United States Patent Application Publication US 2014/0004565 A1 - sequence listing, part 103

SEQ ID NO: 2564912 - RNA, 19 nt, Artificial Sequence
  Description of Artificial Sequence: Synthetic oligonucleotide
cuagcuaguauggucuguu

SEQ ID NO: 2564913 - RNA, 19 nt, Artificial Sequence
  Description of Artificial Sequence: Synthetic oligonucleotide
cagauuugcuggagacuua

SEQ ID NO: 2564914 - RNA, 19 nt, Artificial Sequence
  Description of Artificial Sequence: Synthetic oligonucleotide
ggguaagagcaaauugcaa

SEQ ID NO: 2564915 - RNA, 19 nt, Artificial Sequence
  Description of Artificial Sequence: Synthetic oligonucleotide
ccaggcuggaucuugcagu

SEQ ID NO: 2564916 - RNA, 19 nt, Artificial Sequence
  Description of Artificial Sequence: Synthetic oligonucleotide
gcuuagagguagagacaug

SEQ ID NO: 2564917 - RNA, 19 nt, Artificial Sequence
  Description of Artificial Sequence: Synthetic oligonucleotide
agagagccggcaacagauu

SEQ ID NO: 2564918 - RNA, 19 nt, Artificial Sequence
  Description of Artificial Sequence: Synthetic oligonucleotide
ccuaugcagucuuuaccaa

SEQ ID NO: 2564919 - RNA, 19 nt, Artificial Sequence
  Description of Artificial Sequence: Synthetic oligonucleotide
gcauagggucugcugccuc

SEQ ID NO: 2564920 - RNA, 19 nt, Artificial Sequence
  Description of Artificial Sequence: Synthetic oligonucleotide
ggcacaugaugaauacaua

SEQ ID NO: 2564921 - RNA, 19 nt, Artificial Sequence
  Description of Artificial Sequence: Synthetic oligonucleotide
gugagcuguuguaaauaau

SEQ ID NO: 2564922 - RNA, 19 nt, Artificial Sequence
  Description of Artificial Sequence: Synthetic oligonucleotide
gaauuucauugguguuguu

SEQ ID NO: 2564923 - RNA, 19 nt, Artificial Sequence
  Description of Artificial Sequence: Synthetic oligonucleotide
agaggaccacucaguugaa

SEQ ID NO: 2564924 - RNA, 19 nt, Artificial Sequence
  Description of Artificial Sequence: Synthetic oligonucleotide
cccaagaggaccacucagu

SEQ ID NO: 2564925 - RNA, 19 nt, Artificial Sequence
  Description of Artificial Sequence: Synthetic oligonucleotide
cugccucccuuccauuacu

SEQ ID NO: 2564926 - RNA, 19 nt, Artificial Sequence
  Description of Artificial Sequence: Synthetic oligonucleotide
ggacagaugcugucagcau

SEQ ID NO: 2564927 - RNA, 19 nt, Artificial Sequence
  Description of Artificial Sequence: Synthetic oligonucleotide
cugcugcauggugauuaga

SEQ ID NO: 2564928 - RNA, 19 nt, Artificial Sequence
  Description of Artificial Sequence: Synthetic oligonucleotide
ggcgggucaucagcuuccc

SEQ ID NO: 2564929 - RNA, 19 nt, Artificial Sequence
  Description of Artificial Sequence: Synthetic oligonucleotide
cucuggcaguaggggcaag

SEQ ID NO: 2564930 - RNA, 19 nt, Artificial Sequence
  Description of Artificial Sequence: Synthetic oligonucleotide
cccggugagcuguuguaaa

SEQ ID NO: 2564931 - RNA, 19 nt, Artificial Sequence
  Description of Artificial Sequence: Synthetic oligonucleotide
aggggcaagugggcuugau

SEQ ID NO: 2564932 - RNA, 19 nt, Artificial Sequence
  Description of Artificial Sequence: Synthetic oligonucleotide
gcauggguaagagcaaauu

SEQ ID NO: 2564933 - RNA, 19 nt, Artificial Sequence
  Description of Artificial Sequence: Synthetic oligonucleotide
ccaagaggaccacucaguu

SEQ ID NO: 2564934 - RNA, 19 nt, Artificial Sequence
  Description of Artificial Sequence: Synthetic oligonucleotide
agccggcaacagauuugcu

SEQ ID NO: 2564935 - RNA, 19 nt, Artificial Sequence
  Description of Artificial Sequence: Synthetic oligonucleotide
ucgccccggugagcuguug

SEQ ID NO: 2564936 - RNA, 19 nt, Artificial Sequence
  Description of Artificial Sequence: Synthetic oligonucleotide
cugcuucaggcgggucauc

SEQ ID NO: 2564937 - RNA, 19 nt, Artificial Sequence
  Description of Artificial Sequence: Synthetic oligonucleotide
gccccggugagcuguugua

SEQ ID NO: 2564938 - RNA, 19 nt, Artificial Sequence
  Description of Artificial Sequence: Synthetic oligonucleotide
ccagaagcccugguuugaa

SEQ ID NO: 2564939 - RNA, 19 nt, Artificial Sequence
  Description of Artificial Sequence: Synthetic oligonucleotide
gcgggucaucagcuuccca

SEQ ID NO: 2564940 - RNA, 19 nt, Artificial Sequence
  Description of Artificial Sequence: Synthetic oligonucleotide
ccggugagcuguuguaaau

SEQ ID NO: 2564941 - RNA, 19 nt, Artificial Sequence
  Description of Artificial Sequence: Synthetic oligonucleotide
cggugagcuguuguaaaua

SEQ ID NO: 2564942 - RNA, 19 nt, Artificial Sequence
  Description of Artificial Sequence: Synthetic oligonucleotide
gcauggcuggacagaugcu

SEQ ID NO: 2564943 - RNA, 19 nt, Artificial Sequence
  Description of Artificial Sequence: Synthetic oligonucleotide
ccccggugagcuguuguaa

SEQ ID NO: 2564944 - RNA, 19 nt, Artificial Sequence
  Description of Artificial Sequence: Synthetic oligonucleotide
cucgccccggugagcuguu

SEQ ID NO: 2564945 - RNA, 19 nt, Artificial Sequence
  Description of Artificial Sequence: Synthetic oligonucleotide
cgccccggugagcuguugu

SEQ ID NO: 2564946 - RNA, 19 nt, Artificial Sequence
  Description of Artificial Sequence: Synthetic oligonucleotide
uguuuuaccauccugcagc

SEQ ID NO: 2564947 - RNA, 19 nt, Artificial Sequence
  Description of Artificial Sequence: Synthetic oligonucleotide
uuauguuuuaccauccugc

SEQ ID NO: 2564948 - RNA, 19 nt, Artificial Sequence
  Description of Artificial Sequence: Synthetic oligonucleotide
auacauguucaucaggagc

SEQ ID NO: 2564949 - RNA, 19 nt, Artificial Sequence
  Description of Artificial Sequence: Synthetic oligonucleotide
uacauguucaucaggagcc

SEQ ID NO: 2564950 - RNA, 19 nt, Artificial Sequence
  Description of Artificial Sequence: Synthetic oligonucleotide
cucgguaucagccucaucg

SEQ ID NO: 2564951 - RNA, 19 nt, Artificial Sequence
  Description of Artificial Sequence: Synthetic oligonucleotide
uuuaccauccugcagcgcc

SEQ ID NO: 2564952 - RNA, 19 nt, Artificial Sequence
  Description of Artificial Sequence: Synthetic oligonucleotide
uguucaauucucaaggcac

SEQ ID NO: 2564953 - RNA, 19 nt, Artificial Sequence
  Description of Artificial Sequence: Synthetic oligonucleotide
agaagugcucaucaggaac

SEQ ID NO: 2564954 - RNA, 19 nt, Artificial Sequence
  Description of Artificial Sequence: Synthetic oligonucleotide
accacacacacacacacac

SEQ ID NO: 2564955 - RNA, 19 nt, Artificial Sequence
  Description of Artificial Sequence: Synthetic oligonucleotide
uuuuacucuucucuguccc

SEQ ID NO: 2564956 - RNA, 19 nt, Artificial Sequence
  Description of Artificial Sequence: Synthetic oligonucleotide
agaguuggcuuccuguacc

SEQ ID NO: 2564957 - RNA, 19 nt, Artificial Sequence
  Description of Artificial Sequence: Synthetic oligonucleotide
uacagggagaccauguuca

SEQ ID NO: 2564958 - RNA, 19 nt, Artificial Sequence
  Description of Artificial Sequence: Synthetic oligonucleotide
aaacucuucucuccucugg

SEQ ID NO: 2564959 - RNA, 19 nt, Artificial Sequence
  Description of Artificial Sequence: Synthetic oligonucleotide
uuucccuuauguuuuacca

SEQ ID NO: 2564960 - RNA, 19 nt, Artificial Sequence
  Description of Artificial Sequence: Synthetic oligonucleotide
  modified_base (7)..(7): a, c, u, g, unknown or other
uuccaunuuccccagcugu

SEQ ID NO: 2564961 - RNA, 19 nt, Artificial Sequence
  Description of Artificial Sequence: Synthetic oligonucleotide
uguaccuuggggcuggccc

SEQ ID NO: 2564962 - RNA, 19 nt, Artificial Sequence
  Description of Artificial Sequence: Synthetic oligonucleotide
agcuguguaucucuggguc

SEQ ID NO: 2564963 - RNA, 19 nt, Artificial Sequence
  Description of Artificial Sequence: Synthetic oligonucleotide
uauguuuuaccauccugca

SEQ ID NO: 2564964 - RNA, 19 nt, Artificial Sequence
  Description of Artificial Sequence: Synthetic oligonucleotide
accauguucaauucucaag

SEQ ID NO: 2564965 - RNA, 19 nt, Artificial Sequence
  Description of Artificial Sequence: Synthetic oligonucleotide
guaguuguagcaccugccg

SEQ ID NO: 2564966 - RNA, 19 nt, Artificial Sequence
  Description of Artificial Sequence: Synthetic oligonucleotide
aaugccugccucccgcaac

SEQ ID NO: 2564967 - RNA, 19 nt, Artificial Sequence
  Description of Artificial Sequence: Synthetic oligonucleotide
uaguuguagcaccugccgg

SEQ ID NO: 2564968 - RNA, 19 nt, Artificial Sequence
  Description of Artificial Sequence: Synthetic oligonucleotide
uacuccagggccagaacgg

SEQ ID NO: 2564969 - RNA, 19 nt, Artificial Sequence
  Description of Artificial Sequence: Synthetic oligonucleotide
ucuucucugucccuccuag

SEQ ID NO: 2564970 - RNA, 19 nt, Artificial Sequence
  Description of Artificial Sequence: Synthetic oligonucleotide
ugggccacgaaccaccacc

SEQ ID NO: 2564971 - RNA, 19 nt, Artificial Sequence
  Description of Artificial Sequence: Synthetic oligonucleotide
uuaggagaguaguuguagc

SEQ ID NO: 2564972 - RNA, 19 nt, Artificial Sequence
  Description of Artificial Sequence: Synthetic oligonucleotide
agcaaugccugccucccgc

SEQ ID NO: 2564973 - RNA, 19 nt, Artificial Sequence
  Description of Artificial Sequence: Synthetic oligonucleotide
ccauguucaauucucaagg

SEQ ID NO: 2564974 - RNA, 19 nt, Artificial Sequence
  Description of Artificial Sequence: Synthetic oligonucleotide
cucgagguaguccagcagg

SEQ ID NO: 2564975 - RNA, 19 nt, Artificial Sequence
  Description of Artificial Sequence: Synthetic oligonucleotide
auuaggagaguaguuguag

SEQ ID NO: 2564976 - RNA, 19 nt, Artificial Sequence
  Description of Artificial Sequence: Synthetic oligonucleotide
cuuauguuuuaccauccug

SEQ ID NO: 2564977 - RNA, 19 nt, Artificial Sequence
  Description of Artificial Sequence: Synthetic oligonucleotide
ucucaaggcaccccauuag

SEQ ID NO: 2564978 - RNA, 19 nt, Artificial Sequence
  Description of Artificial Sequence: Synthetic oligonucleotide
aguaguuguagcaccugcc

SEQ ID NO: 2564979 - RNA, 19 nt, Artificial Sequence
  Description of Artificial Sequence: Synthetic oligonucleotide
uaggagaguaguuguagca

SEQ ID NO: 2564980 - RNA, 19 nt, Artificial Sequence
  Description of Artificial Sequence: Synthetic oligonucleotide
cacacacacacacacacac

SEQ ID NO: 2564981 - RNA, 19 nt, Artificial Sequence
  Description of Artificial Sequence: Synthetic oligonucleotide
guacuccagggccagaacg

SEQ ID NO: 2564982 - RNA, 19 nt, Artificial Sequence
  Description of Artificial Sequence: Synthetic oligonucleotide
uucucugucccuccuagac

SEQ ID NO: 2564983 - RNA, 19 nt, Artificial Sequence
  Description of Artificial Sequence: Synthetic oligonucleotide
gaaucuccagcucuccugc

SEQ ID NO: 2564984 - RNA, 19 nt, Artificial Sequence
  Description of Artificial Sequence: Synthetic oligonucleotide
uccaaaacucuucucuccu

SEQ ID NO: 2564985 - RNA, 19 nt, Artificial Sequence
  Description of Artificial Sequence: Synthetic oligonucleotide
aaggcaccccauuaggaga

SEQ ID NO: 2564986 - RNA, 19 nt, Artificial Sequence
  Description of Artificial Sequence: Synthetic oligonucleotide
ucgagguaguccagcaggg

SEQ ID NO: 2564987 - RNA, 19 nt, Artificial Sequence
  Description of Artificial Sequence: Synthetic oligonucleotide
guuuuaccauccugcagcg

SEQ ID NO: 2564988 - RNA, 19 nt, Artificial Sequence
  Description of Artificial Sequence: Synthetic oligonucleotide
uuuccaaaacucuucucuc

SEQ ID NO: 2564989 - RNA, 19 nt, Artificial Sequence
  Description of Artificial Sequence: Synthetic oligonucleotide
cauguucaauucucaaggc

SEQ ID NO: 2564990 - RNA, 19 nt, Artificial Sequence
  Description of Artificial Sequence: Synthetic oligonucleotide
ucaucgagcuccugcauca

SEQ ID NO: 2564991 - RNA, 19 nt, Artificial Sequence
  Description of Artificial Sequence: Synthetic oligonucleotide
acucucgcacgccugggcc

SEQ ID NO: 2564992 - RNA, 19 nt, Artificial Sequence
  Description of Artificial Sequence: Synthetic oligonucleotide
auguucaauucucaaggca

SEQ ID NO: 2564993 - RNA, 19 nt, Artificial Sequence
  Description of Artificial Sequence: Synthetic oligonucleotide
cacacacacacacacgagc

SEQ ID NO: 2564994 - RNA, 19 nt, Artificial Sequence
  Description of Artificial Sequence: Synthetic oligonucleotide
cugggucucgguaucagcc

SEQ ID NO: 2564995 - RNA, 19 nt, Artificial Sequence
  Description of Artificial Sequence: Synthetic oligonucleotide
ucccuuauguuuuaccauc

SEQ ID NO: 2564996 - RNA, 19 nt, Artificial Sequence
  Description of Artificial Sequence: Synthetic oligonucleotide
ucaaggcaccccauuagga

SEQ ID NO: 2564997 - RNA, 19 nt, Artificial Sequence
  Description of Artificial Sequence: Synthetic oligonucleotide
aggagaguaguuguagcac

SEQ ID NO: 2564998 - RNA, 19 nt, Artificial Sequence
  Description of Artificial Sequence: Synthetic oligonucleotide
uuacagggagaccauguuc

SEQ ID NO: 2564999 - RNA, 19 nt, Artificial Sequence
  Description of Artificial Sequence: Synthetic oligonucleotide
uuuuccguucuuucuucag

SEQ ID NO: 2565000 - RNA, 19 nt, Artificial Sequence
  Description of Artificial Sequence: Synthetic oligonucleotide
aguuguagcaccugccgga

SEQ ID NO: 2565001 - RNA, 19 nt, Artificial Sequence
  Description of Artificial Sequence: Synthetic oligonucleotide
gaguaguuguagcaccugc

SEQ ID NO: 2565002 - RNA, 19 nt, Artificial Sequence
  Description of Artificial Sequence: Synthetic oligonucleotide
uccuuuccaaaacucuucu

SEQ ID NO: 2565003 - RNA, 19 nt, Artificial Sequence
  Description of Artificial Sequence: Synthetic oligonucleotide
caaggcaccccauuaggag

SEQ ID NO: 2565004 - RNA, 19 nt, Artificial Sequence
  Description of Artificial Sequence: Synthetic oligonucleotide
  modified_base (6)..(6): a, c, u, g, unknown or other
uccaunuuccccagcugug

SEQ ID NO: 2565005 - RNA, 19 nt, Artificial Sequence
  Description of Artificial Sequence: Synthetic oligonucleotide
cauacauguucaucaggag

SEQ ID NO: 2565006 - RNA, 19 nt, Artificial Sequence
  Description of Artificial Sequence: Synthetic oligonucleotide
cucaaggcaccccauuagg

SEQ ID NO: 2565007 - RNA, 19 nt, Artificial Sequence
  Description of Artificial Sequence: Synthetic oligonucleotide
ucucugucccuccuagacc

SEQ ID NO: 2565008 - RNA, 19 nt, Artificial Sequence
  Description of Artificial Sequence: Synthetic oligonucleotide
auguuuuaccauccugcag

SEQ ID NO: 2565009 - RNA, 19 nt, Artificial Sequence
  Description of Artificial Sequence: Synthetic oligonucleotide
uuccuuuccaaaacucuuc

SEQ ID NO: 2565010 - RNA, 19 nt, Artificial Sequence
  Description of Artificial Sequence: Synthetic oligonucleotide
ggcacuacccuucaguccc

SEQ ID NO: 2565011 - RNA, 19 nt, Artificial Sequence
  Description of Artificial Sequence: Synthetic oligonucleotide
aggaaccuuguccucauca

SEQ ID NO: 2565012 - RNA, 19 nt, Artificial Sequence
  Description of Artificial Sequence: Synthetic oligonucleotide
agggagaccauguucaauu

SEQ ID NO: 2565013 - RNA, 19 nt, Artificial Sequence
  Description of Artificial Sequence: Synthetic oligonucleotide
agagaagugcucaucagga

SEQ ID NO: 2565014 - RNA, 19 nt, Artificial Sequence
  Description of Artificial Sequence: Synthetic oligonucleotide
agaacggcagcugagggcu

SEQ ID NO: 2565015 - RNA, 19 nt, Artificial Sequence
  Description of Artificial Sequence: Synthetic oligonucleotide
ucaguucagaguuggcuuc

SEQ ID NO: 2565016 - RNA, 19 nt, Artificial Sequence
  Description of Artificial Sequence: Synthetic oligonucleotide
ucuggaaucuccagcucuc

SEQ ID NO: 2565017 - RNA, 19 nt, Artificial Sequence
  Description of Artificial Sequence: Synthetic oligonucleotide
gagaccauguucaauucuc

SEQ ID NO: 2565018 - RNA, 19 nt, Artificial Sequence
  Description of Artificial Sequence: Synthetic oligonucleotide
ucugagcugcagcaaugcc

SEQ ID NO: 2565019 - RNA, 19 nt, Artificial Sequence
  Description of Artificial Sequence: Synthetic oligonucleotide
cuucagucccucgagguag

SEQ ID NO: 2565020 - RNA, 19 nt, Artificial Sequence
  Description of Artificial Sequence: Synthetic oligonucleotide
uucagaugcccgcagcguc

SEQ ID NO: 2565021 - RNA, 19 nt, Artificial Sequence
  Description of Artificial Sequence: Synthetic oligonucleotide
cacacacacacacacacga

SEQ ID NO: 2565022 - RNA, 19 nt, Artificial Sequence
  Description of Artificial Sequence: Synthetic oligonucleotide
gcuuccuguaccuuggggc

SEQ ID NO: 2565023 - RNA, 19 nt, Artificial Sequence
  Description of Artificial Sequence: Synthetic oligonucleotide
uucucaaggcaccccauua

SEQ ID NO: 2565024 - RNA, 19 nt, Artificial Sequence
  Description of Artificial Sequence: Synthetic oligonucleotide
cacgccugggccacgaacc

SEQ ID NO: 2565025 - RNA, 19 nt, Artificial Sequence
  Description of Artificial Sequence: Synthetic oligonucleotide
uacccuucagucccucgag

SEQ ID NO: 2565026 - RNA, 19 nt, Artificial Sequence
  Description of Artificial Sequence: Synthetic oligonucleotide
ggagaguaguuguagcacc

SEQ ID NO: 2565027 - RNA, 19 nt, Artificial Sequence
  Description of Artificial Sequence: Synthetic oligonucleotide
gguagagaagugcucauca

SEQ ID NO: 2565028 - RNA, 19 nt, Artificial Sequence
  Description of Artificial Sequence: Synthetic oligonucleotide
ugguguuagcuuuugcuuu

SEQ ID NO: 2565029 - RNA, 19 nt, Artificial Sequence
  Description of Artificial Sequence: Synthetic oligonucleotide
ucaauucucaaggcacccc

SEQ ID NO: 2565030 - RNA, 19 nt, Artificial Sequence
  Description of Artificial Sequence: Synthetic oligonucleotide
uguucaucaggagccacgu

SEQ ID NO: 2565031 - RNA, 19 nt, Artificial Sequence
  Description of Artificial Sequence: Synthetic oligonucleotide
uucccuuauguuuuaccau

SEQ ID NO: 2565032 - RNA, 19 nt, Artificial Sequence
  Description of Artificial Sequence: Synthetic oligonucleotide
ucagaugcccgcagcgucu

SEQ ID NO: 2565033 - RNA, 19 nt, Artificial Sequence
  Description of Artificial Sequence: Synthetic oligonucleotide
acacacacgagcuguuaca

SEQ ID NO: 2565034 - RNA, 19 nt, Artificial Sequence
  Description of Artificial Sequence: Synthetic oligonucleotide
  modified_base (13)..(13): a, c, u, g, unknown or other
gaggcguuccaunuucccc

SEQ ID NO: 2565035 - RNA, 19 nt, Artificial Sequence
  Description of Artificial Sequence: Synthetic oligonucleotide
acacacgagcuguuacagg

SEQ ID NO: 2565036 - RNA, 19 nt, Artificial Sequence
  Description of Artificial Sequence: Synthetic oligonucleotide
aucucugggucucgguauc

SEQ ID NO: 2565037 - RNA, 19 nt, Artificial Sequence
  Description of Artificial Sequence: Synthetic oligonucleotide
ucgguaucagccucaucga

SEQ ID NO: 2565038 - RNA, 19 nt, Artificial Sequence
  Description of Artificial Sequence: Synthetic oligonucleotide
auguucaucaggagccacg

SEQ ID NO: 2565039 - RNA, 19 nt, Artificial Sequence
  Description of Artificial Sequence: Synthetic oligonucleotide
ucugggucucgguaucagc

SEQ ID NO: 2565040 - RNA, 19 nt, Artificial Sequence
  Description of Artificial Sequence: Synthetic oligonucleotide
ugcuuuugggcccacccuu

SEQ ID NO: 2565041 - RNA, 19 nt, Artificial Sequence
  Description of Artificial Sequence: Synthetic oligonucleotide
accgucagcucacgggcac

SEQ ID NO: 2565042 - RNA, 19 nt, Artificial Sequence
  Description of Artificial Sequence: Synthetic oligonucleotide
cacgagcuguuacagggag

SEQ ID NO: 2565043 - RNA, 19 nt, Artificial Sequence
  Description of Artificial Sequence: Synthetic oligonucleotide
aucgagcuccugcaucagg

SEQ ID NO: 2565044 - RNA, 19 nt, Artificial Sequence
  Description of Artificial Sequence: Synthetic oligonucleotide
cagcucacgggcacuaccc

SEQ ID NO: 2565045 - RNA, 19 nt, Artificial Sequence
  Description of Artificial Sequence: Synthetic oligonucleotide
cucaucauacauguucauc

SEQ ID NO: 2565046 - RNA, 19 nt, Artificial Sequence
  Description of Artificial Sequence: Synthetic oligonucleotide
cagcugagggcuuggcugg

SEQ ID NO: 2565047 - RNA, 19 nt, Artificial Sequence
  Description of Artificial Sequence: Synthetic oligonucleotide
uguaucucugggucucggu

SEQ ID NO: 2565048 - RNA, 19 nt, Artificial Sequence
  Description of Artificial Sequence: Synthetic oligonucleotide
acuacccuucagucccucg

SEQ ID NO: 2565049 - RNA, 19 nt, Artificial Sequence
  Description of Artificial Sequence: Synthetic oligonucleotide
acacacacacacgagcugu

SEQ ID NO: 2565050 - RNA, 19 nt, Artificial Sequence
  Description of Artificial Sequence: Synthetic oligonucleotide
uccugcagcgcccacucuc

SEQ ID NO: 2565051 - RNA, 19 nt, Artificial Sequence
  Description of Artificial Sequence: Synthetic oligonucleotide
acgggcacuacccuucagu

SEQ ID NO: 2565052 - RNA, 19 nt, Artificial Sequence
  Description of Artificial Sequence: Synthetic oligonucleotide
gcuucagaugcccgcagcg

SEQ ID NO: 2565053 - RNA, 19 nt, Artificial Sequence
  Description of Artificial Sequence: Synthetic oligonucleotide
caauucucaaggcacccca

SEQ ID NO: 2565054 - RNA, 19 nt, Artificial Sequence
  Description of Artificial Sequence: Synthetic oligonucleotide
guaucagccucaucgagcu

SEQ ID NO: 2565055 - RNA, 19 nt, Artificial Sequence
  Description of Artificial Sequence: Synthetic oligonucleotide
uuguagcaccugccggagg

SEQ ID NO: 2565056 - RNA, 19 nt, Artificial Sequence
  Description of Artificial Sequence: Synthetic oligonucleotide
  modified_base (3)..(3): a, c, u, g, unknown or other
aunuuccccagcuguguau

SEQ ID NO: 2565057 - RNA, 19 nt, Artificial Sequence
  Description of Artificial Sequence: Synthetic oligonucleotide
cacacacacgagcuguuac

SEQ ID NO: 2565058 - RNA, 19 nt, Artificial Sequence
  Description of Artificial Sequence: Synthetic oligonucleotide
uucuggaccgucagcucac

SEQ ID NO: 2565059 - RNA, 19 nt, Artificial Sequence
  Description of Artificial Sequence: Synthetic oligonucleotide
cacacacgagcuguuacag

SEQ ID NO: 2565060 - RNA, 19 nt, Artificial Sequence
  Description of Artificial Sequence: Synthetic oligonucleotide
cuuuugggcccacccuugg

SEQ ID NO: 2565061 - RNA, 19 nt, Artificial Sequence
  Description of Artificial Sequence: Synthetic oligonucleotide
uuuugggcccacccuugga

SEQ ID NO: 2565062 - RNA, 19 nt, Artificial Sequence
  Description of Artificial Sequence: Synthetic oligonucleotide
acacacacacacacgagcu

SEQ ID NO: 2565063 - RNA, 19 nt, Artificial Sequence
  Description of Artificial Sequence: Synthetic oligonucleotide
cagcucuccugcuuuuggg

SEQ ID NO: 2565064 - RNA, 19 nt, Artificial Sequence
  Description of Artificial Sequence: Synthetic oligonucleotide
uguguaucucugggucucg

SEQ ID NO: 2565065 - RNA, 19 nt, Artificial Sequence
  Description of Artificial Sequence: Synthetic oligonucleotide
caccccauuaggagaguag

SEQ ID NO: 2565066 - RNA, 19 nt, Artificial Sequence
  Description of Artificial Sequence: Synthetic oligonucleotide
guaccuuggggcuggcccc

SEQ ID NO: 2565067 - RNA, 19 nt, Artificial Sequence
  Description of Artificial Sequence: Synthetic oligonucleotide
  modified_base (2)..(2): a, c, u, g, unknown or other
unuuccccagcuguguauc

SEQ ID NO: 2565068 - RNA, 19 nt, Artificial Sequence
  Description of Artificial Sequence: Synthetic oligonucleotide
  modified_base (8)..(8): a, c, u, g, unknown or other
guuccaunuuccccagcug

SEQ ID NO: 2565069 - RNA, 19 nt, Artificial Sequence
  Description of Artificial Sequence: Synthetic oligonucleotide
gguaucagccucaucgagc

SEQ ID NO: 2565070 - RNA, 19 nt, Artificial Sequence
  Description of Artificial Sequence: Synthetic oligonucleotide
uuacucuucucugucccuc

SEQ ID NO: 2565071 - RNA, 19 nt, Artificial Sequence
  Description of Artificial Sequence: Synthetic oligonucleotide
uggcugucugagcugcagc

SEQ ID NO: 2565072 - RNA, 19 nt, Artificial Sequence
  Description of Artificial Sequence: Synthetic oligonucleotide
agcgcccacucucgcacgc

SEQ ID NO: 2565073 - RNA, 19 nt, Artificial Sequence
  Description of Artificial Sequence: Synthetic oligonucleotide
acccuucagucccucgagg

SEQ ID NO: 2565074 - RNA, 19 nt, Artificial Sequence
  Description of Artificial Sequence: Synthetic oligonucleotide
gcagcgucucuucugcugg

SEQ ID NO: 2565075 - RNA, 19 nt, Artificial Sequence
  Description of Artificial Sequence: Synthetic oligonucleotide
ugccucgucuucuggaauc

SEQ ID NO: 2565076 - RNA, 19 nt, Artificial Sequence
  Description of Artificial Sequence: Synthetic oligonucleotide
cucaucgagcuccugcauc

SEQ ID NO: 2565077 - RNA, 19 nt, Artificial Sequence
  Description of Artificial Sequence: Synthetic oligonucleotide
ugcugguguuagcuuuugc

SEQ ID NO: 2565078 - RNA, 19 nt, Artificial Sequence
  Description of Artificial Sequence: Synthetic oligonucleotide
aaucuccagcucuccugcu

SEQ ID NO: 2565079 - RNA, 19 nt, Artificial Sequence
  Description of Artificial Sequence: Synthetic oligonucleotide
uccuagaccuuuucccuua

SEQ ID NO: 2565080 - RNA, 19 nt, Artificial Sequence
  Description of Artificial Sequence: Synthetic oligonucleotide
agggccucggccuucugga

SEQ ID NO: 2565081 - RNA, 19 nt, Artificial Sequence
  Description of Artificial Sequence: Synthetic oligonucleotide
ggaccgucagcucacgggc

SEQ ID NO: 2565082 - RNA, 19 nt, Artificial Sequence
  Description of Artificial Sequence: Synthetic oligonucleotide
gaccauguucaauucucaa

SEQ ID NO: 2565083 - RNA, 19 nt, Artificial Sequence
  Description of Artificial Sequence: Synthetic oligonucleotide
uggcccuuggcugucugag

SEQ ID NO: 2565084 - RNA, 19 nt, Artificial Sequence
  Description of Artificial Sequence: Synthetic oligonucleotide
uuggcugucugagcugcag

SEQ ID NO: 2565085 - RNA, 19 nt, Artificial Sequence
  Description of Artificial Sequence: Synthetic oligonucleotide
ugggucucgguaucagccu

SEQ ID NO: 2565086 - RNA, 19 nt, Artificial Sequence
  Description of Artificial Sequence: Synthetic oligonucleotide
acacacacacacacacacg

SEQ ID NO: 2565087 - RNA, 19 nt, Artificial Sequence
  Description of Artificial Sequence: Synthetic oligonucleotide
cagaguuggcuuccuguac

SEQ ID NO: 2565088 - RNA, 19 nt, Artificial Sequence
  Description of Artificial Sequence: Synthetic oligonucleotide
cccuccuagaccuuuuccc

SEQ ID NO: 2565089 - RNA, 19 nt, Artificial Sequence
  Description of Artificial Sequence: Synthetic oligonucleotide
cucuggggucaguucagag

SEQ ID NO: 2565090 - RNA, 19 nt, Artificial Sequence
  Description of Artificial Sequence: Synthetic oligonucleotide
ccuuggagguacuccaggg

SEQ ID NO: 2565091 - RNA, 19 nt, Artificial Sequence
  Description of Artificial Sequence: Synthetic oligonucleotide
gaaccuuguccucaucaua

SEQ ID NO: 2565092 - RNA, 19 nt, Artificial Sequence
  Description of Artificial Sequence: Synthetic oligonucleotide
gagaagugcucaucaggaa

SEQ ID NO: 2565093 - RNA, 19 nt, Artificial Sequence
  Description of Artificial Sequence: Synthetic oligonucleotide
guuguagcaccugccggag

SEQ ID NO: 2565094 - RNA, 19 nt, Artificial Sequence
  Description of Artificial Sequence: Synthetic oligonucleotide
cacacacacacacgagcug

SEQ ID NO: 2565095 - RNA, 19 nt, Artificial Sequence
  Description of Artificial Sequence: Synthetic oligonucleotide
uggcuuccuguaccuuggg

SEQ ID NO: 2565096 - RNA, 19 nt, Artificial Sequence
  Description of Artificial Sequence: Synthetic oligonucleotide
cugcaucagggccucggcc

SEQ ID NO: 2565097 - RNA, 19 nt, Artificial Sequence
  Description of Artificial Sequence: Synthetic oligonucleotide
auucucaaggcaccccauu

SEQ ID NO: 2565098 - RNA, 19 nt, Artificial Sequence
  Description of Artificial Sequence: Synthetic oligonucleotide
agaguaguuguagcaccug

SEQ ID NO: 2565099 - RNA, 19 nt, Artificial Sequence
  Description of Artificial Sequence: Synthetic oligonucleotide
guaucucugggucucggua

SEQ ID NO: 2565100 - RNA, 19 nt, Artificial Sequence
  Description of Artificial Sequence: Synthetic oligonucleotide
cccauuaggagaguaguug

SEQ ID NO: 2565101 - RNA, 19 nt, Artificial Sequence
  Description of Artificial Sequence: Synthetic oligonucleotide
cccuuauguuuuaccaucc

SEQ ID NO: 2565102 - RNA, 19 nt, Artificial Sequence
  Description of Artificial Sequence: Synthetic oligonucleotide
cuguguaucucugggucuc

SEQ ID NO: 2565103 - RNA, 19 nt, Artificial Sequence
  Description of Artificial Sequence: Synthetic oligonucleotide
uuuuaccauccugcagcgc

SEQ ID NO: 2565104 - RNA, 19 nt, Artificial Sequence
  Description of Artificial Sequence: Synthetic oligonucleotide
ucagccucaucgagcuccu

SEQ ID NO: 2565105 - RNA, 19 nt, Artificial Sequence
  Description of Artificial Sequence: Synthetic oligonucleotide
cuuuuccguucuuucuuca

SEQ ID NO: 2565106 - RNA, 19 nt, Artificial Sequence
  Description of Artificial Sequence: Synthetic oligonucleotide
caaaacucuucucuccucu

SEQ ID NO: 2565107 - RNA, 19 nt, Artificial Sequence
  Description of Artificial Sequence: Synthetic oligonucleotide
ccaccacacacacacacac

SEQ ID NO: 2565108 - RNA, 19 nt, Artificial Sequence
  Description of Artificial Sequence: Synthetic oligonucleotide
cucugucccuccuagaccu

SEQ ID NO: 2565109 - RNA, 19 nt, Artificial Sequence
  Description of Artificial Sequence: Synthetic oligonucleotide
aacggcagcugagggcuug

SEQ ID NO: 2565110 - RNA, 19 nt, Artificial Sequence
  Description of Artificial Sequence: Synthetic oligonucleotide
cuacccuucagucccucga

SEQ ID NO: 2565111 - RNA, 19 nt, Artificial Sequence
  Description of Artificial Sequence: Synthetic oligonucleotide
aggcaccccauuaggagag

SEQ ID NO: 2565112 - RNA, 19 nt, Artificial Sequence
  Description of Artificial Sequence: Synthetic oligonucleotide
agaccauguucaauucuca

SEQ ID NO: 2565113 - RNA, 19 nt, Artificial Sequence
  Description of Artificial Sequence: Synthetic oligonucleotide
ugagggcuuggcuggcaga

SEQ ID NO: 2565114 - RNA, 19 nt, Artificial Sequence
  Description of Artificial Sequence: Synthetic oligonucleotide
ccugcuuuugggcccaccc

SEQ ID NO: 2565115 - RNA, 19 nt, Artificial Sequence
  Description of Artificial Sequence: Synthetic oligonucleotide
cauuaggagaguaguugua

SEQ ID NO: 2565116 - RNA, 19 nt, Artificial Sequence
  Description of Artificial Sequence: Synthetic oligonucleotide
caguucagaguuggcuucc

SEQ ID NO: 2565117 - RNA, 19 nt, Artificial Sequence
  Description of Artificial Sequence: Synthetic oligonucleotide
caucaggagccacgucugc

SEQ ID NO: 2565118 - RNA, 19 nt, Artificial Sequence
  Description of Artificial Sequence: Synthetic oligonucleotide
acacacacacacacacgag

SEQ ID NO: 2565119 - RNA, 19 nt, Artificial Sequence
  Description of Artificial Sequence: Synthetic oligonucleotide
ugcagcgcccacucucgca

SEQ ID NO: 2565120 - RNA, 19 nt, Artificial Sequence
  Description of Artificial Sequence: Synthetic oligonucleotide
ugggcccacccuuggaggu

SEQ ID NO: 2565121 - RNA, 19 nt, Artificial Sequence
  Description of Artificial Sequence: Synthetic oligonucleotide
ucuggaccgucagcucacg

SEQ ID NO: 2565122 - RNA, 19 nt, Artificial Sequence
  Description of Artificial Sequence: Synthetic oligonucleotide
uccguucuuucuucaguuu

SEQ ID NO: 2565123 - RNA, 19 nt, Artificial Sequence
  Description of Artificial Sequence: Synthetic oligonucleotide
ggcuuccuguaccuugggg

SEQ ID NO: 2565124 - RNA, 19 nt, Artificial Sequence
  Description of Artificial Sequence: Synthetic oligonucleotide
gucaguucagaguuggcuu

SEQ ID NO: 2565125 - RNA, 19 nt, Artificial Sequence
  Description of Artificial Sequence: Synthetic oligonucleotide
cuuuucccuuauguuuuac

SEQ ID NO: 2565126 - RNA, 19 nt, Artificial Sequence
  Description of Artificial Sequence: Synthetic oligonucleotide
  modified_base (18)..(18): a, c, u, g, unknown or other
ugccggaggcguuccaunu

SEQ ID NO: 2565127 - RNA, 19 nt, Artificial Sequence
  Description of Artificial Sequence: Synthetic oligonucleotide
cauguucaucaggagccac

SEQ ID NO: 2565128 - RNA, 19 nt, Artificial Sequence
  Description of Artificial Sequence: Synthetic oligonucleotide
uggccuggcuucagaugcc

SEQ ID NO: 2565129 - RNA, 19 nt, Artificial Sequence
  Description of Artificial Sequence: Synthetic oligonucleotide
aggguagagaagugcucau

SEQ ID NO: 2565130 - RNA, 19 nt, Artificial Sequence
  Description of Artificial Sequence: Synthetic oligonucleotide
cuuccuguaccuuggggcu

SEQ ID NO: 2565131 - RNA, 19 nt, Artificial Sequence
  Description of Artificial Sequence: Synthetic oligonucleotide
guguaucucugggucucgg

SEQ ID NO: 2565132 - RNA, 19 nt, Artificial Sequence
  Description of Artificial Sequence: Synthetic oligonucleotide
cuggaaucuccagcucucc

SEQ ID NO: 2565133 - RNA, 19 nt, Artificial Sequence
  Description of Artificial Sequence: Synthetic oligonucleotide
cuagaccuuuucccuuaug

SEQ ID NO: 2565134 - RNA, 19 nt, Artificial Sequence
  Description of Artificial Sequence: Synthetic oligonucleotide
acgucugccucgucuucug

SEQ ID NO: 2565135 - RNA, 19 nt, Artificial Sequence
  Description of Artificial Sequence: Synthetic oligonucleotide
cacucucgcacgccugggc

SEQ ID NO: 2565136 - RNA, 19 nt, Artificial Sequence
  Description of Artificial Sequence: Synthetic oligonucleotide
cuggaccgucagcucacgg

SEQ ID NO: 2565137 - RNA, 19 nt, Artificial Sequence
  Description of Artificial Sequence: Synthetic oligonucleotide
gucugccucgucuucugga

SEQ ID NO: 2565138 - RNA, 19 nt, Artificial Sequence
  Description of Artificial Sequence: Synthetic oligonucleotide
acagggagaccauguucaa

SEQ ID NO: 2565139 - RNA, 19 nt, Artificial Sequence
  Description of Artificial Sequence: Synthetic oligonucleotide
gagaguaguuguagcaccu

SEQ ID NO: 2565140 - RNA, 19 nt, Artificial Sequence
  Description of Artificial Sequence: Synthetic oligonucleotide
  modified_base (4)..(4): a, c, u, g, unknown or other
caunuuccccagcugugua

SEQ ID NO: 2565141 - RNA, 19 nt, Artificial Sequence
  Description of Artificial Sequence: Synthetic oligonucleotide
ucccucgagguaguccagc

SEQ ID NO: 2565142 - RNA, 19 nt, Artificial Sequence
  Description of Artificial Sequence: Synthetic oligonucleotide
ggcugucugagcugcagca

SEQ ID NO: 2565143 - RNA, 19 nt, Artificial Sequence
  Description of Artificial Sequence: Synthetic oligonucleotide
guagcaccugccggaggcg

SEQ ID NO: 2565144 - RNA, 19 nt, Artificial Sequence
  Description of Artificial Sequence: Synthetic oligonucleotide
gccagaacggcagcugagg

SEQ ID NO: 2565145 - RNA, 19 nt, Artificial Sequence
  Description of Artificial Sequence: Synthetic oligonucleotide
ucucugggucucgguauca

SEQ ID NO: 2565146 - RNA, 19 nt, Artificial Sequence
  Description of Artificial Sequence: Synthetic oligonucleotide
cuguuacagggagaccaug

SEQ ID NO: 2565147 - RNA, 19 nt, Artificial Sequence
  Description of Artificial Sequence: Synthetic oligonucleotide
cagucccucgagguagucc

SEQ ID NO: 2565148 - RNA, 19 nt, Artificial Sequence
  Description of Artificial Sequence: Synthetic oligonucleotide
cuggggucaguucagaguu

SEQ ID NO: 2565149 - RNA, 19 nt, Artificial Sequence
  Description of Artificial Sequence: Synthetic oligonucleotide
ccugcagcgcccacucucg

SEQ ID NO: 2565150 - RNA, 19 nt, Artificial Sequence
  Description of Artificial Sequence: Synthetic oligonucleotide
acacacacacacacacaca

SEQ ID NO: 2565151 - RNA, 19 nt, Artificial Sequence
  Description of Artificial Sequence: Synthetic oligonucleotide
agguacuccagggccagaa

SEQ ID NO: 2565152 - RNA, 19 nt, Artificial Sequence
  Description of Artificial Sequence: Synthetic oligonucleotide
ugucccuccuagaccuuuu

SEQ ID NO: 2565153 - RNA, 19 nt, Artificial Sequence
  Description of Artificial Sequence: Synthetic oligonucleotide
ccagcucuccugcuuuugg

SEQ ID NO: 2565154 - RNA, 19 nt, Artificial Sequence
  Description of Artificial Sequence: Synthetic oligonucleotide
gaguuggcuuccuguaccu

SEQ ID NO: 2565155 - RNA, 19 nt, Artificial Sequence
  Description of Artificial Sequence: Synthetic oligonucleotide
  modified_base (16)..(16): a, c, u, g, unknown or other
ccggaggcguuccaunuuc

SEQ ID NO: 2565156 - RNA, 19 nt, Artificial Sequence
  Description of Artificial Sequence: Synthetic oligonucleotide
cagcaaugccugccucccg

SEQ ID NO: 2565157 - RNA, 19 nt, Artificial Sequence
  Description of Artificial Sequence: Synthetic oligonucleotide
gggagaccauguucaauuc

SEQ ID NO: 2565158 - RNA, 19 nt, Artificial Sequence
  Description of Artificial Sequence: Synthetic oligonucleotide
aguucagaguuggcuuccu

SEQ ID NO: 2565159 - RNA, 19 nt, Artificial Sequence
  Description of Artificial Sequence: Synthetic oligonucleotide
guuacagggagaccauguu

SEQ ID NO: 2565160 - RNA, 19 nt, Artificial Sequence
  Description of Artificial Sequence: Synthetic oligonucleotide
ucucgcacgccugggccac

SEQ ID NO: 2565161 - RNA, 19 nt, Artificial Sequence
  Description of Artificial Sequence: Synthetic oligonucleotide
  modified_base (11)..(11): a, c, u, g, unknown or other
ggcguuccaunuuccccag

SEQ ID NO: 2565162 - RNA, 19 nt, Artificial Sequence
  Description of Artificial Sequence: Synthetic oligonucleotide
cccuuggagguacuccagg

SEQ ID NO: 2565163 - RNA, 19 nt, Artificial Sequence
  Description of Artificial Sequence: Synthetic oligonucleotide
ccccaccacacacacacac

SEQ ID NO: 2565164 - RNA, 19 nt, Artificial Sequence
  Description of Artificial Sequence: Synthetic oligonucleotide
caccacacacacacacaca

SEQ ID NO: 2565165 - RNA, 19 nt, Artificial Sequence
  Description of Artificial Sequence: Synthetic oligonucleotide
gagcuguuacagggagacc

SEQ ID NO: 2565166 - RNA, 19 nt, Artificial Sequence
  Description of Artificial Sequence: Synthetic oligonucleotide
ccaaaacucuucucuccuc

SEQ ID NO: 2565167 - RNA, 19 nt, Artificial Sequence
  Description of Artificial Sequence: Synthetic oligonucleotide
gccucaucgagcuccugca

SEQ ID NO: 2565168 - RNA, 19 nt, Artificial Sequence
  Description of Artificial Sequence: Synthetic oligonucleotide
uaccauccugcagcgccca

SEQ ID NO: 2565169 - RNA, 19 nt, Artificial Sequence
  Description of Artificial Sequence: Synthetic oligonucleotide
acacgagcuguuacaggga

SEQ ID NO: 2565170 - RNA, 19 nt, Artificial Sequence
  Description of Artificial Sequence: Synthetic oligonucleotide
uagcaccugccggaggcgu

SEQ ID NO: 2565171 - RNA, 19 nt, Artificial Sequence
  Description of Artificial Sequence: Synthetic oligonucleotide
agucuggcccuuggcuguc

SEQ ID NO: 2565172 - RNA, 19 nt, Artificial Sequence
  Description of Artificial Sequence: Synthetic oligonucleotide
guaguccagcaggguagag

SEQ ID NO: 2565173 - RNA, 19 nt, Artificial Sequence
  Description of Artificial Sequence: Synthetic oligonucleotide
cuucucugucccuccuaga

SEQ ID NO: 2565174 - RNA, 19 nt, Artificial Sequence
  Description of Artificial Sequence: Synthetic oligonucleotide
acccuuggagguacuccag

SEQ ID NO: 2565175 - RNA, 19 nt, Artificial Sequence
  Description of Artificial Sequence: Synthetic oligonucleotide
ugccugccucccgcaaccg

SEQ ID NO: 2565176 - RNA, 19 nt, Artificial Sequence
  Description of Artificial Sequence: Synthetic oligonucleotide
ggagaccauguucaauucu

SEQ ID NO: 2565177 - RNA, 19 nt, Artificial Sequence
  Description of Artificial Sequence: Synthetic oligonucleotide
caucgagcuccugcaucag

SEQ ID NO: 2565178 - RNA, 19 nt, Artificial Sequence
  Description of Artificial Sequence: Synthetic oligonucleotide
cucucgcacgccugggcca

SEQ ID NO: 2565179 - RNA, 19 nt, Artificial Sequence
  Description of Artificial Sequence: Synthetic oligonucleotide
cagcgcccacucucgcacg

SEQ ID NO: 2565180 - RNA, 19 nt, Artificial Sequence
  Description of Artificial Sequence: Synthetic oligonucleotide
cuggcuucagaugcccgca

SEQ ID NO: 2565181 - RNA, 19 nt, Artificial Sequence
  Description of Artificial Sequence: Synthetic oligonucleotide
uucucuccucuggggucag

SEQ ID NO: 2565182 - RNA, 19 nt, Artificial Sequence
  Description of Artificial Sequence: Synthetic oligonucleotide
cccacucucgcacgccugg

SEQ ID NO: 2565183 - RNA, 19 nt, Artificial Sequence
  Description of Artificial Sequence: Synthetic oligonucleotide
ccauuaggagaguaguugu

SEQ ID NO: 2565184 - RNA, 19 nt, Artificial Sequence
  Description of Artificial Sequence: Synthetic oligonucleotide
cugcagcaaugccugccuc

SEQ ID NO: 2565185 - RNA, 19 nt, Artificial Sequence
  Description of Artificial Sequence: Synthetic oligonucleotide
acggcagcugagggcuugg

SEQ ID NO: 2565186 - RNA, 19 nt, Artificial Sequence
  Description of Artificial Sequence: Synthetic oligonucleotide
uccugcuuuugggcccacc

SEQ ID NO: 2565187 - RNA, 19 nt, Artificial Sequence
  Description of Artificial Sequence: Synthetic oligonucleotide
gggucucgguaucagccuc

SEQ ID NO: 2565188 - RNA, 19 nt, Artificial Sequence
  Description of Artificial Sequence: Synthetic oligonucleotide
ucugucccuccuagaccuu

SEQ ID NO: 2565189 - RNA, 19 nt, Artificial Sequence
  Description of Artificial Sequence: Synthetic oligonucleotide
gcuuuugggcccacccuug

SEQ ID NO: 2565190 - RNA, 19 nt, Artificial Sequence
  Description of Artificial Sequence: Synthetic oligonucleotide
uucccuggccuggcuucag

SEQ ID NO: 2565191 - RNA, 19 nt, Artificial Sequence
  Description of Artificial Sequence: Synthetic oligonucleotide
acacacacacgagcuguua

SEQ ID NO: 2565192 - RNA, 19 nt, Artificial Sequence
  Description of Artificial Sequence: Synthetic oligonucleotide
acgagcuguuacagggaga

SEQ ID NO: 2565193 - RNA, 19 nt, Artificial Sequence
  Description of Artificial Sequence: Synthetic oligonucleotide
ccacccuuggagguacucc

SEQ ID NO: 2565194 - RNA, 19 nt, Artificial Sequence
  Description of Artificial Sequence: Synthetic oligonucleotide
ggaaccuuguccucaucau

SEQ ID NO: 2565195 - RNA, 19 nt, Artificial Sequence
  Description of Artificial Sequence: Synthetic oligonucleotide
cugcagcgcccacucucgc

SEQ ID NO: 2565196 - RNA, 19 nt, Artificial Sequence
  Description of Artificial Sequence: Synthetic oligonucleotide
ccuggccuggcuucagaug

SEQ ID NO: 2565197 - RNA, 19 nt, Artificial Sequence
  Description of Artificial Sequence: Synthetic oligonucleotide
gguguuagcuuuugcuuuu

SEQ ID NO: 2565198 - RNA, 19 nt, Artificial Sequence
  Description of Artificial Sequence: Synthetic oligonucleotide
ggguagagaagugcucauc

SEQ ID NO: 2565199 - RNA, 19 nt, Artificial Sequence
  Description of Artificial Sequence: Synthetic oligonucleotide
cuguaccuuggggcuggcc

SEQ ID NO: 2565200 - RNA, 19 nt, Artificial Sequence
  Description of Artificial Sequence: Synthetic oligonucleotide
gaccgucagcucacgggca

SEQ ID NO: 2565201 - RNA, 19 nt, Artificial Sequence
  Description of Artificial Sequence: Synthetic oligonucleotide
ggccagaacggcagcugag

SEQ ID NO: 2565202 - RNA, 19 nt, Artificial Sequence
  Description of Artificial Sequence: Synthetic oligonucleotide
  modified_base (10)..(10): a, c, u, g, unknown or other
gcguuccaunuuccccagc

SEQ ID NO: 2565203 - RNA, 19 nt, Artificial Sequence
  Description of Artificial Sequence: Synthetic oligonucleotide
cacgggcacuacccuucag

SEQ ID NO: 2565204 - RNA, 19 nt, Artificial Sequence
  Description of Artificial Sequence: Synthetic oligonucleotide
ucagucccucgagguaguc

SEQ ID NO: 2565205 - RNA, 19 nt, Artificial Sequence
  Description of Artificial Sequence: Synthetic oligonucleotide
cuuggcugucugagcugca

SEQ ID NO: 2565206 - RNA, 19 nt, Artificial Sequence
  Description of Artificial Sequence: Synthetic oligonucleotide
gggccagaacggcagcuga

SEQ ID NO: 2565207 - RNA, 19 nt, Artificial Sequence
  Description of Artificial Sequence: Synthetic oligonucleotide
agaugcccgcagcgucucu

SEQ ID NO: 2565208 - RNA, 19 nt, Artificial Sequence
  Description of Artificial Sequence: Synthetic oligonucleotide
gguaguccagcaggguaga

SEQ ID NO: 2565209 - RNA, 19 nt, Artificial Sequence
  Description of Artificial Sequence: Synthetic oligonucleotide
cgguaucagccucaucgag

SEQ ID NO: 2565210 - RNA, 19 nt, Artificial Sequence
  Description of Artificial Sequence: Synthetic oligonucleotide
aguuggcuuccuguaccuu

SEQ ID NO: 2565211 - RNA, 19 nt, Artificial Sequence
  Description of Artificial Sequence: Synthetic oligonucleotide
ggcccuuggcugucugagc

SEQ ID NO: 2565212 - RNA, 19 nt, Artificial Sequence
  Description of Artificial Sequence: Synthetic oligonucleotide
gcacgccugggccacgaac

SEQ ID NO: 2565213 - RNA, 19 nt, Artificial Sequence
  Description of Artificial Sequence: Synthetic oligonucleotide
cgggcacuacccuucaguc

SEQ ID NO: 2565214 - RNA, 19 nt, Artificial Sequence
  Description of Artificial Sequence: Synthetic oligonucleotide
cugcuuuugggcccacccu

SEQ ID NO: 2565215 - RNA, 19 nt, Artificial Sequence
  Description of Artificial Sequence: Synthetic oligonucleotide
cagaugcccgcagcgucuc

SEQ ID NO: 2565216 - RNA, 19 nt, Artificial Sequence
  Description of Artificial Sequence: Synthetic oligonucleotide
cgagcuccugcaucagggc

SEQ ID NO: 2565217 - RNA, 19 nt, Artificial Sequence
  Description of Artificial Sequence: Synthetic oligonucleotide
cuucagaugcccgcagcgu

SEQ ID NO: 2565218 - RNA, 19 nt, Artificial Sequence
  Description of Artificial Sequence: Synthetic oligonucleotide
cagcuguguaucucugggu

SEQ ID NO: 2565219 - RNA, 19 nt, Artificial Sequence
  Description of Artificial Sequence: Synthetic oligonucleotide
cuggcccuuggcugucuga

SEQ ID NO: 2565220 - RNA, 19 nt, Artificial Sequence
  Description of Artificial Sequence: Synthetic oligonucleotide
ucgcacgccugggccacga

SEQ ID NO: 2565221 - RNA, 19 nt, Artificial Sequence
  Description of Artificial Sequence: Synthetic oligonucleotide
gucagcucacgggcacuac

SEQ ID NO: 2565222 - RNA, 19 nt, Artificial Sequence
  Description of Artificial Sequence: Synthetic oligonucleotide
gucccucgagguaguccag

SEQ ID NO: 2565223 - RNA, 19 nt, Artificial Sequence
  Description of Artificial Sequence: Synthetic oligonucleotide
gcugcagcaaugccugccu

SEQ ID NO: 2565224 - RNA, 19 nt, Artificial Sequence
  Description of Artificial Sequence: Synthetic oligonucleotide
agggcuuggcuggcagagu

SEQ ID NO: 2565225 - RNA, 19 nt, Artificial Sequence
  Description of Artificial Sequence: Synthetic oligonucleotide
ccuccuagaccuuuucccu

SEQ ID NO: 2565226 - RNA, 19 nt, Artificial Sequence
  Description of Artificial Sequence: Synthetic oligonucleotide
gcaaugccugccucccgca

SEQ ID NO: 2565227 - RNA, 19 nt, Artificial Sequence
  Description of Artificial Sequence: Synthetic oligonucleotide
cgcagcgucucuucugcug

SEQ ID NO: 2565228 - RNA, 19 nt, Artificial Sequence
  Description of Artificial Sequence: Synthetic oligonucleotide
caaugccugccucccgcaa

SEQ ID NO: 2565229 - RNA, 19 nt, Artificial Sequence
  Description of Artificial Sequence: Synthetic oligonucleotide
ccacacacacacacacaca

SEQ ID NO: 2565230 - RNA, 19 nt, Artificial Sequence
  Description of Artificial Sequence: Synthetic oligonucleotide
gcccgcagcgucucuucug

SEQ ID NO: 2565231 - RNA, 19 nt, Artificial Sequence
  Description of Artificial Sequence: Synthetic oligonucleotide
ggucucgguaucagccuca

SEQ ID NO: 2565232 - RNA, 19 nt, Artificial Sequence
  Description of Artificial Sequence: Synthetic oligonucleotide
cuccuagaccuuuucccuu

SEQ ID NO: 2565233 - RNA, 19 nt, Artificial Sequence
  Description of Artificial Sequence: Synthetic oligonucleotide
  modified_base (9)..(9): a, c, u, g, unknown or other
cguuccaunuuccccagcu

SEQ ID NO: 2565234 - RNA, 19 nt, Artificial Sequence
  Description of Artificial Sequence: Synthetic oligonucleotide
cccaccacacacacacaca

SEQ ID NO: 2565235 - RNA, 19 nt, Artificial Sequence
  Description of Artificial Sequence: Synthetic oligonucleotide
cacuacccuucagucccuc

SEQ ID NO: 2565236 - RNA, 19 nt, Artificial Sequence
  Description of Artificial Sequence: Synthetic oligonucleotide
gggucaguucagaguuggc

SEQ ID NO: 2565237 - RNA, 19 nt, Artificial Sequence
  Description of Artificial Sequence: Synthetic oligonucleotide
cuucccuggccuggcuuca

SEQ ID NO: 2565238 - RNA, 19 nt, Artificial Sequence
  Description of Artificial Sequence: Synthetic oligonucleotide
gggccacgaaccaccacca

SEQ ID NO: 2565239 - RNA, 19 nt, Artificial Sequence
  Description of Artificial Sequence: Synthetic oligonucleotide
gaugcccgcagcgucucuu

SEQ ID NO: 2565240 - RNA, 19 nt, Artificial Sequence
  Description of Artificial Sequence: Synthetic oligonucleotide
ggccacgaaccaccaccac

SEQ ID NO: 2565241 - RNA, 19 nt, Artificial Sequence
  Description of Artificial Sequence: Synthetic oligonucleotide
ccccagcuguguaucucug

SEQ ID NO: 2565242 - RNA, 19 nt, Artificial Sequence
  Description of Artificial Sequence: Synthetic oligonucleotide
ccuuauguuuuaccauccu

SEQ ID NO: 2565243 - RNA, 19 nt, Artificial Sequence
  Description of Artificial Sequence: Synthetic oligonucleotide
ggcccacccuuggagguac

SEQ ID NO: 2565244 - RNA, 19 nt, Artificial Sequence
  Description of Artificial Sequence: Synthetic oligonucleotide
gcugucugagcugcagcaa

SEQ ID NO: 2565245 - RNA, 19 nt, Artificial Sequence
  Description of Artificial Sequence: Synthetic oligonucleotide
cucggccuucuggaccguc

SEQ ID NO: 2565246 - RNA, 19 nt, Artificial Sequence
  Description of Artificial Sequence: Synthetic oligonucleotide
cacgucugccucgucuucu

SEQ ID NO: 2565247 - RNA, 19 nt, Artificial Sequence
  Description of Artificial Sequence: Synthetic oligonucleotide
cucgcacgccugggccacg

SEQ ID NO: 2565248 - RNA, 19 nt, Artificial Sequence
  Description of Artificial Sequence: Synthetic oligonucleotide
ccacucucgcacgccuggg

SEQ ID NO: 2565249 - RNA, 19 nt, Artificial Sequence
  Description of Artificial Sequence: Synthetic oligonucleotide
gcgucucuucugcuggugu

SEQ ID NO: 2565250 - RNA, 19 nt, Artificial Sequence
  Description of Artificial Sequence: Synthetic oligonucleotide
cggccuucuggaccgucag

SEQ ID NO: 2565251 - RNA, 19 nt, Artificial Sequence
  Description of Artificial Sequence: Synthetic oligonucleotide
agcaccugccggaggcguu

SEQ ID NO: 2565252 - RNA, 19 nt, Artificial Sequence
  Description of Artificial Sequence: Synthetic oligonucleotide
  modified_base (5)..(5): a, c, u, g, unknown or other
ccaunuuccccagcugugu

SEQ ID NO: 2565253 - RNA, 19 nt, Artificial Sequence
  Description of Artificial Sequence: Synthetic oligonucleotide
ccacgucugccucgucuuc

SEQ ID NO: 2565254 - RNA, 19 nt, Artificial Sequence
  Description of Artificial Sequence: Synthetic oligonucleotide
gagccacgucugccucguc

SEQ ID NO: 2565255 - RNA, 19 nt, Artificial Sequence
  Description of Artificial Sequence: Synthetic oligonucleotide
cagggagaccauguucaau

SEQ ID NO: 2565256 - RNA, 19 nt, Artificial Sequence
  Description of Artificial Sequence: Synthetic oligonucleotide
cugccucgucuucuggaau

SEQ ID NO: 2565257 - RNA, 19 nt, Artificial Sequence
  Description of Artificial Sequence: Synthetic oligonucleotide
gcuguuacagggagaccau

SEQ ID NO: 2565258 - RNA, 19 nt, Artificial Sequence
  Description of Artificial Sequence: Synthetic oligonucleotide
gccacgucugccucgucuu

SEQ ID NO: 2565259 - RNA, 19 nt, Artificial Sequence
  Description of Artificial Sequence: Synthetic oligonucleotide
ggagccacgucugccucgu

SEQ ID NO: 2565260 - RNA, 19 nt, Artificial Sequence
  Description of Artificial Sequence: Synthetic oligonucleotide
cagggccagaacggcagcu

SEQ ID NO: 2565261 - RNA, 19 nt, Artificial Sequence
  Description of Artificial Sequence: Synthetic oligonucleotide
cagcgucucuucugcuggu

SEQ ID NO: 2565262 - RNA, 19 nt, Artificial Sequence
  Description of Artificial Sequence: Synthetic oligonucleotide
gucucgguaucagccucau

SEQ ID NO: 2565263 - RNA, 19 nt, Artificial Sequence
  Description of Artificial Sequence: Synthetic oligonucleotide
gcccacucucgcacgccug

SEQ ID NO: 2565264 - RNA, 19 nt, Artificial Sequence
  Description of Artificial Sequence: Synthetic oligonucleotide
cagccucaucgagcuccug

SEQ ID NO: 2565265 - RNA, 19 nt, Artificial Sequence
  Description of Artificial Sequence: Synthetic oligonucleotide
gcaccccauuaggagagua

SEQ ID NO: 2565266 - RNA, 19 nt, Artificial Sequence
  Description of Artificial Sequence: Synthetic oligonucleotide
gcugagggcuuggcuggca

SEQ ID NO: 2565267 - RNA, 19 nt, Artificial Sequence
  Description of Artificial Sequence: Synthetic oligonucleotide
ccucgucuucuggaaucuc

SEQ ID NO: 2565268 - RNA, 19 nt, Artificial Sequence
  Description of Artificial Sequence: Synthetic oligonucleotide
gcucacgggcacuacccuu

SEQ ID NO: 2565269 - RNA, 19 nt, Artificial Sequence
  Description of Artificial Sequence: Synthetic oligonucleotide
gccucgucuucuggaaucu

SEQ ID NO: 2565270 - RNA, 19 nt, Artificial Sequence
  Description of Artificial Sequence: Synthetic oligonucleotide
cccacccuuggagguacuc

SEQ ID NO: 2565271 - RNA, 19 nt, Artificial Sequence
  Description of Artificial Sequence: Synthetic oligonucleotide
cugucccuccuagaccuuu

SEQ ID NO: 2565272 - RNA, 19 nt, Artificial Sequence
  Description of Artificial Sequence: Synthetic oligonucleotide
gcgcccacucucgcacgcc

SEQ ID NO: 2565273 - RNA, 19 nt, Artificial Sequence
  Description of Artificial Sequence: Synthetic oligonucleotide
  modified_base (17)..(17): a, c, u, g, unknown or other
gccggaggcguuccaunuu

SEQ ID NO: 2565274 - RNA, 19 nt, Artificial Sequence
  Description of Artificial Sequence: Synthetic oligonucleotide
gaacggcagcugagggcuu

SEQ ID NO: 2565275 - RNA, 19 nt, Artificial Sequence
  Description of Artificial Sequence: Synthetic oligonucleotide
ccuagaccuuuucccuuau

SEQ ID NO: 2565276 - RNA, 19 nt, Artificial Sequence
  Description of Artificial Sequence: Synthetic oligonucleotide
ccauccugcagcgcccacu

SEQ ID NO: 2565277 - RNA, 19 nt, Artificial Sequence
  Description of Artificial Sequence: Synthetic oligonucleotide
gggcccacccuuggaggua

SEQ ID NO: 2565278 - RNA, 19 nt, Artificial Sequence
  Description of Artificial Sequence: Synthetic oligonucleotide
ccucaucgagcuccugcau

SEQ ID NO: 2565279 - RNA, 19 nt, Artificial Sequence
  Description of Artificial Sequence: Synthetic oligonucleotide
gcacuacccuucagucccu

SEQ ID NO: 2565280 - RNA, 19 nt, Artificial Sequence
  Description of Artificial Sequence: Synthetic oligonucleotide
ggcaccccauuaggagagu

SEQ ID NO: 2565281 - RNA, 19 nt, Artificial Sequence
  Description of Artificial Sequence: Synthetic oligonucleotide
cgucagcucacgggcacua

SEQ ID NO: 2565282 - RNA, 19 nt, Artificial Sequence
  Description of Artificial Sequence: Synthetic oligonucleotide
gccucccgcaaccgcuuuu

SEQ ID NO: 2565283 - RNA, 19 nt, Artificial Sequence
  Description of Artificial Sequence: Synthetic oligonucleotide
cgcccacucucgcacgccu

SEQ ID NO: 2565284 - RNA, 19 nt, Artificial Sequence
  Description of Artificial Sequence: Synthetic oligonucleotide
ccgucagcucacgggcacu

SEQ ID NO: 2565285 - RNA, 19 nt, Artificial Sequence
  Description of Artificial Sequence: Synthetic oligonucleotide
cgcacgccugggccacgaa

SEQ ID NO: 2565286 - RNA, 19 nt, Artificial Sequence
  Description of Artificial Sequence: Synthetic oligonucleotide
gcccacccuuggagguacu

SEQ ID NO: 2565287 - RNA, 19 nt, Artificial Sequence
  Description of Artificial Sequence: Synthetic oligonucleotide
ccucggccuucuggaccgu

SEQ ID NO: 2565288 - RNA, 19 nt, Artificial Sequence
  Description of Artificial Sequence: Synthetic oligonucleotide
aauuuguuaacauuucucc

SEQ ID NO: 2565289 - RNA, 19 nt, Artificial Sequence
  Description of Artificial Sequence: Synthetic oligonucleotide
ucaaauaaaagacucaaga

SEQ ID NO: 2565290 - RNA, 19 nt, Artificial Sequence
  Description of Artificial Sequence: Synthetic oligonucleotide
cuuaagaaaaucaugaaug

SEQ ID NO: 2565291 - RNA, 19 nt, Artificial Sequence
  Description of Artificial Sequence: Synthetic oligonucleotide
aaaacaaaugucuccacuc

SEQ ID NO: 2565292 - RNA, 19 nt, Artificial Sequence
  Description of Artificial Sequence: Synthetic oligonucleotide
aagaaaaucaugaaugggg

SEQ ID NO: 2565293 - RNA, 19 nt, Artificial Sequence
  Description of Artificial Sequence: Synthetic oligonucleotide
aauaaaagacucaagauga

SEQ ID NO: 2565294 - RNA, 19 nt, Artificial Sequence
  Description of Artificial Sequence: Synthetic oligonucleotide
ucaaguuugccuuugagug

SEQ ID NO: 2565295 - RNA, 19 nt, Artificial Sequence
  Description of Artificial Sequence: Synthetic oligonucleotide
uccaaauaaaucaugguca

SEQ ID NO: 2565296 - RNA, 19 nt, Artificial Sequence
  Description of Artificial Sequence: Synthetic oligonucleotide
aaccaugccaucuggauuc

SEQ ID NO: 2565297 - RNA, 19 nt, Artificial Sequence
  Description of Artificial Sequence: Synthetic oligonucleotide
uuucauguaaucuuugaug

SEQ ID NO: 2565298 - RNA, 19 nt, Artificial Sequence
  Description of Artificial Sequence: Synthetic oligonucleotide
aaaggcuuuacucuuucag

SEQ ID NO: 2565299 - RNA, 19 nt, Artificial Sequence
  Description of Artificial Sequence: Synthetic oligonucleotide
ucauggucaaauaaaagac

SEQ ID NO: 2565300 - RNA, 19 nt, Artificial Sequence
  Description of Artificial Sequence: Synthetic oligonucleotide
uugaaauuagcaaggaugu

SEQ ID NO: 2565301 - RNA, 19 nt, Artificial Sequence
  Description of Artificial Sequence: Synthetic oligonucleotide
acaucagucccauuugucc

SEQ ID NO: 2565302 - RNA, 19 nt, Artificial Sequence
  Description of Artificial Sequence: Synthetic oligonucleotide
auugaaauuagcaaggaug

SEQ ID NO: 2565303 - RNA, 19 nt, Artificial Sequence
  Description of Artificial Sequence: Synthetic oligonucleotide
aaauaaaucauggucaaau

SEQ ID NO: 2565304 - RNA, 19 nt, Artificial Sequence
  Description of Artificial Sequence: Synthetic oligonucleotide
aucauggucaaauaaaaga

SEQ ID NO: 2565305 - RNA, 19 nt, Artificial Sequence
  Description of Artificial Sequence: Synthetic oligonucleotide
aaggaugugcuuaauuugc

SEQ ID NO: 2565306 - RNA, 19 nt, Artificial Sequence
  Description of Artificial Sequence: Synthetic oligonucleotide
uaaaucauggucaaauaaa

SEQ ID NO: 2565307 - RNA, 19 nt, Artificial Sequence
  Description of Artificial Sequence: Synthetic oligonucleotide
aaaacugguaguuauugaa

SEQ ID NO: 2565308 - RNA, 19 nt, Artificial Sequence
  Description of Artificial Sequence: Synthetic oligonucleotide
cuuaauuugcucugcagcc

SEQ ID NO: 2565309 - RNA, 19 nt, Artificial Sequence
  Description of Artificial Sequence: Synthetic oligonucleotide
uucaugacaauaucgacac

SEQ ID NO: 2565310 - RNA, 19 nt, Artificial Sequence
  Description of Artificial Sequence: Synthetic oligonucleotide
ucauaaaaggcuuuacucu

SEQ ID NO: 2565311 - RNA, 19 nt, Artificial Sequence
  Description of Artificial Sequence: Synthetic oligonucleotide
uguucuacugaccaucuug

SEQ ID NO: 2565312 - RNA, 19 nt, Artificial Sequence
  Description of Artificial Sequence: Synthetic oligonucleotide
ugugcuuucgguuccuucg

SEQ ID NO: 2565313 - RNA, 19 nt, Artificial Sequence
  Description of Artificial Sequence: Synthetic oligonucleotide
aaagacucaagaugacauc

SEQ ID NO: 2565314 - RNA, 19 nt, Artificial Sequence
  Description of Artificial Sequence: Synthetic oligonucleotide
gaugucggagaacagcucg

SEQ ID NO: 2565315 - RNA, 19 nt, Artificial Sequence
  Description of Artificial Sequence: Synthetic oligonucleotide
uagaugaucaugguggcgg

SEQ ID NO: 2565316 - RNA, 19 nt, Artificial Sequence
  Description of Artificial Sequence: Synthetic oligonucleotide
acuacugugcuuucgguuc

SEQ ID NO: 2565317 - RNA, 19 nt, Artificial Sequence
  Description of Artificial Sequence: Synthetic oligonucleotide
uaagaaaaucaugaauggg

SEQ ID NO: 2565318 - RNA, 19 nt, Artificial Sequence
  Description of Artificial Sequence: Synthetic oligonucleotide
auuuccaccaaugagcgag

SEQ ID NO: 2565319 - RNA, 19 nt, Artificial Sequence
  Description of Artificial Sequence: Synthetic oligonucleotide
cauuucuccaucucuaggc

SEQ ID NO: 2565320 - RNA, 19 nt, Artificial Sequence
  Description of Artificial Sequence: Synthetic oligonucleotide
uguauggauggcaagcagc

SEQ ID NO: 2565321 - RNA, 19 nt, Artificial Sequence
  Description of Artificial Sequence: Synthetic oligonucleotide
cacuccaaauaaaucaugg

SEQ ID NO: 2565322 - RNA, 19 nt, Artificial Sequence
  Description of Artificial Sequence: Synthetic oligonucleotide
uaaucuuugauguacuuuu

SEQ ID NO: 2565323 - RNA, 19 nt, Artificial Sequence
  Description of Artificial Sequence: Synthetic oligonucleotide
uucacgguaguccaggaga

SEQ ID NO: 2565324 - RNA, 19 nt, Artificial Sequence
  Description of Artificial Sequence: Synthetic oligonucleotide
aaugucuccacuccaaaua

SEQ ID NO: 2565325 - RNA, 19 nt, Artificial Sequence
  Description of Artificial Sequence: Synthetic oligonucleotide
uaguuauugaaauuagcaa

SEQ ID NO: 2565326 - RNA, 19 nt, Artificial Sequence
  Description of Artificial Sequence: Synthetic oligonucleotide
ggucacaccaucuucacgg

SEQ ID NO: 2565327 - RNA, 19 nt, Artificial Sequence
  Description of Artificial Sequence: Synthetic oligonucleotide
auaaaucauggucaaauaa

SEQ ID NO: 2565328 - RNA, 19 nt, Artificial Sequence
  Description of Artificial Sequence: Synthetic oligonucleotide
acaauaucgacaccgguga

SEQ ID NO: 2565329 - RNA, 19 nt, Artificial Sequence
  Description of Artificial Sequence: Synthetic oligonucleotide
ugguucaugacaauaucga

SEQ ID NO: 2565330 - RNA, 19 nt, Artificial Sequence
  Description of Artificial Sequence: Synthetic oligonucleotide
gucauaaaaggcuuuacuc

SEQ ID NO: 2565331 - RNA, 19 nt, Artificial Sequence
  Description of Artificial Sequence: Synthetic oligonucleotide
aaaagacucaagaugacau

SEQ ID NO: 2565332 - RNA, 19 nt, Artificial Sequence
  Description of Artificial Sequence: Synthetic oligonucleotide
cuccaaauaaaucaugguc

SEQ ID NO: 2565333 - RNA, 19 nt, Artificial Sequence
  Description of Artificial Sequence: Synthetic oligonucleotide
aauaaaucauggucaaaua

SEQ ID NO: 2565334 - RNA, 19 nt, Artificial Sequence
  Description of Artificial Sequence: Synthetic oligonucleotide
agucccauuuguccuaagc

SEQ ID NO: 2565335 - RNA, 19 nt, Artificial Sequence
  Description of Artificial Sequence: Synthetic oligonucleotide
agugauuucauguaaucuu

SEQ ID NO: 2565336 - RNA, 19 nt, Artificial Sequence
  Description of Artificial Sequence: Synthetic oligonucleotide
aacugguaguuauugaaau

SEQ ID NO: 2565337 - RNA, 19 nt, Artificial Sequence
  Description of Artificial Sequence: Synthetic oligonucleotide
uucaaguuugccuuugagu

SEQ ID NO: 2565338 - RNA, 19 nt, Artificial Sequence
  Description of Artificial Sequence: Synthetic oligonucleotide
guaguuauugaaauuagca

SEQ ID NO: 2565339 - RNA, 19 nt, Artificial Sequence
  Description of Artificial Sequence: Synthetic oligonucleotide
ucuuucagguuucuguucu

SEQ ID NO: 2565340 - RNA, 19 nt, Artificial Sequence
  Description of Artificial Sequence: Synthetic oligonucleotide
auggucaaauaaaagacuc

SEQ ID NO: 2565341 - RNA, 19 nt, Artificial Sequence
  Description of Artificial Sequence: Synthetic oligonucleotide
aagacucaagaugacauca

SEQ ID NO: 2565342 - RNA, 19 nt, Artificial Sequence
  Description of Artificial Sequence: Synthetic oligonucleotide
uuugagugauuucauguaa

SEQ ID NO: 2565343 - RNA, 19 nt, Artificial Sequence
  Description of Artificial Sequence: Synthetic oligonucleotide
uagaugucggagaacagcu

SEQ ID NO: 2565344 - RNA, 19 nt, Artificial Sequence
  Description of Artificial Sequence: Synthetic oligonucleotide
ucuggauucauguucucac

SEQ ID NO: 2565345 - RNA, 19 nt, Artificial Sequence
  Description of Artificial Sequence: Synthetic oligonucleotide
caauuuguuaacauuucuc

SEQ ID NO: 2565346 - RNA, 19 nt, Artificial Sequence
  Description of Artificial Sequence: Synthetic oligonucleotide
uguaaguggugguucauga

SEQ ID NO: 2565347 - RNA, 19 nt, Artificial Sequence
  Description of Artificial Sequence: Synthetic oligonucleotide
uguuguauggauggcaagc

SEQ ID NO: 2565348 - RNA, 19 nt, Artificial Sequence
  Description of Artificial Sequence: Synthetic oligonucleotide
ucccauuuguccuaagccc

SEQ ID NO: 2565349 - RNA, 19 nt, Artificial Sequence
  Description of Artificial Sequence: Synthetic oligonucleotide
ugguaguuauugaaauuag

SEQ ID NO: 2565350 - RNA, 19 nt, Artificial Sequence
  Description of Artificial Sequence: Synthetic oligonucleotide
cauguaaucuuugauguac

SEQ ID NO: 2565351 - RNA, 19 nt, Artificial Sequence
  Description of Artificial Sequence: Synthetic oligonucleotide
auuuguuaacauuucucca

SEQ ID NO: 2565352 - RNA, 19 nt, Artificial Sequence
  Description of Artificial Sequence: Synthetic oligonucleotide
aaaucaugaauggggucac

SEQ ID NO: 2565353 - RNA, 19 nt, Artificial Sequence
  Description of Artificial Sequence: Synthetic oligonucleotide
uuguagaugucggagaaca

SEQ ID NO: 2565354 - RNA, 19 nt, Artificial Sequence
  Description of Artificial Sequence: Synthetic oligonucleotide
gaagcugguuucuuguaag

SEQ ID NO: 2565355 - RNA, 19 nt, Artificial Sequence
  Description of Artificial Sequence: Synthetic oligonucleotide
aaucauggucaaauaaaag

SEQ ID NO: 2565356 - RNA, 19 nt, Artificial Sequence
  Description of Artificial Sequence: Synthetic oligonucleotide
aacaaaugucuccacucca

SEQ ID NO: 2565357 - RNA, 19 nt, Artificial Sequence
  Description of Artificial Sequence: Synthetic oligonucleotide
aaaucauggucaaauaaaa

SEQ ID NO: 2565358 - RNA, 19 nt, Artificial Sequence
  Description of Artificial Sequence: Synthetic oligonucleotide
gacaauaucgacaccggug

SEQ ID NO: 2565359 - RNA, 19 nt, Artificial Sequence
  Description of Artificial Sequence: Synthetic oligonucleotide
uuaccuucuguucuacuga

SEQ ID NO: 2565360 - RNA, 19 nt, Artificial Sequence
  Description of Artificial Sequence: Synthetic oligonucleotide
uuguccuaagcccuggugu

SEQ ID NO: 2565361 - RNA, 19 nt, Artificial Sequence
  Description of Artificial Sequence: Synthetic oligonucleotide
acagauccaauuuguuaac

SEQ ID NO: 2565362 - RNA, 19 nt, Artificial Sequence
  Description of Artificial Sequence: Synthetic oligonucleotide
gauggcaagcagcagucag

SEQ ID NO: 2565363 - RNA, 19 nt, Artificial Sequence
  Description of Artificial Sequence: Synthetic oligonucleotide
gaucuuguagaugucggag

SEQ ID NO: 2565364 - RNA, 19 nt, Artificial Sequence
  Description of Artificial Sequence: Synthetic oligonucleotide
cauccuuaagaaaaucaug

SEQ ID NO: 2565365 - RNA, 19 nt, Artificial Sequence
  Description of Artificial Sequence: Synthetic oligonucleotide
uaaaagacucaagaugaca

SEQ ID NO: 2565366 - RNA, 19 nt, Artificial Sequence
  Description of Artificial Sequence: Synthetic oligonucleotide
uggauucauguucucacca

SEQ ID NO: 2565367 - RNA, 19 nt, Artificial Sequence
  Description of Artificial Sequence: Synthetic oligonucleotide
uauugaaauuagcaaggau

SEQ ID NO: 2565368 - RNA, 19 nt, Artificial Sequence
  Description of Artificial Sequence: Synthetic oligonucleotide
cacaccaucuucacgguag

SEQ ID NO: 2565369 - RNA, 19 nt, Artificial Sequence
  Description of Artificial Sequence: Synthetic oligonucleotide
uugccuuugagugauuuca

SEQ ID NO: 2565370 - RNA, 19 nt, Artificial Sequence
  Description of Artificial Sequence: Synthetic oligonucleotide
uggucaaauaaaagacuca

SEQ ID NO: 2565371 - RNA, 19 nt, Artificial Sequence
  Description of Artificial Sequence: Synthetic oligonucleotide
accaaugagcgagucaucg

SEQ ID NO: 2565372 - RNA, 19 nt, Artificial Sequence
  Description of Artificial Sequence: Synthetic oligonucleotide
gugguucaugacaauaucg

SEQ ID NO: 2565373 - RNA, 19 nt, Artificial Sequence
  Description of Artificial Sequence: Synthetic oligonucleotide
aauaucgacaccggugacu

SEQ ID NO: 2565374 - RNA, 19 nt, Artificial Sequence
  Description of Artificial Sequence: Synthetic oligonucleotide
ugcuuaauuugcucugcag

SEQ ID NO: 2565375 - RNA, 19 nt, Artificial Sequence
  Description of Artificial Sequence: Synthetic oligonucleotide
aagcccugguguuguaugg

SEQ ID NO: 2565376 - RNA, 19 nt, Artificial Sequence
  Description of Artificial Sequence: Synthetic oligonucleotide
gaagcauuuccaccaauga

SEQ ID NO: 2565377 - RNA, 19 nt, Artificial Sequence
  Description of Artificial Sequence: Synthetic oligonucleotide
uccaauuuguuaacauuuc

SEQ ID NO: 2565378 - RNA, 19 nt, Artificial Sequence
  Description of Artificial Sequence: Synthetic oligonucleotide
ucaugaauggggucacacc

SEQ ID NO: 2565379 - RNA, 19 nt, Artificial Sequence
  Description of Artificial Sequence: Synthetic oligonucleotide
aucaugaauggggucacac

SEQ ID NO: 2565380 - RNA, 19 nt, Artificial Sequence
  Description of Artificial Sequence: Synthetic oligonucleotide
uuguuaacauuucuccauc

SEQ ID NO: 2565381 - RNA, 19 nt, Artificial Sequence
  Description of Artificial Sequence: Synthetic oligonucleotide
gucccauuuguccuaagcc

SEQ ID NO: 2565382 - RNA, 19 nt, Artificial Sequence
  Description of Artificial Sequence: Synthetic oligonucleotide
aggcuuuacucuuucaggu

SEQ ID NO: 2565383 - RNA, 19 nt, Artificial Sequence
  Description of Artificial Sequence: Synthetic oligonucleotide
uuuguccuaagcccuggug

SEQ ID NO: 2565384 - RNA, 19 nt, Artificial Sequence
  Description of Artificial Sequence: Synthetic oligonucleotide
uccgcgaucucccggaucu

SEQ ID NO: 2565385 - RNA, 19 nt, Artificial Sequence
  Description of Artificial Sequence: Synthetic oligonucleotide
ugagugauuucauguaauc

SEQ ID NO: 2565386 - RNA, 19 nt, Artificial Sequence
  Description of Artificial Sequence: Synthetic oligonucleotide
uuaauuugcucugcagccc

SEQ ID NO: 2565387 - RNA, 19 nt, Artificial Sequence
  Description of Artificial Sequence: Synthetic oligonucleotide
uuguaggccucuuuuguga

SEQ ID NO: 2565388 - RNA, 19 nt, Artificial Sequence
  Description of Artificial Sequence: Synthetic oligonucleotide
acucaagaugacaucaguc

SEQ ID NO: 2565389 - RNA, 19 nt, Artificial Sequence
  Description of Artificial Sequence: Synthetic oligonucleotide
caugaauggggucacacca

SEQ ID NO: 2565390 - RNA, 19 nt, Artificial Sequence
  Description of Artificial Sequence: Synthetic oligonucleotide
ugacagauccaauuuguua

SEQ ID NO: 2565391 - RNA, 19 nt, Artificial Sequence
  Description of Artificial Sequence: Synthetic oligonucleotide
ucacgguaguccaggagag

SEQ ID NO: 2565392 - RNA, 19 nt, Artificial Sequence
  Description of Artificial Sequence: Synthetic oligonucleotide
uaaaaggcuuuacucuuuc

SEQ ID NO: 2565393 - RNA, 19 nt, Artificial Sequence
  Description of Artificial Sequence: Synthetic oligonucleotide
agucaucgauguuaccuuc

SEQ ID NO: 2565394 - RNA, 19 nt, Artificial Sequence
  Description of Artificial Sequence: Synthetic oligonucleotide
uguuaacauuucuccaucu

SEQ ID NO: 2565395 - RNA, 19 nt, Artificial Sequence
  Description of Artificial Sequence: Synthetic oligonucleotide
auaaaagacucaagaugac

SEQ ID NO: 2565396 - RNA, 19 nt, Artificial Sequence
  Description of Artificial Sequence: Synthetic oligonucleotide
gaugacaucagucccauuu

SEQ ID NO: 2565397 - RNA, 19 nt, Artificial Sequence
  Description of Artificial Sequence: Synthetic oligonucleotide
agcggcgcuagccugacag

SEQ ID NO: 2565398 - RNA, 19 nt, Artificial Sequence
  Description of Artificial Sequence: Synthetic oligonucleotide
cuuuugugaagcugguuuc

SEQ ID NO: 2565399 - RNA, 19 nt, Artificial Sequence
  Description of Artificial Sequence: Synthetic oligonucleotide
ugcagccccagucauaaaa

SEQ ID NO: 2565400 - RNA, 19 nt, Artificial Sequence
  Description of Artificial Sequence: Synthetic oligonucleotide
uguagaugucggagaacag

SEQ ID NO: 2565401 - RNA, 19 nt, Artificial Sequence
  Description of Artificial Sequence: Synthetic oligonucleotide
ucauguucucaccaauaaa

SEQ ID NO: 2565402 - RNA, 19 nt, Artificial Sequence
  Description of Artificial Sequence: Synthetic oligonucleotide
aaaaggcuuuacucuuuca

SEQ ID NO: 2565403 - RNA, 19 nt, Artificial Sequence
  Description of Artificial Sequence: Synthetic oligonucleotide
guagaugucggagaacagc

SEQ ID NO: 2565404 - RNA, 19 nt, Artificial Sequence
  Description of Artificial Sequence: Synthetic oligonucleotide
uuagcaaggaugugcuuaa

SEQ ID NO: 2565405 - RNA, 19 nt, Artificial Sequence
  Description of Artificial Sequence: Synthetic oligonucleotide
uugagugauuucauguaau

SEQ ID NO: 2565406 - RNA, 19 nt, Artificial Sequence
  Description of Artificial Sequence: Synthetic oligonucleotide
ucggagaacagcucgucac

SEQ ID NO: 2565407 - RNA, 19 nt, Artificial Sequence
  Description of Artificial Sequence: Synthetic oligonucleotide
guucaugacaauaucgaca

SEQ ID NO: 2565408 - RNA, 19 nt, Artificial Sequence
  Description of Artificial Sequence: Synthetic oligonucleotide
ucuguucuacugaccaucu

SEQ ID NO: 2565409 - RNA, 19 nt, Artificial Sequence
  Description of Artificial Sequence: Synthetic oligonucleotide
agauccaauuuguuaacau

SEQ ID NO: 2565410 - RNA, 19 nt, Artificial Sequence
  Description of Artificial Sequence: Synthetic oligonucleotide
augacaucagucccauuug

SEQ ID NO: 2565411 - RNA, 19 nt, Artificial Sequence
  Description of Artificial Sequence: Synthetic oligonucleotide
agagcaaccaugccaucug

SEQ ID NO: 2565412 - RNA, 19 nt, Artificial Sequence
  Description of Artificial Sequence: Synthetic oligonucleotide
augagcgagucaucgaugu

SEQ ID NO: 2565413 - RNA, 19 nt, Artificial Sequence
  Description of Artificial Sequence: Synthetic oligonucleotide
uaagcccugguguuguaug

SEQ ID NO: 2565414 - RNA, 19 nt, Artificial Sequence
  Description of Artificial Sequence: Synthetic oligonucleotide
gguuucuuguaaguggugg

SEQ ID NO: 2565415 - RNA, 19 nt, Artificial Sequence
  Description of Artificial Sequence: Synthetic oligonucleotide
augugcuuaauuugcucug

SEQ ID NO: 2565416 - RNA, 19 nt, Artificial Sequence
  Description of Artificial Sequence: Synthetic oligonucleotide
ucuccacuccaaauaaauc

SEQ ID NO: 2565417 - RNA, 19 nt, Artificial Sequence
  Description of Artificial Sequence: Synthetic oligonucleotide
gaugaugucccgguagaug

SEQ ID NO: 2565418 - RNA, 19 nt, Artificial Sequence
  Description of Artificial Sequence: Synthetic oligonucleotide
gguuccuucgcccucuggg

SEQ ID NO: 2565419 - RNA, 19 nt, Artificial Sequence
  Description of Artificial Sequence: Synthetic oligonucleotide
aucuuguagaugucggaga

SEQ ID NO: 2565420 - RNA, 19 nt, Artificial Sequence
  Description of Artificial Sequence: Synthetic oligonucleotide
ugacaucagucccauuugu

SEQ ID NO: 2565421 - RNA, 19 nt, Artificial Sequence
  Description of Artificial Sequence: Synthetic oligonucleotide
agccccagucauaaaaggc

SEQ ID NO: 2565422 - RNA, 19 nt, Artificial Sequence
  Description of Artificial Sequence: Synthetic oligonucleotide
gacaccggugacuacugug

SEQ ID NO: 2565423 - RNA, 19 nt, Artificial Sequence
  Description of Artificial Sequence: Synthetic oligonucleotide
ugacaauaucgacaccggu

SEQ ID NO: 2565424 - RNA, 19 nt, Artificial Sequence
  Description of Artificial Sequence: Synthetic oligonucleotide
aaacugguaguuauugaaa

SEQ ID NO: 2565425 - RNA, 19 nt, Artificial Sequence
  Description of Artificial Sequence: Synthetic oligonucleotide
uugugaagcugguuucuug

SEQ ID NO: 2565426 - RNA, 19 nt, Artificial Sequence
  Description of Artificial Sequence: Synthetic oligonucleotide
auuagcaaggaugugcuua

SEQ ID NO: 2565427 - RNA, 19 nt, Artificial Sequence
  Description of Artificial Sequence: Synthetic oligonucleotide
guuaacauuucuccaucuc

SEQ ID NO: 2565428 - RNA, 19 nt, Artificial Sequence
  Description of Artificial Sequence: Synthetic oligonucleotide
cuucaaguuugccuuugag

SEQ ID NO: 2565429 - RNA, 19 nt, Artificial Sequence
  Description of Artificial Sequence: Synthetic oligonucleotide
aggugacagauccaauuug

SEQ ID NO: 2565430 - RNA, 19 nt, Artificial Sequence
  Description of Artificial Sequence: Synthetic oligonucleotide
aagcugguuucuuguaagu

SEQ ID NO: 2565431 - RNA, 19 nt, Artificial Sequence
  Description of Artificial Sequence: Synthetic oligonucleotide
ugugcuuaauuugcucugc

SEQ ID NO: 2565432 - RNA, 19 nt, Artificial Sequence
  Description of Artificial Sequence: Synthetic oligonucleotide
acaggugacagauccaauu

SEQ ID NO: 2565433 - RNA, 19 nt, Artificial Sequence
  Description of Artificial Sequence: Synthetic oligonucleotide
uucuguucuacugaccauc

SEQ ID NO: 2565434 - RNA, 19 nt, Artificial Sequence
  Description of Artificial Sequence: Synthetic oligonucleotide
agccugacagcgcggagcg

SEQ ID NO: 2565435 - RNA, 19 nt, Artificial Sequence
  Description of Artificial Sequence: Synthetic oligonucleotide
cuggauucauguucucacc

SEQ ID NO: 2565436 - RNA, 19 nt, Artificial Sequence
  Description of Artificial Sequence: Synthetic oligonucleotide
uucggcggaagcauuucca

SEQ ID NO: 2565437 - RNA, 19 nt, Artificial Sequence
  Description of Artificial Sequence: Synthetic oligonucleotide
uggauggcaagcagcaguc

SEQ ID NO: 2565438 - RNA, 19 nt, Artificial Sequence
  Description of Artificial Sequence: Synthetic oligonucleotide
auggcaagcagcagucagc

SEQ ID NO: 2565439 - RNA, 19 nt, Artificial Sequence
  Description of Artificial Sequence: Synthetic oligonucleotide
ugaaauuagcaaggaugug

SEQ ID NO: 2565440 - RNA, 19 nt, Artificial Sequence
  Description of Artificial Sequence: Synthetic oligonucleotide
uccaggcacagcccguccg

SEQ ID NO: 2565441 - RNA, 19 nt, Artificial Sequence
  Description of Artificial Sequence: Synthetic oligonucleotide
cucuaggccauccuuaaga

SEQ ID NO: 2565442 - RNA, 19 nt, Artificial Sequence
  Description of Artificial Sequence: Synthetic oligonucleotide
ucagguuucuguucuucaa

SEQ ID NO: 2565443 - RNA, 19 nt, Artificial Sequence
  Description of Artificial Sequence: Synthetic oligonucleotide
aucuucacgguaguccagg

SEQ ID NO: 2565444 - RNA, 19 nt, Artificial Sequence
  Description of Artificial Sequence: Synthetic oligonucleotide
aaugagcgagucaucgaug

SEQ ID NO: 2565445 - RNA, 19 nt, Artificial Sequence
  Description of Artificial Sequence: Synthetic oligonucleotide
uuuugugaagcugguuucu

SEQ ID NO: 2565446 - RNA, 19 nt, Artificial Sequence
  Description of Artificial Sequence: Synthetic oligonucleotide
augacaauaucgacaccgg

SEQ ID NO: 2565447 - RNA, 19 nt, Artificial Sequence
  Description of Artificial Sequence: Synthetic oligonucleotide
gagcaaccaugccaucugg

SEQ ID NO: 2565448 - RNA, 19 nt, Artificial Sequence
  Description of Artificial Sequence: Synthetic oligonucleotide
cagucagcuauggugacag

SEQ ID NO: 2565449 - RNA, 19 nt, Artificial Sequence
  Description of Artificial Sequence: Synthetic oligonucleotide
augucuccacuccaaauaa

SEQ ID NO: 2565450 - RNA, 19 nt, Artificial Sequence
  Description of Artificial Sequence: Synthetic oligonucleotide
gcauuuccaccaaugagcg

SEQ ID NO: 2565451 - RNA, 19 nt, Artificial Sequence
  Description of Artificial Sequence: Synthetic oligonucleotide
agcgagucaucgauguuac

SEQ ID NO: 2565452 - RNA, 19 nt, Artificial Sequence
  Description of Artificial Sequence: Synthetic oligonucleotide
uuccuucgcccucugggcc

SEQ ID NO: 2565453 - RNA, 19 nt, Artificial Sequence
  Description of Artificial Sequence: Synthetic oligonucleotide
uuugccuuugagugauuuc

SEQ ID NO: 2565454 - RNA, 19 nt, Artificial Sequence
  Description of Artificial Sequence: Synthetic oligonucleotide
caagaugacaucaguccca

SEQ ID NO: 2565455 - RNA, 19 nt, Artificial Sequence
  Description of Artificial Sequence: Synthetic oligonucleotide
uccaccaaugagcgaguca

SEQ ID NO: 2565456 - RNA, 19 nt, Artificial Sequence
  Description of Artificial Sequence: Synthetic oligonucleotide
agcucgucacggcugauga

SEQ ID NO: 2565457 - RNA, 19 nt, Artificial Sequence
  Description of Artificial Sequence: Synthetic oligonucleotide
uaccuucuguucuacugac

SEQ ID NO: 2565458 - RNA, 19 nt, Artificial Sequence
  Description of Artificial Sequence: Synthetic oligonucleotide
ucucuaggccauccuuaag

SEQ ID NO: 2565459 - RNA, 19 nt, Artificial Sequence
  Description of Artificial Sequence: Synthetic oligonucleotide
gguaguuauugaaauuagc

SEQ ID NO: 2565460 - RNA, 19 nt, Artificial Sequence
  Description of Artificial Sequence: Synthetic oligonucleotide
gagaacagcucgucacggc

SEQ ID NO: 2565461 - RNA, 19 nt, Artificial Sequence
  Description of Artificial Sequence: Synthetic oligonucleotide
aaguggugguucaugacaa

SEQ ID NO: 2565462 - RNA, 19 nt, Artificial Sequence
  Description of Artificial Sequence: Synthetic oligonucleotide
uucuuguaaguggugguuc

SEQ ID NO: 2565463 - RNA, 19 nt, Artificial Sequence
  Description of Artificial Sequence: Synthetic oligonucleotide
gaccaucuugcccuccacc

SEQ ID NO: 2565464 - RNA, 19 nt, Artificial Sequence
  Description of Artificial Sequence: Synthetic oligonucleotide
gauguuaccuucuguucua

SEQ ID NO: 2565465 - RNA, 19 nt, Artificial Sequence
  Description of Artificial Sequence: Synthetic oligonucleotide
ugguguuguauggauggca

SEQ ID NO: 2565466 - RNA, 19 nt, Artificial Sequence
  Description of Artificial Sequence: Synthetic oligonucleotide
cugguaguuauugaaauua

SEQ ID NO: 2565467 - RNA, 19 nt, Artificial Sequence
  Description of Artificial Sequence: Synthetic oligonucleotide
guauggauggcaagcagca

SEQ ID NO: 2565468 - RNA, 19 nt, Artificial Sequence
  Description of Artificial Sequence: Synthetic oligonucleotide
guuccuucgcccucugggc

SEQ ID NO: 2565469 - RNA, 19 nt, Artificial Sequence
  Description of Artificial Sequence: Synthetic oligonucleotide
gaugaucaugguggcggcg

SEQ ID NO: 2565470 - RNA, 19 nt, Artificial Sequence
  Description of Artificial Sequence: Synthetic oligonucleotide
ucauguaaucuuugaugua

SEQ ID NO: 2565471 - RNA, 19 nt, Artificial Sequence
  Description of Artificial Sequence: Synthetic oligonucleotide
cuauggugacaggugacag

SEQ ID NO: 2565472 - RNA, 19 nt, Artificial Sequence
  Description of Artificial Sequence: Synthetic oligonucleotide
guaaguggugguucaugac

SEQ ID NO: 2565473 - RNA, 19 nt, Artificial Sequence
  Description of Artificial Sequence: Synthetic oligonucleotide
cucgucacggcugaugaug

SEQ ID NO: 2565474 - RNA, 19 nt, Artificial Sequence
  Description of Artificial Sequence: Synthetic oligonucleotide
cuuugagugauuucaugua

SEQ ID NO: 2565475 - RNA, 19 nt, Artificial Sequence
  Description of Artificial Sequence: Synthetic oligonucleotide
cuacugaccaucuugcccu

SEQ ID NO: 2565476 - RNA, 19 nt, Artificial Sequence
  Description of Artificial Sequence: Synthetic oligonucleotide
guagaugaucaugguggcg

SEQ ID NO: 2565477 - RNA, 19 nt, Artificial Sequence
  Description of Artificial Sequence: Synthetic oligonucleotide
gucacggcugaugaugucc

SEQ ID NO: 2565478 - RNA, 19 nt, Artificial Sequence
  Description of Artificial Sequence: Synthetic oligonucleotide
ugguuucuuguaaguggug

SEQ ID NO: 2565479 - RNA, 19 nt, Artificial Sequence
  Description of Artificial Sequence: Synthetic oligonucleotide
ucgucacggcugaugaugu

SEQ ID NO: 2565480 - RNA, 19 nt, Artificial Sequence
  Description of Artificial Sequence: Synthetic oligonucleotide
uguaggccucuuuugugaa

SEQ ID NO: 2565481 - RNA, 19 nt, Artificial Sequence
  Description of Artificial Sequence: Synthetic oligonucleotide
ucaugacaauaucgacacc

SEQ ID NO: 2565482 - RNA, 19 nt, Artificial Sequence
  Description of Artificial Sequence: Synthetic oligonucleotide
acgguaguccaggagagca

SEQ ID NO: 2565483 - RNA, 19 nt, Artificial Sequence
  Description of Artificial Sequence: Synthetic oligonucleotide
cagcagucagcuaugguga

SEQ ID NO: 2565484 - RNA, 19 nt, Artificial Sequence
  Description of Artificial Sequence: Synthetic oligonucleotide
cuugcccuccaccuccagg

SEQ ID NO: 2565485 - RNA, 19 nt, Artificial Sequence
  Description of Artificial Sequence: Synthetic oligonucleotide
aucgacaccggugacuacu

SEQ ID NO: 2565486 - RNA, 19 nt, Artificial Sequence
  Description of Artificial Sequence: Synthetic oligonucleotide
ucgacaccggugacuacug

SEQ ID NO: 2565487 - RNA, 19 nt, Artificial Sequence
  Description of Artificial Sequence: Synthetic oligonucleotide
cauggucaaauaaaagacu

SEQ ID NO: 2565488 - RNA, 19 nt, Artificial Sequence
  Description of Artificial Sequence: Synthetic oligonucleotide
ugcuuucgguuccuucgcc

SEQ ID NO: 2565489 - RNA, 19 nt, Artificial Sequence
  Description of Artificial Sequence: Synthetic oligonucleotide
cuacugugcuuucgguucc

SEQ ID NO: 2565490 - RNA, 19 nt, Artificial Sequence
  Description of Artificial Sequence: Synthetic oligonucleotide
ugacuacugugcuuucggu

SEQ ID NO: 2565491 - RNA, 19 nt, Artificial Sequence
  Description of Artificial Sequence: Synthetic oligonucleotide
uguccuaagcccugguguu

SEQ ID NO: 2565492 - RNA, 19 nt, Artificial Sequence
  Description of Artificial Sequence: Synthetic oligonucleotide
ucggcggaagcauuuccac

SEQ ID NO: 2565493 - RNA, 19 nt, Artificial Sequence
  Description of Artificial Sequence: Synthetic oligonucleotide
uguuaccuucuguucuacu

SEQ ID NO: 2565494 - RNA, 19 nt, Artificial Sequence
  Description of Artificial Sequence: Synthetic oligonucleotide
guguuguauggauggcaag

SEQ ID NO: 2565495 - RNA, 19 nt, Artificial Sequence
  Description of Artificial Sequence: Synthetic oligonucleotide
agcugguuucuuguaagug

SEQ ID NO: 2565496 - RNA, 19 nt, Artificial Sequence
  Description of Artificial Sequence: Synthetic oligonucleotide
cuucacgguaguccaggag

SEQ ID NO: 2565497 - RNA, 19 nt, Artificial Sequence
  Description of Artificial Sequence: Synthetic oligonucleotide
ggucaaauaaaagacucaa

SEQ ID NO: 2565498 - RNA, 19 nt, Artificial Sequence
  Description of Artificial Sequence: Synthetic oligonucleotide
ggaagcauuuccaccaaug

SEQ ID NO: 2565499 - RNA, 19 nt, Artificial Sequence
  Description of Artificial Sequence: Synthetic oligonucleotide
ugucuccacuccaaauaaa

SEQ ID NO: 2565500 - RNA, 19 nt, Artificial Sequence
  Description of Artificial Sequence: Synthetic oligonucleotide
auaucgacaccggugacua

SEQ ID NO: 2565501 - RNA, 19 nt, Artificial Sequence
  Description of Artificial Sequence: Synthetic oligonucleotide
uuuccaccaaugagcgagu

SEQ ID NO: 2565502 - RNA, 19 nt, Artificial Sequence
  Description of Artificial Sequence: Synthetic oligonucleotide
gccaucuggauucauguuc

SEQ ID NO: 2565503 - RNA, 19 nt, Artificial Sequence
  Description of Artificial Sequence: Synthetic oligonucleotide
caaguuugccuuugaguga

SEQ ID NO: 2565504 - RNA, 19 nt, Artificial Sequence
  Description of Artificial Sequence: Synthetic oligonucleotide
ggcggaagcauuuccacca

SEQ ID NO: 2565505 - RNA, 19 nt, Artificial Sequence
  Description of Artificial Sequence: Synthetic oligonucleotide
acagcgcggagcgagcgcg

SEQ ID NO: 2565506 - RNA, 19 nt, Artificial Sequence
  Description of Artificial Sequence: Synthetic oligonucleotide
cauuuguccuaagcccugg

SEQ ID NO: 2565507 - RNA, 19 nt, Artificial Sequence
  Description of Artificial Sequence: Synthetic oligonucleotide
cuucggcggaagcauuucc

SEQ ID NO: 2565508 - RNA, 19 nt, Artificial Sequence
  Description of Artificial Sequence: Synthetic oligonucleotide
auguuaccuucuguucuac

SEQ ID NO: 2565509 - RNA, 19 nt, Artificial Sequence
  Description of Artificial Sequence: Synthetic oligonucleotide
ucuucacgguaguccagga

SEQ ID NO: 2565510 - RNA, 19 nt, Artificial Sequence
  Description of Artificial Sequence: Synthetic oligonucleotide
agacucaagaugacaucag

SEQ ID NO: 2565511 - RNA, 19 nt, Artificial Sequence
  Description of Artificial Sequence: Synthetic oligonucleotide
gacaucagucccauuuguc

SEQ ID NO: 2565512 - RNA, 19 nt, Artificial Sequence
  Description of Artificial Sequence: Synthetic oligonucleotide
ugccuuugagugauuucau

SEQ ID NO: 2565513 - RNA, 19 nt, Artificial Sequence
  Description of Artificial Sequence: Synthetic oligonucleotide
ugacagcgcggagcgagcg

SEQ ID NO: 2565514 - RNA, 19 nt, Artificial Sequence
  Description of Artificial Sequence: Synthetic oligonucleotide
gauucauguucucaccaau

SEQ ID NO: 2565515 - RNA, 19 nt, Artificial Sequence
  Description of Artificial Sequence: Synthetic oligonucleotide
auguaaucuuugauguacu

SEQ ID NO: 2565516 - RNA, 19 nt, Artificial Sequence
  Description of Artificial Sequence: Synthetic oligonucleotide
gacucaagaugacaucagu

SEQ ID NO: 2565517 - RNA, 19 nt, Artificial Sequence
  Description of Artificial Sequence: Synthetic oligonucleotide
auuuguccuaagcccuggu

SEQ ID NO: 2565518 - RNA, 19 nt, Artificial Sequence
  Description of Artificial Sequence: Synthetic oligonucleotide
gugcuuucgguuccuucgc

SEQ ID NO: 2565519 - RNA, 19 nt, Artificial Sequence
  Description of Artificial Sequence: Synthetic oligonucleotide
gagcgagucaucgauguua

SEQ ID NO: 2565520 - RNA, 19 nt, Artificial Sequence
  Description of Artificial Sequence: Synthetic oligonucleotide
ggagaacagcucgucacgg

SEQ ID NO: 2565521 - RNA, 19 nt, Artificial Sequence
  Description of Artificial Sequence: Synthetic oligonucleotide
guuucuuguaagugguggu

SEQ ID NO: 2565522 - RNA, 19 nt, Artificial Sequence
  Description of Artificial Sequence: Synthetic oligonucleotide
uccuaagcccugguguugu

SEQ ID NO: 2565523 - RNA, 19 nt, Artificial Sequence
  Description of Artificial Sequence: Synthetic oligonucleotide
cagucauaaaaggcuuuac

SEQ ID NO: 2565524 - RNA, 19 nt, Artificial Sequence
  Description of Artificial Sequence: Synthetic oligonucleotide
agaugucggagaacagcuc

SEQ ID NO: 2565525 - RNA, 19 nt, Artificial Sequence
  Description of Artificial Sequence: Synthetic oligonucleotide
uuucgguuccuucgcccuc

SEQ ID NO: 2565526 - RNA, 19 nt, Artificial Sequence
  Description of Artificial Sequence: Synthetic oligonucleotide
aaucaugaauggggucaca

SEQ ID NO: 2565527 - RNA, 19 nt, Artificial Sequence
  Description of Artificial Sequence: Synthetic oligonucleotide
cuuguagaugucggagaac

SEQ ID NO: 2565528 - RNA, 19 nt, Artificial Sequence
  Description of Artificial Sequence: Synthetic oligonucleotide
ugggccuucggcggaagca

SEQ ID NO: 2565529 - RNA, 19 nt, Artificial Sequence
  Description of Artificial Sequence: Synthetic oligonucleotide
ggugacuacugugcuuucg

SEQ ID NO: 2565530 - RNA, 19 nt, Artificial Sequence
  Description of Artificial Sequence: Synthetic oligonucleotide
ugaccaucuugcccuccac

SEQ ID NO: 2565531 - RNA, 19 nt, Artificial Sequence
  Description of Artificial Sequence: Synthetic oligonucleotide
cugguuucuuguaaguggu

SEQ ID NO: 2565532 - RNA, 19 nt, Artificial Sequence
  Description of Artificial Sequence: Synthetic oligonucleotide
ggaugugcuuaauuugcuc

SEQ ID NO: 2565533 - RNA, 19 nt, Artificial Sequence
  Description of Artificial Sequence: Synthetic oligonucleotide
aucagucccauuuguccua

SEQ ID NO: 2565534 - RNA, 19 nt, Artificial Sequence
  Description of Artificial Sequence: Synthetic oligonucleotide
caauaucgacaccggugac

SEQ ID NO: 2565535 - RNA, 19 nt, Artificial Sequence
  Description of Artificial Sequence: Synthetic oligonucleotide
auaaaaggcuuuacucuuu

SEQ ID NO: 2565536 - RNA, 19 nt, Artificial Sequence
  Description of Artificial Sequence: Synthetic oligonucleotide
ucacaccaucuucacggua

SEQ ID NO: 2565537 - RNA, 19 nt, Artificial Sequence
  Description of Artificial Sequence: Synthetic oligonucleotide
agcccguccgcgaucuccc

SEQ ID NO: 2565538 - RNA, 19 nt, Artificial Sequence
  Description of Artificial Sequence: Synthetic oligonucleotide
aggaugugcuuaauuugcu

SEQ ID NO: 2565539 - RNA, 19 nt, Artificial Sequence
  Description of Artificial Sequence: Synthetic oligonucleotide
gugcuuaauuugcucugca

SEQ ID NO: 2565540 - RNA, 19 nt, Artificial Sequence
  Description of Artificial Sequence: Synthetic oligonucleotide
caucagucccauuuguccu

SEQ ID NO: 2565541 - RNA, 19 nt, Artificial Sequence
  Description of Artificial Sequence: Synthetic oligonucleotide
aauuugcucugcagcccca

SEQ ID NO: 2565542 - RNA, 19 nt, Artificial Sequence
  Description of Artificial Sequence: Synthetic oligonucleotide
cugugcuuucgguuccuuc

SEQ ID NO: 2565543 - RNA, 19 nt, Artificial Sequence
  Description of Artificial Sequence: Synthetic oligonucleotide
gagucaucgauguuaccuu

SEQ ID NO: 2565544 - RNA, 19 nt, Artificial Sequence
  Description of Artificial Sequence: Synthetic oligonucleotide
uucgguuccuucgcccucu

SEQ ID NO: 2565545 - RNA, 19 nt, Artificial Sequence
  Description of Artificial Sequence: Synthetic oligonucleotide
gcuuucgguuccuucgccc

SEQ ID NO: 2565546 - RNA, 19 nt, Artificial Sequence
  Description of Artificial Sequence: Synthetic oligonucleotide
gcaaggaugugcuuaauuu

SEQ ID NO: 2565547 - RNA, 19 nt, Artificial Sequence
  Description of Artificial Sequence: Synthetic oligonucleotide
ggaucuuguagaugucgga

SEQ ID NO: 2565548 - RNA, 19 nt, Artificial Sequence
  Description of Artificial Sequence: Synthetic oligonucleotide
ugucggagaacagcucguc

SEQ ID NO: 2565549 - RNA, 19 nt, Artificial Sequence
  Description of Artificial Sequence: Synthetic oligonucleotide
gccauccuuaagaaaauca

SEQ ID NO: 2565550 - RNA, 19 nt, Artificial Sequence
  Description of Artificial Sequence: Synthetic oligonucleotide
gggucacaccaucuucacg

SEQ ID NO: 2565551 - RNA, 19 nt, Artificial Sequence
  Description of Artificial Sequence: Synthetic oligonucleotide
gccuuugagugauuucaug

SEQ ID NO: 2565552 - RNA, 19 nt, Artificial Sequence
  Description of Artificial Sequence: Synthetic oligonucleotide
gucggagaacagcucguca

SEQ ID NO: 2565553 - RNA, 19 nt, Artificial Sequence
  Description of Artificial Sequence: Synthetic oligonucleotide
ugaugaugucccgguagau

SEQ ID NO: 2565554 - RNA, 19 nt, Artificial Sequence
  Description of Artificial Sequence: Synthetic oligonucleotide
cggaucuuguagaugucgg

SEQ ID NO: 2565555 - RNA, 19 nt, Artificial Sequence
  Description of Artificial Sequence: Synthetic oligonucleotide
caaugagcgagucaucgau

SEQ ID NO: 2565556 - RNA, 19 nt, Artificial Sequence
  Description of Artificial Sequence: Synthetic oligonucleotide
gacagcgcggagcgagcgc

SEQ ID NO: 2565557 - RNA, 19 nt, Artificial Sequence
  Description of Artificial Sequence: Synthetic oligonucleotide
cugacagcgcggagcgagc

SEQ ID NO: 2565558 - RNA, 19 nt, Artificial Sequence
  Description of Artificial Sequence: Synthetic oligonucleotide
gcgcuagccugacagcgcg

SEQ ID NO: 2565559 - RNA, 19 nt, Artificial Sequence
  Description of Artificial Sequence: Synthetic oligonucleotide
cacggcugaugaugucccg

SEQ ID NO: 2565560 - RNA, 19 nt, Artificial Sequence
  Description of Artificial Sequence: Synthetic oligonucleotide
gacuacugugcuuucgguu

SEQ ID NO: 2565561 - RNA, 19 nt, Artificial Sequence
  Description of Artificial Sequence: Synthetic oligonucleotide
aguggugguucaugacaau

SEQ ID NO: 2565562 - RNA, 19 nt, Artificial Sequence
  Description of Artificial Sequence: Synthetic oligonucleotide
cugguguuguauggauggc

SEQ ID NO: 2565563 - RNA, 19 nt, Artificial Sequence
  Description of Artificial Sequence: Synthetic oligonucleotide
ugagcgagucaucgauguu

SEQ ID NO: 2565564 - RNA, 19 nt, Artificial Sequence
  Description of Artificial Sequence: Synthetic oligonucleotide
gucagcuauggugacaggu

SEQ ID NO: 2565565 - RNA, 19 nt, Artificial Sequence
  Description of Artificial Sequence: Synthetic oligonucleotide
gcccucugggccuucggcg

SEQ ID NO: 2565566 - RNA, 19 nt, Artificial Sequence
  Description of Artificial Sequence: Synthetic oligonucleotide
ggauucauguucucaccaa

SEQ ID NO: 2565567 - RNA, 19 nt, Artificial Sequence
  Description of Artificial Sequence: Synthetic oligonucleotide
guaaucuuugauguacuuu

SEQ ID NO: 2565568 - RNA, 19 nt, Artificial Sequence
  Description of Artificial Sequence: Synthetic oligonucleotide
ccuuugagugauuucaugu

SEQ ID NO: 2565569 - RNA, 19 nt, Artificial Sequence
  Description of Artificial Sequence: Synthetic oligonucleotide
cuaggccauccuuaagaaa

SEQ ID NO: 2565570 - RNA, 19 nt, Artificial Sequence
  Description of Artificial Sequence: Synthetic oligonucleotide
ccacuccaaauaaaucaug

SEQ ID NO: 2565571 - RNA, 19 nt, Artificial Sequence
  Description of Artificial Sequence: Synthetic oligonucleotide
cagauccaauuuguuaaca

SEQ ID NO: 2565572 - RNA, 19 nt, Artificial Sequence
  Description of Artificial Sequence: Synthetic oligonucleotide
gguguuguauggauggcaa

SEQ ID NO: 2565573 - RNA, 19 nt, Artificial Sequence
  Description of Artificial Sequence: Synthetic oligonucleotide
cuagccugacagcgcggag

SEQ ID NO: 2565574 - RNA, 19 nt, Artificial Sequence
  Description of Artificial Sequence: Synthetic oligonucleotide
ccggaucuuguagaugucg

SEQ ID NO: 2565575 - RNA, 19 nt, Artificial Sequence
  Description of Artificial Sequence: Synthetic oligonucleotide
ugucccgguagaugaucau

SEQ ID NO: 2565576 - RNA, 19 nt, Artificial Sequence
  Description of Artificial Sequence: Synthetic oligonucleotide
ucgcccucugggccuucgg

SEQ ID NO: 2565577 - RNA, 19 nt, Artificial Sequence
  Description of Artificial Sequence: Synthetic oligonucleotide
ccgguagaugaucauggug

SEQ ID NO: 2565578 - RNA, 19 nt, Artificial Sequence
  Description of Artificial Sequence: Synthetic oligonucleotide
gcgagcgcggugcagccgg

SEQ ID NO: 2565579 - RNA, 19 nt, Artificial Sequence
  Description of Artificial Sequence: Synthetic oligonucleotide
ccugacagcgcggagcgag

SEQ ID NO: 2565580 - RNA, 19 nt, Artificial Sequence
  Description of Artificial Sequence: Synthetic oligonucleotide
agcaaccaugccaucugga

SEQ ID NO: 2565581 - RNA, 19 nt, Artificial Sequence
  Description of Artificial Sequence: Synthetic oligonucleotide
aggccucuuuugugaagcu

SEQ ID NO: 2565582 - RNA, 19 nt, Artificial Sequence
  Description of Artificial Sequence: Synthetic oligonucleotide
gucuccacuccaaauaaau

SEQ ID NO: 2565583 - RNA, 19 nt, Artificial Sequence
  Description of Artificial Sequence: Synthetic oligonucleotide
cuuucgguuccuucgcccu

SEQ ID NO: 2565584 - RNA, 19 nt, Artificial Sequence
  Description of Artificial Sequence: Synthetic oligonucleotide
ggugacagauccaauuugu

SEQ ID NO: 2565585 - RNA, 19 nt, Artificial Sequence
  Description of Artificial Sequence: Synthetic oligonucleotide
acagcggcgcuagccugac

SEQ ID NO: 2565586 - RNA, 19 nt, Artificial Sequence
  Description of Artificial Sequence: Synthetic oligonucleotide
cagcccguccgcgaucucc

SEQ ID NO: 2565587 - RNA, 19 nt, Artificial Sequence
  Description of Artificial Sequence: Synthetic oligonucleotide
ggagcgagcgcggugcagc

SEQ ID NO: 2565588 - RNA, 19 nt, Artificial Sequence
  Description of Artificial Sequence: Synthetic oligonucleotide
guggugguucaugacaaua

SEQ ID NO: 2565589 - RNA, 19 nt, Artificial Sequence
  Description of Artificial Sequence: Synthetic oligonucleotide
uaucgacaccggugacuac

SEQ ID NO: 2565590 - RNA, 19 nt, Artificial Sequence
  Description of Artificial Sequence: Synthetic oligonucleotide
guccuaagcccugguguug

SEQ ID NO: 2565591 - RNA, 19 nt, Artificial Sequence
  Description of Artificial Sequence: Synthetic oligonucleotide
uacugaccaucuugcccuc

SEQ ID NO: 2565592 - RNA, 19 nt, Artificial Sequence
  Description of Artificial Sequence: Synthetic oligonucleotide
uucgcccucugggccuucg

SEQ ID NO: 2565593 - RNA, 19 nt, Artificial Sequence
  Description of Artificial Sequence: Synthetic oligonucleotide
cacgguaguccaggagagc

SEQ ID NO: 2565594 - RNA, 19 nt, Artificial Sequence
  Description of Artificial Sequence: Synthetic oligonucleotide
accggugacuacugugcuu

SEQ ID NO: 2565595 - RNA, 19 nt, Artificial Sequence
  Description of Artificial Sequence: Synthetic oligonucleotide
cccucugggccuucggcgg

SEQ ID NO: 2565596 - RNA, 19 nt, Artificial Sequence
  Description of Artificial Sequence: Synthetic oligonucleotide
cggagaacagcucgucacg

SEQ ID NO: 2565597 - RNA, 19 nt, Artificial Sequence
  Description of Artificial Sequence: Synthetic oligonucleotide
uuccaccaaugagcgaguc

SEQ ID NO: 2565598 - RNA, 19 nt, Artificial Sequence
  Description of Artificial Sequence: Synthetic oligonucleotide
gacagcggcgcuagccuga

SEQ ID NO: 2565599 - RNA, 19 nt, Artificial Sequence
  Description of Artificial Sequence: Synthetic oligonucleotide
cauuuccaccaaugagcga

SEQ ID NO: 2565600 - RNA, 19 nt, Artificial Sequence
  Description of Artificial Sequence: Synthetic oligonucleotide
caggcacagcccguccgcg

SEQ ID NO: 2565601 - RNA, 19 nt, Artificial Sequence
  Description of Artificial Sequence: Synthetic oligonucleotide
gcuuuacucuuucagguuu

SEQ ID NO: 2565602 - RNA, 19 nt, Artificial Sequence
  Description of Artificial Sequence: Synthetic oligonucleotide
uacugugcuuucgguuccu

SEQ ID NO: 2565603 - RNA, 19 nt, Artificial Sequence
  Description of Artificial Sequence: Synthetic oligonucleotide
ggggacagcggcgcuagcc

SEQ ID NO: 2565604 - RNA, 19 nt, Artificial Sequence
  Description of Artificial Sequence: Synthetic oligonucleotide
ggggucacaccaucuucac

SEQ ID NO: 2565605 - RNA, 19 nt, Artificial Sequence
  Description of Artificial Sequence: Synthetic oligonucleotide
agcccugguguuguaugga

SEQ ID NO: 2565606 - RNA, 19 nt, Artificial Sequence
  Description of Artificial Sequence: Synthetic oligonucleotide
gccggagcggcgcucgggg

SEQ ID NO: 2565607 - RNA, 19 nt, Artificial Sequence
  Description of Artificial Sequence: Synthetic oligonucleotide
ucgguuccuucgcccucug

SEQ ID NO: 2565608 - RNA, 19 nt, Artificial Sequence
  Description of Artificial Sequence: Synthetic oligonucleotide
caggugacagauccaauuu

SEQ ID NO: 2565609 - RNA, 19 nt, Artificial Sequence
  Description of Artificial Sequence: Synthetic oligonucleotide
aggcacagcccguccgcga

SEQ ID NO: 2565610 - RNA, 19 nt, Artificial Sequence
  Description of Artificial Sequence: Synthetic oligonucleotide
ccaauuuguuaacauuucu

SEQ ID NO: 2565611 - RNA, 19 nt, Artificial Sequence
  Description of Artificial Sequence: Synthetic oligonucleotide
cugggccuucggcggaagc

SEQ ID NO: 2565612 - RNA, 19 nt, Artificial Sequence
  Description of Artificial Sequence: Synthetic oligonucleotide
ggacagcggcgcuagccug

SEQ ID NO: 2565613 - RNA, 19 nt, Artificial Sequence
  Description of Artificial Sequence: Synthetic oligonucleotide
aggccauccuuaagaaaau

SEQ ID NO: 2565614 - RNA, 19 nt, Artificial Sequence
  Description of Artificial Sequence: Synthetic oligonucleotide
caucgauguuaccuucugu

SEQ ID NO: 2565615 - RNA, 19 nt, Artificial Sequence
  Description of Artificial Sequence: Synthetic oligonucleotide
gucaucgauguuaccuucu

SEQ ID NO: 2565616 - RNA, 19 nt, Artificial Sequence
  Description of Artificial Sequence: Synthetic oligonucleotide
agcgagcgcggugcagccg

SEQ ID NO: 2565617 - RNA, 19 nt, Artificial Sequence
  Description of Artificial Sequence: Synthetic oligonucleotide
gcaaccaugccaucuggau

SEQ ID NO: 2565618 - RNA, 19 nt, Artificial Sequence
  Description of Artificial Sequence: Synthetic oligonucleotide
caaccaugccaucuggauu

SEQ ID NO: 2565619 - RNA, 19 nt, Artificial Sequence
  Description of Artificial Sequence: Synthetic oligonucleotide
ccaggcacagcccguccgc

SEQ ID NO: 2565620 - RNA, 19 nt, Artificial Sequence
  Description of Artificial Sequence: Synthetic oligonucleotide
gccccagucauaaaaggcu

SEQ ID NO: 2565621 - RNA, 19 nt, Artificial Sequence
  Description of Artificial Sequence: Synthetic oligonucleotide
ccaaugagcgagucaucga

SEQ ID NO: 2565622 - RNA, 19 nt, Artificial Sequence
  Description of Artificial Sequence: Synthetic oligonucleotide
uagcaaggaugugcuuaau

SEQ ID NO: 2565623 - RNA, 19 nt, Artificial Sequence
  Description of Artificial Sequence: Synthetic oligonucleotide
cagcgcggagcgagcgcgg

SEQ ID NO: 2565624 - RNA, 19 nt, Artificial Sequence
  Description of Artificial Sequence: Synthetic oligonucleotide
cuucuguucuacugaccau

SEQ ID NO: 2565625 - RNA, 19 nt, Artificial Sequence
  Description of Artificial Sequence: Synthetic oligonucleotide
ggccauccuuaagaaaauc

SEQ ID NO: 2565626 - RNA, 19 nt, Artificial Sequence
  Description of Artificial Sequence: Synthetic oligonucleotide
acagcccguccgcgaucuc

SEQ ID NO: 2565627 - RNA, 19 nt, Artificial Sequence
  Description of Artificial Sequence: Synthetic oligonucleotide
ggcgcuagccugacagcgc

SEQ ID NO: 2565628 - RNA, 19 nt, Artificial Sequence
  Description of Artificial Sequence: Synthetic oligonucleotide
gcagccggagcggcgcucg

SEQ ID NO: 2565629 - RNA, 19 nt, Artificial Sequence
  Description of Artificial Sequence: Synthetic oligonucleotide
gcuagccugacagcgcgga

SEQ ID NO: 2565630 - RNA, 19 nt, Artificial Sequence
  Description of Artificial Sequence: Synthetic oligonucleotide
cggcggaagcauuuccacc

SEQ ID NO: 2565631 - RNA, 19 nt, Artificial Sequence
  Description of Artificial Sequence: Synthetic oligonucleotide
guccgcgaucucccggauc

SEQ ID NO: 2565632 - RNA, 19 nt, Artificial Sequence
  Description of Artificial Sequence: Synthetic oligonucleotide
cgagucaucgauguuaccu

SEQ ID NO: 2565633 - RNA, 19 nt, Artificial Sequence
  Description of Artificial Sequence: Synthetic oligonucleotide
cgauguuaccuucuguucu

SEQ ID NO: 2565634 - RNA, 19 nt, Artificial Sequence
  Description of Artificial Sequence: Synthetic oligonucleotide
ggagagcaaccaugccauc

SEQ ID NO: 2565635 - RNA, 19 nt, Artificial Sequence
  Description of Artificial Sequence: Synthetic oligonucleotide
gcgagucaucgauguuacc

SEQ ID NO: 2565636 - RNA, 19 nt, Artificial Sequence
  Description of Artificial Sequence: Synthetic oligonucleotide
cggcgcuagccugacagcg

SEQ ID NO: 2565637 - RNA, 19 nt, Artificial Sequence
  Description of Artificial Sequence: Synthetic oligonucleotide
gacaggugacagauccaau

SEQ ID NO: 2565638 - RNA, 19 nt, Artificial Sequence
  Description of Artificial Sequence: Synthetic oligonucleotide
ggcuuuacucuuucagguu

SEQ ID NO: 2565639 - RNA, 19 nt, Artificial Sequence
  Description of Artificial Sequence: Synthetic oligonucleotide
acugugcuuucgguuccuu

SEQ ID NO: 2565640 - RNA, 19 nt, Artificial Sequence
  Description of Artificial Sequence: Synthetic oligonucleotide
accuccaggcacagcccgu

SEQ ID NO: 2565641 - RNA, 19 nt, Artificial Sequence
  Description of Artificial Sequence: Synthetic oligonucleotide
cuuguaaguggugguucau

SEQ ID NO: 2565642 - RNA, 19 nt, Artificial Sequence
  Description of Artificial Sequence: Synthetic oligonucleotide
gcggcgcuagccugacagc

SEQ ID NO: 2565643 - RNA, 19 nt, Artificial Sequence
  Description of Artificial Sequence: Synthetic oligonucleotide
cccguccgcgaucucccgg

SEQ ID NO: 2565644 - RNA, 19 nt, Artificial Sequence
  Description of Artificial Sequence: Synthetic oligonucleotide
agcgcggagcgagcgcggu

SEQ ID NO: 2565645 - RNA, 19 nt, Artificial Sequence
  Description of Artificial Sequence: Synthetic oligonucleotide
ugcagccggagcggcgcuc

SEQ ID NO: 2565646 - RNA, 19 nt, Artificial Sequence
  Description of Artificial Sequence: Synthetic oligonucleotide
ggauggcaagcagcaguca

SEQ ID NO: 2565647 - RNA, 19 nt, Artificial Sequence
  Description of Artificial Sequence: Synthetic oligonucleotide
cuaagcccugguguuguau

SEQ ID NO: 2565648 - RNA, 19 nt, Artificial Sequence
  Description of Artificial Sequence: Synthetic oligonucleotide
caccggugacuacugugcu

SEQ ID NO: 2565649 - RNA, 19 nt, Artificial Sequence
  Description of Artificial Sequence: Synthetic oligonucleotide
cagccggagcggcgcucgg

SEQ ID NO: 2565650 - RNA, 19 nt, Artificial Sequence
  Description of Artificial Sequence: Synthetic oligonucleotide
cgcggagcgagcgcggugc

SEQ ID NO: 2565651 - RNA, 19 nt, Artificial Sequence
  Description of Artificial Sequence: Synthetic oligonucleotide
gcggaagcauuuccaccaa

SEQ ID NO: 2565652 - RNA, 19 nt, Artificial Sequence
  Description of Artificial Sequence: Synthetic oligonucleotide
ccuucggcggaagcauuuc

SEQ ID NO: 2565653 - RNA, 19 nt, Artificial Sequence
  Description of Artificial Sequence: Synthetic oligonucleotide
cacagcccguccgcgaucu

SEQ ID NO: 2565654 - RNA, 19 nt, Artificial Sequence
  Description of Artificial Sequence: Synthetic oligonucleotide
gcccguccgcgaucucccg

SEQ ID NO: 2565655 - RNA, 19 nt, Artificial Sequence
  Description of Artificial Sequence: Synthetic oligonucleotide
ccguccgcgaucucccgga

SEQ ID NO: 2565656 - RNA, 19 nt, Artificial Sequence
  Description of Artificial Sequence: Synthetic oligonucleotide
cgcccucugggccuucggc

SEQ ID NO: 2565657 - RNA, 19 nt, Artificial Sequence
  Description of Artificial Sequence: Synthetic oligonucleotide
aguuugccuuugagugauu

SEQ ID NO: 2565658 - RNA, 19 nt, Artificial Sequence
  Description of Artificial Sequence: Synthetic oligonucleotide
acagcucgucacggcugau

SEQ ID NO: 2565659 - RNA, 19 nt, Artificial Sequence
  Description of Artificial Sequence: Synthetic oligonucleotide
ggcacagcccguccgcgau

SEQ ID NO: 2565660 - RNA, 19 nt, Artificial Sequence
  Description of Artificial Sequence: Synthetic oligonucleotide
cgcuagccugacagcgcgg

SEQ ID NO: 2565661 - RNA, 19 nt, Artificial Sequence
  Description of Artificial Sequence: Synthetic oligonucleotide
cgcgaucucccggaucuug

SEQ ID NO: 2565662 - RNA, 19 nt, Artificial Sequence
  Description of Artificial Sequence: Synthetic oligonucleotide
gcccugguguuguauggau

SEQ ID NO: 2565663 - RNA, 19 nt, Artificial Sequence
  Description of Artificial Sequence: Synthetic oligonucleotide
gcacagcccguccgcgauc

SEQ ID NO: 2565664 - RNA, 19 nt, Artificial Sequence
  Description of Artificial Sequence: Synthetic oligonucleotide
cgcggugcagccggagcgg

SEQ ID NO: 2565665 - RNA, 19 nt, Artificial Sequence
  Description of Artificial Sequence: Synthetic oligonucleotide
gcgcggagcgagcgcggug

SEQ ID NO: 2565666 - RNA, 19 nt, Artificial Sequence
  Description of Artificial Sequence: Synthetic oligonucleotide
gcgaucucccggaucuugu

SEQ ID NO: 2565667 - RNA, 19 nt, Artificial Sequence
  Description of Artificial Sequence: Synthetic oligonucleotide
ccggugacuacugugcuuu

SEQ ID NO: 2565668 - RNA, 19 nt, Artificial Sequence
  Description of Artificial Sequence: Synthetic oligonucleotide
cgguuccuucgcccucugg

SEQ ID NO: 2565669 - RNA, 19 nt, Artificial Sequence
  Description of Artificial Sequence: Synthetic oligonucleotide
cccgguagaugaucauggu

SEQ ID NO: 2565670 - RNA, 19 nt, Artificial Sequence
  Description of Artificial Sequence: Synthetic oligonucleotide
gggccuucggcggaagcau

SEQ ID NO: 2565671 - RNA, 19 nt, Artificial Sequence
  Description of Artificial Sequence: Synthetic oligonucleotide
cgguaguccaggagagcaa

SEQ ID NO: 2565672 - RNA, 19 nt, Artificial Sequence
  Description of Artificial Sequence: Synthetic oligonucleotide
cgaucucccggaucuugua

SEQ ID NO: 2565673 - RNA, 19 nt, Artificial Sequence
  Description of Artificial Sequence: Synthetic oligonucleotide
gcggagcgagcgcggugca

SEQ ID NO: 2565674 - RNA, 19 nt, Artificial Sequence
  Description of Artificial Sequence: Synthetic oligonucleotide
cggugacuacugugcuuuc

SEQ ID NO: 2565675 - RNA, 19 nt, Artificial Sequence
  Description of Artificial Sequence: Synthetic oligonucleotide
ccuaagcccugguguugua

SEQ ID NO: 2565676 - RNA, 19 nt, Artificial Sequence
  Description of Artificial Sequence: Synthetic oligonucleotide
cagcggcgcuagccugaca

SEQ ID NO: 2565677 - RNA, 19 nt, Artificial Sequence
  Description of Artificial Sequence: Synthetic oligonucleotide
gccuucggcggaagcauuu

SEQ ID NO: 2565678 - RNA, 19 nt, Artificial Sequence
  Description of Artificial Sequence: Synthetic oligonucleotide
cggagcgagcgcggugcag

SEQ ID NO: 2565679 - RNA, 19 nt, Artificial Sequence
  Description of Artificial Sequence: Synthetic oligonucleotide
gccugacagcgcggagcga

SEQ ID NO: 2565680 - RNA, 19 nt, Artificial Sequence
  Description of Artificial Sequence: Synthetic oligonucleotide
cggaagcauuuccaccaau

SEQ ID NO: 2565681 - RNA, 19 nt, Artificial Sequence
  Description of Artificial Sequence: Synthetic oligonucleotide
ggccuucggcggaagcauu

SEQ ID NO: 2565682 - RNA, 19 nt, Artificial Sequence
  Description of Artificial Sequence: Synthetic oligonucleotide
cgacaccggugacuacugu

SEQ ID NO: 2565683 - RNA, 19 nt, Artificial Sequence
  Description of Artificial Sequence: Synthetic oligonucleotide
ccaugccaucuggauucau

SEQ ID NO: 2565684 - RNA, 19 nt, Artificial Sequence
  Description of Artificial Sequence: Synthetic oligonucleotide
cguccgcgaucucccggau

SEQ ID NO: 2565685 - RNA, 19 nt, Artificial Sequence
  Description of Artificial Sequence: Synthetic oligonucleotide
ccgcgaucucccggaucuu

SEQ ID NO: 2565686 - RNA, 19 nt, Artificial Sequence
  Description of Artificial Sequence: Synthetic oligonucleotide
aauaauaauaauaauaaca

SEQ ID NO: 2565687 - RNA, 19 nt, Artificial Sequence
  Description of Artificial Sequence: Synthetic oligonucleotide
auuacaauagcacaauagc

SEQ ID NO: 2565688 - RNA, 19 nt, Artificial Sequence
  Description of Artificial Sequence: Synthetic oligonucleotide
aauaauaacaacaauaaaa

SEQ ID NO: 2565689 - RNA, 19 nt, Artificial Sequence
  Description of Artificial Sequence: Synthetic oligonucleotide
aaaauaauaauaauaauaa

SEQ ID NO: 2565690 - RNA, 19 nt, Artificial Sequence
  Description of Artificial Sequence: Synthetic oligonucleotide
aauuuagaggcuuuaguuc

SEQ ID NO: 2565691 - RNA, 19 nt, Artificial Sequence
  Description of Artificial Sequence: Synthetic oligonucleotide
aaaauauuacaauagcaca

SEQ ID NO: 2565692 - RNA, 19 nt, Artificial Sequence
  Description of Artificial Sequence: Synthetic oligonucleotide
auuuagaggcuuuaguucc

SEQ ID NO: 2565693 - RNA, 19 nt, Artificial Sequence
  Description of Artificial Sequence: Synthetic oligonucleotide
uuagaagugggaaucaggg

SEQ ID NO: 2565694 - RNA, 19 nt, Artificial Sequence
  Description of Artificial Sequence: Synthetic oligonucleotide
aauaauaauaauaauaaua

SEQ ID NO: 2565695 - RNA, 19 nt, Artificial Sequence
  Description of Artificial Sequence: Synthetic oligonucleotide
uacaauagcacaauagcag

SEQ ID NO: 2565696 - RNA, 19 nt, Artificial Sequence
  Description of Artificial Sequence: Synthetic oligonucleotide
uauuacaauagcacaauag

SEQ ID NO: 2565697 - RNA, 19 nt, Artificial Sequence
  Description of Artificial Sequence: Synthetic oligonucleotide
uaaguauuugaccaaaaca

SEQ ID NO: 2565698 - RNA, 19 nt, Artificial Sequence
  Description of Artificial Sequence: Synthetic oligonucleotide
uguucauucaauuccaucu

SEQ ID NO: 2565699 - RNA, 19 nt, Artificial Sequence
  Description of Artificial Sequence: Synthetic oligonucleotide
aaagccagcaauuaccugu

SEQ ID NO: 2565700 - RNA, 19 nt, Artificial Sequence
  Description of Artificial Sequence: Synthetic oligonucleotide
auaauaauaauaauaauaa

SEQ ID NO: 2565701 - RNA, 19 nt, Artificial Sequence
  Description of Artificial Sequence: Synthetic oligonucleotide
aaaauuuagaggcuuuagu

SEQ ID NO: 2565702 - RNA, 19 nt, Artificial Sequence
  Description of Artificial Sequence: Synthetic oligonucleotide
aaauuuagaggcuuuaguu

SEQ ID NO: 2565703 - RNA, 19 nt, Artificial Sequence
  Description of Artificial Sequence: Synthetic oligonucleotide
aaaagaaauuagaaguggg

SEQ ID NO: 2565704 - RNA, 19 nt, Artificial Sequence
  Description of Artificial Sequence: Synthetic oligonucleotide
uuacaauagcacaauagca

SEQ ID NO: 2565705 - RNA, 19 nt, Artificial Sequence
  Description of Artificial Sequence: Synthetic oligonucleotide
uucaauuccaucucuagcu

SEQ ID NO: 2565706 - RNA, 19 nt, Artificial Sequence
  Description of Artificial Sequence: Synthetic oligonucleotide
aaguauuugaccaaaacau

SEQ ID NO: 2565707 - RNA, 19 nt, Artificial Sequence
  Description of Artificial Sequence: Synthetic oligonucleotide
auucaauuccaucucuagc

SEQ ID NO: 2565708 - RNA, 19 nt, Artificial Sequence
  Description of Artificial Sequence: Synthetic oligonucleotide
aaauaauaauaauaauaau

SEQ ID NO: 2565709 - RNA, 19 nt, Artificial Sequence
  Description of Artificial Sequence: Synthetic oligonucleotide
uuuaguuccuaagagacca

SEQ ID NO: 2565710 - RNA, 19 nt, Artificial Sequence
  Description of Artificial Sequence: Synthetic oligonucleotide
ucuuuguugccuuccaagg

SEQ ID NO: 2565711 - RNA, 19 nt, Artificial Sequence
  Description of Artificial Sequence: Synthetic oligonucleotide
uuaaguauuugaccaaaac

SEQ ID NO: 2565712 - RNA, 19 nt, Artificial Sequence
  Description of Artificial Sequence: Synthetic oligonucleotide
agcaauuaccuguucggcc

SEQ ID NO: 2565713 - RNA, 19 nt, Artificial Sequence
  Description of Artificial Sequence: Synthetic oligonucleotide
caggguaucaaucacuagg

SEQ ID NO: 2565714 - RNA, 19 nt, Artificial Sequence
  Description of Artificial Sequence: Synthetic oligonucleotide
uuucccgaaauucauugag

SEQ ID NO: 2565715 - RNA, 19 nt, Artificial Sequence
  Description of Artificial Sequence: Synthetic oligonucleotide
gaauguugugcuuuucccg

SEQ ID NO: 2565716 - RNA, 19 nt, Artificial Sequence
  Description of Artificial Sequence: Synthetic oligonucleotide
uaauaauaauaauaauaac

SEQ ID NO: 2565717 - RNA, 19 nt, Artificial Sequence
  Description of Artificial Sequence: Synthetic oligonucleotide
aauguugugcuuuucccga

SEQ ID NO: 2565718 - RNA, 19 nt, Artificial Sequence
  Description of Artificial Sequence: Synthetic oligonucleotide
cauaagacgaauguugugc

SEQ ID NO: 2565719 - RNA, 19 nt, Artificial Sequence
  Description of Artificial Sequence: Synthetic oligonucleotide
uugaccaaaacauuuaauu

SEQ ID NO: 2565720 - RNA, 19 nt, Artificial Sequence
  Description of Artificial Sequence: Synthetic oligonucleotide
aagagaccagcacuccugc

SEQ ID NO: 2565721 - RNA, 19 nt, Artificial Sequence
  Description of Artificial Sequence: Synthetic oligonucleotide
aaauauuacaauagcacaa

SEQ ID NO: 2565722 - RNA, 19 nt, Artificial Sequence
  Description of Artificial Sequence: Synthetic oligonucleotide
uuaaagccagcaauuaccu

SEQ ID NO: 2565723 - RNA, 19 nt, Artificial Sequence
  Description of Artificial Sequence: Synthetic oligonucleotide
ucugaguuuuccuuggcug

SEQ ID NO: 2565724 - RNA, 19 nt, Artificial Sequence
  Description of Artificial Sequence: Synthetic oligonucleotide
gaaauuagaagugggaauc

SEQ ID NO: 2565725 - RNA, 19 nt, Artificial Sequence
  Description of Artificial Sequence: Synthetic oligonucleotide
ugugacagugucucgauga

SEQ ID NO: 2565726 - RNA, 19 nt, Artificial Sequence
  Description of Artificial Sequence: Synthetic oligonucleotide
uaauaauaauaauaauaau

SEQ ID NO: 2565727 - RNA, 19 nt, Artificial Sequence
  Description of Artificial Sequence: Synthetic oligonucleotide
agaaaauaauaauaauaau

SEQ ID NO: 2565728 - RNA, 19 nt, Artificial Sequence
  Description of Artificial Sequence: Synthetic oligonucleotide
aauauuacaauagcacaau

SEQ ID NO: 2565729 - RNA, 19 nt, Artificial Sequence
  Description of Artificial Sequence: Synthetic oligonucleotide
aaagaaauuagaaguggga

SEQ ID NO: 2565730 - RNA, 19 nt, Artificial Sequence
  Description of Artificial Sequence: Synthetic oligonucleotide
agagaaaauaauaauaaua

SEQ ID NO: 2565731 - RNA, 19 nt, Artificial Sequence
  Description of Artificial Sequence: Synthetic oligonucleotide
cuuuucccgaaauucauug

SEQ ID NO: 2565732 - RNA, 19 nt, Artificial Sequence
  Description of Artificial Sequence: Synthetic oligonucleotide
aguucuuuccccuuugccu

SEQ ID NO: 2565733 - RNA, 19 nt, Artificial Sequence
  Description of Artificial Sequence: Synthetic oligonucleotide
accaaaacauuuaauuaac

SEQ ID NO: 2565734 - RNA, 19 nt, Artificial Sequence
  Description of Artificial Sequence: Synthetic oligonucleotide
uucauugaguucuuucccc

SEQ ID NO: 2565735 - RNA, 19 nt, Artificial Sequence
  Description of Artificial Sequence: Synthetic oligonucleotide
ugaccaaaacauuuaauua

SEQ ID NO: 2565736 - RNA, 19 nt, Artificial Sequence
  Description of Artificial Sequence: Synthetic oligonucleotide
agcacaauagcagagaaaa

SEQ ID NO: 2565737 - RNA, 19 nt, Artificial Sequence
  Description of Artificial Sequence: Synthetic oligonucleotide
uaagagaccagcacuccug

SEQ ID NO: 2565738 - RNA, 19 nt, Artificial Sequence
  Description of Artificial Sequence: Synthetic oligonucleotide
acaauagcacaauagcaga

SEQ ID NO: 2565739 - RNA, 19 nt, Artificial Sequence
  Description of Artificial Sequence: Synthetic oligonucleotide
agaaauuagaagugggaau

SEQ ID NO: 2565740 - RNA, 19 nt, Artificial Sequence
  Description of Artificial Sequence: Synthetic oligonucleotide
aggguaucaaucacuaggc

SEQ ID NO: 2565741 - RNA, 19 nt, Artificial Sequence
  Description of Artificial Sequence: Synthetic oligonucleotide
agaagugggaaucaggguu

SEQ ID NO: 2565742 - RNA, 19 nt, Artificial Sequence
  Description of Artificial Sequence: Synthetic oligonucleotide
aauuagaagugggaaucag

SEQ ID NO: 2565743 - RNA, 19 nt, Artificial Sequence
  Description of Artificial Sequence: Synthetic oligonucleotide
aaucacuaggcuguguuca

SEQ ID NO: 2565744 - RNA, 19 nt, Artificial Sequence
  Description of Artificial Sequence: Synthetic oligonucleotide
uauuugaccaaaacauuua

SEQ ID NO: 2565745 - RNA, 19 nt, Artificial Sequence
  Description of Artificial Sequence: Synthetic oligonucleotide
aauagcacaauagcagaga

SEQ ID NO: 2565746 - RNA, 19 nt, Artificial Sequence
  Description of Artificial Sequence: Synthetic oligonucleotide
uuccuaagagaccagcacu

SEQ ID NO: 2565747 - RNA, 19 nt, Artificial Sequence
  Description of Artificial Sequence: Synthetic oligonucleotide
uggacuucgccccagcccc

SEQ ID NO: 2565748 - RNA, 19 nt, Artificial Sequence
  Description of Artificial Sequence: Synthetic oligonucleotide
ucgaugaucuucuguaucu

SEQ ID NO: 2565749 - RNA, 19 nt, Artificial Sequence
  Description of Artificial Sequence: Synthetic oligonucleotide
ugugcuuuucccgaaauuc

SEQ ID NO: 2565750 - RNA, 19 nt, Artificial Sequence
  Description of Artificial Sequence: Synthetic oligonucleotide
agcucagcagcuuuggaug

SEQ ID NO: 2565751 - RNA, 19 nt, Artificial Sequence
  Description of Artificial Sequence: Synthetic oligonucleotide
uuuaaguauuugaccaaaa

SEQ ID NO: 2565752 - RNA, 19 nt, Artificial Sequence
  Description of Artificial Sequence: Synthetic oligonucleotide
ugcucuugcucacacgacc

SEQ ID NO: 2565753 - RNA, 19 nt, Artificial Sequence
  Description of Artificial Sequence: Synthetic oligonucleotide
auuagaagugggaaucagg

SEQ ID NO: 2565754 - RNA, 19 nt, Artificial Sequence
  Description of Artificial Sequence: Synthetic oligonucleotide
ugacaguccgcucuaccag

SEQ ID NO: 2565755 - RNA, 19 nt, Artificial Sequence
  Description of Artificial Sequence: Synthetic oligonucleotide
auaagacgaauguugugcu

SEQ ID NO: 2565756 - RNA, 19 nt, Artificial Sequence
  Description of Artificial Sequence: Synthetic oligonucleotide
aauuccaucucuagcucag

SEQ ID NO: 2565757 - RNA, 19 nt, Artificial Sequence
  Description of Artificial Sequence: Synthetic oligonucleotide
gcaauuaccuguucggccg

SEQ ID NO: 2565758 - RNA, 19 nt, Artificial Sequence
  Description of Artificial Sequence: Synthetic oligonucleotide
aggcuuuaguuccuaagag

SEQ ID NO: 2565759 - RNA, 19 nt, Artificial Sequence
  Description of Artificial Sequence: Synthetic oligonucleotide
uuugaccaaaacauuuaau

SEQ ID NO: 2565760 - RNA, 19 nt, Artificial Sequence
  Description of Artificial Sequence: Synthetic oligonucleotide
ucaaucacuaggcuguguu

SEQ ID NO: 2565761 - RNA, 19 nt, Artificial Sequence
  Description of Artificial Sequence: Synthetic oligonucleotide
cuuuaguuccuaagagacc

SEQ ID NO: 2565762 - RNA, 19 nt, Artificial Sequence
  Description of Artificial Sequence: Synthetic oligonucleotide
caauagcacaauagcagag

SEQ ID NO: 2565763 - RNA, 19 nt, Artificial Sequence
  Description of Artificial Sequence: Synthetic oligonucleotide
uugacaguccgcucuacca

SEQ ID NO: 2565764 - RNA, 19 nt, Artificial Sequence
  Description of Artificial Sequence: Synthetic oligonucleotide
aaggcgauuaaagccagca

SEQ ID NO: 2565765 - RNA, 19 nt, Artificial Sequence
  Description of Artificial Sequence: Synthetic oligonucleotide
agaggcuuuaguuccuaag

SEQ ID NO: 2565766 - RNA, 19 nt, Artificial Sequence
  Description of Artificial Sequence: Synthetic oligonucleotide
ggcagcaccucuuugacag

SEQ ID NO: 2565767 - RNA, 19 nt, Artificial Sequence
  Description of Artificial Sequence: Synthetic oligonucleotide
aaauuagaagugggaauca

SEQ ID NO: 2565768 - RNA, 19 nt, Artificial Sequence
  Description of Artificial Sequence: Synthetic oligonucleotide
gaggcuuuaguuccuaaga

SEQ ID NO: 2565769 - RNA, 19 nt, Artificial Sequence
  Description of Artificial Sequence: Synthetic oligonucleotide
uuugacaguccgcucuacc

SEQ ID NO: 2565770 - RNA, 19 nt, Artificial Sequence
  Description of Artificial Sequence: Synthetic oligonucleotide
cuuuguugccuuccaaggc

SEQ ID NO: 2565771 - RNA, 19 nt, Artificial Sequence
  Description of Artificial Sequence: Synthetic oligonucleotide
uucaggguaucaaucacua

SEQ ID NO: 2565772 - RNA, 19 nt, Artificial Sequence
  Description of Artificial Sequence: Synthetic oligonucleotide
auuugaccaaaacauuuaa

SEQ ID NO: 2565773 - RNA, 19 nt, Artificial Sequence
  Description of Artificial Sequence: Synthetic oligonucleotide
accuguucggccgacaccg

SEQ ID NO: 2565774 - RNA, 19 nt, Artificial Sequence
  Description of Artificial Sequence: Synthetic oligonucleotide
uucuguaucugcucuuugu

SEQ ID NO: 2565775 - RNA, 19 nt, Artificial Sequence
  Description of Artificial Sequence: Synthetic oligonucleotide
ucuguuccugccgaaggcg

SEQ ID NO: 2565776 - RNA, 19 nt, Artificial Sequence
  Description of Artificial Sequence: Synthetic oligonucleotide
ugaagcugcugugacagug

SEQ ID NO: 2565777 - RNA, 19 nt, Artificial Sequence
  Description of Artificial Sequence: Synthetic oligonucleotide
gagaccagcacuccugcug

SEQ ID NO: 2565778 - RNA, 19 nt, Artificial Sequence
  Description of Artificial Sequence: Synthetic oligonucleotide
uagcagagaaaauaauaau

SEQ ID NO: 2565779 - RNA, 19 nt, Artificial Sequence
  Description of Artificial Sequence: Synthetic oligonucleotide
ucaauuccaucucuagcuc

SEQ ID NO: 2565780 - RNA, 19 nt, Artificial Sequence
  Description of Artificial Sequence: Synthetic oligonucleotide
ucuagcucagcagcuuugg

SEQ ID NO: 2565781 - RNA, 19 nt, Artificial Sequence
  Description of Artificial Sequence: Synthetic oligonucleotide
uuugccugaagcugcugug

SEQ ID NO: 2565782 - RNA, 19 nt, Artificial Sequence
  Description of Artificial Sequence: Synthetic oligonucleotide
uucugaguuuuccuuggcu

SEQ ID NO: 2565783 - RNA, 19 nt, Artificial Sequence
  Description of Artificial Sequence: Synthetic oligonucleotide
ucauugaguucuuuccccu

SEQ ID NO: 2565784 - RNA, 19 nt, Artificial Sequence
  Description of Artificial Sequence: Synthetic oligonucleotide
agcagagaaaauaauaaua

SEQ ID NO: 2565785 - RNA, 19 nt, Artificial Sequence
  Description of Artificial Sequence: Synthetic oligonucleotide
auagcacaauagcagagaa

SEQ ID NO: 2565786 - RNA, 19 nt, Artificial Sequence
  Description of Artificial Sequence: Synthetic oligonucleotide
ucuguaucugcucuuuguu

SEQ ID NO: 2565787 - RNA, 19 nt, Artificial Sequence
  Description of Artificial Sequence: Synthetic oligonucleotide
ucuaccagcacgccgccaa

SEQ ID NO: 2565788 - RNA, 19 nt, Artificial Sequence
  Description of Artificial Sequence: Synthetic oligonucleotide
aguccgcucuaccagcacg

SEQ ID NO: 2565789 - RNA, 19 nt, Artificial Sequence
  Description of Artificial Sequence: Synthetic oligonucleotide
uuguugccuuccaaggcag

SEQ ID NO: 2565790 - RNA, 19 nt, Artificial Sequence
  Description of Artificial Sequence: Synthetic oligonucleotide
aguuuuccuuggcugcugg

SEQ ID NO: 2565791 - RNA, 19 nt, Artificial Sequence
  Description of Artificial Sequence: Synthetic oligonucleotide
cugagcuggacuucgcccc

SEQ ID NO: 2565792 - RNA, 19 nt, Artificial Sequence
  Description of Artificial Sequence: Synthetic oligonucleotide
ugccuuccaaggcaggcag

SEQ ID NO: 2565793 - RNA, 19 nt, Artificial Sequence
  Description of Artificial Sequence: Synthetic oligonucleotide
uuuucccgaaauucauuga

SEQ ID NO: 2565794 - RNA, 19 nt, Artificial Sequence
  Description of Artificial Sequence: Synthetic oligonucleotide
ugccgaaggcgauuaaagc

SEQ ID NO: 2565795 - RNA, 19 nt, Artificial Sequence
  Description of Artificial Sequence: Synthetic oligonucleotide
cugccgaaggcgauuaaag

SEQ ID NO: 2565796 - RNA, 19 nt, Artificial Sequence
  Description of Artificial Sequence: Synthetic oligonucleotide
uuccaucucuagcucagca

SEQ ID NO: 2565797 - RNA, 19 nt, Artificial Sequence
  Description of Artificial Sequence: Synthetic oligonucleotide
guuccuaagagaccagcac

SEQ ID NO: 2565798 - RNA, 19 nt, Artificial Sequence
  Description of Artificial Sequence: Synthetic oligonucleotide
uucccgaaauucauugagu

SEQ ID NO: 2565799 - RNA, 19 nt, Artificial Sequence
  Description of Artificial Sequence: Synthetic oligonucleotide
uuuagaggcuuuaguuccu

SEQ ID NO: 2565800 - RNA, 19 nt, Artificial Sequence
  Description of Artificial Sequence: Synthetic oligonucleotide
aagacgaauguugugcuuu

SEQ ID NO: 2565801 - RNA, 19 nt, Artificial Sequence
  Description of Artificial Sequence: Synthetic oligonucleotide
uugaguucuuuccccuuug

SEQ ID NO: 2565802 - RNA, 19 nt, Artificial Sequence
  Description of Artificial Sequence: Synthetic oligonucleotide
uuaguuccuaagagaccag

SEQ ID NO: 2565803 - RNA, 19 nt, Artificial Sequence
  Description of Artificial Sequence: Synthetic oligonucleotide
cuguaucugcucuuuguug

SEQ ID NO: 2565804 - RNA, 19 nt, Artificial Sequence
  Description of Artificial Sequence: Synthetic oligonucleotide
ucccgaaauucauugaguu

SEQ ID NO: 2565805 - RNA, 19 nt, Artificial Sequence
  Description of Artificial Sequence: Synthetic oligonucleotide
guucauucaauuccaucuc

SEQ ID NO: 2565806 - RNA, 19 nt, Artificial Sequence
  Description of Artificial Sequence: Synthetic oligonucleotide
ugaucuucuguaucugcuc

SEQ ID NO: 2565807 - RNA, 19 nt, Artificial Sequence
  Description of Artificial Sequence: Synthetic oligonucleotide
uccacuuccuucaggguau

SEQ ID NO: 2565808 - RNA, 19 nt, Artificial Sequence
  Description of Artificial Sequence: Synthetic oligonucleotide
gcuuuaguuccuaagagac

SEQ ID NO: 2565809 - RNA, 19 nt, Artificial Sequence
  Description of Artificial Sequence: Synthetic oligonucleotide
uuaccuguucggccgacac

SEQ ID NO: 2565810 - RNA, 19 nt, Artificial Sequence
  Description of Artificial Sequence: Synthetic oligonucleotide
gccgaaggcgauuaaagcc

SEQ ID NO: 2565811 - RNA, 19 nt, Artificial Sequence
  Description of Artificial Sequence: Synthetic oligonucleotide
uuggaugccaagccccucu

SEQ ID NO: 2565812 - RNA, 19 nt, Artificial Sequence
  Description of Artificial Sequence: Synthetic oligonucleotide
uguucggccgacaccgccc

SEQ ID NO: 2565813 - RNA, 19 nt, Artificial Sequence
  Description of Artificial Sequence: Synthetic oligonucleotide
uuuuccuuggcugcuggcu

SEQ ID NO: 2565814 - RNA, 19 nt, Artificial Sequence
  Description of Artificial Sequence: Synthetic oligonucleotide
ugcuuuucccgaaauucau

SEQ ID NO: 2565815 - RNA, 19 nt, Artificial Sequence
  Description of Artificial Sequence: Synthetic oligonucleotide
cacaauagcagagaaaaua

SEQ ID NO: 2565816 - RNA, 19 nt, Artificial Sequence
  Description of Artificial Sequence: Synthetic oligonucleotide
cacgccgccaaccauccgg

SEQ ID NO: 2565817 - RNA, 19 nt, Artificial Sequence
  Description of Artificial Sequence: Synthetic oligonucleotide
uaggcuguguucauucaau

SEQ ID NO: 2565818 - RNA, 19 nt, Artificial Sequence
  Description of Artificial Sequence: Synthetic oligonucleotide
uaaagccagcaauuaccug

SEQ ID NO: 2565819 - RNA, 19 nt, Artificial Sequence
  Description of Artificial Sequence: Synthetic oligonucleotide
gacaguccgcucuaccagc

SEQ ID NO: 2565820 - RNA, 19 nt, Artificial Sequence
  Description of Artificial Sequence: Synthetic oligonucleotide
gacagugucucgaugaucu

SEQ ID NO: 2565821 - RNA, 19 nt, Artificial Sequence
  Description of Artificial Sequence: Synthetic oligonucleotide
auauuacaauagcacaaua

SEQ ID NO: 2565822 - RNA, 19 nt, Artificial Sequence
  Description of Artificial Sequence: Synthetic oligonucleotide
guaucaaucacuaggcugu

SEQ ID NO: 2565823 - RNA, 19 nt, Artificial Sequence
  Description of Artificial Sequence: Synthetic oligonucleotide
ccagcaauuaccuguucgg

SEQ ID NO: 2565824 - RNA, 19 nt, Artificial Sequence
  Description of Artificial Sequence: Synthetic oligonucleotide
uagcucagcagcuuuggau

SEQ ID NO: 2565825 - RNA, 19 nt, Artificial Sequence
  Description of Artificial Sequence: Synthetic oligonucleotide
ucaggguaucaaucacuag

SEQ ID NO: 2565826 - RNA, 19 nt, Artificial Sequence
  Description of Artificial Sequence: Synthetic oligonucleotide
augccaagccccucuguuc

SEQ ID NO: 2565827 - RNA, 19 nt, Artificial Sequence
  Description of Artificial Sequence: Synthetic oligonucleotide
uccgguagcaccugcgggu

SEQ ID NO: 2565828 - RNA, 19 nt, Artificial Sequence
  Description of Artificial Sequence: Synthetic oligonucleotide
uuccccuuugccugaagcu

SEQ ID NO: 2565829 - RNA, 19 nt, Artificial Sequence
  Description of Artificial Sequence: Synthetic oligonucleotide
accucuuugacaguccgcu

SEQ ID NO: 2565830 - RNA, 19 nt, Artificial Sequence
  Description of Artificial Sequence: Synthetic oligonucleotide
aauuaccuguucggccgac

SEQ ID NO: 2565831 - RNA, 19 nt, Artificial Sequence
  Description of Artificial Sequence: Synthetic oligonucleotide
gcagagaaaauaauaauaa

SEQ ID NO: 2565832 - RNA, 19 nt, Artificial Sequence
  Description of Artificial Sequence: Synthetic oligonucleotide
ccaaccauccgguagcacc

SEQ ID NO: 2565833 - RNA, 19 nt, Artificial Sequence
  Description of Artificial Sequence: Synthetic oligonucleotide
uguugccuuccaaggcagg

SEQ ID NO: 2565834 - RNA, 19 nt, Artificial Sequence
  Description of Artificial Sequence: Synthetic oligonucleotide
gccagcaauuaccuguucg

SEQ ID NO: 2565835 - RNA, 19 nt, Artificial Sequence
  Description of Artificial Sequence: Synthetic oligonucleotide
gucucgaugaucuucugua

SEQ ID NO: 2565836 - RNA, 19 nt, Artificial Sequence
  Description of Artificial Sequence: Synthetic oligonucleotide
ugcugagcuggacuucgcc

SEQ ID NO: 2565837 - RNA, 19 nt, Artificial Sequence
  Description of Artificial Sequence: Synthetic oligonucleotide
auccgguagcaccugcggg

SEQ ID NO: 2565838 - RNA, 19 nt, Artificial Sequence
  Description of Artificial Sequence: Synthetic oligonucleotide
cacuaggcuguguucauuc

SEQ ID NO: 2565839 - RNA, 19 nt, Artificial Sequence
  Description of Artificial Sequence: Synthetic oligonucleotide
uaguuccuaagagaccagc

SEQ ID NO: 2565840 - RNA, 19 nt, Artificial Sequence
  Description of Artificial Sequence: Synthetic oligonucleotide
agaccagcacuccugcuga

SEQ ID NO: 2565841 - RNA, 19 nt, Artificial Sequence
  Description of Artificial Sequence: Synthetic oligonucleotide
agugucucgaugaucuucu

SEQ ID NO: 2565842 - RNA, 19 nt, Artificial Sequence
  Description of Artificial Sequence: Synthetic oligonucleotide
cucgaugaucuucuguauc

SEQ ID NO: 2565843 - RNA, 19 nt, Artificial Sequence
  Description of Artificial Sequence: Synthetic oligonucleotide
guaucugcucuuuguugcc

SEQ ID NO: 2565844 - RNA, 19 nt, Artificial Sequence
  Description of Artificial Sequence: Synthetic oligonucleotide
cuggcuucucaucuucccc

SEQ ID NO: 2565845 - RNA, 19 nt, Artificial Sequence
  Description of Artificial Sequence: Synthetic oligonucleotide
acuccugcugagcuggacu

SEQ ID NO: 2565846 - RNA, 19 nt, Artificial Sequence
  Description of Artificial Sequence: Synthetic oligonucleotide
cuggacuucgccccagccc

SEQ ID NO: 2565847 - RNA, 19 nt, Artificial Sequence
  Description of Artificial Sequence: Synthetic oligonucleotide
uagcacaauagcagagaaa

SEQ ID NO: 2565848 - RNA, 19 nt, Artificial Sequence
  Description of Artificial Sequence: Synthetic oligonucleotide
auugaguucuuuccccuuu

SEQ ID NO: 2565849 - RNA, 19 nt, Artificial Sequence
  Description of Artificial Sequence: Synthetic oligonucleotide
ugcugugacagugucucga

SEQ ID NO: 2565850 - RNA, 19 nt, Artificial Sequence
  Description of Artificial Sequence: Synthetic oligonucleotide
ccccauaagacgaauguug

SEQ ID NO: 2565851 - RNA, 19 nt, Artificial Sequence
  Description of Artificial Sequence: Synthetic oligonucleotide
uccccuuugccugaagcug

SEQ ID NO: 2565852 - RNA, 19 nt, Artificial Sequence
  Description of Artificial Sequence: Synthetic oligonucleotide
uguguucauucaauuccau

SEQ ID NO: 2565853 - RNA, 19 nt, Artificial Sequence
  Description of Artificial Sequence: Synthetic oligonucleotide
cucuguuccugccgaaggc

SEQ ID NO: 2565854 - RNA, 19 nt, Artificial Sequence
  Description of Artificial Sequence: Synthetic oligonucleotide
uugcucacacgaccgcugc

SEQ ID NO: 2565855 - RNA, 19 nt, Artificial Sequence
  Description of Artificial Sequence: Synthetic oligonucleotide
agccccuucugaguuuucc

SEQ ID NO: 2565856 - RNA, 19 nt, Artificial Sequence
  Description of Artificial Sequence: Synthetic oligonucleotide
cuugcucacacgaccgcug

SEQ ID NO: 2565857 - RNA, 19 nt, Artificial Sequence
  Description of Artificial Sequence: Synthetic oligonucleotide
accauccgguagcaccugc

SEQ ID NO: 2565858 - RNA, 19 nt, Artificial Sequence
  Description of Artificial Sequence: Synthetic oligonucleotide
ucucauccacuuccuucag

SEQ ID NO: 2565859 - RNA, 19 nt, Artificial Sequence
  Description of Artificial Sequence: Synthetic oligonucleotide
cauccgguagcaccugcgg

SEQ ID NO: 2565860 - RNA, 19 nt, Artificial Sequence
  Description of Artificial Sequence: Synthetic oligonucleotide
aguauuugaccaaaacauu

SEQ ID NO: 2565861 - RNA, 19 nt, Artificial Sequence
  Description of Artificial Sequence: Synthetic oligonucleotide
uguugugcuuuucccgaaa

SEQ ID NO: 2565862 - RNA, 19 nt, Artificial Sequence
  Description of Artificial Sequence: Synthetic oligonucleotide
accugcgggucucauccac

SEQ ID NO: 2565863 - RNA, 19 nt, Artificial Sequence
  Description of Artificial Sequence: Synthetic oligonucleotide
ucuuugacaguccgcucua

SEQ ID NO: 2565864 - RNA, 19 nt, Artificial Sequence
  Description of Artificial Sequence: Synthetic oligonucleotide
agcagcuuuggaugccaag

SEQ ID NO: 2565865 - RNA, 19 nt, Artificial Sequence
  Description of Artificial Sequence: Synthetic oligonucleotide
uuuccuuggcugcuggcuu

SEQ ID NO: 2565866 - RNA, 19 nt, Artificial Sequence
  Description of Artificial Sequence: Synthetic oligonucleotide
guguucauucaauuccauc

SEQ ID NO: 2565867 - RNA, 19 nt, Artificial Sequence
  Description of Artificial Sequence: Synthetic oligonucleotide
cacacgaccgcugcugucc

SEQ ID NO: 2565868 - RNA, 19 nt, Artificial Sequence
  Description of Artificial Sequence: Synthetic oligonucleotide
gcaccugcgggucucaucc

SEQ ID NO: 2565869 - RNA, 19 nt, Artificial Sequence
  Description of Artificial Sequence: Synthetic oligonucleotide
cugcuguccgccaaucuuc

SEQ ID NO: 2565870 - RNA, 19 nt, Artificial Sequence
  Description of Artificial Sequence: Synthetic oligonucleotide
ucucgaugaucuucuguau

SEQ ID NO: 2565871 - RNA, 19 nt, Artificial Sequence
  Description of Artificial Sequence: Synthetic oligonucleotide
auuccaucucuagcucagc

SEQ ID NO: 2565872 - RNA, 19 nt, Artificial Sequence
  Description of Artificial Sequence: Synthetic oligonucleotide
caaucacuaggcuguguuc

SEQ ID NO: 2565873 - RNA, 19 nt, Artificial Sequence
  Description of Artificial Sequence: Synthetic oligonucleotide
acgaccgcugcuguccgcc

SEQ ID NO: 2565874 - RNA, 19 nt, Artificial Sequence
  Description of Artificial Sequence: Synthetic oligonucleotide
gugggaaucaggguuaaaa

SEQ ID NO: 2565875 - RNA, 19 nt, Artificial Sequence
  Description of Artificial Sequence: Synthetic oligonucleotide
uaccuguucggccgacacc

SEQ ID NO: 2565876 - RNA, 19 nt, Artificial Sequence
  Description of Artificial Sequence: Synthetic oligonucleotide
ugccugaagcugcugugac

SEQ ID NO: 2565877 - RNA, 19 nt, Artificial Sequence
  Description of Artificial Sequence: Synthetic oligonucleotide
ugcuggcuucucaucuucc

SEQ ID NO: 2565878 - RNA, 19 nt, Artificial Sequence
  Description of Artificial Sequence: Synthetic oligonucleotide
aguuccuaagagaccagca

SEQ ID NO: 2565879 - RNA, 19 nt, Artificial Sequence
  Description of Artificial Sequence: Synthetic oligonucleotide
ucuugcucacacgaccgcu

SEQ ID NO: 2565880 - RNA, 19 nt, Artificial Sequence
  Description of Artificial Sequence: Synthetic oligonucleotide
uuggcugcuggcuucucau

SEQ ID NO: 2565881 - RNA, 19 nt, Artificial Sequence
  Description of Artificial Sequence: Synthetic oligonucleotide
cagcaauuaccuguucggc

SEQ ID NO: 2565882 - RNA, 19 nt, Artificial Sequence
  Description of Artificial Sequence: Synthetic oligonucleotide
caauuccaucucuagcuca

SEQ ID NO: 2565883 - RNA, 19 nt, Artificial Sequence
  Description of Artificial Sequence: Synthetic oligonucleotide
acuaggcuguguucauuca

SEQ ID NO: 2565884 - RNA, 19 nt, Artificial Sequence
  Description of Artificial Sequence: Synthetic oligonucleotide
ggcuuuaguuccuaagaga

SEQ ID NO: 2565885 - RNA, 19 nt, Artificial Sequence
  Description of Artificial Sequence: Synthetic oligonucleotide
guugccuuccaaggcaggc

SEQ ID NO: 2565886 - RNA, 19 nt, Artificial Sequence
  Description of Artificial Sequence: Synthetic oligonucleotide
agcaccucuuugacagucc

SEQ ID NO: 2565887 - RNA, 19 nt, Artificial Sequence
  Description of Artificial Sequence: Synthetic oligonucleotide
ccuucugaguuuuccuugg

SEQ ID NO: 2565888 - RNA, 19 nt, Artificial Sequence
  Description of Artificial Sequence: Synthetic oligonucleotide
ugagcuggacuucgcccca

SEQ ID NO: 2565889 - RNA, 19 nt, Artificial Sequence
  Description of Artificial Sequence: Synthetic oligonucleotide
cucuagcucagcagcuuug

SEQ ID NO: 2565890 - RNA, 19 nt, Artificial Sequence
  Description of Artificial Sequence: Synthetic oligonucleotide
ggucucauccacuuccuuc

SEQ ID NO: 2565891 - RNA, 19 nt, Artificial Sequence
  Description of Artificial Sequence: Synthetic oligonucleotide
uugugcuuuucccgaaauu

SEQ ID NO: 2565892 - RNA, 19 nt, Artificial Sequence
  Description of Artificial Sequence: Synthetic oligonucleotide
ucagcagcuuuggaugcca

SEQ ID NO: 2565893 - RNA, 19 nt, Artificial Sequence
  Description of Artificial Sequence: Synthetic oligonucleotide
guauuugaccaaaacauuu

SEQ ID NO: 2565894 - RNA, 19 nt, Artificial Sequence
  Description of Artificial Sequence: Synthetic oligonucleotide
agcacgccgccaaccaucc

SEQ ID NO: 2565895 - RNA, 19 nt, Artificial Sequence
  Description of Artificial Sequence: Synthetic oligonucleotide
gcugcucuugcucacacga

SEQ ID NO: 2565896 - RNA, 19 nt, Artificial Sequence
  Description of Artificial Sequence: Synthetic oligonucleotide
uaagacgaauguugugcuu

SEQ ID NO: 2565897 - RNA, 19 nt, Artificial Sequence
  Description of Artificial Sequence: Synthetic oligonucleotide
agcaccugcgggucucauc

SEQ ID NO: 2565898 - RNA, 19 nt, Artificial Sequence
  Description of Artificial Sequence: Synthetic oligonucleotide
uaucaaucacuaggcugug

SEQ ID NO: 2565899 - RNA, 19 nt, Artificial Sequence
  Description of Artificial Sequence: Synthetic oligonucleotide
uggaugccaagccccucug

SEQ ID NO: 2565900 - RNA, 19 nt, Artificial Sequence
  Description of Artificial Sequence: Synthetic oligonucleotide
acuuccuucaggguaucaa

SEQ ID NO: 2565901 - RNA, 19 nt, Artificial Sequence
  Description of Artificial Sequence: Synthetic oligonucleotide
cuucuguaucugcucuuug

SEQ ID NO: 2565902 - RNA, 19 nt, Artificial Sequence
  Description of Artificial Sequence: Synthetic oligonucleotide
cgaauguugugcuuuuccc

SEQ ID NO: 2565903 - RNA, 19 nt, Artificial Sequence
  Description of Artificial Sequence: Synthetic oligonucleotide
gcgggucucauccacuucc

SEQ ID NO: 2565904 - RNA, 19 nt, Artificial Sequence
  Description of Artificial Sequence: Synthetic oligonucleotide
caggcagcaccucuuugac

SEQ ID NO: 2565905 - RNA, 19 nt, Artificial Sequence
  Description of Artificial Sequence: Synthetic oligonucleotide
gaagugggaaucaggguua

SEQ ID NO: 2565906 - RNA, 19 nt, Artificial Sequence
  Description of Artificial Sequence: Synthetic oligonucleotide
uaucugcucuuuguugccu

SEQ ID NO: 2565907 - RNA, 19 nt, Artificial Sequence
  Description of Artificial Sequence: Synthetic oligonucleotide
guuuuccuuggcugcuggc

SEQ ID NO: 2565908 - RNA, 19 nt, Artificial Sequence
  Description of Artificial Sequence: Synthetic oligonucleotide
gcugagcuggacuucgccc

SEQ ID NO: 2565909 - RNA, 19 nt, Artificial Sequence
  Description of Artificial Sequence: Synthetic oligonucleotide
ucugcucuuuguugccuuc

SEQ ID NO: 2565910 - RNA, 19 nt, Artificial Sequence
  Description of Artificial Sequence: Synthetic oligonucleotide
acacgaccgcugcuguccg

SEQ ID NO: 2565911 - RNA, 19 nt, Artificial Sequence
  Description of Artificial Sequence: Synthetic oligonucleotide
gcaccucuuugacaguccg

SEQ ID NO: 2565912 - RNA, 19 nt, Artificial Sequence
  Description of Artificial Sequence: Synthetic oligonucleotide
uugccuuccaaggcaggca

SEQ ID NO: 2565913 - RNA, 19 nt, Artificial Sequence
  Description of Artificial Sequence: Synthetic oligonucleotide
cucuugcucacacgaccgc

SEQ ID NO: 2565914 - RNA, 19 nt, Artificial Sequence
  Description of Artificial Sequence: Synthetic oligonucleotide
gugcuuuucccgaaauuca

SEQ ID NO: 2565915 - RNA, 19 nt, Artificial Sequence
  Description of Artificial Sequence: Synthetic oligonucleotide
ggcuguguucauucaauuc

SEQ ID NO: 2565916 - RNA, 19 nt, Artificial Sequence
  Description of Artificial Sequence: Synthetic oligonucleotide
uguuccugccgaaggcgau

SEQ ID NO: 2565917 - RNA, 19 nt, Artificial Sequence
  Description of Artificial Sequence: Synthetic oligonucleotide
aucacuaggcuguguucau

SEQ ID NO: 2565918 - RNA, 19 nt, Artificial Sequence
  Description of Artificial Sequence: Synthetic oligonucleotide
caccucuuugacaguccgc

SEQ ID NO: 2565919 - RNA, 19 nt, Artificial Sequence
  Description of Artificial Sequence: Synthetic oligonucleotide
gcucuugcucacacgaccg

SEQ ID NO: 2565920 - RNA, 19 nt, Artificial Sequence
  Description of Artificial Sequence: Synthetic oligonucleotide
cuguucggccgacaccgcc

SEQ ID NO: 2565921 - RNA, 19 nt, Artificial Sequence
  Description of Artificial Sequence: Synthetic oligonucleotide
ggcgauuaaagccagcaau

SEQ ID NO: 2565922 - RNA, 19 nt, Artificial Sequence
  Description of Artificial Sequence: Synthetic oligonucleotide
aggcgauuaaagccagcaa

SEQ ID NO: 2565923 - RNA, 19 nt, Artificial Sequence
  Description of Artificial Sequence: Synthetic oligonucleotide
cuucaggguaucaaucacu

SEQ ID NO: 2565924 - RNA, 19 nt, Artificial Sequence
  Description of Artificial Sequence: Synthetic oligonucleotide
uucccggugcugcucccgc

SEQ ID NO: 2565925 - RNA, 19 nt, Artificial Sequence
  Description of Artificial Sequence: Synthetic oligonucleotide
cucuuugacaguccgcucu

SEQ ID NO: 2565926 - RNA, 19 nt, Artificial Sequence
  Description of Artificial Sequence: Synthetic oligonucleotide
cagugucucgaugaucuuc

SEQ ID NO: 2565927 - RNA, 19 nt, Artificial Sequence
  Description of Artificial Sequence: Synthetic oligonucleotide
uagaggcuuuaguuccuaa

SEQ ID NO: 2565928 - RNA, 19 nt, Artificial Sequence
  Description of Artificial Sequence: Synthetic oligonucleotide
cagcacgccgccaaccauc

SEQ ID NO: 2565929 - RNA, 19 nt, Artificial Sequence
  Description of Artificial Sequence: Synthetic oligonucleotide
agacgaauguugugcuuuu

SEQ ID NO: 2565930 - RNA, 19 nt, Artificial Sequence
  Description of Artificial Sequence: Synthetic oligonucleotide
ccaaaacauuuaauuaaca

SEQ ID NO: 2565931 - RNA, 19 nt, Artificial Sequence
  Description of Artificial Sequence: Synthetic oligonucleotide
ugacagugucucgaugauc

SEQ ID NO: 2565932 - RNA, 19 nt, Artificial Sequence
  Description of Artificial Sequence: Synthetic oligonucleotide
cuaggcuguguucauucaa

SEQ ID NO: 2565933 - RNA, 19 nt, Artificial Sequence
  Description of Artificial Sequence: Synthetic oligonucleotide
gcuggcuucucaucuuccc

SEQ ID NO: 2565934 - RNA, 19 nt, Artificial Sequence
  Description of Artificial Sequence: Synthetic oligonucleotide
ccgaaggcgauuaaagcca

SEQ ID NO: 2565935 - RNA, 19 nt, Artificial Sequence
  Description of Artificial Sequence: Synthetic oligonucleotide
aucuucuguaucugcucuu

SEQ ID NO: 2565936 - RNA, 19 nt, Artificial Sequence
  Description of Artificial Sequence: Synthetic oligonucleotide
caagccccucuguuccugc

SEQ ID NO: 2565937 - RNA, 19 nt, Artificial Sequence
  Description of Artificial Sequence: Synthetic oligonucleotide
ccucuguuccugccgaagg

SEQ ID NO: 2565938 - RNA, 19 nt, Artificial Sequence
  Description of Artificial Sequence: Synthetic oligonucleotide
agccagcaauuaccuguuc

SEQ ID NO: 2565939 - RNA, 19 nt, Artificial Sequence
  Description of Artificial Sequence: Synthetic oligonucleotide
aagccagcaauuaccuguu

SEQ ID NO: 2565940 - RNA, 19 nt, Artificial Sequence
  Description of Artificial Sequence: Synthetic oligonucleotide
uuagaggcuuuaguuccua

SEQ ID NO: 2565941 - RNA, 19 nt, Artificial Sequence
  Description of Artificial Sequence: Synthetic oligonucleotide
agagaccagcacuccugcu

SEQ ID NO: 2565942 - RNA, 19 nt, Artificial Sequence
  Description of Artificial Sequence: Synthetic oligonucleotide
auguugugcuuuucccgaa

SEQ ID NO: 2565943 - RNA, 19 nt, Artificial Sequence
  Description of Artificial Sequence: Synthetic oligonucleotide
ccauaagacgaauguugug

SEQ ID NO: 2565944 - RNA, 19 nt, Artificial Sequence
  Description of Artificial Sequence: Synthetic oligonucleotide
gaugccaagccccucuguu

SEQ ID NO: 2565945 - RNA, 19 nt, Artificial Sequence
  Description of Artificial Sequence: Synthetic oligonucleotide
uucgccccagccccuucug

SEQ ID NO: 2565946 - RNA, 19 nt, Artificial Sequence
  Description of Artificial Sequence: Synthetic oligonucleotide
guucggccgacaccgcccc

SEQ ID NO: 2565947 - RNA, 19 nt, Artificial Sequence
  Description of Artificial Sequence: Synthetic oligonucleotide
gccgccaaccauccgguag

SEQ ID NO: 2565948 - RNA, 19 nt, Artificial Sequence
  Description of Artificial Sequence: Synthetic oligonucleotide
ugcucacacgaccgcugcu

SEQ ID NO: 2565949 - RNA, 19 nt, Artificial Sequence
  Description of Artificial Sequence: Synthetic oligonucleotide
cugcucuugcucacacgac

SEQ ID NO: 2565950 - RNA, 19 nt, Artificial Sequence
  Description of Artificial Sequence: Synthetic oligonucleotide
guccgcucuaccagcacgc

SEQ ID NO: 2565951 - RNA, 19 nt, Artificial Sequence
  Description of Artificial Sequence: Synthetic oligonucleotide
ccgaaauucauugaguucu

SEQ ID NO: 2565952 - RNA, 19 nt, Artificial Sequence
  Description of Artificial Sequence: Synthetic oligonucleotide
uaccagcacgccgccaacc

SEQ ID NO: 2565953 - RNA, 19 nt, Artificial Sequence
  Description of Artificial Sequence: Synthetic oligonucleotide
cgcucuaccagcacgccgc

SEQ ID NO: 2565954 - RNA, 19 nt, Artificial Sequence
  Description of Artificial Sequence: Synthetic oligonucleotide
cugcugugacagugucucg

SEQ ID NO: 2565955 - RNA, 19 nt, Artificial Sequence
  Description of Artificial Sequence: Synthetic oligonucleotide
aagugggaaucaggguuaa

SEQ ID NO: 2565956 - RNA, 19 nt, Artificial Sequence
  Description of Artificial Sequence: Synthetic oligonucleotide
cuuugccugaagcugcugu

SEQ ID NO: 2565957 - RNA, 19 nt, Artificial Sequence
  Description of Artificial Sequence: Synthetic oligonucleotide
aggcagcaccucuuugaca

SEQ ID NO: 2565958 - RNA, 19 nt, Artificial Sequence
  Description of Artificial Sequence: Synthetic oligonucleotide
cuguuccugccgaaggcga

SEQ ID NO: 2565959 - RNA, 19 nt, Artificial Sequence
  Description of Artificial Sequence: Synthetic oligonucleotide
cccgaaauucauugaguuc

SEQ ID NO: 2565960 - RNA, 19 nt, Artificial Sequence
  Description of Artificial Sequence: Synthetic oligonucleotide
gaccagcacuccugcugag

SEQ ID NO: 2565961 - RNA, 19 nt, Artificial Sequence
  Description of Artificial Sequence: Synthetic oligonucleotide
cuaagagaccagcacuccu

SEQ ID NO: 2565962 - RNA, 19 nt, Artificial Sequence
  Description of Artificial Sequence: Synthetic oligonucleotide
aaccauccgguagcaccug

SEQ ID NO: 2565963 - RNA, 19 nt, Artificial Sequence
  Description of Artificial Sequence: Synthetic oligonucleotide
uuuggaugccaagccccuc

SEQ ID NO: 2565964 - RNA, 19 nt, Artificial Sequence
  Description of Artificial Sequence: Synthetic oligonucleotide
cagcaccucuuugacaguc

SEQ ID NO: 2565965 - RNA, 19 nt, Artificial Sequence
  Description of Artificial Sequence: Synthetic oligonucleotide
ugcgggucucauccacuuc

SEQ ID NO: 2565966 - RNA, 19 nt, Artificial Sequence
  Description of Artificial Sequence: Synthetic oligonucleotide
caaccauccgguagcaccu

SEQ ID NO: 2565967 - RNA, 19 nt, Artificial Sequence
  Description of Artificial Sequence: Synthetic oligonucleotide
ccccuuugccugaagcugc

SEQ ID NO: 2565968 - RNA, 19 nt, Artificial Sequence
  Description of Artificial Sequence: Synthetic oligonucleotide
aaggcaggcagcaccucuu

SEQ ID NO: 2565969 - RNA, 19 nt, Artificial Sequence
  Description of Artificial Sequence: Synthetic oligonucleotide
auuaccuguucggccgaca

SEQ ID NO: 2565970 - RNA, 19 nt, Artificial Sequence
  Description of Artificial Sequence: Synthetic oligonucleotide
acuucgccccagccccuuc

SEQ ID NO: 2565971 - RNA, 19 nt, Artificial Sequence
  Description of Artificial Sequence: Synthetic oligonucleotide
ccugcugagcuggacuucg

SEQ ID NO: 2565972 - RNA, 19 nt, Artificial Sequence
  Description of Artificial Sequence: Synthetic oligonucleotide
ucacacgaccgcugcuguc

SEQ ID NO: 2565973 - RNA, 19 nt, Artificial Sequence
  Description of Artificial Sequence: Synthetic oligonucleotide
ccauccgguagcaccugcg

SEQ ID NO: 2565974 - RNA, 19 nt, Artificial Sequence
  Description of Artificial Sequence: Synthetic oligonucleotide
cuuugacaguccgcucuac

SEQ ID NO: 2565975 - RNA, 19 nt, Artificial Sequence
  Description of Artificial Sequence: Synthetic oligonucleotide
cuagcucagcagcuuugga

SEQ ID NO: 2565976 - RNA, 19 nt, Artificial Sequence
  Description of Artificial Sequence: Synthetic oligonucleotide
uccgcucuaccagcacgcc

SEQ ID NO: 2565977 - RNA, 19 nt, Artificial Sequence
  Description of Artificial Sequence: Synthetic oligonucleotide
ccuaagagaccagcacucc

SEQ ID NO: 2565978 - RNA, 19 nt, Artificial Sequence
  Description of Artificial Sequence: Synthetic oligonucleotide
caauuaccuguucggccga

SEQ ID NO: 2565979 - RNA, 19 nt, Artificial Sequence
  Description of Artificial Sequence: Synthetic oligonucleotide
cuucccggugcugcucccg

SEQ ID NO: 2565980 - RNA, 19 nt, Artificial Sequence
  Description of Artificial Sequence: Synthetic oligonucleotide
gugucucgaugaucuucug

SEQ ID NO: 2565981 - RNA, 19 nt, Artificial Sequence
  Description of Artificial Sequence: Synthetic oligonucleotide
ccgccaaccauccgguagc

SEQ ID NO: 2565982 - RNA, 19 nt, Artificial Sequence
  Description of Artificial Sequence: Synthetic oligonucleotide
cuuuggaugccaagccccu

SEQ ID NO: 2565983 - RNA, 19 nt, Artificial Sequence
  Description of Artificial Sequence: Synthetic oligonucleotide
uuccugccgaaggcgauua

SEQ ID NO: 2565984 - RNA, 19 nt, Artificial Sequence
  Description of Artificial Sequence: Synthetic oligonucleotide
gcucacacgaccgcugcug

SEQ ID NO: 2565985 - RNA, 19 nt, Artificial Sequence
  Description of Artificial Sequence: Synthetic oligonucleotide
guugugcuuuucccgaaau

SEQ ID NO: 2565986 - RNA, 19 nt, Artificial Sequence
  Description of Artificial Sequence: Synthetic oligonucleotide
ucacuaggcuguguucauu

SEQ ID NO: 2565987 - RNA, 19 nt, Artificial Sequence
  Description of Artificial Sequence: Synthetic oligonucleotide
acaguccgcucuaccagca

SEQ ID NO: 2565988 - RNA, 19 nt, Artificial Sequence
  Description of Artificial Sequence: Synthetic oligonucleotide
cuaccagcacgccgccaac

SEQ ID NO: 2565989 - RNA, 19 nt, Artificial Sequence
  Description of Artificial Sequence: Synthetic oligonucleotide
cuuccaaggcaggcagcac

SEQ ID NO: 2565990 - RNA, 19 nt, Artificial Sequence
  Description of Artificial Sequence: Synthetic oligonucleotide
acagugucucgaugaucuu

SEQ ID NO: 2565991 - RNA, 19 nt, Artificial Sequence
  Description of Artificial Sequence: Synthetic oligonucleotide
gcuggacuucgccccagcc

SEQ ID NO: 2565992 - RNA, 19 nt, Artificial Sequence
  Description of Artificial Sequence: Synthetic oligonucleotide
accgcugcuguccgccaau

SEQ ID NO: 2565993 - RNA, 19 nt, Artificial Sequence
  Description of Artificial Sequence: Synthetic oligonucleotide
ggcaggcagcaccucuuug

SEQ ID NO: 2565994 - RNA, 19 nt, Artificial Sequence
  Description of Artificial Sequence: Synthetic oligonucleotide
caguccgcucuaccagcac

SEQ ID NO: 2565995 - RNA, 19 nt, Artificial Sequence
  Description of Artificial Sequence: Synthetic oligonucleotide
gagcuggacuucgccccag

SEQ ID NO: 2565996 - RNA, 19 nt, Artificial Sequence
  Description of Artificial Sequence: Synthetic oligonucleotide
uccugccgaaggcgauuaa

SEQ ID NO: 2565997 - RNA, 19 nt, Artificial Sequence
  Description of Artificial Sequence: Synthetic oligonucleotide
aggcaggcagcaccucuuu

SEQ ID NO: 2565998 - RNA, 19 nt, Artificial Sequence
  Description of Artificial Sequence: Synthetic oligonucleotide
gugacagugucucgaugau

SEQ ID NO: 2565999 - RNA, 19 nt, Artificial Sequence
  Description of Artificial Sequence: Synthetic oligonucleotide
cccauaagacgaauguugu

SEQ ID NO: 2566000 - RNA, 19 nt, Artificial Sequence
  Description of Artificial Sequence: Synthetic oligonucleotide
ucccggugcugcucccgcu

SEQ ID NO: 2566001 - RNA, 19 nt, Artificial Sequence
  Description of Artificial Sequence: Synthetic oligonucleotide
cacgaccgcugcuguccgc

SEQ ID NO: 2566002 - RNA, 19 nt, Artificial Sequence
  Description of Artificial Sequence: Synthetic oligonucleotide
ccgcucuaccagcacgccg

SEQ ID NO: 2566003 - RNA, 19 nt, Artificial Sequence
  Description of Artificial Sequence: Synthetic oligonucleotide
ggguaucaaucacuaggcu

SEQ ID NO: 2566004 - RNA, 19 nt, Artificial Sequence
  Description of Artificial Sequence: Synthetic oligonucleotide
gguagcaccugcgggucuc

SEQ ID NO: 2566005 - RNA, 19 nt, Artificial Sequence
  Description of Artificial Sequence: Synthetic oligonucleotide
cacuccugcugagcuggac

SEQ ID NO: 2566006 - RNA, 19 nt, Artificial Sequence
  Description of Artificial Sequence: Synthetic oligonucleotide
gccugaagcugcugugaca

SEQ ID NO: 2566007 - RNA, 19 nt, Artificial Sequence
  Description of Artificial Sequence: Synthetic oligonucleotide
ccuuccaaggcaggcagca

SEQ ID NO: 2566008 - RNA, 19 nt, Artificial Sequence
  Description of Artificial Sequence: Synthetic oligonucleotide
gaccgcugcuguccgccaa

SEQ ID NO: 2566009 - RNA, 19 nt, Artificial Sequence
  Description of Artificial Sequence: Synthetic oligonucleotide
cauugaguucuuuccccuu

SEQ ID NO: 2566010 - RNA, 19 nt, Artificial Sequence
  Description of Artificial Sequence: Synthetic oligonucleotide
agugggaaucaggguuaaa

SEQ ID NO: 2566011 - RNA, 19 nt, Artificial Sequence
  Description of Artificial Sequence: Synthetic oligonucleotide
gcgauuaaagccagcaauu

SEQ ID NO: 2566012 - RNA, 19 nt, Artificial Sequence
  Description of Artificial Sequence: Synthetic oligonucleotide
acgccgccaaccauccggu

SEQ ID NO: 2566013 - RNA, 19 nt, Artificial Sequence
  Description of Artificial Sequence: Synthetic oligonucleotide
cauccacuuccuucagggu

SEQ ID NO: 2566014 - RNA, 19 nt, Artificial Sequence
  Description of Artificial Sequence: Synthetic oligonucleotide
gcucuaccagcacgccgcc

SEQ ID NO: 2566015 - RNA, 19 nt, Artificial Sequence
  Description of Artificial Sequence: Synthetic oligonucleotide
cccuucccggugcugcucc

SEQ ID NO: 2566016 - RNA, 19 nt, Artificial Sequence
  Description of Artificial Sequence: Synthetic oligonucleotide
gcugcucccgcugcucuug

SEQ ID NO: 2566017 - RNA, 19 nt, Artificial Sequence
  Description of Artificial Sequence: Synthetic oligonucleotide
ccucuuugacaguccgcuc

SEQ ID NO: 2566018 - RNA, 19 nt, Artificial Sequence
  Description of Artificial Sequence: Synthetic oligonucleotide
cucacacgaccgcugcugu

SEQ ID NO: 2566019 - RNA, 19 nt, Artificial Sequence
  Description of Artificial Sequence: Synthetic oligonucleotide
gcugcuguccgccaaucuu

SEQ ID NO: 2566020 - RNA, 19 nt, Artificial Sequence
  Description of Artificial Sequence: Synthetic oligonucleotide
cgaugaucuucuguaucug

SEQ ID NO: 2566021 - RNA, 19 nt, Artificial Sequence
  Description of Artificial Sequence: Synthetic oligonucleotide
cccucuguuccugccgaag

SEQ ID NO: 2566022 - RNA, 19 nt, Artificial Sequence
  Description of Artificial Sequence: Synthetic oligonucleotide
gccccucuguuccugccga

SEQ ID NO: 2566023 - RNA, 19 nt, Artificial Sequence
  Description of Artificial Sequence: Synthetic oligonucleotide
guagcaccugcgggucuca

SEQ ID NO: 2566024 - RNA, 19 nt, Artificial Sequence
  Description of Artificial Sequence: Synthetic oligonucleotide
cagcagcuuuggaugccaa

SEQ ID NO: 2566025 - RNA, 19 nt, Artificial Sequence
  Description of Artificial Sequence: Synthetic oligonucleotide
gcugugacagugucucgau

SEQ ID NO: 2566026 - RNA, 19 nt, Artificial Sequence
  Description of Artificial Sequence: Synthetic oligonucleotide
ccagcacuccugcugagcu

SEQ ID NO: 2566027 - RNA, 19 nt, Artificial Sequence
  Description of Artificial Sequence: Synthetic oligonucleotide
cacuuccuucaggguauca

SEQ ID NO: 2566028 - RNA, 19 nt, Artificial Sequence
  Description of Artificial Sequence: Synthetic oligonucleotide
ccuguucggccgacaccgc

SEQ ID NO: 2566029 - RNA, 19 nt, Artificial Sequence
  Description of Artificial Sequence: Synthetic oligonucleotide
cgcugcucuugcucacacg

SEQ ID NO: 2566030 - RNA, 19 nt, Artificial Sequence
  Description of Artificial Sequence: Synthetic oligonucleotide
cgauuaaagccagcaauua

SEQ ID NO: 2566031 - RNA, 19 nt, Artificial Sequence
  Description of Artificial Sequence: Synthetic oligonucleotide
cccggugcugcucccgcug

SEQ ID NO: 2566032 - RNA, 19 nt, Artificial Sequence
  Description of Artificial Sequence: Synthetic oligonucleotide
cuucgccccagccccuucu

SEQ ID NO: 2566033 - RNA, 19 nt, Artificial Sequence
  Description of Artificial Sequence: Synthetic oligonucleotide
gccccuucugaguuuuccu

SEQ ID NO: 2566034 - RNA, 19 nt, Artificial Sequence
  Description of Artificial Sequence: Synthetic oligonucleotide
caccugcgggucucaucca

SEQ ID NO: 2566035 - RNA, 19 nt, Artificial Sequence
  Description of Artificial Sequence: Synthetic oligonucleotide
ccaagccccucuguuccug

SEQ ID NO: 2566036 - RNA, 19 nt, Artificial Sequence
  Description of Artificial Sequence: Synthetic oligonucleotide
cagccccuucugaguuuuc

SEQ ID NO: 2566037 - RNA, 19 nt, Artificial Sequence
  Description of Artificial Sequence: Synthetic oligonucleotide
cugcgggucucauccacuu

SEQ ID NO: 2566038 - RNA, 19 nt, Artificial Sequence
  Description of Artificial Sequence: Synthetic oligonucleotide
gccuuccaaggcaggcagc

SEQ ID NO: 2566039 - RNA, 19 nt, Artificial Sequence
  Description of Artificial Sequence: Synthetic oligonucleotide
ccugccgaaggcgauuaaa

SEQ ID NO: 2566040 - RNA, 19 nt, Artificial Sequence
  Description of Artificial Sequence: Synthetic oligonucleotide
cugaagcugcugugacagu

SEQ ID NO: 2566041 - RNA, 19 nt, Artificial Sequence
  Description of Artificial Sequence: Synthetic oligonucleotide
ccuucccggugcugcuccc

SEQ ID NO: 2566042 - RNA, 19 nt, Artificial Sequence
  Description of Artificial Sequence: Synthetic oligonucleotide
ggaugccaagccccucugu

SEQ ID NO: 2566043 - RNA, 19 nt, Artificial Sequence
  Description of Artificial Sequence: Synthetic oligonucleotide
gcacgccgccaaccauccg

SEQ ID NO: 2566044 - RNA, 19 nt, Artificial Sequence
  Description of Artificial Sequence: Synthetic oligonucleotide
cucuaccagcacgccgcca

SEQ ID NO: 2566045 - RNA, 19 nt, Artificial Sequence
  Description of Artificial Sequence: Synthetic oligonucleotide
gcuuuucccgaaauucauu

SEQ ID NO: 2566046 - RNA, 19 nt, Artificial Sequence
  Description of Artificial Sequence: Synthetic oligonucleotide
guuccugccgaaggcgauu

SEQ ID NO: 2566047 - RNA, 19 nt, Artificial Sequence
  Description of Artificial Sequence: Synthetic oligonucleotide
ccgguagcaccugcggguc

SEQ ID NO: 2566048 - RNA, 19 nt, Artificial Sequence
  Description of Artificial Sequence: Synthetic oligonucleotide
gcacaauagcagagaaaau

SEQ ID NO: 2566049 - RNA, 19 nt, Artificial Sequence
  Description of Artificial Sequence: Synthetic oligonucleotide
gccaaccauccgguagcac

SEQ ID NO: 2566050 - RNA, 19 nt, Artificial Sequence
  Description of Artificial Sequence: Synthetic oligonucleotide
gccccagccccuucugagu

SEQ ID NO: 2566051 - RNA, 19 nt, Artificial Sequence
  Description of Artificial Sequence: Synthetic oligonucleotide
ccccuucugaguuuuccuu

SEQ ID NO: 2566052 - RNA, 19 nt, Artificial Sequence
  Description of Artificial Sequence: Synthetic oligonucleotide
ccaaggcaggcagcaccuc

SEQ ID NO: 2566053 - RNA, 19 nt, Artificial Sequence
  Description of Artificial Sequence: Synthetic oligonucleotide
gcagcaccucuuugacagu

SEQ ID NO: 2566054 - RNA, 19 nt, Artificial Sequence
  Description of Artificial Sequence: Synthetic oligonucleotide
ccugcgggucucauccacu

SEQ ID NO: 2566055 - RNA, 19 nt, Artificial Sequence
  Description of Artificial Sequence: Synthetic oligonucleotide
gacuucgccccagccccuu

SEQ ID NO: 2566056 - RNA, 19 nt, Artificial Sequence
  Description of Artificial Sequence: Synthetic oligonucleotide
gggucucauccacuuccuu

SEQ ID NO: 2566057 - RNA, 19 nt, Artificial Sequence
  Description of Artificial Sequence: Synthetic oligonucleotide
gccaagccccucuguuccu

SEQ ID NO: 2566058 - RNA, 19 nt, Artificial Sequence
  Description of Artificial Sequence: Synthetic oligonucleotide
ccgcugcuguccgccaauc

SEQ ID NO: 2566059 - RNA, 19 nt, Artificial Sequence
  Description of Artificial Sequence: Synthetic oligonucleotide
cccgcugcucuugcucaca

SEQ ID NO: 2566060 - RNA, 19 nt, Artificial Sequence
  Description of Artificial Sequence: Synthetic oligonucleotide
ccccuucccggugcugcuc

SEQ ID NO: 2566061 - RNA, 19 nt, Artificial Sequence
  Description of Artificial Sequence: Synthetic oligonucleotide
cgggucucauccacuuccu

SEQ ID NO: 2566062 - RNA, 19 nt, Artificial Sequence
  Description of Artificial Sequence: Synthetic oligonucleotide
ccccagccccuucugaguu

SEQ ID NO: 2566063 - RNA, 19 nt, Artificial Sequence
  Description of Artificial Sequence: Synthetic oligonucleotide
ggacuucgccccagccccu

SEQ ID NO: 2566064 - RNA, 19 nt, Artificial Sequence
  Description of Artificial Sequence: Synthetic oligonucleotide
ccagcacgccgccaaccau

SEQ ID NO: 2566065 - RNA, 19 nt, Artificial Sequence
  Description of Artificial Sequence: Synthetic oligonucleotide
ccccucuguuccugccgaa

SEQ ID NO: 2566066 - RNA, 19 nt, Artificial Sequence
  Description of Artificial Sequence: Synthetic oligonucleotide
ccagccccuucugaguuuu

SEQ ID NO: 2566067 - RNA, 19 nt, Artificial Sequence
  Description of Artificial Sequence: Synthetic oligonucleotide
cgaccgcugcuguccgcca

SEQ ID NO: 2566068 - RNA, 19 nt, Artificial Sequence
  Description of Artificial Sequence: Synthetic oligonucleotide
cgccaaccauccgguagca

SEQ ID NO: 2566069 - RNA, 19 nt, Artificial Sequence
  Description of Artificial Sequence: Synthetic oligonucleotide
cgcugcuguccgccaaucu

SEQ ID NO: 2566070 - RNA, 19 nt, Artificial Sequence
  Description of Artificial Sequence: Synthetic oligonucleotide
cgguagcaccugcgggucu

SEQ ID NO: 2566071 - RNA, 19 nt, Artificial Sequence
  Description of Artificial Sequence: Synthetic oligonucleotide
cgccgccaaccauccggua

SEQ ID NO: 2566072 - RNA, 19 nt, Artificial Sequence
  Description of Artificial Sequence: Synthetic oligonucleotide
aacauugucaguuaaaggu

SEQ ID NO: 2566073 - RNA, 19 nt, Artificial Sequence
  Description of Artificial Sequence: Synthetic oligonucleotide
ucaguuaaagguuuucugg

SEQ ID NO: 2566074 - RNA, 19 nt, Artificial Sequence
  Description of Artificial Sequence: Synthetic oligonucleotide
aaacauugucaguuaaagg

SEQ ID NO: 2566075 - RNA, 19 nt, Artificial Sequence
  Description of Artificial Sequence: Synthetic oligonucleotide
ucaucagacuucaauaaac

SEQ ID NO: 2566076 - RNA, 19 nt, Artificial Sequence
  Description of Artificial Sequence: Synthetic oligonucleotide
uccucgguuauuuucaccc

SEQ ID NO: 2566077 - RNA, 19 nt, Artificial Sequence
  Description of Artificial Sequence: Synthetic oligonucleotide
auuuucacccucaucagac

SEQ ID NO: 2566078 - RNA, 19 nt, Artificial Sequence
  Description of Artificial Sequence: Synthetic oligonucleotide
uggucuuccucgauaauag

SEQ ID NO: 2566079 - RNA, 19 nt, Artificial Sequence
  Description of Artificial Sequence: Synthetic oligonucleotide
uuauuuucacccucaucag

SEQ ID NO: 2566080 - RNA, 19 nt, Artificial Sequence
  Description of Artificial Sequence: Synthetic oligonucleotide
uauuuucacccucaucaga

SEQ ID NO: 2566081 - RNA, 19 nt, Artificial Sequence
  Description of Artificial Sequence: Synthetic oligonucleotide
gucaguuaaagguuuucug

SEQ ID NO: 2566082 - RNA, 19 nt, Artificial Sequence
  Description of Artificial Sequence: Synthetic oligonucleotide
aguuaaagguuuucuggca

SEQ ID NO: 2566083 - RNA, 19 nt, Artificial Sequence
  Description of Artificial Sequence: Synthetic oligonucleotide
guuaaagguuuucuggcac

SEQ ID NO: 2566084 - RNA, 19 nt, Artificial Sequence
  Description of Artificial Sequence: Synthetic oligonucleotide
ucgguuauuuucacccuca

SEQ ID NO: 2566085 - RNA, 19 nt, Artificial Sequence
  Description of Artificial Sequence: Synthetic oligonucleotide
ugucaguuaaagguuuucu

SEQ ID NO: 2566086 - RNA, 19 nt, Artificial Sequence
  Description of Artificial Sequence: Synthetic oligonucleotide
uucuggucuuccucgauaa

SEQ ID NO: 2566087 - RNA, 19 nt, Artificial Sequence
  Description of Artificial Sequence: Synthetic oligonucleotide
uuucacccucaucagacuu

SEQ ID NO: 2566088 - RNA, 19 nt, Artificial Sequence
  Description of Artificial Sequence: Synthetic oligonucleotide
uuucuggucuuccucgaua

SEQ ID NO: 2566089 - RNA, 19 nt, Artificial Sequence
  Description of Artificial Sequence: Synthetic oligonucleotide
uuuucacccucaucagacu

SEQ ID NO: 2566090 - RNA, 19 nt, Artificial Sequence
  Description of Artificial Sequence: Synthetic oligonucleotide
acguccauuuguuucuggu

SEQ ID NO: 2566091 - RNA, 19 nt, Artificial Sequence
  Description of Artificial Sequence: Synthetic oligonucleotide
acccucaucagacuucaau

SEQ ID NO: 2566092 - RNA, 19 nt, Artificial Sequence
  Description of Artificial Sequence: Synthetic oligonucleotide
gacguccauuuguuucugg

SEQ ID NO: 2566093 - RNA, 19 nt, Artificial Sequence
  Description of Artificial Sequence: Synthetic oligonucleotide
cauuuguuucuggucuucc

SEQ ID NO: 2566094 - RNA, 19 nt, Artificial Sequence
  Description of Artificial Sequence: Synthetic oligonucleotide
guccauuuguuucuggucu

SEQ ID NO: 2566095 - RNA, 19 nt, Artificial Sequence
  Description of Artificial Sequence: Synthetic oligonucleotide
ucacccucaucagacuuca

SEQ ID NO: 2566096 - RNA, 19 nt, Artificial Sequence
  Description of Artificial Sequence: Synthetic oligonucleotide
cucgguuauuuucacccuc

SEQ ID NO: 2566097 - RNA, 19 nt, Artificial Sequence
  Description of Artificial Sequence: Synthetic oligonucleotide
acauugucaguuaaagguu

SEQ ID NO: 2566098 - RNA, 19 nt, Artificial Sequence
  Description of Artificial Sequence: Synthetic oligonucleotide
caucagacuucaauaaacu

SEQ ID NO: 2566099 - RNA, 19 nt, Artificial Sequence
  Description of Artificial Sequence: Synthetic oligonucleotide
uugucaguuaaagguuuuc

SEQ ID NO: 2566100 - RNA, 19 nt, Artificial Sequence
  Description of Artificial Sequence: Synthetic oligonucleotide
cucaucagacuucaauaaa

SEQ ID NO: 2566101 - RNA, 19 nt, Artificial Sequence
  Description of Artificial Sequence: Synthetic oligonucleotide
uccauuuguuucuggucuu

SEQ ID NO: 2566102 - RNA, 19 nt, Artificial Sequence
  Description of Artificial Sequence: Synthetic oligonucleotide
gguuauuuucacccucauc

SEQ ID NO: 2566103 - RNA, 19 nt, Artificial Sequence
  Description of Artificial Sequence: Synthetic oligonucleotide
gucuuccucgauaauagcu

SEQ ID NO: 2566104 - RNA, 19 nt, Artificial Sequence
  Description of Artificial Sequence: Synthetic oligonucleotide
ggucuuccucgauaauagc

SEQ ID NO: 2566105 - RNA, 19 nt, Artificial Sequence
  Description of Artificial Sequence: Synthetic oligonucleotide
cuggucuuccucgauaaua

SEQ ID NO: 2566106 - RNA, 19 nt, Artificial Sequence
  Description of Artificial Sequence: Synthetic oligonucleotide
auugucaguuaaagguuuu

SEQ ID NO: 2566107 - RNA, 19 nt, Artificial Sequence
  Description of Artificial Sequence: Synthetic oligonucleotide
cccucaucagacuucaaua

SEQ ID NO: 2566108 - RNA, 19 nt, Artificial Sequence
  Description of Artificial Sequence: Synthetic oligonucleotide
cguccauuuguuucugguc

SEQ ID NO: 2566109 - RNA, 19 nt, Artificial Sequence
  Description of Artificial Sequence: Synthetic oligonucleotide
guuucuggucuuccucgau

SEQ ID NO: 2566110 - RNA, 19 nt, Artificial Sequence
  Description of Artificial Sequence: Synthetic oligonucleotide
ggacguccauuuguuucug

SEQ ID NO: 2566111 - RNA, 19 nt, Artificial Sequence
  Description of Artificial Sequence: Synthetic oligonucleotide
ccauuuguuucuggucuuc

SEQ ID NO: 2566112 - RNA, 19 nt, Artificial Sequence
  Description of Artificial Sequence: Synthetic oligonucleotide
ccucgguuauuuucacccu

SEQ ID NO: 2566113 - RNA, 19 nt, Artificial Sequence
  Description of Artificial Sequence: Synthetic oligonucleotide
cacccucaucagacuucaa

SEQ ID NO: 2566114 - RNA, 19 nt, Artificial Sequence
  Description of Artificial Sequence: Synthetic oligonucleotide
cgguuauuuucacccucau

SEQ ID NO: 2566115 - RNA, 19 nt, Artificial Sequence
  Description of Artificial Sequence: Synthetic oligonucleotide
uuucuuaaaguuuagagag

SEQ ID NO: 2566116 - RNA, 19 nt, Artificial Sequence
  Description of Artificial Sequence: Synthetic oligonucleotide
aaauuuauagcucaucaug

SEQ ID NO: 2566117 - RNA, 19 nt, Artificial Sequence
  Description of Artificial Sequence: Synthetic oligonucleotide
aaauacaguaaguacuaac

SEQ ID NO: 2566118 - RNA, 19 nt, Artificial Sequence
  Description of Artificial Sequence: Synthetic oligonucleotide
ucaaaauacaguaaguacu

SEQ ID NO: 2566119 - RNA, 19 nt, Artificial Sequence
  Description of Artificial Sequence: Synthetic oligonucleotide
uuucguuugucccugagcg

SEQ ID NO: 2566120 - RNA, 19 nt, Artificial Sequence
  Description of Artificial Sequence: Synthetic oligonucleotide
uuuaguaaaggaaacaaau

SEQ ID NO: 2566121 - RNA, 19 nt, Artificial Sequence
  Description of Artificial Sequence: Synthetic oligonucleotide
uuauagcucaucauguugg

SEQ ID NO: 2566122 - RNA, 19 nt, Artificial Sequence
  Description of Artificial Sequence: Synthetic oligonucleotide
ucaaucucaaacaucagug

SEQ ID NO: 2566123 - RNA, 19 nt, Artificial Sequence
  Description of Artificial Sequence: Synthetic oligonucleotide
aauaucuucucauaaggga

SEQ ID NO: 2566124 - RNA, 19 nt, Artificial Sequence
  Description of Artificial Sequence: Synthetic oligonucleotide
aagaacaaaccauuugggg

SEQ ID NO: 2566125 - RNA, 19 nt, Artificial Sequence
  Description of Artificial Sequence: Synthetic oligonucleotide
uuuucuuaaaguuuagaga

SEQ ID NO: 2566126 - RNA, 19 nt, Artificial Sequence
  Description of Artificial Sequence: Synthetic oligonucleotide
uuuuggagcaguuuucugg

SEQ ID NO: 2566127 - RNA, 19 nt, Artificial Sequence
  Description of Artificial Sequence: Synthetic oligonucleotide
aacuucuauuuucacuucc

SEQ ID NO: 2566128 - RNA, 19 nt, Artificial Sequence
  Description of Artificial Sequence: Synthetic oligonucleotide
aaaguuuagagaguugccg

SEQ ID NO: 2566129 - RNA, 19 nt, Artificial Sequence
  Description of Artificial Sequence: Synthetic oligonucleotide
uuauguuuaguaaaggaaa

SEQ ID NO: 2566130 - RNA, 19 nt, Artificial Sequence
  Description of Artificial Sequence: Synthetic oligonucleotide
aaguuuagagaguugccgg

SEQ ID NO: 2566131 - RNA, 19 nt, Artificial Sequence
  Description of Artificial Sequence: Synthetic oligonucleotide
auaaauuuauagcucauca

SEQ ID NO: 2566132 - RNA, 19 nt, Artificial Sequence
  Description of Artificial Sequence: Synthetic oligonucleotide
uaaaauaaauuuauagcuc

SEQ ID NO: 2566133 - RNA, 19 nt, Artificial Sequence
  Description of Artificial Sequence: Synthetic oligonucleotide
uuaaaguuuagagaguugc

SEQ ID NO: 2566134 - RNA, 19 nt, Artificial Sequence
  Description of Artificial Sequence: Synthetic oligonucleotide
cugaauaggaaaugcaugg

SEQ ID NO: 2566135 - RNA, 19 nt, Artificial Sequence
  Description of Artificial Sequence: Synthetic oligonucleotide
uuccauaugcaaacgaagg

SEQ ID NO: 2566136 - RNA, 19 nt, Artificial Sequence
  Description of Artificial Sequence: Synthetic oligonucleotide
ucuauuuucacuuccucug

SEQ ID NO: 2566137 - RNA, 19 nt, Artificial Sequence
  Description of Artificial Sequence: Synthetic oligonucleotide
ugcaguagaauuuggagcc

SEQ ID NO: 2566138 - RNA, 19 nt, Artificial Sequence
  Description of Artificial Sequence: Synthetic oligonucleotide
aauaggaaaugcaugguuc

SEQ ID NO: 2566139 - RNA, 19 nt, Artificial Sequence
  Description of Artificial Sequence: Synthetic oligonucleotide
uaaguacuaacaaauaaaa

SEQ ID NO: 2566140 - RNA, 19 nt, Artificial Sequence
  Description of Artificial Sequence: Synthetic oligonucleotide
auaggaaaugcaugguucc

SEQ ID NO: 2566141 - RNA, 19 nt, Artificial Sequence
  Description of Artificial Sequence: Synthetic oligonucleotide
uaguaaaggaaacaaauau

SEQ ID NO: 2566142 - RNA, 19 nt, Artificial Sequence
  Description of Artificial Sequence: Synthetic oligonucleotide
aauaaauuuauagcucauc

SEQ ID NO: 2566143 - RNA, 19 nt, Artificial Sequence
  Description of Artificial Sequence: Synthetic oligonucleotide
aauguuucaaugcuccgug

SEQ ID NO: 2566144 - RNA, 19 nt, Artificial Sequence
  Description of Artificial Sequence: Synthetic oligonucleotide
aauacaguaaguacuaaca

SEQ ID NO: 2566145 - RNA, 19 nt, Artificial Sequence
  Description of Artificial Sequence: Synthetic oligonucleotide
uuuauagcucaucauguug

SEQ ID NO: 2566146 - RNA, 19 nt, Artificial Sequence
  Description of Artificial Sequence: Synthetic oligonucleotide
ugagcguuagaacagcucc

SEQ ID NO: 2566147 - RNA, 19 nt, Artificial Sequence
  Description of Artificial Sequence: Synthetic oligonucleotide
guaaugggcauuuagcaag

SEQ ID NO: 2566148 - RNA, 19 nt, Artificial Sequence
  Description of Artificial Sequence: Synthetic oligonucleotide
uccauaugcaaacgaaggg

SEQ ID NO: 2566149 - RNA, 19 nt, Artificial Sequence
  Description of Artificial Sequence: Synthetic oligonucleotide
aaaggaaaccacaaccugg

SEQ ID NO: 2566150 - RNA, 19 nt, Artificial Sequence
  Description of Artificial Sequence: Synthetic oligonucleotide
aaauuauguuuaguaaagg

SEQ ID NO: 2566151 - RNA, 19 nt, Artificial Sequence
  Description of Artificial Sequence: Synthetic oligonucleotide
ugucuauuuccuuaaaugu

SEQ ID NO: 2566152 - RNA, 19 nt, Artificial Sequence
  Description of Artificial Sequence: Synthetic oligonucleotide
uuuccauaugcaaacgaag

SEQ ID NO: 2566153 - RNA, 19 nt, Artificial Sequence
  Description of Artificial Sequence: Synthetic oligonucleotide
uaugacgugcccaacacca

SEQ ID NO: 2566154 - RNA, 19 nt, Artificial Sequence
  Description of Artificial Sequence: Synthetic oligonucleotide
uacaguucaaucucaaaca

SEQ ID NO: 2566155 - RNA, 19 nt, Artificial Sequence
  Description of Artificial Sequence: Synthetic oligonucleotide
uacaccaaaauuauguuua

SEQ ID NO: 2566156 - RNA, 19 nt, Artificial Sequence
  Description of Artificial Sequence: Synthetic oligonucleotide
aaaaccgcuagccugaaua

SEQ ID NO: 2566157 - RNA, 19 nt, Artificial Sequence
  Description of Artificial Sequence: Synthetic oligonucleotide
uccaucauagcaaugucca

SEQ ID NO: 2566158 - RNA, 19 nt, Artificial Sequence
  Description of Artificial Sequence: Synthetic oligonucleotide
gaacaaaccauuuggggug

SEQ ID NO: 2566159 - RNA, 19 nt, Artificial Sequence
  Description of Artificial Sequence: Synthetic oligonucleotide
uauguuuaguaaaggaaac

SEQ ID NO: 2566160 - RNA, 19 nt, Artificial Sequence
  Description of Artificial Sequence: Synthetic oligonucleotide
aauuuauagcucaucaugu

SEQ ID NO: 2566161 - RNA, 19 nt, Artificial Sequence
  Description of Artificial Sequence: Synthetic oligonucleotide
aguaaguacuaacaaauaa

SEQ ID NO: 2566162 - RNA, 19 nt, Artificial Sequence
  Description of Artificial Sequence: Synthetic oligonucleotide
uagcucaucauguuggugc

SEQ ID NO: 2566163 - RNA, 19 nt, Artificial Sequence
  Description of Artificial Sequence: Synthetic oligonucleotide
aguaaaggaaacaaauauc

SEQ ID NO: 2566164 - RNA, 19 nt, Artificial Sequence
  Description of Artificial Sequence: Synthetic oligonucleotide
aaucaaaauacaguaagua

SEQ ID NO: 2566165 - RNA, 19 nt, Artificial Sequence
  Description of Artificial Sequence: Synthetic oligonucleotide
ucaaacaucaguguugcgu

SEQ ID NO: 2566166 - RNA, 19 nt, Artificial Sequence
  Description of Artificial Sequence: Synthetic oligonucleotide
uuuagcaagucuccuuucc

SEQ ID NO: 2566167 - RNA, 19 nt, Artificial Sequence
  Description of Artificial Sequence: Synthetic oligonucleotide
uauuccuugggagaaauga

SEQ ID NO: 2566168 - RNA, 19 nt, Artificial Sequence
  Description of Artificial Sequence: Synthetic oligonucleotide
gugucuauuuccuuaaaug

SEQ ID NO: 2566169 - RNA, 19 nt, Artificial Sequence
  Description of Artificial Sequence: Synthetic oligonucleotide
ucuuuagccaaguagccgu

SEQ ID NO: 2566170 - RNA, 19 nt, Artificial Sequence
  Description of Artificial Sequence: Synthetic oligonucleotide
gaagccaucucuguugugg

SEQ ID NO: 2566171 - RNA, 19 nt, Artificial Sequence
  Description of Artificial Sequence: Synthetic oligonucleotide
uuuuaugacgugcccaaca

SEQ ID NO: 2566172 - RNA, 19 nt, Artificial Sequence
  Description of Artificial Sequence: Synthetic oligonucleotide
uuuuccauaugcaaacgaa

SEQ ID NO: 2566173 - RNA, 19 nt, Artificial Sequence
  Description of Artificial Sequence: Synthetic oligonucleotide
guuagaacagcuccacagg

SEQ ID NO: 2566174 - RNA, 19 nt, Artificial Sequence
  Description of Artificial Sequence: Synthetic oligonucleotide
ucguaaugggcauuuagca

SEQ ID NO: 2566175 - RNA, 19 nt, Artificial Sequence
  Description of Artificial Sequence: Synthetic oligonucleotide
agaguugccggucauuguc

SEQ ID NO: 2566176 - RNA, 19 nt, Artificial Sequence
  Description of Artificial Sequence: Synthetic oligonucleotide
uggagcaguuuucuggacg

SEQ ID NO: 2566177 - RNA, 19 nt, Artificial Sequence
  Description of Artificial Sequence: Synthetic oligonucleotide
uuuaugacgugcccaacac

SEQ ID NO: 2566178 - RNA, 19 nt, Artificial Sequence
  Description of Artificial Sequence: Synthetic oligonucleotide
cugcaguagaauuuggagc

SEQ ID NO: 2566179 - RNA, 19 nt, Artificial Sequence
  Description of Artificial Sequence: Synthetic oligonucleotide
caaaauuauguuuaguaaa

SEQ ID NO: 2566180 - RNA, 19 nt, Artificial Sequence
  Description of Artificial Sequence: Synthetic oligonucleotide
uaaauguuucaaugcuccg

SEQ ID NO: 2566181 - RNA, 19 nt, Artificial Sequence
  Description of Artificial Sequence: Synthetic oligonucleotide
ucaguguugcguugggugg

SEQ ID NO: 2566182 - RNA, 19 nt, Artificial Sequence
  Description of Artificial Sequence: Synthetic oligonucleotide
aaaccgcuagccugaauag

SEQ ID NO: 2566183 - RNA, 19 nt, Artificial Sequence
  Description of Artificial Sequence: Synthetic oligonucleotide
uucuauuuucacuuccucu

SEQ ID NO: 2566184 - RNA, 19 nt, Artificial Sequence
  Description of Artificial Sequence: Synthetic oligonucleotide
uacaguaaguacuaacaaa

SEQ ID NO: 2566185 - RNA, 19 nt, Artificial Sequence
  Description of Artificial Sequence: Synthetic oligonucleotide
ugggcauuuagcaagucuc

SEQ ID NO: 2566186 - RNA, 19 nt, Artificial Sequence
  Description of Artificial Sequence: Synthetic oligonucleotide
aaaucaaaauacaguaagu

SEQ ID NO: 2566187 - RNA, 19 nt, Artificial Sequence
  Description of Artificial Sequence: Synthetic oligonucleotide
uaaauuuauagcucaucau

SEQ ID NO: 2566188 - RNA, 19 nt, Artificial Sequence
  Description of Artificial Sequence: Synthetic oligonucleotide
uuuggagcaguuuucugga

SEQ ID NO: 2566189 - RNA, 19 nt, Artificial Sequence
  Description of Artificial Sequence: Synthetic oligonucleotide
aaauguuucaaugcuccgu

SEQ ID NO: 2566190 - RNA, 19 nt, Artificial Sequence
  Description of Artificial Sequence: Synthetic oligonucleotide
aacaucaguguugcguugg

SEQ ID NO: 2566191 - RNA, 19 nt, Artificial Sequence
  Description of Artificial Sequence: Synthetic oligonucleotide
caaguagccgucguaaugg

SEQ ID NO: 2566192 - RNA, 19 nt, Artificial Sequence
  Description of Artificial Sequence: Synthetic oligonucleotide
auuauguuuaguaaaggaa

SEQ ID NO: 2566193 - RNA, 19 nt, Artificial Sequence
  Description of Artificial Sequence: Synthetic oligonucleotide
uucuucuuucguuuguccc

SEQ ID NO: 2566194 - RNA, 19 nt, Artificial Sequence
  Description of Artificial Sequence: Synthetic oligonucleotide
augcaugguucccagguac

SEQ ID NO: 2566195 - RNA, 19 nt, Artificial Sequence
  Description of Artificial Sequence: Synthetic oligonucleotide
aacaccaagaacaaaccau

SEQ ID NO: 2566196 - RNA, 19 nt, Artificial Sequence
  Description of Artificial Sequence: Synthetic oligonucleotide
uuuccugcuuguuuuggag

SEQ ID NO: 2566197 - RNA, 19 nt, Artificial Sequence
  Description of Artificial Sequence: Synthetic oligonucleotide
guaaaggaaacaaauaucu

SEQ ID NO: 2566198 - RNA, 19 nt, Artificial Sequence
  Description of Artificial Sequence: Synthetic oligonucleotide
acaguaaguacuaacaaau

SEQ ID NO: 2566199 - RNA, 19 nt, Artificial Sequence
  Description of Artificial Sequence: Synthetic oligonucleotide
uuuccuuaaauguuucaau

SEQ ID NO: 2566200 - RNA, 19 nt, Artificial Sequence
  Description of Artificial Sequence: Synthetic oligonucleotide
uuucaaugcuccguggucc

SEQ ID NO: 2566201 - RNA, 19 nt, Artificial Sequence
  Description of Artificial Sequence: Synthetic oligonucleotide
accaagaacaaaccauuug

SEQ ID NO: 2566202 - RNA, 19 nt, Artificial Sequence
  Description of Artificial Sequence: Synthetic oligonucleotide
gguauaaucaccuuucucu

SEQ ID NO: 2566203 - RNA, 19 nt, Artificial Sequence
  Description of Artificial Sequence: Synthetic oligonucleotide
uguuucaaugcuccguggu

SEQ ID NO: 2566204 - RNA, 19 nt, Artificial Sequence
  Description of Artificial Sequence: Synthetic oligonucleotide
ccaucuuuagccaaguagc

SEQ ID NO: 2566205 - RNA, 19 nt, Artificial Sequence
  Description of Artificial Sequence: Synthetic oligonucleotide
gagcaaaaccgcuagccug

SEQ ID NO: 2566206 - RNA, 19 nt, Artificial Sequence
  Description of Artificial Sequence: Synthetic oligonucleotide
auguccagcccuuuuauga

SEQ ID NO: 2566207 - RNA, 19 nt, Artificial Sequence
  Description of Artificial Sequence: Synthetic oligonucleotide
gaaacaaauaucuucucau

SEQ ID NO: 2566208 - RNA, 19 nt, Artificial Sequence
  Description of Artificial Sequence: Synthetic oligonucleotide
uucaucuuguguccggcug

SEQ ID NO: 2566209 - RNA, 19 nt, Artificial Sequence
  Description of Artificial Sequence: Synthetic oligonucleotide
cuuucucuucucuccaggg

SEQ ID NO: 2566210 - RNA, 19 nt, Artificial Sequence
  Description of Artificial Sequence: Synthetic oligonucleotide
ugugucuauuuccuuaaau

SEQ ID NO: 2566211 - RNA, 19 nt, Artificial Sequence
  Description of Artificial Sequence: Synthetic oligonucleotide
caucuuuagccaaguagcc

SEQ ID NO: 2566212 - RNA, 19 nt, Artificial Sequence
  Description of Artificial Sequence: Synthetic oligonucleotide
aauguccagcccuuuuaug

SEQ ID NO: 2566213 - RNA, 19 nt, Artificial Sequence
  Description of Artificial Sequence: Synthetic oligonucleotide
ugagcaaaaccgcuagccu

SEQ ID NO: 2566214 - RNA, 19 nt, Artificial Sequence
  Description of Artificial Sequence: Synthetic oligonucleotide
uuucuucuuucguuugucc

SEQ ID NO: 2566215 - RNA, 19 nt, Artificial Sequence
  Description of Artificial Sequence: Synthetic oligonucleotide
auacaguaaguacuaacaa

SEQ ID NO: 2566216 - RNA, 19 nt, Artificial Sequence
  Description of Artificial Sequence: Synthetic oligonucleotide
uuagcaagucuccuuuccu

SEQ ID NO: 2566217 - RNA, 19 nt, Artificial Sequence
  Description of Artificial Sequence: Synthetic oligonucleotide
guaaguacuaacaaauaaa

SEQ ID NO: 2566218 - RNA, 19 nt, Artificial Sequence
  Description of Artificial Sequence: Synthetic oligonucleotide
aaguagccgucguaauggg

SEQ ID NO: 2566219 - RNA, 19 nt, Artificial Sequence
  Description of Artificial Sequence: Synthetic oligonucleotide
uaucuucucauaagggaaa

SEQ ID NO: 2566220 - RNA, 19 nt, Artificial Sequence
  Description of Artificial Sequence: Synthetic oligonucleotide
aggaaacaaauaucuucuc

SEQ ID NO: 2566221 - RNA, 19 nt, Artificial Sequence
  Description of Artificial Sequence: Synthetic oligonucleotide
uucuuaaaguuuagagagu

SEQ ID NO: 2566222 - RNA, 19 nt, Artificial Sequence
  Description of Artificial Sequence: Synthetic oligonucleotide
cugagcaaaaccgcuagcc

SEQ ID NO: 2566223 - RNA, 19 nt, Artificial Sequence
  Description of Artificial Sequence: Synthetic oligonucleotide
aacaaaccauuuggggugg

SEQ ID NO: 2566224 - RNA, 19 nt, Artificial Sequence
  Description of Artificial Sequence: Synthetic oligonucleotide
aaaguaaaauaaauuuaua

SEQ ID NO: 2566225 - RNA, 19 nt, Artificial Sequence
  Description of Artificial Sequence: Synthetic oligonucleotide
uggaaucuugccuucugca

SEQ ID NO: 2566226 - RNA, 19 nt, Artificial Sequence
  Description of Artificial Sequence: Synthetic oligonucleotide
auuuagcaagucuccuuuc

SEQ ID NO: 2566227 - RNA, 19 nt, Artificial Sequence
  Description of Artificial Sequence: Synthetic oligonucleotide
cuuaaaguuuagagaguug

SEQ ID NO: 2566228 - RNA, 19 nt, Artificial Sequence
  Description of Artificial Sequence: Synthetic oligonucleotide
uuaugacgugcccaacacc

SEQ ID NO: 2566229 - RNA, 19 nt, Artificial Sequence
  Description of Artificial Sequence: Synthetic oligonucleotide
aaggaaaccacaaccugga

SEQ ID NO: 2566230 - RNA, 19 nt, Artificial Sequence
  Description of Artificial Sequence: Synthetic oligonucleotide
gugcccaacaccaagaaca

SEQ ID NO: 2566231 - RNA, 19 nt, Artificial Sequence
  Description of Artificial Sequence: Synthetic oligonucleotide
aagucuccuuuccugcuug

SEQ ID NO: 2566232 - RNA, 19 nt, Artificial Sequence
  Description of Artificial Sequence: Synthetic oligonucleotide
aucuuuagccaaguagccg

SEQ ID NO: 2566233 - RNA, 19 nt, Artificial Sequence
  Description of Artificial Sequence: Synthetic oligonucleotide
aaacaucaguguugcguug

SEQ ID NO: 2566234 - RNA, 19 nt, Artificial Sequence
  Description of Artificial Sequence: Synthetic oligonucleotide
ucugugucuauuuccuuaa

SEQ ID NO: 2566235 - RNA, 19 nt, Artificial Sequence
  Description of Artificial Sequence: Synthetic oligonucleotide
ugacgugcccaacaccaag

SEQ ID NO: 2566236 - RNA, 19 nt, Artificial Sequence
  Description of Artificial Sequence: Synthetic oligonucleotide
gcugcaguagaauuuggag

SEQ ID NO: 2566237 - RNA, 19 nt, Artificial Sequence
  Description of Artificial Sequence: Synthetic oligonucleotide
aaaccauuugggguggccu

SEQ ID NO: 2566238 - RNA, 19 nt, Artificial Sequence
  Description of Artificial Sequence: Synthetic oligonucleotide
uguuuuggagcaguuuucu

SEQ ID NO: 2566239 - RNA, 19 nt, Artificial Sequence
  Description of Artificial Sequence: Synthetic oligonucleotide
aaauaaauuuauagcucau

SEQ ID NO: 2566240 - RNA, 19 nt, Artificial Sequence
  Description of Artificial Sequence: Synthetic oligonucleotide
gucguaaugggcauuuagc

SEQ ID NO: 2566241 - RNA, 19 nt, Artificial Sequence
  Description of Artificial Sequence: Synthetic oligonucleotide
uagaacagcuccacaggcu

SEQ ID NO: 2566242 - RNA, 19 nt, Artificial Sequence
  Description of Artificial Sequence: Synthetic oligonucleotide
uuguuuuggagcaguuuuc

SEQ ID NO: 2566243 - RNA, 19 nt, Artificial Sequence
  Description of Artificial Sequence: Synthetic oligonucleotide
cccaacaccaagaacaaac

SEQ ID NO: 2566244 - RNA, 19 nt, Artificial Sequence
  Description of Artificial Sequence: Synthetic oligonucleotide
ucccugagcguuagaacag

SEQ ID NO: 2566245 - RNA, 19 nt, Artificial Sequence
  Description of Artificial Sequence: Synthetic oligonucleotide
uaaugggcauuuagcaagu

SEQ ID NO: 2566246 - RNA, 19 nt, Artificial Sequence
  Description of Artificial Sequence: Synthetic oligonucleotide
auuuauagcucaucauguu

SEQ ID NO: 2566247 - RNA, 19 nt, Artificial Sequence
  Description of Artificial Sequence: Synthetic oligonucleotide
ucuuucguuugucccugag

SEQ ID NO: 2566248 - RNA, 19 nt, Artificial Sequence
  Description of Artificial Sequence: Synthetic oligonucleotide
cauuguauuccuugggaga

SEQ ID NO: 2566249 - RNA, 19 nt, Artificial Sequence
  Description of Artificial Sequence: Synthetic oligonucleotide
cuucuuuuccauaugcaaa

SEQ ID NO: 2566250 - RNA, 19 nt, Artificial Sequence
  Description of Artificial Sequence: Synthetic oligonucleotide
agcccuuuuaugacgugcc

SEQ ID NO: 2566251 - RNA, 19 nt, Artificial Sequence
  Description of Artificial Sequence: Synthetic oligonucleotide
uuuucuggacgaugcaaaa

SEQ ID NO: 2566252 - RNA, 19 nt, Artificial Sequence
  Description of Artificial Sequence: Synthetic oligonucleotide
ggaaacaaauaucuucuca

SEQ ID NO: 2566253 - RNA, 19 nt, Artificial Sequence
  Description of Artificial Sequence: Synthetic oligonucleotide
uuuagccaaguagccgucg

SEQ ID NO: 2566254 - RNA, 19 nt, Artificial Sequence
  Description of Artificial Sequence: Synthetic oligonucleotide
gucccugagcguuagaaca

SEQ ID NO: 2566255 - RNA, 19 nt, Artificial Sequence
  Description of Artificial Sequence: Synthetic oligonucleotide
ugaauaggaaaugcauggu

SEQ ID NO: 2566256 - RNA, 19 nt, Artificial Sequence
  Description of Artificial Sequence: Synthetic oligonucleotide
auuguauuccuugggagaa

SEQ ID NO: 2566257 - RNA, 19 nt, Artificial Sequence
  Description of Artificial Sequence: Synthetic oligonucleotide
auguuucaaugcuccgugg

SEQ ID NO: 2566258 - RNA, 19 nt, Artificial Sequence
  Description of Artificial Sequence: Synthetic oligonucleotide
uauagcucaucauguuggu

SEQ ID NO: 2566259 - RNA, 19 nt, Artificial Sequence
  Description of Artificial Sequence: Synthetic oligonucleotide
agcguuagaacagcuccac

SEQ ID NO: 2566260 - RNA, 19 nt, Artificial Sequence
  Description of Artificial Sequence: Synthetic oligonucleotide
agagaguugccggucauug

SEQ ID NO: 2566261 - RNA, 19 nt, Artificial Sequence
  Description of Artificial Sequence: Synthetic oligonucleotide
guuggugcacauuguauuc

SEQ ID NO: 2566262 - RNA, 19 nt, Artificial Sequence
  Description of Artificial Sequence: Synthetic oligonucleotide
uuggguggaaucuugccuu

SEQ ID NO: 2566263 - RNA, 19 nt, Artificial Sequence
  Description of Artificial Sequence: Synthetic oligonucleotide
ucuccagggcacaugucca

SEQ ID NO: 2566264 - RNA, 19 nt, Artificial Sequence
  Description of Artificial Sequence: Synthetic oligonucleotide
aaccgcuagccugaauagg

SEQ ID NO: 2566265 - RNA, 19 nt, Artificial Sequence
  Description of Artificial Sequence: Synthetic oligonucleotide
augggcauuuagcaagucu

SEQ ID NO: 2566266 - RNA, 19 nt, Artificial Sequence
  Description of Artificial Sequence: Synthetic oligonucleotide
auuugggguggccuucauc

SEQ ID NO: 2566267 - RNA, 19 nt, Artificial Sequence
  Description of Artificial Sequence: Synthetic oligonucleotide
uguccagcccuuuuaugac

SEQ ID NO: 2566268 - RNA, 19 nt, Artificial Sequence
  Description of Artificial Sequence: Synthetic oligonucleotide
ugcaugguucccagguacc

SEQ ID NO: 2566269 - RNA, 19 nt, Artificial Sequence
  Description of Artificial Sequence: Synthetic oligonucleotide
aagccaucucuguuguggu

SEQ ID NO: 2566270 - RNA, 19 nt, Artificial Sequence
  Description of Artificial Sequence: Synthetic oligonucleotide
auguuuaguaaaggaaaca

SEQ ID NO: 2566271 - RNA, 19 nt, Artificial Sequence
  Description of Artificial Sequence: Synthetic oligonucleotide
ucccagguaccccaggccu

SEQ ID NO: 2566272 - RNA, 19 nt, Artificial Sequence
  Description of Artificial Sequence: Synthetic oligonucleotide
uuagccaaguagccgucgu

SEQ ID NO: 2566273 - RNA, 19 nt, Artificial Sequence
  Description of Artificial Sequence: Synthetic oligonucleotide
ccauaugcaaacgaagggg

SEQ ID NO: 2566274 - RNA, 19 nt, Artificial Sequence
  Description of Artificial Sequence: Synthetic oligonucleotide
ugggguggccuucaucuug

SEQ ID NO: 2566275 - RNA, 19 nt, Artificial Sequence
  Description of Artificial Sequence: Synthetic oligonucleotide
uguccaucauagcaauguc

SEQ ID NO: 2566276 - RNA, 19 nt, Artificial Sequence
  Description of Artificial Sequence: Synthetic oligonucleotide
acaaccuggagaaaaguaa

SEQ ID NO: 2566277 - RNA, 19 nt, Artificial Sequence
  Description of Artificial Sequence: Synthetic oligonucleotide
uccagcccuuuuaugacgu

SEQ ID NO: 2566278 - RNA, 19 nt, Artificial Sequence
  Description of Artificial Sequence: Synthetic oligonucleotide
aaugcaugguucccaggua

SEQ ID NO: 2566279 - RNA, 19 nt, Artificial Sequence
  Description of Artificial Sequence: Synthetic oligonucleotide
gaaucuugccuucugcaua

SEQ ID NO: 2566280 - RNA, 19 nt, Artificial Sequence
  Description of Artificial Sequence: Synthetic oligonucleotide
augaagccaucucuguugu

SEQ ID NO: 2566281 - RNA, 19 nt, Artificial Sequence
  Description of Artificial Sequence: Synthetic oligonucleotide
ugcguuggguggaaucuug

SEQ ID NO: 2566282 - RNA, 19 nt, Artificial Sequence
  Description of Artificial Sequence: Synthetic oligonucleotide
aaugcuccgugguccuuug

SEQ ID NO: 2566283 - RNA, 19 nt, Artificial Sequence
  Description of Artificial Sequence: Synthetic oligonucleotide
cuucuauuuucacuuccuc

SEQ ID NO: 2566284 - RNA, 19 nt, Artificial Sequence
  Description of Artificial Sequence: Synthetic oligonucleotide
uuggugcacauuguauucc

SEQ ID NO: 2566285 - RNA, 19 nt, Artificial Sequence
  Description of Artificial Sequence: Synthetic oligonucleotide
caaaacuucuauuuucacu

SEQ ID NO: 2566286 - RNA, 19 nt, Artificial Sequence
  Description of Artificial Sequence: Synthetic oligonucleotide
uggccuucaucuugugucc

SEQ ID NO: 2566287 - RNA, 19 nt, Artificial Sequence
  Description of Artificial Sequence: Synthetic oligonucleotide
ugcuccgugguccuuuggu

SEQ ID NO: 2566288 - RNA, 19 nt, Artificial Sequence
  Description of Artificial Sequence: Synthetic oligonucleotide
cacagcguacaguucaauc

SEQ ID NO: 2566289 - RNA, 19 nt, Artificial Sequence
  Description of Artificial Sequence: Synthetic oligonucleotide
uguugcguuggguggaauc

SEQ ID NO: 2566290 - RNA, 19 nt, Artificial Sequence
  Description of Artificial Sequence: Synthetic oligonucleotide
guuucaaugcuccgugguc

SEQ ID NO: 2566291 - RNA, 19 nt, Artificial Sequence
  Description of Artificial Sequence: Synthetic oligonucleotide
ggaaaugcaugguucccag

SEQ ID NO: 2566292 - RNA, 19 nt, Artificial Sequence
  Description of Artificial Sequence: Synthetic oligonucleotide
uguauuccuugggagaaau

SEQ ID NO: 2566293 - RNA, 19 nt, Artificial Sequence
  Description of Artificial Sequence: Synthetic oligonucleotide
cuuuuccauaugcaaacga

SEQ ID NO: 2566294 - RNA, 19 nt, Artificial Sequence
  Description of Artificial Sequence: Synthetic oligonucleotide
cuggacgaugcaaaacuuc

SEQ ID NO: 2566295 - RNA, 19 nt, Artificial Sequence
  Description of Artificial Sequence: Synthetic oligonucleotide
uuuggucacagcguacagu

SEQ ID NO: 2566296 - RNA, 19 nt, Artificial Sequence
  Description of Artificial Sequence: Synthetic oligonucleotide
uaggaaaugcaugguuccc

SEQ ID NO: 2566297 - RNA, 19 nt, Artificial Sequence
  Description of Artificial Sequence: Synthetic oligonucleotide
cacauguccaucauagcaa

SEQ ID NO: 2566298 - RNA, 19 nt, Artificial Sequence
  Description of Artificial Sequence: Synthetic oligonucleotide
ugucccugagcguuagaac

SEQ ID NO: 2566299 - RNA, 19 nt, Artificial Sequence
  Description of Artificial Sequence: Synthetic oligonucleotide
uucccagguaccccaggcc

SEQ ID NO: 2566300 - RNA, 19 nt, Artificial Sequence
  Description of Artificial Sequence: Synthetic oligonucleotide
guggaaucuugccuucugc

SEQ ID NO: 2566301 - RNA, 19 nt, Artificial Sequence
  Description of Artificial Sequence: Synthetic oligonucleotide
ucauugucugugucuauuu

SEQ ID NO: 2566302 - RNA, 19 nt, Artificial Sequence
  Description of Artificial Sequence: Synthetic oligonucleotide
uggugcacauuguauuccu

SEQ ID NO: 2566303 - RNA, 19 nt, Artificial Sequence
  Description of Artificial Sequence: Synthetic oligonucleotide
guuuuggagcaguuuucug

SEQ ID NO: 2566304 - RNA, 19 nt, Artificial Sequence
  Description of Artificial Sequence: Synthetic oligonucleotide
guagccgucguaaugggca

SEQ ID NO: 2566305 - RNA, 19 nt, Artificial Sequence
  Description of Artificial Sequence: Synthetic oligonucleotide
cguuagaacagcuccacag

SEQ ID NO: 2566306 - RNA, 19 nt, Artificial Sequence
  Description of Artificial Sequence: Synthetic oligonucleotide
ucucuucucuccagggcac

SEQ ID NO: 2566307 - RNA, 19 nt, Artificial Sequence
  Description of Artificial Sequence: Synthetic oligonucleotide
guuuaguaaaggaaacaaa

SEQ ID NO: 2566308 - RNA, 19 nt, Artificial Sequence
  Description of Artificial Sequence: Synthetic oligonucleotide
caguucaaucucaaacauc

SEQ ID NO: 2566309 - RNA, 19 nt, Artificial Sequence
  Description of Artificial Sequence: Synthetic oligonucleotide
ucuggacgaugcaaaacuu

SEQ ID NO: 2566310 - RNA, 19 nt, Artificial Sequence
  Description of Artificial Sequence: Synthetic oligonucleotide
ucauagcaauguccagccc

SEQ ID NO: 2566311 - RNA, 19 nt, Artificial Sequence
  Description of Artificial Sequence: Synthetic oligonucleotide
ggaaaccacaaccuggaga

SEQ ID NO: 2566312 - RNA, 19 nt, Artificial Sequence
  Description of Artificial Sequence: Synthetic oligonucleotide
uucaaugcuccgugguccu

SEQ ID NO: 2566313 - RNA, 19 nt, Artificial Sequence
  Description of Artificial Sequence: Synthetic oligonucleotide
gacgaugcaaaacuucuau

SEQ ID NO: 2566314 - RNA, 19 nt, Artificial Sequence
  Description of Artificial Sequence: Synthetic oligonucleotide
cuagccugaauaggaaaug

SEQ ID NO: 2566315 - RNA, 19 nt, Artificial Sequence
  Description of Artificial Sequence: Synthetic oligonucleotide
aguagccgucguaaugggc

SEQ ID NO: 2566316 - RNA, 19 nt, Artificial Sequence
  Description of Artificial Sequence: Synthetic oligonucleotide
ccaacaccaagaacaaacc

SEQ ID NO: 2566317 - RNA, 19 nt, Artificial Sequence
  Description of Artificial Sequence: Synthetic oligonucleotide
cauugucugugucuauuuc

SEQ ID NO: 2566318 - RNA, 19 nt, Artificial Sequence
  Description of Artificial Sequence: Synthetic oligonucleotide
cagcguacaguucaaucuc

SEQ ID NO: 2566319 - RNA, 19 nt, Artificial Sequence
  Description of Artificial Sequence: Synthetic oligonucleotide
gaauuuggagccaucuuua

SEQ ID NO: 2566320 - RNA, 19 nt, Artificial Sequence
  Description of Artificial Sequence: Synthetic oligonucleotide
ggucacagcguacaguuca

SEQ ID NO: 2566321 - RNA, 19 nt, Artificial Sequence
  Description of Artificial Sequence: Synthetic oligonucleotide
agcucaucauguuggugca

SEQ ID NO: 2566322 - RNA, 19 nt, Artificial Sequence
  Description of Artificial Sequence: Synthetic oligonucleotide
uugucccugagcguuagaa

SEQ ID NO: 2566323 - RNA, 19 nt, Artificial Sequence
  Description of Artificial Sequence: Synthetic oligonucleotide
aguuuucuggacgaugcaa

SEQ ID NO: 2566324 - RNA, 19 nt, Artificial Sequence
  Description of Artificial Sequence: Synthetic oligonucleotide
cauagcaauguccagcccu

SEQ ID NO: 2566325 - RNA, 19 nt, Artificial Sequence
  Description of Artificial Sequence: Synthetic oligonucleotide
gcaguuuucuggacgaugc

SEQ ID NO: 2566326 - RNA, 19 nt, Artificial Sequence
  Description of Artificial Sequence: Synthetic oligonucleotide
agcaaaaccgcuagccuga

SEQ ID NO: 2566327 - RNA, 19 nt, Artificial Sequence
  Description of Artificial Sequence: Synthetic oligonucleotide
cuuuggucacagcguacag

SEQ ID NO: 2566328 - RNA, 19 nt, Artificial Sequence
  Description of Artificial Sequence: Synthetic oligonucleotide
uccggcugcaguagaauuu

SEQ ID NO: 2566329 - RNA, 19 nt, Artificial Sequence
  Description of Artificial Sequence: Synthetic oligonucleotide
aggaaaugcaugguuccca

SEQ ID NO: 2566330 - RNA, 19 nt, Artificial Sequence
  Description of Artificial Sequence: Synthetic oligonucleotide
aguugccggucauugucug

SEQ ID NO: 2566331 - RNA, 19 nt, Artificial Sequence
  Description of Artificial Sequence: Synthetic oligonucleotide
accuggagaaaaguaauuu

SEQ ID NO: 2566332 - RNA, 19 nt, Artificial Sequence
  Description of Artificial Sequence: Synthetic oligonucleotide
uagccuucuuuuccauaug

SEQ ID NO: 2566333 - RNA, 19 nt, Artificial Sequence
  Description of Artificial Sequence: Synthetic oligonucleotide
caacaccaagaacaaacca

SEQ ID NO: 2566334 - RNA, 19 nt, Artificial Sequence
  Description of Artificial Sequence: Synthetic oligonucleotide
cugagcguuagaacagcuc

SEQ ID NO: 2566335 - RNA, 19 nt, Artificial Sequence
  Description of Artificial Sequence: Synthetic oligonucleotide
cuuguuuuggagcaguuuu

SEQ ID NO: 2566336 - RNA, 19 nt, Artificial Sequence
  Description of Artificial Sequence: Synthetic oligonucleotide
uccuuuccugcuuguuuug

SEQ ID NO: 2566337 - RNA, 19 nt, Artificial Sequence
  Description of Artificial Sequence: Synthetic oligonucleotide
accgcuagccugaauagga

SEQ ID NO: 2566338 - RNA, 19 nt, Artificial Sequence
  Description of Artificial Sequence: Synthetic oligonucleotide
ggcugagcaaaaccgcuag

SEQ ID NO: 2566339 - RNA, 19 nt, Artificial Sequence
  Description of Artificial Sequence: Synthetic oligonucleotide
ucguuugucccugagcguu

SEQ ID NO: 2566340 - RNA, 19 nt, Artificial Sequence
  Description of Artificial Sequence: Synthetic oligonucleotide
cuucuuucguuugucccug

SEQ ID NO: 2566341 - RNA, 19 nt, Artificial Sequence
  Description of Artificial Sequence: Synthetic oligonucleotide
accacaaccuggagaaaag

SEQ ID NO: 2566342 - RNA, 19 nt, Artificial Sequence
  Description of Artificial Sequence: Synthetic oligonucleotide
guuuucuggacgaugcaaa

SEQ ID NO: 2566343 - RNA, 19 nt, Artificial Sequence
  Description of Artificial Sequence: Synthetic oligonucleotide
aggaaaccacaaccuggag

SEQ ID NO: 2566344 - RNA, 19 nt, Artificial Sequence
  Description of Artificial Sequence: Synthetic oligonucleotide
uucguuugucccugagcgu

SEQ ID NO: 2566345 - RNA, 19 nt, Artificial Sequence
  Description of Artificial Sequence: Synthetic oligonucleotide
guuggguggaaucuugccu

SEQ ID NO: 2566346 - RNA, 19 nt, Artificial Sequence
  Description of Artificial Sequence: Synthetic oligonucleotide
gucugugucuauuuccuua

SEQ ID NO: 2566347 - RNA, 19 nt, Artificial Sequence
  Description of Artificial Sequence: Synthetic oligonucleotide
cuuuagccaaguagccguc

SEQ ID NO: 2566348 - RNA, 19 nt, Artificial Sequence
  Description of Artificial Sequence: Synthetic oligonucleotide
auagcucaucauguuggug

SEQ ID NO: 2566349 - RNA, 19 nt, Artificial Sequence
  Description of Artificial Sequence: Synthetic oligonucleotide
ggagcaguuuucuggacga

SEQ ID NO: 2566350 - RNA, 19 nt, Artificial Sequence
  Description of Artificial Sequence: Synthetic oligonucleotide
caugguucccagguacccc

SEQ ID NO: 2566351 - RNA, 19 nt, Artificial Sequence
  Description of Artificial Sequence: Synthetic oligonucleotide
ucaucauguuggugcacau

SEQ ID NO: 2566352 - RNA, 19 nt, Artificial Sequence
  Description of Artificial Sequence: Synthetic oligonucleotide
cagcccuuuuaugacgugc

SEQ ID NO: 2566353 - RNA, 19 nt, Artificial Sequence
  Description of Artificial Sequence: Synthetic oligonucleotide
cacaaccuggagaaaagua

SEQ ID NO: 2566354 - RNA, 19 nt, Artificial Sequence
  Description of Artificial Sequence: Synthetic oligonucleotide
aaccuggagaaaaguaauu

SEQ ID NO: 2566355 - RNA, 19 nt, Artificial Sequence
  Description of Artificial Sequence: Synthetic oligonucleotide
gcaaaacuucuauuuucac

SEQ ID NO: 2566356 - RNA, 19 nt, Artificial Sequence
  Description of Artificial Sequence: Synthetic oligonucleotide
auuccuugggagaaaugaa

SEQ ID NO: 2566357 - RNA, 19 nt, Artificial Sequence
  Description of Artificial Sequence: Synthetic oligonucleotide
guauaaucaccuuucucuu

SEQ ID NO: 2566358 - RNA, 19 nt, Artificial Sequence
  Description of Artificial Sequence: Synthetic oligonucleotide
cuugccuucugcauagccu

SEQ ID NO: 2566359 - RNA, 19 nt, Artificial Sequence
  Description of Artificial Sequence: Synthetic oligonucleotide
uuggagcaguuuucuggac

SEQ ID NO: 2566360 - RNA, 19 nt, Artificial Sequence
  Description of Artificial Sequence: Synthetic oligonucleotide
agccugaauaggaaaugca

SEQ ID NO: 2566361 - RNA, 19 nt, Artificial Sequence
  Description of Artificial Sequence: Synthetic oligonucleotide
caguaaguacuaacaaaua

SEQ ID NO: 2566362 - RNA, 19 nt, Artificial Sequence
  Description of Artificial Sequence: Synthetic oligonucleotide
acaaaccauuugggguggc

SEQ ID NO: 2566363 - RNA, 19 nt, Artificial Sequence
  Description of Artificial Sequence: Synthetic oligonucleotide
cauguuggugcacauugua

SEQ ID NO: 2566364 - RNA, 19 nt, Artificial Sequence
  Description of Artificial Sequence: Synthetic oligonucleotide
ggguauaaucaccuuucuc

SEQ ID NO: 2566365 - RNA, 19 nt, Artificial Sequence
  Description of Artificial Sequence: Synthetic oligonucleotide
cuuguguccggcugcagua

SEQ ID NO: 2566366 - RNA, 19 nt, Artificial Sequence
  Description of Artificial Sequence: Synthetic oligonucleotide
ugaagccaucucuguugug

SEQ ID NO: 2566367 - RNA, 19 nt, Artificial Sequence
  Description of Artificial Sequence: Synthetic oligonucleotide
ugguucccagguaccccag

SEQ ID NO: 2566368 - RNA, 19 nt, Artificial Sequence
  Description of Artificial Sequence: Synthetic oligonucleotide
uaccccaggccuaguguaa

SEQ ID NO: 2566369 - RNA, 19 nt, Artificial Sequence
  Description of Artificial Sequence: Synthetic oligonucleotide
cuuuuaugacgugcccaac

SEQ ID NO: 2566370 - RNA, 19 nt, Artificial Sequence
  Description of Artificial Sequence: Synthetic oligonucleotide
cauuuagcaagucuccuuu

SEQ ID NO: 2566371 - RNA, 19 nt, Artificial Sequence
  Description of Artificial Sequence: Synthetic oligonucleotide
aucuucucauaagggaaaa

SEQ ID NO: 2566372 - RNA, 19 nt, Artificial Sequence
  Description of Artificial Sequence: Synthetic oligonucleotide
gacgugcccaacaccaaga

SEQ ID NO: 2566373 - RNA, 19 nt, Artificial Sequence
  Description of Artificial Sequence: Synthetic oligonucleotide
ccaaguagccgucguaaug

SEQ ID NO: 2566374 - RNA, 19 nt, Artificial Sequence
  Description of Artificial Sequence: Synthetic oligonucleotide
uagccaaguagccgucgua

SEQ ID NO: 2566375 - RNA, 19 nt, Artificial Sequence
  Description of Artificial Sequence: Synthetic oligonucleotide
guuugucccugagcguuag

SEQ ID NO: 2566376 - RNA, 19 nt, Artificial Sequence
  Description of Artificial Sequence: Synthetic oligonucleotide
uuugucccugagcguuaga

SEQ ID NO: 2566377 - RNA, 19 nt, Artificial Sequence
  Description of Artificial Sequence: Synthetic oligonucleotide
ugucugugucuauuuccuu

SEQ ID NO: 2566378 - RNA, 19 nt, Artificial Sequence
  Description of Artificial Sequence: Synthetic oligonucleotide
gagcguuagaacagcucca

SEQ ID NO: 2566379 - RNA, 19 nt, Artificial Sequence
  Description of Artificial Sequence: Synthetic oligonucleotide
ggagccaucuuuagccaag

SEQ ID NO: 2566380 - RNA, 19 nt, Artificial Sequence
  Description of Artificial Sequence: Synthetic oligonucleotide
uggguggaaucuugccuuc

SEQ ID NO: 2566381 - RNA, 19 nt, Artificial Sequence
  Description of Artificial Sequence: Synthetic oligonucleotide
auagcaauguccagcccuu

SEQ ID NO: 2566382 - RNA, 19 nt, Artificial Sequence
  Description of Artificial Sequence: Synthetic oligonucleotide
agcguacaguucaaucuca

SEQ ID NO: 2566383 - RNA, 19 nt, Artificial Sequence
  Description of Artificial Sequence: Synthetic oligonucleotide
ccuuaaauguuucaaugcu

SEQ ID NO: 2566384 - RNA, 19 nt, Artificial Sequence
  Description of Artificial Sequence: Synthetic oligonucleotide
caaccuggagaaaaguaau

SEQ ID NO: 2566385 - RNA, 19 nt, Artificial Sequence
  Description of Artificial Sequence: Synthetic oligonucleotide
guauuccuugggagaaaug

SEQ ID NO: 2566386 - RNA, 19 nt, Artificial Sequence
  Description of Artificial Sequence: Synthetic oligonucleotide
guccuuuggucacagcgua

SEQ ID NO: 2566387 - RNA, 19 nt, Artificial Sequence
  Description of Artificial Sequence: Synthetic oligonucleotide
gggcauuuagcaagucucc

SEQ ID NO: 2566388 - RNA, 19 nt, Artificial Sequence
  Description of Artificial Sequence: Synthetic oligonucleotide
acgugcccaacaccaagaa

SEQ ID NO: 2566389 - RNA, 19 nt, Artificial Sequence
  Description of Artificial Sequence: Synthetic oligonucleotide
guugcguuggguggaaucu

SEQ ID NO: 2566390 - RNA, 19 nt, Artificial Sequence
  Description of Artificial Sequence: Synthetic oligonucleotide
uucuuucguuugucccuga

SEQ ID NO: 2566391 - RNA, 19 nt, Artificial Sequence
  Description of Artificial Sequence: Synthetic oligonucleotide
uuguauuccuugggagaaa

SEQ ID NO: 2566392 - RNA, 19 nt, Artificial Sequence
  Description of Artificial Sequence: Synthetic oligonucleotide
guaccccaggccuagugua

SEQ ID NO: 2566393 - RNA, 19 nt, Artificial Sequence
  Description of Artificial Sequence: Synthetic oligonucleotide
uagccgucguaaugggcau

SEQ ID NO: 2566394 - RNA, 19 nt, Artificial Sequence
  Description of Artificial Sequence: Synthetic oligonucleotide
uguccggcugcaguagaau

SEQ ID NO: 2566395 - RNA, 19 nt, Artificial Sequence
  Description of Artificial Sequence: Synthetic oligonucleotide
ugccuucugcauagccuuc

SEQ ID NO: 2566396 - RNA, 19 nt, Artificial Sequence
  Description of Artificial Sequence: Synthetic oligonucleotide
ccuuuuaugacgugcccaa

SEQ ID NO: 2566397 - RNA, 19 nt, Artificial Sequence
  Description of Artificial Sequence: Synthetic oligonucleotide
cgucguaaugggcauuuag

SEQ ID NO: 2566398 - RNA, 19 nt, Artificial Sequence
  Description of Artificial Sequence: Synthetic oligonucleotide
caccuuucucuucucucca

SEQ ID NO: 2566399 - RNA, 19 nt, Artificial Sequence
  Description of Artificial Sequence: Synthetic oligonucleotide
ucuucucuccagggcacau

SEQ ID NO: 2566400 - RNA, 19 nt, Artificial Sequence
  Description of Artificial Sequence: Synthetic oligonucleotide
aaaccacaaccuggagaaa

SEQ ID NO: 2566401 - RNA, 19 nt, Artificial Sequence
  Description of Artificial Sequence: Synthetic oligonucleotide
gcugagcaaaaccgcuagc

SEQ ID NO: 2566402 - RNA, 19 nt, Artificial Sequence
  Description of Artificial Sequence: Synthetic oligonucleotide
caguuuucuggacgaugca

SEQ ID NO: 2566403 - RNA, 19 nt, Artificial Sequence
  Description of Artificial Sequence: Synthetic oligonucleotide
uagagaguugccggucauu

SEQ ID NO: 2566404 - RNA, 19 nt, Artificial Sequence
  Description of Artificial Sequence: Synthetic oligonucleotide
gagaguugccggucauugu

SEQ ID NO: 2566405 - RNA, 19 nt, Artificial Sequence
  Description of Artificial Sequence: Synthetic oligonucleotide
ucacagcguacaguucaau

SEQ ID NO: 2566406 - RNA, 19 nt, Artificial Sequence
  Description of Artificial Sequence: Synthetic oligonucleotide
caggcugagcaaaaccgcu

SEQ ID NO: 2566407 - RNA, 19 nt, Artificial Sequence
  Description of Artificial Sequence: Synthetic oligonucleotide
gcaugguucccagguaccc

SEQ ID NO: 2566408 - RNA, 19 nt, Artificial Sequence
  Description of Artificial Sequence: Synthetic oligonucleotide
cguuggguggaaucuugcc

SEQ ID NO: 2566409 - RNA, 19 nt, Artificial Sequence
  Description of Artificial Sequence: Synthetic oligonucleotide
ggaaucuugccuucugcau

SEQ ID NO: 2566410 - RNA, 19 nt, Artificial Sequence
  Description of Artificial Sequence: Synthetic oligonucleotide
gcccuuuuaugacgugccc

SEQ ID NO: 2566411 - RNA, 19 nt, Artificial Sequence
  Description of Artificial Sequence: Synthetic oligonucleotide
uugcguuggguggaaucuu

SEQ ID NO: 2566412 - RNA, 19 nt, Artificial Sequence
  Description of Artificial Sequence: Synthetic oligonucleotide
ggccuucaucuuguguccg

SEQ ID NO: 2566413 - RNA, 19 nt, Artificial Sequence
  Description of Artificial Sequence: Synthetic oligonucleotide
cguaaugggcauuuagcaa

SEQ ID NO: 2566414 - RNA, 19 nt, Artificial Sequence
  Description of Artificial Sequence: Synthetic oligonucleotide
cccaggccuaguguaagcc

SEQ ID NO: 2566415 - RNA, 19 nt, Artificial Sequence
  Description of Artificial Sequence: Synthetic oligonucleotide
aguguugcguuggguggaa

SEQ ID NO: 2566416 - RNA, 19 nt, Artificial Sequence
  Description of Artificial Sequence: Synthetic oligonucleotide
caucuuguguccggcugca

SEQ ID NO: 2566417 - RNA, 19 nt, Artificial Sequence
  Description of Artificial Sequence: Synthetic oligonucleotide
ccggcugcaguagaauuug

SEQ ID NO: 2566418 - RNA, 19 nt, Artificial Sequence
  Description of Artificial Sequence: Synthetic oligonucleotide
gugguccuuuggucacagc

SEQ ID NO: 2566419 - RNA, 19 nt, Artificial Sequence
  Description of Artificial Sequence: Synthetic oligonucleotide
gccuucuuuuccauaugca

SEQ ID NO: 2566420 - RNA, 19 nt, Artificial Sequence
  Description of Artificial Sequence: Synthetic oligonucleotide
caguguugcguugggugga

SEQ ID NO: 2566421 - RNA, 19 nt, Artificial Sequence
  Description of Artificial Sequence: Synthetic oligonucleotide
gguaccccaggccuagugu

SEQ ID NO: 2566422 - RNA, 19 nt, Artificial Sequence
  Description of Artificial Sequence: Synthetic oligonucleotide
aggcugagcaaaaccgcua

SEQ ID NO: 2566423 - RNA, 19 nt, Artificial Sequence
  Description of Artificial Sequence: Synthetic oligonucleotide
gccugaauaggaaaugcau

SEQ ID NO: 2566424 - RNA, 19 nt, Artificial Sequence
  Description of Artificial Sequence: Synthetic oligonucleotide
gcuagccugaauaggaaau

SEQ ID NO: 2566425 - RNA, 19 nt, Artificial Sequence
  Description of Artificial Sequence: Synthetic oligonucleotide
gucacagcguacaguucaa

SEQ ID NO: 2566426 - RNA, 19 nt, Artificial Sequence
  Description of Artificial Sequence: Synthetic oligonucleotide
caccaaaauuauguuuagu

SEQ ID NO: 2566427 - RNA, 19 nt, Artificial Sequence
  Description of Artificial Sequence: Synthetic oligonucleotide
caccaagaacaaaccauuu

SEQ ID NO: 2566428 - RNA, 19 nt, Artificial Sequence
  Description of Artificial Sequence: Synthetic oligonucleotide
augacgugcccaacaccaa

SEQ ID NO: 2566429 - RNA, 19 nt, Artificial Sequence
  Description of Artificial Sequence: Synthetic oligonucleotide
gcauuuagcaagucuccuu

SEQ ID NO: 2566430 - RNA, 19 nt, Artificial Sequence
  Description of Artificial Sequence: Synthetic oligonucleotide
guugccggucauugucugu

SEQ ID NO: 2566431 - RNA, 19 nt, Artificial Sequence
  Description of Artificial Sequence: Synthetic oligonucleotide
ccuggagaaaaguaauuuu

SEQ ID NO: 2566432 - RNA, 19 nt, Artificial Sequence
  Description of Artificial Sequence: Synthetic oligonucleotide
ucaaugcuccgugguccuu

SEQ ID NO: 2566433 - RNA, 19 nt, Artificial Sequence
  Description of Artificial Sequence: Synthetic oligonucleotide
ccagggcacauguccauca

SEQ ID NO: 2566434 - RNA, 19 nt, Artificial Sequence
  Description of Artificial Sequence: Synthetic oligonucleotide
gggguauaaucaccuuucu

SEQ ID NO: 2566435 - RNA, 19 nt, Artificial Sequence
  Description of Artificial Sequence: Synthetic oligonucleotide
gguccuuuggucacagcgu

SEQ ID NO: 2566436 - RNA, 19 nt, Artificial Sequence
  Description of Artificial Sequence: Synthetic oligonucleotide
cccuuuuaugacgugccca

SEQ ID NO: 2566437 - RNA, 19 nt, Artificial Sequence
  Description of Artificial Sequence: Synthetic oligonucleotide
gcguuagaacagcuccaca

SEQ ID NO: 2566438 - RNA, 19 nt, Artificial Sequence
  Description of Artificial Sequence: Synthetic oligonucleotide
ggcauuuagcaagucuccu

SEQ ID NO: 2566439 - RNA, 19 nt, Artificial Sequence
  Description of Artificial Sequence: Synthetic oligonucleotide
ccagguaccccaggccuag

SEQ ID NO: 2566440 - RNA, 19 nt, Artificial Sequence
  Description of Artificial Sequence: Synthetic oligonucleotide
gcguuggguggaaucuugc

SEQ ID NO: 2566441 - RNA, 19 nt, Artificial Sequence
  Description of Artificial Sequence: Synthetic oligonucleotide
cccugagcguuagaacagc

SEQ ID NO: 2566442 - RNA, 19 nt, Artificial Sequence
  Description of Artificial Sequence: Synthetic oligonucleotide
uagcaauguccagcccuuu

SEQ ID NO: 2566443 - RNA, 19 nt, Artificial Sequence
  Description of Artificial Sequence: Synthetic oligonucleotide
ccugcuuguuuuggagcag

SEQ ID NO: 2566444 - RNA, 19 nt, Artificial Sequence
  Description of Artificial Sequence: Synthetic oligonucleotide
gguggccuucaucuugugu

SEQ ID NO: 2566445 - RNA, 19 nt, Artificial Sequence
  Description of Artificial Sequence: Synthetic oligonucleotide
guccggcugcaguagaauu

SEQ ID NO: 2566446 - RNA, 19 nt, Artificial Sequence
  Description of Artificial Sequence: Synthetic oligonucleotide
cgugcccaacaccaagaac

SEQ ID NO: 2566447 - RNA, 19 nt, Artificial Sequence
  Description of Artificial Sequence: Synthetic oligonucleotide
cugcuuguuuuggagcagu

SEQ ID NO: 2566448 - RNA, 19 nt, Artificial Sequence
  Description of Artificial Sequence: Synthetic oligonucleotide
ggacgaugcaaaacuucua

SEQ ID NO: 2566449 - RNA, 19 nt, Artificial Sequence
  Description of Artificial Sequence: Synthetic oligonucleotide
guguccggcugcaguagaa

SEQ ID NO: 2566450 - RNA, 19 nt, Artificial Sequence
  Description of Artificial Sequence: Synthetic oligonucleotide
caagucuccuuuccugcuu

SEQ ID NO: 2566451 - RNA, 19 nt, Artificial Sequence
  Description of Artificial Sequence: Synthetic oligonucleotide
caguagaauuuggagccau

SEQ ID NO: 2566452 - RNA, 19 nt, Artificial Sequence
  Description of Artificial Sequence: Synthetic oligonucleotide
cguacaguucaaucucaaa

SEQ ID NO: 2566453 - RNA, 19 nt, Artificial Sequence
  Description of Artificial Sequence: Synthetic oligonucleotide
caucaguguugcguugggu

SEQ ID NO: 2566454 - RNA, 19 nt, Artificial Sequence
  Description of Artificial Sequence: Synthetic oligonucleotide
ccagcccuuuuaugacgug

SEQ ID NO: 2566455 - RNA, 19 nt, Artificial Sequence
  Description of Artificial Sequence: Synthetic oligonucleotide
gcguacaguucaaucucaa

SEQ ID NO: 2566456 - RNA, 19 nt, Artificial Sequence
  Description of Artificial Sequence: Synthetic oligonucleotide
ccggucauugucugugucu

SEQ ID NO: 2566457 - RNA, 19 nt, Artificial Sequence
  Description of Artificial Sequence: Synthetic oligonucleotide
ggguggccuucaucuugug

SEQ ID NO: 2566458 - RNA, 19 nt, Artificial Sequence
  Description of Artificial Sequence: Synthetic oligonucleotide
caucauguuggugcacauu

SEQ ID NO: 2566459 - RNA, 19 nt, Artificial Sequence
  Description of Artificial Sequence: Synthetic oligonucleotide
cgugguccuuuggucacag

SEQ ID NO: 2566460 - RNA, 19 nt, Artificial Sequence
  Description of Artificial Sequence: Synthetic oligonucleotide
cgcuagccugaauaggaaa

SEQ ID NO: 2566461 - RNA, 19 nt, Artificial Sequence
  Description of Artificial Sequence: Synthetic oligonucleotide
agccgucguaaugggcauu

SEQ ID NO: 2566462 - RNA, 19 nt, Artificial Sequence
  Description of Artificial Sequence: Synthetic oligonucleotide
gagcaguuuucuggacgau

SEQ ID NO: 2566463 - RNA, 19 nt, Artificial Sequence
  Description of Artificial Sequence: Synthetic oligonucleotide
caaugcuccgugguccuuu

SEQ ID NO: 2566464 - RNA, 19 nt, Artificial Sequence
  Description of Artificial Sequence: Synthetic oligonucleotide
ccugagcguuagaacagcu

SEQ ID NO: 2566465 - RNA, 19 nt, Artificial Sequence
  Description of Artificial Sequence: Synthetic oligonucleotide
ccgcuagccugaauaggaa

SEQ ID NO: 2566466 - RNA, 19 nt, Artificial Sequence
  Description of Artificial Sequence: Synthetic oligonucleotide
caaaaccgcuagccugaau

SEQ ID NO: 2566467 - RNA, 19 nt, Artificial Sequence
  Description of Artificial Sequence: Synthetic oligonucleotide
gcaaaaccgcuagccugaa

SEQ ID NO: 2566468 - RNA, 19 nt, Artificial Sequence
  Description of Artificial Sequence: Synthetic oligonucleotide
cggucauugucugugucua

SEQ ID NO: 2566469 - RNA, 19 nt, Artificial Sequence
  Description of Artificial Sequence: Synthetic oligonucleotide
ccacaaccuggagaaaagu

SEQ ID NO: 2566470 - RNA, 19 nt, Artificial Sequence
  Description of Artificial Sequence: Synthetic oligonucleotide
cccagguaccccaggccua

SEQ ID NO: 2566471 - RNA, 19 nt, Artificial Sequence
  Description of Artificial Sequence: Synthetic oligonucleotide
ggugcacauuguauuccuu

SEQ ID NO: 2566472 - RNA, 19 nt, Artificial Sequence
  Description of Artificial Sequence: Synthetic oligonucleotide
gccgucguaaugggcauuu

SEQ ID NO: 2566473 - RNA, 19 nt, Artificial Sequence
  Description of Artificial Sequence: Synthetic oligonucleotide
cguuugucccugagcguua

SEQ ID NO: 2566474 - RNA, 19 nt, Artificial Sequence
  Description of Artificial Sequence: Synthetic oligonucleotide
guguugcguuggguggaau

SEQ ID NO: 2566475 - RNA, 19 nt, Artificial Sequence
  Description of Artificial Sequence: Synthetic oligonucleotide
cagguaccccaggccuagu

SEQ ID NO: 2566476 - RNA, 19 nt, Artificial Sequence
  Description of Artificial Sequence: Synthetic oligonucleotide
ccgucguaaugggcauuua

SEQ ID NO: 2566477 - RNA, 19 nt, Artificial Sequence
  Description of Artificial Sequence: Synthetic oligonucleotide
uguagugucaggaacagcg

SEQ ID NO: 2566478 - RNA, 19 nt, Artificial Sequence
  Description of Artificial Sequence: Synthetic oligonucleotide
aaagacuccagccaugagg

SEQ ID NO: 2566479 - RNA, 19 nt, Artificial Sequence
  Description of Artificial Sequence: Synthetic oligonucleotide
aaagcaacuccuuucacag

SEQ ID NO: 2566480 - RNA, 19 nt, Artificial Sequence
  Description of Artificial Sequence: Synthetic oligonucleotide
aaugcuaccagcuccagca

SEQ ID NO: 2566481 - RNA, 19 nt, Artificial Sequence
  Description of Artificial Sequence: Synthetic oligonucleotide
aaguaaagcaacuccuuuc

SEQ ID NO: 2566482 - RNA, 19 nt, Artificial Sequence
  Description of Artificial Sequence: Synthetic oligonucleotide
aagauucuggccaaggagc

SEQ ID NO: 2566483 - RNA, 19 nt, Artificial Sequence
  Description of Artificial Sequence: Synthetic oligonucleotide
gaaugaaugguucuagaag

SEQ ID NO: 2566484 - RNA, 19 nt, Artificial Sequence
  Description of Artificial Sequence: Synthetic oligonucleotide
ugaacagaagugaagauuc

SEQ ID NO: 2566485 - RNA, 19 nt, Artificial Sequence
  Description of Artificial Sequence: Synthetic oligonucleotide
agaagugaagauucuggcc

SEQ ID NO: 2566486 - RNA, 19 nt, Artificial Sequence
  Description of Artificial Sequence: Synthetic oligonucleotide
aggagugucgcauagcagg

SEQ ID NO: 2566487 - RNA, 19 nt, Artificial Sequence
  Description of Artificial Sequence: Synthetic oligonucleotide
aaauaucuggggcagccag

SEQ ID NO: 2566488 - RNA, 19 nt, Artificial Sequence
  Description of Artificial Sequence: Synthetic oligonucleotide
auuuuaaauaucuggggca

SEQ ID NO: 2566489 - RNA, 19 nt, Artificial Sequence
  Description of Artificial Sequence: Synthetic oligonucleotide
auuccaguagaagaggacc

SEQ ID NO: 2566490 - RNA, 19 nt, Artificial Sequence
  Description of Artificial Sequence: Synthetic oligonucleotide
gaagugaagauucuggcca

SEQ ID NO: 2566491 - RNA, 19 nt, Artificial Sequence
  Description of Artificial Sequence: Synthetic oligonucleotide
gaagauucuggccaaggag

SEQ ID NO: 2566492 - RNA, 19 nt, Artificial Sequence
  Description of Artificial Sequence: Synthetic oligonucleotide
acagcagguacauuggagg

SEQ ID NO: 2566493 - RNA, 19 nt, Artificial Sequence
  Description of Artificial Sequence: Synthetic oligonucleotide
gaguggagaaagcagagcc

SEQ ID NO: 2566494 - RNA, 19 nt, Artificial Sequence
  Description of Artificial Sequence: Synthetic oligonucleotide
uagaagaggaccugggcgg

SEQ ID NO: 2566495 - RNA, 19 nt, Artificial Sequence
  Description of Artificial Sequence: Synthetic oligonucleotide
auagcaggcaaguaaagca

SEQ ID NO: 2566496 - RNA, 19 nt, Artificial Sequence
  Description of Artificial Sequence: Synthetic oligonucleotide
uuuuaaauaucuggggcag

SEQ ID NO: 2566497 - RNA, 19 nt, Artificial Sequence
  Description of Artificial Sequence: Synthetic oligonucleotide
agguaagagaacuggcacc

SEQ ID NO: 2566498 - RNA, 19 nt, Artificial Sequence
  Description of Artificial Sequence: Synthetic oligonucleotide
uugcauuccaguagaagag

SEQ ID NO: 2566499 - RNA, 19 nt, Artificial Sequence
  Description of Artificial Sequence: Synthetic oligonucleotide
ugcuguagaucacaguucc

SEQ ID NO: 2566500 - RNA, 19 nt, Artificial Sequence
  Description of Artificial Sequence: Synthetic oligonucleotide
ugucaaugcuaccagcucc

SEQ ID NO: 2566501 - RNA, 19 nt, Artificial Sequence
  Description of Artificial Sequence: Synthetic oligonucleotide
agcucagcacuauugcucc

SEQ ID NO: 2566502 - RNA, 19 nt, Artificial Sequence
  Description of Artificial Sequence: Synthetic oligonucleotide
aaugguucuagaagcuagc

SEQ ID NO: 2566503 - RNA, 19 nt, Artificial Sequence
  Description of Artificial Sequence: Synthetic oligonucleotide
uuggucauagcauuucuca

SEQ ID NO: 2566504 - RNA, 19 nt, Artificial Sequence
  Description of Artificial Sequence: Synthetic oligonucleotide
uaaagcaacuccuuucaca

SEQ ID NO: 2566505 - RNA, 19 nt, Artificial Sequence
  Description of Artificial Sequence: Synthetic oligonucleotide
ucagguaagagaacuggca

SEQ ID NO: 2566506 - RNA, 19 nt, Artificial Sequence
  Description of Artificial Sequence: Synthetic oligonucleotide
aaggaagucccaguggacg

SEQ ID NO: 2566507 - RNA, 19 nt, Artificial Sequence
  Description of Artificial Sequence: Synthetic oligonucleotide
aguaaagcaacuccuuuca

SEQ ID NO: 2566508 - RNA, 19 nt, Artificial Sequence
  Description of Artificial Sequence: Synthetic oligonucleotide
uacauuggaggccuggagc

SEQ ID NO: 2566509 - RNA, 19 nt, Artificial Sequence
  Description of Artificial Sequence: Synthetic oligonucleotide
uuaaauaucuggggcagcc

SEQ ID NO: 2566510 - RNA, 19 nt, Artificial Sequence
  Description of Artificial Sequence: Synthetic oligonucleotide
agcgcuucaccccaagagc

SEQ ID NO: 2566511 - RNA, 19 nt, Artificial Sequence
  Description of Artificial Sequence: Synthetic oligonucleotide
acugugauagcugaaagcu

SEQ ID NO: 2566512 - RNA, 19 nt, Artificial Sequence
  Description of Artificial Sequence: Synthetic oligonucleotide
ucucagguaagagaacugg

SEQ ID NO: 2566513 - RNA, 19 nt, Artificial Sequence
  Description of Artificial Sequence: Synthetic oligonucleotide
uccuucggcacucuuggcg

SEQ ID NO: 2566514 - RNA, 19 nt, Artificial Sequence
  Description of Artificial Sequence: Synthetic oligonucleotide
agugauccagccacgaugc

SEQ ID NO: 2566515 - RNA, 19 nt, Artificial Sequence
  Description of Artificial Sequence: Synthetic oligonucleotide
cauugcagagggaagagac

SEQ ID NO: 2566516 - RNA, 19 nt, Artificial Sequence
  Description of Artificial Sequence: Synthetic oligonucleotide
agcaacuccuuucacagug

SEQ ID NO: 2566517 - RNA, 19 nt, Artificial Sequence
  Description of Artificial Sequence: Synthetic oligonucleotide
cugaaggggaaguuguugg

SEQ ID NO: 2566518 - RNA, 19 nt, Artificial Sequence
  Description of Artificial Sequence: Synthetic oligonucleotide
aguccuucggcacucuugg

SEQ ID NO: 2566519 - RNA, 19 nt, Artificial Sequence
  Description of Artificial Sequence: Synthetic oligonucleotide
aggaacagcgcuucacccc

SEQ ID NO: 2566520 - RNA, 19 nt, Artificial Sequence
  Description of Artificial Sequence: Synthetic oligonucleotide
aacagcauaaacacuguga

SEQ ID NO: 2566521 - RNA, 19 nt, Artificial Sequence
  Description of Artificial Sequence: Synthetic oligonucleotide
acuccuuucacagugucuc

SEQ ID NO: 2566522 - RNA, 19 nt, Artificial Sequence
  Description of Artificial Sequence: Synthetic oligonucleotide
gguucuagaagcuagcuca

SEQ ID NO: 2566523 - RNA, 19 nt, Artificial Sequence
  Description of Artificial Sequence: Synthetic oligonucleotide
gagcauggugacuacagcc

SEQ ID NO: 2566524 - RNA, 19 nt, Artificial Sequence
  Description of Artificial Sequence: Synthetic oligonucleotide
uuuuauguuuguggggagg

SEQ ID NO: 2566525 - RNA, 19 nt, Artificial Sequence
  Description of Artificial Sequence: Synthetic oligonucleotide
acagaagugaagauucugg

SEQ ID NO: 2566526 - RNA, 19 nt, Artificial Sequence
  Description of Artificial Sequence: Synthetic oligonucleotide
uaagagaacuggcaccagc

SEQ ID NO: 2566527 - RNA, 19 nt, Artificial Sequence
  Description of Artificial Sequence: Synthetic oligonucleotide
gaaugguucuagaagcuag

SEQ ID NO: 2566528 - RNA, 19 nt, Artificial Sequence
  Description of Artificial Sequence: Synthetic oligonucleotide
uagaagcuagcucagcacu

SEQ ID NO: 2566529 - RNA, 19 nt, Artificial Sequence
  Description of Artificial Sequence: Synthetic oligonucleotide
ucaggaacagcgcuucacc

SEQ ID NO: 2566530 - RNA, 19 nt, Artificial Sequence
  Description of Artificial Sequence: Synthetic oligonucleotide
aaggggaaguuguugguga

SEQ ID NO: 2566531 - RNA, 19 nt, Artificial Sequence
  Description of Artificial Sequence: Synthetic oligonucleotide
uuuauguuuguggggaggc

SEQ ID NO: 2566532 - RNA, 19 nt, Artificial Sequence
  Description of Artificial Sequence: Synthetic oligonucleotide
ccaaacagcauaaacacug

SEQ ID NO: 2566533 - RNA, 19 nt, Artificial Sequence
  Description of Artificial Sequence: Synthetic oligonucleotide
gaccacaaagacuccagcc

SEQ ID NO: 2566534 - RNA, 19 nt, Artificial Sequence
  Description of Artificial Sequence: Synthetic oligonucleotide
auagcugaaagcuggccug

SEQ ID NO: 2566535 - RNA, 19 nt, Artificial Sequence
  Description of Artificial Sequence: Synthetic oligonucleotide
agugucuccucuguagugc

SEQ ID NO: 2566536 - RNA, 19 nt, Artificial Sequence
  Description of Artificial Sequence: Synthetic oligonucleotide
gacgaaaaguuggucauag

SEQ ID NO: 2566537 - RNA, 19 nt, Artificial Sequence
  Description of Artificial Sequence: Synthetic oligonucleotide
agccagaagugauccagcc

SEQ ID NO: 2566538 - RNA, 19 nt, Artificial Sequence
  Description of Artificial Sequence: Synthetic oligonucleotide
uuucucagguaagagaacu

SEQ ID NO: 2566539 - RNA, 19 nt, Artificial Sequence
  Description of Artificial Sequence: Synthetic oligonucleotide
uccugaacagaagugaaga

SEQ ID NO: 2566540 - RNA, 19 nt, Artificial Sequence
  Description of Artificial Sequence: Synthetic oligonucleotide
cagaagugaagauucuggc

SEQ ID NO: 2566541 - RNA, 19 nt, Artificial Sequence
  Description of Artificial Sequence: Synthetic oligonucleotide
aauugucuguagugucagg

SEQ ID NO: 2566542 - RNA, 19 nt, Artificial Sequence
  Description of Artificial Sequence: Synthetic oligonucleotide
agaccacaaagacuccagc

SEQ ID NO: 2566543 - RNA, 19 nt, Artificial Sequence
  Description of Artificial Sequence: Synthetic oligonucleotide
ugucuguagugucaggaac

SEQ ID NO: 2566544 - RNA, 19 nt, Artificial Sequence
  Description of Artificial Sequence: Synthetic oligonucleotide
augaaggaagucccagugg

SEQ ID NO: 2566545 - RNA, 19 nt, Artificial Sequence
  Description of Artificial Sequence: Synthetic oligonucleotide
gaaguuguuggugaugcug

SEQ ID NO: 2566546 - RNA, 19 nt, Artificial Sequence
  Description of Artificial Sequence: Synthetic oligonucleotide
aacagaagugaagauucug

SEQ ID NO: 2566547 - RNA, 19 nt, Artificial Sequence
  Description of Artificial Sequence: Synthetic oligonucleotide
accacaaagacuccagcca

SEQ ID NO: 2566548 - RNA, 19 nt, Artificial Sequence
  Description of Artificial Sequence: Synthetic oligonucleotide
uccagcauuacugacugga

SEQ ID NO: 2566549 - RNA, 19 nt, Artificial Sequence
  Description of Artificial Sequence: Synthetic oligonucleotide
caccacagcagguacauug

SEQ ID NO: 2566550 - RNA, 19 nt, Artificial Sequence
  Description of Artificial Sequence: Synthetic oligonucleotide
aaguuggucauagcauuuc

SEQ ID NO: 2566551 - RNA, 19 nt, Artificial Sequence
  Description of Artificial Sequence: Synthetic oligonucleotide
caugaaggaagucccagug

SEQ ID NO: 2566552 - RNA, 19 nt, Artificial Sequence
  Description of Artificial Sequence: Synthetic oligonucleotide
acgaugcccaguccaaggc

SEQ ID NO: 2566553 - RNA, 19 nt, Artificial Sequence
  Description of Artificial Sequence: Synthetic oligonucleotide
uguagaucacaguuccugu

SEQ ID NO: 2566554 - RNA, 19 nt, Artificial Sequence
  Description of Artificial Sequence: Synthetic oligonucleotide
aguccaaggccuuugcuga

SEQ ID NO: 2566555 - RNA, 19 nt, Artificial Sequence
  Description of Artificial Sequence: Synthetic oligonucleotide
aaggccuuugcugaggaga

SEQ ID NO: 2566556 - RNA, 19 nt, Artificial Sequence
  Description of Artificial Sequence: Synthetic oligonucleotide
ugcccguugugguaguugg

SEQ ID NO: 2566557 - RNA, 19 nt, Artificial Sequence
  Description of Artificial Sequence: Synthetic oligonucleotide
gaugcuguagaucacaguu

SEQ ID NO: 2566558 - RNA, 19 nt, Artificial Sequence
  Description of Artificial Sequence: Synthetic oligonucleotide
uuccaguagaagaggaccu

SEQ ID NO: 2566559 - RNA, 19 nt, Artificial Sequence
  Description of Artificial Sequence: Synthetic oligonucleotide
ugcauuccaguagaagagg

SEQ ID NO: 2566560 - RNA, 19 nt, Artificial Sequence
  Description of Artificial Sequence: Synthetic oligonucleotide
ucgcauagcaggcaaguaa

SEQ ID NO: 2566561 - RNA, 19 nt, Artificial Sequence
  Description of Artificial Sequence: Synthetic oligonucleotide
ugaaagcuggccugugugc

SEQ ID NO: 2566562 - RNA, 19 nt, Artificial Sequence
  Description of Artificial Sequence: Synthetic oligonucleotide
cacugugauagcugaaagc

SEQ ID NO: 2566563 - RNA, 19 nt, Artificial Sequence
  Description of Artificial Sequence: Synthetic oligonucleotide
uuuguggggaggcuuugca

SEQ ID NO: 2566564 - RNA, 19 nt, Artificial Sequence
  Description of Artificial Sequence: Synthetic oligonucleotide
acacugugauagcugaaag

SEQ ID NO: 2566565 - RNA, 19 nt, Artificial Sequence
  Description of Artificial Sequence: Synthetic oligonucleotide
cucagguaagagaacuggc

SEQ ID NO: 2566566 - RNA, 19 nt, Artificial Sequence
  Description of Artificial Sequence: Synthetic oligonucleotide
uagcucagcacuauugcuc

SEQ ID NO: 2566567 - RNA, 19 nt, Artificial Sequence
  Description of Artificial Sequence: Synthetic oligonucleotide
caccccaagagcugaaggg

SEQ ID NO: 2566568 - RNA, 19 nt, Artificial Sequence
  Description of Artificial Sequence: Synthetic oligonucleotide
acgaaaaguuggucauagc

SEQ ID NO: 2566569 - RNA, 19 nt, Artificial Sequence
  Description of Artificial Sequence: Synthetic oligonucleotide
gaggagaaucuugaggcag

SEQ ID NO: 2566570 - RNA, 19 nt, Artificial Sequence
  Description of Artificial Sequence: Synthetic oligonucleotide
cauagcaggcaaguaaagc

SEQ ID NO: 2566571 - RNA, 19 nt, Artificial Sequence
  Description of Artificial Sequence: Synthetic oligonucleotide
cuagaagcuagcucagcac

SEQ ID NO: 2566572 - RNA, 19 nt, Artificial Sequence
  Description of Artificial Sequence: Synthetic oligonucleotide
uucacagugucuccucugu

SEQ ID NO: 2566573 - RNA, 19 nt, Artificial Sequence
  Description of Artificial Sequence: Synthetic oligonucleotide
auugucuguagugucagga

SEQ ID NO: 2566574 - RNA, 19 nt, Artificial Sequence
  Description of Artificial Sequence: Synthetic oligonucleotide
agacucaguccuucggcac

SEQ ID NO: 2566575 - RNA, 19 nt, Artificial Sequence
  Description of Artificial Sequence: Synthetic oligonucleotide
accugggcggcaaugaggc

SEQ ID NO: 2566576 - RNA, 19 nt, Artificial Sequence
  Description of Artificial Sequence: Synthetic oligonucleotide
uucucagguaagagaacug

SEQ ID NO: 2566577 - RNA, 19 nt, Artificial Sequence
  Description of Artificial Sequence: Synthetic oligonucleotide
gugacuacagccagaggcg

SEQ ID NO: 2566578 - RNA, 19 nt, Artificial Sequence
  Description of Artificial Sequence: Synthetic oligonucleotide
cagguaagagaacuggcac

SEQ ID NO: 2566579 - RNA, 19 nt, Artificial Sequence
  Description of Artificial Sequence: Synthetic oligonucleotide
aacacugugauagcugaaa

SEQ ID NO: 2566580 - RNA, 19 nt, Artificial Sequence
  Description of Artificial Sequence: Synthetic oligonucleotide
uagcaggcaaguaaagcaa

SEQ ID NO: 2566581 - RNA, 19 nt, Artificial Sequence
  Description of Artificial Sequence: Synthetic oligonucleotide
agcagguacauuggaggcc

SEQ ID NO: 2566582 - RNA, 19 nt, Artificial Sequence
  Description of Artificial Sequence: Synthetic oligonucleotide
aggcuuugcauuccaguag

SEQ ID NO: 2566583 - RNA, 19 nt, Artificial Sequence
  Description of Artificial Sequence: Synthetic oligonucleotide
uggacgaaaaguuggucau

SEQ ID NO: 2566584 - RNA, 19 nt, Artificial Sequence
  Description of Artificial Sequence: Synthetic oligonucleotide
guggacgaaaaguugguca

SEQ ID NO: 2566585 - RNA, 19 nt, Artificial Sequence
  Description of Artificial Sequence: Synthetic oligonucleotide
ugguaauugucuguagugu

SEQ ID NO: 2566586 - RNA, 19 nt, Artificial Sequence
  Description of Artificial Sequence: Synthetic oligonucleotide
aguuccugucaaugcuacc

SEQ ID NO: 2566587 - RNA, 19 nt, Artificial Sequence
  Description of Artificial Sequence: Synthetic oligonucleotide
uagugucaggaacagcgcu

SEQ ID NO: 2566588 - RNA, 19 nt, Artificial Sequence
  Description of Artificial Sequence: Synthetic oligonucleotide
uggaaugaaugguucuaga

SEQ ID NO: 2566589 - RNA, 19 nt, Artificial Sequence
  Description of Artificial Sequence: Synthetic oligonucleotide
ggaacaugaaggaaguccc

SEQ ID NO: 2566590 - RNA, 19 nt, Artificial Sequence
  Description of Artificial Sequence: Synthetic oligonucleotide
caguccaaggccuuugcug

SEQ ID NO: 2566591 - RNA, 19 nt, Artificial Sequence
  Description of Artificial Sequence: Synthetic oligonucleotide
gauagcugaaagcuggccu

SEQ ID NO: 2566592 - RNA, 19 nt, Artificial Sequence
  Description of Artificial Sequence: Synthetic oligonucleotide
gaggcgugaguggagaaag

SEQ ID NO: 2566593 - RNA, 19 nt, Artificial Sequence
  Description of Artificial Sequence: Synthetic oligonucleotide
gaaagcuggccugugugcc

SEQ ID NO: 2566594 - RNA, 19 nt, Artificial Sequence
  Description of Artificial Sequence: Synthetic oligonucleotide
gaugguaauugucuguagu

SEQ ID NO: 2566595 - RNA, 19 nt, Artificial Sequence
  Description of Artificial Sequence: Synthetic oligonucleotide
ccaguggacgaaaaguugg

SEQ ID NO: 2566596 - RNA, 19 nt, Artificial Sequence
  Description of Artificial Sequence: Synthetic oligonucleotide
agaugguaauugucuguag

SEQ ID NO: 2566597 - RNA, 19 nt, Artificial Sequence
  Description of Artificial Sequence: Synthetic oligonucleotide
uuuaaauaucuggggcagc

SEQ ID NO: 2566598 - RNA, 19 nt, Artificial Sequence
  Description of Artificial Sequence: Synthetic oligonucleotide
ugaggagaaucuugaggca

SEQ ID NO: 2566599 - RNA, 19 nt, Artificial Sequence
  Description of Artificial Sequence: Synthetic oligonucleotide
aguuggucauagcauuucu

SEQ ID NO: 2566600 - RNA, 19 nt, Artificial Sequence
  Description of Artificial Sequence: Synthetic oligonucleotide
ugguucuagaagcuagcuc

SEQ ID NO: 2566601 - RNA, 19 nt, Artificial Sequence
  Description of Artificial Sequence: Synthetic oligonucleotide
cuuugcauuccaguagaag

SEQ ID NO: 2566602 - RNA, 19 nt, Artificial Sequence
  Description of Artificial Sequence: Synthetic oligonucleotide
caaugaggccauugcagag

SEQ ID NO: 2566603 - RNA, 19 nt, Artificial Sequence
  Description of Artificial Sequence: Synthetic oligonucleotide
gaagcagaugguaauuguc

SEQ ID NO: 2566604 - RNA, 19 nt, Artificial Sequence
  Description of Artificial Sequence: Synthetic oligonucleotide
aacuugcccaccaccacag

SEQ ID NO: 2566605 - RNA, 19 nt, Artificial Sequence
  Description of Artificial Sequence: Synthetic oligonucleotide
aaagcagagccagcaggag

SEQ ID NO: 2566606 - RNA, 19 nt, Artificial Sequence
  Description of Artificial Sequence: Synthetic oligonucleotide
auggugacuacagccagag

SEQ ID NO: 2566607 - RNA, 19 nt, Artificial Sequence
  Description of Artificial Sequence: Synthetic oligonucleotide
aagugaagauucuggccaa

SEQ ID NO: 2566608 - RNA, 19 nt, Artificial Sequence
  Description of Artificial Sequence: Synthetic oligonucleotide
ccagaagugauccagccac

SEQ ID NO: 2566609 - RNA, 19 nt, Artificial Sequence
  Description of Artificial Sequence: Synthetic oligonucleotide
gaaucuugaggcagggaac

SEQ ID NO: 2566610 - RNA, 19 nt, Artificial Sequence
  Description of Artificial Sequence: Synthetic oligonucleotide
ucccaguggacgaaaaguu

SEQ ID NO: 2566611 - RNA, 19 nt, Artificial Sequence
  Description of Artificial Sequence: Synthetic oligonucleotide
gagaccacaaagacuccag

SEQ ID NO: 2566612 - RNA, 19 nt, Artificial Sequence
  Description of Artificial Sequence: Synthetic oligonucleotide
cagcagguacauuggaggc

SEQ ID NO: 2566613 - RNA, 19 nt, Artificial Sequence
  Description of Artificial Sequence: Synthetic oligonucleotide
gaaagcagagccagcagga

SEQ ID NO: 2566614 - RNA, 19 nt, Artificial Sequence
  Description of Artificial Sequence: Synthetic oligonucleotide
ugaaggggaaguuguuggu

SEQ ID NO: 2566615 - RNA, 19 nt, Artificial Sequence
  Description of Artificial Sequence: Synthetic oligonucleotide
aagagaccacaaagacucc

SEQ ID NO: 2566616 - RNA, 19 nt, Artificial Sequence
  Description of Artificial Sequence: Synthetic oligonucleotide
guuccugucaaugcuacca

SEQ ID NO: 2566617 - RNA, 19 nt, Artificial Sequence
  Description of Artificial Sequence: Synthetic oligonucleotide
caggaacagcgcuucaccc

SEQ ID NO: 2566618 - RNA, 19 nt, Artificial Sequence
  Description of Artificial Sequence: Synthetic oligonucleotide
uguggggaggcuuugcauu

SEQ ID NO: 2566619 - RNA, 19 nt, Artificial Sequence
  Description of Artificial Sequence: Synthetic oligonucleotide
gggaagagaccacaaagac

SEQ ID NO: 2566620 - RNA, 19 nt, Artificial Sequence
  Description of Artificial Sequence: Synthetic oligonucleotide
gguaauugucuguaguguc

SEQ ID NO: 2566621 - RNA, 19 nt, Artificial Sequence
  Description of Artificial Sequence: Synthetic oligonucleotide
gucuccaguuuccugaaca

SEQ ID NO: 2566622 - RNA, 19 nt, Artificial Sequence
  Description of Artificial Sequence: Synthetic oligonucleotide
ugauagcugaaagcuggcc

SEQ ID NO: 2566623 - RNA, 19 nt, Artificial Sequence
  Description of Artificial Sequence: Synthetic oligonucleotide
cagcgcuucaccccaagag

SEQ ID NO: 2566624 - RNA, 19 nt, Artificial Sequence
  Description of Artificial Sequence: Synthetic oligonucleotide
aguggacgaaaaguugguc

SEQ ID NO: 2566625 - RNA, 19 nt, Artificial Sequence
  Description of Artificial Sequence: Synthetic oligonucleotide
agucccaguggacgaaaag

SEQ ID NO: 2566626 - RNA, 19 nt, Artificial Sequence
  Description of Artificial Sequence: Synthetic oligonucleotide
gagcaacuugcccaccacc

SEQ ID NO: 2566627 - RNA, 19 nt, Artificial Sequence
  Description of Artificial Sequence: Synthetic oligonucleotide
uugucuguagugucaggaa

SEQ ID NO: 2566628 - RNA, 19 nt, Artificial Sequence
  Description of Artificial Sequence: Synthetic oligonucleotide
cauuacugacuggagacuc

SEQ ID NO: 2566629 - RNA, 19 nt, Artificial Sequence
  Description of Artificial Sequence: Synthetic oligonucleotide
aguuuccugaacagaagug

SEQ ID NO: 2566630 - RNA, 19 nt, Artificial Sequence
  Description of Artificial Sequence: Synthetic oligonucleotide
guaauugucuguaguguca

SEQ ID NO: 2566631 - RNA, 19 nt, Artificial Sequence
  Description of Artificial Sequence: Synthetic oligonucleotide
aacagcgcuucaccccaag

SEQ ID NO: 2566632 - RNA, 19 nt, Artificial Sequence
  Description of Artificial Sequence: Synthetic oligonucleotide
cugugauagcugaaagcug

SEQ ID NO: 2566633 - RNA, 19 nt, Artificial Sequence
  Description of Artificial Sequence: Synthetic oligonucleotide
gauccagccacgaugccca

SEQ ID NO: 2566634 - RNA, 19 nt, Artificial Sequence
  Description of Artificial Sequence: Synthetic oligonucleotide
gaaaaguuggucauagcau

SEQ ID NO: 2566635 - RNA, 19 nt, Artificial Sequence
  Description of Artificial Sequence: Synthetic oligonucleotide
guagaucacaguuccuguc

SEQ ID NO: 2566636 - RNA, 19 nt, Artificial Sequence
  Description of Artificial Sequence: Synthetic oligonucleotide
uccugucaaugcuaccagc

SEQ ID NO: 2566637 - RNA, 19 nt, Artificial Sequence
  Description of Artificial Sequence: Synthetic oligonucleotide
aggaagcagaugguaauug

SEQ ID NO: 2566638 - RNA, 19 nt, Artificial Sequence
  Description of Artificial Sequence: Synthetic oligonucleotide
gcuagcucagcacuauugc

SEQ ID NO: 2566639 - RNA, 19 nt, Artificial Sequence
  Description of Artificial Sequence: Synthetic oligonucleotide
aggagaaucuugaggcagg

SEQ ID NO: 2566640 - RNA, 19 nt, Artificial Sequence
  Description of Artificial Sequence: Synthetic oligonucleotide
agugucgcauagcaggcaa

SEQ ID NO: 2566641 - RNA, 19 nt, Artificial Sequence
  Description of Artificial Sequence: Synthetic oligonucleotide
ugaugcuguagaucacagu

SEQ ID NO: 2566642 - RNA, 19 nt, Artificial Sequence
  Description of Artificial Sequence: Synthetic oligonucleotide
ggcaaugaggccauugcag

SEQ ID NO: 2566643 - RNA, 19 nt, Artificial Sequence
  Description of Artificial Sequence: Synthetic oligonucleotide
uaaauaucuggggcagcca

SEQ ID NO: 2566644 - RNA, 19 nt, Artificial Sequence
  Description of Artificial Sequence: Synthetic oligonucleotide
cagaagugauccagccacg

SEQ ID NO: 2566645 - RNA, 19 nt, Artificial Sequence
  Description of Artificial Sequence: Synthetic oligonucleotide
ugucgcauagcaggcaagu

SEQ ID NO: 2566646 - RNA, 19 nt, Artificial Sequence
  Description of Artificial Sequence: Synthetic oligonucleotide
gggaaguuguuggugaugc

SEQ ID NO: 2566647 - RNA, 19 nt, Artificial Sequence
  Description of Artificial Sequence: Synthetic oligonucleotide
ggaaugaaugguucuagaa

SEQ ID NO: 2566648 - RNA, 19 nt, Artificial Sequence
  Description of Artificial Sequence: Synthetic oligonucleotide
aauaucuggggcagccaga

SEQ ID NO: 2566649 - RNA, 19 nt, Artificial Sequence
  Description of Artificial Sequence: Synthetic oligonucleotide
augcuguagaucacaguuc

SEQ ID NO: 2566650 - RNA, 19 nt, Artificial Sequence
  Description of Artificial Sequence: Synthetic oligonucleotide
uauguuuguggggaggcuu

SEQ ID NO: 2566651 - RNA, 19 nt, Artificial Sequence
  Description of Artificial Sequence: Synthetic oligonucleotide
aaaguuggucauagcauuu

SEQ ID NO: 2566652 - RNA, 19 nt, Artificial Sequence
  Description of Artificial Sequence: Synthetic oligonucleotide
ggagacucaguccuucggc

SEQ ID NO: 2566653 - RNA, 19 nt, Artificial Sequence
  Description of Artificial Sequence: Synthetic oligonucleotide
gaccugggcggcaaugagg

SEQ ID NO: 2566654 - RNA, 19 nt, Artificial Sequence
  Description of Artificial Sequence: Synthetic oligonucleotide
uccaaggccuuugcugagg

SEQ ID NO: 2566655 - RNA, 19 nt, Artificial Sequence
  Description of Artificial Sequence: Synthetic oligonucleotide
cuggagacucaguccuucg

SEQ ID NO: 2566656 - RNA, 19 nt, Artificial Sequence
  Description of Artificial Sequence: Synthetic oligonucleotide
caguuccugucaaugcuac

SEQ ID NO: 2566657 - RNA, 19 nt, Artificial Sequence
  Description of Artificial Sequence: Synthetic oligonucleotide
acucuuggcgcccaagauu

SEQ ID NO: 2566658 - RNA, 19 nt, Artificial Sequence
  Description of Artificial Sequence: Synthetic oligonucleotide
gaggccauugcagagggaa

SEQ ID NO: 2566659 - RNA, 19 nt, Artificial Sequence
  Description of Artificial Sequence: Synthetic oligonucleotide
guaaagcaacuccuuucac

SEQ ID NO: 2566660 - RNA, 19 nt, Artificial Sequence
  Description of Artificial Sequence: Synthetic oligonucleotide
gucuccucuguagugcagg

SEQ ID NO: 2566661 - RNA, 19 nt, Artificial Sequence
  Description of Artificial Sequence: Synthetic oligonucleotide
gguaagagaacuggcacca

SEQ ID NO: 2566662 - RNA, 19 nt, Artificial Sequence
  Description of Artificial Sequence: Synthetic oligonucleotide
agccacgaugcccagucca

SEQ ID NO: 2566663 - RNA, 19 nt, Artificial Sequence
  Description of Artificial Sequence: Synthetic oligonucleotide
agcuagcucagcacuauug

SEQ ID NO: 2566664 - RNA, 19 nt, Artificial Sequence
  Description of Artificial Sequence: Synthetic oligonucleotide
aggcagggaacaugaagga

SEQ ID NO: 2566665 - RNA, 19 nt, Artificial Sequence
  Description of Artificial Sequence: Synthetic oligonucleotide
caaugcuaccagcuccagc

SEQ ID NO: 2566666 - RNA, 19 nt, Artificial Sequence
  Description of Artificial Sequence: Synthetic oligonucleotide
agagaccacaaagacucca

SEQ ID NO: 2566667 - RNA, 19 nt, Artificial Sequence
  Description of Artificial Sequence: Synthetic oligonucleotide
acuacagccagaggcguga

SEQ ID NO: 2566668 - RNA, 19 nt, Artificial Sequence
  Description of Artificial Sequence: Synthetic oligonucleotide
ugucuccucuguagugcag

SEQ ID NO: 2566669 - RNA, 19 nt, Artificial Sequence
  Description of Artificial Sequence: Synthetic oligonucleotide
uuggcgcccaagauuuuaa

SEQ ID NO: 2566670 - RNA, 19 nt, Artificial Sequence
  Description of Artificial Sequence: Synthetic oligonucleotide
agcaacuugcccaccacca

SEQ ID NO: 2566671 - RNA, 19 nt, Artificial Sequence
  Description of Artificial Sequence: Synthetic oligonucleotide
uccuuucacagugucuccu

SEQ ID NO: 2566672 - RNA, 19 nt, Artificial Sequence
  Description of Artificial Sequence: Synthetic oligonucleotide
guucuagaagcuagcucag

SEQ ID NO: 2566673 - RNA, 19 nt, Artificial Sequence
  Description of Artificial Sequence: Synthetic oligonucleotide
guuggugaugcuguagauc

SEQ ID NO: 2566674 - RNA, 19 nt, Artificial Sequence
  Description of Artificial Sequence: Synthetic oligonucleotide
caguccuucggcacucuug

SEQ ID NO: 2566675 - RNA, 19 nt, Artificial Sequence
  Description of Artificial Sequence: Synthetic oligonucleotide
aguggaaugaaugguucua

SEQ ID NO: 2566676 - RNA, 19 nt, Artificial Sequence
  Description of Artificial Sequence: Synthetic oligonucleotide
gucuguagugucaggaaca

SEQ ID NO: 2566677 - RNA, 19 nt, Artificial Sequence
  Description of Artificial Sequence: Synthetic oligonucleotide
gugaugcuguagaucacag

SEQ ID NO: 2566678 - RNA, 19 nt, Artificial Sequence
  Description of Artificial Sequence: Synthetic oligonucleotide
cugucaaugcuaccagcuc

SEQ ID NO: 2566679 - RNA, 19 nt, Artificial Sequence
  Description of Artificial Sequence: Synthetic oligonucleotide
agguacauuggaggccugg

SEQ ID NO: 2566680 - RNA, 19 nt, Artificial Sequence
  Description of Artificial Sequence: Synthetic oligonucleotide
cgaaaaguuggucauagca

SEQ ID NO: 2566681 - RNA, 19 nt, Artificial Sequence
  Description of Artificial Sequence: Synthetic oligonucleotide
uuauguuuguggggaggcu

SEQ ID NO: 2566682 - RNA, 19 nt, Artificial Sequence
  Description of Artificial Sequence: Synthetic oligonucleotide
agaagugauccagccacga

SEQ ID NO: 2566683 - RNA, 19 nt, Artificial Sequence
  Description of Artificial Sequence: Synthetic oligonucleotide
uucaccccaagagcugaag

SEQ ID NO: 2566684 - RNA, 19 nt, Artificial Sequence
  Description of Artificial Sequence: Synthetic oligonucleotide
aguggagaaagcagagcca

SEQ ID NO: 2566685 - RNA, 19 nt, Artificial Sequence
  Description of Artificial Sequence: Synthetic oligonucleotide
uggccugugugcccguugu

SEQ ID NO: 2566686 - RNA, 19 nt, Artificial Sequence
  Description of Artificial Sequence: Synthetic oligonucleotide
caggagugucgcauagcag

SEQ ID NO: 2566687 - RNA, 19 nt, Artificial Sequence
  Description of Artificial Sequence: Synthetic oligonucleotide
cagugucuccucuguagug

SEQ ID NO: 2566688 - RNA, 19 nt, Artificial Sequence
  Description of Artificial Sequence: Synthetic oligonucleotide
gaaggaagucccaguggac

SEQ ID NO: 2566689 - RNA, 19 nt, Artificial Sequence
  Description of Artificial Sequence: Synthetic oligonucleotide
cagcauuacugacuggaga

SEQ ID NO: 2566690 - RNA, 19 nt, Artificial Sequence
  Description of Artificial Sequence: Synthetic oligonucleotide
uuguggggaggcuuugcau

SEQ ID NO: 2566691 - RNA, 19 nt, Artificial Sequence
  Description of Artificial Sequence: Synthetic oligonucleotide
agcuccagcauuacugacu

SEQ ID NO: 2566692 - RNA, 19 nt, Artificial Sequence
  Description of Artificial Sequence: Synthetic oligonucleotide
acucaguccuucggcacuc

SEQ ID NO: 2566693 - RNA, 19 nt, Artificial Sequence
  Description of Artificial Sequence: Synthetic oligonucleotide
ugacuacagccagaggcgu

SEQ ID NO: 2566694 - RNA, 19 nt, Artificial Sequence
  Description of Artificial Sequence: Synthetic oligonucleotide
agugaagauucuggccaag

SEQ ID NO: 2566695 - RNA, 19 nt, Artificial Sequence
  Description of Artificial Sequence: Synthetic oligonucleotide
gcugccuggagcaacuugc

SEQ ID NO: 2566696 - RNA, 19 nt, Artificial Sequence
  Description of Artificial Sequence: Synthetic oligonucleotide
gcaggagugucgcauagca

SEQ ID NO: 2566697 - RNA, 19 nt, Artificial Sequence
  Description of Artificial Sequence: Synthetic oligonucleotide
auuacugacuggagacuca

SEQ ID NO: 2566698 - RNA, 19 nt, Artificial Sequence
  Description of Artificial Sequence: Synthetic oligonucleotide
cagccagaggcgugagugg

SEQ ID NO: 2566699 - RNA, 19 nt, Artificial Sequence
  Description of Artificial Sequence: Synthetic oligonucleotide
caacuccuuucacaguguc

SEQ ID NO: 2566700 - RNA, 19 nt, Artificial Sequence
  Description of Artificial Sequence: Synthetic oligonucleotide
ggcuuugcauuccaguaga

SEQ ID NO: 2566701 - RNA, 19 nt, Artificial Sequence
  Description of Artificial Sequence: Synthetic oligonucleotide
gagccagcaggagugucgc

SEQ ID NO: 2566702 - RNA, 19 nt, Artificial Sequence
  Description of Artificial Sequence: Synthetic oligonucleotide
ggaacagcgcuucacccca

SEQ ID NO: 2566703 - RNA, 19 nt, Artificial Sequence
  Description of Artificial Sequence: Synthetic oligonucleotide
ggagaaucuugaggcaggg

SEQ ID NO: 2566704 - RNA, 19 nt, Artificial Sequence
  Description of Artificial Sequence: Synthetic oligonucleotide
gucaaugcuaccagcucca

SEQ ID NO: 2566705 - RNA, 19 nt, Artificial Sequence
  Description of Artificial Sequence: Synthetic oligonucleotide
agacuccagccaugagggg

SEQ ID NO: 2566706 - RNA, 19 nt, Artificial Sequence
  Description of Artificial Sequence: Synthetic oligonucleotide
ggagcauggugacuacagc

SEQ ID NO: 2566707 - RNA, 19 nt, Artificial Sequence
  Description of Artificial Sequence: Synthetic oligonucleotide
ccuucggcacucuuggcgc

SEQ ID NO: 2566708 - RNA, 19 nt, Artificial Sequence
  Description of Artificial Sequence: Synthetic oligonucleotide
gcauaaacacugugauagc

SEQ ID NO: 2566709 - RNA, 19 nt, Artificial Sequence
  Description of Artificial Sequence: Synthetic oligonucleotide
ggggucuccaguuuccuga

SEQ ID NO: 2566710 - RNA, 19 nt, Artificial Sequence
  Description of Artificial Sequence: Synthetic oligonucleotide
caacuugcccaccaccaca

SEQ ID NO: 2566711 - RNA, 19 nt, Artificial Sequence
  Description of Artificial Sequence: Synthetic oligonucleotide
uggugaugcuguagaucac

SEQ ID NO: 2566712 - RNA, 19 nt, Artificial Sequence
  Description of Artificial Sequence: Synthetic oligonucleotide
cccaagauuuuaaauaucu

SEQ ID NO: 2566713 - RNA, 19 nt, Artificial Sequence
  Description of Artificial Sequence: Synthetic oligonucleotide
cuucggcacucuuggcgcc

SEQ ID NO: 2566714 - RNA, 19 nt, Artificial Sequence
  Description of Artificial Sequence: Synthetic oligonucleotide
guggggaggcuuugcauuc

SEQ ID NO: 2566715 - RNA, 19 nt, Artificial Sequence
  Description of Artificial Sequence: Synthetic oligonucleotide
agggaacaugaaggaaguc

SEQ ID NO: 2566716 - RNA, 19 nt, Artificial Sequence
  Description of Artificial Sequence: Synthetic oligonucleotide
gugauagcugaaagcuggc

SEQ ID NO: 2566717 - RNA, 19 nt, Artificial Sequence
  Description of Artificial Sequence: Synthetic oligonucleotide
gcggcaaugaggccauugc

SEQ ID NO: 2566718 - RNA, 19 nt, Artificial Sequence
  Description of Artificial Sequence: Synthetic oligonucleotide
aaacacugugauagcugaa

SEQ ID NO: 2566719 - RNA, 19 nt, Artificial Sequence
  Description of Artificial Sequence: Synthetic oligonucleotide
caguuuccugaacagaagu

SEQ ID NO: 2566720 - RNA, 19 nt, Artificial Sequence
  Description of Artificial Sequence: Synthetic oligonucleotide
ccguugugguaguuggugg

SEQ ID NO: 2566721 - RNA, 19 nt, Artificial Sequence
  Description of Artificial Sequence: Synthetic oligonucleotide
gcgcccaagauuuuaaaua

SEQ ID NO: 2566722 - RNA, 19 nt, Artificial Sequence
  Description of Artificial Sequence: Synthetic oligonucleotide
ccaguagaagaggaccugg

SEQ ID NO: 2566723 - RNA, 19 nt, Artificial Sequence
  Description of Artificial Sequence: Synthetic oligonucleotide
gacuacagccagaggcgug

SEQ ID NO: 2566724 - RNA, 19 nt, Artificial Sequence
  Description of Artificial Sequence: Synthetic oligonucleotide
uacagccagaggcgugagu

SEQ ID NO: 2566725 - RNA, 19 nt, Artificial Sequence
  Description of Artificial Sequence: Synthetic oligonucleotide
aggcgugaguggagaaagc

SEQ ID NO: 2566726 - RNA, 19 nt, Artificial Sequence
  Description of Artificial Sequence: Synthetic oligonucleotide
gcugaaggggaaguuguug

SEQ ID NO: 2566727 - RNA, 19 nt, Artificial Sequence
  Description of Artificial Sequence: Synthetic oligonucleotide
guaagagaacuggcaccag

SEQ ID NO: 2566728 - RNA, 19 nt, Artificial Sequence
  Description of Artificial Sequence: Synthetic oligonucleotide
ggugaugcuguagaucaca

SEQ ID NO: 2566729 - RNA, 19 nt, Artificial Sequence
  Description of Artificial Sequence: Synthetic oligonucleotide
guuuguggggaggcuuugc

SEQ ID NO: 2566730 - RNA, 19 nt, Artificial Sequence
  Description of Artificial Sequence: Synthetic oligonucleotide
uagcugaaagcuggccugu

SEQ ID NO: 2566731 - RNA, 19 nt, Artificial Sequence
  Description of Artificial Sequence: Synthetic oligonucleotide
cauggugacuacagccaga

SEQ ID NO: 2566732 - RNA, 19 nt, Artificial Sequence
  Description of Artificial Sequence: Synthetic oligonucleotide
cuagcucagcacuauugcu

SEQ ID NO: 2566733 - RNA, 19 nt, Artificial Sequence
  Description of Artificial Sequence: Synthetic oligonucleotide
aagaggaccugggcggcaa

SEQ ID NO: 2566734 - RNA, 19 nt, Artificial Sequence
  Description of Artificial Sequence: Synthetic oligonucleotide
caaacagcauaaacacugu

SEQ ID NO: 2566735 - RNA, 19 nt, Artificial Sequence
  Description of Artificial Sequence: Synthetic oligonucleotide
agugucaggaacagcgcuu

SEQ ID NO: 2566736 - RNA, 19 nt, Artificial Sequence
  Description of Artificial Sequence: Synthetic oligonucleotide
ccagcauuacugacuggag

SEQ ID NO: 2566737 - RNA, 19 nt, Artificial Sequence
  Description of Artificial Sequence: Synthetic oligonucleotide
cagaugguaauugucugua

SEQ ID NO: 2566738 - RNA, 19 nt, Artificial Sequence
  Description of Artificial Sequence: Synthetic oligonucleotide
gccugugugcccguugugg

SEQ ID NO: 2566739 - RNA, 19 nt, Artificial Sequence
  Description of Artificial Sequence: Synthetic oligonucleotide
cccaguggacgaaaaguug

SEQ ID NO: 2566740 - RNA, 19 nt, Artificial Sequence
  Description of Artificial Sequence: Synthetic oligonucleotide
ggagugucgcauagcaggc

SEQ ID NO: 2566741 - RNA, 19 nt, Artificial Sequence
  Description of Artificial Sequence: Synthetic oligonucleotide
gugucaggaacagcgcuuc

SEQ ID NO: 2566742 - RNA, 19 nt, Artificial Sequence
  Description of Artificial Sequence: Synthetic oligonucleotide
gacucaguccuucggcacu

SEQ ID NO: 2566743 - RNA, 19 nt, Artificial Sequence
  Description of Artificial Sequence: Synthetic oligonucleotide
uggcgcccaagauuuuaaa

SEQ ID NO: 2566744 - RNA, 19 nt, Artificial Sequence
  Description of Artificial Sequence: Synthetic oligonucleotide
agccagaggcgugagugga

SEQ ID NO: 2566745 - RNA, 19 nt, Artificial Sequence
  Description of Artificial Sequence: Synthetic oligonucleotide
acaguuccugucaaugcua

SEQ ID NO: 2566746 - RNA, 19 nt, Artificial Sequence
  Description of Artificial Sequence: Synthetic oligonucleotide
gucccaguggacgaaaagu

SEQ ID NO: 2566747 - RNA, 19 nt, Artificial Sequence
  Description of Artificial Sequence: Synthetic oligonucleotide
cguugugguaguugguggc

SEQ ID NO: 2566748 - RNA, 19 nt, Artificial Sequence
  Description of Artificial Sequence: Synthetic oligonucleotide
cagggaacaugaaggaagu

SEQ ID NO: 2566749 - RNA, 19 nt, Artificial Sequence
  Description of Artificial Sequence: Synthetic oligonucleotide
agaggcgugaguggagaaa

SEQ ID NO: 2566750 - RNA, 19 nt, Artificial Sequence
  Description of Artificial Sequence: Synthetic oligonucleotide
ggcaaguaaagcaacuccu

SEQ ID NO: 2566751 - RNA, 19 nt, Artificial Sequence
  Description of Artificial Sequence: Synthetic oligonucleotide
cuccagcauuacugacugg

SEQ ID NO: 2566752 - RNA, 19 nt, Artificial Sequence
  Description of Artificial Sequence: Synthetic oligonucleotide
uucggcacucuuggcgccc

SEQ ID NO: 2566753 - RNA, 19 nt, Artificial Sequence
  Description of Artificial Sequence: Synthetic oligonucleotide
gcgugaguggagaaagcag

SEQ ID NO: 2566754 - RNA, 19 nt, Artificial Sequence
  Description of Artificial Sequence: Synthetic oligonucleotide
agaagcuagcucagcacua

SEQ ID NO: 2566755 - RNA, 19 nt, Artificial Sequence
  Description of Artificial Sequence: Synthetic oligonucleotide
cgugaguggagaaagcaga

SEQ ID NO: 2566756 - RNA, 19 nt, Artificial Sequence
  Description of Artificial Sequence: Synthetic oligonucleotide
caaguaaagcaacuccuuu

SEQ ID NO: 2566757 - RNA, 19 nt, Artificial Sequence
  Description of Artificial Sequence: Synthetic oligonucleotide
gugguaguugguggcugcc

SEQ ID NO: 2566758 - RNA, 19 nt, Artificial Sequence
  Description of Artificial Sequence: Synthetic oligonucleotide
ucaguccuucggcacucuu

SEQ ID NO: 2566759 - RNA, 19 nt, Artificial Sequence
  Description of Artificial Sequence: Synthetic oligonucleotide
aggccauugcagagggaag

SEQ ID NO: 2566760 - RNA, 19 nt, Artificial Sequence
  Description of Artificial Sequence: Synthetic oligonucleotide
ggcgugaguggagaaagca

SEQ ID NO: 2566761 - RNA, 19 nt, Artificial Sequence
  Description of Artificial Sequence: Synthetic oligonucleotide
cagcauaaacacugugaua

SEQ ID NO: 2566762 - RNA, 19 nt, Artificial Sequence
  Description of Artificial Sequence: Synthetic oligonucleotide
gaacagaagugaagauucu

SEQ ID NO: 2566763 - RNA, 19 nt, Artificial Sequence
  Description of Artificial Sequence: Synthetic oligonucleotide
ggaccugggcggcaaugag

SEQ ID NO: 2566764 - RNA, 19 nt, Artificial Sequence
  Description of Artificial Sequence: Synthetic oligonucleotide
gcaacuugcccaccaccac

SEQ ID NO: 2566765 - RNA, 19 nt, Artificial Sequence
  Description of Artificial Sequence: Synthetic oligonucleotide
gugucgcauagcaggcaag

SEQ ID NO: 2566766 - RNA, 19 nt, Artificial Sequence
  Description of Artificial Sequence: Synthetic oligonucleotide
gugauccagccacgaugcc

SEQ ID NO: 2566767 - RNA, 19 nt, Artificial Sequence
  Description of Artificial Sequence: Synthetic oligonucleotide
gugcaggaccaggaagcag

SEQ ID NO: 2566768 - RNA, 19 nt, Artificial Sequence
  Description of Artificial Sequence: Synthetic oligonucleotide
ggaggcuuugcauuccagu

SEQ ID NO: 2566769 - RNA, 19 nt, Artificial Sequence
  Description of Artificial Sequence: Synthetic oligonucleotide
aggccuuugcugaggagaa

SEQ ID NO: 2566770 - RNA, 19 nt, Artificial Sequence
  Description of Artificial Sequence: Synthetic oligonucleotide
gagugucgcauagcaggca

SEQ ID NO: 2566771 - RNA, 19 nt, Artificial Sequence
  Description of Artificial Sequence: Synthetic oligonucleotide
auguuuguggggaggcuuu

SEQ ID NO: 2566772 - RNA, 19 nt, Artificial Sequence
  Description of Artificial Sequence: Synthetic oligonucleotide
gaagcuagcucagcacuau

SEQ ID NO: 2566773 - RNA, 19 nt, Artificial Sequence
  Description of Artificial Sequence: Synthetic oligonucleotide
augcuaccagcuccagcau

SEQ ID NO: 2566774 - RNA, 19 nt, Artificial Sequence
  Description of Artificial Sequence: Synthetic oligonucleotide
ggccauugcagagggaaga

SEQ ID NO: 2566775 - RNA, 19 nt, Artificial Sequence
  Description of Artificial Sequence: Synthetic oligonucleotide
cuaccagcuccagcauuac

SEQ ID NO: 2566776 - RNA, 19 nt, Artificial Sequence
  Description of Artificial Sequence: Synthetic oligonucleotide
cuccucuguagugcaggac

SEQ ID NO: 2566777 - RNA, 19 nt, Artificial Sequence
  Description of Artificial Sequence: Synthetic oligonucleotide
gugcccguugugguaguug

SEQ ID NO: 2566778 - RNA, 19 nt, Artificial Sequence
  Description of Artificial Sequence: Synthetic oligonucleotide
ccuuucacagugucuccuc

SEQ ID NO: 2566779 - RNA, 19 nt, Artificial Sequence
  Description of Artificial Sequence: Synthetic oligonucleotide
agcugaaagcuggccugug

SEQ ID NO: 2566780 - RNA, 19 nt, Artificial Sequence
  Description of Artificial Sequence: Synthetic oligonucleotide
gcagaugguaauugucugu

SEQ ID NO: 2566781 - RNA, 19 nt, Artificial Sequence
  Description of Artificial Sequence: Synthetic oligonucleotide
gccagaagugauccagcca

SEQ ID NO: 2566782 - RNA, 19 nt, Artificial Sequence
  Description of Artificial Sequence: Synthetic oligonucleotide
cuggccugugugcccguug

SEQ ID NO: 2566783 - RNA, 19 nt, Artificial Sequence
  Description of Artificial Sequence: Synthetic oligonucleotide
caguggacgaaaaguuggu

SEQ ID NO: 2566784 - RNA, 19 nt, Artificial Sequence
  Description of Artificial Sequence: Synthetic oligonucleotide
cccguugugguaguuggug

SEQ ID NO: 2566785 - RNA, 19 nt, Artificial Sequence
  Description of Artificial Sequence: Synthetic oligonucleotide
ccugucaaugcuaccagcu

SEQ ID NO: 2566786 - RNA, 19 nt, Artificial Sequence
  Description of Artificial Sequence: Synthetic oligonucleotide
caccaccacagcagguaca

SEQ ID NO: 2566787 - RNA, 19 nt, Artificial Sequence
  Description of Artificial Sequence: Synthetic oligonucleotide
gaagaggaccugggcggca

SEQ ID NO: 2566788 - RNA, 19 nt, Artificial Sequence
  Description of Artificial Sequence: Synthetic oligonucleotide
ggggaaguuguuggugaug

SEQ ID NO: 2566789 - RNA, 19 nt, Artificial Sequence
  Description of Artificial Sequence: Synthetic oligonucleotide
cuacagccagaggcgugag

SEQ ID NO: 2566790 - RNA, 19 nt, Artificial Sequence
  Description of Artificial Sequence: Synthetic oligonucleotide
ucuuggcgcccaagauuuu

SEQ ID NO: 2566791 - RNA, 19 nt, Artificial Sequence
  Description of Artificial Sequence: Synthetic oligonucleotide
cuuggcgcccaagauuuua

SEQ ID NO: 2566792 - RNA, 19 nt, Artificial Sequence
  Description of Artificial Sequence: Synthetic oligonucleotide
ggcggcaaugaggccauug

SEQ ID NO: 2566793 - RNA, 19 nt, Artificial Sequence
  Description of Artificial Sequence: Synthetic oligonucleotide
caagagcugaaggggaagu

SEQ ID NO: 2566794 - RNA, 19 nt, Artificial Sequence
  Description of Artificial Sequence: Synthetic oligonucleotide
cgcauagcaggcaaguaaa

SEQ ID NO: 2566795 - RNA, 19 nt, Artificial Sequence
  Description of Artificial Sequence: Synthetic oligonucleotide
cgaugcccaguccaaggcc

SEQ ID NO: 2566796 - RNA, 19 nt, Artificial Sequence
  Description of Artificial Sequence: Synthetic oligonucleotide
cagguacauuggaggccug

SEQ ID NO: 2566797 - RNA, 19 nt, Artificial Sequence
  Description of Artificial Sequence: Synthetic oligonucleotide
ucggcacucuuggcgccca

SEQ ID NO: 2566798 - RNA, 19 nt, Artificial Sequence
  Description of Artificial Sequence: Synthetic oligonucleotide
gguggcugccuggagcaac

SEQ ID NO: 2566799 - RNA, 19 nt, Artificial Sequence
  Description of Artificial Sequence: Synthetic oligonucleotide
cuggagcaacuugcccacc

SEQ ID NO: 2566800 - RNA, 19 nt, Artificial Sequence
  Description of Artificial Sequence: Synthetic oligonucleotide
cuucaccccaagagcugaa

SEQ ID NO: 2566801 - RNA, 19 nt, Artificial Sequence
  Description of Artificial Sequence: Synthetic oligonucleotide
cccaguccaaggccuuugc

SEQ ID NO: 2566802 - RNA, 19 nt, Artificial Sequence
  Description of Artificial Sequence: Synthetic oligonucleotide
gcccaagauuuuaaauauc

SEQ ID NO: 2566803 - RNA, 19 nt, Artificial Sequence
  Description of Artificial Sequence: Synthetic oligonucleotide
cagagccagcaggaguguc

SEQ ID NO: 2566804 - RNA, 19 nt, Artificial Sequence
  Description of Artificial Sequence: Synthetic oligonucleotide
ggcgcccaagauuuuaaau

SEQ ID NO: 2566805 - RNA, 19 nt, Artificial Sequence
  Description of Artificial Sequence: Synthetic oligonucleotide
gggaggcuuugcauuccag

SEQ ID NO: 2566806 - RNA, 19 nt, Artificial Sequence
  Description of Artificial Sequence: Synthetic oligonucleotide
agccagcaggagugucgca

SEQ ID NO: 2566807 - RNA, 19 nt, Artificial Sequence
  Description of Artificial Sequence: Synthetic oligonucleotide
ggucuccaguuuccugaac

SEQ ID NO: 2566808 - RNA, 19 nt, Artificial Sequence
  Description of Artificial Sequence: Synthetic oligonucleotide
gucgcauagcaggcaagua

SEQ ID NO: 2566809 - RNA, 19 nt, Artificial Sequence
  Description of Artificial Sequence: Synthetic oligonucleotide
ggcacucuuggcgcccaag

SEQ ID NO: 2566810 - RNA, 19 nt, Artificial Sequence
  Description of Artificial Sequence: Synthetic oligonucleotide
ggggaggcuuugcauucca

SEQ ID NO: 2566811 - RNA, 19 nt, Artificial Sequence
  Description of Artificial Sequence: Synthetic oligonucleotide
cagaggcgugaguggagaa

SEQ ID NO: 2566812 - RNA, 19 nt, Artificial Sequence
  Description of Artificial Sequence: Synthetic oligonucleotide
ccccaagagcugaagggga

SEQ ID NO: 2566813 - RNA, 19 nt, Artificial Sequence
  Description of Artificial Sequence: Synthetic oligonucleotide
ugugcccguugugguaguu

SEQ ID NO: 2566814 - RNA, 19 nt, Artificial Sequence
  Description of Artificial Sequence: Synthetic oligonucleotide
gcaaguaaagcaacuccuu

SEQ ID NO: 2566815 - RNA, 19 nt, Artificial Sequence
  Description of Artificial Sequence: Synthetic oligonucleotide
ccaaggccuuugcugagga

SEQ ID NO: 2566816 - RNA, 19 nt, Artificial Sequence
  Description of Artificial Sequence: Synthetic oligonucleotide
cuggggcagccagaaguga

SEQ ID NO: 2566817 - RNA, 19 nt, Artificial Sequence
  Description of Artificial Sequence: Synthetic oligonucleotide
ggcagccagaagugaucca

SEQ ID NO: 2566818 - RNA, 19 nt, Artificial Sequence
  Description of Artificial Sequence: Synthetic oligonucleotide
ugcccaguccaaggccuuu

SEQ ID NO: 2566819 - RNA, 19 nt, Artificial Sequence
  Description of Artificial Sequence: Synthetic oligonucleotide
cuuugcugaggagaaucuu

SEQ ID NO: 2566820 - RNA, 19 nt, Artificial Sequence
  Description of Artificial Sequence: Synthetic oligonucleotide
gccagaggcgugaguggag

SEQ ID NO: 2566821 - RNA, 19 nt, Artificial Sequence
  Description of Artificial Sequence: Synthetic oligonucleotide
gcaggcaaguaaagcaacu

SEQ ID NO: 2566822 - RNA, 19 nt, Artificial Sequence
  Description of Artificial Sequence: Synthetic oligonucleotide
ggaagucccaguggacgaa

SEQ ID NO: 2566823 - RNA, 19 nt, Artificial Sequence
  Description of Artificial Sequence: Synthetic oligonucleotide
gcauuacugacuggagacu

SEQ ID NO: 2566824 - RNA, 19 nt, Artificial Sequence
  Description of Artificial Sequence: Synthetic oligonucleotide
ggccugugugcccguugug

SEQ ID NO: 2566825 - RNA, 19 nt, Artificial Sequence
  Description of Artificial Sequence: Synthetic oligonucleotide
gcgcuucaccccaagagcu

SEQ ID NO: 2566826 - RNA, 19 nt, Artificial Sequence
  Description of Artificial Sequence: Synthetic oligonucleotide
ggacgaaaaguuggucaua

SEQ ID NO: 2566827 - RNA, 19 nt, Artificial Sequence
  Description of Artificial Sequence: Synthetic oligonucleotide
cgcuucaccccaagagcug

SEQ ID NO: 2566828 - RNA, 19 nt, Artificial Sequence
  Description of Artificial Sequence: Synthetic oligonucleotide
ccacaaagacuccagccau

SEQ ID NO: 2566829 - RNA, 19 nt, Artificial Sequence
  Description of Artificial Sequence: Synthetic oligonucleotide
ccacagcagguacauugga

SEQ ID NO: 2566830 - RNA, 19 nt, Artificial Sequence
  Description of Artificial Sequence: Synthetic oligonucleotide
gaacagcgcuucaccccaa

SEQ ID NO: 2566831 - RNA, 19 nt, Artificial Sequence
  Description of Artificial Sequence: Synthetic oligonucleotide
gcccaguccaaggccuuug

SEQ ID NO: 2566832 - RNA, 19 nt, Artificial Sequence
  Description of Artificial Sequence: Synthetic oligonucleotide
cucagcacuauugcuccuu

SEQ ID NO: 2566833 - RNA, 19 nt, Artificial Sequence
  Description of Artificial Sequence: Synthetic oligonucleotide
ccagaggcgugaguggaga

SEQ ID NO: 2566834 - RNA, 19 nt, Artificial Sequence
  Description of Artificial Sequence: Synthetic oligonucleotide
ccauugcagagggaagaga

SEQ ID NO: 2566835 - RNA, 19 nt, Artificial Sequence
  Description of Artificial Sequence: Synthetic oligonucleotide
ccugggcggcaaugaggcc

SEQ ID NO: 2566836 - RNA, 19 nt, Artificial Sequence
  Description of Artificial Sequence: Synthetic oligonucleotide
gcuuugcauuccaguagaa

SEQ ID NO: 2566837 - RNA, 19 nt, Artificial Sequence
  Description of Artificial Sequence: Synthetic oligonucleotide
ccugugugcccguuguggu

SEQ ID NO: 2566838 - RNA, 19 nt, Artificial Sequence
  Description of Artificial Sequence: Synthetic oligonucleotide
cggcaaugaggccauugca

SEQ ID NO: 2566839 - RNA, 19 nt, Artificial Sequence
  Description of Artificial Sequence: Synthetic oligonucleotide
gccagcaggagugucgcau

SEQ ID NO: 2566840 - RNA, 19 nt, Artificial Sequence
  Description of Artificial Sequence: Synthetic oligonucleotide
ccagcaggagugucgcaua

SEQ ID NO: 2566841 - RNA, 19 nt, Artificial Sequence
  Description of Artificial Sequence: Synthetic oligonucleotide
gacuggagacucaguccuu

SEQ ID NO: 2566842 - RNA, 19 nt, Artificial Sequence
  Description of Artificial Sequence: Synthetic oligonucleotide
cauuggaggccuggagcau

SEQ ID NO: 2566843 - RNA, 19 nt, Artificial Sequence
  Description of Artificial Sequence: Synthetic oligonucleotide
cagcacuauugcuccuuuu

SEQ ID NO: 2566844 - RNA, 19 nt, Artificial Sequence
  Description of Artificial Sequence: Synthetic oligonucleotide
gcuguagaucacaguuccu

SEQ ID NO: 2566845 - RNA, 19 nt, Artificial Sequence
  Description of Artificial Sequence: Synthetic oligonucleotide
ccaguccaaggccuuugcu

SEQ ID NO: 2566846 - RNA, 19 nt, Artificial Sequence
  Description of Artificial Sequence: Synthetic oligonucleotide
gcucagcacuauugcuccu

SEQ ID NO: 2566847 - RNA, 19 nt, Artificial Sequence
  Description of Artificial Sequence: Synthetic oligonucleotide
cucaguccuucggcacucu

SEQ ID NO: 2566848 - RNA, 19 nt, Artificial Sequence
  Description of Artificial Sequence: Synthetic oligonucleotide
gcccguugugguaguuggu

SEQ ID NO: 2566849 - RNA, 19 nt, Artificial Sequence
  Description of Artificial Sequence: Synthetic oligonucleotide
ggccuggagcauggugacu

SEQ ID NO: 2566850 - RNA, 19 nt, Artificial Sequence
  Description of Artificial Sequence: Synthetic oligonucleotide
ccaccacagcagguacauu

SEQ ID NO: 2566851 - RNA, 19 nt, Artificial Sequence
  Description of Artificial Sequence: Synthetic oligonucleotide
cggcacucuuggcgcccaa

SEQ ID NO: 2566852 - RNA, 19 nt, Artificial Sequence
  Description of Artificial Sequence: Synthetic oligonucleotide
gggcggcaaugaggccauu

SEQ ID NO: 2566853 - RNA, 19 nt, Artificial Sequence
  Description of Artificial Sequence: Synthetic oligonucleotide
aaacaugagagacaagagg

SEQ ID NO: 2566854 - RNA, 19 nt, Artificial Sequence
  Description of Artificial Sequence: Synthetic oligonucleotide
aaucaagcaauguccacgg

SEQ ID NO: 2566855 - RNA, 19 nt, Artificial Sequence
  Description of Artificial Sequence: Synthetic oligonucleotide
uucggugucaccaucauac

SEQ ID NO: 2566856 - RNA, 19 nt, Artificial Sequence
  Description of Artificial Sequence: Synthetic oligonucleotide
gaaaacaugagagacaaga

SEQ ID NO: 2566857 - RNA, 19 nt, Artificial Sequence
  Description of Artificial Sequence: Synthetic oligonucleotide
gaaugggucccacugaagg

SEQ ID NO: 2566858 - RNA, 19 nt, Artificial Sequence
  Description of Artificial Sequence: Synthetic oligonucleotide
ucguccacgaacauguagg

SEQ ID NO: 2566859 - RNA, 19 nt, Artificial Sequence
  Description of Artificial Sequence: Synthetic oligonucleotide
aacaugagagacaagaggu

SEQ ID NO: 2566860 - RNA, 19 nt, Artificial Sequence
  Description of Artificial Sequence: Synthetic oligonucleotide
aauguccacgggcugaggg

SEQ ID NO: 2566861 - RNA, 19 nt, Artificial Sequence
  Description of Artificial Sequence: Synthetic oligonucleotide
gaaucaagcaauguccacg

SEQ ID NO: 2566862 - RNA, 19 nt, Artificial Sequence
  Description of Artificial Sequence: Synthetic oligonucleotide
augugaaaacaugagagac

SEQ ID NO: 2566863 - RNA, 19 nt, Artificial Sequence
  Description of Artificial Sequence: Synthetic oligonucleotide
aacugguccaugugaaaac

SEQ ID NO: 2566864 - RNA, 19 nt, Artificial Sequence
  Description of Artificial Sequence: Synthetic oligonucleotide
agaggcuugaaauggcggc

SEQ ID NO: 2566865 - RNA, 19 nt, Artificial Sequence
  Description of Artificial Sequence: Synthetic oligonucleotide
aaaacgaacugguccaugu

SEQ ID NO: 2566866 - RNA, 19 nt, Artificial Sequence
  Description of Artificial Sequence: Synthetic oligonucleotide
cuagaagucgucauccucc

SEQ ID NO: 2566867 - RNA, 19 nt, Artificial Sequence
  Description of Artificial Sequence: Synthetic oligonucleotide
uccagaucaguaaagggca

SEQ ID NO: 2566868 - RNA, 19 nt, Artificial Sequence
  Description of Artificial Sequence: Synthetic oligonucleotide
ucaagcaauguccacgggc

SEQ ID NO: 2566869 - RNA, 19 nt, Artificial Sequence
  Description of Artificial Sequence: Synthetic oligonucleotide
aggugaaucaagcaauguc

SEQ ID NO: 2566870 - RNA, 19 nt, Artificial Sequence
  Description of Artificial Sequence: Synthetic oligonucleotide
aaucaggaaggucaccuug

SEQ ID NO: 2566871 - RNA, 19 nt, Artificial Sequence
  Description of Artificial Sequence: Synthetic oligonucleotide
ugaaggugaaucaagcaau

SEQ ID NO: 2566872 - RNA, 19 nt, Artificial Sequence
  Description of Artificial Sequence: Synthetic oligonucleotide
gacaagaggucucugggag

SEQ ID NO: 2566873 - RNA, 19 nt, Artificial Sequence
  Description of Artificial Sequence: Synthetic oligonucleotide
aaaacaugagagacaagag

SEQ ID NO: 2566874 - RNA, 19 nt, Artificial Sequence
  Description of Artificial Sequence: Synthetic oligonucleotide
uccaugugaaaacaugaga

SEQ ID NO: 2566875 - RNA, 19 nt, Artificial Sequence
  Description of Artificial Sequence: Synthetic oligonucleotide
ucaucggugucgaagaccu

SEQ ID NO: 2566876 - RNA, 19 nt, Artificial Sequence
  Description of Artificial Sequence: Synthetic oligonucleotide
agcauucgagaucugcacc

SEQ ID NO: 2566877 - RNA, 19 nt, Artificial Sequence
  Description of Artificial Sequence: Synthetic oligonucleotide
agagacaagaggucucugg

SEQ ID NO: 2566878 - RNA, 19 nt, Artificial Sequence
  Description of Artificial Sequence: Synthetic oligonucleotide
uucgagaucugcaccagcc

SEQ ID NO: 2566879 - RNA, 19 nt, Artificial Sequence
  Description of Artificial Sequence: Synthetic oligonucleotide
aacgaacugguccauguga

SEQ ID NO: 2566880 - RNA, 19 nt, Artificial Sequence
  Description of Artificial Sequence: Synthetic oligonucleotide
aguccagaucaguaaaggg

SEQ ID NO: 2566881 - RNA, 19 nt, Artificial Sequence
  Description of Artificial Sequence: Synthetic oligonucleotide
agggccuggcccuugaggc

SEQ ID NO: 2566882 - RNA, 19 nt, Artificial Sequence
  Description of Artificial Sequence: Synthetic oligonucleotide
cuugaggcggguaaucagg

SEQ ID NO: 2566883 - RNA, 19 nt, Artificial Sequence
  Description of Artificial Sequence: Synthetic oligonucleotide
aguccuuucacagauggug

SEQ ID NO: 2566884 - RNA, 19 nt, Artificial Sequence
  Description of Artificial Sequence: Synthetic oligonucleotide
ugcacgaugaacuccggga

SEQ ID NO: 2566885 - RNA, 19 nt, Artificial Sequence
  Description of Artificial Sequence: Synthetic oligonucleotide
ucgauguaggggaucaccc

SEQ ID NO: 2566886 - RNA, 19 nt, Artificial Sequence
  Description of Artificial Sequence: Synthetic oligonucleotide
ggugaaucaagcaaugucc

SEQ ID NO: 2566887 - RNA, 19 nt, Artificial Sequence
  Description of Artificial Sequence: Synthetic oligonucleotide
ugaguccagaucaguaaag

SEQ ID NO: 2566888 - RNA, 19 nt, Artificial Sequence
  Description of Artificial Sequence: Synthetic oligonucleotide
ucaguaaagggcagcaguc

SEQ ID NO: 2566889 - RNA, 19 nt, Artificial Sequence
  Description of Artificial Sequence: Synthetic oligonucleotide
gaggcggguaaucaggaag

SEQ ID NO: 2566890 - RNA, 19 nt, Artificial Sequence
  Description of Artificial Sequence: Synthetic oligonucleotide
gucaccuugagcucaucgg

SEQ ID NO: 2566891 - RNA, 19 nt, Artificial Sequence
  Description of Artificial Sequence: Synthetic oligonucleotide
agcucagguaccucccucc

SEQ ID NO: 2566892 - RNA, 19 nt, Artificial Sequence
  Description of Artificial Sequence: Synthetic oligonucleotide
ucucgggaaaacgaacugg

SEQ ID NO: 2566893 - RNA, 19 nt, Artificial Sequence
  Description of Artificial Sequence: Synthetic oligonucleotide
acaagaggucucugggagc

SEQ ID NO: 2566894 - RNA, 19 nt, Artificial Sequence
  Description of Artificial Sequence: Synthetic oligonucleotide
ugguccaugugaaaacaug

SEQ ID NO: 2566895 - RNA, 19 nt, Artificial Sequence
  Description of Artificial Sequence: Synthetic oligonucleotide
ggugucgaagaccuggucg

SEQ ID NO: 2566896 - RNA, 19 nt, Artificial Sequence
  Description of Artificial Sequence: Synthetic oligonucleotide
agaccuagcggccuagaag

SEQ ID NO: 2566897 - RNA, 19 nt, Artificial Sequence
  Description of Artificial Sequence: Synthetic oligonucleotide
cacugaaggugaaucaagc

SEQ ID NO: 2566898 - RNA, 19 nt, Artificial Sequence
  Description of Artificial Sequence: Synthetic oligonucleotide
ucaccuugagcucaucggu

SEQ ID NO: 2566899 - RNA, 19 nt, Artificial Sequence
  Description of Artificial Sequence: Synthetic oligonucleotide
gauguaggggaucacccac

SEQ ID NO: 2566900 - RNA, 19 nt, Artificial Sequence
  Description of Artificial Sequence: Synthetic oligonucleotide
aaacgaacugguccaugug

SEQ ID NO: 2566901 - RNA, 19 nt, Artificial Sequence
  Description of Artificial Sequence: Synthetic oligonucleotide
gaguccagaucaguaaagg

SEQ ID NO: 2566902 - RNA, 19 nt, Artificial Sequence
  Description of Artificial Sequence: Synthetic oligonucleotide
acgaugaacuccgggaggc

SEQ ID NO: 2566903 - RNA, 19 nt, Artificial Sequence
  Description of Artificial Sequence: Synthetic oligonucleotide
gggaucacccacuucaggg

SEQ ID NO: 2566904 - RNA, 19 nt, Artificial Sequence
  Description of Artificial Sequence: Synthetic oligonucleotide
ucagggaacgggauggggu

SEQ ID NO: 2566905 - RNA, 19 nt, Artificial Sequence
  Description of Artificial Sequence: Synthetic oligonucleotide
aaaggacacaggaggagag

SEQ ID NO: 2566906 - RNA, 19 nt, Artificial Sequence
  Description of Artificial Sequence: Synthetic oligonucleotide
auguccacgggcugagggc

SEQ ID NO: 2566907 - RNA, 19 nt, Artificial Sequence
  Description of Artificial Sequence: Synthetic oligonucleotide
auucgagaucugcaccagc

SEQ ID NO: 2566908 - RNA, 19 nt, Artificial Sequence
  Description of Artificial Sequence: Synthetic oligonucleotide
aguaaagggcagcaguccu

SEQ ID NO: 2566909 - RNA, 19 nt, Artificial Sequence
  Description of Artificial Sequence: Synthetic oligonucleotide
aacauguaggagcccgucu

SEQ ID NO: 2566910 - RNA, 19 nt, Artificial Sequence
  Description of Artificial Sequence: Synthetic oligonucleotide
acgaacauguaggagcccg

SEQ ID NO: 2566911 - RNA, 19 nt, Artificial Sequence
  Description of Artificial Sequence: Synthetic oligonucleotide
acugaaggugaaucaagca

SEQ ID NO: 2566912 - RNA, 19 nt, Artificial Sequence
  Description of Artificial Sequence: Synthetic oligonucleotide
aucggugucgaagaccugg

SEQ ID NO: 2566913 - RNA, 19 nt, Artificial Sequence
  Description of Artificial Sequence: Synthetic oligonucleotide
guaggagcccgucugcacg

SEQ ID NO: 2566914 - RNA, 19 nt, Artificial Sequence
  Description of Artificial Sequence: Synthetic oligonucleotide
uacagcucagggaacggga

SEQ ID NO: 2566915 - RNA, 19 nt, Artificial Sequence
  Description of Artificial Sequence: Synthetic oligonucleotide
cuugaaauggcggcggcag

SEQ ID NO: 2566916 - RNA, 19 nt, Artificial Sequence
  Description of Artificial Sequence: Synthetic oligonucleotide
gaucacccacuucagggcc

SEQ ID NO: 2566917 - RNA, 19 nt, Artificial Sequence
  Description of Artificial Sequence: Synthetic oligonucleotide
ucaggaaggucaccuugag

SEQ ID NO: 2566918 - RNA, 19 nt, Artificial Sequence
  Description of Artificial Sequence: Synthetic oligonucleotide
ucauccuccucccacccga

SEQ ID NO: 2566919 - RNA, 19 nt, Artificial Sequence
  Description of Artificial Sequence: Synthetic oligonucleotide
uucuuggaacaaaggacac

SEQ ID NO: 2566920 - RNA, 19 nt, Artificial Sequence
  Description of Artificial Sequence: Synthetic oligonucleotide
uugaaauggcggcggcagg

SEQ ID NO: 2566921 - RNA, 19 nt, Artificial Sequence
  Description of Artificial Sequence: Synthetic oligonucleotide
gucugcacgaugaacuccg

SEQ ID NO: 2566922 - RNA, 19 nt, Artificial Sequence
  Description of Artificial Sequence: Synthetic oligonucleotide
ucagguaccucccucccau

SEQ ID NO: 2566923 - RNA, 19 nt, Artificial Sequence
  Description of Artificial Sequence: Synthetic oligonucleotide
uuucacagauggugggcag

SEQ ID NO: 2566924 - RNA, 19 nt, Artificial Sequence
  Description of Artificial Sequence: Synthetic oligonucleotide
gaaggugaaucaagcaaug

SEQ ID NO: 2566925 - RNA, 19 nt, Artificial Sequence
  Description of Artificial Sequence: Synthetic oligonucleotide
cagaggcuugaaauggcgg

SEQ ID NO: 2566926 - RNA, 19 nt, Artificial Sequence
  Description of Artificial Sequence: Synthetic oligonucleotide
gaggcuugaaauggcggcg

SEQ ID NO: 2566927 - RNA, 19 nt, Artificial Sequence
  Description of Artificial Sequence: Synthetic oligonucleotide
gagcauucgagaucugcac

SEQ ID NO: 2566928 - RNA, 19 nt, Artificial Sequence
  Description of Artificial Sequence: Synthetic oligonucleotide
cugaaggugaaucaagcaa

SEQ ID NO: 2566929 - RNA, 19 nt, Artificial Sequence
  Description of Artificial Sequence: Synthetic oligonucleotide
gaccuagcggccuagaagu

SEQ ID NO: 2566930 - RNA, 19 nt, Artificial Sequence
  Description of Artificial Sequence: Synthetic oligonucleotide
ucgagaucugcaccagccc

SEQ ID NO: 2566931 - RNA, 19 nt, Artificial Sequence
  Description of Artificial Sequence: Synthetic oligonucleotide
uugaggcggguaaucagga

SEQ ID NO: 2566932 - RNA, 19 nt, Artificial Sequence
  Description of Artificial Sequence: Synthetic oligonucleotide
acaaaggacacaggaggag

SEQ ID NO: 2566933 - RNA, 19 nt, Artificial Sequence
  Description of Artificial Sequence: Synthetic oligonucleotide
ggugucaccaucauacagc

SEQ ID NO: 2566934 - RNA, 19 nt, Artificial Sequence
  Description of Artificial Sequence: Synthetic oligonucleotide
ucaccaucauacagcucag

SEQ ID NO: 2566935 - RNA, 19 nt, Artificial Sequence
  Description of Artificial Sequence: Synthetic oligonucleotide
cuugagcucaucggugucg

SEQ ID NO: 2566936 - RNA, 19 nt, Artificial Sequence
  Description of Artificial Sequence: Synthetic oligonucleotide
ucacagauggugggcagag

SEQ ID NO: 2566937 - RNA, 19 nt, Artificial Sequence
  Description of Artificial Sequence: Synthetic oligonucleotide
aaggugaaucaagcaaugu

SEQ ID NO: 2566938 - RNA, 19 nt, Artificial Sequence
  Description of Artificial Sequence: Synthetic oligonucleotide
gagcucaucggugucgaag

SEQ ID NO: 2566939 - RNA, 19 nt, Artificial Sequence
  Description of Artificial Sequence: Synthetic oligonucleotide
agaucaguaaagggcagca

SEQ ID NO: 2566940 - RNA, 19 nt, Artificial Sequence
  Description of Artificial Sequence: Synthetic oligonucleotide
acaugagagacaagagguc

SEQ ID NO: 2566941 - RNA, 19 nt, Artificial Sequence
  Description of Artificial Sequence: Synthetic oligonucleotide
ucuuggaacaaaggacaca

SEQ ID NO: 2566942 - RNA, 19 nt, Artificial Sequence
  Description of Artificial Sequence: Synthetic oligonucleotide
gaccuggucguccacgaac

SEQ ID NO: 2566943 - RNA, 19 nt, Artificial Sequence
  Description of Artificial Sequence: Synthetic oligonucleotide
ucugggagcagggagggaa

SEQ ID NO: 2566944 - RNA, 19 nt, Artificial Sequence
  Description of Artificial Sequence: Synthetic oligonucleotide
agacaagaggucucuggga

SEQ ID NO: 2566945 - RNA, 19 nt, Artificial Sequence
  Description of Artificial Sequence: Synthetic oligonucleotide
ucccacugaaggugaauca

SEQ ID NO: 2566946 - RNA, 19 nt, Artificial Sequence
  Description of Artificial Sequence: Synthetic oligonucleotide
aacuccgggaggcguucgg

SEQ ID NO: 2566947 - RNA, 19 nt, Artificial Sequence
  Description of Artificial Sequence: Synthetic oligonucleotide
ugaaauggcggcggcaggu

SEQ ID NO: 2566948 - RNA, 19 nt, Artificial Sequence
  Description of Artificial Sequence: Synthetic oligonucleotide
gucguccacgaacauguag

SEQ ID NO: 2566949 - RNA, 19 nt, Artificial Sequence
  Description of Artificial Sequence: Synthetic oligonucleotide
aaauggcggcggcagguga

SEQ ID NO: 2566950 - RNA, 19 nt, Artificial Sequence
  Description of Artificial Sequence: Synthetic oligonucleotide
guccaugugaaaacaugag

SEQ ID NO: 2566951 - RNA, 19 nt, Artificial Sequence
  Description of Artificial Sequence: Synthetic oligonucleotide
aggcggguaaucaggaagg

SEQ ID NO: 2566952 - RNA, 19 nt, Artificial Sequence
  Description of Artificial Sequence: Synthetic oligonucleotide
auacagcucagggaacggg

SEQ ID NO: 2566953 - RNA, 19 nt, Artificial Sequence
  Description of Artificial Sequence: Synthetic oligonucleotide
cauguaggagcccgucugc

SEQ ID NO: 2566954 - RNA, 19 nt, Artificial Sequence
  Description of Artificial Sequence: Synthetic oligonucleotide
gaucaguaaagggcagcag

SEQ ID NO: 2566955 - RNA, 19 nt, Artificial Sequence
  Description of Artificial Sequence: Synthetic oligonucleotide
gaacugguccaugugaaaa

SEQ ID NO: 2566956 - RNA, 19 nt, Artificial Sequence
  Description of Artificial Sequence: Synthetic oligonucleotide
ggucaccuugagcucaucg

SEQ ID NO: 2566957 - RNA, 19 nt, Artificial Sequence
  Description of Artificial Sequence: Synthetic oligonucleotide
ucgucauccuccucccacc

SEQ ID NO: 2566958 - RNA, 19 nt, Artificial Sequence
  Description of Artificial Sequence: Synthetic oligonucleotide
gaaaacgaacugguccaug

SEQ ID NO: 2566959 - RNA, 19 nt, Artificial Sequence
  Description of Artificial Sequence: Synthetic oligonucleotide
aucaagcaauguccacggg

SEQ ID NO: 2566960 - RNA, 19 nt, Artificial Sequence
  Description of Artificial Sequence: Synthetic oligonucleotide
gaggcguucggugucacca

SEQ ID NO: 2566961 - RNA, 19 nt, Artificial Sequence
  Description of Artificial Sequence: Synthetic oligonucleotide
caguaaagggcagcagucc

SEQ ID NO: 2566962 - RNA, 19 nt, Artificial Sequence
  Description of Artificial Sequence: Synthetic oligonucleotide
guaaucaggaaggucaccu

SEQ ID NO: 2566963 - RNA, 19 nt, Artificial Sequence
  Description of Artificial Sequence: Synthetic oligonucleotide
acugguccaugugaaaaca

SEQ ID NO: 2566964 - RNA, 19 nt, Artificial Sequence
  Description of Artificial Sequence: Synthetic oligonucleotide
cucaucggugucgaagacc

SEQ ID NO: 2566965 - RNA, 19 nt, Artificial Sequence
  Description of Artificial Sequence: Synthetic oligonucleotide
gugaaucaagcaaugucca

SEQ ID NO: 2566966 - RNA, 19 nt, Artificial Sequence
  Description of Artificial Sequence: Synthetic oligonucleotide
gagaccaggggagagucca

SEQ ID NO: 2566967 - RNA, 19 nt, Artificial Sequence
  Description of Artificial Sequence: Synthetic oligonucleotide
agaggggcgagcauucgag

SEQ ID NO: 2566968 - RNA, 19 nt, Artificial Sequence
  Description of Artificial Sequence: Synthetic oligonucleotide
cgggaaaacgaacuggucc

SEQ ID NO: 2566969 - RNA, 19 nt, Artificial Sequence
  Description of Artificial Sequence: Synthetic oligonucleotide
cagaucaguaaagggcagc

SEQ ID NO: 2566970 - RNA, 19 nt, Artificial Sequence
  Description of Artificial Sequence: Synthetic oligonucleotide
ccggaggagaccuagcggc

SEQ ID NO: 2566971 - RNA, 19 nt, Artificial Sequence
  Description of Artificial Sequence: Synthetic oligonucleotide
caagcaauguccacgggcu

SEQ ID NO: 2566972 - RNA, 19 nt, Artificial Sequence
  Description of Artificial Sequence: Synthetic oligonucleotide
aucauacagcucagggaac

SEQ ID NO: 2566973 - RNA, 19 nt, Artificial Sequence
  Description of Artificial Sequence: Synthetic oligonucleotide
uguaggggaucacccacuu

SEQ ID NO: 2566974 - RNA, 19 nt, Artificial Sequence
  Description of Artificial Sequence: Synthetic oligonucleotide
caccuugagcucaucggug

SEQ ID NO: 2566975 - RNA, 19 nt, Artificial Sequence
  Description of Artificial Sequence: Synthetic oligonucleotide
ucgggaaaacgaacugguc

SEQ ID NO: 2566976 - RNA, 19 nt, Artificial Sequence
  Description of Artificial Sequence: Synthetic oligonucleotide
cauacagcucagggaacgg

SEQ ID NO: 2566977 - RNA, 19 nt, Artificial Sequence
  Description of Artificial Sequence: Synthetic oligonucleotide
aggcuugaaauggcggcgg

SEQ ID NO: 2566978 - RNA, 19 nt, Artificial Sequence
  Description of Artificial Sequence: Synthetic oligonucleotide
caggaaggucaccuugagc

SEQ ID NO: 2566979 - RNA, 19 nt, Artificial Sequence
  Description of Artificial Sequence: Synthetic oligonucleotide
uaaucaggaaggucaccuu

SEQ ID NO: 2566980 - RNA, 19 nt, Artificial Sequence
  Description of Artificial Sequence: Synthetic oligonucleotide
ccacgaacauguaggagcc

SEQ ID NO: 2566981 - RNA, 19 nt, Artificial Sequence
  Description of Artificial Sequence: Synthetic oligonucleotide
uaccucccucccaugugag

SEQ ID NO: 2566982 - RNA, 19 nt, Artificial Sequence
  Description of Artificial Sequence: Synthetic oligonucleotide
gcacgaugaacuccgggag

SEQ ID NO: 2566983 - RNA, 19 nt, Artificial Sequence
  Description of Artificial Sequence: Synthetic oligonucleotide
gggcagaggcuugaaaugg

SEQ ID NO: 2566984 - RNA, 19 nt, Artificial Sequence
  Description of Artificial Sequence: Synthetic oligonucleotide
ucggugucgaagaccuggu

SEQ ID NO: 2566985 - RNA, 19 nt, Artificial Sequence
  Description of Artificial Sequence: Synthetic oligonucleotide
gaggucucugggagcaggg

SEQ ID NO: 2566986 - RNA, 19 nt, Artificial Sequence
  Description of Artificial Sequence: Synthetic oligonucleotide
guuggagaccaggggagag

SEQ ID NO: 2566987 - RNA, 19 nt, Artificial Sequence
  Description of Artificial Sequence: Synthetic oligonucleotide
uaaagggcagcaguccuuu

SEQ ID NO: 2566988 - RNA, 19 nt, Artificial Sequence
  Description of Artificial Sequence: Synthetic oligonucleotide
agggaaugggucccacuga

SEQ ID NO: 2566989 - RNA, 19 nt, Artificial Sequence
  Description of Artificial Sequence: Synthetic oligonucleotide
agguaccucccucccaugu

SEQ ID NO: 2566990 - RNA, 19 nt, Artificial Sequence
  Description of Artificial Sequence: Synthetic oligonucleotide
gguccaugugaaaacauga

SEQ ID NO: 2566991 - RNA, 19 nt, Artificial Sequence
  Description of Artificial Sequence: Synthetic oligonucleotide
caaaggacacaggaggaga

SEQ ID NO: 2566992 - RNA, 19 nt, Artificial Sequence
  Description of Artificial Sequence: Synthetic oligonucleotide
ucggugucaccaucauaca

SEQ ID NO: 2566993 - RNA, 19 nt, Artificial Sequence
  Description of Artificial Sequence: Synthetic oligonucleotide
agcaauguccacgggcuga

SEQ ID NO: 2566994 - RNA, 19 nt, Artificial Sequence
  Description of Artificial Sequence: Synthetic oligonucleotide
cuuucacagauggugggca

SEQ ID NO: 2566995 - RNA, 19 nt, Artificial Sequence
  Description of Artificial Sequence: Synthetic oligonucleotide
uaggagcccgucugcacga

SEQ ID NO: 2566996 - RNA, 19 nt, Artificial Sequence
  Description of Artificial Sequence: Synthetic oligonucleotide
guaccucccucccauguga

SEQ ID NO: 2566997 - RNA, 19 nt, Artificial Sequence
  Description of Artificial Sequence: Synthetic oligonucleotide
uggcccuugaggcggguaa

SEQ ID NO: 2566998 - RNA, 19 nt, Artificial Sequence
  Description of Artificial Sequence: Synthetic oligonucleotide
aucaggaaggucaccuuga

SEQ ID NO: 2566999 - RNA, 19 nt, Artificial Sequence
  Description of Artificial Sequence: Synthetic oligonucleotide
cagggccuggcccuugagg

SEQ ID NO: 2567000 - RNA, 19 nt, Artificial Sequence
  Description of Artificial Sequence: Synthetic oligonucleotide
gaaauggcggcggcaggug

SEQ ID NO: 2567001 - RNA, 19 nt, Artificial Sequence
  Description of Artificial Sequence: Synthetic oligonucleotide
acaggaggagagaggggcg

SEQ ID NO: 2567002 - RNA, 19 nt, Artificial Sequence
  Description of Artificial Sequence: Synthetic oligonucleotide
ugagggcagcucagguacc

SEQ ID NO: 2567003 - RNA, 19 nt, Artificial Sequence
  Description of Artificial Sequence: Synthetic oligonucleotide
cucccucccaugugagucc

SEQ ID NO: 2567004 - RNA, 19 nt, Artificial Sequence
  Description of Artificial Sequence: Synthetic oligonucleotide
cggguaaucaggaagguca

SEQ ID NO: 2567005 - RNA, 19 nt, Artificial Sequence
  Description of Artificial Sequence: Synthetic oligonucleotide
aggggcgagcauucgagau

SEQ ID NO: 2567006 - RNA, 19 nt, Artificial Sequence
  Description of Artificial Sequence: Synthetic oligonucleotide
acgggcugagggcagcuca

SEQ ID NO: 2567007 - RNA, 19 nt, Artificial Sequence
  Description of Artificial Sequence: Synthetic oligonucleotide
ggccuagaagucgucaucc

SEQ ID NO: 2567008 - RNA, 19 nt, Artificial Sequence
  Description of Artificial Sequence: Synthetic oligonucleotide
cauucgagaucugcaccag

SEQ ID NO: 2567009 - RNA, 19 nt, Artificial Sequence
  Description of Artificial Sequence: Synthetic oligonucleotide
gaacauguaggagcccguc

SEQ ID NO: 2567010 - RNA, 19 nt, Artificial Sequence
  Description of Artificial Sequence: Synthetic oligonucleotide
gaucugcaccagcccaccc

SEQ ID NO: 2567011 - RNA, 19 nt, Artificial Sequence
  Description of Artificial Sequence: Synthetic oligonucleotide
cucagggaacgggaugggg

SEQ ID NO: 2567012 - RNA, 19 nt, Artificial Sequence
  Description of Artificial Sequence: Synthetic oligonucleotide
ccacugaaggugaaucaag

SEQ ID NO: 2567013 - RNA, 19 nt, Artificial Sequence
  Description of Artificial Sequence: Synthetic oligonucleotide
cucgggaaaacgaacuggu

SEQ ID NO: 2567014 - RNA, 19 nt, Artificial Sequence
  Description of Artificial Sequence: Synthetic oligonucleotide
gagaggggcgagcauucga

SEQ ID NO: 2567015 - RNA, 19 nt, Artificial Sequence
  Description of Artificial Sequence: Synthetic oligonucleotide
gugucgaagaccuggucgu

SEQ ID NO: 2567016 - RNA, 19 nt, Artificial Sequence
  Description of Artificial Sequence: Synthetic oligonucleotide
gagagaggggcgagcauuc

SEQ ID NO: 2567017 - RNA, 19 nt, Artificial Sequence
  Description of Artificial Sequence: Synthetic oligonucleotide
ugaggcggguaaucaggaa

SEQ ID NO: 2567018 - RNA, 19 nt, Artificial Sequence
  Description of Artificial Sequence: Synthetic oligonucleotide
ggggaucacccacuucagg

SEQ ID NO: 2567019 - RNA, 19 nt, Artificial Sequence
  Description of Artificial Sequence: Synthetic oligonucleotide
gagcccgucugcacgauga

SEQ ID NO: 2567020 - RNA, 19 nt, Artificial Sequence
  Description of Artificial Sequence: Synthetic oligonucleotide
guccacgaacauguaggag

SEQ ID NO: 2567021 - RNA, 19 nt, Artificial Sequence
  Description of Artificial Sequence: Synthetic oligonucleotide
cuggucguccacgaacaug

SEQ ID NO: 2567022 - RNA, 19 nt, Artificial Sequence
  Description of Artificial Sequence: Synthetic oligonucleotide
agagaggggcgagcauucg

SEQ ID NO: 2567023 - RNA, 19 nt, Artificial Sequence
  Description of Artificial Sequence: Synthetic oligonucleotide
acgaacugguccaugugaa

SEQ ID NO: 2567024 - RNA, 19 nt, Artificial Sequence
  Description of Artificial Sequence: Synthetic oligonucleotide
gagaccuagcggccuagaa

SEQ ID NO: 2567025 - RNA, 19 nt, Artificial Sequence
  Description of Artificial Sequence: Synthetic oligonucleotide
gcccggaggagaccuagcg

SEQ ID NO: 2567026 - RNA, 19 nt, Artificial Sequence
  Description of Artificial Sequence: Synthetic oligonucleotide
accuggucguccacgaaca

SEQ ID NO: 2567027 - RNA, 19 nt, Artificial Sequence
  Description of Artificial Sequence: Synthetic oligonucleotide
cagggagggaauggguccc

SEQ ID NO: 2567028 - RNA, 19 nt, Artificial Sequence
  Description of Artificial Sequence: Synthetic oligonucleotide
gguaccucccucccaugug

SEQ ID NO: 2567029 - RNA, 19 nt, Artificial Sequence
  Description of Artificial Sequence: Synthetic oligonucleotide
cagcccacccucccggagc

SEQ ID NO: 2567030 - RNA, 19 nt, Artificial Sequence
  Description of Artificial Sequence: Synthetic oligonucleotide
ccuugaggcggguaaucag

SEQ ID NO: 2567031 - RNA, 19 nt, Artificial Sequence
  Description of Artificial Sequence: Synthetic oligonucleotide
ggacacaggaggagagagg

SEQ ID NO: 2567032 - RNA, 19 nt, Artificial Sequence
  Description of Artificial Sequence: Synthetic oligonucleotide
ugucaccaucauacagcuc

SEQ ID NO: 2567033 - RNA, 19 nt, Artificial Sequence
  Description of Artificial Sequence: Synthetic oligonucleotide
cuccgggaggcguucggug

SEQ ID NO: 2567034 - RNA, 19 nt, Artificial Sequence
  Description of Artificial Sequence: Synthetic oligonucleotide
caccaucauacagcucagg

SEQ ID NO: 2567035 - RNA, 19 nt, Artificial Sequence
  Description of Artificial Sequence: Synthetic oligonucleotide
ccuagaagucgucauccuc

SEQ ID NO: 2567036 - RNA, 19 nt, Artificial Sequence
  Description of Artificial Sequence: Synthetic oligonucleotide
gaggggcgagcauucgaga

SEQ ID NO: 2567037 - RNA, 19 nt, Artificial Sequence
  Description of Artificial Sequence: Synthetic oligonucleotide
auguaggagcccgucugca

SEQ ID NO: 2567038 - RNA, 19 nt, Artificial Sequence
  Description of Artificial Sequence: Synthetic oligonucleotide
gaacuccgggaggcguucg

SEQ ID NO: 2567039 - RNA, 19 nt, Artificial Sequence
  Description of Artificial Sequence: Synthetic oligonucleotide
gaugaacuccgggaggcgu

SEQ ID NO: 2567040 - RNA, 19 nt, Artificial Sequence
  Description of Artificial Sequence: Synthetic oligonucleotide
ugaacuccgggaggcguuc

SEQ ID NO: 2567041 - RNA, 19 nt, Artificial Sequence
  Description of Artificial Sequence: Synthetic oligonucleotide
ccuagcggccuagaagucg

SEQ ID NO: 2567042 - RNA, 19 nt, Artificial Sequence
  Description of Artificial Sequence: Synthetic oligonucleotide
auguaggggaucacccacu

SEQ ID NO: 2567043 - RNA, 19 nt, Artificial Sequence
  Description of Artificial Sequence: Synthetic oligonucleotide
aggggaucacccacuucag

SEQ ID NO: 2567044 - RNA, 19 nt, Artificial Sequence
  Description of Artificial Sequence: Synthetic oligonucleotide
cuagcggccuagaagucgu

SEQ ID NO: 2567045 - RNA, 19 nt, Artificial Sequence
  Description of Artificial Sequence: Synthetic oligonucleotide
gggaaugggucccacugaa

SEQ ID NO: 2567046 - RNA, 19 nt, Artificial Sequence
  Description of Artificial Sequence: Synthetic oligonucleotide
cacagauggugggcagagg

SEQ ID NO: 2567047 - RNA, 19 nt, Artificial Sequence
  Description of Artificial Sequence: Synthetic oligonucleotide
ccacuucagggccuggccc

SEQ ID NO: 2567048 - RNA, 19 nt, Artificial Sequence
  Description of Artificial Sequence: Synthetic oligonucleotide
agcggccuagaagucguca

SEQ ID NO: 2567049 - RNA, 19 nt, Artificial Sequence
  Description of Artificial Sequence: Synthetic oligonucleotide
gcgagcauucgagaucugc

SEQ ID NO: 2567050 - RNA, 19 nt, Artificial Sequence
  Description of Artificial Sequence: Synthetic oligonucleotide
ggcggcaggugaucugucc

SEQ ID NO: 2567051 - RNA, 19 nt, Artificial Sequence
  Description of Artificial Sequence: Synthetic oligonucleotide
guaggggaucacccacuuc

SEQ ID NO: 2567052 - RNA, 19 nt, Artificial Sequence
  Description of Artificial Sequence: Synthetic oligonucleotide
cagcucagguaccucccuc

SEQ ID NO: 2567053 - RNA, 19 nt, Artificial Sequence
  Description of Artificial Sequence: Synthetic oligonucleotide
ggcagaggcuugaaauggc

SEQ ID NO: 2567054 - RNA, 19 nt, Artificial Sequence
  Description of Artificial Sequence: Synthetic oligonucleotide
ucccucccaugugagucca

SEQ ID NO: 2567055 - RNA, 19 nt, Artificial Sequence
  Description of Artificial Sequence: Synthetic oligonucleotide
aaggucaccuugagcucau

SEQ ID NO: 2567056 - RNA, 19 nt, Artificial Sequence
  Description of Artificial Sequence: Synthetic oligonucleotide
ggaaugggucccacugaag

SEQ ID NO: 2567057 - RNA, 19 nt, Artificial Sequence
  Description of Artificial Sequence: Synthetic oligonucleotide
aggcccggaggagaccuag

SEQ ID NO: 2567058 - RNA, 19 nt, Artificial Sequence
  Description of Artificial Sequence: Synthetic oligonucleotide
acagcucagggaacgggau

SEQ ID NO: 2567059 - RNA, 19 nt, Artificial Sequence
  Description of Artificial Sequence: Synthetic oligonucleotide
accuagcggccuagaaguc

SEQ ID NO: 2567060 - RNA, 19 nt, Artificial Sequence
  Description of Artificial Sequence: Synthetic oligonucleotide
cccggaggagaccuagcgg

SEQ ID NO: 2567061 - RNA, 19 nt, Artificial Sequence
  Description of Artificial Sequence: Synthetic oligonucleotide
gcucagguaccucccuccc

SEQ ID NO: 2567062 - RNA, 19 nt, Artificial Sequence
  Description of Artificial Sequence: Synthetic oligonucleotide
ggcuugaaauggcggcggc

SEQ ID NO: 2567063 - RNA, 19 nt, Artificial Sequence
  Description of Artificial Sequence: Synthetic oligonucleotide
ggggcgagcauucgagauc

SEQ ID NO: 2567064 - RNA, 19 nt, Artificial Sequence
  Description of Artificial Sequence: Synthetic oligonucleotide
caauguccacgggcugagg

SEQ ID NO: 2567065 - RNA, 19 nt, Artificial Sequence
  Description of Artificial Sequence: Synthetic oligonucleotide
cucagguaccucccuccca

SEQ ID NO: 2567066 - RNA, 19 nt, Artificial Sequence
  Description of Artificial Sequence: Synthetic oligonucleotide
uccacgggcugagggcagc

SEQ ID NO: 2567067 - RNA, 19 nt, Artificial Sequence
  Description of Artificial Sequence: Synthetic oligonucleotide
ugagcucaucggugucgaa

SEQ ID NO: 2567068 - RNA, 19 nt, Artificial Sequence
  Description of Artificial Sequence: Synthetic oligonucleotide
aucacccacuucagggccu

SEQ ID NO: 2567069 - RNA, 19 nt, Artificial Sequence
  Description of Artificial Sequence: Synthetic oligonucleotide
aggcguucggugucaccau

SEQ ID NO: 2567070 - RNA, 19 nt, Artificial Sequence
  Description of Artificial Sequence: Synthetic oligonucleotide
cgagcauucgagaucugca

SEQ ID NO: 2567071 - RNA, 19 nt, Artificial Sequence
  Description of Artificial Sequence: Synthetic oligonucleotide
guucggugucaccaucaua

SEQ ID NO: 2567072 - RNA, 19 nt, Artificial Sequence
  Description of Artificial Sequence: Synthetic oligonucleotide
cggugucaccaucauacag

SEQ ID NO: 2567073 - RNA, 19 nt, Artificial Sequence
  Description of Artificial Sequence: Synthetic oligonucleotide
agaccuggucguccacgaa

SEQ ID NO: 2567074 - RNA, 19 nt, Artificial Sequence
  Description of Artificial Sequence: Synthetic oligonucleotide
gcaccagcccacccucccg

SEQ ID NO: 2567075 - RNA, 19 nt, Artificial Sequence
  Description of Artificial Sequence: Synthetic oligonucleotide
ccucccacccgaacacccg

SEQ ID NO: 2567076 - RNA, 19 nt, Artificial Sequence
  Description of Artificial Sequence: Synthetic oligonucleotide
ccucccucccaugugaguc

SEQ ID NO: 2567077 - RNA, 19 nt, Artificial Sequence
  Description of Artificial Sequence: Synthetic oligonucleotide
gaccaggggagaguccaaa

SEQ ID NO: 2567078 - RNA, 19 nt, Artificial Sequence
  Description of Artificial Sequence: Synthetic oligonucleotide
caucggugucgaagaccug

SEQ ID NO: 2567079 - RNA, 19 nt, Artificial Sequence
  Description of Artificial Sequence: Synthetic oligonucleotide
cagauggugggcagaggcu

SEQ ID NO: 2567080 - RNA, 19 nt, Artificial Sequence
  Description of Artificial Sequence: Synthetic oligonucleotide
aggucucugggagcaggga

SEQ ID NO: 2567081 - RNA, 19 nt, Artificial Sequence
  Description of Artificial Sequence: Synthetic oligonucleotide
cacuucagggccuggcccu

SEQ ID NO: 2567082 - RNA, 19 nt, Artificial Sequence
  Description of Artificial Sequence: Synthetic oligonucleotide
gcggcaggugaucugucca

SEQ ID NO: 2567083 - RNA, 19 nt, Artificial Sequence
  Description of Artificial Sequence: Synthetic oligonucleotide
augaacuccgggaggcguu

SEQ ID NO: 2567084 - RNA, 19 nt, Artificial Sequence
  Description of Artificial Sequence: Synthetic oligonucleotide
caugugaguccagaucagu

SEQ ID NO: 2567085 - RNA, 19 nt, Artificial Sequence
  Description of Artificial Sequence: Synthetic oligonucleotide
gcugagggcagcucaggua

SEQ ID NO: 2567086 - RNA, 19 nt, Artificial Sequence
  Description of Artificial Sequence: Synthetic oligonucleotide
uagcggccuagaagucguc

SEQ ID NO: 2567087 - RNA, 19 nt, Artificial Sequence
  Description of Artificial Sequence: Synthetic oligonucleotide
agcccgucugcacgaugaa

SEQ ID NO: 2567088 - RNA, 19 nt, Artificial Sequence
  Description of Artificial Sequence: Synthetic oligonucleotide
ggaggcguucggugucacc

SEQ ID NO: 2567089 - RNA, 19 nt, Artificial Sequence
  Description of Artificial Sequence: Synthetic oligonucleotide
cugguccaugugaaaacau

SEQ ID NO: 2567090 - RNA, 19 nt, Artificial Sequence
  Description of Artificial Sequence: Synthetic oligonucleotide
ggugggcagaggcuugaaa

SEQ ID NO: 2567091 - RNA, 19 nt, Artificial Sequence
  Description of Artificial Sequence: Synthetic oligonucleotide
gcaggugaucuguccauua

SEQ ID NO: 2567092 - RNA, 19 nt, Artificial Sequence
  Description of Artificial Sequence: Synthetic oligonucleotide
uggcggcggcaggugaucu

SEQ ID NO: 2567093 - RNA, 19 nt, Artificial Sequence
  Description of Artificial Sequence: Synthetic oligonucleotide
ccgucugcacgaugaacuc

SEQ ID NO: 2567094 - RNA, 19 nt, Artificial Sequence
  Description of Artificial Sequence: Synthetic oligonucleotide
cgagaucugcaccagccca

SEQ ID NO: 2567095 - RNA, 19 nt, Artificial Sequence
  Description of Artificial Sequence: Synthetic oligonucleotide
caggugaucuguccauuau

SEQ ID NO: 2567096 - RNA, 19 nt, Artificial Sequence
  Description of Artificial Sequence: Synthetic oligonucleotide
gcuugaaauggcggcggca

SEQ ID NO: 2567097 - RNA, 19 nt, Artificial Sequence
  Description of Artificial Sequence: Synthetic oligonucleotide
gggcgagcauucgagaucu

SEQ ID NO: 2567098 - RNA, 19 nt, Artificial Sequence
  Description of Artificial Sequence: Synthetic oligonucleotide
ggcguucggugucaccauc

SEQ ID NO: 2567099 - RNA, 19 nt, Artificial Sequence
  Description of Artificial Sequence: Synthetic oligonucleotide
ggagcccgucugcacgaug

SEQ ID NO: 2567100 - RNA, 19 nt, Artificial Sequence
  Description of Artificial Sequence: Synthetic oligonucleotide
guaaagggcagcaguccuu

SEQ ID NO: 2567101 - RNA, 19 nt, Artificial Sequence
  Description of Artificial Sequence: Synthetic oligonucleotide
gcggguaaucaggaagguc

SEQ ID NO: 2567102 - RNA, 19 nt, Artificial Sequence
  Description of Artificial Sequence: Synthetic oligonucleotide
guccacgggcugagggcag

SEQ ID NO: 2567103 - RNA, 19 nt, Artificial Sequence
  Description of Artificial Sequence: Synthetic oligonucleotide
cgucugcacgaugaacucc

SEQ ID NO: 2567104 - RNA, 19 nt, Artificial Sequence
  Description of Artificial Sequence: Synthetic oligonucleotide
cgauguaggggaucaccca

SEQ ID NO: 2567105 - RNA, 19 nt, Artificial Sequence
  Description of Artificial Sequence: Synthetic oligonucleotide
caguccuuucacagauggu

SEQ ID NO: 2567106 - RNA, 19 nt, Artificial Sequence
  Description of Artificial Sequence: Synthetic oligonucleotide
cucccaugugaguccagau

SEQ ID NO: 2567107 - RNA, 19 nt, Artificial Sequence
  Description of Artificial Sequence: Synthetic oligonucleotide
cccacugaaggugaaucaa

SEQ ID NO: 2567108 - RNA, 19 nt, Artificial Sequence
  Description of Artificial Sequence: Synthetic oligonucleotide
ggagagaggggcgagcauu

SEQ ID NO: 2567109 - RNA, 19 nt, Artificial Sequence
  Description of Artificial Sequence: Synthetic oligonucleotide
ggcggcggcaggugaucug

SEQ ID NO: 2567110 - RNA, 19 nt, Artificial Sequence
  Description of Artificial Sequence: Synthetic oligonucleotide
gcguucggugucaccauca

SEQ ID NO: 2567111 - RNA, 19 nt, Artificial Sequence
  Description of Artificial Sequence: Synthetic oligonucleotide
cguccacgaacauguagga

SEQ ID NO: 2567112 - RNA, 19 nt, Artificial Sequence
  Description of Artificial Sequence: Synthetic oligonucleotide
agaccaggggagaguccaa

SEQ ID NO: 2567113 - RNA, 19 nt, Artificial Sequence
  Description of Artificial Sequence: Synthetic oligonucleotide
ggcugagggcagcucaggu

SEQ ID NO: 2567114 - RNA, 19 nt, Artificial Sequence
  Description of Artificial Sequence: Synthetic oligonucleotide
cacccacuucagggccugg

SEQ ID NO: 2567115 - RNA, 19 nt, Artificial Sequence
  Description of Artificial Sequence: Synthetic oligonucleotide
cccacccucccggagcccc

SEQ ID NO: 2567116 - RNA, 19 nt, Artificial Sequence
  Description of Artificial Sequence: Synthetic oligonucleotide
cgaugaacuccgggaggcg

SEQ ID NO: 2567117 - RNA, 19 nt, Artificial Sequence
  Description of Artificial Sequence: Synthetic oligonucleotide
cacgggcugagggcagcuc

SEQ ID NO: 2567118 - RNA, 19 nt, Artificial Sequence
  Description of Artificial Sequence: Synthetic oligonucleotide
gccuagaagucgucauccu

SEQ ID NO: 2567119 - RNA, 19 nt, Artificial Sequence
  Description of Artificial Sequence: Synthetic oligonucleotide
cgggcugagggcagcucag

SEQ ID NO: 2567120 - RNA, 19 nt, Artificial Sequence
  Description of Artificial Sequence: Synthetic oligonucleotide
cccuugaggcggguaauca

SEQ ID NO: 2567121 - RNA, 19 nt, Artificial Sequence
  Description of Artificial Sequence: Synthetic oligonucleotide
cggccuagaagucgucauc

SEQ ID NO: 2567122 - RNA, 19 nt, Artificial Sequence
  Description of Artificial Sequence: Synthetic oligonucleotide
ccucccaugugaguccaga

SEQ ID NO: 2567123 - RNA, 19 nt, Artificial Sequence
  Description of Artificial Sequence: Synthetic oligonucleotide
ggaaaacgaacugguccau

SEQ ID NO: 2567124 - RNA, 19 nt, Artificial Sequence
  Description of Artificial Sequence: Synthetic oligonucleotide
gggagggaaugggucccac

SEQ ID NO: 2567125 - RNA, 19 nt, Artificial Sequence
  Description of Artificial Sequence: Synthetic oligonucleotide
ggaggagaccuagcggccu

SEQ ID NO: 2567126 - RNA, 19 nt, Artificial Sequence
  Description of Artificial Sequence: Synthetic oligonucleotide
ggagaccuagcggccuaga

SEQ ID NO: 2567127 - RNA, 19 nt, Artificial Sequence
  Description of Artificial Sequence: Synthetic oligonucleotide
gcggccuagaagucgucau

SEQ ID NO: 2567128 - RNA, 19 nt, Artificial Sequence
  Description of Artificial Sequence: Synthetic oligonucleotide
ccgggaggcguucgguguc

SEQ ID NO: 2567129 - RNA, 19 nt, Artificial Sequence
  Description of Artificial Sequence: Synthetic oligonucleotide
aggagcccgucugcacgau

SEQ ID NO: 2567130 - RNA, 19 nt, Artificial Sequence
  Description of Artificial Sequence: Synthetic oligonucleotide
gcagcucagguaccucccu

SEQ ID NO: 2567131 - RNA, 19 nt, Artificial Sequence
  Description of Artificial Sequence: Synthetic oligonucleotide
ggcccggaggagaccuagc

SEQ ID NO: 2567132 - RNA, 19 nt, Artificial Sequence
  Description of Artificial Sequence: Synthetic oligonucleotide
ggcggguaaucaggaaggu

SEQ ID NO: 2567133 - RNA, 19 nt, Artificial Sequence
  Description of Artificial Sequence: Synthetic oligonucleotide
gggaggcguucggugucac

SEQ ID NO: 2567134 - RNA, 19 nt, Artificial Sequence
  Description of Artificial Sequence: Synthetic oligonucleotide
gcggcggcaggugaucugu

SEQ ID NO: 2567135 - RNA, 19 nt, Artificial Sequence
  Description of Artificial Sequence: Synthetic oligonucleotide
gccuggcccuugaggcggg

SEQ ID NO: 2567136 - RNA, 19 nt, Artificial Sequence
  Description of Artificial Sequence: Synthetic oligonucleotide
ggcgagcauucgagaucug

SEQ ID NO: 2567137 - RNA, 19 nt, Artificial Sequence
  Description of Artificial Sequence: Synthetic oligonucleotide
cgaacauguaggagcccgu

SEQ ID NO: 2567138 - RNA, 19 nt, Artificial Sequence
  Description of Artificial Sequence: Synthetic oligonucleotide
ggucguccacgaacaugua

SEQ ID NO: 2567139 - RNA, 19 nt, Artificial Sequence
  Description of Artificial Sequence: Synthetic oligonucleotide
cggcggcaggugaucuguc

SEQ ID NO: 2567140 - RNA, 19 nt, Artificial Sequence
  Description of Artificial Sequence: Synthetic oligonucleotide
cguucggugucaccaucau

SEQ ID NO: 2567141 - RNA, 19 nt, Artificial Sequence
  Description of Artificial Sequence: Synthetic oligonucleotide
ccuggucguccacgaacau

SEQ ID NO: 2567142 - RNA, 19 nt, Artificial Sequence
  Description of Artificial Sequence: Synthetic oligonucleotide
cgggaggcguucgguguca

SEQ ID NO: 2567143 - RNA, 19 nt, Artificial Sequence
  Description of Artificial Sequence: Synthetic oligonucleotide
ccacgggcugagggcagcu

SEQ ID NO: 2567144 - RNA, 19 nt, Artificial Sequence
  Description of Artificial Sequence: Synthetic oligonucleotide
aagaaagugagucacaagu

SEQ ID NO: 2567145 - RNA, 19 nt, Artificial Sequence
  Description of Artificial Sequence: Synthetic oligonucleotide
aaagccguuguacaggugg

SEQ ID NO: 2567146 - RNA, 19 nt, Artificial Sequence
  Description of Artificial Sequence: Synthetic oligonucleotide
gauaagggugucuuuaggg

SEQ ID NO: 2567147 - RNA, 19 nt, Artificial Sequence
  Description of Artificial Sequence: Synthetic oligonucleotide
uguagugugaacucauagg

SEQ ID NO: 2567148 - RNA, 19 nt, Artificial Sequence
  Description of Artificial Sequence: Synthetic oligonucleotide
uuuuguugugcucagguca

SEQ ID NO: 2567149 - RNA, 19 nt, Artificial Sequence
  Description of Artificial Sequence: Synthetic oligonucleotide
ugcuaugagguuaaagccg

SEQ ID NO: 2567150 - RNA, 19 nt, Artificial Sequence
  Description of Artificial Sequence: Synthetic oligonucleotide
aauugguuguacauacucc

SEQ ID NO: 2567151 - RNA, 19 nt, Artificial Sequence
  Description of Artificial Sequence: Synthetic oligonucleotide
uucauuguugaguacaucu

SEQ ID NO: 2567152 - RNA, 19 nt, Artificial Sequence
  Description of Artificial Sequence: Synthetic oligonucleotide
gaguacaucuaggagaugg

SEQ ID NO: 2567153 - RNA, 19 nt, Artificial Sequence
  Description of Artificial Sequence: Synthetic oligonucleotide
aggaugaugguguugguuc

SEQ ID NO: 2567154 - RNA, 19 nt, Artificial Sequence
  Description of Artificial Sequence: Synthetic oligonucleotide
ugagucauagacaugcagu

SEQ ID NO: 2567155 - RNA, 19 nt, Artificial Sequence
  Description of Artificial Sequence: Synthetic oligonucleotide
aagaguuguuugccaaagc

SEQ ID NO: 2567156 - RNA, 19 nt, Artificial Sequence
  Description of Artificial Sequence: Synthetic oligonucleotide
guugaguacaucuaggaga

SEQ ID NO: 2567157 - RNA, 19 nt, Artificial Sequence
  Description of Artificial Sequence: Synthetic oligonucleotide
caagacaauaggcucaugc

SEQ ID NO: 2567158 - RNA, 19 nt, Artificial Sequence
  Description of Artificial Sequence: Synthetic oligonucleotide
agacaauaggcucaugcuc

SEQ ID NO: 2567159 - RNA, 19 nt, Artificial Sequence
  Description of Artificial Sequence: Synthetic oligonucleotide
guucuggugccauaggugg

SEQ ID NO: 2567160 - RNA, 19 nt, Artificial Sequence
  Description of Artificial Sequence: Synthetic oligonucleotide
auaucacuggucaagaaag

SEQ ID NO: 2567161 - RNA, 19 nt, Artificial Sequence
  Description of Artificial Sequence: Synthetic oligonucleotide
agugcucccaacuuuccac

SEQ ID NO: 2567162 - RNA, 19 nt, Artificial Sequence
  Description of Artificial Sequence: Synthetic oligonucleotide
ugguuguacauacucccgg

SEQ ID NO: 2567163 - RNA, 19 nt, Artificial Sequence
  Description of Artificial Sequence: Synthetic oligonucleotide
ucauagacaugcagugugg

SEQ ID NO: 2567164 - RNA, 19 nt, Artificial Sequence
  Description of Artificial Sequence: Synthetic oligonucleotide
ugucaagacaauaggcuca

SEQ ID NO: 2567165 - RNA, 19 nt, Artificial Sequence
  Description of Artificial Sequence: Synthetic oligonucleotide
agaguuguuugccaaagca

SEQ ID NO: 2567166 - RNA, 19 nt, Artificial Sequence
  Description of Artificial Sequence: Synthetic oligonucleotide
ugauaagggugucuuuagg

SEQ ID NO: 2567167 - RNA, 19 nt, Artificial Sequence
  Description of Artificial Sequence: Synthetic oligonucleotide
uuuguugugcucaggucag

SEQ ID NO: 2567168 - RNA, 19 nt, Artificial Sequence
  Description of Artificial Sequence: Synthetic oligonucleotide
gcugcuaugagguuaaagc

SEQ ID NO: 2567169 - RNA, 19 nt, Artificial Sequence
  Description of Artificial Sequence: Synthetic oligonucleotide
uacaucuaggagaugggug

SEQ ID NO: 2567170 - RNA, 19 nt, Artificial Sequence
  Description of Artificial Sequence: Synthetic oligonucleotide
gagucauagacaugcagug

SEQ ID NO: 2567171 - RNA, 19 nt, Artificial Sequence
  Description of Artificial Sequence: Synthetic oligonucleotide
gacaauaggcucaugcucc

SEQ ID NO: 2567172 - RNA, 19 nt, Artificial Sequence
  Description of Artificial Sequence: Synthetic oligonucleotide
uugaguacaucuaggagau

SEQ ID NO: 2567173 - RNA, 19 nt, Artificial Sequence
  Description of Artificial Sequence: Synthetic oligonucleotide
uuccauaguagcaaacaac

SEQ ID NO: 2567174 - RNA, 19 nt, Artificial Sequence
  Description of Artificial Sequence: Synthetic oligonucleotide
cugcuaugagguuaaagcc

SEQ ID NO: 2567175 - RNA, 19 nt, Artificial Sequence
  Description of Artificial Sequence: Synthetic oligonucleotide
cagaauugguuguacauac

SEQ ID NO: 2567176 - RNA, 19 nt, Artificial Sequence
  Description of Artificial Sequence: Synthetic oligonucleotide
cauuguugaguacaucuag

SEQ ID NO: 2567177 - RNA, 19 nt, Artificial Sequence
  Description of Artificial Sequence: Synthetic oligonucleotide
gucauagacaugcagugug

SEQ ID NO: 2567178 - RNA, 19 nt, Artificial Sequence
  Description of Artificial Sequence: Synthetic oligonucleotide
uugguuguacauacucccg

SEQ ID NO: 2567179 - RNA, 19 nt, Artificial Sequence
  Description of Artificial Sequence: Synthetic oligonucleotide
auaagggugucuuuaggga

SEQ ID NO: 2567180 - RNA, 19 nt, Artificial Sequence
  Description of Artificial Sequence: Synthetic oligonucleotide
aaguucaccucuaccacgg

SEQ ID NO: 2567181 - RNA, 19 nt, Artificial Sequence
  Description of Artificial Sequence: Synthetic oligonucleotide
cacauggccaucugcaucc

SEQ ID NO: 2567182 - RNA, 19 nt, Artificial Sequence
  Description of Artificial Sequence: Synthetic oligonucleotide
acaauaggcucaugcuccc

SEQ ID NO: 2567183 - RNA, 19 nt, Artificial Sequence
  Description of Artificial Sequence: Synthetic oligonucleotide
uugcuuagcccauagguuc

SEQ ID NO: 2567184 - RNA, 19 nt, Artificial Sequence
  Description of Artificial Sequence: Synthetic oligonucleotide
cuuuguucagcaagcuccg

SEQ ID NO: 2567185 - RNA, 19 nt, Artificial Sequence
  Description of Artificial Sequence: Synthetic oligonucleotide
aagugagucacaaguucac

SEQ ID NO: 2567186 - RNA, 19 nt, Artificial Sequence
  Description of Artificial Sequence: Synthetic oligonucleotide
uuaaagccguuguacaggu

SEQ ID NO: 2567187 - RNA, 19 nt, Artificial Sequence
  Description of Artificial Sequence: Synthetic oligonucleotide
gaugguguugguucuggug

SEQ ID NO: 2567188 - RNA, 19 nt, Artificial Sequence
  Description of Artificial Sequence: Synthetic oligonucleotide
uaacucuguagugugaacu

SEQ ID NO: 2567189 - RNA, 19 nt, Artificial Sequence
  Description of Artificial Sequence: Synthetic oligonucleotide
uccaguagggcauugcuua

SEQ ID NO: 2567190 - RNA, 19 nt, Artificial Sequence
  Description of Artificial Sequence: Synthetic oligonucleotide
caaguucaccucuaccacg

SEQ ID NO: 2567191 - RNA, 19 nt, Artificial Sequence
  Description of Artificial Sequence: Synthetic oligonucleotide
gaugcuggcugagucauag

SEQ ID NO: 2567192 - RNA, 19 nt, Artificial Sequence
  Description of Artificial Sequence: Synthetic oligonucleotide
ucaagaaagugagucacaa

SEQ ID NO: 2567193 - RNA, 19 nt, Artificial Sequence
  Description of Artificial Sequence: Synthetic oligonucleotide
cuggucaagaaagugaguc

SEQ ID NO: 2567194 - RNA, 19 nt, Artificial Sequence
  Description of Artificial Sequence: Synthetic oligonucleotide
uguucagcaagcuccguuc

SEQ ID NO: 2567195 - RNA, 19 nt, Artificial Sequence
  Description of Artificial Sequence: Synthetic oligonucleotide
caggcuguccauaucacug

SEQ ID NO: 2567196 - RNA, 19 nt, Artificial Sequence
  Description of Artificial Sequence: Synthetic oligonucleotide
acucauagguguuggucuc

SEQ ID NO: 2567197 - RNA, 19 nt, Artificial Sequence
  Description of Artificial Sequence: Synthetic oligonucleotide
cuguagugugaacucauag

SEQ ID NO: 2567198 - RNA, 19 nt, Artificial Sequence
  Description of Artificial Sequence: Synthetic oligonucleotide
ugcguacuugcucagaauu

SEQ ID NO: 2567199 - RNA, 19 nt, Artificial Sequence
  Description of Artificial Sequence: Synthetic oligonucleotide
aguuguuugccaaagcaca

SEQ ID NO: 2567200 - RNA, 19 nt, Artificial Sequence
  Description of Artificial Sequence: Synthetic oligonucleotide
uaugagguuaaagccguug

SEQ ID NO: 2567201 - RNA, 19 nt, Artificial Sequence
  Description of Artificial Sequence: Synthetic oligonucleotide
guagugugaacucauaggu

SEQ ID NO: 2567202 - RNA, 19 nt, Artificial Sequence
  Description of Artificial Sequence: Synthetic oligonucleotide
caggucagcugcuaugagg

SEQ ID NO: 2567203 - RNA, 19 nt, Artificial Sequence
  Description of Artificial Sequence: Synthetic oligonucleotide
ugagucacaaguucaccuc

SEQ ID NO: 2567204 - RNA, 19 nt, Artificial Sequence
  Description of Artificial Sequence: Synthetic oligonucleotide
ucauuguugaguacaucua

SEQ ID NO: 2567205 - RNA, 19 nt, Artificial Sequence
  Description of Artificial Sequence: Synthetic oligonucleotide
ucuggugccauagguggcg

SEQ ID NO: 2567206 - RNA, 19 nt, Artificial Sequence
  Description of Artificial Sequence: Synthetic oligonucleotide
uggucaagaaagugaguca

SEQ ID NO: 2567207 - RNA, 19 nt, Artificial Sequence
  Description of Artificial Sequence: Synthetic oligonucleotide
agguuaaagccguuguaca

SEQ ID NO: 2567208 - RNA, 19 nt, Artificial Sequence
  Description of Artificial Sequence: Synthetic oligonucleotide
ucuaccacgggcguauggc

SEQ ID NO: 2567209 - RNA, 19 nt, Artificial Sequence
  Description of Artificial Sequence: Synthetic oligonucleotide
uuagggagugccucgcucu

SEQ ID NO: 2567210 - RNA, 19 nt, Artificial Sequence
  Description of Artificial Sequence: Synthetic oligonucleotide
ucuucauuguugaguacau

SEQ ID NO: 2567211 - RNA, 19 nt, Artificial Sequence
  Description of Artificial Sequence: Synthetic oligonucleotide
uuggugagugcucccaacu

SEQ ID NO: 2567212 - RNA, 19 nt, Artificial Sequence
  Description of Artificial Sequence: Synthetic oligonucleotide
gguuaaagccguuguacag

SEQ ID NO: 2567213 - RNA, 19 nt, Artificial Sequence
  Description of Artificial Sequence: Synthetic oligonucleotide
ucuaggagaugggugauaa

SEQ ID NO: 2567214 - RNA, 19 nt, Artificial Sequence
  Description of Artificial Sequence: Synthetic oligonucleotide
ugcuuagcccauagguucc

SEQ ID NO: 2567215 - RNA, 19 nt, Artificial Sequence
  Description of Artificial Sequence: Synthetic oligonucleotide
gugucaagacaauaggcuc

SEQ ID NO: 2567216 - RNA, 19 nt, Artificial Sequence
  Description of Artificial Sequence: Synthetic oligonucleotide
uucagguaggacaggcugu

SEQ ID NO: 2567217 - RNA, 19 nt, Artificial Sequence
  Description of Artificial Sequence: Synthetic oligonucleotide
gugauaagggugucuuuag

SEQ ID NO: 2567218 - RNA, 19 nt, Artificial Sequence
  Description of Artificial Sequence: Synthetic oligonucleotide
cugagucauagacaugcag

SEQ ID NO: 2567219 - RNA, 19 nt, Artificial Sequence
  Description of Artificial Sequence: Synthetic oligonucleotide
gaguuguuugccaaagcac

SEQ ID NO: 2567220 - RNA, 19 nt, Artificial Sequence
  Description of Artificial Sequence: Synthetic oligonucleotide
gucuuuagggagugccucg

SEQ ID NO: 2567221 - RNA, 19 nt, Artificial Sequence
  Description of Artificial Sequence: Synthetic oligonucleotide
uuuagggagugccucgcuc

SEQ ID NO: 2567222 - RNA, 19 nt, Artificial Sequence
  Description of Artificial Sequence: Synthetic oligonucleotide
ggcugagucauagacaugc

SEQ ID NO: 2567223 - RNA, 19 nt, Artificial Sequence
  Description of Artificial Sequence: Synthetic oligonucleotide
uaucacuggucaagaaagu

SEQ ID NO: 2567224 - RNA, 19 nt, Artificial Sequence
  Description of Artificial Sequence: Synthetic oligonucleotide
ugugaacucauagguguug

SEQ ID NO: 2567225 - RNA, 19 nt, Artificial Sequence
  Description of Artificial Sequence: Synthetic oligonucleotide
caagaaagugagucacaag

SEQ ID NO: 2567226 - RNA, 19 nt, Artificial Sequence
  Description of Artificial Sequence: Synthetic oligonucleotide
uugaggcacggcauccuag

SEQ ID NO: 2567227 - RNA, 19 nt, Artificial Sequence
  Description of Artificial Sequence: Synthetic oligonucleotide
aagccguuguacagguggc

SEQ ID NO: 2567228 - RNA, 19 nt, Artificial Sequence
  Description of Artificial Sequence: Synthetic oligonucleotide
guuguacauacucccggcc

SEQ ID NO: 2567229 - RNA, 19 nt, Artificial Sequence
  Description of Artificial Sequence: Synthetic oligonucleotide
augaagaguuguuugccaa

SEQ ID NO: 2567230 - RNA, 19 nt, Artificial Sequence
  Description of Artificial Sequence: Synthetic oligonucleotide
guagacaccuucuucaggu

SEQ ID NO: 2567231 - RNA, 19 nt, Artificial Sequence
  Description of Artificial Sequence: Synthetic oligonucleotide
gccaucugcauccacgagg

SEQ ID NO: 2567232 - RNA, 19 nt, Artificial Sequence
  Description of Artificial Sequence: Synthetic oligonucleotide
ugagguuaaagccguugua

SEQ ID NO: 2567233 - RNA, 19 nt, Artificial Sequence
  Description of Artificial Sequence: Synthetic oligonucleotide
auuccugccuaugcuggcc

SEQ ID NO: 2567234 - RNA, 19 nt, Artificial Sequence
  Description of Artificial Sequence: Synthetic oligonucleotide
ucaauggcuggaucuggca

SEQ ID NO: 2567235 - RNA, 19 nt, Artificial Sequence
  Description of Artificial Sequence: Synthetic oligonucleotide
aguacaucuaggagauggg

SEQ ID NO: 2567236 - RNA, 19 nt, Artificial Sequence
  Description of Artificial Sequence: Synthetic oligonucleotide
cugguccuagcgaugcugg

SEQ ID NO: 2567237 - RNA, 19 nt, Artificial Sequence
  Description of Artificial Sequence: Synthetic oligonucleotide
gggcguauggcucuugccg

SEQ ID NO: 2567238 - RNA, 19 nt, Artificial Sequence
  Description of Artificial Sequence: Synthetic oligonucleotide
guuuccauaguagcaaaca

SEQ ID NO: 2567239 - RNA, 19 nt, Artificial Sequence
  Description of Artificial Sequence: Synthetic oligonucleotide
uccauaucacuggucaaga

SEQ ID NO: 2567240 - RNA, 19 nt, Artificial Sequence
  Description of Artificial Sequence: Synthetic oligonucleotide
uggcccuugaggcacggca

SEQ ID NO: 2567241 - RNA, 19 nt, Artificial Sequence
  Description of Artificial Sequence: Synthetic oligonucleotide
guuguuugccaaagcacag

SEQ ID NO: 2567242 - RNA, 19 nt, Artificial Sequence
  Description of Artificial Sequence: Synthetic oligonucleotide
ugcagguaguuggugagug

SEQ ID NO: 2567243 - RNA, 19 nt, Artificial Sequence
  Description of Artificial Sequence: Synthetic oligonucleotide
cauugcuuagcccauaggu

SEQ ID NO: 2567244 - RNA, 19 nt, Artificial Sequence
  Description of Artificial Sequence: Synthetic oligonucleotide
uguacagguggcccucugu

SEQ ID NO: 2567245 - RNA, 19 nt, Artificial Sequence
  Description of Artificial Sequence: Synthetic oligonucleotide
uagcaaacaacaucuucuu

SEQ ID NO: 2567246 - RNA, 19 nt, Artificial Sequence
  Description of Artificial Sequence: Synthetic oligonucleotide
ugagugcucccaacuuucc

SEQ ID NO: 2567247 - RNA, 19 nt, Artificial Sequence
  Description of Artificial Sequence: Synthetic oligonucleotide
gugcucccaacuuuccacg

SEQ ID NO: 2567248 - RNA, 19 nt, Artificial Sequence
  Description of Artificial Sequence: Synthetic oligonucleotide
cauagacaugcaguguggc

SEQ ID NO: 2567249 - RNA, 19 nt, Artificial Sequence
  Description of Artificial Sequence: Synthetic oligonucleotide
aagcuccguucugugaagg

SEQ ID NO: 2567250 - RNA, 19 nt, Artificial Sequence
  Description of Artificial Sequence: Synthetic oligonucleotide
uccagggcgucuccaguag

SEQ ID NO: 2567251 - RNA, 19 nt, Artificial Sequence
  Description of Artificial Sequence: Synthetic oligonucleotide
auagguuccuggugucaag

SEQ ID NO: 2567252 - RNA, 19 nt, Artificial Sequence
  Description of Artificial Sequence: Synthetic oligonucleotide
acgggcguauggcucuugc

SEQ ID NO: 2567253 - RNA, 19 nt, Artificial Sequence
  Description of Artificial Sequence: Synthetic oligonucleotide
cacggcauccuaguagugg

SEQ ID NO: 2567254 - RNA, 19 nt, Artificial Sequence
  Description of Artificial Sequence: Synthetic oligonucleotide
gauuccugccuaugcuggc

SEQ ID NO: 2567255 - RNA, 19 nt, Artificial Sequence
  Description of Artificial Sequence: Synthetic oligonucleotide
agguguuggucucccagug

SEQ ID NO: 2567256 - RNA, 19 nt, Artificial Sequence
  Description of Artificial Sequence: Synthetic oligonucleotide
ucuuuagggagugccucgc

SEQ ID NO: 2567257 - RNA, 19 nt, Artificial Sequence
  Description of Artificial Sequence: Synthetic oligonucleotide
guccuagcgaugcuggcug

SEQ ID NO: 2567258 - RNA, 19 nt, Artificial Sequence
  Description of Artificial Sequence: Synthetic oligonucleotide
cagggcgucuccaguaggg

SEQ ID NO: 2567259 - RNA, 19 nt, Artificial Sequence
  Description of Artificial Sequence: Synthetic oligonucleotide
ggugucuuuagggagugcc

SEQ ID NO: 2567260 - RNA, 19 nt, Artificial Sequence
  Description of Artificial Sequence: Synthetic oligonucleotide
uagguguuggucucccagu

SEQ ID NO: 2567261 - RNA, 19 nt, Artificial Sequence
  Description of Artificial Sequence: Synthetic oligonucleotide
cuaacucuguagugugaac

SEQ ID NO: 2567262 - RNA, 19 nt, Artificial Sequence
  Description of Artificial Sequence: Synthetic oligonucleotide
uucuggugccauagguggc

SEQ ID NO: 2567263 - RNA, 19 nt, Artificial Sequence
  Description of Artificial Sequence: Synthetic oligonucleotide
aaggucacauggccaucug

SEQ ID NO: 2567264 - RNA, 19 nt, Artificial Sequence
  Description of Artificial Sequence: Synthetic oligonucleotide
uuccugccuaugcuggccc

SEQ ID NO: 2567265 - RNA, 19 nt, Artificial Sequence
  Description of Artificial Sequence: Synthetic oligonucleotide
ucuguagugugaacucaua

SEQ ID NO: 2567266 - RNA, 19 nt, Artificial Sequence
  Description of Artificial Sequence: Synthetic oligonucleotide
ggucaagaaagugagucac

SEQ ID NO: 2567267 - RNA, 19 nt, Artificial Sequence
  Description of Artificial Sequence: Synthetic oligonucleotide
uugccggggcugcagguag

SEQ ID NO: 2567268 - RNA, 19 nt, Artificial Sequence
  Description of Artificial Sequence: Synthetic oligonucleotide
uagcgaugcuggcugaguc

SEQ ID NO: 2567269 - RNA, 19 nt, Artificial Sequence
  Description of Artificial Sequence: Synthetic oligonucleotide
agugagaggugucuuuguu

SEQ ID NO: 2567270 - RNA, 19 nt, Artificial Sequence
  Description of Artificial Sequence: Synthetic oligonucleotide
uguuggucucccagugaga

SEQ ID NO: 2567271 - RNA, 19 nt, Artificial Sequence
  Description of Artificial Sequence: Synthetic oligonucleotide
agcugcuaugagguuaaag

SEQ ID NO: 2567272 - RNA, 19 nt, Artificial Sequence
  Description of Artificial Sequence: Synthetic oligonucleotide
gguaguuggugagugcucc

SEQ ID NO: 2567273 - RNA, 19 nt, Artificial Sequence
  Description of Artificial Sequence: Synthetic oligonucleotide
agcgaugcuggcugaguca

SEQ ID NO: 2567274 - RNA, 19 nt, Artificial Sequence
  Description of Artificial Sequence: Synthetic oligonucleotide
uguccauaucacuggucaa

SEQ ID NO: 2567275 - RNA, 19 nt, Artificial Sequence
  Description of Artificial Sequence: Synthetic oligonucleotide
agaaagugagucacaaguu

SEQ ID NO: 2567276 - RNA, 19 nt, Artificial Sequence
  Description of Artificial Sequence: Synthetic oligonucleotide
agccguuguacagguggcc

SEQ ID NO: 2567277 - RNA, 19 nt, Artificial Sequence
  Description of Artificial Sequence: Synthetic oligonucleotide
uaaagccguuguacaggug

SEQ ID NO: 2567278 - RNA, 19 nt, Artificial Sequence
  Description of Artificial Sequence: Synthetic oligonucleotide
ugggugauaagggugucuu

SEQ ID NO: 2567279 - RNA, 19 nt, Artificial Sequence
  Description of Artificial Sequence: Synthetic oligonucleotide
aguucaccucuaccacggg

SEQ ID NO: 2567280 - RNA, 19 nt, Artificial Sequence
  Description of Artificial Sequence: Synthetic oligonucleotide
auccacgaggaugauggug

SEQ ID NO: 2567281 - RNA, 19 nt, Artificial Sequence
  Description of Artificial Sequence: Synthetic oligonucleotide
uaguuggugagugcuccca

SEQ ID NO: 2567282 - RNA, 19 nt, Artificial Sequence
  Description of Artificial Sequence: Synthetic oligonucleotide
guaguuggugagugcuccc

SEQ ID NO: 2567283 - RNA, 19 nt, Artificial Sequence
  Description of Artificial Sequence: Synthetic oligonucleotide
agggcgucuccaguagggc

SEQ ID NO: 2567284 - RNA, 19 nt, Artificial Sequence
  Description of Artificial Sequence: Synthetic oligonucleotide
guuggugagugcucccaac

SEQ ID NO: 2567285 - RNA, 19 nt, Artificial Sequence
  Description of Artificial Sequence: Synthetic oligonucleotide
uguggccauggaagauucc

SEQ ID NO: 2567286 - RNA, 19 nt, Artificial Sequence
  Description of Artificial Sequence: Synthetic oligonucleotide
caagcuccguucugugaag

SEQ ID NO: 2567287 - RNA, 19 nt, Artificial Sequence
  Description of Artificial Sequence: Synthetic oligonucleotide
ccuaugcuggcccuugagg

SEQ ID NO: 2567288 - RNA, 19 nt, Artificial Sequence
  Description of Artificial Sequence: Synthetic oligonucleotide
agcugugcuucuucauugu

SEQ ID NO: 2567289 - RNA, 19 nt, Artificial Sequence
  Description of Artificial Sequence: Synthetic oligonucleotide
agcaagcuccguucuguga

SEQ ID NO: 2567290 - RNA, 19 nt, Artificial Sequence
  Description of Artificial Sequence: Synthetic oligonucleotide
acucuguagugugaacuca

SEQ ID NO: 2567291 - RNA, 19 nt, Artificial Sequence
  Description of Artificial Sequence: Synthetic oligonucleotide
uacauacucccggcccugg

SEQ ID NO: 2567292 - RNA, 19 nt, Artificial Sequence
  Description of Artificial Sequence: Synthetic oligonucleotide
ggcauugcuuagcccauag

SEQ ID NO: 2567293 - RNA, 19 nt, Artificial Sequence
  Description of Artificial Sequence: Synthetic oligonucleotide
cucuaccacgggcguaugg

SEQ ID NO: 2567294 - RNA, 19 nt, Artificial Sequence
  Description of Artificial Sequence: Synthetic oligonucleotide
cuugcucagaauugguugu

SEQ ID NO: 2567295 - RNA, 19 nt, Artificial Sequence
  Description of Artificial Sequence: Synthetic oligonucleotide
accacgggcguauggcucu

SEQ ID NO: 2567296 - RNA, 19 nt, Artificial Sequence
  Description of Artificial Sequence: Synthetic oligonucleotide
uccguucugugaaggucac

SEQ ID NO: 2567297 - RNA, 19 nt, Artificial Sequence
  Description of Artificial Sequence: Synthetic oligonucleotide
uggcccucuguagacaccu

SEQ ID NO: 2567298 - RNA, 19 nt, Artificial Sequence
  Description of Artificial Sequence: Synthetic oligonucleotide
cucagaauugguuguacau

SEQ ID NO: 2567299 - RNA, 19 nt, Artificial Sequence
  Description of Artificial Sequence: Synthetic oligonucleotide
cauggaagauuccugccua

SEQ ID NO: 2567300 - RNA, 19 nt, Artificial Sequence
  Description of Artificial Sequence: Synthetic oligonucleotide
gguggcgcagcgcacacac

SEQ ID NO: 2567301 - RNA, 19 nt, Artificial Sequence
  Description of Artificial Sequence: Synthetic oligonucleotide
ggugucaagacaauaggcu

SEQ ID NO: 2567302 - RNA, 19 nt, Artificial Sequence
  Description of Artificial Sequence: Synthetic oligonucleotide
aguguggccauggaagauu

SEQ ID NO: 2567303 - RNA, 19 nt, Artificial Sequence
  Description of Artificial Sequence: Synthetic oligonucleotide
ugcucaggucagcugcuau

SEQ ID NO: 2567304 - RNA, 19 nt, Artificial Sequence
  Description of Artificial Sequence: Synthetic oligonucleotide
uuccagggcgucuccagua

SEQ ID NO: 2567305 - RNA, 19 nt, Artificial Sequence
  Description of Artificial Sequence: Synthetic oligonucleotide
gggcuaacucuguagugug

SEQ ID NO: 2567306 - RNA, 19 nt, Artificial Sequence
  Description of Artificial Sequence: Synthetic oligonucleotide
gugagugcucccaacuuuc

SEQ ID NO: 2567307 - RNA, 19 nt, Artificial Sequence
  Description of Artificial Sequence: Synthetic oligonucleotide
cagguggcccucuguagac

SEQ ID NO: 2567308 - RNA, 19 nt, Artificial Sequence
  Description of Artificial Sequence: Synthetic oligonucleotide
cauagguggcgcagcgcac

SEQ ID NO: 2567309 - RNA, 19 nt, Artificial Sequence
  Description of Artificial Sequence: Synthetic oligonucleotide
agguaguuggugagugcuc

SEQ ID NO: 2567310 - RNA, 19 nt, Artificial Sequence
  Description of Artificial Sequence: Synthetic oligonucleotide
gacaggcuguccauaucac

SEQ ID NO: 2567311 - RNA, 19 nt, Artificial Sequence
  Description of Artificial Sequence: Synthetic oligonucleotide
ugguccuagcgaugcuggc

SEQ ID NO: 2567312 - RNA, 19 nt, Artificial Sequence
  Description of Artificial Sequence: Synthetic oligonucleotide
agcuccguucugugaaggu

SEQ ID NO: 2567313 - RNA, 19 nt, Artificial Sequence
  Description of Artificial Sequence: Synthetic oligonucleotide
cucuugccggggcugcagg

SEQ ID NO: 2567314 - RNA, 19 nt, Artificial Sequence
  Description of Artificial Sequence: Synthetic oligonucleotide
agggagugccucgcucugc

SEQ ID NO: 2567315 - RNA, 19 nt, Artificial Sequence
  Description of Artificial Sequence: Synthetic oligonucleotide
ggugauaagggugucuuua

SEQ ID NO: 2567316 - RNA, 19 nt, Artificial Sequence
  Description of Artificial Sequence: Synthetic oligonucleotide
gcauugcuuagcccauagg

SEQ ID NO: 2567317 - RNA, 19 nt, Artificial Sequence
  Description of Artificial Sequence: Synthetic oligonucleotide
guacagguggcccucugua

SEQ ID NO: 2567318 - RNA, 19 nt, Artificial Sequence
  Description of Artificial Sequence: Synthetic oligonucleotide
gucaagaaagugagucaca

SEQ ID NO: 2567319 - RNA, 19 nt, Artificial Sequence
  Description of Artificial Sequence: Synthetic oligonucleotide
uuuguucagcaagcuccgu

SEQ ID NO: 2567320 - RNA, 19 nt, Artificial Sequence
  Description of Artificial Sequence: Synthetic oligonucleotide
ggugccauagguggcgcag

SEQ ID NO: 2567321 - RNA, 19 nt, Artificial Sequence
  Description of Artificial Sequence: Synthetic oligonucleotide
ugcuggcccuugaggcacg

SEQ ID NO: 2567322 - RNA, 19 nt, Artificial Sequence
  Description of Artificial Sequence: Synthetic oligonucleotide
uagguggcgcagcgcacac

SEQ ID NO: 2567323 - RNA, 19 nt, Artificial Sequence
  Description of Artificial Sequence: Synthetic oligonucleotide
ccaucugcauccacgagga

SEQ ID NO: 2567324 - RNA, 19 nt, Artificial Sequence
  Description of Artificial Sequence: Synthetic oligonucleotide
cagcaagcuccguucugug

SEQ ID NO: 2567325 - RNA, 19 nt, Artificial Sequence
  Description of Artificial Sequence: Synthetic oligonucleotide
caauaggcucaugcucccc

SEQ ID NO: 2567326 - RNA, 19 nt, Artificial Sequence
  Description of Artificial Sequence: Synthetic oligonucleotide
gcucagaauugguuguaca

SEQ ID NO: 2567327 - RNA, 19 nt, Artificial Sequence
  Description of Artificial Sequence: Synthetic oligonucleotide
gcgcagcgcacacacacag

SEQ ID NO: 2567328 - RNA, 19 nt, Artificial Sequence
  Description of Artificial Sequence: Synthetic oligonucleotide
ugccuaugcuggcccuuga

SEQ ID NO: 2567329 - RNA, 19 nt, Artificial Sequence
  Description of Artificial Sequence: Synthetic oligonucleotide
uuguugugcucaggucagc

SEQ ID NO: 2567330 - RNA, 19 nt, Artificial Sequence
  Description of Artificial Sequence: Synthetic oligonucleotide
uccuagcgaugcuggcuga

SEQ ID NO: 2567331 - RNA, 19 nt, Artificial Sequence
  Description of Artificial Sequence: Synthetic oligonucleotide
cauagguuccuggugucaa

SEQ ID NO: 2567332 - RNA, 19 nt, Artificial Sequence
  Description of Artificial Sequence: Synthetic oligonucleotide
ugaguacaucuaggagaug

SEQ ID NO: 2567333 - RNA, 19 nt, Artificial Sequence
  Description of Artificial Sequence: Synthetic oligonucleotide
uugcucagaauugguugua

SEQ ID NO: 2567334 - RNA, 19 nt, Artificial Sequence
  Description of Artificial Sequence: Synthetic oligonucleotide
ccccgguuuccauaguagc

SEQ ID NO: 2567335 - RNA, 19 nt, Artificial Sequence
  Description of Artificial Sequence: Synthetic oligonucleotide
gcguauggcucuugccggg

SEQ ID NO: 2567336 - RNA, 19 nt, Artificial Sequence
  Description of Artificial Sequence: Synthetic oligonucleotide
gucuccaguagggcauugc

SEQ ID NO: 2567337 - RNA, 19 nt, Artificial Sequence
  Description of Artificial Sequence: Synthetic oligonucleotide
cagcgcacacacacagcug

SEQ ID NO: 2567338 - RNA, 19 nt, Artificial Sequence
  Description of Artificial Sequence: Synthetic oligonucleotide
acuggucaagaaagugagu

SEQ ID NO: 2567339 - RNA, 19 nt, Artificial Sequence
  Description of Artificial Sequence: Synthetic oligonucleotide
uggugccauagguggcgca

SEQ ID NO: 2567340 - RNA, 19 nt, Artificial Sequence
  Description of Artificial Sequence: Synthetic oligonucleotide
gcguacuugcucagaauug

SEQ ID NO: 2567341 - RNA, 19 nt, Artificial Sequence
  Description of Artificial Sequence: Synthetic oligonucleotide
guacaucuaggagaugggu

SEQ ID NO: 2567342 - RNA, 19 nt, Artificial Sequence
  Description of Artificial Sequence: Synthetic oligonucleotide
uccugccuaugcuggcccu

SEQ ID NO: 2567343 - RNA, 19 nt, Artificial Sequence
  Description of Artificial Sequence: Synthetic oligonucleotide
gcuaacucuguagugugaa

SEQ ID NO: 2567344 - RNA, 19 nt, Artificial Sequence
  Description of Artificial Sequence: Synthetic oligonucleotide
gcugcguacuugcucagaa

SEQ ID NO: 2567345 - RNA, 19 nt, Artificial Sequence
  Description of Artificial Sequence: Synthetic oligonucleotide
cuuagcccauagguuccug

SEQ ID NO: 2567346 - RNA, 19 nt, Artificial Sequence
  Description of Artificial Sequence: Synthetic oligonucleotide
gccguuguacagguggccc

SEQ ID NO: 2567347 - RNA, 19 nt, Artificial Sequence
  Description of Artificial Sequence: Synthetic oligonucleotide
ggcacggcauccuaguagu

SEQ ID NO: 2567348 - RNA, 19 nt, Artificial Sequence
  Description of Artificial Sequence: Synthetic oligonucleotide
gcuaugagguuaaagccgu

SEQ ID NO: 2567349 - RNA, 19 nt, Artificial Sequence
  Description of Artificial Sequence: Synthetic oligonucleotide
cagguaguuggugagugcu

SEQ ID NO: 2567350 - RNA, 19 nt, Artificial Sequence
  Description of Artificial Sequence: Synthetic oligonucleotide
gccuaugcuggcccuugag

SEQ ID NO: 2567351 - RNA, 19 nt, Artificial Sequence
  Description of Artificial Sequence: Synthetic oligonucleotide
gguguuggucucccaguga

SEQ ID NO: 2567352 - RNA, 19 nt, Artificial Sequence
  Description of Artificial Sequence: Synthetic oligonucleotide
cauagguguuggucuccca

SEQ ID NO: 2567353 - RNA, 19 nt, Artificial Sequence
  Description of Artificial Sequence: Synthetic oligonucleotide
cugccuaugcuggcccuug

SEQ ID NO: 2567354 - RNA, 19 nt, Artificial Sequence
  Description of Artificial Sequence: Synthetic oligonucleotide
cagguaggacaggcugucc

SEQ ID NO: 2567355 - RNA, 19 nt, Artificial Sequence
  Description of Artificial Sequence: Synthetic oligonucleotide
cccgguuuccauaguagca

SEQ ID NO: 2567356 - RNA, 19 nt, Artificial Sequence
  Description of Artificial Sequence: Synthetic oligonucleotide
agucacaaguucaccucua

SEQ ID NO: 2567357 - RNA, 19 nt, Artificial Sequence
  Description of Artificial Sequence: Synthetic oligonucleotide
cuugaggcacggcauccua

SEQ ID NO: 2567358 - RNA, 19 nt, Artificial Sequence
  Description of Artificial Sequence: Synthetic oligonucleotide
gaggcacggcauccuagua

SEQ ID NO: 2567359 - RNA, 19 nt, Artificial Sequence
  Description of Artificial Sequence: Synthetic oligonucleotide
aucuaggagaugggugaua

SEQ ID NO: 2567360 - RNA, 19 nt, Artificial Sequence
  Description of Artificial Sequence: Synthetic oligonucleotide
gcccauagguuccuggugu

SEQ ID NO: 2567361 - RNA, 19 nt, Artificial Sequence
  Description of Artificial Sequence: Synthetic oligonucleotide
ggggcuaacucuguagugu

SEQ ID NO: 2567362 - RNA, 19 nt, Artificial Sequence
  Description of Artificial Sequence: Synthetic oligonucleotide
gacaugcaguguggccaug

SEQ ID NO: 2567363 - RNA, 19 nt, Artificial Sequence
  Description of Artificial Sequence: Synthetic oligonucleotide
gggcgucuccaguagggca

SEQ ID NO: 2567364 - RNA, 19 nt, Artificial Sequence
  Description of Artificial Sequence: Synthetic oligonucleotide
ugccggggcugcagguagu

SEQ ID NO: 2567365 - RNA, 19 nt, Artificial Sequence
  Description of Artificial Sequence: Synthetic oligonucleotide
gcccucuguagacaccuuc

SEQ ID NO: 2567366 - RNA, 19 nt, Artificial Sequence
  Description of Artificial Sequence: Synthetic oligonucleotide
guacuugcucagaauuggu

SEQ ID NO: 2567367 - RNA, 19 nt, Artificial Sequence
  Description of Artificial Sequence: Synthetic oligonucleotide
guaggacaggcuguccaua

SEQ ID NO: 2567368 - RNA, 19 nt, Artificial Sequence
  Description of Artificial Sequence: Synthetic oligonucleotide
ggugagugcucccaacuuu

SEQ ID NO: 2567369 - RNA, 19 nt, Artificial Sequence
  Description of Artificial Sequence: Synthetic oligonucleotide
agguggcccucuguagaca

SEQ ID NO: 2567370 - RNA, 19 nt, Artificial Sequence
  Description of Artificial Sequence: Synthetic oligonucleotide
ccggcccugguccucaaug

SEQ ID NO: 2567371 - RNA, 19 nt, Artificial Sequence
  Description of Artificial Sequence: Synthetic oligonucleotide
ccagggcgucuccaguagg

SEQ ID NO: 2567372 - RNA, 19 nt, Artificial Sequence
  Description of Artificial Sequence: Synthetic oligonucleotide
cucgcucugcuccaccacu

SEQ ID NO: 2567373 - RNA, 19 nt, Artificial Sequence
  Description of Artificial Sequence: Synthetic oligonucleotide
caccacuuccaugaagagu

SEQ ID NO: 2567374 - RNA, 19 nt, Artificial Sequence
  Description of Artificial Sequence: Synthetic oligonucleotide
gcuggaucuggcagcugug

SEQ ID NO: 2567375 - RNA, 19 nt, Artificial Sequence
  Description of Artificial Sequence: Synthetic oligonucleotide
guggcccucuguagacacc

SEQ ID NO: 2567376 - RNA, 19 nt, Artificial Sequence
  Description of Artificial Sequence: Synthetic oligonucleotide
cccauagguuccugguguc

SEQ ID NO: 2567377 - RNA, 19 nt, Artificial Sequence
  Description of Artificial Sequence: Synthetic oligonucleotide
gguaggacaggcuguccau

SEQ ID NO: 2567378 - RNA, 19 nt, Artificial Sequence
  Description of Artificial Sequence: Synthetic oligonucleotide
cuuuagggagugccucgcu

SEQ ID NO: 2567379 - RNA, 19 nt, Artificial Sequence
  Description of Artificial Sequence: Synthetic oligonucleotide
cggcccugguccucaaugg

SEQ ID NO: 2567380 - RNA, 19 nt, Artificial Sequence
  Description of Artificial Sequence: Synthetic oligonucleotide
cugguccucaauggcugga

SEQ ID NO: 2567381 - RNA, 19 nt, Artificial Sequence
  Description of Artificial Sequence: Synthetic oligonucleotide
ccauggaagauuccugccu

SEQ ID NO: 2567382 - RNA, 19 nt, Artificial Sequence
  Description of Artificial Sequence: Synthetic oligonucleotide
ggaucuggcagcugugcuu

SEQ ID NO: 2567383 - RNA, 19 nt, Artificial Sequence
  Description of Artificial Sequence: Synthetic oligonucleotide
ggcuaacucuguaguguga

SEQ ID NO: 2567384 - RNA, 19 nt, Artificial Sequence
  Description of Artificial Sequence: Synthetic oligonucleotide
gguguugguucuggugcca

SEQ ID NO: 2567385 - RNA, 19 nt, Artificial Sequence
  Description of Artificial Sequence: Synthetic oligonucleotide
ccauaucacuggucaagaa

SEQ ID NO: 2567386 - RNA, 19 nt, Artificial Sequence
  Description of Artificial Sequence: Synthetic oligonucleotide
ccuagcgaugcuggcugag

SEQ ID NO: 2567387 - RNA, 19 nt, Artificial Sequence
  Description of Artificial Sequence: Synthetic oligonucleotide
gcagcugugcuucuucauu

SEQ ID NO: 2567388 - RNA, 19 nt, Artificial Sequence
  Description of Artificial Sequence: Synthetic oligonucleotide
cggcauccuaguagugggg

SEQ ID NO: 2567389 - RNA, 19 nt, Artificial Sequence
  Description of Artificial Sequence: Synthetic oligonucleotide
gcccuugaggcacggcauc

SEQ ID NO: 2567390 - RNA, 19 nt, Artificial Sequence
  Description of Artificial Sequence: Synthetic oligonucleotide
gguccuagcgaugcuggcu

SEQ ID NO: 2567391 - RNA, 19 nt, Artificial Sequence
  Description of Artificial Sequence: Synthetic oligonucleotide
cuagcgaugcuggcugagu

SEQ ID NO: 2567392 - RNA, 19 nt, Artificial Sequence
  Description of Artificial Sequence: Synthetic oligonucleotide
cuggcccuugaggcacggc

SEQ ID NO: 2567393 - RNA, 19 nt, Artificial Sequence
  Description of Artificial Sequence: Synthetic oligonucleotide
cugcguacuugcucagaau

SEQ ID NO: 2567394 - RNA, 19 nt, Artificial Sequence
  Description of Artificial Sequence: Synthetic oligonucleotide
gccauagguggcgcagcgc

SEQ ID NO: 2567395 - RNA, 19 nt, Artificial Sequence
  Description of Artificial Sequence: Synthetic oligonucleotide
cuugccggggcugcaggua

SEQ ID NO: 2567396 - RNA, 19 nt, Artificial Sequence
  Description of Artificial Sequence: Synthetic oligonucleotide
cguauggcucuugccgggg

SEQ ID NO: 2567397 - RNA, 19 nt, Artificial Sequence
  Description of Artificial Sequence: Synthetic oligonucleotide
cgggcguauggcucuugcc

SEQ ID NO: 2567398 - RNA, 19 nt, Artificial Sequence
  Description of Artificial Sequence: Synthetic oligonucleotide
ccucgcucugcuccaccac

SEQ ID NO: 2567399 - RNA, 19 nt, Artificial Sequence
  Description of Artificial Sequence: Synthetic oligonucleotide
gugugaacucauagguguu

SEQ ID NO: 2567400 - RNA, 19 nt, Artificial Sequence
  Description of Artificial Sequence: Synthetic oligonucleotide
agguggcgcagcgcacaca

SEQ ID NO: 2567401 - RNA, 19 nt, Artificial Sequence
  Description of Artificial Sequence: Synthetic oligonucleotide
cguucugugaaggucacau

SEQ ID NO: 2567402 - RNA, 19 nt, Artificial Sequence
  Description of Artificial Sequence: Synthetic oligonucleotide
caucuaggagaugggugau

SEQ ID NO: 2567403 - RNA, 19 nt, Artificial Sequence
  Description of Artificial Sequence: Synthetic oligonucleotide
cuaugagguuaaagccguu

SEQ ID NO: 2567404 - RNA, 19 nt, Artificial Sequence
  Description of Artificial Sequence: Synthetic oligonucleotide
ccauagguuccugguguca

SEQ ID NO: 2567405 - RNA, 19 nt, Artificial Sequence
  Description of Artificial Sequence: Synthetic oligonucleotide
ggcgucuccaguagggcau

SEQ ID NO: 2567406 - RNA, 19 nt, Artificial Sequence
  Description of Artificial Sequence: Synthetic oligonucleotide
cacgggcguauggcucuug

SEQ ID NO: 2567407 - RNA, 19 nt, Artificial Sequence
  Description of Artificial Sequence: Synthetic oligonucleotide
gggugucuuuagggagugc

SEQ ID NO: 2567408 - RNA, 19 nt, Artificial Sequence
  Description of Artificial Sequence: Synthetic oligonucleotide
ggucucccagugagaggug

SEQ ID NO: 2567409 - RNA, 19 nt, Artificial Sequence
  Description of Artificial Sequence: Synthetic oligonucleotide
gcacggcauccuaguagug

SEQ ID NO: 2567410 - RNA, 19 nt, Artificial Sequence
  Description of Artificial Sequence: Synthetic oligonucleotide
ggcgcagcgcacacacaca

SEQ ID NO: 2567411 - RNA, 19 nt, Artificial Sequence
  Description of Artificial Sequence: Synthetic oligonucleotide
gcgaugcuggcugagucau

SEQ ID NO: 2567412 - RNA, 19 nt, Artificial Sequence
  Description of Artificial Sequence: Synthetic oligonucleotide
gugcucaggucagcugcua

SEQ ID NO: 2567413 - RNA, 19 nt, Artificial Sequence
  Description of Artificial Sequence: Synthetic oligonucleotide
ucccggcccugguccucaa

SEQ ID NO: 2567414 - RNA, 19 nt, Artificial Sequence
  Description of Artificial Sequence: Synthetic oligonucleotide
gggugauaagggugucuuu

SEQ ID NO: 2567415 - RNA, 19 nt, Artificial Sequence
  Description of Artificial Sequence: Synthetic oligonucleotide
ccguuguacagguggcccu

SEQ ID NO: 2567416 - RNA, 19 nt, Artificial Sequence
  Description of Artificial Sequence: Synthetic oligonucleotide
cacacacagcugcguacuu

SEQ ID NO: 2567417 - RNA, 19 nt, Artificial Sequence
  Description of Artificial Sequence: Synthetic oligonucleotide
caccucuaccacgggcgua

SEQ ID NO: 2567418 - RNA, 19 nt, Artificial Sequence
  Description of Artificial Sequence: Synthetic oligonucleotide
gcuuagcccauagguuccu

SEQ ID NO: 2567419 - RNA, 19 nt, Artificial Sequence
  Description of Artificial Sequence: Synthetic oligonucleotide
ggucagcugcuaugagguu

SEQ ID NO: 2567420 - RNA, 19 nt, Artificial Sequence
  Description of Artificial Sequence: Synthetic oligonucleotide
cccagugagaggugucuuu

SEQ ID NO: 2567421 - RNA, 19 nt, Artificial Sequence
  Description of Artificial Sequence: Synthetic oligonucleotide
cagcugcuaugagguuaaa

SEQ ID NO: 2567422 - RNA, 19 nt, Artificial Sequence
  Description of Artificial Sequence: Synthetic oligonucleotide
ccuugaggcacggcauccu

SEQ ID NO: 2567423 - RNA, 19 nt, Artificial Sequence
  Description of Artificial Sequence: Synthetic oligonucleotide
ccguucugugaaggucaca

SEQ ID NO: 2567424 - RNA, 19 nt, Artificial Sequence
  Description of Artificial Sequence: Synthetic oligonucleotide
ccacgaggaugaugguguu

SEQ ID NO: 2567425 - RNA, 19 nt, Artificial Sequence
  Description of Artificial Sequence: Synthetic oligonucleotide
gccggggcugcagguaguu

SEQ ID NO: 2567426 - RNA, 19 nt, Artificial Sequence
  Description of Artificial Sequence: Synthetic oligonucleotide
gcgucuccaguagggcauu

SEQ ID NO: 2567427 - RNA, 19 nt, Artificial Sequence
  Description of Artificial Sequence: Synthetic oligonucleotide
ccugccuaugcuggcccuu

SEQ ID NO: 2567428 - RNA, 19 nt, Artificial Sequence
  Description of Artificial Sequence: Synthetic oligonucleotide
ggcccucuguagacaccuu

SEQ ID NO: 2567429 - RNA, 19 nt, Artificial Sequence
  Description of Artificial Sequence: Synthetic oligonucleotide
cccggcccugguccucaau

SEQ ID NO: 2567430 - RNA, 19 nt, Artificial Sequence
  Description of Artificial Sequence: Synthetic oligonucleotide
ccacgggcguauggcucuu

SEQ ID NO: 2567431 - RNA, 19 nt, Artificial Sequence
  Description of Artificial Sequence: Synthetic oligonucleotide
uuuaauuuuagagugaucc

SEQ ID NO: 2567432 - RNA, 19 nt, Artificial Sequence
  Description of Artificial Sequence: Synthetic oligonucleotide
uucuauuuuacuaaucugg

SEQ ID NO: 2567433 - RNA, 19 nt, Artificial Sequence
  Description of Artificial Sequence: Synthetic oligonucleotide
uucaagaaggcucugagcc

SEQ ID NO: 2567434 - RNA, 19 nt, Artificial Sequence
  Description of Artificial Sequence: Synthetic oligonucleotide
uucuuucaauucaagaagg

SEQ ID NO: 2567435 - RNA, 19 nt, Artificial Sequence
  Description of Artificial Sequence: Synthetic oligonucleotide
uuuacuaaucuggugauag

SEQ ID NO: 2567436 - RNA, 19 nt, Artificial Sequence
  Description of Artificial Sequence: Synthetic oligonucleotide
gaugcuguagcucauugcc

SEQ ID NO: 2567437 - RNA, 19 nt, Artificial Sequence
  Description of Artificial Sequence: Synthetic oligonucleotide
aagaggucaaggcucuggc

SEQ ID NO: 2567438 - RNA, 19 nt, Artificial Sequence
  Description of Artificial Sequence: Synthetic oligonucleotide
uucaauucaagaaggcucu

SEQ ID NO: 2567439 - RNA, 19 nt, Artificial Sequence
  Description of Artificial Sequence: Synthetic oligonucleotide
auagaggugugccacguac

SEQ ID NO: 2567440 - RNA, 19 nt, Artificial Sequence
  Description of Artificial Sequence: Synthetic oligonucleotide
uuaauuuuagagugauccc

SEQ ID NO: 2567441 - RNA, 19 nt, Artificial Sequence
  Description of Artificial Sequence: Synthetic oligonucleotide
aagguaagaggucaaggcu

SEQ ID NO: 2567442 - RNA, 19 nt, Artificial Sequence
  Description of Artificial Sequence: Synthetic oligonucleotide
ugaugaacuucugugagag

SEQ ID NO: 2567443 - RNA, 19 nt, Artificial Sequence
  Description of Artificial Sequence: Synthetic oligonucleotide
aaucuggugauagaggugu

SEQ ID NO: 2567444 - RNA, 19 nt, Artificial Sequence
  Description of Artificial Sequence: Synthetic oligonucleotide
agcugcuacaaccuccucc

SEQ ID NO: 2567445 - RNA, 19 nt, Artificial Sequence
  Description of Artificial Sequence: Synthetic oligonucleotide
uguccaaguggauaggcag

SEQ ID NO: 2567446 - RNA, 19 nt, Artificial Sequence
  Description of Artificial Sequence: Synthetic oligonucleotide
caagguaagaggucaaggc

SEQ ID NO: 2567447 - RNA, 19 nt, Artificial Sequence
  Description of Artificial Sequence: Synthetic oligonucleotide
aaggcucugagccgcuucc

SEQ ID NO: 2567448 - RNA, 19 nt, Artificial Sequence
  Description of Artificial Sequence: Synthetic oligonucleotide
uacuaaucuggugauagag

SEQ ID NO: 2567449 - RNA, 19 nt, Artificial Sequence
  Description of Artificial Sequence: Synthetic oligonucleotide
ucugugcaagguaagaggu

SEQ ID NO: 2567450 - RNA, 19 nt, Artificial Sequence
  Description of Artificial Sequence: Synthetic oligonucleotide
aaucccauucuauuuuacu

SEQ ID NO: 2567451 - RNA, 19 nt, Artificial Sequence
  Description of Artificial Sequence: Synthetic oligonucleotide
auucuauuuuacuaaucug

SEQ ID NO: 2567452 - RNA, 19 nt, Artificial Sequence
  Description of Artificial Sequence: Synthetic oligonucleotide
cauucuuucaauucaagaa

SEQ ID NO: 2567453 - RNA, 19 nt, Artificial Sequence
  Description of Artificial Sequence: Synthetic oligonucleotide
uggagauccgccuccaucc

SEQ ID NO: 2567454 - RNA, 19 nt, Artificial Sequence
  Description of Artificial Sequence: Synthetic oligonucleotide
cacaguggggccauggugg

SEQ ID NO: 2567455 - RNA, 19 nt, Artificial Sequence
  Description of Artificial Sequence: Synthetic oligonucleotide
agaugcuguagcucauugc

SEQ ID NO: 2567456 - RNA, 19 nt, Artificial Sequence
  Description of Artificial Sequence: Synthetic oligonucleotide
ucaagaaggcucugagccg

SEQ ID NO: 2567457 - RNA, 19 nt, Artificial Sequence
  Description of Artificial Sequence: Synthetic oligonucleotide
aggugugccacguacacug

SEQ ID NO: 2567458 - RNA, 19 nt, Artificial Sequence
  Description of Artificial Sequence: Synthetic oligonucleotide
augaacuucugugagagcu

SEQ ID NO: 2567459 - RNA, 19 nt, Artificial Sequence
  Description of Artificial Sequence: Synthetic oligonucleotide
ucgcugaugaacuucugug

SEQ ID NO: 2567460 - RNA, 19 nt, Artificial Sequence
  Description of Artificial Sequence: Synthetic oligonucleotide
uucauaaucccauucuauu

SEQ ID NO: 2567461 - RNA, 19 nt, Artificial Sequence
  Description of Artificial Sequence: Synthetic oligonucleotide
agaggugugccacguacac

SEQ ID NO: 2567462 - RNA, 19 nt, Artificial Sequence
  Description of Artificial Sequence: Synthetic oligonucleotide
uuccagaugcuguagcuca

SEQ ID NO: 2567463 - RNA, 19 nt, Artificial Sequence
  Description of Artificial Sequence: Synthetic oligonucleotide
uacacugcagaggggaugg

SEQ ID NO: 2567464 - RNA, 19 nt, Artificial Sequence
  Description of Artificial Sequence: Synthetic oligonucleotide
uaggcagggccacaguggg

SEQ ID NO: 2567465 - RNA, 19 nt, Artificial Sequence
  Description of Artificial Sequence: Synthetic oligonucleotide
caaguggauaggcagggcc

SEQ ID NO: 2567466 - RNA, 19 nt, Artificial Sequence
  Description of Artificial Sequence: Synthetic oligonucleotide
cagacaggcauuuuccuug

SEQ ID NO: 2567467 - RNA, 19 nt, Artificial Sequence
  Description of Artificial Sequence: Synthetic oligonucleotide
ucccauucuauuuuacuaa

SEQ ID NO: 2567468 - RNA, 19 nt, Artificial Sequence
  Description of Artificial Sequence: Synthetic oligonucleotide
acuaaucuggugauagagg

SEQ ID NO: 2567469 - RNA, 19 nt, Artificial Sequence
  Description of Artificial Sequence: Synthetic oligonucleotide
cauauccccaguucugugc

SEQ ID NO: 2567470 - RNA, 19 nt, Artificial Sequence
  Description of Artificial Sequence: Synthetic oligonucleotide
agacaggcauuuuccuugc

SEQ ID NO: 2567471 - RNA, 19 nt, Artificial Sequence
  Description of Artificial Sequence: Synthetic oligonucleotide
caugcauucuuucaauuca

SEQ ID NO: 2567472 - RNA, 19 nt, Artificial Sequence
  Description of Artificial Sequence: Synthetic oligonucleotide
uccaaguggauaggcaggg

SEQ ID NO: 2567473 - RNA, 19 nt, Artificial Sequence
  Description of Artificial Sequence: Synthetic oligonucleotide
cuggcuaccacgcaguguc

SEQ ID NO: 2567474 - RNA, 19 nt, Artificial Sequence
  Description of Artificial Sequence: Synthetic oligonucleotide
agguaagaggucaaggcuc

SEQ ID NO: 2567475 - RNA, 19 nt, Artificial Sequence
  Description of Artificial Sequence: Synthetic oligonucleotide
uggcucgcauucauaaucc

SEQ ID NO: 2567476 - RNA, 19 nt, Artificial Sequence
  Description of Artificial Sequence: Synthetic oligonucleotide
uccaccaucugcucguggc

SEQ ID NO: 2567477 - RNA, 19 nt, Artificial Sequence
  Description of Artificial Sequence: Synthetic oligonucleotide
uuuuaauuuuagagugauc

SEQ ID NO: 2567478 - RNA, 19 nt, Artificial Sequence
  Description of Artificial Sequence: Synthetic oligonucleotide
ugugcgcuguccaagugga

SEQ ID NO: 2567479 - RNA, 19 nt, Artificial Sequence
  Description of Artificial Sequence: Synthetic oligonucleotide
uucucgacgugguuggccc

SEQ ID NO: 2567480 - RNA, 19 nt, Artificial Sequence
  Description of Artificial Sequence: Synthetic oligonucleotide
uucugugagagcugugcgc

SEQ ID NO: 2567481 - RNA, 19 nt, Artificial Sequence
  Description of Artificial Sequence: Synthetic oligonucleotide
cauucuauuuuacuaaucu

SEQ ID NO: 2567482 - RNA, 19 nt, Artificial Sequence
  Description of Artificial Sequence: Synthetic oligonucleotide
acaggcauuuuccuugcug

SEQ ID NO: 2567483 - RNA, 19 nt, Artificial Sequence
  Description of Artificial Sequence: Synthetic oligonucleotide
aggucaaggcucuggcuac

SEQ ID NO: 2567484 - RNA, 19 nt, Artificial Sequence
  Description of Artificial Sequence: Synthetic oligonucleotide
uggagcucgacuuccagau

SEQ ID NO: 2567485 - RNA, 19 nt, Artificial Sequence
  Description of Artificial Sequence: Synthetic oligonucleotide
aucccauucuauuuuacua

SEQ ID NO: 2567486 - RNA, 19 nt, Artificial Sequence
  Description of Artificial Sequence: Synthetic oligonucleotide
cuucugugagagcugugcg

SEQ ID NO: 2567487 - RNA, 19 nt, Artificial Sequence
  Description of Artificial Sequence: Synthetic oligonucleotide
ucuguggucagcugacaga

SEQ ID NO: 2567488 - RNA, 19 nt, Artificial Sequence
  Description of Artificial Sequence: Synthetic oligonucleotide
uagucgcugaugaacuucu

SEQ ID NO: 2567489 - RNA, 19 nt, Artificial Sequence
  Description of Artificial Sequence: Synthetic oligonucleotide
gagguagucgcugaugaac

SEQ ID NO: 2567490 - RNA, 19 nt, Artificial Sequence
  Description of Artificial Sequence: Synthetic oligonucleotide
agauccgccuccauccucc

SEQ ID NO: 2567491 - RNA, 19 nt, Artificial Sequence
  Description of Artificial Sequence: Synthetic oligonucleotide
aggcuccagagguagucgc

SEQ ID NO: 2567492 - RNA, 19 nt, Artificial Sequence
  Description of Artificial Sequence: Synthetic oligonucleotide
ugcuguagcucauugccuc

SEQ ID NO: 2567493 - RNA, 19 nt, Artificial Sequence
  Description of Artificial Sequence: Synthetic oligonucleotide
cuaaucuggugauagaggu

SEQ ID NO: 2567494 - RNA, 19 nt, Artificial Sequence
  Description of Artificial Sequence: Synthetic oligonucleotide
cuggcucgcauucauaauc

SEQ ID NO: 2567495 - RNA, 19 nt, Artificial Sequence
  Description of Artificial Sequence: Synthetic oligonucleotide
uuacuaaucuggugauaga

SEQ ID NO: 2567496 - RNA, 19 nt, Artificial Sequence
  Description of Artificial Sequence: Synthetic oligonucleotide
ugcugcuuucucgacgugg

SEQ ID NO: 2567497 - RNA, 19 nt, Artificial Sequence
  Description of Artificial Sequence: Synthetic oligonucleotide
guucugugcaagguaagag

SEQ ID NO: 2567498 - RNA, 19 nt, Artificial Sequence
  Description of Artificial Sequence: Synthetic oligonucleotide
cacgcaguguccaccaggc

SEQ ID NO: 2567499 - RNA, 19 nt, Artificial Sequence
  Description of Artificial Sequence: Synthetic oligonucleotide
auauccccaguucugugca

SEQ ID NO: 2567500 - RNA, 19 nt, Artificial Sequence
  Description of Artificial Sequence: Synthetic oligonucleotide
caagaaggcucugagccgc

SEQ ID NO: 2567501 - RNA, 19 nt, Artificial Sequence
  Description of Artificial Sequence: Synthetic oligonucleotide
cuguggucagcugacagag

SEQ ID NO: 2567502 - RNA, 19 nt, Artificial Sequence
  Description of Artificial Sequence: Synthetic oligonucleotide
gacuuccagaugcuguagc

SEQ ID NO: 2567503 - RNA, 19 nt, Artificial Sequence
  Description of Artificial Sequence: Synthetic oligonucleotide
accaucugcucguggcgcc

SEQ ID NO: 2567504 - RNA, 19 nt, Artificial Sequence
  Description of Artificial Sequence: Synthetic oligonucleotide
cugugcgcuguccaagugg

SEQ ID NO: 2567505 - RNA, 19 nt, Artificial Sequence
  Description of Artificial Sequence: Synthetic oligonucleotide
cuugaucgucccuggcucg

SEQ ID NO: 2567506 - RNA, 19 nt, Artificial Sequence
  Description of Artificial Sequence: Synthetic oligonucleotide
uguugcuggagauccgccu

SEQ ID NO: 2567507 - RNA, 19 nt, Artificial Sequence
  Description of Artificial Sequence: Synthetic oligonucleotide
auaggcagggccacagugg

SEQ ID NO: 2567508 - RNA, 19 nt, Artificial Sequence
  Description of Artificial Sequence: Synthetic oligonucleotide
auaaucccauucuauuuua

SEQ ID NO: 2567509 - RNA, 19 nt, Artificial Sequence
  Description of Artificial Sequence: Synthetic oligonucleotide
gcuuucucgacgugguugg

SEQ ID NO: 2567510 - RNA, 19 nt, Artificial Sequence
  Description of Artificial Sequence: Synthetic oligonucleotide
ugcuacaaccuccuccauc

SEQ ID NO: 2567511 - RNA, 19 nt, Artificial Sequence
  Description of Artificial Sequence: Synthetic oligonucleotide
uagaggugugccacguaca

SEQ ID NO: 2567512 - RNA, 19 nt, Artificial Sequence
  Description of Artificial Sequence: Synthetic oligonucleotide
aaguggauaggcagggcca

SEQ ID NO: 2567513 - RNA, 19 nt, Artificial Sequence
  Description of Artificial Sequence: Synthetic oligonucleotide
aguggauaggcagggccac

SEQ ID NO: 2567514 - RNA, 19 nt, Artificial Sequence
  Description of Artificial Sequence: Synthetic oligonucleotide
ugcaagguaagaggucaag

SEQ ID NO: 2567515 - RNA, 19 nt, Artificial Sequence
  Description of Artificial Sequence: Synthetic oligonucleotide
gugauagaggugugccacg

SEQ ID NO: 2567516 - RNA, 19 nt, Artificial Sequence
  Description of Artificial Sequence: Synthetic oligonucleotide
gaggucaaggcucuggcua

SEQ ID NO: 2567517 - RNA, 19 nt, Artificial Sequence
  Description of Artificial Sequence: Synthetic oligonucleotide
uguggucagcugacagagg

SEQ ID NO: 2567518 - RNA, 19 nt, Artificial Sequence
  Description of Artificial Sequence: Synthetic oligonucleotide
ccacguacacugcagaggg

SEQ ID NO: 2567519 - RNA, 19 nt, Artificial Sequence
  Description of Artificial Sequence: Synthetic oligonucleotide
ugcagacaggcauuuuccu

SEQ ID NO: 2567520 - RNA, 19 nt, Artificial Sequence
  Description of Artificial Sequence: Synthetic oligonucleotide
agcaaggcucagcagccag

SEQ ID NO: 2567521 - RNA, 19 nt, Artificial Sequence
  Description of Artificial Sequence: Synthetic oligonucleotide
auucauaaucccauucuau

SEQ ID NO: 2567522 - RNA, 19 nt, Artificial Sequence
  Description of Artificial Sequence: Synthetic oligonucleotide
caucucacggaaagccgcc

SEQ ID NO: 2567523 - RNA, 19 nt, Artificial Sequence
  Description of Artificial Sequence: Synthetic oligonucleotide
cucuguggucagcugacag

SEQ ID NO: 2567524 - RNA, 19 nt, Artificial Sequence
  Description of Artificial Sequence: Synthetic oligonucleotide
ucgacuuccagaugcugua

SEQ ID NO: 2567525 - RNA, 19 nt, Artificial Sequence
  Description of Artificial Sequence: Synthetic oligonucleotide
uuucucgacgugguuggcc

SEQ ID NO: 2567526 - RNA, 19 nt, Artificial Sequence
  Description of Artificial Sequence: Synthetic oligonucleotide
uggugauagaggugugcca

SEQ ID NO: 2567527 - RNA, 19 nt, Artificial Sequence
  Description of Artificial Sequence: Synthetic oligonucleotide
uggaugcccuugaucgucc

SEQ ID NO: 2567528 - RNA, 19 nt, Artificial Sequence
  Description of Artificial Sequence: Synthetic oligonucleotide
ucagcugacagaggcuggc

SEQ ID NO: 2567529 - RNA, 19 nt, Artificial Sequence
  Description of Artificial Sequence: Synthetic oligonucleotide
guccaaguggauaggcagg

SEQ ID NO: 2567530 - RNA, 19 nt, Artificial Sequence
  Description of Artificial Sequence: Synthetic oligonucleotide
acguacacugcagagggga

SEQ ID NO: 2567531 - RNA, 19 nt, Artificial Sequence
  Description of Artificial Sequence: Synthetic oligonucleotide
gcaagguaagaggucaagg

SEQ ID NO: 2567532 - RNA, 19 nt, Artificial Sequence
  Description of Artificial Sequence: Synthetic oligonucleotide
ucucuccuguugcuggaga

SEQ ID NO: 2567533 - RNA, 19 nt, Artificial Sequence
  Description of Artificial Sequence: Synthetic oligonucleotide
ugauagaggugugccacgu

SEQ ID NO: 2567534 - RNA, 19 nt, Artificial Sequence
  Description of Artificial Sequence: Synthetic oligonucleotide
cagagguagucgcugauga

SEQ ID NO: 2567535 - RNA, 19 nt, Artificial Sequence
  Description of Artificial Sequence: Synthetic oligonucleotide
aguggggccaugguggaug

SEQ ID NO: 2567536 - RNA, 19 nt, Artificial Sequence
  Description of Artificial Sequence: Synthetic oligonucleotide
ugcucguggcgcccgagca

SEQ ID NO: 2567537 - RNA, 19 nt, Artificial Sequence
  Description of Artificial Sequence: Synthetic oligonucleotide
ggugauagaggugugccac

SEQ ID NO: 2567538 - RNA, 19 nt, Artificial Sequence
  Description of Artificial Sequence: Synthetic oligonucleotide
ugcccuugaucgucccugg

SEQ ID NO: 2567539 - RNA, 19 nt, Artificial Sequence
  Description of Artificial Sequence: Synthetic oligonucleotide
gaagccgcuggucggcgcc

SEQ ID NO: 2567540 - RNA, 19 nt, Artificial Sequence
  Description of Artificial Sequence: Synthetic oligonucleotide
gcugcuacaaccuccucca

SEQ ID NO: 2567541 - RNA, 19 nt, Artificial Sequence
  Description of Artificial Sequence: Synthetic oligonucleotide
cauucauaaucccauucua

SEQ ID NO: 2567542 - RNA, 19 nt, Artificial Sequence
  Description of Artificial Sequence: Synthetic oligonucleotide
uaccacgcaguguccacca

SEQ ID NO: 2567543 - RNA, 19 nt, Artificial Sequence
  Description of Artificial Sequence: Synthetic oligonucleotide
agaggucaaggcucuggcu

SEQ ID NO: 2567544 - RNA, 19 nt, Artificial Sequence
  Description of Artificial Sequence: Synthetic oligonucleotide
ucccgaagccgcuggucgg

SEQ ID NO: 2567545 - RNA, 19 nt, Artificial Sequence
  Description of Artificial Sequence: Synthetic oligonucleotide
uuuuacuaaucuggugaua

SEQ ID NO: 2567546 - RNA, 19 nt, Artificial Sequence
  Description of Artificial Sequence: Synthetic oligonucleotide
agguagucgcugaugaacu

SEQ ID NO: 2567547 - RNA, 19 nt, Artificial Sequence
  Description of Artificial Sequence: Synthetic oligonucleotide
cuggagauccgccuccauc

SEQ ID NO: 2567548 - RNA, 19 nt, Artificial Sequence
  Description of Artificial Sequence: Synthetic oligonucleotide
caguucugugcaagguaag

SEQ ID NO: 2567549 - RNA, 19 nt, Artificial Sequence
  Description of Artificial Sequence: Synthetic oligonucleotide
cugaugaacuucugugaga

SEQ ID NO: 2567550 - RNA, 19 nt, Artificial Sequence
  Description of Artificial Sequence: Synthetic oligonucleotide
uggugguguccucauccac

SEQ ID NO: 2567551 - RNA, 19 nt, Artificial Sequence
  Description of Artificial Sequence: Synthetic oligonucleotide
ucaaggcucuggcuaccac

SEQ ID NO: 2567552 - RNA, 19 nt, Artificial Sequence
  Description of Artificial Sequence: Synthetic oligonucleotide
gcuacaaccuccuccaucu

SEQ ID NO: 2567553 - RNA, 19 nt, Artificial Sequence
  Description of Artificial Sequence: Synthetic oligonucleotide
gagagcugugcgcugucca

SEQ ID NO: 2567554 - RNA, 19 nt, Artificial Sequence
  Description of Artificial Sequence: Synthetic oligonucleotide
ccaucucacggaaagccgc

SEQ ID NO: 2567555 - RNA, 19 nt, Artificial Sequence
  Description of Artificial Sequence: Synthetic oligonucleotide
auggugguguccucaucca

SEQ ID NO: 2567556 - RNA, 19 nt, Artificial Sequence
  Description of Artificial Sequence: Synthetic oligonucleotide
ugcgcuguccaaguggaua

SEQ ID NO: 2567557 - RNA, 19 nt, Artificial Sequence
  Description of Artificial Sequence: Synthetic oligonucleotide
aggcgcaugcauucuuuca

SEQ ID NO: 2567558 - RNA, 19 nt, Artificial Sequence
  Description of Artificial Sequence: Synthetic oligonucleotide
ucucacggaaagccgccau

SEQ ID NO: 2567559 - RNA, 19 nt, Artificial Sequence
  Description of Artificial Sequence: Synthetic oligonucleotide
gaaggcucugagccgcuuc

SEQ ID NO: 2567560 - RNA, 19 nt, Artificial Sequence
  Description of Artificial Sequence: Synthetic oligonucleotide
guagucgcugaugaacuuc

SEQ ID NO: 2567561 - RNA, 19 nt, Artificial Sequence
  Description of Artificial Sequence: Synthetic oligonucleotide
cauaaucccauucuauuuu

SEQ ID NO: 2567562 - RNA, 19 nt, Artificial Sequence
  Description of Artificial Sequence: Synthetic oligonucleotide
ugagccgcuuccuccucca

SEQ ID NO: 2567563 - RNA, 19 nt, Artificial Sequence
  Description of Artificial Sequence: Synthetic oligonucleotide
gcgcuguccaaguggauag

SEQ ID NO: 2567564 - RNA, 19 nt, Artificial Sequence
  Description of Artificial Sequence: Synthetic oligonucleotide
cucgcauucauaaucccau

SEQ ID NO: 2567565 - RNA, 19 nt, Artificial Sequence
  Description of Artificial Sequence: Synthetic oligonucleotide
cucccaggcgcaugcauuc

SEQ ID NO: 2567566 - RNA, 19 nt, Artificial Sequence
  Description of Artificial Sequence: Synthetic oligonucleotide
agcugugcgcuguccaagu

SEQ ID NO: 2567567 - RNA, 19 nt, Artificial Sequence
  Description of Artificial Sequence: Synthetic oligonucleotide
ggcucuggcuaccacgcag

SEQ ID NO: 2567568 - RNA, 19 nt, Artificial Sequence
  Description of Artificial Sequence: Synthetic oligonucleotide
uugaucgucccuggcucgc

SEQ ID NO: 2567569 - RNA, 19 nt, Artificial Sequence
  Description of Artificial Sequence: Synthetic oligonucleotide
guacacugcagaggggaug

SEQ ID NO: 2567570 - RNA, 19 nt, Artificial Sequence
  Description of Artificial Sequence: Synthetic oligonucleotide
cuaccacgcaguguccacc

SEQ ID NO: 2567571 - RNA, 19 nt, Artificial Sequence
  Description of Artificial Sequence: Synthetic oligonucleotide
caaccuccuccaucucacg

SEQ ID NO: 2567572 - RNA, 19 nt, Artificial Sequence
  Description of Artificial Sequence: Synthetic oligonucleotide
ggcauuuuccuugcuggcc

SEQ ID NO: 2567573 - RNA, 19 nt, Artificial Sequence
  Description of Artificial Sequence: Synthetic oligonucleotide
ugagagcugugcgcugucc

SEQ ID NO: 2567574 - RNA, 19 nt, Artificial Sequence
  Description of Artificial Sequence: Synthetic oligonucleotide
cacguacacugcagagggg

SEQ ID NO: 2567575 - RNA, 19 nt, Artificial Sequence
  Description of Artificial Sequence: Synthetic oligonucleotide
uccauccucccugagccuc

SEQ ID NO: 2567576 - RNA, 19 nt, Artificial Sequence
  Description of Artificial Sequence: Synthetic oligonucleotide
agagguagucgcugaugaa

SEQ ID NO: 2567577 - RNA, 19 nt, Artificial Sequence
  Description of Artificial Sequence: Synthetic oligonucleotide
ucauugccucccaggcgca

SEQ ID NO: 2567578 - RNA, 19 nt, Artificial Sequence
  Description of Artificial Sequence: Synthetic oligonucleotide
caauucaagaaggcucuga

SEQ ID NO: 2567579 - RNA, 19 nt, Artificial Sequence
  Description of Artificial Sequence: Synthetic oligonucleotide
cuguagcucauugccuccc

SEQ ID NO: 2567580 - RNA, 19 nt, Artificial Sequence
  Description of Artificial Sequence: Synthetic oligonucleotide
ucuggcuaccacgcagugu

SEQ ID NO: 2567581 - RNA, 19 nt, Artificial Sequence
  Description of Artificial Sequence: Synthetic oligonucleotide
caggcuccagagguagucg

SEQ ID NO: 2567582 - RNA, 19 nt, Artificial Sequence
  Description of Artificial Sequence: Synthetic oligonucleotide
cucguggcgcccgagcagc

SEQ ID NO: 2567583 - RNA, 19 nt, Artificial Sequence
  Description of Artificial Sequence: Synthetic oligonucleotide
uggucggcgccguccugcg

SEQ ID NO: 2567584 - RNA, 19 nt, Artificial Sequence
  Description of Artificial Sequence: Synthetic oligonucleotide
caccaggcuccagagguag

SEQ ID NO: 2567585 - RNA, 19 nt, Artificial Sequence
  Description of Artificial Sequence: Synthetic oligonucleotide
gcugacagaggcuggccug

SEQ ID NO: 2567586 - RNA, 19 nt, Artificial Sequence
  Description of Artificial Sequence: Synthetic oligonucleotide
caccaucugcucguggcgc

SEQ ID NO: 2567587 - RNA, 19 nt, Artificial Sequence
  Description of Artificial Sequence: Synthetic oligonucleotide
ucucgacgugguuggcccc

SEQ ID NO: 2567588 - RNA, 19 nt, Artificial Sequence
  Description of Artificial Sequence: Synthetic oligonucleotide
guccaccaggcuccagagg

SEQ ID NO: 2567589 - RNA, 19 nt, Artificial Sequence
  Description of Artificial Sequence: Synthetic oligonucleotide
augcauucuuucaauucaa

SEQ ID NO: 2567590 - RNA, 19 nt, Artificial Sequence
  Description of Artificial Sequence: Synthetic oligonucleotide
guggcgcccgagcagcugc

SEQ ID NO: 2567591 - RNA, 19 nt, Artificial Sequence
  Description of Artificial Sequence: Synthetic oligonucleotide
cugagccgcuuccuccucc

SEQ ID NO: 2567592 - RNA, 19 nt, Artificial Sequence
  Description of Artificial Sequence: Synthetic oligonucleotide
cuggagcucgacuuccaga

SEQ ID NO: 2567593 - RNA, 19 nt, Artificial Sequence
  Description of Artificial Sequence: Synthetic oligonucleotide
ccuugaucgucccuggcuc

SEQ ID NO: 2567594 - RNA, 19 nt, Artificial Sequence
  Description of Artificial Sequence: Synthetic oligonucleotide
cucgacuuccagaugcugu

SEQ ID NO: 2567595 - RNA, 19 nt, Artificial Sequence
  Description of Artificial Sequence: Synthetic oligonucleotide
ucgcauucauaaucccauu

SEQ ID NO: 2567596 - RNA, 19 nt, Artificial Sequence
  Description of Artificial Sequence: Synthetic oligonucleotide
ggcgcaugcauucuuucaa

SEQ ID NO: 2567597 - RNA, 19 nt, Artificial Sequence
  Description of Artificial Sequence: Synthetic oligonucleotide
caggcgcaugcauucuuuc

SEQ ID NO: 2567598 - RNA, 19 nt, Artificial Sequence
  Description of Artificial Sequence: Synthetic oligonucleotide
gucggcgccguccugcguc

SEQ ID NO: 2567599 - RNA, 19 nt, Artificial Sequence
  Description of Artificial Sequence: Synthetic oligonucleotide
cuggucggcgccguccugc

SEQ ID NO: 2567600 - RNA, 19 nt, Artificial Sequence
  Description of Artificial Sequence: Synthetic oligonucleotide
uggccugcagacaggcauu

SEQ ID NO: 2567601 - RNA, 19 nt, Artificial Sequence
  Description of Artificial Sequence: Synthetic oligonucleotide
auugccucccaggcgcaug

SEQ ID NO: 2567602 - RNA, 19 nt, Artificial Sequence
  Description of Artificial Sequence: Synthetic oligonucleotide
augcuguagcucauugccu

SEQ ID NO: 2567603 - RNA, 19 nt, Artificial Sequence
  Description of Artificial Sequence: Synthetic oligonucleotide
gauagaggugugccacgua

SEQ ID NO: 2567604 - RNA, 19 nt, Artificial Sequence
  Description of Artificial Sequence: Synthetic oligonucleotide
aagccgcuggucggcgccg

SEQ ID NO: 2567605 - RNA, 19 nt, Artificial Sequence
  Description of Artificial Sequence: Synthetic oligonucleotide
cuccaccaucugcucgugg

SEQ ID NO: 2567606 - RNA, 19 nt, Artificial Sequence
  Description of Artificial Sequence: Synthetic oligonucleotide
cucuggcuaccacgcagug

SEQ ID NO: 2567607 - RNA, 19 nt, Artificial Sequence
  Description of Artificial Sequence: Synthetic oligonucleotide
gugugccacguacacugca

SEQ ID NO: 2567608 - RNA, 19 nt, Artificial Sequence
  Description of Artificial Sequence: Synthetic oligonucleotide
ccaguucugugcaagguaa

SEQ ID NO: 2567609 - RNA, 19 nt, Artificial Sequence
  Description of Artificial Sequence: Synthetic oligonucleotide
guggggccaugguggaugc

SEQ ID NO: 2567610 - RNA, 19 nt, Artificial Sequence
  Description of Artificial Sequence: Synthetic oligonucleotide
uauccccaguucugugcaa

SEQ ID NO: 2567611 - RNA, 19 nt, Artificial Sequence
  Description of Artificial Sequence: Synthetic oligonucleotide
gugccacguacacugcaga

SEQ ID NO: 2567612 - RNA, 19 nt, Artificial Sequence
  Description of Artificial Sequence: Synthetic oligonucleotide
ccacgcaguguccaccagg

SEQ ID NO: 2567613 - RNA, 19 nt, Artificial Sequence
  Description of Artificial Sequence: Synthetic oligonucleotide
ggcucgcauucauaauccc

SEQ ID NO: 2567614 - RNA, 19 nt, Artificial Sequence
  Description of Artificial Sequence: Synthetic oligonucleotide
accacgcaguguccaccag

SEQ ID NO: 2567615 - RNA, 19 nt, Artificial Sequence
  Description of Artificial Sequence: Synthetic oligonucleotide
cugugagagcugugcgcug

SEQ ID NO: 2567616 - RNA, 19 nt, Artificial Sequence
  Description of Artificial Sequence: Synthetic oligonucleotide
cugcucguggcgcccgagc

SEQ ID NO: 2567617 - RNA, 19 nt, Artificial Sequence
  Description of Artificial Sequence: Synthetic oligonucleotide
ggugauggugguguccuca

SEQ ID NO: 2567618 - RNA, 19 nt, Artificial Sequence
  Description of Artificial Sequence: Synthetic oligonucleotide
ucugcucguggcgcccgag

SEQ ID NO: 2567619 - RNA, 19 nt, Artificial Sequence
  Description of Artificial Sequence: Synthetic oligonucleotide
aagaaggcucugagccgcu

SEQ ID NO: 2567620 - RNA, 19 nt, Artificial Sequence
  Description of Artificial Sequence: Synthetic oligonucleotide
caucugcucguggcgcccg

SEQ ID NO: 2567621 - RNA, 19 nt, Artificial Sequence
  Description of Artificial Sequence: Synthetic oligonucleotide
cuuucucgacgugguuggc

SEQ ID NO: 2567622 - RNA, 19 nt, Artificial Sequence
  Description of Artificial Sequence: Synthetic oligonucleotide
ugcuggagauccgccucca

SEQ ID NO: 2567623 - RNA, 19 nt, Artificial Sequence
  Description of Artificial Sequence: Synthetic oligonucleotide
cgcauucauaaucccauuc

SEQ ID NO: 2567624 - RNA, 19 nt, Artificial Sequence
  Description of Artificial Sequence: Synthetic oligonucleotide
cgcaguguccaccaggcuc

SEQ ID NO: 2567625 - RNA, 19 nt, Artificial Sequence
  Description of Artificial Sequence: Synthetic oligonucleotide
ccacaguggggccauggug

SEQ ID NO: 2567626 - RNA, 19 nt, Artificial Sequence
  Description of Artificial Sequence: Synthetic oligonucleotide
guaagaggucaaggcucug

SEQ ID NO: 2567627 - RNA, 19 nt, Artificial Sequence
  Description of Artificial Sequence: Synthetic oligonucleotide
gcucgcauucauaauccca

SEQ ID NO: 2567628 - RNA, 19 nt, Artificial Sequence
  Description of Artificial Sequence: Synthetic oligonucleotide
cuacaaccuccuccaucuc

SEQ ID NO: 2567629 - RNA, 19 nt, Artificial Sequence
  Description of Artificial Sequence: Synthetic oligonucleotide
ccauauccccaguucugug

SEQ ID NO: 2567630 - RNA, 19 nt, Artificial Sequence
  Description of Artificial Sequence: Synthetic oligonucleotide
uggcgcccgagcagcugcc

SEQ ID NO: 2567631 - RNA, 19 nt, Artificial Sequence
  Description of Artificial Sequence: Synthetic oligonucleotide
gcuaccacgcaguguccac

SEQ ID NO: 2567632 - RNA, 19 nt, Artificial Sequence
  Description of Artificial Sequence: Synthetic oligonucleotide
ccccauauccccaguucug

SEQ ID NO: 2567633 - RNA, 19 nt, Artificial Sequence
  Description of Artificial Sequence: Synthetic oligonucleotide
ggagcucgacuuccagaug

SEQ ID NO: 2567634 - RNA, 19 nt, Artificial Sequence
  Description of Artificial Sequence: Synthetic oligonucleotide
gaugcccuugaucgucccu

SEQ ID NO: 2567635 - RNA, 19 nt, Artificial Sequence
  Description of Artificial Sequence: Synthetic oligonucleotide
agcucgacuuccagaugcu

SEQ ID NO: 2567636 - RNA, 19 nt, Artificial Sequence
  Description of Artificial Sequence: Synthetic oligonucleotide
aucuggugauagaggugug

SEQ ID NO: 2567637 - RNA, 19 nt, Artificial Sequence
  Description of Artificial Sequence: Synthetic oligonucleotide
gguaagaggucaaggcucu

SEQ ID NO: 2567638 - RNA, 19 nt, Artificial Sequence
  Description of Artificial Sequence: Synthetic oligonucleotide
ucggcgccguccugcgucu

SEQ ID NO: 2567639 - RNA, 19 nt, Artificial Sequence
  Description of Artificial Sequence: Synthetic oligonucleotide
acgcaguguccaccaggcu

SEQ ID NO: 2567640 - RNA, 19 nt, Artificial Sequence
  Description of Artificial Sequence: Synthetic oligonucleotide
uggccuucuggagcucgac

SEQ ID NO: 2567641 - RNA, 19 nt, Artificial Sequence
  Description of Artificial Sequence: Synthetic oligonucleotide
agucgcugaugaacuucug

SEQ ID NO: 2567642 - RNA, 19 nt, Artificial Sequence
  Description of Artificial Sequence: Synthetic oligonucleotide
gugagagcugugcgcuguc

SEQ ID NO: 2567643 - RNA, 19 nt, Artificial Sequence
  Description of Artificial Sequence: Synthetic oligonucleotide
ccacuucucucuccuguug

SEQ ID NO: 2567644 - RNA, 19 nt, Artificial Sequence
  Description of Artificial Sequence: Synthetic oligonucleotide
ggccacaguggggccaugg

SEQ ID NO: 2567645 - RNA, 19 nt, Artificial Sequence
  Description of Artificial Sequence: Synthetic oligonucleotide
gcucguggcgcccgagcag

SEQ ID NO: 2567646 - RNA, 19 nt, Artificial Sequence
  Description of Artificial Sequence: Synthetic oligonucleotide
gucaaggcucuggcuacca

SEQ ID NO: 2567647 - RNA, 19 nt, Artificial Sequence
  Description of Artificial Sequence: Synthetic oligonucleotide
ucccaggcgcaugcauucu

SEQ ID NO: 2567648 - RNA, 19 nt, Artificial Sequence
  Description of Artificial Sequence: Synthetic oligonucleotide
aggcucuggcuaccacgca

SEQ ID NO: 2567649 - RNA, 19 nt, Artificial Sequence
  Description of Artificial Sequence: Synthetic oligonucleotide
gcugugcgcuguccaagug

SEQ ID NO: 2567650 - RNA, 19 nt, Artificial Sequence
  Description of Artificial Sequence: Synthetic oligonucleotide
gccaugguggaugcccuug

SEQ ID NO: 2567651 - RNA, 19 nt, Artificial Sequence
  Description of Artificial Sequence: Synthetic oligonucleotide
ucguggcgcccgagcagcu

SEQ ID NO: 2567652 - RNA, 19 nt, Artificial Sequence
  Description of Artificial Sequence: Synthetic oligonucleotide
ccagagguagucgcugaug

SEQ ID NO: 2567653 - RNA, 19 nt, Artificial Sequence
  Description of Artificial Sequence: Synthetic oligonucleotide
cgcugcugcuuucucgacg

SEQ ID NO: 2567654 - RNA, 19 nt, Artificial Sequence
  Description of Artificial Sequence: Synthetic oligonucleotide
ggcucugagccgcuuccuc

SEQ ID NO: 2567655 - RNA, 19 nt, Artificial Sequence
  Description of Artificial Sequence: Synthetic oligonucleotide
aucugcucguggcgcccga

SEQ ID NO: 2567656 - RNA, 19 nt, Artificial Sequence
  Description of Artificial Sequence: Synthetic oligonucleotide
aguguccaccaggcuccag

SEQ ID NO: 2567657 - RNA, 19 nt, Artificial Sequence
  Description of Artificial Sequence: Synthetic oligonucleotide
ccuccaucucacggaaagc

SEQ ID NO: 2567658 - RNA, 19 nt, Artificial Sequence
  Description of Artificial Sequence: Synthetic oligonucleotide
gagccgcuuccuccuccac

SEQ ID NO: 2567659 - RNA, 19 nt, Artificial Sequence
  Description of Artificial Sequence: Synthetic oligonucleotide
gaggugugccacguacacu

SEQ ID NO: 2567660 - RNA, 19 nt, Artificial Sequence
  Description of Artificial Sequence: Synthetic oligonucleotide
gacaggcauuuuccuugcu

SEQ ID NO: 2567661 - RNA, 19 nt, Artificial Sequence
  Description of Artificial Sequence: Synthetic oligonucleotide
ggugugccacguacacugc

SEQ ID NO: 2567662 - RNA, 19 nt, Artificial Sequence
  Description of Artificial Sequence: Synthetic oligonucleotide
cugcugcuuucucgacgug

SEQ ID NO: 2567663 - RNA, 19 nt, Artificial Sequence
  Description of Artificial Sequence: Synthetic oligonucleotide
gcucgacuuccagaugcug

SEQ ID NO: 2567664 - RNA, 19 nt, Artificial Sequence
  Description of Artificial Sequence: Synthetic oligonucleotide
gugcaagguaagaggucaa

SEQ ID NO: 2567665 - RNA, 19 nt, Artificial Sequence
  Description of Artificial Sequence: Synthetic oligonucleotide
guggauaggcagggccaca

SEQ ID NO: 2567666 - RNA, 19 nt, Artificial Sequence
  Description of Artificial Sequence: Synthetic oligonucleotide
ccaaguggauaggcagggc

SEQ ID NO: 2567667 - RNA, 19 nt, Artificial Sequence
  Description of Artificial Sequence: Synthetic oligonucleotide
ggcuaccacgcagugucca

SEQ ID NO: 2567668 - RNA, 19 nt, Artificial Sequence
  Description of Artificial Sequence: Synthetic oligonucleotide
gccuucuggagcucgacuu

SEQ ID NO: 2567669 - RNA, 19 nt, Artificial Sequence
  Description of Artificial Sequence: Synthetic oligonucleotide
gguggaugcccuugaucgu

SEQ ID NO: 2567670 - RNA, 19 nt, Artificial Sequence
  Description of Artificial Sequence: Synthetic oligonucleotide
ggcgccguccugcgucucc

SEQ ID NO: 2567671 - RNA, 19 nt, Artificial Sequence
  Description of Artificial Sequence: Synthetic oligonucleotide
gaucgucccuggcucgcau

SEQ ID NO: 2567672 - RNA, 19 nt, Artificial Sequence
  Description of Artificial Sequence: Synthetic oligonucleotide
gcugcuuucucgacguggu

SEQ ID NO: 2567673 - RNA, 19 nt, Artificial Sequence
  Description of Artificial Sequence: Synthetic oligonucleotide
agaaggcucugagccgcuu

SEQ ID NO: 2567674 - RNA, 19 nt, Artificial Sequence
  Description of Artificial Sequence: Synthetic oligonucleotide
cccauucuauuuuacuaau

SEQ ID NO: 2567675 - RNA, 19 nt, Artificial Sequence
  Description of Artificial Sequence: Synthetic oligonucleotide
gcccuugaucgucccuggc

SEQ ID NO: 2567676 - RNA, 19 nt, Artificial Sequence
  Description of Artificial Sequence: Synthetic oligonucleotide
cccaguucugugcaaggua

SEQ ID NO: 2567677 - RNA, 19 nt, Artificial Sequence
  Description of Artificial Sequence: Synthetic oligonucleotide
cagcugcuacaaccuccuc

SEQ ID NO: 2567678 - RNA, 19 nt, Artificial Sequence
  Description of Artificial Sequence: Synthetic oligonucleotide
caugguggaugcccuugau

SEQ ID NO: 2567679 - RNA, 19 nt, Artificial Sequence
  Description of Artificial Sequence: Synthetic oligonucleotide
ccaugguggaugcccuuga

SEQ ID NO: 2567680 - RNA, 19 nt, Artificial Sequence
  Description of Artificial Sequence: Synthetic oligonucleotide
gguagucgcugaugaacuu

SEQ ID NO: 2567681 - RNA, 19 nt, Artificial Sequence
  Description of Artificial Sequence: Synthetic oligonucleotide
gcgcccgagcagcugccgc

SEQ ID NO: 2567682 - RNA, 19 nt, Artificial Sequence
  Description of Artificial Sequence: Synthetic oligonucleotide
gggucucccgaagccgcug

SEQ ID NO: 2567683 - RNA, 19 nt, Artificial Sequence
  Description of Artificial Sequence: Synthetic oligonucleotide
gcgcaugcauucuuucaau

SEQ ID NO: 2567684 - RNA, 19 nt, Artificial Sequence
  Description of Artificial Sequence: Synthetic oligonucleotide
cccuugaucgucccuggcu

SEQ ID NO: 2567685 - RNA, 19 nt, Artificial Sequence
  Description of Artificial Sequence: Synthetic oligonucleotide
ggcgcccgagcagcugccg

SEQ ID NO: 2567686 - RNA, 19 nt, Artificial Sequence
  Description of Artificial Sequence: Synthetic oligonucleotide
gcucuggcuaccacgcagu

SEQ ID NO: 2567687 - RNA, 19 nt, Artificial Sequence
  Description of Artificial Sequence: Synthetic oligonucleotide
gccacaguggggccauggu

SEQ ID NO: 2567688 - RNA, 19 nt, Artificial Sequence
  Description of Artificial Sequence: Synthetic oligonucleotide
gcuccaccaucugcucgug

SEQ ID NO: 2567689 - RNA, 19 nt, Artificial Sequence
  Description of Artificial Sequence: Synthetic oligonucleotide
gcucuguggucagcugaca

SEQ ID NO: 2567690 - RNA, 19 nt, Artificial Sequence
  Description of Artificial Sequence: Synthetic oligonucleotide
ccgcuggucggcgccgucc

SEQ ID NO: 2567691 - RNA, 19 nt, Artificial Sequence
  Description of Artificial Sequence: Synthetic oligonucleotide
ccgcugcugcuuucucgac

SEQ ID NO: 2567692 - RNA, 19 nt, Artificial Sequence
  Description of Artificial Sequence: Synthetic oligonucleotide
cagaggggauggugauggu

SEQ ID NO: 2567693 - RNA, 19 nt, Artificial Sequence
  Description of Artificial Sequence: Synthetic oligonucleotide
caguguccaccaggcucca

SEQ ID NO: 2567694 - RNA, 19 nt, Artificial Sequence
  Description of Artificial Sequence: Synthetic oligonucleotide
ccgcuuccuccuccacagc

SEQ ID NO: 2567695 - RNA, 19 nt, Artificial Sequence
  Description of Artificial Sequence: Synthetic oligonucleotide
cugcuuucucgacgugguu

SEQ ID NO: 2567696 - RNA, 19 nt, Artificial Sequence
  Description of Artificial Sequence: Synthetic oligonucleotide
gcgucuccagcagccgcuc

SEQ ID NO: 2567697 - RNA, 19 nt, Artificial Sequence
  Description of Artificial Sequence: Synthetic oligonucleotide
cgcuccaccaucugcucgu

SEQ ID NO: 2567698 - RNA, 19 nt, Artificial Sequence
  Description of Artificial Sequence: Synthetic oligonucleotide
ccuggcucgcauucauaau

SEQ ID NO: 2567699 - RNA, 19 nt, Artificial Sequence
  Description of Artificial Sequence: Synthetic oligonucleotide
cugcuacaaccuccuccau

SEQ ID NO: 2567700 - RNA, 19 nt, Artificial Sequence
  Description of Artificial Sequence: Synthetic oligonucleotide
ccucccaggcgcaugcauu

SEQ ID NO: 2567701 - RNA, 19 nt, Artificial Sequence
  Description of Artificial Sequence: Synthetic oligonucleotide
ccaggcgcaugcauucuuu

SEQ ID NO: 2567702 - RNA, 19 nt, Artificial Sequence
  Description of Artificial Sequence: Synthetic oligonucleotide
cauccucccugagccuccu

SEQ ID NO: 2567703 - RNA, 19 nt, Artificial Sequence
  Description of Artificial Sequence: Synthetic oligonucleotide
cgcaugcauucuuucaauu

SEQ ID NO: 2567704 - RNA, 19 nt, Artificial Sequence
  Description of Artificial Sequence: Synthetic oligonucleotide
cauugccucccaggcgcau

SEQ ID NO: 2567705 - RNA, 19 nt, Artificial Sequence
  Description of Artificial Sequence: Synthetic oligonucleotide
gcuggagauccgccuccau

SEQ ID NO: 2567706 - RNA, 19 nt, Artificial Sequence
  Description of Artificial Sequence: Synthetic oligonucleotide
cguggcgcccgagcagcug

SEQ ID NO: 2567707 - RNA, 19 nt, Artificial Sequence
  Description of Artificial Sequence: Synthetic oligonucleotide
ggccaugguggaugcccuu

SEQ ID NO: 2567708 - RNA, 19 nt, Artificial Sequence
  Description of Artificial Sequence: Synthetic oligonucleotide
gccgcuggucggcgccguc

SEQ ID NO: 2567709 - RNA, 19 nt, Artificial Sequence
  Description of Artificial Sequence: Synthetic oligonucleotide
gugcgcuguccaaguggau

SEQ ID NO: 2567710 - RNA, 19 nt, Artificial Sequence
  Description of Artificial Sequence: Synthetic oligonucleotide
ggucggcgccguccugcgu

SEQ ID NO: 2567711 - RNA, 19 nt, Artificial Sequence
  Description of Artificial Sequence: Synthetic oligonucleotide
gggccacaguggggccaug

SEQ ID NO: 2567712 - RNA, 19 nt, Artificial Sequence
  Description of Artificial Sequence: Synthetic oligonucleotide
cggcgccguccugcgucuc

SEQ ID NO: 2567713 - RNA, 19 nt, Artificial Sequence
  Description of Artificial Sequence: Synthetic oligonucleotide
aauguuaguauucauaaag

SEQ ID NO: 2567714 - RNA, 19 nt, Artificial Sequence
  Description of Artificial Sequence: Synthetic oligonucleotide
aaaacuuaauucuauauca

SEQ ID NO: 2567715 - RNA, 19 nt, Artificial Sequence
  Description of Artificial Sequence: Synthetic oligonucleotide
auaauaaugacuucuauca

SEQ ID NO: 2567716 - RNA, 19 nt, Artificial Sequence
  Description of Artificial Sequence: Synthetic oligonucleotide
cagugaauaaauaagauag

SEQ ID NO: 2567717 - RNA, 19 nt, Artificial Sequence
  Description of Artificial Sequence: Synthetic oligonucleotide
aagcuuauggcucauugcc

SEQ ID NO: 2567718 - RNA, 19 nt, Artificial Sequence
  Description of Artificial Sequence: Synthetic oligonucleotide
uuaguauucauaaagugca

SEQ ID NO: 2567719 - RNA, 19 nt, Artificial Sequence
  Description of Artificial Sequence: Synthetic oligonucleotide
auuuauaugcaguuuaagg

SEQ ID NO: 2567720 - RNA, 19 nt, Artificial Sequence
  Description of Artificial Sequence: Synthetic oligonucleotide
uuuauaugcaguuuaaggu

SEQ ID NO: 2567721 - RNA, 19 nt, Artificial Sequence
  Description of Artificial Sequence: Synthetic oligonucleotide
aauucuuuuauuccagcuc

SEQ ID NO: 2567722 - RNA, 19 nt, Artificial Sequence
  Description of Artificial Sequence: Synthetic oligonucleotide
aaauaagauaguaagauga

SEQ ID NO: 2567723 - RNA, 19 nt, Artificial Sequence
  Description of Artificial Sequence: Synthetic oligonucleotide
caauuuaguauuaaggagc

SEQ ID NO: 2567724 - RNA, 19 nt, Artificial Sequence
  Description of Artificial Sequence: Synthetic oligonucleotide
uucuauaucacaagguuag

SEQ ID NO: 2567725 - RNA, 19 nt, Artificial Sequence
  Description of Artificial Sequence: Synthetic oligonucleotide
uaaguuuuguaaaagcugc

SEQ ID NO: 2567726 - RNA, 19 nt, Artificial Sequence
  Description of Artificial Sequence: Synthetic oligonucleotide
agauaaauuacauauuucu

SEQ ID NO: 2567727 - RNA, 19 nt, Artificial Sequence
  Description of Artificial Sequence: Synthetic oligonucleotide
aaaaguauuucuauugcac

SEQ ID NO: 2567728 - RNA, 19 nt, Artificial Sequence
  Description of Artificial Sequence: Synthetic oligonucleotide
uuaucaaugguuaaaagua

SEQ ID NO: 2567729 - RNA, 19 nt, Artificial Sequence
  Description of Artificial Sequence: Synthetic oligonucleotide
ucauguauggucuauagac

SEQ ID NO: 2567730 - RNA, 19 nt, Artificial Sequence
  Description of Artificial Sequence: Synthetic oligonucleotide
uggucuauagacuaaaccc

SEQ ID NO: 2567731 - RNA, 19 nt, Artificial Sequence
  Description of Artificial Sequence: Synthetic oligonucleotide
ucaauuuaguauuaaggag

SEQ ID NO: 2567732 - RNA, 19 nt, Artificial Sequence
  Description of Artificial Sequence: Synthetic oligonucleotide
acuucuaucauguuagcuc

SEQ ID NO: 2567733 - RNA, 19 nt, Artificial Sequence
  Description of Artificial Sequence: Synthetic oligonucleotide
uuuaguuuauugauaaugu

SEQ ID NO: 2567734 - RNA, 19 nt, Artificial Sequence
  Description of Artificial Sequence: Synthetic oligonucleotide
auagacuaaacccagauau

SEQ ID NO: 2567735 - RNA, 19 nt, Artificial Sequence
  Description of Artificial Sequence: Synthetic oligonucleotide
uaagauaguaagaugaaaa

SEQ ID NO: 2567736 - RNA, 19 nt, Artificial Sequence
  Description of Artificial Sequence: Synthetic oligonucleotide
aguauuuuaaguuuuguaa

SEQ ID NO: 2567737 - RNA, 19 nt, Artificial Sequence
  Description of Artificial Sequence: Synthetic oligonucleotide
uuucuuauaguauuuuaag

SEQ ID NO: 2567738 - RNA, 19 nt, Artificial Sequence
  Description of Artificial Sequence: Synthetic oligonucleotide
auuaucaaugguuaaaagu

SEQ ID NO: 2567739 - RNA, 19 nt, Artificial Sequence
  Description of Artificial Sequence: Synthetic oligonucleotide
uuaguaaugugaaagcaca

SEQ ID NO: 2567740 - RNA, 19 nt, Artificial Sequence
  Description of Artificial Sequence: Synthetic oligonucleotide
uuaaggagcauauuauugc

SEQ ID NO: 2567741 - RNA, 19 nt, Artificial Sequence
  Description of Artificial Sequence: Synthetic oligonucleotide
aauucuauaucacaagguu

SEQ ID NO: 2567742 - RNA, 19 nt, Artificial Sequence
  Description of Artificial Sequence: Synthetic oligonucleotide
auggucuauagacuaaacc

SEQ ID NO: 2567743 - RNA, 19 nt, Artificial Sequence
  Description of Artificial Sequence: Synthetic oligonucleotide
aauuccgucugucauccac

SEQ ID NO: 2567744 - RNA, 19 nt, Artificial Sequence
  Description of Artificial Sequence: Synthetic oligonucleotide
uacaaaauagguauguauc

SEQ ID NO: 2567745 - RNA, 19 nt, Artificial Sequence
  Description of Artificial Sequence: Synthetic oligonucleotide
auuucuauugcacuuugag

SEQ ID NO: 2567746 - RNA, 19 nt, Artificial Sequence
  Description of Artificial Sequence: Synthetic oligonucleotide
ugaauaaauaagauaguaa

SEQ ID NO: 2567747 - RNA, 19 nt, Artificial Sequence
  Description of Artificial Sequence: Synthetic oligonucleotide
uauuuaguaaugugaaagc

SEQ ID NO: 2567748 - RNA, 19 nt, Artificial Sequence
  Description of Artificial Sequence: Synthetic oligonucleotide
uccaguuagaaauucaaac

SEQ ID NO: 2567749 - RNA, 19 nt, Artificial Sequence
  Description of Artificial Sequence: Synthetic oligonucleotide
uguuaguauucauaaagug

SEQ ID NO: 2567750 - RNA, 19 nt, Artificial Sequence
  Description of Artificial Sequence: Synthetic oligonucleotide
aguuuauugauaauguuag

SEQ ID NO: 2567751 - RNA, 19 nt, Artificial Sequence
  Description of Artificial Sequence: Synthetic oligonucleotide
uaaauaagauaguaagaug

SEQ ID NO: 2567752 - RNA, 19 nt, Artificial Sequence
  Description of Artificial Sequence: Synthetic oligonucleotide
acuaaacccagauaugguc

SEQ ID NO: 2567753 - RNA, 19 nt, Artificial Sequence
  Description of Artificial Sequence: Synthetic oligonucleotide
uuuguauuaucaaugguua

SEQ ID NO: 2567754 - RNA, 19 nt, Artificial Sequence
  Description of Artificial Sequence: Synthetic oligonucleotide
ugugaaagcacauuagcgu

SEQ ID NO: 2567755 - RNA, 19 nt, Artificial Sequence
  Description of Artificial Sequence: Synthetic oligonucleotide
aacuuaauucuauaucaca

SEQ ID NO: 2567756 - RNA, 19 nt, Artificial Sequence
  Description of Artificial Sequence: Synthetic oligonucleotide
uuauugauaauguuaguau

SEQ ID NO: 2567757 - RNA, 19 nt, Artificial Sequence
  Description of Artificial Sequence: Synthetic oligonucleotide
uaaauuacauauuucuuau

SEQ ID NO: 2567758 - RNA, 19 nt, Artificial Sequence
  Description of Artificial Sequence: Synthetic oligonucleotide
ucauguuagcucaauuuag

SEQ ID NO: 2567759 - RNA, 19 nt, Artificial Sequence
  Description of Artificial Sequence: Synthetic oligonucleotide
ugcaguuuaagguaaagau

SEQ ID NO: 2567760 - RNA, 19 nt, Artificial Sequence
  Description of Artificial Sequence: Synthetic oligonucleotide
guuaguauucauaaagugc

SEQ ID NO: 2567761 - RNA, 19 nt, Artificial Sequence
  Description of Artificial Sequence: Synthetic oligonucleotide
aaacuuaauucuauaucac

SEQ ID NO: 2567762 - RNA, 19 nt, Artificial Sequence
  Description of Artificial Sequence: Synthetic oligonucleotide
uaaugugaaagcacauuag

SEQ ID NO: 2567763 - RNA, 19 nt, Artificial Sequence
  Description of Artificial Sequence: Synthetic oligonucleotide
uauggucagaugcugagca

SEQ ID NO: 2567764 - RNA, 19 nt, Artificial Sequence
  Description of Artificial Sequence: Synthetic oligonucleotide
aggaccaugggcuguaccc

SEQ ID NO: 2567765 - RNA, 19 nt, Artificial Sequence
  Description of Artificial Sequence: Synthetic oligonucleotide
uaaagugcagugaauaaau

SEQ ID NO: 2567766 - RNA, 19 nt, Artificial Sequence
  Description of Artificial Sequence: Synthetic oligonucleotide
acaaaauagguauguaucu

SEQ ID NO: 2567767 - RNA, 19 nt, Artificial Sequence
  Description of Artificial Sequence: Synthetic oligonucleotide
uaaaaguauuucuauugca

SEQ ID NO: 2567768 - RNA, 19 nt, Artificial Sequence
  Description of Artificial Sequence: Synthetic oligonucleotide
uaauucuauaucacaaggu

SEQ ID NO: 2567769 - RNA, 19 nt, Artificial Sequence
  Description of Artificial Sequence: Synthetic oligonucleotide
aguguuuuaguuuauugau

SEQ ID NO: 2567770 - RNA, 19 nt, Artificial Sequence
  Description of Artificial Sequence: Synthetic oligonucleotide
uuauugcaaaacuuaauuc

SEQ ID NO: 2567771 - RNA, 19 nt, Artificial Sequence
  Description of Artificial Sequence: Synthetic oligonucleotide
gaguuucaucauuaaaagg

SEQ ID NO: 2567772 - RNA, 19 nt, Artificial Sequence
  Description of Artificial Sequence: Synthetic oligonucleotide
uggcuuacaaaauagguau

SEQ ID NO: 2567773 - RNA, 19 nt, Artificial Sequence
  Description of Artificial Sequence: Synthetic oligonucleotide
uauuaucaaugguuaaaag

SEQ ID NO: 2567774 - RNA, 19 nt, Artificial Sequence
  Description of Artificial Sequence: Synthetic oligonucleotide
uuauaugcaguuuaaggua

SEQ ID NO: 2567775 - RNA, 19 nt, Artificial Sequence
  Description of Artificial Sequence: Synthetic oligonucleotide
aaucagcagauguagacaa

SEQ ID NO: 2567776 - RNA, 19 nt, Artificial Sequence
  Description of Artificial Sequence: Synthetic oligonucleotide
uuaguauuaaggagcauau

SEQ ID NO: 2567777 - RNA, 19 nt, Artificial Sequence
  Description of Artificial Sequence: Synthetic oligonucleotide
aagguaaagauaaauuaca

SEQ ID NO: 2567778 - RNA, 19 nt, Artificial Sequence
  Description of Artificial Sequence: Synthetic oligonucleotide
gccuugaugauuuauaugc

SEQ ID NO: 2567779 - RNA, 19 nt, Artificial Sequence
  Description of Artificial Sequence: Synthetic oligonucleotide
agacuaaacccagauaugg

SEQ ID NO: 2567780 - RNA, 19 nt, Artificial Sequence
  Description of Artificial Sequence: Synthetic oligonucleotide
caaaacuuaauucuauauc

SEQ ID NO: 2567781 - RNA, 19 nt, Artificial Sequence
  Description of Artificial Sequence: Synthetic oligonucleotide
uacgaauucuuuuauucca

SEQ ID NO: 2567782 - RNA, 19 nt, Artificial Sequence
  Description of Artificial Sequence: Synthetic oligonucleotide
agaauuccgucugucaucc

SEQ ID NO: 2567783 - RNA, 19 nt, Artificial Sequence
  Description of Artificial Sequence: Synthetic oligonucleotide
uuuaguauuaaggagcaua

SEQ ID NO: 2567784 - RNA, 19 nt, Artificial Sequence
  Description of Artificial Sequence: Synthetic oligonucleotide
aagugcagugaauaaauaa

SEQ ID NO: 2567785 - RNA, 19 nt, Artificial Sequence
  Description of Artificial Sequence: Synthetic oligonucleotide
aauuuaguauuaaggagca

SEQ ID NO: 2567786 - RNA, 19 nt, Artificial Sequence
  Description of Artificial Sequence: Synthetic oligonucleotide
agcauauuauugcaaaacu

SEQ ID NO: 2567787 - RNA, 19 nt, Artificial Sequence
  Description of Artificial Sequence: Synthetic oligonucleotide
uauaucacaagguuagaua

SEQ ID NO: 2567788 - RNA, 19 nt, Artificial Sequence
  Description of Artificial Sequence: Synthetic oligonucleotide
uuauuccuggcuuacaaaa

SEQ ID NO: 2567789 - RNA, 19 nt, Artificial Sequence
  Description of Artificial Sequence: Synthetic oligonucleotide
auucaaacaagcagacucc

SEQ ID NO: 2567790 - RNA, 19 nt, Artificial Sequence
  Description of Artificial Sequence: Synthetic oligonucleotide
agugcagugaauaaauaag

SEQ ID NO: 2567791 - RNA, 19 nt, Artificial Sequence
  Description of Artificial Sequence: Synthetic oligonucleotide
uggaguuccuagaauuccg

SEQ ID NO: 2567792 - RNA, 19 nt, Artificial Sequence
  Description of Artificial Sequence: Synthetic oligonucleotide
uauaugcaguuuaagguaa

SEQ ID NO: 2567793 - RNA, 19 nt, Artificial Sequence
  Description of Artificial Sequence: Synthetic oligonucleotide
cuuguuucgucauucguug

SEQ ID NO: 2567794 - RNA, 19 nt, Artificial Sequence
  Description of Artificial Sequence: Synthetic oligonucleotide
uagcguaggcauaauaaug

SEQ ID NO: 2567795 - RNA, 19 nt, Artificial Sequence
  Description of Artificial Sequence: Synthetic oligonucleotide
guuucaucauuaaaagggg

SEQ ID NO: 2567796 - RNA, 19 nt, Artificial Sequence
  Description of Artificial Sequence: Synthetic oligonucleotide
ugaaagcacauuagcguag

SEQ ID NO: 2567797 - RNA, 19 nt, Artificial Sequence
  Description of Artificial Sequence: Synthetic oligonucleotide
ugucauguauggucuauag

SEQ ID NO: 2567798 - RNA, 19 nt, Artificial Sequence
  Description of Artificial Sequence: Synthetic oligonucleotide
auucauaaagugcagugaa

SEQ ID NO: 2567799 - RNA, 19 nt, Artificial Sequence
  Description of Artificial Sequence: Synthetic oligonucleotide
ggaguuucaucauuaaaag

SEQ ID NO: 2567800 - RNA, 19 nt, Artificial Sequence
  Description of Artificial Sequence: Synthetic oligonucleotide
uguuagcucaauuuaguau

SEQ ID NO: 2567801 - RNA, 19 nt, Artificial Sequence
  Description of Artificial Sequence: Synthetic oligonucleotide
ucuguauagcacaguagug

SEQ ID NO: 2567802 - RNA, 19 nt, Artificial Sequence
  Description of Artificial Sequence: Synthetic oligonucleotide
uaucauguuagcucaauuu

SEQ ID NO: 2567803 - RNA, 19 nt, Artificial Sequence
  Description of Artificial Sequence: Synthetic oligonucleotide
uuccuggcuuacaaaauag

SEQ ID NO: 2567804 - RNA, 19 nt, Artificial Sequence
  Description of Artificial Sequence: Synthetic oligonucleotide
ucaaugguuaaaaguauuu

SEQ ID NO: 2567805 - RNA, 19 nt, Artificial Sequence
  Description of Artificial Sequence: Synthetic oligonucleotide
agguauguaucuuguuucg

SEQ ID NO: 2567806 - RNA, 19 nt, Artificial Sequence
  Description of Artificial Sequence: Synthetic oligonucleotide
auugccucuguauagcaca

SEQ ID NO: 2567807 - RNA, 19 nt, Artificial Sequence
  Description of Artificial Sequence: Synthetic oligonucleotide
auaaugacuucuaucaugu

SEQ ID NO: 2567808 - RNA, 19 nt, Artificial Sequence
  Description of Artificial Sequence: Synthetic oligonucleotide
guacgaauucuuuuauucc

SEQ ID NO: 2567809 - RNA, 19 nt, Artificial Sequence
  Description of Artificial Sequence: Synthetic oligonucleotide
ugcucuauuuaguaaugug

SEQ ID NO: 2567810 - RNA, 19 nt, Artificial Sequence
  Description of Artificial Sequence: Synthetic oligonucleotide
uugauaauguuaguauuca

SEQ ID NO: 2567811 - RNA, 19 nt, Artificial Sequence
  Description of Artificial Sequence: Synthetic oligonucleotide
acaagcuuauggcucauug

SEQ ID NO: 2567812 - RNA, 19 nt, Artificial Sequence
  Description of Artificial Sequence: Synthetic oligonucleotide
aguuccuagaauuccgucu

SEQ ID NO: 2567813 - RNA, 19 nt, Artificial Sequence
  Description of Artificial Sequence: Synthetic oligonucleotide
agcacauuagcguaggcau

SEQ ID NO: 2567814 - RNA, 19 nt, Artificial Sequence
  Description of Artificial Sequence: Synthetic oligonucleotide
ugugguacgaauucuuuua

SEQ ID NO: 2567815 - RNA, 19 nt, Artificial Sequence
  Description of Artificial Sequence: Synthetic oligonucleotide
auuuaguaaugugaaagca

SEQ ID NO: 2567816 - RNA, 19 nt, Artificial Sequence
  Description of Artificial Sequence: Synthetic oligonucleotide
uaucuuguuucgucauucg

SEQ ID NO: 2567817 - RNA, 19 nt, Artificial Sequence
  Description of Artificial Sequence: Synthetic oligonucleotide
gaaauucaaacaagcagac

SEQ ID NO: 2567818 - RNA, 19 nt, Artificial Sequence
  Description of Artificial Sequence: Synthetic oligonucleotide
uugagcaugaucagauaac

SEQ ID NO: 2567819 - RNA, 19 nt, Artificial Sequence
  Description of Artificial Sequence: Synthetic oligonucleotide
uaucaaugguuaaaaguau

SEQ ID NO: 2567820 - RNA, 19 nt, Artificial Sequence
  Description of Artificial Sequence: Synthetic oligonucleotide
ugcagugaauaaauaagau

SEQ ID NO: 2567821 - RNA, 19 nt, Artificial Sequence
  Description of Artificial Sequence: Synthetic oligonucleotide
uaaucuggaguuccuagaa

SEQ ID NO: 2567822 - RNA, 19 nt, Artificial Sequence
  Description of Artificial Sequence: Synthetic oligonucleotide
aagccuugaugauuuauau

SEQ ID NO: 2567823 - RNA, 19 nt, Artificial Sequence
  Description of Artificial Sequence: Synthetic oligonucleotide
acaguaguguuuuaguuua

SEQ ID NO: 2567824 - RNA, 19 nt, Artificial Sequence
  Description of Artificial Sequence: Synthetic oligonucleotide
ucauaaagugcagugaaua

SEQ ID NO: 2567825 - RNA, 19 nt, Artificial Sequence
  Description of Artificial Sequence: Synthetic oligonucleotide
uggaauacuuguuguggag

SEQ ID NO: 2567826 - RNA, 19 nt, Artificial Sequence
  Description of Artificial Sequence: Synthetic oligonucleotide
uauuaaggagcauauuauu

SEQ ID NO: 2567827 - RNA, 19 nt, Artificial Sequence
  Description of Artificial Sequence: Synthetic oligonucleotide
aauaagauaguaagaugaa

SEQ ID NO: 2567828 - RNA, 19 nt, Artificial Sequence
  Description of Artificial Sequence: Synthetic oligonucleotide
gauaauguuaguauucaua

SEQ ID NO: 2567829 - RNA, 19 nt, Artificial Sequence
  Description of Artificial Sequence: Synthetic oligonucleotide
ugguuaaaaguauuucuau

SEQ ID NO: 2567830 - RNA, 19 nt, Artificial Sequence
  Description of Artificial Sequence: Synthetic oligonucleotide
uuagcguaggcauaauaau

SEQ ID NO: 2567831 - RNA, 19 nt, Artificial Sequence
  Description of Artificial Sequence: Synthetic oligonucleotide
aaauagguauguaucuugu

SEQ ID NO: 2567832 - RNA, 19 nt, Artificial Sequence
  Description of Artificial Sequence: Synthetic oligonucleotide
uagacuaaacccagauaug

SEQ ID NO: 2567833 - RNA, 19 nt, Artificial Sequence
  Description of Artificial Sequence: Synthetic oligonucleotide
uaguauucauaaagugcag

SEQ ID NO: 2567834 - RNA, 19 nt, Artificial Sequence
  Description of Artificial Sequence: Synthetic oligonucleotide
gguacgaauucuuuuauuc

SEQ ID NO: 2567835 - RNA, 19 nt, Artificial Sequence
  Description of Artificial Sequence: Synthetic oligonucleotide
ugcugagcauuauuccugg

SEQ ID NO: 2567836 - RNA, 19 nt, Artificial Sequence
  Description of Artificial Sequence: Synthetic oligonucleotide
auacuuguuguggaguuuc

SEQ ID NO: 2567837 - RNA, 19 nt, Artificial Sequence
  Description of Artificial Sequence: Synthetic oligonucleotide
uguuucgucauucguuggu

SEQ ID NO: 2567838 - RNA, 19 nt, Artificial Sequence
  Description of Artificial Sequence: Synthetic oligonucleotide
ucuauuuaguaaugugaaa

SEQ ID NO: 2567839 - RNA, 19 nt, Artificial Sequence
  Description of Artificial Sequence: Synthetic oligonucleotide
uugguugugguacgaauuc

SEQ ID NO: 2567840 - RNA, 19 nt, Artificial Sequence
  Description of Artificial Sequence: Synthetic oligonucleotide
ugagcaugaucagauaacu

SEQ ID NO: 2567841 - RNA, 19 nt, Artificial Sequence
  Description of Artificial Sequence: Synthetic oligonucleotide
acuuaauucuauaucacaa

SEQ ID NO: 2567842 - RNA, 19 nt, Artificial Sequence
  Description of Artificial Sequence: Synthetic oligonucleotide
ucuauagacuaaacccaga

SEQ ID NO: 2567843 - RNA, 19 nt, Artificial Sequence
  Description of Artificial Sequence: Synthetic oligonucleotide
cauucguugguugugguac

SEQ ID NO: 2567844 - RNA, 19 nt, Artificial Sequence
  Description of Artificial Sequence: Synthetic oligonucleotide
cuucuaucauguuagcuca

SEQ ID NO: 2567845 - RNA, 19 nt, Artificial Sequence
  Description of Artificial Sequence: Synthetic oligonucleotide
auucuggaauacuuguugu

SEQ ID NO: 2567846 - RNA, 19 nt, Artificial Sequence
  Description of Artificial Sequence: Synthetic oligonucleotide
uucuggaauacuuguugug

SEQ ID NO: 2567847 - RNA, 19 nt, Artificial Sequence
  Description of Artificial Sequence: Synthetic oligonucleotide
uagacaagcuuauggcuca

SEQ ID NO: 2567848 - RNA, 19 nt, Artificial Sequence
  Description of Artificial Sequence: Synthetic oligonucleotide
caagcuuauggcucauugc

SEQ ID NO: 2567849 - RNA, 19 nt, Artificial Sequence
  Description of Artificial Sequence: Synthetic oligonucleotide
auuagcguaggcauaauaa

SEQ ID NO: 2567850 - RNA, 19 nt, Artificial Sequence
  Description of Artificial Sequence: Synthetic oligonucleotide
aagcacauuagcguaggca

SEQ ID NO: 2567851 - RNA, 19 nt, Artificial Sequence
  Description of Artificial Sequence: Synthetic oligonucleotide
cucuauuuaguaaugugaa

SEQ ID NO: 2567852 - RNA, 19 nt, Artificial Sequence
  Description of Artificial Sequence: Synthetic oligonucleotide
uauuucuauugcacuuuga

SEQ ID NO: 2567853 - RNA, 19 nt, Artificial Sequence
  Description of Artificial Sequence: Synthetic oligonucleotide
aggagcauauuauugcaaa

SEQ ID NO: 2567854 - RNA, 19 nt, Artificial Sequence
  Description of Artificial Sequence: Synthetic oligonucleotide
auguauggucuauagacua

SEQ ID NO: 2567855 - RNA, 19 nt, Artificial Sequence
  Description of Artificial Sequence: Synthetic oligonucleotide
agcugcucuauuuaguaau

SEQ ID NO: 2567856 - RNA, 19 nt, Artificial Sequence
  Description of Artificial Sequence: Synthetic oligonucleotide
uguauggucuauagacuaa

SEQ ID NO: 2567857 - RNA, 19 nt, Artificial Sequence
  Description of Artificial Sequence: Synthetic oligonucleotide
uauuccagcucucuuugua

SEQ ID NO: 2567858 - RNA, 19 nt, Artificial Sequence
  Description of Artificial Sequence: Synthetic oligonucleotide
uuccaguuagaaauucaaa

SEQ ID NO: 2567859 - RNA, 19 nt, Artificial Sequence
  Description of Artificial Sequence: Synthetic oligonucleotide
gguaaucuggaguuccuag

SEQ ID NO: 2567860 - RNA, 19 nt, Artificial Sequence
  Description of Artificial Sequence: Synthetic oligonucleotide
aggcauaauaaugacuucu

SEQ ID NO: 2567861 - RNA, 19 nt, Artificial Sequence
  Description of Artificial Sequence: Synthetic oligonucleotide
uuuguaaaagcugcucuau

SEQ ID NO: 2567862 - RNA, 19 nt, Artificial Sequence
  Description of Artificial Sequence: Synthetic oligonucleotide
agcauuauuccuggcuuac

SEQ ID NO: 2567863 - RNA, 19 nt, Artificial Sequence
  Description of Artificial Sequence: Synthetic oligonucleotide
cccagauauggucagaugc

SEQ ID NO: 2567864 - RNA, 19 nt, Artificial Sequence
  Description of Artificial Sequence: Synthetic oligonucleotide
uuucgucauucguugguug

SEQ ID NO: 2567865 - RNA, 19 nt, Artificial Sequence
  Description of Artificial Sequence: Synthetic oligonucleotide
uucauaaagugcagugaau

SEQ ID NO: 2567866 - RNA, 19 nt, Artificial Sequence
  Description of Artificial Sequence: Synthetic oligonucleotide
uaucacaagguuagauaaa

SEQ ID NO: 2567867 - RNA, 19 nt, Artificial Sequence
  Description of Artificial Sequence: Synthetic oligonucleotide
uuagcucaauuuaguauua

SEQ ID NO: 2567868 - RNA, 19 nt, Artificial Sequence
  Description of Artificial Sequence: Synthetic oligonucleotide
uauuccuggcuuacaaaau

SEQ ID NO: 2567869 - RNA, 19 nt, Artificial Sequence
  Description of Artificial Sequence: Synthetic oligonucleotide
gucuauagacuaaacccag

SEQ ID NO: 2567870 - RNA, 19 nt, Artificial Sequence
  Description of Artificial Sequence: Synthetic oligonucleotide
uuguuucgucauucguugg

SEQ ID NO: 2567871 - RNA, 19 nt, Artificial Sequence
  Description of Artificial Sequence: Synthetic oligonucleotide
auguuaguauucauaaagu

SEQ ID NO: 2567872 - RNA, 19 nt, Artificial Sequence
  Description of Artificial Sequence: Synthetic oligonucleotide
aaagccuugaugauuuaua

SEQ ID NO: 2567873 - RNA, 19 nt, Artificial Sequence
  Description of Artificial Sequence: Synthetic oligonucleotide
agcguaggcauaauaauga

SEQ ID NO: 2567874 - RNA, 19 nt, Artificial Sequence
  Description of Artificial Sequence: Synthetic oligonucleotide
uagaauuccgucugucauc

SEQ ID NO: 2567875 - RNA, 19 nt, Artificial Sequence
  Description of Artificial Sequence: Synthetic oligonucleotide
auucguugguugugguacg

SEQ ID NO: 2567876 - RNA, 19 nt, Artificial Sequence
  Description of Artificial Sequence: Synthetic oligonucleotide
uuguauuaucaaugguuaa

SEQ ID NO: 2567877 - RNA, 19 nt, Artificial Sequence
  Description of Artificial Sequence: Synthetic oligonucleotide
gaauucuuuuauuccagcu

SEQ ID NO: 2567878 - RNA, 19 nt, Artificial Sequence
  Description of Artificial Sequence: Synthetic oligonucleotide
aaaagccuugaugauuuau

SEQ ID NO: 2567879 - RNA, 19 nt, Artificial Sequence
  Description of Artificial Sequence: Synthetic oligonucleotide
aucacaagguuagauaaaa

SEQ ID NO: 2567880 - RNA, 19 nt, Artificial Sequence
  Description of Artificial Sequence: Synthetic oligonucleotide
gaugcugagcauuauuccu

SEQ ID NO: 2567881 - RNA, 19 nt, Artificial Sequence
  Description of Artificial Sequence: Synthetic oligonucleotide
ugauaauguuaguauucau

SEQ ID NO: 2567882 - RNA, 19 nt, Artificial Sequence
  Description of Artificial Sequence: Synthetic oligonucleotide
uucgucauucguugguugu

SEQ ID NO: 2567883 - RNA, 19 nt, Artificial Sequence
  Description of Artificial Sequence: Synthetic oligonucleotide
auaagauaguaagaugaaa

SEQ ID NO: 2567884 - RNA, 19 nt, Artificial Sequence
  Description of Artificial Sequence: Synthetic oligonucleotide
guagacaagcuuauggcuc

SEQ ID NO: 2567885 - RNA, 19 nt, Artificial Sequence
  Description of Artificial Sequence: Synthetic oligonucleotide
agugaauaaauaagauagu

SEQ ID NO: 2567886 - RNA, 19 nt, Artificial Sequence
  Description of Artificial Sequence: Synthetic oligonucleotide
uugccucuguauagcacag

SEQ ID NO: 2567887 - RNA, 19 nt, Artificial Sequence
  Description of Artificial Sequence: Synthetic oligonucleotide
guaaucuggaguuccuaga

SEQ ID NO: 2567888 - RNA, 19 nt, Artificial Sequence
  Description of Artificial Sequence: Synthetic oligonucleotide
uaguaaugugaaagcacau

SEQ ID NO: 2567889 - RNA, 19 nt, Artificial Sequence
  Description of Artificial Sequence: Synthetic oligonucleotide
acuccaagugcccaccagu

SEQ ID NO: 2567890 - RNA, 19 nt, Artificial Sequence
  Description of Artificial Sequence: Synthetic oligonucleotide
uguacccaguaagagcuca

SEQ ID NO: 2567891 - RNA, 19 nt, Artificial Sequence
  Description of Artificial Sequence: Synthetic oligonucleotide
guaggcauaauaaugacuu

SEQ ID NO: 2567892 - RNA, 19 nt, Artificial Sequence
  Description of Artificial Sequence: Synthetic oligonucleotide
acgaauucuuuuauuccag

SEQ ID NO: 2567893 - RNA, 19 nt, Artificial Sequence
  Description of Artificial Sequence: Synthetic oligonucleotide
cucauugccucuguauagc

SEQ ID NO: 2567894 - RNA, 19 nt, Artificial Sequence
  Description of Artificial Sequence: Synthetic oligonucleotide
uguggaguuucaucauuaa

SEQ ID NO: 2567895 - RNA, 19 nt, Artificial Sequence
  Description of Artificial Sequence: Synthetic oligonucleotide
aagcugcucuauuuaguaa

SEQ ID NO: 2567896 - RNA, 19 nt, Artificial Sequence
  Description of Artificial Sequence: Synthetic oligonucleotide
auguuagcucaauuuagua

SEQ ID NO: 2567897 - RNA, 19 nt, Artificial Sequence
  Description of Artificial Sequence: Synthetic oligonucleotide
ccaguuagaaauucaaaca

SEQ ID NO: 2567898 - RNA, 19 nt, Artificial Sequence
  Description of Artificial Sequence: Synthetic oligonucleotide
uguaucuuguuucgucauu

SEQ ID NO: 2567899 - RNA, 19 nt, Artificial Sequence
  Description of Artificial Sequence: Synthetic oligonucleotide
cucuguauagcacaguagu

SEQ ID NO: 2567900 - RNA, 19 nt, Artificial Sequence
  Description of Artificial Sequence: Synthetic oligonucleotide
gguaaagauaaauuacaua

SEQ ID NO: 2567901 - RNA, 19 nt, Artificial Sequence
  Description of Artificial Sequence: Synthetic oligonucleotide
aguaaugugaaagcacauu

SEQ ID NO: 2567902 - RNA, 19 nt, Artificial Sequence
  Description of Artificial Sequence: Synthetic oligonucleotide
guaucuuguuucgucauuc

SEQ ID NO: 2567903 - RNA, 19 nt, Artificial Sequence
  Description of Artificial Sequence: Synthetic oligonucleotide
aaaugucauguauggucua

SEQ ID NO: 2567904 - RNA, 19 nt, Artificial Sequence
  Description of Artificial Sequence: Synthetic oligonucleotide
uugugguacgaauucuuuu

SEQ ID NO: 2567905 - RNA, 19 nt, Artificial Sequence
  Description of Artificial Sequence: Synthetic oligonucleotide
auucuauaucacaagguua

SEQ ID NO: 2567906 - RNA, 19 nt, Artificial Sequence
  Description of Artificial Sequence: Synthetic oligonucleotide
aacccagauauggucagau

SEQ ID NO: 2567907 - RNA, 19 nt, Artificial Sequence
  Description of Artificial Sequence: Synthetic oligonucleotide
caguaagagcucaggugcc

SEQ ID NO: 2567908 - RNA, 19 nt, Artificial Sequence
  Description of Artificial Sequence: Synthetic oligonucleotide
uguuguggaguuucaucau

SEQ ID NO: 2567909 - RNA, 19 nt, Artificial Sequence
  Description of Artificial Sequence: Synthetic oligonucleotide
agguaaagauaaauuacau

SEQ ID NO: 2567910 - RNA, 19 nt, Artificial Sequence
  Description of Artificial Sequence: Synthetic oligonucleotide
ugacuucuaucauguuagc

SEQ ID NO: 2567911 - RNA, 19 nt, Artificial Sequence
  Description of Artificial Sequence: Synthetic oligonucleotide
ucuauaucacaagguuaga

SEQ ID NO: 2567912 - RNA, 19 nt, Artificial Sequence
  Description of Artificial Sequence: Synthetic oligonucleotide
uccaagugcccaccagucu

SEQ ID NO: 2567913 - RNA, 19 nt, Artificial Sequence
  Description of Artificial Sequence: Synthetic oligonucleotide
uccgucugucauccacugg

SEQ ID NO: 2567914 - RNA, 19 nt, Artificial Sequence
  Description of Artificial Sequence: Synthetic oligonucleotide
gaccaugggcuguacccag

SEQ ID NO: 2567915 - RNA, 19 nt, Artificial Sequence
  Description of Artificial Sequence: Synthetic oligonucleotide
cuggaauacuuguugugga

SEQ ID NO: 2567916 - RNA, 19 nt, Artificial Sequence
  Description of Artificial Sequence: Synthetic oligonucleotide
uacuuguuguggaguuuca

SEQ ID NO: 2567917 - RNA, 19 nt, Artificial Sequence
  Description of Artificial Sequence: Synthetic oligonucleotide
ggucuauagacuaaaccca

SEQ ID NO: 2567918 - RNA, 19 nt, Artificial Sequence
  Description of Artificial Sequence: Synthetic oligonucleotide
uuccgucugucauccacug

SEQ ID NO: 2567919 - RNA, 19 nt, Artificial Sequence
  Description of Artificial Sequence: Synthetic oligonucleotide
gcucuauuuaguaauguga

SEQ ID NO: 2567920 - RNA, 19 nt, Artificial Sequence
  Description of Artificial Sequence: Synthetic oligonucleotide
ucuaucauguuagcucaau

SEQ ID NO: 2567921 - RNA, 19 nt, Artificial Sequence
  Description of Artificial Sequence: Synthetic oligonucleotide
uaggcauaauaaugacuuc

SEQ ID NO: 2567922 - RNA, 19 nt, Artificial Sequence
  Description of Artificial Sequence: Synthetic oligonucleotide
gucauguauggucuauaga

SEQ ID NO: 2567923 - RNA, 19 nt, Artificial Sequence
  Description of Artificial Sequence: Synthetic oligonucleotide
gacuccaagugcccaccag

SEQ ID NO: 2567924 - RNA, 19 nt, Artificial Sequence
  Description of Artificial Sequence: Synthetic oligonucleotide
gaguuccuagaauuccguc

SEQ ID NO: 2567925 - RNA, 19 nt, Artificial Sequence
  Description of Artificial Sequence: Synthetic oligonucleotide
augcugagcauuauuccug

SEQ ID NO: 2567926 - RNA, 19 nt, Artificial Sequence
  Description of Artificial Sequence: Synthetic oligonucleotide
uauggcucauugccucugu

SEQ ID NO: 2567927 - RNA, 19 nt, Artificial Sequence
  Description of Artificial Sequence: Synthetic oligonucleotide
uuauggcucauugccucug

SEQ ID NO: 2567928 - RNA, 19 nt, Artificial Sequence
  Description of Artificial Sequence: Synthetic oligonucleotide
aaggagcauauuauugcaa

SEQ ID NO: 2567929 - RNA, 19 nt, Artificial Sequence
  Description of Artificial Sequence: Synthetic oligonucleotide
ucauucguugguuguggua

SEQ ID NO: 2567930 - RNA, 19 nt, Artificial Sequence
  Description of Artificial Sequence: Synthetic oligonucleotide
agcucucuuuguauuauca

SEQ ID NO: 2567931 - RNA, 19 nt, Artificial Sequence
  Description of Artificial Sequence: Synthetic oligonucleotide
aaagugcagugaauaaaua

SEQ ID NO: 2567932 - RNA, 19 nt, Artificial Sequence
  Description of Artificial Sequence: Synthetic oligonucleotide
guauuaaggagcauauuau

SEQ ID NO: 2567933 - RNA, 19 nt, Artificial Sequence
  Description of Artificial Sequence: Synthetic oligonucleotide
gaauacuuguuguggaguu

SEQ ID NO: 2567934 - RNA, 19 nt, Artificial Sequence
  Description of Artificial Sequence: Synthetic oligonucleotide
ucgucauucguugguugug

SEQ ID NO: 2567935 - RNA, 19 nt, Artificial Sequence
  Description of Artificial Sequence: Synthetic oligonucleotide
cuauugcacuuugagcaug

SEQ ID NO: 2567936 - RNA, 19 nt, Artificial Sequence
  Description of Artificial Sequence: Synthetic oligonucleotide
caagugcccaccagucuac

SEQ ID NO: 2567937 - RNA, 19 nt, Artificial Sequence
  Description of Artificial Sequence: Synthetic oligonucleotide
cauguauggucuauagacu

SEQ ID NO: 2567938 - RNA, 19 nt, Artificial Sequence
  Description of Artificial Sequence: Synthetic oligonucleotide
aucaaugguuaaaaguauu

SEQ ID NO: 2567939 - RNA, 19 nt, Artificial Sequence
  Description of Artificial Sequence: Synthetic oligonucleotide
agauauggucagaugcuga

SEQ ID NO: 2567940 - RNA, 19 nt, Artificial Sequence
  Description of Artificial Sequence: Synthetic oligonucleotide
uucuaucauguuagcucaa

SEQ ID NO: 2567941 - RNA, 19 nt, Artificial Sequence
  Description of Artificial Sequence: Synthetic oligonucleotide
ugguacgaauucuuuuauu

SEQ ID NO: 2567942 - RNA, 19 nt, Artificial Sequence
  Description of Artificial Sequence: Synthetic oligonucleotide
cuauagacuaaacccagau

SEQ ID NO: 2567943 - RNA, 19 nt, Artificial Sequence
  Description of Artificial Sequence: Synthetic oligonucleotide
gcuuauggcucauugccuc

SEQ ID NO: 2567944 - RNA, 19 nt, Artificial Sequence
  Description of Artificial Sequence: Synthetic oligonucleotide
acccagauauggucagaug

SEQ ID NO: 2567945 - RNA, 19 nt, Artificial Sequence
  Description of Artificial Sequence: Synthetic oligonucleotide
ugguugugguacgaauucu

SEQ ID NO: 2567946 - RNA, 19 nt, Artificial Sequence
  Description of Artificial Sequence: Synthetic oligonucleotide
agauguagacaagcuuaug

SEQ ID NO: 2567947 - RNA, 19 nt, Artificial Sequence
  Description of Artificial Sequence: Synthetic oligonucleotide
guggaguuucaucauuaaa

SEQ ID NO: 2567948 - RNA, 19 nt, Artificial Sequence
  Description of Artificial Sequence: Synthetic oligonucleotide
cuguauagcacaguagugu

SEQ ID NO: 2567949 - RNA, 19 nt, Artificial Sequence
  Description of Artificial Sequence: Synthetic oligonucleotide
uccuagaauuccgucuguc

SEQ ID NO: 2567950 - RNA, 19 nt, Artificial Sequence
  Description of Artificial Sequence: Synthetic oligonucleotide
uucuggccaggggauaucu

SEQ ID NO: 2567951 - RNA, 19 nt, Artificial Sequence
  Description of Artificial Sequence: Synthetic oligonucleotide
aaacccagauauggucaga

SEQ ID NO: 2567952 - RNA, 19 nt, Artificial Sequence
  Description of Artificial Sequence: Synthetic oligonucleotide
gaugauuuauaugcaguuu

SEQ ID NO: 2567953 - RNA, 19 nt, Artificial Sequence
  Description of Artificial Sequence: Synthetic oligonucleotide
guauggucuauagacuaaa

SEQ ID NO: 2567954 - RNA, 19 nt, Artificial Sequence
  Description of Artificial Sequence: Synthetic oligonucleotide
auauucuggaauacuuguu

SEQ ID NO: 2567955 - RNA, 19 nt, Artificial Sequence
  Description of Artificial Sequence: Synthetic oligonucleotide
uucguugguugugguacga

SEQ ID NO: 2567956 - RNA, 19 nt, Artificial Sequence
  Description of Artificial Sequence: Synthetic oligonucleotide
cacauuagcguaggcauaa

SEQ ID NO: 2567957 - RNA, 19 nt, Artificial Sequence
  Description of Artificial Sequence: Synthetic oligonucleotide
agcuuauggcucauugccu

SEQ ID NO: 2567958 - RNA, 19 nt, Artificial Sequence
  Description of Artificial Sequence: Synthetic oligonucleotide
gacuucuaucauguuagcu

SEQ ID NO: 2567959 - RNA, 19 nt, Artificial Sequence
  Description of Artificial Sequence: Synthetic oligonucleotide
ccucuguauagcacaguag

SEQ ID NO: 2567960 - RNA, 19 nt, Artificial Sequence
  Description of Artificial Sequence: Synthetic oligonucleotide
ggagcauauuauugcaaaa

SEQ ID NO: 2567961 - RNA, 19 nt, Artificial Sequence
  Description of Artificial Sequence: Synthetic oligonucleotide
uagcucaauuuaguauuaa

SEQ ID NO: 2567962 - RNA, 19 nt, Artificial Sequence
  Description of Artificial Sequence: Synthetic oligonucleotide
cacaguaguguuuuaguuu

SEQ ID NO: 2567963 - RNA, 19 nt, Artificial Sequence
  Description of Artificial Sequence: Synthetic oligonucleotide
gcuguacccaguaagagcu

SEQ ID NO: 2567964 - RNA, 19 nt, Artificial Sequence
  Description of Artificial Sequence: Synthetic oligonucleotide
cgaauucuuuuauuccagc

SEQ ID NO: 2567965 - RNA, 19 nt, Artificial Sequence
  Description of Artificial Sequence: Synthetic oligonucleotide
gacuaaacccagauauggu

SEQ ID NO: 2567966 - RNA, 19 nt, Artificial Sequence
  Description of Artificial Sequence: Synthetic oligonucleotide
gcaguuuaagguaaagaua

SEQ ID NO: 2567967 - RNA, 19 nt, Artificial Sequence
  Description of Artificial Sequence: Synthetic oligonucleotide
caggaccaugggcuguacc

SEQ ID NO: 2567968 - RNA, 19 nt, Artificial Sequence
  Description of Artificial Sequence: Synthetic oligonucleotide
agacuccaagugcccacca

SEQ ID NO: 2567969 - RNA, 19 nt, Artificial Sequence
  Description of Artificial Sequence: Synthetic oligonucleotide
agcagacuccaagugccca

SEQ ID NO: 2567970 - RNA, 19 nt, Artificial Sequence
  Description of Artificial Sequence: Synthetic oligonucleotide
uggccaggggauaucucuu

SEQ ID NO: 2567971 - RNA, 19 nt, Artificial Sequence
  Description of Artificial Sequence: Synthetic oligonucleotide
cuauaucacaagguuagau

SEQ ID NO: 2567972 - RNA, 19 nt, Artificial Sequence
  Description of Artificial Sequence: Synthetic oligonucleotide
auuuaguauuaaggagcau

SEQ ID NO: 2567973 - RNA, 19 nt, Artificial Sequence
  Description of Artificial Sequence: Synthetic oligonucleotide
gcguaggcauaauaaugac

SEQ ID NO: 2567974 - RNA, 19 nt, Artificial Sequence
  Description of Artificial Sequence: Synthetic oligonucleotide
gcuuacaaaauagguaugu

SEQ ID NO: 2567975 - RNA, 19 nt, Artificial Sequence
  Description of Artificial Sequence: Synthetic oligonucleotide
gcugcucuauuuaguaaug

SEQ ID NO: 2567976 - RNA, 19 nt, Artificial Sequence
  Description of Artificial Sequence: Synthetic oligonucleotide
ccuagaauuccgucuguca

SEQ ID NO: 2567977 - RNA, 19 nt, Artificial Sequence
  Description of Artificial Sequence: Synthetic oligonucleotide
ggcuuacaaaauagguaug

SEQ ID NO: 2567978 - RNA, 19 nt, Artificial Sequence
  Description of Artificial Sequence: Synthetic oligonucleotide
caccagucuacugcaggac

SEQ ID NO: 2567979 - RNA, 19 nt, Artificial Sequence
  Description of Artificial Sequence: Synthetic oligonucleotide
agucuacugcaggaccaug

SEQ ID NO: 2567980 - RNA, 19 nt, Artificial Sequence
  Description of Artificial Sequence: Synthetic oligonucleotide
ggcauaauaaugacuucua

SEQ ID NO: 2567981 - RNA, 19 nt, Artificial Sequence
  Description of Artificial Sequence: Synthetic oligonucleotide
ugucauccacuggggcugc

SEQ ID NO: 2567982 - RNA, 19 nt, Artificial Sequence
  Description of Artificial Sequence: Synthetic oligonucleotide
ucguugguugugguacgaa

SEQ ID NO: 2567983 - RNA, 19 nt, Artificial Sequence
  Description of Artificial Sequence: Synthetic oligonucleotide
augucauguauggucuaua

SEQ ID NO: 2567984 - RNA, 19 nt, Artificial Sequence
  Description of Artificial Sequence: Synthetic oligonucleotide
gcagacuccaagugcccac

SEQ ID NO: 2567985 - RNA, 19 nt, Artificial Sequence
  Description of Artificial Sequence: Synthetic oligonucleotide
caaaauagguauguaucuu

SEQ ID NO: 2567986 - RNA, 19 nt, Artificial Sequence
  Description of Artificial Sequence: Synthetic oligonucleotide
gccucuguauagcacagua

SEQ ID NO: 2567987 - RNA, 19 nt, Artificial Sequence
  Description of Artificial Sequence: Synthetic oligonucleotide
guugguugugguacgaauu

SEQ ID NO: 2567988 - RNA, 19 nt, Artificial Sequence
  Description of Artificial Sequence: Synthetic oligonucleotide
cuuauggcucauugccucu

SEQ ID NO: 2567989 - RNA, 19 nt, Artificial Sequence
  Description of Artificial Sequence: Synthetic oligonucleotide
agguaaucuggaguuccua

SEQ ID NO: 2567990 - RNA, 19 nt, Artificial Sequence
  Description of Artificial Sequence: Synthetic oligonucleotide
ggaauacuuguuguggagu

SEQ ID NO: 2567991 - RNA, 19 nt, Artificial Sequence
  Description of Artificial Sequence: Synthetic oligonucleotide
cagcagauguagacaagcu

SEQ ID NO: 2567992 - RNA, 19 nt, Artificial Sequence
  Description of Artificial Sequence: Synthetic oligonucleotide
cuaucauguuagcucaauu

SEQ ID NO: 2567993 - RNA, 19 nt, Artificial Sequence
  Description of Artificial Sequence: Synthetic oligonucleotide
ugccucuguauagcacagu

SEQ ID NO: 2567994 - RNA, 19 nt, Artificial Sequence
  Description of Artificial Sequence: Synthetic oligonucleotide
gaauuccgucugucaucca

SEQ ID NO: 2567995 - RNA, 19 nt, Artificial Sequence
  Description of Artificial Sequence: Synthetic oligonucleotide
cgucauucguugguugugg

SEQ ID NO: 2567996 - RNA, 19 nt, Artificial Sequence
  Description of Artificial Sequence: Synthetic oligonucleotide
ccagauauggucagaugcu

SEQ ID NO: 2567997 - RNA, 19 nt, Artificial Sequence
  Description of Artificial Sequence: Synthetic oligonucleotide
auugcacuuugagcaugau

SEQ ID NO: 2567998 - RNA, 19 nt, Artificial Sequence
  Description of Artificial Sequence: Synthetic oligonucleotide
guugugguacgaauucuuu

SEQ ID NO: 2567999 - RNA, 19 nt, Artificial Sequence
  Description of Artificial Sequence: Synthetic oligonucleotide
acauuagcguaggcauaau

SEQ ID NO: 2568000 - RNA, 19 nt, Artificial Sequence
  Description of Artificial Sequence: Synthetic oligonucleotide
ggaccaugggcuguaccca

SEQ ID NO: 2568001 - RNA, 19 nt, Artificial Sequence
  Description of Artificial Sequence: Synthetic oligonucleotide
ccaagugcccaccagucua

SEQ ID NO: 2568002 - RNA, 19 nt, Artificial Sequence
  Description of Artificial Sequence: Synthetic oligonucleotide
cuucuggccaggggauauc

SEQ ID NO: 2568003 - RNA, 19 nt, Artificial Sequence
  Description of Artificial Sequence: Synthetic oligonucleotide
cagguaaucuggaguuccu

SEQ ID NO: 2568004 - RNA, 19 nt, Artificial Sequence
  Description of Artificial Sequence: Synthetic oligonucleotide
guuucgucauucguugguu

SEQ ID NO: 2568005 - RNA, 19 nt, Artificial Sequence
  Description of Artificial Sequence: Synthetic oligonucleotide
gcaugaucagauaacuuuu

SEQ ID NO: 2568006 - RNA, 19 nt, Artificial Sequence
  Description of Artificial Sequence: Synthetic oligonucleotide
gguauguaucuuguuucgu

SEQ ID NO: 2568007 - RNA, 19 nt, Artificial Sequence
  Description of Artificial Sequence: Synthetic oligonucleotide
cugcucuauuuaguaaugu

SEQ ID NO: 2568008 - RNA, 19 nt, Artificial Sequence
  Description of Artificial Sequence: Synthetic oligonucleotide
ggucagaugcugagcauua

SEQ ID NO: 2568009 - RNA, 19 nt, Artificial Sequence
  Description of Artificial Sequence: Synthetic oligonucleotide
guauagcacaguaguguuu

SEQ ID NO: 2568010 - RNA, 19 nt, Artificial Sequence
  Description of Artificial Sequence: Synthetic oligonucleotide
gcauuauuccuggcuuaca

SEQ ID NO: 2568011 - RNA, 19 nt, Artificial Sequence
  Description of Artificial Sequence: Synthetic oligonucleotide
ggaguuccuagaauuccgu

SEQ ID NO: 2568012 - RNA, 19 nt, Artificial Sequence
  Description of Artificial Sequence: Synthetic oligonucleotide
gguugugguacgaauucuu

SEQ ID NO: 2568013 - RNA, 19 nt, Artificial Sequence
  Description of Artificial Sequence: Synthetic oligonucleotide
gcacauuagcguaggcaua

SEQ ID NO: 2568014 - RNA, 19 nt, Artificial Sequence
  Description of Artificial Sequence: Synthetic oligonucleotide
gacaagcuuauggcucauu

SEQ ID NO: 2568015 - RNA, 19 nt, Artificial Sequence
  Description of Artificial Sequence: Synthetic oligonucleotide
gucagaugcugagcauuau

SEQ ID NO: 2568016 - RNA, 19 nt, Artificial Sequence
  Description of Artificial Sequence: Synthetic oligonucleotide
gcuucuggccaggggauau

SEQ ID NO: 2568017 - RNA, 19 nt, Artificial Sequence
  Description of Artificial Sequence: Synthetic oligonucleotide
cguugguugugguacgaau

SEQ ID NO: 2568018 - RNA, 19 nt, Artificial Sequence
  Description of Artificial Sequence: Synthetic oligonucleotide
ggccaggggauaucucuuu

SEQ ID NO: 2568019 - RNA, 19 nt, Artificial Sequence
  Description of Artificial Sequence: Synthetic oligonucleotide
gccaggggauaucucuuuu

SEQ ID NO: 2568020 - RNA, 19 nt, Artificial Sequence
  Description of Artificial Sequence: Synthetic oligonucleotide
gcaggaccaugggcuguac

SEQ ID NO: 2568021 - RNA, 19 nt, Artificial Sequence
  Description of Artificial Sequence: Synthetic oligonucleotide
ccagcucucuuuguauuau

SEQ ID NO: 2568022 - RNA, 19 nt, Artificial Sequence
  Description of Artificial Sequence: Synthetic oligonucleotide
aaagcuuuaaagcuccugg

SEQ ID NO: 2568023 - RNA, 19 nt, Artificial Sequence
  Description of Artificial Sequence: Synthetic oligonucleotide
aaugggaaaguccccaucc

SEQ ID NO: 2568024 - RNA, 19 nt, Artificial Sequence
  Description of Artificial Sequence: Synthetic oligonucleotide
aaagcugguggccugagcc

SEQ ID NO: 2568025 - RNA, 19 nt, Artificial Sequence
  Description of Artificial Sequence: Synthetic oligonucleotide
aauaaagcuuuaaagcucc

SEQ ID NO: 2568026 - RNA, 19 nt, Artificial Sequence
  Description of Artificial Sequence: Synthetic oligonucleotide
uuagaagacaaccaguugc

SEQ ID NO: 2568027 - RNA, 19 nt, Artificial Sequence
  Description of Artificial Sequence: Synthetic oligonucleotide
uuaugcaugggacuuacgg

SEQ ID NO: 2568028 - RNA, 19 nt, Artificial Sequence
  Description of Artificial Sequence: Synthetic oligonucleotide
ugaguuacuaucuugcugc

SEQ ID NO: 2568029 - RNA, 19 nt, Artificial Sequence
  Description of Artificial Sequence: Synthetic oligonucleotide
uuauuaagaagcuauaaau

SEQ ID NO: 2568030 - RNA, 19 nt, Artificial Sequence
  Description of Artificial Sequence: Synthetic oligonucleotide
auaaccgaaagacuccucc

SEQ ID NO: 2568031 - RNA, 19 nt, Artificial Sequence
  Description of Artificial Sequence: Synthetic oligonucleotide
aguaccaggaagcugugcc

SEQ ID NO: 2568032 - RNA, 19 nt, Artificial Sequence
  Description of Artificial Sequence: Synthetic oligonucleotide
aaagacuccuccuccacac

SEQ ID NO: 2568033 - RNA, 19 nt, Artificial Sequence
  Description of Artificial Sequence: Synthetic oligonucleotide
agacaauuagaagacaacc

SEQ ID NO: 2568034 - RNA, 19 nt, Artificial Sequence
  Description of Artificial Sequence: Synthetic oligonucleotide
uuuauuaagaagcuauaaa

SEQ ID NO: 2568035 - RNA, 19 nt, Artificial Sequence
  Description of Artificial Sequence: Synthetic oligonucleotide
acaauuagaagacaaccag

SEQ ID NO: 2568036 - RNA, 19 nt, Artificial Sequence
  Description of Artificial Sequence: Synthetic oligonucleotide
auaaaugucccagugauag

SEQ ID NO: 2568037 - RNA, 19 nt, Artificial Sequence
  Description of Artificial Sequence: Synthetic oligonucleotide
auuaagaagcuauaaauaa

SEQ ID NO: 2568038 - RNA, 19 nt, Artificial Sequence
  Description of Artificial Sequence: Synthetic oligonucleotide
aaauaaagcuuuaaagcuc

SEQ ID NO: 2568039 - RNA, 19 nt, Artificial Sequence
  Description of Artificial Sequence: Synthetic oligonucleotide
aaaugucccagugauaggg

SEQ ID NO: 2568040 - RNA, 19 nt, Artificial Sequence
  Description of Artificial Sequence: Synthetic oligonucleotide
ucagaaagcacagggaugg

SEQ ID NO: 2568041 - RNA, 19 nt, Artificial Sequence
  Description of Artificial Sequence: Synthetic oligonucleotide
uaagaagcuauaaauaaau

SEQ ID NO: 2568042 - RNA, 19 nt, Artificial Sequence
  Description of Artificial Sequence: Synthetic oligonucleotide
aagcuauaaauaaauaaag

SEQ ID NO: 2568043 - RNA, 19 nt, Artificial Sequence
  Description of Artificial Sequence: Synthetic oligonucleotide
caauucaucgcucuguacg

SEQ ID NO: 2568044 - RNA, 19 nt, Artificial Sequence
  Description of Artificial Sequence: Synthetic oligonucleotide
uuuuccaucaauucaucgc

SEQ ID NO: 2568045 - RNA, 19 nt, Artificial Sequence
  Description of Artificial Sequence: Synthetic oligonucleotide
uccaccuagacaaagacaa

SEQ ID NO: 2568046 - RNA, 19 nt, Artificial Sequence
  Description of Artificial Sequence: Synthetic oligonucleotide
uauuaagaagcuauaaaua

SEQ ID NO: 2568047 - RNA, 19 nt, Artificial Sequence
  Description of Artificial Sequence: Synthetic oligonucleotide
cuaauguucauucuccacc

SEQ ID NO: 2568048 - RNA, 19 nt, Artificial Sequence
  Description of Artificial Sequence: Synthetic oligonucleotide
agcuauaaauaaauaaagc

SEQ ID NO: 2568049 - RNA, 19 nt, Artificial Sequence
  Description of Artificial Sequence: Synthetic oligonucleotide
agaagcuauaaauaaauaa

SEQ ID NO: 2568050 - RNA, 19 nt, Artificial Sequence
  Description of Artificial Sequence: Synthetic oligonucleotide
agagcuguuccuuccaacc

SEQ ID NO: 2568051 - RNA, 19 nt, Artificial Sequence
  Description of Artificial Sequence: Synthetic oligonucleotide
cugagaaugggaaaguccc

SEQ ID NO: 2568052 - RNA, 19 nt, Artificial Sequence
  Description of Artificial Sequence: Synthetic oligonucleotide
acaaagacaauuagaagac

SEQ ID NO: 2568053 - RNA, 19 nt, Artificial Sequence
  Description of Artificial Sequence: Synthetic oligonucleotide
uguacgaauaaccgaaaga

SEQ ID NO: 2568054 - RNA, 19 nt, Artificial Sequence
  Description of Artificial Sequence: Synthetic oligonucleotide
uuuccaucaauucaucgcu

SEQ ID NO: 2568055 - RNA, 19 nt, Artificial Sequence
  Description of Artificial Sequence: Synthetic oligonucleotide
aagcuuuaaagcuccuggg

SEQ ID NO: 2568056 - RNA, 19 nt, Artificial Sequence
  Description of Artificial Sequence: Synthetic oligonucleotide
uuaagaagcuauaaauaaa

SEQ ID NO: 2568057 - RNA, 19 nt, Artificial Sequence
  Description of Artificial Sequence: Synthetic oligonucleotide
uguauaaaugucccaguga

SEQ ID NO: 2568058 - RNA, 19 nt, Artificial Sequence
  Description of Artificial Sequence: Synthetic oligonucleotide
acgaauaaccgaaagacuc

SEQ ID NO: 2568059 - RNA, 19 nt, Artificial Sequence
  Description of Artificial Sequence: Synthetic oligonucleotide
uuagcugagaaugggaaag

SEQ ID NO: 2568060 - RNA, 19 nt, Artificial Sequence
  Description of Artificial Sequence: Synthetic oligonucleotide
gaagcuauaaauaaauaaa

SEQ ID NO: 2568061 - RNA, 19 nt, Artificial Sequence
  Description of Artificial Sequence: Synthetic oligonucleotide
ucuaggguuuauuucaucu

SEQ ID NO: 2568062 - RNA, 19 nt, Artificial Sequence
  Description of Artificial Sequence: Synthetic oligonucleotide
uaggguuuauuucaucugc

SEQ ID NO: 2568063 - RNA, 19 nt, Artificial Sequence
  Description of Artificial Sequence: Synthetic oligonucleotide
aagacaauuagaagacaac

SEQ ID NO: 2568064 - RNA, 19 nt, Artificial Sequence
  Description of Artificial Sequence: Synthetic oligonucleotide
gaugcuuuuaugcauggga

SEQ ID NO: 2568065 - RNA, 19 nt, Artificial Sequence
  Description of Artificial Sequence: Synthetic oligonucleotide
auuucaucugcuaauguuc

SEQ ID NO: 2568066 - RNA, 19 nt, Artificial Sequence
  Description of Artificial Sequence: Synthetic oligonucleotide
uuuauuucaucugcuaaug

SEQ ID NO: 2568067 - RNA, 19 nt, Artificial Sequence
  Description of Artificial Sequence: Synthetic oligonucleotide
aauggaugcuuuuaugcau

SEQ ID NO: 2568068 - RNA, 19 nt, Artificial Sequence
  Description of Artificial Sequence: Synthetic oligonucleotide
aauucaucgcucuguacga

SEQ ID NO: 2568069 - RNA, 19 nt, Artificial Sequence
  Description of Artificial Sequence: Synthetic oligonucleotide
ucugcuaauguucauucuc

SEQ ID NO: 2568070 - RNA, 19 nt, Artificial Sequence
  Description of Artificial Sequence: Synthetic oligonucleotide
guacgaauaaccgaaagac

SEQ ID NO: 2568071 - RNA, 19 nt, Artificial Sequence
  Description of Artificial Sequence: Synthetic oligonucleotide
aaccgaaagacuccuccuc

SEQ ID NO: 2568072 - RNA, 19 nt, Artificial Sequence
  Description of Artificial Sequence: Synthetic oligonucleotide
cucgaaaggucauucagag

SEQ ID NO: 2568073 - RNA, 19 nt, Artificial Sequence
  Description of Artificial Sequence: Synthetic oligonucleotide
gaggguugugcauacaggc

SEQ ID NO: 2568074 - RNA, 19 nt, Artificial Sequence
  Description of Artificial Sequence: Synthetic oligonucleotide
aguggaacaguuccaguuc

SEQ ID NO: 2568075 - RNA, 19 nt, Artificial Sequence
  Description of Artificial Sequence: Synthetic oligonucleotide
ggggcagugaaucagaaag

SEQ ID NO: 2568076 - RNA, 19 nt, Artificial Sequence
  Description of Artificial Sequence: Synthetic oligonucleotide
aaagacaauuagaagacaa

SEQ ID NO: 2568077 - RNA, 19 nt, Artificial Sequence
  Description of Artificial Sequence: Synthetic oligonucleotide
accgaaagacuccuccucc

SEQ ID NO: 2568078 - RNA, 19 nt, Artificial Sequence
  Description of Artificial Sequence: Synthetic oligonucleotide
uuucaucugcuaauguuca

SEQ ID NO: 2568079 - RNA, 19 nt, Artificial Sequence
  Description of Artificial Sequence: Synthetic oligonucleotide
aauuagaagacaaccaguu

SEQ ID NO: 2568080 - RNA, 19 nt, Artificial Sequence
  Description of Artificial Sequence: Synthetic oligonucleotide
uuuuauuaagaagcuauaa

SEQ ID NO: 2568081 - RNA, 19 nt, Artificial Sequence
  Description of Artificial Sequence: Synthetic oligonucleotide
ugcugugaguaccaggaag

SEQ ID NO: 2568082 - RNA, 19 nt, Artificial Sequence
  Description of Artificial Sequence: Synthetic oligonucleotide
uggggaagcacccuguucu

SEQ ID NO: 2568083 - RNA, 19 nt, Artificial Sequence
  Description of Artificial Sequence: Synthetic oligonucleotide
uaauguucauucuccaccu

SEQ ID NO: 2568084 - RNA, 19 nt, Artificial Sequence
  Description of Artificial Sequence: Synthetic oligonucleotide
aagacaaccaguugcuuuu

SEQ ID NO: 2568085 - RNA, 19 nt, Artificial Sequence
  Description of Artificial Sequence: Synthetic oligonucleotide
uaugcaugggacuuacgga

SEQ ID NO: 2568086 - RNA, 19 nt, Artificial Sequence
  Description of Artificial Sequence: Synthetic oligonucleotide
uauuucaucugcuaauguu

SEQ ID NO: 2568087 - RNA, 19 nt, Artificial Sequence
  Description of Artificial Sequence: Synthetic oligonucleotide
uuacggauugcugguaugg

SEQ ID NO: 2568088 - RNA, 19 nt, Artificial Sequence
  Description of Artificial Sequence: Synthetic oligonucleotide
agcccuuguauaaaugucc

SEQ ID NO: 2568089 - RNA, 19 nt, Artificial Sequence
  Description of Artificial Sequence: Synthetic oligonucleotide
auuagaagacaaccaguug

SEQ ID NO: 2568090 - RNA, 19 nt, Artificial Sequence
  Description of Artificial Sequence: Synthetic oligonucleotide
auguucauucuccaccuag

SEQ ID NO: 2568091 - RNA, 19 nt, Artificial Sequence
  Description of Artificial Sequence: Synthetic oligonucleotide
gacugaguuacuaucuugc

SEQ ID NO: 2568092 - RNA, 19 nt, Artificial Sequence
  Description of Artificial Sequence: Synthetic oligonucleotide
gaacaguuccaguucagac

SEQ ID NO: 2568093 - RNA, 19 nt, Artificial Sequence
  Description of Artificial Sequence: Synthetic oligonucleotide
aaagcuccuggguucaagu

SEQ ID NO: 2568094 - RNA, 19 nt, Artificial Sequence
  Description of Artificial Sequence: Synthetic oligonucleotide
cugcuaauguucauucucc

SEQ ID NO: 2568095 - RNA, 19 nt, Artificial Sequence
  Description of Artificial Sequence: Synthetic oligonucleotide
gggacuuacggauugcugg

SEQ ID NO: 2568096 - RNA, 19 nt, Artificial Sequence
  Description of Artificial Sequence: Synthetic oligonucleotide
uacgaauaaccgaaagacu

SEQ ID NO: 2568097 - RNA, 19 nt, Artificial Sequence
  Description of Artificial Sequence: Synthetic oligonucleotide
agcuccuggguucaagugg

SEQ ID NO: 2568098 - RNA, 19 nt, Artificial Sequence
  Description of Artificial Sequence: Synthetic oligonucleotide
cuuuaaagcuccuggguuc

SEQ ID NO: 2568099 - RNA, 19 nt, Artificial Sequence
  Description of Artificial Sequence: Synthetic oligonucleotide
gaugcugugaguaccagga

SEQ ID NO: 2568100 - RNA, 19 nt, Artificial Sequence
  Description of Artificial Sequence: Synthetic oligonucleotide
cuagacaaagacaauuaga

SEQ ID NO: 2568101 - RNA, 19 nt, Artificial Sequence
  Description of Artificial Sequence: Synthetic oligonucleotide
ucgcucuguacgaauaacc

SEQ ID NO: 2568102 - RNA, 19 nt, Artificial Sequence
  Description of Artificial Sequence: Synthetic oligonucleotide
aaugucccagugauagggc

SEQ ID NO: 2568103 - RNA, 19 nt, Artificial Sequence
  Description of Artificial Sequence: Synthetic oligonucleotide
uguucauucuccaccuaga

SEQ ID NO: 2568104 - RNA, 19 nt, Artificial Sequence
  Description of Artificial Sequence: Synthetic oligonucleotide
uuauuucaucugcuaaugu

SEQ ID NO: 2568105 - RNA, 19 nt, Artificial Sequence
  Description of Artificial Sequence: Synthetic oligonucleotide
ucuccaccuagacaaagac

SEQ ID NO: 2568106 - RNA, 19 nt, Artificial Sequence
  Description of Artificial Sequence: Synthetic oligonucleotide
aaccuuagcugagaauggg

SEQ ID NO: 2568107 - RNA, 19 nt, Artificial Sequence
  Description of Artificial Sequence: Synthetic oligonucleotide
agacacguugccuggacag

SEQ ID NO: 2568108 - RNA, 19 nt, Artificial Sequence
  Description of Artificial Sequence: Synthetic oligonucleotide
augcuuuuaugcaugggac

SEQ ID NO: 2568109 - RNA, 19 nt, Artificial Sequence
  Description of Artificial Sequence: Synthetic oligonucleotide
ugucgguagggcagcaagg

SEQ ID NO: 2568110 - RNA, 19 nt, Artificial Sequence
  Description of Artificial Sequence: Synthetic oligonucleotide
cauacaggcccucgaaagg

SEQ ID NO: 2568111 - RNA, 19 nt, Artificial Sequence
  Description of Artificial Sequence: Synthetic oligonucleotide
auccuggccauucacuguc

SEQ ID NO: 2568112 - RNA, 19 nt, Artificial Sequence
  Description of Artificial Sequence: Synthetic oligonucleotide
ccaauggaugcuuuuaugc

SEQ ID NO: 2568113 - RNA, 19 nt, Artificial Sequence
  Description of Artificial Sequence: Synthetic oligonucleotide
uuccuuccaaccuuagcug

SEQ ID NO: 2568114 - RNA, 19 nt, Artificial Sequence
  Description of Artificial Sequence: Synthetic oligonucleotide
aagcccuuguauaaauguc

SEQ ID NO: 2568115 - RNA, 19 nt, Artificial Sequence
  Description of Artificial Sequence: Synthetic oligonucleotide
agcuuuaaagcuccugggu

SEQ ID NO: 2568116 - RNA, 19 nt, Artificial Sequence
  Description of Artificial Sequence: Synthetic oligonucleotide
caucugcuaauguucauuc

SEQ ID NO: 2568117 - RNA, 19 nt, Artificial Sequence
  Description of Artificial Sequence: Synthetic oligonucleotide
uuuaugcaugggacuuacg

SEQ ID NO: 2568118 - RNA, 19 nt, Artificial Sequence
  Description of Artificial Sequence: Synthetic oligonucleotide
uggaugcuuuuaugcaugg

SEQ ID NO: 2568119 - RNA, 19 nt, Artificial Sequence
  Description of Artificial Sequence: Synthetic oligonucleotide
ugcuuuuaugcaugggacu

SEQ ID NO: 2568120 - RNA, 19 nt, Artificial Sequence
  Description of Artificial Sequence: Synthetic oligonucleotide
ugcuucccacuccaggagg

SEQ ID NO: 2568121 - RNA, 19 nt, Artificial Sequence
  Description of Artificial Sequence: Synthetic oligonucleotide
uaggcaggguccuuggagc

SEQ ID NO: 2568122 - RNA, 19 nt, Artificial Sequence
  Description of Artificial Sequence: Synthetic oligonucleotide
uccaucaauucaucgcucu

SEQ ID NO: 2568123 - RNA, 19 nt, Artificial Sequence
  Description of Artificial Sequence: Synthetic oligonucleotide
cugaguuacuaucuugcug

SEQ ID NO: 2568124 - RNA, 19 nt, Artificial Sequence
  Description of Artificial Sequence: Synthetic oligonucleotide
uaaagcuuuaaagcuccug

SEQ ID NO: 2568125 - RNA, 19 nt, Artificial Sequence
  Description of Artificial Sequence: Synthetic oligonucleotide
ugggaaaguccccauccug

SEQ ID NO: 2568126 - RNA, 19 nt, Artificial Sequence
  Description of Artificial Sequence: Synthetic oligonucleotide
guauaaaugucccagugau

SEQ ID NO: 2568127 - RNA, 19 nt, Artificial Sequence
  Description of Artificial Sequence: Synthetic oligonucleotide
cucuguacgaauaaccgaa

SEQ ID NO: 2568128 - RNA, 19 nt, Artificial Sequence
  Description of Artificial Sequence: Synthetic oligonucleotide
guugguguggcccugcauc

SEQ ID NO: 2568129 - RNA, 19 nt, Artificial Sequence
  Description of Artificial Sequence: Synthetic oligonucleotide
guuacuaucuugcugcacu

SEQ ID NO: 2568130 - RNA, 19 nt, Artificial Sequence
  Description of Artificial Sequence: Synthetic oligonucleotide
uuuaaagcuccuggguuca

SEQ ID NO: 2568131 - RNA, 19 nt, Artificial Sequence
  Description of Artificial Sequence: Synthetic oligonucleotide
uuuuaugcaugggacuuac

SEQ ID NO: 2568132 - RNA, 19 nt, Artificial Sequence
  Description of Artificial Sequence: Synthetic oligonucleotide
uucuccaccuagacaaaga

SEQ ID NO: 2568133 - RNA, 19 nt, Artificial Sequence
  Description of Artificial Sequence: Synthetic oligonucleotide
uccuccuccacacuuuuau

SEQ ID NO: 2568134 - RNA, 19 nt, Artificial Sequence
  Description of Artificial Sequence: Synthetic oligonucleotide
ugugcauacaggcccucga

SEQ ID NO: 2568135 - RNA, 19 nt, Artificial Sequence
  Description of Artificial Sequence: Synthetic oligonucleotide
auggugggaacaguggcac

SEQ ID NO: 2568136 - RNA, 19 nt, Artificial Sequence
  Description of Artificial Sequence: Synthetic oligonucleotide
cuuggagcuguagggaugg

SEQ ID NO: 2568137 - RNA, 19 nt, Artificial Sequence
  Description of Artificial Sequence: Synthetic oligonucleotide
aauaaccgaaagacuccuc

SEQ ID NO: 2568138 - RNA, 19 nt, Artificial Sequence
  Description of Artificial Sequence: Synthetic oligonucleotide
acuccgguugguguggccc

SEQ ID NO: 2568139 - RNA, 19 nt, Artificial Sequence
  Description of Artificial Sequence: Synthetic oligonucleotide
aaaggucauucagagcugu

SEQ ID NO: 2568140 - RNA, 19 nt, Artificial Sequence
  Description of Artificial Sequence: Synthetic oligonucleotide
ugcuaauguucauucucca

SEQ ID NO: 2568141 - RNA, 19 nt, Artificial Sequence
  Description of Artificial Sequence: Synthetic oligonucleotide
cuguacgaauaaccgaaag

SEQ ID NO: 2568142 - RNA, 19 nt, Artificial Sequence
  Description of Artificial Sequence: Synthetic oligonucleotide
aagcuccuggguucaagug

SEQ ID NO: 2568143 - RNA, 19 nt, Artificial Sequence
  Description of Artificial Sequence: Synthetic oligonucleotide
aggucauucagagcuguuc

SEQ ID NO: 2568144 - RNA, 19 nt, Artificial Sequence
  Description of Artificial Sequence: Synthetic oligonucleotide
acaaccaguugcuuuucca

SEQ ID NO: 2568145 - RNA, 19 nt, Artificial Sequence
  Description of Artificial Sequence: Synthetic oligonucleotide
ccaaccuuagcugagaaug

SEQ ID NO: 2568146 - RNA, 19 nt, Artificial Sequence
  Description of Artificial Sequence: Synthetic oligonucleotide
caauggaugcuuuuaugca

SEQ ID NO: 2568147 - RNA, 19 nt, Artificial Sequence
  Description of Artificial Sequence: Synthetic oligonucleotide
acugaguuacuaucuugcu

SEQ ID NO: 2568148 - RNA, 19 nt, Artificial Sequence
  Description of Artificial Sequence: Synthetic oligonucleotide
ugucccagugauagggcug

SEQ ID NO: 2568149 - RNA, 19 nt, Artificial Sequence
  Description of Artificial Sequence: Synthetic oligonucleotide
cuuaggcagggguggacgg

SEQ ID NO: 2568150 - RNA, 19 nt, Artificial Sequence
  Description of Artificial Sequence: Synthetic oligonucleotide
aggagaugccccuggguag

SEQ ID NO: 2568151 - RNA, 19 nt, Artificial Sequence
  Description of Artificial Sequence: Synthetic oligonucleotide
uaaccgaaagacuccuccu

SEQ ID NO: 2568152 - RNA, 19 nt, Artificial Sequence
  Description of Artificial Sequence: Synthetic oligonucleotide
uccuuccaaccuuagcuga

SEQ ID NO: 2568153 - RNA, 19 nt, Artificial Sequence
  Description of Artificial Sequence: Synthetic oligonucleotide
agcugugccccaaagcugg

SEQ ID NO: 2568154 - RNA, 19 nt, Artificial Sequence
  Description of Artificial Sequence: Synthetic oligonucleotide
ugggacuuacggauugcug

SEQ ID NO: 2568155 - RNA, 19 nt, Artificial Sequence
  Description of Artificial Sequence: Synthetic oligonucleotide
ucaacuccgguuggugugg

SEQ ID NO: 2568156 - RNA, 19 nt, Artificial Sequence
  Description of Artificial Sequence: Synthetic oligonucleotide
ugucaacuccgguuggugu

SEQ ID NO: 2568157 - RNA, 19 nt, Artificial Sequence
  Description of Artificial Sequence: Synthetic oligonucleotide
uucugagaugcugugagua

SEQ ID NO: 2568158 - RNA, 19 nt, Artificial Sequence
  Description of Artificial Sequence: Synthetic oligonucleotide
aacuccgguugguguggcc

SEQ ID NO: 2568159 - RNA, 19 nt, Artificial Sequence
  Description of Artificial Sequence: Synthetic oligonucleotide
uggaacaguuccaguucag

SEQ ID NO: 2568160 - RNA, 19 nt, Artificial Sequence
  Description of Artificial Sequence: Synthetic oligonucleotide
aggguugugcauacaggcc

SEQ ID NO: 2568161 - RNA, 19 nt, Artificial Sequence
  Description of Artificial Sequence: Synthetic oligonucleotide
uucagagcuguuccuucca

SEQ ID NO: 2568162 - RNA, 19 nt, Artificial Sequence
  Description of Artificial Sequence: Synthetic oligonucleotide
acggauugcugguauggug

SEQ ID NO: 2568163 - RNA, 19 nt, Artificial Sequence
  Description of Artificial Sequence: Synthetic oligonucleotide
guucauucuccaccuagac

SEQ ID NO: 2568164 - RNA, 19 nt, Artificial Sequence
  Description of Artificial Sequence: Synthetic oligonucleotide
cugagaugcugugaguacc

SEQ ID NO: 2568165 - RNA, 19 nt, Artificial Sequence
  Description of Artificial Sequence: Synthetic oligonucleotide
ggguugugcauacaggccc

SEQ ID NO: 2568166 - RNA, 19 nt, Artificial Sequence
  Description of Artificial Sequence: Synthetic oligonucleotide
uggagcuguagggaugggg

SEQ ID NO: 2568167 - RNA, 19 nt, Artificial Sequence
  Description of Artificial Sequence: Synthetic oligonucleotide
gucaacuccgguuggugug

SEQ ID NO: 2568168 - RNA, 19 nt, Artificial Sequence
  Description of Artificial Sequence: Synthetic oligonucleotide
gcauacaggcccucgaaag

SEQ ID NO: 2568169 - RNA, 19 nt, Artificial Sequence
  Description of Artificial Sequence: Synthetic oligonucleotide
ucgaaaggucauucagagc

SEQ ID NO: 2568170 - RNA, 19 nt, Artificial Sequence
  Description of Artificial Sequence: Synthetic oligonucleotide
ucgggacugaguuacuauc

SEQ ID NO: 2568171 - RNA, 19 nt, Artificial Sequence
  Description of Artificial Sequence: Synthetic oligonucleotide
ugugaguaccaggaagcug

SEQ ID NO: 2568172 - RNA, 19 nt, Artificial Sequence
  Description of Artificial Sequence: Synthetic oligonucleotide
ccuuguauaaaugucccag

SEQ ID NO: 2568173 - RNA, 19 nt, Artificial Sequence
  Description of Artificial Sequence: Synthetic oligonucleotide
ucuguacgaauaaccgaaa

SEQ ID NO: 2568174 - RNA, 19 nt, Artificial Sequence
  Description of Artificial Sequence: Synthetic oligonucleotide
ucaauucaucgcucuguac

SEQ ID NO: 2568175 - RNA, 19 nt, Artificial Sequence
  Description of Artificial Sequence: Synthetic oligonucleotide
ugcauacaggcccucgaaa

SEQ ID NO: 2568176 - RNA, 19 nt, Artificial Sequence
  Description of Artificial Sequence: Synthetic oligonucleotide
gaaagacuccuccuccaca

SEQ ID NO: 2568177 - RNA, 19 nt, Artificial Sequence
  Description of Artificial Sequence: Synthetic oligonucleotide
gugucgguagggcagcaag

SEQ ID NO: 2568178 - RNA, 19 nt, Artificial Sequence
  Description of Artificial Sequence: Synthetic oligonucleotide
auggggaagcacccuguuc

SEQ ID NO: 2568179 - RNA, 19 nt, Artificial Sequence
  Description of Artificial Sequence: Synthetic oligonucleotide
guugccuggacaguccugc

SEQ ID NO: 2568180 - RNA, 19 nt, Artificial Sequence
  Description of Artificial Sequence: Synthetic oligonucleotide
aucgcucuguacgaauaac

SEQ ID NO: 2568181 - RNA, 19 nt, Artificial Sequence
  Description of Artificial Sequence: Synthetic oligonucleotide
aguuacuaucuugcugcac

SEQ ID NO: 2568182 - RNA, 19 nt, Artificial Sequence
  Description of Artificial Sequence: Synthetic oligonucleotide
gagaaugggaaagucccca

SEQ ID NO: 2568183 - RNA, 19 nt, Artificial Sequence
  Description of Artificial Sequence: Synthetic oligonucleotide
ucaucgcucuguacgaaua

SEQ ID NO: 2568184 - RNA, 19 nt, Artificial Sequence
  Description of Artificial Sequence: Synthetic oligonucleotide
cauucagagcuguuccuuc

SEQ ID NO: 2568185 - RNA, 19 nt, Artificial Sequence
  Description of Artificial Sequence: Synthetic oligonucleotide
gacaaccaguugcuuuucc

SEQ ID NO: 2568186 - RNA, 19 nt, Artificial Sequence
  Description of Artificial Sequence: Synthetic oligonucleotide
uaaagcuccuggguucaag

SEQ ID NO: 2568187 - RNA, 19 nt, Artificial Sequence
  Description of Artificial Sequence: Synthetic oligonucleotide
agcugagaaugggaaaguc

SEQ ID NO: 2568188 - RNA, 19 nt, Artificial Sequence
  Description of Artificial Sequence: Synthetic oligonucleotide
aucaauucaucgcucugua

SEQ ID NO: 2568189 - RNA, 19 nt, Artificial Sequence
  Description of Artificial Sequence: Synthetic oligonucleotide
cuuacggauugcugguaug

SEQ ID NO: 2568190 - RNA, 19 nt, Artificial Sequence
  Description of Artificial Sequence: Synthetic oligonucleotide
gaaugggaaaguccccauc

SEQ ID NO: 2568191 - RNA, 19 nt, Artificial Sequence
  Description of Artificial Sequence: Synthetic oligonucleotide
gguggccugagccuuaggc

SEQ ID NO: 2568192 - RNA, 19 nt, Artificial Sequence
  Description of Artificial Sequence: Synthetic oligonucleotide
gguauggugggaacagugg

SEQ ID NO: 2568193 - RNA, 19 nt, Artificial Sequence
  Description of Artificial Sequence: Synthetic oligonucleotide
guaccaggaagcugugccc

SEQ ID NO: 2568194 - RNA, 19 nt, Artificial Sequence
  Description of Artificial Sequence: Synthetic oligonucleotide
uggacaguccugcgguccc

SEQ ID NO: 2568195 - RNA, 19 nt, Artificial Sequence
  Description of Artificial Sequence: Synthetic oligonucleotide
uccuccacacuuuuauuuu

SEQ ID NO: 2568196 - RNA, 19 nt, Artificial Sequence
  Description of Artificial Sequence: Synthetic oligonucleotide
acuuacggauugcugguau

SEQ ID NO: 2568197 - RNA, 19 nt, Artificial Sequence
  Description of Artificial Sequence: Synthetic oligonucleotide
ucaucugcuaauguucauu

SEQ ID NO: 2568198 - RNA, 19 nt, Artificial Sequence
  Description of Artificial Sequence: Synthetic oligonucleotide
ccuagacaaagacaauuag

SEQ ID NO: 2568199 - RNA, 19 nt, Artificial Sequence
  Description of Artificial Sequence: Synthetic oligonucleotide
aucagaaagcacagggaug

SEQ ID NO: 2568200 - RNA, 19 nt, Artificial Sequence
  Description of Artificial Sequence: Synthetic oligonucleotide
agcaaggugccucgggacu

SEQ ID NO: 2568201 - RNA, 19 nt, Artificial Sequence
  Description of Artificial Sequence: Synthetic oligonucleotide
gaaaggucauucagagcug

SEQ ID NO: 2568202 - RNA, 19 nt, Artificial Sequence
  Description of Artificial Sequence: Synthetic oligonucleotide
aggaagcugugccccaaag

SEQ ID NO: 2568203 - RNA, 19 nt, Artificial Sequence
  Description of Artificial Sequence: Synthetic oligonucleotide
acacguugccuggacaguc

SEQ ID NO: 2568204 - RNA, 19 nt, Artificial Sequence
  Description of Artificial Sequence: Synthetic oligonucleotide
ucgguagggcagcaaggug

SEQ ID NO: 2568205 - RNA, 19 nt, Artificial Sequence
  Description of Artificial Sequence: Synthetic oligonucleotide
uuaggcagggguggacggg

SEQ ID NO: 2568206 - RNA, 19 nt, Artificial Sequence
  Description of Artificial Sequence: Synthetic oligonucleotide
ggaagcacccuguucugag

SEQ ID NO: 2568207 - RNA, 19 nt, Artificial Sequence
  Description of Artificial Sequence: Synthetic oligonucleotide
uuccaucaauucaucgcuc

SEQ ID NO: 2568208 - RNA, 19 nt, Artificial Sequence
  Description of Artificial Sequence: Synthetic oligonucleotide
cacacaagcccuuguauaa

SEQ ID NO: 2568209 - RNA, 19 nt, Artificial Sequence
  Description of Artificial Sequence: Synthetic oligonucleotide
aucugcuaauguucauucu

SEQ ID NO: 2568210 - RNA, 19 nt, Artificial Sequence
  Description of Artificial Sequence: Synthetic oligonucleotide
gugaguaccaggaagcugu

SEQ ID NO: 2568211 - RNA, 19 nt, Artificial Sequence
  Description of Artificial Sequence: Synthetic oligonucleotide
ugccucgggacugaguuac

SEQ ID NO: 2568212 - RNA, 19 nt, Artificial Sequence
  Description of Artificial Sequence: Synthetic oligonucleotide
auacaggcccucgaaaggu

SEQ ID NO: 2568213 - RNA, 19 nt, Artificial Sequence
  Description of Artificial Sequence: Synthetic oligonucleotide
uuccaaccuuagcugagaa

SEQ ID NO: 2568214 - RNA, 19 nt, Artificial Sequence
  Description of Artificial Sequence: Synthetic oligonucleotide
caauuagaagacaaccagu

SEQ ID NO: 2568215 - RNA, 19 nt, Artificial Sequence
  Description of Artificial Sequence: Synthetic oligonucleotide
uucaucgcucuguacgaau

SEQ ID NO: 2568216 - RNA, 19 nt, Artificial Sequence
  Description of Artificial Sequence: Synthetic oligonucleotide
gcugugaguaccaggaagc

SEQ ID NO: 2568217 - RNA, 19 nt, Artificial Sequence
  Description of Artificial Sequence: Synthetic oligonucleotide
aauguucauucuccaccua

SEQ ID NO: 2568218 - RNA, 19 nt, Artificial Sequence
  Description of Artificial Sequence: Synthetic oligonucleotide
ucagagcuguuccuuccaa

SEQ ID NO: 2568219 - RNA, 19 nt, Artificial Sequence
  Description of Artificial Sequence: Synthetic oligonucleotide
ugaguaccaggaagcugug

SEQ ID NO: 2568220 - RNA, 19 nt, Artificial Sequence
  Description of Artificial Sequence: Synthetic oligonucleotide
gaagacaaccaguugcuuu

SEQ ID NO: 2568221 - RNA, 19 nt, Artificial Sequence
  Description of Artificial Sequence: Synthetic oligonucleotide
uccuuggagcuguagggau

SEQ ID NO: 2568222 - RNA, 19 nt, Artificial Sequence
  Description of Artificial Sequence: Synthetic oligonucleotide
uuacuaucuugcugcacuu

SEQ ID NO: 2568223 - RNA, 19 nt, Artificial Sequence
  Description of Artificial Sequence: Synthetic oligonucleotide
agccaauggaugcuuuuau

SEQ ID NO: 2568224 - RNA, 19 nt, Artificial Sequence
  Description of Artificial Sequence: Synthetic oligonucleotide
guggaacaguuccaguuca

SEQ ID NO: 2568225 - RNA, 19 nt, Artificial Sequence
  Description of Artificial Sequence: Synthetic oligonucleotide
agcuguagggauggggaag

SEQ ID NO: 2568226 - RNA, 19 nt, Artificial Sequence
  Description of Artificial Sequence: Synthetic oligonucleotide
ugggaacaguggcacacaa

SEQ ID NO: 2568227 - RNA, 19 nt, Artificial Sequence
  Description of Artificial Sequence: Synthetic oligonucleotide
acaguccugcggucccugc

SEQ ID NO: 2568228 - RNA, 19 nt, Artificial Sequence
  Description of Artificial Sequence: Synthetic oligonucleotide
aguugcuuuuccaucaauu

SEQ ID NO: 2568229 - RNA, 19 nt, Artificial Sequence
  Description of Artificial Sequence: Synthetic oligonucleotide
ggacugaguuacuaucuug

SEQ ID NO: 2568230 - RNA, 19 nt, Artificial Sequence
  Description of Artificial Sequence: Synthetic oligonucleotide
gcugagaaugggaaagucc

SEQ ID NO: 2568231 - RNA, 19 nt, Artificial Sequence
  Description of Artificial Sequence: Synthetic oligonucleotide
augggaaaguccccauccu

SEQ ID NO: 2568232 - RNA, 19 nt, Artificial Sequence
  Description of Artificial Sequence: Synthetic oligonucleotide
agaaugggaaaguccccau

SEQ ID NO: 2568233 - RNA, 19 nt, Artificial Sequence
  Description of Artificial Sequence: Synthetic oligonucleotide
cuuagcugagaaugggaaa

SEQ ID NO: 2568234 - RNA, 19 nt, Artificial Sequence
  Description of Artificial Sequence: Synthetic oligonucleotide
uucuaggguuuauuucauc

SEQ ID NO: 2568235 - RNA, 19 nt, Artificial Sequence
  Description of Artificial Sequence: Synthetic oligonucleotide
ggauugcugguaugguggg

SEQ ID NO: 2568236 - RNA, 19 nt, Artificial Sequence
  Description of Artificial Sequence: Synthetic oligonucleotide
cgaauaaccgaaagacucc

SEQ ID NO: 2568237 - RNA, 19 nt, Artificial Sequence
  Description of Artificial Sequence: Synthetic oligonucleotide
ucauucagagcuguuccuu

SEQ ID NO: 2568238 - RNA, 19 nt, Artificial Sequence
  Description of Artificial Sequence: Synthetic oligonucleotide
ggaagcugugccccaaagc

SEQ ID NO: 2568239 - RNA, 19 nt, Artificial Sequence
  Description of Artificial Sequence: Synthetic oligonucleotide
gcuaauguucauucuccac

SEQ ID NO: 2568240 - RNA, 19 nt, Artificial Sequence
  Description of Artificial Sequence: Synthetic oligonucleotide
cacguugccuggacagucc

SEQ ID NO: 2568241 - RNA, 19 nt, Artificial Sequence
  Description of Artificial Sequence: Synthetic oligonucleotide
uggacggggaggguugugc

SEQ ID NO: 2568242 - RNA, 19 nt, Artificial Sequence
  Description of Artificial Sequence: Synthetic oligonucleotide
cgcucuguacgaauaaccg

SEQ ID NO: 2568243 - RNA, 19 nt, Artificial Sequence
  Description of Artificial Sequence: Synthetic oligonucleotide
ugcugguauggugggaaca

SEQ ID NO: 2568244 - RNA, 19 nt, Artificial Sequence
  Description of Artificial Sequence: Synthetic oligonucleotide
cacuugcuuggcuucucag

SEQ ID NO: 2568245 - RNA, 19 nt, Artificial Sequence
  Description of Artificial Sequence: Synthetic oligonucleotide
guggccugagccuuaggca

SEQ ID NO: 2568246 - RNA, 19 nt, Artificial Sequence
  Description of Artificial Sequence: Synthetic oligonucleotide
gaauaaccgaaagacuccu

SEQ ID NO: 2568247 - RNA, 19 nt, Artificial Sequence
  Description of Artificial Sequence: Synthetic oligonucleotide
uugccuggacaguccugcg

SEQ ID NO: 2568248 - RNA, 19 nt, Artificial Sequence
  Description of Artificial Sequence: Synthetic oligonucleotide
uccaaccuuagcugagaau

SEQ ID NO: 2568249 - RNA, 19 nt, Artificial Sequence
  Description of Artificial Sequence: Synthetic oligonucleotide
cagagcuguuccuuccaac

SEQ ID NO: 2568250 - RNA, 19 nt, Artificial Sequence
  Description of Artificial Sequence: Synthetic oligonucleotide
cgaaaggucauucagagcu

SEQ ID NO: 2568251 - RNA, 19 nt, Artificial Sequence
  Description of Artificial Sequence: Synthetic oligonucleotide
agcuguuccuuccaaccuu

SEQ ID NO: 2568252 - RNA, 19 nt, Artificial Sequence
  Description of Artificial Sequence: Synthetic oligonucleotide
accuagacaaagacaauua

SEQ ID NO: 2568253 - RNA, 19 nt, Artificial Sequence
  Description of Artificial Sequence: Synthetic oligonucleotide
uggcacacaagcccuugua

SEQ ID NO: 2568254 - RNA, 19 nt, Artificial Sequence
  Description of Artificial Sequence: Synthetic oligonucleotide
ggaggguugugcauacagg

SEQ ID NO: 2568255 - RNA, 19 nt, Artificial Sequence
  Description of Artificial Sequence: Synthetic oligonucleotide
gaguuacuaucuugcugca

SEQ ID NO: 2568256 - RNA, 19 nt, Artificial Sequence
  Description of Artificial Sequence: Synthetic oligonucleotide
acaagcccuuguauaaaug

SEQ ID NO: 2568257 - RNA, 19 nt, Artificial Sequence
  Description of Artificial Sequence: Synthetic oligonucleotide
uucaucugcuaauguucau

SEQ ID NO: 2568258 - RNA, 19 nt, Artificial Sequence
  Description of Artificial Sequence: Synthetic oligonucleotide
uggcccugcaucccagcca

SEQ ID NO: 2568259 - RNA, 19 nt, Artificial Sequence
  Description of Artificial Sequence: Synthetic oligonucleotide
cugcuucccacuccaggag

SEQ ID NO: 2568260 - RNA, 19 nt, Artificial Sequence
  Description of Artificial Sequence: Synthetic oligonucleotide
gaagcacccuguucugaga

SEQ ID NO: 2568261 - RNA, 19 nt, Artificial Sequence
  Description of Artificial Sequence: Synthetic oligonucleotide
agacuccuccuccacacuu

SEQ ID NO: 2568262 - RNA, 19 nt, Artificial Sequence
  Description of Artificial Sequence: Synthetic oligonucleotide
cuccaccuagacaaagaca

SEQ ID NO: 2568263 - RNA, 19 nt, Artificial Sequence
  Description of Artificial Sequence: Synthetic oligonucleotide
aggguuuauuucaucugcu

SEQ ID NO: 2568264 - RNA, 19 nt, Artificial Sequence
  Description of Artificial Sequence: Synthetic oligonucleotide
cuggccauucacugucaac

SEQ ID NO: 2568265 - RNA, 19 nt, Artificial Sequence
  Description of Artificial Sequence: Synthetic oligonucleotide
ugcaugggacuuacggauu

SEQ ID NO: 2568266 - RNA, 19 nt, Artificial Sequence
  Description of Artificial Sequence: Synthetic oligonucleotide
gccaauggaugcuuuuaug

SEQ ID NO: 2568267 - RNA, 19 nt, Artificial Sequence
  Description of Artificial Sequence: Synthetic oligonucleotide
cacugucaacuccgguugg

SEQ ID NO: 2568268 - RNA, 19 nt, Artificial Sequence
  Description of Artificial Sequence: Synthetic oligonucleotide
cuggacaguccugcggucc

SEQ ID NO: 2568269 - RNA, 19 nt, Artificial Sequence
  Description of Artificial Sequence: Synthetic oligonucleotide
agacaaccaguugcuuuuc

SEQ ID NO: 2568270 - RNA, 19 nt, Artificial Sequence
  Description of Artificial Sequence: Synthetic oligonucleotide
uacggauugcugguauggu

SEQ ID NO: 2568271 - RNA, 19 nt, Artificial Sequence
  Description of Artificial Sequence: Synthetic oligonucleotide
gcugguauggugggaacag

SEQ ID NO: 2568272 - RNA, 19 nt, Artificial Sequence
  Description of Artificial Sequence: Synthetic oligonucleotide
cagcaaggugccucgggac

SEQ ID NO: 2568273 - RNA, 19 nt, Artificial Sequence
  Description of Artificial Sequence: Synthetic oligonucleotide
uccuggguucaaguggaac

SEQ ID NO: 2568274 - RNA, 19 nt, Artificial Sequence
  Description of Artificial Sequence: Synthetic oligonucleotide
cgguagggcagcaaggugc

SEQ ID NO: 2568275 - RNA, 19 nt, Artificial Sequence
  Description of Artificial Sequence: Synthetic oligonucleotide
agcacccuguucugagaug

SEQ ID NO: 2568276 - RNA, 19 nt, Artificial Sequence
  Description of Artificial Sequence: Synthetic oligonucleotide
caaagcugguggccugagc

SEQ ID NO: 2568277 - RNA, 19 nt, Artificial Sequence
  Description of Artificial Sequence: Synthetic oligonucleotide
caaagacaauuagaagaca

SEQ ID NO: 2568278 - RNA, 19 nt, Artificial Sequence
  Description of Artificial Sequence: Synthetic oligonucleotide
gcaugggacuuacggauug

SEQ ID NO: 2568279 - RNA, 19 nt, Artificial Sequence
  Description of Artificial Sequence: Synthetic oligonucleotide
ccuggguucaaguggaaca

SEQ ID NO: 2568280 - RNA, 19 nt, Artificial Sequence
  Description of Artificial Sequence: Synthetic oligonucleotide
ugccccaaagcugguggcc

SEQ ID NO: 2568281 - RNA, 19 nt, Artificial Sequence
  Description of Artificial Sequence: Synthetic oligonucleotide
gcacccuguucugagaugc

SEQ ID NO: 2568282 - RNA, 19 nt, Artificial Sequence
  Description of Artificial Sequence: Synthetic oligonucleotide
ggugggaacaguggcacac

SEQ ID NO: 2568283 - RNA, 19 nt, Artificial Sequence
  Description of Artificial Sequence: Synthetic oligonucleotide
ggcuucucagcuccaggag

SEQ ID NO: 2568284 - RNA, 19 nt, Artificial Sequence
  Description of Artificial Sequence: Synthetic oligonucleotide
cccucgaaaggucauucag

SEQ ID NO: 2568285 - RNA, 19 nt, Artificial Sequence
  Description of Artificial Sequence: Synthetic oligonucleotide
augggacuuacggauugcu

SEQ ID NO: 2568286 - RNA, 19 nt, Artificial Sequence
  Description of Artificial Sequence: Synthetic oligonucleotide
ggagaugccccuggguagg

SEQ ID NO: 2568287 - RNA, 19 nt, Artificial Sequence
  Description of Artificial Sequence: Synthetic oligonucleotide
gcucuguacgaauaaccga

SEQ ID NO: 2568288 - RNA, 19 nt, Artificial Sequence
  Description of Artificial Sequence: Synthetic oligonucleotide
caugggacuuacggauugc

SEQ ID NO: 2568289 - RNA, 19 nt, Artificial Sequence
  Description of Artificial Sequence: Synthetic oligonucleotide
acguugccuggacaguccu

SEQ ID NO: 2568290 - RNA, 19 nt, Artificial Sequence
  Description of Artificial Sequence: Synthetic oligonucleotide
aguggcacacaagcccuug

SEQ ID NO: 2568291 - RNA, 19 nt, Artificial Sequence
  Description of Artificial Sequence: Synthetic oligonucleotide
cuguuccuuccaaccuuag

SEQ ID NO: 2568292 - RNA, 19 nt, Artificial Sequence
  Description of Artificial Sequence: Synthetic oligonucleotide
uucagacacguugccugga

SEQ ID NO: 2568293 - RNA, 19 nt, Artificial Sequence
  Description of Artificial Sequence: Synthetic oligonucleotide
cugucaacuccgguuggug

SEQ ID NO: 2568294 - RNA, 19 nt, Artificial Sequence
  Description of Artificial Sequence: Synthetic oligonucleotide
cugcaucccagccaaugga

SEQ ID NO: 2568295 - RNA, 19 nt, Artificial Sequence
  Description of Artificial Sequence: Synthetic oligonucleotide
uccuggccauucacuguca

SEQ ID NO: 2568296 - RNA, 19 nt, Artificial Sequence
  Description of Artificial Sequence: Synthetic oligonucleotide
aaguccccauccuggccau

SEQ ID NO: 2568297 - RNA, 19 nt, Artificial Sequence
  Description of Artificial Sequence: Synthetic oligonucleotide
ggcagcaaggugccucggg

SEQ ID NO: 2568298 - RNA, 19 nt, Artificial Sequence
  Description of Artificial Sequence: Synthetic oligonucleotide
acugucaacuccgguuggu

SEQ ID NO: 2568299 - RNA, 19 nt, Artificial Sequence
  Description of Artificial Sequence: Synthetic oligonucleotide
uccccauccuggccauuca

SEQ ID NO: 2568300 - RNA, 19 nt, Artificial Sequence
  Description of Artificial Sequence: Synthetic oligonucleotide
uggguucaaguggaacagu

SEQ ID NO: 2568301 - RNA, 19 nt, Artificial Sequence
  Description of Artificial Sequence: Synthetic oligonucleotide
gaguaccaggaagcugugc

SEQ ID NO: 2568302 - RNA, 19 nt, Artificial Sequence
  Description of Artificial Sequence: Synthetic oligonucleotide
cuucccacuccaggagggg

SEQ ID NO: 2568303 - RNA, 19 nt, Artificial Sequence
  Description of Artificial Sequence: Synthetic oligonucleotide
ggaugcuuuuaugcauggg

SEQ ID NO: 2568304 - RNA, 19 nt, Artificial Sequence
  Description of Artificial Sequence: Synthetic oligonucleotide
gcccuuguauaaauguccc

SEQ ID NO: 2568305 - RNA, 19 nt, Artificial Sequence
  Description of Artificial Sequence: Synthetic oligonucleotide
gagcuguagggauggggaa

SEQ ID NO: 2568306 - RNA, 19 nt, Artificial Sequence
  Description of Artificial Sequence: Synthetic oligonucleotide
gagcuguuccuuccaaccu

SEQ ID NO: 2568307 - RNA, 19 nt, Artificial Sequence
  Description of Artificial Sequence: Synthetic oligonucleotide
caguuccaguucagacacg

SEQ ID NO: 2568308 - RNA, 19 nt, Artificial Sequence
  Description of Artificial Sequence: Synthetic oligonucleotide
aguccugcggucccugcuu

SEQ ID NO: 2568309 - RNA, 19 nt, Artificial Sequence
  Description of Artificial Sequence: Synthetic oligonucleotide
ccuuccaaccuuagcugag

SEQ ID NO: 2568310 - RNA, 19 nt, Artificial Sequence
  Description of Artificial Sequence: Synthetic oligonucleotide
uucucagcuccaggagaug

SEQ ID NO: 2568311 - RNA, 19 nt, Artificial Sequence
  Description of Artificial Sequence: Synthetic oligonucleotide
auaaagcuuuaaagcuccu

SEQ ID NO: 2568312 - RNA, 19 nt, Artificial Sequence
  Description of Artificial Sequence: Synthetic oligonucleotide
caucaauucaucgcucugu

SEQ ID NO: 2568313 - RNA, 19 nt, Artificial Sequence
  Description of Artificial Sequence: Synthetic oligonucleotide
cagaaagcacagggauggg

SEQ ID NO: 2568314 - RNA, 19 nt, Artificial Sequence
  Description of Artificial Sequence: Synthetic oligonucleotide
gugccccaaagcugguggc

SEQ ID NO: 2568315 - RNA, 19 nt, Artificial Sequence
  Description of Artificial Sequence: Synthetic oligonucleotide
accaggaagcugugcccca

SEQ ID NO: 2568316 - RNA, 19 nt, Artificial Sequence
  Description of Artificial Sequence: Synthetic oligonucleotide
gguucaaguggaacaguuc

SEQ ID NO: 2568317 - RNA, 19 nt, Artificial Sequence
  Description of Artificial Sequence: Synthetic oligonucleotide
acacaagcccuuguauaaa

SEQ ID NO: 2568318 - RNA, 19 nt, Artificial Sequence
  Description of Artificial Sequence: Synthetic oligonucleotide
ccuuaggcagggguggacg

SEQ ID NO: 2568319 - RNA, 19 nt, Artificial Sequence
  Description of Artificial Sequence: Synthetic oligonucleotide
gcuucccacuccaggaggg

SEQ ID NO: 2568320 - RNA, 19 nt, Artificial Sequence
  Description of Artificial Sequence: Synthetic oligonucleotide
ccuuagcugagaaugggaa

SEQ ID NO: 2568321 - RNA, 19 nt, Artificial Sequence
  Description of Artificial Sequence: Synthetic oligonucleotide
cuucucagcuccaggagau

SEQ ID NO: 2568322 - RNA, 19 nt, Artificial Sequence
  Description of Artificial Sequence: Synthetic oligonucleotide
uccugcggucccugcuucc

SEQ ID NO: 2568323 - RNA, 19 nt, Artificial Sequence
  Description of Artificial Sequence: Synthetic oligonucleotide
aucccagccaauggaugcu

SEQ ID NO: 2568324 - RNA, 19 nt, Artificial Sequence
  Description of Artificial Sequence: Synthetic oligonucleotide
caaccaguugcuuuuccau

SEQ ID NO: 2568325 - RNA, 19 nt, Artificial Sequence
  Description of Artificial Sequence: Synthetic oligonucleotide
ggaacaguuccaguucaga

SEQ ID NO: 2568326 - RNA, 19 nt, Artificial Sequence
  Description of Artificial Sequence: Synthetic oligonucleotide
acaggcccucgaaagguca

SEQ ID NO: 2568327 - RNA, 19 nt, Artificial Sequence
  Description of Artificial Sequence: Synthetic oligonucleotide
cuaucuugcugcacuugcu

SEQ ID NO: 2568328 - RNA, 19 nt, Artificial Sequence
  Description of Artificial Sequence: Synthetic oligonucleotide
agaagacaaccaguugcuu

SEQ ID NO: 2568329 - RNA, 19 nt, Artificial Sequence
  Description of Artificial Sequence: Synthetic oligonucleotide
ggguuuauuucaucugcua

SEQ ID NO: 2568330 - RNA, 19 nt, Artificial Sequence
  Description of Artificial Sequence: Synthetic oligonucleotide
auucaucgcucuguacgaa

SEQ ID NO: 2568331 - RNA, 19 nt, Artificial Sequence
  Description of Artificial Sequence: Synthetic oligonucleotide
cuuccaaccuuagcugaga

SEQ ID NO: 2568332 - RNA, 19 nt, Artificial Sequence
  Description of Artificial Sequence: Synthetic oligonucleotide
ccucgaaaggucauucaga

SEQ ID NO: 2568333 - RNA, 19 nt, Artificial Sequence
  Description of Artificial Sequence: Synthetic oligonucleotide
gcagcaaggugccucggga

SEQ ID NO: 2568334 - RNA, 19 nt, Artificial Sequence
  Description of Artificial Sequence: Synthetic oligonucleotide
cuccuccacacuuuuauuu

SEQ ID NO: 2568335 - RNA, 19 nt, Artificial Sequence
  Description of Artificial Sequence: Synthetic oligonucleotide
caucgcucuguacgaauaa

SEQ ID NO: 2568336 - RNA, 19 nt, Artificial Sequence
  Description of Artificial Sequence: Synthetic oligonucleotide
uuggagcuguagggauggg

SEQ ID NO: 2568337 - RNA, 19 nt, Artificial Sequence
  Description of Artificial Sequence: Synthetic oligonucleotide
gcacacaagcccuuguaua

SEQ ID NO: 2568338 - RNA, 19 nt, Artificial Sequence
  Description of Artificial Sequence: Synthetic oligonucleotide
gggaacaguggcacacaag

SEQ ID NO: 2568339 - RNA, 19 nt, Artificial Sequence
  Description of Artificial Sequence: Synthetic oligonucleotide
cagacacguugccuggaca

SEQ ID NO: 2568340 - RNA, 19 nt, Artificial Sequence
  Description of Artificial Sequence: Synthetic oligonucleotide
ggugccucgggacugaguu

SEQ ID NO: 2568341 - RNA, 19 nt, Artificial Sequence
  Description of Artificial Sequence: Synthetic oligonucleotide
aaggucauucagagcuguu

SEQ ID NO: 2568342 - RNA, 19 nt, Artificial Sequence
  Description of Artificial Sequence: Synthetic oligonucleotide
cacaagcccuuguauaaau

SEQ ID NO: 2568343 - RNA, 19 nt, Artificial Sequence
  Description of Artificial Sequence: Synthetic oligonucleotide
ggacuuacggauugcuggu

SEQ ID NO: 2568344 - RNA, 19 nt, Artificial Sequence
  Description of Artificial Sequence: Synthetic oligonucleotide
cugagccuuaggcaggggu

SEQ ID NO: 2568345 - RNA, 19 nt, Artificial Sequence
  Description of Artificial Sequence: Synthetic oligonucleotide
ggggaagcacccuguucug

SEQ ID NO: 2568346 - RNA, 19 nt, Artificial Sequence
  Description of Artificial Sequence: Synthetic oligonucleotide
caccuagacaaagacaauu

SEQ ID NO: 2568347 - RNA, 19 nt, Artificial Sequence
  Description of Artificial Sequence: Synthetic oligonucleotide
aggguccuuggagcuguag

SEQ ID NO: 2568348 - RNA, 19 nt, Artificial Sequence
  Description of Artificial Sequence: Synthetic oligonucleotide
agggauggggaagcacccu

SEQ ID NO: 2568349 - RNA, 19 nt, Artificial Sequence
  Description of Artificial Sequence: Synthetic oligonucleotide
caaguggaacaguuccagu

SEQ ID NO: 2568350 - RNA, 19 nt, Artificial Sequence
  Description of Artificial Sequence: Synthetic oligonucleotide
acggggaggguugugcaua

SEQ ID NO: 2568351 - RNA, 19 nt, Artificial Sequence
  Description of Artificial Sequence: Synthetic oligonucleotide
ucccagugauagggcuggg

SEQ ID NO: 2568352 - RNA, 19 nt, Artificial Sequence
  Description of Artificial Sequence: Synthetic oligonucleotide
gucgguagggcagcaaggu

SEQ ID NO: 2568353 - RNA, 19 nt, Artificial Sequence
  Description of Artificial Sequence: Synthetic oligonucleotide
gcuccuggguucaagugga

SEQ ID NO: 2568354 - RNA, 19 nt, Artificial Sequence
  Description of Artificial Sequence: Synthetic oligonucleotide
gcaucccagccaauggaug

SEQ ID NO: 2568355 - RNA, 19 nt, Artificial Sequence
  Description of Artificial Sequence: Synthetic oligonucleotide
uccgguugguguggcccug

SEQ ID NO: 2568356 - RNA, 19 nt, Artificial Sequence
  Description of Artificial Sequence: Synthetic oligonucleotide
gacuuacggauugcuggua

SEQ ID NO: 2568357 - RNA, 19 nt, Artificial Sequence
  Description of Artificial Sequence: Synthetic oligonucleotide
gauggggaagcacccuguu

SEQ ID NO: 2568358 - RNA, 19 nt, Artificial Sequence
  Description of Artificial Sequence: Synthetic oligonucleotide
ggccugagccuuaggcagg

SEQ ID NO: 2568359 - RNA, 19 nt, Artificial Sequence
  Description of Artificial Sequence: Synthetic oligonucleotide
agcugguggccugagccuu

SEQ ID NO: 2568360 - RNA, 19 nt, Artificial Sequence
  Description of Artificial Sequence: Synthetic oligonucleotide
caacuccgguugguguggc

SEQ ID NO: 2568361 - RNA, 19 nt, Artificial Sequence
  Description of Artificial Sequence: Synthetic oligonucleotide
cugugccccaaagcuggug

SEQ ID NO: 2568362 - RNA, 19 nt, Artificial Sequence
  Description of Artificial Sequence: Synthetic oligonucleotide
gugggaacaguggcacaca

SEQ ID NO: 2568363 - RNA, 19 nt, Artificial Sequence
  Description of Artificial Sequence: Synthetic oligonucleotide
gccugagccuuaggcaggg

SEQ ID NO: 2568364 - RNA, 19 nt, Artificial Sequence
  Description of Artificial Sequence: Synthetic oligonucleotide
ggacggggaggguugugca

SEQ ID NO: 2568365 - RNA, 19 nt, Artificial Sequence
  Description of Artificial Sequence: Synthetic oligonucleotide
cucgggacugaguuacuau

SEQ ID NO: 2568366 - RNA, 19 nt, Artificial Sequence
  Description of Artificial Sequence: Synthetic oligonucleotide
cgaaagacuccuccuccac

SEQ ID NO: 2568367 - RNA, 19 nt, Artificial Sequence
  Description of Artificial Sequence: Synthetic oligonucleotide
guccugcggucccugcuuc

SEQ ID NO: 2568368 - RNA, 19 nt, Artificial Sequence
  Description of Artificial Sequence: Synthetic oligonucleotide
gacacguugccuggacagu

SEQ ID NO: 2568369 - RNA, 19 nt, Artificial Sequence
  Description of Artificial Sequence: Synthetic oligonucleotide
guguggcccugcaucccag

SEQ ID NO: 2568370 - RNA, 19 nt, Artificial Sequence
  Description of Artificial Sequence: Synthetic oligonucleotide
cccagugauagggcugggg

SEQ ID NO: 2568371 - RNA, 19 nt, Artificial Sequence
  Description of Artificial Sequence: Synthetic oligonucleotide
ggcacacaagcccuuguau

SEQ ID NO: 2568372 - RNA, 19 nt, Artificial Sequence
  Description of Artificial Sequence: Synthetic oligonucleotide
agccuuaggcaggggugga

SEQ ID NO: 2568373 - RNA, 19 nt, Artificial Sequence
  Description of Artificial Sequence: Synthetic oligonucleotide
ggcccucgaaaggucauuc

SEQ ID NO: 2568374 - RNA, 19 nt, Artificial Sequence
  Description of Artificial Sequence: Synthetic oligonucleotide
ccgaaagacuccuccucca

SEQ ID NO: 2568375 - RNA, 19 nt, Artificial Sequence
  Description of Artificial Sequence: Synthetic oligonucleotide
gacggggaggguugugcau

SEQ ID NO: 2568376 - RNA, 19 nt, Artificial Sequence
  Description of Artificial Sequence: Synthetic oligonucleotide
gccuggacaguccugcggu

SEQ ID NO: 2568377 - RNA, 19 nt, Artificial Sequence
  Description of Artificial Sequence: Synthetic oligonucleotide
cugugaguaccaggaagcu

SEQ ID NO: 2568378 - RNA, 19 nt, Artificial Sequence
  Description of Artificial Sequence: Synthetic oligonucleotide
guggcacacaagcccuugu

SEQ ID NO: 2568379 - RNA, 19 nt, Artificial Sequence
  Description of Artificial Sequence: Synthetic oligonucleotide
gcccucgaaaggucauuca

SEQ ID NO: 2568380 - RNA, 19 nt, Artificial Sequence
  Description of Artificial Sequence: Synthetic oligonucleotide
ggggugucgguagggcagc

SEQ ID NO: 2568381 - RNA, 19 nt, Artificial Sequence
  Description of Artificial Sequence: Synthetic oligonucleotide
caaggugccucgggacuga

SEQ ID NO: 2568382 - RNA, 19 nt, Artificial Sequence
  Description of Artificial Sequence: Synthetic oligonucleotide
ccugcggucccugcuuccc

SEQ ID NO: 2568383 - RNA, 19 nt, Artificial Sequence
  Description of Artificial Sequence: Synthetic oligonucleotide
gggaagcacccuguucuga

SEQ ID NO: 2568384 - RNA, 19 nt, Artificial Sequence
  Description of Artificial Sequence: Synthetic oligonucleotide
gcuguuccuuccaaccuua

SEQ ID NO: 2568385 - RNA, 19 nt, Artificial Sequence
  Description of Artificial Sequence: Synthetic oligonucleotide
gggacugaguuacuaucuu

SEQ ID NO: 2568386 - RNA, 19 nt, Artificial Sequence
  Description of Artificial Sequence: Synthetic oligonucleotide
caggaagcugugccccaaa

SEQ ID NO: 2568387 - RNA, 19 nt, Artificial Sequence
  Description of Artificial Sequence: Synthetic oligonucleotide
gguugugcauacaggcccu

SEQ ID NO: 2568388 - RNA, 19 nt, Artificial Sequence
  Description of Artificial Sequence: Synthetic oligonucleotide
cugcggucccugcuuccca

SEQ ID NO: 2568389 - RNA, 19 nt, Artificial Sequence
  Description of Artificial Sequence: Synthetic oligonucleotide
guggacggggaggguugug

SEQ ID NO: 2568390 - RNA, 19 nt, Artificial Sequence
  Description of Artificial Sequence: Synthetic oligonucleotide
gugccucgggacugaguua

SEQ ID NO: 2568391 - RNA, 19 nt, Artificial Sequence
  Description of Artificial Sequence: Synthetic oligonucleotide
cccuguucugagaugcugu

SEQ ID NO: 2568392 - RNA, 19 nt, Artificial Sequence
  Description of Artificial Sequence: Synthetic oligonucleotide
ccuggacaguccugcgguc

SEQ ID NO: 2568393 - RNA, 19 nt, Artificial Sequence
  Description of Artificial Sequence: Synthetic oligonucleotide
cuccgguugguguggcccu

SEQ ID NO: 2568394 - RNA, 19 nt, Artificial Sequence
  Description of Artificial Sequence: Synthetic oligonucleotide
gcuccaggagaugccccug

SEQ ID NO: 2568395 - RNA, 19 nt, Artificial Sequence
  Description of Artificial Sequence: Synthetic oligonucleotide
cuccuggguucaaguggaa

SEQ ID NO: 2568396 - RNA, 19 nt, Artificial Sequence
  Description of Artificial Sequence: Synthetic oligonucleotide
cugguauggugggaacagu

SEQ ID NO: 2568397 - RNA, 19 nt, Artificial Sequence
  Description of Artificial Sequence: Synthetic oligonucleotide
caguccugcggucccugcu

SEQ ID NO: 2568398 - RNA, 19 nt, Artificial Sequence
  Description of Artificial Sequence: Synthetic oligonucleotide
ggauggggaagcacccugu

SEQ ID NO: 2568399 - RNA, 19 nt, Artificial Sequence
  Description of Artificial Sequence: Synthetic oligonucleotide
cguugccuggacaguccug

SEQ ID NO: 2568400 - RNA, 19 nt, Artificial Sequence
  Description of Artificial Sequence: Synthetic oligonucleotide
gccuuaggcagggguggac

SEQ ID NO: 2568401 - RNA, 19 nt, Artificial Sequence
  Description of Artificial Sequence: Synthetic oligonucleotide
cgggacugaguuacuaucu

SEQ ID NO: 2568402 - RNA, 19 nt, Artificial Sequence
  Description of Artificial Sequence: Synthetic oligonucleotide
cggggaggguugugcauac

SEQ ID NO: 2568403 - RNA, 19 nt, Artificial Sequence
  Description of Artificial Sequence: Synthetic oligonucleotide
caggcccucgaaaggucau

SEQ ID NO: 2568404 - RNA, 19 nt, Artificial Sequence
  Description of Artificial Sequence: Synthetic oligonucleotide
cugcacuugcuuggcuucu

SEQ ID NO: 2568405 - RNA, 19 nt, Artificial Sequence
  Description of Artificial Sequence: Synthetic oligonucleotide
ggugucgguagggcagcaa

SEQ ID NO: 2568406 - RNA, 19 nt, Artificial Sequence
  Description of Artificial Sequence: Synthetic oligonucleotide
gguugguguggcccugcau

SEQ ID NO: 2568407 - RNA, 19 nt, Artificial Sequence
  Description of Artificial Sequence: Synthetic oligonucleotide
ccugagccuuaggcagggg

SEQ ID NO: 2568408 - RNA, 19 nt, Artificial Sequence
  Description of Artificial Sequence: Synthetic oligonucleotide
ccuggccauucacugucaa

SEQ ID NO: 2568409 - RNA, 19 nt, Artificial Sequence
  Description of Artificial Sequence: Synthetic oligonucleotide
ccgguugguguggcccugc

SEQ ID NO: 2568410 - RNA, 19 nt, Artificial Sequence
  Description of Artificial Sequence: Synthetic oligonucleotide
caguggcacacaagcccuu

SEQ ID NO: 2568411 - RNA, 19 nt, Artificial Sequence
  Description of Artificial Sequence: Synthetic oligonucleotide
gcuuggcuucucagcucca

SEQ ID NO: 2568412 - RNA, 19 nt, Artificial Sequence
  Description of Artificial Sequence: Synthetic oligonucleotide
aguccccauccuggccauu

SEQ ID NO: 2568413 - RNA, 19 nt, Artificial Sequence
  Description of Artificial Sequence: Synthetic oligonucleotide
ccucgggacugaguuacua

SEQ ID NO: 2568414 - RNA, 19 nt, Artificial Sequence
  Description of Artificial Sequence: Synthetic oligonucleotide
ccaccuagacaaagacaau

SEQ ID NO: 2568415 - RNA, 19 nt, Artificial Sequence
  Description of Artificial Sequence: Synthetic oligonucleotide
gggugucgguagggcagca

SEQ ID NO: 2568416 - RNA, 19 nt, Artificial Sequence
  Description of Artificial Sequence: Synthetic oligonucleotide
ccaggaagcugugccccaa

SEQ ID NO: 2568417 - RNA, 19 nt, Artificial Sequence
  Description of Artificial Sequence: Synthetic oligonucleotide
gcugguggccugagccuua

SEQ ID NO: 2568418 - RNA, 19 nt, Artificial Sequence
  Description of Artificial Sequence: Synthetic oligonucleotide
ggacaguccugcggucccu

SEQ ID NO: 2568419 - RNA, 19 nt, Artificial Sequence
  Description of Artificial Sequence: Synthetic oligonucleotide
gcggucccugcuucccacu

SEQ ID NO: 2568420 - RNA, 19 nt, Artificial Sequence
  Description of Artificial Sequence: Synthetic oligonucleotide
cgguugguguggcccugca

SEQ ID NO: 2568421 - RNA, 19 nt, Artificial Sequence
  Description of Artificial Sequence: Synthetic oligonucleotide
gccucgggacugaguuacu

SEQ ID NO: 2568422 - RNA, 19 nt, Artificial Sequence
  Description of Artificial Sequence: Synthetic oligonucleotide
aaagguaauagccaacacc

SEQ ID NO: 2568423 - RNA, 19 nt, Artificial Sequence
  Description of Artificial Sequence: Synthetic oligonucleotide
uauguaguggaccagacug

SEQ ID NO: 2568424 - RNA, 19 nt, Artificial Sequence
  Description of Artificial Sequence: Synthetic oligonucleotide
aagguuuaggccuaucagg

SEQ ID NO: 2568425 - RNA, 19 nt, Artificial Sequence
  Description of Artificial Sequence: Synthetic oligonucleotide
uguacgugaugaaauaggg

SEQ ID NO: 2568426 - RNA, 19 nt, Artificial Sequence
  Description of Artificial Sequence: Synthetic oligonucleotide
aauucaaugccucgggcuc

SEQ ID NO: 2568427 - RNA, 19 nt, Artificial Sequence
  Description of Artificial Sequence: Synthetic oligonucleotide
uacgugaugaaauagggga

SEQ ID NO: 2568428 - RNA, 19 nt, Artificial Sequence
  Description of Artificial Sequence: Synthetic oligonucleotide
aaucuaggaguguacauug

SEQ ID NO: 2568429 - RNA, 19 nt, Artificial Sequence
  Description of Artificial Sequence: Synthetic oligonucleotide
ugcacaaagagguagguga

SEQ ID NO: 2568430 - RNA, 19 nt, Artificial Sequence
  Description of Artificial Sequence: Synthetic oligonucleotide
gacaugacaagguuuaggc

SEQ ID NO: 2568431 - RNA, 19 nt, Artificial Sequence
  Description of Artificial Sequence: Synthetic oligonucleotide
gacauaaugagcucagcag

SEQ ID NO: 2568432 - RNA, 19 nt, Artificial Sequence
  Description of Artificial Sequence: Synthetic oligonucleotide
gacgcuaaggaacaugagg

SEQ ID NO: 2568433 - RNA, 19 nt, Artificial Sequence
  Description of Artificial Sequence: Synthetic oligonucleotide
aaauaggggaaguaggcga

SEQ ID NO: 2568434 - RNA, 19 nt, Artificial Sequence
  Description of Artificial Sequence: Synthetic oligonucleotide
aagguaauagccaacaccu

SEQ ID NO: 2568435 - RNA, 19 nt, Artificial Sequence
  Description of Artificial Sequence: Synthetic oligonucleotide
auagccaacaccugggccg

SEQ ID NO: 2568436 - RNA, 19 nt, Artificial Sequence
  Description of Artificial Sequence: Synthetic oligonucleotide
uuguacgugaugaaauagg

SEQ ID NO: 2568437 - RNA, 19 nt, Artificial Sequence
  Description of Artificial Sequence: Synthetic oligonucleotide
ugcauagcugcacaaagag

SEQ ID NO: 2568438 - RNA, 19 nt, Artificial Sequence
  Description of Artificial Sequence: Synthetic oligonucleotide
aaauucaaugccucgggcu

SEQ ID NO: 2568439 - RNA, 19 nt, Artificial Sequence
  Description of Artificial Sequence: Synthetic oligonucleotide
acauacagggccaaggugc

SEQ ID NO: 2568440 - RNA, 19 nt, Artificial Sequence
  Description of Artificial Sequence: Synthetic oligonucleotide
cuuguagacgcuaaggaac

SEQ ID NO: 2568441 - RNA, 19 nt, Artificial Sequence
  Description of Artificial Sequence: Synthetic oligonucleotide
gaugaaauaggggaaguag

SEQ ID NO: 2568442 - RNA, 19 nt, Artificial Sequence
  Description of Artificial Sequence: Synthetic oligonucleotide
aaugccucgggcucccacc

SEQ ID NO: 2568443 - RNA, 19 nt, Artificial Sequence
  Description of Artificial Sequence: Synthetic oligonucleotide
uaggaguguacauugacca

SEQ ID NO: 2568444 - RNA, 19 nt, Artificial Sequence
  Description of Artificial Sequence: Synthetic oligonucleotide
uguacauugaccacagcaa

SEQ ID NO: 2568445 - RNA, 19 nt, Artificial Sequence
  Description of Artificial Sequence: Synthetic oligonucleotide
gaagaaaguggcuaagaac

SEQ ID NO: 2568446 - RNA, 19 nt, Artificial Sequence
  Description of Artificial Sequence: Synthetic oligonucleotide
uuggagucaaugcucaucu

SEQ ID NO: 2568447 - RNA, 19 nt, Artificial Sequence
  Description of Artificial Sequence: Synthetic oligonucleotide
aguggcuaagaacagcauc

SEQ ID NO: 2568448 - RNA, 19 nt, Artificial Sequence
  Description of Artificial Sequence: Synthetic oligonucleotide
aacaccugggccgacaauc

SEQ ID NO: 2568449 - RNA, 19 nt, Artificial Sequence
  Description of Artificial Sequence: Synthetic oligonucleotide
uagacgcuaaggaacauga

SEQ ID NO: 2568450 - RNA, 19 nt, Artificial Sequence
  Description of Artificial Sequence: Synthetic oligonucleotide
acauaaugagcucagcagu

SEQ ID NO: 2568451 - RNA, 19 nt, Artificial Sequence
  Description of Artificial Sequence: Synthetic oligonucleotide
ugcacgcauuuccagaagg

SEQ ID NO: 2568452 - RNA, 19 nt, Artificial Sequence
  Description of Artificial Sequence: Synthetic oligonucleotide
caaagagggaugcagcggg

SEQ ID NO: 2568453 - RNA, 19 nt, Artificial Sequence
  Description of Artificial Sequence: Synthetic oligonucleotide
aaguaggcgagggcgaagc

SEQ ID NO: 2568454 - RNA, 19 nt, Artificial Sequence
  Description of Artificial Sequence: Synthetic oligonucleotide
ucauagcguguuaucaucc

SEQ ID NO: 2568455 - RNA, 19 nt, Artificial Sequence
  Description of Artificial Sequence: Synthetic oligonucleotide
agcguguuaucauccagac

SEQ ID NO: 2568456 - RNA, 19 nt, Artificial Sequence
  Description of Artificial Sequence: Synthetic oligonucleotide
uuuaggccuaucagguccg

SEQ ID NO: 2568457 - RNA, 19 nt, Artificial Sequence
  Description of Artificial Sequence: Synthetic oligonucleotide
aacaugaggaggagaacgg

SEQ ID NO: 2568458 - RNA, 19 nt, Artificial Sequence
  Description of Artificial Sequence: Synthetic oligonucleotide
augaaauaggggaaguagg

SEQ ID NO: 2568459 - RNA, 19 nt, Artificial Sequence
  Description of Artificial Sequence: Synthetic oligonucleotide
ucuaggaguguacauugac

SEQ ID NO: 2568460 - RNA, 19 nt, Artificial Sequence
  Description of Artificial Sequence: Synthetic oligonucleotide
agaacggcaggccggaagg

SEQ ID NO: 2568461 - RNA, 19 nt, Artificial Sequence
  Description of Artificial Sequence: Synthetic oligonucleotide
aacagggucaucacgccgg

SEQ ID NO: 2568462 - RNA, 19 nt, Artificial Sequence
  Description of Artificial Sequence: Synthetic oligonucleotide
ugcagcgggacauaaugag

SEQ ID NO: 2568463 - RNA, 19 nt, Artificial Sequence
  Description of Artificial Sequence: Synthetic oligonucleotide
uuguagacgcuaaggaaca

SEQ ID NO: 2568464 - RNA, 19 nt, Artificial Sequence
  Description of Artificial Sequence: Synthetic oligonucleotide
uacauugaccacagcaaca

SEQ ID NO: 2568465 - RNA, 19 nt, Artificial Sequence
  Description of Artificial Sequence: Synthetic oligonucleotide
ugggccgacaaucuaggag

SEQ ID NO: 2568466 - RNA, 19 nt, Artificial Sequence
  Description of Artificial Sequence: Synthetic oligonucleotide
aguccuguuacuacugccc

SEQ ID NO: 2568467 - RNA, 19 nt, Artificial Sequence
  Description of Artificial Sequence: Synthetic oligonucleotide
cauaaugagcucagcagug

SEQ ID NO: 2568468 - RNA, 19 nt, Artificial Sequence
  Description of Artificial Sequence: Synthetic oligonucleotide
agggucaucacgccggccg

SEQ ID NO: 2568469 - RNA, 19 nt, Artificial Sequence
  Description of Artificial Sequence: Synthetic oligonucleotide
augaauuccccaaugaagu

SEQ ID NO: 2568470 - RNA, 19 nt, Artificial Sequence
  Description of Artificial Sequence: Synthetic oligonucleotide
guaauagccaacaccuggg

SEQ ID NO: 2568471 - RNA, 19 nt, Artificial Sequence
  Description of Artificial Sequence: Synthetic oligonucleotide
uguuacuacugcccgggcc

SEQ ID NO: 2568472 - RNA, 19 nt, Artificial Sequence
  Description of Artificial Sequence: Synthetic oligonucleotide
ucauagaugccaccuuccc

SEQ ID NO: 2568473 - RNA, 19 nt, Artificial Sequence
  Description of Artificial Sequence: Synthetic oligonucleotide
agggccaaggugcugagag

SEQ ID NO: 2568474 - RNA, 19 nt, Artificial Sequence
  Description of Artificial Sequence: Synthetic oligonucleotide
gaaggcguuguacucagac

SEQ ID NO: 2568475 - RNA, 19 nt, Artificial Sequence
  Description of Artificial Sequence: Synthetic oligonucleotide
caagguuuaggccuaucag

SEQ ID NO: 2568476 - RNA, 19 nt, Artificial Sequence
  Description of Artificial Sequence: Synthetic oligonucleotide
agguccgccacauccacac

SEQ ID NO: 2568477 - RNA, 19 nt, Artificial Sequence
  Description of Artificial Sequence: Synthetic oligonucleotide
cauagcugcacaaagaggu

SEQ ID NO: 2568478 - RNA, 19 nt, Artificial Sequence
  Description of Artificial Sequence: Synthetic oligonucleotide
aauaggggaaguaggcgag

SEQ ID NO: 2568479 - RNA, 19 nt, Artificial Sequence
  Description of Artificial Sequence: Synthetic oligonucleotide
agcaaccaugaucuuguac

SEQ ID NO: 2568480 - RNA, 19 nt, Artificial Sequence
  Description of Artificial Sequence: Synthetic oligonucleotide
aguggaacagggucaucac

SEQ ID NO: 2568481 - RNA, 19 nt, Artificial Sequence
  Description of Artificial Sequence: Synthetic oligonucleotide
ucaucuggauguauuucca

SEQ ID NO: 2568482 - RNA, 19 nt, Artificial Sequence
  Description of Artificial Sequence: Synthetic oligonucleotide
agggcagcaaccaugaucu

SEQ ID NO: 2568483 - RNA, 19 nt, Artificial Sequence
  Description of Artificial Sequence: Synthetic oligonucleotide
gacaaaggccuuguagacg

SEQ ID NO: 2568484 - RNA, 19 nt, Artificial Sequence
  Description of Artificial Sequence: Synthetic oligonucleotide
uagcguguuaucauccaga

SEQ ID NO: 2568485 - RNA, 19 nt, Artificial Sequence
  Description of Artificial Sequence: Synthetic oligonucleotide
auaaugagcucagcagugg

SEQ ID NO: 2568486 - RNA, 19 nt, Artificial Sequence
  Description of Artificial Sequence: Synthetic oligonucleotide
auagcguguuaucauccag

SEQ ID NO: 2568487 - RNA, 19 nt, Artificial Sequence
  Description of Artificial Sequence: Synthetic oligonucleotide
gaacagggucaucacgccg

SEQ ID NO: 2568488 - RNA, 19 nt, Artificial Sequence
  Description of Artificial Sequence: Synthetic oligonucleotide
aggaguguacauugaccac

SEQ ID NO: 2568489 - RNA, 19 nt, Artificial Sequence
  Description of Artificial Sequence: Synthetic oligonucleotide
uuccagaaggcguuguacu

SEQ ID NO: 2568490 - RNA, 19 nt, Artificial Sequence
  Description of Artificial Sequence: Synthetic oligonucleotide
ugcauuccgggacaugaca

SEQ ID NO: 2568491 - RNA, 19 nt, Artificial Sequence
  Description of Artificial Sequence: Synthetic oligonucleotide
caugacaagguuuaggccu

SEQ ID NO: 2568492 - RNA, 19 nt, Artificial Sequence
  Description of Artificial Sequence: Synthetic oligonucleotide
agagguaggugaccccggc

SEQ ID NO: 2568493 - RNA, 19 nt, Artificial Sequence
  Description of Artificial Sequence: Synthetic oligonucleotide
cuuguacgugaugaaauag

SEQ ID NO: 2568494 - RNA, 19 nt, Artificial Sequence
  Description of Artificial Sequence: Synthetic oligonucleotide
aaggcguuguacucagaca

SEQ ID NO: 2568495 - RNA, 19 nt, Artificial Sequence
  Description of Artificial Sequence: Synthetic oligonucleotide
uuguacucagacaggccgc

SEQ ID NO: 2568496 - RNA, 19 nt, Artificial Sequence
  Description of Artificial Sequence: Synthetic oligonucleotide
caaauucaaugccucgggc

SEQ ID NO: 2568497 - RNA, 19 nt, Artificial Sequence
  Description of Artificial Sequence: Synthetic oligonucleotide
guacauugaccacagcaac

SEQ ID NO: 2568498 - RNA, 19 nt, Artificial Sequence
  Description of Artificial Sequence: Synthetic oligonucleotide
gaaaguggcuaagaacagc

SEQ ID NO: 2568499 - RNA, 19 nt, Artificial Sequence
  Description of Artificial Sequence: Synthetic oligonucleotide
guuacuacugcccgggcca

SEQ ID NO: 2568500 - RNA, 19 nt, Artificial Sequence
  Description of Artificial Sequence: Synthetic oligonucleotide
uccgccacauccacacugg

SEQ ID NO: 2568501 - RNA, 19 nt, Artificial Sequence
  Description of Artificial Sequence: Synthetic oligonucleotide
cuaagaacagcaucuugca

SEQ ID NO: 2568502 - RNA, 19 nt, Artificial Sequence
  Description of Artificial Sequence: Synthetic oligonucleotide
accagacugauguuggagu

SEQ ID NO: 2568503 - RNA, 19 nt, Artificial Sequence
  Description of Artificial Sequence: Synthetic oligonucleotide
acaugaggaggagaacggc

SEQ ID NO: 2568504 - RNA, 19 nt, Artificial Sequence
  Description of Artificial Sequence: Synthetic oligonucleotide
acgcuaaggaacaugagga

SEQ ID NO: 2568505 - RNA, 19 nt, Artificial Sequence
  Description of Artificial Sequence: Synthetic oligonucleotide
aacgagcagagguggacga

SEQ ID NO: 2568506 - RNA, 19 nt, Artificial Sequence
  Description of Artificial Sequence: Synthetic oligonucleotide
aagagggaugcagcgggac

SEQ ID NO: 2568507 - RNA, 19 nt, Artificial Sequence
  Description of Artificial Sequence: Synthetic oligonucleotide
auuccgggacaugacaagg

SEQ ID NO: 2568508 - RNA, 19 nt, Artificial Sequence
  Description of Artificial Sequence: Synthetic oligonucleotide
guacgugaugaaauagggg

SEQ ID NO: 2568509 - RNA, 19 nt, Artificial Sequence
  Description of Artificial Sequence: Synthetic oligonucleotide
guccuguuacuacugcccg

SEQ ID NO: 2568510 - RNA, 19 nt, Artificial Sequence
  Description of Artificial Sequence: Synthetic oligonucleotide
auucaaugccucgggcucc

SEQ ID NO: 2568511 - RNA, 19 nt, Artificial Sequence
  Description of Artificial Sequence: Synthetic oligonucleotide
agccgaggcgacuauguag

SEQ ID NO: 2568512 - RNA, 19 nt, Artificial Sequence
  Description of Artificial Sequence: Synthetic oligonucleotide
gagccagaaguccuguuac

SEQ ID NO: 2568513 - RNA, 19 nt, Artificial Sequence
  Description of Artificial Sequence: Synthetic oligonucleotide
guggaacagggucaucacg

SEQ ID NO: 2568514 - RNA, 19 nt, Artificial Sequence
  Description of Artificial Sequence: Synthetic oligonucleotide
uaggcgagggcgaagcagu

SEQ ID NO: 2568515 - RNA, 19 nt, Artificial Sequence
  Description of Artificial Sequence: Synthetic oligonucleotide
gaauuccccaaugaaguca

SEQ ID NO: 2568516 - RNA, 19 nt, Artificial Sequence
  Description of Artificial Sequence: Synthetic oligonucleotide
acuauguaguggaccagac

SEQ ID NO: 2568517 - RNA, 19 nt, Artificial Sequence
  Description of Artificial Sequence: Synthetic oligonucleotide
uccuguuacuacugcccgg

SEQ ID NO: 2568518 - RNA, 19 nt, Artificial Sequence
  Description of Artificial Sequence: Synthetic oligonucleotide
cagucaaauucaaugccuc

SEQ ID NO: 2568519 - RNA, 19 nt, Artificial Sequence
  Description of Artificial Sequence: Synthetic oligonucleotide
gagaacggcaggccggaag

SEQ ID NO: 2568520 - RNA, 19 nt, Artificial Sequence
  Description of Artificial Sequence: Synthetic oligonucleotide
uuuccagaaggcguuguac

SEQ ID NO: 2568521 - RNA, 19 nt, Artificial Sequence
  Description of Artificial Sequence: Synthetic oligonucleotide
ugaauuccccaaugaaguc

SEQ ID NO: 2568522 - RNA, 19 nt, Artificial Sequence
  Description of Artificial Sequence: Synthetic oligonucleotide
uaagaacagcaucuugcau

SEQ ID NO: 2568523 - RNA, 19 nt, Artificial Sequence
  Description of Artificial Sequence: Synthetic oligonucleotide
gcuaaggaacaugaggagg

SEQ ID NO: 2568524 - RNA, 19 nt, Artificial Sequence
  Description of Artificial Sequence: Synthetic oligonucleotide
aauuccccaaugaagucau

SEQ ID NO: 2568525 - RNA, 19 nt, Artificial Sequence
  Description of Artificial Sequence: Synthetic oligonucleotide
acaaucuaggaguguacau

SEQ ID NO: 2568526 - RNA, 19 nt, Artificial Sequence
  Description of Artificial Sequence: Synthetic oligonucleotide
caaugaagucauagaugcc

SEQ ID NO: 2568527 - RNA, 19 nt, Artificial Sequence
  Description of Artificial Sequence: Synthetic oligonucleotide
cacgcauuuccagaaggcg

SEQ ID NO: 2568528 - RNA, 19 nt, Artificial Sequence
  Description of Artificial Sequence: Synthetic oligonucleotide
aggggaaguaggcgagggc

SEQ ID NO: 2568529 - RNA, 19 nt, Artificial Sequence
  Description of Artificial Sequence: Synthetic oligonucleotide
uggccuucaugaauucccc

SEQ ID NO: 2568530 - RNA, 19 nt, Artificial Sequence
  Description of Artificial Sequence: Synthetic oligonucleotide
ggugcugagagccagaagu

SEQ ID NO: 2568531 - RNA, 19 nt, Artificial Sequence
  Description of Artificial Sequence: Synthetic oligonucleotide
acccaaagagggaugcagc

SEQ ID NO: 2568532 - RNA, 19 nt, Artificial Sequence
  Description of Artificial Sequence: Synthetic oligonucleotide
acuggccuucaugaauucc

SEQ ID NO: 2568533 - RNA, 19 nt, Artificial Sequence
  Description of Artificial Sequence: Synthetic oligonucleotide
acuuguacgugaugaaaua

SEQ ID NO: 2568534 - RNA, 19 nt, Artificial Sequence
  Description of Artificial Sequence: Synthetic oligonucleotide
aguguacauugaccacagc

SEQ ID NO: 2568535 - RNA, 19 nt, Artificial Sequence
  Description of Artificial Sequence: Synthetic oligonucleotide
gcaaccaugaucuuguacu

SEQ ID NO: 2568536 - RNA, 19 nt, Artificial Sequence
  Description of Artificial Sequence: Synthetic oligonucleotide
agguuuaggccuaucaggu

SEQ ID NO: 2568537 - RNA, 19 nt, Artificial Sequence
  Description of Artificial Sequence: Synthetic oligonucleotide
gacaaucuaggaguguaca

SEQ ID NO: 2568538 - RNA, 19 nt, Artificial Sequence
  Description of Artificial Sequence: Synthetic oligonucleotide
cauuccgggacaugacaag

SEQ ID NO: 2568539 - RNA, 19 nt, Artificial Sequence
  Description of Artificial Sequence: Synthetic oligonucleotide
augccucgggcucccaccc

SEQ ID NO: 2568540 - RNA, 19 nt, Artificial Sequence
  Description of Artificial Sequence: Synthetic oligonucleotide
gaccagacugauguuggag

SEQ ID NO: 2568541 - RNA, 19 nt, Artificial Sequence
  Description of Artificial Sequence: Synthetic oligonucleotide
uacagggccaaggugcuga

SEQ ID NO: 2568542 - RNA, 19 nt, Artificial Sequence
  Description of Artificial Sequence: Synthetic oligonucleotide
acagggucaucacgccggc

SEQ ID NO: 2568543 - RNA, 19 nt, Artificial Sequence
  Description of Artificial Sequence: Synthetic oligonucleotide
ggacauaaugagcucagca

SEQ ID NO: 2568544 - RNA, 19 nt, Artificial Sequence
  Description of Artificial Sequence: Synthetic oligonucleotide
uggggaagaaaguggcuaa

SEQ ID NO: 2568545 - RNA, 19 nt, Artificial Sequence
  Description of Artificial Sequence: Synthetic oligonucleotide
ggggaaguaggcgagggcg

SEQ ID NO: 2568546 - RNA, 19 nt, Artificial Sequence
  Description of Artificial Sequence: Synthetic oligonucleotide
aagcaguucccgaagugga

SEQ ID NO: 2568547 - RNA, 19 nt, Artificial Sequence
  Description of Artificial Sequence: Synthetic oligonucleotide
aggccuaucagguccgcca

SEQ ID NO: 2568548 - RNA, 19 nt, Artificial Sequence
  Description of Artificial Sequence: Synthetic oligonucleotide
agagccagaaguccuguua

SEQ ID NO: 2568549 - RNA, 19 nt, Artificial Sequence
  Description of Artificial Sequence: Synthetic oligonucleotide
aggucauagcguguuauca

SEQ ID NO: 2568550 - RNA, 19 nt, Artificial Sequence
  Description of Artificial Sequence: Synthetic oligonucleotide
cagaaggcguuguacucag

SEQ ID NO: 2568551 - RNA, 19 nt, Artificial Sequence
  Description of Artificial Sequence: Synthetic oligonucleotide
gaagucauagaugccaccu

SEQ ID NO: 2568552 - RNA, 19 nt, Artificial Sequence
  Description of Artificial Sequence: Synthetic oligonucleotide
gcaacauacagggccaagg

SEQ ID NO: 2568553 - RNA, 19 nt, Artificial Sequence
  Description of Artificial Sequence: Synthetic oligonucleotide
uuccgggacaugacaaggu

SEQ ID NO: 2568554 - RNA, 19 nt, Artificial Sequence
  Description of Artificial Sequence: Synthetic oligonucleotide
cguguuaucauccagaccu

SEQ ID NO: 2568555 - RNA, 19 nt, Artificial Sequence
  Description of Artificial Sequence: Synthetic oligonucleotide
gacuauguaguggaccaga

SEQ ID NO: 2568556 - RNA, 19 nt, Artificial Sequence
  Description of Artificial Sequence: Synthetic oligonucleotide
ucuugcauagcugcacaaa

SEQ ID NO: 2568557 - RNA, 19 nt, Artificial Sequence
  Description of Artificial Sequence: Synthetic oligonucleotide
ugcacuuguacgugaugaa

SEQ ID NO: 2568558 - RNA, 19 nt, Artificial Sequence
  Description of Artificial Sequence: Synthetic oligonucleotide
ugaugaaauaggggaagua

SEQ ID NO: 2568559 - RNA, 19 nt, Artificial Sequence
  Description of Artificial Sequence: Synthetic oligonucleotide
caacgagcagagguggacg

SEQ ID NO: 2568560 - RNA, 19 nt, Artificial Sequence
  Description of Artificial Sequence: Synthetic oligonucleotide
cacccaaagagggaugcag

SEQ ID NO: 2568561 - RNA, 19 nt, Artificial Sequence
  Description of Artificial Sequence: Synthetic oligonucleotide
ugcucaucuggauguauuu

SEQ ID NO: 2568562 - RNA, 19 nt, Artificial Sequence
  Description of Artificial Sequence: Synthetic oligonucleotide
uguaguggaccagacugau

SEQ ID NO: 2568563 - RNA, 19 nt, Artificial Sequence
  Description of Artificial Sequence: Synthetic oligonucleotide
guagacgcuaaggaacaug

SEQ ID NO: 2568564 - RNA, 19 nt, Artificial Sequence
  Description of Artificial Sequence: Synthetic oligonucleotide
aggccgcugcacuuguacg

SEQ ID NO: 2568565 - RNA, 19 nt, Artificial Sequence
  Description of Artificial Sequence: Synthetic oligonucleotide
uugccugcauuccgggaca

SEQ ID NO: 2568566 - RNA, 19 nt, Artificial Sequence
  Description of Artificial Sequence: Synthetic oligonucleotide
aggccggaaggugugguac

SEQ ID NO: 2568567 - RNA, 19 nt, Artificial Sequence
  Description of Artificial Sequence: Synthetic oligonucleotide
cugagagccagaaguccug

SEQ ID NO: 2568568 - RNA, 19 nt, Artificial Sequence
  Description of Artificial Sequence: Synthetic oligonucleotide
aaugcucaucuggauguau

SEQ ID NO: 2568569 - RNA, 19 nt, Artificial Sequence
  Description of Artificial Sequence: Synthetic oligonucleotide
gagggcgaagcaguucccg

SEQ ID NO: 2568570 - RNA, 19 nt, Artificial Sequence
  Description of Artificial Sequence: Synthetic oligonucleotide
cccaaagagggaugcagcg

SEQ ID NO: 2568571 - RNA, 19 nt, Artificial Sequence
  Description of Artificial Sequence: Synthetic oligonucleotide
guggacgaaggucuccaug

SEQ ID NO: 2568572 - RNA, 19 nt, Artificial Sequence
  Description of Artificial Sequence: Synthetic oligonucleotide
uguacucagacaggccgcu

SEQ ID NO: 2568573 - RNA, 19 nt, Artificial Sequence
  Description of Artificial Sequence: Synthetic oligonucleotide
cauagaugccaccuuccca

SEQ ID NO: 2568574 - RNA, 19 nt, Artificial Sequence
  Description of Artificial Sequence: Synthetic oligonucleotide
guggcuaagaacagcaucu

SEQ ID NO: 2568575 - RNA, 19 nt, Artificial Sequence
  Description of Artificial Sequence: Synthetic oligonucleotide
guucccgaaguggaacagg

SEQ ID NO: 2568576 - RNA, 19 nt, Artificial Sequence
  Description of Artificial Sequence: Synthetic oligonucleotide
guuggagucaaugcucauc

SEQ ID NO: 2568577 - RNA, 19 nt, Artificial Sequence
  Description of Artificial Sequence: Synthetic oligonucleotide
guaggcgagggcgaagcag

SEQ ID NO: 2568578 - RNA, 19 nt, Artificial Sequence
  Description of Artificial Sequence: Synthetic oligonucleotide
aacggcaggccggaaggug

SEQ ID NO: 2568579 - RNA, 19 nt, Artificial Sequence
  Description of Artificial Sequence: Synthetic oligonucleotide
ucgggcucccacccaaaga

SEQ ID NO: 2568580 - RNA, 19 nt, Artificial Sequence
  Description of Artificial Sequence: Synthetic oligonucleotide
ggugugguacaggucauag

SEQ ID NO: 2568581 - RNA, 19 nt, Artificial Sequence
  Description of Artificial Sequence: Synthetic oligonucleotide
auaggggaaguaggcgagg

SEQ ID NO: 2568582 - RNA, 19 nt, Artificial Sequence
  Description of Artificial Sequence: Synthetic oligonucleotide
gcgacuauguaguggacca

SEQ ID NO: 2568583 - RNA, 19 nt, Artificial Sequence
  Description of Artificial Sequence: Synthetic oligonucleotide
acgcauuuccagaaggcgu

SEQ ID NO: 2568584 - RNA, 19 nt, Artificial Sequence
  Description of Artificial Sequence: Synthetic oligonucleotide
cauagcguguuaucaucca

SEQ ID NO: 2568585 - RNA, 19 nt, Artificial Sequence
  Description of Artificial Sequence: Synthetic oligonucleotide
auuuccagaaggcguugua

SEQ ID NO: 2568586 - RNA, 19 nt, Artificial Sequence
  Description of Artificial Sequence: Synthetic oligonucleotide
gcgagggcgaagcaguucc

SEQ ID NO: 2568587 - RNA, 19 nt, Artificial Sequence
  Description of Artificial Sequence: Synthetic oligonucleotide
aguucccgaaguggaacag

SEQ ID NO: 2568588 - RNA, 19 nt, Artificial Sequence
  Description of Artificial Sequence: Synthetic oligonucleotide
ggaguguacauugaccaca

SEQ ID NO: 2568589 - RNA, 19 nt, Artificial Sequence
  Description of Artificial Sequence: Synthetic oligonucleotide
agcagagguggacgaaggu

SEQ ID NO: 2568590 - RNA, 19 nt, Artificial Sequence
  Description of Artificial Sequence: Synthetic oligonucleotide
uggagucaaugcucaucug

SEQ ID NO: 2568591 - RNA, 19 nt, Artificial Sequence
  Description of Artificial Sequence: Synthetic oligonucleotide
caggucauagcguguuauc

SEQ ID NO: 2568592 - RNA, 19 nt, Artificial Sequence
  Description of Artificial Sequence: Synthetic oligonucleotide
agacugauguuggagucaa

SEQ ID NO: 2568593 - RNA, 19 nt, Artificial Sequence
  Description of Artificial Sequence: Synthetic oligonucleotide
ggccaaggugcugagagcc

SEQ ID NO: 2568594 - RNA, 19 nt, Artificial Sequence
  Description of Artificial Sequence: Synthetic oligonucleotide
ggaacagggucaucacgcc

SEQ ID NO: 2568595 - RNA, 19 nt, Artificial Sequence
  Description of Artificial Sequence: Synthetic oligonucleotide
ccuguuacuacugcccggg

SEQ ID NO: 2568596 - RNA, 19 nt, Artificial Sequence
  Description of Artificial Sequence: Synthetic oligonucleotide
caucuugcauagcugcaca

SEQ ID NO: 2568597 - RNA, 19 nt, Artificial Sequence
  Description of Artificial Sequence: Synthetic oligonucleotide
aaaggccuuguagacgcua

SEQ ID NO: 2568598 - RNA, 19 nt, Artificial Sequence
  Description of Artificial Sequence: Synthetic oligonucleotide
gaaguaggcgagggcgaag

SEQ ID NO: 2568599 - RNA, 19 nt, Artificial Sequence
  Description of Artificial Sequence: Synthetic oligonucleotide
caggccgcugcacuuguac

SEQ ID NO: 2568600 - RNA, 19 nt, Artificial Sequence
  Description of Artificial Sequence: Synthetic oligonucleotide
uucaaugccucgggcuccc

SEQ ID NO: 2568601 - RNA, 19 nt, Artificial Sequence
  Description of Artificial Sequence: Synthetic oligonucleotide
agccagaaguccuguuacu

SEQ ID NO: 2568602 - RNA, 19 nt, Artificial Sequence
  Description of Artificial Sequence: Synthetic oligonucleotide
agggcgaagcaguucccga

SEQ ID NO: 2568603 - RNA, 19 nt, Artificial Sequence
  Description of Artificial Sequence: Synthetic oligonucleotide
uacugcccgggccagcaau

SEQ ID NO: 2568604 - RNA, 19 nt, Artificial Sequence
  Description of Artificial Sequence: Synthetic oligonucleotide
uuacuacugcccgggccag

SEQ ID NO: 2568605 - RNA, 19 nt, Artificial Sequence
  Description of Artificial Sequence: Synthetic oligonucleotide
agcaacauacagggccaag

SEQ ID NO: 2568606 - RNA, 19 nt, Artificial Sequence
  Description of Artificial Sequence: Synthetic oligonucleotide
cugcauuccgggacaugac

SEQ ID NO: 2568607 - RNA, 19 nt, Artificial Sequence
  Description of Artificial Sequence: Synthetic oligonucleotide
cugcacaaagagguaggug

SEQ ID NO: 2568608 - RNA, 19 nt, Artificial Sequence
  Description of Artificial Sequence: Synthetic oligonucleotide
ggcgacuauguaguggacc

SEQ ID NO: 2568609 - RNA, 19 nt, Artificial Sequence
  Description of Artificial Sequence: Synthetic oligonucleotide
auccagaccugagccgagg

SEQ ID NO: 2568610 - RNA, 19 nt, Artificial Sequence
  Description of Artificial Sequence: Synthetic oligonucleotide
acgugaugaaauaggggaa

SEQ ID NO: 2568611 - RNA, 19 nt, Artificial Sequence
  Description of Artificial Sequence: Synthetic oligonucleotide
cagaccugagccgaggcga

SEQ ID NO: 2568612 - RNA, 19 nt, Artificial Sequence
  Description of Artificial Sequence: Synthetic oligonucleotide
agguggacgaaggucucca

SEQ ID NO: 2568613 - RNA, 19 nt, Artificial Sequence
  Description of Artificial Sequence: Synthetic oligonucleotide
gggccgacaaucuaggagu

SEQ ID NO: 2568614 - RNA, 19 nt, Artificial Sequence
  Description of Artificial Sequence: Synthetic oligonucleotide
aguaggcgagggcgaagca

SEQ ID NO: 2568615 - RNA, 19 nt, Artificial Sequence
  Description of Artificial Sequence: Synthetic oligonucleotide
agaccugagccgaggcgac

SEQ ID NO: 2568616 - RNA, 19 nt, Artificial Sequence
  Description of Artificial Sequence: Synthetic oligonucleotide
gcguuguacucagacaggc

SEQ ID NO: 2568617 - RNA, 19 nt, Artificial Sequence
  Description of Artificial Sequence: Synthetic oligonucleotide
guggggaagaaaguggcua

SEQ ID NO: 2568618 - RNA, 19 nt, Artificial Sequence
  Description of Artificial Sequence: Synthetic oligonucleotide
ccugggccgacaaucuagg

SEQ ID NO: 2568619 - RNA, 19 nt, Artificial Sequence
  Description of Artificial Sequence: Synthetic oligonucleotide
cugcccaacgagcagaggu

SEQ ID NO: 2568620 - RNA, 19 nt, Artificial Sequence
  Description of Artificial Sequence: Synthetic oligonucleotide
caguucccgaaguggaaca

SEQ ID NO: 2568621 - RNA, 19 nt, Artificial Sequence
  Description of Artificial Sequence: Synthetic oligonucleotide
agacgcuaaggaacaugag

SEQ ID NO: 2568622 - RNA, 19 nt, Artificial Sequence
  Description of Artificial Sequence: Synthetic oligonucleotide
gagguggacgaaggucucc

SEQ ID NO: 2568623 - RNA, 19 nt, Artificial Sequence
  Description of Artificial Sequence: Synthetic oligonucleotide
agguaauagccaacaccug

SEQ ID NO: 2568624 - RNA, 19 nt, Artificial Sequence
  Description of Artificial Sequence: Synthetic oligonucleotide
cugcacgcauuuccagaag

SEQ ID NO: 2568625 - RNA, 19 nt, Artificial Sequence
  Description of Artificial Sequence: Synthetic oligonucleotide
guguuaucauccagaccug

SEQ ID NO: 2568626 - RNA, 19 nt, Artificial Sequence
  Description of Artificial Sequence: Synthetic oligonucleotide
uagccaacaccugggccga

SEQ ID NO: 2568627 - RNA, 19 nt, Artificial Sequence
  Description of Artificial Sequence: Synthetic oligonucleotide
cuguuacuacugcccgggc

SEQ ID NO: 2568628 - RNA, 19 nt, Artificial Sequence
  Description of Artificial Sequence: Synthetic oligonucleotide
aucagguccgccacaucca

SEQ ID NO: 2568629 - RNA, 19 nt, Artificial Sequence
  Description of Artificial Sequence: Synthetic oligonucleotide
uaggccuaucagguccgcc

SEQ ID NO: 2568630 - RNA, 19 nt, Artificial Sequence
  Description of Artificial Sequence: Synthetic oligonucleotide
agacaggccgcugcacuug

SEQ ID NO: 2568631 - RNA, 19 nt, Artificial Sequence
  Description of Artificial Sequence: Synthetic oligonucleotide
uguagacgcuaaggaacau

SEQ ID NO: 2568632 - RNA, 19 nt, Artificial Sequence
  Description of Artificial Sequence: Synthetic oligonucleotide
augcagcgggacauaauga

SEQ ID NO: 2568633 - RNA, 19 nt, Artificial Sequence
  Description of Artificial Sequence: Synthetic oligonucleotide
gccuucaugaauuccccaa

SEQ ID NO: 2568634 - RNA, 19 nt, Artificial Sequence
  Description of Artificial Sequence: Synthetic oligonucleotide
gguuuaggccuaucagguc

SEQ ID NO: 2568635 - RNA, 19 nt, Artificial Sequence
  Description of Artificial Sequence: Synthetic oligonucleotide
caaugccucgggcucccac

SEQ ID NO: 2568636 - RNA, 19 nt, Artificial Sequence
  Description of Artificial Sequence: Synthetic oligonucleotide
ggcguuguacucagacagg

SEQ ID NO: 2568637 - RNA, 19 nt, Artificial Sequence
  Description of Artificial Sequence: Synthetic oligonucleotide
aucuaggaguguacauuga

SEQ ID NO: 2568638 - RNA, 19 nt, Artificial Sequence
  Description of Artificial Sequence: Synthetic oligonucleotide
uuaggccuaucagguccgc

SEQ ID NO: 2568639 - RNA, 19 nt, Artificial Sequence
  Description of Artificial Sequence: Synthetic oligonucleotide
augacaagguuuaggccua

SEQ ID NO: 2568640 - RNA, 19 nt, Artificial Sequence
  Description of Artificial Sequence: Synthetic oligonucleotide
aguggaccagacugauguu

SEQ ID NO: 2568641 - RNA, 19 nt, Artificial Sequence
  Description of Artificial Sequence: Synthetic oligonucleotide
ggucuccaugacaaaggcc

SEQ ID NO: 2568642 - RNA, 19 nt, Artificial Sequence
  Description of Artificial Sequence: Synthetic oligonucleotide
cuauguaguggaccagacu

SEQ ID NO: 2568643 - RNA, 19 nt, Artificial Sequence
  Description of Artificial Sequence: Synthetic oligonucleotide
gcagcgggacauaaugagc

SEQ ID NO: 2568644 - RNA, 19 nt, Artificial Sequence
  Description of Artificial Sequence: Synthetic oligonucleotide
gugcugagagccagaaguc

SEQ ID NO: 2568645 - RNA, 19 nt, Artificial Sequence
  Description of Artificial Sequence: Synthetic oligonucleotide
gcagagguggacgaagguc

SEQ ID NO: 2568646 - RNA, 19 nt, Artificial Sequence
  Description of Artificial Sequence: Synthetic oligonucleotide
ccaugaucuuguacucccc

SEQ ID NO: 2568647 - RNA, 19 nt, Artificial Sequence
  Description of Artificial Sequence: Synthetic oligonucleotide
ugcccgggccagcaaugcu

SEQ ID NO: 2568648 - RNA, 19 nt, Artificial Sequence
  Description of Artificial Sequence: Synthetic oligonucleotide
caaugcuguccagcugccc

SEQ ID NO: 2568649 - RNA, 19 nt, Artificial Sequence
  Description of Artificial Sequence: Synthetic oligonucleotide
ccagaccugagccgaggcg

SEQ ID NO: 2568650 - RNA, 19 nt, Artificial Sequence
  Description of Artificial Sequence: Synthetic oligonucleotide
cauacagggccaaggugcu

SEQ ID NO: 2568651 - RNA, 19 nt, Artificial Sequence
  Description of Artificial Sequence: Synthetic oligonucleotide
gcacgcauuuccagaaggc

SEQ ID NO: 2568652 - RNA, 19 nt, Artificial Sequence
  Description of Artificial Sequence: Synthetic oligonucleotide
ccgaaguggaacaggguca

SEQ ID NO: 2568653 - RNA, 19 nt, Artificial Sequence
  Description of Artificial Sequence: Synthetic oligonucleotide
agcugcccaacgagcagag

SEQ ID NO: 2568654 - RNA, 19 nt, Artificial Sequence
  Description of Artificial Sequence: Synthetic oligonucleotide
gcguguuaucauccagacc

SEQ ID NO: 2568655 - RNA, 19 nt, Artificial Sequence
  Description of Artificial Sequence: Synthetic oligonucleotide
caaucuaggaguguacauu

SEQ ID NO: 2568656 - RNA, 19 nt, Artificial Sequence
  Description of Artificial Sequence: Synthetic oligonucleotide
cacuggccuucaugaauuc

SEQ ID NO: 2568657 - RNA, 19 nt, Artificial Sequence
  Description of Artificial Sequence: Synthetic oligonucleotide
acggcaggccggaaggugu

SEQ ID NO: 2568658 - RNA, 19 nt, Artificial Sequence
  Description of Artificial Sequence: Synthetic oligonucleotide
auagcugcacaaagaggua

SEQ ID NO: 2568659 - RNA, 19 nt, Artificial Sequence
  Description of Artificial Sequence: Synthetic oligonucleotide
gcacaaagagguaggugac

SEQ ID NO: 2568660 - RNA, 19 nt, Artificial Sequence
  Description of Artificial Sequence: Synthetic oligonucleotide
cgcuaaggaacaugaggag

SEQ ID NO: 2568661 - RNA, 19 nt, Artificial Sequence
  Description of Artificial Sequence: Synthetic oligonucleotide
gucaucacgccggccgccc

SEQ ID NO: 2568662 - RNA, 19 nt, Artificial Sequence
  Description of Artificial Sequence: Synthetic oligonucleotide
gcaguucccgaaguggaac

SEQ ID NO: 2568663 - RNA, 19 nt, Artificial Sequence
  Description of Artificial Sequence: Synthetic oligonucleotide
ggacgaaggucuccaugac

SEQ ID NO: 2568664 - RNA, 19 nt, Artificial Sequence
  Description of Artificial Sequence: Synthetic oligonucleotide
uucccagguggggaagaaa

SEQ ID NO: 2568665 - RNA, 19 nt, Artificial Sequence
  Description of Artificial Sequence: Synthetic oligonucleotide
uaggugaccccggccugca

SEQ ID NO: 2568666 - RNA, 19 nt, Artificial Sequence
  Description of Artificial Sequence: Synthetic oligonucleotide
cuaucagguccgccacauc

SEQ ID NO: 2568667 - RNA, 19 nt, Artificial Sequence
  Description of Artificial Sequence: Synthetic oligonucleotide
ggucauagcguguuaucau

SEQ ID NO: 2568668 - RNA, 19 nt, Artificial Sequence
  Description of Artificial Sequence: Synthetic oligonucleotide
ccugcauuccgggacauga

SEQ ID NO: 2568669 - RNA, 19 nt, Artificial Sequence
  Description of Artificial Sequence: Synthetic oligonucleotide
aggcgacuauguaguggac

SEQ ID NO: 2568670 - RNA, 19 nt, Artificial Sequence
  Description of Artificial Sequence: Synthetic oligonucleotide
gagggaugcagcgggacau

SEQ ID NO: 2568671 - RNA, 19 nt, Artificial Sequence
  Description of Artificial Sequence: Synthetic oligonucleotide
ggccuaucagguccgccac

SEQ ID NO: 2568672 - RNA, 19 nt, Artificial Sequence
  Description of Artificial Sequence: Synthetic oligonucleotide
ggauguauuuccagucaaa

SEQ ID NO: 2568673 - RNA, 19 nt, Artificial Sequence
  Description of Artificial Sequence: Synthetic oligonucleotide
cccacccaaagagggaugc

SEQ ID NO: 2568674 - RNA, 19 nt, Artificial Sequence
  Description of Artificial Sequence: Synthetic oligonucleotide
cugagccgaggcgacuaug

SEQ ID NO: 2568675 - RNA, 19 nt, Artificial Sequence
  Description of Artificial Sequence: Synthetic oligonucleotide
gggacaugacaagguuuag

SEQ ID NO: 2568676 - RNA, 19 nt, Artificial Sequence
  Description of Artificial Sequence: Synthetic oligonucleotide
ccaacgagcagagguggac

SEQ ID NO: 2568677 - RNA, 19 nt, Artificial Sequence
  Description of Artificial Sequence: Synthetic oligonucleotide
auacagggccaaggugcug

SEQ ID NO: 2568678 - RNA, 19 nt, Artificial Sequence
  Description of Artificial Sequence: Synthetic oligonucleotide
gggucaucacgccggccgc

SEQ ID NO: 2568679 - RNA, 19 nt, Artificial Sequence
  Description of Artificial Sequence: Synthetic oligonucleotide
gggccaaggugcugagagc

SEQ ID NO: 2568680 - RNA, 19 nt, Artificial Sequence
  Description of Artificial Sequence: Synthetic oligonucleotide
gccaccuucccaggugggg

SEQ ID NO: 2568681 - RNA, 19 nt, Artificial Sequence
  Description of Artificial Sequence: Synthetic oligonucleotide
cgacaaucuaggaguguac

SEQ ID NO: 2568682 - RNA, 19 nt, Artificial Sequence
  Description of Artificial Sequence: Synthetic oligonucleotide
gagccgaggcgacuaugua

SEQ ID NO: 2568683 - RNA, 19 nt, Artificial Sequence
  Description of Artificial Sequence: Synthetic oligonucleotide
guacucagacaggccgcug

SEQ ID NO: 2568684 - RNA, 19 nt, Artificial Sequence
  Description of Artificial Sequence: Synthetic oligonucleotide
ccugcacgcauuuccagaa

SEQ ID NO: 2568685 - RNA, 19 nt, Artificial Sequence
  Description of Artificial Sequence: Synthetic oligonucleotide
gcgggacauaaugagcuca

SEQ ID NO: 2568686 - RNA, 19 nt, Artificial Sequence
  Description of Artificial Sequence: Synthetic oligonucleotide
accugagccgaggcgacua

SEQ ID NO: 2568687 - RNA, 19 nt, Artificial Sequence
  Description of Artificial Sequence: Synthetic oligonucleotide
cgaggcgacuauguagugg

SEQ ID NO: 2568688 - RNA, 19 nt, Artificial Sequence
  Description of Artificial Sequence: Synthetic oligonucleotide
cgaagcaguucccgaagug

SEQ ID NO: 2568689 - RNA, 19 nt, Artificial Sequence
  Description of Artificial Sequence: Synthetic oligonucleotide
gcauuccgggacaugacaa

SEQ ID NO: 2568690 - RNA, 19 nt, Artificial Sequence
  Description of Artificial Sequence: Synthetic oligonucleotide
gccggaaggugugguacag

SEQ ID NO: 2568691 - RNA, 19 nt, Artificial Sequence
  Description of Artificial Sequence: Synthetic oligonucleotide
guacaggucauagcguguu

SEQ ID NO: 2568692 - RNA, 19 nt, Artificial Sequence
  Description of Artificial Sequence: Synthetic oligonucleotide
gacaggccgcugcacuugu

SEQ ID NO: 2568693 - RNA, 19 nt, Artificial Sequence
  Description of Artificial Sequence: Synthetic oligonucleotide
cugggccgacaaucuagga

SEQ ID NO: 2568694 - RNA, 19 nt, Artificial Sequence
  Description of Artificial Sequence: Synthetic oligonucleotide
ccagaaggcguuguacuca

SEQ ID NO: 2568695 - RNA, 19 nt, Artificial Sequence
  Description of Artificial Sequence: Synthetic oligonucleotide
ggccgacaaucuaggagug

SEQ ID NO: 2568696 - RNA, 19 nt, Artificial Sequence
  Description of Artificial Sequence: Synthetic oligonucleotide
cgagcagagguggacgaag

SEQ ID NO: 2568697 - RNA, 19 nt, Artificial Sequence
  Description of Artificial Sequence: Synthetic oligonucleotide
acgagcagagguggacgaa

SEQ ID NO: 2568698 - RNA, 19 nt, Artificial Sequence
  Description of Artificial Sequence: Synthetic oligonucleotide
gccgcugcacuuguacgug

SEQ ID NO: 2568699 - RNA, 19 nt, Artificial Sequence
  Description of Artificial Sequence: Synthetic oligonucleotide
gccgaggcgacuauguagu

SEQ ID NO: 2568700 - RNA, 19 nt, Artificial Sequence
  Description of Artificial Sequence: Synthetic oligonucleotide
cagguccgccacauccaca

SEQ ID NO: 2568701 - RNA, 19 nt, Artificial Sequence
  Description of Artificial Sequence: Synthetic oligonucleotide
cgggacaugacaagguuua

SEQ ID NO: 2568702 - RNA, 19 nt, Artificial Sequence
  Description of Artificial Sequence: Synthetic oligonucleotide
cagggucaucacgccggcc

SEQ ID NO: 2568703 - RNA, 19 nt, Artificial Sequence
  Description of Artificial Sequence: Synthetic oligonucleotide
aggugugguacaggucaua

SEQ ID NO: 2568704 - RNA, 19 nt, Artificial Sequence
  Description of Artificial Sequence: Synthetic oligonucleotide
ggccgcugcacuuguacgu

SEQ ID NO: 2568705 - RNA, 19 nt, Artificial Sequence
  Description of Artificial Sequence: Synthetic oligonucleotide
ggucaucacgccggccgcc

SEQ ID NO: 2568706 - RNA, 19 nt, Artificial Sequence
  Description of Artificial Sequence: Synthetic oligonucleotide
agaaggcguuguacucaga

SEQ ID NO: 2568707 - RNA, 19 nt, Artificial Sequence
  Description of Artificial Sequence: Synthetic oligonucleotide
ccgacaaucuaggagugua

SEQ ID NO: 2568708 - RNA, 19 nt, Artificial Sequence
  Description of Artificial Sequence: Synthetic oligonucleotide
gagagccagaaguccuguu

SEQ ID NO: 2568709 - RNA, 19 nt, Artificial Sequence
  Description of Artificial Sequence: Synthetic oligonucleotide
ggcaggccggaaggugugg

SEQ ID NO: 2568710 - RNA, 19 nt, Artificial Sequence
  Description of Artificial Sequence: Synthetic oligonucleotide
ccggaaggugugguacagg

SEQ ID NO: 2568711 - RNA, 19 nt, Artificial Sequence
  Description of Artificial Sequence: Synthetic oligonucleotide
gguacaggucauagcgugu

SEQ ID NO: 2568712 - RNA, 19 nt, Artificial Sequence
  Description of Artificial Sequence: Synthetic oligonucleotide
gcugcccaacgagcagagg

SEQ ID NO: 2568713 - RNA, 19 nt, Artificial Sequence
  Description of Artificial Sequence: Synthetic oligonucleotide
gaacggcaggccggaaggu

SEQ ID NO: 2568714 - RNA, 19 nt, Artificial Sequence
  Description of Artificial Sequence: Synthetic oligonucleotide
gccuaucagguccgccaca

SEQ ID NO: 2568715 - RNA, 19 nt, Artificial Sequence
  Description of Artificial Sequence: Synthetic oligonucleotide
gggaugcagcgggacauaa

SEQ ID NO: 2568716 - RNA, 19 nt, Artificial Sequence
  Description of Artificial Sequence: Synthetic oligonucleotide
ccgaggcgacuauguagug

SEQ ID NO: 2568717 - RNA, 19 nt, Artificial Sequence
  Description of Artificial Sequence: Synthetic oligonucleotide
caaaggccuuguagacgcu

SEQ ID NO: 2568718 - RNA, 19 nt, Artificial Sequence
  Description of Artificial Sequence: Synthetic oligonucleotide
ggcgagggcgaagcaguuc

SEQ ID NO: 2568719 - RNA, 19 nt, Artificial Sequence
  Description of Artificial Sequence: Synthetic oligonucleotide
cgagggcgaagcaguuccc

SEQ ID NO: 2568720 - RNA, 19 nt, Artificial Sequence
  Description of Artificial Sequence: Synthetic oligonucleotide
cagcaacauacagggccaa

SEQ ID NO: 2568721 - RNA, 19 nt, Artificial Sequence
  Description of Artificial Sequence: Synthetic oligonucleotide
cgacuauguaguggaccag

SEQ ID NO: 2568722 - RNA, 19 nt, Artificial Sequence
  Description of Artificial Sequence: Synthetic oligonucleotide
ccaccuucccaggugggga

SEQ ID NO: 2568723 - RNA, 19 nt, Artificial Sequence
  Description of Artificial Sequence: Synthetic oligonucleotide
cuacugcccgggccagcaa

SEQ ID NO: 2568724 - RNA, 19 nt, Artificial Sequence
  Description of Artificial Sequence: Synthetic oligonucleotide
aggcgagggcgaagcaguu

SEQ ID NO: 2568725 - RNA, 19 nt, Artificial Sequence
  Description of Artificial Sequence: Synthetic oligonucleotide
gguggacgaaggucuccau

SEQ ID NO: 2568726 - RNA, 19 nt, Artificial Sequence
  Description of Artificial Sequence: Synthetic oligonucleotide
cgcauuuccagaaggcguu

SEQ ID NO: 2568727 - RNA, 19 nt, Artificial Sequence
  Description of Artificial Sequence: Synthetic oligonucleotide
ccgcugcacuuguacguga

SEQ ID NO: 2568728 - RNA, 19 nt, Artificial Sequence
  Description of Artificial Sequence: Synthetic oligonucleotide
ccuaucagguccgccacau

SEQ ID NO: 2568729 - RNA, 19 nt, Artificial Sequence
  Description of Artificial Sequence: Synthetic oligonucleotide
caacaccugggccgacaau

SEQ ID NO: 2568730 - RNA, 19 nt, Artificial Sequence
  Description of Artificial Sequence: Synthetic oligonucleotide
cggcaggccggaaggugug

SEQ ID NO: 2568731 - RNA, 19 nt, Artificial Sequence
  Description of Artificial Sequence: Synthetic oligonucleotide
ccgggacaugacaagguuu

SEQ ID NO: 2568732 - RNA, 19 nt, Artificial Sequence
  Description of Artificial Sequence: Synthetic oligonucleotide
ccacccaaagagggaugca

SEQ ID NO: 2568733 - RNA, 19 nt, Artificial Sequence
  Description of Artificial Sequence: Synthetic oligonucleotide
gccgacaaucuaggagugu

SEQ ID NO: 2568734 - RNA, 19 nt, Artificial Sequence
  Description of Artificial Sequence: Synthetic oligonucleotide
cccgggccagcaaugcugu

SEQ ID NO: 2568735 - RNA, 19 nt, Artificial Sequence
  Description of Artificial Sequence: Synthetic oligonucleotide
cauccacacuggccuucau

SEQ ID NO: 2568736 - RNA, 19 nt, Artificial Sequence
  Description of Artificial Sequence: Synthetic oligonucleotide
ccgggccagcaaugcuguc

SEQ ID NO: 2568737 - RNA, 19 nt, Artificial Sequence
  Description of Artificial Sequence: Synthetic oligonucleotide
cccggccugcacgcauuuc

SEQ ID NO: 2568738 - RNA, 19 nt, Artificial Sequence
  Description of Artificial Sequence: Synthetic oligonucleotide
cgcugcacuuguacgugau

SEQ ID NO: 2568739 - RNA, 19 nt, Artificial Sequence
  Description of Artificial Sequence: Synthetic oligonucleotide
ccugagccgaggcgacuau

SEQ ID NO: 2568740 - RNA, 19 nt, Artificial Sequence
  Description of Artificial Sequence: Synthetic oligonucleotide
ccccggccugcacgcauuu

SEQ ID NO: 2568741 - RNA, 19 nt, Artificial Sequence
  Description of Artificial Sequence: Synthetic oligonucleotide
uuuauuguuucaugcgucg

SEQ ID NO: 2568742 - RNA, 19 nt, Artificial Sequence
  Description of Artificial Sequence: Synthetic oligonucleotide
uuagggaaacugcaagucg

SEQ ID NO: 2568743 - RNA, 19 nt, Artificial Sequence
  Description of Artificial Sequence: Synthetic oligonucleotide
aaggcggcgaucuccacgc

SEQ ID NO: 2568744 - RNA, 19 nt, Artificial Sequence
  Description of Artificial Sequence: Synthetic oligonucleotide
ucugcagcgaagaaguuga

SEQ ID NO: 2568745 - RNA, 19 nt, Artificial Sequence
  Description of Artificial Sequence: Synthetic oligonucleotide
agcgaagaaguugaggucc

SEQ ID NO: 2568746 - RNA, 19 nt, Artificial Sequence
  Description of Artificial Sequence: Synthetic oligonucleotide
gaagucuagcucuuccucg

SEQ ID NO: 2568747 - RNA, 19 nt, Artificial Sequence
  Description of Artificial Sequence: Synthetic oligonucleotide
uuggaaaccagacuuugac

SEQ ID NO: 2568748 - RNA, 19 nt, Artificial Sequence
  Description of Artificial Sequence: Synthetic oligonucleotide
aagucuagcucuuccucgg

SEQ ID NO: 2568749 - RNA, 19 nt, Artificial Sequence
  Description of Artificial Sequence: Synthetic oligonucleotide
ggaaacugcaagucgaugg

SEQ ID NO: 2568750 - RNA, 19 nt, Artificial Sequence
  Description of Artificial Sequence: Synthetic oligonucleotide
aagaaguugagguccggca

SEQ ID NO: 2568751 - RNA, 19 nt, Artificial Sequence
  Description of Artificial Sequence: Synthetic oligonucleotide
aauccggcugcucaggaca

SEQ ID NO: 2568752 - RNA, 19 nt, Artificial Sequence
  Description of Artificial Sequence: Synthetic oligonucleotide
gaaacugcaagucgauggc

SEQ ID NO: 2568753 - RNA, 19 nt, Artificial Sequence
  Description of Artificial Sequence: Synthetic oligonucleotide
ucuccgacaaucccgggcc

SEQ ID NO: 2568754 - RNA, 19 nt, Artificial Sequence
  Description of Artificial Sequence: Synthetic oligonucleotide
ucgguuuuggaaaccagac

SEQ ID NO: 2568755 - RNA, 19 nt, Artificial Sequence
  Description of Artificial Sequence: Synthetic oligonucleotide
acuuugaccugccuuucgg

SEQ ID NO: 2568756 - RNA, 19 nt, Artificial Sequence
  Description of Artificial Sequence: Synthetic oligonucleotide
cagauacuuguugaaaugg

SEQ ID NO: 2568757 - RNA, 19 nt, Artificial Sequence
  Description of Artificial Sequence: Synthetic oligonucleotide
uauuguuucaugcgucggu

SEQ ID NO: 2568758 - RNA, 19 nt, Artificial Sequence
  Description of Artificial Sequence: Synthetic oligonucleotide
aacugcaagucgauggcac

SEQ ID NO: 2568759 - RNA, 19 nt, Artificial Sequence
  Description of Artificial Sequence: Synthetic oligonucleotide
agguuagggaaacugcaag

SEQ ID NO: 2568760 - RNA, 19 nt, Artificial Sequence
  Description of Artificial Sequence: Synthetic oligonucleotide
uggaaaggaucgaggaaag

SEQ ID NO: 2568761 - RNA, 19 nt, Artificial Sequence
  Description of Artificial Sequence: Synthetic oligonucleotide
auccggagguucccgaugc

SEQ ID NO: 2568762 - RNA, 19 nt, Artificial Sequence
  Description of Artificial Sequence: Synthetic oligonucleotide
gaaaggaucgaggaaagaa

SEQ ID NO: 2568763 - RNA, 19 nt, Artificial Sequence
  Description of Artificial Sequence: Synthetic oligonucleotide
uuuggaaaccagacuuuga

SEQ ID NO: 2568764 - RNA, 19 nt, Artificial Sequence
  Description of Artificial Sequence: Synthetic oligonucleotide
uuauuguuucaugcgucgg

SEQ ID NO: 2568765 - RNA, 19 nt, Artificial Sequence
  Description of Artificial Sequence: Synthetic oligonucleotide
aaaggaucgaggaaagaaa

SEQ ID NO: 2568766 - RNA, 19 nt, Artificial Sequence
  Description of Artificial Sequence: Synthetic oligonucleotide
cugagcaucgugcagccag

SEQ ID NO: 2568767 - RNA, 19 nt, Artificial Sequence
  Description of Artificial Sequence: Synthetic oligonucleotide
uguugguguaggccgugcg

SEQ ID NO: 2568768 - RNA, 19 nt, Artificial Sequence
  Description of Artificial Sequence: Synthetic oligonucleotide
cugccuuucggugaggucc

SEQ ID NO: 2568769 - RNA, 19 nt, Artificial Sequence
  Description of Artificial Sequence: Synthetic oligonucleotide
ugggagaaagaccuccgga

SEQ ID NO: 2568770 - RNA, 19 nt, Artificial Sequence
  Description of Artificial Sequence: Synthetic oligonucleotide
ugcgucugccgcuuuauug

SEQ ID NO: 2568771 - RNA, 19 nt, Artificial Sequence
  Description of Artificial Sequence: Synthetic oligonucleotide
ggagacaggagucugcagc

SEQ ID NO: 2568772 - RNA, 19 nt, Artificial Sequence
  Description of Artificial Sequence: Synthetic oligonucleotide
ugagcaucgugcagccagg

SEQ ID NO: 2568773 - RNA, 19 nt, Artificial Sequence
  Description of Artificial Sequence: Synthetic oligonucleotide
cucgcagccggugagaggc

SEQ ID NO: 2568774 - RNA, 19 nt, Artificial Sequence
  Description of Artificial Sequence: Synthetic oligonucleotide
uaccucuccagggaagugg

SEQ ID NO: 2568775 - RNA, 19 nt, Artificial Sequence
  Description of Artificial Sequence: Synthetic oligonucleotide
ugcagcgaagaaguugagg

SEQ ID NO: 2568776 - RNA, 19 nt, Artificial Sequence
  Description of Artificial Sequence: Synthetic oligonucleotide
ucggccgggaggaagcaag

SEQ ID NO: 2568777 - RNA, 19 nt, Artificial Sequence
  Description of Artificial Sequence: Synthetic oligonucleotide
acagccaaagaggaccagg

SEQ ID NO: 2568778 - RNA, 19 nt, Artificial Sequence
  Description of Artificial Sequence: Synthetic oligonucleotide
ucccgagucguccggggcg

SEQ ID NO: 2568779 - RNA, 19 nt, Artificial Sequence
  Description of Artificial Sequence: Synthetic oligonucleotide
gauacuuguugaaauggaa

SEQ ID NO: 2568780 - RNA, 19 nt, Artificial Sequence
  Description of Artificial Sequence: Synthetic oligonucleotide
cugcggauuccucugcugg

SEQ ID NO: 2568781 - RNA, 19 nt, Artificial Sequence
  Description of Artificial Sequence: Synthetic oligonucleotide
ugcggauuccucugcuggg

SEQ ID NO: 2568782 - RNA, 19 nt, Artificial Sequence
  Description of Artificial Sequence: Synthetic oligonucleotide
gaagaaguugagguccggc

SEQ ID NO: 2568783 - RNA, 19 nt, Artificial Sequence
  Description of Artificial Sequence: Synthetic oligonucleotide
gaaaggcgaauccggcugc

SEQ ID NO: 2568784 - RNA, 19 nt, Artificial Sequence
  Description of Artificial Sequence: Synthetic oligonucleotide
gucgauggcacagagcgug

SEQ ID NO: 2568785 - RNA, 19 nt, Artificial Sequence
  Description of Artificial Sequence: Synthetic oligonucleotide
uggauccccauccggaggu

SEQ ID NO: 2568786 - RNA, 19 nt, Artificial Sequence
  Description of Artificial Sequence: Synthetic oligonucleotide
ugcugggucucccgagucg

SEQ ID NO: 2568787 - RNA, 19 nt, Artificial Sequence
  Description of Artificial Sequence: Synthetic oligonucleotide
agcaucgugcagccagggc

SEQ ID NO: 2568788 - RNA, 19 nt, Artificial Sequence
  Description of Artificial Sequence: Synthetic oligonucleotide
guuagggaaacugcaaguc

SEQ ID NO: 2568789 - RNA, 19 nt, Artificial Sequence
  Description of Artificial Sequence: Synthetic oligonucleotide
ggaagcaagcuucucgcag

SEQ ID NO: 2568790 - RNA, 19 nt, Artificial Sequence
  Description of Artificial Sequence: Synthetic oligonucleotide
ggaaaggcgaauccggcug

SEQ ID NO: 2568791 - RNA, 19 nt, Artificial Sequence
  Description of Artificial Sequence: Synthetic oligonucleotide
gcaagcuucucgcagccgg

SEQ ID NO: 2568792 - RNA, 19 nt, Artificial Sequence
  Description of Artificial Sequence: Synthetic oligonucleotide
aguugcguguugguguagg

SEQ ID NO: 2568793 - RNA, 19 nt, Artificial Sequence
  Description of Artificial Sequence: Synthetic oligonucleotide
ucggaaaaggggcggggcu

SEQ ID NO: 2568794 - RNA, 19 nt, Artificial Sequence
  Description of Artificial Sequence: Synthetic oligonucleotide
uugguguaggccgugcgca

SEQ ID NO: 2568795 - RNA, 19 nt, Artificial Sequence
  Description of Artificial Sequence: Synthetic oligonucleotide
augcgucgguuuuggaaac

SEQ ID NO: 2568796 - RNA, 19 nt, Artificial Sequence
  Description of Artificial Sequence: Synthetic oligonucleotide
aggaaaggcgaauccggcu

SEQ ID NO: 2568797 - RNA, 19 nt, Artificial Sequence
  Description of Artificial Sequence: Synthetic oligonucleotide
aaagaggaccagguggaaa

SEQ ID NO: 2568798 - RNA, 19 nt, Artificial Sequence
  Description of Artificial Sequence: Synthetic oligonucleotide
gagaggcggaggcagggcc

SEQ ID NO: 2568799 - RNA, 19 nt, Artificial Sequence
  Description of Artificial Sequence: Synthetic oligonucleotide
caggacaggugucuucggg

SEQ ID NO: 2568800 - RNA, 19 nt, Artificial Sequence
  Description of Artificial Sequence: Synthetic oligonucleotide
cugacugcggauuccucug

SEQ ID NO: 2568801 - RNA, 19 nt, Artificial Sequence
  Description of Artificial Sequence: Synthetic oligonucleotide
caagucgauggcacagagc

SEQ ID NO: 2568802 - RNA, 19 nt, Artificial Sequence
  Description of Artificial Sequence: Synthetic oligonucleotide
gggagaaagaccuccggac

SEQ ID NO: 2568803 - RNA, 19 nt, Artificial Sequence
  Description of Artificial Sequence: Synthetic oligonucleotide
cugggagaaagaccuccgg

SEQ ID NO: 2568804 - RNA, 19 nt, Artificial Sequence
  Description of Artificial Sequence: Synthetic oligonucleotide
agguucccgaugcugcguc

SEQ ID NO: 2568805 - RNA, 19 nt, Artificial Sequence
  Description of Artificial Sequence: Synthetic oligonucleotide
uugcguguugguguaggcc

SEQ ID NO: 2568806 - RNA, 19 nt, Artificial Sequence
  Description of Artificial Sequence: Synthetic oligonucleotide
gagucugcagcgaagaagu

SEQ ID NO: 2568807 - RNA, 19 nt, Artificial Sequence
  Description of Artificial Sequence: Synthetic oligonucleotide
ucgcggccggcacagauac

SEQ ID NO: 2568808 - RNA, 19 nt, Artificial Sequence
  Description of Artificial Sequence: Synthetic oligonucleotide
cucugagcaucgugcagcc

SEQ ID NO: 2568809 - RNA, 19 nt, Artificial Sequence
  Description of Artificial Sequence: Synthetic oligonucleotide
acugcaagucgauggcaca

SEQ ID NO: 2568810 - RNA, 19 nt, Artificial Sequence
  Description of Artificial Sequence: Synthetic oligonucleotide
acaggugucuucgggcagg

SEQ ID NO: 2568811 - RNA, 19 nt, Artificial Sequence
  Description of Artificial Sequence: Synthetic oligonucleotide
gucugcagcgaagaaguug

SEQ ID NO: 2568812 - RNA, 19 nt, Artificial Sequence
  Description of Artificial Sequence: Synthetic oligonucleotide
gcaggaaaggcgaauccgg

SEQ ID NO: 2568813 - RNA, 19 nt, Artificial Sequence
  Description of Artificial Sequence: Synthetic oligonucleotide
uuccucggaaaaggggcgg

SEQ ID NO: 2568814 - RNA, 19 nt, Artificial Sequence
  Description of Artificial Sequence: Synthetic oligonucleotide
gcagcgaagaaguugaggu

SEQ ID NO: 2568815 - RNA, 19 nt, Artificial Sequence
  Description of Artificial Sequence: Synthetic oligonucleotide
gaggccucgggcucugagc

SEQ ID NO: 2568816 - RNA, 19 nt, Artificial Sequence
  Description of Artificial Sequence: Synthetic oligonucleotide
ugacugcggauuccucugc

SEQ ID NO: 2568817 - RNA, 19 nt, Artificial Sequence
  Description of Artificial Sequence: Synthetic oligonucleotide
guugagguccggcaggaaa

SEQ ID NO: 2568818 - RNA, 19 nt, Artificial Sequence
  Description of Artificial Sequence: Synthetic oligonucleotide
aggcgaauccggcugcuca

SEQ ID NO: 2568819 - RNA, 19 nt, Artificial Sequence
  Description of Artificial Sequence: Synthetic oligonucleotide
ucucccgagucguccgggg

SEQ ID NO: 2568820 - RNA, 19 nt, Artificial Sequence
  Description of Artificial Sequence: Synthetic oligonucleotide
agguccggcaggaaaggcg

SEQ ID NO: 2568821 - RNA, 19 nt, Artificial Sequence
  Description of Artificial Sequence: Synthetic oligonucleotide
ucgggcucugagcaucgug

SEQ ID NO: 2568822 - RNA, 19 nt, Artificial Sequence
  Description of Artificial Sequence: Synthetic oligonucleotide
cuggauccccauccggagg

SEQ ID NO: 2568823 - RNA, 19 nt, Artificial Sequence
  Description of Artificial Sequence: Synthetic oligonucleotide
ugccuuucggugaggucca

SEQ ID NO: 2568824 - RNA, 19 nt, Artificial Sequence
  Description of Artificial Sequence: Synthetic oligonucleotide
ccgcuuuauuguuucaugc

SEQ ID NO: 2568825 - RNA, 19 nt, Artificial Sequence
  Description of Artificial Sequence: Synthetic oligonucleotide
acugcggauuccucugcug

SEQ ID NO: 2568826 - RNA, 19 nt, Artificial Sequence
  Description of Artificial Sequence: Synthetic oligonucleotide
gagcgugcuggugaagaag

SEQ ID NO: 2568827 - RNA, 19 nt, Artificial Sequence
  Description of Artificial Sequence: Synthetic oligonucleotide
auuguuucaugcgucgguu

SEQ ID NO: 2568828 - RNA, 19 nt, Artificial Sequence
  Description of Artificial Sequence: Synthetic oligonucleotide
caucgugcagccagggcuc

SEQ ID NO: 2568829 - RNA, 19 nt, Artificial Sequence
  Description of Artificial Sequence: Synthetic oligonucleotide
guugcguguugguguaggc

SEQ ID NO: 2568830 - RNA, 19 nt, Artificial Sequence
  Description of Artificial Sequence: Synthetic oligonucleotide
ggagaaagaccuccggaca

SEQ ID NO: 2568831 - RNA, 19 nt, Artificial Sequence
  Description of Artificial Sequence: Synthetic oligonucleotide
cugcaagucgauggcacag

SEQ ID NO: 2568832 - RNA, 19 nt, Artificial Sequence
  Description of Artificial Sequence: Synthetic oligonucleotide
ugguguaggccgugcgcag

SEQ ID NO: 2568833 - RNA, 19 nt, Artificial Sequence
  Description of Artificial Sequence: Synthetic oligonucleotide
guccagcgagcucugcagg

SEQ ID NO: 2568834 - RNA, 19 nt, Artificial Sequence
  Description of Artificial Sequence: Synthetic oligonucleotide
ucgauggcacagagcgugc

SEQ ID NO: 2568835 - RNA, 19 nt, Artificial Sequence
  Description of Artificial Sequence: Synthetic oligonucleotide
ucucgcagccggugagagg

SEQ ID NO: 2568836 - RNA, 19 nt, Artificial Sequence
  Description of Artificial Sequence: Synthetic oligonucleotide
cagcgaagaaguugagguc

SEQ ID NO: 2568837 - RNA, 19 nt, Artificial Sequence
  Description of Artificial Sequence: Synthetic oligonucleotide
aggaagcaagcuucucgca

SEQ ID NO: 2568838 - RNA, 19 nt, Artificial Sequence
  Description of Artificial Sequence: Synthetic oligonucleotide
accuccggacaucuggaga

SEQ ID NO: 2568839 - RNA, 19 nt, Artificial Sequence
  Description of Artificial Sequence: Synthetic oligonucleotide
uucccgaugcugcgucugc

SEQ ID NO: 2568840 - RNA, 19 nt, Artificial Sequence
  Description of Artificial Sequence: Synthetic oligonucleotide
gucgguuuuggaaaccaga

SEQ ID NO: 2568841 - RNA, 19 nt, Artificial Sequence
  Description of Artificial Sequence: Synthetic oligonucleotide
agcgugcuggugaagaagu

SEQ ID NO: 2568842 - RNA, 19 nt, Artificial Sequence
  Description of Artificial Sequence: Synthetic oligonucleotide
gaccuccggacaucuggag

SEQ ID NO: 2568843 - RNA, 19 nt, Artificial Sequence
  Description of Artificial Sequence: Synthetic oligonucleotide
ugcaagucgauggcacaga

SEQ ID NO: 2568844 - RNA, 19 nt, Artificial Sequence
  Description of Artificial Sequence: Synthetic oligonucleotide
aaggcgaauccggcugcuc

SEQ ID NO: 2568845 - RNA, 19 nt, Artificial Sequence
  Description of Artificial Sequence: Synthetic oligonucleotide
gacaggagucugcagcgaa

SEQ ID NO: 2568846 - RNA, 19 nt, Artificial Sequence
  Description of Artificial Sequence: Synthetic oligonucleotide
gacaaucccgggccaucug

SEQ ID NO: 2568847 - RNA, 19 nt, Artificial Sequence
  Description of Artificial Sequence: Synthetic oligonucleotide
gagucguccggggcgcucg

SEQ ID NO: 2568848 - RNA, 19 nt, Artificial Sequence
  Description of Artificial Sequence: Synthetic oligonucleotide
ccuccggacaucuggagac

SEQ ID NO: 2568849 - RNA, 19 nt, Artificial Sequence
  Description of Artificial Sequence: Synthetic oligonucleotide
aagcuucucgcagccggug

SEQ ID NO: 2568850 - RNA, 19 nt, Artificial Sequence
  Description of Artificial Sequence: Synthetic oligonucleotide
gauuccucugcugggucuc

SEQ ID NO: 2568851 - RNA, 19 nt, Artificial Sequence
  Description of Artificial Sequence: Synthetic oligonucleotide
ucuccacgcgucgcggccg

SEQ ID NO: 2568852 - RNA, 19 nt, Artificial Sequence
  Description of Artificial Sequence: Synthetic oligonucleotide
gccgcuuuauuguuucaug

SEQ ID NO: 2568853 - RNA, 19 nt, Artificial Sequence
  Description of Artificial Sequence: Synthetic oligonucleotide
gcucugagcaucgugcagc

SEQ ID NO: 2568854 - RNA, 19 nt, Artificial Sequence
  Description of Artificial Sequence: Synthetic oligonucleotide
cagcaaggcggcgaucucc

SEQ ID NO: 2568855 - RNA, 19 nt, Artificial Sequence
  Description of Artificial Sequence: Synthetic oligonucleotide
cuagcucuuccucggaaaa

SEQ ID NO: 2568856 - RNA, 19 nt, Artificial Sequence
  Description of Artificial Sequence: Synthetic oligonucleotide
gagcaucgugcagccaggg

SEQ ID NO: 2568857 - RNA, 19 nt, Artificial Sequence
  Description of Artificial Sequence: Synthetic oligonucleotide
ugccgcuuuauuguuucau

SEQ ID NO: 2568858 - RNA, 19 nt, Artificial Sequence
  Description of Artificial Sequence: Synthetic oligonucleotide
agcuucucgcagccgguga

SEQ ID NO: 2568859 - RNA, 19 nt, Artificial Sequence
  Description of Artificial Sequence: Synthetic oligonucleotide
aggggcggggcuguccagc

SEQ ID NO: 2568860 - RNA, 19 nt, Artificial Sequence
  Description of Artificial Sequence: Synthetic oligonucleotide
cauccggagguucccgaug

SEQ ID NO: 2568861 - RNA, 19 nt, Artificial Sequence
  Description of Artificial Sequence: Synthetic oligonucleotide
ugagaggcggaggcagggc

SEQ ID NO: 2568862 - RNA, 19 nt, Artificial Sequence
  Description of Artificial Sequence: Synthetic oligonucleotide
gcgcccauaccucuccagg

SEQ ID NO: 2568863 - RNA, 19 nt, Artificial Sequence
  Description of Artificial Sequence: Synthetic oligonucleotide
gguuagggaaacugcaagu

SEQ ID NO: 2568864 - RNA, 19 nt, Artificial Sequence
  Description of Artificial Sequence: Synthetic oligonucleotide
gaaagaccuccggacaucu

SEQ ID NO: 2568865 - RNA, 19 nt, Artificial Sequence
  Description of Artificial Sequence: Synthetic oligonucleotide
ggcgaauccggcugcucag

SEQ ID NO: 2568866 - RNA, 19 nt, Artificial Sequence
  Description of Artificial Sequence: Synthetic oligonucleotide
ugcgucgguuuuggaaacc

SEQ ID NO: 2568867 - RNA, 19 nt, Artificial Sequence
  Description of Artificial Sequence: Synthetic oligonucleotide
ccgggaggaagcaagcuuc

SEQ ID NO: 2568868 - RNA, 19 nt, Artificial Sequence
  Description of Artificial Sequence: Synthetic oligonucleotide
aaggggcggggcuguccag

SEQ ID NO: 2568869 - RNA, 19 nt, Artificial Sequence
  Description of Artificial Sequence: Synthetic oligonucleotide
agcaagcuucucgcagccg

SEQ ID NO: 2568870 - RNA, 19 nt, Artificial Sequence
  Description of Artificial Sequence: Synthetic oligonucleotide
ucggcgcgcccauaccucu

SEQ ID NO: 2568871 - RNA, 19 nt, Artificial Sequence
  Description of Artificial Sequence: Synthetic oligonucleotide
ggcggggcuguccagcgag

SEQ ID NO: 2568872 - RNA, 19 nt, Artificial Sequence
  Description of Artificial Sequence: Synthetic oligonucleotide
gcuucucgcagccggugag

SEQ ID NO: 2568873 - RNA, 19 nt, Artificial Sequence
  Description of Artificial Sequence: Synthetic oligonucleotide
gcaucgugcagccagggcu

SEQ ID NO: 2568874 - RNA, 19 nt, Artificial Sequence
  Description of Artificial Sequence: Synthetic oligonucleotide
ccgcucuccgacaaucccg

SEQ ID NO: 2568875 - RNA, 19 nt, Artificial Sequence
  Description of Artificial Sequence: Synthetic oligonucleotide
gcacagagcgugcugguga

SEQ ID NO: 2568876 - RNA, 19 nt, Artificial Sequence
  Description of Artificial Sequence: Synthetic oligonucleotide
ucgcagccggugagaggcg

SEQ ID NO: 2568877 - RNA, 19 nt, Artificial Sequence
  Description of Artificial Sequence: Synthetic oligonucleotide
cccgccuggauccccaucc

SEQ ID NO: 2568878 - RNA, 19 nt, Artificial Sequence
  Description of Artificial Sequence: Synthetic oligonucleotide
aggagucugcagcgaagaa

SEQ ID NO: 2568879 - RNA, 19 nt, Artificial Sequence
  Description of Artificial Sequence: Synthetic oligonucleotide
accagacuuugaccugccu

SEQ ID NO: 2568880 - RNA, 19 nt, Artificial Sequence
  Description of Artificial Sequence: Synthetic oligonucleotide
auaccucuccagggaagug

SEQ ID NO: 2568881 - RNA, 19 nt, Artificial Sequence
  Description of Artificial Sequence: Synthetic oligonucleotide
cucccgagucguccggggc

SEQ ID NO: 2568882 - RNA, 19 nt, Artificial Sequence
  Description of Artificial Sequence: Synthetic oligonucleotide
gcgaagaaguugagguccg

SEQ ID NO: 2568883 - RNA, 19 nt, Artificial Sequence
  Description of Artificial Sequence: Synthetic oligonucleotide
agcgagcucugcaggcugg

SEQ ID NO: 2568884 - RNA, 19 nt, Artificial Sequence
  Description of Artificial Sequence: Synthetic oligonucleotide
gggucucccgagucguccg

SEQ ID NO: 2568885 - RNA, 19 nt, Artificial Sequence
  Description of Artificial Sequence: Synthetic oligonucleotide
cugggcugacugcggauuc

SEQ ID NO: 2568886 - RNA, 19 nt, Artificial Sequence
  Description of Artificial Sequence: Synthetic oligonucleotide
guucccgaugcugcgucug

SEQ ID NO: 2568887 - RNA, 19 nt, Artificial Sequence
  Description of Artificial Sequence: Synthetic oligonucleotide
ggcucugagcaucgugcag

SEQ ID NO: 2568888 - RNA, 19 nt, Artificial Sequence
  Description of Artificial Sequence: Synthetic oligonucleotide
ugcgcccuggggacccugc

SEQ ID NO: 2568889 - RNA, 19 nt, Artificial Sequence
  Description of Artificial Sequence: Synthetic oligonucleotide
gucuagcucuuccucggaa

SEQ ID NO: 2568890 - RNA, 19 nt, Artificial Sequence
  Description of Artificial Sequence: Synthetic oligonucleotide
agaccuccggacaucugga

SEQ ID NO: 2568891 - RNA, 19 nt, Artificial Sequence
  Description of Artificial Sequence: Synthetic oligonucleotide
cugcagcgaagaaguugag

SEQ ID NO: 2568892 - RNA, 19 nt, Artificial Sequence
  Description of Artificial Sequence: Synthetic oligonucleotide
cagcgagcucugcaggcug

SEQ ID NO: 2568893 - RNA, 19 nt, Artificial Sequence
  Description of Artificial Sequence: Synthetic oligonucleotide
caggagucugcagcgaaga

SEQ ID NO: 2568894 - RNA, 19 nt, Artificial Sequence
  Description of Artificial Sequence: Synthetic oligonucleotide
cucggcgcgcccauaccuc

SEQ ID NO: 2568895 - RNA, 19 nt, Artificial Sequence
  Description of Artificial Sequence: Synthetic oligonucleotide
ccauaccucuccagggaag

SEQ ID NO: 2568896 - RNA, 19 nt, Artificial Sequence
  Description of Artificial Sequence: Synthetic oligonucleotide
ugccucggccgggaggaag

SEQ ID NO: 2568897 - RNA, 19 nt, Artificial Sequence
  Description of Artificial Sequence: Synthetic oligonucleotide
gccgugcgcagccugcgcg

SEQ ID NO: 2568898 - RNA, 19 nt, Artificial Sequence
  Description of Artificial Sequence: Synthetic oligonucleotide
uccggagguucccgaugcu

SEQ ID NO: 2568899 - RNA, 19 nt, Artificial Sequence
  Description of Artificial Sequence: Synthetic oligonucleotide
gauccccauccggagguuc

SEQ ID NO: 2568900 - RNA, 19 nt, Artificial Sequence
  Description of Artificial Sequence: Synthetic oligonucleotide
gcucggcccgccuggaucc

SEQ ID NO: 2568901 - RNA, 19 nt, Artificial Sequence
  Description of Artificial Sequence: Synthetic oligonucleotide
agggaaacugcaagucgau

SEQ ID NO: 2568902 - RNA, 19 nt, Artificial Sequence
  Description of Artificial Sequence: Synthetic oligonucleotide
ugcugcgucugccgcuuua

SEQ ID NO: 2568903 - RNA, 19 nt, Artificial Sequence
  Description of Artificial Sequence: Synthetic oligonucleotide
agucguccggggcgcucgg

SEQ ID NO: 2568904 - RNA, 19 nt, Artificial Sequence
  Description of Artificial Sequence: Synthetic oligonucleotide
gggaaguggcaggaggcgc

SEQ ID NO: 2568905 - RNA, 19 nt, Artificial Sequence
  Description of Artificial Sequence: Synthetic oligonucleotide
gacccugcgcugccucggc

SEQ ID NO: 2568906 - RNA, 19 nt, Artificial Sequence
  Description of Artificial Sequence: Synthetic oligonucleotide
gggaaacugcaagucgaug

SEQ ID NO: 2568907 - RNA, 19 nt, Artificial Sequence
  Description of Artificial Sequence: Synthetic oligonucleotide
uccggcaggaaaggcgaau

SEQ ID NO: 2568908 - RNA, 19 nt, Artificial Sequence
  Description of Artificial Sequence: Synthetic oligonucleotide
ccggcacagauacuuguug

SEQ ID NO: 2568909 - RNA, 19 nt, Artificial Sequence
  Description of Artificial Sequence: Synthetic oligonucleotide
gucucccgagucguccggg

SEQ ID NO: 2568910 - RNA, 19 nt, Artificial Sequence
  Description of Artificial Sequence: Synthetic oligonucleotide
cgcucuccgacaaucccgg

SEQ ID NO: 2568911 - RNA, 19 nt, Artificial Sequence
  Description of Artificial Sequence: Synthetic oligonucleotide
agacaggagucugcagcga

SEQ ID NO: 2568912 - RNA, 19 nt, Artificial Sequence
  Description of Artificial Sequence: Synthetic oligonucleotide
gguccggcaggaaaggcga

SEQ ID NO: 2568913 - RNA, 19 nt, Artificial Sequence
  Description of Artificial Sequence: Synthetic oligonucleotide
gccgcucuccgacaauccc

SEQ ID NO: 2568914 - RNA, 19 nt, Artificial Sequence
  Description of Artificial Sequence: Synthetic oligonucleotide
cacagagcgugcuggugaa

SEQ ID NO: 2568915 - RNA, 19 nt, Artificial Sequence
  Description of Artificial Sequence: Synthetic oligonucleotide
uccgacaaucccgggccau

SEQ ID NO: 2568916 - RNA, 19 nt, Artificial Sequence
  Description of Artificial Sequence: Synthetic oligonucleotide
agccggugagaggcggagg

SEQ ID NO: 2568917 - RNA, 19 nt, Artificial Sequence
  Description of Artificial Sequence: Synthetic oligonucleotide
gacugcggauuccucugcu

SEQ ID NO: 2568918 - RNA, 19 nt, Artificial Sequence
  Description of Artificial Sequence: Synthetic oligonucleotide
cuccacgcgucgcggccgg

SEQ ID NO: 2568919 - RNA, 19 nt, Artificial Sequence
  Description of Artificial Sequence: Synthetic oligonucleotide
gcgucugccgcuuuauugu

SEQ ID NO: 2568920 - RNA, 19 nt, Artificial Sequence
  Description of Artificial Sequence: Synthetic oligonucleotide
ggggcggggcuguccagcg

SEQ ID NO: 2568921 - RNA, 19 nt, Artificial Sequence
  Description of Artificial Sequence: Synthetic oligonucleotide
uguaggccgugcgcagccu

SEQ ID NO: 2568922 - RNA, 19 nt, Artificial Sequence
  Description of Artificial Sequence: Synthetic oligonucleotide
cagccggugagaggcggag

SEQ ID NO: 2568923 - RNA, 19 nt, Artificial Sequence
  Description of Artificial Sequence: Synthetic oligonucleotide
ugcucaggacaggugucuu

SEQ ID NO: 2568924 - RNA, 19 nt, Artificial Sequence
  Description of Artificial Sequence: Synthetic oligonucleotide
gguguaggccgugcgcagc

SEQ ID NO: 2568925 - RNA, 19 nt, Artificial Sequence
  Description of Artificial Sequence: Synthetic oligonucleotide
gcgaauccggcugcucagg

SEQ ID NO: 2568926 - RNA, 19 nt, Artificial Sequence
  Description of Artificial Sequence: Synthetic oligonucleotide
cacgcgucgcggccggcac

SEQ ID NO: 2568927 - RNA, 19 nt, Artificial Sequence
  Description of Artificial Sequence: Synthetic oligonucleotide
cugcaggcugggagaaaga

SEQ ID NO: 2568928 - RNA, 19 nt, Artificial Sequence
  Description of Artificial Sequence: Synthetic oligonucleotide
gggcucugagcaucgugca

SEQ ID NO: 2568929 - RNA, 19 nt, Artificial Sequence
  Description of Artificial Sequence: Synthetic oligonucleotide
gcugcgaggccucgggcuc

SEQ ID NO: 2568930 - RNA, 19 nt, Artificial Sequence
  Description of Artificial Sequence: Synthetic oligonucleotide
aggcugggagaaagaccuc

SEQ ID NO: 2568931 - RNA, 19 nt, Artificial Sequence
  Description of Artificial Sequence: Synthetic oligonucleotide
cugggucucccgagucguc

SEQ ID NO: 2568932 - RNA, 19 nt, Artificial Sequence
  Description of Artificial Sequence: Synthetic oligonucleotide
gcaguugcguguuggugua

SEQ ID NO: 2568933 - RNA, 19 nt, Artificial Sequence
  Description of Artificial Sequence: Synthetic oligonucleotide
ggcacagagcgugcuggug

SEQ ID NO: 2568934 - RNA, 19 nt, Artificial Sequence
  Description of Artificial Sequence: Synthetic oligonucleotide
cgucgguuuuggaaaccag

SEQ ID NO: 2568935 - RNA, 19 nt, Artificial Sequence
  Description of Artificial Sequence: Synthetic oligonucleotide
cuucucgcagccggugaga

SEQ ID NO: 2568936 - RNA, 19 nt, Artificial Sequence
  Description of Artificial Sequence: Synthetic oligonucleotide
caguugcguguugguguag

SEQ ID NO: 2568937 - RNA, 19 nt, Artificial Sequence
  Description of Artificial Sequence: Synthetic oligonucleotide
ccucggaaaaggggcgggg

SEQ ID NO: 2568938 - RNA, 19 nt, Artificial Sequence
  Description of Artificial Sequence: Synthetic oligonucleotide
ggucucuggcugcgaggcc

SEQ ID NO: 2568939 - RNA, 19 nt, Artificial Sequence
  Description of Artificial Sequence: Synthetic oligonucleotide
gggcgcucggcccgccugg

SEQ ID NO: 2568940 - RNA, 19 nt, Artificial Sequence
  Description of Artificial Sequence: Synthetic oligonucleotide
gaugcugcgucugccgcuu

SEQ ID NO: 2568941 - RNA, 19 nt, Artificial Sequence
  Description of Artificial Sequence: Synthetic oligonucleotide
gcggcggugcgcccugggg

SEQ ID NO: 2568942 - RNA, 19 nt, Artificial Sequence
  Description of Artificial Sequence: Synthetic oligonucleotide
gugcgcagccugcgcgagc

SEQ ID NO: 2568943 - RNA, 19 nt, Artificial Sequence
  Description of Artificial Sequence: Synthetic oligonucleotide
gcgucgguuuuggaaacca

SEQ ID NO: 2568944 - RNA, 19 nt, Artificial Sequence
  Description of Artificial Sequence: Synthetic oligonucleotide
cugcgcgagccgccgccgc

SEQ ID NO: 2568945 - RNA, 19 nt, Artificial Sequence
  Description of Artificial Sequence: Synthetic oligonucleotide
cuccgacaaucccgggcca

SEQ ID NO: 2568946 - RNA, 19 nt, Artificial Sequence
  Description of Artificial Sequence: Synthetic oligonucleotide
gagguucccgaugcugcgu

SEQ ID NO: 2568947 - RNA, 19 nt, Artificial Sequence
  Description of Artificial Sequence: Synthetic oligonucleotide
acgcgucgcggccggcaca

SEQ ID NO: 2568948 - RNA, 19 nt, Artificial Sequence
  Description of Artificial Sequence: Synthetic oligonucleotide
gggcucggcgcgcccauac

SEQ ID NO: 2568949 - RNA, 19 nt, Artificial Sequence
  Description of Artificial Sequence: Synthetic oligonucleotide
cuccggacaucuggagaca

SEQ ID NO: 2568950 - RNA, 19 nt, Artificial Sequence
  Description of Artificial Sequence: Synthetic oligonucleotide
ccuuucggugagguccagc

SEQ ID NO: 2568951 - RNA, 19 nt, Artificial Sequence
  Description of Artificial Sequence: Synthetic oligonucleotide
gcgagcucugcaggcuggg

SEQ ID NO: 2568952 - RNA, 19 nt, Artificial Sequence
  Description of Artificial Sequence: Synthetic oligonucleotide
ccugccuuucggugagguc

SEQ ID NO: 2568953 - RNA, 19 nt, Artificial Sequence
  Description of Artificial Sequence: Synthetic oligonucleotide
ccggagguucccgaugcug

SEQ ID NO: 2568954 - RNA, 19 nt, Artificial Sequence
  Description of Artificial Sequence: Synthetic oligonucleotide
cgaagaaguugagguccgg

SEQ ID NO: 2568955 - RNA, 19 nt, Artificial Sequence
  Description of Artificial Sequence: Synthetic oligonucleotide
ggggcuguccagcgagcuc

SEQ ID NO: 2568956 - RNA, 19 nt, Artificial Sequence
  Description of Artificial Sequence: Synthetic oligonucleotide
gcgcccuggggacccugcg

SEQ ID NO: 2568957 - RNA, 19 nt, Artificial Sequence
  Description of Artificial Sequence: Synthetic oligonucleotide
ggggcgcucggcccgccug

SEQ ID NO: 2568958 - RNA, 19 nt, Artificial Sequence
  Description of Artificial Sequence: Synthetic oligonucleotide
ccgccuggauccccauccg

SEQ ID NO: 2568959 - RNA, 19 nt, Artificial Sequence
  Description of Artificial Sequence: Synthetic oligonucleotide
ggcggcggugcgcccuggg

SEQ ID NO: 2568960 - RNA, 19 nt, Artificial Sequence
  Description of Artificial Sequence: Synthetic oligonucleotide
ccagacuuugaccugccuu

SEQ ID NO: 2568961 - RNA, 19 nt, Artificial Sequence
  Description of Artificial Sequence: Synthetic oligonucleotide
gcucggcgcgcccauaccu

SEQ ID NO: 2568962 - RNA, 19 nt, Artificial Sequence
  Description of Artificial Sequence: Synthetic oligonucleotide
gucgcggccggcacagaua

SEQ ID NO: 2568963 - RNA, 19 nt, Artificial Sequence
  Description of Artificial Sequence: Synthetic oligonucleotide
gggccugggcugacugcgg

SEQ ID NO: 2568964 - RNA, 19 nt, Artificial Sequence
  Description of Artificial Sequence: Synthetic oligonucleotide
gcccuggggacccugcgcu

SEQ ID NO: 2568965 - RNA, 19 nt, Artificial Sequence
  Description of Artificial Sequence: Synthetic oligonucleotide
cucggcccgccuggauccc

SEQ ID NO: 2568966 - RNA, 19 nt, Artificial Sequence
  Description of Artificial Sequence: Synthetic oligonucleotide
cgccgcucuccgacaaucc

SEQ ID NO: 2568967 - RNA, 19 nt, Artificial Sequence
  Description of Artificial Sequence: Synthetic oligonucleotide
cccgagucguccggggcgc

SEQ ID NO: 2568968 - RNA, 19 nt, Artificial Sequence
  Description of Artificial Sequence: Synthetic oligonucleotide
gcaaggcggcgaucuccac

SEQ ID NO: 2568969 - RNA, 19 nt, Artificial Sequence
  Description of Artificial Sequence: Synthetic oligonucleotide
gccgggaggaagcaagcuu

SEQ ID NO: 2568970 - RNA, 19 nt, Artificial Sequence
  Description of Artificial Sequence: Synthetic oligonucleotide
cgaggccucgggcucugag

SEQ ID NO: 2568971 - RNA, 19 nt, Artificial Sequence
  Description of Artificial Sequence: Synthetic oligonucleotide
cgcgcccauaccucuccag

SEQ ID NO: 2568972 - RNA, 19 nt, Artificial Sequence
  Description of Artificial Sequence: Synthetic oligonucleotide
gcugggucucccgagucgu

SEQ ID NO: 2568973 - RNA, 19 nt, Artificial Sequence
  Description of Artificial Sequence: Synthetic oligonucleotide
ccagcaaggcggcgaucuc

SEQ ID NO: 2568974 - RNA, 19 nt, Artificial Sequence
  Description of Artificial Sequence: Synthetic oligonucleotide
ccccauccggagguucccg

SEQ ID NO: 2568975 - RNA, 19 nt, Artificial Sequence
  Description of Artificial Sequence: Synthetic oligonucleotide
uccacgcgucgcggccggc

SEQ ID NO: 2568976 - RNA, 19 nt, Artificial Sequence
  Description of Artificial Sequence: Synthetic oligonucleotide
ggcggcgaucuccacgcgu

SEQ ID NO: 2568977 - RNA, 19 nt, Artificial Sequence
  Description of Artificial Sequence: Synthetic oligonucleotide
ccgacaaucccgggccauc

SEQ ID NO: 2568978 - RNA, 19 nt, Artificial Sequence
  Description of Artificial Sequence: Synthetic oligonucleotide
cccauccggagguucccga

SEQ ID NO: 2568979 - RNA, 19 nt, Artificial Sequence
  Description of Artificial Sequence: Synthetic oligonucleotide
gcgugcuggugaagaaguc

SEQ ID NO: 2568980 - RNA, 19 nt, Artificial Sequence
  Description of Artificial Sequence: Synthetic oligonucleotide
cggccgggaggaagcaagc

SEQ ID NO: 2568981 - RNA, 19 nt, Artificial Sequence
  Description of Artificial Sequence: Synthetic oligonucleotide
ggcuguccagcgagcucug

SEQ ID NO: 2568982 - RNA, 19 nt, Artificial Sequence
  Description of Artificial Sequence: Synthetic oligonucleotide
gguucccgaugcugcgucu

SEQ ID NO: 2568983 - RNA, 19 nt, Artificial Sequence
  Description of Artificial Sequence: Synthetic oligonucleotide
ccgccgcucuccgacaauc

SEQ ID NO: 2568984 - RNA, 19 nt, Artificial Sequence
  Description of Artificial Sequence: Synthetic oligonucleotide
ccugcgcgagccgccgccg

SEQ ID NO: 2568985 - RNA, 19 nt, Artificial Sequence
  Description of Artificial Sequence: Synthetic oligonucleotide
gcggccggcacagauacuu

SEQ ID NO: 2568986 - RNA, 19 nt, Artificial Sequence
  Description of Artificial Sequence: Synthetic oligonucleotide
augcugcgucugccgcuuu

SEQ ID NO: 2568987 - RNA, 19 nt, Artificial Sequence
  Description of Artificial Sequence: Synthetic oligonucleotide
gcggauuccucugcugggu

SEQ ID NO: 2568988 - RNA, 19 nt, Artificial Sequence
  Description of Artificial Sequence: Synthetic oligonucleotide
gucugccgcuuuauuguuu

SEQ ID NO: 2568989 - RNA, 19 nt, Artificial Sequence
  Description of Artificial Sequence: Synthetic oligonucleotide
cccuggggacccugcgcug

SEQ ID NO: 2568990 - RNA, 19 nt, Artificial Sequence
  Description of Artificial Sequence: Synthetic oligonucleotide
cucggccgggaggaagcaa

SEQ ID NO: 2568991 - RNA, 19 nt, Artificial Sequence
  Description of Artificial Sequence: Synthetic oligonucleotide
guccggcaggaaaggcgaa

SEQ ID NO: 2568992 - RNA, 19 nt, Artificial Sequence
  Description of Artificial Sequence: Synthetic oligonucleotide
cggccggcacagauacuug

SEQ ID NO: 2568993 - RNA, 19 nt, Artificial Sequence
  Description of Artificial Sequence: Synthetic oligonucleotide
gccagggcucggcgcgccc

SEQ ID NO: 2568994 - RNA, 19 nt, Artificial Sequence
  Description of Artificial Sequence: Synthetic oligonucleotide
gcagccggugagaggcgga

SEQ ID NO: 2568995 - RNA, 19 nt, Artificial Sequence
  Description of Artificial Sequence: Synthetic oligonucleotide
ccgugcgcagccugcgcga

SEQ ID NO: 2568996 - RNA, 19 nt, Artificial Sequence
  Description of Artificial Sequence: Synthetic oligonucleotide
cgcgucgcggccggcacag

SEQ ID NO: 2568997 - RNA, 19 nt, Artificial Sequence
  Description of Artificial Sequence: Synthetic oligonucleotide
gccuuucggugagguccag

SEQ ID NO: 2568998 - RNA, 19 nt, Artificial Sequence
  Description of Artificial Sequence: Synthetic oligonucleotide
ggccgggaggaagcaagcu

SEQ ID NO: 2568999 - RNA, 19 nt, Artificial Sequence
  Description of Artificial Sequence: Synthetic oligonucleotide
cgugcgcagccugcgcgag

SEQ ID NO: 2569000 - RNA, 19 nt, Artificial Sequence
  Description of Artificial Sequence: Synthetic oligonucleotide
gggcggggcuguccagcga

SEQ ID NO: 2569001 - RNA, 19 nt, Artificial Sequence
  Description of Artificial Sequence: Synthetic oligonucleotide
cggcggugcgcccugggga

SEQ ID NO: 2569002 - RNA, 19 nt, Artificial Sequence
  Description of Artificial Sequence: Synthetic oligonucleotide
gcggugcgcccuggggacc

SEQ ID NO: 2569003 - RNA, 19 nt, Artificial Sequence
  Description of Artificial Sequence: Synthetic oligonucleotide
gcagggucucuggcugcga

SEQ ID NO: 2569004 - RNA, 19 nt, Artificial Sequence
  Description of Artificial Sequence: Synthetic oligonucleotide
gcguguugguguaggccgu

SEQ ID NO: 2569005 - RNA, 19 nt, Artificial Sequence
  Description of Artificial Sequence: Synthetic oligonucleotide
ccggugagaggcggaggca

SEQ ID NO: 2569006 - RNA, 19 nt, Artificial Sequence
  Description of Artificial Sequence: Synthetic oligonucleotide
gccggcacagauacuuguu

SEQ ID NO: 2569007 - RNA, 19 nt, Artificial Sequence
  Description of Artificial Sequence: Synthetic oligonucleotide
agggcucggcgcgcccaua

SEQ ID NO: 2569008 - RNA, 19 nt, Artificial Sequence
  Description of Artificial Sequence: Synthetic oligonucleotide
gcgcugccucggccgggag

SEQ ID NO: 2569009 - RNA, 19 nt, Artificial Sequence
  Description of Artificial Sequence: Synthetic oligonucleotide
cugcgaggccucgggcucu

SEQ ID NO: 2569010 - RNA, 19 nt, Artificial Sequence
  Description of Artificial Sequence: Synthetic oligonucleotide
ccagcgagcucugcaggcu

SEQ ID NO: 2569011 - RNA, 19 nt, Artificial Sequence
  Description of Artificial Sequence: Synthetic oligonucleotide
ccggcugcucaggacaggu

SEQ ID NO: 2569012 - RNA, 19 nt, Artificial Sequence
  Description of Artificial Sequence: Synthetic oligonucleotide
cagggcucggcgcgcccau

SEQ ID NO: 2569013 - RNA, 19 nt, Artificial Sequence
  Description of Artificial Sequence: Synthetic oligonucleotide
ccacgcgucgcggccggca

SEQ ID NO: 2569014 - RNA, 19 nt, Artificial Sequence
  Description of Artificial Sequence: Synthetic oligonucleotide
ccugggcugacugcggauu

SEQ ID NO: 2569015 - RNA, 19 nt, Artificial Sequence
  Description of Artificial Sequence: Synthetic oligonucleotide
ggcgcucggcccgccugga

SEQ ID NO: 2569016 - RNA, 19 nt, Artificial Sequence
  Description of Artificial Sequence: Synthetic oligonucleotide
ggccucgggcucugagcau

SEQ ID NO: 2569017 - RNA, 19 nt, Artificial Sequence
  Description of Artificial Sequence: Synthetic oligonucleotide
cgacaaucccgggccaucu

SEQ ID NO: 2569018 - RNA, 19 nt, Artificial Sequence
  Description of Artificial Sequence: Synthetic oligonucleotide
cggcgcgcccauaccucuc

SEQ ID NO: 2569019 - RNA, 19 nt, Artificial Sequence
  Description of Artificial Sequence: Synthetic oligonucleotide
cugccucggccgggaggaa

SEQ ID NO: 2569020 - RNA, 19 nt, Artificial Sequence
  Description of Artificial Sequence: Synthetic oligonucleotide
cgucugccgcuuuauuguu

SEQ ID NO: 2569021 - RNA, 19 nt, Artificial Sequence
  Description of Artificial Sequence: Synthetic oligonucleotide
cgggcggcggugcgcccug

SEQ ID NO: 2569022 - RNA, 19 nt, Artificial Sequence
  Description of Artificial Sequence: Synthetic oligonucleotide
ggauccccauccggagguu

SEQ ID NO: 2569023 - RNA, 19 nt, Artificial Sequence
  Description of Artificial Sequence: Synthetic oligonucleotide
gccgccgcucuccgacaau

SEQ ID NO: 2569024 - RNA, 19 nt, Artificial Sequence
  Description of Artificial Sequence: Synthetic oligonucleotide
cgccgccgcucuccgacaa

SEQ ID NO: 2569025 - RNA, 19 nt, Artificial Sequence
  Description of Artificial Sequence: Synthetic oligonucleotide
ggcccgccuggauccccau

SEQ ID NO: 2569026 - RNA, 19 nt, Artificial Sequence
  Description of Artificial Sequence: Synthetic oligonucleotide
gcgaggccucgggcucuga

SEQ ID NO: 2569027 - RNA, 19 nt, Artificial Sequence
  Description of Artificial Sequence: Synthetic oligonucleotide
ggugcgcccuggggacccu

SEQ ID NO: 2569028 - RNA, 19 nt, Artificial Sequence
  Description of Artificial Sequence: Synthetic oligonucleotide
ccggggcgcucggcccgcc

SEQ ID NO: 2569029 - RNA, 19 nt, Artificial Sequence
  Description of Artificial Sequence: Synthetic oligonucleotide
gcgcucggcccgccuggau

SEQ ID NO: 2569030 - RNA, 19 nt, Artificial Sequence
  Description of Artificial Sequence: Synthetic oligonucleotide
gcgucgcggccggcacaga

SEQ ID NO: 2569031 - RNA, 19 nt, Artificial Sequence
  Description of Artificial Sequence: Synthetic oligonucleotide
ccgagucguccggggcgcu

SEQ ID NO: 2569032 - RNA, 19 nt, Artificial Sequence
  Description of Artificial Sequence: Synthetic oligonucleotide
cgcggccggcacagauacu

SEQ ID NO: 2569033 - RNA, 19 nt, Artificial Sequence
  Description of Artificial Sequence: Synthetic oligonucleotide
cggggcgcucggcccgccu

SEQ ID NO: 2569034 - RNA, 19 nt, Artificial Sequence
  Description of Artificial Sequence: Synthetic oligonucleotide
aauggugagagguucaggc

SEQ ID NO: 2569035 - RNA, 19 nt, Artificial Sequence
  Description of Artificial Sequence: Synthetic oligonucleotide
uaauucauuacaaaauugg

SEQ ID NO: 2569036 - RNA, 19 nt, Artificial Sequence
  Description of Artificial Sequence: Synthetic oligonucleotide
aaaugaaacccacacugcc

SEQ ID NO: 2569037 - RNA, 19 nt, Artificial Sequence
  Description of Artificial Sequence: Synthetic oligonucleotide
ucaaaggucaaucacacgc

SEQ ID NO: 2569038 - RNA, 19 nt, Artificial Sequence
  Description of Artificial Sequence: Synthetic oligonucleotide
aaguugaucagcuuggucu

SEQ ID NO: 2569039 - RNA, 19 nt, Artificial Sequence
  Description of Artificial Sequence: Synthetic oligonucleotide
auugauugcaagcaggagg

SEQ ID NO: 2569040 - RNA, 19 nt, Artificial Sequence
  Description of Artificial Sequence: Synthetic oligonucleotide
aaagucaugucauuuuguc

SEQ ID NO: 2569041 - RNA, 19 nt, Artificial Sequence
  Description of Artificial Sequence: Synthetic oligonucleotide
augugaaacacucagucac

SEQ ID NO: 2569042 - RNA, 19 nt, Artificial Sequence
  Description of Artificial Sequence: Synthetic oligonucleotide
caaaaugaaacccacacug

SEQ ID NO: 2569043 - RNA, 19 nt, Artificial Sequence
  Description of Artificial Sequence: Synthetic oligonucleotide
aacuucaaaggucaaucac

SEQ ID NO: 2569044 - RNA, 19 nt, Artificial Sequence
  Description of Artificial Sequence: Synthetic oligonucleotide
aagggaacuaauucauuac

SEQ ID NO: 2569045 - RNA, 19 nt, Artificial Sequence
  Description of Artificial Sequence: Synthetic oligonucleotide
aggacuuuugcacagcaac

SEQ ID NO: 2569046 - RNA, 19 nt, Artificial Sequence
  Description of Artificial Sequence: Synthetic oligonucleotide
aaugccaccacugagggca

SEQ ID NO: 2569047 - RNA, 19 nt, Artificial Sequence
  Description of Artificial Sequence: Synthetic oligonucleotide
aagauguaacuucaaaggu

SEQ ID NO: 2569048 - RNA, 19 nt, Artificial Sequence
  Description of Artificial Sequence: Synthetic oligonucleotide
ugcuauucaagaaacacuc

SEQ ID NO: 2569049 - RNA, 19 nt, Artificial Sequence
  Description of Artificial Sequence: Synthetic oligonucleotide
cacauguuaaagcaguugg

SEQ ID NO: 2569050 - RNA, 19 nt, Artificial Sequence
  Description of Artificial Sequence: Synthetic oligonucleotide
uugauugcaagcaggagga

SEQ ID NO: 2569051 - RNA, 19 nt, Artificial Sequence
  Description of Artificial Sequence: Synthetic oligonucleotide
gucaaucacacgcaaaggg

SEQ ID NO: 2569052 - RNA, 19 nt, Artificial Sequence
  Description of Artificial Sequence: Synthetic oligonucleotide
ucaaagucaugucauuuug

SEQ ID NO: 2569053 - RNA, 19 nt, Artificial Sequence
  Description of Artificial Sequence: Synthetic oligonucleotide
aagaaauggugagagguuc

SEQ ID NO: 2569054 - RNA, 19 nt, Artificial Sequence
  Description of Artificial Sequence: Synthetic oligonucleotide
gucacuccuaagcagaugg

SEQ ID NO: 2569055 - RNA, 19 nt, Artificial Sequence
  Description of Artificial Sequence: Synthetic oligonucleotide
ucugaaacacuaguaaugc

SEQ ID NO: 2569056 - RNA, 19 nt, Artificial Sequence
  Description of Artificial Sequence: Synthetic oligonucleotide
gaaugcacauguuaaagca

SEQ ID NO: 2569057 - RNA, 19 nt, Artificial Sequence
  Description of Artificial Sequence: Synthetic oligonucleotide
aaaguugaucagcuugguc

SEQ ID NO: 2569058 - RNA, 19 nt, Artificial Sequence
  Description of Artificial Sequence: Synthetic oligonucleotide
acaccaacuggucaggagg

SEQ ID NO: 2569059 - RNA, 19 nt, Artificial Sequence
  Description of Artificial Sequence: Synthetic oligonucleotide
aggucaaucacacgcaaag

SEQ ID NO: 2569060 - RNA, 19 nt, Artificial Sequence
  Description of Artificial Sequence: Synthetic oligonucleotide
agucaaagcaucaucaaag

SEQ ID NO: 2569061 - RNA, 19 nt, Artificial Sequence
  Description of Artificial Sequence: Synthetic oligonucleotide
acuaauucauuacaaaauu

SEQ ID NO: 2569062 - RNA, 19 nt, Artificial Sequence
  Description of Artificial Sequence: Synthetic oligonucleotide
gaagaaugcugucccaagg

SEQ ID NO: 2569063 - RNA, 19 nt, Artificial Sequence
  Description of Artificial Sequence: Synthetic oligonucleotide
aagaaacacuccauggugg

SEQ ID NO: 2569064 - RNA, 19 nt, Artificial Sequence
  Description of Artificial Sequence: Synthetic oligonucleotide
ugugugauccgaaugcaca

SEQ ID NO: 2569065 - RNA, 19 nt, Artificial Sequence
  Description of Artificial Sequence: Synthetic oligonucleotide
aguuggccaaaaugaaacc

SEQ ID NO: 2569066 - RNA, 19 nt, Artificial Sequence
  Description of Artificial Sequence: Synthetic oligonucleotide
gguaccaaaagucaaagca

SEQ ID NO: 2569067 - RNA, 19 nt, Artificial Sequence
  Description of Artificial Sequence: Synthetic oligonucleotide
gucauuuugucacugaguc

SEQ ID NO: 2569068 - RNA, 19 nt, Artificial Sequence
  Description of Artificial Sequence: Synthetic oligonucleotide
uguggggugacucucacuc

SEQ ID NO: 2569069 - RNA, 19 nt, Artificial Sequence
  Description of Artificial Sequence: Synthetic oligonucleotide
aaacacuccaugguggguc

SEQ ID NO: 2569070 - RNA, 19 nt, Artificial Sequence
  Description of Artificial Sequence: Synthetic oligonucleotide
gauguaacuucaaagguca

SEQ ID NO: 2569071 - RNA, 19 nt, Artificial Sequence
  Description of Artificial Sequence: Synthetic oligonucleotide
aacacuccauggugggucc

SEQ ID NO: 2569072 - RNA, 19 nt, Artificial Sequence
  Description of Artificial Sequence: Synthetic oligonucleotide
aggagugucucugaaacac

SEQ ID NO: 2569073 - RNA, 19 nt, Artificial Sequence
  Description of Artificial Sequence: Synthetic oligonucleotide
acgcaaagggaacuaauuc

SEQ ID NO: 2569074 - RNA, 19 nt, Artificial Sequence
  Description of Artificial Sequence: Synthetic oligonucleotide
cauguuaaagcaguuggcc

SEQ ID NO: 2569075 - RNA, 19 nt, Artificial Sequence
  Description of Artificial Sequence: Synthetic oligonucleotide
uggucuucacuuaaagccc

SEQ ID NO: 2569076 - RNA, 19 nt, Artificial Sequence
  Description of Artificial Sequence: Synthetic oligonucleotide
agaaacacuccaugguggg

SEQ ID NO: 2569077 - RNA, 19 nt, Artificial Sequence
  Description of Artificial Sequence: Synthetic oligonucleotide
acucucacuccauagcagg

SEQ ID NO: 2569078 - RNA, 19 nt, Artificial Sequence
  Description of Artificial Sequence: Synthetic oligonucleotide
aaauuguaccugucaaccu

SEQ ID NO: 2569079 - RNA, 19 nt, Artificial Sequence
  Description of Artificial Sequence: Synthetic oligonucleotide
ugguggauaaaggaaaggc

SEQ ID NO: 2569080 - RNA, 19 nt, Artificial Sequence
  Description of Artificial Sequence: Synthetic oligonucleotide
uguuaaagcaguuggccaa

SEQ ID NO: 2569081 - RNA, 19 nt, Artificial Sequence
  Description of Artificial Sequence: Synthetic oligonucleotide
aacacaugcuauucaagaa

SEQ ID NO: 2569082 - RNA, 19 nt, Artificial Sequence
  Description of Artificial Sequence: Synthetic oligonucleotide
ugaaauuguaccugucaac

SEQ ID NO: 2569083 - RNA, 19 nt, Artificial Sequence
  Description of Artificial Sequence: Synthetic oligonucleotide
acuccuaagcagauggucc

SEQ ID NO: 2569084 - RNA, 19 nt, Artificial Sequence
  Description of Artificial Sequence: Synthetic oligonucleotide
auaaaggaaaggcucugug

SEQ ID NO: 2569085 - RNA, 19 nt, Artificial Sequence
  Description of Artificial Sequence: Synthetic oligonucleotide
gaagacagugccagcaugg

SEQ ID NO: 2569086 - RNA, 19 nt, Artificial Sequence
  Description of Artificial Sequence: Synthetic oligonucleotide
cacaccauugauugcaagc

SEQ ID NO: 2569087 - RNA, 19 nt, Artificial Sequence
  Description of Artificial Sequence: Synthetic oligonucleotide
ugacucucacuccauagca

SEQ ID NO: 2569088 - RNA, 19 nt, Artificial Sequence
  Description of Artificial Sequence: Synthetic oligonucleotide
caagaaacacuccauggug

SEQ ID NO: 2569089 - RNA, 19 nt, Artificial Sequence
  Description of Artificial Sequence: Synthetic oligonucleotide
uauucaagaaacacuccau

SEQ ID NO: 2569090 - RNA, 19 nt, Artificial Sequence
  Description of Artificial Sequence: Synthetic oligonucleotide
aaugcacauguuaaagcag

SEQ ID NO: 2569091 - RNA, 19 nt, Artificial Sequence
  Description of Artificial Sequence: Synthetic oligonucleotide
cacaugcuauucaagaaac

SEQ ID NO: 2569092 - RNA, 19 nt, Artificial Sequence
  Description of Artificial Sequence: Synthetic oligonucleotide
agguaccaaaagucaaagc

SEQ ID NO: 2569093 - RNA, 19 nt, Artificial Sequence
  Description of Artificial Sequence: Synthetic oligonucleotide
uagugguggauaaaggaaa

SEQ ID NO: 2569094 - RNA, 19 nt, Artificial Sequence
  Description of Artificial Sequence: Synthetic oligonucleotide
aaucacacgcaaagggaac

SEQ ID NO: 2569095 - RNA, 19 nt, Artificial Sequence
  Description of Artificial Sequence: Synthetic oligonucleotide
ucaggagguaggauaagac

SEQ ID NO: 2569096 - RNA, 19 nt, Artificial Sequence
  Description of Artificial Sequence: Synthetic oligonucleotide
auuguaccugucaaccucc

SEQ ID NO: 2569097 - RNA, 19 nt, Artificial Sequence
  Description of Artificial Sequence: Synthetic oligonucleotide
ugucauuuugucacugagu

SEQ ID NO: 2569098 - RNA, 19 nt, Artificial Sequence
  Description of Artificial Sequence: Synthetic oligonucleotide
cuauucaagaaacacucca

SEQ ID NO: 2569099 - RNA, 19 nt, Artificial Sequence
  Description of Artificial Sequence: Synthetic oligonucleotide
acauguuaaagcaguuggc

SEQ ID NO: 2569100 - RNA, 19 nt, Artificial Sequence
  Description of Artificial Sequence: Synthetic oligonucleotide
guaacuucaaaggucaauc

SEQ ID NO: 2569101 - RNA, 19 nt, Artificial Sequence
  Description of Artificial Sequence: Synthetic oligonucleotide
agggcaaacaccccgagaa

SEQ ID NO: 2569102 - RNA, 19 nt, Artificial Sequence
  Description of Artificial Sequence: Synthetic oligonucleotide
auguuaaagcaguuggcca

SEQ ID NO: 2569103 - RNA, 19 nt, Artificial Sequence
  Description of Artificial Sequence: Synthetic oligonucleotide
augugugccagccuagcag

SEQ ID NO: 2569104 - RNA, 19 nt, Artificial Sequence
  Description of Artificial Sequence: Synthetic oligonucleotide
accacugagggcaaacacc

SEQ ID NO: 2569105 - RNA, 19 nt, Artificial Sequence
  Description of Artificial Sequence: Synthetic oligonucleotide
ugugaaacacucagucaca

SEQ ID NO: 2569106 - RNA, 19 nt, Artificial Sequence
  Description of Artificial Sequence: Synthetic oligonucleotide
ugagucuggaucuacccaa

SEQ ID NO: 2569107 - RNA, 19 nt, Artificial Sequence
  Description of Artificial Sequence: Synthetic oligonucleotide
ucucugaaacacuaguaau

SEQ ID NO: 2569108 - RNA, 19 nt, Artificial Sequence
  Description of Artificial Sequence: Synthetic oligonucleotide
agggaacuaauucauuaca

SEQ ID NO: 2569109 - RNA, 19 nt, Artificial Sequence
  Description of Artificial Sequence: Synthetic oligonucleotide
cugcuacccacuuuugugg

SEQ ID NO: 2569110 - RNA, 19 nt, Artificial Sequence
  Description of Artificial Sequence: Synthetic oligonucleotide
aaugcugucccaaggguca

SEQ ID NO: 2569111 - RNA, 19 nt, Artificial Sequence
  Description of Artificial Sequence: Synthetic oligonucleotide
aaguagugguggauaaagg

SEQ ID NO: 2569112 - RNA, 19 nt, Artificial Sequence
  Description of Artificial Sequence: Synthetic oligonucleotide
aaugaaacccacacugcca

SEQ ID NO: 2569113 - RNA, 19 nt, Artificial Sequence
  Description of Artificial Sequence: Synthetic oligonucleotide
gacagugccagcaugguga

SEQ ID NO: 2569114 - RNA, 19 nt, Artificial Sequence
  Description of Artificial Sequence: Synthetic oligonucleotide
uucaaaggucaaucacacg

SEQ ID NO: 2569115 - RNA, 19 nt, Artificial Sequence
  Description of Artificial Sequence: Synthetic oligonucleotide
acacaugcuauucaagaaa

SEQ ID NO: 2569116 - RNA, 19 nt, Artificial Sequence
  Description of Artificial Sequence: Synthetic oligonucleotide
ugucccaagggucacuccu

SEQ ID NO: 2569117 - RNA, 19 nt, Artificial Sequence
  Description of Artificial Sequence: Synthetic oligonucleotide
aaaggucaaucacacgcaa

SEQ ID NO: 2569118 - RNA, 19 nt, Artificial Sequence
  Description of Artificial Sequence: Synthetic oligonucleotide
gaucuacccaacugagucc

SEQ ID NO: 2569119 - RNA, 19 nt, Artificial Sequence
  Description of Artificial Sequence: Synthetic oligonucleotide
aaugugugccagccuagca

SEQ ID NO: 2569120 - RNA, 19 nt, Artificial Sequence
  Description of Artificial Sequence: Synthetic oligonucleotide
ugcucauggcagcaaaugu

SEQ ID NO: 2569121 - RNA, 19 nt, Artificial Sequence
  Description of Artificial Sequence: Synthetic oligonucleotide
ugccacaccaacuggucag

SEQ ID NO: 2569122 - RNA, 19 nt, Artificial Sequence
  Description of Artificial Sequence: Synthetic oligonucleotide
caacacaugcuauucaaga

SEQ ID NO: 2569123 - RNA, 19 nt, Artificial Sequence
  Description of Artificial Sequence: Synthetic oligonucleotide
ggaucuacccaacugaguc

SEQ ID NO: 2569124 - RNA, 19 nt, Artificial Sequence
  Description of Artificial Sequence: Synthetic oligonucleotide
ugcuacccacuuuuguggg

SEQ ID NO: 2569125 - RNA, 19 nt, Artificial Sequence
  Description of Artificial Sequence: Synthetic oligonucleotide
cugaaacacuaguaaugcc

SEQ ID NO: 2569126 - RNA, 19 nt, Artificial Sequence
  Description of Artificial Sequence: Synthetic oligonucleotide
aucagcuuggucucuguga

SEQ ID NO: 2569127 - RNA, 19 nt, Artificial Sequence
  Description of Artificial Sequence: Synthetic oligonucleotide
cugucaaccuccucuuugc

SEQ ID NO: 2569128 - RNA, 19 nt, Artificial Sequence
  Description of Artificial Sequence: Synthetic oligonucleotide
uucacuuaaagcccuccuu

SEQ ID NO: 2569129 - RNA, 19 nt, Artificial Sequence
  Description of Artificial Sequence: Synthetic oligonucleotide
cuggaucuacccaacugag

SEQ ID NO: 2569130 - RNA, 19 nt, Artificial Sequence
  Description of Artificial Sequence: Synthetic oligonucleotide
acaccauugauugcaagca

SEQ ID NO: 2569131 - RNA, 19 nt, Artificial Sequence
  Description of Artificial Sequence: Synthetic oligonucleotide
uggggugacucucacucca

SEQ ID NO: 2569132 - RNA, 19 nt, Artificial Sequence
  Description of Artificial Sequence: Synthetic oligonucleotide
ucauuuugucacugagucu

SEQ ID NO: 2569133 - RNA, 19 nt, Artificial Sequence
  Description of Artificial Sequence: Synthetic oligonucleotide
gucucugaaacacuaguaa

SEQ ID NO: 2569134 - RNA, 19 nt, Artificial Sequence
  Description of Artificial Sequence: Synthetic oligonucleotide
ucauuacaaaauuggcuuu

SEQ ID NO: 2569135 - RNA, 19 nt, Artificial Sequence
  Description of Artificial Sequence: Synthetic oligonucleotide
uggucaggagguaggauaa

SEQ ID NO: 2569136 - RNA, 19 nt, Artificial Sequence
  Description of Artificial Sequence: Synthetic oligonucleotide
ugcaagcaggaggacauag

SEQ ID NO: 2569137 - RNA, 19 nt, Artificial Sequence
  Description of Artificial Sequence: Synthetic oligonucleotide
agugccagcauggugaaau

SEQ ID NO: 2569138 - RNA, 19 nt, Artificial Sequence
  Description of Artificial Sequence: Synthetic oligonucleotide
agcaaugugugccagccua

SEQ ID NO: 2569139 - RNA, 19 nt, Artificial Sequence
  Description of Artificial Sequence: Synthetic oligonucleotide
gugaaauuguaccugucaa

SEQ ID NO: 2569140 - RNA, 19 nt, Artificial Sequence
  Description of Artificial Sequence: Synthetic oligonucleotide
uggccaaaaugaaacccac

SEQ ID NO: 2569141 - RNA, 19 nt, Artificial Sequence
  Description of Artificial Sequence: Synthetic oligonucleotide
cucauggcagcaaauguga

SEQ ID NO: 2569142 - RNA, 19 nt, Artificial Sequence
  Description of Artificial Sequence: Synthetic oligonucleotide
gugacucucacuccauagc

SEQ ID NO: 2569143 - RNA, 19 nt, Artificial Sequence
  Description of Artificial Sequence: Synthetic oligonucleotide
uguaacuucaaaggucaau

SEQ ID NO: 2569144 - RNA, 19 nt, Artificial Sequence
  Description of Artificial Sequence: Synthetic oligonucleotide
acuuuuguggggugacucu

SEQ ID NO: 2569145 - RNA, 19 nt, Artificial Sequence
  Description of Artificial Sequence: Synthetic oligonucleotide
gucuggaucuacccaacug

SEQ ID NO: 2569146 - RNA, 19 nt, Artificial Sequence
  Description of Artificial Sequence: Synthetic oligonucleotide
aaacaccccgagaagaaau

SEQ ID NO: 2569147 - RNA, 19 nt, Artificial Sequence
  Description of Artificial Sequence: Synthetic oligonucleotide
agugguggauaaaggaaag

SEQ ID NO: 2569148 - RNA, 19 nt, Artificial Sequence
  Description of Artificial Sequence: Synthetic oligonucleotide
gauugcaagcaggaggaca

SEQ ID NO: 2569149 - RNA, 19 nt, Artificial Sequence
  Description of Artificial Sequence: Synthetic oligonucleotide
augcuauucaagaaacacu

SEQ ID NO: 2569150 - RNA, 19 nt, Artificial Sequence
  Description of Artificial Sequence: Synthetic oligonucleotide
ucuucacuuaaagcccucc

SEQ ID NO: 2569151 - RNA, 19 nt, Artificial Sequence
  Description of Artificial Sequence: Synthetic oligonucleotide
uuugcucauggcagcaaau

SEQ ID NO: 2569152 - RNA, 19 nt, Artificial Sequence
  Description of Artificial Sequence: Synthetic oligonucleotide
ggugacucucacuccauag

SEQ ID NO: 2569153 - RNA, 19 nt, Artificial Sequence
  Description of Artificial Sequence: Synthetic oligonucleotide
uccgaaugcacauguuaaa

SEQ ID NO: 2569154 - RNA, 19 nt, Artificial Sequence
  Description of Artificial Sequence: Synthetic oligonucleotide
ccaagggucacuccuaagc

SEQ ID NO: 2569155 - RNA, 19 nt, Artificial Sequence
  Description of Artificial Sequence: Synthetic oligonucleotide
uccuuugguuggaagacuu

SEQ ID NO: 2569156 - RNA, 19 nt, Artificial Sequence
  Description of Artificial Sequence: Synthetic oligonucleotide
uuuguggggugacucucac

SEQ ID NO: 2569157 - RNA, 19 nt, Artificial Sequence
  Description of Artificial Sequence: Synthetic oligonucleotide
cuccauagcaggacuuuug

SEQ ID NO: 2569158 - RNA, 19 nt, Artificial Sequence
  Description of Artificial Sequence: Synthetic oligonucleotide
caugguggguccagguacc

SEQ ID NO: 2569159 - RNA, 19 nt, Artificial Sequence
  Description of Artificial Sequence: Synthetic oligonucleotide
uaaagcaguuggccaaaau

SEQ ID NO: 2569160 - RNA, 19 nt, Artificial Sequence
  Description of Artificial Sequence: Synthetic oligonucleotide
uggaucuacccaacugagu

SEQ ID NO: 2569161 - RNA, 19 nt, Artificial Sequence
  Description of Artificial Sequence: Synthetic oligonucleotide
uuggaagacuuugacuggu

SEQ ID NO: 2569162 - RNA, 19 nt, Artificial Sequence
  Description of Artificial Sequence: Synthetic oligonucleotide
aacaccccgagaagaaaug

SEQ ID NO: 2569163 - RNA, 19 nt, Artificial Sequence
  Description of Artificial Sequence: Synthetic oligonucleotide
ugugauccgaaugcacaug

SEQ ID NO: 2569164 - RNA, 19 nt, Artificial Sequence
  Description of Artificial Sequence: Synthetic oligonucleotide
cagcauggugaaauuguac

SEQ ID NO: 2569165 - RNA, 19 nt, Artificial Sequence
  Description of Artificial Sequence: Synthetic oligonucleotide
ggaacuaauucauuacaaa

SEQ ID NO: 2569166 - RNA, 19 nt, Artificial Sequence
  Description of Artificial Sequence: Synthetic oligonucleotide
uggguccagguaccaaaag

SEQ ID NO: 2569167 - RNA, 19 nt, Artificial Sequence
  Description of Artificial Sequence: Synthetic oligonucleotide
cacugagucuggaucuacc

SEQ ID NO: 2569168 - RNA, 19 nt, Artificial Sequence
  Description of Artificial Sequence: Synthetic oligonucleotide
guaccugucaaccuccucu

SEQ ID NO: 2569169 - RNA, 19 nt, Artificial Sequence
  Description of Artificial Sequence: Synthetic oligonucleotide
gaaugcugucccaaggguc

SEQ ID NO: 2569170 - RNA, 19 nt, Artificial Sequence
  Description of Artificial Sequence: Synthetic oligonucleotide
augcacauguuaaagcagu

SEQ ID NO: 2569171 - RNA, 19 nt, Artificial Sequence
  Description of Artificial Sequence: Synthetic oligonucleotide
gacucucacuccauagcag

SEQ ID NO: 2569172 - RNA, 19 nt, Artificial Sequence
  Description of Artificial Sequence: Synthetic oligonucleotide
acaccccgagaagaaaugg

SEQ ID NO: 2569173 - RNA, 19 nt, Artificial Sequence
  Description of Artificial Sequence: Synthetic oligonucleotide
uacccaacugaguccugag

SEQ ID NO: 2569174 - RNA, 19 nt, Artificial Sequence
  Description of Artificial Sequence: Synthetic oligonucleotide
aucuacccaacugaguccu

SEQ ID NO: 2569175 - RNA, 19 nt, Artificial Sequence
  Description of Artificial Sequence: Synthetic oligonucleotide
guagugguggauaaaggaa

SEQ ID NO: 2569176 - RNA, 19 nt, Artificial Sequence
  Description of Artificial Sequence: Synthetic oligonucleotide
caccauugauugcaagcag

SEQ ID NO: 2569177 - RNA, 19 nt, Artificial Sequence
  Description of Artificial Sequence: Synthetic oligonucleotide
agacagugccagcauggug

SEQ ID NO: 2569178 - RNA, 19 nt, Artificial Sequence
  Description of Artificial Sequence: Synthetic oligonucleotide
ugucaaccuccucuuugcu

SEQ ID NO: 2569179 - RNA, 19 nt, Artificial Sequence
  Description of Artificial Sequence: Synthetic oligonucleotide
cacaccaacuggucaggag

SEQ ID NO: 2569180 - RNA, 19 nt, Artificial Sequence
  Description of Artificial Sequence: Synthetic oligonucleotide
cauugauugcaagcaggag

SEQ ID NO: 2569181 - RNA, 19 nt, Artificial Sequence
  Description of Artificial Sequence: Synthetic oligonucleotide
acucagucacaccauugau

SEQ ID NO: 2569182 - RNA, 19 nt, Artificial Sequence
  Description of Artificial Sequence: Synthetic oligonucleotide
caagggucacuccuaagca

SEQ ID NO: 2569183 - RNA, 19 nt, Artificial Sequence
  Description of Artificial Sequence: Synthetic oligonucleotide
agcaggacuuuugcacagc

SEQ ID NO: 2569184 - RNA, 19 nt, Artificial Sequence
  Description of Artificial Sequence: Synthetic oligonucleotide
ugcacauguuaaagcaguu

SEQ ID NO: 2569185 - RNA, 19 nt, Artificial Sequence
  Description of Artificial Sequence: Synthetic oligonucleotide
aucacacgcaaagggaacu

SEQ ID NO: 2569186 - RNA, 19 nt, Artificial Sequence
  Description of Artificial Sequence: Synthetic oligonucleotide
aacugaguccugagaaagu

SEQ ID NO: 2569187 - RNA, 19 nt, Artificial Sequence
  Description of Artificial Sequence: Synthetic oligonucleotide
acugccacaccaacugguc

SEQ ID NO: 2569188 - RNA, 19 nt, Artificial Sequence
  Description of Artificial Sequence: Synthetic oligonucleotide
guucaggccagccaggggu

SEQ ID NO: 2569189 - RNA, 19 nt, Artificial Sequence
  Description of Artificial Sequence: Synthetic oligonucleotide
ugagagguucaggccagcc

SEQ ID NO: 2569190 - RNA, 19 nt, Artificial Sequence
  Description of Artificial Sequence: Synthetic oligonucleotide
cgaaugcacauguuaaagc

SEQ ID NO: 2569191 - RNA, 19 nt, Artificial Sequence
  Description of Artificial Sequence: Synthetic oligonucleotide
aaggcucugugugauccga

SEQ ID NO: 2569192 - RNA, 19 nt, Artificial Sequence
  Description of Artificial Sequence: Synthetic oligonucleotide
guccccacagcaaugugug

SEQ ID NO: 2569193 - RNA, 19 nt, Artificial Sequence
  Description of Artificial Sequence: Synthetic oligonucleotide
uggugaaauuguaccuguc

SEQ ID NO: 2569194 - RNA, 19 nt, Artificial Sequence
  Description of Artificial Sequence: Synthetic oligonucleotide
ucacuccuaagcagauggu

SEQ ID NO: 2569195 - RNA, 19 nt, Artificial Sequence
  Description of Artificial Sequence: Synthetic oligonucleotide
accccgagaagaaauggug

SEQ ID NO: 2569196 - RNA, 19 nt, Artificial Sequence
  Description of Artificial Sequence: Synthetic oligonucleotide
auccgaaugcacauguuaa

SEQ ID NO: 2569197 - RNA, 19 nt, Artificial Sequence
  Description of Artificial Sequence: Synthetic oligonucleotide
cuggucaggagguaggaua

SEQ ID NO: 2569198 - RNA, 19 nt, Artificial Sequence
  Description of Artificial Sequence: Synthetic oligonucleotide
cgagaagaaauggugagag

SEQ ID NO: 2569199 - RNA, 19 nt, Artificial Sequence
  Description of Artificial Sequence: Synthetic oligonucleotide
cuuuuguggggugacucuc

SEQ ID NO: 2569200 - RNA, 19 nt, Artificial Sequence
  Description of Artificial Sequence: Synthetic oligonucleotide
uaaugccaccacugagggc

SEQ ID NO: 2569201 - RNA, 19 nt, Artificial Sequence
  Description of Artificial Sequence: Synthetic oligonucleotide
uggcagcaaaugugaaaca

SEQ ID NO: 2569202 - RNA, 19 nt, Artificial Sequence
  Description of Artificial Sequence: Synthetic oligonucleotide
cuaagcagaugguccccac

SEQ ID NO: 2569203 - RNA, 19 nt, Artificial Sequence
  Description of Artificial Sequence: Synthetic oligonucleotide
cacuuuuguggggugacuc

SEQ ID NO: 2569204 - RNA, 19 nt, Artificial Sequence
  Description of Artificial Sequence: Synthetic oligonucleotide
ucacuccauagcaggacuu

SEQ ID NO: 2569205 - RNA, 19 nt, Artificial Sequence
  Description of Artificial Sequence: Synthetic oligonucleotide
uguaccugucaaccuccuc

SEQ ID NO: 2569206 - RNA, 19 nt, Artificial Sequence
  Description of Artificial Sequence: Synthetic oligonucleotide
ugugccagccuagcaggcc

SEQ ID NO: 2569207 - RNA, 19 nt, Artificial Sequence
  Description of Artificial Sequence: Synthetic oligonucleotide
cacuccuaagcagaugguc

SEQ ID NO: 2569208 - RNA, 19 nt, Artificial Sequence
  Description of Artificial Sequence: Synthetic oligonucleotide
uccuaagcagauggucccc

SEQ ID NO: 2569209 - RNA, 19 nt, Artificial Sequence
  Description of Artificial Sequence: Synthetic oligonucleotide
gcucauggcagcaaaugug

SEQ ID NO: 2569210 - RNA, 19 nt, Artificial Sequence
  Description of Artificial Sequence: Synthetic oligonucleotide
aaggucaaucacacgcaaa

SEQ ID NO: 2569211 - RNA, 19 nt, Artificial Sequence
  Description of Artificial Sequence: Synthetic oligonucleotide
aggaaaggcucugugugau

SEQ ID NO: 2569212 - RNA, 19 nt, Artificial Sequence
  Description of Artificial Sequence: Synthetic oligonucleotide
uaccugucaaccuccucuu

SEQ ID NO: 2569213 - RNA, 19 nt, Artificial Sequence
  Description of Artificial Sequence: Synthetic oligonucleotide
guaccaaaagucaaagcau

SEQ ID NO: 2569214 - RNA, 19 nt, Artificial Sequence
  Description of Artificial Sequence: Synthetic oligonucleotide
uggaagacuuugacugguu

SEQ ID NO: 2569215 - RNA, 19 nt, Artificial Sequence
  Description of Artificial Sequence: Synthetic oligonucleotide
ccaugguggguccagguac

SEQ ID NO: 2569216 - RNA, 19 nt, Artificial Sequence
  Description of Artificial Sequence: Synthetic oligonucleotide
gugauccgaaugcacaugu

SEQ ID NO: 2569217 - RNA, 19 nt, Artificial Sequence
  Description of Artificial Sequence: Synthetic oligonucleotide
ccgaaugcacauguuaaag

SEQ ID NO: 2569218 - RNA, 19 nt, Artificial Sequence
  Description of Artificial Sequence: Synthetic oligonucleotide
uuaaagcaguuggccaaaa

SEQ ID NO: 2569219 - RNA, 19 nt, Artificial Sequence
  Description of Artificial Sequence: Synthetic oligonucleotide
acaugcuauucaagaaaca

SEQ ID NO: 2569220 - RNA, 19 nt, Artificial Sequence
  Description of Artificial Sequence: Synthetic oligonucleotide
ucuacccaacugaguccug

SEQ ID NO: 2569221 - RNA, 19 nt, Artificial Sequence
  Description of Artificial Sequence: Synthetic oligonucleotide
ugauccgaaugcacauguu

SEQ ID NO: 2569222 - RNA, 19 nt, Artificial Sequence
  Description of Artificial Sequence: Synthetic oligonucleotide
agcaguuggccaaaaugaa

SEQ ID NO: 2569223 - RNA, 19 nt, Artificial Sequence
  Description of Artificial Sequence: Synthetic oligonucleotide
gcucugugugauccgaaug

SEQ ID NO: 2569224 - RNA, 19 nt, Artificial Sequence
  Description of Artificial Sequence: Synthetic oligonucleotide
ggucucuucucugcuaccc

SEQ ID NO: 2569225 - RNA, 19 nt, Artificial Sequence
  Description of Artificial Sequence: Synthetic oligonucleotide
gcuauucaagaaacacucc

SEQ ID NO: 2569226 - RNA, 19 nt, Artificial Sequence
  Description of Artificial Sequence: Synthetic oligonucleotide
gcaacacaugcuauucaag

SEQ ID NO: 2569227 - RNA, 19 nt, Artificial Sequence
  Description of Artificial Sequence: Synthetic oligonucleotide
cuuugcucauggcagcaaa

SEQ ID NO: 2569228 - RNA, 19 nt, Artificial Sequence
  Description of Artificial Sequence: Synthetic oligonucleotide
ucacugagucuggaucuac

SEQ ID NO: 2569229 - RNA, 19 nt, Artificial Sequence
  Description of Artificial Sequence: Synthetic oligonucleotide
gagggcaaacaccccgaga

SEQ ID NO: 2569230 - RNA, 19 nt, Artificial Sequence
  Description of Artificial Sequence: Synthetic oligonucleotide
gugaagaaugcugucccaa

SEQ ID NO: 2569231 - RNA, 19 nt, Artificial Sequence
  Description of Artificial Sequence: Synthetic oligonucleotide
gcuacccacuuuugugggg

SEQ ID NO: 2569232 - RNA, 19 nt, Artificial Sequence
  Description of Artificial Sequence: Synthetic oligonucleotide
ugguccccacagcaaugug

SEQ ID NO: 2569233 - RNA, 19 nt, Artificial Sequence
  Description of Artificial Sequence: Synthetic oligonucleotide
gcacauguuaaagcaguug

SEQ ID NO: 2569234 - RNA, 19 nt, Artificial Sequence
  Description of Artificial Sequence: Synthetic oligonucleotide
gggaacuaauucauuacaa

SEQ ID NO: 2569235 - RNA, 19 nt, Artificial Sequence
  Description of Artificial Sequence: Synthetic oligonucleotide
uuguggggugacucucacu

SEQ ID NO: 2569236 - RNA, 19 nt, Artificial Sequence
  Description of Artificial Sequence: Synthetic oligonucleotide
ggcaaacaccccgagaaga

SEQ ID NO: 2569237 - RNA, 19 nt, Artificial Sequence
  Description of Artificial Sequence: Synthetic oligonucleotide
gagucuggaucuacccaac

SEQ ID NO: 2569238 - RNA, 19 nt, Artificial Sequence
  Description of Artificial Sequence: Synthetic oligonucleotide
guggggugacucucacucc

SEQ ID NO: 2569239 - RNA, 19 nt, Artificial Sequence
  Description of Artificial Sequence: Synthetic oligonucleotide
gguggguccagguaccaaa

SEQ ID NO: 2569240 - RNA, 19 nt, Artificial Sequence
  Description of Artificial Sequence: Synthetic oligonucleotide
gaagaaauggugagagguu

SEQ ID NO: 2569241 - RNA, 19 nt, Artificial Sequence
  Description of Artificial Sequence: Synthetic oligonucleotide
gugccagccuagcaggcca

SEQ ID NO: 2569242 - RNA, 19 nt, Artificial Sequence
  Description of Artificial Sequence: Synthetic oligonucleotide
ggugagagguucaggccag

SEQ ID NO: 2569243 - RNA, 19 nt, Artificial Sequence
  Description of Artificial Sequence: Synthetic oligonucleotide
gguucaggccagccagggg

SEQ ID NO: 2569244 - RNA, 19 nt, Artificial Sequence
  Description of Artificial Sequence: Synthetic oligonucleotide
ggacuuuugcacagcaaca

SEQ ID NO: 2569245 - RNA, 19 nt, Artificial Sequence
  Description of Artificial Sequence: Synthetic oligonucleotide
agguaggauaagaccaaaa

SEQ ID NO: 2569246 - RNA, 19 nt, Artificial Sequence
  Description of Artificial Sequence: Synthetic oligonucleotide
ugauugcaagcaggaggac

SEQ ID NO: 2569247 - RNA, 19 nt, Artificial Sequence
  Description of Artificial Sequence: Synthetic oligonucleotide
ccaacuggucaggagguag

SEQ ID NO: 2569248 - RNA, 19 nt, Artificial Sequence
  Description of Artificial Sequence: Synthetic oligonucleotide
cucagucacaccauugauu

SEQ ID NO: 2569249 - RNA, 19 nt, Artificial Sequence
  Description of Artificial Sequence: Synthetic oligonucleotide
acacgcaaagggaacuaau

SEQ ID NO: 2569250 - RNA, 19 nt, Artificial Sequence
  Description of Artificial Sequence: Synthetic oligonucleotide
cuucacuuaaagcccuccu

SEQ ID NO: 2569251 - RNA, 19 nt, Artificial Sequence
  Description of Artificial Sequence: Synthetic oligonucleotide
cuacccaacugaguccuga

SEQ ID NO: 2569252 - RNA, 19 nt, Artificial Sequence
  Description of Artificial Sequence: Synthetic oligonucleotide
gucaugucauuuugucacu

SEQ ID NO: 2569253 - RNA, 19 nt, Artificial Sequence
  Description of Artificial Sequence: Synthetic oligonucleotide
gcaggacuuuugcacagca

SEQ ID NO: 2569254 - RNA, 19 nt, Artificial Sequence
  Description of Artificial Sequence: Synthetic oligonucleotide
gugugauccgaaugcacau

SEQ ID NO: 2569255 - RNA, 19 nt, Artificial Sequence
  Description of Artificial Sequence: Synthetic oligonucleotide
acuccauagcaggacuuuu

SEQ ID NO: 2569256 - RNA, 19 nt, Artificial Sequence
  Description of Artificial Sequence: Synthetic oligonucleotide
cugccacaccaacugguca

SEQ ID NO: 2569257 - RNA, 19 nt, Artificial Sequence
  Description of Artificial Sequence: Synthetic oligonucleotide
cucacuccauagcaggacu

SEQ ID NO: 2569258 - RNA, 19 nt, Artificial Sequence
  Description of Artificial Sequence: Synthetic oligonucleotide
cacgcaaagggaacuaauu

SEQ ID NO: 2569259 - RNA, 19 nt, Artificial Sequence
  Description of Artificial Sequence: Synthetic oligonucleotide
ggguccagguaccaaaagu

SEQ ID NO: 2569260 - RNA, 19 nt, Artificial Sequence
  Description of Artificial Sequence: Synthetic oligonucleotide
cagcccugcucacagcaca

SEQ ID NO: 2569261 - RNA, 19 nt, Artificial Sequence
  Description of Artificial Sequence: Synthetic oligonucleotide
ccagguaccaaaagucaaa

SEQ ID NO: 2569262 - RNA, 19 nt, Artificial Sequence
  Description of Artificial Sequence: Synthetic oligonucleotide
gaaacacuccauggugggu

SEQ ID NO: 2569263 - RNA, 19 nt, Artificial Sequence
  Description of Artificial Sequence: Synthetic oligonucleotide
caggacuuuugcacagcaa

SEQ ID NO: 2569264 - RNA, 19 nt, Artificial Sequence
  Description of Artificial Sequence: Synthetic oligonucleotide
caccaacuggucaggaggu

SEQ ID NO: 2569265 - RNA, 19 nt, Artificial Sequence
  Description of Artificial Sequence: Synthetic oligonucleotide
cccuccuuugguuggaaga

SEQ ID NO: 2569266 - RNA, 19 nt, Artificial Sequence
  Description of Artificial Sequence: Synthetic oligonucleotide
ggagguaggauaagaccaa

SEQ ID NO: 2569267 - RNA, 19 nt, Artificial Sequence
  Description of Artificial Sequence: Synthetic oligonucleotide
gccacaccaacuggucagg

SEQ ID NO: 2569268 - RNA, 19 nt, Artificial Sequence
  Description of Artificial Sequence: Synthetic oligonucleotide
ccccgagaagaaaugguga

SEQ ID NO: 2569269 - RNA, 19 nt, Artificial Sequence
  Description of Artificial Sequence: Synthetic oligonucleotide
cuacccacuuuuguggggu

SEQ ID NO: 2569270 - RNA, 19 nt, Artificial Sequence
  Description of Artificial Sequence: Synthetic oligonucleotide
ggaaaggcucugugugauc

SEQ ID NO: 2569271 - RNA, 19 nt, Artificial Sequence
  Description of Artificial Sequence: Synthetic oligonucleotide
gcaaacaccccgagaagaa

SEQ ID NO: 2569272 - RNA, 19 nt, Artificial Sequence
  Description of Artificial Sequence: Synthetic oligonucleotide
ccaaaaugaaacccacacu

SEQ ID NO: 2569273 - RNA, 19 nt, Artificial Sequence
  Description of Artificial Sequence: Synthetic oligonucleotide
gcagcaaaugugaaacacu

SEQ ID NO: 2569274 - RNA, 19 nt, Artificial Sequence
  Description of Artificial Sequence: Synthetic oligonucleotide
gucuucacuuaaagcccuc

SEQ ID NO: 2569275 - RNA, 19 nt, Artificial Sequence
  Description of Artificial Sequence: Synthetic oligonucleotide
auguaacuucaaaggucaa

SEQ ID NO: 2569276 - RNA, 19 nt, Artificial Sequence
  Description of Artificial Sequence: Synthetic oligonucleotide
cacacgcaaagggaacuaa

SEQ ID NO: 2569277 - RNA, 19 nt, Artificial Sequence
  Description of Artificial Sequence: Synthetic oligonucleotide
ggucaggagguaggauaag

SEQ ID NO: 2569278 - RNA, 19 nt, Artificial Sequence
  Description of Artificial Sequence: Synthetic oligonucleotide
uugcaagcaggaggacaua

SEQ ID NO: 2569279 - RNA, 19 nt, Artificial Sequence
  Description of Artificial Sequence: Synthetic oligonucleotide
ggccaaaaugaaacccaca

SEQ ID NO: 2569280 - RNA, 19 nt, Artificial Sequence
  Description of Artificial Sequence: Synthetic oligonucleotide
gugagagguucaggccagc

SEQ ID NO: 2569281 - RNA, 19 nt, Artificial Sequence
  Description of Artificial Sequence: Synthetic oligonucleotide
gcccuccuuugguuggaag

SEQ ID NO: 2569282 - RNA, 19 nt, Artificial Sequence
  Description of Artificial Sequence: Synthetic oligonucleotide
ccagcauggugaaauugua

SEQ ID NO: 2569283 - RNA, 19 nt, Artificial Sequence
  Description of Artificial Sequence: Synthetic oligonucleotide
cccacuuuuguggggugac

SEQ ID NO: 2569284 - RNA, 19 nt, Artificial Sequence
  Description of Artificial Sequence: Synthetic oligonucleotide
gguccccacagcaaugugu

SEQ ID NO: 2569285 - RNA, 19 nt, Artificial Sequence
  Description of Artificial Sequence: Synthetic oligonucleotide
cuuugacugguuggucucu

SEQ ID NO: 2569286 - RNA, 19 nt, Artificial Sequence
  Description of Artificial Sequence: Synthetic oligonucleotide
gccaccacugagggcaaac

SEQ ID NO: 2569287 - RNA, 19 nt, Artificial Sequence
  Description of Artificial Sequence: Synthetic oligonucleotide
ccgagaagaaauggugaga

SEQ ID NO: 2569288 - RNA, 19 nt, Artificial Sequence
  Description of Artificial Sequence: Synthetic oligonucleotide
gucccaagggucacuccua

SEQ ID NO: 2569289 - RNA, 19 nt, Artificial Sequence
  Description of Artificial Sequence: Synthetic oligonucleotide
aggcucugugugauccgaa

SEQ ID NO: 2569290 - RNA, 19 nt, Artificial Sequence
  Description of Artificial Sequence: Synthetic oligonucleotide
ggagugucucugaaacacu

SEQ ID NO: 2569291 - RNA, 19 nt, Artificial Sequence
  Description of Artificial Sequence: Synthetic oligonucleotide
gggugacucucacuccaua

SEQ ID NO: 2569292 - RNA, 19 nt, Artificial Sequence
  Description of Artificial Sequence: Synthetic oligonucleotide
ugccaccacugagggcaaa

SEQ ID NO: 2569293 - RNA, 19 nt, Artificial Sequence
  Description of Artificial Sequence: Synthetic oligonucleotide
agcccuccuuugguuggaa

SEQ ID NO: 2569294 - RNA, 19 nt, Artificial Sequence
  Description of Artificial Sequence: Synthetic oligonucleotide
cacuccauagcaggacuuu

SEQ ID NO: 2569295 - RNA, 19 nt, Artificial Sequence
  Description of Artificial Sequence: Synthetic oligonucleotide
ccaccacugagggcaaaca

SEQ ID NO: 2569296 - RNA, 19 nt, Artificial Sequence
  Description of Artificial Sequence: Synthetic oligonucleotide
gccuagcaggccagcccug

SEQ ID NO: 2569297 - RNA, 19 nt, Artificial Sequence
  Description of Artificial Sequence: Synthetic oligonucleotide
caaccuccucuuugcucau

SEQ ID NO: 2569298 - RNA, 19 nt, Artificial Sequence
  Description of Artificial Sequence: Synthetic oligonucleotide
ggccagccagggguuugug

SEQ ID NO: 2569299 - RNA, 19 nt, Artificial Sequence
  Description of Artificial Sequence: Synthetic oligonucleotide
ccacaccaacuggucagga

SEQ ID NO: 2569300 - RNA, 19 nt, Artificial Sequence
  Description of Artificial Sequence: Synthetic oligonucleotide
gggucacuccuaagcagau

SEQ ID NO: 2569301 - RNA, 19 nt, Artificial Sequence
  Description of Artificial Sequence: Synthetic oligonucleotide
uucaauauaacuuacaacc

SEQ ID NO: 2569302 - RNA, 19 nt, Artificial Sequence
  Description of Artificial Sequence: Synthetic oligonucleotide
aauauaguaccuuucauag

SEQ ID NO: 2569303 - RNA, 19 nt, Artificial Sequence
  Description of Artificial Sequence: Synthetic oligonucleotide
gauuaaaucugauagauac

SEQ ID NO: 2569304 - RNA, 19 nt, Artificial Sequence
  Description of Artificial Sequence: Synthetic oligonucleotide
uauaguaccuuucauagca

SEQ ID NO: 2569305 - RNA, 19 nt, Artificial Sequence
  Description of Artificial Sequence: Synthetic oligonucleotide
uacuuuaucuauuaaaggc

SEQ ID NO: 2569306 - RNA, 19 nt, Artificial Sequence
  Description of Artificial Sequence: Synthetic oligonucleotide
uuugcuuaacauaacaagc

SEQ ID NO: 2569307 - RNA, 19 nt, Artificial Sequence
  Description of Artificial Sequence: Synthetic oligonucleotide
gauacuuuaucuauuaaag

SEQ ID NO: 2569308 - RNA, 19 nt, Artificial Sequence
  Description of Artificial Sequence: Synthetic oligonucleotide
accugauuaaaucugauag

SEQ ID NO: 2569309 - RNA, 19 nt, Artificial Sequence
  Description of Artificial Sequence: Synthetic oligonucleotide
uuuugcuuaacauaacaag

SEQ ID NO: 2569310 - RNA, 19 nt, Artificial Sequence
  Description of Artificial Sequence: Synthetic oligonucleotide
auauggauggcuuugagug

SEQ ID NO: 2569311 - RNA, 19 nt, Artificial Sequence
  Description of Artificial Sequence: Synthetic oligonucleotide
auaacuuacaaccugauua

SEQ ID NO: 2569312 - RNA, 19 nt, Artificial Sequence
  Description of Artificial Sequence: Synthetic oligonucleotide
gaugaugugaaauuugcug

SEQ ID NO: 2569313 - RNA, 19 nt, Artificial Sequence
  Description of Artificial Sequence: Synthetic oligonucleotide
ugaaauuugcuguugaaga

SEQ ID NO: 2569314 - RNA, 19 nt, Artificial Sequence
  Description of Artificial Sequence: Synthetic oligonucleotide
aaaaucaugccgaagauca

SEQ ID NO: 2569315 - RNA, 19 nt, Artificial Sequence
  Description of Artificial Sequence: Synthetic oligonucleotide
uucaacgccauauggaugg

SEQ ID NO: 2569316 - RNA, 19 nt, Artificial Sequence
  Description of Artificial Sequence: Synthetic oligonucleotide
ucugauagauacuuuaucu

SEQ ID NO: 2569317 - RNA, 19 nt, Artificial Sequence
  Description of Artificial Sequence: Synthetic oligonucleotide
uuuuguaucaaauugucuu

SEQ ID NO: 2569318 - RNA, 19 nt, Artificial Sequence
  Description of Artificial Sequence: Synthetic oligonucleotide
uuauuuuguaucaaauugu

SEQ ID NO: 2569319 - RNA, 19 nt, Artificial Sequence
  Description of Artificial Sequence: Synthetic oligonucleotide
uagagucuggcaaauauag

SEQ ID NO: 2569320 - RNA, 19 nt, Artificial Sequence
  Description of Artificial Sequence: Synthetic oligonucleotide
caggacuuaacuuggaugg

SEQ ID NO: 2569321 - RNA, 19 nt, Artificial Sequence
  Description of Artificial Sequence: Synthetic oligonucleotide
aaauauaguaccuuucaua

SEQ ID NO: 2569322 - RNA, 19 nt, Artificial Sequence
  Description of Artificial Sequence: Synthetic oligonucleotide
aauaucuucugucuagagu

SEQ ID NO: 2569323 - RNA, 19 nt, Artificial Sequence
  Description of Artificial Sequence: Synthetic oligonucleotide
ucuucaauauaacuuacaa

SEQ ID NO: 2569324 - RNA, 19 nt, Artificial Sequence
  Description of Artificial Sequence: Synthetic oligonucleotide
uguacaauaucuucugucu

SEQ ID NO: 2569325 - RNA, 19 nt, Artificial Sequence
  Description of Artificial Sequence: Synthetic oligonucleotide
aaggaaaccgacaagcauc

SEQ ID NO: 2569326 - RNA, 19 nt, Artificial Sequence
  Description of Artificial Sequence: Synthetic oligonucleotide
gcaaauaucaccaagagga

SEQ ID NO: 2569327 - RNA, 19 nt, Artificial Sequence
  Description of Artificial Sequence: Synthetic oligonucleotide
aaaucugauagauacuuua

SEQ ID NO: 2569328 - RNA, 19 nt, Artificial Sequence
  Description of Artificial Sequence: Synthetic oligonucleotide
agauaaacugcuccacacc

SEQ ID NO: 2569329 - RNA, 19 nt, Artificial Sequence
  Description of Artificial Sequence: Synthetic oligonucleotide
cuuacaaccugauuaaauc

SEQ ID NO: 2569330 - RNA, 19 nt, Artificial Sequence
  Description of Artificial Sequence: Synthetic oligonucleotide
uuauguacaauaucuucug

SEQ ID NO: 2569331 - RNA, 19 nt, Artificial Sequence
  Description of Artificial Sequence: Synthetic oligonucleotide
uugcuuaacauaacaagca

SEQ ID NO: 2569332 - RNA, 19 nt, Artificial Sequence
  Description of Artificial Sequence: Synthetic oligonucleotide
uuugcuguugaagacauca

SEQ ID NO: 2569333 - RNA, 19 nt, Artificial Sequence
  Description of Artificial Sequence: Synthetic oligonucleotide
aauauaacuuacaaccuga

SEQ ID NO: 2569334 - RNA, 19 nt, Artificial Sequence
  Description of Artificial Sequence: Synthetic oligonucleotide
ucaauauaacuuacaaccu

SEQ ID NO: 2569335 - RNA, 19 nt, Artificial Sequence
  Description of Artificial Sequence: Synthetic oligonucleotide
auauaguaccuuucauagc

SEQ ID NO: 2569336 - RNA, 19 nt, Artificial Sequence
  Description of Artificial Sequence: Synthetic oligonucleotide
uacaaccugauuaaaucug

SEQ ID NO: 2569337 - RNA, 19 nt, Artificial Sequence
  Description of Artificial Sequence: Synthetic oligonucleotide
augaugugaaauuugcugu

SEQ ID NO: 2569338 - RNA, 19 nt, Artificial Sequence
  Description of Artificial Sequence: Synthetic oligonucleotide
uuaaucuuuuauuuuguau

SEQ ID NO: 2569339 - RNA, 19 nt, Artificial Sequence
  Description of Artificial Sequence: Synthetic oligonucleotide
ugauagauacuuuaucuau

SEQ ID NO: 2569340 - RNA, 19 nt, Artificial Sequence
  Description of Artificial Sequence: Synthetic oligonucleotide
uuacaaccugauuaaaucu

SEQ ID NO: 2569341 - RNA, 19 nt, Artificial Sequence
  Description of Artificial Sequence: Synthetic oligonucleotide
aucugauagauacuuuauc

SEQ ID NO: 2569342 - RNA, 19 nt, Artificial Sequence
  Description of Artificial Sequence: Synthetic oligonucleotide
acuuaacuuggauggauuc

SEQ ID NO: 2569343 - RNA, 19 nt, Artificial Sequence
  Description of Artificial Sequence: Synthetic oligonucleotide
uaaacugcuccacaccacc

SEQ ID NO: 2569344 - RNA, 19 nt, Artificial Sequence
  Description of Artificial Sequence: Synthetic oligonucleotide
uuaaaucugauagauacuu

SEQ ID NO: 2569345 - RNA, 19 nt, Artificial Sequence
  Description of Artificial Sequence: Synthetic oligonucleotide
ucugucuagagucuggcaa

SEQ ID NO: 2569346 - RNA, 19 nt, Artificial Sequence
  Description of Artificial Sequence: Synthetic oligonucleotide
agauacuuuaucuauuaaa

SEQ ID NO: 2569347 - RNA, 19 nt, Artificial Sequence
  Description of Artificial Sequence: Synthetic oligonucleotide
cuuaacauaacaagcaaaa

SEQ ID NO: 2569348 - RNA, 19 nt, Artificial Sequence
  Description of Artificial Sequence: Synthetic oligonucleotide
aaucaugccgaagaucauc

SEQ ID NO: 2569349 - RNA, 19 nt, Artificial Sequence
  Description of Artificial Sequence: Synthetic oligonucleotide
gauaaacugcuccacacca

SEQ ID NO: 2569350 - RNA, 19 nt, Artificial Sequence
  Description of Artificial Sequence: Synthetic oligonucleotide
gaaauuugcuguugaagac

SEQ ID NO: 2569351 - RNA, 19 nt, Artificial Sequence
  Description of Artificial Sequence: Synthetic oligonucleotide
ucuagagucuggcaaauau

SEQ ID NO: 2569352 - RNA, 19 nt, Artificial Sequence
  Description of Artificial Sequence: Synthetic oligonucleotide
cuucaauauaacuuacaac

SEQ ID NO: 2569353 - RNA, 19 nt, Artificial Sequence
  Description of Artificial Sequence: Synthetic oligonucleotide
aucauugauggcuuccggg

SEQ ID NO: 2569354 - RNA, 19 nt, Artificial Sequence
  Description of Artificial Sequence: Synthetic oligonucleotide
ucauugauggcuuccgggc

SEQ ID NO: 2569355 - RNA, 19 nt, Artificial Sequence
  Description of Artificial Sequence: Synthetic oligonucleotide
uggacuuccuuaaucaccu

SEQ ID NO: 2569356 - RNA, 19 nt, Artificial Sequence
  Description of Artificial Sequence: Synthetic oligonucleotide
uuuguaucaaauugucuuc

SEQ ID NO: 2569357 - RNA, 19 nt, Artificial Sequence
  Description of Artificial Sequence: Synthetic oligonucleotide
uggcaaauaucaccaagag

SEQ ID NO: 2569358 - RNA, 19 nt, Artificial Sequence
  Description of Artificial Sequence: Synthetic oligonucleotide
accacggcgaugccgaugc

SEQ ID NO: 2569359 - RNA, 19 nt, Artificial Sequence
  Description of Artificial Sequence: Synthetic oligonucleotide
aaauuugcuguugaagaca

SEQ ID NO: 2569360 - RNA, 19 nt, Artificial Sequence
  Description of Artificial Sequence: Synthetic oligonucleotide
caauauaacuuacaaccug

SEQ ID NO: 2569361 - RNA, 19 nt, Artificial Sequence
  Description of Artificial Sequence: Synthetic oligonucleotide
uuugaguguuucccguugg

SEQ ID NO: 2569362 - RNA, 19 nt, Artificial Sequence
  Description of Artificial Sequence: Synthetic oligonucleotide
gaagaucaucaccacggcg

SEQ ID NO: 2569363 - RNA, 19 nt, Artificial Sequence
  Description of Artificial Sequence: Synthetic oligonucleotide
aauuccuggacuuccuuaa

SEQ ID NO: 2569364 - RNA, 19 nt, Artificial Sequence
  Description of Artificial Sequence: Synthetic oligonucleotide
uauuuuaaucuuuuauuuu

SEQ ID NO: 2569365 - RNA, 19 nt, Artificial Sequence
  Description of Artificial Sequence: Synthetic oligonucleotide
aagaggaacccgaagaaca

SEQ ID NO: 2569366 - RNA, 19 nt, Artificial Sequence
  Description of Artificial Sequence: Synthetic oligonucleotide
gagauaaacugcuccacac

SEQ ID NO: 2569367 - RNA, 19 nt, Artificial Sequence
  Description of Artificial Sequence: Synthetic oligonucleotide
guugaagacaucauugaug

SEQ ID NO: 2569368 - RNA, 19 nt, Artificial Sequence
  Description of Artificial Sequence: Synthetic oligonucleotide
auucucuuuauguacaaua

SEQ ID NO: 2569369 - RNA, 19 nt, Artificial Sequence
  Description of Artificial Sequence: Synthetic oligonucleotide
uuggauggauucaagaauu

SEQ ID NO: 2569370 - RNA, 19 nt, Artificial Sequence
  Description of Artificial Sequence: Synthetic oligonucleotide
cauccuuguggguauagcc

SEQ ID NO: 2569371 - RNA, 19 nt, Artificial Sequence
  Description of Artificial Sequence: Synthetic oligonucleotide
ucuucugucuagagucugg

SEQ ID NO: 2569372 - RNA, 19 nt, Artificial Sequence
  Description of Artificial Sequence: Synthetic oligonucleotide
uuggucuucagcuuuuggu

SEQ ID NO: 2569373 - RNA, 19 nt, Artificial Sequence
  Description of Artificial Sequence: Synthetic oligonucleotide
uaguaccuuucauagcagg

SEQ ID NO: 2569374 - RNA, 19 nt, Artificial Sequence
  Description of Artificial Sequence: Synthetic oligonucleotide
cuuuugguagguauccuug

SEQ ID NO: 2569375 - RNA, 19 nt, Artificial Sequence
  Description of Artificial Sequence: Synthetic oligonucleotide
gaagaacaaucccagcaug

SEQ ID NO: 2569376 - RNA, 19 nt, Artificial Sequence
  Description of Artificial Sequence: Synthetic oligonucleotide
aguucaacgccauauggau

SEQ ID NO: 2569377 - RNA, 19 nt, Artificial Sequence
  Description of Artificial Sequence: Synthetic oligonucleotide
auagauacuuuaucuauua

SEQ ID NO: 2569378 - RNA, 19 nt, Artificial Sequence
  Description of Artificial Sequence: Synthetic oligonucleotide
agucuggcaaauauaguac

SEQ ID NO: 2569379 - RNA, 19 nt, Artificial Sequence
  Description of Artificial Sequence: Synthetic oligonucleotide
ucuggcaaauauaguaccu

SEQ ID NO: 2569380 - RNA, 19 nt, Artificial Sequence
  Description of Artificial Sequence: Synthetic oligonucleotide
acuuggauggauucaagaa

SEQ ID NO: 2569381 - RNA, 19 nt, Artificial Sequence
  Description of Artificial Sequence: Synthetic oligonucleotide
ucaaauugucuucaauaua

SEQ ID NO: 2569382 - RNA, 19 nt, Artificial Sequence
  Description of Artificial Sequence: Synthetic oligonucleotide
gagucuggcaaauauagua

SEQ ID NO: 2569383 - RNA, 19 nt, Artificial Sequence
  Description of Artificial Sequence: Synthetic oligonucleotide
ugcuuaacauaacaagcaa

SEQ ID NO: 2569384 - RNA, 19 nt, Artificial Sequence
  Description of Artificial Sequence: Synthetic oligonucleotide
uccgaugaugugaaauuug

SEQ ID NO: 2569385 - RNA, 19 nt, Artificial Sequence
  Description of Artificial Sequence: Synthetic oligonucleotide
uguugaagacaucauugau

SEQ ID NO: 2569386 - RNA, 19 nt, Artificial Sequence
  Description of Artificial Sequence: Synthetic oligonucleotide
ucucuuuauguacaauauc

SEQ ID NO: 2569387 - RNA, 19 nt, Artificial Sequence
  Description of Artificial Sequence: Synthetic oligonucleotide
uaucucaauggcaaauauc

SEQ ID NO: 2569388 - RNA, 19 nt, Artificial Sequence
  Description of Artificial Sequence: Synthetic oligonucleotide
guggguauagccccagacg

SEQ ID NO: 2569389 - RNA, 19 nt, Artificial Sequence
  Description of Artificial Sequence: Synthetic oligonucleotide
aaauucucuuuauguacaa

SEQ ID NO: 2569390 - RNA, 19 nt, Artificial Sequence
  Description of Artificial Sequence: Synthetic oligonucleotide
agguguccgagauaaacug

SEQ ID NO: 2569391 - RNA, 19 nt, Artificial Sequence
  Description of Artificial Sequence: Synthetic oligonucleotide
gugaaauuugcuguugaag

SEQ ID NO: 2569392 - RNA, 19 nt, Artificial Sequence
  Description of Artificial Sequence: Synthetic oligonucleotide
uuuaaucuuuuauuuugua

SEQ ID NO: 2569393 - RNA, 19 nt, Artificial Sequence
  Description of Artificial Sequence: Synthetic oligonucleotide
uucccguuggggcucaucc

SEQ ID NO: 2569394 - RNA, 19 nt, Artificial Sequence
  Description of Artificial Sequence: Synthetic oligonucleotide
caugccgaagaucaucacc

SEQ ID NO: 2569395 - RNA, 19 nt, Artificial Sequence
  Description of Artificial Sequence: Synthetic oligonucleotide
auaucaccaagaggaaccc

SEQ ID NO: 2569396 - RNA, 19 nt, Artificial Sequence
  Description of Artificial Sequence: Synthetic oligonucleotide
uccgagauaaacugcucca

SEQ ID NO: 2569397 - RNA, 19 nt, Artificial Sequence
  Description of Artificial Sequence: Synthetic oligonucleotide
uugaguguuucccguuggg

SEQ ID NO: 2569398 - RNA, 19 nt, Artificial Sequence
  Description of Artificial Sequence: Synthetic oligonucleotide
ugaguguuucccguugggg

SEQ ID NO: 2569399 - RNA, 19 nt, Artificial Sequence
  Description of Artificial Sequence: Synthetic oligonucleotide
ccgaagaucaucaccacgg

SEQ ID NO: 2569400 - RNA, 19 nt, Artificial Sequence
  Description of Artificial Sequence: Synthetic oligonucleotide
uuguaaaauuccuggacuu

SEQ ID NO: 2569401 - RNA, 19 nt, Artificial Sequence
  Description of Artificial Sequence: Synthetic oligonucleotide
ugcagcuaucucaauggca

SEQ ID NO: 2569402 - RNA, 19 nt, Artificial Sequence
  Description of Artificial Sequence: Synthetic oligonucleotide
ggcaaauaucaccaagagg

SEQ ID NO: 2569403 - RNA, 19 nt, Artificial Sequence
  Description of Artificial Sequence: Synthetic oligonucleotide
uauaacuuacaaccugauu

SEQ ID NO: 2569404 - RNA, 19 nt, Artificial Sequence
  Description of Artificial Sequence: Synthetic oligonucleotide
uucagcuuuugguagguau

SEQ ID NO: 2569405 - RNA, 19 nt, Artificial Sequence
  Description of Artificial Sequence: Synthetic oligonucleotide
aaccugauuaaaucugaua

SEQ ID NO: 2569406 - RNA, 19 nt, Artificial Sequence
  Description of Artificial Sequence: Synthetic oligonucleotide
uuguaucaaauugucuuca

SEQ ID NO: 2569407 - RNA, 19 nt, Artificial Sequence
  Description of Artificial Sequence: Synthetic oligonucleotide
uccuuguaaaauuccugga

SEQ ID NO: 2569408 - RNA, 19 nt, Artificial Sequence
  Description of Artificial Sequence: Synthetic oligonucleotide
ugauuaaaucugauagaua

SEQ ID NO: 2569409 - RNA, 19 nt, Artificial Sequence
  Description of Artificial Sequence: Synthetic oligonucleotide
cuuuaucuauuaaaggcaa

SEQ ID NO: 2569410 - RNA, 19 nt, Artificial Sequence
  Description of Artificial Sequence: Synthetic oligonucleotide
uuuugguagguauccuugu

SEQ ID NO: 2569411 - RNA, 19 nt, Artificial Sequence
  Description of Artificial Sequence: Synthetic oligonucleotide
uauagccccagacggcugc

SEQ ID NO: 2569412 - RNA, 19 nt, Artificial Sequence
  Description of Artificial Sequence: Synthetic oligonucleotide
uggcuuugaguguuucccg

SEQ ID NO: 2569413 - RNA, 19 nt, Artificial Sequence
  Description of Artificial Sequence: Synthetic oligonucleotide
ugugaaauuugcuguugaa

SEQ ID NO: 2569414 - RNA, 19 nt, Artificial Sequence
  Description of Artificial Sequence: Synthetic oligonucleotide
aaucugauagauacuuuau

SEQ ID NO: 2569415 - RNA, 19 nt, Artificial Sequence
  Description of Artificial Sequence: Synthetic oligonucleotide
aguguuucccguuggggcu

SEQ ID NO: 2569416 - RNA, 19 nt, Artificial Sequence
  Description of Artificial Sequence: Synthetic oligonucleotide
uagguauccuuguaaaauu

SEQ ID NO: 2569417 - RNA, 19 nt, Artificial Sequence
  Description of Artificial Sequence: Synthetic oligonucleotide
ucucaauggcaaauaucac

SEQ ID NO: 2569418 - RNA, 19 nt, Artificial Sequence
  Description of Artificial Sequence: Synthetic oligonucleotide
gaugugaaauuugcuguug

SEQ ID NO: 2569419 - RNA, 19 nt, Artificial Sequence
  Description of Artificial Sequence: Synthetic oligonucleotide
ugguagguauccuuguaaa

SEQ ID NO: 2569420 - RNA, 19 nt, Artificial Sequence
  Description of Artificial Sequence: Synthetic oligonucleotide
uguaaaauuccuggacuuc

SEQ ID NO: 2569421 - RNA, 19 nt, Artificial Sequence
  Description of Artificial Sequence: Synthetic oligonucleotide
uagauacuuuaucuauuaa

SEQ ID NO: 2569422 - RNA, 19 nt, Artificial Sequence
  Description of Artificial Sequence: Synthetic oligonucleotide
gacuuccuuaaucaccuca

SEQ ID NO: 2569423 - RNA, 19 nt, Artificial Sequence
  Description of Artificial Sequence: Synthetic oligonucleotide
gcaguucaacgccauaugg

SEQ ID NO: 2569424 - RNA, 19 nt, Artificial Sequence
  Description of Artificial Sequence: Synthetic oligonucleotide
uguaucaaauugucuucaa

SEQ ID NO: 2569425 - RNA, 19 nt, Artificial Sequence
  Description of Artificial Sequence: Synthetic oligonucleotide
aggaacccgaagaacaauc

SEQ ID NO: 2569426 - RNA, 19 nt, Artificial Sequence
  Description of Artificial Sequence: Synthetic oligonucleotide
gacaucauugauggcuucc

SEQ ID NO: 2569427 - RNA, 19 nt, Artificial Sequence
  Description of Artificial Sequence: Synthetic oligonucleotide
gcaaauauaguaccuuuca

SEQ ID NO: 2569428 - RNA, 19 nt, Artificial Sequence
  Description of Artificial Sequence: Synthetic oligonucleotide
agcaguucaacgccauaug

SEQ ID NO: 2569429 - RNA, 19 nt, Artificial Sequence
  Description of Artificial Sequence: Synthetic oligonucleotide
gcuguugaagacaucauug

SEQ ID NO: 2569430 - RNA, 19 nt, Artificial Sequence
  Description of Artificial Sequence: Synthetic oligonucleotide
agguauccuuguaaaauuc

SEQ ID NO: 2569431 - RNA, 19 nt, Artificial Sequence
  Description of Artificial Sequence: Synthetic oligonucleotide
caugcacugggacucuugc

SEQ ID NO: 2569432 - RNA, 19 nt, Artificial Sequence
  Description of Artificial Sequence: Synthetic oligonucleotide
cuuugaguguuucccguug

SEQ ID NO: 2569433 - RNA, 19 nt, Artificial Sequence
  Description of Artificial Sequence: Synthetic oligonucleotide
ugaugugaaauuugcuguu

SEQ ID NO: 2569434 - RNA, 19 nt, Artificial Sequence
  Description of Artificial Sequence: Synthetic oligonucleotide
uuugguagguauccuugua

SEQ ID NO: 2569435 - RNA, 19 nt, Artificial Sequence
  Description of Artificial Sequence: Synthetic oligonucleotide
auuaaaucugauagauacu

SEQ ID NO: 2569436 - RNA, 19 nt, Artificial Sequence
  Description of Artificial Sequence: Synthetic oligonucleotide
auaaacugcuccacaccac

SEQ ID NO: 2569437 - RNA, 19 nt, Artificial Sequence
  Description of Artificial Sequence: Synthetic oligonucleotide
agcacgcccaaggaaaccg

SEQ ID NO: 2569438 - RNA, 19 nt, Artificial Sequence
  Description of Artificial Sequence: Synthetic oligonucleotide
cuuguaaaauuccuggacu

SEQ ID NO: 2569439 - RNA, 19 nt, Artificial Sequence
  Description of Artificial Sequence: Synthetic oligonucleotide
auuuuguaucaaauugucu

SEQ ID NO: 2569440 - RNA, 19 nt, Artificial Sequence
  Description of Artificial Sequence: Synthetic oligonucleotide
uccacagcacgcccaagga

SEQ ID NO: 2569441 - RNA, 19 nt, Artificial Sequence
  Description of Artificial Sequence: Synthetic oligonucleotide
auuaggccacagcaguuca

SEQ ID NO: 2569442 - RNA, 19 nt, Artificial Sequence
  Description of Artificial Sequence: Synthetic oligonucleotide
uuccuggacuuccuuaauc

SEQ ID NO: 2569443 - RNA, 19 nt, Artificial Sequence
  Description of Artificial Sequence: Synthetic oligonucleotide
uuccgggcaggacuuaacu

SEQ ID NO: 2569444 - RNA, 19 nt, Artificial Sequence
  Description of Artificial Sequence: Synthetic oligonucleotide
uaccuuucauagcaggauu

SEQ ID NO: 2569445 - RNA, 19 nt, Artificial Sequence
  Description of Artificial Sequence: Synthetic oligonucleotide
ggucuucagcuuuugguag

SEQ ID NO: 2569446 - RNA, 19 nt, Artificial Sequence
  Description of Artificial Sequence: Synthetic oligonucleotide
cacccauuaggccacagca

SEQ ID NO: 2569447 - RNA, 19 nt, Artificial Sequence
  Description of Artificial Sequence: Synthetic oligonucleotide
agaacaaucccagcaugca

SEQ ID NO: 2569448 - RNA, 19 nt, Artificial Sequence
  Description of Artificial Sequence: Synthetic oligonucleotide
gcaggacuuaacuuggaug

SEQ ID NO: 2569449 - RNA, 19 nt, Artificial Sequence
  Description of Artificial Sequence: Synthetic oligonucleotide
gauucaagaauuugcuuuu

SEQ ID NO: 2569450 - RNA, 19 nt, Artificial Sequence
  Description of Artificial Sequence: Synthetic oligonucleotide
gggacucuugcacagcucc

SEQ ID NO: 2569451 - RNA, 19 nt, Artificial Sequence
  Description of Artificial Sequence: Synthetic oligonucleotide
cugauagauacuuuaucua

SEQ ID NO: 2569452 - RNA, 19 nt, Artificial Sequence
  Description of Artificial Sequence: Synthetic oligonucleotide
uaucaccaagaggaacccg

SEQ ID NO: 2569453 - RNA, 19 nt, Artificial Sequence
  Description of Artificial Sequence: Synthetic oligonucleotide
ccgaugaugugaaauuugc

SEQ ID NO: 2569454 - RNA, 19 nt, Artificial Sequence
  Description of Artificial Sequence: Synthetic oligonucleotide
aucaccaagaggaacccga

SEQ ID NO: 2569455 - RNA, 19 nt, Artificial Sequence
  Description of Artificial Sequence: Synthetic oligonucleotide
acaauaucuucugucuaga

SEQ ID NO: 2569456 - RNA, 19 nt, Artificial Sequence
  Description of Artificial Sequence: Synthetic oligonucleotide
ccuuguaaaauuccuggac

SEQ ID NO: 2569457 - RNA, 19 nt, Artificial Sequence
  Description of Artificial Sequence: Synthetic oligonucleotide
aguaccuuucauagcagga

SEQ ID NO: 2569458 - RNA, 19 nt, Artificial Sequence
  Description of Artificial Sequence: Synthetic oligonucleotide
aucaugccgaagaucauca

SEQ ID NO: 2569459 - RNA, 19 nt, Artificial Sequence
  Description of Artificial Sequence: Synthetic oligonucleotide
acaaccugauuaaaucuga

SEQ ID NO: 2569460 - RNA, 19 nt, Artificial Sequence
  Description of Artificial Sequence: Synthetic oligonucleotide
aggccacagcaguucaacg

SEQ ID NO: 2569461 - RNA, 19 nt, Artificial Sequence
  Description of Artificial Sequence: Synthetic oligonucleotide
caguucaacgccauaugga

SEQ ID NO: 2569462 - RNA, 19 nt, Artificial Sequence
  Description of Artificial Sequence: Synthetic oligonucleotide
uucugucuagagucuggca

SEQ ID NO: 2569463 - RNA, 19 nt, Artificial Sequence
  Description of Artificial Sequence: Synthetic oligonucleotide
cuucugucuagagucuggc

SEQ ID NO: 2569464 - RNA, 19 nt, Artificial Sequence
  Description of Artificial Sequence: Synthetic oligonucleotide
gguauccuuguaaaauucc

SEQ ID NO: 2569465 - RNA, 19 nt, Artificial Sequence
  Description of Artificial Sequence: Synthetic oligonucleotide
cuugcacagcuccacagca

SEQ ID NO: 2569466 - RNA, 19 nt, Artificial Sequence
  Description of Artificial Sequence: Synthetic oligonucleotide
ugcuccgaugaugugaaau

SEQ ID NO: 2569467 - RNA, 19 nt, Artificial Sequence
  Description of Artificial Sequence: Synthetic oligonucleotide
ucauccuuguggguauagc

SEQ ID NO: 2569468 - RNA, 19 nt, Artificial Sequence
  Description of Artificial Sequence: Synthetic oligonucleotide
caagaggaacccgaagaac

SEQ ID NO: 2569469 - RNA, 19 nt, Artificial Sequence
  Description of Artificial Sequence: Synthetic oligonucleotide
ucaccaagaggaacccgaa

SEQ ID NO: 2569470 - RNA, 19 nt, Artificial Sequence
  Description of Artificial Sequence: Synthetic oligonucleotide
cacagcacgcccaaggaaa

SEQ ID NO: 2569471 - RNA, 19 nt, Artificial Sequence
  Description of Artificial Sequence: Synthetic oligonucleotide
ggauucaagaauuugcuuu

SEQ ID NO: 2569472 - RNA, 19 nt, Artificial Sequence
  Description of Artificial Sequence: Synthetic oligonucleotide
aacgccauauggauggcuu

SEQ ID NO: 2569473 - RNA, 19 nt, Artificial Sequence
  Description of Artificial Sequence: Synthetic oligonucleotide
cugauuaaaucugauagau

SEQ ID NO: 2569474 - RNA, 19 nt, Artificial Sequence
  Description of Artificial Sequence: Synthetic oligonucleotide
aggaaaccgacaagcauca

SEQ ID NO: 2569475 - RNA, 19 nt, Artificial Sequence
  Description of Artificial Sequence: Synthetic oligonucleotide
cacugggacucuugcacag

SEQ ID NO: 2569476 - RNA, 19 nt, Artificial Sequence
  Description of Artificial Sequence: Synthetic oligonucleotide
uggauggauucaagaauuu

SEQ ID NO: 2569477 - RNA, 19 nt, Artificial Sequence
  Description of Artificial Sequence: Synthetic oligonucleotide
auaguaccuuucauagcag

SEQ ID NO: 2569478 - RNA, 19 nt, Artificial Sequence
  Description of Artificial Sequence: Synthetic oligonucleotide
cauuaggccacagcaguuc

SEQ ID NO: 2569479 - RNA, 19 nt, Artificial Sequence
  Description of Artificial Sequence: Synthetic oligonucleotide
uuuuggggcagguguccga

SEQ ID NO: 2569480 - RNA, 19 nt, Artificial Sequence
  Description of Artificial Sequence: Synthetic oligonucleotide
uguccgagauaaacugcuc

SEQ ID NO: 2569481 - RNA, 19 nt, Artificial Sequence
  Description of Artificial Sequence: Synthetic oligonucleotide
guagguauccuuguaaaau

SEQ ID NO: 2569482 - RNA, 19 nt, Artificial Sequence
  Description of Artificial Sequence: Synthetic oligonucleotide
agaucaucaccacggcgau

SEQ ID NO: 2569483 - RNA, 19 nt, Artificial Sequence
  Description of Artificial Sequence: Synthetic oligonucleotide
cugcagcuaucucaauggc

SEQ ID NO: 2569484 - RNA, 19 nt, Artificial Sequence
  Description of Artificial Sequence: Synthetic oligonucleotide
cuuccuuaaucaccucauc

SEQ ID NO: 2569485 - RNA, 19 nt, Artificial Sequence
  Description of Artificial Sequence: Synthetic oligonucleotide
ggcugcagcuaucucaaug

SEQ ID NO: 2569486 - RNA, 19 nt, Artificial Sequence
  Description of Artificial Sequence: Synthetic oligonucleotide
cuagagucuggcaaauaua

SEQ ID NO: 2569487 - RNA, 19 nt, Artificial Sequence
  Description of Artificial Sequence: Synthetic oligonucleotide
guucaacgccauauggaug

SEQ ID NO: 2569488 - RNA, 19 nt, Artificial Sequence
  Description of Artificial Sequence: Synthetic oligonucleotide
acagcacgcccaaggaaac

SEQ ID NO: 2569489 - RNA, 19 nt, Artificial Sequence
  Description of Artificial Sequence: Synthetic oligonucleotide
guacaauaucuucugucua

SEQ ID NO: 2569490 - RNA, 19 nt, Artificial Sequence
  Description of Artificial Sequence: Synthetic oligonucleotide
gacucuugcacagcuccac

SEQ ID NO: 2569491 - RNA, 19 nt, Artificial Sequence
  Description of Artificial Sequence: Synthetic oligonucleotide
gccgaagaucaucaccacg

SEQ ID NO: 2569492 - RNA, 19 nt, Artificial Sequence
  Description of Artificial Sequence: Synthetic oligonucleotide
caucaccacggcgaugccg

SEQ ID NO: 2569493 - RNA, 19 nt, Artificial Sequence
  Description of Artificial Sequence: Synthetic oligonucleotide
uuaggccacagcaguucaa

SEQ ID NO: 2569494 - RNA, 19 nt, Artificial Sequence
  Description of Artificial Sequence: Synthetic oligonucleotide
auauaacuuacaaccugau

SEQ ID NO: 2569495 - RNA, 19 nt, Artificial Sequence
  Description of Artificial Sequence: Synthetic oligonucleotide
ggauggauucaagaauuug

SEQ ID NO: 2569496 - RNA, 19 nt, Artificial Sequence
  Description of Artificial Sequence: Synthetic oligonucleotide
acaccacccauuaggccac

SEQ ID NO: 2569497 - RNA, 19 nt, Artificial Sequence
  Description of Artificial Sequence: Synthetic oligonucleotide
gucuucaauauaacuuaca

SEQ ID NO: 2569498 - RNA, 19 nt, Artificial Sequence
  Description of Artificial Sequence: Synthetic oligonucleotide
cauauggauggcuuugagu

SEQ ID NO: 2569499 - RNA, 19 nt, Artificial Sequence
  Description of Artificial Sequence: Synthetic oligonucleotide
gauagauacuuuaucuauu

SEQ ID NO: 2569500 - RNA, 19 nt, Artificial Sequence
  Description of Artificial Sequence: Synthetic oligonucleotide
ggaacccgaagaacaaucc

SEQ ID NO: 2569501 - RNA, 19 nt, Artificial Sequence
  Description of Artificial Sequence: Synthetic oligonucleotide
ucaugccgaagaucaucac

SEQ ID NO: 2569502 - RNA, 19 nt, Artificial Sequence
  Description of Artificial Sequence: Synthetic oligonucleotide
caccaagaggaacccgaag

SEQ ID NO: 2569503 - RNA, 19 nt, Artificial Sequence
  Description of Artificial Sequence: Synthetic oligonucleotide
ccgggcaggacuuaacuug

SEQ ID NO: 2569504 - RNA, 19 nt, Artificial Sequence
  Description of Artificial Sequence: Synthetic oligonucleotide
cauugauggcuuccgggca

SEQ ID NO: 2569505 - RNA, 19 nt, Artificial Sequence
  Description of Artificial Sequence: Synthetic oligonucleotide
acugcuccacaccacccau

SEQ ID NO: 2569506 - RNA, 19 nt, Artificial Sequence
  Description of Artificial Sequence: Synthetic oligonucleotide
cugucuagagucuggcaaa

SEQ ID NO: 2569507 - RNA, 19 nt, Artificial Sequence
  Description of Artificial Sequence: Synthetic oligonucleotide
guauccuuguaaaauuccu

SEQ ID NO: 2569508 - RNA, 19 nt, Artificial Sequence
  Description of Artificial Sequence: Synthetic oligonucleotide
guaucaaauugucuucaau

SEQ ID NO: 2569509 - RNA, 19 nt, Artificial Sequence
  Description of Artificial Sequence: Synthetic oligonucleotide
accucauccuuguggguau

SEQ ID NO: 2569510 - RNA, 19 nt, Artificial Sequence
  Description of Artificial Sequence: Synthetic oligonucleotide
ugucuagagucuggcaaau

SEQ ID NO: 2569511 - RNA, 19 nt, Artificial Sequence
  Description of Artificial Sequence: Synthetic oligonucleotide
ccgaagaacaaucccagca

SEQ ID NO: 2569512 - RNA, 19 nt, Artificial Sequence
  Description of Artificial Sequence: Synthetic oligonucleotide
aaaucaugccgaagaucau

SEQ ID NO: 2569513 - RNA, 19 nt, Artificial Sequence
  Description of Artificial Sequence: Synthetic oligonucleotide
acugcuccgaugaugugaa

SEQ ID NO: 2569514 - RNA, 19 nt, Artificial Sequence
  Description of Artificial Sequence: Synthetic oligonucleotide
ggcaaauauaguaccuuuc

SEQ ID NO: 2569515 - RNA, 19 nt, Artificial Sequence
  Description of Artificial Sequence: Synthetic oligonucleotide
auggauggcuuugaguguu

SEQ ID NO: 2569516 - RNA, 19 nt, Artificial Sequence
  Description of Artificial Sequence: Synthetic oligonucleotide
gcagguguccgagauaaac

SEQ ID NO: 2569517 - RNA, 19 nt, Artificial Sequence
  Description of Artificial Sequence: Synthetic oligonucleotide
uccgggcaggacuuaacuu

SEQ ID NO: 2569518 - RNA, 19 nt, Artificial Sequence
  Description of Artificial Sequence: Synthetic oligonucleotide
caaauauaguaccuuucau

SEQ ID NO: 2569519 - RNA, 19 nt, Artificial Sequence
  Description of Artificial Sequence: Synthetic oligonucleotide
auuccuggacuuccuuaau

SEQ ID NO: 2569520 - RNA, 19 nt, Artificial Sequence
  Description of Artificial Sequence: Synthetic oligonucleotide
agagucuggcaaauauagu

SEQ ID NO: 2569521 - RNA, 19 nt, Artificial Sequence
  Description of Artificial Sequence: Synthetic oligonucleotide
cacgcccaaggaaaccgac

SEQ ID NO: 2569522 - RNA, 19 nt, Artificial Sequence
  Description of Artificial Sequence: Synthetic oligonucleotide
cuuccgggcaggacuuaac

SEQ ID NO: 2569523 - RNA, 19 nt, Artificial Sequence
  Description of Artificial Sequence: Synthetic oligonucleotide
cuuguggguauagccccag

SEQ ID NO: 2569524 - RNA, 19 nt, Artificial Sequence
  Description of Artificial Sequence: Synthetic oligonucleotide
gguagguauccuuguaaaa

SEQ ID NO: 2569525 - RNA, 19 nt, Artificial Sequence
  Description of Artificial Sequence: Synthetic oligonucleotide
cacggcgaugccgaugccc

SEQ ID NO: 2569526 - RNA, 19 nt, Artificial Sequence
  Description of Artificial Sequence: Synthetic oligonucleotide
gguguccgagauaaacugc

SEQ ID NO: 2569527 - RNA, 19 nt, Artificial Sequence
  Description of Artificial Sequence: Synthetic oligonucleotide
cucauccuuguggguauag

SEQ ID NO: 2569528 - RNA, 19 nt, Artificial Sequence
  Description of Artificial Sequence: Synthetic oligonucleotide
ugggacucuugcacagcuc

SEQ ID NO: 2569529 - RNA, 19 nt, Artificial Sequence
  Description of Artificial Sequence: Synthetic oligonucleotide
cacugcuccgaugauguga

SEQ ID NO: 2569530 - RNA, 19 nt, Artificial Sequence
  Description of Artificial Sequence: Synthetic oligonucleotide
aggacuuaacuuggaugga

SEQ ID NO: 2569531 - RNA, 19 nt, Artificial Sequence
  Description of Artificial Sequence: Synthetic oligonucleotide
accuuucauagcaggauuu

SEQ ID NO: 2569532 - RNA, 19 nt, Artificial Sequence
  Description of Artificial Sequence: Synthetic oligonucleotide
ucccguuggggcucauccu

SEQ ID NO: 2569533 - RNA, 19 nt, Artificial Sequence
  Description of Artificial Sequence: Synthetic oligonucleotide
cagguguccgagauaaacu

SEQ ID NO: 2569534 - RNA, 19 nt, Artificial Sequence
  Description of Artificial Sequence: Synthetic oligonucleotide
ucaacgccauauggauggc

SEQ ID NO: 2569535 - RNA, 19 nt, Artificial Sequence
  Description of Artificial Sequence: Synthetic oligonucleotide
cuaucucaauggcaaauau

SEQ ID NO: 2569536 - RNA, 19 nt, Artificial Sequence
  Description of Artificial Sequence: Synthetic oligonucleotide
caaggaaaccgacaagcau

SEQ ID NO: 2569537 - RNA, 19 nt, Artificial Sequence
  Description of Artificial Sequence: Synthetic oligonucleotide
guguccgagauaaacugcu

SEQ ID NO: 2569538 - RNA, 19 nt, Artificial Sequence
  Description of Artificial Sequence: Synthetic oligonucleotide
acggcugcagcuaucucaa

SEQ ID NO: 2569539 - RNA, 19 nt, Artificial Sequence
  Description of Artificial Sequence: Synthetic oligonucleotide
uggcuuccgggcaggacuu

SEQ ID NO: 2569540 - RNA, 19 nt, Artificial Sequence
  Description of Artificial Sequence: Synthetic oligonucleotide
acagcaguucaacgccaua

SEQ ID NO: 2569541 - RNA, 19 nt, Artificial Sequence
  Description of Artificial Sequence: Synthetic oligonucleotide
guaccuuucauagcaggau

SEQ ID NO: 2569542 - RNA, 19 nt, Artificial Sequence
  Description of Artificial Sequence: Synthetic oligonucleotide
ccaaggaaaccgacaagca

SEQ ID NO: 2569543 - RNA, 19 nt, Artificial Sequence
  Description of Artificial Sequence: Synthetic oligonucleotide
uggauggcuuugaguguuu

SEQ ID NO: 2569544 - RNA, 19 nt, Artificial Sequence
  Description of Artificial Sequence: Synthetic oligonucleotide
gacuuaacuuggauggauu

SEQ ID NO: 2569545 - RNA, 19 nt, Artificial Sequence
  Description of Artificial Sequence: Synthetic oligonucleotide
guauagccccagacggcug

SEQ ID NO: 2569546 - RNA, 19 nt, Artificial Sequence
  Description of Artificial Sequence: Synthetic oligonucleotide
ccacaccacccauuaggcc

SEQ ID NO: 2569547 - RNA, 19 nt, Artificial Sequence
  Description of Artificial Sequence: Synthetic oligonucleotide
uguuucccguuggggcuca

SEQ ID NO: 2569548 - RNA, 19 nt, Artificial Sequence
  Description of Artificial Sequence: Synthetic oligonucleotide
cgaagaucaucaccacggc

SEQ ID NO: 2569549 - RNA, 19 nt, Artificial Sequence
  Description of Artificial Sequence: Synthetic oligonucleotide
ggguauagccccagacggc

SEQ ID NO: 2569550 - RNA, 19 nt, Artificial Sequence
  Description of Artificial Sequence: Synthetic oligonucleotide
gguauagccccagacggcu

SEQ ID NO: 2569551 - RNA, 19 nt, Artificial Sequence
  Description of Artificial Sequence: Synthetic oligonucleotide
cccgaagaacaaucccagc

SEQ ID NO: 2569552 - RNA, 19 nt, Artificial Sequence
  Description of Artificial Sequence: Synthetic oligonucleotide
ccacccauuaggccacagc

SEQ ID NO: 2569553 - RNA, 19 nt, Artificial Sequence
  Description of Artificial Sequence: Synthetic oligonucleotide
caccucauccuugugggua

SEQ ID NO: 2569554 - RNA, 19 nt, Artificial Sequence
  Description of Artificial Sequence: Synthetic oligonucleotide
acgcccaaggaaaccgaca

SEQ ID NO: 2569555 - RNA, 19 nt, Artificial Sequence
  Description of Artificial Sequence: Synthetic oligonucleotide
ccgagauaaacugcuccac

SEQ ID NO: 2569556 - RNA, 19 nt, Artificial Sequence
  Description of Artificial Sequence: Synthetic oligonucleotide
gcacugggacucuugcaca

SEQ ID NO: 2569557 - RNA, 19 nt, Artificial Sequence
  Description of Artificial Sequence: Synthetic oligonucleotide
uuucccguuggggcucauc

SEQ ID NO: 2569558 - RNA, 19 nt, Artificial Sequence
  Description of Artificial Sequence: Synthetic oligonucleotide
ggcuuugaguguuucccgu

SEQ ID NO: 2569559 - RNA, 19 nt, Artificial Sequence
  Description of Artificial Sequence: Synthetic oligonucleotide
accacccauuaggccacag

SEQ ID NO: 2569560 - RNA, 19 nt, Artificial Sequence
  Description of Artificial Sequence: Synthetic oligonucleotide
guguuucccguuggggcuc

SEQ ID NO: 2569561 - RNA, 19 nt, Artificial Sequence
  Description of Artificial Sequence: Synthetic oligonucleotide
cagcaguucaacgccauau

SEQ ID NO: 2569562 - RNA, 19 nt, Artificial Sequence
  Description of Artificial Sequence: Synthetic oligonucleotide
cgagauaaacugcuccaca

SEQ ID NO: 2569563 - RNA, 19 nt, Artificial Sequence
  Description of Artificial Sequence: Synthetic oligonucleotide
gcuccacaccacccauuag

SEQ ID NO: 2569564 - RNA, 19 nt, Artificial Sequence
  Description of Artificial Sequence: Synthetic oligonucleotide
auagccccagacggcugca

SEQ ID NO: 2569565 - RNA, 19 nt, Artificial Sequence
  Description of Artificial Sequence: Synthetic oligonucleotide
cagcuaucucaauggcaaa

SEQ ID NO: 2569566 - RNA, 19 nt, Artificial Sequence
  Description of Artificial Sequence: Synthetic oligonucleotide
gcuccgaugaugugaaauu

SEQ ID NO: 2569567 - RNA, 19 nt, Artificial Sequence
  Description of Artificial Sequence: Synthetic oligonucleotide
ugcccacugcuccgaugau

SEQ ID NO: 2569568 - RNA, 19 nt, Artificial Sequence
  Description of Artificial Sequence: Synthetic oligonucleotide
cguuggggcucauccuugg

SEQ ID NO: 2569569 - RNA, 19 nt, Artificial Sequence
  Description of Artificial Sequence: Synthetic oligonucleotide
gcuuuugguagguauccuu

SEQ ID NO: 2569570 - RNA, 19 nt, Artificial Sequence
  Description of Artificial Sequence: Synthetic oligonucleotide
gaggaacccgaagaacaau

SEQ ID NO: 2569571 - RNA, 19 nt, Artificial Sequence
  Description of Artificial Sequence: Synthetic oligonucleotide
cccauuaggccacagcagu

SEQ ID NO: 2569572 - RNA, 19 nt, Artificial Sequence
  Description of Artificial Sequence: Synthetic oligonucleotide
cccacugcuccgaugaugu

SEQ ID NO: 2569573 - RNA, 19 nt, Artificial Sequence
  Description of Artificial Sequence: Synthetic oligonucleotide
gccauauggauggcuuuga

SEQ ID NO: 2569574 - RNA, 19 nt, Artificial Sequence
  Description of Artificial Sequence: Synthetic oligonucleotide
cauccuuggucuucagcuu

SEQ ID NO: 2569575 - RNA, 19 nt, Artificial Sequence
  Description of Artificial Sequence: Synthetic oligonucleotide
caccacggcgaugccgaug

SEQ ID NO: 2569576 - RNA, 19 nt, Artificial Sequence
  Description of Artificial Sequence: Synthetic oligonucleotide
ggacuuaacuuggauggau

SEQ ID NO: 2569577 - RNA, 19 nt, Artificial Sequence
  Description of Artificial Sequence: Synthetic oligonucleotide
ggcaggacuuaacuuggau

SEQ ID NO: 2569578 - RNA, 19 nt, Artificial Sequence
  Description of Artificial Sequence: Synthetic oligonucleotide
ccguuggggcucauccuug

SEQ ID NO: 2569579 - RNA, 19 nt, Artificial Sequence
  Description of Artificial Sequence: Synthetic oligonucleotide
gcucauccuuggucuucag

SEQ ID NO: 2569580 - RNA, 19 nt, Artificial Sequence
  Description of Artificial Sequence: Synthetic oligonucleotide
cagacggcugcagcuaucu

SEQ ID NO: 2569581 - RNA, 19 nt, Artificial Sequence
  Description of Artificial Sequence: Synthetic oligonucleotide
cuccgaugaugugaaauuu

SEQ ID NO: 2569582 - RNA, 19 nt, Artificial Sequence
  Description of Artificial Sequence: Synthetic oligonucleotide
cacagcaguucaacgccau

SEQ ID NO: 2569583 - RNA, 19 nt, Artificial Sequence
  Description of Artificial Sequence: Synthetic oligonucleotide
gcacagcuccacagcacgc

SEQ ID NO: 2569584 - RNA, 19 nt, Artificial Sequence
  Description of Artificial Sequence: Synthetic oligonucleotide
gucuagagucuggcaaaua

SEQ ID NO: 2569585 - RNA, 19 nt, Artificial Sequence
  Description of Artificial Sequence: Synthetic oligonucleotide
cgccauauggauggcuuug

SEQ ID NO: 2569586 - RNA, 19 nt, Artificial Sequence
  Description of Artificial Sequence: Synthetic oligonucleotide
cgcccaaggaaaccgacaa

SEQ ID NO: 2569587 - RNA, 19 nt, Artificial Sequence
  Description of Artificial Sequence: Synthetic oligonucleotide
cgaagaacaaucccagcau

SEQ ID NO: 2569588 - RNA, 19 nt, Artificial Sequence
  Description of Artificial Sequence: Synthetic oligonucleotide
gcuuugaguguuucccguu

SEQ ID NO: 2569589 - RNA, 19 nt, Artificial Sequence
  Description of Artificial Sequence: Synthetic oligonucleotide
cuucagcuuuugguaggua

SEQ ID NO: 2569590 - RNA, 19 nt, Artificial Sequence
  Description of Artificial Sequence: Synthetic oligonucleotide
ccagacggcugcagcuauc

SEQ ID NO: 2569591 - RNA, 19 nt, Artificial Sequence
  Description of Artificial Sequence: Synthetic oligonucleotide
cgaugaugugaaauuugcu

SEQ ID NO: 2569592 - RNA, 19 nt, Artificial Sequence
  Description of Artificial Sequence: Synthetic oligonucleotide
caacgccauauggauggcu

SEQ ID NO: 2569593 - RNA, 19 nt, Artificial Sequence
  Description of Artificial Sequence: Synthetic oligonucleotide
ccacagcacgcccaaggaa

SEQ ID NO: 2569594 - RNA, 19 nt, Artificial Sequence
  Description of Artificial Sequence: Synthetic oligonucleotide
gccccagacggcugcagcu

SEQ ID NO: 2569595 - RNA, 19 nt, Artificial Sequence
  Description of Artificial Sequence: Synthetic oligonucleotide
ccacugcuccgaugaugug

SEQ ID NO: 2569596 - RNA, 19 nt, Artificial Sequence
  Description of Artificial Sequence: Synthetic oligonucleotide
gcacgcccaaggaaaccga

SEQ ID NO: 2569597 - RNA, 19 nt, Artificial Sequence
  Description of Artificial Sequence: Synthetic oligonucleotide
gcuuccgggcaggacuuaa

SEQ ID NO: 2569598 - RNA, 19 nt, Artificial Sequence
  Description of Artificial Sequence: Synthetic oligonucleotide
gggcaggacuuaacuugga

SEQ ID NO: 2569599 - RNA, 19 nt, Artificial Sequence
  Description of Artificial Sequence: Synthetic oligonucleotide
ggggcagguguccgagaua

SEQ ID NO: 2569600 - RNA, 19 nt, Artificial Sequence
  Description of Artificial Sequence: Synthetic oligonucleotide
cugcuccgaugaugugaaa

SEQ ID NO: 2569601 - RNA, 19 nt, Artificial Sequence
  Description of Artificial Sequence: Synthetic oligonucleotide
ccauuaggccacagcaguu

SEQ ID NO: 2569602 - RNA, 19 nt, Artificial Sequence
  Description of Artificial Sequence: Synthetic oligonucleotide
ccuuucauagcaggauuuu

SEQ ID NO: 2569603 - RNA, 19 nt, Artificial Sequence
  Description of Artificial Sequence: Synthetic oligonucleotide
cccguuggggcucauccuu

SEQ ID NO: 2569604 - RNA, 19 nt, Artificial Sequence
  Description of Artificial Sequence: Synthetic oligonucleotide
ccacggcgaugccgaugcc

SEQ ID NO: 2569605 - RNA, 19 nt, Artificial Sequence
  Description of Artificial Sequence: Synthetic oligonucleotide
ggaaaccgacaagcaucau

SEQ ID NO: 2569606 - RNA, 19 nt, Artificial Sequence
  Description of Artificial Sequence: Synthetic oligonucleotide
ccccagacggcugcagcua

SEQ ID NO: 2569607 - RNA, 19 nt, Artificial Sequence
  Description of Artificial Sequence: Synthetic oligonucleotide
cccagacggcugcagcuau

SEQ ID NO: 2569608 - RNA, 19 nt, Artificial Sequence
  Description of Artificial Sequence: Synthetic oligonucleotide
ggcuuccgggcaggacuua

SEQ ID NO: 2569609 - RNA, 19 nt, Artificial Sequence
  Description of Artificial Sequence: Synthetic oligonucleotide
ccucauccuuguggguaua

SEQ ID NO: 2569610 - RNA, 19 nt, Artificial Sequence
  Description of Artificial Sequence: Synthetic oligonucleotide
guuucccguuggggcucau

SEQ ID NO: 2569611 - RNA, 19 nt, Artificial Sequence
  Description of Artificial Sequence: Synthetic oligonucleotide
aacgaaaucguacagauuc

SEQ ID NO: 2569612 - RNA, 19 nt, Artificial Sequence
  Description of Artificial Sequence: Synthetic oligonucleotide
aaauuuacguuuuauugcg

SEQ ID NO: 2569613 - RNA, 19 nt, Artificial Sequence
  Description of Artificial Sequence: Synthetic oligonucleotide
aauacugaucucuuguccc

SEQ ID NO: 2569614 - RNA, 19 nt, Artificial Sequence
  Description of Artificial Sequence: Synthetic oligonucleotide
gaauuauuuaacuucaaag

SEQ ID NO: 2569615 - RNA, 19 nt, Artificial Sequence
  Description of Artificial Sequence: Synthetic oligonucleotide
uuucuuuauuaacagaacg

SEQ ID NO: 2569616 - RNA, 19 nt, Artificial Sequence
  Description of Artificial Sequence: Synthetic oligonucleotide
aaauacugaucucuugucc

SEQ ID NO: 2569617 - RNA, 19 nt, Artificial Sequence
  Description of Artificial Sequence: Synthetic oligonucleotide
ugaaauuuacguuuuauug

SEQ ID NO: 2569618 - RNA, 19 nt, Artificial Sequence
  Description of Artificial Sequence: Synthetic oligonucleotide
auugccaacaaacacaguc

SEQ ID NO: 2569619 - RNA, 19 nt, Artificial Sequence
  Description of Artificial Sequence: Synthetic oligonucleotide
acuacauaugcguugauac

SEQ ID NO: 2569620 - RNA, 19 nt, Artificial Sequence
  Description of Artificial Sequence: Synthetic oligonucleotide
aacuuuguaaggaagauuc

SEQ ID NO: 2569621 - RNA, 19 nt, Artificial Sequence
  Description of Artificial Sequence: Synthetic oligonucleotide
uguagcagcacucucaucc

SEQ ID NO: 2569622 - RNA, 19 nt, Artificial Sequence
  Description of Artificial Sequence: Synthetic oligonucleotide
uuuauuaacagaacgcaug

SEQ ID NO: 2569623 - RNA, 19 nt, Artificial Sequence
  Description of Artificial Sequence: Synthetic oligonucleotide
uuugcuuagauuuauuggc

SEQ ID NO: 2569624 - RNA, 19 nt, Artificial Sequence
  Description of Artificial Sequence: Synthetic oligonucleotide
uuaguuuucuuuauuaaca

SEQ ID NO: 2569625 - RNA, 19 nt, Artificial Sequence
  Description of Artificial Sequence: Synthetic oligonucleotide
uuuggaaugucuuuggaag

SEQ ID NO: 2569626 - RNA, 19 nt, Artificial Sequence
  Description of Artificial Sequence: Synthetic oligonucleotide
gaaauuuacguuuuauugc

SEQ ID NO: 2569627 - RNA, 19 nt, Artificial Sequence
  Description of Artificial Sequence: Synthetic oligonucleotide
uuaacuucaaagcaagaug

SEQ ID NO: 2569628 - RNA, 19 nt, Artificial Sequence
  Description of Artificial Sequence: Synthetic oligonucleotide
ugaauuugaauuuuguugu

SEQ ID NO: 2569629 - RNA, 19 nt, Artificial Sequence
  Description of Artificial Sequence: Synthetic oligonucleotide
aaaucguacagauucuauc

SEQ ID NO: 2569630 - RNA, 19 nt, Artificial Sequence
  Description of Artificial Sequence: Synthetic oligonucleotide
uuuugcuuagauuuauugg

SEQ ID NO: 2569631 - RNA, 19 nt, Artificial Sequence
  Description of Artificial Sequence: Synthetic oligonucleotide
auuauuuaacuucaaagca

SEQ ID NO: 2569632 - RNA, 19 nt, Artificial Sequence
  Description of Artificial Sequence: Synthetic oligonucleotide
uuaaacacuacauaugcgu

SEQ ID NO: 2569633 - RNA, 19 nt, Artificial Sequence
  Description of Artificial Sequence: Synthetic oligonucleotide
aauacgaaauccuucuuca

SEQ ID NO: 2569634 - RNA, 19 nt, Artificial Sequence
  Description of Artificial Sequence: Synthetic oligonucleotide
aaucguacagauucuaucu

SEQ ID NO: 2569635 - RNA, 19 nt, Artificial Sequence
  Description of Artificial Sequence: Synthetic oligonucleotide
aaaguguuccuccaaagca

SEQ ID NO: 2569636 - RNA, 19 nt, Artificial Sequence
  Description of Artificial Sequence: Synthetic oligonucleotide
uuucucaagauccucacug

SEQ ID NO: 2569637 - RNA, 19 nt, Artificial Sequence
  Description of Artificial Sequence: Synthetic oligonucleotide
auuuacguuuuauugcggc

SEQ ID NO: 2569638 - RNA, 19 nt, Artificial Sequence
  Description of Artificial Sequence: Synthetic oligonucleotide
uuuucuucccauuagcuca

SEQ ID NO: 2569639 - RNA, 19 nt, Artificial Sequence
  Description of Artificial Sequence: Synthetic oligonucleotide
ucaagcuugaauuugaauu

SEQ ID NO: 2569640 - RNA, 19 nt, Artificial Sequence
  Description of Artificial Sequence: Synthetic oligonucleotide
agcacucucauccuuaaac

SEQ ID NO: 2569641 - RNA, 19 nt, Artificial Sequence
  Description of Artificial Sequence: Synthetic oligonucleotide
agagcacauagccaaaccc

SEQ ID NO: 2569642 - RNA, 19 nt, Artificial Sequence
  Description of Artificial Sequence: Synthetic oligonucleotide
gaagauuccccacaaauac

SEQ ID NO: 2569643 - RNA, 19 nt, Artificial Sequence
  Description of Artificial Sequence: Synthetic oligonucleotide
uuuguaaggaagauucccc

SEQ ID NO: 2569644 - RNA, 19 nt, Artificial Sequence
  Description of Artificial Sequence: Synthetic oligonucleotide
uuauuuaacuucaaagcaa

SEQ ID NO: 2569645 - RNA, 19 nt, Artificial Sequence
  Description of Artificial Sequence: Synthetic oligonucleotide
augaacagcaucuguauuc

SEQ ID NO: 2569646 - RNA, 19 nt, Artificial Sequence
  Description of Artificial Sequence: Synthetic oligonucleotide
cuuauuacaugugacaggc

SEQ ID NO: 2569647 - RNA, 19 nt, Artificial Sequence
  Description of Artificial Sequence: Synthetic oligonucleotide
uuauuaacagaacgcauga

SEQ ID NO: 2569648 - RNA, 19 nt, Artificial Sequence
  Description of Artificial Sequence: Synthetic oligonucleotide
ugcguugauacuuuucugg

SEQ ID NO: 2569649 - RNA, 19 nt, Artificial Sequence
  Description of Artificial Sequence: Synthetic oligonucleotide
uuuggaaguaaacugaguu

SEQ ID NO: 2569650 - RNA, 19 nt, Artificial Sequence
  Description of Artificial Sequence: Synthetic oligonucleotide
ugucuuuggaaguaaacug

SEQ ID NO: 2569651 - RNA, 19 nt, Artificial Sequence
  Description of Artificial Sequence: Synthetic oligonucleotide
auuaacagaacgcaugacu

SEQ ID NO: 2569652 - RNA, 19 nt, Artificial Sequence
  Description of Artificial Sequence: Synthetic oligonucleotide
uccuucuucaaucugugcc

SEQ ID NO: 2569653 - RNA, 19 nt, Artificial Sequence
  Description of Artificial Sequence: Synthetic oligonucleotide
uuaacagaacgcaugacuc

SEQ ID NO: 2569654 - RNA, 19 nt, Artificial Sequence
  Description of Artificial Sequence: Synthetic oligonucleotide
uaugcguugauacuuuucu

SEQ ID NO: 2569655 - RNA, 19 nt, Artificial Sequence
  Description of Artificial Sequence: Synthetic oligonucleotide
uauuacaugugacaggcaa

SEQ ID NO: 2569656 - RNA, 19 nt, Artificial Sequence
  Description of Artificial Sequence: Synthetic oligonucleotide
uagaggugguuucagaugc

SEQ ID NO: 2569657 - RNA, 19 nt, Artificial Sequence
  Description of Artificial Sequence: Synthetic oligonucleotide
acgaaauccuucuucaauc

SEQ ID NO: 2569658 - RNA, 19 nt, Artificial Sequence
  Description of Artificial Sequence: Synthetic oligonucleotide
uucuuauuacaugugacag

SEQ ID NO: 2569659 - RNA, 19 nt, Artificial Sequence
  Description of Artificial Sequence: Synthetic oligonucleotide
aaauugccaacaaacacag

SEQ ID NO: 2569660 - RNA, 19 nt, Artificial Sequence
  Description of Artificial Sequence: Synthetic oligonucleotide
ucuuuauuaacagaacgca

SEQ ID NO: 2569661 - RNA, 19 nt, Artificial Sequence
  Description of Artificial Sequence: Synthetic oligonucleotide
uuuucaaccgcucuucuuc

SEQ ID NO: 2569662 - RNA, 19 nt, Artificial Sequence
  Description of Artificial Sequence: Synthetic oligonucleotide
uugcuuagauuuauuggcg

SEQ ID NO: 2569663 - RNA, 19 nt, Artificial Sequence
  Description of Artificial Sequence: Synthetic oligonucleotide
acaugugacaggcaaauug

SEQ ID NO: 2569664 - RNA, 19 nt, Artificial Sequence
  Description of Artificial Sequence: Synthetic oligonucleotide
aaacacuacauaugcguug

SEQ ID NO: 2569665 - RNA, 19 nt, Artificial Sequence
  Description of Artificial Sequence: Synthetic oligonucleotide
acaaauacugaucucuugu

SEQ ID NO: 2569666 - RNA, 19 nt, Artificial Sequence
  Description of Artificial Sequence: Synthetic oligonucleotide
uucaacuuuguaaggaaga

SEQ ID NO: 2569667 - RNA, 19 nt, Artificial Sequence
  Description of Artificial Sequence: Synthetic oligonucleotide
ucuuuggaaguaaacugag

SEQ ID NO: 2569668 - RNA, 19 nt, Artificial Sequence
  Description of Artificial Sequence: Synthetic oligonucleotide
uguauucucaaagagcaca

SEQ ID NO: 2569669 - RNA, 19 nt, Artificial Sequence
  Description of Artificial Sequence: Synthetic oligonucleotide
uacagauucuaucugucca

SEQ ID NO: 2569670 - RNA, 19 nt, Artificial Sequence
  Description of Artificial Sequence: Synthetic oligonucleotide
uuuauugcggccaacuuuu

SEQ ID NO: 2569671 - RNA, 19 nt, Artificial Sequence
  Description of Artificial Sequence: Synthetic oligonucleotide
agcaucuguauucucaaag

SEQ ID NO: 2569672 - RNA, 19 nt, Artificial Sequence
  Description of Artificial Sequence: Synthetic oligonucleotide
uuauuggcguucuucaagc

SEQ ID NO: 2569673 - RNA, 19 nt, Artificial Sequence
  Description of Artificial Sequence: Synthetic oligonucleotide
uuagcucagaauuauuuaa

SEQ ID NO: 2569674 - RNA, 19 nt, Artificial Sequence
  Description of Artificial Sequence: Synthetic oligonucleotide
ucugcagugcuuuuguagc

SEQ ID NO: 2569675 - RNA, 19 nt, Artificial Sequence
  Description of Artificial Sequence: Synthetic oligonucleotide
ucuucuuauuacaugugac

SEQ ID NO: 2569676 - RNA, 19 nt, Artificial Sequence
  Description of Artificial Sequence: Synthetic oligonucleotide
uucccauuagcucagaauu

SEQ ID NO: 2569677 - RNA, 19 nt, Artificial Sequence
  Description of Artificial Sequence: Synthetic oligonucleotide
uuucuggucaggaugaaau

SEQ ID NO: 2569678 - RNA, 19 nt, Artificial Sequence
  Description of Artificial Sequence: Synthetic oligonucleotide
cuuaaacacuacauaugcg

SEQ ID NO: 2569679 - RNA, 19 nt, Artificial Sequence
  Description of Artificial Sequence: Synthetic oligonucleotide
ucgaauacgaaauccuucu

SEQ ID NO: 2569680 - RNA, 19 nt, Artificial Sequence
  Description of Artificial Sequence: Synthetic oligonucleotide
aaguaaacugaguuuugcu

SEQ ID NO: 2569681 - RNA, 19 nt, Artificial Sequence
  Description of Artificial Sequence: Synthetic oligonucleotide
aucuguauucucaaagagc

SEQ ID NO: 2569682 - RNA, 19 nt, Artificial Sequence
  Description of Artificial Sequence: Synthetic oligonucleotide
uuuaacuucaaagcaagau

SEQ ID NO: 2569683 - RNA, 19 nt, Artificial Sequence
  Description of Artificial Sequence: Synthetic oligonucleotide
aggcaaauugccaacaaac

SEQ ID NO: 2569684 - RNA, 19 nt, Artificial Sequence
  Description of Artificial Sequence: Synthetic oligonucleotide
gaucucuugucccuagagg

SEQ ID NO: 2569685 - RNA, 19 nt, Artificial Sequence
  Description of Artificial Sequence: Synthetic oligonucleotide
uuggcguucuucaagcuug

SEQ ID NO: 2569686 - RNA, 19 nt, Artificial Sequence
  Description of Artificial Sequence: Synthetic oligonucleotide
ugaauuuuguuguuuuagu

SEQ ID NO: 2569687 - RNA, 19 nt, Artificial Sequence
  Description of Artificial Sequence: Synthetic oligonucleotide
ugcgagaucaacucgaaua

SEQ ID NO: 2569688 - RNA, 19 nt, Artificial Sequence
  Description of Artificial Sequence: Synthetic oligonucleotide
uugccaacaaacacagucc

SEQ ID NO: 2569689 - RNA, 19 nt, Artificial Sequence
  Description of Artificial Sequence: Synthetic oligonucleotide
guugauacuuuucugguca

SEQ ID NO: 2569690 - RNA, 19 nt, Artificial Sequence
  Description of Artificial Sequence: Synthetic oligonucleotide
agaacgaaaucguacagau

SEQ ID NO: 2569691 - RNA, 19 nt, Artificial Sequence
  Description of Artificial Sequence: Synthetic oligonucleotide
ucuucaagcuugaauuuga

SEQ ID NO: 2569692 - RNA, 19 nt, Artificial Sequence
  Description of Artificial Sequence: Synthetic oligonucleotide
ucacagaacgaaaucguac

SEQ ID NO: 2569693 - RNA, 19 nt, Artificial Sequence
  Description of Artificial Sequence: Synthetic oligonucleotide
auccuuaaacacuacauau

SEQ ID NO: 2569694 - RNA, 19 nt, Artificial Sequence
  Description of Artificial Sequence: Synthetic oligonucleotide
uuuacguuuuauugcggcc

SEQ ID NO: 2569695 - RNA, 19 nt, Artificial Sequence
  Description of Artificial Sequence: Synthetic oligonucleotide
aacagaacgcaugacucuc

SEQ ID NO: 2569696 - RNA, 19 nt, Artificial Sequence
  Description of Artificial Sequence: Synthetic oligonucleotide
agauuuauuggcguucuuc

SEQ ID NO: 2569697 - RNA, 19 nt, Artificial Sequence
  Description of Artificial Sequence: Synthetic oligonucleotide
aucucuugucccuagaggu

SEQ ID NO: 2569698 - RNA, 19 nt, Artificial Sequence
  Description of Artificial Sequence: Synthetic oligonucleotide
uuuuauugcggccaacuuu

SEQ ID NO: 2569699 - RNA, 19 nt, Artificial Sequence
  Description of Artificial Sequence: Synthetic oligonucleotide
uucagaugcgagaucaacu

SEQ ID NO: 2569700 - RNA, 19 nt, Artificial Sequence
  Description of Artificial Sequence: Synthetic oligonucleotide
acuucaaagcaagaugaac

SEQ ID NO: 2569701 - RNA, 19 nt, Artificial Sequence
  Description of Artificial Sequence: Synthetic oligonucleotide
cuuuguaaggaagauuccc

SEQ ID NO: 2569702 - RNA, 19 nt, Artificial Sequence
  Description of Artificial Sequence: Synthetic oligonucleotide
agaauuauuuaacuucaaa

SEQ ID NO: 2569703 - RNA, 19 nt, Artificial Sequence
  Description of Artificial Sequence: Synthetic oligonucleotide
uuuuggaaugucuuuggaa

SEQ ID NO: 2569704 - RNA, 19 nt, Artificial Sequence
  Description of Artificial Sequence: Synthetic oligonucleotide
auagccaaacccucugccg

SEQ ID NO: 2569705 - RNA, 19 nt, Artificial Sequence
  Description of Artificial Sequence: Synthetic oligonucleotide
ugaucucuugucccuagag

SEQ ID NO: 2569706 - RNA, 19 nt, Artificial Sequence
  Description of Artificial Sequence: Synthetic oligonucleotide
ugacucucaguuuucuucc

SEQ ID NO: 2569707 - RNA, 19 nt, Artificial Sequence
  Description of Artificial Sequence: Synthetic oligonucleotide
ugagaacugccuuuucucc

SEQ ID NO: 2569708 - RNA, 19 nt, Artificial Sequence
  Description of Artificial Sequence: Synthetic oligonucleotide
ucagaugcgagaucaacuc

SEQ ID NO: 2569709 - RNA, 19 nt, Artificial Sequence
  Description of Artificial Sequence: Synthetic oligonucleotide
agaaaguguuccuccaaag

SEQ ID NO: 2569710 - RNA, 19 nt, Artificial Sequence
  Description of Artificial Sequence: Synthetic oligonucleotide
agauucuaucuguccauac

SEQ ID NO: 2569711 - RNA, 19 nt, Artificial Sequence
  Description of Artificial Sequence: Synthetic oligonucleotide
aguaaacugaguuuugcuu

SEQ ID NO: 2569712 - RNA, 19 nt, Artificial Sequence
  Description of Artificial Sequence: Synthetic oligonucleotide
ugugacaggcaaauugcca

SEQ ID NO: 2569713 - RNA, 19 nt, Artificial Sequence
  Description of Artificial Sequence: Synthetic oligonucleotide
ucaaccgcucuucuucagg

SEQ ID NO: 2569714 - RNA, 19 nt, Artificial Sequence
  Description of Artificial Sequence: Synthetic oligonucleotide
ccuuaaacacuacauaugc

SEQ ID NO: 2569715 - RNA, 19 nt, Artificial Sequence
  Description of Artificial Sequence: Synthetic oligonucleotide
gaaguaaacugaguuuugc

SEQ ID NO: 2569716 - RNA, 19 nt, Artificial Sequence
  Description of Artificial Sequence: Synthetic oligonucleotide
aaguguuccuccaaagcag

SEQ ID NO: 2569717 - RNA, 19 nt, Artificial Sequence
  Description of Artificial Sequence: Synthetic oligonucleotide
ucucaagauccucacugcc

SEQ ID NO: 2569718 - RNA, 19 nt, Artificial Sequence
  Description of Artificial Sequence: Synthetic oligonucleotide
cuucaacuuuguaaggaag

SEQ ID NO: 2569719 - RNA, 19 nt, Artificial Sequence
  Description of Artificial Sequence: Synthetic oligonucleotide
uuguaaggaagauucccca

SEQ ID NO: 2569720 - RNA, 19 nt, Artificial Sequence
  Description of Artificial Sequence: Synthetic oligonucleotide
aacacuacauaugcguuga

SEQ ID NO: 2569721 - RNA, 19 nt, Artificial Sequence
  Description of Artificial Sequence: Synthetic oligonucleotide
uacgaaauccuucuucaau

SEQ ID NO: 2569722 - RNA, 19 nt, Artificial Sequence
  Description of Artificial Sequence: Synthetic oligonucleotide
guuguuuuaguuuucuuua

SEQ ID NO: 2569723 - RNA, 19 nt, Artificial Sequence
  Description of Artificial Sequence: Synthetic oligonucleotide
aaagcagccucuucaacuu

SEQ ID NO: 2569724 - RNA, 19 nt, Artificial Sequence
  Description of Artificial Sequence: Synthetic oligonucleotide
ucuucaacuuuguaaggaa

SEQ ID NO: 2569725 - RNA, 19 nt, Artificial Sequence
  Description of Artificial Sequence: Synthetic oligonucleotide
uagcucagaauuauuuaac

SEQ ID NO: 2569726 - RNA, 19 nt, Artificial Sequence
  Description of Artificial Sequence: Synthetic oligonucleotide
agcucagaauuauuuaacu

SEQ ID NO: 2569727 - RNA, 19 nt, Artificial Sequence
  Description of Artificial Sequence: Synthetic oligonucleotide
aauuuacguuuuauugcgg

SEQ ID NO: 2569728 - RNA, 19 nt, Artificial Sequence
  Description of Artificial Sequence: Synthetic oligonucleotide
agcaagaugaacagcaucu

SEQ ID NO: 2569729 - RNA, 19 nt, Artificial Sequence
  Description of Artificial Sequence: Synthetic oligonucleotide
gucaggaugaaauuuacgu

SEQ ID NO: 2569730 - RNA, 19 nt, Artificial Sequence
  Description of Artificial Sequence: Synthetic oligonucleotide
ucugcuggcaucacagaac

SEQ ID NO: 2569731 - RNA, 19 nt, Artificial Sequence
  Description of Artificial Sequence: Synthetic oligonucleotide
uuacguuuuauugcggcca

SEQ ID NO: 2569732 - RNA, 19 nt, Artificial Sequence
  Description of Artificial Sequence: Synthetic oligonucleotide
uuuguagcagcacucucau

SEQ ID NO: 2569733 - RNA, 19 nt, Artificial Sequence
  Description of Artificial Sequence: Synthetic oligonucleotide
uggaaguaaacugaguuuu

SEQ ID NO: 2569734 - RNA, 19 nt, Artificial Sequence
  Description of Artificial Sequence: Synthetic oligonucleotide
uaaacacuacauaugcguu

SEQ ID NO: 2569735 - RNA, 19 nt, Artificial Sequence
  Description of Artificial Sequence: Synthetic oligonucleotide
cuucuuauuacaugugaca

SEQ ID NO: 2569736 - RNA, 19 nt, Artificial Sequence
  Description of Artificial Sequence: Synthetic oligonucleotide
acagaacgaaaucguacag

SEQ ID NO: 2569737 - RNA, 19 nt, Artificial Sequence
  Description of Artificial Sequence: Synthetic oligonucleotide
auuagcucagaauuauuua

SEQ ID NO: 2569738 - RNA, 19 nt, Artificial Sequence
  Description of Artificial Sequence: Synthetic oligonucleotide
gccucuucaacuuuguaag

SEQ ID NO: 2569739 - RNA, 19 nt, Artificial Sequence
  Description of Artificial Sequence: Synthetic oligonucleotide
uuuucguuaguguucccuc

SEQ ID NO: 2569740 - RNA, 19 nt, Artificial Sequence
  Description of Artificial Sequence: Synthetic oligonucleotide
uaucuguccauacucuuua

SEQ ID NO: 2569741 - RNA, 19 nt, Artificial Sequence
  Description of Artificial Sequence: Synthetic oligonucleotide
augucuuuggaaguaaacu

SEQ ID NO: 2569742 - RNA, 19 nt, Artificial Sequence
  Description of Artificial Sequence: Synthetic oligonucleotide
aacucgaauacgaaauccu

SEQ ID NO: 2569743 - RNA, 19 nt, Artificial Sequence
  Description of Artificial Sequence: Synthetic oligonucleotide
aacugaguuuugcuuagau

SEQ ID NO: 2569744 - RNA, 19 nt, Artificial Sequence
  Description of Artificial Sequence: Synthetic oligonucleotide
gauccucacugccacaaug

SEQ ID NO: 2569745 - RNA, 19 nt, Artificial Sequence
  Description of Artificial Sequence: Synthetic oligonucleotide
gauacuuuucuggucagga

SEQ ID NO: 2569746 - RNA, 19 nt, Artificial Sequence
  Description of Artificial Sequence: Synthetic oligonucleotide
cuccaauaaaugcauuuug

SEQ ID NO: 2569747 - RNA, 19 nt, Artificial Sequence
  Description of Artificial Sequence: Synthetic oligonucleotide
uguaaggaagauuccccac

SEQ ID NO: 2569748 - RNA, 19 nt, Artificial Sequence
  Description of Artificial Sequence: Synthetic oligonucleotide
ucaacucgaauacgaaauc

SEQ ID NO: 2569749 - RNA, 19 nt, Artificial Sequence
  Description of Artificial Sequence: Synthetic oligonucleotide
cucugcagugcuuuuguag

SEQ ID NO: 2569750 - RNA, 19 nt, Artificial Sequence
  Description of Artificial Sequence: Synthetic oligonucleotide
uucucaagauccucacugc

SEQ ID NO: 2569751 - RNA, 19 nt, Artificial Sequence
  Description of Artificial Sequence: Synthetic oligonucleotide
ugccaacaaacacaguccu

SEQ ID NO: 2569752 - RNA, 19 nt, Artificial Sequence
  Description of Artificial Sequence: Synthetic oligonucleotide
acaaacacaguccucucau

SEQ ID NO: 2569753 - RNA, 19 nt, Artificial Sequence
  Description of Artificial Sequence: Synthetic oligonucleotide
ucguacagauucuaucugu

SEQ ID NO: 2569754 - RNA, 19 nt, Artificial Sequence
  Description of Artificial Sequence: Synthetic oligonucleotide
cucgaauacgaaauccuuc

SEQ ID NO: 2569755 - RNA, 19 nt, Artificial Sequence
  Description of Artificial Sequence: Synthetic oligonucleotide
cauagccaaacccucugcc

SEQ ID NO: 2569756 - RNA, 19 nt, Artificial Sequence
  Description of Artificial Sequence: Synthetic oligonucleotide
guaaacugaguuuugcuua

SEQ ID NO: 2569757 - RNA, 19 nt, Artificial Sequence
  Description of Artificial Sequence: Synthetic oligonucleotide
uuagauuuauuggcguucu

SEQ ID NO: 2569758 - RNA, 19 nt, Artificial Sequence
  Description of Artificial Sequence: Synthetic oligonucleotide
uaacagaacgcaugacucu

SEQ ID NO: 2569759 - RNA, 19 nt, Artificial Sequence
  Description of Artificial Sequence: Synthetic oligonucleotide
caaauacugaucucuuguc

SEQ ID NO: 2569760 - RNA, 19 nt, Artificial Sequence
  Description of Artificial Sequence: Synthetic oligonucleotide
gagaucaacucgaauacga

SEQ ID NO: 2569761 - RNA, 19 nt, Artificial Sequence
  Description of Artificial Sequence: Synthetic oligonucleotide
uuggaaguaaacugaguuu

SEQ ID NO: 2569762 - RNA, 19 nt, Artificial Sequence
  Description of Artificial Sequence: Synthetic oligonucleotide
aagaugaacagcaucugua

SEQ ID NO: 2569763 - RNA, 19 nt, Artificial Sequence
  Description of Artificial Sequence: Synthetic oligonucleotide
agccucuucaacuuuguaa

SEQ ID NO: 2569764 - RNA, 19 nt, Artificial Sequence
  Description of Artificial Sequence: Synthetic oligonucleotide
uacauaugcguugauacuu

SEQ ID NO: 2569765 - RNA, 19 nt, Artificial Sequence
  Description of Artificial Sequence: Synthetic oligonucleotide
cuagaggugguuucagaug

SEQ ID NO: 2569766 - RNA, 19 nt, Artificial Sequence
  Description of Artificial Sequence: Synthetic oligonucleotide
cugaguuuugcuuagauuu

SEQ ID NO: 2569767 - RNA, 19 nt, Artificial Sequence
  Description of Artificial Sequence: Synthetic oligonucleotide
agugcuuuuguagcagcac

SEQ ID NO: 2569768 - RNA, 19 nt, Artificial Sequence
  Description of Artificial Sequence: Synthetic oligonucleotide
agauuccccacaaauacug

SEQ ID NO: 2569769 - RNA, 19 nt, Artificial Sequence
  Description of Artificial Sequence: Synthetic oligonucleotide
guacagauucuaucugucc

SEQ ID NO: 2569770 - RNA, 19 nt, Artificial Sequence
  Description of Artificial Sequence: Synthetic oligonucleotide
ucucuugucccuagaggug

SEQ ID NO: 2569771 - RNA, 19 nt, Artificial Sequence
  Description of Artificial Sequence: Synthetic oligonucleotide
uuugaauuuuguuguuuua

SEQ ID NO: 2569772 - RNA, 19 nt, Artificial Sequence
  Description of Artificial Sequence: Synthetic oligonucleotide
ugcuuagauuuauuggcgu

SEQ ID NO: 2569773 - RNA, 19 nt, Artificial Sequence
  Description of Artificial Sequence: Synthetic oligonucleotide
aauccuucuucaaucugug

SEQ ID NO: 2569774 - RNA, 19 nt, Artificial Sequence
  Description of Artificial Sequence: Synthetic oligonucleotide
gcaaauugccaacaaacac

SEQ ID NO: 2569775 - RNA, 19 nt, Artificial Sequence
  Description of Artificial Sequence: Synthetic oligonucleotide
auccucacugccacaaugc

SEQ ID NO: 2569776 - RNA, 19 nt, Artificial Sequence
  Description of Artificial Sequence: Synthetic oligonucleotide
aucaacucgaauacgaaau

SEQ ID NO: 2569777 - RNA, 19 nt, Artificial Sequence
  Description of Artificial Sequence: Synthetic oligonucleotide
agcuucuucuuauuacaug

SEQ ID NO: 2569778 - RNA, 19 nt, Artificial Sequence
  Description of Artificial Sequence: Synthetic oligonucleotide
caacucgaauacgaaaucc

SEQ ID NO: 2569779 - RNA, 19 nt, Artificial Sequence
  Description of Artificial Sequence: Synthetic oligonucleotide
caaccgcucuucuucaggg

SEQ ID NO: 2569780 - RNA, 19 nt, Artificial Sequence
  Description of Artificial Sequence: Synthetic oligonucleotide
uucguuaguguucccucug

SEQ ID NO: 2569781 - RNA, 19 nt, Artificial Sequence
  Description of Artificial Sequence: Synthetic oligonucleotide
gcaucacagaacgaaaucg

SEQ ID NO: 2569782 - RNA, 19 nt, Artificial Sequence
  Description of Artificial Sequence: Synthetic oligonucleotide
uuacaugugacaggcaaau

SEQ ID NO: 2569783 - RNA, 19 nt, Artificial Sequence
  Description of Artificial Sequence: Synthetic oligonucleotide
aaugcucccacaguccaga

SEQ ID NO: 2569784 - RNA, 19 nt, Artificial Sequence
  Description of Artificial Sequence: Synthetic oligonucleotide
cuuagauuuauuggcguuc

SEQ ID NO: 2569785 - RNA, 19 nt, Artificial Sequence
  Description of Artificial Sequence: Synthetic oligonucleotide
aucguacagauucuaucug

SEQ ID NO: 2569786 - RNA, 19 nt, Artificial Sequence
  Description of Artificial Sequence: Synthetic oligonucleotide
cacagaacgaaaucguaca

SEQ ID NO: 2569787 - RNA, 19 nt, Artificial Sequence
  Description of Artificial Sequence: Synthetic oligonucleotide
ugcuuuuguagcagcacuc

SEQ ID NO: 2569788 - RNA, 19 nt, Artificial Sequence
  Description of Artificial Sequence: Synthetic oligonucleotide
acaaugcucccacagucca

SEQ ID NO: 2569789 - RNA, 19 nt, Artificial Sequence
  Description of Artificial Sequence: Synthetic oligonucleotide
guaaggaagauuccccaca

SEQ ID NO: 2569790 - RNA, 19 nt, Artificial Sequence
  Description of Artificial Sequence: Synthetic oligonucleotide
uugauacuuuucuggucag

SEQ ID NO: 2569791 - RNA, 19 nt, Artificial Sequence
  Description of Artificial Sequence: Synthetic oligonucleotide
cacaaugcucccacagucc

SEQ ID NO: 2569792 - RNA, 19 nt, Artificial Sequence
  Description of Artificial Sequence: Synthetic oligonucleotide
ucaacuuuguaaggaagau

SEQ ID NO: 2569793 - RNA, 19 nt, Artificial Sequence
  Description of Artificial Sequence: Synthetic oligonucleotide
uuccccacaaauacugauc

SEQ ID NO: 2569794 - RNA, 19 nt, Artificial Sequence
  Description of Artificial Sequence: Synthetic oligonucleotide
cucuugucccuagaggugg

SEQ ID NO: 2569795 - RNA, 19 nt, Artificial Sequence
  Description of Artificial Sequence: Synthetic oligonucleotide
ucuguccauacucuuuaaa

SEQ ID NO: 2569796 - RNA, 19 nt, Artificial Sequence
  Description of Artificial Sequence: Synthetic oligonucleotide
uuucaaccgcucuucuuca

SEQ ID NO: 2569797 - RNA, 19 nt, Artificial Sequence
  Description of Artificial Sequence: Synthetic oligonucleotide
uuucguuaguguucccucu

SEQ ID NO: 2569798 - RNA, 19 nt, Artificial Sequence
  Description of Artificial Sequence: Synthetic oligonucleotide
augugacaggcaaauugcc

SEQ ID NO: 2569799 - RNA, 19 nt, Artificial Sequence
  Description of Artificial Sequence: Synthetic oligonucleotide
gaacgcaugacucucaguu

SEQ ID NO: 2569800 - RNA, 19 nt, Artificial Sequence
  Description of Artificial Sequence: Synthetic oligonucleotide
ugauacuuuucuggucagg

SEQ ID NO: 2569801 - RNA, 19 nt, Artificial Sequence
  Description of Artificial Sequence: Synthetic oligonucleotide
uggucaggaugaaauuuac

SEQ ID NO: 2569802 - RNA, 19 nt, Artificial Sequence
  Description of Artificial Sequence: Synthetic oligonucleotide
acugccuuuucuccaauaa

SEQ ID NO: 2569803 - RNA, 19 nt, Artificial Sequence
  Description of Artificial Sequence: Synthetic oligonucleotide
uucaagcuugaauuugaau

SEQ ID NO: 2569804 - RNA, 19 nt, Artificial Sequence
  Description of Artificial Sequence: Synthetic oligonucleotide
ucguuaguguucccucugc

SEQ ID NO: 2569805 - RNA, 19 nt, Artificial Sequence
  Description of Artificial Sequence: Synthetic oligonucleotide
auacugaucucuugucccu

SEQ ID NO: 2569806 - RNA, 19 nt, Artificial Sequence
  Description of Artificial Sequence: Synthetic oligonucleotide
cagaugcgagaucaacucg

SEQ ID NO: 2569807 - RNA, 19 nt, Artificial Sequence
  Description of Artificial Sequence: Synthetic oligonucleotide
cuguccauacucuuuaaaa

SEQ ID NO: 2569808 - RNA, 19 nt, Artificial Sequence
  Description of Artificial Sequence: Synthetic oligonucleotide
agcacauagccaaacccuc

SEQ ID NO: 2569809 - RNA, 19 nt, Artificial Sequence
  Description of Artificial Sequence: Synthetic oligonucleotide
gauucuaucuguccauacu

SEQ ID NO: 2569810 - RNA, 19 nt, Artificial Sequence
  Description of Artificial Sequence: Synthetic oligonucleotide
uuauuacaugugacaggca

SEQ ID NO: 2569811 - RNA, 19 nt, Artificial Sequence
  Description of Artificial Sequence: Synthetic oligonucleotide
ucuccaauaaaugcauuuu

SEQ ID NO: 2569812 - RNA, 19 nt, Artificial Sequence
  Description of Artificial Sequence: Synthetic oligonucleotide
aagauuccccacaaauacu

SEQ ID NO: 2569813 - RNA, 19 nt, Artificial Sequence
  Description of Artificial Sequence: Synthetic oligonucleotide
gagaacugccuuuucucca

SEQ ID NO: 2569814 - RNA, 19 nt, Artificial Sequence
  Description of Artificial Sequence: Synthetic oligonucleotide
uggcaucacagaacgaaau

SEQ ID NO: 2569815 - RNA, 19 nt, Artificial Sequence
  Description of Artificial Sequence: Synthetic oligonucleotide
ucaaucugugccccauuuc

SEQ ID NO: 2569816 - RNA, 19 nt, Artificial Sequence
  Description of Artificial Sequence: Synthetic oligonucleotide
gugacaggcaaauugccaa

SEQ ID NO: 2569817 - RNA, 19 nt, Artificial Sequence
  Description of Artificial Sequence: Synthetic oligonucleotide
aagauccucacugccacaa

SEQ ID NO: 2569818 - RNA, 19 nt, Artificial Sequence
  Description of Artificial Sequence: Synthetic oligonucleotide
acugaucucuugucccuag

SEQ ID NO: 2569819 - RNA, 19 nt, Artificial Sequence
  Description of Artificial Sequence: Synthetic oligonucleotide
acugaguuuugcuuagauu

SEQ ID NO: 2569820 - RNA, 19 nt, Artificial Sequence
  Description of Artificial Sequence: Synthetic oligonucleotide
auuccccacaaauacugau

SEQ ID NO: 2569821 - RNA, 19 nt, Artificial Sequence
  Description of Artificial Sequence: Synthetic oligonucleotide
auaugcguugauacuuuuc

SEQ ID NO: 2569822 - RNA, 19 nt, Artificial Sequence
  Description of Artificial Sequence: Synthetic oligonucleotide
cucaaagagcacauagcca

SEQ ID NO: 2569823 - RNA, 19 nt, Artificial Sequence
  Description of Artificial Sequence: Synthetic oligonucleotide
ugacaggcaaauugccaac

SEQ ID NO: 2569824 - RNA, 19 nt, Artificial Sequence
  Description of Artificial Sequence: Synthetic oligonucleotide
uauuaacagaacgcaugac

SEQ ID NO: 2569825 - RNA, 19 nt, Artificial Sequence
  Description of Artificial Sequence: Synthetic oligonucleotide
uccaaagcagccucuucaa

SEQ ID NO: 2569826 - RNA, 19 nt, Artificial Sequence
  Description of Artificial Sequence: Synthetic oligonucleotide
agccaaacccucugccgac

SEQ ID NO: 2569827 - RNA, 19 nt, Artificial Sequence
  Description of Artificial Sequence: Synthetic oligonucleotide
aaacccucugccgacuccu

SEQ ID NO: 2569828 - RNA, 19 nt, Artificial Sequence
  Description of Artificial Sequence: Synthetic oligonucleotide
aacgcaugacucucaguuu

SEQ ID NO: 2569829 - RNA, 19 nt, Artificial Sequence
  Description of Artificial Sequence: Synthetic oligonucleotide
agaacugccuuuucuccaa

SEQ ID NO: 2569830 - RNA, 19 nt, Artificial Sequence
  Description of Artificial Sequence: Synthetic oligonucleotide
augcguugauacuuuucug

SEQ ID NO: 2569831 - RNA, 19 nt, Artificial Sequence
  Description of Artificial Sequence: Synthetic oligonucleotide
uacguuuuauugcggccaa

SEQ ID NO: 2569832 - RNA, 19 nt, Artificial Sequence
  Description of Artificial Sequence: Synthetic oligonucleotide
ucccauuagcucagaauua

SEQ ID NO: 2569833 - RNA, 19 nt, Artificial Sequence
  Description of Artificial Sequence: Synthetic oligonucleotide
cucaagauccucacugcca

SEQ ID NO: 2569834 - RNA, 19 nt, Artificial Sequence
  Description of Artificial Sequence: Synthetic oligonucleotide
auacuuuucuggucaggau

SEQ ID NO: 2569835 - RNA, 19 nt, Artificial Sequence
  Description of Artificial Sequence: Synthetic oligonucleotide
cuuuuguagcagcacucuc

SEQ ID NO: 2569836 - RNA, 19 nt, Artificial Sequence
  Description of Artificial Sequence: Synthetic oligonucleotide
uaguguucccucugcuggc

SEQ ID NO: 2569837 - RNA, 19 nt, Artificial Sequence
  Description of Artificial Sequence: Synthetic oligonucleotide
gcgagaucaacucgaauac

SEQ ID NO: 2569838 - RNA, 19 nt, Artificial Sequence
  Description of Artificial Sequence: Synthetic oligonucleotide
gacucucaguuuucuuccc

SEQ ID NO: 2569839 - RNA, 19 nt, Artificial Sequence
  Description of Artificial Sequence: Synthetic oligonucleotide
acgcaugacucucaguuuu

SEQ ID NO: 2569840 - RNA, 19 nt, Artificial Sequence
  Description of Artificial Sequence: Synthetic oligonucleotide
uucaaccgcucuucuucag

SEQ ID NO: 2569841 - RNA, 19 nt, Artificial Sequence
  Description of Artificial Sequence: Synthetic oligonucleotide
caaagcagccucuucaacu

SEQ ID NO: 2569842 - RNA, 19 nt, Artificial Sequence
  Description of Artificial Sequence: Synthetic oligonucleotide
uucaugagaacugccuuuu

SEQ ID NO: 2569843 - RNA, 19 nt, Artificial Sequence
  Description of Artificial Sequence: Synthetic oligonucleotide
aaggaagauuccccacaaa

SEQ ID NO: 2569844 - RNA, 19 nt, Artificial Sequence
  Description of Artificial Sequence: Synthetic oligonucleotide
cauccuuaaacacuacaua

SEQ ID NO: 2569845 - RNA, 19 nt, Artificial Sequence
  Description of Artificial Sequence: Synthetic oligonucleotide
ucuucccauuagcucagaa

SEQ ID NO: 2569846 - RNA, 19 nt, Artificial Sequence
  Description of Artificial Sequence: Synthetic oligonucleotide
uuguucuuugguccccauc

SEQ ID NO: 2569847 - RNA, 19 nt, Artificial Sequence
  Description of Artificial Sequence: Synthetic oligonucleotide
cucuucaacuuuguaagga

SEQ ID NO: 2569848 - RNA, 19 nt, Artificial Sequence
  Description of Artificial Sequence: Synthetic oligonucleotide
aacuucaaagcaagaugaa

SEQ ID NO: 2569849 - RNA, 19 nt, Artificial Sequence
  Description of Artificial Sequence: Synthetic oligonucleotide
caggaugaaauuuacguuu

SEQ ID NO: 2569850 - RNA, 19 nt, Artificial Sequence
  Description of Artificial Sequence: Synthetic oligonucleotide
auacgaaauccuucuucaa

SEQ ID NO: 2569851 - RNA, 19 nt, Artificial Sequence
  Description of Artificial Sequence: Synthetic oligonucleotide
cuguauucucaaagagcac

SEQ ID NO: 2569852 - RNA, 19 nt, Artificial Sequence
  Description of Artificial Sequence: Synthetic oligonucleotide
acuccugucuguggguuuc

SEQ ID NO: 2569853 - RNA, 19 nt, Artificial Sequence
  Description of Artificial Sequence: Synthetic oligonucleotide
cagaacgcaugacucucag

SEQ ID NO: 2569854 - RNA, 19 nt, Artificial Sequence
  Description of Artificial Sequence: Synthetic oligonucleotide
gcaucuguauucucaaaga

SEQ ID NO: 2569855 - RNA, 19 nt, Artificial Sequence
  Description of Artificial Sequence: Synthetic oligonucleotide
ucugccgacuccugucugu

SEQ ID NO: 2569856 - RNA, 19 nt, Artificial Sequence
  Description of Artificial Sequence: Synthetic oligonucleotide
cuuuauuaacagaacgcau

SEQ ID NO: 2569857 - RNA, 19 nt, Artificial Sequence
  Description of Artificial Sequence: Synthetic oligonucleotide
agcuugaauuugaauuuug

SEQ ID NO: 2569858 - RNA, 19 nt, Artificial Sequence
  Description of Artificial Sequence: Synthetic oligonucleotide
acaggcaaauugccaacaa

SEQ ID NO: 2569859 - RNA, 19 nt, Artificial Sequence
  Description of Artificial Sequence: Synthetic oligonucleotide
auuuaacuucaaagcaaga

SEQ ID NO: 2569860 - RNA, 19 nt, Artificial Sequence
  Description of Artificial Sequence: Synthetic oligonucleotide
ucaugagaacugccuuuuc

SEQ ID NO: 2569861 - RNA, 19 nt, Artificial Sequence
  Description of Artificial Sequence: Synthetic oligonucleotide
caaucugugccccauuucu

SEQ ID NO: 2569862 - RNA, 19 nt, Artificial Sequence
  Description of Artificial Sequence: Synthetic oligonucleotide
ggucaggaugaaauuuacg

SEQ ID NO: 2569863 - RNA, 19 nt, Artificial Sequence
  Description of Artificial Sequence: Synthetic oligonucleotide
auuacaugugacaggcaaa

SEQ ID NO: 2569864 - RNA, 19 nt, Artificial Sequence
  Description of Artificial Sequence: Synthetic oligonucleotide
aacugccuuuucuccaaua

SEQ ID NO: 2569865 - RNA, 19 nt, Artificial Sequence
  Description of Artificial Sequence: Synthetic oligonucleotide
caucacagaacgaaaucgu

SEQ ID NO: 2569866 - RNA, 19 nt, Artificial Sequence
  Description of Artificial Sequence: Synthetic oligonucleotide
cucaguuuucuucccauua

SEQ ID NO: 2569867 - RNA, 19 nt, Artificial Sequence
  Description of Artificial Sequence: Synthetic oligonucleotide
aaacugaguuuugcuuaga

SEQ ID NO: 2569868 - RNA, 19 nt, Artificial Sequence
  Description of Artificial Sequence: Synthetic oligonucleotide
gacaggcaaauugccaaca

SEQ ID NO: 2569869 - RNA, 19 nt, Artificial Sequence
  Description of Artificial Sequence: Synthetic oligonucleotide
gagcacauagccaaacccu

SEQ ID NO: 2569870 - RNA, 19 nt, Artificial Sequence
  Description of Artificial Sequence: Synthetic oligonucleotide
agaacgcaugacucucagu

SEQ ID NO: 2569871 - RNA, 19 nt, Artificial Sequence
  Description of Artificial Sequence: Synthetic oligonucleotide
ggcaaauugccaacaaaca

SEQ ID NO: 2569872 - RNA, 19 nt, Artificial Sequence
  Description of Artificial Sequence: Synthetic oligonucleotide
gccgacuccugucuguggg

SEQ ID NO: 2569873 - RNA, 19 nt, Artificial Sequence
  Description of Artificial Sequence: Synthetic oligonucleotide
caugagaacugccuuuucu

SEQ ID NO: 2569874 - RNA, 19 nt, Artificial Sequence
  Description of Artificial Sequence: Synthetic oligonucleotide
agaucaacucgaauacgaa

SEQ ID NO: 2569875 - RNA, 19 nt, Artificial Sequence
  Description of Artificial Sequence: Synthetic oligonucleotide
cagaaaguguuccuccaaa

SEQ ID NO: 2569876 - RNA, 19 nt, Artificial Sequence
  Description of Artificial Sequence: Synthetic oligonucleotide
cagaacgaaaucguacaga

SEQ ID NO: 2569877 - RNA, 19 nt, Artificial Sequence
  Description of Artificial Sequence: Synthetic oligonucleotide
ugccgacuccugucugugg

SEQ ID NO: 2569878 - RNA, 19 nt, Artificial Sequence
  Description of Artificial Sequence: Synthetic oligonucleotide
cacaguccagaaaguguuc

SEQ ID NO: 2569879 - RNA, 19 nt, Artificial Sequence
  Description of Artificial Sequence: Synthetic oligonucleotide
ugguuucagaugcgagauc

SEQ ID NO: 2569880 - RNA, 19 nt, Artificial Sequence
  Description of Artificial Sequence: Synthetic oligonucleotide
ucccuagaggugguuucag

SEQ ID NO: 2569881 - RNA, 19 nt, Artificial Sequence
  Description of Artificial Sequence: Synthetic oligonucleotide
uggguuucucaagauccuc

SEQ ID NO: 2569882 - RNA, 19 nt, Artificial Sequence
  Description of Artificial Sequence: Synthetic oligonucleotide
aggaugaaauuuacguuuu

SEQ ID NO: 2569883 - RNA, 19 nt, Artificial Sequence
  Description of Artificial Sequence: Synthetic oligonucleotide
uggcguucuucaagcuuga

SEQ ID NO: 2569884 - RNA, 19 nt, Artificial Sequence
  Description of Artificial Sequence: Synthetic oligonucleotide
acucgaauacgaaauccuu

SEQ ID NO: 2569885 - RNA, 19 nt, Artificial Sequence
  Description of Artificial Sequence: Synthetic oligonucleotide
cuacauaugcguugauacu

SEQ ID NO: 2569886 - RNA, 19 nt, Artificial Sequence
  Description of Artificial Sequence: Synthetic oligonucleotide
agaggugguuucagaugcg

SEQ ID NO: 2569887 - RNA, 19 nt, Artificial Sequence
  Description of Artificial Sequence: Synthetic oligonucleotide
acgaaaucguacagauucu

SEQ ID NO: 2569888 - RNA, 19 nt, Artificial Sequence
  Description of Artificial Sequence: Synthetic oligonucleotide
cagaauuauuuaacuucaa

SEQ ID NO: 2569889 - RNA, 19 nt, Artificial Sequence
  Description of Artificial Sequence: Synthetic oligonucleotide
ccacaaugcucccacaguc

SEQ ID NO: 2569890 - RNA, 19 nt, Artificial Sequence
  Description of Artificial Sequence: Synthetic oligonucleotide
cuucaagcuugaauuugaa

SEQ ID NO: 2569891 - RNA, 19 nt, Artificial Sequence
  Description of Artificial Sequence: Synthetic oligonucleotide
gaggugguuucagaugcga

SEQ ID NO: 2569892 - RNA, 19 nt, Artificial Sequence
  Description of Artificial Sequence: Synthetic oligonucleotide
aggugguuucagaugcgag

SEQ ID NO: 2569893 - RNA, 19 nt, Artificial Sequence
  Description of Artificial Sequence: Synthetic oligonucleotide
gaaaucguacagauucuau

SEQ ID NO: 2569894 - RNA, 19 nt, Artificial Sequence
  Description of Artificial Sequence: Synthetic oligonucleotide
aucacagaacgaaaucgua

SEQ ID NO: 2569895 - RNA, 19 nt, Artificial Sequence
  Description of Artificial Sequence: Synthetic oligonucleotide
caagaugaacagcaucugu

SEQ ID NO: 2569896 - RNA, 19 nt, Artificial Sequence
  Description of Artificial Sequence: Synthetic oligonucleotide
uagauuuauuggcguucuu

SEQ ID NO: 2569897 - RNA, 19 nt, Artificial Sequence
  Description of Artificial Sequence: Synthetic oligonucleotide
gugcuuuuguagcagcacu

SEQ ID NO: 2569898 - RNA, 19 nt, Artificial Sequence
  Description of Artificial Sequence: Synthetic oligonucleotide
acguuuuauugcggccaac

SEQ ID NO: 2569899 - RNA, 19 nt, Artificial Sequence
  Description of Artificial Sequence: Synthetic oligonucleotide
cagugcuuuuguagcagca

SEQ ID NO: 2569900 - RNA, 19 nt, Artificial Sequence
  Description of Artificial Sequence: Synthetic oligonucleotide
gaugcgagaucaacucgaa

SEQ ID NO: 2569901 - RNA, 19 nt, Artificial Sequence
  Description of Artificial Sequence: Synthetic oligonucleotide
gcuggcaucacagaacgaa

SEQ ID NO: 2569902 - RNA, 19 nt, Artificial Sequence
  Description of Artificial Sequence: Synthetic oligonucleotide
caggcaaauugccaacaaa

SEQ ID NO: 2569903 - RNA, 19 nt, Artificial Sequence
  Description of Artificial Sequence: Synthetic oligonucleotide
gcagugcuuuuguagcagc

SEQ ID NO: 2569904 - RNA, 19 nt, Artificial Sequence
  Description of Artificial Sequence: Synthetic oligonucleotide
acauaugcguugauacuuu

SEQ ID NO: 2569905 - RNA, 19 nt, Artificial Sequence
  Description of Artificial Sequence: Synthetic oligonucleotide
cuuuggaaguaaacugagu

SEQ ID NO: 2569906 - RNA, 19 nt, Artificial Sequence
  Description of Artificial Sequence: Synthetic oligonucleotide
cuucccauuagcucagaau

SEQ ID NO: 2569907 - RNA, 19 nt, Artificial Sequence
  Description of Artificial Sequence: Synthetic oligonucleotide
ggaagauuccccacaaaua

SEQ ID NO: 2569908 - RNA, 19 nt, Artificial Sequence
  Description of Artificial Sequence: Synthetic oligonucleotide
ugcuggcaucacagaacga

SEQ ID NO: 2569909 - RNA, 19 nt, Artificial Sequence
  Description of Artificial Sequence: Synthetic oligonucleotide
gcaagaugaacagcaucug

SEQ ID NO: 2569910 - RNA, 19 nt, Artificial Sequence
  Description of Artificial Sequence: Synthetic oligonucleotide
augcgagaucaacucgaau

SEQ ID NO: 2569911 - RNA, 19 nt, Artificial Sequence
  Description of Artificial Sequence: Synthetic oligonucleotide
guucuucaagcuugaauuu

SEQ ID NO: 2569912 - RNA, 19 nt, Artificial Sequence
  Description of Artificial Sequence: Synthetic oligonucleotide
aguguucccucugcuggca

SEQ ID NO: 2569913 - RNA, 19 nt, Artificial Sequence
  Description of Artificial Sequence: Synthetic oligonucleotide
aguuuugcuuagauuuauu

SEQ ID NO: 2569914 - RNA, 19 nt, Artificial Sequence
  Description of Artificial Sequence: Synthetic oligonucleotide
uagcagcacucucauccuu

SEQ ID NO: 2569915 - RNA, 19 nt, Artificial Sequence
  Description of Artificial Sequence: Synthetic oligonucleotide
acagaacgcaugacucuca

SEQ ID NO: 2569916 - RNA, 19 nt, Artificial Sequence
  Description of Artificial Sequence: Synthetic oligonucleotide
gaguuuugcuuagauuuau

SEQ ID NO: 2569917 - RNA, 19 nt, Artificial Sequence
  Description of Artificial Sequence: Synthetic oligonucleotide
cguacagauucuaucuguc

SEQ ID NO: 2569918 - RNA, 19 nt, Artificial Sequence
  Description of Artificial Sequence: Synthetic oligonucleotide
uacugaucucuugucccua

SEQ ID NO: 2569919 - RNA, 19 nt, Artificial Sequence
  Description of Artificial Sequence: Synthetic oligonucleotide
guuuuauugcggccaacuu

SEQ ID NO: 2569920 - RNA, 19 nt, Artificial Sequence
  Description of Artificial Sequence: Synthetic oligonucleotide
agauccucacugccacaau

SEQ ID NO: 2569921 - RNA, 19 nt, Artificial Sequence
  Description of Artificial Sequence: Synthetic oligonucleotide
guauucucaaagagcacau

SEQ ID NO: 2569922 - RNA, 19 nt, Artificial Sequence
  Description of Artificial Sequence: Synthetic oligonucleotide
cguucuucaagcuugaauu

SEQ ID NO: 2569923 - RNA, 19 nt, Artificial Sequence
  Description of Artificial Sequence: Synthetic oligonucleotide
uacaugugacaggcaaauu

SEQ ID NO: 2569924 - RNA, 19 nt, Artificial Sequence
  Description of Artificial Sequence: Synthetic oligonucleotide
ucuucaggguuggguggga

SEQ ID NO: 2569925 - RNA, 19 nt, Artificial Sequence
  Description of Artificial Sequence: Synthetic oligonucleotide
cuaucuguccauacucuuu

SEQ ID NO: 2569926 - RNA, 19 nt, Artificial Sequence
  Description of Artificial Sequence: Synthetic oligonucleotide
ggguuucucaagauccuca

SEQ ID NO: 2569927 - RNA, 19 nt, Artificial Sequence
  Description of Artificial Sequence: Synthetic oligonucleotide
guagcagcacucucauccu

SEQ ID NO: 2569928 - RNA, 19 nt, Artificial Sequence
  Description of Artificial Sequence: Synthetic oligonucleotide
gccccauuucucugcagug

SEQ ID NO: 2569929 - RNA, 19 nt, Artificial Sequence
  Description of Artificial Sequence: Synthetic oligonucleotide
ccaacaaacacaguccucu

SEQ ID NO: 2569930 - RNA, 19 nt, Artificial Sequence
  Description of Artificial Sequence: Synthetic oligonucleotide
agcagcacucucauccuua

SEQ ID NO: 2569931 - RNA, 19 nt, Artificial Sequence
  Description of Artificial Sequence: Synthetic oligonucleotide
cucugccgacuccugucug

SEQ ID NO: 2569932 - RNA, 19 nt, Artificial Sequence
  Description of Artificial Sequence: Synthetic oligonucleotide
acacuacauaugcguugau

SEQ ID NO: 2569933 - RNA, 19 nt, Artificial Sequence
  Description of Artificial Sequence: Synthetic oligonucleotide
gcucagaauuauuuaacuu

SEQ ID NO: 2569934 - RNA, 19 nt, Artificial Sequence
  Description of Artificial Sequence: Synthetic oligonucleotide
cguugauacuuuucugguc

SEQ ID NO: 2569935 - RNA, 19 nt, Artificial Sequence
  Description of Artificial Sequence: Synthetic oligonucleotide
cugaucucuugucccuaga

SEQ ID NO: 2569936 - RNA, 19 nt, Artificial Sequence
  Description of Artificial Sequence: Synthetic oligonucleotide
ggaaugucuuuggaaguaa

SEQ ID NO: 2569937 - RNA, 19 nt, Artificial Sequence
  Description of Artificial Sequence: Synthetic oligonucleotide
gcuugaauuugaauuuugu

SEQ ID NO: 2569938 - RNA, 19 nt, Artificial Sequence
  Description of Artificial Sequence: Synthetic oligonucleotide
ccaaagcagccucuucaac

SEQ ID NO: 2569939 - RNA, 19 nt, Artificial Sequence
  Description of Artificial Sequence: Synthetic oligonucleotide
cugccgacuccugucugug

SEQ ID NO: 2569940 - RNA, 19 nt, Artificial Sequence
  Description of Artificial Sequence: Synthetic oligonucleotide
gcguugauacuuuucuggu

SEQ ID NO: 2569941 - RNA, 19 nt, Artificial Sequence
  Description of Artificial Sequence: Synthetic oligonucleotide
ggaugaaauuuacguuuua

SEQ ID NO: 2569942 - RNA, 19 nt, Artificial Sequence
  Description of Artificial Sequence: Synthetic oligonucleotide
gucccuagaggugguuuca

SEQ ID NO: 2569943 - RNA, 19 nt, Artificial Sequence
  Description of Artificial Sequence: Synthetic oligonucleotide
cccacaaauacugaucucu

SEQ ID NO: 2569944 - RNA, 19 nt, Artificial Sequence
  Description of Artificial Sequence: Synthetic oligonucleotide
cagcaucuguauucucaaa

SEQ ID NO: 2569945 - RNA, 19 nt, Artificial Sequence
  Description of Artificial Sequence: Synthetic oligonucleotide
gcuuagauuuauuggcguu

SEQ ID NO: 2569946 - RNA, 19 nt, Artificial Sequence
  Description of Artificial Sequence: Synthetic oligonucleotide
ccuagaggugguuucagau

SEQ ID NO: 2569947 - RNA, 19 nt, Artificial Sequence
  Description of Artificial Sequence: Synthetic oligonucleotide
gaacgaaaucguacagauu

SEQ ID NO: 2569948 - RNA, 19 nt, Artificial Sequence
  Description of Artificial Sequence: Synthetic oligonucleotide
gcguucuucaagcuugaau

SEQ ID NO: 2569949 - RNA, 19 nt, Artificial Sequence
  Description of Artificial Sequence: Synthetic oligonucleotide
caacuuuguaaggaagauu

SEQ ID NO: 2569950 - RNA, 19 nt, Artificial Sequence
  Description of Artificial Sequence: Synthetic oligonucleotide
gcuuuuguagcagcacucu

SEQ ID NO: 2569951 - RNA, 19 nt, Artificial Sequence
  Description of Artificial Sequence: Synthetic oligonucleotide
cauaugcguugauacuuuu

SEQ ID NO: 2569952 - RNA, 19 nt, Artificial Sequence
  Description of Artificial Sequence: Synthetic oligonucleotide
ccaaacccucugccgacuc

SEQ ID NO: 2569953 - RNA, 19 nt, Artificial Sequence
  Description of Artificial Sequence: Synthetic oligonucleotide
cugccacaaugcucccaca

SEQ ID NO: 2569954 - RNA, 19 nt, Artificial Sequence
  Description of Artificial Sequence: Synthetic oligonucleotide
cgcucuucuucaggguugg

SEQ ID NO: 2569955 - RNA, 19 nt, Artificial Sequence
  Description of Artificial Sequence: Synthetic oligonucleotide
cucccacaguccagaaagu

SEQ ID NO: 2569956 - RNA, 19 nt, Artificial Sequence
  Description of Artificial Sequence: Synthetic oligonucleotide
cgcaugacucucaguuuuc

SEQ ID NO: 2569957 - RNA, 19 nt, Artificial Sequence
  Description of Artificial Sequence: Synthetic oligonucleotide
cccuagaggugguuucaga

SEQ ID NO: 2569958 - RNA, 19 nt, Artificial Sequence
  Description of Artificial Sequence: Synthetic oligonucleotide
cagcacucucauccuuaaa

SEQ ID NO: 2569959 - RNA, 19 nt, Artificial Sequence
  Description of Artificial Sequence: Synthetic oligonucleotide
cagccucuucaacuuugua

SEQ ID NO: 2569960 - RNA, 19 nt, Artificial Sequence
  Description of Artificial Sequence: Synthetic oligonucleotide
gcaugacucucaguuuucu

SEQ ID NO: 2569961 - RNA, 19 nt, Artificial Sequence
  Description of Artificial Sequence: Synthetic oligonucleotide
cccauuagcucagaauuau

SEQ ID NO: 2569962 - RNA, 19 nt, Artificial Sequence
  Description of Artificial Sequence: Synthetic oligonucleotide
cgaaaucguacagauucua

SEQ ID NO: 2569963 - RNA, 19 nt, Artificial Sequence
  Description of Artificial Sequence: Synthetic oligonucleotide
ccucugcuggcaucacaga

SEQ ID NO: 2569964 - RNA, 19 nt, Artificial Sequence
  Description of Artificial Sequence: Synthetic oligonucleotide
cuucaggguugggugggau

SEQ ID NO: 2569965 - RNA, 19 nt, Artificial Sequence
  Description of Artificial Sequence: Synthetic oligonucleotide
ccauuagcucagaauuauu

SEQ ID NO: 2569966 - RNA, 19 nt, Artificial Sequence
  Description of Artificial Sequence: Synthetic oligonucleotide
cguuaguguucccucugcu

SEQ ID NO: 2569967 - RNA, 19 nt, Artificial Sequence
  Description of Artificial Sequence: Synthetic oligonucleotide
ggcguucuucaagcuugaa

SEQ ID NO: 2569968 - RNA, 19 nt, Artificial Sequence
  Description of Artificial Sequence: Synthetic oligonucleotide
ccucugccgacuccugucu

SEQ ID NO: 2569969 - RNA, 19 nt, Artificial Sequence
  Description of Artificial Sequence: Synthetic oligonucleotide
cuugucccuagaggugguu

SEQ ID NO: 2569970 - RNA, 19 nt, Artificial Sequence
  Description of Artificial Sequence: Synthetic oligonucleotide
gccaaacccucugccgacu

SEQ ID NO: 2569971 - RNA, 19 nt, Artificial Sequence
  Description of Artificial Sequence: Synthetic oligonucleotide
cuccugucuguggguuucu

SEQ ID NO: 2569972 - RNA, 19 nt, Artificial Sequence
  Description of Artificial Sequence: Synthetic oligonucleotide
ccgacuccugucugugggu

SEQ ID NO: 2569973 - RNA, 19 nt, Artificial Sequence
  Description of Artificial Sequence: Synthetic oligonucleotide
cgaauacgaaauccuucuu

SEQ ID NO: 2569974 - RNA, 19 nt, Artificial Sequence
  Description of Artificial Sequence: Synthetic oligonucleotide
cgacuccugucuguggguu

SEQ ID NO: 2569975 - RNA, 19 nt, Artificial Sequence
  Description of Artificial Sequence: Synthetic oligonucleotide
acagguauaaaacugcacc

SEQ ID NO: 2569976 - RNA, 19 nt, Artificial Sequence
  Description of Artificial Sequence: Synthetic oligonucleotide
ugagaauauacauaagugg

SEQ ID NO: 2569977 - RNA, 19 nt, Artificial Sequence
  Description of Artificial Sequence: Synthetic oligonucleotide
aaaagauucuguuccuugc

SEQ ID NO: 2569978 - RNA, 19 nt, Artificial Sequence
  Description of Artificial Sequence: Synthetic oligonucleotide
aguagcuucagacaagagc

SEQ ID NO: 2569979 - RNA, 19 nt, Artificial Sequence
  Description of Artificial Sequence: Synthetic oligonucleotide
aaaguucuaaaugccaucc

SEQ ID NO: 2569980 - RNA, 19 nt, Artificial Sequence
  Description of Artificial Sequence: Synthetic oligonucleotide
uuauauauuuauauugggu

SEQ ID NO: 2569981 - RNA, 19 nt, Artificial Sequence
  Description of Artificial Sequence: Synthetic oligonucleotide
agugagaauauacauaagu

SEQ ID NO: 2569982 - RNA, 19 nt, Artificial Sequence
  Description of Artificial Sequence: Synthetic oligonucleotide
cagacaagagcuaagagug

SEQ ID NO: 2569983 - RNA, 19 nt, Artificial Sequence
  Description of Artificial Sequence: Synthetic oligonucleotide
uucuaugugacugucauug

SEQ ID NO: 2569984 - RNA, 19 nt, Artificial Sequence
  Description of Artificial Sequence: Synthetic oligonucleotide
uauauuuauauuggguggg

SEQ ID NO: 2569985 - RNA, 19 nt, Artificial Sequence
  Description of Artificial Sequence: Synthetic oligonucleotide
gacaucaggaaugagaggc

SEQ ID NO: 2569986 - RNA, 19 nt, Artificial Sequence
  Description of Artificial Sequence: Synthetic oligonucleotide
aggaaugagaggcauuacc

SEQ ID NO: 2569987 - RNA, 19 nt, Artificial Sequence
  Description of Artificial Sequence: Synthetic oligonucleotide
uauauauauuuauauauuu

SEQ ID NO: 2569988 - RNA, 19 nt, Artificial Sequence
  Description of Artificial Sequence: Synthetic oligonucleotide
uguaaccugaccuggagcc

SEQ ID NO: 2569989 - RNA, 19 nt, Artificial Sequence
  Description of Artificial Sequence: Synthetic oligonucleotide
ucagacaagagcuaagagu

SEQ ID NO: 2569990 - RNA, 19 nt, Artificial Sequence
  Description of Artificial Sequence: Synthetic oligonucleotide
cuaaaugccauccucuggc

SEQ ID NO: 2569991 - RNA, 19 nt, Artificial Sequence
  Description of Artificial Sequence: Synthetic oligonucleotide
aguucuaaaugccauccuc

SEQ ID NO: 2569992 - RNA, 19 nt, Artificial Sequence
  Description of Artificial Sequence: Synthetic oligonucleotide
uacauaaguggacacaggu

SEQ ID NO: 2569993 - RNA, 19 nt, Artificial Sequence
  Description of Artificial Sequence: Synthetic oligonucleotide
aguucaggaaucugcuucc

SEQ ID NO: 2569994 - RNA, 19 nt, Artificial Sequence
  Description of Artificial Sequence: Synthetic oligonucleotide
auuuauauuggguggguug

SEQ ID NO: 2569995 - RNA, 19 nt, Artificial Sequence
  Description of Artificial Sequence: Synthetic oligonucleotide
ugacuaaguagcuucagac

SEQ ID NO: 2569996 - RNA, 19 nt, Artificial Sequence
  Description of Artificial Sequence: Synthetic oligonucleotide
agguugacuaaguagcuuc

SEQ ID NO: 2569997 - RNA, 19 nt, Artificial Sequence
  Description of Artificial Sequence: Synthetic oligonucleotide
augaugucaaagcugaacu

SEQ ID NO: 2569998 - RNA, 19 nt, Artificial Sequence
  Description of Artificial Sequence: Synthetic oligonucleotide
ucaaagcugaacuugugcu

SEQ ID NO: 2569999 - RNA, 19 nt, Artificial Sequence
  Description of Artificial Sequence: Synthetic oligonucleotide
gaaaagauucuguuccuug

SEQ ID NO: 2570000 - RNA, 19 nt, Artificial Sequence
  Description of Artificial Sequence: Synthetic oligonucleotide
aggagaaaagauucuguuc

SEQ ID NO: 2570001 - RNA, 19 nt, Artificial Sequence
  Description of Artificial Sequence: Synthetic oligonucleotide
gaggcauuaccccacaggc

SEQ ID NO: 2570002 - RNA, 19 nt, Artificial Sequence
  Description of Artificial Sequence: Synthetic oligonucleotide
aacugcaccuucuauguga

SEQ ID NO: 2570003 - RNA, 19 nt, Artificial Sequence
  Description of Artificial Sequence: Synthetic oligonucleotide
uaugugacugucauugcca

SEQ ID NO: 2570004 - RNA, 19 nt, Artificial Sequence
  Description of Artificial Sequence: Synthetic oligonucleotide
gguaauguugcccuggucc

SEQ ID NO: 2570005 - RNA, 19 nt, Artificial Sequence
  Description of Artificial Sequence: Synthetic oligonucleotide
agaauauacauaaguggac

SEQ ID NO: 2570006 - RNA, 19 nt, Artificial Sequence
  Description of Artificial Sequence: Synthetic oligonucleotide
agauucuguuccuugcugg

SEQ ID NO: 2570007 - RNA, 19 nt, Artificial Sequence
  Description of Artificial Sequence: Synthetic oligonucleotide
gaugucaaagcugaacuug

SEQ ID NO: 2570008 - RNA, 19 nt, Artificial Sequence
  Description of Artificial Sequence: Synthetic oligonucleotide
gaaugagaggcauuacccc

SEQ ID NO: 2570009 - RNA, 19 nt, Artificial Sequence
  Description of Artificial Sequence: Synthetic oligonucleotide
uauuggguggguugugugg

SEQ ID NO: 2570010 - RNA, 19 nt, Artificial Sequence
  Description of Artificial Sequence: Synthetic oligonucleotide
uuuggugauugguucuugg

SEQ ID NO: 2570011 - RNA, 19 nt, Artificial Sequence
  Description of Artificial Sequence: Synthetic oligonucleotide
aagauucuguuccuugcug

SEQ ID NO: 2570012 - RNA, 19 nt, Artificial Sequence
  Description of Artificial Sequence: Synthetic oligonucleotide
ccaguaaaguucuaaaugc

SEQ ID NO: 2570013 - RNA, 19 nt, Artificial Sequence
  Description of Artificial Sequence: Synthetic oligonucleotide
uucagacaagagcuaagag

SEQ ID NO: 2570014 - RNA, 19 nt, Artificial Sequence
  Description of Artificial Sequence: Synthetic oligonucleotide
uuagagaucugguuucugu

SEQ ID NO: 2570015 - RNA, 19 nt, Artificial Sequence
  Description of Artificial Sequence: Synthetic oligonucleotide
aacuugugcugguagucag

SEQ ID NO: 2570016 - RNA, 19 nt, Artificial Sequence
  Description of Artificial Sequence: Synthetic oligonucleotide
gaauauacauaaguggaca

SEQ ID NO: 2570017 - RNA, 19 nt, Artificial Sequence
  Description of Artificial Sequence: Synthetic oligonucleotide
agaggcauuaccccacagg

SEQ ID NO: 2570018 - RNA, 19 nt, Artificial Sequence
  Description of Artificial Sequence: Synthetic oligonucleotide
uagggagugagaauauaca

SEQ ID NO: 2570019 - RNA, 19 nt, Artificial Sequence
  Description of Artificial Sequence: Synthetic oligonucleotide
caguaaaguucuaaaugcc

SEQ ID NO: 2570020 - RNA, 19 nt, Artificial Sequence
  Description of Artificial Sequence: Synthetic oligonucleotide
accuuagagaucugguuuc

SEQ ID NO: 2570021 - RNA, 19 nt, Artificial Sequence
  Description of Artificial Sequence: Synthetic oligonucleotide
uuuauauuggguggguugu

SEQ ID NO: 2570022 - RNA, 19 nt, Artificial Sequence
  Description of Artificial Sequence: Synthetic oligonucleotide
ugcaccuucuaugugacug

SEQ ID NO: 2570023 - RNA, 19 nt, Artificial Sequence
  Description of Artificial Sequence: Synthetic oligonucleotide
uugacuaaguagcuucaga

SEQ ID NO: 2570024 - RNA, 19 nt, Artificial Sequence
  Description of Artificial Sequence: Synthetic oligonucleotide
gacagaggguggcauaggg

SEQ ID NO: 2570025 - RNA, 19 nt, Artificial Sequence
  Description of Artificial Sequence: Synthetic oligonucleotide
uuguccugaguccugcucc

SEQ ID NO: 2570026 - RNA, 19 nt, Artificial Sequence
  Description of Artificial Sequence: Synthetic oligonucleotide
gacacagguauaaaacugc

SEQ ID NO: 2570027 - RNA, 19 nt, Artificial Sequence
  Description of Artificial Sequence: Synthetic oligonucleotide
cuaugugacugucauugcc

SEQ ID NO: 2570028 - RNA, 19 nt, Artificial Sequence
  Description of Artificial Sequence: Synthetic oligonucleotide
aaugccauccucuggcgau

SEQ ID NO: 2570029 - RNA, 19 nt, Artificial Sequence
  Description of Artificial Sequence: Synthetic oligonucleotide
uauaaaacugcaccuucua

SEQ ID NO: 2570030 - RNA, 19 nt, Artificial Sequence
  Description of Artificial Sequence: Synthetic oligonucleotide
ucauugccaguaaaguucu

SEQ ID NO: 2570031 - RNA, 19 nt, Artificial Sequence
  Description of Artificial Sequence: Synthetic oligonucleotide
uucuaaaugccauccucug

SEQ ID NO: 2570032 - RNA, 19 nt, Artificial Sequence
  Description of Artificial Sequence: Synthetic oligonucleotide
ucuugggucgcacgguggg

SEQ ID NO: 2570033 - RNA, 19 nt, Artificial Sequence
  Description of Artificial Sequence: Synthetic oligonucleotide
uggugauugguucuuggac

SEQ ID NO: 2570034 - RNA, 19 nt, Artificial Sequence
  Description of Artificial Sequence: Synthetic oligonucleotide
ugggcaugaugucaaagcu

SEQ ID NO: 2570035 - RNA, 19 nt, Artificial Sequence
  Description of Artificial Sequence: Synthetic oligonucleotide
uucuuguaaccugaccugg

SEQ ID NO: 2570036 - RNA, 19 nt, Artificial Sequence
  Description of Artificial Sequence: Synthetic oligonucleotide
uaaaguucuaaaugccauc

SEQ ID NO: 2570037 - RNA, 19 nt, Artificial Sequence
  Description of Artificial Sequence: Synthetic oligonucleotide
uuccucuugggucgcacgg

SEQ ID NO: 2570038 - RNA, 19 nt, Artificial Sequence
  Description of Artificial Sequence: Synthetic oligonucleotide
uaaaugccauccucuggcg

SEQ ID NO: 2570039 - RNA, 19 nt, Artificial Sequence
  Description of Artificial Sequence: Synthetic oligonucleotide
gucaaagcugaacuugugc

SEQ ID NO: 2570040 - RNA, 19 nt, Artificial Sequence
  Description of Artificial Sequence: Synthetic oligonucleotide
uaaguagcuucagacaaga

SEQ ID NO: 2570041 - RNA, 19 nt, Artificial Sequence
  Description of Artificial Sequence: Synthetic oligonucleotide
cucuggguaagccuugucc

SEQ ID NO: 2570042 - RNA, 19 nt, Artificial Sequence
  Description of Artificial Sequence: Synthetic oligonucleotide
ggagugagaauauacauaa

SEQ ID NO: 2570043 - RNA, 19 nt, Artificial Sequence
  Description of Artificial Sequence: Synthetic oligonucleotide
ugcccuuccucuugggucg

SEQ ID NO: 2570044 - RNA, 19 nt, Artificial Sequence
  Description of Artificial Sequence: Synthetic oligonucleotide
uuguaaccugaccuggagc

SEQ ID NO: 2570045 - RNA, 19 nt, Artificial Sequence
  Description of Artificial Sequence: Synthetic oligonucleotide
ggcauuaccccacaggcag

SEQ ID NO: 2570046 - RNA, 19 nt, Artificial Sequence
  Description of Artificial Sequence: Synthetic oligonucleotide
gucauugccaguaaaguuc

SEQ ID NO: 2570047 - RNA, 19 nt, Artificial Sequence
  Description of Artificial Sequence: Synthetic oligonucleotide
cuucuuguaaccugaccug

SEQ ID NO: 2570048 - RNA, 19 nt, Artificial Sequence
  Description of Artificial Sequence: Synthetic oligonucleotide
gccaguaaaguucuaaaug

SEQ ID NO: 2570049 - RNA, 19 nt, Artificial Sequence
  Description of Artificial Sequence: Synthetic oligonucleotide
gacuaaguagcuucagaca

SEQ ID NO: 2570050 - RNA, 19 nt, Artificial Sequence
  Description of Artificial Sequence: Synthetic oligonucleotide
gacugccugagacaucagg

SEQ ID NO: 2570051 - RNA, 19 nt, Artificial Sequence
  Description of Artificial Sequence: Synthetic oligonucleotide
uuuccuuuggugauugguu

SEQ ID NO: 2570052 - RNA, 19 nt, Artificial Sequence
  Description of Artificial Sequence: Synthetic oligonucleotide
uagucaggggcauaguccu

SEQ ID NO: 2570053 - RNA, 19 nt, Artificial Sequence
  Description of Artificial Sequence: Synthetic oligonucleotide
ugguucuuggaccccagca

SEQ ID NO: 2570054 - RNA, 19 nt, Artificial Sequence
  Description of Artificial Sequence: Synthetic oligonucleotide
aguggacacagguauaaaa

SEQ ID NO: 2570055 - RNA, 19 nt, Artificial Sequence
  Description of Artificial Sequence: Synthetic oligonucleotide
cuaaguagcuucagacaag

SEQ ID NO: 2570056 - RNA, 19 nt, Artificial Sequence
  Description of Artificial Sequence: Synthetic oligonucleotide
gugauugguucuuggaccc

SEQ ID NO: 2570057 - RNA, 19 nt, Artificial Sequence
  Description of Artificial Sequence: Synthetic oligonucleotide
gagagugaucgccagcccc

SEQ ID NO: 2570058 - RNA, 19 nt, Artificial Sequence
  Description of Artificial Sequence: Synthetic oligonucleotide
aaguucuaaaugccauccu

SEQ ID NO: 2570059 - RNA, 19 nt, Artificial Sequence
  Description of Artificial Sequence: Synthetic oligonucleotide
caaagcugaacuugugcug

SEQ ID NO: 2570060 - RNA, 19 nt, Artificial Sequence
  Description of Artificial Sequence: Synthetic oligonucleotide
acugucauugccaguaaag

SEQ ID NO: 2570061 - RNA, 19 nt, Artificial Sequence
  Description of Artificial Sequence: Synthetic oligonucleotide
ugucauugccaguaaaguu

SEQ ID NO: 2570062 - RNA, 19 nt, Artificial Sequence
  Description of Artificial Sequence: Synthetic oligonucleotide
agggagugagaauauacau

SEQ ID NO: 2570063 - RNA, 19 nt, Artificial Sequence
  Description of Artificial Sequence: Synthetic oligonucleotide
caugaugucaaagcugaac

SEQ ID NO: 2570064 - RNA, 19 nt, Artificial Sequence
  Description of Artificial Sequence: Synthetic oligonucleotide
cuuguaaccugaccuggag

SEQ ID NO: 2570065 - RNA, 19 nt, Artificial Sequence
  Description of Artificial Sequence: Synthetic oligonucleotide
ggaaugagaggcauuaccc

SEQ ID NO: 2570066 - RNA, 19 nt, Artificial Sequence
  Description of Artificial Sequence: Synthetic oligonucleotide
ucagcggagagugaucgcc

SEQ ID NO: 2570067 - RNA, 19 nt, Artificial Sequence
  Description of Artificial Sequence: Synthetic oligonucleotide
aaaugccauccucuggcga

SEQ ID NO: 2570068 - RNA, 19 nt, Artificial Sequence
  Description of Artificial Sequence: Synthetic oligonucleotide
auauacauaaguggacaca

SEQ ID NO: 2570069 - RNA, 19 nt, Artificial Sequence
  Description of Artificial Sequence: Synthetic oligonucleotide
ucaggaaugagaggcauua

SEQ ID NO: 2570070 - RNA, 19 nt, Artificial Sequence
  Description of Artificial Sequence: Synthetic oligonucleotide
ggcagguugacuaaguagc

SEQ ID NO: 2570071 - RNA, 19 nt, Artificial Sequence
  Description of Artificial Sequence: Synthetic oligonucleotide
aguauccaggccaggagcg

SEQ ID NO: 2570072 - RNA, 19 nt, Artificial Sequence
  Description of Artificial Sequence: Synthetic oligonucleotide
ugucaaagcugaacuugug

SEQ ID NO: 2570073 - RNA, 19 nt, Artificial Sequence
  Description of Artificial Sequence: Synthetic oligonucleotide
guagucaggggcauagucc

SEQ ID NO: 2570074 - RNA, 19 nt, Artificial Sequence
  Description of Artificial Sequence: Synthetic oligonucleotide
ucuuguaaccugaccugga

SEQ ID NO: 2570075 - RNA, 19 nt, Artificial Sequence
  Description of Artificial Sequence: Synthetic oligonucleotide
uccuugcuggacuuguggc

SEQ ID NO: 2570076 - RNA, 19 nt, Artificial Sequence
  Description of Artificial Sequence: Synthetic oligonucleotide
uuggugauugguucuugga

SEQ ID NO: 2570077 - RNA, 19 nt, Artificial Sequence
  Description of Artificial Sequence: Synthetic oligonucleotide
augugacugucauugccag

SEQ ID NO: 2570078 - RNA, 19 nt, Artificial Sequence
  Description of Artificial Sequence: Synthetic oligonucleotide
guuucuguuccuguggcug

SEQ ID NO: 2570079 - RNA, 19 nt, Artificial Sequence
  Description of Artificial Sequence: Synthetic oligonucleotide
uaaguggacacagguauaa

SEQ ID NO: 2570080 - RNA, 19 nt, Artificial Sequence
  Description of Artificial Sequence: Synthetic oligonucleotide
ucuaugugacugucauugc

SEQ ID NO: 2570081 - RNA, 19 nt, Artificial Sequence
  Description of Artificial Sequence: Synthetic oligonucleotide
ugccaguaaaguucuaaau

SEQ ID NO: 2570082 - RNA, 19 nt, Artificial Sequence
  Description of Artificial Sequence: Synthetic oligonucleotide
aggggcauaguccugcagu

SEQ ID NO: 2570083 - RNA, 19 nt, Artificial Sequence
  Description of Artificial Sequence: Synthetic oligonucleotide
aagagcuaagagugcucug

SEQ ID NO: 2570084 - RNA, 19 nt, Artificial Sequence
  Description of Artificial Sequence: Synthetic oligonucleotide
agacaucaggaaugagagg

SEQ ID NO: 2570085 - RNA, 19 nt, Artificial Sequence
  Description of Artificial Sequence: Synthetic oligonucleotide
cagugcuggguaauguugc

SEQ ID NO: 2570086 - RNA, 19 nt, Artificial Sequence
  Description of Artificial Sequence: Synthetic oligonucleotide
uugccaguaaaguucuaaa

SEQ ID NO: 2570087 - RNA, 19 nt, Artificial Sequence
  Description of Artificial Sequence: Synthetic oligonucleotide
uggguagggagugagaaua

SEQ ID NO: 2570088 - RNA, 19 nt, Artificial Sequence
  Description of Artificial Sequence: Synthetic oligonucleotide
auauuggguggguugugug

SEQ ID NO: 2570089 - RNA, 19 nt, Artificial Sequence
  Description of Artificial Sequence: Synthetic oligonucleotide
aaacugcaccuucuaugug

SEQ ID NO: 2570090 - RNA, 19 nt, Artificial Sequence
  Description of Artificial Sequence: Synthetic oligonucleotide
guagggagugagaauauac

SEQ ID NO: 2570091 - RNA, 19 nt, Artificial Sequence
  Description of Artificial Sequence: Synthetic oligonucleotide
uguguggguagggagugag

SEQ ID NO: 2570092 - RNA, 19 nt, Artificial Sequence
  Description of Artificial Sequence: Synthetic oligonucleotide
aggaaucugcuucccagug

SEQ ID NO: 2570093 - RNA, 19 nt, Artificial Sequence
  Description of Artificial Sequence: Synthetic oligonucleotide
cuggcgaucuuuccuuugg

SEQ ID NO: 2570094 - RNA, 19 nt, Artificial Sequence
  Description of Artificial Sequence: Synthetic oligonucleotide
aucgccagccccaguaucc

SEQ ID NO: 2570095 - RNA, 19 nt, Artificial Sequence
  Description of Artificial Sequence: Synthetic oligonucleotide
agccccaguauccaggcca

SEQ ID NO: 2570096 - RNA, 19 nt, Artificial Sequence
  Description of Artificial Sequence: Synthetic oligonucleotide
gagcuaagagugcucugag

SEQ ID NO: 2570097 - RNA, 19 nt, Artificial Sequence
  Description of Artificial Sequence: Synthetic oligonucleotide
cauaaguggacacagguau

SEQ ID NO: 2570098 - RNA, 19 nt, Artificial Sequence
  Description of Artificial Sequence: Synthetic oligonucleotide
agagcuaagagugcucuga

SEQ ID NO: 2570099 - RNA, 19 nt, Artificial Sequence
  Description of Artificial Sequence: Synthetic oligonucleotide
uccucuggcgaucuuuccu

SEQ ID NO: 2570100 - RNA, 19 nt, Artificial Sequence
  Description of Artificial Sequence: Synthetic oligonucleotide
auaguccugcaguucagga

SEQ ID NO: 2570101 - RNA, 19 nt, Artificial Sequence
  Description of Artificial Sequence: Synthetic oligonucleotide
gguauaaaacugcaccuuc

SEQ ID NO: 2570102 - RNA, 19 nt, Artificial Sequence
  Description of Artificial Sequence: Synthetic oligonucleotide
uucaggaaucugcuuccca

SEQ ID NO: 2570103 - RNA, 19 nt, Artificial Sequence
  Description of Artificial Sequence: Synthetic oligonucleotide
ugaacuugugcugguaguc

SEQ ID NO: 2570104 - RNA, 19 nt, Artificial Sequence
  Description of Artificial Sequence: Synthetic oligonucleotide
uauauuggguggguugugu

SEQ ID NO: 2570105 - RNA, 19 nt, Artificial Sequence
  Description of Artificial Sequence: Synthetic oligonucleotide
cacagguauaaaacugcac

SEQ ID NO: 2570106 - RNA, 19 nt, Artificial Sequence
  Description of Artificial Sequence: Synthetic oligonucleotide
uucccagugcucaccuuag

SEQ ID NO: 2570107 - RNA, 19 nt, Artificial Sequence
  Description of Artificial Sequence: Synthetic oligonucleotide
aggacugccugagacauca

SEQ ID NO: 2570108 - RNA, 19 nt, Artificial Sequence
  Description of Artificial Sequence: Synthetic oligonucleotide
gaaucugcuucccagugcu

SEQ ID NO: 2570109 - RNA, 19 nt, Artificial Sequence
  Description of Artificial Sequence: Synthetic oligonucleotide
gguucuuggaccccagcag

SEQ ID NO: 2570110 - RNA, 19 nt, Artificial Sequence
  Description of Artificial Sequence: Synthetic oligonucleotide
uugcccuuccucuuggguc

SEQ ID NO: 2570111 - RNA, 19 nt, Artificial Sequence
  Description of Artificial Sequence: Synthetic oligonucleotide
ugccugagacaucaggaau

SEQ ID NO: 2570112 - RNA, 19 nt, Artificial Sequence
  Description of Artificial Sequence: Synthetic oligonucleotide
gaggguggcauaggguugg

SEQ ID NO: 2570113 - RNA, 19 nt, Artificial Sequence
  Description of Artificial Sequence: Synthetic oligonucleotide
agacaagagcuaagagugc

SEQ ID NO: 2570114 - RNA, 19 nt, Artificial Sequence
  Description of Artificial Sequence: Synthetic oligonucleotide
uugccuggcuucuuguaac

SEQ ID NO: 2570115 - RNA, 19 nt, Artificial Sequence
  Description of Artificial Sequence: Synthetic oligonucleotide
augagaggcauuaccccac

SEQ ID NO: 2570116 - RNA, 19 nt, Artificial Sequence
  Description of Artificial Sequence: Synthetic oligonucleotide
auccucuggcgaucuuucc

SEQ ID NO: 2570117 - RNA, 19 nt, Artificial Sequence
  Description of Artificial Sequence: Synthetic oligonucleotide
uggacuuguggcagugcug

SEQ ID NO: 2570118 - RNA, 19 nt, Artificial Sequence
  Description of Artificial Sequence: Synthetic oligonucleotide
uucuuggaccccagcaggu

SEQ ID NO: 2570119 - RNA, 19 nt, Artificial Sequence
  Description of Artificial Sequence: Synthetic oligonucleotide
acugcaccuucuaugugac

SEQ ID NO: 2570120 - RNA, 19 nt, Artificial Sequence
  Description of Artificial Sequence: Synthetic oligonucleotide
auugccaguaaaguucuaa

SEQ ID NO: 2570121 - RNA, 19 nt, Artificial Sequence
  Description of Artificial Sequence: Synthetic oligonucleotide
acugccugagacaucagga

SEQ ID NO: 2570122 - RNA, 19 nt, Artificial Sequence
  Description of Artificial Sequence: Synthetic oligonucleotide
auacauaaguggacacagg

SEQ ID NO: 2570123 - RNA, 19 nt, Artificial Sequence
  Description of Artificial Sequence: Synthetic oligonucleotide
auauuuauauugggugggu

SEQ ID NO: 2570124 - RNA, 19 nt, Artificial Sequence
  Description of Artificial Sequence: Synthetic oligonucleotide
ugaccuggagccaggcaga

SEQ ID NO: 2570125 - RNA, 19 nt, Artificial Sequence
  Description of Artificial Sequence: Synthetic oligonucleotide
uaccccacaggcagggaca

SEQ ID NO: 2570126 - RNA, 19 nt, Artificial Sequence
  Description of Artificial Sequence: Synthetic oligonucleotide
uguuccuugcuggacuugu

SEQ ID NO: 2570127 - RNA, 19 nt, Artificial Sequence
  Description of Artificial Sequence: Synthetic oligonucleotide
cauaguccugcaguucagg

SEQ ID NO: 2570128 - RNA, 19 nt, Artificial Sequence
  Description of Artificial Sequence: Synthetic oligonucleotide
ucuuuccuuuggugauugg

SEQ ID NO: 2570129 - RNA, 19 nt, Artificial Sequence
  Description of Artificial Sequence: Synthetic oligonucleotide
uuauauuggguggguugug

SEQ ID NO: 2570130 - RNA, 19 nt, Artificial Sequence
  Description of Artificial Sequence: Synthetic oligonucleotide
cucugagacugcuggcugc

SEQ ID NO: 2570131 - RNA, 19 nt, Artificial Sequence
  Description of Artificial Sequence: Synthetic oligonucleotide
ugcucugagacugcuggcu

SEQ ID NO: 2570132 - RNA, 19 nt, Artificial Sequence
  Description of Artificial Sequence: Synthetic oligonucleotide
ucuggcgaucuuuccuuug

SEQ ID NO: 2570133 - RNA, 19 nt, Artificial Sequence
  Description of Artificial Sequence: Synthetic oligonucleotide
uauccaggccaggagcgag

SEQ ID NO: 2570134 - RNA, 19 nt, Artificial Sequence
  Description of Artificial Sequence: Synthetic oligonucleotide
gggcagguugacuaaguag

SEQ ID NO: 2570135 - RNA, 19 nt, Artificial Sequence
  Description of Artificial Sequence: Synthetic oligonucleotide
gcuucuuguaaccugaccu

SEQ ID NO: 2570136 - RNA, 19 nt, Artificial Sequence
  Description of Artificial Sequence: Synthetic oligonucleotide
guugacuaaguagcuucag

SEQ ID NO: 2570137 - RNA, 19 nt, Artificial Sequence
  Description of Artificial Sequence: Synthetic oligonucleotide
uggguaauguugcccuggu

SEQ ID NO: 2570138 - RNA, 19 nt, Artificial Sequence
  Description of Artificial Sequence: Synthetic oligonucleotide
gcugaacuugugcugguag

SEQ ID NO: 2570139 - RNA, 19 nt, Artificial Sequence
  Description of Artificial Sequence: Synthetic oligonucleotide
uuggaccccagcaggucug

SEQ ID NO: 2570140 - RNA, 19 nt, Artificial Sequence
  Description of Artificial Sequence: Synthetic oligonucleotide
cuggguaauguugcccugg

SEQ ID NO: 2570141 - RNA, 19 nt, Artificial Sequence
  Description of Artificial Sequence: Synthetic oligonucleotide
guuguguggguagggagug

SEQ ID NO: 2570142 - RNA, 19 nt, Artificial Sequence
  Description of Artificial Sequence: Synthetic oligonucleotide
acaagagcuaagagugcuc

SEQ ID NO: 2570143 - RNA, 19 nt, Artificial Sequence
  Description of Artificial Sequence: Synthetic oligonucleotide
cuucagacaagagcuaaga

SEQ ID NO: 2570144 - RNA, 19 nt, Artificial Sequence
  Description of Artificial Sequence: Synthetic oligonucleotide
augucaaagcugaacuugu

SEQ ID NO: 2570145 - RNA, 19 nt, Artificial Sequence
  Description of Artificial Sequence: Synthetic oligonucleotide
uggguaagccuuguccuga

SEQ ID NO: 2570146 - RNA, 19 nt, Artificial Sequence
  Description of Artificial Sequence: Synthetic oligonucleotide
ugcuucccagugcucaccu

SEQ ID NO: 2570147 - RNA, 19 nt, Artificial Sequence
  Description of Artificial Sequence: Synthetic oligonucleotide
aucuuuccuuuggugauug

SEQ ID NO: 2570148 - RNA, 19 nt, Artificial Sequence
  Description of Artificial Sequence: Synthetic oligonucleotide
agcuaagagugcucugaga

SEQ ID NO: 2570149 - RNA, 19 nt, Artificial Sequence
  Description of Artificial Sequence: Synthetic oligonucleotide
cuggcuucuuguaaccuga

SEQ ID NO: 2570150 - RNA, 19 nt, Artificial Sequence
  Description of Artificial Sequence: Synthetic oligonucleotide
cauccucuggcgaucuuuc

SEQ ID NO: 2570151 - RNA, 19 nt, Artificial Sequence
  Description of Artificial Sequence: Synthetic oligonucleotide
gaacuugugcugguaguca

SEQ ID NO: 2570152 - RNA, 19 nt, Artificial Sequence
  Description of Artificial Sequence: Synthetic oligonucleotide
cuggguaagccuuguccug

SEQ ID NO: 2570153 - RNA, 19 nt, Artificial Sequence
  Description of Artificial Sequence: Synthetic oligonucleotide
cucuugggucgcacggugg

SEQ ID NO: 2570154 - RNA, 19 nt, Artificial Sequence
  Description of Artificial Sequence: Synthetic oligonucleotide
agcggagagugaucgccag

SEQ ID NO: 2570155 - RNA, 19 nt, Artificial Sequence
  Description of Artificial Sequence: Synthetic oligonucleotide
aaguagcuucagacaagag

SEQ ID NO: 2570156 - RNA, 19 nt, Artificial Sequence
  Description of Artificial Sequence: Synthetic oligonucleotide
cagguauaaaacugcaccu

SEQ ID NO: 2570157 - RNA, 19 nt, Artificial Sequence
  Description of Artificial Sequence: Synthetic oligonucleotide
gauugguucuuggacccca

SEQ ID NO: 2570158 - RNA, 19 nt, Artificial Sequence
  Description of Artificial Sequence: Synthetic oligonucleotide
gguagucaggggcauaguc

SEQ ID NO: 2570159 - RNA, 19 nt, Artificial Sequence
  Description of Artificial Sequence: Synthetic oligonucleotide
uguccugaguccugcuccu

SEQ ID NO: 2570160 - RNA, 19 nt, Artificial Sequence
  Description of Artificial Sequence: Synthetic oligonucleotide
uggcuggugcaguucuugc

SEQ ID NO: 2570161 - RNA, 19 nt, Artificial Sequence
  Description of Artificial Sequence: Synthetic oligonucleotide
gacaagagcuaagagugcu

SEQ ID NO: 2570162 - RNA, 19 nt, Artificial Sequence
  Description of Artificial Sequence: Synthetic oligonucleotide
agguauaaaacugcaccuu

SEQ ID NO: 2570163 - RNA, 19 nt, Artificial Sequence
  Description of Artificial Sequence: Synthetic oligonucleotide
gagaggcauuaccccacag

SEQ ID NO: 2570164 - RNA, 19 nt, Artificial Sequence
  Description of Artificial Sequence: Synthetic oligonucleotide
gagaaaagauucuguuccu

SEQ ID NO: 2570165 - RNA, 19 nt, Artificial Sequence
  Description of Artificial Sequence: Synthetic oligonucleotide
ugggcagguugacuaagua

SEQ ID NO: 2570166 - RNA, 19 nt, Artificial Sequence
  Description of Artificial Sequence: Synthetic oligonucleotide
ugugacugucauugccagu

SEQ ID NO: 2570167 - RNA, 19 nt, Artificial Sequence
  Description of Artificial Sequence: Synthetic oligonucleotide
acuugugcugguagucagg

SEQ ID NO: 2570168 - RNA, 19 nt, Artificial Sequence
  Description of Artificial Sequence: Synthetic oligonucleotide
guaauguugcccugguccu

SEQ ID NO: 2570169 - RNA, 19 nt, Artificial Sequence
  Description of Artificial Sequence: Synthetic oligonucleotide
agaaaagauucuguuccuu

SEQ ID NO: 2570170 - RNA, 19 nt, Artificial Sequence
  Description of Artificial Sequence: Synthetic oligonucleotide
guucuaaaugccauccucu

SEQ ID NO: 2570171 - RNA, 19 nt, Artificial Sequence
  Description of Artificial Sequence: Synthetic oligonucleotide
uggcgaucuuuccuuuggu

SEQ ID NO: 2570172 - RNA, 19 nt, Artificial Sequence
  Description of Artificial Sequence: Synthetic oligonucleotide
acuugcccuuccucuuggg

SEQ ID NO: 2570173 - RNA, 19 nt, Artificial Sequence
  Description of Artificial Sequence: Synthetic oligonucleotide
uugggucgcacggugggca

SEQ ID NO: 2570174 - RNA, 19 nt, Artificial Sequence
  Description of Artificial Sequence: Synthetic oligonucleotide
aaucugcuucccagugcuc

SEQ ID NO: 2570175 - RNA, 19 nt, Artificial Sequence
  Description of Artificial Sequence: Synthetic oligonucleotide
ugacugucauugccaguaa

SEQ ID NO: 2570176 - RNA, 19 nt, Artificial Sequence
  Description of Artificial Sequence: Synthetic oligonucleotide
cuuagagaucugguuucug

SEQ ID NO: 2570177 - RNA, 19 nt, Artificial Sequence
  Description of Artificial Sequence: Synthetic oligonucleotide
agcuucagacaagagcuaa

SEQ ID NO: 2570178 - RNA, 19 nt, Artificial Sequence
  Description of Artificial Sequence: Synthetic oligonucleotide
ggcgaucuuuccuuuggug

SEQ ID NO: 2570179 - RNA, 19 nt, Artificial Sequence
  Description of Artificial Sequence: Synthetic oligonucleotide
gaucgccagccccaguauc

SEQ ID NO: 2570180 - RNA, 19 nt, Artificial Sequence
  Description of Artificial Sequence: Synthetic oligonucleotide
uggguuguguggguaggga

SEQ ID NO: 2570181 - RNA, 19 nt, Artificial Sequence
  Description of Artificial Sequence: Synthetic oligonucleotide
ugaucgccagccccaguau

SEQ ID NO: 2570182 - RNA, 19 nt, Artificial Sequence
  Description of Artificial Sequence: Synthetic oligonucleotide
ugauugguucuuggacccc

SEQ ID NO: 2570183 - RNA, 19 nt, Artificial Sequence
  Description of Artificial Sequence: Synthetic oligonucleotide
acauaaguggacacaggua

SEQ ID NO: 2570184 - RNA, 19 nt, Artificial Sequence
  Description of Artificial Sequence: Synthetic oligonucleotide
agugcucaccuuagagauc

SEQ ID NO: 2570185 - RNA, 19 nt, Artificial Sequence
  Description of Artificial Sequence: Synthetic oligonucleotide
gacugucauugccaguaaa

SEQ ID NO: 2570186 - RNA, 19 nt, Artificial Sequence
  Description of Artificial Sequence: Synthetic oligonucleotide
uguugcccugguccucagc

SEQ ID NO: 2570187 - RNA, 19 nt, Artificial Sequence
  Description of Artificial Sequence: Synthetic oligonucleotide
ucgcacggugggcaugaug

SEQ ID NO: 2570188 - RNA, 19 nt, Artificial Sequence
  Description of Artificial Sequence: Synthetic oligonucleotide
cagugcucaccuuagagau

SEQ ID NO: 2570189 - RNA, 19 nt, Artificial Sequence
  Description of Artificial Sequence: Synthetic oligonucleotide
cagggaagugcccgaggag

SEQ ID NO: 2570190 - RNA, 19 nt, Artificial Sequence
  Description of Artificial Sequence: Synthetic oligonucleotide
aaguggacacagguauaaa

SEQ ID NO: 2570191 - RNA, 19 nt, Artificial Sequence
  Description of Artificial Sequence: Synthetic oligonucleotide
gugaucgccagccccagua

SEQ ID NO: 2570192 - RNA, 19 nt, Artificial Sequence
  Description of Artificial Sequence: Synthetic oligonucleotide
uggcuucuuguaaccugac

SEQ ID NO: 2570193 - RNA, 19 nt, Artificial Sequence
  Description of Artificial Sequence: Synthetic oligonucleotide
uggcucuggguaagccuug

SEQ ID NO: 2570194 - RNA, 19 nt, Artificial Sequence
  Description of Artificial Sequence: Synthetic oligonucleotide
ccugcgggcacacuugccc

SEQ ID NO: 2570195 - RNA, 19 nt, Artificial Sequence
  Description of Artificial Sequence: Synthetic oligonucleotide
acaucaggaaugagaggca

SEQ ID NO: 2570196 - RNA, 19 nt, Artificial Sequence
  Description of Artificial Sequence: Synthetic oligonucleotide
ugcuggacuuguggcagug

SEQ ID NO: 2570197 - RNA, 19 nt, Artificial Sequence
  Description of Artificial Sequence: Synthetic oligonucleotide
gaccccagcaggucugcca

SEQ ID NO: 2570198 - RNA, 19 nt, Artificial Sequence
  Description of Artificial Sequence: Synthetic oligonucleotide
gcucaccuuagagaucugg

SEQ ID NO: 2570199 - RNA, 19 nt, Artificial Sequence
  Description of Artificial Sequence: Synthetic oligonucleotide
gugcucaccuuagagaucu

SEQ ID NO: 2570200 - RNA, 19 nt, Artificial Sequence
  Description of Artificial Sequence: Synthetic oligonucleotide
ggcuucuuguaaccugacc

SEQ ID NO: 2570201 - RNA, 19 nt, Artificial Sequence
  Description of Artificial Sequence: Synthetic oligonucleotide
uccucagcggagagugauc

SEQ ID NO: 2570202 - RNA, 19 nt, Artificial Sequence
  Description of Artificial Sequence: Synthetic oligonucleotide
cccagugcucaccuuagag

SEQ ID NO: 2570203 - RNA, 19 nt, Artificial Sequence
  Description of Artificial Sequence: Synthetic oligonucleotide
accugaccuggagccaggc

SEQ ID NO: 2570204 - RNA, 19 nt, Artificial Sequence
  Description of Artificial Sequence: Synthetic oligonucleotide
guggguuguguggguaggg

SEQ ID NO: 2570205 - RNA, 19 nt, Artificial Sequence
  Description of Artificial Sequence: Synthetic oligonucleotide
cuaagagugcucugagacu

SEQ ID NO: 2570206 - RNA, 19 nt, Artificial Sequence
  Description of Artificial Sequence: Synthetic oligonucleotide
cucaccuuagagaucuggu

SEQ ID NO: 2570207 - RNA, 19 nt, Artificial Sequence
  Description of Artificial Sequence: Synthetic oligonucleotide
ccucagcggagagugaucg

SEQ ID NO: 2570208 - RNA, 19 nt, Artificial Sequence
  Description of Artificial Sequence: Synthetic oligonucleotide
cucagcggagagugaucgc

SEQ ID NO: 2570209 - RNA, 19 nt, Artificial Sequence
  Description of Artificial Sequence: Synthetic oligonucleotide
agaggguggcauaggguug

SEQ ID NO: 2570210 - RNA, 19 nt, Artificial Sequence
  Description of Artificial Sequence: Synthetic oligonucleotide
uggacugggcagguugacu

SEQ ID NO: 2570211 - RNA, 19 nt, Artificial Sequence
  Description of Artificial Sequence: Synthetic oligonucleotide
ucuuggaccccagcagguc

SEQ ID NO: 2570212 - RNA, 19 nt, Artificial Sequence
  Description of Artificial Sequence: Synthetic oligonucleotide
gggacagaggguggcauag

SEQ ID NO: 2570213 - RNA, 19 nt, Artificial Sequence
  Description of Artificial Sequence: Synthetic oligonucleotide
uccugcgggcacacuugcc

SEQ ID NO: 2570214 - RNA, 19 nt, Artificial Sequence
  Description of Artificial Sequence: Synthetic oligonucleotide
auugguucuuggaccccag

SEQ ID NO: 2570215 - RNA, 19 nt, Artificial Sequence
  Description of Artificial Sequence: Synthetic oligonucleotide
cugccugagacaucaggaa

SEQ ID NO: 2570216 - RNA, 19 nt, Artificial Sequence
  Description of Artificial Sequence: Synthetic oligonucleotide
ucccagugcucaccuuaga

SEQ ID NO: 2570217 - RNA, 19 nt, Artificial Sequence
  Description of Artificial Sequence: Synthetic oligonucleotide
uguggcagugcuggguaau

SEQ ID NO: 2570218 - RNA, 19 nt, Artificial Sequence
  Description of Artificial Sequence: Synthetic oligonucleotide
guggcuggugcaguucuug

SEQ ID NO: 2570219 - RNA, 19 nt, Artificial Sequence
  Description of Artificial Sequence: Synthetic oligonucleotide
gggcaugaugucaaagcug

SEQ ID NO: 2570220 - RNA, 19 nt, Artificial Sequence
  Description of Artificial Sequence: Synthetic oligonucleotide
ggugggcaugaugucaaag

SEQ ID NO: 2570221 - RNA, 19 nt, Artificial Sequence
  Description of Artificial Sequence: Synthetic oligonucleotide
ccaguauccaggccaggag

SEQ ID NO: 2570222 - RNA, 19 nt, Artificial Sequence
  Description of Artificial Sequence: Synthetic oligonucleotide
uuggguggguugugugggu

SEQ ID NO: 2570223 - RNA, 19 nt, Artificial Sequence
  Description of Artificial Sequence: Synthetic oligonucleotide
cuuuccuuuggugauuggu

SEQ ID NO: 2570224 - RNA, 19 nt, Artificial Sequence
  Description of Artificial Sequence: Synthetic oligonucleotide
cagaggguggcauaggguu

SEQ ID NO: 2570225 - RNA, 19 nt, Artificial Sequence
  Description of Artificial Sequence: Synthetic oligonucleotide
gccugcugcaccccacugg

SEQ ID NO: 2570226 - RNA, 19 nt, Artificial Sequence
  Description of Artificial Sequence: Synthetic oligonucleotide
gcuucagacaagagcuaag

SEQ ID NO: 2570227 - RNA, 19 nt, Artificial Sequence
  Description of Artificial Sequence: Synthetic oligonucleotide
auaaguggacacagguaua

SEQ ID NO: 2570228 - RNA, 19 nt, Artificial Sequence
  Description of Artificial Sequence: Synthetic oligonucleotide
gagugaucgccagccccag

SEQ ID NO: 2570229 - RNA, 19 nt, Artificial Sequence
  Description of Artificial Sequence: Synthetic oligonucleotide
guccugcgggcacacuugc

SEQ ID NO: 2570230 - RNA, 19 nt, Artificial Sequence
  Description of Artificial Sequence: Synthetic oligonucleotide
cugucauugccaguaaagu

SEQ ID NO: 2570231 - RNA, 19 nt, Artificial Sequence
  Description of Artificial Sequence: Synthetic oligonucleotide
uccucuugggucgcacggu

SEQ ID NO: 2570232 - RNA, 19 nt, Artificial Sequence
  Description of Artificial Sequence: Synthetic oligonucleotide
caagagcuaagagugcucu

SEQ ID NO: 2570233 - RNA, 19 nt, Artificial Sequence
  Description of Artificial Sequence: Synthetic oligonucleotide
gacugggcagguugacuaa

SEQ ID NO: 2570234 - RNA, 19 nt, Artificial Sequence
  Description of Artificial Sequence: Synthetic oligonucleotide
gcucugagacugcuggcug

SEQ ID NO: 2570235 - RNA, 19 nt, Artificial Sequence
  Description of Artificial Sequence: Synthetic oligonucleotide
ccagugcucaccuuagaga

SEQ ID NO: 2570236 - RNA, 19 nt, Artificial Sequence
  Description of Artificial Sequence: Synthetic oligonucleotide
ggguggguuguguggguag

SEQ ID NO: 2570237 - RNA, 19 nt, Artificial Sequence
  Description of Artificial Sequence: Synthetic oligonucleotide
cugaacuugugcugguagu

SEQ ID NO: 2570238 - RNA, 19 nt, Artificial Sequence
  Description of Artificial Sequence: Synthetic oligonucleotide
cuugggucgcacggugggc

SEQ ID NO: 2570239 - RNA, 19 nt, Artificial Sequence
  Description of Artificial Sequence: Synthetic oligonucleotide
aggcauuaccccacaggca

SEQ ID NO: 2570240 - RNA, 19 nt, Artificial Sequence
  Description of Artificial Sequence: Synthetic oligonucleotide
uuggacugggcagguugac

SEQ ID NO: 2570241 - RNA, 19 nt, Artificial Sequence
  Description of Artificial Sequence: Synthetic oligonucleotide
caggaaugagaggcauuac

SEQ ID NO: 2570242 - RNA, 19 nt, Artificial Sequence
  Description of Artificial Sequence: Synthetic oligonucleotide
gggagugagaauauacaua

SEQ ID NO: 2570243 - RNA, 19 nt, Artificial Sequence
  Description of Artificial Sequence: Synthetic oligonucleotide
gguugacuaaguagcuuca

SEQ ID NO: 2570244 - RNA, 19 nt, Artificial Sequence
  Description of Artificial Sequence: Synthetic oligonucleotide
cugcugcaccccacugggg

SEQ ID NO: 2570245 - RNA, 19 nt, Artificial Sequence
  Description of Artificial Sequence: Synthetic oligonucleotide
aggaggccugcugcacccc

SEQ ID NO: 2570246 - RNA, 19 nt, Artificial Sequence
  Description of Artificial Sequence: Synthetic oligonucleotide
agggacagaggguggcaua

SEQ ID NO: 2570247 - RNA, 19 nt, Artificial Sequence
  Description of Artificial Sequence: Synthetic oligonucleotide
uguggcuggugcaguucuu

SEQ ID NO: 2570248 - RNA, 19 nt, Artificial Sequence
  Description of Artificial Sequence: Synthetic oligonucleotide
guaaccugaccuggagcca

SEQ ID NO: 2570249 - RNA, 19 nt, Artificial Sequence
  Description of Artificial Sequence: Synthetic oligonucleotide
accuucuaugugacuguca

SEQ ID NO: 2570250 - RNA, 19 nt, Artificial Sequence
  Description of Artificial Sequence: Synthetic oligonucleotide
caggggcauaguccugcag

SEQ ID NO: 2570251 - RNA, 19 nt, Artificial Sequence
  Description of Artificial Sequence: Synthetic oligonucleotide
cacggugggcaugauguca

SEQ ID NO: 2570252 - RNA, 19 nt, Artificial Sequence
  Description of Artificial Sequence: Synthetic oligonucleotide
agugaucgccagccccagu

SEQ ID NO: 2570253 - RNA, 19 nt, Artificial Sequence
  Description of Artificial Sequence: Synthetic oligonucleotide
ucgccagccccaguaucca

SEQ ID NO: 2570254 - RNA, 19 nt, Artificial Sequence
  Description of Artificial Sequence: Synthetic oligonucleotide
ugcucaccuuagagaucug

SEQ ID NO: 2570255 - RNA, 19 nt, Artificial Sequence
  Description of Artificial Sequence: Synthetic oligonucleotide
caccuucuaugugacuguc

SEQ ID NO: 2570256 - RNA, 19 nt, Artificial Sequence
  Description of Artificial Sequence: Synthetic oligonucleotide
cggagagugaucgccagcc

SEQ ID NO: 2570257 - RNA, 19 nt, Artificial Sequence
  Description of Artificial Sequence: Synthetic oligonucleotide
uuguguggguagggaguga

SEQ ID NO: 2570258 - RNA, 19 nt, Artificial Sequence
  Description of Artificial Sequence: Synthetic oligonucleotide
cuuggaccccagcaggucu

SEQ ID NO: 2570259 - RNA, 19 nt, Artificial Sequence
  Description of Artificial Sequence: Synthetic oligonucleotide
aagugcccgaggaggccug

SEQ ID NO: 2570260 - RNA, 19 nt, Artificial Sequence
  Description of Artificial Sequence: Synthetic oligonucleotide
auguugcccugguccucag

SEQ ID NO: 2570261 - RNA, 19 nt, Artificial Sequence
  Description of Artificial Sequence: Synthetic oligonucleotide
acggugggcaugaugucaa

SEQ ID NO: 2570262 - RNA, 19 nt, Artificial Sequence
  Description of Artificial Sequence: Synthetic oligonucleotide
cagcggagagugaucgcca

SEQ ID NO: 2570263 - RNA, 19 nt, Artificial Sequence
  Description of Artificial Sequence: Synthetic oligonucleotide
ugguagucaggggcauagu

SEQ ID NO: 2570264 - RNA, 19 nt, Artificial Sequence
  Description of Artificial Sequence: Synthetic oligonucleotide
gaagugcccgaggaggccu

SEQ ID NO: 2570265 - RNA, 19 nt, Artificial Sequence
  Description of Artificial Sequence: Synthetic oligonucleotide
gugcugguagucaggggca

SEQ ID NO: 2570266 - RNA, 19 nt, Artificial Sequence
  Description of Artificial Sequence: Synthetic oligonucleotide
uggaccccagcaggucugc

SEQ ID NO: 2570267 - RNA, 19 nt, Artificial Sequence
  Description of Artificial Sequence: Synthetic oligonucleotide
gcuggguaauguugcccug

SEQ ID NO: 2570268 - RNA, 19 nt, Artificial Sequence
  Description of Artificial Sequence: Synthetic oligonucleotide
aucaggaaugagaggcauu

SEQ ID NO: 2570269 - RNA, 19 nt, Artificial Sequence
  Description of Artificial Sequence: Synthetic oligonucleotide
uggguggguugugugggua

SEQ ID NO: 2570270 - RNA, 19 nt, Artificial Sequence
  Description of Artificial Sequence: Synthetic oligonucleotide
ggacagaggguggcauagg

SEQ ID NO: 2570271 - RNA, 19 nt, Artificial Sequence
  Description of Artificial Sequence: Synthetic oligonucleotide
gguccugcgggcacacuug

SEQ ID NO: 2570272 - RNA, 19 nt, Artificial Sequence
  Description of Artificial Sequence: Synthetic oligonucleotide
cuggcucuggguaagccuu

SEQ ID NO: 2570273 - RNA, 19 nt, Artificial Sequence
  Description of Artificial Sequence: Synthetic oligonucleotide
ugcgggcacacuugcccuu

SEQ ID NO: 2570274 - RNA, 19 nt, Artificial Sequence
  Description of Artificial Sequence: Synthetic oligonucleotide
ugggucgcacggugggcau

SEQ ID NO: 2570275 - RNA, 19 nt, Artificial Sequence
  Description of Artificial Sequence: Synthetic oligonucleotide
auuaccccacaggcaggga

SEQ ID NO: 2570276 - RNA, 19 nt, Artificial Sequence
  Description of Artificial Sequence: Synthetic oligonucleotide
cugaguccugcuccuucga

SEQ ID NO: 2570277 - RNA, 19 nt, Artificial Sequence
  Description of Artificial Sequence: Synthetic oligonucleotide
gguuguguggguagggagu

SEQ ID NO: 2570278 - RNA, 19 nt, Artificial Sequence
  Description of Artificial Sequence: Synthetic oligonucleotide
cuugcccuuccucuugggu

SEQ ID NO: 2570279 - RNA, 19 nt, Artificial Sequence
  Description of Artificial Sequence: Synthetic oligonucleotide
ccucuugggucgcacggug

SEQ ID NO: 2570280 - RNA, 19 nt, Artificial Sequence
  Description of Artificial Sequence: Synthetic oligonucleotide
cuguuccuugcuggacuug

SEQ ID NO: 2570281 - RNA, 19 nt, Artificial Sequence
  Description of Artificial Sequence: Synthetic oligonucleotide
ccagggaagugcccgagga

SEQ ID NO: 2570282 - RNA, 19 nt, Artificial Sequence
  Description of Artificial Sequence: Synthetic oligonucleotide
ccuucuaugugacugucau

SEQ ID NO: 2570283 - RNA, 19 nt, Artificial Sequence
  Description of Artificial Sequence: Synthetic oligonucleotide
caggacugccugagacauc

SEQ ID NO: 2570284 - RNA, 19 nt, Artificial Sequence
  Description of Artificial Sequence: Synthetic oligonucleotide
agcugaacuugugcuggua

SEQ ID NO: 2570285 - RNA, 19 nt, Artificial Sequence
  Description of Artificial Sequence: Synthetic oligonucleotide
gcggagagugaucgccagc

SEQ ID NO: 2570286 - RNA, 19 nt, Artificial Sequence
  Description of Artificial Sequence: Synthetic oligonucleotide
ggguaauguugcccugguc

SEQ ID NO: 2570287 - RNA, 19 nt, Artificial Sequence
  Description of Artificial Sequence: Synthetic oligonucleotide
cgcacggugggcaugaugu

SEQ ID NO: 2570288 - RNA, 19 nt, Artificial Sequence
  Description of Artificial Sequence: Synthetic oligonucleotide
caucaggaaugagaggcau

SEQ ID NO: 2570289 - RNA, 19 nt, Artificial Sequence
  Description of Artificial Sequence: Synthetic oligonucleotide
cugggcagguugacuaagu

SEQ ID NO: 2570290 - RNA, 19 nt, Artificial Sequence
  Description of Artificial Sequence: Synthetic oligonucleotide
cccagggaagugcccgagg

SEQ ID NO: 2570291 - RNA, 19 nt, Artificial Sequence
  Description of Artificial Sequence: Synthetic oligonucleotide
gguuucuguuccuguggcu

SEQ ID NO: 2570292 - RNA, 19 nt, Artificial Sequence
  Description of Artificial Sequence: Synthetic oligonucleotide
gguagggagugagaauaua

SEQ ID NO: 2570293 - RNA, 19 nt, Artificial Sequence
  Description of Artificial Sequence: Synthetic oligonucleotide
ccagcuggcucuggguaag

SEQ ID NO: 2570294 - RNA, 19 nt, Artificial Sequence
  Description of Artificial Sequence: Synthetic oligonucleotide
gccccaguauccaggccag

SEQ ID NO: 2570295 - RNA, 19 nt, Artificial Sequence
  Description of Artificial Sequence: Synthetic oligonucleotide
guccucagcggagagugau

SEQ ID NO: 2570296 - RNA, 19 nt, Artificial Sequence
  Description of Artificial Sequence: Synthetic oligonucleotide
ggucgcacggugggcauga

SEQ ID NO: 2570297 - RNA, 19 nt, Artificial Sequence
  Description of Artificial Sequence: Synthetic oligonucleotide
ggccugcugcaccccacug

SEQ ID NO: 2570298 - RNA, 19 nt, Artificial Sequence
  Description of Artificial Sequence: Synthetic oligonucleotide
cagcuggcucuggguaagc

SEQ ID NO: 2570299 - RNA, 19 nt, Artificial Sequence
  Description of Artificial Sequence: Synthetic oligonucleotide
cccaguauccaggccagga

SEQ ID NO: 2570300 - RNA, 19 nt, Artificial Sequence
  Description of Artificial Sequence: Synthetic oligonucleotide
gggcauaguccugcaguuc

SEQ ID NO: 2570301 - RNA, 19 nt, Artificial Sequence
  Description of Artificial Sequence: Synthetic oligonucleotide
cauugccaguaaaguucua

SEQ ID NO: 2570302 - RNA, 19 nt, Artificial Sequence
  Description of Artificial Sequence: Synthetic oligonucleotide
gcagguugacuaaguagcu

SEQ ID NO: 2570303 - RNA, 19 nt, Artificial Sequence
  Description of Artificial Sequence: Synthetic oligonucleotide
ggggcauaguccugcaguu

SEQ ID NO: 2570304 - RNA, 19 nt, Artificial Sequence
  Description of Artificial Sequence: Synthetic oligonucleotide
gcacggugggcaugauguc

SEQ ID NO: 2570305 - RNA, 19 nt, Artificial Sequence
  Description of Artificial Sequence: Synthetic oligonucleotide
cagguugacuaaguagcuu

SEQ ID NO: 2570306 - RNA, 19 nt, Artificial Sequence
  Description of Artificial Sequence: Synthetic oligonucleotide
cgaucuuuccuuuggugau

SEQ ID NO: 2570307 - RNA, 19 nt, Artificial Sequence
  Description of Artificial Sequence: Synthetic oligonucleotide
ggguccugcgggcacacuu

SEQ ID NO: 2570308 - RNA, 19 nt, Artificial Sequence
  Description of Artificial Sequence: Synthetic oligonucleotide
gcccugguccucagcggag

SEQ ID NO: 2570309 - RNA, 19 nt, Artificial Sequence
  Description of Artificial Sequence: Synthetic oligonucleotide
ggacugccugagacaucag

SEQ ID NO: 2570310 - RNA, 19 nt, Artificial Sequence
  Description of Artificial Sequence: Synthetic oligonucleotide
cucuggcgaucuuuccuuu

SEQ ID NO: 2570311 - RNA, 19 nt, Artificial Sequence
  Description of Artificial Sequence: Synthetic oligonucleotide
cccgaggaggccugcugca

SEQ ID NO: 2570312 - RNA, 19 nt, Artificial Sequence
  Description of Artificial Sequence: Synthetic oligonucleotide
gaccuggagccaggcagau

SEQ ID NO: 2570313 - RNA, 19 nt, Artificial Sequence
  Description of Artificial Sequence: Synthetic oligonucleotide
ccaggacugccugagacau

SEQ ID NO: 2570314 - RNA, 19 nt, Artificial Sequence
  Description of Artificial Sequence: Synthetic oligonucleotide
ggaccccagcaggucugcc

SEQ ID NO: 2570315 - RNA, 19 nt, Artificial Sequence
  Description of Artificial Sequence: Synthetic oligonucleotide
cugcaccuucuaugugacu

SEQ ID NO: 2570316 - RNA, 19 nt, Artificial Sequence
  Description of Artificial Sequence: Synthetic oligonucleotide
ccucuggcgaucuuuccuu

SEQ ID NO: 2570317 - RNA, 19 nt, Artificial Sequence
  Description of Artificial Sequence: Synthetic oligonucleotide
gggucgcacggugggcaug

SEQ ID NO: 2570318 - RNA, 19 nt, Artificial Sequence
  Description of Artificial Sequence: Synthetic oligonucleotide
ccccagggaagugcccgag

SEQ ID NO: 2570319 - RNA, 19 nt, Artificial Sequence
  Description of Artificial Sequence: Synthetic oligonucleotide
gcgggcacacuugcccuuc

SEQ ID NO: 2570320 - RNA, 19 nt, Artificial Sequence
  Description of Artificial Sequence: Synthetic oligonucleotide
gguccucagcggagaguga

SEQ ID NO: 2570321 - RNA, 19 nt, Artificial Sequence
  Description of Artificial Sequence: Synthetic oligonucleotide
ccccagcuggcucugggua

SEQ ID NO: 2570322 - RNA, 19 nt, Artificial Sequence
  Description of Artificial Sequence: Synthetic oligonucleotide
ggguagggagugagaauau

SEQ ID NO: 2570323 - RNA, 19 nt, Artificial Sequence
  Description of Artificial Sequence: Synthetic oligonucleotide
ccccaguauccaggccagg

SEQ ID NO: 2570324 - RNA, 19 nt, Artificial Sequence
  Description of Artificial Sequence: Synthetic oligonucleotide
gcugguagucaggggcaua

SEQ ID NO: 2570325 - RNA, 19 nt, Artificial Sequence
  Description of Artificial Sequence: Synthetic oligonucleotide
gccuggcuucuuguaaccu

SEQ ID NO: 2570326 - RNA, 19 nt, Artificial Sequence
  Description of Artificial Sequence: Synthetic oligonucleotide
gcccuuccucuugggucgc

SEQ ID NO: 2570327 - RNA, 19 nt, Artificial Sequence
  Description of Artificial Sequence: Synthetic oligonucleotide
cccugguccucagcggaga

SEQ ID NO: 2570328 - RNA, 19 nt, Artificial Sequence
  Description of Artificial Sequence: Synthetic oligonucleotide
ccuuguccugaguccugcu

SEQ ID NO: 2570329 - RNA, 19 nt, Artificial Sequence
  Description of Artificial Sequence: Synthetic oligonucleotide
cggugggcaugaugucaaa

SEQ ID NO: 2570330 - RNA, 19 nt, Artificial Sequence
  Description of Artificial Sequence: Synthetic oligonucleotide
gucgcacggugggcaugau

SEQ ID NO: 2570331 - RNA, 19 nt, Artificial Sequence
  Description of Artificial Sequence: Synthetic oligonucleotide
gccauccucuggcgaucuu

SEQ ID NO: 2570332 - RNA, 19 nt, Artificial Sequence
  Description of Artificial Sequence: Synthetic oligonucleotide
cccuuccucuugggucgca

SEQ ID NO: 2570333 - RNA, 19 nt, Artificial Sequence
  Description of Artificial Sequence: Synthetic oligonucleotide
gggguccugcgggcacacu

SEQ ID NO: 2570334 - RNA, 19 nt, Artificial Sequence
  Description of Artificial Sequence: Synthetic oligonucleotide
aguuaaauuguauucaggc

SEQ ID NO: 2570335 - RNA, 19 nt, Artificial Sequence
  Description of Artificial Sequence: Synthetic oligonucleotide
uuuauuucugaacuguugg

SEQ ID NO: 2570336 - RNA, 19 nt, Artificial Sequence
  Description of Artificial Sequence: Synthetic oligonucleotide
auuauguuucgcuucaucc

SEQ ID NO: 2570337 - RNA, 19 nt, Artificial Sequence
  Description of Artificial Sequence: Synthetic oligonucleotide
aguuauaugucuuaucacg

SEQ ID NO: 2570338 - RNA, 19 nt, Artificial Sequence
  Description of Artificial Sequence: Synthetic oligonucleotide
uccucuaugaacuucauca

SEQ ID NO: 2570339 - RNA, 19 nt, Artificial Sequence
  Description of Artificial Sequence: Synthetic oligonucleotide
cuuacauucgcuuuuguag

SEQ ID NO: 2570340 - RNA, 19 nt, Artificial Sequence
  Description of Artificial Sequence: Synthetic oligonucleotide
uuagaacaaaaucaauggg

SEQ ID NO: 2570341 - RNA, 19 nt, Artificial Sequence
  Description of Artificial Sequence: Synthetic oligonucleotide
auuugugaacuauauuucc

SEQ ID NO: 2570342 - RNA, 19 nt, Artificial Sequence
  Description of Artificial Sequence: Synthetic oligonucleotide
uuuacaacaaacuggacaa

SEQ ID NO: 2570343 - RNA, 19 nt, Artificial Sequence
  Description of Artificial Sequence: Synthetic oligonucleotide
agaguuuugcuccagaaag

SEQ ID NO: 2570344 - RNA, 19 nt, Artificial Sequence
  Description of Artificial Sequence: Synthetic oligonucleotide
aaaaugccuccuuacauuc

SEQ ID NO: 2570345 - RNA, 19 nt, Artificial Sequence
  Description of Artificial Sequence: Synthetic oligonucleotide
auuuacaacaaacuggaca

SEQ ID NO: 2570346 - RNA, 19 nt, Artificial Sequence
  Description of Artificial Sequence: Synthetic oligonucleotide
uuggcaguuauuauuuugg

SEQ ID NO: 2570347 - RNA, 19 nt, Artificial Sequence
  Description of Artificial Sequence: Synthetic oligonucleotide
uuaaauuguauucaggcuu

SEQ ID NO: 2570348 - RNA, 19 nt, Artificial Sequence
  Description of Artificial Sequence: Synthetic oligonucleotide
uuuacuaggagaauuggaa

SEQ ID NO: 2570349 - RNA, 19 nt, Artificial Sequence
  Description of Artificial Sequence: Synthetic oligonucleotide
uauauuuccucuugcaaag

SEQ ID NO: 2570350 - RNA, 19 nt, Artificial Sequence
  Description of Artificial Sequence: Synthetic oligonucleotide
uguauucaggcuuugaaga

SEQ ID NO: 2570351 - RNA, 19 nt, Artificial Sequence
  Description of Artificial Sequence: Synthetic oligonucleotide
aauuggaagugccaucagg

SEQ ID NO: 2570352 - RNA, 19 nt, Artificial Sequence
  Description of Artificial Sequence: Synthetic oligonucleotide
uugcauaugucucuuaagc

SEQ ID NO: 2570353 - RNA, 19 nt, Artificial Sequence
  Description of Artificial Sequence: Synthetic oligonucleotide
acaguuauaugucuuauca

SEQ ID NO: 2570354 - RNA, 19 nt, Artificial Sequence
  Description of Artificial Sequence: Synthetic oligonucleotide
auagcucugaucucuaaac

SEQ ID NO: 2570355 - RNA, 19 nt, Artificial Sequence
  Description of Artificial Sequence: Synthetic oligonucleotide
uuuugcuccagaaagaguu

SEQ ID NO: 2570356 - RNA, 19 nt, Artificial Sequence
  Description of Artificial Sequence: Synthetic oligonucleotide
uccuacuuaaugaaacuag

SEQ ID NO: 2570357 - RNA, 19 nt, Artificial Sequence
  Description of Artificial Sequence: Synthetic oligonucleotide
uuuuauuucugaacuguug

SEQ ID NO: 2570358 - RNA, 19 nt, Artificial Sequence
  Description of Artificial Sequence: Synthetic oligonucleotide
cuuuguuuagaacaaaauc

SEQ ID NO: 2570359 - RNA, 19 nt, Artificial Sequence
  Description of Artificial Sequence: Synthetic oligonucleotide
agaagcgggauccaggaac

SEQ ID NO: 2570360 - RNA, 19 nt, Artificial Sequence
  Description of Artificial Sequence: Synthetic oligonucleotide
ucuaugaacuucaucaaaa

SEQ ID NO: 2570361 - RNA, 19 nt, Artificial Sequence
  Description of Artificial Sequence: Synthetic oligonucleotide
uauaugucuuaucacguca

SEQ ID NO: 2570362 - RNA, 19 nt, Artificial Sequence
  Description of Artificial Sequence: Synthetic oligonucleotide
aacuccuacuuaaugaaac

SEQ ID NO: 2570363 - RNA, 19 nt, Artificial Sequence
  Description of Artificial Sequence: Synthetic oligonucleotide
uuguuuucgagucuuaaaa

SEQ ID NO: 2570364 - RNA, 19 nt, Artificial Sequence
  Description of Artificial Sequence: Synthetic oligonucleotide
gcaguuauuauuuugggcc

SEQ ID NO: 2570365 - RNA, 19 nt, Artificial Sequence
  Description of Artificial Sequence: Synthetic oligonucleotide
uuugaaucauuauguuucg

SEQ ID NO: 2570366 - RNA, 19 nt, Artificial Sequence
  Description of Artificial Sequence: Synthetic oligonucleotide
uuuuaugaaccacaguuau

SEQ ID NO: 2570367 - RNA, 19 nt, Artificial Sequence
  Description of Artificial Sequence: Synthetic oligonucleotide
guuucguaagugcagagag

SEQ ID NO: 2570368 - RNA, 19 nt, Artificial Sequence
  Description of Artificial Sequence: Synthetic oligonucleotide
augcaguuaaauuguauuc

SEQ ID NO: 2570369 - RNA, 19 nt, Artificial Sequence
  Description of Artificial Sequence: Synthetic oligonucleotide
aaaugauuuacaacaaacu

SEQ ID NO: 2570370 - RNA, 19 nt, Artificial Sequence
  Description of Artificial Sequence: Synthetic oligonucleotide
aguaauugaaucccuccuc

SEQ ID NO: 2570371 - RNA, 19 nt, Artificial Sequence
  Description of Artificial Sequence: Synthetic oligonucleotide
uuguauucaggcuuugaag

SEQ ID NO: 2570372 - RNA, 19 nt, Artificial Sequence
  Description of Artificial Sequence: Synthetic oligonucleotide
uaaugaaacuagaacacuc

SEQ ID NO: 2570373 - RNA, 19 nt, Artificial Sequence
  Description of Artificial Sequence: Synthetic oligonucleotide
uuaagcauuauuugugaac

SEQ ID NO: 2570374 - RNA, 19 nt, Artificial Sequence
  Description of Artificial Sequence: Synthetic oligonucleotide
uguuuucgagucuuaaaag

SEQ ID NO: 2570375 - RNA, 19 nt, Artificial Sequence
  Description of Artificial Sequence: Synthetic oligonucleotide
uuaugaaccacaguuauau

SEQ ID NO: 2570376 - RNA, 19 nt, Artificial Sequence
  Description of Artificial Sequence: Synthetic oligonucleotide
uuauguuucgcuucauccc

SEQ ID NO: 2570377 - RNA, 19 nt, Artificial Sequence
  Description of Artificial Sequence: Synthetic oligonucleotide
agaagucugguuuggaguc

SEQ ID NO: 2570378 - RNA, 19 nt, Artificial Sequence
  Description of Artificial Sequence: Synthetic oligonucleotide
uuacauucgcuuuuguagc

SEQ ID NO: 2570379 - RNA, 19 nt, Artificial Sequence
  Description of Artificial Sequence: Synthetic oligonucleotide
uucacuucaaugccgacgu

SEQ ID NO: 2570380 - RNA, 19 nt, Artificial Sequence
  Description of Artificial Sequence: Synthetic oligonucleotide
uuacuaggagaauuggaag

SEQ ID NO: 2570381 - RNA, 19 nt, Artificial Sequence
  Description of Artificial Sequence: Synthetic oligonucleotide
uguagaaaacuuuuauuuc

SEQ ID NO: 2570382 - RNA, 19 nt, Artificial Sequence
  Description of Artificial Sequence: Synthetic oligonucleotide
augaaccacaguuauaugu

SEQ ID NO: 2570383 - RNA, 19 nt, Artificial Sequence
  Description of Artificial Sequence: Synthetic oligonucleotide
aacuauauuuccucuugca

SEQ ID NO: 2570384 - RNA, 19 nt, Artificial Sequence
  Description of Artificial Sequence: Synthetic oligonucleotide
ugucucuuaagcauuauuu

SEQ ID NO: 2570385 - RNA, 19 nt, Artificial Sequence
  Description of Artificial Sequence: Synthetic oligonucleotide
uuugugaacuauauuuccu

SEQ ID NO: 2570386 - RNA, 19 nt, Artificial Sequence
  Description of Artificial Sequence: Synthetic oligonucleotide
ucucuuaagcauuauuugu

SEQ ID NO: 2570387 - RNA, 19 nt, Artificial Sequence
  Description of Artificial Sequence: Synthetic oligonucleotide
uguagcaaaugauuuacaa

SEQ ID NO: 2570388 - RNA, 19 nt, Artificial Sequence
  Description of Artificial Sequence: Synthetic oligonucleotide
uuuuauagcucugaucucu

SEQ ID NO: 2570389 - RNA, 19 nt, Artificial Sequence
  Description of Artificial Sequence: Synthetic oligonucleotide
uuuucgagucuuaaaagau

SEQ ID NO: 2570390 - RNA, 19 nt, Artificial Sequence
  Description of Artificial Sequence: Synthetic oligonucleotide
agaacacucuuauugcguc

SEQ ID NO: 2570391 - RNA, 19 nt, Artificial Sequence
  Description of Artificial Sequence: Synthetic oligonucleotide
ucuuaagcauuauuuguga

SEQ ID NO: 2570392 - RNA, 19 nt, Artificial Sequence
  Description of Artificial Sequence: Synthetic oligonucleotide
ucuuauugcguccuuuaga

SEQ ID NO: 2570393 - RNA, 19 nt, Artificial Sequence
  Description of Artificial Sequence: Synthetic oligonucleotide
gauccaggaacaaagguug

SEQ ID NO: 2570394 - RNA, 19 nt, Artificial Sequence
  Description of Artificial Sequence: Synthetic oligonucleotide
auuggaagugccaucaggg

SEQ ID NO: 2570395 - RNA, 19 nt, Artificial Sequence
  Description of Artificial Sequence: Synthetic oligonucleotide
uauguuucgcuucaucccu

SEQ ID NO: 2570396 - RNA, 19 nt, Artificial Sequence
  Description of Artificial Sequence: Synthetic oligonucleotide
cuagaacacucuuauugcg

SEQ ID NO: 2570397 - RNA, 19 nt, Artificial Sequence
  Description of Artificial Sequence: Synthetic oligonucleotide
uuucacuucaaugccgacg

SEQ ID NO: 2570398 - RNA, 19 nt, Artificial Sequence
  Description of Artificial Sequence: Synthetic oligonucleotide
ugacuuucacuucaaugcc

SEQ ID NO: 2570399 - RNA, 19 nt, Artificial Sequence
  Description of Artificial Sequence: Synthetic oligonucleotide
ucaaaaugccuccuuacau

SEQ ID NO: 2570400 - RNA, 19 nt, Artificial Sequence
  Description of Artificial Sequence: Synthetic oligonucleotide
gacaacuccuacuuaauga

SEQ ID NO: 2570401 - RNA, 19 nt, Artificial Sequence
  Description of Artificial Sequence: Synthetic oligonucleotide
uaugucuuaucacgucacg

SEQ ID NO: 2570402 - RNA, 19 nt, Artificial Sequence
  Description of Artificial Sequence: Synthetic oligonucleotide
uuuccgacgaguuucguaa

SEQ ID NO: 2570403 - RNA, 19 nt, Artificial Sequence
  Description of Artificial Sequence: Synthetic oligonucleotide
uucgcuucaucccuugaag

SEQ ID NO: 2570404 - RNA, 19 nt, Artificial Sequence
  Description of Artificial Sequence: Synthetic oligonucleotide
aaugaaacuagaacacucu

SEQ ID NO: 2570405 - RNA, 19 nt, Artificial Sequence
  Description of Artificial Sequence: Synthetic oligonucleotide
uacuaggagaauuggaagu

SEQ ID NO: 2570406 - RNA, 19 nt, Artificial Sequence
  Description of Artificial Sequence: Synthetic oligonucleotide
uuauuucugaacuguuggc

SEQ ID NO: 2570407 - RNA, 19 nt, Artificial Sequence
  Description of Artificial Sequence: Synthetic oligonucleotide
uucguaagugcagagagga

SEQ ID NO: 2570408 - RNA, 19 nt, Artificial Sequence
  Description of Artificial Sequence: Synthetic oligonucleotide
uugaagacuuuuguuuucg

SEQ ID NO: 2570409 - RNA, 19 nt, Artificial Sequence
  Description of Artificial Sequence: Synthetic oligonucleotide
acuuguagaaaacuuuuau

SEQ ID NO: 2570410 - RNA, 19 nt, Artificial Sequence
  Description of Artificial Sequence: Synthetic oligonucleotide
uguugcuuuaucaggagua

SEQ ID NO: 2570411 - RNA, 19 nt, Artificial Sequence
  Description of Artificial Sequence: Synthetic oligonucleotide
uuucucucguuuuagaguu

SEQ ID NO: 2570412 - RNA, 19 nt, Artificial Sequence
  Description of Artificial Sequence: Synthetic oligonucleotide
ugcauaugucucuuaagca

SEQ ID NO: 2570413 - RNA, 19 nt, Artificial Sequence
  Description of Artificial Sequence: Synthetic oligonucleotide
uaucaggaguaauugaauc

SEQ ID NO: 2570414 - RNA, 19 nt, Artificial Sequence
  Description of Artificial Sequence: Synthetic oligonucleotide
uauuucugaacuguuggca

SEQ ID NO: 2570415 - RNA, 19 nt, Artificial Sequence
  Description of Artificial Sequence: Synthetic oligonucleotide
uauuuugggccuuuucucu

SEQ ID NO: 2570416 - RNA, 19 nt, Artificial Sequence
  Description of Artificial Sequence: Synthetic oligonucleotide
ucguuuuagaguuuugcuc

SEQ ID NO: 2570417 - RNA, 19 nt, Artificial Sequence
  Description of Artificial Sequence: Synthetic oligonucleotide
uucgagucuuaaaagauuu

SEQ ID NO: 2570418 - RNA, 19 nt, Artificial Sequence
  Description of Artificial Sequence: Synthetic oligonucleotide
gacgucagcuacuucauac

SEQ ID NO: 2570419 - RNA, 19 nt, Artificial Sequence
  Description of Artificial Sequence: Synthetic oligonucleotide
guuuucgagucuuaaaaga

SEQ ID NO: 2570420 - RNA, 19 nt, Artificial Sequence
  Description of Artificial Sequence: Synthetic oligonucleotide
uugcaugcaguuaaauugu

SEQ ID NO: 2570421 - RNA, 19 nt, Artificial Sequence
  Description of Artificial Sequence: Synthetic oligonucleotide
gucucuuaagcauuauuug

SEQ ID NO: 2570422 - RNA, 19 nt, Artificial Sequence
  Description of Artificial Sequence: Synthetic oligonucleotide
ugaaacuagaacacucuua

SEQ ID NO: 2570423 - RNA, 19 nt, Artificial Sequence
  Description of Artificial Sequence: Synthetic oligonucleotide
caggguuugaaucauuaug

SEQ ID NO: 2570424 - RNA, 19 nt, Artificial Sequence
  Description of Artificial Sequence: Synthetic oligonucleotide
uuuguugcuuuaucaggag

SEQ ID NO: 2570425 - RNA, 19 nt, Artificial Sequence
  Description of Artificial Sequence: Synthetic oligonucleotide
uaggagaauuggaagugcc

SEQ ID NO: 2570426 - RNA, 19 nt, Artificial Sequence
  Description of Artificial Sequence: Synthetic oligonucleotide
ugauuuucccaagguagcg

SEQ ID NO: 2570427 - RNA, 19 nt, Artificial Sequence
  Description of Artificial Sequence: Synthetic oligonucleotide
ugugaacuauauuuccucu

SEQ ID NO: 2570428 - RNA, 19 nt, Artificial Sequence
  Description of Artificial Sequence: Synthetic oligonucleotide
uuuugggccuuuucucucg

SEQ ID NO: 2570429 - RNA, 19 nt, Artificial Sequence
  Description of Artificial Sequence: Synthetic oligonucleotide
uuaaugaaacuagaacacu

SEQ ID NO: 2570430 - RNA, 19 nt, Artificial Sequence
  Description of Artificial Sequence: Synthetic oligonucleotide
uaucacgucacguuuccga

SEQ ID NO: 2570431 - RNA, 19 nt, Artificial Sequence
  Description of Artificial Sequence: Synthetic oligonucleotide
uaaauuguauucaggcuuu

SEQ ID NO: 2570432 - RNA, 19 nt, Artificial Sequence
  Description of Artificial Sequence: Synthetic oligonucleotide
uuguggacaauuuugcaua

SEQ ID NO: 2570433 - RNA, 19 nt, Artificial Sequence
  Description of Artificial Sequence: Synthetic oligonucleotide
aaacuggacaacuccuacu

SEQ ID NO: 2570434 - RNA, 19 nt, Artificial Sequence
  Description of Artificial Sequence: Synthetic oligonucleotide
ugaucucuaaacuggcugu

SEQ ID NO: 2570435 - RNA, 19 nt, Artificial Sequence
  Description of Artificial Sequence: Synthetic oligonucleotide
caguuaaauuguauucagg

SEQ ID NO: 2570436 - RNA, 19 nt, Artificial Sequence
  Description of Artificial Sequence: Synthetic oligonucleotide
uggcaguuauuauuuuggg

SEQ ID NO: 2570437 - RNA, 19 nt, Artificial Sequence
  Description of Artificial Sequence: Synthetic oligonucleotide
cuuauugcguccuuuagaa

SEQ ID NO: 2570438 - RNA, 19 nt, Artificial Sequence
  Description of Artificial Sequence: Synthetic oligonucleotide
uuuagaguuuugcuccaga

SEQ ID NO: 2570439 - RNA, 19 nt, Artificial Sequence
  Description of Artificial Sequence: Synthetic oligonucleotide
uagaacacucuuauugcgu

SEQ ID NO: 2570440 - RNA, 19 nt, Artificial Sequence
  Description of Artificial Sequence: Synthetic oligonucleotide
acuauauuuccucuugcaa

SEQ ID NO: 2570441 - RNA, 19 nt, Artificial Sequence
  Description of Artificial Sequence: Synthetic oligonucleotide
gaacuauauuuccucuugc

SEQ ID NO: 2570442 - RNA, 19 nt, Artificial Sequence
  Description of Artificial Sequence: Synthetic oligonucleotide
aucauuauguuucgcuuca

SEQ ID NO: 2570443 - RNA, 19 nt, Artificial Sequence
  Description of Artificial Sequence: Synthetic oligonucleotide
aguuuugcuccagaaagag

SEQ ID NO: 2570444 - RNA, 19 nt, Artificial Sequence
  Description of Artificial Sequence: Synthetic oligonucleotide
uuuaucuuguggacaauuu

SEQ ID NO: 2570445 - RNA, 19 nt, Artificial Sequence
  Description of Artificial Sequence: Synthetic oligonucleotide
uccagaaagaguuuaucuu

SEQ ID NO: 2570446 - RNA, 19 nt, Artificial Sequence
  Description of Artificial Sequence: Synthetic oligonucleotide
ugcuuuaucaggaguaauu

SEQ ID NO: 2570447 - RNA, 19 nt, Artificial Sequence
  Description of Artificial Sequence: Synthetic oligonucleotide
ugcaaaggaggcauuugca

SEQ ID NO: 2570448 - RNA, 19 nt, Artificial Sequence
  Description of Artificial Sequence: Synthetic oligonucleotide
auuuugggccuuuucucuc

SEQ ID NO: 2570449 - RNA, 19 nt, Artificial Sequence
  Description of Artificial Sequence: Synthetic oligonucleotide
guuggcaguuauuauuuug

SEQ ID NO: 2570450 - RNA, 19 nt, Artificial Sequence
  Description of Artificial Sequence: Synthetic oligonucleotide
uuauaugucuuaucacguc

SEQ ID NO: 2570451 - RNA, 19 nt, Artificial Sequence
  Description of Artificial Sequence: Synthetic oligonucleotide
uacaacaaacuggacaacu

SEQ ID NO: 2570452 - RNA, 19 nt, Artificial Sequence
  Description of Artificial Sequence: Synthetic oligonucleotide
uuagaguuuugcuccagaa

SEQ ID NO: 2570453 - RNA, 19 nt, Artificial Sequence
  Description of Artificial Sequence: Synthetic oligonucleotide
agaauuggaagugccauca

SEQ ID NO: 2570454 - RNA, 19 nt, Artificial Sequence
  Description of Artificial Sequence: Synthetic oligonucleotide
uuaucuuguggacaauuuu

SEQ ID NO: 2570455 - RNA, 19 nt, Artificial Sequence
  Description of Artificial Sequence: Synthetic oligonucleotide
ucagcuacuucauacuuuu

SEQ ID NO: 2570456 - RNA, 19 nt, Artificial Sequence
  Description of Artificial Sequence: Synthetic oligonucleotide
aggguuugaaucauuaugu

SEQ ID NO: 2570457 - RNA, 19 nt, Artificial Sequence
  Description of Artificial Sequence: Synthetic oligonucleotide
acuguuggcaguuauuauu

SEQ ID NO: 2570458 - RNA, 19 nt, Artificial Sequence
  Description of Artificial Sequence: Synthetic oligonucleotide
cuuaucacgucacguuucc

SEQ ID NO: 2570459 - RNA, 19 nt, Artificial Sequence
  Description of Artificial Sequence: Synthetic oligonucleotide
acaaagguugcccaggcuu

SEQ ID NO: 2570460 - RNA, 19 nt, Artificial Sequence
  Description of Artificial Sequence: Synthetic oligonucleotide
gacuuucacuucaaugccg

SEQ ID NO: 2570461 - RNA, 19 nt, Artificial Sequence
  Description of Artificial Sequence: Synthetic oligonucleotide
gcuuuguugcuuuaucagg

SEQ ID NO: 2570462 - RNA, 19 nt, Artificial Sequence
  Description of Artificial Sequence: Synthetic oligonucleotide
auaugucuuaucacgucac

SEQ ID NO: 2570463 - RNA, 19 nt, Artificial Sequence
  Description of Artificial Sequence: Synthetic oligonucleotide
ucuuaucacgucacguuuc

SEQ ID NO: 2570464 - RNA, 19 nt, Artificial Sequence
  Description of Artificial Sequence: Synthetic oligonucleotide
uuucgagucuuaaaagauu

SEQ ID NO: 2570465 - RNA, 19 nt, Artificial Sequence
  Description of Artificial Sequence: Synthetic oligonucleotide
gaguuuaucuuguggacaa

SEQ ID NO: 2570466 - RNA, 19 nt, Artificial Sequence
  Description of Artificial Sequence: Synthetic oligonucleotide
acuaggagaauuggaagug

SEQ ID NO: 2570467 - RNA, 19 nt, Artificial Sequence
  Description of Artificial Sequence: Synthetic oligonucleotide
ucccaagguagcgagauga

SEQ ID NO: 2570468 - RNA, 19 nt, Artificial Sequence
  Description of Artificial Sequence: Synthetic oligonucleotide
uucgcuuuuguagcaaaug

SEQ ID NO: 2570469 - RNA, 19 nt, Artificial Sequence
  Description of Artificial Sequence: Synthetic oligonucleotide
uuuaugaaccacaguuaua

SEQ ID NO: 2570470 - RNA, 19 nt, Artificial Sequence
  Description of Artificial Sequence: Synthetic oligonucleotide
gcagagaggacacuuguag

SEQ ID NO: 2570471 - RNA, 19 nt, Artificial Sequence
  Description of Artificial Sequence: Synthetic oligonucleotide
ugucuuaucacgucacguu

SEQ ID NO: 2570472 - RNA, 19 nt, Artificial Sequence
  Description of Artificial Sequence: Synthetic oligonucleotide
agaaagaguuuaucuugug

SEQ ID NO: 2570473 - RNA, 19 nt, Artificial Sequence
  Description of Artificial Sequence: Synthetic oligonucleotide
aggaacaaagguugcccag

SEQ ID NO: 2570474 - RNA, 19 nt, Artificial Sequence
  Description of Artificial Sequence: Synthetic oligonucleotide
ggaguaauugaaucccucc

SEQ ID NO: 2570475 - RNA, 19 nt, Artificial Sequence
  Description of Artificial Sequence: Synthetic oligonucleotide
uuucgcuucaucccuugaa

SEQ ID NO: 2570476 - RNA, 19 nt, Artificial Sequence
  Description of Artificial Sequence: Synthetic oligonucleotide
acuccuacuuaaugaaacu

SEQ ID NO: 2570477 - RNA, 19 nt, Artificial Sequence
  Description of Artificial Sequence: Synthetic oligonucleotide
gcaguuaaauuguauucag

SEQ ID NO: 2570478 - RNA, 19 nt, Artificial Sequence
  Description of Artificial Sequence: Synthetic oligonucleotide
caguuauaugucuuaucac

SEQ ID NO: 2570479 - RNA, 19 nt, Artificial Sequence
  Description of Artificial Sequence: Synthetic oligonucleotide
uuguugcuuuaucaggagu

SEQ ID NO: 2570480 - RNA, 19 nt, Artificial Sequence
  Description of Artificial Sequence: Synthetic oligonucleotide
guuaaauuguauucaggcu

SEQ ID NO: 2570481 - RNA, 19 nt, Artificial Sequence
  Description of Artificial Sequence: Synthetic oligonucleotide
ucucuaaacuggcugugau

SEQ ID NO: 2570482 - RNA, 19 nt, Artificial Sequence
  Description of Artificial Sequence: Synthetic oligonucleotide
uaugaaccacaguuauaug

SEQ ID NO: 2570483 - RNA, 19 nt, Artificial Sequence
  Description of Artificial Sequence: Synthetic oligonucleotide
gaacacucuuauugcgucc

SEQ ID NO: 2570484 - RNA, 19 nt, Artificial Sequence
  Description of Artificial Sequence: Synthetic oligonucleotide
uacauucgcuuuuguagca

SEQ ID NO: 2570485 - RNA, 19 nt, Artificial Sequence
  Description of Artificial Sequence: Synthetic oligonucleotide
aacuguuggcaguuauuau

SEQ ID NO: 2570486 - RNA, 19 nt, Artificial Sequence
  Description of Artificial Sequence: Synthetic oligonucleotide
aaaugccuccuuacauucg

SEQ ID NO: 2570487 - RNA, 19 nt, Artificial Sequence
  Description of Artificial Sequence: Synthetic oligonucleotide
cuuuaucaggaguaauuga

SEQ ID NO: 2570488 - RNA, 19 nt, Artificial Sequence
  Description of Artificial Sequence: Synthetic oligonucleotide
aacaaagguugcccaggcu

SEQ ID NO: 2570489 - RNA, 19 nt, Artificial Sequence
  Description of Artificial Sequence: Synthetic oligonucleotide
auuuccucuugcaaaggag

SEQ ID NO: 2570490 - RNA, 19 nt, Artificial Sequence
  Description of Artificial Sequence: Synthetic oligonucleotide
uuuauagcucugaucucua

SEQ ID NO: 2570491 - RNA, 19 nt, Artificial Sequence
  Description of Artificial Sequence: Synthetic oligonucleotide
auugcguccuuuagaaguc

SEQ ID NO: 2570492 - RNA, 19 nt, Artificial Sequence
  Description of Artificial Sequence: Synthetic oligonucleotide
gaguuucguaagugcagag

SEQ ID NO: 2570493 - RNA, 19 nt, Artificial Sequence
  Description of Artificial Sequence: Synthetic oligonucleotide
agcauuauuugugaacuau

SEQ ID NO: 2570494 - RNA, 19 nt, Artificial Sequence
  Description of Artificial Sequence: Synthetic oligonucleotide
ggcaguuauuauuuugggc

SEQ ID NO: 2570495 - RNA, 19 nt, Artificial Sequence
  Description of Artificial Sequence: Synthetic oligonucleotide
gagaauuggaagugccauc

SEQ ID NO: 2570496 - RNA, 19 nt, Artificial Sequence
  Description of Artificial Sequence: Synthetic oligonucleotide
gaauuggaagugccaucag

SEQ ID NO: 2570497 - RNA, 19 nt, Artificial Sequence
  Description of Artificial Sequence: Synthetic oligonucleotide
uuuagaagucugguuugga

SEQ ID NO: 2570498 - RNA, 19 nt, Artificial Sequence
  Description of Artificial Sequence: Synthetic oligonucleotide
uuggaagugccaucagggu

SEQ ID NO: 2570499 - RNA, 19 nt, Artificial Sequence
  Description of Artificial Sequence: Synthetic oligonucleotide
aagguagcgagaugacuuu

SEQ ID NO: 2570500 - RNA, 19 nt, Artificial Sequence
  Description of Artificial Sequence: Synthetic oligonucleotide
cucuuauugcguccuuuag

SEQ ID NO: 2570501 - RNA, 19 nt, Artificial Sequence
  Description of Artificial Sequence: Synthetic oligonucleotide
gugauuuucccaagguagc

SEQ ID NO: 2570502 - RNA, 19 nt, Artificial Sequence
  Description of Artificial Sequence: Synthetic oligonucleotide
guaagugcagagaggacac

SEQ ID NO: 2570503 - RNA, 19 nt, Artificial Sequence
  Description of Artificial Sequence: Synthetic oligonucleotide
gacgaguuucguaagugca

SEQ ID NO: 2570504 - RNA, 19 nt, Artificial Sequence
  Description of Artificial Sequence: Synthetic oligonucleotide
aaacuagaacacucuuauu

SEQ ID NO: 2570505 - RNA, 19 nt, Artificial Sequence
  Description of Artificial Sequence: Synthetic oligonucleotide
cacguuuccgacgaguuuc

SEQ ID NO: 2570506 - RNA, 19 nt, Artificial Sequence
  Description of Artificial Sequence: Synthetic oligonucleotide
ugaacuguuggcaguuauu

SEQ ID NO: 2570507 - RNA, 19 nt, Artificial Sequence
  Description of Artificial Sequence: Synthetic oligonucleotide
uccaggaacaaagguugcc

SEQ ID NO: 2570508 - RNA, 19 nt, Artificial Sequence
  Description of Artificial Sequence: Synthetic oligonucleotide
gaguaauugaaucccuccu

SEQ ID NO: 2570509 - RNA, 19 nt, Artificial Sequence
  Description of Artificial Sequence: Synthetic oligonucleotide
aggaguaauugaaucccuc

SEQ ID NO: 2570510 - RNA, 19 nt, Artificial Sequence
  Description of Artificial Sequence: Synthetic oligonucleotide
uguuucgcuucaucccuug

SEQ ID NO: 2570511 - RNA, 19 nt, Artificial Sequence
  Description of Artificial Sequence: Synthetic oligonucleotide
cacaguuauaugucuuauc

SEQ ID NO: 2570512 - RNA, 19 nt, Artificial Sequence
  Description of Artificial Sequence: Synthetic oligonucleotide
gaacuguuggcaguuauua

SEQ ID NO: 2570513 - RNA, 19 nt, Artificial Sequence
  Description of Artificial Sequence: Synthetic oligonucleotide
uugaaucauuauguuucgc

SEQ ID NO: 2570514 - RNA, 19 nt, Artificial Sequence
  Description of Artificial Sequence: Synthetic oligonucleotide
aaucccuccucaguccucu

SEQ ID NO: 2570515 - RNA, 19 nt, Artificial Sequence
  Description of Artificial Sequence: Synthetic oligonucleotide
aggacacuuguagaaaacu

SEQ ID NO: 2570516 - RNA, 19 nt, Artificial Sequence
  Description of Artificial Sequence: Synthetic oligonucleotide
ucaggguuugaaucauuau

SEQ ID NO: 2570517 - RNA, 19 nt, Artificial Sequence
  Description of Artificial Sequence: Synthetic oligonucleotide
uguggacaauuuugcauau

SEQ ID NO: 2570518 - RNA, 19 nt, Artificial Sequence
  Description of Artificial Sequence: Synthetic oligonucleotide
gaucucuaaacuggcugug

SEQ ID NO: 2570519 - RNA, 19 nt, Artificial Sequence
  Description of Artificial Sequence: Synthetic oligonucleotide
caucugugaagaguagaag

SEQ ID NO: 2570520 - RNA, 19 nt, Artificial Sequence
  Description of Artificial Sequence: Synthetic oligonucleotide
acgucagcuacuucauacu

SEQ ID NO: 2570521 - RNA, 19 nt, Artificial Sequence
  Description of Artificial Sequence: Synthetic oligonucleotide
uggacaacuccuacuuaau

SEQ ID NO: 2570522 - RNA, 19 nt, Artificial Sequence
  Description of Artificial Sequence: Synthetic oligonucleotide
cuggacaacuccuacuuaa

SEQ ID NO: 2570523 - RNA, 19 nt, Artificial Sequence
  Description of Artificial Sequence: Synthetic oligonucleotide
uuaucacgucacguuuccg

SEQ ID NO: 2570524 - RNA, 19 nt, Artificial Sequence
  Description of Artificial Sequence: Synthetic oligonucleotide
cauuauuugugaacuauau

SEQ ID NO: 2570525 - RNA, 19 nt, Artificial Sequence
  Description of Artificial Sequence: Synthetic oligonucleotide
ggcauuugcaugcaguuaa

SEQ ID NO: 2570526 - RNA, 19 nt, Artificial Sequence
  Description of Artificial Sequence: Synthetic oligonucleotide
acuuucacuucaaugccga

SEQ ID NO: 2570527 - RNA, 19 nt, Artificial Sequence
  Description of Artificial Sequence: Synthetic oligonucleotide
aaagguugcccaggcuuug

SEQ ID NO: 2570528 - RNA, 19 nt, Artificial Sequence
  Description of Artificial Sequence: Synthetic oligonucleotide
uccgacgaguuucguaagu

SEQ ID NO: 2570529 - RNA, 19 nt, Artificial Sequence
  Description of Artificial Sequence: Synthetic oligonucleotide
augucuuaucacgucacgu

SEQ ID NO: 2570530 - RNA, 19 nt, Artificial Sequence
  Description of Artificial Sequence: Synthetic oligonucleotide
acucuuauugcguccuuua

SEQ ID NO: 2570531 - RNA, 19 nt, Artificial Sequence
  Description of Artificial Sequence: Synthetic oligonucleotide
gauuuucccaagguagcga

SEQ ID NO: 2570532 - RNA, 19 nt, Artificial Sequence
  Description of Artificial Sequence: Synthetic oligonucleotide
acgaguuucguaagugcag

SEQ ID NO: 2570533 - RNA, 19 nt, Artificial Sequence
  Description of Artificial Sequence: Synthetic oligonucleotide
agugccaucaggguuugaa

SEQ ID NO: 2570534 - RNA, 19 nt, Artificial Sequence
  Description of Artificial Sequence: Synthetic oligonucleotide
guuauaugucuuaucacgu

SEQ ID NO: 2570535 - RNA, 19 nt, Artificial Sequence
  Description of Artificial Sequence: Synthetic oligonucleotide
guuuuagaguuuugcucca

SEQ ID NO: 2570536 - RNA, 19 nt, Artificial Sequence
  Description of Artificial Sequence: Synthetic oligonucleotide
ugggccuuuucucucguuu

SEQ ID NO: 2570537 - RNA, 19 nt, Artificial Sequence
  Description of Artificial Sequence: Synthetic oligonucleotide
caugcaguuaaauuguauu

SEQ ID NO: 2570538 - RNA, 19 nt, Artificial Sequence
  Description of Artificial Sequence: Synthetic oligonucleotide
aaugccgacgucagcuacu

SEQ ID NO: 2570539 - RNA, 19 nt, Artificial Sequence
  Description of Artificial Sequence: Synthetic oligonucleotide
cuuguggacaauuuugcau

SEQ ID NO: 2570540 - RNA, 19 nt, Artificial Sequence
  Description of Artificial Sequence: Synthetic oligonucleotide
ugcuccagaaagaguuuau

SEQ ID NO: 2570541 - RNA, 19 nt, Artificial Sequence
  Description of Artificial Sequence: Synthetic oligonucleotide
cuuguagaaaacuuuuauu

SEQ ID NO: 2570542 - RNA, 19 nt, Artificial Sequence
  Description of Artificial Sequence: Synthetic oligonucleotide
augucucuuaagcauuauu

SEQ ID NO: 2570543 - RNA, 19 nt, Artificial Sequence
  Description of Artificial Sequence: Synthetic oligonucleotide
cuccagaaagaguuuaucu

SEQ ID NO: 2570544 - RNA, 19 nt, Artificial Sequence
  Description of Artificial Sequence: Synthetic oligonucleotide
uuccgacgaguuucguaag

SEQ ID NO: 2570545 - RNA, 19 nt, Artificial Sequence
  Description of Artificial Sequence: Synthetic oligonucleotide
uugccacuuuguuuagaac

SEQ ID NO: 2570546 - RNA, 19 nt, Artificial Sequence
  Description of Artificial Sequence: Synthetic oligonucleotide
ggcugugauuuucccaagg

SEQ ID NO: 2570547 - RNA, 19 nt, Artificial Sequence
  Description of Artificial Sequence: Synthetic oligonucleotide
ucguaagugcagagaggac

SEQ ID NO: 2570548 - RNA, 19 nt, Artificial Sequence
  Description of Artificial Sequence: Synthetic oligonucleotide
ucgagucuuaaaagauuuu

SEQ ID NO: 2570549 - RNA, 19 nt, Artificial Sequence
  Description of Artificial Sequence: Synthetic oligonucleotide
ucuugcaaaggaggcauuu

SEQ ID NO: 2570550 - RNA, 19 nt, Artificial Sequence
  Description of Artificial Sequence: Synthetic oligonucleotide
uuacaacaaacuggacaac

SEQ ID NO: 2570551 - RNA, 19 nt, Artificial Sequence
  Description of Artificial Sequence: Synthetic oligonucleotide
ugcaugcaguuaaauugua

SEQ ID NO: 2570552 - RNA, 19 nt, Artificial Sequence
  Description of Artificial Sequence: Synthetic oligonucleotide
uuugggccuuuucucucgu

SEQ ID NO: 2570553 - RNA, 19 nt, Artificial Sequence
  Description of Artificial Sequence: Synthetic oligonucleotide
cucguuuuagaguuuugcu

SEQ ID NO: 2570554 - RNA, 19 nt, Artificial Sequence
  Description of Artificial Sequence: Synthetic oligonucleotide
ccuuuagaagucugguuug

SEQ ID NO: 2570555 - RNA, 19 nt, Artificial Sequence
  Description of Artificial Sequence: Synthetic oligonucleotide
caggcuuuguugcuuuauc

SEQ ID NO: 2570556 - RNA, 19 nt, Artificial Sequence
  Description of Artificial Sequence: Synthetic oligonucleotide
gccgacgucagcuacuuca

SEQ ID NO: 2570557 - RNA, 19 nt, Artificial Sequence
  Description of Artificial Sequence: Synthetic oligonucleotide
caagguagcgagaugacuu

SEQ ID NO: 2570558 - RNA, 19 nt, Artificial Sequence
  Description of Artificial Sequence: Synthetic oligonucleotide
ucucucguuuuagaguuuu

SEQ ID NO: 2570559 - RNA, 19 nt, Artificial Sequence
  Description of Artificial Sequence: Synthetic oligonucleotide
uugugacuuucacuucaau

SEQ ID NO: 2570560 - RNA, 19 nt, Artificial Sequence
  Description of Artificial Sequence: Synthetic oligonucleotide
uccuuacauucgcuuuugu

SEQ ID NO: 2570561 - RNA, 19 nt, Artificial Sequence
  Description of Artificial Sequence: Synthetic oligonucleotide
cacuucaaugccgacguca

SEQ ID NO: 2570562 - RNA, 19 nt, Artificial Sequence
  Description of Artificial Sequence: Synthetic oligonucleotide
cacgucacguuuccgacga

SEQ ID NO: 2570563 - RNA, 19 nt, Artificial Sequence
  Description of Artificial Sequence: Synthetic oligonucleotide
uucccaagguagcgagaug

SEQ ID NO: 2570564 - RNA, 19 nt, Artificial Sequence
  Description of Artificial Sequence: Synthetic oligonucleotide
ucaaugccgacgucagcua

SEQ ID NO: 2570565 - RNA, 19 nt, Artificial Sequence
  Description of Artificial Sequence: Synthetic oligonucleotide
caaugccgacgucagcuac

SEQ ID NO: 2570566 - RNA, 19 nt, Artificial Sequence
  Description of Artificial Sequence: Synthetic oligonucleotide
ucacguuuccgacgaguuu

SEQ ID NO: 2570567 - RNA, 19 nt, Artificial Sequence
  Description of Artificial Sequence: Synthetic oligonucleotide
ggagaagcgggauccagga

SEQ ID NO: 2570568 - RNA, 19 nt, Artificial Sequence
  Description of Artificial Sequence: Synthetic oligonucleotide
cuucaaugccgacgucagc

SEQ ID NO: 2570569 - RNA, 19 nt, Artificial Sequence
  Description of Artificial Sequence: Synthetic oligonucleotide
aggagaauuggaagugcca

SEQ ID NO: 2570570 - RNA, 19 nt, Artificial Sequence
  Description of Artificial Sequence: Synthetic oligonucleotide
cagaaagaguuuaucuugu

SEQ ID NO: 2570571 - RNA, 19 nt, Artificial Sequence
  Description of Artificial Sequence: Synthetic oligonucleotide
cuaugaacuucaucaaaau

SEQ ID NO: 2570572 - RNA, 19 nt, Artificial Sequence
  Description of Artificial Sequence: Synthetic oligonucleotide
aggaggcauuugcaugcag

SEQ ID NO: 2570573 - RNA, 19 nt, Artificial Sequence
  Description of Artificial Sequence: Synthetic oligonucleotide
uugcuccagaaagaguuua

SEQ ID NO: 2570574 - RNA, 19 nt, Artificial Sequence
  Description of Artificial Sequence: Synthetic oligonucleotide
uugcuuuaucaggaguaau

SEQ ID NO: 2570575 - RNA, 19 nt, Artificial Sequence
  Description of Artificial Sequence: Synthetic oligonucleotide
cauaugucucuuaagcauu

SEQ ID NO: 2570576 - RNA, 19 nt, Artificial Sequence
  Description of Artificial Sequence: Synthetic oligonucleotide
guuuccgacgaguuucgua

SEQ ID NO: 2570577 - RNA, 19 nt, Artificial Sequence
  Description of Artificial Sequence: Synthetic oligonucleotide
caaaaugccuccuuacauu

SEQ ID NO: 2570578 - RNA, 19 nt, Artificial Sequence
  Description of Artificial Sequence: Synthetic oligonucleotide
caguuauuauuuugggccu

SEQ ID NO: 2570579 - RNA, 19 nt, Artificial Sequence
  Description of Artificial Sequence: Synthetic oligonucleotide
acguuuccgacgaguuucg

SEQ ID NO: 2570580 - RNA, 19 nt, Artificial Sequence
  Description of Artificial Sequence: Synthetic oligonucleotide
aguuauuauuuugggccuu

SEQ ID NO: 2570581 - RNA, 19 nt, Artificial Sequence
  Description of Artificial Sequence: Synthetic oligonucleotide
cacuuguagaaaacuuuua

SEQ ID NO: 2570582 - RNA, 19 nt, Artificial Sequence
  Description of Artificial Sequence: Synthetic oligonucleotide
ugccuccuuacauucgcuu

SEQ ID NO: 2570583 - RNA, 19 nt, Artificial Sequence
  Description of Artificial Sequence: Synthetic oligonucleotide
gaggcauuugcaugcaguu

SEQ ID NO: 2570584 - RNA, 19 nt, Artificial Sequence
  Description of Artificial Sequence: Synthetic oligonucleotide
uaugucucuuaagcauuau

SEQ ID NO: 2570585 - RNA, 19 nt, Artificial Sequence
  Description of Artificial Sequence: Synthetic oligonucleotide
acaaacuggacaacuccua

SEQ ID NO: 2570586 - RNA, 19 nt, Artificial Sequence
  Description of Artificial Sequence: Synthetic oligonucleotide
aagucugguuuggagucuu

SEQ ID NO: 2570587 - RNA, 19 nt, Artificial Sequence
  Description of Artificial Sequence: Synthetic oligonucleotide
auaugucucuuaagcauua

SEQ ID NO: 2570588 - RNA, 19 nt, Artificial Sequence
  Description of Artificial Sequence: Synthetic oligonucleotide
aagguugcccaggcuuugu

SEQ ID NO: 2570589 - RNA, 19 nt, Artificial Sequence
  Description of Artificial Sequence: Synthetic oligonucleotide
gguuugaaucauuauguuu

SEQ ID NO: 2570590 - RNA, 19 nt, Artificial Sequence
  Description of Artificial Sequence: Synthetic oligonucleotide
cauucgcuuuuguagcaaa

SEQ ID NO: 2570591 - RNA, 19 nt, Artificial Sequence
  Description of Artificial Sequence: Synthetic oligonucleotide
ucccuccucaguccucuau

SEQ ID NO: 2570592 - RNA, 19 nt, Artificial Sequence
  Description of Artificial Sequence: Synthetic oligonucleotide
cuccuacuuaaugaaacua

SEQ ID NO: 2570593 - RNA, 19 nt, Artificial Sequence
  Description of Artificial Sequence: Synthetic oligonucleotide
auucgcuuuuguagcaaau

SEQ ID NO: 2570594 - RNA, 19 nt, Artificial Sequence
  Description of Artificial Sequence: Synthetic oligonucleotide
ggacaauuuugcauauguc

SEQ ID NO: 2570595 - RNA, 19 nt, Artificial Sequence
  Description of Artificial Sequence: Synthetic oligonucleotide
uugcguccuuuagaagucu

SEQ ID NO: 2570596 - RNA, 19 nt, Artificial Sequence
  Description of Artificial Sequence: Synthetic oligonucleotide
gucuuaucacgucacguuu

SEQ ID NO: 2570597 - RNA, 19 nt, Artificial Sequence
  Description of Artificial Sequence: Synthetic oligonucleotide
ucauuauguuucgcuucau

SEQ ID NO: 2570598 - RNA, 19 nt, Artificial Sequence
  Description of Artificial Sequence: Synthetic oligonucleotide
uucucucguuuuagaguuu

SEQ ID NO: 2570599 - RNA, 19 nt, Artificial Sequence
  Description of Artificial Sequence: Synthetic oligonucleotide
gugaacuauauuuccucuu

SEQ ID NO: 2570600 - RNA, 19 nt, Artificial Sequence
  Description of Artificial Sequence: Synthetic oligonucleotide
cgacgaguuucguaagugc

SEQ ID NO: 2570601 - RNA, 19 nt, Artificial Sequence
  Description of Artificial Sequence: Synthetic oligonucleotide
aguuuaucuuguggacaau

SEQ ID NO: 2570602 - RNA, 19 nt, Artificial Sequence
  Description of Artificial Sequence: Synthetic oligonucleotide
gagaagcgggauccaggaa

SEQ ID NO: 2570603 - RNA, 19 nt, Artificial Sequence
  Description of Artificial Sequence: Synthetic oligonucleotide
agcgggauccaggaacaaa

SEQ ID NO: 2570604 - RNA, 19 nt, Artificial Sequence
  Description of Artificial Sequence: Synthetic oligonucleotide
aggcauuugcaugcaguua

SEQ ID NO: 2570605 - RNA, 19 nt, Artificial Sequence
  Description of Artificial Sequence: Synthetic oligonucleotide
ggagaauuggaagugccau

SEQ ID NO: 2570606 - RNA, 19 nt, Artificial Sequence
  Description of Artificial Sequence: Synthetic oligonucleotide
caggaguaauugaaucccu

SEQ ID NO: 2570607 - RNA, 19 nt, Artificial Sequence
  Description of Artificial Sequence: Synthetic oligonucleotide
gcauuauuugugaacuaua

SEQ ID NO: 2570608 - RNA, 19 nt, Artificial Sequence
  Description of Artificial Sequence: Synthetic oligonucleotide
agguugcccaggcuuuguu

SEQ ID NO: 2570609 - RNA, 19 nt, Artificial Sequence
  Description of Artificial Sequence: Synthetic oligonucleotide
caaagguugcccaggcuuu

SEQ ID NO: 2570610 - RNA, 19 nt, Artificial Sequence
  Description of Artificial Sequence: Synthetic oligonucleotide
guuuugcuccagaaagagu

SEQ ID NO: 2570611 - RNA, 19 nt, Artificial Sequence
  Description of Artificial Sequence: Synthetic oligonucleotide
ccuuuucucucguuuuaga

SEQ ID NO: 2570612 - RNA, 19 nt, Artificial Sequence
  Description of Artificial Sequence: Synthetic oligonucleotide
acacucuuauugcguccuu

SEQ ID NO: 2570613 - RNA, 19 nt, Artificial Sequence
  Description of Artificial Sequence: Synthetic oligonucleotide
ccgacgaguuucguaagug

SEQ ID NO: 2570614 - RNA, 19 nt, Artificial Sequence
  Description of Artificial Sequence: Synthetic oligonucleotide
ccucuaugaacuucaucaa

SEQ ID NO: 2570615 - RNA, 19 nt, Artificial Sequence
  Description of Artificial Sequence: Synthetic oligonucleotide
acgucacguuuccgacgag

SEQ ID NO: 2570616 - RNA, 19 nt, Artificial Sequence
  Description of Artificial Sequence: Synthetic oligonucleotide
cuccucaguccucuaugaa

SEQ ID NO: 2570617 - RNA, 19 nt, Artificial Sequence
  Description of Artificial Sequence: Synthetic oligonucleotide
ggaagugccaucaggguuu

SEQ ID NO: 2570618 - RNA, 19 nt, Artificial Sequence
  Description of Artificial Sequence: Synthetic oligonucleotide
cccaagguagcgagaugac

SEQ ID NO: 2570619 - RNA, 19 nt, Artificial Sequence
  Description of Artificial Sequence: Synthetic oligonucleotide
cucuaaacuggcugugauu

SEQ ID NO: 2570620 - RNA, 19 nt, Artificial Sequence
  Description of Artificial Sequence: Synthetic oligonucleotide
agguagcgagaugacuuuu

SEQ ID NO: 2570621 - RNA, 19 nt, Artificial Sequence
  Description of Artificial Sequence: Synthetic oligonucleotide
aagcgggauccaggaacaa

SEQ ID NO: 2570622 - RNA, 19 nt, Artificial Sequence
  Description of Artificial Sequence: Synthetic oligonucleotide
augccuccuuacauucgcu

SEQ ID NO: 2570623 - RNA, 19 nt, Artificial Sequence
  Description of Artificial Sequence: Synthetic oligonucleotide
augccgacgucagcuacuu

SEQ ID NO: 2570624 - RNA, 19 nt, Artificial Sequence
  Description of Artificial Sequence: Synthetic oligonucleotide
uugggccuuuucucucguu

SEQ ID NO: 2570625 - RNA, 19 nt, Artificial Sequence
  Description of Artificial Sequence: Synthetic oligonucleotide
gucagcuacuucauacuuu

SEQ ID NO: 2570626 - RNA, 19 nt, Artificial Sequence
  Description of Artificial Sequence: Synthetic oligonucleotide
auguuucgcuucaucccuu

SEQ ID NO: 2570627 - RNA, 19 nt, Artificial Sequence
  Description of Artificial Sequence: Synthetic oligonucleotide
ggacacuuguagaaaacuu

SEQ ID NO: 2570628 - RNA, 19 nt, Artificial Sequence
  Description of Artificial Sequence: Synthetic oligonucleotide
gucacguuuccgacgaguu

SEQ ID NO: 2570629 - RNA, 19 nt, Artificial Sequence
  Description of Artificial Sequence: Synthetic oligonucleotide
ugccgacgucagcuacuuc

SEQ ID NO: 2570630 - RNA, 19 nt, Artificial Sequence
  Description of Artificial Sequence: Synthetic oligonucleotide
aucccuugaagggccucuu

SEQ ID NO: 2570631 - RNA, 19 nt, Artificial Sequence
  Description of Artificial Sequence: Synthetic oligonucleotide
aagugccaucaggguuuga

SEQ ID NO: 2570632 - RNA, 19 nt, Artificial Sequence
  Description of Artificial Sequence: Synthetic oligonucleotide
cgaguuucguaagugcaga

SEQ ID NO: 2570633 - RNA, 19 nt, Artificial Sequence
  Description of Artificial Sequence: Synthetic oligonucleotide
gcauuugcaugcaguuaaa

SEQ ID NO: 2570634 - RNA, 19 nt, Artificial Sequence
  Description of Artificial Sequence: Synthetic oligonucleotide
cacucuuauugcguccuuu

SEQ ID NO: 2570635 - RNA, 19 nt, Artificial Sequence
  Description of Artificial Sequence: Synthetic oligonucleotide
ccuccuuacauucgcuuuu

SEQ ID NO: 2570636 - RNA, 19 nt, Artificial Sequence
  Description of Artificial Sequence: Synthetic oligonucleotide
ccaagguagcgagaugacu

SEQ ID NO: 2570637 - RNA, 19 nt, Artificial Sequence
  Description of Artificial Sequence: Synthetic oligonucleotide
ccacaguuauaugucuuau

SEQ ID NO: 2570638 - RNA, 19 nt, Artificial Sequence
  Description of Artificial Sequence: Synthetic oligonucleotide
ccgacgucagcuacuucau

SEQ ID NO: 2570639 - RNA, 19 nt, Artificial Sequence
  Description of Artificial Sequence: Synthetic oligonucleotide
ccaggcuuuguugcuuuau

SEQ ID NO: 2570640 - RNA, 19 nt, Artificial Sequence
  Description of Artificial Sequence: Synthetic oligonucleotide
cgucacguuuccgacgagu

SEQ ID NO: 2570641 - RNA, 19 nt, Artificial Sequence
  Description of Artificial Sequence: Synthetic oligonucleotide
cgacgucagcuacuucaua

SEQ ID NO: 2570642 - RNA, 19 nt, Artificial Sequence
  Description of Artificial Sequence: Synthetic oligonucleotide
cguuuccgacgaguuucgu

SEQ ID NO: 2570643 - RNA, 19 nt, Artificial Sequence
  Description of Artificial Sequence: Synthetic oligonucleotide
uuaacuggaauuuugauag

SEQ ID NO: 2570644 - RNA, 19 nt, Artificial Sequence
  Description of Artificial Sequence: Synthetic oligonucleotide
aaaauuucauaauacagca

SEQ ID NO: 2570645 - RNA, 19 nt, Artificial Sequence
  Description of Artificial Sequence: Synthetic oligonucleotide
aaccccauaucccauaugc

SEQ ID NO: 2570646 - RNA, 19 nt, Artificial Sequence
  Description of Artificial Sequence: Synthetic oligonucleotide
auuuugauagaccuaaggg

SEQ ID NO: 2570647 - RNA, 19 nt, Artificial Sequence
  Description of Artificial Sequence: Synthetic oligonucleotide
aauuuugauagaccuaagg

SEQ ID NO: 2570648 - RNA, 19 nt, Artificial Sequence
  Description of Artificial Sequence: Synthetic oligonucleotide
aaagagaguccucagcagc

SEQ ID NO: 2570649 - RNA, 19 nt, Artificial Sequence
  Description of Artificial Sequence: Synthetic oligonucleotide
aagaguuucagucaaagaa

SEQ ID NO: 2570650 - RNA, 19 nt, Artificial Sequence
  Description of Artificial Sequence: Synthetic oligonucleotide
ucuacuuuagcuaaaauuu

SEQ ID NO: 2570651 - RNA, 19 nt, Artificial Sequence
  Description of Artificial Sequence: Synthetic oligonucleotide
uuuugauagaccuaagggc

SEQ ID NO: 2570652 - RNA, 19 nt, Artificial Sequence
  Description of Artificial Sequence: Synthetic oligonucleotide
uuuagcuaaaauuucauaa

SEQ ID NO: 2570653 - RNA, 19 nt, Artificial Sequence
  Description of Artificial Sequence: Synthetic oligonucleotide
aauggugacuaacaucuac

SEQ ID NO: 2570654 - RNA, 19 nt, Artificial Sequence
  Description of Artificial Sequence: Synthetic oligonucleotide
aacaaagagaguccucagc

SEQ ID NO: 2570655 - RNA, 19 nt, Artificial Sequence
  Description of Artificial Sequence: Synthetic oligonucleotide
cucacuggaacaaagagag

SEQ ID NO: 2570656 - RNA, 19 nt, Artificial Sequence
  Description of Artificial Sequence: Synthetic oligonucleotide
acuaacaucuacuuuagcu

SEQ ID NO: 2570657 - RNA, 19 nt, Artificial Sequence
  Description of Artificial Sequence: Synthetic oligonucleotide
aucaacacugacuagagcu

SEQ ID NO: 2570658 - RNA, 19 nt, Artificial Sequence
  Description of Artificial Sequence: Synthetic oligonucleotide
uucauaauacagcaaauaa

SEQ ID NO: 2570659 - RNA, 19 nt, Artificial Sequence
  Description of Artificial Sequence: Synthetic oligonucleotide
gaugcaaaugugaagagcc

SEQ ID NO: 2570660 - RNA, 19 nt, Artificial Sequence
  Description of Artificial Sequence: Synthetic oligonucleotide
uauuccuuuuguuggagcg

SEQ ID NO: 2570661 - RNA, 19 nt, Artificial Sequence
  Description of Artificial Sequence: Synthetic oligonucleotide
aacauuaucacuacagcug

SEQ ID NO: 2570662 - RNA, 19 nt, Artificial Sequence
  Description of Artificial Sequence: Synthetic oligonucleotide
uauuauacccacuaucaac

SEQ ID NO: 2570663 - RNA, 19 nt, Artificial Sequence
  Description of Artificial Sequence: Synthetic oligonucleotide
auuacugguguuauuauac

SEQ ID NO: 2570664 - RNA, 19 nt, Artificial Sequence
  Description of Artificial Sequence: Synthetic oligonucleotide
uuuuccauuucucuguucu

SEQ ID NO: 2570665 - RNA, 19 nt, Artificial Sequence
  Description of Artificial Sequence: Synthetic oligonucleotide
uguuauuauacccacuauc

SEQ ID NO: 2570666 - RNA, 19 nt, Artificial Sequence
  Description of Artificial Sequence: Synthetic oligonucleotide
uguuccuagauugacuucg

SEQ ID NO: 2570667 - RNA, 19 nt, Artificial Sequence
  Description of Artificial Sequence: Synthetic oligonucleotide
ucaacauuaucacuacagc

SEQ ID NO: 2570668 - RNA, 19 nt, Artificial Sequence
  Description of Artificial Sequence: Synthetic oligonucleotide
uucaaaucggaucugcugu

SEQ ID NO: 2570669 - RNA, 19 nt, Artificial Sequence
  Description of Artificial Sequence: Synthetic oligonucleotide
aaaucggaucugcugugcc

SEQ ID NO: 2570670 - RNA, 19 nt, Artificial Sequence
  Description of Artificial Sequence: Synthetic oligonucleotide
acugacuagagcucacugc

SEQ ID NO: 2570671 - RNA, 19 nt, Artificial Sequence
  Description of Artificial Sequence: Synthetic oligonucleotide
aacuggaauuuugauagac

SEQ ID NO: 2570672 - RNA, 19 nt, Artificial Sequence
  Description of Artificial Sequence: Synthetic oligonucleotide
aacgaagcaucuucgaugu

SEQ ID NO: 2570673 - RNA, 19 nt, Artificial Sequence
  Description of Artificial Sequence: Synthetic oligonucleotide
ugcuguccgguucaaaucg

SEQ ID NO: 2570674 - RNA, 19 nt, Artificial Sequence
  Description of Artificial Sequence: Synthetic oligonucleotide
uugaucaucaacacugacu

SEQ ID NO: 2570675 - RNA, 19 nt, Artificial Sequence
  Description of Artificial Sequence: Synthetic oligonucleotide
uguugaauggugacuaaca

SEQ ID NO: 2570676 - RNA, 19 nt, Artificial Sequence
  Description of Artificial Sequence: Synthetic oligonucleotide
acuauuuguucuauguccc

SEQ ID NO: 2570677 - RNA, 19 nt, Artificial Sequence
  Description of Artificial Sequence: Synthetic oligonucleotide
gaaucuugccuauauaguc

SEQ ID NO: 2570678 - RNA, 19 nt, Artificial Sequence
  Description of Artificial Sequence: Synthetic oligonucleotide
aaugugaagagcccacugu

SEQ ID NO: 2570679 - RNA, 19 nt, Artificial Sequence
  Description of Artificial Sequence: Synthetic oligonucleotide
uuugaggucccugaaaccc

SEQ ID NO: 2570680 - RNA, 19 nt, Artificial Sequence
  Description of Artificial Sequence: Synthetic oligonucleotide
agcuaaaauuucauaauac

SEQ ID NO: 2570681 - RNA, 19 nt, Artificial Sequence
  Description of Artificial Sequence: Synthetic oligonucleotide
agaguuucagucaaagaac

SEQ ID NO: 2570682 - RNA, 19 nt, Artificial Sequence
  Description of Artificial Sequence: Synthetic oligonucleotide
uaaauuacugguguuauua

SEQ ID NO: 2570683 - RNA, 19 nt, Artificial Sequence
  Description of Artificial Sequence: Synthetic oligonucleotide
ucugcugugccguuaaggc

SEQ ID NO: 2570684 - RNA, 19 nt, Artificial Sequence
  Description of Artificial Sequence: Synthetic oligonucleotide
ccuagauugacuucgaagc

SEQ ID NO: 2570685 - RNA, 19 nt, Artificial Sequence
  Description of Artificial Sequence: Synthetic oligonucleotide
uccgguucaaaucggaucu

SEQ ID NO: 2570686 - RNA, 19 nt, Artificial Sequence
  Description of Artificial Sequence: Synthetic oligonucleotide
aauaaauuacugguguuau

SEQ ID NO: 2570687 - RNA, 19 nt, Artificial Sequence
  Description of Artificial Sequence: Synthetic oligonucleotide
uuguucuaugucccgaucc

SEQ ID NO: 2570688 - RNA, 19 nt, Artificial Sequence
  Description of Artificial Sequence: Synthetic oligonucleotide
aaaacgaagcaucuucgau

SEQ ID NO: 2570689 - RNA, 19 nt, Artificial Sequence
  Description of Artificial Sequence: Synthetic oligonucleotide
ucccugaaaccccauaucc

SEQ ID NO: 2570690 - RNA, 19 nt, Artificial Sequence
  Description of Artificial Sequence: Synthetic oligonucleotide
ucaucaacacugacuagag

SEQ ID NO: 2570691 - RNA, 19 nt, Artificial Sequence
  Description of Artificial Sequence: Synthetic oligonucleotide
cuucgauguuccuagauug

SEQ ID NO: 2570692 - RNA, 19 nt, Artificial Sequence
  Description of Artificial Sequence: Synthetic oligonucleotide
aagagaguccucagcagcc

SEQ ID NO: 2570693 - RNA, 19 nt, Artificial Sequence
  Description of Artificial Sequence: Synthetic oligonucleotide
guuauuauacccacuauca

SEQ ID NO: 2570694 - RNA, 19 nt, Artificial Sequence
  Description of Artificial Sequence: Synthetic oligonucleotide
uugacuucgaagcaguuuu

SEQ ID NO: 2570695 - RNA, 19 nt, Artificial Sequence
  Description of Artificial Sequence: Synthetic oligonucleotide
ugacuaacaucuacuuuag

SEQ ID NO: 2570696 - RNA, 19 nt, Artificial Sequence
  Description of Artificial Sequence: Synthetic oligonucleotide
aaccuugucuuccuuucag

SEQ ID NO: 2570697 - RNA, 19 nt, Artificial Sequence
  Description of Artificial Sequence: Synthetic oligonucleotide
ugcacuuuacuauuuguuc

SEQ ID NO: 2570698 - RNA, 19 nt, Artificial Sequence
  Description of Artificial Sequence: Synthetic oligonucleotide
uccuuucagaggaugaaga

SEQ ID NO: 2570699 - RNA, 19 nt, Artificial Sequence
  Description of Artificial Sequence: Synthetic oligonucleotide
uaaggcagagacgaccucg

SEQ ID NO: 2570700 - RNA, 19 nt, Artificial Sequence
  Description of Artificial Sequence: Synthetic oligonucleotide
uguguugagcagcagggga

SEQ ID NO: 2570701 - RNA, 19 nt, Artificial Sequence
  Description of Artificial Sequence: Synthetic oligonucleotide
uagcuaaaauuucauaaua

SEQ ID NO: 2570702 - RNA, 19 nt, Artificial Sequence
  Description of Artificial Sequence: Synthetic oligonucleotide
uugccuauauagucugugg

SEQ ID NO: 2570703 - RNA, 19 nt, Artificial Sequence
  Description of Artificial Sequence: Synthetic oligonucleotide
uacugguguuauuauaccc

SEQ ID NO: 2570704 - RNA, 19 nt, Artificial Sequence
  Description of Artificial Sequence: Synthetic oligonucleotide
acuggaauuuugauagacc

SEQ ID NO: 2570705 - RNA, 19 nt, Artificial Sequence
  Description of Artificial Sequence: Synthetic oligonucleotide
auaguagggauccuuucug

SEQ ID NO: 2570706 - RNA, 19 nt, Artificial Sequence
  Description of Artificial Sequence: Synthetic oligonucleotide
aauuacugguguuauuaua

SEQ ID NO: 2570707 - RNA, 19 nt, Artificial Sequence
  Description of Artificial Sequence: Synthetic oligonucleotide
uaacaucuacuuuagcuaa

SEQ ID NO: 2570708 - RNA, 19 nt, Artificial Sequence
  Description of Artificial Sequence: Synthetic oligonucleotide
uucagucaaagaacuaaac

SEQ ID NO: 2570709 - RNA, 19 nt, Artificial Sequence
  Description of Artificial Sequence: Synthetic oligonucleotide
uuauuauacccacuaucaa

SEQ ID NO: 2570710 - RNA, 19 nt, Artificial Sequence
  Description of Artificial Sequence: Synthetic oligonucleotide
acuaucaacauuaucacua

SEQ ID NO: 2570711 - RNA, 19 nt, Artificial Sequence
  Description of Artificial Sequence: Synthetic oligonucleotide
aguagggauccuuucuggg

SEQ ID NO: 2570712 - RNA, 19 nt, Artificial Sequence
  Description of Artificial Sequence: Synthetic oligonucleotide
uguucuaugucccgaucca

SEQ ID NO: 2570713 - RNA, 19 nt, Artificial Sequence
  Description of Artificial Sequence: Synthetic oligonucleotide
auaugcauacuugaucauc

SEQ ID NO: 2570714 - RNA, 19 nt, Artificial Sequence
  Description of Artificial Sequence: Synthetic oligonucleotide
uuacugguguuauuauacc

SEQ ID NO: 2570715 - RNA, 19 nt, Artificial Sequence
  Description of Artificial Sequence: Synthetic oligonucleotide
uaguagggauccuuucugg

SEQ ID NO: 2570716 - RNA, 19 nt, Artificial Sequence
  Description of Artificial Sequence: Synthetic oligonucleotide
aaucuugccuauauagucu

SEQ ID NO: 2570717 - RNA, 19 nt, Artificial Sequence
  Description of Artificial Sequence: Synthetic oligonucleotide
gaaacugccagcugacuca

SEQ ID NO: 2570718 - RNA, 19 nt, Artificial Sequence
  Description of Artificial Sequence: Synthetic oligonucleotide
acguuuuguguugagcagc

SEQ ID NO: 2570719 - RNA, 19 nt, Artificial Sequence
  Description of Artificial Sequence: Synthetic oligonucleotide
uuucauaauacagcaaaua

SEQ ID NO: 2570720 - RNA, 19 nt, Artificial Sequence
  Description of Artificial Sequence: Synthetic oligonucleotide
acugcuacguuuuguguug

SEQ ID NO: 2570721 - RNA, 19 nt, Artificial Sequence
  Description of Artificial Sequence: Synthetic oligonucleotide
ugccuauauagucuguggu

SEQ ID NO: 2570722 - RNA, 19 nt, Artificial Sequence
  Description of Artificial Sequence: Synthetic oligonucleotide
cuacguuuuguguugagca

SEQ ID NO: 2570723 - RNA, 19 nt, Artificial Sequence
  Description of Artificial Sequence: Synthetic oligonucleotide
uugaauggugacuaacauc

SEQ ID NO: 2570724 - RNA, 19 nt, Artificial Sequence
  Description of Artificial Sequence: Synthetic oligonucleotide
aagagcccacuguugaaug

SEQ ID NO: 2570725 - RNA, 19 nt, Artificial Sequence
  Description of Artificial Sequence: Synthetic oligonucleotide
aaccaauuccccagucugc

SEQ ID NO: 2570726 - RNA, 19 nt, Artificial Sequence
  Description of Artificial Sequence: Synthetic oligonucleotide
ugcuccauaguagggaucc

SEQ ID NO: 2570727 - RNA, 19 nt, Artificial Sequence
  Description of Artificial Sequence: Synthetic oligonucleotide
uacguuuuguguugagcag

SEQ ID NO: 2570728 - RNA, 19 nt, Artificial Sequence
  Description of Artificial Sequence: Synthetic oligonucleotide
auagucuguggucaucuug

SEQ ID NO: 2570729 - RNA, 19 nt, Artificial Sequence
  Description of Artificial Sequence: Synthetic oligonucleotide
acgaguggaggaugaaaac

SEQ ID NO: 2570730 - RNA, 19 nt, Artificial Sequence
  Description of Artificial Sequence: Synthetic oligonucleotide
uuuugaggucccugaaacc

SEQ ID NO: 2570731 - RNA, 19 nt, Artificial Sequence
  Description of Artificial Sequence: Synthetic oligonucleotide
gagcacauggaacgagugg

SEQ ID NO: 2570732 - RNA, 19 nt, Artificial Sequence
  Description of Artificial Sequence: Synthetic oligonucleotide
cuauuuguucuaugucccg

SEQ ID NO: 2570733 - RNA, 19 nt, Artificial Sequence
  Description of Artificial Sequence: Synthetic oligonucleotide
caauuccccagucugcucc

SEQ ID NO: 2570734 - RNA, 19 nt, Artificial Sequence
  Description of Artificial Sequence: Synthetic oligonucleotide
caaccaauuccccagucug

SEQ ID NO: 2570735 - RNA, 19 nt, Artificial Sequence
  Description of Artificial Sequence: Synthetic oligonucleotide
gacuagagcucacugcuac

SEQ ID NO: 2570736 - RNA, 19 nt, Artificial Sequence
  Description of Artificial Sequence: Synthetic oligonucleotide
agcaaauaaauuacuggug

SEQ ID NO: 2570737 - RNA, 19 nt, Artificial Sequence
  Description of Artificial Sequence: Synthetic oligonucleotide
aacauguauuccuuuuguu

SEQ ID NO: 2570738 - RNA, 19 nt, Artificial Sequence
  Description of Artificial Sequence: Synthetic oligonucleotide
ugagcacauggaacgagug

SEQ ID NO: 2570739 - RNA, 19 nt, Artificial Sequence
  Description of Artificial Sequence: Synthetic oligonucleotide
ucuucgauguuccuagauu

SEQ ID NO: 2570740 - RNA, 19 nt, Artificial Sequence
  Description of Artificial Sequence: Synthetic oligonucleotide
ucugcuguccgguucaaau

SEQ ID NO: 2570741 - RNA, 19 nt, Artificial Sequence
  Description of Artificial Sequence: Synthetic oligonucleotide
cucacugcuacguuuugug

SEQ ID NO: 2570742 - RNA, 19 nt, Artificial Sequence
  Description of Artificial Sequence: Synthetic oligonucleotide
gugccguuaaggcagagac

SEQ ID NO: 2570743 - RNA, 19 nt, Artificial Sequence
  Description of Artificial Sequence: Synthetic oligonucleotide
ugacucacuggaacaaaga

SEQ ID NO: 2570744 - RNA, 19 nt, Artificial Sequence
  Description of Artificial Sequence: Synthetic oligonucleotide
ucaaaucggaucugcugug

SEQ ID NO: 2570745 - RNA, 19 nt, Artificial Sequence
  Description of Artificial Sequence: Synthetic oligonucleotide
acauggaacgaguggagga

SEQ ID NO: 2570746 - RNA, 19 nt, Artificial Sequence
  Description of Artificial Sequence: Synthetic oligonucleotide
aucuugccuauauagucug

SEQ ID NO: 2570747 - RNA, 19 nt, Artificial Sequence
  Description of Artificial Sequence: Synthetic oligonucleotide
uaucaacauuaucacuaca

SEQ ID NO: 2570748 - RNA, 19 nt, Artificial Sequence
  Description of Artificial Sequence: Synthetic oligonucleotide
agcgauuccauuuuccauu

SEQ ID NO: 2570749 - RNA, 19 nt, Artificial Sequence
  Description of Artificial Sequence: Synthetic oligonucleotide
uugagcacauggaacgagu

SEQ ID NO: 2570750 - RNA, 19 nt, Artificial Sequence
  Description of Artificial Sequence: Synthetic oligonucleotide
uguuggagcgauuccauuu

SEQ ID NO: 2570751 - RNA, 19 nt, Artificial Sequence
  Description of Artificial Sequence: Synthetic oligonucleotide
cugacucacuggaacaaag

SEQ ID NO: 2570752 - RNA, 19 nt, Artificial Sequence
  Description of Artificial Sequence: Synthetic oligonucleotide
uuuguuggagcgauuccau

SEQ ID NO: 2570753 - RNA, 19 nt, Artificial Sequence
  Description of Artificial Sequence: Synthetic oligonucleotide
gacgaccucguucagguuc

SEQ ID NO: 2570754 - RNA, 19 nt, Artificial Sequence
  Description of Artificial Sequence: Synthetic oligonucleotide
auacuugaucaucaacacu

SEQ ID NO: 2570755 - RNA, 19 nt, Artificial Sequence
  Description of Artificial Sequence: Synthetic oligonucleotide
uucgauguuccuagauuga

SEQ ID NO: 2570756 - RNA, 19 nt, Artificial Sequence
  Description of Artificial Sequence: Synthetic oligonucleotide
uggaugcaaaugugaagag

SEQ ID NO: 2570757 - RNA, 19 nt, Artificial Sequence
  Description of Artificial Sequence: Synthetic oligonucleotide
uggagcgauuccauuuucc

SEQ ID NO: 2570758 - RNA, 19 nt, Artificial Sequence
  Description of Artificial Sequence: Synthetic oligonucleotide
agguucuccuucuuggugu

SEQ ID NO: 2570759 - RNA, 19 nt, Artificial Sequence
  Description of Artificial Sequence: Synthetic oligonucleotide
ugccguuaaggcagagacg

SEQ ID NO: 2570760 - RNA, 19 nt, Artificial Sequence
  Description of Artificial Sequence: Synthetic oligonucleotide
gcaucuucgauguuccuag

SEQ ID NO: 2570761 - RNA, 19 nt, Artificial Sequence
  Description of Artificial Sequence: Synthetic oligonucleotide
auacccacuaucaacauua

SEQ ID NO: 2570762 - RNA, 19 nt, Artificial Sequence
  Description of Artificial Sequence: Synthetic oligonucleotide
agcacauggaacgagugga

SEQ ID NO: 2570763 - RNA, 19 nt, Artificial Sequence
  Description of Artificial Sequence: Synthetic oligonucleotide
cugguguuauuauacccac

SEQ ID NO: 2570764 - RNA, 19 nt, Artificial Sequence
  Description of Artificial Sequence: Synthetic oligonucleotide
agagcccacuguugaaugg

SEQ ID NO: 2570765 - RNA, 19 nt, Artificial Sequence
  Description of Artificial Sequence: Synthetic oligonucleotide
acugguguuauuauaccca

SEQ ID NO: 2570766 - RNA, 19 nt, Artificial Sequence
  Description of Artificial Sequence: Synthetic oligonucleotide
guuucagucaaagaacuaa

SEQ ID NO: 2570767 - RNA, 19 nt, Artificial Sequence
  Description of Artificial Sequence: Synthetic oligonucleotide
ugugagggaggugugaguc

SEQ ID NO: 2570768 - RNA, 19 nt, Artificial Sequence
  Description of Artificial Sequence: Synthetic oligonucleotide
ucccgauccacuucuuuca

SEQ ID NO: 2570769 - RNA, 19 nt, Artificial Sequence
  Description of Artificial Sequence: Synthetic oligonucleotide
ugugaguccuggaugcaaa

SEQ ID NO: 2570770 - RNA, 19 nt, Artificial Sequence
  Description of Artificial Sequence: Synthetic oligonucleotide
uggaauuuugauagaccua

SEQ ID NO: 2570771 - RNA, 19 nt, Artificial Sequence
  Description of Artificial Sequence: Synthetic oligonucleotide
uggaacgaguggaggauga

SEQ ID NO: 2570772 - RNA, 19 nt, Artificial Sequence
  Description of Artificial Sequence: Synthetic oligonucleotide
cuggaauuuugauagaccu

SEQ ID NO: 2570773 - RNA, 19 nt, Artificial Sequence
  Description of Artificial Sequence: Synthetic oligonucleotide
augaaaaccuugucuuccu

SEQ ID NO: 2570774 - RNA, 19 nt, Artificial Sequence
  Description of Artificial Sequence: Synthetic oligonucleotide
aggggacugagaaucuugc

SEQ ID NO: 2570775 - RNA, 19 nt, Artificial Sequence
  Description of Artificial Sequence: Synthetic oligonucleotide
uugauagaccuaagggcaa

SEQ ID NO: 2570776 - RNA, 19 nt, Artificial Sequence
  Description of Artificial Sequence: Synthetic oligonucleotide
gauguuccuagauugacuu

SEQ ID NO: 2570777 - RNA, 19 nt, Artificial Sequence
  Description of Artificial Sequence: Synthetic oligonucleotide
ugagaaucuugccuauaua

SEQ ID NO: 2570778 - RNA, 19 nt, Artificial Sequence
  Description of Artificial Sequence: Synthetic oligonucleotide
uuuguucuaugucccgauc

SEQ ID NO: 2570779 - RNA, 19 nt, Artificial Sequence
  Description of Artificial Sequence: Synthetic oligonucleotide
aucugcugugccguuaagg

SEQ ID NO: 2570780 - RNA, 19 nt, Artificial Sequence
  Description of Artificial Sequence: Synthetic oligonucleotide
guauuccuuuuguuggagc

SEQ ID NO: 2570781 - RNA, 19 nt, Artificial Sequence
  Description of Artificial Sequence: Synthetic oligonucleotide
cccuugagcacauggaacg

SEQ ID NO: 2570782 - RNA, 19 nt, Artificial Sequence
  Description of Artificial Sequence: Synthetic oligonucleotide
uccauaguagggauccuuu

SEQ ID NO: 2570783 - RNA, 19 nt, Artificial Sequence
  Description of Artificial Sequence: Synthetic oligonucleotide
uucuuucaggaaacugcca

SEQ ID NO: 2570784 - RNA, 19 nt, Artificial Sequence
  Description of Artificial Sequence: Synthetic oligonucleotide
ccauaugcauacuugauca

SEQ ID NO: 2570785 - RNA, 19 nt, Artificial Sequence
  Description of Artificial Sequence: Synthetic oligonucleotide
accucguucagguucuccu

SEQ ID NO: 2570786 - RNA, 19 nt, Artificial Sequence
  Description of Artificial Sequence: Synthetic oligonucleotide
cuugaucaucaacacugac

SEQ ID NO: 2570787 - RNA, 19 nt, Artificial Sequence
  Description of Artificial Sequence: Synthetic oligonucleotide
gaauuuugauagaccuaag

SEQ ID NO: 2570788 - RNA, 19 nt, Artificial Sequence
  Description of Artificial Sequence: Synthetic oligonucleotide
gguguuauuauacccacua

SEQ ID NO: 2570789 - RNA, 19 nt, Artificial Sequence
  Description of Artificial Sequence: Synthetic oligonucleotide
cuugccuauauagucugug

SEQ ID NO: 2570790 - RNA, 19 nt, Artificial Sequence
  Description of Artificial Sequence: Synthetic oligonucleotide
cuacagcuguccaccaacc

SEQ ID NO: 2570791 - RNA, 19 nt, Artificial Sequence
  Description of Artificial Sequence: Synthetic oligonucleotide
ugaccaacauguauuccuu

SEQ ID NO: 2570792 - RNA, 19 nt, Artificial Sequence
  Description of Artificial Sequence: Synthetic oligonucleotide
caacauuaucacuacagcu

SEQ ID NO: 2570793 - RNA, 19 nt, Artificial Sequence
  Description of Artificial Sequence: Synthetic oligonucleotide
ucuaugucccgauccacuu

SEQ ID NO: 2570794 - RNA, 19 nt, Artificial Sequence
  Description of Artificial Sequence: Synthetic oligonucleotide
acucacuggaacaaagaga

SEQ ID NO: 2570795 - RNA, 19 nt, Artificial Sequence
  Description of Artificial Sequence: Synthetic oligonucleotide
uacagcuguccaccaacca

SEQ ID NO: 2570796 - RNA, 19 nt, Artificial Sequence
  Description of Artificial Sequence: Synthetic oligonucleotide
ucccauaugcauacuugau

SEQ ID NO: 2570797 - RNA, 19 nt, Artificial Sequence
  Description of Artificial Sequence: Synthetic oligonucleotide
cuagauugacuucgaagca

SEQ ID NO: 2570798 - RNA, 19 nt, Artificial Sequence
  Description of Artificial Sequence: Synthetic oligonucleotide
accaaccaauuccccaguc

SEQ ID NO: 2570799 - RNA, 19 nt, Artificial Sequence
  Description of Artificial Sequence: Synthetic oligonucleotide
acccacuaucaacauuauc

SEQ ID NO: 2570800 - RNA, 19 nt, Artificial Sequence
  Description of Artificial Sequence: Synthetic oligonucleotide
gagugcuucugcuguccgg

SEQ ID NO: 2570801 - RNA, 19 nt, Artificial Sequence
  Description of Artificial Sequence: Synthetic oligonucleotide
ucgauguuccuagauugac

SEQ ID NO: 2570802 - RNA, 19 nt, Artificial Sequence
  Description of Artificial Sequence: Synthetic oligonucleotide
ggaacaaagagaguccuca

SEQ ID NO: 2570803 - RNA, 19 nt, Artificial Sequence
  Description of Artificial Sequence: Synthetic oligonucleotide
auaaauuacugguguuauu

SEQ ID NO: 2570804 - RNA, 19 nt, Artificial Sequence
  Description of Artificial Sequence: Synthetic oligonucleotide
gacuaacaucuacuuuagc

SEQ ID NO: 2570805 - RNA, 19 nt, Artificial Sequence
  Description of Artificial Sequence: Synthetic oligonucleotide
uggugacuaacaucuacuu

SEQ ID NO: 2570806 - RNA, 19 nt, Artificial Sequence
  Description of Artificial Sequence: Synthetic oligonucleotide
cuuuagcuaaaauuucaua

SEQ ID NO: 2570807 - RNA, 19 nt, Artificial Sequence
  Description of Artificial Sequence: Synthetic oligonucleotide
auggugacuaacaucuacu

SEQ ID NO: 2570808 - RNA, 19 nt, Artificial Sequence
  Description of Artificial Sequence: Synthetic oligonucleotide
guagggauccuuucuggga

SEQ ID NO: 2570809 - RNA, 19 nt, Artificial Sequence
  Description of Artificial Sequence: Synthetic oligonucleotide
ucacugcuacguuuugugu

SEQ ID NO: 2570810 - RNA, 19 nt, Artificial Sequence
  Description of Artificial Sequence: Synthetic oligonucleotide
agagacgaccucguucagg

SEQ ID NO: 2570811 - RNA, 19 nt, Artificial Sequence
  Description of Artificial Sequence: Synthetic oligonucleotide
ugagggaggugugaguccu

SEQ ID NO: 2570812 - RNA, 19 nt, Artificial Sequence
  Description of Artificial Sequence: Synthetic oligonucleotide
caucaacacugacuagagc

SEQ ID NO: 2570813 - RNA, 19 nt, Artificial Sequence
  Description of Artificial Sequence: Synthetic oligonucleotide
gcagagacgaccucguuca

SEQ ID NO: 2570814 - RNA, 19 nt, Artificial Sequence
  Description of Artificial Sequence: Synthetic oligonucleotide
gugucugugcacuuuacua

SEQ ID NO: 2570815 - RNA, 19 nt, Artificial Sequence
  Description of Artificial Sequence: Synthetic oligonucleotide
agaguccucagcagccacc

SEQ ID NO: 2570816 - RNA, 19 nt, Artificial Sequence
  Description of Artificial Sequence: Synthetic oligonucleotide
ugguguuauuauacccacu

SEQ ID NO: 2570817 - RNA, 19 nt, Artificial Sequence
  Description of Artificial Sequence: Synthetic oligonucleotide
auacagcaaauaaauuacu

SEQ ID NO: 2570818 - RNA, 19 nt, Artificial Sequence
  Description of Artificial Sequence: Synthetic oligonucleotide
uauauagucuguggucauc

SEQ ID NO: 2570819 - RNA, 19 nt, Artificial Sequence
  Description of Artificial Sequence: Synthetic oligonucleotide
cuugagcacauggaacgag

SEQ ID NO: 2570820 - RNA, 19 nt, Artificial Sequence
  Description of Artificial Sequence: Synthetic oligonucleotide
agagcucacugcuacguuu

SEQ ID NO: 2570821 - RNA, 19 nt, Artificial Sequence
  Description of Artificial Sequence: Synthetic oligonucleotide
uaacuggaauuuugauaga

SEQ ID NO: 2570822 - RNA, 19 nt, Artificial Sequence
  Description of Artificial Sequence: Synthetic oligonucleotide
aucuucgauguuccuagau

SEQ ID NO: 2570823 - RNA, 19 nt, Artificial Sequence
  Description of Artificial Sequence: Synthetic oligonucleotide
guccgguucaaaucggauc

SEQ ID NO: 2570824 - RNA, 19 nt, Artificial Sequence
  Description of Artificial Sequence: Synthetic oligonucleotide
ugaagagcccacuguugaa

SEQ ID NO: 2570825 - RNA, 19 nt, Artificial Sequence
  Description of Artificial Sequence: Synthetic oligonucleotide
uguccgguucaaaucggau

SEQ ID NO: 2570826 - RNA, 19 nt, Artificial Sequence
  Description of Artificial Sequence: Synthetic oligonucleotide
uguggucaucuuguugacc

SEQ ID NO: 2570827 - RNA, 19 nt, Artificial Sequence
  Description of Artificial Sequence: Synthetic oligonucleotide
ggaaacugccagcugacuc

SEQ ID NO: 2570828 - RNA, 19 nt, Artificial Sequence
  Description of Artificial Sequence: Synthetic oligonucleotide
ucuugccuauauagucugu

SEQ ID NO: 2570829 - RNA, 19 nt, Artificial Sequence
  Description of Artificial Sequence: Synthetic oligonucleotide
gaguggaggaugaaaaccu

SEQ ID NO: 2570830 - RNA, 19 nt, Artificial Sequence
  Description of Artificial Sequence: Synthetic oligonucleotide
cugacuagagcucacugcu

SEQ ID NO: 2570831 - RNA, 19 nt, Artificial Sequence
  Description of Artificial Sequence: Synthetic oligonucleotide
accuugucuuccuuucaga

SEQ ID NO: 2570832 - RNA, 19 nt, Artificial Sequence
  Description of Artificial Sequence: Synthetic oligonucleotide
caaaucggaucugcugugc

SEQ ID NO: 2570833 - RNA, 19 nt, Artificial Sequence
  Description of Artificial Sequence: Synthetic oligonucleotide
gucccgauccacuucuuuc

SEQ ID NO: 2570834 - RNA, 19 nt, Artificial Sequence
  Description of Artificial Sequence: Synthetic oligonucleotide
accaauuccccagucugcu

SEQ ID NO: 2570835 - RNA, 19 nt, Artificial Sequence
  Description of Artificial Sequence: Synthetic oligonucleotide
cacuucuuucaggaaacug

SEQ ID NO: 2570836 - RNA, 19 nt, Artificial Sequence
  Description of Artificial Sequence: Synthetic oligonucleotide
uuaaggcagagacgaccuc

SEQ ID NO: 2570837 - RNA, 19 nt, Artificial Sequence
  Description of Artificial Sequence: Synthetic oligonucleotide
guggaggaugaaaaccuug

SEQ ID NO: 2570838 - RNA, 19 nt, Artificial Sequence
  Description of Artificial Sequence: Synthetic oligonucleotide
gccguuaaggcagagacga

SEQ ID NO: 2570839 - RNA, 19 nt, Artificial Sequence
  Description of Artificial Sequence: Synthetic oligonucleotide
ggaugcaaaugugaagagc

SEQ ID NO: 2570840 - RNA, 19 nt, Artificial Sequence
  Description of Artificial Sequence: Synthetic oligonucleotide
ugcuacguuuuguguugag

SEQ ID NO: 2570841 - RNA, 19 nt, Artificial Sequence
  Description of Artificial Sequence: Synthetic oligonucleotide
guugaccaacauguauucc

SEQ ID NO: 2570842 - RNA, 19 nt, Artificial Sequence
  Description of Artificial Sequence: Synthetic oligonucleotide
uuggagcgauuccauuuuc

SEQ ID NO: 2570843 - RNA, 19 nt, Artificial Sequence
  Description of Artificial Sequence: Synthetic oligonucleotide
ugugccguuaaggcagaga

SEQ ID NO: 2570844 - RNA, 19 nt, Artificial Sequence
  Description of Artificial Sequence: Synthetic oligonucleotide
uuccuagauugacuucgaa

SEQ ID NO: 2570845 - RNA, 19 nt, Artificial Sequence
  Description of Artificial Sequence: Synthetic oligonucleotide
cugcuguccgguucaaauc

SEQ ID NO: 2570846 - RNA, 19 nt, Artificial Sequence
  Description of Artificial Sequence: Synthetic oligonucleotide
guugaauggugacuaacau

SEQ ID NO: 2570847 - RNA, 19 nt, Artificial Sequence
  Description of Artificial Sequence: Synthetic oligonucleotide
ugauagaccuaagggcaaa

SEQ ID NO: 2570848 - RNA, 19 nt, Artificial Sequence
  Description of Artificial Sequence: Synthetic oligonucleotide
agggaggugugaguccugg

SEQ ID NO: 2570849 - RNA, 19 nt, Artificial Sequence
  Description of Artificial Sequence: Synthetic oligonucleotide
ggagcgauuccauuuucca

SEQ ID NO: 2570850 - RNA, 19 nt, Artificial Sequence
  Description of Artificial Sequence: Synthetic oligonucleotide
cauuaucacuacagcuguc

SEQ ID NO: 2570851 - RNA, 19 nt, Artificial Sequence
  Description of Artificial Sequence: Synthetic oligonucleotide
aacaucuacuuuagcuaaa

SEQ ID NO: 2570852 - RNA, 19 nt, Artificial Sequence
  Description of Artificial Sequence: Synthetic oligonucleotide
gccuauauagucugugguc

SEQ ID NO: 2570853 - RNA, 19 nt, Artificial Sequence
  Description of Artificial Sequence: Synthetic oligonucleotide
agucugcuccauaguaggg

SEQ ID NO: 2570854 - RNA, 19 nt, Artificial Sequence
  Description of Artificial Sequence: Synthetic oligonucleotide
ccaccaaccaauuccccag

SEQ ID NO: 2570855 - RNA, 19 nt, Artificial Sequence
  Description of Artificial Sequence: Synthetic oligonucleotide
guguugagcagcaggggac

SEQ ID NO: 2570856 - RNA, 19 nt, Artificial Sequence
  Description of Artificial Sequence: Synthetic oligonucleotide
aagcaucuucgauguuccu

SEQ ID NO: 2570857 - RNA, 19 nt, Artificial Sequence
  Description of Artificial Sequence: Synthetic oligonucleotide
gugagggaggugugagucc

SEQ ID NO: 2570858 - RNA, 19 nt, Artificial Sequence
  Description of Artificial Sequence: Synthetic oligonucleotide
acuguugaauggugacuaa

SEQ ID NO: 2570859 - RNA, 19 nt, Artificial Sequence
  Description of Artificial Sequence: Synthetic oligonucleotide
ugacuagagcucacugcua

SEQ ID NO: 2570860 - RNA, 19 nt, Artificial Sequence
  Description of Artificial Sequence: Synthetic oligonucleotide
uucagaggaugaagaguuu

SEQ ID NO: 2570861 - RNA, 19 nt, Artificial Sequence
  Description of Artificial Sequence: Synthetic oligonucleotide
gauccuuucugggagugcu

SEQ ID NO: 2570862 - RNA, 19 nt, Artificial Sequence
  Description of Artificial Sequence: Synthetic oligonucleotide
cccauaugcauacuugauc

SEQ ID NO: 2570863 - RNA, 19 nt, Artificial Sequence
  Description of Artificial Sequence: Synthetic oligonucleotide
cuaugucccgauccacuuc

SEQ ID NO: 2570864 - RNA, 19 nt, Artificial Sequence
  Description of Artificial Sequence: Synthetic oligonucleotide
guuaaggcagagacgaccu

SEQ ID NO: 2570865 - RNA, 19 nt, Artificial Sequence
  Description of Artificial Sequence: Synthetic oligonucleotide
uucugugagggagguguga

SEQ ID NO: 2570866 - RNA, 19 nt, Artificial Sequence
  Description of Artificial Sequence: Synthetic oligonucleotide
ggacugagaaucuugccua

SEQ ID NO: 2570867 - RNA, 19 nt, Artificial Sequence
  Description of Artificial Sequence: Synthetic oligonucleotide
agcaucuucgauguuccua

SEQ ID NO: 2570868 - RNA, 19 nt, Artificial Sequence
  Description of Artificial Sequence: Synthetic oligonucleotide
gaacgaguggaggaugaaa

SEQ ID NO: 2570869 - RNA, 19 nt, Artificial Sequence
  Description of Artificial Sequence: Synthetic oligonucleotide
auggaacgaguggaggaug

SEQ ID NO: 2570870 - RNA, 19 nt, Artificial Sequence
  Description of Artificial Sequence: Synthetic oligonucleotide
ggcagagacgaccucguuc

SEQ ID NO: 2570871 - RNA, 19 nt, Artificial Sequence
  Description of Artificial Sequence: Synthetic oligonucleotide
gucccugaaaccccauauc

SEQ ID NO: 2570872 - RNA, 19 nt, Artificial Sequence
  Description of Artificial Sequence: Synthetic oligonucleotide
ccuauauagucugugguca

SEQ ID NO: 2570873 - RNA, 19 nt, Artificial Sequence
  Description of Artificial Sequence: Synthetic oligonucleotide
gcuacguuuuguguugagc

SEQ ID NO: 2570874 - RNA, 19 nt, Artificial Sequence
  Description of Artificial Sequence: Synthetic oligonucleotide
gcacuuuacuauuuguucu

SEQ ID NO: 2570875 - RNA, 19 nt, Artificial Sequence
  Description of Artificial Sequence: Synthetic oligonucleotide
ugucccgauccacuucuuu

SEQ ID NO: 2570876 - RNA, 19 nt, Artificial Sequence
  Description of Artificial Sequence: Synthetic oligonucleotide
cuuucagaggaugaagagu

SEQ ID NO: 2570877 - RNA, 19 nt, Artificial Sequence
  Description of Artificial Sequence: Synthetic oligonucleotide
ggagugcuucugcuguccg

SEQ ID NO: 2570878 - RNA, 19 nt, Artificial Sequence
  Description of Artificial Sequence: Synthetic oligonucleotide
guucuaugucccgauccac

SEQ ID NO: 2570879 - RNA, 19 nt, Artificial Sequence
  Description of Artificial Sequence: Synthetic oligonucleotide
uacccacuaucaacauuau

SEQ ID NO: 2570880 - RNA, 19 nt, Artificial Sequence
  Description of Artificial Sequence: Synthetic oligonucleotide
gauagaccuaagggcaaaa

SEQ ID NO: 2570881 - RNA, 19 nt, Artificial Sequence
  Description of Artificial Sequence: Synthetic oligonucleotide
cagcugacucacuggaaca

SEQ ID NO: 2570882 - RNA, 19 nt, Artificial Sequence
  Description of Artificial Sequence: Synthetic oligonucleotide
cguuaaggcagagacgacc

SEQ ID NO: 2570883 - RNA, 19 nt, Artificial Sequence
  Description of Artificial Sequence: Synthetic oligonucleotide
agcucacugcuacguuuug

SEQ ID NO: 2570884 - RNA, 19 nt, Artificial Sequence
  Description of Artificial Sequence: Synthetic oligonucleotide
cugcugugccguuaaggca

SEQ ID NO: 2570885 - RNA, 19 nt, Artificial Sequence
  Description of Artificial Sequence: Synthetic oligonucleotide
cccacuguugaauggugac

SEQ ID NO: 2570886 - RNA, 19 nt, Artificial Sequence
  Description of Artificial Sequence: Synthetic oligonucleotide
guccuggaugcaaauguga

SEQ ID NO: 2570887 - RNA, 19 nt, Artificial Sequence
  Description of Artificial Sequence: Synthetic oligonucleotide
cugagaaucuugccuauau

SEQ ID NO: 2570888 - RNA, 19 nt, Artificial Sequence
  Description of Artificial Sequence: Synthetic oligonucleotide
gagcgauuccauuuuccau

SEQ ID NO: 2570889 - RNA, 19 nt, Artificial Sequence
  Description of Artificial Sequence: Synthetic oligonucleotide
aguuucagucaaagaacua

SEQ ID NO: 2570890 - RNA, 19 nt, Artificial Sequence
  Description of Artificial Sequence: Synthetic oligonucleotide
gaagagcccacuguugaau

SEQ ID NO: 2570891 - RNA, 19 nt, Artificial Sequence
  Description of Artificial Sequence: Synthetic oligonucleotide
cuguccgguucaaaucgga

SEQ ID NO: 2570892 - RNA, 19 nt, Artificial Sequence
  Description of Artificial Sequence: Synthetic oligonucleotide
cgauccacuucuuucagga

SEQ ID NO: 2570893 - RNA, 19 nt, Artificial Sequence
  Description of Artificial Sequence: Synthetic oligonucleotide
acgaccucguucagguucu

SEQ ID NO: 2570894 - RNA, 19 nt, Artificial Sequence
  Description of Artificial Sequence: Synthetic oligonucleotide
cugcuccauaguagggauc

SEQ ID NO: 2570895 - RNA, 19 nt, Artificial Sequence
  Description of Artificial Sequence: Synthetic oligonucleotide
gcuucugcuguccgguuca

SEQ ID NO: 2570896 - RNA, 19 nt, Artificial Sequence
  Description of Artificial Sequence: Synthetic oligonucleotide
aggaaacugccagcugacu

SEQ ID NO: 2570897 - RNA, 19 nt, Artificial Sequence
  Description of Artificial Sequence: Synthetic oligonucleotide
accccauaucccauaugca

SEQ ID NO: 2570898 - RNA, 19 nt, Artificial Sequence
  Description of Artificial Sequence: Synthetic oligonucleotide
guguuauuauacccacuau

SEQ ID NO: 2570899 - RNA, 19 nt, Artificial Sequence
  Description of Artificial Sequence: Synthetic oligonucleotide
guuccuagauugacuucga

SEQ ID NO: 2570900 - RNA, 19 nt, Artificial Sequence
  Description of Artificial Sequence: Synthetic oligonucleotide
uuccccagucugcuccaua

SEQ ID NO: 2570901 - RNA, 19 nt, Artificial Sequence
  Description of Artificial Sequence: Synthetic oligonucleotide
gucugugcacuuuacuauu

SEQ ID NO: 2570902 - RNA, 19 nt, Artificial Sequence
  Description of Artificial Sequence: Synthetic oligonucleotide
cacugcuacguuuuguguu

SEQ ID NO: 2570903 - RNA, 19 nt, Artificial Sequence
  Description of Artificial Sequence: Synthetic oligonucleotide
cuggaacaaagagaguccu

SEQ ID NO: 2570904 - RNA, 19 nt, Artificial Sequence
  Description of Artificial Sequence: Synthetic oligonucleotide
agcccacuguugaauggug

SEQ ID NO: 2570905 - RNA, 19 nt, Artificial Sequence
  Description of Artificial Sequence: Synthetic oligonucleotide
cuauauagucuguggucau

SEQ ID NO: 2570906 - RNA, 19 nt, Artificial Sequence
  Description of Artificial Sequence: Synthetic oligonucleotide
acugagaaucuugccuaua

SEQ ID NO: 2570907 - RNA, 19 nt, Artificial Sequence
  Description of Artificial Sequence: Synthetic oligonucleotide
cguuuccugcccuugagca

SEQ ID NO: 2570908 - RNA, 19 nt, Artificial Sequence
  Description of Artificial Sequence: Synthetic oligonucleotide
gcuguccgguucaaaucgg

SEQ ID NO: 2570909 - RNA, 19 nt, Artificial Sequence
  Description of Artificial Sequence: Synthetic oligonucleotide
cagcuguccaccaaccaau

SEQ ID NO: 2570910 - RNA, 19 nt, Artificial Sequence
  Description of Artificial Sequence: Synthetic oligonucleotide
cagagacgaccucguucag

SEQ ID NO: 2570911 - RNA, 19 nt, Artificial Sequence
  Description of Artificial Sequence: Synthetic oligonucleotide
aggucccugaaaccccaua

SEQ ID NO: 2570912 - RNA, 19 nt, Artificial Sequence
  Description of Artificial Sequence: Synthetic oligonucleotide
ggaucugcugugccguuaa

SEQ ID NO: 2570913 - RNA, 19 nt, Artificial Sequence
  Description of Artificial Sequence: Synthetic oligonucleotide
gagcccacuguugaauggu

SEQ ID NO: 2570914 - RNA, 19 nt, Artificial Sequence
  Description of Artificial Sequence: Synthetic oligonucleotide
gggagugcuucugcugucc

SEQ ID NO: 2570915 - RNA, 19 nt, Artificial Sequence
  Description of Artificial Sequence: Synthetic oligonucleotide
caucuucgauguuccuaga

SEQ ID NO: 2570916 - RNA, 19 nt, Artificial Sequence
  Description of Artificial Sequence: Synthetic oligonucleotide
agccaccguuuccugcccu

SEQ ID NO: 2570917 - RNA, 19 nt, Artificial Sequence
  Description of Artificial Sequence: Synthetic oligonucleotide
cccauaucccauaugcaua

SEQ ID NO: 2570918 - RNA, 19 nt, Artificial Sequence
  Description of Artificial Sequence: Synthetic oligonucleotide
ggugacuaacaucuacuuu

SEQ ID NO: 2570919 - RNA, 19 nt, Artificial Sequence
  Description of Artificial Sequence: Synthetic oligonucleotide
ccguuuccugcccuugagc

SEQ ID NO: 2570920 - RNA, 19 nt, Artificial Sequence
  Description of Artificial Sequence: Synthetic oligonucleotide
ccauuucucuguucuguga

SEQ ID NO: 2570921 - RNA, 19 nt, Artificial Sequence
  Description of Artificial Sequence: Synthetic oligonucleotide
gugugaguccuggaugcaa

SEQ ID NO: 2570922 - RNA, 19 nt, Artificial Sequence
  Description of Artificial Sequence: Synthetic oligonucleotide
cagccaccguuuccugccc

SEQ ID NO: 2570923 - RNA, 19 nt, Artificial Sequence
  Description of Artificial Sequence: Synthetic oligonucleotide
gggauccuuucugggagug

SEQ ID NO: 2570924 - RNA, 19 nt, Artificial Sequence
  Description of Artificial Sequence: Synthetic oligonucleotide
gcccuugagcacauggaac

SEQ ID NO: 2570925 - RNA, 19 nt, Artificial Sequence
  Description of Artificial Sequence: Synthetic oligonucleotide
caaaugugaagagcccacu

SEQ ID NO: 2570926 - RNA, 19 nt, Artificial Sequence
  Description of Artificial Sequence: Synthetic oligonucleotide
uucugcuguccgguucaaa

SEQ ID NO: 2570927 - RNA, 19 nt, Artificial Sequence
  Description of Artificial Sequence: Synthetic oligonucleotide
cauggaacgaguggaggau

SEQ ID NO: 2570928 - RNA, 19 nt, Artificial Sequence
  Description of Artificial Sequence: Synthetic oligonucleotide
cguuuuguguugagcagca

SEQ ID NO: 2570929 - RNA, 19 nt, Artificial Sequence
  Description of Artificial Sequence: Synthetic oligonucleotide
cccgauccacuucuuucag

SEQ ID NO: 2570930 - RNA, 19 nt, Artificial Sequence
  Description of Artificial Sequence: Synthetic oligonucleotide
ggauccuuucugggagugc

SEQ ID NO: 2570931 - RNA, 19 nt, Artificial Sequence
  Description of Artificial Sequence: Synthetic oligonucleotide
gagggaggugugaguccug

SEQ ID NO: 2570932 - RNA, 19 nt, Artificial Sequence
  Description of Artificial Sequence: Synthetic oligonucleotide
cacuacagcuguccaccaa

SEQ ID NO: 2570933 - RNA, 19 nt, Artificial Sequence
  Description of Artificial Sequence: Synthetic oligonucleotide
ucggaucugcugugccguu

SEQ ID NO: 2570934 - RNA, 19 nt, Artificial Sequence
  Description of Artificial Sequence: Synthetic oligonucleotide
gguucaaaucggaucugcu

SEQ ID NO: 2570935 - RNA, 19 nt, Artificial Sequence
  Description of Artificial Sequence: Synthetic oligonucleotide
gugaguccuggaugcaaau

SEQ ID NO: 2570936 - RNA, 19 nt, Artificial Sequence
  Description of Artificial Sequence: Synthetic oligonucleotide
aacugccagcugacucacu

SEQ ID NO: 2570937 - RNA, 19 nt, Artificial Sequence
  Description of Artificial Sequence: Synthetic oligonucleotide
agacgaccucguucagguu

SEQ ID NO: 2570938 - RNA, 19 nt, Artificial Sequence
  Description of Artificial Sequence: Synthetic oligonucleotide
cgguucaaaucggaucugc

SEQ ID NO: 2570939 - RNA, 19 nt, Artificial Sequence
  Description of Artificial Sequence: Synthetic oligonucleotide
ccccauaucccauaugcau

SEQ ID NO: 2570940 - RNA, 19 nt, Artificial Sequence
  Description of Artificial Sequence: Synthetic oligonucleotide
gauugacuucgaagcaguu

SEQ ID NO: 2570941 - RNA, 19 nt, Artificial Sequence
  Description of Artificial Sequence: Synthetic oligonucleotide
acgaagcaucuucgauguu

SEQ ID NO: 2570942 - RNA, 19 nt, Artificial Sequence
  Description of Artificial Sequence: Synthetic oligonucleotide
cccagucugcuccauagua

SEQ ID NO: 2570943 - RNA, 19 nt, Artificial Sequence
  Description of Artificial Sequence: Synthetic oligonucleotide
cugcuacguuuuguguuga

SEQ ID NO: 2570944 - RNA, 19 nt, Artificial Sequence
  Description of Artificial Sequence: Synthetic oligonucleotide
cugugccguuaaggcagag

SEQ ID NO: 2570945 - RNA, 19 nt, Artificial Sequence
  Description of Artificial Sequence: Synthetic oligonucleotide
gcugacucacuggaacaaa

SEQ ID NO: 2570946 - RNA, 19 nt, Artificial Sequence
  Description of Artificial Sequence: Synthetic oligonucleotide
ccguuaaggcagagacgac

SEQ ID NO: 2570947 - RNA, 19 nt, Artificial Sequence
  Description of Artificial Sequence: Synthetic oligonucleotide
ggugugaguccuggaugca

SEQ ID NO: 2570948 - RNA, 19 nt, Artificial Sequence
  Description of Artificial Sequence: Synthetic oligonucleotide
ccaaccaauuccccagucu

SEQ ID NO: 2570949 - RNA, 19 nt, Artificial Sequence
  Description of Artificial Sequence: Synthetic oligonucleotide
caccaaccaauuccccagu

SEQ ID NO: 2570950 - RNA, 19 nt, Artificial Sequence
  Description of Artificial Sequence: Synthetic oligonucleotide
ggaacgaguggaggaugaa

SEQ ID NO: 2570951 - RNA, 19 nt, Artificial Sequence
  Description of Artificial Sequence: Synthetic oligonucleotide
cauaucccauaugcauacu

SEQ ID NO: 2570952 - RNA, 19 nt, Artificial Sequence
  Description of Artificial Sequence: Synthetic oligonucleotide
ccuugagcacauggaacga

SEQ ID NO: 2570953 - RNA, 19 nt, Artificial Sequence
  Description of Artificial Sequence: Synthetic oligonucleotide
uccugcccuugagcacaug

SEQ ID NO: 2570954 - RNA, 19 nt, Artificial Sequence
  Description of Artificial Sequence: Synthetic oligonucleotide
ccaccguuuccugcccuug

SEQ ID NO: 2570955 - RNA, 19 nt, Artificial Sequence
  Description of Artificial Sequence: Synthetic oligonucleotide
ccacuguugaauggugacu

SEQ ID NO: 2570956 - RNA, 19 nt, Artificial Sequence
  Description of Artificial Sequence: Synthetic oligonucleotide
gcugugccguuaaggcaga

SEQ ID NO: 2570957 - RNA, 19 nt, Artificial Sequence
  Description of Artificial Sequence: Synthetic oligonucleotide
ccucguucagguucuccuu

SEQ ID NO: 2570958 - RNA, 19 nt, Artificial Sequence
  Description of Artificial Sequence: Synthetic oligonucleotide
gccaccguuuccugcccuu

SEQ ID NO: 2570959 - RNA, 19 nt, Artificial Sequence
  Description of Artificial Sequence: Synthetic oligonucleotide
cggaucugcugugccguua

SEQ ID NO: 2570960 - RNA, 19 nt, Artificial Sequence
  Description of Artificial Sequence: Synthetic oligonucleotide
cgaccucguucagguucuc

SEQ ID NO: 2570961 - RNA, 19 nt, Artificial Sequence
  Description of Artificial Sequence: Synthetic oligonucleotide
aaaguuaaugcaaagauag

SEQ ID NO: 2570962 - RNA, 19 nt, Artificial Sequence
  Description of Artificial Sequence: Synthetic oligonucleotide
aaugcaaagauagucacac

SEQ ID NO: 2570963 - RNA, 19 nt, Artificial Sequence
  Description of Artificial Sequence: Synthetic oligonucleotide
aauacugaggguuuaccac

SEQ ID NO: 2570964 - RNA, 19 nt, Artificial Sequence
  Description of Artificial Sequence: Synthetic oligonucleotide
uauuugaagaaucuguaga

SEQ ID NO: 2570965 - RNA, 19 nt, Artificial Sequence
  Description of Artificial Sequence: Synthetic oligonucleotide
ucugaaacgaugaagggcu

SEQ ID NO: 2570966 - RNA, 19 nt, Artificial Sequence
  Description of Artificial Sequence: Synthetic oligonucleotide
ugugccaucuacaagaagu

SEQ ID NO: 2570967 - RNA, 19 nt, Artificial Sequence
  Description of Artificial Sequence: Synthetic oligonucleotide
ucaaaguuaaugcaaagau

SEQ ID NO: 2570968 - RNA, 19 nt, Artificial Sequence
  Description of Artificial Sequence: Synthetic oligonucleotide
gaugcugaaggcuugcugg

SEQ ID NO: 2570969 - RNA, 19 nt, Artificial Sequence
  Description of Artificial Sequence: Synthetic oligonucleotide
aaaguauuugggaauacuc

SEQ ID NO: 2570970 - RNA, 19 nt, Artificial Sequence
  Description of Artificial Sequence: Synthetic oligonucleotide
cucucugaaacgaugaagg

SEQ ID NO: 2570971 - RNA, 19 nt, Artificial Sequence
  Description of Artificial Sequence: Synthetic oligonucleotide
uucucgauauauuugaaga

SEQ ID NO: 2570972 - RNA, 19 nt, Artificial Sequence
  Description of Artificial Sequence: Synthetic oligonucleotide
gaggguuuaccacaaagcg

SEQ ID NO: 2570973 - RNA, 19 nt, Artificial Sequence
  Description of Artificial Sequence: Synthetic oligonucleotide
aguuaaugcaaagauaguc

SEQ ID NO: 2570974 - RNA, 19 nt, Artificial Sequence
  Description of Artificial Sequence: Synthetic oligonucleotide
aaaauacugaggguuuacc

SEQ ID NO: 2570975 - RNA, 19 nt, Artificial Sequence
  Description of Artificial Sequence: Synthetic oligonucleotide
uguauucucucccuggucc

SEQ ID NO: 2570976 - RNA, 19 nt, Artificial Sequence
  Description of Artificial Sequence: Synthetic oligonucleotide
agagaugccaucuggacag

SEQ ID NO: 2570977 - RNA, 19 nt, Artificial Sequence
  Description of Artificial Sequence: Synthetic oligonucleotide
ucugucagcacaacgaugu

SEQ ID NO: 2570978 - RNA, 19 nt, Artificial Sequence
  Description of Artificial Sequence: Synthetic oligonucleotide
guagugaucaaacugcuug

SEQ ID NO: 2570979 - RNA, 19 nt, Artificial Sequence
  Description of Artificial Sequence: Synthetic oligonucleotide
ugcaaagauagucacacgu

SEQ ID NO: 2570980 - RNA, 19 nt, Artificial Sequence
  Description of Artificial Sequence: Synthetic oligonucleotide
aacgauguggcacucucuc

SEQ ID NO: 2570981 - RNA, 19 nt, Artificial Sequence
  Description of Artificial Sequence: Synthetic oligonucleotide
ugaaguuguauucucuccc

SEQ ID NO: 2570982 - RNA, 19 nt, Artificial Sequence
  Description of Artificial Sequence: Synthetic oligonucleotide
aaauacugaggguuuacca

SEQ ID NO: 2570983 - RNA, 19 nt, Artificial Sequence
  Description of Artificial Sequence: Synthetic oligonucleotide
uuuaccacaaagcgugugc

SEQ ID NO: 2570984 - RNA, 19 nt, Artificial Sequence
  Description of Artificial Sequence: Synthetic oligonucleotide
aaucaguuccucgagguag

SEQ ID NO: 2570985 - RNA, 19 nt, Artificial Sequence
  Description of Artificial Sequence: Synthetic oligonucleotide
cacucuggaagcaugagcc

SEQ ID NO: 2570986 - RNA, 19 nt, Artificial Sequence
  Description of Artificial Sequence: Synthetic oligonucleotide
agucuuauaguaauccagc

SEQ ID NO: 2570987 - RNA, 19 nt, Artificial Sequence
  Description of Artificial Sequence: Synthetic oligonucleotide
ugaggguuuaccacaaagc

SEQ ID NO: 2570988 - RNA, 19 nt, Artificial Sequence
  Description of Artificial Sequence: Synthetic oligonucleotide
uuaaugcaaagauagucac

SEQ ID NO: 2570989 - RNA, 19 nt, Artificial Sequence
  Description of Artificial Sequence: Synthetic oligonucleotide
auauuugaagaaucuguag

SEQ ID NO: 2570990 - RNA, 19 nt, Artificial Sequence
  Description of Artificial Sequence: Synthetic oligonucleotide
ggagcuguaaaguauuugg

SEQ ID NO: 2570991 - RNA, 19 nt, Artificial Sequence
  Description of Artificial Sequence: Synthetic oligonucleotide
cuugugagcaccaucguug

SEQ ID NO: 2570992 - RNA, 19 nt, Artificial Sequence
  Description of Artificial Sequence: Synthetic oligonucleotide
ucggcaaucucauaccucc

SEQ ID NO: 2570993 - RNA, 19 nt, Artificial Sequence
  Description of Artificial Sequence: Synthetic oligonucleotide
auauauuugaagaaucugu

SEQ ID NO: 2570994 - RNA, 19 nt, Artificial Sequence
  Description of Artificial Sequence: Synthetic oligonucleotide
uuauaguaauccagcacug

SEQ ID NO: 2570995 - RNA, 19 nt, Artificial Sequence
  Description of Artificial Sequence: Synthetic oligonucleotide
ucgauauauuugaagaauc

SEQ ID NO: 2570996 - RNA, 19 nt, Artificial Sequence
  Description of Artificial Sequence: Synthetic oligonucleotide
auucucgauauauuugaag

SEQ ID NO: 2570997 - RNA, 19 nt, Artificial Sequence
  Description of Artificial Sequence: Synthetic oligonucleotide
aagccuaccccgcuguuuc

SEQ ID NO: 2570998 - RNA, 19 nt, Artificial Sequence
  Description of Artificial Sequence: Synthetic oligonucleotide
cugcuugugagcaccaucg

SEQ ID NO: 2570999 - RNA, 19 nt, Artificial Sequence
  Description of Artificial Sequence: Synthetic oligonucleotide
cagucuuauaguaauccag

SEQ ID NO: 2571000 - RNA, 19 nt, Artificial Sequence
  Description of Artificial Sequence: Synthetic oligonucleotide
aaagauagucacacguguc

SEQ ID NO: 2571001 - RNA, 19 nt, Artificial Sequence
  Description of Artificial Sequence: Synthetic oligonucleotide
gaugguguuggagucaaag

SEQ ID NO: 2571002 - RNA, 19 nt, Artificial Sequence
  Description of Artificial Sequence: Synthetic oligonucleotide
uuugaagaaucuguagagc

SEQ ID NO: 2571003 - RNA, 19 nt, Artificial Sequence
  Description of Artificial Sequence: Synthetic oligonucleotide
cacugugcggaacacagcg

SEQ ID NO: 2571004 - RNA, 19 nt, Artificial Sequence
  Description of Artificial Sequence: Synthetic oligonucleotide
uaauccagcacugugcgga

SEQ ID NO: 2571005 - RNA, 19 nt, Artificial Sequence
  Description of Artificial Sequence: Synthetic oligonucleotide
agaaucaguuccucgaggu

SEQ ID NO: 2571006 - RNA, 19 nt, Artificial Sequence
  Description of Artificial Sequence: Synthetic oligonucleotide
aagcaugagcccuugcugu

SEQ ID NO: 2571007 - RNA, 19 nt, Artificial Sequence
  Description of Artificial Sequence: Synthetic oligonucleotide
acaacgauguggcacucuc

SEQ ID NO: 2571008 - RNA, 19 nt, Artificial Sequence
  Description of Artificial Sequence: Synthetic oligonucleotide
aggucuugacaucggaugg

SEQ ID NO: 2571009 - RNA, 19 nt, Artificial Sequence
  Description of Artificial Sequence: Synthetic oligonucleotide
guuaaugcaaagauaguca

SEQ ID NO: 2571010 - RNA, 19 nt, Artificial Sequence
  Description of Artificial Sequence: Synthetic oligonucleotide
gaagcaugagcccuugcug

SEQ ID NO: 2571011 - RNA, 19 nt, Artificial Sequence
  Description of Artificial Sequence: Synthetic oligonucleotide
uggucuucaucccagucca

SEQ ID NO: 2571012 - RNA, 19 nt, Artificial Sequence
  Description of Artificial Sequence: Synthetic oligonucleotide
aucguuggacagcucaugg

SEQ ID NO: 2571013 - RNA, 19 nt, Artificial Sequence
  Description of Artificial Sequence: Synthetic oligonucleotide
aguauuugggaauacucuu

SEQ ID NO: 2571014 - RNA, 19 nt, Artificial Sequence
  Description of Artificial Sequence: Synthetic oligonucleotide
ucucauugggccuugugaa

SEQ ID NO: 2571015 - RNA, 19 nt, Artificial Sequence
  Description of Artificial Sequence: Synthetic oligonucleotide
agucaaaguuaaugcaaag

SEQ ID NO: 2571016 - RNA, 19 nt, Artificial Sequence
  Description of Artificial Sequence: Synthetic oligonucleotide
ugucagcacaacgaugugg

SEQ ID NO: 2571017 - RNA, 19 nt, Artificial Sequence
  Description of Artificial Sequence: Synthetic oligonucleotide
agugucacuuucucugggg

SEQ ID NO: 2571018 - RNA, 19 nt, Artificial Sequence
  Description of Artificial Sequence: Synthetic oligonucleotide
ucucagauccgggauagag

SEQ ID NO: 2571019 - RNA, 19 nt, Artificial Sequence
  Description of Artificial Sequence: Synthetic oligonucleotide
ucucucugaaacgaugaag

SEQ ID NO: 2571020 - RNA, 19 nt, Artificial Sequence
  Description of Artificial Sequence: Synthetic oligonucleotide
uuagcaacaucccgauucu

SEQ ID NO: 2571021 - RNA, 19 nt, Artificial Sequence
  Description of Artificial Sequence: Synthetic oligonucleotide
ucucgauauauuugaagaa

SEQ ID NO: 2571022 - RNA, 19 nt, Artificial Sequence
  Description of Artificial Sequence: Synthetic oligonucleotide
auacugaggguuuaccaca

SEQ ID NO: 2571023 - RNA, 19 nt, Artificial Sequence
  Description of Artificial Sequence: Synthetic oligonucleotide
aaguuguauucucucccug

SEQ ID NO: 2571024 - RNA, 19 nt, Artificial Sequence
  Description of Artificial Sequence: Synthetic oligonucleotide
gagcuguaaaguauuuggg

SEQ ID NO: 2571025 - RNA, 19 nt, Artificial Sequence
  Description of Artificial Sequence: Synthetic oligonucleotide
uguaaaguauuugggaaua

SEQ ID NO: 2571026 - RNA, 19 nt, Artificial Sequence
  Description of Artificial Sequence: Synthetic oligonucleotide
cucugaaacgaugaagggc

SEQ ID NO: 2571027 - RNA, 19 nt, Artificial Sequence
  Description of Artificial Sequence: Synthetic oligonucleotide
ugaaacgaugaagggcucg

SEQ ID NO: 2571028 - RNA, 19 nt, Artificial Sequence
  Description of Artificial Sequence: Synthetic oligonucleotide
aucggaugguguuggaguc

SEQ ID NO: 2571029 - RNA, 19 nt, Artificial Sequence
  Description of Artificial Sequence: Synthetic oligonucleotide
agcacucaggucuugacau

SEQ ID NO: 2571030 - RNA, 19 nt, Artificial Sequence
  Description of Artificial Sequence: Synthetic oligonucleotide
ucacacgugucucucagau

SEQ ID NO: 2571031 - RNA, 19 nt, Artificial Sequence
  Description of Artificial Sequence: Synthetic oligonucleotide
caggucuugacaucggaug

SEQ ID NO: 2571032 - RNA, 19 nt, Artificial Sequence
  Description of Artificial Sequence: Synthetic oligonucleotide
gugaaguuguauucucucc

SEQ ID NO: 2571033 - RNA, 19 nt, Artificial Sequence
  Description of Artificial Sequence: Synthetic oligonucleotide
gaugccuucggcaaucuca

SEQ ID NO: 2571034 - RNA, 19 nt, Artificial Sequence
  Description of Artificial Sequence: Synthetic oligonucleotide
caaacugcuugugagcacc

SEQ ID NO: 2571035 - RNA, 19 nt, Artificial Sequence
  Description of Artificial Sequence: Synthetic oligonucleotide
agcacaacgauguggcacu

SEQ ID NO: 2571036 - RNA, 19 nt, Artificial Sequence
  Description of Artificial Sequence: Synthetic oligonucleotide
ggguuuaccacaaagcgug

SEQ ID NO: 2571037 - RNA, 19 nt, Artificial Sequence
  Description of Artificial Sequence: Synthetic oligonucleotide
agucacacgugucucucag

SEQ ID NO: 2571038 - RNA, 19 nt, Artificial Sequence
  Description of Artificial Sequence: Synthetic oligonucleotide
ugugcggaacacagcggcg

SEQ ID NO: 2571039 - RNA, 19 nt, Artificial Sequence
  Description of Artificial Sequence: Synthetic oligonucleotide
ugacaucggaugguguugg

SEQ ID NO: 2571040 - RNA, 19 nt, Artificial Sequence
  Description of Artificial Sequence: Synthetic oligonucleotide
caccaugauggguagaauc

SEQ ID NO: 2571041 - RNA, 19 nt, Artificial Sequence
  Description of Artificial Sequence: Synthetic oligonucleotide
aacaucccgauucucgaua

SEQ ID NO: 2571042 - RNA, 19 nt, Artificial Sequence
  Description of Artificial Sequence: Synthetic oligonucleotide
gguagaaucaguuccucga

SEQ ID NO: 2571043 - RNA, 19 nt, Artificial Sequence
  Description of Artificial Sequence: Synthetic oligonucleotide
uuccucgagguagugauca

SEQ ID NO: 2571044 - RNA, 19 nt, Artificial Sequence
  Description of Artificial Sequence: Synthetic oligonucleotide
caaaaucucucugaaacga

SEQ ID NO: 2571045 - RNA, 19 nt, Artificial Sequence
  Description of Artificial Sequence: Synthetic oligonucleotide
agauagucacacgugucuc

SEQ ID NO: 2571046 - RNA, 19 nt, Artificial Sequence
  Description of Artificial Sequence: Synthetic oligonucleotide
cugugcggaacacagcggc

SEQ ID NO: 2571047 - RNA, 19 nt, Artificial Sequence
  Description of Artificial Sequence: Synthetic oligonucleotide
uauaguaauccagcacugu

SEQ ID NO: 2571048 - RNA, 19 nt, Artificial Sequence
  Description of Artificial Sequence: Synthetic oligonucleotide
ugauggguagaaucaguuc

SEQ ID NO: 2571049 - RNA, 19 nt, Artificial Sequence
  Description of Artificial Sequence: Synthetic oligonucleotide
gucaaaguuaaugcaaaga

SEQ ID NO: 2571050 - RNA, 19 nt, Artificial Sequence
  Description of Artificial Sequence: Synthetic oligonucleotide
auagucacacgugucucuc

SEQ ID NO: 2571051 - RNA, 19 nt, Artificial Sequence
  Description of Artificial Sequence: Synthetic oligonucleotide
aagcgugugccaucuacaa

SEQ ID NO: 2571052 - RNA, 19 nt, Artificial Sequence
  Description of Artificial Sequence: Synthetic oligonucleotide
aagaaucuguagagcuugg

SEQ ID NO: 2571053 - RNA, 19 nt, Artificial Sequence
  Description of Artificial Sequence: Synthetic oligonucleotide
augcaaagauagucacacg

SEQ ID NO: 2571054 - RNA, 19 nt, Artificial Sequence
  Description of Artificial Sequence: Synthetic oligonucleotide
ugguccaaacauucuuccc

SEQ ID NO: 2571055 - RNA, 19 nt, Artificial Sequence
  Description of Artificial Sequence: Synthetic oligonucleotide
ucaggucuugacaucggau

SEQ ID NO: 2571056 - RNA, 19 nt, Artificial Sequence
  Description of Artificial Sequence: Synthetic oligonucleotide
aaagcgugugccaucuaca

SEQ ID NO: 2571057 - RNA, 19 nt, Artificial Sequence
  Description of Artificial Sequence: Synthetic oligonucleotide
cagggagcggcauuacggg

SEQ ID NO: 2571058 - RNA, 19 nt, Artificial Sequence
  Description of Artificial Sequence: Synthetic oligonucleotide
uccgggauagagaugccau

SEQ ID NO: 2571059 - RNA, 19 nt, Artificial Sequence
  Description of Artificial Sequence: Synthetic oligonucleotide
auguggcacucucucuccc

SEQ ID NO: 2571060 - RNA, 19 nt, Artificial Sequence
  Description of Artificial Sequence: Synthetic oligonucleotide
uugacaucggaugguguug

SEQ ID NO: 2571061 - RNA, 19 nt, Artificial Sequence
  Description of Artificial Sequence: Synthetic oligonucleotide
agcaugagcccuugcuguc

SEQ ID NO: 2571062 - RNA, 19 nt, Artificial Sequence
  Description of Artificial Sequence: Synthetic oligonucleotide
ucgagguagugaucaaacu

SEQ ID NO: 2571063 - RNA, 19 nt, Artificial Sequence
  Description of Artificial Sequence: Synthetic oligonucleotide
aaguuaaugcaaagauagu

SEQ ID NO: 2571064 - RNA, 19 nt, Artificial Sequence
  Description of Artificial Sequence: Synthetic oligonucleotide
aaaaucucucugaaacgau

SEQ ID NO: 2571065 - RNA, 19 nt, Artificial Sequence
  Description of Artificial Sequence: Synthetic oligonucleotide
uuucuuggcacagcccacc

SEQ ID NO: 2571066 - RNA, 19 nt, Artificial Sequence
  Description of Artificial Sequence: Synthetic oligonucleotide
cauuacgggaggaugcuga

SEQ ID NO: 2571067 - RNA, 19 nt, Artificial Sequence
  Description of Artificial Sequence: Synthetic oligonucleotide
uggagcuguaaaguauuug

SEQ ID NO: 2571068 - RNA, 19 nt, Artificial Sequence
  Description of Artificial Sequence: Synthetic oligonucleotide
cucauugggccuugugaag

SEQ ID NO: 2571069 - RNA, 19 nt, Artificial Sequence
  Description of Artificial Sequence: Synthetic oligonucleotide
ucauggagcaaagcacuca

SEQ ID NO: 2571070 - RNA, 19 nt, Artificial Sequence
  Description of Artificial Sequence: Synthetic oligonucleotide
gcuguaaaguauuugggaa

SEQ ID NO: 2571071 - RNA, 19 nt, Artificial Sequence
  Description of Artificial Sequence: Synthetic oligonucleotide
ucuugacaucggauggugu

SEQ ID NO: 2571072 - RNA, 19 nt, Artificial Sequence
  Description of Artificial Sequence: Synthetic oligonucleotide
uugcuuccacucuggaagc

SEQ ID NO: 2571073 - RNA, 19 nt, Artificial Sequence
  Description of Artificial Sequence: Synthetic oligonucleotide
gugucacuuucucuggggc

SEQ ID NO: 2571074 - RNA, 19 nt, Artificial Sequence
  Description of Artificial Sequence: Synthetic oligonucleotide
uguggcacucucucucccc

SEQ ID NO: 2571075 - RNA, 19 nt, Artificial Sequence
  Description of Artificial Sequence: Synthetic oligonucleotide
gugagcaccaucguuggac

SEQ ID NO: 2571076 - RNA, 19 nt, Artificial Sequence
  Description of Artificial Sequence: Synthetic oligonucleotide
uuguauucucucccugguc

SEQ ID NO: 2571077 - RNA, 19 nt, Artificial Sequence
  Description of Artificial Sequence: Synthetic oligonucleotide
cucccugguccaaacauuc

SEQ ID NO: 2571078 - RNA, 19 nt, Artificial Sequence
  Description of Artificial Sequence: Synthetic oligonucleotide
guaauccagcacugugcgg

SEQ ID NO: 2571079 - RNA, 19 nt, Artificial Sequence
  Description of Artificial Sequence: Synthetic oligonucleotide
ucguuggacagcucaugga

SEQ ID NO: 2571080 - RNA, 19 nt, Artificial Sequence
  Description of Artificial Sequence: Synthetic oligonucleotide
caucuggacaguugaugac

SEQ ID NO: 2571081 - RNA, 19 nt, Artificial Sequence
  Description of Artificial Sequence: Synthetic oligonucleotide
cuuccacucuggaagcaug

SEQ ID NO: 2571082 - RNA, 19 nt, Artificial Sequence
  Description of Artificial Sequence: Synthetic oligonucleotide
gugaucaaacugcuuguga

SEQ ID NO: 2571083 - RNA, 19 nt, Artificial Sequence
  Description of Artificial Sequence: Synthetic oligonucleotide
uucggcaaucucauaccuc

SEQ ID NO: 2571084 - RNA, 19 nt, Artificial Sequence
  Description of Artificial Sequence: Synthetic oligonucleotide
uacugaggguuuaccacaa

SEQ ID NO: 2571085 - RNA, 19 nt, Artificial Sequence
  Description of Artificial Sequence: Synthetic oligonucleotide
gcgugugccaucuacaaga

SEQ ID NO: 2571086 - RNA, 19 nt, Artificial Sequence
  Description of Artificial Sequence: Synthetic oligonucleotide
acgccagucuuauaguaau

SEQ ID NO: 2571087 - RNA, 19 nt, Artificial Sequence
  Description of Artificial Sequence: Synthetic oligonucleotide
agcgugugccaucuacaag

SEQ ID NO: 2571088 - RNA, 19 nt, Artificial Sequence
  Description of Artificial Sequence: Synthetic oligonucleotide
cagcucauggagcaaagca

SEQ ID NO: 2571089 - RNA, 19 nt, Artificial Sequence
  Description of Artificial Sequence: Synthetic oligonucleotide
agggcuaccuccaaagccu

SEQ ID NO: 2571090 - RNA, 19 nt, Artificial Sequence
  Description of Artificial Sequence: Synthetic oligonucleotide
ggguagaaucaguuccucg

SEQ ID NO: 2571091 - RNA, 19 nt, Artificial Sequence
  Description of Artificial Sequence: Synthetic oligonucleotide
caaagauagucacacgugu

SEQ ID NO: 2571092 - RNA, 19 nt, Artificial Sequence
  Description of Artificial Sequence: Synthetic oligonucleotide
cucagggagcggcauuacg

SEQ ID NO: 2571093 - RNA, 19 nt, Artificial Sequence
  Description of Artificial Sequence: Synthetic oligonucleotide
aggguuuaccacaaagcgu

SEQ ID NO: 2571094 - RNA, 19 nt, Artificial Sequence
  Description of Artificial Sequence: Synthetic oligonucleotide
aaacgaugaagggcucgug

SEQ ID NO: 2571095 - RNA, 19 nt, Artificial Sequence
  Description of Artificial Sequence: Synthetic oligonucleotide
cagcacaacgauguggcac

SEQ ID NO: 2571096 - RNA, 19 nt, Artificial Sequence
  Description of Artificial Sequence: Synthetic oligonucleotide
aucccgauucucgauauau

SEQ ID NO: 2571097 - RNA, 19 nt, Artificial Sequence
  Description of Artificial Sequence: Synthetic oligonucleotide
gauagucacacgugucucu

SEQ ID NO: 2571098 - RNA, 19 nt, Artificial Sequence
  Description of Artificial Sequence: Synthetic oligonucleotide
agcuuggagcuguaaagua

SEQ ID NO: 2571099 - RNA, 19 nt, Artificial Sequence
  Description of Artificial Sequence: Synthetic oligonucleotide
cucagauccgggauagaga

SEQ ID NO: 2571100 - RNA, 19 nt, Artificial Sequence
  Description of Artificial Sequence: Synthetic oligonucleotide
ggcaaucucauaccucccc

SEQ ID NO: 2571101 - RNA, 19 nt, Artificial Sequence
  Description of Artificial Sequence: Synthetic oligonucleotide
guuuaccacaaagcgugug

SEQ ID NO: 2571102 - RNA, 19 nt, Artificial Sequence
  Description of Artificial Sequence: Synthetic oligonucleotide
aauccagcacugugcggaa

SEQ ID NO: 2571103 - RNA, 19 nt, Artificial Sequence
  Description of Artificial Sequence: Synthetic oligonucleotide
uguccgggugagcaguaaa

SEQ ID NO: 2571104 - RNA, 19 nt, Artificial Sequence
  Description of Artificial Sequence: Synthetic oligonucleotide
cucauggagcaaagcacuc

SEQ ID NO: 2571105 - RNA, 19 nt, Artificial Sequence
  Description of Artificial Sequence: Synthetic oligonucleotide
gcaaagauagucacacgug

SEQ ID NO: 2571106 - RNA, 19 nt, Artificial Sequence
  Description of Artificial Sequence: Synthetic oligonucleotide
gugccaucuacaagaagug

SEQ ID NO: 2571107 - RNA, 19 nt, Artificial Sequence
  Description of Artificial Sequence: Synthetic oligonucleotide
acaucccgauucucgauau

SEQ ID NO: 2571108 - RNA, 19 nt, Artificial Sequence
  Description of Artificial Sequence: Synthetic oligonucleotide
uuacgggaggaugcugaag

SEQ ID NO: 2571109 - RNA, 19 nt, Artificial Sequence
  Description of Artificial Sequence: Synthetic oligonucleotide
uccaaacauucuucccaac

SEQ ID NO: 2571110 - RNA, 19 nt, Artificial Sequence
  Description of Artificial Sequence: Synthetic oligonucleotide
ucucccugguccaaacauu

SEQ ID NO: 2571111 - RNA, 19 nt, Artificial Sequence
  Description of Artificial Sequence: Synthetic oligonucleotide
auuacgggaggaugcugaa

SEQ ID NO: 2571112 - RNA, 19 nt, Artificial Sequence
  Description of Artificial Sequence: Synthetic oligonucleotide
ugcuugugagcaccaucgu

SEQ ID NO: 2571113 - RNA, 19 nt, Artificial Sequence
  Description of Artificial Sequence: Synthetic oligonucleotide
aucucucugaaacgaugaa

SEQ ID NO: 2571114 - RNA, 19 nt, Artificial Sequence
  Description of Artificial Sequence: Synthetic oligonucleotide
aagggcucguggcuccgcu

SEQ ID NO: 2571115 - RNA, 19 nt, Artificial Sequence
  Description of Artificial Sequence: Synthetic oligonucleotide
ggagucaaaguuaaugcaa

SEQ ID NO: 2571116 - RNA, 19 nt, Artificial Sequence
  Description of Artificial Sequence: Synthetic oligonucleotide
augauggguagaaucaguu

SEQ ID NO: 2571117 - RNA, 19 nt, Artificial Sequence
  Description of Artificial Sequence: Synthetic oligonucleotide
auggguagaaucaguuccu

SEQ ID NO: 2571118 - RNA, 19 nt, Artificial Sequence
  Description of Artificial Sequence: Synthetic oligonucleotide
augguguccgggugagcag

SEQ ID NO: 2571119 - RNA, 19 nt, Artificial Sequence
  Description of Artificial Sequence: Synthetic oligonucleotide
ccgauucucgauauauuug

SEQ ID NO: 2571120 - RNA, 19 nt, Artificial Sequence
  Description of Artificial Sequence: Synthetic oligonucleotide
guauucucucccuggucca

SEQ ID NO: 2571121 - RNA, 19 nt, Artificial Sequence
  Description of Artificial Sequence: Synthetic oligonucleotide
accacaaagcgugugccau

SEQ ID NO: 2571122 - RNA, 19 nt, Artificial Sequence
  Description of Artificial Sequence: Synthetic oligonucleotide
cguuggacagcucauggag

SEQ ID NO: 2571123 - RNA, 19 nt, Artificial Sequence
  Description of Artificial Sequence: Synthetic oligonucleotide
uaccccgcuguuuccaaaa

SEQ ID NO: 2571124 - RNA, 19 nt, Artificial Sequence
  Description of Artificial Sequence: Synthetic oligonucleotide
aaagccuaccccgcuguuu

SEQ ID NO: 2571125 - RNA, 19 nt, Artificial Sequence
  Description of Artificial Sequence: Synthetic oligonucleotide
caaacauucuucccaacau

SEQ ID NO: 2571126 - RNA, 19 nt, Artificial Sequence
  Description of Artificial Sequence: Synthetic oligonucleotide
ccaucuacaagaaguguca

SEQ ID NO: 2571127 - RNA, 19 nt, Artificial Sequence
  Description of Artificial Sequence: Synthetic oligonucleotide
ccuucggcaaucucauacc

SEQ ID NO: 2571128 - RNA, 19 nt, Artificial Sequence
  Description of Artificial Sequence: Synthetic oligonucleotide
ugcggaacacagcggcgcu

SEQ ID NO: 2571129 - RNA, 19 nt, Artificial Sequence
  Description of Artificial Sequence: Synthetic oligonucleotide
gaaucaguuccucgaggua

SEQ ID NO: 2571130 - RNA, 19 nt, Artificial Sequence
  Description of Artificial Sequence: Synthetic oligonucleotide
acgauguggcacucucucu

SEQ ID NO: 2571131 - RNA, 19 nt, Artificial Sequence
  Description of Artificial Sequence: Synthetic oligonucleotide
cucucuccccuuucuuggc

SEQ ID NO: 2571132 - RNA, 19 nt, Artificial Sequence
  Description of Artificial Sequence: Synthetic oligonucleotide
ucccugguccaaacauucu

SEQ ID NO: 2571133 - RNA, 19 nt, Artificial Sequence
  Description of Artificial Sequence: Synthetic oligonucleotide
ggagcaaagcacucagguc

SEQ ID NO: 2571134 - RNA, 19 nt, Artificial Sequence
  Description of Artificial Sequence: Synthetic oligonucleotide
caucggaugguguuggagu

SEQ ID NO: 2571135 - RNA, 19 nt, Artificial Sequence
  Description of Artificial Sequence: Synthetic oligonucleotide
acugugcggaacacagcgg

SEQ ID NO: 2571136 - RNA, 19 nt, Artificial Sequence
  Description of Artificial Sequence: Synthetic oligonucleotide
cacgugucucucagauccg

SEQ ID NO: 2571137 - RNA, 19 nt, Artificial Sequence
  Description of Artificial Sequence: Synthetic oligonucleotide
uggaagcaugagcccuugc

SEQ ID NO: 2571138 - RNA, 19 nt, Artificial Sequence
  Description of Artificial Sequence: Synthetic oligonucleotide
cuguaaaguauuugggaau

SEQ ID NO: 2571139 - RNA, 19 nt, Artificial Sequence
  Description of Artificial Sequence: Synthetic oligonucleotide
ucccgauucucgauauauu

SEQ ID NO: 2571140 - RNA, 19 nt, Artificial Sequence
  Description of Artificial Sequence: Synthetic oligonucleotide
gccaucuacaagaaguguc

SEQ ID NO: 2571141 - RNA, 19 nt, Artificial Sequence
  Description of Artificial Sequence: Synthetic oligonucleotide
caucguuggacagcucaug

SEQ ID NO: 2571142 - RNA, 19 nt, Artificial Sequence
  Description of Artificial Sequence: Synthetic oligonucleotide
ggagcggcauuacgggagg

SEQ ID NO: 2571143 - RNA, 19 nt, Artificial Sequence
  Description of Artificial Sequence: Synthetic oligonucleotide
cucgauauauuugaagaau

SEQ ID NO: 2571144 - RNA, 19 nt, Artificial Sequence
  Description of Artificial Sequence: Synthetic oligonucleotide
auugggccuugugaaguug

SEQ ID NO: 2571145 - RNA, 19 nt, Artificial Sequence
  Description of Artificial Sequence: Synthetic oligonucleotide
gaaacgaugaagggcucgu

SEQ ID NO: 2571146 - RNA, 19 nt, Artificial Sequence
  Description of Artificial Sequence: Synthetic oligonucleotide
ccaucuggacaguugauga

SEQ ID NO: 2571147 - RNA, 19 nt, Artificial Sequence
  Description of Artificial Sequence: Synthetic oligonucleotide
ccaaacauucuucccaaca

SEQ ID NO: 2571148 - RNA, 19 nt, Artificial Sequence
  Description of Artificial Sequence: Synthetic oligonucleotide
guguuggagucaaaguuaa

SEQ ID NO: 2571149 - RNA, 19 nt, Artificial Sequence
  Description of Artificial Sequence: Synthetic oligonucleotide
gugcggaacacagcggcgc

SEQ ID NO: 2571150 - RNA, 19 nt, Artificial Sequence
  Description of Artificial Sequence: Synthetic oligonucleotide
ucuucccaacauggugucc

SEQ ID NO: 2571151 - RNA, 19 nt, Artificial Sequence
  Description of Artificial Sequence: Synthetic oligonucleotide
gcaacaucccgauucucga

SEQ ID NO: 2571152 - RNA, 19 nt, Artificial Sequence
  Description of Artificial Sequence: Synthetic oligonucleotide
ugaagggcucguggcuccg

SEQ ID NO: 2571153 - RNA, 19 nt, Artificial Sequence
  Description of Artificial Sequence: Synthetic oligonucleotide
gacgccagucuuauaguaa

SEQ ID NO: 2571154 - RNA, 19 nt, Artificial Sequence
  Description of Artificial Sequence: Synthetic oligonucleotide
gggauagagaugccaucug

SEQ ID NO: 2571155 - RNA, 19 nt, Artificial Sequence
  Description of Artificial Sequence: Synthetic oligonucleotide
ugggaguggagggcuaccu

SEQ ID NO: 2571156 - RNA, 19 nt, Artificial Sequence
  Description of Artificial Sequence: Synthetic oligonucleotide
uggguagaaucaguuccuc

SEQ ID NO: 2571157 - RNA, 19 nt, Artificial Sequence
  Description of Artificial Sequence: Synthetic oligonucleotide
ucaguuccucgagguagug

SEQ ID NO: 2571158 - RNA, 19 nt, Artificial Sequence
  Description of Artificial Sequence: Synthetic oligonucleotide
ccacucuggaagcaugagc

SEQ ID NO: 2571159 - RNA, 19 nt, Artificial Sequence
  Description of Artificial Sequence: Synthetic oligonucleotide
cugaaacgaugaagggcuc

SEQ ID NO: 2571160 - RNA, 19 nt, Artificial Sequence
  Description of Artificial Sequence: Synthetic oligonucleotide
caacaugguguccggguga

SEQ ID NO: 2571161 - RNA, 19 nt, Artificial Sequence
  Description of Artificial Sequence: Synthetic oligonucleotide
cuugacaucggaugguguu

SEQ ID NO: 2571162 - RNA, 19 nt, Artificial Sequence
  Description of Artificial Sequence: Synthetic oligonucleotide
ggcgcugaugccuucggca

SEQ ID NO: 2571163 - RNA, 19 nt, Artificial Sequence
  Description of Artificial Sequence: Synthetic oligonucleotide
uguagagcuuggagcugua

SEQ ID NO: 2571164 - RNA, 19 nt, Artificial Sequence
  Description of Artificial Sequence: Synthetic oligonucleotide
caugauggguagaaucagu

SEQ ID NO: 2571165 - RNA, 19 nt, Artificial Sequence
  Description of Artificial Sequence: Synthetic oligonucleotide
auccgggauagagaugcca

SEQ ID NO: 2571166 - RNA, 19 nt, Artificial Sequence
  Description of Artificial Sequence: Synthetic oligonucleotide
cagcccaccaugaugggua

SEQ ID NO: 2571167 - RNA, 19 nt, Artificial Sequence
  Description of Artificial Sequence: Synthetic oligonucleotide
cacacgugucucucagauc

SEQ ID NO: 2571168 - RNA, 19 nt, Artificial Sequence
  Description of Artificial Sequence: Synthetic oligonucleotide
cucaggucuugacaucgga

SEQ ID NO: 2571169 - RNA, 19 nt, Artificial Sequence
  Description of Artificial Sequence: Synthetic oligonucleotide
ggagggcuaccuccaaagc

SEQ ID NO: 2571170 - RNA, 19 nt, Artificial Sequence
  Description of Artificial Sequence: Synthetic oligonucleotide
cagauccgggauagagaug

SEQ ID NO: 2571171 - RNA, 19 nt, Artificial Sequence
  Description of Artificial Sequence: Synthetic oligonucleotide
ugcuuccacucuggaagca

SEQ ID NO: 2571172 - RNA, 19 nt, Artificial Sequence
  Description of Artificial Sequence: Synthetic oligonucleotide
cugucagcacaacgaugug

SEQ ID NO: 2571173 - RNA, 19 nt, Artificial Sequence
  Description of Artificial Sequence: Synthetic oligonucleotide
acagcccaccaugaugggu

SEQ ID NO: 2571174 - RNA, 19 nt, Artificial Sequence
  Description of Artificial Sequence: Synthetic oligonucleotide
ccagucuuauaguaaucca

SEQ ID NO: 2571175 - RNA, 19 nt, Artificial Sequence
  Description of Artificial Sequence: Synthetic oligonucleotide
aacugcuugugagcaccau

SEQ ID NO: 2571176 - RNA, 19 nt, Artificial Sequence
  Description of Artificial Sequence: Synthetic oligonucleotide
gaguggagggcuaccucca

SEQ ID NO: 2571177 - RNA, 19 nt, Artificial Sequence
  Description of Artificial Sequence: Synthetic oligonucleotide
augagcccuugcuguccuc

SEQ ID NO: 2571178 - RNA, 19 nt, Artificial Sequence
  Description of Artificial Sequence: Synthetic oligonucleotide
ccccuuucuuggcacagcc

SEQ ID NO: 2571179 - RNA, 19 nt, Artificial Sequence
  Description of Artificial Sequence: Synthetic oligonucleotide
gacaucggaugguguugga

SEQ ID NO: 2571180 - RNA, 19 nt, Artificial Sequence
  Description of Artificial Sequence: Synthetic oligonucleotide
cuucggcaaucucauaccu

SEQ ID NO: 2571181 - RNA, 19 nt, Artificial Sequence
  Description of Artificial Sequence: Synthetic oligonucleotide
aguggagggcuaccuccaa

SEQ ID NO: 2571182 - RNA, 19 nt, Artificial Sequence
  Description of Artificial Sequence: Synthetic oligonucleotide
cggcauuacgggaggaugc

SEQ ID NO: 2571183 - RNA, 19 nt, Artificial Sequence
  Description of Artificial Sequence: Synthetic oligonucleotide
gauccgggauagagaugcc

SEQ ID NO: 2571184 - RNA, 19 nt, Artificial Sequence
  Description of Artificial Sequence: Synthetic oligonucleotide
gucacacgugucucucaga

SEQ ID NO: 2571185 - RNA, 19 nt, Artificial Sequence
  Description of Artificial Sequence: Synthetic oligonucleotide
cuggaagcaugagcccuug

SEQ ID NO: 2571186 - RNA, 19 nt, Artificial Sequence
  Description of Artificial Sequence: Synthetic oligonucleotide
gcggcauuacgggaggaug

SEQ ID NO: 2571187 - RNA, 19 nt, Artificial Sequence
  Description of Artificial Sequence: Synthetic oligonucleotide
uagcaacaucccgauucuc

SEQ ID NO: 2571188 - RNA, 19 nt, Artificial Sequence
  Description of Artificial Sequence: Synthetic oligonucleotide
cacuuucucuggggcuugg

SEQ ID NO: 2571189 - RNA, 19 nt, Artificial Sequence
  Description of Artificial Sequence: Synthetic oligonucleotide
agcggcauuacgggaggau

SEQ ID NO: 2571190 - RNA, 19 nt, Artificial Sequence
  Description of Artificial Sequence: Synthetic oligonucleotide
cucucccugguccaaacau

SEQ ID NO: 2571191 - RNA, 19 nt, Artificial Sequence
  Description of Artificial Sequence: Synthetic oligonucleotide
accccgcuguuuccaaaau

SEQ ID NO: 2571192 - RNA, 19 nt, Artificial Sequence
  Description of Artificial Sequence: Synthetic oligonucleotide
guccgggugagcaguaaaa

SEQ ID NO: 2571193 - RNA, 19 nt, Artificial Sequence
  Description of Artificial Sequence: Synthetic oligonucleotide
cucuggaagcaugagcccu

SEQ ID NO: 2571194 - RNA, 19 nt, Artificial Sequence
  Description of Artificial Sequence: Synthetic oligonucleotide
gcaugagcccuugcugucc

SEQ ID NO: 2571195 - RNA, 19 nt, Artificial Sequence
  Description of Artificial Sequence: Synthetic oligonucleotide
gcugaugccuucggcaauc

SEQ ID NO: 2571196 - RNA, 19 nt, Artificial Sequence
  Description of Artificial Sequence: Synthetic oligonucleotide
agaugccaucuggacaguu

SEQ ID NO: 2571197 - RNA, 19 nt, Artificial Sequence
  Description of Artificial Sequence: Synthetic oligonucleotide
guuccucgagguagugauc

SEQ ID NO: 2571198 - RNA, 19 nt, Artificial Sequence
  Description of Artificial Sequence: Synthetic oligonucleotide
guagagcuuggagcuguaa

SEQ ID NO: 2571199 - RNA, 19 nt, Artificial Sequence
  Description of Artificial Sequence: Synthetic oligonucleotide
ccgcuguuuccaaaaucuc

SEQ ID NO: 2571200 - RNA, 19 nt, Artificial Sequence
  Description of Artificial Sequence: Synthetic oligonucleotide
gcauuacgggaggaugcug

SEQ ID NO: 2571201 - RNA, 19 nt, Artificial Sequence
  Description of Artificial Sequence: Synthetic oligonucleotide
ccgggauagagaugccauc

SEQ ID NO: 2571202 - RNA, 19 nt, Artificial Sequence
  Description of Artificial Sequence: Synthetic oligonucleotide
caacgauguggcacucucu

SEQ ID NO: 2571203 - RNA, 19 nt, Artificial Sequence
  Description of Artificial Sequence: Synthetic oligonucleotide
uggcuccgcuugcuuccac

SEQ ID NO: 2571204 - RNA, 19 nt, Artificial Sequence
  Description of Artificial Sequence: Synthetic oligonucleotide
gcacucaggucuugacauc

SEQ ID NO: 2571205 - RNA, 19 nt, Artificial Sequence
  Description of Artificial Sequence: Synthetic oligonucleotide
gcgcugaugccuucggcaa

SEQ ID NO: 2571206 - RNA, 19 nt, Artificial Sequence
  Description of Artificial Sequence: Synthetic oligonucleotide
caugagcccuugcuguccu

SEQ ID NO: 2571207 - RNA, 19 nt, Artificial Sequence
  Description of Artificial Sequence: Synthetic oligonucleotide
ugccuucggcaaucucaua

SEQ ID NO: 2571208 - RNA, 19 nt, Artificial Sequence
  Description of Artificial Sequence: Synthetic oligonucleotide
cuaccccgcuguuuccaaa

SEQ ID NO: 2571209 - RNA, 19 nt, Artificial Sequence
  Description of Artificial Sequence: Synthetic oligonucleotide
gcuuggagcuguaaaguau

SEQ ID NO: 2571210 - RNA, 19 nt, Artificial Sequence
  Description of Artificial Sequence: Synthetic oligonucleotide
ggcucguggcuccgcuugc

SEQ ID NO: 2571211 - RNA, 19 nt, Artificial Sequence
  Description of Artificial Sequence: Synthetic oligonucleotide
cccgauucucgauauauuu

SEQ ID NO: 2571212 - RNA, 19 nt, Artificial Sequence
  Description of Artificial Sequence: Synthetic oligonucleotide
cacagcggcgcugaugccu

SEQ ID NO: 2571213 - RNA, 19 nt, Artificial Sequence
  Description of Artificial Sequence: Synthetic oligonucleotide
cacucucucuccccuuucu

SEQ ID NO: 2571214 - RNA, 19 nt, Artificial Sequence
  Description of Artificial Sequence: Synthetic oligonucleotide
agggcucguggcuccgcuu

SEQ ID NO: 2571215 - RNA, 19 nt, Artificial Sequence
  Description of Artificial Sequence: Synthetic oligonucleotide
gcaccaucguuggacagcu

SEQ ID NO: 2571216 - RNA, 19 nt, Artificial Sequence
  Description of Artificial Sequence: Synthetic oligonucleotide
gagcggcauuacgggagga

SEQ ID NO: 2571217 - RNA, 19 nt, Artificial Sequence
  Description of Artificial Sequence: Synthetic oligonucleotide
caccaucguuggacagcuc

SEQ ID NO: 2571218 - RNA, 19 nt, Artificial Sequence
  Description of Artificial Sequence: Synthetic oligonucleotide
ggcauuacgggaggaugcu

SEQ ID NO: 2571219 - RNA, 19 nt, Artificial Sequence
  Description of Artificial Sequence: Synthetic oligonucleotide
caucccgauucucgauaua

SEQ ID NO: 2571220 - RNA, 19 nt, Artificial Sequence
  Description of Artificial Sequence: Synthetic oligonucleotide
cccaacaugguguccgggu

SEQ ID NO: 2571221 - RNA, 19 nt, Artificial Sequence
  Description of Artificial Sequence: Synthetic oligonucleotide
ccagcacugugcggaacac

SEQ ID NO: 2571222 - RNA, 19 nt, Artificial Sequence
  Description of Artificial Sequence: Synthetic oligonucleotide
cgccagucuuauaguaauc

SEQ ID NO: 2571223 - RNA, 19 nt, Artificial Sequence
  Description of Artificial Sequence: Synthetic oligonucleotide
gcggaacacagcggcgcug

SEQ ID NO: 2571224 - RNA, 19 nt, Artificial Sequence
  Description of Artificial Sequence: Synthetic oligonucleotide
ggcuugggaguggagggcu

SEQ ID NO: 2571225 - RNA, 19 nt, Artificial Sequence
  Description of Artificial Sequence: Synthetic oligonucleotide
ggcuccgcuugcuuccacu

SEQ ID NO: 2571226 - RNA, 19 nt, Artificial Sequence
  Description of Artificial Sequence: Synthetic oligonucleotide
cacaacgauguggcacucu

SEQ ID NO: 2571227 - RNA, 19 nt, Artificial Sequence
  Description of Artificial Sequence: Synthetic oligonucleotide
gguuuaccacaaagcgugu

SEQ ID NO: 2571228 - RNA, 19 nt, Artificial Sequence
  Description of Artificial Sequence: Synthetic oligonucleotide
ccucgagguagugaucaaa

SEQ ID NO: 2571229 - RNA, 19 nt, Artificial Sequence
  Description of Artificial Sequence: Synthetic oligonucleotide
guguccgggugagcaguaa

SEQ ID NO: 2571230 - RNA, 19 nt, Artificial Sequence
  Description of Artificial Sequence: Synthetic oligonucleotide
cgugugccaucuacaagaa

SEQ ID NO: 2571231 - RNA, 19 nt, Artificial Sequence
  Description of Artificial Sequence: Synthetic oligonucleotide
ggcacucucucuccccuuu

SEQ ID NO: 2571232 - RNA, 19 nt, Artificial Sequence
  Description of Artificial Sequence: Synthetic oligonucleotide
cgggauagagaugccaucu

SEQ ID NO: 2571233 - RNA, 19 nt, Artificial Sequence
  Description of Artificial Sequence: Synthetic oligonucleotide
gcuuccacucuggaagcau

SEQ ID NO: 2571234 - RNA, 19 nt, Artificial Sequence
  Description of Artificial Sequence: Synthetic oligonucleotide
cagcggcgcugaugccuuc

SEQ ID NO: 2571235 - RNA, 19 nt, Artificial Sequence
  Description of Artificial Sequence: Synthetic oligonucleotide
ccuaccccgcuguuuccaa

SEQ ID NO: 2571236 - RNA, 19 nt, Artificial Sequence
  Description of Artificial Sequence: Synthetic oligonucleotide
ccucagggagcggcauuac

SEQ ID NO: 2571237 - RNA, 19 nt, Artificial Sequence
  Description of Artificial Sequence: Synthetic oligonucleotide
gcacaacgauguggcacuc

SEQ ID NO: 2571238 - RNA, 19 nt, Artificial Sequence
  Description of Artificial Sequence: Synthetic oligonucleotide
ccaucguuggacagcucau

SEQ ID NO: 2571239 - RNA, 19 nt, Artificial Sequence
  Description of Artificial Sequence: Synthetic oligonucleotide
caaagccuaccccgcuguu

SEQ ID NO: 2571240 - RNA, 19 nt, Artificial Sequence
  Description of Artificial Sequence: Synthetic oligonucleotide
cucguggcuccgcuugcuu

SEQ ID NO: 2571241 - RNA, 19 nt, Artificial Sequence
  Description of Artificial Sequence: Synthetic oligonucleotide
gguguccgggugagcagua

SEQ ID NO: 2571242 - RNA, 19 nt, Artificial Sequence
  Description of Artificial Sequence: Synthetic oligonucleotide
gcuugggaguggagggcua

SEQ ID NO: 2571243 - RNA, 19 nt, Artificial Sequence
  Description of Artificial Sequence: Synthetic oligonucleotide
cgcuugcuuccacucugga

SEQ ID NO: 2571244 - RNA, 19 nt, Artificial Sequence
  Description of Artificial Sequence: Synthetic oligonucleotide
gcccaccaugauggguaga

SEQ ID NO: 2571245 - RNA, 19 nt, Artificial Sequence
  Description of Artificial Sequence: Synthetic oligonucleotide
cgggaggaugcugaaggcu

SEQ ID NO: 2571246 - RNA, 19 nt, Artificial Sequence
  Description of Artificial Sequence: Synthetic oligonucleotide
gcucguggcuccgcuugcu

SEQ ID NO: 2571247 - RNA, 19 nt, Artificial Sequence
  Description of Artificial Sequence: Synthetic oligonucleotide
ccaccaugauggguagaau

SEQ ID NO: 2571248 - RNA, 19 nt, Artificial Sequence
  Description of Artificial Sequence: Synthetic oligonucleotide
aaaugauucguguuccucc

SEQ ID NO: 2571249 - RNA, 19 nt, Artificial Sequence
  Description of Artificial Sequence: Synthetic oligonucleotide
ucuaauaagagacagguau

SEQ ID NO: 2571250 - RNA, 19 nt, Artificial Sequence
  Description of Artificial Sequence: Synthetic oligonucleotide
ugaacuacaaugagaaggg

SEQ ID NO: 2571251 - RNA, 19 nt, Artificial Sequence
  Description of Artificial Sequence: Synthetic oligonucleotide
ucagauaccaacauguuga

SEQ ID NO: 2571252 - RNA, 19 nt, Artificial Sequence
  Description of Artificial Sequence: Synthetic oligonucleotide
uaagagacagguauuauca

SEQ ID NO: 2571253 - RNA, 19 nt, Artificial Sequence
  Description of Artificial Sequence: Synthetic oligonucleotide
aaugauucguguuccuccc

SEQ ID NO: 2571254 - RNA, 19 nt, Artificial Sequence
  Description of Artificial Sequence: Synthetic oligonucleotide
aaauaaaaggucucuccuc

SEQ ID NO: 2571255 - RNA, 19 nt, Artificial Sequence
  Description of Artificial Sequence: Synthetic oligonucleotide
augaacuacaaugagaagg

SEQ ID NO: 2571256 - RNA, 19 nt, Artificial Sequence
  Description of Artificial Sequence: Synthetic oligonucleotide
aauaaaaggucucuccucu

SEQ ID NO: 2571257 - RNA, 19 nt, Artificial Sequence
  Description of Artificial Sequence: Synthetic oligonucleotide
uuggaaaauggccuggugg

SEQ ID NO: 2571258 - RNA, 19 nt, Artificial Sequence
  Description of Artificial Sequence: Synthetic oligonucleotide
guccauuucaaacugagcc

SEQ ID NO: 2571259 - RNA, 19 nt, Artificial Sequence
  Description of Artificial Sequence: Synthetic oligonucleotide
uucacuucuacuuuggagu

SEQ ID NO: 2571260 - RNA, 19 nt, Artificial Sequence
  Description of Artificial Sequence: Synthetic oligonucleotide
uguagauuuggaaaauggc

SEQ ID NO: 2571261 - RNA, 19 nt, Artificial Sequence
  Description of Artificial Sequence: Synthetic oligonucleotide
gaaggaaagagagugaggc

SEQ ID NO: 2571262 - RNA, 19 nt, Artificial Sequence
  Description of Artificial Sequence: Synthetic oligonucleotide
auaagagacagguauuauc

SEQ ID NO: 2571263 - RNA, 19 nt, Artificial Sequence
  Description of Artificial Sequence: Synthetic oligonucleotide
gagucuucaauuaaggugc

SEQ ID NO: 2571264 - RNA, 19 nt, Artificial Sequence
  Description of Artificial Sequence: Synthetic oligonucleotide
uagauuuggaaaauggccu

SEQ ID NO: 2571265 - RNA, 19 nt, Artificial Sequence
  Description of Artificial Sequence: Synthetic oligonucleotide
ggaaggaugaacuacaaug

SEQ ID NO: 2571266 - RNA, 19 nt, Artificial Sequence
  Description of Artificial Sequence: Synthetic oligonucleotide
aauugcgucgauccaacag

SEQ ID NO: 2571267 - RNA, 19 nt, Artificial Sequence
  Description of Artificial Sequence: Synthetic oligonucleotide
uuuggagucuucaauuaag

SEQ ID NO: 2571268 - RNA, 19 nt, Artificial Sequence
  Description of Artificial Sequence: Synthetic oligonucleotide
aaggaaagagagugaggcc

SEQ ID NO: 2571269 - RNA, 19 nt, Artificial Sequence
  Description of Artificial Sequence: Synthetic oligonucleotide
ucagauguccauuucaaac

SEQ ID NO: 2571270 - RNA, 19 nt, Artificial Sequence
  Description of Artificial Sequence: Synthetic oligonucleotide
uuguacugaaaacuuaucu

SEQ ID NO: 2571271 - RNA, 19 nt, Artificial Sequence
  Description of Artificial Sequence: Synthetic oligonucleotide
ugauuguucagguuguuca

SEQ ID NO: 2571272 - RNA, 19 nt, Artificial Sequence
  Description of Artificial Sequence: Synthetic oligonucleotide
gguauuaucagauaccaac

SEQ ID NO: 2571273 - RNA, 19 nt, Artificial Sequence
  Description of Artificial Sequence: Synthetic oligonucleotide
cucuccucuaauaagagac

SEQ ID NO: 2571274 - RNA, 19 nt, Artificial Sequence
  Description of Artificial Sequence: Synthetic oligonucleotide
uuggagucuucaauuaagg

SEQ ID NO: 2571275 - RNA, 19 nt, Artificial Sequence
  Description of Artificial Sequence: Synthetic oligonucleotide
aaggaugaacuacaaugag

SEQ ID NO: 2571276 - RNA, 19 nt, Artificial Sequence
  Description of Artificial Sequence: Synthetic oligonucleotide
uucaauuaaggugccaggg

SEQ ID NO: 2571277 - RNA, 19 nt, Artificial Sequence
  Description of Artificial Sequence: Synthetic oligonucleotide
uccuaauacuggaagaugu

SEQ ID NO: 2571278 - RNA, 19 nt, Artificial Sequence
  Description of Artificial Sequence: Synthetic oligonucleotide
guagauuuggaaaauggcc

SEQ ID NO: 2571279 - RNA, 19 nt, Artificial Sequence
  Description of Artificial Sequence: Synthetic oligonucleotide
gacagguauuaucagauac

SEQ ID NO: 2571280 - RNA, 19 nt, Artificial Sequence
  Description of Artificial Sequence: Synthetic oligonucleotide
aacugcaugcuuccugucg

SEQ ID NO: 2571281 - RNA, 19 nt, Artificial Sequence
  Description of Artificial Sequence: Synthetic oligonucleotide
ucuucaauuaaggugccag

SEQ ID NO: 2571282 - RNA, 19 nt, Artificial Sequence
  Description of Artificial Sequence: Synthetic oligonucleotide
aauaaccuuccuaauacug

SEQ ID NO: 2571283 - RNA, 19 nt, Artificial Sequence
  Description of Artificial Sequence: Synthetic oligonucleotide
uugauguagauuuggaaaa

SEQ ID NO: 2571284 - RNA, 19 nt, Artificial Sequence
  Description of Artificial Sequence: Synthetic oligonucleotide
uguacugaaaacuuaucua

SEQ ID NO: 2571285 - RNA, 19 nt, Artificial Sequence
  Description of Artificial Sequence: Synthetic oligonucleotide
ucaauuaaggugccagggc

SEQ ID NO: 2571286 - RNA, 19 nt, Artificial Sequence
  Description of Artificial Sequence: Synthetic oligonucleotide
aauaggucuguagucaucu

SEQ ID NO: 2571287 - RNA, 19 nt, Artificial Sequence
  Description of Artificial Sequence: Synthetic oligonucleotide
gaaacuuucggucauaaau

SEQ ID NO: 2571288 - RNA, 19 nt, Artificial Sequence
  Description of Artificial Sequence: Synthetic oligonucleotide
ugagguaccuuugauguag

SEQ ID NO: 2571289 - RNA, 19 nt, Artificial Sequence
  Description of Artificial Sequence: Synthetic oligonucleotide
caaacugagccucaucucc

SEQ ID NO: 2571290 - RNA, 19 nt, Artificial Sequence
  Description of Artificial Sequence: Synthetic oligonucleotide
uuucggucauaaaugauuc

SEQ ID NO: 2571291 - RNA, 19 nt, Artificial Sequence
  Description of Artificial Sequence: Synthetic oligonucleotide
uguugagguaccuuugaug

SEQ ID NO: 2571292 - RNA, 19 nt, Artificial Sequence
  Description of Artificial Sequence: Synthetic oligonucleotide
gucgugauuguucagguug

SEQ ID NO: 2571293 - RNA, 19 nt, Artificial Sequence
  Description of Artificial Sequence: Synthetic oligonucleotide
ggagucuucaauuaaggug

SEQ ID NO: 2571294 - RNA, 19 nt, Artificial Sequence
  Description of Artificial Sequence: Synthetic oligonucleotide
aaaauuguacugaaaacuu

SEQ ID NO: 2571295 - RNA, 19 nt, Artificial Sequence
  Description of Artificial Sequence: Synthetic oligonucleotide
uggaaaauggccuggugga

SEQ ID NO: 2571296 - RNA, 19 nt, Artificial Sequence
  Description of Artificial Sequence: Synthetic oligonucleotide
uccaacagaaacuuucggu

SEQ ID NO: 2571297 - RNA, 19 nt, Artificial Sequence
  Description of Artificial Sequence: Synthetic oligonucleotide
acagguauuaucagauacc

SEQ ID NO: 2571298 - RNA, 19 nt, Artificial Sequence
  Description of Artificial Sequence: Synthetic oligonucleotide
caaagcagauucaaaggag

SEQ ID NO: 2571299 - RNA, 19 nt, Artificial Sequence
  Description of Artificial Sequence: Synthetic oligonucleotide
ugggcagauggcaaggcgg

SEQ ID NO: 2571300 - RNA, 19 nt, Artificial Sequence
  Description of Artificial Sequence: Synthetic oligonucleotide
aagaaccagaaggaaagag

SEQ ID NO: 2571301 - RNA, 19 nt, Artificial Sequence
  Description of Artificial Sequence: Synthetic oligonucleotide
aauuguacugaaaacuuau

SEQ ID NO: 2571302 - RNA, 19 nt, Artificial Sequence
  Description of Artificial Sequence: Synthetic oligonucleotide
aucagauaccaacauguug

SEQ ID NO: 2571303 - RNA, 19 nt, Artificial Sequence
  Description of Artificial Sequence: Synthetic oligonucleotide
aaaauaggucuguagucau

SEQ ID NO: 2571304 - RNA, 19 nt, Artificial Sequence
  Description of Artificial Sequence: Synthetic oligonucleotide
aagagacagguauuaucag

SEQ ID NO: 2571305 - RNA, 19 nt, Artificial Sequence
  Description of Artificial Sequence: Synthetic oligonucleotide
ugauucguguuccucccgg

SEQ ID NO: 2571306 - RNA, 19 nt, Artificial Sequence
  Description of Artificial Sequence: Synthetic oligonucleotide
auguagauuuggaaaaugg

SEQ ID NO: 2571307 - RNA, 19 nt, Artificial Sequence
  Description of Artificial Sequence: Synthetic oligonucleotide
agguuguucaaguuguuca

SEQ ID NO: 2571308 - RNA, 19 nt, Artificial Sequence
  Description of Artificial Sequence: Synthetic oligonucleotide
auaaccuuccuaauacugg

SEQ ID NO: 2571309 - RNA, 19 nt, Artificial Sequence
  Description of Artificial Sequence: Synthetic oligonucleotide
uccucuaauaagagacagg

SEQ ID NO: 2571310 - RNA, 19 nt, Artificial Sequence
  Description of Artificial Sequence: Synthetic oligonucleotide
ccaaguacaaagcagauuc

SEQ ID NO: 2571311 - RNA, 19 nt, Artificial Sequence
  Description of Artificial Sequence: Synthetic oligonucleotide
guucacuucuacuuuggag

SEQ ID NO: 2571312 - RNA, 19 nt, Artificial Sequence
  Description of Artificial Sequence: Synthetic oligonucleotide
gauccaacagaaacuuucg

SEQ ID NO: 2571313 - RNA, 19 nt, Artificial Sequence
  Description of Artificial Sequence: Synthetic oligonucleotide
auugcgucgauccaacaga

SEQ ID NO: 2571314 - RNA, 19 nt, Artificial Sequence
  Description of Artificial Sequence: Synthetic oligonucleotide
agagugaggccugaaaagg

SEQ ID NO: 2571315 - RNA, 19 nt, Artificial Sequence
  Description of Artificial Sequence: Synthetic oligonucleotide
ugcaguaguccugagguag

SEQ ID NO: 2571316 - RNA, 19 nt, Artificial Sequence
  Description of Artificial Sequence: Synthetic oligonucleotide
acugaaaacuuaucuaaaa

SEQ ID NO: 2571317 - RNA, 19 nt, Artificial Sequence
  Description of Artificial Sequence: Synthetic oligonucleotide
uccauuucaaacugagccu

SEQ ID NO: 2571318 - RNA, 19 nt, Artificial Sequence
  Description of Artificial Sequence: Synthetic oligonucleotide
cuucaauuaaggugccagg

SEQ ID NO: 2571319 - RNA, 19 nt, Artificial Sequence
  Description of Artificial Sequence: Synthetic oligonucleotide
ugugccaugggagaauugc

SEQ ID NO: 2571320 - RNA, 19 nt, Artificial Sequence
  Description of Artificial Sequence: Synthetic oligonucleotide
agauuuggaaaauggccug

SEQ ID NO: 2571321 - RNA, 19 nt, Artificial Sequence
  Description of Artificial Sequence: Synthetic oligonucleotide
gaaggaugaacuacaauga

SEQ ID NO: 2571322 - RNA, 19 nt, Artificial Sequence
  Description of Artificial Sequence: Synthetic oligonucleotide
agauguccauuucaaacug

SEQ ID NO: 2571323 - RNA, 19 nt, Artificial Sequence
  Description of Artificial Sequence: Synthetic oligonucleotide
caugcuuuucucucggcag

SEQ ID NO: 2571324 - RNA, 19 nt, Artificial Sequence
  Description of Artificial Sequence: Synthetic oligonucleotide
aaggucucuccucuaauaa

SEQ ID NO: 2571325 - RNA, 19 nt, Artificial Sequence
  Description of Artificial Sequence: Synthetic oligonucleotide
gagggcagcaaucagaugu

SEQ ID NO: 2571326 - RNA, 19 nt, Artificial Sequence
  Description of Artificial Sequence: Synthetic oligonucleotide
agagacagguauuaucaga

SEQ ID NO: 2571327 - RNA, 19 nt, Artificial Sequence
  Description of Artificial Sequence: Synthetic oligonucleotide
guaguccugagguagcugc

SEQ ID NO: 2571328 - RNA, 19 nt, Artificial Sequence
  Description of Artificial Sequence: Synthetic oligonucleotide
ugcgcggcgucgcugaugg

SEQ ID NO: 2571329 - RNA, 19 nt, Artificial Sequence
  Description of Artificial Sequence: Synthetic oligonucleotide
acuccagggauauugggca

SEQ ID NO: 2571330 - RNA, 19 nt, Artificial Sequence
  Description of Artificial Sequence: Synthetic oligonucleotide
accuuccuaauacuggaag

SEQ ID NO: 2571331 - RNA, 19 nt, Artificial Sequence
  Description of Artificial Sequence: Synthetic oligonucleotide
uuuuagcccaugcuuuucu

SEQ ID NO: 2571332 - RNA, 19 nt, Artificial Sequence
  Description of Artificial Sequence: Synthetic oligonucleotide
guugagguaccuuugaugu

SEQ ID NO: 2571333 - RNA, 19 nt, Artificial Sequence
  Description of Artificial Sequence: Synthetic oligonucleotide
aguucaaaauuguacugaa

SEQ ID NO: 2571334 - RNA, 19 nt, Artificial Sequence
  Description of Artificial Sequence: Synthetic oligonucleotide
agagagugaggccugaaaa

SEQ ID NO: 2571335 - RNA, 19 nt, Artificial Sequence
  Description of Artificial Sequence: Synthetic oligonucleotide
uaaaaggucucuccucuaa

SEQ ID NO: 2571336 - RNA, 19 nt, Artificial Sequence
  Description of Artificial Sequence: Synthetic oligonucleotide
ugagccucaucuccaacug

SEQ ID NO: 2571337 - RNA, 19 nt, Artificial Sequence
  Description of Artificial Sequence: Synthetic oligonucleotide
gaaacggggaggaacacac

SEQ ID NO: 2571338 - RNA, 19 nt, Artificial Sequence
  Description of Artificial Sequence: Synthetic oligonucleotide
ucggucauaaaugauucgu

SEQ ID NO: 2571339 - RNA, 19 nt, Artificial Sequence
  Description of Artificial Sequence: Synthetic oligonucleotide
guuguucacuucuacuuug

SEQ ID NO: 2571340 - RNA, 19 nt, Artificial Sequence
  Description of Artificial Sequence: Synthetic oligonucleotide
uacugaaaacuuaucuaaa

SEQ ID NO: 2571341 - RNA, 19 nt, Artificial Sequence
  Description of Artificial Sequence: Synthetic oligonucleotide
gauguagauuuggaaaaug

SEQ ID NO: 2571342 - RNA, 19 nt, Artificial Sequence
  Description of Artificial Sequence: Synthetic oligonucleotide
uucggucauaaaugauucg

SEQ ID NO: 2571343 - RNA, 19 nt, Artificial Sequence
  Description of Artificial Sequence: Synthetic oligonucleotide
ucuacuuuggagucuucaa

SEQ ID NO: 2571344 - RNA, 19 nt, Artificial Sequence
  Description of Artificial Sequence: Synthetic oligonucleotide
uugggcagauggcaaggcg

SEQ ID NO: 2571345 - RNA, 19 nt, Artificial Sequence
  Description of Artificial Sequence: Synthetic oligonucleotide
gagggaagcaggaaggaug

SEQ ID NO: 2571346 - RNA, 19 nt, Artificial Sequence
  Description of Artificial Sequence: Synthetic oligonucleotide
uaauaagagacagguauua

SEQ ID NO: 2571347 - RNA, 19 nt, Artificial Sequence
  Description of Artificial Sequence: Synthetic oligonucleotide
gggagaauugcgucgaucc

SEQ ID NO: 2571348 - RNA, 19 nt, Artificial Sequence
  Description of Artificial Sequence: Synthetic oligonucleotide
aaaggucucuccucuaaua

SEQ ID NO: 2571349 - RNA, 19 nt, Artificial Sequence
  Description of Artificial Sequence: Synthetic oligonucleotide
ucgcugauggccacggugc

SEQ ID NO: 2571350 - RNA, 19 nt, Artificial Sequence
  Description of Artificial Sequence: Synthetic oligonucleotide
agauucaaaggagggcagc

SEQ ID NO: 2571351 - RNA, 19 nt, Artificial Sequence
  Description of Artificial Sequence: Synthetic oligonucleotide
uacuuuggagucuucaauu

SEQ ID NO: 2571352 - RNA, 19 nt, Artificial Sequence
  Description of Artificial Sequence: Synthetic oligonucleotide
uggugcaguaguccugagg

SEQ ID NO: 2571353 - RNA, 19 nt, Artificial Sequence
  Description of Artificial Sequence: Synthetic oligonucleotide
ucaaaggagggcagcaauc

SEQ ID NO: 2571354 - RNA, 19 nt, Artificial Sequence
  Description of Artificial Sequence: Synthetic oligonucleotide
uguccauuucaaacugagc

SEQ ID NO: 2571355 - RNA, 19 nt, Artificial Sequence
  Description of Artificial Sequence: Synthetic oligonucleotide
aaaaggucucuccucuaau

SEQ ID NO: 2571356 - RNA, 19 nt, Artificial Sequence
  Description of Artificial Sequence: Synthetic oligonucleotide
cagaaggaaagagagugag

SEQ ID NO: 2571357 - RNA, 19 nt, Artificial Sequence
  Description of Artificial Sequence: Synthetic oligonucleotide
aauuaaggugccagggcug

SEQ ID NO: 2571358 - RNA, 19 nt, Artificial Sequence
  Description of Artificial Sequence: Synthetic oligonucleotide
auggccugguggaagaacc

SEQ ID NO: 2571359 - RNA, 19 nt, Artificial Sequence
  Description of Artificial Sequence: Synthetic oligonucleotide
aaauaggucuguagucauc

SEQ ID NO: 2571360 - RNA, 19 nt, Artificial Sequence
  Description of Artificial Sequence: Synthetic oligonucleotide
aaguacaaagcagauucaa

SEQ ID NO: 2571361 - RNA, 19 nt, Artificial Sequence
  Description of Artificial Sequence: Synthetic oligonucleotide
ucuccucuaauaagagaca

SEQ ID NO: 2571362 - RNA, 19 nt, Artificial Sequence
  Description of Artificial Sequence: Synthetic oligonucleotide
gaggccugaaaagggaagg

SEQ ID NO: 2571363 - RNA, 19 nt, Artificial Sequence
  Description of Artificial Sequence: Synthetic oligonucleotide
cuuccugucgugauuguuc

SEQ ID NO: 2571364 - RNA, 19 nt, Artificial Sequence
  Description of Artificial Sequence: Synthetic oligonucleotide
caaaauuguacugaaaacu

SEQ ID NO: 2571365 - RNA, 19 nt, Artificial Sequence
  Description of Artificial Sequence: Synthetic oligonucleotide
auuaaggugccagggcugg

SEQ ID NO: 2571366 - RNA, 19 nt, Artificial Sequence
  Description of Artificial Sequence: Synthetic oligonucleotide
auucguguuccucccggcg

SEQ ID NO: 2571367 - RNA, 19 nt, Artificial Sequence
  Description of Artificial Sequence: Synthetic oligonucleotide
aauaagagacagguauuau

SEQ ID NO: 2571368 - RNA, 19 nt, Artificial Sequence
  Description of Artificial Sequence: Synthetic oligonucleotide
uggagucuucaauuaaggu

SEQ ID NO: 2571369 - RNA, 19 nt, Artificial Sequence
  Description of Artificial Sequence: Synthetic oligonucleotide
aaucagauguccauuucaa

SEQ ID NO: 2571370 - RNA, 19 nt, Artificial Sequence
  Description of Artificial Sequence: Synthetic oligonucleotide
aacggggaggaacacacuu

SEQ ID NO: 2571371 - RNA, 19 nt, Artificial Sequence
  Description of Artificial Sequence: Synthetic oligonucleotide
accuuugauguagauuugg

SEQ ID NO: 2571372 - RNA, 19 nt, Artificial Sequence
  Description of Artificial Sequence: Synthetic oligonucleotide
agaauugcgucgauccaac

SEQ ID NO: 2571373 - RNA, 19 nt, Artificial Sequence
  Description of Artificial Sequence: Synthetic oligonucleotide
auuguacugaaaacuuauc

SEQ ID NO: 2571374 - RNA, 19 nt, Artificial Sequence
  Description of Artificial Sequence: Synthetic oligonucleotide
guauuaucagauaccaaca

SEQ ID NO: 2571375 - RNA, 19 nt, Artificial Sequence
  Description of Artificial Sequence: Synthetic oligonucleotide
aucuccaacugcaugcuuc

SEQ ID NO: 2571376 - RNA, 19 nt, Artificial Sequence
  Description of Artificial Sequence: Synthetic oligonucleotide
accaacauguugagguacc

SEQ ID NO: 2571377 - RNA, 19 nt, Artificial Sequence
  Description of Artificial Sequence: Synthetic oligonucleotide
acuggaagauguuuuguua

SEQ ID NO: 2571378 - RNA, 19 nt, Artificial Sequence
  Description of Artificial Sequence: Synthetic oligonucleotide
ugccaugggagaauugcgu

SEQ ID NO: 2571379 - RNA, 19 nt, Artificial Sequence
  Description of Artificial Sequence: Synthetic oligonucleotide
uuccugucgugauuguuca

SEQ ID NO: 2571380 - RNA, 19 nt, Artificial Sequence
  Description of Artificial Sequence: Synthetic oligonucleotide
aaauuguacugaaaacuua

SEQ ID NO: 2571381 - RNA, 19 nt, Artificial Sequence
  Description of Artificial Sequence: Synthetic oligonucleotide
acugcaugcuuccugucgu

SEQ ID NO: 2571382 - RNA, 19 nt, Artificial Sequence
  Description of Artificial Sequence: Synthetic oligonucleotide
uuccuaauacuggaagaug

SEQ ID NO: 2571383 - RNA, 19 nt, Artificial Sequence
  Description of Artificial Sequence: Synthetic oligonucleotide
uaaaugauucguguuccuc

SEQ ID NO: 2571384 - RNA, 19 nt, Artificial Sequence
  Description of Artificial Sequence: Synthetic oligonucleotide
ggaugaacuacaaugagaa

SEQ ID NO: 2571385 - RNA, 19 nt, Artificial Sequence
  Description of Artificial Sequence: Synthetic oligonucleotide
uaggucuguagucaucuua

SEQ ID NO: 2571386 - RNA, 19 nt, Artificial Sequence
  Description of Artificial Sequence: Synthetic oligonucleotide
ucucuccucuaauaagaga

SEQ ID NO: 2571387 - RNA, 19 nt, Artificial Sequence
  Description of Artificial Sequence: Synthetic oligonucleotide
auaaaugauucguguuccu

SEQ ID NO: 2571388 - RNA, 19 nt, Artificial Sequence
  Description of Artificial Sequence: Synthetic oligonucleotide
uaguccugagguagcugcg

SEQ ID NO: 2571389 - RNA, 19 nt, Artificial Sequence
  Description of Artificial Sequence: Synthetic oligonucleotide
uuguucaaguuguucacuu

SEQ ID NO: 2571390 - RNA, 19 nt, Artificial Sequence
  Description of Artificial Sequence: Synthetic oligonucleotide
ccaacagaaacuuucgguc

SEQ ID NO: 2571391 - RNA, 19 nt, Artificial Sequence
  Description of Artificial Sequence: Synthetic oligonucleotide
cuccucuaauaagagacag

SEQ ID NO: 2571392 - RNA, 19 nt, Artificial Sequence
  Description of Artificial Sequence: Synthetic oligonucleotide
uucuacuuuggagucuuca

SEQ ID NO: 2571393 - RNA, 19 nt, Artificial Sequence
  Description of Artificial Sequence: Synthetic oligonucleotide
ucgugauuguucagguugu

SEQ ID NO: 2571394 - RNA, 19 nt, Artificial Sequence
  Description of Artificial Sequence: Synthetic oligonucleotide
uguucaaguuguucacuuc

SEQ ID NO: 2571395 - RNA, 19 nt, Artificial Sequence
  Description of Artificial Sequence: Synthetic oligonucleotide
ggugacuccagggauauug

SEQ ID NO: 2571396 - RNA, 19 nt, Artificial Sequence
  Description of Artificial Sequence: Synthetic oligonucleotide
auugggcagauggcaaggc

SEQ ID NO: 2571397 - RNA, 19 nt, Artificial Sequence
  Description of Artificial Sequence: Synthetic oligonucleotide
caaucagauguccauuuca

SEQ ID NO: 2571398 - RNA, 19 nt, Artificial Sequence
  Description of Artificial Sequence: Synthetic oligonucleotide
acuuuggagucuucaauua

SEQ ID NO: 2571399 - RNA, 19 nt, Artificial Sequence
  Description of Artificial Sequence: Synthetic oligonucleotide
uuucaaacugagccucauc

SEQ ID NO: 2571400 - RNA, 19 nt, Artificial Sequence
  Description of Artificial Sequence: Synthetic oligonucleotide
gcggacauggcucaggcgc

SEQ ID NO: 2571401 - RNA, 19 nt, Artificial Sequence
  Description of Artificial Sequence: Synthetic oligonucleotide
uucguguuccucccggcgu

SEQ ID NO: 2571402 - RNA, 19 nt, Artificial Sequence
  Description of Artificial Sequence: Synthetic oligonucleotide
uucaaguuguucacuucua

SEQ ID NO: 2571403 - RNA, 19 nt, Artificial Sequence
  Description of Artificial Sequence: Synthetic oligonucleotide
agcaaucagauguccauuu

SEQ ID NO: 2571404 - RNA, 19 nt, Artificial Sequence
  Description of Artificial Sequence: Synthetic oligonucleotide
cugauggccacggugcgcg

SEQ ID NO: 2571405 - RNA, 19 nt, Artificial Sequence
  Description of Artificial Sequence: Synthetic oligonucleotide
cagauaccaacauguugag

SEQ ID NO: 2571406 - RNA, 19 nt, Artificial Sequence
  Description of Artificial Sequence: Synthetic oligonucleotide
cagccaaguacaaagcaga

SEQ ID NO: 2571407 - RNA, 19 nt, Artificial Sequence
  Description of Artificial Sequence: Synthetic oligonucleotide
cagauucaaaggagggcag

SEQ ID NO: 2571408 - RNA, 19 nt, Artificial Sequence
  Description of Artificial Sequence: Synthetic oligonucleotide
gauuguucagguuguucaa

SEQ ID NO: 2571409 - RNA, 19 nt, Artificial Sequence
  Description of Artificial Sequence: Synthetic oligonucleotide
agcccaugcuuuucucucg

SEQ ID NO: 2571410 - RNA, 19 nt, Artificial Sequence
  Description of Artificial Sequence: Synthetic oligonucleotide
gcgucgauccaacagaaac

SEQ ID NO: 2571411 - RNA, 19 nt, Artificial Sequence
  Description of Artificial Sequence: Synthetic oligonucleotide
gauucguguuccucccggc

SEQ ID NO: 2571412 - RNA, 19 nt, Artificial Sequence
  Description of Artificial Sequence: Synthetic oligonucleotide
acugagccucaucuccaac

SEQ ID NO: 2571413 - RNA, 19 nt, Artificial Sequence
  Description of Artificial Sequence: Synthetic oligonucleotide
augauucguguuccucccg

SEQ ID NO: 2571414 - RNA, 19 nt, Artificial Sequence
  Description of Artificial Sequence: Synthetic oligonucleotide
ugagaagggcagggaaacg

SEQ ID NO: 2571415 - RNA, 19 nt, Artificial Sequence
  Description of Artificial Sequence: Synthetic oligonucleotide
uaccuuugauguagauuug

SEQ ID NO: 2571416 - RNA, 19 nt, Artificial Sequence
  Description of Artificial Sequence: Synthetic oligonucleotide
agauaccaacauguugagg

SEQ ID NO: 2571417 - RNA, 19 nt, Artificial Sequence
  Description of Artificial Sequence: Synthetic oligonucleotide
cagguauuaucagauacca

SEQ ID NO: 2571418 - RNA, 19 nt, Artificial Sequence
  Description of Artificial Sequence: Synthetic oligonucleotide
gucgcugauggccacggug

SEQ ID NO: 2571419 - RNA, 19 nt, Artificial Sequence
  Description of Artificial Sequence: Synthetic oligonucleotide
acauggcucaggcgcgggc

SEQ ID NO: 2571420 - RNA, 19 nt, Artificial Sequence
  Description of Artificial Sequence: Synthetic oligonucleotide
gauauugggcagauggcaa

SEQ ID NO: 2571421 - RNA, 19 nt, Artificial Sequence
  Description of Artificial Sequence: Synthetic oligonucleotide
ugauguagauuuggaaaau

SEQ ID NO: 2571422 - RNA, 19 nt, Artificial Sequence
  Description of Artificial Sequence: Synthetic oligonucleotide
agucuucaauuaaggugcc

SEQ ID NO: 2571423 - RNA, 19 nt, Artificial Sequence
  Description of Artificial Sequence: Synthetic oligonucleotide
uaccaacauguugagguac

SEQ ID NO: 2571424 - RNA, 19 nt, Artificial Sequence
  Description of Artificial Sequence: Synthetic oligonucleotide
ugcagacgcggacauggcu

SEQ ID NO: 2571425 - RNA, 19 nt, Artificial Sequence
  Description of Artificial Sequence: Synthetic oligonucleotide
uuuagcccaugcuuuucuc

SEQ ID NO: 2571426 - RNA, 19 nt, Artificial Sequence
  Description of Artificial Sequence: Synthetic oligonucleotide
uagcccaugcuuuucucuc

SEQ ID NO: 2571427 - RNA, 19 nt, Artificial Sequence
  Description of Artificial Sequence: Synthetic oligonucleotide
uugcgucgauccaacagaa

SEQ ID NO: 2571428 - RNA, 19 nt, Artificial Sequence
  Description of Artificial Sequence: Synthetic oligonucleotide
ggugcaguaguccugaggu

SEQ ID NO: 2571429 - RNA, 19 nt, Artificial Sequence
  Description of Artificial Sequence: Synthetic oligonucleotide
cuacaaugagaagggcagg

SEQ ID NO: 2571430 - RNA, 19 nt, Artificial Sequence
  Description of Artificial Sequence: Synthetic oligonucleotide
guuccucccggcguggugg

SEQ ID NO: 2571431 - RNA, 19 nt, Artificial Sequence
  Description of Artificial Sequence: Synthetic oligonucleotide
gccugaaaagggaaggagg

SEQ ID NO: 2571432 - RNA, 19 nt, Artificial Sequence
  Description of Artificial Sequence: Synthetic oligonucleotide
ucguguuccucccggcgug

SEQ ID NO: 2571433 - RNA, 19 nt, Artificial Sequence
  Description of Artificial Sequence: Synthetic oligonucleotide
aucagauguccauuucaaa

SEQ ID NO: 2571434 - RNA, 19 nt, Artificial Sequence
  Description of Artificial Sequence: Synthetic oligonucleotide
ugcgcguggggauggcgcg

SEQ ID NO: 2571435 - RNA, 19 nt, Artificial Sequence
  Description of Artificial Sequence: Synthetic oligonucleotide
gagaauugcgucgauccaa

SEQ ID NO: 2571436 - RNA, 19 nt, Artificial Sequence
  Description of Artificial Sequence: Synthetic oligonucleotide
aagcaggaaggaugaacua

SEQ ID NO: 2571437 - RNA, 19 nt, Artificial Sequence
  Description of Artificial Sequence: Synthetic oligonucleotide
aguacaaagcagauucaaa

SEQ ID NO: 2571438 - RNA, 19 nt, Artificial Sequence
  Description of Artificial Sequence: Synthetic oligonucleotide
ugguggagaacagcguccc

SEQ ID NO: 2571439 - RNA, 19 nt, Artificial Sequence
  Description of Artificial Sequence: Synthetic oligonucleotide
aacugagccucaucuccaa

SEQ ID NO: 2571440 - RNA, 19 nt, Artificial Sequence
  Description of Artificial Sequence: Synthetic oligonucleotide
caguucaaaauuguacuga

SEQ ID NO: 2571441 - RNA, 19 nt, Artificial Sequence
  Description of Artificial Sequence: Synthetic oligonucleotide
cuuucggucauaaaugauu

SEQ ID NO: 2571442 - RNA, 19 nt, Artificial Sequence
  Description of Artificial Sequence: Synthetic oligonucleotide
guccugagguagcugcgcg

SEQ ID NO: 2571443 - RNA, 19 nt, Artificial Sequence
  Description of Artificial Sequence: Synthetic oligonucleotide
caauuaaggugccagggcu

SEQ ID NO: 2571444 - RNA, 19 nt, Artificial Sequence
  Description of Artificial Sequence: Synthetic oligonucleotide
gcagauucaaaggagggca

SEQ ID NO: 2571445 - RNA, 19 nt, Artificial Sequence
  Description of Artificial Sequence: Synthetic oligonucleotide
ugcuuuucucucggcagcc

SEQ ID NO: 2571446 - RNA, 19 nt, Artificial Sequence
  Description of Artificial Sequence: Synthetic oligonucleotide
ucaucuccaacugcaugcu

SEQ ID NO: 2571447 - RNA, 19 nt, Artificial Sequence
  Description of Artificial Sequence: Synthetic oligonucleotide
gagacagguauuaucagau

SEQ ID NO: 2571448 - RNA, 19 nt, Artificial Sequence
  Description of Artificial Sequence: Synthetic oligonucleotide
cagggaaacggggaggaac

SEQ ID NO: 2571449 - RNA, 19 nt, Artificial Sequence
  Description of Artificial Sequence: Synthetic oligonucleotide
aaccagaaggaaagagagu

SEQ ID NO: 2571450 - RNA, 19 nt, Artificial Sequence
  Description of Artificial Sequence: Synthetic oligonucleotide
aggaaggaugaacuacaau

SEQ ID NO: 2571451 - RNA, 19 nt, Artificial Sequence
  Description of Artificial Sequence: Synthetic oligonucleotide
agaaacuuucggucauaaa

SEQ ID NO: 2571452 - RNA, 19 nt, Artificial Sequence
  Description of Artificial Sequence: Synthetic oligonucleotide
ccaugggagaauugcgucg

SEQ ID NO: 2571453 - RNA, 19 nt, Artificial Sequence
  Description of Artificial Sequence: Synthetic oligonucleotide
gucucuccucuaauaagag

SEQ ID NO: 2571454 - RNA, 19 nt, Artificial Sequence
  Description of Artificial Sequence: Synthetic oligonucleotide
ggaaggaggagggaagcag

SEQ ID NO: 2571455 - RNA, 19 nt, Artificial Sequence
  Description of Artificial Sequence: Synthetic oligonucleotide
ccugcagacgcggacaugg

SEQ ID NO: 2571456 - RNA, 19 nt, Artificial Sequence
  Description of Artificial Sequence: Synthetic oligonucleotide
gguggaagaaccagaagga

SEQ ID NO: 2571457 - RNA, 19 nt, Artificial Sequence
  Description of Artificial Sequence: Synthetic oligonucleotide
cgauccaacagaaacuuuc

SEQ ID NO: 2571458 - RNA, 19 nt, Artificial Sequence
  Description of Artificial Sequence: Synthetic oligonucleotide
gcagccaaguacaaagcag

SEQ ID NO: 2571459 - RNA, 19 nt, Artificial Sequence
  Description of Artificial Sequence: Synthetic oligonucleotide
caaaggagggcagcaauca

SEQ ID NO: 2571460 - RNA, 19 nt, Artificial Sequence
  Description of Artificial Sequence: Synthetic oligonucleotide
ccugaaaagggaaggagga

SEQ ID NO: 2571461 - RNA, 19 nt, Artificial Sequence
  Description of Artificial Sequence: Synthetic oligonucleotide
aggucuguagucaucuuaa

SEQ ID NO: 2571462 - RNA, 19 nt, Artificial Sequence
  Description of Artificial Sequence: Synthetic oligonucleotide
acaaugagaagggcaggga

SEQ ID NO: 2571463 - RNA, 19 nt, Artificial Sequence
  Description of Artificial Sequence: Synthetic oligonucleotide
cuuuggagucuucaauuaa

SEQ ID NO: 2571464 - RNA, 19 nt, Artificial Sequence
  Description of Artificial Sequence: Synthetic oligonucleotide
ccugucgugauuguucagg

SEQ ID NO: 2571465 - RNA, 19 nt, Artificial Sequence
  Description of Artificial Sequence: Synthetic oligonucleotide
ggucauaaaugauucgugu

SEQ ID NO: 2571466 - RNA, 19 nt, Artificial Sequence
  Description of Artificial Sequence: Synthetic oligonucleotide
ggauauugggcagauggca

SEQ ID NO: 2571467 - RNA, 19 nt, Artificial Sequence
  Description of Artificial Sequence: Synthetic oligonucleotide
ugagguagcugcgcggcgu

SEQ ID NO: 2571468 - RNA, 19 nt, Artificial Sequence
  Description of Artificial Sequence: Synthetic oligonucleotide
acuucuacuuuggagucuu

SEQ ID NO: 2571469 - RNA, 19 nt, Artificial Sequence
  Description of Artificial Sequence: Synthetic oligonucleotide
gauggcaaggcggggucug

SEQ ID NO: 2571470 - RNA, 19 nt, Artificial Sequence
  Description of Artificial Sequence: Synthetic oligonucleotide
gugguggagaacagcgucc

SEQ ID NO: 2571471 - RNA, 19 nt, Artificial Sequence
  Description of Artificial Sequence: Synthetic oligonucleotide
ggucucuccucuaauaaga

SEQ ID NO: 2571472 - RNA, 19 nt, Artificial Sequence
  Description of Artificial Sequence: Synthetic oligonucleotide
caaguuguucacuucuacu

SEQ ID NO: 2571473 - RNA, 19 nt, Artificial Sequence
  Description of Artificial Sequence: Synthetic oligonucleotide
uugagguaccuuugaugua

SEQ ID NO: 2571474 - RNA, 19 nt, Artificial Sequence
  Description of Artificial Sequence: Synthetic oligonucleotide
ugcaugcuuccugucguga

SEQ ID NO: 2571475 - RNA, 19 nt, Artificial Sequence
  Description of Artificial Sequence: Synthetic oligonucleotide
agacagguauuaucagaua

SEQ ID NO: 2571476 - RNA, 19 nt, Artificial Sequence
  Description of Artificial Sequence: Synthetic oligonucleotide
cuccagggauauugggcag

SEQ ID NO: 2571477 - RNA, 19 nt, Artificial Sequence
  Description of Artificial Sequence: Synthetic oligonucleotide
cuaauaagagacagguauu

SEQ ID NO: 2571478 - RNA, 19 nt, Artificial Sequence
  Description of Artificial Sequence: Synthetic oligonucleotide
aguaguccugagguagcug

SEQ ID NO: 2571479 - RNA, 19 nt, Artificial Sequence
  Description of Artificial Sequence: Synthetic oligonucleotide
aggugccagggcuggugac

SEQ ID NO: 2571480 - RNA, 19 nt, Artificial Sequence
  Description of Artificial Sequence: Synthetic oligonucleotide
gaauugcgucgauccaaca

SEQ ID NO: 2571481 - RNA, 19 nt, Artificial Sequence
  Description of Artificial Sequence: Synthetic oligonucleotide
gugauuguucagguuguuc

SEQ ID NO: 2571482 - RNA, 19 nt, Artificial Sequence
  Description of Artificial Sequence: Synthetic oligonucleotide
uccugucgugauuguucag

SEQ ID NO: 2571483 - RNA, 19 nt, Artificial Sequence
  Description of Artificial Sequence: Synthetic oligonucleotide
auucaaaggagggcagcaa

SEQ ID NO: 2571484 - RNA, 19 nt, Artificial Sequence
  Description of Artificial Sequence: Synthetic oligonucleotide
ucgauccaacagaaacuuu

SEQ ID NO: 2571485 - RNA, 19 nt, Artificial Sequence
  Description of Artificial Sequence: Synthetic oligonucleotide
aaccuuccuaauacuggaa

SEQ ID NO: 2571486 - RNA, 19 nt, Artificial Sequence
  Description of Artificial Sequence: Synthetic oligonucleotide
ggcagccaaguacaaagca

SEQ ID NO: 2571487 - RNA, 19 nt, Artificial Sequence
  Description of Artificial Sequence: Synthetic oligonucleotide
ugucgugauuguucagguu

SEQ ID NO: 2571488 - RNA, 19 nt, Artificial Sequence
  Description of Artificial Sequence: Synthetic oligonucleotide
ugggagaauugcgucgauc

SEQ ID NO: 2571489 - RNA, 19 nt, Artificial Sequence
  Description of Artificial Sequence: Synthetic oligonucleotide
ggccugaaaagggaaggag

SEQ ID NO: 2571490 - RNA, 19 nt, Artificial Sequence
  Description of Artificial Sequence: Synthetic oligonucleotide
cagauggcaaggcgggguc

SEQ ID NO: 2571491 - RNA, 19 nt, Artificial Sequence
  Description of Artificial Sequence: Synthetic oligonucleotide
guucaaaauuguacugaaa

SEQ ID NO: 2571492 - RNA, 19 nt, Artificial Sequence
  Description of Artificial Sequence: Synthetic oligonucleotide
ccauuucaaacugagccuc

SEQ ID NO: 2571493 - RNA, 19 nt, Artificial Sequence
  Description of Artificial Sequence: Synthetic oligonucleotide
cugagguagcugcgcggcg

SEQ ID NO: 2571494 - RNA, 19 nt, Artificial Sequence
  Description of Artificial Sequence: Synthetic oligonucleotide
ucugugccaugggagaauu

SEQ ID NO: 2571495 - RNA, 19 nt, Artificial Sequence
  Description of Artificial Sequence: Synthetic oligonucleotide
ugcgucgauccaacagaaa

SEQ ID NO: 2571496 - RNA, 19 nt, Artificial Sequence
  Description of Artificial Sequence: Synthetic oligonucleotide
cucuaauaagagacaggua

SEQ ID NO: 2571497 - RNA, 19 nt, Artificial Sequence
  Description of Artificial Sequence: Synthetic oligonucleotide
gaaagagagugaggccuga

SEQ ID NO: 2571498 - RNA, 19 nt, Artificial Sequence
  Description of Artificial Sequence: Synthetic oligonucleotide
gggauauugggcagauggc

SEQ ID NO: 2571499 - RNA, 19 nt, Artificial Sequence
  Description of Artificial Sequence: Synthetic oligonucleotide
cugagccucaucuccaacu

SEQ ID NO: 2571500 - RNA, 19 nt, Artificial Sequence
  Description of Artificial Sequence: Synthetic oligonucleotide
auggcgcggcucuggcugg

SEQ ID NO: 2571501 - RNA, 19 nt, Artificial Sequence
  Description of Artificial Sequence: Synthetic oligonucleotide
cuuccuaauacuggaagau

SEQ ID NO: 2571502 - RNA, 19 nt, Artificial Sequence
  Description of Artificial Sequence: Synthetic oligonucleotide
aaggcggggucugugccau

SEQ ID NO: 2571503 - RNA, 19 nt, Artificial Sequence
  Description of Artificial Sequence: Synthetic oligonucleotide
aggagggaagcaggaagga

SEQ ID NO: 2571504 - RNA, 19 nt, Artificial Sequence
  Description of Artificial Sequence: Synthetic oligonucleotide
ccuuccuaauacuggaaga

SEQ ID NO: 2571505 - RNA, 19 nt, Artificial Sequence
  Description of Artificial Sequence: Synthetic oligonucleotide
aggccugaaaagggaagga

SEQ ID NO: 2571506 - RNA, 19 nt, Artificial Sequence
  Description of Artificial Sequence: Synthetic oligonucleotide
ggagaauugcgucgaucca

SEQ ID NO: 2571507 - RNA, 19 nt, Artificial Sequence
  Description of Artificial Sequence: Synthetic oligonucleotide
agcugcgcggcgucgcuga

SEQ ID NO: 2571508 - RNA, 19 nt, Artificial Sequence
  Description of Artificial Sequence: Synthetic oligonucleotide
gcccaugcuuuucucucgg

SEQ ID NO: 2571509 - RNA, 19 nt, Artificial Sequence
  Description of Artificial Sequence: Synthetic oligonucleotide
agguaccuuugauguagau

SEQ ID NO: 2571510 - RNA, 19 nt, Artificial Sequence
  Description of Artificial Sequence: Synthetic oligonucleotide
aaacggggaggaacacacu

SEQ ID NO: 2571511 - RNA, 19 nt, Artificial Sequence
  Description of Artificial Sequence: Synthetic oligonucleotide
ccucuaauaagagacaggu

SEQ ID NO: 2571512 - RNA, 19 nt, Artificial Sequence
  Description of Artificial Sequence: Synthetic oligonucleotide
gccaugggagaauugcguc

SEQ ID NO: 2571513 - RNA, 19 nt, Artificial Sequence
  Description of Artificial Sequence: Synthetic oligonucleotide
ucucggcagccaaguacaa

SEQ ID NO: 2571514 - RNA, 19 nt, Artificial Sequence
  Description of Artificial Sequence: Synthetic oligonucleotide
gcaaucagauguccauuuc

SEQ ID NO: 2571515 - RNA, 19 nt, Artificial Sequence
  Description of Artificial Sequence: Synthetic oligonucleotide
auaggucuguagucaucuu

SEQ ID NO: 2571516 - RNA, 19 nt, Artificial Sequence
  Description of Artificial Sequence: Synthetic oligonucleotide
cugcagacgcggacauggc

SEQ ID NO: 2571517 - RNA, 19 nt, Artificial Sequence
  Description of Artificial Sequence: Synthetic oligonucleotide
caggaaggaugaacuacaa

SEQ ID NO: 2571518 - RNA, 19 nt, Artificial Sequence
  Description of Artificial Sequence: Synthetic oligonucleotide
ggcaaggcggggucugugc

SEQ ID NO: 2571519 - RNA, 19 nt, Artificial Sequence
  Description of Artificial Sequence: Synthetic oligonucleotide
gagguagcugcgcggcguc

SEQ ID NO: 2571520 - RNA, 19 nt, Artificial Sequence
  Description of Artificial Sequence: Synthetic oligonucleotide
cggucauaaaugauucgug

SEQ ID NO: 2571521 - RNA, 19 nt, Artificial Sequence
  Description of Artificial Sequence: Synthetic oligonucleotide
guuguucaaguuguucacu

SEQ ID NO: 2571522 - RNA, 19 nt, Artificial Sequence
  Description of Artificial Sequence: Synthetic oligonucleotide
cagacgcggacauggcuca

SEQ ID NO: 2571523 - RNA, 19 nt, Artificial Sequence
  Description of Artificial Sequence: Synthetic oligonucleotide
agguauuaucagauaccaa

SEQ ID NO: 2571524 - RNA, 19 nt, Artificial Sequence
  Description of Artificial Sequence: Synthetic oligonucleotide
gcaaggcggggucugugcc

SEQ ID NO: 2571525 - RNA, 19 nt, Artificial Sequence
  Description of Artificial Sequence: Synthetic oligonucleotide
gucgauccaacagaaacuu

SEQ ID NO: 2571526 - RNA, 19 nt, Artificial Sequence
  Description of Artificial Sequence: Synthetic oligonucleotide
agccaaguacaaagcagau

SEQ ID NO: 2571527 - RNA, 19 nt, Artificial Sequence
  Description of Artificial Sequence: Synthetic oligonucleotide
cugugccaugggagaauug

SEQ ID NO: 2571528 - RNA, 19 nt, Artificial Sequence
  Description of Artificial Sequence: Synthetic oligonucleotide
cagaaacuuucggucauaa

SEQ ID NO: 2571529 - RNA, 19 nt, Artificial Sequence
  Description of Artificial Sequence: Synthetic oligonucleotide
caacugcaugcuuccuguc

SEQ ID NO: 2571530 - RNA, 19 nt, Artificial Sequence
  Description of Artificial Sequence: Synthetic oligonucleotide
cugucgugauuguucaggu

SEQ ID NO: 2571531 - RNA, 19 nt, Artificial Sequence
  Description of Artificial Sequence: Synthetic oligonucleotide
gugcgcguggggauggcgc

SEQ ID NO: 2571532 - RNA, 19 nt, Artificial Sequence
  Description of Artificial Sequence: Synthetic oligonucleotide
uuaaggugccagggcuggu

SEQ ID NO: 2571533 - RNA, 19 nt, Artificial Sequence
  Description of Artificial Sequence: Synthetic oligonucleotide
ggcggggucugugccaugg

SEQ ID NO: 2571534 - RNA, 19 nt, Artificial Sequence
  Description of Artificial Sequence: Synthetic oligonucleotide
gcagacgcggacauggcuc

SEQ ID NO: 2571535 - RNA, 19 nt, Artificial Sequence
  Description of Artificial Sequence: Synthetic oligonucleotide
gagguaccuuugauguaga

SEQ ID NO: 2571536 - RNA, 19 nt, Artificial Sequence
  Description of Artificial Sequence: Synthetic oligonucleotide
ccugagguagcugcgcggc

SEQ ID NO: 2571537 - RNA, 19 nt, Artificial Sequence
  Description of Artificial Sequence: Synthetic oligonucleotide
acagaaacuuucggucaua

SEQ ID NO: 2571538 - RNA, 19 nt, Artificial Sequence
  Description of Artificial Sequence: Synthetic oligonucleotide
gugaggccugaaaagggaa

SEQ ID NO: 2571539 - RNA, 19 nt, Artificial Sequence
  Description of Artificial Sequence: Synthetic oligonucleotide
agauggcaaggcggggucu

SEQ ID NO: 2571540 - RNA, 19 nt, Artificial Sequence
  Description of Artificial Sequence: Synthetic oligonucleotide
cgugguggagaacagcguc

SEQ ID NO: 2571541 - RNA, 19 nt, Artificial Sequence
  Description of Artificial Sequence: Synthetic oligonucleotide
caaggcggggucugugcca

SEQ ID NO: 2571542 - RNA, 19 nt, Artificial Sequence
  Description of Artificial Sequence: Synthetic oligonucleotide
ccugguggaagaaccagaa

SEQ ID NO: 2571543 - RNA, 19 nt, Artificial Sequence
  Description of Artificial Sequence: Synthetic oligonucleotide
uuccucccggcguggugga

SEQ ID NO: 2571544 - RNA, 19 nt, Artificial Sequence
  Description of Artificial Sequence: Synthetic oligonucleotide
ggaaacggggaggaacaca

SEQ ID NO: 2571545 - RNA, 19 nt, Artificial Sequence
  Description of Artificial Sequence: Synthetic oligonucleotide
agguagcugcgcggcgucg

SEQ ID NO: 2571546 - RNA, 19 nt, Artificial Sequence
  Description of Artificial Sequence: Synthetic oligonucleotide
gcaguaguccugagguagc

SEQ ID NO: 2571547 - RNA, 19 nt, Artificial Sequence
  Description of Artificial Sequence: Synthetic oligonucleotide
guggugcaguaguccugag

SEQ ID NO: 2571548 - RNA, 19 nt, Artificial Sequence
  Description of Artificial Sequence: Synthetic oligonucleotide
ccaugcuuuucucucggca

SEQ ID NO: 2571549 - RNA, 19 nt, Artificial Sequence
  Description of Artificial Sequence: Synthetic oligonucleotide
gguggagaacagcgucccc

SEQ ID NO: 2571550 - RNA, 19 nt, Artificial Sequence
  Description of Artificial Sequence: Synthetic oligonucleotide
augggagaauugcgucgau

SEQ ID NO: 2571551 - RNA, 19 nt, Artificial Sequence
  Description of Artificial Sequence: Synthetic oligonucleotide
ggcagcaaucagaugucca

SEQ ID NO: 2571552 - RNA, 19 nt, Artificial Sequence
  Description of Artificial Sequence: Synthetic oligonucleotide
ggcagggaaacggggagga

SEQ ID NO: 2571553 - RNA, 19 nt, Artificial Sequence
  Description of Artificial Sequence: Synthetic oligonucleotide
gguagcugcgcggcgucgc

SEQ ID NO: 2571554 - RNA, 19 nt, Artificial Sequence
  Description of Artificial Sequence: Synthetic oligonucleotide
ggacauggcucaggcgcgg

SEQ ID NO: 2571555 - RNA, 19 nt, Artificial Sequence
  Description of Artificial Sequence: Synthetic oligonucleotide
acggggaggaacacacuuu

SEQ ID NO: 2571556 - RNA, 19 nt, Artificial Sequence
  Description of Artificial Sequence: Synthetic oligonucleotide
cacggugcgcguggggaug

SEQ ID NO: 2571557 - RNA, 19 nt, Artificial Sequence
  Description of Artificial Sequence: Synthetic oligonucleotide
cggacauggcucaggcgcg

SEQ ID NO: 2571558 - RNA, 19 nt, Artificial Sequence
  Description of Artificial Sequence: Synthetic oligonucleotide
gguaccuuugauguagauu

SEQ ID NO: 2571559 - RNA, 19 nt, Artificial Sequence
  Description of Artificial Sequence: Synthetic oligonucleotide
ugauggccacggugcgcgu

SEQ ID NO: 2571560 - RNA, 19 nt, Artificial Sequence
  Description of Artificial Sequence: Synthetic oligonucleotide
ggaaaauggccugguggaa

SEQ ID NO: 2571561 - RNA, 19 nt, Artificial Sequence
  Description of Artificial Sequence: Synthetic oligonucleotide
ggggauggcgcggcucugg

SEQ ID NO: 2571562 - RNA, 19 nt, Artificial Sequence
  Description of Artificial Sequence: Synthetic oligonucleotide
gugcaguaguccugaggua

SEQ ID NO: 2571563 - RNA, 19 nt, Artificial Sequence
  Description of Artificial Sequence: Synthetic oligonucleotide
gggcagcaaucagaugucc

SEQ ID NO: 2571564 - RNA, 19 nt, Artificial Sequence
  Description of Artificial Sequence: Synthetic oligonucleotide
uagcugcgcggcgucgcug

SEQ ID NO: 2571565 - RNA, 19 nt, Artificial Sequence
  Description of Artificial Sequence: Synthetic oligonucleotide
ggcguggugcaguaguccu

SEQ ID NO: 2571566 - RNA, 19 nt, Artificial Sequence
  Description of Artificial Sequence: Synthetic oligonucleotide
ggugcgcguggggauggcg

SEQ ID NO: 2571567 - RNA, 19 nt, Artificial Sequence
  Description of Artificial Sequence: Synthetic oligonucleotide
uggccacggugcgcguggg

SEQ ID NO: 2571568 - RNA, 19 nt, Artificial Sequence
  Description of Artificial Sequence: Synthetic oligonucleotide
gcgucgcugauggccacgg

SEQ ID NO: 2571569 - RNA, 19 nt, Artificial Sequence
  Description of Artificial Sequence: Synthetic oligonucleotide
cagggauauugggcagaug

SEQ ID NO: 2571570 - RNA, 19 nt, Artificial Sequence
  Description of Artificial Sequence: Synthetic oligonucleotide
uggccgccgccugcagacg

SEQ ID NO: 2571571 - RNA, 19 nt, Artificial Sequence
  Description of Artificial Sequence: Synthetic oligonucleotide
auggcaaggcggggucugu

SEQ ID NO: 2571572 - RNA, 19 nt, Artificial Sequence
  Description of Artificial Sequence: Synthetic oligonucleotide
cggcagccaaguacaaagc

SEQ ID NO: 2571573 - RNA, 19 nt, Artificial Sequence
  Description of Artificial Sequence: Synthetic oligonucleotide
uggcgcggcucuggcuggg

SEQ ID NO: 2571574 - RNA, 19 nt, Artificial Sequence
  Description of Artificial Sequence: Synthetic oligonucleotide
uggggauggcgcggcucug

SEQ ID NO: 2571575 - RNA, 19 nt, Artificial Sequence
  Description of Artificial Sequence: Synthetic oligonucleotide
gcugauggccacggugcgc

SEQ ID NO: 2571576 - RNA, 19 nt, Artificial Sequence
  Description of Artificial Sequence: Synthetic oligonucleotide
caugcuuccugucgugauu

SEQ ID NO: 2571577 - RNA, 19 nt, Artificial Sequence
  Description of Artificial Sequence: Synthetic oligonucleotide
gggaaggaggagggaagca

SEQ ID NO: 2571578 - RNA, 19 nt, Artificial Sequence
  Description of Artificial Sequence: Synthetic oligonucleotide
gcugguggccgccgccugc

SEQ ID NO: 2571579 - RNA, 19 nt, Artificial Sequence
  Description of Artificial Sequence: Synthetic oligonucleotide
cgcggcgucgcugauggcc

SEQ ID NO: 2571580 - RNA, 19 nt, Artificial Sequence
  Description of Artificial Sequence: Synthetic oligonucleotide
ggcgucgcugauggccacg

SEQ ID NO: 2571581 - RNA, 19 nt, Artificial Sequence
  Description of Artificial Sequence: Synthetic oligonucleotide
cucccggcgugguggagaa

SEQ ID NO: 2571582 - RNA, 19 nt, Artificial Sequence
  Description of Artificial Sequence: Synthetic oligonucleotide
gcggggucugugccauggg

SEQ ID NO: 2571583 - RNA, 19 nt, Artificial Sequence
  Description of Artificial Sequence: Synthetic oligonucleotide
cauggcucaggcgcgggcu

SEQ ID NO: 2571584 - RNA, 19 nt, Artificial Sequence
  Description of Artificial Sequence: Synthetic oligonucleotide
ggucugugccaugggagaa

SEQ ID NO: 2571585 - RNA, 19 nt, Artificial Sequence
  Description of Artificial Sequence: Synthetic oligonucleotide
gggaaacggggaggaacac

SEQ ID NO: 2571586 - RNA, 19 nt, Artificial Sequence
  Description of Artificial Sequence: Synthetic oligonucleotide
cccggcgugguggagaaca

SEQ ID NO: 2571587 - RNA, 19 nt, Artificial Sequence
  Description of Artificial Sequence: Synthetic oligonucleotide
gccacggugcgcgugggga

SEQ ID NO: 2571588 - RNA, 19 nt, Artificial Sequence
  Description of Artificial Sequence: Synthetic oligonucleotide
cgucgauccaacagaaacu

SEQ ID NO: 2571589 - RNA, 19 nt, Artificial Sequence
  Description of Artificial Sequence: Synthetic oligonucleotide
cuggugacuccagggauau

SEQ ID NO: 2571590 - RNA, 19 nt, Artificial Sequence
  Description of Artificial Sequence: Synthetic oligonucleotide
uccucccggcgugguggag

SEQ ID NO: 2571591 - RNA, 19 nt, Artificial Sequence
  Description of Artificial Sequence: Synthetic oligonucleotide
ggccacggugcgcgugggg

SEQ ID NO: 2571592 - RNA, 19 nt, Artificial Sequence
  Description of Artificial Sequence: Synthetic oligonucleotide
gcuggugacuccagggaua

SEQ ID NO: 2571593 - RNA, 19 nt, Artificial Sequence
  Description of Artificial Sequence: Synthetic oligonucleotide
cgcugauggccacggugcg

SEQ ID NO: 2571594 - RNA, 19 nt, Artificial Sequence
  Description of Artificial Sequence: Synthetic oligonucleotide
guagcugcgcggcgucgcu

SEQ ID NO: 2571595 - RNA, 19 nt, Artificial Sequence
  Description of Artificial Sequence: Synthetic oligonucleotide
gcguggugcaguaguccug

SEQ ID NO: 2571596 - RNA, 19 nt, Artificial Sequence
  Description of Artificial Sequence: Synthetic oligonucleotide
cugcgcggcgucgcugaug

SEQ ID NO: 2571597 - RNA, 19 nt, Artificial Sequence
  Description of Artificial Sequence: Synthetic oligonucleotide
ccggcgugguggagaacag

SEQ ID NO: 2571598 - RNA, 19 nt, Artificial Sequence
  Description of Artificial Sequence: Synthetic oligonucleotide
ggcugguggccgccgccug

SEQ ID NO: 2571599 - RNA, 19 nt, Artificial Sequence
  Description of Artificial Sequence: Synthetic oligonucleotide
cagcaaucagauguccauu

SEQ ID NO: 2571600 - RNA, 19 nt, Artificial Sequence
  Description of Artificial Sequence: Synthetic oligonucleotide
ggugccagggcuggugacu

SEQ ID NO: 2571601 - RNA, 19 nt, Artificial Sequence
  Description of Artificial Sequence: Synthetic oligonucleotide
cguggugcaguaguccuga

SEQ ID NO: 2571602 - RNA, 19 nt, Artificial Sequence
  Description of Artificial Sequence: Synthetic oligonucleotide
aggcggggucugugccaug

SEQ ID NO: 2571603 - RNA, 19 nt, Artificial Sequence
  Description of Artificial Sequence: Synthetic oligonucleotide
gcggcgucgcugauggcca

SEQ ID NO: 2571604 - RNA, 19 nt, Artificial Sequence
  Description of Artificial Sequence: Synthetic oligonucleotide
uggugacuccagggauauu

SEQ ID NO: 2571605 - RNA, 19 nt, Artificial Sequence
  Description of Artificial Sequence: Synthetic oligonucleotide
gcgcguggggauggcgcgg

SEQ ID NO: 2571606 - RNA, 19 nt, Artificial Sequence
  Description of Artificial Sequence: Synthetic oligonucleotide
caucuccaacugcaugcuu

SEQ ID NO: 2571607 - RNA, 19 nt, Artificial Sequence
  Description of Artificial Sequence: Synthetic oligonucleotide
cguguuccucccggcgugg

SEQ ID NO: 2571608 - RNA, 19 nt, Artificial Sequence
  Description of Artificial Sequence: Synthetic oligonucleotide
cgggcguggugcaguaguc

SEQ ID NO: 2571609 - RNA, 19 nt, Artificial Sequence
  Description of Artificial Sequence: Synthetic oligonucleotide
ucccggcgugguggagaac

SEQ ID NO: 2571610 - RNA, 19 nt, Artificial Sequence
  Description of Artificial Sequence: Synthetic oligonucleotide
ccaacauguugagguaccu

SEQ ID NO: 2571611 - RNA, 19 nt, Artificial Sequence
  Description of Artificial Sequence: Synthetic oligonucleotide
cggggucugugccauggga

SEQ ID NO: 2571612 - RNA, 19 nt, Artificial Sequence
  Description of Artificial Sequence: Synthetic oligonucleotide
ccgggcguggugcaguagu

SEQ ID NO: 2571613 - RNA, 19 nt, Artificial Sequence
  Description of Artificial Sequence: Synthetic oligonucleotide
ccucccggcgugguggaga

SEQ ID NO: 2571614 - RNA, 19 nt, Artificial Sequence
  Description of Artificial Sequence: Synthetic oligonucleotide
guguuccucccggcguggu

SEQ ID NO: 2571615 - RNA, 19 nt, Artificial Sequence
  Description of Artificial Sequence: Synthetic oligonucleotide
gcagggaaacggggaggaa

SEQ ID NO: 2571616 - RNA, 19 nt, Artificial Sequence
  Description of Artificial Sequence: Synthetic oligonucleotide
ggcgcggcucuggcugggc

SEQ ID NO: 2571617 - RNA, 19 nt, Artificial Sequence
  Description of Artificial Sequence: Synthetic oligonucleotide
gcgugguggagaacagcgu

SEQ ID NO: 2571618 - RNA, 19 nt, Artificial Sequence
  Description of Artificial Sequence: Synthetic oligonucleotide
gcuuccugucgugauuguu

SEQ ID NO: 2571619 - RNA, 19 nt, Artificial Sequence
  Description of Artificial Sequence: Synthetic oligonucleotide
cgcguggggauggcgcggc

SEQ ID NO: 2571620 - RNA, 19 nt, Artificial Sequence
  Description of Artificial Sequence: Synthetic oligonucleotide
cggggaggaacacacuuuu

SEQ ID NO: 2571621 - RNA, 19 nt, Artificial Sequence
  Description of Artificial Sequence: Synthetic oligonucleotide
cccgggcguggugcaguag

SEQ ID NO: 2571622 - RNA, 19 nt, Artificial Sequence
  Description of Artificial Sequence: Synthetic oligonucleotide
gcgcggcucuggcugggcu

SEQ ID NO: 2571623 - RNA, 19 nt, Artificial Sequence
  Description of Artificial Sequence: Synthetic oligonucleotide
ccacggugcgcguggggau

SEQ ID NO: 2571624 - RNA, 19 nt, Artificial Sequence
  Description of Artificial Sequence: Synthetic oligonucleotide
gcgcggcgucgcugauggc

SEQ ID NO: 2571625 - RNA, 19 nt, Artificial Sequence
  Description of Artificial Sequence: Synthetic oligonucleotide
ccccgggcguggugcagua

SEQ ID NO: 2571626 - RNA, 19 nt, Artificial Sequence
  Description of Artificial Sequence: Synthetic oligonucleotide
gcguggggauggcgcggcu

SEQ ID NO: 2571627 - RNA, 19 nt, Artificial Sequence
  Description of Artificial Sequence: Synthetic oligonucleotide
gcugcgcggcgucgcugau

SEQ ID NO: 2571628 - RNA, 19 nt, Artificial Sequence
  Description of Artificial Sequence: Synthetic oligonucleotide
cggugcgcguggggauggc

SEQ ID NO: 2571629 - RNA, 19 nt, Artificial Sequence
  Description of Artificial Sequence: Synthetic oligonucleotide
cgugauuguucagguuguu

SEQ ID NO: 2571630 - RNA, 19 nt, Artificial Sequence
  Description of Artificial Sequence: Synthetic oligonucleotide
cgccgccugcagacgcgga

SEQ ID NO: 2571631 - RNA, 19 nt, Artificial Sequence
  Description of Artificial Sequence: Synthetic oligonucleotide
cgucgcugauggccacggu

SEQ ID NO: 2571632 - RNA, 19 nt, Artificial Sequence
  Description of Artificial Sequence: Synthetic oligonucleotide
uguaauuugucucacaugg

SEQ ID NO: 2571633 - RNA, 19 nt, Artificial Sequence
  Description of Artificial Sequence: Synthetic oligonucleotide
agaagauuaaaucaagugc

SEQ ID NO: 2571634 - RNA, 19 nt, Artificial Sequence
  Description of Artificial Sequence: Synthetic oligonucleotide
acuacuuugcauuaaaggc

SEQ ID NO: 2571635 - RNA, 19 nt, Artificial Sequence
  Description of Artificial Sequence: Synthetic oligonucleotide
uuuacaaagacuaaaauua

SEQ ID NO: 2571636 - RNA, 19 nt, Artificial Sequence
  Description of Artificial Sequence: Synthetic oligonucleotide
aaauuaagcacucacagga

SEQ ID NO: 2571637 - RNA, 19 nt, Artificial Sequence
  Description of Artificial Sequence: Synthetic oligonucleotide
acuaaaauuaaacugaaga

SEQ ID NO: 2571638 - RNA, 19 nt, Artificial Sequence
  Description of Artificial Sequence: Synthetic oligonucleotide
aucaagugcacuuaaaugg

SEQ ID NO: 2571639 - RNA, 19 nt, Artificial Sequence
  Description of Artificial Sequence: Synthetic oligonucleotide
aaaagcucagguuggaggc

SEQ ID NO: 2571640 - RNA, 19 nt, Artificial Sequence
  Description of Artificial Sequence: Synthetic oligonucleotide
uauucuaucaaccaacaug

SEQ ID NO: 2571641 - RNA, 19 nt, Artificial Sequence
  Description of Artificial Sequence: Synthetic oligonucleotide
aacuacuuugcauuaaagg

SEQ ID NO: 2571642 - RNA, 19 nt, Artificial Sequence
  Description of Artificial Sequence: Synthetic oligonucleotide
cuaaggaugaucuagcagg

SEQ ID NO: 2571643 - RNA, 19 nt, Artificial Sequence
  Description of Artificial Sequence: Synthetic oligonucleotide
gaaaccaucaacuacuuug

SEQ ID NO: 2571644 - RNA, 19 nt, Artificial Sequence
  Description of Artificial Sequence: Synthetic oligonucleotide
uuagauacaguccagaaaa

SEQ ID NO: 2571645 - RNA, 19 nt, Artificial Sequence
  Description of Artificial Sequence: Synthetic oligonucleotide
acuaaaauuagcuagguaa

SEQ ID NO: 2571646 - RNA, 19 nt, Artificial Sequence
  Description of Artificial Sequence: Synthetic oligonucleotide
uaauucuaugaucagacag

SEQ ID NO: 2571647 - RNA, 19 nt, Artificial Sequence
  Description of Artificial Sequence: Synthetic oligonucleotide
aagaagauuaaaucaagug

SEQ ID NO: 2571648 - RNA, 19 nt, Artificial Sequence
  Description of Artificial Sequence: Synthetic oligonucleotide
acuuaaaugguccaaugac

SEQ ID NO: 2571649 - RNA, 19 nt, Artificial Sequence
  Description of Artificial Sequence: Synthetic oligonucleotide
ucuaauucuaugaucagac

SEQ ID NO: 2571650 - RNA, 19 nt, Artificial Sequence
  Description of Artificial Sequence: Synthetic oligonucleotide
cuuacuaaaauuagcuagg

SEQ ID NO: 2571651 - RNA, 19 nt, Artificial Sequence
  Description of Artificial Sequence: Synthetic oligonucleotide
ucugaaaccaucaacuacu

SEQ ID NO: 2571652 - RNA, 19 nt, Artificial Sequence
  Description of Artificial Sequence: Synthetic oligonucleotide
uuugaaauuaagcacucac

SEQ ID NO: 2571653 - RNA, 19 nt, Artificial Sequence
  Description of Artificial Sequence: Synthetic oligonucleotide
ucuaugaucagacagccaa

SEQ ID NO: 2571654 - RNA, 19 nt, Artificial Sequence
  Description of Artificial Sequence: Synthetic oligonucleotide
uuaaccacauugaagacac

SEQ ID NO: 2571655 - RNA, 19 nt, Artificial Sequence
  Description of Artificial Sequence: Synthetic oligonucleotide
auuguuaucacuuuacaaa

SEQ ID NO: 2571656 - RNA, 19 nt, Artificial Sequence
  Description of Artificial Sequence: Synthetic oligonucleotide
uuaaauaagcacagaaugu

SEQ ID NO: 2571657 - RNA, 19 nt, Artificial Sequence
  Description of Artificial Sequence: Synthetic oligonucleotide
uagucuagcaaacaggaug

SEQ ID NO: 2571658 - RNA, 19 nt, Artificial Sequence
  Description of Artificial Sequence: Synthetic oligonucleotide
aauaagcacagaauguuac

SEQ ID NO: 2571659 - RNA, 19 nt, Artificial Sequence
  Description of Artificial Sequence: Synthetic oligonucleotide
uagguaauuaauucuuugg

SEQ ID NO: 2571660 - RNA, 19 nt, Artificial Sequence
  Description of Artificial Sequence: Synthetic oligonucleotide
uuuccuuaaauaagcacag

SEQ ID NO: 2571661 - RNA, 19 nt, Artificial Sequence
  Description of Artificial Sequence: Synthetic oligonucleotide
uuaaaugguccaaugacac

SEQ ID NO: 2571662 - RNA, 19 nt, Artificial Sequence
  Description of Artificial Sequence: Synthetic oligonucleotide
aaugcuaauuuccuuaaau

SEQ ID NO: 2571663 - RNA, 19 nt, Artificial Sequence
  Description of Artificial Sequence: Synthetic oligonucleotide
guauggguaauuucaaugg

SEQ ID NO: 2571664 - RNA, 19 nt, Artificial Sequence
  Description of Artificial Sequence: Synthetic oligonucleotide
aauuagucuagcaaacagg

SEQ ID NO: 2571665 - RNA, 19 nt, Artificial Sequence
  Description of Artificial Sequence: Synthetic oligonucleotide
uauuuuacucugcacaucu

SEQ ID NO: 2571666 - RNA, 19 nt, Artificial Sequence
  Description of Artificial Sequence: Synthetic oligonucleotide
ucuuuaguagaccaggcac

SEQ ID NO: 2571667 - RNA, 19 nt, Artificial Sequence
  Description of Artificial Sequence: Synthetic oligonucleotide
gaauuagucuagcaaacag

SEQ ID NO: 2571668 - RNA, 19 nt, Artificial Sequence
  Description of Artificial Sequence: Synthetic oligonucleotide
cagaauguuacugacaagg

SEQ ID NO: 2571669 - RNA, 19 nt, Artificial Sequence
  Description of Artificial Sequence: Synthetic oligonucleotide
agcaguuuaaacuuguaca

SEQ ID NO: 2571670 - RNA, 19 nt, Artificial Sequence
  Description of Artificial Sequence: Synthetic oligonucleotide
aaaccaucaacuacuuugc

SEQ ID NO: 2571671 - RNA, 19 nt, Artificial Sequence
  Description of Artificial Sequence: Synthetic oligonucleotide
aaaucaagugcacuuaaau

SEQ ID NO: 2571672 - RNA, 19 nt, Artificial Sequence
  Description of Artificial Sequence: Synthetic oligonucleotide
uucaauggaacauccuugg

SEQ ID NO: 2571673 - RNA, 19 nt, Artificial Sequence
  Description of Artificial Sequence: Synthetic oligonucleotide
ucauguuuagauacagucc

SEQ ID NO: 2571674 - RNA, 19 nt, Artificial Sequence
  Description of Artificial Sequence: Synthetic oligonucleotide
uuuacucugcacaucuggg

SEQ ID NO: 2571675 - RNA, 19 nt, Artificial Sequence
  Description of Artificial Sequence: Synthetic oligonucleotide
uuagcuagguaauuaauuc

SEQ ID NO: 2571676 - RNA, 19 nt, Artificial Sequence
  Description of Artificial Sequence: Synthetic oligonucleotide
aguuuaaacuuguacaaga

SEQ ID NO: 2571677 - RNA, 19 nt, Artificial Sequence
  Description of Artificial Sequence: Synthetic oligonucleotide
aucacaguaagucaagugu

SEQ ID NO: 2571678 - RNA, 19 nt, Artificial Sequence
  Description of Artificial Sequence: Synthetic oligonucleotide
ucaaccaacaugaauuagu

SEQ ID NO: 2571679 - RNA, 19 nt, Artificial Sequence
  Description of Artificial Sequence: Synthetic oligonucleotide
aacuuguacaagaacaaag

SEQ ID NO: 2571680 - RNA, 19 nt, Artificial Sequence
  Description of Artificial Sequence: Synthetic oligonucleotide
gaugcuaaggaugaucuag

SEQ ID NO: 2571681 - RNA, 19 nt, Artificial Sequence
  Description of Artificial Sequence: Synthetic oligonucleotide
uuuaaacuuguacaagaac

SEQ ID NO: 2571682 - RNA, 19 nt, Artificial Sequence
  Description of Artificial Sequence: Synthetic oligonucleotide
auaucuaauucuaugauca

SEQ ID NO: 2571683 - RNA, 19 nt, Artificial Sequence
  Description of Artificial Sequence: Synthetic oligonucleotide
ugagcuuacuaaaauuagc

SEQ ID NO: 2571684 - RNA, 19 nt, Artificial Sequence
  Description of Artificial Sequence: Synthetic oligonucleotide
ugaucuuuaguagaccagg

SEQ ID NO: 2571685 - RNA, 19 nt, Artificial Sequence
  Description of Artificial Sequence: Synthetic oligonucleotide
aauucauguuuagauacag

SEQ ID NO: 2571686 - RNA, 19 nt, Artificial Sequence
  Description of Artificial Sequence: Synthetic oligonucleotide
aaagaaagugccuauugua

SEQ ID NO: 2571687 - RNA, 19 nt, Artificial Sequence
  Description of Artificial Sequence: Synthetic oligonucleotide
aaauuagcuagguaauuaa

SEQ ID NO: 2571688 - RNA, 19 nt, Artificial Sequence
  Description of Artificial Sequence: Synthetic oligonucleotide
aagugcacuuaaauggucc

SEQ ID NO: 2571689 - RNA, 19 nt, Artificial Sequence
  Description of Artificial Sequence: Synthetic oligonucleotide
aauuugucucacauggaac

SEQ ID NO: 2571690 - RNA, 19 nt, Artificial Sequence
  Description of Artificial Sequence: Synthetic oligonucleotide
aggaugaucuagcaggagg

SEQ ID NO: 2571691 - RNA, 19 nt, Artificial Sequence
  Description of Artificial Sequence: Synthetic oligonucleotide
cuuuaguagaccaggcacg

SEQ ID NO: 2571692 - RNA, 19 nt, Artificial Sequence
  Description of Artificial Sequence: Synthetic oligonucleotide
gcuuacuaaaauuagcuag

SEQ ID NO: 2571693 - RNA, 19 nt, Artificial Sequence
  Description of Artificial Sequence: Synthetic oligonucleotide
auucuaugaucagacagcc

SEQ ID NO: 2571694 - RNA, 19 nt, Artificial Sequence
  Description of Artificial Sequence: Synthetic oligonucleotide
uccuuaaauaagcacagaa

SEQ ID NO: 2571695 - RNA, 19 nt, Artificial Sequence
  Description of Artificial Sequence: Synthetic oligonucleotide
aagagguauggguaauuuc

SEQ ID NO: 2571696 - RNA, 19 nt, Artificial Sequence
  Description of Artificial Sequence: Synthetic oligonucleotide
uaauuugucucacauggaa

SEQ ID NO: 2571697 - RNA, 19 nt, Artificial Sequence
  Description of Artificial Sequence: Synthetic oligonucleotide
accaacaugaauuagucua

SEQ ID NO: 2571698 - RNA, 19 nt, Artificial Sequence
  Description of Artificial Sequence: Synthetic oligonucleotide
ugaucuagcaggaggcccg

SEQ ID NO: 2571699 - RNA, 19 nt, Artificial Sequence
  Description of Artificial Sequence: Synthetic oligonucleotide
uuuagauacaguccagaaa

SEQ ID NO: 2571700 - RNA, 19 nt, Artificial Sequence
  Description of Artificial Sequence: Synthetic oligonucleotide
uaaaucacaguaagucaag

SEQ ID NO: 2571701 - RNA, 19 nt, Artificial Sequence
  Description of Artificial Sequence: Synthetic oligonucleotide
gguagcuacacauaaauca

SEQ ID NO: 2571702 - RNA, 19 nt, Artificial Sequence
  Description of Artificial Sequence: Synthetic oligonucleotide
auuguaauuugucucacau

SEQ ID NO: 2571703 - RNA, 19 nt, Artificial Sequence
  Description of Artificial Sequence: Synthetic oligonucleotide
aagauuaaaucaagugcac

SEQ ID NO: 2571704 - RNA, 19 nt, Artificial Sequence
  Description of Artificial Sequence: Synthetic oligonucleotide
aguccagaaaagaaagugc

SEQ ID NO: 2571705 - RNA, 19 nt, Artificial Sequence
  Description of Artificial Sequence: Synthetic oligonucleotide
agcacagaauguuacugac

SEQ ID NO: 2571706 - RNA, 19 nt, Artificial Sequence
  Description of Artificial Sequence: Synthetic oligonucleotide
aaaaugcuaauuuccuuaa

SEQ ID NO: 2571707 - RNA, 19 nt, Artificial Sequence
  Description of Artificial Sequence: Synthetic oligonucleotide
uaugaucagacagccaagg

SEQ ID NO: 2571708 - RNA, 19 nt, Artificial Sequence
  Description of Artificial Sequence: Synthetic oligonucleotide
uggguaauuucaauggaac

SEQ ID NO: 2571709 - RNA, 19 nt, Artificial Sequence
  Description of Artificial Sequence: Synthetic oligonucleotide
uacacauaaaucacaguaa

SEQ ID NO: 2571710 - RNA, 19 nt, Artificial Sequence
  Description of Artificial Sequence: Synthetic oligonucleotide
aaguguuuuauuucugaaa

SEQ ID NO: 2571711 - RNA, 19 nt, Artificial Sequence
  Description of Artificial Sequence: Synthetic oligonucleotide
caauggaacauccuuggag

SEQ ID NO: 2571712 - RNA, 19 nt, Artificial Sequence
  Description of Artificial Sequence: Synthetic oligonucleotide
agugaucuuuaguagacca

SEQ ID NO: 2571713 - RNA, 19 nt, Artificial Sequence
  Description of Artificial Sequence: Synthetic oligonucleotide
uuuaguagaccaggcacgg

SEQ ID NO: 2571714 - RNA, 19 nt, Artificial Sequence
  Description of Artificial Sequence: Synthetic oligonucleotide
ucaaguguuuuauuucuga

SEQ ID NO: 2571715 - RNA, 19 nt, Artificial Sequence
  Description of Artificial Sequence: Synthetic oligonucleotide
uucugaaaccaucaacuac

SEQ ID NO: 2571716 - RNA, 19 nt, Artificial Sequence
  Description of Artificial Sequence: Synthetic oligonucleotide
aacaugaauuagucuagca

SEQ ID NO: 2571717 - RNA, 19 nt, Artificial Sequence
  Description of Artificial Sequence: Synthetic oligonucleotide
cauguuuagauacagucca

SEQ ID NO: 2571718 - RNA, 19 nt, Artificial Sequence
  Description of Artificial Sequence: Synthetic oligonucleotide
auuuuauucuaucaaccaa

SEQ ID NO: 2571719 - RNA, 19 nt, Artificial Sequence
  Description of Artificial Sequence: Synthetic oligonucleotide
uaauucuuuggauuguuau

SEQ ID NO: 2571720 - RNA, 19 nt, Artificial Sequence
  Description of Artificial Sequence: Synthetic oligonucleotide
gguccaaugacacaggcug

SEQ ID NO: 2571721 - RNA, 19 nt, Artificial Sequence
  Description of Artificial Sequence: Synthetic oligonucleotide
uggauuguuaucacuuuac

SEQ ID NO: 2571722 - RNA, 19 nt, Artificial Sequence
  Description of Artificial Sequence: Synthetic oligonucleotide
uauggguaauuucaaugga

SEQ ID NO: 2571723 - RNA, 19 nt, Artificial Sequence
  Description of Artificial Sequence: Synthetic oligonucleotide
acaugaauuagucuagcaa

SEQ ID NO: 2571724 - RNA, 19 nt, Artificial Sequence
  Description of Artificial Sequence: Synthetic oligonucleotide
uagacuuagauaucuaauu

SEQ ID NO: 2571725 - RNA, 19 nt, Artificial Sequence
  Description of Artificial Sequence: Synthetic oligonucleotide
uaaauaagcacagaauguu

SEQ ID NO: 2571726 - RNA, 19 nt, Artificial Sequence
  Description of Artificial Sequence: Synthetic oligonucleotide
auuagucuagcaaacagga

SEQ ID NO: 2571727 - RNA, 19 nt, Artificial Sequence
  Description of Artificial Sequence: Synthetic oligonucleotide
ucucaaagagguaugggua

SEQ ID NO: 2571728 - RNA, 19 nt, Artificial Sequence
  Description of Artificial Sequence: Synthetic oligonucleotide
aagcacagaauguuacuga

SEQ ID NO: 2571729 - RNA, 19 nt, Artificial Sequence
  Description of Artificial Sequence: Synthetic oligonucleotide
uaagcacagaauguuacug

SEQ ID NO: 2571730 - RNA, 19 nt, Artificial Sequence
  Description of Artificial Sequence: Synthetic oligonucleotide
uacuuugcauuaaaggcaa

SEQ ID NO: 2571731 - RNA, 19 nt, Artificial Sequence
  Description of Artificial Sequence: Synthetic oligonucleotide
cuuaaaugguccaaugaca

SEQ ID NO: 2571732 - RNA, 19 nt, Artificial Sequence
  Description of Artificial Sequence: Synthetic oligonucleotide
ucuagcaggaggcccgagg

SEQ ID NO: 2571733 - RNA, 19 nt, Artificial Sequence
  Description of Artificial Sequence: Synthetic oligonucleotide
cuacuuugcauuaaaggca

SEQ ID NO: 2571734 - RNA, 19 nt, Artificial Sequence
  Description of Artificial Sequence: Synthetic oligonucleotide
gguauggguaauuucaaug

SEQ ID NO: 2571735 - RNA, 19 nt, Artificial Sequence
  Description of Artificial Sequence: Synthetic oligonucleotide
agagguauggguaauuuca

SEQ ID NO: 2571736 - RNA, 19 nt, Artificial Sequence
  Description of Artificial Sequence: Synthetic oligonucleotide
acaccagugaucuuuagua

SEQ ID NO: 2571737 - RNA, 19 nt, Artificial Sequence
  Description of Artificial Sequence: Synthetic oligonucleotide
uaaggaugaucuagcagga

SEQ ID NO: 2571738 - RNA, 19 nt, Artificial Sequence
  Description of Artificial Sequence: Synthetic oligonucleotide
uuugucucacauggaaccg

SEQ ID NO: 2571739 - RNA, 19 nt, Artificial Sequence
  Description of Artificial Sequence: Synthetic oligonucleotide
uuaagcacucacaggauuu

SEQ ID NO: 2571740 - RNA, 19 nt, Artificial Sequence
  Description of Artificial Sequence: Synthetic oligonucleotide
uguaauucauccacauuuu

SEQ ID NO: 2571741 - RNA, 19 nt, Artificial Sequence
  Description of Artificial Sequence: Synthetic oligonucleotide
uagcuagguaauuaauucu

SEQ ID NO: 2571742 - RNA, 19 nt, Artificial Sequence
  Description of Artificial Sequence: Synthetic oligonucleotide
uaguagaccaggcacggaa

SEQ ID NO: 2571743 - RNA, 19 nt, Artificial Sequence
  Description of Artificial Sequence: Synthetic oligonucleotide
caaacaggaugaaacauga

SEQ ID NO: 2571744 - RNA, 19 nt, Artificial Sequence
  Description of Artificial Sequence: Synthetic oligonucleotide
gauacaguccagaaaagaa

SEQ ID NO: 2571745 - RNA, 19 nt, Artificial Sequence
  Description of Artificial Sequence: Synthetic oligonucleotide
augaucuagcaggaggccc

SEQ ID NO: 2571746 - RNA, 19 nt, Artificial Sequence
  Description of Artificial Sequence: Synthetic oligonucleotide
cuaucaaccaacaugaauu

SEQ ID NO: 2571747 - RNA, 19 nt, Artificial Sequence
  Description of Artificial Sequence: Synthetic oligonucleotide
auuuugaaauuaagcacuc

SEQ ID NO: 2571748 - RNA, 19 nt, Artificial Sequence
  Description of Artificial Sequence: Synthetic oligonucleotide
agggaggacaccuagggaa

SEQ ID NO: 2571749 - RNA, 19 nt, Artificial Sequence
  Description of Artificial Sequence: Synthetic oligonucleotide
gauuaaaucaagugcacuu

SEQ ID NO: 2571750 - RNA, 19 nt, Artificial Sequence
  Description of Artificial Sequence: Synthetic oligonucleotide
aagacacagguagacuuag

SEQ ID NO: 2571751 - RNA, 19 nt, Artificial Sequence
  Description of Artificial Sequence: Synthetic oligonucleotide
ugaauuagucuagcaaaca

SEQ ID NO: 2571752 - RNA, 19 nt, Artificial Sequence
  Description of Artificial Sequence: Synthetic oligonucleotide
ggauuuuauucuaucaacc

SEQ ID NO: 2571753 - RNA, 19 nt, Artificial Sequence
  Description of Artificial Sequence: Synthetic oligonucleotide
caugagcuuacuaaaauua

SEQ ID NO: 2571754 - RNA, 19 nt, Artificial Sequence
  Description of Artificial Sequence: Synthetic oligonucleotide
gacuuagauaucuaauucu

SEQ ID NO: 2571755 - RNA, 19 nt, Artificial Sequence
  Description of Artificial Sequence: Synthetic oligonucleotide
uauuguaauuugucucaca

SEQ ID NO: 2571756 - RNA, 19 nt, Artificial Sequence
  Description of Artificial Sequence: Synthetic oligonucleotide
uugcauuaaaggcaauuuu

SEQ ID NO: 2571757 - RNA, 19 nt, Artificial Sequence
  Description of Artificial Sequence: Synthetic oligonucleotide
ucuuuggauuguuaucacu

SEQ ID NO: 2571758 - RNA, 19 nt, Artificial Sequence
  Description of Artificial Sequence: Synthetic oligonucleotide
guaauuucaauggaacauc

SEQ ID NO: 2571759 - RNA, 19 nt, Artificial Sequence
  Description of Artificial Sequence: Synthetic oligonucleotide
cacagguagacuuagauau

SEQ ID NO: 2571760 - RNA, 19 nt, Artificial Sequence
  Description of Artificial Sequence: Synthetic oligonucleotide
agaaagugccuauuguaau

SEQ ID NO: 2571761 - RNA, 19 nt, Artificial Sequence
  Description of Artificial Sequence: Synthetic oligonucleotide
guagcuacacauaaaucac

SEQ ID NO: 2571762 - RNA, 19 nt, Artificial Sequence
  Description of Artificial Sequence: Synthetic oligonucleotide
augcuaaggaugaucuagc

SEQ ID NO: 2571763 - RNA, 19 nt, Artificial Sequence
  Description of Artificial Sequence: Synthetic oligonucleotide
gaugaugcuaaggaugauc

SEQ ID NO: 2571764 - RNA, 19 nt, Artificial Sequence
  Description of Artificial Sequence: Synthetic oligonucleotide
uaucaaccaacaugaauua

SEQ ID NO: 2571765 - RNA, 19 nt, Artificial Sequence
  Description of Artificial Sequence: Synthetic oligonucleotide
agcuacacauaaaucacag

SEQ ID NO: 2571766 - RNA, 19 nt, Artificial Sequence
  Description of Artificial Sequence: Synthetic oligonucleotide
cacagaauguuacugacaa

SEQ ID NO: 2571767 - RNA, 19 nt, Artificial Sequence
  Description of Artificial Sequence: Synthetic oligonucleotide
aucuuuaguagaccaggca

SEQ ID NO: 2571768 - RNA, 19 nt, Artificial Sequence
  Description of Artificial Sequence: Synthetic oligonucleotide
aagugccuauuguaauuug

SEQ ID NO: 2571769 - RNA, 19 nt, Artificial Sequence
  Description of Artificial Sequence: Synthetic oligonucleotide
uuacuaaaauuagcuaggu

SEQ ID NO: 2571770 - RNA, 19 nt, Artificial Sequence
  Description of Artificial Sequence: Synthetic oligonucleotide
guagaccaggcacggaagg

SEQ ID NO: 2571771 - RNA, 19 nt, Artificial Sequence
  Description of Artificial Sequence: Synthetic oligonucleotide
auggaacauccuuggaguc

SEQ ID NO: 2571772 - RNA, 19 nt, Artificial Sequence
  Description of Artificial Sequence: Synthetic oligonucleotide
augaugcuaaggaugaucu

SEQ ID NO: 2571773 - RNA, 19 nt, Artificial Sequence
  Description of Artificial Sequence: Synthetic oligonucleotide
uuacucugcacaucugggu

SEQ ID NO: 2571774 - RNA, 19 nt, Artificial Sequence
  Description of Artificial Sequence: Synthetic oligonucleotide
aauuagcuagguaauuaau

SEQ ID NO: 2571775 - RNA, 19 nt, Artificial Sequence
  Description of Artificial Sequence: Synthetic oligonucleotide
cacucacaggauuuuauuc

SEQ ID NO: 2571776 - RNA, 19 nt, Artificial Sequence
  Description of Artificial Sequence: Synthetic oligonucleotide
uuauucuaucaaccaacau

SEQ ID NO: 2571777 - RNA, 19 nt, Artificial Sequence
  Description of Artificial Sequence: Synthetic oligonucleotide
agucuagcaaacaggauga

SEQ ID NO: 2571778 - RNA, 19 nt, Artificial Sequence
  Description of Artificial Sequence: Synthetic oligonucleotide
auuaagcacucacaggauu

SEQ ID NO: 2571779 - RNA, 19 nt, Artificial Sequence
  Description of Artificial Sequence: Synthetic oligonucleotide
acaugagcuuacuaaaauu

SEQ ID NO: 2571780 - RNA, 19 nt, Artificial Sequence
  Description of Artificial Sequence: Synthetic oligonucleotide
uccucucaaagagguaugg

SEQ ID NO: 2571781 - RNA, 19 nt, Artificial Sequence
  Description of Artificial Sequence: Synthetic oligonucleotide
aaagugccuauuguaauuu

SEQ ID NO: 2571782 - RNA, 19 nt, Artificial Sequence
  Description of Artificial Sequence: Synthetic oligonucleotide
aaacuuguacaagaacaaa

SEQ ID NO: 2571783 - RNA, 19 nt, Artificial Sequence
  Description of Artificial Sequence: Synthetic oligonucleotide
aaauaagcacagaauguua

SEQ ID NO: 2571784 - RNA, 19 nt, Artificial Sequence
  Description of Artificial Sequence: Synthetic oligonucleotide
cuagggaacauuucagcca

SEQ ID NO: 2571785 - RNA, 19 nt, Artificial Sequence
  Description of Artificial Sequence: Synthetic oligonucleotide
uacucugcacaucugggua

SEQ ID NO: 2571786 - RNA, 19 nt, Artificial Sequence
  Description of Artificial Sequence: Synthetic oligonucleotide
uugucucacauggaaccgg

SEQ ID NO: 2571787 - RNA, 19 nt, Artificial Sequence
  Description of Artificial Sequence: Synthetic oligonucleotide
cuaugaucagacagccaag

SEQ ID NO: 2571788 - RNA, 19 nt, Artificial Sequence
  Description of Artificial Sequence: Synthetic oligonucleotide
accaucaacuacuuugcau

SEQ ID NO: 2571789 - RNA, 19 nt, Artificial Sequence
  Description of Artificial Sequence: Synthetic oligonucleotide
ucaauggaacauccuugga

SEQ ID NO: 2571790 - RNA, 19 nt, Artificial Sequence
  Description of Artificial Sequence: Synthetic oligonucleotide
agugcacuuaaauggucca

SEQ ID NO: 2571791 - RNA, 19 nt, Artificial Sequence
  Description of Artificial Sequence: Synthetic oligonucleotide
agauacaguccagaaaaga

SEQ ID NO: 2571792 - RNA, 19 nt, Artificial Sequence
  Description of Artificial Sequence: Synthetic oligonucleotide
ugcuaaggaugaucuagca

SEQ ID NO: 2571793 - RNA, 19 nt, Artificial Sequence
  Description of Artificial Sequence: Synthetic oligonucleotide
agauuaaaucaagugcacu

SEQ ID NO: 2571794 - RNA, 19 nt, Artificial Sequence
  Description of Artificial Sequence: Synthetic oligonucleotide
aaacaccagugaucuuuag

SEQ ID NO: 2571795 - RNA, 19 nt, Artificial Sequence
  Description of Artificial Sequence: Synthetic oligonucleotide
auuagcuagguaauuaauu

SEQ ID NO: 2571796 - RNA, 19 nt, Artificial Sequence
  Description of Artificial Sequence: Synthetic oligonucleotide
uuuugaaauuaagcacuca

SEQ ID NO: 2571797 - RNA, 19 nt, Artificial Sequence
  Description of Artificial Sequence: Synthetic oligonucleotide
guuuagauacaguccagaa

SEQ ID NO: 2571798 - RNA, 19 nt, Artificial Sequence
  Description of Artificial Sequence: Synthetic oligonucleotide
aaggcaauuuugaaauuaa

SEQ ID NO: 2571799 - RNA, 19 nt, Artificial Sequence
  Description of Artificial Sequence: Synthetic oligonucleotide
aaacaugagcuuacuaaaa

SEQ ID NO: 2571800 - RNA, 19 nt, Artificial Sequence
  Description of Artificial Sequence: Synthetic oligonucleotide
uuuggauuguuaucacuuu

SEQ ID NO: 2571801 - RNA, 19 nt, Artificial Sequence
  Description of Artificial Sequence: Synthetic oligonucleotide
auuaaaucaagugcacuua

SEQ ID NO: 2571802 - RNA, 19 nt, Artificial Sequence
  Description of Artificial Sequence: Synthetic oligonucleotide
gagcuuacuaaaauuagcu

SEQ ID NO: 2571803 - RNA, 19 nt, Artificial Sequence
  Description of Artificial Sequence: Synthetic oligonucleotide
ccuagggaacauuucagcc

SEQ ID NO: 2571804 - RNA, 19 nt, Artificial Sequence
  Description of Artificial Sequence: Synthetic oligonucleotide
aaccaucaacuacuuugca

SEQ ID NO: 2571805 - RNA, 19 nt, Artificial Sequence
  Description of Artificial Sequence: Synthetic oligonucleotide
agcuuacuaaaauuagcua

SEQ ID NO: 2571806 - RNA, 19 nt, Artificial Sequence
  Description of Artificial Sequence: Synthetic oligonucleotide
uuuugaugaugaugaugcu

SEQ ID NO: 2571807 - RNA, 19 nt, Artificial Sequence
  Description of Artificial Sequence: Synthetic oligonucleotide
caccuagggaacauuucag

SEQ ID NO: 2571808 - RNA, 19 nt, Artificial Sequence
  Description of Artificial Sequence: Synthetic oligonucleotide
acagaauguuacugacaag

SEQ ID NO: 2571809 - RNA, 19 nt, Artificial Sequence
  Description of Artificial Sequence: Synthetic oligonucleotide
acuuagauaucuaauucua

SEQ ID NO: 2571810 - RNA, 19 nt, Artificial Sequence
  Description of Artificial Sequence: Synthetic oligonucleotide
uuagucuagcaaacaggau

SEQ ID NO: 2571811 - RNA, 19 nt, Artificial Sequence
  Description of Artificial Sequence: Synthetic oligonucleotide
uucuuuggauuguuaucac

SEQ ID NO: 2571812 - RNA, 19 nt, Artificial Sequence
  Description of Artificial Sequence: Synthetic oligonucleotide
gaugaucuagcaggaggcc

SEQ ID NO: 2571813 - RNA, 19 nt, Artificial Sequence
  Description of Artificial Sequence: Synthetic oligonucleotide
aauuaagcacucacaggau

SEQ ID NO: 2571814 - RNA, 19 nt, Artificial Sequence
  Description of Artificial Sequence: Synthetic oligonucleotide
ugguccaaugacacaggcu

SEQ ID NO: 2571815 - RNA, 19 nt, Artificial Sequence
  Description of Artificial Sequence: Synthetic oligonucleotide
aaacaggaugaaacaugag

SEQ ID NO: 2571816 - RNA, 19 nt, Artificial Sequence
  Description of Artificial Sequence: Synthetic oligonucleotide
auacaguccagaaaagaaa

SEQ ID NO: 2571817 - RNA, 19 nt, Artificial Sequence
  Description of Artificial Sequence: Synthetic oligonucleotide
cagguuccucucaaagagg

SEQ ID NO: 2571818 - RNA, 19 nt, Artificial Sequence
  Description of Artificial Sequence: Synthetic oligonucleotide
uucuaugaucagacagcca

SEQ ID NO: 2571819 - RNA, 19 nt, Artificial Sequence
  Description of Artificial Sequence: Synthetic oligonucleotide
uggaacauccuuggaguca

SEQ ID NO: 2571820 - RNA, 19 nt, Artificial Sequence
  Description of Artificial Sequence: Synthetic oligonucleotide
ucacaggauuuuauucuau

SEQ ID NO: 2571821 - RNA, 19 nt, Artificial Sequence
  Description of Artificial Sequence: Synthetic oligonucleotide
ggaugaucuagcaggaggc

SEQ ID NO: 2571822 - RNA, 19 nt, Artificial Sequence
  Description of Artificial Sequence: Synthetic oligonucleotide
aaggaugaucuagcaggag

SEQ ID NO: 2571823 - RNA, 19 nt, Artificial Sequence
  Description of Artificial Sequence: Synthetic oligonucleotide
augaucagacagccaagga

SEQ ID NO: 2571824 - RNA, 19 nt, Artificial Sequence
  Description of Artificial Sequence: Synthetic oligonucleotide
guuuaaacuuguacaagaa

SEQ ID NO: 2571825 - RNA, 19 nt, Artificial Sequence
  Description of Artificial Sequence: Synthetic oligonucleotide
aucaaccaacaugaauuag

SEQ ID NO: 2571826 - RNA, 19 nt, Artificial Sequence
  Description of Artificial Sequence: Synthetic oligonucleotide
aaccggucagggaggacac

SEQ ID NO: 2571827 - RNA, 19 nt, Artificial Sequence
  Description of Artificial Sequence: Synthetic oligonucleotide
gugaucuuuaguagaccag

SEQ ID NO: 2571828 - RNA, 19 nt, Artificial Sequence
  Description of Artificial Sequence: Synthetic oligonucleotide
cuaauucuaugaucagaca

SEQ ID NO: 2571829 - RNA, 19 nt, Artificial Sequence
  Description of Artificial Sequence: Synthetic oligonucleotide
gaaccggucagggaggaca

SEQ ID NO: 2571830 - RNA, 19 nt, Artificial Sequence
  Description of Artificial Sequence: Synthetic oligonucleotide
cuauuguaauuugucucac

SEQ ID NO: 2571831 - RNA, 19 nt, Artificial Sequence
  Description of Artificial Sequence: Synthetic oligonucleotide
agcaaacaggaugaaacau

SEQ ID NO: 2571832 - RNA, 19 nt, Artificial Sequence
  Description of Artificial Sequence: Synthetic oligonucleotide
caauucauguuuagauaca

SEQ ID NO: 2571833 - RNA, 19 nt, Artificial Sequence
  Description of Artificial Sequence: Synthetic oligonucleotide
caacaugaauuagucuagc

SEQ ID NO: 2571834 - RNA, 19 nt, Artificial Sequence
  Description of Artificial Sequence: Synthetic oligonucleotide
gacacagguagacuuagau

SEQ ID NO: 2571835 - RNA, 19 nt, Artificial Sequence
  Description of Artificial Sequence: Synthetic oligonucleotide
gcaaacaggaugaaacaug

SEQ ID NO: 2571836 - RNA, 19 nt, Artificial Sequence
  Description of Artificial Sequence: Synthetic oligonucleotide
cucaaagagguauggguaa

SEQ ID NO: 2571837 - RNA, 19 nt, Artificial Sequence
  Description of Artificial Sequence: Synthetic oligonucleotide
cacauggaaccggucaggg

SEQ ID NO: 2571838 - RNA, 19 nt, Artificial Sequence
  Description of Artificial Sequence: Synthetic oligonucleotide
cauuucagccacuauuuua

SEQ ID NO: 2571839 - RNA, 19 nt, Artificial Sequence
  Description of Artificial Sequence: Synthetic oligonucleotide
agggccaauucauguuuag

SEQ ID NO: 2571840 - RNA, 19 nt, Artificial Sequence
  Description of Artificial Sequence: Synthetic oligonucleotide
ccuauuguaauuugucuca

SEQ ID NO: 2571841 - RNA, 19 nt, Artificial Sequence
  Description of Artificial Sequence: Synthetic oligonucleotide
caagugcacuuaaaugguc

SEQ ID NO: 2571842 - RNA, 19 nt, Artificial Sequence
  Description of Artificial Sequence: Synthetic oligonucleotide
cuuuggauuguuaucacuu

SEQ ID NO: 2571843 - RNA, 19 nt, Artificial Sequence
  Description of Artificial Sequence: Synthetic oligonucleotide
agugccuauuguaauuugu

SEQ ID NO: 2571844 - RNA, 19 nt, Artificial Sequence
  Description of Artificial Sequence: Synthetic oligonucleotide
aggaugaaacaugagcuua

SEQ ID NO: 2571845 - RNA, 19 nt, Artificial Sequence
  Description of Artificial Sequence: Synthetic oligonucleotide
augaaacaugagcuuacua

SEQ ID NO: 2571846 - RNA, 19 nt, Artificial Sequence
  Description of Artificial Sequence: Synthetic oligonucleotide
ggaacauccuuggagucag

SEQ ID NO: 2571847 - RNA, 19 nt, Artificial Sequence
  Description of Artificial Sequence: Synthetic oligonucleotide
agcuagguaauuaauucuu

SEQ ID NO: 2571848 - RNA, 19 nt, Artificial Sequence
  Description of Artificial Sequence: Synthetic oligonucleotide
gguaauuaauucuuuggau

SEQ ID NO: 2571849 - RNA, 19 nt, Artificial Sequence
  Description of Artificial Sequence: Synthetic oligonucleotide
acaucuggguagcuacaca

SEQ ID NO: 2571850 - RNA, 19 nt, Artificial Sequence
  Description of Artificial Sequence: Synthetic oligonucleotide
gaaagugccuauuguaauu

SEQ ID NO: 2571851 - RNA, 19 nt, Artificial Sequence
  Description of Artificial Sequence: Synthetic oligonucleotide
ggguaauuucaauggaaca

SEQ ID NO: 2571852 - RNA, 19 nt, Artificial Sequence
  Description of Artificial Sequence: Synthetic oligonucleotide
agguauggguaauuucaau

SEQ ID NO: 2571853 - RNA, 19 nt, Artificial Sequence
  Description of Artificial Sequence: Synthetic oligonucleotide
aguagaccaggcacggaag

SEQ ID NO: 2571854 - RNA, 19 nt, Artificial Sequence
  Description of Artificial Sequence: Synthetic oligonucleotide
acagguagacuuagauauc

SEQ ID NO: 2571855 - RNA, 19 nt, Artificial Sequence
  Description of Artificial Sequence: Synthetic oligonucleotide
auggguaauuucaauggaa

SEQ ID NO: 2571856 - RNA, 19 nt, Artificial Sequence
  Description of Artificial Sequence: Synthetic oligonucleotide
agaaaagaaagugccuauu

SEQ ID NO: 2571857 - RNA, 19 nt, Artificial Sequence
  Description of Artificial Sequence: Synthetic oligonucleotide
cauugaagacacagguaga

SEQ ID NO: 2571858 - RNA, 19 nt, Artificial Sequence
  Description of Artificial Sequence: Synthetic oligonucleotide
ggauuguuaucacuuuaca

SEQ ID NO: 2571859 - RNA, 19 nt, Artificial Sequence
  Description of Artificial Sequence: Synthetic oligonucleotide
ucaaagagguauggguaau

SEQ ID NO: 2571860 - RNA, 19 nt, Artificial Sequence
  Description of Artificial Sequence: Synthetic oligonucleotide
gcauuaaaggcaauuuuga

SEQ ID NO: 2571861 - RNA, 19 nt, Artificial Sequence
  Description of Artificial Sequence: Synthetic oligonucleotide
auucauguuuagauacagu

SEQ ID NO: 2571862 - RNA, 19 nt, Artificial Sequence
  Description of Artificial Sequence: Synthetic oligonucleotide
uuccuuaaauaagcacaga

SEQ ID NO: 2571863 - RNA, 19 nt, Artificial Sequence
  Description of Artificial Sequence: Synthetic oligonucleotide
uuacugacaagggccaauu

SEQ ID NO: 2571864 - RNA, 19 nt, Artificial Sequence
  Description of Artificial Sequence: Synthetic oligonucleotide
auguuuagauacaguccag

SEQ ID NO: 2571865 - RNA, 19 nt, Artificial Sequence
  Description of Artificial Sequence: Synthetic oligonucleotide
uacugacaagggccaauuc

SEQ ID NO: 2571866 - RNA, 19 nt, Artificial Sequence
  Description of Artificial Sequence: Synthetic oligonucleotide
gugccuauuguaauuuguc

SEQ ID NO: 2571867 - RNA, 19 nt, Artificial Sequence
  Description of Artificial Sequence: Synthetic oligonucleotide
agccacuauuuuacucugc

SEQ ID NO: 2571868 - RNA, 19 nt, Artificial Sequence
  Description of Artificial Sequence: Synthetic oligonucleotide
auguuacugacaagggcca

SEQ ID NO: 2571869 - RNA, 19 nt, Artificial Sequence
  Description of Artificial Sequence: Synthetic oligonucleotide
uccaaugacacaggcugua

SEQ ID NO: 2571870 - RNA, 19 nt, Artificial Sequence
  Description of Artificial Sequence: Synthetic oligonucleotide
cagugaucuuuaguagacc

SEQ ID NO: 2571871 - RNA, 19 nt, Artificial Sequence
  Description of Artificial Sequence: Synthetic oligonucleotide
ugaugcuaaggaugaucua

SEQ ID NO: 2571872 - RNA, 19 nt, Artificial Sequence
  Description of Artificial Sequence: Synthetic oligonucleotide
acaguaagucaaguguuuu

SEQ ID NO: 2571873 - RNA, 19 nt, Artificial Sequence
  Description of Artificial Sequence: Synthetic oligonucleotide
gacaccuagggaacauuuc

SEQ ID NO: 2571874 - RNA, 19 nt, Artificial Sequence
  Description of Artificial Sequence: Synthetic oligonucleotide
cuuagauaucuaauucuau

SEQ ID NO: 2571875 - RNA, 19 nt, Artificial Sequence
  Description of Artificial Sequence: Synthetic oligonucleotide
gguggaaacaccagugauc

SEQ ID NO: 2571876 - RNA, 19 nt, Artificial Sequence
  Description of Artificial Sequence: Synthetic oligonucleotide
gaagacacagguagacuua

SEQ ID NO: 2571877 - RNA, 19 nt, Artificial Sequence
  Description of Artificial Sequence: Synthetic oligonucleotide
cacaucuggguagcuacac

SEQ ID NO: 2571878 - RNA, 19 nt, Artificial Sequence
  Description of Artificial Sequence: Synthetic oligonucleotide
acaguccagaaaagaaagu

SEQ ID NO: 2571879 - RNA, 19 nt, Artificial Sequence
  Description of Artificial Sequence: Synthetic oligonucleotide
ggaugaaacaugagcuuac

SEQ ID NO: 2571880 - RNA, 19 nt, Artificial Sequence
  Description of Artificial Sequence: Synthetic oligonucleotide
uaagcacucacaggauuuu

SEQ ID NO: 2571881 - RNA, 19 nt, Artificial Sequence
  Description of Artificial Sequence: Synthetic oligonucleotide
cugacaagggccaauucau

SEQ ID NO: 2571882 - RNA, 19 nt, Artificial Sequence
  Description of Artificial Sequence: Synthetic oligonucleotide
guuccucucaaagagguau

SEQ ID NO: 2571883 - RNA, 19 nt, Artificial Sequence
  Description of Artificial Sequence: Synthetic oligonucleotide
gagguauggguaauuucaa

SEQ ID NO: 2571884 - RNA, 19 nt, Artificial Sequence
  Description of Artificial Sequence: Synthetic oligonucleotide
ccuuuugaugaugaugaug

SEQ ID NO: 2571885 - RNA, 19 nt, Artificial Sequence
  Description of Artificial Sequence: Synthetic oligonucleotide
uuaguagaccaggcacgga

SEQ ID NO: 2571886 - RNA, 19 nt, Artificial Sequence
  Description of Artificial Sequence: Synthetic oligonucleotide
ggccaauucauguuuagau

SEQ ID NO: 2571887 - RNA, 19 nt, Artificial Sequence
  Description of Artificial Sequence: Synthetic oligonucleotide
aucaacuacuuugcauuaa

SEQ ID NO: 2571888 - RNA, 19 nt, Artificial Sequence
  Description of Artificial Sequence: Synthetic oligonucleotide
ggcagguuccucucaaaga

SEQ ID NO: 2571889 - RNA, 19 nt, Artificial Sequence
  Description of Artificial Sequence: Synthetic oligonucleotide
aucagacagccaaggagca

SEQ ID NO: 2571890 - RNA, 19 nt, Artificial Sequence
  Description of Artificial Sequence: Synthetic oligonucleotide
agcacucacaggauuuuau

SEQ ID NO: 2571891 - RNA, 19 nt, Artificial Sequence
  Description of Artificial Sequence: Synthetic oligonucleotide
gacagccaaggagcaacug

SEQ ID NO: 2571892 - RNA, 19 nt, Artificial Sequence
  Description of Artificial Sequence: Synthetic oligonucleotide
gccaauucauguuuagaua

SEQ ID NO: 2571893 - RNA, 19 nt, Artificial Sequence
  Description of Artificial Sequence: Synthetic oligonucleotide
uguuacugacaagggccaa

SEQ ID NO: 2571894 - RNA, 19 nt, Artificial Sequence
  Description of Artificial Sequence: Synthetic oligonucleotide
gccaaggagcaacugaaaa

SEQ ID NO: 2571895 - RNA, 19 nt, Artificial Sequence
  Description of Artificial Sequence: Synthetic oligonucleotide
aagggccaauucauguuua

SEQ ID NO: 2571896 - RNA, 19 nt, Artificial Sequence
  Description of Artificial Sequence: Synthetic oligonucleotide
cagguagacuuagauaucu

SEQ ID NO: 2571897 - RNA, 19 nt, Artificial Sequence
  Description of Artificial Sequence: Synthetic oligonucleotide
uggaaccggucagggagga

SEQ ID NO: 2571898 - RNA, 19 nt, Artificial Sequence
  Description of Artificial Sequence: Synthetic oligonucleotide
ccuuaaauaagcacagaau

SEQ ID NO: 2571899 - RNA, 19 nt, Artificial Sequence
  Description of Artificial Sequence: Synthetic oligonucleotide
guuggaggcagcaguuuaa

SEQ ID NO: 2571900 - RNA, 19 nt, Artificial Sequence
  Description of Artificial Sequence: Synthetic oligonucleotide
ccucucaaagagguauggg

SEQ ID NO: 2571901 - RNA, 19 nt, Artificial Sequence
  Description of Artificial Sequence: Synthetic oligonucleotide
guaagucaaguguuuuauu

SEQ ID NO: 2571902 - RNA, 19 nt, Artificial Sequence
  Description of Artificial Sequence: Synthetic oligonucleotide
cuuugcauuaaaggcaauu

SEQ ID NO: 2571903 - RNA, 19 nt, Artificial Sequence
  Description of Artificial Sequence: Synthetic oligonucleotide
accggucagggaggacacc

SEQ ID NO: 2571904 - RNA, 19 nt, Artificial Sequence
  Description of Artificial Sequence: Synthetic oligonucleotide
gguuggaggcagcaguuua

SEQ ID NO: 2571905 - RNA, 19 nt, Artificial Sequence
  Description of Artificial Sequence: Synthetic oligonucleotide
ggguagcuacacauaaauc

SEQ ID NO: 2571906 - RNA, 19 nt, Artificial Sequence
  Description of Artificial Sequence: Synthetic oligonucleotide
cacaguaagucaaguguuu

SEQ ID NO: 2571907 - RNA, 19 nt, Artificial Sequence
  Description of Artificial Sequence: Synthetic oligonucleotide
gaucuagcaggaggcccga

SEQ ID NO: 2571908 - RNA, 19 nt, Artificial Sequence
  Description of Artificial Sequence: Synthetic oligonucleotide
caagggccaauucauguuu

SEQ ID NO: 2571909 - RNA, 19 nt, Artificial Sequence
  Description of Artificial Sequence: Synthetic oligonucleotide
gggaggacaccuagggaac

SEQ ID NO: 2571910 - RNA, 19 nt, Artificial Sequence
  Description of Artificial Sequence: Synthetic oligonucleotide
agacacagguagacuuaga

SEQ ID NO: 2571911 - RNA, 19 nt, Artificial Sequence
  Description of Artificial Sequence: Synthetic oligonucleotide
caaugacacaggcuguaau

SEQ ID NO: 2571912 - RNA, 19 nt, Artificial Sequence
  Description of Artificial Sequence: Synthetic oligonucleotide
gugcacuuaaaugguccaa

SEQ ID NO: 2571913 - RNA, 19 nt, Artificial Sequence
  Description of Artificial Sequence: Synthetic oligonucleotide
agguagacuuagauaucua

SEQ ID NO: 2571914 - RNA, 19 nt, Artificial Sequence
  Description of Artificial Sequence: Synthetic oligonucleotide
ggaggcccgaggaugaaaa

SEQ ID NO: 2571915 - RNA, 19 nt, Artificial Sequence
  Description of Artificial Sequence: Synthetic oligonucleotide
gcuacacauaaaucacagu

SEQ ID NO: 2571916 - RNA, 19 nt, Artificial Sequence
  Description of Artificial Sequence: Synthetic oligonucleotide
aggacaccuagggaacauu

SEQ ID NO: 2571917 - RNA, 19 nt, Artificial Sequence
  Description of Artificial Sequence: Synthetic oligonucleotide
aucuagcaggaggcccgag

SEQ ID NO: 2571918 - RNA, 19 nt, Artificial Sequence
  Description of Artificial Sequence: Synthetic oligonucleotide
gggaacauuucagccacua

SEQ ID NO: 2571919 - RNA, 19 nt, Artificial Sequence
  Description of Artificial Sequence: Synthetic oligonucleotide
aggaggcccgaggaugaaa

SEQ ID NO: 2571920 - RNA, 19 nt, Artificial Sequence
  Description of Artificial Sequence: Synthetic oligonucleotide
gcuguaauucauccacauu

SEQ ID NO: 2571921 - RNA, 19 nt, Artificial Sequence
  Description of Artificial Sequence: Synthetic oligonucleotide
cagguuggaggcagcaguu

SEQ ID NO: 2571922 - RNA, 19 nt, Artificial Sequence
  Description of Artificial Sequence: Synthetic oligonucleotide
gcacucacaggauuuuauu

SEQ ID NO: 2571923 - RNA, 19 nt, Artificial Sequence
  Description of Artificial Sequence: Synthetic oligonucleotide
guccaaugacacaggcugu

SEQ ID NO: 2571924 - RNA, 19 nt, Artificial Sequence
  Description of Artificial Sequence: Synthetic oligonucleotide
caaagagguauggguaauu

SEQ ID NO: 2571925 - RNA, 19 nt, Artificial Sequence
  Description of Artificial Sequence: Synthetic oligonucleotide
gcuagguaauuaauucuuu

SEQ ID NO: 2571926 - RNA, 19 nt, Artificial Sequence
  Description of Artificial Sequence: Synthetic oligonucleotide
ggacaccuagggaacauuu

SEQ ID NO: 2571927 - RNA, 19 nt, Artificial Sequence
  Description of Artificial Sequence: Synthetic oligonucleotide
gcagcaguuuaaacuugua

SEQ ID NO: 2571928 - RNA, 19 nt, Artificial Sequence
  Description of Artificial Sequence: Synthetic oligonucleotide
ccaaugacacaggcuguaa

SEQ ID NO: 2571929 - RNA, 19 nt, Artificial Sequence
  Description of Artificial Sequence: Synthetic oligonucleotide
ggaaccggucagggaggac

SEQ ID NO: 2571930 - RNA, 19 nt, Artificial Sequence
  Description of Artificial Sequence: Synthetic oligonucleotide
ccggucagggaggacaccu

SEQ ID NO: 2571931 - RNA, 19 nt, Artificial Sequence
  Description of Artificial Sequence: Synthetic oligonucleotide
ccaggcacggaaggcaggu

SEQ ID NO: 2571932 - RNA, 19 nt, Artificial Sequence
  Description of Artificial Sequence: Synthetic oligonucleotide
caggcacggaaggcagguu

SEQ ID NO: 2571933 - RNA, 19 nt, Artificial Sequence
  Description of Artificial Sequence: Synthetic oligonucleotide
uuauuagccauagaaaagg

SEQ ID NO: 2571934 - RNA, 19 nt, Artificial Sequence
  Description of Artificial Sequence: Synthetic oligonucleotide
uuagccauagaaaagggga

SEQ ID NO: 2571935 - RNA, 19 nt, Artificial Sequence
  Description of Artificial Sequence: Synthetic oligonucleotide
uuuugucuuacaaacuuua

SEQ ID NO: 2571936 - RNA, 19 nt, Artificial Sequence
  Description of Artificial Sequence: Synthetic oligonucleotide
cauagaaaaggggacagac

SEQ ID NO: 2571937 - RNA, 19 nt, Artificial Sequence
  Description of Artificial Sequence: Synthetic oligonucleotide
uugucuuacaaacuuuauu

SEQ ID NO: 2571938 - RNA, 19 nt, Artificial Sequence
  Description of Artificial Sequence: Synthetic oligonucleotide
uagccauagaaaaggggac

SEQ ID NO: 2571939 - RNA, 19 nt, Artificial Sequence
  Description of Artificial Sequence: Synthetic oligonucleotide
uuugucuuacaaacuuuau

SEQ ID NO: 2571940 - RNA, 19 nt, Artificial Sequence
  Description of Artificial Sequence: Synthetic oligonucleotide
auagaaaaggggacagaca

SEQ ID NO: 2571941 - RNA, 19 nt, Artificial Sequence
  Description of Artificial Sequence: Synthetic oligonucleotide
agccauagaaaaggggaca

SEQ ID NO: 2571942 - RNA, 19 nt, Artificial Sequence
  Description of Artificial Sequence: Synthetic oligonucleotide
ccauagaaaaggggacaga

SEQ ID NO: 2571943 - RNA, 19 nt, Artificial Sequence
  Description of Artificial Sequence: Synthetic oligonucleotide
aagaauuaagaguugaggc

SEQ ID NO: 2571944 - RNA, 19 nt, Artificial Sequence
  Description of Artificial Sequence: Synthetic oligonucleotide
aauaaaauaauaaguggcc

SEQ ID NO: 2571945 - RNA, 19 nt, Artificial Sequence
  Description of Artificial Sequence: Synthetic oligonucleotide
aaacaauuagauuucaaag

SEQ ID NO: 2571946 - RNA, 19 nt, Artificial Sequence
  Description of Artificial Sequence: Synthetic oligonucleotide
aauaagcucuaccuuagcc

SEQ ID NO: 2571947 - RNA, 19 nt, Artificial Sequence
  Description of Artificial Sequence: Synthetic oligonucleotide
aacaauuagauuucaaaga

SEQ ID NO: 2571948 - RNA, 19 nt, Artificial Sequence
  Description of Artificial Sequence: Synthetic oligonucleotide
ucuaccuuagccaagggag

SEQ ID NO: 2571949 - RNA, 19 nt, Artificial Sequence
  Description of Artificial Sequence: Synthetic oligonucleotide
aaggaaaaggaauagagaa

SEQ ID NO: 2571950 - RNA, 19 nt, Artificial Sequence
  Description of Artificial Sequence: Synthetic oligonucleotide
aauaauaaguggcccugcc

SEQ ID NO: 2571951 - RNA, 19 nt, Artificial Sequence
  Description of Artificial Sequence: Synthetic oligonucleotide
uucaaagaugaauuuaagg

SEQ ID NO: 2571952 - RNA, 19 nt, Artificial Sequence
  Description of Artificial Sequence: Synthetic oligonucleotide
aauuagauuucaaagauga

SEQ ID NO: 2571953 - RNA, 19 nt, Artificial Sequence
  Description of Artificial Sequence: Synthetic oligonucleotide
acaaaccuaaguuuugugc

SEQ ID NO: 2571954 - RNA, 19 nt, Artificial Sequence
  Description of Artificial Sequence: Synthetic oligonucleotide
auaaaauaauaaguggccc

SEQ ID NO: 2571955 - RNA, 19 nt, Artificial Sequence
  Description of Artificial Sequence: Synthetic oligonucleotide
aauuuaaggguugggaagg

SEQ ID NO: 2571956 - RNA, 19 nt, Artificial Sequence
  Description of Artificial Sequence: Synthetic oligonucleotide
aauuaucagguuugggagg

SEQ ID NO: 2571957 - RNA, 19 nt, Artificial Sequence
  Description of Artificial Sequence: Synthetic oligonucleotide
aauuugaauaaauuauaaa

SEQ ID NO: 2571958 - RNA, 19 nt, Artificial Sequence
  Description of Artificial Sequence: Synthetic oligonucleotide
gaauuuaaggguugggaag

SEQ ID NO: 2571959 - RNA, 19 nt, Artificial Sequence
  Description of Artificial Sequence: Synthetic oligonucleotide
ucuggaauaagcucuaccu

SEQ ID NO: 2571960 - RNA, 19 nt, Artificial Sequence
  Description of Artificial Sequence: Synthetic oligonucleotide
uugaauaaauuauaaaauu

SEQ ID NO: 2571961 - RNA, 19 nt, Artificial Sequence
  Description of Artificial Sequence: Synthetic oligonucleotide
agcaauaucugagaggugg

SEQ ID NO: 2571962 - RNA, 19 nt, Artificial Sequence
  Description of Artificial Sequence: Synthetic oligonucleotide
uaaguuuugugcaugcaca

SEQ ID NO: 2571963 - RNA, 19 nt, Artificial Sequence
  Description of Artificial Sequence: Synthetic oligonucleotide
uaauaaguggcccugccca

SEQ ID NO: 2571964 - RNA, 19 nt, Artificial Sequence
  Description of Artificial Sequence: Synthetic oligonucleotide
uagauuucaaagaugaauu

SEQ ID NO: 2571965 - RNA, 19 nt, Artificial Sequence
  Description of Artificial Sequence: Synthetic oligonucleotide
uaaaauaauaaguggcccu

SEQ ID NO: 2571966 - RNA, 19 nt, Artificial Sequence
  Description of Artificial Sequence: Synthetic oligonucleotide
aaugcuuguucccucagca

SEQ ID NO: 2571967 - RNA, 19 nt, Artificial Sequence
  Description of Artificial Sequence: Synthetic oligonucleotide
auaauaaguggcccugccc

SEQ ID NO: 2571968 - RNA, 19 nt, Artificial Sequence
  Description of Artificial Sequence: Synthetic oligonucleotide
uggcuagugacucaguucc

SEQ ID NO: 2571969 - RNA, 19 nt, Artificial Sequence
  Description of Artificial Sequence: Synthetic oligonucleotide
caauuaucagguuugggag

SEQ ID NO: 2571970 - RNA, 19 nt, Artificial Sequence
  Description of Artificial Sequence: Synthetic oligonucleotide
aagcccaagaauuaagagu

SEQ ID NO: 2571971 - RNA, 19 nt, Artificial Sequence
  Description of Artificial Sequence: Synthetic oligonucleotide
acaauuagauuucaaagau

SEQ ID NO: 2571972 - RNA, 19 nt, Artificial Sequence
  Description of Artificial Sequence: Synthetic oligonucleotide
aaaugcuuguucccucagc

SEQ ID NO: 2571973 - RNA, 19 nt, Artificial Sequence
  Description of Artificial Sequence: Synthetic oligonucleotide
agaauuaagaguugaggcu

SEQ ID NO: 2571974 - RNA, 19 nt, Artificial Sequence
  Description of Artificial Sequence: Synthetic oligonucleotide
aaaauaauaaguggcccug

SEQ ID NO: 2571975 - RNA, 19 nt, Artificial Sequence
  Description of Artificial Sequence: Synthetic oligonucleotide
agguaggugggucagaguc

SEQ ID NO: 2571976 - RNA, 19 nt, Artificial Sequence
  Description of Artificial Sequence: Synthetic oligonucleotide
caugacugaauacaagggg

SEQ ID NO: 2571977 - RNA, 19 nt, Artificial Sequence
  Description of Artificial Sequence: Synthetic oligonucleotide
uuagauuucaaagaugaau

SEQ ID NO: 2571978 - RNA, 19 nt, Artificial Sequence
  Description of Artificial Sequence: Synthetic oligonucleotide
ggugaugccaauuaucagg

SEQ ID NO: 2571979 - RNA, 19 nt, Artificial Sequence
  Description of Artificial Sequence: Synthetic oligonucleotide
guaacugggaaccacauga

SEQ ID NO: 2571980 - RNA, 19 nt, Artificial Sequence
  Description of Artificial Sequence: Synthetic oligonucleotide
aaauaauaaguggcccugc

SEQ ID NO: 2571981 - RNA, 19 nt, Artificial Sequence
  Description of Artificial Sequence: Synthetic oligonucleotide
ugcacauucucucucacac

SEQ ID NO: 2571982 - RNA, 19 nt, Artificial Sequence
  Description of Artificial Sequence: Synthetic oligonucleotide
augacugaauacaaggggc

SEQ ID NO: 2571983 - RNA, 19 nt, Artificial Sequence
  Description of Artificial Sequence: Synthetic oligonucleotide
uuucaaagaugaauuuaag

SEQ ID NO: 2571984 - RNA, 19 nt, Artificial Sequence
  Description of Artificial Sequence: Synthetic oligonucleotide
caagaauuaagaguugagg

SEQ ID NO: 2571985 - RNA, 19 nt, Artificial Sequence
  Description of Artificial Sequence: Synthetic oligonucleotide
gaauuaagaguugaggcug

SEQ ID NO: 2571986 - RNA, 19 nt, Artificial Sequence
  Description of Artificial Sequence: Synthetic oligonucleotide
ugaauuuaaggguugggaa

SEQ ID NO: 2571987 - RNA, 19 nt, Artificial Sequence
  Description of Artificial Sequence: Synthetic oligonucleotide
ucagucaggaccccaaagc

SEQ ID NO: 2571988 - RNA, 19 nt, Artificial Sequence
  Description of Artificial Sequence: Synthetic oligonucleotide
agugggguaacugggaacc

SEQ ID NO: 2571989 - RNA, 19 nt, Artificial Sequence
  Description of Artificial Sequence: Synthetic oligonucleotide
aacacuggcauugcuugcc

SEQ ID NO: 2571990 - RNA, 19 nt, Artificial Sequence
  Description of Artificial Sequence: Synthetic oligonucleotide
acaacugagucugaagccc

SEQ ID NO: 2571991 - RNA, 19 nt, Artificial Sequence
  Description of Artificial Sequence: Synthetic oligonucleotide
auaagcucuaccuuagcca

SEQ ID NO: 2571992 - RNA, 19 nt, Artificial Sequence
  Description of Artificial Sequence: Synthetic oligonucleotide
ugcuuguucccucagcaag

SEQ ID NO: 2571993 - RNA, 19 nt, Artificial Sequence
  Description of Artificial Sequence: Synthetic oligonucleotide
accccuguguuacacauac

SEQ ID NO: 2571994 - RNA, 19 nt, Artificial Sequence
  Description of Artificial Sequence: Synthetic oligonucleotide
aaggcaauccaauuugaau

SEQ ID NO: 2571995 - RNA, 19 nt, Artificial Sequence
  Description of Artificial Sequence: Synthetic oligonucleotide
guaagggguguuuaaaccc

SEQ ID NO: 2571996 - RNA, 19 nt, Artificial Sequence
  Description of Artificial Sequence: Synthetic oligonucleotide
uugccuaggaacuugggac

SEQ ID NO: 2571997 - RNA, 19 nt, Artificial Sequence
  Description of Artificial Sequence: Synthetic oligonucleotide
cauacaugcacauucucuc

SEQ ID NO: 2571998 - RNA, 19 nt, Artificial Sequence
  Description of Artificial Sequence: Synthetic oligonucleotide
aagaagagggacaacugag

SEQ ID NO: 2571999 - RNA, 19 nt, Artificial Sequence
  Description of Artificial Sequence: Synthetic oligonucleotide
aaccacaugacugaauaca

SEQ ID NO: 2572000 - RNA, 19 nt, Artificial Sequence
  Description of Artificial Sequence: Synthetic oligonucleotide
aagggagagcaguucuccc

SEQ ID NO: 2572001 - RNA, 19 nt, Artificial Sequence
  Description of Artificial Sequence: Synthetic oligonucleotide
uuggagcaauaucugagag

SEQ ID NO: 2572002 - RNA, 19 nt, Artificial Sequence
  Description of Artificial Sequence: Synthetic oligonucleotide
ugggaggucaccaaggcaa

SEQ ID NO: 2572003 - RNA, 19 nt, Artificial Sequence
  Description of Artificial Sequence: Synthetic oligonucleotide
uaagggguguuuaaacccc

SEQ ID NO: 2572004 - RNA, 19 nt, Artificial Sequence
  Description of Artificial Sequence: Synthetic oligonucleotide
ucagagucuggucaaguga

SEQ ID NO: 2572005 - RNA, 19 nt, Artificial Sequence
  Description of Artificial Sequence: Synthetic oligonucleotide
cuaaguuuugugcaugcac

SEQ ID NO: 2572006 - RNA, 19 nt, Artificial Sequence
  Description of Artificial Sequence: Synthetic oligonucleotide
ugcacacacacacacacaa

SEQ ID NO: 2572007 - RNA, 19 nt, Artificial Sequence
  Description of Artificial Sequence: Synthetic oligonucleotide
cacacaaacaauuagauuu

SEQ ID NO: 2572008 - RNA, 19 nt, Artificial Sequence
  Description of Artificial Sequence: Synthetic oligonucleotide
ugcaugcacacacacacac

SEQ ID NO: 2572009 - RNA, 19 nt, Artificial Sequence
  Description of Artificial Sequence: Synthetic oligonucleotide
accaaggcaauccaauuug

SEQ ID NO: 2572010 - RNA, 19 nt, Artificial Sequence
  Description of Artificial Sequence: Synthetic oligonucleotide
auccaauuugaauaaauua

SEQ ID NO: 2572011 - RNA, 19 nt, Artificial Sequence
  Description of Artificial Sequence: Synthetic oligonucleotide
cacacacauacacacaccc

SEQ ID NO: 2572012 - RNA, 19 nt, Artificial Sequence
  Description of Artificial Sequence: Synthetic oligonucleotide
uuaaggguugggaaggaaa

SEQ ID NO: 2572013 - RNA, 19 nt, Artificial Sequence
  Description of Artificial Sequence: Synthetic oligonucleotide
accuaaguuuugugcaugc

SEQ ID NO: 2572014 - RNA, 19 nt, Artificial Sequence
  Description of Artificial Sequence: Synthetic oligonucleotide
aauaaguggcccugcccag

SEQ ID NO: 2572015 - RNA, 19 nt, Artificial Sequence
  Description of Artificial Sequence: Synthetic oligonucleotide
aggcaauccaauuugaaua

SEQ ID NO: 2572016 - RNA, 19 nt, Artificial Sequence
  Description of Artificial Sequence: Synthetic oligonucleotide
caugcacacacacacacac

SEQ ID NO: 2572017 - RNA, 19 nt, Artificial Sequence
  Description of Artificial Sequence: Synthetic oligonucleotide
guuuugugcaugcacacac

SEQ ID NO: 2572018 - RNA, 19 nt, Artificial Sequence
  Description of Artificial Sequence: Synthetic oligonucleotide
aagagggacaacugagucu

SEQ ID NO: 2572019 - RNA, 19 nt, Artificial Sequence
  Description of Artificial Sequence: Synthetic oligonucleotide
agggagagcaguucucccc

SEQ ID NO: 2572020 - RNA, 19 nt, Artificial Sequence
  Description of Artificial Sequence: Synthetic oligonucleotide
ugacugaauacaaggggca

SEQ ID NO: 2572021 - RNA, 19 nt, Artificial Sequence
  Description of Artificial Sequence: Synthetic oligonucleotide
uuaggccugacucuguccu

SEQ ID NO: 2572022 - RNA, 19 nt, Artificial Sequence
  Description of Artificial Sequence: Synthetic oligonucleotide
uggaauaagcucuaccuua

SEQ ID NO: 2572023 - RNA, 19 nt, Artificial Sequence
  Description of Artificial Sequence: Synthetic oligonucleotide
caaacaauuagauuucaaa

SEQ ID NO: 2572024 - RNA, 19 nt, Artificial Sequence
  Description of Artificial Sequence: Synthetic oligonucleotide
agugacucaguuccucugg

SEQ ID NO: 2572025 - RNA, 19 nt, Artificial Sequence
  Description of Artificial Sequence: Synthetic oligonucleotide
acugaauacaaggggcacc

SEQ ID NO: 2572026 - RNA, 19 nt, Artificial Sequence
  Description of Artificial Sequence: Synthetic oligonucleotide
cucacacacauacacacac

SEQ ID NO: 2572027 - RNA, 19 nt, Artificial Sequence
  Description of Artificial Sequence: Synthetic oligonucleotide
aggggcaccccuuacuccc

SEQ ID NO: 2572028 - RNA, 19 nt, Artificial Sequence
  Description of Artificial Sequence: Synthetic oligonucleotide
ugaagcccuagguaagggg

SEQ ID NO: 2572029 - RNA, 19 nt, Artificial Sequence
  Description of Artificial Sequence: Synthetic oligonucleotide
cacacacacacacacaaac

SEQ ID NO: 2572030 - RNA, 19 nt, Artificial Sequence
  Description of Artificial Sequence: Synthetic oligonucleotide
aaggggcaccccuuacucc

SEQ ID NO: 2572031 - RNA, 19 nt, Artificial Sequence
  Description of Artificial Sequence: Synthetic oligonucleotide
ucagcaaaugcuuguuccc

SEQ ID NO: 2572032 - RNA, 19 nt, Artificial Sequence
  Description of Artificial Sequence: Synthetic oligonucleotide
caaaccuaaguuuugugca

SEQ ID NO: 2572033 - RNA, 19 nt, Artificial Sequence
  Description of Artificial Sequence: Synthetic oligonucleotide
uaagcucuaccuuagccaa

SEQ ID NO: 2572034 - RNA, 19 nt, Artificial Sequence
  Description of Artificial Sequence: Synthetic oligonucleotide
auaucugagagguggggug

SEQ ID NO: 2572035 - RNA, 19 nt, Artificial Sequence
  Description of Artificial Sequence: Synthetic oligonucleotide
uaaggguugggaaggaaaa

SEQ ID NO: 2572036 - RNA, 19 nt, Artificial Sequence
  Description of Artificial Sequence: Synthetic oligonucleotide
caauuagauuucaaagaug

SEQ ID NO: 2572037 - RNA, 19 nt, Artificial Sequence
  Description of Artificial Sequence: Synthetic oligonucleotide
ugagucugaagcccuaggu

SEQ ID NO: 2572038 - RNA, 19 nt, Artificial Sequence
  Description of Artificial Sequence: Synthetic oligonucleotide
aaaccgagucuuuggcuag

SEQ ID NO: 2572039 - RNA, 19 nt, Artificial Sequence
  Description of Artificial Sequence: Synthetic oligonucleotide
agagggacaacugagucug

SEQ ID NO: 2572040 - RNA, 19 nt, Artificial Sequence
  Description of Artificial Sequence: Synthetic oligonucleotide
ucagaguucuugagugggg

SEQ ID NO: 2572041 - RNA, 19 nt, Artificial Sequence
  Description of Artificial Sequence: Synthetic oligonucleotide
auacacacaccccauacaa

SEQ ID NO: 2572042 - RNA, 19 nt, Artificial Sequence
  Description of Artificial Sequence: Synthetic oligonucleotide
uuggacaccuuccucaguc

SEQ ID NO: 2572043 - RNA, 19 nt, Artificial Sequence
  Description of Artificial Sequence: Synthetic oligonucleotide
uggggagugggguaacugg

SEQ ID NO: 2572044 - RNA, 19 nt, Artificial Sequence
  Description of Artificial Sequence: Synthetic oligonucleotide
aaaacaagggaaaccgagu

SEQ ID NO: 2572045 - RNA, 19 nt, Artificial Sequence
  Description of Artificial Sequence: Synthetic oligonucleotide
aaaccuaaguuuugugcau

SEQ ID NO: 2572046 - RNA, 19 nt, Artificial Sequence
  Description of Artificial Sequence: Synthetic oligonucleotide
guuuaaaccccuguguuac

SEQ ID NO: 2572047 - RNA, 19 nt, Artificial Sequence
  Description of Artificial Sequence: Synthetic oligonucleotide
cagagucuggucaagugag

SEQ ID NO: 2572048 - RNA, 19 nt, Artificial Sequence
  Description of Artificial Sequence: Synthetic oligonucleotide
agagcaguucuccccuugc

SEQ ID NO: 2572049 - RNA, 19 nt, Artificial Sequence
  Description of Artificial Sequence: Synthetic oligonucleotide
cucgacaucagcuucuuca

SEQ ID NO: 2572050 - RNA, 19 nt, Artificial Sequence
  Description of Artificial Sequence: Synthetic oligonucleotide
caagcccaagaauuaagag

SEQ ID NO: 2572051 - RNA, 19 nt, Artificial Sequence
  Description of Artificial Sequence: Synthetic oligonucleotide
agggaaaccgagucuuugg

SEQ ID NO: 2572052 - RNA, 19 nt, Artificial Sequence
  Description of Artificial Sequence: Synthetic oligonucleotide
gaagagggacaacugaguc

SEQ ID NO: 2572053 - RNA, 19 nt, Artificial Sequence
  Description of Artificial Sequence: Synthetic oligonucleotide
aauccaauuugaauaaauu

SEQ ID NO: 2572054 - RNA, 19 nt, Artificial Sequence
  Description of Artificial Sequence: Synthetic oligonucleotide
ucuugaguggggagugggg

SEQ ID NO: 2572055 - RNA, 19 nt, Artificial Sequence
  Description of Artificial Sequence: Synthetic oligonucleotide
augaauuuaaggguuggga

SEQ ID NO: 2572056 - RNA, 19 nt, Artificial Sequence
  Description of Artificial Sequence: Synthetic oligonucleotide
aaaccccuguguuacacau

SEQ ID NO: 2572057 - RNA, 19 nt, Artificial Sequence
  Description of Artificial Sequence: Synthetic oligonucleotide
acuggcauugcuugccuag

SEQ ID NO: 2572058 - RNA, 19 nt, Artificial Sequence
  Description of Artificial Sequence: Synthetic oligonucleotide
uuagccaagggagagcagu

SEQ ID NO: 2572059 - RNA, 19 nt, Artificial Sequence
  Description of Artificial Sequence: Synthetic oligonucleotide
gguaagggguguuuaaacc

SEQ ID NO: 2572060 - RNA, 19 nt, Artificial Sequence
  Description of Artificial Sequence: Synthetic oligonucleotide
agcaaaugcuuguucccuc

SEQ ID NO: 2572061 - RNA, 19 nt, Artificial Sequence
  Description of Artificial Sequence: Synthetic oligonucleotide
cugaauacaaggggcaccc

SEQ ID NO: 2572062 - RNA, 19 nt, Artificial Sequence
  Description of Artificial Sequence: Synthetic oligonucleotide
uguuuaaaccccuguguua

SEQ ID NO: 2572063 - RNA, 19 nt, Artificial Sequence
  Description of Artificial Sequence: Synthetic oligonucleotide
ucugaagcccuagguaagg

SEQ ID NO: 2572064 - RNA, 19 nt, Artificial Sequence
  Description of Artificial Sequence: Synthetic oligonucleotide
acacaccccauacaaaccu

SEQ ID NO: 2572065 - RNA, 19 nt, Artificial Sequence
  Description of Artificial Sequence: Synthetic oligonucleotide
gucagaguucuugaguggg

SEQ ID NO: 2572066 - RNA, 19 nt, Artificial Sequence
  Description of Artificial Sequence: Synthetic oligonucleotide
uuuggcuagugacucaguu

SEQ ID NO: 2572067 - RNA, 19 nt, Artificial Sequence
  Description of Artificial Sequence: Synthetic oligonucleotide
uuuugugcaugcacacaca

SEQ ID NO: 2572068 - RNA, 19 nt, Artificial Sequence
  Description of Artificial Sequence: Synthetic oligonucleotide
gaaaccgagucuuuggcua

SEQ ID NO: 2572069 - RNA, 19 nt, Artificial Sequence
  Description of Artificial Sequence: Synthetic oligonucleotide
ucacacacauacacacacc

SEQ ID NO: 2572070 - RNA, 19 nt, Artificial Sequence
  Description of Artificial Sequence: Synthetic oligonucleotide
ugagguaggugggucagag

SEQ ID NO: 2572071 - RNA, 19 nt, Artificial Sequence
  Description of Artificial Sequence: Synthetic oligonucleotide
ugggucagaguucuugagu

SEQ ID NO: 2572072 - RNA, 19 nt, Artificial Sequence
  Description of Artificial Sequence: Synthetic oligonucleotide
ucagcaagcccaagaauua

SEQ ID NO: 2572073 - RNA, 19 nt, Artificial Sequence
  Description of Artificial Sequence: Synthetic oligonucleotide
caguccuuaggccugacuc

SEQ ID NO: 2572074 - RNA, 19 nt, Artificial Sequence
  Description of Artificial Sequence: Synthetic oligonucleotide
uucuugaguggggaguggg

SEQ ID NO: 2572075 - RNA, 19 nt, Artificial Sequence
  Description of Artificial Sequence: Synthetic oligonucleotide
auuaucagguuugggaggu

SEQ ID NO: 2572076 - RNA, 19 nt, Artificial Sequence
  Description of Artificial Sequence: Synthetic oligonucleotide
gaggucaccaaggcaaucc

SEQ ID NO: 2572077 - RNA, 19 nt, Artificial Sequence
  Description of Artificial Sequence: Synthetic oligonucleotide
ucaggaccccaaagcaagg

SEQ ID NO: 2572078 - RNA, 19 nt, Artificial Sequence
  Description of Artificial Sequence: Synthetic oligonucleotide
cucuggaauaagcucuacc

SEQ ID NO: 2572079 - RNA, 19 nt, Artificial Sequence
  Description of Artificial Sequence: Synthetic oligonucleotide
uacaugcacauucucucuc

SEQ ID NO: 2572080 - RNA, 19 nt, Artificial Sequence
  Description of Artificial Sequence: Synthetic oligonucleotide
aaggguugggaaggaaaag

SEQ ID NO: 2572081 - RNA, 19 nt, Artificial Sequence
  Description of Artificial Sequence: Synthetic oligonucleotide
cuggucaagugagaggagg

SEQ ID NO: 2572082 - RNA, 19 nt, Artificial Sequence
  Description of Artificial Sequence: Synthetic oligonucleotide
agcucuaccuuagccaagg

SEQ ID NO: 2572083 - RNA, 19 nt, Artificial Sequence
  Description of Artificial Sequence: Synthetic oligonucleotide
aagggaaaccgagucuuug

SEQ ID NO: 2572084 - RNA, 19 nt, Artificial Sequence
  Description of Artificial Sequence: Synthetic oligonucleotide
aaccuaaguuuugugcaug

SEQ ID NO: 2572085 - RNA, 19 nt, Artificial Sequence
  Description of Artificial Sequence: Synthetic oligonucleotide
gucaggaccccaaagcaag

SEQ ID NO: 2572086 - RNA, 19 nt, Artificial Sequence
  Description of Artificial Sequence: Synthetic oligonucleotide
auacaugcacauucucucu

SEQ ID NO: 2572087 - RNA, 19 nt, Artificial Sequence
  Description of Artificial Sequence: Synthetic oligonucleotide
gaauaagcucuaccuuagc

SEQ ID NO: 2572088 - RNA, 19 nt, Artificial Sequence
  Description of Artificial Sequence: Synthetic oligonucleotide
agaguucuugaguggggag

SEQ ID NO: 2572089 - RNA, 19 nt, Artificial Sequence
  Description of Artificial Sequence: Synthetic oligonucleotide
uuaaaccccuguguuacac

SEQ ID NO: 2572090 - RNA, 19 nt, Artificial Sequence
  Description of Artificial Sequence: Synthetic oligonucleotide
ugccuaggaacuugggaca

SEQ ID NO: 2572091 - RNA, 19 nt, Artificial Sequence
  Description of Artificial Sequence: Synthetic oligonucleotide
ccaauuaucagguuuggga

SEQ ID NO: 2572092 - RNA, 19 nt, Artificial Sequence
  Description of Artificial Sequence: Synthetic oligonucleotide
uuggcuagugacucaguuc

SEQ ID NO: 2572093 - RNA, 19 nt, Artificial Sequence
  Description of Artificial Sequence: Synthetic oligonucleotide
guuggagcaauaucugaga

SEQ ID NO: 2572094 - RNA, 19 nt, Artificial Sequence
  Description of Artificial Sequence: Synthetic oligonucleotide
uggggugaugccaauuauc

SEQ ID NO: 2572095 - RNA, 19 nt, Artificial Sequence
  Description of Artificial Sequence: Synthetic oligonucleotide
aguccuuaggccugacucu

SEQ ID NO: 2572096 - RNA, 19 nt, Artificial Sequence
  Description of Artificial Sequence: Synthetic oligonucleotide
gggucagaguucuugagug

SEQ ID NO: 2572097 - RNA, 19 nt, Artificial Sequence
  Description of Artificial Sequence: Synthetic oligonucleotide
acacaggcagaagaagagg

SEQ ID NO: 2572098 - RNA, 19 nt, Artificial Sequence
  Description of Artificial Sequence: Synthetic oligonucleotide
gcaacacuggcauugcuug

SEQ ID NO: 2572099 - RNA, 19 nt, Artificial Sequence
  Description of Artificial Sequence: Synthetic oligonucleotide
uaccuuagccaagggagag

SEQ ID NO: 2572100 - RNA, 19 nt, Artificial Sequence
  Description of Artificial Sequence: Synthetic oligonucleotide
uaucagguuugggagguca

SEQ ID NO: 2572101 - RNA, 19 nt, Artificial Sequence
  Description of Artificial Sequence: Synthetic oligonucleotide
aguuccucuggaauaagcu

SEQ ID NO: 2572102 - RNA, 19 nt, Artificial Sequence
  Description of Artificial Sequence: Synthetic oligonucleotide
gaaccacaugacugaauac

SEQ ID NO: 2572103 - RNA, 19 nt, Artificial Sequence
  Description of Artificial Sequence: Synthetic oligonucleotide
aaggaaacacaggcagaag

SEQ ID NO: 2572104 - RNA, 19 nt, Artificial Sequence
  Description of Artificial Sequence: Synthetic oligonucleotide
gaugccaauuaucagguuu

SEQ ID NO: 2572105 - RNA, 19 nt, Artificial Sequence
  Description of Artificial Sequence: Synthetic oligonucleotide
caauaucugagaggugggg

SEQ ID NO: 2572106 - RNA, 19 nt, Artificial Sequence
  Description of Artificial Sequence: Synthetic oligonucleotide
ucgacaucagcuucuucaa

SEQ ID NO: 2572107 - RNA, 19 nt, Artificial Sequence
  Description of Artificial Sequence: Synthetic oligonucleotide
caguuccucuggaauaagc

SEQ ID NO: 2572108 - RNA, 19 nt, Artificial Sequence
  Description of Artificial Sequence: Synthetic oligonucleotide
agggaggcaacacuggcau

SEQ ID NO: 2572109 - RNA, 19 nt, Artificial Sequence
  Description of Artificial Sequence: Synthetic oligonucleotide
uagugacucaguuccucug

SEQ ID NO: 2572110 - RNA, 19 nt, Artificial Sequence
  Description of Artificial Sequence: Synthetic oligonucleotide
aagugagaggaggcucccc

SEQ ID NO: 2572111 - RNA, 19 nt, Artificial Sequence
  Description of Artificial Sequence: Synthetic oligonucleotide
gucagagucuggucaagug

SEQ ID NO: 2572112 - RNA, 19 nt, Artificial Sequence
  Description of Artificial Sequence: Synthetic oligonucleotide
cuuaggccugacucugucc

SEQ ID NO: 2572113 - RNA, 19 nt, Artificial Sequence
  Description of Artificial Sequence: Synthetic oligonucleotide
acaugcacauucucucuca

SEQ ID NO: 2572114 - RNA, 19 nt, Artificial Sequence
  Description of Artificial Sequence: Synthetic oligonucleotide
augccaauuaucagguuug

SEQ ID NO: 2572115 - RNA, 19 nt, Artificial Sequence
  Description of Artificial Sequence: Synthetic oligonucleotide
cacacacacacacaaacaa

SEQ ID NO: 2572116 - RNA, 19 nt, Artificial Sequence
  Description of Artificial Sequence: Synthetic oligonucleotide
uugggaggucaccaaggca

SEQ ID NO: 2572117 - RNA, 19 nt, Artificial Sequence
  Description of Artificial Sequence: Synthetic oligonucleotide
aguucuugaguggggagug

SEQ ID NO: 2572118 - RNA, 19 nt, Artificial Sequence
  Description of Artificial Sequence: Synthetic oligonucleotide
caagggagagcaguucucc

SEQ ID NO: 2572119 - RNA, 19 nt, Artificial Sequence
  Description of Artificial Sequence: Synthetic oligonucleotide
ucuggucaagugagaggag

SEQ ID NO: 2572120 - RNA, 19 nt, Artificial Sequence
  Description of Artificial Sequence: Synthetic oligonucleotide
uaaaccccuguguuacaca

SEQ ID NO: 2572121 - RNA, 19 nt, Artificial Sequence
  Description of Artificial Sequence: Synthetic oligonucleotide
acacacaaacaauuagauu

SEQ ID NO: 2572122 - RNA, 19 nt, Artificial Sequence
  Description of Artificial Sequence: Synthetic oligonucleotide
ugccaauuaucagguuugg

SEQ ID NO: 2572123 - RNA, 19 nt, Artificial Sequence
  Description of Artificial Sequence: Synthetic oligonucleotide
ugacucuguccuuggacac

SEQ ID NO: 2572124 - RNA, 19 nt, Artificial Sequence
  Description of Artificial Sequence: Synthetic oligonucleotide
acucaguuccucuggaaua

SEQ ID NO: 2572125 - RNA, 19 nt, Artificial Sequence
  Description of Artificial Sequence: Synthetic oligonucleotide
ugagagguggggugaugcc

SEQ ID NO: 2572126 - RNA, 19 nt, Artificial Sequence
  Description of Artificial Sequence: Synthetic oligonucleotide
ccaaagcaaggaaacacag

SEQ ID NO: 2572127 - RNA, 19 nt, Artificial Sequence
  Description of Artificial Sequence: Synthetic oligonucleotide
agguuggagcaauaucuga

SEQ ID NO: 2572128 - RNA, 19 nt, Artificial Sequence
  Description of Artificial Sequence: Synthetic oligonucleotide
cucagucaggaccccaaag

SEQ ID NO: 2572129 - RNA, 19 nt, Artificial Sequence
  Description of Artificial Sequence: Synthetic oligonucleotide
auuaagaguugaggcuggg

SEQ ID NO: 2572130 - RNA, 19 nt, Artificial Sequence
  Description of Artificial Sequence: Synthetic oligonucleotide
ggaauaagcucuaccuuag

SEQ ID NO: 2572131 - RNA, 19 nt, Artificial Sequence
  Description of Artificial Sequence: Synthetic oligonucleotide
acaagggaaaccgagucuu

SEQ ID NO: 2572132 - RNA, 19 nt, Artificial Sequence
  Description of Artificial Sequence: Synthetic oligonucleotide
gugggucagagucugguca

SEQ ID NO: 2572133 - RNA, 19 nt, Artificial Sequence
  Description of Artificial Sequence: Synthetic oligonucleotide
aauacaaggggcaccccuu

SEQ ID NO: 2572134 - RNA, 19 nt, Artificial Sequence
  Description of Artificial Sequence: Synthetic oligonucleotide
cugagucugaagcccuagg

SEQ ID NO: 2572135 - RNA, 19 nt, Artificial Sequence
  Description of Artificial Sequence: Synthetic oligonucleotide
cuugccuaggaacuuggga

SEQ ID NO: 2572136 - RNA, 19 nt, Artificial Sequence
  Description of Artificial Sequence: Synthetic oligonucleotide
gaauacaaggggcaccccu

SEQ ID NO: 2572137 - RNA, 19 nt, Artificial Sequence
  Description of Artificial Sequence: Synthetic oligonucleotide
cugagguuggagcaauauc

SEQ ID NO: 2572138 - RNA, 19 nt, Artificial Sequence
  Description of Artificial Sequence: Synthetic oligonucleotide
acaaggggcaccccuuacu

SEQ ID NO: 2572139 - RNA, 19 nt, Artificial Sequence
  Description of Artificial Sequence: Synthetic oligonucleotide
cuaggaacuugggacaauc

SEQ ID NO: 2572140 - RNA, 19 nt, Artificial Sequence
  Description of Artificial Sequence: Synthetic oligonucleotide
ucagguuugggaggucacc

SEQ ID NO: 2572141 - RNA, 19 nt, Artificial Sequence
  Description of Artificial Sequence: Synthetic oligonucleotide
uuaagaguugaggcugggu

SEQ ID NO: 2572142 - RNA, 19 nt, Artificial Sequence
  Description of Artificial Sequence: Synthetic oligonucleotide
ucaaguccugagguuggag

SEQ ID NO: 2572143 - RNA, 19 nt, Artificial Sequence
  Description of Artificial Sequence: Synthetic oligonucleotide
ggaacuugggacaaucuca

SEQ ID NO: 2572144 - RNA, 19 nt, Artificial Sequence
  Description of Artificial Sequence: Synthetic oligonucleotide
aguggcccugcccaggaca

SEQ ID NO: 2572145 - RNA, 19 nt, Artificial Sequence
  Description of Artificial Sequence: Synthetic oligonucleotide
ggaaccacaugacugaaua

SEQ ID NO: 2572146 - RNA, 19 nt, Artificial Sequence
  Description of Artificial Sequence: Synthetic oligonucleotide
accuuagccaagggagagc

SEQ ID NO: 2572147 - RNA, 19 nt, Artificial Sequence
  Description of Artificial Sequence: Synthetic oligonucleotide
gagucugaagcccuaggua

SEQ ID NO: 2572148 - RNA, 19 nt, Artificial Sequence
  Description of Artificial Sequence: Synthetic oligonucleotide
ucaccaaggcaauccaauu

SEQ ID NO: 2572149 - RNA, 19 nt, Artificial Sequence
  Description of Artificial Sequence: Synthetic oligonucleotide
gagcaguucuccccuugcc

SEQ ID NO: 2572150 - RNA, 19 nt, Artificial Sequence
  Description of Artificial Sequence: Synthetic oligonucleotide
ggaggcaacacuggcauug

SEQ ID NO: 2572151 - RNA, 19 nt, Artificial Sequence
  Description of Artificial Sequence: Synthetic oligonucleotide
gacugaauacaaggggcac

SEQ ID NO: 2572152 - RNA, 19 nt, Artificial Sequence
  Description of Artificial Sequence: Synthetic oligonucleotide
uggcauugcuugccuagga

SEQ ID NO: 2572153 - RNA, 19 nt, Artificial Sequence
  Description of Artificial Sequence: Synthetic oligonucleotide
ggucagaguucuugagugg

SEQ ID NO: 2572154 - RNA, 19 nt, Artificial Sequence
  Description of Artificial Sequence: Synthetic oligonucleotide
agcaagcccaagaauuaag

SEQ ID NO: 2572155 - RNA, 19 nt, Artificial Sequence
  Description of Artificial Sequence: Synthetic oligonucleotide
cugggaaccacaugacuga

SEQ ID NO: 2572156 - RNA, 19 nt, Artificial Sequence
  Description of Artificial Sequence: Synthetic oligonucleotide
gagugggguaacugggaac

SEQ ID NO: 2572157 - RNA, 19 nt, Artificial Sequence
  Description of Artificial Sequence: Synthetic oligonucleotide
uagguaagggguguuuaaa

SEQ ID NO: 2572158 - RNA, 19 nt, Artificial Sequence
  Description of Artificial Sequence: Synthetic oligonucleotide
gagagcaguucuccccuug

SEQ ID NO: 2572159 - RNA, 19 nt, Artificial Sequence
  Description of Artificial Sequence: Synthetic oligonucleotide
caaggggcaccccuuacuc

SEQ ID NO: 2572160 - RNA, 19 nt, Artificial Sequence
  Description of Artificial Sequence: Synthetic oligonucleotide
guaggugggucagagucug

SEQ ID NO: 2572161 - RNA, 19 nt, Artificial Sequence
  Description of Artificial Sequence: Synthetic oligonucleotide
aaguggcccugcccaggac

SEQ ID NO: 2572162 - RNA, 19 nt, Artificial Sequence
  Description of Artificial Sequence: Synthetic oligonucleotide
ugccucgacaucagcuucu

SEQ ID NO: 2572163 - RNA, 19 nt, Artificial Sequence
  Description of Artificial Sequence: Synthetic oligonucleotide
ggguguuuaaaccccugug

SEQ ID NO: 2572164 - RNA, 19 nt, Artificial Sequence
  Description of Artificial Sequence: Synthetic oligonucleotide
uugccucgacaucagcuuc

SEQ ID NO: 2572165 - RNA, 19 nt, Artificial Sequence
  Description of Artificial Sequence: Synthetic oligonucleotide
uuuaaggguugggaaggaa

SEQ ID NO: 2572166 - RNA, 19 nt, Artificial Sequence
  Description of Artificial Sequence: Synthetic oligonucleotide
gggaaaccgagucuuuggc

SEQ ID NO: 2572167 - RNA, 19 nt, Artificial Sequence
  Description of Artificial Sequence: Synthetic oligonucleotide
ggcaauccaauuugaauaa

SEQ ID NO: 2572168 - RNA, 19 nt, Artificial Sequence
  Description of Artificial Sequence: Synthetic oligonucleotide
gcauugcuugccuaggaac

SEQ ID NO: 2572169 - RNA, 19 nt, Artificial Sequence
  Description of Artificial Sequence: Synthetic oligonucleotide
uacaaggggcaccccuuac

SEQ ID NO: 2572170 - RNA, 19 nt, Artificial Sequence
  Description of Artificial Sequence: Synthetic oligonucleotide
caaggaaacacaggcagaa

SEQ ID NO: 2572171 - RNA, 19 nt, Artificial Sequence
  Description of Artificial Sequence: Synthetic oligonucleotide
aguuuugugcaugcacaca

SEQ ID NO: 2572172 - RNA, 19 nt, Artificial Sequence
  Description of Artificial Sequence: Synthetic oligonucleotide
cagucaggaccccaaagca

SEQ ID NO: 2572173 - RNA, 19 nt, Artificial Sequence
  Description of Artificial Sequence: Synthetic oligonucleotide
cacacacaaacaauuagau

SEQ ID NO: 2572174 - RNA, 19 nt, Artificial Sequence
  Description of Artificial Sequence: Synthetic oligonucleotide
gggacaacugagucugaag

SEQ ID NO: 2572175 - RNA, 19 nt, Artificial Sequence
  Description of Artificial Sequence: Synthetic oligonucleotide
uuguucccucagcaagccc

SEQ ID NO: 2572176 - RNA, 19 nt, Artificial Sequence
  Description of Artificial Sequence: Synthetic oligonucleotide
aucagguuugggaggucac

SEQ ID NO: 2572177 - RNA, 19 nt, Artificial Sequence
  Description of Artificial Sequence: Synthetic oligonucleotide
acacacacacacacaaaca

SEQ ID NO: 2572178 - RNA, 19 nt, Artificial Sequence
  Description of Artificial Sequence: Synthetic oligonucleotide
gguguuuaaaccccugugu

SEQ ID NO: 2572179 - RNA, 19 nt, Artificial Sequence
  Description of Artificial Sequence: Synthetic oligonucleotide
agcugagguagguggguca

SEQ ID NO: 2572180 - RNA, 19 nt, Artificial Sequence
  Description of Artificial Sequence: Synthetic oligonucleotide
ccaauuugaauaaauuaua

SEQ ID NO: 2572181 - RNA, 19 nt, Artificial Sequence
  Description of Artificial Sequence: Synthetic oligonucleotide
cugaagcccuagguaaggg

SEQ ID NO: 2572182 - RNA, 19 nt, Artificial Sequence
  Description of Artificial Sequence: Synthetic oligonucleotide
aagcccuagguaaggggug

SEQ ID NO: 2572183 - RNA, 19 nt, Artificial Sequence
  Description of Artificial Sequence: Synthetic oligonucleotide
uugcuugccuaggaacuug

SEQ ID NO: 2572184 - RNA, 19 nt, Artificial Sequence
  Description of Artificial Sequence: Synthetic oligonucleotide
cucuaccuuagccaaggga

SEQ ID NO: 2572185 - RNA, 19 nt, Artificial Sequence
  Description of Artificial Sequence: Synthetic oligonucleotide
cuaccuuagccaagggaga

SEQ ID NO: 2572186 - RNA, 19 nt, Artificial Sequence
  Description of Artificial Sequence: Synthetic oligonucleotide
ugacucaguuccucuggaa

SEQ ID NO: 2572187 - RNA, 19 nt, Artificial Sequence
  Description of Artificial Sequence: Synthetic oligonucleotide
acugagucugaagcccuag

SEQ ID NO: 2572188 - RNA, 19 nt, Artificial Sequence
  Description of Artificial Sequence: Synthetic oligonucleotide
ugaguggggagugggguaa

SEQ ID NO: 2572189 - RNA, 19 nt, Artificial Sequence
  Description of Artificial Sequence: Synthetic oligonucleotide
accacaugacugaauacaa

SEQ ID NO: 2572190 - RNA, 19 nt, Artificial Sequence
  Description of Artificial Sequence: Synthetic oligonucleotide
caauccaauuugaauaaau

SEQ ID NO: 2572191 - RNA, 19 nt, Artificial Sequence
  Description of Artificial Sequence: Synthetic oligonucleotide
gucaagugagaggaggcuc

SEQ ID NO: 2572192 - RNA, 19 nt, Artificial Sequence
  Description of Artificial Sequence: Synthetic oligonucleotide
gguaacugggaaccacaug

SEQ ID NO: 2572193 - RNA, 19 nt, Artificial Sequence
  Description of Artificial Sequence: Synthetic oligonucleotide
uugaguggggaguggggua

SEQ ID NO: 2572194 - RNA, 19 nt, Artificial Sequence
  Description of Artificial Sequence: Synthetic oligonucleotide
gacucaguuccucuggaau

SEQ ID NO: 2572195 - RNA, 19 nt, Artificial Sequence
  Description of Artificial Sequence: Synthetic oligonucleotide
cacacacacacaaacaauu

SEQ ID NO: 2572196 - RNA, 19 nt, Artificial Sequence
  Description of Artificial Sequence: Synthetic oligonucleotide
auuagauuucaaagaugaa

SEQ ID NO: 2572197 - RNA, 19 nt, Artificial Sequence
  Description of Artificial Sequence: Synthetic oligonucleotide
cuggcauugcuugccuagg

SEQ ID NO: 2572198 - RNA, 19 nt, Artificial Sequence
  Description of Artificial Sequence: Synthetic oligonucleotide
gcaauaucugagagguggg

SEQ ID NO: 2572199 - RNA, 19 nt, Artificial Sequence
  Description of Artificial Sequence: Synthetic oligonucleotide
ccuguguuacacauacaug

SEQ ID NO: 2572200 - RNA, 19 nt, Artificial Sequence
  Description of Artificial Sequence: Synthetic oligonucleotide
cgagucuuuggcuagugac

SEQ ID NO: 2572201 - RNA, 19 nt, Artificial Sequence
  Description of Artificial Sequence: Synthetic oligonucleotide
cuagguaagggguguuuaa

SEQ ID NO: 2572202 - RNA, 19 nt, Artificial Sequence
  Description of Artificial Sequence: Synthetic oligonucleotide
cuuagccaagggagagcag

SEQ ID NO: 2572203 - RNA, 19 nt, Artificial Sequence
  Description of Artificial Sequence: Synthetic oligonucleotide
caaggcaauccaauuugaa

SEQ ID NO: 2572204 - RNA, 19 nt, Artificial Sequence
  Description of Artificial Sequence: Synthetic oligonucleotide
aagggguguuuaaaccccu

SEQ ID NO: 2572205 - RNA, 19 nt, Artificial Sequence
  Description of Artificial Sequence: Synthetic oligonucleotide
ugggguaacugggaaccac

SEQ ID NO: 2572206 - RNA, 19 nt, Artificial Sequence
  Description of Artificial Sequence: Synthetic oligonucleotide
gagagguggggugaugcca

SEQ ID NO: 2572207 - RNA, 19 nt, Artificial Sequence
  Description of Artificial Sequence: Synthetic oligonucleotide
uaggugggucagagucugg

SEQ ID NO: 2572208 - RNA, 19 nt, Artificial Sequence
  Description of Artificial Sequence: Synthetic oligonucleotide
aguucagcaaaugcuuguu

SEQ ID NO: 2572209 - RNA, 19 nt, Artificial Sequence
  Description of Artificial Sequence: Synthetic oligonucleotide
ugaauacaaggggcacccc

SEQ ID NO: 2572210 - RNA, 19 nt, Artificial Sequence
  Description of Artificial Sequence: Synthetic oligonucleotide
agccaagggagagcaguuc

SEQ ID NO: 2572211 - RNA, 19 nt, Artificial Sequence
  Description of Artificial Sequence: Synthetic oligonucleotide
uucuccccuugccucgaca

SEQ ID NO: 2572212 - RNA, 19 nt, Artificial Sequence
  Description of Artificial Sequence: Synthetic oligonucleotide
acacacacacacaaacaau

SEQ ID NO: 2572213 - RNA, 19 nt, Artificial Sequence
  Description of Artificial Sequence: Synthetic oligonucleotide
uagccaagggagagcaguu

SEQ ID NO: 2572214 - RNA, 19 nt, Artificial Sequence
  Description of Artificial Sequence: Synthetic oligonucleotide
gaggcaacacuggcauugc

SEQ ID NO: 2572215 - RNA, 19 nt, Artificial Sequence
  Description of Artificial Sequence: Synthetic oligonucleotide
guguuuaaaccccuguguu

SEQ ID NO: 2572216 - RNA, 19 nt, Artificial Sequence
  Description of Artificial Sequence: Synthetic oligonucleotide
gagucuuuggcuagugacu

SEQ ID NO: 2572217 - RNA, 19 nt, Artificial Sequence
  Description of Artificial Sequence: Synthetic oligonucleotide
gaggcuccccaguccuuag

SEQ ID NO: 2572218 - RNA, 19 nt, Artificial Sequence
  Description of Artificial Sequence: Synthetic oligonucleotide
uccuuaggccugacucugu

SEQ ID NO: 2572219 - RNA, 19 nt, Artificial Sequence
  Description of Artificial Sequence: Synthetic oligonucleotide
auacaaggggcaccccuua

SEQ ID NO: 2572220 - RNA, 19 nt, Artificial Sequence
  Description of Artificial Sequence: Synthetic oligonucleotide
caagugagaggaggcuccc

SEQ ID NO: 2572221 - RNA, 19 nt, Artificial Sequence
  Description of Artificial Sequence: Synthetic oligonucleotide
cacaaacaauuagauuuca

SEQ ID NO: 2572222 - RNA, 19 nt, Artificial Sequence
  Description of Artificial Sequence: Synthetic oligonucleotide
gugacucaguuccucugga

SEQ ID NO: 2572223 - RNA, 19 nt, Artificial Sequence
  Description of Artificial Sequence: Synthetic oligonucleotide
gccaauuaucagguuuggg

SEQ ID NO: 2572224 - RNA, 19 nt, Artificial Sequence
  Description of Artificial Sequence: Synthetic oligonucleotide
agucaggaccccaaagcaa

SEQ ID NO: 2572225 - RNA, 19 nt, Artificial Sequence
  Description of Artificial Sequence: Synthetic oligonucleotide
gcaaaugcuuguucccuca

SEQ ID NO: 2572226 - RNA, 19 nt, Artificial Sequence
  Description of Artificial Sequence: Synthetic oligonucleotide
ccugacucuguccuuggac

SEQ ID NO: 2572227 - RNA, 19 nt, Artificial Sequence
  Description of Artificial Sequence: Synthetic oligonucleotide
cagggaggcaacacuggca

SEQ ID NO: 2572228 - RNA, 19 nt, Artificial Sequence
  Description of Artificial Sequence: Synthetic oligonucleotide
agguuugggaggucaccaa

SEQ ID NO: 2572229 - RNA, 19 nt, Artificial Sequence
  Description of Artificial Sequence: Synthetic oligonucleotide
gcuuguucccucagcaagc

SEQ ID NO: 2572230 - RNA, 19 nt, Artificial Sequence
  Description of Artificial Sequence: Synthetic oligonucleotide
gaguucuugaguggggagu

SEQ ID NO: 2572231 - RNA, 19 nt, Artificial Sequence
  Description of Artificial Sequence: Synthetic oligonucleotide
aggccugacucuguccuug

SEQ ID NO: 2572232 - RNA, 19 nt, Artificial Sequence
  Description of Artificial Sequence: Synthetic oligonucleotide
ccccaaagcaaggaaacac

SEQ ID NO: 2572233 - RNA, 19 nt, Artificial Sequence
  Description of Artificial Sequence: Synthetic oligonucleotide
aaccgagucuuuggcuagu

SEQ ID NO: 2572234 - RNA, 19 nt, Artificial Sequence
  Description of Artificial Sequence: Synthetic oligonucleotide
cuagugacucaguuccucu

SEQ ID NO: 2572235 - RNA, 19 nt, Artificial Sequence
  Description of Artificial Sequence: Synthetic oligonucleotide
cagaguucuugagugggga

SEQ ID NO: 2572236 - RNA, 19 nt, Artificial Sequence
  Description of Artificial Sequence: Synthetic oligonucleotide
gcaagcccaagaauuaaga

SEQ ID NO: 2572237 - RNA, 19 nt, Artificial Sequence
  Description of Artificial Sequence: Synthetic oligonucleotide
cagguuugggaggucacca

SEQ ID NO: 2572238 - RNA, 19 nt, Artificial Sequence
  Description of Artificial Sequence: Synthetic oligonucleotide
agagguggggugaugccaa

SEQ ID NO: 2572239 - RNA, 19 nt, Artificial Sequence
  Description of Artificial Sequence: Synthetic oligonucleotide
gguggggugaugccaauua

SEQ ID NO: 2572240 - RNA, 19 nt, Artificial Sequence
  Description of Artificial Sequence: Synthetic oligonucleotide
guggggagugggguaacug

SEQ ID NO: 2572241 - RNA, 19 nt, Artificial Sequence
  Description of Artificial Sequence: Synthetic oligonucleotide
ugaugccaauuaucagguu

SEQ ID NO: 2572242 - RNA, 19 nt, Artificial Sequence
  Description of Artificial Sequence: Synthetic oligonucleotide
aggcaacacuggcauugcu

SEQ ID NO: 2572243 - RNA, 19 nt, Artificial Sequence
  Description of Artificial Sequence: Synthetic oligonucleotide
gagcaauaucugagaggug

SEQ ID NO: 2572244 - RNA, 19 nt, Artificial Sequence
  Description of Artificial Sequence: Synthetic oligonucleotide
agggacaacugagucugaa

SEQ ID NO: 2572245 - RNA, 19 nt, Artificial Sequence
  Description of Artificial Sequence: Synthetic oligonucleotide
guggcccugcccaggacag

SEQ ID NO: 2572246 - RNA, 19 nt, Artificial Sequence
  Description of Artificial Sequence: Synthetic oligonucleotide
uuccucagucaggacccca

SEQ ID NO: 2572247 - RNA, 19 nt, Artificial Sequence
  Description of Artificial Sequence: Synthetic oligonucleotide
agcccuagguaaggggugu

SEQ ID NO: 2572248 - RNA, 19 nt, Artificial Sequence
  Description of Artificial Sequence: Synthetic oligonucleotide
gcugagguaggugggucag

SEQ ID NO: 2572249 - RNA, 19 nt, Artificial Sequence
  Description of Artificial Sequence: Synthetic oligonucleotide
ggcccugcccaggacaggg

SEQ ID NO: 2572250 - RNA, 19 nt, Artificial Sequence
  Description of Artificial Sequence: Synthetic oligonucleotide
cuugccucgacaucagcuu

SEQ ID NO: 2572251 - RNA, 19 nt, Artificial Sequence
  Description of Artificial Sequence: Synthetic oligonucleotide
gucaccaaggcaauccaau

SEQ ID NO: 2572252 - RNA, 19 nt, Artificial Sequence
  Description of Artificial Sequence: Synthetic oligonucleotide
accgagucuuuggcuagug

SEQ ID NO: 2572253 - RNA, 19 nt, Artificial Sequence
  Description of Artificial Sequence: Synthetic oligonucleotide
aacugagucugaagcccua

SEQ ID NO: 2572254 - RNA, 19 nt, Artificial Sequence
  Description of Artificial Sequence: Synthetic oligonucleotide
ggaaaccgagucuuuggcu

SEQ ID NO: 2572255 - RNA, 19 nt, Artificial Sequence
  Description of Artificial Sequence: Synthetic oligonucleotide
cuggaauaagcucuaccuu

SEQ ID NO: 2572256 - RNA, 19 nt, Artificial Sequence
  Description of Artificial Sequence: Synthetic oligonucleotide
ggcauugcuugccuaggaa

SEQ ID NO: 2572257 - RNA, 19 nt, Artificial Sequence
  Description of Artificial Sequence: Synthetic oligonucleotide
uccugagguuggagcaaua

SEQ ID NO: 2572258 - RNA, 19 nt, Artificial Sequence
  Description of Artificial Sequence: Synthetic oligonucleotide
ggagugggguaacugggaa

SEQ ID NO: 2572259 - RNA, 19 nt, Artificial Sequence
  Description of Artificial Sequence: Synthetic oligonucleotide
cuugaguggggaguggggu

SEQ ID NO: 2572260 - RNA, 19 nt, Artificial Sequence
  Description of Artificial Sequence: Synthetic oligonucleotide
augcacacacacacacaca

SEQ ID NO: 2572261 - RNA, 19 nt, Artificial Sequence
  Description of Artificial Sequence: Synthetic oligonucleotide
uuaucagguuugggagguc

SEQ ID NO: 2572262 - RNA, 19 nt, Artificial Sequence
  Description of Artificial Sequence: Synthetic oligonucleotide
ggugggucagagucugguc

SEQ ID NO: 2572263 - RNA, 19 nt, Artificial Sequence
  Description of Artificial Sequence: Synthetic oligonucleotide
gcuagugacucaguuccuc

SEQ ID NO: 2572264 - RNA, 19 nt, Artificial Sequence
  Description of Artificial Sequence: Synthetic oligonucleotide
caacugagucugaagcccu

SEQ ID NO: 2572265 - RNA, 19 nt, Artificial Sequence
  Description of Artificial Sequence: Synthetic oligonucleotide
ggccugacucuguccuugg

SEQ ID NO: 2572266 - RNA, 19 nt, Artificial Sequence
  Description of Artificial Sequence: Synthetic oligonucleotide
aguggggagugggguaacu

SEQ ID NO: 2572267 - RNA, 19 nt, Artificial Sequence
  Description of Artificial Sequence: Synthetic oligonucleotide
ccuuagccaagggagagca

SEQ ID NO: 2572268 - RNA, 19 nt, Artificial Sequence
  Description of Artificial Sequence: Synthetic oligonucleotide
ccaagggagagcaguucuc

SEQ ID NO: 2572269 - RNA, 19 nt, Artificial Sequence
  Description of Artificial Sequence: Synthetic oligonucleotide
ggaccccaaagcaaggaaa

SEQ ID NO: 2572270 - RNA, 19 nt, Artificial Sequence
  Description of Artificial Sequence: Synthetic oligonucleotide
ccaaggcaauccaauuuga

SEQ ID NO: 2572271 - RNA, 19 nt, Artificial Sequence
  Description of Artificial Sequence: Synthetic oligonucleotide
gggguaacugggaaccaca

SEQ ID NO: 2572272 - RNA, 19 nt, Artificial Sequence
  Description of Artificial Sequence: Synthetic oligonucleotide
uucccucagcaagcccaag

SEQ ID NO: 2572273 - RNA, 19 nt, Artificial Sequence
  Description of Artificial Sequence: Synthetic oligonucleotide
gcuugccuaggaacuuggg

SEQ ID NO: 2572274 - RNA, 19 nt, Artificial Sequence
  Description of Artificial Sequence: Synthetic oligonucleotide
gcacauucucucucacaca

SEQ ID NO: 2572275 - RNA, 19 nt, Artificial Sequence
  Description of Artificial Sequence: Synthetic oligonucleotide
caccaaggcaauccaauuu

SEQ ID NO: 2572276 - RNA, 19 nt, Artificial Sequence
  Description of Artificial Sequence: Synthetic oligonucleotide
uaggccugacucuguccuu

SEQ ID NO: 2572277 - RNA, 19 nt, Artificial Sequence
  Description of Artificial Sequence: Synthetic oligonucleotide
guugaggcugggucagagu

SEQ ID NO: 2572278 - RNA, 19 nt, Artificial Sequence
  Description of Artificial Sequence: Synthetic oligonucleotide
cacaccccauacaaaccua

SEQ ID NO: 2572279 - RNA, 19 nt, Artificial Sequence
  Description of Artificial Sequence: Synthetic oligonucleotide
cagcugagguagguggguc

SEQ ID NO: 2572280 - RNA, 19 nt, Artificial Sequence
  Description of Artificial Sequence: Synthetic oligonucleotide
caggaccccaaagcaagga

SEQ ID NO: 2572281 - RNA, 19 nt, Artificial Sequence
  Description of Artificial Sequence: Synthetic oligonucleotide
ccuuaggccugacucuguc

SEQ ID NO: 2572282 - RNA, 19 nt, Artificial Sequence
  Description of Artificial Sequence: Synthetic oligonucleotide
gccaagggagagcaguucu

SEQ ID NO: 2572283 - RNA, 19 nt, Artificial Sequence
  Description of Artificial Sequence: Synthetic oligonucleotide
gagguaggugggucagagu

SEQ ID NO: 2572284 - RNA, 19 nt, Artificial Sequence
  Description of Artificial Sequence: Synthetic oligonucleotide
gugcaugcacacacacaca

SEQ ID NO: 2572285 - RNA, 19 nt, Artificial Sequence
  Description of Artificial Sequence: Synthetic oligonucleotide
ccccauacaaaccuaaguu

SEQ ID NO: 2572286 - RNA, 19 nt, Artificial Sequence
  Description of Artificial Sequence: Synthetic oligonucleotide
uggcccugcccaggacagg

SEQ ID NO: 2572287 - RNA, 19 nt, Artificial Sequence
  Description of Artificial Sequence: Synthetic oligonucleotide
cagcaaaugcuuguucccu

SEQ ID NO: 2572288 - RNA, 19 nt, Artificial Sequence
  Description of Artificial Sequence: Synthetic oligonucleotide
cagcaagcccaagaauuaa

SEQ ID NO: 2572289 - RNA, 19 nt, Artificial Sequence
  Description of Artificial Sequence: Synthetic oligonucleotide
cccauacaaaccuaaguuu

SEQ ID NO: 2572290 - RNA, 19 nt, Artificial Sequence
  Description of Artificial Sequence: Synthetic oligonucleotide
gggguguuuaaaccccugu

SEQ ID NO: 2572291 - RNA, 19 nt, Artificial Sequence
  Description of Artificial Sequence: Synthetic oligonucleotide
cccaggacagggaggcaac

SEQ ID NO: 2572292 - RNA, 19 nt, Artificial Sequence
  Description of Artificial Sequence: Synthetic oligonucleotide
guggggugaugccaauuau

SEQ ID NO: 2572293 - RNA, 19 nt, Artificial Sequence
  Description of Artificial Sequence: Synthetic oligonucleotide
auucucucucacacacaua

SEQ ID NO: 2572294 - RNA, 19 nt, Artificial Sequence
  Description of Artificial Sequence: Synthetic oligonucleotide
guucccucagcaagcccaa

SEQ ID NO: 2572295 - RNA, 19 nt, Artificial Sequence
  Description of Artificial Sequence: Synthetic oligonucleotide
ccuugccucgacaucagcu

SEQ ID NO: 2572296 - RNA, 19 nt, Artificial Sequence
  Description of Artificial Sequence: Synthetic oligonucleotide
gcccaagaauuaagaguug

SEQ ID NO: 2572297 - RNA, 19 nt, Artificial Sequence
  Description of Artificial Sequence: Synthetic oligonucleotide
gcaauccaauuugaauaaa

SEQ ID NO: 2572298 - RNA, 19 nt, Artificial Sequence
  Description of Artificial Sequence: Synthetic oligonucleotide
cccucagcaagcccaagaa

SEQ ID NO: 2572299 - RNA, 19 nt, Artificial Sequence
  Description of Artificial Sequence: Synthetic oligonucleotide
cuuuggcuagugacucagu

SEQ ID NO: 2572300 - RNA, 19 nt, Artificial Sequence
  Description of Artificial Sequence: Synthetic oligonucleotide
guucuccccuugccucgac

SEQ ID NO: 2572301 - RNA, 19 nt, Artificial Sequence
  Description of Artificial Sequence: Synthetic oligonucleotide
ggucaagugagaggaggcu

SEQ ID NO: 2572302 - RNA, 19 nt, Artificial Sequence
  Description of Artificial Sequence: Synthetic oligonucleotide
gcaugcacacacacacaca

SEQ ID NO: 2572303 - RNA, 19 nt, Artificial Sequence
  Description of Artificial Sequence: Synthetic oligonucleotide
ggcaccccuuacucccagc

SEQ ID NO: 2572304 - RNA, 19 nt, Artificial Sequence
  Description of Artificial Sequence: Synthetic oligonucleotide
ccuaaguuuugugcaugca

SEQ ID NO: 2572305 - RNA, 19 nt, Artificial Sequence
  Description of Artificial Sequence: Synthetic oligonucleotide
gggcaccccuuacucccag

SEQ ID NO: 2572306 - RNA, 19 nt, Artificial Sequence
  Description of Artificial Sequence: Synthetic oligonucleotide
ggucaccaaggcaauccaa

SEQ ID NO: 2572307 - RNA, 19 nt, Artificial Sequence
  Description of Artificial Sequence: Synthetic oligonucleotide
gcaccccuuacucccagcu

SEQ ID NO: 2572308 - RNA, 19 nt, Artificial Sequence
  Description of Artificial Sequence: Synthetic oligonucleotide
cacuggcauugcuugccua

SEQ ID NO: 2572309 - RNA, 19 nt, Artificial Sequence
  Description of Artificial Sequence: Synthetic oligonucleotide
gagggacaacugagucuga

SEQ ID NO: 2572310 - RNA, 19 nt, Artificial Sequence
  Description of Artificial Sequence: Synthetic oligonucleotide
cuuggacaccuuccucagu

SEQ ID NO: 2572311 - RNA, 19 nt, Artificial Sequence
  Description of Artificial Sequence: Synthetic oligonucleotide
ggcaacacuggcauugcuu

SEQ ID NO: 2572312 - RNA, 19 nt, Artificial Sequence
  Description of Artificial Sequence: Synthetic oligonucleotide
cugagguaggugggucaga

SEQ ID NO: 2572313 - RNA, 19 nt, Artificial Sequence
  Description of Artificial Sequence: Synthetic oligonucleotide
caagggaaaccgagucuuu

SEQ ID NO: 2572314 - RNA, 19 nt, Artificial Sequence
  Description of Artificial Sequence: Synthetic oligonucleotide
ccuagguaagggguguuua

SEQ ID NO: 2572315 - RNA, 19 nt, Artificial Sequence
  Description of Artificial Sequence: Synthetic oligonucleotide
ccccuugccucgacaucag

SEQ ID NO: 2572316 - RNA, 19 nt, Artificial Sequence
  Description of Artificial Sequence: Synthetic oligonucleotide
ggucagagucuggucaagu

SEQ ID NO: 2572317 - RNA, 19 nt, Artificial Sequence
  Description of Artificial Sequence: Synthetic oligonucleotide
gccuaggaacuugggacaa

SEQ ID NO: 2572318 - RNA, 19 nt, Artificial Sequence
  Description of Artificial Sequence: Synthetic oligonucleotide
gcacacacacacacacaaa

SEQ ID NO: 2572319 - RNA, 19 nt, Artificial Sequence
  Description of Artificial Sequence: Synthetic oligonucleotide
guccugagguuggagcaau

SEQ ID NO: 2572320 - RNA, 19 nt, Artificial Sequence
  Description of Artificial Sequence: Synthetic oligonucleotide
ccgagucuuuggcuaguga

SEQ ID NO: 2572321 - RNA, 19 nt, Artificial Sequence
  Description of Artificial Sequence: Synthetic oligonucleotide
ggguaacugggaaccacau

SEQ ID NO: 2572322 - RNA, 19 nt, Artificial Sequence
  Description of Artificial Sequence: Synthetic oligonucleotide
ccucgacaucagcuucuuc

SEQ ID NO: 2572323 - RNA, 19 nt, Artificial Sequence
  Description of Artificial Sequence: Synthetic oligonucleotide
aggaggcuccccaguccuu

SEQ ID NO: 2572324 - RNA, 19 nt, Artificial Sequence
  Description of Artificial Sequence: Synthetic oligonucleotide
ccucagucaggaccccaaa

SEQ ID NO: 2572325 - RNA, 19 nt, Artificial Sequence
  Description of Artificial Sequence: Synthetic oligonucleotide
ccucagcaagcccaagaau

SEQ ID NO: 2572326 - RNA, 19 nt, Artificial Sequence
  Description of Artificial Sequence: Synthetic oligonucleotide
gggaaccacaugacugaau

SEQ ID NO: 2572327 - RNA, 19 nt, Artificial Sequence
  Description of Artificial Sequence: Synthetic oligonucleotide
ccaggacagggaggcaaca

SEQ ID NO: 2572328 - RNA, 19 nt, Artificial Sequence
  Description of Artificial Sequence: Synthetic oligonucleotide
ggggcaccccuuacuccca

SEQ ID NO: 2572329 - RNA, 19 nt, Artificial Sequence
  Description of Artificial Sequence: Synthetic oligonucleotide
ccccuguguuacacauaca

SEQ ID NO: 2572330 - RNA, 19 nt, Artificial Sequence
  Description of Artificial Sequence: Synthetic oligonucleotide
gggaggucaccaaggcaau

SEQ ID NO: 2572331 - RNA, 19 nt, Artificial Sequence
  Description of Artificial Sequence: Synthetic oligonucleotide
ggagagcaguucuccccuu

SEQ ID NO: 2572332 - RNA, 19 nt, Artificial Sequence
  Description of Artificial Sequence: Synthetic oligonucleotide
ccaguccuuaggccugacu

SEQ ID NO: 2572333 - RNA, 19 nt, Artificial Sequence
  Description of Artificial Sequence: Synthetic oligonucleotide
ccagcugagguaggugggu

SEQ ID NO: 2572334 - RNA, 19 nt, Artificial Sequence
  Description of Artificial Sequence: Synthetic oligonucleotide
gggaggcaacacuggcauu

SEQ ID NO: 2572335 - RNA, 19 nt, Artificial Sequence
  Description of Artificial Sequence: Synthetic oligonucleotide
gcccugcccaggacaggga

SEQ ID NO: 2572336 - RNA, 19 nt, Artificial Sequence
  Description of Artificial Sequence: Synthetic oligonucleotide
ccccaguccuuaggccuga

SEQ ID NO: 2572337 - RNA, 19 nt, Artificial Sequence
  Description of Artificial Sequence: Synthetic oligonucleotide
ccuaggaacuugggacaau

SEQ ID NO: 2572338 - RNA, 19 nt, Artificial Sequence
  Description of Artificial Sequence: Synthetic oligonucleotide
gccucgacaucagcuucuu

SEQ ID NO: 2572339 - RNA, 19 nt, Artificial Sequence
  Description of Artificial Sequence: Synthetic oligonucleotide
cccuagguaagggguguuu

SEQ ID NO: 2572340 - RNA, 19 nt, Artificial Sequence
  Description of Artificial Sequence: Synthetic oligonucleotide
gcccuagguaagggguguu

SEQ ID NO: 2572341 - RNA, 19 nt, Artificial Sequence
  Description of Artificial Sequence: Synthetic oligonucleotide
aaccauacaaguuaagucc

SEQ ID NO: 2572342 - RNA, 19 nt, Artificial Sequence
  Description of Artificial Sequence: Synthetic oligonucleotide
ucuuacucaaccaaaaccc

SEQ ID NO: 2572343 - RNA, 19 nt, Artificial Sequence
  Description of Artificial Sequence: Synthetic oligonucleotide
aacauuaacauccagguua

SEQ ID NO: 2572344 - RNA, 19 nt, Artificial Sequence
  Description of Artificial Sequence: Synthetic oligonucleotide
acaaguuaaguccugaggg

SEQ ID NO: 2572345 - RNA, 19 nt, Artificial Sequence
  Description of Artificial Sequence: Synthetic oligonucleotide
auuccauaaacguagcgcc

SEQ ID NO: 2572346 - RNA, 19 nt, Artificial Sequence
  Description of Artificial Sequence: Synthetic oligonucleotide
auaagaauucuccacacgg

SEQ ID NO: 2572347 - RNA, 19 nt, Artificial Sequence
  Description of Artificial Sequence: Synthetic oligonucleotide
gaaacaaggaagcuacucg

SEQ ID NO: 2572348 - RNA, 19 nt, Artificial Sequence
  Description of Artificial Sequence: Synthetic oligonucleotide
aaauugaugggccaaagau

SEQ ID NO: 2572349 - RNA, 19 nt, Artificial Sequence
  Description of Artificial Sequence: Synthetic oligonucleotide
uuugaugaaaacaucuuga

SEQ ID NO: 2572350 - RNA, 19 nt, Artificial Sequence
  Description of Artificial Sequence: Synthetic oligonucleotide
aaaaugagggcaccacacc

SEQ ID NO: 2572351 - RNA, 19 nt, Artificial Sequence
  Description of Artificial Sequence: Synthetic oligonucleotide
uuuagaacugccaagcaac

SEQ ID NO: 2572352 - RNA, 19 nt, Artificial Sequence
  Description of Artificial Sequence: Synthetic oligonucleotide
uucuuacucaaccaaaacc

SEQ ID NO: 2572353 - RNA, 19 nt, Artificial Sequence
  Description of Artificial Sequence: Synthetic oligonucleotide
cauaagauagcaucggcgg

SEQ ID NO: 2572354 - RNA, 19 nt, Artificial Sequence
  Description of Artificial Sequence: Synthetic oligonucleotide
uacaaguuaaguccugagg

SEQ ID NO: 2572355 - RNA, 19 nt, Artificial Sequence
  Description of Artificial Sequence: Synthetic oligonucleotide
aaugcuguacucauccugc

SEQ ID NO: 2572356 - RNA, 19 nt, Artificial Sequence
  Description of Artificial Sequence: Synthetic oligonucleotide
uuugcaaauacacauuguc

SEQ ID NO: 2572357 - RNA, 19 nt, Artificial Sequence
  Description of Artificial Sequence: Synthetic oligonucleotide
aaguauucuccacuguagg

SEQ ID NO: 2572358 - RNA, 19 nt, Artificial Sequence
  Description of Artificial Sequence: Synthetic oligonucleotide
ucuacuuuagaacugccaa

SEQ ID NO: 2572359 - RNA, 19 nt, Artificial Sequence
  Description of Artificial Sequence: Synthetic oligonucleotide
cuucccuugaauuaacugc

SEQ ID NO: 2572360 - RNA, 19 nt, Artificial Sequence
  Description of Artificial Sequence: Synthetic oligonucleotide
aaggaagcuacucgaugcc

SEQ ID NO: 2572361 - RNA, 19 nt, Artificial Sequence
  Description of Artificial Sequence: Synthetic oligonucleotide
gaugaaaacaucuugaguu

SEQ ID NO: 2572362 - RNA, 19 nt, Artificial Sequence
  Description of Artificial Sequence: Synthetic oligonucleotide
uaaguauucuccacuguag

SEQ ID NO: 2572363 - RNA, 19 nt, Artificial Sequence
  Description of Artificial Sequence: Synthetic oligonucleotide
agcagaugauuccauaaac

SEQ ID NO: 2572364 - RNA, 19 nt, Artificial Sequence
  Description of Artificial Sequence: Synthetic oligonucleotide
uugaugaaaacaucuugag

SEQ ID NO: 2572365 - RNA, 19 nt, Artificial Sequence
  Description of Artificial Sequence: Synthetic oligonucleotide
uuugccaagagucacuguc

SEQ ID NO: 2572366 - RNA, 19 nt, Artificial Sequence
  Description of Artificial Sequence: Synthetic oligonucleotide
aucuugaguuaacugauuc

SEQ ID NO: 2572367 - RNA, 19 nt, Artificial Sequence
  Description of Artificial Sequence: Synthetic oligonucleotide
auaguuggcaaccauacaa

SEQ ID NO: 2572368 - RNA, 19 nt, Artificial Sequence
  Description of Artificial Sequence: Synthetic oligonucleotide
aaacguagcgccccaggac

SEQ ID NO: 2572369 - RNA, 19 nt, Artificial Sequence
  Description of Artificial Sequence: Synthetic oligonucleotide
gaugaaacucaucuuugcc

SEQ ID NO: 2572370 - RNA, 19 nt, Artificial Sequence
  Description of Artificial Sequence: Synthetic oligonucleotide
acagcagaaacaaggaagc

SEQ ID NO: 2572371 - RNA, 19 nt, Artificial Sequence
  Description of Artificial Sequence: Synthetic oligonucleotide
uagauguagaugaaacuca

SEQ ID NO: 2572372 - RNA, 19 nt, Artificial Sequence
  Description of Artificial Sequence: Synthetic oligonucleotide
aauuaacugcaccucucag

SEQ ID NO: 2572373 - RNA, 19 nt, Artificial Sequence
  Description of Artificial Sequence: Synthetic oligonucleotide
aguucuacuuuagaacugc

SEQ ID NO: 2572374 - RNA, 19 nt, Artificial Sequence
  Description of Artificial Sequence: Synthetic oligonucleotide
aaaugagggcaccacacca

SEQ ID NO: 2572375 - RNA, 19 nt, Artificial Sequence
  Description of Artificial Sequence: Synthetic oligonucleotide
caaggaagcuacucgaugc

SEQ ID NO: 2572376 - RNA, 19 nt, Artificial Sequence
  Description of Artificial Sequence: Synthetic oligonucleotide
uuggcaaccauacaaguua

SEQ ID NO: 2572377 - RNA, 19 nt, Artificial Sequence
  Description of Artificial Sequence: Synthetic oligonucleotide
aaguuaaguccugaggguc

SEQ ID NO: 2572378 - RNA, 19 nt, Artificial Sequence
  Description of Artificial Sequence: Synthetic oligonucleotide
aaugcauacagcagaaaca

SEQ ID NO: 2572379 - RNA, 19 nt, Artificial Sequence
  Description of Artificial Sequence: Synthetic oligonucleotide
aucguagccuuccaggaac

SEQ ID NO: 2572380 - RNA, 19 nt, Artificial Sequence
  Description of Artificial Sequence: Synthetic oligonucleotide
uucccuugaauuaacugca

SEQ ID NO: 2572381 - RNA, 19 nt, Artificial Sequence
  Description of Artificial Sequence: Synthetic oligonucleotide
aaaacaucuugaguuaacu

SEQ ID NO: 2572382 - RNA, 19 nt, Artificial Sequence
  Description of Artificial Sequence: Synthetic oligonucleotide
aauugaugggccaaagaug

SEQ ID NO: 2572383 - RNA, 19 nt, Artificial Sequence
  Description of Artificial Sequence: Synthetic oligonucleotide
ugaugaaaacaucuugagu

SEQ ID NO: 2572384 - RNA, 19 nt, Artificial Sequence
  Description of Artificial Sequence: Synthetic oligonucleotide
gauucucucuagcagauga

SEQ ID NO: 2572385 - RNA, 19 nt, Artificial Sequence
  Description of Artificial Sequence: Synthetic oligonucleotide
uacuuuagaacugccaagc

SEQ ID NO: 2572386 - RNA, 19 nt, Artificial Sequence
  Description of Artificial Sequence: Synthetic oligonucleotide
caaauacacauugucaccc

SEQ ID NO: 2572387 - RNA, 19 nt, Artificial Sequence
  Description of Artificial Sequence: Synthetic oligonucleotide
ugauuccauaaacguagcg

SEQ ID NO: 2572388 - RNA, 19 nt, Artificial Sequence
  Description of Artificial Sequence: Synthetic oligonucleotide
uugaauuaacugcaccucu

SEQ ID NO: 2572389 - RNA, 19 nt, Artificial Sequence
  Description of Artificial Sequence: Synthetic oligonucleotide
uaguuggcaaccauacaag

SEQ ID NO: 2572390 - RNA, 19 nt, Artificial Sequence
  Description of Artificial Sequence: Synthetic oligonucleotide
cacuagauguagaugaaac

SEQ ID NO: 2572391 - RNA, 19 nt, Artificial Sequence
  Description of Artificial Sequence: Synthetic oligonucleotide
ugaaacucaucuuugccaa

SEQ ID NO: 2572392 - RNA, 19 nt, Artificial Sequence
  Description of Artificial Sequence: Synthetic oligonucleotide
aggaucguagccuuccagg

SEQ ID NO: 2572393 - RNA, 19 nt, Artificial Sequence
  Description of Artificial Sequence: Synthetic oligonucleotide
uguucuuacucaaccaaaa

SEQ ID NO: 2572394 - RNA, 19 nt, Artificial Sequence
  Description of Artificial Sequence: Synthetic oligonucleotide
aacguagcgccccaggacu

SEQ ID NO: 2572395 - RNA, 19 nt, Artificial Sequence
  Description of Artificial Sequence: Synthetic oligonucleotide
acauaagauagcaucggcg

SEQ ID NO: 2572396 - RNA, 19 nt, Artificial Sequence
  Description of Artificial Sequence: Synthetic oligonucleotide
uguccaugagacaucuugc

SEQ ID NO: 2572397 - RNA, 19 nt, Artificial Sequence
  Description of Artificial Sequence: Synthetic oligonucleotide
caaaaccuacccaggaggg

SEQ ID NO: 2572398 - RNA, 19 nt, Artificial Sequence
  Description of Artificial Sequence: Synthetic oligonucleotide
ugugcagauuauaaaaguu

SEQ ID NO: 2572399 - RNA, 19 nt, Artificial Sequence
  Description of Artificial Sequence: Synthetic oligonucleotide
acuagauguagaugaaacu

SEQ ID NO: 2572400 - RNA, 19 nt, Artificial Sequence
  Description of Artificial Sequence: Synthetic oligonucleotide
uuccacaaauugaugggcc

SEQ ID NO: 2572401 - RNA, 19 nt, Artificial Sequence
  Description of Artificial Sequence: Synthetic oligonucleotide
ucuucccuugaauuaacug

SEQ ID NO: 2572402 - RNA, 19 nt, Artificial Sequence
  Description of Artificial Sequence: Synthetic oligonucleotide
guguccaugagacaucuug

SEQ ID NO: 2572403 - RNA, 19 nt, Artificial Sequence
  Description of Artificial Sequence: Synthetic oligonucleotide
cauaagaauucuccacacg

SEQ ID NO: 2572404 - RNA, 19 nt, Artificial Sequence
  Description of Artificial Sequence: Synthetic oligonucleotide
gcauacagcagaaacaagg

SEQ ID NO: 2572405 - RNA, 19 nt, Artificial Sequence
  Description of Artificial Sequence: Synthetic oligonucleotide
guccacuagauguagauga

SEQ ID NO: 2572406 - RNA, 19 nt, Artificial Sequence
  Description of Artificial Sequence: Synthetic oligonucleotide
agggacauaguuggcaacc

SEQ ID NO: 2572407 - RNA, 19 nt, Artificial Sequence
  Description of Artificial Sequence: Synthetic oligonucleotide
uccaugagacaucuugccc

SEQ ID NO: 2572408 - RNA, 19 nt, Artificial Sequence
  Description of Artificial Sequence: Synthetic oligonucleotide
auaaacguagcgccccagg

SEQ ID NO: 2572409 - RNA, 19 nt, Artificial Sequence
  Description of Artificial Sequence: Synthetic oligonucleotide
ucuugaguuaacugauucu

SEQ ID NO: 2572410 - RNA, 19 nt, Artificial Sequence
  Description of Artificial Sequence: Synthetic oligonucleotide
ugaguuaacugauucucuc

SEQ ID NO: 2572411 - RNA, 19 nt, Artificial Sequence
  Description of Artificial Sequence: Synthetic oligonucleotide
aaaccuacccaggagggug

SEQ ID NO: 2572412 - RNA, 19 nt, Artificial Sequence
  Description of Artificial Sequence: Synthetic oligonucleotide
aacucaucuuugccaagag

SEQ ID NO: 2572413 - RNA, 19 nt, Artificial Sequence
  Description of Artificial Sequence: Synthetic oligonucleotide
uuagaagccaguguccaug

SEQ ID NO: 2572414 - RNA, 19 nt, Artificial Sequence
  Description of Artificial Sequence: Synthetic oligonucleotide
cuccacacggacaauuucc

SEQ ID NO: 2572415 - RNA, 19 nt, Artificial Sequence
  Description of Artificial Sequence: Synthetic oligonucleotide
agcaucggcggucuugccc

SEQ ID NO: 2572416 - RNA, 19 nt, Artificial Sequence
  Description of Artificial Sequence: Synthetic oligonucleotide
caaaacccaaaaccuaccc

SEQ ID NO: 2572417 - RNA, 19 nt, Artificial Sequence
  Description of Artificial Sequence: Synthetic oligonucleotide
cauccagguuaccagaacc

SEQ ID NO: 2572418 - RNA, 19 nt, Artificial Sequence
  Description of Artificial Sequence: Synthetic oligonucleotide
cucucuagcagaugauucc

SEQ ID NO: 2572419 - RNA, 19 nt, Artificial Sequence
  Description of Artificial Sequence: Synthetic oligonucleotide
ugaauuaacugcaccucuc

SEQ ID NO: 2572420 - RNA, 19 nt, Artificial Sequence
  Description of Artificial Sequence: Synthetic oligonucleotide
auagcaucggcggucuugc

SEQ ID NO: 2572421 - RNA, 19 nt, Artificial Sequence
  Description of Artificial Sequence: Synthetic oligonucleotide
uugaguuaacugauucucu

SEQ ID NO: 2572422 - RNA, 19 nt, Artificial Sequence
  Description of Artificial Sequence: Synthetic oligonucleotide
augccaagagcucacauaa

SEQ ID NO: 2572423 - RNA, 19 nt, Artificial Sequence
  Description of Artificial Sequence: Synthetic oligonucleotide
acauuaacauccagguuac

SEQ ID NO: 2572424 - RNA, 19 nt, Artificial Sequence
  Description of Artificial Sequence: Synthetic oligonucleotide
uaaacguagcgccccagga

SEQ ID NO: 2572425 - RNA, 19 nt, Artificial Sequence
  Description of Artificial Sequence: Synthetic oligonucleotide
uuguaaacauuaacaucca

SEQ ID NO: 2572426 - RNA, 19 nt, Artificial Sequence
  Description of Artificial Sequence: Synthetic oligonucleotide
aguauucuccacuguagga

SEQ ID NO: 2572427 - RNA, 19 nt, Artificial Sequence
  Description of Artificial Sequence: Synthetic oligonucleotide
acaaggaagcuacucgaug

SEQ ID NO: 2572428 - RNA, 19 nt, Artificial Sequence
  Description of Artificial Sequence: Synthetic oligonucleotide
uuacucaaccaaaacccaa

SEQ ID NO: 2572429 - RNA, 19 nt, Artificial Sequence
  Description of Artificial Sequence: Synthetic oligonucleotide
uguaggaucguagccuucc

SEQ ID NO: 2572430 - RNA, 19 nt, Artificial Sequence
  Description of Artificial Sequence: Synthetic oligonucleotide
ggaguuagaagccaguguc

SEQ ID NO: 2572431 - RNA, 19 nt, Artificial Sequence
  Description of Artificial Sequence: Synthetic oligonucleotide
gaauuaacugcaccucuca

SEQ ID NO: 2572432 - RNA, 19 nt, Artificial Sequence
  Description of Artificial Sequence: Synthetic oligonucleotide
ggcuggaaaaugcauacag

SEQ ID NO: 2572433 - RNA, 19 nt, Artificial Sequence
  Description of Artificial Sequence: Synthetic oligonucleotide
agcuacucgaugccaagag

SEQ ID NO: 2572434 - RNA, 19 nt, Artificial Sequence
  Description of Artificial Sequence: Synthetic oligonucleotide
cuguaaguauucuccacug

SEQ ID NO: 2572435 - RNA, 19 nt, Artificial Sequence
  Description of Artificial Sequence: Synthetic oligonucleotide
uuccauaaacguagcgccc

SEQ ID NO: 2572436 - RNA, 19 nt, Artificial Sequence
  Description of Artificial Sequence: Synthetic oligonucleotide
cacauaagauagcaucggc

SEQ ID NO: 2572437 - RNA, 19 nt, Artificial Sequence
  Description of Artificial Sequence: Synthetic oligonucleotide
uacacauugucaccccaga

SEQ ID NO: 2572438 - RNA, 19 nt, Artificial Sequence
  Description of Artificial Sequence: Synthetic oligonucleotide
uauucuccacuguaggauc

SEQ ID NO: 2572439 - RNA, 19 nt, Artificial Sequence
  Description of Artificial Sequence: Synthetic oligonucleotide
uccacaaauugaugggcca

SEQ ID NO: 2572440 - RNA, 19 nt, Artificial Sequence
  Description of Artificial Sequence: Synthetic oligonucleotide
gcucacauaagauagcauc

SEQ ID NO: 2572441 - RNA, 19 nt, Artificial Sequence
  Description of Artificial Sequence: Synthetic oligonucleotide
ugucuugcuguaaguauuc

SEQ ID NO: 2572442 - RNA, 19 nt, Artificial Sequence
  Description of Artificial Sequence: Synthetic oligonucleotide
uccauaaacguagcgcccc

SEQ ID NO: 2572443 - RNA, 19 nt, Artificial Sequence
  Description of Artificial Sequence: Synthetic oligonucleotide
caggcuggaaaaugcauac

SEQ ID NO: 2572444 - RNA, 19 nt, Artificial Sequence
  Description of Artificial Sequence: Synthetic oligonucleotide
auaagauagcaucggcggu

SEQ ID NO: 2572445 - RNA, 19 nt, Artificial Sequence
  Description of Artificial Sequence: Synthetic oligonucleotide
cuugaauuaacugcaccuc

SEQ ID NO: 2572446 - RNA, 19 nt, Artificial Sequence
  Description of Artificial Sequence: Synthetic oligonucleotide
ccaaaaccuacccaggagg

SEQ ID NO: 2572447 - RNA, 19 nt, Artificial Sequence
  Description of Artificial Sequence: Synthetic oligonucleotide
uagcagaugauuccauaaa

SEQ ID NO: 2572448 - RNA, 19 nt, Artificial Sequence
  Description of Artificial Sequence: Synthetic oligonucleotide
aguuggcaaccauacaagu

SEQ ID NO: 2572449 - RNA, 19 nt, Artificial Sequence
  Description of Artificial Sequence: Synthetic oligonucleotide
ccaauguucuuacucaacc

SEQ ID NO: 2572450 - RNA, 19 nt, Artificial Sequence
  Description of Artificial Sequence: Synthetic oligonucleotide
gcagaugauuccauaaacg

SEQ ID NO: 2572451 - RNA, 19 nt, Artificial Sequence
  Description of Artificial Sequence: Synthetic oligonucleotide
uaggaucguagccuuccag

SEQ ID NO: 2572452 - RNA, 19 nt, Artificial Sequence
  Description of Artificial Sequence: Synthetic oligonucleotide
cuuccacaaauugaugggc

SEQ ID NO: 2572453 - RNA, 19 nt, Artificial Sequence
  Description of Artificial Sequence: Synthetic oligonucleotide
uaagauagcaucggcgguc

SEQ ID NO: 2572454 - RNA, 19 nt, Artificial Sequence
  Description of Artificial Sequence: Synthetic oligonucleotide
guaaguauucuccacugua

SEQ ID NO: 2572455 - RNA, 19 nt, Artificial Sequence
  Description of Artificial Sequence: Synthetic oligonucleotide
cacaccauaugcccagagg

SEQ ID NO: 2572456 - RNA, 19 nt, Artificial Sequence
  Description of Artificial Sequence: Synthetic oligonucleotide
guucuuacucaaccaaaac

SEQ ID NO: 2572457 - RNA, 19 nt, Artificial Sequence
  Description of Artificial Sequence: Synthetic oligonucleotide
cucaaccaaaacccaaaac

SEQ ID NO: 2572458 - RNA, 19 nt, Artificial Sequence
  Description of Artificial Sequence: Synthetic oligonucleotide
gggccagggacauaguugg

SEQ ID NO: 2572459 - RNA, 19 nt, Artificial Sequence
  Description of Artificial Sequence: Synthetic oligonucleotide
uuucucaguuuauuugcaa

SEQ ID NO: 2572460 - RNA, 19 nt, Artificial Sequence
  Description of Artificial Sequence: Synthetic oligonucleotide
aggaguuagaagccagugu

SEQ ID NO: 2572461 - RNA, 19 nt, Artificial Sequence
  Description of Artificial Sequence: Synthetic oligonucleotide
agccaguucuacuuuagaa

SEQ ID NO: 2572462 - RNA, 19 nt, Artificial Sequence
  Description of Artificial Sequence: Synthetic oligonucleotide
guccaugagacaucuugcc

SEQ ID NO: 2572463 - RNA, 19 nt, Artificial Sequence
  Description of Artificial Sequence: Synthetic oligonucleotide
gugcagauuauaaaaguuc

SEQ ID NO: 2572464 - RNA, 19 nt, Artificial Sequence
  Description of Artificial Sequence: Synthetic oligonucleotide
ugcuguacucauccugccc

SEQ ID NO: 2572465 - RNA, 19 nt, Artificial Sequence
  Description of Artificial Sequence: Synthetic oligonucleotide
aaguauuucucaguuuauu

SEQ ID NO: 2572466 - RNA, 19 nt, Artificial Sequence
  Description of Artificial Sequence: Synthetic oligonucleotide
ucucuagcagaugauucca

SEQ ID NO: 2572467 - RNA, 19 nt, Artificial Sequence
  Description of Artificial Sequence: Synthetic oligonucleotide
gauagcaucggcggucuug

SEQ ID NO: 2572468 - RNA, 19 nt, Artificial Sequence
  Description of Artificial Sequence: Synthetic oligonucleotide
guagccuuccaggaacucg

SEQ ID NO: 2572469 - RNA, 19 nt, Artificial Sequence
  Description of Artificial Sequence: Synthetic oligonucleotide
ugcaccucucagaaugcug

SEQ ID NO: 2572470 - RNA, 19 nt, Artificial Sequence
  Description of Artificial Sequence: Synthetic oligonucleotide
gaaaacaucuugaguuaac

SEQ ID NO: 2572471 - RNA, 19 nt, Artificial Sequence
  Description of Artificial Sequence: Synthetic oligonucleotide
acuuuagaacugccaagca

SEQ ID NO: 2572472 - RNA, 19 nt, Artificial Sequence
  Description of Artificial Sequence: Synthetic oligonucleotide
aguuagaagccagugucca

SEQ ID NO: 2572473 - RNA, 19 nt, Artificial Sequence
  Description of Artificial Sequence: Synthetic oligonucleotide
aagccaguucuacuuuaga

SEQ ID NO: 2572474 - RNA, 19 nt, Artificial Sequence
  Description of Artificial Sequence: Synthetic oligonucleotide
cuuacucaaccaaaaccca

SEQ ID NO: 2572475 - RNA, 19 nt, Artificial Sequence
  Description of Artificial Sequence: Synthetic oligonucleotide
caccauaugcccagagggc

SEQ ID NO: 2572476 - RNA, 19 nt, Artificial Sequence
  Description of Artificial Sequence: Synthetic oligonucleotide
augauuccauaaacguagc

SEQ ID NO: 2572477 - RNA, 19 nt, Artificial Sequence
  Description of Artificial Sequence: Synthetic oligonucleotide
acaaauugaugggccaaag

SEQ ID NO: 2572478 - RNA, 19 nt, Artificial Sequence
  Description of Artificial Sequence: Synthetic oligonucleotide
gaguuagaagccagugucc

SEQ ID NO: 2572479 - RNA, 19 nt, Artificial Sequence
  Description of Artificial Sequence: Synthetic oligonucleotide
gcaaccaauguucuuacuc

SEQ ID NO: 2572480 - RNA, 19 nt, Artificial Sequence
  Description of Artificial Sequence: Synthetic oligonucleotide
gccaguucuacuuuagaac

SEQ ID NO: 2572481 - RNA, 19 nt, Artificial Sequence
  Description of Artificial Sequence: Synthetic oligonucleotide
acacggacaauuuccugga

SEQ ID NO: 2572482 - RNA, 19 nt, Artificial Sequence
  Description of Artificial Sequence: Synthetic oligonucleotide
agcgccccaggacugugcc

SEQ ID NO: 2572483 - RNA, 19 nt, Artificial Sequence
  Description of Artificial Sequence: Synthetic oligonucleotide
gaugccaagagcucacaua

SEQ ID NO: 2572484 - RNA, 19 nt, Artificial Sequence
  Description of Artificial Sequence: Synthetic oligonucleotide
cuagcagaugauuccauaa

SEQ ID NO: 2572485 - RNA, 19 nt, Artificial Sequence
  Description of Artificial Sequence: Synthetic oligonucleotide
cagaugauuccauaaacgu

SEQ ID NO: 2572486 - RNA, 19 nt, Artificial Sequence
  Description of Artificial Sequence: Synthetic oligonucleotide
ucagaaugcuguacucauc

SEQ ID NO: 2572487 - RNA, 19 nt, Artificial Sequence
  Description of Artificial Sequence: Synthetic oligonucleotide
cucauaucccaacugugca

SEQ ID NO: 2572488 - RNA, 19 nt, Artificial Sequence
  Description of Artificial Sequence: Synthetic oligonucleotide
aagauagcaucggcggucu

SEQ ID NO: 2572489 - RNA, 19 nt, Artificial Sequence
  Description of Artificial Sequence: Synthetic oligonucleotide
uguccacuagauguagaug

SEQ ID NO: 2572490 - RNA, 19 nt, Artificial Sequence
  Description of Artificial Sequence: Synthetic oligonucleotide
uccacuagauguagaugaa

SEQ ID NO: 2572491 - RNA, 19 nt, Artificial Sequence
  Description of Artificial Sequence: Synthetic oligonucleotide
aaaaccuacccaggagggu

SEQ ID NO: 2572492 - RNA, 19 nt, Artificial Sequence
  Description of Artificial Sequence: Synthetic oligonucleotide
ucuccacacggacaauuuc

SEQ ID NO: 2572493 - RNA, 19 nt, Artificial Sequence
  Description of Artificial Sequence: Synthetic oligonucleotide
acaaggaguuagaagccag

SEQ ID NO: 2572494 - RNA, 19 nt, Artificial Sequence
  Description of Artificial Sequence: Synthetic oligonucleotide
uccagguuaccagaaccug

SEQ ID NO: 2572495 - RNA, 19 nt, Artificial Sequence
  Description of Artificial Sequence: Synthetic oligonucleotide
ccaagagucacugucuugc

SEQ ID NO: 2572496 - RNA, 19 nt, Artificial Sequence
  Description of Artificial Sequence: Synthetic oligonucleotide
uggcaaccauacaaguuaa

SEQ ID NO: 2572497 - RNA, 19 nt, Artificial Sequence
  Description of Artificial Sequence: Synthetic oligonucleotide
acucaaccaaaacccaaaa

SEQ ID NO: 2572498 - RNA, 19 nt, Artificial Sequence
  Description of Artificial Sequence: Synthetic oligonucleotide
uccaggcuggaaaaugcau

SEQ ID NO: 2572499 - RNA, 19 nt, Artificial Sequence
  Description of Artificial Sequence: Synthetic oligonucleotide
ccucauaucccaacugugc

SEQ ID NO: 2572500 - RNA, 19 nt, Artificial Sequence
  Description of Artificial Sequence: Synthetic oligonucleotide
accucucagaaugcuguac

SEQ ID NO: 2572501 - RNA, 19 nt, Artificial Sequence
  Description of Artificial Sequence: Synthetic oligonucleotide
cuacucgaugccaagagcu

SEQ ID NO: 2572502 - RNA, 19 nt, Artificial Sequence
  Description of Artificial Sequence: Synthetic oligonucleotide
aggaacucgccuuccacaa

SEQ ID NO: 2572503 - RNA, 19 nt, Artificial Sequence
  Description of Artificial Sequence: Synthetic oligonucleotide
aaguccugagggucuucug

SEQ ID NO: 2572504 - RNA, 19 nt, Artificial Sequence
  Description of Artificial Sequence: Synthetic oligonucleotide
agcagaaacaaggaagcua

SEQ ID NO: 2572505 - RNA, 19 nt, Artificial Sequence
  Description of Artificial Sequence: Synthetic oligonucleotide
auacacauugucaccccag

SEQ ID NO: 2572506 - RNA, 19 nt, Artificial Sequence
  Description of Artificial Sequence: Synthetic oligonucleotide
caucuuugccaagagucac

SEQ ID NO: 2572507 - RNA, 19 nt, Artificial Sequence
  Description of Artificial Sequence: Synthetic oligonucleotide
ugccaagagcucacauaag

SEQ ID NO: 2572508 - RNA, 19 nt, Artificial Sequence
  Description of Artificial Sequence: Synthetic oligonucleotide
aaugagggcaccacaccau

SEQ ID NO: 2572509 - RNA, 19 nt, Artificial Sequence
  Description of Artificial Sequence: Synthetic oligonucleotide
caccacaccauaugcccag

SEQ ID NO: 2572510 - RNA, 19 nt, Artificial Sequence
  Description of Artificial Sequence: Synthetic oligonucleotide
caaauugaugggccaaaga

SEQ ID NO: 2572511 - RNA, 19 nt, Artificial Sequence
  Description of Artificial Sequence: Synthetic oligonucleotide
gaguuaacugauucucucu

SEQ ID NO: 2572512 - RNA, 19 nt, Artificial Sequence
  Description of Artificial Sequence: Synthetic oligonucleotide
aacaaggaagcuacucgau

SEQ ID NO: 2572513 - RNA, 19 nt, Artificial Sequence
  Description of Artificial Sequence: Synthetic oligonucleotide
ucuugccccuuuguaaaca

SEQ ID NO: 2572514 - RNA, 19 nt, Artificial Sequence
  Description of Artificial Sequence: Synthetic oligonucleotide
agaaugcuguacucauccu

SEQ ID NO: 2572515 - RNA, 19 nt, Artificial Sequence
  Description of Artificial Sequence: Synthetic oligonucleotide
auuugcaaauacacauugu

SEQ ID NO: 2572516 - RNA, 19 nt, Artificial Sequence
  Description of Artificial Sequence: Synthetic oligonucleotide
agaugauuccauaaacgua

SEQ ID NO: 2572517 - RNA, 19 nt, Artificial Sequence
  Description of Artificial Sequence: Synthetic oligonucleotide
gacaucuugccccuuugua

SEQ ID NO: 2572518 - RNA, 19 nt, Artificial Sequence
  Description of Artificial Sequence: Synthetic oligonucleotide
cucucagaaugcuguacuc

SEQ ID NO: 2572519 - RNA, 19 nt, Artificial Sequence
  Description of Artificial Sequence: Synthetic oligonucleotide
caagcaaccaauguucuua

SEQ ID NO: 2572520 - RNA, 19 nt, Artificial Sequence
  Description of Artificial Sequence: Synthetic oligonucleotide
aguuaaguccugagggucu

SEQ ID NO: 2572521 - RNA, 19 nt, Artificial Sequence
  Description of Artificial Sequence: Synthetic oligonucleotide
caucuugccccuuuguaaa

SEQ ID NO: 2572522 - RNA, 19 nt, Artificial Sequence
  Description of Artificial Sequence: Synthetic oligonucleotide
gacauaguuggcaaccaua

SEQ ID NO: 2572523 - RNA, 19 nt, Artificial Sequence
  Description of Artificial Sequence: Synthetic oligonucleotide
ucccuugaauuaacugcac

SEQ ID NO: 2572524 - RNA, 19 nt, Artificial Sequence
  Description of Artificial Sequence: Synthetic oligonucleotide
aagcuacucgaugccaaga

SEQ ID NO: 2572525 - RNA, 19 nt, Artificial Sequence
  Description of Artificial Sequence: Synthetic oligonucleotide
aacauccagguuaccagaa

SEQ ID NO: 2572526 - RNA, 19 nt, Artificial Sequence
  Description of Artificial Sequence: Synthetic oligonucleotide
agauguagaugaaacucau

SEQ ID NO: 2572527 - RNA, 19 nt, Artificial Sequence
  Description of Artificial Sequence: Synthetic oligonucleotide
aacugccaagcaaccaaug

SEQ ID NO: 2572528 - RNA, 19 nt, Artificial Sequence
  Description of Artificial Sequence: Synthetic oligonucleotide
agacaucuugccccuuugu

SEQ ID NO: 2572529 - RNA, 19 nt, Artificial Sequence
  Description of Artificial Sequence: Synthetic oligonucleotide
cauaucccaacugugcaga

SEQ ID NO: 2572530 - RNA, 19 nt, Artificial Sequence
  Description of Artificial Sequence: Synthetic oligonucleotide
uucucucuagcagaugauu

SEQ ID NO: 2572531 - RNA, 19 nt, Artificial Sequence
  Description of Artificial Sequence: Synthetic oligonucleotide
ugccaagagucacugucuu

SEQ ID NO: 2572532 - RNA, 19 nt, Artificial Sequence
  Description of Artificial Sequence: Synthetic oligonucleotide
acacauugucaccccagaa

SEQ ID NO: 2572533 - RNA, 19 nt, Artificial Sequence
  Description of Artificial Sequence: Synthetic oligonucleotide
acucgaugccaagagcuca

SEQ ID NO: 2572534 - RNA, 19 nt, Artificial Sequence
  Description of Artificial Sequence: Synthetic oligonucleotide
uggguccucauaucccaac

SEQ ID NO: 2572535 - RNA, 19 nt, Artificial Sequence
  Description of Artificial Sequence: Synthetic oligonucleotide
gaucguagccuuccaggaa

SEQ ID NO: 2572536 - RNA, 19 nt, Artificial Sequence
  Description of Artificial Sequence: Synthetic oligonucleotide
guucuacuuuagaacugcc

SEQ ID NO: 2572537 - RNA, 19 nt, Artificial Sequence
  Description of Artificial Sequence: Synthetic oligonucleotide
gaacucgccuuccacaaau

SEQ ID NO: 2572538 - RNA, 19 nt, Artificial Sequence
  Description of Artificial Sequence: Synthetic oligonucleotide
gcuggaaaaugcauacagc

SEQ ID NO: 2572539 - RNA, 19 nt, Artificial Sequence
  Description of Artificial Sequence: Synthetic oligonucleotide
ucggcggucuugcccauaa

SEQ ID NO: 2572540 - RNA, 19 nt, Artificial Sequence
  Description of Artificial Sequence: Synthetic oligonucleotide
auguucuuacucaaccaaa

SEQ ID NO: 2572541 - RNA, 19 nt, Artificial Sequence
  Description of Artificial Sequence: Synthetic oligonucleotide
ugauucucucuagcagaug

SEQ ID NO: 2572542 - RNA, 19 nt, Artificial Sequence
  Description of Artificial Sequence: Synthetic oligonucleotide
gcuacucgaugccaagagc

SEQ ID NO: 2572543 - RNA, 19 nt, Artificial Sequence
  Description of Artificial Sequence: Synthetic oligonucleotide
uccugagggucuucugccu

SEQ ID NO: 2572544 - RNA, 19 nt, Artificial Sequence
  Description of Artificial Sequence: Synthetic oligonucleotide
cauaguuggcaaccauaca

SEQ ID NO: 2572545 - RNA, 19 nt, Artificial Sequence
  Description of Artificial Sequence: Synthetic oligonucleotide
caaguuaaguccugagggu

SEQ ID NO: 2572546 - RNA, 19 nt, Artificial Sequence
  Description of Artificial Sequence: Synthetic oligonucleotide
ggaucguagccuuccagga

SEQ ID NO: 2572547 - RNA, 19 nt, Artificial Sequence
  Description of Artificial Sequence: Synthetic oligonucleotide
agcaaccaauguucuuacu

SEQ ID NO: 2572548 - RNA, 19 nt, Artificial Sequence
  Description of Artificial Sequence: Synthetic oligonucleotide
cuguguccacuagauguag

SEQ ID NO: 2572549 - RNA, 19 nt, Artificial Sequence
  Description of Artificial Sequence: Synthetic oligonucleotide
cauaaacguagcgccccag

SEQ ID NO: 2572550 - RNA, 19 nt, Artificial Sequence
  Description of Artificial Sequence: Synthetic oligonucleotide
guccucauaucccaacugu

SEQ ID NO: 2572551 - RNA, 19 nt, Artificial Sequence
  Description of Artificial Sequence: Synthetic oligonucleotide
cauaugcccagagggccag

SEQ ID NO: 2572552 - RNA, 19 nt, Artificial Sequence
  Description of Artificial Sequence: Synthetic oligonucleotide
ugucaccccagaagccagu

SEQ ID NO: 2572553 - RNA, 19 nt, Artificial Sequence
  Description of Artificial Sequence: Synthetic oligonucleotide
gguggguccucauauccca

SEQ ID NO: 2572554 - RNA, 19 nt, Artificial Sequence
  Description of Artificial Sequence: Synthetic oligonucleotide
cccauaagaauucuccaca

SEQ ID NO: 2572555 - RNA, 19 nt, Artificial Sequence
  Description of Artificial Sequence: Synthetic oligonucleotide
cagggacauaguuggcaac

SEQ ID NO: 2572556 - RNA, 19 nt, Artificial Sequence
  Description of Artificial Sequence: Synthetic oligonucleotide
uugaugggccaaagauguc

SEQ ID NO: 2572557 - RNA, 19 nt, Artificial Sequence
  Description of Artificial Sequence: Synthetic oligonucleotide
aaccugggaugagugugca

SEQ ID NO: 2572558 - RNA, 19 nt, Artificial Sequence
  Description of Artificial Sequence: Synthetic oligonucleotide
aggaagcuacucgaugcca

SEQ ID NO: 2572559 - RNA, 19 nt, Artificial Sequence
  Description of Artificial Sequence: Synthetic oligonucleotide
ggcggucuugcccauaaga

SEQ ID NO: 2572560 - RNA, 19 nt, Artificial Sequence
  Description of Artificial Sequence: Synthetic oligonucleotide
aucuuugccaagagucacu

SEQ ID NO: 2572561 - RNA, 19 nt, Artificial Sequence
  Description of Artificial Sequence: Synthetic oligonucleotide
gcuguaaguauucuccacu

SEQ ID NO: 2572562 - RNA, 19 nt, Artificial Sequence
  Description of Artificial Sequence: Synthetic oligonucleotide
auaucccaacugugcagau

SEQ ID NO: 2572563 - RNA, 19 nt, Artificial Sequence
  Description of Artificial Sequence: Synthetic oligonucleotide
cucagaaugcuguacucau

SEQ ID NO: 2572564 - RNA, 19 nt, Artificial Sequence
  Description of Artificial Sequence: Synthetic oligonucleotide
gaggguggguccucauauc

SEQ ID NO: 2572565 - RNA, 19 nt, Artificial Sequence
  Description of Artificial Sequence: Synthetic oligonucleotide
caccccagaagccaguucu

SEQ ID NO: 2572566 - RNA, 19 nt, Artificial Sequence
  Description of Artificial Sequence: Synthetic oligonucleotide
cuccaggcuggaaaaugca

SEQ ID NO: 2572567 - RNA, 19 nt, Artificial Sequence
  Description of Artificial Sequence: Synthetic oligonucleotide
guguccacuagauguagau

SEQ ID NO: 2572568 - RNA, 19 nt, Artificial Sequence
  Description of Artificial Sequence: Synthetic oligonucleotide
cauuaacauccagguuacc

SEQ ID NO: 2572569 - RNA, 19 nt, Artificial Sequence
  Description of Artificial Sequence: Synthetic oligonucleotide
gcaucggcggucuugccca

SEQ ID NO: 2572570 - RNA, 19 nt, Artificial Sequence
  Description of Artificial Sequence: Synthetic oligonucleotide
guaggaucguagccuucca

SEQ ID NO: 2572571 - RNA, 19 nt, Artificial Sequence
  Description of Artificial Sequence: Synthetic oligonucleotide
gcaaccauacaaguuaagu

SEQ ID NO: 2572572 - RNA, 19 nt, Artificial Sequence
  Description of Artificial Sequence: Synthetic oligonucleotide
gcuguacucauccugcccu

SEQ ID NO: 2572573 - RNA, 19 nt, Artificial Sequence
  Description of Artificial Sequence: Synthetic oligonucleotide
uugccccuuuguaaacauu

SEQ ID NO: 2572574 - RNA, 19 nt, Artificial Sequence
  Description of Artificial Sequence: Synthetic oligonucleotide
ccauacaaguuaaguccug

SEQ ID NO: 2572575 - RNA, 19 nt, Artificial Sequence
  Description of Artificial Sequence: Synthetic oligonucleotide
auucucucuagcagaugau

SEQ ID NO: 2572576 - RNA, 19 nt, Artificial Sequence
  Description of Artificial Sequence: Synthetic oligonucleotide
cugucuugcuguaaguauu

SEQ ID NO: 2572577 - RNA, 19 nt, Artificial Sequence
  Description of Artificial Sequence: Synthetic oligonucleotide
cacuguaggaucguagccu

SEQ ID NO: 2572578 - RNA, 19 nt, Artificial Sequence
  Description of Artificial Sequence: Synthetic oligonucleotide
uuaaguccugagggucuuc

SEQ ID NO: 2572579 - RNA, 19 nt, Artificial Sequence
  Description of Artificial Sequence: Synthetic oligonucleotide
caaggaguuagaagccagu

SEQ ID NO: 2572580 - RNA, 19 nt, Artificial Sequence
  Description of Artificial Sequence: Synthetic oligonucleotide
aggaggguggguccucaua

SEQ ID NO: 2572581 - RNA, 19 nt, Artificial Sequence
  Description of Artificial Sequence: Synthetic oligonucleotide
gccaagagucacugucuug

SEQ ID NO: 2572582 - RNA, 19 nt, Artificial Sequence
  Description of Artificial Sequence: Synthetic oligonucleotide
agcucacauaagauagcau

SEQ ID NO: 2572583 - RNA, 19 nt, Artificial Sequence
  Description of Artificial Sequence: Synthetic oligonucleotide
ggucuugcccauaagaauu

SEQ ID NO: 2572584 - RNA, 19 nt, Artificial Sequence
  Description of Artificial Sequence: Synthetic oligonucleotide
ggcaaccauacaaguuaag

SEQ ID NO: 2572585 - RNA, 19 nt, Artificial Sequence
  Description of Artificial Sequence: Synthetic oligonucleotide
gagucacugucuugcugua

SEQ ID NO: 2572586 - RNA, 19 nt, Artificial Sequence
  Description of Artificial Sequence: Synthetic oligonucleotide
guuggcaaccauacaaguu

SEQ ID NO: 2572587 - RNA, 19 nt, Artificial Sequence
  Description of Artificial Sequence: Synthetic oligonucleotide
cacugucuugcuguaagua

SEQ ID NO: 2572588 - RNA, 19 nt, Artificial Sequence
  Description of Artificial Sequence: Synthetic oligonucleotide
accuacccaggaggguggg

SEQ ID NO: 2572589 - RNA, 19 nt, Artificial Sequence
  Description of Artificial Sequence: Synthetic oligonucleotide
uagcaucggcggucuugcc

SEQ ID NO: 2572590 - RNA, 19 nt, Artificial Sequence
  Description of Artificial Sequence: Synthetic oligonucleotide
aacucgccuuccacaaauu

SEQ ID NO: 2572591 - RNA, 19 nt, Artificial Sequence
  Description of Artificial Sequence: Synthetic oligonucleotide
auaugcccagagggccagg

SEQ ID NO: 2572592 - RNA, 19 nt, Artificial Sequence
  Description of Artificial Sequence: Synthetic oligonucleotide
ggaagcuacucgaugccaa

SEQ ID NO: 2572593 - RNA, 19 nt, Artificial Sequence
  Description of Artificial Sequence: Synthetic oligonucleotide
ggaggguggguccucauau

SEQ ID NO: 2572594 - RNA, 19 nt, Artificial Sequence
  Description of Artificial Sequence: Synthetic oligonucleotide
gaacugccaagcaaccaau

SEQ ID NO: 2572595 - RNA, 19 nt, Artificial Sequence
  Description of Artificial Sequence: Synthetic oligonucleotide
ggguggguccucauauccc

SEQ ID NO: 2572596 - RNA, 19 nt, Artificial Sequence
  Description of Artificial Sequence: Synthetic oligonucleotide
gccaguguccaugagacau

SEQ ID NO: 2572597 - RNA, 19 nt, Artificial Sequence
  Description of Artificial Sequence: Synthetic oligonucleotide
cuugccccuuuguaaacau

SEQ ID NO: 2572598 - RNA, 19 nt, Artificial Sequence
  Description of Artificial Sequence: Synthetic oligonucleotide
gagggccagggacauaguu

SEQ ID NO: 2572599 - RNA, 19 nt, Artificial Sequence
  Description of Artificial Sequence: Synthetic oligonucleotide
gcggucuugcccauaagaa

SEQ ID NO: 2572600 - RNA, 19 nt, Artificial Sequence
  Description of Artificial Sequence: Synthetic oligonucleotide
ggacaauuuccuggaugac

SEQ ID NO: 2572601 - RNA, 19 nt, Artificial Sequence
  Description of Artificial Sequence: Synthetic oligonucleotide
guagcgccccaggacugug

SEQ ID NO: 2572602 - RNA, 19 nt, Artificial Sequence
  Description of Artificial Sequence: Synthetic oligonucleotide
accugggaugagugugcaa

SEQ ID NO: 2572603 - RNA, 19 nt, Artificial Sequence
  Description of Artificial Sequence: Synthetic oligonucleotide
acguagcgccccaggacug

SEQ ID NO: 2572604 - RNA, 19 nt, Artificial Sequence
  Description of Artificial Sequence: Synthetic oligonucleotide
cagaaccugggaugagugu

SEQ ID NO: 2572605 - RNA, 19 nt, Artificial Sequence
  Description of Artificial Sequence: Synthetic oligonucleotide
cagaaacaaggaagcuacu

SEQ ID NO: 2572606 - RNA, 19 nt, Artificial Sequence
  Description of Artificial Sequence: Synthetic oligonucleotide
caucuugaguuaacugauu

SEQ ID NO: 2572607 - RNA, 19 nt, Artificial Sequence
  Description of Artificial Sequence: Synthetic oligonucleotide
caguguccaugagacaucu

SEQ ID NO: 2572608 - RNA, 19 nt, Artificial Sequence
  Description of Artificial Sequence: Synthetic oligonucleotide
ccauaugcccagagggcca

SEQ ID NO: 2572609 - RNA, 19 nt, Artificial Sequence
  Description of Artificial Sequence: Synthetic oligonucleotide
gcuguguccacuagaugua

SEQ ID NO: 2572610 - RNA, 19 nt, Artificial Sequence
  Description of Artificial Sequence: Synthetic oligonucleotide
cuuugccaagagucacugu

SEQ ID NO: 2572611 - RNA, 19 nt, Artificial Sequence
  Description of Artificial Sequence: Synthetic oligonucleotide
ccucucagaaugcuguacu

SEQ ID NO: 2572612 - RNA, 19 nt, Artificial Sequence
  Description of Artificial Sequence: Synthetic oligonucleotide
ggaacucgccuuccacaaa

SEQ ID NO: 2572613 - RNA, 19 nt, Artificial Sequence
  Description of Artificial Sequence: Synthetic oligonucleotide
cagaagccaguucuacuuu

SEQ ID NO: 2572614 - RNA, 19 nt, Artificial Sequence
  Description of Artificial Sequence: Synthetic oligonucleotide
gcaccacaccauaugccca

SEQ ID NO: 2572615 - RNA, 19 nt, Artificial Sequence
  Description of Artificial Sequence: Synthetic oligonucleotide
cgccccaggacugugccag

SEQ ID NO: 2572616 - RNA, 19 nt, Artificial Sequence
  Description of Artificial Sequence: Synthetic oligonucleotide
ccauaaacguagcgcccca

SEQ ID NO: 2572617 - RNA, 19 nt, Artificial Sequence
  Description of Artificial Sequence: Synthetic oligonucleotide
agagggccagggacauagu

SEQ ID NO: 2572618 - RNA, 19 nt, Artificial Sequence
  Description of Artificial Sequence: Synthetic oligonucleotide
ccacuagauguagaugaaa

SEQ ID NO: 2572619 - RNA, 19 nt, Artificial Sequence
  Description of Artificial Sequence: Synthetic oligonucleotide
gccaagcaaccaauguucu

SEQ ID NO: 2572620 - RNA, 19 nt, Artificial Sequence
  Description of Artificial Sequence: Synthetic oligonucleotide
aguguccaugagacaucuu

SEQ ID NO: 2572621 - RNA, 19 nt, Artificial Sequence
  Description of Artificial Sequence: Synthetic oligonucleotide
gcccagagggccagggaca

SEQ ID NO: 2572622 - RNA, 19 nt, Artificial Sequence
  Description of Artificial Sequence: Synthetic oligonucleotide
ggccagggacauaguuggc

SEQ ID NO: 2572623 - RNA, 19 nt, Artificial Sequence
  Description of Artificial Sequence: Synthetic oligonucleotide
cugcaccucucagaaugcu

SEQ ID NO: 2572624 - RNA, 19 nt, Artificial Sequence
  Description of Artificial Sequence: Synthetic oligonucleotide
cugugccagcuucuucccu

SEQ ID NO: 2572625 - RNA, 19 nt, Artificial Sequence
  Description of Artificial Sequence: Synthetic oligonucleotide
gccuuccaggaacucgccu

SEQ ID NO: 2572626 - RNA, 19 nt, Artificial Sequence
  Description of Artificial Sequence: Synthetic oligonucleotide
cacggacaauuuccuggau

SEQ ID NO: 2572627 - RNA, 19 nt, Artificial Sequence
  Description of Artificial Sequence: Synthetic oligonucleotide
gccccaggacugugccagc

SEQ ID NO: 2572628 - RNA, 19 nt, Artificial Sequence
  Description of Artificial Sequence: Synthetic oligonucleotide
cggucuugcccauaagaau

SEQ ID NO: 2572629 - RNA, 19 nt, Artificial Sequence
  Description of Artificial Sequence: Synthetic oligonucleotide
aucggcggucuugcccaua

SEQ ID NO: 2572630 - RNA, 19 nt, Artificial Sequence
  Description of Artificial Sequence: Synthetic oligonucleotide
ccaagcaaccaauguucuu

SEQ ID NO: 2572631 - RNA, 19 nt, Artificial Sequence
  Description of Artificial Sequence: Synthetic oligonucleotide
gcgccccaggacugugcca

SEQ ID NO: 2572632 - RNA, 19 nt, Artificial Sequence
  Description of Artificial Sequence: Synthetic oligonucleotide
caucggcggucuugcccau

SEQ ID NO: 2572633 - RNA, 19 nt, Artificial Sequence
  Description of Artificial Sequence: Synthetic oligonucleotide
ccuacccaggagggugggu

SEQ ID NO: 2572634 - RNA, 19 nt, Artificial Sequence
  Description of Artificial Sequence: Synthetic oligonucleotide
cguagcgccccaggacugu

SEQ ID NO: 2572635 - RNA, 19 nt, Artificial Sequence
  Description of Artificial Sequence: Synthetic oligonucleotide
uauaguagggaccaaaccg

SEQ ID NO: 2572636 - RNA, 19 nt, Artificial Sequence
  Description of Artificial Sequence: Synthetic oligonucleotide
aaacagguguucuggaucc

SEQ ID NO: 2572637 - RNA, 19 nt, Artificial Sequence
  Description of Artificial Sequence: Synthetic oligonucleotide
ucuagagagcaaaugaagg

SEQ ID NO: 2572638 - RNA, 19 nt, Artificial Sequence
  Description of Artificial Sequence: Synthetic oligonucleotide
gacauaauagacaugauug

SEQ ID NO: 2572639 - RNA, 19 nt, Artificial Sequence
  Description of Artificial Sequence: Synthetic oligonucleotide
auuuguucagagcagguac

SEQ ID NO: 2572640 - RNA, 19 nt, Artificial Sequence
  Description of Artificial Sequence: Synthetic oligonucleotide
acauaauagacaugauugc

SEQ ID NO: 2572641 - RNA, 19 nt, Artificial Sequence
  Description of Artificial Sequence: Synthetic oligonucleotide
uuuucaaugauguggacaa

SEQ ID NO: 2572642 - RNA, 19 nt, Artificial Sequence
  Description of Artificial Sequence: Synthetic oligonucleotide
uguucuggauccauguugg

SEQ ID NO: 2572643 - RNA, 19 nt, Artificial Sequence
  Description of Artificial Sequence: Synthetic oligonucleotide
aaugacaggcucuguauag

SEQ ID NO: 2572644 - RNA, 19 nt, Artificial Sequence
  Description of Artificial Sequence: Synthetic oligonucleotide
uuauaggacauaauagaca

SEQ ID NO: 2572645 - RNA, 19 nt, Artificial Sequence
  Description of Artificial Sequence: Synthetic oligonucleotide
augauguggacaaugacgc

SEQ ID NO: 2572646 - RNA, 19 nt, Artificial Sequence
  Description of Artificial Sequence: Synthetic oligonucleotide
auaauagacaugauugcgc

SEQ ID NO: 2572647 - RNA, 19 nt, Artificial Sequence
  Description of Artificial Sequence: Synthetic oligonucleotide
uaggacauaauagacauga

SEQ ID NO: 2572648 - RNA, 19 nt, Artificial Sequence
  Description of Artificial Sequence: Synthetic oligonucleotide
cuagagagcaaaugaaggg

SEQ ID NO: 2572649 - RNA, 19 nt, Artificial Sequence
  Description of Artificial Sequence: Synthetic oligonucleotide
caugauugcgcucugcugg

SEQ ID NO: 2572650 - RNA, 19 nt, Artificial Sequence
  Description of Artificial Sequence: Synthetic oligonucleotide
accaucugggccuggaucc

SEQ ID NO: 2572651 - RNA, 19 nt, Artificial Sequence
  Description of Artificial Sequence: Synthetic oligonucleotide
uccguuauaggacauaaua

SEQ ID NO: 2572652 - RNA, 19 nt, Artificial Sequence
  Description of Artificial Sequence: Synthetic oligonucleotide
uuucaaacagguguucugg

SEQ ID NO: 2572653 - RNA, 19 nt, Artificial Sequence
  Description of Artificial Sequence: Synthetic oligonucleotide
cauaauagacaugauugcg

SEQ ID NO: 2572654 - RNA, 19 nt, Artificial Sequence
  Description of Artificial Sequence: Synthetic oligonucleotide
uccguggucaccaucuggg

SEQ ID NO: 2572655 - RNA, 19 nt, Artificial Sequence
  Description of Artificial Sequence: Synthetic oligonucleotide
uccuuuucaaugaugugga

SEQ ID NO: 2572656 - RNA, 19 nt, Artificial Sequence
  Description of Artificial Sequence: Synthetic oligonucleotide
uucagccgaaacuugaggc

SEQ ID NO: 2572657 - RNA, 19 nt, Artificial Sequence
  Description of Artificial Sequence: Synthetic oligonucleotide
caaaccguuucucauacag

SEQ ID NO: 2572658 - RNA, 19 nt, Artificial Sequence
  Description of Artificial Sequence: Synthetic oligonucleotide
uguauaguagggaccaaac

SEQ ID NO: 2572659 - RNA, 19 nt, Artificial Sequence
  Description of Artificial Sequence: Synthetic oligonucleotide
ugcgauuccugcaaaccgg

SEQ ID NO: 2572660 - RNA, 19 nt, Artificial Sequence
  Description of Artificial Sequence: Synthetic oligonucleotide
ucagccgaaacuugaggcg

SEQ ID NO: 2572661 - RNA, 19 nt, Artificial Sequence
  Description of Artificial Sequence: Synthetic oligonucleotide
caugggaaagaucuucugg

SEQ ID NO: 2572662 - RNA, 19 nt, Artificial Sequence
  Description of Artificial Sequence: Synthetic oligonucleotide
accaaaccguuucucauac

SEQ ID NO: 2572663 - RNA, 19 nt, Artificial Sequence
  Description of Artificial Sequence: Synthetic oligonucleotide
aggucuucggguccaaccc

SEQ ID NO: 2572664 - RNA, 19 nt, Artificial Sequence
  Description of Artificial Sequence: Synthetic oligonucleotide
uauguagagucugucaccc

SEQ ID NO: 2572665 - RNA, 19 nt, Artificial Sequence
  Description of Artificial Sequence: Synthetic oligonucleotide
uacauuuguucagagcagg

SEQ ID NO: 2572666 - RNA, 19 nt, Artificial Sequence
  Description of Artificial Sequence: Synthetic oligonucleotide
acuacaaagucaucaguca

SEQ ID NO: 2572667 - RNA, 19 nt, Artificial Sequence
  Description of Artificial Sequence: Synthetic oligonucleotide
aggguguaaggcuugaucu

SEQ ID NO: 2572668 - RNA, 19 nt, Artificial Sequence
  Description of Artificial Sequence: Synthetic oligonucleotide
uacagggucaguccauccg

SEQ ID NO: 2572669 - RNA, 19 nt, Artificial Sequence
  Description of Artificial Sequence: Synthetic oligonucleotide
aagggcuuaaaggucuucg

SEQ ID NO: 2572670 - RNA, 19 nt, Artificial Sequence
  Description of Artificial Sequence: Synthetic oligonucleotide
gauguggacaaugacgccc

SEQ ID NO: 2572671 - RNA, 19 nt, Artificial Sequence
  Description of Artificial Sequence: Synthetic oligonucleotide
gagucugucacccauggga

SEQ ID NO: 2572672 - RNA, 19 nt, Artificial Sequence
  Description of Artificial Sequence: Synthetic oligonucleotide
acugacuacaaagucauca

SEQ ID NO: 2572673 - RNA, 19 nt, Artificial Sequence
  Description of Artificial Sequence: Synthetic oligonucleotide
uagagagcaaaugaagggc

SEQ ID NO: 2572674 - RNA, 19 nt, Artificial Sequence
  Description of Artificial Sequence: Synthetic oligonucleotide
uacagguucagccgaaacu

SEQ ID NO: 2572675 - RNA, 19 nt, Artificial Sequence
  Description of Artificial Sequence: Synthetic oligonucleotide
aggucuagagagcaaauga

SEQ ID NO: 2572676 - RNA, 19 nt, Artificial Sequence
  Description of Artificial Sequence: Synthetic oligonucleotide
guuauaggacauaauagac

SEQ ID NO: 2572677 - RNA, 19 nt, Artificial Sequence
  Description of Artificial Sequence: Synthetic oligonucleotide
uucagagcagguaccacug

SEQ ID NO: 2572678 - RNA, 19 nt, Artificial Sequence
  Description of Artificial Sequence: Synthetic oligonucleotide
auagacaugauugcgcucu

SEQ ID NO: 2572679 - RNA, 19 nt, Artificial Sequence
  Description of Artificial Sequence: Synthetic oligonucleotide
gacgucgguagccaguccg

SEQ ID NO: 2572680 - RNA, 19 nt, Artificial Sequence
  Description of Artificial Sequence: Synthetic oligonucleotide
acugcgauuccugcaaacc

SEQ ID NO: 2572681 - RNA, 19 nt, Artificial Sequence
  Description of Artificial Sequence: Synthetic oligonucleotide
cugacuacaaagucaucag

SEQ ID NO: 2572682 - RNA, 19 nt, Artificial Sequence
  Description of Artificial Sequence: Synthetic oligonucleotide
uccauccgggccuucagcg

SEQ ID NO: 2572683 - RNA, 19 nt, Artificial Sequence
  Description of Artificial Sequence: Synthetic oligonucleotide
uguaaggcuugaucugccg

SEQ ID NO: 2572684 - RNA, 19 nt, Artificial Sequence
  Description of Artificial Sequence: Synthetic oligonucleotide
guauaguagggaccaaacc

SEQ ID NO: 2572685 - RNA, 19 nt, Artificial Sequence
  Description of Artificial Sequence: Synthetic oligonucleotide
cugggaccagaauacaggg

SEQ ID NO: 2572686 - RNA, 19 nt, Artificial Sequence
  Description of Artificial Sequence: Synthetic oligonucleotide
cuauguagagucugucacc

SEQ ID NO: 2572687 - RNA, 19 nt, Artificial Sequence
  Description of Artificial Sequence: Synthetic oligonucleotide
acaaugacgcccaugcccg

SEQ ID NO: 2572688 - RNA, 19 nt, Artificial Sequence
  Description of Artificial Sequence: Synthetic oligonucleotide
aggagguuggccaccaugc

SEQ ID NO: 2572689 - RNA, 19 nt, Artificial Sequence
  Description of Artificial Sequence: Synthetic oligonucleotide
cuuaaaggucuucgggucc

SEQ ID NO: 2572690 - RNA, 19 nt, Artificial Sequence
  Description of Artificial Sequence: Synthetic oligonucleotide
aaaccguuucucauacagg

SEQ ID NO: 2572691 - RNA, 19 nt, Artificial Sequence
  Description of Artificial Sequence: Synthetic oligonucleotide
cccuucauggccaugacgg

SEQ ID NO: 2572692 - RNA, 19 nt, Artificial Sequence
  Description of Artificial Sequence: Synthetic oligonucleotide
gggaaaugguuucaaacag

SEQ ID NO: 2572693 - RNA, 19 nt, Artificial Sequence
  Description of Artificial Sequence: Synthetic oligonucleotide
ucugucacccaugggaaag

SEQ ID NO: 2572694 - RNA, 19 nt, Artificial Sequence
  Description of Artificial Sequence: Synthetic oligonucleotide
cuacaaagucaucagucac

SEQ ID NO: 2572695 - RNA, 19 nt, Artificial Sequence
  Description of Artificial Sequence: Synthetic oligonucleotide
acugggaccagaauacagg

SEQ ID NO: 2572696 - RNA, 19 nt, Artificial Sequence
  Description of Artificial Sequence: Synthetic oligonucleotide
aaggacaauuuuauuaaaa

SEQ ID NO: 2572697 - RNA, 19 nt, Artificial Sequence
  Description of Artificial Sequence: Synthetic oligonucleotide
aacaaaagggaaacuggga

SEQ ID NO: 2572698 - RNA, 19 nt, Artificial Sequence
  Description of Artificial Sequence: Synthetic oligonucleotide
ugggcaaccgucuggacgu

SEQ ID NO: 2572699 - RNA, 19 nt, Artificial Sequence
  Description of Artificial Sequence: Synthetic oligonucleotide
caucccauacauuuguuca

SEQ ID NO: 2572700 - RNA, 19 nt, Artificial Sequence
  Description of Artificial Sequence: Synthetic oligonucleotide
ucgcacaucccauacauuu

SEQ ID NO: 2572701 - RNA, 19 nt, Artificial Sequence
  Description of Artificial Sequence: Synthetic oligonucleotide
agggcuuaaaggucuucgg

SEQ ID NO: 2572702 - RNA, 19 nt, Artificial Sequence
  Description of Artificial Sequence: Synthetic oligonucleotide
agacucgcacaucccauac

SEQ ID NO: 2572703 - RNA, 19 nt, Artificial Sequence
  Description of Artificial Sequence: Synthetic oligonucleotide
ugcccgauacagcaucccg

SEQ ID NO: 2572704 - RNA, 19 nt, Artificial Sequence
  Description of Artificial Sequence: Synthetic oligonucleotide
gucuagagagcaaaugaag

SEQ ID NO: 2572705 - RNA, 19 nt, Artificial Sequence
  Description of Artificial Sequence: Synthetic oligonucleotide
cugcgauuccugcaaaccg

SEQ ID NO: 2572706 - RNA, 19 nt, Artificial Sequence
  Description of Artificial Sequence: Synthetic oligonucleotide
caaacagguguucuggauc

SEQ ID NO: 2572707 - RNA, 19 nt, Artificial Sequence
  Description of Artificial Sequence: Synthetic oligonucleotide
gauuccugcaaaccggcuc

SEQ ID NO: 2572708 - RNA, 19 nt, Artificial Sequence
  Description of Artificial Sequence: Synthetic oligonucleotide
uuucccuucauggccauga

SEQ ID NO: 2572709 - RNA, 19 nt, Artificial Sequence
  Description of Artificial Sequence: Synthetic oligonucleotide
cugggcaaccgucuggacg

SEQ ID NO: 2572710 - RNA, 19 nt, Artificial Sequence
  Description of Artificial Sequence: Synthetic oligonucleotide
aucccgaaacgccugucgg

SEQ ID NO: 2572711 - RNA, 19 nt, Artificial Sequence
  Description of Artificial Sequence: Synthetic oligonucleotide
ucgguagccaguccggcca

SEQ ID NO: 2572712 - RNA, 19 nt, Artificial Sequence
  Description of Artificial Sequence: Synthetic oligonucleotide
augauugcgcucugcuggg

SEQ ID NO: 2572713 - RNA, 19 nt, Artificial Sequence
  Description of Artificial Sequence: Synthetic oligonucleotide
auaguagggaccaaaccgu

SEQ ID NO: 2572714 - RNA, 19 nt, Artificial Sequence
  Description of Artificial Sequence: Synthetic oligonucleotide
acucgcacaucccauacau

SEQ ID NO: 2572715 - RNA, 19 nt, Artificial Sequence
  Description of Artificial Sequence: Synthetic oligonucleotide
guagggaccaaaccguuuc

SEQ ID NO: 2572716 - RNA, 19 nt, Artificial Sequence
  Description of Artificial Sequence: Synthetic oligonucleotide
ccguuauaggacauaauag

SEQ ID NO: 2572717 - RNA, 19 nt, Artificial Sequence
  Description of Artificial Sequence: Synthetic oligonucleotide
gaggguguaaggcuugauc

SEQ ID NO: 2572718 - RNA, 19 nt, Artificial Sequence
  Description of Artificial Sequence: Synthetic oligonucleotide
aaguccguggucaccaucu

SEQ ID NO: 2572719 - RNA, 19 nt, Artificial Sequence
  Description of Artificial Sequence: Synthetic oligonucleotide
accgucuggacgucgguag

SEQ ID NO: 2572720 - RNA, 19 nt, Artificial Sequence
  Description of Artificial Sequence: Synthetic oligonucleotide
agcagguaccacugacuac

SEQ ID NO: 2572721 - RNA, 19 nt, Artificial Sequence
  Description of Artificial Sequence: Synthetic oligonucleotide
ggaaaugguuucaaacagg

SEQ ID NO: 2572722 - RNA, 19 nt, Artificial Sequence
  Description of Artificial Sequence: Synthetic oligonucleotide
acaugauugcgcucugcug

SEQ ID NO: 2572723 - RNA, 19 nt, Artificial Sequence
  Description of Artificial Sequence: Synthetic oligonucleotide
uguccuuuucaaugaugug

SEQ ID NO: 2572724 - RNA, 19 nt, Artificial Sequence
  Description of Artificial Sequence: Synthetic oligonucleotide
uuaaaggucuucgggucca

SEQ ID NO: 2572725 - RNA, 19 nt, Artificial Sequence
  Description of Artificial Sequence: Synthetic oligonucleotide
gauacagcaucccggucca

SEQ ID NO: 2572726 - RNA, 19 nt, Artificial Sequence
  Description of Artificial Sequence: Synthetic oligonucleotide
uccggccaggccuauguag

SEQ ID NO: 2572727 - RNA, 19 nt, Artificial Sequence
  Description of Artificial Sequence: Synthetic oligonucleotide
ugaucugccgaccuuccuu

SEQ ID NO: 2572728 - RNA, 19 nt, Artificial Sequence
  Description of Artificial Sequence: Synthetic oligonucleotide
agcaucccgguccacagca

SEQ ID NO: 2572729 - RNA, 19 nt, Artificial Sequence
  Description of Artificial Sequence: Synthetic oligonucleotide
agggucaguccauccgggc

SEQ ID NO: 2572730 - RNA, 19 nt, Artificial Sequence
  Description of Artificial Sequence: Synthetic oligonucleotide
acccaugggaaagaucuuc

SEQ ID NO: 2572731 - RNA, 19 nt, Artificial Sequence
  Description of Artificial Sequence: Synthetic oligonucleotide
ccuauguagagucugucac

SEQ ID NO: 2572732 - RNA, 19 nt, Artificial Sequence
  Description of Artificial Sequence: Synthetic oligonucleotide
gggaccagaauacaggguc

SEQ ID NO: 2572733 - RNA, 19 nt, Artificial Sequence
  Description of Artificial Sequence: Synthetic oligonucleotide
ucggguccaacccagcaau

SEQ ID NO: 2572734 - RNA, 19 nt, Artificial Sequence
  Description of Artificial Sequence: Synthetic oligonucleotide
gaggucuagagagcaaaug

SEQ ID NO: 2572735 - RNA, 19 nt, Artificial Sequence
  Description of Artificial Sequence: Synthetic oligonucleotide
ccguuucucauacaggagg

SEQ ID NO: 2572736 - RNA, 19 nt, Artificial Sequence
  Description of Artificial Sequence: Synthetic oligonucleotide
auacauuuguucagagcag

SEQ ID NO: 2572737 - RNA, 19 nt, Artificial Sequence
  Description of Artificial Sequence: Synthetic oligonucleotide
gggcuuaaaggucuucggg

SEQ ID NO: 2572738 - RNA, 19 nt, Artificial Sequence
  Description of Artificial Sequence: Synthetic oligonucleotide
ucugccgaccuuccuucag

SEQ ID NO: 2572739 - RNA, 19 nt, Artificial Sequence
  Description of Artificial Sequence: Synthetic oligonucleotide
gaucugccgaccuuccuuc

SEQ ID NO: 2572740 - RNA, 19 nt, Artificial Sequence
  Description of Artificial Sequence: Synthetic oligonucleotide
gagagacucgcacauccca

SEQ ID NO: 2572741 - RNA, 19 nt, Artificial Sequence
  Description of Artificial Sequence: Synthetic oligonucleotide
agagagcaaaugaagggcu

SEQ ID NO: 2572742 - RNA, 19 nt, Artificial Sequence
  Description of Artificial Sequence: Synthetic oligonucleotide
agcaaugacaggcucugua

SEQ ID NO: 2572743 - RNA, 19 nt, Artificial Sequence
  Description of Artificial Sequence: Synthetic oligonucleotide
gacaggcucuguauaguag

SEQ ID NO: 2572744 - RNA, 19 nt, Artificial Sequence
  Description of Artificial Sequence: Synthetic oligonucleotide
ucagucaccauggggcagc

SEQ ID NO: 2572745 - RNA, 19 nt, Artificial Sequence
  Description of Artificial Sequence: Synthetic oligonucleotide
agagagacucgcacauccc

SEQ ID NO: 2572746 - RNA, 19 nt, Artificial Sequence
  Description of Artificial Sequence: Synthetic oligonucleotide
ggaaagaucuucuggaagu

SEQ ID NO: 2572747 - RNA, 19 nt, Artificial Sequence
  Description of Artificial Sequence: Synthetic oligonucleotide
gaccagaauacagggucag

SEQ ID NO: 2572748 - RNA, 19 nt, Artificial Sequence
  Description of Artificial Sequence: Synthetic oligonucleotide
uucggguccaacccagcaa

SEQ ID NO: 2572749 - RNA, 19 nt, Artificial Sequence
  Description of Artificial Sequence: Synthetic oligonucleotide
gaaacgccugucggcagcg

SEQ ID NO: 2572750 - RNA, 19 nt, Artificial Sequence
  Description of Artificial Sequence: Synthetic oligonucleotide
acgcccaugcccgauacag

SEQ ID NO: 2572751 - RNA, 19 nt, Artificial Sequence
  Description of Artificial Sequence: Synthetic oligonucleotide
uucagcguccuggugguga

SEQ ID NO: 2572752 - RNA, 19 nt, Artificial Sequence
  Description of Artificial Sequence: Synthetic oligonucleotide
gauugcgcucugcugggac

SEQ ID NO: 2572753 - RNA, 19 nt, Artificial Sequence
  Description of Artificial Sequence: Synthetic oligonucleotide
agacaugauugcgcucugc

SEQ ID NO: 2572754 - RNA, 19 nt, Artificial Sequence
  Description of Artificial Sequence: Synthetic oligonucleotide
ugacaggcucuguauagua

SEQ ID NO: 2572755 - RNA, 19 nt, Artificial Sequence
  Description of Artificial Sequence: Synthetic oligonucleotide
gagguuggccaccaugcuc

SEQ ID NO: 2572756 - RNA, 19 nt, Artificial Sequence
  Description of Artificial Sequence: Synthetic oligonucleotide
ucauacagguucagccgaa

SEQ ID NO: 2572757 - RNA, 19 nt, Artificial Sequence
  Description of Artificial Sequence: Synthetic oligonucleotide
ucccgaaacgccugucggc

SEQ ID NO: 2572758 - RNA, 19 nt, Artificial Sequence
  Description of Artificial Sequence: Synthetic oligonucleotide
auucagcauggcuugggaa

SEQ ID NO: 2572759 - RNA, 19 nt, Artificial Sequence
  Description of Artificial Sequence: Synthetic oligonucleotide
guaaggcuugaucugccga

SEQ ID NO: 2572760 - RNA, 19 nt, Artificial Sequence
  Description of Artificial Sequence: Synthetic oligonucleotide
gguguaaggcuugaucugc

SEQ ID NO: 2572761 - RNA, 19 nt, Artificial Sequence
  Description of Artificial Sequence: Synthetic oligonucleotide
cucauacagguucagccga

SEQ ID NO: 2572762 - RNA, 19 nt, Artificial Sequence
  Description of Artificial Sequence: Synthetic oligonucleotide
caugcccgauacagcaucc

SEQ ID NO: 2572763 - RNA, 19 nt, Artificial Sequence
  Description of Artificial Sequence: Synthetic oligonucleotide
aguccggccaggccuaugu

SEQ ID NO: 2572764 - RNA, 19 nt, Artificial Sequence
  Description of Artificial Sequence: Synthetic oligonucleotide
cucccagagagacucgcac

SEQ ID NO: 2572765 - RNA, 19 nt, Artificial Sequence
  Description of Artificial Sequence: Synthetic oligonucleotide
guugggcucccagagagac

SEQ ID NO: 2572766 - RNA, 19 nt, Artificial Sequence
  Description of Artificial Sequence: Synthetic oligonucleotide
ucuggacgucgguagccag

SEQ ID NO: 2572767 - RNA, 19 nt, Artificial Sequence
  Description of Artificial Sequence: Synthetic oligonucleotide
gacaugauugcgcucugcu

SEQ ID NO: 2572768 - RNA, 19 nt, Artificial Sequence
  Description of Artificial Sequence: Synthetic oligonucleotide
guccguggucaccaucugg

SEQ ID NO: 2572769 - RNA, 19 nt, Artificial Sequence
  Description of Artificial Sequence: Synthetic oligonucleotide
auugcgcucugcugggacu

SEQ ID NO: 2572770 - RNA, 19 nt, Artificial Sequence
  Description of Artificial Sequence: Synthetic oligonucleotide
cagccgaaacuugaggcgc

SEQ ID NO: 2572771 - RNA, 19 nt, Artificial Sequence
  Description of Artificial Sequence: Synthetic oligonucleotide
ucagcauggcuugggaaau

SEQ ID NO: 2572772 - RNA, 19 nt, Artificial Sequence
  Description of Artificial Sequence: Synthetic oligonucleotide
aacgccugucggcagcgau

SEQ ID NO: 2572773 - RNA, 19 nt, Artificial Sequence
  Description of Artificial Sequence: Synthetic oligonucleotide
uugaucugccgaccuuccu

SEQ ID NO: 2572774 - RNA, 19 nt, Artificial Sequence
  Description of Artificial Sequence: Synthetic oligonucleotide
agggaccaaaccguuucuc

SEQ ID NO: 2572775 - RNA, 19 nt, Artificial Sequence
  Description of Artificial Sequence: Synthetic oligonucleotide
uaguagggaccaaaccguu

SEQ ID NO: 2572776 - RNA, 19 nt, Artificial Sequence
  Description of Artificial Sequence: Synthetic oligonucleotide
gaccaaaccguuucucaua

SEQ ID NO: 2572777 - RNA, 19 nt, Artificial Sequence
  Description of Artificial Sequence: Synthetic oligonucleotide
aacccagcaaugacaggcu

SEQ ID NO: 2572778 - RNA, 19 nt, Artificial Sequence
  Description of Artificial Sequence: Synthetic oligonucleotide
ucuucggguccaacccagc

SEQ ID NO: 2572779 - RNA, 19 nt, Artificial Sequence
  Description of Artificial Sequence: Synthetic oligonucleotide
uguugggcucccagagaga

SEQ ID NO: 2572780 - RNA, 19 nt, Artificial Sequence
  Description of Artificial Sequence: Synthetic oligonucleotide
cugccgaccuuccuucagc

SEQ ID NO: 2572781 - RNA, 19 nt, Artificial Sequence
  Description of Artificial Sequence: Synthetic oligonucleotide
ugacgcccaugcccgauac

SEQ ID NO: 2572782 - RNA, 19 nt, Artificial Sequence
  Description of Artificial Sequence: Synthetic oligonucleotide
ugaggcgcugggcaaccgu

SEQ ID NO: 2572783 - RNA, 19 nt, Artificial Sequence
  Description of Artificial Sequence: Synthetic oligonucleotide
augcccgauacagcauccc

SEQ ID NO: 2572784 - RNA, 19 nt, Artificial Sequence
  Description of Artificial Sequence: Synthetic oligonucleotide
cagguucagccgaaacuug

SEQ ID NO: 2572785 - RNA, 19 nt, Artificial Sequence
  Description of Artificial Sequence: Synthetic oligonucleotide
accauggggcagccgauga

SEQ ID NO: 2572786 - RNA, 19 nt, Artificial Sequence
  Description of Artificial Sequence: Synthetic oligonucleotide
cuggaucccgaaacgccug

SEQ ID NO: 2572787 - RNA, 19 nt, Artificial Sequence
  Description of Artificial Sequence: Synthetic oligonucleotide
ccugguggugaucuugucc

SEQ ID NO: 2572788 - RNA, 19 nt, Artificial Sequence
  Description of Artificial Sequence: Synthetic oligonucleotide
ugccgaccuuccuucagcu

SEQ ID NO: 2572789 - RNA, 19 nt, Artificial Sequence
  Description of Artificial Sequence: Synthetic oligonucleotide
uggaucccgaaacgccugu

SEQ ID NO: 2572790 - RNA, 19 nt, Artificial Sequence
  Description of Artificial Sequence: Synthetic oligonucleotide
ggguguaaggcuugaucug

SEQ ID NO: 2572791 - RNA, 19 nt, Artificial Sequence
  Description of Artificial Sequence: Synthetic oligonucleotide
caccaugcucaugagggug

SEQ ID NO: 2572792 - RNA, 19 nt, Artificial Sequence
  Description of Artificial Sequence: Synthetic oligonucleotide
cucaugaggguguaaggcu

SEQ ID NO: 2572793 - RNA, 19 nt, Artificial Sequence
  Description of Artificial Sequence: Synthetic oligonucleotide
gucgguagccaguccggcc

SEQ ID NO: 2572794 - RNA, 19 nt, Artificial Sequence
  Description of Artificial Sequence: Synthetic oligonucleotide
acauuuguucagagcaggu

SEQ ID NO: 2572795 - RNA, 19 nt, Artificial Sequence
  Description of Artificial Sequence: Synthetic oligonucleotide
caggccuauguagagucug

SEQ ID NO: 2572796 - RNA, 19 nt, Artificial Sequence
  Description of Artificial Sequence: Synthetic oligonucleotide
agcguccugguggugaucu

SEQ ID NO: 2572797 - RNA, 19 nt, Artificial Sequence
  Description of Artificial Sequence: Synthetic oligonucleotide
augacaggcucuguauagu

SEQ ID NO: 2572798 - RNA, 19 nt, Artificial Sequence
  Description of Artificial Sequence: Synthetic oligonucleotide
ugggacuccgaccgccacu

SEQ ID NO: 2572799 - RNA, 19 nt, Artificial Sequence
  Description of Artificial Sequence: Synthetic oligonucleotide
augacggccccuccguuau

SEQ ID NO: 2572800 - RNA, 19 nt, Artificial Sequence
  Description of Artificial Sequence: Synthetic oligonucleotide
cacugcgauuccugcaaac

SEQ ID NO: 2572801 - RNA, 19 nt, Artificial Sequence
  Description of Artificial Sequence: Synthetic oligonucleotide
auaggacauaauagacaug

SEQ ID NO: 2572802 - RNA, 19 nt, Artificial Sequence
  Description of Artificial Sequence: Synthetic oligonucleotide
uacaggagguuggccacca

SEQ ID NO: 2572803 - RNA, 19 nt, Artificial Sequence
  Description of Artificial Sequence: Synthetic oligonucleotide
agucugucacccaugggaa

SEQ ID NO: 2572804 - RNA, 19 nt, Artificial Sequence
  Description of Artificial Sequence: Synthetic oligonucleotide
auguggacaaugacgccca

SEQ ID NO: 2572805 - RNA, 19 nt, Artificial Sequence
  Description of Artificial Sequence: Synthetic oligonucleotide
gguccaacccagcaaugac

SEQ ID NO: 2572806 - RNA, 19 nt, Artificial Sequence
  Description of Artificial Sequence: Synthetic oligonucleotide
ccagaauacagggucaguc

SEQ ID NO: 2572807 - RNA, 19 nt, Artificial Sequence
  Description of Artificial Sequence: Synthetic oligonucleotide
cauccgggccuucagcguc

SEQ ID NO: 2572808 - RNA, 19 nt, Artificial Sequence
  Description of Artificial Sequence: Synthetic oligonucleotide
uagccaguccggccaggcc

SEQ ID NO: 2572809 - RNA, 19 nt, Artificial Sequence
  Description of Artificial Sequence: Synthetic oligonucleotide
uggacgucgguagccaguc

SEQ ID NO: 2572810 - RNA, 19 nt, Artificial Sequence
  Description of Artificial Sequence: Synthetic oligonucleotide
aaugacgcccaugcccgau

SEQ ID NO: 2572811 - RNA, 19 nt, Artificial Sequence
  Description of Artificial Sequence: Synthetic oligonucleotide
aggcuugaucugccgaccu

SEQ ID NO: 2572812 - RNA, 19 nt, Artificial Sequence
  Description of Artificial Sequence: Synthetic oligonucleotide
agagcaaaugaagggcuua

SEQ ID NO: 2572813 - RNA, 19 nt, Artificial Sequence
  Description of Artificial Sequence: Synthetic oligonucleotide
gucuucggguccaacccag

SEQ ID NO: 2572814 - RNA, 19 nt, Artificial Sequence
  Description of Artificial Sequence: Synthetic oligonucleotide
agguucagccgaaacuuga

SEQ ID NO: 2572815 - RNA, 19 nt, Artificial Sequence
  Description of Artificial Sequence: Synthetic oligonucleotide
gguucagccgaaacuugag

SEQ ID NO: 2572816 - RNA, 19 nt, Artificial Sequence
  Description of Artificial Sequence: Synthetic oligonucleotide
gggaccaaaccguuucuca

SEQ ID NO: 2572817 - RNA, 19 nt, Artificial Sequence
  Description of Artificial Sequence: Synthetic oligonucleotide
gacucgcacaucccauaca

SEQ ID NO: 2572818 - RNA, 19 nt, Artificial Sequence
  Description of Artificial Sequence: Synthetic oligonucleotide
aucagucaccauggggcag

SEQ ID NO: 2572819 - RNA, 19 nt, Artificial Sequence
  Description of Artificial Sequence: Synthetic oligonucleotide
gagcaaaugaagggcuuaa

SEQ ID NO: 2572820 - RNA, 19 nt, Artificial Sequence
  Description of Artificial Sequence: Synthetic oligonucleotide
cuugaggcgcugggcaacc

SEQ ID NO: 2572821 - RNA, 19 nt, Artificial Sequence
  Description of Artificial Sequence: Synthetic oligonucleotide
auguagagucugucaccca

SEQ ID NO: 2572822 - RNA, 19 nt, Artificial Sequence
  Description of Artificial Sequence: Synthetic oligonucleotide
gagacucgcacaucccaua

SEQ ID NO: 2572823 - RNA, 19 nt, Artificial Sequence
  Description of Artificial Sequence: Synthetic oligonucleotide
uggauccauguugggcucc

SEQ ID NO: 2572824 - RNA, 19 nt, Artificial Sequence
  Description of Artificial Sequence: Synthetic oligonucleotide
aguccguggucaccaucug

SEQ ID NO: 2572825 - RNA, 19 nt, Artificial Sequence
  Description of Artificial Sequence: Synthetic oligonucleotide
ggucuagagagcaaaugaa

SEQ ID NO: 2572826 - RNA, 19 nt, Artificial Sequence
  Description of Artificial Sequence: Synthetic oligonucleotide
ucagcguccugguggugau

SEQ ID NO: 2572827 - RNA, 19 nt, Artificial Sequence
  Description of Artificial Sequence: Synthetic oligonucleotide
aacagguguucuggaucca

SEQ ID NO: 2572828 - RNA, 19 nt, Artificial Sequence
  Description of Artificial Sequence: Synthetic oligonucleotide
gcucuguauaguagggacc

SEQ ID NO: 2572829 - RNA, 19 nt, Artificial Sequence
  Description of Artificial Sequence: Synthetic oligonucleotide
cuguauaguagggaccaaa

SEQ ID NO: 2572830 - RNA, 19 nt, Artificial Sequence
  Description of Artificial Sequence: Synthetic oligonucleotide
cccauacauuuguucagag

SEQ ID NO: 2572831 - RNA, 19 nt, Artificial Sequence
  Description of Artificial Sequence: Synthetic oligonucleotide
cuggaaguccguggucacc

SEQ ID NO: 2572832 - RNA, 19 nt, Artificial Sequence
  Description of Artificial Sequence: Synthetic oligonucleotide
acgucgguagccaguccgg

SEQ ID NO: 2572833 - RNA, 19 nt, Artificial Sequence
  Description of Artificial Sequence: Synthetic oligonucleotide
agagacucgcacaucccau

SEQ ID NO: 2572834 - RNA, 19 nt, Artificial Sequence
  Description of Artificial Sequence: Synthetic oligonucleotide
cauuuguucagagcaggua

SEQ ID NO: 2572835 - RNA, 19 nt, Artificial Sequence
  Description of Artificial Sequence: Synthetic oligonucleotide
gcccgauacagcaucccgg

SEQ ID NO: 2572836 - RNA, 19 nt, Artificial Sequence
  Description of Artificial Sequence: Synthetic oligonucleotide
gggccuggaucccgaaacg

SEQ ID NO: 2572837 - RNA, 19 nt, Artificial Sequence
  Description of Artificial Sequence: Synthetic oligonucleotide
agggaaacugggaccagaa

SEQ ID NO: 2572838 - RNA, 19 nt, Artificial Sequence
  Description of Artificial Sequence: Synthetic oligonucleotide
aaccgucuggacgucggua

SEQ ID NO: 2572839 - RNA, 19 nt, Artificial Sequence
  Description of Artificial Sequence: Synthetic oligonucleotide
guagccaguccggccaggc

SEQ ID NO: 2572840 - RNA, 19 nt, Artificial Sequence
  Description of Artificial Sequence: Synthetic oligonucleotide
ucuguauaguagggaccaa

SEQ ID NO: 2572841 - RNA, 19 nt, Artificial Sequence
  Description of Artificial Sequence: Synthetic oligonucleotide
ccugucggcagcgauggcc

SEQ ID NO: 2572842 - RNA, 19 nt, Artificial Sequence
  Description of Artificial Sequence: Synthetic oligonucleotide
ugucacccaugggaaagau

SEQ ID NO: 2572843 - RNA, 19 nt, Artificial Sequence
  Description of Artificial Sequence: Synthetic oligonucleotide
acggccccuccguuauagg

SEQ ID NO: 2572844 - RNA, 19 nt, Artificial Sequence
  Description of Artificial Sequence: Synthetic oligonucleotide
guggacaaugacgcccaug

SEQ ID NO: 2572845 - RNA, 19 nt, Artificial Sequence
  Description of Artificial Sequence: Synthetic oligonucleotide
gaagggcuuaaaggucuuc

SEQ ID NO: 2572846 - RNA, 19 nt, Artificial Sequence
  Description of Artificial Sequence: Synthetic oligonucleotide
acuccgaccgccacugcga

SEQ ID NO: 2572847 - RNA, 19 nt, Artificial Sequence
  Description of Artificial Sequence: Synthetic oligonucleotide
ggccaugacggccccuccg

SEQ ID NO: 2572848 - RNA, 19 nt, Artificial Sequence
  Description of Artificial Sequence: Synthetic oligonucleotide
uugaggcgcugggcaaccg

SEQ ID NO: 2572849 - RNA, 19 nt, Artificial Sequence
  Description of Artificial Sequence: Synthetic oligonucleotide
ccgaccuuccuucagcuca

SEQ ID NO: 2572850 - RNA, 19 nt, Artificial Sequence
  Description of Artificial Sequence: Synthetic oligonucleotide
cacagcauucagcauggcu

SEQ ID NO: 2572851 - RNA, 19 nt, Artificial Sequence
  Description of Artificial Sequence: Synthetic oligonucleotide
ccaugggaaagaucuucug

SEQ ID NO: 2572852 - RNA, 19 nt, Artificial Sequence
  Description of Artificial Sequence: Synthetic oligonucleotide
gcaaccgucuggacgucgg

SEQ ID NO: 2572853 - RNA, 19 nt, Artificial Sequence
  Description of Artificial Sequence: Synthetic oligonucleotide
agcgauggccacacaauuu

SEQ ID NO: 2572854 - RNA, 19 nt, Artificial Sequence
  Description of Artificial Sequence: Synthetic oligonucleotide
ccgaugaggucuagagagc

SEQ ID NO: 2572855 - RNA, 19 nt, Artificial Sequence
  Description of Artificial Sequence: Synthetic oligonucleotide
uguggacaaugacgcccau

SEQ ID NO: 2572856 - RNA, 19 nt, Artificial Sequence
  Description of Artificial Sequence: Synthetic oligonucleotide
gaggcgcugggcaaccguc

SEQ ID NO: 2572857 - RNA, 19 nt, Artificial Sequence
  Description of Artificial Sequence: Synthetic oligonucleotide
uccugguggugaucuuguc

SEQ ID NO: 2572858 - RNA, 19 nt, Artificial Sequence
  Description of Artificial Sequence: Synthetic oligonucleotide
aguagggaccaaaccguuu

SEQ ID NO: 2572859 - RNA, 19 nt, Artificial Sequence
  Description of Artificial Sequence: Synthetic oligonucleotide
gggacuccgaccgccacug

SEQ ID NO: 2572860 - RNA, 19 nt, Artificial Sequence
  Description of Artificial Sequence: Synthetic oligonucleotide
ccaugcccgauacagcauc

SEQ ID NO: 2572861 - RNA, 19 nt, Artificial Sequence
  Description of Artificial Sequence: Synthetic oligonucleotide
gcgauuccugcaaaccggc

SEQ ID NO: 2572862 - RNA, 19 nt, Artificial Sequence
  Description of Artificial Sequence: Synthetic oligonucleotide
gaauacagggucaguccau

SEQ ID NO: 2572863 - RNA, 19 nt, Artificial Sequence
  Description of Artificial Sequence: Synthetic oligonucleotide
uaaaggucuucggguccaa

SEQ ID NO: 2572864 - RNA, 19 nt, Artificial Sequence
  Description of Artificial Sequence: Synthetic oligonucleotide
gccacugcgauuccugcaa

SEQ ID NO: 2572865 - RNA, 19 nt, Artificial Sequence
  Description of Artificial Sequence: Synthetic oligonucleotide
ccgaccgccacugcgauuc

SEQ ID NO: 2572866 - RNA, 19 nt, Artificial Sequence
  Description of Artificial Sequence: Synthetic oligonucleotide
ggucuucggguccaaccca

SEQ ID NO: 2572867 - RNA, 19 nt, Artificial Sequence
  Description of Artificial Sequence: Synthetic oligonucleotide
ccgguccacagcauucagc

SEQ ID NO: 2572868 - RNA, 19 nt, Artificial Sequence
  Description of Artificial Sequence: Synthetic oligonucleotide
augacgcccaugcccgaua

SEQ ID NO: 2572869 - RNA, 19 nt, Artificial Sequence
  Description of Artificial Sequence: Synthetic oligonucleotide
gucacccaugggaaagauc

SEQ ID NO: 2572870 - RNA, 19 nt, Artificial Sequence
  Description of Artificial Sequence: Synthetic oligonucleotide
auacagcaucccgguccac

SEQ ID NO: 2572871 - RNA, 19 nt, Artificial Sequence
  Description of Artificial Sequence: Synthetic oligonucleotide
ugguggugaucuuguccuu

SEQ ID NO: 2572872 - RNA, 19 nt, Artificial Sequence
  Description of Artificial Sequence: Synthetic oligonucleotide
cugggacuccgaccgccac

SEQ ID NO: 2572873 - RNA, 19 nt, Artificial Sequence
  Description of Artificial Sequence: Synthetic oligonucleotide
acgccugucggcagcgaug

SEQ ID NO: 2572874 - RNA, 19 nt, Artificial Sequence
  Description of Artificial Sequence: Synthetic oligonucleotide
gucuggacgucgguagcca

SEQ ID NO: 2572875 - RNA, 19 nt, Artificial Sequence
  Description of Artificial Sequence: Synthetic oligonucleotide
ggccuggaucccgaaacgc

SEQ ID NO: 2572876 - RNA, 19 nt, Artificial Sequence
  Description of Artificial Sequence: Synthetic oligonucleotide
aaacgccugucggcagcga

SEQ ID NO: 2572877 - RNA, 19 nt, Artificial Sequence
  Description of Artificial Sequence: Synthetic oligonucleotide
ggccccuccguuauaggac

SEQ ID NO: 2572878 - RNA, 19 nt, Artificial Sequence
  Description of Artificial Sequence: Synthetic oligonucleotide
ggaccaaaccguuucucau

SEQ ID NO: 2572879 - RNA, 19 nt, Artificial Sequence
  Description of Artificial Sequence: Synthetic oligonucleotide
cgcacaucccauacauuug

SEQ ID NO: 2572880 - RNA, 19 nt, Artificial Sequence
  Description of Artificial Sequence: Synthetic oligonucleotide
agccgaaacuugaggcgcu

SEQ ID NO: 2572881 - RNA, 19 nt, Artificial Sequence
  Description of Artificial Sequence: Synthetic oligonucleotide
caccauggggcagccgaug

SEQ ID NO: 2572882 - RNA, 19 nt, Artificial Sequence
  Description of Artificial Sequence: Synthetic oligonucleotide
ugcgcucugcugggacucc

SEQ ID NO: 2572883 - RNA, 19 nt, Artificial Sequence
  Description of Artificial Sequence: Synthetic oligonucleotide
ggguccaacccagcaauga

SEQ ID NO: 2572884 - RNA, 19 nt, Artificial Sequence
  Description of Artificial Sequence: Synthetic oligonucleotide
gccccuccguuauaggaca

SEQ ID NO: 2572885 - RNA, 19 nt, Artificial Sequence
  Description of Artificial Sequence: Synthetic oligonucleotide
gacgcccaugcccgauaca

SEQ ID NO: 2572886 - RNA, 19 nt, Artificial Sequence
  Description of Artificial Sequence: Synthetic oligonucleotide
cagcauggcuugggaaaug

SEQ ID NO: 2572887 - RNA, 19 nt, Artificial Sequence
  Description of Artificial Sequence: Synthetic oligonucleotide
ggcaaccgucuggacgucg

SEQ ID NO: 2572888 - RNA, 19 nt, Artificial Sequence
  Description of Artificial Sequence: Synthetic oligonucleotide
gcgcugggcaaccgucugg

SEQ ID NO: 2572889 - RNA, 19 nt, Artificial Sequence
  Description of Artificial Sequence: Synthetic oligonucleotide
cauacagguucagccgaaa

SEQ ID NO: 2572890 - RNA, 19 nt, Artificial Sequence
  Description of Artificial Sequence: Synthetic oligonucleotide
ggcgcugggcaaccgucug

SEQ ID NO: 2572891 - RNA, 19 nt, Artificial Sequence
  Description of Artificial Sequence: Synthetic oligonucleotide
cgaaacgccugucggcagc

SEQ ID NO: 2572892 - RNA, 19 nt, Artificial Sequence
  Description of Artificial Sequence: Synthetic oligonucleotide
gagagcaaaugaagggcuu

SEQ ID NO: 2572893 - RNA, 19 nt, Artificial Sequence
  Description of Artificial Sequence: Synthetic oligonucleotide
cugucacccaugggaaaga

SEQ ID NO: 2572894 - RNA, 19 nt, Artificial Sequence
  Description of Artificial Sequence: Synthetic oligonucleotide
ccguggucaccaucugggc

SEQ ID NO: 2572895 - RNA, 19 nt, Artificial Sequence
  Description of Artificial Sequence: Synthetic oligonucleotide
ccgaaacuugaggcgcugg

SEQ ID NO: 2572896 - RNA, 19 nt, Artificial Sequence
  Description of Artificial Sequence: Synthetic oligonucleotide
ccauggggcagccgaugag

SEQ ID NO: 2572897 - RNA, 19 nt, Artificial Sequence
  Description of Artificial Sequence: Synthetic oligonucleotide
cugcugggacuccgaccgc

SEQ ID NO: 2572898 - RNA, 19 nt, Artificial Sequence
  Description of Artificial Sequence: Synthetic oligonucleotide
ggccuauguagagucuguc

SEQ ID NO: 2572899 - RNA, 19 nt, Artificial Sequence
  Description of Artificial Sequence: Synthetic oligonucleotide
cuggacgucgguagccagu

SEQ ID NO: 2572900 - RNA, 19 nt, Artificial Sequence
  Description of Artificial Sequence: Synthetic oligonucleotide
caaugacgcccaugcccga

SEQ ID NO: 2572901 - RNA, 19 nt, Artificial Sequence
  Description of Artificial Sequence: Synthetic oligonucleotide
ccggccaggccuauguaga

SEQ ID NO: 2572902 - RNA, 19 nt, Artificial Sequence
  Description of Artificial Sequence: Synthetic oligonucleotide
aggcgcugggcaaccgucu

SEQ ID NO: 2572903 - RNA, 19 nt, Artificial Sequence
  Description of Artificial Sequence: Synthetic oligonucleotide
gguagccaguccggccagg

SEQ ID NO: 2572904 - RNA, 19 nt, Artificial Sequence
  Description of Artificial Sequence: Synthetic oligonucleotide
ccuccguuauaggacauaa

SEQ ID NO: 2572905 - RNA, 19 nt, Artificial Sequence
  Description of Artificial Sequence: Synthetic oligonucleotide
ccgaaacgccugucggcag

SEQ ID NO: 2572906 - RNA, 19 nt, Artificial Sequence
  Description of Artificial Sequence: Synthetic oligonucleotide
ggacgucgguagccagucc

SEQ ID NO: 2572907 - RNA, 19 nt, Artificial Sequence
  Description of Artificial Sequence: Synthetic oligonucleotide
ccgucuggacgucgguagc

SEQ ID NO: 2572908 - RNA, 19 nt, Artificial Sequence
  Description of Artificial Sequence: Synthetic oligonucleotide
cgaugaggucuagagagca

SEQ ID NO: 2572909 - RNA, 19 nt, Artificial Sequence
  Description of Artificial Sequence: Synthetic oligonucleotide
cuccguuauaggacauaau

SEQ ID NO: 2572910 - RNA, 19 nt, Artificial Sequence
  Description of Artificial Sequence: Synthetic oligonucleotide
cagcgauggccacacaauu

SEQ ID NO: 2572911 - RNA, 19 nt, Artificial Sequence
  Description of Artificial Sequence: Synthetic oligonucleotide
cccgaaacgccugucggca

SEQ ID NO: 2572912 - RNA, 19 nt, Artificial Sequence
  Description of Artificial Sequence: Synthetic oligonucleotide
ugacggccccuccguuaua

SEQ ID NO: 2572913 - RNA, 19 nt, Artificial Sequence
  Description of Artificial Sequence: Synthetic oligonucleotide
uccgaccgccacugcgauu

SEQ ID NO: 2572914 - RNA, 19 nt, Artificial Sequence
  Description of Artificial Sequence: Synthetic oligonucleotide
cccaugggaaagaucuucu

SEQ ID NO: 2572915 - RNA, 19 nt, Artificial Sequence
  Description of Artificial Sequence: Synthetic oligonucleotide
cguuucucauacaggaggu

SEQ ID NO: 2572916 - RNA, 19 nt, Artificial Sequence
  Description of Artificial Sequence: Synthetic oligonucleotide
cugggccuggaucccgaaa

SEQ ID NO: 2572917 - RNA, 19 nt, Artificial Sequence
  Description of Artificial Sequence: Synthetic oligonucleotide
cgucuggacgucgguagcc

SEQ ID NO: 2572918 - RNA, 19 nt, Artificial Sequence
  Description of Artificial Sequence: Synthetic oligonucleotide
cacaucccauacauuuguu

SEQ ID NO: 2572919 - RNA, 19 nt, Artificial Sequence
  Description of Artificial Sequence: Synthetic oligonucleotide
gccgaaacuugaggcgcug

SEQ ID NO: 2572920 - RNA, 19 nt, Artificial Sequence
  Description of Artificial Sequence: Synthetic oligonucleotide
cccgauacagcaucccggu

SEQ ID NO: 2572921 - RNA, 19 nt, Artificial Sequence
  Description of Artificial Sequence: Synthetic oligonucleotide
cccgguccacagcauucag

SEQ ID NO: 2572922 - RNA, 19 nt, Artificial Sequence
  Description of Artificial Sequence: Synthetic oligonucleotide
gcugggcaaccgucuggac

SEQ ID NO: 2572923 - RNA, 19 nt, Artificial Sequence
  Description of Artificial Sequence: Synthetic oligonucleotide
gccaugacggccccuccgu

SEQ ID NO: 2572924 - RNA, 19 nt, Artificial Sequence
  Description of Artificial Sequence: Synthetic oligonucleotide
gggaaacugggaccagaau

SEQ ID NO: 2572925 - RNA, 19 nt, Artificial Sequence
  Description of Artificial Sequence: Synthetic oligonucleotide
gccgaccuuccuucagcuc

SEQ ID NO: 2572926 - RNA, 19 nt, Artificial Sequence
  Description of Artificial Sequence: Synthetic oligonucleotide
ggaucccgaaacgccuguc

SEQ ID NO: 2572927 - RNA, 19 nt, Artificial Sequence
  Description of Artificial Sequence: Synthetic oligonucleotide
gcgcucugcugggacuccg

SEQ ID NO: 2572928 - RNA, 19 nt, Artificial Sequence
  Description of Artificial Sequence: Synthetic oligonucleotide
cgcccaugcccgauacagc

SEQ ID NO: 2572929 - RNA, 19 nt, Artificial Sequence
  Description of Artificial Sequence: Synthetic oligonucleotide
caucccgguccacagcauu

SEQ ID NO: 2572930 - RNA, 19 nt, Artificial Sequence
  Description of Artificial Sequence: Synthetic oligonucleotide
ccgauacagcaucccgguc

SEQ ID NO: 2572931 - RNA, 19 nt, Artificial Sequence
  Description of Artificial Sequence: Synthetic oligonucleotide
cccagagagacucgcacau

SEQ ID NO: 2572932 - RNA, 19 nt, Artificial Sequence
  Description of Artificial Sequence: Synthetic oligonucleotide
gcagccgaugaggucuaga

SEQ ID NO: 2572933 - RNA, 19 nt, Artificial Sequence
  Description of Artificial Sequence: Synthetic oligonucleotide
ccaaaccguuucucauaca

SEQ ID NO: 2572934 - RNA, 19 nt, Artificial Sequence
  Description of Artificial Sequence: Synthetic oligonucleotide
cucgcacaucccauacauu

SEQ ID NO: 2572935 - RNA, 19 nt, Artificial Sequence
  Description of Artificial Sequence: Synthetic oligonucleotide
guccggccaggccuaugua

SEQ ID NO: 2572936 - RNA, 19 nt, Artificial Sequence
  Description of Artificial Sequence: Synthetic oligonucleotide
ggacuccgaccgccacugc

SEQ ID NO: 2572937 - RNA, 19 nt, Artificial Sequence
  Description of Artificial Sequence: Synthetic oligonucleotide
gggcucccagagagacucg

SEQ ID NO: 2572938 - RNA, 19 nt, Artificial Sequence
  Description of Artificial Sequence: Synthetic oligonucleotide
gguggugaucuuguccuuu

SEQ ID NO: 2572939 - RNA, 19 nt, Artificial Sequence
  Description of Artificial Sequence: Synthetic oligonucleotide
caaccgucuggacgucggu

SEQ ID NO: 2572940 - RNA, 19 nt, Artificial Sequence
  Description of Artificial Sequence: Synthetic oligonucleotide
caguccggccaggccuaug

SEQ ID NO: 2572941 - RNA, 19 nt, Artificial Sequence
  Description of Artificial Sequence: Synthetic oligonucleotide
gcugggacuccgaccgcca

SEQ ID NO: 2572942 - RNA, 19 nt, Artificial Sequence
  Description of Artificial Sequence: Synthetic oligonucleotide
cgucgguagccaguccggc

SEQ ID NO: 2572943 - RNA, 19 nt, Artificial Sequence
  Description of Artificial Sequence: Synthetic oligonucleotide
ggucaccaucugggccugg

SEQ ID NO: 2572944 - RNA, 19 nt, Artificial Sequence
  Description of Artificial Sequence: Synthetic oligonucleotide
cggccccuccguuauagga

SEQ ID NO: 2572945 - RNA, 19 nt, Artificial Sequence
  Description of Artificial Sequence: Synthetic oligonucleotide
gaccgccacugcgauuccu

SEQ ID NO: 2572946 - RNA, 19 nt, Artificial Sequence
  Description of Artificial Sequence: Synthetic oligonucleotide
cagcguccugguggugauc

SEQ ID NO: 2572947 - RNA, 19 nt, Artificial Sequence
  Description of Artificial Sequence: Synthetic oligonucleotide
cacccaugggaaagaucuu

SEQ ID NO: 2572948 - RNA, 19 nt, Artificial Sequence
  Description of Artificial Sequence: Synthetic oligonucleotide
ggcagccgaugaggucuag

SEQ ID NO: 2572949 - RNA, 19 nt, Artificial Sequence
  Description of Artificial Sequence: Synthetic oligonucleotide
ggcuugaucugccgaccuu

SEQ ID NO: 2572950 - RNA, 19 nt, Artificial Sequence
  Description of Artificial Sequence: Synthetic oligonucleotide
cuccgaccgccacugcgau

SEQ ID NO: 2572951 - RNA, 19 nt, Artificial Sequence
  Description of Artificial Sequence: Synthetic oligonucleotide
cgguagccaguccggccag

SEQ ID NO: 2572952 - RNA, 19 nt, Artificial Sequence
  Description of Artificial Sequence: Synthetic oligonucleotide
ccacugcgauuccugcaaa

SEQ ID NO: 2572953 - RNA, 19 nt, Artificial Sequence
  Description of Artificial Sequence: Synthetic oligonucleotide
ccaggccuauguagagucu

SEQ ID NO: 2572954 - RNA, 19 nt, Artificial Sequence
  Description of Artificial Sequence: Synthetic oligonucleotide
ccauccgggccuucagcgu

SEQ ID NO: 2572955 - RNA, 19 nt, Artificial Sequence
  Description of Artificial Sequence: Synthetic oligonucleotide
gguuggccaccaugcucau

SEQ ID NO: 2572956 - RNA, 19 nt, Artificial Sequence
  Description of Artificial Sequence: Synthetic oligonucleotide
gggcaaccgucuggacguc

SEQ ID NO: 2572957 - RNA, 19 nt, Artificial Sequence
  Description of Artificial Sequence: Synthetic oligonucleotide
cgauuccugcaaaccggcu

SEQ ID NO: 2572958 - RNA, 19 nt, Artificial Sequence
  Description of Artificial Sequence: Synthetic oligonucleotide
cgaccgccacugcgauucc

SEQ ID NO: 2572959 - RNA, 19 nt, Artificial Sequence
  Description of Artificial Sequence: Synthetic oligonucleotide
cccaugcccgauacagcau

SEQ ID NO: 2572960 - RNA, 19 nt, Artificial Sequence
  Description of Artificial Sequence: Synthetic oligonucleotide
cccuccguuauaggacaua

SEQ ID NO: 2572961 - RNA, 19 nt, Artificial Sequence
  Description of Artificial Sequence: Synthetic oligonucleotide
gcaucccgguccacagcau

SEQ ID NO: 2572962 - RNA, 19 nt, Artificial Sequence
  Description of Artificial Sequence: Synthetic oligonucleotide
ccaugacggccccuccguu

SEQ ID NO: 2572963 - RNA, 19 nt, Artificial Sequence
  Description of Artificial Sequence: Synthetic oligonucleotide
ccccuccguuauaggacau

SEQ ID NO: 2572964 - RNA, 19 nt, Artificial Sequence
  Description of Artificial Sequence: Synthetic oligonucleotide
gcguccugguggugaucuu

SEQ ID NO: 2572965 - RNA, 19 nt, Artificial Sequence
  Description of Artificial Sequence: Synthetic oligonucleotide
auugucacacaccagaccg

SEQ ID NO: 2572966 - RNA, 19 nt, Artificial Sequence
  Description of Artificial Sequence: Synthetic oligonucleotide
augaguaagacacacgagg

SEQ ID NO: 2572967 - RNA, 19 nt, Artificial Sequence
  Description of Artificial Sequence: Synthetic oligonucleotide
ugaugaguaagacacacga

SEQ ID NO: 2572968 - RNA, 19 nt, Artificial Sequence
  Description of Artificial Sequence: Synthetic oligonucleotide
agaaaauagaugucugugg

SEQ ID NO: 2572969 - RNA, 19 nt, Artificial Sequence
  Description of Artificial Sequence: Synthetic oligonucleotide
uuuaccaccggagaggugg

SEQ ID NO: 2572970 - RNA, 19 nt, Artificial Sequence
  Description of Artificial Sequence: Synthetic oligonucleotide
gaugacagaaaauagaugu

SEQ ID NO: 2572971 - RNA, 19 nt, Artificial Sequence
  Description of Artificial Sequence: Synthetic oligonucleotide
aaauagaugucuguggaag

SEQ ID NO: 2572972 - RNA, 19 nt, Artificial Sequence
  Description of Artificial Sequence: Synthetic oligonucleotide
aauagaugucuguggaagg

SEQ ID NO: 2572973 - RNA, 19 nt, Artificial Sequence
  Description of Artificial Sequence: Synthetic oligonucleotide
auauauugcacugagguug

SEQ ID NO: 2572974 - RNA, 19 nt, Artificial Sequence
  Description of Artificial Sequence: Synthetic oligonucleotide
agugguuacagcugaugcc

SEQ ID NO: 2572975 - RNA, 19 nt, Artificial Sequence
  Description of Artificial Sequence: Synthetic oligonucleotide
uuucagaauggauucagca

SEQ ID NO: 2572976 - RNA, 19 nt, Artificial Sequence
  Description of Artificial Sequence: Synthetic oligonucleotide
gaaaauagaugucugugga

SEQ ID NO: 2572977 - RNA, 19 nt, Artificial Sequence
  Description of Artificial Sequence: Synthetic oligonucleotide
gacaguaccgugccaaggg

SEQ ID NO: 2572978 - RNA, 19 nt, Artificial Sequence
  Description of Artificial Sequence: Synthetic oligonucleotide
uugggaugacagaaaauag

SEQ ID NO: 2572979 - RNA, 19 nt, Artificial Sequence
  Description of Artificial Sequence: Synthetic oligonucleotide
aggauuucacucuguagcg

SEQ ID NO: 2572980 - RNA, 19 nt, Artificial Sequence
  Description of Artificial Sequence: Synthetic oligonucleotide
ucagaauggauucagcauu

SEQ ID NO: 2572981 - RNA, 19 nt, Artificial Sequence
  Description of Artificial Sequence: Synthetic oligonucleotide
ugaguaagacacacgaggu

SEQ ID NO: 2572982 - RNA, 19 nt, Artificial Sequence
  Description of Artificial Sequence: Synthetic oligonucleotide
ugggaugacagaaaauaga

SEQ ID NO: 2572983 - RNA, 19 nt, Artificial Sequence
  Description of Artificial Sequence: Synthetic oligonucleotide
uuuucagacaggauuucac

SEQ ID NO: 2572984 - RNA, 19 nt, Artificial Sequence
  Description of Artificial Sequence: Synthetic oligonucleotide
guugccacaauccuccugc

SEQ ID NO: 2572985 - RNA, 19 nt, Artificial Sequence
  Description of Artificial Sequence: Synthetic oligonucleotide
aggugcguccuccucaucc

SEQ ID NO: 2572986 - RNA, 19 nt, Artificial Sequence
  Description of Artificial Sequence: Synthetic oligonucleotide
uauauugcacugagguugc

SEQ ID NO: 2572987 - RNA, 19 nt, Artificial Sequence
  Description of Artificial Sequence: Synthetic oligonucleotide
aaaauagaugucuguggaa

SEQ ID NO: 2572988 - RNA, 19 nt, Artificial Sequence
  Description of Artificial Sequence: Synthetic oligonucleotide
cuggaaguugccacaaucc

SEQ ID NO: 2572989 - RNA, 19 nt, Artificial Sequence
  Description of Artificial Sequence: Synthetic oligonucleotide
acacacgagguuuugaagu

SEQ ID NO: 2572990 - RNA, 19 nt, Artificial Sequence
  Description of Artificial Sequence: Synthetic oligonucleotide
guuggugcaagggacaccg

SEQ ID NO: 2572991 - RNA, 19 nt, Artificial Sequence
  Description of Artificial Sequence: Synthetic oligonucleotide
aaagugugcgaugcgaucu

SEQ ID NO: 2572992 - RNA, 19 nt, Artificial Sequence
  Description of Artificial Sequence: Synthetic oligonucleotide
ucagacaggauuucacucu

SEQ ID NO: 2572993 - RNA, 19 nt, Artificial Sequence
  Description of Artificial Sequence: Synthetic oligonucleotide
uuuucagaauggauucagc

SEQ ID NO: 2572994 - RNA, 19 nt, Artificial Sequence
  Description of Artificial Sequence: Synthetic oligonucleotide
uuucagacaggauuucacu

SEQ ID NO: 2572995 - RNA, 19 nt, Artificial Sequence
  Description of Artificial Sequence: Synthetic oligonucleotide
auugcacugagguugcugu

SEQ ID NO: 2572996 - RNA, 19 nt, Artificial Sequence
  Description of Artificial Sequence: Synthetic oligonucleotide
acggggagggcauauauug

SEQ ID NO: 2572997 - RNA, 19 nt, Artificial Sequence
  Description of Artificial Sequence: Synthetic oligonucleotide
acagaaaauagaugucugu

SEQ ID NO: 2572998 - RNA, 19 nt, Artificial Sequence
  Description of Artificial Sequence: Synthetic oligonucleotide
uuggggaccauaaucccca

SEQ ID NO: 2572999 - RNA, 19 nt, Artificial Sequence
  Description of Artificial Sequence: Synthetic oligonucleotide
uucagaauggauucagcau

SEQ ID NO: 2573000 - RNA, 19 nt, Artificial Sequence
  Description of Artificial Sequence: Synthetic oligonucleotide
ucauccgaggccuggcugg

SEQ ID NO: 2573001 - RNA, 19 nt, Artificial Sequence
  Description of Artificial Sequence: Synthetic oligonucleotide
cuuggauugucacacacca

SEQ ID NO: 2573002 - RNA, 19 nt, Artificial Sequence
  Description of Artificial Sequence: Synthetic oligonucleotide
cugcagauccuccaugugg

SEQ ID NO: 2573003 - RNA, 19 nt, Artificial Sequence
  Description of Artificial Sequence: Synthetic oligonucleotide
cagcugaugccccugauag

SEQ ID NO: 2573004 - RNA, 19 nt, Artificial Sequence
  Description of Artificial Sequence: Synthetic oligonucleotide
gauuucacucuguagcgca

SEQ ID NO: 2573005 - RNA, 19 nt, Artificial Sequence
  Description of Artificial Sequence: Synthetic oligonucleotide
ugcguuagccuuccaagug

SEQ ID NO: 2573006 - RNA, 19 nt, Artificial Sequence
  Description of Artificial Sequence: Synthetic oligonucleotide
acacacuggcuccaccugc

SEQ ID NO: 2573007 - RNA, 19 nt, Artificial Sequence
  Description of Artificial Sequence: Synthetic oligonucleotide
cagaaaauagaugucugug

SEQ ID NO: 2573008 - RNA, 19 nt, Artificial Sequence
  Description of Artificial Sequence: Synthetic oligonucleotide
uucagacaggauuucacuc

SEQ ID NO: 2573009 - RNA, 19 nt, Artificial Sequence
  Description of Artificial Sequence: Synthetic oligonucleotide
uccacuuccacagugguua

SEQ ID NO: 2573010 - RNA, 19 nt, Artificial Sequence
  Description of Artificial Sequence: Synthetic oligonucleotide
aaguguugggaugacagaa

SEQ ID NO: 2573011 - RNA, 19 nt, Artificial Sequence
  Description of Artificial Sequence: Synthetic oligonucleotide
gagggcauauauugcacug

SEQ ID NO: 2573012 - RNA, 19 nt, Artificial Sequence
  Description of Artificial Sequence: Synthetic oligonucleotide
gacacacgagguuuugaag

SEQ ID NO: 2573013 - RNA, 19 nt, Artificial Sequence
  Description of Artificial Sequence: Synthetic oligonucleotide
ucacacaccagaccgcaga

SEQ ID NO: 2573014 - RNA, 19 nt, Artificial Sequence
  Description of Artificial Sequence: Synthetic oligonucleotide
cagugguuacagcugaugc

SEQ ID NO: 2573015 - RNA, 19 nt, Artificial Sequence
  Description of Artificial Sequence: Synthetic oligonucleotide
accauaauccccacgucac

SEQ ID NO: 2573016 - RNA, 19 nt, Artificial Sequence
  Description of Artificial Sequence: Synthetic oligonucleotide
uggacaggggacuggcugg

SEQ ID NO: 2573017 - RNA, 19 nt, Artificial Sequence
  Description of Artificial Sequence: Synthetic oligonucleotide
aguaccgugccaagggacc

SEQ ID NO: 2573018 - RNA, 19 nt, Artificial Sequence
  Description of Artificial Sequence: Synthetic oligonucleotide
gaccauaauccccacguca

SEQ ID NO: 2573019 - RNA, 19 nt, Artificial Sequence
  Description of Artificial Sequence: Synthetic oligonucleotide
gugguuacagcugaugccc

SEQ ID NO: 2573020 - RNA, 19 nt, Artificial Sequence
  Description of Artificial Sequence: Synthetic oligonucleotide
aaggccuggggugaaagug

SEQ ID NO: 2573021 - RNA, 19 nt, Artificial Sequence
  Description of Artificial Sequence: Synthetic oligonucleotide
gaugaguaagacacacgag

SEQ ID NO: 2573022 - RNA, 19 nt, Artificial Sequence
  Description of Artificial Sequence: Synthetic oligonucleotide
ugaaagugugcgaugcgau

SEQ ID NO: 2573023 - RNA, 19 nt, Artificial Sequence
  Description of Artificial Sequence: Synthetic oligonucleotide
ucuguagcgcagccuagcc

SEQ ID NO: 2573024 - RNA, 19 nt, Artificial Sequence
  Description of Artificial Sequence: Synthetic oligonucleotide
cugaugaguaagacacacg

SEQ ID NO: 2573025 - RNA, 19 nt, Artificial Sequence
  Description of Artificial Sequence: Synthetic oligonucleotide
uaauccccacgucacacac

SEQ ID NO: 2573026 - RNA, 19 nt, Artificial Sequence
  Description of Artificial Sequence: Synthetic oligonucleotide
ugagcaguagcgccagccc

SEQ ID NO: 2573027 - RNA, 19 nt, Artificial Sequence
  Description of Artificial Sequence: Synthetic oligonucleotide
uguggggcuggacagggga

SEQ ID NO: 2573028 - RNA, 19 nt, Artificial Sequence
  Description of Artificial Sequence: Synthetic oligonucleotide
guugggaugacagaaaaua

SEQ ID NO: 2573029 - RNA, 19 nt, Artificial Sequence
  Description of Artificial Sequence: Synthetic oligonucleotide
cauccuggccugaagacug

SEQ ID NO: 2573030 - RNA, 19 nt, Artificial Sequence
  Description of Artificial Sequence: Synthetic oligonucleotide
ugcuuggauugucacacac

SEQ ID NO: 2573031 - RNA, 19 nt, Artificial Sequence
  Description of Artificial Sequence: Synthetic oligonucleotide
auccccacgucacacacug

SEQ ID NO: 2573032 - RNA, 19 nt, Artificial Sequence
  Description of Artificial Sequence: Synthetic oligonucleotide
gacucccucgcccugauga

SEQ ID NO: 2573033 - RNA, 19 nt, Artificial Sequence
  Description of Artificial Sequence: Synthetic oligonucleotide
augacagaaaauagauguc

SEQ ID NO: 2573034 - RNA, 19 nt, Artificial Sequence
  Description of Artificial Sequence: Synthetic oligonucleotide
agauccuccauguggggcu

SEQ ID NO: 2573035 - RNA, 19 nt, Artificial Sequence
  Description of Artificial Sequence: Synthetic oligonucleotide
gcauauauugcacugaggu

SEQ ID NO: 2573036 - RNA, 19 nt, Artificial Sequence
  Description of Artificial Sequence: Synthetic oligonucleotide
guugcuguggggcuggaca

SEQ ID NO: 2573037 - RNA, 19 nt, Artificial Sequence
  Description of Artificial Sequence: Synthetic oligonucleotide
gcugaugccccugauaggg

SEQ ID NO: 2573038 - RNA, 19 nt, Artificial Sequence
  Description of Artificial Sequence: Synthetic oligonucleotide
uuggauugucacacaccag

SEQ ID NO: 2573039 - RNA, 19 nt, Artificial Sequence
  Description of Artificial Sequence: Synthetic oligonucleotide
gaugucuguggaaggugcg

SEQ ID NO: 2573040 - RNA, 19 nt, Artificial Sequence
  Description of Artificial Sequence: Synthetic oligonucleotide
aguagcgccagcccuguga

SEQ ID NO: 2573041 - RNA, 19 nt, Artificial Sequence
  Description of Artificial Sequence: Synthetic oligonucleotide
ugccaagggaccccacggg

SEQ ID NO: 2573042 - RNA, 19 nt, Artificial Sequence
  Description of Artificial Sequence: Synthetic oligonucleotide
accgugcuuggauugucac

SEQ ID NO: 2573043 - RNA, 19 nt, Artificial Sequence
  Description of Artificial Sequence: Synthetic oligonucleotide
gaaagugugcgaugcgauc

SEQ ID NO: 2573044 - RNA, 19 nt, Artificial Sequence
  Description of Artificial Sequence: Synthetic oligonucleotide
uacggaaggacugcggaga

SEQ ID NO: 2573045 - RNA, 19 nt, Artificial Sequence
  Description of Artificial Sequence: Synthetic oligonucleotide
agacacacgagguuuugaa

SEQ ID NO: 2573046 - RNA, 19 nt, Artificial Sequence
  Description of Artificial Sequence: Synthetic oligonucleotide
auguggggcuccugggacc

SEQ ID NO: 2573047 - RNA, 19 nt, Artificial Sequence
  Description of Artificial Sequence: Synthetic oligonucleotide
cugaagacugcgugcgccg

SEQ ID NO: 2573048 - RNA, 19 nt, Artificial Sequence
  Description of Artificial Sequence: Synthetic oligonucleotide
ggaaggacugcggagacag

SEQ ID NO: 2573049 - RNA, 19 nt, Artificial Sequence
  Description of Artificial Sequence: Synthetic oligonucleotide
auagaugucuguggaaggu

SEQ ID NO: 2573050 - RNA, 19 nt, Artificial Sequence
  Description of Artificial Sequence: Synthetic oligonucleotide
cauaauccccacgucacac

SEQ ID NO: 2573051 - RNA, 19 nt, Artificial Sequence
  Description of Artificial Sequence: Synthetic oligonucleotide
uguggaaggugcguccucc

SEQ ID NO: 2573052 - RNA, 19 nt, Artificial Sequence
  Description of Artificial Sequence: Synthetic oligonucleotide
uauugcacugagguugcug

SEQ ID NO: 2573053 - RNA, 19 nt, Artificial Sequence
  Description of Artificial Sequence: Synthetic oligonucleotide
uguugggaugacagaaaau

SEQ ID NO: 2573054 - RNA, 19 nt, Artificial Sequence
  Description of Artificial Sequence: Synthetic oligonucleotide
cuccauguggggcuccugg

SEQ ID NO: 2573055 - RNA, 19 nt, Artificial Sequence
  Description of Artificial Sequence: Synthetic oligonucleotide
gacgagggccccugguugg

SEQ ID NO: 2573056 - RNA, 19 nt, Artificial Sequence
  Description of Artificial Sequence: Synthetic oligonucleotide
gugccaagggaccccacgg

SEQ ID NO: 2573057 - RNA, 19 nt, Artificial Sequence
  Description of Artificial Sequence: Synthetic oligonucleotide
acggaaggacugcggagac

SEQ ID NO: 2573058 - RNA, 19 nt, Artificial Sequence
  Description of Artificial Sequence: Synthetic oligonucleotide
ugcuccuuggggaccauaa

SEQ ID NO: 2573059 - RNA, 19 nt, Artificial Sequence
  Description of Artificial Sequence: Synthetic oligonucleotide
ugucacacaccagaccgca

SEQ ID NO: 2573060 - RNA, 19 nt, Artificial Sequence
  Description of Artificial Sequence: Synthetic oligonucleotide
gcccugaugaguaagacac

SEQ ID NO: 2573061 - RNA, 19 nt, Artificial Sequence
  Description of Artificial Sequence: Synthetic oligonucleotide
auaauccccacgucacaca

SEQ ID NO: 2573062 - RNA, 19 nt, Artificial Sequence
  Description of Artificial Sequence: Synthetic oligonucleotide
cuggacaggggacuggcug

SEQ ID NO: 2573063 - RNA, 19 nt, Artificial Sequence
  Description of Artificial Sequence: Synthetic oligonucleotide
agccuagccuggaaguugc

SEQ ID NO: 2573064 - RNA, 19 nt, Artificial Sequence
  Description of Artificial Sequence: Synthetic oligonucleotide
aaggacugcggagacagua

SEQ ID NO: 2573065 - RNA, 19 nt, Artificial Sequence
  Description of Artificial Sequence: Synthetic oligonucleotide
guacggaaggacugcggag

SEQ ID NO: 2573066 - RNA, 19 nt, Artificial Sequence
  Description of Artificial Sequence: Synthetic oligonucleotide
cuggccugaagacugcgug

SEQ ID NO: 2573067 - RNA, 19 nt, Artificial Sequence
  Description of Artificial Sequence: Synthetic oligonucleotide
agcguccacuuccacagug

SEQ ID NO: 2573068 - RNA, 19 nt, Artificial Sequence
  Description of Artificial Sequence: Synthetic oligonucleotide
uguggggcuccugggaccg

SEQ ID NO: 2573069 - RNA, 19 nt, Artificial Sequence
  Description of Artificial Sequence: Synthetic oligonucleotide
agaccgcagaggcugagga

SEQ ID NO: 2573070 - RNA, 19 nt, Artificial Sequence
  Description of Artificial Sequence: Synthetic oligonucleotide
uccgaggccuggcuggcag

SEQ ID NO: 2573071 - RNA, 19 nt, Artificial Sequence
  Description of Artificial Sequence: Synthetic oligonucleotide
cacuggagggacgagggcc

SEQ ID NO: 2573072 - RNA, 19 nt, Artificial Sequence
  Description of Artificial Sequence: Synthetic oligonucleotide
gacugcggagacaguaccg

SEQ ID NO: 2573073 - RNA, 19 nt, Artificial Sequence
  Description of Artificial Sequence: Synthetic oligonucleotide
uuacagcugaugccccuga

SEQ ID NO: 2573074 - RNA, 19 nt, Artificial Sequence
  Description of Artificial Sequence: Synthetic oligonucleotide
gggcauauauugcacugag

SEQ ID NO: 2573075 - RNA, 19 nt, Artificial Sequence
  Description of Artificial Sequence: Synthetic oligonucleotide
caagggacaccgugcuugg

SEQ ID NO: 2573076 - RNA, 19 nt, Artificial Sequence
  Description of Artificial Sequence: Synthetic oligonucleotide
uggccugaagacugcgugc

SEQ ID NO: 2573077 - RNA, 19 nt, Artificial Sequence
  Description of Artificial Sequence: Synthetic oligonucleotide
ugguuacagcugaugcccc

SEQ ID NO: 2573078 - RNA, 19 nt, Artificial Sequence
  Description of Artificial Sequence: Synthetic oligonucleotide
cuggcuggggcccacugag

SEQ ID NO: 2573079 - RNA, 19 nt, Artificial Sequence
  Description of Artificial Sequence: Synthetic oligonucleotide
uuucacucuguagcgcagc

SEQ ID NO: 2573080 - RNA, 19 nt, Artificial Sequence
  Description of Artificial Sequence: Synthetic oligonucleotide
agcugaugccccugauagg

SEQ ID NO: 2573081 - RNA, 19 nt, Artificial Sequence
  Description of Artificial Sequence: Synthetic oligonucleotide
uaagacacacgagguuuug

SEQ ID NO: 2573082 - RNA, 19 nt, Artificial Sequence
  Description of Artificial Sequence: Synthetic oligonucleotide
aagacacacgagguuuuga

SEQ ID NO: 2573083 - RNA, 19 nt, Artificial Sequence
  Description of Artificial Sequence: Synthetic oligonucleotide
cugggaccggccauccugg

SEQ ID NO: 2573084 - RNA, 19 nt, Artificial Sequence
  Description of Artificial Sequence: Synthetic oligonucleotide
uggggugaaagugugcgau

SEQ ID NO: 2573085 - RNA, 19 nt, Artificial Sequence
  Description of Artificial Sequence: Synthetic oligonucleotide
aggacugcggagacaguac

SEQ ID NO: 2573086 - RNA, 19 nt, Artificial Sequence
  Description of Artificial Sequence: Synthetic oligonucleotide
acaguaccgugccaaggga

SEQ ID NO: 2573087 - RNA, 19 nt, Artificial Sequence
  Description of Artificial Sequence: Synthetic oligonucleotide
uugccacaauccuccugcg

SEQ ID NO: 2573088 - RNA, 19 nt, Artificial Sequence
  Description of Artificial Sequence: Synthetic oligonucleotide
caagggaccccacggggag

SEQ ID NO: 2573089 - RNA, 19 nt, Artificial Sequence
  Description of Artificial Sequence: Synthetic oligonucleotide
acagugguuacagcugaug

SEQ ID NO: 2573090 - RNA, 19 nt, Artificial Sequence
  Description of Artificial Sequence: Synthetic oligonucleotide
gcuggcagcguccacuucc

SEQ ID NO: 2573091 - RNA, 19 nt, Artificial Sequence
  Description of Artificial Sequence: Synthetic oligonucleotide
ggugaaagugugcgaugcg

SEQ ID NO: 2573092 - RNA, 19 nt, Artificial Sequence
  Description of Artificial Sequence: Synthetic oligonucleotide
caguaccgugccaagggac

SEQ ID NO: 2573093 - RNA, 19 nt, Artificial Sequence
  Description of Artificial Sequence: Synthetic oligonucleotide
gaagacugcgugcgccgcc

SEQ ID NO: 2573094 - RNA, 19 nt, Artificial Sequence
  Description of Artificial Sequence: Synthetic oligonucleotide
cacacaccagaccgcagag

SEQ ID NO: 2573095 - RNA, 19 nt, Artificial Sequence
  Description of Artificial Sequence: Synthetic oligonucleotide
caccagaccgcagaggcug

SEQ ID NO: 2573096 - RNA, 19 nt, Artificial Sequence
  Description of Artificial Sequence: Synthetic oligonucleotide
cugaugccccugauagggg

SEQ ID NO: 2573097 - RNA, 19 nt, Artificial Sequence
  Description of Artificial Sequence: Synthetic oligonucleotide
guguugggaugacagaaaa

SEQ ID NO: 2573098 - RNA, 19 nt, Artificial Sequence
  Description of Artificial Sequence: Synthetic oligonucleotide
agggacaccgugcuuggau

SEQ ID NO: 2573099 - RNA, 19 nt, Artificial Sequence
  Description of Artificial Sequence: Synthetic oligonucleotide
gugaaagugugcgaugcga

SEQ ID NO: 2573100 - RNA, 19 nt, Artificial Sequence
  Description of Artificial Sequence: Synthetic oligonucleotide
ggugcguccuccucauccg

SEQ ID NO: 2573101 - RNA, 19 nt, Artificial Sequence
  Description of Artificial Sequence: Synthetic oligonucleotide
acugcggagacaguaccgu

SEQ ID NO: 2573102 - RNA, 19 nt, Artificial Sequence
  Description of Artificial Sequence: Synthetic oligonucleotide
ucuguggaaggugcguccu

SEQ ID NO: 2573103 - RNA, 19 nt, Artificial Sequence
  Description of Artificial Sequence: Synthetic oligonucleotide
ccugguuggugcaagggac

SEQ ID NO: 2573104 - RNA, 19 nt, Artificial Sequence
  Description of Artificial Sequence: Synthetic oligonucleotide
acaaggccuggggugaaag

SEQ ID NO: 2573105 - RNA, 19 nt, Artificial Sequence
  Description of Artificial Sequence: Synthetic oligonucleotide
gcaagggacaccgugcuug

SEQ ID NO: 2573106 - RNA, 19 nt, Artificial Sequence
  Description of Artificial Sequence: Synthetic oligonucleotide
ggaugacagaaaauagaug

SEQ ID NO: 2573107 - RNA, 19 nt, Artificial Sequence
  Description of Artificial Sequence: Synthetic oligonucleotide
aggugggguacggaaggac

SEQ ID NO: 2573108 - RNA, 19 nt, Artificial Sequence
  Description of Artificial Sequence: Synthetic oligonucleotide
ugucuguggaaggugcguc

SEQ ID NO: 2573109 - RNA, 19 nt, Artificial Sequence
  Description of Artificial Sequence: Synthetic oligonucleotide
ccuggggugaaagugugcg

SEQ ID NO: 2573110 - RNA, 19 nt, Artificial Sequence
  Description of Artificial Sequence: Synthetic oligonucleotide
aagugugcgaugcgaucuu

SEQ ID NO: 2573111 - RNA, 19 nt, Artificial Sequence
  Description of Artificial Sequence: Synthetic oligonucleotide
uugcacugagguugcugug

SEQ ID NO: 2573112 - RNA, 19 nt, Artificial Sequence
  Description of Artificial Sequence: Synthetic oligonucleotide
ugggguacggaaggacugc

SEQ ID NO: 2573113 - RNA, 19 nt, Artificial Sequence
  Description of Artificial Sequence: Synthetic oligonucleotide
gagguugcuguggggcugg

SEQ ID NO: 2573114 - RNA, 19 nt, Artificial Sequence
  Description of Artificial Sequence: Synthetic oligonucleotide
acacuggcuccaccugcac

SEQ ID NO: 2573115 - RNA, 19 nt, Artificial Sequence
  Description of Artificial Sequence: Synthetic oligonucleotide
ccugaugaguaagacacac

SEQ ID NO: 2573116 - RNA, 19 nt, Artificial Sequence
  Description of Artificial Sequence: Synthetic oligonucleotide
uguaccgggcugcucugau

SEQ ID NO: 2573117 - RNA, 19 nt, Artificial Sequence
  Description of Artificial Sequence: Synthetic oligonucleotide
ugccacaauccuccugcgu

SEQ ID NO: 2573118 - RNA, 19 nt, Artificial Sequence
  Description of Artificial Sequence: Synthetic oligonucleotide
aaguugccacaauccuccu

SEQ ID NO: 2573119 - RNA, 19 nt, Artificial Sequence
  Description of Artificial Sequence: Synthetic oligonucleotide
cccacugagcaguagcgcc

SEQ ID NO: 2573120 - RNA, 19 nt, Artificial Sequence
  Description of Artificial Sequence: Synthetic oligonucleotide
cucauccgaggccuggcug

SEQ ID NO: 2573121 - RNA, 19 nt, Artificial Sequence
  Description of Artificial Sequence: Synthetic oligonucleotide
ugaagacugcgugcgccgc

SEQ ID NO: 2573122 - RNA, 19 nt, Artificial Sequence
  Description of Artificial Sequence: Synthetic oligonucleotide
ucccucgcccugaugagua

SEQ ID NO: 2573123 - RNA, 19 nt, Artificial Sequence
  Description of Artificial Sequence: Synthetic oligonucleotide
acucccucgcccugaugag

SEQ ID NO: 2573124 - RNA, 19 nt, Artificial Sequence
  Description of Artificial Sequence: Synthetic oligonucleotide
uccaaguguugggaugaca

SEQ ID NO: 2573125 - RNA, 19 nt, Artificial Sequence
  Description of Artificial Sequence: Synthetic oligonucleotide
aagacugcgugcgccgccu

SEQ ID NO: 2573126 - RNA, 19 nt, Artificial Sequence
  Description of Artificial Sequence: Synthetic oligonucleotide
agggcauauauugcacuga

SEQ ID NO: 2573127 - RNA, 19 nt, Artificial Sequence
  Description of Artificial Sequence: Synthetic oligonucleotide
acagcugaugccccugaua

SEQ ID NO: 2573128 - RNA, 19 nt, Artificial Sequence
  Description of Artificial Sequence: Synthetic oligonucleotide
ggcauauauugcacugagg

SEQ ID NO: 2573129 - RNA, 19 nt, Artificial Sequence
  Description of Artificial Sequence: Synthetic oligonucleotide
cucuguagcgcagccuagc

SEQ ID NO: 2573130 - RNA, 19 nt, Artificial Sequence
  Description of Artificial Sequence: Synthetic oligonucleotide
aaggugcguccuccucauc

SEQ ID NO: 2573131 - RNA, 19 nt, Artificial Sequence
  Description of Artificial Sequence: Synthetic oligonucleotide
agcgccagcccugugauuu

SEQ ID NO: 2573132 - RNA, 19 nt, Artificial Sequence
  Description of Artificial Sequence: Synthetic oligonucleotide
ggccugaagacugcgugcg

SEQ ID NO: 2573133 - RNA, 19 nt, Artificial Sequence
  Description of Artificial Sequence: Synthetic oligonucleotide
ugguuggugcaagggacac

SEQ ID NO: 2573134 - RNA, 19 nt, Artificial Sequence
  Description of Artificial Sequence: Synthetic oligonucleotide
ggggagggcauauauugca

SEQ ID NO: 2573135 - RNA, 19 nt, Artificial Sequence
  Description of Artificial Sequence: Synthetic oligonucleotide
ucccgcacccugcuccuug

SEQ ID NO: 2573136 - RNA, 19 nt, Artificial Sequence
  Description of Artificial Sequence: Synthetic oligonucleotide
gccaagggaccccacgggg

SEQ ID NO: 2573137 - RNA, 19 nt, Artificial Sequence
  Description of Artificial Sequence: Synthetic oligonucleotide
gugggguacggaaggacug

SEQ ID NO: 2573138 - RNA, 19 nt, Artificial Sequence
  Description of Artificial Sequence: Synthetic oligonucleotide
uccuccugcguuagccuuc

SEQ ID NO: 2573139 - RNA, 19 nt, Artificial Sequence
  Description of Artificial Sequence: Synthetic oligonucleotide
cagaauggauucagcauua

SEQ ID NO: 2573140 - RNA, 19 nt, Artificial Sequence
  Description of Artificial Sequence: Synthetic oligonucleotide
gggaccauaauccccacgu

SEQ ID NO: 2573141 - RNA, 19 nt, Artificial Sequence
  Description of Artificial Sequence: Synthetic oligonucleotide
ugcgugcgccgccuguacc

SEQ ID NO: 2573142 - RNA, 19 nt, Artificial Sequence
  Description of Artificial Sequence: Synthetic oligonucleotide
ggacugcggagacaguacc

SEQ ID NO: 2573143 - RNA, 19 nt, Artificial Sequence
  Description of Artificial Sequence: Synthetic oligonucleotide
cacacacuggcuccaccug

SEQ ID NO: 2573144 - RNA, 19 nt, Artificial Sequence
  Description of Artificial Sequence: Synthetic oligonucleotide
ccuggaaguugccacaauc

SEQ ID NO: 2573145 - RNA, 19 nt, Artificial Sequence
  Description of Artificial Sequence: Synthetic oligonucleotide
ggaaggugcguccuccuca

SEQ ID NO: 2573146 - RNA, 19 nt, Artificial Sequence
  Description of Artificial Sequence: Synthetic oligonucleotide
cacucuguagcgcagccua

SEQ ID NO: 2573147 - RNA, 19 nt, Artificial Sequence
  Description of Artificial Sequence: Synthetic oligonucleotide
cgugcuuggauugucacac

SEQ ID NO: 2573148 - RNA, 19 nt, Artificial Sequence
  Description of Artificial Sequence: Synthetic oligonucleotide
gacccggggacucccucgc

SEQ ID NO: 2573149 - RNA, 19 nt, Artificial Sequence
  Description of Artificial Sequence: Synthetic oligonucleotide
cacaauccuccugcguuag

SEQ ID NO: 2573150 - RNA, 19 nt, Artificial Sequence
  Description of Artificial Sequence: Synthetic oligonucleotide
gaccgcagaggcugaggac

SEQ ID NO: 2573151 - RNA, 19 nt, Artificial Sequence
  Description of Artificial Sequence: Synthetic oligonucleotide
aggacccggggacucccuc

SEQ ID NO: 2573152 - RNA, 19 nt, Artificial Sequence
  Description of Artificial Sequence: Synthetic oligonucleotide
cugguuggugcaagggaca

SEQ ID NO: 2573153 - RNA, 19 nt, Artificial Sequence
  Description of Artificial Sequence: Synthetic oligonucleotide
ugaggacccggggacuccc

SEQ ID NO: 2573154 - RNA, 19 nt, Artificial Sequence
  Description of Artificial Sequence: Synthetic oligonucleotide
ccccacgucacacacuggc

SEQ ID NO: 2573155 - RNA, 19 nt, Artificial Sequence
  Description of Artificial Sequence: Synthetic oligonucleotide
acgagguuuugaaguuuuc

SEQ ID NO: 2573156 - RNA, 19 nt, Artificial Sequence
  Description of Artificial Sequence: Synthetic oligonucleotide
augucuguggaaggugcgu

SEQ ID NO: 2573157 - RNA, 19 nt, Artificial Sequence
  Description of Artificial Sequence: Synthetic oligonucleotide
acaccgugcuuggauuguc

SEQ ID NO: 2573158 - RNA, 19 nt, Artificial Sequence
  Description of Artificial Sequence: Synthetic oligonucleotide
uacagcugaugccccugau

SEQ ID NO: 2573159 - RNA, 19 nt, Artificial Sequence
  Description of Artificial Sequence: Synthetic oligonucleotide
cugcggagacaguaccgug

SEQ ID NO: 2573160 - RNA, 19 nt, Artificial Sequence
  Description of Artificial Sequence: Synthetic oligonucleotide
ggacaccgugcuuggauug

SEQ ID NO: 2573161 - RNA, 19 nt, Artificial Sequence
  Description of Artificial Sequence: Synthetic oligonucleotide
ggacgagggccccugguug

SEQ ID NO: 2573162 - RNA, 19 nt, Artificial Sequence
  Description of Artificial Sequence: Synthetic oligonucleotide
ggauugucacacaccagac

SEQ ID NO: 2573163 - RNA, 19 nt, Artificial Sequence
  Description of Artificial Sequence: Synthetic oligonucleotide
cauauauugcacugagguu

SEQ ID NO: 2573164 - RNA, 19 nt, Artificial Sequence
  Description of Artificial Sequence: Synthetic oligonucleotide
guaccgugccaagggaccc

SEQ ID NO: 2573165 - RNA, 19 nt, Artificial Sequence
  Description of Artificial Sequence: Synthetic oligonucleotide
aauccccacgucacacacu

SEQ ID NO: 2573166 - RNA, 19 nt, Artificial Sequence
  Description of Artificial Sequence: Synthetic oligonucleotide
gcggagacaguaccgugcc

SEQ ID NO: 2573167 - RNA, 19 nt, Artificial Sequence
  Description of Artificial Sequence: Synthetic oligonucleotide
ucgcccugaugaguaagac

SEQ ID NO: 2573168 - RNA, 19 nt, Artificial Sequence
  Description of Artificial Sequence: Synthetic oligonucleotide
gcuuggauugucacacacc

SEQ ID NO: 2573169 - RNA, 19 nt, Artificial Sequence
  Description of Artificial Sequence: Synthetic oligonucleotide
cagccuagccuggaaguug

SEQ ID NO: 2573170 - RNA, 19 nt, Artificial Sequence
  Description of Artificial Sequence: Synthetic oligonucleotide
gaguaagacacacgagguu

SEQ ID NO: 2573171 - RNA, 19 nt, Artificial Sequence
  Description of Artificial Sequence: Synthetic oligonucleotide
uccccacgucacacacugg

SEQ ID NO: 2573172 - RNA, 19 nt, Artificial Sequence
  Description of Artificial Sequence: Synthetic oligonucleotide
uccucauccgaggccuggc

SEQ ID NO: 2573173 - RNA, 19 nt, Artificial Sequence
  Description of Artificial Sequence: Synthetic oligonucleotide
gggaugacagaaaauagau

SEQ ID NO: 2573174 - RNA, 19 nt, Artificial Sequence
  Description of Artificial Sequence: Synthetic oligonucleotide
ggcccacugagcaguagcg

SEQ ID NO: 2573175 - RNA, 19 nt, Artificial Sequence
  Description of Artificial Sequence: Synthetic oligonucleotide
cacugagcaguagcgccag

SEQ ID NO: 2573176 - RNA, 19 nt, Artificial Sequence
  Description of Artificial Sequence: Synthetic oligonucleotide
cucgcccugaugaguaaga

SEQ ID NO: 2573177 - RNA, 19 nt, Artificial Sequence
  Description of Artificial Sequence: Synthetic oligonucleotide
ccugaagacugcgugcgcc

SEQ ID NO: 2573178 - RNA, 19 nt, Artificial Sequence
  Description of Artificial Sequence: Synthetic oligonucleotide
auccuccugcguuagccuu

SEQ ID NO: 2573179 - RNA, 19 nt, Artificial Sequence
  Description of Artificial Sequence: Synthetic oligonucleotide
accugcacugugaucuucu

SEQ ID NO: 2573180 - RNA, 19 nt, Artificial Sequence
  Description of Artificial Sequence: Synthetic oligonucleotide
guaccgggcugcucugaug

SEQ ID NO: 2573181 - RNA, 19 nt, Artificial Sequence
  Description of Artificial Sequence: Synthetic oligonucleotide
ggggaccauaauccccacg

SEQ ID NO: 2573182 - RNA, 19 nt, Artificial Sequence
  Description of Artificial Sequence: Synthetic oligonucleotide
agaauggauucagcauuaa

SEQ ID NO: 2573183 - RNA, 19 nt, Artificial Sequence
  Description of Artificial Sequence: Synthetic oligonucleotide
ggacccggggacucccucg

SEQ ID NO: 2573184 - RNA, 19 nt, Artificial Sequence
  Description of Artificial Sequence: Synthetic oligonucleotide
accggagaggugggguacg

SEQ ID NO: 2573185 - RNA, 19 nt, Artificial Sequence
  Description of Artificial Sequence: Synthetic oligonucleotide
gcacugugaucuucugcag

SEQ ID NO: 2573186 - RNA, 19 nt, Artificial Sequence
  Description of Artificial Sequence: Synthetic oligonucleotide
guagcgcagccuagccugg

SEQ ID NO: 2573187 - RNA, 19 nt, Artificial Sequence
  Description of Artificial Sequence: Synthetic oligonucleotide
cagaccgcagaggcugagg

SEQ ID NO: 2573188 - RNA, 19 nt, Artificial Sequence
  Description of Artificial Sequence: Synthetic oligonucleotide
accaccggagagguggggu

SEQ ID NO: 2573189 - RNA, 19 nt, Artificial Sequence
  Description of Artificial Sequence: Synthetic oligonucleotide
gagggacgagggccccugg

SEQ ID NO: 2573190 - RNA, 19 nt, Artificial Sequence
  Description of Artificial Sequence: Synthetic oligonucleotide
ggggugaaagugugcgaug

SEQ ID NO: 2573191 - RNA, 19 nt, Artificial Sequence
  Description of Artificial Sequence: Synthetic oligonucleotide
ccugggaccggccauccug

SEQ ID NO: 2573192 - RNA, 19 nt, Artificial Sequence
  Description of Artificial Sequence: Synthetic oligonucleotide
gaccuccccucccgcaccc

SEQ ID NO: 2573193 - RNA, 19 nt, Artificial Sequence
  Description of Artificial Sequence: Synthetic oligonucleotide
uaccgugccaagggacccc

SEQ ID NO: 2573194 - RNA, 19 nt, Artificial Sequence
  Description of Artificial Sequence: Synthetic oligonucleotide
ggcagcguccacuuccaca

SEQ ID NO: 2573195 - RNA, 19 nt, Artificial Sequence
  Description of Artificial Sequence: Synthetic oligonucleotide
ggcugcucugaugucuccg

SEQ ID NO: 2573196 - RNA, 19 nt, Artificial Sequence
  Description of Artificial Sequence: Synthetic oligonucleotide
gcguccuccucauccgagg

SEQ ID NO: 2573197 - RNA, 19 nt, Artificial Sequence
  Description of Artificial Sequence: Synthetic oligonucleotide
cuccccucccgcacccugc

SEQ ID NO: 2573198 - RNA, 19 nt, Artificial Sequence
  Description of Artificial Sequence: Synthetic oligonucleotide
agggacgagggccccuggu

SEQ ID NO: 2573199 - RNA, 19 nt, Artificial Sequence
  Description of Artificial Sequence: Synthetic oligonucleotide
gacaggggacuggcugggg

SEQ ID NO: 2573200 - RNA, 19 nt, Artificial Sequence
  Description of Artificial Sequence: Synthetic oligonucleotide
gccauccuggccugaagac

SEQ ID NO: 2573201 - RNA, 19 nt, Artificial Sequence
  Description of Artificial Sequence: Synthetic oligonucleotide
acucuguagcgcagccuag

SEQ ID NO: 2573202 - RNA, 19 nt, Artificial Sequence
  Description of Artificial Sequence: Synthetic oligonucleotide
gaaggugcguccuccucau

SEQ ID NO: 2573203 - RNA, 19 nt, Artificial Sequence
  Description of Artificial Sequence: Synthetic oligonucleotide
uuggugcaagggacaccgu

SEQ ID NO: 2573204 - RNA, 19 nt, Artificial Sequence
  Description of Artificial Sequence: Synthetic oligonucleotide
ccacgucacacacuggcuc

SEQ ID NO: 2573205 - RNA, 19 nt, Artificial Sequence
  Description of Artificial Sequence: Synthetic oligonucleotide
aacaaggccuggggugaaa

SEQ ID NO: 2573206 - RNA, 19 nt, Artificial Sequence
  Description of Artificial Sequence: Synthetic oligonucleotide
gggguacggaaggacugcg

SEQ ID NO: 2573207 - RNA, 19 nt, Artificial Sequence
  Description of Artificial Sequence: Synthetic oligonucleotide
uuccaaguguugggaugac

SEQ ID NO: 2573208 - RNA, 19 nt, Artificial Sequence
  Description of Artificial Sequence: Synthetic oligonucleotide
uggggaccauaauccccac

SEQ ID NO: 2573209 - RNA, 19 nt, Artificial Sequence
  Description of Artificial Sequence: Synthetic oligonucleotide
gcacccugcuccuugggga

SEQ ID NO: 2573210 - RNA, 19 nt, Artificial Sequence
  Description of Artificial Sequence: Synthetic oligonucleotide
cuggggugaaagugugcga

SEQ ID NO: 2573211 - RNA, 19 nt, Artificial Sequence
  Description of Artificial Sequence: Synthetic oligonucleotide
acacgagguuuugaaguuu

SEQ ID NO: 2573212 - RNA, 19 nt, Artificial Sequence
  Description of Artificial Sequence: Synthetic oligonucleotide
cugcguuagccuuccaagu

SEQ ID NO: 2573213 - RNA, 19 nt, Artificial Sequence
  Description of Artificial Sequence: Synthetic oligonucleotide
cuggcagcguccacuucca

SEQ ID NO: 2573214 - RNA, 19 nt, Artificial Sequence
  Description of Artificial Sequence: Synthetic oligonucleotide
uggcuggcagcguccacuu

SEQ ID NO: 2573215 - RNA, 19 nt, Artificial Sequence
  Description of Artificial Sequence: Synthetic oligonucleotide
gcguccacuuccacagugg

SEQ ID NO: 2573216 - RNA, 19 nt, Artificial Sequence
  Description of Artificial Sequence: Synthetic oligonucleotide
gugcaagggacaccgugcu

SEQ ID NO: 2573217 - RNA, 19 nt, Artificial Sequence
  Description of Artificial Sequence: Synthetic oligonucleotide
caccgugcuuggauuguca

SEQ ID NO: 2573218 - RNA, 19 nt, Artificial Sequence
  Description of Artificial Sequence: Synthetic oligonucleotide
gucacacaccagaccgcag

SEQ ID NO: 2573219 - RNA, 19 nt, Artificial Sequence
  Description of Artificial Sequence: Synthetic oligonucleotide
gggagggcauauauugcac

SEQ ID NO: 2573220 - RNA, 19 nt, Artificial Sequence
  Description of Artificial Sequence: Synthetic oligonucleotide
ggagggcauauauugcacu

SEQ ID NO: 2573221 - RNA, 19 nt, Artificial Sequence
  Description of Artificial Sequence: Synthetic oligonucleotide
ggguacggaaggacugcgg

SEQ ID NO: 2573222 - RNA, 19 nt, Artificial Sequence
  Description of Artificial Sequence: Synthetic oligonucleotide
ugggaccggccauccuggc

SEQ ID NO: 2573223 - RNA, 19 nt, Artificial Sequence
  Description of Artificial Sequence: Synthetic oligonucleotide
ggaccauaauccccacguc

SEQ ID NO: 2573224 - RNA, 19 nt, Artificial Sequence
  Description of Artificial Sequence: Synthetic oligonucleotide
gcugcucugaugucuccga

SEQ ID NO: 2573225 - RNA, 19 nt, Artificial Sequence
  Description of Artificial Sequence: Synthetic oligonucleotide
ggacaggggacuggcuggg

SEQ ID NO: 2573226 - RNA, 19 nt, Artificial Sequence
  Description of Artificial Sequence: Synthetic oligonucleotide
ggaccggccauccuggccu

SEQ ID NO: 2573227 - RNA, 19 nt, Artificial Sequence
  Description of Artificial Sequence: Synthetic oligonucleotide
gauccuccauguggggcuc

SEQ ID NO: 2573228 - RNA, 19 nt, Artificial Sequence
  Description of Artificial Sequence: Synthetic oligonucleotide
aagggacaccgugcuugga

SEQ ID NO: 2573229 - RNA, 19 nt, Artificial Sequence
  Description of Artificial Sequence: Synthetic oligonucleotide
uggcaggcucugaggccug

SEQ ID NO: 2573230 - RNA, 19 nt, Artificial Sequence
  Description of Artificial Sequence: Synthetic oligonucleotide
agcgcagccuagccuggaa

SEQ ID NO: 2573231 - RNA, 19 nt, Artificial Sequence
  Description of Artificial Sequence: Synthetic oligonucleotide
caccggagaggugggguac

SEQ ID NO: 2573232 - RNA, 19 nt, Artificial Sequence
  Description of Artificial Sequence: Synthetic oligonucleotide
gcgcagccuagccuggaag

SEQ ID NO: 2573233 - RNA, 19 nt, Artificial Sequence
  Description of Artificial Sequence: Synthetic oligonucleotide
cgugccaagggaccccacg

SEQ ID NO: 2573234 - RNA, 19 nt, Artificial Sequence
  Description of Artificial Sequence: Synthetic oligonucleotide
uccugggaccggccauccu

SEQ ID NO: 2573235 - RNA, 19 nt, Artificial Sequence
  Description of Artificial Sequence: Synthetic oligonucleotide
guagcgccagcccugugau

SEQ ID NO: 2573236 - RNA, 19 nt, Artificial Sequence
  Description of Artificial Sequence: Synthetic oligonucleotide
cacacgagguuuugaaguu

SEQ ID NO: 2573237 - RNA, 19 nt, Artificial Sequence
  Description of Artificial Sequence: Synthetic oligonucleotide
cacgagguuuugaaguuuu

SEQ ID NO: 2573238 - RNA, 19 nt, Artificial Sequence
  Description of Artificial Sequence: Synthetic oligonucleotide
gaggugggguacggaagga

SEQ ID NO: 2573239 - RNA, 19 nt, Artificial Sequence
  Description of Artificial Sequence: Synthetic oligonucleotide
auauugcacugagguugcu

SEQ ID NO: 2573240 - RNA, 19 nt, Artificial Sequence
  Description of Artificial Sequence: Synthetic oligonucleotide
gugcuuggauugucacaca

SEQ ID NO: 2573241 - RNA, 19 nt, Artificial Sequence
  Description of Artificial Sequence: Synthetic oligonucleotide
cuccugggaccggccaucc

SEQ ID NO: 2573242 - RNA, 19 nt, Artificial Sequence
  Description of Artificial Sequence: Synthetic oligonucleotide
gugcgccgccuguaccggg

SEQ ID NO: 2573243 - RNA, 19 nt, Artificial Sequence
  Description of Artificial Sequence: Synthetic oligonucleotide
gccacaauccuccugcguu

SEQ ID NO: 2573244 - RNA, 19 nt, Artificial Sequence
  Description of Artificial Sequence: Synthetic oligonucleotide
cugcgugcgccgccuguac

SEQ ID NO: 2573245 - RNA, 19 nt, Artificial Sequence
  Description of Artificial Sequence: Synthetic oligonucleotide
agugugcgaugcgaucuuu

SEQ ID NO: 2573246 - RNA, 19 nt, Artificial Sequence
  Description of Artificial Sequence: Synthetic oligonucleotide
accgugccaagggacccca

SEQ ID NO: 2573247 - RNA, 19 nt, Artificial Sequence
  Description of Artificial Sequence: Synthetic oligonucleotide
agacugcgugcgccgccug

SEQ ID NO: 2573248 - RNA, 19 nt, Artificial Sequence
  Description of Artificial Sequence: Synthetic oligonucleotide
ggaccuccccucccgcacc

SEQ ID NO: 2573249 - RNA, 19 nt, Artificial Sequence
  Description of Artificial Sequence: Synthetic oligonucleotide
gcguuagccuuccaagugu

SEQ ID NO: 2573250 - RNA, 19 nt, Artificial Sequence
  Description of Artificial Sequence: Synthetic oligonucleotide
guaagacacacgagguuuu

SEQ ID NO: 2573251 - RNA, 19 nt, Artificial Sequence
  Description of Artificial Sequence: Synthetic oligonucleotide
guggggcuggacaggggac

SEQ ID NO: 2573252 - RNA, 19 nt, Artificial Sequence
  Description of Artificial Sequence: Synthetic oligonucleotide
gacaccgugcuuggauugu

SEQ ID NO: 2573253 - RNA, 19 nt, Artificial Sequence
  Description of Artificial Sequence: Synthetic oligonucleotide
uagcgcagccuagccugga

SEQ ID NO: 2573254 - RNA, 19 nt, Artificial Sequence
  Description of Artificial Sequence: Synthetic oligonucleotide
cggggagggcauauauugc

SEQ ID NO: 2573255 - RNA, 19 nt, Artificial Sequence
  Description of Artificial Sequence: Synthetic oligonucleotide
cuggagggacgagggcccc

SEQ ID NO: 2573256 - RNA, 19 nt, Artificial Sequence
  Description of Artificial Sequence: Synthetic oligonucleotide
gccccugguuggugcaagg

SEQ ID NO: 2573257 - RNA, 19 nt, Artificial Sequence
  Description of Artificial Sequence: Synthetic oligonucleotide
cuguagcgcagccuagccu

SEQ ID NO: 2573258 - RNA, 19 nt, Artificial Sequence
  Description of Artificial Sequence: Synthetic oligonucleotide
ggccuggggugaaagugug

SEQ ID NO: 2573259 - RNA, 19 nt, Artificial Sequence
  Description of Artificial Sequence: Synthetic oligonucleotide
cgagguuuugaaguuuuca

SEQ ID NO: 2573260 - RNA, 19 nt, Artificial Sequence
  Description of Artificial Sequence: Synthetic oligonucleotide
caccugcacugugaucuuc

SEQ ID NO: 2573261 - RNA, 19 nt, Artificial Sequence
  Description of Artificial Sequence: Synthetic oligonucleotide
ccaagggaccccacgggga

SEQ ID NO: 2573262 - RNA, 19 nt, Artificial Sequence
  Description of Artificial Sequence: Synthetic oligonucleotide
ggugggguacggaaggacu

SEQ ID NO: 2573263 - RNA, 19 nt, Artificial Sequence
  Description of Artificial Sequence: Synthetic oligonucleotide
gguuacagcugaugccccu

SEQ ID NO: 2573264 - RNA, 19 nt, Artificial Sequence
  Description of Artificial Sequence: Synthetic oligonucleotide
acugcgugcgccgccugua

SEQ ID NO: 2573265 - RNA, 19 nt, Artificial Sequence
  Description of Artificial Sequence: Synthetic oligonucleotide
gcccacugagcaguagcgc

SEQ ID NO: 2573266 - RNA, 19 nt, Artificial Sequence
  Description of Artificial Sequence: Synthetic oligonucleotide
uggggcccacugagcagua

SEQ ID NO: 2573267 - RNA, 19 nt, Artificial Sequence
  Description of Artificial Sequence: Synthetic oligonucleotide
cccggggacucccucgccc

SEQ ID NO: 2573268 - RNA, 19 nt, Artificial Sequence
  Description of Artificial Sequence: Synthetic oligonucleotide
cgcacccugcuccuugggg

SEQ ID NO: 2573269 - RNA, 19 nt, Artificial Sequence
  Description of Artificial Sequence: Synthetic oligonucleotide
ccauaauccccacgucaca

SEQ ID NO: 2573270 - RNA, 19 nt, Artificial Sequence
  Description of Artificial Sequence: Synthetic oligonucleotide
ggcugcacuggagggacga

SEQ ID NO: 2573271 - RNA, 19 nt, Artificial Sequence
  Description of Artificial Sequence: Synthetic oligonucleotide
guggaaggugcguccuccu

SEQ ID NO: 2573272 - RNA, 19 nt, Artificial Sequence
  Description of Artificial Sequence: Synthetic oligonucleotide
gacugcgugcgccgccugu

SEQ ID NO: 2573273 - RNA, 19 nt, Artificial Sequence
  Description of Artificial Sequence: Synthetic oligonucleotide
cacuuccacagugguuaca

SEQ ID NO: 2573274 - RNA, 19 nt, Artificial Sequence
  Description of Artificial Sequence: Synthetic oligonucleotide
ccuguaccgggcugcucug

SEQ ID NO: 2573275 - RNA, 19 nt, Artificial Sequence
  Description of Artificial Sequence: Synthetic oligonucleotide
gccgccuguaccgggcugc

SEQ ID NO: 2573276 - RNA, 19 nt, Artificial Sequence
  Description of Artificial Sequence: Synthetic oligonucleotide
cccgcacccugcuccuugg

SEQ ID NO: 2573277 - RNA, 19 nt, Artificial Sequence
  Description of Artificial Sequence: Synthetic oligonucleotide
acgagggccccugguuggu

SEQ ID NO: 2573278 - RNA, 19 nt, Artificial Sequence
  Description of Artificial Sequence: Synthetic oligonucleotide
ccuccugcguuagccuucc

SEQ ID NO: 2573279 - RNA, 19 nt, Artificial Sequence
  Description of Artificial Sequence: Synthetic oligonucleotide
ccucgcccugaugaguaag

SEQ ID NO: 2573280 - RNA, 19 nt, Artificial Sequence
  Description of Artificial Sequence: Synthetic oligonucleotide
cacuggcuccaccugcacu

SEQ ID NO: 2573281 - RNA, 19 nt, Artificial Sequence
  Description of Artificial Sequence: Synthetic oligonucleotide
ccgugcuuggauugucaca

SEQ ID NO: 2573282 - RNA, 19 nt, Artificial Sequence
  Description of Artificial Sequence: Synthetic oligonucleotide
gcugaggacccggggacuc

SEQ ID NO: 2573283 - RNA, 19 nt, Artificial Sequence
  Description of Artificial Sequence: Synthetic oligonucleotide
ccuagccuggaaguugcca

SEQ ID NO: 2573284 - RNA, 19 nt, Artificial Sequence
  Description of Artificial Sequence: Synthetic oligonucleotide
gcugcacuggagggacgag

SEQ ID NO: 2573285 - RNA, 19 nt, Artificial Sequence
  Description of Artificial Sequence: Synthetic oligonucleotide
ggccccugguuggugcaag

SEQ ID NO: 2573286 - RNA, 19 nt, Artificial Sequence
  Description of Artificial Sequence: Synthetic oligonucleotide
ccacaauccuccugcguua

SEQ ID NO: 2573287 - RNA, 19 nt, Artificial Sequence
  Description of Artificial Sequence: Synthetic oligonucleotide
ccgaggccuggcuggcagg

SEQ ID NO: 2573288 - RNA, 19 nt, Artificial Sequence
  Description of Artificial Sequence: Synthetic oligonucleotide
cacggggagggcauauauu

SEQ ID NO: 2573289 - RNA, 19 nt, Artificial Sequence
  Description of Artificial Sequence: Synthetic oligonucleotide
cccugaugaguaagacaca

SEQ ID NO: 2573290 - RNA, 19 nt, Artificial Sequence
  Description of Artificial Sequence: Synthetic oligonucleotide
caguagcgccagcccugug

SEQ ID NO: 2573291 - RNA, 19 nt, Artificial Sequence
  Description of Artificial Sequence: Synthetic oligonucleotide
cgcccugaugaguaagaca

SEQ ID NO: 2573292 - RNA, 19 nt, Artificial Sequence
  Description of Artificial Sequence: Synthetic oligonucleotide
gggacaccgugcuuggauu

SEQ ID NO: 2573293 - RNA, 19 nt, Artificial Sequence
  Description of Artificial Sequence: Synthetic oligonucleotide
gcucugaggccuggcuggc

SEQ ID NO: 2573294 - RNA, 19 nt, Artificial Sequence
  Description of Artificial Sequence: Synthetic oligonucleotide
auccgaggccuggcuggca

SEQ ID NO: 2573295 - RNA, 19 nt, Artificial Sequence
  Description of Artificial Sequence: Synthetic oligonucleotide
cacagugguuacagcugau

SEQ ID NO: 2573296 - RNA, 19 nt, Artificial Sequence
  Description of Artificial Sequence: Synthetic oligonucleotide
ccggagaggugggguacgg

SEQ ID NO: 2573297 - RNA, 19 nt, Artificial Sequence
  Description of Artificial Sequence: Synthetic oligonucleotide
cuguaccgggcugcucuga

SEQ ID NO: 2573298 - RNA, 19 nt, Artificial Sequence
  Description of Artificial Sequence: Synthetic oligonucleotide
ggaccccacggggagggca

SEQ ID NO: 2573299 - RNA, 19 nt, Artificial Sequence
  Description of Artificial Sequence: Synthetic oligonucleotide
gccuggggugaaagugugc

SEQ ID NO: 2573300 - RNA, 19 nt, Artificial Sequence
  Description of Artificial Sequence: Synthetic oligonucleotide
gaaggacugcggagacagu

SEQ ID NO: 2573301 - RNA, 19 nt, Artificial Sequence
  Description of Artificial Sequence: Synthetic oligonucleotide
ggacucccucgcccugaug

SEQ ID NO: 2573302 - RNA, 19 nt, Artificial Sequence
  Description of Artificial Sequence: Synthetic oligonucleotide
cgggcugcucugaugucuc

SEQ ID NO: 2573303 - RNA, 19 nt, Artificial Sequence
  Description of Artificial Sequence: Synthetic oligonucleotide
gcuccugggaccggccauc

SEQ ID NO: 2573304 - RNA, 19 nt, Artificial Sequence
  Description of Artificial Sequence: Synthetic oligonucleotide
guggggcuccugggaccgg

SEQ ID NO: 2573305 - RNA, 19 nt, Artificial Sequence
  Description of Artificial Sequence: Synthetic oligonucleotide
cucugaggccuggcuggca

SEQ ID NO: 2573306 - RNA, 19 nt, Artificial Sequence
  Description of Artificial Sequence: Synthetic oligonucleotide
gaccccacggggagggcau

SEQ ID NO: 2573307 - RNA, 19 nt, Artificial Sequence
  Description of Artificial Sequence: Synthetic oligonucleotide
gugugcgaugcgaucuuuu

SEQ ID NO: 2573308 - RNA, 19 nt, Artificial Sequence
  Description of Artificial Sequence: Synthetic oligonucleotide
ccagaccgcagaggcugag

SEQ ID NO: 2573309 - RNA, 19 nt, Artificial Sequence
  Description of Artificial Sequence: Synthetic oligonucleotide
gggacgagggccccugguu

SEQ ID NO: 2573310 - RNA, 19 nt, Artificial Sequence
  Description of Artificial Sequence: Synthetic oligonucleotide
ggggacucccucgcccuga

SEQ ID NO: 2573311 - RNA, 19 nt, Artificial Sequence
  Description of Artificial Sequence: Synthetic oligonucleotide
ccgcacccugcuccuuggg

SEQ ID NO: 2573312 - RNA, 19 nt, Artificial Sequence
  Description of Artificial Sequence: Synthetic oligonucleotide
agguugcuguggggcugga

SEQ ID NO: 2573313 - RNA, 19 nt, Artificial Sequence
  Description of Artificial Sequence: Synthetic oligonucleotide
cucccucgcccugaugagu

SEQ ID NO: 2573314 - RNA, 19 nt, Artificial Sequence
  Description of Artificial Sequence: Synthetic oligonucleotide
gcuccuuggggaccauaau

SEQ ID NO: 2573315 - RNA, 19 nt, Artificial Sequence
  Description of Artificial Sequence: Synthetic oligonucleotide
cgugcgccgccuguaccgg

SEQ ID NO: 2573316 - RNA, 19 nt, Artificial Sequence
  Description of Artificial Sequence: Synthetic oligonucleotide
ccauccuggccugaagacu

SEQ ID NO: 2573317 - RNA, 19 nt, Artificial Sequence
  Description of Artificial Sequence: Synthetic oligonucleotide
ggcuggcagcguccacuuc

SEQ ID NO: 2573318 - RNA, 19 nt, Artificial Sequence
  Description of Artificial Sequence: Synthetic oligonucleotide
ccaccggagagguggggua

SEQ ID NO: 2573319 - RNA, 19 nt, Artificial Sequence
  Description of Artificial Sequence: Synthetic oligonucleotide
cccacgucacacacuggcu

SEQ ID NO: 2573320 - RNA, 19 nt, Artificial Sequence
  Description of Artificial Sequence: Synthetic oligonucleotide
cgcagccuagccuggaagu

SEQ ID NO: 2573321 - RNA, 19 nt, Artificial Sequence
  Description of Artificial Sequence: Synthetic oligonucleotide
gaggacccggggacucccu

SEQ ID NO: 2573322 - RNA, 19 nt, Artificial Sequence
  Description of Artificial Sequence: Synthetic oligonucleotide
ccacggggagggcauauau

SEQ ID NO: 2573323 - RNA, 19 nt, Artificial Sequence
  Description of Artificial Sequence: Synthetic oligonucleotide
gcaguagcgccagcccugu

SEQ ID NO: 2573324 - RNA, 19 nt, Artificial Sequence
  Description of Artificial Sequence: Synthetic oligonucleotide
gcagccuagccuggaaguu

SEQ ID NO: 2573325 - RNA, 19 nt, Artificial Sequence
  Description of Artificial Sequence: Synthetic oligonucleotide
cugcuccuuggggaccaua

SEQ ID NO: 2573326 - RNA, 19 nt, Artificial Sequence
  Description of Artificial Sequence: Synthetic oligonucleotide
ccuccauguggggcuccug

SEQ ID NO: 2573327 - RNA, 19 nt, Artificial Sequence
  Description of Artificial Sequence: Synthetic oligonucleotide
cggcugcacuggagggacg

SEQ ID NO: 2573328 - RNA, 19 nt, Artificial Sequence
  Description of Artificial Sequence: Synthetic oligonucleotide
cguuagccuuccaaguguu

SEQ ID NO: 2573329 - RNA, 19 nt, Artificial Sequence
  Description of Artificial Sequence: Synthetic oligonucleotide
ccucauccgaggccuggcu

SEQ ID NO: 2573330 - RNA, 19 nt, Artificial Sequence
  Description of Artificial Sequence: Synthetic oligonucleotide
ccgugccaagggaccccac

SEQ ID NO: 2573331 - RNA, 19 nt, Artificial Sequence
  Description of Artificial Sequence: Synthetic oligonucleotide
accccacggggagggcaua

SEQ ID NO: 2573332 - RNA, 19 nt, Artificial Sequence
  Description of Artificial Sequence: Synthetic oligonucleotide
gcuggacaggggacuggcu

SEQ ID NO: 2573333 - RNA, 19 nt, Artificial Sequence
  Description of Artificial Sequence: Synthetic oligonucleotide
gggaccccacggggagggc

SEQ ID NO: 2573334 - RNA, 19 nt, Artificial Sequence
  Description of Artificial Sequence: Synthetic oligonucleotide
ccggggacucccucgcccu

SEQ ID NO: 2573335 - RNA, 19 nt, Artificial Sequence
  Description of Artificial Sequence: Synthetic oligonucleotide
gggacucccucgcccugau

SEQ ID NO: 2573336 - RNA, 19 nt, Artificial Sequence
  Description of Artificial Sequence: Synthetic oligonucleotide
cggggacucccucgcccug

SEQ ID NO: 2573337 - RNA, 19 nt, Artificial Sequence
  Description of Artificial Sequence: Synthetic oligonucleotide
cggagacaguaccgugcca

SEQ ID NO: 2573338 - RNA, 19 nt, Artificial Sequence
  Description of Artificial Sequence: Synthetic oligonucleotide
cccucgcccugaugaguaa

SEQ ID NO: 2573339 - RNA, 19 nt, Artificial Sequence
  Description of Artificial Sequence: Synthetic oligonucleotide
cgagggccccugguuggug

SEQ ID NO: 2573340 - RNA, 19 nt, Artificial Sequence
  Description of Artificial Sequence: Synthetic oligonucleotide
gggccccugguuggugcaa

SEQ ID NO: 2573341 - RNA, 19 nt, Artificial Sequence
  Description of Artificial Sequence: Synthetic oligonucleotide
cgccgccuguaccgggcug

SEQ ID NO: 2573342 - RNA, 19 nt, Artificial Sequence
  Description of Artificial Sequence: Synthetic oligonucleotide
ccccucccgcacccugcuc

SEQ ID NO: 2573343 - RNA, 19 nt, Artificial Sequence
  Description of Artificial Sequence: Synthetic oligonucleotide
gcgccagcccugugauuuu

SEQ ID NO: 2573344 - RNA, 19 nt, Artificial Sequence
  Description of Artificial Sequence: Synthetic oligonucleotide
cgccuguaccgggcugcuc

SEQ ID NO: 2573345 - RNA, 19 nt, Artificial Sequence
  Description of Artificial Sequence: Synthetic oligonucleotide
ccgccuguaccgggcugcu

SEQ ID NO: 2573346 - RNA, 19 nt, Artificial Sequence
  Description of Artificial Sequence: Synthetic oligonucleotide
uguauuuaaauaaauagcc

SEQ ID NO: 2573347 - RNA, 19 nt, Artificial Sequence
  Description of Artificial Sequence: Synthetic oligonucleotide
aauaaauagccucauuggc

SEQ ID NO: 2573348 - RNA, 19 nt, Artificial Sequence
  Description of Artificial Sequence: Synthetic oligonucleotide
aaauaaauagccucauugg

SEQ ID NO: 2573349 - RNA, 19 nt, Artificial Sequence
  Description of Artificial Sequence: Synthetic oligonucleotide
uuuggaauggagaagaugc

SEQ ID NO: 2573350 - RNA, 19 nt, Artificial Sequence
  Description of Artificial Sequence: Synthetic oligonucleotide
auaagugugggacaaaugg

SEQ ID NO: 2573351 - RNA, 19 nt, Artificial Sequence
  Description of Artificial Sequence: Synthetic oligonucleotide
aaaaucauaggagagaucu

SEQ ID NO: 2573352 - RNA, 19 nt, Artificial Sequence
  Description of Artificial Sequence: Synthetic oligonucleotide
aaagcaacagaucaggcca

SEQ ID NO: 2573353 - RNA, 19 nt, Artificial Sequence
  Description of Artificial Sequence: Synthetic oligonucleotide
uaaaauacugcuagcagcc

SEQ ID NO: 2573354 - RNA, 19 nt, Artificial Sequence
  Description of Artificial Sequence: Synthetic oligonucleotide
uuggcuaaaauacugcuag

SEQ ID NO: 2573355 - RNA, 19 nt, Artificial Sequence
  Description of Artificial Sequence: Synthetic oligonucleotide
auaauuacaggauaagugu

SEQ ID NO: 2573356 - RNA, 19 nt, Artificial Sequence
  Description of Artificial Sequence: Synthetic oligonucleotide
cauaauuacaggauaagug

SEQ ID NO: 2573357 - RNA, 19 nt, Artificial Sequence
  Description of Artificial Sequence: Synthetic oligonucleotide
ugggaugucacccaugccg

SEQ ID NO: 2573358 - RNA, 19 nt, Artificial Sequence
  Description of Artificial Sequence: Synthetic oligonucleotide
aacagaucaggccaggcuc

SEQ ID NO: 2573359 - RNA, 19 nt, Artificial Sequence
  Description of Artificial Sequence: Synthetic oligonucleotide
cuaaaauacugcuagcagc

SEQ ID NO: 2573360 - RNA, 19 nt, Artificial Sequence
  Description of Artificial Sequence: Synthetic oligonucleotide
acugcaacaugcuacugcc

SEQ ID NO: 2573361 - RNA, 19 nt, Artificial Sequence
  Description of Artificial Sequence: Synthetic oligonucleotide
aauuuuggaauggagaaga

SEQ ID NO: 2573362 - RNA, 19 nt, Artificial Sequence
  Description of Artificial Sequence: Synthetic oligonucleotide
cacuccaugagauagagug

SEQ ID NO: 2573363 - RNA, 19 nt, Artificial Sequence
  Description of Artificial Sequence: Synthetic oligonucleotide
uuagcgauguuugucaugg

SEQ ID NO: 2573364 - RNA, 19 nt, Artificial Sequence
  Description of Artificial Sequence: Synthetic oligonucleotide
auaaauagccucauuggcc

SEQ ID NO: 2573365 - RNA, 19 nt, Artificial Sequence
  Description of Artificial Sequence: Synthetic oligonucleotide
agugcugugauugauuagc

SEQ ID NO: 2573366 - RNA, 19 nt, Artificial Sequence
  Description of Artificial Sequence: Synthetic oligonucleotide
aaacuugccuucccugucc

SEQ ID NO: 2573367 - RNA, 19 nt, Artificial Sequence
  Description of Artificial Sequence: Synthetic oligonucleotide
agaugcuuucucuuugucc

SEQ ID NO: 2573368 - RNA, 19 nt, Artificial Sequence
  Description of Artificial Sequence: Synthetic oligonucleotide
aggagcucugcacugaacc

SEQ ID NO: 2573369 - RNA, 19 nt, Artificial Sequence
  Description of Artificial Sequence: Synthetic oligonucleotide
ugagaagugcauuaggcca

SEQ ID NO: 2573370 - RNA, 19 nt, Artificial Sequence
  Description of Artificial Sequence: Synthetic oligonucleotide
aauuacaggauaagugugg

SEQ ID NO: 2573371 - RNA, 19 nt, Artificial Sequence
  Description of Artificial Sequence: Synthetic oligonucleotide
uaagugugggacaaauggg

SEQ ID NO: 2573372 - RNA, 19 nt, Artificial Sequence
  Description of Artificial Sequence: Synthetic oligonucleotide
aaauacugcuagcagccuc

SEQ ID NO: 2573373 - RNA, 19 nt, Artificial Sequence
  Description of Artificial Sequence: Synthetic oligonucleotide
uguagucugcuucucaaag

SEQ ID NO: 2573374 - RNA, 19 nt, Artificial Sequence
  Description of Artificial Sequence: Synthetic oligonucleotide
uaauuacaggauaagugug

SEQ ID NO: 2573375 - RNA, 19 nt, Artificial Sequence
  Description of Artificial Sequence: Synthetic oligonucleotide
uuuguccucagccaguuga

SEQ ID NO: 2573376 - RNA, 19 nt, Artificial Sequence
  Description of Artificial Sequence: Synthetic oligonucleotide
uaaauagccucauuggccu

SEQ ID NO: 2573377 - RNA, 19 nt, Artificial Sequence
  Description of Artificial Sequence: Synthetic oligonucleotide
aaaacuugccuucccuguc

SEQ ID NO: 2573378 - RNA, 19 nt, Artificial Sequence
  Description of Artificial Sequence: Synthetic oligonucleotide
caucugaacugcaacaugc

SEQ ID NO: 2573379 - RNA, 19 nt, Artificial Sequence
  Description of Artificial Sequence: Synthetic oligonucleotide
uuugucaugggugaagcag

SEQ ID NO: 2573380 - RNA, 19 nt, Artificial Sequence
  Description of Artificial Sequence: Synthetic oligonucleotide
guguauuuaaauaaauagc

SEQ ID NO: 2573381 - RNA, 19 nt, Artificial Sequence
  Description of Artificial Sequence: Synthetic oligonucleotide
gaugcaaguuuccuucugg

SEQ ID NO: 2573382 - RNA, 19 nt, Artificial Sequence
  Description of Artificial Sequence: Synthetic oligonucleotide
agugguuccauaauuacag

SEQ ID NO: 2573383 - RNA, 19 nt, Artificial Sequence
  Description of Artificial Sequence: Synthetic oligonucleotide
ugauuagcgauguuuguca

SEQ ID NO: 2573384 - RNA, 19 nt, Artificial Sequence
  Description of Artificial Sequence: Synthetic oligonucleotide
agugcauuaggccaccaag

SEQ ID NO: 2573385 - RNA, 19 nt, Artificial Sequence
  Description of Artificial Sequence: Synthetic oligonucleotide
uugucaugggugaagcagg

SEQ ID NO: 2573386 - RNA, 19 nt, Artificial Sequence
  Description of Artificial Sequence: Synthetic oligonucleotide
ucugcacugaaccacacuc

SEQ ID NO: 2573387 - RNA, 19 nt, Artificial Sequence
  Description of Artificial Sequence: Synthetic oligonucleotide
uuauccacacuccaugaga

SEQ ID NO: 2573388 - RNA, 19 nt, Artificial Sequence
  Description of Artificial Sequence: Synthetic oligonucleotide
acacucagcauucugggag

SEQ ID NO: 2573389 - RNA, 19 nt, Artificial Sequence
  Description of Artificial Sequence: Synthetic oligonucleotide
gauugauuagcgauguuug

SEQ ID NO: 2573390 - RNA, 19 nt, Artificial Sequence
  Description of Artificial Sequence: Synthetic oligonucleotide
aauggguauccccugaaaa

SEQ ID NO: 2573391 - RNA, 19 nt, Artificial Sequence
  Description of Artificial Sequence: Synthetic oligonucleotide
accuguguaaccugaguac

SEQ ID NO: 2573392 - RNA, 19 nt, Artificial Sequence
  Description of Artificial Sequence: Synthetic oligonucleotide
ucugggaugucacccaugc

SEQ ID NO: 2573393 - RNA, 19 nt, Artificial Sequence
  Description of Artificial Sequence: Synthetic oligonucleotide
aaccugaguaccuuuauuu

SEQ ID NO: 2573394 - RNA, 19 nt, Artificial Sequence
  Description of Artificial Sequence: Synthetic oligonucleotide
ugacaauuuuggaauggag

SEQ ID NO: 2573395 - RNA, 19 nt, Artificial Sequence
  Description of Artificial Sequence: Synthetic oligonucleotide
uagucugcuucucaaagca

SEQ ID NO: 2573396 - RNA, 19 nt, Artificial Sequence
  Description of Artificial Sequence: Synthetic oligonucleotide
ucaugggugaagcagggac

SEQ ID NO: 2573397 - RNA, 19 nt, Artificial Sequence
  Description of Artificial Sequence: Synthetic oligonucleotide
uacaggauaagugugggac

SEQ ID NO: 2573398 - RNA, 19 nt, Artificial Sequence
  Description of Artificial Sequence: Synthetic oligonucleotide
gaugacuuuggcuaaaaua

SEQ ID NO: 2573399 - RNA, 19 nt, Artificial Sequence
  Description of Artificial Sequence: Synthetic oligonucleotide
agauagagugcugugauug

SEQ ID NO: 2573400 - RNA, 19 nt, Artificial Sequence
  Description of Artificial Sequence: Synthetic oligonucleotide
aaagcaaggaggaugacuu

SEQ ID NO: 2573401 - RNA, 19 nt, Artificial Sequence
  Description of Artificial Sequence: Synthetic oligonucleotide
augucacccaugccgaacc

SEQ ID NO: 2573402 - RNA, 19 nt, Artificial Sequence
  Description of Artificial Sequence: Synthetic oligonucleotide
uagugagaagugcauuagg

SEQ ID NO: 2573403 - RNA, 19 nt, Artificial Sequence
  Description of Artificial Sequence: Synthetic oligonucleotide
acuuuggcuaaaauacugc

SEQ ID NO: 2573404 - RNA, 19 nt, Artificial Sequence
  Description of Artificial Sequence: Synthetic oligonucleotide
uauccccugaaaauauaag

SEQ ID NO: 2573405 - RNA, 19 nt, Artificial Sequence
  Description of Artificial Sequence: Synthetic oligonucleotide
aggaggaugacuuuggcua

SEQ ID NO: 2573406 - RNA, 19 nt, Artificial Sequence
  Description of Artificial Sequence: Synthetic oligonucleotide
ugcauuaggccaccaagug

SEQ ID NO: 2573407 - RNA, 19 nt, Artificial Sequence
  Description of Artificial Sequence: Synthetic oligonucleotide
ugagauagagugcugugau

SEQ ID NO: 2573408 - RNA, 19 nt, Artificial Sequence
  Description of Artificial Sequence: Synthetic oligonucleotide
uuccauaauuacaggauaa

SEQ ID NO: 2573409 - RNA, 19 nt, Artificial Sequence
  Description of Artificial Sequence: Synthetic oligonucleotide
ugaacugcaacaugcuacu

SEQ ID NO: 2573410 - RNA, 19 nt, Artificial Sequence
  Description of Artificial Sequence: Synthetic oligonucleotide
auuacaggauaaguguggg

SEQ ID NO: 2573411 - RNA, 19 nt, Artificial Sequence
  Description of Artificial Sequence: Synthetic oligonucleotide
ugguuccauaauuacagga

SEQ ID NO: 2573412 - RNA, 19 nt, Artificial Sequence
  Description of Artificial Sequence: Synthetic oligonucleotide
ugagugaccgggcucagcu

SEQ ID NO: 2573413 - RNA, 19 nt, Artificial Sequence
  Description of Artificial Sequence: Synthetic oligonucleotide
acugcuagcagccucuagu

SEQ ID NO: 2573414 - RNA, 19 nt, Artificial Sequence
  Description of Artificial Sequence: Synthetic oligonucleotide
gguucugaucauuacaagc

SEQ ID NO: 2573415 - RNA, 19 nt, Artificial Sequence
  Description of Artificial Sequence: Synthetic oligonucleotide
agugaccgggcucagcugg

SEQ ID NO: 2573416 - RNA, 19 nt, Artificial Sequence
  Description of Artificial Sequence: Synthetic oligonucleotide
ugaaccacacucagcauuc

SEQ ID NO: 2573417 - RNA, 19 nt, Artificial Sequence
  Description of Artificial Sequence: Synthetic oligonucleotide
agaguggguacugagugac

SEQ ID NO: 2573418 - RNA, 19 nt, Artificial Sequence
  Description of Artificial Sequence: Synthetic oligonucleotide
agcaacugcauacauacua

SEQ ID NO: 2573419 - RNA, 19 nt, Artificial Sequence
  Description of Artificial Sequence: Synthetic oligonucleotide
agcuuauccacacuccaug

SEQ ID NO: 2573420 - RNA, 19 nt, Artificial Sequence
  Description of Artificial Sequence: Synthetic oligonucleotide
uccauaauuacaggauaag

SEQ ID NO: 2573421 - RNA, 19 nt, Artificial Sequence
  Description of Artificial Sequence: Synthetic oligonucleotide
gugagaagugcauuaggcc

SEQ ID NO: 2573422 - RNA, 19 nt, Artificial Sequence
  Description of Artificial Sequence: Synthetic oligonucleotide
caggcuguucugaacaggg

SEQ ID NO: 2573423 - RNA, 19 nt, Artificial Sequence
  Description of Artificial Sequence: Synthetic oligonucleotide
uuuuggaauggagaagaug

SEQ ID NO: 2573424 - RNA, 19 nt, Artificial Sequence
  Description of Artificial Sequence: Synthetic oligonucleotide
gagacaucugaacugcaac

SEQ ID NO: 2573425 - RNA, 19 nt, Artificial Sequence
  Description of Artificial Sequence: Synthetic oligonucleotide
cuggguuucccaaagcaac

SEQ ID NO: 2573426 - RNA, 19 nt, Artificial Sequence
  Description of Artificial Sequence: Synthetic oligonucleotide
uuuggcuaaaauacugcua

SEQ ID NO: 2573427 - RNA, 19 nt, Artificial Sequence
  Description of Artificial Sequence: Synthetic oligonucleotide
guugacaauuuuggaaugg

SEQ ID NO: 2573428 - RNA, 19 nt, Artificial Sequence
  Description of Artificial Sequence: Synthetic oligonucleotide
augcaaguuuccuucuggg

SEQ ID NO: 2573429 - RNA, 19 nt, Artificial Sequence
  Description of Artificial Sequence: Synthetic oligonucleotide
ugauugauuagcgauguuu

SEQ ID NO: 2573430 - RNA, 19 nt, Artificial Sequence
  Description of Artificial Sequence: Synthetic oligonucleotide
ugugauugauuagcgaugu

SEQ ID NO: 2573431 - RNA, 19 nt, Artificial Sequence
  Description of Artificial Sequence: Synthetic oligonucleotide
auuggaggagcucugcacu

SEQ ID NO: 2573432 - RNA, 19 nt, Artificial Sequence
  Description of Artificial Sequence: Synthetic oligonucleotide
agacaucugaacugcaaca

SEQ ID NO: 2573433 - RNA, 19 nt, Artificial Sequence
  Description of Artificial Sequence: Synthetic oligonucleotide
ucugaucauuacaagcaaa

SEQ ID NO: 2573434 - RNA, 19 nt, Artificial Sequence
  Description of Artificial Sequence: Synthetic oligonucleotide
aauacugcuagcagccucu

SEQ ID NO: 2573435 - RNA, 19 nt, Artificial Sequence
  Description of Artificial Sequence: Synthetic oligonucleotide
aagugugggacaaaugggu

SEQ ID NO: 2573436 - RNA, 19 nt, Artificial Sequence
  Description of Artificial Sequence: Synthetic oligonucleotide
ugggguucugaucauuaca

SEQ ID NO: 2573437 - RNA, 19 nt, Artificial Sequence
  Description of Artificial Sequence: Synthetic oligonucleotide
uauccacacuccaugagau

SEQ ID NO: 2573438 - RNA, 19 nt, Artificial Sequence
  Description of Artificial Sequence: Synthetic oligonucleotide
aacaggguaguggagacau

SEQ ID NO: 2573439 - RNA, 19 nt, Artificial Sequence
  Description of Artificial Sequence: Synthetic oligonucleotide
uaggccaccaagugguucc

SEQ ID NO: 2573440 - RNA, 19 nt, Artificial Sequence
  Description of Artificial Sequence: Synthetic oligonucleotide
uuggccuguacauucccag

SEQ ID NO: 2573441 - RNA, 19 nt, Artificial Sequence
  Description of Artificial Sequence: Synthetic oligonucleotide
agaucuggguuucccaaag

SEQ ID NO: 2573442 - RNA, 19 nt, Artificial Sequence
  Description of Artificial Sequence: Synthetic oligonucleotide
guucugaacaggguagugg

SEQ ID NO: 2573443 - RNA, 19 nt, Artificial Sequence
  Description of Artificial Sequence: Synthetic oligonucleotide
cacugaaccacacucagca

SEQ ID NO: 2573444 - RNA, 19 nt, Artificial Sequence
  Description of Artificial Sequence: Synthetic oligonucleotide
caagugguuccauaauuac

SEQ ID NO: 2573445 - RNA, 19 nt, Artificial Sequence
  Description of Artificial Sequence: Synthetic oligonucleotide
gcuaaaauacugcuagcag

SEQ ID NO: 2573446 - RNA, 19 nt, Artificial Sequence
  Description of Artificial Sequence: Synthetic oligonucleotide
agccaguugacaauuuugg

SEQ ID NO: 2573447 - RNA, 19 nt, Artificial Sequence
  Description of Artificial Sequence: Synthetic oligonucleotide
aguugacaauuuuggaaug

SEQ ID NO: 2573448 - RNA, 19 nt, Artificial Sequence
  Description of Artificial Sequence: Synthetic oligonucleotide
uucugaucauuacaagcaa

SEQ ID NO: 2573449 - RNA, 19 nt, Artificial Sequence
  Description of Artificial Sequence: Synthetic oligonucleotide
ucuggguuucccaaagcaa

SEQ ID NO: 2573450 - RNA, 19 nt, Artificial Sequence
  Description of Artificial Sequence: Synthetic oligonucleotide
ucauaggagagaucugggu

SEQ ID NO: 2573451 - RNA, 19 nt, Artificial Sequence
  Description of Artificial Sequence: Synthetic oligonucleotide
aucuggguuucccaaagca

SEQ ID NO: 2573452 - RNA, 19 nt, Artificial Sequence
  Description of Artificial Sequence: Synthetic oligonucleotide
auugauuagcgauguuugu

SEQ ID NO: 2573453 - RNA, 19 nt, Artificial Sequence
  Description of Artificial Sequence: Synthetic oligonucleotide
ugccacaugguccacgaaa

SEQ ID NO: 2573454 - RNA, 19 nt, Artificial Sequence
  Description of Artificial Sequence: Synthetic oligonucleotide
auggagaagaugcaaguuu

SEQ ID NO: 2573455 - RNA, 19 nt, Artificial Sequence
  Description of Artificial Sequence: Synthetic oligonucleotide
caaguuuccuucugggaug

SEQ ID NO: 2573456 - RNA, 19 nt, Artificial Sequence
  Description of Artificial Sequence: Synthetic oligonucleotide
uucccuguccuguagucug

SEQ ID NO: 2573457 - RNA, 19 nt, Artificial Sequence
  Description of Artificial Sequence: Synthetic oligonucleotide
ugaacaggguaguggagac

SEQ ID NO: 2573458 - RNA, 19 nt, Artificial Sequence
  Description of Artificial Sequence: Synthetic oligonucleotide
cugugauugauuagcgaug

SEQ ID NO: 2573459 - RNA, 19 nt, Artificial Sequence
  Description of Artificial Sequence: Synthetic oligonucleotide
cucaaagcaaggaggauga

SEQ ID NO: 2573460 - RNA, 19 nt, Artificial Sequence
  Description of Artificial Sequence: Synthetic oligonucleotide
uugauuagcgauguuuguc

SEQ ID NO: 2573461 - RNA, 19 nt, Artificial Sequence
  Description of Artificial Sequence: Synthetic oligonucleotide
augguugcaacugggguuc

SEQ ID NO: 2573462 - RNA, 19 nt, Artificial Sequence
  Description of Artificial Sequence: Synthetic oligonucleotide
auaggagagaucuggguuu

SEQ ID NO: 2573463 - RNA, 19 nt, Artificial Sequence
  Description of Artificial Sequence: Synthetic oligonucleotide
gaucaggccaggcuccucc

SEQ ID NO: 2573464 - RNA, 19 nt, Artificial Sequence
  Description of Artificial Sequence: Synthetic oligonucleotide
ucugaacaggguaguggag

SEQ ID NO: 2573465 - RNA, 19 nt, Artificial Sequence
  Description of Artificial Sequence: Synthetic oligonucleotide
gacaaauggguauccccug

SEQ ID NO: 2573466 - RNA, 19 nt, Artificial Sequence
  Description of Artificial Sequence: Synthetic oligonucleotide
guagucugcuucucaaagc

SEQ ID NO: 2573467 - RNA, 19 nt, Artificial Sequence
  Description of Artificial Sequence: Synthetic oligonucleotide
uugacaauuuuggaaugga

SEQ ID NO: 2573468 - RNA, 19 nt, Artificial Sequence
  Description of Artificial Sequence: Synthetic oligonucleotide
ucugggagaugcuuucucu

SEQ ID NO: 2573469 - RNA, 19 nt, Artificial Sequence
  Description of Artificial Sequence: Synthetic oligonucleotide
agcgauguuugucaugggu

SEQ ID NO: 2573470 - RNA, 19 nt, Artificial Sequence
  Description of Artificial Sequence: Synthetic oligonucleotide
cuuauccacacuccaugag

SEQ ID NO: 2573471 - RNA, 19 nt, Artificial Sequence
  Description of Artificial Sequence: Synthetic oligonucleotide
uggguacugagugaccggg

SEQ ID NO: 2573472 - RNA, 19 nt, Artificial Sequence
  Description of Artificial Sequence: Synthetic oligonucleotide
uggguuucccaaagcaaca

SEQ ID NO: 2573473 - RNA, 19 nt, Artificial Sequence
  Description of Artificial Sequence: Synthetic oligonucleotide
ugcaaguuuccuucuggga

SEQ ID NO: 2573474 - RNA, 19 nt, Artificial Sequence
  Description of Artificial Sequence: Synthetic oligonucleotide
ccccugaaaauauaagugg

SEQ ID NO: 2573475 - RNA, 19 nt, Artificial Sequence
  Description of Artificial Sequence: Synthetic oligonucleotide
aagugguuccauaauuaca

SEQ ID NO: 2573476 - RNA, 19 nt, Artificial Sequence
  Description of Artificial Sequence: Synthetic oligonucleotide
ucauuggccuguacauucc

SEQ ID NO: 2573477 - RNA, 19 nt, Artificial Sequence
  Description of Artificial Sequence: Synthetic oligonucleotide
gcaacugggguucugauca

SEQ ID NO: 2573478 - RNA, 19 nt, Artificial Sequence
  Description of Artificial Sequence: Synthetic oligonucleotide
cccugaaaauauaaguggg

SEQ ID NO: 2573479 - RNA, 19 nt, Artificial Sequence
  Description of Artificial Sequence: Synthetic oligonucleotide
gaagcagggacagcaacug

SEQ ID NO: 2573480 - RNA, 19 nt, Artificial Sequence
  Description of Artificial Sequence: Synthetic oligonucleotide
auggguauccccugaaaau

SEQ ID NO: 2573481 - RNA, 19 nt, Artificial Sequence
  Description of Artificial Sequence: Synthetic oligonucleotide
uguccuguagucugcuucu

SEQ ID NO: 2573482 - RNA, 19 nt, Artificial Sequence
  Description of Artificial Sequence: Synthetic oligonucleotide
acaucugaacugcaacaug

SEQ ID NO: 2573483 - RNA, 19 nt, Artificial Sequence
  Description of Artificial Sequence: Synthetic oligonucleotide
aaauggguauccccugaaa

SEQ ID NO: 2573484 - RNA, 19 nt, Artificial Sequence
  Description of Artificial Sequence: Synthetic oligonucleotide
gauaagugugggacaaaug

SEQ ID NO: 2573485 - RNA, 19 nt, Artificial Sequence
  Description of Artificial Sequence: Synthetic oligonucleotide
uguguguguguguauuuaa

SEQ ID NO: 2573486 - RNA, 19 nt, Artificial Sequence
  Description of Artificial Sequence: Synthetic oligonucleotide
auuagcgauguuugucaug

SEQ ID NO: 2573487 - RNA, 19 nt, Artificial Sequence
  Description of Artificial Sequence: Synthetic oligonucleotide
acagaucaggccaggcucc

SEQ ID NO: 2573488 - RNA, 19 nt, Artificial Sequence
  Description of Artificial Sequence: Synthetic oligonucleotide
ugagucagugccuggcaca

SEQ ID NO: 2573489 - RNA, 19 nt, Artificial Sequence
  Description of Artificial Sequence: Synthetic oligonucleotide
gcuagcagccucuagugag

SEQ ID NO: 2573490 - RNA, 19 nt, Artificial Sequence
  Description of Artificial Sequence: Synthetic oligonucleotide
caauuuuggaauggagaag

SEQ ID NO: 2573491 - RNA, 19 nt, Artificial Sequence
  Description of Artificial Sequence: Synthetic oligonucleotide
agagugcugugauugauua

SEQ ID NO: 2573492 - RNA, 19 nt, Artificial Sequence
  Description of Artificial Sequence: Synthetic oligonucleotide
aaauagccucauuggccug

SEQ ID NO: 2573493 - RNA, 19 nt, Artificial Sequence
  Description of Artificial Sequence: Synthetic oligonucleotide
gucugcuucucaaagcaag

SEQ ID NO: 2573494 - RNA, 19 nt, Artificial Sequence
  Description of Artificial Sequence: Synthetic oligonucleotide
aacugcauacauacuaaaa

SEQ ID NO: 2573495 - RNA, 19 nt, Artificial Sequence
  Description of Artificial Sequence: Synthetic oligonucleotide
uccuucugggaugucaccc

SEQ ID NO: 2573496 - RNA, 19 nt, Artificial Sequence
  Description of Artificial Sequence: Synthetic oligonucleotide
uugagucagugccuggcac

SEQ ID NO: 2573497 - RNA, 19 nt, Artificial Sequence
  Description of Artificial Sequence: Synthetic oligonucleotide
cuagugagaagugcauuag

SEQ ID NO: 2573498 - RNA, 19 nt, Artificial Sequence
  Description of Artificial Sequence: Synthetic oligonucleotide
acaggauaagugugggaca

SEQ ID NO: 2573499 - RNA, 19 nt, Artificial Sequence
  Description of Artificial Sequence: Synthetic oligonucleotide
aaaucauaggagagaucug

SEQ ID NO: 2573500 - RNA, 19 nt, Artificial Sequence
  Description of Artificial Sequence: Synthetic oligonucleotide
aauagccucauuggccugu

SEQ ID NO: 2573501 - RNA, 19 nt, Artificial Sequence
  Description of Artificial Sequence: Synthetic oligonucleotide
aggcucaaggcagaguggg

SEQ ID NO: 2573502 - RNA, 19 nt, Artificial Sequence
  Description of Artificial Sequence: Synthetic oligonucleotide
cagccaguugacaauuuug

SEQ ID NO: 2573503 - RNA, 19 nt, Artificial Sequence
  Description of Artificial Sequence: Synthetic oligonucleotide
agagaucuggguuucccaa

SEQ ID NO: 2573504 - RNA, 19 nt, Artificial Sequence
  Description of Artificial Sequence: Synthetic oligonucleotide
gaauggagaagaugcaagu

SEQ ID NO: 2573505 - RNA, 19 nt, Artificial Sequence
  Description of Artificial Sequence: Synthetic oligonucleotide
aucauaggagagaucuggg

SEQ ID NO: 2573506 - RNA, 19 nt, Artificial Sequence
  Description of Artificial Sequence: Synthetic oligonucleotide
gugguuccauaauuacagg

SEQ ID NO: 2573507 - RNA, 19 nt, Artificial Sequence
  Description of Artificial Sequence: Synthetic oligonucleotide
acaaauggguauccccuga

SEQ ID NO: 2573508 - RNA, 19 nt, Artificial Sequence
  Description of Artificial Sequence: Synthetic oligonucleotide
uggccuguacauucccagg

SEQ ID NO: 2573509 - RNA, 19 nt, Artificial Sequence
  Description of Artificial Sequence: Synthetic oligonucleotide
augcuacugccacaugguc

SEQ ID NO: 2573510 - RNA, 19 nt, Artificial Sequence
  Description of Artificial Sequence: Synthetic oligonucleotide
ggaauggagaagaugcaag

SEQ ID NO: 2573511 - RNA, 19 nt, Artificial Sequence
  Description of Artificial Sequence: Synthetic oligonucleotide
agaagugcauuaggccacc

SEQ ID NO: 2573512 - RNA, 19 nt, Artificial Sequence
  Description of Artificial Sequence: Synthetic oligonucleotide
cuucccacaugguugcaac

SEQ ID NO: 2573513 - RNA, 19 nt, Artificial Sequence
  Description of Artificial Sequence: Synthetic oligonucleotide
gcauuaggccaccaagugg

SEQ ID NO: 2573514 - RNA, 19 nt, Artificial Sequence
  Description of Artificial Sequence: Synthetic oligonucleotide
accaagugguuccauaauu

SEQ ID NO: 2573515 - RNA, 19 nt, Artificial Sequence
  Description of Artificial Sequence: Synthetic oligonucleotide
uacugagugaccgggcuca

SEQ ID NO: 2573516 - RNA, 19 nt, Artificial Sequence
  Description of Artificial Sequence: Synthetic oligonucleotide
gauagagugcugugauuga

SEQ ID NO: 2573517 - RNA, 19 nt, Artificial Sequence
  Description of Artificial Sequence: Synthetic oligonucleotide
agcaaggaggaugacuuug

SEQ ID NO: 2573518 - RNA, 19 nt, Artificial Sequence
  Description of Artificial Sequence: Synthetic oligonucleotide
gcagaguggguacugagug

SEQ ID NO: 2573519 - RNA, 19 nt, Artificial Sequence
  Description of Artificial Sequence: Synthetic oligonucleotide
agccucuagugagaagugc

SEQ ID NO: 2573520 - RNA, 19 nt, Artificial Sequence
  Description of Artificial Sequence: Synthetic oligonucleotide
gagaagugcauuaggccac

SEQ ID NO: 2573521 - RNA, 19 nt, Artificial Sequence
  Description of Artificial Sequence: Synthetic oligonucleotide
aaaauacugcuagcagccu

SEQ ID NO: 2573522 - RNA, 19 nt, Artificial Sequence
  Description of Artificial Sequence: Synthetic oligonucleotide
agaugcaaguuuccuucug

SEQ ID NO: 2573523 - RNA, 19 nt, Artificial Sequence
  Description of Artificial Sequence: Synthetic oligonucleotide
ucccacaugguugcaacug

SEQ ID NO: 2573524 - RNA, 19 nt, Artificial Sequence
  Description of Artificial Sequence: Synthetic oligonucleotide
uccuguagucugcuucuca

SEQ ID NO: 2573525 - RNA, 19 nt, Artificial Sequence
  Description of Artificial Sequence: Synthetic oligonucleotide
gaccuguguaaccugagua

SEQ ID NO: 2573526 - RNA, 19 nt, Artificial Sequence
  Description of Artificial Sequence: Synthetic oligonucleotide
guuccauaauuacaggaua

SEQ ID NO: 2573527 - RNA, 19 nt, Artificial Sequence
  Description of Artificial Sequence: Synthetic oligonucleotide
uggcuaaaauacugcuagc

SEQ ID NO: 2573528 - RNA, 19 nt, Artificial Sequence
  Description of Artificial Sequence: Synthetic oligonucleotide
ugugggacaaauggguauc

SEQ ID NO: 2573529 - RNA, 19 nt, Artificial Sequence
  Description of Artificial Sequence: Synthetic oligonucleotide
gggacaaauggguaucccc

SEQ ID NO: 2573530 - RNA, 19 nt, Artificial Sequence
  Description of Artificial Sequence: Synthetic oligonucleotide
augagauagagugcuguga

SEQ ID NO: 2573531 - RNA, 19 nt, Artificial Sequence
  Description of Artificial Sequence: Synthetic oligonucleotide
aacuugccuucccuguccu

SEQ ID NO: 2573532 - RNA, 19 nt, Artificial Sequence
  Description of Artificial Sequence: Synthetic oligonucleotide
aagugcauuaggccaccaa

SEQ ID NO: 2573533 - RNA, 19 nt, Artificial Sequence
  Description of Artificial Sequence: Synthetic oligonucleotide
cugcuagcagccucuagug

SEQ ID NO: 2573534 - RNA, 19 nt, Artificial Sequence
  Description of Artificial Sequence: Synthetic oligonucleotide
ucacccaugccgaacccuc

SEQ ID NO: 2573535 - RNA, 19 nt, Artificial Sequence
  Description of Artificial Sequence: Synthetic oligonucleotide
uggguauccccugaaaaua

SEQ ID NO: 2573536 - RNA, 19 nt, Artificial Sequence
  Description of Artificial Sequence: Synthetic oligonucleotide
uaaccugaguaccuuuauu

SEQ ID NO: 2573537 - RNA, 19 nt, Artificial Sequence
  Description of Artificial Sequence: Synthetic oligonucleotide
ucagccaguugacaauuuu

SEQ ID NO: 2573538 - RNA, 19 nt, Artificial Sequence
  Description of Artificial Sequence: Synthetic oligonucleotide
gaucuggguuucccaaagc

SEQ ID NO: 2573539 - RNA, 19 nt, Artificial Sequence
  Description of Artificial Sequence: Synthetic oligonucleotide
gagugcugugauugauuag

SEQ ID NO: 2573540 - RNA, 19 nt, Artificial Sequence
  Description of Artificial Sequence: Synthetic oligonucleotide
auguuugucaugggugaag

SEQ ID NO: 2573541 - RNA, 19 nt, Artificial Sequence
  Description of Artificial Sequence: Synthetic oligonucleotide
uguucugaacaggguagug

SEQ ID NO: 2573542 - RNA, 19 nt, Artificial Sequence
  Description of Artificial Sequence: Synthetic oligonucleotide
ugcuagcagccucuaguga

SEQ ID NO: 2573543 - RNA, 19 nt, Artificial Sequence
  Description of Artificial Sequence: Synthetic oligonucleotide
uccaugagauagagugcug

SEQ ID NO: 2573544 - RNA, 19 nt, Artificial Sequence
  Description of Artificial Sequence: Synthetic oligonucleotide
uagagugcugugauugauu

SEQ ID NO: 2573545 - RNA, 19 nt, Artificial Sequence
  Description of Artificial Sequence: Synthetic oligonucleotide
ugcaacugggguucugauc

SEQ ID NO: 2573546 - RNA, 19 nt, Artificial Sequence
  Description of Artificial Sequence: Synthetic oligonucleotide
cauuggccuguacauuccc

SEQ ID NO: 2573547 - RNA, 19 nt, Artificial Sequence
  Description of Artificial Sequence: Synthetic oligonucleotide
aacaugcuacugccacaug

SEQ ID NO: 2573548 - RNA, 19 nt, Artificial Sequence
  Description of Artificial Sequence: Synthetic oligonucleotide
guggguacugagugaccgg

SEQ ID NO: 2573549 - RNA, 19 nt, Artificial Sequence
  Description of Artificial Sequence: Synthetic oligonucleotide
gugcugugauugauuagcg

SEQ ID NO: 2573550 - RNA, 19 nt, Artificial Sequence
  Description of Artificial Sequence: Synthetic oligonucleotide
cuuuggcuaaaauacugcu

SEQ ID NO: 2573551 - RNA, 19 nt, Artificial Sequence
  Description of Artificial Sequence: Synthetic oligonucleotide
cccaaagcaacagaucagg

SEQ ID NO: 2573552 - RNA, 19 nt, Artificial Sequence
  Description of Artificial Sequence: Synthetic oligonucleotide
gaugucacccaugccgaac

SEQ ID NO: 2573553 - RNA, 19 nt, Artificial Sequence
  Description of Artificial Sequence: Synthetic oligonucleotide
uguguguguguguguauuu

SEQ ID NO: 2573554 - RNA, 19 nt, Artificial Sequence
  Description of Artificial Sequence: Synthetic oligonucleotide
gcuguucugaacaggguag

SEQ ID NO: 2573555 - RNA, 19 nt, Artificial Sequence
  Description of Artificial Sequence: Synthetic oligonucleotide
ggcuaaaauacugcuagca

SEQ ID NO: 2573556 - RNA, 19 nt, Artificial Sequence
  Description of Artificial Sequence: Synthetic oligonucleotide
ugggagaugcuuucucuuu

SEQ ID NO: 2573557 - RNA, 19 nt, Artificial Sequence
  Description of Artificial Sequence: Synthetic oligonucleotide
ugucacccaugccgaaccc

SEQ ID NO: 2573558 - RNA, 19 nt, Artificial Sequence
  Description of Artificial Sequence: Synthetic oligonucleotide
uggagacaucugaacugca

SEQ ID NO: 2573559 - RNA, 19 nt, Artificial Sequence
  Description of Artificial Sequence: Synthetic oligonucleotide
gagcucugcacugaaccac

SEQ ID NO: 2573560 - RNA, 19 nt, Artificial Sequence
  Description of Artificial Sequence: Synthetic oligonucleotide
uguguaaccugaguaccuu

SEQ ID NO: 2573561 - RNA, 19 nt, Artificial Sequence
  Description of Artificial Sequence: Synthetic oligonucleotide
ccacacucagcauucuggg

SEQ ID NO: 2573562 - RNA, 19 nt, Artificial Sequence
  Description of Artificial Sequence: Synthetic oligonucleotide
ugggacaaauggguauccc

SEQ ID NO: 2573563 - RNA, 19 nt, Artificial Sequence
  Description of Artificial Sequence: Synthetic oligonucleotide
cugaacaggguaguggaga

SEQ ID NO: 2573564 - RNA, 19 nt, Artificial Sequence
  Description of Artificial Sequence: Synthetic oligonucleotide
ccaguugacaauuuuggaa

SEQ ID NO: 2573565 - RNA, 19 nt, Artificial Sequence
  Description of Artificial Sequence: Synthetic oligonucleotide
auagagugcugugauugau

SEQ ID NO: 2573566 - RNA, 19 nt, Artificial Sequence
  Description of Artificial Sequence: Synthetic oligonucleotide
gggagaugcuuucucuuug

SEQ ID NO: 2573567 - RNA, 19 nt, Artificial Sequence
  Description of Artificial Sequence: Synthetic oligonucleotide
guauccccugaaaauauaa

SEQ ID NO: 2573568 - RNA, 19 nt, Artificial Sequence
  Description of Artificial Sequence: Synthetic oligonucleotide
uagcgauguuugucauggg

SEQ ID NO: 2573569 - RNA, 19 nt, Artificial Sequence
  Description of Artificial Sequence: Synthetic oligonucleotide
gcgauguuugucaugggug

SEQ ID NO: 2573570 - RNA, 19 nt, Artificial Sequence
  Description of Artificial Sequence: Synthetic oligonucleotide
uguguguguguguguguau

SEQ ID NO: 2573571 - RNA, 19 nt, Artificial Sequence
  Description of Artificial Sequence: Synthetic oligonucleotide
augccgaacccuccuccag

SEQ ID NO: 2573572 - RNA, 19 nt, Artificial Sequence
  Description of Artificial Sequence: Synthetic oligonucleotide
aagcaaggaggaugacuuu

SEQ ID NO: 2573573 - RNA, 19 nt, Artificial Sequence
  Description of Artificial Sequence: Synthetic oligonucleotide
gagaucuggguuucccaaa

SEQ ID NO: 2573574 - RNA, 19 nt, Artificial Sequence
  Description of Artificial Sequence: Synthetic oligonucleotide
ccaaagcaacagaucaggc

SEQ ID NO: 2573575 - RNA, 19 nt, Artificial Sequence
  Description of Artificial Sequence: Synthetic oligonucleotide
ggguucugaucauuacaag

SEQ ID NO: 2573576 - RNA, 19 nt, Artificial Sequence
  Description of Artificial Sequence: Synthetic oligonucleotide
ucccuguccuguagucugc

SEQ ID NO: 2573577 - RNA, 19 nt, Artificial Sequence
  Description of Artificial Sequence: Synthetic oligonucleotide
gcugugauugauuagcgau

SEQ ID NO: 2573578 - RNA, 19 nt, Artificial Sequence
  Description of Artificial Sequence: Synthetic oligonucleotide
uuaggccaccaagugguuc

SEQ ID NO: 2573579 - RNA, 19 nt, Artificial Sequence
  Description of Artificial Sequence: Synthetic oligonucleotide
cuagcagccucuagugaga

SEQ ID NO: 2573580 - RNA, 19 nt, Artificial Sequence
  Description of Artificial Sequence: Synthetic oligonucleotide
ccuguguaaccugaguacc

SEQ ID NO: 2573581 - RNA, 19 nt, Artificial Sequence
  Description of Artificial Sequence: Synthetic oligonucleotide
guuugucaugggugaagca

SEQ ID NO: 2573582 - RNA, 19 nt, Artificial Sequence
  Description of Artificial Sequence: Synthetic oligonucleotide
uguacauucccaggcuguu

SEQ ID NO: 2573583 - RNA, 19 nt, Artificial Sequence
  Description of Artificial Sequence: Synthetic oligonucleotide
gagaagaugcaaguuuccu

SEQ ID NO: 2573584 - RNA, 19 nt, Artificial Sequence
  Description of Artificial Sequence: Synthetic oligonucleotide
aucugaacugcaacaugcu

SEQ ID NO: 2573585 - RNA, 19 nt, Artificial Sequence
  Description of Artificial Sequence: Synthetic oligonucleotide
ggguaguggagacaucuga

SEQ ID NO: 2573586 - RNA, 19 nt, Artificial Sequence
  Description of Artificial Sequence: Synthetic oligonucleotide
uaggagagaucuggguuuc

SEQ ID NO: 2573587 - RNA, 19 nt, Artificial Sequence
  Description of Artificial Sequence: Synthetic oligonucleotide
cuugagucagugccuggca

SEQ ID NO: 2573588 - RNA, 19 nt, Artificial Sequence
  Description of Artificial Sequence: Synthetic oligonucleotide
acugaaccacacucagcau

SEQ ID NO: 2573589 - RNA, 19 nt, Artificial Sequence
  Description of Artificial Sequence: Synthetic oligonucleotide
aggagagaucuggguuucc

SEQ ID NO: 2573590 - RNA, 19 nt, Artificial Sequence
  Description of Artificial Sequence: Synthetic oligonucleotide
caacugcauacauacuaaa

SEQ ID NO: 2573591 - RNA, 19 nt, Artificial Sequence
  Description of Artificial Sequence: Synthetic oligonucleotide
gacaucugaacugcaacau

SEQ ID NO: 2573592 - RNA, 19 nt, Artificial Sequence
  Description of Artificial Sequence: Synthetic oligonucleotide
uugcaacugggguucugau

SEQ ID NO: 2573593 - RNA, 19 nt, Artificial Sequence
  Description of Artificial Sequence: Synthetic oligonucleotide
caugcuacugccacauggu

SEQ ID NO: 2573594 - RNA, 19 nt, Artificial Sequence
  Description of Artificial Sequence: Synthetic oligonucleotide
gagugaccgggcucagcug

SEQ ID NO: 2573595 - RNA, 19 nt, Artificial Sequence
  Description of Artificial Sequence: Synthetic oligonucleotide
ggagagaucuggguuuccc

SEQ ID NO: 2573596 - RNA, 19 nt, Artificial Sequence
  Description of Artificial Sequence: Synthetic oligonucleotide
acauucccaggcuguucug

SEQ ID NO: 2573597 - RNA, 19 nt, Artificial Sequence
  Description of Artificial Sequence: Synthetic oligonucleotide
cagccucuagugagaagug

SEQ ID NO: 2573598 - RNA, 19 nt, Artificial Sequence
  Description of Artificial Sequence: Synthetic oligonucleotide
gcaaguuuccuucugggau

SEQ ID NO: 2573599 - RNA, 19 nt, Artificial Sequence
  Description of Artificial Sequence: Synthetic oligonucleotide
gcuuauccacacuccauga

SEQ ID NO: 2573600 - RNA, 19 nt, Artificial Sequence
  Description of Artificial Sequence: Synthetic oligonucleotide
gauuagcgauguuugucau

SEQ ID NO: 2573601 - RNA, 19 nt, Artificial Sequence
  Description of Artificial Sequence: Synthetic oligonucleotide
gugggacaaauggguaucc

SEQ ID NO: 2573602 - RNA, 19 nt, Artificial Sequence
  Description of Artificial Sequence: Synthetic oligonucleotide
ccacuucccacaugguugc

SEQ ID NO: 2573603 - RNA, 19 nt, Artificial Sequence
  Description of Artificial Sequence: Synthetic oligonucleotide
uggaggagcucugcacuga

SEQ ID NO: 2573604 - RNA, 19 nt, Artificial Sequence
  Description of Artificial Sequence: Synthetic oligonucleotide
gauguuugucaugggugaa

SEQ ID NO: 2573605 - RNA, 19 nt, Artificial Sequence
  Description of Artificial Sequence: Synthetic oligonucleotide
cugcuugagucagugccug

SEQ ID NO: 2573606 - RNA, 19 nt, Artificial Sequence
  Description of Artificial Sequence: Synthetic oligonucleotide
auuggccuguacauuccca

SEQ ID NO: 2573607 - RNA, 19 nt, Artificial Sequence
  Description of Artificial Sequence: Synthetic oligonucleotide
gggguucugaucauuacaa

SEQ ID NO: 2573608 - RNA, 19 nt, Artificial Sequence
  Description of Artificial Sequence: Synthetic oligonucleotide
caaggcagaguggguacug

SEQ ID NO: 2573609 - RNA, 19 nt, Artificial Sequence
  Description of Artificial Sequence: Synthetic oligonucleotide
ggcacagggcauuggagga

SEQ ID NO: 2573610 - RNA, 19 nt, Artificial Sequence
  Description of Artificial Sequence: Synthetic oligonucleotide
acccaugccgaacccuccu

SEQ ID NO: 2573611 - RNA, 19 nt, Artificial Sequence
  Description of Artificial Sequence: Synthetic oligonucleotide
caggauaagugugggacaa

SEQ ID NO: 2573612 - RNA, 19 nt, Artificial Sequence
  Description of Artificial Sequence: Synthetic oligonucleotide
cacccaugccgaacccucc

SEQ ID NO: 2573613 - RNA, 19 nt, Artificial Sequence
  Description of Artificial Sequence: Synthetic oligonucleotide
caugguugcaacugggguu

SEQ ID NO: 2573614 - RNA, 19 nt, Artificial Sequence
  Description of Artificial Sequence: Synthetic oligonucleotide
auuuuggaauggagaagau

SEQ ID NO: 2573615 - RNA, 19 nt, Artificial Sequence
  Description of Artificial Sequence: Synthetic oligonucleotide
ggcuguucugaacagggua

SEQ ID NO: 2573616 - RNA, 19 nt, Artificial Sequence
  Description of Artificial Sequence: Synthetic oligonucleotide
agugugggacaaaugggua

SEQ ID NO: 2573617 - RNA, 19 nt, Artificial Sequence
  Description of Artificial Sequence: Synthetic oligonucleotide
caaagcaaggaggaugacu

SEQ ID NO: 2573618 - RNA, 19 nt, Artificial Sequence
  Description of Artificial Sequence: Synthetic oligonucleotide
gcuugagucagugccuggc

SEQ ID NO: 2573619 - RNA, 19 nt, Artificial Sequence
  Description of Artificial Sequence: Synthetic oligonucleotide
cuccugcuugagucagugc

SEQ ID NO: 2573620 - RNA, 19 nt, Artificial Sequence
  Description of Artificial Sequence: Synthetic oligonucleotide
caaauggguauccccugaa

SEQ ID NO: 2573621 - RNA, 19 nt, Artificial Sequence
  Description of Artificial Sequence: Synthetic oligonucleotide
ggagcucugcacugaacca

SEQ ID NO: 2573622 - RNA, 19 nt, Artificial Sequence
  Description of Artificial Sequence: Synthetic oligonucleotide
agcucugcacugaaccaca

SEQ ID NO: 2573623 - RNA, 19 nt, Artificial Sequence
  Description of Artificial Sequence: Synthetic oligonucleotide
cagaguggguacugaguga

SEQ ID NO: 2573624 - RNA, 19 nt, Artificial Sequence
  Description of Artificial Sequence: Synthetic oligonucleotide
cuuuguccucagccaguug

SEQ ID NO: 2573625 - RNA, 19 nt, Artificial Sequence
  Description of Artificial Sequence: Synthetic oligonucleotide
guguguguguguauuuaaa

SEQ ID NO: 2573626 - RNA, 19 nt, Artificial Sequence
  Description of Artificial Sequence: Synthetic oligonucleotide
acugggguucugaucauua

SEQ ID NO: 2573627 - RNA, 19 nt, Artificial Sequence
  Description of Artificial Sequence: Synthetic oligonucleotide
cacacucagcauucuggga

SEQ ID NO: 2573628 - RNA, 19 nt, Artificial Sequence
  Description of Artificial Sequence: Synthetic oligonucleotide
gguaguggagacaucugaa

SEQ ID NO: 2573629 - RNA, 19 nt, Artificial Sequence
  Description of Artificial Sequence: Synthetic oligonucleotide
gaguggguacugagugacc

SEQ ID NO: 2573630 - RNA, 19 nt, Artificial Sequence
  Description of Artificial Sequence: Synthetic oligonucleotide
gcagccucuagugagaagu

SEQ ID NO: 2573631 - RNA, 19 nt, Artificial Sequence
  Description of Artificial Sequence: Synthetic oligonucleotide
caacagaucaggccaggcu

SEQ ID NO: 2573632 - RNA, 19 nt, Artificial Sequence
  Description of Artificial Sequence: Synthetic oligonucleotide
gguuccauaauuacaggau

SEQ ID NO: 2573633 - RNA, 19 nt, Artificial Sequence
  Description of Artificial Sequence: Synthetic oligonucleotide
gaacaggguaguggagaca

SEQ ID NO: 2573634 - RNA, 19 nt, Artificial Sequence
  Description of Artificial Sequence: Synthetic oligonucleotide
cugaaccacacucagcauu

SEQ ID NO: 2573635 - RNA, 19 nt, Artificial Sequence
  Description of Artificial Sequence: Synthetic oligonucleotide
cuguacauucccaggcugu

SEQ ID NO: 2573636 - RNA, 19 nt, Artificial Sequence
  Description of Artificial Sequence: Synthetic oligonucleotide
aggguaguggagacaucug

SEQ ID NO: 2573637 - RNA, 19 nt, Artificial Sequence
  Description of Artificial Sequence: Synthetic oligonucleotide
guaaccugaguaccuuuau

SEQ ID NO: 2573638 - RNA, 19 nt, Artificial Sequence
  Description of Artificial Sequence: Synthetic oligonucleotide
acuucccacaugguugcaa

SEQ ID NO: 2573639 - RNA, 19 nt, Artificial Sequence
  Description of Artificial Sequence: Synthetic oligonucleotide
ggacaaauggguauccccu

SEQ ID NO: 2573640 - RNA, 19 nt, Artificial Sequence
  Description of Artificial Sequence: Synthetic oligonucleotide
cuguguaaccugaguaccu

SEQ ID NO: 2573641 - RNA, 19 nt, Artificial Sequence
  Description of Artificial Sequence: Synthetic oligonucleotide
ccaagugguuccauaauua

SEQ ID NO: 2573642 - RNA, 19 nt, Artificial Sequence
  Description of Artificial Sequence: Synthetic oligonucleotide
auccacacuccaugagaua

SEQ ID NO: 2573643 - RNA, 19 nt, Artificial Sequence
  Description of Artificial Sequence: Synthetic oligonucleotide
gugugggacaaauggguau

SEQ ID NO: 2573644 - RNA, 19 nt, Artificial Sequence
  Description of Artificial Sequence: Synthetic oligonucleotide
uagcagccucuagugagaa

SEQ ID NO: 2573645 - RNA, 19 nt, Artificial Sequence
  Description of Artificial Sequence: Synthetic oligonucleotide
gugcauuaggccaccaagu

SEQ ID NO: 2573646 - RNA, 19 nt, Artificial Sequence
  Description of Artificial Sequence: Synthetic oligonucleotide
guacauucccaggcuguuc

SEQ ID NO: 2573647 - RNA, 19 nt, Artificial Sequence
  Description of Artificial Sequence: Synthetic oligonucleotide
agaucaggccaggcuccuc

SEQ ID NO: 2573648 - RNA, 19 nt, Artificial Sequence
  Description of Artificial Sequence: Synthetic oligonucleotide
gguacugagugaccgggcu

SEQ ID NO: 2573649 - RNA, 19 nt, Artificial Sequence
  Description of Artificial Sequence: Synthetic oligonucleotide
gccucuagugagaagugca

SEQ ID NO: 2573650 - RNA, 19 nt, Artificial Sequence
  Description of Artificial Sequence: Synthetic oligonucleotide
cagcuggccacuucccaca

SEQ ID NO: 2573651 - RNA, 19 nt, Artificial Sequence
  Description of Artificial Sequence: Synthetic oligonucleotide
gcaacaugcuacugccaca

SEQ ID NO: 2573652 - RNA, 19 nt, Artificial Sequence
  Description of Artificial Sequence: Synthetic oligonucleotide
agucagugccuggcacagg

SEQ ID NO: 2573653 - RNA, 19 nt, Artificial Sequence
  Description of Artificial Sequence: Synthetic oligonucleotide
gaggagcucugcacugaac

SEQ ID NO: 2573654 - RNA, 19 nt, Artificial Sequence
  Description of Artificial Sequence: Synthetic oligonucleotide
cucagcauucugggagaug

SEQ ID NO: 2573655 - RNA, 19 nt, Artificial Sequence
  Description of Artificial Sequence: Synthetic oligonucleotide
cgauguuugucauggguga

SEQ ID NO: 2573656 - RNA, 19 nt, Artificial Sequence
  Description of Artificial Sequence: Synthetic oligonucleotide
guguguguguguguauuua

SEQ ID NO: 2573657 - RNA, 19 nt, Artificial Sequence
  Description of Artificial Sequence: Synthetic oligonucleotide
gggacagcaacugcauaca

SEQ ID NO: 2573658 - RNA, 19 nt, Artificial Sequence
  Description of Artificial Sequence: Synthetic oligonucleotide
ccagcuuauccacacucca

SEQ ID NO: 2573659 - RNA, 19 nt, Artificial Sequence
  Description of Artificial Sequence: Synthetic oligonucleotide
ggagacaucugaacugcaa

SEQ ID NO: 2573660 - RNA, 19 nt, Artificial Sequence
  Description of Artificial Sequence: Synthetic oligonucleotide
gcaacagaucaggccaggc

SEQ ID NO: 2573661 - RNA, 19 nt, Artificial Sequence
  Description of Artificial Sequence: Synthetic oligonucleotide
ggcauuggaggagcucugc

SEQ ID NO: 2573662 - RNA, 19 nt, Artificial Sequence
  Description of Artificial Sequence: Synthetic oligonucleotide
acugagugaccgggcucag

SEQ ID NO: 2573663 - RNA, 19 nt, Artificial Sequence
  Description of Artificial Sequence: Synthetic oligonucleotide
cugagugaccgggcucagc

SEQ ID NO: 2573664 - RNA, 19 nt, Artificial Sequence
  Description of Artificial Sequence: Synthetic oligonucleotide
gaagugcauuaggccacca

SEQ ID NO: 2573665 - RNA, 19 nt, Artificial Sequence
  Description of Artificial Sequence: Synthetic oligonucleotide
caacaugcuacugccacau

SEQ ID NO: 2573666 - RNA, 19 nt, Artificial Sequence
  Description of Artificial Sequence: Synthetic oligonucleotide
ccaggcuguucugaacagg

SEQ ID NO: 2573667 - RNA, 19 nt, Artificial Sequence
  Description of Artificial Sequence: Synthetic oligonucleotide
ggauaagugugggacaaau

SEQ ID NO: 2573668 - RNA, 19 nt, Artificial Sequence
  Description of Artificial Sequence: Synthetic oligonucleotide
ccaccaagugguuccauaa

SEQ ID NO: 2573669 - RNA, 19 nt, Artificial Sequence
  Description of Artificial Sequence: Synthetic oligonucleotide
aggauaagugugggacaaa

SEQ ID NO: 2573670 - RNA, 19 nt, Artificial Sequence
  Description of Artificial Sequence: Synthetic oligonucleotide
aggcuguucugaacagggu

SEQ ID NO: 2573671 - RNA, 19 nt, Artificial Sequence
  Description of Artificial Sequence: Synthetic oligonucleotide
ccauaauuacaggauaagu

SEQ ID NO: 2573672 - RNA, 19 nt, Artificial Sequence
  Description of Artificial Sequence: Synthetic oligonucleotide
gccacaugguccacgaaaa

SEQ ID NO: 2573673 - RNA, 19 nt, Artificial Sequence
  Description of Artificial Sequence: Synthetic oligonucleotide
acacuccaugagauagagu

SEQ ID NO: 2573674 - RNA, 19 nt, Artificial Sequence
  Description of Artificial Sequence: Synthetic oligonucleotide
gggaaggcucaaggcagag

SEQ ID NO: 2573675 - RNA, 19 nt, Artificial Sequence
  Description of Artificial Sequence: Synthetic oligonucleotide
cagggcauuggaggagcuc

SEQ ID NO: 2573676 - RNA, 19 nt, Artificial Sequence
  Description of Artificial Sequence: Synthetic oligonucleotide
gccucauuggccuguacau

SEQ ID NO: 2573677 - RNA, 19 nt, Artificial Sequence
  Description of Artificial Sequence: Synthetic oligonucleotide
ccuucugggaugucaccca

SEQ ID NO: 2573678 - RNA, 19 nt, Artificial Sequence
  Description of Artificial Sequence: Synthetic oligonucleotide
gcucaaggcagagugggua

SEQ ID NO: 2573679 - RNA, 19 nt, Artificial Sequence
  Description of Artificial Sequence: Synthetic oligonucleotide
gucaugggugaagcaggga

SEQ ID NO: 2573680 - RNA, 19 nt, Artificial Sequence
  Description of Artificial Sequence: Synthetic oligonucleotide
gugaccgggcucagcuggc

SEQ ID NO: 2573681 - RNA, 19 nt, Artificial Sequence
  Description of Artificial Sequence: Synthetic oligonucleotide
gcuccuccugcuugaguca

SEQ ID NO: 2573682 - RNA, 19 nt, Artificial Sequence
  Description of Artificial Sequence: Synthetic oligonucleotide
ggguacugagugaccgggc

SEQ ID NO: 2573683 - RNA, 19 nt, Artificial Sequence
  Description of Artificial Sequence: Synthetic oligonucleotide
auagccucauuggccugua

SEQ ID NO: 2573684 - RNA, 19 nt, Artificial Sequence
  Description of Artificial Sequence: Synthetic oligonucleotide
auuaggccaccaagugguu

SEQ ID NO: 2573685 - RNA, 19 nt, Artificial Sequence
  Description of Artificial Sequence: Synthetic oligonucleotide
ugguugcaacugggguucu

SEQ ID NO: 2573686 - RNA, 19 nt, Artificial Sequence
  Description of Artificial Sequence: Synthetic oligonucleotide
guguguguguguguguauu

SEQ ID NO: 2573687 - RNA, 19 nt, Artificial Sequence
  Description of Artificial Sequence: Synthetic oligonucleotide
ggaccuguguaaccugagu

SEQ ID NO: 2573688 - RNA, 19 nt, Artificial Sequence
  Description of Artificial Sequence: Synthetic oligonucleotide
gguauccccugaaaauaua

SEQ ID NO: 2573689 - RNA, 19 nt, Artificial Sequence
  Description of Artificial Sequence: Synthetic oligonucleotide
ggggaccuguguaaccuga

SEQ ID NO: 2573690 - RNA, 19 nt, Artificial Sequence
  Description of Artificial Sequence: Synthetic oligonucleotide
cucugcacugaaccacacu

SEQ ID NO: 2573691 - RNA, 19 nt, Artificial Sequence
  Description of Artificial Sequence: Synthetic oligonucleotide
cuucccuguccuguagucu

SEQ ID NO: 2573692 - RNA, 19 nt, Artificial Sequence
  Description of Artificial Sequence: Synthetic oligonucleotide
auacugcuagcagccucua

SEQ ID NO: 2573693 - RNA, 19 nt, Artificial Sequence
  Description of Artificial Sequence: Synthetic oligonucleotide
gccaccaagugguuccaua

SEQ ID NO: 2573694 - RNA, 19 nt, Artificial Sequence
  Description of Artificial Sequence: Synthetic oligonucleotide
gguugcaacugggguucug

SEQ ID NO: 2573695 - RNA, 19 nt, Artificial Sequence
  Description of Artificial Sequence: Synthetic oligonucleotide
cuucugggaugucacccau

SEQ ID NO: 2573696 - RNA, 19 nt, Artificial Sequence
  Description of Artificial Sequence: Synthetic oligonucleotide
aggccaccaagugguucca

SEQ ID NO: 2573697 - RNA, 19 nt, Artificial Sequence
  Description of Artificial Sequence: Synthetic oligonucleotide
caccaagugguuccauaau

SEQ ID NO: 2573698 - RNA, 19 nt, Artificial Sequence
  Description of Artificial Sequence: Synthetic oligonucleotide
gaacccuccuccagcuuau

SEQ ID NO: 2573699 - RNA, 19 nt, Artificial Sequence
  Description of Artificial Sequence: Synthetic oligonucleotide
ccacacuccaugagauaga

SEQ ID NO: 2573700 - RNA, 19 nt, Artificial Sequence
  Description of Artificial Sequence: Synthetic oligonucleotide
gccuguacauucccaggcu

SEQ ID NO: 2573701 - RNA, 19 nt, Artificial Sequence
  Description of Artificial Sequence: Synthetic oligonucleotide
cucuagugagaagugcauu

SEQ ID NO: 2573702 - RNA, 19 nt, Artificial Sequence
  Description of Artificial Sequence: Synthetic oligonucleotide
ggcagaguggguacugagu

SEQ ID NO: 2573703 - RNA, 19 nt, Artificial Sequence
  Description of Artificial Sequence: Synthetic oligonucleotide
gucacccaugccgaacccu

SEQ ID NO: 2573704 - RNA, 19 nt, Artificial Sequence
  Description of Artificial Sequence: Synthetic oligonucleotide
ccaugagauagagugcugu

SEQ ID NO: 2573705 - RNA, 19 nt, Artificial Sequence
  Description of Artificial Sequence: Synthetic oligonucleotide
ggguauccccugaaaauau

SEQ ID NO: 2573706 - RNA, 19 nt, Artificial Sequence
  Description of Artificial Sequence: Synthetic oligonucleotide
ggacagcaacugcauacau

SEQ ID NO: 2573707 - RNA, 19 nt, Artificial Sequence
  Description of Artificial Sequence: Synthetic oligonucleotide
gugauugauuagcgauguu

SEQ ID NO: 2573708 - RNA, 19 nt, Artificial Sequence
  Description of Artificial Sequence: Synthetic oligonucleotide
gccgaacccuccuccagcu

SEQ ID NO: 2573709 - RNA, 19 nt, Artificial Sequence
  Description of Artificial Sequence: Synthetic oligonucleotide
ccucuagugagaagugcau

SEQ ID NO: 2573710 - RNA, 19 nt, Artificial Sequence
  Description of Artificial Sequence: Synthetic oligonucleotide
cugccacaugguccacgaa

SEQ ID NO: 2573711 - RNA, 19 nt, Artificial Sequence
  Description of Artificial Sequence: Synthetic oligonucleotide
caacugggguucugaucau

SEQ ID NO: 2573712 - RNA, 19 nt, Artificial Sequence
  Description of Artificial Sequence: Synthetic oligonucleotide
cacuucccacaugguugca

SEQ ID NO: 2573713 - RNA, 19 nt, Artificial Sequence
  Description of Artificial Sequence: Synthetic oligonucleotide
cagaucaggccaggcuccu

SEQ ID NO: 2573714 - RNA, 19 nt, Artificial Sequence
  Description of Artificial Sequence: Synthetic oligonucleotide
gugccuggcacagggcauu

SEQ ID NO: 2573715 - RNA, 19 nt, Artificial Sequence
  Description of Artificial Sequence: Synthetic oligonucleotide
ccucagccaguugacaauu

SEQ ID NO: 2573716 - RNA, 19 nt, Artificial Sequence
  Description of Artificial Sequence: Synthetic oligonucleotide
cccuguccuguagucugcu

SEQ ID NO: 2573717 - RNA, 19 nt, Artificial Sequence
  Description of Artificial Sequence: Synthetic oligonucleotide
ccgggcucagcuggccacu

SEQ ID NO: 2573718 - RNA, 19 nt, Artificial Sequence
  Description of Artificial Sequence: Synthetic oligonucleotide
ccgaacccuccuccagcuu

SEQ ID NO: 2573719 - RNA, 19 nt, Artificial Sequence
  Description of Artificial Sequence: Synthetic oligonucleotide
cgggcucagcuggccacuu

SEQ ID NO: 2573720 - RNA, 19 nt, Artificial Sequence
  Description of Artificial Sequence: Synthetic oligonucleotide
uguuuuaacggguaggugg

SEQ ID NO: 2573721 - RNA, 19 nt, Artificial Sequence
  Description of Artificial Sequence: Synthetic oligonucleotide
ucacaaauaaguuaugugc

SEQ ID NO: 2573722 - RNA, 19 nt, Artificial Sequence
  Description of Artificial Sequence: Synthetic oligonucleotide
aaauaaguuaugugcaauc

SEQ ID NO: 2573723 - RNA, 19 nt, Artificial Sequence
  Description of Artificial Sequence: Synthetic oligonucleotide
guuaugugcaaucucaugg

SEQ ID NO: 2573724 - RNA, 19 nt, Artificial Sequence
  Description of Artificial Sequence: Synthetic oligonucleotide
auauauacaggcuuugggg

SEQ ID NO: 2573725 - RNA, 19 nt, Artificial Sequence
  Description of Artificial Sequence: Synthetic oligonucleotide
cacaaaaugacucggaucc

SEQ ID NO: 2573726 - RNA, 19 nt, Artificial Sequence
  Description of Artificial Sequence: Synthetic oligonucleotide
cucauggucacucagauag

SEQ ID NO: 2573727 - RNA, 19 nt, Artificial Sequence
  Description of Artificial Sequence: Synthetic oligonucleotide
aauuauagcccuucuuggg

SEQ ID NO: 2573728 - RNA, 19 nt, Artificial Sequence
  Description of Artificial Sequence: Synthetic oligonucleotide
aaaaccugaagaauuauag

SEQ ID NO: 2573729 - RNA, 19 nt, Artificial Sequence
  Description of Artificial Sequence: Synthetic oligonucleotide
gauauauacaggcuuuggg

SEQ ID NO: 2573730 - RNA, 19 nt, Artificial Sequence
  Description of Artificial Sequence: Synthetic oligonucleotide
agaauuauagcccuucuug

SEQ ID NO: 2573731 - RNA, 19 nt, Artificial Sequence
  Description of Artificial Sequence: Synthetic oligonucleotide
uaaguuaugugcaaucuca

SEQ ID NO: 2573732 - RNA, 19 nt, Artificial Sequence
  Description of Artificial Sequence: Synthetic oligonucleotide
ugaguucaagaucagaagc

SEQ ID NO: 2573733 - RNA, 19 nt, Artificial Sequence
  Description of Artificial Sequence: Synthetic oligonucleotide
auuauagcccuucuugggc

SEQ ID NO: 2573734 - RNA, 19 nt, Artificial Sequence
  Description of Artificial Sequence: Synthetic oligonucleotide
uauccuuuauuccaaagcu

SEQ ID NO: 2573735 - RNA, 19 nt, Artificial Sequence
  Description of Artificial Sequence: Synthetic oligonucleotide
gaauuauagcccuucuugg

SEQ ID NO: 2573736 - RNA, 19 nt, Artificial Sequence
  Description of Artificial Sequence: Synthetic oligonucleotide
uucaagaucagaagccagg

SEQ ID NO: 2573737 - RNA, 19 nt, Artificial Sequence
  Description of Artificial Sequence: Synthetic oligonucleotide
ggaagaaugguucacagag

SEQ ID NO: 2573738 - RNA, 19 nt, Artificial Sequence
  Description of Artificial Sequence: Synthetic oligonucleotide
uucugcagcagauauauac

SEQ ID NO: 2573739 - RNA, 19 nt, Artificial Sequence
  Description of Artificial Sequence: Synthetic oligonucleotide
ugaaugagggccauugcag

SEQ ID NO: 2573740 - RNA, 19 nt, Artificial Sequence
  Description of Artificial Sequence: Synthetic oligonucleotide
uuuauuccaaagcuggacu

SEQ ID NO: 2573741 - RNA, 19 nt, Artificial Sequence
  Description of Artificial Sequence: Synthetic oligonucleotide
aaugacucggaucccagug

SEQ ID NO: 2573742 - RNA, 19 nt, Artificial Sequence
  Description of Artificial Sequence: Synthetic oligonucleotide
auugaaagccccacuaucc

SEQ ID NO: 2573743 - RNA, 19 nt, Artificial Sequence
  Description of Artificial Sequence: Synthetic oligonucleotide
aauaaguuaugugcaaucu

SEQ ID NO: 2573744 - RNA, 19 nt, Artificial Sequence
  Description of Artificial Sequence: Synthetic oligonucleotide
uauauacaggcuuuggggu

SEQ ID NO: 2573745 - RNA, 19 nt, Artificial Sequence
  Description of Artificial Sequence: Synthetic oligonucleotide
cagagcgcaacauugaaag

SEQ ID NO: 2573746 - RNA, 19 nt, Artificial Sequence
  Description of Artificial Sequence: Synthetic oligonucleotide
aucugccugaguuuggggc

SEQ ID NO: 2573747 - RNA, 19 nt, Artificial Sequence
  Description of Artificial Sequence: Synthetic oligonucleotide
cuauccuuuauuccaaagc

SEQ ID NO: 2573748 - RNA, 19 nt, Artificial Sequence
  Description of Artificial Sequence: Synthetic oligonucleotide
aagcuggacuuccuggccc

SEQ ID NO: 2573749 - RNA, 19 nt, Artificial Sequence
  Description of Artificial Sequence: Synthetic oligonucleotide
acaguccugaaugagggcc

SEQ ID NO: 2573750 - RNA, 19 nt, Artificial Sequence
  Description of Artificial Sequence: Synthetic oligonucleotide
accugaagaauuauagccc

SEQ ID NO: 2573751 - RNA, 19 nt, Artificial Sequence
  Description of Artificial Sequence: Synthetic oligonucleotide
aacauugaaagccccacua

SEQ ID NO: 2573752 - RNA, 19 nt, Artificial Sequence
  Description of Artificial Sequence: Synthetic oligonucleotide
ucugcagcagauauauaca

SEQ ID NO: 2573753 - RNA, 19 nt, Artificial Sequence
  Description of Artificial Sequence: Synthetic oligonucleotide
uccugggauguuuuaacgg

SEQ ID NO: 2573754 - RNA, 19 nt, Artificial Sequence
  Description of Artificial Sequence: Synthetic oligonucleotide
cagguaguagccaugcagg

SEQ ID NO: 2573755 - RNA, 19 nt, Artificial Sequence
  Description of Artificial Sequence: Synthetic oligonucleotide
cauacccugcuaaucaagg

SEQ ID NO: 2573756 - RNA, 19 nt, Artificial Sequence
  Description of Artificial Sequence: Synthetic oligonucleotide
gucacaaauaaguuaugug

SEQ ID NO: 2573757 - RNA, 19 nt, Artificial Sequence
  Description of Artificial Sequence: Synthetic oligonucleotide
ucuagaggugugcuugggg

SEQ ID NO: 2573758 - RNA, 19 nt, Artificial Sequence
  Description of Artificial Sequence: Synthetic oligonucleotide
auauacaggcuuugggguc

SEQ ID NO: 2573759 - RNA, 19 nt, Artificial Sequence
  Description of Artificial Sequence: Synthetic oligonucleotide
auacccugcuaaucaaggc

SEQ ID NO: 2573760 - RNA, 19 nt, Artificial Sequence
  Description of Artificial Sequence: Synthetic oligonucleotide
cuagaggugugcuuggggc

SEQ ID NO: 2573761 - RNA, 19 nt, Artificial Sequence
  Description of Artificial Sequence: Synthetic oligonucleotide
aguccugggauguuuuaac

SEQ ID NO: 2573762 - RNA, 19 nt, Artificial Sequence
  Description of Artificial Sequence: Synthetic oligonucleotide
uagccaugcagguaggaag

SEQ ID NO: 2573763 - RNA, 19 nt, Artificial Sequence
  Description of Artificial Sequence: Synthetic oligonucleotide
gaaugguucacagaggcca

SEQ ID NO: 2573764 - RNA, 19 nt, Artificial Sequence
  Description of Artificial Sequence: Synthetic oligonucleotide
cucacagagcgcaacauug

SEQ ID NO: 2573765 - RNA, 19 nt, Artificial Sequence
  Description of Artificial Sequence: Synthetic oligonucleotide
aggaaggugaugccugccc

SEQ ID NO: 2573766 - RNA, 19 nt, Artificial Sequence
  Description of Artificial Sequence: Synthetic oligonucleotide
gagcgcaacauugaaagcc

SEQ ID NO: 2573767 - RNA, 19 nt, Artificial Sequence
  Description of Artificial Sequence: Synthetic oligonucleotide
uagguggccagccagcuca

SEQ ID NO: 2573768 - RNA, 19 nt, Artificial Sequence
  Description of Artificial Sequence: Synthetic oligonucleotide
uuauagcccuucuugggcc

SEQ ID NO: 2573769 - RNA, 19 nt, Artificial Sequence
  Description of Artificial Sequence: Synthetic oligonucleotide
uuaugugcaaucucauggu

SEQ ID NO: 2573770 - RNA, 19 nt, Artificial Sequence
  Description of Artificial Sequence: Synthetic oligonucleotide
auuccaaagcuggacuucc

SEQ ID NO: 2573771 - RNA, 19 nt, Artificial Sequence
  Description of Artificial Sequence: Synthetic oligonucleotide
cacaaauaaguuaugugca

SEQ ID NO: 2573772 - RNA, 19 nt, Artificial Sequence
  Description of Artificial Sequence: Synthetic oligonucleotide
aaugagggccauugcagcu

SEQ ID NO: 2573773 - RNA, 19 nt, Artificial Sequence
  Description of Artificial Sequence: Synthetic oligonucleotide
gaguucaagaucagaagcc

SEQ ID NO: 2573774 - RNA, 19 nt, Artificial Sequence
  Description of Artificial Sequence: Synthetic oligonucleotide
cacucagauagucaguggc

SEQ ID NO: 2573775 - RNA, 19 nt, Artificial Sequence
  Description of Artificial Sequence: Synthetic oligonucleotide
cugaguucaagaucagaag

SEQ ID NO: 2573776 - RNA, 19 nt, Artificial Sequence
  Description of Artificial Sequence: Synthetic oligonucleotide
ucacagaggccaaaccucc

SEQ ID NO: 2573777 - RNA, 19 nt, Artificial Sequence
  Description of Artificial Sequence: Synthetic oligonucleotide
uacccugcuaaucaaggcu

SEQ ID NO: 2573778 - RNA, 19 nt, Artificial Sequence
  Description of Artificial Sequence: Synthetic oligonucleotide
uucacagaggccaaaccuc

SEQ ID NO: 2573779 - RNA, 19 nt, Artificial Sequence
  Description of Artificial Sequence: Synthetic oligonucleotide
cagacaguccugaaugagg

SEQ ID NO: 2573780 - RNA, 19 nt, Artificial Sequence
  Description of Artificial Sequence: Synthetic oligonucleotide
aguuuggggcagcagacag

SEQ ID NO: 2573781 - RNA, 19 nt, Artificial Sequence
  Description of Artificial Sequence: Synthetic oligonucleotide
agcugggagguucugcagc

SEQ ID NO: 2573782 - RNA, 19 nt, Artificial Sequence
  Description of Artificial Sequence: Synthetic oligonucleotide
uucuugggccaucagggcc

SEQ ID NO: 2573783 - RNA, 19 nt, Artificial Sequence
  Description of Artificial Sequence: Synthetic oligonucleotide
gaaugagggccauugcagc

SEQ ID NO: 2573784 - RNA, 19 nt, Artificial Sequence
  Description of Artificial Sequence: Synthetic oligonucleotide
ucagauagucaguggcccg

SEQ ID NO: 2573785 - RNA, 19 nt, Artificial Sequence
  Description of Artificial Sequence: Synthetic oligonucleotide
aagaauuauagcccuucuu

SEQ ID NO: 2573786 - RNA, 19 nt, Artificial Sequence
  Description of Artificial Sequence: Synthetic oligonucleotide
agcagauauauacaggcuu

SEQ ID NO: 2573787 - RNA, 19 nt, Artificial Sequence
  Description of Artificial Sequence: Synthetic oligonucleotide
acuauccuuuauuccaaag

SEQ ID NO: 2573788 - RNA, 19 nt, Artificial Sequence
  Description of Artificial Sequence: Synthetic oligonucleotide
ucaagaucagaagccaggc

SEQ ID NO: 2573789 - RNA, 19 nt, Artificial Sequence
  Description of Artificial Sequence: Synthetic oligonucleotide
uagaggugugcuuggggcg

SEQ ID NO: 2573790 - RNA, 19 nt, Artificial Sequence
  Description of Artificial Sequence: Synthetic oligonucleotide
agacaguccugaaugaggg

SEQ ID NO: 2573791 - RNA, 19 nt, Artificial Sequence
  Description of Artificial Sequence: Synthetic oligonucleotide
aguuaugugcaaucucaug

SEQ ID NO: 2573792 - RNA, 19 nt, Artificial Sequence
  Description of Artificial Sequence: Synthetic oligonucleotide
agagcgcaacauugaaagc

SEQ ID NO: 2573793 - RNA, 19 nt, Artificial Sequence
  Description of Artificial Sequence: Synthetic oligonucleotide
ucugucaagcugccgaagu

SEQ ID NO: 2573794 - RNA, 19 nt, Artificial Sequence
  Description of Artificial Sequence: Synthetic oligonucleotide
ugacucggaucccagugag

SEQ ID NO: 2573795 - RNA, 19 nt, Artificial Sequence
  Description of Artificial Sequence: Synthetic oligonucleotide
acaaauaaguuaugugcaa

SEQ ID NO: 2573796 - RNA, 19 nt, Artificial Sequence
  Description of Artificial Sequence: Synthetic oligonucleotide
uggcccacaaaaugacucg

SEQ ID NO: 2573797 - RNA, 19 nt, Artificial Sequence
  Description of Artificial Sequence: Synthetic oligonucleotide
gaagaaugguucacagagg

SEQ ID NO: 2573798 - RNA, 19 nt, Artificial Sequence
  Description of Artificial Sequence: Synthetic oligonucleotide
ucggaucccagugaggucc

SEQ ID NO: 2573799 - RNA, 19 nt, Artificial Sequence
  Description of Artificial Sequence: Synthetic oligonucleotide
agcgcaacauugaaagccc

SEQ ID NO: 2573800 - RNA, 19 nt, Artificial Sequence
  Description of Artificial Sequence: Synthetic oligonucleotide
uugaaagccccacuauccu

SEQ ID NO: 2573801 - RNA, 19 nt, Artificial Sequence
  Description of Artificial Sequence: Synthetic oligonucleotide
ugaagaauuauagcccuuc

SEQ ID NO: 2573802 - RNA, 19 nt, Artificial Sequence
  Description of Artificial Sequence: Synthetic oligonucleotide
ugucaagcugccgaagucc

SEQ ID NO: 2573803 - RNA, 19 nt, Artificial Sequence
  Description of Artificial Sequence: Synthetic oligonucleotide
ucuugggccaucagggcca

SEQ ID NO: 2573804 - RNA, 19 nt, Artificial Sequence
  Description of Artificial Sequence: Synthetic oligonucleotide
cagcagacaguccugaaug

SEQ ID NO: 2573805 - RNA, 19 nt, Artificial Sequence
  Description of Artificial Sequence: Synthetic oligonucleotide
aaaaugacucggaucccag

SEQ ID NO: 2573806 - RNA, 19 nt, Artificial Sequence
  Description of Artificial Sequence: Synthetic oligonucleotide
cagguaggaagaaugguuc

SEQ ID NO: 2573807 - RNA, 19 nt, Artificial Sequence
  Description of Artificial Sequence: Synthetic oligonucleotide
aacacucgggaagcaaagg

SEQ ID NO: 2573808 - RNA, 19 nt, Artificial Sequence
  Description of Artificial Sequence: Synthetic oligonucleotide
aacggguagguggccagcc

SEQ ID NO: 2573809 - RNA, 19 nt, Artificial Sequence
  Description of Artificial Sequence: Synthetic oligonucleotide
cauugaaagccccacuauc

SEQ ID NO: 2573810 - RNA, 19 nt, Artificial Sequence
  Description of Artificial Sequence: Synthetic oligonucleotide
guuuuaacggguagguggc

SEQ ID NO: 2573811 - RNA, 19 nt, Artificial Sequence
  Description of Artificial Sequence: Synthetic oligonucleotide
uuaacggguagguggccag

SEQ ID NO: 2573812 - RNA, 19 nt, Artificial Sequence
  Description of Artificial Sequence: Synthetic oligonucleotide
aggcuuuggggucuagagg

SEQ ID NO: 2573813 - RNA, 19 nt, Artificial Sequence
  Description of Artificial Sequence: Synthetic oligonucleotide
aaaugacucggaucccagu

SEQ ID NO: 2573814 - RNA, 19 nt, Artificial Sequence
  Description of Artificial Sequence: Synthetic oligonucleotide
guccugggauguuuuaacg

SEQ ID NO: 2573815 - RNA, 19 nt, Artificial Sequence
  Description of Artificial Sequence: Synthetic oligonucleotide
uaaucaaggcuuccagguc

SEQ ID NO: 2573816 - RNA, 19 nt, Artificial Sequence
  Description of Artificial Sequence: Synthetic oligonucleotide
acaaaaugacucggauccc

SEQ ID NO: 2573817 - RNA, 19 nt, Artificial Sequence
  Description of Artificial Sequence: Synthetic oligonucleotide
ucacagagcgcaacauuga

SEQ ID NO: 2573818 - RNA, 19 nt, Artificial Sequence
  Description of Artificial Sequence: Synthetic oligonucleotide
cucagauagucaguggccc

SEQ ID NO: 2573819 - RNA, 19 nt, Artificial Sequence
  Description of Artificial Sequence: Synthetic oligonucleotide
ugcaaucucauggucacuc

SEQ ID NO: 2573820 - RNA, 19 nt, Artificial Sequence
  Description of Artificial Sequence: Synthetic oligonucleotide
uuuggggcagcagacaguc

SEQ ID NO: 2573821 - RNA, 19 nt, Artificial Sequence
  Description of Artificial Sequence: Synthetic oligonucleotide
gaaggugaugccugcccag

SEQ ID NO: 2573822 - RNA, 19 nt, Artificial Sequence
  Description of Artificial Sequence: Synthetic oligonucleotide
agaaugguucacagaggcc

SEQ ID NO: 2573823 - RNA, 19 nt, Artificial Sequence
  Description of Artificial Sequence: Synthetic oligonucleotide
aucccagugagguccgagg

SEQ ID NO: 2573824 - RNA, 19 nt, Artificial Sequence
  Description of Artificial Sequence: Synthetic oligonucleotide
agaagccaggcaguggugg

SEQ ID NO: 2573825 - RNA, 19 nt, Artificial Sequence
  Description of Artificial Sequence: Synthetic oligonucleotide
gucacucagauagucagug

SEQ ID NO: 2573826 - RNA, 19 nt, Artificial Sequence
  Description of Artificial Sequence: Synthetic oligonucleotide
cuaaucaaggcuuccaggu

SEQ ID NO: 2573827 - RNA, 19 nt, Artificial Sequence
  Description of Artificial Sequence: Synthetic oligonucleotide
agaggugugcuuggggcgc

SEQ ID NO: 2573828 - RNA, 19 nt, Artificial Sequence
  Description of Artificial Sequence: Synthetic oligonucleotide
agacaggcggaucucugag

SEQ ID NO: 2573829 - RNA, 19 nt, Artificial Sequence
  Description of Artificial Sequence: Synthetic oligonucleotide
uuuaacggguagguggcca

SEQ ID NO: 2573830 - RNA, 19 nt, Artificial Sequence
  Description of Artificial Sequence: Synthetic oligonucleotide
uauacaggcuuuggggucu

SEQ ID NO: 2573831 - RNA, 19 nt, Artificial Sequence
  Description of Artificial Sequence: Synthetic oligonucleotide
caacacucgggaagcaaag

SEQ ID NO: 2573832 - RNA, 19 nt, Artificial Sequence
  Description of Artificial Sequence: Synthetic oligonucleotide
ggauguuuuaacggguagg

SEQ ID NO: 2573833 - RNA, 19 nt, Artificial Sequence
  Description of Artificial Sequence: Synthetic oligonucleotide
gauguuuuaacggguaggu

SEQ ID NO: 2573834 - RNA, 19 nt, Artificial Sequence
  Description of Artificial Sequence: Synthetic oligonucleotide
acauugaaagccccacuau

SEQ ID NO: 2573835 - RNA, 19 nt, Artificial Sequence
  Description of Artificial Sequence: Synthetic oligonucleotide
cugaaugagggccauugca

SEQ ID NO: 2573836 - RNA, 19 nt, Artificial Sequence
  Description of Artificial Sequence: Synthetic oligonucleotide
ucccagugagguccgagga

SEQ ID NO: 2573837 - RNA, 19 nt, Artificial Sequence
  Description of Artificial Sequence: Synthetic oligonucleotide
ucgggaagcaaaggcaggc

SEQ ID NO: 2573838 - RNA, 19 nt, Artificial Sequence
  Description of Artificial Sequence: Synthetic oligonucleotide
gacuuccuggcccacaaaa

SEQ ID NO: 2573839 - RNA, 19 nt, Artificial Sequence
  Description of Artificial Sequence: Synthetic oligonucleotide
acucgggaagcaaaggcag

SEQ ID NO: 2573840 - RNA, 19 nt, Artificial Sequence
  Description of Artificial Sequence: Synthetic oligonucleotide
ugagggccauugcagcugc

SEQ ID NO: 2573841 - RNA, 19 nt, Artificial Sequence
  Description of Artificial Sequence: Synthetic oligonucleotide
uauuccaaagcuggacuuc

SEQ ID NO: 2573842 - RNA, 19 nt, Artificial Sequence
  Description of Artificial Sequence: Synthetic oligonucleotide
guucaagaucagaagccag

SEQ ID NO: 2573843 - RNA, 19 nt, Artificial Sequence
  Description of Artificial Sequence: Synthetic oligonucleotide
guucacagaggccaaaccu

SEQ ID NO: 2573844 - RNA, 19 nt, Artificial Sequence
  Description of Artificial Sequence: Synthetic oligonucleotide
ugggagguucugcagcaga

SEQ ID NO: 2573845 - RNA, 19 nt, Artificial Sequence
  Description of Artificial Sequence: Synthetic oligonucleotide
ugggauguuuuaacgggua

SEQ ID NO: 2573846 - RNA, 19 nt, Artificial Sequence
  Description of Artificial Sequence: Synthetic oligonucleotide
cuucuugggccaucagggc

SEQ ID NO: 2573847 - RNA, 19 nt, Artificial Sequence
  Description of Artificial Sequence: Synthetic oligonucleotide
uauagcccuucuugggcca

SEQ ID NO: 2573848 - RNA, 19 nt, Artificial Sequence
  Description of Artificial Sequence: Synthetic oligonucleotide
cagauagucaguggcccgg

SEQ ID NO: 2573849 - RNA, 19 nt, Artificial Sequence
  Description of Artificial Sequence: Synthetic oligonucleotide
aagcugccgaaguccuggg

SEQ ID NO: 2573850 - RNA, 19 nt, Artificial Sequence
  Description of Artificial Sequence: Synthetic oligonucleotide
gguccgaggaaggugaugc

SEQ ID NO: 2573851 - RNA, 19 nt, Artificial Sequence
  Description of Artificial Sequence: Synthetic oligonucleotide
cucgggaagcaaaggcagg

SEQ ID NO: 2573852 - RNA, 19 nt, Artificial Sequence
  Description of Artificial Sequence: Synthetic oligonucleotide
agauagucaguggcccggc

SEQ ID NO: 2573853 - RNA, 19 nt, Artificial Sequence
  Description of Artificial Sequence: Synthetic oligonucleotide
augacucggaucccaguga

SEQ ID NO: 2573854 - RNA, 19 nt, Artificial Sequence
  Description of Artificial Sequence: Synthetic oligonucleotide
ccagguaguagccaugcag

SEQ ID NO: 2573855 - RNA, 19 nt, Artificial Sequence
  Description of Artificial Sequence: Synthetic oligonucleotide
auccuuuauuccaaagcug

SEQ ID NO: 2573856 - RNA, 19 nt, Artificial Sequence
  Description of Artificial Sequence: Synthetic oligonucleotide
aaguuaugugcaaucucau

SEQ ID NO: 2573857 - RNA, 19 nt, Artificial Sequence
  Description of Artificial Sequence: Synthetic oligonucleotide
gacaguccugaaugagggc

SEQ ID NO: 2573858 - RNA, 19 nt, Artificial Sequence
  Description of Artificial Sequence: Synthetic oligonucleotide
cauggucacucagauaguc

SEQ ID NO: 2573859 - RNA, 19 nt, Artificial Sequence
  Description of Artificial Sequence: Synthetic oligonucleotide
agcagacaguccugaauga

SEQ ID NO: 2573860 - RNA, 19 nt, Artificial Sequence
  Description of Artificial Sequence: Synthetic oligonucleotide
auagucaguggcccggcau

SEQ ID NO: 2573861 - RNA, 19 nt, Artificial Sequence
  Description of Artificial Sequence: Synthetic oligonucleotide
aggagcugggagguucugc

SEQ ID NO: 2573862 - RNA, 19 nt, Artificial Sequence
  Description of Artificial Sequence: Synthetic oligonucleotide
guggccagccagcucacag

SEQ ID NO: 2573863 - RNA, 19 nt, Artificial Sequence
  Description of Artificial Sequence: Synthetic oligonucleotide
gaagaauuauagcccuucu

SEQ ID NO: 2573864 - RNA, 19 nt, Artificial Sequence
  Description of Artificial Sequence: Synthetic oligonucleotide
aguggcccggcauacccug

SEQ ID NO: 2573865 - RNA, 19 nt, Artificial Sequence
  Description of Artificial Sequence: Synthetic oligonucleotide
cagauauauacaggcuuug

SEQ ID NO: 2573866 - RNA, 19 nt, Artificial Sequence
  Description of Artificial Sequence: Synthetic oligonucleotide
aaguccugggauguuuuaa

SEQ ID NO: 2573867 - RNA, 19 nt, Artificial Sequence
  Description of Artificial Sequence: Synthetic oligonucleotide
guaggaagaaugguucaca

SEQ ID NO: 2573868 - RNA, 19 nt, Artificial Sequence
  Description of Artificial Sequence: Synthetic oligonucleotide
ugaaagccccacuauccuu

SEQ ID NO: 2573869 - RNA, 19 nt, Artificial Sequence
  Description of Artificial Sequence: Synthetic oligonucleotide
cucaucugccugaguuugg

SEQ ID NO: 2573870 - RNA, 19 nt, Artificial Sequence
  Description of Artificial Sequence: Synthetic oligonucleotide
ugugcuuggggcgcccucc

SEQ ID NO: 2573871 - RNA, 19 nt, Artificial Sequence
  Description of Artificial Sequence: Synthetic oligonucleotide
agucaguggcccggcauac

SEQ ID NO: 2573872 - RNA, 19 nt, Artificial Sequence
  Description of Artificial Sequence: Synthetic oligonucleotide
  modified_base (16)..(16): a, c, u, g, unknown or other
cugcccagguggaggnucc

SEQ ID NO: 2573873 - RNA, 19 nt, Artificial Sequence
  Description of Artificial Sequence: Synthetic oligonucleotide
uuuuaacggguagguggcc

SEQ ID NO: 2573874 - RNA, 19 nt, Artificial Sequence
  Description of Artificial Sequence: Synthetic oligonucleotide
cuccacaggcagugggugg

SEQ ID NO: 2573875 - RNA, 19 nt, Artificial Sequence
  Description of Artificial Sequence: Synthetic oligonucleotide
gggauguuuuaacggguag

SEQ ID NO: 2573876 - RNA, 19 nt, Artificial Sequence
  Description of Artificial Sequence: Synthetic oligonucleotide
caaaaugacucggauccca

SEQ ID NO: 2573877 - RNA, 19 nt, Artificial Sequence
  Description of Artificial Sequence: Synthetic oligonucleotide
auguuuuaacggguaggug

SEQ ID NO: 2573878 - RNA, 19 nt, Artificial Sequence
  Description of Artificial Sequence: Synthetic oligonucleotide
cccacuauccuuuauucca

SEQ ID NO: 2573879 - RNA, 19 nt, Artificial Sequence
  Description of Artificial Sequence: Synthetic oligonucleotide
gagguucugcagcagauau

SEQ ID NO: 2573880 - RNA, 19 nt, Artificial Sequence
  Description of Artificial Sequence: Synthetic oligonucleotide
ugggccagguaguagccau

SEQ ID NO: 2573881 - RNA, 19 nt, Artificial Sequence
  Description of Artificial Sequence: Synthetic oligonucleotide
agaucagaagccaggcagu

SEQ ID NO: 2573882 - RNA, 19 nt, Artificial Sequence
  Description of Artificial Sequence: Synthetic oligonucleotide
ugaugccugcccaggugga

SEQ ID NO: 2573883 - RNA, 19 nt, Artificial Sequence
  Description of Artificial Sequence: Synthetic oligonucleotide
ugcaccucaucugccugag

SEQ ID NO: 2573884 - RNA, 19 nt, Artificial Sequence
  Description of Artificial Sequence: Synthetic oligonucleotide
uggccagccagcucacaga

SEQ ID NO: 2573885 - RNA, 19 nt, Artificial Sequence
  Description of Artificial Sequence: Synthetic oligonucleotide
gagcugggagguucugcag

SEQ ID NO: 2573886 - RNA, 19 nt, Artificial Sequence
  Description of Artificial Sequence: Synthetic oligonucleotide
cacagaggccaaaccuccc

SEQ ID NO: 2573887 - RNA, 19 nt, Artificial Sequence
  Description of Artificial Sequence: Synthetic oligonucleotide
cugccgaaguccugggaug

SEQ ID NO: 2573888 - RNA, 19 nt, Artificial Sequence
  Description of Artificial Sequence: Synthetic oligonucleotide
ggucuagaggugugcuugg

SEQ ID NO: 2573889 - RNA, 19 nt, Artificial Sequence
  Description of Artificial Sequence: Synthetic oligonucleotide
gggugggccagguaguagc

SEQ ID NO: 2573890 - RNA, 19 nt, Artificial Sequence
  Description of Artificial Sequence: Synthetic oligonucleotide
uuggggucuagaggugugc

SEQ ID NO: 2573891 - RNA, 19 nt, Artificial Sequence
  Description of Artificial Sequence: Synthetic oligonucleotide
aaagccccacuauccuuua

SEQ ID NO: 2573892 - RNA, 19 nt, Artificial Sequence
  Description of Artificial Sequence: Synthetic oligonucleotide
agccccacuauccuuuauu

SEQ ID NO: 2573893 - RNA, 19 nt, Artificial Sequence
  Description of Artificial Sequence: Synthetic oligonucleotide
augagggccauugcagcug

SEQ ID NO: 2573894 - RNA, 19 nt, Artificial Sequence
  Description of Artificial Sequence: Synthetic oligonucleotide
  modified_base (19)..(19): a, c, u, g, unknown or other
ugccugcccagguggaggn

SEQ ID NO: 2573895 - RNA, 19 nt, Artificial Sequence
  Description of Artificial Sequence: Synthetic oligonucleotide
ccacaaaaugacucggauc

SEQ ID NO: 2573896 - RNA, 19 nt, Artificial Sequence
  Description of Artificial Sequence: Synthetic oligonucleotide
gugagguccgaggaaggug

SEQ ID NO: 2573897 - RNA, 19 nt, Artificial Sequence
  Description of Artificial Sequence: Synthetic oligonucleotide
ucucauggucacucagaua

SEQ ID NO: 2573898 - RNA, 19 nt, Artificial Sequence
  Description of Artificial Sequence: Synthetic oligonucleotide
gacucggaucccagugagg

SEQ ID NO: 2573899 - RNA, 19 nt, Artificial Sequence
  Description of Artificial Sequence: Synthetic oligonucleotide
agugagguccgaggaaggu

SEQ ID NO: 2573900 - RNA, 19 nt, Artificial Sequence
  Description of Artificial Sequence: Synthetic oligonucleotide
gguaggaagaaugguucac

SEQ ID NO: 2573901 - RNA, 19 nt, Artificial Sequence
  Description of Artificial Sequence: Synthetic oligonucleotide
gaugccugcccagguggag

SEQ ID NO: 2573902 - RNA, 19 nt, Artificial Sequence
  Description of Artificial Sequence: Synthetic oligonucleotide
gucuagaggugugcuuggg

SEQ ID NO: 2573903 - RNA, 19 nt, Artificial Sequence
  Description of Artificial Sequence: Synthetic oligonucleotide
gauagucaguggcccggca

SEQ ID NO: 2573904 - RNA, 19 nt, Artificial Sequence
  Description of Artificial Sequence: Synthetic oligonucleotide
auggucacucagauaguca

SEQ ID NO: 2573905 - RNA, 19 nt, Artificial Sequence
  Description of Artificial Sequence: Synthetic oligonucleotide
gcaacauugaaagccccac

SEQ ID NO: 2573906 - RNA, 19 nt, Artificial Sequence
  Description of Artificial Sequence: Synthetic oligonucleotide
ugccgaaguccugggaugu

SEQ ID NO: 2573907 - RNA, 19 nt, Artificial Sequence
  Description of Artificial Sequence: Synthetic oligonucleotide
gaggaaggugaugccugcc

SEQ ID NO: 2573908 - RNA, 19 nt, Artificial Sequence
  Description of Artificial Sequence: Synthetic oligonucleotide
uggggucuagaggugugcu

SEQ ID NO: 2573909 - RNA, 19 nt, Artificial Sequence
  Description of Artificial Sequence: Synthetic oligonucleotide
gccucugucaagcugccga

SEQ ID NO: 2573910 - RNA, 19 nt, Artificial Sequence
  Description of Artificial Sequence: Synthetic oligonucleotide
acagagcgcaacauugaaa

SEQ ID NO: 2573911 - RNA, 19 nt, Artificial Sequence
  Description of Artificial Sequence: Synthetic oligonucleotide
uaacggguagguggccagc

SEQ ID NO: 2573912 - RNA, 19 nt, Artificial Sequence
  Description of Artificial Sequence: Synthetic oligonucleotide
ggcccacaaaaugacucgg

SEQ ID NO: 2573913 - RNA, 19 nt, Artificial Sequence
  Description of Artificial Sequence: Synthetic oligonucleotide
gaaguccugggauguuuua

SEQ ID NO: 2573914 - RNA, 19 nt, Artificial Sequence
  Description of Artificial Sequence: Synthetic oligonucleotide
caguccugaaugagggcca

SEQ ID NO: 2573915 - RNA, 19 nt, Artificial Sequence
  Description of Artificial Sequence: Synthetic oligonucleotide
ccaggucaggcccuggccc

SEQ ID NO: 2573916 - RNA, 19 nt, Artificial Sequence
  Description of Artificial Sequence: Synthetic oligonucleotide
ugggugggccagguaguag

SEQ ID NO: 2573917 - RNA, 19 nt, Artificial Sequence
  Description of Artificial Sequence: Synthetic oligonucleotide
uuggggcgcccuccacagg

SEQ ID NO: 2573918 - RNA, 19 nt, Artificial Sequence
  Description of Artificial Sequence: Synthetic oligonucleotide
aguagccaugcagguagga

SEQ ID NO: 2573919 - RNA, 19 nt, Artificial Sequence
  Description of Artificial Sequence: Synthetic oligonucleotide
cacagagcgcaacauugaa

SEQ ID NO: 2573920 - RNA, 19 nt, Artificial Sequence
  Description of Artificial Sequence: Synthetic oligonucleotide
guagccaugcagguaggaa

SEQ ID NO: 2573921 - RNA, 19 nt, Artificial Sequence
  Description of Artificial Sequence: Synthetic oligonucleotide
gaguuuggggcagcagaca

SEQ ID NO: 2573922 - RNA, 19 nt, Artificial Sequence
  Description of Artificial Sequence: Synthetic oligonucleotide
caaauaaguuaugugcaau

SEQ ID NO: 2573923 - RNA, 19 nt, Artificial Sequence
  Description of Artificial Sequence: Synthetic oligonucleotide
uggcccggcauacccugcu

SEQ ID NO: 2573924 - RNA, 19 nt, Artificial Sequence
  Description of Artificial Sequence: Synthetic oligonucleotide
ccccacuauccuuuauucc

SEQ ID NO: 2573925 - RNA, 19 nt, Artificial Sequence
  Description of Artificial Sequence: Synthetic oligonucleotide
guccgaggaaggugaugcc

SEQ ID NO: 2573926 - RNA, 19 nt, Artificial Sequence
  Description of Artificial Sequence: Synthetic oligonucleotide
gcauacccugcuaaucaag

SEQ ID NO: 2573927 - RNA, 19 nt, Artificial Sequence
  Description of Artificial Sequence: Synthetic oligonucleotide
cucugucaagcugccgaag

SEQ ID NO: 2573928 - RNA, 19 nt, Artificial Sequence
  Description of Artificial Sequence: Synthetic oligonucleotide
ggucacaaauaaguuaugu

SEQ ID NO: 2573929 - RNA, 19 nt, Artificial Sequence
  Description of Artificial Sequence: Synthetic oligonucleotide
gaaagccccacuauccuuu

SEQ ID NO: 2573930 - RNA, 19 nt, Artificial Sequence
  Description of Artificial Sequence: Synthetic oligonucleotide
ccgaggaaggugaugccug

SEQ ID NO: 2573931 - RNA, 19 nt, Artificial Sequence
  Description of Artificial Sequence: Synthetic oligonucleotide
acaggcuuuggggucuaga

SEQ ID NO: 2573932 - RNA, 19 nt, Artificial Sequence
  Description of Artificial Sequence: Synthetic oligonucleotide
acccugcuaaucaaggcuu

SEQ ID NO: 2573933 - RNA, 19 nt, Artificial Sequence
  Description of Artificial Sequence: Synthetic oligonucleotide
gccccacuauccuuuauuc

SEQ ID NO: 2573934 - RNA, 19 nt, Artificial Sequence
  Description of Artificial Sequence: Synthetic oligonucleotide
aagccccacuauccuuuau

SEQ ID NO: 2573935 - RNA, 19 nt, Artificial Sequence
  Description of Artificial Sequence: Synthetic oligonucleotide
agugggugggccagguagu

SEQ ID NO: 2573936 - RNA, 19 nt, Artificial Sequence
  Description of Artificial Sequence: Synthetic oligonucleotide
cucggaucccagugagguc

SEQ ID NO: 2573937 - RNA, 19 nt, Artificial Sequence
  Description of Artificial Sequence: Synthetic oligonucleotide
cugggauguuuuaacgggu

SEQ ID NO: 2573938 - RNA, 19 nt, Artificial Sequence
  Description of Artificial Sequence: Synthetic oligonucleotide
ccugaagaauuauagcccu

SEQ ID NO: 2573939 - RNA, 19 nt, Artificial Sequence
  Description of Artificial Sequence: Synthetic oligonucleotide
cugccugaguuuggggcag

SEQ ID NO: 2573940 - RNA, 19 nt, Artificial Sequence
  Description of Artificial Sequence: Synthetic oligonucleotide
acggguagguggccagcca

SEQ ID NO: 2573941 - RNA, 19 nt, Artificial Sequence
  Description of Artificial Sequence: Synthetic oligonucleotide
cagcagauauauacaggcu

SEQ ID NO: 2573942 - RNA, 19 nt, Artificial Sequence
  Description of Artificial Sequence: Synthetic oligonucleotide
cacuauccuuuauuccaaa

SEQ ID NO: 2573943 - RNA, 19 nt, Artificial Sequence
  Description of Artificial Sequence: Synthetic oligonucleotide
cugcaccucaucugccuga

SEQ ID NO: 2573944 - RNA, 19 nt, Artificial Sequence
  Description of Artificial Sequence: Synthetic oligonucleotide
cagcucacagagcgcaaca

SEQ ID NO: 2573945 - RNA, 19 nt, Artificial Sequence
  Description of Artificial Sequence: Synthetic oligonucleotide
gcaaucucauggucacuca

SEQ ID NO: 2573946 - RNA, 19 nt, Artificial Sequence
  Description of Artificial Sequence: Synthetic oligonucleotide
caacauugaaagccccacu

SEQ ID NO: 2573947 - RNA, 19 nt, Artificial Sequence
  Description of Artificial Sequence: Synthetic oligonucleotide
aggugugcuuggggcgccc

SEQ ID NO: 2573948 - RNA, 19 nt, Artificial Sequence
  Description of Artificial Sequence: Synthetic oligonucleotide
cacaggcagugggugggcc

SEQ ID NO: 2573949 - RNA, 19 nt, Artificial Sequence
  Description of Artificial Sequence: Synthetic oligonucleotide
ccugcuaaucaaggcuucc

SEQ ID NO: 2573950 - RNA, 19 nt, Artificial Sequence
  Description of Artificial Sequence: Synthetic oligonucleotide
ugcuuggggcgcccuccac

SEQ ID NO: 2573951 - RNA, 19 nt, Artificial Sequence
  Description of Artificial Sequence: Synthetic oligonucleotide
aggucaggcccuggcccac

SEQ ID NO: 2573952 - RNA, 19 nt, Artificial Sequence
  Description of Artificial Sequence: Synthetic oligonucleotide
caggucaggcccuggccca

SEQ ID NO: 2573953 - RNA, 19 nt, Artificial Sequence
  Description of Artificial Sequence: Synthetic oligonucleotide
ccaacacucgggaagcaaa

SEQ ID NO: 2573954 - RNA, 19 nt, Artificial Sequence
  Description of Artificial Sequence: Synthetic oligonucleotide
ggcauacccugcuaaucaa

SEQ ID NO: 2573955 - RNA, 19 nt, Artificial Sequence
  Description of Artificial Sequence: Synthetic oligonucleotide
agugcugccugcaccucau

SEQ ID NO: 2573956 - RNA, 19 nt, Artificial Sequence
  Description of Artificial Sequence: Synthetic oligonucleotide
agguccgaggaaggugaug

SEQ ID NO: 2573957 - RNA, 19 nt, Artificial Sequence
  Description of Artificial Sequence: Synthetic oligonucleotide
ggugggccagguaguagcc

SEQ ID NO: 2573958 - RNA, 19 nt, Artificial Sequence
  Description of Artificial Sequence: Synthetic oligonucleotide
uacaggcuuuggggucuag

SEQ ID NO: 2573959 - RNA, 19 nt, Artificial Sequence
  Description of Artificial Sequence: Synthetic oligonucleotide
gucaguggcccggcauacc

SEQ ID NO: 2573960 - RNA, 19 nt, Artificial Sequence
  Description of Artificial Sequence: Synthetic oligonucleotide
gucaagcugccgaaguccu

SEQ ID NO: 2573961 - RNA, 19 nt, Artificial Sequence
  Description of Artificial Sequence: Synthetic oligonucleotide
gggucacaaauaaguuaug

SEQ ID NO: 2573962 - RNA, 19 nt, Artificial Sequence
  Description of Artificial Sequence: Synthetic oligonucleotide
aggcccuggcccacuagug

SEQ ID NO: 2573963 - RNA, 19 nt, Artificial Sequence
  Description of Artificial Sequence: Synthetic oligonucleotide
gcuuggggcgcccuccaca

SEQ ID NO: 2573964 - RNA, 19 nt, Artificial Sequence
  Description of Artificial Sequence: Synthetic oligonucleotide
cgggucacaaauaaguuau

SEQ ID NO: 2573965 - RNA, 19 nt, Artificial Sequence
  Description of Artificial Sequence: Synthetic oligonucleotide
ccugcaccucaucugccug

SEQ ID NO: 2573966 - RNA, 19 nt, Artificial Sequence
  Description of Artificial Sequence: Synthetic oligonucleotide
ugccugaguuuggggcagc

SEQ ID NO: 2573967 - RNA, 19 nt, Artificial Sequence
  Description of Artificial Sequence: Synthetic oligonucleotide
ccccgggucacaaauaagu

SEQ ID NO: 2573968 - RNA, 19 nt, Artificial Sequence
  Description of Artificial Sequence: Synthetic oligonucleotide
gcagauauauacaggcuuu

SEQ ID NO: 2573969 - RNA, 19 nt, Artificial Sequence
  Description of Artificial Sequence: Synthetic oligonucleotide
ccgggucacaaauaaguua

SEQ ID NO: 2573970 - RNA, 19 nt, Artificial Sequence
  Description of Artificial Sequence: Synthetic oligonucleotide
  modified_base (15)..(15): a, c, u, g, unknown or other
ugcccagguggaggnuccc

SEQ ID NO: 2573971 - RNA, 19 nt, Artificial Sequence
  Description of Artificial Sequence: Synthetic oligonucleotide
ccacuauccuuuauuccaa

SEQ ID NO: 2573972 - RNA, 19 nt, Artificial Sequence
  Description of Artificial Sequence: Synthetic oligonucleotide
gcugccgaaguccugggau

SEQ ID NO: 2573973 - RNA, 19 nt, Artificial Sequence
  Description of Artificial Sequence: Synthetic oligonucleotide
cccugcuaaucaaggcuuc

SEQ ID NO: 2573974 - RNA, 19 nt, Artificial Sequence
  Description of Artificial Sequence: Synthetic oligonucleotide
gcagcagacaguccugaau

SEQ ID NO: 2573975 - RNA, 19 nt, Artificial Sequence
  Description of Artificial Sequence: Synthetic oligonucleotide
auagcccuucuugggccau

SEQ ID NO: 2573976 - RNA, 19 nt, Artificial Sequence
  Description of Artificial Sequence: Synthetic oligonucleotide
cggcauacccugcuaauca

SEQ ID NO: 2573977 - RNA, 19 nt, Artificial Sequence
  Description of Artificial Sequence: Synthetic oligonucleotide
ccagcucacagagcgcaac

SEQ ID NO: 2573978 - RNA, 19 nt, Artificial Sequence
  Description of Artificial Sequence: Synthetic oligonucleotide
gcgcaacauugaaagcccc

SEQ ID NO: 2573979 - RNA, 19 nt, Artificial Sequence
  Description of Artificial Sequence: Synthetic oligonucleotide
cggguagguggccagccag

SEQ ID NO: 2573980 - RNA, 19 nt, Artificial Sequence
  Description of Artificial Sequence: Synthetic oligonucleotide
  modified_base (14)..(14): a, c, u, g, unknown or other
gcccagguggaggnucccc

SEQ ID NO: 2573981 - RNA, 19 nt, Artificial Sequence
  Description of Artificial Sequence: Synthetic oligonucleotide
guuuggggcagcagacagu

SEQ ID NO: 2573982 - RNA, 19 nt, Artificial Sequence
  Description of Artificial Sequence: Synthetic oligonucleotide
gugcuuggggcgcccucca

SEQ ID NO: 2573983 - RNA, 19 nt, Artificial Sequence
  Description of Artificial Sequence: Synthetic oligonucleotide
cuggcccacuaguguaaaa

SEQ ID NO: 2573984 - RNA, 19 nt, Artificial Sequence
  Description of Artificial Sequence: Synthetic oligonucleotide
gggcgcccuccacaggcag

SEQ ID NO: 2573985 - RNA, 19 nt, Artificial Sequence
  Description of Artificial Sequence: Synthetic oligonucleotide
gagggccauugcagcugcc

SEQ ID NO: 2573986 - RNA, 19 nt, Artificial Sequence
  Description of Artificial Sequence: Synthetic oligonucleotide
cgcaacauugaaagcccca

SEQ ID NO: 2573987 - RNA, 19 nt, Artificial Sequence
  Description of Artificial Sequence: Synthetic oligonucleotide
gcgcccuccacaggcagug

SEQ ID NO: 2573988 - RNA, 19 nt, Artificial Sequence
  Description of Artificial Sequence: Synthetic oligonucleotide
ccggcauacccugcuaauc

SEQ ID NO: 2573989 - RNA, 19 nt, Artificial Sequence
  Description of Artificial Sequence: Synthetic oligonucleotide
caggcccuggcccacuagu

SEQ ID NO: 2573990 - RNA, 19 nt, Artificial Sequence
  Description of Artificial Sequence: Synthetic oligonucleotide
gcccacaaaaugacucgga

SEQ ID NO: 2573991 - RNA, 19 nt, Artificial Sequence
  Description of Artificial Sequence: Synthetic oligonucleotide
uagcccuucuugggccauc

SEQ ID NO: 2573992 - RNA, 19 nt, Artificial Sequence
  Description of Artificial Sequence: Synthetic oligonucleotide
  modified_base (17)..(17): a, c, u, g, unknown or other
ccugcccagguggaggnuc

SEQ ID NO: 2573993 - RNA, 19 nt, Artificial Sequence
  Description of Artificial Sequence: Synthetic oligonucleotide
ccucugucaagcugccgaa

SEQ ID NO: 2573994 - RNA, 19 nt, Artificial Sequence
  Description of Artificial Sequence: Synthetic oligonucleotide
cccacaaaaugacucggau

SEQ ID NO: 2573995 - RNA, 19 nt, Artificial Sequence
  Description of Artificial Sequence: Synthetic oligonucleotide
auacaggcuuuggggucua

SEQ ID NO: 2573996 - RNA, 19 nt, Artificial Sequence
  Description of Artificial Sequence: Synthetic oligonucleotide
gcucacagagcgcaacauu

SEQ ID NO: 2573997 - RNA, 19 nt, Artificial Sequence
  Description of Artificial Sequence: Synthetic oligonucleotide
ggucacucagauagucagu

SEQ ID NO: 2573998 - RNA, 19 nt, Artificial Sequence
  Description of Artificial Sequence: Synthetic oligonucleotide
gugggugggccagguagua

SEQ ID NO: 2573999 - RNA, 19 nt, Artificial Sequence
  Description of Artificial Sequence: Synthetic oligonucleotide
gcccggcauacccugcuaa

SEQ ID NO: 2574000 - RNA, 19 nt, Artificial Sequence
  Description of Artificial Sequence: Synthetic oligonucleotide
gcccuucuugggccaucag

SEQ ID NO: 2574001 - RNA, 19 nt, Artificial Sequence
  Description of Artificial Sequence: Synthetic oligonucleotide
gccagccagcucacagagc

SEQ ID NO: 2574002 - RNA, 19 nt, Artificial Sequence
  Description of Artificial Sequence: Synthetic oligonucleotide
ccacaggcagugggugggc

SEQ ID NO: 2574003 - RNA, 19 nt, Artificial Sequence
  Description of Artificial Sequence: Synthetic oligonucleotide
gccaugcagguaggaagaa

SEQ ID NO: 2574004 - RNA, 19 nt, Artificial Sequence
  Description of Artificial Sequence: Synthetic oligonucleotide
ggggucuagaggugugcuu

SEQ ID NO: 2574005 - RNA, 19 nt, Artificial Sequence
  Description of Artificial Sequence: Synthetic oligonucleotide
cccuggcccacuaguguaa

SEQ ID NO: 2574006 - RNA, 19 nt, Artificial Sequence
  Description of Artificial Sequence: Synthetic oligonucleotide
gagguccgaggaaggugau

SEQ ID NO: 2574007 - RNA, 19 nt, Artificial Sequence
  Description of Artificial Sequence: Synthetic oligonucleotide
cccuccacaggcagugggu

SEQ ID NO: 2574008 - RNA, 19 nt, Artificial Sequence
  Description of Artificial Sequence: Synthetic oligonucleotide
ccaggagcugggagguucu

SEQ ID NO: 2574009 - RNA, 19 nt, Artificial Sequence
  Description of Artificial Sequence: Synthetic oligonucleotide
gguggccagccagcucaca

SEQ ID NO: 2574010 - RNA, 19 nt, Artificial Sequence
  Description of Artificial Sequence: Synthetic oligonucleotide
ggcccggcauacccugcua

SEQ ID NO: 2574011 - RNA, 19 nt, Artificial Sequence
  Description of Artificial Sequence: Synthetic oligonucleotide
ggaucccagugagguccga

SEQ ID NO: 2574012 - RNA, 19 nt, Artificial Sequence
  Description of Artificial Sequence: Synthetic oligonucleotide
gccagcucacagagcgcaa

SEQ ID NO: 2574013 - RNA, 19 nt, Artificial Sequence
  Description of Artificial Sequence: Synthetic oligonucleotide
ccuggcccacuaguguaaa

SEQ ID NO: 2574014 - RNA, 19 nt, Artificial Sequence
  Description of Artificial Sequence: Synthetic oligonucleotide
cccggcauacccugcuaau

SEQ ID NO: 2574015 - RNA, 19 nt, Artificial Sequence
  Description of Artificial Sequence: Synthetic oligonucleotide
ggugugcuuggggcgcccu

SEQ ID NO: 2574016 - RNA, 19 nt, Artificial Sequence
  Description of Artificial Sequence: Synthetic oligonucleotide
ggcgcccuccacaggcagu

SEQ ID NO: 2574017 - RNA, 19 nt, Artificial Sequence
  Description of Artificial Sequence: Synthetic oligonucleotide
gccgaaguccugggauguu

SEQ ID NO: 2574018 - RNA, 19 nt, Artificial Sequence
  Description of Artificial Sequence: Synthetic oligonucleotide
  modified_base (18)..(18): a, c, u, g, unknown or other
gccugcccagguggaggnu

SEQ ID NO: 2574019 - RNA, 19 nt, Artificial Sequence
  Description of Artificial Sequence: Synthetic oligonucleotide
aaggauauaccacucaguc

SEQ ID NO: 2574020 - RNA, 19 nt, Artificial Sequence
  Description of Artificial Sequence: Synthetic oligonucleotide
ugugagaagauguuggugg

SEQ ID NO: 2574021 - RNA, 19 nt, Artificial Sequence
  Description of Artificial Sequence: Synthetic oligonucleotide
auaccacucagucacagcc

SEQ ID NO: 2574022 - RNA, 19 nt, Artificial Sequence
  Description of Artificial Sequence: Synthetic oligonucleotide
aaguuuaggguacugguag

SEQ ID NO: 2574023 - RNA, 19 nt, Artificial Sequence
  Description of Artificial Sequence: Synthetic oligonucleotide
uccaggaucaacuugagac

SEQ ID NO: 2574024 - RNA, 19 nt, Artificial Sequence
  Description of Artificial Sequence: Synthetic oligonucleotide
accaaauucagucccaggg

SEQ ID NO: 2574025 - RNA, 19 nt, Artificial Sequence
  Description of Artificial Sequence: Synthetic oligonucleotide
gauguugguggccugaagg

SEQ ID NO: 2574026 - RNA, 19 nt, Artificial Sequence
  Description of Artificial Sequence: Synthetic oligonucleotide
gacauaguccucuuggccg

SEQ ID NO: 2574027 - RNA, 19 nt, Artificial Sequence
  Description of Artificial Sequence: Synthetic oligonucleotide
uugaagauguagcaguugc

SEQ ID NO: 2574028 - RNA, 19 nt, Artificial Sequence
  Description of Artificial Sequence: Synthetic oligonucleotide
aaacuccggagccagaauc

SEQ ID NO: 2574029 - RNA, 19 nt, Artificial Sequence
  Description of Artificial Sequence: Synthetic oligonucleotide
ugaaggauauaccacucag

SEQ ID NO: 2574030 - RNA, 19 nt, Artificial Sequence
  Description of Artificial Sequence: Synthetic oligonucleotide
uugaccuuggaguacgugg

SEQ ID NO: 2574031 - RNA, 19 nt, Artificial Sequence
  Description of Artificial Sequence: Synthetic oligonucleotide
ucaauaagaaccagaggug

SEQ ID NO: 2574032 - RNA, 19 nt, Artificial Sequence
  Description of Artificial Sequence: Synthetic oligonucleotide
gaugguaaaguuuagggua

SEQ ID NO: 2574033 - RNA, 19 nt, Artificial Sequence
  Description of Artificial Sequence: Synthetic oligonucleotide
gaagauguagcaguugccg

SEQ ID NO: 2574034 - RNA, 19 nt, Artificial Sequence
  Description of Artificial Sequence: Synthetic oligonucleotide
uucauggccaccuugcacc

SEQ ID NO: 2574035 - RNA, 19 nt, Artificial Sequence
  Description of Artificial Sequence: Synthetic oligonucleotide
ugcucauggagcaucagcc

SEQ ID NO: 2574036 - RNA, 19 nt, Artificial Sequence
  Description of Artificial Sequence: Synthetic oligonucleotide
ucuucucugaugaaggggu

SEQ ID NO: 2574037 - RNA, 19 nt, Artificial Sequence
  Description of Artificial Sequence: Synthetic oligonucleotide
ccguucaucaauaagaacc

SEQ ID NO: 2574038 - RNA, 19 nt, Artificial Sequence
  Description of Artificial Sequence: Synthetic oligonucleotide
ggauauaccacucagucac

SEQ ID NO: 2574039 - RNA, 19 nt, Artificial Sequence
  Description of Artificial Sequence: Synthetic oligonucleotide
ugaccuuggaguacguggg

SEQ ID NO: 2574040 - RNA, 19 nt, Artificial Sequence
  Description of Artificial Sequence: Synthetic oligonucleotide
aggggcauagcccaucccc

SEQ ID NO: 2574041 - RNA, 19 nt, Artificial Sequence
  Description of Artificial Sequence: Synthetic oligonucleotide
uccaagacagccuccauca

SEQ ID NO: 2574042 - RNA, 19 nt, Artificial Sequence
  Description of Artificial Sequence: Synthetic oligonucleotide
uuggcuauccccaaacaac

SEQ ID NO: 2574043 - RNA, 19 nt, Artificial Sequence
  Description of Artificial Sequence: Synthetic oligonucleotide
uuccggaagguacacacag

SEQ ID NO: 2574044 - RNA, 19 nt, Artificial Sequence
  Description of Artificial Sequence: Synthetic oligonucleotide
uccccaaacaacucgagga

SEQ ID NO: 2574045 - RNA, 19 nt, Artificial Sequence
  Description of Artificial Sequence: Synthetic oligonucleotide
ugccgugaaguuccgaugg

SEQ ID NO: 2574046 - RNA, 19 nt, Artificial Sequence
  Description of Artificial Sequence: Synthetic oligonucleotide
guuucugucccaaacaggc

SEQ ID NO: 2574047 - RNA, 19 nt, Artificial Sequence
  Description of Artificial Sequence: Synthetic oligonucleotide
aacaacucgaggaucacug

SEQ ID NO: 2574048 - RNA, 19 nt, Artificial Sequence
  Description of Artificial Sequence: Synthetic oligonucleotide
aauucagucccaggguugg

SEQ ID NO: 2574049 - RNA, 19 nt, Artificial Sequence
  Description of Artificial Sequence: Synthetic oligonucleotide
uggagcaucagccuggcuc

SEQ ID NO: 2574050 - RNA, 19 nt, Artificial Sequence
  Description of Artificial Sequence: Synthetic oligonucleotide
acuugugagaagauguugg

SEQ ID NO: 2574051 - RNA, 19 nt, Artificial Sequence
  Description of Artificial Sequence: Synthetic oligonucleotide
gauuccguucaucaauaag

SEQ ID NO: 2574052 - RNA, 19 nt, Artificial Sequence
  Description of Artificial Sequence: Synthetic oligonucleotide
uuccagaugguaaaguuua

SEQ ID NO: 2574053 - RNA, 19 nt, Artificial Sequence
  Description of Artificial Sequence: Synthetic oligonucleotide
uccgucaugccccaguuga

SEQ ID NO: 2574054 - RNA, 19 nt, Artificial Sequence
  Description of Artificial Sequence: Synthetic oligonucleotide
guaaaguuuaggguacugg

SEQ ID NO: 2574055 - RNA, 19 nt, Artificial Sequence
  Description of Artificial Sequence: Synthetic oligonucleotide
ggugugugguuccagaugg

SEQ ID NO: 2574056 - RNA, 19 nt, Artificial Sequence
  Description of Artificial Sequence: Synthetic oligonucleotide
uaggauuaugcggucaggg

SEQ ID NO: 2574057 - RNA, 19 nt, Artificial Sequence
  Description of Artificial Sequence: Synthetic oligonucleotide
ugcuguuuuggcuaucccc

SEQ ID NO: 2574058 - RNA, 19 nt, Artificial Sequence
  Description of Artificial Sequence: Synthetic oligonucleotide
uuuggcuauccccaaacaa

SEQ ID NO: 2574059 - RNA, 19 nt, Artificial Sequence
  Description of Artificial Sequence: Synthetic oligonucleotide
ugaaguuccggaagguaca

SEQ ID NO: 2574060 - RNA, 19 nt, Artificial Sequence
  Description of Artificial Sequence: Synthetic oligonucleotide
ggaagguacacacaguccc

SEQ ID NO: 2574061 - RNA, 19 nt, Artificial Sequence
  Description of Artificial Sequence: Synthetic oligonucleotide
ugaagauguagcaguugcc

SEQ ID NO: 2574062 - RNA, 19 nt, Artificial Sequence
  Description of Artificial Sequence: Synthetic oligonucleotide
uguaccaccagcaccccga

SEQ ID NO: 2574063 - RNA, 19 nt, Artificial Sequence
  Description of Artificial Sequence: Synthetic oligonucleotide
acugucuccgucaugcccc

SEQ ID NO: 2574064 - RNA, 19 nt, Artificial Sequence
  Description of Artificial Sequence: Synthetic oligonucleotide
aggauuaugcggucagggg

SEQ ID NO: 2574065 - RNA, 19 nt, Artificial Sequence
  Description of Artificial Sequence: Synthetic oligonucleotide
aagauguagcaguugccgu

SEQ ID NO: 2574066 - RNA, 19 nt, Artificial Sequence
  Description of Artificial Sequence: Synthetic oligonucleotide
uguguccaaacuccggagc

SEQ ID NO: 2574067 - RNA, 19 nt, Artificial Sequence
  Description of Artificial Sequence: Synthetic oligonucleotide
auagaugcccucuucucug

SEQ ID NO: 2574068 - RNA, 19 nt, Artificial Sequence
  Description of Artificial Sequence: Synthetic oligonucleotide
uggccugaaggauauacca

SEQ ID NO: 2574069 - RNA, 19 nt, Artificial Sequence
  Description of Artificial Sequence: Synthetic oligonucleotide
uguugguguguccaaacuc

SEQ ID NO: 2574070 - RNA, 19 nt, Artificial Sequence
  Description of Artificial Sequence: Synthetic oligonucleotide
caacuugagaccaaauuca

SEQ ID NO: 2574071 - RNA, 19 nt, Artificial Sequence
  Description of Artificial Sequence: Synthetic oligonucleotide
ucugucccaaacaggcagg

SEQ ID NO: 2574072 - RNA, 19 nt, Artificial Sequence
  Description of Artificial Sequence: Synthetic oligonucleotide
caaggaaggggacauaguc

SEQ ID NO: 2574073 - RNA, 19 nt, Artificial Sequence
  Description of Artificial Sequence: Synthetic oligonucleotide
ucuuguccaagacagccuc

SEQ ID NO: 2574074 - RNA, 19 nt, Artificial Sequence
  Description of Artificial Sequence: Synthetic oligonucleotide
caucaauaagaaccagagg

SEQ ID NO: 2574075 - RNA, 19 nt, Artificial Sequence
  Description of Artificial Sequence: Synthetic oligonucleotide
aauaagaaccagaggugug

SEQ ID NO: 2574076 - RNA, 19 nt, Artificial Sequence
  Description of Artificial Sequence: Synthetic oligonucleotide
uggcuauccccaaacaacu

SEQ ID NO: 2574077 - RNA, 19 nt, Artificial Sequence
  Description of Artificial Sequence: Synthetic oligonucleotide
uuccguucaucaauaagaa

SEQ ID NO: 2574078 - RNA, 19 nt, Artificial Sequence
  Description of Artificial Sequence: Synthetic oligonucleotide
guugguguguccaaacucc

SEQ ID NO: 2574079 - RNA, 19 nt, Artificial Sequence
  Description of Artificial Sequence: Synthetic oligonucleotide
cauugcaggugcuuccugg

SEQ ID NO: 2574080 - RNA, 19 nt, Artificial Sequence
  Description of Artificial Sequence: Synthetic oligonucleotide
aacuugagaccaaauucag

SEQ ID NO: 2574081 - RNA, 19 nt, Artificial Sequence
  Description of Artificial Sequence: Synthetic oligonucleotide
gauguccaggaucaacuug

SEQ ID NO: 2574082 - RNA, 19 nt, Artificial Sequence
  Description of Artificial Sequence: Synthetic oligonucleotide
aguuccgauggcugcaggg

SEQ ID NO: 2574083 - RNA, 19 nt, Artificial Sequence
  Description of Artificial Sequence: Synthetic oligonucleotide
aucaacuugagaccaaauu

SEQ ID NO: 2574084 - RNA, 19 nt, Artificial Sequence
  Description of Artificial Sequence: Synthetic oligonucleotide
ugugguuccagaugguaaa

SEQ ID NO: 2574085 - RNA, 19 nt, Artificial Sequence
  Description of Artificial Sequence: Synthetic oligonucleotide
ucucugaugaagggguacg

SEQ ID NO: 2574086 - RNA, 19 nt, Artificial Sequence
  Description of Artificial Sequence: Synthetic oligonucleotide
aaccagaggugugugguuc

SEQ ID NO: 2574087 - RNA, 19 nt, Artificial Sequence
  Description of Artificial Sequence: Synthetic oligonucleotide
augguaaaguuuaggguac

SEQ ID NO: 2574088 - RNA, 19 nt, Artificial Sequence
  Description of Artificial Sequence: Synthetic oligonucleotide
ucccaaacaggcaggcuag

SEQ ID NO: 2574089 - RNA, 19 nt, Artificial Sequence
  Description of Artificial Sequence: Synthetic oligonucleotide
uacacacagucccauuggc

SEQ ID NO: 2574090 - RNA, 19 nt, Artificial Sequence
  Description of Artificial Sequence: Synthetic oligonucleotide
ggauuaugcggucaggggc

SEQ ID NO: 2574091 - RNA, 19 nt, Artificial Sequence
  Description of Artificial Sequence: Synthetic oligonucleotide
uggccgauguccaggauca

SEQ ID NO: 2574092 - RNA, 19 nt, Artificial Sequence
  Description of Artificial Sequence: Synthetic oligonucleotide
uuuuggcuauccccaaaca

SEQ ID NO: 2574093 - RNA, 19 nt, Artificial Sequence
  Description of Artificial Sequence: Synthetic oligonucleotide
cuggugaaguuccggaagg

SEQ ID NO: 2574094 - RNA, 19 nt, Artificial Sequence
  Description of Artificial Sequence: Synthetic oligonucleotide
agcacuugugagaagaugu

SEQ ID NO: 2574095 - RNA, 19 nt, Artificial Sequence
  Description of Artificial Sequence: Synthetic oligonucleotide
caagacagccuccaucagc

SEQ ID NO: 2574096 - RNA, 19 nt, Artificial Sequence
  Description of Artificial Sequence: Synthetic oligonucleotide
ugcuugaccuuggaguacg

SEQ ID NO: 2574097 - RNA, 19 nt, Artificial Sequence
  Description of Artificial Sequence: Synthetic oligonucleotide
auccccaaacaacucgagg

SEQ ID NO: 2574098 - RNA, 19 nt, Artificial Sequence
  Description of Artificial Sequence: Synthetic oligonucleotide
uggaguacgugggaagggg

SEQ ID NO: 2574099 - RNA, 19 nt, Artificial Sequence
  Description of Artificial Sequence: Synthetic oligonucleotide
aagggguacguccucugcu

SEQ ID NO: 2574100 - RNA, 19 nt, Artificial Sequence
  Description of Artificial Sequence: Synthetic oligonucleotide
caacucgaggaucacuggg

SEQ ID NO: 2574101 - RNA, 19 nt, Artificial Sequence
  Description of Artificial Sequence: Synthetic oligonucleotide
ucagucccaggguuggcgg

SEQ ID NO: 2574102 - RNA, 19 nt, Artificial Sequence
  Description of Artificial Sequence: Synthetic oligonucleotide
auaagaaccagaggugugu

SEQ ID NO: 2574103 - RNA, 19 nt, Artificial Sequence
  Description of Artificial Sequence: Synthetic oligonucleotide
gcuauccccaaacaacucg

SEQ ID NO: 2574104 - RNA, 19 nt, Artificial Sequence
  Description of Artificial Sequence: Synthetic oligonucleotide
acaacucgaggaucacugg

SEQ ID NO: 2574105 - RNA, 19 nt, Artificial Sequence
  Description of Artificial Sequence: Synthetic oligonucleotide
aaauucagucccaggguug

SEQ ID NO: 2574106 - RNA, 19 nt, Artificial Sequence
  Description of Artificial Sequence: Synthetic oligonucleotide
gucaggauuccguucauca

SEQ ID NO: 2574107 - RNA, 19 nt, Artificial Sequence
  Description of Artificial Sequence: Synthetic oligonucleotide
ucaguucccgccauggcau

SEQ ID NO: 2574108 - RNA, 19 nt, Artificial Sequence
  Description of Artificial Sequence: Synthetic oligonucleotide
cuuggaguacgugggaagg

SEQ ID NO: 2574109 - RNA, 19 nt, Artificial Sequence
  Description of Artificial Sequence: Synthetic oligonucleotide
uccggagccagaaucuugu

SEQ ID NO: 2574110 - RNA, 19 nt, Artificial Sequence
  Description of Artificial Sequence: Synthetic oligonucleotide
guuuuggcuauccccaaac

SEQ ID NO: 2574111 - RNA, 19 nt, Artificial Sequence
  Description of Artificial Sequence: Synthetic oligonucleotide
uauaccacucagucacagc

SEQ ID NO: 2574112 - RNA, 19 nt, Artificial Sequence
  Description of Artificial Sequence: Synthetic oligonucleotide
aggauauaccacucaguca

SEQ ID NO: 2574113 - RNA, 19 nt, Artificial Sequence
  Description of Artificial Sequence: Synthetic oligonucleotide
cucagucacagccugggug

SEQ ID NO: 2574114 - RNA, 19 nt, Artificial Sequence
  Description of Artificial Sequence: Synthetic oligonucleotide
accagaggugugugguucc

SEQ ID NO: 2574115 - RNA, 19 nt, Artificial Sequence
  Description of Artificial Sequence: Synthetic oligonucleotide
acguccucugcucauggag

SEQ ID NO: 2574116 - RNA, 19 nt, Artificial Sequence
  Description of Artificial Sequence: Synthetic oligonucleotide
gaccaaauucagucccagg

SEQ ID NO: 2574117 - RNA, 19 nt, Artificial Sequence
  Description of Artificial Sequence: Synthetic oligonucleotide
gcaggcuaggauuaugcgg

SEQ ID NO: 2574118 - RNA, 19 nt, Artificial Sequence
  Description of Artificial Sequence: Synthetic oligonucleotide
uucagucccaggguuggcg

SEQ ID NO: 2574119 - RNA, 19 nt, Artificial Sequence
  Description of Artificial Sequence: Synthetic oligonucleotide
agugcuugaccuuggagua

SEQ ID NO: 2574120 - RNA, 19 nt, Artificial Sequence
  Description of Artificial Sequence: Synthetic oligonucleotide
ugcggucaggggcauagcc

SEQ ID NO: 2574121 - RNA, 19 nt, Artificial Sequence
  Description of Artificial Sequence: Synthetic oligonucleotide
uguggacgcaaggaagggg

SEQ ID NO: 2574122 - RNA, 19 nt, Artificial Sequence
  Description of Artificial Sequence: Synthetic oligonucleotide
uccagaugguaaaguuuag

SEQ ID NO: 2574123 - RNA, 19 nt, Artificial Sequence
  Description of Artificial Sequence: Synthetic oligonucleotide
augcccucuucucugauga

SEQ ID NO: 2574124 - RNA, 19 nt, Artificial Sequence
  Description of Artificial Sequence: Synthetic oligonucleotide
aggcaggcuaggauuaugc

SEQ ID NO: 2574125 - RNA, 19 nt, Artificial Sequence
  Description of Artificial Sequence: Synthetic oligonucleotide
uuggccgauguccaggauc

SEQ ID NO: 2574126 - RNA, 19 nt, Artificial Sequence
  Description of Artificial Sequence: Synthetic oligonucleotide
agcaguugccgugaaguuc

SEQ ID NO: 2574127 - RNA, 19 nt, Artificial Sequence
  Description of Artificial Sequence: Synthetic oligonucleotide
agggguacguccucugcuc

SEQ ID NO: 2574128 - RNA, 19 nt, Artificial Sequence
  Description of Artificial Sequence: Synthetic oligonucleotide
gauuaugcggucaggggca

SEQ ID NO: 2574129 - RNA, 19 nt, Artificial Sequence
  Description of Artificial Sequence: Synthetic oligonucleotide
aagcacuugugagaagaug

SEQ ID NO: 2574130 - RNA, 19 nt, Artificial Sequence
  Description of Artificial Sequence: Synthetic oligonucleotide
aggguuggcggaaggaagc

SEQ ID NO: 2574131 - RNA, 19 nt, Artificial Sequence
  Description of Artificial Sequence: Synthetic oligonucleotide
aaaguuuaggguacuggua

SEQ ID NO: 2574132 - RNA, 19 nt, Artificial Sequence
  Description of Artificial Sequence: Synthetic oligonucleotide
aggguuucugucccaaaca

SEQ ID NO: 2574133 - RNA, 19 nt, Artificial Sequence
  Description of Artificial Sequence: Synthetic oligonucleotide
cucauggagcaucagccug

SEQ ID NO: 2574134 - RNA, 19 nt, Artificial Sequence
  Description of Artificial Sequence: Synthetic oligonucleotide
auauaccacucagucacag

SEQ ID NO: 2574135 - RNA, 19 nt, Artificial Sequence
  Description of Artificial Sequence: Synthetic oligonucleotide
gugagaagauguugguggc

SEQ ID NO: 2574136 - RNA, 19 nt, Artificial Sequence
  Description of Artificial Sequence: Synthetic oligonucleotide
uuuaggguacugguagugu

SEQ ID NO: 2574137 - RNA, 19 nt, Artificial Sequence
  Description of Artificial Sequence: Synthetic oligonucleotide
gugaaguuccggaagguac

SEQ ID NO: 2574138 - RNA, 19 nt, Artificial Sequence
  Description of Artificial Sequence: Synthetic oligonucleotide
aaacaacucgaggaucacu

SEQ ID NO: 2574139 - RNA, 19 nt, Artificial Sequence
  Description of Artificial Sequence: Synthetic oligonucleotide
gcacugcacagcuucaugg

SEQ ID NO: 2574140 - RNA, 19 nt, Artificial Sequence
  Description of Artificial Sequence: Synthetic oligonucleotide
uuggaguacgugggaaggg

SEQ ID NO: 2574141 - RNA, 19 nt, Artificial Sequence
  Description of Artificial Sequence: Synthetic oligonucleotide
uagcccauccccaccaggu

SEQ ID NO: 2574142 - RNA, 19 nt, Artificial Sequence
  Description of Artificial Sequence: Synthetic oligonucleotide
auguccaggaucaacuuga

SEQ ID NO: 2574143 - RNA, 19 nt, Artificial Sequence
  Description of Artificial Sequence: Synthetic oligonucleotide
accacucagucacagccug

SEQ ID NO: 2574144 - RNA, 19 nt, Artificial Sequence
  Description of Artificial Sequence: Synthetic oligonucleotide
ucgaggaucacuggguggu

SEQ ID NO: 2574145 - RNA, 19 nt, Artificial Sequence
  Description of Artificial Sequence: Synthetic oligonucleotide
ucccauuggcacugcacag

SEQ ID NO: 2574146 - RNA, 19 nt, Artificial Sequence
  Description of Artificial Sequence: Synthetic oligonucleotide
uuaggguacugguaguguu

SEQ ID NO: 2574147 - RNA, 19 nt, Artificial Sequence
  Description of Artificial Sequence: Synthetic oligonucleotide
auagcccauccccaccagg

SEQ ID NO: 2574148 - RNA, 19 nt, Artificial Sequence
  Description of Artificial Sequence: Synthetic oligonucleotide
aacucgaggaucacugggu

SEQ ID NO: 2574149 - RNA, 19 nt, Artificial Sequence
  Description of Artificial Sequence: Synthetic oligonucleotide
acucgaggaucacugggug

SEQ ID NO: 2574150 - RNA, 19 nt, Artificial Sequence
  Description of Artificial Sequence: Synthetic oligonucleotide
aggguacugguaguguugg

SEQ ID NO: 2574151 - RNA, 19 nt, Artificial Sequence
  Description of Artificial Sequence: Synthetic oligonucleotide
uggguggucaggauuccgu

SEQ ID NO: 2574152 - RNA, 19 nt, Artificial Sequence
  Description of Artificial Sequence: Synthetic oligonucleotide
ugaaguuccgauggcugca

SEQ ID NO: 2574153 - RNA, 19 nt, Artificial Sequence
  Description of Artificial Sequence: Synthetic oligonucleotide
cucgaggaucacugggugg

SEQ ID NO: 2574154 - RNA, 19 nt, Artificial Sequence
  Description of Artificial Sequence: Synthetic oligonucleotide
ugagaagauguugguggcc

SEQ ID NO: 2574155 - RNA, 19 nt, Artificial Sequence
  Description of Artificial Sequence: Synthetic oligonucleotide
aggugugugguuccagaug

SEQ ID NO: 2574156 - RNA, 19 nt, Artificial Sequence
  Description of Artificial Sequence: Synthetic oligonucleotide
aguuuaggguacugguagu

SEQ ID NO: 2574157 - RNA, 19 nt, Artificial Sequence
  Description of Artificial Sequence: Synthetic oligonucleotide
ucaggauuccguucaucaa

SEQ ID NO: 2574158 - RNA, 19 nt, Artificial Sequence
  Description of Artificial Sequence: Synthetic oligonucleotide
gaagggguacguccucugc

SEQ ID NO: 2574159 - RNA, 19 nt, Artificial Sequence
  Description of Artificial Sequence: Synthetic oligonucleotide
ggagcaucagccuggcucc

SEQ ID NO: 2574160 - RNA, 19 nt, Artificial Sequence
  Description of Artificial Sequence: Synthetic oligonucleotide
uccguucaucaauaagaac

SEQ ID NO: 2574161 - RNA, 19 nt, Artificial Sequence
  Description of Artificial Sequence: Synthetic oligonucleotide
guuuaggguacugguagug

SEQ ID NO: 2574162 - RNA, 19 nt, Artificial Sequence
  Description of Artificial Sequence: Synthetic oligonucleotide
gaugcccucuucucugaug

SEQ ID NO: 2574163 - RNA, 19 nt, Artificial Sequence
  Description of Artificial Sequence: Synthetic oligonucleotide
uguuuuggcuauccccaaa

SEQ ID NO: 2574164 - RNA, 19 nt, Artificial Sequence
  Description of Artificial Sequence: Synthetic oligonucleotide
ucuuggccgauguccagga

SEQ ID NO: 2574165 - RNA, 19 nt, Artificial Sequence
  Description of Artificial Sequence: Synthetic oligonucleotide
ggacauaguccucuuggcc

SEQ ID NO: 2574166 - RNA, 19 nt, Artificial Sequence
  Description of Artificial Sequence: Synthetic oligonucleotide
uugccgugaaguuccgaug

SEQ ID NO: 2574167 - RNA, 19 nt, Artificial Sequence
  Description of Artificial Sequence: Synthetic oligonucleotide
caggguuggcggaaggaag

SEQ ID NO: 2574168 - RNA, 19 nt, Artificial Sequence
  Description of Artificial Sequence: Synthetic oligonucleotide
auggacgucucaguucccg

SEQ ID NO: 2574169 - RNA, 19 nt, Artificial Sequence
  Description of Artificial Sequence: Synthetic oligonucleotide
guacguccucugcucaugg

SEQ ID NO: 2574170 - RNA, 19 nt, Artificial Sequence
  Description of Artificial Sequence: Synthetic oligonucleotide
gucccauuggcacugcaca

SEQ ID NO: 2574171 - RNA, 19 nt, Artificial Sequence
  Description of Artificial Sequence: Synthetic oligonucleotide
cuauccccaaacaacucga

SEQ ID NO: 2574172 - RNA, 19 nt, Artificial Sequence
  Description of Artificial Sequence: Synthetic oligonucleotide
cacugucuccgucaugccc

SEQ ID NO: 2574173 - RNA, 19 nt, Artificial Sequence
  Description of Artificial Sequence: Synthetic oligonucleotide
aacuccggagccagaaucu

SEQ ID NO: 2574174 - RNA, 19 nt, Artificial Sequence
  Description of Artificial Sequence: Synthetic oligonucleotide
uaguccucuuggccgaugu

SEQ ID NO: 2574175 - RNA, 19 nt, Artificial Sequence
  Description of Artificial Sequence: Synthetic oligonucleotide
gcuaggauuaugcggucag

SEQ ID NO: 2574176 - RNA, 19 nt, Artificial Sequence
  Description of Artificial Sequence: Synthetic oligonucleotide
gucucaguucccgccaugg

SEQ ID NO: 2574177 - RNA, 19 nt, Artificial Sequence
  Description of Artificial Sequence: Synthetic oligonucleotide
uaccacucagucacagccu

SEQ ID NO: 2574178 - RNA, 19 nt, Artificial Sequence
  Description of Artificial Sequence: Synthetic oligonucleotide
ccaggaucaacuugagacc

SEQ ID NO: 2574179 - RNA, 19 nt, Artificial Sequence
  Description of Artificial Sequence: Synthetic oligonucleotide
aaggaagcacugucuccgu

SEQ ID NO: 2574180 - RNA, 19 nt, Artificial Sequence
  Description of Artificial Sequence: Synthetic oligonucleotide
guugaagauguagcaguug

SEQ ID NO: 2574181 - RNA, 19 nt, Artificial Sequence
  Description of Artificial Sequence: Synthetic oligonucleotide
aggaagcacugucuccguc

SEQ ID NO: 2574182 - RNA, 19 nt, Artificial Sequence
  Description of Artificial Sequence: Synthetic oligonucleotide
agaccaaauucagucccag

SEQ ID NO: 2574183 - RNA, 19 nt, Artificial Sequence
  Description of Artificial Sequence: Synthetic oligonucleotide
gguacugguaguguuggug

SEQ ID NO: 2574184 - RNA, 19 nt, Artificial Sequence
  Description of Artificial Sequence: Synthetic oligonucleotide
gauguagcaguugccguga

SEQ ID NO: 2574185 - RNA, 19 nt, Artificial Sequence
  Description of Artificial Sequence: Synthetic oligonucleotide
uucucugaugaagggguac

SEQ ID NO: 2574186 - RNA, 19 nt, Artificial Sequence
  Description of Artificial Sequence: Synthetic oligonucleotide
caggcuaggauuaugcggu

SEQ ID NO: 2574187 - RNA, 19 nt, Artificial Sequence
  Description of Artificial Sequence: Synthetic oligonucleotide
cacuugugagaagauguug

SEQ ID NO: 2574188 - RNA, 19 nt, Artificial Sequence
  Description of Artificial Sequence: Synthetic oligonucleotide
ggaagcacuugugagaaga

SEQ ID NO: 2574189 - RNA, 19 nt, Artificial Sequence
  Description of Artificial Sequence: Synthetic oligonucleotide
gcaguugccgugaaguucc

SEQ ID NO: 2574190 - RNA, 19 nt, Artificial Sequence
  Description of Artificial Sequence: Synthetic oligonucleotide
ucugaugaagggguacguc

SEQ ID NO: 2574191 - RNA, 19 nt, Artificial Sequence
  Description of Artificial Sequence: Synthetic oligonucleotide
cucaguucccgccauggca

SEQ ID NO: 2574192 - RNA, 19 nt, Artificial Sequence
  Description of Artificial Sequence: Synthetic oligonucleotide
guagcaguugccgugaagu

SEQ ID NO: 2574193 - RNA, 19 nt, Artificial Sequence
  Description of Artificial Sequence: Synthetic oligonucleotide
cuaggauuaugcggucagg

SEQ ID NO: 2574194 - RNA, 19 nt, Artificial Sequence
  Description of Artificial Sequence: Synthetic oligonucleotide
guucaucaauaagaaccag

SEQ ID NO: 2574195 - RNA, 19 nt, Artificial Sequence
  Description of Artificial Sequence: Synthetic oligonucleotide
ggaaggaagcacugucucc

SEQ ID NO: 2574196 - RNA, 19 nt, Artificial Sequence
  Description of Artificial Sequence: Synthetic oligonucleotide
uggacgucucaguucccgc

SEQ ID NO: 2574197 - RNA, 19 nt, Artificial Sequence
  Description of Artificial Sequence: Synthetic oligonucleotide
gucccaaacaggcaggcua

SEQ ID NO: 2574198 - RNA, 19 nt, Artificial Sequence
  Description of Artificial Sequence: Synthetic oligonucleotide
cuggcuccugcuguggacg

SEQ ID NO: 2574199 - RNA, 19 nt, Artificial Sequence
  Description of Artificial Sequence: Synthetic oligonucleotide
gaugaagggguacguccuc

SEQ ID NO: 2574200 - RNA, 19 nt, Artificial Sequence
  Description of Artificial Sequence: Synthetic oligonucleotide
ggcaggcuaggauuaugcg

SEQ ID NO: 2574201 - RNA, 19 nt, Artificial Sequence
  Description of Artificial Sequence: Synthetic oligonucleotide
guccaagacagccuccauc

SEQ ID NO: 2574202 - RNA, 19 nt, Artificial Sequence
  Description of Artificial Sequence: Synthetic oligonucleotide
gguuucugucccaaacagg

SEQ ID NO: 2574203 - RNA, 19 nt, Artificial Sequence
  Description of Artificial Sequence: Synthetic oligonucleotide
gaagauguugguggccuga

SEQ ID NO: 2574204 - RNA, 19 nt, Artificial Sequence
  Description of Artificial Sequence: Synthetic oligonucleotide
auggccaccuugcaccccu

SEQ ID NO: 2574205 - RNA, 19 nt, Artificial Sequence
  Description of Artificial Sequence: Synthetic oligonucleotide
uguccaaacuccggagcca

SEQ ID NO: 2574206 - RNA, 19 nt, Artificial Sequence
  Description of Artificial Sequence: Synthetic oligonucleotide
gaaguuccggaagguacac

SEQ ID NO: 2574207 - RNA, 19 nt, Artificial Sequence
  Description of Artificial Sequence: Synthetic oligonucleotide
uccggaagguacacacagu

SEQ ID NO: 2574208 - RNA, 19 nt, Artificial Sequence
  Description of Artificial Sequence: Synthetic oligonucleotide
gucaugccccaguugaaga

SEQ ID NO: 2574209 - RNA, 19 nt, Artificial Sequence
  Description of Artificial Sequence: Synthetic oligonucleotide
ugugugguuccagauggua

SEQ ID NO: 2574210 - RNA, 19 nt, Artificial Sequence
  Description of Artificial Sequence: Synthetic oligonucleotide
aacaggcaggcuaggauua

SEQ ID NO: 2574211 - RNA, 19 nt, Artificial Sequence
  Description of Artificial Sequence: Synthetic oligonucleotide
gacgucucaguucccgcca

SEQ ID NO: 2574212 - RNA, 19 nt, Artificial Sequence
  Description of Artificial Sequence: Synthetic oligonucleotide
aguacgugggaaggggcug

SEQ ID NO: 2574213 - RNA, 19 nt, Artificial Sequence
  Description of Artificial Sequence: Synthetic oligonucleotide
cgauggacgucucaguucc

SEQ ID NO: 2574214 - RNA, 19 nt, Artificial Sequence
  Description of Artificial Sequence: Synthetic oligonucleotide
ugguuccagaugguaaagu

SEQ ID NO: 2574215 - RNA, 19 nt, Artificial Sequence
  Description of Artificial Sequence: Synthetic oligonucleotide
cugaaggauauaccacuca

SEQ ID NO: 2574216 - RNA, 19 nt, Artificial Sequence
  Description of Artificial Sequence: Synthetic oligonucleotide
ccccaguugaagauguagc

SEQ ID NO: 2574217 - RNA, 19 nt, Artificial Sequence
  Description of Artificial Sequence: Synthetic oligonucleotide
uggcauagaugcccucuuc

SEQ ID NO: 2574218 - RNA, 19 nt, Artificial Sequence
  Description of Artificial Sequence: Synthetic oligonucleotide
guggacgcaaggaagggga

SEQ ID NO: 2574219 - RNA, 19 nt, Artificial Sequence
  Description of Artificial Sequence: Synthetic oligonucleotide
gguaguguuggugugucca

SEQ ID NO: 2574220 - RNA, 19 nt, Artificial Sequence
  Description of Artificial Sequence: Synthetic oligonucleotide
gcuguuuuggcuaucccca

SEQ ID NO: 2574221 - RNA, 19 nt, Artificial Sequence
  Description of Artificial Sequence: Synthetic oligonucleotide
caggaucaacuugagacca

SEQ ID NO: 2574222 - RNA, 19 nt, Artificial Sequence
  Description of Artificial Sequence: Synthetic oligonucleotide
ggaagcacugucuccguca

SEQ ID NO: 2574223 - RNA, 19 nt, Artificial Sequence
  Description of Artificial Sequence: Synthetic oligonucleotide
agcccauccccaccagguc

SEQ ID NO: 2574224 - RNA, 19 nt, Artificial Sequence
  Description of Artificial Sequence: Synthetic oligonucleotide
gcugcaggguuucuguccc

SEQ ID NO: 2574225 - RNA, 19 nt, Artificial Sequence
  Description of Artificial Sequence: Synthetic oligonucleotide
uggacgcaaggaaggggac

SEQ ID NO: 2574226 - RNA, 19 nt, Artificial Sequence
  Description of Artificial Sequence: Synthetic oligonucleotide
caauaagaaccagaggugu

SEQ ID NO: 2574227 - RNA, 19 nt, Artificial Sequence
  Description of Artificial Sequence: Synthetic oligonucleotide
ccagaugguaaaguuuagg

SEQ ID NO: 2574228 - RNA, 19 nt, Artificial Sequence
  Description of Artificial Sequence: Synthetic oligonucleotide
guggccugaaggauauacc

SEQ ID NO: 2574229 - RNA, 19 nt, Artificial Sequence
  Description of Artificial Sequence: Synthetic oligonucleotide
guacgugggaaggggcugg

SEQ ID NO: 2574230 - RNA, 19 nt, Artificial Sequence
  Description of Artificial Sequence: Synthetic oligonucleotide
aagauguugguggccugaa

SEQ ID NO: 2574231 - RNA, 19 nt, Artificial Sequence
  Description of Artificial Sequence: Synthetic oligonucleotide
gaaggauauaccacucagu

SEQ ID NO: 2574232 - RNA, 19 nt, Artificial Sequence
  Description of Artificial Sequence: Synthetic oligonucleotide
gguggccugaaggauauac

SEQ ID NO: 2574233 - RNA, 19 nt, Artificial Sequence
  Description of Artificial Sequence: Synthetic oligonucleotide
ugggcauugcaggugcuuc

SEQ ID NO: 2574234 - RNA, 19 nt, Artificial Sequence
  Description of Artificial Sequence: Synthetic oligonucleotide
cuguggacgcaaggaaggg

SEQ ID NO: 2574235 - RNA, 19 nt, Artificial Sequence
  Description of Artificial Sequence: Synthetic oligonucleotide
aggcuaggauuaugcgguc

SEQ ID NO: 2574236 - RNA, 19 nt, Artificial Sequence
  Description of Artificial Sequence: Synthetic oligonucleotide
cauagaugcccucuucucu

SEQ ID NO: 2574237 - RNA, 19 nt, Artificial Sequence
  Description of Artificial Sequence: Synthetic oligonucleotide
ugguaguguuggugugucc

SEQ ID NO: 2574238 - RNA, 19 nt, Artificial Sequence
  Description of Artificial Sequence: Synthetic oligonucleotide
uuccgauggcugcaggguu

SEQ ID NO: 2574239 - RNA, 19 nt, Artificial Sequence
  Description of Artificial Sequence: Synthetic oligonucleotide
uccgauggcugcaggguuu

SEQ ID NO: 2574240 - RNA, 19 nt, Artificial Sequence
  Description of Artificial Sequence: Synthetic oligonucleotide
ugguaaaguuuaggguacu

SEQ ID NO: 2574241 - RNA, 19 nt, Artificial Sequence
  Description of Artificial Sequence: Synthetic oligonucleotide
cuggaagcacuugugagaa

SEQ ID NO: 2574242 - RNA, 19 nt, Artificial Sequence
  Description of Artificial Sequence: Synthetic oligonucleotide
gguaaaguuuaggguacug

SEQ ID NO: 2574243 - RNA, 19 nt, Artificial Sequence
  Description of Artificial Sequence: Synthetic oligonucleotide
cuccggagccagaaucuug

SEQ ID NO: 2574244 - RNA, 19 nt, Artificial Sequence
  Description of Artificial Sequence: Synthetic oligonucleotide
gagaccaaauucaguccca

SEQ ID NO: 2574245 - RNA, 19 nt, Artificial Sequence
  Description of Artificial Sequence: Synthetic oligonucleotide
gccagaaucuuguccaaga

SEQ ID NO: 2574246 - RNA, 19 nt, Artificial Sequence
  Description of Artificial Sequence: Synthetic oligonucleotide
aaggggacauaguccucuu

SEQ ID NO: 2574247 - RNA, 19 nt, Artificial Sequence
  Description of Artificial Sequence: Synthetic oligonucleotide
agccagaaucuuguccaag

SEQ ID NO: 2574248 - RNA, 19 nt, Artificial Sequence
  Description of Artificial Sequence: Synthetic oligonucleotide
ccggaagguacacacaguc

SEQ ID NO: 2574249 - RNA, 19 nt, Artificial Sequence
  Description of Artificial Sequence: Synthetic oligonucleotide
cuugugagaagauguuggu

SEQ ID NO: 2574250 - RNA, 19 nt, Artificial Sequence
  Description of Artificial Sequence: Synthetic oligonucleotide
cugcuguuuuggcuauccc

SEQ ID NO: 2574251 - RNA, 19 nt, Artificial Sequence
  Description of Artificial Sequence: Synthetic oligonucleotide
gauauaccacucagucaca

SEQ ID NO: 2574252 - RNA, 19 nt, Artificial Sequence
  Description of Artificial Sequence: Synthetic oligonucleotide
ggacgucucaguucccgcc

SEQ ID NO: 2574253 - RNA, 19 nt, Artificial Sequence
  Description of Artificial Sequence: Synthetic oligonucleotide
aaguuccggaagguacaca

SEQ ID NO: 2574254 - RNA, 19 nt, Artificial Sequence
  Description of Artificial Sequence: Synthetic oligonucleotide
caaacaacucgaggaucac

SEQ ID NO: 2574255 - RNA, 19 nt, Artificial Sequence
  Description of Artificial Sequence: Synthetic oligonucleotide
ccuuggaguacgugggaag

SEQ ID NO: 2574256 - RNA, 19 nt, Artificial Sequence
  Description of Artificial Sequence: Synthetic oligonucleotide
cugucccaaacaggcaggc

SEQ ID NO: 2574257 - RNA, 19 nt, Artificial Sequence
  Description of Artificial Sequence: Synthetic oligonucleotide
auggcauagaugcccucuu

SEQ ID NO: 2574258 - RNA, 19 nt, Artificial Sequence
  Description of Artificial Sequence: Synthetic oligonucleotide
uacguccucugcucaugga

SEQ ID NO: 2574259 - RNA, 19 nt, Artificial Sequence
  Description of Artificial Sequence: Synthetic oligonucleotide
uagcaguugccgugaaguu

SEQ ID NO: 2574260 - RNA, 19 nt, Artificial Sequence
  Description of Artificial Sequence: Synthetic oligonucleotide
ggcggaaggaagcacuguc

SEQ ID NO: 2574261 - RNA, 19 nt, Artificial Sequence
  Description of Artificial Sequence: Synthetic oligonucleotide
cugguaguguugguguguc

SEQ ID NO: 2574262 - RNA, 19 nt, Artificial Sequence
  Description of Artificial Sequence: Synthetic oligonucleotide
caccuugcaccccugggca

SEQ ID NO: 2574263 - RNA, 19 nt, Artificial Sequence
  Description of Artificial Sequence: Synthetic oligonucleotide
cauggagcaucagccuggc

SEQ ID NO: 2574264 - RNA, 19 nt, Artificial Sequence
  Description of Artificial Sequence: Synthetic oligonucleotide
ccugaaggauauaccacuc

SEQ ID NO: 2574265 - RNA, 19 nt, Artificial Sequence
  Description of Artificial Sequence: Synthetic oligonucleotide
agcaccccgauggacgucu

SEQ ID NO: 2574266 - RNA, 19 nt, Artificial Sequence
  Description of Artificial Sequence: Synthetic oligonucleotide
cguucaucaauaagaacca

SEQ ID NO: 2574267 - RNA, 19 nt, Artificial Sequence
  Description of Artificial Sequence: Synthetic oligonucleotide
guaguguugguguguccaa

SEQ ID NO: 2574268 - RNA, 19 nt, Artificial Sequence
  Description of Artificial Sequence: Synthetic oligonucleotide
accccugggcauugcaggu

SEQ ID NO: 2574269 - RNA, 19 nt, Artificial Sequence
  Description of Artificial Sequence: Synthetic oligonucleotide
ucccgccauggcauagaug

SEQ ID NO: 2574270 - RNA, 19 nt, Artificial Sequence
  Description of Artificial Sequence: Synthetic oligonucleotide
uucccgccauggcauagau

SEQ ID NO: 2574271 - RNA, 19 nt, Artificial Sequence
  Description of Artificial Sequence: Synthetic oligonucleotide
gaccuuggaguacguggga

SEQ ID NO: 2574272 - RNA, 19 nt, Artificial Sequence
  Description of Artificial Sequence: Synthetic oligonucleotide
ugcaggguuucugucccaa

SEQ ID NO: 2574273 - RNA, 19 nt, Artificial Sequence
  Description of Artificial Sequence: Synthetic oligonucleotide
aggauuccguucaucaaua

SEQ ID NO: 2574274 - RNA, 19 nt, Artificial Sequence
  Description of Artificial Sequence: Synthetic oligonucleotide
caaauucagucccaggguu

SEQ ID NO: 2574275 - RNA, 19 nt, Artificial Sequence
  Description of Artificial Sequence: Synthetic oligonucleotide
aguucccgccauggcauag

SEQ ID NO: 2574276 - RNA, 19 nt, Artificial Sequence
  Description of Artificial Sequence: Synthetic oligonucleotide
gucacagccuggguggcac

SEQ ID NO: 2574277 - RNA, 19 nt, Artificial Sequence
  Description of Artificial Sequence: Synthetic oligonucleotide
cgugaaguuccgauggcug

SEQ ID NO: 2574278 - RNA, 19 nt, Artificial Sequence
  Description of Artificial Sequence: Synthetic oligonucleotide
caggauuccguucaucaau

SEQ ID NO: 2574279 - RNA, 19 nt, Artificial Sequence
  Description of Artificial Sequence: Synthetic oligonucleotide
ccaccuugcaccccugggc

SEQ ID NO: 2574280 - RNA, 19 nt, Artificial Sequence
  Description of Artificial Sequence: Synthetic oligonucleotide
gugugguuccagaugguaa

SEQ ID NO: 2574281 - RNA, 19 nt, Artificial Sequence
  Description of Artificial Sequence: Synthetic oligonucleotide
gccugaaggauauaccacu

SEQ ID NO: 2574282 - RNA, 19 nt, Artificial Sequence
  Description of Artificial Sequence: Synthetic oligonucleotide
ggcauagcccauccccacc

SEQ ID NO: 2574283 - RNA, 19 nt, Artificial Sequence
  Description of Artificial Sequence: Synthetic oligonucleotide
caaacaggcaggcuaggau

SEQ ID NO: 2574284 - RNA, 19 nt, Artificial Sequence
  Description of Artificial Sequence: Synthetic oligonucleotide
guuggcggaaggaagcacu

SEQ ID NO: 2574285 - RNA, 19 nt, Artificial Sequence
  Description of Artificial Sequence: Synthetic oligonucleotide
accuuggaguacgugggaa

SEQ ID NO: 2574286 - RNA, 19 nt, Artificial Sequence
  Description of Artificial Sequence: Synthetic oligonucleotide
gacgcaaggaaggggacau

SEQ ID NO: 2574287 - RNA, 19 nt, Artificial Sequence
  Description of Artificial Sequence: Synthetic oligonucleotide
uggucaggauuccguucau

SEQ ID NO: 2574288 - RNA, 19 nt, Artificial Sequence
  Description of Artificial Sequence: Synthetic oligonucleotide
guccaggaucaacuugaga

SEQ ID NO: 2574289 - RNA, 19 nt, Artificial Sequence
  Description of Artificial Sequence: Synthetic oligonucleotide
ggaguacgugggaaggggc

SEQ ID NO: 2574290 - RNA, 19 nt, Artificial Sequence
  Description of Artificial Sequence: Synthetic oligonucleotide
cugcuguggacgcaaggaa

SEQ ID NO: 2574291 - RNA, 19 nt, Artificial Sequence
  Description of Artificial Sequence: Synthetic oligonucleotide
gagccagaaucuuguccaa

SEQ ID NO: 2574292 - RNA, 19 nt, Artificial Sequence
  Description of Artificial Sequence: Synthetic oligonucleotide
cguccucugcucauggagc

SEQ ID NO: 2574293 - RNA, 19 nt, Artificial Sequence
  Description of Artificial Sequence: Synthetic oligonucleotide
caguugccgugaaguuccg

SEQ ID NO: 2574294 - RNA, 19 nt, Artificial Sequence
  Description of Artificial Sequence: Synthetic oligonucleotide
augcggucaggggcauagc

SEQ ID NO: 2574295 - RNA, 19 nt, Artificial Sequence
  Description of Artificial Sequence: Synthetic oligonucleotide
gguuccagaugguaaaguu

SEQ ID NO: 2574296 - RNA, 19 nt, Artificial Sequence
  Description of Artificial Sequence: Synthetic oligonucleotide
gauggacgucucaguuccc

SEQ ID NO: 2574297 - RNA, 19 nt, Artificial Sequence
  Description of Artificial Sequence: Synthetic oligonucleotide
cggaagguacacacagucc

SEQ ID NO: 2574298 - RNA, 19 nt, Artificial Sequence
  Description of Artificial Sequence: Synthetic oligonucleotide
gguacguccucugcucaug

SEQ ID NO: 2574299 - RNA, 19 nt, Artificial Sequence
  Description of Artificial Sequence: Synthetic oligonucleotide
gaguacgugggaaggggcu

SEQ ID NO: 2574300 - RNA, 19 nt, Artificial Sequence
  Description of Artificial Sequence: Synthetic oligonucleotide
cagaggugugugguuccag

SEQ ID NO: 2574301 - RNA, 19 nt, Artificial Sequence
  Description of Artificial Sequence: Synthetic oligonucleotide
cuugcaccccugggcauug

SEQ ID NO: 2574302 - RNA, 19 nt, Artificial Sequence
  Description of Artificial Sequence: Synthetic oligonucleotide
cuccgucaugccccaguug

SEQ ID NO: 2574303 - RNA, 19 nt, Artificial Sequence
  Description of Artificial Sequence: Synthetic oligonucleotide
uggcggaaggaagcacugu

SEQ ID NO: 2574304 - RNA, 19 nt, Artificial Sequence
  Description of Artificial Sequence: Synthetic oligonucleotide
gugggaaggggcuggaauu

SEQ ID NO: 2574305 - RNA, 19 nt, Artificial Sequence
  Description of Artificial Sequence: Synthetic oligonucleotide
caggcaggcuaggauuaug

SEQ ID NO: 2574306 - RNA, 19 nt, Artificial Sequence
  Description of Artificial Sequence: Synthetic oligonucleotide
cauggcauagaugcccucu

SEQ ID NO: 2574307 - RNA, 19 nt, Artificial Sequence
  Description of Artificial Sequence: Synthetic oligonucleotide
ggaucaacuugagaccaaa

SEQ ID NO: 2574308 - RNA, 19 nt, Artificial Sequence
  Description of Artificial Sequence: Synthetic oligonucleotide
cccauuggcacugcacagc

SEQ ID NO: 2574309 - RNA, 19 nt, Artificial Sequence
  Description of Artificial Sequence: Synthetic oligonucleotide
acgucucaguucccgccau

SEQ ID NO: 2574310 - RNA, 19 nt, Artificial Sequence
  Description of Artificial Sequence: Synthetic oligonucleotide
ccgauggacgucucaguuc

SEQ ID NO: 2574311 - RNA, 19 nt, Artificial Sequence
  Description of Artificial Sequence: Synthetic oligonucleotide
gaucaacuugagaccaaau

SEQ ID NO: 2574312 - RNA, 19 nt, Artificial Sequence
  Description of Artificial Sequence: Synthetic oligonucleotide
guuccgauggcugcagggu

SEQ ID NO: 2574313 - RNA, 19 nt, Artificial Sequence
  Description of Artificial Sequence: Synthetic oligonucleotide
gcggucaggggcauagccc

SEQ ID NO: 2574314 - RNA, 19 nt, Artificial Sequence
  Description of Artificial Sequence: Synthetic oligonucleotide
uggcacugcacagcuucau

SEQ ID NO: 2574315 - RNA, 19 nt, Artificial Sequence
  Description of Artificial Sequence: Synthetic oligonucleotide
uacgugggaaggggcugga

SEQ ID NO: 2574316 - RNA, 19 nt, Artificial Sequence
  Description of Artificial Sequence: Synthetic oligonucleotide
auuaugcggucaggggcau

SEQ ID NO: 2574317 - RNA, 19 nt, Artificial Sequence
  Description of Artificial Sequence: Synthetic oligonucleotide
gugcuugaccuuggaguac

SEQ ID NO: 2574318 - RNA, 19 nt, Artificial Sequence
  Description of Artificial Sequence: Synthetic oligonucleotide
ugcccucuucucugaugaa

SEQ ID NO: 2574319 - RNA, 19 nt, Artificial Sequence
  Description of Artificial Sequence: Synthetic oligonucleotide
auguagcaguugccgugaa

SEQ ID NO: 2574320 - RNA, 19 nt, Artificial Sequence
  Description of Artificial Sequence: Synthetic oligonucleotide
agcaucagccuggcuccug

SEQ ID NO: 2574321 - RNA, 19 nt, Artificial Sequence
  Description of Artificial Sequence: Synthetic oligonucleotide
gggcauagcccauccccac

SEQ ID NO: 2574322 - RNA, 19 nt, Artificial Sequence
  Description of Artificial Sequence: Synthetic oligonucleotide
gaagcacuugugagaagau

SEQ ID NO: 2574323 - RNA, 19 nt, Artificial Sequence
  Description of Artificial Sequence: Synthetic oligonucleotide
gccgugaaguuccgauggc

SEQ ID NO: 2574324 - RNA, 19 nt, Artificial Sequence
  Description of Artificial Sequence: Synthetic oligonucleotide
aguugccgugaaguuccga

SEQ ID NO: 2574325 - RNA, 19 nt, Artificial Sequence
  Description of Artificial Sequence: Synthetic oligonucleotide
ccgauguccaggaucaacu

SEQ ID NO: 2574326 - RNA, 19 nt, Artificial Sequence
  Description of Artificial Sequence: Synthetic oligonucleotide
ggauuccguucaucaauaa

SEQ ID NO: 2574327 - RNA, 19 nt, Artificial Sequence
  Description of Artificial Sequence: Synthetic oligonucleotide
gcauugcaggugcuuccug

SEQ ID NO: 2574328 - RNA, 19 nt, Artificial Sequence
  Description of Artificial Sequence: Synthetic oligonucleotide
aggaucaacuugagaccaa

SEQ ID NO: 2574329 - RNA, 19 nt, Artificial Sequence
  Description of Artificial Sequence: Synthetic oligonucleotide
auggagcaucagccuggcu

SEQ ID NO: 2574330 - RNA, 19 nt, Artificial Sequence
  Description of Artificial Sequence: Synthetic oligonucleotide
cgccauggcauagaugccc

SEQ ID NO: 2574331 - RNA, 19 nt, Artificial Sequence
  Description of Artificial Sequence: Synthetic oligonucleotide
ggugaaguuccggaaggua

SEQ ID NO: 2574332 - RNA, 19 nt, Artificial Sequence
  Description of Artificial Sequence: Synthetic oligonucleotide
uccucugcucauggagcau

SEQ ID NO: 2574333 - RNA, 19 nt, Artificial Sequence
  Description of Artificial Sequence: Synthetic oligonucleotide
cccaaacaacucgaggauc

SEQ ID NO: 2574334 - RNA, 19 nt, Artificial Sequence
  Description of Artificial Sequence: Synthetic oligonucleotide
gccgauguccaggaucaac

SEQ ID NO: 2574335 - RNA, 19 nt, Artificial Sequence
  Description of Artificial Sequence: Synthetic oligonucleotide
ccaaauucagucccagggu

SEQ ID NO: 2574336 - RNA, 19 nt, Artificial Sequence
  Description of Artificial Sequence: Synthetic oligonucleotide
gguuggcggaaggaagcac

SEQ ID NO: 2574337 - RNA, 19 nt, Artificial Sequence
  Description of Artificial Sequence: Synthetic oligonucleotide
guucccgccauggcauaga

SEQ ID NO: 2574338 - RNA, 19 nt, Artificial Sequence
  Description of Artificial Sequence: Synthetic oligonucleotide
gggguacguccucugcuca

SEQ ID NO: 2574339 - RNA, 19 nt, Artificial Sequence
  Description of Artificial Sequence: Synthetic oligonucleotide
ccuggcuccugcuguggac

SEQ ID NO: 2574340 - RNA, 19 nt, Artificial Sequence
  Description of Artificial Sequence: Synthetic oligonucleotide
gucccaggguuggcggaag

SEQ ID NO: 2574341 - RNA, 19 nt, Artificial Sequence
  Description of Artificial Sequence: Synthetic oligonucleotide
ggacgcaaggaaggggaca

SEQ ID NO: 2574342 - RNA, 19 nt, Artificial Sequence
  Description of Artificial Sequence: Synthetic oligonucleotide
gcacugucuccgucaugcc

SEQ ID NO: 2574343 - RNA, 19 nt, Artificial Sequence
  Description of Artificial Sequence: Synthetic oligonucleotide
ggcuauccccaaacaacuc

SEQ ID NO: 2574344 - RNA, 19 nt, Artificial Sequence
  Description of Artificial Sequence: Synthetic oligonucleotide
ggcuaggauuaugcgguca

SEQ ID NO: 2574345 - RNA, 19 nt, Artificial Sequence
  Description of Artificial Sequence: Synthetic oligonucleotide
gcucauggagcaucagccu

SEQ ID NO: 2574346 - RNA, 19 nt, Artificial Sequence
  Description of Artificial Sequence: Synthetic oligonucleotide
cgucaugccccaguugaag

SEQ ID NO: 2574347 - RNA, 19 nt, Artificial Sequence
  Description of Artificial Sequence: Synthetic oligonucleotide
ccucugcucauggagcauc

SEQ ID NO: 2574348 - RNA, 19 nt, Artificial Sequence
  Description of Artificial Sequence: Synthetic oligonucleotide
uuaugcggucaggggcaua

SEQ ID NO: 2574349 - RNA, 19 nt, Artificial Sequence
  Description of Artificial Sequence: Synthetic oligonucleotide
cggucaggggcauagccca

SEQ ID NO: 2574350 - RNA, 19 nt, Artificial Sequence
  Description of Artificial Sequence: Synthetic oligonucleotide
cucugaugaagggguacgu

SEQ ID NO: 2574351 - RNA, 19 nt, Artificial Sequence
  Description of Artificial Sequence: Synthetic oligonucleotide
cccaaacaggcaggcuagg

SEQ ID NO: 2574352 - RNA, 19 nt, Artificial Sequence
  Description of Artificial Sequence: Synthetic oligonucleotide
caaacuccggagccagaau

SEQ ID NO: 2574353 - RNA, 19 nt, Artificial Sequence
  Description of Artificial Sequence: Synthetic oligonucleotide
ggguuggcggaaggaagca

SEQ ID NO: 2574354 - RNA, 19 nt, Artificial Sequence
  Description of Artificial Sequence: Synthetic oligonucleotide
ccgccauggcauagaugcc

SEQ ID NO: 2574355 - RNA, 19 nt, Artificial Sequence
  Description of Artificial Sequence: Synthetic oligonucleotide
ccaaacaggcaggcuagga

SEQ ID NO: 2574356 - RNA, 19 nt, Artificial Sequence
  Description of Artificial Sequence: Synthetic oligonucleotide
cugcaggguuucuguccca

SEQ ID NO: 2574357 - RNA, 19 nt, Artificial Sequence
  Description of Artificial Sequence: Synthetic oligonucleotide
gcggaaggaagcacugucu

SEQ ID NO: 2574358 - RNA, 19 nt, Artificial Sequence
  Description of Artificial Sequence: Synthetic oligonucleotide
ggcauugcaggugcuuccu

SEQ ID NO: 2574359 - RNA, 19 nt, Artificial Sequence
  Description of Artificial Sequence: Synthetic oligonucleotide
gcuccugcuguggacgcaa

SEQ ID NO: 2574360 - RNA, 19 nt, Artificial Sequence
  Description of Artificial Sequence: Synthetic oligonucleotide
guaccaccagcaccccgau

SEQ ID NO: 2574361 - RNA, 19 nt, Artificial Sequence
  Description of Artificial Sequence: Synthetic oligonucleotide
acgugggaaggggcuggaa

SEQ ID NO: 2574362 - RNA, 19 nt, Artificial Sequence
  Description of Artificial Sequence: Synthetic oligonucleotide
caguucccgccauggcaua

SEQ ID NO: 2574363 - RNA, 19 nt, Artificial Sequence
  Description of Artificial Sequence: Synthetic oligonucleotide
ggguggucaggauuccguu

SEQ ID NO: 2574364 - RNA, 19 nt, Artificial Sequence
  Description of Artificial Sequence: Synthetic oligonucleotide
ccggagccagaaucuuguc

SEQ ID NO: 2574365 - RNA, 19 nt, Artificial Sequence
  Description of Artificial Sequence: Synthetic oligonucleotide
acgcaaggaaggggacaua

SEQ ID NO: 2574366 - RNA, 19 nt, Artificial Sequence
  Description of Artificial Sequence: Synthetic oligonucleotide
gccauggcauagaugcccu

SEQ ID NO: 2574367 - RNA, 19 nt, Artificial Sequence
  Description of Artificial Sequence: Synthetic oligonucleotide
ccccaaacaacucgaggau

SEQ ID NO: 2574368 - RNA, 19 nt, Artificial Sequence
  Description of Artificial Sequence: Synthetic oligonucleotide
gugugugguuccagauggu

SEQ ID NO: 2574369 - RNA, 19 nt, Artificial Sequence
  Description of Artificial Sequence: Synthetic oligonucleotide
gcuggacugcugcuguuuu

SEQ ID NO: 2574370 - RNA, 19 nt, Artificial Sequence
  Description of Artificial Sequence: Synthetic oligonucleotide
ugguggccugaaggauaua

SEQ ID NO: 2574371 - RNA, 19 nt, Artificial Sequence
  Description of Artificial Sequence: Synthetic oligonucleotide
cagcaccccgauggacguc

SEQ ID NO: 2574372 - RNA, 19 nt, Artificial Sequence
  Description of Artificial Sequence: Synthetic oligonucleotide
ccccugggcauugcaggug

SEQ ID NO: 2574373 - RNA, 19 nt, Artificial Sequence
  Description of Artificial Sequence: Synthetic oligonucleotide
ggguacguccucugcucau

SEQ ID NO: 2574374 - RNA, 19 nt, Artificial Sequence
  Description of Artificial Sequence: Synthetic oligonucleotide
gagcaucagccuggcuccu

SEQ ID NO: 2574375 - RNA, 19 nt, Artificial Sequence
  Description of Artificial Sequence: Synthetic oligonucleotide
cgucucaguucccgccaug

SEQ ID NO: 2574376 - RNA, 19 nt, Artificial Sequence
  Description of Artificial Sequence: Synthetic oligonucleotide
cuuggccgauguccaggau

SEQ ID NO: 2574377 - RNA, 19 nt, Artificial Sequence
  Description of Artificial Sequence: Synthetic oligonucleotide
ccagcaccccgauggacgu

SEQ ID NO: 2574378 - RNA, 19 nt, Artificial Sequence
  Description of Artificial Sequence: Synthetic oligonucleotide
ccagaggugugugguucca

SEQ ID NO: 2574379 - RNA, 19 nt, Artificial Sequence
  Description of Artificial Sequence: Synthetic oligonucleotide
cccgauggacgucucaguu

SEQ ID NO: 2574380 - RNA, 19 nt, Artificial Sequence
  Description of Artificial Sequence: Synthetic oligonucleotide
ccgucaugccccaguugaa

SEQ ID NO: 2574381 - RNA, 19 nt, Artificial Sequence
  Description of Artificial Sequence: Synthetic oligonucleotide
ccgugaaguuccgauggcu

SEQ ID NO: 2574382 - RNA, 19 nt, Artificial Sequence
  Description of Artificial Sequence: Synthetic oligonucleotide
cauaguccucuuggccgau

SEQ ID NO: 2574383 - RNA, 19 nt, Artificial Sequence
  Description of Artificial Sequence: Synthetic oligonucleotide
cauccccaccagguccucu

SEQ ID NO: 2574384 - RNA, 19 nt, Artificial Sequence
  Description of Artificial Sequence: Synthetic oligonucleotide
ggcuggacugcugcuguuu

SEQ ID NO: 2574385 - RNA, 19 nt, Artificial Sequence
  Description of Artificial Sequence: Synthetic oligonucleotide
cgaggaucacugggugguc

SEQ ID NO: 2574386 - RNA, 19 nt, Artificial Sequence
  Description of Artificial Sequence: Synthetic oligonucleotide
cgauguccaggaucaacuu

SEQ ID NO: 2574387 - RNA, 19 nt, Artificial Sequence
  Description of Artificial Sequence: Synthetic oligonucleotide
gcuugaccuuggaguacgu

SEQ ID NO: 2574388 - RNA, 19 nt, Artificial Sequence
  Description of Artificial Sequence: Synthetic oligonucleotide
ccccgauggacgucucagu

SEQ ID NO: 2574389 - RNA, 19 nt, Artificial Sequence
  Description of Artificial Sequence: Synthetic oligonucleotide
ccugggcauugcaggugcu

SEQ ID NO: 2574390 - RNA, 19 nt, Artificial Sequence
  Description of Artificial Sequence: Synthetic oligonucleotide
ggccgauguccaggaucaa

SEQ ID NO: 2574391 - RNA, 19 nt, Artificial Sequence
  Description of Artificial Sequence: Synthetic oligonucleotide
gcaccccgauggacgucuc

SEQ ID NO: 2574392 - RNA, 19 nt, Artificial Sequence
  Description of Artificial Sequence: Synthetic oligonucleotide
gggcuggacugcugcuguu

SEQ ID NO: 2574393 - RNA, 19 nt, Artificial Sequence
  Description of Artificial Sequence: Synthetic oligonucleotide
ccuugcaccccugggcauu

SEQ ID NO: 2574394 - RNA, 19 nt, Artificial Sequence
  Description of Artificial Sequence: Synthetic oligonucleotide
acaacaaggaacuccaccc

SEQ ID NO: 2574395 - RNA, 19 nt, Artificial Sequence
  Description of Artificial Sequence: Synthetic oligonucleotide
aagugguagcgccagaucc

SEQ ID NO: 2574396 - RNA, 19 nt, Artificial Sequence
  Description of Artificial Sequence: Synthetic oligonucleotide
ucauaaguagcuuugaacu

SEQ ID NO: 2574397 - RNA, 19 nt, Artificial Sequence
  Description of Artificial Sequence: Synthetic oligonucleotide
cuguagaucauccacaccg

SEQ ID NO: 2574398 - RNA, 19 nt, Artificial Sequence
  Description of Artificial Sequence: Synthetic oligonucleotide
uagagugagauguaguugg

SEQ ID NO: 2574399 - RNA, 19 nt, Artificial Sequence
  Description of Artificial Sequence: Synthetic oligonucleotide
uggagaaaaguccagagga

SEQ ID NO: 2574400 - RNA, 19 nt, Artificial Sequence
  Description of Artificial Sequence: Synthetic oligonucleotide
acuuuggugauauagaggu

SEQ ID NO: 2574401 - RNA, 19 nt, Artificial Sequence
  Description of Artificial Sequence: Synthetic oligonucleotide
uaaaggacaagcuauguac

SEQ ID NO: 2574402 - RNA, 19 nt, Artificial Sequence
  Description of Artificial Sequence: Synthetic oligonucleotide
aagaaaucgcaguagagga

SEQ ID NO: 2574403 - RNA, 19 nt, Artificial Sequence
  Description of Artificial Sequence: Synthetic oligonucleotide
aacaacuguggcaagaugg

SEQ ID NO: 2574404 - RNA, 19 nt, Artificial Sequence
  Description of Artificial Sequence: Synthetic oligonucleotide
gaagaaaucgcaguagagg

SEQ ID NO: 2574405 - RNA, 19 nt, Artificial Sequence
  Description of Artificial Sequence: Synthetic oligonucleotide
auagagguagaagaaaucg

SEQ ID NO: 2574406 - RNA, 19 nt, Artificial Sequence
  Description of Artificial Sequence: Synthetic oligonucleotide
caguugaagagauagagug

SEQ ID NO: 2574407 - RNA, 19 nt, Artificial Sequence
  Description of Artificial Sequence: Synthetic oligonucleotide
aaaagucaacucugggugg

SEQ ID NO: 2574408 - RNA, 19 nt, Artificial Sequence
  Description of Artificial Sequence: Synthetic oligonucleotide
aacagcucagguucugagc

SEQ ID NO: 2574409 - RNA, 19 nt, Artificial Sequence
  Description of Artificial Sequence: Synthetic oligonucleotide
ucaugguugaccaggaaug

SEQ ID NO: 2574410 - RNA, 19 nt, Artificial Sequence
  Description of Artificial Sequence: Synthetic oligonucleotide
aaagaagcccucaaagugg

SEQ ID NO: 2574411 - RNA, 19 nt, Artificial Sequence
  Description of Artificial Sequence: Synthetic oligonucleotide
aaggacaagcuauguacac

SEQ ID NO: 2574412 - RNA, 19 nt, Artificial Sequence
  Description of Artificial Sequence: Synthetic oligonucleotide
aagggcuacaaacagcuca

SEQ ID NO: 2574413 - RNA, 19 nt, Artificial Sequence
  Description of Artificial Sequence: Synthetic oligonucleotide
acaagcuauguacaccacc

SEQ ID NO: 2574414 - RNA, 19 nt, Artificial Sequence
  Description of Artificial Sequence: Synthetic oligonucleotide
gauggagaaaaguccagag

SEQ ID NO: 2574415 - RNA, 19 nt, Artificial Sequence
  Description of Artificial Sequence: Synthetic oligonucleotide
cucaccaugaacaacugug

SEQ ID NO: 2574416 - RNA, 19 nt, Artificial Sequence
  Description of Artificial Sequence: Synthetic oligonucleotide
gugauauagagguagaaga

SEQ ID NO: 2574417 - RNA, 19 nt, Artificial Sequence
  Description of Artificial Sequence: Synthetic oligonucleotide
ugaagagauagagugugcg

SEQ ID NO: 2574418 - RNA, 19 nt, Artificial Sequence
  Description of Artificial Sequence: Synthetic oligonucleotide
accguaguaaaggacaagc

SEQ ID NO: 2574419 - RNA, 19 nt, Artificial Sequence
  Description of Artificial Sequence: Synthetic oligonucleotide
gaagucaugguugaccagg

SEQ ID NO: 2574420 - RNA, 19 nt, Artificial Sequence
  Description of Artificial Sequence: Synthetic oligonucleotide
cuacaaacagcucagguuc

SEQ ID NO: 2574421 - RNA, 19 nt, Artificial Sequence
  Description of Artificial Sequence: Synthetic oligonucleotide
gaagagauagagugugcgg

SEQ ID NO: 2574422 - RNA, 19 nt, Artificial Sequence
  Description of Artificial Sequence: Synthetic oligonucleotide
agggaucuuccacugaccc

SEQ ID NO: 2574423 - RNA, 19 nt, Artificial Sequence
  Description of Artificial Sequence: Synthetic oligonucleotide
agugagauguaguugguga

SEQ ID NO: 2574424 - RNA, 19 nt, Artificial Sequence
  Description of Artificial Sequence: Synthetic oligonucleotide
uagaucauccacaccguag

SEQ ID NO: 2574425 - RNA, 19 nt, Artificial Sequence
  Description of Artificial Sequence: Synthetic oligonucleotide
auggagaaaaguccagagg

SEQ ID NO: 2574426 - RNA, 19 nt, Artificial Sequence
  Description of Artificial Sequence: Synthetic oligonucleotide
gacaacaaggaacuccacc

SEQ ID NO: 2574427 - RNA, 19 nt, Artificial Sequence
  Description of Artificial Sequence: Synthetic oligonucleotide
aagcccucaaagugguagc

SEQ ID NO: 2574428 - RNA, 19 nt, Artificial Sequence
  Description of Artificial Sequence: Synthetic oligonucleotide
uagagguagaagaaaucgc

SEQ ID NO: 2574429 - RNA, 19 nt, Artificial Sequence
  Description of Artificial Sequence: Synthetic oligonucleotide
gauguaguuggugaacagg

SEQ ID NO: 2574430 - RNA, 19 nt, Artificial Sequence
  Description of Artificial Sequence: Synthetic oligonucleotide
uagagugugcgguagacac

SEQ ID NO: 2574431 - RNA, 19 nt, Artificial Sequence
  Description of Artificial Sequence: Synthetic oligonucleotide
aaagugguagcgccagauc

SEQ ID NO: 2574432 - RNA, 19 nt, Artificial Sequence
  Description of Artificial Sequence: Synthetic oligonucleotide
aaacagcucagguucugag

SEQ ID NO: 2574433 - RNA, 19 nt, Artificial Sequence
  Description of Artificial Sequence: Synthetic oligonucleotide
cuugcuguagaucauccac

SEQ ID NO: 2574434 - RNA, 19 nt, Artificial Sequence
  Description of Artificial Sequence: Synthetic oligonucleotide
aacuugcuguagaucaucc

SEQ ID NO: 2574435 - RNA, 19 nt, Artificial Sequence
  Description of Artificial Sequence: Synthetic oligonucleotide
aagagauagagugugcggu

SEQ ID NO: 2574436 - RNA, 19 nt, Artificial Sequence
  Description of Artificial Sequence: Synthetic oligonucleotide
aacgauggcgaugagguca

SEQ ID NO: 2574437 - RNA, 19 nt, Artificial Sequence
  Description of Artificial Sequence: Synthetic oligonucleotide
uaaguagcuuugaacuugc

SEQ ID NO: 2574438 - RNA, 19 nt, Artificial Sequence
  Description of Artificial Sequence: Synthetic oligonucleotide
agugguaaguauuuguuuu

SEQ ID NO: 2574439 - RNA, 19 nt, Artificial Sequence
  Description of Artificial Sequence: Synthetic oligonucleotide
uuucuucucuaaaaggcaa

SEQ ID NO: 2574440 - RNA, 19 nt, Artificial Sequence
  Description of Artificial Sequence: Synthetic oligonucleotide
agguagauggagaaaaguc

SEQ ID NO: 2574441 - RNA, 19 nt, Artificial Sequence
  Description of Artificial Sequence: Synthetic oligonucleotide
ucaacucugggugggaagg

SEQ ID NO: 2574442 - RNA, 19 nt, Artificial Sequence
  Description of Artificial Sequence: Synthetic oligonucleotide
uauagagguagaagaaauc

SEQ ID NO: 2574443 - RNA, 19 nt, Artificial Sequence
  Description of Artificial Sequence: Synthetic oligonucleotide
uguagagugagauguaguu

SEQ ID NO: 2574444 - RNA, 19 nt, Artificial Sequence
  Description of Artificial Sequence: Synthetic oligonucleotide
aggaaugccagaauagccg

SEQ ID NO: 2574445 - RNA, 19 nt, Artificial Sequence
  Description of Artificial Sequence: Synthetic oligonucleotide
auaaguagcuuugaacuug

SEQ ID NO: 2574446 - RNA, 19 nt, Artificial Sequence
  Description of Artificial Sequence: Synthetic oligonucleotide
ugguugaccaggaaugcca

SEQ ID NO: 2574447 - RNA, 19 nt, Artificial Sequence
  Description of Artificial Sequence: Synthetic oligonucleotide
uguccugccucggagaagg

SEQ ID NO: 2574448 - RNA, 19 nt, Artificial Sequence
  Description of Artificial Sequence: Synthetic oligonucleotide
uaugccgguaagcucagcu

SEQ ID NO: 2574449 - RNA, 19 nt, Artificial Sequence
  Description of Artificial Sequence: Synthetic oligonucleotide
ucuucucuaaaaggcaaag

SEQ ID NO: 2574450 - RNA, 19 nt, Artificial Sequence
  Description of Artificial Sequence: Synthetic oligonucleotide
aagauggcaacugacucca

SEQ ID NO: 2574451 - RNA, 19 nt, Artificial Sequence
  Description of Artificial Sequence: Synthetic oligonucleotide
agaucauccacaccguagu

SEQ ID NO: 2574452 - RNA, 19 nt, Artificial Sequence
  Description of Artificial Sequence: Synthetic oligonucleotide
caggaaugccagaauagcc

SEQ ID NO: 2574453 - RNA, 19 nt, Artificial Sequence
  Description of Artificial Sequence: Synthetic oligonucleotide
gacuuuggugauauagagg

SEQ ID NO: 2574454 - RNA, 19 nt, Artificial Sequence
  Description of Artificial Sequence: Synthetic oligonucleotide
agugucgugguucccauca

SEQ ID NO: 2574455 - RNA, 19 nt, Artificial Sequence
  Description of Artificial Sequence: Synthetic oligonucleotide
acaacuguggcaagauggc

SEQ ID NO: 2574456 - RNA, 19 nt, Artificial Sequence
  Description of Artificial Sequence: Synthetic oligonucleotide
aggacaagcuauguacacc

SEQ ID NO: 2574457 - RNA, 19 nt, Artificial Sequence
  Description of Artificial Sequence: Synthetic oligonucleotide
uagauggagaaaaguccag

SEQ ID NO: 2574458 - RNA, 19 nt, Artificial Sequence
  Description of Artificial Sequence: Synthetic oligonucleotide
agcuucuuccccuucagga

SEQ ID NO: 2574459 - RNA, 19 nt, Artificial Sequence
  Description of Artificial Sequence: Synthetic oligonucleotide
ucaugcagguguuguagag

SEQ ID NO: 2574460 - RNA, 19 nt, Artificial Sequence
  Description of Artificial Sequence: Synthetic oligonucleotide
uuccccuucaggacuuugg

SEQ ID NO: 2574461 - RNA, 19 nt, Artificial Sequence
  Description of Artificial Sequence: Synthetic oligonucleotide
uugcuguagaucauccaca

SEQ ID NO: 2574462 - RNA, 19 nt, Artificial Sequence
  Description of Artificial Sequence: Synthetic oligonucleotide
accaugaacaacuguggca

SEQ ID NO: 2574463 - RNA, 19 nt, Artificial Sequence
  Description of Artificial Sequence: Synthetic oligonucleotide
guagaggacugucuggacc

SEQ ID NO: 2574464 - RNA, 19 nt, Artificial Sequence
  Description of Artificial Sequence: Synthetic oligonucleotide
agguagaagaaaucgcagu

SEQ ID NO: 2574465 - RNA, 19 nt, Artificial Sequence
  Description of Artificial Sequence: Synthetic oligonucleotide
auccacaccguaguaaagg

SEQ ID NO: 2574466 - RNA, 19 nt, Artificial Sequence
  Description of Artificial Sequence: Synthetic oligonucleotide
ucuaaaaggcaaagggcua

SEQ ID NO: 2574467 - RNA, 19 nt, Artificial Sequence
  Description of Artificial Sequence: Synthetic oligonucleotide
gguaagcucagcuucuucc

SEQ ID NO: 2574468 - RNA, 19 nt, Artificial Sequence
  Description of Artificial Sequence: Synthetic oligonucleotide
aaaggacaagcuauguaca

SEQ ID NO: 2574469 - RNA, 19 nt, Artificial Sequence
  Description of Artificial Sequence: Synthetic oligonucleotide
auggcgaugaggucaaaga

SEQ ID NO: 2574470 - RNA, 19 nt, Artificial Sequence
  Description of Artificial Sequence: Synthetic oligonucleotide
aaaggcaaagggcuacaaa

SEQ ID NO: 2574471 - RNA, 19 nt, Artificial Sequence
  Description of Artificial Sequence: Synthetic oligonucleotide
agaggugagcucuuuaaaa

SEQ ID NO: 2574472 - RNA, 19 nt, Artificial Sequence
  Description of Artificial Sequence: Synthetic oligonucleotide
ugaaggggugggaagccag

SEQ ID NO: 2574473 - RNA, 19 nt, Artificial Sequence
  Description of Artificial Sequence: Synthetic oligonucleotide
ggacuuuggugauauagag

SEQ ID NO: 2574474 - RNA, 19 nt, Artificial Sequence
  Description of Artificial Sequence: Synthetic oligonucleotide
uuguagagugagauguagu

SEQ ID NO: 2574475 - RNA, 19 nt, Artificial Sequence
  Description of Artificial Sequence: Synthetic oligonucleotide
uugaagagauagagugugc

SEQ ID NO: 2574476 - RNA, 19 nt, Artificial Sequence
  Description of Artificial Sequence: Synthetic oligonucleotide
uguagaucauccacaccgu

SEQ ID NO: 2574477 - RNA, 19 nt, Artificial Sequence
  Description of Artificial Sequence: Synthetic oligonucleotide
cacaccguaguaaaggaca

SEQ ID NO: 2574478 - RNA, 19 nt, Artificial Sequence
  Description of Artificial Sequence: Synthetic oligonucleotide
gauauagagguagaagaaa

SEQ ID NO: 2574479 - RNA, 19 nt, Artificial Sequence
  Description of Artificial Sequence: Synthetic oligonucleotide
aguagaggacugucuggac

SEQ ID NO: 2574480 - RNA, 19 nt, Artificial Sequence
  Description of Artificial Sequence: Synthetic oligonucleotide
auauagagguagaagaaau

SEQ ID NO: 2574481 - RNA, 19 nt, Artificial Sequence
  Description of Artificial Sequence: Synthetic oligonucleotide
cucuaaaaggcaaagggcu

SEQ ID NO: 2574482 - RNA, 19 nt, Artificial Sequence
  Description of Artificial Sequence: Synthetic oligonucleotide
guuguagagugagauguag

SEQ ID NO: 2574483 - RNA, 19 nt, Artificial Sequence
  Description of Artificial Sequence: Synthetic oligonucleotide
agaaaaguccagaggaucu

SEQ ID NO: 2574484 - RNA, 19 nt, Artificial Sequence
  Description of Artificial Sequence: Synthetic oligonucleotide
ggugauauagagguagaag

SEQ ID NO: 2574485 - RNA, 19 nt, Artificial Sequence
  Description of Artificial Sequence: Synthetic oligonucleotide
caacaaggaacuccacccg

SEQ ID NO: 2574486 - RNA, 19 nt, Artificial Sequence
  Description of Artificial Sequence: Synthetic oligonucleotide
uguggcaagauggcaacug

SEQ ID NO: 2574487 - RNA, 19 nt, Artificial Sequence
  Description of Artificial Sequence: Synthetic oligonucleotide
cuucaugcagguguuguag

SEQ ID NO: 2574488 - RNA, 19 nt, Artificial Sequence
  Description of Artificial Sequence: Synthetic oligonucleotide
agaaaucgcaguagaggac

SEQ ID NO: 2574489 - RNA, 19 nt, Artificial Sequence
  Description of Artificial Sequence: Synthetic oligonucleotide
uccacaccguaguaaagga

SEQ ID NO: 2574490 - RNA, 19 nt, Artificial Sequence
  Description of Artificial Sequence: Synthetic oligonucleotide
cagaggaucuccagagggg

SEQ ID NO: 2574491 - RNA, 19 nt, Artificial Sequence
  Description of Artificial Sequence: Synthetic oligonucleotide
ugguucccaucauaaguag

SEQ ID NO: 2574492 - RNA, 19 nt, Artificial Sequence
  Description of Artificial Sequence: Synthetic oligonucleotide
guagauggagaaaagucca

SEQ ID NO: 2574493 - RNA, 19 nt, Artificial Sequence
  Description of Artificial Sequence: Synthetic oligonucleotide
uggcgaugaggucaaagaa

SEQ ID NO: 2574494 - RNA, 19 nt, Artificial Sequence
  Description of Artificial Sequence: Synthetic oligonucleotide
augguugaccaggaaugcc

SEQ ID NO: 2574495 - RNA, 19 nt, Artificial Sequence
  Description of Artificial Sequence: Synthetic oligonucleotide
uuggugauauagagguaga

SEQ ID NO: 2574496 - RNA, 19 nt, Artificial Sequence
  Description of Artificial Sequence: Synthetic oligonucleotide
uucuucucuaaaaggcaaa

SEQ ID NO: 2574497 - RNA, 19 nt, Artificial Sequence
  Description of Artificial Sequence: Synthetic oligonucleotide
caggauagggaucuuccac

SEQ ID NO: 2574498 - RNA, 19 nt, Artificial Sequence
  Description of Artificial Sequence: Synthetic oligonucleotide
caaagggcuacaaacagcu

SEQ ID NO: 2574499 - RNA, 19 nt, Artificial Sequence
  Description of Artificial Sequence: Synthetic oligonucleotide
aaagugucgugguucccau

SEQ ID NO: 2574500 - RNA, 19 nt, Artificial Sequence
  Description of Artificial Sequence: Synthetic oligonucleotide
ugggugggaaggcucuggg

SEQ ID NO: 2574501 - RNA, 19 nt, Artificial Sequence
  Description of Artificial Sequence: Synthetic oligonucleotide
ugagauguaguuggugaac

SEQ ID NO: 2574502 - RNA, 19 nt, Artificial Sequence
  Description of Artificial Sequence: Synthetic oligonucleotide
ugccgguaagcucagcuuc

SEQ ID NO: 2574503 - RNA, 19 nt, Artificial Sequence
  Description of Artificial Sequence: Synthetic oligonucleotide
ggcaaagggcuacaaacag

SEQ ID NO: 2574504 - RNA, 19 nt, Artificial Sequence
  Description of Artificial Sequence: Synthetic oligonucleotide
uuugaacuugcuguagauc

SEQ ID NO: 2574505 - RNA, 19 nt, Artificial Sequence
  Description of Artificial Sequence: Synthetic oligonucleotide
guagagugagauguaguug

SEQ ID NO: 2574506 - RNA, 19 nt, Artificial Sequence
  Description of Artificial Sequence: Synthetic oligonucleotide
gagauagagugugcgguag

SEQ ID NO: 2574507 - RNA, 19 nt, Artificial Sequence
  Description of Artificial Sequence: Synthetic oligonucleotide
gucuugcucaccaugaaca

SEQ ID NO: 2574508 - RNA, 19 nt, Artificial Sequence
  Description of Artificial Sequence: Synthetic oligonucleotide
ugcgguagacacccagugc

SEQ ID NO: 2574509 - RNA, 19 nt, Artificial Sequence
  Description of Artificial Sequence: Synthetic oligonucleotide
agcaacgauggcgaugagg

SEQ ID NO: 2574510 - RNA, 19 nt, Artificial Sequence
  Description of Artificial Sequence: Synthetic oligonucleotide
uucaugcagguguuguaga

SEQ ID NO: 2574511 - RNA, 19 nt, Artificial Sequence
  Description of Artificial Sequence: Synthetic oligonucleotide
gauagagugugcgguagac

SEQ ID NO: 2574512 - RNA, 19 nt, Artificial Sequence
  Description of Artificial Sequence: Synthetic oligonucleotide
aacuguggcaagauggcaa

SEQ ID NO: 2574513 - RNA, 19 nt, Artificial Sequence
  Description of Artificial Sequence: Synthetic oligonucleotide
gaacaacuguggcaagaug

SEQ ID NO: 2574514 - RNA, 19 nt, Artificial Sequence
  Description of Artificial Sequence: Synthetic oligonucleotide
caccaugaacaacuguggc

SEQ ID NO: 2574515 - RNA, 19 nt, Artificial Sequence
  Description of Artificial Sequence: Synthetic oligonucleotide
ugugcgguagacacccagu

SEQ ID NO: 2574516 - RNA, 19 nt, Artificial Sequence
  Description of Artificial Sequence: Synthetic oligonucleotide
uagugguaaguauuuguuu

SEQ ID NO: 2574517 - RNA, 19 nt, Artificial Sequence
  Description of Artificial Sequence: Synthetic oligonucleotide
uacaaacagcucagguucu

SEQ ID NO: 2574518 - RNA, 19 nt, Artificial Sequence
  Description of Artificial Sequence: Synthetic oligonucleotide
uagggaucuuccacugacc

SEQ ID NO: 2574519 - RNA, 19 nt, Artificial Sequence
  Description of Artificial Sequence: Synthetic oligonucleotide
ugcaaacagguaguggcug

SEQ ID NO: 2574520 - RNA, 19 nt, Artificial Sequence
  Description of Artificial Sequence: Synthetic oligonucleotide
uucaggacuuuggugauau

SEQ ID NO: 2574521 - RNA, 19 nt, Artificial Sequence
  Description of Artificial Sequence: Synthetic oligonucleotide
ggugaagucaugguugacc

SEQ ID NO: 2574522 - RNA, 19 nt, Artificial Sequence
  Description of Artificial Sequence: Synthetic oligonucleotide
ucugccucaccugucuugc

SEQ ID NO: 2574523 - RNA, 19 nt, Artificial Sequence
  Description of Artificial Sequence: Synthetic oligonucleotide
uggcaagauggcaacugac

SEQ ID NO: 2574524 - RNA, 19 nt, Artificial Sequence
  Description of Artificial Sequence: Synthetic oligonucleotide
uggucucugccucaccugu

SEQ ID NO: 2574525 - RNA, 19 nt, Artificial Sequence
  Description of Artificial Sequence: Synthetic oligonucleotide
ggacaagcuauguacacca

SEQ ID NO: 2574526 - RNA, 19 nt, Artificial Sequence
  Description of Artificial Sequence: Synthetic oligonucleotide
aagaagcccucaaaguggu

SEQ ID NO: 2574527 - RNA, 19 nt, Artificial Sequence
  Description of Artificial Sequence: Synthetic oligonucleotide
ucuugcucaccaugaacaa

SEQ ID NO: 2574528 - RNA, 19 nt, Artificial Sequence
  Description of Artificial Sequence: Synthetic oligonucleotide
guagacacccagugcaaac

SEQ ID NO: 2574529 - RNA, 19 nt, Artificial Sequence
  Description of Artificial Sequence: Synthetic oligonucleotide
gaaagugucgugguuccca

SEQ ID NO: 2574530 - RNA, 19 nt, Artificial Sequence
  Description of Artificial Sequence: Synthetic oligonucleotide
ugaacaacuguggcaagau

SEQ ID NO: 2574531 - RNA, 19 nt, Artificial Sequence
  Description of Artificial Sequence: Synthetic oligonucleotide
gaaggcucugggucuucgg

SEQ ID NO: 2574532 - RNA, 19 nt, Artificial Sequence
  Description of Artificial Sequence: Synthetic oligonucleotide
agccguggggacaacaagg

SEQ ID NO: 2574533 - RNA, 19 nt, Artificial Sequence
  Description of Artificial Sequence: Synthetic oligonucleotide
accaggaaugccagaauag

SEQ ID NO: 2574534 - RNA, 19 nt, Artificial Sequence
  Description of Artificial Sequence: Synthetic oligonucleotide
aacuccacccggaaagugu

SEQ ID NO: 2574535 - RNA, 19 nt, Artificial Sequence
  Description of Artificial Sequence: Synthetic oligonucleotide
guaguaaaggacaagcuau

SEQ ID NO: 2574536 - RNA, 19 nt, Artificial Sequence
  Description of Artificial Sequence: Synthetic oligonucleotide
ucggagaaggcuggugagg

SEQ ID NO: 2574537 - RNA, 19 nt, Artificial Sequence
  Description of Artificial Sequence: Synthetic oligonucleotide
aacccagcugaaggggugg

SEQ ID NO: 2574538 - RNA, 19 nt, Artificial Sequence
  Description of Artificial Sequence: Synthetic oligonucleotide
gaaaucgcaguagaggacu

SEQ ID NO: 2574539 - RNA, 19 nt, Artificial Sequence
  Description of Artificial Sequence: Synthetic oligonucleotide
aagugucgugguucccauc

SEQ ID NO: 2574540 - RNA, 19 nt, Artificial Sequence
  Description of Artificial Sequence: Synthetic oligonucleotide
guguuguagagugagaugu

SEQ ID NO: 2574541 - RNA, 19 nt, Artificial Sequence
  Description of Artificial Sequence: Synthetic oligonucleotide
aaggcuggugaggccaggg

SEQ ID NO: 2574542 - RNA, 19 nt, Artificial Sequence
  Description of Artificial Sequence: Synthetic oligonucleotide
caugguugaccaggaaugc

SEQ ID NO: 2574543 - RNA, 19 nt, Artificial Sequence
  Description of Artificial Sequence: Synthetic oligonucleotide
guaaaggacaagcuaugua

SEQ ID NO: 2574544 - RNA, 19 nt, Artificial Sequence
  Description of Artificial Sequence: Synthetic oligonucleotide
accugucuugcucaccaug

SEQ ID NO: 2574545 - RNA, 19 nt, Artificial Sequence
  Description of Artificial Sequence: Synthetic oligonucleotide
agggcuaugccgguaagcu

SEQ ID NO: 2574546 - RNA, 19 nt, Artificial Sequence
  Description of Artificial Sequence: Synthetic oligonucleotide
agguguuguagagugagau

SEQ ID NO: 2574547 - RNA, 19 nt, Artificial Sequence
  Description of Artificial Sequence: Synthetic oligonucleotide
gucaacucugggugggaag

SEQ ID NO: 2574548 - RNA, 19 nt, Artificial Sequence
  Description of Artificial Sequence: Synthetic oligonucleotide
aguugaagagauagagugu

SEQ ID NO: 2574549 - RNA, 19 nt, Artificial Sequence
  Description of Artificial Sequence: Synthetic oligonucleotide
uguuguagagugagaugua

SEQ ID NO: 2574550 - RNA, 19 nt, Artificial Sequence
  Description of Artificial Sequence: Synthetic oligonucleotide
gaagccaggagaggugagc

SEQ ID NO: 2574551 - RNA, 19 nt, Artificial Sequence
  Description of Artificial Sequence: Synthetic oligonucleotide
agagugugcgguagacacc

SEQ ID NO: 2574552 - RNA, 19 nt, Artificial Sequence
  Description of Artificial Sequence: Synthetic oligonucleotide
gguagaagaaaucgcagua

SEQ ID NO: 2574553 - RNA, 19 nt, Artificial Sequence
  Description of Artificial Sequence: Synthetic oligonucleotide
cuggaccaggccagcaacg

SEQ ID NO: 2574554 - RNA, 19 nt, Artificial Sequence
  Description of Artificial Sequence: Synthetic oligonucleotide
aaacagguaguggcuggug

SEQ ID NO: 2574555 - RNA, 19 nt, Artificial Sequence
  Description of Artificial Sequence: Synthetic oligonucleotide
agggcuacaaacagcucag

SEQ ID NO: 2574556 - RNA, 19 nt, Artificial Sequence
  Description of Artificial Sequence: Synthetic oligonucleotide
aaaguccagaggaucucca

SEQ ID NO: 2574557 - RNA, 19 nt, Artificial Sequence
  Description of Artificial Sequence: Synthetic oligonucleotide
aggacuuuggugauauaga

SEQ ID NO: 2574558 - RNA, 19 nt, Artificial Sequence
  Description of Artificial Sequence: Synthetic oligonucleotide
acacccagugcaaacaggu

SEQ ID NO: 2574559 - RNA, 19 nt, Artificial Sequence
  Description of Artificial Sequence: Synthetic oligonucleotide
ucccaucauaaguagcuuu

SEQ ID NO: 2574560 - RNA, 19 nt, Artificial Sequence
  Description of Artificial Sequence: Synthetic oligonucleotide
gcaaacagguaguggcugg

SEQ ID NO: 2574561 - RNA, 19 nt, Artificial Sequence
  Description of Artificial Sequence: Synthetic oligonucleotide
ggcgaugaggucaaagaag

SEQ ID NO: 2574562 - RNA, 19 nt, Artificial Sequence
  Description of Artificial Sequence: Synthetic oligonucleotide
aaagggcuacaaacagcuc

SEQ ID NO: 2574563 - RNA, 19 nt, Artificial Sequence
  Description of Artificial Sequence: Synthetic oligonucleotide
cucggagaaggcuggugag

SEQ ID NO: 2574564 - RNA, 19 nt, Artificial Sequence
  Description of Artificial Sequence: Synthetic oligonucleotide
gaccaggaaugccagaaua

SEQ ID NO: 2574565 - RNA, 19 nt, Artificial Sequence
  Description of Artificial Sequence: Synthetic oligonucleotide
ugcucaccaugaacaacug

SEQ ID NO: 2574566 - RNA, 19 nt, Artificial Sequence
  Description of Artificial Sequence: Synthetic oligonucleotide
gagaaggcuggugaggcca

SEQ ID NO: 2574567 - RNA, 19 nt, Artificial Sequence
  Description of Artificial Sequence: Synthetic oligonucleotide
gcaagauggcaacugacuc

SEQ ID NO: 2574568 - RNA, 19 nt, Artificial Sequence
  Description of Artificial Sequence: Synthetic oligonucleotide
gguguuguagagugagaug

SEQ ID NO: 2574569 - RNA, 19 nt, Artificial Sequence
  Description of Artificial Sequence: Synthetic oligonucleotide
uagcuuugaacuugcugua

SEQ ID NO: 2574570 - RNA, 19 nt, Artificial Sequence
  Description of Artificial Sequence: Synthetic oligonucleotide
acugucuggaccaggccag

SEQ ID NO: 2574571 - RNA, 19 nt, Artificial Sequence
  Description of Artificial Sequence: Synthetic oligonucleotide
aaacccagcugaaggggug

SEQ ID NO: 2574572 - RNA, 19 nt, Artificial Sequence
  Description of Artificial Sequence: Synthetic oligonucleotide
gcaguagaggacugucugg

SEQ ID NO: 2574573 - RNA, 19 nt, Artificial Sequence
  Description of Artificial Sequence: Synthetic oligonucleotide
gaaggggugggaagccagg

SEQ ID NO: 2574574 - RNA, 19 nt, Artificial Sequence
  Description of Artificial Sequence: Synthetic oligonucleotide
aaaucgcaguagaggacug

SEQ ID NO: 2574575 - RNA, 19 nt, Artificial Sequence
  Description of Artificial Sequence: Synthetic oligonucleotide
gagugagauguaguuggug

SEQ ID NO: 2574576 - RNA, 19 nt, Artificial Sequence
  Description of Artificial Sequence: Synthetic oligonucleotide
agauagagugugcgguaga

SEQ ID NO: 2574577 - RNA, 19 nt, Artificial Sequence
  Description of Artificial Sequence: Synthetic oligonucleotide
cacccggaaagugucgugg

SEQ ID NO: 2574578 - RNA, 19 nt, Artificial Sequence
  Description of Artificial Sequence: Synthetic oligonucleotide
gugcgguagacacccagug

SEQ ID NO: 2574579 - RNA, 19 nt, Artificial Sequence
  Description of Artificial Sequence: Synthetic oligonucleotide
gauagggaucuuccacuga

SEQ ID NO: 2574580 - RNA, 19 nt, Artificial Sequence
  Description of Artificial Sequence: Synthetic oligonucleotide
augccagaauagccguggg

SEQ ID NO: 2574581 - RNA, 19 nt, Artificial Sequence
  Description of Artificial Sequence: Synthetic oligonucleotide
cauccacaccguaguaaag

SEQ ID NO: 2574582 - RNA, 19 nt, Artificial Sequence
  Description of Artificial Sequence: Synthetic oligonucleotide
caugaacaacuguggcaag

SEQ ID NO: 2574583 - RNA, 19 nt, Artificial Sequence
  Description of Artificial Sequence: Synthetic oligonucleotide
ucaaagugguagcgccaga

SEQ ID NO: 2574584 - RNA, 19 nt, Artificial Sequence
  Description of Artificial Sequence: Synthetic oligonucleotide
ucuccagaggggugaaguc

SEQ ID NO: 2574585 - RNA, 19 nt, Artificial Sequence
  Description of Artificial Sequence: Synthetic oligonucleotide
aacucugggugggaaggcu

SEQ ID NO: 2574586 - RNA, 19 nt, Artificial Sequence
  Description of Artificial Sequence: Synthetic oligonucleotide
ggauagggaucuuccacug

SEQ ID NO: 2574587 - RNA, 19 nt, Artificial Sequence
  Description of Artificial Sequence: Synthetic oligonucleotide
cccaucauaaguagcuuug

SEQ ID NO: 2574588 - RNA, 19 nt, Artificial Sequence
  Description of Artificial Sequence: Synthetic oligonucleotide
aaucgcaguagaggacugu

SEQ ID NO: 2574589 - RNA, 19 nt, Artificial Sequence
  Description of Artificial Sequence: Synthetic oligonucleotide
ggggacaacaaggaacucc

SEQ ID NO: 2574590 - RNA, 19 nt, Artificial Sequence
  Description of Artificial Sequence: Synthetic oligonucleotide
gugugcgguagacacccag

SEQ ID NO: 2574591 - RNA, 19 nt, Artificial Sequence
  Description of Artificial Sequence: Synthetic oligonucleotide
cagguucugagcugcccag

SEQ ID NO: 2574592 - RNA, 19 nt, Artificial Sequence
  Description of Artificial Sequence: Synthetic oligonucleotide
uuccuccuguccugccucg

SEQ ID NO: 2574593 - RNA, 19 nt, Artificial Sequence
  Description of Artificial Sequence: Synthetic oligonucleotide
ugucgugguucccaucaua

SEQ ID NO: 2574594 - RNA, 19 nt, Artificial Sequence
  Description of Artificial Sequence: Synthetic oligonucleotide
aggcaaagggcuacaaaca

SEQ ID NO: 2574595 - RNA, 19 nt, Artificial Sequence
  Description of Artificial Sequence: Synthetic oligonucleotide
agaauagccguggggacaa

SEQ ID NO: 2574596 - RNA, 19 nt, Artificial Sequence
  Description of Artificial Sequence: Synthetic oligonucleotide
ugcagguguuguagaguga

SEQ ID NO: 2574597 - RNA, 19 nt, Artificial Sequence
  Description of Artificial Sequence: Synthetic oligonucleotide
cccaaacccagcugaaggg

SEQ ID NO: 2574598 - RNA, 19 nt, Artificial Sequence
  Description of Artificial Sequence: Synthetic oligonucleotide
gcgguagacacccagugca

SEQ ID NO: 2574599 - RNA, 19 nt, Artificial Sequence
  Description of Artificial Sequence: Synthetic oligonucleotide
aggaucuccagagggguga

SEQ ID NO: 2574600 - RNA, 19 nt, Artificial Sequence
  Description of Artificial Sequence: Synthetic oligonucleotide
ccccaaacccagcugaagg

SEQ ID NO: 2574601 - RNA, 19 nt, Artificial Sequence
  Description of Artificial Sequence: Synthetic oligonucleotide
gugagauguaguuggugaa

SEQ ID NO: 2574602 - RNA, 19 nt, Artificial Sequence
  Description of Artificial Sequence: Synthetic oligonucleotide
caucauaaguagcuuugaa

SEQ ID NO: 2574603 - RNA, 19 nt, Artificial Sequence
  Description of Artificial Sequence: Synthetic oligonucleotide
auagagugugcgguagaca

SEQ ID NO: 2574604 - RNA, 19 nt, Artificial Sequence
  Description of Artificial Sequence: Synthetic oligonucleotide
uccuguccugccucggaga

SEQ ID NO: 2574605 - RNA, 19 nt, Artificial Sequence
  Description of Artificial Sequence: Synthetic oligonucleotide
cccuucaggacuuugguga

SEQ ID NO: 2574606 - RNA, 19 nt, Artificial Sequence
  Description of Artificial Sequence: Synthetic oligonucleotide
gucaugguugaccaggaau

SEQ ID NO: 2574607 - RNA, 19 nt, Artificial Sequence
  Description of Artificial Sequence: Synthetic oligonucleotide
agccaggagaggugagcuc

SEQ ID NO: 2574608 - RNA, 19 nt, Artificial Sequence
  Description of Artificial Sequence: Synthetic oligonucleotide
cucugccucaccugucuug

SEQ ID NO: 2574609 - RNA, 19 nt, Artificial Sequence
  Description of Artificial Sequence: Synthetic oligonucleotide
gaaugccagaauagccgug

SEQ ID NO: 2574610 - RNA, 19 nt, Artificial Sequence
  Description of Artificial Sequence: Synthetic oligonucleotide
ggcuaugccgguaagcuca

SEQ ID NO: 2574611 - RNA, 19 nt, Artificial Sequence
  Description of Artificial Sequence: Synthetic oligonucleotide
gaacuccacccggaaagug

SEQ ID NO: 2574612 - RNA, 19 nt, Artificial Sequence
  Description of Artificial Sequence: Synthetic oligonucleotide
guggcaagauggcaacuga

SEQ ID NO: 2574613 - RNA, 19 nt, Artificial Sequence
  Description of Artificial Sequence: Synthetic oligonucleotide
gggacaacaaggaacucca

SEQ ID NO: 2574614 - RNA, 19 nt, Artificial Sequence
  Description of Artificial Sequence: Synthetic oligonucleotide
agugguagcgccagaucca

SEQ ID NO: 2574615 - RNA, 19 nt, Artificial Sequence
  Description of Artificial Sequence: Synthetic oligonucleotide
uggaccaggccagcaacga

SEQ ID NO: 2574616 - RNA, 19 nt, Artificial Sequence
  Description of Artificial Sequence: Synthetic oligonucleotide
agcugcccaggauagggau

SEQ ID NO: 2574617 - RNA, 19 nt, Artificial Sequence
  Description of Artificial Sequence: Synthetic oligonucleotide
cuccuguccugccucggag

SEQ ID NO: 2574618 - RNA, 19 nt, Artificial Sequence
  Description of Artificial Sequence: Synthetic oligonucleotide
gccagaauagccgugggga

SEQ ID NO: 2574619 - RNA, 19 nt, Artificial Sequence
  Description of Artificial Sequence: Synthetic oligonucleotide
ccaggaaugccagaauagc

SEQ ID NO: 2574620 - RNA, 19 nt, Artificial Sequence
  Description of Artificial Sequence: Synthetic oligonucleotide
gucuucggcagccuuccuc

SEQ ID NO: 2574621 - RNA, 19 nt, Artificial Sequence
  Description of Artificial Sequence: Synthetic oligonucleotide
caguagaggacugucugga

SEQ ID NO: 2574622 - RNA, 19 nt, Artificial Sequence
  Description of Artificial Sequence: Synthetic oligonucleotide
ccugccucggagaaggcug

SEQ ID NO: 2574623 - RNA, 19 nt, Artificial Sequence
  Description of Artificial Sequence: Synthetic oligonucleotide
uccacccggaaagugucgu

SEQ ID NO: 2574624 - RNA, 19 nt, Artificial Sequence
  Description of Artificial Sequence: Synthetic oligonucleotide
acaaggaacuccacccgga

SEQ ID NO: 2574625 - RNA, 19 nt, Artificial Sequence
  Description of Artificial Sequence: Synthetic oligonucleotide
cuccacccggaaagugucg

SEQ ID NO: 2574626 - RNA, 19 nt, Artificial Sequence
  Description of Artificial Sequence: Synthetic oligonucleotide
ggcucugggucuucggcag

SEQ ID NO: 2574627 - RNA, 19 nt, Artificial Sequence
  Description of Artificial Sequence: Synthetic oligonucleotide
gcaaagggcuacaaacagc

SEQ ID NO: 2574628 - RNA, 19 nt, Artificial Sequence
  Description of Artificial Sequence: Synthetic oligonucleotide
aggccagcaacgauggcga

SEQ ID NO: 2574629 - RNA, 19 nt, Artificial Sequence
  Description of Artificial Sequence: Synthetic oligonucleotide
gguugaccaggaaugccag

SEQ ID NO: 2574630 - RNA, 19 nt, Artificial Sequence
  Description of Artificial Sequence: Synthetic oligonucleotide
acccggaaagugucguggu

SEQ ID NO: 2574631 - RNA, 19 nt, Artificial Sequence
  Description of Artificial Sequence: Synthetic oligonucleotide
ccaaacccagcugaagggg

SEQ ID NO: 2574632 - RNA, 19 nt, Artificial Sequence
  Description of Artificial Sequence: Synthetic oligonucleotide
gggaucuuccacugacccc

SEQ ID NO: 2574633 - RNA, 19 nt, Artificial Sequence
  Description of Artificial Sequence: Synthetic oligonucleotide
augccgguaagcucagcuu

SEQ ID NO: 2574634 - RNA, 19 nt, Artificial Sequence
  Description of Artificial Sequence: Synthetic oligonucleotide
cauaaguagcuuugaacuu

SEQ ID NO: 2574635 - RNA, 19 nt, Artificial Sequence
  Description of Artificial Sequence: Synthetic oligonucleotide
gacaagcuauguacaccac

SEQ ID NO: 2574636 - RNA, 19 nt, Artificial Sequence
  Description of Artificial Sequence: Synthetic oligonucleotide
gguucccaucauaaguagc

SEQ ID NO: 2574637 - RNA, 19 nt, Artificial Sequence
  Description of Artificial Sequence: Synthetic oligonucleotide
guagaucauccacaccgua

SEQ ID NO: 2574638 - RNA, 19 nt, Artificial Sequence
  Description of Artificial Sequence: Synthetic oligonucleotide
cagggcuaugccgguaagc

SEQ ID NO: 2574639 - RNA, 19 nt, Artificial Sequence
  Description of Artificial Sequence: Synthetic oligonucleotide
uccugccucggagaaggcu

SEQ ID NO: 2574640 - RNA, 19 nt, Artificial Sequence
  Description of Artificial Sequence: Synthetic oligonucleotide
ugucuggaccaggccagca

SEQ ID NO: 2574641 - RNA, 19 nt, Artificial Sequence
  Description of Artificial Sequence: Synthetic oligonucleotide
gcuacaaacagcucagguu

SEQ ID NO: 2574642 - RNA, 19 nt, Artificial Sequence
  Description of Artificial Sequence: Synthetic oligonucleotide
aggagaggugagcucuuua

SEQ ID NO: 2574643 - RNA, 19 nt, Artificial Sequence
  Description of Artificial Sequence: Synthetic oligonucleotide
agagugagauguaguuggu

SEQ ID NO: 2574644 - RNA, 19 nt, Artificial Sequence
  Description of Artificial Sequence: Synthetic oligonucleotide
caacucugggugggaaggc

SEQ ID NO: 2574645 - RNA, 19 nt, Artificial Sequence
  Description of Artificial Sequence: Synthetic oligonucleotide
caccguaguaaaggacaag

SEQ ID NO: 2574646 - RNA, 19 nt, Artificial Sequence
  Description of Artificial Sequence: Synthetic oligonucleotide
ggaaugccagaauagccgu

SEQ ID NO: 2574647 - RNA, 19 nt, Artificial Sequence
  Description of Artificial Sequence: Synthetic oligonucleotide
acaccguaguaaaggacaa

SEQ ID NO: 2574648 - RNA, 19 nt, Artificial Sequence
  Description of Artificial Sequence: Synthetic oligonucleotide
ccagaauagccguggggac

SEQ ID NO: 2574649 - RNA, 19 nt, Artificial Sequence
  Description of Artificial Sequence: Synthetic oligonucleotide
ccugucuugcucaccauga

SEQ ID NO: 2574650 - RNA, 19 nt, Artificial Sequence
  Description of Artificial Sequence: Synthetic oligonucleotide
caacgauggcgaugagguc

SEQ ID NO: 2574651 - RNA, 19 nt, Artificial Sequence
  Description of Artificial Sequence: Synthetic oligonucleotide
cagcucagguucugagcug

SEQ ID NO: 2574652 - RNA, 19 nt, Artificial Sequence
  Description of Artificial Sequence: Synthetic oligonucleotide
ccagcaacgauggcgauga

SEQ ID NO: 2574653 - RNA, 19 nt, Artificial Sequence
  Description of Artificial Sequence: Synthetic oligonucleotide
ggugggaagccaggagagg

SEQ ID NO: 2574654 - RNA, 19 nt, Artificial Sequence
  Description of Artificial Sequence: Synthetic oligonucleotide
agucaacucugggugggaa

SEQ ID NO: 2574655 - RNA, 19 nt, Artificial Sequence
  Description of Artificial Sequence: Synthetic oligonucleotide
caaacagcucagguucuga

SEQ ID NO: 2574656 - RNA, 19 nt, Artificial Sequence
  Description of Artificial Sequence: Synthetic oligonucleotide
cucaccugucuugcucacc

SEQ ID NO: 2574657 - RNA, 19 nt, Artificial Sequence
  Description of Artificial Sequence: Synthetic oligonucleotide
cggaaagugucgugguucc

SEQ ID NO: 2574658 - RNA, 19 nt, Artificial Sequence
  Description of Artificial Sequence: Synthetic oligonucleotide
cuuuggugauauagaggua

SEQ ID NO: 2574659 - RNA, 19 nt, Artificial Sequence
  Description of Artificial Sequence: Synthetic oligonucleotide
caaggaacuccacccggaa

SEQ ID NO: 2574660 - RNA, 19 nt, Artificial Sequence
  Description of Artificial Sequence: Synthetic oligonucleotide
ggaaggcucugggucuucg

SEQ ID NO: 2574661 - RNA, 19 nt, Artificial Sequence
  Description of Artificial Sequence: Synthetic oligonucleotide
ccacaccguaguaaaggac

SEQ ID NO: 2574662 - RNA, 19 nt, Artificial Sequence
  Description of Artificial Sequence: Synthetic oligonucleotide
ggacugucuggaccaggcc

SEQ ID NO: 2574663 - RNA, 19 nt, Artificial Sequence
  Description of Artificial Sequence: Synthetic oligonucleotide
cguaguaaaggacaagcua

SEQ ID NO: 2574664 - RNA, 19 nt, Artificial Sequence
  Description of Artificial Sequence: Synthetic oligonucleotide
ggcuacaaacagcucaggu

SEQ ID NO: 2574665 - RNA, 19 nt, Artificial Sequence
  Description of Artificial Sequence: Synthetic oligonucleotide
gucuggaccaggccagcaa

SEQ ID NO: 2574666 - RNA, 19 nt, Artificial Sequence
  Description of Artificial Sequence: Synthetic oligonucleotide
cugagcugcccaggauagg

SEQ ID NO: 2574667 - RNA, 19 nt, Artificial Sequence
  Description of Artificial Sequence: Synthetic oligonucleotide
caacuguggcaagauggca

SEQ ID NO: 2574668 - RNA, 19 nt, Artificial Sequence
  Description of Artificial Sequence: Synthetic oligonucleotide
gucucugccucaccugucu

SEQ ID NO: 2574669 - RNA, 19 nt, Artificial Sequence
  Description of Artificial Sequence: Synthetic oligonucleotide
ccggaaagugucgugguuc

SEQ ID NO: 2574670 - RNA, 19 nt, Artificial Sequence
  Description of Artificial Sequence: Synthetic oligonucleotide
gccucaccugucuugcuca

SEQ ID NO: 2574671 - RNA, 19 nt, Artificial Sequence
  Description of Artificial Sequence: Synthetic oligonucleotide
gcugaaggggugggaagcc

SEQ ID NO: 2574672 - RNA, 19 nt, Artificial Sequence
  Description of Artificial Sequence: Synthetic oligonucleotide
ggcaagauggcaacugacu

SEQ ID NO: 2574673 - RNA, 19 nt, Artificial Sequence
  Description of Artificial Sequence: Synthetic oligonucleotide
ucaggacuuuggugauaua

SEQ ID NO: 2574674 - RNA, 19 nt, Artificial Sequence
  Description of Artificial Sequence: Synthetic oligonucleotide
cugucuugcucaccaugaa

SEQ ID NO: 2574675 - RNA, 19 nt, Artificial Sequence
  Description of Artificial Sequence: Synthetic oligonucleotide
ccucggagaaggcugguga

SEQ ID NO: 2574676 - RNA, 19 nt, Artificial Sequence
  Description of Artificial Sequence: Synthetic oligonucleotide
cugucuggaccaggccagc

SEQ ID NO: 2574677 - RNA, 19 nt, Artificial Sequence
  Description of Artificial Sequence: Synthetic oligonucleotide
ccccuucaggacuuuggug

SEQ ID NO: 2574678 - RNA, 19 nt, Artificial Sequence
  Description of Artificial Sequence: Synthetic oligonucleotide
caugcagguguuguagagu

SEQ ID NO: 2574679 - RNA, 19 nt, Artificial Sequence
  Description of Artificial Sequence: Synthetic oligonucleotide
gugcaaacagguaguggcu

SEQ ID NO: 2574680 - RNA, 19 nt, Artificial Sequence
  Description of Artificial Sequence: Synthetic oligonucleotide
ggaaagugucgugguuccc

SEQ ID NO: 2574681 - RNA, 19 nt, Artificial Sequence
  Description of Artificial Sequence: Synthetic oligonucleotide
cugaaggggugggaagcca

SEQ ID NO: 2574682 - RNA, 19 nt, Artificial Sequence
  Description of Artificial Sequence: Synthetic oligonucleotide
gggcuaugccgguaagcuc

SEQ ID NO: 2574683 - RNA, 19 nt, Artificial Sequence
  Description of Artificial Sequence: Synthetic oligonucleotide
gccagcaacgauggcgaug

SEQ ID NO: 2574684 - RNA, 19 nt, Artificial Sequence
  Description of Artificial Sequence: Synthetic oligonucleotide
gguagacacccagugcaaa

SEQ ID NO: 2574685 - RNA, 19 nt, Artificial Sequence
  Description of Artificial Sequence: Synthetic oligonucleotide
cuaugccgguaagcucagc

SEQ ID NO: 2574686 - RNA, 19 nt, Artificial Sequence
  Description of Artificial Sequence: Synthetic oligonucleotide
ccagauccaguugaagaga

SEQ ID NO: 2574687 - RNA, 19 nt, Artificial Sequence
  Description of Artificial Sequence: Synthetic oligonucleotide
aggccagggcuaugccggu

SEQ ID NO: 2574688 - RNA, 19 nt, Artificial Sequence
  Description of Artificial Sequence: Synthetic oligonucleotide
caccuucaugcagguguug

SEQ ID NO: 2574689 - RNA, 19 nt, Artificial Sequence
  Description of Artificial Sequence: Synthetic oligonucleotide
ccucaaagugguagcgcca

SEQ ID NO: 2574690 - RNA, 19 nt, Artificial Sequence
  Description of Artificial Sequence: Synthetic oligonucleotide
cacccagugcaaacaggua

SEQ ID NO: 2574691 - RNA, 19 nt, Artificial Sequence
  Description of Artificial Sequence: Synthetic oligonucleotide
gcuaugccgguaagcucag

SEQ ID NO: 2574692 - RNA, 19 nt, Artificial Sequence
  Description of Artificial Sequence: Synthetic oligonucleotide
gccguggggacaacaagga

SEQ ID NO: 2574693 - RNA, 19 nt, Artificial Sequence
  Description of Artificial Sequence: Synthetic oligonucleotide
ggagaaaaguccagaggau

SEQ ID NO: 2574694 - RNA, 19 nt, Artificial Sequence
  Description of Artificial Sequence: Synthetic oligonucleotide
caaacagguaguggcuggu

SEQ ID NO: 2574695 - RNA, 19 nt, Artificial Sequence
  Description of Artificial Sequence: Synthetic oligonucleotide
gccaggagaggugagcucu

SEQ ID NO: 2574696 - RNA, 19 nt, Artificial Sequence
  Description of Artificial Sequence: Synthetic oligonucleotide
ccaucauaaguagcuuuga

SEQ ID NO: 2574697 - RNA, 19 nt, Artificial Sequence
  Description of Artificial Sequence: Synthetic oligonucleotide
gaauagccguggggacaac

SEQ ID NO: 2574698 - RNA, 19 nt, Artificial Sequence
  Description of Artificial Sequence: Synthetic oligonucleotide
ggacaacaaggaacuccac

SEQ ID NO: 2574699 - RNA, 19 nt, Artificial Sequence
  Description of Artificial Sequence: Synthetic oligonucleotide
ccguaguaaaggacaagcu

SEQ ID NO: 2574700 - RNA, 19 nt, Artificial Sequence
  Description of Artificial Sequence: Synthetic oligonucleotide
gccagggcuaugccgguaa

SEQ ID NO: 2574701 - RNA, 19 nt, Artificial Sequence
  Description of Artificial Sequence: Synthetic oligonucleotide
cccagugcaaacagguagu

SEQ ID NO: 2574702 - RNA, 19 nt, Artificial Sequence
  Description of Artificial Sequence: Synthetic oligonucleotide
ugccucggagaaggcuggu

SEQ ID NO: 2574703 - RNA, 19 nt, Artificial Sequence
  Description of Artificial Sequence: Synthetic oligonucleotide
ccucaccugucuugcucac

SEQ ID NO: 2574704 - RNA, 19 nt, Artificial Sequence
  Description of Artificial Sequence: Synthetic oligonucleotide
ccacccggaaagugucgug

SEQ ID NO: 2574705 - RNA, 19 nt, Artificial Sequence
  Description of Artificial Sequence: Synthetic oligonucleotide
cuucaggacuuuggugaua

SEQ ID NO: 2574706 - RNA, 19 nt, Artificial Sequence
  Description of Artificial Sequence: Synthetic oligonucleotide
ccagaggggugaagucaug

SEQ ID NO: 2574707 - RNA, 19 nt, Artificial Sequence
  Description of Artificial Sequence: Synthetic oligonucleotide
gcuggugaggccagggcua

SEQ ID NO: 2574708 - RNA, 19 nt, Artificial Sequence
  Description of Artificial Sequence: Synthetic oligonucleotide
cagcaacgauggcgaugag

SEQ ID NO: 2574709 - RNA, 19 nt, Artificial Sequence
  Description of Artificial Sequence: Synthetic oligonucleotide
ccagggcuaugccgguaag

SEQ ID NO: 2574710 - RNA, 19 nt, Artificial Sequence
  Description of Artificial Sequence: Synthetic oligonucleotide
gcucaccaugaacaacugu

SEQ ID NO: 2574711 - RNA, 19 nt, Artificial Sequence
  Description of Artificial Sequence: Synthetic oligonucleotide
ccuucaugcagguguugua

SEQ ID NO: 2574712 - RNA, 19 nt, Artificial Sequence
  Description of Artificial Sequence: Synthetic oligonucleotide
agaagcccucaaaguggua

SEQ ID NO: 2574713 - RNA, 19 nt, Artificial Sequence
  Description of Artificial Sequence: Synthetic oligonucleotide
gcucagguucugagcugcc

SEQ ID NO: 2574714 - RNA, 19 nt, Artificial Sequence
  Description of Artificial Sequence: Synthetic oligonucleotide
ggucucugccucaccuguc

SEQ ID NO: 2574715 - RNA, 19 nt, Artificial Sequence
  Description of Artificial Sequence: Synthetic oligonucleotide
gggugggaaggcucugggu

SEQ ID NO: 2574716 - RNA, 19 nt, Artificial Sequence
  Description of Artificial Sequence: Synthetic oligonucleotide
gugucgugguucccaucau

SEQ ID NO: 2574717 - RNA, 19 nt, Artificial Sequence
  Description of Artificial Sequence: Synthetic oligonucleotide
cgguaagcucagcuucuuc

SEQ ID NO: 2574718 - RNA, 19 nt, Artificial Sequence
  Description of Artificial Sequence: Synthetic oligonucleotide
cuguggcaagauggcaacu

SEQ ID NO: 2574719 - RNA, 19 nt, Artificial Sequence
  Description of Artificial Sequence: Synthetic oligonucleotide
ggaccaggccagcaacgau

SEQ ID NO: 2574720 - RNA, 19 nt, Artificial Sequence
  Description of Artificial Sequence: Synthetic oligonucleotide
gccgguaagcucagcuucu

SEQ ID NO: 2574721 - RNA, 19 nt, Artificial Sequence
  Description of Artificial Sequence: Synthetic oligonucleotide
cugggucuucggcagccuu

SEQ ID NO: 2574722 - RNA, 19 nt, Artificial Sequence
  Description of Artificial Sequence: Synthetic oligonucleotide
cuggugaggccagggcuau

SEQ ID NO: 2574723 - RNA, 19 nt, Artificial Sequence
  Description of Artificial Sequence: Synthetic oligonucleotide
caccugucuugcucaccau

SEQ ID NO: 2574724 - RNA, 19 nt, Artificial Sequence
  Description of Artificial Sequence: Synthetic oligonucleotide
cgguagacacccagugcaa

SEQ ID NO: 2574725 - RNA, 19 nt, Artificial Sequence
  Description of Artificial Sequence: Synthetic oligonucleotide
caggagaggugagcucuuu

SEQ ID NO: 2574726 - RNA, 19 nt, Artificial Sequence
  Description of Artificial Sequence: Synthetic oligonucleotide
ggucuucggcagccuuccu

SEQ ID NO: 2574727 - RNA, 19 nt, Artificial Sequence
  Description of Artificial Sequence: Synthetic oligonucleotide
ggccagggcuaugccggua

SEQ ID NO: 2574728 - RNA, 19 nt, Artificial Sequence
  Description of Artificial Sequence: Synthetic oligonucleotide
cccggaaagugucgugguu

SEQ ID NO: 2574729 - RNA, 19 nt, Artificial Sequence
  Description of Artificial Sequence: Synthetic oligonucleotide
ccaggagaggugagcucuu

SEQ ID NO: 2574730 - RNA, 19 nt, Artificial Sequence
  Description of Artificial Sequence: Synthetic oligonucleotide
ccgguaagcucagcuucuu

SEQ ID NO: 2574731 - RNA, 19 nt, Artificial Sequence
  Description of Artificial Sequence: Synthetic oligonucleotide
cgauggcgaugaggucaaa

SEQ ID NO: 2574732 - RNA, 19 nt, Artificial Sequence
  Description of Artificial Sequence: Synthetic oligonucleotide
aaugauguacugcaugugc

SEQ ID NO: 2574733 - RNA, 19 nt, Artificial Sequence
  Description of Artificial Sequence: Synthetic oligonucleotide
aaggaguaacuacauaggc

SEQ ID NO: 2574734 - RNA, 19 nt, Artificial Sequence
  Description of Artificial Sequence: Synthetic oligonucleotide
uuuagaguggucaaagugc

SEQ ID NO: 2574735 - RNA, 19 nt, Artificial Sequence
  Description of Artificial Sequence: Synthetic oligonucleotide
auaaguacgauguggcugc

SEQ ID NO: 2574736 - RNA, 19 nt, Artificial Sequence
  Description of Artificial Sequence: Synthetic oligonucleotide
ucuucuucggaacaaaccc

SEQ ID NO: 2574737 - RNA, 19 nt, Artificial Sequence
  Description of Artificial Sequence: Synthetic oligonucleotide
aguagcagggaugagaagc

SEQ ID NO: 2574738 - RNA, 19 nt, Artificial Sequence
  Description of Artificial Sequence: Synthetic oligonucleotide
ucuuguuugccuccaaugg

SEQ ID NO: 2574739 - RNA, 19 nt, Artificial Sequence
  Description of Artificial Sequence: Synthetic oligonucleotide
uguuaucuuggccauagcc

SEQ ID NO: 2574740 - RNA, 19 nt, Artificial Sequence
  Description of Artificial Sequence: Synthetic oligonucleotide
aagagugacucuuguuugc

SEQ ID NO: 2574741 - RNA, 19 nt, Artificial Sequence
  Description of Artificial Sequence: Synthetic oligonucleotide
uaauucugcaaucaguuuc

SEQ ID NO: 2574742 - RNA, 19 nt, Artificial Sequence
  Description of Artificial Sequence: Synthetic oligonucleotide
aacuaggucuacuucuccg

SEQ ID NO: 2574743 - RNA, 19 nt, Artificial Sequence
  Description of Artificial Sequence: Synthetic oligonucleotide
uaauguacagcucuuuaga

SEQ ID NO: 2574744 - RNA, 19 nt, Artificial Sequence
  Description of Artificial Sequence: Synthetic oligonucleotide
auaauguacagcucuuuag

SEQ ID NO: 2574745 - RNA, 19 nt, Artificial Sequence
  Description of Artificial Sequence: Synthetic oligonucleotide
agggauuguacuuuggaag

SEQ ID NO: 2574746 - RNA, 19 nt, Artificial Sequence
  Description of Artificial Sequence: Synthetic oligonucleotide
aaaggaguaacuacauagg

SEQ ID NO: 2574747 - RNA, 19 nt, Artificial Sequence
  Description of Artificial Sequence: Synthetic oligonucleotide
uuagaguggucaaagugcc

SEQ ID NO: 2574748 - RNA, 19 nt, Artificial Sequence
  Description of Artificial Sequence: Synthetic oligonucleotide
auaggcuccacuuuccauc

SEQ ID NO: 2574749 - RNA, 19 nt, Artificial Sequence
  Description of Artificial Sequence: Synthetic oligonucleotide
aggauauucugccagcauc

SEQ ID NO: 2574750 - RNA, 19 nt, Artificial Sequence
  Description of Artificial Sequence: Synthetic oligonucleotide
uuaaccaggauggugauuc

SEQ ID NO: 2574751 - RNA, 19 nt, Artificial Sequence
  Description of Artificial Sequence: Synthetic oligonucleotide
agaguggucaaagugcccc

SEQ ID NO: 2574752 - RNA, 19 nt, Artificial Sequence
  Description of Artificial Sequence: Synthetic oligonucleotide
uucuucuucggaacaaacc

SEQ ID NO: 2574753 - RNA, 19 nt, Artificial Sequence
  Description of Artificial Sequence: Synthetic oligonucleotide
ugacucgagacucuaauuc

SEQ ID NO: 2574754 - RNA, 19 nt, Artificial Sequence
  Description of Artificial Sequence: Synthetic oligonucleotide
gaagagugacucuuguuug

SEQ ID NO: 2574755 - RNA, 19 nt, Artificial Sequence
  Description of Artificial Sequence: Synthetic oligonucleotide
  modified_base (3)..(3): a, c, u, g, unknown or other
uunugggcuguucucagga

SEQ ID NO: 2574756 - RNA, 19 nt, Artificial Sequence
  Description of Artificial Sequence: Synthetic oligonucleotide
uguacuuuggaagucugca

SEQ ID NO: 2574757 - RNA, 19 nt, Artificial Sequence
  Description of Artificial Sequence: Synthetic oligonucleotide
agcaauggaaaggaguaac

SEQ ID NO: 2574758 - RNA, 19 nt, Artificial Sequence
  Description of Artificial Sequence: Synthetic oligonucleotide
aacuacauaggcuccacuu

SEQ ID NO: 2574759 - RNA, 19 nt, Artificial Sequence
  Description of Artificial Sequence: Synthetic oligonucleotide
cuccauacuuuucaguucc

SEQ ID NO: 2574760 - RNA, 19 nt, Artificial Sequence
  Description of Artificial Sequence: Synthetic oligonucleotide
cuuguuugccuccaauggg

SEQ ID NO: 2574761 - RNA, 19 nt, Artificial Sequence
  Description of Artificial Sequence: Synthetic oligonucleotide
  modified_base (14)..(14): a, c, u, g, unknown or other
cagugauucuguunugggc

SEQ ID NO: 2574762 - RNA, 19 nt, Artificial Sequence
  Description of Artificial Sequence: Synthetic oligonucleotide
uguacuccauacuuuucag

SEQ ID NO: 2574763 - RNA, 19 nt, Artificial Sequence
  Description of Artificial Sequence: Synthetic oligonucleotide
ucgaggaggauauucugcc

SEQ ID NO: 2574764 - RNA, 19 nt, Artificial Sequence
  Description of Artificial Sequence: Synthetic oligonucleotide
gaggaggauauucugccag

SEQ ID NO: 2574765 - RNA, 19 nt, Artificial Sequence
  Description of Artificial Sequence: Synthetic oligonucleotide
ggaguaacuacauaggcuc

SEQ ID NO: 2574766 - RNA, 19 nt, Artificial Sequence
  Description of Artificial Sequence: Synthetic oligonucleotide
aguuccauuaggucugcag

SEQ ID NO: 2574767 - RNA, 19 nt, Artificial Sequence
  Description of Artificial Sequence: Synthetic oligonucleotide
uacuuuggaagucugcauc

SEQ ID NO: 2574768 - RNA, 19 nt, Artificial Sequence
  Description of Artificial Sequence: Synthetic oligonucleotide
uuccauuaggucugcaggc

SEQ ID NO: 2574769 - RNA, 19 nt, Artificial Sequence
  Description of Artificial Sequence: Synthetic oligonucleotide
aauucugcaaucaguuuca

SEQ ID NO: 2574770 - RNA, 19 nt, Artificial Sequence
  Description of Artificial Sequence: Synthetic oligonucleotide
uuguuugccuccaaugggu

SEQ ID NO: 2574771 - RNA, 19 nt, Artificial Sequence
  Description of Artificial Sequence: Synthetic oligonucleotide
aggcauaauguacagcucu

SEQ ID NO: 2574772 - RNA, 19 nt, Artificial Sequence
  Description of Artificial Sequence: Synthetic oligonucleotide
ugugcucguucgaagagug

SEQ ID NO: 2574773 - RNA, 19 nt, Artificial Sequence
  Description of Artificial Sequence: Synthetic oligonucleotide
uccacuuuccaucgaggag

SEQ ID NO: 2574774 - RNA, 19 nt, Artificial Sequence
  Description of Artificial Sequence: Synthetic oligonucleotide
agcaucuugggccucucgg

SEQ ID NO: 2574775 - RNA, 19 nt, Artificial Sequence
  Description of Artificial Sequence: Synthetic oligonucleotide
aaaagcaguagcagggaug

SEQ ID NO: 2574776 - RNA, 19 nt, Artificial Sequence
  Description of Artificial Sequence: Synthetic oligonucleotide
uccauaccagguaaugaug

SEQ ID NO: 2574777 - RNA, 19 nt, Artificial Sequence
  Description of Artificial Sequence: Synthetic oligonucleotide
gaaaagagcuguccucugc

SEQ ID NO: 2574778 - RNA, 19 nt, Artificial Sequence
  Description of Artificial Sequence: Synthetic oligonucleotide
aggaggauauucugccagc

SEQ ID NO: 2574779 - RNA, 19 nt, Artificial Sequence
  Description of Artificial Sequence: Synthetic oligonucleotide
cauaaguacgauguggcug

SEQ ID NO: 2574780 - RNA, 19 nt, Artificial Sequence
  Description of Artificial Sequence: Synthetic oligonucleotide
gauguggcugcacacaguc

SEQ ID NO: 2574781 - RNA, 19 nt, Artificial Sequence
  Description of Artificial Sequence: Synthetic oligonucleotide
uucggaacaaacccucugu

SEQ ID NO: 2574782 - RNA, 19 nt, Artificial Sequence
  Description of Artificial Sequence: Synthetic oligonucleotide
  modified_base (8)..(8): a, c, u, g, unknown or other
uucuguunugggcuguucu

SEQ ID NO: 2574783 - RNA, 19 nt, Artificial Sequence
  Description of Artificial Sequence: Synthetic oligonucleotide
gauggugauucccaaguca

SEQ ID NO: 2574784 - RNA, 19 nt, Artificial Sequence
  Description of Artificial Sequence: Synthetic oligonucleotide
  modified_base (19)..(19): a, c, u, g, unknown or other
aaugccagugauucuguun

SEQ ID NO: 2574785 - RNA, 19 nt, Artificial Sequence
  Description of Artificial Sequence: Synthetic oligonucleotide
ucuguuaaccaggauggug

SEQ ID NO: 2574786 - RNA, 19 nt, Artificial Sequence
  Description of Artificial Sequence: Synthetic oligonucleotide
aguacgauguggcugcaca

SEQ ID NO: 2574787 - RNA, 19 nt, Artificial Sequence
  Description of Artificial Sequence: Synthetic oligonucleotide
  modified_base (5)..(5): a, c, u, g, unknown or other
uguunugggcuguucucag

SEQ ID NO: 2574788 - RNA, 19 nt, Artificial Sequence
  Description of Artificial Sequence: Synthetic oligonucleotide
acucuaauucugcaaucag

SEQ ID NO: 2574789 - RNA, 19 nt, Artificial Sequence
  Description of Artificial Sequence: Synthetic oligonucleotide
  modified_base (7)..(7): a, c, u, g, unknown or other
ucuguunugggcuguucuc

SEQ ID NO: 2574790 - RNA, 19 nt, Artificial Sequence
  Description of Artificial Sequence: Synthetic oligonucleotide
agucagagcaauggaaagg

SEQ ID NO: 2574791 - RNA, 19 nt, Artificial Sequence
  Description of Artificial Sequence: Synthetic oligonucleotide
aucaaugaaaauggggucu

SEQ ID NO: 2574792 - RNA, 19 nt, Artificial Sequence
  Description of Artificial Sequence: Synthetic oligonucleotide
cuguuaaccaggaugguga

SEQ ID NO: 2574793 - RNA, 19 nt, Artificial Sequence
  Description of Artificial Sequence: Synthetic oligonucleotide
ccucuguuaaccaggaugg

SEQ ID NO: 2574794 - RNA, 19 nt, Artificial Sequence
  Description of Artificial Sequence: Synthetic oligonucleotide
aucgaggaggauauucugc

SEQ ID NO: 2574795 - RNA, 19 nt, Artificial Sequence
  Description of Artificial Sequence: Synthetic oligonucleotide
cuguucucaggaacaaagg

SEQ ID NO: 2574796 - RNA, 19 nt, Artificial Sequence
  Description of Artificial Sequence: Synthetic oligonucleotide
acuuuggaagucugcauca

SEQ ID NO: 2574797 - RNA, 19 nt, Artificial Sequence
  Description of Artificial Sequence: Synthetic oligonucleotide
ucuacuucuccgagaaccu

SEQ ID NO: 2574798 - RNA, 19 nt, Artificial Sequence
  Description of Artificial Sequence: Synthetic oligonucleotide
gguaaugauguacugcaug

SEQ ID NO: 2574799 - RNA, 19 nt, Artificial Sequence
  Description of Artificial Sequence: Synthetic oligonucleotide
agagugacucuuguuugcc

SEQ ID NO: 2574800 - RNA, 19 nt, Artificial Sequence
  Description of Artificial Sequence: Synthetic oligonucleotide
  modified_base (18)..(18): a, c, u, g, unknown or other
augccagugauucuguunu

SEQ ID NO: 2574801 - RNA, 19 nt, Artificial Sequence
  Description of Artificial Sequence: Synthetic oligonucleotide
agacucuaauucugcaauc

SEQ ID NO: 2574802 - RNA, 19 nt, Artificial Sequence
  Description of Artificial Sequence: Synthetic oligonucleotide
accacuggagaaaagagcu

SEQ ID NO: 2574803 - RNA, 19 nt, Artificial Sequence
  Description of Artificial Sequence: Synthetic oligonucleotide
acuggccuguacuccauac

SEQ ID NO: 2574804 - RNA, 19 nt, Artificial Sequence
  Description of Artificial Sequence: Synthetic oligonucleotide
ucaaugaaaauggggucug

SEQ ID NO: 2574805 - RNA, 19 nt, Artificial Sequence
  Description of Artificial Sequence: Synthetic oligonucleotide
auggaaaggaguaacuaca

SEQ ID NO: 2574806 - RNA, 19 nt, Artificial Sequence
  Description of Artificial Sequence: Synthetic oligonucleotide
cacuaugccaacuaggucu

SEQ ID NO: 2574807 - RNA, 19 nt, Artificial Sequence
  Description of Artificial Sequence: Synthetic oligonucleotide
cuuccauuuccgacgcugg

SEQ ID NO: 2574808 - RNA, 19 nt, Artificial Sequence
  Description of Artificial Sequence: Synthetic oligonucleotide
  modified_base (4)..(4): a, c, u, g, unknown or other
guunugggcuguucucagg

SEQ ID NO: 2574809 - RNA, 19 nt, Artificial Sequence
  Description of Artificial Sequence: Synthetic oligonucleotide
cucgagacucuaauucugc

SEQ ID NO: 2574810 - RNA, 19 nt, Artificial Sequence
  Description of Artificial Sequence: Synthetic oligonucleotide
aaccuggccuuucugucug

SEQ ID NO: 2574811 - RNA, 19 nt, Artificial Sequence
  Description of Artificial Sequence: Synthetic oligonucleotide
acuaggucuacuucuccga

SEQ ID NO: 2574812 - RNA, 19 nt, Artificial Sequence
  Description of Artificial Sequence: Synthetic oligonucleotide
uggaaaggaguaacuacau

SEQ ID NO: 2574813 - RNA, 19 nt, Artificial Sequence
  Description of Artificial Sequence: Synthetic oligonucleotide
gguaaugccagugauucug

SEQ ID NO: 2574814 - RNA, 19 nt, Artificial Sequence
  Description of Artificial Sequence: Synthetic oligonucleotide
auggugauucccaagucag

SEQ ID NO: 2574815 - RNA, 19 nt, Artificial Sequence
  Description of Artificial Sequence: Synthetic oligonucleotide
guaaugauguacugcaugu

SEQ ID NO: 2574816 - RNA, 19 nt, Artificial Sequence
  Description of Artificial Sequence: Synthetic oligonucleotide
ucugcuuuaguggcggcug

SEQ ID NO: 2574817 - RNA, 19 nt, Artificial Sequence
  Description of Artificial Sequence: Synthetic oligonucleotide
acgauguggcugcacacag

SEQ ID NO: 2574818 - RNA, 19 nt, Artificial Sequence
  Description of Artificial Sequence: Synthetic oligonucleotide
uuuggaagucugcaucaau

SEQ ID NO: 2574819 - RNA, 19 nt, Artificial Sequence
  Description of Artificial Sequence: Synthetic oligonucleotide
aaucaguuucagcuuccau

SEQ ID NO: 2574820 - RNA, 19 nt, Artificial Sequence
  Description of Artificial Sequence: Synthetic oligonucleotide
ugcucguucgaagagugac

SEQ ID NO: 2574821 - RNA, 19 nt, Artificial Sequence
  Description of Artificial Sequence: Synthetic oligonucleotide
uccucugcuuuaguggcgg

SEQ ID NO: 2574822 - RNA, 19 nt, Artificial Sequence
  Description of Artificial Sequence: Synthetic oligonucleotide
uccgaggcauaauguacag

SEQ ID NO: 2574823 - RNA, 19 nt, Artificial Sequence
  Description of Artificial Sequence: Synthetic oligonucleotide
ggugauucccaagucagag

SEQ ID NO: 2574824 - RNA, 19 nt, Artificial Sequence
  Description of Artificial Sequence: Synthetic oligonucleotide
cuggagaaaagagcugucc

SEQ ID NO: 2574825 - RNA, 19 nt, Artificial Sequence
  Description of Artificial Sequence: Synthetic oligonucleotide
auuaggucugcaggcagag

SEQ ID NO: 2574826 - RNA, 19 nt, Artificial Sequence
  Description of Artificial Sequence: Synthetic oligonucleotide
aggaguaacuacauaggcu

SEQ ID NO: 2574827 - RNA, 19 nt, Artificial Sequence
  Description of Artificial Sequence: Synthetic oligonucleotide
cugcaucaaugaaaauggg

SEQ ID NO: 2574828 - RNA, 19 nt, Artificial Sequence
  Description of Artificial Sequence: Synthetic oligonucleotide
ucgagacucuaauucugca

SEQ ID NO: 2574829 - RNA, 19 nt, Artificial Sequence
  Description of Artificial Sequence: Synthetic oligonucleotide
uggccuguacuccauacuu

SEQ ID NO: 2574830 - RNA, 19 nt, Artificial Sequence
  Description of Artificial Sequence: Synthetic oligonucleotide
caugugcucguucgaagag

SEQ ID NO: 2574831 - RNA, 19 nt, Artificial Sequence
  Description of Artificial Sequence: Synthetic oligonucleotide
acaaagggcuuccugguuu

SEQ ID NO: 2574832 - RNA, 19 nt, Artificial Sequence
  Description of Artificial Sequence: Synthetic oligonucleotide
ucacuaugccaacuagguc

SEQ ID NO: 2574833 - RNA, 19 nt, Artificial Sequence
  Description of Artificial Sequence: Synthetic oligonucleotide
uuccugguuucugucagcc

SEQ ID NO: 2574834 - RNA, 19 nt, Artificial Sequence
  Description of Artificial Sequence: Synthetic oligonucleotide
cuaggucuacuucuccgag

SEQ ID NO: 2574835 - RNA, 19 nt, Artificial Sequence
  Description of Artificial Sequence: Synthetic oligonucleotide
cuguacuccauacuuuuca

SEQ ID NO: 2574836 - RNA, 19 nt, Artificial Sequence
  Description of Artificial Sequence: Synthetic oligonucleotide
uccaucgaggaggauauuc

SEQ ID NO: 2574837 - RNA, 19 nt, Artificial Sequence
  Description of Artificial Sequence: Synthetic oligonucleotide
caucgaggaggauauucug

SEQ ID NO: 2574838 - RNA, 19 nt, Artificial Sequence
  Description of Artificial Sequence: Synthetic oligonucleotide
accagguaaugauguacug

SEQ ID NO: 2574839 - RNA, 19 nt, Artificial Sequence
  Description of Artificial Sequence: Synthetic oligonucleotide
gagacucuaauucugcaau

SEQ ID NO: 2574840 - RNA, 19 nt, Artificial Sequence
  Description of Artificial Sequence: Synthetic oligonucleotide
aguaacuacauaggcucca

SEQ ID NO: 2574841 - RNA, 19 nt, Artificial Sequence
  Description of Artificial Sequence: Synthetic oligonucleotide
gugauucccaagucagagc

SEQ ID NO: 2574842 - RNA, 19 nt, Artificial Sequence
  Description of Artificial Sequence: Synthetic oligonucleotide
uaacuacauaggcuccacu

SEQ ID NO: 2574843 - RNA, 19 nt, Artificial Sequence
  Description of Artificial Sequence: Synthetic oligonucleotide
cuucggaacaaacccucug

SEQ ID NO: 2574844 - RNA, 19 nt, Artificial Sequence
  Description of Artificial Sequence: Synthetic oligonucleotide
guuugccuccaaugggucc

SEQ ID NO: 2574845 - RNA, 19 nt, Artificial Sequence
  Description of Artificial Sequence: Synthetic oligonucleotide
  modified_base (16)..(16): a, c, u, g, unknown or other
gccagugauucuguunugg

SEQ ID NO: 2574846 - RNA, 19 nt, Artificial Sequence
  Description of Artificial Sequence: Synthetic oligonucleotide
uacgauguggcugcacaca

SEQ ID NO: 2574847 - RNA, 19 nt, Artificial Sequence
  Description of Artificial Sequence: Synthetic oligonucleotide
cucacuaugccaacuaggu

SEQ ID NO: 2574848 - RNA, 19 nt, Artificial Sequence
  Description of Artificial Sequence: Synthetic oligonucleotide
gaguaacuacauaggcucc

SEQ ID NO: 2574849 - RNA, 19 nt, Artificial Sequence
  Description of Artificial Sequence: Synthetic oligonucleotide
cucagccaugacucgagac

SEQ ID NO: 2574850 - RNA, 19 nt, Artificial Sequence
  Description of Artificial Sequence: Synthetic oligonucleotide
aaguacgauguggcugcac

SEQ ID NO: 2574851 - RNA, 19 nt, Artificial Sequence
  Description of Artificial Sequence: Synthetic oligonucleotide
uuccauuuccgacgcugga

SEQ ID NO: 2574852 - RNA, 19 nt, Artificial Sequence
  Description of Artificial Sequence: Synthetic oligonucleotide
aguccauaccagguaauga

SEQ ID NO: 2574853 - RNA, 19 nt, Artificial Sequence
  Description of Artificial Sequence: Synthetic oligonucleotide
uggugauucccaagucaga

SEQ ID NO: 2574854 - RNA, 19 nt, Artificial Sequence
  Description of Artificial Sequence: Synthetic oligonucleotide
uuuccgacgcuggaccugc

SEQ ID NO: 2574855 - RNA, 19 nt, Artificial Sequence
  Description of Artificial Sequence: Synthetic oligonucleotide
gucugcgccuguuaucuug

SEQ ID NO: 2574856 - RNA, 19 nt, Artificial Sequence
  Description of Artificial Sequence: Synthetic oligonucleotide
caacuaggucuacuucucc

SEQ ID NO: 2574857 - RNA, 19 nt, Artificial Sequence
  Description of Artificial Sequence: Synthetic oligonucleotide
uccauuuccgacgcuggac

SEQ ID NO: 2574858 - RNA, 19 nt, Artificial Sequence
  Description of Artificial Sequence: Synthetic oligonucleotide
agcucuuuagaguggucaa

SEQ ID NO: 2574859 - RNA, 19 nt, Artificial Sequence
  Description of Artificial Sequence: Synthetic oligonucleotide
ucggaacaaacccucuguu

SEQ ID NO: 2574860 - RNA, 19 nt, Artificial Sequence
  Description of Artificial Sequence: Synthetic oligonucleotide
cauaauguacagcucuuua

SEQ ID NO: 2574861 - RNA, 19 nt, Artificial Sequence
  Description of Artificial Sequence: Synthetic oligonucleotide
uguuaaccaggauggugau

SEQ ID NO: 2574862 - RNA, 19 nt, Artificial Sequence
  Description of Artificial Sequence: Synthetic oligonucleotide
gacucgagacucuaauucu

SEQ ID NO: 2574863 - RNA, 19 nt, Artificial Sequence
  Description of Artificial Sequence: Synthetic oligonucleotide
auuguacuuuggaagucug

SEQ ID NO: 2574864 - RNA, 19 nt, Artificial Sequence
  Description of Artificial Sequence: Synthetic oligonucleotide
ugguccgaggcauaaugua

SEQ ID NO: 2574865 - RNA, 19 nt, Artificial Sequence
  Description of Artificial Sequence: Synthetic oligonucleotide
acauaggcuccacuuucca

SEQ ID NO: 2574866 - RNA, 19 nt, Artificial Sequence
  Description of Artificial Sequence: Synthetic oligonucleotide
cucguucgaagagugacuc

SEQ ID NO: 2574867 - RNA, 19 nt, Artificial Sequence
  Description of Artificial Sequence: Synthetic oligonucleotide
ucuccgagaaccuggccuu

SEQ ID NO: 2574868 - RNA, 19 nt, Artificial Sequence
  Description of Artificial Sequence: Synthetic oligonucleotide
agggcuuccugguuucugu

SEQ ID NO: 2574869 - RNA, 19 nt, Artificial Sequence
  Description of Artificial Sequence: Synthetic oligonucleotide
gcaucaaugaaaauggggu

SEQ ID NO: 2574870 - RNA, 19 nt, Artificial Sequence
  Description of Artificial Sequence: Synthetic oligonucleotide
gauuguacuuuggaagucu

SEQ ID NO: 2574871 - RNA, 19 nt, Artificial Sequence
  Description of Artificial Sequence: Synthetic oligonucleotide
caggauggugauucccaag

SEQ ID NO: 2574872 - RNA, 19 nt, Artificial Sequence
  Description of Artificial Sequence: Synthetic oligonucleotide
cuucacuggccuguacucc

SEQ ID NO: 2574873 - RNA, 19 nt, Artificial Sequence
  Description of Artificial Sequence: Synthetic oligonucleotide
  modified_base (9)..(9): a, c, u, g, unknown or other
auucuguunugggcuguuc

SEQ ID NO: 2574874 - RNA, 19 nt, Artificial Sequence
  Description of Artificial Sequence: Synthetic oligonucleotide
gcaucuugggccucucggg

SEQ ID NO: 2574875 - RNA, 19 nt, Artificial Sequence
  Description of Artificial Sequence: Synthetic oligonucleotide
acuggagaaaagagcuguc

SEQ ID NO: 2574876 - RNA, 19 nt, Artificial Sequence
  Description of Artificial Sequence: Synthetic oligonucleotide
gaacaaagggcuuccuggu

SEQ ID NO: 2574877 - RNA, 19 nt, Artificial Sequence
  Description of Artificial Sequence: Synthetic oligonucleotide
uccauacuuuucaguucca

SEQ ID NO: 2574878 - RNA, 19 nt, Artificial Sequence
  Description of Artificial Sequence: Synthetic oligonucleotide
acucgagacucuaauucug

SEQ ID NO: 2574879 - RNA, 19 nt, Artificial Sequence
  Description of Artificial Sequence: Synthetic oligonucleotide
aguccccaagccaaaagca

SEQ ID NO: 2574880 - RNA, 19 nt, Artificial Sequence
  Description of Artificial Sequence: Synthetic oligonucleotide
cuuuccaucgaggaggaua

SEQ ID NO: 2574881 - RNA, 19 nt, Artificial Sequence
  Description of Artificial Sequence: Synthetic oligonucleotide
augacucgagacucuaauu

SEQ ID NO: 2574882 - RNA, 19 nt, Artificial Sequence
  Description of Artificial Sequence: Synthetic oligonucleotide
guccccaagccaaaagcag

SEQ ID NO: 2574883 - RNA, 19 nt, Artificial Sequence
  Description of Artificial Sequence: Synthetic oligonucleotide
acucuuguuugccuccaau

SEQ ID NO: 2574884 - RNA, 19 nt, Artificial Sequence
  Description of Artificial Sequence: Synthetic oligonucleotide
caaagggcuuccugguuuc

SEQ ID NO: 2574885 - RNA, 19 nt, Artificial Sequence
  Description of Artificial Sequence: Synthetic oligonucleotide
uaaccaggauggugauucc

SEQ ID NO: 2574886 - RNA, 19 nt, Artificial Sequence
  Description of Artificial Sequence: Synthetic oligonucleotide
uucugucuggucucaggau

SEQ ID NO: 2574887 - RNA, 19 nt, Artificial Sequence
  Description of Artificial Sequence: Synthetic oligonucleotide
acugcaugugcucguucga

SEQ ID NO: 2574888 - RNA, 19 nt, Artificial Sequence
  Description of Artificial Sequence: Synthetic oligonucleotide
agagcuguccucugcuuua

SEQ ID NO: 2574889 - RNA, 19 nt, Artificial Sequence
  Description of Artificial Sequence: Synthetic oligonucleotide
  modified_base (2)..(2): a, c, u, g, unknown or other
unugggcuguucucaggaa

SEQ ID NO: 2574890 - RNA, 19 nt, Artificial Sequence
  Description of Artificial Sequence: Synthetic oligonucleotide
ccauuuccgacgcuggacc

SEQ ID NO: 2574891 - RNA, 19 nt, Artificial Sequence
  Description of Artificial Sequence: Synthetic oligonucleotide
guacgauguggcugcacac

SEQ ID NO: 2574892 - RNA, 19 nt, Artificial Sequence
  Description of Artificial Sequence: Synthetic oligonucleotide
ucccgguaaugccagugau

SEQ ID NO: 2574893 - RNA, 19 nt, Artificial Sequence
  Description of Artificial Sequence: Synthetic oligonucleotide
cuccaggucccgguaaugc

SEQ ID NO: 2574894 - RNA, 19 nt, Artificial Sequence
  Description of Artificial Sequence: Synthetic oligonucleotide
cagagcaauggaaaggagu

SEQ ID NO: 2574895 - RNA, 19 nt, Artificial Sequence
  Description of Artificial Sequence: Synthetic oligonucleotide
ucagccucacuaugccaac

SEQ ID NO: 2574896 - RNA, 19 nt, Artificial Sequence
  Description of Artificial Sequence: Synthetic oligonucleotide
ucgaagagugacucuuguu

SEQ ID NO: 2574897 - RNA, 19 nt, Artificial Sequence
  Description of Artificial Sequence: Synthetic oligonucleotide
cauuaggucugcaggcaga

SEQ ID NO: 2574898 - RNA, 19 nt, Artificial Sequence
  Description of Artificial Sequence: Synthetic oligonucleotide
uggggucugcgccuguuau

SEQ ID NO: 2574899 - RNA, 19 nt, Artificial Sequence
  Description of Artificial Sequence: Synthetic oligonucleotide
guccauaccagguaaugau

SEQ ID NO: 2574900 - RNA, 19 nt, Artificial Sequence
  Description of Artificial Sequence: Synthetic oligonucleotide
aacccucuguuaaccagga

SEQ ID NO: 2574901 - RNA, 19 nt, Artificial Sequence
  Description of Artificial Sequence: Synthetic oligonucleotide
ccuguuaucuuggccauag

SEQ ID NO: 2574902 - RNA, 19 nt, Artificial Sequence
  Description of Artificial Sequence: Synthetic oligonucleotide
ccagguaaugauguacugc

SEQ ID NO: 2574903 - RNA, 19 nt, Artificial Sequence
  Description of Artificial Sequence: Synthetic oligonucleotide
ggcuccacuuuccaucgag

SEQ ID NO: 2574904 - RNA, 19 nt, Artificial Sequence
  Description of Artificial Sequence: Synthetic oligonucleotide
caaugaaaauggggucugc

SEQ ID NO: 2574905 - RNA, 19 nt, Artificial Sequence
  Description of Artificial Sequence: Synthetic oligonucleotide
caguccauaccagguaaug

SEQ ID NO: 2574906 - RNA, 19 nt, Artificial Sequence
  Description of Artificial Sequence: Synthetic oligonucleotide
ccugccaaguccccaagcc

SEQ ID NO: 2574907 - RNA, 19 nt, Artificial Sequence
  Description of Artificial Sequence: Synthetic oligonucleotide
cacaguccauaccagguaa

SEQ ID NO: 2574908 - RNA, 19 nt, Artificial Sequence
  Description of Artificial Sequence: Synthetic oligonucleotide
cagccaugacucgagacuc

SEQ ID NO: 2574909 - RNA, 19 nt, Artificial Sequence
  Description of Artificial Sequence: Synthetic oligonucleotide
ucguucgaagagugacucu

SEQ ID NO: 2574910 - RNA, 19 nt, Artificial Sequence
  Description of Artificial Sequence: Synthetic oligonucleotide
cagcucuuuagagugguca

SEQ ID NO: 2574911 - RNA, 19 nt, Artificial Sequence
  Description of Artificial Sequence: Synthetic oligonucleotide
  modified_base (6)..(6): a, c, u, g, unknown or other
cuguunugggcuguucuca

SEQ ID NO: 2574912 - RNA, 19 nt, Artificial Sequence
  Description of Artificial Sequence: Synthetic oligonucleotide
gggauuguacuuuggaagu

SEQ ID NO: 2574913 - RNA, 19 nt, Artificial Sequence
  Description of Artificial Sequence: Synthetic oligonucleotide
ccgguaaugccagugauuc

SEQ ID NO: 2574914 - RNA, 19 nt, Artificial Sequence
  Description of Artificial Sequence: Synthetic oligonucleotide
uccgacgcuggaccugcca

SEQ ID NO: 2574915 - RNA, 19 nt, Artificial Sequence
  Description of Artificial Sequence: Synthetic oligonucleotide
gaggcauaauguacagcuc

SEQ ID NO: 2574916 - RNA, 19 nt, Artificial Sequence
  Description of Artificial Sequence: Synthetic oligonucleotide
auuuccgacgcuggaccug

SEQ ID NO: 2574917 - RNA, 19 nt, Artificial Sequence
  Description of Artificial Sequence: Synthetic oligonucleotide
guccgaggcauaauguaca

SEQ ID NO: 2574918 - RNA, 19 nt, Artificial Sequence
  Description of Artificial Sequence: Synthetic oligonucleotide
cacuuucuucuucggaaca

SEQ ID NO: 2574919 - RNA, 19 nt, Artificial Sequence
  Description of Artificial Sequence: Synthetic oligonucleotide
caggcagagggaugggcuc

SEQ ID NO: 2574920 - RNA, 19 nt, Artificial Sequence
  Description of Artificial Sequence: Synthetic oligonucleotide
cugcuuuaguggcggcugc

SEQ ID NO: 2574921 - RNA, 19 nt, Artificial Sequence
  Description of Artificial Sequence: Synthetic oligonucleotide
augugcucguucgaagagu

SEQ ID NO: 2574922 - RNA, 19 nt, Artificial Sequence
  Description of Artificial Sequence: Synthetic oligonucleotide
gaccugccaaguccccaag

SEQ ID NO: 2574923 - RNA, 19 nt, Artificial Sequence
  Description of Artificial Sequence: Synthetic oligonucleotide
agccucacuaugccaacua

SEQ ID NO: 2574924 - RNA, 19 nt, Artificial Sequence
  Description of Artificial Sequence: Synthetic oligonucleotide
cuguuaucuuggccauagc

SEQ ID NO: 2574925 - RNA, 19 nt, Artificial Sequence
  Description of Artificial Sequence: Synthetic oligonucleotide
ggaagucugcaucaaugaa

SEQ ID NO: 2574926 - RNA, 19 nt, Artificial Sequence
  Description of Artificial Sequence: Synthetic oligonucleotide
gguccgaggcauaauguac

SEQ ID NO: 2574927 - RNA, 19 nt, Artificial Sequence
  Description of Artificial Sequence: Synthetic oligonucleotide
uccugguuucugucagccu

SEQ ID NO: 2574928 - RNA, 19 nt, Artificial Sequence
  Description of Artificial Sequence: Synthetic oligonucleotide
ccaacuaggucuacuucuc

SEQ ID NO: 2574929 - RNA, 19 nt, Artificial Sequence
  Description of Artificial Sequence: Synthetic oligonucleotide
acgcuggaccugccaaguc

SEQ ID NO: 2574930 - RNA, 19 nt, Artificial Sequence
  Description of Artificial Sequence: Synthetic oligonucleotide
gcaugugcucguucgaaga

SEQ ID NO: 2574931 - RNA, 19 nt, Artificial Sequence
  Description of Artificial Sequence: Synthetic oligonucleotide
caguagcagggaugagaag

SEQ ID NO: 2574932 - RNA, 19 nt, Artificial Sequence
  Description of Artificial Sequence: Synthetic oligonucleotide
gccucacuaugccaacuag

SEQ ID NO: 2574933 - RNA, 19 nt, Artificial Sequence
  Description of Artificial Sequence: Synthetic oligonucleotide
uggaccugccaagucccca

SEQ ID NO: 2574934 - RNA, 19 nt, Artificial Sequence
  Description of Artificial Sequence: Synthetic oligonucleotide
gccaacuaggucuacuucu

SEQ ID NO: 2574935 - RNA, 19 nt, Artificial Sequence
  Description of Artificial Sequence: Synthetic oligonucleotide
ugcuuuaguggcggcugcu

SEQ ID NO: 2574936 - RNA, 19 nt, Artificial Sequence
  Description of Artificial Sequence: Synthetic oligonucleotide
caugacucgagacucuaau

SEQ ID NO: 2574937 - RNA, 19 nt, Artificial Sequence
  Description of Artificial Sequence: Synthetic oligonucleotide
gcagggaugagaagcagga

SEQ ID NO: 2574938 - RNA, 19 nt, Artificial Sequence
  Description of Artificial Sequence: Synthetic oligonucleotide
guacuccauacuuuucagu

SEQ ID NO: 2574939 - RNA, 19 nt, Artificial Sequence
  Description of Artificial Sequence: Synthetic oligonucleotide
cacuuuccaucgaggagga

SEQ ID NO: 2574940 - RNA, 19 nt, Artificial Sequence
  Description of Artificial Sequence: Synthetic oligonucleotide
acuaugccaacuaggucua

SEQ ID NO: 2574941 - RNA, 19 nt, Artificial Sequence
  Description of Artificial Sequence: Synthetic oligonucleotide
ccauuaggucugcaggcag

SEQ ID NO: 2574942 - RNA, 19 nt, Artificial Sequence
  Description of Artificial Sequence: Synthetic oligonucleotide
cgaggcauaauguacagcu

SEQ ID NO: 2574943 - RNA, 19 nt, Artificial Sequence
  Description of Artificial Sequence: Synthetic oligonucleotide
ggauauucugccagcaucu

SEQ ID NO: 2574944 - RNA, 19 nt, Artificial Sequence
  Description of Artificial Sequence: Synthetic oligonucleotide
gucccgguaaugccaguga

SEQ ID NO: 2574945 - RNA, 19 nt, Artificial Sequence
  Description of Artificial Sequence: Synthetic oligonucleotide
cuggaccugccaagucccc

SEQ ID NO: 2574946 - RNA, 19 nt, Artificial Sequence
  Description of Artificial Sequence: Synthetic oligonucleotide
ggauggugauucccaaguc

SEQ ID NO: 2574947 - RNA, 19 nt, Artificial Sequence
  Description of Artificial Sequence: Synthetic oligonucleotide
gcaguagcagggaugagaa

SEQ ID NO: 2574948 - RNA, 19 nt, Artificial Sequence
  Description of Artificial Sequence: Synthetic oligonucleotide
gagugacucuuguuugccu

SEQ ID NO: 2574949 - RNA, 19 nt, Artificial Sequence
  Description of Artificial Sequence: Synthetic oligonucleotide
ggaaaggaguaacuacaua

SEQ ID NO: 2574950 - RNA, 19 nt, Artificial Sequence
  Description of Artificial Sequence: Synthetic oligonucleotide
gaggauauucugccagcau

SEQ ID NO: 2574951 - RNA, 19 nt, Artificial Sequence
  Description of Artificial Sequence: Synthetic oligonucleotide
uaaguacgauguggcugca

SEQ ID NO: 2574952 - RNA, 19 nt, Artificial Sequence
  Description of Artificial Sequence: Synthetic oligonucleotide
cuggucucaggauucacuu

SEQ ID NO: 2574953 - RNA, 19 nt, Artificial Sequence
  Description of Artificial Sequence: Synthetic oligonucleotide
ggaggauauucugccagca

SEQ ID NO: 2574954 - RNA, 19 nt, Artificial Sequence
  Description of Artificial Sequence: Synthetic oligonucleotide
gaccuucacuggccuguac

SEQ ID NO: 2574955 - RNA, 19 nt, Artificial Sequence
  Description of Artificial Sequence: Synthetic oligonucleotide
aggcagagggaugggcuca

SEQ ID NO: 2574956 - RNA, 19 nt, Artificial Sequence
  Description of Artificial Sequence: Synthetic oligonucleotide
agguaaugauguacugcau

SEQ ID NO: 2574957 - RNA, 19 nt, Artificial Sequence
  Description of Artificial Sequence: Synthetic oligonucleotide
acaguccauaccagguaau

SEQ ID NO: 2574958 - RNA, 19 nt, Artificial Sequence
  Description of Artificial Sequence: Synthetic oligonucleotide
ggcucagccaugacucgag

SEQ ID NO: 2574959 - RNA, 19 nt, Artificial Sequence
  Description of Artificial Sequence: Synthetic oligonucleotide
cugcgccuguuaucuuggc

SEQ ID NO: 2574960 - RNA, 19 nt, Artificial Sequence
  Description of Artificial Sequence: Synthetic oligonucleotide
ggucccgguaaugccagug

SEQ ID NO: 2574961 - RNA, 19 nt, Artificial Sequence
  Description of Artificial Sequence: Synthetic oligonucleotide
uccgagaaccuggccuuuc

SEQ ID NO: 2574962 - RNA, 19 nt, Artificial Sequence
  Description of Artificial Sequence: Synthetic oligonucleotide
cgcuggaccugccaagucc

SEQ ID NO: 2574963 - RNA, 19 nt, Artificial Sequence
  Description of Artificial Sequence: Synthetic oligonucleotide
cuuuggaagucugcaucaa

SEQ ID NO: 2574964 - RNA, 19 nt, Artificial Sequence
  Description of Artificial Sequence: Synthetic oligonucleotide
  modified_base (10)..(10): a, c, u, g, unknown or other
gauucuguunugggcuguu

SEQ ID NO: 2574965 - RNA, 19 nt, Artificial Sequence
  Description of Artificial Sequence: Synthetic oligonucleotide
gacgcuggaccugccaagu

SEQ ID NO: 2574966 - RNA, 19 nt, Artificial Sequence
  Description of Artificial Sequence: Synthetic oligonucleotide
gguccuccagggauuguac

SEQ ID NO: 2574967 - RNA, 19 nt, Artificial Sequence
  Description of Artificial Sequence: Synthetic oligonucleotide
cauuuccgacgcuggaccu

SEQ ID NO: 2574968 - RNA, 19 nt, Artificial Sequence
  Description of Artificial Sequence: Synthetic oligonucleotide
ccccugaccuucacuggcc

SEQ ID NO: 2574969 - RNA, 19 nt, Artificial Sequence
  Description of Artificial Sequence: Synthetic oligonucleotide
agccaugacucgagacucu

SEQ ID NO: 2574970 - RNA, 19 nt, Artificial Sequence
  Description of Artificial Sequence: Synthetic oligonucleotide
ugaccuucacuggccugua

SEQ ID NO: 2574971 - RNA, 19 nt, Artificial Sequence
  Description of Artificial Sequence: Synthetic oligonucleotide
gcaauggaaaggaguaacu

SEQ ID NO: 2574972 - RNA, 19 nt, Artificial Sequence
  Description of Artificial Sequence: Synthetic oligonucleotide
cuaugccaacuaggucuac

SEQ ID NO: 2574973 - RNA, 19 nt, Artificial Sequence
  Description of Artificial Sequence: Synthetic oligonucleotide
cugcaugugcucguucgaa

SEQ ID NO: 2574974 - RNA, 19 nt, Artificial Sequence
  Description of Artificial Sequence: Synthetic oligonucleotide
gggccucucgggcaggguc

SEQ ID NO: 2574975 - RNA, 19 nt, Artificial Sequence
  Description of Artificial Sequence: Synthetic oligonucleotide
acccucuguuaaccaggau

SEQ ID NO: 2574976 - RNA, 19 nt, Artificial Sequence
  Description of Artificial Sequence: Synthetic oligonucleotide
gggucugcgccuguuaucu

SEQ ID NO: 2574977 - RNA, 19 nt, Artificial Sequence
  Description of Artificial Sequence: Synthetic oligonucleotide
ccaucgaggaggauauucu

SEQ ID NO: 2574978 - RNA, 19 nt, Artificial Sequence
  Description of Artificial Sequence: Synthetic oligonucleotide
cugcaaucaguuucagcuu

SEQ ID NO: 2574979 - RNA, 19 nt, Artificial Sequence
  Description of Artificial Sequence: Synthetic oligonucleotide
cccaagccaaaagcaguag

SEQ ID NO: 2574980 - RNA, 19 nt, Artificial Sequence
  Description of Artificial Sequence: Synthetic oligonucleotide
cgaagagugacucuuguuu

SEQ ID NO: 2574981 - RNA, 19 nt, Artificial Sequence
  Description of Artificial Sequence: Synthetic oligonucleotide
cuggccuguacuccauacu

SEQ ID NO: 2574982 - RNA, 19 nt, Artificial Sequence
  Description of Artificial Sequence: Synthetic oligonucleotide
aggcuccacuuuccaucga

SEQ ID NO: 2574983 - RNA, 19 nt, Artificial Sequence
  Description of Artificial Sequence: Synthetic oligonucleotide
ggggucugcgccuguuauc

SEQ ID NO: 2574984 - RNA, 19 nt, Artificial Sequence
  Description of Artificial Sequence: Synthetic oligonucleotide
cgagacucuaauucugcaa

SEQ ID NO: 2574985 - RNA, 19 nt, Artificial Sequence
  Description of Artificial Sequence: Synthetic oligonucleotide
ccgaggcauaauguacagc

SEQ ID NO: 2574986 - RNA, 19 nt, Artificial Sequence
  Description of Artificial Sequence: Synthetic oligonucleotide
gccuguacuccauacuuuu

SEQ ID NO: 2574987 - RNA, 19 nt, Artificial Sequence
  Description of Artificial Sequence: Synthetic oligonucleotide
cgacgcuggaccugccaag

SEQ ID NO: 2574988 - RNA, 19 nt, Artificial Sequence
  Description of Artificial Sequence: Synthetic oligonucleotide
gugcucguucgaagaguga

SEQ ID NO: 2574989 - RNA, 19 nt, Artificial Sequence
  Description of Artificial Sequence: Synthetic oligonucleotide
guuaaccaggauggugauu

SEQ ID NO: 2574990 - RNA, 19 nt, Artificial Sequence
  Description of Artificial Sequence: Synthetic oligonucleotide
ugggccucucgggcagggu

SEQ ID NO: 2574991 - RNA, 19 nt, Artificial Sequence
  Description of Artificial Sequence: Synthetic oligonucleotide
acuuuccaucgaggaggau

SEQ ID NO: 2574992 - RNA, 19 nt, Artificial Sequence
  Description of Artificial Sequence: Synthetic oligonucleotide
ggcauaauguacagcucuu

SEQ ID NO: 2574993 - RNA, 19 nt, Artificial Sequence
  Description of Artificial Sequence: Synthetic oligonucleotide
ggcuguucucaggaacaaa

SEQ ID NO: 2574994 - RNA, 19 nt, Artificial Sequence
  Description of Artificial Sequence: Synthetic oligonucleotide
cucuguuaaccaggauggu

SEQ ID NO: 2574995 - RNA, 19 nt, Artificial Sequence
  Description of Artificial Sequence: Synthetic oligonucleotide
gcucguucgaagagugacu

SEQ ID NO: 2574996 - RNA, 19 nt, Artificial Sequence
  Description of Artificial Sequence: Synthetic oligonucleotide
gcauaauguacagcucuuu

SEQ ID NO: 2574997 - RNA, 19 nt, Artificial Sequence
  Description of Artificial Sequence: Synthetic oligonucleotide
ccaugacucgagacucuaa

SEQ ID NO: 2574998 - RNA, 19 nt, Artificial Sequence
  Description of Artificial Sequence: Synthetic oligonucleotide
gggcuguucucaggaacaa

SEQ ID NO: 2574999 - RNA, 19 nt, Artificial Sequence
  Description of Artificial Sequence: Synthetic oligonucleotide
caccaugguccgaggcaua

SEQ ID NO: 2575000 - RNA, 19 nt, Artificial Sequence
  Description of Artificial Sequence: Synthetic oligonucleotide
gccaugacucgagacucua

SEQ ID NO: 2575001 - RNA, 19 nt, Artificial Sequence
  Description of Artificial Sequence: Synthetic oligonucleotide
caguuccauuaggucugca

SEQ ID NO: 2575002 - RNA, 19 nt, Artificial Sequence
  Description of Artificial Sequence: Synthetic oligonucleotide
ccgacgcuggaccugccaa

SEQ ID NO: 2575003 - RNA, 19 nt, Artificial Sequence
  Description of Artificial Sequence: Synthetic oligonucleotide
cagccucacuaugccaacu

SEQ ID NO: 2575004 - RNA, 19 nt, Artificial Sequence
  Description of Artificial Sequence: Synthetic oligonucleotide
caggaacaaagggcuuccu

SEQ ID NO: 2575005 - RNA, 19 nt, Artificial Sequence
  Description of Artificial Sequence: Synthetic oligonucleotide
ccaaguccccaagccaaaa

SEQ ID NO: 2575006 - RNA, 19 nt, Artificial Sequence
  Description of Artificial Sequence: Synthetic oligonucleotide
cguucgaagagugacucuu

SEQ ID NO: 2575007 - RNA, 19 nt, Artificial Sequence
  Description of Artificial Sequence: Synthetic oligonucleotide
ggccuguacuccauacuuu

SEQ ID NO: 2575008 - RNA, 19 nt, Artificial Sequence
  Description of Artificial Sequence: Synthetic oligonucleotide
cccgguaaugccagugauu

SEQ ID NO: 2575009 - RNA, 19 nt, Artificial Sequence
  Description of Artificial Sequence: Synthetic oligonucleotide
gccucucgggcagggucca

SEQ ID NO: 2575010 - RNA, 19 nt, Artificial Sequence
  Description of Artificial Sequence: Synthetic oligonucleotide
cccugaccuucacuggccu

SEQ ID NO: 2575011 - RNA, 19 nt, Artificial Sequence
  Description of Artificial Sequence: Synthetic oligonucleotide
gccuguuaucuuggccaua

SEQ ID NO: 2575012 - RNA, 19 nt, Artificial Sequence
  Description of Artificial Sequence: Synthetic oligonucleotide
ggucugcgccuguuaucuu

SEQ ID NO: 2575013 - RNA, 19 nt, Artificial Sequence
  Description of Artificial Sequence: Synthetic oligonucleotide
cgguaaugccagugauucu

SEQ ID NO: 2575014 - RNA, 19 nt, Artificial Sequence
  Description of Artificial Sequence: Synthetic oligonucleotide
cuccgagaaccuggccuuu

SEQ ID NO: 2575015 - RNA, 19 nt, Artificial Sequence
  Description of Artificial Sequence: Synthetic oligonucleotide
cgccuguuaucuuggccau

SEQ ID NO: 2575016 - RNA, 19 nt, Artificial Sequence
  Description of Artificial Sequence: Synthetic oligonucleotide
ccuggccuuucugucuggu

SEQ ID NO: 2575017 - RNA, 19 nt, Artificial Sequence
  Description of Artificial Sequence: Synthetic oligonucleotide
aaagacugauuccccacgg

SEQ ID NO: 2575018 - RNA, 19 nt, Artificial Sequence
  Description of Artificial Sequence: Synthetic oligonucleotide
ucaagagagggacuggaag

SEQ ID NO: 2575019 - RNA, 19 nt, Artificial Sequence
  Description of Artificial Sequence: Synthetic oligonucleotide
cugaaugggaacaucaaac

SEQ ID NO: 2575020 - RNA, 19 nt, Artificial Sequence
  Description of Artificial Sequence: Synthetic oligonucleotide
ugaaugggaacaucaaaca

SEQ ID NO: 2575021 - RNA, 19 nt, Artificial Sequence
  Description of Artificial Sequence: Synthetic oligonucleotide
aagacugauuccccacggc

SEQ ID NO: 2575022 - RNA, 19 nt, Artificial Sequence
  Description of Artificial Sequence: Synthetic oligonucleotide
acugaaugggaacaucaaa

SEQ ID NO: 2575023 - RNA, 19 nt, Artificial Sequence
  Description of Artificial Sequence: Synthetic oligonucleotide
ucuuggacugaaugggaac

SEQ ID NO: 2575024 - RNA, 19 nt, Artificial Sequence
  Description of Artificial Sequence: Synthetic oligonucleotide
agacugauuccccacggca

SEQ ID NO: 2575025 - RNA, 19 nt, Artificial Sequence
  Description of Artificial Sequence: Synthetic oligonucleotide
uucuuggacugaaugggaa

SEQ ID NO: 2575026 - RNA, 19 nt, Artificial Sequence
  Description of Artificial Sequence: Synthetic oligonucleotide
gacugauuccccacggcag

SEQ ID NO: 2575027 - RNA, 19 nt, Artificial Sequence
  Description of Artificial Sequence: Synthetic oligonucleotide
uuccccacggcagugaaaa

SEQ ID NO: 2575028 - RNA, 19 nt, Artificial Sequence
  Description of Artificial Sequence: Synthetic oligonucleotide
acugauuccccacggcagu

SEQ ID NO: 2575029 - RNA, 19 nt, Artificial Sequence
  Description of Artificial Sequence: Synthetic oligonucleotide
ccuucuuggacugaauggg

SEQ ID NO: 2575030 - RNA, 19 nt, Artificial Sequence
  Description of Artificial Sequence: Synthetic oligonucleotide
cuuggacugaaugggaaca

SEQ ID NO: 2575031 - RNA, 19 nt, Artificial Sequence
  Description of Artificial Sequence: Synthetic oligonucleotide
cuucuuggacugaauggga

SEQ ID NO: 2575032 - RNA, 19 nt, Artificial Sequence
  Description of Artificial Sequence: Synthetic oligonucleotide
cccacggcagugaaaagag

SEQ ID NO: 2575033 - RNA, 19 nt, Artificial Sequence
  Description of Artificial Sequence: Synthetic oligonucleotide
ggacugaaugggaacauca

SEQ ID NO: 2575034 - RNA, 19 nt, Artificial Sequence
  Description of Artificial Sequence: Synthetic oligonucleotide
gacugaaugggaacaucaa

SEQ ID NO: 2575035 - RNA, 19 nt, Artificial Sequence
  Description of Artificial Sequence: Synthetic oligonucleotide
uggacugaaugggaacauc

SEQ ID NO: 2575036 - RNA, 19 nt, Artificial Sequence
  Description of Artificial Sequence: Synthetic oligonucleotide
uuggacugaaugggaacau

SEQ ID NO: 2575037 - RNA, 19 nt, Artificial Sequence
  Description of Artificial Sequence: Synthetic oligonucleotide
acggcagugaaaagagacu

SEQ ID NO: 2575038 - RNA, 19 nt, Artificial Sequence
  Description of Artificial Sequence: Synthetic oligonucleotide
ugauuccccacggcaguga

SEQ ID NO: 2575039 - RNA, 19 nt, Artificial Sequence
  Description of Artificial Sequence: Synthetic oligonucleotide
gauuccccacggcagugaa

SEQ ID NO: 2575040 - RNA, 19 nt, Artificial Sequence
  Description of Artificial Sequence: Synthetic oligonucleotide
cucaagagagggacuggaa

SEQ ID NO: 2575041 - RNA, 19 nt, Artificial Sequence
  Description of Artificial Sequence: Synthetic oligonucleotide
cugauuccccacggcagug

SEQ ID NO: 2575042 - RNA, 19 nt, Artificial Sequence
  Description of Artificial Sequence: Synthetic oligonucleotide
uccccacggcagugaaaag

SEQ ID NO: 2575043 - RNA, 19 nt, Artificial Sequence
  Description of Artificial Sequence: Synthetic oligonucleotide
auuccccacggcagugaaa

SEQ ID NO: 2575044 - RNA, 19 nt, Artificial Sequence
  Description of Artificial Sequence: Synthetic oligonucleotide
ccccacggcagugaaaaga

SEQ ID NO: 2575045 - RNA, 19 nt, Artificial Sequence
  Description of Artificial Sequence: Synthetic oligonucleotide
ccacggcagugaaaagaga

SEQ ID NO: 2575046 - RNA, 19 nt, Artificial Sequence
  Description of Artificial Sequence: Synthetic oligonucleotide
aaaacgaugaccacgaucc

SEQ ID NO: 2575047 - RNA, 19 nt, Artificial Sequence
  Description of Artificial Sequence: Synthetic oligonucleotide
aacuaggaaacucugggcc

SEQ ID NO: 2575048 - RNA, 19 nt, Artificial Sequence
  Description of Artificial Sequence: Synthetic oligonucleotide
ucccaagccagccaaaacg

SEQ ID NO: 2575049 - RNA, 19 nt, Artificial Sequence
  Description of Artificial Sequence: Synthetic oligonucleotide
gaagauaucaagaacuuga

SEQ ID NO: 2575050 - RNA, 19 nt, Artificial Sequence
  Description of Artificial Sequence: Synthetic oligonucleotide
gauuuugcucuccaugagg

SEQ ID NO: 2575051 - RNA, 19 nt, Artificial Sequence
  Description of Artificial Sequence: Synthetic oligonucleotide
ugugucaugguagaccucg

SEQ ID NO: 2575052 - RNA, 19 nt, Artificial Sequence
  Description of Artificial Sequence: Synthetic oligonucleotide
ucgucgguaaugcagauac

SEQ ID NO: 2575053 - RNA, 19 nt, Artificial Sequence
  Description of Artificial Sequence: Synthetic oligonucleotide
caucaugcaccccagaggc

SEQ ID NO: 2575054 - RNA, 19 nt, Artificial Sequence
  Description of Artificial Sequence: Synthetic oligonucleotide
ucuccaugagguaaggugu

SEQ ID NO: 2575055 - RNA, 19 nt, Artificial Sequence
  Description of Artificial Sequence: Synthetic oligonucleotide
aaggguggagacaagggcg

SEQ ID NO: 2575056 - RNA, 19 nt, Artificial Sequence
  Description of Artificial Sequence: Synthetic oligonucleotide
uaccaaaaggcucccaagc

SEQ ID NO: 2575057 - RNA, 19 nt, Artificial Sequence
  Description of Artificial Sequence: Synthetic oligonucleotide
ucccauguagacuaagagc

SEQ ID NO: 2575058 - RNA, 19 nt, Artificial Sequence
  Description of Artificial Sequence: Synthetic oligonucleotide
ugagguaagguguccaggc

SEQ ID NO: 2575059 - RNA, 19 nt, Artificial Sequence
  Description of Artificial Sequence: Synthetic oligonucleotide
agaggucaguccuacugcc

SEQ ID NO: 2575060 - RNA, 19 nt, Artificial Sequence
  Description of Artificial Sequence: Synthetic oligonucleotide
augaccacgaucccagagg

SEQ ID NO: 2575061 - RNA, 19 nt, Artificial Sequence
  Description of Artificial Sequence: Synthetic oligonucleotide
cauagcuuucccagaagcg

SEQ ID NO: 2575062 - RNA, 19 nt, Artificial Sequence
  Description of Artificial Sequence: Synthetic oligonucleotide
auuguaggcauagcuuucc

SEQ ID NO: 2575063 - RNA, 19 nt, Artificial Sequence
  Description of Artificial Sequence: Synthetic oligonucleotide
aacacgugugucaugguag

SEQ ID NO: 2575064 - RNA, 19 nt, Artificial Sequence
  Description of Artificial Sequence: Synthetic oligonucleotide
aaucccgccgugcaucggg

SEQ ID NO: 2575065 - RNA, 19 nt, Artificial Sequence
  Description of Artificial Sequence: Synthetic oligonucleotide
gagucgaagaggcccagcg

SEQ ID NO: 2575066 - RNA, 19 nt, Artificial Sequence
  Description of Artificial Sequence: Synthetic oligonucleotide
aaacgaugaccacgauccc

SEQ ID NO: 2575067 - RNA, 19 nt, Artificial Sequence
  Description of Artificial Sequence: Synthetic oligonucleotide
ugcagauaccaaaaggcuc

SEQ ID NO: 2575068 - RNA, 19 nt, Artificial Sequence
  Description of Artificial Sequence: Synthetic oligonucleotide
aucccauguagacuaagag

SEQ ID NO: 2575069 - RNA, 19 nt, Artificial Sequence
  Description of Artificial Sequence: Synthetic oligonucleotide
caggucuucagugaggagg

SEQ ID NO: 2575070 - RNA, 19 nt, Artificial Sequence
  Description of Artificial Sequence: Synthetic oligonucleotide
gaagcguuccgucaaugug

SEQ ID NO: 2575071 - RNA, 19 nt, Artificial Sequence
  Description of Artificial Sequence: Synthetic oligonucleotide
guaaugcagauaccaaaag

SEQ ID NO: 2575072 - RNA, 19 nt, Artificial Sequence
  Description of Artificial Sequence: Synthetic oligonucleotide
caaaaggcucccaagccag

SEQ ID NO: 2575073 - RNA, 19 nt, Artificial Sequence
  Description of Artificial Sequence: Synthetic oligonucleotide
ugucaugguagaccucggg

SEQ ID NO: 2575074 - RNA, 19 nt, Artificial Sequence
  Description of Artificial Sequence: Synthetic oligonucleotide
uagaccucggguccgacga

SEQ ID NO: 2575075 - RNA, 19 nt, Artificial Sequence
  Description of Artificial Sequence: Synthetic oligonucleotide
acgugugucaugguagacc

SEQ ID NO: 2575076 - RNA, 19 nt, Artificial Sequence
  Description of Artificial Sequence: Synthetic oligonucleotide
aaugguuagcccguggaau

SEQ ID NO: 2575077 - RNA, 19 nt, Artificial Sequence
  Description of Artificial Sequence: Synthetic oligonucleotide
caugguagaccucgggucc

SEQ ID NO: 2575078 - RNA, 19 nt, Artificial Sequence
  Description of Artificial Sequence: Synthetic oligonucleotide
aaacacgugugucauggua

SEQ ID NO: 2575079 - RNA, 19 nt, Artificial Sequence
  Description of Artificial Sequence: Synthetic oligonucleotide
agccaaaacgaugaccacg

SEQ ID NO: 2575080 - RNA, 19 nt, Artificial Sequence
  Description of Artificial Sequence: Synthetic oligonucleotide
ggucccaaugguuagcccg

SEQ ID NO: 2575081 - RNA, 19 nt, Artificial Sequence
  Description of Artificial Sequence: Synthetic oligonucleotide
ugagguggcgccgucgucg

SEQ ID NO: 2575082 - RNA, 19 nt, Artificial Sequence
  Description of Artificial Sequence: Synthetic oligonucleotide
ccaacuaggaaacucuggg

SEQ ID NO: 2575083 - RNA, 19 nt, Artificial Sequence
  Description of Artificial Sequence: Synthetic oligonucleotide
caacuaggaaacucugggc

SEQ ID NO: 2575084 - RNA, 19 nt, Artificial Sequence
  Description of Artificial Sequence: Synthetic oligonucleotide
uggccaacuaggaaacucu

SEQ ID NO: 2575085 - RNA, 19 nt, Artificial Sequence
  Description of Artificial Sequence: Synthetic oligonucleotide
ugaccacgaucccagaggu

SEQ ID NO: 2575086 - RNA, 19 nt, Artificial Sequence
  Description of Artificial Sequence: Synthetic oligonucleotide
uguaggcauagcuuuccca

SEQ ID NO: 2575087 - RNA, 19 nt, Artificial Sequence
  Description of Artificial Sequence: Synthetic oligonucleotide
guaaggguggagacaaggg

SEQ ID NO: 2575088 - RNA, 19 nt, Artificial Sequence
  Description of Artificial Sequence: Synthetic oligonucleotide
caggaagauaucaagaacu

SEQ ID NO: 2575089 - RNA, 19 nt, Artificial Sequence
  Description of Artificial Sequence: Synthetic oligonucleotide
auagcuuucccagaagcgu

SEQ ID NO: 2575090 - RNA, 19 nt, Artificial Sequence
  Description of Artificial Sequence: Synthetic oligonucleotide
caagccagccaaaacgaug

SEQ ID NO: 2575091 - RNA, 19 nt, Artificial Sequence
  Description of Artificial Sequence: Synthetic oligonucleotide
ucaugcaccccagaggcug

SEQ ID NO: 2575092 - RNA, 19 nt, Artificial Sequence
  Description of Artificial Sequence: Synthetic oligonucleotide
aagcguuccgucaaugugu

SEQ ID NO: 2575093 - RNA, 19 nt, Artificial Sequence
  Description of Artificial Sequence: Synthetic oligonucleotide
aagccggggagucgaagag

SEQ ID NO: 2575094 - RNA, 19 nt, Artificial Sequence
  Description of Artificial Sequence: Synthetic oligonucleotide
auguagacuaagagcaggg

SEQ ID NO: 2575095 - RNA, 19 nt, Artificial Sequence
  Description of Artificial Sequence: Synthetic oligonucleotide
cccauguagacuaagagca

SEQ ID NO: 2575096 - RNA, 19 nt, Artificial Sequence
  Description of Artificial Sequence: Synthetic oligonucleotide
acgucuacucguccacgcc

SEQ ID NO: 2575097 - RNA, 19 nt, Artificial Sequence
  Description of Artificial Sequence: Synthetic oligonucleotide
gucgaagaggcccagcgac

SEQ ID NO: 2575098 - RNA, 19 nt, Artificial Sequence
  Description of Artificial Sequence: Synthetic oligonucleotide
uccgucaauguguuguccu

SEQ ID NO: 2575099 - RNA, 19 nt, Artificial Sequence
  Description of Artificial Sequence: Synthetic oligonucleotide
aagauaucaagaacuugau

SEQ ID NO: 2575100 - RNA, 19 nt, Artificial Sequence
  Description of Artificial Sequence: Synthetic oligonucleotide
aggccugcgacgucuacuc

SEQ ID NO: 2575101 - RNA, 19 nt, Artificial Sequence
  Description of Artificial Sequence: Synthetic oligonucleotide
caugagguaagguguccag

SEQ ID NO: 2575102 - RNA, 19 nt, Artificial Sequence
  Description of Artificial Sequence: Synthetic oligonucleotide
uggccaaucccauguagac

SEQ ID NO: 2575103 - RNA, 19 nt, Artificial Sequence
  Description of Artificial Sequence: Synthetic oligonucleotide
uccgccuguggccaacuag

SEQ ID NO: 2575104 - RNA, 19 nt, Artificial Sequence
  Description of Artificial Sequence: Synthetic oligonucleotide
agaagcguuccgucaaugu

SEQ ID NO: 2575105 - RNA, 19 nt, Artificial Sequence
  Description of Artificial Sequence: Synthetic oligonucleotide
gaugagcccggccucuugc

SEQ ID NO: 2575106 - RNA, 19 nt, Artificial Sequence
  Description of Artificial Sequence: Synthetic oligonucleotide
gcagauaccaaaaggcucc

SEQ ID NO: 2575107 - RNA, 19 nt, Artificial Sequence
  Description of Artificial Sequence: Synthetic oligonucleotide
ucccguuccagguucccag

SEQ ID NO: 2575108 - RNA, 19 nt, Artificial Sequence
  Description of Artificial Sequence: Synthetic oligonucleotide
gacgucuacucguccacgc

SEQ ID NO: 2575109 - RNA, 19 nt, Artificial Sequence
  Description of Artificial Sequence: Synthetic oligonucleotide
acacucccguuccagguuc

SEQ ID NO: 2575110 - RNA, 19 nt, Artificial Sequence
  Description of Artificial Sequence: Synthetic oligonucleotide
uggagguaaggguggagac

SEQ ID NO: 2575111 - RNA, 19 nt, Artificial Sequence
  Description of Artificial Sequence: Synthetic oligonucleotide
gguaaggguggagacaagg

SEQ ID NO: 2575112 - RNA, 19 nt, Artificial Sequence
  Description of Artificial Sequence: Synthetic oligonucleotide
gucgguaaugcagauacca

SEQ ID NO: 2575113 - RNA, 19 nt, Artificial Sequence
  Description of Artificial Sequence: Synthetic oligonucleotide
auguguuguccucaaagua

SEQ ID NO: 2575114 - RNA, 19 nt, Artificial Sequence
  Description of Artificial Sequence: Synthetic oligonucleotide
uguagacuaagagcaggga

SEQ ID NO: 2575115 - RNA, 19 nt, Artificial Sequence
  Description of Artificial Sequence: Synthetic oligonucleotide
guggaauccgccuguggcc

SEQ ID NO: 2575116 - RNA, 19 nt, Artificial Sequence
  Description of Artificial Sequence: Synthetic oligonucleotide
ugacacucccguuccaggu

SEQ ID NO: 2575117 - RNA, 19 nt, Artificial Sequence
  Description of Artificial Sequence: Synthetic oligonucleotide
uuucccagaagcguuccgu

SEQ ID NO: 2575118 - RNA, 19 nt, Artificial Sequence
  Description of Artificial Sequence: Synthetic oligonucleotide
acgaugaccacgaucccag

SEQ ID NO: 2575119 - RNA, 19 nt, Artificial Sequence
  Description of Artificial Sequence: Synthetic oligonucleotide
gcaucaugcaccccagagg

SEQ ID NO: 2575120 - RNA, 19 nt, Artificial Sequence
  Description of Artificial Sequence: Synthetic oligonucleotide
cugacacucccguuccagg

SEQ ID NO: 2575121 - RNA, 19 nt, Artificial Sequence
  Description of Artificial Sequence: Synthetic oligonucleotide
guuggggcaucaugcaccc

SEQ ID NO: 2575122 - RNA, 19 nt, Artificial Sequence
  Description of Artificial Sequence: Synthetic oligonucleotide
ugcgacgucuacucgucca

SEQ ID NO: 2575123 - RNA, 19 nt, Artificial Sequence
  Description of Artificial Sequence: Synthetic oligonucleotide
cauuguaggcauagcuuuc

SEQ ID NO: 2575124 - RNA, 19 nt, Artificial Sequence
  Description of Artificial Sequence: Synthetic oligonucleotide
gagguaaggguggagacaa

SEQ ID NO: 2575125 - RNA, 19 nt, Artificial Sequence
  Description of Artificial Sequence: Synthetic oligonucleotide
aggagucagcaacuccagg

SEQ ID NO: 2575126 - RNA, 19 nt, Artificial Sequence
  Description of Artificial Sequence: Synthetic oligonucleotide
uccggaaucccgccgugca

SEQ ID NO: 2575127 - RNA, 19 nt, Artificial Sequence
  Description of Artificial Sequence: Synthetic oligonucleotide
gacuuccggaaucccgccg

SEQ ID NO: 2575128 - RNA, 19 nt, Artificial Sequence
  Description of Artificial Sequence: Synthetic oligonucleotide
gaagccggggagucgaaga

SEQ ID NO: 2575129 - RNA, 19 nt, Artificial Sequence
  Description of Artificial Sequence: Synthetic oligonucleotide
augcagauaccaaaaggcu

SEQ ID NO: 2575130 - RNA, 19 nt, Artificial Sequence
  Description of Artificial Sequence: Synthetic oligonucleotide
uuagcccguggaauccgcc

SEQ ID NO: 2575131 - RNA, 19 nt, Artificial Sequence
  Description of Artificial Sequence: Synthetic oligonucleotide
guagaccucggguccgacg

SEQ ID NO: 2575132 - RNA, 19 nt, Artificial Sequence
  Description of Artificial Sequence: Synthetic oligonucleotide
uaggcauagcuuucccaga

SEQ ID NO: 2575133 - RNA, 19 nt, Artificial Sequence
  Description of Artificial Sequence: Synthetic oligonucleotide
acuuccggaaucccgccgu

SEQ ID NO: 2575134 - RNA, 19 nt, Artificial Sequence
  Description of Artificial Sequence: Synthetic oligonucleotide
gagcccgcgcucuugagca

SEQ ID NO: 2575135 - RNA, 19 nt, Artificial Sequence
  Description of Artificial Sequence: Synthetic oligonucleotide
cucccggacucugaggugg

SEQ ID NO: 2575136 - RNA, 19 nt, Artificial Sequence
  Description of Artificial Sequence: Synthetic oligonucleotide
acacgugugucaugguaga

SEQ ID NO: 2575137 - RNA, 19 nt, Artificial Sequence
  Description of Artificial Sequence: Synthetic oligonucleotide
ucccagaagcguuccguca

SEQ ID NO: 2575138 - RNA, 19 nt, Artificial Sequence
  Description of Artificial Sequence: Synthetic oligonucleotide
uggaauccgccuguggcca

SEQ ID NO: 2575139 - RNA, 19 nt, Artificial Sequence
  Description of Artificial Sequence: Synthetic oligonucleotide
gguaagguguccaggcagg

SEQ ID NO: 2575140 - RNA, 19 nt, Artificial Sequence
  Description of Artificial Sequence: Synthetic oligonucleotide
agcgacuuccggaaucccg

SEQ ID NO: 2575141 - RNA, 19 nt, Artificial Sequence
  Description of Artificial Sequence: Synthetic oligonucleotide
aggcauagcuuucccagaa

SEQ ID NO: 2575142 - RNA, 19 nt, Artificial Sequence
  Description of Artificial Sequence: Synthetic oligonucleotide
auccgugcgcggcggaaac

SEQ ID NO: 2575143 - RNA, 19 nt, Artificial Sequence
  Description of Artificial Sequence: Synthetic oligonucleotide
caggagucagcaacuccag

SEQ ID NO: 2575144 - RNA, 19 nt, Artificial Sequence
  Description of Artificial Sequence: Synthetic oligonucleotide
acuugauuuugcucuccau

SEQ ID NO: 2575145 - RNA, 19 nt, Artificial Sequence
  Description of Artificial Sequence: Synthetic oligonucleotide
ugguuagcccguggaaucc

SEQ ID NO: 2575146 - RNA, 19 nt, Artificial Sequence
  Description of Artificial Sequence: Synthetic oligonucleotide
guggagacaagggcgucgg

SEQ ID NO: 2575147 - RNA, 19 nt, Artificial Sequence
  Description of Artificial Sequence: Synthetic oligonucleotide
gguaaugcagauaccaaaa

SEQ ID NO: 2575148 - RNA, 19 nt, Artificial Sequence
  Description of Artificial Sequence: Synthetic oligonucleotide
uccaugagguaaggugucc

SEQ ID NO: 2575149 - RNA, 19 nt, Artificial Sequence
  Description of Artificial Sequence: Synthetic oligonucleotide
agucgaagaggcccagcga

SEQ ID NO: 2575150 - RNA, 19 nt, Artificial Sequence
  Description of Artificial Sequence: Synthetic oligonucleotide
gacucccggacucugaggu

SEQ ID NO: 2575151 - RNA, 19 nt, Artificial Sequence
  Description of Artificial Sequence: Synthetic oligonucleotide
accccagaggcugcuagcg

SEQ ID NO: 2575152 - RNA, 19 nt, Artificial Sequence
  Description of Artificial Sequence: Synthetic oligonucleotide
aggagcaccucuccuccug

SEQ ID NO: 2575153 - RNA, 19 nt, Artificial Sequence
  Description of Artificial Sequence: Synthetic oligonucleotide
ucuugcugacaggacuccc

SEQ ID NO: 2575154 - RNA, 19 nt, Artificial Sequence
  Description of Artificial Sequence: Synthetic oligonucleotide
ugagcccggccucuugcug

SEQ ID NO: 2575155 - RNA, 19 nt, Artificial Sequence
  Description of Artificial Sequence: Synthetic oligonucleotide
gagguggcgccgucgucgg

SEQ ID NO: 2575156 - RNA, 19 nt, Artificial Sequence
  Description of Artificial Sequence: Synthetic oligonucleotide
ucaguccuacugccaggcc

SEQ ID NO: 2575157 - RNA, 19 nt, Artificial Sequence
  Description of Artificial Sequence: Synthetic oligonucleotide
ucguagguggggaggccug

SEQ ID NO: 2575158 - RNA, 19 nt, Artificial Sequence
  Description of Artificial Sequence: Synthetic oligonucleotide
ugcucguagguggggaggc

SEQ ID NO: 2575159 - RNA, 19 nt, Artificial Sequence
  Description of Artificial Sequence: Synthetic oligonucleotide
gccaaucccauguagacua

SEQ ID NO: 2575160 - RNA, 19 nt, Artificial Sequence
  Description of Artificial Sequence: Synthetic oligonucleotide
ggcugcuagcgccugcucg

SEQ ID NO: 2575161 - RNA, 19 nt, Artificial Sequence
  Description of Artificial Sequence: Synthetic oligonucleotide
aguccuacugccaggccug

SEQ ID NO: 2575162 - RNA, 19 nt, Artificial Sequence
  Description of Artificial Sequence: Synthetic oligonucleotide
aggaagauaucaagaacuu

SEQ ID NO: 2575163 - RNA, 19 nt, Artificial Sequence
  Description of Artificial Sequence: Synthetic oligonucleotide
acugccaggccugcgacgu

SEQ ID NO: 2575164 - RNA, 19 nt, Artificial Sequence
  Description of Artificial Sequence: Synthetic oligonucleotide
uuccgucaauguguugucc

SEQ ID NO: 2575165 - RNA, 19 nt, Artificial Sequence
  Description of Artificial Sequence: Synthetic oligonucleotide
augguagaccucggguccg

SEQ ID NO: 2575166 - RNA, 19 nt, Artificial Sequence
  Description of Artificial Sequence: Synthetic oligonucleotide
agcuuucccagaagcguuc

SEQ ID NO: 2575167 - RNA, 19 nt, Artificial Sequence
  Description of Artificial Sequence: Synthetic oligonucleotide
ggaaucccgccgugcaucg

SEQ ID NO: 2575168 - RNA, 19 nt, Artificial Sequence
  Description of Artificial Sequence: Synthetic oligonucleotide
acgaucccagaggucaguc

SEQ ID NO: 2575169 - RNA, 19 nt, Artificial Sequence
  Description of Artificial Sequence: Synthetic oligonucleotide
agcccguggaauccgccug

SEQ ID NO: 2575170 - RNA, 19 nt, Artificial Sequence
  Description of Artificial Sequence: Synthetic oligonucleotide
ugaagccggggagucgaag

SEQ ID NO: 2575171 - RNA, 19 nt, Artificial Sequence
  Description of Artificial Sequence: Synthetic oligonucleotide
aggcccagcgacuuccgga

SEQ ID NO: 2575172 - RNA, 19 nt, Artificial Sequence
  Description of Artificial Sequence: Synthetic oligonucleotide
ugcgcggcggaaacacgug

SEQ ID NO: 2575173 - RNA, 19 nt, Artificial Sequence
  Description of Artificial Sequence: Synthetic oligonucleotide
cacaguucggggagcccgc

SEQ ID NO: 2575174 - RNA, 19 nt, Artificial Sequence
  Description of Artificial Sequence: Synthetic oligonucleotide
uagcccguggaauccgccu

SEQ ID NO: 2575175 - RNA, 19 nt, Artificial Sequence
  Description of Artificial Sequence: Synthetic oligonucleotide
guuccgucaauguguuguc

SEQ ID NO: 2575176 - RNA, 19 nt, Artificial Sequence
  Description of Artificial Sequence: Synthetic oligonucleotide
guggccaacuaggaaacuc

SEQ ID NO: 2575177 - RNA, 19 nt, Artificial Sequence
  Description of Artificial Sequence: Synthetic oligonucleotide
caugcaccccagaggcugc

SEQ ID NO: 2575178 - RNA, 19 nt, Artificial Sequence
  Description of Artificial Sequence: Synthetic oligonucleotide
ccgccuguggccaacuagg

SEQ ID NO: 2575179 - RNA, 19 nt, Artificial Sequence
  Description of Artificial Sequence: Synthetic oligonucleotide
agaccucggguccgacgac

SEQ ID NO: 2575180 - RNA, 19 nt, Artificial Sequence
  Description of Artificial Sequence: Synthetic oligonucleotide
ccaggagucagcaacucca

SEQ ID NO: 2575181 - RNA, 19 nt, Artificial Sequence
  Description of Artificial Sequence: Synthetic oligonucleotide
cguuggggcaucaugcacc

SEQ ID NO: 2575182 - RNA, 19 nt, Artificial Sequence
  Description of Artificial Sequence: Synthetic oligonucleotide
caaaguacucccgggccuc

SEQ ID NO: 2575183 - RNA, 19 nt, Artificial Sequence
  Description of Artificial Sequence: Synthetic oligonucleotide
gguccgacgaccccucccc

SEQ ID NO: 2575184 - RNA, 19 nt, Artificial Sequence
  Description of Artificial Sequence: Synthetic oligonucleotide
gccaacuaggaaacucugg

SEQ ID NO: 2575185 - RNA, 19 nt, Artificial Sequence
  Description of Artificial Sequence: Synthetic oligonucleotide
gcaccucuccuccugacac

SEQ ID NO: 2575186 - RNA, 19 nt, Artificial Sequence
  Description of Artificial Sequence: Synthetic oligonucleotide
cuggagguaaggguggaga

SEQ ID NO: 2575187 - RNA, 19 nt, Artificial Sequence
  Description of Artificial Sequence: Synthetic oligonucleotide
gcacaguucggggagcccg

SEQ ID NO: 2575188 - RNA, 19 nt, Artificial Sequence
  Description of Artificial Sequence: Synthetic oligonucleotide
gccaaaacgaugaccacga

SEQ ID NO: 2575189 - RNA, 19 nt, Artificial Sequence
  Description of Artificial Sequence: Synthetic oligonucleotide
cagauaccaaaaggcuccc

SEQ ID NO: 2575190 - RNA, 19 nt, Artificial Sequence
  Description of Artificial Sequence: Synthetic oligonucleotide
cccagaggcugcuagcgcc

SEQ ID NO: 2575191 - RNA, 19 nt, Artificial Sequence
  Description of Artificial Sequence: Synthetic oligonucleotide
accucggguccgacgaccc

SEQ ID NO: 2575192 - RNA, 19 nt, Artificial Sequence
  Description of Artificial Sequence: Synthetic oligonucleotide
aggaaacucugggccuucg

SEQ ID NO: 2575193 - RNA, 19 nt, Artificial Sequence
  Description of Artificial Sequence: Synthetic oligonucleotide
ugcugacaggacucccgga

SEQ ID NO: 2575194 - RNA, 19 nt, Artificial Sequence
  Description of Artificial Sequence: Synthetic oligonucleotide
gagcccggccucuugcuga

SEQ ID NO: 2575195 - RNA, 19 nt, Artificial Sequence
  Description of Artificial Sequence: Synthetic oligonucleotide
cugcucguagguggggagg

SEQ ID NO: 2575196 - RNA, 19 nt, Artificial Sequence
  Description of Artificial Sequence: Synthetic oligonucleotide
ggcauagcuuucccagaag

SEQ ID NO: 2575197 - RNA, 19 nt, Artificial Sequence
  Description of Artificial Sequence: Synthetic oligonucleotide
agccggggagucgaagagg

SEQ ID NO: 2575198 - RNA, 19 nt, Artificial Sequence
  Description of Artificial Sequence: Synthetic oligonucleotide
cagccaaaacgaugaccac

SEQ ID NO: 2575199 - RNA, 19 nt, Artificial Sequence
  Description of Artificial Sequence: Synthetic oligonucleotide
gccgucgucgguaaugcag

SEQ ID NO: 2575200 - RNA, 19 nt, Artificial Sequence
  Description of Artificial Sequence: Synthetic oligonucleotide
caaugguuagcccguggaa

SEQ ID NO: 2575201 - RNA, 19 nt, Artificial Sequence
  Description of Artificial Sequence: Synthetic oligonucleotide
ucccagaggucaguccuac

SEQ ID NO: 2575202 - RNA, 19 nt, Artificial Sequence
  Description of Artificial Sequence: Synthetic oligonucleotide
ccauguagacuaagagcag

SEQ ID NO: 2575203 - RNA, 19 nt, Artificial Sequence
  Description of Artificial Sequence: Synthetic oligonucleotide
gaccucggguccgacgacc

SEQ ID NO: 2575204 - RNA, 19 nt, Artificial Sequence
  Description of Artificial Sequence: Synthetic oligonucleotide
gggcguuggggcaucaugc

SEQ ID NO: 2575205 - RNA, 19 nt, Artificial Sequence
  Description of Artificial Sequence: Synthetic oligonucleotide
augagcccggccucuugcu

SEQ ID NO: 2575206 - RNA, 19 nt, Artificial Sequence
  Description of Artificial Sequence: Synthetic oligonucleotide
aggguggagacaagggcgu

SEQ ID NO: 2575207 - RNA, 19 nt, Artificial Sequence
  Description of Artificial Sequence: Synthetic oligonucleotide
acucugagguggcgccguc

SEQ ID NO: 2575208 - RNA, 19 nt, Artificial Sequence
  Description of Artificial Sequence: Synthetic oligonucleotide
guuagcccguggaauccgc

SEQ ID NO: 2575209 - RNA, 19 nt, Artificial Sequence
  Description of Artificial Sequence: Synthetic oligonucleotide
gguuagcccguggaauccg

SEQ ID NO: 2575210 - RNA, 19 nt, Artificial Sequence
  Description of Artificial Sequence: Synthetic oligonucleotide
uccuacugccaggccugcg

SEQ ID NO: 2575211 - RNA, 19 nt, Artificial Sequence
  Description of Artificial Sequence: Synthetic oligonucleotide
gugucaugguagaccucgg

SEQ ID NO: 2575212 - RNA, 19 nt, Artificial Sequence
  Description of Artificial Sequence: Synthetic oligonucleotide
uuccggaaucccgccgugc

SEQ ID NO: 2575213 - RNA, 19 nt, Artificial Sequence
  Description of Artificial Sequence: Synthetic oligonucleotide
uccugacacucccguucca

SEQ ID NO: 2575214 - RNA, 19 nt, Artificial Sequence
  Description of Artificial Sequence: Synthetic oligonucleotide
ucuacucguccacgcccuc

SEQ ID NO: 2575215 - RNA, 19 nt, Artificial Sequence
  Description of Artificial Sequence: Synthetic oligonucleotide
uggggaggccuggagguaa

SEQ ID NO: 2575216 - RNA, 19 nt, Artificial Sequence
  Description of Artificial Sequence: Synthetic oligonucleotide
ucccggacucugagguggc

SEQ ID NO: 2575217 - RNA, 19 nt, Artificial Sequence
  Description of Artificial Sequence: Synthetic oligonucleotide
agguucccaggagucagca

SEQ ID NO: 2575218 - RNA, 19 nt, Artificial Sequence
  Description of Artificial Sequence: Synthetic oligonucleotide
gcgacuuccggaaucccgc

SEQ ID NO: 2575219 - RNA, 19 nt, Artificial Sequence
  Description of Artificial Sequence: Synthetic oligonucleotide
aauccgccuguggccaacu

SEQ ID NO: 2575220 - RNA, 19 nt, Artificial Sequence
  Description of Artificial Sequence: Synthetic oligonucleotide
cagaagcguuccgucaaug

SEQ ID NO: 2575221 - RNA, 19 nt, Artificial Sequence
  Description of Artificial Sequence: Synthetic oligonucleotide
ccuccugacacucccguuc

SEQ ID NO: 2575222 - RNA, 19 nt, Artificial Sequence
  Description of Artificial Sequence: Synthetic oligonucleotide
uguggccaacuaggaaacu

SEQ ID NO: 2575223 - RNA, 19 nt, Artificial Sequence
  Description of Artificial Sequence: Synthetic oligonucleotide
ggggcguuggggcaucaug

SEQ ID NO: 2575224 - RNA, 19 nt, Artificial Sequence
  Description of Artificial Sequence: Synthetic oligonucleotide
acaguucggggagcccgcg

SEQ ID NO: 2575225 - RNA, 19 nt, Artificial Sequence
  Description of Artificial Sequence: Synthetic oligonucleotide
gaggucaguccuacugcca

SEQ ID NO: 2575226 - RNA, 19 nt, Artificial Sequence
  Description of Artificial Sequence: Synthetic oligonucleotide
acaggacucccggacucug

SEQ ID NO: 2575227 - RNA, 19 nt, Artificial Sequence
  Description of Artificial Sequence: Synthetic oligonucleotide
ggacucccggacucugagg

SEQ ID NO: 2575228 - RNA, 19 nt, Artificial Sequence
  Description of Artificial Sequence: Synthetic oligonucleotide
uauccgugcgcggcggaaa

SEQ ID NO: 2575229 - RNA, 19 nt, Artificial Sequence
  Description of Artificial Sequence: Synthetic oligonucleotide
cacugaagccggggagucg

SEQ ID NO: 2575230 - RNA, 19 nt, Artificial Sequence
  Description of Artificial Sequence: Synthetic oligonucleotide
cuuccggaaucccgccgug

SEQ ID NO: 2575231 - RNA, 19 nt, Artificial Sequence
  Description of Artificial Sequence: Synthetic oligonucleotide
aggcugcuagcgccugcuc

SEQ ID NO: 2575232 - RNA, 19 nt, Artificial Sequence
  Description of Artificial Sequence: Synthetic oligonucleotide
gaaucccgccgugcaucgg

SEQ ID NO: 2575233 - RNA, 19 nt, Artificial Sequence
  Description of Artificial Sequence: Synthetic oligonucleotide
acgcccuccuuugccauug

SEQ ID NO: 2575234 - RNA, 19 nt, Artificial Sequence
  Description of Artificial Sequence: Synthetic oligonucleotide
cugcgacgucuacucgucc

SEQ ID NO: 2575235 - RNA, 19 nt, Artificial Sequence
  Description of Artificial Sequence: Synthetic oligonucleotide
caguccuacugccaggccu

SEQ ID NO: 2575236 - RNA, 19 nt, Artificial Sequence
  Description of Artificial Sequence: Synthetic oligonucleotide
uucggggagcccgcgcucu

SEQ ID NO: 2575237 - RNA, 19 nt, Artificial Sequence
  Description of Artificial Sequence: Synthetic oligonucleotide
cgucuacucguccacgccc

SEQ ID NO: 2575238 - RNA, 19 nt, Artificial Sequence
  Description of Artificial Sequence: Synthetic oligonucleotide
gccggggagucgaagaggc

SEQ ID NO: 2575239 - RNA, 19 nt, Artificial Sequence
  Description of Artificial Sequence: Synthetic oligonucleotide
gaaacacgugugucauggu

SEQ ID NO: 2575240 - RNA, 19 nt, Artificial Sequence
  Description of Artificial Sequence: Synthetic oligonucleotide
gaauccgccuguggccaac

SEQ ID NO: 2575241 - RNA, 19 nt, Artificial Sequence
  Description of Artificial Sequence: Synthetic oligonucleotide
ccaaugguuagcccgugga

SEQ ID NO: 2575242 - RNA, 19 nt, Artificial Sequence
  Description of Artificial Sequence: Synthetic oligonucleotide
ucggguccgacgaccccuc

SEQ ID NO: 2575243 - RNA, 19 nt, Artificial Sequence
  Description of Artificial Sequence: Synthetic oligonucleotide
ggagguaaggguggagaca

SEQ ID NO: 2575244 - RNA, 19 nt, Artificial Sequence
  Description of Artificial Sequence: Synthetic oligonucleotide
ucccaaugguuagcccgug

SEQ ID NO: 2575245 - RNA, 19 nt, Artificial Sequence
  Description of Artificial Sequence: Synthetic oligonucleotide
uaggaaacucugggccuuc

SEQ ID NO: 2575246 - RNA, 19 nt, Artificial Sequence
  Description of Artificial Sequence: Synthetic oligonucleotide
cacgugugucaugguagac

SEQ ID NO: 2575247 - RNA, 19 nt, Artificial Sequence
  Description of Artificial Sequence: Synthetic oligonucleotide
ccagcgacuuccggaaucc

SEQ ID NO: 2575248 - RNA, 19 nt, Artificial Sequence
  Description of Artificial Sequence: Synthetic oligonucleotide
ggccaacuaggaaacucug

SEQ ID NO: 2575249 - RNA, 19 nt, Artificial Sequence
  Description of Artificial Sequence: Synthetic oligonucleotide
cccaggagucagcaacucc

SEQ ID NO: 2575250 - RNA, 19 nt, Artificial Sequence
  Description of Artificial Sequence: Synthetic oligonucleotide
ugguagaccucggguccga

SEQ ID NO: 2575251 - RNA, 19 nt, Artificial Sequence
  Description of Artificial Sequence: Synthetic oligonucleotide
uccuccugacacucccguu

SEQ ID NO: 2575252 - RNA, 19 nt, Artificial Sequence
  Description of Artificial Sequence: Synthetic oligonucleotide
ggcguuggggcaucaugca

SEQ ID NO: 2575253 - RNA, 19 nt, Artificial Sequence
  Description of Artificial Sequence: Synthetic oligonucleotide
ccugacacucccguuccag

SEQ ID NO: 2575254 - RNA, 19 nt, Artificial Sequence
  Description of Artificial Sequence: Synthetic oligonucleotide
cccaaugguuagcccgugg

SEQ ID NO: 2575255 - RNA, 19 nt, Artificial Sequence
  Description of Artificial Sequence: Synthetic oligonucleotide
ccugcgacgucuacucguc

SEQ ID NO: 2575256 - RNA, 19 nt, Artificial Sequence
  Description of Artificial Sequence: Synthetic oligonucleotide
gcgacgucuacucguccac

SEQ ID NO: 2575257 - RNA, 19 nt, Artificial Sequence
  Description of Artificial Sequence: Synthetic oligonucleotide
agcguuccgucaauguguu

SEQ ID NO: 2575258 - RNA, 19 nt, Artificial Sequence
  Description of Artificial Sequence: Synthetic oligonucleotide
aucccgccgugcaucgggg

SEQ ID NO: 2575259 - RNA, 19 nt, Artificial Sequence
  Description of Artificial Sequence: Synthetic oligonucleotide
ccugcucguagguggggag

SEQ ID NO: 2575260 - RNA, 19 nt, Artificial Sequence
  Description of Artificial Sequence: Synthetic oligonucleotide
cggggagucgaagaggccc

SEQ ID NO: 2575261 - RNA, 19 nt, Artificial Sequence
  Description of Artificial Sequence: Synthetic oligonucleotide
aucaugcaccccagaggcu

SEQ ID NO: 2575262 - RNA, 19 nt, Artificial Sequence
  Description of Artificial Sequence: Synthetic oligonucleotide
ccgucaauguguuguccuc

SEQ ID NO: 2575263 - RNA, 19 nt, Artificial Sequence
  Description of Artificial Sequence: Synthetic oligonucleotide
ggacucugagguggcgccg

SEQ ID NO: 2575264 - RNA, 19 nt, Artificial Sequence
  Description of Artificial Sequence: Synthetic oligonucleotide
gacacucccguuccagguu

SEQ ID NO: 2575265 - RNA, 19 nt, Artificial Sequence
  Description of Artificial Sequence: Synthetic oligonucleotide
gcguuggggcaucaugcac

SEQ ID NO: 2575266 - RNA, 19 nt, Artificial Sequence
  Description of Artificial Sequence: Synthetic oligonucleotide
ggguccgacgaccccuccc

SEQ ID NO: 2575267 - RNA, 19 nt, Artificial Sequence
  Description of Artificial Sequence: Synthetic oligonucleotide
agcccgcgcucuugagcag

SEQ ID NO: 2575268 - RNA, 19 nt, Artificial Sequence
  Description of Artificial Sequence: Synthetic oligonucleotide
agguggccaaucccaugua

SEQ ID NO: 2575269 - RNA, 19 nt, Artificial Sequence
  Description of Artificial Sequence: Synthetic oligonucleotide
agguaaggguggagacaag

SEQ ID NO: 2575270 - RNA, 19 nt, Artificial Sequence
  Description of Artificial Sequence: Synthetic oligonucleotide
ccuacugccaggccugcga

SEQ ID NO: 2575271 - RNA, 19 nt, Artificial Sequence
  Description of Artificial Sequence: Synthetic oligonucleotide
cugacaggacucccggacu

SEQ ID NO: 2575272 - RNA, 19 nt, Artificial Sequence
  Description of Artificial Sequence: Synthetic oligonucleotide
ggcccagcgacuuccggaa

SEQ ID NO: 2575273 - RNA, 19 nt, Artificial Sequence
  Description of Artificial Sequence: Synthetic oligonucleotide
cggacucugagguggcgcc

SEQ ID NO: 2575274 - RNA, 19 nt, Artificial Sequence
  Description of Artificial Sequence: Synthetic oligonucleotide
ggccugcgacgucuacucg

SEQ ID NO: 2575275 - RNA, 19 nt, Artificial Sequence
  Description of Artificial Sequence: Synthetic oligonucleotide
ggagcaccucuccuccuga

SEQ ID NO: 2575276 - RNA, 19 nt, Artificial Sequence
  Description of Artificial Sequence: Synthetic oligonucleotide
cgaucccagaggucagucc

SEQ ID NO: 2575277 - RNA, 19 nt, Artificial Sequence
  Description of Artificial Sequence: Synthetic oligonucleotide
caggacucccggacucuga

SEQ ID NO: 2575278 - RNA, 19 nt, Artificial Sequence
  Description of Artificial Sequence: Synthetic oligonucleotide
cccggccucuugcugacag

SEQ ID NO: 2575279 - RNA, 19 nt, Artificial Sequence
  Description of Artificial Sequence: Synthetic oligonucleotide
ccgucgucgguaaugcaga

SEQ ID NO: 2575280 - RNA, 19 nt, Artificial Sequence
  Description of Artificial Sequence: Synthetic oligonucleotide
gaccacgaucccagagguc

SEQ ID NO: 2575281 - RNA, 19 nt, Artificial Sequence
  Description of Artificial Sequence: Synthetic oligonucleotide
cagcgacuuccggaauccc

SEQ ID NO: 2575282 - RNA, 19 nt, Artificial Sequence
  Description of Artificial Sequence: Synthetic oligonucleotide
ggucuucagugaggagggg

SEQ ID NO: 2575283 - RNA, 19 nt, Artificial Sequence
  Description of Artificial Sequence: Synthetic oligonucleotide
gcugcuagcgccugcucgu

SEQ ID NO: 2575284 - RNA, 19 nt, Artificial Sequence
  Description of Artificial Sequence: Synthetic oligonucleotide
cgugugucaugguagaccu

SEQ ID NO: 2575285 - RNA, 19 nt, Artificial Sequence
  Description of Artificial Sequence: Synthetic oligonucleotide
cugagguggcgccgucguc

SEQ ID NO: 2575286 - RNA, 19 nt, Artificial Sequence
  Description of Artificial Sequence: Synthetic oligonucleotide
gucuacucguccacgcccu

SEQ ID NO: 2575287 - RNA, 19 nt, Artificial Sequence
  Description of Artificial Sequence: Synthetic oligonucleotide
uuggggcaucaugcacccc

SEQ ID NO: 2575288 - RNA, 19 nt, Artificial Sequence
  Description of Artificial Sequence: Synthetic oligonucleotide
ggagucgaagaggcccagc

SEQ ID NO: 2575289 - RNA, 19 nt, Artificial Sequence
  Description of Artificial Sequence: Synthetic oligonucleotide
guagguggggaggccugga

SEQ ID NO: 2575290 - RNA, 19 nt, Artificial Sequence
  Description of Artificial Sequence: Synthetic oligonucleotide
ccguggaauccgccugugg

SEQ ID NO: 2575291 - RNA, 19 nt, Artificial Sequence
  Description of Artificial Sequence: Synthetic oligonucleotide
ccggacucugagguggcgc

SEQ ID NO: 2575292 - RNA, 19 nt, Artificial Sequence
  Description of Artificial Sequence: Synthetic oligonucleotide
ggggagucgaagaggccca

SEQ ID NO: 2575293 - RNA, 19 nt, Artificial Sequence
  Description of Artificial Sequence: Synthetic oligonucleotide
gcgccgucgucgguaaugc

SEQ ID NO: 2575294 - RNA, 19 nt, Artificial Sequence
  Description of Artificial Sequence: Synthetic oligonucleotide
guccuacugccaggccugc

SEQ ID NO: 2575295 - RNA, 19 nt, Artificial Sequence
  Description of Artificial Sequence: Synthetic oligonucleotide
gucgucgguaaugcagaua

SEQ ID NO: 2575296 - RNA, 19 nt, Artificial Sequence
  Description of Artificial Sequence: Synthetic oligonucleotide
cccagaagcguuccgucaa

SEQ ID NO: 2575297 - RNA, 19 nt, Artificial Sequence
  Description of Artificial Sequence: Synthetic oligonucleotide
gcccgcgcucuugagcagg

SEQ ID NO: 2575298 - RNA, 19 nt, Artificial Sequence
  Description of Artificial Sequence: Synthetic oligonucleotide
cuaggaaacucugggccuu

SEQ ID NO: 2575299 - RNA, 19 nt, Artificial Sequence
  Description of Artificial Sequence: Synthetic oligonucleotide
gugcgcggcggaaacacgu

SEQ ID NO: 2575300 - RNA, 19 nt, Artificial Sequence
  Description of Artificial Sequence: Synthetic oligonucleotide
ccaugagguaaggugucca

SEQ ID NO: 2575301 - RNA, 19 nt, Artificial Sequence
  Description of Artificial Sequence: Synthetic oligonucleotide
cguuccgucaauguguugu

SEQ ID NO: 2575302 - RNA, 19 nt, Artificial Sequence
  Description of Artificial Sequence: Synthetic oligonucleotide
cucccguuccagguuccca

SEQ ID NO: 2575303 - RNA, 19 nt, Artificial Sequence
  Description of Artificial Sequence: Synthetic oligonucleotide
cgucgguaaugcagauacc

SEQ ID NO: 2575304 - RNA, 19 nt, Artificial Sequence
  Description of Artificial Sequence: Synthetic oligonucleotide
ccccagaggcugcuagcgc

SEQ ID NO: 2575305 - RNA, 19 nt, Artificial Sequence
  Description of Artificial Sequence: Synthetic oligonucleotide
gugugucaugguagaccuc

SEQ ID NO: 2575306 - RNA, 19 nt, Artificial Sequence
  Description of Artificial Sequence: Synthetic oligonucleotide
cucguagguggggaggccu

SEQ ID NO: 2575307 - RNA, 19 nt, Artificial Sequence
  Description of Artificial Sequence: Synthetic oligonucleotide
cgacuuccggaaucccgcc

SEQ ID NO: 2575308 - RNA, 19 nt, Artificial Sequence
  Description of Artificial Sequence: Synthetic oligonucleotide
gccugcgacgucuacucgu

SEQ ID NO: 2575309 - RNA, 19 nt, Artificial Sequence
  Description of Artificial Sequence: Synthetic oligonucleotide
guggcgccgucgucgguaa

SEQ ID NO: 2575310 - RNA, 19 nt, Artificial Sequence
  Description of Artificial Sequence: Synthetic oligonucleotide
aucccagaggucaguccua

SEQ ID NO: 2575311 - RNA, 19 nt, Artificial Sequence
  Description of Artificial Sequence: Synthetic oligonucleotide
ccggccucuugcugacagg

SEQ ID NO: 2575312 - RNA, 19 nt, Artificial Sequence
  Description of Artificial Sequence: Synthetic oligonucleotide
cgcggcggaaacacgugug

SEQ ID NO: 2575313 - RNA, 19 nt, Artificial Sequence
  Description of Artificial Sequence: Synthetic oligonucleotide
auccgccuguggccaacua

SEQ ID NO: 2575314 - RNA, 19 nt, Artificial Sequence
  Description of Artificial Sequence: Synthetic oligonucleotide
ucggggagcccgcgcucuu

SEQ ID NO: 2575315 - RNA, 19 nt, Artificial Sequence
  Description of Artificial Sequence: Synthetic oligonucleotide
ggcacaguucggggagccc

SEQ ID NO: 2575316 - RNA, 19 nt, Artificial Sequence
  Description of Artificial Sequence: Synthetic oligonucleotide
cucggguccgacgaccccu

SEQ ID NO: 2575317 - RNA, 19 nt, Artificial Sequence
  Description of Artificial Sequence: Synthetic oligonucleotide
ugcaccccagaggcugcua

SEQ ID NO: 2575318 - RNA, 19 nt, Artificial Sequence
  Description of Artificial Sequence: Synthetic oligonucleotide
gcucccaagccagccaaaa

SEQ ID NO: 2575319 - RNA, 19 nt, Artificial Sequence
  Description of Artificial Sequence: Synthetic oligonucleotide
ggccaaucccauguagacu

SEQ ID NO: 2575320 - RNA, 19 nt, Artificial Sequence
  Description of Artificial Sequence: Synthetic oligonucleotide
cgugcgcggcggaaacacg

SEQ ID NO: 2575321 - RNA, 19 nt, Artificial Sequence
  Description of Artificial Sequence: Synthetic oligonucleotide
cgacgucuacucguccacg

SEQ ID NO: 2575322 - RNA, 19 nt, Artificial Sequence
  Description of Artificial Sequence: Synthetic oligonucleotide
cugaagccggggagucgaa

SEQ ID NO: 2575323 - RNA, 19 nt, Artificial Sequence
  Description of Artificial Sequence: Synthetic oligonucleotide
ccggggagucgaagaggcc

SEQ ID NO: 2575324 - RNA, 19 nt, Artificial Sequence
  Description of Artificial Sequence: Synthetic oligonucleotide
gguggcgccgucgucggua

SEQ ID NO: 2575325 - RNA, 19 nt, Artificial Sequence
  Description of Artificial Sequence: Synthetic oligonucleotide
caccucuccuccugacacu

SEQ ID NO: 2575326 - RNA, 19 nt, Artificial Sequence
  Description of Artificial Sequence: Synthetic oligonucleotide
gguagaccucggguccgac

SEQ ID NO: 2575327 - RNA, 19 nt, Artificial Sequence
  Description of Artificial Sequence: Synthetic oligonucleotide
cguagguggggaggccugg

SEQ ID NO: 2575328 - RNA, 19 nt, Artificial Sequence
  Description of Artificial Sequence: Synthetic oligonucleotide
ggccucuugcugacaggac

SEQ ID NO: 2575329 - RNA, 19 nt, Artificial Sequence
  Description of Artificial Sequence: Synthetic oligonucleotide
gcggcggaaacacgugugu

SEQ ID NO: 2575330 - RNA, 19 nt, Artificial Sequence
  Description of Artificial Sequence: Synthetic oligonucleotide
cggaaucccgccgugcauc

SEQ ID NO: 2575331 - RNA, 19 nt, Artificial Sequence
  Description of Artificial Sequence: Synthetic oligonucleotide
cgucaauguguuguccuca

SEQ ID NO: 2575332 - RNA, 19 nt, Artificial Sequence
  Description of Artificial Sequence: Synthetic oligonucleotide
gcggaaacacgugugucau

SEQ ID NO: 2575333 - RNA, 19 nt, Artificial Sequence
  Description of Artificial Sequence: Synthetic oligonucleotide
cugccaggccugcgacguc

SEQ ID NO: 2575334 - RNA, 19 nt, Artificial Sequence
  Description of Artificial Sequence: Synthetic oligonucleotide
cggaaacacgugugucaug

SEQ ID NO: 2575335 - RNA, 19 nt, Artificial Sequence
  Description of Artificial Sequence: Synthetic oligonucleotide
agguggcgccgucgucggu

SEQ ID NO: 2575336 - RNA, 19 nt, Artificial Sequence
  Description of Artificial Sequence: Synthetic oligonucleotide
ggggauccaggaagauauc

SEQ ID NO: 2575337 - RNA, 19 nt, Artificial Sequence
  Description of Artificial Sequence: Synthetic oligonucleotide
ccucggguccgacgacccc

SEQ ID NO: 2575338 - RNA, 19 nt, Artificial Sequence
  Description of Artificial Sequence: Synthetic oligonucleotide
gcguuccgucaauguguug

SEQ ID NO: 2575339 - RNA, 19 nt, Artificial Sequence
  Description of Artificial Sequence: Synthetic oligonucleotide
ccaaucccauguagacuaa

SEQ ID NO: 2575340 - RNA, 19 nt, Artificial Sequence
  Description of Artificial Sequence: Synthetic oligonucleotide
ggguggagacaagggcguc

SEQ ID NO: 2575341 - RNA, 19 nt, Artificial Sequence
  Description of Artificial Sequence: Synthetic oligonucleotide
guggggaggccuggaggua

SEQ ID NO: 2575342 - RNA, 19 nt, Artificial Sequence
  Description of Artificial Sequence: Synthetic oligonucleotide
cccggacucugagguggcg

SEQ ID NO: 2575343 - RNA, 19 nt, Artificial Sequence
  Description of Artificial Sequence: Synthetic oligonucleotide
ccaagccagccaaaacgau

SEQ ID NO: 2575344 - RNA, 19 nt, Artificial Sequence
  Description of Artificial Sequence: Synthetic oligonucleotide
gcccguggaauccgccugu

SEQ ID NO: 2575345 - RNA, 19 nt, Artificial Sequence
  Description of Artificial Sequence: Synthetic oligonucleotide
gcgcggcggaaacacgugu

SEQ ID NO: 2575346 - RNA, 19 nt, Artificial Sequence
  Description of Artificial Sequence: Synthetic oligonucleotide
cggcggaaacacguguguc

SEQ ID NO: 2575347 - RNA, 19 nt, Artificial Sequence
  Description of Artificial Sequence: Synthetic oligonucleotide
cccguggaauccgccugug

SEQ ID NO: 2575348 - RNA, 19 nt, Artificial Sequence
  Description of Artificial Sequence: Synthetic oligonucleotide
gcccuccuuugccauugua

SEQ ID NO: 2575349 - RNA, 19 nt, Artificial Sequence
  Description of Artificial Sequence: Synthetic oligonucleotide
gugaugagcccggccucuu

SEQ ID NO: 2575350 - RNA, 19 nt, Artificial Sequence
  Description of Artificial Sequence: Synthetic oligonucleotide
ggcucccaagccagccaaa

SEQ ID NO: 2575351 - RNA, 19 nt, Artificial Sequence
  Description of Artificial Sequence: Synthetic oligonucleotide
cacgcccuccuuugccauu

SEQ ID NO: 2575352 - RNA, 19 nt, Artificial Sequence
  Description of Artificial Sequence: Synthetic oligonucleotide
ccagaagcguuccgucaau

SEQ ID NO: 2575353 - RNA, 19 nt, Artificial Sequence
  Description of Artificial Sequence: Synthetic oligonucleotide
guccaggcagguggccaau

SEQ ID NO: 2575354 - RNA, 19 nt, Artificial Sequence
  Description of Artificial Sequence: Synthetic oligonucleotide
cgccugcucguaggugggg

SEQ ID NO: 2575355 - RNA, 19 nt, Artificial Sequence
  Description of Artificial Sequence: Synthetic oligonucleotide
cggguccgacgaccccucc

SEQ ID NO: 2575356 - RNA, 19 nt, Artificial Sequence
  Description of Artificial Sequence: Synthetic oligonucleotide
cccagaggucaguccuacu

SEQ ID NO: 2575357 - RNA, 19 nt, Artificial Sequence
  Description of Artificial Sequence: Synthetic oligonucleotide
ccacgcccuccuuugccau

SEQ ID NO: 2575358 - RNA, 19 nt, Artificial Sequence
  Description of Artificial Sequence: Synthetic oligonucleotide
cccgcgcucuugagcaggu

SEQ ID NO: 2575359 - RNA, 19 nt, Artificial Sequence
  Description of Artificial Sequence: Synthetic oligonucleotide
ccggaaucccgccgugcau

SEQ ID NO: 2575360 - RNA, 19 nt, Artificial Sequence
  Description of Artificial Sequence: Synthetic oligonucleotide
ccgcgcucuugagcagguc

SEQ ID NO: 2575361 - RNA, 19 nt, Artificial Sequence
  Description of Artificial Sequence: Synthetic oligonucleotide
cgccgucgucgguaaugca

SEQ ID NO: 2575362 - RNA, 19 nt, Artificial Sequence
  Description of Artificial Sequence: Synthetic oligonucleotide
gcccagcgacuuccggaau

SEQ ID NO: 2575363 - RNA, 19 nt, Artificial Sequence
  Description of Artificial Sequence: Synthetic oligonucleotide
cgucgucgguaaugcagau

SEQ ID NO: 2575364 - RNA, 19 nt, Artificial Sequence
  Description of Artificial Sequence: Synthetic oligonucleotide
cgcccuccuuugccauugu

SEQ ID NO: 2575365 - RNA, 19 nt, Artificial Sequence
  Description of Artificial Sequence: Synthetic oligonucleotide
aaauuauuaaauuaguugc

SEQ ID NO: 2575366 - RNA, 19 nt, Artificial Sequence
  Description of Artificial Sequence: Synthetic oligonucleotide
aaaauuauuaaauuaguug

SEQ ID NO: 2575367 - RNA, 19 nt, Artificial Sequence
  Description of Artificial Sequence: Synthetic oligonucleotide
aaugucaaggaauagcaac

SEQ ID NO: 2575368 - RNA, 19 nt, Artificial Sequence
  Description of Artificial Sequence: Synthetic oligonucleotide
auaauauacacauuacuac

SEQ ID NO: 2575369 - RNA, 19 nt, Artificial Sequence
  Description of Artificial Sequence: Synthetic oligonucleotide
aaagucaagaauuugaaua

SEQ ID NO: 2575370 - RNA, 19 nt, Artificial Sequence
  Description of Artificial Sequence: Synthetic oligonucleotide
uuuagcauugguaaggcag

SEQ ID NO: 2575371 - RNA, 19 nt, Artificial Sequence
  Description of Artificial Sequence: Synthetic oligonucleotide
uuuuauuacacaaauccca

SEQ ID NO: 2575372 - RNA, 19 nt, Artificial Sequence
  Description of Artificial Sequence: Synthetic oligonucleotide
aaucucaugaaugucaagg

SEQ ID NO: 2575373 - RNA, 19 nt, Artificial Sequence
  Description of Artificial Sequence: Synthetic oligonucleotide
agacaaauaaauuuuagca

SEQ ID NO: 2575374 - RNA, 19 nt, Artificial Sequence
  Description of Artificial Sequence: Synthetic oligonucleotide
uuugaauaagugcuuauag

SEQ ID NO: 2575375 - RNA, 19 nt, Artificial Sequence
  Description of Artificial Sequence: Synthetic oligonucleotide
agagaguugguuuagggac

SEQ ID NO: 2575376 - RNA, 19 nt, Artificial Sequence
  Description of Artificial Sequence: Synthetic oligonucleotide
acugauaaaaccaucauuc

SEQ ID NO: 2575377 - RNA, 19 nt, Artificial Sequence
  Description of Artificial Sequence: Synthetic oligonucleotide
gauuacuacugauaaaacc

SEQ ID NO: 2575378 - RNA, 19 nt, Artificial Sequence
  Description of Artificial Sequence: Synthetic oligonucleotide
uauaauguuggcaugguaa

SEQ ID NO: 2575379 - RNA, 19 nt, Artificial Sequence
  Description of Artificial Sequence: Synthetic oligonucleotide
uauuaaauuaguugcauau

SEQ ID NO: 2575380 - RNA, 19 nt, Artificial Sequence
  Description of Artificial Sequence: Synthetic oligonucleotide
aauaagugcuuauaguuau

SEQ ID NO: 2575381 - RNA, 19 nt, Artificial Sequence
  Description of Artificial Sequence: Synthetic oligonucleotide
aauuaaggauagcauuccg

SEQ ID NO: 2575382 - RNA, 19 nt, Artificial Sequence
  Description of Artificial Sequence: Synthetic oligonucleotide
uuugaacuacucuugauga

SEQ ID NO: 2575383 - RNA, 19 nt, Artificial Sequence
  Description of Artificial Sequence: Synthetic oligonucleotide
aaauuuuagcauugguaag

SEQ ID NO: 2575384 - RNA, 19 nt, Artificial Sequence
  Description of Artificial Sequence: Synthetic oligonucleotide
aucccaauagauaauauac

SEQ ID NO: 2575385 - RNA, 19 nt, Artificial Sequence
  Description of Artificial Sequence: Synthetic oligonucleotide
uacuucguuuguuacaugg

SEQ ID NO: 2575386 - RNA, 19 nt, Artificial Sequence
  Description of Artificial Sequence: Synthetic oligonucleotide
uacacauuacuacagauua

SEQ ID NO: 2575387 - RNA, 19 nt, Artificial Sequence
  Description of Artificial Sequence: Synthetic oligonucleotide
uuaaauuaguugcauauuu

SEQ ID NO: 2575388 - RNA, 19 nt, Artificial Sequence
  Description of Artificial Sequence: Synthetic oligonucleotide
auuacuacugauaaaacca

SEQ ID NO: 2575389 - RNA, 19 nt, Artificial Sequence
  Description of Artificial Sequence: Synthetic oligonucleotide
uaugcuaauguaaucugug

SEQ ID NO: 2575390 - RNA, 19 nt, Artificial Sequence
  Description of Artificial Sequence: Synthetic oligonucleotide
uuguaggcaaaucucauga

SEQ ID NO: 2575391 - RNA, 19 nt, Artificial Sequence
  Description of Artificial Sequence: Synthetic oligonucleotide
augaaugucaaggaauagc

SEQ ID NO: 2575392 - RNA, 19 nt, Artificial Sequence
  Description of Artificial Sequence: Synthetic oligonucleotide
aagucaagaauuugaauaa

SEQ ID NO: 2575393 - RNA, 19 nt, Artificial Sequence
  Description of Artificial Sequence: Synthetic oligonucleotide
ucucauaguugauaagccg

SEQ ID NO: 2575394 - RNA, 19 nt, Artificial Sequence
  Description of Artificial Sequence: Synthetic oligonucleotide
uugguaaggcagcagagag

SEQ ID NO: 2575395 - RNA, 19 nt, Artificial Sequence
  Description of Artificial Sequence: Synthetic oligonucleotide
agauaauauacacauuacu

SEQ ID NO: 2575396 - RNA, 19 nt, Artificial Sequence
  Description of Artificial Sequence: Synthetic oligonucleotide
guuggcaugguaauuaagg

SEQ ID NO: 2575397 - RNA, 19 nt, Artificial Sequence
  Description of Artificial Sequence: Synthetic oligonucleotide
auuuaugcuaauguaaucu

SEQ ID NO: 2575398 - RNA, 19 nt, Artificial Sequence
  Description of Artificial Sequence: Synthetic oligonucleotide
uuuaugcuaauguaaucug

SEQ ID NO: 2575399 - RNA, 19 nt, Artificial Sequence
  Description of Artificial Sequence: Synthetic oligonucleotide
uucuauaauguuggcaugg

SEQ ID NO: 2575400 - RNA, 19 nt, Artificial Sequence
  Description of Artificial Sequence: Synthetic oligonucleotide
aauuauuaaauuaguugca

SEQ ID NO: 2575401 - RNA, 19 nt, Artificial Sequence
  Description of Artificial Sequence: Synthetic oligonucleotide
ugauaaaaccaucauucaa

SEQ ID NO: 2575402 - RNA, 19 nt, Artificial Sequence
  Description of Artificial Sequence: Synthetic oligonucleotide
auuaguugcauauuuugaa

SEQ ID NO: 2575403 - RNA, 19 nt, Artificial Sequence
  Description of Artificial Sequence: Synthetic oligonucleotide
ucguuuguuacauggcacg

SEQ ID NO: 2575404 - RNA, 19 nt, Artificial Sequence
  Description of Artificial Sequence: Synthetic oligonucleotide
uguuacauggcacgcaaac

SEQ ID NO: 2575405 - RNA, 19 nt, Artificial Sequence
  Description of Artificial Sequence: Synthetic oligonucleotide
uuagcauugguaaggcagc

SEQ ID NO: 2575406 - RNA, 19 nt, Artificial Sequence
  Description of Artificial Sequence: Synthetic oligonucleotide
ugaacuacucuugaugaag

SEQ ID NO: 2575407 - RNA, 19 nt, Artificial Sequence
  Description of Artificial Sequence: Synthetic oligonucleotide
cuugcugcggacauagucc

SEQ ID NO: 2575408 - RNA, 19 nt, Artificial Sequence
  Description of Artificial Sequence: Synthetic oligonucleotide
aaaagucaagaauuugaau

SEQ ID NO: 2575409 - RNA, 19 nt, Artificial Sequence
  Description of Artificial Sequence: Synthetic oligonucleotide
gaugaagacaaauaaauuu

SEQ ID NO: 2575410 - RNA, 19 nt, Artificial Sequence
  Description of Artificial Sequence: Synthetic oligonucleotide
uugguuuagggacucucgg

SEQ ID NO: 2575411 - RNA, 19 nt, Artificial Sequence
  Description of Artificial Sequence: Synthetic oligonucleotide
uauaaaauuuuguuccuua

SEQ ID NO: 2575412 - RNA, 19 nt, Artificial Sequence
  Description of Artificial Sequence: Synthetic oligonucleotide
caucucauaguugauaagc

SEQ ID NO: 2575413 - RNA, 19 nt, Artificial Sequence
  Description of Artificial Sequence: Synthetic oligonucleotide
uuaguugcauauuuugaac

SEQ ID NO: 2575414 - RNA, 19 nt, Artificial Sequence
  Description of Artificial Sequence: Synthetic oligonucleotide
uugaauaagugcuuauagu

SEQ ID NO: 2575415 - RNA, 19 nt, Artificial Sequence
  Description of Artificial Sequence: Synthetic oligonucleotide
uucggcaagaccauuuaug

SEQ ID NO: 2575416 - RNA, 19 nt, Artificial Sequence
  Description of Artificial Sequence: Synthetic oligonucleotide
aguugauaagccguccucc

SEQ ID NO: 2575417 - RNA, 19 nt, Artificial Sequence
  Description of Artificial Sequence: Synthetic oligonucleotide
uagauaauauacacauuac

SEQ ID NO: 2575418 - RNA, 19 nt, Artificial Sequence
  Description of Artificial Sequence: Synthetic oligonucleotide
uuacacaaaucccaauaga

SEQ ID NO: 2575419 - RNA, 19 nt, Artificial Sequence
  Description of Artificial Sequence: Synthetic oligonucleotide
ucggcaagaccauuuaugc

SEQ ID NO: 2575420 - RNA, 19 nt, Artificial Sequence
  Description of Artificial Sequence: Synthetic oligonucleotide
ggaauagcaacagagggcg

SEQ ID NO: 2575421 - RNA, 19 nt, Artificial Sequence
  Description of Artificial Sequence: Synthetic oligonucleotide
aauuaguugcauauuuuga

SEQ ID NO: 2575422 - RNA, 19 nt, Artificial Sequence
  Description of Artificial Sequence: Synthetic oligonucleotide
uuaugcuaauguaaucugu

SEQ ID NO: 2575423 - RNA, 19 nt, Artificial Sequence
  Description of Artificial Sequence: Synthetic oligonucleotide
uuacuacagauuacuacug

SEQ ID NO: 2575424 - RNA, 19 nt, Artificial Sequence
  Description of Artificial Sequence: Synthetic oligonucleotide
gugcucaugagauaguccc

SEQ ID NO: 2575425 - RNA, 19 nt, Artificial Sequence
  Description of Artificial Sequence: Synthetic oligonucleotide
uuuguuacauggcacgcaa

SEQ ID NO: 2575426 - RNA, 19 nt, Artificial Sequence
  Description of Artificial Sequence: Synthetic oligonucleotide
caugagauagucccggaag

SEQ ID NO: 2575427 - RNA, 19 nt, Artificial Sequence
  Description of Artificial Sequence: Synthetic oligonucleotide
guaaucuguggcuuggcag

SEQ ID NO: 2575428 - RNA, 19 nt, Artificial Sequence
  Description of Artificial Sequence: Synthetic oligonucleotide
ugaagacaaauaaauuuua

SEQ ID NO: 2575429 - RNA, 19 nt, Artificial Sequence
  Description of Artificial Sequence: Synthetic oligonucleotide
aucucauaguugauaagcc

SEQ ID NO: 2575430 - RNA, 19 nt, Artificial Sequence
  Description of Artificial Sequence: Synthetic oligonucleotide
uaauuaaggauagcauucc

SEQ ID NO: 2575431 - RNA, 19 nt, Artificial Sequence
  Description of Artificial Sequence: Synthetic oligonucleotide
ucccaauagauaauauaca

SEQ ID NO: 2575432 - RNA, 19 nt, Artificial Sequence
  Description of Artificial Sequence: Synthetic oligonucleotide
cacaaaucccaauagauaa

SEQ ID NO: 2575433 - RNA, 19 nt, Artificial Sequence
  Description of Artificial Sequence: Synthetic oligonucleotide
aucauucaaaauuauuaaa

SEQ ID NO: 2575434 - RNA, 19 nt, Artificial Sequence
  Description of Artificial Sequence: Synthetic oligonucleotide
uaaauuaguugcauauuuu

SEQ ID NO: 2575435 - RNA, 19 nt, Artificial Sequence
  Description of Artificial Sequence: Synthetic oligonucleotide
auaaaaccaucauucaaaa

SEQ ID NO: 2575436 - RNA, 19 nt, Artificial Sequence
  Description of Artificial Sequence: Synthetic oligonucleotide
aauguuggcaugguaauua

SEQ ID NO: 2575437 - RNA, 19 nt, Artificial Sequence
  Description of Artificial Sequence: Synthetic oligonucleotide
ugauaagccguccucccug

SEQ ID NO: 2575438 - RNA, 19 nt, Artificial Sequence
  Description of Artificial Sequence: Synthetic oligonucleotide
ugguaauuaaggauagcau

SEQ ID NO: 2575439 - RNA, 19 nt, Artificial Sequence
  Description of Artificial Sequence: Synthetic oligonucleotide
uccucgaacugcuacgaag

SEQ ID NO: 2575440 - RNA, 19 nt, Artificial Sequence
  Description of Artificial Sequence: Synthetic oligonucleotide
uacgaagacgccuucuuac

SEQ ID NO: 2575441 - RNA, 19 nt, Artificial Sequence
  Description of Artificial Sequence: Synthetic oligonucleotide
auggggagaccccaguugg

SEQ ID NO: 2575442 - RNA, 19 nt, Artificial Sequence
  Description of Artificial Sequence: Synthetic oligonucleotide
aagaccauuuaugcuaaug

SEQ ID NO: 2575443 - RNA, 19 nt, Artificial Sequence
  Description of Artificial Sequence: Synthetic oligonucleotide
uucguuuguuacauggcac

SEQ ID NO: 2575444 - RNA, 19 nt, Artificial Sequence
  Description of Artificial Sequence: Synthetic oligonucleotide
cuacucuugaugaagacaa

SEQ ID NO: 2575445 - RNA, 19 nt, Artificial Sequence
  Description of Artificial Sequence: Synthetic oligonucleotide
acuacugauaaaaccauca

SEQ ID NO: 2575446 - RNA, 19 nt, Artificial Sequence
  Description of Artificial Sequence: Synthetic oligonucleotide
uugcauauuuugaacuacu

SEQ ID NO: 2575447 - RNA, 19 nt, Artificial Sequence
  Description of Artificial Sequence: Synthetic oligonucleotide
auauacacauuacuacaga

SEQ ID NO: 2575448 - RNA, 19 nt, Artificial Sequence
  Description of Artificial Sequence: Synthetic oligonucleotide
uuacuacugauaaaaccau

SEQ ID NO: 2575449 - RNA, 19 nt, Artificial Sequence
  Description of Artificial Sequence: Synthetic oligonucleotide
ugcuuauaguuauaaaauu

SEQ ID NO: 2575450 - RNA, 19 nt, Artificial Sequence
  Description of Artificial Sequence: Synthetic oligonucleotide
ucucaugaaugucaaggaa

SEQ ID NO: 2575451 - RNA, 19 nt, Artificial Sequence
  Description of Artificial Sequence: Synthetic oligonucleotide
aaaccaucauucaaaauua

SEQ ID NO: 2575452 - RNA, 19 nt, Artificial Sequence
  Description of Artificial Sequence: Synthetic oligonucleotide
gaggcuguaccuuguaggc

SEQ ID NO: 2575453 - RNA, 19 nt, Artificial Sequence
  Description of Artificial Sequence: Synthetic oligonucleotide
uuucuauaauguuggcaug

SEQ ID NO: 2575454 - RNA, 19 nt, Artificial Sequence
  Description of Artificial Sequence: Synthetic oligonucleotide
auaauguuggcaugguaau

SEQ ID NO: 2575455 - RNA, 19 nt, Artificial Sequence
  Description of Artificial Sequence: Synthetic oligonucleotide
uacuacagauuacuacuga

SEQ ID NO: 2575456 - RNA, 19 nt, Artificial Sequence
  Description of Artificial Sequence: Synthetic oligonucleotide
uugcugcggacauaguccg

SEQ ID NO: 2575457 - RNA, 19 nt, Artificial Sequence
  Description of Artificial Sequence: Synthetic oligonucleotide
ugcauauuuugaacuacuc

SEQ ID NO: 2575458 - RNA, 19 nt, Artificial Sequence
  Description of Artificial Sequence: Synthetic oligonucleotide
ggcuuuucuauaauguugg

SEQ ID NO: 2575459 - RNA, 19 nt, Artificial Sequence
  Description of Artificial Sequence: Synthetic oligonucleotide
ugaggcacucccuuucaag

SEQ ID NO: 2575460 - RNA, 19 nt, Artificial Sequence
  Description of Artificial Sequence: Synthetic oligonucleotide
ugcucaugagauagucccg

SEQ ID NO: 2575461 - RNA, 19 nt, Artificial Sequence
  Description of Artificial Sequence: Synthetic oligonucleotide
aggcaaaucucaugaaugu

SEQ ID NO: 2575462 - RNA, 19 nt, Artificial Sequence
  Description of Artificial Sequence: Synthetic oligonucleotide
ucgaacugcuacgaagacg

SEQ ID NO: 2575463 - RNA, 19 nt, Artificial Sequence
  Description of Artificial Sequence: Synthetic oligonucleotide
aauagcaacagagggcgaa

SEQ ID NO: 2575464 - RNA, 19 nt, Artificial Sequence
  Description of Artificial Sequence: Synthetic oligonucleotide
uguuggcaugguaauuaag

SEQ ID NO: 2575465 - RNA, 19 nt, Artificial Sequence
  Description of Artificial Sequence: Synthetic oligonucleotide
agauuacuacugauaaaac

SEQ ID NO: 2575466 - RNA, 19 nt, Artificial Sequence
  Description of Artificial Sequence: Synthetic oligonucleotide
cagauuacuacugauaaaa

SEQ ID NO: 2575467 - RNA, 19 nt, Artificial Sequence
  Description of Artificial Sequence: Synthetic oligonucleotide
auaguugauaagccguccu

SEQ ID NO: 2575468 - RNA, 19 nt, Artificial Sequence
  Description of Artificial Sequence: Synthetic oligonucleotide
uaaggauagcauuccgugu

SEQ ID NO: 2575469 - RNA, 19 nt, Artificial Sequence
  Description of Artificial Sequence: Synthetic oligonucleotide
cauugguaaggcagcagag

SEQ ID NO: 2575470 - RNA, 19 nt, Artificial Sequence
  Description of Artificial Sequence: Synthetic oligonucleotide
gcaaacagaagccaguuuc

SEQ ID NO: 2575471 - RNA, 19 nt, Artificial Sequence
  Description of Artificial Sequence: Synthetic oligonucleotide
cuuguaggcaaaucucaug

SEQ ID NO: 2575472 - RNA, 19 nt, Artificial Sequence
  Description of Artificial Sequence: Synthetic oligonucleotide
uaccuuguaggcaaaucuc

SEQ ID NO: 2575473 - RNA, 19 nt, Artificial Sequence
  Description of Artificial Sequence: Synthetic oligonucleotide
ucaucucauaguugauaag

SEQ ID NO: 2575474 - RNA, 19 nt, Artificial Sequence
  Description of Artificial Sequence: Synthetic oligonucleotide
augagauagucccggaagu

SEQ ID NO: 2575475 - RNA, 19 nt, Artificial Sequence
  Description of Artificial Sequence: Synthetic oligonucleotide
ugguccucgaacugcuacg

SEQ ID NO: 2575476 - RNA, 19 nt, Artificial Sequence
  Description of Artificial Sequence: Synthetic oligonucleotide
cccaauagauaauauacac

SEQ ID NO: 2575477 - RNA, 19 nt, Artificial Sequence
  Description of Artificial Sequence: Synthetic oligonucleotide
acuucguuuguuacauggc

SEQ ID NO: 2575478 - RNA, 19 nt, Artificial Sequence
  Description of Artificial Sequence: Synthetic oligonucleotide
cgaacugcuacgaagacgc

SEQ ID NO: 2575479 - RNA, 19 nt, Artificial Sequence
  Description of Artificial Sequence: Synthetic oligonucleotide
gagauagucccggaagucc

SEQ ID NO: 2575480 - RNA, 19 nt, Artificial Sequence
  Description of Artificial Sequence: Synthetic oligonucleotide
uggcacgcaaacagaagcc

SEQ ID NO: 2575481 - RNA, 19 nt, Artificial Sequence
  Description of Artificial Sequence: Synthetic oligonucleotide
guugauaagccguccuccc

SEQ ID NO: 2575482 - RNA, 19 nt, Artificial Sequence
  Description of Artificial Sequence: Synthetic oligonucleotide
cauuuaugcuaauguaauc

SEQ ID NO: 2575483 - RNA, 19 nt, Artificial Sequence
  Description of Artificial Sequence: Synthetic oligonucleotide
uaguccgccgcuuugcgca

SEQ ID NO: 2575484 - RNA, 19 nt, Artificial Sequence
  Description of Artificial Sequence: Synthetic oligonucleotide
gaagacgccuucuuacuca

SEQ ID NO: 2575485 - RNA, 19 nt, Artificial Sequence
  Description of Artificial Sequence: Synthetic oligonucleotide
ucucggcuuuucuauaaug

SEQ ID NO: 2575486 - RNA, 19 nt, Artificial Sequence
  Description of Artificial Sequence: Synthetic oligonucleotide
auaguccgccgcuuugcgc

SEQ ID NO: 2575487 - RNA, 19 nt, Artificial Sequence
  Description of Artificial Sequence: Synthetic oligonucleotide
ugguuuagggacucucggc

SEQ ID NO: 2575488 - RNA, 19 nt, Artificial Sequence
  Description of Artificial Sequence: Synthetic oligonucleotide
guugguuuagggacucucg

SEQ ID NO: 2575489 - RNA, 19 nt, Artificial Sequence
  Description of Artificial Sequence: Synthetic oligonucleotide
aguugcauauuuugaacua

SEQ ID NO: 2575490 - RNA, 19 nt, Artificial Sequence
  Description of Artificial Sequence: Synthetic oligonucleotide
uggcaugguaauuaaggau

SEQ ID NO: 2575491 - RNA, 19 nt, Artificial Sequence
  Description of Artificial Sequence: Synthetic oligonucleotide
acauaguccgccgcuuugc

SEQ ID NO: 2575492 - RNA, 19 nt, Artificial Sequence
  Description of Artificial Sequence: Synthetic oligonucleotide
auuaaggauagcauuccgu

SEQ ID NO: 2575493 - RNA, 19 nt, Artificial Sequence
  Description of Artificial Sequence: Synthetic oligonucleotide
aagugcuuauaguuauaaa

SEQ ID NO: 2575494 - RNA, 19 nt, Artificial Sequence
  Description of Artificial Sequence: Synthetic oligonucleotide
aguugguuuagggacucuc

SEQ ID NO: 2575495 - RNA, 19 nt, Artificial Sequence
  Description of Artificial Sequence: Synthetic oligonucleotide
uccguguuuucccuucggc

SEQ ID NO: 2575496 - RNA, 19 nt, Artificial Sequence
  Description of Artificial Sequence: Synthetic oligonucleotide
auuuugaacuacucuugau

SEQ ID NO: 2575497 - RNA, 19 nt, Artificial Sequence
  Description of Artificial Sequence: Synthetic oligonucleotide
guuucgaggcuguaccuug

SEQ ID NO: 2575498 - RNA, 19 nt, Artificial Sequence
  Description of Artificial Sequence: Synthetic oligonucleotide
uuuuagcauugguaaggca

SEQ ID NO: 2575499 - RNA, 19 nt, Artificial Sequence
  Description of Artificial Sequence: Synthetic oligonucleotide
uacuacugauaaaaccauc

SEQ ID NO: 2575500 - RNA, 19 nt, Artificial Sequence
  Description of Artificial Sequence: Synthetic oligonucleotide
uaguugauaagccguccuc

SEQ ID NO: 2575501 - RNA, 19 nt, Artificial Sequence
  Description of Artificial Sequence: Synthetic oligonucleotide
acucccuuucaagagcugg

SEQ ID NO: 2575502 - RNA, 19 nt, Artificial Sequence
  Description of Artificial Sequence: Synthetic oligonucleotide
auaaucucuggagacuucu

SEQ ID NO: 2575503 - RNA, 19 nt, Artificial Sequence
  Description of Artificial Sequence: Synthetic oligonucleotide
ucaugagauagucccggaa

SEQ ID NO: 2575504 - RNA, 19 nt, Artificial Sequence
  Description of Artificial Sequence: Synthetic oligonucleotide
ucgaggcuguaccuuguag

SEQ ID NO: 2575505 - RNA, 19 nt, Artificial Sequence
  Description of Artificial Sequence: Synthetic oligonucleotide
aacugcuacgaagacgccu

SEQ ID NO: 2575506 - RNA, 19 nt, Artificial Sequence
  Description of Artificial Sequence: Synthetic oligonucleotide
gaauaagugcuuauaguua

SEQ ID NO: 2575507 - RNA, 19 nt, Artificial Sequence
  Description of Artificial Sequence: Synthetic oligonucleotide
agggcgaaggucauccgcc

SEQ ID NO: 2575508 - RNA, 19 nt, Artificial Sequence
  Description of Artificial Sequence: Synthetic oligonucleotide
gaggcacucccuuucaaga

SEQ ID NO: 2575509 - RNA, 19 nt, Artificial Sequence
  Description of Artificial Sequence: Synthetic oligonucleotide
gauagcauuccguguuuuc

SEQ ID NO: 2575510 - RNA, 19 nt, Artificial Sequence
  Description of Artificial Sequence: Synthetic oligonucleotide
cuucguuuguuacauggca

SEQ ID NO: 2575511 - RNA, 19 nt, Artificial Sequence
  Description of Artificial Sequence: Synthetic oligonucleotide
aagugcgugcucaugagau

SEQ ID NO: 2575512 - RNA, 19 nt, Artificial Sequence
  Description of Artificial Sequence: Synthetic oligonucleotide
ucuauaauguuggcauggu

SEQ ID NO: 2575513 - RNA, 19 nt, Artificial Sequence
  Description of Artificial Sequence: Synthetic oligonucleotide
cuuuucuauaauguuggca

SEQ ID NO: 2575514 - RNA, 19 nt, Artificial Sequence
  Description of Artificial Sequence: Synthetic oligonucleotide
agcugggcuacuucguuug

SEQ ID NO: 2575515 - RNA, 19 nt, Artificial Sequence
  Description of Artificial Sequence: Synthetic oligonucleotide
uuccguguuuucccuucgg

SEQ ID NO: 2575516 - RNA, 19 nt, Artificial Sequence
  Description of Artificial Sequence: Synthetic oligonucleotide
cauaguugauaagccgucc

SEQ ID NO: 2575517 - RNA, 19 nt, Artificial Sequence
  Description of Artificial Sequence: Synthetic oligonucleotide
auuugaauaagugcuuaua

SEQ ID NO: 2575518 - RNA, 19 nt, Artificial Sequence
  Description of Artificial Sequence: Synthetic oligonucleotide
uugaacuacucuugaugaa

SEQ ID NO: 2575519 - RNA, 19 nt, Artificial Sequence
  Description of Artificial Sequence: Synthetic oligonucleotide
acacauuacuacagauuac

SEQ ID NO: 2575520 - RNA, 19 nt, Artificial Sequence
  Description of Artificial Sequence: Synthetic oligonucleotide
auuccguguuuucccuucg

SEQ ID NO: 2575521 - RNA, 19 nt, Artificial Sequence
  Description of Artificial Sequence: Synthetic oligonucleotide
uguaggcaaaucucaugaa

SEQ ID NO: 2575522 - RNA, 19 nt, Artificial Sequence
  Description of Artificial Sequence: Synthetic oligonucleotide
gacauaguccgccgcuuug

SEQ ID NO: 2575523 - RNA, 19 nt, Artificial Sequence
  Description of Artificial Sequence: Synthetic oligonucleotide
cauggcacgcaaacagaag

SEQ ID NO: 2575524 - RNA, 19 nt, Artificial Sequence
  Description of Artificial Sequence: Synthetic oligonucleotide
uuuagggacucucggcuuu

SEQ ID NO: 2575525 - RNA, 19 nt, Artificial Sequence
  Description of Artificial Sequence: Synthetic oligonucleotide
ggcaagaccauuuaugcua

SEQ ID NO: 2575526 - RNA, 19 nt, Artificial Sequence
  Description of Artificial Sequence: Synthetic oligonucleotide
aggcacucccuuucaagag

SEQ ID NO: 2575527 - RNA, 19 nt, Artificial Sequence
  Description of Artificial Sequence: Synthetic oligonucleotide
ccaucauucaaaauuauua

SEQ ID NO: 2575528 - RNA, 19 nt, Artificial Sequence
  Description of Artificial Sequence: Synthetic oligonucleotide
auugguaaggcagcagaga

SEQ ID NO: 2575529 - RNA, 19 nt, Artificial Sequence
  Description of Artificial Sequence: Synthetic oligonucleotide
gacgccuucuuacucaucu

SEQ ID NO: 2575530 - RNA, 19 nt, Artificial Sequence
  Description of Artificial Sequence: Synthetic oligonucleotide
gagggcgaaggucauccgc

SEQ ID NO: 2575531 - RNA, 19 nt, Artificial Sequence
  Description of Artificial Sequence: Synthetic oligonucleotide
gaacuacucuugaugaaga

SEQ ID NO: 2575532 - RNA, 19 nt, Artificial Sequence
  Description of Artificial Sequence: Synthetic oligonucleotide
ucggcuuuucuauaauguu

SEQ ID NO: 2575533 - RNA, 19 nt, Artificial Sequence
  Description of Artificial Sequence: Synthetic oligonucleotide
guaccuuguaggcaaaucu

SEQ ID NO: 2575534 - RNA, 19 nt, Artificial Sequence
  Description of Artificial Sequence: Synthetic oligonucleotide
cauaguccgccgcuuugcg

SEQ ID NO: 2575535 - RNA, 19 nt, Artificial Sequence
  Description of Artificial Sequence: Synthetic oligonucleotide
gugcgugcucaugagauag

SEQ ID NO: 2575536 - RNA, 19 nt, Artificial Sequence
  Description of Artificial Sequence: Synthetic oligonucleotide
aagacgccuucuuacucau

SEQ ID NO: 2575537 - RNA, 19 nt, Artificial Sequence
  Description of Artificial Sequence: Synthetic oligonucleotide
caaaucucaugaaugucaa

SEQ ID NO: 2575538 - RNA, 19 nt, Artificial Sequence
  Description of Artificial Sequence: Synthetic oligonucleotide
acgaagacgccuucuuacu

SEQ ID NO: 2575539 - RNA, 19 nt, Artificial Sequence
  Description of Artificial Sequence: Synthetic oligonucleotide
acucuugaugaagacaaau

SEQ ID NO: 2575540 - RNA, 19 nt, Artificial Sequence
  Description of Artificial Sequence: Synthetic oligonucleotide
guguuuucccuucggcaag

SEQ ID NO: 2575541 - RNA, 19 nt, Artificial Sequence
  Description of Artificial Sequence: Synthetic oligonucleotide
cagagaguugguuuaggga

SEQ ID NO: 2575542 - RNA, 19 nt, Artificial Sequence
  Description of Artificial Sequence: Synthetic oligonucleotide
ugggcuacuucguuuguua

SEQ ID NO: 2575543 - RNA, 19 nt, Artificial Sequence
  Description of Artificial Sequence: Synthetic oligonucleotide
aggucauccgcccacugau

SEQ ID NO: 2575544 - RNA, 19 nt, Artificial Sequence
  Description of Artificial Sequence: Synthetic oligonucleotide
ccaguuucgaggcuguacc

SEQ ID NO: 2575545 - RNA, 19 nt, Artificial Sequence
  Description of Artificial Sequence: Synthetic oligonucleotide
gauggcagcaauggggaga

SEQ ID NO: 2575546 - RNA, 19 nt, Artificial Sequence
  Description of Artificial Sequence: Synthetic oligonucleotide
uguaccuuguaggcaaauc

SEQ ID NO: 2575547 - RNA, 19 nt, Artificial Sequence
  Description of Artificial Sequence: Synthetic oligonucleotide
caagagcugguccucgaac

SEQ ID NO: 2575548 - RNA, 19 nt, Artificial Sequence
  Description of Artificial Sequence: Synthetic oligonucleotide
gguaauuaaggauagcauu

SEQ ID NO: 2575549 - RNA, 19 nt, Artificial Sequence
  Description of Artificial Sequence: Synthetic oligonucleotide
gcaaaucucaugaauguca

SEQ ID NO: 2575550 - RNA, 19 nt, Artificial Sequence
  Description of Artificial Sequence: Synthetic oligonucleotide
ccacugauaaucucuggag

SEQ ID NO: 2575551 - RNA, 19 nt, Artificial Sequence
  Description of Artificial Sequence: Synthetic oligonucleotide
cauuccguguuuucccuuc

SEQ ID NO: 2575552 - RNA, 19 nt, Artificial Sequence
  Description of Artificial Sequence: Synthetic oligonucleotide
auagcaacagagggcgaag

SEQ ID NO: 2575553 - RNA, 19 nt, Artificial Sequence
  Description of Artificial Sequence: Synthetic oligonucleotide
ugagauagucccggaaguc

SEQ ID NO: 2575554 - RNA, 19 nt, Artificial Sequence
  Description of Artificial Sequence: Synthetic oligonucleotide
agcauuccguguuuucccu

SEQ ID NO: 2575555 - RNA, 19 nt, Artificial Sequence
  Description of Artificial Sequence: Synthetic oligonucleotide
cucaugaaugucaaggaau

SEQ ID NO: 2575556 - RNA, 19 nt, Artificial Sequence
  Description of Artificial Sequence: Synthetic oligonucleotide
guggcuuggcagcaguggc

SEQ ID NO: 2575557 - RNA, 19 nt, Artificial Sequence
  Description of Artificial Sequence: Synthetic oligonucleotide
auacacauuacuacagauu

SEQ ID NO: 2575558 - RNA, 19 nt, Artificial Sequence
  Description of Artificial Sequence: Synthetic oligonucleotide
gaagugcgugcucaugaga

SEQ ID NO: 2575559 - RNA, 19 nt, Artificial Sequence
  Description of Artificial Sequence: Synthetic oligonucleotide
uuucgaggcuguaccuugu

SEQ ID NO: 2575560 - RNA, 19 nt, Artificial Sequence
  Description of Artificial Sequence: Synthetic oligonucleotide
ccaauagauaauauacaca

SEQ ID NO: 2575561 - RNA, 19 nt, Artificial Sequence
  Description of Artificial Sequence: Synthetic oligonucleotide
uaagccguccucccugaau

SEQ ID NO: 2575562 - RNA, 19 nt, Artificial Sequence
  Description of Artificial Sequence: Synthetic oligonucleotide
cugguccucgaacugcuac

SEQ ID NO: 2575563 - RNA, 19 nt, Artificial Sequence
  Description of Artificial Sequence: Synthetic oligonucleotide
ccaguuggcaacugggccc

SEQ ID NO: 2575564 - RNA, 19 nt, Artificial Sequence
  Description of Artificial Sequence: Synthetic oligonucleotide
gcuaauguaaucuguggcu

SEQ ID NO: 2575565 - RNA, 19 nt, Artificial Sequence
  Description of Artificial Sequence: Synthetic oligonucleotide
ugcggacauaguccgccgc

SEQ ID NO: 2575566 - RNA, 19 nt, Artificial Sequence
  Description of Artificial Sequence: Synthetic oligonucleotide
cauccgcccacugauaauc

SEQ ID NO: 2575567 - RNA, 19 nt, Artificial Sequence
  Description of Artificial Sequence: Synthetic oligonucleotide
caugguaauuaaggauagc

SEQ ID NO: 2575568 - RNA, 19 nt, Artificial Sequence
  Description of Artificial Sequence: Synthetic oligonucleotide
gugcuuauaguuauaaaau

SEQ ID NO: 2575569 - RNA, 19 nt, Artificial Sequence
  Description of Artificial Sequence: Synthetic oligonucleotide
acucucggcuuuucuauaa

SEQ ID NO: 2575570 - RNA, 19 nt, Artificial Sequence
  Description of Artificial Sequence: Synthetic oligonucleotide
gcucaugagauagucccgg

SEQ ID NO: 2575571 - RNA, 19 nt, Artificial Sequence
  Description of Artificial Sequence: Synthetic oligonucleotide
cacauuacuacagauuacu

SEQ ID NO: 2575572 - RNA, 19 nt, Artificial Sequence
  Description of Artificial Sequence: Synthetic oligonucleotide
ggcaugguaauuaaggaua

SEQ ID NO: 2575573 - RNA, 19 nt, Artificial Sequence
  Description of Artificial Sequence: Synthetic oligonucleotide
uggcuuggcagcaguggcu

SEQ ID NO: 2575574 - RNA, 19 nt, Artificial Sequence
  Description of Artificial Sequence: Synthetic oligonucleotide
gcauugguaaggcagcaga

SEQ ID NO: 2575575 - RNA, 19 nt, Artificial Sequence
  Description of Artificial Sequence: Synthetic oligonucleotide
auguuggcaugguaauuaa

SEQ ID NO: 2575576 - RNA, 19 nt, Artificial Sequence
  Description of Artificial Sequence: Synthetic oligonucleotide
guaggcaaaucucaugaau

SEQ ID NO: 2575577 - RNA, 19 nt, Artificial Sequence
  Description of Artificial Sequence: Synthetic oligonucleotide
agagggcgaaggucauccg

SEQ ID NO: 2575578 - RNA, 19 nt, Artificial Sequence
  Description of Artificial Sequence: Synthetic oligonucleotide
cucggcuuuucuauaaugu

SEQ ID NO: 2575579 - RNA, 19 nt, Artificial Sequence
  Description of Artificial Sequence: Synthetic oligonucleotide
gaaggucauccgcccacug

SEQ ID NO: 2575580 - RNA, 19 nt, Artificial Sequence
  Description of Artificial Sequence: Synthetic oligonucleotide
gauaaucucuggagacuuc

SEQ ID NO: 2575581 - RNA, 19 nt, Artificial Sequence
  Description of Artificial Sequence: Synthetic oligonucleotide
gaaugucaaggaauagcaa

SEQ ID NO: 2575582 - RNA, 19 nt, Artificial Sequence
  Description of Artificial Sequence: Synthetic oligonucleotide
auggccgugcgugcggucg

SEQ ID NO: 2575583 - RNA, 19 nt, Artificial Sequence
  Description of Artificial Sequence: Synthetic oligonucleotide
guuuguuacauggcacgca

SEQ ID NO: 2575584 - RNA, 19 nt, Artificial Sequence
  Description of Artificial Sequence: Synthetic oligonucleotide
cucgaacugcuacgaagac

SEQ ID NO: 2575585 - RNA, 19 nt, Artificial Sequence
  Description of Artificial Sequence: Synthetic oligonucleotide
agcauugguaaggcagcag

SEQ ID NO: 2575586 - RNA, 19 nt, Artificial Sequence
  Description of Artificial Sequence: Synthetic oligonucleotide
cuuucaagagcugguccuc

SEQ ID NO: 2575587 - RNA, 19 nt, Artificial Sequence
  Description of Artificial Sequence: Synthetic oligonucleotide
uggggagaccccaguuggc

SEQ ID NO: 2575588 - RNA, 19 nt, Artificial Sequence
  Description of Artificial Sequence: Synthetic oligonucleotide
gucauccgcccacugauaa

SEQ ID NO: 2575589 - RNA, 19 nt, Artificial Sequence
  Description of Artificial Sequence: Synthetic oligonucleotide
acauggcacgcaaacagaa

SEQ ID NO: 2575590 - RNA, 19 nt, Artificial Sequence
  Description of Artificial Sequence: Synthetic oligonucleotide
gguuuagggacucucggcu

SEQ ID NO: 2575591 - RNA, 19 nt, Artificial Sequence
  Description of Artificial Sequence: Synthetic oligonucleotide
agcgccccagccauggccg

SEQ ID NO: 2575592 - RNA, 19 nt, Artificial Sequence
  Description of Artificial Sequence: Synthetic oligonucleotide
uagucccggaaguccuugc

SEQ ID NO: 2575593 - RNA, 19 nt, Artificial Sequence
  Description of Artificial Sequence: Synthetic oligonucleotide
ggcuguaccuuguaggcaa

SEQ ID NO: 2575594 - RNA, 19 nt, Artificial Sequence
  Description of Artificial Sequence: Synthetic oligonucleotide
auagucccggaaguccuug

SEQ ID NO: 2575595 - RNA, 19 nt, Artificial Sequence
  Description of Artificial Sequence: Synthetic oligonucleotide
cugcggacauaguccgccg

SEQ ID NO: 2575596 - RNA, 19 nt, Artificial Sequence
  Description of Artificial Sequence: Synthetic oligonucleotide
ugcgugcucaugagauagu

SEQ ID NO: 2575597 - RNA, 19 nt, Artificial Sequence
  Description of Artificial Sequence: Synthetic oligonucleotide
gcuuuucuauaauguuggc

SEQ ID NO: 2575598 - RNA, 19 nt, Artificial Sequence
  Description of Artificial Sequence: Synthetic oligonucleotide
agcaguggcugaggcacuc

SEQ ID NO: 2575599 - RNA, 19 nt, Artificial Sequence
  Description of Artificial Sequence: Synthetic oligonucleotide
cccaguuggcaacugggcc

SEQ ID NO: 2575600 - RNA, 19 nt, Artificial Sequence
  Description of Artificial Sequence: Synthetic oligonucleotide
ugcuacgaagacgccuucu

SEQ ID NO: 2575601 - RNA, 19 nt, Artificial Sequence
  Description of Artificial Sequence: Synthetic oligonucleotide
ggcaacugggccccagaag

SEQ ID NO: 2575602 - RNA, 19 nt, Artificial Sequence
  Description of Artificial Sequence: Synthetic oligonucleotide
cuauaauguuggcauggua

SEQ ID NO: 2575603 - RNA, 19 nt, Artificial Sequence
  Description of Artificial Sequence: Synthetic oligonucleotide
ugaaugagcugggcuacuu

SEQ ID NO: 2575604 - RNA, 19 nt, Artificial Sequence
  Description of Artificial Sequence: Synthetic oligonucleotide
cuacuucguuuguuacaug

SEQ ID NO: 2575605 - RNA, 19 nt, Artificial Sequence
  Description of Artificial Sequence: Synthetic oligonucleotide
agggacucucggcuuuucu

SEQ ID NO: 2575606 - RNA, 19 nt, Artificial Sequence
  Description of Artificial Sequence: Synthetic oligonucleotide
aguccgccgcuuugcgcac

SEQ ID NO: 2575607 - RNA, 19 nt, Artificial Sequence
  Description of Artificial Sequence: Synthetic oligonucleotide
uggccgugcgugcggucgg

SEQ ID NO: 2575608 - RNA, 19 nt, Artificial Sequence
  Description of Artificial Sequence: Synthetic oligonucleotide
uucgaggcuguaccuugua

SEQ ID NO: 2575609 - RNA, 19 nt, Artificial Sequence
  Description of Artificial Sequence: Synthetic oligonucleotide
uugcgcaccagcgccccag

SEQ ID NO: 2575610 - RNA, 19 nt, Artificial Sequence
  Description of Artificial Sequence: Synthetic oligonucleotide
aguuucgaggcuguaccuu

SEQ ID NO: 2575611 - RNA, 19 nt, Artificial Sequence
  Description of Artificial Sequence: Synthetic oligonucleotide
ucauccgcccacugauaau

SEQ ID NO: 2575612 - RNA, 19 nt, Artificial Sequence
  Description of Artificial Sequence: Synthetic oligonucleotide
agugcgugcucaugagaua

SEQ ID NO: 2575613 - RNA, 19 nt, Artificial Sequence
  Description of Artificial Sequence: Synthetic oligonucleotide
ccucgaacugcuacgaaga

SEQ ID NO: 2575614 - RNA, 19 nt, Artificial Sequence
  Description of Artificial Sequence: Synthetic oligonucleotide
ugcugcggacauaguccgc

SEQ ID NO: 2575615 - RNA, 19 nt, Artificial Sequence
  Description of Artificial Sequence: Synthetic oligonucleotide
uccgcccacugauaaucuc

SEQ ID NO: 2575616 - RNA, 19 nt, Artificial Sequence
  Description of Artificial Sequence: Synthetic oligonucleotide
acagagggcgaaggucauc

SEQ ID NO: 2575617 - RNA, 19 nt, Artificial Sequence
  Description of Artificial Sequence: Synthetic oligonucleotide
ggagaccccaguuggcaac

SEQ ID NO: 2575618 - RNA, 19 nt, Artificial Sequence
  Description of Artificial Sequence: Synthetic oligonucleotide
gcugcggacauaguccgcc

SEQ ID NO: 2575619 - RNA, 19 nt, Artificial Sequence
  Description of Artificial Sequence: Synthetic oligonucleotide
gguaaggcagcagagaguu

SEQ ID NO: 2575620 - RNA, 19 nt, Artificial Sequence
  Description of Artificial Sequence: Synthetic oligonucleotide
gagaguugguuuagggacu

SEQ ID NO: 2575621 - RNA, 19 nt, Artificial Sequence
  Description of Artificial Sequence: Synthetic oligonucleotide
acgcaaacagaagccaguu

SEQ ID NO: 2575622 - RNA, 19 nt, Artificial Sequence
  Description of Artificial Sequence: Synthetic oligonucleotide
aacagagggcgaaggucau

SEQ ID NO: 2575623 - RNA, 19 nt, Artificial Sequence
  Description of Artificial Sequence: Synthetic oligonucleotide
gcagcagagaguugguuua

SEQ ID NO: 2575624 - RNA, 19 nt, Artificial Sequence
  Description of Artificial Sequence: Synthetic oligonucleotide
ugggccccagaagugcgug

SEQ ID NO: 2575625 - RNA, 19 nt, Artificial Sequence
  Description of Artificial Sequence: Synthetic oligonucleotide
gcacgcaaacagaagccag

SEQ ID NO: 2575626 - RNA, 19 nt, Artificial Sequence
  Description of Artificial Sequence: Synthetic oligonucleotide
cagcagagaguugguuuag

SEQ ID NO: 2575627 - RNA, 19 nt, Artificial Sequence
  Description of Artificial Sequence: Synthetic oligonucleotide
cuaauguaaucuguggcuu

SEQ ID NO: 2575628 - RNA, 19 nt, Artificial Sequence
  Description of Artificial Sequence: Synthetic oligonucleotide
auaagugcuuauaguuaua

SEQ ID NO: 2575629 - RNA, 19 nt, Artificial Sequence
  Description of Artificial Sequence: Synthetic oligonucleotide
gacucucggcuuuucuaua

SEQ ID NO: 2575630 - RNA, 19 nt, Artificial Sequence
  Description of Artificial Sequence: Synthetic oligonucleotide
aggcuguaccuuguaggca

SEQ ID NO: 2575631 - RNA, 19 nt, Artificial Sequence
  Description of Artificial Sequence: Synthetic oligonucleotide
cacgcaaacagaagccagu

SEQ ID NO: 2575632 - RNA, 19 nt, Artificial Sequence
  Description of Artificial Sequence: Synthetic oligonucleotide
ugcgcaccagcgccccagc

SEQ ID NO: 2575633 - RNA, 19 nt, Artificial Sequence
  Description of Artificial Sequence: Synthetic oligonucleotide
cuacgaagacgccuucuua

SEQ ID NO: 2575634 - RNA, 19 nt, Artificial Sequence
  Description of Artificial Sequence: Synthetic oligonucleotide
cgugcucaugagauagucc

SEQ ID NO: 2575635 - RNA, 19 nt, Artificial Sequence
  Description of Artificial Sequence: Synthetic oligonucleotide
uuugcgcaccagcgcccca

SEQ ID NO: 2575636 - RNA, 19 nt, Artificial Sequence
  Description of Artificial Sequence: Synthetic oligonucleotide
gaacugcuacgaagacgcc

SEQ ID NO: 2575637 - RNA, 19 nt, Artificial Sequence
  Description of Artificial Sequence: Synthetic oligonucleotide
gggcuacuucguuuguuac

SEQ ID NO: 2575638 - RNA, 19 nt, Artificial Sequence
  Description of Artificial Sequence: Synthetic oligonucleotide
cugauaaucucuggagacu

SEQ ID NO: 2575639 - RNA, 19 nt, Artificial Sequence
  Description of Artificial Sequence: Synthetic oligonucleotide
gaauagcaacagagggcga

SEQ ID NO: 2575640 - RNA, 19 nt, Artificial Sequence
  Description of Artificial Sequence: Synthetic oligonucleotide
cagccauggccgugcgugc

SEQ ID NO: 2575641 - RNA, 19 nt, Artificial Sequence
  Description of Artificial Sequence: Synthetic oligonucleotide
ccugaaugagcugggcuac

SEQ ID NO: 2575642 - RNA, 19 nt, Artificial Sequence
  Description of Artificial Sequence: Synthetic oligonucleotide
cgcuuugcgcaccagcgcc

SEQ ID NO: 2575643 - RNA, 19 nt, Artificial Sequence
  Description of Artificial Sequence: Synthetic oligonucleotide
ggcugaggcacucccuuuc

SEQ ID NO: 2575644 - RNA, 19 nt, Artificial Sequence
  Description of Artificial Sequence: Synthetic oligonucleotide
aguggcugaggcacucccu

SEQ ID NO: 2575645 - RNA, 19 nt, Artificial Sequence
  Description of Artificial Sequence: Synthetic oligonucleotide
gcuacuucguuuguuacau

SEQ ID NO: 2575646 - RNA, 19 nt, Artificial Sequence
  Description of Artificial Sequence: Synthetic oligonucleotide
ccguccucccugaaugagc

SEQ ID NO: 2575647 - RNA, 19 nt, Artificial Sequence
  Description of Artificial Sequence: Synthetic oligonucleotide
ggcacgcaaacagaagcca

SEQ ID NO: 2575648 - RNA, 19 nt, Artificial Sequence
  Description of Artificial Sequence: Synthetic oligonucleotide
uuagggacucucggcuuuu

SEQ ID NO: 2575649 - RNA, 19 nt, Artificial Sequence
  Description of Artificial Sequence: Synthetic oligonucleotide
cucccuuucaagagcuggu

SEQ ID NO: 2575650 - RNA, 19 nt, Artificial Sequence
  Description of Artificial Sequence: Synthetic oligonucleotide
guaaggcagcagagaguug

SEQ ID NO: 2575651 - RNA, 19 nt, Artificial Sequence
  Description of Artificial Sequence: Synthetic oligonucleotide
gggacucucggcuuuucua

SEQ ID NO: 2575652 - RNA, 19 nt, Artificial Sequence
  Description of Artificial Sequence: Synthetic oligonucleotide
gggcgaaggucauccgccc

SEQ ID NO: 2575653 - RNA, 19 nt, Artificial Sequence
  Description of Artificial Sequence: Synthetic oligonucleotide
ccguguuuucccuucggca

SEQ ID NO: 2575654 - RNA, 19 nt, Artificial Sequence
  Description of Artificial Sequence: Synthetic oligonucleotide
cguuuguuacauggcacgc

SEQ ID NO: 2575655 - RNA, 19 nt, Artificial Sequence
  Description of Artificial Sequence: Synthetic oligonucleotide
cguguuuucccuucggcaa

SEQ ID NO: 2575656 - RNA, 19 nt, Artificial Sequence
  Description of Artificial Sequence: Synthetic oligonucleotide
ggagacuucuucaugucau

SEQ ID NO: 2575657 - RNA, 19 nt, Artificial Sequence
  Description of Artificial Sequence: Synthetic oligonucleotide
gcaagaccauuuaugcuaa

SEQ ID NO: 2575658 - RNA, 19 nt, Artificial Sequence
  Description of Artificial Sequence: Synthetic oligonucleotide
guuuagggacucucggcuu

SEQ ID NO: 2575659 - RNA, 19 nt, Artificial Sequence
  Description of Artificial Sequence: Synthetic oligonucleotide
ggacucucggcuuuucuau

SEQ ID NO: 2575660 - RNA, 19 nt, Artificial Sequence
  Description of Artificial Sequence: Synthetic oligonucleotide
ccuuucaagagcugguccu

SEQ ID NO: 2575661 - RNA, 19 nt, Artificial Sequence
  Description of Artificial Sequence: Synthetic oligonucleotide
gugcggucggcggugcagc

SEQ ID NO: 2575662 - RNA, 19 nt, Artificial Sequence
  Description of Artificial Sequence: Synthetic oligonucleotide
gguccucgaacugcuacga

SEQ ID NO: 2575663 - RNA, 19 nt, Artificial Sequence
  Description of Artificial Sequence: Synthetic oligonucleotide
ggcagcagagaguugguuu

SEQ ID NO: 2575664 - RNA, 19 nt, Artificial Sequence
  Description of Artificial Sequence: Synthetic oligonucleotide
gccauggccgugcgugcgg

SEQ ID NO: 2575665 - RNA, 19 nt, Artificial Sequence
  Description of Artificial Sequence: Synthetic oligonucleotide
agacgccuucuuacucauc

SEQ ID NO: 2575666 - RNA, 19 nt, Artificial Sequence
  Description of Artificial Sequence: Synthetic oligonucleotide
auccgcccacugauaaucu

SEQ ID NO: 2575667 - RNA, 19 nt, Artificial Sequence
  Description of Artificial Sequence: Synthetic oligonucleotide
cagcaauggggagacccca

SEQ ID NO: 2575668 - RNA, 19 nt, Artificial Sequence
  Description of Artificial Sequence: Synthetic oligonucleotide
cugcuacgaagacgccuuc

SEQ ID NO: 2575669 - RNA, 19 nt, Artificial Sequence
  Description of Artificial Sequence: Synthetic oligonucleotide
ggggagaccccaguuggca

SEQ ID NO: 2575670 - RNA, 19 nt, Artificial Sequence
  Description of Artificial Sequence: Synthetic oligonucleotide
caguuucgaggcuguaccu

SEQ ID NO: 2575671 - RNA, 19 nt, Artificial Sequence
  Description of Artificial Sequence: Synthetic oligonucleotide
cgaagacgccuucuuacuc

SEQ ID NO: 2575672 - RNA, 19 nt, Artificial Sequence
  Description of Artificial Sequence: Synthetic oligonucleotide
gcgugcucaugagauaguc

SEQ ID NO: 2575673 - RNA, 19 nt, Artificial Sequence
  Description of Artificial Sequence: Synthetic oligonucleotide
uagggacucucggcuuuuc

SEQ ID NO: 2575674 - RNA, 19 nt, Artificial Sequence
  Description of Artificial Sequence: Synthetic oligonucleotide
gagaccccaguuggcaacu

SEQ ID NO: 2575675 - RNA, 19 nt, Artificial Sequence
  Description of Artificial Sequence: Synthetic oligonucleotide
cuucggcaagaccauuuau

SEQ ID NO: 2575676 - RNA, 19 nt, Artificial Sequence
  Description of Artificial Sequence: Synthetic oligonucleotide
ccuucuuacucaucucaua

SEQ ID NO: 2575677 - RNA, 19 nt, Artificial Sequence
  Description of Artificial Sequence: Synthetic oligonucleotide
ugcgugcggucggcggugc

SEQ ID NO: 2575678 - RNA, 19 nt, Artificial Sequence
  Description of Artificial Sequence: Synthetic oligonucleotide
ccgcuuugcgcaccagcgc

SEQ ID NO: 2575679 - RNA, 19 nt, Artificial Sequence
  Description of Artificial Sequence: Synthetic oligonucleotide
gcuacgaagacgccuucuu

SEQ ID NO: 2575680 - RNA, 19 nt, Artificial Sequence
  Description of Artificial Sequence: Synthetic oligonucleotide
gugcgugcggucggcggug

SEQ ID NO: 2575681 - RNA, 19 nt, Artificial Sequence
  Description of Artificial Sequence: Synthetic oligonucleotide
ccgugcgugcggucggcgg

SEQ ID NO: 2575682 - RNA, 19 nt, Artificial Sequence
  Description of Artificial Sequence: Synthetic oligonucleotide
aguccuugcugcggacaua

SEQ ID NO: 2575683 - RNA, 19 nt, Artificial Sequence
  Description of Artificial Sequence: Synthetic oligonucleotide
gauagucccggaaguccuu

SEQ ID NO: 2575684 - RNA, 19 nt, Artificial Sequence
  Description of Artificial Sequence: Synthetic oligonucleotide
gggccccagaagugcgugc

SEQ ID NO: 2575685 - RNA, 19 nt, Artificial Sequence
  Description of Artificial Sequence: Synthetic oligonucleotide
gcaauggggagaccccagu

SEQ ID NO: 2575686 - RNA, 19 nt, Artificial Sequence
  Description of Artificial Sequence: Synthetic oligonucleotide
cucucggcuuuucuauaau

SEQ ID NO: 2575687 - RNA, 19 nt, Artificial Sequence
  Description of Artificial Sequence: Synthetic oligonucleotide
ccuuguaggcaaaucucau

SEQ ID NO: 2575688 - RNA, 19 nt, Artificial Sequence
  Description of Artificial Sequence: Synthetic oligonucleotide
gcacucccuuucaagagcu

SEQ ID NO: 2575689 - RNA, 19 nt, Artificial Sequence
  Description of Artificial Sequence: Synthetic oligonucleotide
cggucggcggugcagccgc

SEQ ID NO: 2575690 - RNA, 19 nt, Artificial Sequence
  Description of Artificial Sequence: Synthetic oligonucleotide
ccuucggcaagaccauuua

SEQ ID NO: 2575691 - RNA, 19 nt, Artificial Sequence
  Description of Artificial Sequence: Synthetic oligonucleotide
gaguugguuuagggacucu

SEQ ID NO: 2575692 - RNA, 19 nt, Artificial Sequence
  Description of Artificial Sequence: Synthetic oligonucleotide
caccagcgccccagccaug

SEQ ID NO: 2575693 - RNA, 19 nt, Artificial Sequence
  Description of Artificial Sequence: Synthetic oligonucleotide
gcggucggcggugcagccg

SEQ ID NO: 2575694 - RNA, 19 nt, Artificial Sequence
  Description of Artificial Sequence: Synthetic oligonucleotide
ccgcccacugauaaucucu

SEQ ID NO: 2575695 - RNA, 19 nt, Artificial Sequence
  Description of Artificial Sequence: Synthetic oligonucleotide
gcaccagcgccccagccau

SEQ ID NO: 2575696 - RNA, 19 nt, Artificial Sequence
  Description of Artificial Sequence: Synthetic oligonucleotide
ggacauaguccgccgcuuu

SEQ ID NO: 2575697 - RNA, 19 nt, Artificial Sequence
  Description of Artificial Sequence: Synthetic oligonucleotide
cugggccccagaagugcgu

SEQ ID NO: 2575698 - RNA, 19 nt, Artificial Sequence
  Description of Artificial Sequence: Synthetic oligonucleotide
agccaguuucgaggcugua

SEQ ID NO: 2575699 - RNA, 19 nt, Artificial Sequence
  Description of Artificial Sequence: Synthetic oligonucleotide
gccgugcgugcggucggcg

SEQ ID NO: 2575700 - RNA, 19 nt, Artificial Sequence
  Description of Artificial Sequence: Synthetic oligonucleotide
cgugcggucggcggugcag

SEQ ID NO: 2575701 - RNA, 19 nt, Artificial Sequence
  Description of Artificial Sequence: Synthetic oligonucleotide
ggccccagaagugcgugcu

SEQ ID NO: 2575702 - RNA, 19 nt, Artificial Sequence
  Description of Artificial Sequence: Synthetic oligonucleotide
gccccagaagugcgugcuc

SEQ ID NO: 2575703 - RNA, 19 nt, Artificial Sequence
  Description of Artificial Sequence: Synthetic oligonucleotide
cuguaccuuguaggcaaau

SEQ ID NO: 2575704 - RNA, 19 nt, Artificial Sequence
  Description of Artificial Sequence: Synthetic oligonucleotide
ggucauccgcccacugaua

SEQ ID NO: 2575705 - RNA, 19 nt, Artificial Sequence
  Description of Artificial Sequence: Synthetic oligonucleotide
gcuguaccuuguaggcaaa

SEQ ID NO: 2575706 - RNA, 19 nt, Artificial Sequence
  Description of Artificial Sequence: Synthetic oligonucleotide
gcugggcuacuucguuugu

SEQ ID NO: 2575707 - RNA, 19 nt, Artificial Sequence
  Description of Artificial Sequence: Synthetic oligonucleotide
gcauuccguguuuucccuu

SEQ ID NO: 2575708 - RNA, 19 nt, Artificial Sequence
  Description of Artificial Sequence: Synthetic oligonucleotide
ccccagccauggccgugcg

SEQ ID NO: 2575709 - RNA, 19 nt, Artificial Sequence
  Description of Artificial Sequence: Synthetic oligonucleotide
cggcaagaccauuuaugcu

SEQ ID NO: 2575710 - RNA, 19 nt, Artificial Sequence
  Description of Artificial Sequence: Synthetic oligonucleotide
gcgugcggucggcggugca

SEQ ID NO: 2575711 - RNA, 19 nt, Artificial Sequence
  Description of Artificial Sequence: Synthetic oligonucleotide
cgugcgugcggucggcggu

SEQ ID NO: 2575712 - RNA, 19 nt, Artificial Sequence
  Description of Artificial Sequence: Synthetic oligonucleotide
ccauggccgugcgugcggu

SEQ ID NO: 2575713 - RNA, 19 nt, Artificial Sequence
  Description of Artificial Sequence: Synthetic oligonucleotide
gcgccccagccauggccgu

SEQ ID NO: 2575714 - RNA, 19 nt, Artificial Sequence
  Description of Artificial Sequence: Synthetic oligonucleotide
cccagccauggccgugcgu

SEQ ID NO: 2575715 - RNA, 19 nt, Artificial Sequence
  Description of Artificial Sequence: Synthetic oligonucleotide
cggacauaguccgccgcuu

SEQ ID NO: 2575716 - RNA, 19 nt, Artificial Sequence
  Description of Artificial Sequence: Synthetic oligonucleotide
uucuugaggaucuugaccg

SEQ ID NO: 2575717 - RNA, 19 nt, Artificial Sequence
  Description of Artificial Sequence: Synthetic oligonucleotide
ugguagaucaccucggugg

SEQ ID NO: 2575718 - RNA, 19 nt, Artificial Sequence
  Description of Artificial Sequence: Synthetic oligonucleotide
auguuguagagugugaccc

SEQ ID NO: 2575719 - RNA, 19 nt, Artificial Sequence
  Description of Artificial Sequence: Synthetic oligonucleotide
guagauauugucucccucg

SEQ ID NO: 2575720 - RNA, 19 nt, Artificial Sequence
  Description of Artificial Sequence: Synthetic oligonucleotide
cucggcaacacccaggucg

SEQ ID NO: 2575721 - RNA, 19 nt, Artificial Sequence
  Description of Artificial Sequence: Synthetic oligonucleotide
agcgaaagggugcagggcc

SEQ ID NO: 2575722 - RNA, 19 nt, Artificial Sequence
  Description of Artificial Sequence: Synthetic oligonucleotide
aaggugucgaguccguugg

SEQ ID NO: 2575723 - RNA, 19 nt, Artificial Sequence
  Description of Artificial Sequence: Synthetic oligonucleotide
uauugucucccucgaaugg

SEQ ID NO: 2575724 - RNA, 19 nt, Artificial Sequence
  Description of Artificial Sequence: Synthetic oligonucleotide
agcuuguagauauugucuc

SEQ ID NO: 2575725 - RNA, 19 nt, Artificial Sequence
  Description of Artificial Sequence: Synthetic oligonucleotide
aucuugaccgcccugcgac

SEQ ID NO: 2575726 - RNA, 19 nt, Artificial Sequence
  Description of Artificial Sequence: Synthetic oligonucleotide
uggagaaccucuuggcugg

SEQ ID NO: 2575727 - RNA, 19 nt, Artificial Sequence
  Description of Artificial Sequence: Synthetic oligonucleotide
uugagcgugccguuggugg

SEQ ID NO: 2575728 - RNA, 19 nt, Artificial Sequence
  Description of Artificial Sequence: Synthetic oligonucleotide
gauguuguagagugugacc

SEQ ID NO: 2575729 - RNA, 19 nt, Artificial Sequence
  Description of Artificial Sequence: Synthetic oligonucleotide
aaugcccuggcuguguagg

SEQ ID NO: 2575730 - RNA, 19 nt, Artificial Sequence
  Description of Artificial Sequence: Synthetic oligonucleotide
ucauccacagcgaaagggu

SEQ ID NO: 2575731 - RNA, 19 nt, Artificial Sequence
  Description of Artificial Sequence: Synthetic oligonucleotide
uguguagguacuccaggcc

SEQ ID NO: 2575732 - RNA, 19 nt, Artificial Sequence
  Description of Artificial Sequence: Synthetic oligonucleotide
ugagaaggugucgaguccg

SEQ ID NO: 2575733 - RNA, 19 nt, Artificial Sequence
  Description of Artificial Sequence: Synthetic oligonucleotide
aucugucggauggagaacc

SEQ ID NO: 2575734 - RNA, 19 nt, Artificial Sequence
  Description of Artificial Sequence: Synthetic oligonucleotide
acaagggauggugaagucc

SEQ ID NO: 2575735 - RNA, 19 nt, Artificial Sequence
  Description of Artificial Sequence: Synthetic oligonucleotide
auauugucucccucgaaug

SEQ ID NO: 2575736 - RNA, 19 nt, Artificial Sequence
  Description of Artificial Sequence: Synthetic oligonucleotide
cucggagcaggucagaaag

SEQ ID NO: 2575737 - RNA, 19 nt, Artificial Sequence
  Description of Artificial Sequence: Synthetic oligonucleotide
uucaccuugccguacgagc

SEQ ID NO: 2575738 - RNA, 19 nt, Artificial Sequence
  Description of Artificial Sequence: Synthetic oligonucleotide
ucaccuugccguacgagcc

SEQ ID NO: 2575739 - RNA, 19 nt, Artificial Sequence
  Description of Artificial Sequence: Synthetic oligonucleotide
uugaaaccugagaaggugu

SEQ ID NO: 2575740 - RNA, 19 nt, Artificial Sequence
  Description of Artificial Sequence: Synthetic oligonucleotide
aaacucacucucuggaaaa

SEQ ID NO: 2575741 - RNA, 19 nt, Artificial Sequence
  Description of Artificial Sequence: Synthetic oligonucleotide
gugagcagcagguugccgg

SEQ ID NO: 2575742 - RNA, 19 nt, Artificial Sequence
  Description of Artificial Sequence: Synthetic oligonucleotide
uccaccuugaaaccugaga

SEQ ID NO: 2575743 - RNA, 19 nt, Artificial Sequence
  Description of Artificial Sequence: Synthetic oligonucleotide
ugucggauggagaaccucu

SEQ ID NO: 2575744 - RNA, 19 nt, Artificial Sequence
  Description of Artificial Sequence: Synthetic oligonucleotide
gaaggugucgaguccguug

SEQ ID NO: 2575745 - RNA, 19 nt, Artificial Sequence
  Description of Artificial Sequence: Synthetic oligonucleotide
gaaucgaugcgguggauga

SEQ ID NO: 2575746 - RNA, 19 nt, Artificial Sequence
  Description of Artificial Sequence: Synthetic oligonucleotide
uagauauugucucccucga

SEQ ID NO: 2575747 - RNA, 19 nt, Artificial Sequence
  Description of Artificial Sequence: Synthetic oligonucleotide
gucauccacagcgaaaggg

SEQ ID NO: 2575748 - RNA, 19 nt, Artificial Sequence
  Description of Artificial Sequence: Synthetic oligonucleotide
gacacaaggucucggaguc

SEQ ID NO: 2575749 - RNA, 19 nt, Artificial Sequence
  Description of Artificial Sequence: Synthetic oligonucleotide
aguggugggccgcagucac

SEQ ID NO: 2575750 - RNA, 19 nt, Artificial Sequence
  Description of Artificial Sequence: Synthetic oligonucleotide
uguagauauugucucccuc

SEQ ID NO: 2575751 - RNA, 19 nt, Artificial Sequence
  Description of Artificial Sequence: Synthetic oligonucleotide
cuugaaaccugagaaggug

SEQ ID NO: 2575752 - RNA, 19 nt, Artificial Sequence
  Description of Artificial Sequence: Synthetic oligonucleotide
ucggcaacacccaggucgg

SEQ ID NO: 2575753 - RNA, 19 nt, Artificial Sequence
  Description of Artificial Sequence: Synthetic oligonucleotide
ugggccgcagucacaaggg

SEQ ID NO: 2575754 - RNA, 19 nt, Artificial Sequence
  Description of Artificial Sequence: Synthetic oligonucleotide
gaaaccugagaaggugucg

SEQ ID NO: 2575755 - RNA, 19 nt, Artificial Sequence
  Description of Artificial Sequence: Synthetic oligonucleotide
gaaccucuuggcuggcucg

SEQ ID NO: 2575756 - RNA, 19 nt, Artificial Sequence
  Description of Artificial Sequence: Synthetic oligonucleotide
aaggucucggaguccagca

SEQ ID NO: 2575757 - RNA, 19 nt, Artificial Sequence
  Description of Artificial Sequence: Synthetic oligonucleotide
gaaacucacucucuggaaa

SEQ ID NO: 2575758 - RNA, 19 nt, Artificial Sequence
  Description of Artificial Sequence: Synthetic oligonucleotide
uguagagugugaccccagc

SEQ ID NO: 2575759 - RNA, 19 nt, Artificial Sequence
  Description of Artificial Sequence: Synthetic oligonucleotide
accgaaacucacucucugg

SEQ ID NO: 2575760 - RNA, 19 nt, Artificial Sequence
  Description of Artificial Sequence: Synthetic oligonucleotide
agcuuggcgcgcuugcggc

SEQ ID NO: 2575761 - RNA, 19 nt, Artificial Sequence
  Description of Artificial Sequence: Synthetic oligonucleotide
ugauguuguagagugugac

SEQ ID NO: 2575762 - RNA, 19 nt, Artificial Sequence
  Description of Artificial Sequence: Synthetic oligonucleotide
ucggguggcuggaaggccg

SEQ ID NO: 2575763 - RNA, 19 nt, Artificial Sequence
  Description of Artificial Sequence: Synthetic oligonucleotide
uguuguagagugugacccc

SEQ ID NO: 2575764 - RNA, 19 nt, Artificial Sequence
  Description of Artificial Sequence: Synthetic oligonucleotide
agagugugaccccagcuga

SEQ ID NO: 2575765 - RNA, 19 nt, Artificial Sequence
  Description of Artificial Sequence: Synthetic oligonucleotide
ucaacuucuugacguuggc

SEQ ID NO: 2575766 - RNA, 19 nt, Artificial Sequence
  Description of Artificial Sequence: Synthetic oligonucleotide
uguccaugcccaccgaaac

SEQ ID NO: 2575767 - RNA, 19 nt, Artificial Sequence
  Description of Artificial Sequence: Synthetic oligonucleotide
ucguacuccaacaucccuc

SEQ ID NO: 2575768 - RNA, 19 nt, Artificial Sequence
  Description of Artificial Sequence: Synthetic oligonucleotide
gucagaaaguggugggccg

SEQ ID NO: 2575769 - RNA, 19 nt, Artificial Sequence
  Description of Artificial Sequence: Synthetic oligonucleotide
uccuucaccuugccguacg

SEQ ID NO: 2575770 - RNA, 19 nt, Artificial Sequence
  Description of Artificial Sequence: Synthetic oligonucleotide
aggccgucaacuucuugac

SEQ ID NO: 2575771 - RNA, 19 nt, Artificial Sequence
  Description of Artificial Sequence: Synthetic oligonucleotide
gauauugucucccucgaau

SEQ ID NO: 2575772 - RNA, 19 nt, Artificial Sequence
  Description of Artificial Sequence: Synthetic oligonucleotide
guacuugccgaugagcuug

SEQ ID NO: 2575773 - RNA, 19 nt, Artificial Sequence
  Description of Artificial Sequence: Synthetic oligonucleotide
aucucggguggcuggaagg

SEQ ID NO: 2575774 - RNA, 19 nt, Artificial Sequence
  Description of Artificial Sequence: Synthetic oligonucleotide
cuugccgaugagcuuggcg

SEQ ID NO: 2575775 - RNA, 19 nt, Artificial Sequence
  Description of Artificial Sequence: Synthetic oligonucleotide
uuggccucgccauugggga

SEQ ID NO: 2575776 - RNA, 19 nt, Artificial Sequence
  Description of Artificial Sequence: Synthetic oligonucleotide
ugucauccacagcgaaagg

SEQ ID NO: 2575777 - RNA, 19 nt, Artificial Sequence
  Description of Artificial Sequence: Synthetic oligonucleotide
cucgguggaaucgaugcgg

SEQ ID NO: 2575778 - RNA, 19 nt, Artificial Sequence
  Description of Artificial Sequence: Synthetic oligonucleotide
ucgaauggauacaggccug

SEQ ID NO: 2575779 - RNA, 19 nt, Artificial Sequence
  Description of Artificial Sequence: Synthetic oligonucleotide
gaguccguuggcgaucucg

SEQ ID NO: 2575780 - RNA, 19 nt, Artificial Sequence
  Description of Artificial Sequence: Synthetic oligonucleotide
aucagguacuugccgauga

SEQ ID NO: 2575781 - RNA, 19 nt, Artificial Sequence
  Description of Artificial Sequence: Synthetic oligonucleotide
gaucaccucgguggaaucg

SEQ ID NO: 2575782 - RNA, 19 nt, Artificial Sequence
  Description of Artificial Sequence: Synthetic oligonucleotide
caccuugaaaccugagaag

SEQ ID NO: 2575783 - RNA, 19 nt, Artificial Sequence
  Description of Artificial Sequence: Synthetic oligonucleotide
uccguuggcgaucucgggu

SEQ ID NO: 2575784 - RNA, 19 nt, Artificial Sequence
  Description of Artificial Sequence: Synthetic oligonucleotide
gugggccgcagucacaagg

SEQ ID NO: 2575785 - RNA, 19 nt, Artificial Sequence
  Description of Artificial Sequence: Synthetic oligonucleotide
ugccgaugagcuuggcgcg

SEQ ID NO: 2575786 - RNA, 19 nt, Artificial Sequence
  Description of Artificial Sequence: Synthetic oligonucleotide
uugacguuggccucgccau

SEQ ID NO: 2575787 - RNA, 19 nt, Artificial Sequence
  Description of Artificial Sequence: Synthetic oligonucleotide
ucggagaucuugagcgugc

SEQ ID NO: 2575788 - RNA, 19 nt, Artificial Sequence
  Description of Artificial Sequence: Synthetic oligonucleotide
ucgccauuggggauccugc

SEQ ID NO: 2575789 - RNA, 19 nt, Artificial Sequence
  Description of Artificial Sequence: Synthetic oligonucleotide
uggugaaguccccucuccc

SEQ ID NO: 2575790 - RNA, 19 nt, Artificial Sequence
  Description of Artificial Sequence: Synthetic oligonucleotide
ggugaaguccccucucccg

SEQ ID NO: 2575791 - RNA, 19 nt, Artificial Sequence
  Description of Artificial Sequence: Synthetic oligonucleotide
ugccguacgagcccucccc

SEQ ID NO: 2575792 - RNA, 19 nt, Artificial Sequence
  Description of Artificial Sequence: Synthetic oligonucleotide
ucggauggagaaccucuug

SEQ ID NO: 2575793 - RNA, 19 nt, Artificial Sequence
  Description of Artificial Sequence: Synthetic oligonucleotide
agguugccggcugaugucc

SEQ ID NO: 2575794 - RNA, 19 nt, Artificial Sequence
  Description of Artificial Sequence: Synthetic oligonucleotide
ugcgacacaaggucucgga

SEQ ID NO: 2575795 - RNA, 19 nt, Artificial Sequence
  Description of Artificial Sequence: Synthetic oligonucleotide
guuggccucgccauugggg

SEQ ID NO: 2575796 - RNA, 19 nt, Artificial Sequence
  Description of Artificial Sequence: Synthetic oligonucleotide
aucgaugcgguggaugaag

SEQ ID NO: 2575797 - RNA, 19 nt, Artificial Sequence
  Description of Artificial Sequence: Synthetic oligonucleotide
uacuugccgaugagcuugg

SEQ ID NO: 2575798 - RNA, 19 nt, Artificial Sequence
  Description of Artificial Sequence: Synthetic oligonucleotide
uuguagagugugaccccag

SEQ ID NO: 2575799 - RNA, 19 nt, Artificial Sequence
  Description of Artificial Sequence: Synthetic oligonucleotide
cugagaaggugucgagucc

SEQ ID NO: 2575800 - RNA, 19 nt, Artificial Sequence
  Description of Artificial Sequence: Synthetic oligonucleotide
aaagggugcagggccucgg

SEQ ID NO: 2575801 - RNA, 19 nt, Artificial Sequence
  Description of Artificial Sequence: Synthetic oligonucleotide
uuggggauccugcguagcu

SEQ ID NO: 2575802 - RNA, 19 nt, Artificial Sequence
  Description of Artificial Sequence: Synthetic oligonucleotide
ucagaaaguggugggccgc

SEQ ID NO: 2575803 - RNA, 19 nt, Artificial Sequence
  Description of Artificial Sequence: Synthetic oligonucleotide
auuggggauccugcguagc

SEQ ID NO: 2575804 - RNA, 19 nt, Artificial Sequence
  Description of Artificial Sequence: Synthetic oligonucleotide
gauggugaaguccccucuc

SEQ ID NO: 2575805 - RNA, 19 nt, Artificial Sequence
  Description of Artificial Sequence: Synthetic oligonucleotide
ggauggagaaccucuuggc

SEQ ID NO: 2575806 - RNA, 19 nt, Artificial Sequence
  Description of Artificial Sequence: Synthetic oligonucleotide
cucggaguccagcaccucc

SEQ ID NO: 2575807 - RNA, 19 nt, Artificial Sequence
  Description of Artificial Sequence: Synthetic oligonucleotide
agaucaccucgguggaauc

SEQ ID NO: 2575808 - RNA, 19 nt, Artificial Sequence
  Description of Artificial Sequence: Synthetic oligonucleotide
ugcccaccgaaacucacuc

SEQ ID NO: 2575809 - RNA, 19 nt, Artificial Sequence
  Description of Artificial Sequence: Synthetic oligonucleotide
caggccgucaacuucuuga

SEQ ID NO: 2575810 - RNA, 19 nt, Artificial Sequence
  Description of Artificial Sequence: Synthetic oligonucleotide
gucucccucgaauggauac

SEQ ID NO: 2575811 - RNA, 19 nt, Artificial Sequence
  Description of Artificial Sequence: Synthetic oligonucleotide
cccucgaauggauacaggc

SEQ ID NO: 2575812 - RNA, 19 nt, Artificial Sequence
  Description of Artificial Sequence: Synthetic oligonucleotide
agucacaagggauggugaa

SEQ ID NO: 2575813 - RNA, 19 nt, Artificial Sequence
  Description of Artificial Sequence: Synthetic oligonucleotide
gguggugagcagcagguug

SEQ ID NO: 2575814 - RNA, 19 nt, Artificial Sequence
  Description of Artificial Sequence: Synthetic oligonucleotide
ucggaguccagcaccuccu

SEQ ID NO: 2575815 - RNA, 19 nt, Artificial Sequence
  Description of Artificial Sequence: Synthetic oligonucleotide
gauggagaaccucuuggcu

SEQ ID NO: 2575816 - RNA, 19 nt, Artificial Sequence
  Description of Artificial Sequence: Synthetic oligonucleotide
aaguccccucucccgaugu

SEQ ID NO: 2575817 - RNA, 19 nt, Artificial Sequence
  Description of Artificial Sequence: Synthetic oligonucleotide
ggcucguacuccaacaucc

SEQ ID NO: 2575818 - RNA, 19 nt, Artificial Sequence
  Description of Artificial Sequence: Synthetic oligonucleotide
uggauacaggccuguggug

SEQ ID NO: 2575819 - RNA, 19 nt, Artificial Sequence
  Description of Artificial Sequence: Synthetic oligonucleotide
ucccucgaauggauacagg

SEQ ID NO: 2575820 - RNA, 19 nt, Artificial Sequence
  Description of Artificial Sequence: Synthetic oligonucleotide
uccacagcgaaagggugca

SEQ ID NO: 2575821 - RNA, 19 nt, Artificial Sequence
  Description of Artificial Sequence: Synthetic oligonucleotide
cucgaauggauacaggccu

SEQ ID NO: 2575822 - RNA, 19 nt, Artificial Sequence
  Description of Artificial Sequence: Synthetic oligonucleotide
aguccguuggcgaucucgg

SEQ ID NO: 2575823 - RNA, 19 nt, Artificial Sequence
  Description of Artificial Sequence: Synthetic oligonucleotide
uagaucaccucgguggaau

SEQ ID NO: 2575824 - RNA, 19 nt, Artificial Sequence
  Description of Artificial Sequence: Synthetic oligonucleotide
uccggcaggugucauccac

SEQ ID NO: 2575825 - RNA, 19 nt, Artificial Sequence
  Description of Artificial Sequence: Synthetic oligonucleotide
cuugacguuggccucgcca

SEQ ID NO: 2575826 - RNA, 19 nt, Artificial Sequence
  Description of Artificial Sequence: Synthetic oligonucleotide
gucacaagggauggugaag

SEQ ID NO: 2575827 - RNA, 19 nt, Artificial Sequence
  Description of Artificial Sequence: Synthetic oligonucleotide
ccucgaauggauacaggcc

SEQ ID NO: 2575828 - RNA, 19 nt, Artificial Sequence
  Description of Artificial Sequence: Synthetic oligonucleotide
uggcucguccggcaggugu

SEQ ID NO: 2575829 - RNA, 19 nt, Artificial Sequence
  Description of Artificial Sequence: Synthetic oligonucleotide
ucugucggauggagaaccu

SEQ ID NO: 2575830 - RNA, 19 nt, Artificial Sequence
  Description of Artificial Sequence: Synthetic oligonucleotide
uggcuguguagguacucca

SEQ ID NO: 2575831 - RNA, 19 nt, Artificial Sequence
  Description of Artificial Sequence: Synthetic oligonucleotide
cccacguccauccuggccc

SEQ ID NO: 2575832 - RNA, 19 nt, Artificial Sequence
  Description of Artificial Sequence: Synthetic oligonucleotide
caucccucggagcagguca

SEQ ID NO: 2575833 - RNA, 19 nt, Artificial Sequence
  Description of Artificial Sequence: Synthetic oligonucleotide
gagaucuugagcgugccgu

SEQ ID NO: 2575834 - RNA, 19 nt, Artificial Sequence
  Description of Artificial Sequence: Synthetic oligonucleotide
ugugcacaaugcccuggcu

SEQ ID NO: 2575835 - RNA, 19 nt, Artificial Sequence
  Description of Artificial Sequence: Synthetic oligonucleotide
gaaagggugcagggccucg

SEQ ID NO: 2575836 - RNA, 19 nt, Artificial Sequence
  Description of Artificial Sequence: Synthetic oligonucleotide
cucccgauguucucaaaca

SEQ ID NO: 2575837 - RNA, 19 nt, Artificial Sequence
  Description of Artificial Sequence: Synthetic oligonucleotide
cugguagaucaccucggug

SEQ ID NO: 2575838 - RNA, 19 nt, Artificial Sequence
  Description of Artificial Sequence: Synthetic oligonucleotide
ggucucggaguccagcacc

SEQ ID NO: 2575839 - RNA, 19 nt, Artificial Sequence
  Description of Artificial Sequence: Synthetic oligonucleotide
aggugucgaguccguuggc

SEQ ID NO: 2575840 - RNA, 19 nt, Artificial Sequence
  Description of Artificial Sequence: Synthetic oligonucleotide
gaucuugagcgugccguug

SEQ ID NO: 2575841 - RNA, 19 nt, Artificial Sequence
  Description of Artificial Sequence: Synthetic oligonucleotide
caccgaaacucacucucug

SEQ ID NO: 2575842 - RNA, 19 nt, Artificial Sequence
  Description of Artificial Sequence: Synthetic oligonucleotide
uggcucguacuccaacauc

SEQ ID NO: 2575843 - RNA, 19 nt, Artificial Sequence
  Description of Artificial Sequence: Synthetic oligonucleotide
ggucagaaaguggugggcc

SEQ ID NO: 2575844 - RNA, 19 nt, Artificial Sequence
  Description of Artificial Sequence: Synthetic oligonucleotide
gacguuggccucgccauug

SEQ ID NO: 2575845 - RNA, 19 nt, Artificial Sequence
  Description of Artificial Sequence: Synthetic oligonucleotide
ugagcgugccguugguggu

SEQ ID NO: 2575846 - RNA, 19 nt, Artificial Sequence
  Description of Artificial Sequence: Synthetic oligonucleotide
agauauugucucccucgaa

SEQ ID NO: 2575847 - RNA, 19 nt, Artificial Sequence
  Description of Artificial Sequence: Synthetic oligonucleotide
ucggagcaggucagaaagu

SEQ ID NO: 2575848 - RNA, 19 nt, Artificial Sequence
  Description of Artificial Sequence: Synthetic oligonucleotide
cucccucgaauggauacag

SEQ ID NO: 2575849 - RNA, 19 nt, Artificial Sequence
  Description of Artificial Sequence: Synthetic oligonucleotide
gaauggauacaggccugug

SEQ ID NO: 2575850 - RNA, 19 nt, Artificial Sequence
  Description of Artificial Sequence: Synthetic oligonucleotide
cagcuuguagauauugucu

SEQ ID NO: 2575851 - RNA, 19 nt, Artificial Sequence
  Description of Artificial Sequence: Synthetic oligonucleotide
guuguagagugugacccca

SEQ ID NO: 2575852 - RNA, 19 nt, Artificial Sequence
  Description of Artificial Sequence: Synthetic oligonucleotide
gaucuugaccgcccugcga

SEQ ID NO: 2575853 - RNA, 19 nt, Artificial Sequence
  Description of Artificial Sequence: Synthetic oligonucleotide
ugucgaguccguuggcgau

SEQ ID NO: 2575854 - RNA, 19 nt, Artificial Sequence
  Description of Artificial Sequence: Synthetic oligonucleotide
gugaaguccccucucccga

SEQ ID NO: 2575855 - RNA, 19 nt, Artificial Sequence
  Description of Artificial Sequence: Synthetic oligonucleotide
guggaaucgaugcggugga

SEQ ID NO: 2575856 - RNA, 19 nt, Artificial Sequence
  Description of Artificial Sequence: Synthetic oligonucleotide
cccgauguucucaaacagc

SEQ ID NO: 2575857 - RNA, 19 nt, Artificial Sequence
  Description of Artificial Sequence: Synthetic oligonucleotide
ggugucgaguccguuggcg

SEQ ID NO: 2575858 - RNA, 19 nt, Artificial Sequence
  Description of Artificial Sequence: Synthetic oligonucleotide
gaggaucuugaccgcccug

SEQ ID NO: 2575859 - RNA, 19 nt, Artificial Sequence
  Description of Artificial Sequence: Synthetic oligonucleotide
ucuugaccgcccugcgaca

SEQ ID NO: 2575860 - RNA, 19 nt, Artificial Sequence
  Description of Artificial Sequence: Synthetic oligonucleotide
cuccaacaucccucggagc

SEQ ID NO: 2575861 - RNA, 19 nt, Artificial Sequence
  Description of Artificial Sequence: Synthetic oligonucleotide
gucggagaucuugagcgug

SEQ ID NO: 2575862 - RNA, 19 nt, Artificial Sequence
  Description of Artificial Sequence: Synthetic oligonucleotide
uugccguacgagcccuccc

SEQ ID NO: 2575863 - RNA, 19 nt, Artificial Sequence
  Description of Artificial Sequence: Synthetic oligonucleotide
ccaccuugaaaccugagaa

SEQ ID NO: 2575864 - RNA, 19 nt, Artificial Sequence
  Description of Artificial Sequence: Synthetic oligonucleotide
ggagaucuugagcgugccg

SEQ ID NO: 2575865 - RNA, 19 nt, Artificial Sequence
  Description of Artificial Sequence: Synthetic oligonucleotide
ggaucuugaccgcccugcg

SEQ ID NO: 2575866 - RNA, 19 nt, Artificial Sequence
  Description of Artificial Sequence: Synthetic oligonucleotide
cuucaccuugccguacgag

SEQ ID NO: 2575867 - RNA, 19 nt, Artificial Sequence
  Description of Artificial Sequence: Synthetic oligonucleotide
ggauacaggccugugguga

SEQ ID NO: 2575868 - RNA, 19 nt, Artificial Sequence
  Description of Artificial Sequence: Synthetic oligonucleotide
gguagaucaccucggugga

SEQ ID NO: 2575869 - RNA, 19 nt, Artificial Sequence
  Description of Artificial Sequence: Synthetic oligonucleotide
ggaaucgaugcgguggaug

SEQ ID NO: 2575870 - RNA, 19 nt, Artificial Sequence
  Description of Artificial Sequence: Synthetic oligonucleotide
ugaaguccccucucccgau

SEQ ID NO: 2575871 - RNA, 19 nt, Artificial Sequence
  Description of Artificial Sequence: Synthetic oligonucleotide
cacaagggauggugaaguc

SEQ ID NO: 2575872 - RNA, 19 nt, Artificial Sequence
  Description of Artificial Sequence: Synthetic oligonucleotide
cagucacaagggaugguga

SEQ ID NO: 2575873 - RNA, 19 nt, Artificial Sequence
  Description of Artificial Sequence: Synthetic oligonucleotide
cuugccguacgagcccucc

SEQ ID NO: 2575874 - RNA, 19 nt, Artificial Sequence
  Description of Artificial Sequence: Synthetic oligonucleotide
uggugggccgcagucacaa

SEQ ID NO: 2575875 - RNA, 19 nt, Artificial Sequence
  Description of Artificial Sequence: Synthetic oligonucleotide
caaugcccuggcuguguag

SEQ ID NO: 2575876 - RNA, 19 nt, Artificial Sequence
  Description of Artificial Sequence: Synthetic oligonucleotide
ggcgaucucggguggcugg

SEQ ID NO: 2575877 - RNA, 19 nt, Artificial Sequence
  Description of Artificial Sequence: Synthetic oligonucleotide
aaucgaugcgguggaugaa

SEQ ID NO: 2575878 - RNA, 19 nt, Artificial Sequence
  Description of Artificial Sequence: Synthetic oligonucleotide
cucgccauuggggauccug

SEQ ID NO: 2575879 - RNA, 19 nt, Artificial Sequence
  Description of Artificial Sequence: Synthetic oligonucleotide
guagagugugaccccagcu

SEQ ID NO: 2575880 - RNA, 19 nt, Artificial Sequence
  Description of Artificial Sequence: Synthetic oligonucleotide
guacuccaacaucccucgg

SEQ ID NO: 2575881 - RNA, 19 nt, Artificial Sequence
  Description of Artificial Sequence: Synthetic oligonucleotide
gcugauguccuugugcaca

SEQ ID NO: 2575882 - RNA, 19 nt, Artificial Sequence
  Description of Artificial Sequence: Synthetic oligonucleotide
gugccguugguggugagca

SEQ ID NO: 2575883 - RNA, 19 nt, Artificial Sequence
  Description of Artificial Sequence: Synthetic oligonucleotide
ugcgguggaugaagguguc

SEQ ID NO: 2575884 - RNA, 19 nt, Artificial Sequence
  Description of Artificial Sequence: Synthetic oligonucleotide
caccuccuucaccuugccg

SEQ ID NO: 2575885 - RNA, 19 nt, Artificial Sequence
  Description of Artificial Sequence: Synthetic oligonucleotide
ucgaguccguuggcgaucu

SEQ ID NO: 2575886 - RNA, 19 nt, Artificial Sequence
  Description of Artificial Sequence: Synthetic oligonucleotide
uugccggcugauguccuug

SEQ ID NO: 2575887 - RNA, 19 nt, Artificial Sequence
  Description of Artificial Sequence: Synthetic oligonucleotide
cagguugccggcugauguc

SEQ ID NO: 2575888 - RNA, 19 nt, Artificial Sequence
  Description of Artificial Sequence: Synthetic oligonucleotide
guacgagcccuccccgagc

SEQ ID NO: 2575889 - RNA, 19 nt, Artificial Sequence
  Description of Artificial Sequence: Synthetic oligonucleotide
gcgacacaaggucucggag

SEQ ID NO: 2575890 - RNA, 19 nt, Artificial Sequence
  Description of Artificial Sequence: Synthetic oligonucleotide
uucuugacguuggccucgc

SEQ ID NO: 2575891 - RNA, 19 nt, Artificial Sequence
  Description of Artificial Sequence: Synthetic oligonucleotide
cuugaccgcccugcgacac

SEQ ID NO: 2575892 - RNA, 19 nt, Artificial Sequence
  Description of Artificial Sequence: Synthetic oligonucleotide
cccaccgaaacucacucuc

SEQ ID NO: 2575893 - RNA, 19 nt, Artificial Sequence
  Description of Artificial Sequence: Synthetic oligonucleotide
uugaccgcccugcgacaca

SEQ ID NO: 2575894 - RNA, 19 nt, Artificial Sequence
  Description of Artificial Sequence: Synthetic oligonucleotide
gccgucaacuucuugacgu

SEQ ID NO: 2575895 - RNA, 19 nt, Artificial Sequence
  Description of Artificial Sequence: Synthetic oligonucleotide
ggccgucaacuucuugacg

SEQ ID NO: 2575896 - RNA, 19 nt, Artificial Sequence
  Description of Artificial Sequence: Synthetic oligonucleotide
caccucgguggaaucgaug

SEQ ID NO: 2575897 - RNA, 19 nt, Artificial Sequence
  Description of Artificial Sequence: Synthetic oligonucleotide
uuggcgaucucggguggcu

SEQ ID NO: 2575898 - RNA, 19 nt, Artificial Sequence
  Description of Artificial Sequence: Synthetic oligonucleotide
cagcgaaagggugcagggc

SEQ ID NO: 2575899 - RNA, 19 nt, Artificial Sequence
  Description of Artificial Sequence: Synthetic oligonucleotide
gccgcagucacaagggaug

SEQ ID NO: 2575900 - RNA, 19 nt, Artificial Sequence
  Description of Artificial Sequence: Synthetic oligonucleotide
ucuugacguuggccucgcc

SEQ ID NO: 2575901 - RNA, 19 nt, Artificial Sequence
  Description of Artificial Sequence: Synthetic oligonucleotide
ggcaacacccaggucggag

SEQ ID NO: 2575902 - RNA, 19 nt, Artificial Sequence
  Description of Artificial Sequence: Synthetic oligonucleotide
uuggcgcgcuugcggcgcg

SEQ ID NO: 2575903 - RNA, 19 nt, Artificial Sequence
  Description of Artificial Sequence: Synthetic oligonucleotide
ggcuguguagguacuccag

SEQ ID NO: 2575904 - RNA, 19 nt, Artificial Sequence
  Description of Artificial Sequence: Synthetic oligonucleotide
cugcgacacaaggucucgg

SEQ ID NO: 2575905 - RNA, 19 nt, Artificial Sequence
  Description of Artificial Sequence: Synthetic oligonucleotide
ugaccgcccugcgacacaa

SEQ ID NO: 2575906 - RNA, 19 nt, Artificial Sequence
  Description of Artificial Sequence: Synthetic oligonucleotide
acuugccgaugagcuuggc

SEQ ID NO: 2575907 - RNA, 19 nt, Artificial Sequence
  Description of Artificial Sequence: Synthetic oligonucleotide
cucggguggcuggaaggcc

SEQ ID NO: 2575908 - RNA, 19 nt, Artificial Sequence
  Description of Artificial Sequence: Synthetic oligonucleotide
auacaggccuguggugaug

SEQ ID NO: 2575909 - RNA, 19 nt, Artificial Sequence
  Description of Artificial Sequence: Synthetic oligonucleotide
ccguuggcgaucucgggug

SEQ ID NO: 2575910 - RNA, 19 nt, Artificial Sequence
  Description of Artificial Sequence: Synthetic oligonucleotide
gagcgugccguugguggug

SEQ ID NO: 2575911 - RNA, 19 nt, Artificial Sequence
  Description of Artificial Sequence: Synthetic oligonucleotide
cggcugguagaucaccucg

SEQ ID NO: 2575912 - RNA, 19 nt, Artificial Sequence
  Description of Artificial Sequence: Synthetic oligonucleotide
ugaccccagcugaccagau

SEQ ID NO: 2575913 - RNA, 19 nt, Artificial Sequence
  Description of Artificial Sequence: Synthetic oligonucleotide
agcagguugccggcugaug

SEQ ID NO: 2575914 - RNA, 19 nt, Artificial Sequence
  Description of Artificial Sequence: Synthetic oligonucleotide
cugucggauggagaaccuc

SEQ ID NO: 2575915 - RNA, 19 nt, Artificial Sequence
  Description of Artificial Sequence: Synthetic oligonucleotide
uggcgaucucggguggcug

SEQ ID NO: 2575916 - RNA, 19 nt, Artificial Sequence
  Description of Artificial Sequence: Synthetic oligonucleotide
augcccaccgaaacucacu

SEQ ID NO: 2575917 - RNA, 19 nt, Artificial Sequence
  Description of Artificial Sequence: Synthetic oligonucleotide
aacaucccucggagcaggu

SEQ ID NO: 2575918 - RNA, 19 nt, Artificial Sequence
  Description of Artificial Sequence: Synthetic oligonucleotide
guuggcgaucucggguggc

SEQ ID NO: 2575919 - RNA, 19 nt, Artificial Sequence
  Description of Artificial Sequence: Synthetic oligonucleotide
aucccucggagcaggucag

SEQ ID NO: 2575920 - RNA, 19 nt, Artificial Sequence
  Description of Artificial Sequence: Synthetic oligonucleotide
ucguccggcaggugucauc

SEQ ID NO: 2575921 - RNA, 19 nt, Artificial Sequence
  Description of Artificial Sequence: Synthetic oligonucleotide
ccccaucagguacuugccg

SEQ ID NO: 2575922 - RNA, 19 nt, Artificial Sequence
  Description of Artificial Sequence: Synthetic oligonucleotide
gccguacgagcccuccccg

SEQ ID NO: 2575923 - RNA, 19 nt, Artificial Sequence
  Description of Artificial Sequence: Synthetic oligonucleotide
uggggauccugcguagcuu

SEQ ID NO: 2575924 - RNA, 19 nt, Artificial Sequence
  Description of Artificial Sequence: Synthetic oligonucleotide
cccaucagguacuugccga

SEQ ID NO: 2575925 - RNA, 19 nt, Artificial Sequence
  Description of Artificial Sequence: Synthetic oligonucleotide
gccguugguggugagcagc

SEQ ID NO: 2575926 - RNA, 19 nt, Artificial Sequence
  Description of Artificial Sequence: Synthetic oligonucleotide
ggugcagggccucggcaac

SEQ ID NO: 2575927 - RNA, 19 nt, Artificial Sequence
  Description of Artificial Sequence: Synthetic oligonucleotide
guguccaugcccaccgaaa

SEQ ID NO: 2575928 - RNA, 19 nt, Artificial Sequence
  Description of Artificial Sequence: Synthetic oligonucleotide
gggagcccuggcucguccg

SEQ ID NO: 2575929 - RNA, 19 nt, Artificial Sequence
  Description of Artificial Sequence: Synthetic oligonucleotide
gugaccccagcugaccaga

SEQ ID NO: 2575930 - RNA, 19 nt, Artificial Sequence
  Description of Artificial Sequence: Synthetic oligonucleotide
ugcggcgcggcugguagau

SEQ ID NO: 2575931 - RNA, 19 nt, Artificial Sequence
  Description of Artificial Sequence: Synthetic oligonucleotide
guccaugcccaccgaaacu

SEQ ID NO: 2575932 - RNA, 19 nt, Artificial Sequence
  Description of Artificial Sequence: Synthetic oligonucleotide
guccaccuugaaaccugag

SEQ ID NO: 2575933 - RNA, 19 nt, Artificial Sequence
  Description of Artificial Sequence: Synthetic oligonucleotide
ugcccuggcuguguaggua

SEQ ID NO: 2575934 - RNA, 19 nt, Artificial Sequence
  Description of Artificial Sequence: Synthetic oligonucleotide
gucgaguccguuggcgauc

SEQ ID NO: 2575935 - RNA, 19 nt, Artificial Sequence
  Description of Artificial Sequence: Synthetic oligonucleotide
ggugucauccacagcgaaa

SEQ ID NO: 2575936 - RNA, 19 nt, Artificial Sequence
  Description of Artificial Sequence: Synthetic oligonucleotide
gcucguacuccaacauccc

SEQ ID NO: 2575937 - RNA, 19 nt, Artificial Sequence
  Description of Artificial Sequence: Synthetic oligonucleotide
cucguacuccaacaucccu

SEQ ID NO: 2575938 - RNA, 19 nt, Artificial Sequence
  Description of Artificial Sequence: Synthetic oligonucleotide
uggccucgccauuggggau

SEQ ID NO: 2575939 - RNA, 19 nt, Artificial Sequence
  Description of Artificial Sequence: Synthetic oligonucleotide
ccugcgacacaaggucucg

SEQ ID NO: 2575940 - RNA, 19 nt, Artificial Sequence
  Description of Artificial Sequence: Synthetic oligonucleotide
cguccggcaggugucaucc

SEQ ID NO: 2575941 - RNA, 19 nt, Artificial Sequence
  Description of Artificial Sequence: Synthetic oligonucleotide
gguguccaugcccaccgaa

SEQ ID NO: 2575942 - RNA, 19 nt, Artificial Sequence
  Description of Artificial Sequence: Synthetic oligonucleotide
agguguccaugcccaccga

SEQ ID NO: 2575943 - RNA, 19 nt, Artificial Sequence
  Description of Artificial Sequence: Synthetic oligonucleotide
guacuccaggccgucaacu

SEQ ID NO: 2575944 - RNA, 19 nt, Artificial Sequence
  Description of Artificial Sequence: Synthetic oligonucleotide
uugcggcgcggcugguaga

SEQ ID NO: 2575945 - RNA, 19 nt, Artificial Sequence
  Description of Artificial Sequence: Synthetic oligonucleotide
acgagcccuccccgagcag

SEQ ID NO: 2575946 - RNA, 19 nt, Artificial Sequence
  Description of Artificial Sequence: Synthetic oligonucleotide
ggcuggcucguacuccaac

SEQ ID NO: 2575947 - RNA, 19 nt, Artificial Sequence
  Description of Artificial Sequence: Synthetic oligonucleotide
agcgugccguuggugguga

SEQ ID NO: 2575948 - RNA, 19 nt, Artificial Sequence
  Description of Artificial Sequence: Synthetic oligonucleotide
ccucuuggcuggcucguac

SEQ ID NO: 2575949 - RNA, 19 nt, Artificial Sequence
  Description of Artificial Sequence: Synthetic oligonucleotide
uggaaucgaugcgguggau

SEQ ID NO: 2575950 - RNA, 19 nt, Artificial Sequence
  Description of Artificial Sequence: Synthetic oligonucleotide
cucuuggcuggcucguacu

SEQ ID NO: 2575951 - RNA, 19 nt, Artificial Sequence
  Description of Artificial Sequence: Synthetic oligonucleotide
ccgcagucacaagggaugg

SEQ ID NO: 2575952 - RNA, 19 nt, Artificial Sequence
  Description of Artificial Sequence: Synthetic oligonucleotide
cccugcgacacaaggucuc

SEQ ID NO: 2575953 - RNA, 19 nt, Artificial Sequence
  Description of Artificial Sequence: Synthetic oligonucleotide
cguacgagcccuccccgag

SEQ ID NO: 2575954 - RNA, 19 nt, Artificial Sequence
  Description of Artificial Sequence: Synthetic oligonucleotide
acguccauccuggcccagu

SEQ ID NO: 2575955 - RNA, 19 nt, Artificial Sequence
  Description of Artificial Sequence: Synthetic oligonucleotide
guagaucaccucgguggaa

SEQ ID NO: 2575956 - RNA, 19 nt, Artificial Sequence
  Description of Artificial Sequence: Synthetic oligonucleotide
aguccccucucccgauguu

SEQ ID NO: 2575957 - RNA, 19 nt, Artificial Sequence
  Description of Artificial Sequence: Synthetic oligonucleotide
cuggcucguacuccaacau

SEQ ID NO: 2575958 - RNA, 19 nt, Artificial Sequence
  Description of Artificial Sequence: Synthetic oligonucleotide
ggggagcccuggcucgucc

SEQ ID NO: 2575959 - RNA, 19 nt, Artificial Sequence
  Description of Artificial Sequence: Synthetic oligonucleotide
ucccucggagcaggucaga

SEQ ID NO: 2575960 - RNA, 19 nt, Artificial Sequence
  Description of Artificial Sequence: Synthetic oligonucleotide
gcggcugguagaucaccuc

SEQ ID NO: 2575961 - RNA, 19 nt, Artificial Sequence
  Description of Artificial Sequence: Synthetic oligonucleotide
ccuugaaaccugagaaggu

SEQ ID NO: 2575962 - RNA, 19 nt, Artificial Sequence
  Description of Artificial Sequence: Synthetic oligonucleotide
gccucggcaacacccaggu

SEQ ID NO: 2575963 - RNA, 19 nt, Artificial Sequence
  Description of Artificial Sequence: Synthetic oligonucleotide
gucucggaguccagcaccu

SEQ ID NO: 2575964 - RNA, 19 nt, Artificial Sequence
  Description of Artificial Sequence: Synthetic oligonucleotide
cgagcccuccccgagcagg

SEQ ID NO: 2575965 - RNA, 19 nt, Artificial Sequence
  Description of Artificial Sequence: Synthetic oligonucleotide
agcccuccccgagcagguc

SEQ ID NO: 2575966 - RNA, 19 nt, Artificial Sequence
  Description of Artificial Sequence: Synthetic oligonucleotide
ggugggccgcagucacaag

SEQ ID NO: 2575967 - RNA, 19 nt, Artificial Sequence
  Description of Artificial Sequence: Synthetic oligonucleotide
ccguugguggugagcagca

SEQ ID NO: 2575968 - RNA, 19 nt, Artificial Sequence
  Description of Artificial Sequence: Synthetic oligonucleotide
gagaaccucuuggcuggcu

SEQ ID NO: 2575969 - RNA, 19 nt, Artificial Sequence
  Description of Artificial Sequence: Synthetic oligonucleotide
ggagaaccucuuggcuggc

SEQ ID NO: 2575970 - RNA, 19 nt, Artificial Sequence
  Description of Artificial Sequence: Synthetic oligonucleotide
gaccgcccugcgacacaag

SEQ ID NO: 2575971 - RNA, 19 nt, Artificial Sequence
  Description of Artificial Sequence: Synthetic oligonucleotide
gccggcugauguccuugug

SEQ ID NO: 2575972 - RNA, 19 nt, Artificial Sequence
  Description of Artificial Sequence: Synthetic oligonucleotide
ggggauccugcguagcuuu

SEQ ID NO: 2575973 - RNA, 19 nt, Artificial Sequence
  Description of Artificial Sequence: Synthetic oligonucleotide
cacaaugcccuggcugugu

SEQ ID NO: 2575974 - RNA, 19 nt, Artificial Sequence
  Description of Artificial Sequence: Synthetic oligonucleotide
ccggcaggugucauccaca

SEQ ID NO: 2575975 - RNA, 19 nt, Artificial Sequence
  Description of Artificial Sequence: Synthetic oligonucleotide
gggccgcagucacaaggga

SEQ ID NO: 2575976 - RNA, 19 nt, Artificial Sequence
  Description of Artificial Sequence: Synthetic oligonucleotide
cgacacaaggucucggagu

SEQ ID NO: 2575977 - RNA, 19 nt, Artificial Sequence
  Description of Artificial Sequence: Synthetic oligonucleotide
cacguccauccuggcccag

SEQ ID NO: 2575978 - RNA, 19 nt, Artificial Sequence
  Description of Artificial Sequence: Synthetic oligonucleotide
gucggauggagaaccucuu

SEQ ID NO: 2575979 - RNA, 19 nt, Artificial Sequence
  Description of Artificial Sequence: Synthetic oligonucleotide
guugccggcugauguccuu

SEQ ID NO: 2575980 - RNA, 19 nt, Artificial Sequence
  Description of Artificial Sequence: Synthetic oligonucleotide
ggcccagcggcuggggauc

SEQ ID NO: 2575981 - RNA, 19 nt, Artificial Sequence
  Description of Artificial Sequence: Synthetic oligonucleotide
ccuucaccuugccguacga

SEQ ID NO: 2575982 - RNA, 19 nt, Artificial Sequence
  Description of Artificial Sequence: Synthetic oligonucleotide
ccucucccgauguucucaa

SEQ ID NO: 2575983 - RNA, 19 nt, Artificial Sequence
  Description of Artificial Sequence: Synthetic oligonucleotide
cccucucccgauguucuca

SEQ ID NO: 2575984 - RNA, 19 nt, Artificial Sequence
  Description of Artificial Sequence: Synthetic oligonucleotide
cuggcucguccggcaggug

SEQ ID NO: 2575985 - RNA, 19 nt, Artificial Sequence
  Description of Artificial Sequence: Synthetic oligonucleotide
ggcgcggcugguagaucac

SEQ ID NO: 2575986 - RNA, 19 nt, Artificial Sequence
  Description of Artificial Sequence: Synthetic oligonucleotide
cggcgcggcugguagauca

SEQ ID NO: 2575987 - RNA, 19 nt, Artificial Sequence
  Description of Artificial Sequence: Synthetic oligonucleotide
ccacguccauccuggccca

SEQ ID NO: 2575988 - RNA, 19 nt, Artificial Sequence
  Description of Artificial Sequence: Synthetic oligonucleotide
ggccgcagucacaagggau

SEQ ID NO: 2575989 - RNA, 19 nt, Artificial Sequence
  Description of Artificial Sequence: Synthetic oligonucleotide
gcucguccggcagguguca

SEQ ID NO: 2575990 - RNA, 19 nt, Artificial Sequence
  Description of Artificial Sequence: Synthetic oligonucleotide
ccuugccguacgagcccuc

SEQ ID NO: 2575991 - RNA, 19 nt, Artificial Sequence
  Description of Artificial Sequence: Synthetic oligonucleotide
cgaaagggugcagggccuc

SEQ ID NO: 2575992 - RNA, 19 nt, Artificial Sequence
  Description of Artificial Sequence: Synthetic oligonucleotide
gcgaaagggugcagggccu

SEQ ID NO: 2575993 - RNA, 19 nt, Artificial Sequence
  Description of Artificial Sequence: Synthetic oligonucleotide
ccguacgagcccuccccga

SEQ ID NO: 2575994 - RNA, 19 nt, Artificial Sequence
  Description of Artificial Sequence: Synthetic oligonucleotide
cguugguggugagcagcag

SEQ ID NO: 2575995 - RNA, 19 nt, Artificial Sequence
  Description of Artificial Sequence: Synthetic oligonucleotide
gcccaccgaaacucacucu

SEQ ID NO: 2575996 - RNA, 19 nt, Artificial Sequence
  Description of Artificial Sequence: Synthetic oligonucleotide
ggcgcgcuugcggcgcggc

SEQ ID NO: 2575997 - RNA, 19 nt, Artificial Sequence
  Description of Artificial Sequence: Synthetic oligonucleotide
ccacagcgaaagggugcag

SEQ ID NO: 2575998 - RNA, 19 nt, Artificial Sequence
  Description of Artificial Sequence: Synthetic oligonucleotide
ccucggcaacacccagguc

SEQ ID NO: 2575999 - RNA, 19 nt, Artificial Sequence
  Description of Artificial Sequence: Synthetic oligonucleotide
ccgcccugcgacacaaggu

SEQ ID NO: 2576000 - RNA, 19 nt, Artificial Sequence
  Description of Artificial Sequence: Synthetic oligonucleotide
cgaugcgguggaugaaggu

SEQ ID NO: 2576001 - RNA, 19 nt, Artificial Sequence
  Description of Artificial Sequence: Synthetic oligonucleotide
cgaauggauacaggccugu

SEQ ID NO: 2576002 - RNA, 19 nt, Artificial Sequence
  Description of Artificial Sequence: Synthetic oligonucleotide
ccgucaacuucuugacguu

SEQ ID NO: 2576003 - RNA, 19 nt, Artificial Sequence
  Description of Artificial Sequence: Synthetic oligonucleotide
cgcggcugguagaucaccu

SEQ ID NO: 2576004 - RNA, 19 nt, Artificial Sequence
  Description of Artificial Sequence: Synthetic oligonucleotide
ccuggcucguccggcaggu

SEQ ID NO: 2576005 - RNA, 19 nt, Artificial Sequence
  Description of Artificial Sequence: Synthetic oligonucleotide
cccagcggcuggggauccc

SEQ ID NO: 2576006 - RNA, 19 nt, Artificial Sequence
  Description of Artificial Sequence: Synthetic oligonucleotide
ccauccuggcccagucuuu

SEQ ID NO: 2576007 - RNA, 19 nt, Artificial Sequence
  Description of Artificial Sequence: Synthetic oligonucleotide
cucguccggcaggugucau

SEQ ID NO: 2576008 - RNA, 19 nt, Artificial Sequence
  Description of Artificial Sequence: Synthetic oligonucleotide
gggauccugcguagcuuuu

SEQ ID NO: 2576009 - RNA, 19 nt, Artificial Sequence
  Description of Artificial Sequence: Synthetic oligonucleotide
ccgaugagcuuggcgcgcu

SEQ ID NO: 2576010 - RNA, 19 nt, Artificial Sequence
  Description of Artificial Sequence: Synthetic oligonucleotide
gcggcgcggcugguagauc

SEQ ID NO: 2576011 - RNA, 19 nt, Artificial Sequence
  Description of Artificial Sequence: Synthetic oligonucleotide
gcgcgcuugcggcgcggcu

SEQ ID NO: 2576012 - RNA, 19 nt, Artificial Sequence
  Description of Artificial Sequence: Synthetic oligonucleotide
cgaucucggguggcuggaa

SEQ ID NO: 2576013 - RNA, 19 nt, Artificial Sequence
  Description of Artificial Sequence: Synthetic oligonucleotide
cgaguccguuggcgaucuc

SEQ ID NO: 2576014 - RNA, 19 nt, Artificial Sequence
  Description of Artificial Sequence: Synthetic oligonucleotide
ccggggagcccuggcucgu

SEQ ID NO: 2576015 - RNA, 19 nt, Artificial Sequence
  Description of Artificial Sequence: Synthetic oligonucleotide
cggcaacacccaggucgga

SEQ ID NO: 2576016 - RNA, 19 nt, Artificial Sequence
  Description of Artificial Sequence: Synthetic oligonucleotide
ccucgccauuggggauccu

SEQ ID NO: 2576017 - RNA, 19 nt, Artificial Sequence
  Description of Artificial Sequence: Synthetic oligonucleotide
cgcuugcggcgcggcuggu

SEQ ID NO: 2576018 - RNA, 19 nt, Artificial Sequence
  Description of Artificial Sequence: Synthetic oligonucleotide
aaaaguguuucuuagaaca

SEQ ID NO: 2576019 - RNA, 19 nt, Artificial Sequence
  Description of Artificial Sequence: Synthetic oligonucleotide
aaaguuaaguaauuggcag

SEQ ID NO: 2576020 - RNA, 19 nt, Artificial Sequence
  Description of Artificial Sequence: Synthetic oligonucleotide
augaaguucaauuggauac

SEQ ID NO: 2576021 - RNA, 19 nt, Artificial Sequence
  Description of Artificial Sequence: Synthetic oligonucleotide
aguucaauuggauaccucc

SEQ ID NO: 2576022 - RNA, 19 nt, Artificial Sequence
  Description of Artificial Sequence: Synthetic oligonucleotide
ucugaaaacuugauaaugg

SEQ ID NO: 2576023 - RNA, 19 nt, Artificial Sequence
  Description of Artificial Sequence: Synthetic oligonucleotide
aucauagagaccaagaggc

SEQ ID NO: 2576024 - RNA, 19 nt, Artificial Sequence
  Description of Artificial Sequence: Synthetic oligonucleotide
gauugagaaauauaguugc

SEQ ID NO: 2576025 - RNA, 19 nt, Artificial Sequence
  Description of Artificial Sequence: Synthetic oligonucleotide
auuuauuuaacuugugguc

SEQ ID NO: 2576026 - RNA, 19 nt, Artificial Sequence
  Description of Artificial Sequence: Synthetic oligonucleotide
uuugcuacggagaucauag

SEQ ID NO: 2576027 - RNA, 19 nt, Artificial Sequence
  Description of Artificial Sequence: Synthetic oligonucleotide
aacaaggcaccuuuaagac

SEQ ID NO: 2576028 - RNA, 19 nt, Artificial Sequence
  Description of Artificial Sequence: Synthetic oligonucleotide
uuaaguaauuggcagaggc

SEQ ID NO: 2576029 - RNA, 19 nt, Artificial Sequence
  Description of Artificial Sequence: Synthetic oligonucleotide
ucuagaaacucccaaagca

SEQ ID NO: 2576030 - RNA, 19 nt, Artificial Sequence
  Description of Artificial Sequence: Synthetic oligonucleotide
ucaucugaaaacuugauaa

SEQ ID NO: 2576031 - RNA, 19 nt, Artificial Sequence
  Description of Artificial Sequence: Synthetic oligonucleotide
uauuuauuuaacuuguggu

SEQ ID NO: 2576032 - RNA, 19 nt, Artificial Sequence
  Description of Artificial Sequence: Synthetic oligonucleotide
aauuggauaccuccacugc

SEQ ID NO: 2576033 - RNA, 19 nt, Artificial Sequence
  Description of Artificial Sequence: Synthetic oligonucleotide
aauauaguugcaaugagga

SEQ ID NO: 2576034 - RNA, 19 nt, Artificial Sequence
  Description of Artificial Sequence: Synthetic oligonucleotide
aaacaaggcaccuuuaaga

SEQ ID NO: 2576035 - RNA, 19 nt, Artificial Sequence
  Description of Artificial Sequence: Synthetic oligonucleotide
uugauaaugguuuugcuac

SEQ ID NO: 2576036 - RNA, 19 nt, Artificial Sequence
  Description of Artificial Sequence: Synthetic oligonucleotide
uuuaacuccagcacugggg

SEQ ID NO: 2576037 - RNA, 19 nt, Artificial Sequence
  Description of Artificial Sequence: Synthetic oligonucleotide
uuuaccaaucccaugaagu

SEQ ID NO: 2576038 - RNA, 19 nt, Artificial Sequence
  Description of Artificial Sequence: Synthetic oligonucleotide
ucagauauucaucugaaaa

SEQ ID NO: 2576039 - RNA, 19 nt, Artificial Sequence
  Description of Artificial Sequence: Synthetic oligonucleotide
gaucauagagaccaagagg

SEQ ID NO: 2576040 - RNA, 19 nt, Artificial Sequence
  Description of Artificial Sequence: Synthetic oligonucleotide
aacuugauaaugguuuugc

SEQ ID NO: 2576041 - RNA, 19 nt, Artificial Sequence
  Description of Artificial Sequence: Synthetic oligonucleotide
auauuuaccaaucccauga

SEQ ID NO: 2576042 - RNA, 19 nt, Artificial Sequence
  Description of Artificial Sequence: Synthetic oligonucleotide
guauuuauuuaacuugugg

SEQ ID NO: 2576043 - RNA, 19 nt, Artificial Sequence
  Description of Artificial Sequence: Synthetic oligonucleotide
aagaauuaaaaggugacga

SEQ ID NO: 2576044 - RNA, 19 nt, Artificial Sequence
  Description of Artificial Sequence: Synthetic oligonucleotide
aggcuuaggacacacaugg

SEQ ID NO: 2576045 - RNA, 19 nt, Artificial Sequence
  Description of Artificial Sequence: Synthetic oligonucleotide
uagcaaacuucaaacaagg

SEQ ID NO: 2576046 - RNA, 19 nt, Artificial Sequence
  Description of Artificial Sequence: Synthetic oligonucleotide
aaauauaguugcaaugagg

SEQ ID NO: 2576047 - RNA, 19 nt, Artificial Sequence
  Description of Artificial Sequence: Synthetic oligonucleotide
uuagaacaagaauuaaaag

SEQ ID NO: 2576048 - RNA, 19 nt, Artificial Sequence
  Description of Artificial Sequence: Synthetic oligonucleotide
aaagcaaugcauagcaaac

SEQ ID NO: 2576049 - RNA, 19 nt, Artificial Sequence
  Description of Artificial Sequence: Synthetic oligonucleotide
agaacaagaauuaaaaggu

SEQ ID NO: 2576050 - RNA, 19 nt, Artificial Sequence
  Description of Artificial Sequence: Synthetic oligonucleotide
aaacucccaaagcacaggg

SEQ ID NO: 2576051 - RNA, 19 nt, Artificial Sequence
  Description of Artificial Sequence: Synthetic oligonucleotide
ugcauagcaaacuucaaac

SEQ ID NO: 2576052 - RNA, 19 nt, Artificial Sequence
  Description of Artificial Sequence: Synthetic oligonucleotide
aaaucuacaugccugggaa

SEQ ID NO: 2576053 - RNA, 19 nt, Artificial Sequence
  Description of Artificial Sequence: Synthetic oligonucleotide
uuuauuuaacuuguggucu

SEQ ID NO: 2576054 - RNA, 19 nt, Artificial Sequence
  Description of Artificial Sequence: Synthetic oligonucleotide
acauggacuucucacaaac

SEQ ID NO: 2576055 - RNA, 19 nt, Artificial Sequence
  Description of Artificial Sequence: Synthetic oligonucleotide
ucucuagaaacucccaaag

SEQ ID NO: 2576056 - RNA, 19 nt, Artificial Sequence
  Description of Artificial Sequence: Synthetic oligonucleotide
caaggcaccuuuaagacag

SEQ ID NO: 2576057 - RNA, 19 nt, Artificial Sequence
  Description of Artificial Sequence: Synthetic oligonucleotide
uauucaucugaaaacuuga

SEQ ID NO: 2576058 - RNA, 19 nt, Artificial Sequence
  Description of Artificial Sequence: Synthetic oligonucleotide
gagaaauauaguugcaaug

SEQ ID NO: 2576059 - RNA, 19 nt, Artificial Sequence
  Description of Artificial Sequence: Synthetic oligonucleotide
uggaucauaggaaaagugu

SEQ ID NO: 2576060 - RNA, 19 nt, Artificial Sequence
  Description of Artificial Sequence: Synthetic oligonucleotide
aaaaguuaaguaauuggca

SEQ ID NO: 2576061 - RNA, 19 nt, Artificial Sequence
  Description of Artificial Sequence: Synthetic oligonucleotide
ucuuagaacaagaauuaaa

SEQ ID NO: 2576062 - RNA, 19 nt, Artificial Sequence
  Description of Artificial Sequence: Synthetic oligonucleotide
gaaauauaguugcaaugag

SEQ ID NO: 2576063 - RNA, 19 nt, Artificial Sequence
  Description of Artificial Sequence: Synthetic oligonucleotide
agaaauauaguugcaauga

SEQ ID NO: 2576064 - RNA, 19 nt, Artificial Sequence
  Description of Artificial Sequence: Synthetic oligonucleotide
cuuagaacaagaauuaaaa

SEQ ID NO: 2576065 - RNA, 19 nt, Artificial Sequence
  Description of Artificial Sequence: Synthetic oligonucleotide
agaauuaaaaggugacgag

SEQ ID NO: 2576066 - RNA, 19 nt, Artificial Sequence
  Description of Artificial Sequence: Synthetic oligonucleotide
auuggcagaggcuuaggac

SEQ ID NO: 2576067 - RNA, 19 nt, Artificial Sequence
  Description of Artificial Sequence: Synthetic oligonucleotide
cagauauucaucugaaaac

SEQ ID NO: 2576068 - RNA, 19 nt, Artificial Sequence
  Description of Artificial Sequence: Synthetic oligonucleotide
acacacauggacuucucac

SEQ ID NO: 2576069 - RNA, 19 nt, Artificial Sequence
  Description of Artificial Sequence: Synthetic oligonucleotide
aacaagaauuaaaagguga

SEQ ID NO: 2576070 - RNA, 19 nt, Artificial Sequence
  Description of Artificial Sequence: Synthetic oligonucleotide
aaaaucuacaugccuggga

SEQ ID NO: 2576071 - RNA, 19 nt, Artificial Sequence
  Description of Artificial Sequence: Synthetic oligonucleotide
ugcuacggagaucauagag

SEQ ID NO: 2576072 - RNA, 19 nt, Artificial Sequence
  Description of Artificial Sequence: Synthetic oligonucleotide
aaaggaagcacaaagcaau

SEQ ID NO: 2576073 - RNA, 19 nt, Artificial Sequence
  Description of Artificial Sequence: Synthetic oligonucleotide
uuaacuccagcacugggga

SEQ ID NO: 2576074 - RNA, 19 nt, Artificial Sequence
  Description of Artificial Sequence: Synthetic oligonucleotide
aaguuaaguaauuggcaga

SEQ ID NO: 2576075 - RNA, 19 nt, Artificial Sequence
  Description of Artificial Sequence: Synthetic oligonucleotide
aggguacuucucuagaaac

SEQ ID NO: 2576076 - RNA, 19 nt, Artificial Sequence
  Description of Artificial Sequence: Synthetic oligonucleotide
uaaugguuuugcuacggag

SEQ ID NO: 2576077 - RNA, 19 nt, Artificial Sequence
  Description of Artificial Sequence: Synthetic oligonucleotide
uuggcagaggcuuaggaca

SEQ ID NO: 2576078 - RNA, 19 nt, Artificial Sequence
  Description of Artificial Sequence: Synthetic oligonucleotide
uguuucuuagaacaagaau

SEQ ID NO: 2576079 - RNA, 19 nt, Artificial Sequence
  Description of Artificial Sequence: Synthetic oligonucleotide
aguuaaguaauuggcagag

SEQ ID NO: 2576080 - RNA, 19 nt, Artificial Sequence
  Description of Artificial Sequence: Synthetic oligonucleotide
acugcuucgucagauauuc

SEQ ID NO: 2576081 - RNA, 19 nt, Artificial Sequence
  Description of Artificial Sequence: Synthetic oligonucleotide
gaccaagaggcuuaagaag

SEQ ID NO: 2576082 - RNA, 19 nt, Artificial Sequence
  Description of Artificial Sequence: Synthetic oligonucleotide
auggacuucucacaaacug

SEQ ID NO: 2576083 - RNA, 19 nt, Artificial Sequence
  Description of Artificial Sequence: Synthetic oligonucleotide
caaugaggagcuuccaugg

SEQ ID NO: 2576084 - RNA, 19 nt, Artificial Sequence
  Description of Artificial Sequence: Synthetic oligonucleotide
ugagaaauauaguugcaau

SEQ ID NO: 2576085 - RNA, 19 nt, Artificial Sequence
  Description of Artificial Sequence: Synthetic oligonucleotide
ugccauauuuaccaauccc

SEQ ID NO: 2576086 - RNA, 19 nt, Artificial Sequence
  Description of Artificial Sequence: Synthetic oligonucleotide
agcacaaagcaaugcauag

SEQ ID NO: 2576087 - RNA, 19 nt, Artificial Sequence
  Description of Artificial Sequence: Synthetic oligonucleotide
agauauucaucugaaaacu

SEQ ID NO: 2576088 - RNA, 19 nt, Artificial Sequence
  Description of Artificial Sequence: Synthetic oligonucleotide
guccgauugagaaauauag

SEQ ID NO: 2576089 - RNA, 19 nt, Artificial Sequence
  Description of Artificial Sequence: Synthetic oligonucleotide
cuacggagaucauagagac

SEQ ID NO: 2576090 - RNA, 19 nt, Artificial Sequence
  Description of Artificial Sequence: Synthetic oligonucleotide
aucauaggaaaaguguuuc

SEQ ID NO: 2576091 - RNA, 19 nt, Artificial Sequence
  Description of Artificial Sequence: Synthetic oligonucleotide
aucagaggaucuuagaaaa

SEQ ID NO: 2576092 - RNA, 19 nt, Artificial Sequence
  Description of Artificial Sequence: Synthetic oligonucleotide
ugagacaucccuccagcag

SEQ ID NO: 2576093 - RNA, 19 nt, Artificial Sequence
  Description of Artificial Sequence: Synthetic oligonucleotide
gauaaugguuuugcuacgg

SEQ ID NO: 2576094 - RNA, 19 nt, Artificial Sequence
  Description of Artificial Sequence: Synthetic oligonucleotide
ucgucagauauucaucuga

SEQ ID NO: 2576095 - RNA, 19 nt, Artificial Sequence
  Description of Artificial Sequence: Synthetic oligonucleotide
aaaacuugauaaugguuuu

SEQ ID NO: 2576096 - RNA, 19 nt, Artificial Sequence
  Description of Artificial Sequence: Synthetic oligonucleotide
augauuuucccaaagccag

SEQ ID NO: 2576097 - RNA, 19 nt, Artificial Sequence
  Description of Artificial Sequence: Synthetic oligonucleotide
aaugguuuugcuacggaga

SEQ ID NO: 2576098 - RNA, 19 nt, Artificial Sequence
  Description of Artificial Sequence: Synthetic oligonucleotide
acagggauggccaucuugc

SEQ ID NO: 2576099 - RNA, 19 nt, Artificial Sequence
  Description of Artificial Sequence: Synthetic oligonucleotide
ugauaaugguuuugcuacg

SEQ ID NO: 2576100 - RNA, 19 nt, Artificial Sequence
  Description of Artificial Sequence: Synthetic oligonucleotide
caagaauuaaaaggugacg

SEQ ID NO: 2576101 - RNA, 19 nt, Artificial Sequence
  Description of Artificial Sequence: Synthetic oligonucleotide
aggaucuuagaaaaggaag

SEQ ID NO: 2576102 - RNA, 19 nt, Artificial Sequence
  Description of Artificial Sequence: Synthetic oligonucleotide
uucccaaagccagucaugg

SEQ ID NO: 2576103 - RNA, 19 nt, Artificial Sequence
  Description of Artificial Sequence: Synthetic oligonucleotide
uuuaacuuguggucuucag

SEQ ID NO: 2576104 - RNA, 19 nt, Artificial Sequence
  Description of Artificial Sequence: Synthetic oligonucleotide
ugaaaacuugauaaugguu

SEQ ID NO: 2576105 - RNA, 19 nt, Artificial Sequence
  Description of Artificial Sequence: Synthetic oligonucleotide
gagaccaagaggcuuaaga

SEQ ID NO: 2576106 - RNA, 19 nt, Artificial Sequence
  Description of Artificial Sequence: Synthetic oligonucleotide
ucaugguauuuauuuaacu

SEQ ID NO: 2576107 - RNA, 19 nt, Artificial Sequence
  Description of Artificial Sequence: Synthetic oligonucleotide
aggcuuaagaaguucugag

SEQ ID NO: 2576108 - RNA, 19 nt, Artificial Sequence
  Description of Artificial Sequence: Synthetic oligonucleotide
aaucuacaugccugggaag

SEQ ID NO: 2576109 - RNA, 19 nt, Artificial Sequence
  Description of Artificial Sequence: Synthetic oligonucleotide
uggacuucucacaaacuga

SEQ ID NO: 2576110 - RNA, 19 nt, Artificial Sequence
  Description of Artificial Sequence: Synthetic oligonucleotide
auuuaccaaucccaugaag

SEQ ID NO: 2576111 - RNA, 19 nt, Artificial Sequence
  Description of Artificial Sequence: Synthetic oligonucleotide
auauaguugcaaugaggag

SEQ ID NO: 2576112 - RNA, 19 nt, Artificial Sequence
  Description of Artificial Sequence: Synthetic oligonucleotide
caaugcauagcaaacuuca

SEQ ID NO: 2576113 - RNA, 19 nt, Artificial Sequence
  Description of Artificial Sequence: Synthetic oligonucleotide
ucaauuggauaccuccacu

SEQ ID NO: 2576114 - RNA, 19 nt, Artificial Sequence
  Description of Artificial Sequence: Synthetic oligonucleotide
uucaucugaaaacuugaua

SEQ ID NO: 2576115 - RNA, 19 nt, Artificial Sequence
  Description of Artificial Sequence: Synthetic oligonucleotide
aaguaauuggcagaggcuu

SEQ ID NO: 2576116 - RNA, 19 nt, Artificial Sequence
  Description of Artificial Sequence: Synthetic oligonucleotide
caugauuuucccaaagcca

SEQ ID NO: 2576117 - RNA, 19 nt, Artificial Sequence
  Description of Artificial Sequence: Synthetic oligonucleotide
ugaaguucaauuggauacc

SEQ ID NO: 2576118 - RNA, 19 nt, Artificial Sequence
  Description of Artificial Sequence: Synthetic oligonucleotide
aucugaaaacuugauaaug

SEQ ID NO: 2576119 - RNA, 19 nt, Artificial Sequence
  Description of Artificial Sequence: Synthetic oligonucleotide
aucuacaugccugggaagg

SEQ ID NO: 2576120 - RNA, 19 nt, Artificial Sequence
  Description of Artificial Sequence: Synthetic oligonucleotide
gcuuaagaaguucugagac

SEQ ID NO: 2576121 - RNA, 19 nt, Artificial Sequence
  Description of Artificial Sequence: Synthetic oligonucleotide
ucagaggaucuuagaaaag

SEQ ID NO: 2576122 - RNA, 19 nt, Artificial Sequence
  Description of Artificial Sequence: Synthetic oligonucleotide
ugaaggguacuucucuaga

SEQ ID NO: 2576123 - RNA, 19 nt, Artificial Sequence
  Description of Artificial Sequence: Synthetic oligonucleotide
aaggguacuucucuagaaa

SEQ ID NO: 2576124 - RNA, 19 nt, Artificial Sequence
  Description of Artificial Sequence: Synthetic oligonucleotide
auuggauaccuccacugcu

SEQ ID NO: 2576125 - RNA, 19 nt, Artificial Sequence
  Description of Artificial Sequence: Synthetic oligonucleotide
agaccaagaggcuuaagaa

SEQ ID NO: 2576126 - RNA, 19 nt, Artificial Sequence
  Description of Artificial Sequence: Synthetic oligonucleotide
agaggcuuaggacacacau

SEQ ID NO: 2576127 - RNA, 19 nt, Artificial Sequence
  Description of Artificial Sequence: Synthetic oligonucleotide
gaacaagaauuaaaaggug

SEQ ID NO: 2576128 - RNA, 19 nt, Artificial Sequence
  Description of Artificial Sequence: Synthetic oligonucleotide
uccgauugagaaauauagu

SEQ ID NO: 2576129 - RNA, 19 nt, Artificial Sequence
  Description of Artificial Sequence: Synthetic oligonucleotide
uucugagacaucccuccag

SEQ ID NO: 2576130 - RNA, 19 nt, Artificial Sequence
  Description of Artificial Sequence: Synthetic oligonucleotide
aggaagcacaaagcaaugc

SEQ ID NO: 2576131 - RNA, 19 nt, Artificial Sequence
  Description of Artificial Sequence: Synthetic oligonucleotide
gcaaacuucaaacaaggca

SEQ ID NO: 2576132 - RNA, 19 nt, Artificial Sequence
  Description of Artificial Sequence: Synthetic oligonucleotide
uucucuagaaacucccaaa

SEQ ID NO: 2576133 - RNA, 19 nt, Artificial Sequence
  Description of Artificial Sequence: Synthetic oligonucleotide
uugagaaauauaguugcaa

SEQ ID NO: 2576134 - RNA, 19 nt, Artificial Sequence
  Description of Artificial Sequence: Synthetic oligonucleotide
ugagguccgauugagaaau

SEQ ID NO: 2576135 - RNA, 19 nt, Artificial Sequence
  Description of Artificial Sequence: Synthetic oligonucleotide
ggaucuuagaaaaggaagc

SEQ ID NO: 2576136 - RNA, 19 nt, Artificial Sequence
  Description of Artificial Sequence: Synthetic oligonucleotide
aguugcaaugaggagcuuc

SEQ ID NO: 2576137 - RNA, 19 nt, Artificial Sequence
  Description of Artificial Sequence: Synthetic oligonucleotide
aaacuugauaaugguuuug

SEQ ID NO: 2576138 - RNA, 19 nt, Artificial Sequence
  Description of Artificial Sequence: Synthetic oligonucleotide
guuucuuagaacaagaauu

SEQ ID NO: 2576139 - RNA, 19 nt, Artificial Sequence
  Description of Artificial Sequence: Synthetic oligonucleotide
cauagcaaacuucaaacaa

SEQ ID NO: 2576140 - RNA, 19 nt, Artificial Sequence
  Description of Artificial Sequence: Synthetic oligonucleotide
acucccaaagcacagggau

SEQ ID NO: 2576141 - RNA, 19 nt, Artificial Sequence
  Description of Artificial Sequence: Synthetic oligonucleotide
acaucccuccagcaguucg

SEQ ID NO: 2576142 - RNA, 19 nt, Artificial Sequence
  Description of Artificial Sequence: Synthetic oligonucleotide
auaggaaaaguguuucuua

SEQ ID NO: 2576143 - RNA, 19 nt, Artificial Sequence
  Description of Artificial Sequence: Synthetic oligonucleotide
uccgguauggggucguugc

SEQ ID NO: 2576144 - RNA, 19 nt, Artificial Sequence
  Description of Artificial Sequence: Synthetic oligonucleotide
gaucuuagaaaaggaagca

SEQ ID NO: 2576145 - RNA, 19 nt, Artificial Sequence
  Description of Artificial Sequence: Synthetic oligonucleotide
uuccauggaucauaggaaa

SEQ ID NO: 2576146 - RNA, 19 nt, Artificial Sequence
  Description of Artificial Sequence: Synthetic oligonucleotide
cuugccugagguccgauug

SEQ ID NO: 2576147 - RNA, 19 nt, Artificial Sequence
  Description of Artificial Sequence: Synthetic oligonucleotide
cuacagaaugaguuccagc

SEQ ID NO: 2576148 - RNA, 19 nt, Artificial Sequence
  Description of Artificial Sequence: Synthetic oligonucleotide
cucuagaaacucccaaagc

SEQ ID NO: 2576149 - RNA, 19 nt, Artificial Sequence
  Description of Artificial Sequence: Synthetic oligonucleotide
ugcuucgucagauauucau

SEQ ID NO: 2576150 - RNA, 19 nt, Artificial Sequence
  Description of Artificial Sequence: Synthetic oligonucleotide
caaagcaaugcauagcaaa

SEQ ID NO: 2576151 - RNA, 19 nt, Artificial Sequence
  Description of Artificial Sequence: Synthetic oligonucleotide
accaagaggcuuaagaagu

SEQ ID NO: 2576152 - RNA, 19 nt, Artificial Sequence
  Description of Artificial Sequence: Synthetic oligonucleotide
uuaccaaucccaugaaguu

SEQ ID NO: 2576153 - RNA, 19 nt, Artificial Sequence
  Description of Artificial Sequence: Synthetic oligonucleotide
gaaacucccaaagcacagg

SEQ ID NO: 2576154 - RNA, 19 nt, Artificial Sequence
  Description of Artificial Sequence: Synthetic oligonucleotide
cucgcuguccaucagagga

SEQ ID NO: 2576155 - RNA, 19 nt, Artificial Sequence
  Description of Artificial Sequence: Synthetic oligonucleotide
cuugauaaugguuuugcua

SEQ ID NO: 2576156 - RNA, 19 nt, Artificial Sequence
  Description of Artificial Sequence: Synthetic oligonucleotide
aaaauccgguauggggucg

SEQ ID NO: 2576157 - RNA, 19 nt, Artificial Sequence
  Description of Artificial Sequence: Synthetic oligonucleotide
ucauaggaaaaguguuucu

SEQ ID NO: 2576158 - RNA, 19 nt, Artificial Sequence
  Description of Artificial Sequence: Synthetic oligonucleotide
aaugaggagcuuccaugga

SEQ ID NO: 2576159 - RNA, 19 nt, Artificial Sequence
  Description of Artificial Sequence: Synthetic oligonucleotide
agcaguucgggccaccuca

SEQ ID NO: 2576160 - RNA, 19 nt, Artificial Sequence
  Description of Artificial Sequence: Synthetic oligonucleotide
uuaggacacacauggacuu

SEQ ID NO: 2576161 - RNA, 19 nt, Artificial Sequence
  Description of Artificial Sequence: Synthetic oligonucleotide
aagaggcuuaagaaguucu

SEQ ID NO: 2576162 - RNA, 19 nt, Artificial Sequence
  Description of Artificial Sequence: Synthetic oligonucleotide
aagcaaugcauagcaaacu

SEQ ID NO: 2576163 - RNA, 19 nt, Artificial Sequence
  Description of Artificial Sequence: Synthetic oligonucleotide
ugaggagcuuccauggauc

SEQ ID NO: 2576164 - RNA, 19 nt, Artificial Sequence
  Description of Artificial Sequence: Synthetic oligonucleotide
accuuuaagacagacuuaa

SEQ ID NO: 2576165 - RNA, 19 nt, Artificial Sequence
  Description of Artificial Sequence: Synthetic oligonucleotide
uauuuaccaaucccaugaa

SEQ ID NO: 2576166 - RNA, 19 nt, Artificial Sequence
  Description of Artificial Sequence: Synthetic oligonucleotide
cugaaggguacuucucuag

SEQ ID NO: 2576167 - RNA, 19 nt, Artificial Sequence
  Description of Artificial Sequence: Synthetic oligonucleotide
ucuacaugccugggaaggg

SEQ ID NO: 2576168 - RNA, 19 nt, Artificial Sequence
  Description of Artificial Sequence: Synthetic oligonucleotide
agcaaacuucaaacaaggc

SEQ ID NO: 2576169 - RNA, 19 nt, Artificial Sequence
  Description of Artificial Sequence: Synthetic oligonucleotide
aguguuucuuagaacaaga

SEQ ID NO: 2576170 - RNA, 19 nt, Artificial Sequence
  Description of Artificial Sequence: Synthetic oligonucleotide
acuugauaaugguuuugcu

SEQ ID NO: 2576171 - RNA, 19 nt, Artificial Sequence
  Description of Artificial Sequence: Synthetic oligonucleotide
ugcuuccacucauugacac

SEQ ID NO: 2576172 - RNA, 19 nt, Artificial Sequence
  Description of Artificial Sequence: Synthetic oligonucleotide
agcaaugcauagcaaacuu

SEQ ID NO: 2576173 - RNA, 19 nt, Artificial Sequence
  Description of Artificial Sequence: Synthetic oligonucleotide
augguuuugcuacggagau

SEQ ID NO: 2576174 - RNA, 19 nt, Artificial Sequence
  Description of Artificial Sequence: Synthetic oligonucleotide
gguuuugcuacggagauca

SEQ ID NO: 2576175 - RNA, 19 nt, Artificial Sequence
  Description of Artificial Sequence: Synthetic oligonucleotide
ucauagagaccaagaggcu

SEQ ID NO: 2576176 - RNA, 19 nt, Artificial Sequence
  Description of Artificial Sequence: Synthetic oligonucleotide
uccacucauugacacaaaa

SEQ ID NO: 2576177 - RNA, 19 nt, Artificial Sequence
  Description of Artificial Sequence: Synthetic oligonucleotide
auaaugguuuugcuacgga

SEQ ID NO: 2576178 - RNA, 19 nt, Artificial Sequence
  Description of Artificial Sequence: Synthetic oligonucleotide
agcugaaggguacuucucu

SEQ ID NO: 2576179 - RNA, 19 nt, Artificial Sequence
  Description of Artificial Sequence: Synthetic oligonucleotide
uggccaucuugccugaggu

SEQ ID NO: 2576180 - RNA, 19 nt, Artificial Sequence
  Description of Artificial Sequence: Synthetic oligonucleotide
ugauuuucccaaagccagu

SEQ ID NO: 2576181 - RNA, 19 nt, Artificial Sequence
  Description of Artificial Sequence: Synthetic oligonucleotide
gaaguucugagacaucccu

SEQ ID NO: 2576182 - RNA, 19 nt, Artificial Sequence
  Description of Artificial Sequence: Synthetic oligonucleotide
acaaggcaccuuuaagaca

SEQ ID NO: 2576183 - RNA, 19 nt, Artificial Sequence
  Description of Artificial Sequence: Synthetic oligonucleotide
gcaaugaggagcuuccaug

SEQ ID NO: 2576184 - RNA, 19 nt, Artificial Sequence
  Description of Artificial Sequence: Synthetic oligonucleotide
uccauggaucauaggaaaa

SEQ ID NO: 2576185 - RNA, 19 nt, Artificial Sequence
  Description of Artificial Sequence: Synthetic oligonucleotide
aaguucaauuggauaccuc

SEQ ID NO: 2576186 - RNA, 19 nt, Artificial Sequence
  Description of Artificial Sequence: Synthetic oligonucleotide
uucgucagauauucaucug

SEQ ID NO: 2576187 - RNA, 19 nt, Artificial Sequence
  Description of Artificial Sequence: Synthetic oligonucleotide
aaaguguuucuuagaacaa

SEQ ID NO: 2576188 - RNA, 19 nt, Artificial Sequence
  Description of Artificial Sequence: Synthetic oligonucleotide
aguucgggccaccucagcu

SEQ ID NO: 2576189 - RNA, 19 nt, Artificial Sequence
  Description of Artificial Sequence: Synthetic oligonucleotide
agaaacucccaaagcacag

SEQ ID NO: 2576190 - RNA, 19 nt, Artificial Sequence
  Description of Artificial Sequence: Synthetic oligonucleotide
gauuuucccaaagccaguc

SEQ ID NO: 2576191 - RNA, 19 nt, Artificial Sequence
  Description of Artificial Sequence: Synthetic oligonucleotide
caucagaggaucuuagaaa

SEQ ID NO: 2576192 - RNA, 19 nt, Artificial Sequence
  Description of Artificial Sequence: Synthetic oligonucleotide
accaaucccaugaaguuca

SEQ ID NO: 2576193 - RNA, 19 nt, Artificial Sequence
  Description of Artificial Sequence: Synthetic oligonucleotide
guuaaguaauuggcagagg

SEQ ID NO: 2576194 - RNA, 19 nt, Artificial Sequence
  Description of Artificial Sequence: Synthetic oligonucleotide
ggaagcacaaagcaaugca

SEQ ID NO: 2576195 - RNA, 19 nt, Artificial Sequence
  Description of Artificial Sequence: Synthetic oligonucleotide
aaggaagcacaaagcaaug

SEQ ID NO: 2576196 - RNA, 19 nt, Artificial Sequence
  Description of Artificial Sequence: Synthetic oligonucleotide
gaaggguacuucucuagaa

SEQ ID NO: 2576197 - RNA, 19 nt, Artificial Sequence
  Description of Artificial Sequence: Synthetic oligonucleotide
caucccuccagcaguucgg

SEQ ID NO: 2576198 - RNA, 19 nt, Artificial Sequence
  Description of Artificial Sequence: Synthetic oligonucleotide
cuuaggacacacauggacu

SEQ ID NO: 2576199 - RNA, 19 nt, Artificial Sequence
  Description of Artificial Sequence: Synthetic oligonucleotide
augaggagcuuccauggau

SEQ ID NO: 2576200 - RNA, 19 nt, Artificial Sequence
  Description of Artificial Sequence: Synthetic oligonucleotide
aaagcacagggauggccau

SEQ ID NO: 2576201 - RNA, 19 nt, Artificial Sequence
  Description of Artificial Sequence: Synthetic oligonucleotide
aagcacaaagcaaugcaua

SEQ ID NO: 2576202 - RNA, 19 nt, Artificial Sequence
  Description of Artificial Sequence: Synthetic oligonucleotide
agaggaucuuagaaaagga

SEQ ID NO: 2576203 - RNA, 19 nt, Artificial Sequence
  Description of Artificial Sequence: Synthetic oligonucleotide
auuuucccaaagccaguca

SEQ ID NO: 2576204 - RNA, 19 nt, Artificial Sequence
  Description of Artificial Sequence: Synthetic oligonucleotide
uauggggucguugccauau

SEQ ID NO: 2576205 - RNA, 19 nt, Artificial Sequence
  Description of Artificial Sequence: Synthetic oligonucleotide
uacggagaucauagagacc

SEQ ID NO: 2576206 - RNA, 19 nt, Artificial Sequence
  Description of Artificial Sequence: Synthetic oligonucleotide
cgauugagaaauauaguug

SEQ ID NO: 2576207 - RNA, 19 nt, Artificial Sequence
  Description of Artificial Sequence: Synthetic oligonucleotide
uaauuggcagaggcuuagg

SEQ ID NO: 2576208 - RNA, 19 nt, Artificial Sequence
  Description of Artificial Sequence: Synthetic oligonucleotide
cuucgucagauauucaucu

SEQ ID NO: 2576209 - RNA, 19 nt, Artificial Sequence
  Description of Artificial Sequence: Synthetic oligonucleotide
uucgggccaccucagcuga

SEQ ID NO: 2576210 - RNA, 19 nt, Artificial Sequence
  Description of Artificial Sequence: Synthetic oligonucleotide
auugagaaauauaguugca

SEQ ID NO: 2576211 - RNA, 19 nt, Artificial Sequence
  Description of Artificial Sequence: Synthetic oligonucleotide
uaccaaucccaugaaguuc

SEQ ID NO: 2576212 - RNA, 19 nt, Artificial Sequence
  Description of Artificial Sequence: Synthetic oligonucleotide
gaggaucuuagaaaaggaa

SEQ ID NO: 2576213 - RNA, 19 nt, Artificial Sequence
  Description of Artificial Sequence: Synthetic oligonucleotide
gaggcuuaagaaguucuga

SEQ ID NO: 2576214 - RNA, 19 nt, Artificial Sequence
  Description of Artificial Sequence: Synthetic oligonucleotide
uuuugcuacggagaucaua

SEQ ID NO: 2576215 - RNA, 19 nt, Artificial Sequence
  Description of Artificial Sequence: Synthetic oligonucleotide
gucaugguauuuauuuaac

SEQ ID NO: 2576216 - RNA, 19 nt, Artificial Sequence
  Description of Artificial Sequence: Synthetic oligonucleotide
gagacaucccuccagcagu

SEQ ID NO: 2576217 - RNA, 19 nt, Artificial Sequence
  Description of Artificial Sequence: Synthetic oligonucleotide
aaugcauagcaaacuucaa

SEQ ID NO: 2576218 - RNA, 19 nt, Artificial Sequence
  Description of Artificial Sequence: Synthetic oligonucleotide
agggauggccaucuugccu

SEQ ID NO: 2576219 - RNA, 19 nt, Artificial Sequence
  Description of Artificial Sequence: Synthetic oligonucleotide
guacuucucuagaaacucc

SEQ ID NO: 2576220 - RNA, 19 nt, Artificial Sequence
  Description of Artificial Sequence: Synthetic oligonucleotide
uggauaccuccacugcuuc

SEQ ID NO: 2576221 - RNA, 19 nt, Artificial Sequence
  Description of Artificial Sequence: Synthetic oligonucleotide
ugcaccugcuuccacucau

SEQ ID NO: 2576222 - RNA, 19 nt, Artificial Sequence
  Description of Artificial Sequence: Synthetic oligonucleotide
gaggcuuaggacacacaug

SEQ ID NO: 2576223 - RNA, 19 nt, Artificial Sequence
  Description of Artificial Sequence: Synthetic oligonucleotide
gaggagcuuccauggauca

SEQ ID NO: 2576224 - RNA, 19 nt, Artificial Sequence
  Description of Artificial Sequence: Synthetic oligonucleotide
guucgggccaccucagcug

SEQ ID NO: 2576225 - RNA, 19 nt, Artificial Sequence
  Description of Artificial Sequence: Synthetic oligonucleotide
uaacuccagcacuggggag

SEQ ID NO: 2576226 - RNA, 19 nt, Artificial Sequence
  Description of Artificial Sequence: Synthetic oligonucleotide
cucccaaagcacagggaug

SEQ ID NO: 2576227 - RNA, 19 nt, Artificial Sequence
  Description of Artificial Sequence: Synthetic oligonucleotide
aaagccagucaugguauuu

SEQ ID NO: 2576228 - RNA, 19 nt, Artificial Sequence
  Description of Artificial Sequence: Synthetic oligonucleotide
uugccugagguccgauuga

SEQ ID NO: 2576229 - RNA, 19 nt, Artificial Sequence
  Description of Artificial Sequence: Synthetic oligonucleotide
cugaaaacuugauaauggu

SEQ ID NO: 2576230 - RNA, 19 nt, Artificial Sequence
  Description of Artificial Sequence: Synthetic oligonucleotide
auaccuccacugcuucguc

SEQ ID NO: 2576231 - RNA, 19 nt, Artificial Sequence
  Description of Artificial Sequence: Synthetic oligonucleotide
guucaauuggauaccucca

SEQ ID NO: 2576232 - RNA, 19 nt, Artificial Sequence
  Description of Artificial Sequence: Synthetic oligonucleotide
gccaucuugccugaggucc

SEQ ID NO: 2576233 - RNA, 19 nt, Artificial Sequence
  Description of Artificial Sequence: Synthetic oligonucleotide
aagccagucaugguauuua

SEQ ID NO: 2576234 - RNA, 19 nt, Artificial Sequence
  Description of Artificial Sequence: Synthetic oligonucleotide
agaggcuuaagaaguucug

SEQ ID NO: 2576235 - RNA, 19 nt, Artificial Sequence
  Description of Artificial Sequence: Synthetic oligonucleotide
aggcaccuuuaagacagac

SEQ ID NO: 2576236 - RNA, 19 nt, Artificial Sequence
  Description of Artificial Sequence: Synthetic oligonucleotide
gagcuuccauggaucauag

SEQ ID NO: 2576237 - RNA, 19 nt, Artificial Sequence
  Description of Artificial Sequence: Synthetic oligonucleotide
cuuguggucuucaggugca

SEQ ID NO: 2576238 - RNA, 19 nt, Artificial Sequence
  Description of Artificial Sequence: Synthetic oligonucleotide
ggcuuaagaaguucugaga

SEQ ID NO: 2576239 - RNA, 19 nt, Artificial Sequence
  Description of Artificial Sequence: Synthetic oligonucleotide
aagcacagggauggccauc

SEQ ID NO: 2576240 - RNA, 19 nt, Artificial Sequence
  Description of Artificial Sequence: Synthetic oligonucleotide
gcauagcaaacuucaaaca

SEQ ID NO: 2576241 - RNA, 19 nt, Artificial Sequence
  Description of Artificial Sequence: Synthetic oligonucleotide
gggucguugccauauuuac

SEQ ID NO: 2576242 - RNA, 19 nt, Artificial Sequence
  Description of Artificial Sequence: Synthetic oligonucleotide
ugccugagguccgauugag

SEQ ID NO: 2576243 - RNA, 19 nt, Artificial Sequence
  Description of Artificial Sequence: Synthetic oligonucleotide
agcacagggauggccaucu

SEQ ID NO: 2576244 - RNA, 19 nt, Artificial Sequence
  Description of Artificial Sequence: Synthetic oligonucleotide
aggacacacauggacuucu

SEQ ID NO: 2576245 - RNA, 19 nt, Artificial Sequence
  Description of Artificial Sequence: Synthetic oligonucleotide
caagaggcuuaagaaguuc

SEQ ID NO: 2576246 - RNA, 19 nt, Artificial Sequence
  Description of Artificial Sequence: Synthetic oligonucleotide
ggagaucauagagaccaag

SEQ ID NO: 2576247 - RNA, 19 nt, Artificial Sequence
  Description of Artificial Sequence: Synthetic oligonucleotide
aaauccgguauggggucgu

SEQ ID NO: 2576248 - RNA, 19 nt, Artificial Sequence
  Description of Artificial Sequence: Synthetic oligonucleotide
ccauggaucauaggaaaag

SEQ ID NO: 2576249 - RNA, 19 nt, Artificial Sequence
  Description of Artificial Sequence: Synthetic oligonucleotide
uaccuccacugcuucguca

SEQ ID NO: 2576250 - RNA, 19 nt, Artificial Sequence
  Description of Artificial Sequence: Synthetic oligonucleotide
agcuuccauggaucauagg

SEQ ID NO: 2576251 - RNA, 19 nt, Artificial Sequence
  Description of Artificial Sequence: Synthetic oligonucleotide
ggauaccuccacugcuucg

SEQ ID NO: 2576252 - RNA, 19 nt, Artificial Sequence
  Description of Artificial Sequence: Synthetic oligonucleotide
guccaucagaggaucuuag

SEQ ID NO: 2576253 - RNA, 19 nt, Artificial Sequence
  Description of Artificial Sequence: Synthetic oligonucleotide
agcuacaaagaaacccugu

SEQ ID NO: 2576254 - RNA, 19 nt, Artificial Sequence
  Description of Artificial Sequence: Synthetic oligonucleotide
ggccaccucagcugaaggg

SEQ ID NO: 2576255 - RNA, 19 nt, Artificial Sequence
  Description of Artificial Sequence: Synthetic oligonucleotide
gauaccuccacugcuucgu

SEQ ID NO: 2576256 - RNA, 19 nt, Artificial Sequence
  Description of Artificial Sequence: Synthetic oligonucleotide
gaagcacaaagcaaugcau

SEQ ID NO: 2576257 - RNA, 19 nt, Artificial Sequence
  Description of Artificial Sequence: Synthetic oligonucleotide
aacucccaaagcacaggga

SEQ ID NO: 2576258 - RNA, 19 nt, Artificial Sequence
  Description of Artificial Sequence: Synthetic oligonucleotide
ucgcuguccaucagaggau

SEQ ID NO: 2576259 - RNA, 19 nt, Artificial Sequence
  Description of Artificial Sequence: Synthetic oligonucleotide
gaaguucaauuggauaccu

SEQ ID NO: 2576260 - RNA, 19 nt, Artificial Sequence
  Description of Artificial Sequence: Synthetic oligonucleotide
gaucauaggaaaaguguuu

SEQ ID NO: 2576261 - RNA, 19 nt, Artificial Sequence
  Description of Artificial Sequence: Synthetic oligonucleotide
uggggucguugccauauuu

SEQ ID NO: 2576262 - RNA, 19 nt, Artificial Sequence
  Description of Artificial Sequence: Synthetic oligonucleotide
agccagucaugguauuuau

SEQ ID NO: 2576263 - RNA, 19 nt, Artificial Sequence
  Description of Artificial Sequence: Synthetic oligonucleotide
caccucagcugaaggguac

SEQ ID NO: 2576264 - RNA, 19 nt, Artificial Sequence
  Description of Artificial Sequence: Synthetic oligonucleotide
ucaggugcaccugcuucca

SEQ ID NO: 2576265 - RNA, 19 nt, Artificial Sequence
  Description of Artificial Sequence: Synthetic oligonucleotide
agggagcucgcuguccauc

SEQ ID NO: 2576266 - RNA, 19 nt, Artificial Sequence
  Description of Artificial Sequence: Synthetic oligonucleotide
ucccaaagccagucauggu

SEQ ID NO: 2576267 - RNA, 19 nt, Artificial Sequence
  Description of Artificial Sequence: Synthetic oligonucleotide
guguuucuuagaacaagaa

SEQ ID NO: 2576268 - RNA, 19 nt, Artificial Sequence
  Description of Artificial Sequence: Synthetic oligonucleotide
ggucguugccauauuuacc

SEQ ID NO: 2576269 - RNA, 19 nt, Artificial Sequence
  Description of Artificial Sequence: Synthetic oligonucleotide
cucagcugaaggguacuuc

SEQ ID NO: 2576270 - RNA, 19 nt, Artificial Sequence
  Description of Artificial Sequence: Synthetic oligonucleotide
cagucaugguauuuauuua

SEQ ID NO: 2576271 - RNA, 19 nt, Artificial Sequence
  Description of Artificial Sequence: Synthetic oligonucleotide
agguccgauugagaaauau

SEQ ID NO: 2576272 - RNA, 19 nt, Artificial Sequence
  Description of Artificial Sequence: Synthetic oligonucleotide
ccugagguccgauugagaa

SEQ ID NO: 2576273 - RNA, 19 nt, Artificial Sequence
  Description of Artificial Sequence: Synthetic oligonucleotide
aguaauuggcagaggcuua

SEQ ID NO: 2576274 - RNA, 19 nt, Artificial Sequence
  Description of Artificial Sequence: Synthetic oligonucleotide
ucuugccugagguccgauu

SEQ ID NO: 2576275 - RNA, 19 nt, Artificial Sequence
  Description of Artificial Sequence: Synthetic oligonucleotide
uuccacucauugacacaaa

SEQ ID NO: 2576276 - RNA, 19 nt, Artificial Sequence
  Description of Artificial Sequence: Synthetic oligonucleotide
acaaagcaaugcauagcaa

SEQ ID NO: 2576277 - RNA, 19 nt, Artificial Sequence
  Description of Artificial Sequence: Synthetic oligonucleotide
aagggagcucgcuguccau

SEQ ID NO: 2576278 - RNA, 19 nt, Artificial Sequence
  Description of Artificial Sequence: Synthetic oligonucleotide
cauggaucauaggaaaagu

SEQ ID NO: 2576279 - RNA, 19 nt, Artificial Sequence
  Description of Artificial Sequence: Synthetic oligonucleotide
cugagguccgauugagaaa

SEQ ID NO: 2576280 - RNA, 19 nt, Artificial Sequence
  Description of Artificial Sequence: Synthetic oligonucleotide
ccgauugagaaauauaguu

SEQ ID NO: 2576281 - RNA, 19 nt, Artificial Sequence
  Description of Artificial Sequence: Synthetic oligonucleotide
ggugcaccugcuuccacuc

SEQ ID NO: 2576282 - RNA, 19 nt, Artificial Sequence
  Description of Artificial Sequence: Synthetic oligonucleotide
gcaaugcauagcaaacuuc

SEQ ID NO: 2576283 - RNA, 19 nt, Artificial Sequence
  Description of Artificial Sequence: Synthetic oligonucleotide
cauaggaaaaguguuucuu

SEQ ID NO: 2576284 - RNA, 19 nt, Artificial Sequence
  Description of Artificial Sequence: Synthetic oligonucleotide
gcuucgucagauauucauc

SEQ ID NO: 2576285 - RNA, 19 nt, Artificial Sequence
  Description of Artificial Sequence: Synthetic oligonucleotide
cagcacagguuccaaagcu

SEQ ID NO: 2576286 - RNA, 19 nt, Artificial Sequence
  Description of Artificial Sequence: Synthetic oligonucleotide
ccagucaugguauuuauuu

SEQ ID NO: 2576287 - RNA, 19 nt, Artificial Sequence
  Description of Artificial Sequence: Synthetic oligonucleotide
ugguuuugcuacggagauc

SEQ ID NO: 2576288 - RNA, 19 nt, Artificial Sequence
  Description of Artificial Sequence: Synthetic oligonucleotide
cugcuuccacucauugaca

SEQ ID NO: 2576289 - RNA, 19 nt, Artificial Sequence
  Description of Artificial Sequence: Synthetic oligonucleotide
gacuucucacaaacugaaa

SEQ ID NO: 2576290 - RNA, 19 nt, Artificial Sequence
  Description of Artificial Sequence: Synthetic oligonucleotide
agagaccaagaggcuuaag

SEQ ID NO: 2576291 - RNA, 19 nt, Artificial Sequence
  Description of Artificial Sequence: Synthetic oligonucleotide
ggaucauaggaaaaguguu

SEQ ID NO: 2576292 - RNA, 19 nt, Artificial Sequence
  Description of Artificial Sequence: Synthetic oligonucleotide
ggagcuuccauggaucaua

SEQ ID NO: 2576293 - RNA, 19 nt, Artificial Sequence
  Description of Artificial Sequence: Synthetic oligonucleotide
cauggacuucucacaaacu

SEQ ID NO: 2576294 - RNA, 19 nt, Artificial Sequence
  Description of Artificial Sequence: Synthetic oligonucleotide
caccuuuaagacagacuua

SEQ ID NO: 2576295 - RNA, 19 nt, Artificial Sequence
  Description of Artificial Sequence: Synthetic oligonucleotide
cacauggacuucucacaaa

SEQ ID NO: 2576296 - RNA, 19 nt, Artificial Sequence
  Description of Artificial Sequence: Synthetic oligonucleotide
gauggccaucuugccugag

SEQ ID NO: 2576297 - RNA, 19 nt, Artificial Sequence
  Description of Artificial Sequence: Synthetic oligonucleotide
auccgguauggggucguug

SEQ ID NO: 2576298 - RNA, 19 nt, Artificial Sequence
  Description of Artificial Sequence: Synthetic oligonucleotide
caguucgggccaccucagc

SEQ ID NO: 2576299 - RNA, 19 nt, Artificial Sequence
  Description of Artificial Sequence: Synthetic oligonucleotide
cauagagaccaagaggcuu

SEQ ID NO: 2576300 - RNA, 19 nt, Artificial Sequence
  Description of Artificial Sequence: Synthetic oligonucleotide
gcucgcuguccaucagagg

SEQ ID NO: 2576301 - RNA, 19 nt, Artificial Sequence
  Description of Artificial Sequence: Synthetic oligonucleotide
gggagcucgcuguccauca

SEQ ID NO: 2576302 - RNA, 19 nt, Artificial Sequence
  Description of Artificial Sequence: Synthetic oligonucleotide
aaggcaccuuuaagacaga

SEQ ID NO: 2576303 - RNA, 19 nt, Artificial Sequence
  Description of Artificial Sequence: Synthetic oligonucleotide
ggagcucgcuguccaucag

SEQ ID NO: 2576304 - RNA, 19 nt, Artificial Sequence
  Description of Artificial Sequence: Synthetic oligonucleotide
gguccgauugagaaauaua

SEQ ID NO: 2576305 - RNA, 19 nt, Artificial Sequence
  Description of Artificial Sequence: Synthetic oligonucleotide
aggagcuuccauggaucau

SEQ ID NO: 2576306 - RNA, 19 nt, Artificial Sequence
  Description of Artificial Sequence: Synthetic oligonucleotide
cagcaguucgggccaccuc

SEQ ID NO: 2576307 - RNA, 19 nt, Artificial Sequence
  Description of Artificial Sequence: Synthetic oligonucleotide
aauccgguauggggucguu

SEQ ID NO: 2576308 - RNA, 19 nt, Artificial Sequence
  Description of Artificial Sequence: Synthetic oligonucleotide
caggugcaccugcuuccac

SEQ ID NO: 2576309 - RNA, 19 nt, Artificial Sequence
  Description of Artificial Sequence: Synthetic oligonucleotide
cgucagauauucaucugaa

SEQ ID NO: 2576310 - RNA, 19 nt, Artificial Sequence
  Description of Artificial Sequence: Synthetic oligonucleotide
cugcuucgucagauauuca

SEQ ID NO: 2576311 - RNA, 19 nt, Artificial Sequence
  Description of Artificial Sequence: Synthetic oligonucleotide
gguauggggucguugccau

SEQ ID NO: 2576312 - RNA, 19 nt, Artificial Sequence
  Description of Artificial Sequence: Synthetic oligonucleotide
gggaagggagcucgcuguc

SEQ ID NO: 2576313 - RNA, 19 nt, Artificial Sequence
  Description of Artificial Sequence: Synthetic oligonucleotide
ccgguauggggucguugcc

SEQ ID NO: 2576314 - RNA, 19 nt, Artificial Sequence
  Description of Artificial Sequence: Synthetic oligonucleotide
auggggucguugccauauu

SEQ ID NO: 2576315 - RNA, 19 nt, Artificial Sequence
  Description of Artificial Sequence: Synthetic oligonucleotide
gcaguucgggccaccucag

SEQ ID NO: 2576316 - RNA, 19 nt, Artificial Sequence
  Description of Artificial Sequence: Synthetic oligonucleotide
ggcaccuuuaagacagacu

SEQ ID NO: 2576317 - RNA, 19 nt, Artificial Sequence
  Description of Artificial Sequence: Synthetic oligonucleotide
ucgggccaccucagcugaa

SEQ ID NO: 2576318 - RNA, 19 nt, Artificial Sequence
  Description of Artificial Sequence: Synthetic oligonucleotide
ggggucguugccauauuua

SEQ ID NO: 2576319 - RNA, 19 nt, Artificial Sequence
  Description of Artificial Sequence: Synthetic oligonucleotide
ccuccagcaguucgggcca

SEQ ID NO: 2576320 - RNA, 19 nt, Artificial Sequence
  Description of Artificial Sequence: Synthetic oligonucleotide
guauggggucguugccaua

SEQ ID NO: 2576321 - RNA, 19 nt, Artificial Sequence
  Description of Artificial Sequence: Synthetic oligonucleotide
aucuugccugagguccgau

SEQ ID NO: 2576322 - RNA, 19 nt, Artificial Sequence
  Description of Artificial Sequence: Synthetic oligonucleotide
cacugcuucgucagauauu

SEQ ID NO: 2576323 - RNA, 19 nt, Artificial Sequence
  Description of Artificial Sequence: Synthetic oligonucleotide
ggcuuaggacacacaugga

SEQ ID NO: 2576324 - RNA, 19 nt, Artificial Sequence
  Description of Artificial Sequence: Synthetic oligonucleotide
caaagccagucaugguauu

SEQ ID NO: 2576325 - RNA, 19 nt, Artificial Sequence
  Description of Artificial Sequence: Synthetic oligonucleotide
cuccacugcuucgucagau

SEQ ID NO: 2576326 - RNA, 19 nt, Artificial Sequence
  Description of Artificial Sequence: Synthetic oligonucleotide
uaguugcaaugaggagcuu

SEQ ID NO: 2576327 - RNA, 19 nt, Artificial Sequence
  Description of Artificial Sequence: Synthetic oligonucleotide
gagguccgauugagaaaua

SEQ ID NO: 2576328 - RNA, 19 nt, Artificial Sequence
  Description of Artificial Sequence: Synthetic oligonucleotide
cccaaagcacagggauggc

SEQ ID NO: 2576329 - RNA, 19 nt, Artificial Sequence
  Description of Artificial Sequence: Synthetic oligonucleotide
ccacugcuucgucagauau

SEQ ID NO: 2576330 - RNA, 19 nt, Artificial Sequence
  Description of Artificial Sequence: Synthetic oligonucleotide
ccaccucagcugaagggua

SEQ ID NO: 2576331 - RNA, 19 nt, Artificial Sequence
  Description of Artificial Sequence: Synthetic oligonucleotide
cgcuguccaucagaggauc

SEQ ID NO: 2576332 - RNA, 19 nt, Artificial Sequence
  Description of Artificial Sequence: Synthetic oligonucleotide
ccaagaggcuuaagaaguu

SEQ ID NO: 2576333 - RNA, 19 nt, Artificial Sequence
  Description of Artificial Sequence: Synthetic oligonucleotide
ccuuuaagacagacuuaau

SEQ ID NO: 2576334 - RNA, 19 nt, Artificial Sequence
  Description of Artificial Sequence: Synthetic oligonucleotide
gccugagguccgauugaga

SEQ ID NO: 2576335 - RNA, 19 nt, Artificial Sequence
  Description of Artificial Sequence: Synthetic oligonucleotide
cguugccauauuuaccaau

SEQ ID NO: 2576336 - RNA, 19 nt, Artificial Sequence
  Description of Artificial Sequence: Synthetic oligonucleotide
gcuguccaucagaggaucu

SEQ ID NO: 2576337 - RNA, 19 nt, Artificial Sequence
  Description of Artificial Sequence: Synthetic oligonucleotide
ccaaucccaugaaguucaa

SEQ ID NO: 2576338 - RNA, 19 nt, Artificial Sequence
  Description of Artificial Sequence: Synthetic oligonucleotide
cggagaucauagagaccaa

SEQ ID NO: 2576339 - RNA, 19 nt, Artificial Sequence
  Description of Artificial Sequence: Synthetic oligonucleotide
ccucagcugaaggguacuu

SEQ ID NO: 2576340 - RNA, 19 nt, Artificial Sequence
  Description of Artificial Sequence: Synthetic oligonucleotide
cuaucuuaaguacugaccc

SEQ ID NO: 2576341 - RNA, 19 nt, Artificial Sequence
  Description of Artificial Sequence: Synthetic oligonucleotide
uuugcauuuacaucuccgg

SEQ ID NO: 2576342 - RNA, 19 nt, Artificial Sequence
  Description of Artificial Sequence: Synthetic oligonucleotide
agcguuugcauuuacaucu

SEQ ID NO: 2576343 - RNA, 19 nt, Artificial Sequence
  Description of Artificial Sequence: Synthetic oligonucleotide
  modified_base (4)..(4): a, c, u, g, unknown or other
aacnccaguccaucugucc

SEQ ID NO: 2576344 - RNA, 19 nt, Artificial Sequence
  Description of Artificial Sequence: Synthetic oligonucleotide
uauaggagcgccacagugg

SEQ ID NO: 2576345 - RNA, 19 nt, Artificial Sequence
  Description of Artificial Sequence: Synthetic oligonucleotide
aagugauuccacgggaucc

SEQ ID NO: 2576346 - RNA, 19 nt, Artificial Sequence
  Description of Artificial Sequence: Synthetic oligonucleotide
uguagcuccaccuuggccu

SEQ ID NO: 2576347 - RNA, 19 nt, Artificial Sequence
  Description of Artificial Sequence: Synthetic oligonucleotide
acuaucuuaaguacugacc

SEQ ID NO: 2576348 - RNA, 19 nt, Artificial Sequence
  Description of Artificial Sequence: Synthetic oligonucleotide
aaagugauuccacgggauc

SEQ ID NO: 2576349 - RNA, 19 nt, Artificial Sequence
  Description of Artificial Sequence: Synthetic oligonucleotide
uggaaagugauuccacggg

SEQ ID NO: 2576350 - RNA, 19 nt, Artificial Sequence
  Description of Artificial Sequence: Synthetic oligonucleotide
  modified_base (13)..(13): a, c, u, g, unknown or other
uccacuacaaacnccaguc

SEQ ID NO: 2576351 - RNA, 19 nt, Artificial Sequence
  Description of Artificial Sequence: Synthetic oligonucleotide
uuaaguacugaccccaagu

SEQ ID NO: 2576352 - RNA, 19 nt, Artificial Sequence
  Description of Artificial Sequence: Synthetic oligonucleotide
aaccuuucaaucucugcag

SEQ ID NO: 2576353 - RNA, 19 nt, Artificial Sequence
  Description of Artificial Sequence: Synthetic oligonucleotide
auaggagcgccacaguggc

SEQ ID NO: 2576354 - RNA, 19 nt, Artificial Sequence
  Description of Artificial Sequence: Synthetic oligonucleotide
aaguacugaccccaaguag

SEQ ID NO: 2576355 - RNA, 19 nt, Artificial Sequence
  Description of Artificial Sequence: Synthetic oligonucleotide
acaccuuggaaagugauuc

SEQ ID NO: 2576356 - RNA, 19 nt, Artificial Sequence
  Description of Artificial Sequence: Synthetic oligonucleotide
acaucuccggucuugcagc

SEQ ID NO: 2576357 - RNA, 19 nt, Artificial Sequence
  Description of Artificial Sequence: Synthetic oligonucleotide
cuuggaaagugauuccacg

SEQ ID NO: 2576358 - RNA, 19 nt, Artificial Sequence
  Description of Artificial Sequence: Synthetic oligonucleotide
ugcagaguccacuacaaac

SEQ ID NO: 2576359 - RNA, 19 nt, Artificial Sequence
  Description of Artificial Sequence: Synthetic oligonucleotide
aguacugaccccaaguagg

SEQ ID NO: 2576360 - RNA, 19 nt, Artificial Sequence
  Description of Artificial Sequence: Synthetic oligonucleotide
acugaccccaaguagguag

SEQ ID NO: 2576361 - RNA, 19 nt, Artificial Sequence
  Description of Artificial Sequence: Synthetic oligonucleotide
uugucugaggccuugcuga

SEQ ID NO: 2576362 - RNA, 19 nt, Artificial Sequence
  Description of Artificial Sequence: Synthetic oligonucleotide
uccucuaaccuuucaaucu

SEQ ID NO: 2576363 - RNA, 19 nt, Artificial Sequence
  Description of Artificial Sequence: Synthetic oligonucleotide
  modified_base (7)..(7): a, c, u, g, unknown or other
acaaacnccaguccaucug

SEQ ID NO: 2576364 - RNA, 19 nt, Artificial Sequence
  Description of Artificial Sequence: Synthetic oligonucleotide
  modified_base (3)..(3): a, c, u, g, unknown or other
acnccaguccaucuguccg

SEQ ID NO: 2576365 - RNA, 19 nt, Artificial Sequence
  Description of Artificial Sequence: Synthetic oligonucleotide
agaaccagggucgagguag

SEQ ID NO: 2576366 - RNA, 19 nt, Artificial Sequence
  Description of Artificial Sequence: Synthetic oligonucleotide
ucagcguuugcauuuacau

SEQ ID NO: 2576367 - RNA, 19 nt, Artificial Sequence
  Description of Artificial Sequence: Synthetic oligonucleotide
cagacuaucuuaaguacug

SEQ ID NO: 2576368 - RNA, 19 nt, Artificial Sequence
  Description of Artificial Sequence: Synthetic oligonucleotide
ugcauuuacaucuccgguc

SEQ ID NO: 2576369 - RNA, 19 nt, Artificial Sequence
  Description of Artificial Sequence: Synthetic oligonucleotide
agacacuucaucuccccuc

SEQ ID NO: 2576370 - RNA, 19 nt, Artificial Sequence
  Description of Artificial Sequence: Synthetic oligonucleotide
agguccagcacccaggcug

SEQ ID NO: 2576371 - RNA, 19 nt, Artificial Sequence
  Description of Artificial Sequence: Synthetic oligonucleotide
  modified_base (16)..(16): a, c, u, g, unknown or other
gaguccacuacaaacncca

SEQ ID NO: 2576372 - RNA, 19 nt, Artificial Sequence
  Description of Artificial Sequence: Synthetic oligonucleotide
ugcacaugggugagggugg

SEQ ID NO: 2576373 - RNA, 19 nt, Artificial Sequence
  Description of Artificial Sequence: Synthetic oligonucleotide
uaucuuaaguacugacccc

SEQ ID NO: 2576374 - RNA, 19 nt, Artificial Sequence
  Description of Artificial Sequence: Synthetic oligonucleotide
uaaguacugaccccaagua

SEQ ID NO: 2576375 - RNA, 19 nt, Artificial Sequence
  Description of Artificial Sequence: Synthetic oligonucleotide
gacuaucuuaaguacugac

SEQ ID NO: 2576376 - RNA, 19 nt, Artificial Sequence
  Description of Artificial Sequence: Synthetic oligonucleotide
uucaguccuuuugaggugg

SEQ ID NO: 2576377 - RNA, 19 nt, Artificial Sequence
  Description of Artificial Sequence: Synthetic oligonucleotide
gaggugaagagcugagaag

SEQ ID NO: 2576378 - RNA, 19 nt, Artificial Sequence
  Description of Artificial Sequence: Synthetic oligonucleotide
guuugcauuuacaucuccg

SEQ ID NO: 2576379 - RNA, 19 nt, Artificial Sequence
  Description of Artificial Sequence: Synthetic oligonucleotide
agugauuccacgggauccc

SEQ ID NO: 2576380 - RNA, 19 nt, Artificial Sequence
  Description of Artificial Sequence: Synthetic oligonucleotide
cuaaccuuucaaucucugc

SEQ ID NO: 2576381 - RNA, 19 nt, Artificial Sequence
  Description of Artificial Sequence: Synthetic oligonucleotide
caucccacaccuuggaaag

SEQ ID NO: 2576382 - RNA, 19 nt, Artificial Sequence
  Description of Artificial Sequence: Synthetic oligonucleotide
guauaggagcgccacagug

SEQ ID NO: 2576383 - RNA, 19 nt, Artificial Sequence
  Description of Artificial Sequence: Synthetic oligonucleotide
uugcacaugggugagggug

SEQ ID NO: 2576384 - RNA, 19 nt, Artificial Sequence
  Description of Artificial Sequence: Synthetic oligonucleotide
gacacuucaucuccccucc

SEQ ID NO: 2576385 - RNA, 19 nt, Artificial Sequence
  Description of Artificial Sequence: Synthetic oligonucleotide
uugcauuuacaucuccggu

SEQ ID NO: 2576386 - RNA, 19 nt, Artificial Sequence
  Description of Artificial Sequence: Synthetic oligonucleotide
ucuucuugcuugcccgagg

SEQ ID NO: 2576387 - RNA, 19 nt, Artificial Sequence
  Description of Artificial Sequence: Synthetic oligonucleotide
cauacaggcgcuccagucc

SEQ ID NO: 2576388 - RNA, 19 nt, Artificial Sequence
  Description of Artificial Sequence: Synthetic oligonucleotide
agcacugcaggcuugcaca

SEQ ID NO: 2576389 - RNA, 19 nt, Artificial Sequence
  Description of Artificial Sequence: Synthetic oligonucleotide
gcugauucgguguagcucc

SEQ ID NO: 2576390 - RNA, 19 nt, Artificial Sequence
  Description of Artificial Sequence: Synthetic oligonucleotide
gaagacacuucaucucccc

SEQ ID NO: 2576391 - RNA, 19 nt, Artificial Sequence
  Description of Artificial Sequence: Synthetic oligonucleotide
ucuagaggugaagagcuga

SEQ ID NO: 2576392 - RNA, 19 nt, Artificial Sequence
  Description of Artificial Sequence: Synthetic oligonucleotide
uguccggcggguauaggag

SEQ ID NO: 2576393 - RNA, 19 nt, Artificial Sequence
  Description of Artificial Sequence: Synthetic oligonucleotide
ucgagguagagucagcguu

SEQ ID NO: 2576394 - RNA, 19 nt, Artificial Sequence
  Description of Artificial Sequence: Synthetic oligonucleotide
uuuacaucuccggucuugc

SEQ ID NO: 2576395 - RNA, 19 nt, Artificial Sequence
  Description of Artificial Sequence: Synthetic oligonucleotide
cuugguggggacacucugg

SEQ ID NO: 2576396 - RNA, 19 nt, Artificial Sequence
  Description of Artificial Sequence: Synthetic oligonucleotide
uguggcaccgaaacaggac

SEQ ID NO: 2576397 - RNA, 19 nt, Artificial Sequence
  Description of Artificial Sequence: Synthetic oligonucleotide
accucggcugcacugcccc

SEQ ID NO: 2576398 - RNA, 19 nt, Artificial Sequence
  Description of Artificial Sequence: Synthetic oligonucleotide
gauucgguguagcuccacc

SEQ ID NO: 2576399 - RNA, 19 nt, Artificial Sequence
  Description of Artificial Sequence: Synthetic oligonucleotide
guggcaccgaaacaggacc

SEQ ID NO: 2576400 - RNA, 19 nt, Artificial Sequence
  Description of Artificial Sequence: Synthetic oligonucleotide
aagacacuucaucuccccu

SEQ ID NO: 2576401 - RNA, 19 nt, Artificial Sequence
  Description of Artificial Sequence: Synthetic oligonucleotide
agaagacacuucaucuccc

SEQ ID NO: 2576402 - RNA, 19 nt, Artificial Sequence
  Description of Artificial Sequence: Synthetic oligonucleotide
cauguggcaccgaaacagg

SEQ ID NO: 2576403 - RNA, 19 nt, Artificial Sequence
  Description of Artificial Sequence: Synthetic oligonucleotide
ucuccggucuugcagcccc

SEQ ID NO: 2576404 - RNA, 19 nt, Artificial Sequence
  Description of Artificial Sequence: Synthetic oligonucleotide
aucuuaaguacugacccca

SEQ ID NO: 2576405 - RNA, 19 nt, Artificial Sequence
  Description of Artificial Sequence: Synthetic oligonucleotide
uccggcggguauaggagcg

SEQ ID NO: 2576406 - RNA, 19 nt, Artificial Sequence
  Description of Artificial Sequence: Synthetic oligonucleotide
  modified_base (17)..(17): a, c, u, g, unknown or other
agaguccacuacaaacncc

SEQ ID NO: 2576407 - RNA, 19 nt, Artificial Sequence
  Description of Artificial Sequence: Synthetic oligonucleotide
  modified_base (8)..(8): a, c, u, g, unknown or other
uacaaacnccaguccaucu

SEQ ID NO: 2576408 - RNA, 19 nt, Artificial Sequence
  Description of Artificial Sequence: Synthetic oligonucleotide
gagcugagaagacacuuca

SEQ ID NO: 2576409 - RNA, 19 nt, Artificial Sequence
  Description of Artificial Sequence: Synthetic oligonucleotide
cuuaaguacugaccccaag

SEQ ID NO: 2576410 - RNA, 19 nt, Artificial Sequence
  Description of Artificial Sequence: Synthetic oligonucleotide
agagucagcguuugcauuu

SEQ ID NO: 2576411 - RNA, 19 nt, Artificial Sequence
  Description of Artificial Sequence: Synthetic oligonucleotide
aguccaucuguccggcggg

SEQ ID NO: 2576412 - RNA, 19 nt, Artificial Sequence
  Description of Artificial Sequence: Synthetic oligonucleotide
guugucugaggccuugcug

SEQ ID NO: 2576413 - RNA, 19 nt, Artificial Sequence
  Description of Artificial Sequence: Synthetic oligonucleotide
cuccucuaaccuuucaauc

SEQ ID NO: 2576414 - RNA, 19 nt, Artificial Sequence
  Description of Artificial Sequence: Synthetic oligonucleotide
auucgguguagcuccaccu

SEQ ID NO: 2576415 - RNA, 19 nt, Artificial Sequence
  Description of Artificial Sequence: Synthetic oligonucleotide
auuuacaucuccggucuug

SEQ ID NO: 2576416 - RNA, 19 nt, Artificial Sequence
  Description of Artificial Sequence: Synthetic oligonucleotide
ucuugcagccccuacccuc

SEQ ID NO: 2576417 - RNA, 19 nt, Artificial Sequence
  Description of Artificial Sequence: Synthetic oligonucleotide
  modified_base (10)..(10): a, c, u, g, unknown or other
acuacaaacnccaguccau

SEQ ID NO: 2576418 - RNA, 19 nt, Artificial Sequence
  Description of Artificial Sequence: Synthetic oligonucleotide
agagcugagaagacacuuc

SEQ ID NO: 2576419 - RNA, 19 nt, Artificial Sequence
  Description of Artificial Sequence: Synthetic oligonucleotide
auacaggcgcuccaguccu

SEQ ID NO: 2576420 - RNA, 19 nt, Artificial Sequence
  Description of Artificial Sequence: Synthetic oligonucleotide
  modified_base (5)..(5): a, c, u, g, unknown or other
aaacnccaguccaucuguc

SEQ ID NO: 2576421 - RNA, 19 nt, Artificial Sequence
  Description of Artificial Sequence: Synthetic oligonucleotide
ugaggccuugcugauucgg

SEQ ID NO: 2576422 - RNA, 19 nt, Artificial Sequence
  Description of Artificial Sequence: Synthetic oligonucleotide
  modified_base (11)..(11): a, c, u, g, unknown or other
cacuacaaacnccagucca

SEQ ID NO: 2576423 - RNA, 19 nt, Artificial Sequence
  Description of Artificial Sequence: Synthetic oligonucleotide
agccccuacccucuagagg

SEQ ID NO: 2576424 - RNA, 19 nt, Artificial Sequence
  Description of Artificial Sequence: Synthetic oligonucleotide
cuugcuugcccgaggugcc

SEQ ID NO: 2576425 - RNA, 19 nt, Artificial Sequence
  Description of Artificial Sequence: Synthetic oligonucleotide
acucggaucuucucagugu

SEQ ID NO: 2576426 - RNA, 19 nt, Artificial Sequence
  Description of Artificial Sequence: Synthetic oligonucleotide
ucuuaaguacugaccccaa

SEQ ID NO: 2576427 - RNA, 19 nt, Artificial Sequence
  Description of Artificial Sequence: Synthetic oligonucleotide
acccucuagaggugaagag

SEQ ID NO: 2576428 - RNA, 19 nt, Artificial Sequence
  Description of Artificial Sequence: Synthetic oligonucleotide
  modified_base (2)..(2): a, c, u, g, unknown or other
cnccaguccaucuguccgg

SEQ ID NO: 2576429 - RNA, 19 nt, Artificial Sequence
  Description of Artificial Sequence: Synthetic oligonucleotide
cugagaagacacuucaucu

SEQ ID NO: 2576430 - RNA, 19 nt, Artificial Sequence
  Description of Artificial Sequence: Synthetic oligonucleotide
cuugcugauucgguguagc

SEQ ID NO: 2576431 - RNA, 19 nt, Artificial Sequence
  Description of Artificial Sequence: Synthetic oligonucleotide
uacccucuagaggugaaga

SEQ ID NO: 2576432 - RNA, 19 nt, Artificial Sequence
  Description of Artificial Sequence: Synthetic oligonucleotide
cuucaguccuuuugaggug

SEQ ID NO: 2576433 - RNA, 19 nt, Artificial Sequence
  Description of Artificial Sequence: Synthetic oligonucleotide
caccuuggaaagugauucc

SEQ ID NO: 2576434 - RNA, 19 nt, Artificial Sequence
  Description of Artificial Sequence: Synthetic oligonucleotide
accccaaguagguagggua

SEQ ID NO: 2576435 - RNA, 19 nt, Artificial Sequence
  Description of Artificial Sequence: Synthetic oligonucleotide
ugcugauucgguguagcuc

SEQ ID NO: 2576436 - RNA, 19 nt, Artificial Sequence
  Description of Artificial Sequence: Synthetic oligonucleotide
ggucuugcagccccuaccc

SEQ ID NO: 2576437 - RNA, 19 nt, Artificial Sequence
  Description of Artificial Sequence: Synthetic oligonucleotide
agucagcguuugcauuuac

SEQ ID NO: 2576438 - RNA, 19 nt, Artificial Sequence
  Description of Artificial Sequence: Synthetic oligonucleotide
ccagggucgagguagaguc

SEQ ID NO: 2576439 - RNA, 19 nt, Artificial Sequence
  Description of Artificial Sequence: Synthetic oligonucleotide
guugaagcccuuggugggg

SEQ ID NO: 2576440 - RNA, 19 nt, Artificial Sequence
  Description of Artificial Sequence: Synthetic oligonucleotide
cagcguuugcauuuacauc

SEQ ID NO: 2576441 - RNA, 19 nt, Artificial Sequence
  Description of Artificial Sequence: Synthetic oligonucleotide
cacucggaucuucucagug

SEQ ID NO: 2576442 - RNA, 19 nt, Artificial Sequence
  Description of Artificial Sequence: Synthetic oligonucleotide
acacuucaucuccccuccc

SEQ ID NO: 2576443 - RNA, 19 nt, Artificial Sequence
  Description of Artificial Sequence: Synthetic oligonucleotide
ccauguggcaccgaaacag

SEQ ID NO: 2576444 - RNA, 19 nt, Artificial Sequence
  Description of Artificial Sequence: Synthetic oligonucleotide
gguggacagguccagcacc

SEQ ID NO: 2576445 - RNA, 19 nt, Artificial Sequence
  Description of Artificial Sequence: Synthetic oligonucleotide
  modified_base (9)..(9): a, c, u, g, unknown or other
cuacaaacnccaguccauc

SEQ ID NO: 2576446 - RNA, 19 nt, Artificial Sequence
  Description of Artificial Sequence: Synthetic oligonucleotide
aucucauacaggcgcucca

SEQ ID NO: 2576447 - RNA, 19 nt, Artificial Sequence
  Description of Artificial Sequence: Synthetic oligonucleotide
agggucgagguagagucag

SEQ ID NO: 2576448 - RNA, 19 nt, Artificial Sequence
  Description of Artificial Sequence: Synthetic oligonucleotide
aggccuugcugauucggug

SEQ ID NO: 2576449 - RNA, 19 nt, Artificial Sequence
  Description of Artificial Sequence: Synthetic oligonucleotide
ggucgagguagagucagcg

SEQ ID NO: 2576450 - RNA, 19 nt, Artificial Sequence
  Description of Artificial Sequence: Synthetic oligonucleotide
uugcugauucgguguagcu

SEQ ID NO: 2576451 - RNA, 19 nt, Artificial Sequence
  Description of Artificial Sequence: Synthetic oligonucleotide
uucgguguagcuccaccuu

SEQ ID NO: 2576452 - RNA, 19 nt, Artificial Sequence
  Description of Artificial Sequence: Synthetic oligonucleotide
caccgucucuucuugcuug

SEQ ID NO: 2576453 - RNA, 19 nt, Artificial Sequence
  Description of Artificial Sequence: Synthetic oligonucleotide
ucucugcagaguccacuac

SEQ ID NO: 2576454 - RNA, 19 nt, Artificial Sequence
  Description of Artificial Sequence: Synthetic oligonucleotide
agcucccggacugccagcc

SEQ ID NO: 2576455 - RNA, 19 nt, Artificial Sequence
  Description of Artificial Sequence: Synthetic oligonucleotide
ggcacucggaucuucucag

SEQ ID NO: 2576456 - RNA, 19 nt, Artificial Sequence
  Description of Artificial Sequence: Synthetic oligonucleotide
gcuugcacaugggugaggg

SEQ ID NO: 2576457 - RNA, 19 nt, Artificial Sequence
  Description of Artificial Sequence: Synthetic oligonucleotide
caucucauacaggcgcucc

SEQ ID NO: 2576458 - RNA, 19 nt, Artificial Sequence
  Description of Artificial Sequence: Synthetic oligonucleotide
ggguauaggagcgccacag

SEQ ID NO: 2576459 - RNA, 19 nt, Artificial Sequence
  Description of Artificial Sequence: Synthetic oligonucleotide
uagagucagcguuugcauu

SEQ ID NO: 2576460 - RNA, 19 nt, Artificial Sequence
  Description of Artificial Sequence: Synthetic oligonucleotide
uucuugcuugcccgaggug

SEQ ID NO: 2576461 - RNA, 19 nt, Artificial Sequence
  Description of Artificial Sequence: Synthetic oligonucleotide
agggcacucggaucuucuc

SEQ ID NO: 2576462 - RNA, 19 nt, Artificial Sequence
  Description of Artificial Sequence: Synthetic oligonucleotide
gccagacuaucuuaaguac

SEQ ID NO: 2576463 - RNA, 19 nt, Artificial Sequence
  Description of Artificial Sequence: Synthetic oligonucleotide
gagguagagucagcguuug

SEQ ID NO: 2576464 - RNA, 19 nt, Artificial Sequence
  Description of Artificial Sequence: Synthetic oligonucleotide
ggcuccuucaguccuuuug

SEQ ID NO: 2576465 - RNA, 19 nt, Artificial Sequence
  Description of Artificial Sequence: Synthetic oligonucleotide
caugggugaggguggcagc

SEQ ID NO: 2576466 - RNA, 19 nt, Artificial Sequence
  Description of Artificial Sequence: Synthetic oligonucleotide
gugaagagcugagaagaca

SEQ ID NO: 2576467 - RNA, 19 nt, Artificial Sequence
  Description of Artificial Sequence: Synthetic oligonucleotide
caucuccggucuugcagcc

SEQ ID NO: 2576468 - RNA, 19 nt, Artificial Sequence
  Description of Artificial Sequence: Synthetic oligonucleotide
ucgggucaccgucucuucu

SEQ ID NO: 2576469 - RNA, 19 nt, Artificial Sequence
  Description of Artificial Sequence: Synthetic oligonucleotide
agacuaucuuaaguacuga

SEQ ID NO: 2576470 - RNA, 19 nt, Artificial Sequence
  Description of Artificial Sequence: Synthetic oligonucleotide
cucuagaggugaagagcug

SEQ ID NO: 2576471 - RNA, 19 nt, Artificial Sequence
  Description of Artificial Sequence: Synthetic oligonucleotide
uguuggccagcaccagcac

SEQ ID NO: 2576472 - RNA, 19 nt, Artificial Sequence
  Description of Artificial Sequence: Synthetic oligonucleotide
ccucuugagaaucaucuca

SEQ ID NO: 2576473 - RNA, 19 nt, Artificial Sequence
  Description of Artificial Sequence: Synthetic oligonucleotide
  modified_base (14)..(14): a, c, u, g, unknown or other
guccacuacaaacnccagu

SEQ ID NO: 2576474 - RNA, 19 nt, Artificial Sequence
  Description of Artificial Sequence: Synthetic oligonucleotide
cuguccggcggguauagga

SEQ ID NO: 2576475 - RNA, 19 nt, Artificial Sequence
  Description of Artificial Sequence: Synthetic oligonucleotide
ucaguccuuuugaggugga

SEQ ID NO: 2576476 - RNA, 19 nt, Artificial Sequence
  Description of Artificial Sequence: Synthetic oligonucleotide
ccguccacagcacugcagg

SEQ ID NO: 2576477 - RNA, 19 nt, Artificial Sequence
  Description of Artificial Sequence: Synthetic oligonucleotide
ugcagccccuacccucuag

SEQ ID NO: 2576478 - RNA, 19 nt, Artificial Sequence
  Description of Artificial Sequence: Synthetic oligonucleotide
aagggcacucggaucuucu

SEQ ID NO: 2576479 - RNA, 19 nt, Artificial Sequence
  Description of Artificial Sequence: Synthetic oligonucleotide
  modified_base (6)..(6): a, c, u, g, unknown or other
caaacnccaguccaucugu

SEQ ID NO: 2576480 - RNA, 19 nt, Artificial Sequence
  Description of Artificial Sequence: Synthetic oligonucleotide
gcauuuacaucuccggucu

SEQ ID NO: 2576481 - RNA, 19 nt, Artificial Sequence
  Description of Artificial Sequence: Synthetic oligonucleotide
ugucugaggccuugcugau

SEQ ID NO: 2576482 - RNA, 19 nt, Artificial Sequence
  Description of Artificial Sequence: Synthetic oligonucleotide
guccggcggguauaggagc

SEQ ID NO: 2576483 - RNA, 19 nt, Artificial Sequence
  Description of Artificial Sequence: Synthetic oligonucleotide
ugcccgaggugccuucuuc

SEQ ID NO: 2576484 - RNA, 19 nt, Artificial Sequence
  Description of Artificial Sequence: Synthetic oligonucleotide
ccuucaguccuuuugaggu

SEQ ID NO: 2576485 - RNA, 19 nt, Artificial Sequence
  Description of Artificial Sequence: Synthetic oligonucleotide
guggggacacucuggacaa

SEQ ID NO: 2576486 - RNA, 19 nt, Artificial Sequence
  Description of Artificial Sequence: Synthetic oligonucleotide
ccucuaaccuuucaaucuc

SEQ ID NO: 2576487 - RNA, 19 nt, Artificial Sequence
  Description of Artificial Sequence: Synthetic oligonucleotide
gaaagugauuccacgggau

SEQ ID NO: 2576488 - RNA, 19 nt, Artificial Sequence
  Description of Artificial Sequence: Synthetic oligonucleotide
aucuccggucuugcagccc

SEQ ID NO: 2576489 - RNA, 19 nt, Artificial Sequence
  Description of Artificial Sequence: Synthetic oligonucleotide
cagccccuacccucuagag

SEQ ID NO: 2576490 - RNA, 19 nt, Artificial Sequence
  Description of Artificial Sequence: Synthetic oligonucleotide
cuacccucuagaggugaag

SEQ ID NO: 2576491 - RNA, 19 nt, Artificial Sequence
  Description of Artificial Sequence: Synthetic oligonucleotide
cccucuagaggugaagagc

SEQ ID NO: 2576492 - RNA, 19 nt, Artificial Sequence
  Description of Artificial Sequence: Synthetic oligonucleotide
ggacagguccagcacccag

SEQ ID NO: 2576493 - RNA, 19 nt, Artificial Sequence
  Description of Artificial Sequence: Synthetic oligonucleotide
cuccaccucggcugcacug

SEQ ID NO: 2576494 - RNA, 19 nt, Artificial Sequence
  Description of Artificial Sequence: Synthetic oligonucleotide
  modified_base (12)..(12): a, c, u, g, unknown or other
ccacuacaaacnccagucc

SEQ ID NO: 2576495 - RNA, 19 nt, Artificial Sequence
  Description of Artificial Sequence: Synthetic oligonucleotide
ucccggacugccagccucu

SEQ ID NO: 2576496 - RNA, 19 nt, Artificial Sequence
  Description of Artificial Sequence: Synthetic oligonucleotide
aaccagggucgagguagag

SEQ ID NO: 2576497 - RNA, 19 nt, Artificial Sequence
  Description of Artificial Sequence: Synthetic oligonucleotide
ucuccaccucggcugcacu

SEQ ID NO: 2576498 - RNA, 19 nt, Artificial Sequence
  Description of Artificial Sequence: Synthetic oligonucleotide
cucuucuugcuugcccgag

SEQ ID NO: 2576499 - RNA, 19 nt, Artificial Sequence
  Description of Artificial Sequence: Synthetic oligonucleotide
cugaggccuugcugauucg

SEQ ID NO: 2576500 - RNA, 19 nt, Artificial Sequence
  Description of Artificial Sequence: Synthetic oligonucleotide
ccccauguggcaccgaaac

SEQ ID NO: 2576501 - RNA, 19 nt, Artificial Sequence
  Description of Artificial Sequence: Synthetic oligonucleotide
aucuguccggcggguauag

SEQ ID NO: 2576502 - RNA, 19 nt, Artificial Sequence
  Description of Artificial Sequence: Synthetic oligonucleotide
caacaucccacaccuugga

SEQ ID NO: 2576503 - RNA, 19 nt, Artificial Sequence
  Description of Artificial Sequence: Synthetic oligonucleotide
gccccuacccucuagaggu

SEQ ID NO: 2576504 - RNA, 19 nt, Artificial Sequence
  Description of Artificial Sequence: Synthetic oligonucleotide
accagggucgagguagagu

SEQ ID NO: 2576505 - RNA, 19 nt, Artificial Sequence
  Description of Artificial Sequence: Synthetic oligonucleotide
cugcaggcuugcacauggg

SEQ ID NO: 2576506 - RNA, 19 nt, Artificial Sequence
  Description of Artificial Sequence: Synthetic oligonucleotide
cagcccguccacagcacug

SEQ ID NO: 2576507 - RNA, 19 nt, Artificial Sequence
  Description of Artificial Sequence: Synthetic oligonucleotide
gucagcguuugcauuuaca

SEQ ID NO: 2576508 - RNA, 19 nt, Artificial Sequence
  Description of Artificial Sequence: Synthetic oligonucleotide
ccaaguagguaggguaggg

SEQ ID NO: 2576509 - RNA, 19 nt, Artificial Sequence
  Description of Artificial Sequence: Synthetic oligonucleotide
  modified_base (15)..(15): a, c, u, g, unknown or other
aguccacuacaaacnccag

SEQ ID NO: 2576510 - RNA, 19 nt, Artificial Sequence
  Description of Artificial Sequence: Synthetic oligonucleotide
auguggcaccgaaacagga

SEQ ID NO: 2576511 - RNA, 19 nt, Artificial Sequence
  Description of Artificial Sequence: Synthetic oligonucleotide
ucuguccggcggguauagg

SEQ ID NO: 2576512 - RNA, 19 nt, Artificial Sequence
  Description of Artificial Sequence: Synthetic oligonucleotide
caggcuggcugagagguca

SEQ ID NO: 2576513 - RNA, 19 nt, Artificial Sequence
  Description of Artificial Sequence: Synthetic oligonucleotide
uacaggcgcuccaguccug

SEQ ID NO: 2576514 - RNA, 19 nt, Artificial Sequence
  Description of Artificial Sequence: Synthetic oligonucleotide
ugauucgguguagcuccac

SEQ ID NO: 2576515 - RNA, 19 nt, Artificial Sequence
  Description of Artificial Sequence: Synthetic oligonucleotide
gugauuccacgggaucccc

SEQ ID NO: 2576516 - RNA, 19 nt, Artificial Sequence
  Description of Artificial Sequence: Synthetic oligonucleotide
cugccagacuaucuuaagu

SEQ ID NO: 2576517 - RNA, 19 nt, Artificial Sequence
  Description of Artificial Sequence: Synthetic oligonucleotide
  modified_base (7)..(7): a, c, u, g, unknown or other
ccccggnugguccugcuug

SEQ ID NO: 2576518 - RNA, 19 nt, Artificial Sequence
  Description of Artificial Sequence: Synthetic oligonucleotide
cugguugucugaggccuug

SEQ ID NO: 2576519 - RNA, 19 nt, Artificial Sequence
  Description of Artificial Sequence: Synthetic oligonucleotide
gaagcccuugguggggaca

SEQ ID NO: 2576520 - RNA, 19 nt, Artificial Sequence
  Description of Artificial Sequence: Synthetic oligonucleotide
cucuaaccuuucaaucucu

SEQ ID NO: 2576521 - RNA, 19 nt, Artificial Sequence
  Description of Artificial Sequence: Synthetic oligonucleotide
ccuggcugcaggcccagcc

SEQ ID NO: 2576522 - RNA, 19 nt, Artificial Sequence
  Description of Artificial Sequence: Synthetic oligonucleotide
cuugcagccccuacccucu

SEQ ID NO: 2576523 - RNA, 19 nt, Artificial Sequence
  Description of Artificial Sequence: Synthetic oligonucleotide
ccucuagaggugaagagcu

SEQ ID NO: 2576524 - RNA, 19 nt, Artificial Sequence
  Description of Artificial Sequence: Synthetic oligonucleotide
agcgccacaguggccgcag

SEQ ID NO: 2576525 - RNA, 19 nt, Artificial Sequence
  Description of Artificial Sequence: Synthetic oligonucleotide
cucgggucaccgucucuuc

SEQ ID NO: 2576526 - RNA, 19 nt, Artificial Sequence
  Description of Artificial Sequence: Synthetic oligonucleotide
ggggacacucuggacaaac

SEQ ID NO: 2576527 - RNA, 19 nt, Artificial Sequence
  Description of Artificial Sequence: Synthetic oligonucleotide
ggucaccgucucuucuugc

SEQ ID NO: 2576528 - RNA, 19 nt, Artificial Sequence
  Description of Artificial Sequence: Synthetic oligonucleotide
cccaaguagguaggguagg

SEQ ID NO: 2576529 - RNA, 19 nt, Artificial Sequence
  Description of Artificial Sequence: Synthetic oligonucleotide
ccuugguggggacacucug

SEQ ID NO: 2576530 - RNA, 19 nt, Artificial Sequence
  Description of Artificial Sequence: Synthetic oligonucleotide
ugccagcucccggacugcc

SEQ ID NO: 2576531 - RNA, 19 nt, Artificial Sequence
  Description of Artificial Sequence: Synthetic oligonucleotide
gcccgaggugccuucuucc

SEQ ID NO: 2576532 - RNA, 19 nt, Artificial Sequence
  Description of Artificial Sequence: Synthetic oligonucleotide
guacugaccccaaguaggu

SEQ ID NO: 2576533 - RNA, 19 nt, Artificial Sequence
  Description of Artificial Sequence: Synthetic oligonucleotide
gagaaccagggucgaggua

SEQ ID NO: 2576534 - RNA, 19 nt, Artificial Sequence
  Description of Artificial Sequence: Synthetic oligonucleotide
gucgagguagagucagcgu

SEQ ID NO: 2576535 - RNA, 19 nt, Artificial Sequence
  Description of Artificial Sequence: Synthetic oligonucleotide
ggcaccgaaacaggacccc

SEQ ID NO: 2576536 - RNA, 19 nt, Artificial Sequence
  Description of Artificial Sequence: Synthetic oligonucleotide
uacugaccccaaguaggua

SEQ ID NO: 2576537 - RNA, 19 nt, Artificial Sequence
  Description of Artificial Sequence: Synthetic oligonucleotide
gaaccagggucgagguaga

SEQ ID NO: 2576538 - RNA, 19 nt, Artificial Sequence
  Description of Artificial Sequence: Synthetic oligonucleotide
ccagacuaucuuaaguacu

SEQ ID NO: 2576539 - RNA, 19 nt, Artificial Sequence
  Description of Artificial Sequence: Synthetic oligonucleotide
cguuugcauuuacaucucc

SEQ ID NO: 2576540 - RNA, 19 nt, Artificial Sequence
  Description of Artificial Sequence: Synthetic oligonucleotide
gugaggguggcagcugcca

SEQ ID NO: 2576541 - RNA, 19 nt, Artificial Sequence
  Description of Artificial Sequence: Synthetic oligonucleotide
ggagaaccagggucgaggu

SEQ ID NO: 2576542 - RNA, 19 nt, Artificial Sequence
  Description of Artificial Sequence: Synthetic oligonucleotide
caguccuuuugagguggac

SEQ ID NO: 2576543 - RNA, 19 nt, Artificial Sequence
  Description of Artificial Sequence: Synthetic oligonucleotide
cugauucgguguagcucca

SEQ ID NO: 2576544 - RNA, 19 nt, Artificial Sequence
  Description of Artificial Sequence: Synthetic oligonucleotide
gccuccucuaaccuuucaa

SEQ ID NO: 2576545 - RNA, 19 nt, Artificial Sequence
  Description of Artificial Sequence: Synthetic oligonucleotide
caagggcacucggaucuuc

SEQ ID NO: 2576546 - RNA, 19 nt, Artificial Sequence
  Description of Artificial Sequence: Synthetic oligonucleotide
uugcuugcccgaggugccu

SEQ ID NO: 2576547 - RNA, 19 nt, Artificial Sequence
  Description of Artificial Sequence: Synthetic oligonucleotide
uggccuccucuaaccuuuc

SEQ ID NO: 2576548 - RNA, 19 nt, Artificial Sequence
  Description of Artificial Sequence: Synthetic oligonucleotide
cagggucgagguagaguca

SEQ ID NO: 2576549 - RNA, 19 nt, Artificial Sequence
  Description of Artificial Sequence: Synthetic oligonucleotide
gagucagcguuugcauuua

SEQ ID NO: 2576550 - RNA, 19 nt, Artificial Sequence
  Description of Artificial Sequence: Synthetic oligonucleotide
gcggguauaggagcgccac

SEQ ID NO: 2576551 - RNA, 19 nt, Artificial Sequence
  Description of Artificial Sequence: Synthetic oligonucleotide
cugcagaguccacuacaaa

SEQ ID NO: 2576552 - RNA, 19 nt, Artificial Sequence
  Description of Artificial Sequence: Synthetic oligonucleotide
cagcucccggacugccagc

SEQ ID NO: 2576553 - RNA, 19 nt, Artificial Sequence
  Description of Artificial Sequence: Synthetic oligonucleotide
ggaucuucucaguguugaa

SEQ ID NO: 2576554 - RNA, 19 nt, Artificial Sequence
  Description of Artificial Sequence: Synthetic oligonucleotide
uccaucuguccggcgggua

SEQ ID NO: 2576555 - RNA, 19 nt, Artificial Sequence
  Description of Artificial Sequence: Synthetic oligonucleotide
ggccuugcugauucggugu

SEQ ID NO: 2576556 - RNA, 19 nt, Artificial Sequence
  Description of Artificial Sequence: Synthetic oligonucleotide
cggucuugcagccccuacc

SEQ ID NO: 2576557 - RNA, 19 nt, Artificial Sequence
  Description of Artificial Sequence: Synthetic oligonucleotide
cccaagggcacucggaucu

SEQ ID NO: 2576558 - RNA, 19 nt, Artificial Sequence
  Description of Artificial Sequence: Synthetic oligonucleotide
ccacaguggccgcagcuuc

SEQ ID NO: 2576559 - RNA, 19 nt, Artificial Sequence
  Description of Artificial Sequence: Synthetic oligonucleotide
  modified_base (4)..(4): a, c, u, g, unknown or other
cggnugguccugcuuguug

SEQ ID NO: 2576560 - RNA, 19 nt, Artificial Sequence
  Description of Artificial Sequence: Synthetic oligonucleotide
gguauaggagcgccacagu

SEQ ID NO: 2576561 - RNA, 19 nt, Artificial Sequence
  Description of Artificial Sequence: Synthetic oligonucleotide
ggugaggguggcagcugcc

SEQ ID NO: 2576562 - RNA, 19 nt, Artificial Sequence
  Description of Artificial Sequence: Synthetic oligonucleotide
ccccugguugucugaggcc

SEQ ID NO: 2576563 - RNA, 19 nt, Artificial Sequence
  Description of Artificial Sequence: Synthetic oligonucleotide
cuuggccuccucuaaccuu

SEQ ID NO: 2576564 - RNA, 19 nt, Artificial Sequence
  Description of Artificial Sequence: Synthetic oligonucleotide
gaccccaaguagguagggu

SEQ ID NO: 2576565 - RNA, 19 nt, Artificial Sequence
  Description of Artificial Sequence: Synthetic oligonucleotide
ggcuugcacaugggugagg

SEQ ID NO: 2576566 - RNA, 19 nt, Artificial Sequence
  Description of Artificial Sequence: Synthetic oligonucleotide
cagcacccaggcuggcuga

SEQ ID NO: 2576567 - RNA, 19 nt, Artificial Sequence
  Description of Artificial Sequence: Synthetic oligonucleotide
uugcagccccuacccucua

SEQ ID NO: 2576568 - RNA, 19 nt, Artificial Sequence
  Description of Artificial Sequence: Synthetic oligonucleotide
ccaguccaucuguccggcg

SEQ ID NO: 2576569 - RNA, 19 nt, Artificial Sequence
  Description of Artificial Sequence: Synthetic oligonucleotide
ccuugcugauucgguguag

SEQ ID NO: 2576570 - RNA, 19 nt, Artificial Sequence
  Description of Artificial Sequence: Synthetic oligonucleotide
cugagaggucacaggcccu

SEQ ID NO: 2576571 - RNA, 19 nt, Artificial Sequence
  Description of Artificial Sequence: Synthetic oligonucleotide
ccuccucuaaccuuucaau

SEQ ID NO: 2576572 - RNA, 19 nt, Artificial Sequence
  Description of Artificial Sequence: Synthetic oligonucleotide
ggccgcagcuucuccugac

SEQ ID NO: 2576573 - RNA, 19 nt, Artificial Sequence
  Description of Artificial Sequence: Synthetic oligonucleotide
cuugcacaugggugagggu

SEQ ID NO: 2576574 - RNA, 19 nt, Artificial Sequence
  Description of Artificial Sequence: Synthetic oligonucleotide
ggacugccagccucuucuc

SEQ ID NO: 2576575 - RNA, 19 nt, Artificial Sequence
  Description of Artificial Sequence: Synthetic oligonucleotide
uccggucuugcagccccua

SEQ ID NO: 2576576 - RNA, 19 nt, Artificial Sequence
  Description of Artificial Sequence: Synthetic oligonucleotide
uggggacacucuggacaaa

SEQ ID NO: 2576577 - RNA, 19 nt, Artificial Sequence
  Description of Artificial Sequence: Synthetic oligonucleotide
cccugccagacuaucuuaa

SEQ ID NO: 2576578 - RNA, 19 nt, Artificial Sequence
  Description of Artificial Sequence: Synthetic oligonucleotide
ccaccucggcugcacugcc

SEQ ID NO: 2576579 - RNA, 19 nt, Artificial Sequence
  Description of Artificial Sequence: Synthetic oligonucleotide
ccccaagggcacucggauc

SEQ ID NO: 2576580 - RNA, 19 nt, Artificial Sequence
  Description of Artificial Sequence: Synthetic oligonucleotide
caucuguccggcggguaua

SEQ ID NO: 2576581 - RNA, 19 nt, Artificial Sequence
  Description of Artificial Sequence: Synthetic oligonucleotide
gccuugcugauucggugua

SEQ ID NO: 2576582 - RNA, 19 nt, Artificial Sequence
  Description of Artificial Sequence: Synthetic oligonucleotide
gggucgagguagagucagc

SEQ ID NO: 2576583 - RNA, 19 nt, Artificial Sequence
  Description of Artificial Sequence: Synthetic oligonucleotide
gcuugcccgaggugccuuc

SEQ ID NO: 2576584 - RNA, 19 nt, Artificial Sequence
  Description of Artificial Sequence: Synthetic oligonucleotide
cacaugggugaggguggca

SEQ ID NO: 2576585 - RNA, 19 nt, Artificial Sequence
  Description of Artificial Sequence: Synthetic oligonucleotide
gcccuugguggggacacuc

SEQ ID NO: 2576586 - RNA, 19 nt, Artificial Sequence
  Description of Artificial Sequence: Synthetic oligonucleotide
ggccuccucuaaccuuuca

SEQ ID NO: 2576587 - RNA, 19 nt, Artificial Sequence
  Description of Artificial Sequence: Synthetic oligonucleotide
ggcccugccagacuaucuu

SEQ ID NO: 2576588 - RNA, 19 nt, Artificial Sequence
  Description of Artificial Sequence: Synthetic oligonucleotide
ccggucuugcagccccuac

SEQ ID NO: 2576589 - RNA, 19 nt, Artificial Sequence
  Description of Artificial Sequence: Synthetic oligonucleotide
gggcagccucgggucaccg

SEQ ID NO: 2576590 - RNA, 19 nt, Artificial Sequence
  Description of Artificial Sequence: Synthetic oligonucleotide
cauuuacaucuccggucuu

SEQ ID NO: 2576591 - RNA, 19 nt, Artificial Sequence
  Description of Artificial Sequence: Synthetic oligonucleotide
ggcggguauaggagcgcca

SEQ ID NO: 2576592 - RNA, 19 nt, Artificial Sequence
  Description of Artificial Sequence: Synthetic oligonucleotide
ccuacccucuagaggugaa

SEQ ID NO: 2576593 - RNA, 19 nt, Artificial Sequence
  Description of Artificial Sequence: Synthetic oligonucleotide
guccagcacccaggcuggc

SEQ ID NO: 2576594 - RNA, 19 nt, Artificial Sequence
  Description of Artificial Sequence: Synthetic oligonucleotide
ccgucucuucuugcuugcc

SEQ ID NO: 2576595 - RNA, 19 nt, Artificial Sequence
  Description of Artificial Sequence: Synthetic oligonucleotide
cagccucgggucaccgucu

SEQ ID NO: 2576596 - RNA, 19 nt, Artificial Sequence
  Description of Artificial Sequence: Synthetic oligonucleotide
cccagcccguccacagcac

SEQ ID NO: 2576597 - RNA, 19 nt, Artificial Sequence
  Description of Artificial Sequence: Synthetic oligonucleotide
cccugguugucugaggccu

SEQ ID NO: 2576598 - RNA, 19 nt, Artificial Sequence
  Description of Artificial Sequence: Synthetic oligonucleotide
gcacucggaucuucucagu

SEQ ID NO: 2576599 - RNA, 19 nt, Artificial Sequence
  Description of Artificial Sequence: Synthetic oligonucleotide
cuugcccgaggugccuucu

SEQ ID NO: 2576600 - RNA, 19 nt, Artificial Sequence
  Description of Artificial Sequence: Synthetic oligonucleotide
gcccguccacagcacugca

SEQ ID NO: 2576601 - RNA, 19 nt, Artificial Sequence
  Description of Artificial Sequence: Synthetic oligonucleotide
cggcggguauaggagcgcc

SEQ ID NO: 2576602 - RNA, 19 nt, Artificial Sequence
  Description of Artificial Sequence: Synthetic oligonucleotide
cccuacccucuagagguga

SEQ ID NO: 2576603 - RNA, 19 nt, Artificial Sequence
  Description of Artificial Sequence: Synthetic oligonucleotide
ccggacugccagccucuuc

SEQ ID NO: 2576604 - RNA, 19 nt, Artificial Sequence
  Description of Artificial Sequence: Synthetic oligonucleotide
gcgccacaguggccgcagc

SEQ ID NO: 2576605 - RNA, 19 nt, Artificial Sequence
  Description of Artificial Sequence: Synthetic oligonucleotide
ccaucuguccggcggguau

SEQ ID NO: 2576606 - RNA, 19 nt, Artificial Sequence
  Description of Artificial Sequence: Synthetic oligonucleotide
cgagguagagucagcguuu

SEQ ID NO: 2576607 - RNA, 19 nt, Artificial Sequence
  Description of Artificial Sequence: Synthetic oligonucleotide
cccgaggugccuucuuccu

SEQ ID NO: 2576608 - RNA, 19 nt, Artificial Sequence
  Description of Artificial Sequence: Synthetic oligonucleotide
gucugaggccuugcugauu

SEQ ID NO: 2576609 - RNA, 19 nt, Artificial Sequence
  Description of Artificial Sequence: Synthetic oligonucleotide
cuccggucuugcagccccu

SEQ ID NO: 2576610 - RNA, 19 nt, Artificial Sequence
  Description of Artificial Sequence: Synthetic oligonucleotide
gcacccaggcuggcugaga

SEQ ID NO: 2576611 - RNA, 19 nt, Artificial Sequence
  Description of Artificial Sequence: Synthetic oligonucleotide
cggguauaggagcgccaca

SEQ ID NO: 2576612 - RNA, 19 nt, Artificial Sequence
  Description of Artificial Sequence: Synthetic oligonucleotide
  modified_base (6)..(6): a, c, u, g, unknown or other
cccggnugguccugcuugu

SEQ ID NO: 2576613 - RNA, 19 nt, Artificial Sequence
  Description of Artificial Sequence: Synthetic oligonucleotide
ccucgggucaccgucucuu

SEQ ID NO: 2576614 - RNA, 19 nt, Artificial Sequence
  Description of Artificial Sequence: Synthetic oligonucleotide
gcucccggacugccagccu

SEQ ID NO: 2576615 - RNA, 19 nt, Artificial Sequence
  Description of Artificial Sequence: Synthetic oligonucleotide
ccugguugucugaggccuu

SEQ ID NO: 2576616 - RNA, 19 nt, Artificial Sequence
  Description of Artificial Sequence: Synthetic oligonucleotide
cgggucaccgucucuucuu

SEQ ID NO: 2576617 - RNA, 19 nt, Artificial Sequence
  Description of Artificial Sequence: Synthetic oligonucleotide
ccaagggcacucggaucuu

SEQ ID NO: 2576618 - RNA, 19 nt, Artificial Sequence
  Description of Artificial Sequence: Synthetic oligonucleotide
  modified_base (5)..(5): a, c, u, g, unknown or other
ccggnugguccugcuuguu

SEQ ID NO: 2576619 - RNA, 19 nt, Artificial Sequence
  Description of Artificial Sequence: Synthetic oligonucleotide
ccccaacaucccacaccuu

SEQ ID NO: 2576620 - RNA, 19 nt, Artificial Sequence
  Description of Artificial Sequence: Synthetic oligonucleotide
cccggacugccagccucuu

SEQ ID NO: 2576621 - RNA, 19 nt, Artificial Sequence
  Description of Artificial Sequence: Synthetic oligonucleotide
  modified_base (1)..(1): a, c, u, g, unknown or other
nccaguccaucuguccggc

SEQ ID NO: 2576622 - RNA, 19 nt, Artificial Sequence
  Description of Artificial Sequence: Synthetic oligonucleotide
uacaucauaaaaucgaugg

SEQ ID NO: 2576623 - RNA, 19 nt, Artificial Sequence
  Description of Artificial Sequence: Synthetic oligonucleotide
aaaauuauuuccuacucug

SEQ ID NO: 2576624 - RNA, 19 nt, Artificial Sequence
  Description of Artificial Sequence: Synthetic oligonucleotide
aauccagccacuugguucc

SEQ ID NO: 2576625 - RNA, 19 nt, Artificial Sequence
  Description of Artificial Sequence: Synthetic oligonucleotide
aaguuacuuaucuaaauug

SEQ ID NO: 2576626 - RNA, 19 nt, Artificial Sequence
  Description of Artificial Sequence: Synthetic oligonucleotide
augauugucaguuaaagga

SEQ ID NO: 2576627 - RNA, 19 nt, Artificial Sequence
  Description of Artificial Sequence: Synthetic oligonucleotide
uauauuuuaauuugucuca

SEQ ID NO: 2576628 - RNA, 19 nt, Artificial Sequence
  Description of Artificial Sequence: Synthetic oligonucleotide
aguuaaaggaacaugaauc

SEQ ID NO: 2576629 - RNA, 19 nt, Artificial Sequence
  Description of Artificial Sequence: Synthetic oligonucleotide
caagucaccguauugaacg

SEQ ID NO: 2576630 - RNA, 19 nt, Artificial Sequence
  Description of Artificial Sequence: Synthetic oligonucleotide
uuauaguccgcauaaauac

SEQ ID NO: 2576631 - RNA, 19 nt, Artificial Sequence
  Description of Artificial Sequence: Synthetic oligonucleotide
uggauguucacuaaaugag

SEQ ID NO: 2576632 - RNA, 19 nt, Artificial Sequence
  Description of Artificial Sequence: Synthetic oligonucleotide
uguaucaugaaugugcgag

SEQ ID NO: 2576633 - RNA, 19 nt, Artificial Sequence
  Description of Artificial Sequence: Synthetic oligonucleotide
agauaauugacauaauacu

SEQ ID NO: 2576634 - RNA, 19 nt, Artificial Sequence
  Description of Artificial Sequence: Synthetic oligonucleotide
auaaaaucgaugguugugc

SEQ ID NO: 2576635 - RNA, 19 nt, Artificial Sequence
  Description of Artificial Sequence: Synthetic oligonucleotide
ugaacgauacaucauaaaa

SEQ ID NO: 2576636 - RNA, 19 nt, Artificial Sequence
  Description of Artificial Sequence: Synthetic oligonucleotide
ucuguaucaugaaugugcg

SEQ ID NO: 2576637 - RNA, 19 nt, Artificial Sequence
  Description of Artificial Sequence: Synthetic oligonucleotide
aaagauaauugacauaaua

SEQ ID NO: 2576638 - RNA, 19 nt, Artificial Sequence
  Description of Artificial Sequence: Synthetic oligonucleotide
uccgcauaaauacacaaug

SEQ ID NO: 2576639 - RNA, 19 nt, Artificial Sequence
  Description of Artificial Sequence: Synthetic oligonucleotide
uaugauugucaguuaaagg

SEQ ID NO: 2576640 - RNA, 19 nt, Artificial Sequence
  Description of Artificial Sequence: Synthetic oligonucleotide
guuaaaggaacaugaaucc

SEQ ID NO: 2576641 - RNA, 19 nt, Artificial Sequence
  Description of Artificial Sequence: Synthetic oligonucleotide
aaaucgaugguugugcauc

SEQ ID NO: 2576642 - RNA, 19 nt, Artificial Sequence
  Description of Artificial Sequence: Synthetic oligonucleotide
uggaguguagcuuucauca

SEQ ID NO: 2576643 - RNA, 19 nt, Artificial Sequence
  Description of Artificial Sequence: Synthetic oligonucleotide
auaaaugucuauucacuuc

SEQ ID NO: 2576644 - RNA, 19 nt, Artificial Sequence
  Description of Artificial Sequence: Synthetic oligonucleotide
uaaaacgacaugcuuuucc

SEQ ID NO: 2576645 - RNA, 19 nt, Artificial Sequence
  Description of Artificial Sequence: Synthetic oligonucleotide
cacuaaaugaggcugagag

SEQ ID NO: 2576646 - RNA, 19 nt, Artificial Sequence
  Description of Artificial Sequence: Synthetic oligonucleotide
uuuccacuaaagauaauug

SEQ ID NO: 2576647 - RNA, 19 nt, Artificial Sequence
  Description of Artificial Sequence: Synthetic oligonucleotide
ugacauaauacucaauguc

SEQ ID NO: 2576648 - RNA, 19 nt, Artificial Sequence
  Description of Artificial Sequence: Synthetic oligonucleotide
ucaugaaugugcgaguugg

SEQ ID NO: 2576649 - RNA, 19 nt, Artificial Sequence
  Description of Artificial Sequence: Synthetic oligonucleotide
uacuuaucuaaauugaaau

SEQ ID NO: 2576650 - RNA, 19 nt, Artificial Sequence
  Description of Artificial Sequence: Synthetic oligonucleotide
aaaacgacaugcuuuucca

SEQ ID NO: 2576651 - RNA, 19 nt, Artificial Sequence
  Description of Artificial Sequence: Synthetic oligonucleotide
uuuauaguccgcauaaaua

SEQ ID NO: 2576652 - RNA, 19 nt, Artificial Sequence
  Description of Artificial Sequence: Synthetic oligonucleotide
ugucuauucacuucucucc

SEQ ID NO: 2576653 - RNA, 19 nt, Artificial Sequence
  Description of Artificial Sequence: Synthetic oligonucleotide
uuucuagauugucaucucg

SEQ ID NO: 2576654 - RNA, 19 nt, Artificial Sequence
  Description of Artificial Sequence: Synthetic oligonucleotide
acuaaaugaggcugagagc

SEQ ID NO: 2576655 - RNA, 19 nt, Artificial Sequence
  Description of Artificial Sequence: Synthetic oligonucleotide
ugucaggauaaaauaaaug

SEQ ID NO: 2576656 - RNA, 19 nt, Artificial Sequence
  Description of Artificial Sequence: Synthetic oligonucleotide
gauaauugacauaauacuc

SEQ ID NO: 2576657 - RNA, 19 nt, Artificial Sequence
  Description of Artificial Sequence: Synthetic oligonucleotide
ugaaaauuauuuccuacuc

SEQ ID NO: 2576658 - RNA, 19 nt, Artificial Sequence
  Description of Artificial Sequence: Synthetic oligonucleotide
ucguaauugauccacucca

SEQ ID NO: 2576659 - RNA, 19 nt, Artificial Sequence
  Description of Artificial Sequence: Synthetic oligonucleotide
uuugcaugaugacagugcc

SEQ ID NO: 2576660 - RNA, 19 nt, Artificial Sequence
  Description of Artificial Sequence: Synthetic oligonucleotide
uguagcuuucaucagauuu

SEQ ID NO: 2576661 - RNA, 19 nt, Artificial Sequence
  Description of Artificial Sequence: Synthetic oligonucleotide
uuaugauugucaguuaaag

SEQ ID NO: 2576662 - RNA, 19 nt, Artificial Sequence
  Description of Artificial Sequence: Synthetic oligonucleotide
agaacagcaaucuguauca

SEQ ID NO: 2576663 - RNA, 19 nt, Artificial Sequence
  Description of Artificial Sequence: Synthetic oligonucleotide
gucaucucguaauugaucc

SEQ ID NO: 2576664 - RNA, 19 nt, Artificial Sequence
  Description of Artificial Sequence: Synthetic oligonucleotide
aauggagcucucuucaacu

SEQ ID NO: 2576665 - RNA, 19 nt, Artificial Sequence
  Description of Artificial Sequence: Synthetic oligonucleotide
uauugaacgauacaucaua

SEQ ID NO: 2576666 - RNA, 19 nt, Artificial Sequence
  Description of Artificial Sequence: Synthetic oligonucleotide
uagaacagcaaucuguauc

SEQ ID NO: 2576667 - RNA, 19 nt, Artificial Sequence
  Description of Artificial Sequence: Synthetic oligonucleotide
uuacuuaucuaaauugaaa

SEQ ID NO: 2576668 - RNA, 19 nt, Artificial Sequence
  Description of Artificial Sequence: Synthetic oligonucleotide
auacacaaugucuucacug

SEQ ID NO: 2576669 - RNA, 19 nt, Artificial Sequence
  Description of Artificial Sequence: Synthetic oligonucleotide
  modified_base (2)..(2): a, c, u, g, unknown or other
cngguuugcaugaugacag

SEQ ID NO: 2576670 - RNA, 19 nt, Artificial Sequence
  Description of Artificial Sequence: Synthetic oligonucleotide
acugcuugggacccgauuc

SEQ ID NO: 2576671 - RNA, 19 nt, Artificial Sequence
  Description of Artificial Sequence: Synthetic oligonucleotide
uaaguuucuagauugucau

SEQ ID NO: 2576672 - RNA, 19 nt, Artificial Sequence
  Description of Artificial Sequence: Synthetic oligonucleotide
aacgacaugcuuuuccacu

SEQ ID NO: 2576673 - RNA, 19 nt, Artificial Sequence
  Description of Artificial Sequence: Synthetic oligonucleotide
ugcuuuuccacuaaagaua

SEQ ID NO: 2576674 - RNA, 19 nt, Artificial Sequence
  Description of Artificial Sequence: Synthetic oligonucleotide
ucuuaugauugucaguuaa

SEQ ID NO: 2576675 - RNA, 19 nt, Artificial Sequence
  Description of Artificial Sequence: Synthetic oligonucleotide
auugucaucucguaauuga

SEQ ID NO: 2576676 - RNA, 19 nt, Artificial Sequence
  Description of Artificial Sequence: Synthetic oligonucleotide
aauacucaaugucaggaua

SEQ ID NO: 2576677 - RNA, 19 nt, Artificial Sequence
  Description of Artificial Sequence: Synthetic oligonucleotide
agauuuauaguccgcauaa

SEQ ID NO: 2576678 - RNA, 19 nt, Artificial Sequence
  Description of Artificial Sequence: Synthetic oligonucleotide
caccaauucaaguugccgg

SEQ ID NO: 2576679 - RNA, 19 nt, Artificial Sequence
  Description of Artificial Sequence: Synthetic oligonucleotide
aaacgacaugcuuuuccac

SEQ ID NO: 2576680 - RNA, 19 nt, Artificial Sequence
  Description of Artificial Sequence: Synthetic oligonucleotide
aagguugugaaaauuauuu

SEQ ID NO: 2576681 - RNA, 19 nt, Artificial Sequence
  Description of Artificial Sequence: Synthetic oligonucleotide
uccauuuuggugauuggcu

SEQ ID NO: 2576682 - RNA, 19 nt, Artificial Sequence
  Description of Artificial Sequence: Synthetic oligonucleotide
ugauugucaguuaaaggaa

SEQ ID NO: 2576683 - RNA, 19 nt, Artificial Sequence
  Description of Artificial Sequence: Synthetic oligonucleotide
uugacauaauacucaaugu

SEQ ID NO: 2576684 - RNA, 19 nt, Artificial Sequence
  Description of Artificial Sequence: Synthetic oligonucleotide
  modified_base (18)..(18): a, c, u, g, unknown or other
ugauccacuccaaaaccng

SEQ ID NO: 2576685 - RNA, 19 nt, Artificial Sequence
  Description of Artificial Sequence: Synthetic oligonucleotide
cauaauacucaaugucagg

SEQ ID NO: 2576686 - RNA, 19 nt, Artificial Sequence
  Description of Artificial Sequence: Synthetic oligonucleotide
uuccacuaaagauaauuga

SEQ ID NO: 2576687 - RNA, 19 nt, Artificial Sequence
  Description of Artificial Sequence: Synthetic oligonucleotide
agguugugaaaauuauuuc

SEQ ID NO: 2576688 - RNA, 19 nt, Artificial Sequence
  Description of Artificial Sequence: Synthetic oligonucleotide
uguaaaacgacaugcuuuu

SEQ ID NO: 2576689 - RNA, 19 nt, Artificial Sequence
  Description of Artificial Sequence: Synthetic oligonucleotide
uugaagguugugaaaauua

SEQ ID NO: 2576690 - RNA, 19 nt, Artificial Sequence
  Description of Artificial Sequence: Synthetic oligonucleotide
aauacacaaugucuucacu

SEQ ID NO: 2576691 - RNA, 19 nt, Artificial Sequence
  Description of Artificial Sequence: Synthetic oligonucleotide
uaauugauccacuccaaaa

SEQ ID NO: 2576692 - RNA, 19 nt, Artificial Sequence
  Description of Artificial Sequence: Synthetic oligonucleotide
accaggaggagucuuguuc

SEQ ID NO: 2576693 - RNA, 19 nt, Artificial Sequence
  Description of Artificial Sequence: Synthetic oligonucleotide
gaugguugugcaucugggg

SEQ ID NO: 2576694 - RNA, 19 nt, Artificial Sequence
  Description of Artificial Sequence: Synthetic oligonucleotide
uccaauggagcucucuuca

SEQ ID NO: 2576695 - RNA, 19 nt, Artificial Sequence
  Description of Artificial Sequence: Synthetic oligonucleotide
ugguguauauauuuuaauu

SEQ ID NO: 2576696 - RNA, 19 nt, Artificial Sequence
  Description of Artificial Sequence: Synthetic oligonucleotide
ucgaugguugugcaucugg

SEQ ID NO: 2576697 - RNA, 19 nt, Artificial Sequence
  Description of Artificial Sequence: Synthetic oligonucleotide
aaugucaggauaaaauaaa

SEQ ID NO: 2576698 - RNA, 19 nt, Artificial Sequence
  Description of Artificial Sequence: Synthetic oligonucleotide
  modified_base (19)..(19): a, c, u, g, unknown or other
uugauccacuccaaaaccn

SEQ ID NO: 2576699 - RNA, 19 nt, Artificial Sequence
  Description of Artificial Sequence: Synthetic oligonucleotide
ucacccaaaaguuacuuau

SEQ ID NO: 2576700 - RNA, 19 nt, Artificial Sequence
  Description of Artificial Sequence: Synthetic oligonucleotide
uauaguccgcauaaauaca

SEQ ID NO: 2576701 - RNA, 19 nt, Artificial Sequence
  Description of Artificial Sequence: Synthetic oligonucleotide
gaugacagugccaaacugc

SEQ ID NO: 2576702 - RNA, 19 nt, Artificial Sequence
  Description of Artificial Sequence: Synthetic oligonucleotide
  modified_base (10)..(10): a, c, u, g, unknown or other
uccaaaaccngguuugcau

SEQ ID NO: 2576703 - RNA, 19 nt, Artificial Sequence
  Description of Artificial Sequence: Synthetic oligonucleotide
uuuuccacuaaagauaauu

SEQ ID NO: 2576704 - RNA, 19 nt, Artificial Sequence
  Description of Artificial Sequence: Synthetic oligonucleotide
uucuagauugucaucucgu

SEQ ID NO: 2576705 - RNA, 19 nt, Artificial Sequence
  Description of Artificial Sequence: Synthetic oligonucleotide
uuaucuaaauugaaauguu

SEQ ID NO: 2576706 - RNA, 19 nt, Artificial Sequence
  Description of Artificial Sequence: Synthetic oligonucleotide
uugccggauuucuugaagg

SEQ ID NO: 2576707 - RNA, 19 nt, Artificial Sequence
  Description of Artificial Sequence: Synthetic oligonucleotide
auaguccgcauaaauacac

SEQ ID NO: 2576708 - RNA, 19 nt, Artificial Sequence
  Description of Artificial Sequence: Synthetic oligonucleotide
ugaagguugugaaaauuau

SEQ ID NO: 2576709 - RNA, 19 nt, Artificial Sequence
  Description of Artificial Sequence: Synthetic oligonucleotide
augcuuuuccacuaaagau

SEQ ID NO: 2576710 - RNA, 19 nt, Artificial Sequence
  Description of Artificial Sequence: Synthetic oligonucleotide
uaucuaaauugaaauguuu

SEQ ID NO: 2576711 - RNA, 19 nt, Artificial Sequence
  Description of Artificial Sequence: Synthetic oligonucleotide
ucugaauuggauguucacu

SEQ ID NO: 2576712 - RNA, 19 nt, Artificial Sequence
  Description of Artificial Sequence: Synthetic oligonucleotide
aguaaguuucuagauuguc

SEQ ID NO: 2576713 - RNA, 19 nt, Artificial Sequence
  Description of Artificial Sequence: Synthetic oligonucleotide
acccaaaaguuacuuaucu

SEQ ID NO: 2576714 - RNA, 19 nt, Artificial Sequence
  Description of Artificial Sequence: Synthetic oligonucleotide
aaaaggcaucacccaaaag

SEQ ID NO: 2576715 - RNA, 19 nt, Artificial Sequence
  Description of Artificial Sequence: Synthetic oligonucleotide
uuggcuagaacagcaaucu

SEQ ID NO: 2576716 - RNA, 19 nt, Artificial Sequence
  Description of Artificial Sequence: Synthetic oligonucleotide
ucauaaaaucgaugguugu

SEQ ID NO: 2576717 - RNA, 19 nt, Artificial Sequence
  Description of Artificial Sequence: Synthetic oligonucleotide
gaaugugcgaguuggcuuc

SEQ ID NO: 2576718 - RNA, 19 nt, Artificial Sequence
  Description of Artificial Sequence: Synthetic oligonucleotide
uggggaauuuuccaaugga

SEQ ID NO: 2576719 - RNA, 19 nt, Artificial Sequence
  Description of Artificial Sequence: Synthetic oligonucleotide
aguuacuuaucuaaauuga

SEQ ID NO: 2576720 - RNA, 19 nt, Artificial Sequence
  Description of Artificial Sequence: Synthetic oligonucleotide
caaguugccggauuucuug

SEQ ID NO: 2576721 - RNA, 19 nt, Artificial Sequence
  Description of Artificial Sequence: Synthetic oligonucleotide
caggauaaaauaaaugucu

SEQ ID NO: 2576722 - RNA, 19 nt, Artificial Sequence
  Description of Artificial Sequence: Synthetic oligonucleotide
auuggcuagaacagcaauc

SEQ ID NO: 2576723 - RNA, 19 nt, Artificial Sequence
  Description of Artificial Sequence: Synthetic oligonucleotide
ucaugugggugucucuucc

SEQ ID NO: 2576724 - RNA, 19 nt, Artificial Sequence
  Description of Artificial Sequence: Synthetic oligonucleotide
cuuaucuaaauugaaaugu

SEQ ID NO: 2576725 - RNA, 19 nt, Artificial Sequence
  Description of Artificial Sequence: Synthetic oligonucleotide
cucguaauugauccacucc

SEQ ID NO: 2576726 - RNA, 19 nt, Artificial Sequence
  Description of Artificial Sequence: Synthetic oligonucleotide
acuugguuccaccaauuca

SEQ ID NO: 2576727 - RNA, 19 nt, Artificial Sequence
  Description of Artificial Sequence: Synthetic oligonucleotide
gauuucuugaagguuguga

SEQ ID NO: 2576728 - RNA, 19 nt, Artificial Sequence
  Description of Artificial Sequence: Synthetic oligonucleotide
aaauuauuuccuacucuga

SEQ ID NO: 2576729 - RNA, 19 nt, Artificial Sequence
  Description of Artificial Sequence: Synthetic oligonucleotide
aauuggauguucacuaaau

SEQ ID NO: 2576730 - RNA, 19 nt, Artificial Sequence
  Description of Artificial Sequence: Synthetic oligonucleotide
acgauacaucauaaaaucg

SEQ ID NO: 2576731 - RNA, 19 nt, Artificial Sequence
  Description of Artificial Sequence: Synthetic oligonucleotide
cauaaaaucgaugguugug

SEQ ID NO: 2576732 - RNA, 19 nt, Artificial Sequence
  Description of Artificial Sequence: Synthetic oligonucleotide
ccaguaaguuucuagauug

SEQ ID NO: 2576733 - RNA, 19 nt, Artificial Sequence
  Description of Artificial Sequence: Synthetic oligonucleotide
augguugugcaucugggga

SEQ ID NO: 2576734 - RNA, 19 nt, Artificial Sequence
  Description of Artificial Sequence: Synthetic oligonucleotide
acaucauaaaaucgauggu

SEQ ID NO: 2576735 - RNA, 19 nt, Artificial Sequence
  Description of Artificial Sequence: Synthetic oligonucleotide
  modified_base (6)..(6): a, c, u, g, unknown or other
aaaccngguuugcaugaug

SEQ ID NO: 2576736 - RNA, 19 nt, Artificial Sequence
  Description of Artificial Sequence: Synthetic oligonucleotide
aaucgaugguugugcaucu

SEQ ID NO: 2576737 - RNA, 19 nt, Artificial Sequence
  Description of Artificial Sequence: Synthetic oligonucleotide
ucacuucucuccauuuuca

SEQ ID NO: 2576738 - RNA, 19 nt, Artificial Sequence
  Description of Artificial Sequence: Synthetic oligonucleotide
ugucaucucguaauugauc

SEQ ID NO: 2576739 - RNA, 19 nt, Artificial Sequence
  Description of Artificial Sequence: Synthetic oligonucleotide
accguauugaacgauacau

SEQ ID NO: 2576740 - RNA, 19 nt, Artificial Sequence
  Description of Artificial Sequence: Synthetic oligonucleotide
  modified_base (5)..(5): a, c, u, g, unknown or other
aaccngguuugcaugauga

SEQ ID NO: 2576741 - RNA, 19 nt, Artificial Sequence
  Description of Artificial Sequence: Synthetic oligonucleotide
uaauacucaaugucaggau

SEQ ID NO: 2576742 - RNA, 19 nt, Artificial Sequence
  Description of Artificial Sequence: Synthetic oligonucleotide
caugcuuuuccacuaaaga

SEQ ID NO: 2576743 - RNA, 19 nt, Artificial Sequence
  Description of Artificial Sequence: Synthetic oligonucleotide
aacuguaaaacgacaugcu

SEQ ID NO: 2576744 - RNA, 19 nt, Artificial Sequence
  Description of Artificial Sequence: Synthetic oligonucleotide
guuugcaugaugacagugc

SEQ ID NO: 2576745 - RNA, 19 nt, Artificial Sequence
  Description of Artificial Sequence: Synthetic oligonucleotide
  modified_base (4)..(4): a, c, u, g, unknown or other
accngguuugcaugaugac

SEQ ID NO: 2576746 - RNA, 19 nt, Artificial Sequence
  Description of Artificial Sequence: Synthetic oligonucleotide
ucgcaguccuuucuaacug

SEQ ID NO: 2576747 - RNA, 19 nt, Artificial Sequence
  Description of Artificial Sequence: Synthetic oligonucleotide
guccuuucuaacugcuugg

SEQ ID NO: 2576748 - RNA, 19 nt, Artificial Sequence
  Description of Artificial Sequence: Synthetic oligonucleotide
gcugagagccaucagacug

SEQ ID NO: 2576749 - RNA, 19 nt, Artificial Sequence
  Description of Artificial Sequence: Synthetic oligonucleotide
  modified_base (17)..(17): a, c, u, g, unknown or other
gauccacuccaaaaccngg

SEQ ID NO: 2576750 - RNA, 19 nt, Artificial Sequence
  Description of Artificial Sequence: Synthetic oligonucleotide
ucaccguauugaacgauac

SEQ ID NO: 2576751 - RNA, 19 nt, Artificial Sequence
  Description of Artificial Sequence: Synthetic oligonucleotide
caaugucaggauaaaauaa

SEQ ID NO: 2576752 - RNA, 19 nt, Artificial Sequence
  Description of Artificial Sequence: Synthetic oligonucleotide
uucaagucaccguauugaa

SEQ ID NO: 2576753 - RNA, 19 nt, Artificial Sequence
  Description of Artificial Sequence: Synthetic oligonucleotide
aaguugccggauuucuuga

SEQ ID NO: 2576754 - RNA, 19 nt, Artificial Sequence
  Description of Artificial Sequence: Synthetic oligonucleotide
uuuccaauggagcucucuu

SEQ ID NO: 2576755 - RNA, 19 nt, Artificial Sequence
  Description of Artificial Sequence: Synthetic oligonucleotide
ucugacugagauuuugcuu

SEQ ID NO: 2576756 - RNA, 19 nt, Artificial Sequence
  Description of Artificial Sequence: Synthetic oligonucleotide
ugcgaguuggcuucuuaug

SEQ ID NO: 2576757 - RNA, 19 nt, Artificial Sequence
  Description of Artificial Sequence: Synthetic oligonucleotide
acuaaagauaauugacaua

SEQ ID NO: 2576758 - RNA, 19 nt, Artificial Sequence
  Description of Artificial Sequence: Synthetic oligonucleotide
uuuggugauuggcuagaac

SEQ ID NO: 2576759 - RNA, 19 nt, Artificial Sequence
  Description of Artificial Sequence: Synthetic oligonucleotide
cugagagccaucagacugc

SEQ ID NO: 2576760 - RNA, 19 nt, Artificial Sequence
  Description of Artificial Sequence: Synthetic oligonucleotide
auguucacuaaaugaggcu

SEQ ID NO: 2576761 - RNA, 19 nt, Artificial Sequence
  Description of Artificial Sequence: Synthetic oligonucleotide
aucagauuuauaguccgca

SEQ ID NO: 2576762 - RNA, 19 nt, Artificial Sequence
  Description of Artificial Sequence: Synthetic oligonucleotide
uccuuucuaacugcuuggg

SEQ ID NO: 2576763 - RNA, 19 nt, Artificial Sequence
  Description of Artificial Sequence: Synthetic oligonucleotide
ugaaugugcgaguuggcuu

SEQ ID NO: 2576764 - RNA, 19 nt, Artificial Sequence
  Description of Artificial Sequence: Synthetic oligonucleotide
ucuagauugucaucucgua

SEQ ID NO: 2576765 - RNA, 19 nt, Artificial Sequence
  Description of Artificial Sequence: Synthetic oligonucleotide
ugaauuggauguucacuaa

SEQ ID NO: 2576766 - RNA, 19 nt, Artificial Sequence
  Description of Artificial Sequence: Synthetic oligonucleotide
uggcuucuuaugauuguca

SEQ ID NO: 2576767 - RNA, 19 nt, Artificial Sequence
  Description of Artificial Sequence: Synthetic oligonucleotide
cugaauuggauguucacua

SEQ ID NO: 2576768 - RNA, 19 nt, Artificial Sequence
  Description of Artificial Sequence: Synthetic oligonucleotide
gaauuuuccaauggagcuc

SEQ ID NO: 2576769 - RNA, 19 nt, Artificial Sequence
  Description of Artificial Sequence: Synthetic oligonucleotide
gauugucaucucguaauug

SEQ ID NO: 2576770 - RNA, 19 nt, Artificial Sequence
  Description of Artificial Sequence: Synthetic oligonucleotide
gaguguagcuuucaucaga

SEQ ID NO: 2576771 - RNA, 19 nt, Artificial Sequence
  Description of Artificial Sequence: Synthetic oligonucleotide
ucagauuuauaguccgcau

SEQ ID NO: 2576772 - RNA, 19 nt, Artificial Sequence
  Description of Artificial Sequence: Synthetic oligonucleotide
uuugcuuggaguguagcuu

SEQ ID NO: 2576773 - RNA, 19 nt, Artificial Sequence
  Description of Artificial Sequence: Synthetic oligonucleotide
uccaccaauucaaguugcc

SEQ ID NO: 2576774 - RNA, 19 nt, Artificial Sequence
  Description of Artificial Sequence: Synthetic oligonucleotide
ucucguaauugauccacuc

SEQ ID NO: 2576775 - RNA, 19 nt, Artificial Sequence
  Description of Artificial Sequence: Synthetic oligonucleotide
aguccgcauaaauacacaa

SEQ ID NO: 2576776 - RNA, 19 nt, Artificial Sequence
  Description of Artificial Sequence: Synthetic oligonucleotide
uuuccuacucugacugaga

SEQ ID NO: 2576777 - RNA, 19 nt, Artificial Sequence
  Description of Artificial Sequence: Synthetic oligonucleotide
guugccggauuucuugaag

SEQ ID NO: 2576778 - RNA, 19 nt, Artificial Sequence
  Description of Artificial Sequence: Synthetic oligonucleotide
caucucguaauugauccac

SEQ ID NO: 2576779 - RNA, 19 nt, Artificial Sequence
  Description of Artificial Sequence: Synthetic oligonucleotide
uuccuacucugacugagau

SEQ ID NO: 2576780 - RNA, 19 nt, Artificial Sequence
  Description of Artificial Sequence: Synthetic oligonucleotide
gaauuggauguucacuaaa

SEQ ID NO: 2576781 - RNA, 19 nt, Artificial Sequence
  Description of Artificial Sequence: Synthetic oligonucleotide
aagucaccguauugaacga

SEQ ID NO: 2576782 - RNA, 19 nt, Artificial Sequence
  Description of Artificial Sequence: Synthetic oligonucleotide
agugccaaacugcuuggga

SEQ ID NO: 2576783 - RNA, 19 nt, Artificial Sequence
  Description of Artificial Sequence: Synthetic oligonucleotide
ggaggagucuuguucggcg

SEQ ID NO: 2576784 - RNA, 19 nt, Artificial Sequence
  Description of Artificial Sequence: Synthetic oligonucleotide
gggaauuuuccaauggagc

SEQ ID NO: 2576785 - RNA, 19 nt, Artificial Sequence
  Description of Artificial Sequence: Synthetic oligonucleotide
aucaugaaugugcgaguug

SEQ ID NO: 2576786 - RNA, 19 nt, Artificial Sequence
  Description of Artificial Sequence: Synthetic oligonucleotide
uaguccgcauaaauacaca

SEQ ID NO: 2576787 - RNA, 19 nt, Artificial Sequence
  Description of Artificial Sequence: Synthetic oligonucleotide
ccaaaaguuacuuaucuaa

SEQ ID NO: 2576788 - RNA, 19 nt, Artificial Sequence
  Description of Artificial Sequence: Synthetic oligonucleotide
ugauuggcuagaacagcaa

SEQ ID NO: 2576789 - RNA, 19 nt, Artificial Sequence
  Description of Artificial Sequence: Synthetic oligonucleotide
gaacgauacaucauaaaau

SEQ ID NO: 2576790 - RNA, 19 nt, Artificial Sequence
  Description of Artificial Sequence: Synthetic oligonucleotide
uauucacuucucuccauuu

SEQ ID NO: 2576791 - RNA, 19 nt, Artificial Sequence
  Description of Artificial Sequence: Synthetic oligonucleotide
caauggagcucucuucaac

SEQ ID NO: 2576792 - RNA, 19 nt, Artificial Sequence
  Description of Artificial Sequence: Synthetic oligonucleotide
uucaacugguguauauauu

SEQ ID NO: 2576793 - RNA, 19 nt, Artificial Sequence
  Description of Artificial Sequence: Synthetic oligonucleotide
ugccaguaaguuucuagau

SEQ ID NO: 2576794 - RNA, 19 nt, Artificial Sequence
  Description of Artificial Sequence: Synthetic oligonucleotide
  modified_base (8)..(8): a, c, u, g, unknown or other
caaaaccngguuugcauga

SEQ ID NO: 2576795 - RNA, 19 nt, Artificial Sequence
  Description of Artificial Sequence: Synthetic oligonucleotide
guuacuuaucuaaauugaa

SEQ ID NO: 2576796 - RNA, 19 nt, Artificial Sequence
  Description of Artificial Sequence: Synthetic oligonucleotide
ggaauuuuccaauggagcu

SEQ ID NO: 2576797 - RNA, 19 nt, Artificial Sequence
  Description of Artificial Sequence: Synthetic oligonucleotide
acaugcuuuuccacuaaag

SEQ ID NO: 2576798 - RNA, 19 nt, Artificial Sequence
  Description of Artificial Sequence: Synthetic oligonucleotide
caugaaugugcgaguuggc

SEQ ID NO: 2576799 - RNA, 19 nt, Artificial Sequence
  Description of Artificial Sequence: Synthetic oligonucleotide
ccaggaggagucuuguucg

SEQ ID NO: 2576800 - RNA, 19 nt, Artificial Sequence
  Description of Artificial Sequence: Synthetic oligonucleotide
uucggcguggucauucuua

SEQ ID NO: 2576801 - RNA, 19 nt, Artificial Sequence
  Description of Artificial Sequence: Synthetic oligonucleotide
ugguugugcaucuggggaa

SEQ ID NO: 2576802 - RNA, 19 nt, Artificial Sequence
  Description of Artificial Sequence: Synthetic oligonucleotide
cuuaugauugucaguuaaa

SEQ ID NO: 2576803 - RNA, 19 nt, Artificial Sequence
  Description of Artificial Sequence: Synthetic oligonucleotide
ucagacugccaguaaguuu

SEQ ID NO: 2576804 - RNA, 19 nt, Artificial Sequence
  Description of Artificial Sequence: Synthetic oligonucleotide
uauuuccuacucugacuga

SEQ ID NO: 2576805 - RNA, 19 nt, Artificial Sequence
  Description of Artificial Sequence: Synthetic oligonucleotide
ucuucaacugguguauaua

SEQ ID NO: 2576806 - RNA, 19 nt, Artificial Sequence
  Description of Artificial Sequence: Synthetic oligonucleotide
  modified_base (7)..(7): a, c, u, g, unknown or other
aaaaccngguuugcaugau

SEQ ID NO: 2576807 - RNA, 19 nt, Artificial Sequence
  Description of Artificial Sequence: Synthetic oligonucleotide
gucuauucacuucucucca

SEQ ID NO: 2576808 - RNA, 19 nt, Artificial Sequence
  Description of Artificial Sequence: Synthetic oligonucleotide
uuuuccaauggagcucucu

SEQ ID NO: 2576809 - RNA, 19 nt, Artificial Sequence
  Description of Artificial Sequence: Synthetic oligonucleotide
augacagugccaaacugcu

SEQ ID NO: 2576810 - RNA, 19 nt, Artificial Sequence
  Description of Artificial Sequence: Synthetic oligonucleotide
uucccuuacugucgcaguc

SEQ ID NO: 2576811 - RNA, 19 nt, Artificial Sequence
  Description of Artificial Sequence: Synthetic oligonucleotide
ugucgcaguccuuucuaac

SEQ ID NO: 2576812 - RNA, 19 nt, Artificial Sequence
  Description of Artificial Sequence: Synthetic oligonucleotide
aggaggagucuuguucggc

SEQ ID NO: 2576813 - RNA, 19 nt, Artificial Sequence
  Description of Artificial Sequence: Synthetic oligonucleotide
ucuuguucggcguggucau

SEQ ID NO: 2576814 - RNA, 19 nt, Artificial Sequence
  Description of Artificial Sequence: Synthetic oligonucleotide
ugccggauuucuugaaggu

SEQ ID NO: 2576815 - RNA, 19 nt, Artificial Sequence
  Description of Artificial Sequence: Synthetic oligonucleotide
cacuaaagauaauugacau

SEQ ID NO: 2576816 - RNA, 19 nt, Artificial Sequence
  Description of Artificial Sequence: Synthetic oligonucleotide
cuaacugcuugggaucagc

SEQ ID NO: 2576817 - RNA, 19 nt, Artificial Sequence
  Description of Artificial Sequence: Synthetic oligonucleotide
guaauugauccacuccaaa

SEQ ID NO: 2576818 - RNA, 19 nt, Artificial Sequence
  Description of Artificial Sequence: Synthetic oligonucleotide
ggggaauuuuccaauggag

SEQ ID NO: 2576819 - RNA, 19 nt, Artificial Sequence
  Description of Artificial Sequence: Synthetic oligonucleotide
auugaacgauacaucauaa

SEQ ID NO: 2576820 - RNA, 19 nt, Artificial Sequence
  Description of Artificial Sequence: Synthetic oligonucleotide
ccggauuucuugaagguug

SEQ ID NO: 2576821 - RNA, 19 nt, Artificial Sequence
  Description of Artificial Sequence: Synthetic oligonucleotide
agauugucaucucguaauu

SEQ ID NO: 2576822 - RNA, 19 nt, Artificial Sequence
  Description of Artificial Sequence: Synthetic oligonucleotide
ucuauucacuucucuccau

SEQ ID NO: 2576823 - RNA, 19 nt, Artificial Sequence
  Description of Artificial Sequence: Synthetic oligonucleotide
uacugucgcaguccuuucu

SEQ ID NO: 2576824 - RNA, 19 nt, Artificial Sequence
  Description of Artificial Sequence: Synthetic oligonucleotide
gugauuggcuagaacagca

SEQ ID NO: 2576825 - RNA, 19 nt, Artificial Sequence
  Description of Artificial Sequence: Synthetic oligonucleotide
aaugaggcugagagccauc

SEQ ID NO: 2576826 - RNA, 19 nt, Artificial Sequence
  Description of Artificial Sequence: Synthetic oligonucleotide
ucaaguugccggauuucuu

SEQ ID NO: 2576827 - RNA, 19 nt, Artificial Sequence
  Description of Artificial Sequence: Synthetic oligonucleotide
guuucuagauugucaucuc

SEQ ID NO: 2576828 - RNA, 19 nt, Artificial Sequence
  Description of Artificial Sequence: Synthetic oligonucleotide
aguguagcuuucaucagau

SEQ ID NO: 2576829 - RNA, 19 nt, Artificial Sequence
  Description of Artificial Sequence: Synthetic oligonucleotide
cuagauugucaucucguaa

SEQ ID NO: 2576830 - RNA, 19 nt, Artificial Sequence
  Description of Artificial Sequence: Synthetic oligonucleotide
auucccuuacugucgcagu

SEQ ID NO: 2576831 - RNA, 19 nt, Artificial Sequence
  Description of Artificial Sequence: Synthetic oligonucleotide
aacaugaauccagccacuu

SEQ ID NO: 2576832 - RNA, 19 nt, Artificial Sequence
  Description of Artificial Sequence: Synthetic oligonucleotide
  modified_base (9)..(9): a, c, u, g, unknown or other
ccaaaaccngguuugcaug

SEQ ID NO: 2576833 - RNA, 19 nt, Artificial Sequence
  Description of Artificial Sequence: Synthetic oligonucleotide
cguauugaacgauacauca

SEQ ID NO: 2576834 - RNA, 19 nt, Artificial Sequence
  Description of Artificial Sequence: Synthetic oligonucleotide
cacccaaaaguuacuuauc

SEQ ID NO: 2576835 - RNA, 19 nt, Artificial Sequence
  Description of Artificial Sequence: Synthetic oligonucleotide
gucuuguucggcgugguca

SEQ ID NO: 2576836 - RNA, 19 nt, Artificial Sequence
  Description of Artificial Sequence: Synthetic oligonucleotide
ucccuuacugucgcagucc

SEQ ID NO: 2576837 - RNA, 19 nt, Artificial Sequence
  Description of Artificial Sequence: Synthetic oligonucleotide
ggcaucacccaaaaguuac

SEQ ID NO: 2576838 - RNA, 19 nt, Artificial Sequence
  Description of Artificial Sequence: Synthetic oligonucleotide
augucaggauaaaauaaau

SEQ ID NO: 2576839 - RNA, 19 nt, Artificial Sequence
  Description of Artificial Sequence: Synthetic oligonucleotide
ccacuaaagauaauugaca

SEQ ID NO: 2576840 - RNA, 19 nt, Artificial Sequence
  Description of Artificial Sequence: Synthetic oligonucleotide
acgacaugcuuuuccacua

SEQ ID NO: 2576841 - RNA, 19 nt, Artificial Sequence
  Description of Artificial Sequence: Synthetic oligonucleotide
cgauacaucauaaaaucga

SEQ ID NO: 2576842 - RNA, 19 nt, Artificial Sequence
  Description of Artificial Sequence: Synthetic oligonucleotide
cuguaaaacgacaugcuuu

SEQ ID NO: 2576843 - RNA, 19 nt, Artificial Sequence
  Description of Artificial Sequence: Synthetic oligonucleotide
cugcuugggacccgauucc

SEQ ID NO: 2576844 - RNA, 19 nt, Artificial Sequence
  Description of Artificial Sequence: Synthetic oligonucleotide
agucuuguucggcgugguc

SEQ ID NO: 2576845 - RNA, 19 nt, Artificial Sequence
  Description of Artificial Sequence: Synthetic oligonucleotide
uagcuuucaucagauuuau

SEQ ID NO: 2576846 - RNA, 19 nt, Artificial Sequence
  Description of Artificial Sequence: Synthetic oligonucleotide
uucuuaugauugucaguua

SEQ ID NO: 2576847 - RNA, 19 nt, Artificial Sequence
  Description of Artificial Sequence: Synthetic oligonucleotide
caggaggagucuuguucgg

SEQ ID NO: 2576848 - RNA, 19 nt, Artificial Sequence
  Description of Artificial Sequence: Synthetic oligonucleotide
cuucaacugguguauauau

SEQ ID NO: 2576849 - RNA, 19 nt, Artificial Sequence
  Description of Artificial Sequence: Synthetic oligonucleotide
ugugcgaguuggcuucuua

SEQ ID NO: 2576850 - RNA, 19 nt, Artificial Sequence
  Description of Artificial Sequence: Synthetic oligonucleotide
ucucaugugggugucucuu

SEQ ID NO: 2576851 - RNA, 19 nt, Artificial Sequence
  Description of Artificial Sequence: Synthetic oligonucleotide
acugucgcaguccuuucua

SEQ ID NO: 2576852 - RNA, 19 nt, Artificial Sequence
  Description of Artificial Sequence: Synthetic oligonucleotide
ccaucagacugccaguaag

SEQ ID NO: 2576853 - RNA, 19 nt, Artificial Sequence
  Description of Artificial Sequence: Synthetic oligonucleotide
gauuggcuagaacagcaau

SEQ ID NO: 2576854 - RNA, 19 nt, Artificial Sequence
  Description of Artificial Sequence: Synthetic oligonucleotide
ugggacccgauucccuuac

SEQ ID NO: 2576855 - RNA, 19 nt, Artificial Sequence
  Description of Artificial Sequence: Synthetic oligonucleotide
ucggcguggucauucuuaa

SEQ ID NO: 2576856 - RNA, 19 nt, Artificial Sequence
  Description of Artificial Sequence: Synthetic oligonucleotide
cagauuuauaguccgcaua

SEQ ID NO: 2576857 - RNA, 19 nt, Artificial Sequence
  Description of Artificial Sequence: Synthetic oligonucleotide
ggaguguagcuuucaucag

SEQ ID NO: 2576858 - RNA, 19 nt, Artificial Sequence
  Description of Artificial Sequence: Synthetic oligonucleotide
ggugauuggcuagaacagc

SEQ ID NO: 2576859 - RNA, 19 nt, Artificial Sequence
  Description of Artificial Sequence: Synthetic oligonucleotide
uuguucggcguggucauuc

SEQ ID NO: 2576860 - RNA, 19 nt, Artificial Sequence
  Description of Artificial Sequence: Synthetic oligonucleotide
cccgauucccuuacugucg

SEQ ID NO: 2576861 - RNA, 19 nt, Artificial Sequence
  Description of Artificial Sequence: Synthetic oligonucleotide
caucuggggaauuuuccaa

SEQ ID NO: 2576862 - RNA, 19 nt, Artificial Sequence
  Description of Artificial Sequence: Synthetic oligonucleotide
uguucggcguggucauucu

SEQ ID NO: 2576863 - RNA, 19 nt, Artificial Sequence
  Description of Artificial Sequence: Synthetic oligonucleotide
ggcguggucauucuuaacu

SEQ ID NO: 2576864 - RNA, 19 nt, Artificial Sequence
  Description of Artificial Sequence: Synthetic oligonucleotide
augugggugucucuuccau

SEQ ID NO: 2576865 - RNA, 19 nt, Artificial Sequence
  Description of Artificial Sequence: Synthetic oligonucleotide
uuuuggugauuggcuagaa

SEQ ID NO: 2576866 - RNA, 19 nt, Artificial Sequence
  Description of Artificial Sequence: Synthetic oligonucleotide
cucaugugggugucucuuc

SEQ ID NO: 2576867 - RNA, 19 nt, Artificial Sequence
  Description of Artificial Sequence: Synthetic oligonucleotide
acucaaugucaggauaaaa

SEQ ID NO: 2576868 - RNA, 19 nt, Artificial Sequence
  Description of Artificial Sequence: Synthetic oligonucleotide
gucgcaguccuuucuaacu

SEQ ID NO: 2576869 - RNA, 19 nt, Artificial Sequence
  Description of Artificial Sequence: Synthetic oligonucleotide
uuacugucgcaguccuuuc

SEQ ID NO: 2576870 - RNA, 19 nt, Artificial Sequence
  Description of Artificial Sequence: Synthetic oligonucleotide
aaugugcgaguuggcuucu

SEQ ID NO: 2576871 - RNA, 19 nt, Artificial Sequence
  Description of Artificial Sequence: Synthetic oligonucleotide
gguuccaccaauucaaguu

SEQ ID NO: 2576872 - RNA, 19 nt, Artificial Sequence
  Description of Artificial Sequence: Synthetic oligonucleotide
guaucaugaaugugcgagu

SEQ ID NO: 2576873 - RNA, 19 nt, Artificial Sequence
  Description of Artificial Sequence: Synthetic oligonucleotide
gacccgauucccuuacugu

SEQ ID NO: 2576874 - RNA, 19 nt, Artificial Sequence
  Description of Artificial Sequence: Synthetic oligonucleotide
gcuuuuccacuaaagauaa

SEQ ID NO: 2576875 - RNA, 19 nt, Artificial Sequence
  Description of Artificial Sequence: Synthetic oligonucleotide
aguugccggauuucuugaa

SEQ ID NO: 2576876 - RNA, 19 nt, Artificial Sequence
  Description of Artificial Sequence: Synthetic oligonucleotide
ggacccgauucccuuacug

SEQ ID NO: 2576877 - RNA, 19 nt, Artificial Sequence
  Description of Artificial Sequence: Synthetic oligonucleotide
ugcuuggaguguagcuuuc

SEQ ID NO: 2576878 - RNA, 19 nt, Artificial Sequence
  Description of Artificial Sequence: Synthetic oligonucleotide
uccuacucugacugagauu

SEQ ID NO: 2576879 - RNA, 19 nt, Artificial Sequence
  Description of Artificial Sequence: Synthetic oligonucleotide
ggagucuuguucggcgugg

SEQ ID NO: 2576880 - RNA, 19 nt, Artificial Sequence
  Description of Artificial Sequence: Synthetic oligonucleotide
ccguauugaacgauacauc

SEQ ID NO: 2576881 - RNA, 19 nt, Artificial Sequence
  Description of Artificial Sequence: Synthetic oligonucleotide
gagauuuugcuuggagugu

SEQ ID NO: 2576882 - RNA, 19 nt, Artificial Sequence
  Description of Artificial Sequence: Synthetic oligonucleotide
caucagacugccaguaagu

SEQ ID NO: 2576883 - RNA, 19 nt, Artificial Sequence
  Description of Artificial Sequence: Synthetic oligonucleotide
ugacagugccaaacugcuu

SEQ ID NO: 2576884 - RNA, 19 nt, Artificial Sequence
  Description of Artificial Sequence: Synthetic oligonucleotide
cgaugguugugcaucuggg

SEQ ID NO: 2576885 - RNA, 19 nt, Artificial Sequence
  Description of Artificial Sequence: Synthetic oligonucleotide
aucucguaauugauccacu

SEQ ID NO: 2576886 - RNA, 19 nt, Artificial Sequence
  Description of Artificial Sequence: Synthetic oligonucleotide
cugguguauauauuuuaau

SEQ ID NO: 2576887 - RNA, 19 nt, Artificial Sequence
  Description of Artificial Sequence: Synthetic oligonucleotide
gcuagaacagcaaucugua

SEQ ID NO: 2576888 - RNA, 19 nt, Artificial Sequence
  Description of Artificial Sequence: Synthetic oligonucleotide
uugggacccgauucccuua

SEQ ID NO: 2576889 - RNA, 19 nt, Artificial Sequence
  Description of Artificial Sequence: Synthetic oligonucleotide
gaggagucuuguucggcgu

SEQ ID NO: 2576890 - RNA, 19 nt, Artificial Sequence
  Description of Artificial Sequence: Synthetic oligonucleotide
gugggugucucuuccauuu

SEQ ID NO: 2576891 - RNA, 19 nt, Artificial Sequence
  Description of Artificial Sequence: Synthetic oligonucleotide
caccguauugaacgauaca

SEQ ID NO: 2576892 - RNA, 19 nt, Artificial Sequence
  Description of Artificial Sequence: Synthetic oligonucleotide
cuguaucaugaaugugcga

SEQ ID NO: 2576893 - RNA, 19 nt, Artificial Sequence
  Description of Artificial Sequence: Synthetic oligonucleotide
gagcucucuucaacuggug

SEQ ID NO: 2576894 - RNA, 19 nt, Artificial Sequence
  Description of Artificial Sequence: Synthetic oligonucleotide
gugcaucuggggaauuuuc

SEQ ID NO: 2576895 - RNA, 19 nt, Artificial Sequence
  Description of Artificial Sequence: Synthetic oligonucleotide
ccuacucugacugagauuu

SEQ ID NO: 2576896 - RNA, 19 nt, Artificial Sequence
  Description of Artificial Sequence: Synthetic oligonucleotide
gucaccguauugaacgaua

SEQ ID NO: 2576897 - RNA, 19 nt, Artificial Sequence
  Description of Artificial Sequence: Synthetic oligonucleotide
guauugaacgauacaucau

SEQ ID NO: 2576898 - RNA, 19 nt, Artificial Sequence
  Description of Artificial Sequence: Synthetic oligonucleotide
guggucauucuuaacuuau

SEQ ID NO: 2576899 - RNA, 19 nt, Artificial Sequence
  Description of Artificial Sequence: Synthetic oligonucleotide
ccgauucccuuacugucgc

SEQ ID NO: 2576900 - RNA, 19 nt, Artificial Sequence
  Description of Artificial Sequence: Synthetic oligonucleotide
caaacugcuugggacccga

SEQ ID NO: 2576901 - RNA, 19 nt, Artificial Sequence
  Description of Artificial Sequence: Synthetic oligonucleotide
aucgaugguugugcaucug

SEQ ID NO: 2576902 - RNA, 19 nt, Artificial Sequence
  Description of Artificial Sequence: Synthetic oligonucleotide
  modified_base (3)..(3): a, c, u, g, unknown or other
ccngguuugcaugaugaca

SEQ ID NO: 2576903 - RNA, 19 nt, Artificial Sequence
  Description of Artificial Sequence: Synthetic oligonucleotide
cuugaagguugugaaaauu

SEQ ID NO: 2576904 - RNA, 19 nt, Artificial Sequence
  Description of Artificial Sequence: Synthetic oligonucleotide
cugucgcaguccuuucuaa

SEQ ID NO: 2576905 - RNA, 19 nt, Artificial Sequence
  Description of Artificial Sequence: Synthetic oligonucleotide
aggcaucacccaaaaguua

SEQ ID NO: 2576906 - RNA, 19 nt, Artificial Sequence
  Description of Artificial Sequence: Synthetic oligonucleotide
ggauuucuugaagguugug

SEQ ID NO: 2576907 - RNA, 19 nt, Artificial Sequence
  Description of Artificial Sequence: Synthetic oligonucleotide
cuagaacagcaaucuguau

SEQ ID NO: 2576908 - RNA, 19 nt, Artificial Sequence
  Description of Artificial Sequence: Synthetic oligonucleotide
gugcgaguuggcuucuuau

SEQ ID NO: 2576909 - RNA, 19 nt, Artificial Sequence
  Description of Artificial Sequence: Synthetic oligonucleotide
gccaguaaguuucuagauu

SEQ ID NO: 2576910 - RNA, 19 nt, Artificial Sequence
  Description of Artificial Sequence: Synthetic oligonucleotide
cuugggacccgauucccuu

SEQ ID NO: 2576911 - RNA, 19 nt, Artificial Sequence
  Description of Artificial Sequence: Synthetic oligonucleotide
guccgcauaaauacacaau

SEQ ID NO: 2576912 - RNA, 19 nt, Artificial Sequence
  Description of Artificial Sequence: Synthetic oligonucleotide
cccaaaaguuacuuaucua

SEQ ID NO: 2576913 - RNA, 19 nt, Artificial Sequence
  Description of Artificial Sequence: Synthetic oligonucleotide
aaacugcuugggacccgau

SEQ ID NO: 2576914 - RNA, 19 nt, Artificial Sequence
  Description of Artificial Sequence: Synthetic oligonucleotide
ccuuucuaacugcuuggga

SEQ ID NO: 2576915 - RNA, 19 nt, Artificial Sequence
  Description of Artificial Sequence: Synthetic oligonucleotide
caauucaaguugccggauu

SEQ ID NO: 2576916 - RNA, 19 nt, Artificial Sequence
  Description of Artificial Sequence: Synthetic oligonucleotide
ccgcauaaauacacaaugu

SEQ ID NO: 2576917 - RNA, 19 nt, Artificial Sequence
  Description of Artificial Sequence: Synthetic oligonucleotide
gucucaugugggugucucu

SEQ ID NO: 2576918 - RNA, 19 nt, Artificial Sequence
  Description of Artificial Sequence: Synthetic oligonucleotide
cguaauugauccacuccaa

SEQ ID NO: 2576919 - RNA, 19 nt, Artificial Sequence
  Description of Artificial Sequence: Synthetic oligonucleotide
caucacccaaaaguuacuu

SEQ ID NO: 2576920 - RNA, 19 nt, Artificial Sequence
  Description of Artificial Sequence: Synthetic oligonucleotide
agcuuucaucagauuuaua

SEQ ID NO: 2576921 - RNA, 19 nt, Artificial Sequence
  Description of Artificial Sequence: Synthetic oligonucleotide
gagucuuguucggcguggu

SEQ ID NO: 2576922 - RNA, 19 nt, Artificial Sequence
  Description of Artificial Sequence: Synthetic oligonucleotide
gccaucagacugccaguaa

SEQ ID NO: 2576923 - RNA, 19 nt, Artificial Sequence
  Description of Artificial Sequence: Synthetic oligonucleotide
gcguggucauucuuaacuu

SEQ ID NO: 2576924 - RNA, 19 nt, Artificial Sequence
  Description of Artificial Sequence: Synthetic oligonucleotide
ggcugagagccaucagacu

SEQ ID NO: 2576925 - RNA, 19 nt, Artificial Sequence
  Description of Artificial Sequence: Synthetic oligonucleotide
guguagcuuucaucagauu

SEQ ID NO: 2576926 - RNA, 19 nt, Artificial Sequence
  Description of Artificial Sequence: Synthetic oligonucleotide
gguugugcaucuggggaau

SEQ ID NO: 2576927 - RNA, 19 nt, Artificial Sequence
  Description of Artificial Sequence: Synthetic oligonucleotide
gcaucacccaaaaguuacu

SEQ ID NO: 2576928 - RNA, 19 nt, Artificial Sequence
  Description of Artificial Sequence: Synthetic oligonucleotide
guucggcguggucauucuu

SEQ ID NO: 2576929 - RNA, 19 nt, Artificial Sequence
  Description of Artificial Sequence: Synthetic oligonucleotide
augugcgaguuggcuucuu

SEQ ID NO: 2576930 - RNA, 19 nt, Artificial Sequence
  Description of Artificial Sequence: Synthetic oligonucleotide
cuacucugacugagauuuu

SEQ ID NO: 2576931 - RNA, 19 nt, Artificial Sequence
  Description of Artificial Sequence: Synthetic oligonucleotide
cgaguuggcuucuuaugau

SEQ ID NO: 2576932 - RNA, 19 nt, Artificial Sequence
  Description of Artificial Sequence: Synthetic oligonucleotide
gccggauuucuugaagguu

SEQ ID NO: 2576933 - RNA, 19 nt, Artificial Sequence
  Description of Artificial Sequence: Synthetic oligonucleotide
cccuuacugucgcaguccu

SEQ ID NO: 2576934 - RNA, 19 nt, Artificial Sequence
  Description of Artificial Sequence: Synthetic oligonucleotide
gcaccaggaggagucuugu

SEQ ID NO: 2576935 - RNA, 19 nt, Artificial Sequence
  Description of Artificial Sequence: Synthetic oligonucleotide
cggauuucuugaagguugu

SEQ ID NO: 2576936 - RNA, 19 nt, Artificial Sequence
  Description of Artificial Sequence: Synthetic oligonucleotide
gcuugggacccgauucccu

SEQ ID NO: 2576937 - RNA, 19 nt, Artificial Sequence
  Description of Artificial Sequence: Synthetic oligonucleotide
guugugcaucuggggaauu

SEQ ID NO: 2576938 - RNA, 19 nt, Artificial Sequence
  Description of Artificial Sequence: Synthetic oligonucleotide
caccaggaggagucuuguu

SEQ ID NO: 2576939 - RNA, 19 nt, Artificial Sequence
  Description of Artificial Sequence: Synthetic oligonucleotide
cggcguggucauucuuaac

SEQ ID NO: 2576940 - RNA, 19 nt, Artificial Sequence
  Description of Artificial Sequence: Synthetic oligonucleotide
ccaauucaaguugccggau

SEQ ID NO: 2576941 - RNA, 19 nt, Artificial Sequence
  Description of Artificial Sequence: Synthetic oligonucleotide
gggacccgauucccuuacu

SEQ ID NO: 2576942 - RNA, 19 nt, Artificial Sequence
  Description of Artificial Sequence: Synthetic oligonucleotide
cuuguucggcguggucauu

SEQ ID NO: 2576943 - RNA, 19 nt, Artificial Sequence
  Description of Artificial Sequence: Synthetic oligonucleotide
aauaauuugaagcucuugg

SEQ ID NO: 2576944 - RNA, 19 nt, Artificial Sequence
  Description of Artificial Sequence: Synthetic oligonucleotide
uuggauaugacucuugagg

SEQ ID NO: 2576945 - RNA, 19 nt, Artificial Sequence
  Description of Artificial Sequence: Synthetic oligonucleotide
uguagugggacugagaucg

SEQ ID NO: 2576946 - RNA, 19 nt, Artificial Sequence
  Description of Artificial Sequence: Synthetic oligonucleotide
auaauuugaagcucuuggc

SEQ ID NO: 2576947 - RNA, 19 nt, Artificial Sequence
  Description of Artificial Sequence: Synthetic oligonucleotide
uuguaaauaauuugaagcu

SEQ ID NO: 2576948 - RNA, 19 nt, Artificial Sequence
  Description of Artificial Sequence: Synthetic oligonucleotide
uggauaugacucuugaggg

SEQ ID NO: 2576949 - RNA, 19 nt, Artificial Sequence
  Description of Artificial Sequence: Synthetic oligonucleotide
acagccacguauuucaggc

SEQ ID NO: 2576950 - RNA, 19 nt, Artificial Sequence
  Description of Artificial Sequence: Synthetic oligonucleotide
uguguagucauuucucagg

SEQ ID NO: 2576951 - RNA, 19 nt, Artificial Sequence
  Description of Artificial Sequence: Synthetic oligonucleotide
cuuggcuaaagauuuauug

SEQ ID NO: 2576952 - RNA, 19 nt, Artificial Sequence
  Description of Artificial Sequence: Synthetic oligonucleotide
aucgcgaucuucuugacag

SEQ ID NO: 2576953 - RNA, 19 nt, Artificial Sequence
  Description of Artificial Sequence: Synthetic oligonucleotide
acuccaugagccuucaugg

SEQ ID NO: 2576954 - RNA, 19 nt, Artificial Sequence
  Description of Artificial Sequence: Synthetic oligonucleotide
uuauugauccuucuaugug

SEQ ID NO: 2576955 - RNA, 19 nt, Artificial Sequence
  Description of Artificial Sequence: Synthetic oligonucleotide
uuuauugauccuucuaugu

SEQ ID NO: 2576956 - RNA, 19 nt, Artificial Sequence
  Description of Artificial Sequence: Synthetic oligonucleotide
uucuugacagccaugcugc

SEQ ID NO: 2576957 - RNA, 19 nt, Artificial Sequence
  Description of Artificial Sequence: Synthetic oligonucleotide
ucggacaucacuguagugg

SEQ ID NO: 2576958 - RNA, 19 nt, Artificial Sequence
  Description of Artificial Sequence: Synthetic oligonucleotide
ucuauguguagucauuucu

SEQ ID NO: 2576959 - RNA, 19 nt, Artificial Sequence
  Description of Artificial Sequence: Synthetic oligonucleotide
uuggcuaaagauuuauuga

SEQ ID NO: 2576960 - RNA, 19 nt, Artificial Sequence
  Description of Artificial Sequence: Synthetic oligonucleotide
aagaucgcgaucuucuuga

SEQ ID NO: 2576961 - RNA, 19 nt, Artificial Sequence
  Description of Artificial Sequence: Synthetic oligonucleotide
aauuugaagcucuuggcua

SEQ ID NO: 2576962 - RNA, 19 nt, Artificial Sequence
  Description of Artificial Sequence: Synthetic oligonucleotide
uauugauccuucuaugugu

SEQ ID NO: 2576963 - RNA, 19 nt, Artificial Sequence
  Description of Artificial Sequence: Synthetic oligonucleotide
auuuauugauccuucuaug

SEQ ID NO: 2576964 - RNA, 19 nt, Artificial Sequence
  Description of Artificial Sequence: Synthetic oligonucleotide
gauaugacucuugagggcc

SEQ ID NO: 2576965 - RNA, 19 nt, Artificial Sequence
  Description of Artificial Sequence: Synthetic oligonucleotide
cuugcgggaaucucgaacc

SEQ ID NO: 2576966 - RNA, 19 nt, Artificial Sequence
  Description of Artificial Sequence: Synthetic oligonucleotide
gcuaaagauuuauugaucc

SEQ ID NO: 2576967 - RNA, 19 nt, Artificial Sequence
  Description of Artificial Sequence: Synthetic oligonucleotide
auaaccugcuugcaccgcc

SEQ ID NO: 2576968 - RNA, 19 nt, Artificial Sequence
  Description of Artificial Sequence: Synthetic oligonucleotide
ucucccaccaccacgcggg

SEQ ID NO: 2576969 - RNA, 19 nt, Artificial Sequence
  Description of Artificial Sequence: Synthetic oligonucleotide
aagccauucucccaaccag

SEQ ID NO: 2576970 - RNA, 19 nt, Artificial Sequence
  Description of Artificial Sequence: Synthetic oligonucleotide
guagguguuguguccaucg

SEQ ID NO: 2576971 - RNA, 19 nt, Artificial Sequence
  Description of Artificial Sequence: Synthetic oligonucleotide
ucccagaguaggaaggccg

SEQ ID NO: 2576972 - RNA, 19 nt, Artificial Sequence
  Description of Artificial Sequence: Synthetic oligonucleotide
agcguggugagcccggucc

SEQ ID NO: 2576973 - RNA, 19 nt, Artificial Sequence
  Description of Artificial Sequence: Synthetic oligonucleotide
acuguagugggacugagau

SEQ ID NO: 2576974 - RNA, 19 nt, Artificial Sequence
  Description of Artificial Sequence: Synthetic oligonucleotide
uagucauuucucaggaagc

SEQ ID NO: 2576975 - RNA, 19 nt, Artificial Sequence
  Description of Artificial Sequence: Synthetic oligonucleotide
acgaugacagcauccugcc

SEQ ID NO: 2576976 - RNA, 19 nt, Artificial Sequence
  Description of Artificial Sequence: Synthetic oligonucleotide
aaauaauuugaagcucuug

SEQ ID NO: 2576977 - RNA, 19 nt, Artificial Sequence
  Description of Artificial Sequence: Synthetic oligonucleotide
uguuguguccaucguacug

SEQ ID NO: 2576978 - RNA, 19 nt, Artificial Sequence
  Description of Artificial Sequence: Synthetic oligonucleotide
cacgaugacagcauccugc

SEQ ID NO: 2576979 - RNA, 19 nt, Artificial Sequence
  Description of Artificial Sequence: Synthetic oligonucleotide
uguaaauaauuugaagcuc

SEQ ID NO: 2576980 - RNA, 19 nt, Artificial Sequence
  Description of Artificial Sequence: Synthetic oligonucleotide
ucucgaaccagcacuguca

SEQ ID NO: 2576981 - RNA, 19 nt, Artificial Sequence
  Description of Artificial Sequence: Synthetic oligonucleotide
guccuacucauacuggugg

SEQ ID NO: 2576982 - RNA, 19 nt, Artificial Sequence
  Description of Artificial Sequence: Synthetic oligonucleotide
agccacguauuucaggccg

SEQ ID NO: 2576983 - RNA, 19 nt, Artificial Sequence
  Description of Artificial Sequence: Synthetic oligonucleotide
uggcuaaagauuuauugau

SEQ ID NO: 2576984 - RNA, 19 nt, Artificial Sequence
  Description of Artificial Sequence: Synthetic oligonucleotide
guguccaucguacugguug

SEQ ID NO: 2576985 - RNA, 19 nt, Artificial Sequence
  Description of Artificial Sequence: Synthetic oligonucleotide
ugucacaauguuccgggug

SEQ ID NO: 2576986 - RNA, 19 nt, Artificial Sequence
  Description of Artificial Sequence: Synthetic oligonucleotide
uuggaugggucccagagua

SEQ ID NO: 2576987 - RNA, 19 nt, Artificial Sequence
  Description of Artificial Sequence: Synthetic oligonucleotide
uguccaucguacugguugg

SEQ ID NO: 2576988 - RNA, 19 nt, Artificial Sequence
  Description of Artificial Sequence: Synthetic oligonucleotide
guuguguccaucguacugg

SEQ ID NO: 2576989 - RNA, 19 nt, Artificial Sequence
  Description of Artificial Sequence: Synthetic oligonucleotide
gauuuauugauccuucuau

SEQ ID NO: 2576990 - RNA, 19 nt, Artificial Sequence
  Description of Artificial Sequence: Synthetic oligonucleotide
cuauguguagucauuucuc

SEQ ID NO: 2576991 - RNA, 19 nt, Artificial Sequence
  Description of Artificial Sequence: Synthetic oligonucleotide
uggugguaaggcaacggag

SEQ ID NO: 2576992 - RNA, 19 nt, Artificial Sequence
  Description of Artificial Sequence: Synthetic oligonucleotide
gucacaauguuccgggugc

SEQ ID NO: 2576993 - RNA, 19 nt, Artificial Sequence
  Description of Artificial Sequence: Synthetic oligonucleotide
acucauacuggugggaggg

SEQ ID NO: 2576994 - RNA, 19 nt, Artificial Sequence
  Description of Artificial Sequence: Synthetic oligonucleotide
agggguagguguugugucc

SEQ ID NO: 2576995 - RNA, 19 nt, Artificial Sequence
  Description of Artificial Sequence: Synthetic oligonucleotide
gaagaucgcgaucuucuug

SEQ ID NO: 2576996 - RNA, 19 nt, Artificial Sequence
  Description of Artificial Sequence: Synthetic oligonucleotide
uuggugguaaggcaacgga

SEQ ID NO: 2576997 - RNA, 19 nt, Artificial Sequence
  Description of Artificial Sequence: Synthetic oligonucleotide
cuguguaggcuccaguuag

SEQ ID NO: 2576998 - RNA, 19 nt, Artificial Sequence
  Description of Artificial Sequence: Synthetic oligonucleotide
ugaagcucuuggcuaaaga

SEQ ID NO: 2576999 - RNA, 19 nt, Artificial Sequence
  Description of Artificial Sequence: Synthetic oligonucleotide
ugaagugucccaagucaug

SEQ ID NO: 2577000 - RNA, 19 nt, Artificial Sequence
  Description of Artificial Sequence: Synthetic oligonucleotide
ugagaucguugccagugcc

SEQ ID NO: 2577001 - RNA, 19 nt, Artificial Sequence
  Description of Artificial Sequence: Synthetic oligonucleotide
gauccuucuauguguaguc

SEQ ID NO: 2577002 - RNA, 19 nt, Artificial Sequence
  Description of Artificial Sequence: Synthetic oligonucleotide
uguuuggauaugacucuug

SEQ ID NO: 2577003 - RNA, 19 nt, Artificial Sequence
  Description of Artificial Sequence: Synthetic oligonucleotide
uacucauacuggugggagg

SEQ ID NO: 2577004 - RNA, 19 nt, Artificial Sequence
  Description of Artificial Sequence: Synthetic oligonucleotide
uccuacucauacugguggg

SEQ ID NO: 2577005 - RNA, 19 nt, Artificial Sequence
  Description of Artificial Sequence: Synthetic oligonucleotide
uggcugauccccuaugugu

SEQ ID NO: 2577006 - RNA, 19 nt, Artificial Sequence
  Description of Artificial Sequence: Synthetic oligonucleotide
agaguaggaaggccgaggu

SEQ ID NO: 2577007 - RNA, 19 nt, Artificial Sequence
  Description of Artificial Sequence: Synthetic oligonucleotide
acguauuucaggccggacu

SEQ ID NO: 2577008 - RNA, 19 nt, Artificial Sequence
  Description of Artificial Sequence: Synthetic oligonucleotide
caccucauaaccugcuugc

SEQ ID NO: 2577009 - RNA, 19 nt, Artificial Sequence
  Description of Artificial Sequence: Synthetic oligonucleotide
auuugaagcucuuggcuaa

SEQ ID NO: 2577010 - RNA, 19 nt, Artificial Sequence
  Description of Artificial Sequence: Synthetic oligonucleotide
aucucgaaccagcacuguc

SEQ ID NO: 2577011 - RNA, 19 nt, Artificial Sequence
  Description of Artificial Sequence: Synthetic oligonucleotide
uaaauaauuugaagcucuu

SEQ ID NO: 2577012 - RNA, 19 nt, Artificial Sequence
  Description of Artificial Sequence: Synthetic oligonucleotide
gaagccauucucccaacca

SEQ ID NO: 2577013 - RNA, 19 nt, Artificial Sequence
  Description of Artificial Sequence: Synthetic oligonucleotide
uuucaggccggacuccuga

SEQ ID NO: 2577014 - RNA, 19 nt, Artificial Sequence
  Description of Artificial Sequence: Synthetic oligonucleotide
aauguuccgggugcccucg

SEQ ID NO: 2577015 - RNA, 19 nt, Artificial Sequence
  Description of Artificial Sequence: Synthetic oligonucleotide
aacggagcaugaagugucc

SEQ ID NO: 2577016 - RNA, 19 nt, Artificial Sequence
  Description of Artificial Sequence: Synthetic oligonucleotide
agauuuauugauccuucua

SEQ ID NO: 2577017 - RNA, 19 nt, Artificial Sequence
  Description of Artificial Sequence: Synthetic oligonucleotide
ucaucggucacguccugca

SEQ ID NO: 2577018 - RNA, 19 nt, Artificial Sequence
  Description of Artificial Sequence: Synthetic oligonucleotide
caacggagcaugaaguguc

SEQ ID NO: 2577019 - RNA, 19 nt, Artificial Sequence
  Description of Artificial Sequence: Synthetic oligonucleotide
ucccaagucauguuuggau

SEQ ID NO: 2577020 - RNA, 19 nt, Artificial Sequence
  Description of Artificial Sequence: Synthetic oligonucleotide
gaaucucgaaccagcacug

SEQ ID NO: 2577021 - RNA, 19 nt, Artificial Sequence
  Description of Artificial Sequence: Synthetic oligonucleotide
aucguugccagugcccagc

SEQ ID NO: 2577022 - RNA, 19 nt, Artificial Sequence
  Description of Artificial Sequence: Synthetic oligonucleotide
ugccgaacaucucccacca

SEQ ID NO: 2577023 - RNA, 19 nt, Artificial Sequence
  Description of Artificial Sequence: Synthetic oligonucleotide
ucggucacguccugcaggc

SEQ ID NO: 2577024 - RNA, 19 nt, Artificial Sequence
  Description of Artificial Sequence: Synthetic oligonucleotide
gaagcucuuggcuaaagau

SEQ ID NO: 2577025 - RNA, 19 nt, Artificial Sequence
  Description of Artificial Sequence: Synthetic oligonucleotide
ugggucccagaguaggaag

SEQ ID NO: 2577026 - RNA, 19 nt, Artificial Sequence
  Description of Artificial Sequence: Synthetic oligonucleotide
guguagucauuucucagga

SEQ ID NO: 2577027 - RNA, 19 nt, Artificial Sequence
  Description of Artificial Sequence: Synthetic oligonucleotide
uucuauguguagucauuuc

SEQ ID NO: 2577028 - RNA, 19 nt, Artificial Sequence
  Description of Artificial Sequence: Synthetic oligonucleotide
agugucccaagucauguuu

SEQ ID NO: 2577029 - RNA, 19 nt, Artificial Sequence
  Description of Artificial Sequence: Synthetic oligonucleotide
agucauguuuggauaugac

SEQ ID NO: 2577030 - RNA, 19 nt, Artificial Sequence
  Description of Artificial Sequence: Synthetic oligonucleotide
cugccgaacaucucccacc

SEQ ID NO: 2577031 - RNA, 19 nt, Artificial Sequence
  Description of Artificial Sequence: Synthetic oligonucleotide
guuggugguaaggcaacgg

SEQ ID NO: 2577032 - RNA, 19 nt, Artificial Sequence
  Description of Artificial Sequence: Synthetic oligonucleotide
ugacucuugagggcccucg

SEQ ID NO: 2577033 - RNA, 19 nt, Artificial Sequence
  Description of Artificial Sequence: Synthetic oligonucleotide
cuacucauacuggugggag

SEQ ID NO: 2577034 - RNA, 19 nt, Artificial Sequence
  Description of Artificial Sequence: Synthetic oligonucleotide
aguggcugauccccuaugu

SEQ ID NO: 2577035 - RNA, 19 nt, Artificial Sequence
  Description of Artificial Sequence: Synthetic oligonucleotide
ucuugacagccaugcugcg

SEQ ID NO: 2577036 - RNA, 19 nt, Artificial Sequence
  Description of Artificial Sequence: Synthetic oligonucleotide
caccuuaugcauccggaug

SEQ ID NO: 2577037 - RNA, 19 nt, Artificial Sequence
  Description of Artificial Sequence: Synthetic oligonucleotide
ugauccccuaugugugggg

SEQ ID NO: 2577038 - RNA, 19 nt, Artificial Sequence
  Description of Artificial Sequence: Synthetic oligonucleotide
aagcucuuggcuaaagauu

SEQ ID NO: 2577039 - RNA, 19 nt, Artificial Sequence
  Description of Artificial Sequence: Synthetic oligonucleotide
auaugacucuugagggccc

SEQ ID NO: 2577040 - RNA, 19 nt, Artificial Sequence
  Description of Artificial Sequence: Synthetic oligonucleotide
ggauaugacucuugagggc

SEQ ID NO: 2577041 - RNA, 19 nt, Artificial Sequence
  Description of Artificial Sequence: Synthetic oligonucleotide
uccggauguggucaucggu

SEQ ID NO: 2577042 - RNA, 19 nt, Artificial Sequence
  Description of Artificial Sequence: Synthetic oligonucleotide
ucaggccggacuccugaag

SEQ ID NO: 2577043 - RNA, 19 nt, Artificial Sequence
  Description of Artificial Sequence: Synthetic oligonucleotide
gguaaggcaacggagcaug

SEQ ID NO: 2577044 - RNA, 19 nt, Artificial Sequence
  Description of Artificial Sequence: Synthetic oligonucleotide
aucucccaccaccacgcgg

SEQ ID NO: 2577045 - RNA, 19 nt, Artificial Sequence
  Description of Artificial Sequence: Synthetic oligonucleotide
gcacugucaccucauaacc

SEQ ID NO: 2577046 - RNA, 19 nt, Artificial Sequence
  Description of Artificial Sequence: Synthetic oligonucleotide
cauccggauguggucaucg

SEQ ID NO: 2577047 - RNA, 19 nt, Artificial Sequence
  Description of Artificial Sequence: Synthetic oligonucleotide
ggugguaaggcaacggagc

SEQ ID NO: 2577048 - RNA, 19 nt, Artificial Sequence
  Description of Artificial Sequence: Synthetic oligonucleotide
caggccggacuccugaagc

SEQ ID NO: 2577049 - RNA, 19 nt, Artificial Sequence
  Description of Artificial Sequence: Synthetic oligonucleotide
ugguuggugguaaggcaac

SEQ ID NO: 2577050 - RNA, 19 nt, Artificial Sequence
  Description of Artificial Sequence: Synthetic oligonucleotide
uguguaggcuccaguuagu

SEQ ID NO: 2577051 - RNA, 19 nt, Artificial Sequence
  Description of Artificial Sequence: Synthetic oligonucleotide
agaucgcgaucuucuugac

SEQ ID NO: 2577052 - RNA, 19 nt, Artificial Sequence
  Description of Artificial Sequence: Synthetic oligonucleotide
cagaguaggaaggccgagg

SEQ ID NO: 2577053 - RNA, 19 nt, Artificial Sequence
  Description of Artificial Sequence: Synthetic oligonucleotide
gagggguagguguuguguc

SEQ ID NO: 2577054 - RNA, 19 nt, Artificial Sequence
  Description of Artificial Sequence: Synthetic oligonucleotide
cagcacgaugacagcaucc

SEQ ID NO: 2577055 - RNA, 19 nt, Artificial Sequence
  Description of Artificial Sequence: Synthetic oligonucleotide
uuaguggcugauccccuau

SEQ ID NO: 2577056 - RNA, 19 nt, Artificial Sequence
  Description of Artificial Sequence: Synthetic oligonucleotide
uguagucauuucucaggaa

SEQ ID NO: 2577057 - RNA, 19 nt, Artificial Sequence
  Description of Artificial Sequence: Synthetic oligonucleotide
gguguuguguccaucguac

SEQ ID NO: 2577058 - RNA, 19 nt, Artificial Sequence
  Description of Artificial Sequence: Synthetic oligonucleotide
cucgaaccagcacugucac

SEQ ID NO: 2577059 - RNA, 19 nt, Artificial Sequence
  Description of Artificial Sequence: Synthetic oligonucleotide
agcacgaugacagcauccu

SEQ ID NO: 2577060 - RNA, 19 nt, Artificial Sequence
  Description of Artificial Sequence: Synthetic oligonucleotide
cuccaugagccuucauggc

SEQ ID NO: 2577061 - RNA, 19 nt, Artificial Sequence
  Description of Artificial Sequence: Synthetic oligonucleotide
agccauucucccaaccagg

SEQ ID NO: 2577062 - RNA, 19 nt, Artificial Sequence
  Description of Artificial Sequence: Synthetic oligonucleotide
gagaucguugccagugccc

SEQ ID NO: 2577063 - RNA, 19 nt, Artificial Sequence
  Description of Artificial Sequence: Synthetic oligonucleotide
uggaugggucccagaguag

SEQ ID NO: 2577064 - RNA, 19 nt, Artificial Sequence
  Description of Artificial Sequence: Synthetic oligonucleotide
agaucguugccagugccca

SEQ ID NO: 2577065 - RNA, 19 nt, Artificial Sequence
  Description of Artificial Sequence: Synthetic oligonucleotide
agugggacugagaucguug

SEQ ID NO: 2577066 - RNA, 19 nt, Artificial Sequence
  Description of Artificial Sequence: Synthetic oligonucleotide
uaguggcugauccccuaug

SEQ ID NO: 2577067 - RNA, 19 nt, Artificial Sequence
  Description of Artificial Sequence: Synthetic oligonucleotide
caucacuguagugggacug

SEQ ID NO: 2577068 - RNA, 19 nt, Artificial Sequence
  Description of Artificial Sequence: Synthetic oligonucleotide
gugguaaggcaacggagca

SEQ ID NO: 2577069 - RNA, 19 nt, Artificial Sequence
  Description of Artificial Sequence: Synthetic oligonucleotide
uagguguuguguccaucgu

SEQ ID NO: 2577070 - RNA, 19 nt, Artificial Sequence
  Description of Artificial Sequence: Synthetic oligonucleotide
cugagaucguugccagugc

SEQ ID NO: 2577071 - RNA, 19 nt, Artificial Sequence
  Description of Artificial Sequence: Synthetic oligonucleotide
uaaccugcuugcaccgccu

SEQ ID NO: 2577072 - RNA, 19 nt, Artificial Sequence
  Description of Artificial Sequence: Synthetic oligonucleotide
gaguaggaaggccgaggug

SEQ ID NO: 2577073 - RNA, 19 nt, Artificial Sequence
  Description of Artificial Sequence: Synthetic oligonucleotide
uugcgggaaucucgaacca

SEQ ID NO: 2577074 - RNA, 19 nt, Artificial Sequence
  Description of Artificial Sequence: Synthetic oligonucleotide
uccaucguacugguuggug

SEQ ID NO: 2577075 - RNA, 19 nt, Artificial Sequence
  Description of Artificial Sequence: Synthetic oligonucleotide
ugagggcccucguccaucc

SEQ ID NO: 2577076 - RNA, 19 nt, Artificial Sequence
  Description of Artificial Sequence: Synthetic oligonucleotide
acggagcaugaaguguccc

SEQ ID NO: 2577077 - RNA, 19 nt, Artificial Sequence
  Description of Artificial Sequence: Synthetic oligonucleotide
ugcgggaaucucgaaccag

SEQ ID NO: 2577078 - RNA, 19 nt, Artificial Sequence
  Description of Artificial Sequence: Synthetic oligonucleotide
acaauguuccgggugcccu

SEQ ID NO: 2577079 - RNA, 19 nt, Artificial Sequence
  Description of Artificial Sequence: Synthetic oligonucleotide
gaucgcgaucuucuugaca

SEQ ID NO: 2577080 - RNA, 19 nt, Artificial Sequence
  Description of Artificial Sequence: Synthetic oligonucleotide
gugagcccgguccugccgg

SEQ ID NO: 2577081 - RNA, 19 nt, Artificial Sequence
  Description of Artificial Sequence: Synthetic oligonucleotide
gcagcuugcgggaaucucg

SEQ ID NO: 2577082 - RNA, 19 nt, Artificial Sequence
  Description of Artificial Sequence: Synthetic oligonucleotide
ccuuggaugggucccagag

SEQ ID NO: 2577083 - RNA, 19 nt, Artificial Sequence
  Description of Artificial Sequence: Synthetic oligonucleotide
gaagugucccaagucaugu

SEQ ID NO: 2577084 - RNA, 19 nt, Artificial Sequence
  Description of Artificial Sequence: Synthetic oligonucleotide
cugauccccuauguguggg

SEQ ID NO: 2577085 - RNA, 19 nt, Artificial Sequence
  Description of Artificial Sequence: Synthetic oligonucleotide
gaucguugccagugcccag

SEQ ID NO: 2577086 - RNA, 19 nt, Artificial Sequence
  Description of Artificial Sequence: Synthetic oligonucleotide
aagugucccaagucauguu

SEQ ID NO: 2577087 - RNA, 19 nt, Artificial Sequence
  Description of Artificial Sequence: Synthetic oligonucleotide
uuccgggugcccucggaca

SEQ ID NO: 2577088 - RNA, 19 nt, Artificial Sequence
  Description of Artificial Sequence: Synthetic oligonucleotide
caagucauguuuggauaug

SEQ ID NO: 2577089 - RNA, 19 nt, Artificial Sequence
  Description of Artificial Sequence: Synthetic oligonucleotide
ggcaacggagcaugaagug

SEQ ID NO: 2577090 - RNA, 19 nt, Artificial Sequence
  Description of Artificial Sequence: Synthetic oligonucleotide
aaucucgaaccagcacugu

SEQ ID NO: 2577091 - RNA, 19 nt, Artificial Sequence
  Description of Artificial Sequence: Synthetic oligonucleotide
ccgguggcgccgaagaucg

SEQ ID NO: 2577092 - RNA, 19 nt, Artificial Sequence
  Description of Artificial Sequence: Synthetic oligonucleotide
acguccugcaggcgugggg

SEQ ID NO: 2577093 - RNA, 19 nt, Artificial Sequence
  Description of Artificial Sequence: Synthetic oligonucleotide
aggcaacggagcaugaagu

SEQ ID NO: 2577094 - RNA, 19 nt, Artificial Sequence
  Description of Artificial Sequence: Synthetic oligonucleotide
agguguuguguccaucgua

SEQ ID NO: 2577095 - RNA, 19 nt, Artificial Sequence
  Description of Artificial Sequence: Synthetic oligonucleotide
gugcccucggacaucacug

SEQ ID NO: 2577096 - RNA, 19 nt, Artificial Sequence
  Description of Artificial Sequence: Synthetic oligonucleotide
uaaggcaacggagcaugaa

SEQ ID NO: 2577097 - RNA, 19 nt, Artificial Sequence
  Description of Artificial Sequence: Synthetic oligonucleotide
gugucccaagucauguuug

SEQ ID NO: 2577098 - RNA, 19 nt, Artificial Sequence
  Description of Artificial Sequence: Synthetic oligonucleotide
auugauccuucuaugugua

SEQ ID NO: 2577099 - RNA, 19 nt, Artificial Sequence
  Description of Artificial Sequence: Synthetic oligonucleotide
cuguagugggacugagauc

SEQ ID NO: 2577100 - RNA, 19 nt, Artificial Sequence
  Description of Artificial Sequence: Synthetic oligonucleotide
uccacgucagccgccugcc

SEQ ID NO: 2577101 - RNA, 19 nt, Artificial Sequence
  Description of Artificial Sequence: Synthetic oligonucleotide
guguaggcuccaguuagug

SEQ ID NO: 2577102 - RNA, 19 nt, Artificial Sequence
  Description of Artificial Sequence: Synthetic oligonucleotide
acgcgggcuggcuggggcc

SEQ ID NO: 2577103 - RNA, 19 nt, Artificial Sequence
  Description of Artificial Sequence: Synthetic oligonucleotide
aggguccuacucauacugg

SEQ ID NO: 2577104 - RNA, 19 nt, Artificial Sequence
  Description of Artificial Sequence: Synthetic oligonucleotide
agcccgguccugccggugg

SEQ ID NO: 2577105 - RNA, 19 nt, Artificial Sequence
  Description of Artificial Sequence: Synthetic oligonucleotide
gcugauccccuaugugugg

SEQ ID NO: 2577106 - RNA, 19 nt, Artificial Sequence
  Description of Artificial Sequence: Synthetic oligonucleotide
uaugacucuugagggcccu

SEQ ID NO: 2577107 - RNA, 19 nt, Artificial Sequence
  Description of Artificial Sequence: Synthetic oligonucleotide
guauuucaggccggacucc

SEQ ID NO: 2577108 - RNA, 19 nt, Artificial Sequence
  Description of Artificial Sequence: Synthetic oligonucleotide
cagccacguauuucaggcc

SEQ ID NO: 2577109 - RNA, 19 nt, Artificial Sequence
  Description of Artificial Sequence: Synthetic oligonucleotide
gcuugcgggaaucucgaac

SEQ ID NO: 2577110 - RNA, 19 nt, Artificial Sequence
  Description of Artificial Sequence: Synthetic oligonucleotide
ucgaaccagcacugucacc

SEQ ID NO: 2577111 - RNA, 19 nt, Artificial Sequence
  Description of Artificial Sequence: Synthetic oligonucleotide
uguuccgggugcccucgga

SEQ ID NO: 2577112 - RNA, 19 nt, Artificial Sequence
  Description of Artificial Sequence: Synthetic oligonucleotide
cugaaggcagcuugcggga

SEQ ID NO: 2577113 - RNA, 19 nt, Artificial Sequence
  Description of Artificial Sequence: Synthetic oligonucleotide
caauguuccgggugcccuc

SEQ ID NO: 2577114 - RNA, 19 nt, Artificial Sequence
  Description of Artificial Sequence: Synthetic oligonucleotide
ggcuaaagauuuauugauc

SEQ ID NO: 2577115 - RNA, 19 nt, Artificial Sequence
  Description of Artificial Sequence: Synthetic oligonucleotide
ucguugccagugcccagca

SEQ ID NO: 2577116 - RNA, 19 nt, Artificial Sequence
  Description of Artificial Sequence: Synthetic oligonucleotide
auccuucuauguguaguca

SEQ ID NO: 2577117 - RNA, 19 nt, Artificial Sequence
  Description of Artificial Sequence: Synthetic oligonucleotide
ucgcgaucuucuugacagc

SEQ ID NO: 2577118 - RNA, 19 nt, Artificial Sequence
  Description of Artificial Sequence: Synthetic oligonucleotide
ggcugucacaauguuccgg

SEQ ID NO: 2577119 - RNA, 19 nt, Artificial Sequence
  Description of Artificial Sequence: Synthetic oligonucleotide
uuugaagcucuuggcuaaa

SEQ ID NO: 2577120 - RNA, 19 nt, Artificial Sequence
  Description of Artificial Sequence: Synthetic oligonucleotide
ucguacugguuggugguaa

SEQ ID NO: 2577121 - RNA, 19 nt, Artificial Sequence
  Description of Artificial Sequence: Synthetic oligonucleotide
ugcccucggacaucacugu

SEQ ID NO: 2577122 - RNA, 19 nt, Artificial Sequence
  Description of Artificial Sequence: Synthetic oligonucleotide
guuccgggugcccucggac

SEQ ID NO: 2577123 - RNA, 19 nt, Artificial Sequence
  Description of Artificial Sequence: Synthetic oligonucleotide
ggaagccauucucccaacc

SEQ ID NO: 2577124 - RNA, 19 nt, Artificial Sequence
  Description of Artificial Sequence: Synthetic oligonucleotide
cucggacaucacuguagug

SEQ ID NO: 2577125 - RNA, 19 nt, Artificial Sequence
  Description of Artificial Sequence: Synthetic oligonucleotide
cacaauguuccgggugccc

SEQ ID NO: 2577126 - RNA, 19 nt, Artificial Sequence
  Description of Artificial Sequence: Synthetic oligonucleotide
cccucguccauccaggguc

SEQ ID NO: 2577127 - RNA, 19 nt, Artificial Sequence
  Description of Artificial Sequence: Synthetic oligonucleotide
cucauacuggugggagggg

SEQ ID NO: 2577128 - RNA, 19 nt, Artificial Sequence
  Description of Artificial Sequence: Synthetic oligonucleotide
ggcugauccccuaugugug

SEQ ID NO: 2577129 - RNA, 19 nt, Artificial Sequence
  Description of Artificial Sequence: Synthetic oligonucleotide
ccggauguggucaucgguc

SEQ ID NO: 2577130 - RNA, 19 nt, Artificial Sequence
  Description of Artificial Sequence: Synthetic oligonucleotide
acggccuuguccacgucag

SEQ ID NO: 2577131 - RNA, 19 nt, Artificial Sequence
  Description of Artificial Sequence: Synthetic oligonucleotide
ucacguccugcaggcgugg

SEQ ID NO: 2577132 - RNA, 19 nt, Artificial Sequence
  Description of Artificial Sequence: Synthetic oligonucleotide
uuguccacgucagccgccu

SEQ ID NO: 2577133 - RNA, 19 nt, Artificial Sequence
  Description of Artificial Sequence: Synthetic oligonucleotide
ggaaggccgaggugcaggc

SEQ ID NO: 2577134 - RNA, 19 nt, Artificial Sequence
  Description of Artificial Sequence: Synthetic oligonucleotide
gguuggugguaaggcaacg

SEQ ID NO: 2577135 - RNA, 19 nt, Artificial Sequence
  Description of Artificial Sequence: Synthetic oligonucleotide
aguuaguggcugauccccu

SEQ ID NO: 2577136 - RNA, 19 nt, Artificial Sequence
  Description of Artificial Sequence: Synthetic oligonucleotide
ugguaaggcaacggagcau

SEQ ID NO: 2577137 - RNA, 19 nt, Artificial Sequence
  Description of Artificial Sequence: Synthetic oligonucleotide
auguuuggauaugacucuu

SEQ ID NO: 2577138 - RNA, 19 nt, Artificial Sequence
  Description of Artificial Sequence: Synthetic oligonucleotide
ggugagcccgguccugccg

SEQ ID NO: 2577139 - RNA, 19 nt, Artificial Sequence
  Description of Artificial Sequence: Synthetic oligonucleotide
cccucggacaucacuguag

SEQ ID NO: 2577140 - RNA, 19 nt, Artificial Sequence
  Description of Artificial Sequence: Synthetic oligonucleotide
uucaggccggacuccugaa

SEQ ID NO: 2577141 - RNA, 19 nt, Artificial Sequence
  Description of Artificial Sequence: Synthetic oligonucleotide
uccugcccggccacggccu

SEQ ID NO: 2577142 - RNA, 19 nt, Artificial Sequence
  Description of Artificial Sequence: Synthetic oligonucleotide
gguccuacucauacuggug

SEQ ID NO: 2577143 - RNA, 19 nt, Artificial Sequence
  Description of Artificial Sequence: Synthetic oligonucleotide
gcaggccacgaccuugucc

SEQ ID NO: 2577144 - RNA, 19 nt, Artificial Sequence
  Description of Artificial Sequence: Synthetic oligonucleotide
uaggaaggccgaggugcag

SEQ ID NO: 2577145 - RNA, 19 nt, Artificial Sequence
  Description of Artificial Sequence: Synthetic oligonucleotide
ugcauccggauguggucau

SEQ ID NO: 2577146 - RNA, 19 nt, Artificial Sequence
  Description of Artificial Sequence: Synthetic oligonucleotide
gucaucggucacguccugc

SEQ ID NO: 2577147 - RNA, 19 nt, Artificial Sequence
  Description of Artificial Sequence: Synthetic oligonucleotide
gucacguccugcaggcgug

SEQ ID NO: 2577148 - RNA, 19 nt, Artificial Sequence
  Description of Artificial Sequence: Synthetic oligonucleotide
cagcuugcgggaaucucga

SEQ ID NO: 2577149 - RNA, 19 nt, Artificial Sequence
  Description of Artificial Sequence: Synthetic oligonucleotide
caucguacugguugguggu

SEQ ID NO: 2577150 - RNA, 19 nt, Artificial Sequence
  Description of Artificial Sequence: Synthetic oligonucleotide
guuaguggcugauccccua

SEQ ID NO: 2577151 - RNA, 19 nt, Artificial Sequence
  Description of Artificial Sequence: Synthetic oligonucleotide
gcgggaaucucgaaccagc

SEQ ID NO: 2577152 - RNA, 19 nt, Artificial Sequence
  Description of Artificial Sequence: Synthetic oligonucleotide
ggugcaggccacgaccuug

SEQ ID NO: 2577153 - RNA, 19 nt, Artificial Sequence
  Description of Artificial Sequence: Synthetic oligonucleotide
cauacuggugggaggggua

SEQ ID NO: 2577154 - RNA, 19 nt, Artificial Sequence
  Description of Artificial Sequence: Synthetic oligonucleotide
cacgaccuuguccacucca

SEQ ID NO: 2577155 - RNA, 19 nt, Artificial Sequence
  Description of Artificial Sequence: Synthetic oligonucleotide
cuugcaccgccugcgccag

SEQ ID NO: 2577156 - RNA, 19 nt, Artificial Sequence
  Description of Artificial Sequence: Synthetic oligonucleotide
cacuguagugggacugaga

SEQ ID NO: 2577157 - RNA, 19 nt, Artificial Sequence
  Description of Artificial Sequence: Synthetic oligonucleotide
acgucagccgccugccgaa

SEQ ID NO: 2577158 - RNA, 19 nt, Artificial Sequence
  Description of Artificial Sequence: Synthetic oligonucleotide
aggccacgaccuuguccac

SEQ ID NO: 2577159 - RNA, 19 nt, Artificial Sequence
  Description of Artificial Sequence: Synthetic oligonucleotide
cacgucagccgccugccga

SEQ ID NO: 2577160 - RNA, 19 nt, Artificial Sequence
  Description of Artificial Sequence: Synthetic oligonucleotide
auguuccgggugcccucgg

SEQ ID NO: 2577161 - RNA, 19 nt, Artificial Sequence
  Description of Artificial Sequence: Synthetic oligonucleotide
cauccugcccggccacggc

SEQ ID NO: 2577162 - RNA, 19 nt, Artificial Sequence
  Description of Artificial Sequence: Synthetic oligonucleotide
uucucccaaccagggccag

SEQ ID NO: 2577163 - RNA, 19 nt, Artificial Sequence
  Description of Artificial Sequence: Synthetic oligonucleotide
auuucaggccggacuccug

SEQ ID NO: 2577164 - RNA, 19 nt, Artificial Sequence
  Description of Artificial Sequence: Synthetic oligonucleotide
accuuggaugggucccaga

SEQ ID NO: 2577165 - RNA, 19 nt, Artificial Sequence
  Description of Artificial Sequence: Synthetic oligonucleotide
cacguauuucaggccggac

SEQ ID NO: 2577166 - RNA, 19 nt, Artificial Sequence
  Description of Artificial Sequence: Synthetic oligonucleotide
uguggucaucggucacguc

SEQ ID NO: 2577167 - RNA, 19 nt, Artificial Sequence
  Description of Artificial Sequence: Synthetic oligonucleotide
ccauucucccaaccagggc

SEQ ID NO: 2577168 - RNA, 19 nt, Artificial Sequence
  Description of Artificial Sequence: Synthetic oligonucleotide
cugccgguggcgccgaaga

SEQ ID NO: 2577169 - RNA, 19 nt, Artificial Sequence
  Description of Artificial Sequence: Synthetic oligonucleotide
uagugggacugagaucguu

SEQ ID NO: 2577170 - RNA, 19 nt, Artificial Sequence
  Description of Artificial Sequence: Synthetic oligonucleotide
ucguccauccagggucacu

SEQ ID NO: 2577171 - RNA, 19 nt, Artificial Sequence
  Description of Artificial Sequence: Synthetic oligonucleotide
cuucuauguguagucauuu

SEQ ID NO: 2577172 - RNA, 19 nt, Artificial Sequence
  Description of Artificial Sequence: Synthetic oligonucleotide
gccacguauuucaggccgg

SEQ ID NO: 2577173 - RNA, 19 nt, Artificial Sequence
  Description of Artificial Sequence: Synthetic oligonucleotide
ccccucugaaggcagcuug

SEQ ID NO: 2577174 - RNA, 19 nt, Artificial Sequence
  Description of Artificial Sequence: Synthetic oligonucleotide
agccgccugccgaacaucu

SEQ ID NO: 2577175 - RNA, 19 nt, Artificial Sequence
  Description of Artificial Sequence: Synthetic oligonucleotide
aggccgaggugcaggccac

SEQ ID NO: 2577176 - RNA, 19 nt, Artificial Sequence
  Description of Artificial Sequence: Synthetic oligonucleotide
acgaccuuguccacuccau

SEQ ID NO: 2577177 - RNA, 19 nt, Artificial Sequence
  Description of Artificial Sequence: Synthetic oligonucleotide
guaaggcaacggagcauga

SEQ ID NO: 2577178 - RNA, 19 nt, Artificial Sequence
  Description of Artificial Sequence: Synthetic oligonucleotide
ccugccgaacaucucccac

SEQ ID NO: 2577179 - RNA, 19 nt, Artificial Sequence
  Description of Artificial Sequence: Synthetic oligonucleotide
cccaagucauguuuggaua

SEQ ID NO: 2577180 - RNA, 19 nt, Artificial Sequence
  Description of Artificial Sequence: Synthetic oligonucleotide
ggcccucguccauccaggg

SEQ ID NO: 2577181 - RNA, 19 nt, Artificial Sequence
  Description of Artificial Sequence: Synthetic oligonucleotide
caccgccugcgccagcgug

SEQ ID NO: 2577182 - RNA, 19 nt, Artificial Sequence
  Description of Artificial Sequence: Synthetic oligonucleotide
ugagcccgguccugccggu

SEQ ID NO: 2577183 - RNA, 19 nt, Artificial Sequence
  Description of Artificial Sequence: Synthetic oligonucleotide
cgcgaucuucuugacagcc

SEQ ID NO: 2577184 - RNA, 19 nt, Artificial Sequence
  Description of Artificial Sequence: Synthetic oligonucleotide
cagggccaggguccuacuc

SEQ ID NO: 2577185 - RNA, 19 nt, Artificial Sequence
  Description of Artificial Sequence: Synthetic oligonucleotide
gcagcacgaugacagcauc

SEQ ID NO: 2577186 - RNA, 19 nt, Artificial Sequence
  Description of Artificial Sequence: Synthetic oligonucleotide
ggguccuacucauacuggu

SEQ ID NO: 2577187 - RNA, 19 nt, Artificial Sequence
  Description of Artificial Sequence: Synthetic oligonucleotide
gacucuugagggcccucgu

SEQ ID NO: 2577188 - RNA, 19 nt, Artificial Sequence
  Description of Artificial Sequence: Synthetic oligonucleotide
ccgaagaucgcgaucuucu

SEQ ID NO: 2577189 - RNA, 19 nt, Artificial Sequence
  Description of Artificial Sequence: Synthetic oligonucleotide
gggcccucguccauccagg

SEQ ID NO: 2577190 - RNA, 19 nt, Artificial Sequence
  Description of Artificial Sequence: Synthetic oligonucleotide
ggucacguccugcaggcgu

SEQ ID NO: 2577191 - RNA, 19 nt, Artificial Sequence
  Description of Artificial Sequence: Synthetic oligonucleotide
gucagccgccugccgaaca

SEQ ID NO: 2577192 - RNA, 19 nt, Artificial Sequence
  Description of Artificial Sequence: Synthetic oligonucleotide
agcuugcgggaaucucgaa

SEQ ID NO: 2577193 - RNA, 19 nt, Artificial Sequence
  Description of Artificial Sequence: Synthetic oligonucleotide
guguuguguccaucguacu

SEQ ID NO: 2577194 - RNA, 19 nt, Artificial Sequence
  Description of Artificial Sequence: Synthetic oligonucleotide
gacugagaucguugccagu

SEQ ID NO: 2577195 - RNA, 19 nt, Artificial Sequence
  Description of Artificial Sequence: Synthetic oligonucleotide
uggcgccgaagaucgcgau

SEQ ID NO: 2577196 - RNA, 19 nt, Artificial Sequence
  Description of Artificial Sequence: Synthetic oligonucleotide
aucguacugguugguggua

SEQ ID NO: 2577197 - RNA, 19 nt, Artificial Sequence
  Description of Artificial Sequence: Synthetic oligonucleotide
cucccaccaccacgcgggc

SEQ ID NO: 2577198 - RNA, 19 nt, Artificial Sequence
  Description of Artificial Sequence: Synthetic oligonucleotide
gggguagguguugugucca

SEQ ID NO: 2577199 - RNA, 19 nt, Artificial Sequence
  Description of Artificial Sequence: Synthetic oligonucleotide
cacguccugcaggcguggg

SEQ ID NO: 2577200 - RNA, 19 nt, Artificial Sequence
  Description of Artificial Sequence: Synthetic oligonucleotide
ugcccggccacggccuugu

SEQ ID NO: 2577201 - RNA, 19 nt, Artificial Sequence
  Description of Artificial Sequence: Synthetic oligonucleotide
ggugcccucggacaucacu

SEQ ID NO: 2577202 - RNA, 19 nt, Artificial Sequence
  Description of Artificial Sequence: Synthetic oligonucleotide
guggcgccgaagaucgcga

SEQ ID NO: 2577203 - RNA, 19 nt, Artificial Sequence
  Description of Artificial Sequence: Synthetic oligonucleotide
gccggacuccugaagcacc

SEQ ID NO: 2577204 - RNA, 19 nt, Artificial Sequence
  Description of Artificial Sequence: Synthetic oligonucleotide
gccugcgccagcgugguga

SEQ ID NO: 2577205 - RNA, 19 nt, Artificial Sequence
  Description of Artificial Sequence: Synthetic oligonucleotide
ccuuaugcauccggaugug

SEQ ID NO: 2577206 - RNA, 19 nt, Artificial Sequence
  Description of Artificial Sequence: Synthetic oligonucleotide
gcaacggagcaugaagugu

SEQ ID NO: 2577207 - RNA, 19 nt, Artificial Sequence
  Description of Artificial Sequence: Synthetic oligonucleotide
gggcaucacagccacguau

SEQ ID NO: 2577208 - RNA, 19 nt, Artificial Sequence
  Description of Artificial Sequence: Synthetic oligonucleotide
ccaagucauguuuggauau

SEQ ID NO: 2577209 - RNA, 19 nt, Artificial Sequence
  Description of Artificial Sequence: Synthetic oligonucleotide
caugagccuucauggcugu

SEQ ID NO: 2577210 - RNA, 19 nt, Artificial Sequence
  Description of Artificial Sequence: Synthetic oligonucleotide
ggccacggccuuguccacg

SEQ ID NO: 2577211 - RNA, 19 nt, Artificial Sequence
  Description of Artificial Sequence: Synthetic oligonucleotide
cauuucucaggaagccauu

SEQ ID NO: 2577212 - RNA, 19 nt, Artificial Sequence
  Description of Artificial Sequence: Synthetic oligonucleotide
ggcgccgaagaucgcgauc

SEQ ID NO: 2577213 - RNA, 19 nt, Artificial Sequence
  Description of Artificial Sequence: Synthetic oligonucleotide
aggugcaggccacgaccuu

SEQ ID NO: 2577214 - RNA, 19 nt, Artificial Sequence
  Description of Artificial Sequence: Synthetic oligonucleotide
ggucaucggucacguccug

SEQ ID NO: 2577215 - RNA, 19 nt, Artificial Sequence
  Description of Artificial Sequence: Synthetic oligonucleotide
gucaccucauaaccugcuu

SEQ ID NO: 2577216 - RNA, 19 nt, Artificial Sequence
  Description of Artificial Sequence: Synthetic oligonucleotide
gccgaagaucgcgaucuuc

SEQ ID NO: 2577217 - RNA, 19 nt, Artificial Sequence
  Description of Artificial Sequence: Synthetic oligonucleotide
cccggccacggccuugucc

SEQ ID NO: 2577218 - RNA, 19 nt, Artificial Sequence
  Description of Artificial Sequence: Synthetic oligonucleotide
ccugcgccagcguggugag

SEQ ID NO: 2577219 - RNA, 19 nt, Artificial Sequence
  Description of Artificial Sequence: Synthetic oligonucleotide
gacagccaugcugcggggu

SEQ ID NO: 2577220 - RNA, 19 nt, Artificial Sequence
  Description of Artificial Sequence: Synthetic oligonucleotide
ccuacucauacugguggga

SEQ ID NO: 2577221 - RNA, 19 nt, Artificial Sequence
  Description of Artificial Sequence: Synthetic oligonucleotide
gccagcguggugagcccgg

SEQ ID NO: 2577222 - RNA, 19 nt, Artificial Sequence
  Description of Artificial Sequence: Synthetic oligonucleotide
cagcguggugagcccgguc

SEQ ID NO: 2577223 - RNA, 19 nt, Artificial Sequence
  Description of Artificial Sequence: Synthetic oligonucleotide
gcaccuuaugcauccggau

SEQ ID NO: 2577224 - RNA, 19 nt, Artificial Sequence
  Description of Artificial Sequence: Synthetic oligonucleotide
cggagcaugaaguguccca

SEQ ID NO: 2577225 - RNA, 19 nt, Artificial Sequence
  Description of Artificial Sequence: Synthetic oligonucleotide
cgccugccgaacaucuccc

SEQ ID NO: 2577226 - RNA, 19 nt, Artificial Sequence
  Description of Artificial Sequence: Synthetic oligonucleotide
gagcccgguccugccggug

SEQ ID NO: 2577227 - RNA, 19 nt, Artificial Sequence
  Description of Artificial Sequence: Synthetic oligonucleotide
cucguccauccagggucac

SEQ ID NO: 2577228 - RNA, 19 nt, Artificial Sequence
  Description of Artificial Sequence: Synthetic oligonucleotide
ggcaucacagccacguauu

SEQ ID NO: 2577229 - RNA, 19 nt, Artificial Sequence
  Description of Artificial Sequence: Synthetic oligonucleotide
ccgaggugcaggccacgac

SEQ ID NO: 2577230 - RNA, 19 nt, Artificial Sequence
  Description of Artificial Sequence: Synthetic oligonucleotide
cgggaaucucgaaccagca

SEQ ID NO: 2577231 - RNA, 19 nt, Artificial Sequence
  Description of Artificial Sequence: Synthetic oligonucleotide
gccugccgaacaucuccca

SEQ ID NO: 2577232 - RNA, 19 nt, Artificial Sequence
  Description of Artificial Sequence: Synthetic oligonucleotide
cuugagggcccucguccau

SEQ ID NO: 2577233 - RNA, 19 nt, Artificial Sequence
  Description of Artificial Sequence: Synthetic oligonucleotide
ccacgaccuuguccacucc

SEQ ID NO: 2577234 - RNA, 19 nt, Artificial Sequence
  Description of Artificial Sequence: Synthetic oligonucleotide
ccacgucagccgccugccg

SEQ ID NO: 2577235 - RNA, 19 nt, Artificial Sequence
  Description of Artificial Sequence: Synthetic oligonucleotide
ggucacuguguaggcucca

SEQ ID NO: 2577236 - RNA, 19 nt, Artificial Sequence
  Description of Artificial Sequence: Synthetic oligonucleotide
gcgccagcguggugagccc

SEQ ID NO: 2577237 - RNA, 19 nt, Artificial Sequence
  Description of Artificial Sequence: Synthetic oligonucleotide
gggccaggguccuacucau

SEQ ID NO: 2577238 - RNA, 19 nt, Artificial Sequence
  Description of Artificial Sequence: Synthetic oligonucleotide
guccaucguacugguuggu

SEQ ID NO: 2577239 - RNA, 19 nt, Artificial Sequence
  Description of Artificial Sequence: Synthetic oligonucleotide
cugcgccagcguggugagc

SEQ ID NO: 2577240 - RNA, 19 nt, Artificial Sequence
  Description of Artificial Sequence: Synthetic oligonucleotide
guagugggacugagaucgu

SEQ ID NO: 2577241 - RNA, 19 nt, Artificial Sequence
  Description of Artificial Sequence: Synthetic oligonucleotide
ccugccgguggcgccgaag

SEQ ID NO: 2577242 - RNA, 19 nt, Artificial Sequence
  Description of Artificial Sequence: Synthetic oligonucleotide
gcccucggacaucacugua

SEQ ID NO: 2577243 - RNA, 19 nt, Artificial Sequence
  Description of Artificial Sequence: Synthetic oligonucleotide
gccgaggugcaggccacga

SEQ ID NO: 2577244 - RNA, 19 nt, Artificial Sequence
  Description of Artificial Sequence: Synthetic oligonucleotide
ccgguccugccgguggcgc

SEQ ID NO: 2577245 - RNA, 19 nt, Artificial Sequence
  Description of Artificial Sequence: Synthetic oligonucleotide
ccacguauuucaggccgga

SEQ ID NO: 2577246 - RNA, 19 nt, Artificial Sequence
  Description of Artificial Sequence: Synthetic oligonucleotide
ccaggguccuacucauacu

SEQ ID NO: 2577247 - RNA, 19 nt, Artificial Sequence
  Description of Artificial Sequence: Synthetic oligonucleotide
gcauccggauguggucauc

SEQ ID NO: 2577248 - RNA, 19 nt, Artificial Sequence
  Description of Artificial Sequence: Synthetic oligonucleotide
cgguccugccgguggcgcc

SEQ ID NO: 2577249 - RNA, 19 nt, Artificial Sequence
  Description of Artificial Sequence: Synthetic oligonucleotide
gcuccaguuaguggcugau

SEQ ID NO: 2577250 - RNA, 19 nt, Artificial Sequence
  Description of Artificial Sequence: Synthetic oligonucleotide
gcccucguccauccagggu

SEQ ID NO: 2577251 - RNA, 19 nt, Artificial Sequence
  Description of Artificial Sequence: Synthetic oligonucleotide
cguggugagcccgguccug

SEQ ID NO: 2577252 - RNA, 19 nt, Artificial Sequence
  Description of Artificial Sequence: Synthetic oligonucleotide
guccugccgguggcgccga

SEQ ID NO: 2577253 - RNA, 19 nt, Artificial Sequence
  Description of Artificial Sequence: Synthetic oligonucleotide
gccgccugccgaacaucuc

SEQ ID NO: 2577254 - RNA, 19 nt, Artificial Sequence
  Description of Artificial Sequence: Synthetic oligonucleotide
cgcgggcuggcuggggccc

SEQ ID NO: 2577255 - RNA, 19 nt, Artificial Sequence
  Description of Artificial Sequence: Synthetic oligonucleotide
ccacgcgggcuggcugggg

SEQ ID NO: 2577256 - RNA, 19 nt, Artificial Sequence
  Description of Artificial Sequence: Synthetic oligonucleotide
cggucacguccugcaggcg

SEQ ID NO: 2577257 - RNA, 19 nt, Artificial Sequence
  Description of Artificial Sequence: Synthetic oligonucleotide
cgaagaucgcgaucuucuu

SEQ ID NO: 2577258 - RNA, 19 nt, Artificial Sequence
  Description of Artificial Sequence: Synthetic oligonucleotide
ccgggugcccucggacauc

SEQ ID NO: 2577259 - RNA, 19 nt, Artificial Sequence
  Description of Artificial Sequence: Synthetic oligonucleotide
ggccaggguccuacucaua

SEQ ID NO: 2577260 - RNA, 19 nt, Artificial Sequence
  Description of Artificial Sequence: Synthetic oligonucleotide
cgguggcgccgaagaucgc

SEQ ID NO: 2577261 - RNA, 19 nt, Artificial Sequence
  Description of Artificial Sequence: Synthetic oligonucleotide
cggccacggccuuguccac

SEQ ID NO: 2577262 - RNA, 19 nt, Artificial Sequence
  Description of Artificial Sequence: Synthetic oligonucleotide
cagugcccagcagcacgau

SEQ ID NO: 2577263 - RNA, 19 nt, Artificial Sequence
  Description of Artificial Sequence: Synthetic oligonucleotide
gccccucugaaggcagcuu

SEQ ID NO: 2577264 - RNA, 19 nt, Artificial Sequence
  Description of Artificial Sequence: Synthetic oligonucleotide
gcccggccacggccuuguc

SEQ ID NO: 2577265 - RNA, 19 nt, Artificial Sequence
  Description of Artificial Sequence: Synthetic oligonucleotide
cgccugcgccagcguggug

SEQ ID NO: 2577266 - RNA, 19 nt, Artificial Sequence
  Description of Artificial Sequence: Synthetic oligonucleotide
cgccgaagaucgcgaucuu

SEQ ID NO: 2577267 - RNA, 19 nt, Artificial Sequence
  Description of Artificial Sequence: Synthetic oligonucleotide
aauguuccaaaccaaauac

SEQ ID NO: 2577268 - RNA, 19 nt, Artificial Sequence
  Description of Artificial Sequence: Synthetic oligonucleotide
aaagggaugacauucacuc

SEQ ID NO: 2577269 - RNA, 19 nt, Artificial Sequence
  Description of Artificial Sequence: Synthetic oligonucleotide
aaauacuucacaguaaagg

SEQ ID NO: 2577270 - RNA, 19 nt, Artificial Sequence
  Description of Artificial Sequence: Synthetic oligonucleotide
accagaaguuauuagaugc

SEQ ID NO: 2577271 - RNA, 19 nt, Artificial Sequence
  Description of Artificial Sequence: Synthetic oligonucleotide
aauaccagaaguuauuaga

SEQ ID NO: 2577272 - RNA, 19 nt, Artificial Sequence
  Description of Artificial Sequence: Synthetic oligonucleotide
aaaaguuaaauaaggcacc

SEQ ID NO: 2577273 - RNA, 19 nt, Artificial Sequence
  Description of Artificial Sequence: Synthetic oligonucleotide
aguaaaauguuccaaacca

SEQ ID NO: 2577274 - RNA, 19 nt, Artificial Sequence
  Description of Artificial Sequence: Synthetic oligonucleotide
uacuucacaguaaaggacg

SEQ ID NO: 2577275 - RNA, 19 nt, Artificial Sequence
  Description of Artificial Sequence: Synthetic oligonucleotide
gaaguuauuagaugcacag

SEQ ID NO: 2577276 - RNA, 19 nt, Artificial Sequence
  Description of Artificial Sequence: Synthetic oligonucleotide
aauacuccuugacaggugg

SEQ ID NO: 2577277 - RNA, 19 nt, Artificial Sequence
  Description of Artificial Sequence: Synthetic oligonucleotide
ucuuaaacauggcauaugc

SEQ ID NO: 2577278 - RNA, 19 nt, Artificial Sequence
  Description of Artificial Sequence: Synthetic oligonucleotide
auuaagacuuuccauauug

SEQ ID NO: 2577279 - RNA, 19 nt, Artificial Sequence
  Description of Artificial Sequence: Synthetic oligonucleotide
aaaguuaaauaaggcaccc

SEQ ID NO: 2577280 - RNA, 19 nt, Artificial Sequence
  Description of Artificial Sequence: Synthetic oligonucleotide
ugugguuccaagaaugucc

SEQ ID NO: 2577281 - RNA, 19 nt, Artificial Sequence
  Description of Artificial Sequence: Synthetic oligonucleotide
aagucuauccuucgucucc

SEQ ID NO: 2577282 - RNA, 19 nt, Artificial Sequence
  Description of Artificial Sequence: Synthetic oligonucleotide
aguuauuagaugcacagga

SEQ ID NO: 2577283 - RNA, 19 nt, Artificial Sequence
  Description of Artificial Sequence: Synthetic oligonucleotide
aucuaauagauuccuuugc

SEQ ID NO: 2577284 - RNA, 19 nt, Artificial Sequence
  Description of Artificial Sequence: Synthetic oligonucleotide
uguuccaaaccaaauacca

SEQ ID NO: 2577285 - RNA, 19 nt, Artificial Sequence
  Description of Artificial Sequence: Synthetic oligonucleotide
uccaagaauguccugagug

SEQ ID NO: 2577286 - RNA, 19 nt, Artificial Sequence
  Description of Artificial Sequence: Synthetic oligonucleotide
gauuccuuugcuuugcaag

SEQ ID NO: 2577287 - RNA, 19 nt, Artificial Sequence
  Description of Artificial Sequence: Synthetic oligonucleotide
auugucuaaacccagcuga

SEQ ID NO: 2577288 - RNA, 19 nt, Artificial Sequence
  Description of Artificial Sequence: Synthetic oligonucleotide
ucagguaauccaaugaacu

SEQ ID NO: 2577289 - RNA, 19 nt, Artificial Sequence
  Description of Artificial Sequence: Synthetic oligonucleotide
aaugguccuuuucuucucc

SEQ ID NO: 2577290 - RNA, 19 nt, Artificial Sequence
  Description of Artificial Sequence: Synthetic oligonucleotide
aauaaggcacccuuauucu

SEQ ID NO: 2577291 - RNA, 19 nt, Artificial Sequence
  Description of Artificial Sequence: Synthetic oligonucleotide
cugagcaucuaauagauuc

SEQ ID NO: 2577292 - RNA, 19 nt, Artificial Sequence
  Description of Artificial Sequence: Synthetic oligonucleotide
uuuauagcugcauaguaaa

SEQ ID NO: 2577293 - RNA, 19 nt, Artificial Sequence
  Description of Artificial Sequence: Synthetic oligonucleotide
aguaagucuauccuucguc

SEQ ID NO: 2577294 - RNA, 19 nt, Artificial Sequence
  Description of Artificial Sequence: Synthetic oligonucleotide
uaguaaaauguuccaaacc

SEQ ID NO: 2577295 - RNA, 19 nt, Artificial Sequence
  Description of Artificial Sequence: Synthetic oligonucleotide
guuguugcaaucuuaaaca

SEQ ID NO: 2577296 - RNA, 19 nt, Artificial Sequence
  Description of Artificial Sequence: Synthetic oligonucleotide
ucuaauagauuccuuugcu

SEQ ID NO: 2577297 - RNA, 19 nt, Artificial Sequence
  Description of Artificial Sequence: Synthetic oligonucleotide
uccauuuucucugugauga

SEQ ID NO: 2577298 - RNA, 19 nt, Artificial Sequence
  Description of Artificial Sequence: Synthetic oligonucleotide
augucuacuacacugucag

SEQ ID NO: 2577299 - RNA, 19 nt, Artificial Sequence
  Description of Artificial Sequence: Synthetic oligonucleotide
uguauucaccuccaagucc

SEQ ID NO: 2577300 - RNA, 19 nt, Artificial Sequence
  Description of Artificial Sequence: Synthetic oligonucleotide
ugcaaucuuaaacauggca

SEQ ID NO: 2577301 - RNA, 19 nt, Artificial Sequence
  Description of Artificial Sequence: Synthetic oligonucleotide
aguaaugguccuuuucuuc

SEQ ID NO: 2577302 - RNA, 19 nt, Artificial Sequence
  Description of Artificial Sequence: Synthetic oligonucleotide
uccuuuuauagcugcauag

SEQ ID NO: 2577303 - RNA, 19 nt, Artificial Sequence
  Description of Artificial Sequence: Synthetic oligonucleotide
aaacauggcauaugcuguc

SEQ ID NO: 2577304 - RNA, 19 nt, Artificial Sequence
  Description of Artificial Sequence: Synthetic oligonucleotide
uaaaauguuccaaaccaaa

SEQ ID NO: 2577305 - RNA, 19 nt, Artificial Sequence
  Description of Artificial Sequence: Synthetic oligonucleotide
uuccaaaccaaauaccaga

SEQ ID NO: 2577306 - RNA, 19 nt, Artificial Sequence
  Description of Artificial Sequence: Synthetic oligonucleotide
uuaaauaaggcacccuuau

SEQ ID NO: 2577307 - RNA, 19 nt, Artificial Sequence
  Description of Artificial Sequence: Synthetic oligonucleotide
uacacugucagguaaucca

SEQ ID NO: 2577308 - RNA, 19 nt, Artificial Sequence
  Description of Artificial Sequence: Synthetic oligonucleotide
aagggaugacauucacucc

SEQ ID NO: 2577309 - RNA, 19 nt, Artificial Sequence
  Description of Artificial Sequence: Synthetic oligonucleotide
ucuaggaaagggaugacau

SEQ ID NO: 2577310 - RNA, 19 nt, Artificial Sequence
  Description of Artificial Sequence: Synthetic oligonucleotide
auucacuccuuuuauagcu

SEQ ID NO: 2577311 - RNA, 19 nt, Artificial Sequence
  Description of Artificial Sequence: Synthetic oligonucleotide
aaggugugguguccaaacc

SEQ ID NO: 2577312 - RNA, 19 nt, Artificial Sequence
  Description of Artificial Sequence: Synthetic oligonucleotide
ugacuucucaaauacuuca

SEQ ID NO: 2577313 - RNA, 19 nt, Artificial Sequence
  Description of Artificial Sequence: Synthetic oligonucleotide
uuugcaaggcacugaacag

SEQ ID NO: 2577314 - RNA, 19 nt, Artificial Sequence
  Description of Artificial Sequence: Synthetic oligonucleotide
uugacauguagccaugacu

SEQ ID NO: 2577315 - RNA, 19 nt, Artificial Sequence
  Description of Artificial Sequence: Synthetic oligonucleotide
aagacuuuccauauugucu

SEQ ID NO: 2577316 - RNA, 19 nt, Artificial Sequence
  Description of Artificial Sequence: Synthetic oligonucleotide
ugaacucuaggaaagggau

SEQ ID NO: 2577317 - RNA, 19 nt, Artificial Sequence
  Description of Artificial Sequence: Synthetic oligonucleotide
aacucuaggaaagggauga

SEQ ID NO: 2577318 - RNA, 19 nt, Artificial Sequence
  Description of Artificial Sequence: Synthetic oligonucleotide
aguaaaggacguuccuccc

SEQ ID NO: 2577319 - RNA, 19 nt, Artificial Sequence
  Description of Artificial Sequence: Synthetic oligonucleotide
aaggacguuccucccaagg

SEQ ID NO: 2577320 - RNA, 19 nt, Artificial Sequence
  Description of Artificial Sequence: Synthetic oligonucleotide
ugugaugagcuccuuaguc

SEQ ID NO: 2577321 - RNA, 19 nt, Artificial Sequence
  Description of Artificial Sequence: Synthetic oligonucleotide
uccaaugaacucuaggaaa

SEQ ID NO: 2577322 - RNA, 19 nt, Artificial Sequence
  Description of Artificial Sequence: Synthetic oligonucleotide
gaugcacaggaauuaagac

SEQ ID NO: 2577323 - RNA, 19 nt, Artificial Sequence
  Description of Artificial Sequence: Synthetic oligonucleotide
uguugcaaucuuaaacaug

SEQ ID NO: 2577324 - RNA, 19 nt, Artificial Sequence
  Description of Artificial Sequence: Synthetic oligonucleotide
uauuagaugcacaggaauu

SEQ ID NO: 2577325 - RNA, 19 nt, Artificial Sequence
  Description of Artificial Sequence: Synthetic oligonucleotide
uuuaguucgagguuauuuu

SEQ ID NO: 2577326 - RNA, 19 nt, Artificial Sequence
  Description of Artificial Sequence: Synthetic oligonucleotide
aauggagccacugcuuccg

SEQ ID NO: 2577327 - RNA, 19 nt, Artificial Sequence
  Description of Artificial Sequence: Synthetic oligonucleotide
caguaaaggacguuccucc

SEQ ID NO: 2577328 - RNA, 19 nt, Artificial Sequence
  Description of Artificial Sequence: Synthetic oligonucleotide
aguuaaauaaggcacccuu

SEQ ID NO: 2577329 - RNA, 19 nt, Artificial Sequence
  Description of Artificial Sequence: Synthetic oligonucleotide
aaccacucuguauucaccu

SEQ ID NO: 2577330 - RNA, 19 nt, Artificial Sequence
  Description of Artificial Sequence: Synthetic oligonucleotide
ugucagguaauccaaugaa

SEQ ID NO: 2577331 - RNA, 19 nt, Artificial Sequence
  Description of Artificial Sequence: Synthetic oligonucleotide
uauugucuaaacccagcug

SEQ ID NO: 2577332 - RNA, 19 nt, Artificial Sequence
  Description of Artificial Sequence: Synthetic oligonucleotide
aaguuauuagaugcacagg

SEQ ID NO: 2577333 - RNA, 19 nt, Artificial Sequence
  Description of Artificial Sequence: Synthetic oligonucleotide
ucaguaagucuauccuucg

SEQ ID NO: 2577334 - RNA, 19 nt, Artificial Sequence
  Description of Artificial Sequence: Synthetic oligonucleotide
caucuaauagauuccuuug

SEQ ID NO: 2577335 - RNA, 19 nt, Artificial Sequence
  Description of Artificial Sequence: Synthetic oligonucleotide
auauugucuaaacccagcu

SEQ ID NO: 2577336 - RNA, 19 nt, Artificial Sequence
  Description of Artificial Sequence: Synthetic oligonucleotide
auacuucacaguaaaggac

SEQ ID NO: 2577337 - RNA, 19 nt, Artificial Sequence
  Description of Artificial Sequence: Synthetic oligonucleotide
caaggcacugaacagcagg

SEQ ID NO: 2577338 - RNA, 19 nt, Artificial Sequence
  Description of Artificial Sequence: Synthetic oligonucleotide
cuuugcaaggcacugaaca

SEQ ID NO: 2577339 - RNA, 19 nt, Artificial Sequence
  Description of Artificial Sequence: Synthetic oligonucleotide
uccaaguccaaguaauggu

SEQ ID NO: 2577340 - RNA, 19 nt, Artificial Sequence
  Description of Artificial Sequence: Synthetic oligonucleotide
ugcauaguaaaauguucca

SEQ ID NO: 2577341 - RNA, 19 nt, Artificial Sequence
  Description of Artificial Sequence: Synthetic oligonucleotide
cuaaacccagcugaggugg

SEQ ID NO: 2577342 - RNA, 19 nt, Artificial Sequence
  Description of Artificial Sequence: Synthetic oligonucleotide
aaaccacucuguauucacc

SEQ ID NO: 2577343 - RNA, 19 nt, Artificial Sequence
  Description of Artificial Sequence: Synthetic oligonucleotide
uaagacuuuccauauuguc

SEQ ID NO: 2577344 - RNA, 19 nt, Artificial Sequence
  Description of Artificial Sequence: Synthetic oligonucleotide
ucacaguaaaggacguucc

SEQ ID NO: 2577345 - RNA, 19 nt, Artificial Sequence
  Description of Artificial Sequence: Synthetic oligonucleotide
gguuguugcaaucuuaaac

SEQ ID NO: 2577346 - RNA, 19 nt, Artificial Sequence
  Description of Artificial Sequence: Synthetic oligonucleotide
uaaggcacccuuauucuac

SEQ ID NO: 2577347 - RNA, 19 nt, Artificial Sequence
  Description of Artificial Sequence: Synthetic oligonucleotide
uuaagacuuuccauauugu

SEQ ID NO: 2577348 - RNA, 19 nt, Artificial Sequence
  Description of Artificial Sequence: Synthetic oligonucleotide
uaggaaagggaugacauuc

SEQ ID NO: 2577349 - RNA, 19 nt, Artificial Sequence
  Description of Artificial Sequence: Synthetic oligonucleotide
agggaugacauucacuccu

SEQ ID NO: 2577350 - RNA, 19 nt, Artificial Sequence
  Description of Artificial Sequence: Synthetic oligonucleotide
uauagcugcauaguaaaau

SEQ ID NO: 2577351 - RNA, 19 nt, Artificial Sequence
  Description of Artificial Sequence: Synthetic oligonucleotide
ccagcugagacauaguccg

SEQ ID NO: 2577352 - RNA, 19 nt, Artificial Sequence
  Description of Artificial Sequence: Synthetic oligonucleotide
uguccugagugccagcuga

SEQ ID NO: 2577353 - RNA, 19 nt, Artificial Sequence
  Description of Artificial Sequence: Synthetic oligonucleotide
guggcugagcaucuaauag

SEQ ID NO: 2577354 - RNA, 19 nt, Artificial Sequence
  Description of Artificial Sequence: Synthetic oligonucleotide
gaaggugugguguccaaac

SEQ ID NO: 2577355 - RNA, 19 nt, Artificial Sequence
  Description of Artificial Sequence: Synthetic oligonucleotide
uucacaguaaaggacguuc

SEQ ID NO: 2577356 - RNA, 19 nt, Artificial Sequence
  Description of Artificial Sequence: Synthetic oligonucleotide
agacuuuccauauugucua

SEQ ID NO: 2577357 - RNA, 19 nt, Artificial Sequence
  Description of Artificial Sequence: Synthetic oligonucleotide
agggcauuuccacuuuugg

SEQ ID NO: 2577358 - RNA, 19 nt, Artificial Sequence
  Description of Artificial Sequence: Synthetic oligonucleotide
uugucuaaacccagcugag

SEQ ID NO: 2577359 - RNA, 19 nt, Artificial Sequence
  Description of Artificial Sequence: Synthetic oligonucleotide
auguuccaaaccaaauacc

SEQ ID NO: 2577360 - RNA, 19 nt, Artificial Sequence
  Description of Artificial Sequence: Synthetic oligonucleotide
uuuuaguucgagguuauuu

SEQ ID NO: 2577361 - RNA, 19 nt, Artificial Sequence
  Description of Artificial Sequence: Synthetic oligonucleotide
aaucuuaaacauggcauau

SEQ ID NO: 2577362 - RNA, 19 nt, Artificial Sequence
  Description of Artificial Sequence: Synthetic oligonucleotide
cauucacuccuuuuauagc

SEQ ID NO: 2577363 - RNA, 19 nt, Artificial Sequence
  Description of Artificial Sequence: Synthetic oligonucleotide
acaguaaaggacguuccuc

SEQ ID NO: 2577364 - RNA, 19 nt, Artificial Sequence
  Description of Artificial Sequence: Synthetic oligonucleotide
uaccagaaguuauuagaug

SEQ ID NO: 2577365 - RNA, 19 nt, Artificial Sequence
  Description of Artificial Sequence: Synthetic oligonucleotide
acuucucaaauacuucaca

SEQ ID NO: 2577366 - RNA, 19 nt, Artificial Sequence
  Description of Artificial Sequence: Synthetic oligonucleotide
gugggguugacauguagcc

SEQ ID NO: 2577367 - RNA, 19 nt, Artificial Sequence
  Description of Artificial Sequence: Synthetic oligonucleotide
agugccagcugagacauag

SEQ ID NO: 2577368 - RNA, 19 nt, Artificial Sequence
  Description of Artificial Sequence: Synthetic oligonucleotide
uccuuagucucuuccauuc

SEQ ID NO: 2577369 - RNA, 19 nt, Artificial Sequence
  Description of Artificial Sequence: Synthetic oligonucleotide
ggaauuaagacuuuccaua

SEQ ID NO: 2577370 - RNA, 19 nt, Artificial Sequence
  Description of Artificial Sequence: Synthetic oligonucleotide
acugucagguaauccaaug

SEQ ID NO: 2577371 - RNA, 19 nt, Artificial Sequence
  Description of Artificial Sequence: Synthetic oligonucleotide
aaguccaaguaaugguccu

SEQ ID NO: 2577372 - RNA, 19 nt, Artificial Sequence
  Description of Artificial Sequence: Synthetic oligonucleotide
augacauucacuccuuuua

SEQ ID NO: 2577373 - RNA, 19 nt, Artificial Sequence
  Description of Artificial Sequence: Synthetic oligonucleotide
agguaauggagccacugcu

SEQ ID NO: 2577374 - RNA, 19 nt, Artificial Sequence
  Description of Artificial Sequence: Synthetic oligonucleotide
ucuauccuucgucuccucc

SEQ ID NO: 2577375 - RNA, 19 nt, Artificial Sequence
  Description of Artificial Sequence: Synthetic oligonucleotide
aauuaagacuuuccauauu

SEQ ID NO: 2577376 - RNA, 19 nt, Artificial Sequence
  Description of Artificial Sequence: Synthetic oligonucleotide
uaaaggacguuccucccaa

SEQ ID NO: 2577377 - RNA, 19 nt, Artificial Sequence
  Description of Artificial Sequence: Synthetic oligonucleotide
agguaauccaaugaacucu

SEQ ID NO: 2577378 - RNA, 19 nt, Artificial Sequence
  Description of Artificial Sequence: Synthetic oligonucleotide
ucuguccugcaaauacucc

SEQ ID NO: 2577379 - RNA, 19 nt, Artificial Sequence
  Description of Artificial Sequence: Synthetic oligonucleotide
ugugguguccaaaccacuc

SEQ ID NO: 2577380 - RNA, 19 nt, Artificial Sequence
  Description of Artificial Sequence: Synthetic oligonucleotide
aauguccugagugccagcu

SEQ ID NO: 2577381 - RNA, 19 nt, Artificial Sequence
  Description of Artificial Sequence: Synthetic oligonucleotide
cuuagucucuuccauucug

SEQ ID NO: 2577382 - RNA, 19 nt, Artificial Sequence
  Description of Artificial Sequence: Synthetic oligonucleotide
ugaugagcuccuuagucuc

SEQ ID NO: 2577383 - RNA, 19 nt, Artificial Sequence
  Description of Artificial Sequence: Synthetic oligonucleotide
guagcgggcagguuguugc

SEQ ID NO: 2577384 - RNA, 19 nt, Artificial Sequence
  Description of Artificial Sequence: Synthetic oligonucleotide
ugacauucacuccuuuuau

SEQ ID NO: 2577385 - RNA, 19 nt, Artificial Sequence
  Description of Artificial Sequence: Synthetic oligonucleotide
caagaauguccugagugcc

SEQ ID NO: 2577386 - RNA, 19 nt, Artificial Sequence
  Description of Artificial Sequence: Synthetic oligonucleotide
auccaaugaacucuaggaa

SEQ ID NO: 2577387 - RNA, 19 nt, Artificial Sequence
  Description of Artificial Sequence: Synthetic oligonucleotide
agagccuggcuuucugugg

SEQ ID NO: 2577388 - RNA, 19 nt, Artificial Sequence
  Description of Artificial Sequence: Synthetic oligonucleotide
ugagacauaguccguggua

SEQ ID NO: 2577389 - RNA, 19 nt, Artificial Sequence
  Description of Artificial Sequence: Synthetic oligonucleotide
cucuguauucaccuccaag

SEQ ID NO: 2577390 - RNA, 19 nt, Artificial Sequence
  Description of Artificial Sequence: Synthetic oligonucleotide
ugucuaaacccagcugagg

SEQ ID NO: 2577391 - RNA, 19 nt, Artificial Sequence
  Description of Artificial Sequence: Synthetic oligonucleotide
uguguagcgggcagguugu

SEQ ID NO: 2577392 - RNA, 19 nt, Artificial Sequence
  Description of Artificial Sequence: Synthetic oligonucleotide
cuguguagcgggcagguug

SEQ ID NO: 2577393 - RNA, 19 nt, Artificial Sequence
  Description of Artificial Sequence: Synthetic oligonucleotide
ccaaugaacucuaggaaag

SEQ ID NO: 2577394 - RNA, 19 nt, Artificial Sequence
  Description of Artificial Sequence: Synthetic oligonucleotide
uuauagcugcauaguaaaa

SEQ ID NO: 2577395 - RNA, 19 nt, Artificial Sequence
  Description of Artificial Sequence: Synthetic oligonucleotide
agaugcacaggaauuaaga

SEQ ID NO: 2577396 - RNA, 19 nt, Artificial Sequence
  Description of Artificial Sequence: Synthetic oligonucleotide
uccggugguguuccaagag

SEQ ID NO: 2577397 - RNA, 19 nt, Artificial Sequence
  Description of Artificial Sequence: Synthetic oligonucleotide
uaauggagccacugcuucc

SEQ ID NO: 2577398 - RNA, 19 nt, Artificial Sequence
  Description of Artificial Sequence: Synthetic oligonucleotide
augacuucucaaauacuuc

SEQ ID NO: 2577399 - RNA, 19 nt, Artificial Sequence
  Description of Artificial Sequence: Synthetic oligonucleotide
cagguaauccaaugaacuc

SEQ ID NO: 2577400 - RNA, 19 nt, Artificial Sequence
  Description of Artificial Sequence: Synthetic oligonucleotide
guagccaugacuucucaaa

SEQ ID NO: 2577401 - RNA, 19 nt, Artificial Sequence
  Description of Artificial Sequence: Synthetic oligonucleotide
aggugugguguccaaacca

SEQ ID NO: 2577402 - RNA, 19 nt, Artificial Sequence
  Description of Artificial Sequence: Synthetic oligonucleotide
gaauuaagacuuuccauau

SEQ ID NO: 2577403 - RNA, 19 nt, Artificial Sequence
  Description of Artificial Sequence: Synthetic oligonucleotide
ugguccuuuucuucuccgg

SEQ ID NO: 2577404 - RNA, 19 nt, Artificial Sequence
  Description of Artificial Sequence: Synthetic oligonucleotide
ucuacuacacugucaggua

SEQ ID NO: 2577405 - RNA, 19 nt, Artificial Sequence
  Description of Artificial Sequence: Synthetic oligonucleotide
guauucaccuccaagucca

SEQ ID NO: 2577406 - RNA, 19 nt, Artificial Sequence
  Description of Artificial Sequence: Synthetic oligonucleotide
gcaaauacuccuugacagg

SEQ ID NO: 2577407 - RNA, 19 nt, Artificial Sequence
  Description of Artificial Sequence: Synthetic oligonucleotide
guaauggagccacugcuuc

SEQ ID NO: 2577408 - RNA, 19 nt, Artificial Sequence
  Description of Artificial Sequence: Synthetic oligonucleotide
ucuccggugguguuccaag

SEQ ID NO: 2577409 - RNA, 19 nt, Artificial Sequence
  Description of Artificial Sequence: Synthetic oligonucleotide
uccuuugcuuugcaaggca

SEQ ID NO: 2577410 - RNA, 19 nt, Artificial Sequence
  Description of Artificial Sequence: Synthetic oligonucleotide
uccuccauuuucucuguga

SEQ ID NO: 2577411 - RNA, 19 nt, Artificial Sequence
  Description of Artificial Sequence: Synthetic oligonucleotide
auuagaugcacaggaauua

SEQ ID NO: 2577412 - RNA, 19 nt, Artificial Sequence
  Description of Artificial Sequence: Synthetic oligonucleotide
acugcuuccgaaggugugg

SEQ ID NO: 2577413 - RNA, 19 nt, Artificial Sequence
  Description of Artificial Sequence: Synthetic oligonucleotide
uucuuugguuucuuguaau

SEQ ID NO: 2577414 - RNA, 19 nt, Artificial Sequence
  Description of Artificial Sequence: Synthetic oligonucleotide
uguccaaaccacucuguau

SEQ ID NO: 2577415 - RNA, 19 nt, Artificial Sequence
  Description of Artificial Sequence: Synthetic oligonucleotide
agaauguccugagugccag

SEQ ID NO: 2577416 - RNA, 19 nt, Artificial Sequence
  Description of Artificial Sequence: Synthetic oligonucleotide
aaguuaaauaaggcacccu

SEQ ID NO: 2577417 - RNA, 19 nt, Artificial Sequence
  Description of Artificial Sequence: Synthetic oligonucleotide
cuguauucaccuccaaguc

SEQ ID NO: 2577418 - RNA, 19 nt, Artificial Sequence
  Description of Artificial Sequence: Synthetic oligonucleotide
auaccagaaguuauuagau

SEQ ID NO: 2577419 - RNA, 19 nt, Artificial Sequence
  Description of Artificial Sequence: Synthetic oligonucleotide
uaagucuauccuucgucuc

SEQ ID NO: 2577420 - RNA, 19 nt, Artificial Sequence
  Description of Artificial Sequence: Synthetic oligonucleotide
ugucuacuacacugucagg

SEQ ID NO: 2577421 - RNA, 19 nt, Artificial Sequence
  Description of Artificial Sequence: Synthetic oligonucleotide
aaggcacccuuauucuacu

SEQ ID NO: 2577422 - RNA, 19 nt, Artificial Sequence
  Description of Artificial Sequence: Synthetic oligonucleotide
uuagaugcacaggaauuaa

SEQ ID NO: 2577423 - RNA, 19 nt, Artificial Sequence
  Description of Artificial Sequence: Synthetic oligonucleotide
cuccuugacaggugguggg

SEQ ID NO: 2577424 - RNA, 19 nt, Artificial Sequence
  Description of Artificial Sequence: Synthetic oligonucleotide
acauguagccaugacuucu

SEQ ID NO: 2577425 - RNA, 19 nt, Artificial Sequence
  Description of Artificial Sequence: Synthetic oligonucleotide
caaugaacucuaggaaagg

SEQ ID NO: 2577426 - RNA, 19 nt, Artificial Sequence
  Description of Artificial Sequence: Synthetic oligonucleotide
uggcauaugcugucagggc

SEQ ID NO: 2577427 - RNA, 19 nt, Artificial Sequence
  Description of Artificial Sequence: Synthetic oligonucleotide
cagaaguuauuagaugcac

SEQ ID NO: 2577428 - RNA, 19 nt, Artificial Sequence
  Description of Artificial Sequence: Synthetic oligonucleotide
ucuuugguuucuuguaauu

SEQ ID NO: 2577429 - RNA, 19 nt, Artificial Sequence
  Description of Artificial Sequence: Synthetic oligonucleotide
aaauacuccuugacaggug

SEQ ID NO: 2577430 - RNA, 19 nt, Artificial Sequence
  Description of Artificial Sequence: Synthetic oligonucleotide
uagccaugacuucucaaau

SEQ ID NO: 2577431 - RNA, 19 nt, Artificial Sequence
  Description of Artificial Sequence: Synthetic oligonucleotide
caaguaaugguccuuuucu

SEQ ID NO: 2577432 - RNA, 19 nt, Artificial Sequence
  Description of Artificial Sequence: Synthetic oligonucleotide
agaaugucuacuacacugu

SEQ ID NO: 2577433 - RNA, 19 nt, Artificial Sequence
  Description of Artificial Sequence: Synthetic oligonucleotide
agaaguuauuagaugcaca

SEQ ID NO: 2577434 - RNA, 19 nt, Artificial Sequence
  Description of Artificial Sequence: Synthetic oligonucleotide
aaaggacguuccucccaag

SEQ ID NO: 2577435 - RNA, 19 nt, Artificial Sequence
  Description of Artificial Sequence: Synthetic oligonucleotide
uugcaaucuuaaacauggc

SEQ ID NO: 2577436 - RNA, 19 nt, Artificial Sequence
  Description of Artificial Sequence: Synthetic oligonucleotide
cuuuuauagcugcauagua

SEQ ID NO: 2577437 - RNA, 19 nt, Artificial Sequence
  Description of Artificial Sequence: Synthetic oligonucleotide
acuacacugucagguaauc

SEQ ID NO: 2577438 - RNA, 19 nt, Artificial Sequence
  Description of Artificial Sequence: Synthetic oligonucleotide
ugucagggcauuuccacuu

SEQ ID NO: 2577439 - RNA, 19 nt, Artificial Sequence
  Description of Artificial Sequence: Synthetic oligonucleotide
ucuucuccggugguguucc

SEQ ID NO: 2577440 - RNA, 19 nt, Artificial Sequence
  Description of Artificial Sequence: Synthetic oligonucleotide
uguccugcaaauacuccuu

SEQ ID NO: 2577441 - RNA, 19 nt, Artificial Sequence
  Description of Artificial Sequence: Synthetic oligonucleotide
augaacucuaggaaaggga

SEQ ID NO: 2577442 - RNA, 19 nt, Artificial Sequence
  Description of Artificial Sequence: Synthetic oligonucleotide
uggugggguugacauguag

SEQ ID NO: 2577443 - RNA, 19 nt, Artificial Sequence
  Description of Artificial Sequence: Synthetic oligonucleotide
uacuccuugacagguggug

SEQ ID NO: 2577444 - RNA, 19 nt, Artificial Sequence
  Description of Artificial Sequence: Synthetic oligonucleotide
gaacucuaggaaagggaug

SEQ ID NO: 2577445 - RNA, 19 nt, Artificial Sequence
  Description of Artificial Sequence: Synthetic oligonucleotide
uaugcugucagggcauuuc

SEQ ID NO: 2577446 - RNA, 19 nt, Artificial Sequence
  Description of Artificial Sequence: Synthetic oligonucleotide
cauguagccaugacuucuc

SEQ ID NO: 2577447 - RNA, 19 nt, Artificial Sequence
  Description of Artificial Sequence: Synthetic oligonucleotide
aucuuaaacauggcauaug

SEQ ID NO: 2577448 - RNA, 19 nt, Artificial Sequence
  Description of Artificial Sequence: Synthetic oligonucleotide
ucaccuccaaguccaagua

SEQ ID NO: 2577449 - RNA, 19 nt, Artificial Sequence
  Description of Artificial Sequence: Synthetic oligonucleotide
guaagucuauccuucgucu

SEQ ID NO: 2577450 - RNA, 19 nt, Artificial Sequence
  Description of Artificial Sequence: Synthetic oligonucleotide
uuccuuugcuuugcaaggc

SEQ ID NO: 2577451 - RNA, 19 nt, Artificial Sequence
  Description of Artificial Sequence: Synthetic oligonucleotide
guugacauguagccaugac

SEQ ID NO: 2577452 - RNA, 19 nt, Artificial Sequence
  Description of Artificial Sequence: Synthetic oligonucleotide
gucagguaauccaaugaac

SEQ ID NO: 2577453 - RNA, 19 nt, Artificial Sequence
  Description of Artificial Sequence: Synthetic oligonucleotide
uccuugacagguggugggg

SEQ ID NO: 2577454 - RNA, 19 nt, Artificial Sequence
  Description of Artificial Sequence: Synthetic oligonucleotide
uaaugguccuuuucuucuc

SEQ ID NO: 2577455 - RNA, 19 nt, Artificial Sequence
  Description of Artificial Sequence: Synthetic oligonucleotide
ugcugucagggcauuucca

SEQ ID NO: 2577456 - RNA, 19 nt, Artificial Sequence
  Description of Artificial Sequence: Synthetic oligonucleotide
uagauuccuuugcuuugca

SEQ ID NO: 2577457 - RNA, 19 nt, Artificial Sequence
  Description of Artificial Sequence: Synthetic oligonucleotide
cugcaaauacuccuugaca

SEQ ID NO: 2577458 - RNA, 19 nt, Artificial Sequence
  Description of Artificial Sequence: Synthetic oligonucleotide
uguagccaugacuucucaa

SEQ ID NO: 2577459 - RNA, 19 nt, Artificial Sequence
  Description of Artificial Sequence: Synthetic oligonucleotide
uccucccaaggucacugug

SEQ ID NO: 2577460 - RNA, 19 nt, Artificial Sequence
  Description of Artificial Sequence: Synthetic oligonucleotide
guaaaggacguuccuccca

SEQ ID NO: 2577461 - RNA, 19 nt, Artificial Sequence
  Description of Artificial Sequence: Synthetic oligonucleotide
uccuucgucuccuccauuu

SEQ ID NO: 2577462 - RNA, 19 nt, Artificial Sequence
  Description of Artificial Sequence: Synthetic oligonucleotide
uauccuucgucuccuccau

SEQ ID NO: 2577463 - RNA, 19 nt, Artificial Sequence
  Description of Artificial Sequence: Synthetic oligonucleotide
uuccaagaauguccugagu

SEQ ID NO: 2577464 - RNA, 19 nt, Artificial Sequence
  Description of Artificial Sequence: Synthetic oligonucleotide
cuauccuucgucuccucca

SEQ ID NO: 2577465 - RNA, 19 nt, Artificial Sequence
  Description of Artificial Sequence: Synthetic oligonucleotide
gacauguagccaugacuuc

SEQ ID NO: 2577466 - RNA, 19 nt, Artificial Sequence
  Description of Artificial Sequence: Synthetic oligonucleotide
gcugagacauaguccgugg

SEQ ID NO: 2577467 - RNA, 19 nt, Artificial Sequence
  Description of Artificial Sequence: Synthetic oligonucleotide
cuacacugucagguaaucc

SEQ ID NO: 2577468 - RNA, 19 nt, Artificial Sequence
  Description of Artificial Sequence: Synthetic oligonucleotide
auaaggcacccuuauucua

SEQ ID NO: 2577469 - RNA, 19 nt, Artificial Sequence
  Description of Artificial Sequence: Synthetic oligonucleotide
cugucagguaauccaauga

SEQ ID NO: 2577470 - RNA, 19 nt, Artificial Sequence
  Description of Artificial Sequence: Synthetic oligonucleotide
cuucgucuccuccauuuuc

SEQ ID NO: 2577471 - RNA, 19 nt, Artificial Sequence
  Description of Artificial Sequence: Synthetic oligonucleotide
ggcauaugcugucagggca

SEQ ID NO: 2577472 - RNA, 19 nt, Artificial Sequence
  Description of Artificial Sequence: Synthetic oligonucleotide
agcugagacauaguccgug

SEQ ID NO: 2577473 - RNA, 19 nt, Artificial Sequence
  Description of Artificial Sequence: Synthetic oligonucleotide
gacauucacuccuuuuaua

SEQ ID NO: 2577474 - RNA, 19 nt, Artificial Sequence
  Description of Artificial Sequence: Synthetic oligonucleotide
gucuacuacacugucaggu

SEQ ID NO: 2577475 - RNA, 19 nt, Artificial Sequence
  Description of Artificial Sequence: Synthetic oligonucleotide
uugacagguggugggguug

SEQ ID NO: 2577476 - RNA, 19 nt, Artificial Sequence
  Description of Artificial Sequence: Synthetic oligonucleotide
cacugaacagcagguaaug

SEQ ID NO: 2577477 - RNA, 19 nt, Artificial Sequence
  Description of Artificial Sequence: Synthetic oligonucleotide
cagguuguugcaaucuuaa

SEQ ID NO: 2577478 - RNA, 19 nt, Artificial Sequence
  Description of Artificial Sequence: Synthetic oligonucleotide
guuaaauaaggcacccuua

SEQ ID NO: 2577479 - RNA, 19 nt, Artificial Sequence
  Description of Artificial Sequence: Synthetic oligonucleotide
ccauauugucuaaacccag

SEQ ID NO: 2577480 - RNA, 19 nt, Artificial Sequence
  Description of Artificial Sequence: Synthetic oligonucleotide
cagggcauuuccacuuuug

SEQ ID NO: 2577481 - RNA, 19 nt, Artificial Sequence
  Description of Artificial Sequence: Synthetic oligonucleotide
cuuccgaaggugugguguc

SEQ ID NO: 2577482 - RNA, 19 nt, Artificial Sequence
  Description of Artificial Sequence: Synthetic oligonucleotide
gugguguuccaagagccug

SEQ ID NO: 2577483 - RNA, 19 nt, Artificial Sequence
  Description of Artificial Sequence: Synthetic oligonucleotide
caaggucacuguguagcgg

SEQ ID NO: 2577484 - RNA, 19 nt, Artificial Sequence
  Description of Artificial Sequence: Synthetic oligonucleotide
auuuccacuuuugggaguu

SEQ ID NO: 2577485 - RNA, 19 nt, Artificial Sequence
  Description of Artificial Sequence: Synthetic oligonucleotide
ccugcaaauacuccuugac

SEQ ID NO: 2577486 - RNA, 19 nt, Artificial Sequence
  Description of Artificial Sequence: Synthetic oligonucleotide
uguagcgggcagguuguug

SEQ ID NO: 2577487 - RNA, 19 nt, Artificial Sequence
  Description of Artificial Sequence: Synthetic oligonucleotide
guccaaaccacucuguauu

SEQ ID NO: 2577488 - RNA, 19 nt, Artificial Sequence
  Description of Artificial Sequence: Synthetic oligonucleotide
ugggguugacauguagcca

SEQ ID NO: 2577489 - RNA, 19 nt, Artificial Sequence
  Description of Artificial Sequence: Synthetic oligonucleotide
ucccaaggucacuguguag

SEQ ID NO: 2577490 - RNA, 19 nt, Artificial Sequence
  Description of Artificial Sequence: Synthetic oligonucleotide
acucuaggaaagggaugac

SEQ ID NO: 2577491 - RNA, 19 nt, Artificial Sequence
  Description of Artificial Sequence: Synthetic oligonucleotide
ccacucuguauucaccucc

SEQ ID NO: 2577492 - RNA, 19 nt, Artificial Sequence
  Description of Artificial Sequence: Synthetic oligonucleotide
ggaaagggaugacauucac

SEQ ID NO: 2577493 - RNA, 19 nt, Artificial Sequence
  Description of Artificial Sequence: Synthetic oligonucleotide
gaauguccugagugccagc

SEQ ID NO: 2577494 - RNA, 19 nt, Artificial Sequence
  Description of Artificial Sequence: Synthetic oligonucleotide
accuccaaguccaaguaau

SEQ ID NO: 2577495 - RNA, 19 nt, Artificial Sequence
  Description of Artificial Sequence: Synthetic oligonucleotide
acuccuuuuauagcugcau

SEQ ID NO: 2577496 - RNA, 19 nt, Artificial Sequence
  Description of Artificial Sequence: Synthetic oligonucleotide
caaauaccagaaguuauua

SEQ ID NO: 2577497 - RNA, 19 nt, Artificial Sequence
  Description of Artificial Sequence: Synthetic oligonucleotide
cuacuacacugucagguaa

SEQ ID NO: 2577498 - RNA, 19 nt, Artificial Sequence
  Description of Artificial Sequence: Synthetic oligonucleotide
guaauccaaugaacucuag

SEQ ID NO: 2577499 - RNA, 19 nt, Artificial Sequence
  Description of Artificial Sequence: Synthetic oligonucleotide
aggaaagggaugacauuca

SEQ ID NO: 2577500 - RNA, 19 nt, Artificial Sequence
  Description of Artificial Sequence: Synthetic oligonucleotide
ccaaggucacuguguagcg

SEQ ID NO: 2577501 - RNA, 19 nt, Artificial Sequence
  Description of Artificial Sequence: Synthetic oligonucleotide
agguuguugcaaucuuaaa

SEQ ID NO: 2577502 - RNA, 19 nt, Artificial Sequence
  Description of Artificial Sequence: Synthetic oligonucleotide
cacugcuuccgaaggugug

SEQ ID NO: 2577503 - RNA, 19 nt, Artificial Sequence
  Description of Artificial Sequence: Synthetic oligonucleotide
auucaccuccaaguccaag

SEQ ID NO: 2577504 - RNA, 19 nt, Artificial Sequence
  Description of Artificial Sequence: Synthetic oligonucleotide
gcaaucuuaaacauggcau

SEQ ID NO: 2577505 - RNA, 19 nt, Artificial Sequence
  Description of Artificial Sequence: Synthetic oligonucleotide
cuguccugcaaauacuccu

SEQ ID NO: 2577506 - RNA, 19 nt, Artificial Sequence
  Description of Artificial Sequence: Synthetic oligonucleotide
uccgaagguguggugucca

SEQ ID NO: 2577507 - RNA, 19 nt, Artificial Sequence
  Description of Artificial Sequence: Synthetic oligonucleotide
cuaauagauuccuuugcuu

SEQ ID NO: 2577508 - RNA, 19 nt, Artificial Sequence
  Description of Artificial Sequence: Synthetic oligonucleotide
cucuaggaaagggaugaca

SEQ ID NO: 2577509 - RNA, 19 nt, Artificial Sequence
  Description of Artificial Sequence: Synthetic oligonucleotide
aaacccagcugagguggcu

SEQ ID NO: 2577510 - RNA, 19 nt, Artificial Sequence
  Description of Artificial Sequence: Synthetic oligonucleotide
uccaaguaaugguccuuuu

SEQ ID NO: 2577511 - RNA, 19 nt, Artificial Sequence
  Description of Artificial Sequence: Synthetic oligonucleotide
cacucuguauucaccucca

SEQ ID NO: 2577512 - RNA, 19 nt, Artificial Sequence
  Description of Artificial Sequence: Synthetic oligonucleotide
auguccugagugccagcug

SEQ ID NO: 2577513 - RNA, 19 nt, Artificial Sequence
  Description of Artificial Sequence: Synthetic oligonucleotide
uuccgaagguguggugucc

SEQ ID NO: 2577514 - RNA, 19 nt, Artificial Sequence
  Description of Artificial Sequence: Synthetic oligonucleotide
ccaaguaaugguccuuuuc

SEQ ID NO: 2577515 - RNA, 19 nt, Artificial Sequence
  Description of Artificial Sequence: Synthetic oligonucleotide
ucagggcauuuccacuuuu

SEQ ID NO: 2577516 - RNA, 19 nt, Artificial Sequence
  Description of Artificial Sequence: Synthetic oligonucleotide
ggugugguguccaaaccac

SEQ ID NO: 2577517 - RNA, 19 nt, Artificial Sequence
  Description of Artificial Sequence: Synthetic oligonucleotide
ugacagguggugggguuga

SEQ ID NO: 2577518 - RNA, 19 nt, Artificial Sequence
  Description of Artificial Sequence: Synthetic oligonucleotide
ccugagugccagcugagac

SEQ ID NO: 2577519 - RNA, 19 nt, Artificial Sequence
  Description of Artificial Sequence: Synthetic oligonucleotide
ugguuccaagaauguccug

SEQ ID NO: 2577520 - RNA, 19 nt, Artificial Sequence
  Description of Artificial Sequence: Synthetic oligonucleotide
acagcagguaauggagcca

SEQ ID NO: 2577521 - RNA, 19 nt, Artificial Sequence
  Description of Artificial Sequence: Synthetic oligonucleotide
uucuucuccggugguguuc

SEQ ID NO: 2577522 - RNA, 19 nt, Artificial Sequence
  Description of Artificial Sequence: Synthetic oligonucleotide
gagcaucuaauagauuccu

SEQ ID NO: 2577523 - RNA, 19 nt, Artificial Sequence
  Description of Artificial Sequence: Synthetic oligonucleotide
acacugucagguaauccaa

SEQ ID NO: 2577524 - RNA, 19 nt, Artificial Sequence
  Description of Artificial Sequence: Synthetic oligonucleotide
agccacugcuuccgaaggu

SEQ ID NO: 2577525 - RNA, 19 nt, Artificial Sequence
  Description of Artificial Sequence: Synthetic oligonucleotide
uuccacuuuugggaguuuu

SEQ ID NO: 2577526 - RNA, 19 nt, Artificial Sequence
  Description of Artificial Sequence: Synthetic oligonucleotide
gcaucuaauagauuccuuu

SEQ ID NO: 2577527 - RNA, 19 nt, Artificial Sequence
  Description of Artificial Sequence: Synthetic oligonucleotide
gccagcugagacauagucc

SEQ ID NO: 2577528 - RNA, 19 nt, Artificial Sequence
  Description of Artificial Sequence: Synthetic oligonucleotide
cuuccauucuguccugcaa

SEQ ID NO: 2577529 - RNA, 19 nt, Artificial Sequence
  Description of Artificial Sequence: Synthetic oligonucleotide
gcuuucugugguuccaaga

SEQ ID NO: 2577530 - RNA, 19 nt, Artificial Sequence
  Description of Artificial Sequence: Synthetic oligonucleotide
ccagaaguuauuagaugca

SEQ ID NO: 2577531 - RNA, 19 nt, Artificial Sequence
  Description of Artificial Sequence: Synthetic oligonucleotide
cggugguguuccaagagcc

SEQ ID NO: 2577532 - RNA, 19 nt, Artificial Sequence
  Description of Artificial Sequence: Synthetic oligonucleotide
uccugagugccagcugaga

SEQ ID NO: 2577533 - RNA, 19 nt, Artificial Sequence
  Description of Artificial Sequence: Synthetic oligonucleotide
ugagcuccuuagucucuuc

SEQ ID NO: 2577534 - RNA, 19 nt, Artificial Sequence
  Description of Artificial Sequence: Synthetic oligonucleotide
uccaagagccuggcuuucu

SEQ ID NO: 2577535 - RNA, 19 nt, Artificial Sequence
  Description of Artificial Sequence: Synthetic oligonucleotide
cuccuuuuauagcugcaua

SEQ ID NO: 2577536 - RNA, 19 nt, Artificial Sequence
  Description of Artificial Sequence: Synthetic oligonucleotide
gguaauccaaugaacucua

SEQ ID NO: 2577537 - RNA, 19 nt, Artificial Sequence
  Description of Artificial Sequence: Synthetic oligonucleotide
uagcgggcagguuguugca

SEQ ID NO: 2577538 - RNA, 19 nt, Artificial Sequence
  Description of Artificial Sequence: Synthetic oligonucleotide
uuccucccaaggucacugu

SEQ ID NO: 2577539 - RNA, 19 nt, Artificial Sequence
  Description of Artificial Sequence: Synthetic oligonucleotide
gagccuggcuuucuguggu

SEQ ID NO: 2577540 - RNA, 19 nt, Artificial Sequence
  Description of Artificial Sequence: Synthetic oligonucleotide
acucuguauucaccuccaa

SEQ ID NO: 2577541 - RNA, 19 nt, Artificial Sequence
  Description of Artificial Sequence: Synthetic oligonucleotide
guuccaagagccuggcuuu

SEQ ID NO: 2577542 - RNA, 19 nt, Artificial Sequence
  Description of Artificial Sequence: Synthetic oligonucleotide
gggguugacauguagccau

SEQ ID NO: 2577543 - RNA, 19 nt, Artificial Sequence
  Description of Artificial Sequence: Synthetic oligonucleotide
ccggugguguuccaagagc

SEQ ID NO: 2577544 - RNA, 19 nt, Artificial Sequence
  Description of Artificial Sequence: Synthetic oligonucleotide
gugguuccaagaauguccu

SEQ ID NO: 2577545 - RNA, 19 nt, Artificial Sequence
  Description of Artificial Sequence: Synthetic oligonucleotide
acguuccucccaaggucac

SEQ ID NO: 2577546 - RNA, 19 nt, Artificial Sequence
  Description of Artificial Sequence: Synthetic oligonucleotide
aguccaaguaaugguccuu

SEQ ID NO: 2577547 - RNA, 19 nt, Artificial Sequence
  Description of Artificial Sequence: Synthetic oligonucleotide
uucuccggugguguuccaa

SEQ ID NO: 2577548 - RNA, 19 nt, Artificial Sequence
  Description of Artificial Sequence: Synthetic oligonucleotide
cucccaaggucacugugua

SEQ ID NO: 2577549 - RNA, 19 nt, Artificial Sequence
  Description of Artificial Sequence: Synthetic oligonucleotide
uggcuuucugugguuccaa

SEQ ID NO: 2577550 - RNA, 19 nt, Artificial Sequence
  Description of Artificial Sequence: Synthetic oligonucleotide
cacaguaaaggacguuccu

SEQ ID NO: 2577551 - RNA, 19 nt, Artificial Sequence
  Description of Artificial Sequence: Synthetic oligonucleotide
uuccaagagccuggcuuuc

SEQ ID NO: 2577552 - RNA, 19 nt, Artificial Sequence
  Description of Artificial Sequence: Synthetic oligonucleotide
auacuccuugacagguggu

SEQ ID NO: 2577553 - RNA, 19 nt, Artificial Sequence
  Description of Artificial Sequence: Synthetic oligonucleotide
cucugugaugagcuccuua

SEQ ID NO: 2577554 - RNA, 19 nt, Artificial Sequence
  Description of Artificial Sequence: Synthetic oligonucleotide
cuccggugguguuccaaga

SEQ ID NO: 2577555 - RNA, 19 nt, Artificial Sequence
  Description of Artificial Sequence: Synthetic oligonucleotide
gaugagcuccuuagucucu

SEQ ID NO: 2577556 - RNA, 19 nt, Artificial Sequence
  Description of Artificial Sequence: Synthetic oligonucleotide
cauuuccacuuuugggagu

SEQ ID NO: 2577557 - RNA, 19 nt, Artificial Sequence
  Description of Artificial Sequence: Synthetic oligonucleotide
agguggcugagcaucuaau

SEQ ID NO: 2577558 - RNA, 19 nt, Artificial Sequence
  Description of Artificial Sequence: Synthetic oligonucleotide
caccuccaaguccaaguaa

SEQ ID NO: 2577559 - RNA, 19 nt, Artificial Sequence
  Description of Artificial Sequence: Synthetic oligonucleotide
caagagccuggcuuucugu

SEQ ID NO: 2577560 - RNA, 19 nt, Artificial Sequence
  Description of Artificial Sequence: Synthetic oligonucleotide
ccaagagccuggcuuucug

SEQ ID NO: 2577561 - RNA, 19 nt, Artificial Sequence
  Description of Artificial Sequence: Synthetic oligonucleotide
caguaagucuauccuucgu

SEQ ID NO: 2577562 - RNA, 19 nt, Artificial Sequence
  Description of Artificial Sequence: Synthetic oligonucleotide
gucuauccuucgucuccuc

SEQ ID NO: 2577563 - RNA, 19 nt, Artificial Sequence
  Description of Artificial Sequence: Synthetic oligonucleotide
gguugacauguagccauga

SEQ ID NO: 2577564 - RNA, 19 nt, Artificial Sequence
  Description of Artificial Sequence: Synthetic oligonucleotide
ugagguggcugagcaucua

SEQ ID NO: 2577565 - RNA, 19 nt, Artificial Sequence
  Description of Artificial Sequence: Synthetic oligonucleotide
cugagacauaguccguggu

SEQ ID NO: 2577566 - RNA, 19 nt, Artificial Sequence
  Description of Artificial Sequence: Synthetic oligonucleotide
auaugcugucagggcauuu

SEQ ID NO: 2577567 - RNA, 19 nt, Artificial Sequence
  Description of Artificial Sequence: Synthetic oligonucleotide
ggguugacauguagccaug

SEQ ID NO: 2577568 - RNA, 19 nt, Artificial Sequence
  Description of Artificial Sequence: Synthetic oligonucleotide
auccuucgucuccuccauu

SEQ ID NO: 2577569 - RNA, 19 nt, Artificial Sequence
  Description of Artificial Sequence: Synthetic oligonucleotide
uuuccacuuuugggaguuu

SEQ ID NO: 2577570 - RNA, 19 nt, Artificial Sequence
  Description of Artificial Sequence: Synthetic oligonucleotide
gcacccuuauucuacuuuu

SEQ ID NO: 2577571 - RNA, 19 nt, Artificial Sequence
  Description of Artificial Sequence: Synthetic oligonucleotide
agcagguaauggagccacu

SEQ ID NO: 2577572 - RNA, 19 nt, Artificial Sequence
  Description of Artificial Sequence: Synthetic oligonucleotide
cuugacagguggugggguu

SEQ ID NO: 2577573 - RNA, 19 nt, Artificial Sequence
  Description of Artificial Sequence: Synthetic oligonucleotide
ccuuuuauagcugcauagu

SEQ ID NO: 2577574 - RNA, 19 nt, Artificial Sequence
  Description of Artificial Sequence: Synthetic oligonucleotide
agcgggcagguuguugcaa

SEQ ID NO: 2577575 - RNA, 19 nt, Artificial Sequence
  Description of Artificial Sequence: Synthetic oligonucleotide
cuccuuagucucuuccauu

SEQ ID NO: 2577576 - RNA, 19 nt, Artificial Sequence
  Description of Artificial Sequence: Synthetic oligonucleotide
ccagcugagguggcugagc

SEQ ID NO: 2577577 - RNA, 19 nt, Artificial Sequence
  Description of Artificial Sequence: Synthetic oligonucleotide
cacugucagguaauccaau

SEQ ID NO: 2577578 - RNA, 19 nt, Artificial Sequence
  Description of Artificial Sequence: Synthetic oligonucleotide
agccuggcuuucugugguu

SEQ ID NO: 2577579 - RNA, 19 nt, Artificial Sequence
  Description of Artificial Sequence: Synthetic oligonucleotide
gguaauggagccacugcuu

SEQ ID NO: 2577580 - RNA, 19 nt, Artificial Sequence
  Description of Artificial Sequence: Synthetic oligonucleotide
gcuuugcaaggcacugaac

SEQ ID NO: 2577581 - RNA, 19 nt, Artificial Sequence
  Description of Artificial Sequence: Synthetic oligonucleotide
ggcacccuuauucuacuuu

SEQ ID NO: 2577582 - RNA, 19 nt, Artificial Sequence
  Description of Artificial Sequence: Synthetic oligonucleotide
gugugguguccaaaccacu

SEQ ID NO: 2577583 - RNA, 19 nt, Artificial Sequence
  Description of Artificial Sequence: Synthetic oligonucleotide
cacuguguagcgggcaggu

SEQ ID NO: 2577584 - RNA, 19 nt, Artificial Sequence
  Description of Artificial Sequence: Synthetic oligonucleotide
gguguccaaaccacucugu

SEQ ID NO: 2577585 - RNA, 19 nt, Artificial Sequence
  Description of Artificial Sequence: Synthetic oligonucleotide
gucagggcauuuccacuuu

SEQ ID NO: 2577586 - RNA, 19 nt, Artificial Sequence
  Description of Artificial Sequence: Synthetic oligonucleotide
ccaugacuucucaaauacu

SEQ ID NO: 2577587 - RNA, 19 nt, Artificial Sequence
  Description of Artificial Sequence: Synthetic oligonucleotide
ggcagguuguugcaaucuu

SEQ ID NO: 2577588 - RNA, 19 nt, Artificial Sequence
  Description of Artificial Sequence: Synthetic oligonucleotide
ccucccaaggucacugugu

SEQ ID NO: 2577589 - RNA, 19 nt, Artificial Sequence
  Description of Artificial Sequence: Synthetic oligonucleotide
gccuggcuuucugugguuc

SEQ ID NO: 2577590 - RNA, 19 nt, Artificial Sequence
  Description of Artificial Sequence: Synthetic oligonucleotide
cugcuuccgaagguguggu

SEQ ID NO: 2577591 - RNA, 19 nt, Artificial Sequence
  Description of Artificial Sequence: Synthetic oligonucleotide
gggcagguuguugcaaucu

SEQ ID NO: 2577592 - RNA, 19 nt, Artificial Sequence
  Description of Artificial Sequence: Synthetic oligonucleotide
cuucacaguaaaggacguu

SEQ ID NO: 2577593 - RNA, 19 nt, Artificial Sequence
  Description of Artificial Sequence: Synthetic oligonucleotide
cagcugagacauaguccgu

SEQ ID NO: 2577594 - RNA, 19 nt, Artificial Sequence
  Description of Artificial Sequence: Synthetic oligonucleotide
cuucuccggugguguucca

SEQ ID NO: 2577595 - RNA, 19 nt, Artificial Sequence
  Description of Artificial Sequence: Synthetic oligonucleotide
ccuuagucucuuccauucu

SEQ ID NO: 2577596 - RNA, 19 nt, Artificial Sequence
  Description of Artificial Sequence: Synthetic oligonucleotide
cgggcagguuguugcaauc

SEQ ID NO: 2577597 - RNA, 19 nt, Artificial Sequence
  Description of Artificial Sequence: Synthetic oligonucleotide
cauaugcugucagggcauu

SEQ ID NO: 2577598 - RNA, 19 nt, Artificial Sequence
  Description of Artificial Sequence: Synthetic oligonucleotide
gcgggcagguuguugcaau

SEQ ID NO: 2577599 - RNA, 19 nt, Artificial Sequence
  Description of Artificial Sequence: Synthetic oligonucleotide
gggaugacauucacuccuu

SEQ ID NO: 2577600 - RNA, 19 nt, Artificial Sequence
  Description of Artificial Sequence: Synthetic oligonucleotide
ccauucuguccugcaaaua

SEQ ID NO: 2577601 - RNA, 19 nt, Artificial Sequence
  Description of Artificial Sequence: Synthetic oligonucleotide
ccgaaggugugguguccaa

SEQ ID NO: 2577602 - RNA, 19 nt, Artificial Sequence
  Description of Artificial Sequence: Synthetic oligonucleotide
cgaaggugugguguccaaa

SEQ ID NO: 2577603 - RNA, 19 nt, Artificial Sequence
  Description of Artificial Sequence: Synthetic oligonucleotide
ccuugacaggugguggggu

SEQ ID NO: 2577604 - RNA, 19 nt, Artificial Sequence
  Description of Artificial Sequence: Synthetic oligonucleotide
ccuucgucuccuccauuuu

SEQ ID NO: 2577605 - RNA, 19 nt, Artificial Sequence
  Description of Artificial Sequence: Synthetic oligonucleotide
gcacaggaauuaagacuuu

SEQ ID NO: 2577606 - RNA, 19 nt, Artificial Sequence
  Description of Artificial Sequence: Synthetic oligonucleotide
guguagcgggcagguuguu

SEQ ID NO: 2577607 - RNA, 19 nt, Artificial Sequence
  Description of Artificial Sequence: Synthetic oligonucleotide
cguuccucccaaggucacu

SEQ ID NO: 2577608 - RNA, 19 nt, Artificial Sequence
  Description of Artificial Sequence: Synthetic oligonucleotide
aagacugagacccagagcc

SEQ ID NO: 2577609 - RNA, 19 nt, Artificial Sequence
  Description of Artificial Sequence: Synthetic oligonucleotide
acuaacagaagacugagac

SEQ ID NO: 2577610 - RNA, 19 nt, Artificial Sequence
  Description of Artificial Sequence: Synthetic oligonucleotide
aaaggacuuaauaagaugg

SEQ ID NO: 2577611 - RNA, 19 nt, Artificial Sequence
  Description of Artificial Sequence: Synthetic oligonucleotide
uuuauuaggaugcugucug

SEQ ID NO: 2577612 - RNA, 19 nt, Artificial Sequence
  Description of Artificial Sequence: Synthetic oligonucleotide
ugguuuuccauuuaaaugu

SEQ ID NO: 2577613 - RNA, 19 nt, Artificial Sequence
  Description of Artificial Sequence: Synthetic oligonucleotide
uaacagaagacugagaccc

SEQ ID NO: 2577614 - RNA, 19 nt, Artificial Sequence
  Description of Artificial Sequence: Synthetic oligonucleotide
auaagaugggcacggauac

SEQ ID NO: 2577615 - RNA, 19 nt, Artificial Sequence
  Description of Artificial Sequence: Synthetic oligonucleotide
agcaccuugcuacaggucc

SEQ ID NO: 2577616 - RNA, 19 nt, Artificial Sequence
  Description of Artificial Sequence: Synthetic oligonucleotide
agaagaaaggacuuaauaa

SEQ ID NO: 2577617 - RNA, 19 nt, Artificial Sequence
  Description of Artificial Sequence: Synthetic oligonucleotide
accacuggggcucagaggg

SEQ ID NO: 2577618 - RNA, 19 nt, Artificial Sequence
  Description of Artificial Sequence: Synthetic oligonucleotide
uuuaggagggcucggcucg

SEQ ID NO: 2577619 - RNA, 19 nt, Artificial Sequence
  Description of Artificial Sequence: Synthetic oligonucleotide
uuaggaugcugucugcugg

SEQ ID NO: 2577620 - RNA, 19 nt, Artificial Sequence
  Description of Artificial Sequence: Synthetic oligonucleotide
guaucuuuuguuuucuucc

SEQ ID NO: 2577621 - RNA, 19 nt, Artificial Sequence
  Description of Artificial Sequence: Synthetic oligonucleotide
  modified_base (4)..(4): a, c, u, g, unknown or other
uaunuggggaggcugggag

SEQ ID NO: 2577622 - RNA, 19 nt, Artificial Sequence
  Description of Artificial Sequence: Synthetic oligonucleotide
uagucgguggguaagagug

SEQ ID NO: 2577623 - RNA, 19 nt, Artificial Sequence
  Description of Artificial Sequence: Synthetic oligonucleotide
aguaucuuuuguuuucuuc

SEQ ID NO: 2577624 - RNA, 19 nt, Artificial Sequence
  Description of Artificial Sequence: Synthetic oligonucleotide
augguuuuccauuuaaaug

SEQ ID NO: 2577625 - RNA, 19 nt, Artificial Sequence
  Description of Artificial Sequence: Synthetic oligonucleotide
acggauacagcccuccugc

SEQ ID NO: 2577626 - RNA, 19 nt, Artificial Sequence
  Description of Artificial Sequence: Synthetic oligonucleotide
cuguugucauguuugaugg

SEQ ID NO: 2577627 - RNA, 19 nt, Artificial Sequence
  Description of Artificial Sequence: Synthetic oligonucleotide
guucucagcaccuucacag

SEQ ID NO: 2577628 - RNA, 19 nt, Artificial Sequence
  Description of Artificial Sequence: Synthetic oligonucleotide
aaggcugggcaguacauuc

SEQ ID NO: 2577629 - RNA, 19 nt, Artificial Sequence
  Description of Artificial Sequence: Synthetic oligonucleotide
cuuaauaagaugggcacgg

SEQ ID NO: 2577630 - RNA, 19 nt, Artificial Sequence
  Description of Artificial Sequence: Synthetic oligonucleotide
gauacagcccuccugcagg

SEQ ID NO: 2577631 - RNA, 19 nt, Artificial Sequence
  Description of Artificial Sequence: Synthetic oligonucleotide
uuuaaaugugcacuuacuu

SEQ ID NO: 2577632 - RNA, 19 nt, Artificial Sequence
  Description of Artificial Sequence: Synthetic oligonucleotide
gaaaggacuuaauaagaug

SEQ ID NO: 2577633 - RNA, 19 nt, Artificial Sequence
  Description of Artificial Sequence: Synthetic oligonucleotide
acugaagggcuauucaagg

SEQ ID NO: 2577634 - RNA, 19 nt, Artificial Sequence
  Description of Artificial Sequence: Synthetic oligonucleotide
gacuuaauaagaugggcac

SEQ ID NO: 2577635 - RNA, 19 nt, Artificial Sequence
  Description of Artificial Sequence: Synthetic oligonucleotide
aucguaaggacccaggaga

SEQ ID NO: 2577636 - RNA, 19 nt, Artificial Sequence
  Description of Artificial Sequence: Synthetic oligonucleotide
guaagagugaaucuggcca

SEQ ID NO: 2577637 - RNA, 19 nt, Artificial Sequence
  Description of Artificial Sequence: Synthetic oligonucleotide
agcaccuucacagucaagg

SEQ ID NO: 2577638 - RNA, 19 nt, Artificial Sequence
  Description of Artificial Sequence: Synthetic oligonucleotide
  modified_base (12)..(12): a, c, u, g, unknown or other
aagggauguaunuggggag

SEQ ID NO: 2577639 - RNA, 19 nt, Artificial Sequence
  Description of Artificial Sequence: Synthetic oligonucleotide
uucaaggauagucgguggg

SEQ ID NO: 2577640 - RNA, 19 nt, Artificial Sequence
  Description of Artificial Sequence: Synthetic oligonucleotide
uggaugaggacaccaaccc

SEQ ID NO: 2577641 - RNA, 19 nt, Artificial Sequence
  Description of Artificial Sequence: Synthetic oligonucleotide
agugaaucuggccagacau

SEQ ID NO: 2577642 - RNA, 19 nt, Artificial Sequence
  Description of Artificial Sequence: Synthetic oligonucleotide
uauucaaggauagucggug

SEQ ID NO: 2577643 - RNA, 19 nt, Artificial Sequence
  Description of Artificial Sequence: Synthetic oligonucleotide
ugcacuuacuuuuaguauc

SEQ ID NO: 2577644 - RNA, 19 nt, Artificial Sequence
  Description of Artificial Sequence: Synthetic oligonucleotide
aacccgacugcuuuaggag

SEQ ID NO: 2577645 - RNA, 19 nt, Artificial Sequence
  Description of Artificial Sequence: Synthetic oligonucleotide
uuaaaugugcacuuacuuu

SEQ ID NO: 2577646 - RNA, 19 nt, Artificial Sequence
  Description of Artificial Sequence: Synthetic oligonucleotide
uaagagugaaucuggccag

SEQ ID NO: 2577647 - RNA, 19 nt, Artificial Sequence
  Description of Artificial Sequence: Synthetic oligonucleotide
aggacuuaauaagaugggc

SEQ ID NO: 2577648 - RNA, 19 nt, Artificial Sequence
  Description of Artificial Sequence: Synthetic oligonucleotide
ugugcacuuacuuuuagua

SEQ ID NO: 2577649 - RNA, 19 nt, Artificial Sequence
  Description of Artificial Sequence: Synthetic oligonucleotide
ucauguuugaugguuuucc

SEQ ID NO: 2577650 - RNA, 19 nt, Artificial Sequence
  Description of Artificial Sequence: Synthetic oligonucleotide
aagaaaggacuuaauaaga

SEQ ID NO: 2577651 - RNA, 19 nt, Artificial Sequence
  Description of Artificial Sequence: Synthetic oligonucleotide
aguacauucacagaagaaa

SEQ ID NO: 2577652 - RNA, 19 nt, Artificial Sequence
  Description of Artificial Sequence: Synthetic oligonucleotide
uuccauuuaaaugugcacu

SEQ ID NO: 2577653 - RNA, 19 nt, Artificial Sequence
  Description of Artificial Sequence: Synthetic oligonucleotide
aaugugcacuuacuuuuag

SEQ ID NO: 2577654 - RNA, 19 nt, Artificial Sequence
  Description of Artificial Sequence: Synthetic oligonucleotide
uacuuuuaguaucuuuugu

SEQ ID NO: 2577655 - RNA, 19 nt, Artificial Sequence
  Description of Artificial Sequence: Synthetic oligonucleotide
aaccccaugagcaccuugc

SEQ ID NO: 2577656 - RNA, 19 nt, Artificial Sequence
  Description of Artificial Sequence: Synthetic oligonucleotide
cuaacagaagacugagacc

SEQ ID NO: 2577657 - RNA, 19 nt, Artificial Sequence
  Description of Artificial Sequence: Synthetic oligonucleotide
aaggacuuaauaagauggg

SEQ ID NO: 2577658 - RNA, 19 nt, Artificial Sequence
  Description of Artificial Sequence: Synthetic oligonucleotide
  modified_base (16)..(16): a, c, u, g, unknown or other
ggggaagggauguaunugg

SEQ ID NO: 2577659 - RNA, 19 nt, Artificial Sequence
  Description of Artificial Sequence: Synthetic oligonucleotide
caguaacucagccagcucc

SEQ ID NO: 2577660 - RNA, 19 nt, Artificial Sequence
  Description of Artificial Sequence: Synthetic oligonucleotide
ucugaaggagcgcugggug

SEQ ID NO: 2577661 - RNA, 19 nt, Artificial Sequence
  Description of Artificial Sequence: Synthetic oligonucleotide
cauuuaaaugugcacuuac

SEQ ID NO: 2577662 - RNA, 19 nt, Artificial Sequence
  Description of Artificial Sequence: Synthetic oligonucleotide
gaugggcacggauacagcc

SEQ ID NO: 2577663 - RNA, 19 nt, Artificial Sequence
  Description of Artificial Sequence: Synthetic oligonucleotide
ugcuauuuccugcuggcca

SEQ ID NO: 2577664 - RNA, 19 nt, Artificial Sequence
  Description of Artificial Sequence: Synthetic oligonucleotide
uuuccauuuaaaugugcac

SEQ ID NO: 2577665 - RNA, 19 nt, Artificial Sequence
  Description of Artificial Sequence: Synthetic oligonucleotide
agaugaguggcaguaacuc

SEQ ID NO: 2577666 - RNA, 19 nt, Artificial Sequence
  Description of Artificial Sequence: Synthetic oligonucleotide
acaugcuauuuccugcugg

SEQ ID NO: 2577667 - RNA, 19 nt, Artificial Sequence
  Description of Artificial Sequence: Synthetic oligonucleotide
uuuuauuaggaugcugucu

SEQ ID NO: 2577668 - RNA, 19 nt, Artificial Sequence
  Description of Artificial Sequence: Synthetic oligonucleotide
ucugcuggcaucguaagga

SEQ ID NO: 2577669 - RNA, 19 nt, Artificial Sequence
  Description of Artificial Sequence: Synthetic oligonucleotide
cugggcaguacauucacag

SEQ ID NO: 2577670 - RNA, 19 nt, Artificial Sequence
  Description of Artificial Sequence: Synthetic oligonucleotide
acuuuuaguaucuuuuguu

SEQ ID NO: 2577671 - RNA, 19 nt, Artificial Sequence
  Description of Artificial Sequence: Synthetic oligonucleotide
  modified_base (3)..(3): a, c, u, g, unknown or other
aunuggggaggcugggagc

SEQ ID NO: 2577672 - RNA, 19 nt, Artificial Sequence
  Description of Artificial Sequence: Synthetic oligonucleotide
ugcaggacuaacagaagac

SEQ ID NO: 2577673 - RNA, 19 nt, Artificial Sequence
  Description of Artificial Sequence: Synthetic oligonucleotide
aauaagaugggcacggaua

SEQ ID NO: 2577674 - RNA, 19 nt, Artificial Sequence
  Description of Artificial Sequence: Synthetic oligonucleotide
auucacagaagaaaggacu

SEQ ID NO: 2577675 - RNA, 19 nt, Artificial Sequence
  Description of Artificial Sequence: Synthetic oligonucleotide
uguuugaugguuuuccauu

SEQ ID NO: 2577676 - RNA, 19 nt, Artificial Sequence
  Description of Artificial Sequence: Synthetic oligonucleotide
aacgucuuuuccuuccagu

SEQ ID NO: 2577677 - RNA, 19 nt, Artificial Sequence
  Description of Artificial Sequence: Synthetic oligonucleotide
ugggaggugauugugggag

SEQ ID NO: 2577678 - RNA, 19 nt, Artificial Sequence
  Description of Artificial Sequence: Synthetic oligonucleotide
auucaaggauagucggugg

SEQ ID NO: 2577679 - RNA, 19 nt, Artificial Sequence
  Description of Artificial Sequence: Synthetic oligonucleotide
acuuaauaagaugggcacg

SEQ ID NO: 2577680 - RNA, 19 nt, Artificial Sequence
  Description of Artificial Sequence: Synthetic oligonucleotide
ugggauccgaaugugggcg

SEQ ID NO: 2577681 - RNA, 19 nt, Artificial Sequence
  Description of Artificial Sequence: Synthetic oligonucleotide
gacaccaaccccaugagca

SEQ ID NO: 2577682 - RNA, 19 nt, Artificial Sequence
  Description of Artificial Sequence: Synthetic oligonucleotide
gcuauucaaggauagucgg

SEQ ID NO: 2577683 - RNA, 19 nt, Artificial Sequence
  Description of Artificial Sequence: Synthetic oligonucleotide
acauucacagaagaaagga

SEQ ID NO: 2577684 - RNA, 19 nt, Artificial Sequence
  Description of Artificial Sequence: Synthetic oligonucleotide
ucuauuucagcaggcaaac

SEQ ID NO: 2577685 - RNA, 19 nt, Artificial Sequence
  Description of Artificial Sequence: Synthetic oligonucleotide
  modified_base (8)..(8): a, c, u, g, unknown or other
gauguaunuggggaggcug

SEQ ID NO: 2577686 - RNA, 19 nt, Artificial Sequence
  Description of Artificial Sequence: Synthetic oligonucleotide
  modified_base (13)..(13): a, c, u, g, unknown or other
gaagggauguaunugggga

SEQ ID NO: 2577687 - RNA, 19 nt, Artificial Sequence
  Description of Artificial Sequence: Synthetic oligonucleotide
ugugggagcuccugaagag

SEQ ID NO: 2577688 - RNA, 19 nt, Artificial Sequence
  Description of Artificial Sequence: Synthetic oligonucleotide
cagagucuauuucagcagg

SEQ ID NO: 2577689 - RNA, 19 nt, Artificial Sequence
  Description of Artificial Sequence: Synthetic oligonucleotide
gaggacaccaaccccauga

SEQ ID NO: 2577690 - RNA, 19 nt, Artificial Sequence
  Description of Artificial Sequence: Synthetic oligonucleotide
cauucacagaagaaaggac

SEQ ID NO: 2577691 - RNA, 19 nt, Artificial Sequence
  Description of Artificial Sequence: Synthetic oligonucleotide
uaucuuuuguuuucuuccu

SEQ ID NO: 2577692 - RNA, 19 nt, Artificial Sequence
  Description of Artificial Sequence: Synthetic oligonucleotide
aaucuggccagacaugcua

SEQ ID NO: 2577693 - RNA, 19 nt, Artificial Sequence
  Description of Artificial Sequence: Synthetic oligonucleotide
  modified_base (14)..(14): a, c, u, g, unknown or other
ggaagggauguaunugggg

SEQ ID NO: 2577694 - RNA, 19 nt, Artificial Sequence
  Description of Artificial Sequence: Synthetic oligonucleotide
cagacaugcuauuuccugc

SEQ ID NO: 2577695 - RNA, 19 nt, Artificial Sequence
  Description of Artificial Sequence: Synthetic oligonucleotide
aaaacgucuuuuccuucca

SEQ ID NO: 2577696 - RNA, 19 nt, Artificial Sequence
  Description of Artificial Sequence: Synthetic oligonucleotide
uucacagaagaaaggacuu

SEQ ID NO: 2577697 - RNA, 19 nt, Artificial Sequence
  Description of Artificial Sequence: Synthetic oligonucleotide
guaaggacccaggagaccc

SEQ ID NO: 2577698 - RNA, 19 nt, Artificial Sequence
  Description of Artificial Sequence: Synthetic oligonucleotide
aaacgucuuuuccuuccag

SEQ ID NO: 2577699 - RNA, 19 nt, Artificial Sequence
  Description of Artificial Sequence: Synthetic oligonucleotide
caggacuaacagaagacug

SEQ ID NO: 2577700 - RNA, 19 nt, Artificial Sequence
  Description of Artificial Sequence: Synthetic oligonucleotide
uccugaagagaugaguggc

SEQ ID NO: 2577701 - RNA, 19 nt, Artificial Sequence
  Description of Artificial Sequence: Synthetic oligonucleotide
aguaacucagccagcuccc

SEQ ID NO: 2577702 - RNA, 19 nt, Artificial Sequence
  Description of Artificial Sequence: Synthetic oligonucleotide
uugugggagcuccugaaga

SEQ ID NO: 2577703 - RNA, 19 nt, Artificial Sequence
  Description of Artificial Sequence: Synthetic oligonucleotide
acccaggagacccaccugg

SEQ ID NO: 2577704 - RNA, 19 nt, Artificial Sequence
  Description of Artificial Sequence: Synthetic oligonucleotide
uaauaagaugggcacggau

SEQ ID NO: 2577705 - RNA, 19 nt, Artificial Sequence
  Description of Artificial Sequence: Synthetic oligonucleotide
gaugaggacaccaacccca

SEQ ID NO: 2577706 - RNA, 19 nt, Artificial Sequence
  Description of Artificial Sequence: Synthetic oligonucleotide
agcaggcaaacugaagggc

SEQ ID NO: 2577707 - RNA, 19 nt, Artificial Sequence
  Description of Artificial Sequence: Synthetic oligonucleotide
aaugugggcguggauacca

SEQ ID NO: 2577708 - RNA, 19 nt, Artificial Sequence
  Description of Artificial Sequence: Synthetic oligonucleotide
auuaggaugcugucugcug

SEQ ID NO: 2577709 - RNA, 19 nt, Artificial Sequence
  Description of Artificial Sequence: Synthetic oligonucleotide
acugcuuuaggagggcucg

SEQ ID NO: 2577710 - RNA, 19 nt, Artificial Sequence
  Description of Artificial Sequence: Synthetic oligonucleotide
  modified_base (7)..(7): a, c, u, g, unknown or other
auguaunuggggaggcugg

SEQ ID NO: 2577711 - RNA, 19 nt, Artificial Sequence
  Description of Artificial Sequence: Synthetic oligonucleotide
aaccacuggggcucagagg

SEQ ID NO: 2577712 - RNA, 19 nt, Artificial Sequence
  Description of Artificial Sequence: Synthetic oligonucleotide
cugacugguucucagcacc

SEQ ID NO: 2577713 - RNA, 19 nt, Artificial Sequence
  Description of Artificial Sequence: Synthetic oligonucleotide
uccauuuaaaugugcacuu

SEQ ID NO: 2577714 - RNA, 19 nt, Artificial Sequence
  Description of Artificial Sequence: Synthetic oligonucleotide
aggugauugugggagcucc

SEQ ID NO: 2577715 - RNA, 19 nt, Artificial Sequence
  Description of Artificial Sequence: Synthetic oligonucleotide
guggauaccacuguuguca

SEQ ID NO: 2577716 - RNA, 19 nt, Artificial Sequence
  Description of Artificial Sequence: Synthetic oligonucleotide
aacucagccagcucccuaa

SEQ ID NO: 2577717 - RNA, 19 nt, Artificial Sequence
  Description of Artificial Sequence: Synthetic oligonucleotide
cucagagggaacccgacug

SEQ ID NO: 2577718 - RNA, 19 nt, Artificial Sequence
  Description of Artificial Sequence: Synthetic oligonucleotide
augaguggcaguaacucag

SEQ ID NO: 2577719 - RNA, 19 nt, Artificial Sequence
  Description of Artificial Sequence: Synthetic oligonucleotide
uuauuaggaugcugucugc

SEQ ID NO: 2577720 - RNA, 19 nt, Artificial Sequence
  Description of Artificial Sequence: Synthetic oligonucleotide
ggcuauucaaggauagucg

SEQ ID NO: 2577721 - RNA, 19 nt, Artificial Sequence
  Description of Artificial Sequence: Synthetic oligonucleotide
agagucuauuucagcaggc

SEQ ID NO: 2577722 - RNA, 19 nt, Artificial Sequence
  Description of Artificial Sequence: Synthetic oligonucleotide
  modified_base (6)..(6): a, c, u, g, unknown or other
uguaunuggggaggcuggg

SEQ ID NO: 2577723 - RNA, 19 nt, Artificial Sequence
  Description of Artificial Sequence: Synthetic oligonucleotide
aagggcuauucaaggauag

SEQ ID NO: 2577724 - RNA, 19 nt, Artificial Sequence
  Description of Artificial Sequence: Synthetic oligonucleotide
accacuguugucauguuug

SEQ ID NO: 2577725 - RNA, 19 nt, Artificial Sequence
  Description of Artificial Sequence: Synthetic oligonucleotide
agacaugcuauuuccugcu

SEQ ID NO: 2577726 - RNA, 19 nt, Artificial Sequence
  Description of Artificial Sequence: Synthetic oligonucleotide
gaugaguggcaguaacuca

SEQ ID NO: 2577727 - RNA, 19 nt, Artificial Sequence
  Description of Artificial Sequence: Synthetic oligonucleotide
gauaccacuguugucaugu

SEQ ID NO: 2577728 - RNA, 19 nt, Artificial Sequence
  Description of Artificial Sequence: Synthetic oligonucleotide
acccgacugcuuuaggagg

SEQ ID NO: 2577729 - RNA, 19 nt, Artificial Sequence
  Description of Artificial Sequence: Synthetic oligonucleotide
acaggucccgucaagaaug

SEQ ID NO: 2577730 - RNA, 19 nt, Artificial Sequence
  Description of Artificial Sequence: Synthetic oligonucleotide
guggguaagagugaaucug

SEQ ID NO: 2577731 - RNA, 19 nt, Artificial Sequence
  Description of Artificial Sequence: Synthetic oligonucleotide
auuuaaaugugcacuuacu

SEQ ID NO: 2577732 - RNA, 19 nt, Artificial Sequence
  Description of Artificial Sequence: Synthetic oligonucleotide
caucguaaggacccaggag

SEQ ID NO: 2577733 - RNA, 19 nt, Artificial Sequence
  Description of Artificial Sequence: Synthetic oligonucleotide
ucguaaggacccaggagac

SEQ ID NO: 2577734 - RNA, 19 nt, Artificial Sequence
  Description of Artificial Sequence: Synthetic oligonucleotide
ugaguggcaguaacucagc

SEQ ID NO: 2577735 - RNA, 19 nt, Artificial Sequence
  Description of Artificial Sequence: Synthetic oligonucleotide
gaacccgacugcuuuagga

SEQ ID NO: 2577736 - RNA, 19 nt, Artificial Sequence
  Description of Artificial Sequence: Synthetic oligonucleotide
agucuauuucagcaggcaa

SEQ ID NO: 2577737 - RNA, 19 nt, Artificial Sequence
  Description of Artificial Sequence: Synthetic oligonucleotide
cugaaggagcgcugggugg

SEQ ID NO: 2577738 - RNA, 19 nt, Artificial Sequence
  Description of Artificial Sequence: Synthetic oligonucleotide
uauuaggaugcugucugcu

SEQ ID NO: 2577739 - RNA, 19 nt, Artificial Sequence
  Description of Artificial Sequence: Synthetic oligonucleotide
gguaagagugaaucuggcc

SEQ ID NO: 2577740 - RNA, 19 nt, Artificial Sequence
  Description of Artificial Sequence: Synthetic oligonucleotide
agaaaggacuuaauaagau

SEQ ID NO: 2577741 - RNA, 19 nt, Artificial Sequence
  Description of Artificial Sequence: Synthetic oligonucleotide
  modified_base (11)..(11): a, c, u, g, unknown or other
agggauguaunuggggagg

SEQ ID NO: 2577742 - RNA, 19 nt, Artificial Sequence
  Description of Artificial Sequence: Synthetic oligonucleotide
aaggauagucgguggguaa

SEQ ID NO: 2577743 - RNA, 19 nt, Artificial Sequence
  Description of Artificial Sequence: Synthetic oligonucleotide
gaagagaugaguggcagua

SEQ ID NO: 2577744 - RNA, 19 nt, Artificial Sequence
  Description of Artificial Sequence: Synthetic oligonucleotide
ugucugcuggcaucguaag

SEQ ID NO: 2577745 - RNA, 19 nt, Artificial Sequence
  Description of Artificial Sequence: Synthetic oligonucleotide
cuuuaggagggcucggcuc

SEQ ID NO: 2577746 - RNA, 19 nt, Artificial Sequence
  Description of Artificial Sequence: Synthetic oligonucleotide
  modified_base (2)..(2): a, c, u, g, unknown or other
unuggggaggcugggagcu

SEQ ID NO: 2577747 - RNA, 19 nt, Artificial Sequence
  Description of Artificial Sequence: Synthetic oligonucleotide
cuugcuacaggucccguca

SEQ ID NO: 2577748 - RNA, 19 nt, Artificial Sequence
  Description of Artificial Sequence: Synthetic oligonucleotide
aaaauuccuccgggagugg

SEQ ID NO: 2577749 - RNA, 19 nt, Artificial Sequence
  Description of Artificial Sequence: Synthetic oligonucleotide
ucacugacugguucucagc

SEQ ID NO: 2577750 - RNA, 19 nt, Artificial Sequence
  Description of Artificial Sequence: Synthetic oligonucleotide
ugaagagaugaguggcagu

SEQ ID NO: 2577751 - RNA, 19 nt, Artificial Sequence
  Description of Artificial Sequence: Synthetic oligonucleotide
ccugguuucagaaccacug

SEQ ID NO: 2577752 - RNA, 19 nt, Artificial Sequence
  Description of Artificial Sequence: Synthetic oligonucleotide
ugggcacggauacagcccu

SEQ ID NO: 2577753 - RNA, 19 nt, Artificial Sequence
  Description of Artificial Sequence: Synthetic oligonucleotide
auguuugaugguuuuccau

SEQ ID NO: 2577754 - RNA, 19 nt, Artificial Sequence
  Description of Artificial Sequence: Synthetic oligonucleotide
cagugggaggugauugugg

SEQ ID NO: 2577755 - RNA, 19 nt, Artificial Sequence
  Description of Artificial Sequence: Synthetic oligonucleotide
ucaaggauagucggugggu

SEQ ID NO: 2577756 - RNA, 19 nt, Artificial Sequence
  Description of Artificial Sequence: Synthetic oligonucleotide
gauagucgguggguaagag

SEQ ID NO: 2577757 - RNA, 19 nt, Artificial Sequence
  Description of Artificial Sequence: Synthetic oligonucleotide
caaacugaagggcuauuca

SEQ ID NO: 2577758 - RNA, 19 nt, Artificial Sequence
  Description of Artificial Sequence: Synthetic oligonucleotide
augggcacggauacagccc

SEQ ID NO: 2577759 - RNA, 19 nt, Artificial Sequence
  Description of Artificial Sequence: Synthetic oligonucleotide
auagucgguggguaagagu

SEQ ID NO: 2577760 - RNA, 19 nt, Artificial Sequence
  Description of Artificial Sequence: Synthetic oligonucleotide
ugggagcuccugaagagau

SEQ ID NO: 2577761 - RNA, 19 nt, Artificial Sequence
  Description of Artificial Sequence: Synthetic oligonucleotide
ugggaucugaaggagcgcu

SEQ ID NO: 2577762 - RNA, 19 nt, Artificial Sequence
  Description of Artificial Sequence: Synthetic oligonucleotide
aggacaccaaccccaugag

SEQ ID NO: 2577763 - RNA, 19 nt, Artificial Sequence
  Description of Artificial Sequence: Synthetic oligonucleotide
agagugaaucuggccagac

SEQ ID NO: 2577764 - RNA, 19 nt, Artificial Sequence
  Description of Artificial Sequence: Synthetic oligonucleotide
uugucauguuugaugguuu

SEQ ID NO: 2577765 - RNA, 19 nt, Artificial Sequence
  Description of Artificial Sequence: Synthetic oligonucleotide
aggacuaacagaagacuga

SEQ ID NO: 2577766 - RNA, 19 nt, Artificial Sequence
  Description of Artificial Sequence: Synthetic oligonucleotide
gaguggcaguaacucagcc

SEQ ID NO: 2577767 - RNA, 19 nt, Artificial Sequence
  Description of Artificial Sequence: Synthetic oligonucleotide
aguucacugacugguucuc

SEQ ID NO: 2577768 - RNA, 19 nt, Artificial Sequence
  Description of Artificial Sequence: Synthetic oligonucleotide
ccugggauccgaauguggg

SEQ ID NO: 2577769 - RNA, 19 nt, Artificial Sequence
  Description of Artificial Sequence: Synthetic oligonucleotide
cugggauccgaaugugggc

SEQ ID NO: 2577770 - RNA, 19 nt, Artificial Sequence
  Description of Artificial Sequence: Synthetic oligonucleotide
uggccagacaugcuauuuc

SEQ ID NO: 2577771 - RNA, 19 nt, Artificial Sequence
  Description of Artificial Sequence: Synthetic oligonucleotide
uuaauaagaugggcacgga

SEQ ID NO: 2577772 - RNA, 19 nt, Artificial Sequence
  Description of Artificial Sequence: Synthetic oligonucleotide
cuaagccuaugauuuaaaa

SEQ ID NO: 2577773 - RNA, 19 nt, Artificial Sequence
  Description of Artificial Sequence: Synthetic oligonucleotide
aaauuccuccgggagugga

SEQ ID NO: 2577774 - RNA, 19 nt, Artificial Sequence
  Description of Artificial Sequence: Synthetic oligonucleotide
ggacuuaauaagaugggca

SEQ ID NO: 2577775 - RNA, 19 nt, Artificial Sequence
  Description of Artificial Sequence: Synthetic oligonucleotide
ugacugguucucagcaccu

SEQ ID NO: 2577776 - RNA, 19 nt, Artificial Sequence
  Description of Artificial Sequence: Synthetic oligonucleotide
acgucuuuuccuuccaguu

SEQ ID NO: 2577777 - RNA, 19 nt, Artificial Sequence
  Description of Artificial Sequence: Synthetic oligonucleotide
aggauagucgguggguaag

SEQ ID NO: 2577778 - RNA, 19 nt, Artificial Sequence
  Description of Artificial Sequence: Synthetic oligonucleotide
ugggcaguacauucacaga

SEQ ID NO: 2577779 - RNA, 19 nt, Artificial Sequence
  Description of Artificial Sequence: Synthetic oligonucleotide
ggacuaacagaagacugag

SEQ ID NO: 2577780 - RNA, 19 nt, Artificial Sequence
  Description of Artificial Sequence: Synthetic oligonucleotide
ugucauguuugaugguuuu

SEQ ID NO: 2577781 - RNA, 19 nt, Artificial Sequence
  Description of Artificial Sequence: Synthetic oligonucleotide
ucaaggcugggcaguacau

SEQ ID NO: 2577782 - RNA, 19 nt, Artificial Sequence
  Description of Artificial Sequence: Synthetic oligonucleotide
gacaugcuauuuccugcug

SEQ ID NO: 2577783 - RNA, 19 nt, Artificial Sequence
  Description of Artificial Sequence: Synthetic oligonucleotide
aggagacccaccugggagu

SEQ ID NO: 2577784 - RNA, 19 nt, Artificial Sequence
  Description of Artificial Sequence: Synthetic oligonucleotide
cauguuugaugguuuucca

SEQ ID NO: 2577785 - RNA, 19 nt, Artificial Sequence
  Description of Artificial Sequence: Synthetic oligonucleotide
gucugcuggcaucguaagg

SEQ ID NO: 2577786 - RNA, 19 nt, Artificial Sequence
  Description of Artificial Sequence: Synthetic oligonucleotide
cacagucaaggcugggcag

SEQ ID NO: 2577787 - RNA, 19 nt, Artificial Sequence
  Description of Artificial Sequence: Synthetic oligonucleotide
uguugucauguuugauggu

SEQ ID NO: 2577788 - RNA, 19 nt, Artificial Sequence
  Description of Artificial Sequence: Synthetic oligonucleotide
ggccagacaugcuauuucc

SEQ ID NO: 2577789 - RNA, 19 nt, Artificial Sequence
  Description of Artificial Sequence: Synthetic oligonucleotide
gcuggcaucguaaggaccc

SEQ ID NO: 2577790 - RNA, 19 nt, Artificial Sequence
  Description of Artificial Sequence: Synthetic oligonucleotide
gagggcucggcucggggcc

SEQ ID NO: 2577791 - RNA, 19 nt, Artificial Sequence
  Description of Artificial Sequence: Synthetic oligonucleotide
gauccgaaugugggcgugg

SEQ ID NO: 2577792 - RNA, 19 nt, Artificial Sequence
  Description of Artificial Sequence: Synthetic oligonucleotide
gucuauuucagcaggcaaa

SEQ ID NO: 2577793 - RNA, 19 nt, Artificial Sequence
  Description of Artificial Sequence: Synthetic oligonucleotide
augcugucugcuggcaucg

SEQ ID NO: 2577794 - RNA, 19 nt, Artificial Sequence
  Description of Artificial Sequence: Synthetic oligonucleotide
ugggcguggauaccacugu

SEQ ID NO: 2577795 - RNA, 19 nt, Artificial Sequence
  Description of Artificial Sequence: Synthetic oligonucleotide
ugcuuuaggagggcucggc

SEQ ID NO: 2577796 - RNA, 19 nt, Artificial Sequence
  Description of Artificial Sequence: Synthetic oligonucleotide
cugaagggcuauucaagga

SEQ ID NO: 2577797 - RNA, 19 nt, Artificial Sequence
  Description of Artificial Sequence: Synthetic oligonucleotide
aagagugaaucuggccaga

SEQ ID NO: 2577798 - RNA, 19 nt, Artificial Sequence
  Description of Artificial Sequence: Synthetic oligonucleotide
agcuccugaagagaugagu

SEQ ID NO: 2577799 - RNA, 19 nt, Artificial Sequence
  Description of Artificial Sequence: Synthetic oligonucleotide
gagugaaucuggccagaca

SEQ ID NO: 2577800 - RNA, 19 nt, Artificial Sequence
  Description of Artificial Sequence: Synthetic oligonucleotide
gucaagaaugcccugguuu

SEQ ID NO: 2577801 - RNA, 19 nt, Artificial Sequence
  Description of Artificial Sequence: Synthetic oligonucleotide
uaaggacccaggagaccca

SEQ ID NO: 2577802 - RNA, 19 nt, Artificial Sequence
  Description of Artificial Sequence: Synthetic oligonucleotide
cacugacugguucucagca

SEQ ID NO: 2577803 - RNA, 19 nt, Artificial Sequence
  Description of Artificial Sequence: Synthetic oligonucleotide
agaugggcacggauacagc

SEQ ID NO: 2577804 - RNA, 19 nt, Artificial Sequence
  Description of Artificial Sequence: Synthetic oligonucleotide
ggucccgucaagaaugccc

SEQ ID NO: 2577805 - RNA, 19 nt, Artificial Sequence
  Description of Artificial Sequence: Synthetic oligonucleotide
uaccacuguugucauguuu

SEQ ID NO: 2577806 - RNA, 19 nt, Artificial Sequence
  Description of Artificial Sequence: Synthetic oligonucleotide
ccagacaugcuauuuccug

SEQ ID NO: 2577807 - RNA, 19 nt, Artificial Sequence
  Description of Artificial Sequence: Synthetic oligonucleotide
cucccuaagccuaugauuu

SEQ ID NO: 2577808 - RNA, 19 nt, Artificial Sequence
  Description of Artificial Sequence: Synthetic oligonucleotide
ggauacagcccuccugcag

SEQ ID NO: 2577809 - RNA, 19 nt, Artificial Sequence
  Description of Artificial Sequence: Synthetic oligonucleotide
cacggauacagcccuccug

SEQ ID NO: 2577810 - RNA, 19 nt, Artificial Sequence
  Description of Artificial Sequence: Synthetic oligonucleotide
ugcccugguuucagaacca

SEQ ID NO: 2577811 - RNA, 19 nt, Artificial Sequence
  Description of Artificial Sequence: Synthetic oligonucleotide
auuccuccgggaguggaug

SEQ ID NO: 2577812 - RNA, 19 nt, Artificial Sequence
  Description of Artificial Sequence: Synthetic oligonucleotide
gguuuuccauuuaaaugug

SEQ ID NO: 2577813 - RNA, 19 nt, Artificial Sequence
  Description of Artificial Sequence: Synthetic oligonucleotide
ggaugaggacaccaacccc

SEQ ID NO: 2577814 - RNA, 19 nt, Artificial Sequence
  Description of Artificial Sequence: Synthetic oligonucleotide
aagagaugaguggcaguaa

SEQ ID NO: 2577815 - RNA, 19 nt, Artificial Sequence
  Description of Artificial Sequence: Synthetic oligonucleotide
acagucaaggcugggcagu

SEQ ID NO: 2577816 - RNA, 19 nt, Artificial Sequence
  Description of Artificial Sequence: Synthetic oligonucleotide
gcaguacauucacagaaga

SEQ ID NO: 2577817 - RNA, 19 nt, Artificial Sequence
  Description of Artificial Sequence: Synthetic oligonucleotide
agcucccuaagccuaugau

SEQ ID NO: 2577818 - RNA, 19 nt, Artificial Sequence
  Description of Artificial Sequence: Synthetic oligonucleotide
uggauaccacuguugucau

SEQ ID NO: 2577819 - RNA, 19 nt, Artificial Sequence
  Description of Artificial Sequence: Synthetic oligonucleotide
gggcuauucaaggauaguc

SEQ ID NO: 2577820 - RNA, 19 nt, Artificial Sequence
  Description of Artificial Sequence: Synthetic oligonucleotide
gagcugggaucugaaggag

SEQ ID NO: 2577821 - RNA, 19 nt, Artificial Sequence
  Description of Artificial Sequence: Synthetic oligonucleotide
caguacauucacagaagaa

SEQ ID NO: 2577822 - RNA, 19 nt, Artificial Sequence
  Description of Artificial Sequence: Synthetic oligonucleotide
ugugggcguggauaccacu

SEQ ID NO: 2577823 - RNA, 19 nt, Artificial Sequence
  Description of Artificial Sequence: Synthetic oligonucleotide
uaagaugggcacggauaca

SEQ ID NO: 2577824 - RNA, 19 nt, Artificial Sequence
  Description of Artificial Sequence: Synthetic oligonucleotide
ggcaguacauucacagaag

SEQ ID NO: 2577825 - RNA, 19 nt, Artificial Sequence
  Description of Artificial Sequence: Synthetic oligonucleotide
ugaggacaccaaccccaug

SEQ ID NO: 2577826 - RNA, 19 nt, Artificial Sequence
  Description of Artificial Sequence: Synthetic oligonucleotide
gaagggcuauucaaggaua

SEQ ID NO: 2577827 - RNA, 19 nt, Artificial Sequence
  Description of Artificial Sequence: Synthetic oligonucleotide
cccagagucuauuucagca

SEQ ID NO: 2577828 - RNA, 19 nt, Artificial Sequence
  Description of Artificial Sequence: Synthetic oligonucleotide
uggcaguaacucagccagc

SEQ ID NO: 2577829 - RNA, 19 nt, Artificial Sequence
  Description of Artificial Sequence: Synthetic oligonucleotide
  modified_base (10)..(10): a, c, u, g, unknown or other
gggauguaunuggggaggc

SEQ ID NO: 2577830 - RNA, 19 nt, Artificial Sequence
  Description of Artificial Sequence: Synthetic oligonucleotide
caggucccgucaagaaugc

SEQ ID NO: 2577831 - RNA, 19 nt, Artificial Sequence
  Description of Artificial Sequence: Synthetic oligonucleotide
uuaggagggcucggcucgg

SEQ ID NO: 2577832 - RNA, 19 nt, Artificial Sequence
  Description of Artificial Sequence: Synthetic oligonucleotide
aauuccuccgggaguggau

SEQ ID NO: 2577833 - RNA, 19 nt, Artificial Sequence
  Description of Artificial Sequence: Synthetic oligonucleotide
ggagcuccugaagagauga

SEQ ID NO: 2577834 - RNA, 19 nt, Artificial Sequence
  Description of Artificial Sequence: Synthetic oligonucleotide
gugggcguggauaccacug

SEQ ID NO: 2577835 - RNA, 19 nt, Artificial Sequence
  Description of Artificial Sequence: Synthetic oligonucleotide
cuggggcucagagggaacc

SEQ ID NO: 2577836 - RNA, 19 nt, Artificial Sequence
  Description of Artificial Sequence: Synthetic oligonucleotide
  modified_base (15)..(15): a, c, u, g, unknown or other
gggaagggauguaunuggg

SEQ ID NO: 2577837 - RNA, 19 nt, Artificial Sequence
  Description of Artificial Sequence: Synthetic oligonucleotide
aggagggcucggcucgggg

SEQ ID NO: 2577838 - RNA, 19 nt, Artificial Sequence
  Description of Artificial Sequence: Synthetic oligonucleotide
gugaaucuggccagacaug

SEQ ID NO: 2577839 - RNA, 19 nt, Artificial Sequence
  Description of Artificial Sequence: Synthetic oligonucleotide
uuccuccgggaguggauga

SEQ ID NO: 2577840 - RNA, 19 nt, Artificial Sequence
  Description of Artificial Sequence: Synthetic oligonucleotide
cccgacugcuuuaggaggg

SEQ ID NO: 2577841 - RNA, 19 nt, Artificial Sequence
  Description of Artificial Sequence: Synthetic oligonucleotide
guuugaugguuuuccauuu

SEQ ID NO: 2577842 - RNA, 19 nt, Artificial Sequence
  Description of Artificial Sequence: Synthetic oligonucleotide
cuauucaaggauagucggu

SEQ ID NO: 2577843 - RNA, 19 nt, Artificial Sequence
  Description of Artificial Sequence: Synthetic oligonucleotide
gacugcuuuaggagggcuc

SEQ ID NO: 2577844 - RNA, 19 nt, Artificial Sequence
  Description of Artificial Sequence: Synthetic oligonucleotide
gacuaacagaagacugaga

SEQ ID NO: 2577845 - RNA, 19 nt, Artificial Sequence
  Description of Artificial Sequence: Synthetic oligonucleotide
gaaugugggcguggauacc

SEQ ID NO: 2577846 - RNA, 19 nt, Artificial Sequence
  Description of Artificial Sequence: Synthetic oligonucleotide
ggcaucguaaggacccagg

SEQ ID NO: 2577847 - RNA, 19 nt, Artificial Sequence
  Description of Artificial Sequence: Synthetic oligonucleotide
uugcuacaggucccgucaa

SEQ ID NO: 2577848 - RNA, 19 nt, Artificial Sequence
  Description of Artificial Sequence: Synthetic oligonucleotide
uccgggaguggaugaggac

SEQ ID NO: 2577849 - RNA, 19 nt, Artificial Sequence
  Description of Artificial Sequence: Synthetic oligonucleotide
caccaaccccaugagcacc

SEQ ID NO: 2577850 - RNA, 19 nt, Artificial Sequence
  Description of Artificial Sequence: Synthetic oligonucleotide
uggcaucguaaggacccag

SEQ ID NO: 2577851 - RNA, 19 nt, Artificial Sequence
  Description of Artificial Sequence: Synthetic oligonucleotide
cuacaggucccgucaagaa

SEQ ID NO: 2577852 - RNA, 19 nt, Artificial Sequence
  Description of Artificial Sequence: Synthetic oligonucleotide
gucauguuugaugguuuuc

SEQ ID NO: 2577853 - RNA, 19 nt, Artificial Sequence
  Description of Artificial Sequence: Synthetic oligonucleotide
caccuugcuacaggucccg

SEQ ID NO: 2577854 - RNA, 19 nt, Artificial Sequence
  Description of Artificial Sequence: Synthetic oligonucleotide
cgaaugugggcguggauac

SEQ ID NO: 2577855 - RNA, 19 nt, Artificial Sequence
  Description of Artificial Sequence: Synthetic oligonucleotide
ucccuaagccuaugauuua

SEQ ID NO: 2577856 - RNA, 19 nt, Artificial Sequence
  Description of Artificial Sequence: Synthetic oligonucleotide
gagaugaguggcaguaacu

SEQ ID NO: 2577857 - RNA, 19 nt, Artificial Sequence
  Description of Artificial Sequence: Synthetic oligonucleotide
aggucccgucaagaaugcc

SEQ ID NO: 2577858 - RNA, 19 nt, Artificial Sequence
  Description of Artificial Sequence: Synthetic oligonucleotide
ucuggccagacaugcuauu

SEQ ID NO: 2577859 - RNA, 19 nt, Artificial Sequence
  Description of Artificial Sequence: Synthetic oligonucleotide
ccuucacagucaaggcugg

SEQ ID NO: 2577860 - RNA, 19 nt, Artificial Sequence
  Description of Artificial Sequence: Synthetic oligonucleotide
cagaagacugagacccaga

SEQ ID NO: 2577861 - RNA, 19 nt, Artificial Sequence
  Description of Artificial Sequence: Synthetic oligonucleotide
gcaucguaaggacccagga

SEQ ID NO: 2577862 - RNA, 19 nt, Artificial Sequence
  Description of Artificial Sequence: Synthetic oligonucleotide
ggaacccgacugcuuuagg

SEQ ID NO: 2577863 - RNA, 19 nt, Artificial Sequence
  Description of Artificial Sequence: Synthetic oligonucleotide
gaguggaugaggacaccaa

SEQ ID NO: 2577864 - RNA, 19 nt, Artificial Sequence
  Description of Artificial Sequence: Synthetic oligonucleotide
ggguaagagugaaucuggc

SEQ ID NO: 2577865 - RNA, 19 nt, Artificial Sequence
  Description of Artificial Sequence: Synthetic oligonucleotide
gagggaacccgacugcuuu

SEQ ID NO: 2577866 - RNA, 19 nt, Artificial Sequence
  Description of Artificial Sequence: Synthetic oligonucleotide
cuccgggaguggaugagga

SEQ ID NO: 2577867 - RNA, 19 nt, Artificial Sequence
  Description of Artificial Sequence: Synthetic oligonucleotide
  modified_base (5)..(5): a, c, u, g, unknown or other
guaunuggggaggcuggga

SEQ ID NO: 2577868 - RNA, 19 nt, Artificial Sequence
  Description of Artificial Sequence: Synthetic oligonucleotide
uccgaaugugggcguggau

SEQ ID NO: 2577869 - RNA, 19 nt, Artificial Sequence
  Description of Artificial Sequence: Synthetic oligonucleotide
augugggcguggauaccac

SEQ ID NO: 2577870 - RNA, 19 nt, Artificial Sequence
  Description of Artificial Sequence: Synthetic oligonucleotide
ucgguggguaagagugaau

SEQ ID NO: 2577871 - RNA, 19 nt, Artificial Sequence
  Description of Artificial Sequence: Synthetic oligonucleotide
agggcuauucaaggauagu

SEQ ID NO: 2577872 - RNA, 19 nt, Artificial Sequence
  Description of Artificial Sequence: Synthetic oligonucleotide
agaaccacuggggcucaga

SEQ ID NO: 2577873 - RNA, 19 nt, Artificial Sequence
  Description of Artificial Sequence: Synthetic oligonucleotide
ucccgucaagaaugcccug

SEQ ID NO: 2577874 - RNA, 19 nt, Artificial Sequence
  Description of Artificial Sequence: Synthetic oligonucleotide
ggagggcucggcucggggc

SEQ ID NO: 2577875 - RNA, 19 nt, Artificial Sequence
  Description of Artificial Sequence: Synthetic oligonucleotide
gguucucagcaccuucaca

SEQ ID NO: 2577876 - RNA, 19 nt, Artificial Sequence
  Description of Artificial Sequence: Synthetic oligonucleotide
gagcuccugaagagaugag

SEQ ID NO: 2577877 - RNA, 19 nt, Artificial Sequence
  Description of Artificial Sequence: Synthetic oligonucleotide
cccgucaagaaugcccugg

SEQ ID NO: 2577878 - RNA, 19 nt, Artificial Sequence
  Description of Artificial Sequence: Synthetic oligonucleotide
gggcccugggauccgaaug

SEQ ID NO: 2577879 - RNA, 19 nt, Artificial Sequence
  Description of Artificial Sequence: Synthetic oligonucleotide
ggaguggaugaggacacca

SEQ ID NO: 2577880 - RNA, 19 nt, Artificial Sequence
  Description of Artificial Sequence: Synthetic oligonucleotide
acccagagccucccagagu

SEQ ID NO: 2577881 - RNA, 19 nt, Artificial Sequence
  Description of Artificial Sequence: Synthetic oligonucleotide
accaaccccaugagcaccu

SEQ ID NO: 2577882 - RNA, 19 nt, Artificial Sequence
  Description of Artificial Sequence: Synthetic oligonucleotide
cugcuuuaggagggcucgg

SEQ ID NO: 2577883 - RNA, 19 nt, Artificial Sequence
  Description of Artificial Sequence: Synthetic oligonucleotide
ggcguggauaccacuguug

SEQ ID NO: 2577884 - RNA, 19 nt, Artificial Sequence
  Description of Artificial Sequence: Synthetic oligonucleotide
caggcaaacugaagggcua

SEQ ID NO: 2577885 - RNA, 19 nt, Artificial Sequence
  Description of Artificial Sequence: Synthetic oligonucleotide
gguggguaagagugaaucu

SEQ ID NO: 2577886 - RNA, 19 nt, Artificial Sequence
  Description of Artificial Sequence: Synthetic oligonucleotide
ucggcucggggcccuggga

SEQ ID NO: 2577887 - RNA, 19 nt, Artificial Sequence
  Description of Artificial Sequence: Synthetic oligonucleotide
gugggaggugauuguggga

SEQ ID NO: 2577888 - RNA, 19 nt, Artificial Sequence
  Description of Artificial Sequence: Synthetic oligonucleotide
uaggagggcucggcucggg

SEQ ID NO: 2577889 - RNA, 19 nt, Artificial Sequence
  Description of Artificial Sequence: Synthetic oligonucleotide
gaggugauugugggagcuc

SEQ ID NO: 2577890 - RNA, 19 nt, Artificial Sequence
  Description of Artificial Sequence: Synthetic oligonucleotide
cucggcucggggcccuggg

SEQ ID NO: 2577891 - RNA, 19 nt, Artificial Sequence
  Description of Artificial Sequence: Synthetic oligonucleotide
aucuggccagacaugcuau

SEQ ID NO: 2577892 - RNA, 19 nt, Artificial Sequence
  Description of Artificial Sequence: Synthetic oligonucleotide
ccugcaggacuaacagaag

SEQ ID NO: 2577893 - RNA, 19 nt, Artificial Sequence
  Description of Artificial Sequence: Synthetic oligonucleotide
ggggcucagagggaacccg

SEQ ID NO: 2577894 - RNA, 19 nt, Artificial Sequence
  Description of Artificial Sequence: Synthetic oligonucleotide
ccugaagagaugaguggca

SEQ ID NO: 2577895 - RNA, 19 nt, Artificial Sequence
  Description of Artificial Sequence: Synthetic oligonucleotide
agacugagacccagagccu

SEQ ID NO: 2577896 - RNA, 19 nt, Artificial Sequence
  Description of Artificial Sequence: Synthetic oligonucleotide
caaggauagucggugggua

SEQ ID NO: 2577897 - RNA, 19 nt, Artificial Sequence
  Description of Artificial Sequence: Synthetic oligonucleotide
auccgaaugugggcgugga

SEQ ID NO: 2577898 - RNA, 19 nt, Artificial Sequence
  Description of Artificial Sequence: Synthetic oligonucleotide
gagcgcuggguggcagugg

SEQ ID NO: 2577899 - RNA, 19 nt, Artificial Sequence
  Description of Artificial Sequence: Synthetic oligonucleotide
gggaggugauugugggagc

SEQ ID NO: 2577900 - RNA, 19 nt, Artificial Sequence
  Description of Artificial Sequence: Synthetic oligonucleotide
auaccacuguugucauguu

SEQ ID NO: 2577901 - RNA, 19 nt, Artificial Sequence
  Description of Artificial Sequence: Synthetic oligonucleotide
gugggagcuccugaagaga

SEQ ID NO: 2577902 - RNA, 19 nt, Artificial Sequence
  Description of Artificial Sequence: Synthetic oligonucleotide
agggaacccgacugcuuua

SEQ ID NO: 2577903 - RNA, 19 nt, Artificial Sequence
  Description of Artificial Sequence: Synthetic oligonucleotide
gggaacccgacugcuuuag

SEQ ID NO: 2577904 - RNA, 19 nt, Artificial Sequence
  Description of Artificial Sequence: Synthetic oligonucleotide
gucgguggguaagagugaa

SEQ ID NO: 2577905 - RNA, 19 nt, Artificial Sequence
  Description of Artificial Sequence: Synthetic oligonucleotide
agucgguggguaagaguga

SEQ ID NO: 2577906 - RNA, 19 nt, Artificial Sequence
  Description of Artificial Sequence: Synthetic oligonucleotide
gcagugggaggugauugug

SEQ ID NO: 2577907 - RNA, 19 nt, Artificial Sequence
  Description of Artificial Sequence: Synthetic oligonucleotide
gucccgucaagaaugcccu

SEQ ID NO: 2577908 - RNA, 19 nt, Artificial Sequence
  Description of Artificial Sequence: Synthetic oligonucleotide
aggaugcugucugcuggca

SEQ ID NO: 2577909 - RNA, 19 nt, Artificial Sequence
  Description of Artificial Sequence: Synthetic oligonucleotide
augaggacaccaaccccau

SEQ ID NO: 2577910 - RNA, 19 nt, Artificial Sequence
  Description of Artificial Sequence: Synthetic oligonucleotide
aggcugggcaguacauuca

SEQ ID NO: 2577911 - RNA, 19 nt, Artificial Sequence
  Description of Artificial Sequence: Synthetic oligonucleotide
gagcaccuugcuacagguc

SEQ ID NO: 2577912 - RNA, 19 nt, Artificial Sequence
  Description of Artificial Sequence: Synthetic oligonucleotide
agccucccagagucuauuu

SEQ ID NO: 2577913 - RNA, 19 nt, Artificial Sequence
  Description of Artificial Sequence: Synthetic oligonucleotide
gcguggauaccacuguugu

SEQ ID NO: 2577914 - RNA, 19 nt, Artificial Sequence
  Description of Artificial Sequence: Synthetic oligonucleotide
uggguggcagugggaggug

SEQ ID NO: 2577915 - RNA, 19 nt, Artificial Sequence
  Description of Artificial Sequence: Synthetic oligonucleotide
ggauagucgguggguaaga

SEQ ID NO: 2577916 - RNA, 19 nt, Artificial Sequence
  Description of Artificial Sequence: Synthetic oligonucleotide
ggacccaggagacccaccu

SEQ ID NO: 2577917 - RNA, 19 nt, Artificial Sequence
  Description of Artificial Sequence: Synthetic oligonucleotide
gccucccagagucuauuuc

SEQ ID NO: 2577918 - RNA, 19 nt, Artificial Sequence
  Description of Artificial Sequence: Synthetic oligonucleotide
ggcaguaacucagccagcu

SEQ ID NO: 2577919 - RNA, 19 nt, Artificial Sequence
  Description of Artificial Sequence: Synthetic oligonucleotide
gcaccuugcuacagguccc

SEQ ID NO: 2577920 - RNA, 19 nt, Artificial Sequence
  Description of Artificial Sequence: Synthetic oligonucleotide
gaaggagcgcuggguggca

SEQ ID NO: 2577921 - RNA, 19 nt, Artificial Sequence
  Description of Artificial Sequence: Synthetic oligonucleotide
cgggaguggaugaggacac

SEQ ID NO: 2577922 - RNA, 19 nt, Artificial Sequence
  Description of Artificial Sequence: Synthetic oligonucleotide
gcaguaacucagccagcuc

SEQ ID NO: 2577923 - RNA, 19 nt, Artificial Sequence
  Description of Artificial Sequence: Synthetic oligonucleotide
gcacuuacuuuuaguaucu

SEQ ID NO: 2577924 - RNA, 19 nt, Artificial Sequence
  Description of Artificial Sequence: Synthetic oligonucleotide
accugggaguucacugacu

SEQ ID NO: 2577925 - RNA, 19 nt, Artificial Sequence
  Description of Artificial Sequence: Synthetic oligonucleotide
gcucccuaagccuaugauu

SEQ ID NO: 2577926 - RNA, 19 nt, Artificial Sequence
  Description of Artificial Sequence: Synthetic oligonucleotide
ggauccgaaugugggcgug

SEQ ID NO: 2577927 - RNA, 19 nt, Artificial Sequence
  Description of Artificial Sequence: Synthetic oligonucleotide
cuggguggcagugggaggu

SEQ ID NO: 2577928 - RNA, 19 nt, Artificial Sequence
  Description of Artificial Sequence: Synthetic oligonucleotide
agccagcucccuaagccua

SEQ ID NO: 2577929 - RNA, 19 nt, Artificial Sequence
  Description of Artificial Sequence: Synthetic oligonucleotide
cagcucccuaagccuauga

SEQ ID NO: 2577930 - RNA, 19 nt, Artificial Sequence
  Description of Artificial Sequence: Synthetic oligonucleotide
ccgggaguggaugaggaca

SEQ ID NO: 2577931 - RNA, 19 nt, Artificial Sequence
  Description of Artificial Sequence: Synthetic oligonucleotide
acccaccugggaguucacu

SEQ ID NO: 2577932 - RNA, 19 nt, Artificial Sequence
  Description of Artificial Sequence: Synthetic oligonucleotide
agagccucccagagucuau

SEQ ID NO: 2577933 - RNA, 19 nt, Artificial Sequence
  Description of Artificial Sequence: Synthetic oligonucleotide
cagcccuccugcaggacua

SEQ ID NO: 2577934 - RNA, 19 nt, Artificial Sequence
  Description of Artificial Sequence: Synthetic oligonucleotide
gcuuuaggagggcucggcu

SEQ ID NO: 2577935 - RNA, 19 nt, Artificial Sequence
  Description of Artificial Sequence: Synthetic oligonucleotide
ggcccugggauccgaaugu

SEQ ID NO: 2577936 - RNA, 19 nt, Artificial Sequence
  Description of Artificial Sequence: Synthetic oligonucleotide
gggagcuccugaagagaug

SEQ ID NO: 2577937 - RNA, 19 nt, Artificial Sequence
  Description of Artificial Sequence: Synthetic oligonucleotide
ccacuguugucauguuuga

SEQ ID NO: 2577938 - RNA, 19 nt, Artificial Sequence
  Description of Artificial Sequence: Synthetic oligonucleotide
cguggauaccacuguuguc

SEQ ID NO: 2577939 - RNA, 19 nt, Artificial Sequence
  Description of Artificial Sequence: Synthetic oligonucleotide
gcucggggcccugggaucc

SEQ ID NO: 2577940 - RNA, 19 nt, Artificial Sequence
  Description of Artificial Sequence: Synthetic oligonucleotide
ugcugucugcuggcaucgu

SEQ ID NO: 2577941 - RNA, 19 nt, Artificial Sequence
  Description of Artificial Sequence: Synthetic oligonucleotide
cuauuucagcaggcaaacu

SEQ ID NO: 2577942 - RNA, 19 nt, Artificial Sequence
  Description of Artificial Sequence: Synthetic oligonucleotide
ccgaaugugggcguggaua

SEQ ID NO: 2577943 - RNA, 19 nt, Artificial Sequence
  Description of Artificial Sequence: Synthetic oligonucleotide
ggcucagagggaacccgac

SEQ ID NO: 2577944 - RNA, 19 nt, Artificial Sequence
  Description of Artificial Sequence: Synthetic oligonucleotide
accuugcuacaggucccgu

SEQ ID NO: 2577945 - RNA, 19 nt, Artificial Sequence
  Description of Artificial Sequence: Synthetic oligonucleotide
  modified_base (9)..(9): a, c, u, g, unknown or other
ggauguaunuggggaggcu

SEQ ID NO: 2577946 - RNA, 19 nt, Artificial Sequence
  Description of Artificial Sequence: Synthetic oligonucleotide
cguaaggacccaggagacc

SEQ ID NO: 2577947 - RNA, 19 nt, Artificial Sequence
  Description of Artificial Sequence: Synthetic oligonucleotide
cuggcaucguaaggaccca

SEQ ID NO: 2577948 - RNA, 19 nt, Artificial Sequence
  Description of Artificial Sequence: Synthetic oligonucleotide
guaacucagccagcucccu

SEQ ID NO: 2577949 - RNA, 19 nt, Artificial Sequence
  Description of Artificial Sequence: Synthetic oligonucleotide
gggaguggaugaggacacc

SEQ ID NO: 2577950 - RNA, 19 nt, Artificial Sequence
  Description of Artificial Sequence: Synthetic oligonucleotide
gagacccaccugggaguuc

SEQ ID NO: 2577951 - RNA, 19 nt, Artificial Sequence
  Description of Artificial Sequence: Synthetic oligonucleotide
cagagggaacccgacugcu

SEQ ID NO: 2577952 - RNA, 19 nt, Artificial Sequence
  Description of Artificial Sequence: Synthetic oligonucleotide
cucggggcccugggauccg

SEQ ID NO: 2577953 - RNA, 19 nt, Artificial Sequence
  Description of Artificial Sequence: Synthetic oligonucleotide
ggcucggggcccugggauc

SEQ ID NO: 2577954 - RNA, 19 nt, Artificial Sequence
  Description of Artificial Sequence: Synthetic oligonucleotide
gcucagagggaacccgacu

SEQ ID NO: 2577955 - RNA, 19 nt, Artificial Sequence
  Description of Artificial Sequence: Synthetic oligonucleotide
cccuaagccuaugauuuaa

SEQ ID NO: 2577956 - RNA, 19 nt, Artificial Sequence
  Description of Artificial Sequence: Synthetic oligonucleotide
ccauuuaaaugugcacuua

SEQ ID NO: 2577957 - RNA, 19 nt, Artificial Sequence
  Description of Artificial Sequence: Synthetic oligonucleotide
ccgacugcuuuaggagggc

SEQ ID NO: 2577958 - RNA, 19 nt, Artificial Sequence
  Description of Artificial Sequence: Synthetic oligonucleotide
gggcucagagggaacccga

SEQ ID NO: 2577959 - RNA, 19 nt, Artificial Sequence
  Description of Artificial Sequence: Synthetic oligonucleotide
gcugggcaguacauucaca

SEQ ID NO: 2577960 - RNA, 19 nt, Artificial Sequence
  Description of Artificial Sequence: Synthetic oligonucleotide
cagucaaggcugggcagua

SEQ ID NO: 2577961 - RNA, 19 nt, Artificial Sequence
  Description of Artificial Sequence: Synthetic oligonucleotide
gcccugggauccgaaugug

SEQ ID NO: 2577962 - RNA, 19 nt, Artificial Sequence
  Description of Artificial Sequence: Synthetic oligonucleotide
cuggccagacaugcuauuu

SEQ ID NO: 2577963 - RNA, 19 nt, Artificial Sequence
  Description of Artificial Sequence: Synthetic oligonucleotide
gacccaccugggaguucac

SEQ ID NO: 2577964 - RNA, 19 nt, Artificial Sequence
  Description of Artificial Sequence: Synthetic oligonucleotide
ggaugcugucugcuggcau

SEQ ID NO: 2577965 - RNA, 19 nt, Artificial Sequence
  Description of Artificial Sequence: Synthetic oligonucleotide
gggauccgaaugugggcgu

SEQ ID NO: 2577966 - RNA, 19 nt, Artificial Sequence
  Description of Artificial Sequence: Synthetic oligonucleotide
gagccucccagagucuauu

SEQ ID NO: 2577967 - RNA, 19 nt, Artificial Sequence
  Description of Artificial Sequence: Synthetic oligonucleotide
cacuguugucauguuugau

SEQ ID NO: 2577968 - RNA, 19 nt, Artificial Sequence
  Description of Artificial Sequence: Synthetic oligonucleotide
gacugguucucagcaccuu

SEQ ID NO: 2577969 - RNA, 19 nt, Artificial Sequence
  Description of Artificial Sequence: Synthetic oligonucleotide
ggugauugugggagcuccu

SEQ ID NO: 2577970 - RNA, 19 nt, Artificial Sequence
  Description of Artificial Sequence: Synthetic oligonucleotide
gccagacaugcuauuuccu

SEQ ID NO: 2577971 - RNA, 19 nt, Artificial Sequence
  Description of Artificial Sequence: Synthetic oligonucleotide
agcccuccugcaggacuaa

SEQ ID NO: 2577972 - RNA, 19 nt, Artificial Sequence
  Description of Artificial Sequence: Synthetic oligonucleotide
ccagcucccuaagccuaug

SEQ ID NO: 2577973 - RNA, 19 nt, Artificial Sequence
  Description of Artificial Sequence: Synthetic oligonucleotide
gcucggcucggggcccugg

SEQ ID NO: 2577974 - RNA, 19 nt, Artificial Sequence
  Description of Artificial Sequence: Synthetic oligonucleotide
gcacggauacagcccuccu

SEQ ID NO: 2577975 - RNA, 19 nt, Artificial Sequence
  Description of Artificial Sequence: Synthetic oligonucleotide
cccugguuucagaaccacu

SEQ ID NO: 2577976 - RNA, 19 nt, Artificial Sequence
  Description of Artificial Sequence: Synthetic oligonucleotide
ccgucaagaaugcccuggu

SEQ ID NO: 2577977 - RNA, 19 nt, Artificial Sequence
  Description of Artificial Sequence: Synthetic oligonucleotide
cacuuacuuuuaguaucuu

SEQ ID NO: 2577978 - RNA, 19 nt, Artificial Sequence
  Description of Artificial Sequence: Synthetic oligonucleotide
gggcguggauaccacuguu

SEQ ID NO: 2577979 - RNA, 19 nt, Artificial Sequence
  Description of Artificial Sequence: Synthetic oligonucleotide
cggauacagcccuccugca

SEQ ID NO: 2577980 - RNA, 19 nt, Artificial Sequence
  Description of Artificial Sequence: Synthetic oligonucleotide
ggagacccaccugggaguu

SEQ ID NO: 2577981 - RNA, 19 nt, Artificial Sequence
  Description of Artificial Sequence: Synthetic oligonucleotide
gguggcagugggaggugau

SEQ ID NO: 2577982 - RNA, 19 nt, Artificial Sequence
  Description of Artificial Sequence: Synthetic oligonucleotide
gcccuccugcaggacuaac

SEQ ID NO: 2577983 - RNA, 19 nt, Artificial Sequence
  Description of Artificial Sequence: Synthetic oligonucleotide
ggcaaacugaagggcuauu

SEQ ID NO: 2577984 - RNA, 19 nt, Artificial Sequence
  Description of Artificial Sequence: Synthetic oligonucleotide
ggggcccugggauccgaau

SEQ ID NO: 2577985 - RNA, 19 nt, Artificial Sequence
  Description of Artificial Sequence: Synthetic oligonucleotide
gggcacggauacagcccuc

SEQ ID NO: 2577986 - RNA, 19 nt, Artificial Sequence
  Description of Artificial Sequence: Synthetic oligonucleotide
ggcucggcucggggcccug

SEQ ID NO: 2577987 - RNA, 19 nt, Artificial Sequence
  Description of Artificial Sequence: Synthetic oligonucleotide
cgucaagaaugcccugguu

SEQ ID NO: 2577988 - RNA, 19 nt, Artificial Sequence
  Description of Artificial Sequence: Synthetic oligonucleotide
cgacugcuuuaggagggcu

SEQ ID NO: 2577989 - RNA, 19 nt, Artificial Sequence
  Description of Artificial Sequence: Synthetic oligonucleotide
cggcucggggcccugggau

SEQ ID NO: 2577990 - RNA, 19 nt, Artificial Sequence
  Description of Artificial Sequence: Synthetic oligonucleotide
cggggcccugggauccgaa

SEQ ID NO: 2577991 - RNA, 19 nt, Artificial Sequence
  Description of Artificial Sequence: Synthetic oligonucleotide
gggcucggcucggggcccu

SEQ ID NO: 2577992 - RNA, 19 nt, Artificial Sequence
  Description of Artificial Sequence: Synthetic oligonucleotide
ccaaccccaugagcaccuu

SEQ ID NO: 2577993 - RNA, 19 nt, Artificial Sequence
  Description of Artificial Sequence: Synthetic oligonucleotide
agaacuauagcuuuaaggu

SEQ ID NO: 2577994 - RNA, 19 nt, Artificial Sequence
  Description of Artificial Sequence: Synthetic oligonucleotide
uguucaaagauucauucag

SEQ ID NO: 2577995 - RNA, 19 nt, Artificial Sequence
  Description of Artificial Sequence: Synthetic oligonucleotide
auuguucaaagauucauuc

SEQ ID NO: 2577996 - RNA, 19 nt, Artificial Sequence
  Description of Artificial Sequence: Synthetic oligonucleotide
ugaaauuucucaaucuggc

SEQ ID NO: 2577997 - RNA, 19 nt, Artificial Sequence
  Description of Artificial Sequence: Synthetic oligonucleotide
ucuauauccaguuucgcca

SEQ ID NO: 2577998 - RNA, 19 nt, Artificial Sequence
  Description of Artificial Sequence: Synthetic oligonucleotide
ugacaugugugucugaaag

SEQ ID NO: 2577999 - RNA, 19 nt, Artificial Sequence
  Description of Artificial Sequence: Synthetic oligonucleotide
cucauagccgucuauaucc

SEQ ID NO: 2578000 - RNA, 19 nt, Artificial Sequence
  Description of Artificial Sequence: Synthetic oligonucleotide
aagguaugcguacucauag

SEQ ID NO: 2578001 - RNA, 19 nt, Artificial Sequence
  Description of Artificial Sequence: Synthetic oligonucleotide
gaugaucagggcuaaagag

SEQ ID NO: 2578002 - RNA, 19 nt, Artificial Sequence
  Description of Artificial Sequence: Synthetic oligonucleotide
uguacauugagguacucug

SEQ ID NO: 2578003 - RNA, 19 nt, Artificial Sequence
  Description of Artificial Sequence: Synthetic oligonucleotide
ucugcugauaacauggaug

SEQ ID NO: 2578004 - RNA, 19 nt, Artificial Sequence
  Description of Artificial Sequence: Synthetic oligonucleotide
cuucgaacuucaaugaugg

SEQ ID NO: 2578005 - RNA, 19 nt, Artificial Sequence
  Description of Artificial Sequence: Synthetic oligonucleotide
aaauuucucaaucuggcuu

SEQ ID NO: 2578006 - RNA, 19 nt, Artificial Sequence
  Description of Artificial Sequence: Synthetic oligonucleotide
ugucaaaccuggaugauca

SEQ ID NO: 2578007 - RNA, 19 nt, Artificial Sequence
  Description of Artificial Sequence: Synthetic oligonucleotide
agaaagcuuaucuuccugg

SEQ ID NO: 2578008 - RNA, 19 nt, Artificial Sequence
  Description of Artificial Sequence: Synthetic oligonucleotide
caaaccuggaugaucaggg

SEQ ID NO: 2578009 - RNA, 19 nt, Artificial Sequence
  Description of Artificial Sequence: Synthetic oligonucleotide
uuagcuaaggugucaaaug

SEQ ID NO: 2578010 - RNA, 19 nt, Artificial Sequence
  Description of Artificial Sequence: Synthetic oligonucleotide
aguuucgccaugcuguuac

SEQ ID NO: 2578011 - RNA, 19 nt, Artificial Sequence
  Description of Artificial Sequence: Synthetic oligonucleotide
uuauccggucaccagaaag

SEQ ID NO: 2578012 - RNA, 19 nt, Artificial Sequence
  Description of Artificial Sequence: Synthetic oligonucleotide
aaugauggguguugacugg

SEQ ID NO: 2578013 - RNA, 19 nt, Artificial Sequence
  Description of Artificial Sequence: Synthetic oligonucleotide
cugcugauaacauggaugc

SEQ ID NO: 2578014 - RNA, 19 nt, Artificial Sequence
  Description of Artificial Sequence: Synthetic oligonucleotide
cuuaaaugugacaugugug

SEQ ID NO: 2578015 - RNA, 19 nt, Artificial Sequence
  Description of Artificial Sequence: Synthetic oligonucleotide
uccaguuucgccaugcugu

SEQ ID NO: 2578016 - RNA, 19 nt, Artificial Sequence
  Description of Artificial Sequence: Synthetic oligonucleotide
uguccaagugccuggaagg

SEQ ID NO: 2578017 - RNA, 19 nt, Artificial Sequence
  Description of Artificial Sequence: Synthetic oligonucleotide
caugacuugcuuuauccgg

SEQ ID NO: 2578018 - RNA, 19 nt, Artificial Sequence
  Description of Artificial Sequence: Synthetic oligonucleotide
agugcuuuagcuaaggugu

SEQ ID NO: 2578019 - RNA, 19 nt, Artificial Sequence
  Description of Artificial Sequence: Synthetic oligonucleotide
auaacauggaugcucccuc

SEQ ID NO: 2578020 - RNA, 19 nt, Artificial Sequence
  Description of Artificial Sequence: Synthetic oligonucleotide
agcuuaucuuccuggauac

SEQ ID NO: 2578021 - RNA, 19 nt, Artificial Sequence
  Description of Artificial Sequence: Synthetic oligonucleotide
agcuuuaagguaugcguac

SEQ ID NO: 2578022 - RNA, 19 nt, Artificial Sequence
  Description of Artificial Sequence: Synthetic oligonucleotide
uauccggucaccagaaagc

SEQ ID NO: 2578023 - RNA, 19 nt, Artificial Sequence
  Description of Artificial Sequence: Synthetic oligonucleotide
aacuauagcuuuaagguau

SEQ ID NO: 2578024 - RNA, 19 nt, Artificial Sequence
  Description of Artificial Sequence: Synthetic oligonucleotide
uucucaaucuggcuugugc

SEQ ID NO: 2578025 - RNA, 19 nt, Artificial Sequence
  Description of Artificial Sequence: Synthetic oligonucleotide
aaugcauggagaggaaaag

SEQ ID NO: 2578026 - RNA, 19 nt, Artificial Sequence
  Description of Artificial Sequence: Synthetic oligonucleotide
aagcuuaaaugugacaugu

SEQ ID NO: 2578027 - RNA, 19 nt, Artificial Sequence
  Description of Artificial Sequence: Synthetic oligonucleotide
cugauaacauggaugcucc

SEQ ID NO: 2578028 - RNA, 19 nt, Artificial Sequence
  Description of Artificial Sequence: Synthetic oligonucleotide
caugcuguuacagaacucc

SEQ ID NO: 2578029 - RNA, 19 nt, Artificial Sequence
  Description of Artificial Sequence: Synthetic oligonucleotide
ugguauugcaguccugucc

SEQ ID NO: 2578030 - RNA, 19 nt, Artificial Sequence
  Description of Artificial Sequence: Synthetic oligonucleotide
uccugcaacuuccagauau

SEQ ID NO: 2578031 - RNA, 19 nt, Artificial Sequence
  Description of Artificial Sequence: Synthetic oligonucleotide
uaugcguacucauagccgu

SEQ ID NO: 2578032 - RNA, 19 nt, Artificial Sequence
  Description of Artificial Sequence: Synthetic oligonucleotide
acuugcuuuauccggucac

SEQ ID NO: 2578033 - RNA, 19 nt, Artificial Sequence
  Description of Artificial Sequence: Synthetic oligonucleotide
guaguguacauugagguac

SEQ ID NO: 2578034 - RNA, 19 nt, Artificial Sequence
  Description of Artificial Sequence: Synthetic oligonucleotide
ucgaacuucaaugaugggu

SEQ ID NO: 2578035 - RNA, 19 nt, Artificial Sequence
  Description of Artificial Sequence: Synthetic oligonucleotide
aagcuuaucuuccuggaua

SEQ ID NO: 2578036 - RNA, 19 nt, Artificial Sequence
  Description of Artificial Sequence: Synthetic oligonucleotide
uguuacagaacuccugcaa

SEQ ID NO: 2578037 - RNA, 19 nt, Artificial Sequence
  Description of Artificial Sequence: Synthetic oligonucleotide
uuaagugcuuuagcuaagg

SEQ ID NO: 2578038 - RNA, 19 nt, Artificial Sequence
  Description of Artificial Sequence: Synthetic oligonucleotide
ucaaaccuggaugaucagg

SEQ ID NO: 2578039 - RNA, 19 nt, Artificial Sequence
  Description of Artificial Sequence: Synthetic oligonucleotide
gucuauauccaguuucgcc

SEQ ID NO: 2578040 - RNA, 19 nt, Artificial Sequence
  Description of Artificial Sequence: Synthetic oligonucleotide
ugccugucaaaccuggaug

SEQ ID NO: 2578041 - RNA, 19 nt, Artificial Sequence
  Description of Artificial Sequence: Synthetic oligonucleotide
cuaaggugucaaaugcccg

SEQ ID NO: 2578042 - RNA, 19 nt, Artificial Sequence
  Description of Artificial Sequence: Synthetic oligonucleotide
uaaggugucaaaugcccga

SEQ ID NO: 2578043 - RNA, 19 nt, Artificial Sequence
  Description of Artificial Sequence: Synthetic oligonucleotide
caucguaagcuuaaaugug

SEQ ID NO: 2578044 - RNA, 19 nt, Artificial Sequence
  Description of Artificial Sequence: Synthetic oligonucleotide
uuacagaacuccugcaacu

SEQ ID NO: 2578045 - RNA, 19 nt, Artificial Sequence
  Description of Artificial Sequence: Synthetic oligonucleotide
ggagaggaaaagcaggcgg

SEQ ID NO: 2578046 - RNA, 19 nt, Artificial Sequence
  Description of Artificial Sequence: Synthetic oligonucleotide
uuuaagguaugcguacuca

SEQ ID NO: 2578047 - RNA, 19 nt, Artificial Sequence
  Description of Artificial Sequence: Synthetic oligonucleotide
caccauuguucaaagauuc

SEQ ID NO: 2578048 - RNA, 19 nt, Artificial Sequence
  Description of Artificial Sequence: Synthetic oligonucleotide
uuuagcuaaggugucaaau

SEQ ID NO: 2578049 - RNA, 19 nt, Artificial Sequence
  Description of Artificial Sequence: Synthetic oligonucleotide
aaggcugggauugaccuug

SEQ ID NO: 2578050 - RNA, 19 nt, Artificial Sequence
  Description of Artificial Sequence: Synthetic oligonucleotide
gaguaauuucacuugcaga

SEQ ID NO: 2578051 - RNA, 19 nt, Artificial Sequence
  Description of Artificial Sequence: Synthetic oligonucleotide
auauccaguuucgccaugc

SEQ ID NO: 2578052 - RNA, 19 nt, Artificial Sequence
  Description of Artificial Sequence: Synthetic oligonucleotide
cuguaguuccaucugugcc

SEQ ID NO: 2578053 - RNA, 19 nt, Artificial Sequence
  Description of Artificial Sequence: Synthetic oligonucleotide
gguggagagacucaugacc

SEQ ID NO: 2578054 - RNA, 19 nt, Artificial Sequence
  Description of Artificial Sequence: Synthetic oligonucleotide
agguaugcguacucauagc

SEQ ID NO: 2578055 - RNA, 19 nt, Artificial Sequence
  Description of Artificial Sequence: Synthetic oligonucleotide
ugaccuugcccaaugcaug

SEQ ID NO: 2578056 - RNA, 19 nt, Artificial Sequence
  Description of Artificial Sequence: Synthetic oligonucleotide
uugaccuugcccaaugcau

SEQ ID NO: 2578057 - RNA, 19 nt, Artificial Sequence
  Description of Artificial Sequence: Synthetic oligonucleotide
uugugccugucaaaccugg

SEQ ID NO: 2578058 - RNA, 19 nt, Artificial Sequence
  Description of Artificial Sequence: Synthetic oligonucleotide
gcuaaagagaacuauagcu

SEQ ID NO: 2578059 - RNA, 19 nt, Artificial Sequence
  Description of Artificial Sequence: Synthetic oligonucleotide
agacugguccucuggcugc

SEQ ID NO: 2578060 - RNA, 19 nt, Artificial Sequence
  Description of Artificial Sequence: Synthetic oligonucleotide
aaagcuuaucuuccuggau

SEQ ID NO: 2578061 - RNA, 19 nt, Artificial Sequence
  Description of Artificial Sequence: Synthetic oligonucleotide
gaccuugcccaaugcaugg

SEQ ID NO: 2578062 - RNA, 19 nt, Artificial Sequence
  Description of Artificial Sequence: Synthetic oligonucleotide
gguaugcguacucauagcc

SEQ ID NO: 2578063 - RNA, 19 nt, Artificial Sequence
  Description of Artificial Sequence: Synthetic oligonucleotide
uuccgaagugucaccauug

SEQ ID NO: 2578064 - RNA, 19 nt, Artificial Sequence
  Description of Artificial Sequence: Synthetic oligonucleotide
uaguccuguaguuccaucu

SEQ ID NO: 2578065 - RNA, 19 nt, Artificial Sequence
  Description of Artificial Sequence: Synthetic oligonucleotide
ugcuguuacagaacuccug

SEQ ID NO: 2578066 - RNA, 19 nt, Artificial Sequence
  Description of Artificial Sequence: Synthetic oligonucleotide
agcuaaggugucaaaugcc

SEQ ID NO: 2578067 - RNA, 19 nt, Artificial Sequence
  Description of Artificial Sequence: Synthetic oligonucleotide
aaaagcaggcgggaugcag

SEQ ID NO: 2578068 - RNA, 19 nt, Artificial Sequence
  Description of Artificial Sequence: Synthetic oligonucleotide
aucuauuccaucugccaga

SEQ ID NO: 2578069 - RNA, 19 nt, Artificial Sequence
  Description of Artificial Sequence: Synthetic oligonucleotide
uuaagguaugcguacucau

SEQ ID NO: 2578070 - RNA, 19 nt, Artificial Sequence
  Description of Artificial Sequence: Synthetic oligonucleotide
ugucaaaugcccgaguaau

SEQ ID NO: 2578071 - RNA, 19 nt, Artificial Sequence
  Description of Artificial Sequence: Synthetic oligonucleotide
aaaugcccgaguaauuuca

SEQ ID NO: 2578072 - RNA, 19 nt, Artificial Sequence
  Description of Artificial Sequence: Synthetic oligonucleotide
augguugacaauggcugcc

SEQ ID NO: 2578073 - RNA, 19 nt, Artificial Sequence
  Description of Artificial Sequence: Synthetic oligonucleotide
ucaccauuguucaaagauu

SEQ ID NO: 2578074 - RNA, 19 nt, Artificial Sequence
  Description of Artificial Sequence: Synthetic oligonucleotide
gauaugcuccaugacuugc

SEQ ID NO: 2578075 - RNA, 19 nt, Artificial Sequence
  Description of Artificial Sequence: Synthetic oligonucleotide
gaaagcuuaucuuccugga

SEQ ID NO: 2578076 - RNA, 19 nt, Artificial Sequence
  Description of Artificial Sequence: Synthetic oligonucleotide
gcaacuuccagauaugcuc

SEQ ID NO: 2578077 - RNA, 19 nt, Artificial Sequence
  Description of Artificial Sequence: Synthetic oligonucleotide
agcaucuauuccaucugcc

SEQ ID NO: 2578078 - RNA, 19 nt, Artificial Sequence
  Description of Artificial Sequence: Synthetic oligonucleotide
uagcuuuaagguaugcgua

SEQ ID NO: 2578079 - RNA, 19 nt, Artificial Sequence
  Description of Artificial Sequence: Synthetic oligonucleotide
ucguaagcuuaaaugugac

SEQ ID NO: 2578080 - RNA, 19 nt, Artificial Sequence
  Description of Artificial Sequence: Synthetic oligonucleotide
auugaccuugcccaaugca

SEQ ID NO: 2578081 - RNA, 19 nt, Artificial Sequence
  Description of Artificial Sequence: Synthetic oligonucleotide
gguauuaagugcuuuagcu

SEQ ID NO: 2578082 - RNA, 19 nt, Artificial Sequence
  Description of Artificial Sequence: Synthetic oligonucleotide
aaugcccgaguaauuucac

SEQ ID NO: 2578083 - RNA, 19 nt, Artificial Sequence
  Description of Artificial Sequence: Synthetic oligonucleotide
guaugcguacucauagccg

SEQ ID NO: 2578084 - RNA, 19 nt, Artificial Sequence
  Description of Artificial Sequence: Synthetic oligonucleotide
gcuguuacagaacuccugc

SEQ ID NO: 2578085 - RNA, 19 nt, Artificial Sequence
  Description of Artificial Sequence: Synthetic oligonucleotide
ugaagcacuaucuguggua

SEQ ID NO: 2578086 - RNA, 19 nt, Artificial Sequence
  Description of Artificial Sequence: Synthetic oligonucleotide
uaagguaugcguacucaua

SEQ ID NO: 2578087 - RNA, 19 nt, Artificial Sequence
  Description of Artificial Sequence: Synthetic oligonucleotide
gaacuauagcuuuaaggua

SEQ ID NO: 2578088 - RNA, 19 nt, Artificial Sequence
  Description of Artificial Sequence: Synthetic oligonucleotide
uguaguguacauugaggua

SEQ ID NO: 2578089 - RNA, 19 nt, Artificial Sequence
  Description of Artificial Sequence: Synthetic oligonucleotide
ucaaaugcccgaguaauuu

SEQ ID NO: 2578090 - RNA, 19 nt, Artificial Sequence
  Description of Artificial Sequence: Synthetic oligonucleotide
acuaucugugguauuaagu

SEQ ID NO: 2578091 - RNA, 19 nt, Artificial Sequence
  Description of Artificial Sequence: Synthetic oligonucleotide
aacauggaugcucccuccu

SEQ ID NO: 2578092 - RNA, 19 nt, Artificial Sequence
  Description of Artificial Sequence: Synthetic oligonucleotide
aaggugucaaaugcccgag

SEQ ID NO: 2578093 - RNA, 19 nt, Artificial Sequence
  Description of Artificial Sequence: Synthetic oligonucleotide
aagagaacuauagcuuuaa

SEQ ID NO: 2578094 - RNA, 19 nt, Artificial Sequence
  Description of Artificial Sequence: Synthetic oligonucleotide
uaacauggaugcucccucc

SEQ ID NO: 2578095 - RNA, 19 nt, Artificial Sequence
  Description of Artificial Sequence: Synthetic oligonucleotide
gggccuucgaacuucaaug

SEQ ID NO: 2578096 - RNA, 19 nt, Artificial Sequence
  Description of Artificial Sequence: Synthetic oligonucleotide
uguugacuggucucugcug

SEQ ID NO: 2578097 - RNA, 19 nt, Artificial Sequence
  Description of Artificial Sequence: Synthetic oligonucleotide
gugguauuaagugcuuuag

SEQ ID NO: 2578098 - RNA, 19 nt, Artificial Sequence
  Description of Artificial Sequence: Synthetic oligonucleotide
ucauagccgucuauaucca

SEQ ID NO: 2578099 - RNA, 19 nt, Artificial Sequence
  Description of Artificial Sequence: Synthetic oligonucleotide
gguauugcaguccugucca

SEQ ID NO: 2578100 - RNA, 19 nt, Artificial Sequence
  Description of Artificial Sequence: Synthetic oligonucleotide
guugacuggucucugcuga

SEQ ID NO: 2578101 - RNA, 19 nt, Artificial Sequence
  Description of Artificial Sequence: Synthetic oligonucleotide
gauugaccuugcccaaugc

SEQ ID NO: 2578102 - RNA, 19 nt, Artificial Sequence
  Description of Artificial Sequence: Synthetic oligonucleotide
acauggaugcucccuccuc

SEQ ID NO: 2578103 - RNA, 19 nt, Artificial Sequence
  Description of Artificial Sequence: Synthetic oligonucleotide
aucguaagcuuaaauguga

SEQ ID NO: 2578104 - RNA, 19 nt, Artificial Sequence
  Description of Artificial Sequence: Synthetic oligonucleotide
ugugccuucuccugaaauu

SEQ ID NO: 2578105 - RNA, 19 nt, Artificial Sequence
  Description of Artificial Sequence: Synthetic oligonucleotide
aucugccagacuuggaggu

SEQ ID NO: 2578106 - RNA, 19 nt, Artificial Sequence
  Description of Artificial Sequence: Synthetic oligonucleotide
ugugacaugugugucugaa

SEQ ID NO: 2578107 - RNA, 19 nt, Artificial Sequence
  Description of Artificial Sequence: Synthetic oligonucleotide
uuuccgaagugucaccauu

SEQ ID NO: 2578108 - RNA, 19 nt, Artificial Sequence
  Description of Artificial Sequence: Synthetic oligonucleotide
ugcccgaguaauuucacuu

SEQ ID NO: 2578109 - RNA, 19 nt, Artificial Sequence
  Description of Artificial Sequence: Synthetic oligonucleotide
cuuuaagguaugcguacuc

SEQ ID NO: 2578110 - RNA, 19 nt, Artificial Sequence
  Description of Artificial Sequence: Synthetic oligonucleotide
ucacuugcagacugguccu

SEQ ID NO: 2578111 - RNA, 19 nt, Artificial Sequence
  Description of Artificial Sequence: Synthetic oligonucleotide
uccuggauacuguucugca

SEQ ID NO: 2578112 - RNA, 19 nt, Artificial Sequence
  Description of Artificial Sequence: Synthetic oligonucleotide
uauugcaguccuguccaag

SEQ ID NO: 2578113 - RNA, 19 nt, Artificial Sequence
  Description of Artificial Sequence: Synthetic oligonucleotide
uucgaacuucaaugauggg

SEQ ID NO: 2578114 - RNA, 19 nt, Artificial Sequence
  Description of Artificial Sequence: Synthetic oligonucleotide
uaguguacauugagguacu

SEQ ID NO: 2578115 - RNA, 19 nt, Artificial Sequence
  Description of Artificial Sequence: Synthetic oligonucleotide
cuaaagagaacuauagcuu

SEQ ID NO: 2578116 - RNA, 19 nt, Artificial Sequence
  Description of Artificial Sequence: Synthetic oligonucleotide
cacuaucugugguauuaag

SEQ ID NO: 2578117 - RNA, 19 nt, Artificial Sequence
  Description of Artificial Sequence: Synthetic oligonucleotide
gaaauuucucaaucuggcu

SEQ ID NO: 2578118 - RNA, 19 nt, Artificial Sequence
  Description of Artificial Sequence: Synthetic oligonucleotide
caaaugcccgaguaauuuc

SEQ ID NO: 2578119 - RNA, 19 nt, Artificial Sequence
  Description of Artificial Sequence: Synthetic oligonucleotide
ccugaaauuucucaaucug

SEQ ID NO: 2578120 - RNA, 19 nt, Artificial Sequence
  Description of Artificial Sequence: Synthetic oligonucleotide
uuucgccaugcuguuacag

SEQ ID NO: 2578121 - RNA, 19 nt, Artificial Sequence
  Description of Artificial Sequence: Synthetic oligonucleotide
cuugcuuuauccggucacc

SEQ ID NO: 2578122 - RNA, 19 nt, Artificial Sequence
  Description of Artificial Sequence: Synthetic oligonucleotide
cgaagugucaccauuguuc

SEQ ID NO: 2578123 - RNA, 19 nt, Artificial Sequence
  Description of Artificial Sequence: Synthetic oligonucleotide
agacucacagauguagugu

SEQ ID NO: 2578124 - RNA, 19 nt, Artificial Sequence
  Description of Artificial Sequence: Synthetic oligonucleotide
cuuccagauaugcuccaug

SEQ ID NO: 2578125 - RNA, 19 nt, Artificial Sequence
  Description of Artificial Sequence: Synthetic oligonucleotide
ggaaaagcaggcgggaugc

SEQ ID NO: 2578126 - RNA, 19 nt, Artificial Sequence
  Description of Artificial Sequence: Synthetic oligonucleotide
auuaagugcuuuagcuaag

SEQ ID NO: 2578127 - RNA, 19 nt, Artificial Sequence
  Description of Artificial Sequence: Synthetic oligonucleotide
gcuaaggugucaaaugccc

SEQ ID NO: 2578128 - RNA, 19 nt, Artificial Sequence
  Description of Artificial Sequence: Synthetic oligonucleotide
ugauaacauggaugcuccc

SEQ ID NO: 2578129 - RNA, 19 nt, Artificial Sequence
  Description of Artificial Sequence: Synthetic oligonucleotide
gaccugggcgcacugggcc

SEQ ID NO: 2578130 - RNA, 19 nt, Artificial Sequence
  Description of Artificial Sequence: Synthetic oligonucleotide
gacucacagauguagugua

SEQ ID NO: 2578131 - RNA, 19 nt, Artificial Sequence
  Description of Artificial Sequence: Synthetic oligonucleotide
gcaucguaagcuuaaaugu

SEQ ID NO: 2578132 - RNA, 19 nt, Artificial Sequence
  Description of Artificial Sequence: Synthetic oligonucleotide
ccuucgaacuucaaugaug

SEQ ID NO: 2578133 - RNA, 19 nt, Artificial Sequence
  Description of Artificial Sequence: Synthetic oligonucleotide
acuguucugcagaugguug

SEQ ID NO: 2578134 - RNA, 19 nt, Artificial Sequence
  Description of Artificial Sequence: Synthetic oligonucleotide
cagacuuggaggugaagca

SEQ ID NO: 2578135 - RNA, 19 nt, Artificial Sequence
  Description of Artificial Sequence: Synthetic oligonucleotide
cugccaagaugguggagag

SEQ ID NO: 2578136 - RNA, 19 nt, Artificial Sequence
  Description of Artificial Sequence: Synthetic oligonucleotide
auuucacuugcagacuggu

SEQ ID NO: 2578137 - RNA, 19 nt, Artificial Sequence
  Description of Artificial Sequence: Synthetic oligonucleotide
gauaacauggaugcucccu

SEQ ID NO: 2578138 - RNA, 19 nt, Artificial Sequence
  Description of Artificial Sequence: Synthetic oligonucleotide
ugcucccuccuccacuagc

SEQ ID NO: 2578139 - RNA, 19 nt, Artificial Sequence
  Description of Artificial Sequence: Synthetic oligonucleotide
ugagguacucuggcauagg

SEQ ID NO: 2578140 - RNA, 19 nt, Artificial Sequence
  Description of Artificial Sequence: Synthetic oligonucleotide
ggaggugaagcacuaucug

SEQ ID NO: 2578141 - RNA, 19 nt, Artificial Sequence
  Description of Artificial Sequence: Synthetic oligonucleotide
agcacuaucugugguauua

SEQ ID NO: 2578142 - RNA, 19 nt, Artificial Sequence
  Description of Artificial Sequence: Synthetic oligonucleotide
cauagccgucuauauccag

SEQ ID NO: 2578143 - RNA, 19 nt, Artificial Sequence
  Description of Artificial Sequence: Synthetic oligonucleotide
uaugcuccaugacuugcuu

SEQ ID NO: 2578144 - RNA, 19 nt, Artificial Sequence
  Description of Artificial Sequence: Synthetic oligonucleotide
ucagggcuaaagagaacua

SEQ ID NO: 2578145 - RNA, 19 nt, Artificial Sequence
  Description of Artificial Sequence: Synthetic oligonucleotide
cuuuauccggucaccagaa

SEQ ID NO: 2578146 - RNA, 19 nt, Artificial Sequence
  Description of Artificial Sequence: Synthetic oligonucleotide
gacuggucucugcugauaa

SEQ ID NO: 2578147 - RNA, 19 nt, Artificial Sequence
  Description of Artificial Sequence: Synthetic oligonucleotide
ugcuuuagcuaagguguca

SEQ ID NO: 2578148 - RNA, 19 nt, Artificial Sequence
  Description of Artificial Sequence: Synthetic oligonucleotide
cuauagcuuuaagguaugc

SEQ ID NO: 2578149 - RNA, 19 nt, Artificial Sequence
  Description of Artificial Sequence: Synthetic oligonucleotide
gcgggaugcagacucacag

SEQ ID NO: 2578150 - RNA, 19 nt, Artificial Sequence
  Description of Artificial Sequence: Synthetic oligonucleotide
cauuccagcaggcccgcac

SEQ ID NO: 2578151 - RNA, 19 nt, Artificial Sequence
  Description of Artificial Sequence: Synthetic oligonucleotide
ggaugaucagggcuaaaga

SEQ ID NO: 2578152 - RNA, 19 nt, Artificial Sequence
  Description of Artificial Sequence: Synthetic oligonucleotide
uuuauccggucaccagaaa

SEQ ID NO: 2578153 - RNA, 19 nt, Artificial Sequence
  Description of Artificial Sequence: Synthetic oligonucleotide
acuauagcuuuaagguaug

SEQ ID NO: 2578154 - RNA, 19 nt, Artificial Sequence
  Description of Artificial Sequence: Synthetic oligonucleotide
ccaugacuugcuuuauccg

SEQ ID NO: 2578155 - RNA, 19 nt, Artificial Sequence
  Description of Artificial Sequence: Synthetic oligonucleotide
uagccgucuauauccaguu

SEQ ID NO: 2578156 - RNA, 19 nt, Artificial Sequence
  Description of Artificial Sequence: Synthetic oligonucleotide
caagugccuggaaggcugg

SEQ ID NO: 2578157 - RNA, 19 nt, Artificial Sequence
  Description of Artificial Sequence: Synthetic oligonucleotide
ugugccugucaaaccugga

SEQ ID NO: 2578158 - RNA, 19 nt, Artificial Sequence
  Description of Artificial Sequence: Synthetic oligonucleotide
ugaccugggcgcacugggc

SEQ ID NO: 2578159 - RNA, 19 nt, Artificial Sequence
  Description of Artificial Sequence: Synthetic oligonucleotide
gccgucuauauccaguuuc

SEQ ID NO: 2578160 - RNA, 19 nt, Artificial Sequence
  Description of Artificial Sequence: Synthetic oligonucleotide
cuggucucugcugauaaca

SEQ ID NO: 2578161 - RNA, 19 nt, Artificial Sequence
  Description of Artificial Sequence: Synthetic oligonucleotide
ugacuugcuuuauccgguc

SEQ ID NO: 2578162 - RNA, 19 nt, Artificial Sequence
  Description of Artificial Sequence: Synthetic oligonucleotide
gcuuuauccggucaccaga

SEQ ID NO: 2578163 - RNA, 19 nt, Artificial Sequence
  Description of Artificial Sequence: Synthetic oligonucleotide
ugcguacucauagccgucu

SEQ ID NO: 2578164 - RNA, 19 nt, Artificial Sequence
  Description of Artificial Sequence: Synthetic oligonucleotide
uacagaacuccugcaacuu

SEQ ID NO: 2578165 - RNA, 19 nt, Artificial Sequence
  Description of Artificial Sequence: Synthetic oligonucleotide
ggauugaccuugcccaaug

SEQ ID NO: 2578166 - RNA, 19 nt, Artificial Sequence
  Description of Artificial Sequence: Synthetic oligonucleotide
gacuugcuuuauccgguca

SEQ ID NO: 2578167 - RNA, 19 nt, Artificial Sequence
  Description of Artificial Sequence: Synthetic oligonucleotide
cgaguaauuucacuugcag

SEQ ID NO: 2578168 - RNA, 19 nt, Artificial Sequence
  Description of Artificial Sequence: Synthetic oligonucleotide
cugucaaaccuggaugauc

SEQ ID NO: 2578169 - RNA, 19 nt, Artificial Sequence
  Description of Artificial Sequence: Synthetic oligonucleotide
gucaaaccuggaugaucag

SEQ ID NO: 2578170 - RNA, 19 nt, Artificial Sequence
  Description of Artificial Sequence: Synthetic oligonucleotide
auggaugcucccuccucca

SEQ ID NO: 2578171 - RNA, 19 nt, Artificial Sequence
  Description of Artificial Sequence: Synthetic oligonucleotide
auaugcuccaugacuugcu

SEQ ID NO: 2578172 - RNA, 19 nt, Artificial Sequence
  Description of Artificial Sequence: Synthetic oligonucleotide
uccaagugccuggaaggcu

SEQ ID NO: 2578173 - RNA, 19 nt, Artificial Sequence
  Description of Artificial Sequence: Synthetic oligonucleotide
augcccgaguaauuucacu

SEQ ID NO: 2578174 - RNA, 19 nt, Artificial Sequence
  Description of Artificial Sequence: Synthetic oligonucleotide
ccaagugccuggaaggcug

SEQ ID NO: 2578175 - RNA, 19 nt, Artificial Sequence
  Description of Artificial Sequence: Synthetic oligonucleotide
aguguacauugagguacuc

SEQ ID NO: 2578176 - RNA, 19 nt, Artificial Sequence
  Description of Artificial Sequence: Synthetic oligonucleotide
ugggauugaccuugcccaa

SEQ ID NO: 2578177 - RNA, 19 nt, Artificial Sequence
  Description of Artificial Sequence: Synthetic oligonucleotide
agaugguggagagacucau

SEQ ID NO: 2578178 - RNA, 19 nt, Artificial Sequence
  Description of Artificial Sequence: Synthetic oligonucleotide
caggcccgcaccaggcugg

SEQ ID NO: 2578179 - RNA, 19 nt, Artificial Sequence
  Description of Artificial Sequence: Synthetic oligonucleotide
cugguauugcaguccuguc

SEQ ID NO: 2578180 - RNA, 19 nt, Artificial Sequence
  Description of Artificial Sequence: Synthetic oligonucleotide
augauggguguugacuggu

SEQ ID NO: 2578181 - RNA, 19 nt, Artificial Sequence
  Description of Artificial Sequence: Synthetic oligonucleotide
gugucaaaugcccgaguaa

SEQ ID NO: 2578182 - RNA, 19 nt, Artificial Sequence
  Description of Artificial Sequence: Synthetic oligonucleotide
cccgaguaauuucacuugc

SEQ ID NO: 2578183 - RNA, 19 nt, Artificial Sequence
  Description of Artificial Sequence: Synthetic oligonucleotide
cugcauuuccgaaguguca

SEQ ID NO: 2578184 - RNA, 19 nt, Artificial Sequence
  Description of Artificial Sequence: Synthetic oligonucleotide
aagugccuggaaggcuggg

SEQ ID NO: 2578185 - RNA, 19 nt, Artificial Sequence
  Description of Artificial Sequence: Synthetic oligonucleotide
agggcuaaagagaacuaua

SEQ ID NO: 2578186 - RNA, 19 nt, Artificial Sequence
  Description of Artificial Sequence: Synthetic oligonucleotide
cauuguucaaagauucauu

SEQ ID NO: 2578187 - RNA, 19 nt, Artificial Sequence
  Description of Artificial Sequence: Synthetic oligonucleotide
cauugagguacucuggcau

SEQ ID NO: 2578188 - RNA, 19 nt, Artificial Sequence
  Description of Artificial Sequence: Synthetic oligonucleotide
cagauguaguguacauuga

SEQ ID NO: 2578189 - RNA, 19 nt, Artificial Sequence
  Description of Artificial Sequence: Synthetic oligonucleotide
gccugucaaaccuggauga

SEQ ID NO: 2578190 - RNA, 19 nt, Artificial Sequence
  Description of Artificial Sequence: Synthetic oligonucleotide
gaagcacuaucugugguau

SEQ ID NO: 2578191 - RNA, 19 nt, Artificial Sequence
  Description of Artificial Sequence: Synthetic oligonucleotide
ggugucaaaugcccgagua

SEQ ID NO: 2578192 - RNA, 19 nt, Artificial Sequence
  Description of Artificial Sequence: Synthetic oligonucleotide
uggaugcucccuccuccac

SEQ ID NO: 2578193 - RNA, 19 nt, Artificial Sequence
  Description of Artificial Sequence: Synthetic oligonucleotide
gcccgaguaauuucacuug

SEQ ID NO: 2578194 - RNA, 19 nt, Artificial Sequence
  Description of Artificial Sequence: Synthetic oligonucleotide
uugacuggucucugcugau

SEQ ID NO: 2578195 - RNA, 19 nt, Artificial Sequence
  Description of Artificial Sequence: Synthetic oligonucleotide
auuucucaaucuggcuugu

SEQ ID NO: 2578196 - RNA, 19 nt, Artificial Sequence
  Description of Artificial Sequence: Synthetic oligonucleotide
aggugucaaaugcccgagu

SEQ ID NO: 2578197 - RNA, 19 nt, Artificial Sequence
  Description of Artificial Sequence: Synthetic oligonucleotide
guacucauagccgucuaua

SEQ ID NO: 2578198 - RNA, 19 nt, Artificial Sequence
  Description of Artificial Sequence: Synthetic oligonucleotide
acucaugaccugggcgcac

SEQ ID NO: 2578199 - RNA, 19 nt, Artificial Sequence
  Description of Artificial Sequence: Synthetic oligonucleotide
ggccuucgaacuucaauga

SEQ ID NO: 2578200 - RNA, 19 nt, Artificial Sequence
  Description of Artificial Sequence: Synthetic oligonucleotide
acuugcagacugguccucu

SEQ ID NO: 2578201 - RNA, 19 nt, Artificial Sequence
  Description of Artificial Sequence: Synthetic oligonucleotide
aggcgggaugcagacucac

SEQ ID NO: 2578202 - RNA, 19 nt, Artificial Sequence
  Description of Artificial Sequence: Synthetic oligonucleotide
uggcauagggcugggcauc

SEQ ID NO: 2578203 - RNA, 19 nt, Artificial Sequence
  Description of Artificial Sequence: Synthetic oligonucleotide
cuuuagcuaaggugucaaa

SEQ ID NO: 2578204 - RNA, 19 nt, Artificial Sequence
  Description of Artificial Sequence: Synthetic oligonucleotide
auagggcugggcaucguaa

SEQ ID NO: 2578205 - RNA, 19 nt, Artificial Sequence
  Description of Artificial Sequence: Synthetic oligonucleotide
augcuguuacagaacuccu

SEQ ID NO: 2578206 - RNA, 19 nt, Artificial Sequence
  Description of Artificial Sequence: Synthetic oligonucleotide
cugggcaucguaagcuuaa

SEQ ID NO: 2578207 - RNA, 19 nt, Artificial Sequence
  Description of Artificial Sequence: Synthetic oligonucleotide
ccuccacuagcaucuauuc

SEQ ID NO: 2578208 - RNA, 19 nt, Artificial Sequence
  Description of Artificial Sequence: Synthetic oligonucleotide
uccggucaccagaaagcuu

SEQ ID NO: 2578209 - RNA, 19 nt, Artificial Sequence
  Description of Artificial Sequence: Synthetic oligonucleotide
guguugacuggucucugcu

SEQ ID NO: 2578210 - RNA, 19 nt, Artificial Sequence
  Description of Artificial Sequence: Synthetic oligonucleotide
augcguacucauagccguc

SEQ ID NO: 2578211 - RNA, 19 nt, Artificial Sequence
  Description of Artificial Sequence: Synthetic oligonucleotide
uggcugcauuuccgaagug

SEQ ID NO: 2578212 - RNA, 19 nt, Artificial Sequence
  Description of Artificial Sequence: Synthetic oligonucleotide
auacuguucugcagauggu

SEQ ID NO: 2578213 - RNA, 19 nt, Artificial Sequence
  Description of Artificial Sequence: Synthetic oligonucleotide
uccuguccaagugccugga

SEQ ID NO: 2578214 - RNA, 19 nt, Artificial Sequence
  Description of Artificial Sequence: Synthetic oligonucleotide
gacucaugaccugggcgca

SEQ ID NO: 2578215 - RNA, 19 nt, Artificial Sequence
  Description of Artificial Sequence: Synthetic oligonucleotide
cuggcugcauuuccgaagu

SEQ ID NO: 2578216 - RNA, 19 nt, Artificial Sequence
  Description of Artificial Sequence: Synthetic oligonucleotide
cuggaaggcugggauugac

SEQ ID NO: 2578217 - RNA, 19 nt, Artificial Sequence
  Description of Artificial Sequence: Synthetic oligonucleotide
ugccuggaaggcugggauu

SEQ ID NO: 2578218 - RNA, 19 nt, Artificial Sequence
  Description of Artificial Sequence: Synthetic oligonucleotide
ugacuggucucugcugaua

SEQ ID NO: 2578219 - RNA, 19 nt, Artificial Sequence
  Description of Artificial Sequence: Synthetic oligonucleotide
augugacaugugugucuga

SEQ ID NO: 2578220 - RNA, 19 nt, Artificial Sequence
  Description of Artificial Sequence: Synthetic oligonucleotide
ccggucaccagaaagcuua

SEQ ID NO: 2578221 - RNA, 19 nt, Artificial Sequence
  Description of Artificial Sequence: Synthetic oligonucleotide
guucugcagaugguugaca

SEQ ID NO: 2578222 - RNA, 19 nt, Artificial Sequence
  Description of Artificial Sequence: Synthetic oligonucleotide
guguacauugagguacucu

SEQ ID NO: 2578223 - RNA, 19 nt, Artificial Sequence
  Description of Artificial Sequence: Synthetic oligonucleotide
ggcauagggcugggcaucg

SEQ ID NO: 2578224 - RNA, 19 nt, Artificial Sequence
  Description of Artificial Sequence: Synthetic oligonucleotide
guccuguaguuccaucugu

SEQ ID NO: 2578225 - RNA, 19 nt, Artificial Sequence
  Description of Artificial Sequence: Synthetic oligonucleotide
ggaugcagacucacagaug

SEQ ID NO: 2578226 - RNA, 19 nt, Artificial Sequence
  Description of Artificial Sequence: Synthetic oligonucleotide
ugggcaucguaagcuuaaa

SEQ ID NO: 2578227 - RNA, 19 nt, Artificial Sequence
  Description of Artificial Sequence: Synthetic oligonucleotide
cugccagacuuggagguga

SEQ ID NO: 2578228 - RNA, 19 nt, Artificial Sequence
  Description of Artificial Sequence: Synthetic oligonucleotide
gugcuuuagcuaagguguc

SEQ ID NO: 2578229 - RNA, 19 nt, Artificial Sequence
  Description of Artificial Sequence: Synthetic oligonucleotide
gugccugucaaaccuggau

SEQ ID NO: 2578230 - RNA, 19 nt, Artificial Sequence
  Description of Artificial Sequence: Synthetic oligonucleotide
agccgucuauauccaguuu

SEQ ID NO: 2578231 - RNA, 19 nt, Artificial Sequence
  Description of Artificial Sequence: Synthetic oligonucleotide
acuuggaggugaagcacua

SEQ ID NO: 2578232 - RNA, 19 nt, Artificial Sequence
  Description of Artificial Sequence: Synthetic oligonucleotide
gcuuuagcuaaggugucaa

SEQ ID NO: 2578233 - RNA, 19 nt, Artificial Sequence
  Description of Artificial Sequence: Synthetic oligonucleotide
aggcugggauugaccuugc

SEQ ID NO: 2578234 - RNA, 19 nt, Artificial Sequence
  Description of Artificial Sequence: Synthetic oligonucleotide
gcugguauugcaguccugu

SEQ ID NO: 2578235 - RNA, 19 nt, Artificial Sequence
  Description of Artificial Sequence: Synthetic oligonucleotide
guauugcaguccuguccaa

SEQ ID NO: 2578236 - RNA, 19 nt, Artificial Sequence
  Description of Artificial Sequence: Synthetic oligonucleotide
accuugcccaaugcaugga

SEQ ID NO: 2578237 - RNA, 19 nt, Artificial Sequence
  Description of Artificial Sequence: Synthetic oligonucleotide
gacugguccucuggcugca

SEQ ID NO: 2578238 - RNA, 19 nt, Artificial Sequence
  Description of Artificial Sequence: Synthetic oligonucleotide
ccgaguaauuucacuugca

SEQ ID NO: 2578239 - RNA, 19 nt, Artificial Sequence
  Description of Artificial Sequence: Synthetic oligonucleotide
cguaagcuuaaaugugaca

SEQ ID NO: 2578240 - RNA, 19 nt, Artificial Sequence
  Description of Artificial Sequence: Synthetic oligonucleotide
gaggaaaagcaggcgggau

SEQ ID NO: 2578241 - RNA, 19 nt, Artificial Sequence
  Description of Artificial Sequence: Synthetic oligonucleotide
ccaugcuguuacagaacuc

SEQ ID NO: 2578242 - RNA, 19 nt, Artificial Sequence
  Description of Artificial Sequence: Synthetic oligonucleotide
cagggcuaaagagaacuau

SEQ ID NO: 2578243 - RNA, 19 nt, Artificial Sequence
  Description of Artificial Sequence: Synthetic oligonucleotide
cacuugcagacugguccuc

SEQ ID NO: 2578244 - RNA, 19 nt, Artificial Sequence
  Description of Artificial Sequence: Synthetic oligonucleotide
ggcugcauuuccgaagugu

SEQ ID NO: 2578245 - RNA, 19 nt, Artificial Sequence
  Description of Artificial Sequence: Synthetic oligonucleotide
ugggcgcacugggccaggc

SEQ ID NO: 2578246 - RNA, 19 nt, Artificial Sequence
  Description of Artificial Sequence: Synthetic oligonucleotide
cgucuauauccaguuucgc

SEQ ID NO: 2578247 - RNA, 19 nt, Artificial Sequence
  Description of Artificial Sequence: Synthetic oligonucleotide
agcaggcgggaugcagacu

SEQ ID NO: 2578248 - RNA, 19 nt, Artificial Sequence
  Description of Artificial Sequence: Synthetic oligonucleotide
gucaaaugcccgaguaauu

SEQ ID NO: 2578249 - RNA, 19 nt, Artificial Sequence
  Description of Artificial Sequence: Synthetic oligonucleotide
ccauuguucaaagauucau

SEQ ID NO: 2578250 - RNA, 19 nt, Artificial Sequence
  Description of Artificial Sequence: Synthetic oligonucleotide
ccagaaagcuuaucuuccu

SEQ ID NO: 2578251 - RNA, 19 nt, Artificial Sequence
  Description of Artificial Sequence: Synthetic oligonucleotide
ggucaccagaaagcuuauc

SEQ ID NO: 2578252 - RNA, 19 nt, Artificial Sequence
  Description of Artificial Sequence: Synthetic oligonucleotide
cauaguccuguaguuccau

SEQ ID NO: 2578253 - RNA, 19 nt, Artificial Sequence
  Description of Artificial Sequence: Synthetic oligonucleotide
gcacuaucugugguauuaa

SEQ ID NO: 2578254 - RNA, 19 nt, Artificial Sequence
  Description of Artificial Sequence: Synthetic oligonucleotide
augcagacucacagaugua

SEQ ID NO: 2578255 - RNA, 19 nt, Artificial Sequence
  Description of Artificial Sequence: Synthetic oligonucleotide
gggcaucguaagcuuaaau

SEQ ID NO: 2578256 - RNA, 19 nt, Artificial Sequence
  Description of Artificial Sequence: Synthetic oligonucleotide
gggcgcacugggccaggcc

SEQ ID NO: 2578257 - RNA, 19 nt, Artificial Sequence
  Description of Artificial Sequence: Synthetic oligonucleotide
cugggcgcacugggccagg

SEQ ID NO: 2578258 - RNA, 19 nt, Artificial Sequence
  Description of Artificial Sequence: Synthetic oligonucleotide
cucaugaccugggcgcacu

SEQ ID NO: 2578259 - RNA, 19 nt, Artificial Sequence
  Description of Artificial Sequence: Synthetic oligonucleotide
gcccgcaccaggcugguau

SEQ ID NO: 2578260 - RNA, 19 nt, Artificial Sequence
  Description of Artificial Sequence: Synthetic oligonucleotide
ggcugguauugcaguccug

SEQ ID NO: 2578261 - RNA, 19 nt, Artificial Sequence
  Description of Artificial Sequence: Synthetic oligonucleotide
ggcgggaugcagacucaca

SEQ ID NO: 2578262 - RNA, 19 nt, Artificial Sequence
  Description of Artificial Sequence: Synthetic oligonucleotide
cuuggaggugaagcacuau

SEQ ID NO: 2578263 - RNA, 19 nt, Artificial Sequence
  Description of Artificial Sequence: Synthetic oligonucleotide
gcugggcaucguaagcuua

SEQ ID NO: 2578264 - RNA, 19 nt, Artificial Sequence
  Description of Artificial Sequence: Synthetic oligonucleotide
cccaaugcauggagaggaa

SEQ ID NO: 2578265 - RNA, 19 nt, Artificial Sequence
  Description of Artificial Sequence: Synthetic oligonucleotide
ccacuagcaucuauuccau

SEQ ID NO: 2578266 - RNA, 19 nt, Artificial Sequence
  Description of Artificial Sequence: Synthetic oligonucleotide
caguuucgccaugcuguua

SEQ ID NO: 2578267 - RNA, 19 nt, Artificial Sequence
  Description of Artificial Sequence: Synthetic oligonucleotide
ccgcaccaggcugguauug

SEQ ID NO: 2578268 - RNA, 19 nt, Artificial Sequence
  Description of Artificial Sequence: Synthetic oligonucleotide
gggauugaccuugcccaau

SEQ ID NO: 2578269 - RNA, 19 nt, Artificial Sequence
  Description of Artificial Sequence: Synthetic oligonucleotide
ccaguuucgccaugcuguu

SEQ ID NO: 2578270 - RNA, 19 nt, Artificial Sequence
  Description of Artificial Sequence: Synthetic oligonucleotide
gcuccaugacuugcuuuau

SEQ ID NO: 2578271 - RNA, 19 nt, Artificial Sequence
  Description of Artificial Sequence: Synthetic oligonucleotide
cgcacugggccaggccaag

SEQ ID NO: 2578272 - RNA, 19 nt, Artificial Sequence
  Description of Artificial Sequence: Synthetic oligonucleotide
cguacucauagccgucuau

SEQ ID NO: 2578273 - RNA, 19 nt, Artificial Sequence
  Description of Artificial Sequence: Synthetic oligonucleotide
cccgcaccaggcugguauu

SEQ ID NO: 2578274 - RNA, 19 nt, Artificial Sequence
  Description of Artificial Sequence: Synthetic oligonucleotide
cggucaccagaaagcuuau

SEQ ID NO: 2578275 - RNA, 19 nt, Artificial Sequence
  Description of Artificial Sequence: Synthetic oligonucleotide
ggcccgcaccaggcuggua

SEQ ID NO: 2578276 - RNA, 19 nt, Artificial Sequence
  Description of Artificial Sequence: Synthetic oligonucleotide
uaauuuauaauuaacagga

SEQ ID NO: 2578277 - RNA, 19 nt, Artificial Sequence
  Description of Artificial Sequence: Synthetic oligonucleotide
aaaugggugagcuuuaggg

SEQ ID NO: 2578278 - RNA, 19 nt, Artificial Sequence
  Description of Artificial Sequence: Synthetic oligonucleotide
aauacaauauggcuguggg

SEQ ID NO: 2578279 - RNA, 19 nt, Artificial Sequence
  Description of Artificial Sequence: Synthetic oligonucleotide
aaagcaugauuacagacuc

SEQ ID NO: 2578280 - RNA, 19 nt, Artificial Sequence
  Description of Artificial Sequence: Synthetic oligonucleotide
accacaauaucccaggccc

SEQ ID NO: 2578281 - RNA, 19 nt, Artificial Sequence
  Description of Artificial Sequence: Synthetic oligonucleotide
uuaucaaccacaauauccc

SEQ ID NO: 2578282 - RNA, 19 nt, Artificial Sequence
  Description of Artificial Sequence: Synthetic oligonucleotide
acuuaaacgacuuuauuug

SEQ ID NO: 2578283 - RNA, 19 nt, Artificial Sequence
  Description of Artificial Sequence: Synthetic oligonucleotide
uuugacacaaaauacaaua

SEQ ID NO: 2578284 - RNA, 19 nt, Artificial Sequence
  Description of Artificial Sequence: Synthetic oligonucleotide
aaacgacuuuauuugacac

SEQ ID NO: 2578285 - RNA, 19 nt, Artificial Sequence
  Description of Artificial Sequence: Synthetic oligonucleotide
uacacgaguaacaaauggg

SEQ ID NO: 2578286 - RNA, 19 nt, Artificial Sequence
  Description of Artificial Sequence: Synthetic oligonucleotide
aacuuaaacgacuuuauuu

SEQ ID NO: 2578287 - RNA, 19 nt, Artificial Sequence
  Description of Artificial Sequence: Synthetic oligonucleotide
acaguuaucaaccacaaua

SEQ ID NO: 2578288 - RNA, 19 nt, Artificial Sequence
  Description of Artificial Sequence: Synthetic oligonucleotide
ugugggaacagcaaacucc

SEQ ID NO: 2578289 - RNA, 19 nt, Artificial Sequence
  Description of Artificial Sequence: Synthetic oligonucleotide
cuugugaugaugcagcugc

SEQ ID NO: 2578290 - RNA, 19 nt, Artificial Sequence
  Description of Artificial Sequence: Synthetic oligonucleotide
aaccacaauaucccaggcc

SEQ ID NO: 2578291 - RNA, 19 nt, Artificial Sequence
  Description of Artificial Sequence: Synthetic oligonucleotide
auauacacacgacagcaac

SEQ ID NO: 2578292 - RNA, 19 nt, Artificial Sequence
  Description of Artificial Sequence: Synthetic oligonucleotide
uuauaauuaacaggaaggc

SEQ ID NO: 2578293 - RNA, 19 nt, Artificial Sequence
  Description of Artificial Sequence: Synthetic oligonucleotide
guuaucaaccacaauaucc

SEQ ID NO: 2578294 - RNA, 19 nt, Artificial Sequence
  Description of Artificial Sequence: Synthetic oligonucleotide
cuuguuuugagccaucgag

SEQ ID NO: 2578295 - RNA, 19 nt, Artificial Sequence
  Description of Artificial Sequence: Synthetic oligonucleotide
auacuuuuggaauucccac

SEQ ID NO: 2578296 - RNA, 19 nt, Artificial Sequence
  Description of Artificial Sequence: Synthetic oligonucleotide
uuuagggagagucauuucu

SEQ ID NO: 2578297 - RNA, 19 nt, Artificial Sequence
  Description of Artificial Sequence: Synthetic oligonucleotide
ugacacaaaauacaauaug

SEQ ID NO: 2578298 - RNA, 19 nt, Artificial Sequence
  Description of Artificial Sequence: Synthetic oligonucleotide
uuuccauauacacacgaca

SEQ ID NO: 2578299 - RNA, 19 nt, Artificial Sequence
  Description of Artificial Sequence: Synthetic oligonucleotide
acaaaauacaauauggcug

SEQ ID NO: 2578300 - RNA, 19 nt, Artificial Sequence
  Description of Artificial Sequence: Synthetic oligonucleotide
uguuuugagccaucgagag

SEQ ID NO: 2578301 - RNA, 19 nt, Artificial Sequence
  Description of Artificial Sequence: Synthetic oligonucleotide
acaauuccagccuuuacag

SEQ ID NO: 2578302 - RNA, 19 nt, Artificial Sequence
  Description of Artificial Sequence: Synthetic oligonucleotide
agcaugauuacagacuccc

SEQ ID NO: 2578303 - RNA, 19 nt, Artificial Sequence
  Description of Artificial Sequence: Synthetic oligonucleotide
accauucucgaacuuaaac

SEQ ID NO: 2578304 - RNA, 19 nt, Artificial Sequence
  Description of Artificial Sequence: Synthetic oligonucleotide
uaauuaacaggaaggcaag

SEQ ID NO: 2578305 - RNA, 19 nt, Artificial Sequence
  Description of Artificial Sequence: Synthetic oligonucleotide
uucuaucuaauuuauaauu

SEQ ID NO: 2578306 - RNA, 19 nt, Artificial Sequence
  Description of Artificial Sequence: Synthetic oligonucleotide
acuuuuggaauucccacuc

SEQ ID NO: 2578307 - RNA, 19 nt, Artificial Sequence
  Description of Artificial Sequence: Synthetic oligonucleotide
ugacauucaaugcaaagau

SEQ ID NO: 2578308 - RNA, 19 nt, Artificial Sequence
  Description of Artificial Sequence: Synthetic oligonucleotide
acacaaaauacaauauggc

SEQ ID NO: 2578309 - RNA, 19 nt, Artificial Sequence
  Description of Artificial Sequence: Synthetic oligonucleotide
aaaagcaugauuacagacu

SEQ ID NO: 2578310 - RNA, 19 nt, Artificial Sequence
  Description of Artificial Sequence: Synthetic oligonucleotide
augauuacagacuccccac

SEQ ID NO: 2578311 - RNA, 19 nt, Artificial Sequence
  Description of Artificial Sequence: Synthetic oligonucleotide
uacaauauggcugugggaa

SEQ ID NO: 2578312 - RNA, 19 nt, Artificial Sequence
  Description of Artificial Sequence: Synthetic oligonucleotide
ugugaccuugugaugaugc

SEQ ID NO: 2578313 - RNA, 19 nt, Artificial Sequence
  Description of Artificial Sequence: Synthetic oligonucleotide
aaugggugagcuuuaggga

SEQ ID NO: 2578314 - RNA, 19 nt, Artificial Sequence
  Description of Artificial Sequence: Synthetic oligonucleotide
uuuugagccaucgagagau

SEQ ID NO: 2578315 - RNA, 19 nt, Artificial Sequence
  Description of Artificial Sequence: Synthetic oligonucleotide
uuaaacgacuuuauuugac

SEQ ID NO: 2578316 - RNA, 19 nt, Artificial Sequence
  Description of Artificial Sequence: Synthetic oligonucleotide
uaaacgacuuuauuugaca

SEQ ID NO: 2578317 - RNA, 19 nt, Artificial Sequence
  Description of Artificial Sequence: Synthetic oligonucleotide
aacaguacacucuucggaa

SEQ ID NO: 2578318 - RNA, 19 nt, Artificial Sequence
  Description of Artificial Sequence: Synthetic oligonucleotide
uauacacacgacagcaacc

SEQ ID NO: 2578319 - RNA, 19 nt, Artificial Sequence
  Description of Artificial Sequence: Synthetic oligonucleotide
guuucuggcacugaagagg

SEQ ID NO: 2578320 - RNA, 19 nt, Artificial Sequence
  Description of Artificial Sequence: Synthetic oligonucleotide
cuacacgaguaacaaaugg

SEQ ID NO: 2578321 - RNA, 19 nt, Artificial Sequence
  Description of Artificial Sequence: Synthetic oligonucleotide
aagauccauaaugugguuc

SEQ ID NO: 2578322 - RNA, 19 nt, Artificial Sequence
  Description of Artificial Sequence: Synthetic oligonucleotide
uauaauuaacaggaaggca

SEQ ID NO: 2578323 - RNA, 19 nt, Artificial Sequence
  Description of Artificial Sequence: Synthetic oligonucleotide
uuguccaagggacacaccu

SEQ ID NO: 2578324 - RNA, 19 nt, Artificial Sequence
  Description of Artificial Sequence: Synthetic oligonucleotide
aaaaccacgguucuaucua

SEQ ID NO: 2578325 - RNA, 19 nt, Artificial Sequence
  Description of Artificial Sequence: Synthetic oligonucleotide
acgaguaacaaauggguga

SEQ ID NO: 2578326 - RNA, 19 nt, Artificial Sequence
  Description of Artificial Sequence: Synthetic oligonucleotide
ucucuguuguccaagggac

SEQ ID NO: 2578327 - RNA, 19 nt, Artificial Sequence
  Description of Artificial Sequence: Synthetic oligonucleotide
gacaccuccauucugguga

SEQ ID NO: 2578328 - RNA, 19 nt, Artificial Sequence
  Description of Artificial Sequence: Synthetic oligonucleotide
uucaaagcgcuucuugccc

SEQ ID NO: 2578329 - RNA, 19 nt, Artificial Sequence
  Description of Artificial Sequence: Synthetic oligonucleotide
ugauuacagacuccccacg

SEQ ID NO: 2578330 - RNA, 19 nt, Artificial Sequence
  Description of Artificial Sequence: Synthetic oligonucleotide
aacgacuuuauuugacaca

SEQ ID NO: 2578331 - RNA, 19 nt, Artificial Sequence
  Description of Artificial Sequence: Synthetic oligonucleotide
ugcuaucucagaaggaaga

SEQ ID NO: 2578332 - RNA, 19 nt, Artificial Sequence
  Description of Artificial Sequence: Synthetic oligonucleotide
uuguuuugagccaucgaga

SEQ ID NO: 2578333 - RNA, 19 nt, Artificial Sequence
  Description of Artificial Sequence: Synthetic oligonucleotide
aauaucccaggcccagagg

SEQ ID NO: 2578334 - RNA, 19 nt, Artificial Sequence
  Description of Artificial Sequence: Synthetic oligonucleotide
uucucgaacuuaaacgacu

SEQ ID NO: 2578335 - RNA, 19 nt, Artificial Sequence
  Description of Artificial Sequence: Synthetic oligonucleotide
ccauucucgaacuuaaacg

SEQ ID NO: 2578336 - RNA, 19 nt, Artificial Sequence
  Description of Artificial Sequence: Synthetic oligonucleotide
uccauauacacacgacagc

SEQ ID NO: 2578337 - RNA, 19 nt, Artificial Sequence
  Description of Artificial Sequence: Synthetic oligonucleotide
gcaaagauccauaaugugg

SEQ ID NO: 2578338 - RNA, 19 nt, Artificial Sequence
  Description of Artificial Sequence: Synthetic oligonucleotide
aauucccacucucuguugu

SEQ ID NO: 2578339 - RNA, 19 nt, Artificial Sequence
  Description of Artificial Sequence: Synthetic oligonucleotide
uugacacaaaauacaauau

SEQ ID NO: 2578340 - RNA, 19 nt, Artificial Sequence
  Description of Artificial Sequence: Synthetic oligonucleotide
cauucucgaacuuaaacga

SEQ ID NO: 2578341 - RNA, 19 nt, Artificial Sequence
  Description of Artificial Sequence: Synthetic oligonucleotide
uaacaggaaggcaagucac

SEQ ID NO: 2578342 - RNA, 19 nt, Artificial Sequence
  Description of Artificial Sequence: Synthetic oligonucleotide
gauuacagacuccccacgc

SEQ ID NO: 2578343 - RNA, 19 nt, Artificial Sequence
  Description of Artificial Sequence: Synthetic oligonucleotide
ugcaaagauccauaaugug

SEQ ID NO: 2578344 - RNA, 19 nt, Artificial Sequence
  Description of Artificial Sequence: Synthetic oligonucleotide
aguagcagacgccugguug

SEQ ID NO: 2578345 - RNA, 19 nt, Artificial Sequence
  Description of Artificial Sequence: Synthetic oligonucleotide
guagcagacgccugguugg

SEQ ID NO: 2578346 - RNA, 19 nt, Artificial Sequence
  Description of Artificial Sequence: Synthetic oligonucleotide
aagucacuacacgaguaac

SEQ ID NO: 2578347 - RNA, 19 nt, Artificial Sequence
  Description of Artificial Sequence: Synthetic oligonucleotide
cuucggaaguagcagacgc

SEQ ID NO: 2578348 - RNA, 19 nt, Artificial Sequence
  Description of Artificial Sequence: Synthetic oligonucleotide
gguucuaucuaauuuauaa

SEQ ID NO: 2578349 - RNA, 19 nt, Artificial Sequence
  Description of Artificial Sequence: Synthetic oligonucleotide
gggguauccacauccaucg

SEQ ID NO: 2578350 - RNA, 19 nt, Artificial Sequence
  Description of Artificial Sequence: Synthetic oligonucleotide
aguaacaaaugggugagcu

SEQ ID NO: 2578351 - RNA, 19 nt, Artificial Sequence
  Description of Artificial Sequence: Synthetic oligonucleotide
acaauauggcugugggaac

SEQ ID NO: 2578352 - RNA, 19 nt, Artificial Sequence
  Description of Artificial Sequence: Synthetic oligonucleotide
ugagcuuuagggagaguca

SEQ ID NO: 2578353 - RNA, 19 nt, Artificial Sequence
  Description of Artificial Sequence: Synthetic oligonucleotide
cuuuacagguuccugugac

SEQ ID NO: 2578354 - RNA, 19 nt, Artificial Sequence
  Description of Artificial Sequence: Synthetic oligonucleotide
cauacuuuuggaauuccca

SEQ ID NO: 2578355 - RNA, 19 nt, Artificial Sequence
  Description of Artificial Sequence: Synthetic oligonucleotide
ucauuucuagugcccauac

SEQ ID NO: 2578356 - RNA, 19 nt, Artificial Sequence
  Description of Artificial Sequence: Synthetic oligonucleotide
caggacaccuccauucugg

SEQ ID NO: 2578357 - RNA, 19 nt, Artificial Sequence
  Description of Artificial Sequence: Synthetic oligonucleotide
uuuacagguuccugugacc

SEQ ID NO: 2578358 - RNA, 19 nt, Artificial Sequence
  Description of Artificial Sequence: Synthetic oligonucleotide
caaaauacaauauggcugu

SEQ ID NO: 2578359 - RNA, 19 nt, Artificial Sequence
  Description of Artificial Sequence: Synthetic oligonucleotide
cuagugcccauacuuuugg

SEQ ID NO: 2578360 - RNA, 19 nt, Artificial Sequence
  Description of Artificial Sequence: Synthetic oligonucleotide
ucuggugaugacaguacac

SEQ ID NO: 2578361 - RNA, 19 nt, Artificial Sequence
  Description of Artificial Sequence: Synthetic oligonucleotide
uagggagagucauuucuag

SEQ ID NO: 2578362 - RNA, 19 nt, Artificial Sequence
  Description of Artificial Sequence: Synthetic oligonucleotide
cuaucuaauuuauaauuaa

SEQ ID NO: 2578363 - RNA, 19 nt, Artificial Sequence
  Description of Artificial Sequence: Synthetic oligonucleotide
uacacucuucggaaguagc

SEQ ID NO: 2578364 - RNA, 19 nt, Artificial Sequence
  Description of Artificial Sequence: Synthetic oligonucleotide
ucgaacuuaaacgacuuua

SEQ ID NO: 2578365 - RNA, 19 nt, Artificial Sequence
  Description of Artificial Sequence: Synthetic oligonucleotide
ugacccacaauuccagccu

SEQ ID NO: 2578366 - RNA, 19 nt, Artificial Sequence
  Description of Artificial Sequence: Synthetic oligonucleotide
gaccuugugaugaugcagc

SEQ ID NO: 2578367 - RNA, 19 nt, Artificial Sequence
  Description of Artificial Sequence: Synthetic oligonucleotide
cacacgacagcaaccauuc

SEQ ID NO: 2578368 - RNA, 19 nt, Artificial Sequence
  Description of Artificial Sequence: Synthetic oligonucleotide
uccugugaccuugugauga

SEQ ID NO: 2578369 - RNA, 19 nt, Artificial Sequence
  Description of Artificial Sequence: Synthetic oligonucleotide
aauauggcugugggaacag

SEQ ID NO: 2578370 - RNA, 19 nt, Artificial Sequence
  Description of Artificial Sequence: Synthetic oligonucleotide
uuacagacuccccacgcaa

SEQ ID NO: 2578371 - RNA, 19 nt, Artificial Sequence
  Description of Artificial Sequence: Synthetic oligonucleotide
agugcuaucucagaaggaa

SEQ ID NO: 2578372 - RNA, 19 nt, Artificial Sequence
  Description of Artificial Sequence: Synthetic oligonucleotide
ugaccuugugaugaugcag

SEQ ID NO: 2578373 - RNA, 19 nt, Artificial Sequence
  Description of Artificial Sequence: Synthetic oligonucleotide
ggaaguagcagacgccugg

SEQ ID NO: 2578374 - RNA, 19 nt, Artificial Sequence
  Description of Artificial Sequence: Synthetic oligonucleotide
uuagggagagucauuucua

SEQ ID NO: 2578375 - RNA, 19 nt, Artificial Sequence
  Description of Artificial Sequence: Synthetic oligonucleotide
cacaauuccagccuuuaca

SEQ ID NO: 2578376 - RNA, 19 nt, Artificial Sequence
  Description of Artificial Sequence: Synthetic oligonucleotide
aagcaugauuacagacucc

SEQ ID NO: 2578377 - RNA, 19 nt, Artificial Sequence
  Description of Artificial Sequence: Synthetic oligonucleotide
cacgaguaacaaaugggug

SEQ ID NO: 2578378 - RNA, 19 nt, Artificial Sequence
  Description of Artificial Sequence: Synthetic oligonucleotide
uaucaaccacaauauccca

SEQ ID NO: 2578379 - RNA, 19 nt, Artificial Sequence
  Description of Artificial Sequence: Synthetic oligonucleotide
acgacuuuauuugacacaa

SEQ ID NO: 2578380 - RNA, 19 nt, Artificial Sequence
  Description of Artificial Sequence: Synthetic oligonucleotide
ugagccaucgagagaugca

SEQ ID NO: 2578381 - RNA, 19 nt, Artificial Sequence
  Description of Artificial Sequence: Synthetic oligonucleotide
auucucgaacuuaaacgac

SEQ ID NO: 2578382 - RNA, 19 nt, Artificial Sequence
  Description of Artificial Sequence: Synthetic oligonucleotide
cuuaaacgacuuuauuuga

SEQ ID NO: 2578383 - RNA, 19 nt, Artificial Sequence
  Description of Artificial Sequence: Synthetic oligonucleotide
ucuguuguccaagggacac

SEQ ID NO: 2578384 - RNA, 19 nt, Artificial Sequence
  Description of Artificial Sequence: Synthetic oligonucleotide
agggcuacugcauuccacu

SEQ ID NO: 2578385 - RNA, 19 nt, Artificial Sequence
  Description of Artificial Sequence: Synthetic oligonucleotide
uggaauucccacucucugu

SEQ ID NO: 2578386 - RNA, 19 nt, Artificial Sequence
  Description of Artificial Sequence: Synthetic oligonucleotide
acacgaguaacaaaugggu

SEQ ID NO: 2578387 - RNA, 19 nt, Artificial Sequence
  Description of Artificial Sequence: Synthetic oligonucleotide
acagagaccuugguguuuc

SEQ ID NO: 2578388 - RNA, 19 nt, Artificial Sequence
  Description of Artificial Sequence: Synthetic oligonucleotide
uguccaagggacacaccug

SEQ ID NO: 2578389 - RNA, 19 nt, Artificial Sequence
  Description of Artificial Sequence: Synthetic oligonucleotide
aagcgcuucuugcccgcgc

SEQ ID NO: 2578390 - RNA, 19 nt, Artificial Sequence
  Description of Artificial Sequence: Synthetic oligonucleotide
agcgcuucuugcccgcgcc

SEQ ID NO: 2578391 - RNA, 19 nt, Artificial Sequence
  Description of Artificial Sequence: Synthetic oligonucleotide
caauuccagccuuuacagg

SEQ ID NO: 2578392 - RNA, 19 nt, Artificial Sequence
  Description of Artificial Sequence: Synthetic oligonucleotide
guccaagggacacaccugc

SEQ ID NO: 2578393 - RNA, 19 nt, Artificial Sequence
  Description of Artificial Sequence: Synthetic oligonucleotide
ugugguuccugcagauggc

SEQ ID NO: 2578394 - RNA, 19 nt, Artificial Sequence
  Description of Artificial Sequence: Synthetic oligonucleotide
cacgacagcaaccauucuc

SEQ ID NO: 2578395 - RNA, 19 nt, Artificial Sequence
  Description of Artificial Sequence: Synthetic oligonucleotide
ucuucggaaguagcagacg

SEQ ID NO: 2578396 - RNA, 19 nt, Artificial Sequence
  Description of Artificial Sequence: Synthetic oligonucleotide
ucucgaacuuaaacgacuu

SEQ ID NO: 2578397 - RNA, 19 nt, Artificial Sequence
  Description of Artificial Sequence: Synthetic oligonucleotide
cugacauucaaugcaaaga

SEQ ID NO: 2578398 - RNA, 19 nt, Artificial Sequence
  Description of Artificial Sequence: Synthetic oligonucleotide
acucuucggaaguagcaga

SEQ ID NO: 2578399 - RNA, 19 nt, Artificial Sequence
  Description of Artificial Sequence: Synthetic oligonucleotide
caaaugggugagcuuuagg

SEQ ID NO: 2578400 - RNA, 19 nt, Artificial Sequence
  Description of Artificial Sequence: Synthetic oligonucleotide
aaaccacgguucuaucuaa

SEQ ID NO: 2578401 - RNA, 19 nt, Artificial Sequence
  Description of Artificial Sequence: Synthetic oligonucleotide
ucggaaguagcagacgccu

SEQ ID NO: 2578402 - RNA, 19 nt, Artificial Sequence
  Description of Artificial Sequence: Synthetic oligonucleotide
gugagcuuuagggagaguc

SEQ ID NO: 2578403 - RNA, 19 nt, Artificial Sequence
  Description of Artificial Sequence: Synthetic oligonucleotide
auacaauauggcuguggga

SEQ ID NO: 2578404 - RNA, 19 nt, Artificial Sequence
  Description of Artificial Sequence: Synthetic oligonucleotide
ggagagucauuucuagugc

SEQ ID NO: 2578405 - RNA, 19 nt, Artificial Sequence
  Description of Artificial Sequence: Synthetic oligonucleotide
guauccacauccaucgcug

SEQ ID NO: 2578406 - RNA, 19 nt, Artificial Sequence
  Description of Artificial Sequence: Synthetic oligonucleotide
aucaaccacaauaucccag

SEQ ID NO: 2578407 - RNA, 19 nt, Artificial Sequence
  Description of Artificial Sequence: Synthetic oligonucleotide
agugcccauacuuuuggaa

SEQ ID NO: 2578408 - RNA, 19 nt, Artificial Sequence
  Description of Artificial Sequence: Synthetic oligonucleotide
cucuucggaaguagcagac

SEQ ID NO: 2578409 - RNA, 19 nt, Artificial Sequence
  Description of Artificial Sequence: Synthetic oligonucleotide
cugcaggacaccuccauuc

SEQ ID NO: 2578410 - RNA, 19 nt, Artificial Sequence
  Description of Artificial Sequence: Synthetic oligonucleotide
ugguguuuccgggugcagg

SEQ ID NO: 2578411 - RNA, 19 nt, Artificial Sequence
  Description of Artificial Sequence: Synthetic oligonucleotide
acaccugccuuguuuugag

SEQ ID NO: 2578412 - RNA, 19 nt, Artificial Sequence
  Description of Artificial Sequence: Synthetic oligonucleotide
agaggccccuucucuuucc

SEQ ID NO: 2578413 - RNA, 19 nt, Artificial Sequence
  Description of Artificial Sequence: Synthetic oligonucleotide
aaagauccauaaugugguu

SEQ ID NO: 2578414 - RNA, 19 nt, Artificial Sequence
  Description of Artificial Sequence: Synthetic oligonucleotide
cacuacacgaguaacaaau

SEQ ID NO: 2578415 - RNA, 19 nt, Artificial Sequence
  Description of Artificial Sequence: Synthetic oligonucleotide
caacaguacacucuucgga

SEQ ID NO: 2578416 - RNA, 19 nt, Artificial Sequence
  Description of Artificial Sequence: Synthetic oligonucleotide
ugcaggugacccacaauuc

SEQ ID NO: 2578417 - RNA, 19 nt, Artificial Sequence
  Description of Artificial Sequence: Synthetic oligonucleotide
cacucucuguuguccaagg

SEQ ID NO: 2578418 - RNA, 19 nt, Artificial Sequence
  Description of Artificial Sequence: Synthetic oligonucleotide
gcaacaguacacucuucgg

SEQ ID NO: 2578419 - RNA, 19 nt, Artificial Sequence
  Description of Artificial Sequence: Synthetic oligonucleotide
uugcccgcgccgcuguugg

SEQ ID NO: 2578420 - RNA, 19 nt, Artificial Sequence
  Description of Artificial Sequence: Synthetic oligonucleotide
gaauucccacucucuguug

SEQ ID NO: 2578421 - RNA, 19 nt, Artificial Sequence
  Description of Artificial Sequence: Synthetic oligonucleotide
cauucaaugcaaagaucca

SEQ ID NO: 2578422 - RNA, 19 nt, Artificial Sequence
  Description of Artificial Sequence: Synthetic oligonucleotide
cucucuguuguccaaggga

SEQ ID NO: 2578423 - RNA, 19 nt, Artificial Sequence
  Description of Artificial Sequence: Synthetic oligonucleotide
uacagacuccccacgcaac

SEQ ID NO: 2578424 - RNA, 19 nt, Artificial Sequence
  Description of Artificial Sequence: Synthetic oligonucleotide
cacucuucggaaguagcag

SEQ ID NO: 2578425 - RNA, 19 nt, Artificial Sequence
  Description of Artificial Sequence: Synthetic oligonucleotide
agagaccuugguguuuccg

SEQ ID NO: 2578426 - RNA, 19 nt, Artificial Sequence
  Description of Artificial Sequence: Synthetic oligonucleotide
agucacuacacgaguaaca

SEQ ID NO: 2578427 - RNA, 19 nt, Artificial Sequence
  Description of Artificial Sequence: Synthetic oligonucleotide
accuugguguuuccgggug

SEQ ID NO: 2578428 - RNA, 19 nt, Artificial Sequence
  Description of Artificial Sequence: Synthetic oligonucleotide
uccaagggacacaccugcc

SEQ ID NO: 2578429 - RNA, 19 nt, Artificial Sequence
  Description of Artificial Sequence: Synthetic oligonucleotide
ugcccauacuuuuggaauu

SEQ ID NO: 2578430 - RNA, 19 nt, Artificial Sequence
  Description of Artificial Sequence: Synthetic oligonucleotide
cacaauaucccaggcccag

SEQ ID NO: 2578431 - RNA, 19 nt, Artificial Sequence
  Description of Artificial Sequence: Synthetic oligonucleotide
ucgagagaugcaguggaaa

SEQ ID NO: 2578432 - RNA, 19 nt, Artificial Sequence
  Description of Artificial Sequence: Synthetic oligonucleotide
uccagccuuuacagguucc

SEQ ID NO: 2578433 - RNA, 19 nt, Artificial Sequence
  Description of Artificial Sequence: Synthetic oligonucleotide
ucacuacacgaguaacaaa

SEQ ID NO: 2578434 - RNA, 19 nt, Artificial Sequence
  Description of Artificial Sequence: Synthetic oligonucleotide
aggcaagucacuacacgag

SEQ ID NO: 2578435 - RNA, 19 nt, Artificial Sequence
  Description of Artificial Sequence: Synthetic oligonucleotide
gagguuguuucuggcacug

SEQ ID NO: 2578436 - RNA, 19 nt, Artificial Sequence
  Description of Artificial Sequence: Synthetic oligonucleotide
acaaaugggugagcuuuag

SEQ ID NO: 2578437 - RNA, 19 nt, Artificial Sequence
  Description of Artificial Sequence: Synthetic oligonucleotide
acuacacgaguaacaaaug

SEQ ID NO: 2578438 - RNA, 19 nt, Artificial Sequence
  Description of Artificial Sequence: Synthetic oligonucleotide
cuuuagggagagucauuuc

SEQ ID NO: 2578439 - RNA, 19 nt, Artificial Sequence
  Description of Artificial Sequence: Synthetic oligonucleotide
gcaggugacccacaauucc

SEQ ID NO: 2578440 - RNA, 19 nt, Artificial Sequence
  Description of Artificial Sequence: Synthetic oligonucleotide
caaccauucucgaacuuaa

SEQ ID NO: 2578441 - RNA, 19 nt, Artificial Sequence
  Description of Artificial Sequence: Synthetic oligonucleotide
gucacuacacgaguaacaa

SEQ ID NO: 2578442 - RNA, 19 nt, Artificial Sequence
  Description of Artificial Sequence: Synthetic oligonucleotide
uuugagccaucgagagaug

SEQ ID NO: 2578443 - RNA, 19 nt, Artificial Sequence
  Description of Artificial Sequence: Synthetic oligonucleotide
aaagcgcuucuugcccgcg

SEQ ID NO: 2578444 - RNA, 19 nt, Artificial Sequence
  Description of Artificial Sequence: Synthetic oligonucleotide
gacagcaaccauucucgaa

SEQ ID NO: 2578445 - RNA, 19 nt, Artificial Sequence
  Description of Artificial Sequence: Synthetic oligonucleotide
caguuaucaaccacaauau

SEQ ID NO: 2578446 - RNA, 19 nt, Artificial Sequence
  Description of Artificial Sequence: Synthetic oligonucleotide
gugcuaucucagaaggaag

SEQ ID NO: 2578447 - RNA, 19 nt, Artificial Sequence
  Description of Artificial Sequence: Synthetic oligonucleotide
caaagcgcuucuugcccgc

SEQ ID NO: 2578448 - RNA, 19 nt, Artificial Sequence
  Description of Artificial Sequence: Synthetic oligonucleotide
cgcaacaguacacucuucg

SEQ ID NO: 2578449 - RNA, 19 nt, Artificial Sequence
  Description of Artificial Sequence: Synthetic oligonucleotide
ugguuccugcagauggcac

SEQ ID NO: 2578450 - RNA, 19 nt, Artificial Sequence
  Description of Artificial Sequence: Synthetic oligonucleotide
ugguuggccugacauucaa

SEQ ID NO: 2578451 - RNA, 19 nt, Artificial Sequence
  Description of Artificial Sequence: Synthetic oligonucleotide
ccauacuuuuggaauuccc

SEQ ID NO: 2578452 - RNA, 19 nt, Artificial Sequence
  Description of Artificial Sequence: Synthetic oligonucleotide
agucauuucuagugcccau

SEQ ID NO: 2578453 - RNA, 19 nt, Artificial Sequence
  Description of Artificial Sequence: Synthetic oligonucleotide
accuugugaugaugcagcu

SEQ ID NO: 2578454 - RNA, 19 nt, Artificial Sequence
  Description of Artificial Sequence: Synthetic oligonucleotide
caagucacuacacgaguaa

SEQ ID NO: 2578455 - RNA, 19 nt, Artificial Sequence
  Description of Artificial Sequence: Synthetic oligonucleotide
uccccacgcaacaguacac

SEQ ID NO: 2578456 - RNA, 19 nt, Artificial Sequence
  Description of Artificial Sequence: Synthetic oligonucleotide
gcugccgccauuuuggaaa

SEQ ID NO: 2578457 - RNA, 19 nt, Artificial Sequence
  Description of Artificial Sequence: Synthetic oligonucleotide
ucccacucucuguugucca

SEQ ID NO: 2578458 - RNA, 19 nt, Artificial Sequence
  Description of Artificial Sequence: Synthetic oligonucleotide
cugugggaacagcaaacuc

SEQ ID NO: 2578459 - RNA, 19 nt, Artificial Sequence
  Description of Artificial Sequence: Synthetic oligonucleotide
acacucuucggaaguagca

SEQ ID NO: 2578460 - RNA, 19 nt, Artificial Sequence
  Description of Artificial Sequence: Synthetic oligonucleotide
gccaucgagagaugcagug

SEQ ID NO: 2578461 - RNA, 19 nt, Artificial Sequence
  Description of Artificial Sequence: Synthetic oligonucleotide
agaugcaguggaaaugaaa

SEQ ID NO: 2578462 - RNA, 19 nt, Artificial Sequence
  Description of Artificial Sequence: Synthetic oligonucleotide
uagugcccauacuuuugga

SEQ ID NO: 2578463 - RNA, 19 nt, Artificial Sequence
  Description of Artificial Sequence: Synthetic oligonucleotide
accacgguucuaucuaauu

SEQ ID NO: 2578464 - RNA, 19 nt, Artificial Sequence
  Description of Artificial Sequence: Synthetic oligonucleotide
ccauauacacacgacagca

SEQ ID NO: 2578465 - RNA, 19 nt, Artificial Sequence
  Description of Artificial Sequence: Synthetic oligonucleotide
uuuucacuucaaagcgcuu

SEQ ID NO: 2578466 - RNA, 19 nt, Artificial Sequence
  Description of Artificial Sequence: Synthetic oligonucleotide
aaguagcagacgccugguu

SEQ ID NO: 2578467 - RNA, 19 nt, Artificial Sequence
  Description of Artificial Sequence: Synthetic oligonucleotide
aggugacccacaauuccag

SEQ ID NO: 2578468 - RNA, 19 nt, Artificial Sequence
  Description of Artificial Sequence: Synthetic oligonucleotide
gaguaacaaaugggugagc

SEQ ID NO: 2578469 - RNA, 19 nt, Artificial Sequence
  Description of Artificial Sequence: Synthetic oligonucleotide
aacaaaugggugagcuuua

SEQ ID NO: 2578470 - RNA, 19 nt, Artificial Sequence
  Description of Artificial Sequence: Synthetic oligonucleotide
cgccauuuuggaaacacac

SEQ ID NO: 2578471 - RNA, 19 nt, Artificial Sequence
  Description of Artificial Sequence: Synthetic oligonucleotide
aggacaccuccauucuggu

SEQ ID NO: 2578472 - RNA, 19 nt, Artificial Sequence
  Description of Artificial Sequence: Synthetic oligonucleotide
ugcccagugcuaucucaga

SEQ ID NO: 2578473 - RNA, 19 nt, Artificial Sequence
  Description of Artificial Sequence: Synthetic oligonucleotide
ugcagcugcaggacaccuc

SEQ ID NO: 2578474 - RNA, 19 nt, Artificial Sequence
  Description of Artificial Sequence: Synthetic oligonucleotide
uacacacgacagcaaccau

SEQ ID NO: 2578475 - RNA, 19 nt, Artificial Sequence
  Description of Artificial Sequence: Synthetic oligonucleotide
cccuucucuuuccauauac

SEQ ID NO: 2578476 - RNA, 19 nt, Artificial Sequence
  Description of Artificial Sequence: Synthetic oligonucleotide
gugcaggugacccacaauu

SEQ ID NO: 2578477 - RNA, 19 nt, Artificial Sequence
  Description of Artificial Sequence: Synthetic oligonucleotide
gguuccugcagauggcaca

SEQ ID NO: 2578478 - RNA, 19 nt, Artificial Sequence
  Description of Artificial Sequence: Synthetic oligonucleotide
acgguucuaucuaauuuau

SEQ ID NO: 2578479 - RNA, 19 nt, Artificial Sequence
  Description of Artificial Sequence: Synthetic oligonucleotide
cuccccacgcaacaguaca

SEQ ID NO: 2578480 - RNA, 19 nt, Artificial Sequence
  Description of Artificial Sequence: Synthetic oligonucleotide
agcagacgccugguuggcc

SEQ ID NO: 2578481 - RNA, 19 nt, Artificial Sequence
  Description of Artificial Sequence: Synthetic oligonucleotide
gagggcuacugcauuccac

SEQ ID NO: 2578482 - RNA, 19 nt, Artificial Sequence
  Description of Artificial Sequence: Synthetic oligonucleotide
acuccccacgcaacaguac

SEQ ID NO: 2578483 - RNA, 19 nt, Artificial Sequence
  Description of Artificial Sequence: Synthetic oligonucleotide
acacacgacagcaaccauu

SEQ ID NO: 2578484 - RNA, 19 nt, Artificial Sequence
  Description of Artificial Sequence: Synthetic oligonucleotide
gugcccauacuuuuggaau

SEQ ID NO: 2578485 - RNA, 19 nt, Artificial Sequence
  Description of Artificial Sequence: Synthetic oligonucleotide
ggugacccacaauuccagc

SEQ ID NO: 2578486 - RNA, 19 nt, Artificial Sequence
  Description of Artificial Sequence: Synthetic oligonucleotide
aguacacucuucggaagua

SEQ ID NO: 2578487 - RNA, 19 nt, Artificial Sequence
  Description of Artificial Sequence: Synthetic oligonucleotide
gcuaucucagaaggaagac

SEQ ID NO: 2578488 - RNA, 19 nt, Artificial Sequence
  Description of Artificial Sequence: Synthetic oligonucleotide
cugccgccauuuuggaaac

SEQ ID NO: 2578489 - RNA, 19 nt, Artificial Sequence
  Description of Artificial Sequence: Synthetic oligonucleotide
cgaguaacaaaugggugag

SEQ ID NO: 2578490 - RNA, 19 nt, Artificial Sequence
  Description of Artificial Sequence: Synthetic oligonucleotide
cucuguuguccaagggaca

SEQ ID NO: 2578491 - RNA, 19 nt, Artificial Sequence
  Description of Artificial Sequence: Synthetic oligonucleotide
caccugccuuguuuugagc

SEQ ID NO: 2578492 - RNA, 19 nt, Artificial Sequence
  Description of Artificial Sequence: Synthetic oligonucleotide
gccuuguuuugagccaucg

SEQ ID NO: 2578493 - RNA, 19 nt, Artificial Sequence
  Description of Artificial Sequence: Synthetic oligonucleotide
cuggugaugacaguacacu

SEQ ID NO: 2578494 - RNA, 19 nt, Artificial Sequence
  Description of Artificial Sequence: Synthetic oligonucleotide
cagacuccccacgcaacag

SEQ ID NO: 2578495 - RNA, 19 nt, Artificial Sequence
  Description of Artificial Sequence: Synthetic oligonucleotide
aaccauucucgaacuuaaa

SEQ ID NO: 2578496 - RNA, 19 nt, Artificial Sequence
  Description of Artificial Sequence: Synthetic oligonucleotide
ccaucgagagaugcagugg

SEQ ID NO: 2578497 - RNA, 19 nt, Artificial Sequence
  Description of Artificial Sequence: Synthetic oligonucleotide
uagcagacgccugguuggc

SEQ ID NO: 2578498 - RNA, 19 nt, Artificial Sequence
  Description of Artificial Sequence: Synthetic oligonucleotide
ugggaacagcaaacuccaa

SEQ ID NO: 2578499 - RNA, 19 nt, Artificial Sequence
  Description of Artificial Sequence: Synthetic oligonucleotide
cuugguguuuccgggugca

SEQ ID NO: 2578500 - RNA, 19 nt, Artificial Sequence
  Description of Artificial Sequence: Synthetic oligonucleotide
agcaaccauucucgaacuu

SEQ ID NO: 2578501 - RNA, 19 nt, Artificial Sequence
  Description of Artificial Sequence: Synthetic oligonucleotide
cagugcuaucucagaagga

SEQ ID NO: 2578502 - RNA, 19 nt, Artificial Sequence
  Description of Artificial Sequence: Synthetic oligonucleotide
guaacaaaugggugagcuu

SEQ ID NO: 2578503 - RNA, 19 nt, Artificial Sequence
  Description of Artificial Sequence: Synthetic oligonucleotide
agggacacaccugccuugu

SEQ ID NO: 2578504 - RNA, 19 nt, Artificial Sequence
  Description of Artificial Sequence: Synthetic oligonucleotide
ugccuuguuuugagccauc

SEQ ID NO: 2578505 - RNA, 19 nt, Artificial Sequence
  Description of Artificial Sequence: Synthetic oligonucleotide
gagcuuuagggagagucau

SEQ ID NO: 2578506 - RNA, 19 nt, Artificial Sequence
  Description of Artificial Sequence: Synthetic oligonucleotide
gucauuucuagugcccaua

SEQ ID NO: 2578507 - RNA, 19 nt, Artificial Sequence
  Description of Artificial Sequence: Synthetic oligonucleotide
acacgacagcaaccauucu

SEQ ID NO: 2578508 - RNA, 19 nt, Artificial Sequence
  Description of Artificial Sequence: Synthetic oligonucleotide
ucgcugccgccauuuugga

SEQ ID NO: 2578509 - RNA, 19 nt, Artificial Sequence
  Description of Artificial Sequence: Synthetic oligonucleotide
gguguuuccgggugcaggu

SEQ ID NO: 2578510 - RNA, 19 nt, Artificial Sequence
  Description of Artificial Sequence: Synthetic oligonucleotide
caguacacucuucggaagu

SEQ ID NO: 2578511 - RNA, 19 nt, Artificial Sequence
  Description of Artificial Sequence: Synthetic oligonucleotide
guuguccaagggacacacc

SEQ ID NO: 2578512 - RNA, 19 nt, Artificial Sequence
  Description of Artificial Sequence: Synthetic oligonucleotide
cagacgccugguuggccug

SEQ ID NO: 2578513 - RNA, 19 nt, Artificial Sequence
  Description of Artificial Sequence: Synthetic oligonucleotide
gaccuugguguuuccgggu

SEQ ID NO: 2578514 - RNA, 19 nt, Artificial Sequence
  Description of Artificial Sequence: Synthetic oligonucleotide
gccgccauuuuggaaacac

SEQ ID NO: 2578515 - RNA, 19 nt, Artificial Sequence
  Description of Artificial Sequence: Synthetic oligonucleotide
ggcaagucacuacacgagu

SEQ ID NO: 2578516 - RNA, 19 nt, Artificial Sequence
  Description of Artificial Sequence: Synthetic oligonucleotide
gacuccccacgcaacagua

SEQ ID NO: 2578517 - RNA, 19 nt, Artificial Sequence
  Description of Artificial Sequence: Synthetic oligonucleotide
gcaugauuacagacucccc

SEQ ID NO: 2578518 - RNA, 19 nt, Artificial Sequence
  Description of Artificial Sequence: Synthetic oligonucleotide
gcaaccauucucgaacuua

SEQ ID NO: 2578519 - RNA, 19 nt, Artificial Sequence
  Description of Artificial Sequence: Synthetic oligonucleotide
cacgcaacaguacacucuu

SEQ ID NO: 2578520 - RNA, 19 nt, Artificial Sequence
  Description of Artificial Sequence: Synthetic oligonucleotide
aucgagagaugcaguggaa

SEQ ID NO: 2578521 - RNA, 19 nt, Artificial Sequence
  Description of Artificial Sequence: Synthetic oligonucleotide
ccuugguguuuccgggugc

SEQ ID NO: 2578522 - RNA, 19 nt, Artificial Sequence
  Description of Artificial Sequence: Synthetic oligonucleotide
ggguauccacauccaucgc

SEQ ID NO: 2578523 - RNA, 19 nt, Artificial Sequence
  Description of Artificial Sequence: Synthetic oligonucleotide
gauccauaaugugguuccu

SEQ ID NO: 2578524 - RNA, 19 nt, Artificial Sequence
  Description of Artificial Sequence: Synthetic oligonucleotide
cccacgcaacaguacacuc

SEQ ID NO: 2578525 - RNA, 19 nt, Artificial Sequence
  Description of Artificial Sequence: Synthetic oligonucleotide
caagggacacaccugccuu

SEQ ID NO: 2578526 - RNA, 19 nt, Artificial Sequence
  Description of Artificial Sequence: Synthetic oligonucleotide
ggugaugacaguacacuuu

SEQ ID NO: 2578527 - RNA, 19 nt, Artificial Sequence
  Description of Artificial Sequence: Synthetic oligonucleotide
agguuguuucuggcacuga

SEQ ID NO: 2578528 - RNA, 19 nt, Artificial Sequence
  Description of Artificial Sequence: Synthetic oligonucleotide
gcaagucacuacacgagua

SEQ ID NO: 2578529 - RNA, 19 nt, Artificial Sequence
  Description of Artificial Sequence: Synthetic oligonucleotide
gcccagugcuaucucagaa

SEQ ID NO: 2578530 - RNA, 19 nt, Artificial Sequence
  Description of Artificial Sequence: Synthetic oligonucleotide
ccuugugaugaugcagcug

SEQ ID NO: 2578531 - RNA, 19 nt, Artificial Sequence
  Description of Artificial Sequence: Synthetic oligonucleotide
cuguuguccaagggacaca

SEQ ID NO: 2578532 - RNA, 19 nt, Artificial Sequence
  Description of Artificial Sequence: Synthetic oligonucleotide
ggccccuucucuuuccaua

SEQ ID NO: 2578533 - RNA, 19 nt, Artificial Sequence
  Description of Artificial Sequence: Synthetic oligonucleotide
ccacucucuguuguccaag

SEQ ID NO: 2578534 - RNA, 19 nt, Artificial Sequence
  Description of Artificial Sequence: Synthetic oligonucleotide
ccuuuacagguuccuguga

SEQ ID NO: 2578535 - RNA, 19 nt, Artificial Sequence
  Description of Artificial Sequence: Synthetic oligonucleotide
gcgcuucuugcccgcgccg

SEQ ID NO: 2578536 - RNA, 19 nt, Artificial Sequence
  Description of Artificial Sequence: Synthetic oligonucleotide
ugccgccauuuuggaaaca

SEQ ID NO: 2578537 - RNA, 19 nt, Artificial Sequence
  Description of Artificial Sequence: Synthetic oligonucleotide
ccuuguuuugagccaucga

SEQ ID NO: 2578538 - RNA, 19 nt, Artificial Sequence
  Description of Artificial Sequence: Synthetic oligonucleotide
gcagacgccugguuggccu

SEQ ID NO: 2578539 - RNA, 19 nt, Artificial Sequence
  Description of Artificial Sequence: Synthetic oligonucleotide
ccacaauaucccaggccca

SEQ ID NO: 2578540 - RNA, 19 nt, Artificial Sequence
  Description of Artificial Sequence: Synthetic oligonucleotide
gcugugggaacagcaaacu

SEQ ID NO: 2578541 - RNA, 19 nt, Artificial Sequence
  Description of Artificial Sequence: Synthetic oligonucleotide
agacgccugguuggccuga

SEQ ID NO: 2578542 - RNA, 19 nt, Artificial Sequence
  Description of Artificial Sequence: Synthetic oligonucleotide
gacagagaccuugguguuu

SEQ ID NO: 2578543 - RNA, 19 nt, Artificial Sequence
  Description of Artificial Sequence: Synthetic oligonucleotide
cacaguuaucaaccacaau

SEQ ID NO: 2578544 - RNA, 19 nt, Artificial Sequence
  Description of Artificial Sequence: Synthetic oligonucleotide
cucgaacuuaaacgacuuu

SEQ ID NO: 2578545 - RNA, 19 nt, Artificial Sequence
  Description of Artificial Sequence: Synthetic oligonucleotide
gggugcaggugacccacaa

SEQ ID NO: 2578546 - RNA, 19 nt, Artificial Sequence
  Description of Artificial Sequence: Synthetic oligonucleotide
ccacgcaacaguacacucu

SEQ ID NO: 2578547 - RNA, 19 nt, Artificial Sequence
  Description of Artificial Sequence: Synthetic oligonucleotide
ccgccauuuuggaaacaca

SEQ ID NO: 2578548 - RNA, 19 nt, Artificial Sequence
  Description of Artificial Sequence: Synthetic oligonucleotide
ccgggugcaggugacccac

SEQ ID NO: 2578549 - RNA, 19 nt, Artificial Sequence
  Description of Artificial Sequence: Synthetic oligonucleotide
gccccuucucuuuccauau

SEQ ID NO: 2578550 - RNA, 19 nt, Artificial Sequence
  Description of Artificial Sequence: Synthetic oligonucleotide
gcccgcgccgcuguuggug

SEQ ID NO: 2578551 - RNA, 19 nt, Artificial Sequence
  Description of Artificial Sequence: Synthetic oligonucleotide
ugcccgcgccgcuguuggu

SEQ ID NO: 2578552 - RNA, 19 nt, Artificial Sequence
  Description of Artificial Sequence: Synthetic oligonucleotide
cccacucucuguuguccaa

SEQ ID NO: 2578553 - RNA, 19 nt, Artificial Sequence
  Description of Artificial Sequence: Synthetic oligonucleotide
gggcuacugcauuccacuu

SEQ ID NO: 2578554 - RNA, 19 nt, Artificial Sequence
  Description of Artificial Sequence: Synthetic oligonucleotide
cgacagcaaccauucucga

SEQ ID NO: 2578555 - RNA, 19 nt, Artificial Sequence
  Description of Artificial Sequence: Synthetic oligonucleotide
gguuggccugacauucaau

SEQ ID NO: 2578556 - RNA, 19 nt, Artificial Sequence
  Description of Artificial Sequence: Synthetic oligonucleotide
cgguucuaucuaauuuaua

SEQ ID NO: 2578557 - RNA, 19 nt, Artificial Sequence
  Description of Artificial Sequence: Synthetic oligonucleotide
ccucauucagcugcccagu

SEQ ID NO: 2578558 - RNA, 19 nt, Artificial Sequence
  Description of Artificial Sequence: Synthetic oligonucleotide
ccccacgcaacaguacacu

SEQ ID NO: 2578559 - RNA, 19 nt, Artificial Sequence
  Description of Artificial Sequence: Synthetic oligonucleotide
cgccugguuggccugacau

SEQ ID NO: 2578560 - RNA, 19 nt, Artificial Sequence
  Description of Artificial Sequence: Synthetic oligonucleotide
ggugagcuuuagggagagu

SEQ ID NO: 2578561 - RNA, 19 nt, Artificial Sequence
  Description of Artificial Sequence: Synthetic oligonucleotide
cccagagggcuacugcauu

SEQ ID NO: 2578562 - RNA, 19 nt, Artificial Sequence
  Description of Artificial Sequence: Synthetic oligonucleotide
ccccuucucuuuccauaua

SEQ ID NO: 2578563 - RNA, 19 nt, Artificial Sequence
  Description of Artificial Sequence: Synthetic oligonucleotide
gggacacaccugccuuguu

SEQ ID NO: 2578564 - RNA, 19 nt, Artificial Sequence
  Description of Artificial Sequence: Synthetic oligonucleotide
aauuucaagagacacacag

SEQ ID NO: 2578565 - RNA, 19 nt, Artificial Sequence
  Description of Artificial Sequence: Synthetic oligonucleotide
auagacaucagacacaggg

SEQ ID NO: 2578566 - RNA, 19 nt, Artificial Sequence
  Description of Artificial Sequence: Synthetic oligonucleotide
ucugauuauguccucagcg

SEQ ID NO: 2578567 - RNA, 19 nt, Artificial Sequence
  Description of Artificial Sequence: Synthetic oligonucleotide
aggguuaucaccuauagca

SEQ ID NO: 2578568 - RNA, 19 nt, Artificial Sequence
  Description of Artificial Sequence: Synthetic oligonucleotide
auucuauagcuacugaagc

SEQ ID NO: 2578569 - RNA, 19 nt, Artificial Sequence
  Description of Artificial Sequence: Synthetic oligonucleotide
agagcuacaauagugagac

SEQ ID NO: 2578570 - RNA, 19 nt, Artificial Sequence
  Description of Artificial Sequence: Synthetic oligonucleotide
uuucaagagacacacagga

SEQ ID NO: 2578571 - RNA, 19 nt, Artificial Sequence
  Description of Artificial Sequence: Synthetic oligonucleotide
agcuacaauagugagaccc

SEQ ID NO: 2578572 - RNA, 19 nt, Artificial Sequence
  Description of Artificial Sequence: Synthetic oligonucleotide
aaaggaagcaacaugaggu

SEQ ID NO: 2578573 - RNA, 19 nt, Artificial Sequence
  Description of Artificial Sequence: Synthetic oligonucleotide
uaugccaguacacaccagg

SEQ ID NO: 2578574 - RNA, 19 nt, Artificial Sequence
  Description of Artificial Sequence: Synthetic oligonucleotide
aauuguguaugccaguaca

SEQ ID NO: 2578575 - RNA, 19 nt, Artificial Sequence
  Description of Artificial Sequence: Synthetic oligonucleotide
aggaucauucuauagcuac

SEQ ID NO: 2578576 - RNA, 19 nt, Artificial Sequence
  Description of Artificial Sequence: Synthetic oligonucleotide
ucugaaaugcugcccaagg

SEQ ID NO: 2578577 - RNA, 19 nt, Artificial Sequence
  Description of Artificial Sequence: Synthetic oligonucleotide
aagggccagaaauccaucc

SEQ ID NO: 2578578 - RNA, 19 nt, Artificial Sequence
  Description of Artificial Sequence: Synthetic oligonucleotide
cauucuauagcuacugaag

SEQ ID NO: 2578579 - RNA, 19 nt, Artificial Sequence
  Description of Artificial Sequence: Synthetic oligonucleotide
ucuggguuguugaaggccg

SEQ ID NO: 2578580 - RNA, 19 nt, Artificial Sequence
  Description of Artificial Sequence: Synthetic oligonucleotide
aaaguccuuacugagagga

SEQ ID NO: 2578581 - RNA, 19 nt, Artificial Sequence
  Description of Artificial Sequence: Synthetic oligonucleotide
ugacaauuguguaugccag

SEQ ID NO: 2578582 - RNA, 19 nt, Artificial Sequence
  Description of Artificial Sequence: Synthetic oligonucleotide
gaaguaggcgcuuuggggc

SEQ ID NO: 2578583 - RNA, 19 nt, Artificial Sequence
  Description of Artificial Sequence: Synthetic oligonucleotide
agaaguaggcgcuuugggg

SEQ ID NO: 2578584 - RNA, 19 nt, Artificial Sequence
  Description of Artificial Sequence: Synthetic oligonucleotide
uauagcauagagcuuccug

SEQ ID NO: 2578585 - RNA, 19 nt, Artificial Sequence
  Description of Artificial Sequence: Synthetic oligonucleotide
augaggucaaauuucaaga

SEQ ID NO: 2578586 - RNA, 19 nt, Artificial Sequence
  Description of Artificial Sequence: Synthetic oligonucleotide
caugaggucaaauuucaag

SEQ ID NO: 2578587 - RNA, 19 nt, Artificial Sequence
  Description of Artificial Sequence: Synthetic oligonucleotide
ugaggucaaauuucaagag

SEQ ID NO: 2578588 - RNA, 19 nt, Artificial Sequence
  Description of Artificial Sequence: Synthetic oligonucleotide
aggucaaauuucaagagac

SEQ ID NO: 2578589 - RNA, 19 nt, Artificial Sequence
  Description of Artificial Sequence: Synthetic oligonucleotide
auagcauagagcuuccuga

SEQ ID NO: 2578590 - RNA, 19 nt, Artificial Sequence
  Description of Artificial Sequence: Synthetic oligonucleotide
ucuauagcuacugaagcug

SEQ ID NO: 2578591 - RNA, 19 nt, Artificial Sequence
  Description of Artificial Sequence: Synthetic oligonucleotide
aaguaggcgcuuuggggcc

SEQ ID NO: 2578592 - RNA, 19 nt, Artificial Sequence
  Description of Artificial Sequence: Synthetic oligonucleotide
accuauagcauagagcuuc

SEQ ID NO: 2578593 - RNA, 19 nt, Artificial Sequence
  Description of Artificial Sequence: Synthetic oligonucleotide
uuacuuuccgguagauugg

SEQ ID NO: 2578594 - RNA, 19 nt, Artificial Sequence
  Description of Artificial Sequence: Synthetic oligonucleotide
cuuacugagaggaggacac

SEQ ID NO: 2578595 - RNA, 19 nt, Artificial Sequence
  Description of Artificial Sequence: Synthetic oligonucleotide
ucguauuucagcuccuugc

SEQ ID NO: 2578596 - RNA, 19 nt, Artificial Sequence
  Description of Artificial Sequence: Synthetic oligonucleotide
uguaugccaguacacacca

SEQ ID NO: 2578597 - RNA, 19 nt, Artificial Sequence
  Description of Artificial Sequence: Synthetic oligonucleotide
ugaaaugcugcccaaggau

SEQ ID NO: 2578598 - RNA, 19 nt, Artificial Sequence
  Description of Artificial Sequence: Synthetic oligonucleotide
ucagcguacugguaagugg

SEQ ID NO: 2578599 - RNA, 19 nt, Artificial Sequence
  Description of Artificial Sequence: Synthetic oligonucleotide
aauagguuggcaccauaga

SEQ ID NO: 2578600 - RNA, 19 nt, Artificial Sequence
  Description of Artificial Sequence: Synthetic oligonucleotide
uagguuggcaccauagaca

SEQ ID NO: 2578601 - RNA, 19 nt, Artificial Sequence
  Description of Artificial Sequence: Synthetic oligonucleotide
aucaccuauagcauagagc

SEQ ID NO: 2578602 - RNA, 19 nt, Artificial Sequence
  Description of Artificial Sequence: Synthetic oligonucleotide
gacuugaugccugugaccc

SEQ ID NO: 2578603 - RNA, 19 nt, Artificial Sequence
  Description of Artificial Sequence: Synthetic oligonucleotide
uaucaccuauagcauagag

SEQ ID NO: 2578604 - RNA, 19 nt, Artificial Sequence
  Description of Artificial Sequence: Synthetic oligonucleotide
ucagagcuacaauagugag

SEQ ID NO: 2578605 - RNA, 19 nt, Artificial Sequence
  Description of Artificial Sequence: Synthetic oligonucleotide
uguguaugccaguacacac

SEQ ID NO: 2578606 - RNA, 19 nt, Artificial Sequence
  Description of Artificial Sequence: Synthetic oligonucleotide
ggaaaguccuuacugagag

SEQ ID NO: 2578607 - RNA, 19 nt, Artificial Sequence
  Description of Artificial Sequence: Synthetic oligonucleotide
guacugguugaauagguug

SEQ ID NO: 2578608 - RNA, 19 nt, Artificial Sequence
  Description of Artificial Sequence: Synthetic oligonucleotide
ucauucuauagcuacugaa

SEQ ID NO: 2578609 - RNA, 19 nt, Artificial Sequence
  Description of Artificial Sequence: Synthetic oligonucleotide
ugucugugaguucaagggc

SEQ ID NO: 2578610 - RNA, 19 nt, Artificial Sequence
  Description of Artificial Sequence: Synthetic oligonucleotide
uucuauagcuacugaagcu

SEQ ID NO: 2578611 - RNA, 19 nt, Artificial Sequence
  Description of Artificial Sequence: Synthetic oligonucleotide
guuaucaccuauagcauag

SEQ ID NO: 2578612 - RNA, 19 nt, Artificial Sequence
  Description of Artificial Sequence: Synthetic oligonucleotide
acugguaaguggaggaugc

SEQ ID NO: 2578613 - RNA, 19 nt, Artificial Sequence
  Description of Artificial Sequence: Synthetic oligonucleotide
gucaaauuucaagagacac

SEQ ID NO: 2578614 - RNA, 19 nt, Artificial Sequence
  Description of Artificial Sequence: Synthetic oligonucleotide
gaauagguuggcaccauag

SEQ ID NO: 2578615 - RNA, 19 nt, Artificial Sequence
  Description of Artificial Sequence: Synthetic oligonucleotide
acaggguuaucaccuauag

SEQ ID NO: 2578616 - RNA, 19 nt, Artificial Sequence
  Description of Artificial Sequence: Synthetic oligonucleotide
agguaaaggaagcaacaug

SEQ ID NO: 2578617 - RNA, 19 nt, Artificial Sequence
  Description of Artificial Sequence: Synthetic oligonucleotide
agggccagaaauccauccc

SEQ ID NO: 2578618 - RNA, 19 nt, Artificial Sequence
  Description of Artificial Sequence: Synthetic oligonucleotide
uuugucauuugcagguacu

SEQ ID NO: 2578619 - RNA, 19 nt, Artificial Sequence
  Description of Artificial Sequence: Synthetic oligonucleotide
aacaugaggucaaauuuca

SEQ ID NO: 2578620 - RNA, 19 nt, Artificial Sequence
  Description of Artificial Sequence: Synthetic oligonucleotide
cacgcuuugucauuugcag

SEQ ID NO: 2578621 - RNA, 19 nt, Artificial Sequence
  Description of Artificial Sequence: Synthetic oligonucleotide
agagacacacaggaagggc

SEQ ID NO: 2578622 - RNA, 19 nt, Artificial Sequence
  Description of Artificial Sequence: Synthetic oligonucleotide
ugguugaauagguuggcac

SEQ ID NO: 2578623 - RNA, 19 nt, Artificial Sequence
  Description of Artificial Sequence: Synthetic oligonucleotide
ugucugauuauguccucag

SEQ ID NO: 2578624 - RNA, 19 nt, Artificial Sequence
  Description of Artificial Sequence: Synthetic oligonucleotide
aguccuuacugagaggagg

SEQ ID NO: 2578625 - RNA, 19 nt, Artificial Sequence
  Description of Artificial Sequence: Synthetic oligonucleotide
aggaugcuggguuugcccg

SEQ ID NO: 2578626 - RNA, 19 nt, Artificial Sequence
  Description of Artificial Sequence: Synthetic oligonucleotide
auagcuacugaagcugugg

SEQ ID NO: 2578627 - RNA, 19 nt, Artificial Sequence
  Description of Artificial Sequence: Synthetic oligonucleotide
uugccuguuacuuuccggu

SEQ ID NO: 2578628 - RNA, 19 nt, Artificial Sequence
  Description of Artificial Sequence: Synthetic oligonucleotide
ucagccugcugucugauua

SEQ ID NO: 2578629 - RNA, 19 nt, Artificial Sequence
  Description of Artificial Sequence: Synthetic oligonucleotide
auuguguaugccaguacac

SEQ ID NO: 2578630 - RNA, 19 nt, Artificial Sequence
  Description of Artificial Sequence: Synthetic oligonucleotide
ugacccguggaacggaagc

SEQ ID NO: 2578631 - RNA, 19 nt, Artificial Sequence
  Description of Artificial Sequence: Synthetic oligonucleotide
cugcugucugauuaugucc

SEQ ID NO: 2578632 - RNA, 19 nt, Artificial Sequence
  Description of Artificial Sequence: Synthetic oligonucleotide
auuucaagagacacacagg

SEQ ID NO: 2578633 - RNA, 19 nt, Artificial Sequence
  Description of Artificial Sequence: Synthetic oligonucleotide
uagacaucagacacagggu

SEQ ID NO: 2578634 - RNA, 19 nt, Artificial Sequence
  Description of Artificial Sequence: Synthetic oligonucleotide
cugacaauuguguaugcca

SEQ ID NO: 2578635 - RNA, 19 nt, Artificial Sequence
  Description of Artificial Sequence: Synthetic oligonucleotide
agcaacaugaggucaaauu

SEQ ID NO: 2578636 - RNA, 19 nt, Artificial Sequence
  Description of Artificial Sequence: Synthetic oligonucleotide
acagucagagcuacaauag

SEQ ID NO: 2578637 - RNA, 19 nt, Artificial Sequence
  Description of Artificial Sequence: Synthetic oligonucleotide
gguugaauagguuggcacc

SEQ ID NO: 2578638 - RNA, 19 nt, Artificial Sequence
  Description of Artificial Sequence: Synthetic oligonucleotide
gaagcaguggcaaggggcc

SEQ ID NO: 2578639 - RNA, 19 nt, Artificial Sequence
  Description of Artificial Sequence: Synthetic oligonucleotide
gaggucaaauuucaagaga

SEQ ID NO: 2578640 - RNA, 19 nt, Artificial Sequence
  Description of Artificial Sequence: Synthetic oligonucleotide
gaaaguccuuacugagagg

SEQ ID NO: 2578641 - RNA, 19 nt, Artificial Sequence
  Description of Artificial Sequence: Synthetic oligonucleotide
ccaaggaucauucuauagc

SEQ ID NO: 2578642 - RNA, 19 nt, Artificial Sequence
  Description of Artificial Sequence: Synthetic oligonucleotide
uacaauagugagacccugu

SEQ ID NO: 2578643 - RNA, 19 nt, Artificial Sequence
  Description of Artificial Sequence: Synthetic oligonucleotide
acugguugaauagguuggc

SEQ ID NO: 2578644 - RNA, 19 nt, Artificial Sequence
  Description of Artificial Sequence: Synthetic oligonucleotide
gguaaguggaggaugcugg

SEQ ID NO: 2578645 - RNA, 19 nt, Artificial Sequence
  Description of Artificial Sequence: Synthetic oligonucleotide
uguugaaggccgcugcuuc

SEQ ID NO: 2578646 - RNA, 19 nt, Artificial Sequence
  Description of Artificial Sequence: Synthetic oligonucleotide
uauagcuacugaagcugug

SEQ ID NO: 2578647 - RNA, 19 nt, Artificial Sequence
  Description of Artificial Sequence: Synthetic oligonucleotide
acgcuuugucauuugcagg

SEQ ID NO: 2578648 - RNA, 19 nt, Artificial Sequence
  Description of Artificial Sequence: Synthetic oligonucleotide
agcuacugaagcugugguc

SEQ ID NO: 2578649 - RNA, 19 nt, Artificial Sequence
  Description of Artificial Sequence: Synthetic oligonucleotide
aaaugcugcccaaggauca

SEQ ID NO: 2578650 - RNA, 19 nt, Artificial Sequence
  Description of Artificial Sequence: Synthetic oligonucleotide
cagacacaggguuaucacc

SEQ ID NO: 2578651 - RNA, 19 nt, Artificial Sequence
  Description of Artificial Sequence: Synthetic oligonucleotide
ugcccaaggaucauucuau

SEQ ID NO: 2578652 - RNA, 19 nt, Artificial Sequence
  Description of Artificial Sequence: Synthetic oligonucleotide
agacaucagacacaggguu

SEQ ID NO: 2578653 - RNA, 19 nt, Artificial Sequence
  Description of Artificial Sequence: Synthetic oligonucleotide
ugggacuugaugccuguga

SEQ ID NO: 2578654 - RNA, 19 nt, Artificial Sequence
  Description of Artificial Sequence: Synthetic oligonucleotide
cagaaguaggcgcuuuggg

SEQ ID NO: 2578655 - RNA, 19 nt, Artificial Sequence
  Description of Artificial Sequence: Synthetic oligonucleotide
uuuccgguagauugguuuc

SEQ ID NO: 2578656 - RNA, 19 nt, Artificial Sequence
  Description of Artificial Sequence: Synthetic oligonucleotide
gaggaugcuggguuugccc

SEQ ID NO: 2578657 - RNA, 19 nt, Artificial Sequence
  Description of Artificial Sequence: Synthetic oligonucleotide
cauagagcuuccugauggg

SEQ ID NO: 2578658 - RNA, 19 nt, Artificial Sequence
  Description of Artificial Sequence: Synthetic oligonucleotide
agguuggcaccauagacau

SEQ ID NO: 2578659 - RNA, 19 nt, Artificial Sequence
  Description of Artificial Sequence: Synthetic oligonucleotide
gaaaugcugcccaaggauc

SEQ ID NO: 2578660 - RNA, 19 nt, Artificial Sequence
  Description of Artificial Sequence: Synthetic oligonucleotide
caugcccucguauuucagc

SEQ ID NO: 2578661 - RNA, 19 nt, Artificial Sequence
  Description of Artificial Sequence: Synthetic oligonucleotide
uuguguaugccaguacaca

SEQ ID NO: 2578662 - RNA, 19 nt, Artificial Sequence
  Description of Artificial Sequence: Synthetic oligonucleotide
ugggcccugacaauugugu

SEQ ID NO: 2578663 - RNA, 19 nt, Artificial Sequence
  Description of Artificial Sequence: Synthetic oligonucleotide
uucaagagacacacaggaa

SEQ ID NO: 2578664 - RNA, 19 nt, Artificial Sequence
  Description of Artificial Sequence: Synthetic oligonucleotide
uggaacggaagcuccgccc

SEQ ID NO: 2578665 - RNA, 19 nt, Artificial Sequence
  Description of Artificial Sequence: Synthetic oligonucleotide
uccacgcuuugucauuugc

SEQ ID NO: 2578666 - RNA, 19 nt, Artificial Sequence
  Description of Artificial Sequence: Synthetic oligonucleotide
uacugagaggaggacacug

SEQ ID NO: 2578667 - RNA, 19 nt, Artificial Sequence
  Description of Artificial Sequence: Synthetic oligonucleotide
auagagcuuccugaugggg

SEQ ID NO: 2578668 - RNA, 19 nt, Artificial Sequence
  Description of Artificial Sequence: Synthetic oligonucleotide
cuuugucauuugcagguac

SEQ ID NO: 2578669 - RNA, 19 nt, Artificial Sequence
  Description of Artificial Sequence: Synthetic oligonucleotide
augcccucguauuucagcu

SEQ ID NO: 2578670 - RNA, 19 nt, Artificial Sequence
  Description of Artificial Sequence: Synthetic oligonucleotide
uucucuccacgcuuuguca

SEQ ID NO: 2578671 - RNA, 19 nt, Artificial Sequence
  Description of Artificial Sequence: Synthetic oligonucleotide
ucucucagccugcugucug

SEQ ID NO: 2578672 - RNA, 19 nt, Artificial Sequence
  Description of Artificial Sequence: Synthetic oligonucleotide
uagcuacugaagcuguggu

SEQ ID NO: 2578673 - RNA, 19 nt, Artificial Sequence
  Description of Artificial Sequence: Synthetic oligonucleotide
acaauagugagacccuguu

SEQ ID NO: 2578674 - RNA, 19 nt, Artificial Sequence
  Description of Artificial Sequence: Synthetic oligonucleotide
agacacaggguuaucaccu

SEQ ID NO: 2578675 - RNA, 19 nt, Artificial Sequence
  Description of Artificial Sequence: Synthetic oligonucleotide
uacugguaaguggaggaug

SEQ ID NO: 2578676 - RNA, 19 nt, Artificial Sequence
  Description of Artificial Sequence: Synthetic oligonucleotide
caaggaucauucuauagcu

SEQ ID NO: 2578677 - RNA, 19 nt, Artificial Sequence
  Description of Artificial Sequence: Synthetic oligonucleotide
ugguaaguggaggaugcug

SEQ ID NO: 2578678 - RNA, 19 nt, Artificial Sequence
  Description of Artificial Sequence: Synthetic oligonucleotide
uucaucccaggaagcagug

SEQ ID NO: 2578679 - RNA, 19 nt, Artificial Sequence
  Description of Artificial Sequence: Synthetic oligonucleotide
uggcaaggggccaggcugg

SEQ ID NO: 2578680 - RNA, 19 nt, Artificial Sequence
  Description of Artificial Sequence: Synthetic oligonucleotide
ggcaccauagacaucagac

SEQ ID NO: 2578681 - RNA, 19 nt, Artificial Sequence
  Description of Artificial Sequence: Synthetic oligonucleotide
caggaagggccagaaaucc

SEQ ID NO: 2578682 - RNA, 19 nt, Artificial Sequence
  Description of Artificial Sequence: Synthetic oligonucleotide
uccagaaguaggcgcuuug

SEQ ID NO: 2578683 - RNA, 19 nt, Artificial Sequence
  Description of Artificial Sequence: Synthetic oligonucleotide
ccaggcugggacuugaugc

SEQ ID NO: 2578684 - RNA, 19 nt, Artificial Sequence
  Description of Artificial Sequence: Synthetic oligonucleotide
cugagaggaggacacugag

SEQ ID NO: 2578685 - RNA, 19 nt, Artificial Sequence
  Description of Artificial Sequence: Synthetic oligonucleotide
ugaugccugugacccgugg

SEQ ID NO: 2578686 - RNA, 19 nt, Artificial Sequence
  Description of Artificial Sequence: Synthetic oligonucleotide
caugcuccuucucuccacg

SEQ ID NO: 2578687 - RNA, 19 nt, Artificial Sequence
  Description of Artificial Sequence: Synthetic oligonucleotide
gauugguuuccaggcacag

SEQ ID NO: 2578688 - RNA, 19 nt, Artificial Sequence
  Description of Artificial Sequence: Synthetic oligonucleotide
caggcugggacuugaugcc

SEQ ID NO: 2578689 - RNA, 19 nt, Artificial Sequence
  Description of Artificial Sequence: Synthetic oligonucleotide
uccucagcguacugguaag

SEQ ID NO: 2578690 - RNA, 19 nt, Artificial Sequence
  Description of Artificial Sequence: Synthetic oligonucleotide
agcauagagcuuccugaug

SEQ ID NO: 2578691 - RNA, 19 nt, Artificial Sequence
  Description of Artificial Sequence: Synthetic oligonucleotide
aacggaagcuccgcccuuc

SEQ ID NO: 2578692 - RNA, 19 nt, Artificial Sequence
  Description of Artificial Sequence: Synthetic oligonucleotide
ggggaaaguccuuacugag

SEQ ID NO: 2578693 - RNA, 19 nt, Artificial Sequence
  Description of Artificial Sequence: Synthetic oligonucleotide
gucagagcuacaauaguga

SEQ ID NO: 2578694 - RNA, 19 nt, Artificial Sequence
  Description of Artificial Sequence: Synthetic oligonucleotide
gagacacagcucuggguug

SEQ ID NO: 2578695 - RNA, 19 nt, Artificial Sequence
  Description of Artificial Sequence: Synthetic oligonucleotide
cuucucuccacgcuuuguc

SEQ ID NO: 2578696 - RNA, 19 nt, Artificial Sequence
  Description of Artificial Sequence: Synthetic oligonucleotide
guugaauagguuggcacca

SEQ ID NO: 2578697 - RNA, 19 nt, Artificial Sequence
  Description of Artificial Sequence: Synthetic oligonucleotide
uagcauagagcuuccugau

SEQ ID NO: 2578698 - RNA, 19 nt, Artificial Sequence
  Description of Artificial Sequence: Synthetic oligonucleotide
guguaugccaguacacacc

SEQ ID NO: 2578699 - RNA, 19 nt, Artificial Sequence
  Description of Artificial Sequence: Synthetic oligonucleotide
acuugaugccugugacccg

SEQ ID NO: 2578700 - RNA, 19 nt, Artificial Sequence
  Description of Artificial Sequence: Synthetic oligonucleotide
auuauguccucagcguacu

SEQ ID NO: 2578701 - RNA, 19 nt, Artificial Sequence
  Description of Artificial Sequence: Synthetic oligonucleotide
caauuguguaugccaguac

SEQ ID NO: 2578702 - RNA, 19 nt, Artificial Sequence
  Description of Artificial Sequence: Synthetic oligonucleotide
guagauugguuuccaggca

SEQ ID NO: 2578703 - RNA, 19 nt, Artificial Sequence
  Description of Artificial Sequence: Synthetic oligonucleotide
caggguuaucaccuauagc

SEQ ID NO: 2578704 - RNA, 19 nt, Artificial Sequence
  Description of Artificial Sequence: Synthetic oligonucleotide
ugaauagguuggcaccaua

SEQ ID NO: 2578705 - RNA, 19 nt, Artificial Sequence
  Description of Artificial Sequence: Synthetic oligonucleotide
acaauuguguaugccagua

SEQ ID NO: 2578706 - RNA, 19 nt, Artificial Sequence
  Description of Artificial Sequence: Synthetic oligonucleotide
ucucuccacgcuuugucau

SEQ ID NO: 2578707 - RNA, 19 nt, Artificial Sequence
  Description of Artificial Sequence: Synthetic oligonucleotide
gucugauuauguccucagc

SEQ ID NO: 2578708 - RNA, 19 nt, Artificial Sequence
  Description of Artificial Sequence: Synthetic oligonucleotide
cucguauuucagcuccuug

SEQ ID NO: 2578709 - RNA, 19 nt, Artificial Sequence
  Description of Artificial Sequence: Synthetic oligonucleotide
uuauguccucagcguacug

SEQ ID NO: 2578710 - RNA, 19 nt, Artificial Sequence
  Description of Artificial Sequence: Synthetic oligonucleotide
ucaugcccucguauuucag

SEQ ID NO: 2578711 - RNA, 19 nt, Artificial Sequence
  Description of Artificial Sequence: Synthetic oligonucleotide
cagcguacugguaagugga

SEQ ID NO: 2578712 - RNA, 19 nt, Artificial Sequence
  Description of Artificial Sequence: Synthetic oligonucleotide
ugccaguacacaccaggau

SEQ ID NO: 2578713 - RNA, 19 nt, Artificial Sequence
  Description of Artificial Sequence: Synthetic oligonucleotide
gcucuacaaagcaaguucc

SEQ ID NO: 2578714 - RNA, 19 nt, Artificial Sequence
  Description of Artificial Sequence: Synthetic oligonucleotide
acggaagcuccgcccuucc

SEQ ID NO: 2578715 - RNA, 19 nt, Artificial Sequence
  Description of Artificial Sequence: Synthetic oligonucleotide
ccauagacaucagacacag

SEQ ID NO: 2578716 - RNA, 19 nt, Artificial Sequence
  Description of Artificial Sequence: Synthetic oligonucleotide
cuacaauagugagacccug

SEQ ID NO: 2578717 - RNA, 19 nt, Artificial Sequence
  Description of Artificial Sequence: Synthetic oligonucleotide
ugaaggccgcugcuucugc

SEQ ID NO: 2578718 - RNA, 19 nt, Artificial Sequence
  Description of Artificial Sequence: Synthetic oligonucleotide
aaguccuuacugagaggag

SEQ ID NO: 2578719 - RNA, 19 nt, Artificial Sequence
  Description of Artificial Sequence: Synthetic oligonucleotide
gaagcuccgcccuuccaga

SEQ ID NO: 2578720 - RNA, 19 nt, Artificial Sequence
  Description of Artificial Sequence: Synthetic oligonucleotide
cagagcuacaauagugaga

SEQ ID NO: 2578721 - RNA, 19 nt, Artificial Sequence
  Description of Artificial Sequence: Synthetic oligonucleotide
aggaagcaacaugagguca

SEQ ID NO: 2578722 - RNA, 19 nt, Artificial Sequence
  Description of Artificial Sequence: Synthetic oligonucleotide
ugcuucugcuguccaccag

SEQ ID NO: 2578723 - RNA, 19 nt, Artificial Sequence
  Description of Artificial Sequence: Synthetic oligonucleotide
cauagacaucagacacagg

SEQ ID NO: 2578724 - RNA, 19 nt, Artificial Sequence
  Description of Artificial Sequence: Synthetic oligonucleotide
uuaucaccuauagcauaga

SEQ ID NO: 2578725 - RNA, 19 nt, Artificial Sequence
  Description of Artificial Sequence: Synthetic oligonucleotide
uggguuugcccgucaugcc

SEQ ID NO: 2578726 - RNA, 19 nt, Artificial Sequence
  Description of Artificial Sequence: Synthetic oligonucleotide
gggccagaaauccaucccc

SEQ ID NO: 2578727 - RNA, 19 nt, Artificial Sequence
  Description of Artificial Sequence: Synthetic oligonucleotide
uuccgguagauugguuucc

SEQ ID NO: 2578728 - RNA, 19 nt, Artificial Sequence
  Description of Artificial Sequence: Synthetic oligonucleotide
uacuuuccgguagauuggu

SEQ ID NO: 2578729 - RNA, 19 nt, Artificial Sequence
  Description of Artificial Sequence: Synthetic oligonucleotide
cugauuauguccucagcgu

SEQ ID NO: 2578730 - RNA, 19 nt, Artificial Sequence
  Description of Artificial Sequence: Synthetic oligonucleotide
cugaaaugcugcccaagga

SEQ ID NO: 2578731 - RNA, 19 nt, Artificial Sequence
  Description of Artificial Sequence: Synthetic oligonucleotide
caggaagcaguggcaaggg

SEQ ID NO: 2578732 - RNA, 19 nt, Artificial Sequence
  Description of Artificial Sequence: Synthetic oligonucleotide
augccugugacccguggaa

SEQ ID NO: 2578733 - RNA, 19 nt, Artificial Sequence
  Description of Artificial Sequence: Synthetic oligonucleotide
ugugacccguggaacggaa

SEQ ID NO: 2578734 - RNA, 19 nt, Artificial Sequence
  Description of Artificial Sequence: Synthetic oligonucleotide
cucagcguacugguaagug

SEQ ID NO: 2578735 - RNA, 19 nt, Artificial Sequence
  Description of Artificial Sequence: Synthetic oligonucleotide
accauagacaucagacaca

SEQ ID NO: 2578736 - RNA, 19 nt, Artificial Sequence
  Description of Artificial Sequence: Synthetic oligonucleotide
gccuguuacuuuccgguag

SEQ ID NO: 2578737 - RNA, 19 nt, Artificial Sequence
  Description of Artificial Sequence: Synthetic oligonucleotide
aguucaagggcagccugcu

SEQ ID NO: 2578738 - RNA, 19 nt, Artificial Sequence
  Description of Artificial Sequence: Synthetic oligonucleotide
ggguuugcccgucaugccc

SEQ ID NO: 2578739 - RNA, 19 nt, Artificial Sequence
  Description of Artificial Sequence: Synthetic oligonucleotide
cguauuucagcuccuugcc

SEQ ID NO: 2578740 - RNA, 19 nt, Artificial Sequence
  Description of Artificial Sequence: Synthetic oligonucleotide
guccucagcguacugguaa

SEQ ID NO: 2578741 - RNA, 19 nt, Artificial Sequence
  Description of Artificial Sequence: Synthetic oligonucleotide
caggauggagacacagcuc

SEQ ID NO: 2578742 - RNA, 19 nt, Artificial Sequence
  Description of Artificial Sequence: Synthetic oligonucleotide
gggacuugaugccugugac

SEQ ID NO: 2578743 - RNA, 19 nt, Artificial Sequence
  Description of Artificial Sequence: Synthetic oligonucleotide
acccguggaacggaagcuc

SEQ ID NO: 2578744 - RNA, 19 nt, Artificial Sequence
  Description of Artificial Sequence: Synthetic oligonucleotide
guggaacggaagcuccgcc

SEQ ID NO: 2578745 - RNA, 19 nt, Artificial Sequence
  Description of Artificial Sequence: Synthetic oligonucleotide
ggacuugaugccugugacc

SEQ ID NO: 2578746 - RNA, 19 nt, Artificial Sequence
  Description of Artificial Sequence: Synthetic oligonucleotide
gccugugacccguggaacg

SEQ ID NO: 2578747 - RNA, 19 nt, Artificial Sequence
  Description of Artificial Sequence: Synthetic oligonucleotide
aagcuguggucuucuucau

SEQ ID NO: 2578748 - RNA, 19 nt, Artificial Sequence
  Description of Artificial Sequence: Synthetic oligonucleotide
aguggaggaugcuggguuu

SEQ ID NO: 2578749 - RNA, 19 nt, Artificial Sequence
  Description of Artificial Sequence: Synthetic oligonucleotide
gcccucguauuucagcucc

SEQ ID NO: 2578750 - RNA, 19 nt, Artificial Sequence
  Description of Artificial Sequence: Synthetic oligonucleotide
acacaggguuaucaccuau

SEQ ID NO: 2578751 - RNA, 19 nt, Artificial Sequence
  Description of Artificial Sequence: Synthetic oligonucleotide
aaggaucauucuauagcua

SEQ ID NO: 2578752 - RNA, 19 nt, Artificial Sequence
  Description of Artificial Sequence: Synthetic oligonucleotide
uccgcccuuccagaaguag

SEQ ID NO: 2578753 - RNA, 19 nt, Artificial Sequence
  Description of Artificial Sequence: Synthetic oligonucleotide
gacaauuguguaugccagu

SEQ ID NO: 2578754 - RNA, 19 nt, Artificial Sequence
  Description of Artificial Sequence: Synthetic oligonucleotide
cccaaggaucauucuauag

SEQ ID NO: 2578755 - RNA, 19 nt, Artificial Sequence
  Description of Artificial Sequence: Synthetic oligonucleotide
uucagcuccuugccuguua

SEQ ID NO: 2578756 - RNA, 19 nt, Artificial Sequence
  Description of Artificial Sequence: Synthetic oligonucleotide
uccgguagauugguuucca

SEQ ID NO: 2578757 - RNA, 19 nt, Artificial Sequence
  Description of Artificial Sequence: Synthetic oligonucleotide
cgguagauugguuuccagg

SEQ ID NO: 2578758 - RNA, 19 nt, Artificial Sequence
  Description of Artificial Sequence: Synthetic oligonucleotide
aaugcugcccaaggaucau

SEQ ID NO: 2578759 - RNA, 19 nt, Artificial Sequence
  Description of Artificial Sequence: Synthetic oligonucleotide
cacugaggcacagagguaa

SEQ ID NO: 2578760 - RNA, 19 nt, Artificial Sequence
  Description of Artificial Sequence: Synthetic oligonucleotide
agcuccgcccuuccagaag

SEQ ID NO: 2578761 - RNA, 19 nt, Artificial Sequence
  Description of Artificial Sequence: Synthetic oligonucleotide
cuggguuguugaaggccgc

SEQ ID NO: 2578762 - RNA, 19 nt, Artificial Sequence
  Description of Artificial Sequence: Synthetic oligonucleotide
uugcccgucaugcccucgu

SEQ ID NO: 2578763 - RNA, 19 nt, Artificial Sequence
  Description of Artificial Sequence: Synthetic oligonucleotide
gcaacaugaggucaaauuu

SEQ ID NO: 2578764 - RNA, 19 nt, Artificial Sequence
  Description of Artificial Sequence: Synthetic oligonucleotide
gguuaucaccuauagcaua

SEQ ID NO: 2578765 - RNA, 19 nt, Artificial Sequence
  Description of Artificial Sequence: Synthetic oligonucleotide
aagcaacaugaggucaaau

SEQ ID NO: 2578766 - RNA, 19 nt, Artificial Sequence
  Description of Artificial Sequence: Synthetic oligonucleotide
cuuuccgguagauugguuu

SEQ ID NO: 2578767 - RNA, 19 nt, Artificial Sequence
  Description of Artificial Sequence: Synthetic oligonucleotide
ucccaggaagcaguggcaa

SEQ ID NO: 2578768 - RNA, 19 nt, Artificial Sequence
  Description of Artificial Sequence: Synthetic oligonucleotide
cuauagcuacugaagcugu

SEQ ID NO: 2578769 - RNA, 19 nt, Artificial Sequence
  Description of Artificial Sequence: Synthetic oligonucleotide
ugccuguuacuuuccggua

SEQ ID NO: 2578770 - RNA, 19 nt, Artificial Sequence
  Description of Artificial Sequence: Synthetic oligonucleotide
agauugguuuccaggcaca

SEQ ID NO: 2578771 - RNA, 19 nt, Artificial Sequence
  Description of Artificial Sequence: Synthetic oligonucleotide
ccuauagcauagagcuucc

SEQ ID NO: 2578772 - RNA, 19 nt, Artificial Sequence
  Description of Artificial Sequence: Synthetic oligonucleotide
gcuacugaagcuguggucu

SEQ ID NO: 2578773 - RNA, 19 nt, Artificial Sequence
  Description of Artificial Sequence: Synthetic oligonucleotide
cccuuccagaaguaggcgc

SEQ ID NO: 2578774 - RNA, 19 nt, Artificial Sequence
  Description of Artificial Sequence: Synthetic oligonucleotide
aagcuccgcccuuccagaa

SEQ ID NO: 2578775 - RNA, 19 nt, Artificial Sequence
  Description of Artificial Sequence: Synthetic oligonucleotide
uuugcccgucaugcccucg

SEQ ID NO: 2578776 - RNA, 19 nt, Artificial Sequence
  Description of Artificial Sequence: Synthetic oligonucleotide
ccuucugaaaugcugccca

SEQ ID NO: 2578777 - RNA, 19 nt, Artificial Sequence
  Description of Artificial Sequence: Synthetic oligonucleotide
uugaauagguuggcaccau

SEQ ID NO: 2578778 - RNA, 19 nt, Artificial Sequence
  Description of Artificial Sequence: Synthetic oligonucleotide
cugggcccugacaauugug

SEQ ID NO: 2578779 - RNA, 19 nt, Artificial Sequence
  Description of Artificial Sequence: Synthetic oligonucleotide
agacacagcucuggguugu

SEQ ID NO: 2578780 - RNA, 19 nt, Artificial Sequence
  Description of Artificial Sequence: Synthetic oligonucleotide
gagcuacaauagugagacc

SEQ ID NO: 2578781 - RNA, 19 nt, Artificial Sequence
  Description of Artificial Sequence: Synthetic oligonucleotide
augccaguacacaccagga

SEQ ID NO: 2578782 - RNA, 19 nt, Artificial Sequence
  Description of Artificial Sequence: Synthetic oligonucleotide
guauuucagcuccuugccu

SEQ ID NO: 2578783 - RNA, 19 nt, Artificial Sequence
  Description of Artificial Sequence: Synthetic oligonucleotide
gcccugacaauuguguaug

SEQ ID NO: 2578784 - RNA, 19 nt, Artificial Sequence
  Description of Artificial Sequence: Synthetic oligonucleotide
gaagggccagaaauccauc

SEQ ID NO: 2578785 - RNA, 19 nt, Artificial Sequence
  Description of Artificial Sequence: Synthetic oligonucleotide
gagguaaaggaagcaacau

SEQ ID NO: 2578786 - RNA, 19 nt, Artificial Sequence
  Description of Artificial Sequence: Synthetic oligonucleotide
ugccugugacccguggaac

SEQ ID NO: 2578787 - RNA, 19 nt, Artificial Sequence
  Description of Artificial Sequence: Synthetic oligonucleotide
ucuccacgcuuugucauuu

SEQ ID NO: 2578788 - RNA, 19 nt, Artificial Sequence
  Description of Artificial Sequence: Synthetic oligonucleotide
ccugacaauuguguaugcc

SEQ ID NO: 2578789 - RNA, 19 nt, Artificial Sequence
  Description of Artificial Sequence: Synthetic oligonucleotide
uguccucagcguacuggua

SEQ ID NO: 2578790 - RNA, 19 nt, Artificial Sequence
  Description of Artificial Sequence: Synthetic oligonucleotide
agcguacugguaaguggag

SEQ ID NO: 2578791 - RNA, 19 nt, Artificial Sequence
  Description of Artificial Sequence: Synthetic oligonucleotide
gcacagagguaaaggaagc

SEQ ID NO: 2578792 - RNA, 19 nt, Artificial Sequence
  Description of Artificial Sequence: Synthetic oligonucleotide
uggguuguugaaggccgcu

SEQ ID NO: 2578793 - RNA, 19 nt, Artificial Sequence
  Description of Artificial Sequence: Synthetic oligonucleotide
ugcccucguauuucagcuc

SEQ ID NO: 2578794 - RNA, 19 nt, Artificial Sequence
  Description of Artificial Sequence: Synthetic oligonucleotide
cacagagguaaaggaagca

SEQ ID NO: 2578795 - RNA, 19 nt, Artificial Sequence
  Description of Artificial Sequence: Synthetic oligonucleotide
gaagcaacaugaggucaaa

SEQ ID NO: 2578796 - RNA, 19 nt, Artificial Sequence
  Description of Artificial Sequence: Synthetic oligonucleotide
gcgcuuuggggccugggcc

SEQ ID NO: 2578797 - RNA, 19 nt, Artificial Sequence
  Description of Artificial Sequence: Synthetic oligonucleotide
ggucaaauuucaagagaca

SEQ ID NO: 2578798 - RNA, 19 nt, Artificial Sequence
  Description of Artificial Sequence: Synthetic oligonucleotide
aggccgcugcuucugcugu

SEQ ID NO: 2578799 - RNA, 19 nt, Artificial Sequence
  Description of Artificial Sequence: Synthetic oligonucleotide
gaugcuggguuugcccguc

SEQ ID NO: 2578800 - RNA, 19 nt, Artificial Sequence
  Description of Artificial Sequence: Synthetic oligonucleotide
uacugaagcuguggucuuc

SEQ ID NO: 2578801 - RNA, 19 nt, Artificial Sequence
  Description of Artificial Sequence: Synthetic oligonucleotide
gcguacugguaaguggagg

SEQ ID NO: 2578802 - RNA, 19 nt, Artificial Sequence
  Description of Artificial Sequence: Synthetic oligonucleotide
ccgcccuuccagaaguagg

SEQ ID NO: 2578803 - RNA, 19 nt, Artificial Sequence
  Description of Artificial Sequence: Synthetic oligonucleotide
ccagccccaucucucagcc

SEQ ID NO: 2578804 - RNA, 19 nt, Artificial Sequence
  Description of Artificial Sequence: Synthetic oligonucleotide
aagcaguggcaaggggcca

SEQ ID NO: 2578805 - RNA, 19 nt, Artificial Sequence
  Description of Artificial Sequence: Synthetic oligonucleotide
cugcccaaggaucauucua

SEQ ID NO: 2578806 - RNA, 19 nt, Artificial Sequence
  Description of Artificial Sequence: Synthetic oligonucleotide
cacaggguuaucaccuaua

SEQ ID NO: 2578807 - RNA, 19 nt, Artificial Sequence
  Description of Artificial Sequence: Synthetic oligonucleotide
ggcgcuuuggggccugggc

SEQ ID NO: 2578808 - RNA, 19 nt, Artificial Sequence
  Description of Artificial Sequence: Synthetic oligonucleotide
aggaagggccagaaaucca

SEQ ID NO: 2578809 - RNA, 19 nt, Artificial Sequence
  Description of Artificial Sequence: Synthetic oligonucleotide
ggaaggcagaugucuguga

SEQ ID NO: 2578810 - RNA, 19 nt, Artificial Sequence
  Description of Artificial Sequence: Synthetic oligonucleotide
ggaagcaacaugaggucaa

SEQ ID NO: 2578811 - RNA, 19 nt, Artificial Sequence
  Description of Artificial Sequence: Synthetic oligonucleotide
cguacugguaaguggagga

SEQ ID NO: 2578812 - RNA, 19 nt, Artificial Sequence
  Description of Artificial Sequence: Synthetic oligonucleotide
cccguggaacggaagcucc

SEQ ID NO: 2578813 - RNA, 19 nt, Artificial Sequence
  Description of Artificial Sequence: Synthetic oligonucleotide
aucucucagccugcugucu

SEQ ID NO: 2578814 - RNA, 19 nt, Artificial Sequence
  Description of Artificial Sequence: Synthetic oligonucleotide
ggggccugggcccugacaa

SEQ ID NO: 2578815 - RNA, 19 nt, Artificial Sequence
  Description of Artificial Sequence: Synthetic oligonucleotide
cucucagccugcugucuga

SEQ ID NO: 2578816 - RNA, 19 nt, Artificial Sequence
  Description of Artificial Sequence: Synthetic oligonucleotide
guugaaggccgcugcuucu

SEQ ID NO: 2578817 - RNA, 19 nt, Artificial Sequence
  Description of Artificial Sequence: Synthetic oligonucleotide
ccugugacccguggaacgg

SEQ ID NO: 2578818 - RNA, 19 nt, Artificial Sequence
  Description of Artificial Sequence: Synthetic oligonucleotide
cuugaugccugugacccgu

SEQ ID NO: 2578819 - RNA, 19 nt, Artificial Sequence
  Description of Artificial Sequence: Synthetic oligonucleotide
guaugccaguacacaccag

SEQ ID NO: 2578820 - RNA, 19 nt, Artificial Sequence
  Description of Artificial Sequence: Synthetic oligonucleotide
acaugaggucaaauuucaa

SEQ ID NO: 2578821 - RNA, 19 nt, Artificial Sequence
  Description of Artificial Sequence: Synthetic oligonucleotide
cuccacgcuuugucauuug

SEQ ID NO: 2578822 - RNA, 19 nt, Artificial Sequence
  Description of Artificial Sequence: Synthetic oligonucleotide
guucaagggcagccugcuc

SEQ ID NO: 2578823 - RNA, 19 nt, Artificial Sequence
  Description of Artificial Sequence: Synthetic oligonucleotide
ccccuucugaaaugcugcc

SEQ ID NO: 2578824 - RNA, 19 nt, Artificial Sequence
  Description of Artificial Sequence: Synthetic oligonucleotide
ggaacggaagcuccgcccu

SEQ ID NO: 2578825 - RNA, 19 nt, Artificial Sequence
  Description of Artificial Sequence: Synthetic oligonucleotide
ccguggaacggaagcuccg

SEQ ID NO: 2578826 - RNA, 19 nt, Artificial Sequence
  Description of Artificial Sequence: Synthetic oligonucleotide
aggcugggacuugaugccu

SEQ ID NO: 2578827 - RNA, 19 nt, Artificial Sequence
  Description of Artificial Sequence: Synthetic oligonucleotide
aguaggcgcuuuggggccu

SEQ ID NO: 2578828 - RNA, 19 nt, Artificial Sequence
  Description of Artificial Sequence: Synthetic oligonucleotide
ccuuacugagaggaggaca

SEQ ID NO: 2578829 - RNA, 19 nt, Artificial Sequence
  Description of Artificial Sequence: Synthetic oligonucleotide
ccuguuacuuuccgguaga

SEQ ID NO: 2578830 - RNA, 19 nt, Artificial Sequence
  Description of Artificial Sequence: Synthetic oligonucleotide
cccuucugaaaugcugccc

SEQ ID NO: 2578831 - RNA, 19 nt, Artificial Sequence
  Description of Artificial Sequence: Synthetic oligonucleotide
ccacgcuuugucauuugca

SEQ ID NO: 2578832 - RNA, 19 nt, Artificial Sequence
  Description of Artificial Sequence: Synthetic oligonucleotide
cccugacaauuguguaugc

SEQ ID NO: 2578833 - RNA, 19 nt, Artificial Sequence
  Description of Artificial Sequence: Synthetic oligonucleotide
ccccaugcuccuucucucc

SEQ ID NO: 2578834 - RNA, 19 nt, Artificial Sequence
  Description of Artificial Sequence: Synthetic oligonucleotide
caucagacacaggguuauc

SEQ ID NO: 2578835 - RNA, 19 nt, Artificial Sequence
  Description of Artificial Sequence: Synthetic oligonucleotide
caauagugagacccuguuu

SEQ ID NO: 2578836 - RNA, 19 nt, Artificial Sequence
  Description of Artificial Sequence: Synthetic oligonucleotide
ccaucucucagccugcugu

SEQ ID NO: 2578837 - RNA, 19 nt, Artificial Sequence
  Description of Artificial Sequence: Synthetic oligonucleotide
gacccguggaacggaagcu

SEQ ID NO: 2578838 - RNA, 19 nt, Artificial Sequence
  Description of Artificial Sequence: Synthetic oligonucleotide
ccaugcuccuucucuccac

SEQ ID NO: 2578839 - RNA, 19 nt, Artificial Sequence
  Description of Artificial Sequence: Synthetic oligonucleotide
ugcccgucaugcccucgua

SEQ ID NO: 2578840 - RNA, 19 nt, Artificial Sequence
  Description of Artificial Sequence: Synthetic oligonucleotide
cugggacuugaugccugug

SEQ ID NO: 2578841 - RNA, 19 nt, Artificial Sequence
  Description of Artificial Sequence: Synthetic oligonucleotide
guuugcccgucaugcccuc

SEQ ID NO: 2578842 - RNA, 19 nt, Artificial Sequence
  Description of Artificial Sequence: Synthetic oligonucleotide
uuucagcuccuugccuguu

SEQ ID NO: 2578843 - RNA, 19 nt, Artificial Sequence
  Description of Artificial Sequence: Synthetic oligonucleotide
gcuacaauagugagacccu

SEQ ID NO: 2578844 - RNA, 19 nt, Artificial Sequence
  Description of Artificial Sequence: Synthetic oligonucleotide
ccgguagauugguuuccag

SEQ ID NO: 2578845 - RNA, 19 nt, Artificial Sequence
  Description of Artificial Sequence: Synthetic oligonucleotide
acacaccaggauggagaca

SEQ ID NO: 2578846 - RNA, 19 nt, Artificial Sequence
  Description of Artificial Sequence: Synthetic oligonucleotide
ggaucauucuauagcuacu

SEQ ID NO: 2578847 - RNA, 19 nt, Artificial Sequence
  Description of Artificial Sequence: Synthetic oligonucleotide
uaggcgcuuuggggccugg

SEQ ID NO: 2578848 - RNA, 19 nt, Artificial Sequence
  Description of Artificial Sequence: Synthetic oligonucleotide
cgcuuugucauuugcaggu

SEQ ID NO: 2578849 - RNA, 19 nt, Artificial Sequence
  Description of Artificial Sequence: Synthetic oligonucleotide
aggcgcuuuggggccuggg

SEQ ID NO: 2578850 - RNA, 19 nt, Artificial Sequence
  Description of Artificial Sequence: Synthetic oligonucleotide
ccuuccagaaguaggcgcu

SEQ ID NO: 2578851 - RNA, 19 nt, Artificial Sequence
  Description of Artificial Sequence: Synthetic oligonucleotide
ggcccugacaauuguguau

SEQ ID NO: 2578852 - RNA, 19 nt, Artificial Sequence
  Description of Artificial Sequence: Synthetic oligonucleotide
caguggcaaggggccaggc

SEQ ID NO: 2578853 - RNA, 19 nt, Artificial Sequence
  Description of Artificial Sequence: Synthetic oligonucleotide
gggcggaccagccccaucu

SEQ ID NO: 2578854 - RNA, 19 nt, Artificial Sequence
  Description of Artificial Sequence: Synthetic oligonucleotide
guacugguaaguggaggau

SEQ ID NO: 2578855 - RNA, 19 nt, Artificial Sequence
  Description of Artificial Sequence: Synthetic oligonucleotide
acuuuccgguagauugguu

SEQ ID NO: 2578856 - RNA, 19 nt, Artificial Sequence
  Description of Artificial Sequence: Synthetic oligonucleotide
guaggcgcuuuggggccug

SEQ ID NO: 2578857 - RNA, 19 nt, Artificial Sequence
  Description of Artificial Sequence: Synthetic oligonucleotide
cguggaacggaagcuccgc

SEQ ID NO: 2578858 - RNA, 19 nt, Artificial Sequence
  Description of Artificial Sequence: Synthetic oligonucleotide
ggguuaucaccuauagcau

SEQ ID NO: 2578859 - RNA, 19 nt, Artificial Sequence
  Description of Artificial Sequence: Synthetic oligonucleotide
cugugacccguggaacgga

SEQ ID NO: 2578860 - RNA, 19 nt, Artificial Sequence
  Description of Artificial Sequence: Synthetic oligonucleotide
gguuugcccgucaugcccu

SEQ ID NO: 2578861 - RNA, 19 nt, Artificial Sequence
  Description of Artificial Sequence: Synthetic oligonucleotide
gggcccugacaauugugua

SEQ ID NO: 2578862 - RNA, 19 nt, Artificial Sequence
  Description of Artificial Sequence: Synthetic oligonucleotide
cuacugaagcuguggucuu

SEQ ID NO: 2578863 - RNA, 19 nt, Artificial Sequence
  Description of Artificial Sequence: Synthetic oligonucleotide
cuauagcauagagcuuccu

SEQ ID NO: 2578864 - RNA, 19 nt, Artificial Sequence
  Description of Artificial Sequence: Synthetic oligonucleotide
gaacggaagcuccgcccuu

SEQ ID NO: 2578865 - RNA, 19 nt, Artificial Sequence
  Description of Artificial Sequence: Synthetic oligonucleotide
gccugggcccugacaauug

SEQ ID NO: 2578866 - RNA, 19 nt, Artificial Sequence
  Description of Artificial Sequence: Synthetic oligonucleotide
cgucaugcccucguauuuc

SEQ ID NO: 2578867 - RNA, 19 nt, Artificial Sequence
  Description of Artificial Sequence: Synthetic oligonucleotide
cagccccaugcuccuucuc

SEQ ID NO: 2578868 - RNA, 19 nt, Artificial Sequence
  Description of Artificial Sequence: Synthetic oligonucleotide
cucuccacgcuuugucauu

SEQ ID NO: 2578869 - RNA, 19 nt, Artificial Sequence
  Description of Artificial Sequence: Synthetic oligonucleotide
cagccugcugucugauuau

SEQ ID NO: 2578870 - RNA, 19 nt, Artificial Sequence
  Description of Artificial Sequence: Synthetic oligonucleotide
cugguaaguggaggaugcu

SEQ ID NO: 2578871 - RNA, 19 nt, Artificial Sequence
  Description of Artificial Sequence: Synthetic oligonucleotide
ggcggaccagccccaucuc

SEQ ID NO: 2578872 - RNA, 19 nt, Artificial Sequence
  Description of Artificial Sequence: Synthetic oligonucleotide
gguuggcaccauagacauc

SEQ ID NO: 2578873 - RNA, 19 nt, Artificial Sequence
  Description of Artificial Sequence: Synthetic oligonucleotide
cuccgcccuuccagaagua

SEQ ID NO: 2578874 - RNA, 19 nt, Artificial Sequence
  Description of Artificial Sequence: Synthetic oligonucleotide
gcggaccagccccaucucu

SEQ ID NO: 2578875 - RNA, 19 nt, Artificial Sequence
  Description of Artificial Sequence: Synthetic oligonucleotide
cuuccagaaguaggcgcuu

SEQ ID NO: 2578876 - RNA, 19 nt, Artificial Sequence
  Description of Artificial Sequence: Synthetic oligonucleotide
gccugcugucugauuaugu

SEQ ID NO: 2578877 - RNA, 19 nt, Artificial Sequence
  Description of Artificial Sequence: Synthetic oligonucleotide
ggggcggaccagccccauc

SEQ ID NO: 2578878 - RNA, 19 nt, Artificial Sequence
  Description of Artificial Sequence: Synthetic oligonucleotide
cccgucaugcccucguauu

SEQ ID NO: 2578879 - RNA, 19 nt, Artificial Sequence
  Description of Artificial Sequence: Synthetic oligonucleotide
gcccgucaugcccucguau

SEQ ID NO: 2578880 - RNA, 19 nt, Artificial Sequence
  Description of Artificial Sequence: Synthetic oligonucleotide
ccugggcccugacaauugu

SEQ ID NO: 2578881 - RNA, 19 nt, Artificial Sequence
  Description of Artificial Sequence: Synthetic oligonucleotide
ccgucaugcccucguauuu

SEQ ID NO: 2578882 - RNA, 19 nt, Artificial Sequence
  Description of Artificial Sequence: Synthetic oligonucleotide
gcuuuggggccugggcccu

SEQ ID NO: 2578883 - RNA, 19 nt, Artificial Sequence
  Description of Artificial Sequence: Synthetic oligonucleotide
ccaccagccccaugcuccu

SEQ ID NO: 2578884 - RNA, 19 nt, Artificial Sequence
  Description of Artificial Sequence: Synthetic oligonucleotide
cccucguauuucagcuccu

SEQ ID NO: 2578885 - RNA, 19 nt, Artificial Sequence
  Description of Artificial Sequence: Synthetic oligonucleotide
ccucagcguacugguaagu

SEQ ID NO: 2578886 - RNA, 19 nt, Artificial Sequence
  Description of Artificial Sequence: Synthetic oligonucleotide
cggaagcuccgcccuucca

SEQ ID NO: 2578887 - RNA, 19 nt, Artificial Sequence
  Description of Artificial Sequence: Synthetic oligonucleotide
aagagugucagccaaacac

SEQ ID NO: 2578888 - RNA, 19 nt, Artificial Sequence
  Description of Artificial Sequence: Synthetic oligonucleotide
uuuaucuacacauuaacag

SEQ ID NO: 2578889 - RNA, 19 nt, Artificial Sequence
  Description of Artificial Sequence: Synthetic oligonucleotide
acauuaaaauaccaaaggc

SEQ ID NO: 2578890 - RNA, 19 nt, Artificial Sequence
  Description of Artificial Sequence: Synthetic oligonucleotide
aauugagagauacugaaga

SEQ ID NO: 2578891 - RNA, 19 nt, Artificial Sequence
  Description of Artificial Sequence: Synthetic oligonucleotide
uuuacacugauuaaugugc

SEQ ID NO: 2578892 - RNA, 19 nt, Artificial Sequence
  Description of Artificial Sequence: Synthetic oligonucleotide
auuaaaauaccaaaggcac

SEQ ID NO: 2578893 - RNA, 19 nt, Artificial Sequence
  Description of Artificial Sequence: Synthetic oligonucleotide
cacauuaacagccacaggg

SEQ ID NO: 2578894 - RNA, 19 nt, Artificial Sequence
  Description of Artificial Sequence: Synthetic oligonucleotide
auuauuauuugucauuguc

SEQ ID NO: 2578895 - RNA, 19 nt, Artificial Sequence
  Description of Artificial Sequence: Synthetic oligonucleotide
uaacauuucaugauuaccu

SEQ ID NO: 2578896 - RNA, 19 nt, Artificial Sequence
  Description of Artificial Sequence: Synthetic oligonucleotide
ucuacuuagggcuuuaucu

SEQ ID NO: 2578897 - RNA, 19 nt, Artificial Sequence
  Description of Artificial Sequence: Synthetic oligonucleotide
uaucuacacauuaacagcc

SEQ ID NO: 2578898 - RNA, 19 nt, Artificial Sequence
  Description of Artificial Sequence: Synthetic oligonucleotide
uucaugauuaccuuuaaaa

SEQ ID NO: 2578899 - RNA, 19 nt, Artificial Sequence
  Description of Artificial Sequence: Synthetic oligonucleotide
uuaucuacacauuaacagc

SEQ ID NO: 2578900 - RNA, 19 nt, Artificial Sequence
  Description of Artificial Sequence: Synthetic oligonucleotide
caugauuaccuuuaaaaug

SEQ ID NO: 2578901 - RNA, 19 nt, Artificial Sequence
  Description of Artificial Sequence: Synthetic oligonucleotide
cauaaauugagagauacug

SEQ ID NO: 2578902 - RNA, 19 nt, Artificial Sequence
  Description of Artificial Sequence: Synthetic oligonucleotide
aaaauuuacacugauuaau

SEQ ID NO: 2578903 - RNA, 19 nt, Artificial Sequence
  Description of Artificial Sequence: Synthetic oligonucleotide
uaaauagucuugcaucuag

SEQ ID NO: 2578904 - RNA, 19 nt, Artificial Sequence
  Description of Artificial Sequence: Synthetic oligonucleotide
agucacuuuaaacuguaac

SEQ ID NO: 2578905 - RNA, 19 nt, Artificial Sequence
  Description of Artificial Sequence: Synthetic oligonucleotide
cuaccauugagccaaaccc

SEQ ID NO: 2578906 - RNA, 19 nt, Artificial Sequence
  Description of Artificial Sequence: Synthetic oligonucleotide
aguaaucaggccugggugc

SEQ ID NO: 2578907 - RNA, 19 nt, Artificial Sequence
  Description of Artificial Sequence: Synthetic oligonucleotide
uaaauugagagauacugaa

SEQ ID NO: 2578908 - RNA, 19 nt, Artificial Sequence
  Description of Artificial Sequence: Synthetic oligonucleotide
ugagagauacugaagaaaa

SEQ ID NO: 2578909 - RNA, 19 nt, Artificial Sequence
  Description of Artificial Sequence: Synthetic oligonucleotide
uaauuauuauuugucauug

SEQ ID NO: 2578910 - RNA, 19 nt, Artificial Sequence
  Description of Artificial Sequence: Synthetic oligonucleotide
agcauaaauugagagauac

SEQ ID NO: 2578911 - RNA, 19 nt, Artificial Sequence
  Description of Artificial Sequence: Synthetic oligonucleotide
aauuuacacugauuaaugu

SEQ ID NO: 2578912 - RNA, 19 nt, Artificial Sequence
  Description of Artificial Sequence: Synthetic oligonucleotide
uuacaugauaaauaaaaua

SEQ ID NO: 2578913 - RNA, 19 nt, Artificial Sequence
  Description of Artificial Sequence: Synthetic oligonucleotide
cauuaaaauaccaaaggca

SEQ ID NO: 2578914 - RNA, 19 nt, Artificial Sequence
  Description of Artificial Sequence: Synthetic oligonucleotide
aacacuuggcauuagcccu

SEQ ID NO: 2578915 - RNA, 19 nt, Artificial Sequence
  Description of Artificial Sequence: Synthetic oligonucleotide
aguaacauuucaugauuac

SEQ ID NO: 2578916 - RNA, 19 nt, Artificial Sequence
  Description of Artificial Sequence: Synthetic oligonucleotide
aaauuuacacugauuaaug

SEQ ID NO: 2578917 - RNA, 19 nt, Artificial Sequence
  Description of Artificial Sequence: Synthetic oligonucleotide
uuaacagccacagggaaag

SEQ ID NO: 2578918 - RNA, 19 nt, Artificial Sequence
  Description of Artificial Sequence: Synthetic oligonucleotide
auuaauuauuauuugucau

SEQ ID NO: 2578919 - RNA, 19 nt, Artificial Sequence
  Description of Artificial Sequence: Synthetic oligonucleotide
aauugacugggcaucacac

SEQ ID NO: 2578920 - RNA, 19 nt, Artificial Sequence
  Description of Artificial Sequence: Synthetic oligonucleotide
ugauuaaugugcaagucau

SEQ ID NO: 2578921 - RNA, 19 nt, Artificial Sequence
  Description of Artificial Sequence: Synthetic oligonucleotide
uagucuugcaucuaguaac

SEQ ID NO: 2578922 - RNA, 19 nt, Artificial Sequence
  Description of Artificial Sequence: Synthetic oligonucleotide
ucuaccauugagccaaacc

SEQ ID NO: 2578923 - RNA, 19 nt, Artificial Sequence
  Description of Artificial Sequence: Synthetic oligonucleotide
uacacauuaacagccacag

SEQ ID NO: 2578924 - RNA, 19 nt, Artificial Sequence
  Description of Artificial Sequence: Synthetic oligonucleotide
uaaucaaggauguucucug

SEQ ID NO: 2578925 - RNA, 19 nt, Artificial Sequence
  Description of Artificial Sequence: Synthetic oligonucleotide
uuaauuauuauuugucauu

SEQ ID NO: 2578926 - RNA, 19 nt, Artificial Sequence
  Description of Artificial Sequence: Synthetic oligonucleotide
agucauuuuaaucaaggau

SEQ ID NO: 2578927 - RNA, 19 nt, Artificial Sequence
  Description of Artificial Sequence: Synthetic oligonucleotide
aggaugaagacaauggcac

SEQ ID NO: 2578928 - RNA, 19 nt, Artificial Sequence
  Description of Artificial Sequence: Synthetic oligonucleotide
ucuaguaacauuucaugau

SEQ ID NO: 2578929 - RNA, 19 nt, Artificial Sequence
  Description of Artificial Sequence: Synthetic oligonucleotide
cacagcucauuuuaaauag

SEQ ID NO: 2578930 - RNA, 19 nt, Artificial Sequence
  Description of Artificial Sequence: Synthetic oligonucleotide
ucaugauuaccuuuaaaau

SEQ ID NO: 2578931 - RNA, 19 nt, Artificial Sequence
  Description of Artificial Sequence: Synthetic oligonucleotide
uccccuuuggcaaacagga

SEQ ID NO: 2578932 - RNA, 19 nt, Artificial Sequence
  Description of Artificial Sequence: Synthetic oligonucleotide
agaagcauaaauugagaga

SEQ ID NO: 2578933 - RNA, 19 nt, Artificial Sequence
  Description of Artificial Sequence: Synthetic oligonucleotide
augauuaccuuuaaaaugu

SEQ ID NO: 2578934 - RNA, 19 nt, Artificial Sequence
  Description of Artificial Sequence: Synthetic oligonucleotide
uuaaaauaccaaaggcacu

SEQ ID NO: 2578935 - RNA, 19 nt, Artificial Sequence
  Description of Artificial Sequence: Synthetic oligonucleotide
cagaagcauaaauugagag

SEQ ID NO: 2578936 - RNA, 19 nt, Artificial Sequence
  Description of Artificial Sequence: Synthetic oligonucleotide
uuuaaacuguaaccagaag

SEQ ID NO: 2578937 - RNA, 19 nt, Artificial Sequence
  Description of Artificial Sequence: Synthetic oligonucleotide
ugcuuuguaggccaccugc

SEQ ID NO: 2578938 - RNA, 19 nt, Artificial Sequence
  Description of Artificial Sequence: Synthetic oligonucleotide
gugcaagucauuuuaauca

SEQ ID NO: 2578939 - RNA, 19 nt, Artificial Sequence
  Description of Artificial Sequence: Synthetic oligonucleotide
agacaguagcuguggaucc

SEQ ID NO: 2578940 - RNA, 19 nt, Artificial Sequence
  Description of Artificial Sequence: Synthetic oligonucleotide
auuaccuuuaaaauguacu

SEQ ID NO: 2578941 - RNA, 19 nt, Artificial Sequence
  Description of Artificial Sequence: Synthetic oligonucleotide
caucuaguaacauuucaug

SEQ ID NO: 2578942 - RNA, 19 nt, Artificial Sequence
  Description of Artificial Sequence: Synthetic oligonucleotide
uguaaccagaagcauaaau

SEQ ID NO: 2578943 - RNA, 19 nt, Artificial Sequence
  Description of Artificial Sequence: Synthetic oligonucleotide
uucccauguagcuagaaaa

SEQ ID NO: 2578944 - RNA, 19 nt, Artificial Sequence
  Description of Artificial Sequence: Synthetic oligonucleotide
uuaaucaaggauguucucu

SEQ ID NO: 2578945 - RNA, 19 nt, Artificial Sequence
  Description of Artificial Sequence: Synthetic oligonucleotide
uuggcauuagcccugcacu

SEQ ID NO: 2578946 - RNA, 19 nt, Artificial Sequence
  Description of Artificial Sequence: Synthetic oligonucleotide
auguuuacacauuaaaaua

SEQ ID NO: 2578947 - RNA, 19 nt, Artificial Sequence
  Description of Artificial Sequence: Synthetic oligonucleotide
auuauuugucauugucuuc

SEQ ID NO: 2578948 - RNA, 19 nt, Artificial Sequence
  Description of Artificial Sequence: Synthetic oligonucleotide
uuuguaggccaccugccag

SEQ ID NO: 2578949 - RNA, 19 nt, Artificial Sequence
  Description of Artificial Sequence: Synthetic oligonucleotide
gugucagccaaacacuugg

SEQ ID NO: 2578950 - RNA, 19 nt, Artificial Sequence
  Description of Artificial Sequence: Synthetic oligonucleotide
auaccaaaggcacuuucag

SEQ ID NO: 2578951 - RNA, 19 nt, Artificial Sequence
  Description of Artificial Sequence: Synthetic oligonucleotide
aauagucuugcaucuagua

SEQ ID NO: 2578952 - RNA, 19 nt, Artificial Sequence
  Description of Artificial Sequence: Synthetic oligonucleotide
acugcugggcacuccagcc

SEQ ID NO: 2578953 - RNA, 19 nt, Artificial Sequence
  Description of Artificial Sequence: Synthetic oligonucleotide
uagggcuuuaucuacacau

SEQ ID NO: 2578954 - RNA, 19 nt, Artificial Sequence
  Description of Artificial Sequence: Synthetic oligonucleotide
uaccauugagccaaacccc

SEQ ID NO: 2578955 - RNA, 19 nt, Artificial Sequence
  Description of Artificial Sequence: Synthetic oligonucleotide
acacauuaaaauaccaaag

SEQ ID NO: 2578956 - RNA, 19 nt, Artificial Sequence
  Description of Artificial Sequence: Synthetic oligonucleotide
aaauugagagauacugaag

SEQ ID NO: 2578957 - RNA, 19 nt, Artificial Sequence
  Description of Artificial Sequence: Synthetic oligonucleotide
uaaaauaccaaaggcacuu

SEQ ID NO: 2578958 - RNA, 19 nt, Artificial Sequence
  Description of Artificial Sequence: Synthetic oligonucleotide
ugcucuggucuacuuaggg

SEQ ID NO: 2578959 - RNA, 19 nt, Artificial Sequence
  Description of Artificial Sequence: Synthetic oligonucleotide
uucaguuuacaugauaaau

SEQ ID NO: 2578960 - RNA, 19 nt, Artificial Sequence
  Description of Artificial Sequence: Synthetic oligonucleotide
ugcaucuaguaacauuuca

SEQ ID NO: 2578961 - RNA, 19 nt, Artificial Sequence
  Description of Artificial Sequence: Synthetic oligonucleotide
cugggcaucacacuuuugc

SEQ ID NO: 2578962 - RNA, 19 nt, Artificial Sequence
  Description of Artificial Sequence: Synthetic oligonucleotide
ucugauaacugcugggcac

SEQ ID NO: 2578963 - RNA, 19 nt, Artificial Sequence
  Description of Artificial Sequence: Synthetic oligonucleotide
uuacacugauuaaugugca

SEQ ID NO: 2578964 - RNA, 19 nt, Artificial Sequence
  Description of Artificial Sequence: Synthetic oligonucleotide
gaagcauaaauugagagau

SEQ ID NO: 2578965 - RNA, 19 nt, Artificial Sequence
  Description of Artificial Sequence: Synthetic oligonucleotide
uuagcccugcacuuggaag

SEQ ID NO: 2578966 - RNA, 19 nt, Artificial Sequence
  Description of Artificial Sequence: Synthetic oligonucleotide
auagaauguuuacacauua

SEQ ID NO: 2578967 - RNA, 19 nt, Artificial Sequence
  Description of Artificial Sequence: Synthetic oligonucleotide
agcccaauucugcaccucc

SEQ ID NO: 2578968 - RNA, 19 nt, Artificial Sequence
  Description of Artificial Sequence: Synthetic oligonucleotide
aacauuucaugauuaccuu

SEQ ID NO: 2578969 - RNA, 19 nt, Artificial Sequence
  Description of Artificial Sequence: Synthetic oligonucleotide
ucacugagagcccaauucu

SEQ ID NO: 2578970 - RNA, 19 nt, Artificial Sequence
  Description of Artificial Sequence: Synthetic oligonucleotide
cuuuaucuacacauuaaca

SEQ ID NO: 2578971 - RNA, 19 nt, Artificial Sequence
  Description of Artificial Sequence: Synthetic oligonucleotide
ggcacuuucaguuuacaug

SEQ ID NO: 2578972 - RNA, 19 nt, Artificial Sequence
  Description of Artificial Sequence: Synthetic oligonucleotide
acacugauuaaugugcaag

SEQ ID NO: 2578973 - RNA, 19 nt, Artificial Sequence
  Description of Artificial Sequence: Synthetic oligonucleotide
cagggaaagagugucagcc

SEQ ID NO: 2578974 - RNA, 19 nt, Artificial Sequence
  Description of Artificial Sequence: Synthetic oligonucleotide
accagaagcauaaauugag

SEQ ID NO: 2578975 - RNA, 19 nt, Artificial Sequence
  Description of Artificial Sequence: Synthetic oligonucleotide
cacuuuaaacuguaaccag

SEQ ID NO: 2578976 - RNA, 19 nt, Artificial Sequence
  Description of Artificial Sequence: Synthetic oligonucleotide
auuaaugugcaagucauuu

SEQ ID NO: 2578977 - RNA, 19 nt, Artificial Sequence
  Description of Artificial Sequence: Synthetic oligonucleotide
acuuuugcuuuguaggcca

SEQ ID NO: 2578978 - RNA, 19 nt, Artificial Sequence
  Description of Artificial Sequence: Synthetic oligonucleotide
guagcuguggaucccacug

SEQ ID NO: 2578979 - RNA, 19 nt, Artificial Sequence
  Description of Artificial Sequence: Synthetic oligonucleotide
aaucaggccugggugcugc

SEQ ID NO: 2578980 - RNA, 19 nt, Artificial Sequence
  Description of Artificial Sequence: Synthetic oligonucleotide
acugauuaaugugcaaguc

SEQ ID NO: 2578981 - RNA, 19 nt, Artificial Sequence
  Description of Artificial Sequence: Synthetic oligonucleotide
ucuacacauuaacagccac

SEQ ID NO: 2578982 - RNA, 19 nt, Artificial Sequence
  Description of Artificial Sequence: Synthetic oligonucleotide
ucugcaauugacugggcau

SEQ ID NO: 2578983 - RNA, 19 nt, Artificial Sequence
  Description of Artificial Sequence: Synthetic oligonucleotide
ucucacauagaauguuuac

SEQ ID NO: 2578984 - RNA, 19 nt, Artificial Sequence
  Description of Artificial Sequence: Synthetic oligonucleotide
ugucaagacaguagcugug

SEQ ID NO: 2578985 - RNA, 19 nt, Artificial Sequence
  Description of Artificial Sequence: Synthetic oligonucleotide
ucagccaaacacuuggcau

SEQ ID NO: 2578986 - RNA, 19 nt, Artificial Sequence
  Description of Artificial Sequence: Synthetic oligonucleotide
auagucuugcaucuaguaa

SEQ ID NO: 2578987 - RNA, 19 nt, Artificial Sequence
  Description of Artificial Sequence: Synthetic oligonucleotide
ucuggcacagaucccucag

SEQ ID NO: 2578988 - RNA, 19 nt, Artificial Sequence
  Description of Artificial Sequence: Synthetic oligonucleotide
ugcaagucauuuuaaucaa

SEQ ID NO: 2578989 - RNA, 19 nt, Artificial Sequence
  Description of Artificial Sequence: Synthetic oligonucleotide
gaugaagacaauggcacca

SEQ ID NO: 2578990 - RNA, 19 nt, Artificial Sequence
  Description of Artificial Sequence: Synthetic oligonucleotide
aggaauuccuggcagcugu

SEQ ID NO: 2578991 - RNA, 19 nt, Artificial Sequence
  Description of Artificial Sequence: Synthetic oligonucleotide
gagagcccaauucugcacc

SEQ ID NO: 2578992 - RNA, 19 nt, Artificial Sequence
  Description of Artificial Sequence: Synthetic oligonucleotide
auaaauugagagauacuga

SEQ ID NO: 2578993 - RNA, 19 nt, Artificial Sequence
  Description of Artificial Sequence: Synthetic oligonucleotide
uugagagauacugaagaaa

SEQ ID NO: 2578994 - RNA, 19 nt, Artificial Sequence
  Description of Artificial Sequence: Synthetic oligonucleotide
uacuuagggcuuuaucuac

SEQ ID NO: 2578995 - RNA, 19 nt, Artificial Sequence
  Description of Artificial Sequence: Synthetic oligonucleotide
auugagagauacugaagaa

SEQ ID NO: 2578996 - RNA, 19 nt, Artificial Sequence
  Description of Artificial Sequence: Synthetic oligonucleotide
uugacugggcaucacacuu

SEQ ID NO: 2578997 - RNA, 19 nt, Artificial Sequence
  Description of Artificial Sequence: Synthetic oligonucleotide
uuucucacauagaauguuu

SEQ ID NO: 2578998 - RNA, 19 nt, Artificial Sequence
  Description of Artificial Sequence: Synthetic oligonucleotide
cugauuaaugugcaaguca

SEQ ID NO: 2578999 - RNA, 19 nt, Artificial Sequence
  Description of Artificial Sequence: Synthetic oligonucleotide
accucugauaacugcuggg

SEQ ID NO: 2579000 - RNA, 19 nt, Artificial Sequence
  Description of Artificial Sequence: Synthetic oligonucleotide
cuuuaaacuguaaccagaa

SEQ ID NO: 2579001 - RNA, 19 nt, Artificial Sequence
  Description of Artificial Sequence: Synthetic oligonucleotide
ucaaggauguucucugcaa

SEQ ID NO: 2579002 - RNA, 19 nt, Artificial Sequence
  Description of Artificial Sequence: Synthetic oligonucleotide
cagcucauuuuaaauaguc

SEQ ID NO: 2579003 - RNA, 19 nt, Artificial Sequence
  Description of Artificial Sequence: Synthetic oligonucleotide
gcacuuucaguuuacauga

SEQ ID NO: 2579004 - RNA, 19 nt, Artificial Sequence
  Description of Artificial Sequence: Synthetic oligonucleotide
aaggauguucucugcaauu

SEQ ID NO: 2579005 - RNA, 19 nt, Artificial Sequence
  Description of Artificial Sequence: Synthetic oligonucleotide
acuuuaaacuguaaccaga

SEQ ID NO: 2579006 - RNA, 19 nt, Artificial Sequence
  Description of Artificial Sequence: Synthetic oligonucleotide
gauuaccuuuaaaauguac

SEQ ID NO: 2579007 - RNA, 19 nt, Artificial Sequence
  Description of Artificial Sequence: Synthetic oligonucleotide
uucucacauagaauguuua

SEQ ID NO: 2579008 - RNA, 19 nt, Artificial Sequence
  Description of Artificial Sequence: Synthetic oligonucleotide
gaaagagugucagccaaac

SEQ ID NO: 2579009 - RNA, 19 nt, Artificial Sequence
  Description of Artificial Sequence: Synthetic oligonucleotide
cuuggcauuagcccugcac

SEQ ID NO: 2579010 - RNA, 19 nt, Artificial Sequence
  Description of Artificial Sequence: Synthetic oligonucleotide
uuaaugugcaagucauuuu

SEQ ID NO: 2579011 - RNA, 19 nt, Artificial Sequence
  Description of Artificial Sequence: Synthetic oligonucleotide
uggcaaacaggaugaagac

SEQ ID NO: 2579012 - RNA, 19 nt, Artificial Sequence
  Description of Artificial Sequence: Synthetic oligonucleotide
cuagguaagugcucuacca

SEQ ID NO: 2579013 - RNA, 19 nt, Artificial Sequence
  Description of Artificial Sequence: Synthetic oligonucleotide
uuuaaucaaggauguucuc

SEQ ID NO: 2579014 - RNA, 19 nt, Artificial Sequence
  Description of Artificial Sequence: Synthetic oligonucleotide
ugcaccuccccuuuggcaa

SEQ ID NO: 2579015 - RNA, 19 nt, Artificial Sequence
  Description of Artificial Sequence: Synthetic oligonucleotide
gauguucucugcaauugac

SEQ ID NO: 2579016 - RNA, 19 nt, Artificial Sequence
  Description of Artificial Sequence: Synthetic oligonucleotide
uuugcuuuguaggccaccu

SEQ ID NO: 2579017 - RNA, 19 nt, Artificial Sequence
  Description of Artificial Sequence: Synthetic oligonucleotide
ucuugcaucuaguaacauu

SEQ ID NO: 2579018 - RNA, 19 nt, Artificial Sequence
  Description of Artificial Sequence: Synthetic oligonucleotide
acuguaaccagaagcauaa

SEQ ID NO: 2579019 - RNA, 19 nt, Artificial Sequence
  Description of Artificial Sequence: Synthetic oligonucleotide
gucaagacaguagcugugg

SEQ ID NO: 2579020 - RNA, 19 nt, Artificial Sequence
  Description of Artificial Sequence: Synthetic oligonucleotide
cuccccuuuggcaaacagg

SEQ ID NO: 2579021 - RNA, 19 nt, Artificial Sequence
  Description of Artificial Sequence: Synthetic oligonucleotide
cuugcaucuaguaacauuu

SEQ ID NO: 2579022 - RNA, 19 nt, Artificial Sequence
  Description of Artificial Sequence: Synthetic oligonucleotide
cuuagggcuuuaucuacac

SEQ ID NO: 2579023 - RNA, 19 nt, Artificial Sequence
  Description of Artificial Sequence: Synthetic oligonucleotide
gcagugucaagacaguagc

SEQ ID NO: 2579024 - RNA, 19 nt, Artificial Sequence
  Description of Artificial Sequence: Synthetic oligonucleotide
gcuuuaucuacacauuaac

SEQ ID NO: 2579025 - RNA, 19 nt, Artificial Sequence
  Description of Artificial Sequence: Synthetic oligonucleotide
uaccuuuaaaauguacuau

SEQ ID NO: 2579026 - RNA, 19 nt, Artificial Sequence
  Description of Artificial Sequence: Synthetic oligonucleotide
ucaagacaguagcugugga

SEQ ID NO: 2579027 - RNA, 19 nt, Artificial Sequence
  Description of Artificial Sequence: Synthetic oligonucleotide
uagguaagugcucuaccau

SEQ ID NO: 2579028 - RNA, 19 nt, Artificial Sequence
  Description of Artificial Sequence: Synthetic oligonucleotide
aaauagucuugcaucuagu

SEQ ID NO: 2579029 - RNA, 19 nt, Artificial Sequence
  Description of Artificial Sequence: Synthetic oligonucleotide
auugacugggcaucacacu

SEQ ID NO: 2579030 - RNA, 19 nt, Artificial Sequence
  Description of Artificial Sequence: Synthetic oligonucleotide
uaccaaaggcacuuucagu

SEQ ID NO: 2579031 - RNA, 19 nt, Artificial Sequence
  Description of Artificial Sequence: Synthetic oligonucleotide
uuuucucacauagaauguu

SEQ ID NO: 2579032 - RNA, 19 nt, Artificial Sequence
  Description of Artificial Sequence: Synthetic oligonucleotide
acacauuaacagccacagg

SEQ ID NO: 2579033 - RNA, 19 nt, Artificial Sequence
  Description of Artificial Sequence: Synthetic oligonucleotide
ugggcaucacacuuuugcu

SEQ ID NO: 2579034 - RNA, 19 nt, Artificial Sequence
  Description of Artificial Sequence: Synthetic oligonucleotide
uuagggcuuuaucuacaca

SEQ ID NO: 2579035 - RNA, 19 nt, Artificial Sequence
  Description of Artificial Sequence: Synthetic oligonucleotide
gaucccacugcucuggucu

SEQ ID NO: 2579036 - RNA, 19 nt, Artificial Sequence
  Description of Artificial Sequence: Synthetic oligonucleotide
ugagagcccaauucugcac

SEQ ID NO: 2579037 - RNA, 19 nt, Artificial Sequence
  Description of Artificial Sequence: Synthetic oligonucleotide
aggauguucucugcaauug

SEQ ID NO: 2579038 - RNA, 19 nt, Artificial Sequence
  Description of Artificial Sequence: Synthetic oligonucleotide
aacuguaaccagaagcaua

SEQ ID NO: 2579039 - RNA, 19 nt, Artificial Sequence
  Description of Artificial Sequence: Synthetic oligonucleotide
uggcacagaucccucaguc

SEQ ID NO: 2579040 - RNA, 19 nt, Artificial Sequence
  Description of Artificial Sequence: Synthetic oligonucleotide
aaacuguaaccagaagcau

SEQ ID NO: 2579041 - RNA, 19 nt, Artificial Sequence
  Description of Artificial Sequence: Synthetic oligonucleotide
cucacauagaauguuuaca

SEQ ID NO: 2579042 - RNA, 19 nt, Artificial Sequence
  Description of Artificial Sequence: Synthetic oligonucleotide
gcuggcagugucaagacag

SEQ ID NO: 2579043 - RNA, 19 nt, Artificial Sequence
  Description of Artificial Sequence: Synthetic oligonucleotide
auucccauguagcuagaaa

SEQ ID NO: 2579044 - RNA, 19 nt, Artificial Sequence
  Description of Artificial Sequence: Synthetic oligonucleotide
aaugugcaagucauuuuaa

SEQ ID NO: 2579045 - RNA, 19 nt, Artificial Sequence
  Description of Artificial Sequence: Synthetic oligonucleotide
acauuaacagccacaggga

SEQ ID NO: 2579046 - RNA, 19 nt, Artificial Sequence
  Description of Artificial Sequence: Synthetic oligonucleotide
agaucccucaguccagcug

SEQ ID NO: 2579047 - RNA, 19 nt, Artificial Sequence
  Description of Artificial Sequence: Synthetic oligonucleotide
uagcuguggaucccacugc

SEQ ID NO: 2579048 - RNA, 19 nt, Artificial Sequence
  Description of Artificial Sequence: Synthetic oligonucleotide
cacauagaauguuuacaca

SEQ ID NO: 2579049 - RNA, 19 nt, Artificial Sequence
  Description of Artificial Sequence: Synthetic oligonucleotide
uguggaucccacugcucug

SEQ ID NO: 2579050 - RNA, 19 nt, Artificial Sequence
  Description of Artificial Sequence: Synthetic oligonucleotide
augugcaagucauuuuaau

SEQ ID NO: 2579051 - RNA, 19 nt, Artificial Sequence
  Description of Artificial Sequence: Synthetic oligonucleotide
cacagggaaagagugucag

SEQ ID NO: 2579052 - RNA, 19 nt, Artificial Sequence
  Description of Artificial Sequence: Synthetic oligonucleotide
ugauuaccuuuaaaaugua

SEQ ID NO: 2579053 - RNA, 19 nt, Artificial Sequence
  Description of Artificial Sequence: Synthetic oligonucleotide
aggcuggcagugucaagac

SEQ ID NO: 2579054 - RNA, 19 nt, Artificial Sequence
  Description of Artificial Sequence: Synthetic oligonucleotide
cugccaguaaucaggccug

SEQ ID NO: 2579055 - RNA, 19 nt, Artificial Sequence
  Description of Artificial Sequence: Synthetic oligonucleotide
agcucauuuuaaauagucu

SEQ ID NO: 2579056 - RNA, 19 nt, Artificial Sequence
  Description of Artificial Sequence: Synthetic oligonucleotide
uccgugguggucacugaga

SEQ ID NO: 2579057 - RNA, 19 nt, Artificial Sequence
  Description of Artificial Sequence: Synthetic oligonucleotide
cacugagagcccaauucug

SEQ ID NO: 2579058 - RNA, 19 nt, Artificial Sequence
  Description of Artificial Sequence: Synthetic oligonucleotide
agguaagugcucuaccauu

SEQ ID NO: 2579059 - RNA, 19 nt, Artificial Sequence
  Description of Artificial Sequence: Synthetic oligonucleotide
gguaagugcucuaccauug

SEQ ID NO: 2579060 - RNA, 19 nt, Artificial Sequence
  Description of Artificial Sequence: Synthetic oligonucleotide
gggaaggaauuccuggcag

SEQ ID NO: 2579061 - RNA, 19 nt, Artificial Sequence
  Description of Artificial Sequence: Synthetic oligonucleotide
uacacugauuaaugugcaa

SEQ ID NO: 2579062 - RNA, 19 nt, Artificial Sequence
  Description of Artificial Sequence: Synthetic oligonucleotide
agggaaagagugucagcca

SEQ ID NO: 2579063 - RNA, 19 nt, Artificial Sequence
  Description of Artificial Sequence: Synthetic oligonucleotide
cucuggucuacuuagggcu

SEQ ID NO: 2579064 - RNA, 19 nt, Artificial Sequence
  Description of Artificial Sequence: Synthetic oligonucleotide
aguuucuguguccguggug

SEQ ID NO: 2579065 - RNA, 19 nt, Artificial Sequence
  Description of Artificial Sequence: Synthetic oligonucleotide
cuacuuagggcuuuaucua

SEQ ID NO: 2579066 - RNA, 19 nt, Artificial Sequence
  Description of Artificial Sequence: Synthetic oligonucleotide
ugcaauugacugggcauca

SEQ ID NO: 2579067 - RNA, 19 nt, Artificial Sequence
  Description of Artificial Sequence: Synthetic oligonucleotide
gaagccagggaaggaauuc

SEQ ID NO: 2579068 - RNA, 19 nt, Artificial Sequence
  Description of Artificial Sequence: Synthetic oligonucleotide
uugcaucuaguaacauuuc

SEQ ID NO: 2579069 - RNA, 19 nt, Artificial Sequence
  Description of Artificial Sequence: Synthetic oligonucleotide
guaaccagaagcauaaauu

SEQ ID NO: 2579070 - RNA, 19 nt, Artificial Sequence
  Description of Artificial Sequence: Synthetic oligonucleotide
caccugccaguaaucaggc

SEQ ID NO: 2579071 - RNA, 19 nt, Artificial Sequence
  Description of Artificial Sequence: Synthetic oligonucleotide
gcauuagcccugcacuugg

SEQ ID NO: 2579072 - RNA, 19 nt, Artificial Sequence
  Description of Artificial Sequence: Synthetic oligonucleotide
ugaagccagggaaggaauu

SEQ ID NO: 2579073 - RNA, 19 nt, Artificial Sequence
  Description of Artificial Sequence: Synthetic oligonucleotide
ggaaggaauuccuggcagc

SEQ ID NO: 2579074 - RNA, 19 nt, Artificial Sequence
  Description of Artificial Sequence: Synthetic oligonucleotide
auuaacagccacagggaaa

SEQ ID NO: 2579075 - RNA, 19 nt, Artificial Sequence
  Description of Artificial Sequence: Synthetic oligonucleotide
auuagcccugcacuuggaa

SEQ ID NO: 2579076 - RNA, 19 nt, Artificial Sequence
  Description of Artificial Sequence: Synthetic oligonucleotide
agcccugcacuuggaagcc

SEQ ID NO: 2579077 - RNA, 19 nt, Artificial Sequence
  Description of Artificial Sequence: Synthetic oligonucleotide
gaaagucacuuuaaacugu

SEQ ID NO: 2579078 - RNA, 19 nt, Artificial Sequence
  Description of Artificial Sequence: Synthetic oligonucleotide
gucuacuuagggcuuuauc

SEQ ID NO: 2579079 - RNA, 19 nt, Artificial Sequence
  Description of Artificial Sequence: Synthetic oligonucleotide
gauaacugcugggcacucc

SEQ ID NO: 2579080 - RNA, 19 nt, Artificial Sequence
  Description of Artificial Sequence: Synthetic oligonucleotide
agucuugcaucuaguaaca

SEQ ID NO: 2579081 - RNA, 19 nt, Artificial Sequence
  Description of Artificial Sequence: Synthetic oligonucleotide
uugcuuuguaggccaccug

SEQ ID NO: 2579082 - RNA, 19 nt, Artificial Sequence
  Description of Artificial Sequence: Synthetic oligonucleotide
cauuaacagccacagggaa

SEQ ID NO: 2579083 - RNA, 19 nt, Artificial Sequence
  Description of Artificial Sequence: Synthetic oligonucleotide
cccuuuggcaaacaggaug

SEQ ID NO: 2579084 - RNA, 19 nt, Artificial Sequence
  Description of Artificial Sequence: Synthetic oligonucleotide
ggcagugucaagacaguag

SEQ ID NO: 2579085 - RNA, 19 nt, Artificial Sequence
  Description of Artificial Sequence: Synthetic oligonucleotide
guggaucccacugcucugg

SEQ ID NO: 2579086 - RNA, 19 nt, Artificial Sequence
  Description of Artificial Sequence: Synthetic oligonucleotide
aggcacuuucaguuuacau

SEQ ID NO: 2579087 - RNA, 19 nt, Artificial Sequence
  Description of Artificial Sequence: Synthetic oligonucleotide
caauugacugggcaucaca

SEQ ID NO: 2579088 - RNA, 19 nt, Artificial Sequence
  Description of Artificial Sequence: Synthetic oligonucleotide
aauucccauguagcuagaa

SEQ ID NO: 2579089 - RNA, 19 nt, Artificial Sequence
  Description of Artificial Sequence: Synthetic oligonucleotide
gcacagaucccucagucca

SEQ ID NO: 2579090 - RNA, 19 nt, Artificial Sequence
  Description of Artificial Sequence: Synthetic oligonucleotide
cacagaucccucaguccag

SEQ ID NO: 2579091 - RNA, 19 nt, Artificial Sequence
  Description of Artificial Sequence: Synthetic oligonucleotide
gacaguagcuguggauccc

SEQ ID NO: 2579092 - RNA, 19 nt, Artificial Sequence
  Description of Artificial Sequence: Synthetic oligonucleotide
cugcaauugacugggcauc

SEQ ID NO: 2579093 - RNA, 19 nt, Artificial Sequence
  Description of Artificial Sequence: Synthetic oligonucleotide
agagcccaauucugcaccu

SEQ ID NO: 2579094 - RNA, 19 nt, Artificial Sequence
  Description of Artificial Sequence: Synthetic oligonucleotide
guaagugcucuaccauuga

SEQ ID NO: 2579095 - RNA, 19 nt, Artificial Sequence
  Description of Artificial Sequence: Synthetic oligonucleotide
gcucuggucuacuuagggc

SEQ ID NO: 2579096 - RNA, 19 nt, Artificial Sequence
  Description of Artificial Sequence: Synthetic oligonucleotide
gugucaagacaguagcugu

SEQ ID NO: 2579097 - RNA, 19 nt, Artificial Sequence
  Description of Artificial Sequence: Synthetic oligonucleotide
cucugauaacugcugggca

SEQ ID NO: 2579098 - RNA, 19 nt, Artificial Sequence
  Description of Artificial Sequence: Synthetic oligonucleotide
ugacugggcaucacacuuu

SEQ ID NO: 2579099 - RNA, 19 nt, Artificial Sequence
  Description of Artificial Sequence: Synthetic oligonucleotide
ugggugcugccaagggcag

SEQ ID NO: 2579100 - RNA, 19 nt, Artificial Sequence
  Description of Artificial Sequence: Synthetic oligonucleotide
cuuuguaggccaccugcca

SEQ ID NO: 2579101 - RNA, 19 nt, Artificial Sequence
  Description of Artificial Sequence: Synthetic oligonucleotide
gcucauuuuaaauagucuu

SEQ ID NO: 2579102 - RNA, 19 nt, Artificial Sequence
  Description of Artificial Sequence: Synthetic oligonucleotide
gaaggaauuccuggcagcu

SEQ ID NO: 2579103 - RNA, 19 nt, Artificial Sequence
  Description of Artificial Sequence: Synthetic oligonucleotide
acuuagggcuuuaucuaca

SEQ ID NO: 2579104 - RNA, 19 nt, Artificial Sequence
  Description of Artificial Sequence: Synthetic oligonucleotide
ccaaacacuuggcauuagc

SEQ ID NO: 2579105 - RNA, 19 nt, Artificial Sequence
  Description of Artificial Sequence: Synthetic oligonucleotide
uggcauuagcccugcacuu

SEQ ID NO: 2579106 - RNA, 19 nt, Artificial Sequence
  Description of Artificial Sequence: Synthetic oligonucleotide
cacugauuaaugugcaagu

SEQ ID NO: 2579107 - RNA, 19 nt, Artificial Sequence
  Description of Artificial Sequence: Synthetic oligonucleotide
aucuacacauuaacagcca

SEQ ID NO: 2579108 - RNA, 19 nt, Artificial Sequence
  Description of Artificial Sequence: Synthetic oligonucleotide
ggcacagaucccucagucc

SEQ ID NO: 2579109 - RNA, 19 nt, Artificial Sequence
  Description of Artificial Sequence: Synthetic oligonucleotide
acagcucauuuuaaauagu

SEQ ID NO: 2579110 - RNA, 19 nt, Artificial Sequence
  Description of Artificial Sequence: Synthetic oligonucleotide
guguccgugguggucacug

SEQ ID NO: 2579111 - RNA, 19 nt, Artificial Sequence
  Description of Artificial Sequence: Synthetic oligonucleotide
ucucugcaauugacugggc

SEQ ID NO: 2579112 - RNA, 19 nt, Artificial Sequence
  Description of Artificial Sequence: Synthetic oligonucleotide
ugucuggcacagaucccuc

SEQ ID NO: 2579113 - RNA, 19 nt, Artificial Sequence
  Description of Artificial Sequence: Synthetic oligonucleotide
gcaagucauuuuaaucaag

SEQ ID NO: 2579114 - RNA, 19 nt, Artificial Sequence
  Description of Artificial Sequence: Synthetic oligonucleotide
augaagacaauggcaccaa

SEQ ID NO: 2579115 - RNA, 19 nt, Artificial Sequence
  Description of Artificial Sequence: Synthetic oligonucleotide
ccucugauaacugcugggc

SEQ ID NO: 2579116 - RNA, 19 nt, Artificial Sequence
  Description of Artificial Sequence: Synthetic oligonucleotide
caaaggcacuuucaguuua

SEQ ID NO: 2579117 - RNA, 19 nt, Artificial Sequence
  Description of Artificial Sequence: Synthetic oligonucleotide
gggaaagagugucagccaa

SEQ ID NO: 2579118 - RNA, 19 nt, Artificial Sequence
  Description of Artificial Sequence: Synthetic oligonucleotide
cauagaauguuuacacauu

SEQ ID NO: 2579119 - RNA, 19 nt, Artificial Sequence
  Description of Artificial Sequence: Synthetic oligonucleotide
aagccaccucugauaacug

SEQ ID NO: 2579120 - RNA, 19 nt, Artificial Sequence
  Description of Artificial Sequence: Synthetic oligonucleotide
aagcauaaauugagagaua

SEQ ID NO: 2579121 - RNA, 19 nt, Artificial Sequence
  Description of Artificial Sequence: Synthetic oligonucleotide
aagucacuuuaaacuguaa

SEQ ID NO: 2579122 - RNA, 19 nt, Artificial Sequence
  Description of Artificial Sequence: Synthetic oligonucleotide
aaauucccauguagcuaga

SEQ ID NO: 2579123 - RNA, 19 nt, Artificial Sequence
  Description of Artificial Sequence: Synthetic oligonucleotide
cuguggaucccacugcucu

SEQ ID NO: 2579124 - RNA, 19 nt, Artificial Sequence
  Description of Artificial Sequence: Synthetic oligonucleotide
uguccgugguggucacuga

SEQ ID NO: 2579125 - RNA, 19 nt, Artificial Sequence
  Description of Artificial Sequence: Synthetic oligonucleotide
uggaucccacugcucuggu

SEQ ID NO: 2579126 - RNA, 19 nt, Artificial Sequence
  Description of Artificial Sequence: Synthetic oligonucleotide
uaaucaggccugggugcug

SEQ ID NO: 2579127 - RNA, 19 nt, Artificial Sequence
  Description of Artificial Sequence: Synthetic oligonucleotide
cccaauucugcaccucccc

SEQ ID NO: 2579128 - RNA, 19 nt, Artificial Sequence
  Description of Artificial Sequence: Synthetic oligonucleotide
ccagaagcauaaauugaga

SEQ ID NO: 2579129 - RNA, 19 nt, Artificial Sequence
  Description of Artificial Sequence: Synthetic oligonucleotide
ccgugguggucacugagag

SEQ ID NO: 2579130 - RNA, 19 nt, Artificial Sequence
  Description of Artificial Sequence: Synthetic oligonucleotide
ggcccugaaagucacuuua

SEQ ID NO: 2579131 - RNA, 19 nt, Artificial Sequence
  Description of Artificial Sequence: Synthetic oligonucleotide
ggcaaacaggaugaagaca

SEQ ID NO: 2579132 - RNA, 19 nt, Artificial Sequence
  Description of Artificial Sequence: Synthetic oligonucleotide
gcuuuguaggccaccugcc

SEQ ID NO: 2579133 - RNA, 19 nt, Artificial Sequence
  Description of Artificial Sequence: Synthetic oligonucleotide
ggcauuagcccugcacuug

SEQ ID NO: 2579134 - RNA, 19 nt, Artificial Sequence
  Description of Artificial Sequence: Synthetic oligonucleotide
uggcagugucaagacagua

SEQ ID NO: 2579135 - RNA, 19 nt, Artificial Sequence
  Description of Artificial Sequence: Synthetic oligonucleotide
uguaggccaccugccagua

SEQ ID NO: 2579136 - RNA, 19 nt, Artificial Sequence
  Description of Artificial Sequence: Synthetic oligonucleotide
ggcuuuaucuacacauuaa

SEQ ID NO: 2579137 - RNA, 19 nt, Artificial Sequence
  Description of Artificial Sequence: Synthetic oligonucleotide
agccagggaaggaauuccu

SEQ ID NO: 2579138 - RNA, 19 nt, Artificial Sequence
  Description of Artificial Sequence: Synthetic oligonucleotide
ccacagcucauuuuaaaua

SEQ ID NO: 2579139 - RNA, 19 nt, Artificial Sequence
  Description of Artificial Sequence: Synthetic oligonucleotide
cugcaccuccccuuuggca

SEQ ID NO: 2579140 - RNA, 19 nt, Artificial Sequence
  Description of Artificial Sequence: Synthetic oligonucleotide
agggcuuuaucuacacauu

SEQ ID NO: 2579141 - RNA, 19 nt, Artificial Sequence
  Description of Artificial Sequence: Synthetic oligonucleotide
ccugccaguaaucaggccu

SEQ ID NO: 2579142 - RNA, 19 nt, Artificial Sequence
  Description of Artificial Sequence: Synthetic oligonucleotide
cauugucuucaguuucugu

SEQ ID NO: 2579143 - RNA, 19 nt, Artificial Sequence
  Description of Artificial Sequence: Synthetic oligonucleotide
caagggcaggcuggcagug

SEQ ID NO: 2579144 - RNA, 19 nt, Artificial Sequence
  Description of Artificial Sequence: Synthetic oligonucleotide
caaggauguucucugcaau

SEQ ID NO: 2579145 - RNA, 19 nt, Artificial Sequence
  Description of Artificial Sequence: Synthetic oligonucleotide
aggccaccugccaguaauc

SEQ ID NO: 2579146 - RNA, 19 nt, Artificial Sequence
  Description of Artificial Sequence: Synthetic oligonucleotide
gcccugaagccagggaagg

SEQ ID NO: 2579147 - RNA, 19 nt, Artificial Sequence
  Description of Artificial Sequence: Synthetic oligonucleotide
cauuagcccugcacuugga

SEQ ID NO: 2579148 - RNA, 19 nt, Artificial Sequence
  Description of Artificial Sequence: Synthetic oligonucleotide
guaaucaggccugggugcu

SEQ ID NO: 2579149 - RNA, 19 nt, Artificial Sequence
  Description of Artificial Sequence: Synthetic oligonucleotide
cagccaaacacuuggcauu

SEQ ID NO: 2579150 - RNA, 19 nt, Artificial Sequence
  Description of Artificial Sequence: Synthetic oligonucleotide
cucuaccauugagccaaac

SEQ ID NO: 2579151 - RNA, 19 nt, Artificial Sequence
  Description of Artificial Sequence: Synthetic oligonucleotide
caauucugcaccuccccuu

SEQ ID NO: 2579152 - RNA, 19 nt, Artificial Sequence
  Description of Artificial Sequence: Synthetic oligonucleotide
gccacagcucauuuuaaau

SEQ ID NO: 2579153 - RNA, 19 nt, Artificial Sequence
  Description of Artificial Sequence: Synthetic oligonucleotide
cuguguccgugguggucac

SEQ ID NO: 2579154 - RNA, 19 nt, Artificial Sequence
  Description of Artificial Sequence: Synthetic oligonucleotide
gagugucagccaaacacuu

SEQ ID NO: 2579155 - RNA, 19 nt, Artificial Sequence
  Description of Artificial Sequence: Synthetic oligonucleotide
cugaagccagggaaggaau

SEQ ID NO: 2579156 - RNA, 19 nt, Artificial Sequence
  Description of Artificial Sequence: Synthetic oligonucleotide
uggucuacuuagggcuuua

SEQ ID NO: 2579157 - RNA, 19 nt, Artificial Sequence
  Description of Artificial Sequence: Synthetic oligonucleotide
ccugcacuuggaagccacc

SEQ ID NO: 2579158 - RNA, 19 nt, Artificial Sequence
  Description of Artificial Sequence: Synthetic oligonucleotide
acuuggcauuagcccugca

SEQ ID NO: 2579159 - RNA, 19 nt, Artificial Sequence
  Description of Artificial Sequence: Synthetic oligonucleotide
gccaguaaucaggccuggg

SEQ ID NO: 2579160 - RNA, 19 nt, Artificial Sequence
  Description of Artificial Sequence: Synthetic oligonucleotide
gccagggaaggaauuccug

SEQ ID NO: 2579161 - RNA, 19 nt, Artificial Sequence
  Description of Artificial Sequence: Synthetic oligonucleotide
ucccucaguccagcugcca

SEQ ID NO: 2579162 - RNA, 19 nt, Artificial Sequence
  Description of Artificial Sequence: Synthetic oligonucleotide
ggaagccaccucugauaac

SEQ ID NO: 2579163 - RNA, 19 nt, Artificial Sequence
  Description of Artificial Sequence: Synthetic oligonucleotide
cugccacagcucauuuuaa

SEQ ID NO: 2579164 - RNA, 19 nt, Artificial Sequence
  Description of Artificial Sequence: Synthetic oligonucleotide
ggaaagagugucagccaaa

SEQ ID NO: 2579165 - RNA, 19 nt, Artificial Sequence
  Description of Artificial Sequence: Synthetic oligonucleotide
gagcccaauucugcaccuc

SEQ ID NO: 2579166 - RNA, 19 nt, Artificial Sequence
  Description of Artificial Sequence: Synthetic oligonucleotide
uguguccgugguggucacu

SEQ ID NO: 2579167 - RNA, 19 nt, Artificial Sequence
  Description of Artificial Sequence: Synthetic oligonucleotide
gcccaauucugcaccuccc

SEQ ID NO: 2579168 - RNA, 19 nt, Artificial Sequence
  Description of Artificial Sequence: Synthetic oligonucleotide
ccaguaaucaggccugggu

SEQ ID NO: 2579169 - RNA, 19 nt, Artificial Sequence
  Description of Artificial Sequence: Synthetic oligonucleotide
caggccugggugcugccaa

SEQ ID NO: 2579170 - RNA, 19 nt, Artificial Sequence
  Description of Artificial Sequence: Synthetic oligonucleotide
gcauaaauugagagauacu

SEQ ID NO: 2579171 - RNA, 19 nt, Artificial Sequence
  Description of Artificial Sequence: Synthetic oligonucleotide
cuggcagugucaagacagu

SEQ ID NO: 2579172 - RNA, 19 nt, Artificial Sequence
  Description of Artificial Sequence: Synthetic oligonucleotide
ggaucccacugcucugguc

SEQ ID NO: 2579173 - RNA, 19 nt, Artificial Sequence
  Description of Artificial Sequence: Synthetic oligonucleotide
gcaauugacugggcaucac

SEQ ID NO: 2579174 - RNA, 19 nt, Artificial Sequence
  Description of Artificial Sequence: Synthetic oligonucleotide
gggcaucacacuuuugcuu

SEQ ID NO: 2579175 - RNA, 19 nt, Artificial Sequence
  Description of Artificial Sequence: Synthetic oligonucleotide
gcugucuggcacagauccc

SEQ ID NO: 2579176 - RNA, 19 nt, Artificial Sequence
  Description of Artificial Sequence: Synthetic oligonucleotide
cccugaaagucacuuuaaa

SEQ ID NO: 2579177 - RNA, 19 nt, Artificial Sequence
  Description of Artificial Sequence: Synthetic oligonucleotide
ggaauuccuggcagcuguc

SEQ ID NO: 2579178 - RNA, 19 nt, Artificial Sequence
  Description of Artificial Sequence: Synthetic oligonucleotide
cgugguggucacugagagc

SEQ ID NO: 2579179 - RNA, 19 nt, Artificial Sequence
  Description of Artificial Sequence: Synthetic oligonucleotide
caucacacuuuugcuuugu

SEQ ID NO: 2579180 - RNA, 19 nt, Artificial Sequence
  Description of Artificial Sequence: Synthetic oligonucleotide
caccuccccuuuggcaaac

SEQ ID NO: 2579181 - RNA, 19 nt, Artificial Sequence
  Description of Artificial Sequence: Synthetic oligonucleotide
cuguaaccagaagcauaaa

SEQ ID NO: 2579182 - RNA, 19 nt, Artificial Sequence
  Description of Artificial Sequence: Synthetic oligonucleotide
cacuuucaguuuacaugau

SEQ ID NO: 2579183 - RNA, 19 nt, Artificial Sequence
  Description of Artificial Sequence: Synthetic oligonucleotide
accuccccuuuggcaaaca

SEQ ID NO: 2579184 - RNA, 19 nt, Artificial Sequence
  Description of Artificial Sequence: Synthetic oligonucleotide
ccaauucugcaccuccccu

SEQ ID NO: 2579185 - RNA, 19 nt, Artificial Sequence
  Description of Artificial Sequence: Synthetic oligonucleotide
cagaucccucaguccagcu

SEQ ID NO: 2579186 - RNA, 19 nt, Artificial Sequence
  Description of Artificial Sequence: Synthetic oligonucleotide
gcccugaaagucacuuuaa

SEQ ID NO: 2579187 - RNA, 19 nt, Artificial Sequence
  Description of Artificial Sequence: Synthetic oligonucleotide
gucuugcaucuaguaacau

SEQ ID NO: 2579188 - RNA, 19 nt, Artificial Sequence
  Description of Artificial Sequence: Synthetic oligonucleotide
ccaaaggcacuuucaguuu

SEQ ID NO: 2579189 - RNA, 19 nt, Artificial Sequence
  Description of Artificial Sequence: Synthetic oligonucleotide
gcugggcacuccagcccug

SEQ ID NO: 2579190 - RNA, 19 nt, Artificial Sequence
  Description of Artificial Sequence: Synthetic oligonucleotide
ggucuacuuagggcuuuau

SEQ ID NO: 2579191 - RNA, 19 nt, Artificial Sequence
  Description of Artificial Sequence: Synthetic oligonucleotide
gcucuaccauugagccaaa

SEQ ID NO: 2579192 - RNA, 19 nt, Artificial Sequence
  Description of Artificial Sequence: Synthetic oligonucleotide
uggucgaagagguagacgg

SEQ ID NO: 2579193 - RNA, 19 nt, Artificial Sequence
  Description of Artificial Sequence: Synthetic oligonucleotide
aaggagaccaucuugcgcu

SEQ ID NO: 2579194 - RNA, 19 nt, Artificial Sequence
  Description of Artificial Sequence: Synthetic oligonucleotide
uguugggaaacccaucucc

SEQ ID NO: 2579195 - RNA, 19 nt, Artificial Sequence
  Description of Artificial Sequence: Synthetic oligonucleotide
agauucugcucgcaaaccc

SEQ ID NO: 2579196 - RNA, 19 nt, Artificial Sequence
  Description of Artificial Sequence: Synthetic oligonucleotide
aagcgggagaagcacaggg

SEQ ID NO: 2579197 - RNA, 19 nt, Artificial Sequence
  Description of Artificial Sequence: Synthetic oligonucleotide
ucuuuggggagucaguucu

SEQ ID NO: 2579198 - RNA, 19 nt, Artificial Sequence
  Description of Artificial Sequence: Synthetic oligonucleotide
guugguuggagucuccugg

SEQ ID NO: 2579199 - RNA, 19 nt, Artificial Sequence
  Description of Artificial Sequence: Synthetic oligonucleotide
ugggaaacccaucuccugg

SEQ ID NO: 2579200 - RNA, 19 nt, Artificial Sequence
  Description of Artificial Sequence: Synthetic oligonucleotide
aaauccuccgcccacucga

SEQ ID NO: 2579201 - RNA, 19 nt, Artificial Sequence
  Description of Artificial Sequence: Synthetic oligonucleotide
gacgcugcucaccacaacg

SEQ ID NO: 2579202 - RNA, 19 nt, Artificial Sequence
  Description of Artificial Sequence: Synthetic oligonucleotide
aaagggacugggucuuugg

SEQ ID NO: 2579203 - RNA, 19 nt, Artificial Sequence
  Description of Artificial Sequence: Synthetic oligonucleotide
ucuuuucacaugguggagg

SEQ ID NO: 2579204 - RNA, 19 nt, Artificial Sequence
  Description of Artificial Sequence: Synthetic oligonucleotide
gagguagacggucacgucc

SEQ ID NO: 2579205 - RNA, 19 nt, Artificial Sequence
  Description of Artificial Sequence: Synthetic oligonucleotide
cuucuuggggugcaaaggg

SEQ ID NO: 2579206 - RNA, 19 nt, Artificial Sequence
  Description of Artificial Sequence: Synthetic oligonucleotide
uggacgcucaacucguugg

SEQ ID NO: 2579207 - RNA, 19 nt, Artificial Sequence
  Description of Artificial Sequence: Synthetic oligonucleotide
ucgcaaacccucuucuugg

SEQ ID NO: 2579208 - RNA, 19 nt, Artificial Sequence
  Description of Artificial Sequence: Synthetic oligonucleotide
aagggacugggucuuuggg

SEQ ID NO: 2579209 - RNA, 19 nt, Artificial Sequence
  Description of Artificial Sequence: Synthetic oligonucleotide
uccagcgcaggugagacgg

SEQ ID NO: 2579210 - RNA, 19 nt, Artificial Sequence
  Description of Artificial Sequence: Synthetic oligonucleotide
gagucaguucuccacgggg

SEQ ID NO: 2579211 - RNA, 19 nt, Artificial Sequence
  Description of Artificial Sequence: Synthetic oligonucleotide
uccgggguggcccuggacg

SEQ ID NO: 2579212 - RNA, 19 nt, Artificial Sequence
  Description of Artificial Sequence: Synthetic oligonucleotide
uucacaugguggaggagag

SEQ ID NO: 2579213 - RNA, 19 nt, Artificial Sequence
  Description of Artificial Sequence: Synthetic oligonucleotide
cacaugguggaggagaggg

SEQ ID NO: 2579214 - RNA, 19 nt, Artificial Sequence
  Description of Artificial Sequence: Synthetic oligonucleotide
gaaggagaccaucuugcgc

SEQ ID NO: 2579215 - RNA, 19 nt, Artificial Sequence
  Description of Artificial Sequence: Synthetic oligonucleotide
aggggcaauggcuccaucg

SEQ ID NO: 2579216 - RNA, 19 nt, Artificial Sequence
  Description of Artificial Sequence: Synthetic oligonucleotide
aagagguagacggucacgu

SEQ ID NO: 2579217 - RNA, 19 nt, Artificial Sequence
  Description of Artificial Sequence: Synthetic oligonucleotide
ucuuggggugcaaagggac

SEQ ID NO: 2579218 - RNA, 19 nt, Artificial Sequence
  Description of Artificial Sequence: Synthetic oligonucleotide
acggagaagcgggagaagc

SEQ ID NO: 2579219 - RNA, 19 nt, Artificial Sequence
  Description of Artificial Sequence: Synthetic oligonucleotide
aaacccucuucuuggggug

SEQ ID NO: 2579220 - RNA, 19 nt, Artificial Sequence
  Description of Artificial Sequence: Synthetic oligonucleotide
agucaguucuccacggggc

SEQ ID NO: 2579221 - RNA, 19 nt, Artificial Sequence
  Description of Artificial Sequence: Synthetic oligonucleotide
ccacacaagauucugcucg

SEQ ID NO: 2579222 - RNA, 19 nt, Artificial Sequence
  Description of Artificial Sequence: Synthetic oligonucleotide
caucguccacacaagauuc

SEQ ID NO: 2579223 - RNA, 19 nt, Artificial Sequence
  Description of Artificial Sequence: Synthetic oligonucleotide
uccgcgucgacgcugcuca

SEQ ID NO: 2579224 - RNA, 19 nt, Artificial Sequence
  Description of Artificial Sequence: Synthetic oligonucleotide
gaaauccuccgcccacucg

SEQ ID NO: 2579225 - RNA, 19 nt, Artificial Sequence
  Description of Artificial Sequence: Synthetic oligonucleotide
ggcugugucagugucaggg

SEQ ID NO: 2579226 - RNA, 19 nt, Artificial Sequence
  Description of Artificial Sequence: Synthetic oligonucleotide
cucgcaaacccucuucuug

SEQ ID NO: 2579227 - RNA, 19 nt, Artificial Sequence
  Description of Artificial Sequence: Synthetic oligonucleotide
gucacguccccguggaagg

SEQ ID NO: 2579228 - RNA, 19 nt, Artificial Sequence
  Description of Artificial Sequence: Synthetic oligonucleotide
acaagauucugcucgcaaa

SEQ ID NO: 2579229 - RNA, 19 nt, Artificial Sequence
  Description of Artificial Sequence: Synthetic oligonucleotide
gguuggagucuccuggucg

SEQ ID NO: 2579230 - RNA, 19 nt, Artificial Sequence
  Description of Artificial Sequence: Synthetic oligonucleotide
agguagacggucacguccc

SEQ ID NO: 2579231 - RNA, 19 nt, Artificial Sequence
  Description of Artificial Sequence: Synthetic oligonucleotide
accaucuugcgcuuccucu

SEQ ID NO: 2579232 - RNA, 19 nt, Artificial Sequence
  Description of Artificial Sequence: Synthetic oligonucleotide
ggugagacggagaagcggg

SEQ ID NO: 2579233 - RNA, 19 nt, Artificial Sequence
  Description of Artificial Sequence: Synthetic oligonucleotide
ggcacuggggcuuccagcg

SEQ ID NO: 2579234 - RNA, 19 nt, Artificial Sequence
  Description of Artificial Sequence: Synthetic oligonucleotide
caugguggaggagagggag

SEQ ID NO: 2579235 - RNA, 19 nt, Artificial Sequence
  Description of Artificial Sequence: Synthetic oligonucleotide
gaggcugugucagugucag

SEQ ID NO: 2579236 - RNA, 19 nt, Artificial Sequence
  Description of Artificial Sequence: Synthetic oligonucleotide
uucuccacggggccugcgg

SEQ ID NO: 2579237 - RNA, 19 nt, Artificial Sequence
  Description of Artificial Sequence: Synthetic oligonucleotide
uccaucguccacacaagau

SEQ ID NO: 2579238 - RNA, 19 nt, Artificial Sequence
  Description of Artificial Sequence: Synthetic oligonucleotide
ucuccacggggccugcggg

SEQ ID NO: 2579239 - RNA, 19 nt, Artificial Sequence
  Description of Artificial Sequence: Synthetic oligonucleotide
ugguugauggguccguguc

SEQ ID NO: 2579240 - RNA, 19 nt, Artificial Sequence
  Description of Artificial Sequence: Synthetic oligonucleotide
acgcucaacucguugguug

SEQ ID NO: 2579241 - RNA, 19 nt, Artificial Sequence
  Description of Artificial Sequence: Synthetic oligonucleotide
ucguuguugggaaacccau

SEQ ID NO: 2579242 - RNA, 19 nt, Artificial Sequence
  Description of Artificial Sequence: Synthetic oligonucleotide
uugggaaacccaucuccug

SEQ ID NO: 2579243 - RNA, 19 nt, Artificial Sequence
  Description of Artificial Sequence: Synthetic oligonucleotide
ugcucgcaaacccucuucu

SEQ ID NO: 2579244 - RNA, 19 nt, Artificial Sequence
  Description of Artificial Sequence: Synthetic oligonucleotide
gagaccaucuugcgcuucc

SEQ ID NO: 2579245 - RNA, 19 nt, Artificial Sequence
  Description of Artificial Sequence: Synthetic oligonucleotide
aacccucuucuuggggugc

SEQ ID NO: 2579246 - RNA, 19 nt, Artificial Sequence
  Description of Artificial Sequence: Synthetic oligonucleotide
uuuugucuuuucacauggu

SEQ ID NO: 2579247 - RNA, 19 nt, Artificial Sequence
  Description of Artificial Sequence: Synthetic oligonucleotide
cuuuucacaugguggagga

SEQ ID NO: 2579248 - RNA, 19 nt, Artificial Sequence
  Description of Artificial Sequence: Synthetic oligonucleotide
cacacaagauucugcucgc

SEQ ID NO: 2579249 - RNA, 19 nt, Artificial Sequence
  Description of Artificial Sequence: Synthetic oligonucleotide
ggugcaaagggacuggguc

SEQ ID NO: 2579250 - RNA, 19 nt, Artificial Sequence
  Description of Artificial Sequence: Synthetic oligonucleotide
caacucguugguuggaguc

SEQ ID NO: 2579251 - RNA, 19 nt, Artificial Sequence
  Description of Artificial Sequence: Synthetic oligonucleotide
guuguugggaaacccaucu

SEQ ID NO: 2579252 - RNA, 19 nt, Artificial Sequence
  Description of Artificial Sequence: Synthetic oligonucleotide
agagguagacggucacguc

SEQ ID NO: 2579253 - RNA, 19 nt, Artificial Sequence
  Description of Artificial Sequence: Synthetic oligonucleotide
aacucguugguuggagucu

SEQ ID NO: 2579254 - RNA, 19 nt, Artificial Sequence
  Description of Artificial Sequence: Synthetic oligonucleotide
cuccuggucgaagagguag

SEQ ID NO: 2579255 - RNA, 19 nt, Artificial Sequence
  Description of Artificial Sequence: Synthetic oligonucleotide
ugucguuguugggaaaccc

SEQ ID NO: 2579256 - RNA, 19 nt, Artificial Sequence
  Description of Artificial Sequence: Synthetic oligonucleotide
uccagcguccucccggggc

SEQ ID NO: 2579257 - RNA, 19 nt, Artificial Sequence
  Description of Artificial Sequence: Synthetic oligonucleotide
accacaacgggcacugggg

SEQ ID NO: 2579258 - RNA, 19 nt, Artificial Sequence
  Description of Artificial Sequence: Synthetic oligonucleotide
gacggucacguccccgugg

SEQ ID NO: 2579259 - RNA, 19 nt, Artificial Sequence
  Description of Artificial Sequence: Synthetic oligonucleotide
caccacaacgggcacuggg

SEQ ID NO: 2579260 - RNA, 19 nt, Artificial Sequence
  Description of Artificial Sequence: Synthetic oligonucleotide
uagacggucacguccccgu

SEQ ID NO: 2579261 - RNA, 19 nt, Artificial Sequence
  Description of Artificial Sequence: Synthetic oligonucleotide
uuggggugcaaagggacug

SEQ ID NO: 2579262 - RNA, 19 nt, Artificial Sequence
  Description of Artificial Sequence: Synthetic oligonucleotide
uccccguggaaggagacca

SEQ ID NO: 2579263 - RNA, 19 nt, Artificial Sequence
  Description of Artificial Sequence: Synthetic oligonucleotide
aggugagacggagaagcgg

SEQ ID NO: 2579264 - RNA, 19 nt, Artificial Sequence
  Description of Artificial Sequence: Synthetic oligonucleotide
ugagacggagaagcgggag

SEQ ID NO: 2579265 - RNA, 19 nt, Artificial Sequence
  Description of Artificial Sequence: Synthetic oligonucleotide
ugggucuuuggggagucag

SEQ ID NO: 2579266 - RNA, 19 nt, Artificial Sequence
  Description of Artificial Sequence: Synthetic oligonucleotide
agucuccuggucgaagagg

SEQ ID NO: 2579267 - RNA, 19 nt, Artificial Sequence
  Description of Artificial Sequence: Synthetic oligonucleotide
uccuccgcccacucgaaac

SEQ ID NO: 2579268 - RNA, 19 nt, Artificial Sequence
  Description of Artificial Sequence: Synthetic oligonucleotide
gagucuccuggucgaagag

SEQ ID NO: 2579269 - RNA, 19 nt, Artificial Sequence
  Description of Artificial Sequence: Synthetic oligonucleotide
agaagcgggagaagcacag

SEQ ID NO: 2579270 - RNA, 19 nt, Artificial Sequence
  Description of Artificial Sequence: Synthetic oligonucleotide
auucugcucgcaaacccuc

SEQ ID NO: 2579271 - RNA, 19 nt, Artificial Sequence
  Description of Artificial Sequence: Synthetic oligonucleotide
uugguuggagucuccuggu

SEQ ID NO: 2579272 - RNA, 19 nt, Artificial Sequence
  Description of Artificial Sequence: Synthetic oligonucleotide
uccuggucgaagagguaga

SEQ ID NO: 2579273 - RNA, 19 nt, Artificial Sequence
  Description of Artificial Sequence: Synthetic oligonucleotide
guuggagucuccuggucga

SEQ ID NO: 2579274 - RNA, 19 nt, Artificial Sequence
  Description of Artificial Sequence: Synthetic oligonucleotide
caggugagacggagaagcg

SEQ ID NO: 2579275 - RNA, 19 nt, Artificial Sequence
  Description of Artificial Sequence: Synthetic oligonucleotide
gggaaacccaucuccuggg

SEQ ID NO: 2579276 - RNA, 19 nt, Artificial Sequence
  Description of Artificial Sequence: Synthetic oligonucleotide
ucguccacacaagauucug

SEQ ID NO: 2579277 - RNA, 19 nt, Artificial Sequence
  Description of Artificial Sequence: Synthetic oligonucleotide
cugcucaccacaacgggca

SEQ ID NO: 2579278 - RNA, 19 nt, Artificial Sequence
  Description of Artificial Sequence: Synthetic oligonucleotide
ggcuccaucguccacacaa

SEQ ID NO: 2579279 - RNA, 19 nt, Artificial Sequence
  Description of Artificial Sequence: Synthetic oligonucleotide
uuuucacaugguggaggag

SEQ ID NO: 2579280 - RNA, 19 nt, Artificial Sequence
  Description of Artificial Sequence: Synthetic oligonucleotide
uccacacaagauucugcuc

SEQ ID NO: 2579281 - RNA, 19 nt, Artificial Sequence
  Description of Artificial Sequence: Synthetic oligonucleotide
gagacggagaagcgggaga

SEQ ID NO: 2579282 - RNA, 19 nt, Artificial Sequence
  Description of Artificial Sequence: Synthetic oligonucleotide
guccguguccccuccgggg

SEQ ID NO: 2579283 - RNA, 19 nt, Artificial Sequence
  Description of Artificial Sequence: Synthetic oligonucleotide
cuugcgcuuccucuccagc

SEQ ID NO: 2579284 - RNA, 19 nt, Artificial Sequence
  Description of Artificial Sequence: Synthetic oligonucleotide
cucgcuguccucggguucg

SEQ ID NO: 2579285 - RNA, 19 nt, Artificial Sequence
  Description of Artificial Sequence: Synthetic oligonucleotide
uccuccgcuggccccggcg

SEQ ID NO: 2579286 - RNA, 19 nt, Artificial Sequence
  Description of Artificial Sequence: Synthetic oligonucleotide
uccguguccccuccggggu

SEQ ID NO: 2579287 - RNA, 19 nt, Artificial Sequence
  Description of Artificial Sequence: Synthetic oligonucleotide
uggggugcaaagggacugg

SEQ ID NO: 2579288 - RNA, 19 nt, Artificial Sequence
  Description of Artificial Sequence: Synthetic oligonucleotide
gaagcgggagaagcacagg

SEQ ID NO: 2579289 - RNA, 19 nt, Artificial Sequence
  Description of Artificial Sequence: Synthetic oligonucleotide
uccgcccacucgaaacugc

SEQ ID NO: 2579290 - RNA, 19 nt, Artificial Sequence
  Description of Artificial Sequence: Synthetic oligonucleotide
cucaacucguugguuggag

SEQ ID NO: 2579291 - RNA, 19 nt, Artificial Sequence
  Description of Artificial Sequence: Synthetic oligonucleotide
cuggucgaagagguagacg

SEQ ID NO: 2579292 - RNA, 19 nt, Artificial Sequence
  Description of Artificial Sequence: Synthetic oligonucleotide
cgaaacugccgccaaagcc

SEQ ID NO: 2579293 - RNA, 19 nt, Artificial Sequence
  Description of Artificial Sequence: Synthetic oligonucleotide
gggagucaguucuccacgg

SEQ ID NO: 2579294 - RNA, 19 nt, Artificial Sequence
  Description of Artificial Sequence: Synthetic oligonucleotide
gguugauggguccgugucc

SEQ ID NO: 2579295 - RNA, 19 nt, Artificial Sequence
  Description of Artificial Sequence: Synthetic oligonucleotide
ggaaacccaucuccugggg

SEQ ID NO: 2579296 - RNA, 19 nt, Artificial Sequence
  Description of Artificial Sequence: Synthetic oligonucleotide
guccacacaagauucugcu

SEQ ID NO: 2579297 - RNA, 19 nt, Artificial Sequence
  Description of Artificial Sequence: Synthetic oligonucleotide
gggacugggucuuugggga

SEQ ID NO: 2579298 - RNA, 19 nt, Artificial Sequence
  Description of Artificial Sequence: Synthetic oligonucleotide
acgcugcucaccacaacgg

SEQ ID NO: 2579299 - RNA, 19 nt, Artificial Sequence
  Description of Artificial Sequence: Synthetic oligonucleotide
ggagucaguucuccacggg

SEQ ID NO: 2579300 - RNA, 19 nt, Artificial Sequence
  Description of Artificial Sequence: Synthetic oligonucleotide
gucgacgcugcucaccaca

SEQ ID NO: 2579301 - RNA, 19 nt, Artificial Sequence
  Description of Artificial Sequence: Synthetic oligonucleotide
uggagucuccuggucgaag

SEQ ID NO: 2579302 - RNA, 19 nt, Artificial Sequence
  Description of Artificial Sequence: Synthetic oligonucleotide
gcaaacccucuucuugggg

SEQ ID NO: 2579303 - RNA, 19 nt, Artificial Sequence
  Description of Artificial Sequence: Synthetic oligonucleotide
ucgacgcugcucaccacaa

SEQ ID NO: 2579304 - RNA, 19 nt, Artificial Sequence
  Description of Artificial Sequence: Synthetic oligonucleotide
cuggacgcucaacucguug

SEQ ID NO: 2579305 - RNA, 19 nt, Artificial Sequence
  Description of Artificial Sequence: Synthetic oligonucleotide
aucuccugggguggggagg

SEQ ID NO: 2579306 - RNA, 19 nt, Artificial Sequence
  Description of Artificial Sequence: Synthetic oligonucleotide
gcccuggacgcucaacucg

SEQ ID NO: 2579307 - RNA, 19 nt, Artificial Sequence
  Description of Artificial Sequence: Synthetic oligonucleotide
acugggucuuuggggaguc

SEQ ID NO: 2579308 - RNA, 19 nt, Artificial Sequence
  Description of Artificial Sequence: Synthetic oligonucleotide
ucugcucgcaaacccucuu

SEQ ID NO: 2579309 - RNA, 19 nt, Artificial Sequence
  Description of Artificial Sequence: Synthetic oligonucleotide
gauggguccguguccccuc

SEQ ID NO: 2579310 - RNA, 19 nt, Artificial Sequence
  Description of Artificial Sequence: Synthetic oligonucleotide
guagacggucacguccccg

SEQ ID NO: 2579311 - RNA, 19 nt, Artificial Sequence
  Description of Artificial Sequence: Synthetic oligonucleotide
ugauggguccguguccccu

SEQ ID NO: 2579312 - RNA, 19 nt, Artificial Sequence
  Description of Artificial Sequence: Synthetic oligonucleotide
ugcaaagggacugggucuu

SEQ ID NO: 2579313 - RNA, 19 nt, Artificial Sequence
  Description of Artificial Sequence: Synthetic oligonucleotide
ugguuggagucuccugguc

SEQ ID NO: 2579314 - RNA, 19 nt, Artificial Sequence
  Description of Artificial Sequence: Synthetic oligonucleotide
acggucacguccccgugga

SEQ ID NO: 2579315 - RNA, 19 nt, Artificial Sequence
  Description of Artificial Sequence: Synthetic oligonucleotide
guggggaggcgucggggcg

SEQ ID NO: 2579316 - RNA, 19 nt, Artificial Sequence
  Description of Artificial Sequence: Synthetic oligonucleotide
agacggagaagcgggagaa

SEQ ID NO: 2579317 - RNA, 19 nt, Artificial Sequence
  Description of Artificial Sequence: Synthetic oligonucleotide
caaacccucuucuuggggu

SEQ ID NO: 2579318 - RNA, 19 nt, Artificial Sequence
  Description of Artificial Sequence: Synthetic oligonucleotide
gucuuuggggagucaguuc

SEQ ID NO: 2579319 - RNA, 19 nt, Artificial Sequence
  Description of Artificial Sequence: Synthetic oligonucleotide
gaaacccaucuccuggggu

SEQ ID NO: 2579320 - RNA, 19 nt, Artificial Sequence
  Description of Artificial Sequence: Synthetic oligonucleotide
cugucguuguugggaaacc

SEQ ID NO: 2579321 - RNA, 19 nt, Artificial Sequence
  Description of Artificial Sequence: Synthetic oligonucleotide
gugucaggggcaauggcuc

SEQ ID NO: 2579322 - RNA, 19 nt, Artificial Sequence
  Description of Artificial Sequence: Synthetic oligonucleotide
gauucugcucgcaaacccu

SEQ ID NO: 2579323 - RNA, 19 nt, Artificial Sequence
  Description of Artificial Sequence: Synthetic oligonucleotide
ggucacguccccguggaag

SEQ ID NO: 2579324 - RNA, 19 nt, Artificial Sequence
  Description of Artificial Sequence: Synthetic oligonucleotide
cuuuggggagucaguucuc

SEQ ID NO: 2579325 - RNA, 19 nt, Artificial Sequence
  Description of Artificial Sequence: Synthetic oligonucleotide
gucguuguugggaaaccca

SEQ ID NO: 2579326 - RNA, 19 nt, Artificial Sequence
  Description of Artificial Sequence: Synthetic oligonucleotide
gcccacucgaaacugccgc

SEQ ID NO: 2579327 - RNA, 19 nt, Artificial Sequence
  Description of Artificial Sequence: Synthetic oligonucleotide
caucuccugggguggggag

SEQ ID NO: 2579328 - RNA, 19 nt, Artificial Sequence
  Description of Artificial Sequence: Synthetic oligonucleotide
gagaagcgggagaagcaca

SEQ ID NO: 2579329 - RNA, 19 nt, Artificial Sequence
  Description of Artificial Sequence: Synthetic oligonucleotide
cuggggugguugauggguc

SEQ ID NO: 2579330 - RNA, 19 nt, Artificial Sequence
  Description of Artificial Sequence: Synthetic oligonucleotide
ucgucggccgcgcguggag

SEQ ID NO: 2579331 - RNA, 19 nt, Artificial Sequence
  Description of Artificial Sequence: Synthetic oligonucleotide
gccaaagccgcugucguug

SEQ ID NO: 2579332 - RNA, 19 nt, Artificial Sequence
  Description of Artificial Sequence: Synthetic oligonucleotide
ucguugguuggagucuccu

SEQ ID NO: 2579333 - RNA, 19 nt, Artificial Sequence
  Description of Artificial Sequence: Synthetic oligonucleotide
gaccaucuugcgcuuccuc

SEQ ID NO: 2579334 - RNA, 19 nt, Artificial Sequence
  Description of Artificial Sequence: Synthetic oligonucleotide
ugcucaccacaacgggcac

SEQ ID NO: 2579335 - RNA, 19 nt, Artificial Sequence
  Description of Artificial Sequence: Synthetic oligonucleotide
cucguugguuggagucucc

SEQ ID NO: 2579336 - RNA, 19 nt, Artificial Sequence
  Description of Artificial Sequence: Synthetic oligonucleotide
caaagggacugggucuuug

SEQ ID NO: 2579337 - RNA, 19 nt, Artificial Sequence
  Description of Artificial Sequence: Synthetic oligonucleotide
uugauggguccgugucccc

SEQ ID NO: 2579338 - RNA, 19 nt, Artificial Sequence
  Description of Artificial Sequence: Synthetic oligonucleotide
gugcaaagggacugggucu

SEQ ID NO: 2579339 - RNA, 19 nt, Artificial Sequence
  Description of Artificial Sequence: Synthetic oligonucleotide
gacggagaagcgggagaag

SEQ ID NO: 2579340 - RNA, 19 nt, Artificial Sequence
  Description of Artificial Sequence: Synthetic oligonucleotide
gcgcguggagacuugagca

SEQ ID NO: 2579341 - RNA, 19 nt, Artificial Sequence
  Description of Artificial Sequence: Synthetic oligonucleotide
gagggagggcccagccucg

SEQ ID NO: 2579342 - RNA, 19 nt, Artificial Sequence
  Description of Artificial Sequence: Synthetic oligonucleotide
gcgcuggggugguugaugg

SEQ ID NO: 2579343 - RNA, 19 nt, Artificial Sequence
  Description of Artificial Sequence: Synthetic oligonucleotide
uggguccguguccccuccg

SEQ ID NO: 2579344 - RNA, 19 nt, Artificial Sequence
  Description of Artificial Sequence: Synthetic oligonucleotide
cugcucgcaaacccucuuc

SEQ ID NO: 2579345 - RNA, 19 nt, Artificial Sequence
  Description of Artificial Sequence: Synthetic oligonucleotide
gccguguccgcgucgacgc

SEQ ID NO: 2579346 - RNA, 19 nt, Artificial Sequence
  Description of Artificial Sequence: Synthetic oligonucleotide
cucggguucgucggccgcg

SEQ ID NO: 2579347 - RNA, 19 nt, Artificial Sequence
  Description of Artificial Sequence: Synthetic oligonucleotide
ggagagggagggcccagcc

SEQ ID NO: 2579348 - RNA, 19 nt, Artificial Sequence
  Description of Artificial Sequence: Synthetic oligonucleotide
acaacgggcacuggggcuu

SEQ ID NO: 2579349 - RNA, 19 nt, Artificial Sequence
  Description of Artificial Sequence: Synthetic oligonucleotide
aacgggcacuggggcuucc

SEQ ID NO: 2579350 - RNA, 19 nt, Artificial Sequence
  Description of Artificial Sequence: Synthetic oligonucleotide
guugggaaacccaucuccu

SEQ ID NO: 2579351 - RNA, 19 nt, Artificial Sequence
  Description of Artificial Sequence: Synthetic oligonucleotide
gcugucguuguugggaaac

SEQ ID NO: 2579352 - RNA, 19 nt, Artificial Sequence
  Description of Artificial Sequence: Synthetic oligonucleotide
cuccacggggccugcgggc

SEQ ID NO: 2579353 - RNA, 19 nt, Artificial Sequence
  Description of Artificial Sequence: Synthetic oligonucleotide
agacggucacguccccgug

SEQ ID NO: 2579354 - RNA, 19 nt, Artificial Sequence
  Description of Artificial Sequence: Synthetic oligonucleotide
cuccaucguccacacaaga

SEQ ID NO: 2579355 - RNA, 19 nt, Artificial Sequence
  Description of Artificial Sequence: Synthetic oligonucleotide
gguccguguccccuccggg

SEQ ID NO: 2579356 - RNA, 19 nt, Artificial Sequence
  Description of Artificial Sequence: Synthetic oligonucleotide
gcugcucaccacaacgggc

SEQ ID NO: 2579357 - RNA, 19 nt, Artificial Sequence
  Description of Artificial Sequence: Synthetic oligonucleotide
aucguccacacaagauucu

SEQ ID NO: 2579358 - RNA, 19 nt, Artificial Sequence
  Description of Artificial Sequence: Synthetic oligonucleotide
gccgccaaagccgcugucg

SEQ ID NO: 2579359 - RNA, 19 nt, Artificial Sequence
  Description of Artificial Sequence: Synthetic oligonucleotide
ucuccuggucgaagaggua

SEQ ID NO: 2579360 - RNA, 19 nt, Artificial Sequence
  Description of Artificial Sequence: Synthetic oligonucleotide
gucuccuggucgaagaggu

SEQ ID NO: 2579361 - RNA, 19 nt, Artificial Sequence
  Description of Artificial Sequence: Synthetic oligonucleotide
agccgcugucguuguuggg

SEQ ID NO: 2579362 - RNA, 19 nt, Artificial Sequence
  Description of Artificial Sequence: Synthetic oligonucleotide
ggggaaauccuccgcccac

SEQ ID NO: 2579363 - RNA, 19 nt, Artificial Sequence
  Description of Artificial Sequence: Synthetic oligonucleotide
guggagacuugagcagccc

SEQ ID NO: 2579364 - RNA, 19 nt, Artificial Sequence
  Description of Artificial Sequence: Synthetic oligonucleotide
uggggaggcgucggggcgc

SEQ ID NO: 2579365 - RNA, 19 nt, Artificial Sequence
  Description of Artificial Sequence: Synthetic oligonucleotide
caguucuccacggggccug

SEQ ID NO: 2579366 - RNA, 19 nt, Artificial Sequence
  Description of Artificial Sequence: Synthetic oligonucleotide
ggacugggucuuuggggag

SEQ ID NO: 2579367 - RNA, 19 nt, Artificial Sequence
  Description of Artificial Sequence: Synthetic oligonucleotide
cgcucaacucguugguugg

SEQ ID NO: 2579368 - RNA, 19 nt, Artificial Sequence
  Description of Artificial Sequence: Synthetic oligonucleotide
cuuggggugcaaagggacu

SEQ ID NO: 2579369 - RNA, 19 nt, Artificial Sequence
  Description of Artificial Sequence: Synthetic oligonucleotide
ccacaacgggcacuggggc

SEQ ID NO: 2579370 - RNA, 19 nt, Artificial Sequence
  Description of Artificial Sequence: Synthetic oligonucleotide
aauccuccgcccacucgaa

SEQ ID NO: 2579371 - RNA, 19 nt, Artificial Sequence
  Description of Artificial Sequence: Synthetic oligonucleotide
agcucgcuguccucggguu

SEQ ID NO: 2579372 - RNA, 19 nt, Artificial Sequence
  Description of Artificial Sequence: Synthetic oligonucleotide
cagcgcaggugagacggag

SEQ ID NO: 2579373 - RNA, 19 nt, Artificial Sequence
  Description of Artificial Sequence: Synthetic oligonucleotide
ucacguccccguggaagga

SEQ ID NO: 2579374 - RNA, 19 nt, Artificial Sequence
  Description of Artificial Sequence: Synthetic oligonucleotide
ggguccguguccccuccgg

SEQ ID NO: 2579375 - RNA, 19 nt, Artificial Sequence
  Description of Artificial Sequence: Synthetic oligonucleotide
guucgucggccgcgcgugg

SEQ ID NO: 2579376 - RNA, 19 nt, Artificial Sequence
  Description of Artificial Sequence: Synthetic oligonucleotide
cccacucgaaacugccgcc

SEQ ID NO: 2579377 - RNA, 19 nt, Artificial Sequence
  Description of Artificial Sequence: Synthetic oligonucleotide
gccccgacgagcccgcugc

SEQ ID NO: 2579378 - RNA, 19 nt, Artificial Sequence
  Description of Artificial Sequence: Synthetic oligonucleotide
cacguccccguggaaggag

SEQ ID NO: 2579379 - RNA, 19 nt, Artificial Sequence
  Description of Artificial Sequence: Synthetic oligonucleotide
gcgucgggagcccgggugg

SEQ ID NO: 2579380 - RNA, 19 nt, Artificial Sequence
  Description of Artificial Sequence: Synthetic oligonucleotide
uccugggguggggaggcgu

SEQ ID NO: 2579381 - RNA, 19 nt, Artificial Sequence
  Description of Artificial Sequence: Synthetic oligonucleotide
ucggguucgucggccgcgc

SEQ ID NO: 2579382 - RNA, 19 nt, Artificial Sequence
  Description of Artificial Sequence: Synthetic oligonucleotide
gguucgucggccgcgcgug

SEQ ID NO: 2579383 - RNA, 19 nt, Artificial Sequence
  Description of Artificial Sequence: Synthetic oligonucleotide
ggccguguccgcgucgacg

SEQ ID NO: 2579384 - RNA, 19 nt, Artificial Sequence
  Description of Artificial Sequence: Synthetic oligonucleotide
ggaggcgucggggcgcugg

SEQ ID NO: 2579385 - RNA, 19 nt, Artificial Sequence
  Description of Artificial Sequence: Synthetic oligonucleotide
cguggagacuugagcagcc

SEQ ID NO: 2579386 - RNA, 19 nt, Artificial Sequence
  Description of Artificial Sequence: Synthetic oligonucleotide
aggagaccaucuugcgcuu

SEQ ID NO: 2579387 - RNA, 19 nt, Artificial Sequence
  Description of Artificial Sequence: Synthetic oligonucleotide
gcguggagacuugagcagc

SEQ ID NO: 2579388 - RNA, 19 nt, Artificial Sequence
  Description of Artificial Sequence: Synthetic oligonucleotide
gagcccgggugggaggccc

SEQ ID NO: 2579389 - RNA, 19 nt, Artificial Sequence
  Description of Artificial Sequence: Synthetic oligonucleotide
gucggccgcgcguggagac

SEQ ID NO: 2579390 - RNA, 19 nt, Artificial Sequence
  Description of Artificial Sequence: Synthetic oligonucleotide
ggggugcaaagggacuggg

SEQ ID NO: 2579391 - RNA, 19 nt, Artificial Sequence
  Description of Artificial Sequence: Synthetic oligonucleotide
guguccgcgucgacgcugc

SEQ ID NO: 2579392 - RNA, 19 nt, Artificial Sequence
  Description of Artificial Sequence: Synthetic oligonucleotide
uucgucggccgcgcgugga

SEQ ID NO: 2579393 - RNA, 19 nt, Artificial Sequence
  Description of Artificial Sequence: Synthetic oligonucleotide
uuggagucuccuggucgaa

SEQ ID NO: 2579394 - RNA, 19 nt, Artificial Sequence
  Description of Artificial Sequence: Synthetic oligonucleotide
agaccaucuugcgcuuccu

SEQ ID NO: 2579395 - RNA, 19 nt, Artificial Sequence
  Description of Artificial Sequence: Synthetic oligonucleotide
gccgcugucguuguuggga

SEQ ID NO: 2579396 - RNA, 19 nt, Artificial Sequence
  Description of Artificial Sequence: Synthetic oligonucleotide
cuccgcccacucgaaacug

SEQ ID NO: 2579397 - RNA, 19 nt, Artificial Sequence
  Description of Artificial Sequence: Synthetic oligonucleotide
agccucgggugccucccca

SEQ ID NO: 2579398 - RNA, 19 nt, Artificial Sequence
  Description of Artificial Sequence: Synthetic oligonucleotide
guccccguggaaggagacc

SEQ ID NO: 2579399 - RNA, 19 nt, Artificial Sequence
  Description of Artificial Sequence: Synthetic oligonucleotide
gguagacggucacgucccc

SEQ ID NO: 2579400 - RNA, 19 nt, Artificial Sequence
  Description of Artificial Sequence: Synthetic oligonucleotide
gugguugauggguccgugu

SEQ ID NO: 2579401 - RNA, 19 nt, Artificial Sequence
  Description of Artificial Sequence: Synthetic oligonucleotide
guccucggguucgucggcc

SEQ ID NO: 2579402 - RNA, 19 nt, Artificial Sequence
  Description of Artificial Sequence: Synthetic oligonucleotide
gcgucgacgcugcucacca

SEQ ID NO: 2579403 - RNA, 19 nt, Artificial Sequence
  Description of Artificial Sequence: Synthetic oligonucleotide
cgcaaacccucuucuuggg

SEQ ID NO: 2579404 - RNA, 19 nt, Artificial Sequence
  Description of Artificial Sequence: Synthetic oligonucleotide
agcgcaggugagacggaga

SEQ ID NO: 2579405 - RNA, 19 nt, Artificial Sequence
  Description of Artificial Sequence: Synthetic oligonucleotide
cagcgggcgggccgugucc

SEQ ID NO: 2579406 - RNA, 19 nt, Artificial Sequence
  Description of Artificial Sequence: Synthetic oligonucleotide
cgcguggagacuugagcag

SEQ ID NO: 2579407 - RNA, 19 nt, Artificial Sequence
  Description of Artificial Sequence: Synthetic oligonucleotide
gucaggggcaauggcucca

SEQ ID NO: 2579408 - RNA, 19 nt, Artificial Sequence
  Description of Artificial Sequence: Synthetic oligonucleotide
gcgcaggugagacggagaa

SEQ ID NO: 2579409 - RNA, 19 nt, Artificial Sequence
  Description of Artificial Sequence: Synthetic oligonucleotide
gucuccagcgcaggugaga

SEQ ID NO: 2579410 - RNA, 19 nt, Artificial Sequence
  Description of Artificial Sequence: Synthetic oligonucleotide
ccgcccacucgaaacugcc

SEQ ID NO: 2579411 - RNA, 19 nt, Artificial Sequence
  Description of Artificial Sequence: Synthetic oligonucleotide
agggagggcccagccucgg

SEQ ID NO: 2579412 - RNA, 19 nt, Artificial Sequence
  Description of Artificial Sequence: Synthetic oligonucleotide
cuccgcuggccccggcgcc

SEQ ID NO: 2579413 - RNA, 19 nt, Artificial Sequence
  Description of Artificial Sequence: Synthetic oligonucleotide
cgcgcguggagacuugagc

SEQ ID NO: 2579414 - RNA, 19 nt, Artificial Sequence
  Description of Artificial Sequence: Synthetic oligonucleotide
guucuccacggggccugcg

SEQ ID NO: 2579415 - RNA, 19 nt, Artificial Sequence
  Description of Artificial Sequence: Synthetic oligonucleotide
ugccgccaaagccgcuguc

SEQ ID NO: 2579416 - RNA, 19 nt, Artificial Sequence
  Description of Artificial Sequence: Synthetic oligonucleotide
auccuccgcccacucgaaa

SEQ ID NO: 2579417 - RNA, 19 nt, Artificial Sequence
  Description of Artificial Sequence: Synthetic oligonucleotide
ggggucuccagcgcaggug

SEQ ID NO: 2579418 - RNA, 19 nt, Artificial Sequence
  Description of Artificial Sequence: Synthetic oligonucleotide
cccagaggcugugucagug

SEQ ID NO: 2579419 - RNA, 19 nt, Artificial Sequence
  Description of Artificial Sequence: Synthetic oligonucleotide
gugagacggagaagcggga

SEQ ID NO: 2579420 - RNA, 19 nt, Artificial Sequence
  Description of Artificial Sequence: Synthetic oligonucleotide
uggcuccaucguccacaca

SEQ ID NO: 2579421 - RNA, 19 nt, Artificial Sequence
  Description of Artificial Sequence: Synthetic oligonucleotide
uccccuccgggguggcccu

SEQ ID NO: 2579422 - RNA, 19 nt, Artificial Sequence
  Description of Artificial Sequence: Synthetic oligonucleotide
gacugggucuuuggggagu

SEQ ID NO: 2579423 - RNA, 19 nt, Artificial Sequence
  Description of Artificial Sequence: Synthetic oligonucleotide
cguuguugggaaacccauc

SEQ ID NO: 2579424 - RNA, 19 nt, Artificial Sequence
  Description of Artificial Sequence: Synthetic oligonucleotide
ccgggguggcccuggacgc

SEQ ID NO: 2579425 - RNA, 19 nt, Artificial Sequence
  Description of Artificial Sequence: Synthetic oligonucleotide
acgagcccgcugccuccuc

SEQ ID NO: 2579426 - RNA, 19 nt, Artificial Sequence
  Description of Artificial Sequence: Synthetic oligonucleotide
ggcgcuggggugguugaug

SEQ ID NO: 2579427 - RNA, 19 nt, Artificial Sequence
  Description of Artificial Sequence: Synthetic oligonucleotide
cguugguuggagucuccug

SEQ ID NO: 2579428 - RNA, 19 nt, Artificial Sequence
  Description of Artificial Sequence: Synthetic oligonucleotide
acccucuucuuggggugca

SEQ ID NO: 2579429 - RNA, 19 nt, Artificial Sequence
  Description of Artificial Sequence: Synthetic oligonucleotide
acguccccguggaaggaga

SEQ ID NO: 2579430 - RNA, 19 nt, Artificial Sequence
  Description of Artificial Sequence: Synthetic oligonucleotide
ggcuuccagcguccucccg

SEQ ID NO: 2579431 - RNA, 19 nt, Artificial Sequence
  Description of Artificial Sequence: Synthetic oligonucleotide
ccuggucgaagagguagac

SEQ ID NO: 2579432 - RNA, 19 nt, Artificial Sequence
  Description of Artificial Sequence: Synthetic oligonucleotide
gggagggcccagccucggg

SEQ ID NO: 2579433 - RNA, 19 nt, Artificial Sequence
  Description of Artificial Sequence: Synthetic oligonucleotide
gcccgcugccuccucgucc

SEQ ID NO: 2579434 - RNA, 19 nt, Artificial Sequence
  Description of Artificial Sequence: Synthetic oligonucleotide
ugucagugucaggggcaau

SEQ ID NO: 2579435 - RNA, 19 nt, Artificial Sequence
  Description of Artificial Sequence: Synthetic oligonucleotide
agcccgggugggaggcccc

SEQ ID NO: 2579436 - RNA, 19 nt, Artificial Sequence
  Description of Artificial Sequence: Synthetic oligonucleotide
cccggggccccgacgagcc

SEQ ID NO: 2579437 - RNA, 19 nt, Artificial Sequence
  Description of Artificial Sequence: Synthetic oligonucleotide
cacggggccugcgggccgg

SEQ ID NO: 2579438 - RNA, 19 nt, Artificial Sequence
  Description of Artificial Sequence: Synthetic oligonucleotide
uguccccuccgggguggcc

SEQ ID NO: 2579439 - RNA, 19 nt, Artificial Sequence
  Description of Artificial Sequence: Synthetic oligonucleotide
ccaucguccacacaagauu

SEQ ID NO: 2579440 - RNA, 19 nt, Artificial Sequence
  Description of Artificial Sequence: Synthetic oligonucleotide
ggacgcucaacucguuggu

SEQ ID NO: 2579441 - RNA, 19 nt, Artificial Sequence
  Description of Artificial Sequence: Synthetic oligonucleotide
uguccgcgucgacgcugcu

SEQ ID NO: 2579442 - RNA, 19 nt, Artificial Sequence
  Description of Artificial Sequence: Synthetic oligonucleotide
cuccgggguggcccuggac

SEQ ID NO: 2579443 - RNA, 19 nt, Artificial Sequence
  Description of Artificial Sequence: Synthetic oligonucleotide
ccagcucgcuguccucggg

SEQ ID NO: 2579444 - RNA, 19 nt, Artificial Sequence
  Description of Artificial Sequence: Synthetic oligonucleotide
ucggccgcgcguggagacu

SEQ ID NO: 2579445 - RNA, 19 nt, Artificial Sequence
  Description of Artificial Sequence: Synthetic oligonucleotide
cugcgggccgggcgucggg

SEQ ID NO: 2579446 - RNA, 19 nt, Artificial Sequence
  Description of Artificial Sequence: Synthetic oligonucleotide
ccuccgcuggccccggcgc

SEQ ID NO: 2579447 - RNA, 19 nt, Artificial Sequence
  Description of Artificial Sequence: Synthetic oligonucleotide
cagccucgggugccucccc

SEQ ID NO: 2579448 - RNA, 19 nt, Artificial Sequence
  Description of Artificial Sequence: Synthetic oligonucleotide
ggucuuuggggagucaguu

SEQ ID NO: 2579449 - RNA, 19 nt, Artificial Sequence
  Description of Artificial Sequence: Synthetic oligonucleotide
ccgacgagcccgcugccuc

SEQ ID NO: 2579450 - RNA, 19 nt, Artificial Sequence
  Description of Artificial Sequence: Synthetic oligonucleotide
ccuccccagaggcuguguc

SEQ ID NO: 2579451 - RNA, 19 nt, Artificial Sequence
  Description of Artificial Sequence: Synthetic oligonucleotide
guccgcgucgacgcugcuc

SEQ ID NO: 2579452 - RNA, 19 nt, Artificial Sequence
  Description of Artificial Sequence: Synthetic oligonucleotide
gagcccgcugccuccucgu

SEQ ID NO: 2579453 - RNA, 19 nt, Artificial Sequence
  Description of Artificial Sequence: Synthetic oligonucleotide
ccugggguggggaggcguc

SEQ ID NO: 2579454 - RNA, 19 nt, Artificial Sequence
  Description of Artificial Sequence: Synthetic oligonucleotide
gacgcucaacucguugguu

SEQ ID NO: 2579455 - RNA, 19 nt, Artificial Sequence
  Description of Artificial Sequence: Synthetic oligonucleotide
ggucuccagcgcaggugag

SEQ ID NO: 2579456 - RNA, 19 nt, Artificial Sequence
  Description of Artificial Sequence: Synthetic oligonucleotide
acgggcacuggggcuucca

SEQ ID NO: 2579457 - RNA, 19 nt, Artificial Sequence
  Description of Artificial Sequence: Synthetic oligonucleotide
caacgggcacuggggcuuc

SEQ ID NO: 2579458 - RNA, 19 nt, Artificial Sequence
  Description of Artificial Sequence: Synthetic oligonucleotide
ccucggguucgucggccgc

SEQ ID NO: 2579459 - RNA, 19 nt, Artificial Sequence
  Description of Artificial Sequence: Synthetic oligonucleotide
cagcucgcuguccucgggu

SEQ ID NO: 2579460 - RNA, 19 nt, Artificial Sequence
  Description of Artificial Sequence: Synthetic oligonucleotide
gcgucggggcgcuggggug

SEQ ID NO: 2579461 - RNA, 19 nt, Artificial Sequence
  Description of Artificial Sequence: Synthetic oligonucleotide
cgagcccgcugccuccucg

SEQ ID NO: 2579462 - RNA, 19 nt, Artificial Sequence
  Description of Artificial Sequence: Synthetic oligonucleotide
gcucaacucguugguugga

SEQ ID NO: 2579463 - RNA, 19 nt, Artificial Sequence
  Description of Artificial Sequence: Synthetic oligonucleotide
cccguggaaggagaccauc

SEQ ID NO: 2579464 - RNA, 19 nt, Artificial Sequence
  Description of Artificial Sequence: Synthetic oligonucleotide
ccguggaaggagaccaucu

SEQ ID NO: 2579465 - RNA, 19 nt, Artificial Sequence
  Description of Artificial Sequence: Synthetic oligonucleotide
ggccccgacgagcccgcug

SEQ ID NO: 2579466 - RNA, 19 nt, Artificial Sequence
  Description of Artificial Sequence: Synthetic oligonucleotide
cgacgagcccgcugccucc

SEQ ID NO: 2579467 - RNA, 19 nt, Artificial Sequence
  Description of Artificial Sequence: Synthetic oligonucleotide
ggcgucggggcgcuggggu

SEQ ID NO: 2579468 - RNA, 19 nt, Artificial Sequence
  Description of Artificial Sequence: Synthetic oligonucleotide
ccgcgcguggagacuugag

SEQ ID NO: 2579469 - RNA, 19 nt, Artificial Sequence
  Description of Artificial Sequence: Synthetic oligonucleotide
gcagcgggcgggccguguc

SEQ ID NO: 2579470 - RNA, 19 nt, Artificial Sequence
  Description of Artificial Sequence: Synthetic oligonucleotide
ccccguccuccuccgcugg

SEQ ID NO: 2579471 - RNA, 19 nt, Artificial Sequence
  Description of Artificial Sequence: Synthetic oligonucleotide
gacgagcccgcugccuccu

SEQ ID NO: 2579472 - RNA, 19 nt, Artificial Sequence
  Description of Artificial Sequence: Synthetic oligonucleotide
ccgggcgucgggagcccgg

SEQ ID NO: 2579473 - RNA, 19 nt, Artificial Sequence
  Description of Artificial Sequence: Synthetic oligonucleotide
gcgggccguguccgcgucg

SEQ ID NO: 2579474 - RNA, 19 nt, Artificial Sequence
  Description of Artificial Sequence: Synthetic oligonucleotide
cguguccccuccggggugg

SEQ ID NO: 2579475 - RNA, 19 nt, Artificial Sequence
  Description of Artificial Sequence: Synthetic oligonucleotide
ccgcugucguuguugggaa

SEQ ID NO: 2579476 - RNA, 19 nt, Artificial Sequence
  Description of Artificial Sequence: Synthetic oligonucleotide
gcgggccgggcgucgggag

SEQ ID NO: 2579477 - RNA, 19 nt, Artificial Sequence
  Description of Artificial Sequence: Synthetic oligonucleotide
cgucggggcgcuggggugg

SEQ ID NO: 2579478 - RNA, 19 nt, Artificial Sequence
  Description of Artificial Sequence: Synthetic oligonucleotide
gucgggagcccggguggga

SEQ ID NO: 2579479 - RNA, 19 nt, Artificial Sequence
  Description of Artificial Sequence: Synthetic oligonucleotide
cuccuccgcuggccccggc

SEQ ID NO: 2579480 - RNA, 19 nt, Artificial Sequence
  Description of Artificial Sequence: Synthetic oligonucleotide
cccuggacgcucaacucgu

SEQ ID NO: 2579481 - RNA, 19 nt, Artificial Sequence
  Description of Artificial Sequence: Synthetic oligonucleotide
gggguggcccuggacgcuc

SEQ ID NO: 2579482 - RNA, 19 nt, Artificial Sequence
  Description of Artificial Sequence: Synthetic oligonucleotide
gggucuuuggggagucagu

SEQ ID NO: 2579483 - RNA, 19 nt, Artificial Sequence
  Description of Artificial Sequence: Synthetic oligonucleotide
cguguccgcgucgacgcug

SEQ ID NO: 2579484 - RNA, 19 nt, Artificial Sequence
  Description of Artificial Sequence: Synthetic oligonucleotide
ggguucgucggccgcgcgu

SEQ ID NO: 2579485 - RNA, 19 nt, Artificial Sequence
  Description of Artificial Sequence: Synthetic oligonucleotide
ccacggggccugcgggccg

SEQ ID NO: 2579486 - RNA, 19 nt, Artificial Sequence
  Description of Artificial Sequence: Synthetic oligonucleotide
guccucccggggccccgac

SEQ ID NO: 2579487 - RNA, 19 nt, Artificial Sequence
  Description of Artificial Sequence: Synthetic oligonucleotide
ccaucuccuggggugggga

SEQ ID NO: 2579488 - RNA, 19 nt, Artificial Sequence
  Description of Artificial Sequence: Synthetic oligonucleotide
guguccccuccgggguggc

SEQ ID NO: 2579489 - RNA, 19 nt, Artificial Sequence
  Description of Artificial Sequence: Synthetic oligonucleotide
ccguguccccuccggggug

SEQ ID NO: 2579490 - RNA, 19 nt, Artificial Sequence
  Description of Artificial Sequence: Synthetic oligonucleotide
cgcgucgacgcugcucacc

SEQ ID NO: 2579491 - RNA, 19 nt, Artificial Sequence
  Description of Artificial Sequence: Synthetic oligonucleotide
gcucgcaaacccucuucuu

SEQ ID NO: 2579492 - RNA, 19 nt, Artificial Sequence
  Description of Artificial Sequence: Synthetic oligonucleotide
gggugcaaagggacugggu

SEQ ID NO: 2579493 - RNA, 19 nt, Artificial Sequence
  Description of Artificial Sequence: Synthetic oligonucleotide
cggggccccgacgagcccg

SEQ ID NO: 2579494 - RNA, 19 nt, Artificial Sequence
  Description of Artificial Sequence: Synthetic oligonucleotide
ccuccgcccacucgaaacu

SEQ ID NO: 2579495 - RNA, 19 nt, Artificial Sequence
  Description of Artificial Sequence: Synthetic oligonucleotide
ggagcccgggugggaggcc

SEQ ID NO: 2579496 - RNA, 19 nt, Artificial Sequence
  Description of Artificial Sequence: Synthetic oligonucleotide
ccugcgggccgggcgucgg

SEQ ID NO: 2579497 - RNA, 19 nt, Artificial Sequence
  Description of Artificial Sequence: Synthetic oligonucleotide
cgacgcugcucaccacaac

SEQ ID NO: 2579498 - RNA, 19 nt, Artificial Sequence
  Description of Artificial Sequence: Synthetic oligonucleotide
ccucuucuuggggugcaaa

SEQ ID NO: 2579499 - RNA, 19 nt, Artificial Sequence
  Description of Artificial Sequence: Synthetic oligonucleotide
ccucgggugccuccccaga

SEQ ID NO: 2579500 - RNA, 19 nt, Artificial Sequence
  Description of Artificial Sequence: Synthetic oligonucleotide
gcucaccacaacgggcacu

SEQ ID NO: 2579501 - RNA, 19 nt, Artificial Sequence
  Description of Artificial Sequence: Synthetic oligonucleotide
ggggccccgacgagcccgc

SEQ ID NO: 2579502 - RNA, 19 nt, Artificial Sequence
  Description of Artificial Sequence: Synthetic oligonucleotide
ggcgggccguguccgcguc

SEQ ID NO: 2579503 - RNA, 19 nt, Artificial Sequence
  Description of Artificial Sequence: Synthetic oligonucleotide
gggccugcgggccgggcgu

SEQ ID NO: 2579504 - RNA, 19 nt, Artificial Sequence
  Description of Artificial Sequence: Synthetic oligonucleotide
gccugcgggccgggcgucg

SEQ ID NO: 2579505 - RNA, 19 nt, Artificial Sequence
  Description of Artificial Sequence: Synthetic oligonucleotide
cgucgggagcccggguggg

SEQ ID NO: 2579506 - RNA, 19 nt, Artificial Sequence
  Description of Artificial Sequence: Synthetic oligonucleotide
gggugguugauggguccgu

SEQ ID NO: 2579507 - RNA, 19 nt, Artificial Sequence
  Description of Artificial Sequence: Synthetic oligonucleotide
ccgccaaagccgcugucgu

SEQ ID NO: 2579508 - RNA, 19 nt, Artificial Sequence
  Description of Artificial Sequence: Synthetic oligonucleotide
gccgggcgucgggagcccg

SEQ ID NO: 2579509 - RNA, 19 nt, Artificial Sequence
  Description of Artificial Sequence: Synthetic oligonucleotide
gcgggcgggccguguccgc

SEQ ID NO: 2579510 - RNA, 19 nt, Artificial Sequence
  Description of Artificial Sequence: Synthetic oligonucleotide
caaagccgcugucguuguu

SEQ ID NO: 2579511 - RNA, 19 nt, Artificial Sequence
  Description of Artificial Sequence: Synthetic oligonucleotide
cgucgacgcugcucaccac

SEQ ID NO: 2579512 - RNA, 19 nt, Artificial Sequence
  Description of Artificial Sequence: Synthetic oligonucleotide
gccgcgcguggagacuuga

SEQ ID NO: 2579513 - RNA, 19 nt, Artificial Sequence
  Description of Artificial Sequence: Synthetic oligonucleotide
ccccggggucuccagcgca

SEQ ID NO: 2579514 - RNA, 19 nt, Artificial Sequence
  Description of Artificial Sequence: Synthetic oligonucleotide
cgggccgggcgucgggagc

SEQ ID NO: 2579515 - RNA, 19 nt, Artificial Sequence
  Description of Artificial Sequence: Synthetic oligonucleotide
cgggcgggccguguccgcg

SEQ ID NO: 2579516 - RNA, 19 nt, Artificial Sequence
  Description of Artificial Sequence: Synthetic oligonucleotide
gugccuccccagaggcugu

SEQ ID NO: 2579517 - RNA, 19 nt, Artificial Sequence
  Description of Artificial Sequence: Synthetic oligonucleotide
cgggcgucgggagcccggg

SEQ ID NO: 2579518 - RNA, 19 nt, Artificial Sequence
  Description of Artificial Sequence: Synthetic oligonucleotide
gggccguguccgcgucgac

SEQ ID NO: 2579519 - RNA, 19 nt, Artificial Sequence
  Description of Artificial Sequence: Synthetic oligonucleotide
ggccgcgcguggagacuug

SEQ ID NO: 2579520 - RNA, 19 nt, Artificial Sequence
  Description of Artificial Sequence: Synthetic oligonucleotide
cggguucgucggccgcgcg

SEQ ID NO: 2579521 - RNA, 19 nt, Artificial Sequence
  Description of Artificial Sequence: Synthetic oligonucleotide
ggccgggcgucgggagccc

SEQ ID NO: 2579522 - RNA, 19 nt, Artificial Sequence
  Description of Artificial Sequence: Synthetic oligonucleotide
gucggggcgcugggguggu

SEQ ID NO: 2579523 - RNA, 19 nt, Artificial Sequence
  Description of Artificial Sequence: Synthetic oligonucleotide
ccgcgucgacgcugcucac

SEQ ID NO: 2579524 - RNA, 19 nt, Artificial Sequence
  Description of Artificial Sequence: Synthetic oligonucleotide
ccggggccccgacgagccc

SEQ ID NO: 2579525 - RNA, 19 nt, Artificial Sequence
  Description of Artificial Sequence: Synthetic oligonucleotide
gggcgggccguguccgcgu

SEQ ID NO: 2579526 - RNA, 19 nt, Artificial Sequence
  Description of Artificial Sequence: Synthetic oligonucleotide
cgcugucguuguugggaaa

SEQ ID NO: 2579527 - RNA, 19 nt, Artificial Sequence
  Description of Artificial Sequence: Synthetic oligonucleotide
gcaaagggacugggucuuu

SEQ ID NO: 2579528 - RNA, 19 nt, Artificial Sequence
  Description of Artificial Sequence: Synthetic oligonucleotide
ggccugcgggccgggcguc

SEQ ID NO: 2579529 - RNA, 19 nt, Artificial Sequence
  Description of Artificial Sequence: Synthetic oligonucleotide
ggggaggcgucggggcgcu

SEQ ID NO: 2579530 - RNA, 19 nt, Artificial Sequence
  Description of Artificial Sequence: Synthetic oligonucleotide
cgggccguguccgcgucga

SEQ ID NO: 2579531 - RNA, 19 nt, Artificial Sequence
  Description of Artificial Sequence: Synthetic oligonucleotide
cccucuucuuggggugcaa

SEQ ID NO: 2579532 - RNA, 19 nt, Artificial Sequence
  Description of Artificial Sequence: Synthetic oligonucleotide
ccuccgggguggcccugga

SEQ ID NO: 2579533 - RNA, 19 nt, Artificial Sequence
  Description of Artificial Sequence: Synthetic oligonucleotide
ccuggacgcucaacucguu

SEQ ID NO: 2579534 - RNA, 19 nt, Artificial Sequence
  Description of Artificial Sequence: Synthetic oligonucleotide
gggcgucgggagcccgggu

SEQ ID NO: 2579535 - RNA, 19 nt, Artificial Sequence
  Description of Artificial Sequence: Synthetic oligonucleotide
gcccagccucgggugccuc

SEQ ID NO: 2579536 - RNA, 19 nt, Artificial Sequence
  Description of Artificial Sequence: Synthetic oligonucleotide
gggaggcgucggggcgcug

SEQ ID NO: 2579537 - RNA, 19 nt, Artificial Sequence
  Description of Artificial Sequence: Synthetic oligonucleotide
cgucggccgcgcguggaga

SEQ ID NO: 2579538 - RNA, 19 nt, Artificial Sequence
  Description of Artificial Sequence: Synthetic oligonucleotide
ccccguggaaggagaccau

SEQ ID NO: 2579539 - RNA, 19 nt, Artificial Sequence
  Description of Artificial Sequence: Synthetic oligonucleotide
cccgacgagcccgcugccu

SEQ ID NO: 2579540 - RNA, 19 nt, Artificial Sequence
  Description of Artificial Sequence: Synthetic oligonucleotide
cggggucuccagcgcaggu

SEQ ID NO: 2579541 - RNA, 19 nt, Artificial Sequence
  Description of Artificial Sequence: Synthetic oligonucleotide
cccgcagcgggcgggccgu

SEQ ID NO: 2579542 - RNA, 19 nt, Artificial Sequence
  Description of Artificial Sequence: Synthetic oligonucleotide
ccguguccgcgucgacgcu

SEQ ID NO: 2579543 - RNA, 19 nt, Artificial Sequence
  Description of Artificial Sequence: Synthetic oligonucleotide
ccccuccgggguggcccug

SEQ ID NO: 2579544 - RNA, 19 nt, Artificial Sequence
  Description of Artificial Sequence: Synthetic oligonucleotide
gggccccgacgagcccgcu

SEQ ID NO: 2579545 - RNA, 19 nt, Artificial Sequence
  Description of Artificial Sequence: Synthetic oligonucleotide
cggccgcgcguggagacuu

SEQ ID NO: 2579546 - RNA, 19 nt, Artificial Sequence
  Description of Artificial Sequence: Synthetic oligonucleotide
cgcagcgggcgggccgugu

SEQ ID NO: 2579547 - RNA, 19 nt, Artificial Sequence
  Description of Artificial Sequence: Synthetic oligonucleotide
aaccauuuguguuuggucc

SEQ ID NO: 2579548 - RNA, 19 nt, Artificial Sequence
  Description of Artificial Sequence: Synthetic oligonucleotide
aaaagaauuagaguugccc

SEQ ID NO: 2579549 - RNA, 19 nt, Artificial Sequence
  Description of Artificial Sequence: Synthetic oligonucleotide
aauagcucgaaggagacgc

SEQ ID NO: 2579550 - RNA, 19 nt, Artificial Sequence
  Description of Artificial Sequence: Synthetic oligonucleotide
uuugucugcaaauagcucg

SEQ ID NO: 2579551 - RNA, 19 nt, Artificial Sequence
  Description of Artificial Sequence: Synthetic oligonucleotide
gaaaauauggaacccaaag

SEQ ID NO: 2579552 - RNA, 19 nt, Artificial Sequence
  Description of Artificial Sequence: Synthetic oligonucleotide
ucugcaaauagcucgaagg

SEQ ID NO: 2579553 - RNA, 19 nt, Artificial Sequence
  Description of Artificial Sequence: Synthetic oligonucleotide
aaauauggaacccaaagaa

SEQ ID NO: 2579554 - RNA, 19 nt, Artificial Sequence
  Description of Artificial Sequence: Synthetic oligonucleotide
aggaggaacccuuauaucc

SEQ ID NO: 2579555 - RNA, 19 nt, Artificial Sequence
  Description of Artificial Sequence: Synthetic oligonucleotide
auuagaguugcccacaguc

SEQ ID NO: 2579556 - RNA, 19 nt, Artificial Sequence
  Description of Artificial Sequence: Synthetic oligonucleotide
aaacuuaacucugccaucc

SEQ ID NO: 2579557 - RNA, 19 nt, Artificial Sequence
  Description of Artificial Sequence: Synthetic oligonucleotide
aagaauuagaguugcccac

SEQ ID NO: 2579558 - RNA, 19 nt, Artificial Sequence
  Description of Artificial Sequence: Synthetic oligonucleotide
aaagaauuagaguugccca

SEQ ID NO: 2579559 - RNA, 19 nt, Artificial Sequence
  Description of Artificial Sequence: Synthetic oligonucleotide
agucaaaagaauuagaguu

SEQ ID NO: 2579560 - RNA, 19 nt, Artificial Sequence
  Description of Artificial Sequence: Synthetic oligonucleotide
caagucaaaagaauuagag

SEQ ID NO: 2579561 - RNA, 19 nt, Artificial Sequence
  Description of Artificial Sequence: Synthetic oligonucleotide
uucaccuucccaaagacca

SEQ ID NO: 2579562 - RNA, 19 nt, Artificial Sequence
  Description of Artificial Sequence: Synthetic oligonucleotide
agggcauucgagcagaugg

SEQ ID NO: 2579563 - RNA, 19 nt, Artificial Sequence
  Description of Artificial Sequence: Synthetic oligonucleotide
aauguucaugccuucuuuc

SEQ ID NO: 2579564 - RNA, 19 nt, Artificial Sequence
  Description of Artificial Sequence: Synthetic oligonucleotide
aaaggaggaacccuuauau

SEQ ID NO: 2579565 - RNA, 19 nt, Artificial Sequence
  Description of Artificial Sequence: Synthetic oligonucleotide
uccagcuagacuuggaggg

SEQ ID NO: 2579566 - RNA, 19 nt, Artificial Sequence
  Description of Artificial Sequence: Synthetic oligonucleotide
aagucaaaagaauuagagu

SEQ ID NO: 2579567 - RNA, 19 nt, Artificial Sequence
  Description of Artificial Sequence: Synthetic oligonucleotide
aacuuugucugcaaauagc

SEQ ID NO: 2579568 - RNA, 19 nt, Artificial Sequence
  Description of Artificial Sequence: Synthetic oligonucleotide
uuagaguugcccacagucg

SEQ ID NO: 2579569 - RNA, 19 nt, Artificial Sequence
  Description of Artificial Sequence: Synthetic oligonucleotide
ucuccugagcuacacaagg

SEQ ID NO: 2579570 - RNA, 19 nt, Artificial Sequence
  Description of Artificial Sequence: Synthetic oligonucleotide
gaugccaggaccuguaugc

SEQ ID NO: 2579571 - RNA, 19 nt, Artificial Sequence
  Description of Artificial Sequence: Synthetic oligonucleotide
gaagucaccacccuggcac

SEQ ID NO: 2579572 - RNA, 19 nt, Artificial Sequence
  Description of Artificial Sequence: Synthetic oligonucleotide
gauuacagggcauucgagc

SEQ ID NO: 2579573 - RNA, 19 nt, Artificial Sequence
  Description of Artificial Sequence: Synthetic oligonucleotide
acaaggaauggucugguag

SEQ ID NO: 2579574 - RNA, 19 nt, Artificial Sequence
  Description of Artificial Sequence: Synthetic oligonucleotide
uagaguugcccacagucgg

SEQ ID NO: 2579575 - RNA, 19 nt, Artificial Sequence
  Description of Artificial Sequence: Synthetic oligonucleotide
ucaaaagaauuagaguugc

SEQ ID NO: 2579576 - RNA, 19 nt, Artificial Sequence
  Description of Artificial Sequence: Synthetic oligonucleotide
ugggauaauucugugaaag

SEQ ID NO: 2579577 - RNA, 19 nt, Artificial Sequence
  Description of Artificial Sequence: Synthetic oligonucleotide
ugucgaagaacacgguggg

SEQ ID NO: 2579578 - RNA, 19 nt, Artificial Sequence
  Description of Artificial Sequence: Synthetic oligonucleotide
auaauucugugaaaggagg

SEQ ID NO: 2579579 - RNA, 19 nt, Artificial Sequence
  Description of Artificial Sequence: Synthetic oligonucleotide
cuuauauccaaauccuuuc

SEQ ID NO: 2579580 - RNA, 19 nt, Artificial Sequence
  Description of Artificial Sequence: Synthetic oligonucleotide
accuguaugcuucaggaug

SEQ ID NO: 2579581 - RNA, 19 nt, Artificial Sequence
  Description of Artificial Sequence: Synthetic oligonucleotide
cuuaacucugccauccagc

SEQ ID NO: 2579582 - RNA, 19 nt, Artificial Sequence
  Description of Artificial Sequence: Synthetic oligonucleotide
aaggaggaacccuuauauc

SEQ ID NO: 2579583 - RNA, 19 nt, Artificial Sequence
  Description of Artificial Sequence: Synthetic oligonucleotide
auuacagggcauucgagca

SEQ ID NO: 2579584 - RNA, 19 nt, Artificial Sequence
  Description of Artificial Sequence: Synthetic oligonucleotide
uuauauccaaauccuuucu

SEQ ID NO: 2579585 - RNA, 19 nt, Artificial Sequence
  Description of Artificial Sequence: Synthetic oligonucleotide
gggaaugaggaaaauaugg

SEQ ID NO: 2579586 - RNA, 19 nt, Artificial Sequence
  Description of Artificial Sequence: Synthetic oligonucleotide
uucucauccucaaauuucu

SEQ ID NO: 2579587 - RNA, 19 nt, Artificial Sequence
  Description of Artificial Sequence: Synthetic oligonucleotide
gaugucgaagaacacggug

SEQ ID NO: 2579588 - RNA, 19 nt, Artificial Sequence
  Description of Artificial Sequence: Synthetic oligonucleotide
ugagagcagagauuacagg

SEQ ID NO: 2579589 - RNA, 19 nt, Artificial Sequence
  Description of Artificial Sequence: Synthetic oligonucleotide
ugagcuacacaaggaaugg

SEQ ID NO: 2579590 - RNA, 19 nt, Artificial Sequence
  Description of Artificial Sequence: Synthetic oligonucleotide
ucggaaauggugaucuucu

SEQ ID NO: 2579591 - RNA, 19 nt, Artificial Sequence
  Description of Artificial Sequence: Synthetic oligonucleotide
auuccuggacccgaaacgc

SEQ ID NO: 2579592 - RNA, 19 nt, Artificial Sequence
  Description of Artificial Sequence: Synthetic oligonucleotide
cugagcuacacaaggaaug

SEQ ID NO: 2579593 - RNA, 19 nt, Artificial Sequence
  Description of Artificial Sequence: Synthetic oligonucleotide
uuaacucugccauccagcu

SEQ ID NO: 2579594 - RNA, 19 nt, Artificial Sequence
  Description of Artificial Sequence: Synthetic oligonucleotide
cauuccuggacccgaaacg

SEQ ID NO: 2579595 - RNA, 19 nt, Artificial Sequence
  Description of Artificial Sequence: Synthetic oligonucleotide
agagcagagauuacagggc

SEQ ID NO: 2579596 - RNA, 19 nt, Artificial Sequence
  Description of Artificial Sequence: Synthetic oligonucleotide
uaagaagcccgcaagucaa

SEQ ID NO: 2579597 - RNA, 19 nt, Artificial Sequence
  Description of Artificial Sequence: Synthetic oligonucleotide
gcuuccacaauguucaugc

SEQ ID NO: 2579598 - RNA, 19 nt, Artificial Sequence
  Description of Artificial Sequence: Synthetic oligonucleotide
ucagugagagcagagauua

SEQ ID NO: 2579599 - RNA, 19 nt, Artificial Sequence
  Description of Artificial Sequence: Synthetic oligonucleotide
auggacaagaugccaggac

SEQ ID NO: 2579600 - RNA, 19 nt, Artificial Sequence
  Description of Artificial Sequence: Synthetic oligonucleotide
cugguagguaagaagcccg

SEQ ID NO: 2579601 - RNA, 19 nt, Artificial Sequence
  Description of Artificial Sequence: Synthetic oligonucleotide
uuccacaauguucaugccu

SEQ ID NO: 2579602 - RNA, 19 nt, Artificial Sequence
  Description of Artificial Sequence: Synthetic oligonucleotide
agccacucagucuuggcgg

SEQ ID NO: 2579603 - RNA, 19 nt, Artificial Sequence
  Description of Artificial Sequence: Synthetic oligonucleotide
ugcaaauagcucgaaggag

SEQ ID NO: 2579604 - RNA, 19 nt, Artificial Sequence
  Description of Artificial Sequence: Synthetic oligonucleotide
uuguguuugguccagcauu

SEQ ID NO: 2579605 - RNA, 19 nt, Artificial Sequence
  Description of Artificial Sequence: Synthetic oligonucleotide
augucgaagaacacggugg

SEQ ID NO: 2579606 - RNA, 19 nt, Artificial Sequence
  Description of Artificial Sequence: Synthetic oligonucleotide
aaauuucucuccguagaug

SEQ ID NO: 2579607 - RNA, 19 nt, Artificial Sequence
  Description of Artificial Sequence: Synthetic oligonucleotide
aaggagacgcggcccaagg

SEQ ID NO: 2579608 - RNA, 19 nt, Artificial Sequence
  Description of Artificial Sequence: Synthetic oligonucleotide
uuugguccagcauuugcca

SEQ ID NO: 2579609 - RNA, 19 nt, Artificial Sequence
  Description of Artificial Sequence: Synthetic oligonucleotide
uccacaauguucaugccuu

SEQ ID NO: 2579610 - RNA, 19 nt, Artificial Sequence
  Description of Artificial Sequence: Synthetic oligonucleotide
auccagcuagacuuggagg

SEQ ID NO: 2579611 - RNA, 19 nt, Artificial Sequence
  Description of Artificial Sequence: Synthetic oligonucleotide
ugugaaaggaggaacccuu

SEQ ID NO: 2579612 - RNA, 19 nt, Artificial Sequence
  Description of Artificial Sequence: Synthetic oligonucleotide
caaucauaaacuuaacucu

SEQ ID NO: 2579613 - RNA, 19 nt, Artificial Sequence
  Description of Artificial Sequence: Synthetic oligonucleotide
uuucaccuucccaaagacc

SEQ ID NO: 2579614 - RNA, 19 nt, Artificial Sequence
  Description of Artificial Sequence: Synthetic oligonucleotide
uggucugguagguaagaag

SEQ ID NO: 2579615 - RNA, 19 nt, Artificial Sequence
  Description of Artificial Sequence: Synthetic oligonucleotide
gaauuagaguugcccacag

SEQ ID NO: 2579616 - RNA, 19 nt, Artificial Sequence
  Description of Artificial Sequence: Synthetic oligonucleotide
aacugggaaccauuugugu

SEQ ID NO: 2579617 - RNA, 19 nt, Artificial Sequence
  Description of Artificial Sequence: Synthetic oligonucleotide
auccucaaauuucucuccg

SEQ ID NO: 2579618 - RNA, 19 nt, Artificial Sequence
  Description of Artificial Sequence: Synthetic oligonucleotide
gagcucgaaaguuuucugc

SEQ ID NO: 2579619 - RNA, 19 nt, Artificial Sequence
  Description of Artificial Sequence: Synthetic oligonucleotide
aauccugggauaauucugu

SEQ ID NO: 2579620 - RNA, 19 nt, Artificial Sequence
  Description of Artificial Sequence: Synthetic oligonucleotide
gucaaaagaauuagaguug

SEQ ID NO: 2579621 - RNA, 19 nt, Artificial Sequence
  Description of Artificial Sequence: Synthetic oligonucleotide
aauuucagugagagcagag

SEQ ID NO: 2579622 - RNA, 19 nt, Artificial Sequence
  Description of Artificial Sequence: Synthetic oligonucleotide
uccagcauuugccauggac

SEQ ID NO: 2579623 - RNA, 19 nt, Artificial Sequence
  Description of Artificial Sequence: Synthetic oligonucleotide
gacccgaaacgcuccaugg

SEQ ID NO: 2579624 - RNA, 19 nt, Artificial Sequence
  Description of Artificial Sequence: Synthetic oligonucleotide
agagauuacagggcauucg

SEQ ID NO: 2579625 - RNA, 19 nt, Artificial Sequence
  Description of Artificial Sequence: Synthetic oligonucleotide
ucugccauccagcuagacu

SEQ ID NO: 2579626 - RNA, 19 nt, Artificial Sequence
  Description of Artificial Sequence: Synthetic oligonucleotide
ucugguagguaagaagccc

SEQ ID NO: 2579627 - RNA, 19 nt, Artificial Sequence
  Description of Artificial Sequence: Synthetic oligonucleotide
acuuaacucugccauccag

SEQ ID NO: 2579628 - RNA, 19 nt, Artificial Sequence
  Description of Artificial Sequence: Synthetic oligonucleotide
auuucacaaucauaaacuu

SEQ ID NO: 2579629 - RNA, 19 nt, Artificial Sequence
  Description of Artificial Sequence: Synthetic oligonucleotide
aauucugugaaaggaggaa

SEQ ID NO: 2579630 - RNA, 19 nt, Artificial Sequence
  Description of Artificial Sequence: Synthetic oligonucleotide
gagauuacagggcauucga

SEQ ID NO: 2579631 - RNA, 19 nt, Artificial Sequence
  Description of Artificial Sequence: Synthetic oligonucleotide
ucgaagaacacgguggggu

SEQ ID NO: 2579632 - RNA, 19 nt, Artificial Sequence
  Description of Artificial Sequence: Synthetic oligonucleotide
uuacagggcauucgagcag

SEQ ID NO: 2579633 - RNA, 19 nt, Artificial Sequence
  Description of Artificial Sequence: Synthetic oligonucleotide
agcucgaaaguuuucugcu

SEQ ID NO: 2579634 - RNA, 19 nt, Artificial Sequence
  Description of Artificial Sequence: Synthetic oligonucleotide
uaugcuucaggaugaaguu

SEQ ID NO: 2579635 - RNA, 19 nt, Artificial Sequence
  Description of Artificial Sequence: Synthetic oligonucleotide
caaauagcucgaaggagac

SEQ ID NO: 2579636 - RNA, 19 nt, Artificial Sequence
  Description of Artificial Sequence: Synthetic oligonucleotide
cauccucaaauuucucucc

SEQ ID NO: 2579637 - RNA, 19 nt, Artificial Sequence
  Description of Artificial Sequence: Synthetic oligonucleotide
acuuugucugcaaauagcu

SEQ ID NO: 2579638 - RNA, 19 nt, Artificial Sequence
  Description of Artificial Sequence: Synthetic oligonucleotide
aaauagcucgaaggagacg

SEQ ID NO: 2579639 - RNA, 19 nt, Artificial Sequence
  Description of Artificial Sequence: Synthetic oligonucleotide
uugucugcaaauagcucga

SEQ ID NO: 2579640 - RNA, 19 nt, Artificial Sequence
  Description of Artificial Sequence: Synthetic oligonucleotide
gaauccugggauaauucug

SEQ ID NO: 2579641 - RNA, 19 nt, Artificial Sequence
  Description of Artificial Sequence: Synthetic oligonucleotide
gaaccauuuguguuugguc

SEQ ID NO: 2579642 - RNA, 19 nt, Artificial Sequence
  Description of Artificial Sequence: Synthetic oligonucleotide
acccaaagaauuucaguga

SEQ ID NO: 2579643 - RNA, 19 nt, Artificial Sequence
  Description of Artificial Sequence: Synthetic oligonucleotide
gaggcgacaggggacagcg

SEQ ID NO: 2579644 - RNA, 19 nt, Artificial Sequence
  Description of Artificial Sequence: Synthetic oligonucleotide
aauuagaguugcccacagu

SEQ ID NO: 2579645 - RNA, 19 nt, Artificial Sequence
  Description of Artificial Sequence: Synthetic oligonucleotide
ucugugaaaggaggaaccc

SEQ ID NO: 2579646 - RNA, 19 nt, Artificial Sequence
  Description of Artificial Sequence: Synthetic oligonucleotide
cacccuggcacaugaaucc

SEQ ID NO: 2579647 - RNA, 19 nt, Artificial Sequence
  Description of Artificial Sequence: Synthetic oligonucleotide
acccgaaacgcuccauggc

SEQ ID NO: 2579648 - RNA, 19 nt, Artificial Sequence
  Description of Artificial Sequence: Synthetic oligonucleotide
agugagagcagagauuaca

SEQ ID NO: 2579649 - RNA, 19 nt, Artificial Sequence
  Description of Artificial Sequence: Synthetic oligonucleotide
caugccuucuuucaccuuc

SEQ ID NO: 2579650 - RNA, 19 nt, Artificial Sequence
  Description of Artificial Sequence: Synthetic oligonucleotide
guuugguccagcauuugcc

SEQ ID NO: 2579651 - RNA, 19 nt, Artificial Sequence
  Description of Artificial Sequence: Synthetic oligonucleotide
aggaccuguaugcuucagg

SEQ ID NO: 2579652 - RNA, 19 nt, Artificial Sequence
  Description of Artificial Sequence: Synthetic oligonucleotide
caaaagaauuagaguugcc

SEQ ID NO: 2579653 - RNA, 19 nt, Artificial Sequence
  Description of Artificial Sequence: Synthetic oligonucleotide
uuuugccauuccuggaccc

SEQ ID NO: 2579654 - RNA, 19 nt, Artificial Sequence
  Description of Artificial Sequence: Synthetic oligonucleotide
gaagcccgcaagucaaaag

SEQ ID NO: 2579655 - RNA, 19 nt, Artificial Sequence
  Description of Artificial Sequence: Synthetic oligonucleotide
uggaccugccgccagugcc

SEQ ID NO: 2579656 - RNA, 19 nt, Artificial Sequence
  Description of Artificial Sequence: Synthetic oligonucleotide
uucucuccguagauggacc

SEQ ID NO: 2579657 - RNA, 19 nt, Artificial Sequence
  Description of Artificial Sequence: Synthetic oligonucleotide
ggucugguagguaagaagc

SEQ ID NO: 2579658 - RNA, 19 nt, Artificial Sequence
  Description of Artificial Sequence: Synthetic oligonucleotide
uggaacuuugucugcaaau

SEQ ID NO: 2579659 - RNA, 19 nt, Artificial Sequence
  Description of Artificial Sequence: Synthetic oligonucleotide
gggauaauucugugaaagg

SEQ ID NO: 2579660 - RNA, 19 nt, Artificial Sequence
  Description of Artificial Sequence: Synthetic oligonucleotide
uuuguguuugguccagcau

SEQ ID NO: 2579661 - RNA, 19 nt, Artificial Sequence
  Description of Artificial Sequence: Synthetic oligonucleotide
aagggcucgccgucggccg

SEQ ID NO: 2579662 - RNA, 19 nt, Artificial Sequence
  Description of Artificial Sequence: Synthetic oligonucleotide
auuauggcgugugaaguca

SEQ ID NO: 2579663 - RNA, 19 nt, Artificial Sequence
  Description of Artificial Sequence: Synthetic oligonucleotide
aacgcuccauggcuuccac

SEQ ID NO: 2579664 - RNA, 19 nt, Artificial Sequence
  Description of Artificial Sequence: Synthetic oligonucleotide
cugucuuuggaacuuuguc

SEQ ID NO: 2579665 - RNA, 19 nt, Artificial Sequence
  Description of Artificial Sequence: Synthetic oligonucleotide
agagcucgaaaguuuucug

SEQ ID NO: 2579666 - RNA, 19 nt, Artificial Sequence
  Description of Artificial Sequence: Synthetic oligonucleotide
augaauccugggauaauuc

SEQ ID NO: 2579667 - RNA, 19 nt, Artificial Sequence
  Description of Artificial Sequence: Synthetic oligonucleotide
uuucucuccguagauggac

SEQ ID NO: 2579668 - RNA, 19 nt, Artificial Sequence
  Description of Artificial Sequence: Synthetic oligonucleotide
gacuuggaggggaaugagg

SEQ ID NO: 2579669 - RNA, 19 nt, Artificial Sequence
  Description of Artificial Sequence: Synthetic oligonucleotide
acuuggaggggaaugagga

SEQ ID NO: 2579670 - RNA, 19 nt, Artificial Sequence
  Description of Artificial Sequence: Synthetic oligonucleotide
ucggccgagaugucgaaga

SEQ ID NO: 2579671 - RNA, 19 nt, Artificial Sequence
  Description of Artificial Sequence: Synthetic oligonucleotide
ugguagguaagaagcccgc

SEQ ID NO: 2579672 - RNA, 19 nt, Artificial Sequence
  Description of Artificial Sequence: Synthetic oligonucleotide
gugagagcagagauuacag

SEQ ID NO: 2579673 - RNA, 19 nt, Artificial Sequence
  Description of Artificial Sequence: Synthetic oligonucleotide
cauuauggcgugugaaguc

SEQ ID NO: 2579674 - RNA, 19 nt, Artificial Sequence
  Description of Artificial Sequence: Synthetic oligonucleotide
ucacaaucauaaacuuaac

SEQ ID NO: 2579675 - RNA, 19 nt, Artificial Sequence
  Description of Artificial Sequence: Synthetic oligonucleotide
aauggucugguagguaaga

SEQ ID NO: 2579676 - RNA, 19 nt, Artificial Sequence
  Description of Artificial Sequence: Synthetic oligonucleotide
ugaaaggaggaacccuuau

SEQ ID NO: 2579677 - RNA, 19 nt, Artificial Sequence
  Description of Artificial Sequence: Synthetic oligonucleotide
gugggguugaccauggcug

SEQ ID NO: 2579678 - RNA, 19 nt, Artificial Sequence
  Description of Artificial Sequence: Synthetic oligonucleotide
ucuccguagauggaccugc

SEQ ID NO: 2579679 - RNA, 19 nt, Artificial Sequence
  Description of Artificial Sequence: Synthetic oligonucleotide
gaggaaaauauggaaccca

SEQ ID NO: 2579680 - RNA, 19 nt, Artificial Sequence
  Description of Artificial Sequence: Synthetic oligonucleotide
accauuuguguuuggucca

SEQ ID NO: 2579681 - RNA, 19 nt, Artificial Sequence
  Description of Artificial Sequence: Synthetic oligonucleotide
ugggaaugcucuccugagc

SEQ ID NO: 2579682 - RNA, 19 nt, Artificial Sequence
  Description of Artificial Sequence: Synthetic oligonucleotide
uagacuuggaggggaauga

SEQ ID NO: 2579683 - RNA, 19 nt, Artificial Sequence
  Description of Artificial Sequence: Synthetic oligonucleotide
ugaaguucucauccucaaa

SEQ ID NO: 2579684 - RNA, 19 nt, Artificial Sequence
  Description of Artificial Sequence: Synthetic oligonucleotide
cagccacucagucuuggcg

SEQ ID NO: 2579685 - RNA, 19 nt, Artificial Sequence
  Description of Artificial Sequence: Synthetic oligonucleotide
uucagugagagcagagauu

SEQ ID NO: 2579686 - RNA, 19 nt, Artificial Sequence
  Description of Artificial Sequence: Synthetic oligonucleotide
ugguccagcauuugccaug

SEQ ID NO: 2579687 - RNA, 19 nt, Artificial Sequence
  Description of Artificial Sequence: Synthetic oligonucleotide
cuuugucugcaaauagcuc

SEQ ID NO: 2579688 - RNA, 19 nt, Artificial Sequence
  Description of Artificial Sequence: Synthetic oligonucleotide
auucgagcagauggggugg

SEQ ID NO: 2579689 - RNA, 19 nt, Artificial Sequence
  Description of Artificial Sequence: Synthetic oligonucleotide
auuugccauggacaagaug

SEQ ID NO: 2579690 - RNA, 19 nt, Artificial Sequence
  Description of Artificial Sequence: Synthetic oligonucleotide
agaauuagaguugcccaca

SEQ ID NO: 2579691 - RNA, 19 nt, Artificial Sequence
  Description of Artificial Sequence: Synthetic oligonucleotide
ucagucuuggcggugcaga

SEQ ID NO: 2579692 - RNA, 19 nt, Artificial Sequence
  Description of Artificial Sequence: Synthetic oligonucleotide
aacuuaacucugccaucca

SEQ ID NO: 2579693 - RNA, 19 nt, Artificial Sequence
  Description of Artificial Sequence: Synthetic oligonucleotide
agguaagaagcccgcaagu

SEQ ID NO: 2579694 - RNA, 19 nt, Artificial Sequence
  Description of Artificial Sequence: Synthetic oligonucleotide
agaauuucagugagagcag

SEQ ID NO: 2579695 - RNA, 19 nt, Artificial Sequence
  Description of Artificial Sequence: Synthetic oligonucleotide
guucucauccucaaauuuc

SEQ ID NO: 2579696 - RNA, 19 nt, Artificial Sequence
  Description of Artificial Sequence: Synthetic oligonucleotide
uuuggaacuuugucugcaa

SEQ ID NO: 2579697 - RNA, 19 nt, Artificial Sequence
  Description of Artificial Sequence: Synthetic oligonucleotide
uucuugcugguuuugccau

SEQ ID NO: 2579698 - RNA, 19 nt, Artificial Sequence
  Description of Artificial Sequence: Synthetic oligonucleotide
cuagacuuggaggggaaug

SEQ ID NO: 2579699 - RNA, 19 nt, Artificial Sequence
  Description of Artificial Sequence: Synthetic oligonucleotide
uuggaacuuugucugcaaa

SEQ ID NO: 2579700 - RNA, 19 nt, Artificial Sequence
  Description of Artificial Sequence: Synthetic oligonucleotide
aagaacacggugggguuga

SEQ ID NO: 2579701 - RNA, 19 nt, Artificial Sequence
  Description of Artificial Sequence: Synthetic oligonucleotide
uguaugcuucaggaugaag

SEQ ID NO: 2579702 - RNA, 19 nt, Artificial Sequence
  Description of Artificial Sequence: Synthetic oligonucleotide
gguuuugccauuccuggac

SEQ ID NO: 2579703 - RNA, 19 nt, Artificial Sequence
  Description of Artificial Sequence: Synthetic oligonucleotide
cugcaaauagcucgaagga

SEQ ID NO: 2579704 - RNA, 19 nt, Artificial Sequence
  Description of Artificial Sequence: Synthetic oligonucleotide
agugccauuauggcgugug

SEQ ID NO: 2579705 - RNA, 19 nt, Artificial Sequence
  Description of Artificial Sequence: Synthetic oligonucleotide
agaugccaggaccuguaug

SEQ ID NO: 2579706 - RNA, 19 nt, Artificial Sequence
  Description of Artificial Sequence: Synthetic oligonucleotide
gucugcaaauagcucgaag

SEQ ID NO: 2579707 - RNA, 19 nt, Artificial Sequence
  Description of Artificial Sequence: Synthetic oligonucleotide
cuucuugcugguuuugcca

SEQ ID NO: 2579708 - RNA, 19 nt, Artificial Sequence
  Description of Artificial Sequence: Synthetic oligonucleotide
gaaaggaggaacccuuaua

SEQ ID NO: 2579709 - RNA, 19 nt, Artificial Sequence
  Description of Artificial Sequence: Synthetic oligonucleotide
acccuuauauccaaauccu

SEQ ID NO: 2579710 - RNA, 19 nt, Artificial Sequence
  Description of Artificial Sequence: Synthetic oligonucleotide
uugaccauggcugcaggaa

SEQ ID NO: 2579711 - RNA, 19 nt, Artificial Sequence
  Description of Artificial Sequence: Synthetic oligonucleotide
ucgccgucggccgagaugu

SEQ ID NO: 2579712 - RNA, 19 nt, Artificial Sequence
  Description of Artificial Sequence: Synthetic oligonucleotide
uagauggaccugccgccag

SEQ ID NO: 2579713 - RNA, 19 nt, Artificial Sequence
  Description of Artificial Sequence: Synthetic oligonucleotide
gccauuauggcgugugaag

SEQ ID NO: 2579714 - RNA, 19 nt, Artificial Sequence
  Description of Artificial Sequence: Synthetic oligonucleotide
gucuuggcggugcagauaa

SEQ ID NO: 2579715 - RNA, 19 nt, Artificial Sequence
  Description of Artificial Sequence: Synthetic oligonucleotide
gaagaacacggugggguug

SEQ ID NO: 2579716 - RNA, 19 nt, Artificial Sequence
  Description of Artificial Sequence: Synthetic oligonucleotide
uccuggacccgaaacgcuc

SEQ ID NO: 2579717 - RNA, 19 nt, Artificial Sequence
  Description of Artificial Sequence: Synthetic oligonucleotide
ggaaugaggaaaauaugga

SEQ ID NO: 2579718 - RNA, 19 nt, Artificial Sequence
  Description of Artificial Sequence: Synthetic oligonucleotide
ggaccuguaugcuucagga

SEQ ID NO: 2579719 - RNA, 19 nt, Artificial Sequence
  Description of Artificial Sequence: Synthetic oligonucleotide
guagguaagaagcccgcaa

SEQ ID NO: 2579720 - RNA, 19 nt, Artificial Sequence
  Description of Artificial Sequence: Synthetic oligonucleotide
aagucaccacccuggcaca

SEQ ID NO: 2579721 - RNA, 19 nt, Artificial Sequence
  Description of Artificial Sequence: Synthetic oligonucleotide
ggaauggucugguagguaa

SEQ ID NO: 2579722 - RNA, 19 nt, Artificial Sequence
  Description of Artificial Sequence: Synthetic oligonucleotide
gaauuucagugagagcaga

SEQ ID NO: 2579723 - RNA, 19 nt, Artificial Sequence
  Description of Artificial Sequence: Synthetic oligonucleotide
cacaaucauaaacuuaacu

SEQ ID NO: 2579724 - RNA, 19 nt, Artificial Sequence
  Description of Artificial Sequence: Synthetic oligonucleotide
ucucuccguagauggaccu

SEQ ID NO: 2579725 - RNA, 19 nt, Artificial Sequence
  Description of Artificial Sequence: Synthetic oligonucleotide
ucagagcucgaaaguuuuc

SEQ ID NO: 2579726 - RNA, 19 nt, Artificial Sequence
  Description of Artificial Sequence: Synthetic oligonucleotide
gcaaauagcucgaaggaga

SEQ ID NO: 2579727 - RNA, 19 nt, Artificial Sequence
  Description of Artificial Sequence: Synthetic oligonucleotide
agauuacagggcauucgag

SEQ ID NO: 2579728 - RNA, 19 nt, Artificial Sequence
  Description of Artificial Sequence: Synthetic oligonucleotide
ucgaaaguuuucugcuguc

SEQ ID NO: 2579729 - RNA, 19 nt, Artificial Sequence
  Description of Artificial Sequence: Synthetic oligonucleotide
auggaccugccgccagugc

SEQ ID NO: 2579730 - RNA, 19 nt, Artificial Sequence
  Description of Artificial Sequence: Synthetic oligonucleotide
acagucggaaauggugauc

SEQ ID NO: 2579731 - RNA, 19 nt, Artificial Sequence
  Description of Artificial Sequence: Synthetic oligonucleotide
gaagaggcgacaggggaca

SEQ ID NO: 2579732 - RNA, 19 nt, Artificial Sequence
  Description of Artificial Sequence: Synthetic oligonucleotide
ugggaaccauuuguguuug

SEQ ID NO: 2579733 - RNA, 19 nt, Artificial Sequence
  Description of Artificial Sequence: Synthetic oligonucleotide
agcagauggggugggaaug

SEQ ID NO: 2579734 - RNA, 19 nt, Artificial Sequence
  Description of Artificial Sequence: Synthetic oligonucleotide
ggcgugugaagucaccacc

SEQ ID NO: 2579735 - RNA, 19 nt, Artificial Sequence
  Description of Artificial Sequence: Synthetic oligonucleotide
aagaugccaggaccuguau

SEQ ID NO: 2579736 - RNA, 19 nt, Artificial Sequence
  Description of Artificial Sequence: Synthetic oligonucleotide
ucaccuucccaaagaccac

SEQ ID NO: 2579737 - RNA, 19 nt, Artificial Sequence
  Description of Artificial Sequence: Synthetic oligonucleotide
gacaagaugccaggaccug

SEQ ID NO: 2579738 - RNA, 19 nt, Artificial Sequence
  Description of Artificial Sequence: Synthetic oligonucleotide
uuccuggacccgaaacgcu

SEQ ID NO: 2579739 - RNA, 19 nt, Artificial Sequence
  Description of Artificial Sequence: Synthetic oligonucleotide
gucugguagguaagaagcc

SEQ ID NO: 2579740 - RNA, 19 nt, Artificial Sequence
  Description of Artificial Sequence: Synthetic oligonucleotide
cccacagucggaaauggug

SEQ ID NO: 2579741 - RNA, 19 nt, Artificial Sequence
  Description of Artificial Sequence: Synthetic oligonucleotide
ugccauccagcuagacuug

SEQ ID NO: 2579742 - RNA, 19 nt, Artificial Sequence
  Description of Artificial Sequence: Synthetic oligonucleotide
accacccuggcacaugaau

SEQ ID NO: 2579743 - RNA, 19 nt, Artificial Sequence
  Description of Artificial Sequence: Synthetic oligonucleotide
ugccauuauggcgugugaa

SEQ ID NO: 2579744 - RNA, 19 nt, Artificial Sequence
  Description of Artificial Sequence: Synthetic oligonucleotide
ccagcauuugccauggaca

SEQ ID NO: 2579745 - RNA, 19 nt, Artificial Sequence
  Description of Artificial Sequence: Synthetic oligonucleotide
auccugggauaauucugug

SEQ ID NO: 2579746 - RNA, 19 nt, Artificial Sequence
  Description of Artificial Sequence: Synthetic oligonucleotide
ggaacccaaagaauuucag

SEQ ID NO: 2579747 - RNA, 19 nt, Artificial Sequence
  Description of Artificial Sequence: Synthetic oligonucleotide
agacuuggaggggaaugag

SEQ ID NO: 2579748 - RNA, 19 nt, Artificial Sequence
  Description of Artificial Sequence: Synthetic oligonucleotide
gucggaaauggugaucuuc

SEQ ID NO: 2579749 - RNA, 19 nt, Artificial Sequence
  Description of Artificial Sequence: Synthetic oligonucleotide
ggcgacaggggacagcggc

SEQ ID NO: 2579750 - RNA, 19 nt, Artificial Sequence
  Description of Artificial Sequence: Synthetic oligonucleotide
uggcgugugaagucaccac

SEQ ID NO: 2579751 - RNA, 19 nt, Artificial Sequence
  Description of Artificial Sequence: Synthetic oligonucleotide
cagcauuugccauggacaa

SEQ ID NO: 2579752 - RNA, 19 nt, Artificial Sequence
  Description of Artificial Sequence: Synthetic oligonucleotide
cuugcugguuuugccauuc

SEQ ID NO: 2579753 - RNA, 19 nt, Artificial Sequence
  Description of Artificial Sequence: Synthetic oligonucleotide
ugcucuccugagcuacaca

SEQ ID NO: 2579754 - RNA, 19 nt, Artificial Sequence
  Description of Artificial Sequence: Synthetic oligonucleotide
aaacgcuccauggcuucca

SEQ ID NO: 2579755 - RNA, 19 nt, Artificial Sequence
  Description of Artificial Sequence: Synthetic oligonucleotide
uucgagcagaugggguggg

SEQ ID NO: 2579756 - RNA, 19 nt, Artificial Sequence
  Description of Artificial Sequence: Synthetic oligonucleotide
acaagaugccaggaccugu

SEQ ID NO: 2579757 - RNA, 19 nt, Artificial Sequence
  Description of Artificial Sequence: Synthetic oligonucleotide
ggugggaaugcucuccuga

SEQ ID NO: 2579758 - RNA, 19 nt, Artificial Sequence
  Description of Artificial Sequence: Synthetic oligonucleotide
gcugguuuugccauuccug

SEQ ID NO: 2579759 - RNA, 19 nt, Artificial Sequence
  Description of Artificial Sequence: Synthetic oligonucleotide
gaggaacccuuauauccaa

SEQ ID NO: 2579760 - RNA, 19 nt, Artificial Sequence
  Description of Artificial Sequence: Synthetic oligonucleotide
cucgaaggagacgcggccc

SEQ ID NO: 2579761 - RNA, 19 nt, Artificial Sequence
  Description of Artificial Sequence: Synthetic oligonucleotide
gauggaccugccgccagug

SEQ ID NO: 2579762 - RNA, 19 nt, Artificial Sequence
  Description of Artificial Sequence: Synthetic oligonucleotide
auagcucgaaggagacgcg

SEQ ID NO: 2579763 - RNA, 19 nt, Artificial Sequence
  Description of Artificial Sequence: Synthetic oligonucleotide
augcucuccugagcuacac

SEQ ID NO: 2579764 - RNA, 19 nt, Artificial Sequence
  Description of Artificial Sequence: Synthetic oligonucleotide
agcauuugccauggacaag

SEQ ID NO: 2579765 - RNA, 19 nt, Artificial Sequence
  Description of Artificial Sequence: Synthetic oligonucleotide
gguaagaagcccgcaaguc

SEQ ID NO: 2579766 - RNA, 19 nt, Artificial Sequence
  Description of Artificial Sequence: Synthetic oligonucleotide
cacucagucuuggcggugc

SEQ ID NO: 2579767 - RNA, 19 nt, Artificial Sequence
  Description of Artificial Sequence: Synthetic oligonucleotide
acacaaggaauggucuggu

SEQ ID NO: 2579768 - RNA, 19 nt, Artificial Sequence
  Description of Artificial Sequence: Synthetic oligonucleotide
gucgaagaacacggugggg

SEQ ID NO: 2579769 - RNA, 19 nt, Artificial Sequence
  Description of Artificial Sequence: Synthetic oligonucleotide
aaugcucuccugagcuaca

SEQ ID NO: 2579770 - RNA, 19 nt, Artificial Sequence
  Description of Artificial Sequence: Synthetic oligonucleotide
gccauggacaagaugccag

SEQ ID NO: 2579771 - RNA, 19 nt, Artificial Sequence
  Description of Artificial Sequence: Synthetic oligonucleotide
gcucgaaaguuuucugcug

SEQ ID NO: 2579772 - RNA, 19 nt, Artificial Sequence
  Description of Artificial Sequence: Synthetic oligonucleotide
ggggaaugaggaaaauaug

SEQ ID NO: 2579773 - RNA, 19 nt, Artificial Sequence
  Description of Artificial Sequence: Synthetic oligonucleotide
cucgaaaguuuucugcugu

SEQ ID NO: 2579774 - RNA, 19 nt, Artificial Sequence
  Description of Artificial Sequence: Synthetic oligonucleotide
gaggggaaugaggaaaaua

SEQ ID NO: 2579775 - RNA, 19 nt, Artificial Sequence
  Description of Artificial Sequence: Synthetic oligonucleotide
cagagauuacagggcauuc

SEQ ID NO: 2579776 - RNA, 19 nt, Artificial Sequence
  Description of Artificial Sequence: Synthetic oligonucleotide
agauggaccugccgccagu

SEQ ID NO: 2579777 - RNA, 19 nt, Artificial Sequence
  Description of Artificial Sequence: Synthetic oligonucleotide
cauuuguguuugguccagc

SEQ ID NO: 2579778 - RNA, 19 nt, Artificial Sequence
  Description of Artificial Sequence: Synthetic oligonucleotide
gaacacggugggguugacc

SEQ ID NO: 2579779 - RNA, 19 nt, Artificial Sequence
  Description of Artificial Sequence: Synthetic oligonucleotide
gggaaugcucuccugagcu

SEQ ID NO: 2579780 - RNA, 19 nt, Artificial Sequence
  Description of Artificial Sequence: Synthetic oligonucleotide
gaccauggcugcaggaaga

SEQ ID NO: 2579781 - RNA, 19 nt, Artificial Sequence
  Description of Artificial Sequence: Synthetic oligonucleotide
ggaacuuugucugcaaaua

SEQ ID NO: 2579782 - RNA, 19 nt, Artificial Sequence
  Description of Artificial Sequence: Synthetic oligonucleotide
cgcaagucaaaagaauuag

SEQ ID NO: 2579783 - RNA, 19 nt, Artificial Sequence
  Description of Artificial Sequence: Synthetic oligonucleotide
cacaugaauccugggauaa

SEQ ID NO: 2579784 - RNA, 19 nt, Artificial Sequence
  Description of Artificial Sequence: Synthetic oligonucleotide
ggcacaugaauccugggau

SEQ ID NO: 2579785 - RNA, 19 nt, Artificial Sequence
  Description of Artificial Sequence: Synthetic oligonucleotide
ggaggaacccuuauaucca

SEQ ID NO: 2579786 - RNA, 19 nt, Artificial Sequence
  Description of Artificial Sequence: Synthetic oligonucleotide
gacgcggcccaagggcucg

SEQ ID NO: 2579787 - RNA, 19 nt, Artificial Sequence
  Description of Artificial Sequence: Synthetic oligonucleotide
aagaggcgacaggggacag

SEQ ID NO: 2579788 - RNA, 19 nt, Artificial Sequence
  Description of Artificial Sequence: Synthetic oligonucleotide
ggacccgaaacgcuccaug

SEQ ID NO: 2579789 - RNA, 19 nt, Artificial Sequence
  Description of Artificial Sequence: Synthetic oligonucleotide
gcaagucaaaagaauuaga

SEQ ID NO: 2579790 - RNA, 19 nt, Artificial Sequence
  Description of Artificial Sequence: Synthetic oligonucleotide
cuuggcggugcagauaaaa

SEQ ID NO: 2579791 - RNA, 19 nt, Artificial Sequence
  Description of Artificial Sequence: Synthetic oligonucleotide
gggcauucgagcagauggg

SEQ ID NO: 2579792 - RNA, 19 nt, Artificial Sequence
  Description of Artificial Sequence: Synthetic oligonucleotide
auuucucuccguagaugga

SEQ ID NO: 2579793 - RNA, 19 nt, Artificial Sequence
  Description of Artificial Sequence: Synthetic oligonucleotide
cuuggaggggaaugaggaa

SEQ ID NO: 2579794 - RNA, 19 nt, Artificial Sequence
  Description of Artificial Sequence: Synthetic oligonucleotide
gcucgaaggagacgcggcc

SEQ ID NO: 2579795 - RNA, 19 nt, Artificial Sequence
  Description of Artificial Sequence: Synthetic oligonucleotide
cagucggaaauggugaucu

SEQ ID NO: 2579796 - RNA, 19 nt, Artificial Sequence
  Description of Artificial Sequence: Synthetic oligonucleotide
ccacagucggaaaugguga

SEQ ID NO: 2579797 - RNA, 19 nt, Artificial Sequence
  Description of Artificial Sequence: Synthetic oligonucleotide
ccauuccuggacccgaaac

SEQ ID NO: 2579798 - RNA, 19 nt, Artificial Sequence
  Description of Artificial Sequence: Synthetic oligonucleotide
guugcccacagucggaaau

SEQ ID NO: 2579799 - RNA, 19 nt, Artificial Sequence
  Description of Artificial Sequence: Synthetic oligonucleotide
cucgccgucggccgagaug

SEQ ID NO: 2579800 - RNA, 19 nt, Artificial Sequence
  Description of Artificial Sequence: Synthetic oligonucleotide
agaagcccgcaagucaaaa

SEQ ID NO: 2579801 - RNA, 19 nt, Artificial Sequence
  Description of Artificial Sequence: Synthetic oligonucleotide
cagugagagcagagauuac

SEQ ID NO: 2579802 - RNA, 19 nt, Artificial Sequence
  Description of Artificial Sequence: Synthetic oligonucleotide
ccacccuggcacaugaauc

SEQ ID NO: 2579803 - RNA, 19 nt, Artificial Sequence
  Description of Artificial Sequence: Synthetic oligonucleotide
auggucugguagguaagaa

SEQ ID NO: 2579804 - RNA, 19 nt, Artificial Sequence
  Description of Artificial Sequence: Synthetic oligonucleotide
cugggaaccauuuguguuu

SEQ ID NO: 2579805 - RNA, 19 nt, Artificial Sequence
  Description of Artificial Sequence: Synthetic oligonucleotide
agaguugcccacagucgga

SEQ ID NO: 2579806 - RNA, 19 nt, Artificial Sequence
  Description of Artificial Sequence: Synthetic oligonucleotide
guagauggaccugccgcca

SEQ ID NO: 2579807 - RNA, 19 nt, Artificial Sequence
  Description of Artificial Sequence: Synthetic oligonucleotide
gcgugugaagucaccaccc

SEQ ID NO: 2579808 - RNA, 19 nt, Artificial Sequence
  Description of Artificial Sequence: Synthetic oligonucleotide
ccuggacccgaaacgcucc

SEQ ID NO: 2579809 - RNA, 19 nt, Artificial Sequence
  Description of Artificial Sequence: Synthetic oligonucleotide
aagaagcccgcaagucaaa

SEQ ID NO: 2579810 - RNA, 19 nt, Artificial Sequence
  Description of Artificial Sequence: Synthetic oligonucleotide
gaguugcccacagucggaa

SEQ ID NO: 2579811 - RNA, 19 nt, Artificial Sequence
  Description of Artificial Sequence: Synthetic oligonucleotide
aguugcccacagucggaaa

SEQ ID NO: 2579812 - RNA, 19 nt, Artificial Sequence
  Description of Artificial Sequence: Synthetic oligonucleotide
acaugaauccugggauaau

SEQ ID NO: 2579813 - RNA, 19 nt, Artificial Sequence
  Description of Artificial Sequence: Synthetic oligonucleotide
ggugggguugaccauggcu

SEQ ID NO: 2579814 - RNA, 19 nt, Artificial Sequence
  Description of Artificial Sequence: Synthetic oligonucleotide
ggaacccuuauauccaaau

SEQ ID NO: 2579815 - RNA, 19 nt, Artificial Sequence
  Description of Artificial Sequence: Synthetic oligonucleotide
cucagucuuggcggugcag

SEQ ID NO: 2579816 - RNA, 19 nt, Artificial Sequence
  Description of Artificial Sequence: Synthetic oligonucleotide
agcccgcaagucaaaagaa

SEQ ID NO: 2579817 - RNA, 19 nt, Artificial Sequence
  Description of Artificial Sequence: Synthetic oligonucleotide
cucuccguagauggaccug

SEQ ID NO: 2579818 - RNA, 19 nt, Artificial Sequence
  Description of Artificial Sequence: Synthetic oligonucleotide
ggaaaauauggaacccaaa

SEQ ID NO: 2579819 - RNA, 19 nt, Artificial Sequence
  Description of Artificial Sequence: Synthetic oligonucleotide
gcagauggggugggaaugc

SEQ ID NO: 2579820 - RNA, 19 nt, Artificial Sequence
  Description of Artificial Sequence: Synthetic oligonucleotide
gagcagauggggugggaau

SEQ ID NO: 2579821 - RNA, 19 nt, Artificial Sequence
  Description of Artificial Sequence: Synthetic oligonucleotide
gccagugccauuauggcgu

SEQ ID NO: 2579822 - RNA, 19 nt, Artificial Sequence
  Description of Artificial Sequence: Synthetic oligonucleotide
gccaggaccuguaugcuuc

SEQ ID NO: 2579823 - RNA, 19 nt, Artificial Sequence
  Description of Artificial Sequence: Synthetic oligonucleotide
cucagagcucgaaaguuuu

SEQ ID NO: 2579824 - RNA, 19 nt, Artificial Sequence
  Description of Artificial Sequence: Synthetic oligonucleotide
agcagagauuacagggcau

SEQ ID NO: 2579825 - RNA, 19 nt, Artificial Sequence
  Description of Artificial Sequence: Synthetic oligonucleotide
ggcuuccacaauguucaug

SEQ ID NO: 2579826 - RNA, 19 nt, Artificial Sequence
  Description of Artificial Sequence: Synthetic oligonucleotide
gugccauuauggcguguga

SEQ ID NO: 2579827 - RNA, 19 nt, Artificial Sequence
  Description of Artificial Sequence: Synthetic oligonucleotide
ccagcuagacuuggagggg

SEQ ID NO: 2579828 - RNA, 19 nt, Artificial Sequence
  Description of Artificial Sequence: Synthetic oligonucleotide
caccuucccaaagaccaca

SEQ ID NO: 2579829 - RNA, 19 nt, Artificial Sequence
  Description of Artificial Sequence: Synthetic oligonucleotide
guguuugguccagcauuug

SEQ ID NO: 2579830 - RNA, 19 nt, Artificial Sequence
  Description of Artificial Sequence: Synthetic oligonucleotide
agucggaaauggugaucuu

SEQ ID NO: 2579831 - RNA, 19 nt, Artificial Sequence
  Description of Artificial Sequence: Synthetic oligonucleotide
acgcuccauggcuuccaca

SEQ ID NO: 2579832 - RNA, 19 nt, Artificial Sequence
  Description of Artificial Sequence: Synthetic oligonucleotide
gucggccgagaugucgaag

SEQ ID NO: 2579833 - RNA, 19 nt, Artificial Sequence
  Description of Artificial Sequence: Synthetic oligonucleotide
acccuggcacaugaauccu

SEQ ID NO: 2579834 - RNA, 19 nt, Artificial Sequence
  Description of Artificial Sequence: Synthetic oligonucleotide
ucuuggcggugcagauaaa

SEQ ID NO: 2579835 - RNA, 19 nt, Artificial Sequence
  Description of Artificial Sequence: Synthetic oligonucleotide
gccauccagcuagacuugg

SEQ ID NO: 2579836 - RNA, 19 nt, Artificial Sequence
  Description of Artificial Sequence: Synthetic oligonucleotide
agacgcggcccaagggcuc

SEQ ID NO: 2579837 - RNA, 19 nt, Artificial Sequence
  Description of Artificial Sequence: Synthetic oligonucleotide
cagcuagacuuggagggga

SEQ ID NO: 2579838 - RNA, 19 nt, Artificial Sequence
  Description of Artificial Sequence: Synthetic oligonucleotide
gacaggggacagcggcguc

SEQ ID NO: 2579839 - RNA, 19 nt, Artificial Sequence
  Description of Artificial Sequence: Synthetic oligonucleotide
gguagguaagaagcccgca

SEQ ID NO: 2579840 - RNA, 19 nt, Artificial Sequence
  Description of Artificial Sequence: Synthetic oligonucleotide
cagggcauucgagcagaug

SEQ ID NO: 2579841 - RNA, 19 nt, Artificial Sequence
  Description of Artificial Sequence: Synthetic oligonucleotide
gugaaaggaggaacccuua

SEQ ID NO: 2579842 - RNA, 19 nt, Artificial Sequence
  Description of Artificial Sequence: Synthetic oligonucleotide
ucgagcagaugggguggga

SEQ ID NO: 2579843 - RNA, 19 nt, Artificial Sequence
  Description of Artificial Sequence: Synthetic oligonucleotide
gccuucuuucaccuuccca

SEQ ID NO: 2579844 - RNA, 19 nt, Artificial Sequence
  Description of Artificial Sequence: Synthetic oligonucleotide
gcgacaggggacagcggcg

SEQ ID NO: 2579845 - RNA, 19 nt, Artificial Sequence
  Description of Artificial Sequence: Synthetic oligonucleotide
aggaauggucugguaggua

SEQ ID NO: 2579846 - RNA, 19 nt, Artificial Sequence
  Description of Artificial Sequence: Synthetic oligonucleotide
ccauuuguguuugguccag

SEQ ID NO: 2579847 - RNA, 19 nt, Artificial Sequence
  Description of Artificial Sequence: Synthetic oligonucleotide
gcacaugaauccugggaua

SEQ ID NO: 2579848 - RNA, 19 nt, Artificial Sequence
  Description of Artificial Sequence: Synthetic oligonucleotide
ccgcaagucaaaagaauua

SEQ ID NO: 2579849 - RNA, 19 nt, Artificial Sequence
  Description of Artificial Sequence: Synthetic oligonucleotide
gagacgcggcccaagggcu

SEQ ID NO: 2579850 - RNA, 19 nt, Artificial Sequence
  Description of Artificial Sequence: Synthetic oligonucleotide
cugugaaaggaggaacccu

SEQ ID NO: 2579851 - RNA, 19 nt, Artificial Sequence
  Description of Artificial Sequence: Synthetic oligonucleotide
gccgucggccgagaugucg

SEQ ID NO: 2579852 - RNA, 19 nt, Artificial Sequence
  Description of Artificial Sequence: Synthetic oligonucleotide
ccucaaauuucucuccgua

SEQ ID NO: 2579853 - RNA, 19 nt, Artificial Sequence
  Description of Artificial Sequence: Synthetic oligonucleotide
caggaccuguaugcuucag

SEQ ID NO: 2579854 - RNA, 19 nt, Artificial Sequence
  Description of Artificial Sequence: Synthetic oligonucleotide
ggacaagaugccaggaccu

SEQ ID NO: 2579855 - RNA, 19 nt, Artificial Sequence
  Description of Artificial Sequence: Synthetic oligonucleotide
aggaacccuuauauccaaa

SEQ ID NO: 2579856 - RNA, 19 nt, Artificial Sequence
  Description of Artificial Sequence: Synthetic oligonucleotide
cacaauguucaugccuucu

SEQ ID NO: 2579857 - RNA, 19 nt, Artificial Sequence
  Description of Artificial Sequence: Synthetic oligonucleotide
agcuagacuuggaggggaa

SEQ ID NO: 2579858 - RNA, 19 nt, Artificial Sequence
  Description of Artificial Sequence: Synthetic oligonucleotide
ggccgagaugucgaagaac

SEQ ID NO: 2579859 - RNA, 19 nt, Artificial Sequence
  Description of Artificial Sequence: Synthetic oligonucleotide
uggacccgaaacgcuccau

SEQ ID NO: 2579860 - RNA, 19 nt, Artificial Sequence
  Description of Artificial Sequence: Synthetic oligonucleotide
cacagucggaaauggugau

SEQ ID NO: 2579861 - RNA, 19 nt, Artificial Sequence
  Description of Artificial Sequence: Synthetic oligonucleotide
cccuggcacaugaauccug

SEQ ID NO: 2579862 - RNA, 19 nt, Artificial Sequence
  Description of Artificial Sequence: Synthetic oligonucleotide
cucugccauccagcuagac

SEQ ID NO: 2579863 - RNA, 19 nt, Artificial Sequence
  Description of Artificial Sequence: Synthetic oligonucleotide
cuggacccgaaacgcucca

SEQ ID NO: 2579864 - RNA, 19 nt, Artificial Sequence
  Description of Artificial Sequence: Synthetic oligonucleotide
ggaaugcucuccugagcua

SEQ ID NO: 2579865 - RNA, 19 nt, Artificial Sequence
  Description of Artificial Sequence: Synthetic oligonucleotide
agucaccacccuggcacau

SEQ ID NO: 2579866 - RNA, 19 nt, Artificial Sequence
  Description of Artificial Sequence: Synthetic oligonucleotide
cgaaacgcuccauggcuuc

SEQ ID NO: 2579867 - RNA, 19 nt, Artificial Sequence
  Description of Artificial Sequence: Synthetic oligonucleotide
gggugggaaugcucuccug

SEQ ID NO: 2579868 - RNA, 19 nt, Artificial Sequence
  Description of Artificial Sequence: Synthetic oligonucleotide
ccacaauguucaugccuuc

SEQ ID NO: 2579869 - RNA, 19 nt, Artificial Sequence
  Description of Artificial Sequence: Synthetic oligonucleotide
agggcucgccgucggccga

SEQ ID NO: 2579870 - RNA, 19 nt, Artificial Sequence
  Description of Artificial Sequence: Synthetic oligonucleotide
cccaagggcucgccgucgg

SEQ ID NO: 2579871 - RNA, 19 nt, Artificial Sequence
  Description of Artificial Sequence: Synthetic oligonucleotide
gcggcccaagggcucgccg

SEQ ID NO: 2579872 - RNA, 19 nt, Artificial Sequence
  Description of Artificial Sequence: Synthetic oligonucleotide
cccgcaagucaaaagaauu

SEQ ID NO: 2579873 - RNA, 19 nt, Artificial Sequence
  Description of Artificial Sequence: Synthetic oligonucleotide
ccagugccauuauggcgug

SEQ ID NO: 2579874 - RNA, 19 nt, Artificial Sequence
  Description of Artificial Sequence: Synthetic oligonucleotide
cccgaaacgcuccauggcu

SEQ ID NO: 2579875 - RNA, 19 nt, Artificial Sequence
  Description of Artificial Sequence: Synthetic oligonucleotide
aggcgacaggggacagcgg

SEQ ID NO: 2579876 - RNA, 19 nt, Artificial Sequence
  Description of Artificial Sequence: Synthetic oligonucleotide
ccugagcuacacaaggaau

SEQ ID NO: 2579877 - RNA, 19 nt, Artificial Sequence
  Description of Artificial Sequence: Synthetic oligonucleotide
ggcccaagggcucgccguc

SEQ ID NO: 2579878 - RNA, 19 nt, Artificial Sequence
  Description of Artificial Sequence: Synthetic oligonucleotide
acgcggcccaagggcucgc

SEQ ID NO: 2579879 - RNA, 19 nt, Artificial Sequence
  Description of Artificial Sequence: Synthetic oligonucleotide
gcagagauuacagggcauu

SEQ ID NO: 2579880 - RNA, 19 nt, Artificial Sequence
  Description of Artificial Sequence: Synthetic oligonucleotide
cagucuuggcggugcagau

SEQ ID NO: 2579881 - RNA, 19 nt, Artificial Sequence
  Description of Artificial Sequence: Synthetic oligonucleotide
gcccaagggcucgccgucg

SEQ ID NO: 2579882 - RNA, 19 nt, Artificial Sequence
  Description of Artificial Sequence: Synthetic oligonucleotide
ccauccagcuagacuugga

SEQ ID NO: 2579883 - RNA, 19 nt, Artificial Sequence
  Description of Artificial Sequence: Synthetic oligonucleotide
acagggcauucgagcagau

SEQ ID NO: 2579884 - RNA, 19 nt, Artificial Sequence
  Description of Artificial Sequence: Synthetic oligonucleotide
ccgucggccgagaugucga

SEQ ID NO: 2579885 - RNA, 19 nt, Artificial Sequence
  Description of Artificial Sequence: Synthetic oligonucleotide
gggguugaccauggcugca

SEQ ID NO: 2579886 - RNA, 19 nt, Artificial Sequence
  Description of Artificial Sequence: Synthetic oligonucleotide
gccacucagucuuggcggu

SEQ ID NO: 2579887 - RNA, 19 nt, Artificial Sequence
  Description of Artificial Sequence: Synthetic oligonucleotide
gcucagagcucgaaaguuu

SEQ ID NO: 2579888 - RNA, 19 nt, Artificial Sequence
  Description of Artificial Sequence: Synthetic oligonucleotide
cccuuauauccaaauccuu

SEQ ID NO: 2579889 - RNA, 19 nt, Artificial Sequence
  Description of Artificial Sequence: Synthetic oligonucleotide
ccacucagucuuggcggug

SEQ ID NO: 2579890 - RNA, 19 nt, Artificial Sequence
  Description of Artificial Sequence: Synthetic oligonucleotide
gcccgcaagucaaaagaau

SEQ ID NO: 2579891 - RNA, 19 nt, Artificial Sequence
  Description of Artificial Sequence: Synthetic oligonucleotide
gggcucgccgucggccgag

SEQ ID NO: 2579892 - RNA, 19 nt, Artificial Sequence
  Description of Artificial Sequence: Synthetic oligonucleotide
ggaggggaaugaggaaaau

SEQ ID NO: 2579893 - RNA, 19 nt, Artificial Sequence
  Description of Artificial Sequence: Synthetic oligonucleotide
gcuagacuuggaggggaau

SEQ ID NO: 2579894 - RNA, 19 nt, Artificial Sequence
  Description of Artificial Sequence: Synthetic oligonucleotide
ccgaaacgcuccauggcuu

SEQ ID NO: 2579895 - RNA, 19 nt, Artificial Sequence
  Description of Artificial Sequence: Synthetic oligonucleotide
cgagcagauggggugggaa

SEQ ID NO: 2579896 - RNA, 19 nt, Artificial Sequence
  Description of Artificial Sequence: Synthetic oligonucleotide
accugccgccagugccauu

SEQ ID NO: 2579897 - RNA, 19 nt, Artificial Sequence
  Description of Artificial Sequence: Synthetic oligonucleotide
cgugugaagucaccacccu

SEQ ID NO: 2579898 - RNA, 19 nt, Artificial Sequence
  Description of Artificial Sequence: Synthetic oligonucleotide
ccagugcucagagcucgaa

SEQ ID NO: 2579899 - RNA, 19 nt, Artificial Sequence
  Description of Artificial Sequence: Synthetic oligonucleotide
gcccacagucggaaauggu

SEQ ID NO: 2579900 - RNA, 19 nt, Artificial Sequence
  Description of Artificial Sequence: Synthetic oligonucleotide
cggccgagaugucgaagaa

SEQ ID NO: 2579901 - RNA, 19 nt, Artificial Sequence
  Description of Artificial Sequence: Synthetic oligonucleotide
cagugccauuauggcgugu

SEQ ID NO: 2579902 - RNA, 19 nt, Artificial Sequence
  Description of Artificial Sequence: Synthetic oligonucleotide
cggaaauggugaucuucuu

SEQ ID NO: 2579903 - RNA, 19 nt, Artificial Sequence
  Description of Artificial Sequence: Synthetic oligonucleotide
cgucggccgagaugucgaa

SEQ ID NO: 2579904 - RNA, 19 nt, Artificial Sequence
  Description of Artificial Sequence: Synthetic oligonucleotide
ggcucgccgucggccgaga

SEQ ID NO: 2579905 - RNA, 19 nt, Artificial Sequence
  Description of Artificial Sequence: Synthetic oligonucleotide
cgacaggggacagcggcgu

SEQ ID NO: 2579906 - RNA, 19 nt, Artificial Sequence
  Description of Artificial Sequence: Synthetic oligonucleotide
cgcggcccaagggcucgcc

SEQ ID NO: 2579907 - RNA, 19 nt, Artificial Sequence
  Description of Artificial Sequence: Synthetic oligonucleotide
gcucgccgucggccgagau

SEQ ID NO: 2579908 - RNA, 19 nt, Artificial Sequence
  Description of Artificial Sequence: Synthetic oligonucleotide
cgccgucggccgagauguc

SEQ ID NO: 2579909 - RNA, 19 nt, Artificial Sequence
  Description of Artificial Sequence: Synthetic oligonucleotide
caagaaacgaaucugaacc

SEQ ID NO: 2579910 - RNA, 19 nt, Artificial Sequence
  Description of Artificial Sequence: Synthetic oligonucleotide
uuuaucgucauuaaguuuc

SEQ ID NO: 2579911 - RNA, 19 nt, Artificial Sequence
  Description of Artificial Sequence: Synthetic oligonucleotide
auagauuuuguauauuuag

SEQ ID NO: 2579912 - RNA, 19 nt, Artificial Sequence
  Description of Artificial Sequence: Synthetic oligonucleotide
uuacucauagucaggagcg

SEQ ID NO: 2579913 - RNA, 19 nt, Artificial Sequence
  Description of Artificial Sequence: Synthetic oligonucleotide
uuuacucauagucaggagc

SEQ ID NO: 2579914 - RNA, 19 nt, Artificial Sequence
  Description of Artificial Sequence: Synthetic oligonucleotide
uuuaauguuucccaauagc

SEQ ID NO: 2579915 - RNA, 19 nt, Artificial Sequence
  Description of Artificial Sequence: Synthetic oligonucleotide
ucaauaucuacuaauucca

SEQ ID NO: 2579916 - RNA, 19 nt, Artificial Sequence
  Description of Artificial Sequence: Synthetic oligonucleotide
uagauuuuguauauuuagg

SEQ ID NO: 2579917 - RNA, 19 nt, Artificial Sequence
  Description of Artificial Sequence: Synthetic oligonucleotide
uuuagguggacccucauca

SEQ ID NO: 2579918 - RNA, 19 nt, Artificial Sequence
  Description of Artificial Sequence: Synthetic oligonucleotide
uuaauguuucccaauagcu

SEQ ID NO: 2579919 - RNA, 19 nt, Artificial Sequence
  Description of Artificial Sequence: Synthetic oligonucleotide
ugaguuugguauuuggugg

SEQ ID NO: 2579920 - RNA, 19 nt, Artificial Sequence
  Description of Artificial Sequence: Synthetic oligonucleotide
uguauauuuagguggaccc

SEQ ID NO: 2579921 - RNA, 19 nt, Artificial Sequence
  Description of Artificial Sequence: Synthetic oligonucleotide
uggaauuuuggcaucaggc

SEQ ID NO: 2579922 - RNA, 19 nt, Artificial Sequence
  Description of Artificial Sequence: Synthetic oligonucleotide
aaaugaguuugguauuugg

SEQ ID NO: 2579923 - RNA, 19 nt, Artificial Sequence
  Description of Artificial Sequence: Synthetic oligonucleotide
uguuugaauauuaguauca

SEQ ID NO: 2579924 - RNA, 19 nt, Artificial Sequence
  Description of Artificial Sequence: Synthetic oligonucleotide
gauaauguccuucuugggc

SEQ ID NO: 2579925 - RNA, 19 nt, Artificial Sequence
  Description of Artificial Sequence: Synthetic oligonucleotide
aagaaacgaaucugaaccg

SEQ ID NO: 2579926 - RNA, 19 nt, Artificial Sequence
  Description of Artificial Sequence: Synthetic oligonucleotide
aaaagaugguuguaggcug

SEQ ID NO: 2579927 - RNA, 19 nt, Artificial Sequence
  Description of Artificial Sequence: Synthetic oligonucleotide
agauuuuguauauuuaggu

SEQ ID NO: 2579928 - RNA, 19 nt, Artificial Sequence
  Description of Artificial Sequence: Synthetic oligonucleotide
aauaucuacuaauuccacu

SEQ ID NO: 2579929 - RNA, 19 nt, Artificial Sequence
  Description of Artificial Sequence: Synthetic oligonucleotide
uucuccuuuacucauaguc

SEQ ID NO: 2579930 - RNA, 19 nt, Artificial Sequence
  Description of Artificial Sequence: Synthetic oligonucleotide
uuuauuguuguugaugucu

SEQ ID NO: 2579931 - RNA, 19 nt, Artificial Sequence
  Description of Artificial Sequence: Synthetic oligonucleotide
uuuuguauauuuaggugga

SEQ ID NO: 2579932 - RNA, 19 nt, Artificial Sequence
  Description of Artificial Sequence: Synthetic oligonucleotide
auagcuuaugcucugcaag

SEQ ID NO: 2579933 - RNA, 19 nt, Artificial Sequence
  Description of Artificial Sequence: Synthetic oligonucleotide
ugaaccgugauccugcaga

SEQ ID NO: 2579934 - RNA, 19 nt, Artificial Sequence
  Description of Artificial Sequence: Synthetic oligonucleotide
aaaugguccuuauuagcag

SEQ ID NO: 2579935 - RNA, 19 nt, Artificial Sequence
  Description of Artificial Sequence: Synthetic oligonucleotide
guuucaguacccuugaaac

SEQ ID NO: 2579936 - RNA, 19 nt, Artificial Sequence
  Description of Artificial Sequence: Synthetic oligonucleotide
agucaggagcgcuucaucc

SEQ ID NO: 2579937 - RNA, 19 nt, Artificial Sequence
  Description of Artificial Sequence: Synthetic oligonucleotide
uguugaugucuucagagcu

SEQ ID NO: 2579938 - RNA, 19 nt, Artificial Sequence
  Description of Artificial Sequence: Synthetic oligonucleotide
accgugauccugcagaaac

SEQ ID NO: 2579939 - RNA, 19 nt, Artificial Sequence
  Description of Artificial Sequence: Synthetic oligonucleotide
gaauuuuggcaucaggcug

SEQ ID NO: 2579940 - RNA, 19 nt, Artificial Sequence
  Description of Artificial Sequence: Synthetic oligonucleotide
aaacuugauaauguccuuc

SEQ ID NO: 2579941 - RNA, 19 nt, Artificial Sequence
  Description of Artificial Sequence: Synthetic oligonucleotide
uaggcuguaaccaaauggu

SEQ ID NO: 2579942 - RNA, 19 nt, Artificial Sequence
  Description of Artificial Sequence: Synthetic oligonucleotide
uuaugcucugcaagaaacg

SEQ ID NO: 2579943 - RNA, 19 nt, Artificial Sequence
  Description of Artificial Sequence: Synthetic oligonucleotide
uuucaguacccuugaaacg

SEQ ID NO: 2579944 - RNA, 19 nt, Artificial Sequence
  Description of Artificial Sequence: Synthetic oligonucleotide
uuuggcaucaggcuguccu

SEQ ID NO: 2579945 - RNA, 19 nt, Artificial Sequence
  Description of Artificial Sequence: Synthetic oligonucleotide
aacuuguuugaauauuagu

SEQ ID NO: 2579946 - RNA, 19 nt, Artificial Sequence
  Description of Artificial Sequence: Synthetic oligonucleotide
uauuugguggaauuuuggc

SEQ ID NO: 2579947 - RNA, 19 nt, Artificial Sequence
  Description of Artificial Sequence: Synthetic oligonucleotide
aacuugauaauguccuucu

SEQ ID NO: 2579948 - RNA, 19 nt, Artificial Sequence
  Description of Artificial Sequence: Synthetic oligonucleotide
uuugguggaauuuuggcau

SEQ ID NO: 2579949 - RNA, 19 nt, Artificial Sequence
  Description of Artificial Sequence: Synthetic oligonucleotide
cuuaugcucugcaagaaac

SEQ ID NO: 2579950 - RNA, 19 nt, Artificial Sequence
  Description of Artificial Sequence: Synthetic oligonucleotide
aaacaguuccauccgggag

SEQ ID NO: 2579951 - RNA, 19 nt, Artificial Sequence
  Description of Artificial Sequence: Synthetic oligonucleotide
ucgucauuaaguuucacau

SEQ ID NO: 2579952 - RNA, 19 nt, Artificial Sequence
  Description of Artificial Sequence: Synthetic oligonucleotide
uucaguacccuugaaacgc

SEQ ID NO: 2579953 - RNA, 19 nt, Artificial Sequence
  Description of Artificial Sequence: Synthetic oligonucleotide
auaauguccuucuugggca

SEQ ID NO: 2579954 - RNA, 19 nt, Artificial Sequence
  Description of Artificial Sequence: Synthetic oligonucleotide
uacuaauuccacuucaaaa

SEQ ID NO: 2579955 - RNA, 19 nt, Artificial Sequence
  Description of Artificial Sequence: Synthetic oligonucleotide
ucuccuuuacucauaguca

SEQ ID NO: 2579956 - RNA, 19 nt, Artificial Sequence
  Description of Artificial Sequence: Synthetic oligonucleotide
aagcuuaaaggcuuggcau

SEQ ID NO: 2579957 - RNA, 19 nt, Artificial Sequence
  Description of Artificial Sequence: Synthetic oligonucleotide
uuccauaggcccauucugg

SEQ ID NO: 2579958 - RNA, 19 nt, Artificial Sequence
  Description of Artificial Sequence: Synthetic oligonucleotide
uggacccucaucaagaguc

SEQ ID NO: 2579959 - RNA, 19 nt, Artificial Sequence
  Description of Artificial Sequence: Synthetic oligonucleotide
uuuccauaggcccauucug

SEQ ID NO: 2579960 - RNA, 19 nt, Artificial Sequence
  Description of Artificial Sequence: Synthetic oligonucleotide
uuacuuacaguuucaguac

SEQ ID NO: 2579961 - RNA, 19 nt, Artificial Sequence
  Description of Artificial Sequence: Synthetic oligonucleotide
ugauccugcagaaacuuga

SEQ ID NO: 2579962 - RNA, 19 nt, Artificial Sequence
  Description of Artificial Sequence: Synthetic oligonucleotide
aaccuugccuacuccgacc

SEQ ID NO: 2579963 - RNA, 19 nt, Artificial Sequence
  Description of Artificial Sequence: Synthetic oligonucleotide
auuugguggaauuuuggca

SEQ ID NO: 2579964 - RNA, 19 nt, Artificial Sequence
  Description of Artificial Sequence: Synthetic oligonucleotide
uguucagacacuuuacuua

SEQ ID NO: 2579965 - RNA, 19 nt, Artificial Sequence
  Description of Artificial Sequence: Synthetic oligonucleotide
ucugguucaaucuccaguc

SEQ ID NO: 2579966 - RNA, 19 nt, Artificial Sequence
  Description of Artificial Sequence: Synthetic oligonucleotide
gguuucuuuggguuuaucg

SEQ ID NO: 2579967 - RNA, 19 nt, Artificial Sequence
  Description of Artificial Sequence: Synthetic oligonucleotide
uucccaauagcuuaugcuc

SEQ ID NO: 2579968 - RNA, 19 nt, Artificial Sequence
  Description of Artificial Sequence: Synthetic oligonucleotide
agaaacuugauaauguccu

SEQ ID NO: 2579969 - RNA, 19 nt, Artificial Sequence
  Description of Artificial Sequence: Synthetic oligonucleotide
ugaacuuguuugaauauua

SEQ ID NO: 2579970 - RNA, 19 nt, Artificial Sequence
  Description of Artificial Sequence: Synthetic oligonucleotide
aaugguccuuauuagcagu

SEQ ID NO: 2579971 - RNA, 19 nt, Artificial Sequence
  Description of Artificial Sequence: Synthetic oligonucleotide
ucagucaauaucuacuaau

SEQ ID NO: 2579972 - RNA, 19 nt, Artificial Sequence
  Description of Artificial Sequence: Synthetic oligonucleotide
uguccuuucuuuccauagg

SEQ ID NO: 2579973 - RNA, 19 nt, Artificial Sequence
  Description of Artificial Sequence: Synthetic oligonucleotide
ucugcaagaaacgaaucug

SEQ ID NO: 2579974 - RNA, 19 nt, Artificial Sequence
  Description of Artificial Sequence: Synthetic oligonucleotide
uuucccaauagcuuaugcu

SEQ ID NO: 2579975 - RNA, 19 nt, Artificial Sequence
  Description of Artificial Sequence: Synthetic oligonucleotide
uagaauagauuuuguauau

SEQ ID NO: 2579976 - RNA, 19 nt, Artificial Sequence
  Description of Artificial Sequence: Synthetic oligonucleotide
uguauaccagcagugaaca

SEQ ID NO: 2579977 - RNA, 19 nt, Artificial Sequence
  Description of Artificial Sequence: Synthetic oligonucleotide
aucccauccucugauaacc

SEQ ID NO: 2579978 - RNA, 19 nt, Artificial Sequence
  Description of Artificial Sequence: Synthetic oligonucleotide
uauuagcagucuuagcuac

SEQ ID NO: 2579979 - RNA, 19 nt, Artificial Sequence
  Description of Artificial Sequence: Synthetic oligonucleotide
uucaaucuccagucgagcc

SEQ ID NO: 2579980 - RNA, 19 nt, Artificial Sequence
  Description of Artificial Sequence: Synthetic oligonucleotide
gaagcuuaaaggcuuggca

SEQ ID NO: 2579981 - RNA, 19 nt, Artificial Sequence
  Description of Artificial Sequence: Synthetic oligonucleotide
uuguauauuuagguggacc

SEQ ID NO: 2579982 - RNA, 19 nt, Artificial Sequence
  Description of Artificial Sequence: Synthetic oligonucleotide
gaaacgcuuaguuucaaaa

SEQ ID NO: 2579983 - RNA, 19 nt, Artificial Sequence
  Description of Artificial Sequence: Synthetic oligonucleotide
aauagcuuaugcucugcaa

SEQ ID NO: 2579984 - RNA, 19 nt, Artificial Sequence
  Description of Artificial Sequence: Synthetic oligonucleotide
ugaugcacugguuucaguc

SEQ ID NO: 2579985 - RNA, 19 nt, Artificial Sequence
  Description of Artificial Sequence: Synthetic oligonucleotide
acuuguuugaauauuagua

SEQ ID NO: 2579986 - RNA, 19 nt, Artificial Sequence
  Description of Artificial Sequence: Synthetic oligonucleotide
aauuuuggcaucaggcugu

SEQ ID NO: 2579987 - RNA, 19 nt, Artificial Sequence
  Description of Artificial Sequence: Synthetic oligonucleotide
uacuuacaguuucaguacc

SEQ ID NO: 2579988 - RNA, 19 nt, Artificial Sequence
  Description of Artificial Sequence: Synthetic oligonucleotide
cuccuuuacucauagucag

SEQ ID NO: 2579989 - RNA, 19 nt, Artificial Sequence
  Description of Artificial Sequence: Synthetic oligonucleotide
uggguuuaucgucauuaag

SEQ ID NO: 2579990 - RNA, 19 nt, Artificial Sequence
  Description of Artificial Sequence: Synthetic oligonucleotide
caaaugguccuuauuagca

SEQ ID NO: 2579991 - RNA, 19 nt, Artificial Sequence
  Description of Artificial Sequence: Synthetic oligonucleotide
agcagugaacaaugucucc

SEQ ID NO: 2579992 - RNA, 19 nt, Artificial Sequence
  Description of Artificial Sequence: Synthetic oligonucleotide
uaauguuucccaauagcuu

SEQ ID NO: 2579993 - RNA, 19 nt, Artificial Sequence
  Description of Artificial Sequence: Synthetic oligonucleotide
uuucagucaauaucuacua

SEQ ID NO: 2579994 - RNA, 19 nt, Artificial Sequence
  Description of Artificial Sequence: Synthetic oligonucleotide
uuauuagcagucuuagcua

SEQ ID NO: 2579995 - RNA, 19 nt, Artificial Sequence
  Description of Artificial Sequence: Synthetic oligonucleotide
aucgucauuaaguuucaca

SEQ ID NO: 2579996 - RNA, 19 nt, Artificial Sequence
  Description of Artificial Sequence: Synthetic oligonucleotide
ccuacuccgaccuugaagc

SEQ ID NO: 2579997 - RNA, 19 nt, Artificial Sequence
  Description of Artificial Sequence: Synthetic oligonucleotide
auuuagguggacccucauc

SEQ ID NO: 2579998 - RNA, 19 nt, Artificial Sequence
  Description of Artificial Sequence: Synthetic oligonucleotide
gaugguuguaggcuguaac

SEQ ID NO: 2579999 - RNA, 19 nt, Artificial Sequence
  Description of Artificial Sequence: Synthetic oligonucleotide
uuugaacuuguuugaauau

SEQ ID NO: 2580000 - RNA, 19 nt, Artificial Sequence
  Description of Artificial Sequence: Synthetic oligonucleotide
ucuacuaauuccacuucaa

SEQ ID NO: 2580001 - RNA, 19 nt, Artificial Sequence
  Description of Artificial Sequence: Synthetic oligonucleotide
agcagucuuagcuacauuu

SEQ ID NO: 2580002 - RNA, 19 nt, Artificial Sequence
  Description of Artificial Sequence: Synthetic oligonucleotide
ugcucugcaagaaacgaau

SEQ ID NO: 2580003 - RNA, 19 nt, Artificial Sequence
  Description of Artificial Sequence: Synthetic oligonucleotide
uccuuuacucauagucagg

SEQ ID NO: 2580004 - RNA, 19 nt, Artificial Sequence
  Description of Artificial Sequence: Synthetic oligonucleotide
uguuguugaugucuucaga

SEQ ID NO: 2580005 - RNA, 19 nt, Artificial Sequence
  Description of Artificial Sequence: Synthetic oligonucleotide
ugaacaaugucucccuuuu

SEQ ID NO: 2580006 - RNA, 19 nt, Artificial Sequence
  Description of Artificial Sequence: Synthetic oligonucleotide
aguuucaguacccuugaaa

SEQ ID NO: 2580007 - RNA, 19 nt, Artificial Sequence
  Description of Artificial Sequence: Synthetic oligonucleotide
cuguauaccagcagugaac

SEQ ID NO: 2580008 - RNA, 19 nt, Artificial Sequence
  Description of Artificial Sequence: Synthetic oligonucleotide
ucccaauagcuuaugcucu

SEQ ID NO: 2580009 - RNA, 19 nt, Artificial Sequence
  Description of Artificial Sequence: Synthetic oligonucleotide
uuugguauuugguggaauu

SEQ ID NO: 2580010 - RNA, 19 nt, Artificial Sequence
  Description of Artificial Sequence: Synthetic oligonucleotide
aucugaaccgugauccugc

SEQ ID NO: 2580011 - RNA, 19 nt, Artificial Sequence
  Description of Artificial Sequence: Synthetic oligonucleotide
agcgcuucaucccauccuc

SEQ ID NO: 2580012 - RNA, 19 nt, Artificial Sequence
  Description of Artificial Sequence: Synthetic oligonucleotide
uagcuuaugcucugcaaga

SEQ ID NO: 2580013 - RNA, 19 nt, Artificial Sequence
  Description of Artificial Sequence: Synthetic oligonucleotide
aucaagagucucuucagau

SEQ ID NO: 2580014 - RNA, 19 nt, Artificial Sequence
  Description of Artificial Sequence: Synthetic oligonucleotide
ugguucaaucuccagucga

SEQ ID NO: 2580015 - RNA, 19 nt, Artificial Sequence
  Description of Artificial Sequence: Synthetic oligonucleotide
uauauuuagguggacccuc

SEQ ID NO: 2580016 - RNA, 19 nt, Artificial Sequence
  Description of Artificial Sequence: Synthetic oligonucleotide
gaacuuguuugaauauuag

SEQ ID NO: 2580017 - RNA, 19 nt, Artificial Sequence
  Description of Artificial Sequence: Synthetic oligonucleotide
acgaaucugaaccgugauc

SEQ ID NO: 2580018 - RNA, 19 nt, Artificial Sequence
  Description of Artificial Sequence: Synthetic oligonucleotide
aaguuuguuuuaucucccu

SEQ ID NO: 2580019 - RNA, 19 nt, Artificial Sequence
  Description of Artificial Sequence: Synthetic oligonucleotide
cuuugaacuuguuugaaua

SEQ ID NO: 2580020 - RNA, 19 nt, Artificial Sequence
  Description of Artificial Sequence: Synthetic oligonucleotide
ugcacgcuggggaacagcc

SEQ ID NO: 2580021 - RNA, 19 nt, Artificial Sequence
  Description of Artificial Sequence: Synthetic oligonucleotide
aaucugaaccgugauccug

SEQ ID NO: 2580022 - RNA, 19 nt, Artificial Sequence
  Description of Artificial Sequence: Synthetic oligonucleotide
ucuucagagcugaugcacu

SEQ ID NO: 2580023 - RNA, 19 nt, Artificial Sequence
  Description of Artificial Sequence: Synthetic oligonucleotide
ccuugaaacgcuuaguuuc

SEQ ID NO: 2580024 - RNA, 19 nt, Artificial Sequence
  Description of Artificial Sequence: Synthetic oligonucleotide
uuauuguuguugaugucuu

SEQ ID NO: 2580025 - RNA, 19 nt, Artificial Sequence
  Description of Artificial Sequence: Synthetic oligonucleotide
ugcuccacgguccaugcac

SEQ ID NO: 2580026 - RNA, 19 nt, Artificial Sequence
  Description of Artificial Sequence: Synthetic oligonucleotide
acugcuccacgguccaugc

SEQ ID NO: 2580027 - RNA, 19 nt, Artificial Sequence
  Description of Artificial Sequence: Synthetic oligonucleotide
ugcaagaaacgaaucugaa

SEQ ID NO: 2580028 - RNA, 19 nt, Artificial Sequence
  Description of Artificial Sequence: Synthetic oligonucleotide
uguaggcuguaaccaaaug

SEQ ID NO: 2580029 - RNA, 19 nt, Artificial Sequence
  Description of Artificial Sequence: Synthetic oligonucleotide
uuaucgucauuaaguuuca

SEQ ID NO: 2580030 - RNA, 19 nt, Artificial Sequence
  Description of Artificial Sequence: Synthetic oligonucleotide
cauaggcccauucugguuc

SEQ ID NO: 2580031 - RNA, 19 nt, Artificial Sequence
  Description of Artificial Sequence: Synthetic oligonucleotide
ucaucccauccucugauaa

SEQ ID NO: 2580032 - RNA, 19 nt, Artificial Sequence
  Description of Artificial Sequence: Synthetic oligonucleotide
uaucuacuaauuccacuuc

SEQ ID NO: 2580033 - RNA, 19 nt, Artificial Sequence
  Description of Artificial Sequence: Synthetic oligonucleotide
aacgaaucugaaccgugau

SEQ ID NO: 2580034 - RNA, 19 nt, Artificial Sequence
  Description of Artificial Sequence: Synthetic oligonucleotide
guggaauuuuggcaucagg

SEQ ID NO: 2580035 - RNA, 19 nt, Artificial Sequence
  Description of Artificial Sequence: Synthetic oligonucleotide
ugauaaccuugccuacucc

SEQ ID NO: 2580036 - RNA, 19 nt, Artificial Sequence
  Description of Artificial Sequence: Synthetic oligonucleotide
aguuccauccgggaguguc

SEQ ID NO: 2580037 - RNA, 19 nt, Artificial Sequence
  Description of Artificial Sequence: Synthetic oligonucleotide
caauaucuacuaauuccac

SEQ ID NO: 2580038 - RNA, 19 nt, Artificial Sequence
  Description of Artificial Sequence: Synthetic oligonucleotide
ucaggagcgcuucauccca

SEQ ID NO: 2580039 - RNA, 19 nt, Artificial Sequence
  Description of Artificial Sequence: Synthetic oligonucleotide
gaaacgaaucugaaccgug

SEQ ID NO: 2580040 - RNA, 19 nt, Artificial Sequence
  Description of Artificial Sequence: Synthetic oligonucleotide
agagcugaugcacugguuu

SEQ ID NO: 2580041 - RNA, 19 nt, Artificial Sequence
  Description of Artificial Sequence: Synthetic oligonucleotide
uuugggaaaguuuguuuua

SEQ ID NO: 2580042 - RNA, 19 nt, Artificial Sequence
  Description of Artificial Sequence: Synthetic oligonucleotide
cauccucugauaaccuugc

SEQ ID NO: 2580043 - RNA, 19 nt, Artificial Sequence
  Description of Artificial Sequence: Synthetic oligonucleotide
gaugcacugguuucaguca

SEQ ID NO: 2580044 - RNA, 19 nt, Artificial Sequence
  Description of Artificial Sequence: Synthetic oligonucleotide
agagucucuucagauuugg

SEQ ID NO: 2580045 - RNA, 19 nt, Artificial Sequence
  Description of Artificial Sequence: Synthetic oligonucleotide
ucccuguauaccagcagug

SEQ ID NO: 2580046 - RNA, 19 nt, Artificial Sequence
  Description of Artificial Sequence: Synthetic oligonucleotide
cugguuucagucaauaucu

SEQ ID NO: 2580047 - RNA, 19 nt, Artificial Sequence
  Description of Artificial Sequence: Synthetic oligonucleotide
cuuuacucauagucaggag

SEQ ID NO: 2580048 - RNA, 19 nt, Artificial Sequence
  Description of Artificial Sequence: Synthetic oligonucleotide
ugaagcuuaaaggcuuggc

SEQ ID NO: 2580049 - RNA, 19 nt, Artificial Sequence
  Description of Artificial Sequence: Synthetic oligonucleotide
acuuuacuuacaguuucag

SEQ ID NO: 2580050 - RNA, 19 nt, Artificial Sequence
  Description of Artificial Sequence: Synthetic oligonucleotide
ugucccuguauaccagcag

SEQ ID NO: 2580051 - RNA, 19 nt, Artificial Sequence
  Description of Artificial Sequence: Synthetic oligonucleotide
aaacgaaucugaaccguga

SEQ ID NO: 2580052 - RNA, 19 nt, Artificial Sequence
  Description of Artificial Sequence: Synthetic oligonucleotide
uucagucaauaucuacuaa

SEQ ID NO: 2580053 - RNA, 19 nt, Artificial Sequence
  Description of Artificial Sequence: Synthetic oligonucleotide
guacccuugaaacgcuuag

SEQ ID NO: 2580054 - RNA, 19 nt, Artificial Sequence
  Description of Artificial Sequence: Synthetic oligonucleotide
ccuuucuuuccauaggccc

SEQ ID NO: 2580055 - RNA, 19 nt, Artificial Sequence
  Description of Artificial Sequence: Synthetic oligonucleotide
uuucacuuguucagacacu

SEQ ID NO: 2580056 - RNA, 19 nt, Artificial Sequence
  Description of Artificial Sequence: Synthetic oligonucleotide
uuuuauuguuguugauguc

SEQ ID NO: 2580057 - RNA, 19 nt, Artificial Sequence
  Description of Artificial Sequence: Synthetic oligonucleotide
guuucccaauagcuuaugc

SEQ ID NO: 2580058 - RNA, 19 nt, Artificial Sequence
  Description of Artificial Sequence: Synthetic oligonucleotide
cuugaagcuuaaaggcuug

SEQ ID NO: 2580059 - RNA, 19 nt, Artificial Sequence
  Description of Artificial Sequence: Synthetic oligonucleotide
cuuguuugaauauuaguau

SEQ ID NO: 2580060 - RNA, 19 nt, Artificial Sequence
  Description of Artificial Sequence: Synthetic oligonucleotide
cuuucuuuccauaggccca

SEQ ID NO: 2580061 - RNA, 19 nt, Artificial Sequence
  Description of Artificial Sequence: Synthetic oligonucleotide
cuucuuugaacuuguuuga

SEQ ID NO: 2580062 - RNA, 19 nt, Artificial Sequence
  Description of Artificial Sequence: Synthetic oligonucleotide
ucaagagucucuucagauu

SEQ ID NO: 2580063 - RNA, 19 nt, Artificial Sequence
  Description of Artificial Sequence: Synthetic oligonucleotide
uaaccuugccuacuccgac

SEQ ID NO: 2580064 - RNA, 19 nt, Artificial Sequence
  Description of Artificial Sequence: Synthetic oligonucleotide
gaguuugguauuuggugga

SEQ ID NO: 2580065 - RNA, 19 nt, Artificial Sequence
  Description of Artificial Sequence: Synthetic oligonucleotide
cucgcugcgcaacugcucc

SEQ ID NO: 2580066 - RNA, 19 nt, Artificial Sequence
  Description of Artificial Sequence: Synthetic oligonucleotide
ucugauaaccuugccuacu

SEQ ID NO: 2580067 - RNA, 19 nt, Artificial Sequence
  Description of Artificial Sequence: Synthetic oligonucleotide
uugaagcuuaaaggcuugg

SEQ ID NO: 2580068 - RNA, 19 nt, Artificial Sequence
  Description of Artificial Sequence: Synthetic oligonucleotide
cuugaaacgcuuaguuuca

SEQ ID NO: 2580069 - RNA, 19 nt, Artificial Sequence
  Description of Artificial Sequence: Synthetic oligonucleotide
cgaccuugaagcuuaaagg

SEQ ID NO: 2580070 - RNA, 19 nt, Artificial Sequence
  Description of Artificial Sequence: Synthetic oligonucleotide
cgaaucugaaccgugaucc

SEQ ID NO: 2580071 - RNA, 19 nt, Artificial Sequence
  Description of Artificial Sequence: Synthetic oligonucleotide
cacgcuggggaacagccgc

SEQ ID NO: 2580072 - RNA, 19 nt, Artificial Sequence
  Description of Artificial Sequence: Synthetic oligonucleotide
uccauaggcccauucuggu

SEQ ID NO: 2580073 - RNA, 19 nt, Artificial Sequence
  Description of Artificial Sequence: Synthetic oligonucleotide
agaaacgaaucugaaccgu

SEQ ID NO: 2580074 - RNA, 19 nt, Artificial Sequence
  Description of Artificial Sequence: Synthetic oligonucleotide
guuucagucaauaucuacu

SEQ ID NO: 2580075 - RNA, 19 nt, Artificial Sequence
  Description of Artificial Sequence: Synthetic oligonucleotide
aaagaugguuguaggcugu

SEQ ID NO: 2580076 - RNA, 19 nt, Artificial Sequence
  Description of Artificial Sequence: Synthetic oligonucleotide
ccaaaugguccuuauuagc

SEQ ID NO: 2580077 - RNA, 19 nt, Artificial Sequence
  Description of Artificial Sequence: Synthetic oligonucleotide
ugaaacgcuuaguuucaaa

SEQ ID NO: 2580078 - RNA, 19 nt, Artificial Sequence
  Description of Artificial Sequence: Synthetic oligonucleotide
cagcagugaacaaugucuc

SEQ ID NO: 2580079 - RNA, 19 nt, Artificial Sequence
  Description of Artificial Sequence: Synthetic oligonucleotide
cuucagagcugaugcacug

SEQ ID NO: 2580080 - RNA, 19 nt, Artificial Sequence
  Description of Artificial Sequence: Synthetic oligonucleotide
ucauuaaguuucacauuuu

SEQ ID NO: 2580081 - RNA, 19 nt, Artificial Sequence
  Description of Artificial Sequence: Synthetic oligonucleotide
aacugcuccacgguccaug

SEQ ID NO: 2580082 - RNA, 19 nt, Artificial Sequence
  Description of Artificial Sequence: Synthetic oligonucleotide
ucaguacccuugaaacgcu

SEQ ID NO: 2580083 - RNA, 19 nt, Artificial Sequence
  Description of Artificial Sequence: Synthetic oligonucleotide
cugauaaccuugccuacuc

SEQ ID NO: 2580084 - RNA, 19 nt, Artificial Sequence
  Description of Artificial Sequence: Synthetic oligonucleotide
gucaggagcgcuucauccc

SEQ ID NO: 2580085 - RNA, 19 nt, Artificial Sequence
  Description of Artificial Sequence: Synthetic oligonucleotide
acccuugaaacgcuuaguu

SEQ ID NO: 2580086 - RNA, 19 nt, Artificial Sequence
  Description of Artificial Sequence: Synthetic oligonucleotide
agcuuaaaggcuuggcauu

SEQ ID NO: 2580087 - RNA, 19 nt, Artificial Sequence
  Description of Artificial Sequence: Synthetic oligonucleotide
ugucuucagagcugaugca

SEQ ID NO: 2580088 - RNA, 19 nt, Artificial Sequence
  Description of Artificial Sequence: Synthetic oligonucleotide
uuguaggcuguaaccaaau

SEQ ID NO: 2580089 - RNA, 19 nt, Artificial Sequence
  Description of Artificial Sequence: Synthetic oligonucleotide
gcaagaaacgaaucugaac

SEQ ID NO: 2580090 - RNA, 19 nt, Artificial Sequence
  Description of Artificial Sequence: Synthetic oligonucleotide
gguuucagucaauaucuac

SEQ ID NO: 2580091 - RNA, 19 nt, Artificial Sequence
  Description of Artificial Sequence: Synthetic oligonucleotide
uuggguuuaucgucauuaa

SEQ ID NO: 2580092 - RNA, 19 nt, Artificial Sequence
  Description of Artificial Sequence: Synthetic oligonucleotide
cugguucaaucuccagucg

SEQ ID NO: 2580093 - RNA, 19 nt, Artificial Sequence
  Description of Artificial Sequence: Synthetic oligonucleotide
cugcgcaacugcuccacgg

SEQ ID NO: 2580094 - RNA, 19 nt, Artificial Sequence
  Description of Artificial Sequence: Synthetic oligonucleotide
cuugccuacuccgaccuug

SEQ ID NO: 2580095 - RNA, 19 nt, Artificial Sequence
  Description of Artificial Sequence: Synthetic oligonucleotide
ccgaccuugaagcuuaaag

SEQ ID NO: 2580096 - RNA, 19 nt, Artificial Sequence
  Description of Artificial Sequence: Synthetic oligonucleotide
ugcgcaacugcuccacggu

SEQ ID NO: 2580097 - RNA, 19 nt, Artificial Sequence
  Description of Artificial Sequence: Synthetic oligonucleotide
uuuguauauuuagguggac

SEQ ID NO: 2580098 - RNA, 19 nt, Artificial Sequence
  Description of Artificial Sequence: Synthetic oligonucleotide
uugggaaaguuuguuuuau

SEQ ID NO: 2580099 - RNA, 19 nt, Artificial Sequence
  Description of Artificial Sequence: Synthetic oligonucleotide
uuacaguuucaguacccuu

SEQ ID NO: 2580100 - RNA, 19 nt, Artificial Sequence
  Description of Artificial Sequence: Synthetic oligonucleotide
cucugauaaccuugccuac

SEQ ID NO: 2580101 - RNA, 19 nt, Artificial Sequence
  Description of Artificial Sequence: Synthetic oligonucleotide
gguauuugguggaauuuug

SEQ ID NO: 2580102 - RNA, 19 nt, Artificial Sequence
  Description of Artificial Sequence: Synthetic oligonucleotide
accuugccuacuccgaccu

SEQ ID NO: 2580103 - RNA, 19 nt, Artificial Sequence
  Description of Artificial Sequence: Synthetic oligonucleotide
augguccuuauuagcaguc

SEQ ID NO: 2580104 - RNA, 19 nt, Artificial Sequence
  Description of Artificial Sequence: Synthetic oligonucleotide
gucuucagagcugaugcac

SEQ ID NO: 2580105 - RNA, 19 nt, Artificial Sequence
  Description of Artificial Sequence: Synthetic oligonucleotide
gucucuucagauuugguuu

SEQ ID NO: 2580106 - RNA, 19 nt, Artificial Sequence
  Description of Artificial Sequence: Synthetic oligonucleotide
uuagguggacccucaucaa

SEQ ID NO: 2580107 - RNA, 19 nt, Artificial Sequence
  Description of Artificial Sequence: Synthetic oligonucleotide
gggaaaguuuguuuuaucu

SEQ ID NO: 2580108 - RNA, 19 nt, Artificial Sequence
  Description of Artificial Sequence: Synthetic oligonucleotide
guucaaucuccagucgagc

SEQ ID NO: 2580109 - RNA, 19 nt, Artificial Sequence
  Description of Artificial Sequence: Synthetic oligonucleotide
uauuuagguggacccucau

SEQ ID NO: 2580110 - RNA, 19 nt, Artificial Sequence
  Description of Artificial Sequence: Synthetic oligonucleotide
ggaauuuuggcaucaggcu

SEQ ID NO: 2580111 - RNA, 19 nt, Artificial Sequence
  Description of Artificial Sequence: Synthetic oligonucleotide
uguaaccaaaugguccuua

SEQ ID NO: 2580112 - RNA, 19 nt, Artificial Sequence
  Description of Artificial Sequence: Synthetic oligonucleotide
ggagugucccuguauacca

SEQ ID NO: 2580113 - RNA, 19 nt, Artificial Sequence
  Description of Artificial Sequence: Synthetic oligonucleotide
ccauucugguucaaucucc

SEQ ID NO: 2580114 - RNA, 19 nt, Artificial Sequence
  Description of Artificial Sequence: Synthetic oligonucleotide
gguucaaucuccagucgag

SEQ ID NO: 2580115 - RNA, 19 nt, Artificial Sequence
  Description of Artificial Sequence: Synthetic oligonucleotide
uccagucgagccuuuucuc

SEQ ID NO: 2580116 - RNA, 19 nt, Artificial Sequence
  Description of Artificial Sequence: Synthetic oligonucleotide
cauucugguucaaucucca

SEQ ID NO: 2580117 - RNA, 19 nt, Artificial Sequence
  Description of Artificial Sequence: Synthetic oligonucleotide
auaaccuugccuacuccga

SEQ ID NO: 2580118 - RNA, 19 nt, Artificial Sequence
  Description of Artificial Sequence: Synthetic oligonucleotide
aggcuguaaccaaaugguc

SEQ ID NO: 2580119 - RNA, 19 nt, Artificial Sequence
  Description of Artificial Sequence: Synthetic oligonucleotide
uuucuuuccauaggcccau

SEQ ID NO: 2580120 - RNA, 19 nt, Artificial Sequence
  Description of Artificial Sequence: Synthetic oligonucleotide
ucugaaccgugauccugca

SEQ ID NO: 2580121 - RNA, 19 nt, Artificial Sequence
  Description of Artificial Sequence: Synthetic oligonucleotide
acucauagucaggagcgcu

SEQ ID NO: 2580122 - RNA, 19 nt, Artificial Sequence
  Description of Artificial Sequence: Synthetic oligonucleotide
cuacuaauuccacuucaaa

SEQ ID NO: 2580123 - RNA, 19 nt, Artificial Sequence
  Description of Artificial Sequence: Synthetic oligonucleotide
uugccuacuccgaccuuga

SEQ ID NO: 2580124 - RNA, 19 nt, Artificial Sequence
  Description of Artificial Sequence: Synthetic oligonucleotide
ugguggaauuuuggcauca

SEQ ID NO: 2580125 - RNA, 19 nt, Artificial Sequence
  Description of Artificial Sequence: Synthetic oligonucleotide
uguuucccaauagcuuaug

SEQ ID NO: 2580126 - RNA, 19 nt, Artificial Sequence
  Description of Artificial Sequence: Synthetic oligonucleotide
ucccauccucugauaaccu

SEQ ID NO: 2580127 - RNA, 19 nt, Artificial Sequence
  Description of Artificial Sequence: Synthetic oligonucleotide
uacucauagucaggagcgc

SEQ ID NO: 2580128 - RNA, 19 nt, Artificial Sequence
  Description of Artificial Sequence: Synthetic oligonucleotide
ggguuuaucgucauuaagu

SEQ ID NO: 2580129 - RNA, 19 nt, Artificial Sequence
  Description of Artificial Sequence: Synthetic oligonucleotide
ccauccucugauaaccuug

SEQ ID NO: 2580130 - RNA, 19 nt, Artificial Sequence
  Description of Artificial Sequence: Synthetic oligonucleotide
ugguuucagucaauaucua

SEQ ID NO: 2580131 - RNA, 19 nt, Artificial Sequence
  Description of Artificial Sequence: Synthetic oligonucleotide
uuccauccgggaguguccc

SEQ ID NO: 2580132 - RNA, 19 nt, Artificial Sequence
  Description of Artificial Sequence: Synthetic oligonucleotide
agguggacccucaucaaga

SEQ ID NO: 2580133 - RNA, 19 nt, Artificial Sequence
  Description of Artificial Sequence: Synthetic oligonucleotide
auauuuagguggacccuca

SEQ ID NO: 2580134 - RNA, 19 nt, Artificial Sequence
  Description of Artificial Sequence: Synthetic oligonucleotide
acaguuccauccgggagug

SEQ ID NO: 2580135 - RNA, 19 nt, Artificial Sequence
  Description of Artificial Sequence: Synthetic oligonucleotide
gguggacccucaucaagag

SEQ ID NO: 2580136 - RNA, 19 nt, Artificial Sequence
  Description of Artificial Sequence: Synthetic oligonucleotide
gccuacuccgaccuugaag

SEQ ID NO: 2580137 - RNA, 19 nt, Artificial Sequence
  Description of Artificial Sequence: Synthetic oligonucleotide
auaggcccauucugguuca

SEQ ID NO: 2580138 - RNA, 19 nt, Artificial Sequence
  Description of Artificial Sequence: Synthetic oligonucleotide
cacgguccaugcacgcugg

SEQ ID NO: 2580139 - RNA, 19 nt, Artificial Sequence
  Description of Artificial Sequence: Synthetic oligonucleotide
gaaccgugauccugcagaa

SEQ ID NO: 2580140 - RNA, 19 nt, Artificial Sequence
  Description of Artificial Sequence: Synthetic oligonucleotide
ccagucgagccuuuucucc

SEQ ID NO: 2580141 - RNA, 19 nt, Artificial Sequence
  Description of Artificial Sequence: Synthetic oligonucleotide
caauagcuuaugcucugca

SEQ ID NO: 2580142 - RNA, 19 nt, Artificial Sequence
  Description of Artificial Sequence: Synthetic oligonucleotide
aggagcgcuucaucccauc

SEQ ID NO: 2580143 - RNA, 19 nt, Artificial Sequence
  Description of Artificial Sequence: Synthetic oligonucleotide
acuugauaauguccuucuu

SEQ ID NO: 2580144 - RNA, 19 nt, Artificial Sequence
  Description of Artificial Sequence: Synthetic oligonucleotide
agugaacaaugucucccuu

SEQ ID NO: 2580145 - RNA, 19 nt, Artificial Sequence
  Description of Artificial Sequence: Synthetic oligonucleotide
uacccuugaaacgcuuagu

SEQ ID NO: 2580146 - RNA, 19 nt, Artificial Sequence
  Description of Artificial Sequence: Synthetic oligonucleotide
ugguccuuauuagcagucu

SEQ ID NO: 2580147 - RNA, 19 nt, Artificial Sequence
  Description of Artificial Sequence: Synthetic oligonucleotide
aggcuguccuuucuuucca

SEQ ID NO: 2580148 - RNA, 19 nt, Artificial Sequence
  Description of Artificial Sequence: Synthetic oligonucleotide
cuuuccauaggcccauucu

SEQ ID NO: 2580149 - RNA, 19 nt, Artificial Sequence
  Description of Artificial Sequence: Synthetic oligonucleotide
gcuguaaccaaaugguccu

SEQ ID NO: 2580150 - RNA, 19 nt, Artificial Sequence
  Description of Artificial Sequence: Synthetic oligonucleotide
gguuuaucgucauuaaguu

SEQ ID NO: 2580151 - RNA, 19 nt, Artificial Sequence
  Description of Artificial Sequence: Synthetic oligonucleotide
ccagcagugaacaaugucu

SEQ ID NO: 2580152 - RNA, 19 nt, Artificial Sequence
  Description of Artificial Sequence: Synthetic oligonucleotide
guuccauccgggagugucc

SEQ ID NO: 2580153 - RNA, 19 nt, Artificial Sequence
  Description of Artificial Sequence: Synthetic oligonucleotide
uggggaacagccgccgcca

SEQ ID NO: 2580154 - RNA, 19 nt, Artificial Sequence
  Description of Artificial Sequence: Synthetic oligonucleotide
auagucaggagcgcuucau

SEQ ID NO: 2580155 - RNA, 19 nt, Artificial Sequence
  Description of Artificial Sequence: Synthetic oligonucleotide
guuguaggcuguaaccaaa

SEQ ID NO: 2580156 - RNA, 19 nt, Artificial Sequence
  Description of Artificial Sequence: Synthetic oligonucleotide
cugcucgcugcgcaacugc

SEQ ID NO: 2580157 - RNA, 19 nt, Artificial Sequence
  Description of Artificial Sequence: Synthetic oligonucleotide
auuagcagucuuagcuaca

SEQ ID NO: 2580158 - RNA, 19 nt, Artificial Sequence
  Description of Artificial Sequence: Synthetic oligonucleotide
uccgggagugucccuguau

SEQ ID NO: 2580159 - RNA, 19 nt, Artificial Sequence
  Description of Artificial Sequence: Synthetic oligonucleotide
ccucugauaaccuugccua

SEQ ID NO: 2580160 - RNA, 19 nt, Artificial Sequence
  Description of Artificial Sequence: Synthetic oligonucleotide
gggagugucccuguauacc

SEQ ID NO: 2580161 - RNA, 19 nt, Artificial Sequence
  Description of Artificial Sequence: Synthetic oligonucleotide
cagucaauaucuacuaauu

SEQ ID NO: 2580162 - RNA, 19 nt, Artificial Sequence
  Description of Artificial Sequence: Synthetic oligonucleotide
uucaucccauccucugaua

SEQ ID NO: 2580163 - RNA, 19 nt, Artificial Sequence
  Description of Artificial Sequence: Synthetic oligonucleotide
gagccuuuucuccuuuacu

SEQ ID NO: 2580164 - RNA, 19 nt, Artificial Sequence
  Description of Artificial Sequence: Synthetic oligonucleotide
ucuugggcagcugcucgcu

SEQ ID NO: 2580165 - RNA, 19 nt, Artificial Sequence
  Description of Artificial Sequence: Synthetic oligonucleotide
gaaacuugauaauguccuu

SEQ ID NO: 2580166 - RNA, 19 nt, Artificial Sequence
  Description of Artificial Sequence: Synthetic oligonucleotide
agcuuaugcucugcaagaa

SEQ ID NO: 2580167 - RNA, 19 nt, Artificial Sequence
  Description of Artificial Sequence: Synthetic oligonucleotide
gguuguaggcuguaaccaa

SEQ ID NO: 2580168 - RNA, 19 nt, Artificial Sequence
  Description of Artificial Sequence: Synthetic oligonucleotide
uugaaacgcuuaguuucaa

SEQ ID NO: 2580169 - RNA, 19 nt, Artificial Sequence
  Description of Artificial Sequence: Synthetic oligonucleotide
ggcccauucugguucaauc

SEQ ID NO: 2580170 - RNA, 19 nt, Artificial Sequence
  Description of Artificial Sequence: Synthetic oligonucleotide
uaucgucauuaaguuucac

SEQ ID NO: 2580171 - RNA, 19 nt, Artificial Sequence
  Description of Artificial Sequence: Synthetic oligonucleotide
guuuaucgucauuaaguuu

SEQ ID NO: 2580172 - RNA, 19 nt, Artificial Sequence
  Description of Artificial Sequence: Synthetic oligonucleotide
gaaucugaaccgugauccu

SEQ ID NO: 2580173 - RNA, 19 nt, Artificial Sequence
  Description of Artificial Sequence: Synthetic oligonucleotide
cugaaccgugauccugcag

SEQ ID NO: 2580174 - RNA, 19 nt, Artificial Sequence
  Description of Artificial Sequence: Synthetic oligonucleotide
aguuugguauuugguggaa

SEQ ID NO: 2580175 - RNA, 19 nt, Artificial Sequence
  Description of Artificial Sequence: Synthetic oligonucleotide
uacuccgaccuugaagcuu

SEQ ID NO: 2580176 - RNA, 19 nt, Artificial Sequence
  Description of Artificial Sequence: Synthetic oligonucleotide
acuccgaccuugaagcuua

SEQ ID NO: 2580177 - RNA, 19 nt, Artificial Sequence
  Description of Artificial Sequence: Synthetic oligonucleotide
aagaugguuguaggcugua

SEQ ID NO: 2580178 - RNA, 19 nt, Artificial Sequence
  Description of Artificial Sequence: Synthetic oligonucleotide
ccuuuacucauagucagga

SEQ ID NO: 2580179 - RNA, 19 nt, Artificial Sequence
  Description of Artificial Sequence: Synthetic oligonucleotide
uccaugcacgcuggggaac

SEQ ID NO: 2580180 - RNA, 19 nt, Artificial Sequence
  Description of Artificial Sequence: Synthetic oligonucleotide
cuuacaguuucaguacccu

SEQ ID NO: 2580181 - RNA, 19 nt, Artificial Sequence
  Description of Artificial Sequence: Synthetic oligonucleotide
auguuucccaauagcuuau

SEQ ID NO: 2580182 - RNA, 19 nt, Artificial Sequence
  Description of Artificial Sequence: Synthetic oligonucleotide
acgcuggggaacagccgcc

SEQ ID NO: 2580183 - RNA, 19 nt, Artificial Sequence
  Description of Artificial Sequence: Synthetic oligonucleotide
agucgagccuuuucuccuu

SEQ ID NO: 2580184 - RNA, 19 nt, Artificial Sequence
  Description of Artificial Sequence: Synthetic oligonucleotide
agcugcucgcugcgcaacu

SEQ ID NO: 2580185 - RNA, 19 nt, Artificial Sequence
  Description of Artificial Sequence: Synthetic oligonucleotide
cccaauagcuuaugcucug

SEQ ID NO: 2580186 - RNA, 19 nt, Artificial Sequence
  Description of Artificial Sequence: Synthetic oligonucleotide
aguacccuugaaacgcuua

SEQ ID NO: 2580187 - RNA, 19 nt, Artificial Sequence
  Description of Artificial Sequence: Synthetic oligonucleotide
acgguccaugcacgcuggg

SEQ ID NO: 2580188 - RNA, 19 nt, Artificial Sequence
  Description of Artificial Sequence: Synthetic oligonucleotide
cagugaacaaugucucccu

SEQ ID NO: 2580189 - RNA, 19 nt, Artificial Sequence
  Description of Artificial Sequence: Synthetic oligonucleotide
guauaccagcagugaacaa

SEQ ID NO: 2580190 - RNA, 19 nt, Artificial Sequence
  Description of Artificial Sequence: Synthetic oligonucleotide
gcuuaugcucugcaagaaa

SEQ ID NO: 2580191 - RNA, 19 nt, Artificial Sequence
  Description of Artificial Sequence: Synthetic oligonucleotide
cuugggcagcugcucgcug

SEQ ID NO: 2580192 - RNA, 19 nt, Artificial Sequence
  Description of Artificial Sequence: Synthetic oligonucleotide
aaccgugauccugcagaaa

SEQ ID NO: 2580193 - RNA, 19 nt, Artificial Sequence
  Description of Artificial Sequence: Synthetic oligonucleotide
gcuucaucccauccucuga

SEQ ID NO: 2580194 - RNA, 19 nt, Artificial Sequence
  Description of Artificial Sequence: Synthetic oligonucleotide
agaugguuguaggcuguaa

SEQ ID NO: 2580195 - RNA, 19 nt, Artificial Sequence
  Description of Artificial Sequence: Synthetic oligonucleotide
cuucaucccauccucugau

SEQ ID NO: 2580196 - RNA, 19 nt, Artificial Sequence
  Description of Artificial Sequence: Synthetic oligonucleotide
guccaugcacgcuggggaa

SEQ ID NO: 2580197 - RNA, 19 nt, Artificial Sequence
  Description of Artificial Sequence: Synthetic oligonucleotide
ucgcugcgcaacugcucca

SEQ ID NO: 2580198 - RNA, 19 nt, Artificial Sequence
  Description of Artificial Sequence: Synthetic oligonucleotide
ccaauagcuuaugcucugc

SEQ ID NO: 2580199 - RNA, 19 nt, Artificial Sequence
  Description of Artificial Sequence: Synthetic oligonucleotide
ugccuacuccgaccuugaa

SEQ ID NO: 2580200 - RNA, 19 nt, Artificial Sequence
  Description of Artificial Sequence: Synthetic oligonucleotide
gcuccacgguccaugcacg

SEQ ID NO: 2580201 - RNA, 19 nt, Artificial Sequence
  Description of Artificial Sequence: Synthetic oligonucleotide
ccuguauaccagcagugaa

SEQ ID NO: 2580202 - RNA, 19 nt, Artificial Sequence
  Description of Artificial Sequence: Synthetic oligonucleotide
ugguuucuuuggguuuauc

SEQ ID NO: 2580203 - RNA, 19 nt, Artificial Sequence
  Description of Artificial Sequence: Synthetic oligonucleotide
cagucgagccuuuucuccu

SEQ ID NO: 2580204 - RNA, 19 nt, Artificial Sequence
  Description of Artificial Sequence: Synthetic oligonucleotide
gcugcgcaacugcuccacg

SEQ ID NO: 2580205 - RNA, 19 nt, Artificial Sequence
  Description of Artificial Sequence: Synthetic oligonucleotide
ggaacagccgccgccaucu

SEQ ID NO: 2580206 - RNA, 19 nt, Artificial Sequence
  Description of Artificial Sequence: Synthetic oligonucleotide
uccauccgggagugucccu

SEQ ID NO: 2580207 - RNA, 19 nt, Artificial Sequence
  Description of Artificial Sequence: Synthetic oligonucleotide
gcccauucugguucaaucu

SEQ ID NO: 2580208 - RNA, 19 nt, Artificial Sequence
  Description of Artificial Sequence: Synthetic oligonucleotide
caugcacgcuggggaacag

SEQ ID NO: 2580209 - RNA, 19 nt, Artificial Sequence
  Description of Artificial Sequence: Synthetic oligonucleotide
ggcaucaggcuguccuuuc

SEQ ID NO: 2580210 - RNA, 19 nt, Artificial Sequence
  Description of Artificial Sequence: Synthetic oligonucleotide
uccgaccuugaagcuuaaa

SEQ ID NO: 2580211 - RNA, 19 nt, Artificial Sequence
  Description of Artificial Sequence: Synthetic oligonucleotide
guuugguauuugguggaau

SEQ ID NO: 2580212 - RNA, 19 nt, Artificial Sequence
  Description of Artificial Sequence: Synthetic oligonucleotide
guggacccucaucaagagu

SEQ ID NO: 2580213 - RNA, 19 nt, Artificial Sequence
  Description of Artificial Sequence: Synthetic oligonucleotide
cgcuucaucccauccucug

SEQ ID NO: 2580214 - RNA, 19 nt, Artificial Sequence
  Description of Artificial Sequence: Synthetic oligonucleotide
gcacgcuggggaacagccg

SEQ ID NO: 2580215 - RNA, 19 nt, Artificial Sequence
  Description of Artificial Sequence: Synthetic oligonucleotide
cagcugcucgcugcgcaac

SEQ ID NO: 2580216 - RNA, 19 nt, Artificial Sequence
  Description of Artificial Sequence: Synthetic oligonucleotide
gguccuuauuagcagucuu

SEQ ID NO: 2580217 - RNA, 19 nt, Artificial Sequence
  Description of Artificial Sequence: Synthetic oligonucleotide
aggcccauucugguucaau

SEQ ID NO: 2580218 - RNA, 19 nt, Artificial Sequence
  Description of Artificial Sequence: Synthetic oligonucleotide
gcuguccuuucuuuccaua

SEQ ID NO: 2580219 - RNA, 19 nt, Artificial Sequence
  Description of Artificial Sequence: Synthetic oligonucleotide
cuacuccgaccuugaagcu

SEQ ID NO: 2580220 - RNA, 19 nt, Artificial Sequence
  Description of Artificial Sequence: Synthetic oligonucleotide
caguuucaguacccuugaa

SEQ ID NO: 2580221 - RNA, 19 nt, Artificial Sequence
  Description of Artificial Sequence: Synthetic oligonucleotide
caaucuccagucgagccuu

SEQ ID NO: 2580222 - RNA, 19 nt, Artificial Sequence
  Description of Artificial Sequence: Synthetic oligonucleotide
gggaacagccgccgccauc

SEQ ID NO: 2580223 - RNA, 19 nt, Artificial Sequence
  Description of Artificial Sequence: Synthetic oligonucleotide
auccgggagugucccugua

SEQ ID NO: 2580224 - RNA, 19 nt, Artificial Sequence
  Description of Artificial Sequence: Synthetic oligonucleotide
cgggagugucccuguauac

SEQ ID NO: 2580225 - RNA, 19 nt, Artificial Sequence
  Description of Artificial Sequence: Synthetic oligonucleotide
uucuuuccauaggcccauu

SEQ ID NO: 2580226 - RNA, 19 nt, Artificial Sequence
  Description of Artificial Sequence: Synthetic oligonucleotide
gcugcucgcugcgcaacug

SEQ ID NO: 2580227 - RNA, 19 nt, Artificial Sequence
  Description of Artificial Sequence: Synthetic oligonucleotide
cccuguauaccagcaguga

SEQ ID NO: 2580228 - RNA, 19 nt, Artificial Sequence
  Description of Artificial Sequence: Synthetic oligonucleotide
gcaucaggcuguccuuucu

SEQ ID NO: 2580229 - RNA, 19 nt, Artificial Sequence
  Description of Artificial Sequence: Synthetic oligonucleotide
gcagucuuagcuacauuuu

SEQ ID NO: 2580230 - RNA, 19 nt, Artificial Sequence
  Description of Artificial Sequence: Synthetic oligonucleotide
cugcuccacgguccaugca

SEQ ID NO: 2580231 - RNA, 19 nt, Artificial Sequence
  Description of Artificial Sequence: Synthetic oligonucleotide
uaggcccauucugguucaa

SEQ ID NO: 2580232 - RNA, 19 nt, Artificial Sequence
  Description of Artificial Sequence: Synthetic oligonucleotide
cuuuggguuuaucgucauu

SEQ ID NO: 2580233 - RNA, 19 nt, Artificial Sequence
  Description of Artificial Sequence: Synthetic oligonucleotide
cauccgggagugucccugu

SEQ ID NO: 2580234 - RNA, 19 nt, Artificial Sequence
  Description of Artificial Sequence: Synthetic oligonucleotide
cuuaaaggcuuggcauuuu

SEQ ID NO: 2580235 - RNA, 19 nt, Artificial Sequence
  Description of Artificial Sequence: Synthetic oligonucleotide
gcagcugcucgcugcgcaa

SEQ ID NO: 2580236 - RNA, 19 nt, Artificial Sequence
  Description of Artificial Sequence: Synthetic oligonucleotide
ccgggagugucccuguaua

SEQ ID NO: 2580237 - RNA, 19 nt, Artificial Sequence
  Description of Artificial Sequence: Synthetic oligonucleotide
ccaugcacgcuggggaaca

SEQ ID NO: 2580238 - RNA, 19 nt, Artificial Sequence
  Description of Artificial Sequence: Synthetic oligonucleotide
cccuugaaacgcuuaguuu

SEQ ID NO: 2580239 - RNA, 19 nt, Artificial Sequence
  Description of Artificial Sequence: Synthetic oligonucleotide
gcucgcugcgcaacugcuc

SEQ ID NO: 2580240 - RNA, 19 nt, Artificial Sequence
  Description of Artificial Sequence: Synthetic oligonucleotide
cagagcugaugcacugguu

SEQ ID NO: 2580241 - RNA, 19 nt, Artificial Sequence
  Description of Artificial Sequence: Synthetic oligonucleotide
ggacccucaucaagagucu

SEQ ID NO: 2580242 - RNA, 19 nt, Artificial Sequence
  Description of Artificial Sequence: Synthetic oligonucleotide
caguacccuugaaacgcuu

SEQ ID NO: 2580243 - RNA, 19 nt, Artificial Sequence
  Description of Artificial Sequence: Synthetic oligonucleotide
cuccgaccuugaagcuuaa

SEQ ID NO: 2580244 - RNA, 19 nt, Artificial Sequence
  Description of Artificial Sequence: Synthetic oligonucleotide
ggcuguccuuucuuuccau

SEQ ID NO: 2580245 - RNA, 19 nt, Artificial Sequence
  Description of Artificial Sequence: Synthetic oligonucleotide
caggagcgcuucaucccau

SEQ ID NO: 2580246 - RNA, 19 nt, Artificial Sequence
  Description of Artificial Sequence: Synthetic oligonucleotide
cgucauuaaguuucacauu

SEQ ID NO: 2580247 - RNA, 19 nt, Artificial Sequence
  Description of Artificial Sequence: Synthetic oligonucleotide
cuguaaccaaaugguccuu

SEQ ID NO: 2580248 - RNA, 19 nt, Artificial Sequence
  Description of Artificial Sequence: Synthetic oligonucleotide
gaacagccgccgccaucuu

SEQ ID NO: 2580249 - RNA, 19 nt, Artificial Sequence
  Description of Artificial Sequence: Synthetic oligonucleotide
ccauaggcccauucugguu

SEQ ID NO: 2580250 - RNA, 19 nt, Artificial Sequence
  Description of Artificial Sequence: Synthetic oligonucleotide
cccauccucugauaaccuu

SEQ ID NO: 2580251 - RNA, 19 nt, Artificial Sequence
  Description of Artificial Sequence: Synthetic oligonucleotide
cgugauccugcagaaacuu

SEQ ID NO: 2580252 - RNA, 19 nt, Artificial Sequence
  Description of Artificial Sequence: Synthetic oligonucleotide
cccucaucaagagucucuu

SEQ ID NO: 2580253 - RNA, 19 nt, Artificial Sequence
  Description of Artificial Sequence: Synthetic oligonucleotide
gcgcuucaucccauccucu

SEQ ID NO: 2580254 - RNA, 19 nt, Artificial Sequence
  Description of Artificial Sequence: Synthetic oligonucleotide
ggggaacagccgccgccau

SEQ ID NO: 2580255 - RNA, 19 nt, Artificial Sequence
  Description of Artificial Sequence: Synthetic oligonucleotide
caacugcuccacgguccau

SEQ ID NO: 2580256 - RNA, 19 nt, Artificial Sequence
  Description of Artificial Sequence: Synthetic oligonucleotide
caguuccauccgggagugu

SEQ ID NO: 2580257 - RNA, 19 nt, Artificial Sequence
  Description of Artificial Sequence: Synthetic oligonucleotide
aaagucauacuccagugag

SEQ ID NO: 2580258 - RNA, 19 nt, Artificial Sequence
  Description of Artificial Sequence: Synthetic oligonucleotide
augagcacugcucagaccc

SEQ ID NO: 2580259 - RNA, 19 nt, Artificial Sequence
  Description of Artificial Sequence: Synthetic oligonucleotide
uguaccuucagccuucagg

SEQ ID NO: 2580260 - RNA, 19 nt, Artificial Sequence
  Description of Artificial Sequence: Synthetic oligonucleotide
aaaccuugccuauaggcuc

SEQ ID NO: 2580261 - RNA, 19 nt, Artificial Sequence
  Description of Artificial Sequence: Synthetic oligonucleotide
ugaaguagggcauaguugu

SEQ ID NO: 2580262 - RNA, 19 nt, Artificial Sequence
  Description of Artificial Sequence: Synthetic oligonucleotide
aacauaucugcccagugcu

SEQ ID NO: 2580263 - RNA, 19 nt, Artificial Sequence
  Description of Artificial Sequence: Synthetic oligonucleotide
auuuggggaaacugaagcc

SEQ ID NO: 2580264 - RNA, 19 nt, Artificial Sequence
  Description of Artificial Sequence: Synthetic oligonucleotide
uggagugaggccuagguag

SEQ ID NO: 2580265 - RNA, 19 nt, Artificial Sequence
  Description of Artificial Sequence: Synthetic oligonucleotide
aagccuacagucuuuggag

SEQ ID NO: 2580266 - RNA, 19 nt, Artificial Sequence
  Description of Artificial Sequence: Synthetic oligonucleotide
aaagugaaggccucguuga

SEQ ID NO: 2580267 - RNA, 19 nt, Artificial Sequence
  Description of Artificial Sequence: Synthetic oligonucleotide
caaaaccuugccuauaggc

SEQ ID NO: 2580268 - RNA, 19 nt, Artificial Sequence
  Description of Artificial Sequence: Synthetic oligonucleotide
cuaaagggaaccaggaaag

SEQ ID NO: 2580269 - RNA, 19 nt, Artificial Sequence
  Description of Artificial Sequence: Synthetic oligonucleotide
cauuuggggaaacugaagc

SEQ ID NO: 2580270 - RNA, 19 nt, Artificial Sequence
  Description of Artificial Sequence: Synthetic oligonucleotide
auaguugugcccuucuuag

SEQ ID NO: 2580271 - RNA, 19 nt, Artificial Sequence
  Description of Artificial Sequence: Synthetic oligonucleotide
cagacaagagaccaggagg

SEQ ID NO: 2580272 - RNA, 19 nt, Artificial Sequence
  Description of Artificial Sequence: Synthetic oligonucleotide
ugccuauaggcucagcccg

SEQ ID NO: 2580273 - RNA, 19 nt, Artificial Sequence
  Description of Artificial Sequence: Synthetic oligonucleotide
aguagggcauaguugugcc

SEQ ID NO: 2580274 - RNA, 19 nt, Artificial Sequence
  Description of Artificial Sequence: Synthetic oligonucleotide
ucugguuuaacaugagcug

SEQ ID NO: 2580275 - RNA, 19 nt, Artificial Sequence
  Description of Artificial Sequence: Synthetic oligonucleotide
agcaguagaugacacagag

SEQ ID NO: 2580276 - RNA, 19 nt, Artificial Sequence
  Description of Artificial Sequence: Synthetic oligonucleotide
uugaaguagggcauaguug

SEQ ID NO: 2580277 - RNA, 19 nt, Artificial Sequence
  Description of Artificial Sequence: Synthetic oligonucleotide
uccaaagucauacuccagu

SEQ ID NO: 2580278 - RNA, 19 nt, Artificial Sequence
  Description of Artificial Sequence: Synthetic oligonucleotide
aaucuccuggcuuccaaag

SEQ ID NO: 2580279 - RNA, 19 nt, Artificial Sequence
  Description of Artificial Sequence: Synthetic oligonucleotide
agugcuguagagguugucc

SEQ ID NO: 2580280 - RNA, 19 nt, Artificial Sequence
  Description of Artificial Sequence: Synthetic oligonucleotide
ucuuagaggauguuuuccu

SEQ ID NO: 2580281 - RNA, 19 nt, Artificial Sequence
  Description of Artificial Sequence: Synthetic oligonucleotide
agcaaaaccuugccuauag

SEQ ID NO: 2580282 - RNA, 19 nt, Artificial Sequence
  Description of Artificial Sequence: Synthetic oligonucleotide
cuugccuauaggcucagcc

SEQ ID NO: 2580283 - RNA, 19 nt, Artificial Sequence
  Description of Artificial Sequence: Synthetic oligonucleotide
agucauacuccagugagag

SEQ ID NO: 2580284 - RNA, 19 nt, Artificial Sequence
  Description of Artificial Sequence: Synthetic oligonucleotide
uuagaggauguuuuccucu

SEQ ID NO: 2580285 - RNA, 19 nt, Artificial Sequence
  Description of Artificial Sequence: Synthetic oligonucleotide
uauaggcucagcccgguga

SEQ ID NO: 2580286 - RNA, 19 nt, Artificial Sequence
  Description of Artificial Sequence: Synthetic oligonucleotide
gguggaaacacugaugcgg

SEQ ID NO: 2580287 - RNA, 19 nt, Artificial Sequence
  Description of Artificial Sequence: Synthetic oligonucleotide
cuggcuaaagggaaccagg

SEQ ID NO: 2580288 - RNA, 19 nt, Artificial Sequence
  Description of Artificial Sequence: Synthetic oligonucleotide
uucaugucuucucccagcc

SEQ ID NO: 2580289 - RNA, 19 nt, Artificial Sequence
  Description of Artificial Sequence: Synthetic oligonucleotide
ugaaccaggugaguagugg

SEQ ID NO: 2580290 - RNA, 19 nt, Artificial Sequence
  Description of Artificial Sequence: Synthetic oligonucleotide
guccacaucugguugaacc

SEQ ID NO: 2580291 - RNA, 19 nt, Artificial Sequence
  Description of Artificial Sequence: Synthetic oligonucleotide
aagggaaccaggaaaguga

SEQ ID NO: 2580292 - RNA, 19 nt, Artificial Sequence
  Description of Artificial Sequence: Synthetic oligonucleotide
uagagguuguccugaagcc

SEQ ID NO: 2580293 - RNA, 19 nt, Artificial Sequence
  Description of Artificial Sequence: Synthetic oligonucleotide
cugguuuaacaugagcugg

SEQ ID NO: 2580294 - RNA, 19 nt, Artificial Sequence
  Description of Artificial Sequence: Synthetic oligonucleotide
uuuggggaaacugaagccu

SEQ ID NO: 2580295 - RNA, 19 nt, Artificial Sequence
  Description of Artificial Sequence: Synthetic oligonucleotide
ugaguaguggugcugcuau

SEQ ID NO: 2580296 - RNA, 19 nt, Artificial Sequence
  Description of Artificial Sequence: Synthetic oligonucleotide
uugccuauaggcucagccc

SEQ ID NO: 2580297 - RNA, 19 nt, Artificial Sequence
  Description of Artificial Sequence: Synthetic oligonucleotide
gaaccaggaaagugaaggc

SEQ ID NO: 2580298 - RNA, 19 nt, Artificial Sequence
  Description of Artificial Sequence: Synthetic oligonucleotide
uucagccugccucaggccc

SEQ ID NO: 2580299 - RNA, 19 nt, Artificial Sequence
  Description of Artificial Sequence: Synthetic oligonucleotide
uccauuuggggaaacugaa

SEQ ID NO: 2580300 - RNA, 19 nt, Artificial Sequence
  Description of Artificial Sequence: Synthetic oligonucleotide
ugggccaacauaucugccc

SEQ ID NO: 2580301 - RNA, 19 nt, Artificial Sequence
  Description of Artificial Sequence: Synthetic oligonucleotide
uucuuagaggauguuuucc

SEQ ID NO: 2580302 - RNA, 19 nt, Artificial Sequence
  Description of Artificial Sequence: Synthetic oligonucleotide
ucuccuggcuuccaaaguc

SEQ ID NO: 2580303 - RNA, 19 nt, Artificial Sequence
  Description of Artificial Sequence: Synthetic oligonucleotide
aguggugcugcuaugagca

SEQ ID NO: 2580304 - RNA, 19 nt, Artificial Sequence
  Description of Artificial Sequence: Synthetic oligonucleotide
ugguuuaacaugagcugga

SEQ ID NO: 2580305 - RNA, 19 nt, Artificial Sequence
  Description of Artificial Sequence: Synthetic oligonucleotide
aacugaagccuacagucuu

SEQ ID NO: 2580306 - RNA, 19 nt, Artificial Sequence
  Description of Artificial Sequence: Synthetic oligonucleotide
accaggugaguaguggugc

SEQ ID NO: 2580307 - RNA, 19 nt, Artificial Sequence
  Description of Artificial Sequence: Synthetic oligonucleotide
cagguuuucagccugccuc

SEQ ID NO: 2580308 - RNA, 19 nt, Artificial Sequence
  Description of Artificial Sequence: Synthetic oligonucleotide
acccuaaucuccuggcuuc

SEQ ID NO: 2580309 - RNA, 19 nt, Artificial Sequence
  Description of Artificial Sequence: Synthetic oligonucleotide
uccacaucugguugaacca

SEQ ID NO: 2580310 - RNA, 19 nt, Artificial Sequence
  Description of Artificial Sequence: Synthetic oligonucleotide
agugagagcagcagucgcc

SEQ ID NO: 2580311 - RNA, 19 nt, Artificial Sequence
  Description of Artificial Sequence: Synthetic oligonucleotide
gagcagacaagagaccagg

SEQ ID NO: 2580312 - RNA, 19 nt, Artificial Sequence
  Description of Artificial Sequence: Synthetic oligonucleotide
agaccaggaggacuccagc

SEQ ID NO: 2580313 - RNA, 19 nt, Artificial Sequence
  Description of Artificial Sequence: Synthetic oligonucleotide
agucuuuggagugaggccu

SEQ ID NO: 2580314 - RNA, 19 nt, Artificial Sequence
  Description of Artificial Sequence: Synthetic oligonucleotide
aaggccucguugaaguagg

SEQ ID NO: 2580315 - RNA, 19 nt, Artificial Sequence
  Description of Artificial Sequence: Synthetic oligonucleotide
cagagcacgguccaccucc

SEQ ID NO: 2580316 - RNA, 19 nt, Artificial Sequence
  Description of Artificial Sequence: Synthetic oligonucleotide
ugggcgauaggccgucugg

SEQ ID NO: 2580317 - RNA, 19 nt, Artificial Sequence
  Description of Artificial Sequence: Synthetic oligonucleotide
uggcuaaagggaaccagga

SEQ ID NO: 2580318 - RNA, 19 nt, Artificial Sequence
  Description of Artificial Sequence: Synthetic oligonucleotide
ugcagguggugccacuggg

SEQ ID NO: 2580319 - RNA, 19 nt, Artificial Sequence
  Description of Artificial Sequence: Synthetic oligonucleotide
ugcccagugcuguagaggu

SEQ ID NO: 2580320 - RNA, 19 nt, Artificial Sequence
  Description of Artificial Sequence: Synthetic oligonucleotide
aggugaguaguggugcugc

SEQ ID NO: 2580321 - RNA, 19 nt, Artificial Sequence
  Description of Artificial Sequence: Synthetic oligonucleotide
acugaugcgggcguagggg

SEQ ID NO: 2580322 - RNA, 19 nt, Artificial Sequence
  Description of Artificial Sequence: Synthetic oligonucleotide
ugcucagacccacagcuuc

SEQ ID NO: 2580323 - RNA, 19 nt, Artificial Sequence
  Description of Artificial Sequence: Synthetic oligonucleotide
gaaggccucguugaaguag

SEQ ID NO: 2580324 - RNA, 19 nt, Artificial Sequence
  Description of Artificial Sequence: Synthetic oligonucleotide
guugugcccuucuuagagg

SEQ ID NO: 2580325 - RNA, 19 nt, Artificial Sequence
  Description of Artificial Sequence: Synthetic oligonucleotide
caggugaggcuucagggcc

SEQ ID NO: 2580326 - RNA, 19 nt, Artificial Sequence
  Description of Artificial Sequence: Synthetic oligonucleotide
ggugaugcaggccaugggc

SEQ ID NO: 2580327 - RNA, 19 nt, Artificial Sequence
  Description of Artificial Sequence: Synthetic oligonucleotide
cuuagaggauguuuuccuc

SEQ ID NO: 2580328 - RNA, 19 nt, Artificial Sequence
  Description of Artificial Sequence: Synthetic oligonucleotide
cucugguuuaacaugagcu

SEQ ID NO: 2580329 - RNA, 19 nt, Artificial Sequence
  Description of Artificial Sequence: Synthetic oligonucleotide
agacaagagaccaggagga

SEQ ID NO: 2580330 - RNA, 19 nt, Artificial Sequence
  Description of Artificial Sequence: Synthetic oligonucleotide
aaacugaagccuacagucu

SEQ ID NO: 2580331 - RNA, 19 nt, Artificial Sequence
  Description of Artificial Sequence: Synthetic oligonucleotide
gguugaaccaggugaguag

SEQ ID NO: 2580332 - RNA, 19 nt, Artificial Sequence
  Description of Artificial Sequence: Synthetic oligonucleotide
ugaagccuacagucuuugg

SEQ ID NO: 2580333 - RNA, 19 nt, Artificial Sequence
  Description of Artificial Sequence: Synthetic oligonucleotide
cuaugagcacugcucagac

SEQ ID NO: 2580334 - RNA, 19 nt, Artificial Sequence
  Description of Artificial Sequence: Synthetic oligonucleotide
cagccuucagguuuucagc

SEQ ID NO: 2580335 - RNA, 19 nt, Artificial Sequence
  Description of Artificial Sequence: Synthetic oligonucleotide
ugggcuucuuccugcggcg

SEQ ID NO: 2580336 - RNA, 19 nt, Artificial Sequence
  Description of Artificial Sequence: Synthetic oligonucleotide
agguccacacucuggagcu

SEQ ID NO: 2580337 - RNA, 19 nt, Artificial Sequence
  Description of Artificial Sequence: Synthetic oligonucleotide
ggaaacacugaugcgggcg

SEQ ID NO: 2580338 - RNA, 19 nt, Artificial Sequence
  Description of Artificial Sequence: Synthetic oligonucleotide
gcuaaagggaaccaggaaa

SEQ ID NO: 2580339 - RNA, 19 nt, Artificial Sequence
  Description of Artificial Sequence: Synthetic oligonucleotide
cuuccugcggcgcuggcag

SEQ ID NO: 2580340 - RNA, 19 nt, Artificial Sequence
  Description of Artificial Sequence: Synthetic oligonucleotide
agacccacagcuucuuugu

SEQ ID NO: 2580341 - RNA, 19 nt, Artificial Sequence
  Description of Artificial Sequence: Synthetic oligonucleotide
aagagaccaggaggacucc

SEQ ID NO: 2580342 - RNA, 19 nt, Artificial Sequence
  Description of Artificial Sequence: Synthetic oligonucleotide
uugaaccaggugaguagug

SEQ ID NO: 2580343 - RNA, 19 nt, Artificial Sequence
  Description of Artificial Sequence: Synthetic oligonucleotide
uaggccgucuggcaugggc

SEQ ID NO: 2580344 - RNA, 19 nt, Artificial Sequence
  Description of Artificial Sequence: Synthetic oligonucleotide
uacuccagugagagcagca

SEQ ID NO: 2580345 - RNA, 19 nt, Artificial Sequence
  Description of Artificial Sequence: Synthetic oligonucleotide
uaugagcacugcucagacc

SEQ ID NO: 2580346 - RNA, 19 nt, Artificial Sequence
  Description of Artificial Sequence: Synthetic oligonucleotide
aguaguggugcugcuauga

SEQ ID NO: 2580347 - RNA, 19 nt, Artificial Sequence
  Description of Artificial Sequence: Synthetic oligonucleotide
caugggcccagacagccag

SEQ ID NO: 2580348 - RNA, 19 nt, Artificial Sequence
  Description of Artificial Sequence: Synthetic oligonucleotide
uggaccuucaugucuucuc

SEQ ID NO: 2580349 - RNA, 19 nt, Artificial Sequence
  Description of Artificial Sequence: Synthetic oligonucleotide
uacagucuuuggagugagg

SEQ ID NO: 2580350 - RNA, 19 nt, Artificial Sequence
  Description of Artificial Sequence: Synthetic oligonucleotide
gauaggccgucuggcaugg

SEQ ID NO: 2580351 - RNA, 19 nt, Artificial Sequence
  Description of Artificial Sequence: Synthetic oligonucleotide
cagacccacagcuucuuug

SEQ ID NO: 2580352 - RNA, 19 nt, Artificial Sequence
  Description of Artificial Sequence: Synthetic oligonucleotide
guaguggugcugcuaugag

SEQ ID NO: 2580353 - RNA, 19 nt, Artificial Sequence
  Description of Artificial Sequence: Synthetic oligonucleotide
agguaggggcaggugaggc

SEQ ID NO: 2580354 - RNA, 19 nt, Artificial Sequence
  Description of Artificial Sequence: Synthetic oligonucleotide
accuucagccuucagguuu

SEQ ID NO: 2580355 - RNA, 19 nt, Artificial Sequence
  Description of Artificial Sequence: Synthetic oligonucleotide
uaaucuccuggcuuccaaa

SEQ ID NO: 2580356 - RNA, 19 nt, Artificial Sequence
  Description of Artificial Sequence: Synthetic oligonucleotide
guuguccugaagcccuggg

SEQ ID NO: 2580357 - RNA, 19 nt, Artificial Sequence
  Description of Artificial Sequence: Synthetic oligonucleotide
ucagguuuucagccugccu

SEQ ID NO: 2580358 - RNA, 19 nt, Artificial Sequence
  Description of Artificial Sequence: Synthetic oligonucleotide
agugaaggccucguugaag

SEQ ID NO: 2580359 - RNA, 19 nt, Artificial Sequence
  Description of Artificial Sequence: Synthetic oligonucleotide
auacuccagugagagcagc

SEQ ID NO: 2580360 - RNA, 19 nt, Artificial Sequence
  Description of Artificial Sequence: Synthetic oligonucleotide
uggcagcagcaguagauga

SEQ ID NO: 2580361 - RNA, 19 nt, Artificial Sequence
  Description of Artificial Sequence: Synthetic oligonucleotide
aaccaggugaguaguggug

SEQ ID NO: 2580362 - RNA, 19 nt, Artificial Sequence
  Description of Artificial Sequence: Synthetic oligonucleotide
uccugaagcccugggaccc

SEQ ID NO: 2580363 - RNA, 19 nt, Artificial Sequence
  Description of Artificial Sequence: Synthetic oligonucleotide
gcagacaagagaccaggag

SEQ ID NO: 2580364 - RNA, 19 nt, Artificial Sequence
  Description of Artificial Sequence: Synthetic oligonucleotide
aggggucugcuguaccuuc

SEQ ID NO: 2580365 - RNA, 19 nt, Artificial Sequence
  Description of Artificial Sequence: Synthetic oligonucleotide
gccacugggcgauaggccg

SEQ ID NO: 2580366 - RNA, 19 nt, Artificial Sequence
  Description of Artificial Sequence: Synthetic oligonucleotide
caugagcuggaccuucaug

SEQ ID NO: 2580367 - RNA, 19 nt, Artificial Sequence
  Description of Artificial Sequence: Synthetic oligonucleotide
ugcugcuaugagcacugcu

SEQ ID NO: 2580368 - RNA, 19 nt, Artificial Sequence
  Description of Artificial Sequence: Synthetic oligonucleotide
guugaaguagggcauaguu

SEQ ID NO: 2580369 - RNA, 19 nt, Artificial Sequence
  Description of Artificial Sequence: Synthetic oligonucleotide
agcccugggacccagcaaa

SEQ ID NO: 2580370 - RNA, 19 nt, Artificial Sequence
  Description of Artificial Sequence: Synthetic oligonucleotide
uuucagccugccucaggcc

SEQ ID NO: 2580371 - RNA, 19 nt, Artificial Sequence
  Description of Artificial Sequence: Synthetic oligonucleotide
agugaggccuagguagggg

SEQ ID NO: 2580372 - RNA, 19 nt, Artificial Sequence
  Description of Artificial Sequence: Synthetic oligonucleotide
ugcuguaccuucagccuuc

SEQ ID NO: 2580373 - RNA, 19 nt, Artificial Sequence
  Description of Artificial Sequence: Synthetic oligonucleotide
ggaccuucaugucuucucc

SEQ ID NO: 2580374 - RNA, 19 nt, Artificial Sequence
  Description of Artificial Sequence: Synthetic oligonucleotide
aagugaaggccucguugaa

SEQ ID NO: 2580375 - RNA, 19 nt, Artificial Sequence
  Description of Artificial Sequence: Synthetic oligonucleotide
ggauguuuuccucuucuuc

SEQ ID NO: 2580376 - RNA, 19 nt, Artificial Sequence
  Description of Artificial Sequence: Synthetic oligonucleotide
ucguugaaguagggcauag

SEQ ID NO: 2580377 - RNA, 19 nt, Artificial Sequence
  Description of Artificial Sequence: Synthetic oligonucleotide
agcagcaguagaugacaca

SEQ ID NO: 2580378 - RNA, 19 nt, Artificial Sequence
  Description of Artificial Sequence: Synthetic oligonucleotide
cucagcccggugaugcagg

SEQ ID NO: 2580379 - RNA, 19 nt, Artificial Sequence
  Description of Artificial Sequence: Synthetic oligonucleotide
uagaggauguuuuccucuu

SEQ ID NO: 2580380 - RNA, 19 nt, Artificial Sequence
  Description of Artificial Sequence: Synthetic oligonucleotide
gccucguugaaguagggca

SEQ ID NO: 2580381 - RNA, 19 nt, Artificial Sequence
  Description of Artificial Sequence: Synthetic oligonucleotide
agccuacagucuuuggagu

SEQ ID NO: 2580382 - RNA, 19 nt, Artificial Sequence
  Description of Artificial Sequence: Synthetic oligonucleotide
acuccagugagagcagcag

SEQ ID NO: 2580383 - RNA, 19 nt, Artificial Sequence
  Description of Artificial Sequence: Synthetic oligonucleotide
gagaccaggaggacuccag

SEQ ID NO: 2580384 - RNA, 19 nt, Artificial Sequence
  Description of Artificial Sequence: Synthetic oligonucleotide
uaucugcccagugcuguag

SEQ ID NO: 2580385 - RNA, 19 nt, Artificial Sequence
  Description of Artificial Sequence: Synthetic oligonucleotide
ugguugaaccaggugagua

SEQ ID NO: 2580386 - RNA, 19 nt, Artificial Sequence
  Description of Artificial Sequence: Synthetic oligonucleotide
gaggauguuuuccucuucu

SEQ ID NO: 2580387 - RNA, 19 nt, Artificial Sequence
  Description of Artificial Sequence: Synthetic oligonucleotide
caggcccacccuaaucucc

SEQ ID NO: 2580388 - RNA, 19 nt, Artificial Sequence
  Description of Artificial Sequence: Synthetic oligonucleotide
aaccuugccuauaggcuca

SEQ ID NO: 2580389 - RNA, 19 nt, Artificial Sequence
  Description of Artificial Sequence: Synthetic oligonucleotide
ucagccugccucaggccca

SEQ ID NO: 2580390 - RNA, 19 nt, Artificial Sequence
  Description of Artificial Sequence: Synthetic oligonucleotide
cuucagggccagagcacgg

SEQ ID NO: 2580391 - RNA, 19 nt, Artificial Sequence
  Description of Artificial Sequence: Synthetic oligonucleotide
cagagcagacaagagacca

SEQ ID NO: 2580392 - RNA, 19 nt, Artificial Sequence
  Description of Artificial Sequence: Synthetic oligonucleotide
cauaguugugcccuucuua

SEQ ID NO: 2580393 - RNA, 19 nt, Artificial Sequence
  Description of Artificial Sequence: Synthetic oligonucleotide
gugagagcagcagucgccc

SEQ ID NO: 2580394 - RNA, 19 nt, Artificial Sequence
  Description of Artificial Sequence: Synthetic oligonucleotide
cacugaugcgggcguaggg

SEQ ID NO: 2580395 - RNA, 19 nt, Artificial Sequence
  Description of Artificial Sequence: Synthetic oligonucleotide
uaacaugagcuggaccuuc

SEQ ID NO: 2580396 - RNA, 19 nt, Artificial Sequence
  Description of Artificial Sequence: Synthetic oligonucleotide
cuacagucuuuggagugag

SEQ ID NO: 2580397 - RNA, 19 nt, Artificial Sequence
  Description of Artificial Sequence: Synthetic oligonucleotide
uucagguuuucagccugcc

SEQ ID NO: 2580398 - RNA, 19 nt, Artificial Sequence
  Description of Artificial Sequence: Synthetic oligonucleotide
gaaacacugaugcgggcgu

SEQ ID NO: 2580399 - RNA, 19 nt, Artificial Sequence
  Description of Artificial Sequence: Synthetic oligonucleotide
acacucuggagcuggcuaa

SEQ ID NO: 2580400 - RNA, 19 nt, Artificial Sequence
  Description of Artificial Sequence: Synthetic oligonucleotide
cuggagcuggcuaaaggga

SEQ ID NO: 2580401 - RNA, 19 nt, Artificial Sequence
  Description of Artificial Sequence: Synthetic oligonucleotide
uagguaggggcaggugagg

SEQ ID NO: 2580402 - RNA, 19 nt, Artificial Sequence
  Description of Artificial Sequence: Synthetic oligonucleotide
agagcagacaagagaccag

SEQ ID NO: 2580403 - RNA, 19 nt, Artificial Sequence
  Description of Artificial Sequence: Synthetic oligonucleotide
guagggcauaguugugccc

SEQ ID NO: 2580404 - RNA, 19 nt, Artificial Sequence
  Description of Artificial Sequence: Synthetic oligonucleotide
ugagcacugcucagaccca

SEQ ID NO: 2580405 - RNA, 19 nt, Artificial Sequence
  Description of Artificial Sequence: Synthetic oligonucleotide
cugcuaugagcacugcuca

SEQ ID NO: 2580406 - RNA, 19 nt, Artificial Sequence
  Description of Artificial Sequence: Synthetic oligonucleotide
aacaugagcuggaccuuca

SEQ ID NO: 2580407 - RNA, 19 nt, Artificial Sequence
  Description of Artificial Sequence: Synthetic oligonucleotide
gaaguagggcauaguugug

SEQ ID NO: 2580408 - RNA, 19 nt, Artificial Sequence
  Description of Artificial Sequence: Synthetic oligonucleotide
acccagcaaaaccuugccu

SEQ ID NO: 2580409 - RNA, 19 nt, Artificial Sequence
  Description of Artificial Sequence: Synthetic oligonucleotide
uccauuucucugguuuaac

SEQ ID NO: 2580410 - RNA, 19 nt, Artificial Sequence
  Description of Artificial Sequence: Synthetic oligonucleotide
cagcuucuuugucuuuggg

SEQ ID NO: 2580411 - RNA, 19 nt, Artificial Sequence
  Description of Artificial Sequence: Synthetic oligonucleotide
gcaaaaccuugccuauagg

SEQ ID NO: 2580412 - RNA, 19 nt, Artificial Sequence
  Description of Artificial Sequence: Synthetic oligonucleotide
gugcccuucuuagaggaug

SEQ ID NO: 2580413 - RNA, 19 nt, Artificial Sequence
  Description of Artificial Sequence: Synthetic oligonucleotide
gaaccaggugaguaguggu

SEQ ID NO: 2580414 - RNA, 19 nt, Artificial Sequence
  Description of Artificial Sequence: Synthetic oligonucleotide
caggaaagugaaggccucg

SEQ ID NO: 2580415 - RNA, 19 nt, Artificial Sequence
  Description of Artificial Sequence: Synthetic oligonucleotide
uggugcugcuaugagcacu

SEQ ID NO: 2580416 - RNA, 19 nt, Artificial Sequence
  Description of Artificial Sequence: Synthetic oligonucleotide
cuggcaugggccaacauau

SEQ ID NO: 2580417 - RNA, 19 nt, Artificial Sequence
  Description of Artificial Sequence: Synthetic oligonucleotide
gaguaguggugcugcuaug

SEQ ID NO: 2580418 - RNA, 19 nt, Artificial Sequence
  Description of Artificial Sequence: Synthetic oligonucleotide
cugaagccuacagucuuug

SEQ ID NO: 2580419 - RNA, 19 nt, Artificial Sequence
  Description of Artificial Sequence: Synthetic oligonucleotide
uccuggcuuccaaagucau

SEQ ID NO: 2580420 - RNA, 19 nt, Artificial Sequence
  Description of Artificial Sequence: Synthetic oligonucleotide
ucuuuggagugaggccuag

SEQ ID NO: 2580421 - RNA, 19 nt, Artificial Sequence
  Description of Artificial Sequence: Synthetic oligonucleotide
ucaggcccacccuaaucuc

SEQ ID NO: 2580422 - RNA, 19 nt, Artificial Sequence
  Description of Artificial Sequence: Synthetic oligonucleotide
aggaaagugaaggccucgu

SEQ ID NO: 2580423 - RNA, 19 nt, Artificial Sequence
  Description of Artificial Sequence: Synthetic oligonucleotide
gugccacugggcgauaggc

SEQ ID NO: 2580424 - RNA, 19 nt, Artificial Sequence
  Description of Artificial Sequence: Synthetic oligonucleotide
acacugaugcgggcguagg

SEQ ID NO: 2580425 - RNA, 19 nt, Artificial Sequence
  Description of Artificial Sequence: Synthetic oligonucleotide
gacaagagaccaggaggac

SEQ ID NO: 2580426 - RNA, 19 nt, Artificial Sequence
  Description of Artificial Sequence: Synthetic oligonucleotide
augacacagagcagacaag

SEQ ID NO: 2580427 - RNA, 19 nt, Artificial Sequence
  Description of Artificial Sequence: Synthetic oligonucleotide
ucagcccggugaugcaggc

SEQ ID NO: 2580428 - RNA, 19 nt, Artificial Sequence
  Description of Artificial Sequence: Synthetic oligonucleotide
aggauguuuuccucuucuu

SEQ ID NO: 2580429 - RNA, 19 nt, Artificial Sequence
  Description of Artificial Sequence: Synthetic oligonucleotide
ggguggaaacacugaugcg

SEQ ID NO: 2580430 - RNA, 19 nt, Artificial Sequence
  Description of Artificial Sequence: Synthetic oligonucleotide
aggcaguccacaucugguu

SEQ ID NO: 2580431 - RNA, 19 nt, Artificial Sequence
  Description of Artificial Sequence: Synthetic oligonucleotide
ggagugaggccuagguagg

SEQ ID NO: 2580432 - RNA, 19 nt, Artificial Sequence
  Description of Artificial Sequence: Synthetic oligonucleotide
gauggcagcagcaguagau

SEQ ID NO: 2580433 - RNA, 19 nt, Artificial Sequence
  Description of Artificial Sequence: Synthetic oligonucleotide
ggaaacugaagccuacagu

SEQ ID NO: 2580434 - RNA, 19 nt, Artificial Sequence
  Description of Artificial Sequence: Synthetic oligonucleotide
cuuuggagugaggccuagg

SEQ ID NO: 2580435 - RNA, 19 nt, Artificial Sequence
  Description of Artificial Sequence: Synthetic oligonucleotide
ugaugcgggcguagggguc

SEQ ID NO: 2580436 - RNA, 19 nt, Artificial Sequence
  Description of Artificial Sequence: Synthetic oligonucleotide
cugggacccagcaaaaccu

SEQ ID NO: 2580437 - RNA, 19 nt, Artificial Sequence
  Description of Artificial Sequence: Synthetic oligonucleotide
ccauuuggggaaacugaag

SEQ ID NO: 2580438 - RNA, 19 nt, Artificial Sequence
  Description of Artificial Sequence: Synthetic oligonucleotide
ggugcugcuaugagcacug

SEQ ID NO: 2580439 - RNA, 19 nt, Artificial Sequence
  Description of Artificial Sequence: Synthetic oligonucleotide
ugggacccagcaaaaccuu

SEQ ID NO: 2580440 - RNA, 19 nt, Artificial Sequence
  Description of Artificial Sequence: Synthetic oligonucleotide
cucaggcccacccuaaucu

SEQ ID NO: 2580441 - RNA, 19 nt, Artificial Sequence
  Description of Artificial Sequence: Synthetic oligonucleotide
gagguuguccugaagcccu

SEQ ID NO: 2580442 - RNA, 19 nt, Artificial Sequence
  Description of Artificial Sequence: Synthetic oligonucleotide
agagcacgguccaccuccc

SEQ ID NO: 2580443 - RNA, 19 nt, Artificial Sequence
  Description of Artificial Sequence: Synthetic oligonucleotide
agaugacacagagcagaca

SEQ ID NO: 2580444 - RNA, 19 nt, Artificial Sequence
  Description of Artificial Sequence: Synthetic oligonucleotide
uucagggccagagcacggu

SEQ ID NO: 2580445 - RNA, 19 nt, Artificial Sequence
  Description of Artificial Sequence: Synthetic oligonucleotide
acauaucugcccagugcug

SEQ ID NO: 2580446 - RNA, 19 nt, Artificial Sequence
  Description of Artificial Sequence: Synthetic oligonucleotide
acaucugguugaaccaggu

SEQ ID NO: 2580447 - RNA, 19 nt, Artificial Sequence
  Description of Artificial Sequence: Synthetic oligonucleotide
ugugcccuucuuagaggau

SEQ ID NO: 2580448 - RNA, 19 nt, Artificial Sequence
  Description of Artificial Sequence: Synthetic oligonucleotide
gagcuggaccuucaugucu

SEQ ID NO: 2580449 - RNA, 19 nt, Artificial Sequence
  Description of Artificial Sequence: Synthetic oligonucleotide
ugaagcccugggacccagc

SEQ ID NO: 2580450 - RNA, 19 nt, Artificial Sequence
  Description of Artificial Sequence: Synthetic oligonucleotide
auaucugcccagugcugua

SEQ ID NO: 2580451 - RNA, 19 nt, Artificial Sequence
  Description of Artificial Sequence: Synthetic oligonucleotide
cuaaucuccuggcuuccaa

SEQ ID NO: 2580452 - RNA, 19 nt, Artificial Sequence
  Description of Artificial Sequence: Synthetic oligonucleotide
gcuggcuaaagggaaccag

SEQ ID NO: 2580453 - RNA, 19 nt, Artificial Sequence
  Description of Artificial Sequence: Synthetic oligonucleotide
caggaggacuccagcagca

SEQ ID NO: 2580454 - RNA, 19 nt, Artificial Sequence
  Description of Artificial Sequence: Synthetic oligonucleotide
gcacugcucagacccacag

SEQ ID NO: 2580455 - RNA, 19 nt, Artificial Sequence
  Description of Artificial Sequence: Synthetic oligonucleotide
gguuuaacaugagcuggac

SEQ ID NO: 2580456 - RNA, 19 nt, Artificial Sequence
  Description of Artificial Sequence: Synthetic oligonucleotide
guugaaccaggugaguagu

SEQ ID NO: 2580457 - RNA, 19 nt, Artificial Sequence
  Description of Artificial Sequence: Synthetic oligonucleotide
agggaaccaggaaagugaa

SEQ ID NO: 2580458 - RNA, 19 nt, Artificial Sequence
  Description of Artificial Sequence: Synthetic oligonucleotide
ggugccacugggcgauagg

SEQ ID NO: 2580459 - RNA, 19 nt, Artificial Sequence
  Description of Artificial Sequence: Synthetic oligonucleotide
cuauaggcucagcccggug

SEQ ID NO: 2580460 - RNA, 19 nt, Artificial Sequence
  Description of Artificial Sequence: Synthetic oligonucleotide
uggcagcgauggcagcagc

SEQ ID NO: 2580461 - RNA, 19 nt, Artificial Sequence
  Description of Artificial Sequence: Synthetic oligonucleotide
guaggggucugcuguaccu

SEQ ID NO: 2580462 - RNA, 19 nt, Artificial Sequence
  Description of Artificial Sequence: Synthetic oligonucleotide
uggcaugggccaacauauc

SEQ ID NO: 2580463 - RNA, 19 nt, Artificial Sequence
  Description of Artificial Sequence: Synthetic oligonucleotide
agcgauggcagcagcagua

SEQ ID NO: 2580464 - RNA, 19 nt, Artificial Sequence
  Description of Artificial Sequence: Synthetic oligonucleotide
ugccucaggcccacccuaa

SEQ ID NO: 2580465 - RNA, 19 nt, Artificial Sequence
  Description of Artificial Sequence: Synthetic oligonucleotide
acucuggagcuggcuaaag

SEQ ID NO: 2580466 - RNA, 19 nt, Artificial Sequence
  Description of Artificial Sequence: Synthetic oligonucleotide
gacccacagcuucuuuguc

SEQ ID NO: 2580467 - RNA, 19 nt, Artificial Sequence
  Description of Artificial Sequence: Synthetic oligonucleotide
cagagcagggcuccaggca

SEQ ID NO: 2580468 - RNA, 19 nt, Artificial Sequence
  Description of Artificial Sequence: Synthetic oligonucleotide
ugcggcgcuggcagcgaug

SEQ ID NO: 2580469 - RNA, 19 nt, Artificial Sequence
  Description of Artificial Sequence: Synthetic oligonucleotide
gaugcaggccaugggccca

SEQ ID NO: 2580470 - RNA, 19 nt, Artificial Sequence
  Description of Artificial Sequence: Synthetic oligonucleotide
cuggcagcgauggcagcag

SEQ ID NO: 2580471 - RNA, 19 nt, Artificial Sequence
  Description of Artificial Sequence: Synthetic oligonucleotide
caggccaugggcccagaca

SEQ ID NO: 2580472 - RNA, 19 nt, Artificial Sequence
  Description of Artificial Sequence: Synthetic oligonucleotide
agagaccaggaggacucca

SEQ ID NO: 2580473 - RNA, 19 nt, Artificial Sequence
  Description of Artificial Sequence: Synthetic oligonucleotide
ccagugagagcagcagucg

SEQ ID NO: 2580474 - RNA, 19 nt, Artificial Sequence
  Description of Artificial Sequence: Synthetic oligonucleotide
gcaguagaugacacagagc

SEQ ID NO: 2580475 - RNA, 19 nt, Artificial Sequence
  Description of Artificial Sequence: Synthetic oligonucleotide
ggcaugggccaacauaucu

SEQ ID NO: 2580476 - RNA, 19 nt, Artificial Sequence
  Description of Artificial Sequence: Synthetic oligonucleotide
agcagacaagagaccagga

SEQ ID NO: 2580477 - RNA, 19 nt, Artificial Sequence
  Description of Artificial Sequence: Synthetic oligonucleotide
gcccacccuaaucuccugg

SEQ ID NO: 2580478 - RNA, 19 nt, Artificial Sequence
  Description of Artificial Sequence: Synthetic oligonucleotide
aaacacugaugcgggcgua

SEQ ID NO: 2580479 - RNA, 19 nt, Artificial Sequence
  Description of Artificial Sequence: Synthetic oligonucleotide
caggugaguaguggugcug

SEQ ID NO: 2580480 - RNA, 19 nt, Artificial Sequence
  Description of Artificial Sequence: Synthetic oligonucleotide
cccacccuaaucuccuggc

SEQ ID NO: 2580481 - RNA, 19 nt, Artificial Sequence
  Description of Artificial Sequence: Synthetic oligonucleotide
cauaucugcccagugcugu

SEQ ID NO: 2580482 - RNA, 19 nt, Artificial Sequence
  Description of Artificial Sequence: Synthetic oligonucleotide
cugggcgauaggccgucug

SEQ ID NO: 2580483 - RNA, 19 nt, Artificial Sequence
  Description of Artificial Sequence: Synthetic oligonucleotide
gcuguagagguuguccuga

SEQ ID NO: 2580484 - RNA, 19 nt, Artificial Sequence
  Description of Artificial Sequence: Synthetic oligonucleotide
cagcaguagaugacacaga

SEQ ID NO: 2580485 - RNA, 19 nt, Artificial Sequence
  Description of Artificial Sequence: Synthetic oligonucleotide
uaccuucagccuucagguu

SEQ ID NO: 2580486 - RNA, 19 nt, Artificial Sequence
  Description of Artificial Sequence: Synthetic oligonucleotide
ggcuaaagggaaccaggaa

SEQ ID NO: 2580487 - RNA, 19 nt, Artificial Sequence
  Description of Artificial Sequence: Synthetic oligonucleotide
uucuuccauuucucugguu

SEQ ID NO: 2580488 - RNA, 19 nt, Artificial Sequence
  Description of Artificial Sequence: Synthetic oligonucleotide
agcuggcuaaagggaacca

SEQ ID NO: 2580489 - RNA, 19 nt, Artificial Sequence
  Description of Artificial Sequence: Synthetic oligonucleotide
acugaagccuacagucuuu

SEQ ID NO: 2580490 - RNA, 19 nt, Artificial Sequence
  Description of Artificial Sequence: Synthetic oligonucleotide
ccacaucugguugaaccag

SEQ ID NO: 2580491 - RNA, 19 nt, Artificial Sequence
  Description of Artificial Sequence: Synthetic oligonucleotide
augggcccagacagccagc

SEQ ID NO: 2580492 - RNA, 19 nt, Artificial Sequence
  Description of Artificial Sequence: Synthetic oligonucleotide
ggagcuggcuaaagggaac

SEQ ID NO: 2580493 - RNA, 19 nt, Artificial Sequence
  Description of Artificial Sequence: Synthetic oligonucleotide
ggcgcuggcagcgauggca

SEQ ID NO: 2580494 - RNA, 19 nt, Artificial Sequence
  Description of Artificial Sequence: Synthetic oligonucleotide
ccaggaaagugaaggccuc

SEQ ID NO: 2580495 - RNA, 19 nt, Artificial Sequence
  Description of Artificial Sequence: Synthetic oligonucleotide
ggccaacauaucugcccag

SEQ ID NO: 2580496 - RNA, 19 nt, Artificial Sequence
  Description of Artificial Sequence: Synthetic oligonucleotide
gguuguccugaagcccugg

SEQ ID NO: 2580497 - RNA, 19 nt, Artificial Sequence
  Description of Artificial Sequence: Synthetic oligonucleotide
ggcgauaggccgucuggca

SEQ ID NO: 2580498 - RNA, 19 nt, Artificial Sequence
  Description of Artificial Sequence: Synthetic oligonucleotide
aggcccacccuaaucuccu

SEQ ID NO: 2580499 - RNA, 19 nt, Artificial Sequence
  Description of Artificial Sequence: Synthetic oligonucleotide
gccuauaggcucagcccgg

SEQ ID NO: 2580500 - RNA, 19 nt, Artificial Sequence
  Description of Artificial Sequence: Synthetic oligonucleotide
gaugcgggcguaggggucu

SEQ ID NO: 2580501 - RNA, 19 nt, Artificial Sequence
  Description of Artificial Sequence: Synthetic oligonucleotide
cugaagcccugggacccag

SEQ ID NO: 2580502 - RNA, 19 nt, Artificial Sequence
  Description of Artificial Sequence: Synthetic oligonucleotide
cugaugcgggcguaggggu

SEQ ID NO: 2580503 - RNA, 19 nt, Artificial Sequence
  Description of Artificial Sequence: Synthetic oligonucleotide
cuucuuccauuucucuggu

SEQ ID NO: 2580504 - RNA, 19 nt, Artificial Sequence
  Description of Artificial Sequence: Synthetic oligonucleotide
aggugaggcuucagggcca

SEQ ID NO: 2580505 - RNA, 19 nt, Artificial Sequence
  Description of Artificial Sequence: Synthetic oligonucleotide
ggccucguugaaguagggc

SEQ ID NO: 2580506 - RNA, 19 nt, Artificial Sequence
  Description of Artificial Sequence: Synthetic oligonucleotide
ccggugaugcaggccaugg

SEQ ID NO: 2580507 - RNA, 19 nt, Artificial Sequence
  Description of Artificial Sequence: Synthetic oligonucleotide
aggccucguugaaguaggg

SEQ ID NO: 2580508 - RNA, 19 nt, Artificial Sequence
  Description of Artificial Sequence: Synthetic oligonucleotide
cuccagugagagcagcagu

SEQ ID NO: 2580509 - RNA, 19 nt, Artificial Sequence
  Description of Artificial Sequence: Synthetic oligonucleotide
cgauaggccgucuggcaug

SEQ ID NO: 2580510 - RNA, 19 nt, Artificial Sequence
  Description of Artificial Sequence: Synthetic oligonucleotide
gggcgauaggccgucuggc

SEQ ID NO: 2580511 - RNA, 19 nt, Artificial Sequence
  Description of Artificial Sequence: Synthetic oligonucleotide
agcacugcucagacccaca

SEQ ID NO: 2580512 - RNA, 19 nt, Artificial Sequence
  Description of Artificial Sequence: Synthetic oligonucleotide
gcagguggugccacugggc

SEQ ID NO: 2580513 - RNA, 19 nt, Artificial Sequence
  Description of Artificial Sequence: Synthetic oligonucleotide
accuugccuauaggcucag

SEQ ID NO: 2580514 - RNA, 19 nt, Artificial Sequence
  Description of Artificial Sequence: Synthetic oligonucleotide
gcucagcccggugaugcag

SEQ ID NO: 2580515 - RNA, 19 nt, Artificial Sequence
  Description of Artificial Sequence: Synthetic oligonucleotide
gcuggcagcgauggcagca

SEQ ID NO: 2580516 - RNA, 19 nt, Artificial Sequence
  Description of Artificial Sequence: Synthetic oligonucleotide
guaggggcaggugaggcuu

SEQ ID NO: 2580517 - RNA, 19 nt, Artificial Sequence
  Description of Artificial Sequence: Synthetic oligonucleotide
cacccuaaucuccuggcuu

SEQ ID NO: 2580518 - RNA, 19 nt, Artificial Sequence
  Description of Artificial Sequence: Synthetic oligonucleotide
ccuacagucuuuggaguga

SEQ ID NO: 2580519 - RNA, 19 nt, Artificial Sequence
  Description of Artificial Sequence: Synthetic oligonucleotide
cucguugaaguagggcaua

SEQ ID NO: 2580520 - RNA, 19 nt, Artificial Sequence
  Description of Artificial Sequence: Synthetic oligonucleotide
ggggaaacugaagccuaca

SEQ ID NO: 2580521 - RNA, 19 nt, Artificial Sequence
  Description of Artificial Sequence: Synthetic oligonucleotide
ggcauaguugugcccuucu

SEQ ID NO: 2580522 - RNA, 19 nt, Artificial Sequence
  Description of Artificial Sequence: Synthetic oligonucleotide
cacugggcgauaggccguc

SEQ ID NO: 2580523 - RNA, 19 nt, Artificial Sequence
  Description of Artificial Sequence: Synthetic oligonucleotide
gguaggggcaggugaggcu

SEQ ID NO: 2580524 - RNA, 19 nt, Artificial Sequence
  Description of Artificial Sequence: Synthetic oligonucleotide
ggccgucuggcaugggcca

SEQ ID NO: 2580525 - RNA, 19 nt, Artificial Sequence
  Description of Artificial Sequence: Synthetic oligonucleotide
auaggccgucuggcauggg

SEQ ID NO: 2580526 - RNA, 19 nt, Artificial Sequence
  Description of Artificial Sequence: Synthetic oligonucleotide
gucuuuggagugaggccua

SEQ ID NO: 2580527 - RNA, 19 nt, Artificial Sequence
  Description of Artificial Sequence: Synthetic oligonucleotide
cugccucaggcccacccua

SEQ ID NO: 2580528 - RNA, 19 nt, Artificial Sequence
  Description of Artificial Sequence: Synthetic oligonucleotide
cccuaaucuccuggcuucc

SEQ ID NO: 2580529 - RNA, 19 nt, Artificial Sequence
  Description of Artificial Sequence: Synthetic oligonucleotide
gugcugcuaugagcacugc

SEQ ID NO: 2580530 - RNA, 19 nt, Artificial Sequence
  Description of Artificial Sequence: Synthetic oligonucleotide
ggaaagugaaggccucguu

SEQ ID NO: 2580531 - RNA, 19 nt, Artificial Sequence
  Description of Artificial Sequence: Synthetic oligonucleotide
cacucuggagcuggcuaaa

SEQ ID NO: 2580532 - RNA, 19 nt, Artificial Sequence
  Description of Artificial Sequence: Synthetic oligonucleotide
gcuggaccuucaugucuuc

SEQ ID NO: 2580533 - RNA, 19 nt, Artificial Sequence
  Description of Artificial Sequence: Synthetic oligonucleotide
ggugaguaguggugcugcu

SEQ ID NO: 2580534 - RNA, 19 nt, Artificial Sequence
  Description of Artificial Sequence: Synthetic oligonucleotide
gcgauaggccgucuggcau

SEQ ID NO: 2580535 - RNA, 19 nt, Artificial Sequence
  Description of Artificial Sequence: Synthetic oligonucleotide
ggcccacccuaaucuccug

SEQ ID NO: 2580536 - RNA, 19 nt, Artificial Sequence
  Description of Artificial Sequence: Synthetic oligonucleotide
gguccacacucuggagcug

SEQ ID NO: 2580537 - RNA, 19 nt, Artificial Sequence
  Description of Artificial Sequence: Synthetic oligonucleotide
gggcuucuuccugcggcgc

SEQ ID NO: 2580538 - RNA, 19 nt, Artificial Sequence
  Description of Artificial Sequence: Synthetic oligonucleotide
acugggcgauaggccgucu

SEQ ID NO: 2580539 - RNA, 19 nt, Artificial Sequence
  Description of Artificial Sequence: Synthetic oligonucleotide
ugcgggcguaggggucugc

SEQ ID NO: 2580540 - RNA, 19 nt, Artificial Sequence
  Description of Artificial Sequence: Synthetic oligonucleotide
gccaacauaucugcccagu

SEQ ID NO: 2580541 - RNA, 19 nt, Artificial Sequence
  Description of Artificial Sequence: Synthetic oligonucleotide
ggacugcagguggugccac

SEQ ID NO: 2580542 - RNA, 19 nt, Artificial Sequence
  Description of Artificial Sequence: Synthetic oligonucleotide
ggcucagcccggugaugca

SEQ ID NO: 2580543 - RNA, 19 nt, Artificial Sequence
  Description of Artificial Sequence: Synthetic oligonucleotide
ggccaugggcccagacagc

SEQ ID NO: 2580544 - RNA, 19 nt, Artificial Sequence
  Description of Artificial Sequence: Synthetic oligonucleotide
ggcguaggggucugcugua

SEQ ID NO: 2580545 - RNA, 19 nt, Artificial Sequence
  Description of Artificial Sequence: Synthetic oligonucleotide
cugguugaaccaggugagu

SEQ ID NO: 2580546 - RNA, 19 nt, Artificial Sequence
  Description of Artificial Sequence: Synthetic oligonucleotide
augcgggcguaggggucug

SEQ ID NO: 2580547 - RNA, 19 nt, Artificial Sequence
  Description of Artificial Sequence: Synthetic oligonucleotide
ccagagcacgguccaccuc

SEQ ID NO: 2580548 - RNA, 19 nt, Artificial Sequence
  Description of Artificial Sequence: Synthetic oligonucleotide
gcguaggggucugcuguac

SEQ ID NO: 2580549 - RNA, 19 nt, Artificial Sequence
  Description of Artificial Sequence: Synthetic oligonucleotide
gagcacgguccaccucccu

SEQ ID NO: 2580550 - RNA, 19 nt, Artificial Sequence
  Description of Artificial Sequence: Synthetic oligonucleotide
cccugggacccagcaaaac

SEQ ID NO: 2580551 - RNA, 19 nt, Artificial Sequence
  Description of Artificial Sequence: Synthetic oligonucleotide
gcuguaccuucagccuuca

SEQ ID NO: 2580552 - RNA, 19 nt, Artificial Sequence
  Description of Artificial Sequence: Synthetic oligonucleotide
ccuaaucuccuggcuucca

SEQ ID NO: 2580553 - RNA, 19 nt, Artificial Sequence
  Description of Artificial Sequence: Synthetic oligonucleotide
cugcucagacccacagcuu

SEQ ID NO: 2580554 - RNA, 19 nt, Artificial Sequence
  Description of Artificial Sequence: Synthetic oligonucleotide
ccuugccuauaggcucagc

SEQ ID NO: 2580555 - RNA, 19 nt, Artificial Sequence
  Description of Artificial Sequence: Synthetic oligonucleotide
ccaggugaguaguggugcu

SEQ ID NO: 2580556 - RNA, 19 nt, Artificial Sequence
  Description of Artificial Sequence: Synthetic oligonucleotide
ccccagagcagggcuccag

SEQ ID NO: 2580557 - RNA, 19 nt, Artificial Sequence
  Description of Artificial Sequence: Synthetic oligonucleotide
cgggcguaggggucugcug

SEQ ID NO: 2580558 - RNA, 19 nt, Artificial Sequence
  Description of Artificial Sequence: Synthetic oligonucleotide
gucuggcaugggccaacau

SEQ ID NO: 2580559 - RNA, 19 nt, Artificial Sequence
  Description of Artificial Sequence: Synthetic oligonucleotide
ccgucuggcaugggccaac

SEQ ID NO: 2580560 - RNA, 19 nt, Artificial Sequence
  Description of Artificial Sequence: Synthetic oligonucleotide
cucagacccacagcuucuu

SEQ ID NO: 2580561 - RNA, 19 nt, Artificial Sequence
  Description of Artificial Sequence: Synthetic oligonucleotide
ccccacuguuggagucccc

SEQ ID NO: 2580562 - RNA, 19 nt, Artificial Sequence
  Description of Artificial Sequence: Synthetic oligonucleotide
cccggugaugcaggccaug

SEQ ID NO: 2580563 - RNA, 19 nt, Artificial Sequence
  Description of Artificial Sequence: Synthetic oligonucleotide
ccacccuaaucuccuggcu

SEQ ID NO: 2580564 - RNA, 19 nt, Artificial Sequence
  Description of Artificial Sequence: Synthetic oligonucleotide
cccuucuuagaggauguuu

SEQ ID NO: 2580565 - RNA, 19 nt, Artificial Sequence
  Description of Artificial Sequence: Synthetic oligonucleotide
ccagugcuguagagguugu

SEQ ID NO: 2580566 - RNA, 19 nt, Artificial Sequence
  Description of Artificial Sequence: Synthetic oligonucleotide
ccacugggcgauaggccgu

SEQ ID NO: 2580567 - RNA, 19 nt, Artificial Sequence
  Description of Artificial Sequence: Synthetic oligonucleotide
gcccugggacccagcaaaa

SEQ ID NO: 2580568 - RNA, 19 nt, Artificial Sequence
  Description of Artificial Sequence: Synthetic oligonucleotide
ccuauaggcucagcccggu

SEQ ID NO: 2580569 - RNA, 19 nt, Artificial Sequence
  Description of Artificial Sequence: Synthetic oligonucleotide
gccgucuggcaugggccaa

SEQ ID NO: 2580570 - RNA, 19 nt, Artificial Sequence
  Description of Artificial Sequence: Synthetic oligonucleotide
gcgggcguaggggucugcu

SEQ ID NO: 2580571 - RNA, 19 nt, Artificial Sequence
  Description of Artificial Sequence: Synthetic oligonucleotide
cguugaaguagggcauagu

SEQ ID NO: 2580572 - RNA, 19 nt, Artificial Sequence
  Description of Artificial Sequence: Synthetic oligonucleotide
cugcggcgcuggcagcgau

SEQ ID NO: 2580573 - RNA, 19 nt, Artificial Sequence
  Description of Artificial Sequence: Synthetic oligonucleotide
cgucuggcaugggccaaca

SEQ ID NO: 2580574 - RNA, 19 nt, Artificial Sequence
  Description of Artificial Sequence: Synthetic oligonucleotide
ccugcggcgcuggcagcga

SEQ ID NO: 2580575 - RNA, 19 nt, Artificial Sequence
  Description of Artificial Sequence: Synthetic oligonucleotide
agauuuugcagacauaugc

SEQ ID NO: 2580576 - RNA, 19 nt, Artificial Sequence
  Description of Artificial Sequence: Synthetic oligonucleotide
aacuucacccaucugaggc

SEQ ID NO: 2580577 - RNA, 19 nt, Artificial Sequence
  Description of Artificial Sequence: Synthetic oligonucleotide
uauuacaacaaguagggcc

SEQ ID NO: 2580578 - RNA, 19 nt, Artificial Sequence
  Description of Artificial Sequence: Synthetic oligonucleotide
aagauggagauacuguggc

SEQ ID NO: 2580579 - RNA, 19 nt, Artificial Sequence
  Description of Artificial Sequence: Synthetic oligonucleotide
aggaauuucaugcugaaag

SEQ ID NO: 2580580 - RNA, 19 nt, Artificial Sequence
  Description of Artificial Sequence: Synthetic oligonucleotide
aauuucaugcugaaagucc

SEQ ID NO: 2580581 - RNA, 19 nt, Artificial Sequence
  Description of Artificial Sequence: Synthetic oligonucleotide
gauacuguggcucagguac

SEQ ID NO: 2580582 - RNA, 19 nt, Artificial Sequence
  Description of Artificial Sequence: Synthetic oligonucleotide
aguuauuacaacaaguagg

SEQ ID NO: 2580583 - RNA, 19 nt, Artificial Sequence
  Description of Artificial Sequence: Synthetic oligonucleotide
uaugcuuaugguaagcugc

SEQ ID NO: 2580584 - RNA, 19 nt, Artificial Sequence
  Description of Artificial Sequence: Synthetic oligonucleotide
uguguuacagauuuugcag

SEQ ID NO: 2580585 - RNA, 19 nt, Artificial Sequence
  Description of Artificial Sequence: Synthetic oligonucleotide
guuauuacaacaaguaggg

SEQ ID NO: 2580586 - RNA, 19 nt, Artificial Sequence
  Description of Artificial Sequence: Synthetic oligonucleotide
uaugguaagcugcugcugg

SEQ ID NO: 2580587 - RNA, 19 nt, Artificial Sequence
  Description of Artificial Sequence: Synthetic oligonucleotide
ugaguuauuacaacaagua

SEQ ID NO: 2580588 - RNA, 19 nt, Artificial Sequence
  Description of Artificial Sequence: Synthetic oligonucleotide
ucaccugagagucugucgg

SEQ ID NO: 2580589 - RNA, 19 nt, Artificial Sequence
  Description of Artificial Sequence: Synthetic oligonucleotide
aaagaggaauuucaugcug

SEQ ID NO: 2580590 - RNA, 19 nt, Artificial Sequence
  Description of Artificial Sequence: Synthetic oligonucleotide
guagcugaugaccagagcc

SEQ ID NO: 2580591 - RNA, 19 nt, Artificial Sequence
  Description of Artificial Sequence: Synthetic oligonucleotide
ucugaguuauuacaacaag

SEQ ID NO: 2580592 - RNA, 19 nt, Artificial Sequence
  Description of Artificial Sequence: Synthetic oligonucleotide
uguacagcaugcucaaagg

SEQ ID NO: 2580593 - RNA, 19 nt, Artificial Sequence
  Description of Artificial Sequence: Synthetic oligonucleotide
ucuauugcaggcuguagag

SEQ ID NO: 2580594 - RNA, 19 nt, Artificial Sequence
  Description of Artificial Sequence: Synthetic oligonucleotide
aaaucuucaaagauggaga

SEQ ID NO: 2580595 - RNA, 19 nt, Artificial Sequence
  Description of Artificial Sequence: Synthetic oligonucleotide
ucuuauuagggucgugagg

SEQ ID NO: 2580596 - RNA, 19 nt, Artificial Sequence
  Description of Artificial Sequence: Synthetic oligonucleotide
aacaaguagggccagugga

SEQ ID NO: 2580597 - RNA, 19 nt, Artificial Sequence
  Description of Artificial Sequence: Synthetic oligonucleotide
uacucuagagauaucugag

SEQ ID NO: 2580598 - RNA, 19 nt, Artificial Sequence
  Description of Artificial Sequence: Synthetic oligonucleotide
uuuacucuauugcaggcug

SEQ ID NO: 2580599 - RNA, 19 nt, Artificial Sequence
  Description of Artificial Sequence: Synthetic oligonucleotide
ugcagcacuaccaacauau

SEQ ID NO: 2580600 - RNA, 19 nt, Artificial Sequence
  Description of Artificial Sequence: Synthetic oligonucleotide
auaucugaguuauuacaac

SEQ ID NO: 2580601 - RNA, 19 nt, Artificial Sequence
  Description of Artificial Sequence: Synthetic oligonucleotide
auuccaauggcuaacauca

SEQ ID NO: 2580602 - RNA, 19 nt, Artificial Sequence
  Description of Artificial Sequence: Synthetic oligonucleotide
uacagcaugcucaaaggcc

SEQ ID NO: 2580603 - RNA, 19 nt, Artificial Sequence
  Description of Artificial Sequence: Synthetic oligonucleotide
uugcuauagaccuagcaca

SEQ ID NO: 2580604 - RNA, 19 nt, Artificial Sequence
  Description of Artificial Sequence: Synthetic oligonucleotide
aacauaucuggacugugca

SEQ ID NO: 2580605 - RNA, 19 nt, Artificial Sequence
  Description of Artificial Sequence: Synthetic oligonucleotide
ugcagacauaugcuuaugg

SEQ ID NO: 2580606 - RNA, 19 nt, Artificial Sequence
  Description of Artificial Sequence: Synthetic oligonucleotide
cuugcuauagaccuagcac

SEQ ID NO: 2580607 - RNA, 19 nt, Artificial Sequence
  Description of Artificial Sequence: Synthetic oligonucleotide
agauaucugaguuauuaca

SEQ ID NO: 2580608 - RNA, 19 nt, Artificial Sequence
  Description of Artificial Sequence: Synthetic oligonucleotide
caaaucuucaaagauggag

SEQ ID NO: 2580609 - RNA, 19 nt, Artificial Sequence
  Description of Artificial Sequence: Synthetic oligonucleotide
uaucugaguuauuacaaca

SEQ ID NO: 2580610 - RNA, 19 nt, Artificial Sequence
  Description of Artificial Sequence: Synthetic oligonucleotide
uuucaaguggagcugcuug

SEQ ID NO: 2580611 - RNA, 19 nt, Artificial Sequence
  Description of Artificial Sequence: Synthetic oligonucleotide
ugaaagguagcugaugacc

SEQ ID NO: 2580612 - RNA, 19 nt, Artificial Sequence
  Description of Artificial Sequence: Synthetic oligonucleotide
uuguguuucaaguggagcu

SEQ ID NO: 2580613 - RNA, 19 nt, Artificial Sequence
  Description of Artificial Sequence: Synthetic oligonucleotide
uguagaggucacaagguca

SEQ ID NO: 2580614 - RNA, 19 nt, Artificial Sequence
  Description of Artificial Sequence: Synthetic oligonucleotide
cuauagaccuagcacaggc

SEQ ID NO: 2580615 - RNA, 19 nt, Artificial Sequence
  Description of Artificial Sequence: Synthetic oligonucleotide
uuacagauuuugcagacau

SEQ ID NO: 2580616 - RNA, 19 nt, Artificial Sequence
  Description of Artificial Sequence: Synthetic oligonucleotide
aaucuucaaagauggagau

SEQ ID NO: 2580617 - RNA, 19 nt, Artificial Sequence
  Description of Artificial Sequence: Synthetic oligonucleotide
uauugcaggcuguagaggu

SEQ ID NO: 2580618 - RNA, 19 nt, Artificial Sequence
  Description of Artificial Sequence: Synthetic oligonucleotide
ucugaggcuacugaggaag

SEQ ID NO: 2580619 - RNA, 19 nt, Artificial Sequence
  Description of Artificial Sequence: Synthetic oligonucleotide
aggaaguugcagcacuacc

SEQ ID NO: 2580620 - RNA, 19 nt, Artificial Sequence
  Description of Artificial Sequence: Synthetic oligonucleotide
ugaccacagagguugaaag

SEQ ID NO: 2580621 - RNA, 19 nt, Artificial Sequence
  Description of Artificial Sequence: Synthetic oligonucleotide
ugcuauagaccuagcacag

SEQ ID NO: 2580622 - RNA, 19 nt, Artificial Sequence
  Description of Artificial Sequence: Synthetic oligonucleotide
uugccucuuauuagggucg

SEQ ID NO: 2580623 - RNA, 19 nt, Artificial Sequence
  Description of Artificial Sequence: Synthetic oligonucleotide
gaugaccagagccccagcg

SEQ ID NO: 2580624 - RNA, 19 nt, Artificial Sequence
  Description of Artificial Sequence: Synthetic oligonucleotide
gaggugaccacagagguug

SEQ ID NO: 2580625 - RNA, 19 nt, Artificial Sequence
  Description of Artificial Sequence: Synthetic oligonucleotide
ugucggcaaaucuucaaag

SEQ ID NO: 2580626 - RNA, 19 nt, Artificial Sequence
  Description of Artificial Sequence: Synthetic oligonucleotide
aaagguagcugaugaccag

SEQ ID NO: 2580627 - RNA, 19 nt, Artificial Sequence
  Description of Artificial Sequence: Synthetic oligonucleotide
auuacaacaaguagggcca

SEQ ID NO: 2580628 - RNA, 19 nt, Artificial Sequence
  Description of Artificial Sequence: Synthetic oligonucleotide
ucugaccuugcuauagacc

SEQ ID NO: 2580629 - RNA, 19 nt, Artificial Sequence
  Description of Artificial Sequence: Synthetic oligonucleotide
gagguugaaagguagcuga

SEQ ID NO: 2580630 - RNA, 19 nt, Artificial Sequence
  Description of Artificial Sequence: Synthetic oligonucleotide
guguacagcaugcucaaag

SEQ ID NO: 2580631 - RNA, 19 nt, Artificial Sequence
  Description of Artificial Sequence: Synthetic oligonucleotide
acagauuuugcagacauau

SEQ ID NO: 2580632 - RNA, 19 nt, Artificial Sequence
  Description of Artificial Sequence: Synthetic oligonucleotide
auagaccuagcacaggcca

SEQ ID NO: 2580633 - RNA, 19 nt, Artificial Sequence
  Description of Artificial Sequence: Synthetic oligonucleotide
uuuugcagacauaugcuua

SEQ ID NO: 2580634 - RNA, 19 nt, Artificial Sequence
  Description of Artificial Sequence: Synthetic oligonucleotide
ucgugaggugaccacagag

SEQ ID NO: 2580635 - RNA, 19 nt, Artificial Sequence
  Description of Artificial Sequence: Synthetic oligonucleotide
gaccacagagguugaaagg

SEQ ID NO: 2580636 - RNA, 19 nt, Artificial Sequence
  Description of Artificial Sequence: Synthetic oligonucleotide
augaccagagccccagcgc

SEQ ID NO: 2580637 - RNA, 19 nt, Artificial Sequence
  Description of Artificial Sequence: Synthetic oligonucleotide
cuucuccccaccuuugugg

SEQ ID NO: 2580638 - RNA, 19 nt, Artificial Sequence
  Description of Artificial Sequence: Synthetic oligonucleotide
auaugcuuaugguaagcug

SEQ ID NO: 2580639 - RNA, 19 nt, Artificial Sequence
  Description of Artificial Sequence: Synthetic oligonucleotide
augugcaguggauucuccc

SEQ ID NO: 2580640 - RNA, 19 nt, Artificial Sequence
  Description of Artificial Sequence: Synthetic oligonucleotide
uauagaccuagcacaggcc

SEQ ID NO: 2580641 - RNA, 19 nt, Artificial Sequence
  Description of Artificial Sequence: Synthetic oligonucleotide
ggcuguagaggucacaagg

SEQ ID NO: 2580642 - RNA, 19 nt, Artificial Sequence
  Description of Artificial Sequence: Synthetic oligonucleotide
cacaaggucagcacauucc

SEQ ID NO: 2580643 - RNA, 19 nt, Artificial Sequence
  Description of Artificial Sequence: Synthetic oligonucleotide
ucagguacucuagagauau

SEQ ID NO: 2580644 - RNA, 19 nt, Artificial Sequence
  Description of Artificial Sequence: Synthetic oligonucleotide
ucggcaaaucuucaaagau

SEQ ID NO: 2580645 - RNA, 19 nt, Artificial Sequence
  Description of Artificial Sequence: Synthetic oligonucleotide
gagauaucugaguuauuac

SEQ ID NO: 2580646 - RNA, 19 nt, Artificial Sequence
  Description of Artificial Sequence: Synthetic oligonucleotide
gcuaacaucacaugggaac

SEQ ID NO: 2580647 - RNA, 19 nt, Artificial Sequence
  Description of Artificial Sequence: Synthetic oligonucleotide
uuugugguggccuuguguu

SEQ ID NO: 2580648 - RNA, 19 nt, Artificial Sequence
  Description of Artificial Sequence: Synthetic oligonucleotide
agcacuaccaacauaucug

SEQ ID NO: 2580649 - RNA, 19 nt, Artificial Sequence
  Description of Artificial Sequence: Synthetic oligonucleotide
uagcugaugaccagagccc

SEQ ID NO: 2580650 - RNA, 19 nt, Artificial Sequence
  Description of Artificial Sequence: Synthetic oligonucleotide
gacauaugcuuaugguaag

SEQ ID NO: 2580651 - RNA, 19 nt, Artificial Sequence
  Description of Artificial Sequence: Synthetic oligonucleotide
uucaaguggagcugcuugc

SEQ ID NO: 2580652 - RNA, 19 nt, Artificial Sequence
  Description of Artificial Sequence: Synthetic oligonucleotide
ugaccagagccccagcgcc

SEQ ID NO: 2580653 - RNA, 19 nt, Artificial Sequence
  Description of Artificial Sequence: Synthetic oligonucleotide
agagauaucugaguuauua

SEQ ID NO: 2580654 - RNA, 19 nt, Artificial Sequence
  Description of Artificial Sequence: Synthetic oligonucleotide
uggcuaacaucacauggga

SEQ ID NO: 2580655 - RNA, 19 nt, Artificial Sequence
  Description of Artificial Sequence: Synthetic oligonucleotide
cauuccaauggcuaacauc

SEQ ID NO: 2580656 - RNA, 19 nt, Artificial Sequence
  Description of Artificial Sequence: Synthetic oligonucleotide
gauucucccucccuucucc

SEQ ID NO: 2580657 - RNA, 19 nt, Artificial Sequence
  Description of Artificial Sequence: Synthetic oligonucleotide
cugcuugccucuuauuagg

SEQ ID NO: 2580658 - RNA, 19 nt, Artificial Sequence
  Description of Artificial Sequence: Synthetic oligonucleotide
ugcuugccucuuauuaggg

SEQ ID NO: 2580659 - RNA, 19 nt, Artificial Sequence
  Description of Artificial Sequence: Synthetic oligonucleotide
ucuagagauaucugaguua

SEQ ID NO: 2580660 - RNA, 19 nt, Artificial Sequence
  Description of Artificial Sequence: Synthetic oligonucleotide
gaauuucaugcugaaaguc

SEQ ID NO: 2580661 - RNA, 19 nt, Artificial Sequence
  Description of Artificial Sequence: Synthetic oligonucleotide
aagaggaauuucaugcuga

SEQ ID NO: 2580662 - RNA, 19 nt, Artificial Sequence
  Description of Artificial Sequence: Synthetic oligonucleotide
guacucuagagauaucuga

SEQ ID NO: 2580663 - RNA, 19 nt, Artificial Sequence
  Description of Artificial Sequence: Synthetic oligonucleotide
cacagagguugaaagguag

SEQ ID NO: 2580664 - RNA, 19 nt, Artificial Sequence
  Description of Artificial Sequence: Synthetic oligonucleotide
gauggagauacuguggcuc

SEQ ID NO: 2580665 - RNA, 19 nt, Artificial Sequence
  Description of Artificial Sequence: Synthetic oligonucleotide
aaguagggccaguggacag

SEQ ID NO: 2580666 - RNA, 19 nt, Artificial Sequence
  Description of Artificial Sequence: Synthetic oligonucleotide
agacauaugcuuaugguaa

SEQ ID NO: 2580667 - RNA, 19 nt, Artificial Sequence
  Description of Artificial Sequence: Synthetic oligonucleotide
cuagggagcacaugugcag

SEQ ID NO: 2580668 - RNA, 19 nt, Artificial Sequence
  Description of Artificial Sequence: Synthetic oligonucleotide
uaccaacauaucuggacug

SEQ ID NO: 2580669 - RNA, 19 nt, Artificial Sequence
  Description of Artificial Sequence: Synthetic oligonucleotide
ucaaaggccucugaccuug

SEQ ID NO: 2580670 - RNA, 19 nt, Artificial Sequence
  Description of Artificial Sequence: Synthetic oligonucleotide
cucuuauuagggucgugag

SEQ ID NO: 2580671 - RNA, 19 nt, Artificial Sequence
  Description of Artificial Sequence: Synthetic oligonucleotide
ugugcaguggauucucccu

SEQ ID NO: 2580672 - RNA, 19 nt, Artificial Sequence
  Description of Artificial Sequence: Synthetic oligonucleotide
uguguuucaaguggagcug

SEQ ID NO: 2580673 - RNA, 19 nt, Artificial Sequence
  Description of Artificial Sequence: Synthetic oligonucleotide
gaaagguagcugaugacca

SEQ ID NO: 2580674 - RNA, 19 nt, Artificial Sequence
  Description of Artificial Sequence: Synthetic oligonucleotide
cuugagaugggugugguca

SEQ ID NO: 2580675 - RNA, 19 nt, Artificial Sequence
  Description of Artificial Sequence: Synthetic oligonucleotide
uuuuacucuauugcaggcu

SEQ ID NO: 2580676 - RNA, 19 nt, Artificial Sequence
  Description of Artificial Sequence: Synthetic oligonucleotide
auuuugcagacauaugcuu

SEQ ID NO: 2580677 - RNA, 19 nt, Artificial Sequence
  Description of Artificial Sequence: Synthetic oligonucleotide
cuuguguuucaaguggagc

SEQ ID NO: 2580678 - RNA, 19 nt, Artificial Sequence
  Description of Artificial Sequence: Synthetic oligonucleotide
gucagcacauuccaauggc

SEQ ID NO: 2580679 - RNA, 19 nt, Artificial Sequence
  Description of Artificial Sequence: Synthetic oligonucleotide
gaaaccuuuugucuuggaa

SEQ ID NO: 2580680 - RNA, 19 nt, Artificial Sequence
  Description of Artificial Sequence: Synthetic oligonucleotide
guacagcaugcucaaaggc

SEQ ID NO: 2580681 - RNA, 19 nt, Artificial Sequence
  Description of Artificial Sequence: Synthetic oligonucleotide
guagaggucacaaggucag

SEQ ID NO: 2580682 - RNA, 19 nt, Artificial Sequence
  Description of Artificial Sequence: Synthetic oligonucleotide
ucagcacauuccaauggcu

SEQ ID NO: 2580683 - RNA, 19 nt, Artificial Sequence
  Description of Artificial Sequence: Synthetic oligonucleotide
acucuagagauaucugagu

SEQ ID NO: 2580684 - RNA, 19 nt, Artificial Sequence
  Description of Artificial Sequence: Synthetic oligonucleotide
gaccuugcuauagaccuag

SEQ ID NO: 2580685 - RNA, 19 nt, Artificial Sequence
  Description of Artificial Sequence: Synthetic oligonucleotide
uauuagggucgugagguga

SEQ ID NO: 2580686 - RNA, 19 nt, Artificial Sequence
  Description of Artificial Sequence: Synthetic oligonucleotide
cugguguacagcaugcuca

SEQ ID NO: 2580687 - RNA, 19 nt, Artificial Sequence
  Description of Artificial Sequence: Synthetic oligonucleotide
auuucaugcugaaaguccu

SEQ ID NO: 2580688 - RNA, 19 nt, Artificial Sequence
  Description of Artificial Sequence: Synthetic oligonucleotide
uugaaagguagcugaugac

SEQ ID NO: 2580689 - RNA, 19 nt, Artificial Sequence
  Description of Artificial Sequence: Synthetic oligonucleotide
agucugucggcaaaucuuc

SEQ ID NO: 2580690 - RNA, 19 nt, Artificial Sequence
  Description of Artificial Sequence: Synthetic oligonucleotide
cacaugggaaccaacuuca

SEQ ID NO: 2580691 - RNA, 19 nt, Artificial Sequence
  Description of Artificial Sequence: Synthetic oligonucleotide
uuugguucuugagaugggu

SEQ ID NO: 2580692 - RNA, 19 nt, Artificial Sequence
  Description of Artificial Sequence: Synthetic oligonucleotide
gucaccugagagucugucg

SEQ ID NO: 2580693 - RNA, 19 nt, Artificial Sequence
  Description of Artificial Sequence: Synthetic oligonucleotide
ucacaaggucagcacauuc

SEQ ID NO: 2580694 - RNA, 19 nt, Artificial Sequence
  Description of Artificial Sequence: Synthetic oligonucleotide
ggccuuguguuucaagugg

SEQ ID NO: 2580695 - RNA, 19 nt, Artificial Sequence
  Description of Artificial Sequence: Synthetic oligonucleotide
gcacuaccaacauaucugg

SEQ ID NO: 2580696 - RNA, 19 nt, Artificial Sequence
  Description of Artificial Sequence: Synthetic oligonucleotide
uuauuacaacaaguagggc

SEQ ID NO: 2580697 - RNA, 19 nt, Artificial Sequence
  Description of Artificial Sequence: Synthetic oligonucleotide
gaggcuacugaggaaguug

SEQ ID NO: 2580698 - RNA, 19 nt, Artificial Sequence
  Description of Artificial Sequence: Synthetic oligonucleotide
auuagggucgugaggugac

SEQ ID NO: 2580699 - RNA, 19 nt, Artificial Sequence
  Description of Artificial Sequence: Synthetic oligonucleotide
caacaaguagggccagugg

SEQ ID NO: 2580700 - RNA, 19 nt, Artificial Sequence
  Description of Artificial Sequence: Synthetic oligonucleotide
aguagggccaguggacagc

SEQ ID NO: 2580701 - RNA, 19 nt, Artificial Sequence
  Description of Artificial Sequence: Synthetic oligonucleotide
guguuacagauuuugcaga

SEQ ID NO: 2580702 - RNA, 19 nt, Artificial Sequence
  Description of Artificial Sequence: Synthetic oligonucleotide
uggccuuguguuucaagug

SEQ ID NO: 2580703 - RNA, 19 nt, Artificial Sequence
  Description of Artificial Sequence: Synthetic oligonucleotide
auaucuggacugugcacug

SEQ ID NO: 2580704 - RNA, 19 nt, Artificial Sequence
  Description of Artificial Sequence: Synthetic oligonucleotide
cuagcacaggccacgcuag

SEQ ID NO: 2580705 - RNA, 19 nt, Artificial Sequence
  Description of Artificial Sequence: Synthetic oligonucleotide
ggucagcacauuccaaugg

SEQ ID NO: 2580706 - RNA, 19 nt, Artificial Sequence
  Description of Artificial Sequence: Synthetic oligonucleotide
cugaccuugcuauagaccu

SEQ ID NO: 2580707 - RNA, 19 nt, Artificial Sequence
  Description of Artificial Sequence: Synthetic oligonucleotide
aggucagcacauuccaaug

SEQ ID NO: 2580708 - RNA, 19 nt, Artificial Sequence
  Description of Artificial Sequence: Synthetic oligonucleotide
uggcucagguacucuagag

SEQ ID NO: 2580709 - RNA, 19 nt, Artificial Sequence
  Description of Artificial Sequence: Synthetic oligonucleotide
gcuuaugguaagcugcugc

SEQ ID NO: 2580710 - RNA, 19 nt, Artificial Sequence
  Description of Artificial Sequence: Synthetic oligonucleotide
agcacauuccaauggcuaa

SEQ ID NO: 2580711 - RNA, 19 nt, Artificial Sequence
  Description of Artificial Sequence: Synthetic oligonucleotide
uuaugguaagcugcugcug

SEQ ID NO: 2580712 - RNA, 19 nt, Artificial Sequence
  Description of Artificial Sequence: Synthetic oligonucleotide
aagguagcugaugaccaga

SEQ ID NO: 2580713 - RNA, 19 nt, Artificial Sequence
  Description of Artificial Sequence: Synthetic oligonucleotide
uuauuagggucgugaggug

SEQ ID NO: 2580714 - RNA, 19 nt, Artificial Sequence
  Description of Artificial Sequence: Synthetic oligonucleotide
auggagauacuguggcuca

SEQ ID NO: 2580715 - RNA, 19 nt, Artificial Sequence
  Description of Artificial Sequence: Synthetic oligonucleotide
ugcaguggauucucccucc

SEQ ID NO: 2580716 - RNA, 19 nt, Artificial Sequence
  Description of Artificial Sequence: Synthetic oligonucleotide
agcugcuugccucuuauua

SEQ ID NO: 2580717 - RNA, 19 nt, Artificial Sequence
  Description of Artificial Sequence: Synthetic oligonucleotide
gauggguguggucaccuga

SEQ ID NO: 2580718 - RNA, 19 nt, Artificial Sequence
  Description of Artificial Sequence: Synthetic oligonucleotide
ucaaguggagcugcuugcc

SEQ ID NO: 2580719 - RNA, 19 nt, Artificial Sequence
  Description of Artificial Sequence: Synthetic oligonucleotide
ugugcacugggcucuugug

SEQ ID NO: 2580720 - RNA, 19 nt, Artificial Sequence
  Description of Artificial Sequence: Synthetic oligonucleotide
acaugugcaguggauucuc

SEQ ID NO: 2580721 - RNA, 19 nt, Artificial Sequence
  Description of Artificial Sequence: Synthetic oligonucleotide
aggccucugaccuugcuau

SEQ ID NO: 2580722 - RNA, 19 nt, Artificial Sequence
  Description of Artificial Sequence: Synthetic oligonucleotide
guucuugagaugggugugg

SEQ ID NO: 2580723 - RNA, 19 nt, Artificial Sequence
  Description of Artificial Sequence: Synthetic oligonucleotide
ucugucggcaaaucuucaa

SEQ ID NO: 2580724 - RNA, 19 nt, Artificial Sequence
  Description of Artificial Sequence: Synthetic oligonucleotide
uuacucuauugcaggcugu

SEQ ID NO: 2580725 - RNA, 19 nt, Artificial Sequence
  Description of Artificial Sequence: Synthetic oligonucleotide
cuauugcaggcuguagagg

SEQ ID NO: 2580726 - RNA, 19 nt, Artificial Sequence
  Description of Artificial Sequence: Synthetic oligonucleotide
cucugaccuugcuauagac

SEQ ID NO: 2580727 - RNA, 19 nt, Artificial Sequence
  Description of Artificial Sequence: Synthetic oligonucleotide
gauuuugcagacauaugcu

SEQ ID NO: 2580728 - RNA, 19 nt, Artificial Sequence
  Description of Artificial Sequence: Synthetic oligonucleotide
aggucacaaggucagcaca

SEQ ID NO: 2580729 - RNA, 19 nt, Artificial Sequence
  Description of Artificial Sequence: Synthetic oligonucleotide
cucuauugcaggcuguaga

SEQ ID NO: 2580730 - RNA, 19 nt, Artificial Sequence
  Description of Artificial Sequence: Synthetic oligonucleotide
cugaguuauuacaacaagu

SEQ ID NO: 2580731 - RNA, 19 nt, Artificial Sequence
  Description of Artificial Sequence: Synthetic oligonucleotide
ugggaaccaacuucaccca

SEQ ID NO: 2580732 - RNA, 19 nt, Artificial Sequence
  Description of Artificial Sequence: Synthetic oligonucleotide
cagauuuugcagacauaug

SEQ ID NO: 2580733 - RNA, 19 nt, Artificial Sequence
  Description of Artificial Sequence: Synthetic oligonucleotide
gcugcuugccucuuauuag

SEQ ID NO: 2580734 - RNA, 19 nt, Artificial Sequence
  Description of Artificial Sequence: Synthetic oligonucleotide
cuguagaggucacaagguc

SEQ ID NO: 2580735 - RNA, 19 nt, Artificial Sequence
  Description of Artificial Sequence: Synthetic oligonucleotide
caauggcuaacaucacaug

SEQ ID NO: 2580736 - RNA, 19 nt, Artificial Sequence
  Description of Artificial Sequence: Synthetic oligonucleotide
uggauucucccucccuucu

SEQ ID NO: 2580737 - RNA, 19 nt, Artificial Sequence
  Description of Artificial Sequence: Synthetic oligonucleotide
aguggauucucccucccuu

SEQ ID NO: 2580738 - RNA, 19 nt, Artificial Sequence
  Description of Artificial Sequence: Synthetic oligonucleotide
aucacaugggaaccaacuu

SEQ ID NO: 2580739 - RNA, 19 nt, Artificial Sequence
  Description of Artificial Sequence: Synthetic oligonucleotide
caucugaggcuacugagga

SEQ ID NO: 2580740 - RNA, 19 nt, Artificial Sequence
  Description of Artificial Sequence: Synthetic oligonucleotide
uguuucaaguggagcugcu

SEQ ID NO: 2580741 - RNA, 19 nt, Artificial Sequence
  Description of Artificial Sequence: Synthetic oligonucleotide
gucggcaaaucuucaaaga

SEQ ID NO: 2580742 - RNA, 19 nt, Artificial Sequence
  Description of Artificial Sequence: Synthetic oligonucleotide
aaggccucugaccuugcua

SEQ ID NO: 2580743 - RNA, 19 nt, Artificial Sequence
  Description of Artificial Sequence: Synthetic oligonucleotide
agggucgugaggugaccac

SEQ ID NO: 2580744 - RNA, 19 nt, Artificial Sequence
  Description of Artificial Sequence: Synthetic oligonucleotide
ccaacuucacccaucugag

SEQ ID NO: 2580745 - RNA, 19 nt, Artificial Sequence
  Description of Artificial Sequence: Synthetic oligonucleotide
agauggagauacuguggcu

SEQ ID NO: 2580746 - RNA, 19 nt, Artificial Sequence
  Description of Artificial Sequence: Synthetic oligonucleotide
caacuucacccaucugagg

SEQ ID NO: 2580747 - RNA, 19 nt, Artificial Sequence
  Description of Artificial Sequence: Synthetic oligonucleotide
uugagauggguguggucac

SEQ ID NO: 2580748 - RNA, 19 nt, Artificial Sequence
  Description of Artificial Sequence: Synthetic oligonucleotide
uaacaucacaugggaacca

SEQ ID NO: 2580749 - RNA, 19 nt, Artificial Sequence
  Description of Artificial Sequence: Synthetic oligonucleotide
aacaucacaugggaaccaa

SEQ ID NO: 2580750 - RNA, 19 nt, Artificial Sequence
  Description of Artificial Sequence: Synthetic oligonucleotide
aucugaguuauuacaacaa

SEQ ID NO: 2580751 - RNA, 19 nt, Artificial Sequence
  Description of Artificial Sequence: Synthetic oligonucleotide
aguggagcugcuugccucu

SEQ ID NO: 2580752 - RNA, 19 nt, Artificial Sequence
  Description of Artificial Sequence: Synthetic oligonucleotide
ugcacugggcucuuguguu

SEQ ID NO: 2580753 - RNA, 19 nt, Artificial Sequence
  Description of Artificial Sequence: Synthetic oligonucleotide
ugugguggccuuguguuuc

SEQ ID NO: 2580754 - RNA, 19 nt, Artificial Sequence
  Description of Artificial Sequence: Synthetic oligonucleotide
uaucuggacugugcacugg

SEQ ID NO: 2580755 - RNA, 19 nt, Artificial Sequence
  Description of Artificial Sequence: Synthetic oligonucleotide
gaaccaacuucacccaucu

SEQ ID NO: 2580756 - RNA, 19 nt, Artificial Sequence
  Description of Artificial Sequence: Synthetic oligonucleotide
uucuccccaccuuuguggu

SEQ ID NO: 2580757 - RNA, 19 nt, Artificial Sequence
  Description of Artificial Sequence: Synthetic oligonucleotide
cacaggccacgcuagggag

SEQ ID NO: 2580758 - RNA, 19 nt, Artificial Sequence
  Description of Artificial Sequence: Synthetic oligonucleotide
uagcacaggccacgcuagg

SEQ ID NO: 2580759 - RNA, 19 nt, Artificial Sequence
  Description of Artificial Sequence: Synthetic oligonucleotide
ccaucugaggcuacugagg

SEQ ID NO: 2580760 - RNA, 19 nt, Artificial Sequence
  Description of Artificial Sequence: Synthetic oligonucleotide
agcacaggccacgcuaggg

SEQ ID NO: 2580761 - RNA, 19 nt, Artificial Sequence
  Description of Artificial Sequence: Synthetic oligonucleotide
uuacaacaaguagggccag

SEQ ID NO: 2580762 - RNA, 19 nt, Artificial Sequence
  Description of Artificial Sequence: Synthetic oligonucleotide
uuucaugcugaaaguccuu

SEQ ID NO: 2580763 - RNA, 19 nt, Artificial Sequence
  Description of Artificial Sequence: Synthetic oligonucleotide
cuuaugguaagcugcugcu

SEQ ID NO: 2580764 - RNA, 19 nt, Artificial Sequence
  Description of Artificial Sequence: Synthetic oligonucleotide
aaccaacuucacccaucug

SEQ ID NO: 2580765 - RNA, 19 nt, Artificial Sequence
  Description of Artificial Sequence: Synthetic oligonucleotide
ugggcucuuguguuacaga

SEQ ID NO: 2580766 - RNA, 19 nt, Artificial Sequence
  Description of Artificial Sequence: Synthetic oligonucleotide
guguggucaccugagaguc

SEQ ID NO: 2580767 - RNA, 19 nt, Artificial Sequence
  Description of Artificial Sequence: Synthetic oligonucleotide
agggagcacaugugcagug

SEQ ID NO: 2580768 - RNA, 19 nt, Artificial Sequence
  Description of Artificial Sequence: Synthetic oligonucleotide
guguuucaaguggagcugc

SEQ ID NO: 2580769 - RNA, 19 nt, Artificial Sequence
  Description of Artificial Sequence: Synthetic oligonucleotide
ucaugcugaaaguccuuuu

SEQ ID NO: 2580770 - RNA, 19 nt, Artificial Sequence
  Description of Artificial Sequence: Synthetic oligonucleotide
uucaugcugaaaguccuuu

SEQ ID NO: 2580771 - RNA, 19 nt, Artificial Sequence
  Description of Artificial Sequence: Synthetic oligonucleotide
caucacaugggaaccaacu

SEQ ID NO: 2580772 - RNA, 19 nt, Artificial Sequence
  Description of Artificial Sequence: Synthetic oligonucleotide
acaggccacgcuagggagc

SEQ ID NO: 2580773 - RNA, 19 nt, Artificial Sequence
  Description of Artificial Sequence: Synthetic oligonucleotide
acccaucugaggcuacuga

SEQ ID NO: 2580774 - RNA, 19 nt, Artificial Sequence
  Description of Artificial Sequence: Synthetic oligonucleotide
accaacauaucuggacugu

SEQ ID NO: 2580775 - RNA, 19 nt, Artificial Sequence
  Description of Artificial Sequence: Synthetic oligonucleotide
aggcuguagaggucacaag

SEQ ID NO: 2580776 - RNA, 19 nt, Artificial Sequence
  Description of Artificial Sequence: Synthetic oligonucleotide
augguaagcugcugcuggu

SEQ ID NO: 2580777 - RNA, 19 nt, Artificial Sequence
  Description of Artificial Sequence: Synthetic oligonucleotide
guggucaccugagagucug

SEQ ID NO: 2580778 - RNA, 19 nt, Artificial Sequence
  Description of Artificial Sequence: Synthetic oligonucleotide
cauaucuggacugugcacu

SEQ ID NO: 2580779 - RNA, 19 nt, Artificial Sequence
  Description of Artificial Sequence: Synthetic oligonucleotide
uucuugagauggguguggu

SEQ ID NO: 2580780 - RNA, 19 nt, Artificial Sequence
  Description of Artificial Sequence: Synthetic oligonucleotide
guggccuuguguuucaagu

SEQ ID NO: 2580781 - RNA, 19 nt, Artificial Sequence
  Description of Artificial Sequence: Synthetic oligonucleotide
gaggaaguugcagcacuac

SEQ ID NO: 2580782 - RNA, 19 nt, Artificial Sequence
  Description of Artificial Sequence: Synthetic oligonucleotide
ugaggugaccacagagguu

SEQ ID NO: 2580783 - RNA, 19 nt, Artificial Sequence
  Description of Artificial Sequence: Synthetic oligonucleotide
ugaugaccagagccccagc

SEQ ID NO: 2580784 - RNA, 19 nt, Artificial Sequence
  Description of Artificial Sequence: Synthetic oligonucleotide
gguacucuagagauaucug

SEQ ID NO: 2580785 - RNA, 19 nt, Artificial Sequence
  Description of Artificial Sequence: Synthetic oligonucleotide
uguggucaccugagagucu

SEQ ID NO: 2580786 - RNA, 19 nt, Artificial Sequence
  Description of Artificial Sequence: Synthetic oligonucleotide
uagggagcacaugugcagu

SEQ ID NO: 2580787 - RNA, 19 nt, Artificial Sequence
  Description of Artificial Sequence: Synthetic oligonucleotide
ucuugagaugggugugguc

SEQ ID NO: 2580788 - RNA, 19 nt, Artificial Sequence
  Description of Artificial Sequence: Synthetic oligonucleotide
agguagcugaugaccagag

SEQ ID NO: 2580789 - RNA, 19 nt, Artificial Sequence
  Description of Artificial Sequence: Synthetic oligonucleotide
agaaaccuuuugucuugga

SEQ ID NO: 2580790 - RNA, 19 nt, Artificial Sequence
  Description of Artificial Sequence: Synthetic oligonucleotide
ucccuucuccccaccuuug

SEQ ID NO: 2580791 - RNA, 19 nt, Artificial Sequence
  Description of Artificial Sequence: Synthetic oligonucleotide
agggccaguggacagccau

SEQ ID NO: 2580792 - RNA, 19 nt, Artificial Sequence
  Description of Artificial Sequence: Synthetic oligonucleotide
ugagagucugucggcaaau

SEQ ID NO: 2580793 - RNA, 19 nt, Artificial Sequence
  Description of Artificial Sequence: Synthetic oligonucleotide
acauuccaauggcuaacau

SEQ ID NO: 2580794 - RNA, 19 nt, Artificial Sequence
  Description of Artificial Sequence: Synthetic oligonucleotide
uggagauacuguggcucag

SEQ ID NO: 2580795 - RNA, 19 nt, Artificial Sequence
  Description of Artificial Sequence: Synthetic oligonucleotide
agauacuguggcucaggua

SEQ ID NO: 2580796 - RNA, 19 nt, Artificial Sequence
  Description of Artificial Sequence: Synthetic oligonucleotide
cacgcuagggagcacaugu

SEQ ID NO: 2580797 - RNA, 19 nt, Artificial Sequence
  Description of Artificial Sequence: Synthetic oligonucleotide
cugggcucuuguguuacag

SEQ ID NO: 2580798 - RNA, 19 nt, Artificial Sequence
  Description of Artificial Sequence: Synthetic oligonucleotide
augcuuaugguaagcugcu

SEQ ID NO: 2580799 - RNA, 19 nt, Artificial Sequence
  Description of Artificial Sequence: Synthetic oligonucleotide
uacucuauugcaggcugua

SEQ ID NO: 2580800 - RNA, 19 nt, Artificial Sequence
  Description of Artificial Sequence: Synthetic oligonucleotide
caccugagagucugucggc

SEQ ID NO: 2580801 - RNA, 19 nt, Artificial Sequence
  Description of Artificial Sequence: Synthetic oligonucleotide
guagggccaguggacagcc

SEQ ID NO: 2580802 - RNA, 19 nt, Artificial Sequence
  Description of Artificial Sequence: Synthetic oligonucleotide
uugcagacauaugcuuaug

SEQ ID NO: 2580803 - RNA, 19 nt, Artificial Sequence
  Description of Artificial Sequence: Synthetic oligonucleotide
guuacagauuuugcagaca

SEQ ID NO: 2580804 - RNA, 19 nt, Artificial Sequence
  Description of Artificial Sequence: Synthetic oligonucleotide
acaugggaaccaacuucac

SEQ ID NO: 2580805 - RNA, 19 nt, Artificial Sequence
  Description of Artificial Sequence: Synthetic oligonucleotide
uggguguggucaccugaga

SEQ ID NO: 2580806 - RNA, 19 nt, Artificial Sequence
  Description of Artificial Sequence: Synthetic oligonucleotide
uuagggucgugaggugacc

SEQ ID NO: 2580807 - RNA, 19 nt, Artificial Sequence
  Description of Artificial Sequence: Synthetic oligonucleotide
ugaccuugcuauagaccua

SEQ ID NO: 2580808 - RNA, 19 nt, Artificial Sequence
  Description of Artificial Sequence: Synthetic oligonucleotide
gagauacuguggcucaggu

SEQ ID NO: 2580809 - RNA, 19 nt, Artificial Sequence
  Description of Artificial Sequence: Synthetic oligonucleotide
uagggucgugaggugacca

SEQ ID NO: 2580810 - RNA, 19 nt, Artificial Sequence
  Description of Artificial Sequence: Synthetic oligonucleotide
gguugaaagguagcugaug

SEQ ID NO: 2580811 - RNA, 19 nt, Artificial Sequence
  Description of Artificial Sequence: Synthetic oligonucleotide
ggagauacuguggcucagg

SEQ ID NO: 2580812 - RNA, 19 nt, Artificial Sequence
  Description of Artificial Sequence: Synthetic oligonucleotide
agcacaugugcaguggauu

SEQ ID NO: 2580813 - RNA, 19 nt, Artificial Sequence
  Description of Artificial Sequence: Synthetic oligonucleotide
ugcuuaugguaagcugcug

SEQ ID NO: 2580814 - RNA, 19 nt, Artificial Sequence
  Description of Artificial Sequence: Synthetic oligonucleotide
gcacaugugcaguggauuc

SEQ ID NO: 2580815 - RNA, 19 nt, Artificial Sequence
  Description of Artificial Sequence: Synthetic oligonucleotide
cucuagagauaucugaguu

SEQ ID NO: 2580816 - RNA, 19 nt, Artificial Sequence
  Description of Artificial Sequence: Synthetic oligonucleotide
gcucaaaggccucugaccu

SEQ ID NO: 2580817 - RNA, 19 nt, Artificial Sequence
  Description of Artificial Sequence: Synthetic oligonucleotide
cugucggcaaaucuucaaa

SEQ ID NO: 2580818 - RNA, 19 nt, Artificial Sequence
  Description of Artificial Sequence: Synthetic oligonucleotide
gguucuugagaugggugug

SEQ ID NO: 2580819 - RNA, 19 nt, Artificial Sequence
  Description of Artificial Sequence: Synthetic oligonucleotide
ggcucagguacucuagaga

SEQ ID NO: 2580820 - RNA, 19 nt, Artificial Sequence
  Description of Artificial Sequence: Synthetic oligonucleotide
gguagcugaugaccagagc

SEQ ID NO: 2580821 - RNA, 19 nt, Artificial Sequence
  Description of Artificial Sequence: Synthetic oligonucleotide
cagcacauuccaauggcua

SEQ ID NO: 2580822 - RNA, 19 nt, Artificial Sequence
  Description of Artificial Sequence: Synthetic oligonucleotide
uacaacaaguagggccagu

SEQ ID NO: 2580823 - RNA, 19 nt, Artificial Sequence
  Description of Artificial Sequence: Synthetic oligonucleotide
gcucuuguguuacagauuu

SEQ ID NO: 2580824 - RNA, 19 nt, Artificial Sequence
  Description of Artificial Sequence: Synthetic oligonucleotide
cauaugcuuaugguaagcu

SEQ ID NO: 2580825 - RNA, 19 nt, Artificial Sequence
  Description of Artificial Sequence: Synthetic oligonucleotide
uucacccaucugaggcuac

SEQ ID NO: 2580826 - RNA, 19 nt, Artificial Sequence
  Description of Artificial Sequence: Synthetic oligonucleotide
cagcacuaccaacauaucu

SEQ ID NO: 2580827 - RNA, 19 nt, Artificial Sequence
  Description of Artificial Sequence: Synthetic oligonucleotide
accugagagucugucggca

SEQ ID NO: 2580828 - RNA, 19 nt, Artificial Sequence
  Description of Artificial Sequence: Synthetic oligonucleotide
uugcagcacuaccaacaua

SEQ ID NO: 2580829 - RNA, 19 nt, Artificial Sequence
  Description of Artificial Sequence: Synthetic oligonucleotide
gcuauagaccuagcacagg

SEQ ID NO: 2580830 - RNA, 19 nt, Artificial Sequence
  Description of Artificial Sequence: Synthetic oligonucleotide
gcugguguacagcaugcuc

SEQ ID NO: 2580831 - RNA, 19 nt, Artificial Sequence
  Description of Artificial Sequence: Synthetic oligonucleotide
gcucagguacucuagagau

SEQ ID NO: 2580832 - RNA, 19 nt, Artificial Sequence
  Description of Artificial Sequence: Synthetic oligonucleotide
gguggccuuguguuucaag

SEQ ID NO: 2580833 - RNA, 19 nt, Artificial Sequence
  Description of Artificial Sequence: Synthetic oligonucleotide
aucugaggcuacugaggaa

SEQ ID NO: 2580834 - RNA, 19 nt, Artificial Sequence
  Description of Artificial Sequence: Synthetic oligonucleotide
gagccccagcgccacuucc

SEQ ID NO: 2580835 - RNA, 19 nt, Artificial Sequence
  Description of Artificial Sequence: Synthetic oligonucleotide
gaggaauuucaugcugaaa

SEQ ID NO: 2580836 - RNA, 19 nt, Artificial Sequence
  Description of Artificial Sequence: Synthetic oligonucleotide
cacauuccaauggcuaaca

SEQ ID NO: 2580837 - RNA, 19 nt, Artificial Sequence
  Description of Artificial Sequence: Synthetic oligonucleotide
cuuugugguggccuugugu

SEQ ID NO: 2580838 - RNA, 19 nt, Artificial Sequence
  Description of Artificial Sequence: Synthetic oligonucleotide
guggcucagguacucuaga

SEQ ID NO: 2580839 - RNA, 19 nt, Artificial Sequence
  Description of Artificial Sequence: Synthetic oligonucleotide
ucacccaucugaggcuacu

SEQ ID NO: 2580840 - RNA, 19 nt, Artificial Sequence
  Description of Artificial Sequence: Synthetic oligonucleotide
agcaugcucaaaggccucu

SEQ ID NO: 2580841 - RNA, 19 nt, Artificial Sequence
  Description of Artificial Sequence: Synthetic oligonucleotide
gagagucugucggcaaauc

SEQ ID NO: 2580842 - RNA, 19 nt, Artificial Sequence
  Description of Artificial Sequence: Synthetic oligonucleotide
gggagcacaugugcagugg

SEQ ID NO: 2580843 - RNA, 19 nt, Artificial Sequence
  Description of Artificial Sequence: Synthetic oligonucleotide
uugugguggccuuguguuu

SEQ ID NO: 2580844 - RNA, 19 nt, Artificial Sequence
  Description of Artificial Sequence: Synthetic oligonucleotide
ggucgugaggugaccacag

SEQ ID NO: 2580845 - RNA, 19 nt, Artificial Sequence
  Description of Artificial Sequence: Synthetic oligonucleotide
ugcugguguacagcaugcu

SEQ ID NO: 2580846 - RNA, 19 nt, Artificial Sequence
  Description of Artificial Sequence: Synthetic oligonucleotide
cacuaccaacauaucugga

SEQ ID NO: 2580847 - RNA, 19 nt, Artificial Sequence
  Description of Artificial Sequence: Synthetic oligonucleotide
gugaccacagagguugaaa

SEQ ID NO: 2580848 - RNA, 19 nt, Artificial Sequence
  Description of Artificial Sequence: Synthetic oligonucleotide
gagucugucggcaaaucuu

SEQ ID NO: 2580849 - RNA, 19 nt, Artificial Sequence
  Description of Artificial Sequence: Synthetic oligonucleotide
guaagcugcugcuggugua

SEQ ID NO: 2580850 - RNA, 19 nt, Artificial Sequence
  Description of Artificial Sequence: Synthetic oligonucleotide
cacugggcucuuguguuac

SEQ ID NO: 2580851 - RNA, 19 nt, Artificial Sequence
  Description of Artificial Sequence: Synthetic oligonucleotide
gaccuagcacaggccacgc

SEQ ID NO: 2580852 - RNA, 19 nt, Artificial Sequence
  Description of Artificial Sequence: Synthetic oligonucleotide
accuugcuauagaccuagc

SEQ ID NO: 2580853 - RNA, 19 nt, Artificial Sequence
  Description of Artificial Sequence: Synthetic oligonucleotide
ugaggcuacugaggaaguu

SEQ ID NO: 2580854 - RNA, 19 nt, Artificial Sequence
  Description of Artificial Sequence: Synthetic oligonucleotide
guugcagcacuaccaacau

SEQ ID NO: 2580855 - RNA, 19 nt, Artificial Sequence
  Description of Artificial Sequence: Synthetic oligonucleotide
accuuugugguggccuugu

SEQ ID NO: 2580856 - RNA, 19 nt, Artificial Sequence
  Description of Artificial Sequence: Synthetic oligonucleotide
ggagcacaugugcagugga

SEQ ID NO: 2580857 - RNA, 19 nt, Artificial Sequence
  Description of Artificial Sequence: Synthetic oligonucleotide
ugccucuuauuagggucgu

SEQ ID NO: 2580858 - RNA, 19 nt, Artificial Sequence
  Description of Artificial Sequence: Synthetic oligonucleotide
cugagagucugucggcaaa

SEQ ID NO: 2580859 - RNA, 19 nt, Artificial Sequence
  Description of Artificial Sequence: Synthetic oligonucleotide
ccuugcuauagaccuagca

SEQ ID NO: 2580860 - RNA, 19 nt, Artificial Sequence
  Description of Artificial Sequence: Synthetic oligonucleotide
ggaaccaacuucacccauc

SEQ ID NO: 2580861 - RNA, 19 nt, Artificial Sequence
  Description of Artificial Sequence: Synthetic oligonucleotide
uggucaccugagagucugu

SEQ ID NO: 2580862 - RNA, 19 nt, Artificial Sequence
  Description of Artificial Sequence: Synthetic oligonucleotide
auacuguggcucagguacu

SEQ ID NO: 2580863 - RNA, 19 nt, Artificial Sequence
  Description of Artificial Sequence: Synthetic oligonucleotide
cagcaugcucaaaggccuc

SEQ ID NO: 2580864 - RNA, 19 nt, Artificial Sequence
  Description of Artificial Sequence: Synthetic oligonucleotide
gugcacugggcucuugugu

SEQ ID NO: 2580865 - RNA, 19 nt, Artificial Sequence
  Description of Artificial Sequence: Synthetic oligonucleotide
cucagguacucuagagaua

SEQ ID NO: 2580866 - RNA, 19 nt, Artificial Sequence
  Description of Artificial Sequence: Synthetic oligonucleotide
accuagcacaggccacgcu

SEQ ID NO: 2580867 - RNA, 19 nt, Artificial Sequence
  Description of Artificial Sequence: Synthetic oligonucleotide
ccucuuauuagggucguga

SEQ ID NO: 2580868 - RNA, 19 nt, Artificial Sequence
  Description of Artificial Sequence: Synthetic oligonucleotide
gcacauuccaauggcuaac

SEQ ID NO: 2580869 - RNA, 19 nt, Artificial Sequence
  Description of Artificial Sequence: Synthetic oligonucleotide
agguugaaagguagcugau

SEQ ID NO: 2580870 - RNA, 19 nt, Artificial Sequence
  Description of Artificial Sequence: Synthetic oligonucleotide
ccaauggcuaacaucacau

SEQ ID NO: 2580871 - RNA, 19 nt, Artificial Sequence
  Description of Artificial Sequence: Synthetic oligonucleotide
gcacaggccacgcuaggga

SEQ ID NO: 2580872 - RNA, 19 nt, Artificial Sequence
  Description of Artificial Sequence: Synthetic oligonucleotide
cacccaucugaggcuacug

SEQ ID NO: 2580873 - RNA, 19 nt, Artificial Sequence
  Description of Artificial Sequence: Synthetic oligonucleotide
acgcuagggagcacaugug

SEQ ID NO: 2580874 - RNA, 19 nt, Artificial Sequence
  Description of Artificial Sequence: Synthetic oligonucleotide
cagguacucuagagauauc

SEQ ID NO: 2580875 - RNA, 19 nt, Artificial Sequence
  Description of Artificial Sequence: Synthetic oligonucleotide
gucgugaggugaccacaga

SEQ ID NO: 2580876 - RNA, 19 nt, Artificial Sequence
  Description of Artificial Sequence: Synthetic oligonucleotide
gggcucuuguguuacagau

SEQ ID NO: 2580877 - RNA, 19 nt, Artificial Sequence
  Description of Artificial Sequence: Synthetic oligonucleotide
cuguggcucagguacucua

SEQ ID NO: 2580878 - RNA, 19 nt, Artificial Sequence
  Description of Artificial Sequence: Synthetic oligonucleotide
gcaguggauucucccuccc

SEQ ID NO: 2580879 - RNA, 19 nt, Artificial Sequence
  Description of Artificial Sequence: Synthetic oligonucleotide
caguggacagccaucuuuu

SEQ ID NO: 2580880 - RNA, 19 nt, Artificial Sequence
  Description of Artificial Sequence: Synthetic oligonucleotide
ggauucucccucccuucuc

SEQ ID NO: 2580881 - RNA, 19 nt, Artificial Sequence
  Description of Artificial Sequence: Synthetic oligonucleotide
caggccacgcuagggagca

SEQ ID NO: 2580882 - RNA, 19 nt, Artificial Sequence
  Description of Artificial Sequence: Synthetic oligonucleotide
ucccucccuucuccccacc

SEQ ID NO: 2580883 - RNA, 19 nt, Artificial Sequence
  Description of Artificial Sequence: Synthetic oligonucleotide
uccccaccuuugugguggc

SEQ ID NO: 2580884 - RNA, 19 nt, Artificial Sequence
  Description of Artificial Sequence: Synthetic oligonucleotide
gugguggccuuguguuuca

SEQ ID NO: 2580885 - RNA, 19 nt, Artificial Sequence
  Description of Artificial Sequence: Synthetic oligonucleotide
gucugucggcaaaucuuca

SEQ ID NO: 2580886 - RNA, 19 nt, Artificial Sequence
  Description of Artificial Sequence: Synthetic oligonucleotide
ccuagcacaggccacgcua

SEQ ID NO: 2580887 - RNA, 19 nt, Artificial Sequence
  Description of Artificial Sequence: Synthetic oligonucleotide
cuucacccaucugaggcua

SEQ ID NO: 2580888 - RNA, 19 nt, Artificial Sequence
  Description of Artificial Sequence: Synthetic oligonucleotide
caccuuugugguggccuug

SEQ ID NO: 2580889 - RNA, 19 nt, Artificial Sequence
  Description of Artificial Sequence: Synthetic oligonucleotide
ggucaccugagagucuguc

SEQ ID NO: 2580890 - RNA, 19 nt, Artificial Sequence
  Description of Artificial Sequence: Synthetic oligonucleotide
caaguggagcugcuugccu

SEQ ID NO: 2580891 - RNA, 19 nt, Artificial Sequence
  Description of Artificial Sequence: Synthetic oligonucleotide
agccccagcgccacuuccu

SEQ ID NO: 2580892 - RNA, 19 nt, Artificial Sequence
  Description of Artificial Sequence: Synthetic oligonucleotide
gccuuguguuucaagugga

SEQ ID NO: 2580893 - RNA, 19 nt, Artificial Sequence
  Description of Artificial Sequence: Synthetic oligonucleotide
gcaugcucaaaggccucug

SEQ ID NO: 2580894 - RNA, 19 nt, Artificial Sequence
  Description of Artificial Sequence: Synthetic oligonucleotide
cugaggcuacugaggaagu

SEQ ID NO: 2580895 - RNA, 19 nt, Artificial Sequence
  Description of Artificial Sequence: Synthetic oligonucleotide
gcaaaucuucaaagaugga

SEQ ID NO: 2580896 - RNA, 19 nt, Artificial Sequence
  Description of Artificial Sequence: Synthetic oligonucleotide
acugugcacugggcucuug

SEQ ID NO: 2580897 - RNA, 19 nt, Artificial Sequence
  Description of Artificial Sequence: Synthetic oligonucleotide
gggucgugaggugaccaca

SEQ ID NO: 2580898 - RNA, 19 nt, Artificial Sequence
  Description of Artificial Sequence: Synthetic oligonucleotide
gagcacaugugcaguggau

SEQ ID NO: 2580899 - RNA, 19 nt, Artificial Sequence
  Description of Artificial Sequence: Synthetic oligonucleotide
ggucacaaggucagcacau

SEQ ID NO: 2580900 - RNA, 19 nt, Artificial Sequence
  Description of Artificial Sequence: Synthetic oligonucleotide
guuucaaguggagcugcuu

SEQ ID NO: 2580901 - RNA, 19 nt, Artificial Sequence
  Description of Artificial Sequence: Synthetic oligonucleotide
gccccagcgccacuuccug

SEQ ID NO: 2580902 - RNA, 19 nt, Artificial Sequence
  Description of Artificial Sequence: Synthetic oligonucleotide
ggccacgcuagggagcaca

SEQ ID NO: 2580903 - RNA, 19 nt, Artificial Sequence
  Description of Artificial Sequence: Synthetic oligonucleotide
ugguggccuuguguuucaa

SEQ ID NO: 2580904 - RNA, 19 nt, Artificial Sequence
  Description of Artificial Sequence: Synthetic oligonucleotide
ccucugaccuugcuauaga

SEQ ID NO: 2580905 - RNA, 19 nt, Artificial Sequence
  Description of Artificial Sequence: Synthetic oligonucleotide
ccacagagguugaaaggua

SEQ ID NO: 2580906 - RNA, 19 nt, Artificial Sequence
  Description of Artificial Sequence: Synthetic oligonucleotide
caguggauucucccucccu

SEQ ID NO: 2580907 - RNA, 19 nt, Artificial Sequence
  Description of Artificial Sequence: Synthetic oligonucleotide
ggacugugcacugggcucu

SEQ ID NO: 2580908 - RNA, 19 nt, Artificial Sequence
  Description of Artificial Sequence: Synthetic oligonucleotide
gcagcacuaccaacauauc

SEQ ID NO: 2580909 - RNA, 19 nt, Artificial Sequence
  Description of Artificial Sequence: Synthetic oligonucleotide
cucaaaggccucugaccuu

SEQ ID NO: 2580910 - RNA, 19 nt, Artificial Sequence
  Description of Artificial Sequence: Synthetic oligonucleotide
ggccaguggacagccaucu

SEQ ID NO: 2580911 - RNA, 19 nt, Artificial Sequence
  Description of Artificial Sequence: Synthetic oligonucleotide
ccugagagucugucggcaa

SEQ ID NO: 2580912 - RNA, 19 nt, Artificial Sequence
  Description of Artificial Sequence: Synthetic oligonucleotide
gucacaaggucagcacauu

SEQ ID NO: 2580913 - RNA, 19 nt, Artificial Sequence
  Description of Artificial Sequence: Synthetic oligonucleotide
aggccacgcuagggagcac

SEQ ID NO: 2580914 - RNA, 19 nt, Artificial Sequence
  Description of Artificial Sequence: Synthetic oligonucleotide
gggaaccaacuucacccau

SEQ ID NO: 2580915 - RNA, 19 nt, Artificial Sequence
  Description of Artificial Sequence: Synthetic oligonucleotide
gagcugcuugccucuuauu

SEQ ID NO: 2580916 - RNA, 19 nt, Artificial Sequence
  Description of Artificial Sequence: Synthetic oligonucleotide
gcacugggcucuuguguua

SEQ ID NO: 2580917 - RNA, 19 nt, Artificial Sequence
  Description of Artificial Sequence: Synthetic oligonucleotide
gccucuuauuagggucgug

SEQ ID NO: 2580918 - RNA, 19 nt, Artificial Sequence
  Description of Artificial Sequence: Synthetic oligonucleotide
gguguacagcaugcucaaa

SEQ ID NO: 2580919 - RNA, 19 nt, Artificial Sequence
  Description of Artificial Sequence: Synthetic oligonucleotide
gcaggcuguagaggucaca

SEQ ID NO: 2580920 - RNA, 19 nt, Artificial Sequence
  Description of Artificial Sequence: Synthetic oligonucleotide
ccacgcuagggagcacaug

SEQ ID NO: 2580921 - RNA, 19 nt, Artificial Sequence
  Description of Artificial Sequence: Synthetic oligonucleotide
ggccucugaccuugcuaua

SEQ ID NO: 2580922 - RNA, 19 nt, Artificial Sequence
  Description of Artificial Sequence: Synthetic oligonucleotide
ggcucuuguguuacagauu

SEQ ID NO: 2580923 - RNA, 19 nt, Artificial Sequence
  Description of Artificial Sequence: Synthetic oligonucleotide
ccccaccuuugugguggcc

SEQ ID NO: 2580924 - RNA, 19 nt, Artificial Sequence
  Description of Artificial Sequence: Synthetic oligonucleotide
gccacgcuagggagcacau

SEQ ID NO: 2580925 - RNA, 19 nt, Artificial Sequence
  Description of Artificial Sequence: Synthetic oligonucleotide
cccucccuucuccccaccu

SEQ ID NO: 2580926 - RNA, 19 nt, Artificial Sequence
  Description of Artificial Sequence: Synthetic oligonucleotide
uccaauaagauuaaguccc

SEQ ID NO: 2580927 - RNA, 19 nt, Artificial Sequence
  Description of Artificial Sequence: Synthetic oligonucleotide
ucuguaaauaugcacaggg

SEQ ID NO: 2580928 - RNA, 19 nt, Artificial Sequence
  Description of Artificial Sequence: Synthetic oligonucleotide
agagaauuaggugagaucc

SEQ ID NO: 2580929 - RNA, 19 nt, Artificial Sequence
  Description of Artificial Sequence: Synthetic oligonucleotide
auaguuggagaccaaaacc

SEQ ID NO: 2580930 - RNA, 19 nt, Artificial Sequence
  Description of Artificial Sequence: Synthetic oligonucleotide
auaagauuaagucccacac

SEQ ID NO: 2580931 - RNA, 19 nt, Artificial Sequence
  Description of Artificial Sequence: Synthetic oligonucleotide
aaauauucaagguuugucu

SEQ ID NO: 2580932 - RNA, 19 nt, Artificial Sequence
  Description of Artificial Sequence: Synthetic oligonucleotide
aagauuaagucccacacca

SEQ ID NO: 2580933 - RNA, 19 nt, Artificial Sequence
  Description of Artificial Sequence: Synthetic oligonucleotide
aucauagagaauuagguga

SEQ ID NO: 2580934 - RNA, 19 nt, Artificial Sequence
  Description of Artificial Sequence: Synthetic oligonucleotide
auuauccacuauuugcugc

SEQ ID NO: 2580935 - RNA, 19 nt, Artificial Sequence
  Description of Artificial Sequence: Synthetic oligonucleotide
aauaagauuaagucccaca

SEQ ID NO: 2580936 - RNA, 19 nt, Artificial Sequence
  Description of Artificial Sequence: Synthetic oligonucleotide
aaguucgugaauugcugcc

SEQ ID NO: 2580937 - RNA, 19 nt, Artificial Sequence
  Description of Artificial Sequence: Synthetic oligonucleotide
caucacuugagcuaaauuc

SEQ ID NO: 2580938 - RNA, 19 nt, Artificial Sequence
  Description of Artificial Sequence: Synthetic oligonucleotide
ccuucuaaaauauucaagg

SEQ ID NO: 2580939 - RNA, 19 nt, Artificial Sequence
  Description of Artificial Sequence: Synthetic oligonucleotide
acuggauauguucagauga

SEQ ID NO: 2580940 - RNA, 19 nt, Artificial Sequence
  Description of Artificial Sequence: Synthetic oligonucleotide
uaucauagagaauuaggug

SEQ ID NO: 2580941 - RNA, 19 nt, Artificial Sequence
  Description of Artificial Sequence: Synthetic oligonucleotide
ugaaauuauccacuauuug

SEQ ID NO: 2580942 - RNA, 19 nt, Artificial Sequence
  Description of Artificial Sequence: Synthetic oligonucleotide
uauaguuggagaccaaaac

SEQ ID NO: 2580943 - RNA, 19 nt, Artificial Sequence
  Description of Artificial Sequence: Synthetic oligonucleotide
caagccuuugcauagauuc

SEQ ID NO: 2580944 - RNA, 19 nt, Artificial Sequence
  Description of Artificial Sequence: Synthetic oligonucleotide
uaaccaguaggguacagag

SEQ ID NO: 2580945 - RNA, 19 nt, Artificial Sequence
  Description of Artificial Sequence: Synthetic oligonucleotide
ugagcuaaauucuuuacuc

SEQ ID NO: 2580946 - RNA, 19 nt, Artificial Sequence
  Description of Artificial Sequence: Synthetic oligonucleotide
uuuaccaacacuuguaguu

SEQ ID NO: 2580947 - RNA, 19 nt, Artificial Sequence
  Description of Artificial Sequence: Synthetic oligonucleotide
gauauguucagaugacuug

SEQ ID NO: 2580948 - RNA, 19 nt, Artificial Sequence
  Description of Artificial Sequence: Synthetic oligonucleotide
ugugaauuuucgugcaacg

SEQ ID NO: 2580949 - RNA, 19 nt, Artificial Sequence
  Description of Artificial Sequence: Synthetic oligonucleotide
cuccaauaagauuaagucc

SEQ ID NO: 2580950 - RNA, 19 nt, Artificial Sequence
  Description of Artificial Sequence: Synthetic oligonucleotide
aauuaggugagauccucca

SEQ ID NO: 2580951 - RNA, 19 nt, Artificial Sequence
  Description of Artificial Sequence: Synthetic oligonucleotide
aauauucaagguuugucua

SEQ ID NO: 2580952 - RNA, 19 nt, Artificial Sequence
  Description of Artificial Sequence: Synthetic oligonucleotide
gaacaagucuuuaagcucc

SEQ ID NO: 2580953 - RNA, 19 nt, Artificial Sequence
  Description of Artificial Sequence: Synthetic oligonucleotide
aucucuccaaacucuagac

SEQ ID NO: 2580954 - RNA, 19 nt, Artificial Sequence
  Description of Artificial Sequence: Synthetic oligonucleotide
gaugucaguagcuggauuc

SEQ ID NO: 2580955 - RNA, 19 nt, Artificial Sequence
  Description of Artificial Sequence: Synthetic oligonucleotide
uccucuaugguaccuguag

SEQ ID NO: 2580956 - RNA, 19 nt, Artificial Sequence
  Description of Artificial Sequence: Synthetic oligonucleotide
ucuagacauagccuggaug

SEQ ID NO: 2580957 - RNA, 19 nt, Artificial Sequence
  Description of Artificial Sequence: Synthetic oligonucleotide
uaugguaccuguagucagg

SEQ ID NO: 2580958 - RNA, 19 nt, Artificial Sequence
  Description of Artificial Sequence: Synthetic oligonucleotide
ucagcaagccuuugcauag

SEQ ID NO: 2580959 - RNA, 19 nt, Artificial Sequence
  Description of Artificial Sequence: Synthetic oligonucleotide
acuggagagggucguaacc

SEQ ID NO: 2580960 - RNA, 19 nt, Artificial Sequence
  Description of Artificial Sequence: Synthetic oligonucleotide
cugaaaacuggauauguuc

SEQ ID NO: 2580961 - RNA, 19 nt, Artificial Sequence
  Description of Artificial Sequence: Synthetic oligonucleotide
uuauccacuauuugcugcc

SEQ ID NO: 2580962 - RNA, 19 nt, Artificial Sequence
  Description of Artificial Sequence: Synthetic oligonucleotide
ggcacaagcauauccaugg

SEQ ID NO: 2580963 - RNA, 19 nt, Artificial Sequence
  Description of Artificial Sequence: Synthetic oligonucleotide
caggagucuguaaauaugc

SEQ ID NO: 2580964 - RNA, 19 nt, Artificial Sequence
  Description of Artificial Sequence: Synthetic oligonucleotide
aaacuggauauguucagau

SEQ ID NO: 2580965 - RNA, 19 nt, Artificial Sequence
  Description of Artificial Sequence: Synthetic oligonucleotide
uccuccaauaagauuaagu

SEQ ID NO: 2580966 - RNA, 19 nt, Artificial Sequence
  Description of Artificial Sequence: Synthetic oligonucleotide
acaacugccccggaaaggc

SEQ ID NO: 2580967 - RNA, 19 nt, Artificial Sequence
  Description of Artificial Sequence: Synthetic oligonucleotide
ugcaacgugaacaagucuu

SEQ ID NO: 2580968 - RNA, 19 nt, Artificial Sequence
  Description of Artificial Sequence: Synthetic oligonucleotide
ugaacaagucuuuaagcuc

SEQ ID NO: 2580969 - RNA, 19 nt, Artificial Sequence
  Description of Artificial Sequence: Synthetic oligonucleotide
acuauuugcugccuuugag

SEQ ID NO: 2580970 - RNA, 19 nt, Artificial Sequence
  Description of Artificial Sequence: Synthetic oligonucleotide
uuacucuucacagaacuga

SEQ ID NO: 2580971 - RNA, 19 nt, Artificial Sequence
  Description of Artificial Sequence: Synthetic oligonucleotide
acgugaacaagucuuuaag

SEQ ID NO: 2580972 - RNA, 19 nt, Artificial Sequence
  Description of Artificial Sequence: Synthetic oligonucleotide
ucuacaacugccccggaaa

SEQ ID NO: 2580973 - RNA, 19 nt, Artificial Sequence
  Description of Artificial Sequence: Synthetic oligonucleotide
agcuuuugaaacuuaaaua

SEQ ID NO: 2580974 - RNA, 19 nt, Artificial Sequence
  Description of Artificial Sequence: Synthetic oligonucleotide
aacuggauauguucagaug

SEQ ID NO: 2580975 - RNA, 19 nt, Artificial Sequence
  Description of Artificial Sequence: Synthetic oligonucleotide
cagucaauaucauagagaa

SEQ ID NO: 2580976 - RNA, 19 nt, Artificial Sequence
  Description of Artificial Sequence: Synthetic oligonucleotide
cuaaaauauucaagguuug

SEQ ID NO: 2580977 - RNA, 19 nt, Artificial Sequence
  Description of Artificial Sequence: Synthetic oligonucleotide
agucuuuaagcuccuccac

SEQ ID NO: 2580978 - RNA, 19 nt, Artificial Sequence
  Description of Artificial Sequence: Synthetic oligonucleotide
uuaagucccacaccaccag

SEQ ID NO: 2580979 - RNA, 19 nt, Artificial Sequence
  Description of Artificial Sequence: Synthetic oligonucleotide
gaaguucgugaauugcugc

SEQ ID NO: 2580980 - RNA, 19 nt, Artificial Sequence
  Description of Artificial Sequence: Synthetic oligonucleotide
uuaggugagauccuccaau

SEQ ID NO: 2580981 - RNA, 19 nt, Artificial Sequence
  Description of Artificial Sequence: Synthetic oligonucleotide
caucaagucuggcacaagc

SEQ ID NO: 2580982 - RNA, 19 nt, Artificial Sequence
  Description of Artificial Sequence: Synthetic oligonucleotide
ucgaguauuugcuauugaa

SEQ ID NO: 2580983 - RNA, 19 nt, Artificial Sequence
  Description of Artificial Sequence: Synthetic oligonucleotide
ucgugcaacgugaacaagu

SEQ ID NO: 2580984 - RNA, 19 nt, Artificial Sequence
  Description of Artificial Sequence: Synthetic oligonucleotide
auucucagagaacuggaga

SEQ ID NO: 2580985 - RNA, 19 nt, Artificial Sequence
  Description of Artificial Sequence: Synthetic oligonucleotide
agaauuaggugagauccuc

SEQ ID NO: 2580986 - RNA, 19 nt, Artificial Sequence
  Description of Artificial Sequence: Synthetic oligonucleotide
aacgugaacaagucuuuaa

SEQ ID NO: 2580987 - RNA, 19 nt, Artificial Sequence
  Description of Artificial Sequence: Synthetic oligonucleotide
gagggucguaaccaguagg

SEQ ID NO: 2580988 - RNA, 19 nt, Artificial Sequence
  Description of Artificial Sequence: Synthetic oligonucleotide
ccaaacucuagacauagcc

SEQ ID NO: 2580989 - RNA, 19 nt, Artificial Sequence
  Description of Artificial Sequence: Synthetic oligonucleotide
cacaagcauauccauggcg

SEQ ID NO: 2580990 - RNA, 19 nt, Artificial Sequence
  Description of Artificial Sequence: Synthetic oligonucleotide
ugucuauaguuggagacca

SEQ ID NO: 2580991 - RNA, 19 nt, Artificial Sequence
  Description of Artificial Sequence: Synthetic oligonucleotide
ucaagucuggcacaagcau

SEQ ID NO: 2580992 - RNA, 19 nt, Artificial Sequence
  Description of Artificial Sequence: Synthetic oligonucleotide
cuugagcuaaauucuuuac

SEQ ID NO: 2580993 - RNA, 19 nt, Artificial Sequence
  Description of Artificial Sequence: Synthetic oligonucleotide
aaaacuggauauguucaga

SEQ ID NO: 2580994 - RNA, 19 nt, Artificial Sequence
  Description of Artificial Sequence: Synthetic oligonucleotide
ugaggucuacaacugcccc

SEQ ID NO: 2580995 - RNA, 19 nt, Artificial Sequence
  Description of Artificial Sequence: Synthetic oligonucleotide
auagccuggaugucaguag

SEQ ID NO: 2580996 - RNA, 19 nt, Artificial Sequence
  Description of Artificial Sequence: Synthetic oligonucleotide
gaauuuucgugcaacguga

SEQ ID NO: 2580997 - RNA, 19 nt, Artificial Sequence
  Description of Artificial Sequence: Synthetic oligonucleotide
aguagcuggauuccaguca

SEQ ID NO: 2580998 - RNA, 19 nt, Artificial Sequence
  Description of Artificial Sequence: Synthetic oligonucleotide
uuggagaccaaaaccacuu

SEQ ID NO: 2580999 - RNA, 19 nt, Artificial Sequence
  Description of Artificial Sequence: Synthetic oligonucleotide
ucucuccaaacucuagaca

SEQ ID NO: 2581000 - RNA, 19 nt, Artificial Sequence
  Description of Artificial Sequence: Synthetic oligonucleotide
aaaggccuugcuuacugau

SEQ ID NO: 2581001 - RNA, 19 nt, Artificial Sequence
  Description of Artificial Sequence: Synthetic oligonucleotide
ucagaugacuuggugaggu

SEQ ID NO: 2581002 - RNA, 19 nt, Artificial Sequence
  Description of Artificial Sequence: Synthetic oligonucleotide
aucacuugagcuaaauucu

SEQ ID NO: 2581003 - RNA, 19 nt, Artificial Sequence
  Description of Artificial Sequence: Synthetic oligonucleotide
ugaccaucucuccaaacuc

SEQ ID NO: 2581004 - RNA, 19 nt, Artificial Sequence
  Description of Artificial Sequence: Synthetic oligonucleotide
ccuccaauaagauuaaguc

SEQ ID NO: 2581005 - RNA, 19 nt, Artificial Sequence
  Description of Artificial Sequence: Synthetic oligonucleotide
aaauacagucgaguauuug

SEQ ID NO: 2581006 - RNA, 19 nt, Artificial Sequence
  Description of Artificial Sequence: Synthetic oligonucleotide
uccugugcacucacagucg

SEQ ID NO: 2581007 - RNA, 19 nt, Artificial Sequence
  Description of Artificial Sequence: Synthetic oligonucleotide
uucaagguuugucuauagu

SEQ ID NO: 2581008 - RNA, 19 nt, Artificial Sequence
  Description of Artificial Sequence: Synthetic oligonucleotide
uggugucuggccaucaagu

SEQ ID NO: 2581009 - RNA, 19 nt, Artificial Sequence
  Description of Artificial Sequence: Synthetic oligonucleotide
cacacacugugaauuuucg

SEQ ID NO: 2581010 - RNA, 19 nt, Artificial Sequence
  Description of Artificial Sequence: Synthetic oligonucleotide
uauugaaauuauccacuau

SEQ ID NO: 2581011 - RNA, 19 nt, Artificial Sequence
  Description of Artificial Sequence: Synthetic oligonucleotide
auucaagguuugucuauag

SEQ ID NO: 2581012 - RNA, 19 nt, Artificial Sequence
  Description of Artificial Sequence: Synthetic oligonucleotide
cuagacauagccuggaugu

SEQ ID NO: 2581013 - RNA, 19 nt, Artificial Sequence
  Description of Artificial Sequence: Synthetic oligonucleotide
cuaaauucuuuacucuuca

SEQ ID NO: 2581014 - RNA, 19 nt, Artificial Sequence
  Description of Artificial Sequence: Synthetic oligonucleotide
agcuccuccacugaaaacu

SEQ ID NO: 2581015 - RNA, 19 nt, Artificial Sequence
  Description of Artificial Sequence: Synthetic oligonucleotide
guauuugcuauugaaauua

SEQ ID NO: 2581016 - RNA, 19 nt, Artificial Sequence
  Description of Artificial Sequence: Synthetic oligonucleotide
auauccauggcgcuugcau

SEQ ID NO: 2581017 - RNA, 19 nt, Artificial Sequence
  Description of Artificial Sequence: Synthetic oligonucleotide
uuucgugcaacgugaacaa

SEQ ID NO: 2581018 - RNA, 19 nt, Artificial Sequence
  Description of Artificial Sequence: Synthetic oligonucleotide
auagauucauuucuucauu

SEQ ID NO: 2581019 - RNA, 19 nt, Artificial Sequence
  Description of Artificial Sequence: Synthetic oligonucleotide
uagagaauuaggugagauc

SEQ ID NO: 2581020 - RNA, 19 nt, Artificial Sequence
  Description of Artificial Sequence: Synthetic oligonucleotide
auauucaagguuugucuau

SEQ ID NO: 2581021 - RNA, 19 nt, Artificial Sequence
  Description of Artificial Sequence: Synthetic oligonucleotide
aggccuugcuuacugaucu

SEQ ID NO: 2581022 - RNA, 19 nt, Artificial Sequence
  Description of Artificial Sequence: Synthetic oligonucleotide
ugagauccuccaauaagau

SEQ ID NO: 2581023 - RNA, 19 nt, Artificial Sequence
  Description of Artificial Sequence: Synthetic oligonucleotide
cucuaugguaccuguaguc

SEQ ID NO: 2581024 - RNA, 19 nt, Artificial Sequence
  Description of Artificial Sequence: Synthetic oligonucleotide
ugcacucacagucgagcag

SEQ ID NO: 2581025 - RNA, 19 nt, Artificial Sequence
  Description of Artificial Sequence: Synthetic oligonucleotide
ugcauagauucauuucuuc

SEQ ID NO: 2581026 - RNA, 19 nt, Artificial Sequence
  Description of Artificial Sequence: Synthetic oligonucleotide
aguuggagaccaaaaccac

SEQ ID NO: 2581027 - RNA, 19 nt, Artificial Sequence
  Description of Artificial Sequence: Synthetic oligonucleotide
uuaagcuccuccacugaaa

SEQ ID NO: 2581028 - RNA, 19 nt, Artificial Sequence
  Description of Artificial Sequence: Synthetic oligonucleotide
guagucaggagucuguaaa

SEQ ID NO: 2581029 - RNA, 19 nt, Artificial Sequence
  Description of Artificial Sequence: Synthetic oligonucleotide
uucccagacucauucucag

SEQ ID NO: 2581030 - RNA, 19 nt, Artificial Sequence
  Description of Artificial Sequence: Synthetic oligonucleotide
cuuacugaucugccuuugg

SEQ ID NO: 2581031 - RNA, 19 nt, Artificial Sequence
  Description of Artificial Sequence: Synthetic oligonucleotide
uauuugcuauugaaauuau

SEQ ID NO: 2581032 - RNA, 19 nt, Artificial Sequence
  Description of Artificial Sequence: Synthetic oligonucleotide
cuggauauguucagaugac

SEQ ID NO: 2581033 - RNA, 19 nt, Artificial Sequence
  Description of Artificial Sequence: Synthetic oligonucleotide
acagucgaguauuugcuau

SEQ ID NO: 2581034 - RNA, 19 nt, Artificial Sequence
  Description of Artificial Sequence: Synthetic oligonucleotide
gaauuaggugagauccucc

SEQ ID NO: 2581035 - RNA, 19 nt, Artificial Sequence
  Description of Artificial Sequence: Synthetic oligonucleotide
gacgaaguucgugaauugc

SEQ ID NO: 2581036 - RNA, 19 nt, Artificial Sequence
  Description of Artificial Sequence: Synthetic oligonucleotide
uacaacugccccggaaagg

SEQ ID NO: 2581037 - RNA, 19 nt, Artificial Sequence
  Description of Artificial Sequence: Synthetic oligonucleotide
uucgugaauugcugccagg

SEQ ID NO: 2581038 - RNA, 19 nt, Artificial Sequence
  Description of Artificial Sequence: Synthetic oligonucleotide
gucguaaccaguaggguac

SEQ ID NO: 2581039 - RNA, 19 nt, Artificial Sequence
  Description of Artificial Sequence: Synthetic oligonucleotide
aagucuggcacaagcauau

SEQ ID NO: 2581040 - RNA, 19 nt, Artificial Sequence
  Description of Artificial Sequence: Synthetic oligonucleotide
auagagaauuaggugagau

SEQ ID NO: 2581041 - RNA, 19 nt, Artificial Sequence
  Description of Artificial Sequence: Synthetic oligonucleotide
agucgagcaggucaugggu

SEQ ID NO: 2581042 - RNA, 19 nt, Artificial Sequence
  Description of Artificial Sequence: Synthetic oligonucleotide
gacauagccuggaugucag

SEQ ID NO: 2581043 - RNA, 19 nt, Artificial Sequence
  Description of Artificial Sequence: Synthetic oligonucleotide
uuuucggugggacgaaguu

SEQ ID NO: 2581044 - RNA, 19 nt, Artificial Sequence
  Description of Artificial Sequence: Synthetic oligonucleotide
gugagauccuccaauaaga

SEQ ID NO: 2581045 - RNA, 19 nt, Artificial Sequence
  Description of Artificial Sequence: Synthetic oligonucleotide
ggagucuguaaauaugcac

SEQ ID NO: 2581046 - RNA, 19 nt, Artificial Sequence
  Description of Artificial Sequence: Synthetic oligonucleotide
accaccagcuuuugaaacu

SEQ ID NO: 2581047 - RNA, 19 nt, Artificial Sequence
  Description of Artificial Sequence: Synthetic oligonucleotide
ucgugaauugcugccagga

SEQ ID NO: 2581048 - RNA, 19 nt, Artificial Sequence
  Description of Artificial Sequence: Synthetic oligonucleotide
cuuuacucuucacagaacu

SEQ ID NO: 2581049 - RNA, 19 nt, Artificial Sequence
  Description of Artificial Sequence: Synthetic oligonucleotide
agugugaccuuuuccuccu

SEQ ID NO: 2581050 - RNA, 19 nt, Artificial Sequence
  Description of Artificial Sequence: Synthetic oligonucleotide
ucaucacuugagcuaaauu

SEQ ID NO: 2581051 - RNA, 19 nt, Artificial Sequence
  Description of Artificial Sequence: Synthetic oligonucleotide
guuugucuauaguuggaga

SEQ ID NO: 2581052 - RNA, 19 nt, Artificial Sequence
  Description of Artificial Sequence: Synthetic oligonucleotide
accaacacuuguaguuucc

SEQ ID NO: 2581053 - RNA, 19 nt, Artificial Sequence
  Description of Artificial Sequence: Synthetic oligonucleotide
auacagucgaguauuugcu

SEQ ID NO: 2581054 - RNA, 19 nt, Artificial Sequence
  Description of Artificial Sequence: Synthetic oligonucleotide
guucgugaauugcugccag

SEQ ID NO: 2581055 - RNA, 19 nt, Artificial Sequence
  Description of Artificial Sequence: Synthetic oligonucleotide
ucgagcaggucauggguca

SEQ ID NO: 2581056 - RNA, 19 nt, Artificial Sequence
  Description of Artificial Sequence: Synthetic oligonucleotide
guaaauaugcacagggugu

SEQ ID NO: 2581057 - RNA, 19 nt, Artificial Sequence
  Description of Artificial Sequence: Synthetic oligonucleotide
guagaucuucuccucuaug

SEQ ID NO: 2581058 - RNA, 19 nt, Artificial Sequence
  Description of Artificial Sequence: Synthetic oligonucleotide
ugcacaggguguuucugac

SEQ ID NO: 2581059 - RNA, 19 nt, Artificial Sequence
  Description of Artificial Sequence: Synthetic oligonucleotide
auaugcacaggguguuucu

SEQ ID NO: 2581060 - RNA, 19 nt, Artificial Sequence
  Description of Artificial Sequence: Synthetic oligonucleotide
agagggucguaaccaguag

SEQ ID NO: 2581061 - RNA, 19 nt, Artificial Sequence
  Description of Artificial Sequence: Synthetic oligonucleotide
gauuccagucaauaucaua

SEQ ID NO: 2581062 - RNA, 19 nt, Artificial Sequence
  Description of Artificial Sequence: Synthetic oligonucleotide
uggauauguucagaugacu

SEQ ID NO: 2581063 - RNA, 19 nt, Artificial Sequence
  Description of Artificial Sequence: Synthetic oligonucleotide
uauucaagguuugucuaua

SEQ ID NO: 2581064 - RNA, 19 nt, Artificial Sequence
  Description of Artificial Sequence: Synthetic oligonucleotide
cuauaguuggagaccaaaa

SEQ ID NO: 2581065 - RNA, 19 nt, Artificial Sequence
  Description of Artificial Sequence: Synthetic oligonucleotide
uguagucaggagucuguaa

SEQ ID NO: 2581066 - RNA, 19 nt, Artificial Sequence
  Description of Artificial Sequence: Synthetic oligonucleotide
uccaaacucuagacauagc

SEQ ID NO: 2581067 - RNA, 19 nt, Artificial Sequence
  Description of Artificial Sequence: Synthetic oligonucleotide
agucgaguauuugcuauug

SEQ ID NO: 2581068 - RNA, 19 nt, Artificial Sequence
  Description of Artificial Sequence: Synthetic oligonucleotide
agauuaagucccacaccac

SEQ ID NO: 2581069 - RNA, 19 nt, Artificial Sequence
  Description of Artificial Sequence: Synthetic oligonucleotide
agcauauccauggcgcuug

SEQ ID NO: 2581070 - RNA, 19 nt, Artificial Sequence
  Description of Artificial Sequence: Synthetic oligonucleotide
guaccuguagucaggaguc

SEQ ID NO: 2581071 - RNA, 19 nt, Artificial Sequence
  Description of Artificial Sequence: Synthetic oligonucleotide
uauccauggcgcuugcaua

SEQ ID NO: 2581072 - RNA, 19 nt, Artificial Sequence
  Description of Artificial Sequence: Synthetic oligonucleotide
ucuccucuaugguaccugu

SEQ ID NO: 2581073 - RNA, 19 nt, Artificial Sequence
  Description of Artificial Sequence: Synthetic oligonucleotide
auccauggcgcuugcauau

SEQ ID NO: 2581074 - RNA, 19 nt, Artificial Sequence
  Description of Artificial Sequence: Synthetic oligonucleotide
cugugaauuuucgugcaac

SEQ ID NO: 2581075 - RNA, 19 nt, Artificial Sequence
  Description of Artificial Sequence: Synthetic oligonucleotide
cauggcgcuugcauaugcc

SEQ ID NO: 2581076 - RNA, 19 nt, Artificial Sequence
  Description of Artificial Sequence: Synthetic oligonucleotide
cagucgagcaggucauggg

SEQ ID NO: 2581077 - RNA, 19 nt, Artificial Sequence
  Description of Artificial Sequence: Synthetic oligonucleotide
ccuuugguagaucuucucc

SEQ ID NO: 2581078 - RNA, 19 nt, Artificial Sequence
  Description of Artificial Sequence: Synthetic oligonucleotide
gguuugucuauaguuggag

SEQ ID NO: 2581079 - RNA, 19 nt, Artificial Sequence
  Description of Artificial Sequence: Synthetic oligonucleotide
gcauagauucauuucuuca

SEQ ID NO: 2581080 - RNA, 19 nt, Artificial Sequence
  Description of Artificial Sequence: Synthetic oligonucleotide
uaggguacagagucagcaa

SEQ ID NO: 2581081 - RNA, 19 nt, Artificial Sequence
  Description of Artificial Sequence: Synthetic oligonucleotide
cauagauucauuucuucau

SEQ ID NO: 2581082 - RNA, 19 nt, Artificial Sequence
  Description of Artificial Sequence: Synthetic oligonucleotide
agacauagccuggauguca

SEQ ID NO: 2581083 - RNA, 19 nt, Artificial Sequence
  Description of Artificial Sequence: Synthetic oligonucleotide
acgaaguucgugaauugcu

SEQ ID NO: 2581084 - RNA, 19 nt, Artificial Sequence
  Description of Artificial Sequence: Synthetic oligonucleotide
auggcgcuugcauaugccu

SEQ ID NO: 2581085 - RNA, 19 nt, Artificial Sequence
  Description of Artificial Sequence: Synthetic oligonucleotide
caguaggguacagagucag

SEQ ID NO: 2581086 - RNA, 19 nt, Artificial Sequence
  Description of Artificial Sequence: Synthetic oligonucleotide
guagcuggauuccagucaa

SEQ ID NO: 2581087 - RNA, 19 nt, Artificial Sequence
  Description of Artificial Sequence: Synthetic oligonucleotide
ggugggacgaaguucguga

SEQ ID NO: 2581088 - RNA, 19 nt, Artificial Sequence
  Description of Artificial Sequence: Synthetic oligonucleotide
cuggugucuggccaucaag

SEQ ID NO: 2581089 - RNA, 19 nt, Artificial Sequence
  Description of Artificial Sequence: Synthetic oligonucleotide
uccacuauuugcugccuuu

SEQ ID NO: 2581090 - RNA, 19 nt, Artificial Sequence
  Description of Artificial Sequence: Synthetic oligonucleotide
uacagucgaguauuugcua

SEQ ID NO: 2581091 - RNA, 19 nt, Artificial Sequence
  Description of Artificial Sequence: Synthetic oligonucleotide
cuggaugucaguagcugga

SEQ ID NO: 2581092 - RNA, 19 nt, Artificial Sequence
  Description of Artificial Sequence: Synthetic oligonucleotide
caaacucuagacauagccu

SEQ ID NO: 2581093 - RNA, 19 nt, Artificial Sequence
  Description of Artificial Sequence: Synthetic oligonucleotide
ggugaggucuacaacugcc

SEQ ID NO: 2581094 - RNA, 19 nt, Artificial Sequence
  Description of Artificial Sequence: Synthetic oligonucleotide
uuucggugggacgaaguuc

SEQ ID NO: 2581095 - RNA, 19 nt, Artificial Sequence
  Description of Artificial Sequence: Synthetic oligonucleotide
aaaauacagucgaguauuu

SEQ ID NO: 2581096 - RNA, 19 nt, Artificial Sequence
  Description of Artificial Sequence: Synthetic oligonucleotide
gcauaugccuucuaaaaua

SEQ ID NO: 2581097 - RNA, 19 nt, Artificial Sequence
  Description of Artificial Sequence: Synthetic oligonucleotide
aagccuuugcauagauuca

SEQ ID NO: 2581098 - RNA, 19 nt, Artificial Sequence
  Description of Artificial Sequence: Synthetic oligonucleotide
aauugcugccaggagcuuu

SEQ ID NO: 2581099 - RNA, 19 nt, Artificial Sequence
  Description of Artificial Sequence: Synthetic oligonucleotide
gucagcaagccuuugcaua

SEQ ID NO: 2581100 - RNA, 19 nt, Artificial Sequence
  Description of Artificial Sequence: Synthetic oligonucleotide
aguucgugaauugcugcca

SEQ ID NO: 2581101 - RNA, 19 nt, Artificial Sequence
  Description of Artificial Sequence: Synthetic oligonucleotide
aauuuucgugcaacgugaa

SEQ ID NO: 2581102 - RNA, 19 nt, Artificial Sequence
  Description of Artificial Sequence: Synthetic oligonucleotide
augacuuggugaggucuac

SEQ ID NO: 2581103 - RNA, 19 nt, Artificial Sequence
  Description of Artificial Sequence: Synthetic oligonucleotide
gaaaggccuugcuuacuga

SEQ ID NO: 2581104 - RNA, 19 nt, Artificial Sequence
  Description of Artificial Sequence: Synthetic oligonucleotide
ugaucugccuuugguagau

SEQ ID NO: 2581105 - RNA, 19 nt, Artificial Sequence
  Description of Artificial Sequence: Synthetic oligonucleotide
cugccuuugguagaucuuc

SEQ ID NO: 2581106 - RNA, 19 nt, Artificial Sequence
  Description of Artificial Sequence: Synthetic oligonucleotide
aacugccccggaaaggccu

SEQ ID NO: 2581107 - RNA, 19 nt, Artificial Sequence
  Description of Artificial Sequence: Synthetic oligonucleotide
gguaccuguagucaggagu

SEQ ID NO: 2581108 - RNA, 19 nt, Artificial Sequence
  Description of Artificial Sequence: Synthetic oligonucleotide
uucaucacuugagcuaaau

SEQ ID NO: 2581109 - RNA, 19 nt, Artificial Sequence
  Description of Artificial Sequence: Synthetic oligonucleotide
ucugccuuugguagaucuu

SEQ ID NO: 2581110 - RNA, 19 nt, Artificial Sequence
  Description of Artificial Sequence: Synthetic oligonucleotide
acugugaauuuucgugcaa

SEQ ID NO: 2581111 - RNA, 19 nt, Artificial Sequence
  Description of Artificial Sequence: Synthetic oligonucleotide
aggugagauccuccaauaa

SEQ ID NO: 2581112 - RNA, 19 nt, Artificial Sequence
  Description of Artificial Sequence: Synthetic oligonucleotide
ccagucaauaucauagaga

SEQ ID NO: 2581113 - RNA, 19 nt, Artificial Sequence
  Description of Artificial Sequence: Synthetic oligonucleotide
cauaugccuucuaaaauau

SEQ ID NO: 2581114 - RNA, 19 nt, Artificial Sequence
  Description of Artificial Sequence: Synthetic oligonucleotide
gcuaaauucuuuacucuuc

SEQ ID NO: 2581115 - RNA, 19 nt, Artificial Sequence
  Description of Artificial Sequence: Synthetic oligonucleotide
guaaccaguaggguacaga

SEQ ID NO: 2581116 - RNA, 19 nt, Artificial Sequence
  Description of Artificial Sequence: Synthetic oligonucleotide
uucgugcaacgugaacaag

SEQ ID NO: 2581117 - RNA, 19 nt, Artificial Sequence
  Description of Artificial Sequence: Synthetic oligonucleotide
ggagcuuuaccaacacuug

SEQ ID NO: 2581118 - RNA, 19 nt, Artificial Sequence
  Description of Artificial Sequence: Synthetic oligonucleotide
ugggacgaaguucgugaau

SEQ ID NO: 2581119 - RNA, 19 nt, Artificial Sequence
  Description of Artificial Sequence: Synthetic oligonucleotide
aagcauauccauggcgcuu

SEQ ID NO: 2581120 - RNA, 19 nt, Artificial Sequence
  Description of Artificial Sequence: Synthetic oligonucleotide
uggagaccaaaaccacuuu

SEQ ID NO: 2581121 - RNA, 19 nt, Artificial Sequence
  Description of Artificial Sequence: Synthetic oligonucleotide
agccuuugcauagauucau

SEQ ID NO: 2581122 - RNA, 19 nt, Artificial Sequence
  Description of Artificial Sequence: Synthetic oligonucleotide
cuggagagggucguaacca

SEQ ID NO: 2581123 - RNA, 19 nt, Artificial Sequence
  Description of Artificial Sequence: Synthetic oligonucleotide
caagucuggcacaagcaua

SEQ ID NO: 2581124 - RNA, 19 nt, Artificial Sequence
  Description of Artificial Sequence: Synthetic oligonucleotide
uggcgcuugcauaugccuu

SEQ ID NO: 2581125 - RNA, 19 nt, Artificial Sequence
  Description of Artificial Sequence: Synthetic oligonucleotide
ggucguaaccaguagggua

SEQ ID NO: 2581126 - RNA, 19 nt, Artificial Sequence
  Description of Artificial Sequence: Synthetic oligonucleotide
cuguaaauaugcacagggu

SEQ ID NO: 2581127 - RNA, 19 nt, Artificial Sequence
  Description of Artificial Sequence: Synthetic oligonucleotide
uuucaucacuugagcuaaa

SEQ ID NO: 2581128 - RNA, 19 nt, Artificial Sequence
  Description of Artificial Sequence: Synthetic oligonucleotide
ugacuuggugaggucuaca

SEQ ID NO: 2581129 - RNA, 19 nt, Artificial Sequence
  Description of Artificial Sequence: Synthetic oligonucleotide
cuccacugaaaacuggaua

SEQ ID NO: 2581130 - RNA, 19 nt, Artificial Sequence
  Description of Artificial Sequence: Synthetic oligonucleotide
augguaccuguagucagga

SEQ ID NO: 2581131 - RNA, 19 nt, Artificial Sequence
  Description of Artificial Sequence: Synthetic oligonucleotide
ggacgaaguucgugaauug

SEQ ID NO: 2581132 - RNA, 19 nt, Artificial Sequence
  Description of Artificial Sequence: Synthetic oligonucleotide
gaugacuuggugaggucua

SEQ ID NO: 2581133 - RNA, 19 nt, Artificial Sequence
  Description of Artificial Sequence: Synthetic oligonucleotide
aggagucuguaaauaugca

SEQ ID NO: 2581134 - RNA, 19 nt, Artificial Sequence
  Description of Artificial Sequence: Synthetic oligonucleotide
cugugcacucacagucgag

SEQ ID NO: 2581135 - RNA, 19 nt, Artificial Sequence
  Description of Artificial Sequence: Synthetic oligonucleotide
gucgaguauuugcuauuga

SEQ ID NO: 2581136 - RNA, 19 nt, Artificial Sequence
  Description of Artificial Sequence: Synthetic oligonucleotide
gagagggucguaaccagua

SEQ ID NO: 2581137 - RNA, 19 nt, Artificial Sequence
  Description of Artificial Sequence: Synthetic oligonucleotide
uagacauagccuggauguc

SEQ ID NO: 2581138 - RNA, 19 nt, Artificial Sequence
  Description of Artificial Sequence: Synthetic oligonucleotide
agcuggauuccagucaaua

SEQ ID NO: 2581139 - RNA, 19 nt, Artificial Sequence
  Description of Artificial Sequence: Synthetic oligonucleotide
cuuuaccaacacuuguagu

SEQ ID NO: 2581140 - RNA, 19 nt, Artificial Sequence
  Description of Artificial Sequence: Synthetic oligonucleotide
ggugucuggccaucaaguc

SEQ ID NO: 2581141 - RNA, 19 nt, Artificial Sequence
  Description of Artificial Sequence: Synthetic oligonucleotide
gaacuggagagggucguaa

SEQ ID NO: 2581142 - RNA, 19 nt, Artificial Sequence
  Description of Artificial Sequence: Synthetic oligonucleotide
cacuauuugcugccuuuga

SEQ ID NO: 2581143 - RNA, 19 nt, Artificial Sequence
  Description of Artificial Sequence: Synthetic oligonucleotide
ggguacagagucagcaagc

SEQ ID NO: 2581144 - RNA, 19 nt, Artificial Sequence
  Description of Artificial Sequence: Synthetic oligonucleotide
cgaaguucgugaauugcug

SEQ ID NO: 2581145 - RNA, 19 nt, Artificial Sequence
  Description of Artificial Sequence: Synthetic oligonucleotide
uggaugucaguagcuggau

SEQ ID NO: 2581146 - RNA, 19 nt, Artificial Sequence
  Description of Artificial Sequence: Synthetic oligonucleotide
caggguguuucugaccauc

SEQ ID NO: 2581147 - RNA, 19 nt, Artificial Sequence
  Description of Artificial Sequence: Synthetic oligonucleotide
gcuugcauaugccuucuaa

SEQ ID NO: 2581148 - RNA, 19 nt, Artificial Sequence
  Description of Artificial Sequence: Synthetic oligonucleotide
gccuuugagagacuggugu

SEQ ID NO: 2581149 - RNA, 19 nt, Artificial Sequence
  Description of Artificial Sequence: Synthetic oligonucleotide
acuggugucuggccaucaa

SEQ ID NO: 2581150 - RNA, 19 nt, Artificial Sequence
  Description of Artificial Sequence: Synthetic oligonucleotide
cauagccuggaugucagua

SEQ ID NO: 2581151 - RNA, 19 nt, Artificial Sequence
  Description of Artificial Sequence: Synthetic oligonucleotide
ccuuugagagacugguguc

SEQ ID NO: 2581152 - RNA, 19 nt, Artificial Sequence
  Description of Artificial Sequence: Synthetic oligonucleotide
gagauccuccaauaagauu

SEQ ID NO: 2581153 - RNA, 19 nt, Artificial Sequence
  Description of Artificial Sequence: Synthetic oligonucleotide
gugaauuuucgugcaacgu

SEQ ID NO: 2581154 - RNA, 19 nt, Artificial Sequence
  Description of Artificial Sequence: Synthetic oligonucleotide
ucguaaccaguaggguaca

SEQ ID NO: 2581155 - RNA, 19 nt, Artificial Sequence
  Description of Artificial Sequence: Synthetic oligonucleotide
guuggagaccaaaaccacu

SEQ ID NO: 2581156 - RNA, 19 nt, Artificial Sequence
  Description of Artificial Sequence: Synthetic oligonucleotide
uccauggcgcuugcauaug

SEQ ID NO: 2581157 - RNA, 19 nt, Artificial Sequence
  Description of Artificial Sequence: Synthetic oligonucleotide
cacugaaaacuggauaugu

SEQ ID NO: 2581158 - RNA, 19 nt, Artificial Sequence
  Description of Artificial Sequence: Synthetic oligonucleotide
auccuccaauaagauuaag

SEQ ID NO: 2581159 - RNA, 19 nt, Artificial Sequence
  Description of Artificial Sequence: Synthetic oligonucleotide
aggguguuucugaccaucu

SEQ ID NO: 2581160 - RNA, 19 nt, Artificial Sequence
  Description of Artificial Sequence: Synthetic oligonucleotide
gucgagcaggucauggguc

SEQ ID NO: 2581161 - RNA, 19 nt, Artificial Sequence
  Description of Artificial Sequence: Synthetic oligonucleotide
auugcugccaggagcuuua

SEQ ID NO: 2581162 - RNA, 19 nt, Artificial Sequence
  Description of Artificial Sequence: Synthetic oligonucleotide
gagaauuaggugagauccu

SEQ ID NO: 2581163 - RNA, 19 nt, Artificial Sequence
  Description of Artificial Sequence: Synthetic oligonucleotide
auccacuauuugcugccuu

SEQ ID NO: 2581164 - RNA, 19 nt, Artificial Sequence
  Description of Artificial Sequence: Synthetic oligonucleotide
agucaauaucauagagaau

SEQ ID NO: 2581165 - RNA, 19 nt, Artificial Sequence
  Description of Artificial Sequence: Synthetic oligonucleotide
agucuggcacaagcauauc

SEQ ID NO: 2581166 - RNA, 19 nt, Artificial Sequence
  Description of Artificial Sequence: Synthetic oligonucleotide
cauagagaauuaggugaga

SEQ ID NO: 2581167 - RNA, 19 nt, Artificial Sequence
  Description of Artificial Sequence: Synthetic oligonucleotide
uaccuguagucaggagucu

SEQ ID NO: 2581168 - RNA, 19 nt, Artificial Sequence
  Description of Artificial Sequence: Synthetic oligonucleotide
cgugcaacgugaacaaguc

SEQ ID NO: 2581169 - RNA, 19 nt, Artificial Sequence
  Description of Artificial Sequence: Synthetic oligonucleotide
cgaguauuugcuauugaaa

SEQ ID NO: 2581170 - RNA, 19 nt, Artificial Sequence
  Description of Artificial Sequence: Synthetic oligonucleotide
caagcauauccauggcgcu

SEQ ID NO: 2581171 - RNA, 19 nt, Artificial Sequence
  Description of Artificial Sequence: Synthetic oligonucleotide
gugggacgaaguucgugaa

SEQ ID NO: 2581172 - RNA, 19 nt, Artificial Sequence
  Description of Artificial Sequence: Synthetic oligonucleotide
ccaauaagauuaaguccca

SEQ ID NO: 2581173 - RNA, 19 nt, Artificial Sequence
  Description of Artificial Sequence: Synthetic oligonucleotide
auaugccuucuaaaauauu

SEQ ID NO: 2581174 - RNA, 19 nt, Artificial Sequence
  Description of Artificial Sequence: Synthetic oligonucleotide
ccauggcgcuugcauaugc

SEQ ID NO: 2581175 - RNA, 19 nt, Artificial Sequence
  Description of Artificial Sequence: Synthetic oligonucleotide
gagaacuggagagggucgu

SEQ ID NO: 2581176 - RNA, 19 nt, Artificial Sequence
  Description of Artificial Sequence: Synthetic oligonucleotide
ucggugggacgaaguucgu

SEQ ID NO: 2581177 - RNA, 19 nt, Artificial Sequence
  Description of Artificial Sequence: Synthetic oligonucleotide
cccggaaaggccuugcuua

SEQ ID NO: 2581178 - RNA, 19 nt, Artificial Sequence
  Description of Artificial Sequence: Synthetic oligonucleotide
cgugaauugcugccaggag

SEQ ID NO: 2581179 - RNA, 19 nt, Artificial Sequence
  Description of Artificial Sequence: Synthetic oligonucleotide
ccggaaaggccuugcuuac

SEQ ID NO: 2581180 - RNA, 19 nt, Artificial Sequence
  Description of Artificial Sequence: Synthetic oligonucleotide
ugccccggaaaggccuugc

SEQ ID NO: 2581181 - RNA, 19 nt, Artificial Sequence
  Description of Artificial Sequence: Synthetic oligonucleotide
gcuuacugaucugccuuug

SEQ ID NO: 2581182 - RNA, 19 nt, Artificial Sequence
  Description of Artificial Sequence: Synthetic oligonucleotide
ggagaccaaaaccacuuuu

SEQ ID NO: 2581183 - RNA, 19 nt, Artificial Sequence
  Description of Artificial Sequence: Synthetic oligonucleotide
ggguguuucugaccaucuc

SEQ ID NO: 2581184 - RNA, 19 nt, Artificial Sequence
  Description of Artificial Sequence: Synthetic oligonucleotide
gugcaacgugaacaagucu

SEQ ID NO: 2581185 - RNA, 19 nt, Artificial Sequence
  Description of Artificial Sequence: Synthetic oligonucleotide
agaacuggagagggucgua

SEQ ID NO: 2581186 - RNA, 19 nt, Artificial Sequence
  Description of Artificial Sequence: Synthetic oligonucleotide
ccagacucauucucagaga

SEQ ID NO: 2581187 - RNA, 19 nt, Artificial Sequence
  Description of Artificial Sequence: Synthetic oligonucleotide
gguagaucuucuccucuau

SEQ ID NO: 2581188 - RNA, 19 nt, Artificial Sequence
  Description of Artificial Sequence: Synthetic oligonucleotide
gaucugccuuugguagauc

SEQ ID NO: 2581189 - RNA, 19 nt, Artificial Sequence
  Description of Artificial Sequence: Synthetic oligonucleotide
caacgugaacaagucuuua

SEQ ID NO: 2581190 - RNA, 19 nt, Artificial Sequence
  Description of Artificial Sequence: Synthetic oligonucleotide
gcauauccauggcgcuugc

SEQ ID NO: 2581191 - RNA, 19 nt, Artificial Sequence
  Description of Artificial Sequence: Synthetic oligonucleotide
gggacgaaguucgugaauu

SEQ ID NO: 2581192 - RNA, 19 nt, Artificial Sequence
  Description of Artificial Sequence: Synthetic oligonucleotide
cauauccauggcgcuugca

SEQ ID NO: 2581193 - RNA, 19 nt, Artificial Sequence
  Description of Artificial Sequence: Synthetic oligonucleotide
cacagucgagcaggucaug

SEQ ID NO: 2581194 - RNA, 19 nt, Artificial Sequence
  Description of Artificial Sequence: Synthetic oligonucleotide
ccaguaggguacagaguca

SEQ ID NO: 2581195 - RNA, 19 nt, Artificial Sequence
  Description of Artificial Sequence: Synthetic oligonucleotide
ccuuugcauagauucauuu

SEQ ID NO: 2581196 - RNA, 19 nt, Artificial Sequence
  Description of Artificial Sequence: Synthetic oligonucleotide
cagucgaguauuugcuauu

SEQ ID NO: 2581197 - RNA, 19 nt, Artificial Sequence
  Description of Artificial Sequence: Synthetic oligonucleotide
cucuagacauagccuggau

SEQ ID NO: 2581198 - RNA, 19 nt, Artificial Sequence
  Description of Artificial Sequence: Synthetic oligonucleotide
cagcaagccuuugcauaga

SEQ ID NO: 2581199 - RNA, 19 nt, Artificial Sequence
  Description of Artificial Sequence: Synthetic oligonucleotide
cacucacagucgagcaggu

SEQ ID NO: 2581200 - RNA, 19 nt, Artificial Sequence
  Description of Artificial Sequence: Synthetic oligonucleotide
gcaggucaugggucacaca

SEQ ID NO: 2581201 - RNA, 19 nt, Artificial Sequence
  Description of Artificial Sequence: Synthetic oligonucleotide
gucaugggucacacacugu

SEQ ID NO: 2581202 - RNA, 19 nt, Artificial Sequence
  Description of Artificial Sequence: Synthetic oligonucleotide
gcaacgugaacaagucuuu

SEQ ID NO: 2581203 - RNA, 19 nt, Artificial Sequence
  Description of Artificial Sequence: Synthetic oligonucleotide
cguaaccaguaggguacag

SEQ ID NO: 2581204 - RNA, 19 nt, Artificial Sequence
  Description of Artificial Sequence: Synthetic oligonucleotide
ggucuacaacugccccgga

SEQ ID NO: 2581205 - RNA, 19 nt, Artificial Sequence
  Description of Artificial Sequence: Synthetic oligonucleotide
gggucguaaccaguagggu

SEQ ID NO: 2581206 - RNA, 19 nt, Artificial Sequence
  Description of Artificial Sequence: Synthetic oligonucleotide
ccacaccaccagcuuuuga

SEQ ID NO: 2581207 - RNA, 19 nt, Artificial Sequence
  Description of Artificial Sequence: Synthetic oligonucleotide
cggugggacgaaguucgug

SEQ ID NO: 2581208 - RNA, 19 nt, Artificial Sequence
  Description of Artificial Sequence: Synthetic oligonucleotide
gcaagccuuugcauagauu

SEQ ID NO: 2581209 - RNA, 19 nt, Artificial Sequence
  Description of Artificial Sequence: Synthetic oligonucleotide
gccuuugcauagauucauu

SEQ ID NO: 2581210 - RNA, 19 nt, Artificial Sequence
  Description of Artificial Sequence: Synthetic oligonucleotide
ccaccagcuuuugaaacuu

SEQ ID NO: 2581211 - RNA, 19 nt, Artificial Sequence
  Description of Artificial Sequence: Synthetic oligonucleotide
gccccggaaaggccuugcu

SEQ ID NO: 2581212 - RNA, 19 nt, Artificial Sequence
  Description of Artificial Sequence: Synthetic oligonucleotide
gcgcuugcauaugccuucu

SEQ ID NO: 2581213 - RNA, 19 nt, Artificial Sequence
  Description of Artificial Sequence: Synthetic oligonucleotide
ccccggaaaggccuugcuu

SEQ ID NO: 2581214 - RNA, 19 nt, Artificial Sequence
  Description of Artificial Sequence: Synthetic oligonucleotide
aaaaguaugagcuuggagc

SEQ ID NO: 2581215 - RNA, 19 nt, Artificial Sequence
  Description of Artificial Sequence: Synthetic oligonucleotide
aaaguaugagcuuggagcg

SEQ ID NO: 2581216 - RNA, 19 nt, Artificial Sequence
  Description of Artificial Sequence: Synthetic oligonucleotide
uuucuuauggauaccagcc

SEQ ID NO: 2581217 - RNA, 19 nt, Artificial Sequence
  Description of Artificial Sequence: Synthetic oligonucleotide
uuuaugcaaaguuuuauug

SEQ ID NO: 2581218 - RNA, 19 nt, Artificial Sequence
  Description of Artificial Sequence: Synthetic oligonucleotide
uaugcaaaguuuuauugca

SEQ ID NO: 2581219 - RNA, 19 nt, Artificial Sequence
  Description of Artificial Sequence: Synthetic oligonucleotide
auuuguuucgucuccuugg

SEQ ID NO: 2581220 - RNA, 19 nt, Artificial Sequence
  Description of Artificial Sequence: Synthetic oligonucleotide
gauucaguggauuuguuuc

SEQ ID NO: 2581221 - RNA, 19 nt, Artificial Sequence
  Description of Artificial Sequence: Synthetic oligonucleotide
gauaacucuggcuuucucc

SEQ ID NO: 2581222 - RNA, 19 nt, Artificial Sequence
  Description of Artificial Sequence: Synthetic oligonucleotide
aggaucaugccauuccggc

SEQ ID NO: 2581223 - RNA, 19 nt, Artificial Sequence
  Description of Artificial Sequence: Synthetic oligonucleotide
uuuguuucgucuccuuggg

SEQ ID NO: 2581224 - RNA, 19 nt, Artificial Sequence
  Description of Artificial Sequence: Synthetic oligonucleotide
uuugcuuuaugcaaaguuu

SEQ ID NO: 2581225 - RNA, 19 nt, Artificial Sequence
  Description of Artificial Sequence: Synthetic oligonucleotide
cuuucuuauggauaccagc

SEQ ID NO: 2581226 - RNA, 19 nt, Artificial Sequence
  Description of Artificial Sequence: Synthetic oligonucleotide
aagagccgggcauuggccc

SEQ ID NO: 2581227 - RNA, 19 nt, Artificial Sequence
  Description of Artificial Sequence: Synthetic oligonucleotide
uuccguaugcgcaucacag

SEQ ID NO: 2581228 - RNA, 19 nt, Artificial Sequence
  Description of Artificial Sequence: Synthetic oligonucleotide
uagacauuccguaugcgca

SEQ ID NO: 2581229 - RNA, 19 nt, Artificial Sequence
  Description of Artificial Sequence: Synthetic oligonucleotide
ugaaccaaguguccacucg

SEQ ID NO: 2581230 - RNA, 19 nt, Artificial Sequence
  Description of Artificial Sequence: Synthetic oligonucleotide
acuggcaaaagccuugaag

SEQ ID NO: 2581231 - RNA, 19 nt, Artificial Sequence
  Description of Artificial Sequence: Synthetic oligonucleotide
auggauaccagccacccug

SEQ ID NO: 2581232 - RNA, 19 nt, Artificial Sequence
  Description of Artificial Sequence: Synthetic oligonucleotide
aguggauuuguuucgucuc

SEQ ID NO: 2581233 - RNA, 19 nt, Artificial Sequence
  Description of Artificial Sequence: Synthetic oligonucleotide
gaugguucgagccacuuuc

SEQ ID NO: 2581234 - RNA, 19 nt, Artificial Sequence
  Description of Artificial Sequence: Synthetic oligonucleotide
uggggcuucaggaucaugc

SEQ ID NO: 2581235 - RNA, 19 nt, Artificial Sequence
  Description of Artificial Sequence: Synthetic oligonucleotide
ugcacauuggccuguagug

SEQ ID NO: 2581236 - RNA, 19 nt, Artificial Sequence
  Description of Artificial Sequence: Synthetic oligonucleotide
ucuuauggauaccagccac

SEQ ID NO: 2581237 - RNA, 19 nt, Artificial Sequence
  Description of Artificial Sequence: Synthetic oligonucleotide
gaugccgaugguucgagcc

SEQ ID NO: 2581238 - RNA, 19 nt, Artificial Sequence
  Description of Artificial Sequence: Synthetic oligonucleotide
uacgaagacuggcaaaagc

SEQ ID NO: 2581239 - RNA, 19 nt, Artificial Sequence
  Description of Artificial Sequence: Synthetic oligonucleotide
ucggaugccaaagagccgg

SEQ ID NO: 2581240 - RNA, 19 nt, Artificial Sequence
  Description of Artificial Sequence: Synthetic oligonucleotide
acuccaauagcacaucacu

SEQ ID NO: 2581241 - RNA, 19 nt, Artificial Sequence
  Description of Artificial Sequence: Synthetic oligonucleotide
caauccuuguggaaguggg

SEQ ID NO: 2581242 - RNA, 19 nt, Artificial Sequence
  Description of Artificial Sequence: Synthetic oligonucleotide
ucgagccacuuucuuaugg

SEQ ID NO: 2581243 - RNA, 19 nt, Artificial Sequence
  Description of Artificial Sequence: Synthetic oligonucleotide
ugaagccccugccagcucg

SEQ ID NO: 2581244 - RNA, 19 nt, Artificial Sequence
  Description of Artificial Sequence: Synthetic oligonucleotide
guagacauuccguaugcgc

SEQ ID NO: 2581245 - RNA, 19 nt, Artificial Sequence
  Description of Artificial Sequence: Synthetic oligonucleotide
aaagagccgggcauuggcc

SEQ ID NO: 2581246 - RNA, 19 nt, Artificial Sequence
  Description of Artificial Sequence: Synthetic oligonucleotide
uguuucgucuccuuggguc

SEQ ID NO: 2581247 - RNA, 19 nt, Artificial Sequence
  Description of Artificial Sequence: Synthetic oligonucleotide
gauuuguuucgucuccuug

SEQ ID NO: 2581248 - RNA, 19 nt, Artificial Sequence
  Description of Artificial Sequence: Synthetic oligonucleotide
ucuuccaggcugaagcccc

SEQ ID NO: 2581249 - RNA, 19 nt, Artificial Sequence
  Description of Artificial Sequence: Synthetic oligonucleotide
aacugucucccuucuuggg

SEQ ID NO: 2581250 - RNA, 19 nt, Artificial Sequence
  Description of Artificial Sequence: Synthetic oligonucleotide
guaugcgcaucacaggucc

SEQ ID NO: 2581251 - RNA, 19 nt, Artificial Sequence
  Description of Artificial Sequence: Synthetic oligonucleotide
uuuuguagacauuccguau

SEQ ID NO: 2581252 - RNA, 19 nt, Artificial Sequence
  Description of Artificial Sequence: Synthetic oligonucleotide
cuuccuggggaaaaguaug

SEQ ID NO: 2581253 - RNA, 19 nt, Artificial Sequence
  Description of Artificial Sequence: Synthetic oligonucleotide
uuauggauaccagccaccc

SEQ ID NO: 2581254 - RNA, 19 nt, Artificial Sequence
  Description of Artificial Sequence: Synthetic oligonucleotide
uugcuuuaugcaaaguuuu

SEQ ID NO: 2581255 - RNA, 19 nt, Artificial Sequence
  Description of Artificial Sequence: Synthetic oligonucleotide
ucacuaucggccugauggg

SEQ ID NO: 2581256 - RNA, 19 nt, Artificial Sequence
  Description of Artificial Sequence: Synthetic oligonucleotide
uuuugcucggaugccaaag

SEQ ID NO: 2581257 - RNA, 19 nt, Artificial Sequence
  Description of Artificial Sequence: Synthetic oligonucleotide
ugguaucucacuguagggc

SEQ ID NO: 2581258 - RNA, 19 nt, Artificial Sequence
  Description of Artificial Sequence: Synthetic oligonucleotide
guuuuauugcaguacucca

SEQ ID NO: 2581259 - RNA, 19 nt, Artificial Sequence
  Description of Artificial Sequence: Synthetic oligonucleotide
ugcucggaugccaaagagc

SEQ ID NO: 2581260 - RNA, 19 nt, Artificial Sequence
  Description of Artificial Sequence: Synthetic oligonucleotide
aaccaaguguccacucgcc

SEQ ID NO: 2581261 - RNA, 19 nt, Artificial Sequence
  Description of Artificial Sequence: Synthetic oligonucleotide
uuugcucggaugccaaaga

SEQ ID NO: 2581262 - RNA, 19 nt, Artificial Sequence
  Description of Artificial Sequence: Synthetic oligonucleotide
uugcucggaugccaaagag

SEQ ID NO: 2581263 - RNA, 19 nt, Artificial Sequence
  Description of Artificial Sequence: Synthetic oligonucleotide
caguucuucagcagaacug

SEQ ID NO: 2581264 - RNA, 19 nt, Artificial Sequence
  Description of Artificial Sequence: Synthetic oligonucleotide
aguucuucagcagaacugu

SEQ ID NO: 2581265 - RNA, 19 nt, Artificial Sequence
  Description of Artificial Sequence: Synthetic oligonucleotide
acccugaguucuuccaggc

SEQ ID NO: 2581266 - RNA, 19 nt, Artificial Sequence
  Description of Artificial Sequence: Synthetic oligonucleotide
acaggagaacggccgagcg

SEQ ID NO: 2581267 - RNA, 19 nt, Artificial Sequence
  Description of Artificial Sequence: Synthetic oligonucleotide
agcgguacuccuucaggcg

SEQ ID NO: 2581268 - RNA, 19 nt, Artificial Sequence
  Description of Artificial Sequence: Synthetic oligonucleotide
uccguaugcgcaucacagg

SEQ ID NO: 2581269 - RNA, 19 nt, Artificial Sequence
  Description of Artificial Sequence: Synthetic oligonucleotide
augccauuccggcugggcg

SEQ ID NO: 2581270 - RNA, 19 nt, Artificial Sequence
  Description of Artificial Sequence: Synthetic oligonucleotide
gagcgguacuccuucaggc

SEQ ID NO: 2581271 - RNA, 19 nt, Artificial Sequence
  Description of Artificial Sequence: Synthetic oligonucleotide
ggagcagaaggcuuccugg

SEQ ID NO: 2581272 - RNA, 19 nt, Artificial Sequence
  Description of Artificial Sequence: Synthetic oligonucleotide
gaugggaccggacgcgggg

SEQ ID NO: 2581273 - RNA, 19 nt, Artificial Sequence
  Description of Artificial Sequence: Synthetic oligonucleotide
uguagggcaccucacuauc

SEQ ID NO: 2581274 - RNA, 19 nt, Artificial Sequence
  Description of Artificial Sequence: Synthetic oligonucleotide
gugguaucucacuguaggg

SEQ ID NO: 2581275 - RNA, 19 nt, Artificial Sequence
  Description of Artificial Sequence: Synthetic oligonucleotide
uacuccaauagcacaucac

SEQ ID NO: 2581276 - RNA, 19 nt, Artificial Sequence
  Description of Artificial Sequence: Synthetic oligonucleotide
cuggcaaaagccuugaagu

SEQ ID NO: 2581277 - RNA, 19 nt, Artificial Sequence
  Description of Artificial Sequence: Synthetic oligonucleotide
guuucgucuccuugggucc

SEQ ID NO: 2581278 - RNA, 19 nt, Artificial Sequence
  Description of Artificial Sequence: Synthetic oligonucleotide
agugauucaguggauuugu

SEQ ID NO: 2581279 - RNA, 19 nt, Artificial Sequence
  Description of Artificial Sequence: Synthetic oligonucleotide
uuccuggggaaaaguauga

SEQ ID NO: 2581280 - RNA, 19 nt, Artificial Sequence
  Description of Artificial Sequence: Synthetic oligonucleotide
aagacuggcaaaagccuug

SEQ ID NO: 2581281 - RNA, 19 nt, Artificial Sequence
  Description of Artificial Sequence: Synthetic oligonucleotide
uguagacauuccguaugcg

SEQ ID NO: 2581282 - RNA, 19 nt, Artificial Sequence
  Description of Artificial Sequence: Synthetic oligonucleotide
accaaguguccacucgccg

SEQ ID NO: 2581283 - RNA, 19 nt, Artificial Sequence
  Description of Artificial Sequence: Synthetic oligonucleotide
cuggggaaaaguaugagcu

SEQ ID NO: 2581284 - RNA, 19 nt, Artificial Sequence
  Description of Artificial Sequence: Synthetic oligonucleotide
gaaguggggcuucaggauc

SEQ ID NO: 2581285 - RNA, 19 nt, Artificial Sequence
  Description of Artificial Sequence: Synthetic oligonucleotide
gaugccaaagagccgggca

SEQ ID NO: 2581286 - RNA, 19 nt, Artificial Sequence
  Description of Artificial Sequence: Synthetic oligonucleotide
uggguggccaguuucaguu

SEQ ID NO: 2581287 - RNA, 19 nt, Artificial Sequence
  Description of Artificial Sequence: Synthetic oligonucleotide
guggaaguggggcuucagg

SEQ ID NO: 2581288 - RNA, 19 nt, Artificial Sequence
  Description of Artificial Sequence: Synthetic oligonucleotide
uagugauucaguggauuug

SEQ ID NO: 2581289 - RNA, 19 nt, Artificial Sequence
  Description of Artificial Sequence: Synthetic oligonucleotide
guggauuuguuucgucucc

SEQ ID NO: 2581290 - RNA, 19 nt, Artificial Sequence
  Description of Artificial Sequence: Synthetic oligonucleotide
gaugcggcgcgcuuucgcc

SEQ ID NO: 2581291 - RNA, 19 nt, Artificial Sequence
  Description of Artificial Sequence: Synthetic oligonucleotide
ugcuuuaugcaaaguuuua

SEQ ID NO: 2581292 - RNA, 19 nt, Artificial Sequence
  Description of Artificial Sequence: Synthetic oligonucleotide
gccacuuucuuauggauac

SEQ ID NO: 2581293 - RNA, 19 nt, Artificial Sequence
  Description of Artificial Sequence: Synthetic oligonucleotide
uuggccuguagugauucag

SEQ ID NO: 2581294 - RNA, 19 nt, Artificial Sequence
  Description of Artificial Sequence: Synthetic oligonucleotide
uccgguacaggagaacggc

SEQ ID NO: 2581295 - RNA, 19 nt, Artificial Sequence
  Description of Artificial Sequence: Synthetic oligonucleotide
acuaucggccugaugggac

SEQ ID NO: 2581296 - RNA, 19 nt, Artificial Sequence
  Description of Artificial Sequence: Synthetic oligonucleotide
caggaucaugccauuccgg

SEQ ID NO: 2581297 - RNA, 19 nt, Artificial Sequence
  Description of Artificial Sequence: Synthetic oligonucleotide
aguacuccaauagcacauc

SEQ ID NO: 2581298 - RNA, 19 nt, Artificial Sequence
  Description of Artificial Sequence: Synthetic oligonucleotide
cuucaggcgcugcacauug

SEQ ID NO: 2581299 - RNA, 19 nt, Artificial Sequence
  Description of Artificial Sequence: Synthetic oligonucleotide
auuggcccgggccauacga

SEQ ID NO: 2581300 - RNA, 19 nt, Artificial Sequence
  Description of Artificial Sequence: Synthetic oligonucleotide
ugcgucugcggaucuugcg

SEQ ID NO: 2581301 - RNA, 19 nt, Artificial Sequence
  Description of Artificial Sequence: Synthetic oligonucleotide
aguguccacucgccgcugc

SEQ ID NO: 2581302 - RNA, 19 nt, Artificial Sequence
  Description of Artificial Sequence: Synthetic oligonucleotide
cuaucggccugaugggacc

SEQ ID NO: 2581303 - RNA, 19 nt, Artificial Sequence
  Description of Artificial Sequence: Synthetic oligonucleotide
gguaucucacuguagggca

SEQ ID NO: 2581304 - RNA, 19 nt, Artificial Sequence
  Description of Artificial Sequence: Synthetic oligonucleotide
auuccguaugcgcaucaca

SEQ ID NO: 2581305 - RNA, 19 nt, Artificial Sequence
  Description of Artificial Sequence: Synthetic oligonucleotide
uggagcgguacuccuucag

SEQ ID NO: 2581306 - RNA, 19 nt, Artificial Sequence
  Description of Artificial Sequence: Synthetic oligonucleotide
ggucccguuagcugggugg

SEQ ID NO: 2581307 - RNA, 19 nt, Artificial Sequence
  Description of Artificial Sequence: Synthetic oligonucleotide
cacccugaguucuuccagg

SEQ ID NO: 2581308 - RNA, 19 nt, Artificial Sequence
  Description of Artificial Sequence: Synthetic oligonucleotide
cuucugugauaacucuggc

SEQ ID NO: 2581309 - RNA, 19 nt, Artificial Sequence
  Description of Artificial Sequence: Synthetic oligonucleotide
gcucggaugccaaagagcc

SEQ ID NO: 2581310 - RNA, 19 nt, Artificial Sequence
  Description of Artificial Sequence: Synthetic oligonucleotide
aguaugagcuuggagcggu

SEQ ID NO: 2581311 - RNA, 19 nt, Artificial Sequence
  Description of Artificial Sequence: Synthetic oligonucleotide
uguagugauucaguggauu

SEQ ID NO: 2581312 - RNA, 19 nt, Artificial Sequence
  Description of Artificial Sequence: Synthetic oligonucleotide
aaggcuuccuggggaaaag

SEQ ID NO: 2581313 - RNA, 19 nt, Artificial Sequence
  Description of Artificial Sequence: Synthetic oligonucleotide
uggccuguagugauucagu

SEQ ID NO: 2581314 - RNA, 19 nt, Artificial Sequence
  Description of Artificial Sequence: Synthetic oligonucleotide
cuccgguacaggagaacgg

SEQ ID NO: 2581315 - RNA, 19 nt, Artificial Sequence
  Description of Artificial Sequence: Synthetic oligonucleotide
ugagcuuggagcgguacuc

SEQ ID NO: 2581316 - RNA, 19 nt, Artificial Sequence
  Description of Artificial Sequence: Synthetic oligonucleotide
uauggauaccagccacccu

SEQ ID NO: 2581317 - RNA, 19 nt, Artificial Sequence
  Description of Artificial Sequence: Synthetic oligonucleotide
cauacgaagacuggcaaaa

SEQ ID NO: 2581318 - RNA, 19 nt, Artificial Sequence
  Description of Artificial Sequence: Synthetic oligonucleotide
aucaugccauuccggcugg

SEQ ID NO: 2581319 - RNA, 19 nt, Artificial Sequence
  Description of Artificial Sequence: Synthetic oligonucleotide
agagccgggcauuggcccg

SEQ ID NO: 2581320 - RNA, 19 nt, Artificial Sequence
  Description of Artificial Sequence: Synthetic oligonucleotide
ccuguagugauucagugga

SEQ ID NO: 2581321 - RNA, 19 nt, Artificial Sequence
  Description of Artificial Sequence: Synthetic oligonucleotide
augcaaaguuuuauugcag

SEQ ID NO: 2581322 - RNA, 19 nt, Artificial Sequence
  Description of Artificial Sequence: Synthetic oligonucleotide
uggauaccagccacccuga

SEQ ID NO: 2581323 - RNA, 19 nt, Artificial Sequence
  Description of Artificial Sequence: Synthetic oligonucleotide
ccuggggaaaaguaugagc

SEQ ID NO: 2581324 - RNA, 19 nt, Artificial Sequence
  Description of Artificial Sequence: Synthetic oligonucleotide
agccacccugaguucuucc

SEQ ID NO: 2581325 - RNA, 19 nt, Artificial Sequence
  Description of Artificial Sequence: Synthetic oligonucleotide
uggcaaaagccuugaaguu

SEQ ID NO: 2581326 - RNA, 19 nt, Artificial Sequence
  Description of Artificial Sequence: Synthetic oligonucleotide
agacauuccguaugcgcau

SEQ ID NO: 2581327 - RNA, 19 nt, Artificial Sequence
  Description of Artificial Sequence: Synthetic oligonucleotide
ugcggaucuugcgugccgg

SEQ ID NO: 2581328 - RNA, 19 nt, Artificial Sequence
  Description of Artificial Sequence: Synthetic oligonucleotide
gccuguagugauucagugg

SEQ ID NO: 2581329 - RNA, 19 nt, Artificial Sequence
  Description of Artificial Sequence: Synthetic oligonucleotide
ggagcgguacuccuucagg

SEQ ID NO: 2581330 - RNA, 19 nt, Artificial Sequence
  Description of Artificial Sequence: Synthetic oligonucleotide
caguuucaguucuucagca

SEQ ID NO: 2581331 - RNA, 19 nt, Artificial Sequence
  Description of Artificial Sequence: Synthetic oligonucleotide
uucaguggauuuguuucgu

SEQ ID NO: 2581332 - RNA, 19 nt, Artificial Sequence
  Description of Artificial Sequence: Synthetic oligonucleotide
cuugcgugccggcugguug

SEQ ID NO: 2581333 - RNA, 19 nt, Artificial Sequence
  Description of Artificial Sequence: Synthetic oligonucleotide
uucaggcgcugcacauugg

SEQ ID NO: 2581334 - RNA, 19 nt, Artificial Sequence
  Description of Artificial Sequence: Synthetic oligonucleotide
uaugcgcaucacagguccc

SEQ ID NO: 2581335 - RNA, 19 nt, Artificial Sequence
  Description of Artificial Sequence: Synthetic oligonucleotide
uaucggccugaugggaccg

SEQ ID NO: 2581336 - RNA, 19 nt, Artificial Sequence
  Description of Artificial Sequence: Synthetic oligonucleotide
cucggaugccaaagagccg

SEQ ID NO: 2581337 - RNA, 19 nt, Artificial Sequence
  Description of Artificial Sequence: Synthetic oligonucleotide
guagggcaccucacuaucg

SEQ ID NO: 2581338 - RNA, 19 nt, Artificial Sequence
  Description of Artificial Sequence: Synthetic oligonucleotide
ucacuguagggcaccucac

SEQ ID NO: 2581339 - RNA, 19 nt, Artificial Sequence
  Description of Artificial Sequence: Synthetic oligonucleotide
augcgcaucacaggucccg

SEQ ID NO: 2581340 - RNA, 19 nt, Artificial Sequence
  Description of Artificial Sequence: Synthetic oligonucleotide
gggaaaaguaugagcuugg

SEQ ID NO: 2581341 - RNA, 19 nt, Artificial Sequence
  Description of Artificial Sequence: Synthetic oligonucleotide
gguugaaccaaguguccac

SEQ ID NO: 2581342 - RNA, 19 nt, Artificial Sequence
  Description of Artificial Sequence: Synthetic oligonucleotide
auacgaagacuggcaaaag

SEQ ID NO: 2581343 - RNA, 19 nt, Artificial Sequence
  Description of Artificial Sequence: Synthetic oligonucleotide
uggauuuguuucgucuccu

SEQ ID NO: 2581344 - RNA, 19 nt, Artificial Sequence
  Description of Artificial Sequence: Synthetic oligonucleotide
guacuccaauagcacauca

SEQ ID NO: 2581345 - RNA, 19 nt, Artificial Sequence
  Description of Artificial Sequence: Synthetic oligonucleotide
augccgaugguucgagcca

SEQ ID NO: 2581346 - RNA, 19 nt, Artificial Sequence
  Description of Artificial Sequence: Synthetic oligonucleotide
cuugcgucugcggaucuug

SEQ ID NO: 2581347 - RNA, 19 nt, Artificial Sequence
  Description of Artificial Sequence: Synthetic oligonucleotide
uggcccgggccauacgaag

SEQ ID NO: 2581348 - RNA, 19 nt, Artificial Sequence
  Description of Artificial Sequence: Synthetic oligonucleotide
cauuggccuguagugauuc

SEQ ID NO: 2581349 - RNA, 19 nt, Artificial Sequence
  Description of Artificial Sequence: Synthetic oligonucleotide
ggccugaugggaccggacg

SEQ ID NO: 2581350 - RNA, 19 nt, Artificial Sequence
  Description of Artificial Sequence: Synthetic oligonucleotide
ccaaguguccacucgccgc

SEQ ID NO: 2581351 - RNA, 19 nt, Artificial Sequence
  Description of Artificial Sequence: Synthetic oligonucleotide
caucacaggucccguuagc

SEQ ID NO: 2581352 - RNA, 19 nt, Artificial Sequence
  Description of Artificial Sequence: Synthetic oligonucleotide
uugcgucugcggaucuugc

SEQ ID NO: 2581353 - RNA, 19 nt, Artificial Sequence
  Description of Artificial Sequence: Synthetic oligonucleotide
acauuccguaugcgcauca

SEQ ID NO: 2581354 - RNA, 19 nt, Artificial Sequence
  Description of Artificial Sequence: Synthetic oligonucleotide
ggcaaaagccuugaaguuc

SEQ ID NO: 2581355 - RNA, 19 nt, Artificial Sequence
  Description of Artificial Sequence: Synthetic oligonucleotide
ucugcggaucuugcgugcc

SEQ ID NO: 2581356 - RNA, 19 nt, Artificial Sequence
  Description of Artificial Sequence: Synthetic oligonucleotide
uguggaaguggggcuucag

SEQ ID NO: 2581357 - RNA, 19 nt, Artificial Sequence
  Description of Artificial Sequence: Synthetic oligonucleotide
ggccuguagugauucagug

SEQ ID NO: 2581358 - RNA, 19 nt, Artificial Sequence
  Description of Artificial Sequence: Synthetic oligonucleotide
augggaccggacgcggggc

SEQ ID NO: 2581359 - RNA, 19 nt, Artificial Sequence
  Description of Artificial Sequence: Synthetic oligonucleotide
agagaugccgaugguucga

SEQ ID NO: 2581360 - RNA, 19 nt, Artificial Sequence
  Description of Artificial Sequence: Synthetic oligonucleotide
agccccugccagcucggac

SEQ ID NO: 2581361 - RNA, 19 nt, Artificial Sequence
  Description of Artificial Sequence: Synthetic oligonucleotide
uuccggcugggcgccaugg

SEQ ID NO: 2581362 - RNA, 19 nt, Artificial Sequence
  Description of Artificial Sequence: Synthetic oligonucleotide
caugccauuccggcugggc

SEQ ID NO: 2581363 - RNA, 19 nt, Artificial Sequence
  Description of Artificial Sequence: Synthetic oligonucleotide
guacaggagaacggccgag

SEQ ID NO: 2581364 - RNA, 19 nt, Artificial Sequence
  Description of Artificial Sequence: Synthetic oligonucleotide
gucugcggaucuugcgugc

SEQ ID NO: 2581365 - RNA, 19 nt, Artificial Sequence
  Description of Artificial Sequence: Synthetic oligonucleotide
ccuccgguacaggagaacg

SEQ ID NO: 2581366 - RNA, 19 nt, Artificial Sequence
  Description of Artificial Sequence: Synthetic oligonucleotide
ugguucgagccacuuucuu

SEQ ID NO: 2581367 - RNA, 19 nt, Artificial Sequence
  Description of Artificial Sequence: Synthetic oligonucleotide
gcaucacaggucccguuag

SEQ ID NO: 2581368 - RNA, 19 nt, Artificial Sequence
  Description of Artificial Sequence: Synthetic oligonucleotide
ugcggcgcgcuuucgccug

SEQ ID NO: 2581369 - RNA, 19 nt, Artificial Sequence
  Description of Artificial Sequence: Synthetic oligonucleotide
guaucucacuguagggcac

SEQ ID NO: 2581370 - RNA, 19 nt, Artificial Sequence
  Description of Artificial Sequence: Synthetic oligonucleotide
caguggauuuguuucgucu

SEQ ID NO: 2581371 - RNA, 19 nt, Artificial Sequence
  Description of Artificial Sequence: Synthetic oligonucleotide
cugcggaucuugcgugccg

SEQ ID NO: 2581372 - RNA, 19 nt, Artificial Sequence
  Description of Artificial Sequence: Synthetic oligonucleotide
gcagaaggcuuccugggga

SEQ ID NO: 2581373 - RNA, 19 nt, Artificial Sequence
  Description of Artificial Sequence: Synthetic oligonucleotide
ugccgaugguucgagccac

SEQ ID NO: 2581374 - RNA, 19 nt, Artificial Sequence
  Description of Artificial Sequence: Synthetic oligonucleotide
agacuggcaaaagccuuga

SEQ ID NO: 2581375 - RNA, 19 nt, Artificial Sequence
  Description of Artificial Sequence: Synthetic oligonucleotide
ucggaccuuggugugguau

SEQ ID NO: 2581376 - RNA, 19 nt, Artificial Sequence
  Description of Artificial Sequence: Synthetic oligonucleotide
cgguacaggagaacggccg

SEQ ID NO: 2581377 - RNA, 19 nt, Artificial Sequence
  Description of Artificial Sequence: Synthetic oligonucleotide
uuggagcgguacuccuuca

SEQ ID NO: 2581378 - RNA, 19 nt, Artificial Sequence
  Description of Artificial Sequence: Synthetic oligonucleotide
uuggcccgggccauacgaa

SEQ ID NO: 2581379 - RNA, 19 nt, Artificial Sequence
  Description of Artificial Sequence: Synthetic oligonucleotide
ucucuucuucugugauaac

SEQ ID NO: 2581380 - RNA, 19 nt, Artificial Sequence
  Description of Artificial Sequence: Synthetic oligonucleotide
ggugugguaucucacugua

SEQ ID NO: 2581381 - RNA, 19 nt, Artificial Sequence
  Description of Artificial Sequence: Synthetic oligonucleotide
gugugguaucucacuguag

SEQ ID NO: 2581382 - RNA, 19 nt, Artificial Sequence
  Description of Artificial Sequence: Synthetic oligonucleotide
gaagccccugccagcucgg

SEQ ID NO: 2581383 - RNA, 19 nt, Artificial Sequence
  Description of Artificial Sequence: Synthetic oligonucleotide
agcucggaccuuggugugg

SEQ ID NO: 2581384 - RNA, 19 nt, Artificial Sequence
  Description of Artificial Sequence: Synthetic oligonucleotide
gccagcucggaccuuggug

SEQ ID NO: 2581385 - RNA, 19 nt, Artificial Sequence
  Description of Artificial Sequence: Synthetic oligonucleotide
ucccuucuugggagcagaa

SEQ ID NO: 2581386 - RNA, 19 nt, Artificial Sequence
  Description of Artificial Sequence: Synthetic oligonucleotide
gccugaugggaccggacgc

SEQ ID NO: 2581387 - RNA, 19 nt, Artificial Sequence
  Description of Artificial Sequence: Synthetic oligonucleotide
gguacaggagaacggccga

SEQ ID NO: 2581388 - RNA, 19 nt, Artificial Sequence
  Description of Artificial Sequence: Synthetic oligonucleotide
gacauuccguaugcgcauc

SEQ ID NO: 2581389 - RNA, 19 nt, Artificial Sequence
  Description of Artificial Sequence: Synthetic oligonucleotide
gguucgagccacuuucuua

SEQ ID NO: 2581390 - RNA, 19 nt, Artificial Sequence
  Description of Artificial Sequence: Synthetic oligonucleotide
cauuccguaugcgcaucac

SEQ ID NO: 2581391 - RNA, 19 nt, Artificial Sequence
  Description of Artificial Sequence: Synthetic oligonucleotide
ccaauccuuguggaagugg

SEQ ID NO: 2581392 - RNA, 19 nt, Artificial Sequence
  Description of Artificial Sequence: Synthetic oligonucleotide
gucccguuagcuggguggc

SEQ ID NO: 2581393 - RNA, 19 nt, Artificial Sequence
  Description of Artificial Sequence: Synthetic oligonucleotide
guugaaccaaguguccacu

SEQ ID NO: 2581394 - RNA, 19 nt, Artificial Sequence
  Description of Artificial Sequence: Synthetic oligonucleotide
cuuguggaaguggggcuuc

SEQ ID NO: 2581395 - RNA, 19 nt, Artificial Sequence
  Description of Artificial Sequence: Synthetic oligonucleotide
uggccaguuucaguucuuc

SEQ ID NO: 2581396 - RNA, 19 nt, Artificial Sequence
  Description of Artificial Sequence: Synthetic oligonucleotide
cugccuccgguacaggaga

SEQ ID NO: 2581397 - RNA, 19 nt, Artificial Sequence
  Description of Artificial Sequence: Synthetic oligonucleotide
aaguguccacucgccgcug

SEQ ID NO: 2581398 - RNA, 19 nt, Artificial Sequence
  Description of Artificial Sequence: Synthetic oligonucleotide
cauuggcccgggccauacg

SEQ ID NO: 2581399 - RNA, 19 nt, Artificial Sequence
  Description of Artificial Sequence: Synthetic oligonucleotide
cgugccggcugguugaacc

SEQ ID NO: 2581400 - RNA, 19 nt, Artificial Sequence
  Description of Artificial Sequence: Synthetic oligonucleotide
ggcgccauggcugccuccg

SEQ ID NO: 2581401 - RNA, 19 nt, Artificial Sequence
  Description of Artificial Sequence: Synthetic oligonucleotide
guccacagagaugccgaug

SEQ ID NO: 2581402 - RNA, 19 nt, Artificial Sequence
  Description of Artificial Sequence: Synthetic oligonucleotide
cugcacauuggccuguagu

SEQ ID NO: 2581403 - RNA, 19 nt, Artificial Sequence
  Description of Artificial Sequence: Synthetic oligonucleotide
ugcgcaucacaggucccgu

SEQ ID NO: 2581404 - RNA, 19 nt, Artificial Sequence
  Description of Artificial Sequence: Synthetic oligonucleotide
ggggcgaggggcgaugcgg

SEQ ID NO: 2581405 - RNA, 19 nt, Artificial Sequence
  Description of Artificial Sequence: Synthetic oligonucleotide
cacauuggccuguagugau

SEQ ID NO: 2581406 - RNA, 19 nt, Artificial Sequence
  Description of Artificial Sequence: Synthetic oligonucleotide
cuccaauagcacaucacuu

SEQ ID NO: 2581407 - RNA, 19 nt, Artificial Sequence
  Description of Artificial Sequence: Synthetic oligonucleotide
gggccauacgaagacuggc

SEQ ID NO: 2581408 - RNA, 19 nt, Artificial Sequence
  Description of Artificial Sequence: Synthetic oligonucleotide
ugccuccgguacaggagaa

SEQ ID NO: 2581409 - RNA, 19 nt, Artificial Sequence
  Description of Artificial Sequence: Synthetic oligonucleotide
cacucgccgcugccaaucc

SEQ ID NO: 2581410 - RNA, 19 nt, Artificial Sequence
  Description of Artificial Sequence: Synthetic oligonucleotide
ccugaugggaccggacgcg

SEQ ID NO: 2581411 - RNA, 19 nt, Artificial Sequence
  Description of Artificial Sequence: Synthetic oligonucleotide
cugccagcucggaccuugg

SEQ ID NO: 2581412 - RNA, 19 nt, Artificial Sequence
  Description of Artificial Sequence: Synthetic oligonucleotide
uuguggaaguggggcuuca

SEQ ID NO: 2581413 - RNA, 19 nt, Artificial Sequence
  Description of Artificial Sequence: Synthetic oligonucleotide
cagaaggcuuccuggggaa

SEQ ID NO: 2581414 - RNA, 19 nt, Artificial Sequence
  Description of Artificial Sequence: Synthetic oligonucleotide
aggucccguuagcugggug

SEQ ID NO: 2581415 - RNA, 19 nt, Artificial Sequence
  Description of Artificial Sequence: Synthetic oligonucleotide
caaguguccacucgccgcu

SEQ ID NO: 2581416 - RNA, 19 nt, Artificial Sequence
  Description of Artificial Sequence: Synthetic oligonucleotide
augguucgagccacuuucu

SEQ ID NO: 2581417 - RNA, 19 nt, Artificial Sequence
  Description of Artificial Sequence: Synthetic oligonucleotide
gcugccuccgguacaggag

SEQ ID NO: 2581418 - RNA, 19 nt, Artificial Sequence
  Description of Artificial Sequence: Synthetic oligonucleotide
gccauacgaagacuggcaa

SEQ ID NO: 2581419 - RNA, 19 nt, Artificial Sequence
  Description of Artificial Sequence: Synthetic oligonucleotide
cagcucggaccuuggugug

SEQ ID NO: 2581420 - RNA, 19 nt, Artificial Sequence
  Description of Artificial Sequence: Synthetic oligonucleotide
ggccauacgaagacuggca

SEQ ID NO: 2581421 - RNA, 19 nt, Artificial Sequence
  Description of Artificial Sequence: Synthetic oligonucleotide
gugccggcugguugaacca

SEQ ID NO: 2581422 - RNA, 19 nt, Artificial Sequence
  Description of Artificial Sequence: Synthetic oligonucleotide
ccacccugaguucuuccag

SEQ ID NO: 2581423 - RNA, 19 nt, Artificial Sequence
  Description of Artificial Sequence: Synthetic oligonucleotide
cgcgcuuucgccugccggg

SEQ ID NO: 2581424 - RNA, 19 nt, Artificial Sequence
  Description of Artificial Sequence: Synthetic oligonucleotide
auuccggcugggcgccaug

SEQ ID NO: 2581425 - RNA, 19 nt, Artificial Sequence
  Description of Artificial Sequence: Synthetic oligonucleotide
uaccagccacccugaguuc

SEQ ID NO: 2581426 - RNA, 19 nt, Artificial Sequence
  Description of Artificial Sequence: Synthetic oligonucleotide
aucggccugaugggaccgg

SEQ ID NO: 2581427 - RNA, 19 nt, Artificial Sequence
  Description of Artificial Sequence: Synthetic oligonucleotide
ccgcugccaauccuugugg

SEQ ID NO: 2581428 - RNA, 19 nt, Artificial Sequence
  Description of Artificial Sequence: Synthetic oligonucleotide
ggauaccagccacccugag

SEQ ID NO: 2581429 - RNA, 19 nt, Artificial Sequence
  Description of Artificial Sequence: Synthetic oligonucleotide
aucucacuguagggcaccu

SEQ ID NO: 2581430 - RNA, 19 nt, Artificial Sequence
  Description of Artificial Sequence: Synthetic oligonucleotide
ucggccugaugggaccgga

SEQ ID NO: 2581431 - RNA, 19 nt, Artificial Sequence
  Description of Artificial Sequence: Synthetic oligonucleotide
gacuggcaaaagccuugaa

SEQ ID NO: 2581432 - RNA, 19 nt, Artificial Sequence
  Description of Artificial Sequence: Synthetic oligonucleotide
gcacauuggccuguaguga

SEQ ID NO: 2581433 - RNA, 19 nt, Artificial Sequence
  Description of Artificial Sequence: Synthetic oligonucleotide
cacuaucggccugauggga

SEQ ID NO: 2581434 - RNA, 19 nt, Artificial Sequence
  Description of Artificial Sequence: Synthetic oligonucleotide
ucccguuagcuggguggcc

SEQ ID NO: 2581435 - RNA, 19 nt, Artificial Sequence
  Description of Artificial Sequence: Synthetic oligonucleotide
gcgcgcuuucgccugccgg

SEQ ID NO: 2581436 - RNA, 19 nt, Artificial Sequence
  Description of Artificial Sequence: Synthetic oligonucleotide
ggaucaugccauuccggcu

SEQ ID NO: 2581437 - RNA, 19 nt, Artificial Sequence
  Description of Artificial Sequence: Synthetic oligonucleotide
ggaaguggggcuucaggau

SEQ ID NO: 2581438 - RNA, 19 nt, Artificial Sequence
  Description of Artificial Sequence: Synthetic oligonucleotide
cuguagggcaccucacuau

SEQ ID NO: 2581439 - RNA, 19 nt, Artificial Sequence
  Description of Artificial Sequence: Synthetic oligonucleotide
uucgucuccuuggguccac

SEQ ID NO: 2581440 - RNA, 19 nt, Artificial Sequence
  Description of Artificial Sequence: Synthetic oligonucleotide
gagaacggccgagcggaaa

SEQ ID NO: 2581441 - RNA, 19 nt, Artificial Sequence
  Description of Artificial Sequence: Synthetic oligonucleotide
ugggagcagaaggcuuccu

SEQ ID NO: 2581442 - RNA, 19 nt, Artificial Sequence
  Description of Artificial Sequence: Synthetic oligonucleotide
ggcgaggggcgaugcggcg

SEQ ID NO: 2581443 - RNA, 19 nt, Artificial Sequence
  Description of Artificial Sequence: Synthetic oligonucleotide
uucgccugccgggccuugc

SEQ ID NO: 2581444 - RNA, 19 nt, Artificial Sequence
  Description of Artificial Sequence: Synthetic oligonucleotide
guccacucgccgcugccaa

SEQ ID NO: 2581445 - RNA, 19 nt, Artificial Sequence
  Description of Artificial Sequence: Synthetic oligonucleotide
cucccuucuugggagcaga

SEQ ID NO: 2581446 - RNA, 19 nt, Artificial Sequence
  Description of Artificial Sequence: Synthetic oligonucleotide
ucuugcgugccggcugguu

SEQ ID NO: 2581447 - RNA, 19 nt, Artificial Sequence
  Description of Artificial Sequence: Synthetic oligonucleotide
ucgucuccuuggguccaca

SEQ ID NO: 2581448 - RNA, 19 nt, Artificial Sequence
  Description of Artificial Sequence: Synthetic oligonucleotide
cgucugcggaucuugcgug

SEQ ID NO: 2581449 - RNA, 19 nt, Artificial Sequence
  Description of Artificial Sequence: Synthetic oligonucleotide
acauuggccuguagugauu

SEQ ID NO: 2581450 - RNA, 19 nt, Artificial Sequence
  Description of Artificial Sequence: Synthetic oligonucleotide
ccauacgaagacuggcaaa

SEQ ID NO: 2581451 - RNA, 19 nt, Artificial Sequence
  Description of Artificial Sequence: Synthetic oligonucleotide
cguaugcgcaucacagguc

SEQ ID NO: 2581452 - RNA, 19 nt, Artificial Sequence
  Description of Artificial Sequence: Synthetic oligonucleotide
caccucacuaucggccuga

SEQ ID NO: 2581453 - RNA, 19 nt, Artificial Sequence
  Description of Artificial Sequence: Synthetic oligonucleotide
ccugccagcucggaccuug

SEQ ID NO: 2581454 - RNA, 19 nt, Artificial Sequence
  Description of Artificial Sequence: Synthetic oligonucleotide
uuucgccugccgggccuug

SEQ ID NO: 2581455 - RNA, 19 nt, Artificial Sequence
  Description of Artificial Sequence: Synthetic oligonucleotide
gugauaacucuggcuuucu

SEQ ID NO: 2581456 - RNA, 19 nt, Artificial Sequence
  Description of Artificial Sequence: Synthetic oligonucleotide
cgagccacuuucuuaugga

SEQ ID NO: 2581457 - RNA, 19 nt, Artificial Sequence
  Description of Artificial Sequence: Synthetic oligonucleotide
ccguaugcgcaucacaggu

SEQ ID NO: 2581458 - RNA, 19 nt, Artificial Sequence
  Description of Artificial Sequence: Synthetic oligonucleotide
ccacuuucuuauggauacc

SEQ ID NO: 2581459 - RNA, 19 nt, Artificial Sequence
  Description of Artificial Sequence: Synthetic oligonucleotide
ggcgaugcggcgcgcuuuc

SEQ ID NO: 2581460 - RNA, 19 nt, Artificial Sequence
  Description of Artificial Sequence: Synthetic oligonucleotide
ggacgcggggcgaggggcg

SEQ ID NO: 2581461 - RNA, 19 nt, Artificial Sequence
  Description of Artificial Sequence: Synthetic oligonucleotide
guggggcuucaggaucaug

SEQ ID NO: 2581462 - RNA, 19 nt, Artificial Sequence
  Description of Artificial Sequence: Synthetic oligonucleotide
ccguuagcuggguggccag

SEQ ID NO: 2581463 - RNA, 19 nt, Artificial Sequence
  Description of Artificial Sequence: Synthetic oligonucleotide
cgaggggcgaugcggcgcg

SEQ ID NO: 2581464 - RNA, 19 nt, Artificial Sequence
  Description of Artificial Sequence: Synthetic oligonucleotide
ccaauagcacaucacuuuu

SEQ ID NO: 2581465 - RNA, 19 nt, Artificial Sequence
  Description of Artificial Sequence: Synthetic oligonucleotide
ggcgcgcuuucgccugccg

SEQ ID NO: 2581466 - RNA, 19 nt, Artificial Sequence
  Description of Artificial Sequence: Synthetic oligonucleotide
cggaccuuggugugguauc

SEQ ID NO: 2581467 - RNA, 19 nt, Artificial Sequence
  Description of Artificial Sequence: Synthetic oligonucleotide
cucgccgcugccaauccuu

SEQ ID NO: 2581468 - RNA, 19 nt, Artificial Sequence
  Description of Artificial Sequence: Synthetic oligonucleotide
ugcgugccggcugguugaa

SEQ ID NO: 2581469 - RNA, 19 nt, Artificial Sequence
  Description of Artificial Sequence: Synthetic oligonucleotide
cgaugcggcgcgcuuucgc

SEQ ID NO: 2581470 - RNA, 19 nt, Artificial Sequence
  Description of Artificial Sequence: Synthetic oligonucleotide
gcauuggcccgggccauac

SEQ ID NO: 2581471 - RNA, 19 nt, Artificial Sequence
  Description of Artificial Sequence: Synthetic oligonucleotide
aggggcgaugcggcgcgcu

SEQ ID NO: 2581472 - RNA, 19 nt, Artificial Sequence
  Description of Artificial Sequence: Synthetic oligonucleotide
ggauuuguuucgucuccuu

SEQ ID NO: 2581473 - RNA, 19 nt, Artificial Sequence
  Description of Artificial Sequence: Synthetic oligonucleotide
ggaccuuggugugguaucu

SEQ ID NO: 2581474 - RNA, 19 nt, Artificial Sequence
  Description of Artificial Sequence: Synthetic oligonucleotide
gccuugaaguucuucucuu

SEQ ID NO: 2581475 - RNA, 19 nt, Artificial Sequence
  Description of Artificial Sequence: Synthetic oligonucleotide
ggccuugcgucugcggauc

SEQ ID NO: 2581476 - RNA, 19 nt, Artificial Sequence
  Description of Artificial Sequence: Synthetic oligonucleotide
gccugccgggccuugcguc

SEQ ID NO: 2581477 - RNA, 19 nt, Artificial Sequence
  Description of Artificial Sequence: Synthetic oligonucleotide
ggaccggacgcggggcgag

SEQ ID NO: 2581478 - RNA, 19 nt, Artificial Sequence
  Description of Artificial Sequence: Synthetic oligonucleotide
agccgggcauuggcccggg

SEQ ID NO: 2581479 - RNA, 19 nt, Artificial Sequence
  Description of Artificial Sequence: Synthetic oligonucleotide
ccacucgccgcugccaauc

SEQ ID NO: 2581480 - RNA, 19 nt, Artificial Sequence
  Description of Artificial Sequence: Synthetic oligonucleotide
guaugagcuuggagcggua

SEQ ID NO: 2581481 - RNA, 19 nt, Artificial Sequence
  Description of Artificial Sequence: Synthetic oligonucleotide
cggcugguugaaccaagug

SEQ ID NO: 2581482 - RNA, 19 nt, Artificial Sequence
  Description of Artificial Sequence: Synthetic oligonucleotide
accucacuaucggccugau

SEQ ID NO: 2581483 - RNA, 19 nt, Artificial Sequence
  Description of Artificial Sequence: Synthetic oligonucleotide
gacgcggggcgaggggcga

SEQ ID NO: 2581484 - RNA, 19 nt, Artificial Sequence
  Description of Artificial Sequence: Synthetic oligonucleotide
ggcccgggccauacgaaga

SEQ ID NO: 2581485 - RNA, 19 nt, Artificial Sequence
  Description of Artificial Sequence: Synthetic oligonucleotide
gcgcuuucgccugccgggc

SEQ ID NO: 2581486 - RNA, 19 nt, Artificial Sequence
  Description of Artificial Sequence: Synthetic oligonucleotide
gugauucaguggauuuguu

SEQ ID NO: 2581487 - RNA, 19 nt, Artificial Sequence
  Description of Artificial Sequence: Synthetic oligonucleotide
gcuuucgccugccgggccu

SEQ ID NO: 2581488 - RNA, 19 nt, Artificial Sequence
  Description of Artificial Sequence: Synthetic oligonucleotide
gaggggcgaugcggcgcgc

SEQ ID NO: 2581489 - RNA, 19 nt, Artificial Sequence
  Description of Artificial Sequence: Synthetic oligonucleotide
gccuccgguacaggagaac

SEQ ID NO: 2581490 - RNA, 19 nt, Artificial Sequence
  Description of Artificial Sequence: Synthetic oligonucleotide
caaaagccuugaaguucuu

SEQ ID NO: 2581491 - RNA, 19 nt, Artificial Sequence
  Description of Artificial Sequence: Synthetic oligonucleotide
cgcaucacaggucccguua

SEQ ID NO: 2581492 - RNA, 19 nt, Artificial Sequence
  Description of Artificial Sequence: Synthetic oligonucleotide
gcgaugcggcgcgcuuucg

SEQ ID NO: 2581493 - RNA, 19 nt, Artificial Sequence
  Description of Artificial Sequence: Synthetic oligonucleotide
cgcugccaauccuugugga

SEQ ID NO: 2581494 - RNA, 19 nt, Artificial Sequence
  Description of Artificial Sequence: Synthetic oligonucleotide
gggccuugcgucugcggau

SEQ ID NO: 2581495 - RNA, 19 nt, Artificial Sequence
  Description of Artificial Sequence: Synthetic oligonucleotide
gcucggaccuugguguggu

SEQ ID NO: 2581496 - RNA, 19 nt, Artificial Sequence
  Description of Artificial Sequence: Synthetic oligonucleotide
cgcuuucgccugccgggcc

SEQ ID NO: 2581497 - RNA, 19 nt, Artificial Sequence
  Description of Artificial Sequence: Synthetic oligonucleotide
cucggaccuugguguggua

SEQ ID NO: 2581498 - RNA, 19 nt, Artificial Sequence
  Description of Artificial Sequence: Synthetic oligonucleotide
gcggggcgaggggcgaugc

SEQ ID NO: 2581499 - RNA, 19 nt, Artificial Sequence
  Description of Artificial Sequence: Synthetic oligonucleotide
cggccugaugggaccggac

SEQ ID NO: 2581500 - RNA, 19 nt, Artificial Sequence
  Description of Artificial Sequence: Synthetic oligonucleotide
gggaccggacgcggggcga

SEQ ID NO: 2581501 - RNA, 19 nt, Artificial Sequence
  Description of Artificial Sequence: Synthetic oligonucleotide
ccggcugguugaaccaagu

SEQ ID NO: 2581502 - RNA, 19 nt, Artificial Sequence
  Description of Artificial Sequence: Synthetic oligonucleotide
cccugaguucuuccaggcu

SEQ ID NO: 2581503 - RNA, 19 nt, Artificial Sequence
  Description of Artificial Sequence: Synthetic oligonucleotide
ccggcugggcgccauggcu

SEQ ID NO: 2581504 - RNA, 19 nt, Artificial Sequence
  Description of Artificial Sequence: Synthetic oligonucleotide
cggggcgaggggcgaugcg

SEQ ID NO: 2581505 - RNA, 19 nt, Artificial Sequence
  Description of Artificial Sequence: Synthetic oligonucleotide
acgcggggcgaggggcgau

SEQ ID NO: 2581506 - RNA, 19 nt, Artificial Sequence
  Description of Artificial Sequence: Synthetic oligonucleotide
cauuccggcugggcgccau

SEQ ID NO: 2581507 - RNA, 19 nt, Artificial Sequence
  Description of Artificial Sequence: Synthetic oligonucleotide
gccuugcgucugcggaucu

SEQ ID NO: 2581508 - RNA, 19 nt, Artificial Sequence
  Description of Artificial Sequence: Synthetic oligonucleotide
cgguacuccuucaggcgcu

SEQ ID NO: 2581509 - RNA, 19 nt, Artificial Sequence
  Description of Artificial Sequence: Synthetic oligonucleotide
ggcauuggcccgggccaua

SEQ ID NO: 2581510 - RNA, 19 nt, Artificial Sequence
  Description of Artificial Sequence: Synthetic oligonucleotide
cuuucgccugccgggccuu

SEQ ID NO: 2581511 - RNA, 19 nt, Artificial Sequence
  Description of Artificial Sequence: Synthetic oligonucleotide
caggucccguuagcugggu

SEQ ID NO: 2581512 - RNA, 19 nt, Artificial Sequence
  Description of Artificial Sequence: Synthetic oligonucleotide
gcgugccggcugguugaac

SEQ ID NO: 2581513 - RNA, 19 nt, Artificial Sequence
  Description of Artificial Sequence: Synthetic oligonucleotide
gcgcaucacaggucccguu

SEQ ID NO: 2581514 - RNA, 19 nt, Artificial Sequence
  Description of Artificial Sequence: Synthetic oligonucleotide
ggggcgaugcggcgcgcuu

SEQ ID NO: 2581515 - RNA, 19 nt, Artificial Sequence
  Description of Artificial Sequence: Synthetic oligonucleotide
gggcauuggcccgggccau

SEQ ID NO: 2581516 - RNA, 19 nt, Artificial Sequence
  Description of Artificial Sequence: Synthetic oligonucleotide
cgaugguucgagccacuuu

SEQ ID NO: 2581517 - RNA, 19 nt, Artificial Sequence
  Description of Artificial Sequence: Synthetic oligonucleotide
gccgaugguucgagccacu

SEQ ID NO: 2581518 - RNA, 19 nt, Artificial Sequence
  Description of Artificial Sequence: Synthetic oligonucleotide
ccagccacccugaguucuu

SEQ ID NO: 2581519 - RNA, 19 nt, Artificial Sequence
  Description of Artificial Sequence: Synthetic oligonucleotide
gggcgaugcggcgcgcuuu

SEQ ID NO: 2581520 - RNA, 19 nt, Artificial Sequence
  Description of Artificial Sequence: Synthetic oligonucleotide
cgcggggcgaggggcgaug

SEQ ID NO: 2581521 - RNA, 19 nt, Artificial Sequence
  Description of Artificial Sequence: Synthetic oligonucleotide
cccgggccauacgaagacu

SEQ ID NO: 2581522 - RNA, 19 nt, Artificial Sequence
  Description of Artificial Sequence: Synthetic oligonucleotide
ccgaugguucgagccacuu

SEQ ID NO: 2581523 - RNA, 19 nt, Artificial Sequence
  Description of Artificial Sequence: Synthetic oligonucleotide
cguuagcuggguggccagu

SEQ ID NO: 2581524 - RNA, 19 nt, Artificial Sequence
  Description of Artificial Sequence: Synthetic oligonucleotide
cgccgcugccaauccuugu

SEQ ID NO: 2581525 - RNA, 19 nt, Artificial Sequence
  Description of Artificial Sequence: Synthetic oligonucleotide
ccuugcgucugcggaucuu

SEQ ID NO: 2581526 - RNA, 19 nt, Artificial Sequence
  Description of Artificial Sequence: Synthetic oligonucleotide
cgcugcacauuggccugua

SEQ ID NO: 2581527 - RNA, 19 nt, Artificial Sequence
  Description of Artificial Sequence: Synthetic oligonucleotide
aauauaauuauuuucaagc

SEQ ID NO: 2581528 - RNA, 19 nt, Artificial Sequence
  Description of Artificial Sequence: Synthetic oligonucleotide
guaaugaacaauuagcugg

SEQ ID NO: 2581529 - RNA, 19 nt, Artificial Sequence
  Description of Artificial Sequence: Synthetic oligonucleotide
uuuauaauuaauuucucag

SEQ ID NO: 2581530 - RNA, 19 nt, Artificial Sequence
  Description of Artificial Sequence: Synthetic oligonucleotide
aacauuuaagcccucaauc

SEQ ID NO: 2581531 - RNA, 19 nt, Artificial Sequence
  Description of Artificial Sequence: Synthetic oligonucleotide
aguuaaggcagcuagaagg

SEQ ID NO: 2581532 - RNA, 19 nt, Artificial Sequence
  Description of Artificial Sequence: Synthetic oligonucleotide
uucuacaucgcuaagaaug

SEQ ID NO: 2581533 - RNA, 19 nt, Artificial Sequence
  Description of Artificial Sequence: Synthetic oligonucleotide
auuguaaugaacaauuagc

SEQ ID NO: 2581534 - RNA, 19 nt, Artificial Sequence
  Description of Artificial Sequence: Synthetic oligonucleotide
uguuuuaggguuuggaagg

SEQ ID NO: 2581535 - RNA, 19 nt, Artificial Sequence
  Description of Artificial Sequence: Synthetic oligonucleotide
aauuaugggaaguggacag

SEQ ID NO: 2581536 - RNA, 19 nt, Artificial Sequence
  Description of Artificial Sequence: Synthetic oligonucleotide
uugacuacaguuucuaggg

SEQ ID NO: 2581537 - RNA, 19 nt, Artificial Sequence
  Description of Artificial Sequence: Synthetic oligonucleotide
uggaaauuagucuuaauga

SEQ ID NO: 2581538 - RNA, 19 nt, Artificial Sequence
  Description of Artificial Sequence: Synthetic oligonucleotide
aacuaaacagacuucugag

SEQ ID NO: 2581539 - RNA, 19 nt, Artificial Sequence
  Description of Artificial Sequence: Synthetic oligonucleotide
aaguguaacauuuugcuaa

SEQ ID NO: 2581540 - RNA, 19 nt, Artificial Sequence
  Description of Artificial Sequence: Synthetic oligonucleotide
auuuugcuaagugagaagc

SEQ ID NO: 2581541 - RNA, 19 nt, Artificial Sequence
  Description of Artificial Sequence: Synthetic oligonucleotide
augaugaucacgcgaaggc

SEQ ID NO: 2581542 - RNA, 19 nt, Artificial Sequence
  Description of Artificial Sequence: Synthetic oligonucleotide
uuguaaugaacaauuagcu

SEQ ID NO: 2581543 - RNA, 19 nt, Artificial Sequence
  Description of Artificial Sequence: Synthetic oligonucleotide
uuauuuucaagcuuucuac

SEQ ID NO: 2581544 - RNA, 19 nt, Artificial Sequence
  Description of Artificial Sequence: Synthetic oligonucleotide
uguaacauuuugcuaagug

SEQ ID NO: 2581545 - RNA, 19 nt, Artificial Sequence
  Description of Artificial Sequence: Synthetic oligonucleotide
acuaaacagacuucugagc

SEQ ID NO: 2581546 - RNA, 19 nt, Artificial Sequence
  Description of Artificial Sequence: Synthetic oligonucleotide
ugaacaauuagcuggaaau

SEQ ID NO: 2581547 - RNA, 19 nt, Artificial Sequence
  Description of Artificial Sequence: Synthetic oligonucleotide
cuugacuacaguuucuagg

SEQ ID NO: 2581548 - RNA, 19 nt, Artificial Sequence
  Description of Artificial Sequence: Synthetic oligonucleotide
agaagcauaauauaauuau

SEQ ID NO: 2581549 - RNA, 19 nt, Artificial Sequence
  Description of Artificial Sequence: Synthetic oligonucleotide
uggacuagaagcauaauau

SEQ ID NO: 2581550 - RNA, 19 nt, Artificial Sequence
  Description of Artificial Sequence: Synthetic oligonucleotide
uuaaugauuuguuuuagau

SEQ ID NO: 2581551 - RNA, 19 nt, Artificial Sequence
  Description of Artificial Sequence: Synthetic oligonucleotide
acagucuguacauucgggc

SEQ ID NO: 2581552 - RNA, 19 nt, Artificial Sequence
  Description of Artificial Sequence: Synthetic oligonucleotide
cuggaaauuagucuuaaug

SEQ ID NO: 2581553 - RNA, 19 nt, Artificial Sequence
  Description of Artificial Sequence: Synthetic oligonucleotide
uguaaugaacaauuagcug

SEQ ID NO: 2581554 - RNA, 19 nt, Artificial Sequence
  Description of Artificial Sequence: Synthetic oligonucleotide
aauuagcuggaaauuaguc

SEQ ID NO: 2581555 - RNA, 19 nt, Artificial Sequence
  Description of Artificial Sequence: Synthetic oligonucleotide
aauggcaccaccuuucaau

SEQ ID NO: 2581556 - RNA, 19 nt, Artificial Sequence
  Description of Artificial Sequence: Synthetic oligonucleotide
uaugguuuaggcauggcuc

SEQ ID NO: 2581557 - RNA, 19 nt, Artificial Sequence
  Description of Artificial Sequence: Synthetic oligonucleotide
augguuuaggcauggcucc

SEQ ID NO: 2581558 - RNA, 19 nt, Artificial Sequence
  Description of Artificial Sequence: Synthetic oligonucleotide
uucaauuaugggaagugga

SEQ ID NO: 2581559 - RNA, 19 nt, Artificial Sequence
  Description of Artificial Sequence: Synthetic oligonucleotide
auuagcuggaaauuagucu

SEQ ID NO: 2581560 - RNA, 19 nt, Artificial Sequence
  Description of Artificial Sequence: Synthetic oligonucleotide
uguacauucgggcuguugu

SEQ ID NO: 2581561 - RNA, 19 nt, Artificial Sequence
  Description of Artificial Sequence: Synthetic oligonucleotide
uuuggacagagcuugggag

SEQ ID NO: 2581562 - RNA, 19 nt, Artificial Sequence
  Description of Artificial Sequence: Synthetic oligonucleotide
uaagcccucaaucuaagga

SEQ ID NO: 2581563 - RNA, 19 nt, Artificial Sequence
  Description of Artificial Sequence: Synthetic oligonucleotide
uuguuuuagaugcuggacu

SEQ ID NO: 2581564 - RNA, 19 nt, Artificial Sequence
  Description of Artificial Sequence: Synthetic oligonucleotide
uccuauuccaaguacugcc

SEQ ID NO: 2581565 - RNA, 19 nt, Artificial Sequence
  Description of Artificial Sequence: Synthetic oligonucleotide
aucgcuaagaaugcaaugg

SEQ ID NO: 2581566 - RNA, 19 nt, Artificial Sequence
  Description of Artificial Sequence: Synthetic oligonucleotide
ucuacaucgcuaagaaugc

SEQ ID NO: 2581567 - RNA, 19 nt, Artificial Sequence
  Description of Artificial Sequence: Synthetic oligonucleotide
aaauuagucuuaaugauuu

SEQ ID NO: 2581568 - RNA, 19 nt, Artificial Sequence
  Description of Artificial Sequence: Synthetic oligonucleotide
ucauuuaauucuccugaag

SEQ ID NO: 2581569 - RNA, 19 nt, Artificial Sequence
  Description of Artificial Sequence: Synthetic oligonucleotide
ucaaucuaaggaaggagac

SEQ ID NO: 2581570 - RNA, 19 nt, Artificial Sequence
  Description of Artificial Sequence: Synthetic oligonucleotide
cuguuuuaggguuuggaag

SEQ ID NO: 2581571 - RNA, 19 nt, Artificial Sequence
  Description of Artificial Sequence: Synthetic oligonucleotide
uuucaauuaugggaagugg

SEQ ID NO: 2581572 - RNA, 19 nt, Artificial Sequence
  Description of Artificial Sequence: Synthetic oligonucleotide
uuagcuggaaauuagucuu

SEQ ID NO: 2581573 - RNA, 19 nt, Artificial Sequence
  Description of Artificial Sequence: Synthetic oligonucleotide
uuaggcauggcuccaaggu

SEQ ID NO: 2581574 - RNA, 19 nt, Artificial Sequence
  Description of Artificial Sequence: Synthetic oligonucleotide
agcauaauuguaaugaaca

SEQ ID NO: 2581575 - RNA, 19 nt, Artificial Sequence
  Description of Artificial Sequence: Synthetic oligonucleotide
uggaaguguaacauuuugc

SEQ ID NO: 2581576 - RNA, 19 nt, Artificial Sequence
  Description of Artificial Sequence: Synthetic oligonucleotide
uuggaaguguaacauuuug

SEQ ID NO: 2581577 - RNA, 19 nt, Artificial Sequence
  Description of Artificial Sequence: Synthetic oligonucleotide
ugaaguaggcuuuggggag

SEQ ID NO: 2581578 - RNA, 19 nt, Artificial Sequence
  Description of Artificial Sequence: Synthetic oligonucleotide
aaucuugauucauuuaauu

SEQ ID NO: 2581579 - RNA, 19 nt, Artificial Sequence
  Description of Artificial Sequence: Synthetic oligonucleotide
auaauuaauuucucagccu

SEQ ID NO: 2581580 - RNA, 19 nt, Artificial Sequence
  Description of Artificial Sequence: Synthetic oligonucleotide
guuguauuccuauuccaag

SEQ ID NO: 2581581 - RNA, 19 nt, Artificial Sequence
  Description of Artificial Sequence: Synthetic oligonucleotide
auaauuguaaugaacaauu

SEQ ID NO: 2581582 - RNA, 19 nt, Artificial Sequence
  Description of Artificial Sequence: Synthetic oligonucleotide
cacgcgaaggcacagaccc

SEQ ID NO: 2581583 - RNA, 19 nt, Artificial Sequence
  Description of Artificial Sequence: Synthetic oligonucleotide
uucaacuaaacagacuucu

SEQ ID NO: 2581584 - RNA, 19 nt, Artificial Sequence
  Description of Artificial Sequence: Synthetic oligonucleotide
guaacauuuugcuaaguga

SEQ ID NO: 2581585 - RNA, 19 nt, Artificial Sequence
  Description of Artificial Sequence: Synthetic oligonucleotide
uguuguauuccuauuccaa

SEQ ID NO: 2581586 - RNA, 19 nt, Artificial Sequence
  Description of Artificial Sequence: Synthetic oligonucleotide
aagcauaauauaauuauuu

SEQ ID NO: 2581587 - RNA, 19 nt, Artificial Sequence
  Description of Artificial Sequence: Synthetic oligonucleotide
uggacagucacggagggag

SEQ ID NO: 2581588 - RNA, 19 nt, Artificial Sequence
  Description of Artificial Sequence: Synthetic oligonucleotide
cuaaacagacuucugagca

SEQ ID NO: 2581589 - RNA, 19 nt, Artificial Sequence
  Description of Artificial Sequence: Synthetic oligonucleotide
cuaagugagaagcugugug

SEQ ID NO: 2581590 - RNA, 19 nt, Artificial Sequence
  Description of Artificial Sequence: Synthetic oligonucleotide
aauuagucuuaaugauuug

SEQ ID NO: 2581591 - RNA, 19 nt, Artificial Sequence
  Description of Artificial Sequence: Synthetic oligonucleotide
uuugcuaagugagaagcug

SEQ ID NO: 2581592 - RNA, 19 nt, Artificial Sequence
  Description of Artificial Sequence: Synthetic oligonucleotide
uuuaagcccucaaucuaag

SEQ ID NO: 2581593 - RNA, 19 nt, Artificial Sequence
  Description of Artificial Sequence: Synthetic oligonucleotide
uuuaggguuuggaaggcac

SEQ ID NO: 2581594 - RNA, 19 nt, Artificial Sequence
  Description of Artificial Sequence: Synthetic oligonucleotide
uuuucaagcuuucuacauc

SEQ ID NO: 2581595 - RNA, 19 nt, Artificial Sequence
  Description of Artificial Sequence: Synthetic oligonucleotide
auaauuauuuucaagcuuu

SEQ ID NO: 2581596 - RNA, 19 nt, Artificial Sequence
  Description of Artificial Sequence: Synthetic oligonucleotide
uagaagcauaauauaauua

SEQ ID NO: 2581597 - RNA, 19 nt, Artificial Sequence
  Description of Artificial Sequence: Synthetic oligonucleotide
uuguauuccuauuccaagu

SEQ ID NO: 2581598 - RNA, 19 nt, Artificial Sequence
  Description of Artificial Sequence: Synthetic oligonucleotide
uuagucuuaaugauuuguu

SEQ ID NO: 2581599 - RNA, 19 nt, Artificial Sequence
  Description of Artificial Sequence: Synthetic oligonucleotide
ucuaaggaaggagacacac

SEQ ID NO: 2581600 - RNA, 19 nt, Artificial Sequence
  Description of Artificial Sequence: Synthetic oligonucleotide
uaauucuccugaaguaggc

SEQ ID NO: 2581601 - RNA, 19 nt, Artificial Sequence
  Description of Artificial Sequence: Synthetic oligonucleotide
ucuuaaugauuuguuuuag

SEQ ID NO: 2581602 - RNA, 19 nt, Artificial Sequence
  Description of Artificial Sequence: Synthetic oligonucleotide
uuuaggcauggcuccaagg

SEQ ID NO: 2581603 - RNA, 19 nt, Artificial Sequence
  Description of Artificial Sequence: Synthetic oligonucleotide
uccugaaguaggcuuuggg

SEQ ID NO: 2581604 - RNA, 19 nt, Artificial Sequence
  Description of Artificial Sequence: Synthetic oligonucleotide
ucaacuaaacagacuucug

SEQ ID NO: 2581605 - RNA, 19 nt, Artificial Sequence
  Description of Artificial Sequence: Synthetic oligonucleotide
aagaaugcaauggcaccac

SEQ ID NO: 2581606 - RNA, 19 nt, Artificial Sequence
  Description of Artificial Sequence: Synthetic oligonucleotide
aguguaacauuuugcuaag

SEQ ID NO: 2581607 - RNA, 19 nt, Artificial Sequence
  Description of Artificial Sequence: Synthetic oligonucleotide
auuuguuuuagaugcugga

SEQ ID NO: 2581608 - RNA, 19 nt, Artificial Sequence
  Description of Artificial Sequence: Synthetic oligonucleotide
aaugcaauggcaccaccuu

SEQ ID NO: 2581609 - RNA, 19 nt, Artificial Sequence
  Description of Artificial Sequence: Synthetic oligonucleotide
aucacgcgaaggcacagac

SEQ ID NO: 2581610 - RNA, 19 nt, Artificial Sequence
  Description of Artificial Sequence: Synthetic oligonucleotide
aacaauuagcuggaaauua

SEQ ID NO: 2581611 - RNA, 19 nt, Artificial Sequence
  Description of Artificial Sequence: Synthetic oligonucleotide
acagaugaugaucacgcga

SEQ ID NO: 2581612 - RNA, 19 nt, Artificial Sequence
  Description of Artificial Sequence: Synthetic oligonucleotide
aagcuuucuacaucgcuaa

SEQ ID NO: 2581613 - RNA, 19 nt, Artificial Sequence
  Description of Artificial Sequence: Synthetic oligonucleotide
ucaagcuuucuacaucgcu

SEQ ID NO: 2581614 - RNA, 19 nt, Artificial Sequence
  Description of Artificial Sequence: Synthetic oligonucleotide
uguuuuagaugcuggacua

SEQ ID NO: 2581615 - RNA, 19 nt, Artificial Sequence
  Description of Artificial Sequence: Synthetic oligonucleotide
ucgcuaagaaugcaauggc

SEQ ID NO: 2581616 - RNA, 19 nt, Artificial Sequence
  Description of Artificial Sequence: Synthetic oligonucleotide
guuacagucuguacauucg

SEQ ID NO: 2581617 - RNA, 19 nt, Artificial Sequence
  Description of Artificial Sequence: Synthetic oligonucleotide
uuuugcuaagugagaagcu

SEQ ID NO: 2581618 - RNA, 19 nt, Artificial Sequence
  Description of Artificial Sequence: Synthetic oligonucleotide
  modified_base (10)..(10): a, c, u, g, unknown or other
ugugccggcnccuucucug

SEQ ID NO: 2581619 - RNA, 19 nt, Artificial Sequence
  Description of Artificial Sequence: Synthetic oligonucleotide
ugauuuguuuuagaugcug

SEQ ID NO: 2581620 - RNA, 19 nt, Artificial Sequence
  Description of Artificial Sequence: Synthetic oligonucleotide
uuaagcccucaaucuaagg

SEQ ID NO: 2581621 - RNA, 19 nt, Artificial Sequence
  Description of Artificial Sequence: Synthetic oligonucleotide
cucaaucuaaggaaggaga

SEQ ID NO: 2581622 - RNA, 19 nt, Artificial Sequence
  Description of Artificial Sequence: Synthetic oligonucleotide
acaauuagcuggaaauuag

SEQ ID NO: 2581623 - RNA, 19 nt, Artificial Sequence
  Description of Artificial Sequence: Synthetic oligonucleotide
agaaugcaauggcaccacc

SEQ ID NO: 2581624 - RNA, 19 nt, Artificial Sequence
  Description of Artificial Sequence: Synthetic oligonucleotide
uacaucgcuaagaaugcaa

SEQ ID NO: 2581625 - RNA, 19 nt, Artificial Sequence
  Description of Artificial Sequence: Synthetic oligonucleotide
gcagaguuaaggcagcuag

SEQ ID NO: 2581626 - RNA, 19 nt, Artificial Sequence
  Description of Artificial Sequence: Synthetic oligonucleotide
guguuuauaauuaauuucu

SEQ ID NO: 2581627 - RNA, 19 nt, Artificial Sequence
  Description of Artificial Sequence: Synthetic oligonucleotide
ugcuaagugagaagcugug

SEQ ID NO: 2581628 - RNA, 19 nt, Artificial Sequence
  Description of Artificial Sequence: Synthetic oligonucleotide
uuuagaugcuggacuagaa

SEQ ID NO: 2581629 - RNA, 19 nt, Artificial Sequence
  Description of Artificial Sequence: Synthetic oligonucleotide
uacaccacuuuggacagag

SEQ ID NO: 2581630 - RNA, 19 nt, Artificial Sequence
  Description of Artificial Sequence: Synthetic oligonucleotide
uuuuagaugcuggacuaga

SEQ ID NO: 2581631 - RNA, 19 nt, Artificial Sequence
  Description of Artificial Sequence: Synthetic oligonucleotide
gacagauuggaaguguaac

SEQ ID NO: 2581632 - RNA, 19 nt, Artificial Sequence
  Description of Artificial Sequence: Synthetic oligonucleotide
cauuuugcuaagugagaag

SEQ ID NO: 2581633 - RNA, 19 nt, Artificial Sequence
  Description of Artificial Sequence: Synthetic oligonucleotide
cugaaguaggcuuugggga

SEQ ID NO: 2581634 - RNA, 19 nt, Artificial Sequence
  Description of Artificial Sequence: Synthetic oligonucleotide
ugcaaaaucuugauucauu

SEQ ID NO: 2581635 - RNA, 19 nt, Artificial Sequence
  Description of Artificial Sequence: Synthetic oligonucleotide
guuaaggcagcuagaaggc

SEQ ID NO: 2581636 - RNA, 19 nt, Artificial Sequence
  Description of Artificial Sequence: Synthetic oligonucleotide
ugcuacuugacuacaguuu

SEQ ID NO: 2581637 - RNA, 19 nt, Artificial Sequence
  Description of Artificial Sequence: Synthetic oligonucleotide
agugagaagcugugugccg

SEQ ID NO: 2581638 - RNA, 19 nt, Artificial Sequence
  Description of Artificial Sequence: Synthetic oligonucleotide
agucuguacauucgggcug

SEQ ID NO: 2581639 - RNA, 19 nt, Artificial Sequence
  Description of Artificial Sequence: Synthetic oligonucleotide
aaguacugccaaguucugg

SEQ ID NO: 2581640 - RNA, 19 nt, Artificial Sequence
  Description of Artificial Sequence: Synthetic oligonucleotide
  modified_base (17)..(17): a, c, u, g, unknown or other
gaagcugugugccggcncc

SEQ ID NO: 2581641 - RNA, 19 nt, Artificial Sequence
  Description of Artificial Sequence: Synthetic oligonucleotide
aggagcagaguuaaggcag

SEQ ID NO: 2581642 - RNA, 19 nt, Artificial Sequence
  Description of Artificial Sequence: Synthetic oligonucleotide
uuaggguuuggaaggcaca

SEQ ID NO: 2581643 - RNA, 19 nt, Artificial Sequence
  Description of Artificial Sequence: Synthetic oligonucleotide
gaguuaaggcagcuagaag

SEQ ID NO: 2581644 - RNA, 19 nt, Artificial Sequence
  Description of Artificial Sequence: Synthetic oligonucleotide
caacuaaacagacuucuga

SEQ ID NO: 2581645 - RNA, 19 nt, Artificial Sequence
  Description of Artificial Sequence: Synthetic oligonucleotide
ucgguuacagucuguacau

SEQ ID NO: 2581646 - RNA, 19 nt, Artificial Sequence
  Description of Artificial Sequence: Synthetic oligonucleotide
ccacagaugaugaucacgc

SEQ ID NO: 2581647 - RNA, 19 nt, Artificial Sequence
  Description of Artificial Sequence: Synthetic oligonucleotide
  modified_base (18)..(18): a, c, u, g, unknown or other
agaagcugugugccggcnc

SEQ ID NO: 2581648 - RNA, 19 nt, Artificial Sequence
  Description of Artificial Sequence: Synthetic oligonucleotide
acuagaagcauaauauaau

SEQ ID NO: 2581649 - RNA, 19 nt, Artificial Sequence
  Description of Artificial Sequence: Synthetic oligonucleotide
uaugggaaguggacaguca

SEQ ID NO: 2581650 - RNA, 19 nt, Artificial Sequence
  Description of Artificial Sequence: Synthetic oligonucleotide
ugcuggacuagaagcauaa

SEQ ID NO: 2581651 - RNA, 19 nt, Artificial Sequence
  Description of Artificial Sequence: Synthetic oligonucleotide
acuugacuacaguuucuag

SEQ ID NO: 2581652 - RNA, 19 nt, Artificial Sequence
  Description of Artificial Sequence: Synthetic oligonucleotide
caccaccuuucaauuaugg

SEQ ID NO: 2581653 - RNA, 19 nt, Artificial Sequence
  Description of Artificial Sequence: Synthetic oligonucleotide
ugacuacaguuucuagggc

SEQ ID NO: 2581654 - RNA, 19 nt, Artificial Sequence
  Description of Artificial Sequence: Synthetic oligonucleotide
ugccuucaacuaaacagac

SEQ ID NO: 2581655 - RNA, 19 nt, Artificial Sequence
  Description of Artificial Sequence: Synthetic oligonucleotide
aggccugcuacuugacuac

SEQ ID NO: 2581656 - RNA, 19 nt, Artificial Sequence
  Description of Artificial Sequence: Synthetic oligonucleotide
acauuuugcuaagugagaa

SEQ ID NO: 2581657 - RNA, 19 nt, Artificial Sequence
  Description of Artificial Sequence: Synthetic oligonucleotide
cucgguuacagucuguaca

SEQ ID NO: 2581658 - RNA, 19 nt, Artificial Sequence
  Description of Artificial Sequence: Synthetic oligonucleotide
guauuccuauuccaaguac

SEQ ID NO: 2581659 - RNA, 19 nt, Artificial Sequence
  Description of Artificial Sequence: Synthetic oligonucleotide
augaacaauuagcuggaaa

SEQ ID NO: 2581660 - RNA, 19 nt, Artificial Sequence
  Description of Artificial Sequence: Synthetic oligonucleotide
auuccaaguacugccaagu

SEQ ID NO: 2581661 - RNA, 19 nt, Artificial Sequence
  Description of Artificial Sequence: Synthetic oligonucleotide
uaaacagacuucugagcau

SEQ ID NO: 2581662 - RNA, 19 nt, Artificial Sequence
  Description of Artificial Sequence: Synthetic oligonucleotide
aaggcgcucagaagggaac

SEQ ID NO: 2581663 - RNA, 19 nt, Artificial Sequence
  Description of Artificial Sequence: Synthetic oligonucleotide
uacugccaaguucuggcca

SEQ ID NO: 2581664 - RNA, 19 nt, Artificial Sequence
  Description of Artificial Sequence: Synthetic oligonucleotide
auuccuauuccaaguacug

SEQ ID NO: 2581665 - RNA, 19 nt, Artificial Sequence
  Description of Artificial Sequence: Synthetic oligonucleotide
gaaguaggcuuuggggagg

SEQ ID NO: 2581666 - RNA, 19 nt, Artificial Sequence
  Description of Artificial Sequence: Synthetic oligonucleotide
gaaguguaacauuuugcua

SEQ ID NO: 2581667 - RNA, 19 nt, Artificial Sequence
  Description of Artificial Sequence: Synthetic oligonucleotide
agaguuaaggcagcuagaa

SEQ ID NO: 2581668 - RNA, 19 nt, Artificial Sequence
  Description of Artificial Sequence: Synthetic oligonucleotide
uacaguuucuagggcuugg

SEQ ID NO: 2581669 - RNA, 19 nt, Artificial Sequence
  Description of Artificial Sequence: Synthetic oligonucleotide
uuaugggaaguggacaguc

SEQ ID NO: 2581670 - RNA, 19 nt, Artificial Sequence
  Description of Artificial Sequence: Synthetic oligonucleotide
cuucaacuaaacagacuuc

SEQ ID NO: 2581671 - RNA, 19 nt, Artificial Sequence
  Description of Artificial Sequence: Synthetic oligonucleotide
gggaacacacugcaaggcg

SEQ ID NO: 2581672 - RNA, 19 nt, Artificial Sequence
  Description of Artificial Sequence: Synthetic oligonucleotide
ggaaguguaacauuuugcu

SEQ ID NO: 2581673 - RNA, 19 nt, Artificial Sequence
  Description of Artificial Sequence: Synthetic oligonucleotide
guugcagcccacucaggag

SEQ ID NO: 2581674 - RNA, 19 nt, Artificial Sequence
  Description of Artificial Sequence: Synthetic oligonucleotide
gcagcuagaaggcugcacc

SEQ ID NO: 2581675 - RNA, 19 nt, Artificial Sequence
  Description of Artificial Sequence: Synthetic oligonucleotide
gacuacaguuucuagggcu

SEQ ID NO: 2581676 - RNA, 19 nt, Artificial Sequence
  Description of Artificial Sequence: Synthetic oligonucleotide
uucaagcuuucuacaucgc

SEQ ID NO: 2581677 - RNA, 19 nt, Artificial Sequence
  Description of Artificial Sequence: Synthetic oligonucleotide
cagaugaugaucacgcgaa

SEQ ID NO: 2581678 - RNA, 19 nt, Artificial Sequence
  Description of Artificial Sequence: Synthetic oligonucleotide
ggcacagacccguugagug

SEQ ID NO: 2581679 - RNA, 19 nt, Artificial Sequence
  Description of Artificial Sequence: Synthetic oligonucleotide
gacccguugagugggcucg

SEQ ID NO: 2581680 - RNA, 19 nt, Artificial Sequence
  Description of Artificial Sequence: Synthetic oligonucleotide
cacagaugaugaucacgcg

SEQ ID NO: 2581681 - RNA, 19 nt, Artificial Sequence
  Description of Artificial Sequence: Synthetic oligonucleotide
aaguaggcuuuggggaggg

SEQ ID NO: 2581682 - RNA, 19 nt, Artificial Sequence
  Description of Artificial Sequence: Synthetic oligonucleotide
auuuaagcccucaaucuaa

SEQ ID NO: 2581683 - RNA, 19 nt, Artificial Sequence
  Description of Artificial Sequence: Synthetic oligonucleotide
gacacacgaggccugcuac

SEQ ID NO: 2581684 - RNA, 19 nt, Artificial Sequence
  Description of Artificial Sequence: Synthetic oligonucleotide
gcuaagaaugcaauggcac

SEQ ID NO: 2581685 - RNA, 19 nt, Artificial Sequence
  Description of Artificial Sequence: Synthetic oligonucleotide
cacggagggagguugcagc

SEQ ID NO: 2581686 - RNA, 19 nt, Artificial Sequence
  Description of Artificial Sequence: Synthetic oligonucleotide
acuuuggacagagcuuggg

SEQ ID NO: 2581687 - RNA, 19 nt, Artificial Sequence
  Description of Artificial Sequence: Synthetic oligonucleotide
guugagugggcucgguuac

SEQ ID NO: 2581688 - RNA, 19 nt, Artificial Sequence
  Description of Artificial Sequence: Synthetic oligonucleotide
uucuccugaaguaggcuuu

SEQ ID NO: 2581689 - RNA, 19 nt, Artificial Sequence
  Description of Artificial Sequence: Synthetic oligonucleotide
accuuucaauuaugggaag

SEQ ID NO: 2581690 - RNA, 19 nt, Artificial Sequence
  Description of Artificial Sequence: Synthetic oligonucleotide
cacagacccguugaguggg

SEQ ID NO: 2581691 - RNA, 19 nt, Artificial Sequence
  Description of Artificial Sequence: Synthetic oligonucleotide
guuucuagggcuugggagu

SEQ ID NO: 2581692 - RNA, 19 nt, Artificial Sequence
  Description of Artificial Sequence: Synthetic oligonucleotide
agauuggaaguguaacauu

SEQ ID NO: 2581693 - RNA, 19 nt, Artificial Sequence
  Description of Artificial Sequence: Synthetic oligonucleotide
cucagaagggaacauuuaa

SEQ ID NO: 2581694 - RNA, 19 nt, Artificial Sequence
  Description of Artificial Sequence: Synthetic oligonucleotide
ugcugccuacaccacuuug

SEQ ID NO: 2581695 - RNA, 19 nt, Artificial Sequence
  Description of Artificial Sequence: Synthetic oligonucleotide
agaugcuggacuagaagca

SEQ ID NO: 2581696 - RNA, 19 nt, Artificial Sequence
  Description of Artificial Sequence: Synthetic oligonucleotide
caagcuuucuacaucgcua

SEQ ID NO: 2581697 - RNA, 19 nt, Artificial Sequence
  Description of Artificial Sequence: Synthetic oligonucleotide
guuuaggcauggcuccaag

SEQ ID NO: 2581698 - RNA, 19 nt, Artificial Sequence
  Description of Artificial Sequence: Synthetic oligonucleotide
cagcuagaaggcugcaccc

SEQ ID NO: 2581699 - RNA, 19 nt, Artificial Sequence
  Description of Artificial Sequence: Synthetic oligonucleotide
uuuuaggguuuggaaggca

SEQ ID NO: 2581700 - RNA, 19 nt, Artificial Sequence
  Description of Artificial Sequence: Synthetic oligonucleotide
uuucuacaucgcuaagaau

SEQ ID NO: 2581701 - RNA, 19 nt, Artificial Sequence
  Description of Artificial Sequence: Synthetic oligonucleotide
ucacgcgaaggcacagacc

SEQ ID NO: 2581702 - RNA, 19 nt, Artificial Sequence
  Description of Artificial Sequence: Synthetic oligonucleotide
ugggcucgguuacagucug

SEQ ID NO: 2581703 - RNA, 19 nt, Artificial Sequence
  Description of Artificial Sequence: Synthetic oligonucleotide
cuggacuagaagcauaaua

SEQ ID NO: 2581704 - RNA, 19 nt, Artificial Sequence
  Description of Artificial Sequence: Synthetic oligonucleotide
agacccguugagugggcuc

SEQ ID NO: 2581705 - RNA, 19 nt, Artificial Sequence
  Description of Artificial Sequence: Synthetic oligonucleotide
cuagaagcauaauauaauu

SEQ ID NO: 2581706 - RNA, 19 nt, Artificial Sequence
  Description of Artificial Sequence: Synthetic oligonucleotide
uacuugacuacaguuucua

SEQ ID NO: 2581707 - RNA, 19 nt, Artificial Sequence
  Description of Artificial Sequence: Synthetic oligonucleotide
guuuuaggguuuggaaggc

SEQ ID NO: 2581708 - RNA, 19 nt, Artificial Sequence
  Description of Artificial Sequence: Synthetic oligonucleotide
agcccagguguuuauaauu

SEQ ID NO: 2581709 - RNA, 19 nt, Artificial Sequence
  Description of Artificial Sequence: Synthetic oligonucleotide
agcuaugguuuaggcaugg

SEQ ID NO: 2581710 - RNA, 19 nt, Artificial Sequence
  Description of Artificial Sequence: Synthetic oligonucleotide
cuagaaggcugcaccccag

SEQ ID NO: 2581711 - RNA, 19 nt, Artificial Sequence
  Description of Artificial Sequence: Synthetic oligonucleotide
cauuuaagcccucaaucua

SEQ ID NO: 2581712 - RNA, 19 nt, Artificial Sequence
  Description of Artificial Sequence: Synthetic oligonucleotide
gcugccuacaccacuuugg

SEQ ID NO: 2581713 - RNA, 19 nt, Artificial Sequence
  Description of Artificial Sequence: Synthetic oligonucleotide
cuugcuguuuuaggguuug

SEQ ID NO: 2581714 - RNA, 19 nt, Artificial Sequence
  Description of Artificial Sequence: Synthetic oligonucleotide
caggagcagaguuaaggca

SEQ ID NO: 2581715 - RNA, 19 nt, Artificial Sequence
  Description of Artificial Sequence: Synthetic oligonucleotide
agcccucaaucuaaggaag

SEQ ID NO: 2581716 - RNA, 19 nt, Artificial Sequence
  Description of Artificial Sequence: Synthetic oligonucleotide
gcuugggagccacagauga

SEQ ID NO: 2581717 - RNA, 19 nt, Artificial Sequence
  Description of Artificial Sequence: Synthetic oligonucleotide
accuugcuguuuuaggguu

SEQ ID NO: 2581718 - RNA, 19 nt, Artificial Sequence
  Description of Artificial Sequence: Synthetic oligonucleotide
uacauucgggcuguuguau

SEQ ID NO: 2581719 - RNA, 19 nt, Artificial Sequence
  Description of Artificial Sequence: Synthetic oligonucleotide
agcuuucuacaucgcuaag

SEQ ID NO: 2581720 - RNA, 19 nt, Artificial Sequence
  Description of Artificial Sequence: Synthetic oligonucleotide
ggccauuucucaucuuugc

SEQ ID NO: 2581721 - RNA, 19 nt, Artificial Sequence
  Description of Artificial Sequence: Synthetic oligonucleotide
ggcuguuguauuccuauuc

SEQ ID NO: 2581722 - RNA, 19 nt, Artificial Sequence
  Description of Artificial Sequence: Synthetic oligonucleotide
auuaugggaaguggacagu

SEQ ID NO: 2581723 - RNA, 19 nt, Artificial Sequence
  Description of Artificial Sequence: Synthetic oligonucleotide
uagcuggaaauuagucuua

SEQ ID NO: 2581724 - RNA, 19 nt, Artificial Sequence
  Description of Artificial Sequence: Synthetic oligonucleotide
ugaucacgcgaaggcacag

SEQ ID NO: 2581725 - RNA, 19 nt, Artificial Sequence
  Description of Artificial Sequence: Synthetic oligonucleotide
  modified_base (3)..(3): a, c, u, g, unknown or other
gcnccuucucuguagacca

SEQ ID NO: 2581726 - RNA, 19 nt, Artificial Sequence
  Description of Artificial Sequence: Synthetic oligonucleotide
cacacugcaaggcgcucag

SEQ ID NO: 2581727 - RNA, 19 nt, Artificial Sequence
  Description of Artificial Sequence: Synthetic oligonucleotide
acuucugagcauaauugua

SEQ ID NO: 2581728 - RNA, 19 nt, Artificial Sequence
  Description of Artificial Sequence: Synthetic oligonucleotide
gccacagaugaugaucacg

SEQ ID NO: 2581729 - RNA, 19 nt, Artificial Sequence
  Description of Artificial Sequence: Synthetic oligonucleotide
ucacggagggagguugcag

SEQ ID NO: 2581730 - RNA, 19 nt, Artificial Sequence
  Description of Artificial Sequence: Synthetic oligonucleotide
cuaugguuuaggcauggcu

SEQ ID NO: 2581731 - RNA, 19 nt, Artificial Sequence
  Description of Artificial Sequence: Synthetic oligonucleotide
  modified_base (4)..(4): a, c, u, g, unknown or other
ggcnccuucucuguagacc

SEQ ID NO: 2581732 - RNA, 19 nt, Artificial Sequence
  Description of Artificial Sequence: Synthetic oligonucleotide
agucacggagggagguugc

SEQ ID NO: 2581733 - RNA, 19 nt, Artificial Sequence
  Description of Artificial Sequence: Synthetic oligonucleotide
ugccuacaccacuuuggac

SEQ ID NO: 2581734 - RNA, 19 nt, Artificial Sequence
  Description of Artificial Sequence: Synthetic oligonucleotide
gguugcagcccacucagga

SEQ ID NO: 2581735 - RNA, 19 nt, Artificial Sequence
  Description of Artificial Sequence: Synthetic oligonucleotide
ccuacaccacuuuggacag

SEQ ID NO: 2581736 - RNA, 19 nt, Artificial Sequence
  Description of Artificial Sequence: Synthetic oligonucleotide
ccaaguacugccaaguucu

SEQ ID NO: 2581737 - RNA, 19 nt, Artificial Sequence
  Description of Artificial Sequence: Synthetic oligonucleotide
uucgggcuguuguauuccu

SEQ ID NO: 2581738 - RNA, 19 nt, Artificial Sequence
  Description of Artificial Sequence: Synthetic oligonucleotide
caauuagcuggaaauuagu

SEQ ID NO: 2581739 - RNA, 19 nt, Artificial Sequence
  Description of Artificial Sequence: Synthetic oligonucleotide
caaguacugccaaguucug

SEQ ID NO: 2581740 - RNA, 19 nt, Artificial Sequence
  Description of Artificial Sequence: Synthetic oligonucleotide
gaaugcaauggcaccaccu

SEQ ID NO: 2581741 - RNA, 19 nt, Artificial Sequence
  Description of Artificial Sequence: Synthetic oligonucleotide
gcacagacccguugagugg

SEQ ID NO: 2581742 - RNA, 19 nt, Artificial Sequence
  Description of Artificial Sequence: Synthetic oligonucleotide
ugggaguagcuaugguuua

SEQ ID NO: 2581743 - RNA, 19 nt, Artificial Sequence
  Description of Artificial Sequence: Synthetic oligonucleotide
acacacgaggccugcuacu

SEQ ID NO: 2581744 - RNA, 19 nt, Artificial Sequence
  Description of Artificial Sequence: Synthetic oligonucleotide
uuucuagggcuugggagua

SEQ ID NO: 2581745 - RNA, 19 nt, Artificial Sequence
  Description of Artificial Sequence: Synthetic oligonucleotide
cagaguuaaggcagcuaga

SEQ ID NO: 2581746 - RNA, 19 nt, Artificial Sequence
  Description of Artificial Sequence: Synthetic oligonucleotide
cacgaggccugcuacuuga

SEQ ID NO: 2581747 - RNA, 19 nt, Artificial Sequence
  Description of Artificial Sequence: Synthetic oligonucleotide
gaacaauuagcuggaaauu

SEQ ID NO: 2581748 - RNA, 19 nt, Artificial Sequence
  Description of Artificial Sequence: Synthetic oligonucleotide
agacacacgaggccugcua

SEQ ID NO: 2581749 - RNA, 19 nt, Artificial Sequence
  Description of Artificial Sequence: Synthetic oligonucleotide
acacgaggccugcuacuug

SEQ ID NO: 2581750 - RNA, 19 nt, Artificial Sequence
  Description of Artificial Sequence: Synthetic oligonucleotide
acauucgggcuguuguauu

SEQ ID NO: 2581751 - RNA, 19 nt, Artificial Sequence
  Description of Artificial Sequence: Synthetic oligonucleotide
  modified_base (16)..(16): a, c, u, g, unknown or other
aagcugugugccggcnccu

SEQ ID NO: 2581752 - RNA, 19 nt, Artificial Sequence
  Description of Artificial Sequence: Synthetic oligonucleotide
ccucaaucuaaggaaggag

SEQ ID NO: 2581753 - RNA, 19 nt, Artificial Sequence
  Description of Artificial Sequence: Synthetic oligonucleotide
  modified_base (12)..(12): a, c, u, g, unknown or other
ugugugccggcnccuucuc

SEQ ID NO: 2581754 - RNA, 19 nt, Artificial Sequence
  Description of Artificial Sequence: Synthetic oligonucleotide
gcuuucuacaucgcuaaga

SEQ ID NO: 2581755 - RNA, 19 nt, Artificial Sequence
  Description of Artificial Sequence: Synthetic oligonucleotide
ugguuuaggcauggcucca

SEQ ID NO: 2581756 - RNA, 19 nt, Artificial Sequence
  Description of Artificial Sequence: Synthetic oligonucleotide
cagucacggagggagguug

SEQ ID NO: 2581757 - RNA, 19 nt, Artificial Sequence
  Description of Artificial Sequence: Synthetic oligonucleotide
gcaaaaucuugauucauuu

SEQ ID NO: 2581758 - RNA, 19 nt, Artificial Sequence
  Description of Artificial Sequence: Synthetic oligonucleotide
ccauuucucaucuuugcaa

SEQ ID NO: 2581759 - RNA, 19 nt, Artificial Sequence
  Description of Artificial Sequence: Synthetic oligonucleotide
augaucacgcgaaggcaca

SEQ ID NO: 2581760 - RNA, 19 nt, Artificial Sequence
  Description of Artificial Sequence: Synthetic oligonucleotide
uagggcuugggaguagcua

SEQ ID NO: 2581761 - RNA, 19 nt, Artificial Sequence
  Description of Artificial Sequence: Synthetic oligonucleotide
agcuggaaauuagucuuaa

SEQ ID NO: 2581762 - RNA, 19 nt, Artificial Sequence
  Description of Artificial Sequence: Synthetic oligonucleotide
guacauucgggcuguugua

SEQ ID NO: 2581763 - RNA, 19 nt, Artificial Sequence
  Description of Artificial Sequence: Synthetic oligonucleotide
  modified_base (2)..(2): a, c, u, g, unknown or other
cnccuucucuguagaccag

SEQ ID NO: 2581764 - RNA, 19 nt, Artificial Sequence
  Description of Artificial Sequence: Synthetic oligonucleotide
cagacagauuggaagugua

SEQ ID NO: 2581765 - RNA, 19 nt, Artificial Sequence
  Description of Artificial Sequence: Synthetic oligonucleotide
cagauuggaaguguaacau

SEQ ID NO: 2581766 - RNA, 19 nt, Artificial Sequence
  Description of Artificial Sequence: Synthetic oligonucleotide
  modified_base (7)..(7): a, c, u, g, unknown or other
gccggcnccuucucuguag

SEQ ID NO: 2581767 - RNA, 19 nt, Artificial Sequence
  Description of Artificial Sequence: Synthetic oligonucleotide
gcuagaaggcugcacccca

SEQ ID NO: 2581768 - RNA, 19 nt, Artificial Sequence
  Description of Artificial Sequence: Synthetic oligonucleotide
caaggcgcucagaagggaa

SEQ ID NO: 2581769 - RNA, 19 nt, Artificial Sequence
  Description of Artificial Sequence: Synthetic oligonucleotide
aucuaaggaaggagacaca

SEQ ID NO: 2581770 - RNA, 19 nt, Artificial Sequence
  Description of Artificial Sequence: Synthetic oligonucleotide
caguuucuagggcuuggga

SEQ ID NO: 2581771 - RNA, 19 nt, Artificial Sequence
  Description of Artificial Sequence: Synthetic oligonucleotide
uugagugggcucgguuaca

SEQ ID NO: 2581772 - RNA, 19 nt, Artificial Sequence
  Description of Artificial Sequence: Synthetic oligonucleotide
ugcaaaccuugcuguuuua

SEQ ID NO: 2581773 - RNA, 19 nt, Artificial Sequence
  Description of Artificial Sequence: Synthetic oligonucleotide
gaacacacugcaaggcgcu

SEQ ID NO: 2581774 - RNA, 19 nt, Artificial Sequence
  Description of Artificial Sequence: Synthetic oligonucleotide
gaugcuggacuagaagcau

SEQ ID NO: 2581775 - RNA, 19 nt, Artificial Sequence
  Description of Artificial Sequence: Synthetic oligonucleotide
cuguacauucgggcuguug

SEQ ID NO: 2581776 - RNA, 19 nt, Artificial Sequence
  Description of Artificial Sequence: Synthetic oligonucleotide
ucgggcuguuguauuccua

SEQ ID NO: 2581777 - RNA, 19 nt, Artificial Sequence
  Description of Artificial Sequence: Synthetic oligonucleotide
gggaguagcuaugguuuag

SEQ ID NO: 2581778 - RNA, 19 nt, Artificial Sequence
  Description of Artificial Sequence: Synthetic oligonucleotide
acagacccguugagugggc

SEQ ID NO: 2581779 - RNA, 19 nt, Artificial Sequence
  Description of Artificial Sequence: Synthetic oligonucleotide
gcccucaaucuaaggaagg

SEQ ID NO: 2581780 - RNA, 19 nt, Artificial Sequence
  Description of Artificial Sequence: Synthetic oligonucleotide
gaucacgcgaaggcacaga

SEQ ID NO: 2581781 - RNA, 19 nt, Artificial Sequence
  Description of Artificial Sequence: Synthetic oligonucleotide
aggcacagacccguugagu

SEQ ID NO: 2581782 - RNA, 19 nt, Artificial Sequence
  Description of Artificial Sequence: Synthetic oligonucleotide
aggcgcucagaagggaaca

SEQ ID NO: 2581783 - RNA, 19 nt, Artificial Sequence
  Description of Artificial Sequence: Synthetic oligonucleotide
agcagaguuaaggcagcua

SEQ ID NO: 2581784 - RNA, 19 nt, Artificial Sequence
  Description of Artificial Sequence: Synthetic oligonucleotide
cuacaucgcuaagaaugca

SEQ ID NO: 2581785 - RNA, 19 nt, Artificial Sequence
  Description of Artificial Sequence: Synthetic oligonucleotide
ggcaccaccuuucaauuau

SEQ ID NO: 2581786 - RNA, 19 nt, Artificial Sequence
  Description of Artificial Sequence: Synthetic oligonucleotide
  modified_base (19)..(19): a, c, u, g, unknown or other
gagaagcugugugccggcn

SEQ ID NO: 2581787 - RNA, 19 nt, Artificial Sequence
  Description of Artificial Sequence: Synthetic oligonucleotide
acgaggccugcuacuugac

SEQ ID NO: 2581788 - RNA, 19 nt, Artificial Sequence
  Description of Artificial Sequence: Synthetic oligonucleotide
gacagucacggagggaggu

SEQ ID NO: 2581789 - RNA, 19 nt, Artificial Sequence
  Description of Artificial Sequence: Synthetic oligonucleotide
cugcuacuugacuacaguu

SEQ ID NO: 2581790 - RNA, 19 nt, Artificial Sequence
  Description of Artificial Sequence: Synthetic oligonucleotide
gguuuggaaggcacagaca

SEQ ID NO: 2581791 - RNA, 19 nt, Artificial Sequence
  Description of Artificial Sequence: Synthetic oligonucleotide
ggacagucacggagggagg

SEQ ID NO: 2581792 - RNA, 19 nt, Artificial Sequence
  Description of Artificial Sequence: Synthetic oligonucleotide
ggaggggagcugugcaaac

SEQ ID NO: 2581793 - RNA, 19 nt, Artificial Sequence
  Description of Artificial Sequence: Synthetic oligonucleotide
ggaaguggacagucacgga

SEQ ID NO: 2581794 - RNA, 19 nt, Artificial Sequence
  Description of Artificial Sequence: Synthetic oligonucleotide
ugccaaguucuggccauuu

SEQ ID NO: 2581795 - RNA, 19 nt, Artificial Sequence
  Description of Artificial Sequence: Synthetic oligonucleotide
acgcgaaggcacagacccg

SEQ ID NO: 2581796 - RNA, 19 nt, Artificial Sequence
  Description of Artificial Sequence: Synthetic oligonucleotide
gcuccaaggugcugccuac

SEQ ID NO: 2581797 - RNA, 19 nt, Artificial Sequence
  Description of Artificial Sequence: Synthetic oligonucleotide
gggagguugcagcccacuc

SEQ ID NO: 2581798 - RNA, 19 nt, Artificial Sequence
  Description of Artificial Sequence: Synthetic oligonucleotide
agggaacauuuaagcccuc

SEQ ID NO: 2581799 - RNA, 19 nt, Artificial Sequence
  Description of Artificial Sequence: Synthetic oligonucleotide
  modified_base (8)..(8): a, c, u, g, unknown or other
ugccggcnccuucucugua

SEQ ID NO: 2581800 - RNA, 19 nt, Artificial Sequence
  Description of Artificial Sequence: Synthetic oligonucleotide
aggcacagacagauuggaa

SEQ ID NO: 2581801 - RNA, 19 nt, Artificial Sequence
  Description of Artificial Sequence: Synthetic oligonucleotide
acagucacggagggagguu

SEQ ID NO: 2581802 - RNA, 19 nt, Artificial Sequence
  Description of Artificial Sequence: Synthetic oligonucleotide
gccugcuacuugacuacag

SEQ ID NO: 2581803 - RNA, 19 nt, Artificial Sequence
  Description of Artificial Sequence: Synthetic oligonucleotide
acccguugagugggcucgg

SEQ ID NO: 2581804 - RNA, 19 nt, Artificial Sequence
  Description of Artificial Sequence: Synthetic oligonucleotide
caauggcaccaccuuucaa

SEQ ID NO: 2581805 - RNA, 19 nt, Artificial Sequence
  Description of Artificial Sequence: Synthetic oligonucleotide
cuuuggggaggggagcugu

SEQ ID NO: 2581806 - RNA, 19 nt, Artificial Sequence
  Description of Artificial Sequence: Synthetic oligonucleotide
gcccagguguuuauaauua

SEQ ID NO: 2581807 - RNA, 19 nt, Artificial Sequence
  Description of Artificial Sequence: Synthetic oligonucleotide
gucacggagggagguugca

SEQ ID NO: 2581808 - RNA, 19 nt, Artificial Sequence
  Description of Artificial Sequence: Synthetic oligonucleotide
gggcuugggaguagcuaug

SEQ ID NO: 2581809 - RNA, 19 nt, Artificial Sequence
  Description of Artificial Sequence: Synthetic oligonucleotide
cuagggcuugggaguagcu

SEQ ID NO: 2581810 - RNA, 19 nt, Artificial Sequence
  Description of Artificial Sequence: Synthetic oligonucleotide
gagcagaguuaaggcagcu

SEQ ID NO: 2581811 - RNA, 19 nt, Artificial Sequence
  Description of Artificial Sequence: Synthetic oligonucleotide
cccucaaucuaaggaagga

SEQ ID NO: 2581812 - RNA, 19 nt, Artificial Sequence
  Description of Artificial Sequence: Synthetic oligonucleotide
gagggagguugcagcccac

SEQ ID NO: 2581813 - RNA, 19 nt, Artificial Sequence
  Description of Artificial Sequence: Synthetic oligonucleotide
guguaacauuuugcuaagu

SEQ ID NO: 2581814 - RNA, 19 nt, Artificial Sequence
  Description of Artificial Sequence: Synthetic oligonucleotide
cguugagugggcucgguua

SEQ ID NO: 2581815 - RNA, 19 nt, Artificial Sequence
  Description of Artificial Sequence: Synthetic oligonucleotide
guggacagucacggaggga

SEQ ID NO: 2581816 - RNA, 19 nt, Artificial Sequence
  Description of Artificial Sequence: Synthetic oligonucleotide
cagcccacucaggagcaga

SEQ ID NO: 2581817 - RNA, 19 nt, Artificial Sequence
  Description of Artificial Sequence: Synthetic oligonucleotide
ggcucgguuacagucugua

SEQ ID NO: 2581818 - RNA, 19 nt, Artificial Sequence
  Description of Artificial Sequence: Synthetic oligonucleotide
gguuuaggcauggcuccaa

SEQ ID NO: 2581819 - RNA, 19 nt, Artificial Sequence
  Description of Artificial Sequence: Synthetic oligonucleotide
gggaggggagcugugcaaa

SEQ ID NO: 2581820 - RNA, 19 nt, Artificial Sequence
  Description of Artificial Sequence: Synthetic oligonucleotide
cuccaaggugcugccuaca

SEQ ID NO: 2581821 - RNA, 19 nt, Artificial Sequence
  Description of Artificial Sequence: Synthetic oligonucleotide
cagcccagguguuuauaau

SEQ ID NO: 2581822 - RNA, 19 nt, Artificial Sequence
  Description of Artificial Sequence: Synthetic oligonucleotide
ccugcuacuugacuacagu

SEQ ID NO: 2581823 - RNA, 19 nt, Artificial Sequence
  Description of Artificial Sequence: Synthetic oligonucleotide
  modified_base (9)..(9): a, c, u, g, unknown or other
gugccggcnccuucucugu

SEQ ID NO: 2581824 - RNA, 19 nt, Artificial Sequence
  Description of Artificial Sequence: Synthetic oligonucleotide
ccacucaggagcagaguua

SEQ ID NO: 2581825 - RNA, 19 nt, Artificial Sequence
  Description of Artificial Sequence: Synthetic oligonucleotide
gagacacacgaggccugcu

SEQ ID NO: 2581826 - RNA, 19 nt, Artificial Sequence
  Description of Artificial Sequence: Synthetic oligonucleotide
gcaaggcgcucagaaggga

SEQ ID NO: 2581827 - RNA, 19 nt, Artificial Sequence
  Description of Artificial Sequence: Synthetic oligonucleotide
ggugcugccuacaccacuu

SEQ ID NO: 2581828 - RNA, 19 nt, Artificial Sequence
  Description of Artificial Sequence: Synthetic oligonucleotide
  modified_base (11)..(11): a, c, u, g, unknown or other
gugugccggcnccuucucu

SEQ ID NO: 2581829 - RNA, 19 nt, Artificial Sequence
  Description of Artificial Sequence: Synthetic oligonucleotide
gcuugggaguagcuauggu

SEQ ID NO: 2581830 - RNA, 19 nt, Artificial Sequence
  Description of Artificial Sequence: Synthetic oligonucleotide
cuacaccacuuuggacaga

SEQ ID NO: 2581831 - RNA, 19 nt, Artificial Sequence
  Description of Artificial Sequence: Synthetic oligonucleotide
gccuucaacuaaacagacu

SEQ ID NO: 2581832 - RNA, 19 nt, Artificial Sequence
  Description of Artificial Sequence: Synthetic oligonucleotide
ggccugcuacuugacuaca

SEQ ID NO: 2581833 - RNA, 19 nt, Artificial Sequence
  Description of Artificial Sequence: Synthetic oligonucleotide
cacacgaggccugcuacuu

SEQ ID NO: 2581834 - RNA, 19 nt, Artificial Sequence
  Description of Artificial Sequence: Synthetic oligonucleotide
ggcuuuggggaggggagcu

SEQ ID NO: 2581835 - RNA, 19 nt, Artificial Sequence
  Description of Artificial Sequence: Synthetic oligonucleotide
  modified_base (6)..(6): a, c, u, g, unknown or other
ccggcnccuucucuguaga

SEQ ID NO: 2581836 - RNA, 19 nt, Artificial Sequence
  Description of Artificial Sequence: Synthetic oligonucleotide
ggacagagcuugggagcca

SEQ ID NO: 2581837 - RNA, 19 nt, Artificial Sequence
  Description of Artificial Sequence: Synthetic oligonucleotide
  modified_base (5)..(5): a, c, u, g, unknown or other
cggcnccuucucuguagac

SEQ ID NO: 2581838 - RNA, 19 nt, Artificial Sequence
  Description of Artificial Sequence: Synthetic oligonucleotide
gcugcaccccagcccaggu

SEQ ID NO: 2581839 - RNA, 19 nt, Artificial Sequence
  Description of Artificial Sequence: Synthetic oligonucleotide
cgggcuguuguauuccuau

SEQ ID NO: 2581840 - RNA, 19 nt, Artificial Sequence
  Description of Artificial Sequence: Synthetic oligonucleotide
ggcgcucagaagggaacau

SEQ ID NO: 2581841 - RNA, 19 nt, Artificial Sequence
  Description of Artificial Sequence: Synthetic oligonucleotide
gcuggacuagaagcauaau

SEQ ID NO: 2581842 - RNA, 19 nt, Artificial Sequence
  Description of Artificial Sequence: Synthetic oligonucleotide
cgcgaaggcacagacccgu

SEQ ID NO: 2581843 - RNA, 19 nt, Artificial Sequence
  Description of Artificial Sequence: Synthetic oligonucleotide
gcccacucaggagcagagu

SEQ ID NO: 2581844 - RNA, 19 nt, Artificial Sequence
  Description of Artificial Sequence: Synthetic oligonucleotide
cgaggccugcuacuugacu

SEQ ID NO: 2581845 - RNA, 19 nt, Artificial Sequence
  Description of Artificial Sequence: Synthetic oligonucleotide
ccguugagugggcucgguu

SEQ ID NO: 2581846 - RNA, 19 nt, Artificial Sequence
  Description of Artificial Sequence: Synthetic oligonucleotide
gcgaaggcacagacccguu

SEQ ID NO: 2581847 - RNA, 19 nt, Artificial Sequence
  Description of Artificial Sequence: Synthetic oligonucleotide
cccguugagugggcucggu

SEQ ID NO: 2581848 - RNA, 19 nt, Artificial Sequence
  Description of Artificial Sequence: Synthetic oligonucleotide
uugaauuugucauucagcc

SEQ ID NO: 2581849 - RNA, 19 nt, Artificial Sequence
  Description of Artificial Sequence: Synthetic oligonucleotide
uguuuuaaguacaaagggc

SEQ ID NO: 2581850 - RNA, 19 nt, Artificial Sequence
  Description of Artificial Sequence: Synthetic oligonucleotide
aguacaaagggcuugggag

SEQ ID NO: 2581851 - RNA, 19 nt, Artificial Sequence
  Description of Artificial Sequence: Synthetic oligonucleotide
gaauuugucauucagccac

SEQ ID NO: 2581852 - RNA, 19 nt, Artificial Sequence
  Description of Artificial Sequence: Synthetic oligonucleotide
aucccaauagcccagaguc

SEQ ID NO: 2581853 - RNA, 19 nt, Artificial Sequence
  Description of Artificial Sequence: Synthetic oligonucleotide
guuacuggaagcuagcugc

SEQ ID NO: 2581854 - RNA, 19 nt, Artificial Sequence
  Description of Artificial Sequence: Synthetic oligonucleotide
gaugcagagaaguuacugg

SEQ ID NO: 2581855 - RNA, 19 nt, Artificial Sequence
  Description of Artificial Sequence: Synthetic oligonucleotide
auuggggaaguccaggccc

SEQ ID NO: 2581856 - RNA, 19 nt, Artificial Sequence
  Description of Artificial Sequence: Synthetic oligonucleotide
cuguuuuaaguacaaaggg

SEQ ID NO: 2581857 - RNA, 19 nt, Artificial Sequence
  Description of Artificial Sequence: Synthetic oligonucleotide
aaggcauccaggcacuugg

SEQ ID NO: 2581858 - RNA, 19 nt, Artificial Sequence
  Description of Artificial Sequence: Synthetic oligonucleotide
uggcccaucaauuaaguag

SEQ ID NO: 2581859 - RNA, 19 nt, Artificial Sequence
  Description of Artificial Sequence: Synthetic oligonucleotide
ugcaaaagugaucuugucc

SEQ ID NO: 2581860 - RNA, 19 nt, Artificial Sequence
  Description of Artificial Sequence: Synthetic oligonucleotide
uacuuguuaccccacgugg

SEQ ID NO: 2581861 - RNA, 19 nt, Artificial Sequence
  Description of Artificial Sequence: Synthetic oligonucleotide
caugauuucuguuccagcc

SEQ ID NO: 2581862 - RNA, 19 nt, Artificial Sequence
  Description of Artificial Sequence: Synthetic oligonucleotide
cuggcuucggucauaaucg

SEQ ID NO: 2581863 - RNA, 19 nt, Artificial Sequence
  Description of Artificial Sequence: Synthetic oligonucleotide
cauuugaugcugaucaagg

SEQ ID NO: 2581864 - RNA, 19 nt, Artificial Sequence
  Description of Artificial Sequence: Synthetic oligonucleotide
uuugaugcugaucaaggac

SEQ ID NO: 2581865 - RNA, 19 nt, Artificial Sequence
  Description of Artificial Sequence: Synthetic oligonucleotide
uucuguuccagccuuggag

SEQ ID NO: 2581866 - RNA, 19 nt, Artificial Sequence
  Description of Artificial Sequence: Synthetic oligonucleotide
cuucaagugaucugggagg

SEQ ID NO: 2581867 - RNA, 19 nt, Artificial Sequence
  Description of Artificial Sequence: Synthetic oligonucleotide
caaaccauggcgauguccc

SEQ ID NO: 2581868 - RNA, 19 nt, Artificial Sequence
  Description of Artificial Sequence: Synthetic oligonucleotide
ucauagacgaggaaaucug

SEQ ID NO: 2581869 - RNA, 19 nt, Artificial Sequence
  Description of Artificial Sequence: Synthetic oligonucleotide
gaggaaaucugcaaaagug

SEQ ID NO: 2581870 - RNA, 19 nt, Artificial Sequence
  Description of Artificial Sequence: Synthetic oligonucleotide
gaagcuagcugcaaggucc

SEQ ID NO: 2581871 - RNA, 19 nt, Artificial Sequence
  Description of Artificial Sequence: Synthetic oligonucleotide
uuccguuucucaaagucag

SEQ ID NO: 2581872 - RNA, 19 nt, Artificial Sequence
  Description of Artificial Sequence: Synthetic oligonucleotide
agagcuucaagugaucugg

SEQ ID NO: 2581873 - RNA, 19 nt, Artificial Sequence
  Description of Artificial Sequence: Synthetic oligonucleotide
agugugcccaucugaaugc

SEQ ID NO: 2581874 - RNA, 19 nt, Artificial Sequence
  Description of Artificial Sequence: Synthetic oligonucleotide
aagcgguuagucuucaugu

SEQ ID NO: 2581875 - RNA, 19 nt, Artificial Sequence
  Description of Artificial Sequence: Synthetic oligonucleotide
uuaaguacaaagggcuugg

SEQ ID NO: 2581876 - RNA, 19 nt, Artificial Sequence
  Description of Artificial Sequence: Synthetic oligonucleotide
ucggucauaaucgggagcg

SEQ ID NO: 2581877 - RNA, 19 nt, Artificial Sequence
  Description of Artificial Sequence: Synthetic oligonucleotide
agauuggggaaguccaggc

SEQ ID NO: 2581878 - RNA, 19 nt, Artificial Sequence
  Description of Artificial Sequence: Synthetic oligonucleotide
gcaaaagugaucuuguccc

SEQ ID NO: 2581879 - RNA, 19 nt, Artificial Sequence
  Description of Artificial Sequence: Synthetic oligonucleotide
auagguugugcuugcggcc

SEQ ID NO: 2581880 - RNA, 19 nt, Artificial Sequence
  Description of Artificial Sequence: Synthetic oligonucleotide
uuuaaguacaaagggcuug

SEQ ID NO: 2581881 - RNA, 19 nt, Artificial Sequence
  Description of Artificial Sequence: Synthetic oligonucleotide
ugcuucuccaaaaugucca

SEQ ID NO: 2581882 - RNA, 19 nt, Artificial Sequence
  Description of Artificial Sequence: Synthetic oligonucleotide
uccacggauaucccaauag

SEQ ID NO: 2581883 - RNA, 19 nt, Artificial Sequence
  Description of Artificial Sequence: Synthetic oligonucleotide
ccuguuuuaaguacaaagg

SEQ ID NO: 2581884 - RNA, 19 nt, Artificial Sequence
  Description of Artificial Sequence: Synthetic oligonucleotide
cauagguugugcuugcggc

SEQ ID NO: 2581885 - RNA, 19 nt, Artificial Sequence
  Description of Artificial Sequence: Synthetic oligonucleotide
gaucaaggacaucauagac

SEQ ID NO: 2581886 - RNA, 19 nt, Artificial Sequence
  Description of Artificial Sequence: Synthetic oligonucleotide
uuugucauucagccacugg

SEQ ID NO: 2581887 - RNA, 19 nt, Artificial Sequence
  Description of Artificial Sequence: Synthetic oligonucleotide
guacaaagggcuugggagg

SEQ ID NO: 2581888 - RNA, 19 nt, Artificial Sequence
  Description of Artificial Sequence: Synthetic oligonucleotide
aagguccuacuuguuaccc

SEQ ID NO: 2581889 - RNA, 19 nt, Artificial Sequence
  Description of Artificial Sequence: Synthetic oligonucleotide
ucggaguagagcuucaagu

SEQ ID NO: 2581890 - RNA, 19 nt, Artificial Sequence
  Description of Artificial Sequence: Synthetic oligonucleotide
aagugaucuuguccccugc

SEQ ID NO: 2581891 - RNA, 19 nt, Artificial Sequence
  Description of Artificial Sequence: Synthetic oligonucleotide
acgggcaugauuucuguuc

SEQ ID NO: 2581892 - RNA, 19 nt, Artificial Sequence
  Description of Artificial Sequence: Synthetic oligonucleotide
ucugggugaccuuguaugg

SEQ ID NO: 2581893 - RNA, 19 nt, Artificial Sequence
  Description of Artificial Sequence: Synthetic oligonucleotide
cacaaagucccucagguuc

SEQ ID NO: 2581894 - RNA, 19 nt, Artificial Sequence
  Description of Artificial Sequence: Synthetic oligonucleotide
gagugugcccaucugaaug

SEQ ID NO: 2581895 - RNA, 19 nt, Artificial Sequence
  Description of Artificial Sequence: Synthetic oligonucleotide
aaagugaucuuguccccug

SEQ ID NO: 2581896 - RNA, 19 nt, Artificial Sequence
  Description of Artificial Sequence: Synthetic oligonucleotide
cacggauaucccaauagcc

SEQ ID NO: 2581897 - RNA, 19 nt, Artificial Sequence
  Description of Artificial Sequence: Synthetic oligonucleotide
ucuguuccagccuuggaga

SEQ ID NO: 2581898 - RNA, 19 nt, Artificial Sequence
  Description of Artificial Sequence: Synthetic oligonucleotide
aaguacaaagggcuuggga

SEQ ID NO: 2581899 - RNA, 19 nt, Artificial Sequence
  Description of Artificial Sequence: Synthetic oligonucleotide
aaaccauggcgaugucccc

SEQ ID NO: 2581900 - RNA, 19 nt, Artificial Sequence
  Description of Artificial Sequence: Synthetic oligonucleotide
gaagcgguuagucuucaug

SEQ ID NO: 2581901 - RNA, 19 nt, Artificial Sequence
  Description of Artificial Sequence: Synthetic oligonucleotide
uguauggcccaucaauuaa

SEQ ID NO: 2581902 - RNA, 19 nt, Artificial Sequence
  Description of Artificial Sequence: Synthetic oligonucleotide
uccauaaccugcuucucca

SEQ ID NO: 2581903 - RNA, 19 nt, Artificial Sequence
  Description of Artificial Sequence: Synthetic oligonucleotide
acauagguugugcuugcgg

SEQ ID NO: 2581904 - RNA, 19 nt, Artificial Sequence
  Description of Artificial Sequence: Synthetic oligonucleotide
agaaguuacuggaagcuag

SEQ ID NO: 2581905 - RNA, 19 nt, Artificial Sequence
  Description of Artificial Sequence: Synthetic oligonucleotide
aguuacuggaagcuagcug

SEQ ID NO: 2581906 - RNA, 19 nt, Artificial Sequence
  Description of Artificial Sequence: Synthetic oligonucleotide
uucgggaaggcauccaggc

SEQ ID NO: 2581907 - RNA, 19 nt, Artificial Sequence
  Description of Artificial Sequence: Synthetic oligonucleotide
gccuguuuuaaguacaaag

SEQ ID NO: 2581908 - RNA, 19 nt, Artificial Sequence
  Description of Artificial Sequence: Synthetic oligonucleotide
cuggaagcuagcugcaagg

SEQ ID NO: 2581909 - RNA, 19 nt, Artificial Sequence
  Description of Artificial Sequence: Synthetic oligonucleotide
ugaauuugucauucagcca

SEQ ID NO: 2581910 - RNA, 19 nt, Artificial Sequence
  Description of Artificial Sequence: Synthetic oligonucleotide
uucucuucauagcuugucu

SEQ ID NO: 2581911 - RNA, 19 nt, Artificial Sequence
  Description of Artificial Sequence: Synthetic oligonucleotide
ugaugcagagaaguuacug

SEQ ID NO: 2581912 - RNA, 19 nt, Artificial Sequence
  Description of Artificial Sequence: Synthetic oligonucleotide
cauagacgaggaaaucugc

SEQ ID NO: 2581913 - RNA, 19 nt, Artificial Sequence
  Description of Artificial Sequence: Synthetic oligonucleotide
aucauagacgaggaaaucu

SEQ ID NO: 2581914 - RNA, 19 nt, Artificial Sequence
  Description of Artificial Sequence: Synthetic oligonucleotide
aacccucuccucuucuguc

SEQ ID NO: 2581915 - RNA, 19 nt, Artificial Sequence
  Description of Artificial Sequence: Synthetic oligonucleotide
augcagagaaguuacugga

SEQ ID NO: 2581916 - RNA, 19 nt, Artificial Sequence
  Description of Artificial Sequence: Synthetic oligonucleotide
uuuuaaguacaaagggcuu

SEQ ID NO: 2581917 - RNA, 19 nt, Artificial Sequence
  Description of Artificial Sequence: Synthetic oligonucleotide
augcugaucaaggacauca

SEQ ID NO: 2581918 - RNA, 19 nt, Artificial Sequence
  Description of Artificial Sequence: Synthetic oligonucleotide
auuugaugcugaucaagga

SEQ ID NO: 2581919 - RNA, 19 nt, Artificial Sequence
  Description of Artificial Sequence: Synthetic oligonucleotide
acuuguuaccccacguggc

SEQ ID NO: 2581920 - RNA, 19 nt, Artificial Sequence
  Description of Artificial Sequence: Synthetic oligonucleotide
acuggaagcuagcugcaag

SEQ ID NO: 2581921 - RNA, 19 nt, Artificial Sequence
  Description of Artificial Sequence: Synthetic oligonucleotide
guuuuaaguacaaagggcu

SEQ ID NO: 2581922 - RNA, 19 nt, Artificial Sequence
  Description of Artificial Sequence: Synthetic oligonucleotide
agguccuacuuguuacccc

SEQ ID NO: 2581923 - RNA, 19 nt, Artificial Sequence
  Description of Artificial Sequence: Synthetic oligonucleotide
aagguagcgcagaauggcg

SEQ ID NO: 2581924 - RNA, 19 nt, Artificial Sequence
  Description of Artificial Sequence: Synthetic oligonucleotide
cuuguuaccccacguggcc

SEQ ID NO: 2581925 - RNA, 19 nt, Artificial Sequence
  Description of Artificial Sequence: Synthetic oligonucleotide
agagaaguuacuggaagcu

SEQ ID NO: 2581926 - RNA, 19 nt, Artificial Sequence
  Description of Artificial Sequence: Synthetic oligonucleotide
aaccugcuucuccaaaaug

SEQ ID NO: 2581927 - RNA, 19 nt, Artificial Sequence
  Description of Artificial Sequence: Synthetic oligonucleotide
ugggugaccuuguauggcc

SEQ ID NO: 2581928 - RNA, 19 nt, Artificial Sequence
  Description of Artificial Sequence: Synthetic oligonucleotide
aaaagugaucuuguccccu

SEQ ID NO: 2581929 - RNA, 19 nt, Artificial Sequence
  Description of Artificial Sequence: Synthetic oligonucleotide
uauggcccaucaauuaagu

SEQ ID NO: 2581930 - RNA, 19 nt, Artificial Sequence
  Description of Artificial Sequence: Synthetic oligonucleotide
uaucccaauagcccagagu

SEQ ID NO: 2581931 - RNA, 19 nt, Artificial Sequence
  Description of Artificial Sequence: Synthetic oligonucleotide
gauuggggaaguccaggcc

SEQ ID NO: 2581932 - RNA, 19 nt, Artificial Sequence
  Description of Artificial Sequence: Synthetic oligonucleotide
agaauggcguugcucuggg

SEQ ID NO: 2581933 - RNA, 19 nt, Artificial Sequence
  Description of Artificial Sequence: Synthetic oligonucleotide
caagguagcgcagaauggc

SEQ ID NO: 2581934 - RNA, 19 nt, Artificial Sequence
  Description of Artificial Sequence: Synthetic oligonucleotide
uucaagugaucugggaggc

SEQ ID NO: 2581935 - RNA, 19 nt, Artificial Sequence
  Description of Artificial Sequence: Synthetic oligonucleotide
caaaagugaucuugucccc

SEQ ID NO: 2581936 - RNA, 19 nt, Artificial Sequence
  Description of Artificial Sequence: Synthetic oligonucleotide
gcuucaagugaucugggag

SEQ ID NO: 2581937 - RNA, 19 nt, Artificial Sequence
  Description of Artificial Sequence: Synthetic oligonucleotide
caagugaucugggaggccc

SEQ ID NO: 2581938 - RNA, 19 nt, Artificial Sequence
  Description of Artificial Sequence: Synthetic oligonucleotide
aagaacucuggcuuccguu

SEQ ID NO: 2581939 - RNA, 19 nt, Artificial Sequence
  Description of Artificial Sequence: Synthetic oligonucleotide
aagucccucagguucggga

SEQ ID NO: 2581940 - RNA, 19 nt, Artificial Sequence
  Description of Artificial Sequence: Synthetic oligonucleotide
uucggucauaaucgggagc

SEQ ID NO: 2581941 - RNA, 19 nt, Artificial Sequence
  Description of Artificial Sequence: Synthetic oligonucleotide
uagacgaggaaaucugcaa

SEQ ID NO: 2581942 - RNA, 19 nt, Artificial Sequence
  Description of Artificial Sequence: Synthetic oligonucleotide
ucucuucauagcuugucuc

SEQ ID NO: 2581943 - RNA, 19 nt, Artificial Sequence
  Description of Artificial Sequence: Synthetic oligonucleotide
aggaaaucugcaaaaguga

SEQ ID NO: 2581944 - RNA, 19 nt, Artificial Sequence
  Description of Artificial Sequence: Synthetic oligonucleotide
ugauuucuguuccagccuu

SEQ ID NO: 2581945 - RNA, 19 nt, Artificial Sequence
  Description of Artificial Sequence: Synthetic oligonucleotide
augauuucuguuccagccu

SEQ ID NO: 2581946 - RNA, 19 nt, Artificial Sequence
  Description of Artificial Sequence: Synthetic oligonucleotide
caauagcccagagucacgg

SEQ ID NO: 2581947 - RNA, 19 nt, Artificial Sequence
  Description of Artificial Sequence: Synthetic oligonucleotide
auaaccugcuucuccaaaa

SEQ ID NO: 2581948 - RNA, 19 nt, Artificial Sequence
  Description of Artificial Sequence: Synthetic oligonucleotide
ggcccaucaauuaaguagg

SEQ ID NO: 2581949 - RNA, 19 nt, Artificial Sequence
  Description of Artificial Sequence: Synthetic oligonucleotide
agcugcaagguccuacuug

SEQ ID NO: 2581950 - RNA, 19 nt, Artificial Sequence
  Description of Artificial Sequence: Synthetic oligonucleotide
acaaagucccucagguucg

SEQ ID NO: 2581951 - RNA, 19 nt, Artificial Sequence
  Description of Artificial Sequence: Synthetic oligonucleotide
uggcuuccguuucucaaag

SEQ ID NO: 2581952 - RNA, 19 nt, Artificial Sequence
  Description of Artificial Sequence: Synthetic oligonucleotide
gauguccccaggaacucgg

SEQ ID NO: 2581953 - RNA, 19 nt, Artificial Sequence
  Description of Artificial Sequence: Synthetic oligonucleotide
gcuugaauuugucauucag

SEQ ID NO: 2581954 - RNA, 19 nt, Artificial Sequence
  Description of Artificial Sequence: Synthetic oligonucleotide
ugcaagguccuacuuguua

SEQ ID NO: 2581955 - RNA, 19 nt, Artificial Sequence
  Description of Artificial Sequence: Synthetic oligonucleotide
ugugcccaucugaaugcgg

SEQ ID NO: 2581956 - RNA, 19 nt, Artificial Sequence
  Description of Artificial Sequence: Synthetic oligonucleotide
gaaguuacuggaagcuagc

SEQ ID NO: 2581957 - RNA, 19 nt, Artificial Sequence
  Description of Artificial Sequence: Synthetic oligonucleotide
uccguuucucaaagucagg

SEQ ID NO: 2581958 - RNA, 19 nt, Artificial Sequence
  Description of Artificial Sequence: Synthetic oligonucleotide
ucauaaucgggagcguccc

SEQ ID NO: 2581959 - RNA, 19 nt, Artificial Sequence
  Description of Artificial Sequence: Synthetic oligonucleotide
agagucacgggcaugauuu

SEQ ID NO: 2581960 - RNA, 19 nt, Artificial Sequence
  Description of Artificial Sequence: Synthetic oligonucleotide
auuucuguuccagccuugg

SEQ ID NO: 2581961 - RNA, 19 nt, Artificial Sequence
  Description of Artificial Sequence: Synthetic oligonucleotide
gaaaucugcaaaagugauc

SEQ ID NO: 2581962 - RNA, 19 nt, Artificial Sequence
  Description of Artificial Sequence: Synthetic oligonucleotide
ugcagagaaguuacuggaa

SEQ ID NO: 2581963 - RNA, 19 nt, Artificial Sequence
  Description of Artificial Sequence: Synthetic oligonucleotide
agacgaggaaaucugcaaa

SEQ ID NO: 2581964 - RNA, 19 nt, Artificial Sequence
  Description of Artificial Sequence: Synthetic oligonucleotide
agccuuggagacugcaguc

SEQ ID NO: 2581965 - RNA, 19 nt, Artificial Sequence
  Description of Artificial Sequence: Synthetic oligonucleotide
gacgaggaaaucugcaaaa

SEQ ID NO: 2581966 - RNA, 19 nt, Artificial Sequence
  Description of Artificial Sequence: Synthetic oligonucleotide
uuguauggcccaucaauua

SEQ ID NO: 2581967 - RNA, 19 nt, Artificial Sequence
  Description of Artificial Sequence: Synthetic oligonucleotide
uuacuggaagcuagcugca

SEQ ID NO: 2581968 - RNA, 19 nt, Artificial Sequence
  Description of Artificial Sequence: Synthetic oligonucleotide
ugaugcugaucaaggacau

SEQ ID NO: 2581969 - RNA, 19 nt, Artificial Sequence
  Description of Artificial Sequence: Synthetic oligonucleotide
guccauaaccugcuucucc

SEQ ID NO: 2581970 - RNA, 19 nt, Artificial Sequence
  Description of Artificial Sequence: Synthetic oligonucleotide
accugcuucuccaaaaugu

SEQ ID NO: 2581971 - RNA, 19 nt, Artificial Sequence
  Description of Artificial Sequence: Synthetic oligonucleotide
caagguccuacuuguuacc

SEQ ID NO: 2581972 - RNA, 19 nt, Artificial Sequence
  Description of Artificial Sequence: Synthetic oligonucleotide
uaaccugcuucuccaaaau

SEQ ID NO: 2581973 - RNA, 19 nt, Artificial Sequence
  Description of Artificial Sequence: Synthetic oligonucleotide
cuuccguuucucaaaguca

SEQ ID NO: 2581974 - RNA, 19 nt, Artificial Sequence
  Description of Artificial Sequence: Synthetic oligonucleotide
aaguuacuggaagcuagcu

SEQ ID NO: 2581975 - RNA, 19 nt, Artificial Sequence
  Description of Artificial Sequence: Synthetic oligonucleotide
cuucggucauaaucgggag

SEQ ID NO: 2581976 - RNA, 19 nt, Artificial Sequence
  Description of Artificial Sequence: Synthetic oligonucleotide
aucugggaggcccuucaag

SEQ ID NO: 2581977 - RNA, 19 nt, Artificial Sequence
  Description of Artificial Sequence: Synthetic oligonucleotide
uaaguacaaagggcuuggg

SEQ ID NO: 2581978 - RNA, 19 nt, Artificial Sequence
  Description of Artificial Sequence: Synthetic oligonucleotide
guauggcccaucaauuaag

SEQ ID NO: 2581979 - RNA, 19 nt, Artificial Sequence
  Description of Artificial Sequence: Synthetic oligonucleotide
ugggaggcccuucaagaac

SEQ ID NO: 2581980 - RNA, 19 nt, Artificial Sequence
  Description of Artificial Sequence: Synthetic oligonucleotide
acaucauagacgaggaaau

SEQ ID NO: 2581981 - RNA, 19 nt, Artificial Sequence
  Description of Artificial Sequence: Synthetic oligonucleotide
uguccccaggaacucggag

SEQ ID NO: 2581982 - RNA, 19 nt, Artificial Sequence
  Description of Artificial Sequence: Synthetic oligonucleotide
ucagguucgggaaggcauc

SEQ ID NO: 2581983 - RNA, 19 nt, Artificial Sequence
  Description of Artificial Sequence: Synthetic oligonucleotide
agcuugucucuguguauuc

SEQ ID NO: 2581984 - RNA, 19 nt, Artificial Sequence
  Description of Artificial Sequence: Synthetic oligonucleotide
ucuucugucuccccacaua

SEQ ID NO: 2581985 - RNA, 19 nt, Artificial Sequence
  Description of Artificial Sequence: Synthetic oligonucleotide
uagcccagagucacgggca

SEQ ID NO: 2581986 - RNA, 19 nt, Artificial Sequence
  Description of Artificial Sequence: Synthetic oligonucleotide
uggcuucggucauaaucgg

SEQ ID NO: 2581987 - RNA, 19 nt, Artificial Sequence
  Description of Artificial Sequence: Synthetic oligonucleotide
acgaggaaaucugcaaaag

SEQ ID NO: 2581988 - RNA, 19 nt, Artificial Sequence
  Description of Artificial Sequence: Synthetic oligonucleotide
uguuaccccacguggccug

SEQ ID NO: 2581989 - RNA, 19 nt, Artificial Sequence
  Description of Artificial Sequence: Synthetic oligonucleotide
gguuagucuucauguaggc

SEQ ID NO: 2581990 - RNA, 19 nt, Artificial Sequence
  Description of Artificial Sequence: Synthetic oligonucleotide
cucggaguagagcuucaag

SEQ ID NO: 2581991 - RNA, 19 nt, Artificial Sequence
  Description of Artificial Sequence: Synthetic oligonucleotide
gugcccaucugaaugcggg

SEQ ID NO: 2581992 - RNA, 19 nt, Artificial Sequence
  Description of Artificial Sequence: Synthetic oligonucleotide
ucccaauagcccagaguca

SEQ ID NO: 2581993 - RNA, 19 nt, Artificial Sequence
  Description of Artificial Sequence: Synthetic oligonucleotide
uuggggaaguccaggccca

SEQ ID NO: 2581994 - RNA, 19 nt, Artificial Sequence
  Description of Artificial Sequence: Synthetic oligonucleotide
guuccagccuuggagacug

SEQ ID NO: 2581995 - RNA, 19 nt, Artificial Sequence
  Description of Artificial Sequence: Synthetic oligonucleotide
uuucuguuccagccuugga

SEQ ID NO: 2581996 - RNA, 19 nt, Artificial Sequence
  Description of Artificial Sequence: Synthetic oligonucleotide
uccccaggaacucggagua

SEQ ID NO: 2581997 - RNA, 19 nt, Artificial Sequence
  Description of Artificial Sequence: Synthetic oligonucleotide
uggcguaucucuucucuuc

SEQ ID NO: 2581998 - RNA, 19 nt, Artificial Sequence
  Description of Artificial Sequence: Synthetic oligonucleotide
auagacgaggaaaucugca

SEQ ID NO: 2581999 - RNA, 19 nt, Artificial Sequence
  Description of Artificial Sequence: Synthetic oligonucleotide
auaucccaauagcccagag

SEQ ID NO: 2582000 - RNA, 19 nt, Artificial Sequence
  Description of Artificial Sequence: Synthetic oligonucleotide
gcaagguccuacuuguuac

SEQ ID NO: 2582001 - RNA, 19 nt, Artificial Sequence
  Description of Artificial Sequence: Synthetic oligonucleotide
uagcagagugugcccaucu

SEQ ID NO: 2582002 - RNA, 19 nt, Artificial Sequence
  Description of Artificial Sequence: Synthetic oligonucleotide
cuugcggccaagguagcgc

SEQ ID NO: 2582003 - RNA, 19 nt, Artificial Sequence
  Description of Artificial Sequence: Synthetic oligonucleotide
uggcgauguccccaggaac

SEQ ID NO: 2582004 - RNA, 19 nt, Artificial Sequence
  Description of Artificial Sequence: Synthetic oligonucleotide
aaccauggcgaugucccca

SEQ ID NO: 2582005 - RNA, 19 nt, Artificial Sequence
  Description of Artificial Sequence: Synthetic oligonucleotide
accauggcgauguccccag

SEQ ID NO: 2582006 - RNA, 19 nt, Artificial Sequence
  Description of Artificial Sequence: Synthetic oligonucleotide
gcgguuagucuucauguag

SEQ ID NO: 2582007 - RNA, 19 nt, Artificial Sequence
  Description of Artificial Sequence: Synthetic oligonucleotide
ugaaugcggguguccauaa

SEQ ID NO: 2582008 - RNA, 19 nt, Artificial Sequence
  Description of Artificial Sequence: Synthetic oligonucleotide
agcuucaagugaucuggga

SEQ ID NO: 2582009 - RNA, 19 nt, Artificial Sequence
  Description of Artificial Sequence: Synthetic oligonucleotide
ggaguagagcuucaaguga

SEQ ID NO: 2582010 - RNA, 19 nt, Artificial Sequence
  Description of Artificial Sequence: Synthetic oligonucleotide
ucccucagguucgggaagg

SEQ ID NO: 2582011 - RNA, 19 nt, Artificial Sequence
  Description of Artificial Sequence: Synthetic oligonucleotide
aguagagcuucaagugauc

SEQ ID NO: 2582012 - RNA, 19 nt, Artificial Sequence
  Description of Artificial Sequence: Synthetic oligonucleotide
gaccuuguauggcccauca

SEQ ID NO: 2582013 - RNA, 19 nt, Artificial Sequence
  Description of Artificial Sequence: Synthetic oligonucleotide
agucccucagguucgggaa

SEQ ID NO: 2582014 - RNA, 19 nt, Artificial Sequence
  Description of Artificial Sequence: Synthetic oligonucleotide
guucgggaaggcauccagg

SEQ ID NO: 2582015 - RNA, 19 nt, Artificial Sequence
  Description of Artificial Sequence: Synthetic oligonucleotide
uggaagcuagcugcaaggu

SEQ ID NO: 2582016 - RNA, 19 nt, Artificial Sequence
  Description of Artificial Sequence: Synthetic oligonucleotide
ggcuguagcagagugugcc

SEQ ID NO: 2582017 - RNA, 19 nt, Artificial Sequence
  Description of Artificial Sequence: Synthetic oligonucleotide
uggccuguuuuaaguacaa

SEQ ID NO: 2582018 - RNA, 19 nt, Artificial Sequence
  Description of Artificial Sequence: Synthetic oligonucleotide
ucacgggcaugauuucugu

SEQ ID NO: 2582019 - RNA, 19 nt, Artificial Sequence
  Description of Artificial Sequence: Synthetic oligonucleotide
aaagucccucagguucggg

SEQ ID NO: 2582020 - RNA, 19 nt, Artificial Sequence
  Description of Artificial Sequence: Synthetic oligonucleotide
gagcuucaagugaucuggg

SEQ ID NO: 2582021 - RNA, 19 nt, Artificial Sequence
  Description of Artificial Sequence: Synthetic oligonucleotide
gguucgggaaggcauccag

SEQ ID NO: 2582022 - RNA, 19 nt, Artificial Sequence
  Description of Artificial Sequence: Synthetic oligonucleotide
ccaagguagcgcagaaugg

SEQ ID NO: 2582023 - RNA, 19 nt, Artificial Sequence
  Description of Artificial Sequence: Synthetic oligonucleotide
agcuugaauuugucauuca

SEQ ID NO: 2582024 - RNA, 19 nt, Artificial Sequence
  Description of Artificial Sequence: Synthetic oligonucleotide
agcagagugugcccaucug

SEQ ID NO: 2582025 - RNA, 19 nt, Artificial Sequence
  Description of Artificial Sequence: Synthetic oligonucleotide
cuucucuucauagcuuguc

SEQ ID NO: 2582026 - RNA, 19 nt, Artificial Sequence
  Description of Artificial Sequence: Synthetic oligonucleotide
gauuucuguuccagccuug

SEQ ID NO: 2582027 - RNA, 19 nt, Artificial Sequence
  Description of Artificial Sequence: Synthetic oligonucleotide
cuguuccagccuuggagac

SEQ ID NO: 2582028 - RNA, 19 nt, Artificial Sequence
  Description of Artificial Sequence: Synthetic oligonucleotide
aucugaaugcgggugucca

SEQ ID NO: 2582029 - RNA, 19 nt, Artificial Sequence
  Description of Artificial Sequence: Synthetic oligonucleotide
uguagcagagugugcccau

SEQ ID NO: 2582030 - RNA, 19 nt, Artificial Sequence
  Description of Artificial Sequence: Synthetic oligonucleotide
uccccacauagguugugcu

SEQ ID NO: 2582031 - RNA, 19 nt, Artificial Sequence
  Description of Artificial Sequence: Synthetic oligonucleotide
gguccuacuuguuacccca

SEQ ID NO: 2582032 - RNA, 19 nt, Artificial Sequence
  Description of Artificial Sequence: Synthetic oligonucleotide
cugcaaaagugaucuuguc

SEQ ID NO: 2582033 - RNA, 19 nt, Artificial Sequence
  Description of Artificial Sequence: Synthetic oligonucleotide
guuagucuucauguaggca

SEQ ID NO: 2582034 - RNA, 19 nt, Artificial Sequence
  Description of Artificial Sequence: Synthetic oligonucleotide
cauaaucgggagcgucccc

SEQ ID NO: 2582035 - RNA, 19 nt, Artificial Sequence
  Description of Artificial Sequence: Synthetic oligonucleotide
auggcgauguccccaggaa

SEQ ID NO: 2582036 - RNA, 19 nt, Artificial Sequence
  Description of Artificial Sequence: Synthetic oligonucleotide
ggcaugauuucuguuccag

SEQ ID NO: 2582037 - RNA, 19 nt, Artificial Sequence
  Description of Artificial Sequence: Synthetic oligonucleotide
ucugaaugcggguguccau

SEQ ID NO: 2582038 - RNA, 19 nt, Artificial Sequence
  Description of Artificial Sequence: Synthetic oligonucleotide
auuugucauucagccacug

SEQ ID NO: 2582039 - RNA, 19 nt, Artificial Sequence
  Description of Artificial Sequence: Synthetic oligonucleotide
aggcccuucaagaacucug

SEQ ID NO: 2582040 - RNA, 19 nt, Artificial Sequence
  Description of Artificial Sequence: Synthetic oligonucleotide
uagcuugucucuguguauu

SEQ ID NO: 2582041 - RNA, 19 nt, Artificial Sequence
  Description of Artificial Sequence: Synthetic oligonucleotide
gucacgggcaugauuucug

SEQ ID NO: 2582042 - RNA, 19 nt, Artificial Sequence
  Description of Artificial Sequence: Synthetic oligonucleotide
gcaugauuucuguuccagc

SEQ ID NO: 2582043 - RNA, 19 nt, Artificial Sequence
  Description of Artificial Sequence: Synthetic oligonucleotide
caucauagacgaggaaauc

SEQ ID NO: 2582044 - RNA, 19 nt, Artificial Sequence
  Description of Artificial Sequence: Synthetic oligonucleotide
agagugugcccaucugaau

SEQ ID NO: 2582045 - RNA, 19 nt, Artificial Sequence
  Description of Artificial Sequence: Synthetic oligonucleotide
cgguuagucuucauguagg

SEQ ID NO: 2582046 - RNA, 19 nt, Artificial Sequence
  Description of Artificial Sequence: Synthetic oligonucleotide
cugggugaccuuguauggc

SEQ ID NO: 2582047 - RNA, 19 nt, Artificial Sequence
  Description of Artificial Sequence: Synthetic oligonucleotide
uagcgcagaauggcguugc

SEQ ID NO: 2582048 - RNA, 19 nt, Artificial Sequence
  Description of Artificial Sequence: Synthetic oligonucleotide
ucaagugaucugggaggcc

SEQ ID NO: 2582049 - RNA, 19 nt, Artificial Sequence
  Description of Artificial Sequence: Synthetic oligonucleotide
uuguuaccccacguggccu

SEQ ID NO: 2582050 - RNA, 19 nt, Artificial Sequence
  Description of Artificial Sequence: Synthetic oligonucleotide
acccucuccucuucugucu

SEQ ID NO: 2582051 - RNA, 19 nt, Artificial Sequence
  Description of Artificial Sequence: Synthetic oligonucleotide
cagagugugcccaucugaa

SEQ ID NO: 2582052 - RNA, 19 nt, Artificial Sequence
  Description of Artificial Sequence: Synthetic oligonucleotide
ccacggauaucccaauagc

SEQ ID NO: 2582053 - RNA, 19 nt, Artificial Sequence
  Description of Artificial Sequence: Synthetic oligonucleotide
uguuccagccuuggagacu

SEQ ID NO: 2582054 - RNA, 19 nt, Artificial Sequence
  Description of Artificial Sequence: Synthetic oligonucleotide
cuuguauggcccaucaauu

SEQ ID NO: 2582055 - RNA, 19 nt, Artificial Sequence
  Description of Artificial Sequence: Synthetic oligonucleotide
caucugaaugcgggugucc

SEQ ID NO: 2582056 - RNA, 19 nt, Artificial Sequence
  Description of Artificial Sequence: Synthetic oligonucleotide
gcccaguccacggauaucc

SEQ ID NO: 2582057 - RNA, 19 nt, Artificial Sequence
  Description of Artificial Sequence: Synthetic oligonucleotide
gaaugcggguguccauaac

SEQ ID NO: 2582058 - RNA, 19 nt, Artificial Sequence
  Description of Artificial Sequence: Synthetic oligonucleotide
agucacgggcaugauuucu

SEQ ID NO: 2582059 - RNA, 19 nt, Artificial Sequence
  Description of Artificial Sequence: Synthetic oligonucleotide
uggcccaguccacggauau

SEQ ID NO: 2582060 - RNA, 19 nt, Artificial Sequence
  Description of Artificial Sequence: Synthetic oligonucleotide
ugcccaucugaaugcgggu

SEQ ID NO: 2582061 - RNA, 19 nt, Artificial Sequence
  Description of Artificial Sequence: Synthetic oligonucleotide
gagaaguuacuggaagcua

SEQ ID NO: 2582062 - RNA, 19 nt, Artificial Sequence
  Description of Artificial Sequence: Synthetic oligonucleotide
ggcccuucaagaacucugg

SEQ ID NO: 2582063 - RNA, 19 nt, Artificial Sequence
  Description of Artificial Sequence: Synthetic oligonucleotide
cggaguagagcuucaagug

SEQ ID NO: 2582064 - RNA, 19 nt, Artificial Sequence
  Description of Artificial Sequence: Synthetic oligonucleotide
agcgguuagucuucaugua

SEQ ID NO: 2582065 - RNA, 19 nt, Artificial Sequence
  Description of Artificial Sequence: Synthetic oligonucleotide
aagcuagcugcaagguccu

SEQ ID NO: 2582066 - RNA, 19 nt, Artificial Sequence
  Description of Artificial Sequence: Synthetic oligonucleotide
ccugcuucuccaaaauguc

SEQ ID NO: 2582067 - RNA, 19 nt, Artificial Sequence
  Description of Artificial Sequence: Synthetic oligonucleotide
gcuucggucauaaucggga

SEQ ID NO: 2582068 - RNA, 19 nt, Artificial Sequence
  Description of Artificial Sequence: Synthetic oligonucleotide
caguccacggauaucccaa

SEQ ID NO: 2582069 - RNA, 19 nt, Artificial Sequence
  Description of Artificial Sequence: Synthetic oligonucleotide
ggaagcuagcugcaagguc

SEQ ID NO: 2582070 - RNA, 19 nt, Artificial Sequence
  Description of Artificial Sequence: Synthetic oligonucleotide
gaguagagcuucaagugau

SEQ ID NO: 2582071 - RNA, 19 nt, Artificial Sequence
  Description of Artificial Sequence: Synthetic oligonucleotide
cauaaccugcuucuccaaa

SEQ ID NO: 2582072 - RNA, 19 nt, Artificial Sequence
  Description of Artificial Sequence: Synthetic oligonucleotide
agucagggcuguagcagag

SEQ ID NO: 2582073 - RNA, 19 nt, Artificial Sequence
  Description of Artificial Sequence: Synthetic oligonucleotide
cacauagguugugcuugcg

SEQ ID NO: 2582074 - RNA, 19 nt, Artificial Sequence
  Description of Artificial Sequence: Synthetic oligonucleotide
auggcccaucaauuaagua

SEQ ID NO: 2582075 - RNA, 19 nt, Artificial Sequence
  Description of Artificial Sequence: Synthetic oligonucleotide
aagugaucugggaggcccu

SEQ ID NO: 2582076 - RNA, 19 nt, Artificial Sequence
  Description of Artificial Sequence: Synthetic oligonucleotide
uccagccuuggagacugca

SEQ ID NO: 2582077 - RNA, 19 nt, Artificial Sequence
  Description of Artificial Sequence: Synthetic oligonucleotide
cauggcgauguccccagga

SEQ ID NO: 2582078 - RNA, 19 nt, Artificial Sequence
  Description of Artificial Sequence: Synthetic oligonucleotide
ugcggccaagguagcgcag

SEQ ID NO: 2582079 - RNA, 19 nt, Artificial Sequence
  Description of Artificial Sequence: Synthetic oligonucleotide
acgaacccucuccucuucu

SEQ ID NO: 2582080 - RNA, 19 nt, Artificial Sequence
  Description of Artificial Sequence: Synthetic oligonucleotide
guggccuguuuuaaguaca

SEQ ID NO: 2582081 - RNA, 19 nt, Artificial Sequence
  Description of Artificial Sequence: Synthetic oligonucleotide
gugugcccaucugaaugcg

SEQ ID NO: 2582082 - RNA, 19 nt, Artificial Sequence
  Description of Artificial Sequence: Synthetic oligonucleotide
auggcguaucucuucucuu

SEQ ID NO: 2582083 - RNA, 19 nt, Artificial Sequence
  Description of Artificial Sequence: Synthetic oligonucleotide
uguccauaaccugcuucuc

SEQ ID NO: 2582084 - RNA, 19 nt, Artificial Sequence
  Description of Artificial Sequence: Synthetic oligonucleotide
cuggcuuccguuucucaaa

SEQ ID NO: 2582085 - RNA, 19 nt, Artificial Sequence
  Description of Artificial Sequence: Synthetic oligonucleotide
guagagcuucaagugaucu

SEQ ID NO: 2582086 - RNA, 19 nt, Artificial Sequence
  Description of Artificial Sequence: Synthetic oligonucleotide
cccacauagguugugcuug

SEQ ID NO: 2582087 - RNA, 19 nt, Artificial Sequence
  Description of Artificial Sequence: Synthetic oligonucleotide
cccaauagcccagagucac

SEQ ID NO: 2582088 - RNA, 19 nt, Artificial Sequence
  Description of Artificial Sequence: Synthetic oligonucleotide
caaagucccucagguucgg

SEQ ID NO: 2582089 - RNA, 19 nt, Artificial Sequence
  Description of Artificial Sequence: Synthetic oligonucleotide
cucagguucgggaaggcau

SEQ ID NO: 2582090 - RNA, 19 nt, Artificial Sequence
  Description of Artificial Sequence: Synthetic oligonucleotide
gccacaaagucccucaggu

SEQ ID NO: 2582091 - RNA, 19 nt, Artificial Sequence
  Description of Artificial Sequence: Synthetic oligonucleotide
acguggccuguuuuaagua

SEQ ID NO: 2582092 - RNA, 19 nt, Artificial Sequence
  Description of Artificial Sequence: Synthetic oligonucleotide
ggcauccaggcacuugggc

SEQ ID NO: 2582093 - RNA, 19 nt, Artificial Sequence
  Description of Artificial Sequence: Synthetic oligonucleotide
gcuguagcagagugugccc

SEQ ID NO: 2582094 - RNA, 19 nt, Artificial Sequence
  Description of Artificial Sequence: Synthetic oligonucleotide
uggcguggcccaguccacg

SEQ ID NO: 2582095 - RNA, 19 nt, Artificial Sequence
  Description of Artificial Sequence: Synthetic oligonucleotide
caggcggauggcguggccc

SEQ ID NO: 2582096 - RNA, 19 nt, Artificial Sequence
  Description of Artificial Sequence: Synthetic oligonucleotide
gaacccucuccucuucugu

SEQ ID NO: 2582097 - RNA, 19 nt, Artificial Sequence
  Description of Artificial Sequence: Synthetic oligonucleotide
gcagagugugcccaucuga

SEQ ID NO: 2582098 - RNA, 19 nt, Artificial Sequence
  Description of Artificial Sequence: Synthetic oligonucleotide
cauggcguaucucuucucu

SEQ ID NO: 2582099 - RNA, 19 nt, Artificial Sequence
  Description of Artificial Sequence: Synthetic oligonucleotide
gcaaaccauggcgaugucc

SEQ ID NO: 2582100 - RNA, 19 nt, Artificial Sequence
  Description of Artificial Sequence: Synthetic oligonucleotide
aguccacggauaucccaau

SEQ ID NO: 2582101 - RNA, 19 nt, Artificial Sequence
  Description of Artificial Sequence: Synthetic oligonucleotide
ccuuggagacugcagucag

SEQ ID NO: 2582102 - RNA, 19 nt, Artificial Sequence
  Description of Artificial Sequence: Synthetic oligonucleotide
gcugcaagguccuacuugu

SEQ ID NO: 2582103 - RNA, 19 nt, Artificial Sequence
  Description of Artificial Sequence: Synthetic oligonucleotide
agcaggcggauggcguggc

SEQ ID NO: 2582104 - RNA, 19 nt, Artificial Sequence
  Description of Artificial Sequence: Synthetic oligonucleotide
agguagcgcagaauggcgu

SEQ ID NO: 2582105 - RNA, 19 nt, Artificial Sequence
  Description of Artificial Sequence: Synthetic oligonucleotide
aggcggauggcguggccca

SEQ ID NO: 2582106 - RNA, 19 nt, Artificial Sequence
  Description of Artificial Sequence: Synthetic oligonucleotide
cacacgaacccucuccucu

SEQ ID NO: 2582107 - RNA, 19 nt, Artificial Sequence
  Description of Artificial Sequence: Synthetic oligonucleotide
gagucacgggcaugauuuc

SEQ ID NO: 2582108 - RNA, 19 nt, Artificial Sequence
  Description of Artificial Sequence: Synthetic oligonucleotide
cagguucgggaaggcaucc

SEQ ID NO: 2582109 - RNA, 19 nt, Artificial Sequence
  Description of Artificial Sequence: Synthetic oligonucleotide
acacgaacccucuccucuu

SEQ ID NO: 2582110 - RNA, 19 nt, Artificial Sequence
  Description of Artificial Sequence: Synthetic oligonucleotide
cuagcugcaagguccuacu

SEQ ID NO: 2582111 - RNA, 19 nt, Artificial Sequence
  Description of Artificial Sequence: Synthetic oligonucleotide
ccaauagcccagagucacg

SEQ ID NO: 2582112 - RNA, 19 nt, Artificial Sequence
  Description of Artificial Sequence: Synthetic oligonucleotide
ggcguaucucuucucuuca

SEQ ID NO: 2582113 - RNA, 19 nt, Artificial Sequence
  Description of Artificial Sequence: Synthetic oligonucleotide
gaugcugaucaaggacauc

SEQ ID NO: 2582114 - RNA, 19 nt, Artificial Sequence
  Description of Artificial Sequence: Synthetic oligonucleotide
cacguggccuguuuuaagu

SEQ ID NO: 2582115 - RNA, 19 nt, Artificial Sequence
  Description of Artificial Sequence: Synthetic oligonucleotide
ggcuucggucauaaucggg

SEQ ID NO: 2582116 - RNA, 19 nt, Artificial Sequence
  Description of Artificial Sequence: Synthetic oligonucleotide
guccccaggaacucggagu

SEQ ID NO: 2582117 - RNA, 19 nt, Artificial Sequence
  Description of Artificial Sequence: Synthetic oligonucleotide
cuucauagcuugucucugu

SEQ ID NO: 2582118 - RNA, 19 nt, Artificial Sequence
  Description of Artificial Sequence: Synthetic oligonucleotide
uacuggaagcuagcugcaa

SEQ ID NO: 2582119 - RNA, 19 nt, Artificial Sequence
  Description of Artificial Sequence: Synthetic oligonucleotide
ggucauaaucgggagcguc

SEQ ID NO: 2582120 - RNA, 19 nt, Artificial Sequence
  Description of Artificial Sequence: Synthetic oligonucleotide
ugaccuuguauggcccauc

SEQ ID NO: 2582121 - RNA, 19 nt, Artificial Sequence
  Description of Artificial Sequence: Synthetic oligonucleotide
ggcguggcccaguccacgg

SEQ ID NO: 2582122 - RNA, 19 nt, Artificial Sequence
  Description of Artificial Sequence: Synthetic oligonucleotide
ccagccuuggagacugcag

SEQ ID NO: 2582123 - RNA, 19 nt, Artificial Sequence
  Description of Artificial Sequence: Synthetic oligonucleotide
accuuguauggcccaucaa

SEQ ID NO: 2582124 - RNA, 19 nt, Artificial Sequence
  Description of Artificial Sequence: Synthetic oligonucleotide
cugggaggcccuucaagaa

SEQ ID NO: 2582125 - RNA, 19 nt, Artificial Sequence
  Description of Artificial Sequence: Synthetic oligonucleotide
gcuagcugcaagguccuac

SEQ ID NO: 2582126 - RNA, 19 nt, Artificial Sequence
  Description of Artificial Sequence: Synthetic oligonucleotide
cuguagcagagugugccca

SEQ ID NO: 2582127 - RNA, 19 nt, Artificial Sequence
  Description of Artificial Sequence: Synthetic oligonucleotide
cgggcaugauuucuguucc

SEQ ID NO: 2582128 - RNA, 19 nt, Artificial Sequence
  Description of Artificial Sequence: Synthetic oligonucleotide
ccacauagguugugcuugc

SEQ ID NO: 2582129 - RNA, 19 nt, Artificial Sequence
  Description of Artificial Sequence: Synthetic oligonucleotide
ugcaaaccauggcgauguc

SEQ ID NO: 2582130 - RNA, 19 nt, Artificial Sequence
  Description of Artificial Sequence: Synthetic oligonucleotide
ggaaaucugcaaaagugau

SEQ ID NO: 2582131 - RNA, 19 nt, Artificial Sequence
  Description of Artificial Sequence: Synthetic oligonucleotide
cguggccuguuuuaaguac

SEQ ID NO: 2582132 - RNA, 19 nt, Artificial Sequence
  Description of Artificial Sequence: Synthetic oligonucleotide
gaucugggaggcccuucaa

SEQ ID NO: 2582133 - RNA, 19 nt, Artificial Sequence
  Description of Artificial Sequence: Synthetic oligonucleotide
cacgaacccucuccucuuc

SEQ ID NO: 2582134 - RNA, 19 nt, Artificial Sequence
  Description of Artificial Sequence: Synthetic oligonucleotide
aggcauccaggcacuuggg

SEQ ID NO: 2582135 - RNA, 19 nt, Artificial Sequence
  Description of Artificial Sequence: Synthetic oligonucleotide
agcgcagaauggcguugcu

SEQ ID NO: 2582136 - RNA, 19 nt, Artificial Sequence
  Description of Artificial Sequence: Synthetic oligonucleotide
ggugaccuuguauggccca

SEQ ID NO: 2582137 - RNA, 19 nt, Artificial Sequence
  Description of Artificial Sequence: Synthetic oligonucleotide
cugaaugcggguguccaua

SEQ ID NO: 2582138 - RNA, 19 nt, Artificial Sequence
  Description of Artificial Sequence: Synthetic oligonucleotide
auggcguggcccaguccac

SEQ ID NO: 2582139 - RNA, 19 nt, Artificial Sequence
  Description of Artificial Sequence: Synthetic oligonucleotide
uggggaaguccaggcccag

SEQ ID NO: 2582140 - RNA, 19 nt, Artificial Sequence
  Description of Artificial Sequence: Synthetic oligonucleotide
cagccuuggagacugcagu

SEQ ID NO: 2582141 - RNA, 19 nt, Artificial Sequence
  Description of Artificial Sequence: Synthetic oligonucleotide
uaccccacguggccuguuu

SEQ ID NO: 2582142 - RNA, 19 nt, Artificial Sequence
  Description of Artificial Sequence: Synthetic oligonucleotide
guagcagagugugcccauc

SEQ ID NO: 2582143 - RNA, 19 nt, Artificial Sequence
  Description of Artificial Sequence: Synthetic oligonucleotide
gcccuucaagaacucuggc

SEQ ID NO: 2582144 - RNA, 19 nt, Artificial Sequence
  Description of Artificial Sequence: Synthetic oligonucleotide
uuccagccuuggagacugc

SEQ ID NO: 2582145 - RNA, 19 nt, Artificial Sequence
  Description of Artificial Sequence: Synthetic oligonucleotide
gcuugcggccaagguagcg

SEQ ID NO: 2582146 - RNA, 19 nt, Artificial Sequence
  Description of Artificial Sequence: Synthetic oligonucleotide
gcccaucugaaugcgggug

SEQ ID NO: 2582147 - RNA, 19 nt, Artificial Sequence
  Description of Artificial Sequence: Synthetic oligonucleotide
ccacguggccuguuuuaag

SEQ ID NO: 2582148 - RNA, 19 nt, Artificial Sequence
  Description of Artificial Sequence: Synthetic oligonucleotide
ggcgauguccccaggaacu

SEQ ID NO: 2582149 - RNA, 19 nt, Artificial Sequence
  Description of Artificial Sequence: Synthetic oligonucleotide
gggugaccuuguauggccc

SEQ ID NO: 2582150 - RNA, 19 nt, Artificial Sequence
  Description of Artificial Sequence: Synthetic oligonucleotide
guccacggauaucccaaua

SEQ ID NO: 2582151 - RNA, 19 nt, Artificial Sequence
  Description of Artificial Sequence: Synthetic oligonucleotide
ccugcaaaccauggcgaug

SEQ ID NO: 2582152 - RNA, 19 nt, Artificial Sequence
  Description of Artificial Sequence: Synthetic oligonucleotide
accccacguggccuguuuu

SEQ ID NO: 2582153 - RNA, 19 nt, Artificial Sequence
  Description of Artificial Sequence: Synthetic oligonucleotide
guccuacuuguuaccccac

SEQ ID NO: 2582154 - RNA, 19 nt, Artificial Sequence
  Description of Artificial Sequence: Synthetic oligonucleotide
agguucgggaaggcaucca

SEQ ID NO: 2582155 - RNA, 19 nt, Artificial Sequence
  Description of Artificial Sequence: Synthetic oligonucleotide
cgcagaauggcguugcucu

SEQ ID NO: 2582156 - RNA, 19 nt, Artificial Sequence
  Description of Artificial Sequence: Synthetic oligonucleotide
agugaucugggaggcccuu

SEQ ID NO: 2582157 - RNA, 19 nt, Artificial Sequence
  Description of Artificial Sequence: Synthetic oligonucleotide
caagaacucuggcuuccgu

SEQ ID NO: 2582158 - RNA, 19 nt, Artificial Sequence
  Description of Artificial Sequence: Synthetic oligonucleotide
gccuuggagacugcaguca

SEQ ID NO: 2582159 - RNA, 19 nt, Artificial Sequence
  Description of Artificial Sequence: Synthetic oligonucleotide
gugaucugggaggcccuuc

SEQ ID NO: 2582160 - RNA, 19 nt, Artificial Sequence
  Description of Artificial Sequence: Synthetic oligonucleotide
ggauggcguggcccagucc

SEQ ID NO: 2582161 - RNA, 19 nt, Artificial Sequence
  Description of Artificial Sequence: Synthetic oligonucleotide
cccuucaagaacucuggcu

SEQ ID NO: 2582162 - RNA, 19 nt, Artificial Sequence
  Description of Artificial Sequence: Synthetic oligonucleotide
gggaggcccuucaagaacu

SEQ ID NO: 2582163 - RNA, 19 nt, Artificial Sequence
  Description of Artificial Sequence: Synthetic oligonucleotide
gaauggcguugcucugggu

SEQ ID NO: 2582164 - RNA, 19 nt, Artificial Sequence
  Description of Artificial Sequence: Synthetic oligonucleotide
gaggcccuucaagaacucu

SEQ ID NO: 2582165 - RNA, 19 nt, Artificial Sequence
  Description of Artificial Sequence: Synthetic oligonucleotide
cccagagucacgggcauga

SEQ ID NO: 2582166 - RNA, 19 nt, Artificial Sequence
  Description of Artificial Sequence: Synthetic oligonucleotide
cagggcuguagcagagugu

SEQ ID NO: 2582167 - RNA, 19 nt, Artificial Sequence
  Description of Artificial Sequence: Synthetic oligonucleotide
ccccauggcguaucucuuc

SEQ ID NO: 2582168 - RNA, 19 nt, Artificial Sequence
  Description of Artificial Sequence: Synthetic oligonucleotide
cgaacccucuccucuucug

SEQ ID NO: 2582169 - RNA, 19 nt, Artificial Sequence
  Description of Artificial Sequence: Synthetic oligonucleotide
auguccccaggaacucgga

SEQ ID NO: 2582170 - RNA, 19 nt, Artificial Sequence
  Description of Artificial Sequence: Synthetic oligonucleotide
cgauguccccaggaacucg

SEQ ID NO: 2582171 - RNA, 19 nt, Artificial Sequence
  Description of Artificial Sequence: Synthetic oligonucleotide
cgaggaaaucugcaaaagu

SEQ ID NO: 2582172 - RNA, 19 nt, Artificial Sequence
  Description of Artificial Sequence: Synthetic oligonucleotide
ccaucugaaugcggguguc

SEQ ID NO: 2582173 - RNA, 19 nt, Artificial Sequence
  Description of Artificial Sequence: Synthetic oligonucleotide
ccauggcguaucucuucuc

SEQ ID NO: 2582174 - RNA, 19 nt, Artificial Sequence
  Description of Artificial Sequence: Synthetic oligonucleotide
cagagucacgggcaugauu

SEQ ID NO: 2582175 - RNA, 19 nt, Artificial Sequence
  Description of Artificial Sequence: Synthetic oligonucleotide
gcgauguccccaggaacuc

SEQ ID NO: 2582176 - RNA, 19 nt, Artificial Sequence
  Description of Artificial Sequence: Synthetic oligonucleotide
cucuucugucuccccacau

SEQ ID NO: 2582177 - RNA, 19 nt, Artificial Sequence
  Description of Artificial Sequence: Synthetic oligonucleotide
gcgcagaauggcguugcuc

SEQ ID NO: 2582178 - RNA, 19 nt, Artificial Sequence
  Description of Artificial Sequence: Synthetic oligonucleotide
ccauaaccugcuucuccaa

SEQ ID NO: 2582179 - RNA, 19 nt, Artificial Sequence
  Description of Artificial Sequence: Synthetic oligonucleotide
uuaccccacguggccuguu

SEQ ID NO: 2582180 - RNA, 19 nt, Artificial Sequence
  Description of Artificial Sequence: Synthetic oligonucleotide
gcaggcggauggcguggcc

SEQ ID NO: 2582181 - RNA, 19 nt, Artificial Sequence
  Description of Artificial Sequence: Synthetic oligonucleotide
ggccuguuuuaaguacaaa

SEQ ID NO: 2582182 - RNA, 19 nt, Artificial Sequence
  Description of Artificial Sequence: Synthetic oligonucleotide
ccauggcgauguccccagg

SEQ ID NO: 2582183 - RNA, 19 nt, Artificial Sequence
  Description of Artificial Sequence: Synthetic oligonucleotide
gcucugggugaccuuguau

SEQ ID NO: 2582184 - RNA, 19 nt, Artificial Sequence
  Description of Artificial Sequence: Synthetic oligonucleotide
gugaccuuguauggcccau

SEQ ID NO: 2582185 - RNA, 19 nt, Artificial Sequence
  Description of Artificial Sequence: Synthetic oligonucleotide
ggaggcccuucaagaacuc

SEQ ID NO: 2582186 - RNA, 19 nt, Artificial Sequence
  Description of Artificial Sequence: Synthetic oligonucleotide
ccucuucugucuccccaca

SEQ ID NO: 2582187 - RNA, 19 nt, Artificial Sequence
  Description of Artificial Sequence: Synthetic oligonucleotide
cccaucugaaugcgggugu

SEQ ID NO: 2582188 - RNA, 19 nt, Artificial Sequence
  Description of Artificial Sequence: Synthetic oligonucleotide
cccauggcguaucucuucu

SEQ ID NO: 2582189 - RNA, 19 nt, Artificial Sequence
  Description of Artificial Sequence: Synthetic oligonucleotide
cacgggcaugauuucuguu

SEQ ID NO: 2582190 - RNA, 19 nt, Artificial Sequence
  Description of Artificial Sequence: Synthetic oligonucleotide
guuaccccacguggccugu

SEQ ID NO: 2582191 - RNA, 19 nt, Artificial Sequence
  Description of Artificial Sequence: Synthetic oligonucleotide
ggcggauggcguggcccag

SEQ ID NO: 2582192 - RNA, 19 nt, Artificial Sequence
  Description of Artificial Sequence: Synthetic oligonucleotide
cccucagguucgggaaggc

SEQ ID NO: 2582193 - RNA, 19 nt, Artificial Sequence
  Description of Artificial Sequence: Synthetic oligonucleotide
ggcuuccguuucucaaagu

SEQ ID NO: 2582194 - RNA, 19 nt, Artificial Sequence
  Description of Artificial Sequence: Synthetic oligonucleotide
agcuagcugcaagguccua

SEQ ID NO: 2582195 - RNA, 19 nt, Artificial Sequence
  Description of Artificial Sequence: Synthetic oligonucleotide
gcguaucucuucucuucau

SEQ ID NO: 2582196 - RNA, 19 nt, Artificial Sequence
  Description of Artificial Sequence: Synthetic oligonucleotide
ccucagguucgggaaggca

SEQ ID NO: 2582197 - RNA, 19 nt, Artificial Sequence
  Description of Artificial Sequence: Synthetic oligonucleotide
agcgggccacaaagucccu

SEQ ID NO: 2582198 - RNA, 19 nt, Artificial Sequence
  Description of Artificial Sequence: Synthetic oligonucleotide
gcguggcccaguccacgga

SEQ ID NO: 2582199 - RNA, 19 nt, Artificial Sequence
  Description of Artificial Sequence: Synthetic oligonucleotide
cugcaagguccuacuuguu

SEQ ID NO: 2582200 - RNA, 19 nt, Artificial Sequence
  Description of Artificial Sequence: Synthetic oligonucleotide
gcccagagucacgggcaug

SEQ ID NO: 2582201 - RNA, 19 nt, Artificial Sequence
  Description of Artificial Sequence: Synthetic oligonucleotide
ggcccaguccacggauauc

SEQ ID NO: 2582202 - RNA, 19 nt, Artificial Sequence
  Description of Artificial Sequence: Synthetic oligonucleotide
cccacguggccuguuuuaa

SEQ ID NO: 2582203 - RNA, 19 nt, Artificial Sequence
  Description of Artificial Sequence: Synthetic oligonucleotide
ggaagcgguuagucuucau

SEQ ID NO: 2582204 - RNA, 19 nt, Artificial Sequence
  Description of Artificial Sequence: Synthetic oligonucleotide
cggauggcguggcccaguc

SEQ ID NO: 2582205 - RNA, 19 nt, Artificial Sequence
  Description of Artificial Sequence: Synthetic oligonucleotide
ccccacguggccuguuuua

SEQ ID NO: 2582206 - RNA, 19 nt, Artificial Sequence
  Description of Artificial Sequence: Synthetic oligonucleotide
ccacaaagucccucagguu

SEQ ID NO: 2582207 - RNA, 19 nt, Artificial Sequence
  Description of Artificial Sequence: Synthetic oligonucleotide
cggguguccauaaccugcu

SEQ ID NO: 2582208 - RNA, 19 nt, Artificial Sequence
  Description of Artificial Sequence: Synthetic oligonucleotide
ccccacauagguugugcuu

SEQ ID NO: 2582209 - RNA, 19 nt, Artificial Sequence
  Description of Artificial Sequence: Synthetic oligonucleotide
cccugcaaaccauggcgau

SEQ ID NO: 2582210 - RNA, 19 nt, Artificial Sequence
  Description of Artificial Sequence: Synthetic oligonucleotide
cacuggcuucggucauaau

SEQ ID NO: 2582211 - RNA, 19 nt, Artificial Sequence
  Description of Artificial Sequence: Synthetic oligonucleotide
cguggcccaguccacggau

SEQ ID NO: 2582212 - RNA, 19 nt, Artificial Sequence
  Description of Artificial Sequence: Synthetic oligonucleotide
gcggauggcguggcccagu

SEQ ID NO: 2582213 - RNA, 19 nt, Artificial Sequence
  Description of Artificial Sequence: Synthetic oligonucleotide
ccagagucacgggcaugau

SEQ ID NO: 2582214 - RNA, 19 nt, Artificial Sequence
  Description of Artificial Sequence: Synthetic oligonucleotide
cggucauaaucgggagcgu

SEQ ID NO: 2582215 - RNA, 19 nt, Artificial Sequence
  Description of Artificial Sequence: Synthetic oligonucleotide
aaaacaauaaucaagagug

SEQ ID NO: 2582216 - RNA, 19 nt, Artificial Sequence
  Description of Artificial Sequence: Synthetic oligonucleotide
uucauuauagcccagguug

SEQ ID NO: 2582217 - RNA, 19 nt, Artificial Sequence
  Description of Artificial Sequence: Synthetic oligonucleotide
uauuuuacaucuuacuugg

SEQ ID NO: 2582218 - RNA, 19 nt, Artificial Sequence
  Description of Artificial Sequence: Synthetic oligonucleotide
auauuaauauuuuacaucu

SEQ ID NO: 2582219 - RNA, 19 nt, Artificial Sequence
  Description of Artificial Sequence: Synthetic oligonucleotide
aaguugaucauaaaugucg

SEQ ID NO: 2582220 - RNA, 19 nt, Artificial Sequence
  Description of Artificial Sequence: Synthetic oligonucleotide
uaaucgaggaaucagaccu

SEQ ID NO: 2582221 - RNA, 19 nt, Artificial Sequence
  Description of Artificial Sequence: Synthetic oligonucleotide
aaauuucauaguuauacca

SEQ ID NO: 2582222 - RNA, 19 nt, Artificial Sequence
  Description of Artificial Sequence: Synthetic oligonucleotide
ucucuaaagaauaguaggg

SEQ ID NO: 2582223 - RNA, 19 nt, Artificial Sequence
  Description of Artificial Sequence: Synthetic oligonucleotide
aaugucgguucauauaaac

SEQ ID NO: 2582224 - RNA, 19 nt, Artificial Sequence
  Description of Artificial Sequence: Synthetic oligonucleotide
aauucauaugugcugauca

SEQ ID NO: 2582225 - RNA, 19 nt, Artificial Sequence
  Description of Artificial Sequence: Synthetic oligonucleotide
caucaaaugguaaaguugc

SEQ ID NO: 2582226 - RNA, 19 nt, Artificial Sequence
  Description of Artificial Sequence: Synthetic oligonucleotide
auauuuuacaucuuacuug

SEQ ID NO: 2582227 - RNA, 19 nt, Artificial Sequence
  Description of Artificial Sequence: Synthetic oligonucleotide
aauaaucaagagugcuugc

SEQ ID NO: 2582228 - RNA, 19 nt, Artificial Sequence
  Description of Artificial Sequence: Synthetic oligonucleotide
uaaaugucgguucauauaa

SEQ ID NO: 2582229 - RNA, 19 nt, Artificial Sequence
  Description of Artificial Sequence: Synthetic oligonucleotide
uauaccaguacauugcuga

SEQ ID NO: 2582230 - RNA, 19 nt, Artificial Sequence
  Description of Artificial Sequence: Synthetic oligonucleotide
auauaaaccagauuucuca

SEQ ID NO: 2582231 - RNA, 19 nt, Artificial Sequence
  Description of Artificial Sequence: Synthetic oligonucleotide
ucuaaagaauaguagggcc

SEQ ID NO: 2582232 - RNA, 19 nt, Artificial Sequence
  Description of Artificial Sequence: Synthetic oligonucleotide
ucauaauggcacaagcagg

SEQ ID NO: 2582233 - RNA, 19 nt, Artificial Sequence
  Description of Artificial Sequence: Synthetic oligonucleotide
uuuuaauuaaucgaggaau

SEQ ID NO: 2582234 - RNA, 19 nt, Artificial Sequence
  Description of Artificial Sequence: Synthetic oligonucleotide
agcaauuuuaauuaaucga

SEQ ID NO: 2582235 - RNA, 19 nt, Artificial Sequence
  Description of Artificial Sequence: Synthetic oligonucleotide
aauaguagggcccaguaua

SEQ ID NO: 2582236 - RNA, 19 nt, Artificial Sequence
  Description of Artificial Sequence: Synthetic oligonucleotide
aauuucauaguuauaccag

SEQ ID NO: 2582237 - RNA, 19 nt, Artificial Sequence
  Description of Artificial Sequence: Synthetic oligonucleotide
ugucgguucauauaaacca

SEQ ID NO: 2582238 - RNA, 19 nt, Artificial Sequence
  Description of Artificial Sequence: Synthetic oligonucleotide
uagucaaaaguccaucuag

SEQ ID NO: 2582239 - RNA, 19 nt, Artificial Sequence
  Description of Artificial Sequence: Synthetic oligonucleotide
aaaagaccagacaaugccc

SEQ ID NO: 2582240 - RNA, 19 nt, Artificial Sequence
  Description of Artificial Sequence: Synthetic oligonucleotide
agauuucucacacaaccac

SEQ ID NO: 2582241 - RNA, 19 nt, Artificial Sequence
  Description of Artificial Sequence: Synthetic oligonucleotide
aaaugguaaaguugcaaca

SEQ ID NO: 2582242 - RNA, 19 nt, Artificial Sequence
  Description of Artificial Sequence: Synthetic oligonucleotide
aguuauaccaguacauugc

SEQ ID NO: 2582243 - RNA, 19 nt, Artificial Sequence
  Description of Artificial Sequence: Synthetic oligonucleotide
aaaggcacaucucuaaaga

SEQ ID NO: 2582244 - RNA, 19 nt, Artificial Sequence
  Description of Artificial Sequence: Synthetic oligonucleotide
caaaagaccagacaaugcc

SEQ ID NO: 2582245 - RNA, 19 nt, Artificial Sequence
  Description of Artificial Sequence: Synthetic oligonucleotide
uccaucuagagaauuauac

SEQ ID NO: 2582246 - RNA, 19 nt, Artificial Sequence
  Description of Artificial Sequence: Synthetic oligonucleotide
caucuagagaauuauacug

SEQ ID NO: 2582247 - RNA, 19 nt, Artificial Sequence
  Description of Artificial Sequence: Synthetic oligonucleotide
aaugguaaaguugcaacag

SEQ ID NO: 2582248 - RNA, 19 nt, Artificial Sequence
  Description of Artificial Sequence: Synthetic oligonucleotide
aaagaccagacaaugcccc

SEQ ID NO: 2582249 - RNA, 19 nt, Artificial Sequence
  Description of Artificial Sequence: Synthetic oligonucleotide
cuaaagaauaguagggccc

SEQ ID NO: 2582250 - RNA, 19 nt, Artificial Sequence
  Description of Artificial Sequence: Synthetic oligonucleotide
uugacaaauggaaaggcac

SEQ ID NO: 2582251 - RNA, 19 nt, Artificial Sequence
  Description of Artificial Sequence: Synthetic oligonucleotide
uuuaauuaaucgaggaauc

SEQ ID NO: 2582252 - RNA, 19 nt, Artificial Sequence
  Description of Artificial Sequence: Synthetic oligonucleotide
uucaacauuuuguuucugg

SEQ ID NO: 2582253 - RNA, 19 nt, Artificial Sequence
  Description of Artificial Sequence: Synthetic oligonucleotide
ucauaguuauaccaguaca

SEQ ID NO: 2582254 - RNA, 19 nt, Artificial Sequence
  Description of Artificial Sequence: Synthetic oligonucleotide
ucaaaaguccaucuagaga

SEQ ID NO: 2582255 - RNA, 19 nt, Artificial Sequence
  Description of Artificial Sequence: Synthetic oligonucleotide
uguucuucauuauagccca

SEQ ID NO: 2582256 - RNA, 19 nt, Artificial Sequence
  Description of Artificial Sequence: Synthetic oligonucleotide
ugaucauaauggcacaagc

SEQ ID NO: 2582257 - RNA, 19 nt, Artificial Sequence
  Description of Artificial Sequence: Synthetic oligonucleotide
auaaucaagagugcuugcc

SEQ ID NO: 2582258 - RNA, 19 nt, Artificial Sequence
  Description of Artificial Sequence: Synthetic oligonucleotide
ucuagagaauuauacugcc

SEQ ID NO: 2582259 - RNA, 19 nt, Artificial Sequence
  Description of Artificial Sequence: Synthetic oligonucleotide
aucuagagaauuauacugc

SEQ ID NO: 2582260 - RNA, 19 nt, Artificial Sequence
  Description of Artificial Sequence: Synthetic oligonucleotide
uaguuauaccaguacauug

SEQ ID NO: 2582261 - RNA, 19 nt, Artificial Sequence
  Description of Artificial Sequence: Synthetic oligonucleotide
aacaauaaucaagagugcu

SEQ ID NO: 2582262 - RNA, 19 nt, Artificial Sequence
  Description of Artificial Sequence: Synthetic oligonucleotide
aggaaucagaccuguaaac

SEQ ID NO: 2582263 - RNA, 19 nt, Artificial Sequence
  Description of Artificial Sequence: Synthetic oligonucleotide
aaacaauaaucaagagugc

SEQ ID NO: 2582264 - RNA, 19 nt, Artificial Sequence
  Description of Artificial Sequence: Synthetic oligonucleotide
aaucagaccuguaaacaac

SEQ ID NO: 2582265 - RNA, 19 nt, Artificial Sequence
  Description of Artificial Sequence: Synthetic oligonucleotide
uuuacaucuuacuuggcuc

SEQ ID NO: 2582266 - RNA, 19 nt, Artificial Sequence
  Description of Artificial Sequence: Synthetic oligonucleotide
augguaaaguugcaacagc

SEQ ID NO: 2582267 - RNA, 19 nt, Artificial Sequence
  Description of Artificial Sequence: Synthetic oligonucleotide
uuucgugaguccaaaguug

SEQ ID NO: 2582268 - RNA, 19 nt, Artificial Sequence
  Description of Artificial Sequence: Synthetic oligonucleotide
ucauaugugcugaucauaa

SEQ ID NO: 2582269 - RNA, 19 nt, Artificial Sequence
  Description of Artificial Sequence: Synthetic oligonucleotide
aauuaaucgaggaaucaga

SEQ ID NO: 2582270 - RNA, 19 nt, Artificial Sequence
  Description of Artificial Sequence: Synthetic oligonucleotide
ugacauuucuagucaaaag

SEQ ID NO: 2582271 - RNA, 19 nt, Artificial Sequence
  Description of Artificial Sequence: Synthetic oligonucleotide
auuaaucgaggaaucagac

SEQ ID NO: 2582272 - RNA, 19 nt, Artificial Sequence
  Description of Artificial Sequence: Synthetic oligonucleotide
caguacauugcugagaaag

SEQ ID NO: 2582273 - RNA, 19 nt, Artificial Sequence
  Description of Artificial Sequence: Synthetic oligonucleotide
ugguaaaguugcaacagcu

SEQ ID NO: 2582274 - RNA, 19 nt, Artificial Sequence
  Description of Artificial Sequence: Synthetic oligonucleotide
uuaaucgaggaaucagacc

SEQ ID NO: 2582275 - RNA, 19 nt, Artificial Sequence
  Description of Artificial Sequence: Synthetic oligonucleotide
uauaaaccagauuucucac

SEQ ID NO: 2582276 - RNA, 19 nt, Artificial Sequence
  Description of Artificial Sequence: Synthetic oligonucleotide
gacauuucuagucaaaagu

SEQ ID NO: 2582277 - RNA, 19 nt, Artificial Sequence
  Description of Artificial Sequence: Synthetic oligonucleotide
ugacaaauggaaaggcaca

SEQ ID NO: 2582278 - RNA, 19 nt, Artificial Sequence
  Description of Artificial Sequence: Synthetic oligonucleotide
gauuuucuacuuucgugag

SEQ ID NO: 2582279 - RNA, 19 nt, Artificial Sequence
  Description of Artificial Sequence: Synthetic oligonucleotide
auuucauaguuauaccagu

SEQ ID NO: 2582280 - RNA, 19 nt, Artificial Sequence
  Description of Artificial Sequence: Synthetic oligonucleotide
ucuagucaaaaguccaucu

SEQ ID NO: 2582281 - RNA, 19 nt, Artificial Sequence
  Description of Artificial Sequence: Synthetic oligonucleotide
ugcaaaagaccagacaaug

SEQ ID NO: 2582282 - RNA, 19 nt, Artificial Sequence
  Description of Artificial Sequence: Synthetic oligonucleotide
uaauggcacaagcaggagc

SEQ ID NO: 2582283 - RNA, 19 nt, Artificial Sequence
  Description of Artificial Sequence: Synthetic oligonucleotide
uaaucaagagugcuugccu

SEQ ID NO: 2582284 - RNA, 19 nt, Artificial Sequence
  Description of Artificial Sequence: Synthetic oligonucleotide
aaaguugugucuguuucug

SEQ ID NO: 2582285 - RNA, 19 nt, Artificial Sequence
  Description of Artificial Sequence: Synthetic oligonucleotide
uucccagccagccuagccg

SEQ ID NO: 2582286 - RNA, 19 nt, Artificial Sequence
  Description of Artificial Sequence: Synthetic oligonucleotide
agccuuuccaaauucauau

SEQ ID NO: 2582287 - RNA, 19 nt, Artificial Sequence
  Description of Artificial Sequence: Synthetic oligonucleotide
agaccuguaaacaacccgg

SEQ ID NO: 2582288 - RNA, 19 nt, Artificial Sequence
  Description of Artificial Sequence: Synthetic oligonucleotide
uuauagcccagguugacaa

SEQ ID NO: 2582289 - RNA, 19 nt, Artificial Sequence
  Description of Artificial Sequence: Synthetic oligonucleotide
gucaaaaguccaucuagag

SEQ ID NO: 2582290 - RNA, 19 nt, Artificial Sequence
  Description of Artificial Sequence: Synthetic oligonucleotide
uucucacacaaccacuucu

SEQ ID NO: 2582291 - RNA, 19 nt, Artificial Sequence
  Description of Artificial Sequence: Synthetic oligonucleotide
uuacaucuuacuuggcucu

SEQ ID NO: 2582292 - RNA, 19 nt, Artificial Sequence
  Description of Artificial Sequence: Synthetic oligonucleotide
acuuucgugaguccaaagu

SEQ ID NO: 2582293 - RNA, 19 nt, Artificial Sequence
  Description of Artificial Sequence: Synthetic oligonucleotide
agaauuauacugccuuuca

SEQ ID NO: 2582294 - RNA, 19 nt, Artificial Sequence
  Description of Artificial Sequence: Synthetic oligonucleotide
ucuucauuauagcccaggu

SEQ ID NO: 2582295 - RNA, 19 nt, Artificial Sequence
  Description of Artificial Sequence: Synthetic oligonucleotide
acccggaaaauccacuuuc

SEQ ID NO: 2582296 - RNA, 19 nt, Artificial Sequence
  Description of Artificial Sequence: Synthetic oligonucleotide
acaucaaaugguaaaguug

SEQ ID NO: 2582297 - RNA, 19 nt, Artificial Sequence
  Description of Artificial Sequence: Synthetic oligonucleotide
ugguugacauuucuaguca

SEQ ID NO: 2582298 - RNA, 19 nt, Artificial Sequence
  Description of Artificial Sequence: Synthetic oligonucleotide
ccaguauaaaacaauaauc

SEQ ID NO: 2582299 - RNA, 19 nt, Artificial Sequence
  Description of Artificial Sequence: Synthetic oligonucleotide
cucuaaagaauaguagggc

SEQ ID NO: 2582300 - RNA, 19 nt, Artificial Sequence
  Description of Artificial Sequence: Synthetic oligonucleotide
augucgguucauauaaacc

SEQ ID NO: 2582301 - RNA, 19 nt, Artificial Sequence
  Description of Artificial Sequence: Synthetic oligonucleotide
cugguugacauuucuaguc

SEQ ID NO: 2582302 - RNA, 19 nt, Artificial Sequence
  Description of Artificial Sequence: Synthetic oligonucleotide
ucauuauagcccagguuga

SEQ ID NO: 2582303 - RNA, 19 nt, Artificial Sequence
  Description of Artificial Sequence: Synthetic oligonucleotide
ugaaguaaaguugaucaua

SEQ ID NO: 2582304 - RNA, 19 nt, Artificial Sequence
  Description of Artificial Sequence: Synthetic oligonucleotide
ugccccugaaguaaaguug

SEQ ID NO: 2582305 - RNA, 19 nt, Artificial Sequence
  Description of Artificial Sequence: Synthetic oligonucleotide
aguugaucauaaaugucgg

SEQ ID NO: 2582306 - RNA, 19 nt, Artificial Sequence
  Description of Artificial Sequence: Synthetic oligonucleotide
uucgugaguccaaaguugu

SEQ ID NO: 2582307 - RNA, 19 nt, Artificial Sequence
  Description of Artificial Sequence: Synthetic oligonucleotide
aaauggaaaggcacaggag

SEQ ID NO: 2582308 - RNA, 19 nt, Artificial Sequence
  Description of Artificial Sequence: Synthetic oligonucleotide
uuucauaguuauaccagua

SEQ ID NO: 2582309 - RNA, 19 nt, Artificial Sequence
  Description of Artificial Sequence: Synthetic oligonucleotide
aagucuuggguuugauucu

SEQ ID NO: 2582310 - RNA, 19 nt, Artificial Sequence
  Description of Artificial Sequence: Synthetic oligonucleotide
uucuucauuauagcccagg

SEQ ID NO: 2582311 - RNA, 19 nt, Artificial Sequence
  Description of Artificial Sequence: Synthetic oligonucleotide
gaucauaaaugucgguuca

SEQ ID NO: 2582312 - RNA, 19 nt, Artificial Sequence
  Description of Artificial Sequence: Synthetic oligonucleotide
auaaaugucgguucauaua

SEQ ID NO: 2582313 - RNA, 19 nt, Artificial Sequence
  Description of Artificial Sequence: Synthetic oligonucleotide
aacaacccggaaaauccac

SEQ ID NO: 2582314 - RNA, 19 nt, Artificial Sequence
  Description of Artificial Sequence: Synthetic oligonucleotide
uuauaccaguacauugcug

SEQ ID NO: 2582315 - RNA, 19 nt, Artificial Sequence
  Description of Artificial Sequence: Synthetic oligonucleotide
cagaccuguaaacaacccg

SEQ ID NO: 2582316 - RNA, 19 nt, Artificial Sequence
  Description of Artificial Sequence: Synthetic oligonucleotide
aguacauugcugagaaagg

SEQ ID NO: 2582317 - RNA, 19 nt, Artificial Sequence
  Description of Artificial Sequence: Synthetic oligonucleotide
gaaucagaccuguaaacaa

SEQ ID NO: 2582318 - RNA, 19 nt, Artificial Sequence
  Description of Artificial Sequence: Synthetic oligonucleotide
ccuuucaacauuuuguuuc

SEQ ID NO: 2582319 - RNA, 19 nt, Artificial Sequence
  Description of Artificial Sequence: Synthetic oligonucleotide
ccugaaguaaaguugauca

SEQ ID NO: 2582320 - RNA, 19 nt, Artificial Sequence
  Description of Artificial Sequence: Synthetic oligonucleotide
auaaaccagauuucucaca

SEQ ID NO: 2582321 - RNA, 19 nt, Artificial Sequence
  Description of Artificial Sequence: Synthetic oligonucleotide
aucaagagugcuugccuag

SEQ ID NO: 2582322 - RNA, 19 nt, Artificial Sequence
  Description of Artificial Sequence: Synthetic oligonucleotide
ucagaccuguaaacaaccc

SEQ ID NO: 2582323 - RNA, 19 nt, Artificial Sequence
  Description of Artificial Sequence: Synthetic oligonucleotide
gaucauaauggcacaagca

SEQ ID NO: 2582324 - RNA, 19 nt, Artificial Sequence
  Description of Artificial Sequence: Synthetic oligonucleotide
aaggcacaucucuaaagaa

SEQ ID NO: 2582325 - RNA, 19 nt, Artificial Sequence
  Description of Artificial Sequence: Synthetic oligonucleotide
uuucuagucaaaaguccau

SEQ ID NO: 2582326 - RNA, 19 nt, Artificial Sequence
  Description of Artificial Sequence: Synthetic oligonucleotide
ucuacuuucgugaguccaa

SEQ ID NO: 2582327 - RNA, 19 nt, Artificial Sequence
  Description of Artificial Sequence: Synthetic oligonucleotide
ucgguucauauaaaccaga

SEQ ID NO: 2582328 - RNA, 19 nt, Artificial Sequence
  Description of Artificial Sequence: Synthetic oligonucleotide
uuauacugccuuucaacau

SEQ ID NO: 2582329 - RNA, 19 nt, Artificial Sequence
  Description of Artificial Sequence: Synthetic oligonucleotide
aaauccacuuucagaaaca

SEQ ID NO: 2582330 - RNA, 19 nt, Artificial Sequence
  Description of Artificial Sequence: Synthetic oligonucleotide
ugagaaaggcacaucucua

SEQ ID NO: 2582331 - RNA, 19 nt, Artificial Sequence
  Description of Artificial Sequence: Synthetic oligonucleotide
guacauugcugagaaaggc

SEQ ID NO: 2582332 - RNA, 19 nt, Artificial Sequence
  Description of Artificial Sequence: Synthetic oligonucleotide
aguagggcccaguauaaaa

SEQ ID NO: 2582333 - RNA, 19 nt, Artificial Sequence
  Description of Artificial Sequence: Synthetic oligonucleotide
gagaauuauacugccuuuc

SEQ ID NO: 2582334 - RNA, 19 nt, Artificial Sequence
  Description of Artificial Sequence: Synthetic oligonucleotide
cuguuucuguguuuucacc

SEQ ID NO: 2582335 - RNA, 19 nt, Artificial Sequence
  Description of Artificial Sequence: Synthetic oligonucleotide
auaccaguacauugcugag

SEQ ID NO: 2582336 - RNA, 19 nt, Artificial Sequence
  Description of Artificial Sequence: Synthetic oligonucleotide
agcaugcucaagucuuggg

SEQ ID NO: 2582337 - RNA, 19 nt, Artificial Sequence
  Description of Artificial Sequence: Synthetic oligonucleotide
gauucucagcacugguggc

SEQ ID NO: 2582338 - RNA, 19 nt, Artificial Sequence
  Description of Artificial Sequence: Synthetic oligonucleotide
cuagccggugaugacagcc

SEQ ID NO: 2582339 - RNA, 19 nt, Artificial Sequence
  Description of Artificial Sequence: Synthetic oligonucleotide
cacacaaccacuucuuuaa

SEQ ID NO: 2582340 - RNA, 19 nt, Artificial Sequence
  Description of Artificial Sequence: Synthetic oligonucleotide
gagaaaggcacaucucuaa

SEQ ID NO: 2582341 - RNA, 19 nt, Artificial Sequence
  Description of Artificial Sequence: Synthetic oligonucleotide
auucauaugugcugaucau

SEQ ID NO: 2582342 - RNA, 19 nt, Artificial Sequence
  Description of Artificial Sequence: Synthetic oligonucleotide
ucacacaaccacuucuuua

SEQ ID NO: 2582343 - RNA, 19 nt, Artificial Sequence
  Description of Artificial Sequence: Synthetic oligonucleotide
auuuucuacuuucgugagu

SEQ ID NO: 2582344 - RNA, 19 nt, Artificial Sequence
  Description of Artificial Sequence: Synthetic oligonucleotide
ucucacacaaccacuucuu

SEQ ID NO: 2582345 - RNA, 19 nt, Artificial Sequence
  Description of Artificial Sequence: Synthetic oligonucleotide
aggagauuuucuacuuucg

SEQ ID NO: 2582346 - RNA, 19 nt, Artificial Sequence
  Description of Artificial Sequence: Synthetic oligonucleotide
agaauaguagggcccagua

SEQ ID NO: 2582347 - RNA, 19 nt, Artificial Sequence
  Description of Artificial Sequence: Synthetic oligonucleotide
ugcgaggccgcccgcaucc

SEQ ID NO: 2582348 - RNA, 19 nt, Artificial Sequence
  Description of Artificial Sequence: Synthetic oligonucleotide
aagaccagacaaugccccu

SEQ ID NO: 2582349 - RNA, 19 nt, Artificial Sequence
  Description of Artificial Sequence: Synthetic oligonucleotide
acaucucuaaagaauagua

SEQ ID NO: 2582350 - RNA, 19 nt, Artificial Sequence
  Description of Artificial Sequence: Synthetic oligonucleotide
gucgguucauauaaaccag

SEQ ID NO: 2582351 - RNA, 19 nt, Artificial Sequence
  Description of Artificial Sequence: Synthetic oligonucleotide
aaagaauaguagggcccag

SEQ ID NO: 2582352 - RNA, 19 nt, Artificial Sequence
  Description of Artificial Sequence: Synthetic oligonucleotide
agaaaggcacaucucuaaa

SEQ ID NO: 2582353 - RNA, 19 nt, Artificial Sequence
  Description of Artificial Sequence: Synthetic oligonucleotide
aagaauaguagggcccagu

SEQ ID NO: 2582354 - RNA, 19 nt, Artificial Sequence
  Description of Artificial Sequence: Synthetic oligonucleotide
cuuacuuggcucugguuga

SEQ ID NO: 2582355 - RNA, 19 nt, Artificial Sequence
  Description of Artificial Sequence: Synthetic oligonucleotide
auaguuauaccaguacauu

SEQ ID NO: 2582356 - RNA, 19 nt, Artificial Sequence
  Description of Artificial Sequence: Synthetic oligonucleotide
cagacaaugccccugaagu

SEQ ID NO: 2582357 - RNA, 19 nt, Artificial Sequence
  Description of Artificial Sequence: Synthetic oligonucleotide
aaacaacccggaaaaucca

SEQ ID NO: 2582358 - RNA, 19 nt, Artificial Sequence
  Description of Artificial Sequence: Synthetic oligonucleotide
ugcaaggcgggguucccag

SEQ ID NO: 2582359 - RNA, 19 nt, Artificial Sequence
  Description of Artificial Sequence: Synthetic oligonucleotide
uacuuucgugaguccaaag

SEQ ID NO: 2582360 - RNA, 19 nt, Artificial Sequence
  Description of Artificial Sequence: Synthetic oligonucleotide
ucauaaaugucgguucaua

SEQ ID NO: 2582361 - RNA, 19 nt, Artificial Sequence
  Description of Artificial Sequence: Synthetic oligonucleotide
guugacaaauggaaaggca

SEQ ID NO: 2582362 - RNA, 19 nt, Artificial Sequence
  Description of Artificial Sequence: Synthetic oligonucleotide
gacaaugccccugaaguaa

SEQ ID NO: 2582363 - RNA, 19 nt, Artificial Sequence
  Description of Artificial Sequence: Synthetic oligonucleotide
gacucccgagucugcagcg

SEQ ID NO: 2582364 - RNA, 19 nt, Artificial Sequence
  Description of Artificial Sequence: Synthetic oligonucleotide
agucaaaaguccaucuaga

SEQ ID NO: 2582365 - RNA, 19 nt, Artificial Sequence
  Description of Artificial Sequence: Synthetic oligonucleotide
auugcugagaaaggcacau

SEQ ID NO: 2582366 - RNA, 19 nt, Artificial Sequence
  Description of Artificial Sequence: Synthetic oligonucleotide
aaaguccaucuagagaauu

SEQ ID NO: 2582367 - RNA, 19 nt, Artificial Sequence
  Description of Artificial Sequence: Synthetic oligonucleotide
uuucuacuuucgugagucc

SEQ ID NO: 2582368 - RNA, 19 nt, Artificial Sequence
  Description of Artificial Sequence: Synthetic oligonucleotide
gugaguccaaaguuguguc

SEQ ID NO: 2582369 - RNA, 19 nt, Artificial Sequence
  Description of Artificial Sequence: Synthetic oligonucleotide
acaagcaggagcaauuuua

SEQ ID NO: 2582370 - RNA, 19 nt, Artificial Sequence
  Description of Artificial Sequence: Synthetic oligonucleotide
auuauagcccagguugaca

SEQ ID NO: 2582371 - RNA, 19 nt, Artificial Sequence
  Description of Artificial Sequence: Synthetic oligonucleotide
cuagcaugcucaagucuug

SEQ ID NO: 2582372 - RNA, 19 nt, Artificial Sequence
  Description of Artificial Sequence: Synthetic oligonucleotide
aaucgaggaaucagaccug

SEQ ID NO: 2582373 - RNA, 19 nt, Artificial Sequence
  Description of Artificial Sequence: Synthetic oligonucleotide
ucaagagugcuugccuagc

SEQ ID NO: 2582374 - RNA, 19 nt, Artificial Sequence
  Description of Artificial Sequence: Synthetic oligonucleotide
guagggcccaguauaaaac

SEQ ID NO: 2582375 - RNA, 19 nt, Artificial Sequence
  Description of Artificial Sequence: Synthetic oligonucleotide
cagauuucucacacaacca

SEQ ID NO: 2582376 - RNA, 19 nt, Artificial Sequence
  Description of Artificial Sequence: Synthetic oligonucleotide
acaucuuacuuggcucugg

SEQ ID NO: 2582377 - RNA, 19 nt, Artificial Sequence
  Description of Artificial Sequence: Synthetic oligonucleotide
ucaagucuuggguuugauu

SEQ ID NO: 2582378 - RNA, 19 nt, Artificial Sequence
  Description of Artificial Sequence: Synthetic oligonucleotide
aacccggaaaauccacuuu

SEQ ID NO: 2582379 - RNA, 19 nt, Artificial Sequence
  Description of Artificial Sequence: Synthetic oligonucleotide
gaggcgacugcaaggcggg

SEQ ID NO: 2582380 - RNA, 19 nt, Artificial Sequence
  Description of Artificial Sequence: Synthetic oligonucleotide
gguaaaguugcaacagcug

SEQ ID NO: 2582381 - RNA, 19 nt, Artificial Sequence
  Description of Artificial Sequence: Synthetic oligonucleotide
ucgugaguccaaaguugug

SEQ ID NO: 2582382 - RNA, 19 nt, Artificial Sequence
  Description of Artificial Sequence: Synthetic oligonucleotide
guuauaccaguacauugcu

SEQ ID NO: 2582383 - RNA, 19 nt, Artificial Sequence
  Description of Artificial Sequence: Synthetic oligonucleotide
accagauuucucacacaac

SEQ ID NO: 2582384 - RNA, 19 nt, Artificial Sequence
  Description of Artificial Sequence: Synthetic oligonucleotide
augccccugaaguaaaguu

SEQ ID NO: 2582385 - RNA, 19 nt, Artificial Sequence
  Description of Artificial Sequence: Synthetic oligonucleotide
ggaaucagaccuguaaaca

SEQ ID NO: 2582386 - RNA, 19 nt, Artificial Sequence
  Description of Artificial Sequence: Synthetic oligonucleotide
ucccgagucugcagcgcgg

SEQ ID NO: 2582387 - RNA, 19 nt, Artificial Sequence
  Description of Artificial Sequence: Synthetic oligonucleotide
uguaaacaacccggaaaau

SEQ ID NO: 2582388 - RNA, 19 nt, Artificial Sequence
  Description of Artificial Sequence: Synthetic oligonucleotide
aaaaguccaucuagagaau

SEQ ID NO: 2582389 - RNA, 19 nt, Artificial Sequence
  Description of Artificial Sequence: Synthetic oligonucleotide
agacaaugccccugaagua

SEQ ID NO: 2582390 - RNA, 19 nt, Artificial Sequence
  Description of Artificial Sequence: Synthetic oligonucleotide
auagcccagguugacaaau

SEQ ID NO: 2582391 - RNA, 19 nt, Artificial Sequence
  Description of Artificial Sequence: Synthetic oligonucleotide
acaggagauuuucuacuuu

SEQ ID NO: 2582392 - RNA, 19 nt, Artificial Sequence
  Description of Artificial Sequence: Synthetic oligonucleotide
cauuauagcccagguugac

SEQ ID NO: 2582393 - RNA, 19 nt, Artificial Sequence
  Description of Artificial Sequence: Synthetic oligonucleotide
ucugcagcgcggcgccgcg

SEQ ID NO: 2582394 - RNA, 19 nt, Artificial Sequence
  Description of Artificial Sequence: Synthetic oligonucleotide
cauaaaugucgguucauau

SEQ ID NO: 2582395 - RNA, 19 nt, Artificial Sequence
  Description of Artificial Sequence: Synthetic oligonucleotide
aaguugcaacagcugcaaa

SEQ ID NO: 2582396 - RNA, 19 nt, Artificial Sequence
  Description of Artificial Sequence: Synthetic oligonucleotide
gcaaaagaccagacaaugc

SEQ ID NO: 2582397 - RNA, 19 nt, Artificial Sequence
  Description of Artificial Sequence: Synthetic oligonucleotide
aggcacaucucuaaagaau

SEQ ID NO: 2582398 - RNA, 19 nt, Artificial Sequence
  Description of Artificial Sequence: Synthetic oligonucleotide
ugccuagcaugcucaaguc

SEQ ID NO: 2582399 - RNA, 19 nt, Artificial Sequence
  Description of Artificial Sequence: Synthetic oligonucleotide
agcacugguggcgaggcga

SEQ ID NO: 2582400 - RNA, 19 nt, Artificial Sequence
  Description of Artificial Sequence: Synthetic oligonucleotide
cucccgagucugcagcgcg

SEQ ID NO: 2582401 - RNA, 19 nt, Artificial Sequence
  Description of Artificial Sequence: Synthetic oligonucleotide
augcucaagucuuggguuu

SEQ ID NO: 2582402 - RNA, 19 nt, Artificial Sequence
  Description of Artificial Sequence: Synthetic oligonucleotide
aaaugucgguucauauaaa

SEQ ID NO: 2582403 - RNA, 19 nt, Artificial Sequence
  Description of Artificial Sequence: Synthetic oligonucleotide
uauagcccagguugacaaa

SEQ ID NO: 2582404 - RNA, 19 nt, Artificial Sequence
  Description of Artificial Sequence: Synthetic oligonucleotide
ccggugaugacagccaugg

SEQ ID NO: 2582405 - RNA, 19 nt, Artificial Sequence
  Description of Artificial Sequence: Synthetic oligonucleotide
auggaaaggcacaggagau

SEQ ID NO: 2582406 - RNA, 19 nt, Artificial Sequence
  Description of Artificial Sequence: Synthetic oligonucleotide
ugcucaagucuuggguuug

SEQ ID NO: 2582407 - RNA, 19 nt, Artificial Sequence
  Description of Artificial Sequence: Synthetic oligonucleotide
aucgaggaaucagaccugu

SEQ ID NO: 2582408 - RNA, 19 nt, Artificial Sequence
  Description of Artificial Sequence: Synthetic oligonucleotide
cuccaaggggacccgggag

SEQ ID NO: 2582409 - RNA, 19 nt, Artificial Sequence
  Description of Artificial Sequence: Synthetic oligonucleotide
cauugcugagaaaggcaca

SEQ ID NO: 2582410 - RNA, 19 nt, Artificial Sequence
  Description of Artificial Sequence: Synthetic oligonucleotide
aggagcaauuuuaauuaau

SEQ ID NO: 2582411 - RNA, 19 nt, Artificial Sequence
  Description of Artificial Sequence: Synthetic oligonucleotide
gaauaguagggcccaguau

SEQ ID NO: 2582412 - RNA, 19 nt, Artificial Sequence
  Description of Artificial Sequence: Synthetic oligonucleotide
gccgcgggaacuccaaggg

SEQ ID NO: 2582413 - RNA, 19 nt, Artificial Sequence
  Description of Artificial Sequence: Synthetic oligonucleotide
acucccgagucugcagcgc

SEQ ID NO: 2582414 - RNA, 19 nt, Artificial Sequence
  Description of Artificial Sequence: Synthetic oligonucleotide
acugcaaggcgggguuccc

SEQ ID NO: 2582415 - RNA, 19 nt, Artificial Sequence
  Description of Artificial Sequence: Synthetic oligonucleotide
auaguagggcccaguauaa

SEQ ID NO: 2582416 - RNA, 19 nt, Artificial Sequence
  Description of Artificial Sequence: Synthetic oligonucleotide
cuuucgugaguccaaaguu

SEQ ID NO: 2582417 - RNA, 19 nt, Artificial Sequence
  Description of Artificial Sequence: Synthetic oligonucleotide
acaacccggaaaauccacu

SEQ ID NO: 2582418 - RNA, 19 nt, Artificial Sequence
  Description of Artificial Sequence: Synthetic oligonucleotide
aucauaaaugucgguucau

SEQ ID NO: 2582419 - RNA, 19 nt, Artificial Sequence
  Description of Artificial Sequence: Synthetic oligonucleotide
cuagagaauuauacugccu

SEQ ID NO: 2582420 - RNA, 19 nt, Artificial Sequence
  Description of Artificial Sequence: Synthetic oligonucleotide
guugacauuucuagucaaa

SEQ ID NO: 2582421 - RNA, 19 nt, Artificial Sequence
  Description of Artificial Sequence: Synthetic oligonucleotide
agccuagccggugaugaca

SEQ ID NO: 2582422 - RNA, 19 nt, Artificial Sequence
  Description of Artificial Sequence: Synthetic oligonucleotide
gaccuguaaacaacccgga

SEQ ID NO: 2582423 - RNA, 19 nt, Artificial Sequence
  Description of Artificial Sequence: Synthetic oligonucleotide
cacuucuuuaaaauuucau

SEQ ID NO: 2582424 - RNA, 19 nt, Artificial Sequence
  Description of Artificial Sequence: Synthetic oligonucleotide
ggcacaucucuaaagaaua

SEQ ID NO: 2582425 - RNA, 19 nt, Artificial Sequence
  Description of Artificial Sequence: Synthetic oligonucleotide
uuacuuggcucugguugac

SEQ ID NO: 2582426 - RNA, 19 nt, Artificial Sequence
  Description of Artificial Sequence: Synthetic oligonucleotide
caaaguugugucuguuucu

SEQ ID NO: 2582427 - RNA, 19 nt, Artificial Sequence
  Description of Artificial Sequence: Synthetic oligonucleotide
uggaaaggcacaggagauu

SEQ ID NO: 2582428 - RNA, 19 nt, Artificial Sequence
  Description of Artificial Sequence: Synthetic oligonucleotide
cccagguugacaaauggaa

SEQ ID NO: 2582429 - RNA, 19 nt, Artificial Sequence
  Description of Artificial Sequence: Synthetic oligonucleotide
aucuuacuuggcucugguu

SEQ ID NO: 2582430 - RNA, 19 nt, Artificial Sequence
  Description of Artificial Sequence: Synthetic oligonucleotide
gccuuuccaaauucauaug

SEQ ID NO: 2582431 - RNA, 19 nt, Artificial Sequence
  Description of Artificial Sequence: Synthetic oligonucleotide
gcacaucucuaaagaauag

SEQ ID NO: 2582432 - RNA, 19 nt, Artificial Sequence
  Description of Artificial Sequence: Synthetic oligonucleotide
ggagauuuucuacuuucgu

SEQ ID NO: 2582433 - RNA, 19 nt, Artificial Sequence
  Description of Artificial Sequence: Synthetic oligonucleotide
cgaggcgacugcaaggcgg

SEQ ID NO: 2582434 - RNA, 19 nt, Artificial Sequence
  Description of Artificial Sequence: Synthetic oligonucleotide
caggagcaauuuuaauuaa

SEQ ID NO: 2582435 - RNA, 19 nt, Artificial Sequence
  Description of Artificial Sequence: Synthetic oligonucleotide
ccggaaaauccacuuucag

SEQ ID NO: 2582436 - RNA, 19 nt, Artificial Sequence
  Description of Artificial Sequence: Synthetic oligonucleotide
agcgcggcgccgcgggaac

SEQ ID NO: 2582437 - RNA, 19 nt, Artificial Sequence
  Description of Artificial Sequence: Synthetic oligonucleotide
gguugacauuucuagucaa

SEQ ID NO: 2582438 - RNA, 19 nt, Artificial Sequence
  Description of Artificial Sequence: Synthetic oligonucleotide
cugguggcgaggcgacugc

SEQ ID NO: 2582439 - RNA, 19 nt, Artificial Sequence
  Description of Artificial Sequence: Synthetic oligonucleotide
ugcucccgacucccgaguc

SEQ ID NO: 2582440 - RNA, 19 nt, Artificial Sequence
  Description of Artificial Sequence: Synthetic oligonucleotide
ggcgaggcgacugcaaggc

SEQ ID NO: 2582441 - RNA, 19 nt, Artificial Sequence
  Description of Artificial Sequence: Synthetic oligonucleotide
cucccgacucccgagucug

SEQ ID NO: 2582442 - RNA, 19 nt, Artificial Sequence
  Description of Artificial Sequence: Synthetic oligonucleotide
ucgaggaaucagaccugua

SEQ ID NO: 2582443 - RNA, 19 nt, Artificial Sequence
  Description of Artificial Sequence: Synthetic oligonucleotide
uaguagggcccaguauaaa

SEQ ID NO: 2582444 - RNA, 19 nt, Artificial Sequence
  Description of Artificial Sequence: Synthetic oligonucleotide
cggaaaauccacuuucaga

SEQ ID NO: 2582445 - RNA, 19 nt, Artificial Sequence
  Description of Artificial Sequence: Synthetic oligonucleotide
cacaucucuaaagaauagu

SEQ ID NO: 2582446 - RNA, 19 nt, Artificial Sequence
  Description of Artificial Sequence: Synthetic oligonucleotide
agccggugaugacagccau

SEQ ID NO: 2582447 - RNA, 19 nt, Artificial Sequence
  Description of Artificial Sequence: Synthetic oligonucleotide
caaccacuucuuuaaaauu

SEQ ID NO: 2582448 - RNA, 19 nt, Artificial Sequence
  Description of Artificial Sequence: Synthetic oligonucleotide
ccaucuagagaauuauacu

SEQ ID NO: 2582449 - RNA, 19 nt, Artificial Sequence
  Description of Artificial Sequence: Synthetic oligonucleotide
cuucauuauagcccagguu

SEQ ID NO: 2582450 - RNA, 19 nt, Artificial Sequence
  Description of Artificial Sequence: Synthetic oligonucleotide
uacugccuuucaacauuuu

SEQ ID NO: 2582451 - RNA, 19 nt, Artificial Sequence
  Description of Artificial Sequence: Synthetic oligonucleotide
gccccugaaguaaaguuga

SEQ ID NO: 2582452 - RNA, 19 nt, Artificial Sequence
  Description of Artificial Sequence: Synthetic oligonucleotide
caugggccugcgaggccgc

SEQ ID NO: 2582453 - RNA, 19 nt, Artificial Sequence
  Description of Artificial Sequence: Synthetic oligonucleotide
ucccgacucccgagucugc

SEQ ID NO: 2582454 - RNA, 19 nt, Artificial Sequence
  Description of Artificial Sequence: Synthetic oligonucleotide
ccagguugacaaauggaaa

SEQ ID NO: 2582455 - RNA, 19 nt, Artificial Sequence
  Description of Artificial Sequence: Synthetic oligonucleotide
gccuagccggugaugacag

SEQ ID NO: 2582456 - RNA, 19 nt, Artificial Sequence
  Description of Artificial Sequence: Synthetic oligonucleotide
ccaugggccugcgaggccg

SEQ ID NO: 2582457 - RNA, 19 nt, Artificial Sequence
  Description of Artificial Sequence: Synthetic oligonucleotide
uggcucugguugacauuuc

SEQ ID NO: 2582458 - RNA, 19 nt, Artificial Sequence
  Description of Artificial Sequence: Synthetic oligonucleotide
cagccuagccggugaugac

SEQ ID NO: 2582459 - RNA, 19 nt, Artificial Sequence
  Description of Artificial Sequence: Synthetic oligonucleotide
cuacuuucgugaguccaaa

SEQ ID NO: 2582460 - RNA, 19 nt, Artificial Sequence
  Description of Artificial Sequence: Synthetic oligonucleotide
gguucauauaaaccagauu

SEQ ID NO: 2582461 - RNA, 19 nt, Artificial Sequence
  Description of Artificial Sequence: Synthetic oligonucleotide
ggcccaguauaaaacaaua

SEQ ID NO: 2582462 - RNA, 19 nt, Artificial Sequence
  Description of Artificial Sequence: Synthetic oligonucleotide
caucuuacuuggcucuggu

SEQ ID NO: 2582463 - RNA, 19 nt, Artificial Sequence
  Description of Artificial Sequence: Synthetic oligonucleotide
guccaucuagagaauuaua

SEQ ID NO: 2582464 - RNA, 19 nt, Artificial Sequence
  Description of Artificial Sequence: Synthetic oligonucleotide
ugguggcgaggcgacugca

SEQ ID NO: 2582465 - RNA, 19 nt, Artificial Sequence
  Description of Artificial Sequence: Synthetic oligonucleotide
ugacagccaugggccugcg

SEQ ID NO: 2582466 - RNA, 19 nt, Artificial Sequence
  Description of Artificial Sequence: Synthetic oligonucleotide
accagacaaugccccugaa

SEQ ID NO: 2582467 - RNA, 19 nt, Artificial Sequence
  Description of Artificial Sequence: Synthetic oligonucleotide
cgaggaaucagaccuguaa

SEQ ID NO: 2582468 - RNA, 19 nt, Artificial Sequence
  Description of Artificial Sequence: Synthetic oligonucleotide
gucugcagcgcggcgccgc

SEQ ID NO: 2582469 - RNA, 19 nt, Artificial Sequence
  Description of Artificial Sequence: Synthetic oligonucleotide
ccuagcaugcucaagucuu

SEQ ID NO: 2582470 - RNA, 19 nt, Artificial Sequence
  Description of Artificial Sequence: Synthetic oligonucleotide
caacccggaaaauccacuu

SEQ ID NO: 2582471 - RNA, 19 nt, Artificial Sequence
  Description of Artificial Sequence: Synthetic oligonucleotide
ugggccugcgaggccgccc

SEQ ID NO: 2582472 - RNA, 19 nt, Artificial Sequence
  Description of Artificial Sequence: Synthetic oligonucleotide
ggggacccgggagagccgg

SEQ ID NO: 2582473 - RNA, 19 nt, Artificial Sequence
  Description of Artificial Sequence: Synthetic oligonucleotide
caaggggacccgggagagc

SEQ ID NO: 2582474 - RNA, 19 nt, Artificial Sequence
  Description of Artificial Sequence: Synthetic oligonucleotide
cccggaaaauccacuuuca

SEQ ID NO: 2582475 - RNA, 19 nt, Artificial Sequence
  Description of Artificial Sequence: Synthetic oligonucleotide
gcgaggcgacugcaaggcg

SEQ ID NO: 2582476 - RNA, 19 nt, Artificial Sequence
  Description of Artificial Sequence: Synthetic oligonucleotide
gacagccaugggccugcga

SEQ ID NO: 2582477 - RNA, 19 nt, Artificial Sequence
  Description of Artificial Sequence: Synthetic oligonucleotide
cgcgggaacuccaagggga

SEQ ID NO: 2582478 - RNA, 19 nt, Artificial Sequence
  Description of Artificial Sequence: Synthetic oligonucleotide
cgacucccgagucugcagc

SEQ ID NO: 2582479 - RNA, 19 nt, Artificial Sequence
  Description of Artificial Sequence: Synthetic oligonucleotide
cacggcccgggcugcuccc

SEQ ID NO: 2582480 - RNA, 19 nt, Artificial Sequence
  Description of Artificial Sequence: Synthetic oligonucleotide
ccaaggggacccgggagag

SEQ ID NO: 2582481 - RNA, 19 nt, Artificial Sequence
  Description of Artificial Sequence: Synthetic oligonucleotide
ccgcgggaacuccaagggg

SEQ ID NO: 2582482 - RNA, 19 nt, Artificial Sequence
  Description of Artificial Sequence: Synthetic oligonucleotide
ccagccuagccggugauga

SEQ ID NO: 2582483 - RNA, 19 nt, Artificial Sequence
  Description of Artificial Sequence: Synthetic oligonucleotide
cgccgcgggaacuccaagg

SEQ ID NO: 2582484 - RNA, 19 nt, Artificial Sequence
  Description of Artificial Sequence: Synthetic oligonucleotide
ggcucugguugacauuucu

SEQ ID NO: 2582485 - RNA, 19 nt, Artificial Sequence
  Description of Artificial Sequence: Synthetic oligonucleotide
cagccagccuagccgguga

SEQ ID NO: 2582486 - RNA, 19 nt, Artificial Sequence
  Description of Artificial Sequence: Synthetic oligonucleotide
gcccagguugacaaaugga

SEQ ID NO: 2582487 - RNA, 19 nt, Artificial Sequence
  Description of Artificial Sequence: Synthetic oligonucleotide
gcgggguucccagccagcc

SEQ ID NO: 2582488 - RNA, 19 nt, Artificial Sequence
  Description of Artificial Sequence: Synthetic oligonucleotide
aggggacccgggagagccg

SEQ ID NO: 2582489 - RNA, 19 nt, Artificial Sequence
  Description of Artificial Sequence: Synthetic oligonucleotide
cgagucugcagcgcggcgc

SEQ ID NO: 2582490 - RNA, 19 nt, Artificial Sequence
  Description of Artificial Sequence: Synthetic oligonucleotide
gccuagcaugcucaagucu

SEQ ID NO: 2582491 - RNA, 19 nt, Artificial Sequence
  Description of Artificial Sequence: Synthetic oligonucleotide
cugcgaggccgcccgcauc

SEQ ID NO: 2582492 - RNA, 19 nt, Artificial Sequence
  Description of Artificial Sequence: Synthetic oligonucleotide
cccgcauccacggcccggg

SEQ ID NO: 2582493 - RNA, 19 nt, Artificial Sequence
  Description of Artificial Sequence: Synthetic oligonucleotide
ccgcccgcauccacggccc

SEQ ID NO: 2582494 - RNA, 19 nt, Artificial Sequence
  Description of Artificial Sequence: Synthetic oligonucleotide
ccgagucugcagcgcggcg

SEQ ID NO: 2582495 - RNA, 19 nt, Artificial Sequence
  Description of Artificial Sequence: Synthetic oligonucleotide
ccacggcccgggcugcucc

SEQ ID NO: 2582496 - RNA, 19 nt, Artificial Sequence
  Description of Artificial Sequence: Synthetic oligonucleotide
gcucaagucuuggguuuga

SEQ ID NO: 2582497 - RNA, 19 nt, Artificial Sequence
  Description of Artificial Sequence: Synthetic oligonucleotide
cugcagcgcggcgccgcgg

SEQ ID NO: 2582498 - RNA, 19 nt, Artificial Sequence
  Description of Artificial Sequence: Synthetic oligonucleotide
gccagccuagccggugaug

SEQ ID NO: 2582499 - RNA, 19 nt, Artificial Sequence
  Description of Artificial Sequence: Synthetic oligonucleotide
cggugaugacagccauggg

SEQ ID NO: 2582500 - RNA, 19 nt, Artificial Sequence
  Description of Artificial Sequence: Synthetic oligonucleotide
gcgccgcgggaacuccaag

SEQ ID NO: 2582501 - RNA, 19 nt, Artificial Sequence
  Description of Artificial Sequence: Synthetic oligonucleotide
cgguucauauaaaccagau

SEQ ID NO: 2582502 - RNA, 19 nt, Artificial Sequence
  Description of Artificial Sequence: Synthetic oligonucleotide
cccgggcugcucccgacuc

SEQ ID NO: 2582503 - RNA, 19 nt, Artificial Sequence
  Description of Artificial Sequence: Synthetic oligonucleotide
gggcugcucccgacucccg

SEQ ID NO: 2582504 - RNA, 19 nt, Artificial Sequence
  Description of Artificial Sequence: Synthetic oligonucleotide
cccgacucccgagucugca

SEQ ID NO: 2582505 - RNA, 19 nt, Artificial Sequence
  Description of Artificial Sequence: Synthetic oligonucleotide
cagcgcggcgccgcgggaa

SEQ ID NO: 2582506 - RNA, 19 nt, Artificial Sequence
  Description of Artificial Sequence: Synthetic oligonucleotide
ggccugcgaggccgcccgc

SEQ ID NO: 2582507 - RNA, 19 nt, Artificial Sequence
  Description of Artificial Sequence: Synthetic oligonucleotide
ggcgccgcgggaacuccaa

SEQ ID NO: 2582508 - RNA, 19 nt, Artificial Sequence
  Description of Artificial Sequence: Synthetic oligonucleotide
gcggcgccgcgggaacucc

SEQ ID NO: 2582509 - RNA, 19 nt, Artificial Sequence
  Description of Artificial Sequence: Synthetic oligonucleotide
ccgcauccacggcccgggc

SEQ ID NO: 2582510 - RNA, 19 nt, Artificial Sequence
  Description of Artificial Sequence: Synthetic oligonucleotide
cgacugcaaggcgggguuc

SEQ ID NO: 2582511 - RNA, 19 nt, Artificial Sequence
  Description of Artificial Sequence: Synthetic oligonucleotide
gcagcgcggcgccgcggga

SEQ ID NO: 2582512 - RNA, 19 nt, Artificial Sequence
  Description of Artificial Sequence: Synthetic oligonucleotide
ccccugaaguaaaguugau

SEQ ID NO: 2582513 - RNA, 19 nt, Artificial Sequence
  Description of Artificial Sequence: Synthetic oligonucleotide
gcccgggcugcucccgacu

SEQ ID NO: 2582514 - RNA, 19 nt, Artificial Sequence
  Description of Artificial Sequence: Synthetic oligonucleotide
cgcccgcauccacggcccg

SEQ ID NO: 2582515 - RNA, 19 nt, Artificial Sequence
  Description of Artificial Sequence: Synthetic oligonucleotide
cgcauccacggcccgggcu

SEQ ID NO: 2582516 - RNA, 19 nt, Artificial Sequence
  Description of Artificial Sequence: Synthetic oligonucleotide
gcgcggcgccgcgggaacu

SEQ ID NO: 2582517 - RNA, 19 nt, Artificial Sequence
  Description of Artificial Sequence: Synthetic oligonucleotide
gaaacaaccacgcagacgc

SEQ ID NO: 2582518 - RNA, 19 nt, Artificial Sequence
  Description of Artificial Sequence: Synthetic oligonucleotide
gauacuuagaguuuuggag

SEQ ID NO: 2582519 - RNA, 19 nt, Artificial Sequence
  Description of Artificial Sequence: Synthetic oligonucleotide
aauaaauucugguuaauaa

SEQ ID NO: 2582520 - RNA, 19 nt, Artificial Sequence
  Description of Artificial Sequence: Synthetic oligonucleotide
uuaauaaaguucacugucg

SEQ ID NO: 2582521 - RNA, 19 nt, Artificial Sequence
  Description of Artificial Sequence: Synthetic oligonucleotide
ugugguuuaacucaucgcc

SEQ ID NO: 2582522 - RNA, 19 nt, Artificial Sequence
  Description of Artificial Sequence: Synthetic oligonucleotide
auacuuagaguuuuggagg

SEQ ID NO: 2582523 - RNA, 19 nt, Artificial Sequence
  Description of Artificial Sequence: Synthetic oligonucleotide
guggaaaugauacuuagag

SEQ ID NO: 2582524 - RNA, 19 nt, Artificial Sequence
  Description of Artificial Sequence: Synthetic oligonucleotide
uacuugagcgagaugaugg

SEQ ID NO: 2582525 - RNA, 19 nt, Artificial Sequence
  Description of Artificial Sequence: Synthetic oligonucleotide
ugguuaauaaaguucacug

SEQ ID NO: 2582526 - RNA, 19 nt, Artificial Sequence
  Description of Artificial Sequence: Synthetic oligonucleotide
auaaaguucacugucguuc

SEQ ID NO: 2582527 - RNA, 19 nt, Artificial Sequence
  Description of Artificial Sequence: Synthetic oligonucleotide
aagcaaugcagcuccagac

SEQ ID NO: 2582528 - RNA, 19 nt, Artificial Sequence
  Description of Artificial Sequence: Synthetic oligonucleotide
cuaaguaaguuccucacag

SEQ ID NO: 2582529 - RNA, 19 nt, Artificial Sequence
  Description of Artificial Sequence: Synthetic oligonucleotide
aaggucauuaucagcaugg

SEQ ID NO: 2582530 - RNA, 19 nt, Artificial Sequence
  Description of Artificial Sequence: Synthetic oligonucleotide
gaagacaucacggagcaag

SEQ ID NO: 2582531 - RNA, 19 nt, Artificial Sequence
  Description of Artificial Sequence: Synthetic oligonucleotide
uaaaguucacugucguucg

SEQ ID NO: 2582532 - RNA, 19 nt, Artificial Sequence
  Description of Artificial Sequence: Synthetic oligonucleotide
ugugaugugcucaguaucc

SEQ ID NO: 2582533 - RNA, 19 nt, Artificial Sequence
  Description of Artificial Sequence: Synthetic oligonucleotide
gaugcugugguuuaacuca

SEQ ID NO: 2582534 - RNA, 19 nt, Artificial Sequence
  Description of Artificial Sequence: Synthetic oligonucleotide
uaacucaucgccuacuuga

SEQ ID NO: 2582535 - RNA, 19 nt, Artificial Sequence
  Description of Artificial Sequence: Synthetic oligonucleotide
cucaucgccuacuugagcg

SEQ ID NO: 2582536 - RNA, 19 nt, Artificial Sequence
  Description of Artificial Sequence: Synthetic oligonucleotide
cugacguucaugaacuggg

SEQ ID NO: 2582537 - RNA, 19 nt, Artificial Sequence
  Description of Artificial Sequence: Synthetic oligonucleotide
aagggcuuuggccaggcag

SEQ ID NO: 2582538 - RNA, 19 nt, Artificial Sequence
  Description of Artificial Sequence: Synthetic oligonucleotide
uaauaaaguucacugucgu

SEQ ID NO: 2582539 - RNA, 19 nt, Artificial Sequence
  Description of Artificial Sequence: Synthetic oligonucleotide
uccgcauccagguaaacug

SEQ ID NO: 2582540 - RNA, 19 nt, Artificial Sequence
  Description of Artificial Sequence: Synthetic oligonucleotide
aacuggcacgggcaguucc

SEQ ID NO: 2582541 - RNA, 19 nt, Artificial Sequence
  Description of Artificial Sequence: Synthetic oligonucleotide
cuguauucuuccaugguag

SEQ ID NO: 2582542 - RNA, 19 nt, Artificial Sequence
  Description of Artificial Sequence: Synthetic oligonucleotide
cucucgguggaaaugauac

SEQ ID NO: 2582543 - RNA, 19 nt, Artificial Sequence
  Description of Artificial Sequence: Synthetic oligonucleotide
ucuuuggaugacaucuucc

SEQ ID NO: 2582544 - RNA, 19 nt, Artificial Sequence
  Description of Artificial Sequence: Synthetic oligonucleotide
uuagaguuuuggaggaagc

SEQ ID NO: 2582545 - RNA, 19 nt, Artificial Sequence
  Description of Artificial Sequence: Synthetic oligonucleotide
cuuuuggccagcagcaagg

SEQ ID NO: 2582546 - RNA, 19 nt, Artificial Sequence
  Description of Artificial Sequence: Synthetic oligonucleotide
ugauacuuagaguuuugga

SEQ ID NO: 2582547 - RNA, 19 nt, Artificial Sequence
  Description of Artificial Sequence: Synthetic oligonucleotide
caucccauuccuaaguaag

SEQ ID NO: 2582548 - RNA, 19 nt, Artificial Sequence
  Description of Artificial Sequence: Synthetic oligonucleotide
augaugggcaauucuuugg

SEQ ID NO: 2582549 - RNA, 19 nt, Artificial Sequence
  Description of Artificial Sequence: Synthetic oligonucleotide
ucuuccaugguaggaacgg

SEQ ID NO: 2582550 - RNA, 19 nt, Artificial Sequence
  Description of Artificial Sequence: Synthetic oligonucleotide
uugagcgagaugaugggca

SEQ ID NO: 2582551 - RNA, 19 nt, Artificial Sequence
  Description of Artificial Sequence: Synthetic oligonucleotide
ucguucggaagacaucacg

SEQ ID NO: 2582552 - RNA, 19 nt, Artificial Sequence
  Description of Artificial Sequence: Synthetic oligonucleotide
ugggcaauucuuuggauga

SEQ ID NO: 2582553 - RNA, 19 nt, Artificial Sequence
  Description of Artificial Sequence: Synthetic oligonucleotide
auucuuccaugguaggaac

SEQ ID NO: 2582554 - RNA, 19 nt, Artificial Sequence
  Description of Artificial Sequence: Synthetic oligonucleotide
acuggccacgcuuuuggcc

SEQ ID NO: 2582555 - RNA, 19 nt, Artificial Sequence
  Description of Artificial Sequence: Synthetic oligonucleotide
ugaugggcaauucuuugga

SEQ ID NO: 2582556 - RNA, 19 nt, Artificial Sequence
  Description of Artificial Sequence: Synthetic oligonucleotide
auccagguaaacuggcacg

SEQ ID NO: 2582557 - RNA, 19 nt, Artificial Sequence
  Description of Artificial Sequence: Synthetic oligonucleotide
ugucguucggaagacauca

SEQ ID NO: 2582558 - RNA, 19 nt, Artificial Sequence
  Description of Artificial Sequence: Synthetic oligonucleotide
uacuuagaguuuuggagga

SEQ ID NO: 2582559 - RNA, 19 nt, Artificial Sequence
  Description of Artificial Sequence: Synthetic oligonucleotide
aaguuccucacagagguga

SEQ ID NO: 2582560 - RNA, 19 nt, Artificial Sequence
  Description of Artificial Sequence: Synthetic oligonucleotide
uucuuccaugguaggaacg

SEQ ID NO: 2582561 - RNA, 19 nt, Artificial Sequence
  Description of Artificial Sequence: Synthetic oligonucleotide
cagaguccaggaaacaacc

SEQ ID NO: 2582562 - RNA, 19 nt, Artificial Sequence
  Description of Artificial Sequence: Synthetic oligonucleotide
aaaguucacugucguucgg

SEQ ID NO: 2582563 - RNA, 19 nt, Artificial Sequence
  Description of Artificial Sequence: Synthetic oligonucleotide
uggaaaugauacuuagagu

SEQ ID NO: 2582564 - RNA, 19 nt, Artificial Sequence
  Description of Artificial Sequence: Synthetic oligonucleotide
cacagaggugaauaaauuc

SEQ ID NO: 2582565 - RNA, 19 nt, Artificial Sequence
  Description of Artificial Sequence: Synthetic oligonucleotide
uccagguaaacuggcacgg

SEQ ID NO: 2582566 - RNA, 19 nt, Artificial Sequence
  Description of Artificial Sequence: Synthetic oligonucleotide
aauaaaguucacugucguu

SEQ ID NO: 2582567 - RNA, 19 nt, Artificial Sequence
  Description of Artificial Sequence: Synthetic oligonucleotide
uuccuaaguaaguuccuca

SEQ ID NO: 2582568 - RNA, 19 nt, Artificial Sequence
  Description of Artificial Sequence: Synthetic oligonucleotide
acuugagcgagaugauggg

SEQ ID NO: 2582569 - RNA, 19 nt, Artificial Sequence
  Description of Artificial Sequence: Synthetic oligonucleotide
uuaacucaucgccuacuug

SEQ ID NO: 2582570 - RNA, 19 nt, Artificial Sequence
  Description of Artificial Sequence: Synthetic oligonucleotide
augggcaauucuuuggaug

SEQ ID NO: 2582571 - RNA, 19 nt, Artificial Sequence
  Description of Artificial Sequence: Synthetic oligonucleotide
gacaucacggagcaaggac

SEQ ID NO: 2582572 - RNA, 19 nt, Artificial Sequence
  Description of Artificial Sequence: Synthetic oligonucleotide
cacgcuuuuggccagcagc

SEQ ID NO: 2582573 - RNA, 19 nt, Artificial Sequence
  Description of Artificial Sequence: Synthetic oligonucleotide
ucaguauccaggcccgagc

SEQ ID NO: 2582574 - RNA, 19 nt, Artificial Sequence
  Description of Artificial Sequence: Synthetic oligonucleotide
uuugugaugugcucaguau

SEQ ID NO: 2582575 - RNA, 19 nt, Artificial Sequence
  Description of Artificial Sequence: Synthetic oligonucleotide
uccuaaguaaguuccucac

SEQ ID NO: 2582576 - RNA, 19 nt, Artificial Sequence
  Description of Artificial Sequence: Synthetic oligonucleotide
uugugaugugcucaguauc

SEQ ID NO: 2582577 - RNA, 19 nt, Artificial Sequence
  Description of Artificial Sequence: Synthetic oligonucleotide
uauucuuccaugguaggaa

SEQ ID NO: 2582578 - RNA, 19 nt, Artificial Sequence
  Description of Artificial Sequence: Synthetic oligonucleotide
aguuccgucugucuuccuc

SEQ ID NO: 2582579 - RNA, 19 nt, Artificial Sequence
  Description of Artificial Sequence: Synthetic oligonucleotide
gaguccaggaaacaaccac

SEQ ID NO: 2582580 - RNA, 19 nt, Artificial Sequence
  Description of Artificial Sequence: Synthetic oligonucleotide
aguccaggaaacaaccacg

SEQ ID NO: 2582581 - RNA, 19 nt, Artificial Sequence
  Description of Artificial Sequence: Synthetic oligonucleotide
uccuccgacaggcugacgu

SEQ ID NO: 2582582 - RNA, 19 nt, Artificial Sequence
  Description of Artificial Sequence: Synthetic oligonucleotide
acaucacggagcaaggacg

SEQ ID NO: 2582583 - RNA, 19 nt, Artificial Sequence
  Description of Artificial Sequence: Synthetic oligonucleotide
cuuagaguuuuggaggaag

SEQ ID NO: 2582584 - RNA, 19 nt, Artificial Sequence
  Description of Artificial Sequence: Synthetic oligonucleotide
gucauuaucagcauggccu

SEQ ID NO: 2582585 - RNA, 19 nt, Artificial Sequence
  Description of Artificial Sequence: Synthetic oligonucleotide
ugacccaguaccuccagcu

SEQ ID NO: 2582586 - RNA, 19 nt, Artificial Sequence
  Description of Artificial Sequence: Synthetic oligonucleotide
uccaugguaggaacggcug

SEQ ID NO: 2582587 - RNA, 19 nt, Artificial Sequence
  Description of Artificial Sequence: Synthetic oligonucleotide
caucacggagcaaggacgg

SEQ ID NO: 2582588 - RNA, 19 nt, Artificial Sequence
  Description of Artificial Sequence: Synthetic oligonucleotide
gacguucaugaacugggcc

SEQ ID NO: 2582589 - RNA, 19 nt, Artificial Sequence
  Description of Artificial Sequence: Synthetic oligonucleotide
ugaugugcucaguauccag

SEQ ID NO: 2582590 - RNA, 19 nt, Artificial Sequence
  Description of Artificial Sequence: Synthetic oligonucleotide
agaggugaauaaauucugg

SEQ ID NO: 2582591 - RNA, 19 nt, Artificial Sequence
  Description of Artificial Sequence: Synthetic oligonucleotide
auucuccaugucucuaggg

SEQ ID NO: 2582592 - RNA, 19 nt, Artificial Sequence
  Description of Artificial Sequence: Synthetic oligonucleotide
uaaguaaguuccucacaga

SEQ ID NO: 2582593 - RNA, 19 nt, Artificial Sequence
  Description of Artificial Sequence: Synthetic oligonucleotide
gcugugguuuaacucaucg

SEQ ID NO: 2582594 - RNA, 19 nt, Artificial Sequence
  Description of Artificial Sequence: Synthetic oligonucleotide
aaggacggcucaugacugg

SEQ ID NO: 2582595 - RNA, 19 nt, Artificial Sequence
  Description of Artificial Sequence: Synthetic oligonucleotide
uuuaacucaucgccuacuu

SEQ ID NO: 2582596 - RNA, 19 nt, Artificial Sequence
  Description of Artificial Sequence: Synthetic oligonucleotide
uagaguuuuggaggaagcc

SEQ ID NO: 2582597 - RNA, 19 nt, Artificial Sequence
  Description of Artificial Sequence: Synthetic oligonucleotide
acucaucgccuacuugagc

SEQ ID NO: 2582598 - RNA, 19 nt, Artificial Sequence
  Description of Artificial Sequence: Synthetic oligonucleotide
aagacaucacggagcaagg

SEQ ID NO: 2582599 - RNA, 19 nt, Artificial Sequence
  Description of Artificial Sequence: Synthetic oligonucleotide
ucaugaacugggccgccag

SEQ ID NO: 2582600 - RNA, 19 nt, Artificial Sequence
  Description of Artificial Sequence: Synthetic oligonucleotide
aggaaacaaccacgcagac

SEQ ID NO: 2582601 - RNA, 19 nt, Artificial Sequence
  Description of Artificial Sequence: Synthetic oligonucleotide
agaguuuuggaggaagcca

SEQ ID NO: 2582602 - RNA, 19 nt, Artificial Sequence
  Description of Artificial Sequence: Synthetic oligonucleotide
gagccggccgcuuucaggc

SEQ ID NO: 2582603 - RNA, 19 nt, Artificial Sequence
  Description of Artificial Sequence: Synthetic oligonucleotide
gccgcuuucaggcugaggc

SEQ ID NO: 2582604 - RNA, 19 nt, Artificial Sequence
  Description of Artificial Sequence: Synthetic oligonucleotide
gaguccaugguacaagcaa

SEQ ID NO: 2582605 - RNA, 19 nt, Artificial Sequence
  Description of Artificial Sequence: Synthetic oligonucleotide
agguuugugaugugcucag

SEQ ID NO: 2582606 - RNA, 19 nt, Artificial Sequence
  Description of Artificial Sequence: Synthetic oligonucleotide
uucaguccaucccauuccu

SEQ ID NO: 2582607 - RNA, 19 nt, Artificial Sequence
  Description of Artificial Sequence: Synthetic oligonucleotide
gugaauaaauucugguuaa

SEQ ID NO: 2582608 - RNA, 19 nt, Artificial Sequence
  Description of Artificial Sequence: Synthetic oligonucleotide
cugugguuuaacucaucgc

SEQ ID NO: 2582609 - RNA, 19 nt, Artificial Sequence
  Description of Artificial Sequence: Synthetic oligonucleotide
accacgcagacgcugcgac

SEQ ID NO: 2582610 - RNA, 19 nt, Artificial Sequence
  Description of Artificial Sequence: Synthetic oligonucleotide
accugagaguccaugguac

SEQ ID NO: 2582611 - RNA, 19 nt, Artificial Sequence
  Description of Artificial Sequence: Synthetic oligonucleotide
acaaccacgcagacgcugc

SEQ ID NO: 2582612 - RNA, 19 nt, Artificial Sequence
  Description of Artificial Sequence: Synthetic oligonucleotide
ucacagaggugaauaaauu

SEQ ID NO: 2582613 - RNA, 19 nt, Artificial Sequence
  Description of Artificial Sequence: Synthetic oligonucleotide
augucucuagggaaggccg

SEQ ID NO: 2582614 - RNA, 19 nt, Artificial Sequence
  Description of Artificial Sequence: Synthetic oligonucleotide
guuccgucugucuuccucc

SEQ ID NO: 2582615 - RNA, 19 nt, Artificial Sequence
  Description of Artificial Sequence: Synthetic oligonucleotide
ugugcucaguauccaggcc

SEQ ID NO: 2582616 - RNA, 19 nt, Artificial Sequence
  Description of Artificial Sequence: Synthetic oligonucleotide
ugacguucaugaacugggc

SEQ ID NO: 2582617 - RNA, 19 nt, Artificial Sequence
  Description of Artificial Sequence: Synthetic oligonucleotide
caggaaacaaccacgcaga

SEQ ID NO: 2582618 - RNA, 19 nt, Artificial Sequence
  Description of Artificial Sequence: Synthetic oligonucleotide
caugucucuagggaaggcc

SEQ ID NO: 2582619 - RNA, 19 nt, Artificial Sequence
  Description of Artificial Sequence: Synthetic oligonucleotide
cagguaaacuggcacgggc

SEQ ID NO: 2582620 - RNA, 19 nt, Artificial Sequence
  Description of Artificial Sequence: Synthetic oligonucleotide
gacgcugcgacgcggggag

SEQ ID NO: 2582621 - RNA, 19 nt, Artificial Sequence
  Description of Artificial Sequence: Synthetic oligonucleotide
ucauuaucagcauggccuu

SEQ ID NO: 2582622 - RNA, 19 nt, Artificial Sequence
  Description of Artificial Sequence: Synthetic oligonucleotide
aacucaucgccuacuugag

SEQ ID NO: 2582623 - RNA, 19 nt, Artificial Sequence
  Description of Artificial Sequence: Synthetic oligonucleotide
ugguuuaacucaucgccua

SEQ ID NO: 2582624 - RNA, 19 nt, Artificial Sequence
  Description of Artificial Sequence: Synthetic oligonucleotide
cagcauggccuuuucauuc

SEQ ID NO: 2582625 - RNA, 19 nt, Artificial Sequence
  Description of Artificial Sequence: Synthetic oligonucleotide
caaggacggcucaugacug

SEQ ID NO: 2582626 - RNA, 19 nt, Artificial Sequence
  Description of Artificial Sequence: Synthetic oligonucleotide
caguauccaggcccgagcc

SEQ ID NO: 2582627 - RNA, 19 nt, Artificial Sequence
  Description of Artificial Sequence: Synthetic oligonucleotide
ggccuuuucauucuccaug

SEQ ID NO: 2582628 - RNA, 19 nt, Artificial Sequence
  Description of Artificial Sequence: Synthetic oligonucleotide
uucaggcugaggcaggguu

SEQ ID NO: 2582629 - RNA, 19 nt, Artificial Sequence
  Description of Artificial Sequence: Synthetic oligonucleotide
uggaugcugugguuuaacu

SEQ ID NO: 2582630 - RNA, 19 nt, Artificial Sequence
  Description of Artificial Sequence: Synthetic oligonucleotide
gaaucuggcuguauucuuc

SEQ ID NO: 2582631 - RNA, 19 nt, Artificial Sequence
  Description of Artificial Sequence: Synthetic oligonucleotide
uccaggaaacaaccacgca

SEQ ID NO: 2582632 - RNA, 19 nt, Artificial Sequence
  Description of Artificial Sequence: Synthetic oligonucleotide
acccaguaccuccagcucu

SEQ ID NO: 2582633 - RNA, 19 nt, Artificial Sequence
  Description of Artificial Sequence: Synthetic oligonucleotide
uuccgucugucuuccuccg

SEQ ID NO: 2582634 - RNA, 19 nt, Artificial Sequence
  Description of Artificial Sequence: Synthetic oligonucleotide
ggucauuaucagcauggcc

SEQ ID NO: 2582635 - RNA, 19 nt, Artificial Sequence
  Description of Artificial Sequence: Synthetic oligonucleotide
gccuacuugagcgagauga

SEQ ID NO: 2582636 - RNA, 19 nt, Artificial Sequence
  Description of Artificial Sequence: Synthetic oligonucleotide
guucggaagacaucacgga

SEQ ID NO: 2582637 - RNA, 19 nt, Artificial Sequence
  Description of Artificial Sequence: Synthetic oligonucleotide
aggacggcucaugacuggc

SEQ ID NO: 2582638 - RNA, 19 nt, Artificial Sequence
  Description of Artificial Sequence: Synthetic oligonucleotide
cuugagcgagaugaugggc

SEQ ID NO: 2582639 - RNA, 19 nt, Artificial Sequence
  Description of Artificial Sequence: Synthetic oligonucleotide
ugucucuagggaaggccgu

SEQ ID NO: 2582640 - RNA, 19 nt, Artificial Sequence
  Description of Artificial Sequence: Synthetic oligonucleotide
ggaaacaaccacgcagacg

SEQ ID NO: 2582641 - RNA, 19 nt, Artificial Sequence
  Description of Artificial Sequence: Synthetic oligonucleotide
cacgcagacgcugcgacgc

SEQ ID NO: 2582642 - RNA, 19 nt, Artificial Sequence
  Description of Artificial Sequence: Synthetic oligonucleotide
uuaucagcauggccuuuuc

SEQ ID NO: 2582643 - RNA, 19 nt, Artificial Sequence
  Description of Artificial Sequence: Synthetic oligonucleotide
ucaugacuggccacgcuuu

SEQ ID NO: 2582644 - RNA, 19 nt, Artificial Sequence
  Description of Artificial Sequence: Synthetic oligonucleotide
ugagcgagaugaugggcaa

SEQ ID NO: 2582645 - RNA, 19 nt, Artificial Sequence
  Description of Artificial Sequence: Synthetic oligonucleotide
guuugugaugugcucagua

SEQ ID NO: 2582646 - RNA, 19 nt, Artificial Sequence
  Description of Artificial Sequence: Synthetic oligonucleotide
cguucggaagacaucacgg

SEQ ID NO: 2582647 - RNA, 19 nt, Artificial Sequence
  Description of Artificial Sequence: Synthetic oligonucleotide
ucaucgccuacuugagcga

SEQ ID NO: 2582648 - RNA, 19 nt, Artificial Sequence
  Description of Artificial Sequence: Synthetic oligonucleotide
ucacggagcaaggacggcu

SEQ ID NO: 2582649 - RNA, 19 nt, Artificial Sequence
  Description of Artificial Sequence: Synthetic oligonucleotide
guccaggaaacaaccacgc

SEQ ID NO: 2582650 - RNA, 19 nt, Artificial Sequence
  Description of Artificial Sequence: Synthetic oligonucleotide
caucaagggcuuuggccag

SEQ ID NO: 2582651 - RNA, 19 nt, Artificial Sequence
  Description of Artificial Sequence: Synthetic oligonucleotide
uugcugaccugagagucca

SEQ ID NO: 2582652 - RNA, 19 nt, Artificial Sequence
  Description of Artificial Sequence: Synthetic oligonucleotide
aggcugacguucaugaacu

SEQ ID NO: 2582653 - RNA, 19 nt, Artificial Sequence
  Description of Artificial Sequence: Synthetic oligonucleotide
cuggccacgcuuuuggcca

SEQ ID NO: 2582654 - RNA, 19 nt, Artificial Sequence
  Description of Artificial Sequence: Synthetic oligonucleotide
guaggaacggcuggcccgg

SEQ ID NO: 2582655 - RNA, 19 nt, Artificial Sequence
  Description of Artificial Sequence: Synthetic oligonucleotide
cugcaggccuccuucaguc

SEQ ID NO: 2582656 - RNA, 19 nt, Artificial Sequence
  Description of Artificial Sequence: Synthetic oligonucleotide
gacggcucaugacuggcca

SEQ ID NO: 2582657 - RNA, 19 nt, Artificial Sequence
  Description of Artificial Sequence: Synthetic oligonucleotide
acggcucaugacuggccac

SEQ ID NO: 2582658 - RNA, 19 nt, Artificial Sequence
  Description of Artificial Sequence: Synthetic oligonucleotide
cacgggcaguuccugaccc

SEQ ID NO: 2582659 - RNA, 19 nt, Artificial Sequence
  Description of Artificial Sequence: Synthetic oligonucleotide
uggccaggcaguuccgucu

SEQ ID NO: 2582660 - RNA, 19 nt, Artificial Sequence
  Description of Artificial Sequence: Synthetic oligonucleotide
gcuuuuggccagcagcaag

SEQ ID NO: 2582661 - RNA, 19 nt, Artificial Sequence
  Description of Artificial Sequence: Synthetic oligonucleotide
acugucguucggaagacau

SEQ ID NO: 2582662 - RNA, 19 nt, Artificial Sequence
  Description of Artificial Sequence: Synthetic oligonucleotide
guauucuuccaugguagga

SEQ ID NO: 2582663 - RNA, 19 nt, Artificial Sequence
  Description of Artificial Sequence: Synthetic oligonucleotide
gcugacguucaugaacugg

SEQ ID NO: 2582664 - RNA, 19 nt, Artificial Sequence
  Description of Artificial Sequence: Synthetic oligonucleotide
uuuggccagcagcaagguc

SEQ ID NO: 2582665 - RNA, 19 nt, Artificial Sequence
  Description of Artificial Sequence: Synthetic oligonucleotide
agguaaacuggcacgggca

SEQ ID NO: 2582666 - RNA, 19 nt, Artificial Sequence
  Description of Artificial Sequence: Synthetic oligonucleotide
caugaacugggccgccagc

SEQ ID NO: 2582667 - RNA, 19 nt, Artificial Sequence
  Description of Artificial Sequence: Synthetic oligonucleotide
ucccauuccuaaguaaguu

SEQ ID NO: 2582668 - RNA, 19 nt, Artificial Sequence
  Description of Artificial Sequence: Synthetic oligonucleotide
gguacaagcaaugcagcuc

SEQ ID NO: 2582669 - RNA, 19 nt, Artificial Sequence
  Description of Artificial Sequence: Synthetic oligonucleotide
cuuuggccaggcaguuccg

SEQ ID NO: 2582670 - RNA, 19 nt, Artificial Sequence
  Description of Artificial Sequence: Synthetic oligonucleotide
uuuuggccagcagcaaggu

SEQ ID NO: 2582671 - RNA, 19 nt, Artificial Sequence
  Description of Artificial Sequence: Synthetic oligonucleotide
cuuccaugguaggaacggc

SEQ ID NO: 2582672 - RNA, 19 nt, Artificial Sequence
  Description of Artificial Sequence: Synthetic oligonucleotide
aguccaugguacaagcaau

SEQ ID NO: 2582673 - RNA, 19 nt, Artificial Sequence
  Description of Artificial Sequence: Synthetic oligonucleotide
uucauucuccaugucucua

SEQ ID NO: 2582674 - RNA, 19 nt, Artificial Sequence
  Description of Artificial Sequence: Synthetic oligonucleotide
ucacagaguccaggaaaca

SEQ ID NO: 2582675 - RNA, 19 nt, Artificial Sequence
  Description of Artificial Sequence: Synthetic oligonucleotide
cagcagguuugugaugugc

SEQ ID NO: 2582676 - RNA, 19 nt, Artificial Sequence
  Description of Artificial Sequence: Synthetic oligonucleotide
cucaguauccaggcccgag

SEQ ID NO: 2582677 - RNA, 19 nt, Artificial Sequence
  Description of Artificial Sequence: Synthetic oligonucleotide
aucacggagcaaggacggc

SEQ ID NO: 2582678 - RNA, 19 nt, Artificial Sequence
  Description of Artificial Sequence: Synthetic oligonucleotide
acgcuuuuggccagcagca

SEQ ID NO: 2582679 - RNA, 19 nt, Artificial Sequence
  Description of Artificial Sequence: Synthetic oligonucleotide
gguuuaacucaucgccuac

SEQ ID NO: 2582680 - RNA, 19 nt, Artificial Sequence
  Description of Artificial Sequence: Synthetic oligonucleotide
gucggucugcagcucgucc

SEQ ID NO: 2582681 - RNA, 19 nt, Artificial Sequence
  Description of Artificial Sequence: Synthetic oligonucleotide
gacuggccacgcuuuuggc

SEQ ID NO: 2582682 - RNA, 19 nt, Artificial Sequence
  Description of Artificial Sequence: Synthetic oligonucleotide
ucaagggcuuuggccaggc

SEQ ID NO: 2582683 - RNA, 19 nt, Artificial Sequence
  Description of Artificial Sequence: Synthetic oligonucleotide
ucucuagggaaggccgucu

SEQ ID NO: 2582684 - RNA, 19 nt, Artificial Sequence
  Description of Artificial Sequence: Synthetic oligonucleotide
cagcugucucaccagugug

SEQ ID NO: 2582685 - RNA, 19 nt, Artificial Sequence
  Description of Artificial Sequence: Synthetic oligonucleotide
cuccagacacugcuggcuc

SEQ ID NO: 2582686 - RNA, 19 nt, Artificial Sequence
  Description of Artificial Sequence: Synthetic oligonucleotide
aggcaggguuggccgaacg

SEQ ID NO: 2582687 - RNA, 19 nt, Artificial Sequence
  Description of Artificial Sequence: Synthetic oligonucleotide
aguuccugacccaguaccu

SEQ ID NO: 2582688 - RNA, 19 nt, Artificial Sequence
  Description of Artificial Sequence: Synthetic oligonucleotide
aucccauuccuaaguaagu

SEQ ID NO: 2582689 - RNA, 19 nt, Artificial Sequence
  Description of Artificial Sequence: Synthetic oligonucleotide
cugucguucggaagacauc

SEQ ID NO: 2582690 - RNA, 19 nt, Artificial Sequence
  Description of Artificial Sequence: Synthetic oligonucleotide
guuggccgaacgacacucg

SEQ ID NO: 2582691 - RNA, 19 nt, Artificial Sequence
  Description of Artificial Sequence: Synthetic oligonucleotide
caucgccuacuugagcgag

SEQ ID NO: 2582692 - RNA, 19 nt, Artificial Sequence
  Description of Artificial Sequence: Synthetic oligonucleotide
ggagccggccgcuuucagg

SEQ ID NO: 2582693 - RNA, 19 nt, Artificial Sequence
  Description of Artificial Sequence: Synthetic oligonucleotide
ucacugucguucggaagac

SEQ ID NO: 2582694 - RNA, 19 nt, Artificial Sequence
  Description of Artificial Sequence: Synthetic oligonucleotide
gacccaguaccuccagcuc

SEQ ID NO: 2582695 - RNA, 19 nt, Artificial Sequence
  Description of Artificial Sequence: Synthetic oligonucleotide
gacgcggggagccggccgc

SEQ ID NO: 2582696 - RNA, 19 nt, Artificial Sequence
  Description of Artificial Sequence: Synthetic oligonucleotide
cucguccgcauccagguaa

SEQ ID NO: 2582697 - RNA, 19 nt, Artificial Sequence
  Description of Artificial Sequence: Synthetic oligonucleotide
aggcaguuccgucugucuu

SEQ ID NO: 2582698 - RNA, 19 nt, Artificial Sequence
  Description of Artificial Sequence: Synthetic oligonucleotide
agcgagaugaugggcaauu

SEQ ID NO: 2582699 - RNA, 19 nt, Artificial Sequence
  Description of Artificial Sequence: Synthetic oligonucleotide
cccauuccuaaguaaguuc

SEQ ID NO: 2582700 - RNA, 19 nt, Artificial Sequence
  Description of Artificial Sequence: Synthetic oligonucleotide
caaccacgcagacgcugcg

SEQ ID NO: 2582701 - RNA, 19 nt, Artificial Sequence
  Description of Artificial Sequence: Synthetic oligonucleotide
gaaggccgucuucaccuca

SEQ ID NO: 2582702 - RNA, 19 nt, Artificial Sequence
  Description of Artificial Sequence: Synthetic oligonucleotide
caguaccuccagcucucgg

SEQ ID NO: 2582703 - RNA, 19 nt, Artificial Sequence
  Description of Artificial Sequence: Synthetic oligonucleotide
ucguccgcauccagguaaa

SEQ ID NO: 2582704 - RNA, 19 nt, Artificial Sequence
  Description of Artificial Sequence: Synthetic oligonucleotide
gcaaggacggcucaugacu

SEQ ID NO: 2582705 - RNA, 19 nt, Artificial Sequence
  Description of Artificial Sequence: Synthetic oligonucleotide
cugguuaauaaaguucacu

SEQ ID NO: 2582706 - RNA, 19 nt, Artificial Sequence
  Description of Artificial Sequence: Synthetic oligonucleotide
agacaucacggagcaagga

SEQ ID NO: 2582707 - RNA, 19 nt, Artificial Sequence
  Description of Artificial Sequence: Synthetic oligonucleotide
ccgucuucaccucaucaag

SEQ ID NO: 2582708 - RNA, 19 nt, Artificial Sequence
  Description of Artificial Sequence: Synthetic oligonucleotide
cuggaugcugugguuuaac

SEQ ID NO: 2582709 - RNA, 19 nt, Artificial Sequence
  Description of Artificial Sequence: Synthetic oligonucleotide
ucgccuacuugagcgagau

SEQ ID NO: 2582710 - RNA, 19 nt, Artificial Sequence
  Description of Artificial Sequence: Synthetic oligonucleotide
aaccacgcagacgcugcga

SEQ ID NO: 2582711 - RNA, 19 nt, Artificial Sequence
  Description of Artificial Sequence: Synthetic oligonucleotide
ggcaguuccgucugucuuc

SEQ ID NO: 2582712 - RNA, 19 nt, Artificial Sequence
  Description of Artificial Sequence: Synthetic oligonucleotide
ccgcauccagguaaacugg

SEQ ID NO: 2582713 - RNA, 19 nt, Artificial Sequence
  Description of Artificial Sequence: Synthetic oligonucleotide
uccgucugucuuccuccga

SEQ ID NO: 2582714 - RNA, 19 nt, Artificial Sequence
  Description of Artificial Sequence: Synthetic oligonucleotide
gaacugggccgccagcugu

SEQ ID NO: 2582715 - RNA, 19 nt, Artificial Sequence
  Description of Artificial Sequence: Synthetic oligonucleotide
cugucucaccagugugggc

SEQ ID NO: 2582716 - RNA, 19 nt, Artificial Sequence
  Description of Artificial Sequence: Synthetic oligonucleotide
gguggaaaugauacuuaga

SEQ ID NO: 2582717 - RNA, 19 nt, Artificial Sequence
  Description of Artificial Sequence: Synthetic oligonucleotide
gaugggcaauucuuuggau

SEQ ID NO: 2582718 - RNA, 19 nt, Artificial Sequence
  Description of Artificial Sequence: Synthetic oligonucleotide
acgcagacgcugcgacgcg

SEQ ID NO: 2582719 - RNA, 19 nt, Artificial Sequence
  Description of Artificial Sequence: Synthetic oligonucleotide
uggcacgggcaguuccuga

SEQ ID NO: 2582720 - RNA, 19 nt, Artificial Sequence
  Description of Artificial Sequence: Synthetic oligonucleotide
aggccgucuucaccucauc

SEQ ID NO: 2582721 - RNA, 19 nt, Artificial Sequence
  Description of Artificial Sequence: Synthetic oligonucleotide
gguuggccgaacgacacuc

SEQ ID NO: 2582722 - RNA, 19 nt, Artificial Sequence
  Description of Artificial Sequence: Synthetic oligonucleotide
guuuaacucaucgccuacu

SEQ ID NO: 2582723 - RNA, 19 nt, Artificial Sequence
  Description of Artificial Sequence: Synthetic oligonucleotide
gugguuuaacucaucgccu

SEQ ID NO: 2582724 - RNA, 19 nt, Artificial Sequence
  Description of Artificial Sequence: Synthetic oligonucleotide
ggcaauucuuuggaugaca

SEQ ID NO: 2582725 - RNA, 19 nt, Artificial Sequence
  Description of Artificial Sequence: Synthetic oligonucleotide
ugcgacgcggggagccggc

SEQ ID NO: 2582726 - RNA, 19 nt, Artificial Sequence
  Description of Artificial Sequence: Synthetic oligonucleotide
cauuccuaaguaaguuccu

SEQ ID NO: 2582727 - RNA, 19 nt, Artificial Sequence
  Description of Artificial Sequence: Synthetic oligonucleotide
gugaugugcucaguaucca

SEQ ID NO: 2582728 - RNA, 19 nt, Artificial Sequence
  Description of Artificial Sequence: Synthetic oligonucleotide
aaggccgucuucaccucau

SEQ ID NO: 2582729 - RNA, 19 nt, Artificial Sequence
  Description of Artificial Sequence: Synthetic oligonucleotide
cagcucucgguggaaauga

SEQ ID NO: 2582730 - RNA, 19 nt, Artificial Sequence
  Description of Artificial Sequence: Synthetic oligonucleotide
ggagcaaggacggcucaug

SEQ ID NO: 2582731 - RNA, 19 nt, Artificial Sequence
  Description of Artificial Sequence: Synthetic oligonucleotide
ggcacgggcaguuccugac

SEQ ID NO: 2582732 - RNA, 19 nt, Artificial Sequence
  Description of Artificial Sequence: Synthetic oligonucleotide
gcagguuugugaugugcuc

SEQ ID NO: 2582733 - RNA, 19 nt, Artificial Sequence
  Description of Artificial Sequence: Synthetic oligonucleotide
acuggcacgggcaguuccu

SEQ ID NO: 2582734 - RNA, 19 nt, Artificial Sequence
  Description of Artificial Sequence: Synthetic oligonucleotide
ccuaaguaaguuccucaca

SEQ ID NO: 2582735 - RNA, 19 nt, Artificial Sequence
  Description of Artificial Sequence: Synthetic oligonucleotide
agccguugcugaccugaga

SEQ ID NO: 2582736 - RNA, 19 nt, Artificial Sequence
  Description of Artificial Sequence: Synthetic oligonucleotide
cuuccuccgacaggcugac

SEQ ID NO: 2582737 - RNA, 19 nt, Artificial Sequence
  Description of Artificial Sequence: Synthetic oligonucleotide
gccgucggucugcagcucg

SEQ ID NO: 2582738 - RNA, 19 nt, Artificial Sequence
  Description of Artificial Sequence: Synthetic oligonucleotide
cuccgacaggcugacguuc

SEQ ID NO: 2582739 - RNA, 19 nt, Artificial Sequence
  Description of Artificial Sequence: Synthetic oligonucleotide
guauccaggcccgagccgu

SEQ ID NO: 2582740 - RNA, 19 nt, Artificial Sequence
  Description of Artificial Sequence: Synthetic oligonucleotide
cagacgcugcgacgcgggg

SEQ ID NO: 2582741 - RNA, 19 nt, Artificial Sequence
  Description of Artificial Sequence: Synthetic oligonucleotide
cugagaguccaugguacaa

SEQ ID NO: 2582742 - RNA, 19 nt, Artificial Sequence
  Description of Artificial Sequence: Synthetic oligonucleotide
gccgccagcugucucacca

SEQ ID NO: 2582743 - RNA, 19 nt, Artificial Sequence
  Description of Artificial Sequence: Synthetic oligonucleotide
acgggcaguuccugaccca

SEQ ID NO: 2582744 - RNA, 19 nt, Artificial Sequence
  Description of Artificial Sequence: Synthetic oligonucleotide
gccgucuucaccucaucaa

SEQ ID NO: 2582745 - RNA, 19 nt, Artificial Sequence
  Description of Artificial Sequence: Synthetic oligonucleotide
agacgcugcgacgcgggga

SEQ ID NO: 2582746 - RNA, 19 nt, Artificial Sequence
  Description of Artificial Sequence: Synthetic oligonucleotide
ccgucugucuuccuccgac

SEQ ID NO: 2582747 - RNA, 19 nt, Artificial Sequence
  Description of Artificial Sequence: Synthetic oligonucleotide
cguucaugaacugggccgc

SEQ ID NO: 2582748 - RNA, 19 nt, Artificial Sequence
  Description of Artificial Sequence: Synthetic oligonucleotide
ggccgucuucaccucauca

SEQ ID NO: 2582749 - RNA, 19 nt, Artificial Sequence
  Description of Artificial Sequence: Synthetic oligonucleotide
gcaguuccugacccaguac

SEQ ID NO: 2582750 - RNA, 19 nt, Artificial Sequence
  Description of Artificial Sequence: Synthetic oligonucleotide
gucucuagggaaggccguc

SEQ ID NO: 2582751 - RNA, 19 nt, Artificial Sequence
  Description of Artificial Sequence: Synthetic oligonucleotide
cguugcugaccugagaguc

SEQ ID NO: 2582752 - RNA, 19 nt, Artificial Sequence
  Description of Artificial Sequence: Synthetic oligonucleotide
cgcauccagguaaacuggc

SEQ ID NO: 2582753 - RNA, 19 nt, Artificial Sequence
  Description of Artificial Sequence: Synthetic oligonucleotide
uauccaggcccgagccguu

SEQ ID NO: 2582754 - RNA, 19 nt, Artificial Sequence
  Description of Artificial Sequence: Synthetic oligonucleotide
ggccaggcaguuccgucug

SEQ ID NO: 2582755 - RNA, 19 nt, Artificial Sequence
  Description of Artificial Sequence: Synthetic oligonucleotide
ggcaggguuggccgaacga

SEQ ID NO: 2582756 - RNA, 19 nt, Artificial Sequence
  Description of Artificial Sequence: Synthetic oligonucleotide
gucguucggaagacaucac

SEQ ID NO: 2582757 - RNA, 19 nt, Artificial Sequence
  Description of Artificial Sequence: Synthetic oligonucleotide
gcacgggcaguuccugacc

SEQ ID NO: 2582758 - RNA, 19 nt, Artificial Sequence
  Description of Artificial Sequence: Synthetic oligonucleotide
cccaguaccuccagcucuc

SEQ ID NO: 2582759 - RNA, 19 nt, Artificial Sequence
  Description of Artificial Sequence: Synthetic oligonucleotide
caaugcagcuccagacacu

SEQ ID NO: 2582760 - RNA, 19 nt, Artificial Sequence
  Description of Artificial Sequence: Synthetic oligonucleotide
ccagguaaacuggcacggg

SEQ ID NO: 2582761 - RNA, 19 nt, Artificial Sequence
  Description of Artificial Sequence: Synthetic oligonucleotide
cuggcacgggcaguuccug

SEQ ID NO: 2582762 - RNA, 19 nt, Artificial Sequence
  Description of Artificial Sequence: Synthetic oligonucleotide
guccgcauccagguaaacu

SEQ ID NO: 2582763 - RNA, 19 nt, Artificial Sequence
  Description of Artificial Sequence: Synthetic oligonucleotide
ggcugacguucaugaacug

SEQ ID NO: 2582764 - RNA, 19 nt, Artificial Sequence
  Description of Artificial Sequence: Synthetic oligonucleotide
aucgccuacuugagcgaga

SEQ ID NO: 2582765 - RNA, 19 nt, Artificial Sequence
  Description of Artificial Sequence: Synthetic oligonucleotide
ccacgcagacgcugcgacg

SEQ ID NO: 2582766 - RNA, 19 nt, Artificial Sequence
  Description of Artificial Sequence: Synthetic oligonucleotide
cugcgacgcggggagccgg

SEQ ID NO: 2582767 - RNA, 19 nt, Artificial Sequence
  Description of Artificial Sequence: Synthetic oligonucleotide
uuccuccgacaggcugacg

SEQ ID NO: 2582768 - RNA, 19 nt, Artificial Sequence
  Description of Artificial Sequence: Synthetic oligonucleotide
gcauccagguaaacuggca

SEQ ID NO: 2582769 - RNA, 19 nt, Artificial Sequence
  Description of Artificial Sequence: Synthetic oligonucleotide
ggcucaugacuggccacgc

SEQ ID NO: 2582770 - RNA, 19 nt, Artificial Sequence
  Description of Artificial Sequence: Synthetic oligonucleotide
ggaaggccgucuucaccuc

SEQ ID NO: 2582771 - RNA, 19 nt, Artificial Sequence
  Description of Artificial Sequence: Synthetic oligonucleotide
gggcaauucuuuggaugac

SEQ ID NO: 2582772 - RNA, 19 nt, Artificial Sequence
  Description of Artificial Sequence: Synthetic oligonucleotide
ccaugucucuagggaaggc

SEQ ID NO: 2582773 - RNA, 19 nt, Artificial Sequence
  Description of Artificial Sequence: Synthetic oligonucleotide
gccagcugucucaccagug

SEQ ID NO: 2582774 - RNA, 19 nt, Artificial Sequence
  Description of Artificial Sequence: Synthetic oligonucleotide
ccaucccauuccuaaguaa

SEQ ID NO: 2582775 - RNA, 19 nt, Artificial Sequence
  Description of Artificial Sequence: Synthetic oligonucleotide
acugggccgccagcugucu

SEQ ID NO: 2582776 - RNA, 19 nt, Artificial Sequence
  Description of Artificial Sequence: Synthetic oligonucleotide
gcuggcccggcugccgucg

SEQ ID NO: 2582777 - RNA, 19 nt, Artificial Sequence
  Description of Artificial Sequence: Synthetic oligonucleotide
acgcugcgacgcggggagc

SEQ ID NO: 2582778 - RNA, 19 nt, Artificial Sequence
  Description of Artificial Sequence: Synthetic oligonucleotide
uggcccggcugccgucggu

SEQ ID NO: 2582779 - RNA, 19 nt, Artificial Sequence
  Description of Artificial Sequence: Synthetic oligonucleotide
gcugcgacgcggggagccg

SEQ ID NO: 2582780 - RNA, 19 nt, Artificial Sequence
  Description of Artificial Sequence: Synthetic oligonucleotide
cacugucguucggaagaca

SEQ ID NO: 2582781 - RNA, 19 nt, Artificial Sequence
  Description of Artificial Sequence: Synthetic oligonucleotide
cucaccagugugggcugga

SEQ ID NO: 2582782 - RNA, 19 nt, Artificial Sequence
  Description of Artificial Sequence: Synthetic oligonucleotide
caagggcuuuggccaggca

SEQ ID NO: 2582783 - RNA, 19 nt, Artificial Sequence
  Description of Artificial Sequence: Synthetic oligonucleotide
gcuggcucacagaguccag

SEQ ID NO: 2582784 - RNA, 19 nt, Artificial Sequence
  Description of Artificial Sequence: Synthetic oligonucleotide
gggagccggccgcuuucag

SEQ ID NO: 2582785 - RNA, 19 nt, Artificial Sequence
  Description of Artificial Sequence: Synthetic oligonucleotide
cuccuucaguccaucccau

SEQ ID NO: 2582786 - RNA, 19 nt, Artificial Sequence
  Description of Artificial Sequence: Synthetic oligonucleotide
ccgcuuucaggcugaggca

SEQ ID NO: 2582787 - RNA, 19 nt, Artificial Sequence
  Description of Artificial Sequence: Synthetic oligonucleotide
ccagcugucucaccagugu

SEQ ID NO: 2582788 - RNA, 19 nt, Artificial Sequence
  Description of Artificial Sequence: Synthetic oligonucleotide
guuccucacagaggugaau

SEQ ID NO: 2582789 - RNA, 19 nt, Artificial Sequence
  Description of Artificial Sequence: Synthetic oligonucleotide
ccacgcuuuuggccagcag

SEQ ID NO: 2582790 - RNA, 19 nt, Artificial Sequence
  Description of Artificial Sequence: Synthetic oligonucleotide
cgggcaguuccugacccag

SEQ ID NO: 2582791 - RNA, 19 nt, Artificial Sequence
  Description of Artificial Sequence: Synthetic oligonucleotide
ggccgcuuucaggcugagg

SEQ ID NO: 2582792 - RNA, 19 nt, Artificial Sequence
  Description of Artificial Sequence: Synthetic oligonucleotide
cgagccguugcugaccuga

SEQ ID NO: 2582793 - RNA, 19 nt, Artificial Sequence
  Description of Artificial Sequence: Synthetic oligonucleotide
gcccgagccguugcugacc

SEQ ID NO: 2582794 - RNA, 19 nt, Artificial Sequence
  Description of Artificial Sequence: Synthetic oligonucleotide
caugacuggccacgcuuuu

SEQ ID NO: 2582795 - RNA, 19 nt, Artificial Sequence
  Description of Artificial Sequence: Synthetic oligonucleotide
gcucucgguggaaaugaua

SEQ ID NO: 2582796 - RNA, 19 nt, Artificial Sequence
  Description of Artificial Sequence: Synthetic oligonucleotide
cucuagggaaggccgucuu

SEQ ID NO: 2582797 - RNA, 19 nt, Artificial Sequence
  Description of Artificial Sequence: Synthetic oligonucleotide
gagcgagaugaugggcaau

SEQ ID NO: 2582798 - RNA, 19 nt, Artificial Sequence
  Description of Artificial Sequence: Synthetic oligonucleotide
ccuacuugagcgagaugau

SEQ ID NO: 2582799 - RNA, 19 nt, Artificial Sequence
  Description of Artificial Sequence: Synthetic oligonucleotide
cgcagacgcugcgacgcgg

SEQ ID NO: 2582800 - RNA, 19 nt, Artificial Sequence
  Description of Artificial Sequence: Synthetic oligonucleotide
cgcugcgacgcggggagcc

SEQ ID NO: 2582801 - RNA, 19 nt, Artificial Sequence
  Description of Artificial Sequence: Synthetic oligonucleotide
cauuaucagcauggccuuu

SEQ ID NO: 2582802 - RNA, 19 nt, Artificial Sequence
  Description of Artificial Sequence: Synthetic oligonucleotide
ggguuggccgaacgacacu

SEQ ID NO: 2582803 - RNA, 19 nt, Artificial Sequence
  Description of Artificial Sequence: Synthetic oligonucleotide
ggaagacaucacggagcaa

SEQ ID NO: 2582804 - RNA, 19 nt, Artificial Sequence
  Description of Artificial Sequence: Synthetic oligonucleotide
ggcugccgucggucugcag

SEQ ID NO: 2582805 - RNA, 19 nt, Artificial Sequence
  Description of Artificial Sequence: Synthetic oligonucleotide
cccggcugccgucggucug

SEQ ID NO: 2582806 - RNA, 19 nt, Artificial Sequence
  Description of Artificial Sequence: Synthetic oligonucleotide
acgcggggagccggccgcu

SEQ ID NO: 2582807 - RNA, 19 nt, Artificial Sequence
  Description of Artificial Sequence: Synthetic oligonucleotide
ccggccgcuuucaggcuga

SEQ ID NO: 2582808 - RNA, 19 nt, Artificial Sequence
  Description of Artificial Sequence: Synthetic oligonucleotide
ggggagccggccgcuuuca

SEQ ID NO: 2582809 - RNA, 19 nt, Artificial Sequence
  Description of Artificial Sequence: Synthetic oligonucleotide
gcucaguauccaggcccga

SEQ ID NO: 2582810 - RNA, 19 nt, Artificial Sequence
  Description of Artificial Sequence: Synthetic oligonucleotide
cggggagccggccgcuuuc

SEQ ID NO: 2582811 - RNA, 19 nt, Artificial Sequence
  Description of Artificial Sequence: Synthetic oligonucleotide
cgccuacuugagcgagaug

SEQ ID NO: 2582812 - RNA, 19 nt, Artificial Sequence
  Description of Artificial Sequence: Synthetic oligonucleotide
ccgagccguugcugaccug

SEQ ID NO: 2582813 - RNA, 19 nt, Artificial Sequence
  Description of Artificial Sequence: Synthetic oligonucleotide
ccuccgacaggcugacguu

SEQ ID NO: 2582814 - RNA, 19 nt, Artificial Sequence
  Description of Artificial Sequence: Synthetic oligonucleotide
cguccgcauccagguaaac

SEQ ID NO: 2582815 - RNA, 19 nt, Artificial Sequence
  Description of Artificial Sequence: Synthetic oligonucleotide
cgucggucugcagcucguc

SEQ ID NO: 2582816 - RNA, 19 nt, Artificial Sequence
  Description of Artificial Sequence: Synthetic oligonucleotide
ccucguccgcauccaggua

SEQ ID NO: 2582817 - RNA, 19 nt, Artificial Sequence
  Description of Artificial Sequence: Synthetic oligonucleotide
gcccggcugccgucggucu

SEQ ID NO: 2582818 - RNA, 19 nt, Artificial Sequence
  Description of Artificial Sequence: Synthetic oligonucleotide
ccgucggucugcagcucgu

SEQ ID NO: 2582819 - RNA, 19 nt, Artificial Sequence
  Description of Artificial Sequence: Synthetic oligonucleotide
cgcuuuuggccagcagcaa

SEQ ID NO: 2582820 - RNA, 19 nt, Artificial Sequence
  Description of Artificial Sequence: Synthetic oligonucleotide
ccaggcccgagccguugcu

SEQ ID NO: 2582821 - RNA, 19 nt, Artificial Sequence
  Description of Artificial Sequence: Synthetic oligonucleotide
gcggggagccggccgcuuu

SEQ ID NO: 2582822 - RNA, 19 nt, Artificial Sequence
  Description of Artificial Sequence: Synthetic oligonucleotide
cggccgcuuucaggcugag

SEQ ID NO: 2582823 - RNA, 19 nt, Artificial Sequence
  Description of Artificial Sequence: Synthetic oligonucleotide
cgcggggagccggccgcuu

SEQ ID NO: 2582824 - RNA, 19 nt, Artificial Sequence
  Description of Artificial Sequence: Synthetic oligonucleotide
aauuuucacuccuagcagc

SEQ ID NO: 2582825 - RNA, 19 nt, Artificial Sequence
  Description of Artificial Sequence: Synthetic oligonucleotide
gagaagucauccuagauag

SEQ ID NO: 2582826 - RNA, 19 nt, Artificial Sequence
  Description of Artificial Sequence: Synthetic oligonucleotide
uaugcaucaacccugcucc

SEQ ID NO: 2582827 - RNA, 19 nt, Artificial Sequence
  Description of Artificial Sequence: Synthetic oligonucleotide
aaucucucaggccacaagg

SEQ ID NO: 2582828 - RNA, 19 nt, Artificial Sequence
  Description of Artificial Sequence: Synthetic oligonucleotide
uguagcugcauccaucugg

SEQ ID NO: 2582829 - RNA, 19 nt, Artificial Sequence
  Description of Artificial Sequence: Synthetic oligonucleotide
agucauccuagauaggucc

SEQ ID NO: 2582830 - RNA, 19 nt, Artificial Sequence
  Description of Artificial Sequence: Synthetic oligonucleotide
agugaugaccuguagcugc

SEQ ID NO: 2582831 - RNA, 19 nt, Artificial Sequence
  Description of Artificial Sequence: Synthetic oligonucleotide
auuugaaguagaugggagc

SEQ ID NO: 2582832 - RNA, 19 nt, Artificial Sequence
  Description of Artificial Sequence: Synthetic oligonucleotide
ugaggaaucucucaggcca

SEQ ID NO: 2582833 - RNA, 19 nt, Artificial Sequence
  Description of Artificial Sequence: Synthetic oligonucleotide
agagcuguauaguagccgc

SEQ ID NO: 2582834 - RNA, 19 nt, Artificial Sequence
  Description of Artificial Sequence: Synthetic oligonucleotide
aagacaccggcagagacgc

SEQ ID NO: 2582835 - RNA, 19 nt, Artificial Sequence
  Description of Artificial Sequence: Synthetic oligonucleotide
uacacugaaugccacaagc

SEQ ID NO: 2582836 - RNA, 19 nt, Artificial Sequence
  Description of Artificial Sequence: Synthetic oligonucleotide
aaguagaugggagcaaggc

SEQ ID NO: 2582837 - RNA, 19 nt, Artificial Sequence
  Description of Artificial Sequence: Synthetic oligonucleotide
uguagugaugaccuguagc

SEQ ID NO: 2582838 - RNA, 19 nt, Artificial Sequence
  Description of Artificial Sequence: Synthetic oligonucleotide
ugaauuucugaauuucuga

SEQ ID NO: 2582839 - RNA, 19 nt, Artificial Sequence
  Description of Artificial Sequence: Synthetic oligonucleotide
ucgaacaguacuauucugc

SEQ ID NO: 2582840 - RNA, 19 nt, Artificial Sequence
  Description of Artificial Sequence: Synthetic oligonucleotide
ucuaauauagccugggcua

SEQ ID NO: 2582841 - RNA, 19 nt, Artificial Sequence
  Description of Artificial Sequence: Synthetic oligonucleotide
uauucccucuaauauagcc

SEQ ID NO: 2582842 - RNA, 19 nt, Artificial Sequence
  Description of Artificial Sequence: Synthetic oligonucleotide
augaccuguagcugcaucc

SEQ ID NO: 2582843 - RNA, 19 nt, Artificial Sequence
  Description of Artificial Sequence: Synthetic oligonucleotide
agugcuaaugacaguaugc

SEQ ID NO: 2582844 - RNA, 19 nt, Artificial Sequence
  Description of Artificial Sequence: Synthetic oligonucleotide
auaugcaucaacccugcuc

SEQ ID NO: 2582845 - RNA, 19 nt, Artificial Sequence
  Description of Artificial Sequence: Synthetic oligonucleotide
agagacgcagcccaggagg

SEQ ID NO: 2582846 - RNA, 19 nt, Artificial Sequence
  Description of Artificial Sequence: Synthetic oligonucleotide
cucaggacaagccagcucc

SEQ ID NO: 2582847 - RNA, 19 nt, Artificial Sequence
  Description of Artificial Sequence: Synthetic oligonucleotide
aauaagagccaugaaggca

SEQ ID NO: 2582848 - RNA, 19 nt, Artificial Sequence
  Description of Artificial Sequence: Synthetic oligonucleotide
uuugaaguagaugggagca

SEQ ID NO: 2582849 - RNA, 19 nt, Artificial Sequence
  Description of Artificial Sequence: Synthetic oligonucleotide
ggcaauaagagccaugaag

SEQ ID NO: 2582850 - RNA, 19 nt, Artificial Sequence
  Description of Artificial Sequence: Synthetic oligonucleotide
agagccaugaaggcaaacc

SEQ ID NO: 2582851 - RNA, 19 nt, Artificial Sequence
  Description of Artificial Sequence: Synthetic oligonucleotide
ugcaccaugaauuucugaa

SEQ ID NO: 2582852 - RNA, 19 nt, Artificial Sequence
  Description of Artificial Sequence: Synthetic oligonucleotide
acaguaugcagaguguggc

SEQ ID NO: 2582853 - RNA, 19 nt, Artificial Sequence
  Description of Artificial Sequence: Synthetic oligonucleotide
auauagccugggcuaaucc

SEQ ID NO: 2582854 - RNA, 19 nt, Artificial Sequence
  Description of Artificial Sequence: Synthetic oligonucleotide
aaggugacauauaggaacg

SEQ ID NO: 2582855 - RNA, 19 nt, Artificial Sequence
  Description of Artificial Sequence: Synthetic oligonucleotide
aaggcaauaagagccauga

SEQ ID NO: 2582856 - RNA, 19 nt, Artificial Sequence
  Description of Artificial Sequence: Synthetic oligonucleotide
aguacuauucugcaccaug

SEQ ID NO: 2582857 - RNA, 19 nt, Artificial Sequence
  Description of Artificial Sequence: Synthetic oligonucleotide
uccaucuggaaccauuuga

SEQ ID NO: 2582858 - RNA, 19 nt, Artificial Sequence
  Description of Artificial Sequence: Synthetic oligonucleotide
aguaugcagaguguggccc

SEQ ID NO: 2582859 - RNA, 19 nt, Artificial Sequence
  Description of Artificial Sequence: Synthetic oligonucleotide
aucuggaaccauuugaagu

SEQ ID NO: 2582860 - RNA, 19 nt, Artificial Sequence
  Description of Artificial Sequence: Synthetic oligonucleotide
uucugcaccaugaauuucu

SEQ ID NO: 2582861 - RNA, 19 nt, Artificial Sequence
  Description of Artificial Sequence: Synthetic oligonucleotide
ucuggaaccauuugaagua

SEQ ID NO: 2582862 - RNA, 19 nt, Artificial Sequence
  Description of Artificial Sequence: Synthetic oligonucleotide
aaacaggcagccaauuuuc

SEQ ID NO: 2582863 - RNA, 19 nt, Artificial Sequence
  Description of Artificial Sequence: Synthetic oligonucleotide
cauuugaaguagaugggag

SEQ ID NO: 2582864 - RNA, 19 nt, Artificial Sequence
  Description of Artificial Sequence: Synthetic oligonucleotide
uucccucuaauauagccug

SEQ ID NO: 2582865 - RNA, 19 nt, Artificial Sequence
  Description of Artificial Sequence: Synthetic oligonucleotide
guugucugcagucccacgg

SEQ ID NO: 2582866 - RNA, 19 nt, Artificial Sequence
  Description of Artificial Sequence: Synthetic oligonucleotide
uccuagauagguccgucag

SEQ ID NO: 2582867 - RNA, 19 nt, Artificial Sequence
  Description of Artificial Sequence: Synthetic oligonucleotide
auaggaacgugccagcuga

SEQ ID NO: 2582868 - RNA, 19 nt, Artificial Sequence
  Description of Artificial Sequence: Synthetic oligonucleotide
aacacagagcuguauagua

SEQ ID NO: 2582869 - RNA, 19 nt, Artificial Sequence
  Description of Artificial Sequence: Synthetic oligonucleotide
uguauaguagccgccacug

SEQ ID NO: 2582870 - RNA, 19 nt, Artificial Sequence
  Description of Artificial Sequence: Synthetic oligonucleotide
agcaccuccaucuuuggug

SEQ ID NO: 2582871 - RNA, 19 nt, Artificial Sequence
  Description of Artificial Sequence: Synthetic oligonucleotide
aaugccacaagccccuuau

SEQ ID NO: 2582872 - RNA, 19 nt, Artificial Sequence
  Description of Artificial Sequence: Synthetic oligonucleotide
uauagccugggcuaauccc

SEQ ID NO: 2582873 - RNA, 19 nt, Artificial Sequence
  Description of Artificial Sequence: Synthetic oligonucleotide
aaagacaccggcagagacg

SEQ ID NO: 2582874 - RNA, 19 nt, Artificial Sequence
  Description of Artificial Sequence: Synthetic oligonucleotide
aauauagccugggcuaauc

SEQ ID NO: 2582875 - RNA, 19 nt, Artificial Sequence
  Description of Artificial Sequence: Synthetic oligonucleotide
aacgugccagcugauauuc

SEQ ID NO: 2582876 - RNA, 19 nt, Artificial Sequence
  Description of Artificial Sequence: Synthetic oligonucleotide
caauaagagccaugaaggc

SEQ ID NO: 2582877 - RNA, 19 nt, Artificial Sequence
  Description of Artificial Sequence: Synthetic oligonucleotide
ucauaugcaucaacccugc

SEQ ID NO: 2582878 - RNA, 19 nt, Artificial Sequence
  Description of Artificial Sequence: Synthetic oligonucleotide
ugauauucccucuaauaua

SEQ ID NO: 2582879 - RNA, 19 nt, Artificial Sequence
  Description of Artificial Sequence: Synthetic oligonucleotide
agcgccagucuucagcagc

SEQ ID NO: 2582880 - RNA, 19 nt, Artificial Sequence
  Description of Artificial Sequence: Synthetic oligonucleotide
acaugagugcuaaugacag

SEQ ID NO: 2582881 - RNA, 19 nt, Artificial Sequence
  Description of Artificial Sequence: Synthetic oligonucleotide
agauagguccgucagugca

SEQ ID NO: 2582882 - RNA, 19 nt, Artificial Sequence
  Description of Artificial Sequence: Synthetic oligonucleotide
ugccacaagccccuuauga

SEQ ID NO: 2582883 - RNA, 19 nt, Artificial Sequence
  Description of Artificial Sequence: Synthetic oligonucleotide
cuuaugagccagaacagca

SEQ ID NO: 2582884 - RNA, 19 nt, Artificial Sequence
  Description of Artificial Sequence: Synthetic oligonucleotide
ucugcagucccacggcuag

SEQ ID NO: 2582885 - RNA, 19 nt, Artificial Sequence
  Description of Artificial Sequence: Synthetic oligonucleotide
cuagauagguccgucagug

SEQ ID NO: 2582886 - RNA, 19 nt, Artificial Sequence
  Description of Artificial Sequence: Synthetic oligonucleotide
acacugaaugccacaagcc

SEQ ID NO: 2582887 - RNA, 19 nt, Artificial Sequence
  Description of Artificial Sequence: Synthetic oligonucleotide
caguccuagggcuaggccc

SEQ ID NO: 2582888 - RNA, 19 nt, Artificial Sequence
  Description of Artificial Sequence: Synthetic oligonucleotide
cagucauaugcaucaaccc

SEQ ID NO: 2582889 - RNA, 19 nt, Artificial Sequence
  Description of Artificial Sequence: Synthetic oligonucleotide
ugcagaguguggcccaccg

SEQ ID NO: 2582890 - RNA, 19 nt, Artificial Sequence
  Description of Artificial Sequence: Synthetic oligonucleotide
gugacauauaggaacgugc

SEQ ID NO: 2582891 - RNA, 19 nt, Artificial Sequence
  Description of Artificial Sequence: Synthetic oligonucleotide
cauauaggaacgugccagc

SEQ ID NO: 2582892 - RNA, 19 nt, Artificial Sequence
  Description of Artificial Sequence: Synthetic oligonucleotide
gucauaugcaucaacccug

SEQ ID NO: 2582893 - RNA, 19 nt, Artificial Sequence
  Description of Artificial Sequence: Synthetic oligonucleotide
guagaugggagcaaggcca

SEQ ID NO: 2582894 - RNA, 19 nt, Artificial Sequence
  Description of Artificial Sequence: Synthetic oligonucleotide
ucucucaggccacaaggca

SEQ ID NO: 2582895 - RNA, 19 nt, Artificial Sequence
  Description of Artificial Sequence: Synthetic oligonucleotide
acggcuagaccuucgaaca

SEQ ID NO: 2582896 - RNA, 19 nt, Artificial Sequence
  Description of Artificial Sequence: Synthetic oligonucleotide
aagucauccuagauagguc

SEQ ID NO: 2582897 - RNA, 19 nt, Artificial Sequence
  Description of Artificial Sequence: Synthetic oligonucleotide
guagugaugaccuguagcu

SEQ ID NO: 2582898 - RNA, 19 nt, Artificial Sequence
  Description of Artificial Sequence: Synthetic oligonucleotide
caugaaggcaaaccagcag

SEQ ID NO: 2582899 - RNA, 19 nt, Artificial Sequence
  Description of Artificial Sequence: Synthetic oligonucleotide
acuauucugcaccaugaau

SEQ ID NO: 2582900 - RNA, 19 nt, Artificial Sequence
  Description of Artificial Sequence: Synthetic oligonucleotide
uucgaacaguacuauucug

SEQ ID NO: 2582901 - RNA, 19 nt, Artificial Sequence
  Description of Artificial Sequence: Synthetic oligonucleotide
gaaccauuugaaguagaug

SEQ ID NO: 2582902 - RNA, 19 nt, Artificial Sequence
  Description of Artificial Sequence: Synthetic oligonucleotide
gacaugagugcuaaugaca

SEQ ID NO: 2582903 - RNA, 19 nt, Artificial Sequence
  Description of Artificial Sequence: Synthetic oligonucleotide
ggcagaauuucuaggaagg

SEQ ID NO: 2582904 - RNA, 19 nt, Artificial Sequence
  Description of Artificial Sequence: Synthetic oligonucleotide
cacggcuagaccuucgaac

SEQ ID NO: 2582905 - RNA, 19 nt, Artificial Sequence
  Description of Artificial Sequence: Synthetic oligonucleotide
gagccaugaaggcaaacca

SEQ ID NO: 2582906 - RNA, 19 nt, Artificial Sequence
  Description of Artificial Sequence: Synthetic oligonucleotide
agggcaaacaggcagccaa

SEQ ID NO: 2582907 - RNA, 19 nt, Artificial Sequence
  Description of Artificial Sequence: Synthetic oligonucleotide
cuaaucccugcgcuggucc

SEQ ID NO: 2582908 - RNA, 19 nt, Artificial Sequence
  Description of Artificial Sequence: Synthetic oligonucleotide
gaugggagcaaggccacag

SEQ ID NO: 2582909 - RNA, 19 nt, Artificial Sequence
  Description of Artificial Sequence: Synthetic oligonucleotide
cagaaagacaccggcagag

SEQ ID NO: 2582910 - RNA, 19 nt, Artificial Sequence
  Description of Artificial Sequence: Synthetic oligonucleotide
aucucucaggccacaaggc

SEQ ID NO: 2582911 - RNA, 19 nt, Artificial Sequence
  Description of Artificial Sequence: Synthetic oligonucleotide
cagaguguggcccaccgug

SEQ ID NO: 2582912 - RNA, 19 nt, Artificial Sequence
  Description of Artificial Sequence: Synthetic oligonucleotide
gaacaguacuauucugcac

SEQ ID NO: 2582913 - RNA, 19 nt, Artificial Sequence
  Description of Artificial Sequence: Synthetic oligonucleotide
ugagaacucuguagugaug

SEQ ID NO: 2582914 - RNA, 19 nt, Artificial Sequence
  Description of Artificial Sequence: Synthetic oligonucleotide
gauagguccgucagugcag

SEQ ID NO: 2582915 - RNA, 19 nt, Artificial Sequence
  Description of Artificial Sequence: Synthetic oligonucleotide
uccgucagugcagugagga

SEQ ID NO: 2582916 - RNA, 19 nt, Artificial Sequence
  Description of Artificial Sequence: Synthetic oligonucleotide
gaagucauccuagauaggu

SEQ ID NO: 2582917 - RNA, 19 nt, Artificial Sequence
  Description of Artificial Sequence: Synthetic oligonucleotide
caggccuacacugaaugcc

SEQ ID NO: 2582918 - RNA, 19 nt, Artificial Sequence
  Description of Artificial Sequence: Synthetic oligonucleotide
gacauauaggaacgugcca

SEQ ID NO: 2582919 - RNA, 19 nt, Artificial Sequence
  Description of Artificial Sequence: Synthetic oligonucleotide
uacuauucugcaccaugaa

SEQ ID NO: 2582920 - RNA, 19 nt, Artificial Sequence
  Description of Artificial Sequence: Synthetic oligonucleotide
gacaccggcagagacgcag

SEQ ID NO: 2582921 - RNA, 19 nt, Artificial Sequence
  Description of Artificial Sequence: Synthetic oligonucleotide
ucccucuaauauagccugg

SEQ ID NO: 2582922 - RNA, 19 nt, Artificial Sequence
  Description of Artificial Sequence: Synthetic oligonucleotide
uguugucugcagucccacg

SEQ ID NO: 2582923 - RNA, 19 nt, Artificial Sequence
  Description of Artificial Sequence: Synthetic oligonucleotide
acaguacuauucugcacca

SEQ ID NO: 2582924 - RNA, 19 nt, Artificial Sequence
  Description of Artificial Sequence: Synthetic oligonucleotide
gacaagccagcucccgggg

SEQ ID NO: 2582925 - RNA, 19 nt, Artificial Sequence
  Description of Artificial Sequence: Synthetic oligonucleotide
ccuucgaacaguacuauuc

SEQ ID NO: 2582926 - RNA, 19 nt, Artificial Sequence
  Description of Artificial Sequence: Synthetic oligonucleotide
gcagucauaugcaucaacc

SEQ ID NO: 2582927 - RNA, 19 nt, Artificial Sequence
  Description of Artificial Sequence: Synthetic oligonucleotide
auucccucuaauauagccu

SEQ ID NO: 2582928 - RNA, 19 nt, Artificial Sequence
  Description of Artificial Sequence: Synthetic oligonucleotide
uccggccacagucaguccu

SEQ ID NO: 2582929 - RNA, 19 nt, Artificial Sequence
  Description of Artificial Sequence: Synthetic oligonucleotide
ucuaggaaggugacauaua

SEQ ID NO: 2582930 - RNA, 19 nt, Artificial Sequence
  Description of Artificial Sequence: Synthetic oligonucleotide
agccagaagggcaaacagg

SEQ ID NO: 2582931 - RNA, 19 nt, Artificial Sequence
  Description of Artificial Sequence: Synthetic oligonucleotide
gaauuucuaggaaggugac

SEQ ID NO: 2582932 - RNA, 19 nt, Artificial Sequence
  Description of Artificial Sequence: Synthetic oligonucleotide
cagagcuguauaguagccg

SEQ ID NO: 2582933 - RNA, 19 nt, Artificial Sequence
  Description of Artificial Sequence: Synthetic oligonucleotide
auuuucacuccuagcagca

SEQ ID NO: 2582934 - RNA, 19 nt, Artificial Sequence
  Description of Artificial Sequence: Synthetic oligonucleotide
ucucaggccacaaggcaau

SEQ ID NO: 2582935 - RNA, 19 nt, Artificial Sequence
  Description of Artificial Sequence: Synthetic oligonucleotide
caguaugcagaguguggcc

SEQ ID NO: 2582936 - RNA, 19 nt, Artificial Sequence
  Description of Artificial Sequence: Synthetic oligonucleotide
aaucccugcgcuggucccg

SEQ ID NO: 2582937 - RNA, 19 nt, Artificial Sequence
  Description of Artificial Sequence: Synthetic oligonucleotide
auauucccucuaauauagc

SEQ ID NO: 2582938 - RNA, 19 nt, Artificial Sequence
  Description of Artificial Sequence: Synthetic oligonucleotide
uagauagguccgucagugc

SEQ ID NO: 2582939 - RNA, 19 nt, Artificial Sequence
  Description of Artificial Sequence: Synthetic oligonucleotide
cugauauucccucuaauau

SEQ ID NO: 2582940 - RNA, 19 nt, Artificial Sequence
  Description of Artificial Sequence: Synthetic oligonucleotide
augcaucaacccugcuccc

SEQ ID NO: 2582941 - RNA, 19 nt, Artificial Sequence
  Description of Artificial Sequence: Synthetic oligonucleotide
ugggcuaaucccugcgcug

SEQ ID NO: 2582942 - RNA, 19 nt, Artificial Sequence
  Description of Artificial Sequence: Synthetic oligonucleotide
gucauccuagauagguccg

SEQ ID NO: 2582943 - RNA, 19 nt, Artificial Sequence
  Description of Artificial Sequence: Synthetic oligonucleotide
caaggcaauaagagccaug

SEQ ID NO: 2582944 - RNA, 19 nt, Artificial Sequence
  Description of Artificial Sequence: Synthetic oligonucleotide
ucaggacaagccagcuccc

SEQ ID NO: 2582945 - RNA, 19 nt, Artificial Sequence
  Description of Artificial Sequence: Synthetic oligonucleotide
guacuauucugcaccauga

SEQ ID NO: 2582946 - RNA, 19 nt, Artificial Sequence
  Description of Artificial Sequence: Synthetic oligonucleotide
ggccacaaggcaauaagag

SEQ ID NO: 2582947 - RNA, 19 nt, Artificial Sequence
  Description of Artificial Sequence: Synthetic oligonucleotide
uaguagccgccacuguugu

SEQ ID NO: 2582948 - RNA, 19 nt, Artificial Sequence
  Description of Artificial Sequence: Synthetic oligonucleotide
uaaucccugcgcugguccc

SEQ ID NO: 2582949 - RNA, 19 nt, Artificial Sequence
  Description of Artificial Sequence: Synthetic oligonucleotide
uagugaugaccuguagcug

SEQ ID NO: 2582950 - RNA, 19 nt, Artificial Sequence
  Description of Artificial Sequence: Synthetic oligonucleotide
cuacacugaaugccacaag

SEQ ID NO: 2582951 - RNA, 19 nt, Artificial Sequence
  Description of Artificial Sequence: Synthetic oligonucleotide
ugaccuguagcugcaucca

SEQ ID NO: 2582952 - RNA, 19 nt, Artificial Sequence
  Description of Artificial Sequence: Synthetic oligonucleotide
cacuccuagcagcaccucc

SEQ ID NO: 2582953 - RNA, 19 nt, Artificial Sequence
  Description of Artificial Sequence: Synthetic oligonucleotide
auccuagauagguccguca

SEQ ID NO: 2582954 - RNA, 19 nt, Artificial Sequence
  Description of Artificial Sequence: Synthetic oligonucleotide
ggacaugagugcuaaugac

SEQ ID NO: 2582955 - RNA, 19 nt, Artificial Sequence
  Description of Artificial Sequence: Synthetic oligonucleotide
auauaggaacgugccagcu

SEQ ID NO: 2582956 - RNA, 19 nt, Artificial Sequence
  Description of Artificial Sequence: Synthetic oligonucleotide
ccauacuuggccagagggg

SEQ ID NO: 2582957 - RNA, 19 nt, Artificial Sequence
  Description of Artificial Sequence: Synthetic oligonucleotide
cacagccauacuuggccag

SEQ ID NO: 2582958 - RNA, 19 nt, Artificial Sequence
  Description of Artificial Sequence: Synthetic oligonucleotide
gguccgucagugcagugag

SEQ ID NO: 2582959 - RNA, 19 nt, Artificial Sequence
  Description of Artificial Sequence: Synthetic oligonucleotide
ggggacaugagugcuaaug

SEQ ID NO: 2582960 - RNA, 19 nt, Artificial Sequence
  Description of Artificial Sequence: Synthetic oligonucleotide
agcuguauaguagccgcca

SEQ ID NO: 2582961 - RNA, 19 nt, Artificial Sequence
  Description of Artificial Sequence: Synthetic oligonucleotide
ugcgcuggucccgaggccc

SEQ ID NO: 2582962 - RNA, 19 nt, Artificial Sequence
  Description of Artificial Sequence: Synthetic oligonucleotide
ggugacauauaggaacgug

SEQ ID NO: 2582963 - RNA, 19 nt, Artificial Sequence
  Description of Artificial Sequence: Synthetic oligonucleotide
gcugauauucccucuaaua

SEQ ID NO: 2582964 - RNA, 19 nt, Artificial Sequence
  Description of Artificial Sequence: Synthetic oligonucleotide
ucauccuagauagguccgu

SEQ ID NO: 2582965 - RNA, 19 nt, Artificial Sequence
  Description of Artificial Sequence: Synthetic oligonucleotide
ugacccagcgccagucuuc

SEQ ID NO: 2582966 - RNA, 19 nt, Artificial Sequence
  Description of Artificial Sequence: Synthetic oligonucleotide
acccugcucccagaaagac

SEQ ID NO: 2582967 - RNA, 19 nt, Artificial Sequence
  Description of Artificial Sequence: Synthetic oligonucleotide
aacaggcagccaauuuuca

SEQ ID NO: 2582968 - RNA, 19 nt, Artificial Sequence
  Description of Artificial Sequence: Synthetic oligonucleotide
gccaauuuucacuccuagc

SEQ ID NO: 2582969 - RNA, 19 nt, Artificial Sequence
  Description of Artificial Sequence: Synthetic oligonucleotide
cuagaccuucgaacaguac

SEQ ID NO: 2582970 - RNA, 19 nt, Artificial Sequence
  Description of Artificial Sequence: Synthetic oligonucleotide
ucaacccugcucccagaaa

SEQ ID NO: 2582971 - RNA, 19 nt, Artificial Sequence
  Description of Artificial Sequence: Synthetic oligonucleotide
cuucgaacaguacuauucu

SEQ ID NO: 2582972 - RNA, 19 nt, Artificial Sequence
  Description of Artificial Sequence: Synthetic oligonucleotide
agaccuucgaacaguacua

SEQ ID NO: 2582973 - RNA, 19 nt, Artificial Sequence
  Description of Artificial Sequence: Synthetic oligonucleotide
agaagucauccuagauagg

SEQ ID NO: 2582974 - RNA, 19 nt, Artificial Sequence
  Description of Artificial Sequence: Synthetic oligonucleotide
acuccuagcagcaccucca

SEQ ID NO: 2582975 - RNA, 19 nt, Artificial Sequence
  Description of Artificial Sequence: Synthetic oligonucleotide
aguagccgccacuguuguc

SEQ ID NO: 2582976 - RNA, 19 nt, Artificial Sequence
  Description of Artificial Sequence: Synthetic oligonucleotide
ucccacggcuagaccuucg

SEQ ID NO: 2582977 - RNA, 19 nt, Artificial Sequence
  Description of Artificial Sequence: Synthetic oligonucleotide
aguccuagggcuaggccca

SEQ ID NO: 2582978 - RNA, 19 nt, Artificial Sequence
  Description of Artificial Sequence: Synthetic oligonucleotide
uaagagccaugaaggcaaa

SEQ ID NO: 2582979 - RNA, 19 nt, Artificial Sequence
  Description of Artificial Sequence: Synthetic oligonucleotide
cucucaggccacaaggcaa

SEQ ID NO: 2582980 - RNA, 19 nt, Artificial Sequence
  Description of Artificial Sequence: Synthetic oligonucleotide
augacaguaugcagagugu

SEQ ID NO: 2582981 - RNA, 19 nt, Artificial Sequence
  Description of Artificial Sequence: Synthetic oligonucleotide
gugugagagccagaagggc

SEQ ID NO: 2582982 - RNA, 19 nt, Artificial Sequence
  Description of Artificial Sequence: Synthetic oligonucleotide
gagacgcagcccaggaggc

SEQ ID NO: 2582983 - RNA, 19 nt, Artificial Sequence
  Description of Artificial Sequence: Synthetic oligonucleotide
gagcuguauaguagccgcc

SEQ ID NO: 2582984 - RNA, 19 nt, Artificial Sequence
  Description of Artificial Sequence: Synthetic oligonucleotide
gaguguggcccaccgugac

SEQ ID NO: 2582985 - RNA, 19 nt, Artificial Sequence
  Description of Artificial Sequence: Synthetic oligonucleotide
cuaauauagccugggcuaa

SEQ ID NO: 2582986 - RNA, 19 nt, Artificial Sequence
  Description of Artificial Sequence: Synthetic oligonucleotide
caaacaggcagccaauuuu

SEQ ID NO: 2582987 - RNA, 19 nt, Artificial Sequence
  Description of Artificial Sequence: Synthetic oligonucleotide
caggcagccaauuuucacu

SEQ ID NO: 2582988 - RNA, 19 nt, Artificial Sequence
  Description of Artificial Sequence: Synthetic oligonucleotide
auagguccgucagugcagu

SEQ ID NO: 2582989 - RNA, 19 nt, Artificial Sequence
  Description of Artificial Sequence: Synthetic oligonucleotide
cagagacgcagcccaggag

SEQ ID NO: 2582990 - RNA, 19 nt, Artificial Sequence
  Description of Artificial Sequence: Synthetic oligonucleotide
agguccgucagugcaguga

SEQ ID NO: 2582991 - RNA, 19 nt, Artificial Sequence
  Description of Artificial Sequence: Synthetic oligonucleotide
uaauauagccugggcuaau

SEQ ID NO: 2582992 - RNA, 19 nt, Artificial Sequence
  Description of Artificial Sequence: Synthetic oligonucleotide
guagccgccacuguugucu

SEQ ID NO: 2582993 - RNA, 19 nt, Artificial Sequence
  Description of Artificial Sequence: Synthetic oligonucleotide
gggcuaaucccugcgcugg

SEQ ID NO: 2582994 - RNA, 19 nt, Artificial Sequence
  Description of Artificial Sequence: Synthetic oligonucleotide
ccuuaugagccagaacagc

SEQ ID NO: 2582995 - RNA, 19 nt, Artificial Sequence
  Description of Artificial Sequence: Synthetic oligonucleotide
aggccuacacugaaugcca

SEQ ID NO: 2582996 - RNA, 19 nt, Artificial Sequence
  Description of Artificial Sequence: Synthetic oligonucleotide
caagccccuuaugagccag

SEQ ID NO: 2582997 - RNA, 19 nt, Artificial Sequence
  Description of Artificial Sequence: Synthetic oligonucleotide
ccacagucaguccuagggc

SEQ ID NO: 2582998 - RNA, 19 nt, Artificial Sequence
  Description of Artificial Sequence: Synthetic oligonucleotide
caggacaagccagcucccg

SEQ ID NO: 2582999 - RNA, 19 nt, Artificial Sequence
  Description of Artificial Sequence: Synthetic oligonucleotide
cagucaguccuagggcuag

SEQ ID NO: 2583000 - RNA, 19 nt, Artificial Sequence
  Description of Artificial Sequence: Synthetic oligonucleotide
aagggcaaacaggcagcca

SEQ ID NO: 2583001 - RNA, 19 nt, Artificial Sequence
  Description of Artificial Sequence: Synthetic oligonucleotide
acaagccccuuaugagcca

SEQ ID NO: 2583002 - RNA, 19 nt, Artificial Sequence
  Description of Artificial Sequence: Synthetic oligonucleotide
agccgccacuguugucugc

SEQ ID NO: 2583003 - RNA, 19 nt, Artificial Sequence
  Description of Artificial Sequence: Synthetic oligonucleotide
accuucgaacaguacuauu

SEQ ID NO: 2583004 - RNA, 19 nt, Artificial Sequence
  Description of Artificial Sequence: Synthetic oligonucleotide
aggcaaaccagcagccaca

SEQ ID NO: 2583005 - RNA, 19 nt, Artificial Sequence
  Description of Artificial Sequence: Synthetic oligonucleotide
cauccuagauagguccguc

SEQ ID NO: 2583006 - RNA, 19 nt, Artificial Sequence
  Description of Artificial Sequence: Synthetic oligonucleotide
ucagugcagugaggaaucu

SEQ ID NO: 2583007 - RNA, 19 nt, Artificial Sequence
  Description of Artificial Sequence: Synthetic oligonucleotide
uggucccgaggccccuccg

SEQ ID NO: 2583008 - RNA, 19 nt, Artificial Sequence
  Description of Artificial Sequence: Synthetic oligonucleotide
acaaggcaauaagagccau

SEQ ID NO: 2583009 - RNA, 19 nt, Artificial Sequence
  Description of Artificial Sequence: Synthetic oligonucleotide
cccucuaauauagccuggg

SEQ ID NO: 2583010 - RNA, 19 nt, Artificial Sequence
  Description of Artificial Sequence: Synthetic oligonucleotide
gcaggccuacacugaaugc

SEQ ID NO: 2583011 - RNA, 19 nt, Artificial Sequence
  Description of Artificial Sequence: Synthetic oligonucleotide
cccagcgccagucuucagc

SEQ ID NO: 2583012 - RNA, 19 nt, Artificial Sequence
  Description of Artificial Sequence: Synthetic oligonucleotide
ccacagcccagugugagag

SEQ ID NO: 2583013 - RNA, 19 nt, Artificial Sequence
  Description of Artificial Sequence: Synthetic oligonucleotide
ccugcgcuggucccgaggc

SEQ ID NO: 2583014 - RNA, 19 nt, Artificial Sequence
  Description of Artificial Sequence: Synthetic oligonucleotide
caccggcagagacgcagcc

SEQ ID NO: 2583015 - RNA, 19 nt, Artificial Sequence
  Description of Artificial Sequence: Synthetic oligonucleotide
agaguguggcccaccguga

SEQ ID NO: 2583016 - RNA, 19 nt, Artificial Sequence
  Description of Artificial Sequence: Synthetic oligonucleotide
ggaacgugccagcugauau

SEQ ID NO: 2583017 - RNA, 19 nt, Artificial Sequence
  Description of Artificial Sequence: Synthetic oligonucleotide
cagccauacuuggccagag

SEQ ID NO: 2583018 - RNA, 19 nt, Artificial Sequence
  Description of Artificial Sequence: Synthetic oligonucleotide
gccugggcuaaucccugcg

SEQ ID NO: 2583019 - RNA, 19 nt, Artificial Sequence
  Description of Artificial Sequence: Synthetic oligonucleotide
ccuagggcuaggcccacag

SEQ ID NO: 2583020 - RNA, 19 nt, Artificial Sequence
  Description of Artificial Sequence: Synthetic oligonucleotide
cgaacaguacuauucugca

SEQ ID NO: 2583021 - RNA, 19 nt, Artificial Sequence
  Description of Artificial Sequence: Synthetic oligonucleotide
uaggaacgugccagcugau

SEQ ID NO: 2583022 - RNA, 19 nt, Artificial Sequence
  Description of Artificial Sequence: Synthetic oligonucleotide
gcucccagaaagacaccgg

SEQ ID NO: 2583023 - RNA, 19 nt, Artificial Sequence
  Description of Artificial Sequence: Synthetic oligonucleotide
ccauuugaaguagauggga

SEQ ID NO: 2583024 - RNA, 19 nt, Artificial Sequence
  Description of Artificial Sequence: Synthetic oligonucleotide
gaacgugccagcugauauu

SEQ ID NO: 2583025 - RNA, 19 nt, Artificial Sequence
  Description of Artificial Sequence: Synthetic oligonucleotide
uagguccgucagugcagug

SEQ ID NO: 2583026 - RNA, 19 nt, Artificial Sequence
  Description of Artificial Sequence: Synthetic oligonucleotide
ggcagagacgcagcccagg

SEQ ID NO: 2583027 - RNA, 19 nt, Artificial Sequence
  Description of Artificial Sequence: Synthetic oligonucleotide
cugcucccagaaagacacc

SEQ ID NO: 2583028 - RNA, 19 nt, Artificial Sequence
  Description of Artificial Sequence: Synthetic oligonucleotide
gacccagcgccagucuuca

SEQ ID NO: 2583029 - RNA, 19 nt, Artificial Sequence
  Description of Artificial Sequence: Synthetic oligonucleotide
cuguauaguagccgccacu

SEQ ID NO: 2583030 - RNA, 19 nt, Artificial Sequence
  Description of Artificial Sequence: Synthetic oligonucleotide
cuggucccgaggccccucc

SEQ ID NO: 2583031 - RNA, 19 nt, Artificial Sequence
  Description of Artificial Sequence: Synthetic oligonucleotide
ccugggcuaaucccugcgc

SEQ ID NO: 2583032 - RNA, 19 nt, Artificial Sequence
  Description of Artificial Sequence: Synthetic oligonucleotide
guauaguagccgccacugu

SEQ ID NO: 2583033 - RNA, 19 nt, Artificial Sequence
  Description of Artificial Sequence: Synthetic oligonucleotide
cagugcagugaggaaucuc

SEQ ID NO: 2583034 - RNA, 19 nt, Artificial Sequence
  Description of Artificial Sequence: Synthetic oligonucleotide
cgcaggccuacacugaaug

SEQ ID NO: 2583035 - RNA, 19 nt, Artificial Sequence
  Description of Artificial Sequence: Synthetic oligonucleotide
gcagagacgcagcccagga

SEQ ID NO: 2583036 - RNA, 19 nt, Artificial Sequence
  Description of Artificial Sequence: Synthetic oligonucleotide
gcagccaauuuucacuccu

SEQ ID NO: 2583037 - RNA, 19 nt, Artificial Sequence
  Description of Artificial Sequence: Synthetic oligonucleotide
gaguguccucaggagaagu

SEQ ID NO: 2583038 - RNA, 19 nt, Artificial Sequence
  Description of Artificial Sequence: Synthetic oligonucleotide
accgugacccagcgccagu

SEQ ID NO: 2583039 - RNA, 19 nt, Artificial Sequence
  Description of Artificial Sequence: Synthetic oligonucleotide
gggcuaggcccacagggga

SEQ ID NO: 2583040 - RNA, 19 nt, Artificial Sequence
  Description of Artificial Sequence: Synthetic oligonucleotide
caugagugcuaaugacagu

SEQ ID NO: 2583041 - RNA, 19 nt, Artificial Sequence
  Description of Artificial Sequence: Synthetic oligonucleotide
agccccuuaugagccagaa

SEQ ID NO: 2583042 - RNA, 19 nt, Artificial Sequence
  Description of Artificial Sequence: Synthetic oligonucleotide
gccagaacagcaacacaga

SEQ ID NO: 2583043 - RNA, 19 nt, Artificial Sequence
  Description of Artificial Sequence: Synthetic oligonucleotide
ucacuccuagcagcaccuc

SEQ ID NO: 2583044 - RNA, 19 nt, Artificial Sequence
  Description of Artificial Sequence: Synthetic oligonucleotide
cagccaauuuucacuccua

SEQ ID NO: 2583045 - RNA, 19 nt, Artificial Sequence
  Description of Artificial Sequence: Synthetic oligonucleotide
caccuccaucuuuggugug

SEQ ID NO: 2583046 - RNA, 19 nt, Artificial Sequence
  Description of Artificial Sequence: Synthetic oligonucleotide
caccgugacccagcgccag

SEQ ID NO: 2583047 - RNA, 19 nt, Artificial Sequence
  Description of Artificial Sequence: Synthetic oligonucleotide
gcaccuccaucuuuggugu

SEQ ID NO: 2583048 - RNA, 19 nt, Artificial Sequence
  Description of Artificial Sequence: Synthetic oligonucleotide
ccagugugagagccagaag

SEQ ID NO: 2583049 - RNA, 19 nt, Artificial Sequence
  Description of Artificial Sequence: Synthetic oligonucleotide
gccuacacugaaugccaca

SEQ ID NO: 2583050 - RNA, 19 nt, Artificial Sequence
  Description of Artificial Sequence: Synthetic oligonucleotide
cuccggccacagucagucc

SEQ ID NO: 2583051 - RNA, 19 nt, Artificial Sequence
  Description of Artificial Sequence: Synthetic oligonucleotide
ccuacacugaaugccacaa

SEQ ID NO: 2583052 - RNA, 19 nt, Artificial Sequence
  Description of Artificial Sequence: Synthetic oligonucleotide
agucccacggcuagaccuu

SEQ ID NO: 2583053 - RNA, 19 nt, Artificial Sequence
  Description of Artificial Sequence: Synthetic oligonucleotide
agaugggagcaaggccaca

SEQ ID NO: 2583054 - RNA, 19 nt, Artificial Sequence
  Description of Artificial Sequence: Synthetic oligonucleotide
gcaccaugaauuucugaau

SEQ ID NO: 2583055 - RNA, 19 nt, Artificial Sequence
  Description of Artificial Sequence: Synthetic oligonucleotide
ugcauccaucuggaaccau

SEQ ID NO: 2583056 - RNA, 19 nt, Artificial Sequence
  Description of Artificial Sequence: Synthetic oligonucleotide
gaccuucgaacaguacuau

SEQ ID NO: 2583057 - RNA, 19 nt, Artificial Sequence
  Description of Artificial Sequence: Synthetic oligonucleotide
ccagaaagacaccggcaga

SEQ ID NO: 2583058 - RNA, 19 nt, Artificial Sequence
  Description of Artificial Sequence: Synthetic oligonucleotide
gaccuguagcugcauccau

SEQ ID NO: 2583059 - RNA, 19 nt, Artificial Sequence
  Description of Artificial Sequence: Synthetic oligonucleotide
cagccacacagccauacuu

SEQ ID NO: 2583060 - RNA, 19 nt, Artificial Sequence
  Description of Artificial Sequence: Synthetic oligonucleotide
gcagucccacggcuagacc

SEQ ID NO: 2583061 - RNA, 19 nt, Artificial Sequence
  Description of Artificial Sequence: Synthetic oligonucleotide
uccuagggcuaggcccaca

SEQ ID NO: 2583062 - RNA, 19 nt, Artificial Sequence
  Description of Artificial Sequence: Synthetic oligonucleotide
cugcauccaucuggaacca

SEQ ID NO: 2583063 - RNA, 19 nt, Artificial Sequence
  Description of Artificial Sequence: Synthetic oligonucleotide
ccucaggacaagccagcuc

SEQ ID NO: 2583064 - RNA, 19 nt, Artificial Sequence
  Description of Artificial Sequence: Synthetic oligonucleotide
cacaggggacaugagugcu

SEQ ID NO: 2583065 - RNA, 19 nt, Artificial Sequence
  Description of Artificial Sequence: Synthetic oligonucleotide
aggggacaugagugcuaau

SEQ ID NO: 2583066 - RNA, 19 nt, Artificial Sequence
  Description of Artificial Sequence: Synthetic oligonucleotide
agccgcaggccuacacuga

SEQ ID NO: 2583067 - RNA, 19 nt, Artificial Sequence
  Description of Artificial Sequence: Synthetic oligonucleotide
acccagcgccagucuucag

SEQ ID NO: 2583068 - RNA, 19 nt, Artificial Sequence
  Description of Artificial Sequence: Synthetic oligonucleotide
gaggccccuccggccacag

SEQ ID NO: 2583069 - RNA, 19 nt, Artificial Sequence
  Description of Artificial Sequence: Synthetic oligonucleotide
cccagugugagagccagaa

SEQ ID NO: 2583070 - RNA, 19 nt, Artificial Sequence
  Description of Artificial Sequence: Synthetic oligonucleotide
gccccuuaugagccagaac

SEQ ID NO: 2583071 - RNA, 19 nt, Artificial Sequence
  Description of Artificial Sequence: Synthetic oligonucleotide
ggcuaggcccacaggggac

SEQ ID NO: 2583072 - RNA, 19 nt, Artificial Sequence
  Description of Artificial Sequence: Synthetic oligonucleotide
ggcuagaccuucgaacagu

SEQ ID NO: 2583073 - RNA, 19 nt, Artificial Sequence
  Description of Artificial Sequence: Synthetic oligonucleotide
gcuaggcccacaggggaca

SEQ ID NO: 2583074 - RNA, 19 nt, Artificial Sequence
  Description of Artificial Sequence: Synthetic oligonucleotide
ggaaucucucaggccacaa

SEQ ID NO: 2583075 - RNA, 19 nt, Artificial Sequence
  Description of Artificial Sequence: Synthetic oligonucleotide
ggccuacacugaaugccac

SEQ ID NO: 2583076 - RNA, 19 nt, Artificial Sequence
  Description of Artificial Sequence: Synthetic oligonucleotide
cauaugcaucaacccugcu

SEQ ID NO: 2583077 - RNA, 19 nt, Artificial Sequence
  Description of Artificial Sequence: Synthetic oligonucleotide
gccgcaggccuacacugaa

SEQ ID NO: 2583078 - RNA, 19 nt, Artificial Sequence
  Description of Artificial Sequence: Synthetic oligonucleotide
gugacccagcgccagucuu

SEQ ID NO: 2583079 - RNA, 19 nt, Artificial Sequence
  Description of Artificial Sequence: Synthetic oligonucleotide
cggcuagaccuucgaacag

SEQ ID NO: 2583080 - RNA, 19 nt, Artificial Sequence
  Description of Artificial Sequence: Synthetic oligonucleotide
cccugcgcuggucccgagg

SEQ ID NO: 2583081 - RNA, 19 nt, Artificial Sequence
  Description of Artificial Sequence: Synthetic oligonucleotide
gucccacggcuagaccuuc

SEQ ID NO: 2583082 - RNA, 19 nt, Artificial Sequence
  Description of Artificial Sequence: Synthetic oligonucleotide
gccagcugauauucccucu

SEQ ID NO: 2583083 - RNA, 19 nt, Artificial Sequence
  Description of Artificial Sequence: Synthetic oligonucleotide
ccuagauagguccgucagu

SEQ ID NO: 2583084 - RNA, 19 nt, Artificial Sequence
  Description of Artificial Sequence: Synthetic oligonucleotide
guccuagggcuaggcccac

SEQ ID NO: 2583085 - RNA, 19 nt, Artificial Sequence
  Description of Artificial Sequence: Synthetic oligonucleotide
ccccuccggccacagucag

SEQ ID NO: 2583086 - RNA, 19 nt, Artificial Sequence
  Description of Artificial Sequence: Synthetic oligonucleotide
cccacggcuagaccuucga

SEQ ID NO: 2583087 - RNA, 19 nt, Artificial Sequence
  Description of Artificial Sequence: Synthetic oligonucleotide
ggcuaaucccugcgcuggu

SEQ ID NO: 2583088 - RNA, 19 nt, Artificial Sequence
  Description of Artificial Sequence: Synthetic oligonucleotide
cucaggccacaaggcaaua

SEQ ID NO: 2583089 - RNA, 19 nt, Artificial Sequence
  Description of Artificial Sequence: Synthetic oligonucleotide
gcagaguguggcccaccgu

SEQ ID NO: 2583090 - RNA, 19 nt, Artificial Sequence
  Description of Artificial Sequence: Synthetic oligonucleotide
agacaccggcagagacgca

SEQ ID NO: 2583091 - RNA, 19 nt, Artificial Sequence
  Description of Artificial Sequence: Synthetic oligonucleotide
cccgaggccccuccggcca

SEQ ID NO: 2583092 - RNA, 19 nt, Artificial Sequence
  Description of Artificial Sequence: Synthetic oligonucleotide
cagcaacacagagcuguau

SEQ ID NO: 2583093 - RNA, 19 nt, Artificial Sequence
  Description of Artificial Sequence: Synthetic oligonucleotide
cgucagugcagugaggaau

SEQ ID NO: 2583094 - RNA, 19 nt, Artificial Sequence
  Description of Artificial Sequence: Synthetic oligonucleotide
ccacggcuagaccuucgaa

SEQ ID NO: 2583095 - RNA, 19 nt, Artificial Sequence
  Description of Artificial Sequence: Synthetic oligonucleotide
caguacuauucugcaccau

SEQ ID NO: 2583096 - RNA, 19 nt, Artificial Sequence
  Description of Artificial Sequence: Synthetic oligonucleotide
ccgucagugcagugaggaa

SEQ ID NO: 2583097 - RNA, 19 nt, Artificial Sequence
  Description of Artificial Sequence: Synthetic oligonucleotide
ccaccgugacccagcgcca

SEQ ID NO: 2583098 - RNA, 19 nt, Artificial Sequence
  Description of Artificial Sequence: Synthetic oligonucleotide
gcgcuggucccgaggcccc

SEQ ID NO: 2583099 - RNA, 19 nt, Artificial Sequence
  Description of Artificial Sequence: Synthetic oligonucleotide
gccccuccggccacaguca

SEQ ID NO: 2583100 - RNA, 19 nt, Artificial Sequence
  Description of Artificial Sequence: Synthetic oligonucleotide
cggcagagacgcagcccag

SEQ ID NO: 2583101 - RNA, 19 nt, Artificial Sequence
  Description of Artificial Sequence: Synthetic oligonucleotide
ccggccacagucaguccua

SEQ ID NO: 2583102 - RNA, 19 nt, Artificial Sequence
  Description of Artificial Sequence: Synthetic oligonucleotide
ccgaggccccuccggccac

SEQ ID NO: 2583103 - RNA, 19 nt, Artificial Sequence
  Description of Artificial Sequence: Synthetic oligonucleotide
ccgcaggccuacacugaau

SEQ ID NO: 2583104 - RNA, 19 nt, Artificial Sequence
  Description of Artificial Sequence: Synthetic oligonucleotide
cgaggccccuccggccaca

SEQ ID NO: 2583105 - RNA, 19 nt, Artificial Sequence
  Description of Artificial Sequence: Synthetic oligonucleotide
ucuuccauguuccaaaacg

SEQ ID NO: 2583106 - RNA, 19 nt, Artificial Sequence
  Description of Artificial Sequence: Synthetic oligonucleotide
uguauuaguaccgagaaga

SEQ ID NO: 2583107 - RNA, 19 nt, Artificial Sequence
  Description of Artificial Sequence: Synthetic oligonucleotide
auagaaacuguucuugucg

SEQ ID NO: 2583108 - RNA, 19 nt, Artificial Sequence
  Description of Artificial Sequence: Synthetic oligonucleotide
uaucauuuguauuaguacc

SEQ ID NO: 2583109 - RNA, 19 nt, Artificial Sequence
  Description of Artificial Sequence: Synthetic oligonucleotide
aguuuuacagcugaguccc

SEQ ID NO: 2583110 - RNA, 19 nt, Artificial Sequence
  Description of Artificial Sequence: Synthetic oligonucleotide
auaguuuuacagcugaguc

SEQ ID NO: 2583111 - RNA, 19 nt, Artificial Sequence
  Description of Artificial Sequence: Synthetic oligonucleotide
agcuguauaguuuuacagc

SEQ ID NO: 2583112 - RNA, 19 nt, Artificial Sequence
  Description of Artificial Sequence: Synthetic oligonucleotide
guagaaauuguuuauugag

SEQ ID NO: 2583113 - RNA, 19 nt, Artificial Sequence
  Description of Artificial Sequence: Synthetic oligonucleotide
acaguugugaugcauagag

SEQ ID NO: 2583114 - RNA, 19 nt, Artificial Sequence
  Description of Artificial Sequence: Synthetic oligonucleotide
uuauugagugccaaggacc

SEQ ID NO: 2583115 - RNA, 19 nt, Artificial Sequence
  Description of Artificial Sequence: Synthetic oligonucleotide
agaaauuguuuauugagug

SEQ ID NO: 2583116 - RNA, 19 nt, Artificial Sequence
  Description of Artificial Sequence: Synthetic oligonucleotide
ugcauagaggacuaagugg

SEQ ID NO: 2583117 - RNA, 19 nt, Artificial Sequence
  Description of Artificial Sequence: Synthetic oligonucleotide
uguuuauugagugccaagg

SEQ ID NO: 2583118 - RNA, 19 nt, Artificial Sequence
  Description of Artificial Sequence: Synthetic oligonucleotide
uguauaguuuuacagcuga

SEQ ID NO: 2583119 - RNA, 19 nt, Artificial Sequence
  Description of Artificial Sequence: Synthetic oligonucleotide
uuuguauuaguaccgagaa

SEQ ID NO: 2583120 - RNA, 19 nt, Artificial Sequence
  Description of Artificial Sequence: Synthetic oligonucleotide
auuaguaccgagaagacug

SEQ ID NO: 2583121 - RNA, 19 nt, Artificial Sequence
  Description of Artificial Sequence: Synthetic oligonucleotide
caugucauuaaccagccag

SEQ ID NO: 2583122 - RNA, 19 nt, Artificial Sequence
  Description of Artificial Sequence: Synthetic oligonucleotide
aaucucacagucugcacag

SEQ ID NO: 2583123 - RNA, 19 nt, Artificial Sequence
  Description of Artificial Sequence: Synthetic oligonucleotide
uuuauugagugccaaggac

SEQ ID NO: 2583124 - RNA, 19 nt, Artificial Sequence
  Description of Artificial Sequence: Synthetic oligonucleotide
uccauguuccaaaacgggg

SEQ ID NO: 2583125 - RNA, 19 nt, Artificial Sequence
  Description of Artificial Sequence: Synthetic oligonucleotide
agaugaacaugucauuaac

SEQ ID NO: 2583126 - RNA, 19 nt, Artificial Sequence
  Description of Artificial Sequence: Synthetic oligonucleotide
agaaacuugauguugccca

SEQ ID NO: 2583127 - RNA, 19 nt, Artificial Sequence
  Description of Artificial Sequence: Synthetic oligonucleotide
aaucuguagaaauuguuua

SEQ ID NO: 2583128 - RNA, 19 nt, Artificial Sequence
  Description of Artificial Sequence: Synthetic oligonucleotide
gaacaugucauuaaccagc

SEQ ID NO: 2583129 - RNA, 19 nt, Artificial Sequence
  Description of Artificial Sequence: Synthetic oligonucleotide
ucauuaaccagccaguguu

SEQ ID NO: 2583130 - RNA, 19 nt, Artificial Sequence
  Description of Artificial Sequence: Synthetic oligonucleotide
guuaggacaguugugaugc

SEQ ID NO: 2583131 - RNA, 19 nt, Artificial Sequence
  Description of Artificial Sequence: Synthetic oligonucleotide
uagaaauuguuuauugagu

SEQ ID NO: 2583132 - RNA, 19 nt, Artificial Sequence
  Description of Artificial Sequence: Synthetic oligonucleotide
aaagcugucggcgagagaa

SEQ ID NO: 2583133 - RNA, 19 nt, Artificial Sequence
  Description of Artificial Sequence: Synthetic oligonucleotide
uguagaaauuguuuauuga

SEQ ID NO: 2583134 - RNA, 19 nt, Artificial Sequence
  Description of Artificial Sequence: Synthetic oligonucleotide
gaaggaaaagcugucggcg

SEQ ID NO: 2583135 - RNA, 19 nt, Artificial Sequence
  Description of Artificial Sequence: Synthetic oligonucleotide
ucuuuccaaggccacauag

SEQ ID NO: 2583136 - RNA, 19 nt, Artificial Sequence
  Description of Artificial Sequence: Synthetic oligonucleotide
ucaagggcaaacaucggug

SEQ ID NO: 2583137 - RNA, 19 nt, Artificial Sequence
  Description of Artificial Sequence: Synthetic oligonucleotide
ugaacaugucauuaaccag

SEQ ID NO: 2583138 - RNA, 19 nt, Artificial Sequence
  Description of Artificial Sequence: Synthetic oligonucleotide
gaagcccacauucucaaag

SEQ ID NO: 2583139 - RNA, 19 nt, Artificial Sequence
  Description of Artificial Sequence: Synthetic oligonucleotide
aggauugccgccaucagcc

SEQ ID NO: 2583140 - RNA, 19 nt, Artificial Sequence
  Description of Artificial Sequence: Synthetic oligonucleotide
cuuccauguuccaaaacgg

SEQ ID NO: 2583141 - RNA, 19 nt, Artificial Sequence
  Description of Artificial Sequence: Synthetic oligonucleotide
gagcuguauaguuuuacag

SEQ ID NO: 2583142 - RNA, 19 nt, Artificial Sequence
  Description of Artificial Sequence: Synthetic oligonucleotide
aacaccgccuuccgguucc

SEQ ID NO: 2583143 - RNA, 19 nt, Artificial Sequence
  Description of Artificial Sequence: Synthetic oligonucleotide
ucggcgagagaaaagagcu

SEQ ID NO: 2583144 - RNA, 19 nt, Artificial Sequence
  Description of Artificial Sequence: Synthetic oligonucleotide
uuccauguuccaaaacggg

SEQ ID NO: 2583145 - RNA, 19 nt, Artificial Sequence
  Description of Artificial Sequence: Synthetic oligonucleotide
uauugagugccaaggacca

SEQ ID NO: 2583146 - RNA, 19 nt, Artificial Sequence
  Description of Artificial Sequence: Synthetic oligonucleotide
cuuggugaagcccacauuc

SEQ ID NO: 2583147 - RNA, 19 nt, Artificial Sequence
  Description of Artificial Sequence: Synthetic oligonucleotide
gagagaaaagagcuguccc

SEQ ID NO: 2583148 - RNA, 19 nt, Artificial Sequence
  Description of Artificial Sequence: Synthetic oligonucleotide
uuuccaaggccacauagaa

SEQ ID NO: 2583149 - RNA, 19 nt, Artificial Sequence
  Description of Artificial Sequence: Synthetic oligonucleotide
uacacuuuguagaguaccc

SEQ ID NO: 2583150 - RNA, 19 nt, Artificial Sequence
  Description of Artificial Sequence: Synthetic oligonucleotide
uuccaaaacggggaggugg

SEQ ID NO: 2583151 - RNA, 19 nt, Artificial Sequence
  Description of Artificial Sequence: Synthetic oligonucleotide
aucauuuguauuaguaccg

SEQ ID NO: 2583152 - RNA, 19 nt, Artificial Sequence
  Description of Artificial Sequence: Synthetic oligonucleotide
agagccgcaacgcuggcac

SEQ ID NO: 2583153 - RNA, 19 nt, Artificial Sequence
  Description of Artificial Sequence: Synthetic oligonucleotide
uagaggacuaagugggagg

SEQ ID NO: 2583154 - RNA, 19 nt, Artificial Sequence
  Description of Artificial Sequence: Synthetic oligonucleotide
aagaugaacaugucauuaa

SEQ ID NO: 2583155 - RNA, 19 nt, Artificial Sequence
  Description of Artificial Sequence: Synthetic oligonucleotide
ucaugggaaacucuuucca

SEQ ID NO: 2583156 - RNA, 19 nt, Artificial Sequence
  Description of Artificial Sequence: Synthetic oligonucleotide
aaguucaagggcaaacauc

SEQ ID NO: 2583157 - RNA, 19 nt, Artificial Sequence
  Description of Artificial Sequence: Synthetic oligonucleotide
uccaaaacggggagguggg

SEQ ID NO: 2583158 - RNA, 19 nt, Artificial Sequence
  Description of Artificial Sequence: Synthetic oligonucleotide
cuguagaaauuguuuauug

SEQ ID NO: 2583159 - RNA, 19 nt, Artificial Sequence
  Description of Artificial Sequence: Synthetic oligonucleotide
augcauagaggacuaagug

SEQ ID NO: 2583160 - RNA, 19 nt, Artificial Sequence
  Description of Artificial Sequence: Synthetic oligonucleotide
aaagaugaacaugucauua

SEQ ID NO: 2583161 - RNA, 19 nt, Artificial Sequence
  Description of Artificial Sequence: Synthetic oligonucleotide
auuaaccagccaguguucc

SEQ ID NO: 2583162 - RNA, 19 nt, Artificial Sequence
  Description of Artificial Sequence: Synthetic oligonucleotide
uguucuuccauguuccaaa

SEQ ID NO: 2583163 - RNA, 19 nt, Artificial Sequence
  Description of Artificial Sequence: Synthetic oligonucleotide
gaggcuugaaggaagcagg

SEQ ID NO: 2583164 - RNA, 19 nt, Artificial Sequence
  Description of Artificial Sequence: Synthetic oligonucleotide
uauaguuuuacagcugagu

SEQ ID NO: 2583165 - RNA, 19 nt, Artificial Sequence
  Description of Artificial Sequence: Synthetic oligonucleotide
cagacuacacuuuguagag

SEQ ID NO: 2583166 - RNA, 19 nt, Artificial Sequence
  Description of Artificial Sequence: Synthetic oligonucleotide
gcuugaaggaagcaggacg

SEQ ID NO: 2583167 - RNA, 19 nt, Artificial Sequence
  Description of Artificial Sequence: Synthetic oligonucleotide
accagaaacuugauguugc

SEQ ID NO: 2583168 - RNA, 19 nt, Artificial Sequence
  Description of Artificial Sequence: Synthetic oligonucleotide
agcucagccgguuccaucg

SEQ ID NO: 2583169 - RNA, 19 nt, Artificial Sequence
  Description of Artificial Sequence: Synthetic oligonucleotide
agaggacuaagugggaggc

SEQ ID NO: 2583170 - RNA, 19 nt, Artificial Sequence
  Description of Artificial Sequence: Synthetic oligonucleotide
acauucucaaagaugaaca

SEQ ID NO: 2583171 - RNA, 19 nt, Artificial Sequence
  Description of Artificial Sequence: Synthetic oligonucleotide
gcauagaggacuaaguggg

SEQ ID NO: 2583172 - RNA, 19 nt, Artificial Sequence
  Description of Artificial Sequence: Synthetic oligonucleotide
uuguauuaguaccgagaag

SEQ ID NO: 2583173 - RNA, 19 nt, Artificial Sequence
  Description of Artificial Sequence: Synthetic oligonucleotide
ggcaaugccagccaauggg

SEQ ID NO: 2583174 - RNA, 19 nt, Artificial Sequence
  Description of Artificial Sequence: Synthetic oligonucleotide
aaggaaaagcugucggcga

SEQ ID NO: 2583175 - RNA, 19 nt, Artificial Sequence
  Description of Artificial Sequence: Synthetic oligonucleotide
agaaaagagcugucccugg

SEQ ID NO: 2583176 - RNA, 19 nt, Artificial Sequence
  Description of Artificial Sequence: Synthetic oligonucleotide
uguucuugucgucuaggca

SEQ ID NO: 2583177 - RNA, 19 nt, Artificial Sequence
  Description of Artificial Sequence: Synthetic oligonucleotide
ucugcacagaccagaaacu

SEQ ID NO: 2583178 - RNA, 19 nt, Artificial Sequence
  Description of Artificial Sequence: Synthetic oligonucleotide
ugaugcauagaggacuaag

SEQ ID NO: 2583179 - RNA, 19 nt, Artificial Sequence
  Description of Artificial Sequence: Synthetic oligonucleotide
uugugaugcauagaggacu

SEQ ID NO: 2583180 - RNA, 19 nt, Artificial Sequence
  Description of Artificial Sequence: Synthetic oligonucleotide
guucuugucgucuaggcaa

SEQ ID NO: 2583181 - RNA, 19 nt, Artificial Sequence
  Description of Artificial Sequence: Synthetic oligonucleotide
uugucgucuaggcaaugcc

SEQ ID NO: 2583182 - RNA, 19 nt, Artificial Sequence
  Description of Artificial Sequence: Synthetic oligonucleotide
auuuguauuaguaccgaga

SEQ ID NO: 2583183 - RNA, 19 nt, Artificial Sequence
  Description of Artificial Sequence: Synthetic oligonucleotide
caaacaucggugcuuauca

SEQ ID NO: 2583184 - RNA, 19 nt, Artificial Sequence
  Description of Artificial Sequence: Synthetic oligonucleotide
uagaaacuguucuugucgu

SEQ ID NO: 2583185 - RNA, 19 nt, Artificial Sequence
  Description of Artificial Sequence: Synthetic oligonucleotide
uaagugggaggcaugcacu

SEQ ID NO: 2583186 - RNA, 19 nt, Artificial Sequence
  Description of Artificial Sequence: Synthetic oligonucleotide
guaccgagaagacugccag

SEQ ID NO: 2583187 - RNA, 19 nt, Artificial Sequence
  Description of Artificial Sequence: Synthetic oligonucleotide
uugcccacauccuugguga

SEQ ID NO: 2583188 - RNA, 19 nt, Artificial Sequence
  Description of Artificial Sequence: Synthetic oligonucleotide
uccccucaguuacucaugg

SEQ ID NO: 2583189 - RNA, 19 nt, Artificial Sequence
  Description of Artificial Sequence: Synthetic oligonucleotide
uguuccaaaacggggaggu

SEQ ID NO: 2583190 - RNA, 19 nt, Artificial Sequence
  Description of Artificial Sequence: Synthetic oligonucleotide
uuacucaugggaaacucuu

SEQ ID NO: 2583191 - RNA, 19 nt, Artificial Sequence
  Description of Artificial Sequence: Synthetic oligonucleotide
ugucgucuaggcaaugcca

SEQ ID NO: 2583192 - RNA, 19 nt, Artificial Sequence
  Description of Artificial Sequence: Synthetic oligonucleotide
cucaugggaaacucuuucc

SEQ ID NO: 2583193 - RNA, 19 nt, Artificial Sequence
  Description of Artificial Sequence: Synthetic oligonucleotide
acacuuuguagaguacccc

SEQ ID NO: 2583194 - RNA, 19 nt, Artificial Sequence
  Description of Artificial Sequence: Synthetic oligonucleotide
cuacacuuuguagaguacc

SEQ ID NO: 2583195 - RNA, 19 nt, Artificial Sequence
  Description of Artificial Sequence: Synthetic oligonucleotide
aguuacucaugggaaacuc

SEQ ID NO: 2583196 - RNA, 19 nt, Artificial Sequence
  Description of Artificial Sequence: Synthetic oligonucleotide
cauggagggaaggaaaagc

SEQ ID NO: 2583197 - RNA, 19 nt, Artificial Sequence
  Description of Artificial Sequence: Synthetic oligonucleotide
uuaguaccgagaagacugc

SEQ ID NO: 2583198 - RNA, 19 nt, Artificial Sequence
  Description of Artificial Sequence: Synthetic oligonucleotide
agagcuguauaguuuuaca

SEQ ID NO: 2583199 - RNA, 19 nt, Artificial Sequence
  Description of Artificial Sequence: Synthetic oligonucleotide
cauuuguauuaguaccgag

SEQ ID NO: 2583200 - RNA, 19 nt, Artificial Sequence
  Description of Artificial Sequence: Synthetic oligonucleotide
cucggcugacacuagcugg

SEQ ID NO: 2583201 - RNA, 19 nt, Artificial Sequence
  Description of Artificial Sequence: Synthetic oligonucleotide
accagacuacacuuuguag

SEQ ID NO: 2583202 - RNA, 19 nt, Artificial Sequence
  Description of Artificial Sequence: Synthetic oligonucleotide
aagugggaggcaugcacug

SEQ ID NO: 2583203 - RNA, 19 nt, Artificial Sequence
  Description of Artificial Sequence: Synthetic oligonucleotide
ucagccgguuccaucgccg

SEQ ID NO: 2583204 - RNA, 19 nt, Artificial Sequence
  Description of Artificial Sequence: Synthetic oligonucleotide
aacaucggugcuuaucauu

SEQ ID NO: 2583205 - RNA, 19 nt, Artificial Sequence
  Description of Artificial Sequence: Synthetic oligonucleotide
cacauagaaacuguucuug

SEQ ID NO: 2583206 - RNA, 19 nt, Artificial Sequence
  Description of Artificial Sequence: Synthetic oligonucleotide
aacuguucuugucgucuag

SEQ ID NO: 2583207 - RNA, 19 nt, Artificial Sequence
  Description of Artificial Sequence: Synthetic oligonucleotide
aucaccgucaggauugccg

SEQ ID NO: 2583208 - RNA, 19 nt, Artificial Sequence
  Description of Artificial Sequence: Synthetic oligonucleotide
gagaagacugccagcacag

SEQ ID NO: 2583209 - RNA, 19 nt, Artificial Sequence
  Description of Artificial Sequence: Synthetic oligonucleotide
ucaguuacucaugggaaac

SEQ ID NO: 2583210 - RNA, 19 nt, Artificial Sequence
  Description of Artificial Sequence: Synthetic oligonucleotide
gaaggaagcaggacggccc

SEQ ID NO: 2583211 - RNA, 19 nt, Artificial Sequence
  Description of Artificial Sequence: Synthetic oligonucleotide
aacuugauguugcccacau

SEQ ID NO: 2583212 - RNA, 19 nt, Artificial Sequence
  Description of Artificial Sequence: Synthetic oligonucleotide
agaaacuguucuugucguc

SEQ ID NO: 2583213 - RNA, 19 nt, Artificial Sequence
  Description of Artificial Sequence: Synthetic oligonucleotide
gaagacugccagcacagca

SEQ ID NO: 2583214 - RNA, 19 nt, Artificial Sequence
  Description of Artificial Sequence: Synthetic oligonucleotide
ugcuuaucauuuguauuag

SEQ ID NO: 2583215 - RNA, 19 nt, Artificial Sequence
  Description of Artificial Sequence: Synthetic oligonucleotide
uauuaguaccgagaagacu

SEQ ID NO: 2583216 - RNA, 19 nt, Artificial Sequence
  Description of Artificial Sequence: Synthetic oligonucleotide
uccaaucucacagucugca

SEQ ID NO: 2583217 - RNA, 19 nt, Artificial Sequence
  Description of Artificial Sequence: Synthetic oligonucleotide
gugcuuaucauuuguauua

SEQ ID NO: 2583218 - RNA, 19 nt, Artificial Sequence
  Description of Artificial Sequence: Synthetic oligonucleotide
gguccaaucucacagucug

SEQ ID NO: 2583219 - RNA, 19 nt, Artificial Sequence
  Description of Artificial Sequence: Synthetic oligonucleotide
auagaggacuaagugggag

SEQ ID NO: 2583220 - RNA, 19 nt, Artificial Sequence
  Description of Artificial Sequence: Synthetic oligonucleotide
agccaauggguccaaucuc

SEQ ID NO: 2583221 - RNA, 19 nt, Artificial Sequence
  Description of Artificial Sequence: Synthetic oligonucleotide
ugugaugcauagaggacua

SEQ ID NO: 2583222 - RNA, 19 nt, Artificial Sequence
  Description of Artificial Sequence: Synthetic oligonucleotide
gaaacuugauguugcccac

SEQ ID NO: 2583223 - RNA, 19 nt, Artificial Sequence
  Description of Artificial Sequence: Synthetic oligonucleotide
agucaccacagguucacug

SEQ ID NO: 2583224 - RNA, 19 nt, Artificial Sequence
  Description of Artificial Sequence: Synthetic oligonucleotide
ucauuuguauuaguaccga

SEQ ID NO: 2583225 - RNA, 19 nt, Artificial Sequence
  Description of Artificial Sequence: Synthetic oligonucleotide
aggaccagacuacacuuug

SEQ ID NO: 2583226 - RNA, 19 nt, Artificial Sequence
  Description of Artificial Sequence: Synthetic oligonucleotide
ugucauuaaccagccagug

SEQ ID NO: 2583227 - RNA, 19 nt, Artificial Sequence
  Description of Artificial Sequence: Synthetic oligonucleotide
cuguucuugucgucuaggc

SEQ ID NO: 2583228 - RNA, 19 nt, Artificial Sequence
  Description of Artificial Sequence: Synthetic oligonucleotide
ugucggcgagagaaaagag

SEQ ID NO: 2583229 - RNA, 19 nt, Artificial Sequence
  Description of Artificial Sequence: Synthetic oligonucleotide
aauuguuuauugagugcca

SEQ ID NO: 2583230 - RNA, 19 nt, Artificial Sequence
  Description of Artificial Sequence: Synthetic oligonucleotide
aagggcaaacaucggugcu

SEQ ID NO: 2583231 - RNA, 19 nt, Artificial Sequence
  Description of Artificial Sequence: Synthetic oligonucleotide
gacuaagugggaggcaugc

SEQ ID NO: 2583232 - RNA, 19 nt, Artificial Sequence
  Description of Artificial Sequence: Synthetic oligonucleotide
ucuguagaaauuguuuauu

SEQ ID NO: 2583233 - RNA, 19 nt, Artificial Sequence
  Description of Artificial Sequence: Synthetic oligonucleotide
ugcaaguucaagggcaaac

SEQ ID NO: 2583234 - RNA, 19 nt, Artificial Sequence
  Description of Artificial Sequence: Synthetic oligonucleotide
gaaaagcugucggcgagag

SEQ ID NO: 2583235 - RNA, 19 nt, Artificial Sequence
  Description of Artificial Sequence: Synthetic oligonucleotide
caguugugaugcauagagg

SEQ ID NO: 2583236 - RNA, 19 nt, Artificial Sequence
  Description of Artificial Sequence: Synthetic oligonucleotide
ucugcaaguucaagggcaa

SEQ ID NO: 2583237 - RNA, 19 nt, Artificial Sequence
  Description of Artificial Sequence: Synthetic oligonucleotide
uugagugccaaggaccaga

SEQ ID NO: 2583238 - RNA, 19 nt, Artificial Sequence
  Description of Artificial Sequence: Synthetic oligonucleotide
gacacuagcugguucugca

SEQ ID NO: 2583239 - RNA, 19 nt, Artificial Sequence
  Description of Artificial Sequence: Synthetic oligonucleotide
guugcccacauccuuggug

SEQ ID NO: 2583240 - RNA, 19 nt, Artificial Sequence
  Description of Artificial Sequence: Synthetic oligonucleotide
gauugccgccaucagccag

SEQ ID NO: 2583241 - RNA, 19 nt, Artificial Sequence
  Description of Artificial Sequence: Synthetic oligonucleotide
accgccuuccgguuccggc

SEQ ID NO: 2583242 - RNA, 19 nt, Artificial Sequence
  Description of Artificial Sequence: Synthetic oligonucleotide
aucggugcuuaucauuugu

SEQ ID NO: 2583243 - RNA, 19 nt, Artificial Sequence
  Description of Artificial Sequence: Synthetic oligonucleotide
acuguucuugucgucuagg

SEQ ID NO: 2583244 - RNA, 19 nt, Artificial Sequence
  Description of Artificial Sequence: Synthetic oligonucleotide
cuguauaguuuuacagcug

SEQ ID NO: 2583245 - RNA, 19 nt, Artificial Sequence
  Description of Artificial Sequence: Synthetic oligonucleotide
agggaaggaaaagcugucg

SEQ ID NO: 2583246 - RNA, 19 nt, Artificial Sequence
  Description of Artificial Sequence: Synthetic oligonucleotide
caaucucacagucugcaca

SEQ ID NO: 2583247 - RNA, 19 nt, Artificial Sequence
  Description of Artificial Sequence: Synthetic oligonucleotide
ugucccuggcugcagcacc

SEQ ID NO: 2583248 - RNA, 19 nt, Artificial Sequence
  Description of Artificial Sequence: Synthetic oligonucleotide
aaggccacauagaaacugu

SEQ ID NO: 2583249 - RNA, 19 nt, Artificial Sequence
  Description of Artificial Sequence: Synthetic oligonucleotide
accgagaagacugccagca

SEQ ID NO: 2583250 - RNA, 19 nt, Artificial Sequence
  Description of Artificial Sequence: Synthetic oligonucleotide
ugggaggcaugcacugagg

SEQ ID NO: 2583251 - RNA, 19 nt, Artificial Sequence
  Description of Artificial Sequence: Synthetic oligonucleotide
aaacaucggugcuuaucau

SEQ ID NO: 2583252 - RNA, 19 nt, Artificial Sequence
  Description of Artificial Sequence: Synthetic oligonucleotide
ugagugccaaggaccagac

SEQ ID NO: 2583253 - RNA, 19 nt, Artificial Sequence
  Description of Artificial Sequence: Synthetic oligonucleotide
aggcaaugccagccaaugg

SEQ ID NO: 2583254 - RNA, 19 nt, Artificial Sequence
  Description of Artificial Sequence: Synthetic oligonucleotide
gucgucuaggcaaugccag

SEQ ID NO: 2583255 - RNA, 19 nt, Artificial Sequence
  Description of Artificial Sequence: Synthetic oligonucleotide
uccuuggugaagcccacau

SEQ ID NO: 2583256 - RNA, 19 nt, Artificial Sequence
  Description of Artificial Sequence: Synthetic oligonucleotide
guucacugucaguucuggg

SEQ ID NO: 2583257 - RNA, 19 nt, Artificial Sequence
  Description of Artificial Sequence: Synthetic oligonucleotide
cccucugcaaguucaaggg

SEQ ID NO: 2583258 - RNA, 19 nt, Artificial Sequence
  Description of Artificial Sequence: Synthetic oligonucleotide
acgcuggcacaacaccgcc

SEQ ID NO: 2583259 - RNA, 19 nt, Artificial Sequence
  Description of Artificial Sequence: Synthetic oligonucleotide
cuugucgucuaggcaaugc

SEQ ID NO: 2583260 - RNA, 19 nt, Artificial Sequence
  Description of Artificial Sequence: Synthetic oligonucleotide
gguuaggacaguugugaug

SEQ ID NO: 2583261 - RNA, 19 nt, Artificial Sequence
  Description of Artificial Sequence: Synthetic oligonucleotide
agcacagcagucaccacag

SEQ ID NO: 2583262 - RNA, 19 nt, Artificial Sequence
  Description of Artificial Sequence: Synthetic oligonucleotide
acuacacuuuguagaguac

SEQ ID NO: 2583263 - RNA, 19 nt, Artificial Sequence
  Description of Artificial Sequence: Synthetic oligonucleotide
gagagcuguauaguuuuac

SEQ ID NO: 2583264 - RNA, 19 nt, Artificial Sequence
  Description of Artificial Sequence: Synthetic oligonucleotide
gugggaggcaugcacugag

SEQ ID NO: 2583265 - RNA, 19 nt, Artificial Sequence
  Description of Artificial Sequence: Synthetic oligonucleotide
gaaacuguucuugucgucu

SEQ ID NO: 2583266 - RNA, 19 nt, Artificial Sequence
  Description of Artificial Sequence: Synthetic oligonucleotide
cauuaaccagccaguguuc

SEQ ID NO: 2583267 - RNA, 19 nt, Artificial Sequence
  Description of Artificial Sequence: Synthetic oligonucleotide
aaacuugauguugcccaca

SEQ ID NO: 2583268 - RNA, 19 nt, Artificial Sequence
  Description of Artificial Sequence: Synthetic oligonucleotide
ucaccacagguucacuguc

SEQ ID NO: 2583269 - RNA, 19 nt, Artificial Sequence
  Description of Artificial Sequence: Synthetic oligonucleotide
ugcagcacccgagagccgc

SEQ ID NO: 2583270 - RNA, 19 nt, Artificial Sequence
  Description of Artificial Sequence: Synthetic oligonucleotide
acagucugcacagaccaga

SEQ ID NO: 2583271 - RNA, 19 nt, Artificial Sequence
  Description of Artificial Sequence: Synthetic oligonucleotide
auuguuuauugagugccaa

SEQ ID NO: 2583272 - RNA, 19 nt, Artificial Sequence
  Description of Artificial Sequence: Synthetic oligonucleotide
gucggcgagagaaaagagc

SEQ ID NO: 2583273 - RNA, 19 nt, Artificial Sequence
  Description of Artificial Sequence: Synthetic oligonucleotide
uggcacaacaccgccuucc

SEQ ID NO: 2583274 - RNA, 19 nt, Artificial Sequence
  Description of Artificial Sequence: Synthetic oligonucleotide
gcuguauaguuuuacagcu

SEQ ID NO: 2583275 - RNA, 19 nt, Artificial Sequence
  Description of Artificial Sequence: Synthetic oligonucleotide
gaugcauagaggacuaagu

SEQ ID NO: 2583276 - RNA, 19 nt, Artificial Sequence
  Description of Artificial Sequence: Synthetic oligonucleotide
guauuaguaccgagaagac

SEQ ID NO: 2583277 - RNA, 19 nt, Artificial Sequence
  Description of Artificial Sequence: Synthetic oligonucleotide
gcugaguccccucaguuac

SEQ ID NO: 2583278 - RNA, 19 nt, Artificial Sequence
  Description of Artificial Sequence: Synthetic oligonucleotide
ccagacuacacuuuguaga

SEQ ID NO: 2583279 - RNA, 19 nt, Artificial Sequence
  Description of Artificial Sequence: Synthetic oligonucleotide
ucgucuaggcaaugccagc

SEQ ID NO: 2583280 - RNA, 19 nt, Artificial Sequence
  Description of Artificial Sequence: Synthetic oligonucleotide
agaccagaaacuugauguu

SEQ ID NO: 2583281 - RNA, 19 nt, Artificial Sequence
  Description of Artificial Sequence: Synthetic oligonucleotide
augucauuaaccagccagu

SEQ ID NO: 2583282 - RNA, 19 nt, Artificial Sequence
  Description of Artificial Sequence: Synthetic oligonucleotide
uucuugucgucuaggcaau

SEQ ID NO: 2583283 - RNA, 19 nt, Artificial Sequence
  Description of Artificial Sequence: Synthetic oligonucleotide
cagcagucaccacagguuc

SEQ ID NO: 2583284 - RNA, 19 nt, Artificial Sequence
  Description of Artificial Sequence: Synthetic oligonucleotide
gaccagacuacacuuugua

SEQ ID NO: 2583285 - RNA, 19 nt, Artificial Sequence
  Description of Artificial Sequence: Synthetic oligonucleotide
aaaagcugucggcgagaga

SEQ ID NO: 2583286 - RNA, 19 nt, Artificial Sequence
  Description of Artificial Sequence: Synthetic oligonucleotide
ucggugcuuaucauuugua

SEQ ID NO: 2583287 - RNA, 19 nt, Artificial Sequence
  Description of Artificial Sequence: Synthetic oligonucleotide
aggacuaagugggaggcau

SEQ ID NO: 2583288 - RNA, 19 nt, Artificial Sequence
  Description of Artificial Sequence: Synthetic oligonucleotide
uacucaugggaaacucuuu

SEQ ID NO: 2583289 - RNA, 19 nt, Artificial Sequence
  Description of Artificial Sequence: Synthetic oligonucleotide
gggaaacucuuuccaaggc

SEQ ID NO: 2583290 - RNA, 19 nt, Artificial Sequence
  Description of Artificial Sequence: Synthetic oligonucleotide
acaucggugcuuaucauuu

SEQ ID NO: 2583291 - RNA, 19 nt, Artificial Sequence
  Description of Artificial Sequence: Synthetic oligonucleotide
uccucauggagggaaggaa

SEQ ID NO: 2583292 - RNA, 19 nt, Artificial Sequence
  Description of Artificial Sequence: Synthetic oligonucleotide
gccgccaucagccagagcu

SEQ ID NO: 2583293 - RNA, 19 nt, Artificial Sequence
  Description of Artificial Sequence: Synthetic oligonucleotide
cacauccuuggugaagccc

SEQ ID NO: 2583294 - RNA, 19 nt, Artificial Sequence
  Description of Artificial Sequence: Synthetic oligonucleotide
uaccgagaagacugccagc

SEQ ID NO: 2583295 - RNA, 19 nt, Artificial Sequence
  Description of Artificial Sequence: Synthetic oligonucleotide
cucaguuacucaugggaaa

SEQ ID NO: 2583296 - RNA, 19 nt, Artificial Sequence
  Description of Artificial Sequence: Synthetic oligonucleotide
aguaccgagaagacugcca

SEQ ID NO: 2583297 - RNA, 19 nt, Artificial Sequence
  Description of Artificial Sequence: Synthetic oligonucleotide
caugggaaacucuuuccaa

SEQ ID NO: 2583298 - RNA, 19 nt, Artificial Sequence
  Description of Artificial Sequence: Synthetic oligonucleotide
ugacacuagcugguucugc

SEQ ID NO: 2583299 - RNA, 19 nt, Artificial Sequence
  Description of Artificial Sequence: Synthetic oligonucleotide
cucauggagggaaggaaaa

SEQ ID NO: 2583300 - RNA, 19 nt, Artificial Sequence
  Description of Artificial Sequence: Synthetic oligonucleotide
agaucaccgucaggauugc

SEQ ID NO: 2583301 - RNA, 19 nt, Artificial Sequence
  Description of Artificial Sequence: Synthetic oligonucleotide
caggacggcccucugcaag

SEQ ID NO: 2583302 - RNA, 19 nt, Artificial Sequence
  Description of Artificial Sequence: Synthetic oligonucleotide
gcaacgcuggcacaacacc

SEQ ID NO: 2583303 - RNA, 19 nt, Artificial Sequence
  Description of Artificial Sequence: Synthetic oligonucleotide
uaguaccgagaagacugcc

SEQ ID NO: 2583304 - RNA, 19 nt, Artificial Sequence
  Description of Artificial Sequence: Synthetic oligonucleotide
gccacauagaaacuguucu

SEQ ID NO: 2583305 - RNA, 19 nt, Artificial Sequence
  Description of Artificial Sequence: Synthetic oligonucleotide
cagcacagcagucaccaca

SEQ ID NO: 2583306 - RNA, 19 nt, Artificial Sequence
  Description of Artificial Sequence: Synthetic oligonucleotide
aggacggcccucugcaagu

SEQ ID NO: 2583307 - RNA, 19 nt, Artificial Sequence
  Description of Artificial Sequence: Synthetic oligonucleotide
guucaagggcaaacaucgg

SEQ ID NO: 2583308 - RNA, 19 nt, Artificial Sequence
  Description of Artificial Sequence: Synthetic oligonucleotide
cugcagcucagccgguucc

SEQ ID NO: 2583309 - RNA, 19 nt, Artificial Sequence
  Description of Artificial Sequence: Synthetic oligonucleotide
acagcagucaccacagguu

SEQ ID NO: 2583310 - RNA, 19 nt, Artificial Sequence
  Description of Artificial Sequence: Synthetic oligonucleotide
cugucggcgagagaaaaga

SEQ ID NO: 2583311 - RNA, 19 nt, Artificial Sequence
  Description of Artificial Sequence: Synthetic oligonucleotide
gggaggcaugcacugaggc

SEQ ID NO: 2583312 - RNA, 19 nt, Artificial Sequence
  Description of Artificial Sequence: Synthetic oligonucleotide
uuaggacaguugugaugca

SEQ ID NO: 2583313 - RNA, 19 nt, Artificial Sequence
  Description of Artificial Sequence: Synthetic oligonucleotide
ggcacaacaccgccuuccg

SEQ ID NO: 2583314 - RNA, 19 nt, Artificial Sequence
  Description of Artificial Sequence: Synthetic oligonucleotide
uaggacaguugugaugcau

SEQ ID NO: 2583315 - RNA, 19 nt, Artificial Sequence
  Description of Artificial Sequence: Synthetic oligonucleotide
caucggugcuuaucauuug

SEQ ID NO: 2583316 - RNA, 19 nt, Artificial Sequence
  Description of Artificial Sequence: Synthetic oligonucleotide
ugaguccccucaguuacuc

SEQ ID NO: 2583317 - RNA, 19 nt, Artificial Sequence
  Description of Artificial Sequence: Synthetic oligonucleotide
gcacccgagagccgcaacg

SEQ ID NO: 2583318 - RNA, 19 nt, Artificial Sequence
  Description of Artificial Sequence: Synthetic oligonucleotide
gggguuaggacaguuguga

SEQ ID NO: 2583319 - RNA, 19 nt, Artificial Sequence
  Description of Artificial Sequence: Synthetic oligonucleotide
uuccgguuccggcccucgg

SEQ ID NO: 2583320 - RNA, 19 nt, Artificial Sequence
  Description of Artificial Sequence: Synthetic oligonucleotide
agcugaguccccucaguua

SEQ ID NO: 2583321 - RNA, 19 nt, Artificial Sequence
  Description of Artificial Sequence: Synthetic oligonucleotide
ccauguuccaaaacgggga

SEQ ID NO: 2583322 - RNA, 19 nt, Artificial Sequence
  Description of Artificial Sequence: Synthetic oligonucleotide
agcacccgagagccgcaac

SEQ ID NO: 2583323 - RNA, 19 nt, Artificial Sequence
  Description of Artificial Sequence: Synthetic oligonucleotide
cacagucugcacagaccag

SEQ ID NO: 2583324 - RNA, 19 nt, Artificial Sequence
  Description of Artificial Sequence: Synthetic oligonucleotide
gguuccaucgccgcgccgc

SEQ ID NO: 2583325 - RNA, 19 nt, Artificial Sequence
  Description of Artificial Sequence: Synthetic oligonucleotide
agccgguuccaucgccgcg

SEQ ID NO: 2583326 - RNA, 19 nt, Artificial Sequence
  Description of Artificial Sequence: Synthetic oligonucleotide
ccagaaacuugauguugcc

SEQ ID NO: 2583327 - RNA, 19 nt, Artificial Sequence
  Description of Artificial Sequence: Synthetic oligonucleotide
acaugucauuaaccagcca

SEQ ID NO: 2583328 - RNA, 19 nt, Artificial Sequence
  Description of Artificial Sequence: Synthetic oligonucleotide
cucagccgguuccaucgcc

SEQ ID NO: 2583329 - RNA, 19 nt, Artificial Sequence
  Description of Artificial Sequence: Synthetic oligonucleotide
aggagaucaccgucaggau

SEQ ID NO: 2583330 - RNA, 19 nt, Artificial Sequence
  Description of Artificial Sequence: Synthetic oligonucleotide
ugccaaggaccagacuaca

SEQ ID NO: 2583331 - RNA, 19 nt, Artificial Sequence
  Description of Artificial Sequence: Synthetic oligonucleotide
cugccagcacagcagucac

SEQ ID NO: 2583332 - RNA, 19 nt, Artificial Sequence
  Description of Artificial Sequence: Synthetic oligonucleotide
gucauuaaccagccagugu

SEQ ID NO: 2583333 - RNA, 19 nt, Artificial Sequence
  Description of Artificial Sequence: Synthetic oligonucleotide
auugccgccaucagccaga

SEQ ID NO: 2583334 - RNA, 19 nt, Artificial Sequence
  Description of Artificial Sequence: Synthetic oligonucleotide
gaggcaugcacugaggcuu

SEQ ID NO: 2583335 - RNA, 19 nt, Artificial Sequence
  Description of Artificial Sequence: Synthetic oligonucleotide
gacaguugugaugcauaga

SEQ ID NO: 2583336 - RNA, 19 nt, Artificial Sequence
  Description of Artificial Sequence: Synthetic oligonucleotide
gucaccacagguucacugu

SEQ ID NO: 2583337 - RNA, 19 nt, Artificial Sequence
  Description of Artificial Sequence: Synthetic oligonucleotide
auguucuuccauguuccaa

SEQ ID NO: 2583338 - RNA, 19 nt, Artificial Sequence
  Description of Artificial Sequence: Synthetic oligonucleotide
ccgagagccgcaacgcugg

SEQ ID NO: 2583339 - RNA, 19 nt, Artificial Sequence
  Description of Artificial Sequence: Synthetic oligonucleotide
caauggguccaaucucaca

SEQ ID NO: 2583340 - RNA, 19 nt, Artificial Sequence
  Description of Artificial Sequence: Synthetic oligonucleotide
gucuaggcaaugccagcca

SEQ ID NO: 2583341 - RNA, 19 nt, Artificial Sequence
  Description of Artificial Sequence: Synthetic oligonucleotide
cauccuuggugaagcccac

SEQ ID NO: 2583342 - RNA, 19 nt, Artificial Sequence
  Description of Artificial Sequence: Synthetic oligonucleotide
aaggaccagacuacacuuu

SEQ ID NO: 2583343 - RNA, 19 nt, Artificial Sequence
  Description of Artificial Sequence: Synthetic oligonucleotide
gaagcaggacggcccucug

SEQ ID NO: 2583344 - RNA, 19 nt, Artificial Sequence
  Description of Artificial Sequence: Synthetic oligonucleotide
gugccaaggaccagacuac

SEQ ID NO: 2583345 - RNA, 19 nt, Artificial Sequence
  Description of Artificial Sequence: Synthetic oligonucleotide
aggacaguugugaugcaua

SEQ ID NO: 2583346 - RNA, 19 nt, Artificial Sequence
  Description of Artificial Sequence: Synthetic oligonucleotide
agacuacacuuuguagagu

SEQ ID NO: 2583347 - RNA, 19 nt, Artificial Sequence
  Description of Artificial Sequence: Synthetic oligonucleotide
accgucaggauugccgcca

SEQ ID NO: 2583348 - RNA, 19 nt, Artificial Sequence
  Description of Artificial Sequence: Synthetic oligonucleotide
acaacaccgccuuccgguu

SEQ ID NO: 2583349 - RNA, 19 nt, Artificial Sequence
  Description of Artificial Sequence: Synthetic oligonucleotide
cccucaguuacucauggga

SEQ ID NO: 2583350 - RNA, 19 nt, Artificial Sequence
  Description of Artificial Sequence: Synthetic oligonucleotide
cauguucuuccauguucca

SEQ ID NO: 2583351 - RNA, 19 nt, Artificial Sequence
  Description of Artificial Sequence: Synthetic oligonucleotide
cacccgagagccgcaacgc

SEQ ID NO: 2583352 - RNA, 19 nt, Artificial Sequence
  Description of Artificial Sequence: Synthetic oligonucleotide
cagagcuggcuucuuccuc

SEQ ID NO: 2583353 - RNA, 19 nt, Artificial Sequence
  Description of Artificial Sequence: Synthetic oligonucleotide
ucuugucgucuaggcaaug

SEQ ID NO: 2583354 - RNA, 19 nt, Artificial Sequence
  Description of Artificial Sequence: Synthetic oligonucleotide
ugcagcucagccgguucca

SEQ ID NO: 2583355 - RNA, 19 nt, Artificial Sequence
  Description of Artificial Sequence: Synthetic oligonucleotide
cacagguucacugucaguu

SEQ ID NO: 2583356 - RNA, 19 nt, Artificial Sequence
  Description of Artificial Sequence: Synthetic oligonucleotide
guuacucaugggaaacucu

SEQ ID NO: 2583357 - RNA, 19 nt, Artificial Sequence
  Description of Artificial Sequence: Synthetic oligonucleotide
cacagcagucaccacaggu

SEQ ID NO: 2583358 - RNA, 19 nt, Artificial Sequence
  Description of Artificial Sequence: Synthetic oligonucleotide
gcugacacuagcugguucu

SEQ ID NO: 2583359 - RNA, 19 nt, Artificial Sequence
  Description of Artificial Sequence: Synthetic oligonucleotide
agggcaaacaucggugcuu

SEQ ID NO: 2583360 - RNA, 19 nt, Artificial Sequence
  Description of Artificial Sequence: Synthetic oligonucleotide
gcaaacaucggugcuuauc

SEQ ID NO: 2583361 - RNA, 19 nt, Artificial Sequence
  Description of Artificial Sequence: Synthetic oligonucleotide
caaggaccagacuacacuu

SEQ ID NO: 2583362 - RNA, 19 nt, Artificial Sequence
  Description of Artificial Sequence: Synthetic oligonucleotide
aggcuugaaggaagcagga

SEQ ID NO: 2583363 - RNA, 19 nt, Artificial Sequence
  Description of Artificial Sequence: Synthetic oligonucleotide
caaagaugaacaugucauu

SEQ ID NO: 2583364 - RNA, 19 nt, Artificial Sequence
  Description of Artificial Sequence: Synthetic oligonucleotide
uccggcccucggcugacac

SEQ ID NO: 2583365 - RNA, 19 nt, Artificial Sequence
  Description of Artificial Sequence: Synthetic oligonucleotide
caccgucaggauugccgcc

SEQ ID NO: 2583366 - RNA, 19 nt, Artificial Sequence
  Description of Artificial Sequence: Synthetic oligonucleotide
cugacacuagcugguucug

SEQ ID NO: 2583367 - RNA, 19 nt, Artificial Sequence
  Description of Artificial Sequence: Synthetic oligonucleotide
ccucugcaaguucaagggc

SEQ ID NO: 2583368 - RNA, 19 nt, Artificial Sequence
  Description of Artificial Sequence: Synthetic oligonucleotide
caccacagguucacuguca

SEQ ID NO: 2583369 - RNA, 19 nt, Artificial Sequence
  Description of Artificial Sequence: Synthetic oligonucleotide
ggugcuuaucauuuguauu

SEQ ID NO: 2583370 - RNA, 19 nt, Artificial Sequence
  Description of Artificial Sequence: Synthetic oligonucleotide
acggcccucugcaaguuca

SEQ ID NO: 2583371 - RNA, 19 nt, Artificial Sequence
  Description of Artificial Sequence: Synthetic oligonucleotide
acccgagagccgcaacgcu

SEQ ID NO: 2583372 - RNA, 19 nt, Artificial Sequence
  Description of Artificial Sequence: Synthetic oligonucleotide
gcccacauucucaaagaug

SEQ ID NO: 2583373 - RNA, 19 nt, Artificial Sequence
  Description of Artificial Sequence: Synthetic oligonucleotide
agugggaggcaugcacuga

SEQ ID NO: 2583374 - RNA, 19 nt, Artificial Sequence
  Description of Artificial Sequence: Synthetic oligonucleotide
guuccaaaacggggaggug

SEQ ID NO: 2583375 - RNA, 19 nt, Artificial Sequence
  Description of Artificial Sequence: Synthetic oligonucleotide
agcugucggcgagagaaaa

SEQ ID NO: 2583376 - RNA, 19 nt, Artificial Sequence
  Description of Artificial Sequence: Synthetic oligonucleotide
guccaaucucacagucugc

SEQ ID NO: 2583377 - RNA, 19 nt, Artificial Sequence
  Description of Artificial Sequence: Synthetic oligonucleotide
ggcgagagaaaagagcugu

SEQ ID NO: 2583378 - RNA, 19 nt, Artificial Sequence
  Description of Artificial Sequence: Synthetic oligonucleotide
gaucaccgucaggauugcc

SEQ ID NO: 2583379 - RNA, 19 nt, Artificial Sequence
  Description of Artificial Sequence: Synthetic oligonucleotide
gcacaacaccgccuuccgg

SEQ ID NO: 2583380 - RNA, 19 nt, Artificial Sequence
  Description of Artificial Sequence: Synthetic oligonucleotide
ccuggaggagaucaccguc

SEQ ID NO: 2583381 - RNA, 19 nt, Artificial Sequence
  Description of Artificial Sequence: Synthetic oligonucleotide
agcagucaccacagguuca

SEQ ID NO: 2583382 - RNA, 19 nt, Artificial Sequence
  Description of Artificial Sequence: Synthetic oligonucleotide
cagucugcacagaccagaa

SEQ ID NO: 2583383 - RNA, 19 nt, Artificial Sequence
  Description of Artificial Sequence: Synthetic oligonucleotide
ccagccaauggguccaauc

SEQ ID NO: 2583384 - RNA, 19 nt, Artificial Sequence
  Description of Artificial Sequence: Synthetic oligonucleotide
guuuuacagcugagucccc

SEQ ID NO: 2583385 - RNA, 19 nt, Artificial Sequence
  Description of Artificial Sequence: Synthetic oligonucleotide
ccaaucucacagucugcac

SEQ ID NO: 2583386 - RNA, 19 nt, Artificial Sequence
  Description of Artificial Sequence: Synthetic oligonucleotide
ucccuggcugcagcacccg

SEQ ID NO: 2583387 - RNA, 19 nt, Artificial Sequence
  Description of Artificial Sequence: Synthetic oligonucleotide
gaggacuaagugggaggca

SEQ ID NO: 2583388 - RNA, 19 nt, Artificial Sequence
  Description of Artificial Sequence: Synthetic oligonucleotide
ccaauggguccaaucucac

SEQ ID NO: 2583389 - RNA, 19 nt, Artificial Sequence
  Description of Artificial Sequence: Synthetic oligonucleotide
uugccgccaucagccagag

SEQ ID NO: 2583390 - RNA, 19 nt, Artificial Sequence
  Description of Artificial Sequence: Synthetic oligonucleotide
cuuccgguuccggcccucg

SEQ ID NO: 2583391 - RNA, 19 nt, Artificial Sequence
  Description of Artificial Sequence: Synthetic oligonucleotide
caacaccgccuuccgguuc

SEQ ID NO: 2583392 - RNA, 19 nt, Artificial Sequence
  Description of Artificial Sequence: Synthetic oligonucleotide
gacggcccucugcaaguuc

SEQ ID NO: 2583393 - RNA, 19 nt, Artificial Sequence
  Description of Artificial Sequence: Synthetic oligonucleotide
cagcucagccgguuccauc

SEQ ID NO: 2583394 - RNA, 19 nt, Artificial Sequence
  Description of Artificial Sequence: Synthetic oligonucleotide
cccgagagccgcaacgcug

SEQ ID NO: 2583395 - RNA, 19 nt, Artificial Sequence
  Description of Artificial Sequence: Synthetic oligonucleotide
gggagagcuguauaguuuu

SEQ ID NO: 2583396 - RNA, 19 nt, Artificial Sequence
  Description of Artificial Sequence: Synthetic oligonucleotide
gcugucggcgagagaaaag

SEQ ID NO: 2583397 - RNA, 19 nt, Artificial Sequence
  Description of Artificial Sequence: Synthetic oligonucleotide
cgucuaggcaaugccagcc

SEQ ID NO: 2583398 - RNA, 19 nt, Artificial Sequence
  Description of Artificial Sequence: Synthetic oligonucleotide
ugcccacauccuuggugaa

SEQ ID NO: 2583399 - RNA, 19 nt, Artificial Sequence
  Description of Artificial Sequence: Synthetic oligonucleotide
aagcugucggcgagagaaa

SEQ ID NO: 2583400 - RNA, 19 nt, Artificial Sequence
  Description of Artificial Sequence: Synthetic oligonucleotide
agccgcaacgcuggcacaa

SEQ ID NO: 2583401 - RNA, 19 nt, Artificial Sequence
  Description of Artificial Sequence: Synthetic oligonucleotide
ccucauggagggaaggaaa

SEQ ID NO: 2583402 - RNA, 19 nt, Artificial Sequence
  Description of Artificial Sequence: Synthetic oligonucleotide
ggcuugaaggaagcaggac

SEQ ID NO: 2583403 - RNA, 19 nt, Artificial Sequence
  Description of Artificial Sequence: Synthetic oligonucleotide
aggcaugcacugaggcuug

SEQ ID NO: 2583404 - RNA, 19 nt, Artificial Sequence
  Description of Artificial Sequence: Synthetic oligonucleotide
ggaaaagcugucggcgaga

SEQ ID NO: 2583405 - RNA, 19 nt, Artificial Sequence
  Description of Artificial Sequence: Synthetic oligonucleotide
cgagaagacugccagcaca

SEQ ID NO: 2583406 - RNA, 19 nt, Artificial Sequence
  Description of Artificial Sequence: Synthetic oligonucleotide
ggcugacacuagcugguuc

SEQ ID NO: 2583407 - RNA, 19 nt, Artificial Sequence
  Description of Artificial Sequence: Synthetic oligonucleotide
ccgccuuccgguuccggcc

SEQ ID NO: 2583408 - RNA, 19 nt, Artificial Sequence
  Description of Artificial Sequence: Synthetic oligonucleotide
ccaaggaccagacuacacu

SEQ ID NO: 2583409 - RNA, 19 nt, Artificial Sequence
  Description of Artificial Sequence: Synthetic oligonucleotide
ggacuaagugggaggcaug

SEQ ID NO: 2583410 - RNA, 19 nt, Artificial Sequence
  Description of Artificial Sequence: Synthetic oligonucleotide
ggaggcaugcacugaggcu

SEQ ID NO: 2583411 - RNA, 19 nt, Artificial Sequence
  Description of Artificial Sequence: Synthetic oligonucleotide
aucucacagucugcacaga

SEQ ID NO: 2583412 - RNA, 19 nt, Artificial Sequence
  Description of Artificial Sequence: Synthetic oligonucleotide
cugucccuggcugcagcac

SEQ ID NO: 2583413 - RNA, 19 nt, Artificial Sequence
  Description of Artificial Sequence: Synthetic oligonucleotide
gacugccagcacagcaguc

SEQ ID NO: 2583414 - RNA, 19 nt, Artificial Sequence
  Description of Artificial Sequence: Synthetic oligonucleotide
ggagaucaccgucaggauu

SEQ ID NO: 2583415 - RNA, 19 nt, Artificial Sequence
  Description of Artificial Sequence: Synthetic oligonucleotide
gccgguuccaucgccgcgc

SEQ ID NO: 2583416 - RNA, 19 nt, Artificial Sequence
  Description of Artificial Sequence: Synthetic oligonucleotide
gcuuaucauuuguauuagu

SEQ ID NO: 2583417 - RNA, 19 nt, Artificial Sequence
  Description of Artificial Sequence: Synthetic oligonucleotide
cuaggcaaugccagccaau

SEQ ID NO: 2583418 - RNA, 19 nt, Artificial Sequence
  Description of Artificial Sequence: Synthetic oligonucleotide
gguuccggcccucggcuga

SEQ ID NO: 2583419 - RNA, 19 nt, Artificial Sequence
  Description of Artificial Sequence: Synthetic oligonucleotide
cugaggcuugaaggaagca

SEQ ID NO: 2583420 - RNA, 19 nt, Artificial Sequence
  Description of Artificial Sequence: Synthetic oligonucleotide
cuggcacaacaccgccuuc

SEQ ID NO: 2583421 - RNA, 19 nt, Artificial Sequence
  Description of Artificial Sequence: Synthetic oligonucleotide
aggccacauagaaacuguu

SEQ ID NO: 2583422 - RNA, 19 nt, Artificial Sequence
  Description of Artificial Sequence: Synthetic oligonucleotide
ccccucaguuacucauggg

SEQ ID NO: 2583423 - RNA, 19 nt, Artificial Sequence
  Description of Artificial Sequence: Synthetic oligonucleotide
gcacagcagucaccacagg

SEQ ID NO: 2583424 - RNA, 19 nt, Artificial Sequence
  Description of Artificial Sequence: Synthetic oligonucleotide
gagccgcaacgcuggcaca

SEQ ID NO: 2583425 - RNA, 19 nt, Artificial Sequence
  Description of Artificial Sequence: Synthetic oligonucleotide
ggauugccgccaucagcca

SEQ ID NO: 2583426 - RNA, 19 nt, Artificial Sequence
  Description of Artificial Sequence: Synthetic oligonucleotide
gcugucccuggcugcagca

SEQ ID NO: 2583427 - RNA, 19 nt, Artificial Sequence
  Description of Artificial Sequence: Synthetic oligonucleotide
ccaaaacggggaggugggg

SEQ ID NO: 2583428 - RNA, 19 nt, Artificial Sequence
  Description of Artificial Sequence: Synthetic oligonucleotide
caguuacucaugggaaacu

SEQ ID NO: 2583429 - RNA, 19 nt, Artificial Sequence
  Description of Artificial Sequence: Synthetic oligonucleotide
cucuuuccaaggccacaua

SEQ ID NO: 2583430 - RNA, 19 nt, Artificial Sequence
  Description of Artificial Sequence: Synthetic oligonucleotide
ugccgccaucagccagagc

SEQ ID NO: 2583431 - RNA, 19 nt, Artificial Sequence
  Description of Artificial Sequence: Synthetic oligonucleotide
gagugccaaggaccagacu

SEQ ID NO: 2583432 - RNA, 19 nt, Artificial Sequence
  Description of Artificial Sequence: Synthetic oligonucleotide
gcccucggcugacacuagc

SEQ ID NO: 2583433 - RNA, 19 nt, Artificial Sequence
  Description of Artificial Sequence: Synthetic oligonucleotide
gcucagccgguuccaucgc

SEQ ID NO: 2583434 - RNA, 19 nt, Artificial Sequence
  Description of Artificial Sequence: Synthetic oligonucleotide
ccgccaucagccagagcug

SEQ ID NO: 2583435 - RNA, 19 nt, Artificial Sequence
  Description of Artificial Sequence: Synthetic oligonucleotide
gcuggcacaacaccgccuu

SEQ ID NO: 2583436 - RNA, 19 nt, Artificial Sequence
  Description of Artificial Sequence: Synthetic oligonucleotide
gcgagagaaaagagcuguc

SEQ ID NO: 2583437 - RNA, 19 nt, Artificial Sequence
  Description of Artificial Sequence: Synthetic oligonucleotide
acaccgccuuccgguuccg

SEQ ID NO: 2583438 - RNA, 19 nt, Artificial Sequence
  Description of Artificial Sequence: Synthetic oligonucleotide
gcacugaggcuugaaggaa

SEQ ID NO: 2583439 - RNA, 19 nt, Artificial Sequence
  Description of Artificial Sequence: Synthetic oligonucleotide
ccgagaagacugccagcac

SEQ ID NO: 2583440 - RNA, 19 nt, Artificial Sequence
  Description of Artificial Sequence: Synthetic oligonucleotide
gugaugcauagaggacuaa

SEQ ID NO: 2583441 - RNA, 19 nt, Artificial Sequence
  Description of Artificial Sequence: Synthetic oligonucleotide
gggcaaacaucggugcuua

SEQ ID NO: 2583442 - RNA, 19 nt, Artificial Sequence
  Description of Artificial Sequence: Synthetic oligonucleotide
ggguuaggacaguugugau

SEQ ID NO: 2583443 - RNA, 19 nt, Artificial Sequence
  Description of Artificial Sequence: Synthetic oligonucleotide
ggaagcaggacggcccucu

SEQ ID NO: 2583444 - RNA, 19 nt, Artificial Sequence
  Description of Artificial Sequence: Synthetic oligonucleotide
cuucuuccucauggaggga

SEQ ID NO: 2583445 - RNA, 19 nt, Artificial Sequence
  Description of Artificial Sequence: Synthetic oligonucleotide
cacagaccagaaacuugau

SEQ ID NO: 2583446 - RNA, 19 nt, Artificial Sequence
  Description of Artificial Sequence: Synthetic oligonucleotide
guuccggcccucggcugac

SEQ ID NO: 2583447 - RNA, 19 nt, Artificial Sequence
  Description of Artificial Sequence: Synthetic oligonucleotide
gccaucagccagagcuggc

SEQ ID NO: 2583448 - RNA, 19 nt, Artificial Sequence
  Description of Artificial Sequence: Synthetic oligonucleotide
cugcaaguucaagggcaaa

SEQ ID NO: 2583449 - RNA, 19 nt, Artificial Sequence
  Description of Artificial Sequence: Synthetic oligonucleotide
cggcgagagaaaagagcug

SEQ ID NO: 2583450 - RNA, 19 nt, Artificial Sequence
  Description of Artificial Sequence: Synthetic oligonucleotide
ccacauagaaacuguucuu

SEQ ID NO: 2583451 - RNA, 19 nt, Artificial Sequence
  Description of Artificial Sequence: Synthetic oligonucleotide
ccacauucucaaagaugaa

SEQ ID NO: 2583452 - RNA, 19 nt, Artificial Sequence
  Description of Artificial Sequence: Synthetic oligonucleotide
ggaccagacuacacuuugu

SEQ ID NO: 2583453 - RNA, 19 nt, Artificial Sequence
  Description of Artificial Sequence: Synthetic oligonucleotide
ccgguuccaucgccgcgcc

SEQ ID NO: 2583454 - RNA, 19 nt, Artificial Sequence
  Description of Artificial Sequence: Synthetic oligonucleotide
ggggagagcuguauaguuu

SEQ ID NO: 2583455 - RNA, 19 nt, Artificial Sequence
  Description of Artificial Sequence: Synthetic oligonucleotide
uuccggcccucggcugaca

SEQ ID NO: 2583456 - RNA, 19 nt, Artificial Sequence
  Description of Artificial Sequence: Synthetic oligonucleotide
ggguccaaucucacagucu

SEQ ID NO: 2583457 - RNA, 19 nt, Artificial Sequence
  Description of Artificial Sequence: Synthetic oligonucleotide
gccgcaacgcuggcacaac

SEQ ID NO: 2583458 - RNA, 19 nt, Artificial Sequence
  Description of Artificial Sequence: Synthetic oligonucleotide
gcaggacggcccucugcaa

SEQ ID NO: 2583459 - RNA, 19 nt, Artificial Sequence
  Description of Artificial Sequence: Synthetic oligonucleotide
cggugcuuaucauuuguau

SEQ ID NO: 2583460 - RNA, 19 nt, Artificial Sequence
  Description of Artificial Sequence: Synthetic oligonucleotide
ccgcaacgcuggcacaaca

SEQ ID NO: 2583461 - RNA, 19 nt, Artificial Sequence
  Description of Artificial Sequence: Synthetic oligonucleotide
ggcccucggcugacacuag

SEQ ID NO: 2583462 - RNA, 19 nt, Artificial Sequence
  Description of Artificial Sequence: Synthetic oligonucleotide
cgagagccgcaacgcuggc

SEQ ID NO: 2583463 - RNA, 19 nt, Artificial Sequence
  Description of Artificial Sequence: Synthetic oligonucleotide
ggcaugcacugaggcuuga

SEQ ID NO: 2583464 - RNA, 19 nt, Artificial Sequence
  Description of Artificial Sequence: Synthetic oligonucleotide
gcagcacccgagagccgca

SEQ ID NO: 2583465 - RNA, 19 nt, Artificial Sequence
  Description of Artificial Sequence: Synthetic oligonucleotide
cagcacccgagagccgcaa

SEQ ID NO: 2583466 - RNA, 19 nt, Artificial Sequence
  Description of Artificial Sequence: Synthetic oligonucleotide
ggcaaacaucggugcuuau

SEQ ID NO: 2583467 - RNA, 19 nt, Artificial Sequence
  Description of Artificial Sequence: Synthetic oligonucleotide
cgguuccggcccucggcug

SEQ ID NO: 2583468 - RNA, 19 nt, Artificial Sequence
  Description of Artificial Sequence: Synthetic oligonucleotide
ccgguuccggcccucggcu

SEQ ID NO: 2583469 - RNA, 19 nt, Artificial Sequence
  Description of Artificial Sequence: Synthetic oligonucleotide
cgucaggauugccgccauc

SEQ ID NO: 2583470 - RNA, 19 nt, Artificial Sequence
  Description of Artificial Sequence: Synthetic oligonucleotide
cgguuccaucgccgcgccg

SEQ ID NO: 2583471 - RNA, 19 nt, Artificial Sequence
  Description of Artificial Sequence: Synthetic oligonucleotide
cggcccucggcugacacua

SEQ ID NO: 2583472 - RNA, 19 nt, Artificial Sequence
  Description of Artificial Sequence: Synthetic oligonucleotide
ccuuccgguuccggcccuc

SEQ ID NO: 2583473 - RNA, 19 nt, Artificial Sequence
  Description of Artificial Sequence: Synthetic oligonucleotide
cgcuggcacaacaccgccu

SEQ ID NO: 2583474 - RNA, 19 nt, Artificial Sequence
  Description of Artificial Sequence: Synthetic oligonucleotide
gccuuccgguuccggcccu

SEQ ID NO: 2583475 - RNA, 19 nt, Artificial Sequence
  Description of Artificial Sequence: Synthetic oligonucleotide
ccccauguucuuccauguu

SEQ ID NO: 2583476 - RNA, 19 nt, Artificial Sequence
  Description of Artificial Sequence: Synthetic oligonucleotide
ggacggcccucugcaaguu

SEQ ID NO: 2583477 - RNA, 19 nt, Artificial Sequence
  Description of Artificial Sequence: Synthetic oligonucleotide
cggcccucugcaaguucaa

SEQ ID NO: 2583478 - RNA, 19 nt, Artificial Sequence
  Description of Artificial Sequence: Synthetic oligonucleotide
ccggcccucggcugacacu

SEQ ID NO: 2583479 - RNA, 19 nt, Artificial Sequence
  Description of Artificial Sequence: Synthetic oligonucleotide
ccgucaggauugccgccau

SEQ ID NO: 2583480 - RNA, 19 nt, Artificial Sequence
  Description of Artificial Sequence: Synthetic oligonucleotide
cggcugacacuagcugguu

SEQ ID NO: 2583481 - RNA, 19 nt, Artificial Sequence
  Description of Artificial Sequence: Synthetic oligonucleotide
aauuggaagggacauagcc

SEQ ID NO: 2583482 - RNA, 19 nt, Artificial Sequence
  Description of Artificial Sequence: Synthetic oligonucleotide
aagucaaggauccugaguc

SEQ ID NO: 2583483 - RNA, 19 nt, Artificial Sequence
  Description of Artificial Sequence: Synthetic oligonucleotide
auuaacuucagccaaccac

SEQ ID NO: 2583484 - RNA, 19 nt, Artificial Sequence
  Description of Artificial Sequence: Synthetic oligonucleotide
uuaacuucagccaaccacc

SEQ ID NO: 2583485 - RNA, 19 nt, Artificial Sequence
  Description of Artificial Sequence: Synthetic oligonucleotide
gacacagucauguuguugg

SEQ ID NO: 2583486 - RNA, 19 nt, Artificial Sequence
  Description of Artificial Sequence: Synthetic oligonucleotide
ucuacuuuggguuucgugc

SEQ ID NO: 2583487 - RNA, 19 nt, Artificial Sequence
  Description of Artificial Sequence: Synthetic oligonucleotide
ucuuuaaagucaaggaucc

SEQ ID NO: 2583488 - RNA, 19 nt, Artificial Sequence
  Description of Artificial Sequence: Synthetic oligonucleotide
uguucaaggacacacugag

SEQ ID NO: 2583489 - RNA, 19 nt, Artificial Sequence
  Description of Artificial Sequence: Synthetic oligonucleotide
uggauaagcaguguggugg

SEQ ID NO: 2583490 - RNA, 19 nt, Artificial Sequence
  Description of Artificial Sequence: Synthetic oligonucleotide
ggagucauuaccuuguucg

SEQ ID NO: 2583491 - RNA, 19 nt, Artificial Sequence
  Description of Artificial Sequence: Synthetic oligonucleotide
gucuucuacagucugauag

SEQ ID NO: 2583492 - RNA, 19 nt, Artificial Sequence
  Description of Artificial Sequence: Synthetic oligonucleotide
uccggauauaauuggaagg

SEQ ID NO: 2583493 - RNA, 19 nt, Artificial Sequence
  Description of Artificial Sequence: Synthetic oligonucleotide
gauccugagucucugauug

SEQ ID NO: 2583494 - RNA, 19 nt, Artificial Sequence
  Description of Artificial Sequence: Synthetic oligonucleotide
uuuaaagucaaggauccug

SEQ ID NO: 2583495 - RNA, 19 nt, Artificial Sequence
  Description of Artificial Sequence: Synthetic oligonucleotide
auaauuggaagggacauag

SEQ ID NO: 2583496 - RNA, 19 nt, Artificial Sequence
  Description of Artificial Sequence: Synthetic oligonucleotide
gauauggauaagcagugug

SEQ ID NO: 2583497 - RNA, 19 nt, Artificial Sequence
  Description of Artificial Sequence: Synthetic oligonucleotide
ucuucuacagucugauagg

SEQ ID NO: 2583498 - RNA, 19 nt, Artificial Sequence
  Description of Artificial Sequence: Synthetic oligonucleotide
cuugcacuuccuuuuaugg

SEQ ID NO: 2583499 - RNA, 19 nt, Artificial Sequence
  Description of Artificial Sequence: Synthetic oligonucleotide
uggcuuaugucucuggugc

SEQ ID NO: 2583500 - RNA, 19 nt, Artificial Sequence
  Description of Artificial Sequence: Synthetic oligonucleotide
acaucuuuaaagucaagga

SEQ ID NO: 2583501 - RNA, 19 nt, Artificial Sequence
  Description of Artificial Sequence: Synthetic oligonucleotide
ugaaaguagcggcaagggg

SEQ ID NO: 2583502 - RNA, 19 nt, Artificial Sequence
  Description of Artificial Sequence: Synthetic oligonucleotide
ucuacagucugauaggcuc

SEQ ID NO: 2583503 - RNA, 19 nt, Artificial Sequence
  Description of Artificial Sequence: Synthetic oligonucleotide
auuggaagggacauagccc

SEQ ID NO: 2583504 - RNA, 19 nt, Artificial Sequence
  Description of Artificial Sequence: Synthetic oligonucleotide
uguauugccugugacaucu

SEQ ID NO: 2583505 - RNA, 19 nt, Artificial Sequence
  Description of Artificial Sequence: Synthetic oligonucleotide
ucagcagacugaaaguagc

SEQ ID NO: 2583506 - RNA, 19 nt, Artificial Sequence
  Description of Artificial Sequence: Synthetic oligonucleotide
ucugauaggcucuugcacu

SEQ ID NO: 2583507 - RNA, 19 nt, Artificial Sequence
  Description of Artificial Sequence: Synthetic oligonucleotide
aaagucaaggauccugagu

SEQ ID NO: 2583508 - RNA, 19 nt, Artificial Sequence
  Description of Artificial Sequence: Synthetic oligonucleotide
ggcaaaauagaccugguug

SEQ ID NO: 2583509 - RNA, 19 nt, Artificial Sequence
  Description of Artificial Sequence: Synthetic oligonucleotide
agaguaaccgaccaccucu

SEQ ID NO: 2583510 - RNA, 19 nt, Artificial Sequence
  Description of Artificial Sequence: Synthetic oligonucleotide
auuaccuuguucguuucgc

SEQ ID NO: 2583511 - RNA, 19 nt, Artificial Sequence
  Description of Artificial Sequence: Synthetic oligonucleotide
uccacgauauggauaagca

SEQ ID NO: 2583512 - RNA, 19 nt, Artificial Sequence
  Description of Artificial Sequence: Synthetic oligonucleotide
uuggaagggacauagcccu

SEQ ID NO: 2583513 - RNA, 19 nt, Artificial Sequence
  Description of Artificial Sequence: Synthetic oligonucleotide
uuccggauauaauuggaag

SEQ ID NO: 2583514 - RNA, 19 nt, Artificial Sequence
  Description of Artificial Sequence: Synthetic oligonucleotide
agcagguuggcuuaugucu

SEQ ID NO: 2583515 - RNA, 19 nt, Artificial Sequence
  Description of Artificial Sequence: Synthetic oligonucleotide
uguuguuggaguugaaggu

SEQ ID NO: 2583516 - RNA, 19 nt, Artificial Sequence
  Description of Artificial Sequence: Synthetic oligonucleotide
uucagcagacugaaaguag

SEQ ID NO: 2583517 - RNA, 19 nt, Artificial Sequence
  Description of Artificial Sequence: Synthetic oligonucleotide
uacagaguaaccgaccacc

SEQ ID NO: 2583518 - RNA, 19 nt, Artificial Sequence
  Description of Artificial Sequence: Synthetic oligonucleotide
gaaaguagcggcaagggga

SEQ ID NO: 2583519 - RNA, 19 nt, Artificial Sequence
  Description of Artificial Sequence: Synthetic oligonucleotide
accuggaagguccaguuuc

SEQ ID NO: 2583520 - RNA, 19 nt, Artificial Sequence
  Description of Artificial Sequence: Synthetic oligonucleotide
gacggcaaaauagaccugg

SEQ ID NO: 2583521 - RNA, 19 nt, Artificial Sequence
  Description of Artificial Sequence: Synthetic oligonucleotide
uuauggagucauuaccuug

SEQ ID NO: 2583522 - RNA, 19 nt, Artificial Sequence
  Description of Artificial Sequence: Synthetic oligonucleotide
agcagugggcgcuuggagc

SEQ ID NO: 2583523 - RNA, 19 nt, Artificial Sequence
  Description of Artificial Sequence: Synthetic oligonucleotide
guucguuucgcccugguac

SEQ ID NO: 2583524 - RNA, 19 nt, Artificial Sequence
  Description of Artificial Sequence: Synthetic oligonucleotide
ucggggaaagcccugaggu

SEQ ID NO: 2583525 - RNA, 19 nt, Artificial Sequence
  Description of Artificial Sequence: Synthetic oligonucleotide
accaccacucuguauugcc

SEQ ID NO: 2583526 - RNA, 19 nt, Artificial Sequence
  Description of Artificial Sequence: Synthetic oligonucleotide
acugagaguuccuugguca

SEQ ID NO: 2583527 - RNA, 19 nt, Artificial Sequence
  Description of Artificial Sequence: Synthetic oligonucleotide
aagcagguuggcuuauguc

SEQ ID NO: 2583528 - RNA, 19 nt, Artificial Sequence
  Description of Artificial Sequence: Synthetic oligonucleotide
auaagcagugugguggggc

SEQ ID NO: 2583529 - RNA, 19 nt, Artificial Sequence
  Description of Artificial Sequence: Synthetic oligonucleotide
uguagacggcaaaauagac

SEQ ID NO: 2583530 - RNA, 19 nt, Artificial Sequence
  Description of Artificial Sequence: Synthetic oligonucleotide
agggacauagcccuuccuc

SEQ ID NO: 2583531 - RNA, 19 nt, Artificial Sequence
  Description of Artificial Sequence: Synthetic oligonucleotide
ucuguauugccugugacau

SEQ ID NO: 2583532 - RNA, 19 nt, Artificial Sequence
  Description of Artificial Sequence: Synthetic oligonucleotide
uuucgugccuugaaggugu

SEQ ID NO: 2583533 - RNA, 19 nt, Artificial Sequence
  Description of Artificial Sequence: Synthetic oligonucleotide
ugauuggcugacuacacuc

SEQ ID NO: 2583534 - RNA, 19 nt, Artificial Sequence
  Description of Artificial Sequence: Synthetic oligonucleotide
aaggacacagucauguugu

SEQ ID NO: 2583535 - RNA, 19 nt, Artificial Sequence
  Description of Artificial Sequence: Synthetic oligonucleotide
gcaaaauagaccugguugc

SEQ ID NO: 2583536 - RNA, 19 nt, Artificial Sequence
  Description of Artificial Sequence: Synthetic oligonucleotide
aaauagaccugguugccuu

SEQ ID NO: 2583537 - RNA, 19 nt, Artificial Sequence
  Description of Artificial Sequence: Synthetic oligonucleotide
acuacacucacguucuacu

SEQ ID NO: 2583538 - RNA, 19 nt, Artificial Sequence
  Description of Artificial Sequence: Synthetic oligonucleotide
auuggcugacuacacucac

SEQ ID NO: 2583539 - RNA, 19 nt, Artificial Sequence
  Description of Artificial Sequence: Synthetic oligonucleotide
agccccuggggacugaagc

SEQ ID NO: 2583540 - RNA, 19 nt, Artificial Sequence
  Description of Artificial Sequence: Synthetic oligonucleotide
ucuugcacuuccuuuuaug

SEQ ID NO: 2583541 - RNA, 19 nt, Artificial Sequence
  Description of Artificial Sequence: Synthetic oligonucleotide
aaaguagcggcaaggggag

SEQ ID NO: 2583542 - RNA, 19 nt, Artificial Sequence
  Description of Artificial Sequence: Synthetic oligonucleotide
cuacuuuggguuucgugcc

SEQ ID NO: 2583543 - RNA, 19 nt, Artificial Sequence
  Description of Artificial Sequence: Synthetic oligonucleotide
gguguagacggcaaaauag

SEQ ID NO: 2583544 - RNA, 19 nt, Artificial Sequence
  Description of Artificial Sequence: Synthetic oligonucleotide
gaguugaaggucaaggcac

SEQ ID NO: 2583545 - RNA, 19 nt, Artificial Sequence
  Description of Artificial Sequence: Synthetic oligonucleotide
auuccuucagugaagacgu

SEQ ID NO: 2583546 - RNA, 19 nt, Artificial Sequence
  Description of Artificial Sequence: Synthetic oligonucleotide
uggcugacuacacucacgu

SEQ ID NO: 2583547 - RNA, 19 nt, Artificial Sequence
  Description of Artificial Sequence: Synthetic oligonucleotide
uggguuucgugccuugaag

SEQ ID NO: 2583548 - RNA, 19 nt, Artificial Sequence
  Description of Artificial Sequence: Synthetic oligonucleotide
ucuuccggauauaauugga

SEQ ID NO: 2583549 - RNA, 19 nt, Artificial Sequence
  Description of Artificial Sequence: Synthetic oligonucleotide
ccucccauuaacuucagcc

SEQ ID NO: 2583550 - RNA, 19 nt, Artificial Sequence
  Description of Artificial Sequence: Synthetic oligonucleotide
ucacauuccuucagugaag

SEQ ID NO: 2583551 - RNA, 19 nt, Artificial Sequence
  Description of Artificial Sequence: Synthetic oligonucleotide
aaccgaccaccucugaaug

SEQ ID NO: 2583552 - RNA, 19 nt, Artificial Sequence
  Description of Artificial Sequence: Synthetic oligonucleotide
agugugguggggccugugc

SEQ ID NO: 2583553 - RNA, 19 nt, Artificial Sequence
  Description of Artificial Sequence: Synthetic oligonucleotide
acucuguauugccugugac

SEQ ID NO: 2583554 - RNA, 19 nt, Artificial Sequence
  Description of Artificial Sequence: Synthetic oligonucleotide
gucuuccggauauaauugg

SEQ ID NO: 2583555 - RNA, 19 nt, Artificial Sequence
  Description of Artificial Sequence: Synthetic oligonucleotide
uucggggaaagcccugagg

SEQ ID NO: 2583556 - RNA, 19 nt, Artificial Sequence
  Description of Artificial Sequence: Synthetic oligonucleotide
agcccuuccucccauuaac

SEQ ID NO: 2583557 - RNA, 19 nt, Artificial Sequence
  Description of Artificial Sequence: Synthetic oligonucleotide
aaaauagaccugguugccu

SEQ ID NO: 2583558 - RNA, 19 nt, Artificial Sequence
  Description of Artificial Sequence: Synthetic oligonucleotide
uacucagucuuccggauau

SEQ ID NO: 2583559 - RNA, 19 nt, Artificial Sequence
  Description of Artificial Sequence: Synthetic oligonucleotide
uucuacuuuggguuucgug

SEQ ID NO: 2583560 - RNA, 19 nt, Artificial Sequence
  Description of Artificial Sequence: Synthetic oligonucleotide
auauaauuggaagggacau

SEQ ID NO: 2583561 - RNA, 19 nt, Artificial Sequence
  Description of Artificial Sequence: Synthetic oligonucleotide
uucugucuucuacagucug

SEQ ID NO: 2583562 - RNA, 19 nt, Artificial Sequence
  Description of Artificial Sequence: Synthetic oligonucleotide
uuggcuuaugucucuggug

SEQ ID NO: 2583563 - RNA, 19 nt, Artificial Sequence
  Description of Artificial Sequence: Synthetic oligonucleotide
ugguacagaguaaccgacc

SEQ ID NO: 2583564 - RNA, 19 nt, Artificial Sequence
  Description of Artificial Sequence: Synthetic oligonucleotide
cugaaaguagcggcaaggg

SEQ ID NO: 2583565 - RNA, 19 nt, Artificial Sequence
  Description of Artificial Sequence: Synthetic oligonucleotide
uuaccuuguucguuucgcc

SEQ ID NO: 2583566 - RNA, 19 nt, Artificial Sequence
  Description of Artificial Sequence: Synthetic oligonucleotide
acucacguucuacuuuggg

SEQ ID NO: 2583567 - RNA, 19 nt, Artificial Sequence
  Description of Artificial Sequence: Synthetic oligonucleotide
cacgauauggauaagcagu

SEQ ID NO: 2583568 - RNA, 19 nt, Artificial Sequence
  Description of Artificial Sequence: Synthetic oligonucleotide
cuguuucugucuucuacag

SEQ ID NO: 2583569 - RNA, 19 nt, Artificial Sequence
  Description of Artificial Sequence: Synthetic oligonucleotide
uaaccgaccaccucugaau

SEQ ID NO: 2583570 - RNA, 19 nt, Artificial Sequence
  Description of Artificial Sequence: Synthetic oligonucleotide
agguccaguuucuggacuc

SEQ ID NO: 2583571 - RNA, 19 nt, Artificial Sequence
  Description of Artificial Sequence: Synthetic oligonucleotide
agcagacugaaaguagcgg

SEQ ID NO: 2583572 - RNA, 19 nt, Artificial Sequence
  Description of Artificial Sequence: Synthetic oligonucleotide
uaauuggaagggacauagc

SEQ ID NO: 2583573 - RNA, 19 nt, Artificial Sequence
  Description of Artificial Sequence: Synthetic oligonucleotide
uugccugugacaucuuuaa

SEQ ID NO: 2583574 - RNA, 19 nt, Artificial Sequence
  Description of Artificial Sequence: Synthetic oligonucleotide
agucugauaggcucuugca

SEQ ID NO: 2583575 - RNA, 19 nt, Artificial Sequence
  Description of Artificial Sequence: Synthetic oligonucleotide
cuucagugaagacgugucc

SEQ ID NO: 2583576 - RNA, 19 nt, Artificial Sequence
  Description of Artificial Sequence: Synthetic oligonucleotide
ucaaggauccugagucucu

SEQ ID NO: 2583577 - RNA, 19 nt, Artificial Sequence
  Description of Artificial Sequence: Synthetic oligonucleotide
aguagcggcaaggggaggg

SEQ ID NO: 2583578 - RNA, 19 nt, Artificial Sequence
  Description of Artificial Sequence: Synthetic oligonucleotide
acuccccauguucaaggac

SEQ ID NO: 2583579 - RNA, 19 nt, Artificial Sequence
  Description of Artificial Sequence: Synthetic oligonucleotide
caaaauagaccugguugcc

SEQ ID NO: 2583580 - RNA, 19 nt, Artificial Sequence
  Description of Artificial Sequence: Synthetic oligonucleotide
gcugacuacacucacguuc

SEQ ID NO: 2583581 - RNA, 19 nt, Artificial Sequence
  Description of Artificial Sequence: Synthetic oligonucleotide
uucguuucgcccugguaca

SEQ ID NO: 2583582 - RNA, 19 nt, Artificial Sequence
  Description of Artificial Sequence: Synthetic oligonucleotide
agacguguccuggugcugc

SEQ ID NO: 2583583 - RNA, 19 nt, Artificial Sequence
  Description of Artificial Sequence: Synthetic oligonucleotide
ugcugcuucggggaaagcc

SEQ ID NO: 2583584 - RNA, 19 nt, Artificial Sequence
  Description of Artificial Sequence: Synthetic oligonucleotide
uggucacauuccuucagug

SEQ ID NO: 2583585 - RNA, 19 nt, Artificial Sequence
  Description of Artificial Sequence: Synthetic oligonucleotide
accgaccaccucugaaugc

SEQ ID NO: 2583586 - RNA, 19 nt, Artificial Sequence
  Description of Artificial Sequence: Synthetic oligonucleotide
gcagacugaaaguagcggc

SEQ ID NO: 2583587 - RNA, 19 nt, Artificial Sequence
  Description of Artificial Sequence: Synthetic oligonucleotide
ggguuucgugccuugaagg

SEQ ID NO: 2583588 - RNA, 19 nt, Artificial Sequence
  Description of Artificial Sequence: Synthetic oligonucleotide
guuucgcccugguacagag

SEQ ID NO: 2583589 - RNA, 19 nt, Artificial Sequence
  Description of Artificial Sequence: Synthetic oligonucleotide
agagcccuucagcagacug

SEQ ID NO: 2583590 - RNA, 19 nt, Artificial Sequence
  Description of Artificial Sequence: Synthetic oligonucleotide
gucugauaggcucuugcac

SEQ ID NO: 2583591 - RNA, 19 nt, Artificial Sequence
  Description of Artificial Sequence: Synthetic oligonucleotide
accuuguucguuucgcccu

SEQ ID NO: 2583592 - RNA, 19 nt, Artificial Sequence
  Description of Artificial Sequence: Synthetic oligonucleotide
ucucugauuggcugacuac

SEQ ID NO: 2583593 - RNA, 19 nt, Artificial Sequence
  Description of Artificial Sequence: Synthetic oligonucleotide
cauuaccuuguucguuucg

SEQ ID NO: 2583594 - RNA, 19 nt, Artificial Sequence
  Description of Artificial Sequence: Synthetic oligonucleotide
uccugagucucugauuggc

SEQ ID NO: 2583595 - RNA, 19 nt, Artificial Sequence
  Description of Artificial Sequence: Synthetic oligonucleotide
acgauauggauaagcagug

SEQ ID NO: 2583596 - RNA, 19 nt, Artificial Sequence
  Description of Artificial Sequence: Synthetic oligonucleotide
gaagggacauagcccuucc

SEQ ID NO: 2583597 - RNA, 19 nt, Artificial Sequence
  Description of Artificial Sequence: Synthetic oligonucleotide
cuccccauguucaaggaca

SEQ ID NO: 2583598 - RNA, 19 nt, Artificial Sequence
  Description of Artificial Sequence: Synthetic oligonucleotide
ccggauauaauuggaaggg

SEQ ID NO: 2583599 - RNA, 19 nt, Artificial Sequence
  Description of Artificial Sequence: Synthetic oligonucleotide
cuccacgauauggauaagc

SEQ ID NO: 2583600 - RNA, 19 nt, Artificial Sequence
  Description of Artificial Sequence: Synthetic oligonucleotide
agugaagacguguccuggu

SEQ ID NO: 2583601 - RNA, 19 nt, Artificial Sequence
  Description of Artificial Sequence: Synthetic oligonucleotide
agguguacucagucuuccg

SEQ ID NO: 2583602 - RNA, 19 nt, Artificial Sequence
  Description of Artificial Sequence: Synthetic oligonucleotide
ucugucucaccgcucccga

SEQ ID NO: 2583603 - RNA, 19 nt, Artificial Sequence
  Description of Artificial Sequence: Synthetic oligonucleotide
ggacuccccauguucaagg

SEQ ID NO: 2583604 - RNA, 19 nt, Artificial Sequence
  Description of Artificial Sequence: Synthetic oligonucleotide
gggacauagcccuuccucc

SEQ ID NO: 2583605 - RNA, 19 nt, Artificial Sequence
  Description of Artificial Sequence: Synthetic oligonucleotide
acugaagcagguuggcuua

SEQ ID NO: 2583606 - RNA, 19 nt, Artificial Sequence
  Description of Artificial Sequence: Synthetic oligonucleotide
aagguguagacggcaaaau

SEQ ID NO: 2583607 - RNA, 19 nt, Artificial Sequence
  Description of Artificial Sequence: Synthetic oligonucleotide
uauaauuggaagggacaua

SEQ ID NO: 2583608 - RNA, 19 nt, Artificial Sequence
  Description of Artificial Sequence: Synthetic oligonucleotide
gguacagaguaaccgacca

SEQ ID NO: 2583609 - RNA, 19 nt, Artificial Sequence
  Description of Artificial Sequence: Synthetic oligonucleotide
cugagaguuccuuggucac

SEQ ID NO: 2583610 - RNA, 19 nt, Artificial Sequence
  Description of Artificial Sequence: Synthetic oligonucleotide
agucaaggauccugagucu

SEQ ID NO: 2583611 - RNA, 19 nt, Artificial Sequence
  Description of Artificial Sequence: Synthetic oligonucleotide
cagacugaaaguagcggca

SEQ ID NO: 2583612 - RNA, 19 nt, Artificial Sequence
  Description of Artificial Sequence: Synthetic oligonucleotide
uggagucauuaccuuguuc

SEQ ID NO: 2583613 - RNA, 19 nt, Artificial Sequence
  Description of Artificial Sequence: Synthetic oligonucleotide
caccacucuguauugccug

SEQ ID NO: 2583614 - RNA, 19 nt, Artificial Sequence
  Description of Artificial Sequence: Synthetic oligonucleotide
gauaagcaguguggugggg

SEQ ID NO: 2583615 - RNA, 19 nt, Artificial Sequence
  Description of Artificial Sequence: Synthetic oligonucleotide
guuucgugccuugaaggug

SEQ ID NO: 2583616 - RNA, 19 nt, Artificial Sequence
  Description of Artificial Sequence: Synthetic oligonucleotide
uccccauguucaaggacac

SEQ ID NO: 2583617 - RNA, 19 nt, Artificial Sequence
  Description of Artificial Sequence: Synthetic oligonucleotide
gauuggcugacuacacuca

SEQ ID NO: 2583618 - RNA, 19 nt, Artificial Sequence
  Description of Artificial Sequence: Synthetic oligonucleotide
guguagacggcaaaauaga

SEQ ID NO: 2583619 - RNA, 19 nt, Artificial Sequence
  Description of Artificial Sequence: Synthetic oligonucleotide
aggauccugagucucugau

SEQ ID NO: 2583620 - RNA, 19 nt, Artificial Sequence
  Description of Artificial Sequence: Synthetic oligonucleotide
gaagguguagacggcaaaa

SEQ ID NO: 2583621 - RNA, 19 nt, Artificial Sequence
  Description of Artificial Sequence: Synthetic oligonucleotide
ucauuaccuuguucguuuc

SEQ ID NO: 2583622 - RNA, 19 nt, Artificial Sequence
  Description of Artificial Sequence: Synthetic oligonucleotide
uggaaagcaccuggaaggu

SEQ ID NO: 2583623 - RNA, 19 nt, Artificial Sequence
  Description of Artificial Sequence: Synthetic oligonucleotide
gacuacacucacguucuac

SEQ ID NO: 2583624 - RNA, 19 nt, Artificial Sequence
  Description of Artificial Sequence: Synthetic oligonucleotide
cuggccuaagcuggcaggg

SEQ ID NO: 2583625 - RNA, 19 nt, Artificial Sequence
  Description of Artificial Sequence: Synthetic oligonucleotide
gaccugguugccuucuguc

SEQ ID NO: 2583626 - RNA, 19 nt, Artificial Sequence
  Description of Artificial Sequence: Synthetic oligonucleotide
cagugaagacguguccugg

SEQ ID NO: 2583627 - RNA, 19 nt, Artificial Sequence
  Description of Artificial Sequence: Synthetic oligonucleotide
cuuccggauauaauuggaa

SEQ ID NO: 2583628 - RNA, 19 nt, Artificial Sequence
  Description of Artificial Sequence: Synthetic oligonucleotide
uguuggaguugaaggucaa

SEQ ID NO: 2583629 - RNA, 19 nt, Artificial Sequence
  Description of Artificial Sequence: Synthetic oligonucleotide
ugagaguuccuuggucaca

SEQ ID NO: 2583630 - RNA, 19 nt, Artificial Sequence
  Description of Artificial Sequence: Synthetic oligonucleotide
cuggcagggagagucuggg

SEQ ID NO: 2583631 - RNA, 19 nt, Artificial Sequence
  Description of Artificial Sequence: Synthetic oligonucleotide
uguucguuucgcccuggua

SEQ ID NO: 2583632 - RNA, 19 nt, Artificial Sequence
  Description of Artificial Sequence: Synthetic oligonucleotide
gaagacguguccuggugcu

SEQ ID NO: 2583633 - RNA, 19 nt, Artificial Sequence
  Description of Artificial Sequence: Synthetic oligonucleotide
guacagaguaaccgaccac

SEQ ID NO: 2583634 - RNA, 19 nt, Artificial Sequence
  Description of Artificial Sequence: Synthetic oligonucleotide
gcagugggcgcuuggagcc

SEQ ID NO: 2583635 - RNA, 19 nt, Artificial Sequence
  Description of Artificial Sequence: Synthetic oligonucleotide
gacugaagcagguuggcuu

SEQ ID NO: 2583636 - RNA, 19 nt, Artificial Sequence
  Description of Artificial Sequence: Synthetic oligonucleotide
gagucugggucuggaaagc

SEQ ID NO: 2583637 - RNA, 19 nt, Artificial Sequence
  Description of Artificial Sequence: Synthetic oligonucleotide
gacauagcccuuccuccca

SEQ ID NO: 2583638 - RNA, 19 nt, Artificial Sequence
  Description of Artificial Sequence: Synthetic oligonucleotide
caaccaccacucuguauug

SEQ ID NO: 2583639 - RNA, 19 nt, Artificial Sequence
  Description of Artificial Sequence: Synthetic oligonucleotide
cagguguacucagucuucc

SEQ ID NO: 2583640 - RNA, 19 nt, Artificial Sequence
  Description of Artificial Sequence: Synthetic oligonucleotide
ccuucugucucaccgcucc

SEQ ID NO: 2583641 - RNA, 19 nt, Artificial Sequence
  Description of Artificial Sequence: Synthetic oligonucleotide
gugccaucugcagaguccc

SEQ ID NO: 2583642 - RNA, 19 nt, Artificial Sequence
  Description of Artificial Sequence: Synthetic oligonucleotide
gaagcagguuggcuuaugu

SEQ ID NO: 2583643 - RNA, 19 nt, Artificial Sequence
  Description of Artificial Sequence: Synthetic oligonucleotide
cugacuacacucacguucu

SEQ ID NO: 2583644 - RNA, 19 nt, Artificial Sequence
  Description of Artificial Sequence: Synthetic oligonucleotide
gucucaccgcucccgagcc

SEQ ID NO: 2583645 - RNA, 19 nt, Artificial Sequence
  Description of Artificial Sequence: Synthetic oligonucleotide
gaaugccugaagcuucucu

SEQ ID NO: 2583646 - RNA, 19 nt, Artificial Sequence
  Description of Artificial Sequence: Synthetic oligonucleotide
gaguaaccgaccaccucug

SEQ ID NO: 2583647 - RNA, 19 nt, Artificial Sequence
  Description of Artificial Sequence: Synthetic oligonucleotide
ccacgauauggauaagcag

SEQ ID NO: 2583648 - RNA, 19 nt, Artificial Sequence
  Description of Artificial Sequence: Synthetic oligonucleotide
cucacguucuacuuugggu

SEQ ID NO: 2583649 - RNA, 19 nt, Artificial Sequence
  Description of Artificial Sequence: Synthetic oligonucleotide
acguucuacuuuggguuuc

SEQ ID NO: 2583650 - RNA, 19 nt, Artificial Sequence
  Description of Artificial Sequence: Synthetic oligonucleotide
guaaccgaccaccucugaa

SEQ ID NO: 2583651 - RNA, 19 nt, Artificial Sequence
  Description of Artificial Sequence: Synthetic oligonucleotide
uccucccauuaacuucagc

SEQ ID NO: 2583652 - RNA, 19 nt, Artificial Sequence
  Description of Artificial Sequence: Synthetic oligonucleotide
auguucaaggacacacuga

SEQ ID NO: 2583653 - RNA, 19 nt, Artificial Sequence
  Description of Artificial Sequence: Synthetic oligonucleotide
uaggcucuugcacuuccuu

SEQ ID NO: 2583654 - RNA, 19 nt, Artificial Sequence
  Description of Artificial Sequence: Synthetic oligonucleotide
ggucacauuccuucaguga

SEQ ID NO: 2583655 - RNA, 19 nt, Artificial Sequence
  Description of Artificial Sequence: Synthetic oligonucleotide
gucauuaccuuguucguuu

SEQ ID NO: 2583656 - RNA, 19 nt, Artificial Sequence
  Description of Artificial Sequence: Synthetic oligonucleotide
cacucacguucuacuuugg

SEQ ID NO: 2583657 - RNA, 19 nt, Artificial Sequence
  Description of Artificial Sequence: Synthetic oligonucleotide
ggccuaagcuggcagggag

SEQ ID NO: 2583658 - RNA, 19 nt, Artificial Sequence
  Description of Artificial Sequence: Synthetic oligonucleotide
gucaaggauccugagucuc

SEQ ID NO: 2583659 - RNA, 19 nt, Artificial Sequence
  Description of Artificial Sequence: Synthetic oligonucleotide
agcccugaggugaaggaca

SEQ ID NO: 2583660 - RNA, 19 nt, Artificial Sequence
  Description of Artificial Sequence: Synthetic oligonucleotide
auagcccuuccucccauua

SEQ ID NO: 2583661 - RNA, 19 nt, Artificial Sequence
  Description of Artificial Sequence: Synthetic oligonucleotide
aguaaccgaccaccucuga

SEQ ID NO: 2583662 - RNA, 19 nt, Artificial Sequence
  Description of Artificial Sequence: Synthetic oligonucleotide
guuucuggacuccccaugu

SEQ ID NO: 2583663 - RNA, 19 nt, Artificial Sequence
  Description of Artificial Sequence: Synthetic oligonucleotide
cccugguacagaguaaccg

SEQ ID NO: 2583664 - RNA, 19 nt, Artificial Sequence
  Description of Artificial Sequence: Synthetic oligonucleotide
caaggauccugagucucug

SEQ ID NO: 2583665 - RNA, 19 nt, Artificial Sequence
  Description of Artificial Sequence: Synthetic oligonucleotide
acagaguaaccgaccaccu

SEQ ID NO: 2583666 - RNA, 19 nt, Artificial Sequence
  Description of Artificial Sequence: Synthetic oligonucleotide
agucauuaccuuguucguu

SEQ ID NO: 2583667 - RNA, 19 nt, Artificial Sequence
  Description of Artificial Sequence: Synthetic oligonucleotide
uagcccuuccucccauuaa

SEQ ID NO: 2583668 - RNA, 19 nt, Artificial Sequence
  Description of Artificial Sequence: Synthetic oligonucleotide
cagaguaaccgaccaccuc

SEQ ID NO: 2583669 - RNA, 19 nt, Artificial Sequence
  Description of Artificial Sequence: Synthetic oligonucleotide
cuucagcagacugaaagua

SEQ ID NO: 2583670 - RNA, 19 nt, Artificial Sequence
  Description of Artificial Sequence: Synthetic oligonucleotide
agcggcaaggggagggugg

SEQ ID NO: 2583671 - RNA, 19 nt, Artificial Sequence
  Description of Artificial Sequence: Synthetic oligonucleotide
gagucauuaccuuguucgu

SEQ ID NO: 2583672 - RNA, 19 nt, Artificial Sequence
  Description of Artificial Sequence: Synthetic oligonucleotide
aaguagcggcaaggggagg

SEQ ID NO: 2583673 - RNA, 19 nt, Artificial Sequence
  Description of Artificial Sequence: Synthetic oligonucleotide
guuggcuuaugucucuggu

SEQ ID NO: 2583674 - RNA, 19 nt, Artificial Sequence
  Description of Artificial Sequence: Synthetic oligonucleotide
uuucuggacuccccauguu

SEQ ID NO: 2583675 - RNA, 19 nt, Artificial Sequence
  Description of Artificial Sequence: Synthetic oligonucleotide
gagucucugauuggcugac

SEQ ID NO: 2583676 - RNA, 19 nt, Artificial Sequence
  Description of Artificial Sequence: Synthetic oligonucleotide
aagacguguccuggugcug

SEQ ID NO: 2583677 - RNA, 19 nt, Artificial Sequence
  Description of Artificial Sequence: Synthetic oligonucleotide
uuguucguuucgcccuggu

SEQ ID NO: 2583678 - RNA, 19 nt, Artificial Sequence
  Description of Artificial Sequence: Synthetic oligonucleotide
auagaccugguugccuucu

SEQ ID NO: 2583679 - RNA, 19 nt, Artificial Sequence
  Description of Artificial Sequence: Synthetic oligonucleotide
agacugaaaguagcggcaa

SEQ ID NO: 2583680 - RNA, 19 nt, Artificial Sequence
  Description of Artificial Sequence: Synthetic oligonucleotide
cauuaacuucagccaacca

SEQ ID NO: 2583681 - RNA, 19 nt, Artificial Sequence
  Description of Artificial Sequence: Synthetic oligonucleotide
uuaugucucuggugccauc

SEQ ID NO: 2583682 - RNA, 19 nt, Artificial Sequence
  Description of Artificial Sequence: Synthetic oligonucleotide
ccauuaacuucagccaacc

SEQ ID NO: 2583683 - RNA, 19 nt, Artificial Sequence
  Description of Artificial Sequence: Synthetic oligonucleotide
aggcucuugcacuuccuuu

SEQ ID NO: 2583684 - RNA, 19 nt, Artificial Sequence
  Description of Artificial Sequence: Synthetic oligonucleotide
caccucugaaugccugaag

SEQ ID NO: 2583685 - RNA, 19 nt, Artificial Sequence
  Description of Artificial Sequence: Synthetic oligonucleotide
auugccugugacaucuuua

SEQ ID NO: 2583686 - RNA, 19 nt, Artificial Sequence
  Description of Artificial Sequence: Synthetic oligonucleotide
cagcagugggcgcuuggag

SEQ ID NO: 2583687 - RNA, 19 nt, Artificial Sequence
  Description of Artificial Sequence: Synthetic oligonucleotide
cuucggggaaagcccugag

SEQ ID NO: 2583688 - RNA, 19 nt, Artificial Sequence
  Description of Artificial Sequence: Synthetic oligonucleotide
uuucgcccugguacagagu

SEQ ID NO: 2583689 - RNA, 19 nt, Artificial Sequence
  Description of Artificial Sequence: Synthetic oligonucleotide
ucguuucgcccugguacag

SEQ ID NO: 2583690 - RNA, 19 nt, Artificial Sequence
  Description of Artificial Sequence: Synthetic oligonucleotide
gccugugcucagcaguggg

SEQ ID NO: 2583691 - RNA, 19 nt, Artificial Sequence
  Description of Artificial Sequence: Synthetic oligonucleotide
uggcucagguguacucagu

SEQ ID NO: 2583692 - RNA, 19 nt, Artificial Sequence
  Description of Artificial Sequence: Synthetic oligonucleotide
cuuguucguuucgcccugg

SEQ ID NO: 2583693 - RNA, 19 nt, Artificial Sequence
  Description of Artificial Sequence: Synthetic oligonucleotide
ggcucagguguacucaguc

SEQ ID NO: 2583694 - RNA, 19 nt, Artificial Sequence
  Description of Artificial Sequence: Synthetic oligonucleotide
gagcccuucagcagacuga

SEQ ID NO: 2583695 - RNA, 19 nt, Artificial Sequence
  Description of Artificial Sequence: Synthetic oligonucleotide
cuuccuuuuauggagucau

SEQ ID NO: 2583696 - RNA, 19 nt, Artificial Sequence
  Description of Artificial Sequence: Synthetic oligonucleotide
cccauuaacuucagccaac

SEQ ID NO: 2583697 - RNA, 19 nt, Artificial Sequence
  Description of Artificial Sequence: Synthetic oligonucleotide
ggcuuaugucucuggugcc

SEQ ID NO: 2583698 - RNA, 19 nt, Artificial Sequence
  Description of Artificial Sequence: Synthetic oligonucleotide
acauagcccuuccucccau

SEQ ID NO: 2583699 - RNA, 19 nt, Artificial Sequence
  Description of Artificial Sequence: Synthetic oligonucleotide
ucucaccgcucccgagccc

SEQ ID NO: 2583700 - RNA, 19 nt, Artificial Sequence
  Description of Artificial Sequence: Synthetic oligonucleotide
uccccuggccuaagcuggc

SEQ ID NO: 2583701 - RNA, 19 nt, Artificial Sequence
  Description of Artificial Sequence: Synthetic oligonucleotide
ugccaucugcagagucccc

SEQ ID NO: 2583702 - RNA, 19 nt, Artificial Sequence
  Description of Artificial Sequence: Synthetic oligonucleotide
cugucucaccgcucccgag

SEQ ID NO: 2583703 - RNA, 19 nt, Artificial Sequence
  Description of Artificial Sequence: Synthetic oligonucleotide
cacucuguauugccuguga

SEQ ID NO: 2583704 - RNA, 19 nt, Artificial Sequence
  Description of Artificial Sequence: Synthetic oligonucleotide
ugauaggcucuugcacuuc

SEQ ID NO: 2583705 - RNA, 19 nt, Artificial Sequence
  Description of Artificial Sequence: Synthetic oligonucleotide
auggagucauuaccuuguu

SEQ ID NO: 2583706 - RNA, 19 nt, Artificial Sequence
  Description of Artificial Sequence: Synthetic oligonucleotide
ggugcugcuucggggaaag

SEQ ID NO: 2583707 - RNA, 19 nt, Artificial Sequence
  Description of Artificial Sequence: Synthetic oligonucleotide
aagcaccuggaagguccag

SEQ ID NO: 2583708 - RNA, 19 nt, Artificial Sequence
  Description of Artificial Sequence: Synthetic oligonucleotide
ccuugaagguguagacggc

SEQ ID NO: 2583709 - RNA, 19 nt, Artificial Sequence
  Description of Artificial Sequence: Synthetic oligonucleotide
cuacagucugauaggcucu

SEQ ID NO: 2583710 - RNA, 19 nt, Artificial Sequence
  Description of Artificial Sequence: Synthetic oligonucleotide
cucagucuuccggauauaa

SEQ ID NO: 2583711 - RNA, 19 nt, Artificial Sequence
  Description of Artificial Sequence: Synthetic oligonucleotide
cucagguguacucagucuu

SEQ ID NO: 2583712 - RNA, 19 nt, Artificial Sequence
  Description of Artificial Sequence: Synthetic oligonucleotide
gagaguuccuuggucacau

SEQ ID NO: 2583713 - RNA, 19 nt, Artificial Sequence
  Description of Artificial Sequence: Synthetic oligonucleotide
ccugguugccuucugucuc

SEQ ID NO: 2583714 - RNA, 19 nt, Artificial Sequence
  Description of Artificial Sequence: Synthetic oligonucleotide
gguuucgugccuugaaggu

SEQ ID NO: 2583715 - RNA, 19 nt, Artificial Sequence
  Description of Artificial Sequence: Synthetic oligonucleotide
ccgaccaccucugaaugcc

SEQ ID NO: 2583716 - RNA, 19 nt, Artificial Sequence
  Description of Artificial Sequence: Synthetic oligonucleotide
guucaaggacacacugaga

SEQ ID NO: 2583717 - RNA, 19 nt, Artificial Sequence
  Description of Artificial Sequence: Synthetic oligonucleotide
uggaagggacauagcccuu

SEQ ID NO: 2583718 - RNA, 19 nt, Artificial Sequence
  Description of Artificial Sequence: Synthetic oligonucleotide
ucgcccugguacagaguaa

SEQ ID NO: 2583719 - RNA, 19 nt, Artificial Sequence
  Description of Artificial Sequence: Synthetic oligonucleotide
ugacuacacucacguucua

SEQ ID NO: 2583720 - RNA, 19 nt, Artificial Sequence
  Description of Artificial Sequence: Synthetic oligonucleotide
guacucagucuuccggaua

SEQ ID NO: 2583721 - RNA, 19 nt, Artificial Sequence
  Description of Artificial Sequence: Synthetic oligonucleotide
ccaccagagcccuucagca

SEQ ID NO: 2583722 - RNA, 19 nt, Artificial Sequence
  Description of Artificial Sequence: Synthetic oligonucleotide
uggccuaagcuggcaggga

SEQ ID NO: 2583723 - RNA, 19 nt, Artificial Sequence
  Description of Artificial Sequence: Synthetic oligonucleotide
ugaaugccugaagcuucuc

SEQ ID NO: 2583724 - RNA, 19 nt, Artificial Sequence
  Description of Artificial Sequence: Synthetic oligonucleotide
acggcaaaauagaccuggu

SEQ ID NO: 2583725 - RNA, 19 nt, Artificial Sequence
  Description of Artificial Sequence: Synthetic oligonucleotide
cugauuggcugacuacacu

SEQ ID NO: 2583726 - RNA, 19 nt, Artificial Sequence
  Description of Artificial Sequence: Synthetic oligonucleotide
ggaagggacauagcccuuc

SEQ ID NO: 2583727 - RNA, 19 nt, Artificial Sequence
  Description of Artificial Sequence: Synthetic oligonucleotide
aggacacagucauguuguu

SEQ ID NO: 2583728 - RNA, 19 nt, Artificial Sequence
  Description of Artificial Sequence: Synthetic oligonucleotide
gcuuaugucucuggugcca

SEQ ID NO: 2583729 - RNA, 19 nt, Artificial Sequence
  Description of Artificial Sequence: Synthetic oligonucleotide
agggagagucugggucugg

SEQ ID NO: 2583730 - RNA, 19 nt, Artificial Sequence
  Description of Artificial Sequence: Synthetic oligonucleotide
ggugaaggacacagucaug

SEQ ID NO: 2583731 - RNA, 19 nt, Artificial Sequence
  Description of Artificial Sequence: Synthetic oligonucleotide
ugguggggccugugcucag

SEQ ID NO: 2583732 - RNA, 19 nt, Artificial Sequence
  Description of Artificial Sequence: Synthetic oligonucleotide
gacacacugagaguuccuu

SEQ ID NO: 2583733 - RNA, 19 nt, Artificial Sequence
  Description of Artificial Sequence: Synthetic oligonucleotide
cuacacucacguucuacuu

SEQ ID NO: 2583734 - RNA, 19 nt, Artificial Sequence
  Description of Artificial Sequence: Synthetic oligonucleotide
cugggucuggaaagcaccu

SEQ ID NO: 2583735 - RNA, 19 nt, Artificial Sequence
  Description of Artificial Sequence: Synthetic oligonucleotide
agccaaccaccacucugua

SEQ ID NO: 2583736 - RNA, 19 nt, Artificial Sequence
  Description of Artificial Sequence: Synthetic oligonucleotide
cugauaggcucuugcacuu

SEQ ID NO: 2583737 - RNA, 19 nt, Artificial Sequence
  Description of Artificial Sequence: Synthetic oligonucleotide
agucucugauuggcugacu

SEQ ID NO: 2583738 - RNA, 19 nt, Artificial Sequence
  Description of Artificial Sequence: Synthetic oligonucleotide
gcagggagagucugggucu

SEQ ID NO: 2583739 - RNA, 19 nt, Artificial Sequence
  Description of Artificial Sequence: Synthetic oligonucleotide
ccuuguucguuucgcccug

SEQ ID NO: 2583740 - RNA, 19 nt, Artificial Sequence
  Description of Artificial Sequence: Synthetic oligonucleotide
ggggcaaccuggcucaggu

SEQ ID NO: 2583741 - RNA, 19 nt, Artificial Sequence
  Description of Artificial Sequence: Synthetic oligonucleotide
agcccaccagagcccuuca

SEQ ID NO: 2583742 - RNA, 19 nt, Artificial Sequence
  Description of Artificial Sequence: Synthetic oligonucleotide
ggaaagcaccuggaagguc

SEQ ID NO: 2583743 - RNA, 19 nt, Artificial Sequence
  Description of Artificial Sequence: Synthetic oligonucleotide
gcggcaaggggaggguggg

SEQ ID NO: 2583744 - RNA, 19 nt, Artificial Sequence
  Description of Artificial Sequence: Synthetic oligonucleotide
cagucauguuguuggaguu

SEQ ID NO: 2583745 - RNA, 19 nt, Artificial Sequence
  Description of Artificial Sequence: Synthetic oligonucleotide
cugcagaguccccuggccu

SEQ ID NO: 2583746 - RNA, 19 nt, Artificial Sequence
  Description of Artificial Sequence: Synthetic oligonucleotide
cugcuucggggaaagcccu

SEQ ID NO: 2583747 - RNA, 19 nt, Artificial Sequence
  Description of Artificial Sequence: Synthetic oligonucleotide
gcgcuuggagcccaccaga

SEQ ID NO: 2583748 - RNA, 19 nt, Artificial Sequence
  Description of Artificial Sequence: Synthetic oligonucleotide
ugggcgcuuggagcccacc

SEQ ID NO: 2583749 - RNA, 19 nt, Artificial Sequence
  Description of Artificial Sequence: Synthetic oligonucleotide
cacguucuacuuuggguuu

SEQ ID NO: 2583750 - RNA, 19 nt, Artificial Sequence
  Description of Artificial Sequence: Synthetic oligonucleotide
gacguguccuggugcugcu

SEQ ID NO: 2583751 - RNA, 19 nt, Artificial Sequence
  Description of Artificial Sequence: Synthetic oligonucleotide
ucaccgcucccgagcccuc

SEQ ID NO: 2583752 - RNA, 19 nt, Artificial Sequence
  Description of Artificial Sequence: Synthetic oligonucleotide
gggcgcuuggagcccacca

SEQ ID NO: 2583753 - RNA, 19 nt, Artificial Sequence
  Description of Artificial Sequence: Synthetic oligonucleotide
ugcucagcagugggcgcuu

SEQ ID NO: 2583754 - RNA, 19 nt, Artificial Sequence
  Description of Artificial Sequence: Synthetic oligonucleotide
gcucuugcacuuccuuuua

SEQ ID NO: 2583755 - RNA, 19 nt, Artificial Sequence
  Description of Artificial Sequence: Synthetic oligonucleotide
cucaccgcucccgagcccu

SEQ ID NO: 2583756 - RNA, 19 nt, Artificial Sequence
  Description of Artificial Sequence: Synthetic oligonucleotide
gggagagucugggucugga

SEQ ID NO: 2583757 - RNA, 19 nt, Artificial Sequence
  Description of Artificial Sequence: Synthetic oligonucleotide
gcccugguacagaguaacc

SEQ ID NO: 2583758 - RNA, 19 nt, Artificial Sequence
  Description of Artificial Sequence: Synthetic oligonucleotide
acucagucuuccggauaua

SEQ ID NO: 2583759 - RNA, 19 nt, Artificial Sequence
  Description of Artificial Sequence: Synthetic oligonucleotide
ccauguucaaggacacacu

SEQ ID NO: 2583760 - RNA, 19 nt, Artificial Sequence
  Description of Artificial Sequence: Synthetic oligonucleotide
cggggaaagcccugaggug

SEQ ID NO: 2583761 - RNA, 19 nt, Artificial Sequence
  Description of Artificial Sequence: Synthetic oligonucleotide
gguggggccugugcucagc

SEQ ID NO: 2583762 - RNA, 19 nt, Artificial Sequence
  Description of Artificial Sequence: Synthetic oligonucleotide
gugcucagcagugggcgcu

SEQ ID NO: 2583763 - RNA, 19 nt, Artificial Sequence
  Description of Artificial Sequence: Synthetic oligonucleotide
cucuugcacuuccuuuuau

SEQ ID NO: 2583764 - RNA, 19 nt, Artificial Sequence
  Description of Artificial Sequence: Synthetic oligonucleotide
gcacuccacgauauggaua

SEQ ID NO: 2583765 - RNA, 19 nt, Artificial Sequence
  Description of Artificial Sequence: Synthetic oligonucleotide
guagcggcaaggggagggu

SEQ ID NO: 2583766 - RNA, 19 nt, Artificial Sequence
  Description of Artificial Sequence: Synthetic oligonucleotide
cggauauaauuggaaggga

SEQ ID NO: 2583767 - RNA, 19 nt, Artificial Sequence
  Description of Artificial Sequence: Synthetic oligonucleotide
ccuggaagguccaguuucu

SEQ ID NO: 2583768 - RNA, 19 nt, Artificial Sequence
  Description of Artificial Sequence: Synthetic oligonucleotide
guucuacuuuggguuucgu

SEQ ID NO: 2583769 - RNA, 19 nt, Artificial Sequence
  Description of Artificial Sequence: Synthetic oligonucleotide
acguguccuggugcugcuu

SEQ ID NO: 2583770 - RNA, 19 nt, Artificial Sequence
  Description of Artificial Sequence: Synthetic oligonucleotide
cuaagcuggcagggagagu

SEQ ID NO: 2583771 - RNA, 19 nt, Artificial Sequence
  Description of Artificial Sequence: Synthetic oligonucleotide
caccuggaagguccaguuu

SEQ ID NO: 2583772 - RNA, 19 nt, Artificial Sequence
  Description of Artificial Sequence: Synthetic oligonucleotide
ggacacacugagaguuccu

SEQ ID NO: 2583773 - RNA, 19 nt, Artificial Sequence
  Description of Artificial Sequence: Synthetic oligonucleotide
gccaaccaccacucuguau

SEQ ID NO: 2583774 - RNA, 19 nt, Artificial Sequence
  Description of Artificial Sequence: Synthetic oligonucleotide
cccgagcccucuguuucug

SEQ ID NO: 2583775 - RNA, 19 nt, Artificial Sequence
  Description of Artificial Sequence: Synthetic oligonucleotide
ccaccucugaaugccugaa

SEQ ID NO: 2583776 - RNA, 19 nt, Artificial Sequence
  Description of Artificial Sequence: Synthetic oligonucleotide
gcucagcagugggcgcuug

SEQ ID NO: 2583777 - RNA, 19 nt, Artificial Sequence
  Description of Artificial Sequence: Synthetic oligonucleotide
gugggcgcuuggagcccac

SEQ ID NO: 2583778 - RNA, 19 nt, Artificial Sequence
  Description of Artificial Sequence: Synthetic oligonucleotide
ggcugacuacacucacguu

SEQ ID NO: 2583779 - RNA, 19 nt, Artificial Sequence
  Description of Artificial Sequence: Synthetic oligonucleotide
cguuucgcccugguacaga

SEQ ID NO: 2583780 - RNA, 19 nt, Artificial Sequence
  Description of Artificial Sequence: Synthetic oligonucleotide
cagagcccuucagcagacu

SEQ ID NO: 2583781 - RNA, 19 nt, Artificial Sequence
  Description of Artificial Sequence: Synthetic oligonucleotide
cccugaggugaaggacaca

SEQ ID NO: 2583782 - RNA, 19 nt, Artificial Sequence
  Description of Artificial Sequence: Synthetic oligonucleotide
gcccuucagcagacugaaa

SEQ ID NO: 2583783 - RNA, 19 nt, Artificial Sequence
  Description of Artificial Sequence: Synthetic oligonucleotide
ccgagcccucuguuucugu

SEQ ID NO: 2583784 - RNA, 19 nt, Artificial Sequence
  Description of Artificial Sequence: Synthetic oligonucleotide
ccccuggccuaagcuggca

SEQ ID NO: 2583785 - RNA, 19 nt, Artificial Sequence
  Description of Artificial Sequence: Synthetic oligonucleotide
ccgcucccgagcccucugu

SEQ ID NO: 2583786 - RNA, 19 nt, Artificial Sequence
  Description of Artificial Sequence: Synthetic oligonucleotide
ggagcccaccagagcccuu

SEQ ID NO: 2583787 - RNA, 19 nt, Artificial Sequence
  Description of Artificial Sequence: Synthetic oligonucleotide
cgcucccgagcccucuguu

SEQ ID NO: 2583788 - RNA, 19 nt, Artificial Sequence
  Description of Artificial Sequence: Synthetic oligonucleotide
uucauaugcauauugauug

SEQ ID NO: 2583789 - RNA, 19 nt, Artificial Sequence
  Description of Artificial Sequence: Synthetic oligonucleotide
ugucuguacauccacaugc

SEQ ID NO: 2583790 - RNA, 19 nt, Artificial Sequence
  Description of Artificial Sequence: Synthetic oligonucleotide
ucuccuauuaguaucugag

SEQ ID NO: 2583791 - RNA, 19 nt, Artificial Sequence
  Description of Artificial Sequence: Synthetic oligonucleotide
ucauagauucgucaacugg

SEQ ID NO: 2583792 - RNA, 19 nt, Artificial Sequence
  Description of Artificial Sequence: Synthetic oligonucleotide
ucaacuucaacuauucggu

SEQ ID NO: 2583793 - RNA, 19 nt, Artificial Sequence
  Description of Artificial Sequence: Synthetic oligonucleotide
auuauguuuccauagguca

SEQ ID NO: 2583794 - RNA, 19 nt, Artificial Sequence
  Description of Artificial Sequence: Synthetic oligonucleotide
  modified_base (5)..(5): a, c, u, g, unknown or other
auugnggucugucaucgcc

SEQ ID NO: 2583795 - RNA, 19 nt, Artificial Sequence
  Description of Artificial Sequence: Synthetic oligonucleotide
agauucgucaacuggcugc

SEQ ID NO: 2583796 - RNA, 19 nt, Artificial Sequence
  Description of Artificial Sequence: Synthetic oligonucleotide
uccuauuaguaucugagug

SEQ ID NO: 2583797 - RNA, 19 nt, Artificial Sequence
  Description of Artificial Sequence: Synthetic oligonucleotide
aaggucaaagucaaagagc

SEQ ID NO: 2583798 - RNA, 19 nt, Artificial Sequence
  Description of Artificial Sequence: Synthetic oligonucleotide
cauagauucgucaacuggc

SEQ ID NO: 2583799 - RNA, 19 nt, Artificial Sequence
  Description of Artificial Sequence: Synthetic oligonucleotide
uacauuauguuuccauagg

SEQ ID NO: 2583800 - RNA, 19 nt, Artificial Sequence
  Description of Artificial Sequence: Synthetic oligonucleotide
uuugacuucaaggucaaag

SEQ ID NO: 2583801 - RNA, 19 nt, Artificial Sequence
  Description of Artificial Sequence: Synthetic oligonucleotide
caagguauaauucugucug

SEQ ID NO: 2583802 - RNA, 19 nt, Artificial Sequence
  Description of Artificial Sequence: Synthetic oligonucleotide
uauucggucagcaauuucu

SEQ ID NO: 2583803 - RNA, 19 nt, Artificial Sequence
  Description of Artificial Sequence: Synthetic oligonucleotide
ugcguauuucuucauaugc

SEQ ID NO: 2583804 - RNA, 19 nt, Artificial Sequence
  Description of Artificial Sequence: Synthetic oligonucleotide
acaugguuugacuucaagg

SEQ ID NO: 2583805 - RNA, 19 nt, Artificial Sequence
  Description of Artificial Sequence: Synthetic oligonucleotide
uuggcaggaaugaagagug

SEQ ID NO: 2583806 - RNA, 19 nt, Artificial Sequence
  Description of Artificial Sequence: Synthetic oligonucleotide
auacauuauguuuccauag

SEQ ID NO: 2583807 - RNA, 19 nt, Artificial Sequence
  Description of Artificial Sequence: Synthetic oligonucleotide
ucaacuggcugcaacaggc

SEQ ID NO: 2583808 - RNA, 19 nt, Artificial Sequence
  Description of Artificial Sequence: Synthetic oligonucleotide
uguucaaucgucuucccca

SEQ ID NO: 2583809 - RNA, 19 nt, Artificial Sequence
  Description of Artificial Sequence: Synthetic oligonucleotide
uuucuucauaugcauauug

SEQ ID NO: 2583810 - RNA, 19 nt, Artificial Sequence
  Description of Artificial Sequence: Synthetic oligonucleotide
aacauugcguauuucuuca

SEQ ID NO: 2583811 - RNA, 19 nt, Artificial Sequence
  Description of Artificial Sequence: Synthetic oligonucleotide
uucaacauugcguauuucu

SEQ ID NO: 2583812 - RNA, 19 nt, Artificial Sequence
  Description of Artificial Sequence: Synthetic oligonucleotide
aaugcaucuguucuggcau

SEQ ID NO: 2583813 - RNA, 19 nt, Artificial Sequence
  Description of Artificial Sequence: Synthetic oligonucleotide
aacuucaacuauucgguca

SEQ ID NO: 2583814 - RNA, 19 nt, Artificial Sequence
  Description of Artificial Sequence: Synthetic oligonucleotide
agguguaggugccagacgg

SEQ ID NO: 2583815 - RNA, 19 nt, Artificial Sequence
  Description of Artificial Sequence: Synthetic oligonucleotide
ugguuugacuucaagguca

SEQ ID NO: 2583816 - RNA, 19 nt, Artificial Sequence
  Description of Artificial Sequence: Synthetic oligonucleotide
uucuucaagguauaauucu

SEQ ID NO: 2583817 - RNA, 19 nt, Artificial Sequence
  Description of Artificial Sequence: Synthetic oligonucleotide
aaaugcaucuguucuggca

SEQ ID NO: 2583818 - RNA, 19 nt, Artificial Sequence
  Description of Artificial Sequence: Synthetic oligonucleotide
ucauaugcauauugauugg

SEQ ID NO: 2583819 - RNA, 19 nt, Artificial Sequence
  Description of Artificial Sequence: Synthetic oligonucleotide
auagguguugccucggauc

SEQ ID NO: 2583820 - RNA, 19 nt, Artificial Sequence
  Description of Artificial Sequence: Synthetic oligonucleotide
aaagucaaagagcucuccu

SEQ ID NO: 2583821 - RNA, 19 nt, Artificial Sequence
  Description of Artificial Sequence: Synthetic oligonucleotide
  modified_base (4)..(4): a, c, u, g, unknown or other
uugnggucugucaucgccg

SEQ ID NO: 2583822 - RNA, 19 nt, Artificial Sequence
  Description of Artificial Sequence: Synthetic oligonucleotide
cugucauacauuauguuuc

SEQ ID NO: 2583823 - RNA, 19 nt, Artificial Sequence
  Description of Artificial Sequence: Synthetic oligonucleotide
agugcauagguguugccuc

SEQ ID NO: 2583824 - RNA, 19 nt, Artificial Sequence
  Description of Artificial Sequence: Synthetic oligonucleotide
augcauauugauuggcccg

SEQ ID NO: 2583825 - RNA, 19 nt, Artificial Sequence
  Description of Artificial Sequence: Synthetic oligonucleotide
cuuucugcccuccacaggc

SEQ ID NO: 2583826 - RNA, 19 nt, Artificial Sequence
  Description of Artificial Sequence: Synthetic oligonucleotide
uauugauuggcccgcaggu

SEQ ID NO: 2583827 - RNA, 19 nt, Artificial Sequence
  Description of Artificial Sequence: Synthetic oligonucleotide
auaugcauauugauuggcc

SEQ ID NO: 2583828 - RNA, 19 nt, Artificial Sequence
  Description of Artificial Sequence: Synthetic oligonucleotide
acuuguaacaugguuugac

SEQ ID NO: 2583829 - RNA, 19 nt, Artificial Sequence
  Description of Artificial Sequence: Synthetic oligonucleotide
agaagggccuguucaaucg

SEQ ID NO: 2583830 - RNA, 19 nt, Artificial Sequence
  Description of Artificial Sequence: Synthetic oligonucleotide
uccaucacuuccagaaggg

SEQ ID NO: 2583831 - RNA, 19 nt, Artificial Sequence
  Description of Artificial Sequence: Synthetic oligonucleotide
aaagagcucuccuauuagu

SEQ ID NO: 2583832 - RNA, 19 nt, Artificial Sequence
  Description of Artificial Sequence: Synthetic oligonucleotide
gaaugaagagugguguugg

SEQ ID NO: 2583833 - RNA, 19 nt, Artificial Sequence
  Description of Artificial Sequence: Synthetic oligonucleotide
uguuucuuacguccguucc

SEQ ID NO: 2583834 - RNA, 19 nt, Artificial Sequence
  Description of Artificial Sequence: Synthetic oligonucleotide
uguaacaugguuugacuuc

SEQ ID NO: 2583835 - RNA, 19 nt, Artificial Sequence
  Description of Artificial Sequence: Synthetic oligonucleotide
ucaagguauaauucugucu

SEQ ID NO: 2583836 - RNA, 19 nt, Artificial Sequence
  Description of Artificial Sequence: Synthetic oligonucleotide
uugacuucaaggucaaagu

SEQ ID NO: 2583837 - RNA, 19 nt, Artificial Sequence
  Description of Artificial Sequence: Synthetic oligonucleotide
accagaacuuguaacaugg

SEQ ID NO: 2583838 - RNA, 19 nt, Artificial Sequence
  Description of Artificial Sequence: Synthetic oligonucleotide
auuaguaucugaguggcca

SEQ ID NO: 2583839 - RNA, 19 nt, Artificial Sequence
  Description of Artificial Sequence: Synthetic oligonucleotide
cuauuaguaucugaguggc

SEQ ID NO: 2583840 - RNA, 19 nt, Artificial Sequence
  Description of Artificial Sequence: Synthetic oligonucleotide
aacaugguuugacuucaag

SEQ ID NO: 2583841 - RNA, 19 nt, Artificial Sequence
  Description of Artificial Sequence: Synthetic oligonucleotide
uugauuggcccgcagguug

SEQ ID NO: 2583842 - RNA, 19 nt, Artificial Sequence
  Description of Artificial Sequence: Synthetic oligonucleotide
augguuugacuucaagguc

SEQ ID NO: 2583843 - RNA, 19 nt, Artificial Sequence
  Description of Artificial Sequence: Synthetic oligonucleotide
uguacauccacaugcuuuc

SEQ ID NO: 2583844 - RNA, 19 nt, Artificial Sequence
  Description of Artificial Sequence: Synthetic oligonucleotide
auccacaugcuuucugccc

SEQ ID NO: 2583845 - RNA, 19 nt, Artificial Sequence
  Description of Artificial Sequence: Synthetic oligonucleotide
ucggucagcaauuucuuca

SEQ ID NO: 2583846 - RNA, 19 nt, Artificial Sequence
  Description of Artificial Sequence: Synthetic oligonucleotide
cagaggaucaggcuguccg

SEQ ID NO: 2583847 - RNA, 19 nt, Artificial Sequence
  Description of Artificial Sequence: Synthetic oligonucleotide
auucugucuguacauccac

SEQ ID NO: 2583848 - RNA, 19 nt, Artificial Sequence
  Description of Artificial Sequence: Synthetic oligonucleotide
caucacuuccagaagggcc

SEQ ID NO: 2583849 - RNA, 19 nt, Artificial Sequence
  Description of Artificial Sequence: Synthetic oligonucleotide
ugucaacuucaacuauucg

SEQ ID NO: 2583850 - RNA, 19 nt, Artificial Sequence
  Description of Artificial Sequence: Synthetic oligonucleotide
acauuauguuuccauaggu

SEQ ID NO: 2583851 - RNA, 19 nt, Artificial Sequence
  Description of Artificial Sequence: Synthetic oligonucleotide
guauaauucugucuguaca

SEQ ID NO: 2583852 - RNA, 19 nt, Artificial Sequence
  Description of Artificial Sequence: Synthetic oligonucleotide
ucaaucgucuuccccacca

SEQ ID NO: 2583853 - RNA, 19 nt, Artificial Sequence
  Description of Artificial Sequence: Synthetic oligonucleotide
cauuauguuuccauagguc

SEQ ID NO: 2583854 - RNA, 19 nt, Artificial Sequence
  Description of Artificial Sequence: Synthetic oligonucleotide
auugcguauuucuucauau

SEQ ID NO: 2583855 - RNA, 19 nt, Artificial Sequence
  Description of Artificial Sequence: Synthetic oligonucleotide
uagguguugccucggauca

SEQ ID NO: 2583856 - RNA, 19 nt, Artificial Sequence
  Description of Artificial Sequence: Synthetic oligonucleotide
ucuguucuggcauuccaug

SEQ ID NO: 2583857 - RNA, 19 nt, Artificial Sequence
  Description of Artificial Sequence: Synthetic oligonucleotide
ucgcugaagcuccagagga

SEQ ID NO: 2583858 - RNA, 19 nt, Artificial Sequence
  Description of Artificial Sequence: Synthetic oligonucleotide
cuggcaagagacuuccucc

SEQ ID NO: 2583859 - RNA, 19 nt, Artificial Sequence
  Description of Artificial Sequence: Synthetic oligonucleotide
acaucuuugccaguuuugg

SEQ ID NO: 2583860 - RNA, 19 nt, Artificial Sequence
  Description of Artificial Sequence: Synthetic oligonucleotide
ugacuucaaggucaaaguc

SEQ ID NO: 2583861 - RNA, 19 nt, Artificial Sequence
  Description of Artificial Sequence: Synthetic oligonucleotide
ugaguggccacaucuuugc

SEQ ID NO: 2583862 - RNA, 19 nt, Artificial Sequence
  Description of Artificial Sequence: Synthetic oligonucleotide
auaggucauagauucguca

SEQ ID NO: 2583863 - RNA, 19 nt, Artificial Sequence
  Description of Artificial Sequence: Synthetic oligonucleotide
ucguuuccuggcaagagac

SEQ ID NO: 2583864 - RNA, 19 nt, Artificial Sequence
  Description of Artificial Sequence: Synthetic oligonucleotide
aggucauagauucgucaac

SEQ ID NO: 2583865 - RNA, 19 nt, Artificial Sequence
  Description of Artificial Sequence: Synthetic oligonucleotide
ugucgcugaagcuccagag

SEQ ID NO: 2583866 - RNA, 19 nt, Artificial Sequence
  Description of Artificial Sequence: Synthetic oligonucleotide
uuauguuuccauaggucau

SEQ ID NO: 2583867 - RNA, 19 nt, Artificial Sequence
  Description of Artificial Sequence: Synthetic oligonucleotide
ccuauuaguaucugagugg

SEQ ID NO: 2583868 - RNA, 19 nt, Artificial Sequence
  Description of Artificial Sequence: Synthetic oligonucleotide
ucacccuucugucauacau

SEQ ID NO: 2583869 - RNA, 19 nt, Artificial Sequence
  Description of Artificial Sequence: Synthetic oligonucleotide
ucaacauugcguauuucuu

SEQ ID NO: 2583870 - RNA, 19 nt, Artificial Sequence
  Description of Artificial Sequence: Synthetic oligonucleotide
aguuuuggcaggaaugaag

SEQ ID NO: 2583871 - RNA, 19 nt, Artificial Sequence
  Description of Artificial Sequence: Synthetic oligonucleotide
gagacuuccuccuggcuug

SEQ ID NO: 2583872 - RNA, 19 nt, Artificial Sequence
  Description of Artificial Sequence: Synthetic oligonucleotide
aagucaaagagcucuccua

SEQ ID NO: 2583873 - RNA, 19 nt, Artificial Sequence
  Description of Artificial Sequence: Synthetic oligonucleotide
uucaagguauaauucuguc

SEQ ID NO: 2583874 - RNA, 19 nt, Artificial Sequence
  Description of Artificial Sequence: Synthetic oligonucleotide
uuuccauaggucauagauu

SEQ ID NO: 2583875 - RNA, 19 nt, Artificial Sequence
  Description of Artificial Sequence: Synthetic oligonucleotide
ugccagacggcccuucggg

SEQ ID NO: 2583876 - RNA, 19 nt, Artificial Sequence
  Description of Artificial Sequence: Synthetic oligonucleotide
uccacaugcuuucugcccu

SEQ ID NO: 2583877 - RNA, 19 nt, Artificial Sequence
  Description of Artificial Sequence: Synthetic oligonucleotide
ucuguccagaaaugcaucu

SEQ ID NO: 2583878 - RNA, 19 nt, Artificial Sequence
  Description of Artificial Sequence: Synthetic oligonucleotide
uaggucauagauucgucaa

SEQ ID NO: 2583879 - RNA, 19 nt, Artificial Sequence
  Description of Artificial Sequence: Synthetic oligonucleotide
gacuucaaggucaaaguca

SEQ ID NO: 2583880 - RNA, 19 nt, Artificial Sequence
  Description of Artificial Sequence: Synthetic oligonucleotide
agaacuuguaacaugguuu

SEQ ID NO: 2583881 - RNA, 19 nt, Artificial Sequence
  Description of Artificial Sequence: Synthetic oligonucleotide
ugauuggcccgcagguugg

SEQ ID NO: 2583882 - RNA, 19 nt, Artificial Sequence
  Description of Artificial Sequence: Synthetic oligonucleotide
aagcuccagaggaucaggc

SEQ ID NO: 2583883 - RNA, 19 nt, Artificial Sequence
  Description of Artificial Sequence: Synthetic oligonucleotide
  modified_base (8)..(8): a, c, u, g, unknown or other
aggauugnggucugucauc

SEQ ID NO: 2583884 - RNA, 19 nt, Artificial Sequence
  Description of Artificial Sequence: Synthetic oligonucleotide
agucaaagagcucuccuau

SEQ ID NO: 2583885 - RNA, 19 nt, Artificial Sequence
  Description of Artificial Sequence: Synthetic oligonucleotide
cagucucugcacuucagcc

SEQ ID NO: 2583886 - RNA, 19 nt, Artificial Sequence
  Description of Artificial Sequence: Synthetic oligonucleotide
ugguggucuguccagaaau

SEQ ID NO: 2583887 - RNA, 19 nt, Artificial Sequence
  Description of Artificial Sequence: Synthetic oligonucleotide
uccauaggucauagauucg

SEQ ID NO: 2583888 - RNA, 19 nt, Artificial Sequence
  Description of Artificial Sequence: Synthetic oligonucleotide
guuuccauaggucauagau

SEQ ID NO: 2583889 - RNA, 19 nt, Artificial Sequence
  Description of Artificial Sequence: Synthetic oligonucleotide
caacauugcguauuucuuc

SEQ ID NO: 2583890 - RNA, 19 nt, Artificial Sequence
  Description of Artificial Sequence: Synthetic oligonucleotide
  modified_base (7)..(7): a, c, u, g, unknown or other
ggauugnggucugucaucg

SEQ ID NO: 2583891 - RNA, 19 nt, Artificial Sequence
  Description of Artificial Sequence: Synthetic oligonucleotide
caugguuugacuucaaggu

SEQ ID NO: 2583892 - RNA, 19 nt, Artificial Sequence
  Description of Artificial Sequence: Synthetic oligonucleotide
uggucuguccagaaaugca

SEQ ID NO: 2583893 - RNA, 19 nt, Artificial Sequence
  Description of Artificial Sequence: Synthetic oligonucleotide
gucucugcacuucagccag

SEQ ID NO: 2583894 - RNA, 19 nt, Artificial Sequence
  Description of Artificial Sequence: Synthetic oligonucleotide
aaugaagagugguguuggu

SEQ ID NO: 2583895 - RNA, 19 nt, Artificial Sequence
  Description of Artificial Sequence: Synthetic oligonucleotide
cauaugcauauugauuggc

SEQ ID NO: 2583896 - RNA, 19 nt, Artificial Sequence
  Description of Artificial Sequence: Synthetic oligonucleotide
uauuaguaucugaguggcc

SEQ ID NO: 2583897 - RNA, 19 nt, Artificial Sequence
  Description of Artificial Sequence: Synthetic oligonucleotide
uuguaacaugguuugacuu

SEQ ID NO: 2583898 - RNA, 19 nt, Artificial Sequence
  Description of Artificial Sequence: Synthetic oligonucleotide
ugcauauugauuggcccgc

SEQ ID NO: 2583899 - RNA, 19 nt, Artificial Sequence
  Description of Artificial Sequence: Synthetic oligonucleotide
agaggaucaggcuguccgg

SEQ ID NO: 2583900 - RNA, 19 nt, Artificial Sequence
  Description of Artificial Sequence: Synthetic oligonucleotide
aaucgucuuccccaccaga

SEQ ID NO: 2583901 - RNA, 19 nt, Artificial Sequence
  Description of Artificial Sequence: Synthetic oligonucleotide
ucgucaacuggcugcaaca

SEQ ID NO: 2583902 - RNA, 19 nt, Artificial Sequence
  Description of Artificial Sequence: Synthetic oligonucleotide
ucaacuauucggucagcaa

SEQ ID NO: 2583903 - RNA, 19 nt, Artificial Sequence
  Description of Artificial Sequence: Synthetic oligonucleotide
uagguguaggugccagacg

SEQ ID NO: 2583904 - RNA, 19 nt, Artificial Sequence
  Description of Artificial Sequence: Synthetic oligonucleotide
uacauccacaugcuuucug

SEQ ID NO: 2583905 - RNA, 19 nt, Artificial Sequence
  Description of Artificial Sequence: Synthetic oligonucleotide
uugcguauuucuucauaug

SEQ ID NO: 2583906 - RNA, 19 nt, Artificial Sequence
  Description of Artificial Sequence: Synthetic oligonucleotide
guccguuccuuucuucucg

SEQ ID NO: 2583907 - RNA, 19 nt, Artificial Sequence
  Description of Artificial Sequence: Synthetic oligonucleotide
guuuuggcaggaaugaaga

SEQ ID NO: 2583908 - RNA, 19 nt, Artificial Sequence
  Description of Artificial Sequence: Synthetic oligonucleotide
uucgucaacuggcugcaac

SEQ ID NO: 2583909 - RNA, 19 nt, Artificial Sequence
  Description of Artificial Sequence: Synthetic oligonucleotide
uuaguaucugaguggccac

SEQ ID NO: 2583910 - RNA, 19 nt, Artificial Sequence
  Description of Artificial Sequence: Synthetic oligonucleotide
uagauucgucaacuggcug

SEQ ID NO: 2583911 - RNA, 19 nt, Artificial Sequence
  Description of Artificial Sequence: Synthetic oligonucleotide
ucagccaguucaacauugc

SEQ ID NO: 2583912 - RNA, 19 nt, Artificial Sequence
  Description of Artificial Sequence: Synthetic oligonucleotide
cugcacuucagccaguuca

SEQ ID NO: 2583913 - RNA, 19 nt, Artificial Sequence
  Description of Artificial Sequence: Synthetic oligonucleotide
caucuuugccaguuuuggc

SEQ ID NO: 2583914 - RNA, 19 nt, Artificial Sequence
  Description of Artificial Sequence: Synthetic oligonucleotide
uucugucuguacauccaca

SEQ ID NO: 2583915 - RNA, 19 nt, Artificial Sequence
  Description of Artificial Sequence: Synthetic oligonucleotide
ugguguagguguaggugcc

SEQ ID NO: 2583916 - RNA, 19 nt, Artificial Sequence
  Description of Artificial Sequence: Synthetic oligonucleotide
agucucugcacuucagcca

SEQ ID NO: 2583917 - RNA, 19 nt, Artificial Sequence
  Description of Artificial Sequence: Synthetic oligonucleotide
uguaggugccagacggccc

SEQ ID NO: 2583918 - RNA, 19 nt, Artificial Sequence
  Description of Artificial Sequence: Synthetic oligonucleotide
agagacuuccuccuggcuu

SEQ ID NO: 2583919 - RNA, 19 nt, Artificial Sequence
  Description of Artificial Sequence: Synthetic oligonucleotide
cauacauuauguuuccaua

SEQ ID NO: 2583920 - RNA, 19 nt, Artificial Sequence
  Description of Artificial Sequence: Synthetic oligonucleotide
gagcucuccuauuaguauc

SEQ ID NO: 2583921 - RNA, 19 nt, Artificial Sequence
  Description of Artificial Sequence: Synthetic oligonucleotide
aggcugucccgguagcggc

SEQ ID NO: 2583922 - RNA, 19 nt, Artificial Sequence
  Description of Artificial Sequence: Synthetic oligonucleotide
cauccacaugcuuucugcc

SEQ ID NO: 2583923 - RNA, 19 nt, Artificial Sequence
  Description of Artificial Sequence: Synthetic oligonucleotide
gucaacuggcugcaacagg

SEQ ID NO: 2583924 - RNA, 19 nt, Artificial Sequence
  Description of Artificial Sequence: Synthetic oligonucleotide
gguauaauucugucuguac

SEQ ID NO: 2583925 - RNA, 19 nt, Artificial Sequence
  Description of Artificial Sequence: Synthetic oligonucleotide
uguccgaggccugagcugc

SEQ ID NO: 2583926 - RNA, 19 nt, Artificial Sequence
  Description of Artificial Sequence: Synthetic oligonucleotide
uagugcauagguguugccu

SEQ ID NO: 2583927 - RNA, 19 nt, Artificial Sequence
  Description of Artificial Sequence: Synthetic oligonucleotide
gucauagauucgucaacug

SEQ ID NO: 2583928 - RNA, 19 nt, Artificial Sequence
  Description of Artificial Sequence: Synthetic oligonucleotide
cacaucuuugccaguuuug

SEQ ID NO: 2583929 - RNA, 19 nt, Artificial Sequence
  Description of Artificial Sequence: Synthetic oligonucleotide
ugagcugcgccugggcucg

SEQ ID NO: 2583930 - RNA, 19 nt, Artificial Sequence
  Description of Artificial Sequence: Synthetic oligonucleotide
ucuuacguccguuccuuuc

SEQ ID NO: 2583931 - RNA, 19 nt, Artificial Sequence
  Description of Artificial Sequence: Synthetic oligonucleotide
aacuauucggucagcaauu

SEQ ID NO: 2583932 - RNA, 19 nt, Artificial Sequence
  Description of Artificial Sequence: Synthetic oligonucleotide
ugcggguagugcauaggug

SEQ ID NO: 2583933 - RNA, 19 nt, Artificial Sequence
  Description of Artificial Sequence: Synthetic oligonucleotide
guaacaugguuugacuuca

SEQ ID NO: 2583934 - RNA, 19 nt, Artificial Sequence
  Description of Artificial Sequence: Synthetic oligonucleotide
ugaagcuccagaggaucag

SEQ ID NO: 2583935 - RNA, 19 nt, Artificial Sequence
  Description of Artificial Sequence: Synthetic oligonucleotide
gugcauagguguugccucg

SEQ ID NO: 2583936 - RNA, 19 nt, Artificial Sequence
  Description of Artificial Sequence: Synthetic oligonucleotide
  modified_base (3)..(3): a, c, u, g, unknown or other
ugnggucugucaucgccga

SEQ ID NO: 2583937 - RNA, 19 nt, Artificial Sequence
  Description of Artificial Sequence: Synthetic oligonucleotide
cuguucaaucgucuucccc

SEQ ID NO: 2583938 - RNA, 19 nt, Artificial Sequence
  Description of Artificial Sequence: Synthetic oligonucleotide
uggcaagagacuuccuccu

SEQ ID NO: 2583939 - RNA, 19 nt, Artificial Sequence
  Description of Artificial Sequence: Synthetic oligonucleotide
cauaggucauagauucguc

SEQ ID NO: 2583940 - RNA, 19 nt, Artificial Sequence
  Description of Artificial Sequence: Synthetic oligonucleotide
augaagagugguguuggug

SEQ ID NO: 2583941 - RNA, 19 nt, Artificial Sequence
  Description of Artificial Sequence: Synthetic oligonucleotide
cagccaguucaacauugcg

SEQ ID NO: 2583942 - RNA, 19 nt, Artificial Sequence
  Description of Artificial Sequence: Synthetic oligonucleotide
gaggaucaggcuguccggg

SEQ ID NO: 2583943 - RNA, 19 nt, Artificial Sequence
  Description of Artificial Sequence: Synthetic oligonucleotide
caaagucaaagagcucucc

SEQ ID NO: 2583944 - RNA, 19 nt, Artificial Sequence
  Description of Artificial Sequence: Synthetic oligonucleotide
ucuggcauuccaugucaac

SEQ ID NO: 2583945 - RNA, 19 nt, Artificial Sequence
  Description of Artificial Sequence: Synthetic oligonucleotide
uggcauuccaugucaacuu

SEQ ID NO: 2583946 - RNA, 19 nt, Artificial Sequence
  Description of Artificial Sequence: Synthetic oligonucleotide
uucugucauacauuauguu

SEQ ID NO: 2583947 - RNA, 19 nt, Artificial Sequence
  Description of Artificial Sequence: Synthetic oligonucleotide
uauguuuccauaggucaua

SEQ ID NO: 2583948 - RNA, 19 nt, Artificial Sequence
  Description of Artificial Sequence: Synthetic oligonucleotide
auagauucgucaacuggcu

SEQ ID NO: 2583949 - RNA, 19 nt, Artificial Sequence
  Description of Artificial Sequence: Synthetic oligonucleotide
caugcuuucugcccuccac

SEQ ID NO: 2583950 - RNA, 19 nt, Artificial Sequence
  Description of Artificial Sequence: Synthetic oligonucleotide
uggcaggaaugaagagugg

SEQ ID NO: 2583951 - RNA, 19 nt, Artificial Sequence
  Description of Artificial Sequence: Synthetic oligonucleotide
uuugccaguuuuggcagga

SEQ ID NO: 2583952 - RNA, 19 nt, Artificial Sequence
  Description of Artificial Sequence: Synthetic oligonucleotide
guagguguaggugccagac

SEQ ID NO: 2583953 - RNA, 19 nt, Artificial Sequence
  Description of Artificial Sequence: Synthetic oligonucleotide
ugcgugguguagguguagg

SEQ ID NO: 2583954 - RNA, 19 nt, Artificial Sequence
  Description of Artificial Sequence: Synthetic oligonucleotide
cuuugccaguuuuggcagg

SEQ ID NO: 2583955 - RNA, 19 nt, Artificial Sequence
  Description of Artificial Sequence: Synthetic oligonucleotide
guucaaucgucuuccccac

SEQ ID NO: 2583956 - RNA, 19 nt, Artificial Sequence
  Description of Artificial Sequence: Synthetic oligonucleotide
uguagguguaggugccaga

SEQ ID NO: 2583957 - RNA, 19 nt, Artificial Sequence
  Description of Artificial Sequence: Synthetic oligonucleotide
uucaaucgucuuccccacc

SEQ ID NO: 2583958 - RNA, 19 nt, Artificial Sequence
  Description of Artificial Sequence: Synthetic oligonucleotide
ggaaugaagagugguguug

SEQ ID NO: 2583959 - RNA, 19 nt, Artificial Sequence
  Description of Artificial Sequence: Synthetic oligonucleotide
ucggaucacccuucuguca

SEQ ID NO: 2583960 - RNA, 19 nt, Artificial Sequence
  Description of Artificial Sequence: Synthetic oligonucleotide
auguuuccauaggucauag

SEQ ID NO: 2583961 - RNA, 19 nt, Artificial Sequence
  Description of Artificial Sequence: Synthetic oligonucleotide
ucgucuuccccaccagaac

SEQ ID NO: 2583962 - RNA, 19 nt, Artificial Sequence
  Description of Artificial Sequence: Synthetic oligonucleotide
ucuucucgugccuucucuc

SEQ ID NO: 2583963 - RNA, 19 nt, Artificial Sequence
  Description of Artificial Sequence: Synthetic oligonucleotide
  modified_base (6)..(6): a, c, u, g, unknown or other
gauugnggucugucaucgc

SEQ ID NO: 2583964 - RNA, 19 nt, Artificial Sequence
  Description of Artificial Sequence: Synthetic oligonucleotide
gauucgucaacuggcugca

SEQ ID NO: 2583965 - RNA, 19 nt, Artificial Sequence
  Description of Artificial Sequence: Synthetic oligonucleotide
uuucuuacguccguuccuu

SEQ ID NO: 2583966 - RNA, 19 nt, Artificial Sequence
  Description of Artificial Sequence: Synthetic oligonucleotide
caacaggcugucccgguag

SEQ ID NO: 2583967 - RNA, 19 nt, Artificial Sequence
  Description of Artificial Sequence: Synthetic oligonucleotide
cucggaucacccuucuguc

SEQ ID NO: 2583968 - RNA, 19 nt, Artificial Sequence
  Description of Artificial Sequence: Synthetic oligonucleotide
cuguuucuuacguccguuc

SEQ ID NO: 2583969 - RNA, 19 nt, Artificial Sequence
  Description of Artificial Sequence: Synthetic oligonucleotide
guggucuguccagaaaugc

SEQ ID NO: 2583970 - RNA, 19 nt, Artificial Sequence
  Description of Artificial Sequence: Synthetic oligonucleotide
ugcgccugggcucguuucc

SEQ ID NO: 2583971 - RNA, 19 nt, Artificial Sequence
  Description of Artificial Sequence: Synthetic oligonucleotide
caacuucaacuauucgguc

SEQ ID NO: 2583972 - RNA, 19 nt, Artificial Sequence
  Description of Artificial Sequence: Synthetic oligonucleotide
ugguguugguggucugucc

SEQ ID NO: 2583973 - RNA, 19 nt, Artificial Sequence
  Description of Artificial Sequence: Synthetic oligonucleotide
uguuuccauaggucauaga

SEQ ID NO: 2583974 - RNA, 19 nt, Artificial Sequence
  Description of Artificial Sequence: Synthetic oligonucleotide
uuccccaccagaacuugua

SEQ ID NO: 2583975 - RNA, 19 nt, Artificial Sequence
  Description of Artificial Sequence: Synthetic oligonucleotide
aacuuguaacaugguuuga

SEQ ID NO: 2583976 - RNA, 19 nt, Artificial Sequence
  Description of Artificial Sequence: Synthetic oligonucleotide
gaucacccuucugucauac

SEQ ID NO: 2583977 - RNA, 19 nt, Artificial Sequence
  Description of Artificial Sequence: Synthetic oligonucleotide
uguccgggcaccuguccug

SEQ ID NO: 2583978 - RNA, 19 nt, Artificial Sequence
  Description of Artificial Sequence: Synthetic oligonucleotide
  modified_base (9)..(9): a, c, u, g, unknown or other
gaggauugnggucugucau

SEQ ID NO: 2583979 - RNA, 19 nt, Artificial Sequence
  Description of Artificial Sequence: Synthetic oligonucleotide
guguugguggucuguccag

SEQ ID NO: 2583980 - RNA, 19 nt, Artificial Sequence
  Description of Artificial Sequence: Synthetic oligonucleotide
guguaggugccagacggcc

SEQ ID NO: 2583981 - RNA, 19 nt, Artificial Sequence
  Description of Artificial Sequence: Synthetic oligonucleotide
uaguaucugaguggccaca

SEQ ID NO: 2583982 - RNA, 19 nt, Artificial Sequence
  Description of Artificial Sequence: Synthetic oligonucleotide
uguugguggucuguccaga

SEQ ID NO: 2583983 - RNA, 19 nt, Artificial Sequence
  Description of Artificial Sequence: Synthetic oligonucleotide
uguccugcggguagugcau

SEQ ID NO: 2583984 - RNA, 19 nt, Artificial Sequence
  Description of Artificial Sequence: Synthetic oligonucleotide
gccaguucaacauugcgua

SEQ ID NO: 2583985 - RNA, 19 nt, Artificial Sequence
  Description of Artificial Sequence: Synthetic oligonucleotide
uggcccgcagguuggcuag

SEQ ID NO: 2583986 - RNA, 19 nt, Artificial Sequence
  Description of Artificial Sequence: Synthetic oligonucleotide
agcucuccuauuaguaucu

SEQ ID NO: 2583987 - RNA, 19 nt, Artificial Sequence
  Description of Artificial Sequence: Synthetic oligonucleotide
cuauucggucagcaauuuc

SEQ ID NO: 2583988 - RNA, 19 nt, Artificial Sequence
  Description of Artificial Sequence: Synthetic oligonucleotide
uccccaccagaacuuguaa

SEQ ID NO: 2583989 - RNA, 19 nt, Artificial Sequence
  Description of Artificial Sequence: Synthetic oligonucleotide
uguugccucggaucacccu

SEQ ID NO: 2583990 - RNA, 19 nt, Artificial Sequence
  Description of Artificial Sequence: Synthetic oligonucleotide
caacuauucggucagcaau

SEQ ID NO: 2583991 - RNA, 19 nt, Artificial Sequence
  Description of Artificial Sequence: Synthetic oligonucleotide
gaguggccacaucuuugcc

SEQ ID NO: 2583992 - RNA, 19 nt, Artificial Sequence
  Description of Artificial Sequence: Synthetic oligonucleotide
cucuccuauuaguaucuga

SEQ ID NO: 2583993 - RNA, 19 nt, Artificial Sequence
  Description of Artificial Sequence: Synthetic oligonucleotide
acaggcucggguguccgag

SEQ ID NO: 2583994 - RNA, 19 nt, Artificial Sequence
  Description of Artificial Sequence: Synthetic oligonucleotide
caaucgucuuccccaccag

SEQ ID NO: 2583995 - RNA, 19 nt, Artificial Sequence
  Description of Artificial Sequence: Synthetic oligonucleotide
gccaguuuuggcaggaaug

SEQ ID NO: 2583996 - RNA, 19 nt, Artificial Sequence
  Description of Artificial Sequence: Synthetic oligonucleotide
uccguuccuuucuucucgu

SEQ ID NO: 2583997 - RNA, 19 nt, Artificial Sequence
  Description of Artificial Sequence: Synthetic oligonucleotide
gccuguucaaucgucuucc

SEQ ID NO: 2583998 - RNA, 19 nt, Artificial Sequence
  Description of Artificial Sequence: Synthetic oligonucleotide
cucguuuccuggcaagaga

SEQ ID NO: 2583999 - RNA, 19 nt, Artificial Sequence
  Description of Artificial Sequence: Synthetic oligonucleotide
cuguccugcggguagugca

SEQ ID NO: 2584000 - RNA, 19 nt, Artificial Sequence
  Description of Artificial Sequence: Synthetic oligonucleotide
gcuggcaaggcacggccgg

SEQ ID NO: 2584001 - RNA, 19 nt, Artificial Sequence
  Description of Artificial Sequence: Synthetic oligonucleotide
ugcaacaggcugucccggu

SEQ ID NO: 2584002 - RNA, 19 nt, Artificial Sequence
  Description of Artificial Sequence: Synthetic oligonucleotide
guagugcauagguguugcc

SEQ ID NO: 2584003 - RNA, 19 nt, Artificial Sequence
  Description of Artificial Sequence: Synthetic oligonucleotide
uaacaugguuugacuucaa

SEQ ID NO: 2584004 - RNA, 19 nt, Artificial Sequence
  Description of Artificial Sequence: Synthetic oligonucleotide
aguaucugaguggccacau

SEQ ID NO: 2584005 - RNA, 19 nt, Artificial Sequence
  Description of Artificial Sequence: Synthetic oligonucleotide
gcaggaaugaagaguggug

SEQ ID NO: 2584006 - RNA, 19 nt, Artificial Sequence
  Description of Artificial Sequence: Synthetic oligonucleotide
caucuguucuggcauucca

SEQ ID NO: 2584007 - RNA, 19 nt, Artificial Sequence
  Description of Artificial Sequence: Synthetic oligonucleotide
ggucugucaucgccgacgc

SEQ ID NO: 2584008 - RNA, 19 nt, Artificial Sequence
  Description of Artificial Sequence: Synthetic oligonucleotide
ugggcucguuuccuggcaa

SEQ ID NO: 2584009 - RNA, 19 nt, Artificial Sequence
  Description of Artificial Sequence: Synthetic oligonucleotide
agugguguugguggucugu

SEQ ID NO: 2584010 - RNA, 19 nt, Artificial Sequence
  Description of Artificial Sequence: Synthetic oligonucleotide
gugccagacggcccuucgg

SEQ ID NO: 2584011 - RNA, 19 nt, Artificial Sequence
  Description of Artificial Sequence: Synthetic oligonucleotide
cuguacauccacaugcuuu

SEQ ID NO: 2584012 - RNA, 19 nt, Artificial Sequence
  Description of Artificial Sequence: Synthetic oligonucleotide
cccaccagaacuuguaaca

SEQ ID NO: 2584013 - RNA, 19 nt, Artificial Sequence
  Description of Artificial Sequence: Synthetic oligonucleotide
cuuacguccguuccuuucu

SEQ ID NO: 2584014 - RNA, 19 nt, Artificial Sequence
  Description of Artificial Sequence: Synthetic oligonucleotide
uugccucggaucacccuuc

SEQ ID NO: 2584015 - RNA, 19 nt, Artificial Sequence
  Description of Artificial Sequence: Synthetic oligonucleotide
uuacguccguuccuuucuu

SEQ ID NO: 2584016 - RNA, 19 nt, Artificial Sequence
  Description of Artificial Sequence: Synthetic oligonucleotide
aucgucuuccccaccagaa

SEQ ID NO: 2584017 - RNA, 19 nt, Artificial Sequence
  Description of Artificial Sequence: Synthetic oligonucleotide
acauugcguauuucuucau

SEQ ID NO: 2584018 - RNA, 19 nt, Artificial Sequence
  Description of Artificial Sequence: Synthetic oligonucleotide
caugucaacuucaacuauu

SEQ ID NO: 2584019 - RNA, 19 nt, Artificial Sequence
  Description of Artificial Sequence: Synthetic oligonucleotide
gguguugccucggaucacc

SEQ ID NO: 2584020 - RNA, 19 nt, Artificial Sequence
  Description of Artificial Sequence: Synthetic oligonucleotide
uuggcccgcagguuggcua

SEQ ID NO: 2584021 - RNA, 19 nt, Artificial Sequence
  Description of Artificial Sequence: Synthetic oligonucleotide
agacuuccuccuggcuugc

SEQ ID NO: 2584022 - RNA, 19 nt, Artificial Sequence
  Description of Artificial Sequence: Synthetic oligonucleotide
cauugcguauuucuucaua

SEQ ID NO: 2584023 - RNA, 19 nt, Artificial Sequence
  Description of Artificial Sequence: Synthetic oligonucleotide
guagcggcggcgcuggcaa

SEQ ID NO: 2584024 - RNA, 19 nt, Artificial Sequence
  Description of Artificial Sequence: Synthetic oligonucleotide
uacguccguuccuuucuuc

SEQ ID NO: 2584025 - RNA, 19 nt, Artificial Sequence
  Description of Artificial Sequence: Synthetic oligonucleotide
ggcauuccaugucaacuuc

SEQ ID NO: 2584026 - RNA, 19 nt, Artificial Sequence
  Description of Artificial Sequence: Synthetic oligonucleotide
acaugcuuucugcccucca

SEQ ID NO: 2584027 - RNA, 19 nt, Artificial Sequence
  Description of Artificial Sequence: Synthetic oligonucleotide
gucuguccagaaaugcauc

SEQ ID NO: 2584028 - RNA, 19 nt, Artificial Sequence
  Description of Artificial Sequence: Synthetic oligonucleotide
caggaaugaagaguggugu

SEQ ID NO: 2584029 - RNA, 19 nt, Artificial Sequence
  Description of Artificial Sequence: Synthetic oligonucleotide
acuauucggucagcaauuu

SEQ ID NO: 2584030 - RNA, 19 nt, Artificial Sequence
  Description of Artificial Sequence: Synthetic oligonucleotide
cuucaacuauucggucagc

SEQ ID NO: 2584031 - RNA, 19 nt, Artificial Sequence
  Description of Artificial Sequence: Synthetic oligonucleotide
auugauuggcccgcagguu

SEQ ID NO: 2584032 - RNA, 19 nt, Artificial Sequence
  Description of Artificial Sequence: Synthetic oligonucleotide
ggugccagacggcccuucg

SEQ ID NO: 2584033 - RNA, 19 nt, Artificial Sequence
  Description of Artificial Sequence: Synthetic oligonucleotide
guugguggucuguccagaa

SEQ ID NO: 2584034 - RNA, 19 nt, Artificial Sequence
  Description of Artificial Sequence: Synthetic oligonucleotide
guaucugaguggccacauc

SEQ ID NO: 2584035 - RNA, 19 nt, Artificial Sequence
  Description of Artificial Sequence: Synthetic oligonucleotide
cuggcauuccaugucaacu

SEQ ID NO: 2584036 - RNA, 19 nt, Artificial Sequence
  Description of Artificial Sequence: Synthetic oligonucleotide
cuccuauuaguaucugagu

SEQ ID NO: 2584037 - RNA, 19 nt, Artificial Sequence
  Description of Artificial Sequence: Synthetic oligonucleotide
auucggucagcaauuucuu

SEQ ID NO: 2584038 - RNA, 19 nt, Artificial Sequence
  Description of Artificial Sequence: Synthetic oligonucleotide
gguggucuguccagaaaug

SEQ ID NO: 2584039 - RNA, 19 nt, Artificial Sequence
  Description of Artificial Sequence: Synthetic oligonucleotide
gcggguagugcauaggugu

SEQ ID NO: 2584040 - RNA, 19 nt, Artificial Sequence
  Description of Artificial Sequence: Synthetic oligonucleotide
agguguugccucggaucac

SEQ ID NO: 2584041 - RNA, 19 nt, Artificial Sequence
  Description of Artificial Sequence: Synthetic oligonucleotide
ggcccuucgggcccgcgcg

SEQ ID NO: 2584042 - RNA, 19 nt, Artificial Sequence
  Description of Artificial Sequence: Synthetic oligonucleotide
ggucauagauucgucaacu

SEQ ID NO: 2584043 - RNA, 19 nt, Artificial Sequence
  Description of Artificial Sequence: Synthetic oligonucleotide
gagugguguugguggucug

SEQ ID NO: 2584044 - RNA, 19 nt, Artificial Sequence
  Description of Artificial Sequence: Synthetic oligonucleotide
gaagggccuguucaaucgu

SEQ ID NO: 2584045 - RNA, 19 nt, Artificial Sequence
  Description of Artificial Sequence: Synthetic oligonucleotide
cagaacuuguaacaugguu

SEQ ID NO: 2584046 - RNA, 19 nt, Artificial Sequence
  Description of Artificial Sequence: Synthetic oligonucleotide
  modified_base (2)..(2): a, c, u, g, unknown or other
gnggucugucaucgccgac

SEQ ID NO: 2584047 - RNA, 19 nt, Artificial Sequence
  Description of Artificial Sequence: Synthetic oligonucleotide
ugccucggaucacccuucu

SEQ ID NO: 2584048 - RNA, 19 nt, Artificial Sequence
  Description of Artificial Sequence: Synthetic oligonucleotide
guugccucggaucacccuu

SEQ ID NO: 2584049 - RNA, 19 nt, Artificial Sequence
  Description of Artificial Sequence: Synthetic oligonucleotide
aaggcacggccgggccugc

SEQ ID NO: 2584050 - RNA, 19 nt, Artificial Sequence
  Description of Artificial Sequence: Synthetic oligonucleotide
uggcaaggcacggccgggc

SEQ ID NO: 2584051 - RNA, 19 nt, Artificial Sequence
  Description of Artificial Sequence: Synthetic oligonucleotide
cacaugcuuucugcccucc

SEQ ID NO: 2584052 - RNA, 19 nt, Artificial Sequence
  Description of Artificial Sequence: Synthetic oligonucleotide
guuuccuggcaagagacuu

SEQ ID NO: 2584053 - RNA, 19 nt, Artificial Sequence
  Description of Artificial Sequence: Synthetic oligonucleotide
ggccuguucaaucgucuuc

SEQ ID NO: 2584054 - RNA, 19 nt, Artificial Sequence
  Description of Artificial Sequence: Synthetic oligonucleotide
uucuuacguccguuccuuu

SEQ ID NO: 2584055 - RNA, 19 nt, Artificial Sequence
  Description of Artificial Sequence: Synthetic oligonucleotide
cuguucuggcauuccaugu

SEQ ID NO: 2584056 - RNA, 19 nt, Artificial Sequence
  Description of Artificial Sequence: Synthetic oligonucleotide
gauuggcccgcagguuggc

SEQ ID NO: 2584057 - RNA, 19 nt, Artificial Sequence
  Description of Artificial Sequence: Synthetic oligonucleotide
uccgggcaccuguccugcg

SEQ ID NO: 2584058 - RNA, 19 nt, Artificial Sequence
  Description of Artificial Sequence: Synthetic oligonucleotide
cuggcaaggcacggccggg

SEQ ID NO: 2584059 - RNA, 19 nt, Artificial Sequence
  Description of Artificial Sequence: Synthetic oligonucleotide
gcucguuuccuggcaagag

SEQ ID NO: 2584060 - RNA, 19 nt, Artificial Sequence
  Description of Artificial Sequence: Synthetic oligonucleotide
uccuggcaagagacuuccu

SEQ ID NO: 2584061 - RNA, 19 nt, Artificial Sequence
  Description of Artificial Sequence: Synthetic oligonucleotide
guucaacauugcguauuuc

SEQ ID NO: 2584062 - RNA, 19 nt, Artificial Sequence
  Description of Artificial Sequence: Synthetic oligonucleotide
cugucgcugaagcuccaga

SEQ ID NO: 2584063 - RNA, 19 nt, Artificial Sequence
  Description of Artificial Sequence: Synthetic oligonucleotide
cacggccgggccugcgugg

SEQ ID NO: 2584064 - RNA, 19 nt, Artificial Sequence
  Description of Artificial Sequence: Synthetic oligonucleotide
cuucucgugccuucucucu

SEQ ID NO: 2584065 - RNA, 19 nt, Artificial Sequence
  Description of Artificial Sequence: Synthetic oligonucleotide
ccccaccagaacuuguaac

SEQ ID NO: 2584066 - RNA, 19 nt, Artificial Sequence
  Description of Artificial Sequence: Synthetic oligonucleotide
ggguagugcauagguguug

SEQ ID NO: 2584067 - RNA, 19 nt, Artificial Sequence
  Description of Artificial Sequence: Synthetic oligonucleotide
uccgaggccugagcugcgc

SEQ ID NO: 2584068 - RNA, 19 nt, Artificial Sequence
  Description of Artificial Sequence: Synthetic oligonucleotide
  modified_base (10)..(10): a, c, u, g, unknown or other
cgaggauugnggucuguca

SEQ ID NO: 2584069 - RNA, 19 nt, Artificial Sequence
  Description of Artificial Sequence: Synthetic oligonucleotide
cgugccuucucucuugcuc

SEQ ID NO: 2584070 - RNA, 19 nt, Artificial Sequence
  Description of Artificial Sequence: Synthetic oligonucleotide
ccuguucaaucgucuuccc

SEQ ID NO: 2584071 - RNA, 19 nt, Artificial Sequence
  Description of Artificial Sequence: Synthetic oligonucleotide
guguugccucggaucaccc

SEQ ID NO: 2584072 - RNA, 19 nt, Artificial Sequence
  Description of Artificial Sequence: Synthetic oligonucleotide
ucggguguccgaggccuga

SEQ ID NO: 2584073 - RNA, 19 nt, Artificial Sequence
  Description of Artificial Sequence: Synthetic oligonucleotide
gguguccgaggccugagcu

SEQ ID NO: 2584074 - RNA, 19 nt, Artificial Sequence
  Description of Artificial Sequence: Synthetic oligonucleotide
gguguaggugccagacggc

SEQ ID NO: 2584075 - RNA, 19 nt, Artificial Sequence
  Description of Artificial Sequence: Synthetic oligonucleotide
gcgcuggcaaggcacggcc

SEQ ID NO: 2584076 - RNA, 19 nt, Artificial Sequence
  Description of Artificial Sequence: Synthetic oligonucleotide
cugcggguagugcauaggu

SEQ ID NO: 2584077 - RNA, 19 nt, Artificial Sequence
  Description of Artificial Sequence: Synthetic oligonucleotide
cugcgccugggcucguuuc

SEQ ID NO: 2584078 - RNA, 19 nt, Artificial Sequence
  Description of Artificial Sequence: Synthetic oligonucleotide
gggcucguuuccuggcaag

SEQ ID NO: 2584079 - RNA, 19 nt, Artificial Sequence
  Description of Artificial Sequence: Synthetic oligonucleotide
ggcaaggcacggccgggcc

SEQ ID NO: 2584080 - RNA, 19 nt, Artificial Sequence
  Description of Artificial Sequence: Synthetic oligonucleotide
ccugggcucguuuccuggc

SEQ ID NO: 2584081 - RNA, 19 nt, Artificial Sequence
  Description of Artificial Sequence: Synthetic oligonucleotide
cugggcucguuuccuggca

SEQ ID NO: 2584082 - RNA, 19 nt, Artificial Sequence
  Description of Artificial Sequence: Synthetic oligonucleotide
ggcaggaaugaagaguggu

SEQ ID NO: 2584083 - RNA, 19 nt, Artificial Sequence
  Description of Artificial Sequence: Synthetic oligonucleotide
uccagaggaucaggcuguc

SEQ ID NO: 2584084 - RNA, 19 nt, Artificial Sequence
  Description of Artificial Sequence: Synthetic oligonucleotide
auuggcccgcagguuggcu

SEQ ID NO: 2584085 - RNA, 19 nt, Artificial Sequence
  Description of Artificial Sequence: Synthetic oligonucleotide
gucugucaucgccgacgcc

SEQ ID NO: 2584086 - RNA, 19 nt, Artificial Sequence
  Description of Artificial Sequence: Synthetic oligonucleotide
cugcgugguguagguguag

SEQ ID NO: 2584087 - RNA, 19 nt, Artificial Sequence
  Description of Artificial Sequence: Synthetic oligonucleotide
gccugcgugguguaggugu

SEQ ID NO: 2584088 - RNA, 19 nt, Artificial Sequence
  Description of Artificial Sequence: Synthetic oligonucleotide
guccgggcaccuguccugc

SEQ ID NO: 2584089 - RNA, 19 nt, Artificial Sequence
  Description of Artificial Sequence: Synthetic oligonucleotide
ggucuguccagaaaugcau

SEQ ID NO: 2584090 - RNA, 19 nt, Artificial Sequence
  Description of Artificial Sequence: Synthetic oligonucleotide
uugccaguuuuggcaggaa

SEQ ID NO: 2584091 - RNA, 19 nt, Artificial Sequence
  Description of Artificial Sequence: Synthetic oligonucleotide
gguuugacuucaaggucaa

SEQ ID NO: 2584092 - RNA, 19 nt, Artificial Sequence
  Description of Artificial Sequence: Synthetic oligonucleotide
ccucggaucacccuucugu

SEQ ID NO: 2584093 - RNA, 19 nt, Artificial Sequence
  Description of Artificial Sequence: Synthetic oligonucleotide
cucggguguccgaggccug

SEQ ID NO: 2584094 - RNA, 19 nt, Artificial Sequence
  Description of Artificial Sequence: Synthetic oligonucleotide
cauagguguugccucggau

SEQ ID NO: 2584095 - RNA, 19 nt, Artificial Sequence
  Description of Artificial Sequence: Synthetic oligonucleotide
  modified_base (17)..(17): a, c, u, g, unknown or other
gcccgcgcgaggauugngg

SEQ ID NO: 2584096 - RNA, 19 nt, Artificial Sequence
  Description of Artificial Sequence: Synthetic oligonucleotide
ggcggcgcuggcaaggcac

SEQ ID NO: 2584097 - RNA, 19 nt, Artificial Sequence
  Description of Artificial Sequence: Synthetic oligonucleotide
ggucaaagucaaagagcuc

SEQ ID NO: 2584098 - RNA, 19 nt, Artificial Sequence
  Description of Artificial Sequence: Synthetic oligonucleotide
ucccgguagcggcggcgcu

SEQ ID NO: 2584099 - RNA, 19 nt, Artificial Sequence
  Description of Artificial Sequence: Synthetic oligonucleotide
cuuucuucucgugccuucu

SEQ ID NO: 2584100 - RNA, 19 nt, Artificial Sequence
  Description of Artificial Sequence: Synthetic oligonucleotide
ggguguccgaggccugagc

SEQ ID NO: 2584101 - RNA, 19 nt, Artificial Sequence
  Description of Artificial Sequence: Synthetic oligonucleotide
gcugucccgguagcggcgg

SEQ ID NO: 2584102 - RNA, 19 nt, Artificial Sequence
  Description of Artificial Sequence: Synthetic oligonucleotide
caacuggcugcaacaggcu

SEQ ID NO: 2584103 - RNA, 19 nt, Artificial Sequence
  Description of Artificial Sequence: Synthetic oligonucleotide
agacggcccuucgggcccg

SEQ ID NO: 2584104 - RNA, 19 nt, Artificial Sequence
  Description of Artificial Sequence: Synthetic oligonucleotide
ugcccuccacaggcucggg

SEQ ID NO: 2584105 - RNA, 19 nt, Artificial Sequence
  Description of Artificial Sequence: Synthetic oligonucleotide
  modified_base (11)..(11): a, c, u, g, unknown or other
gcgaggauugnggucuguc

SEQ ID NO: 2584106 - RNA, 19 nt, Artificial Sequence
  Description of Artificial Sequence: Synthetic oligonucleotide
cgucaacuggcugcaacag

SEQ ID NO: 2584107 - RNA, 19 nt, Artificial Sequence
  Description of Artificial Sequence: Synthetic oligonucleotide
uucgggcccgcgcgaggau

SEQ ID NO: 2584108 - RNA, 19 nt, Artificial Sequence
  Description of Artificial Sequence: Synthetic oligonucleotide
ccauaggucauagauucgu

SEQ ID NO: 2584109 - RNA, 19 nt, Artificial Sequence
  Description of Artificial Sequence: Synthetic oligonucleotide
gcauagguguugccucgga

SEQ ID NO: 2584110 - RNA, 19 nt, Artificial Sequence
  Description of Artificial Sequence: Synthetic oligonucleotide
ggcucggguguccgaggcc

SEQ ID NO: 2584111 - RNA, 19 nt, Artificial Sequence
  Description of Artificial Sequence: Synthetic oligonucleotide
gcugucgcugaagcuccag

SEQ ID NO: 2584112 - RNA, 19 nt, Artificial Sequence
  Description of Artificial Sequence: Synthetic oligonucleotide
guccgaggccugagcugcg

SEQ ID NO: 2584113 - RNA, 19 nt, Artificial Sequence
  Description of Artificial Sequence: Synthetic oligonucleotide
ggcucguuuccuggcaaga

SEQ ID NO: 2584114 - RNA, 19 nt, Artificial Sequence
  Description of Artificial Sequence: Synthetic oligonucleotide
caggcuguccgggcaccug

SEQ ID NO: 2584115 - RNA, 19 nt, Artificial Sequence
  Description of Artificial Sequence: Synthetic oligonucleotide
gcucuccuauuaguaucug

SEQ ID NO: 2584116 - RNA, 19 nt, Artificial Sequence
  Description of Artificial Sequence: Synthetic oligonucleotide
ggcgcuggcaaggcacggc

SEQ ID NO: 2584117 - RNA, 19 nt, Artificial Sequence
  Description of Artificial Sequence: Synthetic oligonucleotide
cugucccgguagcggcggc

SEQ ID NO: 2584118 - RNA, 19 nt, Artificial Sequence
  Description of Artificial Sequence: Synthetic oligonucleotide
gccugagcugcgccugggc

SEQ ID NO: 2584119 - RNA, 19 nt, Artificial Sequence
  Description of Artificial Sequence: Synthetic oligonucleotide
gcaacaggcugucccggua

SEQ ID NO: 2584120 - RNA, 19 nt, Artificial Sequence
  Description of Artificial Sequence: Synthetic oligonucleotide
cacaggcucggguguccga

SEQ ID NO: 2584121 - RNA, 19 nt, Artificial Sequence
  Description of Artificial Sequence: Synthetic oligonucleotide
auucgucaacuggcugcaa

SEQ ID NO: 2584122 - RNA, 19 nt, Artificial Sequence
  Description of Artificial Sequence: Synthetic oligonucleotide
ccacaugcuuucugcccuc

SEQ ID NO: 2584123 - RNA, 19 nt, Artificial Sequence
  Description of Artificial Sequence: Synthetic oligonucleotide
guuugacuucaaggucaaa

SEQ ID NO: 2584124 - RNA, 19 nt, Artificial Sequence
  Description of Artificial Sequence: Synthetic oligonucleotide
guacauccacaugcuuucu

SEQ ID NO: 2584125 - RNA, 19 nt, Artificial Sequence
  Description of Artificial Sequence: Synthetic oligonucleotide
gcauauugauuggcccgca

SEQ ID NO: 2584126 - RNA, 19 nt, Artificial Sequence
  Description of Artificial Sequence: Synthetic oligonucleotide
gcacggccgggccugcgug

SEQ ID NO: 2584127 - RNA, 19 nt, Artificial Sequence
  Description of Artificial Sequence: Synthetic oligonucleotide
ccuguccugcggguagugc

SEQ ID NO: 2584128 - RNA, 19 nt, Artificial Sequence
  Description of Artificial Sequence: Synthetic oligonucleotide
ccagaggaucaggcugucc

SEQ ID NO: 2584129 - RNA, 19 nt, Artificial Sequence
  Description of Artificial Sequence: Synthetic oligonucleotide
ccgaggccugagcugcgcc

SEQ ID NO: 2584130 - RNA, 19 nt, Artificial Sequence
  Description of Artificial Sequence: Synthetic oligonucleotide
ggccugagcugcgccuggg

SEQ ID NO: 2584131 - RNA, 19 nt, Artificial Sequence
  Description of Artificial Sequence: Synthetic oligonucleotide
acggccgggccugcguggu

SEQ ID NO: 2584132 - RNA, 19 nt, Artificial Sequence
  Description of Artificial Sequence: Synthetic oligonucleotide
ccguuccuuucuucucgug

SEQ ID NO: 2584133 - RNA, 19 nt, Artificial Sequence
  Description of Artificial Sequence: Synthetic oligonucleotide
ccacaggcucggguguccg

SEQ ID NO: 2584134 - RNA, 19 nt, Artificial Sequence
  Description of Artificial Sequence: Synthetic oligonucleotide
gccucggaucacccuucug

SEQ ID NO: 2584135 - RNA, 19 nt, Artificial Sequence
  Description of Artificial Sequence: Synthetic oligonucleotide
ggaucacccuucugucaua

SEQ ID NO: 2584136 - RNA, 19 nt, Artificial Sequence
  Description of Artificial Sequence: Synthetic oligonucleotide
cggucagcaauuucuucaa

SEQ ID NO: 2584137 - RNA, 19 nt, Artificial Sequence
  Description of Artificial Sequence: Synthetic oligonucleotide
aggcacggccgggccugcg

SEQ ID NO: 2584138 - RNA, 19 nt, Artificial Sequence
  Description of Artificial Sequence: Synthetic oligonucleotide
  modified_base (14)..(14): a, c, u, g, unknown or other
cgcgcgaggauugnggucu

SEQ ID NO: 2584139 - RNA, 19 nt, Artificial Sequence
  Description of Artificial Sequence: Synthetic oligonucleotide
gcucggguguccgaggccu

SEQ ID NO: 2584140 - RNA, 19 nt, Artificial Sequence
  Description of Artificial Sequence: Synthetic oligonucleotide
cgggccugcgugguguagg

SEQ ID NO: 2584141 - RNA, 19 nt, Artificial Sequence
  Description of Artificial Sequence: Synthetic oligonucleotide
uaggugccagacggcccuu

SEQ ID NO: 2584142 - RNA, 19 nt, Artificial Sequence
  Description of Artificial Sequence: Synthetic oligonucleotide
gcgugguguagguguaggu

SEQ ID NO: 2584143 - RNA, 19 nt, Artificial Sequence
  Description of Artificial Sequence: Synthetic oligonucleotide
ccagaacuuguaacauggu

SEQ ID NO: 2584144 - RNA, 19 nt, Artificial Sequence
  Description of Artificial Sequence: Synthetic oligonucleotide
  modified_base (15)..(15): a, c, u, g, unknown or other
ccgcgcgaggauugngguc

SEQ ID NO: 2584145 - RNA, 19 nt, Artificial Sequence
  Description of Artificial Sequence: Synthetic oligonucleotide
acggcccuucgggcccgcg

SEQ ID NO: 2584146 - RNA, 19 nt, Artificial Sequence
  Description of Artificial Sequence: Synthetic oligonucleotide
  modified_base (18)..(18): a, c, u, g, unknown or other
ggcccgcgcgaggauugng

SEQ ID NO: 2584147 - RNA, 19 nt, Artificial Sequence
  Description of Artificial Sequence: Synthetic oligonucleotide
cucugcacuucagccaguu

SEQ ID NO: 2584148 - RNA, 19 nt, Artificial Sequence
  Description of Artificial Sequence: Synthetic oligonucleotide
  modified_base (16)..(16): a, c, u, g, unknown or other
cccgcgcgaggauugnggu

SEQ ID NO: 2584149 - RNA, 19 nt, Artificial Sequence
  Description of Artificial Sequence: Synthetic oligonucleotide
ccugagcugcgccugggcu

SEQ ID NO: 2584150 - RNA, 19 nt, Artificial Sequence
  Description of Artificial Sequence: Synthetic oligonucleotide
ggccacaucuuugccaguu

SEQ ID NO: 2584151 - RNA, 19 nt, Artificial Sequence
  Description of Artificial Sequence: Synthetic oligonucleotide
gcaaggcacggccgggccu

SEQ ID NO: 2584152 - RNA, 19 nt, Artificial Sequence
  Description of Artificial Sequence: Synthetic oligonucleotide
ccacaucuuugccaguuuu

SEQ ID NO: 2584153 - RNA, 19 nt, Artificial Sequence
  Description of Artificial Sequence: Synthetic oligonucleotide
ggccugcgugguguaggug

SEQ ID NO: 2584154 - RNA, 19 nt, Artificial Sequence
  Description of Artificial Sequence: Synthetic oligonucleotide
cccgguagcggcggcgcug

SEQ ID NO: 2584155 - RNA, 19 nt, Artificial Sequence
  Description of Artificial Sequence: Synthetic oligonucleotide
gggccuguucaaucgucuu

SEQ ID NO: 2584156 - RNA, 19 nt, Artificial Sequence
  Description of Artificial Sequence: Synthetic oligonucleotide
ccaguucaacauugcguau

SEQ ID NO: 2584157 - RNA, 19 nt, Artificial Sequence
  Description of Artificial Sequence: Synthetic oligonucleotide
ccaccagaacuuguaacau

SEQ ID NO: 2584158 - RNA, 19 nt, Artificial Sequence
  Description of Artificial Sequence: Synthetic oligonucleotide
cgggcccgcgcgaggauug

SEQ ID NO: 2584159 - RNA, 19 nt, Artificial Sequence
  Description of Artificial Sequence: Synthetic oligonucleotide
gacggcccuucgggcccgc

SEQ ID NO: 2584160 - RNA, 19 nt, Artificial Sequence
  Description of Artificial Sequence: Synthetic oligonucleotide
cggaucacccuucugucau

SEQ ID NO: 2584161 - RNA, 19 nt, Artificial Sequence
  Description of Artificial Sequence: Synthetic oligonucleotide
  modified_base (13)..(13): a, c, u, g, unknown or other
gcgcgaggauugnggucug

SEQ ID NO: 2584162 - RNA, 19 nt, Artificial Sequence
  Description of Artificial Sequence: Synthetic oligonucleotide
cccuucgggcccgcgcgag

SEQ ID NO: 2584163 - RNA, 19 nt, Artificial Sequence
  Description of Artificial Sequence: Synthetic oligonucleotide
ggcacggccgggccugcgu

SEQ ID NO: 2584164 - RNA, 19 nt, Artificial Sequence
  Description of Artificial Sequence: Synthetic oligonucleotide
cgccugggcucguuuccug

SEQ ID NO: 2584165 - RNA, 19 nt, Artificial Sequence
  Description of Artificial Sequence: Synthetic oligonucleotide
ccuccacaggcucgggugu

SEQ ID NO: 2584166 - RNA, 19 nt, Artificial Sequence
  Description of Artificial Sequence: Synthetic oligonucleotide
agcugcgccugggcucguu

SEQ ID NO: 2584167 - RNA, 19 nt, Artificial Sequence
  Description of Artificial Sequence: Synthetic oligonucleotide
cggcccuucgggcccgcgc

SEQ ID NO: 2584168 - RNA, 19 nt, Artificial Sequence
  Description of Artificial Sequence: Synthetic oligonucleotide
ggcccgcagguuggcuagc

SEQ ID NO: 2584169 - RNA, 19 nt, Artificial Sequence
  Description of Artificial Sequence: Synthetic oligonucleotide
cggguguccgaggccugag

SEQ ID NO: 2584170 - RNA, 19 nt, Artificial Sequence
  Description of Artificial Sequence: Synthetic oligonucleotide
ccgggccugcgugguguag

SEQ ID NO: 2584171 - RNA, 19 nt, Artificial Sequence
  Description of Artificial Sequence: Synthetic oligonucleotide
gcugcgccugggcucguuu

SEQ ID NO: 2584172 - RNA, 19 nt, Artificial Sequence
  Description of Artificial Sequence: Synthetic oligonucleotide
  modified_base (19)..(19): a, c, u, g, unknown or other
gggcccgcgcgaggauugn

SEQ ID NO: 2584173 - RNA, 19 nt, Artificial Sequence
  Description of Artificial Sequence: Synthetic oligonucleotide
cgcugaagcuccagaggau

SEQ ID NO: 2584174 - RNA, 19 nt, Artificial Sequence
  Description of Artificial Sequence: Synthetic oligonucleotide
cggguagugcauagguguu

SEQ ID NO: 2584175 - RNA, 19 nt, Artificial Sequence
  Description of Artificial Sequence: Synthetic oligonucleotide
gcccgcagguuggcuagcu

SEQ ID NO: 2584176 - RNA, 19 nt, Artificial Sequence
  Description of Artificial Sequence: Synthetic oligonucleotide
gccgggccugcguggugua

SEQ ID NO: 2584177 - RNA, 19 nt, Artificial Sequence
  Description of Artificial Sequence: Synthetic oligonucleotide
cggccgggccugcguggug

SEQ ID NO: 2584178 - RNA, 19 nt, Artificial Sequence
  Description of Artificial Sequence: Synthetic oligonucleotide
  modified_base (12)..(12): a, c, u, g, unknown or other
cgcgaggauugnggucugu

SEQ ID NO: 2584179 - RNA, 19 nt, Artificial Sequence
  Description of Artificial Sequence: Synthetic oligonucleotide
  modified_base (1)..(1): a, c, u, g, unknown or other
nggucugucaucgccgacg

SEQ ID NO: 2584180 - RNA, 19 nt, Artificial Sequence
  Description of Artificial Sequence: Synthetic oligonucleotide
aaugauaaacaguucacac

SEQ ID NO: 2584181 - RNA, 19 nt, Artificial Sequence
  Description of Artificial Sequence: Synthetic oligonucleotide
ugauaaacaguucacaccg

SEQ ID NO: 2584182 - RNA, 19 nt, Artificial Sequence
  Description of Artificial Sequence: Synthetic oligonucleotide
aauuuguucacucuuauau

SEQ ID NO: 2584183 - RNA, 19 nt, Artificial Sequence
  Description of Artificial Sequence: Synthetic oligonucleotide
aauaguuuuauccucgcug

SEQ ID NO: 2584184 - RNA, 19 nt, Artificial Sequence
  Description of Artificial Sequence: Synthetic oligonucleotide
aacauaaucucugugacuc

SEQ ID NO: 2584185 - RNA, 19 nt, Artificial Sequence
  Description of Artificial Sequence: Synthetic oligonucleotide
ugagaaguuauuaacacac

SEQ ID NO: 2584186 - RNA, 19 nt, Artificial Sequence
  Description of Artificial Sequence: Synthetic oligonucleotide
ugugcuuuaaauucagagg

SEQ ID NO: 2584187 - RNA, 19 nt, Artificial Sequence
  Description of Artificial Sequence: Synthetic oligonucleotide
augauaaacaguucacacc

SEQ ID NO: 2584188 - RNA, 19 nt, Artificial Sequence
  Description of Artificial Sequence: Synthetic oligonucleotide
acugaaaucacacaaacau

SEQ ID NO: 2584189 - RNA, 19 nt, Artificial Sequence
  Description of Artificial Sequence: Synthetic oligonucleotide
uuuguucacucuuauaucc

SEQ ID NO: 2584190 - RNA, 19 nt, Artificial Sequence
  Description of Artificial Sequence: Synthetic oligonucleotide
aauugauuugucuucagaa

SEQ ID NO: 2584191 - RNA, 19 nt, Artificial Sequence
  Description of Artificial Sequence: Synthetic oligonucleotide
cacaaaauuugucaaaucc

SEQ ID NO: 2584192 - RNA, 19 nt, Artificial Sequence
  Description of Artificial Sequence: Synthetic oligonucleotide
cuaucaggaacccagagcc

SEQ ID NO: 2584193 - RNA, 19 nt, Artificial Sequence
  Description of Artificial Sequence: Synthetic oligonucleotide
ugucaaauccuacagaauc

SEQ ID NO: 2584194 - RNA, 19 nt, Artificial Sequence
  Description of Artificial Sequence: Synthetic oligonucleotide
ugucucgugaagcagaggc

SEQ ID NO: 2584195 - RNA, 19 nt, Artificial Sequence
  Description of Artificial Sequence: Synthetic oligonucleotide
aaagacaggacccguaugu

SEQ ID NO: 2584196 - RNA, 19 nt, Artificial Sequence
  Description of Artificial Sequence: Synthetic oligonucleotide
aauccuaaguguuccauca

SEQ ID NO: 2584197 - RNA, 19 nt, Artificial Sequence
  Description of Artificial Sequence: Synthetic oligonucleotide
accauuagggcuaaagucc

SEQ ID NO: 2584198 - RNA, 19 nt, Artificial Sequence
  Description of Artificial Sequence: Synthetic oligonucleotide
uucuaggagauccagaauc

SEQ ID NO: 2584199 - RNA, 19 nt, Artificial Sequence
  Description of Artificial Sequence: Synthetic oligonucleotide
agauccagaauccuaagug

SEQ ID NO: 2584200 - RNA, 19 nt, Artificial Sequence
  Description of Artificial Sequence: Synthetic oligonucleotide
ugugugucgguacagggag

SEQ ID NO: 2584201 - RNA, 19 nt, Artificial Sequence
  Description of Artificial Sequence: Synthetic oligonucleotide
cacacuucgaacuggagcc

SEQ ID NO: 2584202 - RNA, 19 nt, Artificial Sequence
  Description of Artificial Sequence: Synthetic oligonucleotide
acucuuauaucccagauuu

SEQ ID NO: 2584203 - RNA, 19 nt, Artificial Sequence
  Description of Artificial Sequence: Synthetic oligonucleotide
uuaaauucagaggacuucc

SEQ ID NO: 2584204 - RNA, 19 nt, Artificial Sequence
  Description of Artificial Sequence: Synthetic oligonucleotide
auuaaucuuccaucgggcg

SEQ ID NO: 2584205 - RNA, 19 nt, Artificial Sequence
  Description of Artificial Sequence: Synthetic oligonucleotide
uuuuagcacacugaaauca

SEQ ID NO: 2584206 - RNA, 19 nt, Artificial Sequence
  Description of Artificial Sequence: Synthetic oligonucleotide
aauuuggcacagcguaccc

SEQ ID NO: 2584207 - RNA, 19 nt, Artificial Sequence
  Description of Artificial Sequence: Synthetic oligonucleotide
guuauuaacacacugcuua

SEQ ID NO: 2584208 - RNA, 19 nt, Artificial Sequence
  Description of Artificial Sequence: Synthetic oligonucleotide
caugacacgauuaaucuuc

SEQ ID NO: 2584209 - RNA, 19 nt, Artificial Sequence
  Description of Artificial Sequence: Synthetic oligonucleotide
gaaguuauuaacacacugc

SEQ ID NO: 2584210 - RNA, 19 nt, Artificial Sequence
  Description of Artificial Sequence: Synthetic oligonucleotide
ugugaucagaaccugcuga

SEQ ID NO: 2584211 - RNA, 19 nt, Artificial Sequence
  Description of Artificial Sequence: Synthetic oligonucleotide
cacgauuaaucuuccaucg

SEQ ID NO: 2584212 - RNA, 19 nt, Artificial Sequence
  Description of Artificial Sequence: Synthetic oligonucleotide
acacgauuaaucuuccauc

SEQ ID NO: 2584213 - RNA, 19 nt, Artificial Sequence
  Description of Artificial Sequence: Synthetic oligonucleotide
augcauguaccauuagggc

SEQ ID NO: 2584214 - RNA, 19 nt, Artificial Sequence
  Description of Artificial Sequence: Synthetic oligonucleotide
ugugacuccauaacaagac

SEQ ID NO: 2584215 - RNA, 19 nt, Artificial Sequence
  Description of Artificial Sequence: Synthetic oligonucleotide
uccuuugaaaauguaacag

SEQ ID NO: 2584216 - RNA, 19 nt, Artificial Sequence
  Description of Artificial Sequence: Synthetic oligonucleotide
auuuguucacucuuauauc

SEQ ID NO: 2584217 - RNA, 19 nt, Artificial Sequence
  Description of Artificial Sequence: Synthetic oligonucleotide
uggaguguguauaugaguc

SEQ ID NO: 2584218 - RNA, 19 nt, Artificial Sequence
  Description of Artificial Sequence: Synthetic oligonucleotide
uaugagucuuccuucuagg

SEQ ID NO: 2584219 - RNA, 19 nt, Artificial Sequence
  Description of Artificial Sequence: Synthetic oligonucleotide
ucuaggagauccagaaucc

SEQ ID NO: 2584220 - RNA, 19 nt, Artificial Sequence
  Description of Artificial Sequence: Synthetic oligonucleotide
uccauauuuuaauugauuu

SEQ ID NO: 2584221 - RNA, 19 nt, Artificial Sequence
  Description of Artificial Sequence: Synthetic oligonucleotide
auaacaagaccugagcauc

SEQ ID NO: 2584222 - RNA, 19 nt, Artificial Sequence
  Description of Artificial Sequence: Synthetic oligonucleotide
gugugcuuuaaauucagag

SEQ ID NO: 2584223 - RNA, 19 nt, Artificial Sequence
  Description of Artificial Sequence: Synthetic oligonucleotide
uccauaacaagaccugagc

SEQ ID NO: 2584224 - RNA, 19 nt, Artificial Sequence
  Description of Artificial Sequence: Synthetic oligonucleotide
aagaccugagcaucugcac

SEQ ID NO: 2584225 - RNA, 19 nt, Artificial Sequence
  Description of Artificial Sequence: Synthetic oligonucleotide
cuaugcauguaccauuagg

SEQ ID NO: 2584226 - RNA, 19 nt, Artificial Sequence
  Description of Artificial Sequence: Synthetic oligonucleotide
acugcuuacuugcaguauc

SEQ ID NO: 2584227 - RNA, 19 nt, Artificial Sequence
  Description of Artificial Sequence: Synthetic oligonucleotide
agaccugagcaucugcacc

SEQ ID NO: 2584228 - RNA, 19 nt, Artificial Sequence
  Description of Artificial Sequence: Synthetic oligonucleotide
ugcuguuacccaaaggaug

SEQ ID NO: 2584229 - RNA, 19 nt, Artificial Sequence
  Description of Artificial Sequence: Synthetic oligonucleotide
uuuaauugauuugucuuca

SEQ ID NO: 2584230 - RNA, 19 nt, Artificial Sequence
  Description of Artificial Sequence: Synthetic oligonucleotide
ugcaugacacgauuaaucu

SEQ ID NO: 2584231 - RNA, 19 nt, Artificial Sequence
  Description of Artificial Sequence: Synthetic oligonucleotide
uguauaugagucuuccuuc

SEQ ID NO: 2584232 - RNA, 19 nt, Artificial Sequence
  Description of Artificial Sequence: Synthetic oligonucleotide
caaacauaaucucugugac

SEQ ID NO: 2584233 - RNA, 19 nt, Artificial Sequence
  Description of Artificial Sequence: Synthetic oligonucleotide
uuuggcacagcguacccag

SEQ ID NO: 2584234 - RNA, 19 nt, Artificial Sequence
  Description of Artificial Sequence: Synthetic oligonucleotide
caugcuguuacccaaagga

SEQ ID NO: 2584235 - RNA, 19 nt, Artificial Sequence
  Description of Artificial Sequence: Synthetic oligonucleotide
uaauugauuugucuucaga

SEQ ID NO: 2584236 - RNA, 19 nt, Artificial Sequence
  Description of Artificial Sequence: Synthetic oligonucleotide
uuacccaaaggauggaaug

SEQ ID NO: 2584237 - RNA, 19 nt, Artificial Sequence
  Description of Artificial Sequence: Synthetic oligonucleotide
auaugagucuuccuucuag

SEQ ID NO: 2584238 - RNA, 19 nt, Artificial Sequence
  Description of Artificial Sequence: Synthetic oligonucleotide
agacaggacccguaugucc

SEQ ID NO: 2584239 - RNA, 19 nt, Artificial Sequence
  Description of Artificial Sequence: Synthetic oligonucleotide
ugacuccauaacaagaccu

SEQ ID NO: 2584240 - RNA, 19 nt, Artificial Sequence
  Description of Artificial Sequence: Synthetic oligonucleotide
uaccauuagggcuaaaguc

SEQ ID NO: 2584241 - RNA, 19 nt, Artificial Sequence
  Description of Artificial Sequence: Synthetic oligonucleotide
uguuccaucagaagaggcu

SEQ ID NO: 2584242 - RNA, 19 nt, Artificial Sequence
  Description of Artificial Sequence: Synthetic oligonucleotide
ugcauguaccauuagggcu

SEQ ID NO: 2584243 - RNA, 19 nt, Artificial Sequence
  Description of Artificial Sequence: Synthetic oligonucleotide
uguaccauuagggcuaaag

SEQ ID NO: 2584244 - RNA, 19 nt, Artificial Sequence
  Description of Artificial Sequence: Synthetic oligonucleotide
cugaaaaguccacacuucg

SEQ ID NO: 2584245 - RNA, 19 nt, Artificial Sequence
  Description of Artificial Sequence: Synthetic oligonucleotide
ugcuggaguaauuuguuca

SEQ ID NO: 2584246 - RNA, 19 nt, Artificial Sequence
  Description of Artificial Sequence: Synthetic oligonucleotide
ugcaguaucccaaauuuua

SEQ ID NO: 2584247 - RNA, 19 nt, Artificial Sequence
  Description of Artificial Sequence: Synthetic oligonucleotide
uuauaucccagauuuucac

SEQ ID NO: 2584248 - RNA, 19 nt, Artificial Sequence
  Description of Artificial Sequence: Synthetic oligonucleotide
uaaacaguucacaccgcag

SEQ ID NO: 2584249 - RNA, 19 nt, Artificial Sequence
  Description of Artificial Sequence: Synthetic oligonucleotide
uuuagcacacugaaaucac

SEQ ID NO: 2584250 - RNA, 19 nt, Artificial Sequence
  Description of Artificial Sequence: Synthetic oligonucleotide
agaaguuggccacugaaaa

SEQ ID NO: 2584251 - RNA, 19 nt, Artificial Sequence
  Description of Artificial Sequence: Synthetic oligonucleotide
aauucagaggacuucccuu

SEQ ID NO: 2584252 - RNA, 19 nt, Artificial Sequence
  Description of Artificial Sequence: Synthetic oligonucleotide
gagaauuuggcacagcgua

SEQ ID NO: 2584253 - RNA, 19 nt, Artificial Sequence
  Description of Artificial Sequence: Synthetic oligonucleotide
gaaaaguccacacuucgaa

SEQ ID NO: 2584254 - RNA, 19 nt, Artificial Sequence
  Description of Artificial Sequence: Synthetic oligonucleotide
gauuaaucuuccaucgggc

SEQ ID NO: 2584255 - RNA, 19 nt, Artificial Sequence
  Description of Artificial Sequence: Synthetic oligonucleotide
auaaacaguucacaccgca

SEQ ID NO: 2584256 - RNA, 19 nt, Artificial Sequence
  Description of Artificial Sequence: Synthetic oligonucleotide
uuuaaauucagaggacuuc

SEQ ID NO: 2584257 - RNA, 19 nt, Artificial Sequence
  Description of Artificial Sequence: Synthetic oligonucleotide
uaaaguccacaaaauuugu

SEQ ID NO: 2584258 - RNA, 19 nt, Artificial Sequence
  Description of Artificial Sequence: Synthetic oligonucleotide
uuaacacacugcuuacuug

SEQ ID NO: 2584259 - RNA, 19 nt, Artificial Sequence
  Description of Artificial Sequence: Synthetic oligonucleotide
gauuugucuucagaagccg

SEQ ID NO: 2584260 - RNA, 19 nt, Artificial Sequence
  Description of Artificial Sequence: Synthetic oligonucleotide
uaaucuuccaucgggcgag

SEQ ID NO: 2584261 - RNA, 19 nt, Artificial Sequence
  Description of Artificial Sequence: Synthetic oligonucleotide
ugaaaaguccacacuucga

SEQ ID NO: 2584262 - RNA, 19 nt, Artificial Sequence
  Description of Artificial Sequence: Synthetic oligonucleotide
uuauuaacacacugcuuac

SEQ ID NO: 2584263 - RNA, 19 nt, Artificial Sequence
  Description of Artificial Sequence: Synthetic oligonucleotide
uccuacagaaucugagaag

SEQ ID NO: 2584264 - RNA, 19 nt, Artificial Sequence
  Description of Artificial Sequence: Synthetic oligonucleotide
ugaagcuaugcauguacca

SEQ ID NO: 2584265 - RNA, 19 nt, Artificial Sequence
  Description of Artificial Sequence: Synthetic oligonucleotide
uuaauugauuugucuucag

SEQ ID NO: 2584266 - RNA, 19 nt, Artificial Sequence
  Description of Artificial Sequence: Synthetic oligonucleotide
gauggaaugauaaacaguu

SEQ ID NO: 2584267 - RNA, 19 nt, Artificial Sequence
  Description of Artificial Sequence: Synthetic oligonucleotide
uuguucacucuuauauccc

SEQ ID NO: 2584268 - RNA, 19 nt, Artificial Sequence
  Description of Artificial Sequence: Synthetic oligonucleotide
uagcacacugaaaucacac

SEQ ID NO: 2584269 - RNA, 19 nt, Artificial Sequence
  Description of Artificial Sequence: Synthetic oligonucleotide
auuaacacacugcuuacuu

SEQ ID NO: 2584270 - RNA, 19 nt, Artificial Sequence
  Description of Artificial Sequence: Synthetic oligonucleotide
uccuaaguguuccaucaga

SEQ ID NO: 2584271 - RNA, 19 nt, Artificial Sequence
  Description of Artificial Sequence: Synthetic oligonucleotide
ucaaauccuacagaaucug

SEQ ID NO: 2584272 - RNA, 19 nt, Artificial Sequence
  Description of Artificial Sequence: Synthetic oligonucleotide
uguucacucuuauauccca

SEQ ID NO: 2584273 - RNA, 19 nt, Artificial Sequence
  Description of Artificial Sequence: Synthetic oligonucleotide
cuaaguguuccaucagaag

SEQ ID NO: 2584274 - RNA, 19 nt, Artificial Sequence
  Description of Artificial Sequence: Synthetic oligonucleotide
agaagccguagccagaagu

SEQ ID NO: 2584275 - RNA, 19 nt, Artificial Sequence
  Description of Artificial Sequence: Synthetic oligonucleotide
uggaguaauuuguucacuc

SEQ ID NO: 2584276 - RNA, 19 nt, Artificial Sequence
  Description of Artificial Sequence: Synthetic oligonucleotide
ucugucucgugaagcagag

SEQ ID NO: 2584277 - RNA, 19 nt, Artificial Sequence
  Description of Artificial Sequence: Synthetic oligonucleotide
gaauuuggcacagcguacc

SEQ ID NO: 2584278 - RNA, 19 nt, Artificial Sequence
  Description of Artificial Sequence: Synthetic oligonucleotide
acgauuaaucuuccaucgg

SEQ ID NO: 2584279 - RNA, 19 nt, Artificial Sequence
  Description of Artificial Sequence: Synthetic oligonucleotide
gaaugauaaacaguucaca

SEQ ID NO: 2584280 - RNA, 19 nt, Artificial Sequence
  Description of Artificial Sequence: Synthetic oligonucleotide
uuagcacacugaaaucaca

SEQ ID NO: 2584281 - RNA, 19 nt, Artificial Sequence
  Description of Artificial Sequence: Synthetic oligonucleotide
uguuaacuugauagugcug

SEQ ID NO: 2584282 - RNA, 19 nt, Artificial Sequence
  Description of Artificial Sequence: Synthetic oligonucleotide
aguucugucucgugaagca

SEQ ID NO: 2584283 - RNA, 19 nt, Artificial Sequence
  Description of Artificial Sequence: Synthetic oligonucleotide
guuuuauccucgcugcaug

SEQ ID NO: 2584284 - RNA, 19 nt, Artificial Sequence
  Description of Artificial Sequence: Synthetic oligonucleotide
uccuaucaggaacccagag

SEQ ID NO: 2584285 - RNA, 19 nt, Artificial Sequence
  Description of Artificial Sequence: Synthetic oligonucleotide
cuuacuugcaguaucccaa

SEQ ID NO: 2584286 - RNA, 19 nt, Artificial Sequence
  Description of Artificial Sequence: Synthetic oligonucleotide
augcgaacaguucuccguc

SEQ ID NO: 2584287 - RNA, 19 nt, Artificial Sequence
  Description of Artificial Sequence: Synthetic oligonucleotide
uuccauauuuuaauugauu

SEQ ID NO: 2584288 - RNA, 19 nt, Artificial Sequence
  Description of Artificial Sequence: Synthetic oligonucleotide
uauccucgcugcaugacac

SEQ ID NO: 2584289 - RNA, 19 nt, Artificial Sequence
  Description of Artificial Sequence: Synthetic oligonucleotide
ucgggcgagaauuuggcac

SEQ ID NO: 2584290 - RNA, 19 nt, Artificial Sequence
  Description of Artificial Sequence: Synthetic oligonucleotide
ugaugcgaacaguucuccg

SEQ ID NO: 2584291 - RNA, 19 nt, Artificial Sequence
  Description of Artificial Sequence: Synthetic oligonucleotide
acccguauguccuuggagu

SEQ ID NO: 2584292 - RNA, 19 nt, Artificial Sequence
  Description of Artificial Sequence: Synthetic oligonucleotide
auccuacagaaucugagaa

SEQ ID NO: 2584293 - RNA, 19 nt, Artificial Sequence
  Description of Artificial Sequence: Synthetic oligonucleotide
gucuucagaagccguagcc

SEQ ID NO: 2584294 - RNA, 19 nt, Artificial Sequence
  Description of Artificial Sequence: Synthetic oligonucleotide
cugaagcuaugcauguacc

SEQ ID NO: 2584295 - RNA, 19 nt, Artificial Sequence
  Description of Artificial Sequence: Synthetic oligonucleotide
agcuguuaacuugauagug

SEQ ID NO: 2584296 - RNA, 19 nt, Artificial Sequence
  Description of Artificial Sequence: Synthetic oligonucleotide
uuuuauccucgcugcauga

SEQ ID NO: 2584297 - RNA, 19 nt, Artificial Sequence
  Description of Artificial Sequence: Synthetic oligonucleotide
acagcaaagacaggacccg

SEQ ID NO: 2584298 - RNA, 19 nt, Artificial Sequence
  Description of Artificial Sequence: Synthetic oligonucleotide
ucuccguccuuugaaaaug

SEQ ID NO: 2584299 - RNA, 19 nt, Artificial Sequence
  Description of Artificial Sequence: Synthetic oligonucleotide
uacagaaucugagaaguua

SEQ ID NO: 2584300 - RNA, 19 nt, Artificial Sequence
  Description of Artificial Sequence: Synthetic oligonucleotide
uccagaauccuaaguguuc

SEQ ID NO: 2584301 - RNA, 19 nt, Artificial Sequence
  Description of Artificial Sequence: Synthetic oligonucleotide
aguccacaaaauuugucaa

SEQ ID NO: 2584302 - RNA, 19 nt, Artificial Sequence
  Description of Artificial Sequence: Synthetic oligonucleotide
aagacaggacccguauguc

SEQ ID NO: 2584303 - RNA, 19 nt, Artificial Sequence
  Description of Artificial Sequence: Synthetic oligonucleotide
aagcuaugcauguaccauu

SEQ ID NO: 2584304 - RNA, 19 nt, Artificial Sequence
  Description of Artificial Sequence: Synthetic oligonucleotide
gcuguuacccaaaggaugg

SEQ ID NO: 2584305 - RNA, 19 nt, Artificial Sequence
  Description of Artificial Sequence: Synthetic oligonucleotide
uuaacuugauagugcugga

SEQ ID NO: 2584306 - RNA, 19 nt, Artificial Sequence
  Description of Artificial Sequence: Synthetic oligonucleotide
gaauccuaaguguuccauc

SEQ ID NO: 2584307 - RNA, 19 nt, Artificial Sequence
  Description of Artificial Sequence: Synthetic oligonucleotide
uaacaagaccugagcaucu

SEQ ID NO: 2584308 - RNA, 19 nt, Artificial Sequence
  Description of Artificial Sequence: Synthetic oligonucleotide
cugcuuacuugcaguaucc

SEQ ID NO: 2584309 - RNA, 19 nt, Artificial Sequence
  Description of Artificial Sequence: Synthetic oligonucleotide
ucagaggacuucccuuucc

SEQ ID NO: 2584310 - RNA, 19 nt, Artificial Sequence
  Description of Artificial Sequence: Synthetic oligonucleotide
agaauuuggcacagcguac

SEQ ID NO: 2584311 - RNA, 19 nt, Artificial Sequence
  Description of Artificial Sequence: Synthetic oligonucleotide
gcgagaauuuggcacagcg

SEQ ID NO: 2584312 - RNA, 19 nt, Artificial Sequence
  Description of Artificial Sequence: Synthetic oligonucleotide
ugugaccaugcuguuaccc

SEQ ID NO: 2584313 - RNA, 19 nt, Artificial Sequence
  Description of Artificial Sequence: Synthetic oligonucleotide
uucacagugugaucagaac

SEQ ID NO: 2584314 - RNA, 19 nt, Artificial Sequence
  Description of Artificial Sequence: Synthetic oligonucleotide
ucccaaauuuuaauaguuu

SEQ ID NO: 2584315 - RNA, 19 nt, Artificial Sequence
  Description of Artificial Sequence: Synthetic oligonucleotide
ucacucuuauaucccagau

SEQ ID NO: 2584316 - RNA, 19 nt, Artificial Sequence
  Description of Artificial Sequence: Synthetic oligonucleotide
gacuccauaacaagaccug

SEQ ID NO: 2584317 - RNA, 19 nt, Artificial Sequence
  Description of Artificial Sequence: Synthetic oligonucleotide
uguguauaugagucuuccu

SEQ ID NO: 2584318 - RNA, 19 nt, Artificial Sequence
  Description of Artificial Sequence: Synthetic oligonucleotide
uauuaacacacugcuuacu

SEQ ID NO: 2584319 - RNA, 19 nt, Artificial Sequence
  Description of Artificial Sequence: Synthetic oligonucleotide
agagccuaaacaguucugu

SEQ ID NO: 2584320 - RNA, 19 nt, Artificial Sequence
  Description of Artificial Sequence: Synthetic oligonucleotide
caucgggcgagaauuuggc

SEQ ID NO: 2584321 - RNA, 19 nt, Artificial Sequence
  Description of Artificial Sequence: Synthetic oligonucleotide
gauccagaauccuaagugu

SEQ ID NO: 2584322 - RNA, 19 nt, Artificial Sequence
  Description of Artificial Sequence: Synthetic oligonucleotide
gugacuccauaacaagacc

SEQ ID NO: 2584323 - RNA, 19 nt, Artificial Sequence
  Description of Artificial Sequence: Synthetic oligonucleotide
auucagaggacuucccuuu

SEQ ID NO: 2584324 - RNA, 19 nt, Artificial Sequence
  Description of Artificial Sequence: Synthetic oligonucleotide
uaggagauccagaauccua

SEQ ID NO: 2584325 - RNA, 19 nt, Artificial Sequence
  Description of Artificial Sequence: Synthetic oligonucleotide
augacacgauuaaucuucc

SEQ ID NO: 2584326 - RNA, 19 nt, Artificial Sequence
  Description of Artificial Sequence: Synthetic oligonucleotide
aagcgcuggcgguacaugu

SEQ ID NO: 2584327 - RNA, 19 nt, Artificial Sequence
  Description of Artificial Sequence: Synthetic oligonucleotide
guguguauaugagucuucc

SEQ ID NO: 2584328 - RNA, 19 nt, Artificial Sequence
  Description of Artificial Sequence: Synthetic oligonucleotide
cugagaaguuauuaacaca

SEQ ID NO: 2584329 - RNA, 19 nt, Artificial Sequence
  Description of Artificial Sequence: Synthetic oligonucleotide
gaaccugcugaagcuaugc

SEQ ID NO: 2584330 - RNA, 19 nt, Artificial Sequence
  Description of Artificial Sequence: Synthetic oligonucleotide
gacccguauguccuuggag

SEQ ID NO: 2584331 - RNA, 19 nt, Artificial Sequence
  Description of Artificial Sequence: Synthetic oligonucleotide
agugugaucagaaccugcu

SEQ ID NO: 2584332 - RNA, 19 nt, Artificial Sequence
  Description of Artificial Sequence: Synthetic oligonucleotide
uccuucuaggagauccaga

SEQ ID NO: 2584333 - RNA, 19 nt, Artificial Sequence
  Description of Artificial Sequence: Synthetic oligonucleotide
aggaacccagagccuaaac

SEQ ID NO: 2584334 - RNA, 19 nt, Artificial Sequence
  Description of Artificial Sequence: Synthetic oligonucleotide
gaagaggcugugaccaugc

SEQ ID NO: 2584335 - RNA, 19 nt, Artificial Sequence
  Description of Artificial Sequence: Synthetic oligonucleotide
uggcacagcguacccagug

SEQ ID NO: 2584336 - RNA, 19 nt, Artificial Sequence
  Description of Artificial Sequence: Synthetic oligonucleotide
ugaucagaaccugcugaag

SEQ ID NO: 2584337 - RNA, 19 nt, Artificial Sequence
  Description of Artificial Sequence: Synthetic oligonucleotide
uuacuugcaguaucccaaa

SEQ ID NO: 2584338 - RNA, 19 nt, Artificial Sequence
  Description of Artificial Sequence: Synthetic oligonucleotide
ugucgguacagggaguaga

SEQ ID NO: 2584339 - RNA, 19 nt, Artificial Sequence
  Description of Artificial Sequence: Synthetic oligonucleotide
gaugcgaacaguucuccgu

SEQ ID NO: 2584340 - RNA, 19 nt, Artificial Sequence
  Description of Artificial Sequence: Synthetic oligonucleotide
uauaugagucuuccuucua

SEQ ID NO: 2584341 - RNA, 19 nt, Artificial Sequence
  Description of Artificial Sequence: Synthetic oligonucleotide
gauaaacaguucacaccgc

SEQ ID NO: 2584342 - RNA, 19 nt, Artificial Sequence
  Description of Artificial Sequence: Synthetic oligonucleotide
uguccuuggaguguguaua

SEQ ID NO: 2584343 - RNA, 19 nt, Artificial Sequence
  Description of Artificial Sequence: Synthetic oligonucleotide
uucgaacuggagccgugug

SEQ ID NO: 2584344 - RNA, 19 nt, Artificial Sequence
  Description of Artificial Sequence: Synthetic oligonucleotide
guacagggaguagaggaag

SEQ ID NO: 2584345 - RNA, 19 nt, Artificial Sequence
  Description of Artificial Sequence: Synthetic oligonucleotide
aagccguagccagaaguug

SEQ ID NO: 2584346 - RNA, 19 nt, Artificial Sequence
  Description of Artificial Sequence: Synthetic oligonucleotide
auccuaaguguuccaucag

SEQ ID NO: 2584347 - RNA, 19 nt, Artificial Sequence
  Description of Artificial Sequence: Synthetic oligonucleotide
uucuccguccuuugaaaau

SEQ ID NO: 2584348 - RNA, 19 nt, Artificial Sequence
  Description of Artificial Sequence: Synthetic oligonucleotide
uaaucucugugacuccaua

SEQ ID NO: 2584349 - RNA, 19 nt, Artificial Sequence
  Description of Artificial Sequence: Synthetic oligonucleotide
agccgugugugcuuuaaau

SEQ ID NO: 2584350 - RNA, 19 nt, Artificial Sequence
  Description of Artificial Sequence: Synthetic oligonucleotide
cagugugaucagaaccugc

SEQ ID NO: 2584351 - RNA, 19 nt, Artificial Sequence
  Description of Artificial Sequence: Synthetic oligonucleotide
guacccagugugugugucg

SEQ ID NO: 2584352 - RNA, 19 nt, Artificial Sequence
  Description of Artificial Sequence: Synthetic oligonucleotide
aguucuccguccuuugaaa

SEQ ID NO: 2584353 - RNA, 19 nt, Artificial Sequence
  Description of Artificial Sequence: Synthetic oligonucleotide
ucucgugaagcagaggcua

SEQ ID NO: 2584354 - RNA, 19 nt, Artificial Sequence
  Description of Artificial Sequence: Synthetic oligonucleotide
uuccuaucaggaacccaga

SEQ ID NO: 2584355 - RNA, 19 nt, Artificial Sequence
  Description of Artificial Sequence: Synthetic oligonucleotide
cugugacuccauaacaaga

SEQ ID NO: 2584356 - RNA, 19 nt, Artificial Sequence
  Description of Artificial Sequence: Synthetic oligonucleotide
agccguagccagaaguugg

SEQ ID NO: 2584357 - RNA, 19 nt, Artificial Sequence
  Description of Artificial Sequence: Synthetic oligonucleotide
aguguguauaugagucuuc

SEQ ID NO: 2584358 - RNA, 19 nt, Artificial Sequence
  Description of Artificial Sequence: Synthetic oligonucleotide
gcuguuaacuugauagugc

SEQ ID NO: 2584359 - RNA, 19 nt, Artificial Sequence
  Description of Artificial Sequence: Synthetic oligonucleotide
uuuauccucgcugcaugac

SEQ ID NO: 2584360 - RNA, 19 nt, Artificial Sequence
  Description of Artificial Sequence: Synthetic oligonucleotide
ugcgaacaguucuccgucc

SEQ ID NO: 2584361 - RNA, 19 nt, Artificial Sequence
  Description of Artificial Sequence: Synthetic oligonucleotide
uucacaccgcagcuguuaa

SEQ ID NO: 2584362 - RNA, 19 nt, Artificial Sequence
  Description of Artificial Sequence: Synthetic oligonucleotide
uguuacccaaaggauggaa

SEQ ID NO: 2584363 - RNA, 19 nt, Artificial Sequence
  Description of Artificial Sequence: Synthetic oligonucleotide
agcaucugcaccuccugau

SEQ ID NO: 2584364 - RNA, 19 nt, Artificial Sequence
  Description of Artificial Sequence: Synthetic oligonucleotide
ggaacccagagccuaaaca

SEQ ID NO: 2584365 - RNA, 19 nt, Artificial Sequence
  Description of Artificial Sequence: Synthetic oligonucleotide
caaagacaggacccguaug

SEQ ID NO: 2584366 - RNA, 19 nt, Artificial Sequence
  Description of Artificial Sequence: Synthetic oligonucleotide
cauaacaagaccugagcau

SEQ ID NO: 2584367 - RNA, 19 nt, Artificial Sequence
  Description of Artificial Sequence: Synthetic oligonucleotide
ccuaucaggaacccagagc

SEQ ID NO: 2584368 - RNA, 19 nt, Artificial Sequence
  Description of Artificial Sequence: Synthetic oligonucleotide
caguucugucucgugaagc

SEQ ID NO: 2584369 - RNA, 19 nt, Artificial Sequence
  Description of Artificial Sequence: Synthetic oligonucleotide
guaccauuagggcuaaagu

SEQ ID NO: 2584370 - RNA, 19 nt, Artificial Sequence
  Description of Artificial Sequence: Synthetic oligonucleotide
gucgguacagggaguagag

SEQ ID NO: 2584371 - RNA, 19 nt, Artificial Sequence
  Description of Artificial Sequence: Synthetic oligonucleotide
agaagaggcugugaccaug

SEQ ID NO: 2584372 - RNA, 19 nt, Artificial Sequence
  Description of Artificial Sequence: Synthetic oligonucleotide
cacagugugaucagaaccu

SEQ ID NO: 2584373 - RNA, 19 nt, Artificial Sequence
  Description of Artificial Sequence: Synthetic oligonucleotide
aguuggccacugaaaaguc

SEQ ID NO: 2584374 - RNA, 19 nt, Artificial Sequence
  Description of Artificial Sequence: Synthetic oligonucleotide
ccgugugugcuuuaaauuc

SEQ ID NO: 2584375 - RNA, 19 nt, Artificial Sequence
  Description of Artificial Sequence: Synthetic oligonucleotide
ucgguacagggaguagagg

SEQ ID NO: 2584376 - RNA, 19 nt, Artificial Sequence
  Description of Artificial Sequence: Synthetic oligonucleotide
aggagauccagaauccuaa

SEQ ID NO: 2584377 - RNA, 19 nt, Artificial Sequence
  Description of Artificial Sequence: Synthetic oligonucleotide
gccuaaacaguucugucuc

SEQ ID NO: 2584378 - RNA, 19 nt, Artificial Sequence
  Description of Artificial Sequence: Synthetic oligonucleotide
cugaugcgaacaguucucc

SEQ ID NO: 2584379 - RNA, 19 nt, Artificial Sequence
  Description of Artificial Sequence: Synthetic oligonucleotide
ugcuuacuugcaguauccc

SEQ ID NO: 2584380 - RNA, 19 nt, Artificial Sequence
  Description of Artificial Sequence: Synthetic oligonucleotide
agaauccuaaguguuccau

SEQ ID NO: 2584381 - RNA, 19 nt, Artificial Sequence
  Description of Artificial Sequence: Synthetic oligonucleotide
acuccauaacaagaccuga

SEQ ID NO: 2584382 - RNA, 19 nt, Artificial Sequence
  Description of Artificial Sequence: Synthetic oligonucleotide
caccgcagcuguuaacuug

SEQ ID NO: 2584383 - RNA, 19 nt, Artificial Sequence
  Description of Artificial Sequence: Synthetic oligonucleotide
acagcguacccagugugug

SEQ ID NO: 2584384 - RNA, 19 nt, Artificial Sequence
  Description of Artificial Sequence: Synthetic oligonucleotide
cuguuaacuugauagugcu

SEQ ID NO: 2584385 - RNA, 19 nt, Artificial Sequence
  Description of Artificial Sequence: Synthetic oligonucleotide
gcuggaguaauuuguucac

SEQ ID NO: 2584386 - RNA, 19 nt, Artificial Sequence
  Description of Artificial Sequence: Synthetic oligonucleotide
ugacacgauuaaucuucca

SEQ ID NO: 2584387 - RNA, 19 nt, Artificial Sequence
  Description of Artificial Sequence: Synthetic oligonucleotide
ugugucgguacagggagua

SEQ ID NO: 2584388 - RNA, 19 nt, Artificial Sequence
  Description of Artificial Sequence: Synthetic oligonucleotide
cagggaguagaggaagcgc

SEQ ID NO: 2584389 - RNA, 19 nt, Artificial Sequence
  Description of Artificial Sequence: Synthetic oligonucleotide
auccucgcugcaugacacg

SEQ ID NO: 2584390 - RNA, 19 nt, Artificial Sequence
  Description of Artificial Sequence: Synthetic oligonucleotide
gagauccagaauccuaagu

SEQ ID NO: 2584391 - RNA, 19 nt, Artificial Sequence
  Description of Artificial Sequence: Synthetic oligonucleotide
ugauagugcuggaguaauu

SEQ ID NO: 2584392 - RNA, 19 nt, Artificial Sequence
  Description of Artificial Sequence: Synthetic oligonucleotide
agcguacccagugugugug

SEQ ID NO: 2584393 - RNA, 19 nt, Artificial Sequence
  Description of Artificial Sequence: Synthetic oligonucleotide
aggacccguauguccuugg

SEQ ID NO: 2584394 - RNA, 19 nt, Artificial Sequence
  Description of Artificial Sequence: Synthetic oligonucleotide
auuugucuucagaagccgu

SEQ ID NO: 2584395 - RNA, 19 nt, Artificial Sequence
  Description of Artificial Sequence: Synthetic oligonucleotide
ccagaauccuaaguguucc

SEQ ID NO: 2584396 - RNA, 19 nt, Artificial Sequence
  Description of Artificial Sequence: Synthetic oligonucleotide
aagaggcugugaccaugcu

SEQ ID NO: 2584397 - RNA, 19 nt, Artificial Sequence
  Description of Artificial Sequence: Synthetic oligonucleotide
auguccuuggaguguguau

SEQ ID NO: 2584398 - RNA, 19 nt, Artificial Sequence
  Description of Artificial Sequence: Synthetic oligonucleotide
gaccugagcaucugcaccu

SEQ ID NO: 2584399 - RNA, 19 nt, Artificial Sequence
  Description of Artificial Sequence: Synthetic oligonucleotide
uccucgcugcaugacacga

SEQ ID NO: 2584400 - RNA, 19 nt, Artificial Sequence
  Description of Artificial Sequence: Synthetic oligonucleotide
ggagauccagaauccuaag

SEQ ID NO: 2584401 - RNA, 19 nt, Artificial Sequence
  Description of Artificial Sequence: Synthetic oligonucleotide
acacuucgaacuggagccg

SEQ ID NO: 2584402 - RNA, 19 nt, Artificial Sequence
  Description of Artificial Sequence: Synthetic oligonucleotide
cagagccuaaacaguucug

SEQ ID NO: 2584403 - RNA, 19 nt, Artificial Sequence
  Description of Artificial Sequence: Synthetic oligonucleotide
gaagcuaugcauguaccau

SEQ ID NO: 2584404 - RNA, 19 nt, Artificial Sequence
  Description of Artificial Sequence: Synthetic oligonucleotide
cuccugaugcgaacaguuc

SEQ ID NO: 2584405 - RNA, 19 nt, Artificial Sequence
  Description of Artificial Sequence: Synthetic oligonucleotide
aguuauuaacacacugcuu

SEQ ID NO: 2584406 - RNA, 19 nt, Artificial Sequence
  Description of Artificial Sequence: Synthetic oligonucleotide
ccuaaacaguucugucucg

SEQ ID NO: 2584407 - RNA, 19 nt, Artificial Sequence
  Description of Artificial Sequence: Synthetic oligonucleotide
aucaggaacccagagccua

SEQ ID NO: 2584408 - RNA, 19 nt, Artificial Sequence
  Description of Artificial Sequence: Synthetic oligonucleotide
ccaucgggcgagaauuugg

SEQ ID NO: 2584409 - RNA, 19 nt, Artificial Sequence
  Description of Artificial Sequence: Synthetic oligonucleotide
ccauaacaagaccugagca

SEQ ID NO: 2584410 - RNA, 19 nt, Artificial Sequence
  Description of Artificial Sequence: Synthetic oligonucleotide
gcuuacuugcaguauccca

SEQ ID NO: 2584411 - RNA, 19 nt, Artificial Sequence
  Description of Artificial Sequence: Synthetic oligonucleotide
aucgggcgagaauuuggca

SEQ ID NO: 2584412 - RNA, 19 nt, Artificial Sequence
  Description of Artificial Sequence: Synthetic oligonucleotide
auuuggcacagcguaccca

SEQ ID NO: 2584413 - RNA, 19 nt, Artificial Sequence
  Description of Artificial Sequence: Synthetic oligonucleotide
uauguccuuggagugugua

SEQ ID NO: 2584414 - RNA, 19 nt, Artificial Sequence
  Description of Artificial Sequence: Synthetic oligonucleotide
guucuccguccuuugaaaa

SEQ ID NO: 2584415 - RNA, 19 nt, Artificial Sequence
  Description of Artificial Sequence: Synthetic oligonucleotide
cuugauagugcuggaguaa

SEQ ID NO: 2584416 - RNA, 19 nt, Artificial Sequence
  Description of Artificial Sequence: Synthetic oligonucleotide
uggcgguacauguuccaua

SEQ ID NO: 2584417 - RNA, 19 nt, Artificial Sequence
  Description of Artificial Sequence: Synthetic oligonucleotide
augcuguuacccaaaggau

SEQ ID NO: 2584418 - RNA, 19 nt, Artificial Sequence
  Description of Artificial Sequence: Synthetic oligonucleotide
gacaggacccguauguccu

SEQ ID NO: 2584419 - RNA, 19 nt, Artificial Sequence
  Description of Artificial Sequence: Synthetic oligonucleotide
ucgcugcaugacacgauua

SEQ ID NO: 2584420 - RNA, 19 nt, Artificial Sequence
  Description of Artificial Sequence: Synthetic oligonucleotide
uccguccuuugaaaaugua

SEQ ID NO: 2584421 - RNA, 19 nt, Artificial Sequence
  Description of Artificial Sequence: Synthetic oligonucleotide
ucacaccgcagcuguuaac

SEQ ID NO: 2584422 - RNA, 19 nt, Artificial Sequence
  Description of Artificial Sequence: Synthetic oligonucleotide
agcuaugcauguaccauua

SEQ ID NO: 2584423 - RNA, 19 nt, Artificial Sequence
  Description of Artificial Sequence: Synthetic oligonucleotide
ggaguaauuuguucacucu

SEQ ID NO: 2584424 - RNA, 19 nt, Artificial Sequence
  Description of Artificial Sequence: Synthetic oligonucleotide
ccugaugcgaacaguucuc

SEQ ID NO: 2584425 - RNA, 19 nt, Artificial Sequence
  Description of Artificial Sequence: Synthetic oligonucleotide
gagaaguuauuaacacacu

SEQ ID NO: 2584426 - RNA, 19 nt, Artificial Sequence
  Description of Artificial Sequence: Synthetic oligonucleotide
uuccaucgggcgagaauuu

SEQ ID NO: 2584427 - RNA, 19 nt, Artificial Sequence
  Description of Artificial Sequence: Synthetic oligonucleotide
ccacaaaauuugucaaauc

SEQ ID NO: 2584428 - RNA, 19 nt, Artificial Sequence
  Description of Artificial Sequence: Synthetic oligonucleotide
ccuaaguguuccaucagaa

SEQ ID NO: 2584429 - RNA, 19 nt, Artificial Sequence
  Description of Artificial Sequence: Synthetic oligonucleotide
gugugugucgguacaggga

SEQ ID NO: 2584430 - RNA, 19 nt, Artificial Sequence
  Description of Artificial Sequence: Synthetic oligonucleotide
gcuaugcauguaccauuag

SEQ ID NO: 2584431 - RNA, 19 nt, Artificial Sequence
  Description of Artificial Sequence: Synthetic oligonucleotide
cagaauccuaaguguucca

SEQ ID NO: 2584432 - RNA, 19 nt, Artificial Sequence
  Description of Artificial Sequence: Synthetic oligonucleotide
agaaccugcugaagcuaug

SEQ ID NO: 2584433 - RNA, 19 nt, Artificial Sequence
  Description of Artificial Sequence: Synthetic oligonucleotide
gaguguguauaugagucuu

SEQ ID NO: 2584434 - RNA, 19 nt, Artificial Sequence
  Description of Artificial Sequence: Synthetic oligonucleotide
gaggaagcgcuggcgguac

SEQ ID NO: 2584435 - RNA, 19 nt, Artificial Sequence
  Description of Artificial Sequence: Synthetic oligonucleotide
acccagagccuaaacaguu

SEQ ID NO: 2584436 - RNA, 19 nt, Artificial Sequence
  Description of Artificial Sequence: Synthetic oligonucleotide
caguucuccguccuuugaa

SEQ ID NO: 2584437 - RNA, 19 nt, Artificial Sequence
  Description of Artificial Sequence: Synthetic oligonucleotide
ccaugcuguuacccaaagg

SEQ ID NO: 2584438 - RNA, 19 nt, Artificial Sequence
  Description of Artificial Sequence: Synthetic oligonucleotide
gcauguaccauuagggcua

SEQ ID NO: 2584439 - RNA, 19 nt, Artificial Sequence
  Description of Artificial Sequence: Synthetic oligonucleotide
acuggagccgugugugcuu

SEQ ID NO: 2584440 - RNA, 19 nt, Artificial Sequence
  Description of Artificial Sequence: Synthetic oligonucleotide
ccauuagggcuaaagucca

SEQ ID NO: 2584441 - RNA, 19 nt, Artificial Sequence
  Description of Artificial Sequence: Synthetic oligonucleotide
aaucuuccaucgggcgaga

SEQ ID NO: 2584442 - RNA, 19 nt, Artificial Sequence
  Description of Artificial Sequence: Synthetic oligonucleotide
gaagccguagccagaaguu

SEQ ID NO: 2584443 - RNA, 19 nt, Artificial Sequence
  Description of Artificial Sequence: Synthetic oligonucleotide
guuacccaaaggauggaau

SEQ ID NO: 2584444 - RNA, 19 nt, Artificial Sequence
  Description of Artificial Sequence: Synthetic oligonucleotide
cuuccaucgggcgagaauu

SEQ ID NO: 2584445 - RNA, 19 nt, Artificial Sequence
  Description of Artificial Sequence: Synthetic oligonucleotide
cccguauguccuuggagug

SEQ ID NO: 2584446 - RNA, 19 nt, Artificial Sequence
  Description of Artificial Sequence: Synthetic oligonucleotide
cuuuccuaucaggaaccca

SEQ ID NO: 2584447 - RNA, 19 nt, Artificial Sequence
  Description of Artificial Sequence: Synthetic oligonucleotide
ccuacagaaucugagaagu

SEQ ID NO: 2584448 - RNA, 19 nt, Artificial Sequence
  Description of Artificial Sequence: Synthetic oligonucleotide
cacaccgcagcuguuaacu

SEQ ID NO: 2584449 - RNA, 19 nt, Artificial Sequence
  Description of Artificial Sequence: Synthetic oligonucleotide
acuucgaacuggagccgug

SEQ ID NO: 2584450 - RNA, 19 nt, Artificial Sequence
  Description of Artificial Sequence: Synthetic oligonucleotide
caguucacaccgcagcugu

SEQ ID NO: 2584451 - RNA, 19 nt, Artificial Sequence
  Description of Artificial Sequence: Synthetic oligonucleotide
ggauggaaugauaaacagu

SEQ ID NO: 2584452 - RNA, 19 nt, Artificial Sequence
  Description of Artificial Sequence: Synthetic oligonucleotide
agcaaagacaggacccgua

SEQ ID NO: 2584453 - RNA, 19 nt, Artificial Sequence
  Description of Artificial Sequence: Synthetic oligonucleotide
acaccgcagcuguuaacuu

SEQ ID NO: 2584454 - RNA, 19 nt, Artificial Sequence
  Description of Artificial Sequence: Synthetic oligonucleotide
cugucucgugaagcagagg

SEQ ID NO: 2584455 - RNA, 19 nt, Artificial Sequence
  Description of Artificial Sequence: Synthetic oligonucleotide
ggaguguguauaugagucu

SEQ ID NO: 2584456 - RNA, 19 nt, Artificial Sequence
  Description of Artificial Sequence: Synthetic oligonucleotide
ggcuaaaguccacaaaauu

SEQ ID NO: 2584457 - RNA, 19 nt, Artificial Sequence
  Description of Artificial Sequence: Synthetic oligonucleotide
guccacacuucgaacugga

SEQ ID NO: 2584458 - RNA, 19 nt, Artificial Sequence
  Description of Artificial Sequence: Synthetic oligonucleotide
cagaagccguagccagaag

SEQ ID NO: 2584459 - RNA, 19 nt, Artificial Sequence
  Description of Artificial Sequence: Synthetic oligonucleotide
gaacaguucuccguccuuu

SEQ ID NO: 2584460 - RNA, 19 nt, Artificial Sequence
  Description of Artificial Sequence: Synthetic oligonucleotide
ccguccuuugaaaauguaa

SEQ ID NO: 2584461 - RNA, 19 nt, Artificial Sequence
  Description of Artificial Sequence: Synthetic oligonucleotide
ggcgguacauguuccauau

SEQ ID NO: 2584462 - RNA, 19 nt, Artificial Sequence
  Description of Artificial Sequence: Synthetic oligonucleotide
cgaacuggagccgugugug

SEQ ID NO: 2584463 - RNA, 19 nt, Artificial Sequence
  Description of Artificial Sequence: Synthetic oligonucleotide
cccaaauuuuaauaguuuu

SEQ ID NO: 2584464 - RNA, 19 nt, Artificial Sequence
  Description of Artificial Sequence: Synthetic oligonucleotide
gugucgguacagggaguag

SEQ ID NO: 2584465 - RNA, 19 nt, Artificial Sequence
  Description of Artificial Sequence: Synthetic oligonucleotide
gagccgugugugcuuuaaa

SEQ ID NO: 2584466 - RNA, 19 nt, Artificial Sequence
  Description of Artificial Sequence: Synthetic oligonucleotide
cagaaccugcugaagcuau

SEQ ID NO: 2584467 - RNA, 19 nt, Artificial Sequence
  Description of Artificial Sequence: Synthetic oligonucleotide
cacucuuauaucccagauu

SEQ ID NO: 2584468 - RNA, 19 nt, Artificial Sequence
  Description of Artificial Sequence: Synthetic oligonucleotide
cguauguccuuggagugug

SEQ ID NO: 2584469 - RNA, 19 nt, Artificial Sequence
  Description of Artificial Sequence: Synthetic oligonucleotide
caggacccguauguccuug

SEQ ID NO: 2584470 - RNA, 19 nt, Artificial Sequence
  Description of Artificial Sequence: Synthetic oligonucleotide
cccagagccuaaacaguuc

SEQ ID NO: 2584471 - RNA, 19 nt, Artificial Sequence
  Description of Artificial Sequence: Synthetic oligonucleotide
guccuuggaguguguauau

SEQ ID NO: 2584472 - RNA, 19 nt, Artificial Sequence
  Description of Artificial Sequence: Synthetic oligonucleotide
gccguagccagaaguuggc

SEQ ID NO: 2584473 - RNA, 19 nt, Artificial Sequence
  Description of Artificial Sequence: Synthetic oligonucleotide
ccuuuccuaucaggaaccc

SEQ ID NO: 2584474 - RNA, 19 nt, Artificial Sequence
  Description of Artificial Sequence: Synthetic oligonucleotide
cacagcguacccagugugu

SEQ ID NO: 2584475 - RNA, 19 nt, Artificial Sequence
  Description of Artificial Sequence: Synthetic oligonucleotide
cuaggagauccagaauccu

SEQ ID NO: 2584476 - RNA, 19 nt, Artificial Sequence
  Description of Artificial Sequence: Synthetic oligonucleotide
cagaaucugagaaguuauu

SEQ ID NO: 2584477 - RNA, 19 nt, Artificial Sequence
  Description of Artificial Sequence: Synthetic oligonucleotide
gcgcuggcgguacauguuc

SEQ ID NO: 2584478 - RNA, 19 nt, Artificial Sequence
  Description of Artificial Sequence: Synthetic oligonucleotide
cuggaguaauuuguucacu

SEQ ID NO: 2584479 - RNA, 19 nt, Artificial Sequence
  Description of Artificial Sequence: Synthetic oligonucleotide
cuguuacccaaaggaugga

SEQ ID NO: 2584480 - RNA, 19 nt, Artificial Sequence
  Description of Artificial Sequence: Synthetic oligonucleotide
gggcgagaauuuggcacag

SEQ ID NO: 2584481 - RNA, 19 nt, Artificial Sequence
  Description of Artificial Sequence: Synthetic oligonucleotide
gucucgugaagcagaggcu

SEQ ID NO: 2584482 - RNA, 19 nt, Artificial Sequence
  Description of Artificial Sequence: Synthetic oligonucleotide
ggacccguauguccuugga

SEQ ID NO: 2584483 - RNA, 19 nt, Artificial Sequence
  Description of Artificial Sequence: Synthetic oligonucleotide
cucgcugcaugacacgauu

SEQ ID NO: 2584484 - RNA, 19 nt, Artificial Sequence
  Description of Artificial Sequence: Synthetic oligonucleotide
ccagagccuaaacaguucu

SEQ ID NO: 2584485 - RNA, 19 nt, Artificial Sequence
  Description of Artificial Sequence: Synthetic oligonucleotide
cauguaccauuagggcuaa

SEQ ID NO: 2584486 - RNA, 19 nt, Artificial Sequence
  Description of Artificial Sequence: Synthetic oligonucleotide
cucuuauaucccagauuuu

SEQ ID NO: 2584487 - RNA, 19 nt, Artificial Sequence
  Description of Artificial Sequence: Synthetic oligonucleotide
gccgugugugcuuuaaauu

SEQ ID NO: 2584488 - RNA, 19 nt, Artificial Sequence
  Description of Artificial Sequence: Synthetic oligonucleotide
agcgcuggcgguacauguu

SEQ ID NO: 2584489 - RNA, 19 nt, Artificial Sequence
  Description of Artificial Sequence: Synthetic oligonucleotide
gcaugacacgauuaaucuu

SEQ ID NO: 2584490 - RNA, 19 nt, Artificial Sequence
  Description of Artificial Sequence: Synthetic oligonucleotide
cuucgaacuggagccgugu

SEQ ID NO: 2584491 - RNA, 19 nt, Artificial Sequence
  Description of Artificial Sequence: Synthetic oligonucleotide
ggcacagcguacccagugu

SEQ ID NO: 2584492 - RNA, 19 nt, Artificial Sequence
  Description of Artificial Sequence: Synthetic oligonucleotide
ggcgagaauuuggcacagc

SEQ ID NO: 2584493 - RNA, 19 nt, Artificial Sequence
  Description of Artificial Sequence: Synthetic oligonucleotide
uggagccgugugugcuuua

SEQ ID NO: 2584494 - RNA, 19 nt, Artificial Sequence
  Description of Artificial Sequence: Synthetic oligonucleotide
ccguagccagaaguuggcc

SEQ ID NO: 2584495 - RNA, 19 nt, Artificial Sequence
  Description of Artificial Sequence: Synthetic oligonucleotide
cgggcgagaauuuggcaca

SEQ ID NO: 2584496 - RNA, 19 nt, Artificial Sequence
  Description of Artificial Sequence: Synthetic oligonucleotide
gcgaacaguucuccguccu

SEQ ID NO: 2584497 - RNA, 19 nt, Artificial Sequence
  Description of Artificial Sequence: Synthetic oligonucleotide
cagcguacccagugugugu

SEQ ID NO: 2584498 - RNA, 19 nt, Artificial Sequence
  Description of Artificial Sequence: Synthetic oligonucleotide
cgcuggcgguacauguucc

SEQ ID NO: 2584499 - RNA, 19 nt, Artificial Sequence
  Description of Artificial Sequence: Synthetic oligonucleotide
aguucacaccgcagcuguu

SEQ ID NO: 2584500 - RNA, 19 nt, Artificial Sequence
  Description of Artificial Sequence: Synthetic oligonucleotide
cgguacauguuccauauuu

SEQ ID NO: 2584501 - RNA, 19 nt, Artificial Sequence
  Description of Artificial Sequence: Synthetic oligonucleotide
gggcuaaaguccacaaaau

SEQ ID NO: 2584502 - RNA, 19 nt, Artificial Sequence
  Description of Artificial Sequence: Synthetic oligonucleotide
cacuucgaacuggagccgu

SEQ ID NO: 2584503 - RNA, 19 nt, Artificial Sequence
  Description of Artificial Sequence: Synthetic oligonucleotide
ggagccgugugugcuuuaa

SEQ ID NO: 2584504 - RNA, 19 nt, Artificial Sequence
  Description of Artificial Sequence: Synthetic oligonucleotide
cgagaauuuggcacagcgu

SEQ ID NO: 2584505 - RNA, 19 nt, Artificial Sequence
  Description of Artificial Sequence: Synthetic oligonucleotide
gcugcaugacacgauuaau

SEQ ID NO: 2584506 - RNA, 19 nt, Artificial Sequence
  Description of Artificial Sequence: Synthetic oligonucleotide
cgcugcaugacacgauuaa

SEQ ID NO: 2584507 - RNA, 19 nt, Artificial Sequence
  Description of Artificial Sequence: Synthetic oligonucleotide
cacugcuuacuugcaguau

SEQ ID NO: 2584508 - RNA, 19 nt, Artificial Sequence
  Description of Artificial Sequence: Synthetic oligonucleotide
cuggcgguacauguuccau

SEQ ID NO: 2584509 - RNA, 19 nt, Artificial Sequence
  Description of Artificial Sequence: Synthetic oligonucleotide
guauguccuuggagugugu

SEQ ID NO: 2584510 - RNA, 19 nt, Artificial Sequence
  Description of Artificial Sequence: Synthetic oligonucleotide
gugugucgguacagggagu

SEQ ID NO: 2584511 - RNA, 19 nt, Artificial Sequence
  Description of Artificial Sequence: Synthetic oligonucleotide
ggaagcgcuggcgguacau

SEQ ID NO: 2584512 - RNA, 19 nt, Artificial Sequence
  Description of Artificial Sequence: Synthetic oligonucleotide
cuggagccgugugugcuuu

SEQ ID NO: 2584513 - RNA, 19 nt, Artificial Sequence
  Description of Artificial Sequence: Synthetic oligonucleotide
ccguauguccuuggagugu

SEQ ID NO: 2584514 - RNA, 19 nt, Artificial Sequence
  Description of Artificial Sequence: Synthetic oligonucleotide
cgcagcuguuaacuugaua

SEQ ID NO: 2584515 - RNA, 19 nt, Artificial Sequence
  Description of Artificial Sequence: Synthetic oligonucleotide
ccucgcugcaugacacgau

SEQ ID NO: 2584516 - RNA, 19 nt, Artificial Sequence
  Description of Artificial Sequence: Synthetic oligonucleotide
gcgguacauguuccauauu

SEQ ID NO: 2584517 - RNA, 19 nt, Artificial Sequence
  Description of Artificial Sequence: Synthetic oligonucleotide
cgaacaguucuccguccuu

SEQ ID NO: 2584518 - RNA, 19 nt, Artificial Sequence
  Description of Artificial Sequence: Synthetic oligonucleotide
agugauuuaaaugacgugg

SEQ ID NO: 2584519 - RNA, 19 nt, Artificial Sequence
  Description of Artificial Sequence: Synthetic oligonucleotide
agaagacaaacccacauuc

SEQ ID NO: 2584520 - RNA, 19 nt, Artificial Sequence
  Description of Artificial Sequence: Synthetic oligonucleotide
aaugacguggccaagagga

SEQ ID NO: 2584521 - RNA, 19 nt, Artificial Sequence
  Description of Artificial Sequence: Synthetic oligonucleotide
uaaacgugcaacacacucg

SEQ ID NO: 2584522 - RNA, 19 nt, Artificial Sequence
  Description of Artificial Sequence: Synthetic oligonucleotide
gacaaacccacauucacag

SEQ ID NO: 2584523 - RNA, 19 nt, Artificial Sequence
  Description of Artificial Sequence: Synthetic oligonucleotide
gaaggcucuguauuaaagg

SEQ ID NO: 2584524 - RNA, 19 nt, Artificial Sequence
  Description of Artificial Sequence: Synthetic oligonucleotide
aagacagguaguguggggc

SEQ ID NO: 2584525 - RNA, 19 nt, Artificial Sequence
  Description of Artificial Sequence: Synthetic oligonucleotide
cauauuugcagguaacagc

SEQ ID NO: 2584526 - RNA, 19 nt, Artificial Sequence
  Description of Artificial Sequence: Synthetic oligonucleotide
uguauuaaaggguuggcuc

SEQ ID NO: 2584527 - RNA, 19 nt, Artificial Sequence
  Description of Artificial Sequence: Synthetic oligonucleotide
ucugcuuaggccaaaggga

SEQ ID NO: 2584528 - RNA, 19 nt, Artificial Sequence
  Description of Artificial Sequence: Synthetic oligonucleotide
acgugcaacacacucgugc

SEQ ID NO: 2584529 - RNA, 19 nt, Artificial Sequence
  Description of Artificial Sequence: Synthetic oligonucleotide
ugaauauagcucuccacag

SEQ ID NO: 2584530 - RNA, 19 nt, Artificial Sequence
  Description of Artificial Sequence: Synthetic oligonucleotide
aacccacauucacagagac

SEQ ID NO: 2584531 - RNA, 19 nt, Artificial Sequence
  Description of Artificial Sequence: Synthetic oligonucleotide
ugcauaugugaauauagcu

SEQ ID NO: 2584532 - RNA, 19 nt, Artificial Sequence
  Description of Artificial Sequence: Synthetic oligonucleotide
auuugcagguaacagcagg

SEQ ID NO: 2584533 - RNA, 19 nt, Artificial Sequence
  Description of Artificial Sequence: Synthetic oligonucleotide
uuuauuuguccuuuccucu

SEQ ID NO: 2584534 - RNA, 19 nt, Artificial Sequence
  Description of Artificial Sequence: Synthetic oligonucleotide
caucuuaggaggcagagac

SEQ ID NO: 2584535 - RNA, 19 nt, Artificial Sequence
  Description of Artificial Sequence: Synthetic oligonucleotide
uccacagucccucacaaga

SEQ ID NO: 2584536 - RNA, 19 nt, Artificial Sequence
  Description of Artificial Sequence: Synthetic oligonucleotide
aaacgugcaacacacucgu

SEQ ID NO: 2584537 - RNA, 19 nt, Artificial Sequence
  Description of Artificial Sequence: Synthetic oligonucleotide
uuuggaaaugcccuccucu

SEQ ID NO: 2584538 - RNA, 19 nt, Artificial Sequence
  Description of Artificial Sequence: Synthetic oligonucleotide
uccucuuuuggaaaugccc

SEQ ID NO: 2584539 - RNA, 19 nt, Artificial Sequence
  Description of Artificial Sequence: Synthetic oligonucleotide
uauagcucuccacaguccc

SEQ ID NO: 2584540 - RNA, 19 nt, Artificial Sequence
  Description of Artificial Sequence: Synthetic oligonucleotide
ucuuaggaggcagagaccc

SEQ ID NO: 2584541 - RNA, 19 nt, Artificial Sequence
  Description of Artificial Sequence: Synthetic oligonucleotide
aaugcccuccucuaaucuc

SEQ ID NO: 2584542 - RNA, 19 nt, Artificial Sequence
  Description of Artificial Sequence: Synthetic oligonucleotide
caagagaggaguagcaggg

SEQ ID NO: 2584543 - RNA, 19 nt, Artificial Sequence
  Description of Artificial Sequence: Synthetic oligonucleotide
ugaaggcucuguauuaaag

SEQ ID NO: 2584544 - RNA, 19 nt, Artificial Sequence
  Description of Artificial Sequence: Synthetic oligonucleotide
ucuuuauuuguccuuuccu

SEQ ID NO: 2584545 - RNA, 19 nt, Artificial Sequence
  Description of Artificial Sequence: Synthetic oligonucleotide
gaagguuggguacuggacc

SEQ ID NO: 2584546 - RNA, 19 nt, Artificial Sequence
  Description of Artificial Sequence: Synthetic oligonucleotide
gagacagucacuccagugc

SEQ ID NO: 2584547 - RNA, 19 nt, Artificial Sequence
  Description of Artificial Sequence: Synthetic oligonucleotide
aaaguuugcauaugugaau

SEQ ID NO: 2584548 - RNA, 19 nt, Artificial Sequence
  Description of Artificial Sequence: Synthetic oligonucleotide
aaaaguuugcauaugugaa

SEQ ID NO: 2584549 - RNA, 19 nt, Artificial Sequence
  Description of Artificial Sequence: Synthetic oligonucleotide
gucugcuuaggccaaaggg

SEQ ID NO: 2584550 - RNA, 19 nt, Artificial Sequence
  Description of Artificial Sequence: Synthetic oligonucleotide
ucuuccccaucuuaggagg

SEQ ID NO: 2584551 - RNA, 19 nt, Artificial Sequence
  Description of Artificial Sequence: Synthetic oligonucleotide
ucuaaucuccccaauccga

SEQ ID NO: 2584552 - RNA, 19 nt, Artificial Sequence
  Description of Artificial Sequence: Synthetic oligonucleotide
aaaugacguggccaagagg

SEQ ID NO: 2584553 - RNA, 19 nt, Artificial Sequence
  Description of Artificial Sequence: Synthetic oligonucleotide
uaaaugacguggccaagag

SEQ ID NO: 2584554 - RNA, 19 nt, Artificial Sequence
  Description of Artificial Sequence: Synthetic oligonucleotide
auuuaaaugacguggccaa

SEQ ID NO: 2584555 - RNA, 19 nt, Artificial Sequence
  Description of Artificial Sequence: Synthetic oligonucleotide
uugcauaugugaauauagc

SEQ ID NO: 2584556 - RNA, 19 nt, Artificial Sequence
  Description of Artificial Sequence: Synthetic oligonucleotide
cuuuauuuguccuuuccuc

SEQ ID NO: 2584557 - RNA, 19 nt, Artificial Sequence
  Description of Artificial Sequence: Synthetic oligonucleotide
uucuuuauuuguccuuucc

SEQ ID NO: 2584558 - RNA, 19 nt, Artificial Sequence
  Description of Artificial Sequence: Synthetic oligonucleotide
ugauuuaaaugacguggcc

SEQ ID NO: 2584559 - RNA, 19 nt, Artificial Sequence
  Description of Artificial Sequence: Synthetic oligonucleotide
gugaauauagcucuccaca

SEQ ID NO: 2584560 - RNA, 19 nt, Artificial Sequence
  Description of Artificial Sequence: Synthetic oligonucleotide
gacagugauuuaaaugacg

SEQ ID NO: 2584561 - RNA, 19 nt, Artificial Sequence
  Description of Artificial Sequence: Synthetic oligonucleotide
aaucuccccaauccgaccu

SEQ ID NO: 2584562 - RNA, 19 nt, Artificial Sequence
  Description of Artificial Sequence: Synthetic oligonucleotide
cuuuagaagagcagcugag

SEQ ID NO: 2584563 - RNA, 19 nt, Artificial Sequence
  Description of Artificial Sequence: Synthetic oligonucleotide
uuugcagguaacagcaggu

SEQ ID NO: 2584564 - RNA, 19 nt, Artificial Sequence
  Description of Artificial Sequence: Synthetic oligonucleotide
gugguugcauauuugcagg

SEQ ID NO: 2584565 - RNA, 19 nt, Artificial Sequence
  Description of Artificial Sequence: Synthetic oligonucleotide
uucaugaaggcucuguauu

SEQ ID NO: 2584566 - RNA, 19 nt, Artificial Sequence
  Description of Artificial Sequence: Synthetic oligonucleotide
gauggagacagucacucca

SEQ ID NO: 2584567 - RNA, 19 nt, Artificial Sequence
  Description of Artificial Sequence: Synthetic oligonucleotide
gauuuaaaugacguggcca

SEQ ID NO: 2584568 - RNA, 19 nt, Artificial Sequence
  Description of Artificial Sequence: Synthetic oligonucleotide
guaaacgugcaacacacuc

SEQ ID NO: 2584569 - RNA, 19 nt, Artificial Sequence
  Description of Artificial Sequence: Synthetic oligonucleotide
agagcagcugagcagagcu

SEQ ID NO: 2584570 - RNA, 19 nt, Artificial Sequence
  Description of Artificial Sequence: Synthetic oligonucleotide
ugugaauauagcucuccac

SEQ ID NO: 2584571 - RNA, 19 nt, Artificial Sequence
  Description of Artificial Sequence: Synthetic oligonucleotide
uaggccaaagggaaagccc

SEQ ID NO: 2584572 - RNA, 19 nt, Artificial Sequence
  Description of Artificial Sequence: Synthetic oligonucleotide
aaaugcccuccucuaaucu

SEQ ID NO: 2584573 - RNA, 19 nt, Artificial Sequence
  Description of Artificial Sequence: Synthetic oligonucleotide
uaugugaauauagcucucc

SEQ ID NO: 2584574 - RNA, 19 nt, Artificial Sequence
  Description of Artificial Sequence: Synthetic oligonucleotide
aagaagacaaacccacauu

SEQ ID NO: 2584575 - RNA, 19 nt, Artificial Sequence
  Description of Artificial Sequence: Synthetic oligonucleotide
uuuagaagagcagcugagc

SEQ ID NO: 2584576 - RNA, 19 nt, Artificial Sequence
  Description of Artificial Sequence: Synthetic oligonucleotide
ucccacauggcccugugca

SEQ ID NO: 2584577 - RNA, 19 nt, Artificial Sequence
  Description of Artificial Sequence: Synthetic oligonucleotide
cucuguauuaaaggguugg

SEQ ID NO: 2584578 - RNA, 19 nt, Artificial Sequence
  Description of Artificial Sequence: Synthetic oligonucleotide
ggugguugcauauuugcag

SEQ ID NO: 2584579 - RNA, 19 nt, Artificial Sequence
  Description of Artificial Sequence: Synthetic oligonucleotide
uuaaaugacguggccaaga

SEQ ID NO: 2584580 - RNA, 19 nt, Artificial Sequence
  Description of Artificial Sequence: Synthetic oligonucleotide
cauaugugaauauagcucu

SEQ ID NO: 2584581 - RNA, 19 nt, Artificial Sequence
  Description of Artificial Sequence: Synthetic oligonucleotide
acagugauuuaaaugacgu

SEQ ID NO: 2584582 - RNA, 19 nt, Artificial Sequence
  Description of Artificial Sequence: Synthetic oligonucleotide
cucuaaucuccccaauccg

SEQ ID NO: 2584583 - RNA, 19 nt, Artificial Sequence
  Description of Artificial Sequence: Synthetic oligonucleotide
ucuuuuggaaaugcccucc

SEQ ID NO: 2584584 - RNA, 19 nt, Artificial Sequence
  Description of Artificial Sequence: Synthetic oligonucleotide
uggccccagagacacaccg

SEQ ID NO: 2584585 - RNA, 19 nt, Artificial Sequence
  Description of Artificial Sequence: Synthetic oligonucleotide
auaagacagguaguguggg

SEQ ID NO: 2584586 - RNA, 19 nt, Artificial Sequence
  Description of Artificial Sequence: Synthetic oligonucleotide
gaggccgucccuuuagaag

SEQ ID NO: 2584587 - RNA, 19 nt, Artificial Sequence
  Description of Artificial Sequence: Synthetic oligonucleotide
cuaaucuccccaauccgac

SEQ ID NO: 2584588 - RNA, 19 nt, Artificial Sequence
  Description of Artificial Sequence: Synthetic oligonucleotide
aaguuugcauaugugaaua

SEQ ID NO: 2584589 - RNA, 19 nt, Artificial Sequence
  Description of Artificial Sequence: Synthetic oligonucleotide
gagaggaguagcagggugg

SEQ ID NO: 2584590 - RNA, 19 nt, Artificial Sequence
  Description of Artificial Sequence: Synthetic oligonucleotide
ugucugcuuaggccaaagg

SEQ ID NO: 2584591 - RNA, 19 nt, Artificial Sequence
  Description of Artificial Sequence: Synthetic oligonucleotide
ugggguaggggcacuggcg

SEQ ID NO: 2584592 - RNA, 19 nt, Artificial Sequence
  Description of Artificial Sequence: Synthetic oligonucleotide
agagaggaguagcagggug

SEQ ID NO: 2584593 - RNA, 19 nt, Artificial Sequence
  Description of Artificial Sequence: Synthetic oligonucleotide
uuggcucuuucuuuauuug

SEQ ID NO: 2584594 - RNA, 19 nt, Artificial Sequence
  Description of Artificial Sequence: Synthetic oligonucleotide
gugauuuaaaugacguggc

SEQ ID NO: 2584595 - RNA, 19 nt, Artificial Sequence
  Description of Artificial Sequence: Synthetic oligonucleotide
uaaaggguuggcucuuucu

SEQ ID NO: 2584596 - RNA, 19 nt, Artificial Sequence
  Description of Artificial Sequence: Synthetic oligonucleotide
ucccuuuagaagagcagcu

SEQ ID NO: 2584597 - RNA, 19 nt, Artificial Sequence
  Description of Artificial Sequence: Synthetic oligonucleotide
aacacacucgugcgaaggu

SEQ ID NO: 2584598 - RNA, 19 nt, Artificial Sequence
  Description of Artificial Sequence: Synthetic oligonucleotide
guguaaacgugcaacacac

SEQ ID NO: 2584599 - RNA, 19 nt, Artificial Sequence
  Description of Artificial Sequence: Synthetic oligonucleotide
uuuccucuuuuggaaaugc

SEQ ID NO: 2584600 - RNA, 19 nt, Artificial Sequence
  Description of Artificial Sequence: Synthetic oligonucleotide
acuggcgggagacucccac

SEQ ID NO: 2584601 - RNA, 19 nt, Artificial Sequence
  Description of Artificial Sequence: Synthetic oligonucleotide
aggccgucccuuuagaaga

SEQ ID NO: 2584602 - RNA, 19 nt, Artificial Sequence
  Description of Artificial Sequence: Synthetic oligonucleotide
agacagucacuccagugcu

SEQ ID NO: 2584603 - RNA, 19 nt, Artificial Sequence
  Description of Artificial Sequence: Synthetic oligonucleotide
uuuaaaugacguggccaag

SEQ ID NO: 2584604 - RNA, 19 nt, Artificial Sequence
  Description of Artificial Sequence: Synthetic oligonucleotide
augugaauauagcucucca

SEQ ID NO: 2584605 - RNA, 19 nt, Artificial Sequence
  Description of Artificial Sequence: Synthetic oligonucleotide
ucaugaaggcucuguauua

SEQ ID NO: 2584606 - RNA, 19 nt, Artificial Sequence
  Description of Artificial Sequence: Synthetic oligonucleotide
uccucuaaucuccccaauc

SEQ ID NO: 2584607 - RNA, 19 nt, Artificial Sequence
  Description of Artificial Sequence: Synthetic oligonucleotide
augcccuccucuaaucucc

SEQ ID NO: 2584608 - RNA, 19 nt, Artificial Sequence
  Description of Artificial Sequence: Synthetic oligonucleotide
aggccaagagaggaguagc

SEQ ID NO: 2584609 - RNA, 19 nt, Artificial Sequence
  Description of Artificial Sequence: Synthetic oligonucleotide
cuggacccggcccaaaggg

SEQ ID NO: 2584610 - RNA, 19 nt, Artificial Sequence
  Description of Artificial Sequence: Synthetic oligonucleotide
uggagaggccaagagagga

SEQ ID NO: 2584611 - RNA, 19 nt, Artificial Sequence
  Description of Artificial Sequence: Synthetic oligonucleotide
ucuuucuuuauuuguccuu

SEQ ID NO: 2584612 - RNA, 19 nt, Artificial Sequence
  Description of Artificial Sequence: Synthetic oligonucleotide
acagucacuccagugcuuc

SEQ ID NO: 2584613 - RNA, 19 nt, Artificial Sequence
  Description of Artificial Sequence: Synthetic oligonucleotide
uuauuuguccuuuccucuu

SEQ ID NO: 2584614 - RNA, 19 nt, Artificial Sequence
  Description of Artificial Sequence: Synthetic oligonucleotide
gucccuuuagaagagcagc

SEQ ID NO: 2584615 - RNA, 19 nt, Artificial Sequence
  Description of Artificial Sequence: Synthetic oligonucleotide
guugcauauuugcagguaa

SEQ ID NO: 2584616 - RNA, 19 nt, Artificial Sequence
  Description of Artificial Sequence: Synthetic oligonucleotide
caucccagccccauccagg

SEQ ID NO: 2584617 - RNA, 19 nt, Artificial Sequence
  Description of Artificial Sequence: Synthetic oligonucleotide
gaaaugcccuccucuaauc

SEQ ID NO: 2584618 - RNA, 19 nt, Artificial Sequence
  Description of Artificial Sequence: Synthetic oligonucleotide
ggggacagugauuuaaaug

SEQ ID NO: 2584619 - RNA, 19 nt, Artificial Sequence
  Description of Artificial Sequence: Synthetic oligonucleotide
uggcucuuucuuuauuugu

SEQ ID NO: 2584620 - RNA, 19 nt, Artificial Sequence
  Description of Artificial Sequence: Synthetic oligonucleotide
aaggguuggcucuuucuuu

SEQ ID NO: 2584621 - RNA, 19 nt, Artificial Sequence
  Description of Artificial Sequence: Synthetic oligonucleotide
cagugauuuaaaugacgug

SEQ ID NO: 2584622 - RNA, 19 nt, Artificial Sequence
  Description of Artificial Sequence: Synthetic oligonucleotide
cugauggagacagucacuc

SEQ ID NO: 2584623 - RNA, 19 nt, Artificial Sequence
  Description of Artificial Sequence: Synthetic oligonucleotide
guauuaaaggguuggcucu

SEQ ID NO: 2584624 - RNA, 19 nt, Artificial Sequence
  Description of Artificial Sequence: Synthetic oligonucleotide
uguaaacgugcaacacacu

SEQ ID NO: 2584625 - RNA, 19 nt, Artificial Sequence
  Description of Artificial Sequence: Synthetic oligonucleotide
cccacauucacagagacuc

SEQ ID NO: 2584626 - RNA, 19 nt, Artificial Sequence
  Description of Artificial Sequence: Synthetic oligonucleotide
uuuuggaaaugcccuccuc

SEQ ID NO: 2584627 - RNA, 19 nt, Artificial Sequence
  Description of Artificial Sequence: Synthetic oligonucleotide
uucugcgccucuccccugg

SEQ ID NO: 2584628 - RNA, 19 nt, Artificial Sequence
  Description of Artificial Sequence: Synthetic oligonucleotide
cacacucgugcgaagguug

SEQ ID NO: 2584629 - RNA, 19 nt, Artificial Sequence
  Description of Artificial Sequence: Synthetic oligonucleotide
uacuggacccggcccaaag

SEQ ID NO: 2584630 - RNA, 19 nt, Artificial Sequence
  Description of Artificial Sequence: Synthetic oligonucleotide
gaagacaaacccacauuca

SEQ ID NO: 2584631 - RNA, 19 nt, Artificial Sequence
  Description of Artificial Sequence: Synthetic oligonucleotide
ggaucuuccccaucuuagg

SEQ ID NO: 2584632 - RNA, 19 nt, Artificial Sequence
  Description of Artificial Sequence: Synthetic oligonucleotide
ccucuaaucuccccaaucc

SEQ ID NO: 2584633 - RNA, 19 nt, Artificial Sequence
  Description of Artificial Sequence: Synthetic oligonucleotide
ugauggagacagucacucc

SEQ ID NO: 2584634 - RNA, 19 nt, Artificial Sequence
  Description of Artificial Sequence: Synthetic oligonucleotide
ucacuccagugcuucugcg

SEQ ID NO: 2584635 - RNA, 19 nt, Artificial Sequence
  Description of Artificial Sequence: Synthetic oligonucleotide
gcauaugugaauauagcuc

SEQ ID NO: 2584636 - RNA, 19 nt, Artificial Sequence
  Description of Artificial Sequence: Synthetic oligonucleotide
uuggaaaugcccuccucua

SEQ ID NO: 2584637 - RNA, 19 nt, Artificial Sequence
  Description of Artificial Sequence: Synthetic oligonucleotide
caacacacucgugcgaagg

SEQ ID NO: 2584638 - RNA, 19 nt, Artificial Sequence
  Description of Artificial Sequence: Synthetic oligonucleotide
uggguacuggacccggccc

SEQ ID NO: 2584639 - RNA, 19 nt, Artificial Sequence
  Description of Artificial Sequence: Synthetic oligonucleotide
uggaaaugcccuccucuaa

SEQ ID NO: 2584640 - RNA, 19 nt, Artificial Sequence
  Description of Artificial Sequence: Synthetic oligonucleotide
aggaguagcaggguggggu

SEQ ID NO: 2584641 - RNA, 19 nt, Artificial Sequence
  Description of Artificial Sequence: Synthetic oligonucleotide
uauuuguccuuuccucuuu

SEQ ID NO: 2584642 - RNA, 19 nt, Artificial Sequence
  Description of Artificial Sequence: Synthetic oligonucleotide
aucuuaggaggcagagacc

SEQ ID NO: 2584643 - RNA, 19 nt, Artificial Sequence
  Description of Artificial Sequence: Synthetic oligonucleotide
gcgggagacucccacaugg

SEQ ID NO: 2584644 - RNA, 19 nt, Artificial Sequence
  Description of Artificial Sequence: Synthetic oligonucleotide
gaggccaagagaggaguag

SEQ ID NO: 2584645 - RNA, 19 nt, Artificial Sequence
  Description of Artificial Sequence: Synthetic oligonucleotide
gcauauuugcagguaacag

SEQ ID NO: 2584646 - RNA, 19 nt, Artificial Sequence
  Description of Artificial Sequence: Synthetic oligonucleotide
agguaacagcaggucaggc

SEQ ID NO: 2584647 - RNA, 19 nt, Artificial Sequence
  Description of Artificial Sequence: Synthetic oligonucleotide
ugcaacacacucgugcgaa

SEQ ID NO: 2584648 - RNA, 19 nt, Artificial Sequence
  Description of Artificial Sequence: Synthetic oligonucleotide
uggggugguugcauauuug

SEQ ID NO: 2584649 - RNA, 19 nt, Artificial Sequence
  Description of Artificial Sequence: Synthetic oligonucleotide
cagucccucacaagaagac

SEQ ID NO: 2584650 - RNA, 19 nt, Artificial Sequence
  Description of Artificial Sequence: Synthetic oligonucleotide
aguuugcauaugugaauau

SEQ ID NO: 2584651 - RNA, 19 nt, Artificial Sequence
  Description of Artificial Sequence: Synthetic oligonucleotide
gaauauagcucuccacagu

SEQ ID NO: 2584652 - RNA, 19 nt, Artificial Sequence
  Description of Artificial Sequence: Synthetic oligonucleotide
uccuuuccucuuuuggaaa

SEQ ID NO: 2584653 - RNA, 19 nt, Artificial Sequence
  Description of Artificial Sequence: Synthetic oligonucleotide
cacuccagugcuucugcgc

SEQ ID NO: 2584654 - RNA, 19 nt, Artificial Sequence
  Description of Artificial Sequence: Synthetic oligonucleotide
ugguugcauauuugcaggu

SEQ ID NO: 2584655 - RNA, 19 nt, Artificial Sequence
  Description of Artificial Sequence: Synthetic oligonucleotide
aaacccacauucacagaga

SEQ ID NO: 2584656 - RNA, 19 nt, Artificial Sequence
  Description of Artificial Sequence: Synthetic oligonucleotide
agacaaacccacauucaca

SEQ ID NO: 2584657 - RNA, 19 nt, Artificial Sequence
  Description of Artificial Sequence: Synthetic oligonucleotide
ggggugguugcauauuugc

SEQ ID NO: 2584658 - RNA, 19 nt, Artificial Sequence
  Description of Artificial Sequence: Synthetic oligonucleotide
agagaccccguggaggccg

SEQ ID NO: 2584659 - RNA, 19 nt, Artificial Sequence
  Description of Artificial Sequence: Synthetic oligonucleotide
aaagccccugcugcugggg

SEQ ID NO: 2584660 - RNA, 19 nt, Artificial Sequence
  Description of Artificial Sequence: Synthetic oligonucleotide
cugugucuggcugauggag

SEQ ID NO: 2584661 - RNA, 19 nt, Artificial Sequence
  Description of Artificial Sequence: Synthetic oligonucleotide
gaaagccccugcugcuggg

SEQ ID NO: 2584662 - RNA, 19 nt, Artificial Sequence
  Description of Artificial Sequence: Synthetic oligonucleotide
gucacuccagugcuucugc

SEQ ID NO: 2584663 - RNA, 19 nt, Artificial Sequence
  Description of Artificial Sequence: Synthetic oligonucleotide
cuuaggaggcagagacccc

SEQ ID NO: 2584664 - RNA, 19 nt, Artificial Sequence
  Description of Artificial Sequence: Synthetic oligonucleotide
ucgugcgaagguuggguac

SEQ ID NO: 2584665 - RNA, 19 nt, Artificial Sequence
  Description of Artificial Sequence: Synthetic oligonucleotide
ugcccucacaucccagccc

SEQ ID NO: 2584666 - RNA, 19 nt, Artificial Sequence
  Description of Artificial Sequence: Synthetic oligonucleotide
acaucccagccccauccag

SEQ ID NO: 2584667 - RNA, 19 nt, Artificial Sequence
  Description of Artificial Sequence: Synthetic oligonucleotide
caucccaccccguguaaac

SEQ ID NO: 2584668 - RNA, 19 nt, Artificial Sequence
  Description of Artificial Sequence: Synthetic oligonucleotide
uggucagggugugccagcg

SEQ ID NO: 2584669 - RNA, 19 nt, Artificial Sequence
  Description of Artificial Sequence: Synthetic oligonucleotide
ggcugauggagacagucac

SEQ ID NO: 2584670 - RNA, 19 nt, Artificial Sequence
  Description of Artificial Sequence: Synthetic oligonucleotide
cugcuuaggccaaagggaa

SEQ ID NO: 2584671 - RNA, 19 nt, Artificial Sequence
  Description of Artificial Sequence: Synthetic oligonucleotide
gcuuaggccaaagggaaag

SEQ ID NO: 2584672 - RNA, 19 nt, Artificial Sequence
  Description of Artificial Sequence: Synthetic oligonucleotide
gcagguaacagcaggucag

SEQ ID NO: 2584673 - RNA, 19 nt, Artificial Sequence
  Description of Artificial Sequence: Synthetic oligonucleotide
gggguaggggcacuggcgg

SEQ ID NO: 2584674 - RNA, 19 nt, Artificial Sequence
  Description of Artificial Sequence: Synthetic oligonucleotide
cuggcugauggagacaguc

SEQ ID NO: 2584675 - RNA, 19 nt, Artificial Sequence
  Description of Artificial Sequence: Synthetic oligonucleotide
aagagaggaguagcagggu

SEQ ID NO: 2584676 - RNA, 19 nt, Artificial Sequence
  Description of Artificial Sequence: Synthetic oligonucleotide
accccguggaggccguccc

SEQ ID NO: 2584677 - RNA, 19 nt, Artificial Sequence
  Description of Artificial Sequence: Synthetic oligonucleotide
ggagacucccacauggccc

SEQ ID NO: 2584678 - RNA, 19 nt, Artificial Sequence
  Description of Artificial Sequence: Synthetic oligonucleotide
uauuaaaggguuggcucuu

SEQ ID NO: 2584679 - RNA, 19 nt, Artificial Sequence
  Description of Artificial Sequence: Synthetic oligonucleotide
uccccaucuuaggaggcag

SEQ ID NO: 2584680 - RNA, 19 nt, Artificial Sequence
  Description of Artificial Sequence: Synthetic oligonucleotide
uggagacagucacuccagu

SEQ ID NO: 2584681 - RNA, 19 nt, Artificial Sequence
  Description of Artificial Sequence: Synthetic oligonucleotide
auccaggggacagugauuu

SEQ ID NO: 2584682 - RNA, 19 nt, Artificial Sequence
  Description of Artificial Sequence: Synthetic oligonucleotide
ucgcuggucagggugugcc

SEQ ID NO: 2584683 - RNA, 19 nt, Artificial Sequence
  Description of Artificial Sequence: Synthetic oligonucleotide
aggguuggcucuuucuuua

SEQ ID NO: 2584684 - RNA, 19 nt, Artificial Sequence
  Description of Artificial Sequence: Synthetic oligonucleotide
cauggcccugugcaugggg

SEQ ID NO: 2584685 - RNA, 19 nt, Artificial Sequence
  Description of Artificial Sequence: Synthetic oligonucleotide
ucccaccccguguaaacgu

SEQ ID NO: 2584686 - RNA, 19 nt, Artificial Sequence
  Description of Artificial Sequence: Synthetic oligonucleotide
ugcuuaggccaaagggaaa

SEQ ID NO: 2584687 - RNA, 19 nt, Artificial Sequence
  Description of Artificial Sequence: Synthetic oligonucleotide
cagguaacagcaggucagg

SEQ ID NO: 2584688 - RNA, 19 nt, Artificial Sequence
  Description of Artificial Sequence: Synthetic oligonucleotide
gcagagaccccguggaggc

SEQ ID NO: 2584689 - RNA, 19 nt, Artificial Sequence
  Description of Artificial Sequence: Synthetic oligonucleotide
acagguaguguggggcagg

SEQ ID NO: 2584690 - RNA, 19 nt, Artificial Sequence
  Description of Artificial Sequence: Synthetic oligonucleotide
agggaaagccccugcugcu

SEQ ID NO: 2584691 - RNA, 19 nt, Artificial Sequence
  Description of Artificial Sequence: Synthetic oligonucleotide
uccgaccuccucccugugc

SEQ ID NO: 2584692 - RNA, 19 nt, Artificial Sequence
  Description of Artificial Sequence: Synthetic oligonucleotide
aucuccccaauccgaccuc

SEQ ID NO: 2584693 - RNA, 19 nt, Artificial Sequence
  Description of Artificial Sequence: Synthetic oligonucleotide
aucccaccccguguaaacg

SEQ ID NO: 2584694 - RNA, 19 nt, Artificial Sequence
  Description of Artificial Sequence: Synthetic oligonucleotide
ugacguggccaagaggauc

SEQ ID NO: 2584695 - RNA, 19 nt, Artificial Sequence
  Description of Artificial Sequence: Synthetic oligonucleotide
cugcccucacaucccagcc

SEQ ID NO: 2584696 - RNA, 19 nt, Artificial Sequence
  Description of Artificial Sequence: Synthetic oligonucleotide
uggcgggagacucccacau

SEQ ID NO: 2584697 - RNA, 19 nt, Artificial Sequence
  Description of Artificial Sequence: Synthetic oligonucleotide
cgugcaacacacucgugcg

SEQ ID NO: 2584698 - RNA, 19 nt, Artificial Sequence
  Description of Artificial Sequence: Synthetic oligonucleotide
ggcuccuggccccagagac

SEQ ID NO: 2584699 - RNA, 19 nt, Artificial Sequence
  Description of Artificial Sequence: Synthetic oligonucleotide
ugugcauggggugguugca

SEQ ID NO: 2584700 - RNA, 19 nt, Artificial Sequence
  Description of Artificial Sequence: Synthetic oligonucleotide
acaagaagacaaacccaca

SEQ ID NO: 2584701 - RNA, 19 nt, Artificial Sequence
  Description of Artificial Sequence: Synthetic oligonucleotide
agucccucacaagaagaca

SEQ ID NO: 2584702 - RNA, 19 nt, Artificial Sequence
  Description of Artificial Sequence: Synthetic oligonucleotide
ggcagagaccccguggagg

SEQ ID NO: 2584703 - RNA, 19 nt, Artificial Sequence
  Description of Artificial Sequence: Synthetic oligonucleotide
acucgugcgaagguugggu

SEQ ID NO: 2584704 - RNA, 19 nt, Artificial Sequence
  Description of Artificial Sequence: Synthetic oligonucleotide
ucuccccaauccgaccucc

SEQ ID NO: 2584705 - RNA, 19 nt, Artificial Sequence
  Description of Artificial Sequence: Synthetic oligonucleotide
guuggcucuuucuuuauuu

SEQ ID NO: 2584706 - RNA, 19 nt, Artificial Sequence
  Description of Artificial Sequence: Synthetic oligonucleotide
gugggguaggggcacuggc

SEQ ID NO: 2584707 - RNA, 19 nt, Artificial Sequence
  Description of Artificial Sequence: Synthetic oligonucleotide
gagacucccacauggcccu

SEQ ID NO: 2584708 - RNA, 19 nt, Artificial Sequence
  Description of Artificial Sequence: Synthetic oligonucleotide
acacucgugcgaagguugg

SEQ ID NO: 2584709 - RNA, 19 nt, Artificial Sequence
  Description of Artificial Sequence: Synthetic oligonucleotide
uggaggccgucccuuuaga

SEQ ID NO: 2584710 - RNA, 19 nt, Artificial Sequence
  Description of Artificial Sequence: Synthetic oligonucleotide
ugcccuccucuaaucuccc

SEQ ID NO: 2584711 - RNA, 19 nt, Artificial Sequence
  Description of Artificial Sequence: Synthetic oligonucleotide
gggcccugcccucacaucc

SEQ ID NO: 2584712 - RNA, 19 nt, Artificial Sequence
  Description of Artificial Sequence: Synthetic oligonucleotide
uccccaauccgaccuccuc

SEQ ID NO: 2584713 - RNA, 19 nt, Artificial Sequence
  Description of Artificial Sequence: Synthetic oligonucleotide
cuggucagggugugccagc

SEQ ID NO: 2584714 - RNA, 19 nt, Artificial Sequence
  Description of Artificial Sequence: Synthetic oligonucleotide
gaguagcagggugggguag

SEQ ID NO: 2584715 - RNA, 19 nt, Artificial Sequence
  Description of Artificial Sequence: Synthetic oligonucleotide
cuccacagucccucacaag

SEQ ID NO: 2584716 - RNA, 19 nt, Artificial Sequence
  Description of Artificial Sequence: Synthetic oligonucleotide
ugcauggggugguugcaua

SEQ ID NO: 2584717 - RNA, 19 nt, Artificial Sequence
  Description of Artificial Sequence: Synthetic oligonucleotide
gugugccagcgcuccaggg

SEQ ID NO: 2584718 - RNA, 19 nt, Artificial Sequence
  Description of Artificial Sequence: Synthetic oligonucleotide
uccccuggcuccuggcccc

SEQ ID NO: 2584719 - RNA, 19 nt, Artificial Sequence
  Description of Artificial Sequence: Synthetic oligonucleotide
gccccagagacacaccgcc

SEQ ID NO: 2584720 - RNA, 19 nt, Artificial Sequence
  Description of Artificial Sequence: Synthetic oligonucleotide
gacguggccaagaggaucu

SEQ ID NO: 2584721 - RNA, 19 nt, Artificial Sequence
  Description of Artificial Sequence: Synthetic oligonucleotide
ucccagccccauccagggg

SEQ ID NO: 2584722 - RNA, 19 nt, Artificial Sequence
  Description of Artificial Sequence: Synthetic oligonucleotide
cagggugugccagcgcucc

SEQ ID NO: 2584723 - RNA, 19 nt, Artificial Sequence
  Description of Artificial Sequence: Synthetic oligonucleotide
cagguaguguggggcaggg

SEQ ID NO: 2584724 - RNA, 19 nt, Artificial Sequence
  Description of Artificial Sequence: Synthetic oligonucleotide
agccccauccaggggacag

SEQ ID NO: 2584725 - RNA, 19 nt, Artificial Sequence
  Description of Artificial Sequence: Synthetic oligonucleotide
gucagggugugccagcgcu

SEQ ID NO: 2584726 - RNA, 19 nt, Artificial Sequence
  Description of Artificial Sequence: Synthetic oligonucleotide
ggacagugauuuaaaugac

SEQ ID NO: 2584727 - RNA, 19 nt, Artificial Sequence
  Description of Artificial Sequence: Synthetic oligonucleotide
cccaauccgaccuccuccc

SEQ ID NO: 2584728 - RNA, 19 nt, Artificial Sequence
  Description of Artificial Sequence: Synthetic oligonucleotide
cugucugcuuaggccaaag

SEQ ID NO: 2584729 - RNA, 19 nt, Artificial Sequence
  Description of Artificial Sequence: Synthetic oligonucleotide
gguuggguacuggacccgg

SEQ ID NO: 2584730 - RNA, 19 nt, Artificial Sequence
  Description of Artificial Sequence: Synthetic oligonucleotide
ccaaagggaaagccccugc

SEQ ID NO: 2584731 - RNA, 19 nt, Artificial Sequence
  Description of Artificial Sequence: Synthetic oligonucleotide
ggcagcucgcuggucaggg

SEQ ID NO: 2584732 - RNA, 19 nt, Artificial Sequence
  Description of Artificial Sequence: Synthetic oligonucleotide
ccccaauccgaccuccucc

SEQ ID NO: 2584733 - RNA, 19 nt, Artificial Sequence
  Description of Artificial Sequence: Synthetic oligonucleotide
cccaaagggccugugcugg

SEQ ID NO: 2584734 - RNA, 19 nt, Artificial Sequence
  Description of Artificial Sequence: Synthetic oligonucleotide
aacgugcaacacacucgug

SEQ ID NO: 2584735 - RNA, 19 nt, Artificial Sequence
  Description of Artificial Sequence: Synthetic oligonucleotide
ggccgggcagccuggagag

SEQ ID NO: 2584736 - RNA, 19 nt, Artificial Sequence
  Description of Artificial Sequence: Synthetic oligonucleotide
gagaggccaagagaggagu

SEQ ID NO: 2584737 - RNA, 19 nt, Artificial Sequence
  Description of Artificial Sequence: Synthetic oligonucleotide
gagcagcugagcagagcug

SEQ ID NO: 2584738 - RNA, 19 nt, Artificial Sequence
  Description of Artificial Sequence: Synthetic oligonucleotide
caggggacagugauuuaaa

SEQ ID NO: 2584739 - RNA, 19 nt, Artificial Sequence
  Description of Artificial Sequence: Synthetic oligonucleotide
ccugcccucacaucccagc

SEQ ID NO: 2584740 - RNA, 19 nt, Artificial Sequence
  Description of Artificial Sequence: Synthetic oligonucleotide
gugcaacacacucgugcga

SEQ ID NO: 2584741 - RNA, 19 nt, Artificial Sequence
  Description of Artificial Sequence: Synthetic oligonucleotide
cgaagguuggguacuggac

SEQ ID NO: 2584742 - RNA, 19 nt, Artificial Sequence
  Description of Artificial Sequence: Synthetic oligonucleotide
cacucgugcgaagguuggg

SEQ ID NO: 2584743 - RNA, 19 nt, Artificial Sequence
  Description of Artificial Sequence: Synthetic oligonucleotide
cucccacauggcccugugc

SEQ ID NO: 2584744 - RNA, 19 nt, Artificial Sequence
  Description of Artificial Sequence: Synthetic oligonucleotide
auggcccugugcauggggu

SEQ ID NO: 2584745 - RNA, 19 nt, Artificial Sequence
  Description of Artificial Sequence: Synthetic oligonucleotide
caaagggaaagccccugcu

SEQ ID NO: 2584746 - RNA, 19 nt, Artificial Sequence
  Description of Artificial Sequence: Synthetic oligonucleotide
gcgaagguuggguacugga

SEQ ID NO: 2584747 - RNA, 19 nt, Artificial Sequence
  Description of Artificial Sequence: Synthetic oligonucleotide
acacacucgugcgaagguu

SEQ ID NO: 2584748 - RNA, 19 nt, Artificial Sequence
  Description of Artificial Sequence: Synthetic oligonucleotide
gcaacacacucgugcgaag

SEQ ID NO: 2584749 - RNA, 19 nt, Artificial Sequence
  Description of Artificial Sequence: Synthetic oligonucleotide
agguaguguggggcagggg

SEQ ID NO: 2584750 - RNA, 19 nt, Artificial Sequence
  Description of Artificial Sequence: Synthetic oligonucleotide
cguguaaacgugcaacaca

SEQ ID NO: 2584751 - RNA, 19 nt, Artificial Sequence
  Description of Artificial Sequence: Synthetic oligonucleotide
ggaaaugcccuccucuaau

SEQ ID NO: 2584752 - RNA, 19 nt, Artificial Sequence
  Description of Artificial Sequence: Synthetic oligonucleotide
gaccccguggaggccgucc

SEQ ID NO: 2584753 - RNA, 19 nt, Artificial Sequence
  Description of Artificial Sequence: Synthetic oligonucleotide
gcuggucagggugugccag

SEQ ID NO: 2584754 - RNA, 19 nt, Artificial Sequence
  Description of Artificial Sequence: Synthetic oligonucleotide
cccaucuuaggaggcagag

SEQ ID NO: 2584755 - RNA, 19 nt, Artificial Sequence
  Description of Artificial Sequence: Synthetic oligonucleotide
guaggggcacuggcgggag

SEQ ID NO: 2584756 - RNA, 19 nt, Artificial Sequence
  Description of Artificial Sequence: Synthetic oligonucleotide
gcccaaagggccugugcug

SEQ ID NO: 2584757 - RNA, 19 nt, Artificial Sequence
  Description of Artificial Sequence: Synthetic oligonucleotide
caccccguguaaacgugca

SEQ ID NO: 2584758 - RNA, 19 nt, Artificial Sequence
  Description of Artificial Sequence: Synthetic oligonucleotide
gugccagcgcuccagggcu

SEQ ID NO: 2584759 - RNA, 19 nt, Artificial Sequence
  Description of Artificial Sequence: Synthetic oligonucleotide
cucgugcgaagguugggua

SEQ ID NO: 2584760 - RNA, 19 nt, Artificial Sequence
  Description of Artificial Sequence: Synthetic oligonucleotide
ggguacuggacccggccca

SEQ ID NO: 2584761 - RNA, 19 nt, Artificial Sequence
  Description of Artificial Sequence: Synthetic oligonucleotide
agcucgcuggucagggugu

SEQ ID NO: 2584762 - RNA, 19 nt, Artificial Sequence
  Description of Artificial Sequence: Synthetic oligonucleotide
cgucccuuuagaagagcag

SEQ ID NO: 2584763 - RNA, 19 nt, Artificial Sequence
  Description of Artificial Sequence: Synthetic oligonucleotide
gcucuguauuaaaggguug

SEQ ID NO: 2584764 - RNA, 19 nt, Artificial Sequence
  Description of Artificial Sequence: Synthetic oligonucleotide
accccguguaaacgugcaa

SEQ ID NO: 2584765 - RNA, 19 nt, Artificial Sequence
  Description of Artificial Sequence: Synthetic oligonucleotide
cccguguaaacgugcaaca

SEQ ID NO: 2584766 - RNA, 19 nt, Artificial Sequence
  Description of Artificial Sequence: Synthetic oligonucleotide
gggugguugcauauuugca

SEQ ID NO: 2584767 - RNA, 19 nt, Artificial Sequence
  Description of Artificial Sequence: Synthetic oligonucleotide
uaggggcacuggcgggaga

SEQ ID NO: 2584768 - RNA, 19 nt, Artificial Sequence
  Description of Artificial Sequence: Synthetic oligonucleotide
ccaaagggccugugcuggg

SEQ ID NO: 2584769 - RNA, 19 nt, Artificial Sequence
  Description of Artificial Sequence: Synthetic oligonucleotide
ccaccccguguaaacgugc

SEQ ID NO: 2584770 - RNA, 19 nt, Artificial Sequence
  Description of Artificial Sequence: Synthetic oligonucleotide
ccuggccccagagacacac

SEQ ID NO: 2584771 - RNA, 19 nt, Artificial Sequence
  Description of Artificial Sequence: Synthetic oligonucleotide
cagggugggguaggggcac

SEQ ID NO: 2584772 - RNA, 19 nt, Artificial Sequence
  Description of Artificial Sequence: Synthetic oligonucleotide
cuucugcgccucuccccug

SEQ ID NO: 2584773 - RNA, 19 nt, Artificial Sequence
  Description of Artificial Sequence: Synthetic oligonucleotide
ccguguaaacgugcaacac

SEQ ID NO: 2584774 - RNA, 19 nt, Artificial Sequence
  Description of Artificial Sequence: Synthetic oligonucleotide
gugcgaagguuggguacug

SEQ ID NO: 2584775 - RNA, 19 nt, Artificial Sequence
  Description of Artificial Sequence: Synthetic oligonucleotide
ggaguagcaggguggggua

SEQ ID NO: 2584776 - RNA, 19 nt, Artificial Sequence
  Description of Artificial Sequence: Synthetic oligonucleotide
ggcucuguauuaaaggguu

SEQ ID NO: 2584777 - RNA, 19 nt, Artificial Sequence
  Description of Artificial Sequence: Synthetic oligonucleotide
agaggccaagagaggagua

SEQ ID NO: 2584778 - RNA, 19 nt, Artificial Sequence
  Description of Artificial Sequence: Synthetic oligonucleotide
gcugugucuggcugaugga

SEQ ID NO: 2584779 - RNA, 19 nt, Artificial Sequence
  Description of Artificial Sequence: Synthetic oligonucleotide
augacguggccaagaggau

SEQ ID NO: 2584780 - RNA, 19 nt, Artificial Sequence
  Description of Artificial Sequence: Synthetic oligonucleotide
gguugcauauuugcaggua

SEQ ID NO: 2584781 - RNA, 19 nt, Artificial Sequence
  Description of Artificial Sequence: Synthetic oligonucleotide
gggccgggcagccuggaga

SEQ ID NO: 2584782 - RNA, 19 nt, Artificial Sequence
  Description of Artificial Sequence: Synthetic oligonucleotide
gguaggggcacuggcggga

SEQ ID NO: 2584783 - RNA, 19 nt, Artificial Sequence
  Description of Artificial Sequence: Synthetic oligonucleotide
ugagcagagcugggacuuu

SEQ ID NO: 2584784 - RNA, 19 nt, Artificial Sequence
  Description of Artificial Sequence: Synthetic oligonucleotide
cagcugcugucugcuuagg

SEQ ID NO: 2584785 - RNA, 19 nt, Artificial Sequence
  Description of Artificial Sequence: Synthetic oligonucleotide
ggaggccgucccuuuagaa

SEQ ID NO: 2584786 - RNA, 19 nt, Artificial Sequence
  Description of Artificial Sequence: Synthetic oligonucleotide
cagagaccccguggaggcc

SEQ ID NO: 2584787 - RNA, 19 nt, Artificial Sequence
  Description of Artificial Sequence: Synthetic oligonucleotide
ccgucccuuuagaagagca

SEQ ID NO: 2584788 - RNA, 19 nt, Artificial Sequence
  Description of Artificial Sequence: Synthetic oligonucleotide
ggcacuggcgggagacucc

SEQ ID NO: 2584789 - RNA, 19 nt, Artificial Sequence
  Description of Artificial Sequence: Synthetic oligonucleotide
gcacuggcgggagacuccc

SEQ ID NO: 2584790 - RNA, 19 nt, Artificial Sequence
  Description of Artificial Sequence: Synthetic oligonucleotide
ggucagggugugccagcgc

SEQ ID NO: 2584791 - RNA, 19 nt, Artificial Sequence
  Description of Artificial Sequence: Synthetic oligonucleotide
ccgaccuccucccugugca

SEQ ID NO: 2584792 - RNA, 19 nt, Artificial Sequence
  Description of Artificial Sequence: Synthetic oligonucleotide
cccugugcagcaggggccg

SEQ ID NO: 2584793 - RNA, 19 nt, Artificial Sequence
  Description of Artificial Sequence: Synthetic oligonucleotide
cccaccccguguaaacgug

SEQ ID NO: 2584794 - RNA, 19 nt, Artificial Sequence
  Description of Artificial Sequence: Synthetic oligonucleotide
ggcgggagacucccacaug

SEQ ID NO: 2584795 - RNA, 19 nt, Artificial Sequence
  Description of Artificial Sequence: Synthetic oligonucleotide
gcagccuggagaggccaag

SEQ ID NO: 2584796 - RNA, 19 nt, Artificial Sequence
  Description of Artificial Sequence: Synthetic oligonucleotide
gcgccucuccccuggcucc

SEQ ID NO: 2584797 - RNA, 19 nt, Artificial Sequence
  Description of Artificial Sequence: Synthetic oligonucleotide
cagugcuucugcgccucuc

SEQ ID NO: 2584798 - RNA, 19 nt, Artificial Sequence
  Description of Artificial Sequence: Synthetic oligonucleotide
ggccgucccuuuagaagag

SEQ ID NO: 2584799 - RNA, 19 nt, Artificial Sequence
  Description of Artificial Sequence: Synthetic oligonucleotide
ccaggggacagugauuuaa

SEQ ID NO: 2584800 - RNA, 19 nt, Artificial Sequence
  Description of Artificial Sequence: Synthetic oligonucleotide
ccacagucccucacaagaa

SEQ ID NO: 2584801 - RNA, 19 nt, Artificial Sequence
  Description of Artificial Sequence: Synthetic oligonucleotide
ccacauucacagagacuca

SEQ ID NO: 2584802 - RNA, 19 nt, Artificial Sequence
  Description of Artificial Sequence: Synthetic oligonucleotide
cgggagacucccacauggc

SEQ ID NO: 2584803 - RNA, 19 nt, Artificial Sequence
  Description of Artificial Sequence: Synthetic oligonucleotide
cagccuggagaggccaaga

SEQ ID NO: 2584804 - RNA, 19 nt, Artificial Sequence
  Description of Artificial Sequence: Synthetic oligonucleotide
gggcacuggcgggagacuc

SEQ ID NO: 2584805 - RNA, 19 nt, Artificial Sequence
  Description of Artificial Sequence: Synthetic oligonucleotide
ccugugcauggggugguug

SEQ ID NO: 2584806 - RNA, 19 nt, Artificial Sequence
  Description of Artificial Sequence: Synthetic oligonucleotide
ggcccugcccucacauccc

SEQ ID NO: 2584807 - RNA, 19 nt, Artificial Sequence
  Description of Artificial Sequence: Synthetic oligonucleotide
ccauccaggggacagugau

SEQ ID NO: 2584808 - RNA, 19 nt, Artificial Sequence
  Description of Artificial Sequence: Synthetic oligonucleotide
gggcaucccaccccgugua

SEQ ID NO: 2584809 - RNA, 19 nt, Artificial Sequence
  Description of Artificial Sequence: Synthetic oligonucleotide
gcccuccucuaaucucccc

SEQ ID NO: 2584810 - RNA, 19 nt, Artificial Sequence
  Description of Artificial Sequence: Synthetic oligonucleotide
agacucccacauggcccug

SEQ ID NO: 2584811 - RNA, 19 nt, Artificial Sequence
  Description of Artificial Sequence: Synthetic oligonucleotide
cauccaggggacagugauu

SEQ ID NO: 2584812 - RNA, 19 nt, Artificial Sequence
  Description of Artificial Sequence: Synthetic oligonucleotide
acccggcccaaagggccug

SEQ ID NO: 2584813 - RNA, 19 nt, Artificial Sequence
  Description of Artificial Sequence: Synthetic oligonucleotide
gcugauggagacagucacu

SEQ ID NO: 2584814 - RNA, 19 nt, Artificial Sequence
  Description of Artificial Sequence: Synthetic oligonucleotide
cuccagugcuucugcgccu

SEQ ID NO: 2584815 - RNA, 19 nt, Artificial Sequence
  Description of Artificial Sequence: Synthetic oligonucleotide
gccgucccuuuagaagagc

SEQ ID NO: 2584816 - RNA, 19 nt, Artificial Sequence
  Description of Artificial Sequence: Synthetic oligonucleotide
gguuggcucuuucuuuauu

SEQ ID NO: 2584817 - RNA, 19 nt, Artificial Sequence
  Description of Artificial Sequence: Synthetic oligonucleotide
gagcagagcugggacuuuu

SEQ ID NO: 2584818 - RNA, 19 nt, Artificial Sequence
  Description of Artificial Sequence: Synthetic oligonucleotide
gcauggggugguugcauau

SEQ ID NO: 2584819 - RNA, 19 nt, Artificial Sequence
  Description of Artificial Sequence: Synthetic oligonucleotide
gacucccacauggcccugu

SEQ ID NO: 2584820 - RNA, 19 nt, Artificial Sequence
  Description of Artificial Sequence: Synthetic oligonucleotide
agggugggguaggggcacu

SEQ ID NO: 2584821 - RNA, 19 nt, Artificial Sequence
  Description of Artificial Sequence: Synthetic oligonucleotide
gguacuggacccggcccaa

SEQ ID NO: 2584822 - RNA, 19 nt, Artificial Sequence
  Description of Artificial Sequence: Synthetic oligonucleotide
cuccucuaaucuccccaau

SEQ ID NO: 2584823 - RNA, 19 nt, Artificial Sequence
  Description of Artificial Sequence: Synthetic oligonucleotide
ggcaucccaccccguguaa

SEQ ID NO: 2584824 - RNA, 19 nt, Artificial Sequence
  Description of Artificial Sequence: Synthetic oligonucleotide
gggugggguaggggcacug

SEQ ID NO: 2584825 - RNA, 19 nt, Artificial Sequence
  Description of Artificial Sequence: Synthetic oligonucleotide
cccugcccucacaucccag

SEQ ID NO: 2584826 - RNA, 19 nt, Artificial Sequence
  Description of Artificial Sequence: Synthetic oligonucleotide
gcaucccaccccguguaaa

SEQ ID NO: 2584827 - RNA, 19 nt, Artificial Sequence
  Description of Artificial Sequence: Synthetic oligonucleotide
gcucgcuggucagggugug

SEQ ID NO: 2584828 - RNA, 19 nt, Artificial Sequence
  Description of Artificial Sequence: Synthetic oligonucleotide
cauggggugguugcauauu

SEQ ID NO: 2584829 - RNA, 19 nt, Artificial Sequence
  Description of Artificial Sequence: Synthetic oligonucleotide
cacuggcgggagacuccca

SEQ ID NO: 2584830 - RNA, 19 nt, Artificial Sequence
  Description of Artificial Sequence: Synthetic oligonucleotide
gugcauggggugguugcau

SEQ ID NO: 2584831 - RNA, 19 nt, Artificial Sequence
  Description of Artificial Sequence: Synthetic oligonucleotide
ccccaucuuaggaggcaga

SEQ ID NO: 2584832 - RNA, 19 nt, Artificial Sequence
  Description of Artificial Sequence: Synthetic oligonucleotide
guacuggacccggcccaaa

SEQ ID NO: 2584833 - RNA, 19 nt, Artificial Sequence
  Description of Artificial Sequence: Synthetic oligonucleotide
gcccugcccucacauccca

SEQ ID NO: 2584834 - RNA, 19 nt, Artificial Sequence
  Description of Artificial Sequence: Synthetic oligonucleotide
cgaccuccucccugugcag

SEQ ID NO: 2584835 - RNA, 19 nt, Artificial Sequence
  Description of Artificial Sequence: Synthetic oligonucleotide
acguggccaagaggaucuu

SEQ ID NO: 2584836 - RNA, 19 nt, Artificial Sequence
  Description of Artificial Sequence: Synthetic oligonucleotide
ggccaaagggaaagccccu

SEQ ID NO: 2584837 - RNA, 19 nt, Artificial Sequence
  Description of Artificial Sequence: Synthetic oligonucleotide
cguggccaagaggaucuuc

SEQ ID NO: 2584838 - RNA, 19 nt, Artificial Sequence
  Description of Artificial Sequence: Synthetic oligonucleotide
aggggccgggcagccugga

SEQ ID NO: 2584839 - RNA, 19 nt, Artificial Sequence
  Description of Artificial Sequence: Synthetic oligonucleotide
ccugugcagcaggggccgg

SEQ ID NO: 2584840 - RNA, 19 nt, Artificial Sequence
  Description of Artificial Sequence: Synthetic oligonucleotide
gcugucugcuuaggccaaa

SEQ ID NO: 2584841 - RNA, 19 nt, Artificial Sequence
  Description of Artificial Sequence: Synthetic oligonucleotide
gagaccccguggaggccgu

SEQ ID NO: 2584842 - RNA, 19 nt, Artificial Sequence
  Description of Artificial Sequence: Synthetic oligonucleotide
gccgggcagccuggagagg

SEQ ID NO: 2584843 - RNA, 19 nt, Artificial Sequence
  Description of Artificial Sequence: Synthetic oligonucleotide
ggcagccuggagaggccaa

SEQ ID NO: 2584844 - RNA, 19 nt, Artificial Sequence
  Description of Artificial Sequence: Synthetic oligonucleotide
cagcgcuccagggcugugu

SEQ ID NO: 2584845 - RNA, 19 nt, Artificial Sequence
  Description of Artificial Sequence: Synthetic oligonucleotide
gggcugugucuggcugaug

SEQ ID NO: 2584846 - RNA, 19 nt, Artificial Sequence
  Description of Artificial Sequence: Synthetic oligonucleotide
cgugcgaagguuggguacu

SEQ ID NO: 2584847 - RNA, 19 nt, Artificial Sequence
  Description of Artificial Sequence: Synthetic oligonucleotide
cccucacaucccagcccca

SEQ ID NO: 2584848 - RNA, 19 nt, Artificial Sequence
  Description of Artificial Sequence: Synthetic oligonucleotide
gccucuccccuggcuccug

SEQ ID NO: 2584849 - RNA, 19 nt, Artificial Sequence
  Description of Artificial Sequence: Synthetic oligonucleotide
gcgcuccagggcugugucu

SEQ ID NO: 2584850 - RNA, 19 nt, Artificial Sequence
  Description of Artificial Sequence: Synthetic oligonucleotide
ccaauccgaccuccucccu

SEQ ID NO: 2584851 - RNA, 19 nt, Artificial Sequence
  Description of Artificial Sequence: Synthetic oligonucleotide
ccggcccaaagggccugug

SEQ ID NO: 2584852 - RNA, 19 nt, Artificial Sequence
  Description of Artificial Sequence: Synthetic oligonucleotide
ccagcgcuccagggcugug

SEQ ID NO: 2584853 - RNA, 19 nt, Artificial Sequence
  Description of Artificial Sequence: Synthetic oligonucleotide
gcccugugcaugggguggu

SEQ ID NO: 2584854 - RNA, 19 nt, Artificial Sequence
  Description of Artificial Sequence: Synthetic oligonucleotide
ccucacaucccagccccau

SEQ ID NO: 2584855 - RNA, 19 nt, Artificial Sequence
  Description of Artificial Sequence: Synthetic oligonucleotide
gccccauccaggggacagu

SEQ ID NO: 2584856 - RNA, 19 nt, Artificial Sequence
  Description of Artificial Sequence: Synthetic oligonucleotide
gccagcgcuccagggcugu

SEQ ID NO: 2584857 - RNA, 19 nt, Artificial Sequence
  Description of Artificial Sequence: Synthetic oligonucleotide
ccguggaggccgucccuuu

SEQ ID NO: 2584858 - RNA, 19 nt, Artificial Sequence
  Description of Artificial Sequence: Synthetic oligonucleotide
cccguggaggccgucccuu

SEQ ID NO: 2584859 - RNA, 19 nt, Artificial Sequence
  Description of Artificial Sequence: Synthetic oligonucleotide
ccccguggaggccgucccu

SEQ ID NO: 2584860 - RNA, 19 nt, Artificial Sequence
  Description of Artificial Sequence: Synthetic oligonucleotide
cccugugcauggggugguu

SEQ ID NO: 2584861 - RNA, 19 nt, Artificial Sequence
  Description of Artificial Sequence: Synthetic oligonucleotide
aaugauggcagacagcugc

SEQ ID NO: 2584862 - RNA, 19 nt, Artificial Sequence
  Description of Artificial Sequence: Synthetic oligonucleotide
aaacuguuugaauuggugg

SEQ ID NO: 2584863 - RNA, 19 nt, Artificial Sequence
  Description of Artificial Sequence: Synthetic oligonucleotide
aaauguuggacaguguugc

SEQ ID NO: 2584864 - RNA, 19 nt, Artificial Sequence
  Description of Artificial Sequence: Synthetic oligonucleotide
ugugauaauuuuaaaaugu

SEQ ID NO: 2584865 - RNA, 19 nt, Artificial Sequence
  Description of Artificial Sequence: Synthetic oligonucleotide
acaguugugagauccaagc

SEQ ID NO: 2584866 - RNA, 19 nt, Artificial Sequence
  Description of Artificial Sequence: Synthetic oligonucleotide
aauuggugguuucagggac

SEQ ID NO: 2584867 - RNA, 19 nt, Artificial Sequence
  Description of Artificial Sequence: Synthetic oligonucleotide
gaaaggggcagcuugaucc

SEQ ID NO: 2584868 - RNA, 19 nt, Artificial Sequence
  Description of Artificial Sequence: Synthetic oligonucleotide
agaguuuuggucuccaugg

SEQ ID NO: 2584869 - RNA, 19 nt, Artificial Sequence
  Description of Artificial Sequence: Synthetic oligonucleotide
uuuaaaauguuggacagug

SEQ ID NO: 2584870 - RNA, 19 nt, Artificial Sequence
  Description of Artificial Sequence: Synthetic oligonucleotide
cauucaguggggaagacgg

SEQ ID NO: 2584871 - RNA, 19 nt, Artificial Sequence
  Description of Artificial Sequence: Synthetic oligonucleotide
aauuaaugcugggucaccc

SEQ ID NO: 2584872 - RNA, 19 nt, Artificial Sequence
  Description of Artificial Sequence: Synthetic oligonucleotide
ugcaaaugaaugauggcag

SEQ ID NO: 2584873 - RNA, 19 nt, Artificial Sequence
  Description of Artificial Sequence: Synthetic oligonucleotide
aaaagcuauggccgugugc

SEQ ID NO: 2584874 - RNA, 19 nt, Artificial Sequence
  Description of Artificial Sequence: Synthetic oligonucleotide
agaagggacauucaucagg

SEQ ID NO: 2584875 - RNA, 19 nt, Artificial Sequence
  Description of Artificial Sequence: Synthetic oligonucleotide
ggcaacuccacucagaggg

SEQ ID NO: 2584876 - RNA, 19 nt, Artificial Sequence
  Description of Artificial Sequence: Synthetic oligonucleotide
ucuccaaggaagaaaagcu

SEQ ID NO: 2584877 - RNA, 19 nt, Artificial Sequence
  Description of Artificial Sequence: Synthetic oligonucleotide
aaagcuauggccgugugca

SEQ ID NO: 2584878 - RNA, 19 nt, Artificial Sequence
  Description of Artificial Sequence: Synthetic oligonucleotide
cugacauagaguuagcgug

SEQ ID NO: 2584879 - RNA, 19 nt, Artificial Sequence
  Description of Artificial Sequence: Synthetic oligonucleotide
gagaaauuaaugcuggguc

SEQ ID NO: 2584880 - RNA, 19 nt, Artificial Sequence
  Description of Artificial Sequence: Synthetic oligonucleotide
uaauuuuaaaauguuggac

SEQ ID NO: 2584881 - RNA, 19 nt, Artificial Sequence
  Description of Artificial Sequence: Synthetic oligonucleotide
aucuccaaggaagaaaagc

SEQ ID NO: 2584882 - RNA, 19 nt, Artificial Sequence
  Description of Artificial Sequence: Synthetic oligonucleotide
uaaaauguuggacaguguu

SEQ ID NO: 2584883 - RNA, 19 nt, Artificial Sequence
  Description of Artificial Sequence: Synthetic oligonucleotide
agaguuagcgugcaaauga

SEQ ID NO: 2584884 - RNA, 19 nt, Artificial Sequence
  Description of Artificial Sequence: Synthetic oligonucleotide
ugcaccuugggaaaggggc

SEQ ID NO: 2584885 - RNA, 19 nt, Artificial Sequence
  Description of Artificial Sequence: Synthetic oligonucleotide
aaaggggcagcuugauccc

SEQ ID NO: 2584886 - RNA, 19 nt, Artificial Sequence
  Description of Artificial Sequence: Synthetic oligonucleotide
aguugugagauccaagcug

SEQ ID NO: 2584887 - RNA, 19 nt, Artificial Sequence
  Description of Artificial Sequence: Synthetic oligonucleotide
uucaucaggcuccugagga

SEQ ID NO: 2584888 - RNA, 19 nt, Artificial Sequence
  Description of Artificial Sequence: Synthetic oligonucleotide
uauggcgacagcuggacag

SEQ ID NO: 2584889 - RNA, 19 nt, Artificial Sequence
  Description of Artificial Sequence: Synthetic oligonucleotide
caggacaagacccuggagg

SEQ ID NO: 2584890 - RNA, 19 nt, Artificial Sequence
  Description of Artificial Sequence: Synthetic oligonucleotide
ucucuauggcgacagcugg

SEQ ID NO: 2584891 - RNA, 19 nt, Artificial Sequence
  Description of Artificial Sequence: Synthetic oligonucleotide
agaaauuaaugcuggguca

SEQ ID NO: 2584892 - RNA, 19 nt, Artificial Sequence
  Description of Artificial Sequence: Synthetic oligonucleotide
aaauuaaugcugggucacc

SEQ ID NO: 2584893 - RNA, 19 nt, Artificial Sequence
  Description of Artificial Sequence: Synthetic oligonucleotide
uuagcgugcaaaugaauga

SEQ ID NO: 2584894 - RNA, 19 nt, Artificial Sequence
  Description of Artificial Sequence: Synthetic oligonucleotide
uaggcaacuccacucagag

SEQ ID NO: 2584895 - RNA, 19 nt, Artificial Sequence
  Description of Artificial Sequence: Synthetic oligonucleotide
gacaguguugcaguggugg

SEQ ID NO: 2584896 - RNA, 19 nt, Artificial Sequence
  Description of Artificial Sequence: Synthetic oligonucleotide
aggacaagacccuggaggg

SEQ ID NO: 2584897 - RNA, 19 nt, Artificial Sequence
  Description of Artificial Sequence: Synthetic oligonucleotide
uagugguccaucagggugg

SEQ ID NO: 2584898 - RNA, 19 nt, Artificial Sequence
  Description of Artificial Sequence: Synthetic oligonucleotide
auagugguccaucagggug

SEQ ID NO: 2584899 - RNA, 19 nt, Artificial Sequence
  Description of Artificial Sequence: Synthetic oligonucleotide
gugugauaauuuuaaaaug

SEQ ID NO: 2584900 - RNA, 19 nt, Artificial Sequence
  Description of Artificial Sequence: Synthetic oligonucleotide
uugaauuggugguuucagg

SEQ ID NO: 2584901 - RNA, 19 nt, Artificial Sequence
  Description of Artificial Sequence: Synthetic oligonucleotide
aaaauguuggacaguguug

SEQ ID NO: 2584902 - RNA, 19 nt, Artificial Sequence
  Description of Artificial Sequence: Synthetic oligonucleotide
aucugaagaagggacauuc

SEQ ID NO: 2584903 - RNA, 19 nt, Artificial Sequence
  Description of Artificial Sequence: Synthetic oligonucleotide
ugacauagaguuagcgugc

SEQ ID NO: 2584904 - RNA, 19 nt, Artificial Sequence
  Description of Artificial Sequence: Synthetic oligonucleotide
uuugaauuggugguuucag

SEQ ID NO: 2584905 - RNA, 19 nt, Artificial Sequence
  Description of Artificial Sequence: Synthetic oligonucleotide
uuaaugcugggucacccug

SEQ ID NO: 2584906 - RNA, 19 nt, Artificial Sequence
  Description of Artificial Sequence: Synthetic oligonucleotide
agagcugcaggucaguugu

SEQ ID NO: 2584907 - RNA, 19 nt, Artificial Sequence
  Description of Artificial Sequence: Synthetic oligonucleotide
acggucuccauaguggucc

SEQ ID NO: 2584908 - RNA, 19 nt, Artificial Sequence
  Description of Artificial Sequence: Synthetic oligonucleotide
ugagauccaagcugucugg

SEQ ID NO: 2584909 - RNA, 19 nt, Artificial Sequence
  Description of Artificial Sequence: Synthetic oligonucleotide
agugguaggugucuggucu

SEQ ID NO: 2584910 - RNA, 19 nt, Artificial Sequence
  Description of Artificial Sequence: Synthetic oligonucleotide
gacccuugagcagacaugg

SEQ ID NO: 2584911 - RNA, 19 nt, Artificial Sequence
  Description of Artificial Sequence: Synthetic oligonucleotide
gguauuguuacccuggaca

SEQ ID NO: 2584912 - RNA, 19 nt, Artificial Sequence
  Description of Artificial Sequence: Synthetic oligonucleotide
aagagcucggaggugcacc

SEQ ID NO: 2584913 - RNA, 19 nt, Artificial Sequence
  Description of Artificial Sequence: Synthetic oligonucleotide
cucuaggauagugaaaagg

SEQ ID NO: 2584914 - RNA, 19 nt, Artificial Sequence
  Description of Artificial Sequence: Synthetic oligonucleotide
ugcaggucaguugucaagg

SEQ ID NO: 2584915 - RNA, 19 nt, Artificial Sequence
  Description of Artificial Sequence: Synthetic oligonucleotide
ugcggugugauaauuuuaa

SEQ ID NO: 2584916 - RNA, 19 nt, Artificial Sequence
  Description of Artificial Sequence: Synthetic oligonucleotide
gaaacuguuugaauuggug

SEQ ID NO: 2584917 - RNA, 19 nt, Artificial Sequence
  Description of Artificial Sequence: Synthetic oligonucleotide
guuagcgugcaaaugaaug

SEQ ID NO: 2584918 - RNA, 19 nt, Artificial Sequence
  Description of Artificial Sequence: Synthetic oligonucleotide
gacagcugagaagagcucg

SEQ ID NO: 2584919 - RNA, 19 nt, Artificial Sequence
  Description of Artificial Sequence: Synthetic oligonucleotide
gaagacggucuccauagug

SEQ ID NO: 2584920 - RNA, 19 nt, Artificial Sequence
  Description of Artificial Sequence: Synthetic oligonucleotide
aguuccugagagcugcagg

SEQ ID NO: 2584921 - RNA, 19 nt, Artificial Sequence
  Description of Artificial Sequence: Synthetic oligonucleotide
agcuugaucccauggagug

SEQ ID NO: 2584922 - RNA, 19 nt, Artificial Sequence
  Description of Artificial Sequence: Synthetic oligonucleotide
guauuguuacccuggacac

SEQ ID NO: 2584923 - RNA, 19 nt, Artificial Sequence
  Description of Artificial Sequence: Synthetic oligonucleotide
ucugcccauggcaagaagu

SEQ ID NO: 2584924 - RNA, 19 nt, Artificial Sequence
  Description of Artificial Sequence: Synthetic oligonucleotide
gaagcagagcccuguuugg

SEQ ID NO: 2584925 - RNA, 19 nt, Artificial Sequence
  Description of Artificial Sequence: Synthetic oligonucleotide
agcagagcccuguuugggc

SEQ ID NO: 2584926 - RNA, 19 nt, Artificial Sequence
  Description of Artificial Sequence: Synthetic oligonucleotide
aaugcugggucacccugag

SEQ ID NO: 2584927 - RNA, 19 nt, Artificial Sequence
  Description of Artificial Sequence: Synthetic oligonucleotide
acaguguugcagugguggc

SEQ ID NO: 2584928 - RNA, 19 nt, Artificial Sequence
  Description of Artificial Sequence: Synthetic oligonucleotide
auuguuacccuggacacca

SEQ ID NO: 2584929 - RNA, 19 nt, Artificial Sequence
  Description of Artificial Sequence: Synthetic oligonucleotide
aagaagggacauucaucag

SEQ ID NO: 2584930 - RNA, 19 nt, Artificial Sequence
  Description of Artificial Sequence: Synthetic oligonucleotide
gauggcagacagcugcucc

SEQ ID NO: 2584931 - RNA, 19 nt, Artificial Sequence
  Description of Artificial Sequence: Synthetic oligonucleotide
agacccuggagggacagcc

SEQ ID NO: 2584932 - RNA, 19 nt, Artificial Sequence
  Description of Artificial Sequence: Synthetic oligonucleotide
aguccacccuccuugaucu

SEQ ID NO: 2584933 - RNA, 19 nt, Artificial Sequence
  Description of Artificial Sequence: Synthetic oligonucleotide
gacaccagaguuuuggucu

SEQ ID NO: 2584934 - RNA, 19 nt, Artificial Sequence
  Description of Artificial Sequence: Synthetic oligonucleotide
uggacaguguugcaguggu

SEQ ID NO: 2584935 - RNA, 19 nt, Artificial Sequence
  Description of Artificial Sequence: Synthetic oligonucleotide
cuugagcagacaugggccc

SEQ ID NO: 2584936 - RNA, 19 nt, Artificial Sequence
  Description of Artificial Sequence: Synthetic oligonucleotide
agggacagguauuguuacc

SEQ ID NO: 2584937 - RNA, 19 nt, Artificial Sequence
  Description of Artificial Sequence: Synthetic oligonucleotide
auagaguuagcgugcaaau

SEQ ID NO: 2584938 - RNA, 19 nt, Artificial Sequence
  Description of Artificial Sequence: Synthetic oligonucleotide
gagaagagcucggaggugc

SEQ ID NO: 2584939 - RNA, 19 nt, Artificial Sequence
  Description of Artificial Sequence: Synthetic oligonucleotide
aggacauucaguggggaag

SEQ ID NO: 2584940 - RNA, 19 nt, Artificial Sequence
  Description of Artificial Sequence: Synthetic oligonucleotide
agauccaagcugucugggg

SEQ ID NO: 2584941 - RNA, 19 nt, Artificial Sequence
  Description of Artificial Sequence: Synthetic oligonucleotide
aguuuuggucuccauggca

SEQ ID NO: 2584942 - RNA, 19 nt, Artificial Sequence
  Description of Artificial Sequence: Synthetic oligonucleotide
gaauuggugguuucaggga

SEQ ID NO: 2584943 - RNA, 19 nt, Artificial Sequence
  Description of Artificial Sequence: Synthetic oligonucleotide
ugggcccaucugaagaagg

SEQ ID NO: 2584944 - RNA, 19 nt, Artificial Sequence
  Description of Artificial Sequence: Synthetic oligonucleotide
ugucaaggagacacugaug

SEQ ID NO: 2584945 - RNA, 19 nt, Artificial Sequence
  Description of Artificial Sequence: Synthetic oligonucleotide
gggaagacggucuccauag

SEQ ID NO: 2584946 - RNA, 19 nt, Artificial Sequence
  Description of Artificial Sequence: Synthetic oligonucleotide
ugguuucagggacagucca

SEQ ID NO: 2584947 - RNA, 19 nt, Artificial Sequence
  Description of Artificial Sequence: Synthetic oligonucleotide
uccauggcaacaguuguga

SEQ ID NO: 2584948 - RNA, 19 nt, Artificial Sequence
  Description of Artificial Sequence: Synthetic oligonucleotide
cugccugacauagaguuag

SEQ ID NO: 2584949 - RNA, 19 nt, Artificial Sequence
  Description of Artificial Sequence: Synthetic oligonucleotide
auccaagcugucuggggcg

SEQ ID NO: 2584950 - RNA, 19 nt, Artificial Sequence
  Description of Artificial Sequence: Synthetic oligonucleotide
aauggagugguaggugucu

SEQ ID NO: 2584951 - RNA, 19 nt, Artificial Sequence
  Description of Artificial Sequence: Synthetic oligonucleotide
agagggacucugcccaugg

SEQ ID NO: 2584952 - RNA, 19 nt, Artificial Sequence
  Description of Artificial Sequence: Synthetic oligonucleotide
ugacccuugagcagacaug

SEQ ID NO: 2584953 - RNA, 19 nt, Artificial Sequence
  Description of Artificial Sequence: Synthetic oligonucleotide
gucucuaggauagugaaaa

SEQ ID NO: 2584954 - RNA, 19 nt, Artificial Sequence
  Description of Artificial Sequence: Synthetic oligonucleotide
caaaugaaugauggcagac

SEQ ID NO: 2584955 - RNA, 19 nt, Artificial Sequence
  Description of Artificial Sequence: Synthetic oligonucleotide
gaaauggagugguaggugu

SEQ ID NO: 2584956 - RNA, 19 nt, Artificial Sequence
  Description of Artificial Sequence: Synthetic oligonucleotide
cagaguuuuggucuccaug

SEQ ID NO: 2584957 - RNA, 19 nt, Artificial Sequence
  Description of Artificial Sequence: Synthetic oligonucleotide
ugguccaucagggugggga

SEQ ID NO: 2584958 - RNA, 19 nt, Artificial Sequence
  Description of Artificial Sequence: Synthetic oligonucleotide
uuggacaguguugcagugg

SEQ ID NO: 2584959 - RNA, 19 nt, Artificial Sequence
  Description of Artificial Sequence: Synthetic oligonucleotide
aagaaaagcuauggccgug

SEQ ID NO: 2584960 - RNA, 19 nt, Artificial Sequence
  Description of Artificial Sequence: Synthetic oligonucleotide
uuacccuggacaccagagu

SEQ ID NO: 2584961 - RNA, 19 nt, Artificial Sequence
  Description of Artificial Sequence: Synthetic oligonucleotide
uguuugggcccaucugaag

SEQ ID NO: 2584962 - RNA, 19 nt, Artificial Sequence
  Description of Artificial Sequence: Synthetic oligonucleotide
uagaguuagcgugcaaaug

SEQ ID NO: 2584963 - RNA, 19 nt, Artificial Sequence
  Description of Artificial Sequence: Synthetic oligonucleotide
ggcaacaguugugagaucc

SEQ ID NO: 2584964 - RNA, 19 nt, Artificial Sequence
  Description of Artificial Sequence: Synthetic oligonucleotide
gcugcugccugacauagag

SEQ ID NO: 2584965 - RNA, 19 nt, Artificial Sequence
  Description of Artificial Sequence: Synthetic oligonucleotide
uaaugcugggucacccuga

SEQ ID NO: 2584966 - RNA, 19 nt, Artificial Sequence
  Description of Artificial Sequence: Synthetic oligonucleotide
uacccuggacaccagaguu

SEQ ID NO: 2584967 - RNA, 19 nt, Artificial Sequence
  Description of Artificial Sequence: Synthetic oligonucleotide
aguaggcaacuccacucag

SEQ ID NO: 2584968 - RNA, 19 nt, Artificial Sequence
  Description of Artificial Sequence: Synthetic oligonucleotide
ucuggggcggggcuuagac

SEQ ID NO: 2584969 - RNA, 19 nt, Artificial Sequence
  Description of Artificial Sequence: Synthetic oligonucleotide
uuugggcccaucugaagaa

SEQ ID NO: 2584970 - RNA, 19 nt, Artificial Sequence
  Description of Artificial Sequence: Synthetic oligonucleotide
gacaagacccuggagggac

SEQ ID NO: 2584971 - RNA, 19 nt, Artificial Sequence
  Description of Artificial Sequence: Synthetic oligonucleotide
cuugugcucagcugcugcc

SEQ ID NO: 2584972 - RNA, 19 nt, Artificial Sequence
  Description of Artificial Sequence: Synthetic oligonucleotide
uggaguguccuggagaaau

SEQ ID NO: 2584973 - RNA, 19 nt, Artificial Sequence
  Description of Artificial Sequence: Synthetic oligonucleotide
uuggucuccauggcaacag

SEQ ID NO: 2584974 - RNA, 19 nt, Artificial Sequence
  Description of Artificial Sequence: Synthetic oligonucleotide
uucagggacaguccacccu

SEQ ID NO: 2584975 - RNA, 19 nt, Artificial Sequence
  Description of Artificial Sequence: Synthetic oligonucleotide
gagagcugcaggucaguug

SEQ ID NO: 2584976 - RNA, 19 nt, Artificial Sequence
  Description of Artificial Sequence: Synthetic oligonucleotide
uauuguuacccuggacacc

SEQ ID NO: 2584977 - RNA, 19 nt, Artificial Sequence
  Description of Artificial Sequence: Synthetic oligonucleotide
gaguuuuggucuccauggc

SEQ ID NO: 2584978 - RNA, 19 nt, Artificial Sequence
  Description of Artificial Sequence: Synthetic oligonucleotide
uuucagggacaguccaccc

SEQ ID NO: 2584979 - RNA, 19 nt, Artificial Sequence
  Description of Artificial Sequence: Synthetic oligonucleotide
aucccauggaguguccugg

SEQ ID NO: 2584980 - RNA, 19 nt, Artificial Sequence
  Description of Artificial Sequence: Synthetic oligonucleotide
uguuacccuggacaccaga

SEQ ID NO: 2584981 - RNA, 19 nt, Artificial Sequence
  Description of Artificial Sequence: Synthetic oligonucleotide
gaucccauggaguguccug

SEQ ID NO: 2584982 - RNA, 19 nt, Artificial Sequence
  Description of Artificial Sequence: Synthetic oligonucleotide
ucuauggcgacagcuggac

SEQ ID NO: 2584983 - RNA, 19 nt, Artificial Sequence
  Description of Artificial Sequence: Synthetic oligonucleotide
uauggccgugugcagugcc

SEQ ID NO: 2584984 - RNA, 19 nt, Artificial Sequence
  Description of Artificial Sequence: Synthetic oligonucleotide
guaggugucuggucucuag

SEQ ID NO: 2584985 - RNA, 19 nt, Artificial Sequence
  Description of Artificial Sequence: Synthetic oligonucleotide
ucggaggugcaccuuggga

SEQ ID NO: 2584986 - RNA, 19 nt, Artificial Sequence
  Description of Artificial Sequence: Synthetic oligonucleotide
cuuagacagcugagaagag

SEQ ID NO: 2584987 - RNA, 19 nt, Artificial Sequence
  Description of Artificial Sequence: Synthetic oligonucleotide
ugggaaaggggcagcuuga

SEQ ID NO: 2584988 - RNA, 19 nt, Artificial Sequence
  Description of Artificial Sequence: Synthetic oligonucleotide
agugccacagccucaguuu

SEQ ID NO: 2584989 - RNA, 19 nt, Artificial Sequence
  Description of Artificial Sequence: Synthetic oligonucleotide
cuugaucccauggaguguc

SEQ ID NO: 2584990 - RNA, 19 nt, Artificial Sequence
  Description of Artificial Sequence: Synthetic oligonucleotide
gcgugcaaaugaaugaugg

SEQ ID NO: 2584991 - RNA, 19 nt, Artificial Sequence
  Description of Artificial Sequence: Synthetic oligonucleotide
cuuggagggacagguauug

SEQ ID NO: 2584992 - RNA, 19 nt, Artificial Sequence
  Description of Artificial Sequence: Synthetic oligonucleotide
aggucaguugucaaggaga

SEQ ID NO: 2584993 - RNA, 19 nt, Artificial Sequence
  Description of Artificial Sequence: Synthetic oligonucleotide
gggacauucaucaggcucc

SEQ ID NO: 2584994 - RNA, 19 nt, Artificial Sequence
  Description of Artificial Sequence: Synthetic oligonucleotide
cacagccucaguuucccac

SEQ ID NO: 2584995 - RNA, 19 nt, Artificial Sequence
  Description of Artificial Sequence: Synthetic oligonucleotide
cuaggauagugaaaaggaa

SEQ ID NO: 2584996 - RNA, 19 nt, Artificial Sequence
  Description of Artificial Sequence: Synthetic oligonucleotide
agacggucuccauaguggu

SEQ ID NO: 2584997 - RNA, 19 nt, Artificial Sequence
  Description of Artificial Sequence: Synthetic oligonucleotide
cucagagggacucugccca

SEQ ID NO: 2584998 - RNA, 19 nt, Artificial Sequence
  Description of Artificial Sequence: Synthetic oligonucleotide
cacucagagggacucugcc

SEQ ID NO: 2584999 - RNA, 19 nt, Artificial Sequence
  Description of Artificial Sequence: Synthetic oligonucleotide
gcagcuugaucccauggag

SEQ ID NO: 2585000 - RNA, 19 nt, Artificial Sequence
  Description of Artificial Sequence: Synthetic oligonucleotide
uggcaagaaguuccugaga

SEQ ID NO: 2585001 - RNA, 19 nt, Artificial Sequence
  Description of Artificial Sequence: Synthetic oligonucleotide
uuggugguuucagggacag

SEQ ID NO: 2585002 - RNA, 19 nt, Artificial Sequence
  Description of Artificial Sequence: Synthetic oligonucleotide
caggucaguugucaaggag

SEQ ID NO: 2585003 - RNA, 19 nt, Artificial Sequence
  Description of Artificial Sequence: Synthetic oligonucleotide
uuuggucuccauggcaaca

SEQ ID NO: 2585004 - RNA, 19 nt, Artificial Sequence
  Description of Artificial Sequence: Synthetic oligonucleotide
cauggaguguccuggagaa

SEQ ID NO: 2585005 - RNA, 19 nt, Artificial Sequence
  Description of Artificial Sequence: Synthetic oligonucleotide
aguggggaagacggucucc

SEQ ID NO: 2585006 - RNA, 19 nt, Artificial Sequence
  Description of Artificial Sequence: Synthetic oligonucleotide
ggacaguccacccuccuug

SEQ ID NO: 2585007 - RNA, 19 nt, Artificial Sequence
  Description of Artificial Sequence: Synthetic oligonucleotide
uucaguggggaagacgguc

SEQ ID NO: 2585008 - RNA, 19 nt, Artificial Sequence
  Description of Artificial Sequence: Synthetic oligonucleotide
aagcuauggccgugugcag

SEQ ID NO: 2585009 - RNA, 19 nt, Artificial Sequence
  Description of Artificial Sequence: Synthetic oligonucleotide
cugcaggucaguugucaag

SEQ ID NO: 2585010 - RNA, 19 nt, Artificial Sequence
  Description of Artificial Sequence: Synthetic oligonucleotide
aagaaguuccugagagcug

SEQ ID NO: 2585011 - RNA, 19 nt, Artificial Sequence
  Description of Artificial Sequence: Synthetic oligonucleotide
cauagaguuagcgugcaaa

SEQ ID NO: 2585012 - RNA, 19 nt, Artificial Sequence
  Description of Artificial Sequence: Synthetic oligonucleotide
gggacagguauuguuaccc

SEQ ID NO: 2585013 - RNA, 19 nt, Artificial Sequence
  Description of Artificial Sequence: Synthetic oligonucleotide
guuggacaguguugcagug

SEQ ID NO: 2585014 - RNA, 19 nt, Artificial Sequence
  Description of Artificial Sequence: Synthetic oligonucleotide
gcuggacaggacaagaccc

SEQ ID NO: 2585015 - RNA, 19 nt, Artificial Sequence
  Description of Artificial Sequence: Synthetic oligonucleotide
gucucuauggcgacagcug

SEQ ID NO: 2585016 - RNA, 19 nt, Artificial Sequence
  Description of Artificial Sequence: Synthetic oligonucleotide
uagcgugcaaaugaaugau

SEQ ID NO: 2585017 - RNA, 19 nt, Artificial Sequence
  Description of Artificial Sequence: Synthetic oligonucleotide
aagggacauucaucaggcu

SEQ ID NO: 2585018 - RNA, 19 nt, Artificial Sequence
  Description of Artificial Sequence: Synthetic oligonucleotide
agcucggaggugcaccuug

SEQ ID NO: 2585019 - RNA, 19 nt, Artificial Sequence
  Description of Artificial Sequence: Synthetic oligonucleotide
aagacccuggagggacagc

SEQ ID NO: 2585020 - RNA, 19 nt, Artificial Sequence
  Description of Artificial Sequence: Synthetic oligonucleotide
cuccauggcaacaguugug

SEQ ID NO: 2585021 - RNA, 19 nt, Artificial Sequence
  Description of Artificial Sequence: Synthetic oligonucleotide
cagacaugggcccucagaa

SEQ ID NO: 2585022 - RNA, 19 nt, Artificial Sequence
  Description of Artificial Sequence: Synthetic oligonucleotide
agagcucggaggugcaccu

SEQ ID NO: 2585023 - RNA, 19 nt, Artificial Sequence
  Description of Artificial Sequence: Synthetic oligonucleotide
gccagaaauggagugguag

SEQ ID NO: 2585024 - RNA, 19 nt, Artificial Sequence
  Description of Artificial Sequence: Synthetic oligonucleotide
ugguggcuugugcucagcu

SEQ ID NO: 2585025 - RNA, 19 nt, Artificial Sequence
  Description of Artificial Sequence: Synthetic oligonucleotide
agaaacuguuugaauuggu

SEQ ID NO: 2585026 - RNA, 19 nt, Artificial Sequence
  Description of Artificial Sequence: Synthetic oligonucleotide
cuccauagugguccaucag

SEQ ID NO: 2585027 - RNA, 19 nt, Artificial Sequence
  Description of Artificial Sequence: Synthetic oligonucleotide
caguuucccaccugcggug

SEQ ID NO: 2585028 - RNA, 19 nt, Artificial Sequence
  Description of Artificial Sequence: Synthetic oligonucleotide
ugggcccucagaaacuguu

SEQ ID NO: 2585029 - RNA, 19 nt, Artificial Sequence
  Description of Artificial Sequence: Synthetic oligonucleotide
gacagcuggacaggacaag

SEQ ID NO: 2585030 - RNA, 19 nt, Artificial Sequence
  Description of Artificial Sequence: Synthetic oligonucleotide
gaggaacacaguaggcaac

SEQ ID NO: 2585031 - RNA, 19 nt, Artificial Sequence
  Description of Artificial Sequence: Synthetic oligonucleotide
caucaggguggggacagcc

SEQ ID NO: 2585032 - RNA, 19 nt, Artificial Sequence
  Description of Artificial Sequence: Synthetic oligonucleotide
uugaucccauggagugucc

SEQ ID NO: 2585033 - RNA, 19 nt, Artificial Sequence
  Description of Artificial Sequence: Synthetic oligonucleotide
caguccacccuccuugauc

SEQ ID NO: 2585034 - RNA, 19 nt, Artificial Sequence
  Description of Artificial Sequence: Synthetic oligonucleotide
gacauagaguuagcgugca

SEQ ID NO: 2585035 - RNA, 19 nt, Artificial Sequence
  Description of Artificial Sequence: Synthetic oligonucleotide
gaggacauucaguggggaa

SEQ ID NO: 2585036 - RNA, 19 nt, Artificial Sequence
  Description of Artificial Sequence: Synthetic oligonucleotide
uugggcccaucugaagaag

SEQ ID NO: 2585037 - RNA, 19 nt, Artificial Sequence
  Description of Artificial Sequence: Synthetic oligonucleotide
ggcccucagaaacuguuug

SEQ ID NO: 2585038 - RNA, 19 nt, Artificial Sequence
  Description of Artificial Sequence: Synthetic oligonucleotide
gguggggacagccagaaau

SEQ ID NO: 2585039 - RNA, 19 nt, Artificial Sequence
  Description of Artificial Sequence: Synthetic oligonucleotide
agcgugcaaaugaaugaug

SEQ ID NO: 2585040 - RNA, 19 nt, Artificial Sequence
  Description of Artificial Sequence: Synthetic oligonucleotide
ggucaguugucaaggagac

SEQ ID NO: 2585041 - RNA, 19 nt, Artificial Sequence
  Description of Artificial Sequence: Synthetic oligonucleotide
uuguuacccuggacaccag

SEQ ID NO: 2585042 - RNA, 19 nt, Artificial Sequence
  Description of Artificial Sequence: Synthetic oligonucleotide
gcaaaugaaugauggcaga

SEQ ID NO: 2585043 - RNA, 19 nt, Artificial Sequence
  Description of Artificial Sequence: Synthetic oligonucleotide
caugggcccucagaaacug

SEQ ID NO: 2585044 - RNA, 19 nt, Artificial Sequence
  Description of Artificial Sequence: Synthetic oligonucleotide
gugucuggucucuaggaua

SEQ ID NO: 2585045 - RNA, 19 nt, Artificial Sequence
  Description of Artificial Sequence: Synthetic oligonucleotide
gcuauggccgugugcagug

SEQ ID NO: 2585046 - RNA, 19 nt, Artificial Sequence
  Description of Artificial Sequence: Synthetic oligonucleotide
ccugaggaacacaguaggc

SEQ ID NO: 2585047 - RNA, 19 nt, Artificial Sequence
  Description of Artificial Sequence: Synthetic oligonucleotide
cagcugcugccugacauag

SEQ ID NO: 2585048 - RNA, 19 nt, Artificial Sequence
  Description of Artificial Sequence: Synthetic oligonucleotide
gaguuagcgugcaaaugaa

SEQ ID NO: 2585049 - RNA, 19 nt, Artificial Sequence
  Description of Artificial Sequence: Synthetic oligonucleotide
agugguccaucaggguggg

SEQ ID NO: 2585050 - RNA, 19 nt, Artificial Sequence
  Description of Artificial Sequence: Synthetic oligonucleotide
gguccugacccuugagcag

SEQ ID NO: 2585051 - RNA, 19 nt, Artificial Sequence
  Description of Artificial Sequence: Synthetic oligonucleotide
agacagcugagaagagcuc

SEQ ID NO: 2585052 - RNA, 19 nt, Artificial Sequence
  Description of Artificial Sequence: Synthetic oligonucleotide
gaggugcaccuugggaaag

SEQ ID NO: 2585053 - RNA, 19 nt, Artificial Sequence
  Description of Artificial Sequence: Synthetic oligonucleotide
auuggugguuucagggaca

SEQ ID NO: 2585054 - RNA, 19 nt, Artificial Sequence
  Description of Artificial Sequence: Synthetic oligonucleotide
gccugacauagaguuagcg

SEQ ID NO: 2585055 - RNA, 19 nt, Artificial Sequence
  Description of Artificial Sequence: Synthetic oligonucleotide
agcuauggccgugugcagu

SEQ ID NO: 2585056 - RNA, 19 nt, Artificial Sequence
  Description of Artificial Sequence: Synthetic oligonucleotide
ucccauggaguguccugga

SEQ ID NO: 2585057 - RNA, 19 nt, Artificial Sequence
  Description of Artificial Sequence: Synthetic oligonucleotide
aguguccuggagaaauuaa

SEQ ID NO: 2585058 - RNA, 19 nt, Artificial Sequence
  Description of Artificial Sequence: Synthetic oligonucleotide
gacucugcccauggcaaga

SEQ ID NO: 2585059 - RNA, 19 nt, Artificial Sequence
  Description of Artificial Sequence: Synthetic oligonucleotide
ugcccauggcaagaaguuc

SEQ ID NO: 2585060 - RNA, 19 nt, Artificial Sequence
  Description of Artificial Sequence: Synthetic oligonucleotide
gcuccugaggaacacagua

SEQ ID NO: 2585061 - RNA, 19 nt, Artificial Sequence
  Description of Artificial Sequence: Synthetic oligonucleotide
gagggacucugcccauggc

SEQ ID NO: 2585062 - RNA, 19 nt, Artificial Sequence
  Description of Artificial Sequence: Synthetic oligonucleotide
ggugcaccuugggaaaggg

SEQ ID NO: 2585063 - RNA, 19 nt, Artificial Sequence
  Description of Artificial Sequence: Synthetic oligonucleotide
gugcaccuugggaaagggg

SEQ ID NO: 2585064 - RNA, 19 nt, Artificial Sequence
  Description of Artificial Sequence: Synthetic oligonucleotide
gcgacagcuggacaggaca

SEQ ID NO: 2585065 - RNA, 19 nt, Artificial Sequence
  Description of Artificial Sequence: Synthetic oligonucleotide
aguuagcgugcaaaugaau

SEQ ID NO: 2585066 - RNA, 19 nt, Artificial Sequence
  Description of Artificial Sequence: Synthetic oligonucleotide
cucuauggcgacagcugga

SEQ ID NO: 2585067 - RNA, 19 nt, Artificial Sequence
  Description of Artificial Sequence: Synthetic oligonucleotide
uccugacccuugagcagac

SEQ ID NO: 2585068 - RNA, 19 nt, Artificial Sequence
  Description of Artificial Sequence: Synthetic oligonucleotide
ugguaggugucuggucucu

SEQ ID NO: 2585069 - RNA, 19 nt, Artificial Sequence
  Description of Artificial Sequence: Synthetic oligonucleotide
acauagaguuagcgugcaa

SEQ ID NO: 2585070 - RNA, 19 nt, Artificial Sequence
  Description of Artificial Sequence: Synthetic oligonucleotide
guaggcaacuccacucaga

SEQ ID NO: 2585071 - RNA, 19 nt, Artificial Sequence
  Description of Artificial Sequence: Synthetic oligonucleotide
ugagcagacaugggcccuc

SEQ ID NO: 2585072 - RNA, 19 nt, Artificial Sequence
  Description of Artificial Sequence: Synthetic oligonucleotide
gacauucaguggggaagac

SEQ ID NO: 2585073 - RNA, 19 nt, Artificial Sequence
  Description of Artificial Sequence: Synthetic oligonucleotide
aaggggcagcuugauccca

SEQ ID NO: 2585074 - RNA, 19 nt, Artificial Sequence
  Description of Artificial Sequence: Synthetic oligonucleotide
cuguuugggcccaucugaa

SEQ ID NO: 2585075 - RNA, 19 nt, Artificial Sequence
  Description of Artificial Sequence: Synthetic oligonucleotide
ugagagcugcaggucaguu

SEQ ID NO: 2585076 - RNA, 19 nt, Artificial Sequence
  Description of Artificial Sequence: Synthetic oligonucleotide
gaagagcucggaggugcac

SEQ ID NO: 2585077 - RNA, 19 nt, Artificial Sequence
  Description of Artificial Sequence: Synthetic oligonucleotide
aguuucccaccugcggugu

SEQ ID NO: 2585078 - RNA, 19 nt, Artificial Sequence
  Description of Artificial Sequence: Synthetic oligonucleotide
acaugggcccucagaaacu

SEQ ID NO: 2585079 - RNA, 19 nt, Artificial Sequence
  Description of Artificial Sequence: Synthetic oligonucleotide
gcccaucugaagaagggac

SEQ ID NO: 2585080 - RNA, 19 nt, Artificial Sequence
  Description of Artificial Sequence: Synthetic oligonucleotide
guggggaagacggucucca

SEQ ID NO: 2585081 - RNA, 19 nt, Artificial Sequence
  Description of Artificial Sequence: Synthetic oligonucleotide
ggacucugcccauggcaag

SEQ ID NO: 2585082 - RNA, 19 nt, Artificial Sequence
  Description of Artificial Sequence: Synthetic oligonucleotide
cuugaucuccaaggaagaa

SEQ ID NO: 2585083 - RNA, 19 nt, Artificial Sequence
  Description of Artificial Sequence: Synthetic oligonucleotide
cagaaauggagugguaggu

SEQ ID NO: 2585084 - RNA, 19 nt, Artificial Sequence
  Description of Artificial Sequence: Synthetic oligonucleotide
ggaaaggggcagcuugauc

SEQ ID NO: 2585085 - RNA, 19 nt, Artificial Sequence
  Description of Artificial Sequence: Synthetic oligonucleotide
ggaggugcaccuugggaaa

SEQ ID NO: 2585086 - RNA, 19 nt, Artificial Sequence
  Description of Artificial Sequence: Synthetic oligonucleotide
ccuugaucuccaaggaaga

SEQ ID NO: 2585087 - RNA, 19 nt, Artificial Sequence
  Description of Artificial Sequence: Synthetic oligonucleotide
guuucccaccugcggugug

SEQ ID NO: 2585088 - RNA, 19 nt, Artificial Sequence
  Description of Artificial Sequence: Synthetic oligonucleotide
cggugugauaauuuuaaaa

SEQ ID NO: 2585089 - RNA, 19 nt, Artificial Sequence
  Description of Artificial Sequence: Synthetic oligonucleotide
cauagugguccaucagggu

SEQ ID NO: 2585090 - RNA, 19 nt, Artificial Sequence
  Description of Artificial Sequence: Synthetic oligonucleotide
auucaguggggaagacggu

SEQ ID NO: 2585091 - RNA, 19 nt, Artificial Sequence
  Description of Artificial Sequence: Synthetic oligonucleotide
ccugacauagaguuagcgu

SEQ ID NO: 2585092 - RNA, 19 nt, Artificial Sequence
  Description of Artificial Sequence: Synthetic oligonucleotide
agaagagcucggaggugca

SEQ ID NO: 2585093 - RNA, 19 nt, Artificial Sequence
  Description of Artificial Sequence: Synthetic oligonucleotide
acccuugagcagacauggg

SEQ ID NO: 2585094 - RNA, 19 nt, Artificial Sequence
  Description of Artificial Sequence: Synthetic oligonucleotide
cagcuugaucccauggagu

SEQ ID NO: 2585095 - RNA, 19 nt, Artificial Sequence
  Description of Artificial Sequence: Synthetic oligonucleotide
gguuucagggacaguccac

SEQ ID NO: 2585096 - RNA, 19 nt, Artificial Sequence
  Description of Artificial Sequence: Synthetic oligonucleotide
acaguccacccuccuugau

SEQ ID NO: 2585097 - RNA, 19 nt, Artificial Sequence
  Description of Artificial Sequence: Synthetic oligonucleotide
cugcggugugauaauuuua

SEQ ID NO: 2585098 - RNA, 19 nt, Artificial Sequence
  Description of Artificial Sequence: Synthetic oligonucleotide
uggggaagacggucuccau

SEQ ID NO: 2585099 - RNA, 19 nt, Artificial Sequence
  Description of Artificial Sequence: Synthetic oligonucleotide
cuauggccgugugcagugc

SEQ ID NO: 2585100 - RNA, 19 nt, Artificial Sequence
  Description of Artificial Sequence: Synthetic oligonucleotide
uggcgacagcuggacagga

SEQ ID NO: 2585101 - RNA, 19 nt, Artificial Sequence
  Description of Artificial Sequence: Synthetic oligonucleotide
gccgugugcagugccacag

SEQ ID NO: 2585102 - RNA, 19 nt, Artificial Sequence
  Description of Artificial Sequence: Synthetic oligonucleotide
cuauggcgacagcuggaca

SEQ ID NO: 2585103 - RNA, 19 nt, Artificial Sequence
  Description of Artificial Sequence: Synthetic oligonucleotide
ccauggaguguccuggaga

SEQ ID NO: 2585104 - RNA, 19 nt, Artificial Sequence
  Description of Artificial Sequence: Synthetic oligonucleotide
cccaucugaagaagggaca

SEQ ID NO: 2585105 - RNA, 19 nt, Artificial Sequence
  Description of Artificial Sequence: Synthetic oligonucleotide
cacccugaggacauucagu

SEQ ID NO: 2585106 - RNA, 19 nt, Artificial Sequence
  Description of Artificial Sequence: Synthetic oligonucleotide
gcccucagaaacuguuuga

SEQ ID NO: 2585107 - RNA, 19 nt, Artificial Sequence
  Description of Artificial Sequence: Synthetic oligonucleotide
acaagacccuggagggaca

SEQ ID NO: 2585108 - RNA, 19 nt, Artificial Sequence
  Description of Artificial Sequence: Synthetic oligonucleotide
ccacucagagggacucugc

SEQ ID NO: 2585109 - RNA, 19 nt, Artificial Sequence
  Description of Artificial Sequence: Synthetic oligonucleotide
gcggggcuuagacagcuga

SEQ ID NO: 2585110 - RNA, 19 nt, Artificial Sequence
  Description of Artificial Sequence: Synthetic oligonucleotide
gucaguugucaaggagaca

SEQ ID NO: 2585111 - RNA, 19 nt, Artificial Sequence
  Description of Artificial Sequence: Synthetic oligonucleotide
acucugcccauggcaagaa

SEQ ID NO: 2585112 - RNA, 19 nt, Artificial Sequence
  Description of Artificial Sequence: Synthetic oligonucleotide
accugcggugugauaauuu

SEQ ID NO: 2585113 - RNA, 19 nt, Artificial Sequence
  Description of Artificial Sequence: Synthetic oligonucleotide
ggggaagacggucuccaua

SEQ ID NO: 2585114 - RNA, 19 nt, Artificial Sequence
  Description of Artificial Sequence: Synthetic oligonucleotide
uggcaacaguugugagauc

SEQ ID NO: 2585115 - RNA, 19 nt, Artificial Sequence
  Description of Artificial Sequence: Synthetic oligonucleotide
gggacucugcccauggcaa

SEQ ID NO: 2585116 - RNA, 19 nt, Artificial Sequence
  Description of Artificial Sequence: Synthetic oligonucleotide
auggccgugugcagugcca

SEQ ID NO: 2585117 - RNA, 19 nt, Artificial Sequence
  Description of Artificial Sequence: Synthetic oligonucleotide
gcaggucaguugucaagga

SEQ ID NO: 2585118 - RNA, 19 nt, Artificial Sequence
  Description of Artificial Sequence: Synthetic oligonucleotide
cagccuuggagggacaggu

SEQ ID NO: 2585119 - RNA, 19 nt, Artificial Sequence
  Description of Artificial Sequence: Synthetic oligonucleotide
uucccaccugcggugugau

SEQ ID NO: 2585120 - RNA, 19 nt, Artificial Sequence
  Description of Artificial Sequence: Synthetic oligonucleotide
ggugucuggucucuaggau

SEQ ID NO: 2585121 - RNA, 19 nt, Artificial Sequence
  Description of Artificial Sequence: Synthetic oligonucleotide
gcucggaggugcaccuugg

SEQ ID NO: 2585122 - RNA, 19 nt, Artificial Sequence
  Description of Artificial Sequence: Synthetic oligonucleotide
ggacagguauuguuacccu

SEQ ID NO: 2585123 - RNA, 19 nt, Artificial Sequence
  Description of Artificial Sequence: Synthetic oligonucleotide
cggaggugcaccuugggaa

SEQ ID NO: 2585124 - RNA, 19 nt, Artificial Sequence
  Description of Artificial Sequence: Synthetic oligonucleotide
gcaacaguugugagaucca

SEQ ID NO: 2585125 - RNA, 19 nt, Artificial Sequence
  Description of Artificial Sequence: Synthetic oligonucleotide
ggggcagcuugaucccaug

SEQ ID NO: 2585126 - RNA, 19 nt, Artificial Sequence
  Description of Artificial Sequence: Synthetic oligonucleotide
gcggugugauaauuuuaaa

SEQ ID NO: 2585127 - RNA, 19 nt, Artificial Sequence
  Description of Artificial Sequence: Synthetic oligonucleotide
uggugguuucagggacagu

SEQ ID NO: 2585128 - RNA, 19 nt, Artificial Sequence
  Description of Artificial Sequence: Synthetic oligonucleotide
cccucagaaacuguuugaa

SEQ ID NO: 2585129 - RNA, 19 nt, Artificial Sequence
  Description of Artificial Sequence: Synthetic oligonucleotide
caguguugcagugguggcu

SEQ ID NO: 2585130 - RNA, 19 nt, Artificial Sequence
  Description of Artificial Sequence: Synthetic oligonucleotide
ggacaguguugcaguggug

SEQ ID NO: 2585131 - RNA, 19 nt, Artificial Sequence
  Description of Artificial Sequence: Synthetic oligonucleotide
cggggcuuagacagcugag

SEQ ID NO: 2585132 - RNA, 19 nt, Artificial Sequence
  Description of Artificial Sequence: Synthetic oligonucleotide
caggcuccugaggaacaca

SEQ ID NO: 2585133 - RNA, 19 nt, Artificial Sequence
  Description of Artificial Sequence: Synthetic oligonucleotide
ggagacacugauggucucu

SEQ ID NO: 2585134 - RNA, 19 nt, Artificial Sequence
  Description of Artificial Sequence: Synthetic oligonucleotide
ggacaagacccuggaggga

SEQ ID NO: 2585135 - RNA, 19 nt, Artificial Sequence
  Description of Artificial Sequence: Synthetic oligonucleotide
cuggagggacagccuugga

SEQ ID NO: 2585136 - RNA, 19 nt, Artificial Sequence
  Description of Artificial Sequence: Synthetic oligonucleotide
ggcgacagcuggacaggac

SEQ ID NO: 2585137 - RNA, 19 nt, Artificial Sequence
  Description of Artificial Sequence: Synthetic oligonucleotide
gugguccaucagggugggg

SEQ ID NO: 2585138 - RNA, 19 nt, Artificial Sequence
  Description of Artificial Sequence: Synthetic oligonucleotide
guccacccuccuugaucuc

SEQ ID NO: 2585139 - RNA, 19 nt, Artificial Sequence
  Description of Artificial Sequence: Synthetic oligonucleotide
cagccucaguuucccaccu

SEQ ID NO: 2585140 - RNA, 19 nt, Artificial Sequence
  Description of Artificial Sequence: Synthetic oligonucleotide
gacccuggagggacagccu

SEQ ID NO: 2585141 - RNA, 19 nt, Artificial Sequence
  Description of Artificial Sequence: Synthetic oligonucleotide
ccugcggugugauaauuuu

SEQ ID NO: 2585142 - RNA, 19 nt, Artificial Sequence
  Description of Artificial Sequence: Synthetic oligonucleotide
ggaagacggucuccauagu

SEQ ID NO: 2585143 - RNA, 19 nt, Artificial Sequence
  Description of Artificial Sequence: Synthetic oligonucleotide
ccaagcugucuggggcggg

SEQ ID NO: 2585144 - RNA, 19 nt, Artificial Sequence
  Description of Artificial Sequence: Synthetic oligonucleotide
ggccgugugcagugccaca

SEQ ID NO: 2585145 - RNA, 19 nt, Artificial Sequence
  Description of Artificial Sequence: Synthetic oligonucleotide
gcuugaucccauggagugu

SEQ ID NO: 2585146 - RNA, 19 nt, Artificial Sequence
  Description of Artificial Sequence: Synthetic oligonucleotide
gcugccugacauagaguua

SEQ ID NO: 2585147 - RNA, 19 nt, Artificial Sequence
  Description of Artificial Sequence: Synthetic oligonucleotide
cgacagcuggacaggacaa

SEQ ID NO: 2585148 - RNA, 19 nt, Artificial Sequence
  Description of Artificial Sequence: Synthetic oligonucleotide
ggacauucaucaggcuccu

SEQ ID NO: 2585149 - RNA, 19 nt, Artificial Sequence
  Description of Artificial Sequence: Synthetic oligonucleotide
cugucuggggcggggcuua

SEQ ID NO: 2585150 - RNA, 19 nt, Artificial Sequence
  Description of Artificial Sequence: Synthetic oligonucleotide
caucugaagaagggacauu

SEQ ID NO: 2585151 - RNA, 19 nt, Artificial Sequence
  Description of Artificial Sequence: Synthetic oligonucleotide
gcccuguuugggcccaucu

SEQ ID NO: 2585152 - RNA, 19 nt, Artificial Sequence
  Description of Artificial Sequence: Synthetic oligonucleotide
cuugggaaaggggcagcuu

SEQ ID NO: 2585153 - RNA, 19 nt, Artificial Sequence
  Description of Artificial Sequence: Synthetic oligonucleotide
gguaggugucuggucucua

SEQ ID NO: 2585154 - RNA, 19 nt, Artificial Sequence
  Description of Artificial Sequence: Synthetic oligonucleotide
ggggcggggcuuagacagc

SEQ ID NO: 2585155 - RNA, 19 nt, Artificial Sequence
  Description of Artificial Sequence: Synthetic oligonucleotide
gggacaguccacccuccuu

SEQ ID NO: 2585156 - RNA, 19 nt, Artificial Sequence
  Description of Artificial Sequence: Synthetic oligonucleotide
gucuggggcggggcuuaga

SEQ ID NO: 2585157 - RNA, 19 nt, Artificial Sequence
  Description of Artificial Sequence: Synthetic oligonucleotide
ggcggggcuuagacagcug

SEQ ID NO: 2585158 - RNA, 19 nt, Artificial Sequence
  Description of Artificial Sequence: Synthetic oligonucleotide
ccuuggagggacagguauu

SEQ ID NO: 2585159 - RNA, 19 nt, Artificial Sequence
  Description of Artificial Sequence: Synthetic oligonucleotide
gggaaaggggcagcuugau

SEQ ID NO: 2585160 - RNA, 19 nt, Artificial Sequence
  Description of Artificial Sequence: Synthetic oligonucleotide
gggcggggcuuagacagcu

SEQ ID NO: 2585161 - RNA, 19 nt, Artificial Sequence
  Description of Artificial Sequence: Synthetic oligonucleotide
gucuggucucuaggauagu

SEQ ID NO: 2585162 - RNA, 19 nt, Artificial Sequence
  Description of Artificial Sequence: Synthetic oligonucleotide
ccuugggaaaggggcagcu

SEQ ID NO: 2585163 - RNA, 19 nt, Artificial Sequence
  Description of Artificial Sequence: Synthetic oligonucleotide
ggacagccuuggagggaca

SEQ ID NO: 2585164 - RNA, 19 nt, Artificial Sequence
  Description of Artificial Sequence: Synthetic oligonucleotide
ccagaguuuuggucuccau

SEQ ID NO: 2585165 - RNA, 19 nt, Artificial Sequence
  Description of Artificial Sequence: Synthetic oligonucleotide
caccugcggugugauaauu

SEQ ID NO: 2585166 - RNA, 19 nt, Artificial Sequence
  Description of Artificial Sequence: Synthetic oligonucleotide
cccuggacaccagaguuuu

SEQ ID NO: 2585167 - RNA, 19 nt, Artificial Sequence
  Description of Artificial Sequence: Synthetic oligonucleotide
gggcccucagaaacuguuu

SEQ ID NO: 2585168 - RNA, 19 nt, Artificial Sequence
  Description of Artificial Sequence: Synthetic oligonucleotide
ccaccugcggugugauaau

SEQ ID NO: 2585169 - RNA, 19 nt, Artificial Sequence
  Description of Artificial Sequence: Synthetic oligonucleotide
gggucacccugaggacauu

SEQ ID NO: 2585170 - RNA, 19 nt, Artificial Sequence
  Description of Artificial Sequence: Synthetic oligonucleotide
uuuuaacaagcugagaucg

SEQ ID NO: 2585171 - RNA, 19 nt, Artificial Sequence
  Description of Artificial Sequence: Synthetic oligonucleotide
gaugaaaagccuuggaagg

SEQ ID NO: 2585172 - RNA, 19 nt, Artificial Sequence
  Description of Artificial Sequence: Synthetic oligonucleotide
agauucaugaugaaaagcc

SEQ ID NO: 2585173 - RNA, 19 nt, Artificial Sequence
  Description of Artificial Sequence: Synthetic oligonucleotide
uuuccuuuuaacaagcuga

SEQ ID NO: 2585174 - RNA, 19 nt, Artificial Sequence
  Description of Artificial Sequence: Synthetic oligonucleotide
uuucuuuaaguguugaugc

SEQ ID NO: 2585175 - RNA, 19 nt, Artificial Sequence
  Description of Artificial Sequence: Synthetic oligonucleotide
agcaguaacaucucuaagg

SEQ ID NO: 2585176 - RNA, 19 nt, Artificial Sequence
  Description of Artificial Sequence: Synthetic oligonucleotide
ugaugaaaagccuuggaag

SEQ ID NO: 2585177 - RNA, 19 nt, Artificial Sequence
  Description of Artificial Sequence: Synthetic oligonucleotide
aaguguuugaugccgagag

SEQ ID NO: 2585178 - RNA, 19 nt, Artificial Sequence
  Description of Artificial Sequence: Synthetic oligonucleotide
aguugcaccacguucauuc

SEQ ID NO: 2585179 - RNA, 19 nt, Artificial Sequence
  Description of Artificial Sequence: Synthetic oligonucleotide
aauguuugaucuguucugc

SEQ ID NO: 2585180 - RNA, 19 nt, Artificial Sequence
  Description of Artificial Sequence: Synthetic oligonucleotide
gaaucucuaauuuauuagc

SEQ ID NO: 2585181 - RNA, 19 nt, Artificial Sequence
  Description of Artificial Sequence: Synthetic oligonucleotide
aguguugaugcuuuauagc

SEQ ID NO: 2585182 - RNA, 19 nt, Artificial Sequence
  Description of Artificial Sequence: Synthetic oligonucleotide
uuuauuacuuuccaaaguu

SEQ ID NO: 2585183 - RNA, 19 nt, Artificial Sequence
  Description of Artificial Sequence: Synthetic oligonucleotide
aaguguugaugcuuuauag

SEQ ID NO: 2585184 - RNA, 19 nt, Artificial Sequence
  Description of Artificial Sequence: Synthetic oligonucleotide
agaaucucuaauuuauuag

SEQ ID NO: 2585185 - RNA, 19 nt, Artificial Sequence
  Description of Artificial Sequence: Synthetic oligonucleotide
ucuuucuaauguuugaucu

SEQ ID NO: 2585186 - RNA, 19 nt, Artificial Sequence
  Description of Artificial Sequence: Synthetic oligonucleotide
agcuuuauucaauucuccc

SEQ ID NO: 2585187 - RNA, 19 nt, Artificial Sequence
  Description of Artificial Sequence: Synthetic oligonucleotide
uucgaguuguuucuuaaag

SEQ ID NO: 2585188 - RNA, 19 nt, Artificial Sequence
  Description of Artificial Sequence: Synthetic oligonucleotide
auucaauucucccugaagu

SEQ ID NO: 2585189 - RNA, 19 nt, Artificial Sequence
  Description of Artificial Sequence: Synthetic oligonucleotide
uuuuauuacuuuccaaagu

SEQ ID NO: 2585190 - RNA, 19 nt, Artificial Sequence
  Description of Artificial Sequence: Synthetic oligonucleotide
ucugcuucaaugcauccag

SEQ ID NO: 2585191 - RNA, 19 nt, Artificial Sequence
  Description of Artificial Sequence: Synthetic oligonucleotide
auauucuugauuugugguc

SEQ ID NO: 2585192 - RNA, 19 nt, Artificial Sequence
  Description of Artificial Sequence: Synthetic oligonucleotide
uuugcuuuagauucuggug

SEQ ID NO: 2585193 - RNA, 19 nt, Artificial Sequence
  Description of Artificial Sequence: Synthetic oligonucleotide
aaaucagcuauuuucuuaa

SEQ ID NO: 2585194 - RNA, 19 nt, Artificial Sequence
  Description of Artificial Sequence: Synthetic oligonucleotide
ucugaguugauuuugcaaa

SEQ ID NO: 2585195 - RNA, 19 nt, Artificial Sequence
  Description of Artificial Sequence: Synthetic oligonucleotide
ucucuaauuuauuagcugu

SEQ ID NO: 2585196 - RNA, 19 nt, Artificial Sequence
  Description of Artificial Sequence: Synthetic oligonucleotide
ucuagaagcauccuuguau

SEQ ID NO: 2585197 - RNA, 19 nt, Artificial Sequence
  Description of Artificial Sequence: Synthetic oligonucleotide
aauuuauuagcuguuccug

SEQ ID NO: 2585198 - RNA, 19 nt, Artificial Sequence
  Description of Artificial Sequence: Synthetic oligonucleotide
ugaucuguucugcagaucu

SEQ ID NO: 2585199 - RNA, 19 nt, Artificial Sequence
  Description of Artificial Sequence: Synthetic oligonucleotide
aaaguccucauccuguugu

SEQ ID NO: 2585200 - RNA, 19 nt, Artificial Sequence
  Description of Artificial Sequence: Synthetic oligonucleotide
aguaacaucucuaaggucu

SEQ ID NO: 2585201 - RNA, 19 nt, Artificial Sequence
  Description of Artificial Sequence: Synthetic oligonucleotide
uguauauucuugauuugug

SEQ ID NO: 2585202 - RNA, 19 nt, Artificial Sequence
  Description of Artificial Sequence: Synthetic oligonucleotide
uauuacuuuccaaaguuaa

SEQ ID NO: 2585203 - RNA, 19 nt, Artificial Sequence
  Description of Artificial Sequence: Synthetic oligonucleotide
uauauucuugauuuguggu

SEQ ID NO: 2585204 - RNA, 19 nt, Artificial Sequence
  Description of Artificial Sequence: Synthetic oligonucleotide
ugacagagauucaugauga

SEQ ID NO: 2585205 - RNA, 19 nt, Artificial Sequence
  Description of Artificial Sequence: Synthetic oligonucleotide
ucaguugucaguaucuggu

SEQ ID NO: 2585206 - RNA, 19 nt, Artificial Sequence
  Description of Artificial Sequence: Synthetic oligonucleotide
uuuauuagcuguuccugag

SEQ ID NO: 2585207 - RNA, 19 nt, Artificial Sequence
  Description of Artificial Sequence: Synthetic oligonucleotide
uuuauagcuuuccaauuga

SEQ ID NO: 2585208 - RNA, 19 nt, Artificial Sequence
  Description of Artificial Sequence: Synthetic oligonucleotide
uguugaacaucuucuacgc

SEQ ID NO: 2585209 - RNA, 19 nt, Artificial Sequence
  Description of Artificial Sequence: Synthetic oligonucleotide
guguugaacaucuucuacg

SEQ ID NO: 2585210 - RNA, 19 nt, Artificial Sequence
  Description of Artificial Sequence: Synthetic oligonucleotide
uucacaacaugcuugauuu

SEQ ID NO: 2585211 - RNA, 19 nt, Artificial Sequence
  Description of Artificial Sequence: Synthetic oligonucleotide
cuuuauucaauucucccug

SEQ ID NO: 2585212 - RNA, 19 nt, Artificial Sequence
  Description of Artificial Sequence: Synthetic oligonucleotide
uaauuuauuagcuguuccu

SEQ ID NO: 2585213 - RNA, 19 nt, Artificial Sequence
  Description of Artificial Sequence: Synthetic oligonucleotide
gaugccgagagcuuuauuc

SEQ ID NO: 2585214 - RNA, 19 nt, Artificial Sequence
  Description of Artificial Sequence: Synthetic oligonucleotide
aagaaucucuaauuuauua

SEQ ID NO: 2585215 - RNA, 19 nt, Artificial Sequence
  Description of Artificial Sequence: Synthetic oligonucleotide
auuucuuuaaguguugaug

SEQ ID NO: 2585216 - RNA, 19 nt, Artificial Sequence
  Description of Artificial Sequence: Synthetic oligonucleotide
uuuucuuaaguggacguag

SEQ ID NO: 2585217 - RNA, 19 nt, Artificial Sequence
  Description of Artificial Sequence: Synthetic oligonucleotide
cuaauuuauuagcuguucc

SEQ ID NO: 2585218 - RNA, 19 nt, Artificial Sequence
  Description of Artificial Sequence: Synthetic oligonucleotide
uauucaauucucccugaag

SEQ ID NO: 2585219 - RNA, 19 nt, Artificial Sequence
  Description of Artificial Sequence: Synthetic oligonucleotide
uucaguuucacaacaugcu

SEQ ID NO: 2585220 - RNA, 19 nt, Artificial Sequence
  Description of Artificial Sequence: Synthetic oligonucleotide
aaaguuaacucugccacug

SEQ ID NO: 2585221 - RNA, 19 nt, Artificial Sequence
  Description of Artificial Sequence: Synthetic oligonucleotide
uuacuuuccaaaguuaacu

SEQ ID NO: 2585222 - RNA, 19 nt, Artificial Sequence
  Description of Artificial Sequence: Synthetic oligonucleotide
ucucccugaagucugagcu

SEQ ID NO: 2585223 - RNA, 19 nt, Artificial Sequence
  Description of Artificial Sequence: Synthetic oligonucleotide
aacaaugccugcuucucug

SEQ ID NO: 2585224 - RNA, 19 nt, Artificial Sequence
  Description of Artificial Sequence: Synthetic oligonucleotide
ucuuaaaguccucauccug

SEQ ID NO: 2585225 - RNA, 19 nt, Artificial Sequence
  Description of Artificial Sequence: Synthetic oligonucleotide
cuuuccaaaguuaacucug

SEQ ID NO: 2585226 - RNA, 19 nt, Artificial Sequence
  Description of Artificial Sequence: Synthetic oligonucleotide
guucugcagaucuagaagc

SEQ ID NO: 2585227 - RNA, 19 nt, Artificial Sequence
  Description of Artificial Sequence: Synthetic oligonucleotide
uuccaauugagcaguaaca

SEQ ID NO: 2585228 - RNA, 19 nt, Artificial Sequence
  Description of Artificial Sequence: Synthetic oligonucleotide
acguucauucaacaaugcc

SEQ ID NO: 2585229 - RNA, 19 nt, Artificial Sequence
  Description of Artificial Sequence: Synthetic oligonucleotide
uucuuguagagucaaguuc

SEQ ID NO: 2585230 - RNA, 19 nt, Artificial Sequence
  Description of Artificial Sequence: Synthetic oligonucleotide
uuuaacaagcugagaucgg

SEQ ID NO: 2585231 - RNA, 19 nt, Artificial Sequence
  Description of Artificial Sequence: Synthetic oligonucleotide
aucucuaaggucuugcacu

SEQ ID NO: 2585232 - RNA, 19 nt, Artificial Sequence
  Description of Artificial Sequence: Synthetic oligonucleotide
ugcagaucuagaagcaucc

SEQ ID NO: 2585233 - RNA, 19 nt, Artificial Sequence
  Description of Artificial Sequence: Synthetic oligonucleotide
uuuugcuuuagauucuggu

SEQ ID NO: 2585234 - RNA, 19 nt, Artificial Sequence
  Description of Artificial Sequence: Synthetic oligonucleotide
ugauuuguggucucaguug

SEQ ID NO: 2585235 - RNA, 19 nt, Artificial Sequence
  Description of Artificial Sequence: Synthetic oligonucleotide
gagaucggaguuuugacac

SEQ ID NO: 2585236 - RNA, 19 nt, Artificial Sequence
  Description of Artificial Sequence: Synthetic oligonucleotide
uguuugaucuguucugcag

SEQ ID NO: 2585237 - RNA, 19 nt, Artificial Sequence
  Description of Artificial Sequence: Synthetic oligonucleotide
uuccuuuuaacaagcugag

SEQ ID NO: 2585238 - RNA, 19 nt, Artificial Sequence
  Description of Artificial Sequence: Synthetic oligonucleotide
aaguuaacucugccacugc

SEQ ID NO: 2585239 - RNA, 19 nt, Artificial Sequence
  Description of Artificial Sequence: Synthetic oligonucleotide
agagauucaugaugaaaag

SEQ ID NO: 2585240 - RNA, 19 nt, Artificial Sequence
  Description of Artificial Sequence: Synthetic oligonucleotide
uuauagcuuuccaauugag

SEQ ID NO: 2585241 - RNA, 19 nt, Artificial Sequence
  Description of Artificial Sequence: Synthetic oligonucleotide
uaucugguguugaacaucu

SEQ ID NO: 2585242 - RNA, 19 nt, Artificial Sequence
  Description of Artificial Sequence: Synthetic oligonucleotide
cagcuauuuucuuaagugg

SEQ ID NO: 2585243 - RNA, 19 nt, Artificial Sequence
  Description of Artificial Sequence: Synthetic oligonucleotide
ucuauuucuuuaaguguug

SEQ ID NO: 2585244 - RNA, 19 nt, Artificial Sequence
  Description of Artificial Sequence: Synthetic oligonucleotide
aguaguucugcauaagaau

SEQ ID NO: 2585245 - RNA, 19 nt, Artificial Sequence
  Description of Artificial Sequence: Synthetic oligonucleotide
ugcuuuauagcuuuccaau

SEQ ID NO: 2585246 - RNA, 19 nt, Artificial Sequence
  Description of Artificial Sequence: Synthetic oligonucleotide
aagaucuucuauuucuuua

SEQ ID NO: 2585247 - RNA, 19 nt, Artificial Sequence
  Description of Artificial Sequence: Synthetic oligonucleotide
cuuaaguggacguagaugu

SEQ ID NO: 2585248 - RNA, 19 nt, Artificial Sequence
  Description of Artificial Sequence: Synthetic oligonucleotide
aaucucuaauuuauuagcu

SEQ ID NO: 2585249 - RNA, 19 nt, Artificial Sequence
  Description of Artificial Sequence: Synthetic oligonucleotide
ucuaaggucuugcacugug

SEQ ID NO: 2585250 - RNA, 19 nt, Artificial Sequence
  Description of Artificial Sequence: Synthetic oligonucleotide
uccaaaguuaacucugcca

SEQ ID NO: 2585251 - RNA, 19 nt, Artificial Sequence
  Description of Artificial Sequence: Synthetic oligonucleotide
aacaagcugagaucggagu

SEQ ID NO: 2585252 - RNA, 19 nt, Artificial Sequence
  Description of Artificial Sequence: Synthetic oligonucleotide
gauuuugcaaaucagcuau

SEQ ID NO: 2585253 - RNA, 19 nt, Artificial Sequence
  Description of Artificial Sequence: Synthetic oligonucleotide
cuuuagauucuggugaccc

SEQ ID NO: 2585254 - RNA, 19 nt, Artificial Sequence
  Description of Artificial Sequence: Synthetic oligonucleotide
cuuuuaacaagcugagauc

SEQ ID NO: 2585255 - RNA, 19 nt, Artificial Sequence
  Description of Artificial Sequence: Synthetic oligonucleotide
uuagauucuggugacccag

SEQ ID NO: 2585256 - RNA, 19 nt, Artificial Sequence
  Description of Artificial Sequence: Synthetic oligonucleotide
ugcauaagaaucucuaauu

SEQ ID NO: 2585257 - RNA, 19 nt, Artificial Sequence
  Description of Artificial Sequence: Synthetic oligonucleotide
uauucuugauuuguggucu

SEQ ID NO: 2585258 - RNA, 19 nt, Artificial Sequence
  Description of Artificial Sequence: Synthetic oligonucleotide
uuucuaauguuugaucugu

SEQ ID NO: 2585259 - RNA, 19 nt, Artificial Sequence
  Description of Artificial Sequence: Synthetic oligonucleotide
cuauuuucuuaaguggacg

SEQ ID NO: 2585260 - RNA, 19 nt, Artificial Sequence
  Description of Artificial Sequence: Synthetic oligonucleotide
uuuccaaaguuaacucugc

SEQ ID NO: 2585261 - RNA, 19 nt, Artificial Sequence
  Description of Artificial Sequence: Synthetic oligonucleotide
auuuauuagcuguuccuga

SEQ ID NO: 2585262 - RNA, 19 nt, Artificial Sequence
  Description of Artificial Sequence: Synthetic oligonucleotide
aucucuaauuuauuagcug

SEQ ID NO: 2585263 - RNA, 19 nt, Artificial Sequence
  Description of Artificial Sequence: Synthetic oligonucleotide
ucugguguugaacaucuuc

SEQ ID NO: 2585264 - RNA, 19 nt, Artificial Sequence
  Description of Artificial Sequence: Synthetic oligonucleotide
ugagaucggaguuuugaca

SEQ ID NO: 2585265 - RNA, 19 nt, Artificial Sequence
  Description of Artificial Sequence: Synthetic oligonucleotide
uuugacaccuccgauuuca

SEQ ID NO: 2585266 - RNA, 19 nt, Artificial Sequence
  Description of Artificial Sequence: Synthetic oligonucleotide
uugaacaucuucuacgcuu

SEQ ID NO: 2585267 - RNA, 19 nt, Artificial Sequence
  Description of Artificial Sequence: Synthetic oligonucleotide
augaugaaaagccuuggaa

SEQ ID NO: 2585268 - RNA, 19 nt, Artificial Sequence
  Description of Artificial Sequence: Synthetic oligonucleotide
aguuucacaacaugcuuga

SEQ ID NO: 2585269 - RNA, 19 nt, Artificial Sequence
  Description of Artificial Sequence: Synthetic oligonucleotide
gaguugauuuugcaaauca

SEQ ID NO: 2585270 - RNA, 19 nt, Artificial Sequence
  Description of Artificial Sequence: Synthetic oligonucleotide
ugagcaguaacaucucuaa

SEQ ID NO: 2585271 - RNA, 19 nt, Artificial Sequence
  Description of Artificial Sequence: Synthetic oligonucleotide
aguguuugaugccgagagc

SEQ ID NO: 2585272 - RNA, 19 nt, Artificial Sequence
  Description of Artificial Sequence: Synthetic oligonucleotide
acuuuccaaaguuaacucu

SEQ ID NO: 2585273 - RNA, 19 nt, Artificial Sequence
  Description of Artificial Sequence: Synthetic oligonucleotide
uuguauauucuugauuugu

SEQ ID NO: 2585274 - RNA, 19 nt, Artificial Sequence
  Description of Artificial Sequence: Synthetic oligonucleotide
auuacuuuccaaaguuaac

SEQ ID NO: 2585275 - RNA, 19 nt, Artificial Sequence
  Description of Artificial Sequence: Synthetic oligonucleotide
uaacaagcugagaucggag

SEQ ID NO: 2585276 - RNA, 19 nt, Artificial Sequence
  Description of Artificial Sequence: Synthetic oligonucleotide
uccgauuucaguuggcuau

SEQ ID NO: 2585277 - RNA, 19 nt, Artificial Sequence
  Description of Artificial Sequence: Synthetic oligonucleotide
ucuaauguuugaucuguuc

SEQ ID NO: 2585278 - RNA, 19 nt, Artificial Sequence
  Description of Artificial Sequence: Synthetic oligonucleotide
uagcuuuccaauugagcag

SEQ ID NO: 2585279 - RNA, 19 nt, Artificial Sequence
  Description of Artificial Sequence: Synthetic oligonucleotide
agaucuagaagcauccuug

SEQ ID NO: 2585280 - RNA, 19 nt, Artificial Sequence
  Description of Artificial Sequence: Synthetic oligonucleotide
uugauuuguggucucaguu

SEQ ID NO: 2585281 - RNA, 19 nt, Artificial Sequence
  Description of Artificial Sequence: Synthetic oligonucleotide
caauugagcaguaacaucu

SEQ ID NO: 2585282 - RNA, 19 nt, Artificial Sequence
  Description of Artificial Sequence: Synthetic oligonucleotide
aacccugccuaugacagag

SEQ ID NO: 2585283 - RNA, 19 nt, Artificial Sequence
  Description of Artificial Sequence: Synthetic oligonucleotide
gagauucaugaugaaaagc

SEQ ID NO: 2585284 - RNA, 19 nt, Artificial Sequence
  Description of Artificial Sequence: Synthetic oligonucleotide
uaaguguugaugcuuuaua

SEQ ID NO: 2585285 - RNA, 19 nt, Artificial Sequence
  Description of Artificial Sequence: Synthetic oligonucleotide
cuuucuaauguuugaucug

SEQ ID NO: 2585286 - RNA, 19 nt, Artificial Sequence
  Description of Artificial Sequence: Synthetic oligonucleotide
uucugcauaagaaucucua

SEQ ID NO: 2585287 - RNA, 19 nt, Artificial Sequence
  Description of Artificial Sequence: Synthetic oligonucleotide
uauuagcuguuccugaguu

SEQ ID NO: 2585288 - RNA, 19 nt, Artificial Sequence
  Description of Artificial Sequence: Synthetic oligonucleotide
guagagucaaguucuccag

SEQ ID NO: 2585289 - RNA, 19 nt, Artificial Sequence
  Description of Artificial Sequence: Synthetic oligonucleotide
aaucagcuauuuucuuaag

SEQ ID NO: 2585290 - RNA, 19 nt, Artificial Sequence
  Description of Artificial Sequence: Synthetic oligonucleotide
ucgaguuguuucuuaaagu

SEQ ID NO: 2585291 - RNA, 19 nt, Artificial Sequence
  Description of Artificial Sequence: Synthetic oligonucleotide
gaguuguuucuuaaagucc

SEQ ID NO: 2585292 - RNA, 19 nt, Artificial Sequence
  Description of Artificial Sequence: Synthetic oligonucleotide
agagucaaguucuccagcu

SEQ ID NO: 2585293 - RNA, 19 nt, Artificial Sequence
  Description of Artificial Sequence: Synthetic oligonucleotide
aguuguuucuuaaaguccu

SEQ ID NO: 2585294 - RNA, 19 nt, Artificial Sequence
  Description of Artificial Sequence: Synthetic oligonucleotide
uacuuuccaaaguuaacuc

SEQ ID NO: 2585295 - RNA, 19 nt, Artificial Sequence
  Description of Artificial Sequence: Synthetic oligonucleotide
ucucuaaggucuugcacug

SEQ ID NO: 2585296 - RNA, 19 nt, Artificial Sequence
  Description of Artificial Sequence: Synthetic oligonucleotide
gauucuggugacccaguag

SEQ ID NO: 2585297 - RNA, 19 nt, Artificial Sequence
  Description of Artificial Sequence: Synthetic oligonucleotide
uugcacugugucauuauac

SEQ ID NO: 2585298 - RNA, 19 nt, Artificial Sequence
  Description of Artificial Sequence: Synthetic oligonucleotide
acugugucauuauaccucu

SEQ ID NO: 2585299 - RNA, 19 nt, Artificial Sequence
  Description of Artificial Sequence: Synthetic oligonucleotide
uuucuuaaguggacguaga

SEQ ID NO: 2585300 - RNA, 19 nt, Artificial Sequence
  Description of Artificial Sequence: Synthetic oligonucleotide
agaucuucuauuucuuuaa

SEQ ID NO: 2585301 - RNA, 19 nt, Artificial Sequence
  Description of Artificial Sequence: Synthetic oligonucleotide
uucuuucuaauguuugauc

SEQ ID NO: 2585302 - RNA, 19 nt, Artificial Sequence
  Description of Artificial Sequence: Synthetic oligonucleotide
gaugcuuuauagcuuucca

SEQ ID NO: 2585303 - RNA, 19 nt, Artificial Sequence
  Description of Artificial Sequence: Synthetic oligonucleotide
uugucugaguugauuuugc

SEQ ID NO: 2585304 - RNA, 19 nt, Artificial Sequence
  Description of Artificial Sequence: Synthetic oligonucleotide
acaaugccugcuucucugc

SEQ ID NO: 2585305 - RNA, 19 nt, Artificial Sequence
  Description of Artificial Sequence: Synthetic oligonucleotide
ucuaauuuauuagcuguuc

SEQ ID NO: 2585306 - RNA, 19 nt, Artificial Sequence
  Description of Artificial Sequence: Synthetic oligonucleotide
cucaguugucaguaucugg

SEQ ID NO: 2585307 - RNA, 19 nt, Artificial Sequence
  Description of Artificial Sequence: Synthetic oligonucleotide
aucagcuauuuucuuaagu

SEQ ID NO: 2585308 - RNA, 19 nt, Artificial Sequence
  Description of Artificial Sequence: Synthetic oligonucleotide
agaucggaguuuugacacc

SEQ ID NO: 2585309 - RNA, 19 nt, Artificial Sequence
  Description of Artificial Sequence: Synthetic oligonucleotide
ugauuuugcaaaucagcua

SEQ ID NO: 2585310 - RNA, 19 nt, Artificial Sequence
  Description of Artificial Sequence: Synthetic oligonucleotide
cuaugacagagauucauga

SEQ ID NO: 2585311 - RNA, 19 nt, Artificial Sequence
  Description of Artificial Sequence: Synthetic oligonucleotide
ucggaguuuugacaccucc

SEQ ID NO: 2585312 - RNA, 19 nt, Artificial Sequence
  Description of Artificial Sequence: Synthetic oligonucleotide
uuauuagcuguuccugagu

SEQ ID NO: 2585313 - RNA, 19 nt, Artificial Sequence
  Description of Artificial Sequence: Synthetic oligonucleotide
cacugugucauuauaccuc

SEQ ID NO: 2585314 - RNA, 19 nt, Artificial Sequence
  Description of Artificial Sequence: Synthetic oligonucleotide
uagagucaaguucuccagc

SEQ ID NO: 2585315 - RNA, 19 nt, Artificial Sequence
  Description of Artificial Sequence: Synthetic oligonucleotide
uuccaaaguuaacucugcc

SEQ ID NO: 2585316 - RNA, 19 nt, Artificial Sequence
  Description of Artificial Sequence: Synthetic oligonucleotide
aaguccucauccuguuguc

SEQ ID NO: 2585317 - RNA, 19 nt, Artificial Sequence
  Description of Artificial Sequence: Synthetic oligonucleotide
uuuguggucucaguuguca

SEQ ID NO: 2585318 - RNA, 19 nt, Artificial Sequence
  Description of Artificial Sequence: Synthetic oligonucleotide
guaguucugcauaagaauc

SEQ ID NO: 2585319 - RNA, 19 nt, Artificial Sequence
  Description of Artificial Sequence: Synthetic oligonucleotide
uaaguggacguagauguga

SEQ ID NO: 2585320 - RNA, 19 nt, Artificial Sequence
  Description of Artificial Sequence: Synthetic oligonucleotide
ucugcauaagaaucucuaa

SEQ ID NO: 2585321 - RNA, 19 nt, Artificial Sequence
  Description of Artificial Sequence: Synthetic oligonucleotide
gggucgaaguguuugaugc

SEQ ID NO: 2585322 - RNA, 19 nt, Artificial Sequence
  Description of Artificial Sequence: Synthetic oligonucleotide
uucugcagaucuagaagca

SEQ ID NO: 2585323 - RNA, 19 nt, Artificial Sequence
  Description of Artificial Sequence: Synthetic oligonucleotide
ccaaaguuaacucugccac

SEQ ID NO: 2585324 - RNA, 19 nt, Artificial Sequence
  Description of Artificial Sequence: Synthetic oligonucleotide
aaggucuugcacuguguca

SEQ ID NO: 2585325 - RNA, 19 nt, Artificial Sequence
  Description of Artificial Sequence: Synthetic oligonucleotide
uuuagauucuggugaccca

SEQ ID NO: 2585326 - RNA, 19 nt, Artificial Sequence
  Description of Artificial Sequence: Synthetic oligonucleotide
aguugucaguaucuggugu

SEQ ID NO: 2585327 - RNA, 19 nt, Artificial Sequence
  Description of Artificial Sequence: Synthetic oligonucleotide
gucgaaguguuugaugccg

SEQ ID NO: 2585328 - RNA, 19 nt, Artificial Sequence
  Description of Artificial Sequence: Synthetic oligonucleotide
aguuuugacaccuccgauu

SEQ ID NO: 2585329 - RNA, 19 nt, Artificial Sequence
  Description of Artificial Sequence: Synthetic oligonucleotide
uaugacagagauucaugau

SEQ ID NO: 2585330 - RNA, 19 nt, Artificial Sequence
  Description of Artificial Sequence: Synthetic oligonucleotide
uuucuuguagagucaaguu

SEQ ID NO: 2585331 - RNA, 19 nt, Artificial Sequence
  Description of Artificial Sequence: Synthetic oligonucleotide
cuuguauauucuugauuug

SEQ ID NO: 2585332 - RNA, 19 nt, Artificial Sequence
  Description of Artificial Sequence: Synthetic oligonucleotide
uccaauugagcaguaacau

SEQ ID NO: 2585333 - RNA, 19 nt, Artificial Sequence
  Description of Artificial Sequence: Synthetic oligonucleotide
ugcaccacguucauucaac

SEQ ID NO: 2585334 - RNA, 19 nt, Artificial Sequence
  Description of Artificial Sequence: Synthetic oligonucleotide
uuugaucuguucugcagau

SEQ ID NO: 2585335 - RNA, 19 nt, Artificial Sequence
  Description of Artificial Sequence: Synthetic oligonucleotide
uuaaguggacguagaugug

SEQ ID NO: 2585336 - RNA, 19 nt, Artificial Sequence
  Description of Artificial Sequence: Synthetic oligonucleotide
agaugugauuucuuuaauu

SEQ ID NO: 2585337 - RNA, 19 nt, Artificial Sequence
  Description of Artificial Sequence: Synthetic oligonucleotide
aguugauuuugcaaaucag

SEQ ID NO: 2585338 - RNA, 19 nt, Artificial Sequence
  Description of Artificial Sequence: Synthetic oligonucleotide
uugagcaguaacaucucua

SEQ ID NO: 2585339 - RNA, 19 nt, Artificial Sequence
  Description of Artificial Sequence: Synthetic oligonucleotide
ugaugcuuuauagcuuucc

SEQ ID NO: 2585340 - RNA, 19 nt, Artificial Sequence
  Description of Artificial Sequence: Synthetic oligonucleotide
aguuaacucugccacugca

SEQ ID NO: 2585341 - RNA, 19 nt, Artificial Sequence
  Description of Artificial Sequence: Synthetic oligonucleotide
uuauucaauucucccugaa

SEQ ID NO: 2585342 - RNA, 19 nt, Artificial Sequence
  Description of Artificial Sequence: Synthetic oligonucleotide
guuugaucuguucugcaga

SEQ ID NO: 2585343 - RNA, 19 nt, Artificial Sequence
  Description of Artificial Sequence: Synthetic oligonucleotide
ucauucaacaaugccugcu

SEQ ID NO: 2585344 - RNA, 19 nt, Artificial Sequence
  Description of Artificial Sequence: Synthetic oligonucleotide
caauucucccugaagucug

SEQ ID NO: 2585345 - RNA, 19 nt, Artificial Sequence
  Description of Artificial Sequence: Synthetic oligonucleotide
guuccugaguugcaccacg

SEQ ID NO: 2585346 - RNA, 19 nt, Artificial Sequence
  Description of Artificial Sequence: Synthetic oligonucleotide
ucuugauuuguggucucag

SEQ ID NO: 2585347 - RNA, 19 nt, Artificial Sequence
  Description of Artificial Sequence: Synthetic oligonucleotide
uuccucuucgaguuguuuc

SEQ ID NO: 2585348 - RNA, 19 nt, Artificial Sequence
  Description of Artificial Sequence: Synthetic oligonucleotide
agcuauuuucuuaagugga

SEQ ID NO: 2585349 - RNA, 19 nt, Artificial Sequence
  Description of Artificial Sequence: Synthetic oligonucleotide
guguugaugcuuuauagcu

SEQ ID NO: 2585350 - RNA, 19 nt, Artificial Sequence
  Description of Artificial Sequence: Synthetic oligonucleotide
ucuuucaguuucacaacau

SEQ ID NO: 2585351 - RNA, 19 nt, Artificial Sequence
  Description of Artificial Sequence: Synthetic oligonucleotide
uaaaguccucauccuguug

SEQ ID NO: 2585352 - RNA, 19 nt, Artificial Sequence
  Description of Artificial Sequence: Synthetic oligonucleotide
ucuucgaguuguuucuuaa

SEQ ID NO: 2585353 - RNA, 19 nt, Artificial Sequence
  Description of Artificial Sequence: Synthetic oligonucleotide
uccuuguauauucuugauu

SEQ ID NO: 2585354 - RNA, 19 nt, Artificial Sequence
  Description of Artificial Sequence: Synthetic oligonucleotide
cauaagaaucucuaauuua

SEQ ID NO: 2585355 - RNA, 19 nt, Artificial Sequence
  Description of Artificial Sequence: Synthetic oligonucleotide
uguugaugcuuuauagcuu

SEQ ID NO: 2585356 - RNA, 19 nt, Artificial Sequence
  Description of Artificial Sequence: Synthetic oligonucleotide
ugcuuuagauucuggugac

SEQ ID NO: 2585357 - RNA, 19 nt, Artificial Sequence
  Description of Artificial Sequence: Synthetic oligonucleotide
auuagcuguuccugaguug

SEQ ID NO: 2585358 - RNA, 19 nt, Artificial Sequence
  Description of Artificial Sequence: Synthetic oligonucleotide
cugaguugcaccacguuca

SEQ ID NO: 2585359 - RNA, 19 nt, Artificial Sequence
  Description of Artificial Sequence: Synthetic oligonucleotide
gauuuguggucucaguugu

SEQ ID NO: 2585360 - RNA, 19 nt, Artificial Sequence
  Description of Artificial Sequence: Synthetic oligonucleotide
auugagcaguaacaucucu

SEQ ID NO: 2585361 - RNA, 19 nt, Artificial Sequence
  Description of Artificial Sequence: Synthetic oligonucleotide
uucuuaaguggacguagau

SEQ ID NO: 2585362 - RNA, 19 nt, Artificial Sequence
  Description of Artificial Sequence: Synthetic oligonucleotide
ugaaaagccuuggaagggu

SEQ ID NO: 2585363 - RNA, 19 nt, Artificial Sequence
  Description of Artificial Sequence: Synthetic oligonucleotide
cuaauguuugaucuguucu

SEQ ID NO: 2585364 - RNA, 19 nt, Artificial Sequence
  Description of Artificial Sequence: Synthetic oligonucleotide
cauccuuguauauucuuga

SEQ ID NO: 2585365 - RNA, 19 nt, Artificial Sequence
  Description of Artificial Sequence: Synthetic oligonucleotide
cugagaucggaguuuugac

SEQ ID NO: 2585366 - RNA, 19 nt, Artificial Sequence
  Description of Artificial Sequence: Synthetic oligonucleotide
caguaucugguguugaaca

SEQ ID NO: 2585367 - RNA, 19 nt, Artificial Sequence
  Description of Artificial Sequence: Synthetic oligonucleotide
augccgagagcuuuauuca

SEQ ID NO: 2585368 - RNA, 19 nt, Artificial Sequence
  Description of Artificial Sequence: Synthetic oligonucleotide
gagcaguaacaucucuaag

SEQ ID NO: 2585369 - RNA, 19 nt, Artificial Sequence
  Description of Artificial Sequence: Synthetic oligonucleotide
ucuuuaaguguugaugcuu

SEQ ID NO: 2585370 - RNA, 19 nt, Artificial Sequence
  Description of Artificial Sequence: Synthetic oligonucleotide
ucaguaucugguguugaac

SEQ ID NO: 2585371 - RNA, 19 nt, Artificial Sequence
  Description of Artificial Sequence: Synthetic oligonucleotide
gcuauuuucaucuuucagu

SEQ ID NO: 2585372 - RNA, 19 nt, Artificial Sequence
  Description of Artificial Sequence: Synthetic oligonucleotide
uguggucucaguugucagu

SEQ ID NO: 2585373 - RNA, 19 nt, Artificial Sequence
  Description of Artificial Sequence: Synthetic oligonucleotide
augcuuuauagcuuuccaa

SEQ ID NO: 2585374 - RNA, 19 nt, Artificial Sequence
  Description of Artificial Sequence: Synthetic oligonucleotide
gagcuuuauucaauucucc

SEQ ID NO: 2585375 - RNA, 19 nt, Artificial Sequence
  Description of Artificial Sequence: Synthetic oligonucleotide
aagucugagcucauuuugu

SEQ ID NO: 2585376 - RNA, 19 nt, Artificial Sequence
  Description of Artificial Sequence: Synthetic oligonucleotide
uuaaguguugaugcuuuau

SEQ ID NO: 2585377 - RNA, 19 nt, Artificial Sequence
  Description of Artificial Sequence: Synthetic oligonucleotide
uaacucugccacugcaucu

SEQ ID NO: 2585378 - RNA, 19 nt, Artificial Sequence
  Description of Artificial Sequence: Synthetic oligonucleotide
cauccuguugucugaguug

SEQ ID NO: 2585379 - RNA, 19 nt, Artificial Sequence
  Description of Artificial Sequence: Synthetic oligonucleotide
uagaugugauuucuuuaau

SEQ ID NO: 2585380 - RNA, 19 nt, Artificial Sequence
  Description of Artificial Sequence: Synthetic oligonucleotide
uucauucaacaaugccugc

SEQ ID NO: 2585381 - RNA, 19 nt, Artificial Sequence
  Description of Artificial Sequence: Synthetic oligonucleotide
aguaucugguguugaacau

SEQ ID NO: 2585382 - RNA, 19 nt, Artificial Sequence
  Description of Artificial Sequence: Synthetic oligonucleotide
uuguggucucaguugucag

SEQ ID NO: 2585383 - RNA, 19 nt, Artificial Sequence
  Description of Artificial Sequence: Synthetic oligonucleotide
uuaaaguccucauccuguu

SEQ ID NO: 2585384 - RNA, 19 nt, Artificial Sequence
  Description of Artificial Sequence: Synthetic oligonucleotide
uuugaugccgagagcuuua

SEQ ID NO: 2585385 - RNA, 19 nt, Artificial Sequence
  Description of Artificial Sequence: Synthetic oligonucleotide
cugagcucauuuuguuucc

SEQ ID NO: 2585386 - RNA, 19 nt, Artificial Sequence
  Description of Artificial Sequence: Synthetic oligonucleotide
ggcuauuuucaucuuucag

SEQ ID NO: 2585387 - RNA, 19 nt, Artificial Sequence
  Description of Artificial Sequence: Synthetic oligonucleotide
cacguucauucaacaaugc

SEQ ID NO: 2585388 - RNA, 19 nt, Artificial Sequence
  Description of Artificial Sequence: Synthetic oligonucleotide
ucccugaagucugagcuca

SEQ ID NO: 2585389 - RNA, 19 nt, Artificial Sequence
  Description of Artificial Sequence: Synthetic oligonucleotide
acaagcugagaucggaguu

SEQ ID NO: 2585390 - RNA, 19 nt, Artificial Sequence
  Description of Artificial Sequence: Synthetic oligonucleotide
ugcuucaaugcauccaguu

SEQ ID NO: 2585391 - RNA, 19 nt, Artificial Sequence
  Description of Artificial Sequence: Synthetic oligonucleotide
ucucaguugucaguaucug

SEQ ID NO: 2585392 - RNA, 19 nt, Artificial Sequence
  Description of Artificial Sequence: Synthetic oligonucleotide
cuucuauuucuuuaagugu

SEQ ID NO: 2585393 - RNA, 19 nt, Artificial Sequence
  Description of Artificial Sequence: Synthetic oligonucleotide
uguugucugaguugauuuu

SEQ ID NO: 2585394 - RNA, 19 nt, Artificial Sequence
  Description of Artificial Sequence: Synthetic oligonucleotide
ucaaguucuccagcuuaag

SEQ ID NO: 2585395 - RNA, 19 nt, Artificial Sequence
  Description of Artificial Sequence: Synthetic oligonucleotide
uggcuauuuucaucuuuca

SEQ ID NO: 2585396 - RNA, 19 nt, Artificial Sequence
  Description of Artificial Sequence: Synthetic oligonucleotide
uugacaccuccgauuucag

SEQ ID NO: 2585397 - RNA, 19 nt, Artificial Sequence
  Description of Artificial Sequence: Synthetic oligonucleotide
gguguugaacaucuucuac

SEQ ID NO: 2585398 - RNA, 19 nt, Artificial Sequence
  Description of Artificial Sequence: Synthetic oligonucleotide
cuagaagcauccuuguaua

SEQ ID NO: 2585399 - RNA, 19 nt, Artificial Sequence
  Description of Artificial Sequence: Synthetic oligonucleotide
agcuguuccugaguugcac

SEQ ID NO: 2585400 - RNA, 19 nt, Artificial Sequence
  Description of Artificial Sequence: Synthetic oligonucleotide
acguagaugugauuucuuu

SEQ ID NO: 2585401 - RNA, 19 nt, Artificial Sequence
  Description of Artificial Sequence: Synthetic oligonucleotide
caguaguucugcauaagaa

SEQ ID NO: 2585402 - RNA, 19 nt, Artificial Sequence
  Description of Artificial Sequence: Synthetic oligonucleotide
gacaccuccgauuucaguu

SEQ ID NO: 2585403 - RNA, 19 nt, Artificial Sequence
  Description of Artificial Sequence: Synthetic oligonucleotide
auguuugaucuguucugca

SEQ ID NO: 2585404 - RNA, 19 nt, Artificial Sequence
  Description of Artificial Sequence: Synthetic oligonucleotide
uuggaagggucgaaguguu

SEQ ID NO: 2585405 - RNA, 19 nt, Artificial Sequence
  Description of Artificial Sequence: Synthetic oligonucleotide
agcucauuuuguuuccuuu

SEQ ID NO: 2585406 - RNA, 19 nt, Artificial Sequence
  Description of Artificial Sequence: Synthetic oligonucleotide
uugucaguaucugguguug

SEQ ID NO: 2585407 - RNA, 19 nt, Artificial Sequence
  Description of Artificial Sequence: Synthetic oligonucleotide
uuuaaguguugaugcuuua

SEQ ID NO: 2585408 - RNA, 19 nt, Artificial Sequence
  Description of Artificial Sequence: Synthetic oligonucleotide
uggacguagaugugauuuc

SEQ ID NO: 2585409 - RNA, 19 nt, Artificial Sequence
  Description of Artificial Sequence: Synthetic oligonucleotide
auucaugaugaaaagccuu

SEQ ID NO: 2585410 - RNA, 19 nt, Artificial Sequence
  Description of Artificial Sequence: Synthetic oligonucleotide
cgaguuguuucuuaaaguc

SEQ ID NO: 2585411 - RNA, 19 nt, Artificial Sequence
  Description of Artificial Sequence: Synthetic oligonucleotide
caugaugaaaagccuugga

SEQ ID NO: 2585412 - RNA, 19 nt, Artificial Sequence
  Description of Artificial Sequence: Synthetic oligonucleotide
ugguguugaacaucuucua

SEQ ID NO: 2585413 - RNA, 19 nt, Artificial Sequence
  Description of Artificial Sequence: Synthetic oligonucleotide
ugcuuucuugcuucuuccu

SEQ ID NO: 2585414 - RNA, 19 nt, Artificial Sequence
  Description of Artificial Sequence: Synthetic oligonucleotide
gucugaguugauuuugcaa

SEQ ID NO: 2585415 - RNA, 19 nt, Artificial Sequence
  Description of Artificial Sequence: Synthetic oligonucleotide
aggucuugcacugugucau

SEQ ID NO: 2585416 - RNA, 19 nt, Artificial Sequence
  Description of Artificial Sequence: Synthetic oligonucleotide
ggaguuuugacaccuccga

SEQ ID NO: 2585417 - RNA, 19 nt, Artificial Sequence
  Description of Artificial Sequence: Synthetic oligonucleotide
ugacccaguaguucugcau

SEQ ID NO: 2585418 - RNA, 19 nt, Artificial Sequence
  Description of Artificial Sequence: Synthetic oligonucleotide
cuuguagagucaaguucuc

SEQ ID NO: 2585419 - RNA, 19 nt, Artificial Sequence
  Description of Artificial Sequence: Synthetic oligonucleotide
ccacguucauucaacaaug

SEQ ID NO: 2585420 - RNA, 19 nt, Artificial Sequence
  Description of Artificial Sequence: Synthetic oligonucleotide
caguugucaguaucuggug

SEQ ID NO: 2585421 - RNA, 19 nt, Artificial Sequence
  Description of Artificial Sequence: Synthetic oligonucleotide
gauucaugaugaaaagccu

SEQ ID NO: 2585422 - RNA, 19 nt, Artificial Sequence
  Description of Artificial Sequence: Synthetic oligonucleotide
uguuugaugccgagagcuu

SEQ ID NO: 2585423 - RNA, 19 nt, Artificial Sequence
  Description of Artificial Sequence: Synthetic oligonucleotide
ucuugcacugugucauuau

SEQ ID NO: 2585424 - RNA, 19 nt, Artificial Sequence
  Description of Artificial Sequence: Synthetic oligonucleotide
cugguguugaacaucuucu

SEQ ID NO: 2585425 - RNA, 19 nt, Artificial Sequence
  Description of Artificial Sequence: Synthetic oligonucleotide
gacccaguaguucugcaua

SEQ ID NO: 2585426 - RNA, 19 nt, Artificial Sequence
  Description of Artificial Sequence: Synthetic oligonucleotide
guugaugcuuuauagcuuu

SEQ ID NO: 2585427 - RNA, 19 nt, Artificial Sequence
  Description of Artificial Sequence: Synthetic oligonucleotide
caaguucuccagcuuaaga

SEQ ID NO: 2585428 - RNA, 19 nt, Artificial Sequence
  Description of Artificial Sequence: Synthetic oligonucleotide
ccuaugacagagauucaug

SEQ ID NO: 2585429 - RNA, 19 nt, Artificial Sequence
  Description of Artificial Sequence: Synthetic oligonucleotide
uagaagcauccuuguauau

SEQ ID NO: 2585430 - RNA, 19 nt, Artificial Sequence
  Description of Artificial Sequence: Synthetic oligonucleotide
uuccugaguugcaccacgu

SEQ ID NO: 2585431 - RNA, 19 nt, Artificial Sequence
  Description of Artificial Sequence: Synthetic oligonucleotide
auccuuguauauucuugau

SEQ ID NO: 2585432 - RNA, 19 nt, Artificial Sequence
  Description of Artificial Sequence: Synthetic oligonucleotide
caguaacaucucuaagguc

SEQ ID NO: 2585433 - RNA, 19 nt, Artificial Sequence
  Description of Artificial Sequence: Synthetic oligonucleotide
agaagcauccuuguauauu

SEQ ID NO: 2585434 - RNA, 19 nt, Artificial Sequence
  Description of Artificial Sequence: Synthetic oligonucleotide
ugucaguaucugguguuga

SEQ ID NO: 2585435 - RNA, 19 nt, Artificial Sequence
  Description of Artificial Sequence: Synthetic oligonucleotide
guuuugacaccuccgauuu

SEQ ID NO: 2585436 - RNA, 19 nt, Artificial Sequence
  Description of Artificial Sequence: Synthetic oligonucleotide
gaucuagaagcauccuugu

SEQ ID NO: 2585437 - RNA, 19 nt, Artificial Sequence
  Description of Artificial Sequence: Synthetic oligonucleotide
gaaguguuugaugccgaga

SEQ ID NO: 2585438 - RNA, 19 nt, Artificial Sequence
  Description of Artificial Sequence: Synthetic oligonucleotide
gaaaagccuuggaaggguc

SEQ ID NO: 2585439 - RNA, 19 nt, Artificial Sequence
  Description of Artificial Sequence: Synthetic oligonucleotide
guguuugaugccgagagcu

SEQ ID NO: 2585440 - RNA, 19 nt, Artificial Sequence
  Description of Artificial Sequence: Synthetic oligonucleotide
uugcaccacguucauucaa

SEQ ID NO: 2585441 - RNA, 19 nt, Artificial Sequence
  Description of Artificial Sequence: Synthetic oligonucleotide
ucugcagaucuagaagcau

SEQ ID NO: 2585442 - RNA, 19 nt, Artificial Sequence
  Description of Artificial Sequence: Synthetic oligonucleotide
ugccgagagcuuuauucaa

SEQ ID NO: 2585443 - RNA, 19 nt, Artificial Sequence
  Description of Artificial Sequence: Synthetic oligonucleotide
uccuuuuaacaagcugaga

SEQ ID NO: 2585444 - RNA, 19 nt, Artificial Sequence
  Description of Artificial Sequence: Synthetic oligonucleotide
aaguggacguagaugugau

SEQ ID NO: 2585445 - RNA, 19 nt, Artificial Sequence
  Description of Artificial Sequence: Synthetic oligonucleotide
caccuccgauuucaguugg

SEQ ID NO: 2585446 - RNA, 19 nt, Artificial Sequence
  Description of Artificial Sequence: Synthetic oligonucleotide
ugaguugcaccacguucau

SEQ ID NO: 2585447 - RNA, 19 nt, Artificial Sequence
  Description of Artificial Sequence: Synthetic oligonucleotide
auuuucuuaaguggacgua

SEQ ID NO: 2585448 - RNA, 19 nt, Artificial Sequence
  Description of Artificial Sequence: Synthetic oligonucleotide
uuuugacaccuccgauuuc

SEQ ID NO: 2585449 - RNA, 19 nt, Artificial Sequence
  Description of Artificial Sequence: Synthetic oligonucleotide
guaucugguguugaacauc

SEQ ID NO: 2585450 - RNA, 19 nt, Artificial Sequence
  Description of Artificial Sequence: Synthetic oligonucleotide
ugacaccuccgauuucagu

SEQ ID NO: 2585451 - RNA, 19 nt, Artificial Sequence
  Description of Artificial Sequence: Synthetic oligonucleotide
gcaguaacaucucuaaggu

SEQ ID NO: 2585452 - RNA, 19 nt, Artificial Sequence
  Description of Artificial Sequence: Synthetic oligonucleotide
cuauuucuuuaaguguuga

SEQ ID NO: 2585453 - RNA, 19 nt, Artificial Sequence
  Description of Artificial Sequence: Synthetic oligonucleotide
uugaugcuuuauagcuuuc

SEQ ID NO: 2585454 - RNA, 19 nt, Artificial Sequence
  Description of Artificial Sequence: Synthetic oligonucleotide
aauucucccugaagucuga

SEQ ID NO: 2585455 - RNA, 19 nt, Artificial Sequence
  Description of Artificial Sequence: Synthetic oligonucleotide
gcuuuauucaauucucccu

SEQ ID NO: 2585456 - RNA, 19 nt, Artificial Sequence
  Description of Artificial Sequence: Synthetic oligonucleotide
cuguuccugaguugcacca

SEQ ID NO: 2585457 - RNA, 19 nt, Artificial Sequence
  Description of Artificial Sequence: Synthetic oligonucleotide
ccuuuuaacaagcugagau

SEQ ID NO: 2585458 - RNA, 19 nt, Artificial Sequence
  Description of Artificial Sequence: Synthetic oligonucleotide
uaacaucucuaaggucuug

SEQ ID NO: 2585459 - RNA, 19 nt, Artificial Sequence
  Description of Artificial Sequence: Synthetic oligonucleotide
aagggucgaaguguuugau

SEQ ID NO: 2585460 - RNA, 19 nt, Artificial Sequence
  Description of Artificial Sequence: Synthetic oligonucleotide
aucuagaagcauccuugua

SEQ ID NO: 2585461 - RNA, 19 nt, Artificial Sequence
  Description of Artificial Sequence: Synthetic oligonucleotide
cuuuaaguguugaugcuuu

SEQ ID NO: 2585462 - RNA, 19 nt, Artificial Sequence
  Description of Artificial Sequence: Synthetic oligonucleotide
uucuggugacccaguaguu

SEQ ID NO: 2585463 - RNA, 19 nt, Artificial Sequence
  Description of Artificial Sequence: Synthetic oligonucleotide
agauucuggugacccagua

SEQ ID NO: 2585464 - RNA, 19 nt, Artificial Sequence
  Description of Artificial Sequence: Synthetic oligonucleotide
gcuuaagaucuucuauuuc

SEQ ID NO: 2585465 - RNA, 19 nt, Artificial Sequence
  Description of Artificial Sequence: Synthetic oligonucleotide
uguuccugaguugcaccac

SEQ ID NO: 2585466 - RNA, 19 nt, Artificial Sequence
  Description of Artificial Sequence: Synthetic oligonucleotide
auuuguggucucaguuguc

SEQ ID NO: 2585467 - RNA, 19 nt, Artificial Sequence
  Description of Artificial Sequence: Synthetic oligonucleotide
ggucgaaguguuugaugcc

SEQ ID NO: 2585468 - RNA, 19 nt, Artificial Sequence
  Description of Artificial Sequence: Synthetic oligonucleotide
cugcauaagaaucucuaau

SEQ ID NO: 2585469 - RNA, 19 nt, Artificial Sequence
  Description of Artificial Sequence: Synthetic oligonucleotide
ugccuaugacagagauuca

SEQ ID NO: 2585470 - RNA, 19 nt, Artificial Sequence
  Description of Artificial Sequence: Synthetic oligonucleotide
cucccugaagucugagcuc

SEQ ID NO: 2585471 - RNA, 19 nt, Artificial Sequence
  Description of Artificial Sequence: Synthetic oligonucleotide
cuuggaagggucgaagugu

SEQ ID NO: 2585472 - RNA, 19 nt, Artificial Sequence
  Description of Artificial Sequence: Synthetic oligonucleotide
cuucgaguuguuucuuaaa

SEQ ID NO: 2585473 - RNA, 19 nt, Artificial Sequence
  Description of Artificial Sequence: Synthetic oligonucleotide
guugcaccacguucauuca

SEQ ID NO: 2585474 - RNA, 19 nt, Artificial Sequence
  Description of Artificial Sequence: Synthetic oligonucleotide
uccugaguugcaccacguu

SEQ ID NO: 2585475 - RNA, 19 nt, Artificial Sequence
  Description of Artificial Sequence: Synthetic oligonucleotide
gcugagaucggaguuuuga

SEQ ID NO: 2585476 - RNA, 19 nt, Artificial Sequence
  Description of Artificial Sequence: Synthetic oligonucleotide
cguucauucaacaaugccu

SEQ ID NO: 2585477 - RNA, 19 nt, Artificial Sequence
  Description of Artificial Sequence: Synthetic oligonucleotide
cuugauuuguggucucagu

SEQ ID NO: 2585478 - RNA, 19 nt, Artificial Sequence
  Description of Artificial Sequence: Synthetic oligonucleotide
guugucaguaucugguguu

SEQ ID NO: 2585479 - RNA, 19 nt, Artificial Sequence
  Description of Artificial Sequence: Synthetic oligonucleotide
cuugcacugugucauuaua

SEQ ID NO: 2585480 - RNA, 19 nt, Artificial Sequence
  Description of Artificial Sequence: Synthetic oligonucleotide
guggacguagaugugauuu

SEQ ID NO: 2585481 - RNA, 19 nt, Artificial Sequence
  Description of Artificial Sequence: Synthetic oligonucleotide
caaaguuaacucugccacu

SEQ ID NO: 2585482 - RNA, 19 nt, Artificial Sequence
  Description of Artificial Sequence: Synthetic oligonucleotide
gcauaagaaucucuaauuu

SEQ ID NO: 2585483 - RNA, 19 nt, Artificial Sequence
  Description of Artificial Sequence: Synthetic oligonucleotide
cuguugucugaguugauuu

SEQ ID NO: 2585484 - RNA, 19 nt, Artificial Sequence
  Description of Artificial Sequence: Synthetic oligonucleotide
uugaucuguucugcagauc

SEQ ID NO: 2585485 - RNA, 19 nt, Artificial Sequence
  Description of Artificial Sequence: Synthetic oligonucleotide
accuccgauuucaguuggc

SEQ ID NO: 2585486 - RNA, 19 nt, Artificial Sequence
  Description of Artificial Sequence: Synthetic oligonucleotide
guggucucaguugucagua

SEQ ID NO: 2585487 - RNA, 19 nt, Artificial Sequence
  Description of Artificial Sequence: Synthetic oligonucleotide
gaguuuugacaccuccgau

SEQ ID NO: 2585488 - RNA, 19 nt, Artificial Sequence
  Description of Artificial Sequence: Synthetic oligonucleotide
cggaguuuugacaccuccg

SEQ ID NO: 2585489 - RNA, 19 nt, Artificial Sequence
  Description of Artificial Sequence: Synthetic oligonucleotide
gucaaguucuccagcuuaa

SEQ ID NO: 2585490 - RNA, 19 nt, Artificial Sequence
  Description of Artificial Sequence: Synthetic oligonucleotide
guugaacaucuucuacgcu

SEQ ID NO: 2585491 - RNA, 19 nt, Artificial Sequence
  Description of Artificial Sequence: Synthetic oligonucleotide
cucuaauuuauuagcuguu

SEQ ID NO: 2585492 - RNA, 19 nt, Artificial Sequence
  Description of Artificial Sequence: Synthetic oligonucleotide
aguggacguagaugugauu

SEQ ID NO: 2585493 - RNA, 19 nt, Artificial Sequence
  Description of Artificial Sequence: Synthetic oligonucleotide
guuggcuauuuucaucuuu

SEQ ID NO: 2585494 - RNA, 19 nt, Artificial Sequence
  Description of Artificial Sequence: Synthetic oligonucleotide
ccaguaguucugcauaaga

SEQ ID NO: 2585495 - RNA, 19 nt, Artificial Sequence
  Description of Artificial Sequence: Synthetic oligonucleotide
cuucuuucuaauguuugau

SEQ ID NO: 2585496 - RNA, 19 nt, Artificial Sequence
  Description of Artificial Sequence: Synthetic oligonucleotide
ugaugccgagagcuuuauu

SEQ ID NO: 2585497 - RNA, 19 nt, Artificial Sequence
  Description of Artificial Sequence: Synthetic oligonucleotide
uugaugccgagagcuuuau

SEQ ID NO: 2585498 - RNA, 19 nt, Artificial Sequence
  Description of Artificial Sequence: Synthetic oligonucleotide
cauucaacaaugccugcuu

SEQ ID NO: 2585499 - RNA, 19 nt, Artificial Sequence
  Description of Artificial Sequence: Synthetic oligonucleotide
caccacguucauucaacaa

SEQ ID NO: 2585500 - RNA, 19 nt, Artificial Sequence
  Description of Artificial Sequence: Synthetic oligonucleotide
cuaaggucuugcacugugu

SEQ ID NO: 2585501 - RNA, 19 nt, Artificial Sequence
  Description of Artificial Sequence: Synthetic oligonucleotide
cuucucugcuucaaugcau

SEQ ID NO: 2585502 - RNA, 19 nt, Artificial Sequence
  Description of Artificial Sequence: Synthetic oligonucleotide
cugaagucugagcucauuu

SEQ ID NO: 2585503 - RNA, 19 nt, Artificial Sequence
  Description of Artificial Sequence: Synthetic oligonucleotide
gugacccaguaguucugca

SEQ ID NO: 2585504 - RNA, 19 nt, Artificial Sequence
  Description of Artificial Sequence: Synthetic oligonucleotide
cugugucauuauaccucuc

SEQ ID NO: 2585505 - RNA, 19 nt, Artificial Sequence
  Description of Artificial Sequence: Synthetic oligonucleotide
guuaacucugccacugcau

SEQ ID NO: 2585506 - RNA, 19 nt, Artificial Sequence
  Description of Artificial Sequence: Synthetic oligonucleotide
gcuuuagauucuggugacc

SEQ ID NO: 2585507 - RNA, 19 nt, Artificial Sequence
  Description of Artificial Sequence: Synthetic oligonucleotide
gcacugugucauuauaccu

SEQ ID NO: 2585508 - RNA, 19 nt, Artificial Sequence
  Description of Artificial Sequence: Synthetic oligonucleotide
cagaucuagaagcauccuu

SEQ ID NO: 2585509 - RNA, 19 nt, Artificial Sequence
  Description of Artificial Sequence: Synthetic oligonucleotide
gcuuuauagcuuuccaauu

SEQ ID NO: 2585510 - RNA, 19 nt, Artificial Sequence
  Description of Artificial Sequence: Synthetic oligonucleotide
cgaaguguuugaugccgag

SEQ ID NO: 2585511 - RNA, 19 nt, Artificial Sequence
  Description of Artificial Sequence: Synthetic oligonucleotide
guuugaugccgagagcuuu

SEQ ID NO: 2585512 - RNA, 19 nt, Artificial Sequence
  Description of Artificial Sequence: Synthetic oligonucleotide
gcaccacguucauucaaca

SEQ ID NO: 2585513 - RNA, 19 nt, Artificial Sequence
  Description of Artificial Sequence: Synthetic oligonucleotide
caacaaugccugcuucucu

SEQ ID NO: 2585514 - RNA, 19 nt, Artificial Sequence
  Description of Artificial Sequence: Synthetic oligonucleotide
cgagagcuuuauucaauuc

SEQ ID NO: 2585515 - RNA, 19 nt, Artificial Sequence
  Description of Artificial Sequence: Synthetic oligonucleotide
gagucaaguucuccagcuu

SEQ ID NO: 2585516 - RNA, 19 nt, Artificial Sequence
  Description of Artificial Sequence: Synthetic oligonucleotide
gucuugcacugugucauua

SEQ ID NO: 2585517 - RNA, 19 nt, Artificial Sequence
  Description of Artificial Sequence: Synthetic oligonucleotide
ggacguagaugugauuucu

SEQ ID NO: 2585518 - RNA, 19 nt, Artificial Sequence
  Description of Artificial Sequence: Synthetic oligonucleotide
gccacugcaucuucuuucu

SEQ ID NO: 2585519 - RNA, 19 nt, Artificial Sequence
  Description of Artificial Sequence: Synthetic oligonucleotide
caaugccugcuucucugcu

SEQ ID NO: 2585520 - RNA, 19 nt, Artificial Sequence
  Description of Artificial Sequence: Synthetic oligonucleotide
gacguagaugugauuucuu

SEQ ID NO: 2585521 - RNA, 19 nt, Artificial Sequence
  Description of Artificial Sequence: Synthetic oligonucleotide
ccucauccuguugucugag

SEQ ID NO: 2585522 - RNA, 19 nt, Artificial Sequence
  Description of Artificial Sequence: Synthetic oligonucleotide
agcugagaucggaguuuug

SEQ ID NO: 2585523 - RNA, 19 nt, Artificial Sequence
  Description of Artificial Sequence: Synthetic oligonucleotide
caagcugagaucggaguuu

SEQ ID NO: 2585524 - RNA, 19 nt, Artificial Sequence
  Description of Artificial Sequence: Synthetic oligonucleotide
gaacaucuucuacgcuuuu

SEQ ID NO: 2585525 - RNA, 19 nt, Artificial Sequence
  Description of Artificial Sequence: Synthetic oligonucleotide
gcaaaucagcuauuuucuu

SEQ ID NO: 2585526 - RNA, 19 nt, Artificial Sequence
  Description of Artificial Sequence: Synthetic oligonucleotide
gccuaugacagagauucau

SEQ ID NO: 2585527 - RNA, 19 nt, Artificial Sequence
  Description of Artificial Sequence: Synthetic oligonucleotide
gccuuggaagggucgaagu

SEQ ID NO: 2585528 - RNA, 19 nt, Artificial Sequence
  Description of Artificial Sequence: Synthetic oligonucleotide
cugcuucaaugcauccagu

SEQ ID NO: 2585529 - RNA, 19 nt, Artificial Sequence
  Description of Artificial Sequence: Synthetic oligonucleotide
cucauccuguugucugagu

SEQ ID NO: 2585530 - RNA, 19 nt, Artificial Sequence
  Description of Artificial Sequence: Synthetic oligonucleotide
guuucacaacaugcuugau

SEQ ID NO: 2585531 - RNA, 19 nt, Artificial Sequence
  Description of Artificial Sequence: Synthetic oligonucleotide
acccugccuaugacagaga

SEQ ID NO: 2585532 - RNA, 19 nt, Artificial Sequence
  Description of Artificial Sequence: Synthetic oligonucleotide
aucugguguugaacaucuu

SEQ ID NO: 2585533 - RNA, 19 nt, Artificial Sequence
  Description of Artificial Sequence: Synthetic oligonucleotide
cucuaaggucuugcacugu

SEQ ID NO: 2585534 - RNA, 19 nt, Artificial Sequence
  Description of Artificial Sequence: Synthetic oligonucleotide
cugccacugcaucuucuuu

SEQ ID NO: 2585535 - RNA, 19 nt, Artificial Sequence
  Description of Artificial Sequence: Synthetic oligonucleotide
gccgagagcuuuauucaau

SEQ ID NO: 2585536 - RNA, 19 nt, Artificial Sequence
  Description of Artificial Sequence: Synthetic oligonucleotide
gaguugcaccacguucauu

SEQ ID NO: 2585537 - RNA, 19 nt, Artificial Sequence
  Description of Artificial Sequence: Synthetic oligonucleotide
cccugccuaugacagagau

SEQ ID NO: 2585538 - RNA, 19 nt, Artificial Sequence
  Description of Artificial Sequence: Synthetic oligonucleotide
gcuuuccaauugagcagua

SEQ ID NO: 2585539 - RNA, 19 nt, Artificial Sequence
  Description of Artificial Sequence: Synthetic oligonucleotide
ccuguugucugaguugauu

SEQ ID NO: 2585540 - RNA, 19 nt, Artificial Sequence
  Description of Artificial Sequence: Synthetic oligonucleotide
ggucuugcacugugucauu

SEQ ID NO: 2585541 - RNA, 19 nt, Artificial Sequence
  Description of Artificial Sequence: Synthetic oligonucleotide
ccugccuaugacagagauu

SEQ ID NO: 2585542 - RNA, 19 nt, Artificial Sequence
  Description of Artificial Sequence: Synthetic oligonucleotide
ccgauuucaguuggcuauu

SEQ ID NO: 2585543 - RNA, 19 nt, Artificial Sequence
  Description of Artificial Sequence: Synthetic oligonucleotide
cauuauuuuauuuucagag

SEQ ID NO: 2585544 - RNA, 19 nt, Artificial Sequence
  Description of Artificial Sequence: Synthetic oligonucleotide
aaaccauuauuuuauuuuc

SEQ ID NO: 2585545 - RNA, 19 nt, Artificial Sequence
  Description of Artificial Sequence: Synthetic oligonucleotide
ugagacuuuaccuugcugg

SEQ ID NO: 2585546 - RNA, 19 nt, Artificial Sequence
  Description of Artificial Sequence: Synthetic oligonucleotide
uuauuuuauuuucagagga

SEQ ID NO: 2585547 - RNA, 19 nt, Artificial Sequence
  Description of Artificial Sequence: Synthetic oligonucleotide
auuauuuuauuuucagagg

SEQ ID NO: 2585548 - RNA, 19 nt, Artificial Sequence
  Description of Artificial Sequence: Synthetic oligonucleotide
uuuuauucagaagaaacca

SEQ ID NO: 2585549 - RNA, 19 nt, Artificial Sequence
  Description of Artificial Sequence: Synthetic oligonucleotide
ucagaagaaaccauuauuu

SEQ ID NO: 2585550 - RNA, 19 nt, Artificial Sequence
  Description of Artificial Sequence: Synthetic oligonucleotide
uauuuucagaggaaguucu

SEQ ID NO: 2585551 - RNA, 19 nt, Artificial Sequence
  Description of Artificial Sequence: Synthetic oligonucleotide
uuuuauuuucagaggaagu

SEQ ID NO: 2585552 - RNA, 19 nt, Artificial Sequence
  Description of Artificial Sequence: Synthetic oligonucleotide
uuuuguccaaugcuuuggg

SEQ ID NO: 2585553 - RNA, 19 nt, Artificial Sequence
  Description of Artificial Sequence: Synthetic oligonucleotide
accauuauuuuauuuucag

SEQ ID NO: 2585554 - RNA, 19 nt, Artificial Sequence
  Description of Artificial Sequence: Synthetic oligonucleotide
uuuauucagaagaaaccau

SEQ ID NO: 2585555 - RNA, 19 nt, Artificial Sequence
  Description of Artificial Sequence: Synthetic oligonucleotide
uucagaagaaaccauuauu

SEQ ID NO: 2585556 - RNA, 19 nt, Artificial Sequence
  Description of Artificial Sequence: Synthetic oligonucleotide
uuauucagaagaaaccauu

SEQ ID NO: 2585557 - RNA, 19 nt, Artificial Sequence
  Description of Artificial Sequence: Synthetic oligonucleotide
agaagaaaccauuauuuua

SEQ ID NO: 2585558 - RNA, 19 nt, Artificial Sequence
  Description of Artificial Sequence: Synthetic oligonucleotide
uuuauuuucagaggaaguu

SEQ ID NO: 2585559 - RNA, 19 nt, Artificial Sequence
  Description of Artificial Sequence: Synthetic oligonucleotide
uauucagaagaaaccauua

SEQ ID NO: 2585560 - RNA, 19 nt, Artificial Sequence
  Description of Artificial Sequence: Synthetic oligonucleotide
uuuguccaaugcuuugggg

SEQ ID NO: 2585561 - RNA, 19 nt, Artificial Sequence
  Description of Artificial Sequence: Synthetic oligonucleotide
aggaccaccugacccaccc

SEQ ID NO: 2585562 - RNA, 19 nt, Artificial Sequence
  Description of Artificial Sequence: Synthetic oligonucleotide
uacccacgcacccacagag

SEQ ID NO: 2585563 - RNA, 19 nt, Artificial Sequence
  Description of Artificial Sequence: Synthetic oligonucleotide
uuauuuucagaggaaguuc

SEQ ID NO: 2585564 - RNA, 19 nt, Artificial Sequence
  Description of Artificial Sequence: Synthetic oligonucleotide
uguuuuguccaaugcuuug

SEQ ID NO: 2585565 - RNA, 19 nt, Artificial Sequence
  Description of Artificial Sequence: Synthetic oligonucleotide
guuuuguccaaugcuuugg

SEQ ID NO: 2585566 - RNA, 19 nt, Artificial Sequence
  Description of Artificial Sequence: Synthetic oligonucleotide
ugagcuguuuuguccaaug

SEQ ID NO: 2585567 - RNA, 19 nt, Artificial Sequence
  Description of Artificial Sequence: Synthetic oligonucleotide
agcuguuuuguccaaugcu

SEQ ID NO: 2585568 - RNA, 19 nt, Artificial Sequence
  Description of Artificial Sequence: Synthetic oligonucleotide
gaagaaaccauuauuuuau

SEQ ID NO: 2585569 - RNA, 19 nt, Artificial Sequence
  Description of Artificial Sequence: Synthetic oligonucleotide
auucagaagaaaccauuau

SEQ ID NO: 2585570 - RNA, 19 nt, Artificial Sequence
  Description of Artificial Sequence: Synthetic oligonucleotide
aaccauuauuuuauuuuca

SEQ ID NO: 2585571 - RNA, 19 nt, Artificial Sequence
  Description of Artificial Sequence: Synthetic oligonucleotide
agaaaccauuauuuuauuu

SEQ ID NO: 2585572 - RNA, 19 nt, Artificial Sequence
  Description of Artificial Sequence: Synthetic oligonucleotide
uccugcuaggaccaccuga

SEQ ID NO: 2585573 - RNA, 19 nt, Artificial Sequence
  Description of Artificial Sequence: Synthetic oligonucleotide
uugagacuuuaccuugcug

SEQ ID NO: 2585574 - RNA, 19 nt, Artificial Sequence
  Description of Artificial Sequence: Synthetic oligonucleotide
uuuaccuugcuggucuccc

SEQ ID NO: 2585575 - RNA, 19 nt, Artificial Sequence
  Description of Artificial Sequence: Synthetic oligonucleotide
aguacccacgcacccacag

SEQ ID NO: 2585576 - RNA, 19 nt, Artificial Sequence
  Description of Artificial Sequence: Synthetic oligonucleotide
aagaaaccauuauuuuauu

SEQ ID NO: 2585577 - RNA, 19 nt, Artificial Sequence
  Description of Artificial Sequence: Synthetic oligonucleotide
accugacccacccuuccac

SEQ ID NO: 2585578 - RNA, 19 nt, Artificial Sequence
  Description of Artificial Sequence: Synthetic oligonucleotide
gagcuguuuuguccaaugc

SEQ ID NO: 2585579 - RNA, 19 nt, Artificial Sequence
  Description of Artificial Sequence: Synthetic oligonucleotide
gacuuuaccuugcuggucu

SEQ ID NO: 2585580 - RNA, 19 nt, Artificial Sequence
  Description of Artificial Sequence: Synthetic oligonucleotide
ucggaguacccacgcaccc

SEQ ID NO: 2585581 - RNA, 19 nt, Artificial Sequence
  Description of Artificial Sequence: Synthetic oligonucleotide
cucggaguacccacgcacc

SEQ ID NO: 2585582 - RNA, 19 nt, Artificial Sequence
  Description of Artificial Sequence: Synthetic oligonucleotide
uggcuugagacuuuaccuu

SEQ ID NO: 2585583 - RNA, 19 nt, Artificial Sequence
  Description of Artificial Sequence: Synthetic oligonucleotide
uugcuggucucccuuccug

SEQ ID NO: 2585584 - RNA, 19 nt, Artificial Sequence
  Description of Artificial Sequence: Synthetic oligonucleotide
cacgcacccacagaggccc

SEQ ID NO: 2585585 - RNA, 19 nt, Artificial Sequence
  Description of Artificial Sequence: Synthetic oligonucleotide
acuuuaccuugcuggucuc

SEQ ID NO: 2585586 - RNA, 19 nt, Artificial Sequence
  Description of Artificial Sequence: Synthetic oligonucleotide
agacuuuaccuugcugguc

SEQ ID NO: 2585587 - RNA, 19 nt, Artificial Sequence
  Description of Artificial Sequence: Synthetic oligonucleotide
ggcuugagacuuuaccuug

SEQ ID NO: 2585588 - RNA, 19 nt, Artificial Sequence
  Description of Artificial Sequence: Synthetic oligonucleotide
accuugcuggucucccuuc

SEQ ID NO: 2585589 - RNA, 19 nt, Artificial Sequence
  Description of Artificial Sequence: Synthetic oligonucleotide
gagacuuuaccuugcuggu

SEQ ID NO: 2585590 - RNA, 19 nt, Artificial Sequence
  Description of Artificial Sequence: Synthetic oligonucleotide
ccugcuaggaccaccugac

SEQ ID NO: 2585591 - RNA, 19 nt, Artificial Sequence
  Description of Artificial Sequence: Synthetic oligonucleotide
uuaccuugcuggucucccu

SEQ ID NO: 2585592 - RNA, 19 nt, Artificial Sequence
  Description of Artificial Sequence: Synthetic oligonucleotide
accaggggcaccucucgga

SEQ ID NO: 2585593 - RNA, 19 nt, Artificial Sequence
  Description of Artificial Sequence: Synthetic oligonucleotide
caccucucggaguacccac

SEQ ID NO: 2585594 - RNA, 19 nt, Artificial Sequence
  Description of Artificial Sequence: Synthetic oligonucleotide
gcuaggaccaccugaccca

SEQ ID NO: 2585595 - RNA, 19 nt, Artificial Sequence
  Description of Artificial Sequence: Synthetic oligonucleotide
aggggcaccucucggagua

SEQ ID NO: 2585596 - RNA, 19 nt, Artificial Sequence
  Description of Artificial Sequence: Synthetic oligonucleotide
uaccuugcuggucucccuu

SEQ ID NO: 2585597 - RNA, 19 nt, Artificial Sequence
  Description of Artificial Sequence: Synthetic oligonucleotide
ggaguacccacgcacccac

SEQ ID NO: 2585598 - RNA, 19 nt, Artificial Sequence
  Description of Artificial Sequence: Synthetic oligonucleotide
uuccugcuaggaccaccug

SEQ ID NO: 2585599 - RNA, 19 nt, Artificial Sequence
  Description of Artificial Sequence: Synthetic oligonucleotide
accucucggaguacccacg

SEQ ID NO: 2585600 - RNA, 19 nt, Artificial Sequence
  Description of Artificial Sequence: Synthetic oligonucleotide
cagaagaaaccauuauuuu

SEQ ID NO: 2585601 - RNA, 19 nt, Artificial Sequence
  Description of Artificial Sequence: Synthetic oligonucleotide
cccacgcacccacagaggc

SEQ ID NO: 2585602 - RNA, 19 nt, Artificial Sequence
  Description of Artificial Sequence: Synthetic oligonucleotide
cugcuaggaccaccugacc

SEQ ID NO: 2585603 - RNA, 19 nt, Artificial Sequence
  Description of Artificial Sequence: Synthetic oligonucleotide
cuaggaccaccugacccac

SEQ ID NO: 2585604 - RNA, 19 nt, Artificial Sequence
  Description of Artificial Sequence: Synthetic oligonucleotide
accaccugacccacccuuc

SEQ ID NO: 2585605 - RNA, 19 nt, Artificial Sequence
  Description of Artificial Sequence: Synthetic oligonucleotide
caccaggggcaccucucgg

SEQ ID NO: 2585606 - RNA, 19 nt, Artificial Sequence
  Description of Artificial Sequence: Synthetic oligonucleotide
auuuucagaggaaguucua

SEQ ID NO: 2585607 - RNA, 19 nt, Artificial Sequence
  Description of Artificial Sequence: Synthetic oligonucleotide
gcuugagacuuuaccuugc

SEQ ID NO: 2585608 - RNA, 19 nt, Artificial Sequence
  Description of Artificial Sequence: Synthetic oligonucleotide
guacccacgcacccacaga

SEQ ID NO: 2585609 - RNA, 19 nt, Artificial Sequence
  Description of Artificial Sequence: Synthetic oligonucleotide
cuugagacuuuaccuugcu

SEQ ID NO: 2585610 - RNA, 19 nt, Artificial Sequence
  Description of Artificial Sequence: Synthetic oligonucleotide
acccacgcacccacagagg

SEQ ID NO: 2585611 - RNA, 19 nt, Artificial Sequence
  Description of Artificial Sequence: Synthetic oligonucleotide
ccucucggaguacccacgc

SEQ ID NO: 2585612 - RNA, 19 nt, Artificial Sequence
  Description of Artificial Sequence: Synthetic oligonucleotide
gaccaccugacccacccuu

SEQ ID NO: 2585613 - RNA, 19 nt, Artificial Sequence
  Description of Artificial Sequence: Synthetic oligonucleotide
gcuguuuuguccaaugcuu

SEQ ID NO: 2585614 - RNA, 19 nt, Artificial Sequence
  Description of Artificial Sequence: Synthetic oligonucleotide
ccaccugacccacccuucc

SEQ ID NO: 2585615 - RNA, 19 nt, Artificial Sequence
  Description of Artificial Sequence: Synthetic oligonucleotide
ccacgcacccacagaggcc

SEQ ID NO: 2585616 - RNA, 19 nt, Artificial Sequence
  Description of Artificial Sequence: Synthetic oligonucleotide
cucucggaguacccacgca

SEQ ID NO: 2585617 - RNA, 19 nt, Artificial Sequence
  Description of Artificial Sequence: Synthetic oligonucleotide
caccugacccacccuucca

SEQ ID NO: 2585618 - RNA, 19 nt, Artificial Sequence
  Description of Artificial Sequence: Synthetic oligonucleotide
ggcaccucucggaguaccc

SEQ ID NO: 2585619 - RNA, 19 nt, Artificial Sequence
  Description of Artificial Sequence: Synthetic oligonucleotide
cuugcuggucucccuuccu

SEQ ID NO: 2585620 - RNA, 19 nt, Artificial Sequence
  Description of Artificial Sequence: Synthetic oligonucleotide
cuggucucccuuccugcua

SEQ ID NO: 2585621 - RNA, 19 nt, Artificial Sequence
  Description of Artificial Sequence: Synthetic oligonucleotide
gggcaccucucggaguacc

SEQ ID NO: 2585622 - RNA, 19 nt, Artificial Sequence
  Description of Artificial Sequence: Synthetic oligonucleotide
gaguacccacgcacccaca

SEQ ID NO: 2585623 - RNA, 19 nt, Artificial Sequence
  Description of Artificial Sequence: Synthetic oligonucleotide
gcuggucucccuuccugcu

SEQ ID NO: 2585624 - RNA, 19 nt, Artificial Sequence
  Description of Artificial Sequence: Synthetic oligonucleotide
gcaccucucggaguaccca

SEQ ID NO: 2585625 - RNA, 19 nt, Artificial Sequence
  Description of Artificial Sequence: Synthetic oligonucleotide
caggggcaccucucggagu

SEQ ID NO: 2585626 - RNA, 19 nt, Artificial Sequence
  Description of Artificial Sequence: Synthetic oligonucleotide
ggaccaccugacccacccu

SEQ ID NO: 2585627 - RNA, 19 nt, Artificial Sequence
  Description of Artificial Sequence: Synthetic oligonucleotide
ggggcaccucucggaguac

SEQ ID NO: 2585628 - RNA, 19 nt, Artificial Sequence
  Description of Artificial Sequence: Synthetic oligonucleotide
cggaguacccacgcaccca

SEQ ID NO: 2585629 - RNA, 19 nt, Artificial Sequence
  Description of Artificial Sequence: Synthetic oligonucleotide
aagaggacgccccugaggc

SEQ ID NO: 2585630 - RNA, 19 nt, Artificial Sequence
  Description of Artificial Sequence: Synthetic oligonucleotide
aacuugugaccucaggucc

SEQ ID NO: 2585631 - RNA, 19 nt, Artificial Sequence
  Description of Artificial Sequence: Synthetic oligonucleotide
uucgaaaugggacaggggc

SEQ ID NO: 2585632 - RNA, 19 nt, Artificial Sequence
  Description of Artificial Sequence: Synthetic oligonucleotide
uuggcaacaaggaugggcg

SEQ ID NO: 2585633 - RNA, 19 nt, Artificial Sequence
  Description of Artificial Sequence: Synthetic oligonucleotide
cauuuggcaacaaggaugg

SEQ ID NO: 2585634 - RNA, 19 nt, Artificial Sequence
  Description of Artificial Sequence: Synthetic oligonucleotide
uuuucuuugccauuuggca

SEQ ID NO: 2585635 - RNA, 19 nt, Artificial Sequence
  Description of Artificial Sequence: Synthetic oligonucleotide
ucuacuucgaaaugggaca

SEQ ID NO: 2585636 - RNA, 19 nt, Artificial Sequence
  Description of Artificial Sequence: Synthetic oligonucleotide
ucgucugcgacccugcggg

SEQ ID NO: 2585637 - RNA, 19 nt, Artificial Sequence
  Description of Artificial Sequence: Synthetic oligonucleotide
guagauggcaacuugugac

SEQ ID NO: 2585638 - RNA, 19 nt, Artificial Sequence
  Description of Artificial Sequence: Synthetic oligonucleotide
uuugccauuuggcaacaag

SEQ ID NO: 2585639 - RNA, 19 nt, Artificial Sequence
  Description of Artificial Sequence: Synthetic oligonucleotide
aggaugggcgcucagcccc

SEQ ID NO: 2585640 - RNA, 19 nt, Artificial Sequence
  Description of Artificial Sequence: Synthetic oligonucleotide
uuuggcaacaaggaugggc

SEQ ID NO: 2585641 - RNA, 19 nt, Artificial Sequence
  Description of Artificial Sequence: Synthetic oligonucleotide
cucuacuucgaaaugggac

SEQ ID NO: 2585642 - RNA, 19 nt, Artificial Sequence
  Description of Artificial Sequence: Synthetic oligonucleotide
aaggaugggcgcucagccc

SEQ ID NO: 2585643 - RNA, 19 nt, Artificial Sequence
  Description of Artificial Sequence: Synthetic oligonucleotide
uagauggcaacuugugacc

SEQ ID NO: 2585644 - RNA, 19 nt, Artificial Sequence
  Description of Artificial Sequence: Synthetic oligonucleotide
cagaguucgaggucguugg

SEQ ID NO: 2585645 - RNA, 19 nt, Artificial Sequence
  Description of Artificial Sequence: Synthetic oligonucleotide
cugcgggucaguuuggagg

SEQ ID NO: 2585646 - RNA, 19 nt, Artificial Sequence
  Description of Artificial Sequence: Synthetic oligonucleotide
gaagaggacgccccugagg

SEQ ID NO: 2585647 - RNA, 19 nt, Artificial Sequence
  Description of Artificial Sequence: Synthetic oligonucleotide
acuucgaaaugggacaggg

SEQ ID NO: 2585648 - RNA, 19 nt, Artificial Sequence
  Description of Artificial Sequence: Synthetic oligonucleotide
uuuccgcuuuaucccaagg

SEQ ID NO: 2585649 - RNA, 19 nt, Artificial Sequence
  Description of Artificial Sequence: Synthetic oligonucleotide
uccgcuuuaucccaaggua

SEQ ID NO: 2585650 - RNA, 19 nt, Artificial Sequence
  Description of Artificial Sequence: Synthetic oligonucleotide
ucagguucgucugcgaccc

SEQ ID NO: 2585651 - RNA, 19 nt, Artificial Sequence
  Description of Artificial Sequence: Synthetic oligonucleotide
ucgaaaugggacaggggcu

SEQ ID NO: 2585652 - RNA, 19 nt, Artificial Sequence
  Description of Artificial Sequence: Synthetic oligonucleotide
gacccugcgggucaguuug

SEQ ID NO: 2585653 - RNA, 19 nt, Artificial Sequence
  Description of Artificial Sequence: Synthetic oligonucleotide
caacuugugaccucagguc

SEQ ID NO: 2585654 - RNA, 19 nt, Artificial Sequence
  Description of Artificial Sequence: Synthetic oligonucleotide
agcuucacacuccagggga

SEQ ID NO: 2585655 - RNA, 19 nt, Artificial Sequence
  Description of Artificial Sequence: Synthetic oligonucleotide
aguucgaggucguuggaga

SEQ ID NO: 2585656 - RNA, 19 nt, Artificial Sequence
  Description of Artificial Sequence: Synthetic oligonucleotide
uuccgcuuuaucccaaggu

SEQ ID NO: 2585657 - RNA, 19 nt, Artificial Sequence
  Description of Artificial Sequence: Synthetic oligonucleotide
ucagaguucgaggucguug

SEQ ID NO: 2585658 - RNA, 19 nt, Artificial Sequence
  Description of Artificial Sequence: Synthetic oligonucleotide
ggcgguuuccgcuuuaucc

SEQ ID NO: 2585659 - RNA, 19 nt, Artificial Sequence
  Description of Artificial Sequence: Synthetic oligonucleotide
gaggacgagagcuggucag

SEQ ID NO: 2585660 - RNA, 19 nt, Artificial Sequence
  Description of Artificial Sequence: Synthetic oligonucleotide
uucgucugcgacccugcgg

SEQ ID NO: 2585661 - RNA, 19 nt, Artificial Sequence
  Description of Artificial Sequence: Synthetic oligonucleotide
caguuuggaggucagcuug

SEQ ID NO: 2585662 - RNA, 19 nt, Artificial Sequence
  Description of Artificial Sequence: Synthetic oligonucleotide
ucgaggucguuggagaugc

SEQ ID NO: 2585663 - RNA, 19 nt, Artificial Sequence
  Description of Artificial Sequence: Synthetic oligonucleotide
ggugcggaaggccagggcg

SEQ ID NO: 2585664 - RNA, 19 nt, Artificial Sequence
  Description of Artificial Sequence: Synthetic oligonucleotide
acccgugagguuccggagc

SEQ ID NO: 2585665 - RNA, 19 nt, Artificial Sequence
  Description of Artificial Sequence: Synthetic oligonucleotide
gauucucucagguucgucu

SEQ ID NO: 2585666 - RNA, 19 nt, Artificial Sequence
  Description of Artificial Sequence: Synthetic oligonucleotide
cucagguucgucugcgacc

SEQ ID NO: 2585667 - RNA, 19 nt, Artificial Sequence
  Description of Artificial Sequence: Synthetic oligonucleotide
uccggagcuguuuucuuug

SEQ ID NO: 2585668 - RNA, 19 nt, Artificial Sequence
  Description of Artificial Sequence: Synthetic oligonucleotide
aagguagauggcaacuugu

SEQ ID NO: 2585669 - RNA, 19 nt, Artificial Sequence
  Description of Artificial Sequence: Synthetic oligonucleotide
cuucgaaaugggacagggg

SEQ ID NO: 2585670 - RNA, 19 nt, Artificial Sequence
  Description of Artificial Sequence: Synthetic oligonucleotide
caccucuacuucgaaaugg

SEQ ID NO: 2585671 - RNA, 19 nt, Artificial Sequence
  Description of Artificial Sequence: Synthetic oligonucleotide
cuggcacaccucuacuucg

SEQ ID NO: 2585672 - RNA, 19 nt, Artificial Sequence
  Description of Artificial Sequence: Synthetic oligonucleotide
agagguuggugguggggcg

SEQ ID NO: 2585673 - RNA, 19 nt, Artificial Sequence
  Description of Artificial Sequence: Synthetic oligonucleotide
ucucagguucgucugcgac

SEQ ID NO: 2585674 - RNA, 19 nt, Artificial Sequence
  Description of Artificial Sequence: Synthetic oligonucleotide
gaggacgccccugaggccg

SEQ ID NO: 2585675 - RNA, 19 nt, Artificial Sequence
  Description of Artificial Sequence: Synthetic oligonucleotide
gugaagagguugguggugg

SEQ ID NO: 2585676 - RNA, 19 nt, Artificial Sequence
  Description of Artificial Sequence: Synthetic oligonucleotide
ugcgggucaguuuggaggu

SEQ ID NO: 2585677 - RNA, 19 nt, Artificial Sequence
  Description of Artificial Sequence: Synthetic oligonucleotide
ugaagagguuggugguggg

SEQ ID NO: 2585678 - RNA, 19 nt, Artificial Sequence
  Description of Artificial Sequence: Synthetic oligonucleotide
acuugugaccucagguccc

SEQ ID NO: 2585679 - RNA, 19 nt, Artificial Sequence
  Description of Artificial Sequence: Synthetic oligonucleotide
gaggucguuggagaugcgg

SEQ ID NO: 2585680 - RNA, 19 nt, Artificial Sequence
  Description of Artificial Sequence: Synthetic oligonucleotide
gaacggcugcggcugacgg

SEQ ID NO: 2585681 - RNA, 19 nt, Artificial Sequence
  Description of Artificial Sequence: Synthetic oligonucleotide
gaagagguugguggugggg

SEQ ID NO: 2585682 - RNA, 19 nt, Artificial Sequence
  Description of Artificial Sequence: Synthetic oligonucleotide
cacuccaggggaaucggag

SEQ ID NO: 2585683 - RNA, 19 nt, Artificial Sequence
  Description of Artificial Sequence: Synthetic oligonucleotide
accucuacuucgaaauggg

SEQ ID NO: 2585684 - RNA, 19 nt, Artificial Sequence
  Description of Artificial Sequence: Synthetic oligonucleotide
ucugcgacccugcggguca

SEQ ID NO: 2585685 - RNA, 19 nt, Artificial Sequence
  Description of Artificial Sequence: Synthetic oligonucleotide
gaugcgggugacgagggug

SEQ ID NO: 2585686 - RNA, 19 nt, Artificial Sequence
  Description of Artificial Sequence: Synthetic oligonucleotide
aacaaggaugggcgcucag

SEQ ID NO: 2585687 - RNA, 19 nt, Artificial Sequence
  Description of Artificial Sequence: Synthetic oligonucleotide
cuuuaucccaagguagaug

SEQ ID NO: 2585688 - RNA, 19 nt, Artificial Sequence
  Description of Artificial Sequence: Synthetic oligonucleotide
uuaucccaagguagauggc

SEQ ID NO: 2585689 - RNA, 19 nt, Artificial Sequence
  Description of Artificial Sequence: Synthetic oligonucleotide
ucguuggagaugcggguga

SEQ ID NO: 2585690 - RNA, 19 nt, Artificial Sequence
  Description of Artificial Sequence: Synthetic oligonucleotide
uucucucagguucgucugc

SEQ ID NO: 2585691 - RNA, 19 nt, Artificial Sequence
  Description of Artificial Sequence: Synthetic oligonucleotide
aaggugcugcggauggugg

SEQ ID NO: 2585692 - RNA, 19 nt, Artificial Sequence
  Description of Artificial Sequence: Synthetic oligonucleotide
uggugaagagguugguggu

SEQ ID NO: 2585693 - RNA, 19 nt, Artificial Sequence
  Description of Artificial Sequence: Synthetic oligonucleotide
ggagaugcgggugacgagg

SEQ ID NO: 2585694 - RNA, 19 nt, Artificial Sequence
  Description of Artificial Sequence: Synthetic oligonucleotide
cuacuucgaaaugggacag

SEQ ID NO: 2585695 - RNA, 19 nt, Artificial Sequence
  Description of Artificial Sequence: Synthetic oligonucleotide
aggucguuggagaugcggg

SEQ ID NO: 2585696 - RNA, 19 nt, Artificial Sequence
  Description of Artificial Sequence: Synthetic oligonucleotide
cacucggcggaagaggacg

SEQ ID NO: 2585697 - RNA, 19 nt, Artificial Sequence
  Description of Artificial Sequence: Synthetic oligonucleotide
ggggaaucggagcagccgg

SEQ ID NO: 2585698 - RNA, 19 nt, Artificial Sequence
  Description of Artificial Sequence: Synthetic oligonucleotide
gaguucgaggucguuggag

SEQ ID NO: 2585699 - RNA, 19 nt, Artificial Sequence
  Description of Artificial Sequence: Synthetic oligonucleotide
agaggacgccccugaggcc

SEQ ID NO: 2585700 - RNA, 19 nt, Artificial Sequence
  Description of Artificial Sequence: Synthetic oligonucleotide
ucaguuuggaggucagcuu

SEQ ID NO: 2585701 - RNA, 19 nt, Artificial Sequence
  Description of Artificial Sequence: Synthetic oligonucleotide
aguuuggaggucagcuugg

SEQ ID NO: 2585702 - RNA, 19 nt, Artificial Sequence
  Description of Artificial Sequence: Synthetic oligonucleotide
ucgggaggacgagagcugg

SEQ ID NO: 2585703 - RNA, 19 nt, Artificial Sequence
  Description of Artificial Sequence: Synthetic oligonucleotide
aggacgagagcuggucagc

SEQ ID NO: 2585704 - RNA, 19 nt, Artificial Sequence
  Description of Artificial Sequence: Synthetic oligonucleotide
gaaaugggacaggggcucg

SEQ ID NO: 2585705 - RNA, 19 nt, Artificial Sequence
  Description of Artificial Sequence: Synthetic oligonucleotide
ugccacucggcggaagagg

SEQ ID NO: 2585706 - RNA, 19 nt, Artificial Sequence
  Description of Artificial Sequence: Synthetic oligonucleotide
uacuucgaaaugggacagg

SEQ ID NO: 2585707 - RNA, 19 nt, Artificial Sequence
  Description of Artificial Sequence: Synthetic oligonucleotide
augcgggugacgagggugc

SEQ ID NO: 2585708 - RNA, 19 nt, Artificial Sequence
  Description of Artificial Sequence: Synthetic oligonucleotide
gcgguuuccgcuuuauccc

SEQ ID NO: 2585709 - RNA, 19 nt, Artificial Sequence
  Description of Artificial Sequence: Synthetic oligonucleotide
ugcgguggcuugucgcagg

SEQ ID NO: 2585710 - RNA, 19 nt, Artificial Sequence
  Description of Artificial Sequence: Synthetic oligonucleotide
gagaugcgggugacgaggg

SEQ ID NO: 2585711 - RNA, 19 nt, Artificial Sequence
  Description of Artificial Sequence: Synthetic oligonucleotide
ggguccauucugcacaccc

SEQ ID NO: 2585712 - RNA, 19 nt, Artificial Sequence
  Description of Artificial Sequence: Synthetic oligonucleotide
ggagcuguuuucuuugcca

SEQ ID NO: 2585713 - RNA, 19 nt, Artificial Sequence
  Description of Artificial Sequence: Synthetic oligonucleotide
ucgugggccagcgugggug

SEQ ID NO: 2585714 - RNA, 19 nt, Artificial Sequence
  Description of Artificial Sequence: Synthetic oligonucleotide
uucgaggucguuggagaug

SEQ ID NO: 2585715 - RNA, 19 nt, Artificial Sequence
  Description of Artificial Sequence: Synthetic oligonucleotide
agguagauggcaacuugug

SEQ ID NO: 2585716 - RNA, 19 nt, Artificial Sequence
  Description of Artificial Sequence: Synthetic oligonucleotide
ugacggcaccggcagcggg

SEQ ID NO: 2585717 - RNA, 19 nt, Artificial Sequence
  Description of Artificial Sequence: Synthetic oligonucleotide
gguagauggcaacuuguga

SEQ ID NO: 2585718 - RNA, 19 nt, Artificial Sequence
  Description of Artificial Sequence: Synthetic oligonucleotide
uccggucucggaccuggcc

SEQ ID NO: 2585719 - RNA, 19 nt, Artificial Sequence
  Description of Artificial Sequence: Synthetic oligonucleotide
agauggcaacuugugaccu

SEQ ID NO: 2585720 - RNA, 19 nt, Artificial Sequence
  Description of Artificial Sequence: Synthetic oligonucleotide
ucccaagguagauggcaac

SEQ ID NO: 2585721 - RNA, 19 nt, Artificial Sequence
  Description of Artificial Sequence: Synthetic oligonucleotide
gauggcaacuugugaccuc

SEQ ID NO: 2585722 - RNA, 19 nt, Artificial Sequence
  Description of Artificial Sequence: Synthetic oligonucleotide
ccgcuuuaucccaagguag

SEQ ID NO: 2585723 - RNA, 19 nt, Artificial Sequence
  Description of Artificial Sequence: Synthetic oligonucleotide
ggcgcucagccccuggucg

SEQ ID NO: 2585724 - RNA, 19 nt, Artificial Sequence
  Description of Artificial Sequence: Synthetic oligonucleotide
ugcccuccggucucggacc

SEQ ID NO: 2585725 - RNA, 19 nt, Artificial Sequence
  Description of Artificial Sequence: Synthetic oligonucleotide
uggcaacaaggaugggcgc

SEQ ID NO: 2585726 - RNA, 19 nt, Artificial Sequence
  Description of Artificial Sequence: Synthetic oligonucleotide
cugcggaugguggagcccc

SEQ ID NO: 2585727 - RNA, 19 nt, Artificial Sequence
  Description of Artificial Sequence: Synthetic oligonucleotide
gguggcuugucgcagggca

SEQ ID NO: 2585728 - RNA, 19 nt, Artificial Sequence
  Description of Artificial Sequence: Synthetic oligonucleotide
acgccccugaggccgggcc

SEQ ID NO: 2585729 - RNA, 19 nt, Artificial Sequence
  Description of Artificial Sequence: Synthetic oligonucleotide
ggcgaggccgcccggaggg

SEQ ID NO: 2585730 - RNA, 19 nt, Artificial Sequence
  Description of Artificial Sequence: Synthetic oligonucleotide
gucaguuuggaggucagcu

SEQ ID NO: 2585731 - RNA, 19 nt, Artificial Sequence
  Description of Artificial Sequence: Synthetic oligonucleotide
aggggcucgggcccgcccg

SEQ ID NO: 2585732 - RNA, 19 nt, Artificial Sequence
  Description of Artificial Sequence: Synthetic oligonucleotide
uccaggggaaucggagcag

SEQ ID NO: 2585733 - RNA, 19 nt, Artificial Sequence
  Description of Artificial Sequence: Synthetic oligonucleotide
acucggcggaagaggacgc

SEQ ID NO: 2585734 - RNA, 19 nt, Artificial Sequence
  Description of Artificial Sequence: Synthetic oligonucleotide
gccagcgugggugaggccg

SEQ ID NO: 2585735 - RNA, 19 nt, Artificial Sequence
  Description of Artificial Sequence: Synthetic oligonucleotide
ucuuugccauuuggcaaca

SEQ ID NO: 2585736 - RNA, 19 nt, Artificial Sequence
  Description of Artificial Sequence: Synthetic oligonucleotide
guucgucugcgacccugcg

SEQ ID NO: 2585737 - RNA, 19 nt, Artificial Sequence
  Description of Artificial Sequence: Synthetic oligonucleotide
gacgagggugcggaaggcc

SEQ ID NO: 2585738 - RNA, 19 nt, Artificial Sequence
  Description of Artificial Sequence: Synthetic oligonucleotide
uggcuugucgcagggcagc

SEQ ID NO: 2585739 - RNA, 19 nt, Artificial Sequence
  Description of Artificial Sequence: Synthetic oligonucleotide
guuggugguggggcgaggc

SEQ ID NO: 2585740 - RNA, 19 nt, Artificial Sequence
  Description of Artificial Sequence: Synthetic oligonucleotide
cucgggaggacgagagcug

SEQ ID NO: 2585741 - RNA, 19 nt, Artificial Sequence
  Description of Artificial Sequence: Synthetic oligonucleotide
uuccggagcuguuuucuuu

SEQ ID NO: 2585742 - RNA, 19 nt, Artificial Sequence
  Description of Artificial Sequence: Synthetic oligonucleotide
ggcuccgcucucccgaugg

SEQ ID NO: 2585743 - RNA, 19 nt, Artificial Sequence
  Description of Artificial Sequence: Synthetic oligonucleotide
uggagccccgcgccaggcg

SEQ ID NO: 2585744 - RNA, 19 nt, Artificial Sequence
  Description of Artificial Sequence: Synthetic oligonucleotide
gucguuggagaugcgggug

SEQ ID NO: 2585745 - RNA, 19 nt, Artificial Sequence
  Description of Artificial Sequence: Synthetic oligonucleotide
cuccaggggaaucggagca

SEQ ID NO: 2585746 - RNA, 19 nt, Artificial Sequence
  Description of Artificial Sequence: Synthetic oligonucleotide
caggggaaucggagcagcc

SEQ ID NO: 2585747 - RNA, 19 nt, Artificial Sequence
  Description of Artificial Sequence: Synthetic oligonucleotide
ucggcggaagaggacgccc

SEQ ID NO: 2585748 - RNA, 19 nt, Artificial Sequence
  Description of Artificial Sequence: Synthetic oligonucleotide
gcaacuugugaccucaggu

SEQ ID NO: 2585749 - RNA, 19 nt, Artificial Sequence
  Description of Artificial Sequence: Synthetic oligonucleotide
ugcggcugacggcaccggc

SEQ ID NO: 2585750 - RNA, 19 nt, Artificial Sequence
  Description of Artificial Sequence: Synthetic oligonucleotide
gcugacggcaccggcagcg

SEQ ID NO: 2585751 - RNA, 19 nt, Artificial Sequence
  Description of Artificial Sequence: Synthetic oligonucleotide
gugcggaaggccagggcgg

SEQ ID NO: 2585752 - RNA, 19 nt, Artificial Sequence
  Description of Artificial Sequence: Synthetic oligonucleotide
agaguucgaggucguugga

SEQ ID NO: 2585753 - RNA, 19 nt, Artificial Sequence
  Description of Artificial Sequence: Synthetic oligonucleotide
ggcggugccugccacucgg

SEQ ID NO: 2585754 - RNA, 19 nt, Artificial Sequence
  Description of Artificial Sequence: Synthetic oligonucleotide
agccaucagggccucggga

SEQ ID NO: 2585755 - RNA, 19 nt, Artificial Sequence
  Description of Artificial Sequence: Synthetic oligonucleotide
cugcccuccggucucggac

SEQ ID NO: 2585756 - RNA, 19 nt, Artificial Sequence
  Description of Artificial Sequence: Synthetic oligonucleotide
ugagguuccggagcuguuu

SEQ ID NO: 2585757 - RNA, 19 nt, Artificial Sequence
  Description of Artificial Sequence: Synthetic oligonucleotide
gaggccucgugggccagcg

SEQ ID NO: 2585758 - RNA, 19 nt, Artificial Sequence
  Description of Artificial Sequence: Synthetic oligonucleotide
gagggugcggaaggccagg

SEQ ID NO: 2585759 - RNA, 19 nt, Artificial Sequence
  Description of Artificial Sequence: Synthetic oligonucleotide
agggcggugccugccacuc

SEQ ID NO: 2585760 - RNA, 19 nt, Artificial Sequence
  Description of Artificial Sequence: Synthetic oligonucleotide
cacccgugagguuccggag

SEQ ID NO: 2585761 - RNA, 19 nt, Artificial Sequence
  Description of Artificial Sequence: Synthetic oligonucleotide
gcagcuggcacaccucuac

SEQ ID NO: 2585762 - RNA, 19 nt, Artificial Sequence
  Description of Artificial Sequence: Synthetic oligonucleotide
agguucgucugcgacccug

SEQ ID NO: 2585763 - RNA, 19 nt, Artificial Sequence
  Description of Artificial Sequence: Synthetic oligonucleotide
aggugcugcggauggugga

SEQ ID NO: 2585764 - RNA, 19 nt, Artificial Sequence
  Description of Artificial Sequence: Synthetic oligonucleotide
gugccugccacucggcgga

SEQ ID NO: 2585765 - RNA, 19 nt, Artificial Sequence
  Description of Artificial Sequence: Synthetic oligonucleotide
ggugacgagggugcggaag

SEQ ID NO: 2585766 - RNA, 19 nt, Artificial Sequence
  Description of Artificial Sequence: Synthetic oligonucleotide
ugggcgcucagccccuggu

SEQ ID NO: 2585767 - RNA, 19 nt, Artificial Sequence
  Description of Artificial Sequence: Synthetic oligonucleotide
ccccgauucucucagguuc

SEQ ID NO: 2585768 - RNA, 19 nt, Artificial Sequence
  Description of Artificial Sequence: Synthetic oligonucleotide
ggagccccgcgccaggcgg

SEQ ID NO: 2585769 - RNA, 19 nt, Artificial Sequence
  Description of Artificial Sequence: Synthetic oligonucleotide
gccaggcugugacuggagg

SEQ ID NO: 2585770 - RNA, 19 nt, Artificial Sequence
  Description of Artificial Sequence: Synthetic oligonucleotide
gguggggcgaggccgcccg

SEQ ID NO: 2585771 - RNA, 19 nt, Artificial Sequence
  Description of Artificial Sequence: Synthetic oligonucleotide
ggaaucggagcagccgggg

SEQ ID NO: 2585772 - RNA, 19 nt, Artificial Sequence
  Description of Artificial Sequence: Synthetic oligonucleotide
ugacgagggugcggaaggc

SEQ ID NO: 2585773 - RNA, 19 nt, Artificial Sequence
  Description of Artificial Sequence: Synthetic oligonucleotide
ggaugguggagccccgcgc

SEQ ID NO: 2585774 - RNA, 19 nt, Artificial Sequence
  Description of Artificial Sequence: Synthetic oligonucleotide
cuccgcucucccgaugggg

SEQ ID NO: 2585775 - RNA, 19 nt, Artificial Sequence
  Description of Artificial Sequence: Synthetic oligonucleotide
ggccucgugggccagcgug

SEQ ID NO: 2585776 - RNA, 19 nt, Artificial Sequence
  Description of Artificial Sequence: Synthetic oligonucleotide
acgagggugcggaaggcca

SEQ ID NO: 2585777 - RNA, 19 nt, Artificial Sequence
  Description of Artificial Sequence: Synthetic oligonucleotide
gcagccaucagggccucgg

SEQ ID NO: 2585778 - RNA, 19 nt, Artificial Sequence
  Description of Artificial Sequence: Synthetic oligonucleotide
ggugcugcggaugguggag

SEQ ID NO: 2585779 - RNA, 19 nt, Artificial Sequence
  Description of Artificial Sequence: Synthetic oligonucleotide
ccggucucggaccuggccc

SEQ ID NO: 2585780 - RNA, 19 nt, Artificial Sequence
  Description of Artificial Sequence: Synthetic oligonucleotide
ugcgggugacgagggugcg

SEQ ID NO: 2585781 - RNA, 19 nt, Artificial Sequence
  Description of Artificial Sequence: Synthetic oligonucleotide
aggccagggcggugccugc

SEQ ID NO: 2585782 - RNA, 19 nt, Artificial Sequence
  Description of Artificial Sequence: Synthetic oligonucleotide
guggcuugucgcagggcag

SEQ ID NO: 2585783 - RNA, 19 nt, Artificial Sequence
  Description of Artificial Sequence: Synthetic oligonucleotide
cuggucgcucugugcacac

SEQ ID NO: 2585784 - RNA, 19 nt, Artificial Sequence
  Description of Artificial Sequence: Synthetic oligonucleotide
gguccauucugcacacccc

SEQ ID NO: 2585785 - RNA, 19 nt, Artificial Sequence
  Description of Artificial Sequence: Synthetic oligonucleotide
agggugcggaaggccaggg

SEQ ID NO: 2585786 - RNA, 19 nt, Artificial Sequence
  Description of Artificial Sequence: Synthetic oligonucleotide
ggaggacgagagcugguca

SEQ ID NO: 2585787 - RNA, 19 nt, Artificial Sequence
  Description of Artificial Sequence: Synthetic oligonucleotide
agcgggcagcugcgguggc

SEQ ID NO: 2585788 - RNA, 19 nt, Artificial Sequence
  Description of Artificial Sequence: Synthetic oligonucleotide
aggaacggcugcggcugac

SEQ ID NO: 2585789 - RNA, 19 nt, Artificial Sequence
  Description of Artificial Sequence: Synthetic oligonucleotide
cucgggcccgcccgcaccc

SEQ ID NO: 2585790 - RNA, 19 nt, Artificial Sequence
  Description of Artificial Sequence: Synthetic oligonucleotide
agccccuggucgcucugug

SEQ ID NO: 2585791 - RNA, 19 nt, Artificial Sequence
  Description of Artificial Sequence: Synthetic oligonucleotide
gggaaucggagcagccggg

SEQ ID NO: 2585792 - RNA, 19 nt, Artificial Sequence
  Description of Artificial Sequence: Synthetic oligonucleotide
ugcggaaggccagggcggu

SEQ ID NO: 2585793 - RNA, 19 nt, Artificial Sequence
  Description of Artificial Sequence: Synthetic oligonucleotide
cugccacucggcggaagag

SEQ ID NO: 2585794 - RNA, 19 nt, Artificial Sequence
  Description of Artificial Sequence: Synthetic oligonucleotide
gagguuggugguggggcga

SEQ ID NO: 2585795 - RNA, 19 nt, Artificial Sequence
  Description of Artificial Sequence: Synthetic oligonucleotide
ugaggccgggccggggcag

SEQ ID NO: 2585796 - RNA, 19 nt, Artificial Sequence
  Description of Artificial Sequence: Synthetic oligonucleotide
gcugcgguggcuugucgca

SEQ ID NO: 2585797 - RNA, 19 nt, Artificial Sequence
  Description of Artificial Sequence: Synthetic oligonucleotide
caggcggcuccgcucuccc

SEQ ID NO: 2585798 - RNA, 19 nt, Artificial Sequence
  Description of Artificial Sequence: Synthetic oligonucleotide
gcagcgggcagcugcggug

SEQ ID NO: 2585799 - RNA, 19 nt, Artificial Sequence
  Description of Artificial Sequence: Synthetic oligonucleotide
cugacggcaccggcagcgg

SEQ ID NO: 2585800 - RNA, 19 nt, Artificial Sequence
  Description of Artificial Sequence: Synthetic oligonucleotide
gcugcggcugacggcaccg

SEQ ID NO: 2585801 - RNA, 19 nt, Artificial Sequence
  Description of Artificial Sequence: Synthetic oligonucleotide
gcacccgugagguuccgga

SEQ ID NO: 2585802 - RNA, 19 nt, Artificial Sequence
  Description of Artificial Sequence: Synthetic oligonucleotide
aggcggcuccgcucucccg

SEQ ID NO: 2585803 - RNA, 19 nt, Artificial Sequence
  Description of Artificial Sequence: Synthetic oligonucleotide
ggugaggccucgugggcca

SEQ ID NO: 2585804 - RNA, 19 nt, Artificial Sequence
  Description of Artificial Sequence: Synthetic oligonucleotide
gguucgucugcgacccugc

SEQ ID NO: 2585805 - RNA, 19 nt, Artificial Sequence
  Description of Artificial Sequence: Synthetic oligonucleotide
cucggcggaagaggacgcc

SEQ ID NO: 2585806 - RNA, 19 nt, Artificial Sequence
  Description of Artificial Sequence: Synthetic oligonucleotide
cagcugcgguggcuugucg

SEQ ID NO: 2585807 - RNA, 19 nt, Artificial Sequence
  Description of Artificial Sequence: Synthetic oligonucleotide
ggccucgggaggacgagag

SEQ ID NO: 2585808 - RNA, 19 nt, Artificial Sequence
  Description of Artificial Sequence: Synthetic oligonucleotide
gugcugcggaugguggagc

SEQ ID NO: 2585809 - RNA, 19 nt, Artificial Sequence
  Description of Artificial Sequence: Synthetic oligonucleotide
gcgguggcuugucgcaggg

SEQ ID NO: 2585810 - RNA, 19 nt, Artificial Sequence
  Description of Artificial Sequence: Synthetic oligonucleotide
guucgaggucguuggagau

SEQ ID NO: 2585811 - RNA, 19 nt, Artificial Sequence
  Description of Artificial Sequence: Synthetic oligonucleotide
gaggccgcccggagggcag

SEQ ID NO: 2585812 - RNA, 19 nt, Artificial Sequence
  Description of Artificial Sequence: Synthetic oligonucleotide
gggugaggccucgugggcc

SEQ ID NO: 2585813 - RNA, 19 nt, Artificial Sequence
  Description of Artificial Sequence: Synthetic oligonucleotide
gcaacaaggaugggcgcuc

SEQ ID NO: 2585814 - RNA, 19 nt, Artificial Sequence
  Description of Artificial Sequence: Synthetic oligonucleotide
cugcgguggcuugucgcag

SEQ ID NO: 2585815 - RNA, 19 nt, Artificial Sequence
  Description of Artificial Sequence: Synthetic oligonucleotide
ccugcgggucaguuuggag

SEQ ID NO: 2585816 - RNA, 19 nt, Artificial Sequence
  Description of Artificial Sequence: Synthetic oligonucleotide
ggggugaggccucgugggc

SEQ ID NO: 2585817 - RNA, 19 nt, Artificial Sequence
  Description of Artificial Sequence: Synthetic oligonucleotide
ccagcgugggugaggccgg

SEQ ID NO: 2585818 - RNA, 19 nt, Artificial Sequence
  Description of Artificial Sequence: Synthetic oligonucleotide
cucucagguucgucugcga

SEQ ID NO: 2585819 - RNA, 19 nt, Artificial Sequence
  Description of Artificial Sequence: Synthetic oligonucleotide
ugaggccucgugggccagc

SEQ ID NO: 2585820 - RNA, 19 nt, Artificial Sequence
  Description of Artificial Sequence: Synthetic oligonucleotide
caucagggccucgggagga

SEQ ID NO: 2585821 - RNA, 19 nt, Artificial Sequence
  Description of Artificial Sequence: Synthetic oligonucleotide
acacuccaggggaaucgga

SEQ ID NO: 2585822 - RNA, 19 nt, Artificial Sequence
  Description of Artificial Sequence: Synthetic oligonucleotide
ccggagcuguuuucuuugc

SEQ ID NO: 2585823 - RNA, 19 nt, Artificial Sequence
  Description of Artificial Sequence: Synthetic oligonucleotide
ccuccggucucggaccugg

SEQ ID NO: 2585824 - RNA, 19 nt, Artificial Sequence
  Description of Artificial Sequence: Synthetic oligonucleotide
gggaggacgagagcugguc

SEQ ID NO: 2585825 - RNA, 19 nt, Artificial Sequence
  Description of Artificial Sequence: Synthetic oligonucleotide
cagggccucgggaggacga

SEQ ID NO: 2585826 - RNA, 19 nt, Artificial Sequence
  Description of Artificial Sequence: Synthetic oligonucleotide
gggccagcgugggugaggc

SEQ ID NO: 2585827 - RNA, 19 nt, Artificial Sequence
  Description of Artificial Sequence: Synthetic oligonucleotide
ggugguggggcgaggccgc

SEQ ID NO: 2585828 - RNA, 19 nt, Artificial Sequence
  Description of Artificial Sequence: Synthetic oligonucleotide
gcacaccucuacuucgaaa

SEQ ID NO: 2585829 - RNA, 19 nt, Artificial Sequence
  Description of Artificial Sequence: Synthetic oligonucleotide
gucugcgacccugcggguc

SEQ ID NO: 2585830 - RNA, 19 nt, Artificial Sequence
  Description of Artificial Sequence: Synthetic oligonucleotide
cuccggucucggaccuggc

SEQ ID NO: 2585831 - RNA, 19 nt, Artificial Sequence
  Description of Artificial Sequence: Synthetic oligonucleotide
ccucuacuucgaaauggga

SEQ ID NO: 2585832 - RNA, 19 nt, Artificial Sequence
  Description of Artificial Sequence: Synthetic oligonucleotide
gggucaguuuggaggucag

SEQ ID NO: 2585833 - RNA, 19 nt, Artificial Sequence
  Description of Artificial Sequence: Synthetic oligonucleotide
gggugcggaaggccagggc

SEQ ID NO: 2585834 - RNA, 19 nt, Artificial Sequence
  Description of Artificial Sequence: Synthetic oligonucleotide
ggaggucagcuuggugaag

SEQ ID NO: 2585835 - RNA, 19 nt, Artificial Sequence
  Description of Artificial Sequence: Synthetic oligonucleotide
gcuccgcucucccgauggg

SEQ ID NO: 2585836 - RNA, 19 nt, Artificial Sequence
  Description of Artificial Sequence: Synthetic oligonucleotide
gaugggcgcucagccccug

SEQ ID NO: 2585837 - RNA, 19 nt, Artificial Sequence
  Description of Artificial Sequence: Synthetic oligonucleotide
gccacucggcggaagagga

SEQ ID NO: 2585838 - RNA, 19 nt, Artificial Sequence
  Description of Artificial Sequence: Synthetic oligonucleotide
ugguggggcgaggccgccc

SEQ ID NO: 2585839 - RNA, 19 nt, Artificial Sequence
  Description of Artificial Sequence: Synthetic oligonucleotide
caacaaggaugggcgcuca

SEQ ID NO: 2585840 - RNA, 19 nt, Artificial Sequence
  Description of Artificial Sequence: Synthetic oligonucleotide
gguuccggagcuguuuucu

SEQ ID NO: 2585841 - RNA, 19 nt, Artificial Sequence
  Description of Artificial Sequence: Synthetic oligonucleotide
gggcgaggccgcccggagg

SEQ ID NO: 2585842 - RNA, 19 nt, Artificial Sequence
  Description of Artificial Sequence: Synthetic oligonucleotide
ccggcagcgggcagcugcg

SEQ ID NO: 2585843 - RNA, 19 nt, Artificial Sequence
  Description of Artificial Sequence: Synthetic oligonucleotide
caggggcucgggcccgccc

SEQ ID NO: 2585844 - RNA, 19 nt, Artificial Sequence
  Description of Artificial Sequence: Synthetic oligonucleotide
ggcaacaaggaugggcgcu

SEQ ID NO: 2585845 - RNA, 19 nt, Artificial Sequence
  Description of Artificial Sequence: Synthetic oligonucleotide
gacgagagcuggucagcuu

SEQ ID NO: 2585846 - RNA, 19 nt, Artificial Sequence
  Description of Artificial Sequence: Synthetic oligonucleotide
ccccuggucgcucugugca

SEQ ID NO: 2585847 - RNA, 19 nt, Artificial Sequence
  Description of Artificial Sequence: Synthetic oligonucleotide
guggagccccgcgccaggc

SEQ ID NO: 2585848 - RNA, 19 nt, Artificial Sequence
  Description of Artificial Sequence: Synthetic oligonucleotide
ccccguggaaggugcugcg

SEQ ID NO: 2585849 - RNA, 19 nt, Artificial Sequence
  Description of Artificial Sequence: Synthetic oligonucleotide
gcgcucagccccuggucgc

SEQ ID NO: 2585850 - RNA, 19 nt, Artificial Sequence
  Description of Artificial Sequence: Synthetic oligonucleotide
cugcggcugacggcaccgg

SEQ ID NO: 2585851 - RNA, 19 nt, Artificial Sequence
  Description of Artificial Sequence: Synthetic oligonucleotide
guuuggaggucagcuuggu

SEQ ID NO: 2585852 - RNA, 19 nt, Artificial Sequence
  Description of Artificial Sequence: Synthetic oligonucleotide
acccugcgggucaguuugg

SEQ ID NO: 2585853 - RNA, 19 nt, Artificial Sequence
  Description of Artificial Sequence: Synthetic oligonucleotide
ggcuugucgcagggcagcc

SEQ ID NO: 2585854 - RNA, 19 nt, Artificial Sequence
  Description of Artificial Sequence: Synthetic oligonucleotide
ggucagcuucacacuccag

SEQ ID NO: 2585855 - RNA, 19 nt, Artificial Sequence
  Description of Artificial Sequence: Synthetic oligonucleotide
gacaggggcucgggcccgc

SEQ ID NO: 2585856 - RNA, 19 nt, Artificial Sequence
  Description of Artificial Sequence: Synthetic oligonucleotide
guggggcgaggccgcccgg

SEQ ID NO: 2585857 - RNA, 19 nt, Artificial Sequence
  Description of Artificial Sequence: Synthetic oligonucleotide
gagccccgcgccaggcggc

SEQ ID NO: 2585858 - RNA, 19 nt, Artificial Sequence
  Description of Artificial Sequence: Synthetic oligonucleotide
gguuggugguggggcgagg

SEQ ID NO: 2585859 - RNA, 19 nt, Artificial Sequence
  Description of Artificial Sequence: Synthetic oligonucleotide
cggucucggaccuggcccc

SEQ ID NO: 2585860 - RNA, 19 nt, Artificial Sequence
  Description of Artificial Sequence: Synthetic oligonucleotide
ggacaggggcucgggcccg

SEQ ID NO: 2585861 - RNA, 19 nt, Artificial Sequence
  Description of Artificial Sequence: Synthetic oligonucleotide
ggggcgaggccgcccggag

SEQ ID NO: 2585862 - RNA, 19 nt, Artificial Sequence
  Description of Artificial Sequence: Synthetic oligonucleotide
gccccuggucgcucugugc

SEQ ID NO: 2585863 - RNA, 19 nt, Artificial Sequence
  Description of Artificial Sequence: Synthetic oligonucleotide
cgagggugcggaaggccag

SEQ ID NO: 2585864 - RNA, 19 nt, Artificial Sequence
  Description of Artificial Sequence: Synthetic oligonucleotide
ggcugcggcugacggcacc

SEQ ID NO: 2585865 - RNA, 19 nt, Artificial Sequence
  Description of Artificial Sequence: Synthetic oligonucleotide
ccguggaaggugcugcgga

SEQ ID NO: 2585866 - RNA, 19 nt, Artificial Sequence
  Description of Artificial Sequence: Synthetic oligonucleotide
ccccgugcaggcaggccag

SEQ ID NO: 2585867 - RNA, 19 nt, Artificial Sequence
  Description of Artificial Sequence: Synthetic oligonucleotide
gccucgggaggacgagagc

SEQ ID NO: 2585868 - RNA, 19 nt, Artificial Sequence
  Description of Artificial Sequence: Synthetic oligonucleotide
gccccugaggccgggccgg

SEQ ID NO: 2585869 - RNA, 19 nt, Artificial Sequence
  Description of Artificial Sequence: Synthetic oligonucleotide
cggcggaagaggacgcccc

SEQ ID NO: 2585870 - RNA, 19 nt, Artificial Sequence
  Description of Artificial Sequence: Synthetic oligonucleotide
gacgccccugaggccgggc

SEQ ID NO: 2585871 - RNA, 19 nt, Artificial Sequence
  Description of Artificial Sequence: Synthetic oligonucleotide
ccacucggcggaagaggac

SEQ ID NO: 2585872 - RNA, 19 nt, Artificial Sequence
  Description of Artificial Sequence: Synthetic oligonucleotide
ggcacccgugagguuccgg

SEQ ID NO: 2585873 - RNA, 19 nt, Artificial Sequence
  Description of Artificial Sequence: Synthetic oligonucleotide
gcgggugacgagggugcgg

SEQ ID NO: 2585874 - RNA, 19 nt, Artificial Sequence
  Description of Artificial Sequence: Synthetic oligonucleotide
gggcggugccugccacucg

SEQ ID NO: 2585875 - RNA, 19 nt, Artificial Sequence
  Description of Artificial Sequence: Synthetic oligonucleotide
cagcgugggugaggccggg

SEQ ID NO: 2585876 - RNA, 19 nt, Artificial Sequence
  Description of Artificial Sequence: Synthetic oligonucleotide
gggcgguuuccgcuuuauc

SEQ ID NO: 2585877 - RNA, 19 nt, Artificial Sequence
  Description of Artificial Sequence: Synthetic oligonucleotide
gcucgggcccgcccgcacc

SEQ ID NO: 2585878 - RNA, 19 nt, Artificial Sequence
  Description of Artificial Sequence: Synthetic oligonucleotide
ggccggggcagcuggcaca

SEQ ID NO: 2585879 - RNA, 19 nt, Artificial Sequence
  Description of Artificial Sequence: Synthetic oligonucleotide
gugaggccucgugggccag

SEQ ID NO: 2585880 - RNA, 19 nt, Artificial Sequence
  Description of Artificial Sequence: Synthetic oligonucleotide
gguuuccgcuuuaucccaa

SEQ ID NO: 2585881 - RNA, 19 nt, Artificial Sequence
  Description of Artificial Sequence: Synthetic oligonucleotide
aggccgcccggagggcagg

SEQ ID NO: 2585882 - RNA, 19 nt, Artificial Sequence
  Description of Artificial Sequence: Synthetic oligonucleotide
gugggccagcgugggugag

SEQ ID NO: 2585883 - RNA, 19 nt, Artificial Sequence
  Description of Artificial Sequence: Synthetic oligonucleotide
gcuucacacuccaggggaa

SEQ ID NO: 2585884 - RNA, 19 nt, Artificial Sequence
  Description of Artificial Sequence: Synthetic oligonucleotide
gcuuuaucccaagguagau

SEQ ID NO: 2585885 - RNA, 19 nt, Artificial Sequence
  Description of Artificial Sequence: Synthetic oligonucleotide
gggcagcuggcacaccucu

SEQ ID NO: 2585886 - RNA, 19 nt, Artificial Sequence
  Description of Artificial Sequence: Synthetic oligonucleotide
cccuggucgcucugugcac

SEQ ID NO: 2585887 - RNA, 19 nt, Artificial Sequence
  Description of Artificial Sequence: Synthetic oligonucleotide
ggcugacggcaccggcagc

SEQ ID NO: 2585888 - RNA, 19 nt, Artificial Sequence
  Description of Artificial Sequence: Synthetic oligonucleotide
aggccucgugggccagcgu

SEQ ID NO: 2585889 - RNA, 19 nt, Artificial Sequence
  Description of Artificial Sequence: Synthetic oligonucleotide
cggugccugccacucggcg

SEQ ID NO: 2585890 - RNA, 19 nt, Artificial Sequence
  Description of Artificial Sequence: Synthetic oligonucleotide
ccucgggaggacgagagcu

SEQ ID NO: 2585891 - RNA, 19 nt, Artificial Sequence
  Description of Artificial Sequence: Synthetic oligonucleotide
gcggcugacggcaccggca

SEQ ID NO: 2585892 - RNA, 19 nt, Artificial Sequence
  Description of Artificial Sequence: Synthetic oligonucleotide
ggacgagagcuggucagcu

SEQ ID NO: 2585893 - RNA, 19 nt, Artificial Sequence
  Description of Artificial Sequence: Synthetic oligonucleotide
cugcgacccugcgggucag

SEQ ID NO: 2585894 - RNA, 19 nt, Artificial Sequence
  Description of Artificial Sequence: Synthetic oligonucleotide
cgguuuccgcuuuauccca

SEQ ID NO: 2585895 - RNA, 19 nt, Artificial Sequence
  Description of Artificial Sequence: Synthetic oligonucleotide
gggccggggcagcuggcac

SEQ ID NO: 2585896 - RNA, 19 nt, Artificial Sequence
  Description of Artificial Sequence: Synthetic oligonucleotide
ugcgacccugcgggucagu

SEQ ID NO: 2585897 - RNA, 19 nt, Artificial Sequence
  Description of Artificial Sequence: Synthetic oligonucleotide
gcagcugcgguggcuuguc

SEQ ID NO: 2585898 - RNA, 19 nt, Artificial Sequence
  Description of Artificial Sequence: Synthetic oligonucleotide
cucagccccuggucgcucu

SEQ ID NO: 2585899 - RNA, 19 nt, Artificial Sequence
  Description of Artificial Sequence: Synthetic oligonucleotide
gugguggggcgaggccgcc

SEQ ID NO: 2585900 - RNA, 19 nt, Artificial Sequence
  Description of Artificial Sequence: Synthetic oligonucleotide
ucgggcccgcccgcacccc

SEQ ID NO: 2585901 - RNA, 19 nt, Artificial Sequence
  Description of Artificial Sequence: Synthetic oligonucleotide
gccggggcagcuggcacac

SEQ ID NO: 2585902 - RNA, 19 nt, Artificial Sequence
  Description of Artificial Sequence: Synthetic oligonucleotide
ccuggucgcucugugcaca

SEQ ID NO: 2585903 - RNA, 19 nt, Artificial Sequence
  Description of Artificial Sequence: Synthetic oligonucleotide
gccagggcggugccugcca

SEQ ID NO: 2585904 - RNA, 19 nt, Artificial Sequence
  Description of Artificial Sequence: Synthetic oligonucleotide
ggcggaagaggacgccccu

SEQ ID NO: 2585905 - RNA, 19 nt, Artificial Sequence
  Description of Artificial Sequence: Synthetic oligonucleotide
gggguccauucugcacacc

SEQ ID NO: 2585906 - RNA, 19 nt, Artificial Sequence
  Description of Artificial Sequence: Synthetic oligonucleotide
ggccagggcggugccugcc

SEQ ID NO: 2585907 - RNA, 19 nt, Artificial Sequence
  Description of Artificial Sequence: Synthetic oligonucleotide
cgccccugaggccgggccg

SEQ ID NO: 2585908 - RNA, 19 nt, Artificial Sequence
  Description of Artificial Sequence: Synthetic oligonucleotide
cccgugagguuccggagcu

SEQ ID NO: 2585909 - RNA, 19 nt, Artificial Sequence
  Description of Artificial Sequence: Synthetic oligonucleotide
ggcagcgggcagcugcggu

SEQ ID NO: 2585910 - RNA, 19 nt, Artificial Sequence
  Description of Artificial Sequence: Synthetic oligonucleotide
ugccugccacucggcggaa

SEQ ID NO: 2585911 - RNA, 19 nt, Artificial Sequence
  Description of Artificial Sequence: Synthetic oligonucleotide
ggcagccaucagggccucg

SEQ ID NO: 2585912 - RNA, 19 nt, Artificial Sequence
  Description of Artificial Sequence: Synthetic oligonucleotide
cgaggucguuggagaugcg

SEQ ID NO: 2585913 - RNA, 19 nt, Artificial Sequence
  Description of Artificial Sequence: Synthetic oligonucleotide
ggcucgggcccgcccgcac

SEQ ID NO: 2585914 - RNA, 19 nt, Artificial Sequence
  Description of Artificial Sequence: Synthetic oligonucleotide
cgggucaguuuggagguca

SEQ ID NO: 2585915 - RNA, 19 nt, Artificial Sequence
  Description of Artificial Sequence: Synthetic oligonucleotide
cgauucucucagguucguc

SEQ ID NO: 2585916 - RNA, 19 nt, Artificial Sequence
  Description of Artificial Sequence: Synthetic oligonucleotide
cgggugacgagggugcgga

SEQ ID NO: 2585917 - RNA, 19 nt, Artificial Sequence
  Description of Artificial Sequence: Synthetic oligonucleotide
gccugccacucggcggaag

SEQ ID NO: 2585918 - RNA, 19 nt, Artificial Sequence
  Description of Artificial Sequence: Synthetic oligonucleotide
ggccgcccggagggcaggg

SEQ ID NO: 2585919 - RNA, 19 nt, Artificial Sequence
  Description of Artificial Sequence: Synthetic oligonucleotide
gccgcccggagggcagggg

SEQ ID NO: 2585920 - RNA, 19 nt, Artificial Sequence
  Description of Artificial Sequence: Synthetic oligonucleotide
gggugacgagggugcggaa

SEQ ID NO: 2585921 - RNA, 19 nt, Artificial Sequence
  Description of Artificial Sequence: Synthetic oligonucleotide
gcggaaggccagggcggug

SEQ ID NO: 2585922 - RNA, 19 nt, Artificial Sequence
  Description of Artificial Sequence: Synthetic oligonucleotide
cucgugggccagcgugggu

SEQ ID NO: 2585923 - RNA, 19 nt, Artificial Sequence
  Description of Artificial Sequence: Synthetic oligonucleotide
cgugagguuccggagcugu

SEQ ID NO: 2585924 - RNA, 19 nt, Artificial Sequence
  Description of Artificial Sequence: Synthetic oligonucleotide
ccugcccuccggucucgga

SEQ ID NO: 2585925 - RNA, 19 nt, Artificial Sequence
  Description of Artificial Sequence: Synthetic oligonucleotide
gcucagccccuggucgcuc

SEQ ID NO: 2585926 - RNA, 19 nt, Artificial Sequence
  Description of Artificial Sequence: Synthetic oligonucleotide
gcgggucaguuuggagguc

SEQ ID NO: 2585927 - RNA, 19 nt, Artificial Sequence
  Description of Artificial Sequence: Synthetic oligonucleotide
ccgugagguuccggagcug

SEQ ID NO: 2585928 - RNA, 19 nt, Artificial Sequence
  Description of Artificial Sequence: Synthetic oligonucleotide
ggaugggcgcucagccccu

SEQ ID NO: 2585929 - RNA, 19 nt, Artificial Sequence
  Description of Artificial Sequence: Synthetic oligonucleotide
cccgugcaggcaggccagc

SEQ ID NO: 2585930 - RNA, 19 nt, Artificial Sequence
  Description of Artificial Sequence: Synthetic oligonucleotide
cccggagggcaggggugag

SEQ ID NO: 2585931 - RNA, 19 nt, Artificial Sequence
  Description of Artificial Sequence: Synthetic oligonucleotide
cccugcgggucaguuugga

SEQ ID NO: 2585932 - RNA, 19 nt, Artificial Sequence
  Description of Artificial Sequence: Synthetic oligonucleotide
gcccuccggucucggaccu

SEQ ID NO: 2585933 - RNA, 19 nt, Artificial Sequence
  Description of Artificial Sequence: Synthetic oligonucleotide
gcgaggccgcccggagggc

SEQ ID NO: 2585934 - RNA, 19 nt, Artificial Sequence
  Description of Artificial Sequence: Synthetic oligonucleotide
cgguggcuugucgcagggc

SEQ ID NO: 2585935 - RNA, 19 nt, Artificial Sequence
  Description of Artificial Sequence: Synthetic oligonucleotide
cccugcccuccggucucgg

SEQ ID NO: 2585936 - RNA, 19 nt, Artificial Sequence
  Description of Artificial Sequence: Synthetic oligonucleotide
ggccgggccggggcagcug

SEQ ID NO: 2585937 - RNA, 19 nt, Artificial Sequence
  Description of Artificial Sequence: Synthetic oligonucleotide
cccgcgccaggcggcuccg

SEQ ID NO: 2585938 - RNA, 19 nt, Artificial Sequence
  Description of Artificial Sequence: Synthetic oligonucleotide
ggggcgguuuccgcuuuau

SEQ ID NO: 2585939 - RNA, 19 nt, Artificial Sequence
  Description of Artificial Sequence: Synthetic oligonucleotide
cagguucgucugcgacccu

SEQ ID NO: 2585940 - RNA, 19 nt, Artificial Sequence
  Description of Artificial Sequence: Synthetic oligonucleotide
ccgcccggagggcaggggu

SEQ ID NO: 2585941 - RNA, 19 nt, Artificial Sequence
  Description of Artificial Sequence: Synthetic oligonucleotide
gcggcuccgcucucccgau

SEQ ID NO: 2585942 - RNA, 19 nt, Artificial Sequence
  Description of Artificial Sequence: Synthetic oligonucleotide
ccgauucucucagguucgu

SEQ ID NO: 2585943 - RNA, 19 nt, Artificial Sequence
  Description of Artificial Sequence: Synthetic oligonucleotide
gcgacccugcgggucaguu

SEQ ID NO: 2585944 - RNA, 19 nt, Artificial Sequence
  Description of Artificial Sequence: Synthetic oligonucleotide
cccuccggucucggaccug

SEQ ID NO: 2585945 - RNA, 19 nt, Artificial Sequence
  Description of Artificial Sequence: Synthetic oligonucleotide
gggcucgggcccgcccgca

SEQ ID NO: 2585946 - RNA, 19 nt, Artificial Sequence
  Description of Artificial Sequence: Synthetic oligonucleotide
cgaggccgcccggagggca

SEQ ID NO: 2585947 - RNA, 19 nt, Artificial Sequence
  Description of Artificial Sequence: Synthetic oligonucleotide
cggcuccgcucucccgaug

SEQ ID NO: 2585948 - RNA, 19 nt, Artificial Sequence
  Description of Artificial Sequence: Synthetic oligonucleotide
ggcaggggugaggccucgu

SEQ ID NO: 2585949 - RNA, 19 nt, Artificial Sequence
  Description of Artificial Sequence: Synthetic oligonucleotide
ccggggcagcuggcacacc

SEQ ID NO: 2585950 - RNA, 19 nt, Artificial Sequence
  Description of Artificial Sequence: Synthetic oligonucleotide
cgggaggacgagagcuggu

SEQ ID NO: 2585951 - RNA, 19 nt, Artificial Sequence
  Description of Artificial Sequence: Synthetic oligonucleotide
cggcaccggcagcgggcag

SEQ ID NO: 2585952 - RNA, 19 nt, Artificial Sequence
  Description of Artificial Sequence: Synthetic oligonucleotide
cgacccugcgggucaguuu

SEQ ID NO: 2585953 - RNA, 19 nt, Artificial Sequence
  Description of Artificial Sequence: Synthetic oligonucleotide
cgcgccaggcggcuccgcu

SEQ ID NO: 2585954 - RNA, 19 nt, Artificial Sequence
  Description of Artificial Sequence: Synthetic oligonucleotide
cgucugcgacccugcgggu

SEQ ID NO: 2585955 - RNA, 19 nt, Artificial Sequence
  Description of Artificial Sequence: Synthetic oligonucleotide
gccccgcgccaggcggcuc

SEQ ID NO: 2585956 - RNA, 19 nt, Artificial Sequence
  Description of Artificial Sequence: Synthetic oligonucleotide
aauggauugaauuaaaaug

SEQ ID NO: 2585957 - RNA, 19 nt, Artificial Sequence
  Description of Artificial Sequence: Synthetic oligonucleotide
aacaauugauuacaaagac

SEQ ID NO: 2585958 - RNA, 19 nt, Artificial Sequence
  Description of Artificial Sequence: Synthetic oligonucleotide
uuuucuuauguacaaaugc

SEQ ID NO: 2585959 - RNA, 19 nt, Artificial Sequence
  Description of Artificial Sequence: Synthetic oligonucleotide
aauguugauacccugucuc

SEQ ID NO: 2585960 - RNA, 19 nt, Artificial Sequence
  Description of Artificial Sequence: Synthetic oligonucleotide
auacauuuuaccuucagag

SEQ ID NO: 2585961 - RNA, 19 nt, Artificial Sequence
  Description of Artificial Sequence: Synthetic oligonucleotide
uguugaaacagucaguuug

SEQ ID NO: 2585962 - RNA, 19 nt, Artificial Sequence
  Description of Artificial Sequence: Synthetic oligonucleotide
aaguuuuagugguaggccc

SEQ ID NO: 2585963 - RNA, 19 nt, Artificial Sequence
  Description of Artificial Sequence: Synthetic oligonucleotide
aaaauaaauugucauguca

SEQ ID NO: 2585964 - RNA, 19 nt, Artificial Sequence
  Description of Artificial Sequence: Synthetic oligonucleotide
auugaauucauuucuauca

SEQ ID NO: 2585965 - RNA, 19 nt, Artificial Sequence
  Description of Artificial Sequence: Synthetic oligonucleotide
uuucuugacagguagacag

SEQ ID NO: 2585966 - RNA, 19 nt, Artificial Sequence
  Description of Artificial Sequence: Synthetic oligonucleotide
aagaaaacugauuauauuu

SEQ ID NO: 2585967 - RNA, 19 nt, Artificial Sequence
  Description of Artificial Sequence: Synthetic oligonucleotide
aaguauaaguuuuaguggu

SEQ ID NO: 2585968 - RNA, 19 nt, Artificial Sequence
  Description of Artificial Sequence: Synthetic oligonucleotide
auauacguuguacuaaugg

SEQ ID NO: 2585969 - RNA, 19 nt, Artificial Sequence
  Description of Artificial Sequence: Synthetic oligonucleotide
acaugcauuagugauagcc

SEQ ID NO: 2585970 - RNA, 19 nt, Artificial Sequence
  Description of Artificial Sequence: Synthetic oligonucleotide
gauugaauuaaaaugagca

SEQ ID NO: 2585971 - RNA, 19 nt, Artificial Sequence
  Description of Artificial Sequence: Synthetic oligonucleotide
auuucuaucaccaacacgu

SEQ ID NO: 2585972 - RNA, 19 nt, Artificial Sequence
  Description of Artificial Sequence: Synthetic oligonucleotide
ugugagaagaugauggcag

SEQ ID NO: 2585973 - RNA, 19 nt, Artificial Sequence
  Description of Artificial Sequence: Synthetic oligonucleotide
aaauaaagguguuuuaaaa

SEQ ID NO: 2585974 - RNA, 19 nt, Artificial Sequence
  Description of Artificial Sequence: Synthetic oligonucleotide
agugguaggcccuauacac

SEQ ID NO: 2585975 - RNA, 19 nt, Artificial Sequence
  Description of Artificial Sequence: Synthetic oligonucleotide
uugaauuaaaaugagcagc

SEQ ID NO: 2585976 - RNA, 19 nt, Artificial Sequence
  Description of Artificial Sequence: Synthetic oligonucleotide
ugaauuaaaaugagcagcu

SEQ ID NO: 2585977 - RNA, 19 nt, Artificial Sequence
  Description of Artificial Sequence: Synthetic oligonucleotide
aaauggauugaauuaaaau

SEQ ID NO: 2585978 - RNA, 19 nt, Artificial Sequence
  Description of Artificial Sequence: Synthetic oligonucleotide
aaacugauuauauuuuaca

SEQ ID NO: 2585979 - RNA, 19 nt, Artificial Sequence
  Description of Artificial Sequence: Synthetic oligonucleotide
uauaacaugcauuagugau

SEQ ID NO: 2585980 - RNA, 19 nt, Artificial Sequence
  Description of Artificial Sequence: Synthetic oligonucleotide
auaauggucacuuucacaa

SEQ ID NO: 2585981 - RNA, 19 nt, Artificial Sequence
  Description of Artificial Sequence: Synthetic oligonucleotide
auugaauuaaaaugagcag

SEQ ID NO: 2585982 - RNA, 19 nt, Artificial Sequence
  Description of Artificial Sequence: Synthetic oligonucleotide
ugacaaagaaaacugauua

SEQ ID NO: 2585983 - RNA, 19 nt, Artificial Sequence
  Description of Artificial Sequence: Synthetic oligonucleotide
ugucaugucaucaaccuga

SEQ ID NO: 2585984 - RNA, 19 nt, Artificial Sequence
  Description of Artificial Sequence: Synthetic oligonucleotide
cugugugagaagaugaugg

SEQ ID NO: 2585985 - RNA, 19 nt, Artificial Sequence
  Description of Artificial Sequence: Synthetic oligonucleotide
aauuaaaaugagcagcuua

SEQ ID NO: 2585986 - RNA, 19 nt, Artificial Sequence
  Description of Artificial Sequence: Synthetic oligonucleotide
ucuuauguacaaaugcuga

SEQ ID NO: 2585987 - RNA, 19 nt, Artificial Sequence
  Description of Artificial Sequence: Synthetic oligonucleotide
uucauuucuaucaccaaca

SEQ ID NO: 2585988 - RNA, 19 nt, Artificial Sequence
  Description of Artificial Sequence: Synthetic oligonucleotide
uacuaaugguguuuggugg

SEQ ID NO: 2585989 - RNA, 19 nt, Artificial Sequence
  Description of Artificial Sequence: Synthetic oligonucleotide
ucaguauuuguugaaacag

SEQ ID NO: 2585990 - RNA, 19 nt, Artificial Sequence
  Description of Artificial Sequence: Synthetic oligonucleotide
acacauacauuuuaccuuc

SEQ ID NO: 2585991 - RNA, 19 nt, Artificial Sequence
  Description of Artificial Sequence: Synthetic oligonucleotide
uccuuuaaauuaauaaaga

SEQ ID NO: 2585992 - RNA, 19 nt, Artificial Sequence
  Description of Artificial Sequence: Synthetic oligonucleotide
uguuauaauggucacuuuc

SEQ ID NO: 2585993 - RNA, 19 nt, Artificial Sequence
  Description of Artificial Sequence: Synthetic oligonucleotide
aacugauuauauuuuacau

SEQ ID NO: 2585994 - RNA, 19 nt, Artificial Sequence
  Description of Artificial Sequence: Synthetic oligonucleotide
ucuaucaccaacacgugac

SEQ ID NO: 2585995 - RNA, 19 nt, Artificial Sequence
  Description of Artificial Sequence: Synthetic oligonucleotide
uuaaacaaauuuuggacau

SEQ ID NO: 2585996 - RNA, 19 nt, Artificial Sequence
  Description of Artificial Sequence: Synthetic oligonucleotide
ugauaaauggauugaauua

SEQ ID NO: 2585997 - RNA, 19 nt, Artificial Sequence
  Description of Artificial Sequence: Synthetic oligonucleotide
auuaaaaugagcagcuuag

SEQ ID NO: 2585998 - RNA, 19 nt, Artificial Sequence
  Description of Artificial Sequence: Synthetic oligonucleotide
aacuaugaaguauaaguuu

SEQ ID NO: 2585999 - RNA, 19 nt, Artificial Sequence
  Description of Artificial Sequence: Synthetic oligonucleotide
uuagugauagccuuccaac

SEQ ID NO: 2586000 - RNA, 19 nt, Artificial Sequence
  Description of Artificial Sequence: Synthetic oligonucleotide
auuauaacaugcauuagug

SEQ ID NO: 2586001 - RNA, 19 nt, Artificial Sequence
  Description of Artificial Sequence: Synthetic oligonucleotide
uauacguuguacuaauggu

SEQ ID NO: 2586002 - RNA, 19 nt, Artificial Sequence
  Description of Artificial Sequence: Synthetic oligonucleotide
uacccugucucacagagug

SEQ ID NO: 2586003 - RNA, 19 nt, Artificial Sequence
  Description of Artificial Sequence: Synthetic oligonucleotide
uggauugaauuaaaaugag

SEQ ID NO: 2586004 - RNA, 19 nt, Artificial Sequence
  Description of Artificial Sequence: Synthetic oligonucleotide
cuuagagugcaguugacac

SEQ ID NO: 2586005 - RNA, 19 nt, Artificial Sequence
  Description of Artificial Sequence: Synthetic oligonucleotide
uauaaguuuuagugguagg

SEQ ID NO: 2586006 - RNA, 19 nt, Artificial Sequence
  Description of Artificial Sequence: Synthetic oligonucleotide
uaacaugcauuagugauag

SEQ ID NO: 2586007 - RNA, 19 nt, Artificial Sequence
  Description of Artificial Sequence: Synthetic oligonucleotide
uauguacaaaugcugacaa

SEQ ID NO: 2586008 - RNA, 19 nt, Artificial Sequence
  Description of Artificial Sequence: Synthetic oligonucleotide
ucuuaaccaaaacuuguga

SEQ ID NO: 2586009 - RNA, 19 nt, Artificial Sequence
  Description of Artificial Sequence: Synthetic oligonucleotide
cauugugauacucaaguug

SEQ ID NO: 2586010 - RNA, 19 nt, Artificial Sequence
  Description of Artificial Sequence: Synthetic oligonucleotide
uucuuaaccaaaacuugug

SEQ ID NO: 2586011 - RNA, 19 nt, Artificial Sequence
  Description of Artificial Sequence: Synthetic oligonucleotide
uuacaaagacauuucuuug

SEQ ID NO: 2586012 - RNA, 19 nt, Artificial Sequence
  Description of Artificial Sequence: Synthetic oligonucleotide
cuugucaauguugauaccc

SEQ ID NO: 2586013 - RNA, 19 nt, Artificial Sequence
  Description of Artificial Sequence: Synthetic oligonucleotide
uucaguauuuguugaaaca

SEQ ID NO: 2586014 - RNA, 19 nt, Artificial Sequence
  Description of Artificial Sequence: Synthetic oligonucleotide
auggauugaauuaaaauga

SEQ ID NO: 2586015 - RNA, 19 nt, Artificial Sequence
  Description of Artificial Sequence: Synthetic oligonucleotide
cugauuauauuuuacauua

SEQ ID NO: 2586016 - RNA, 19 nt, Artificial Sequence
  Description of Artificial Sequence: Synthetic oligonucleotide
auaucaaugagauuuucuu

SEQ ID NO: 2586017 - RNA, 19 nt, Artificial Sequence
  Description of Artificial Sequence: Synthetic oligonucleotide
uuaggcauuauaacaugca

SEQ ID NO: 2586018 - RNA, 19 nt, Artificial Sequence
  Description of Artificial Sequence: Synthetic oligonucleotide
uacguuguacuaauggugu

SEQ ID NO: 2586019 - RNA, 19 nt, Artificial Sequence
  Description of Artificial Sequence: Synthetic oligonucleotide
auugucaugucaucaaccu

SEQ ID NO: 2586020 - RNA, 19 nt, Artificial Sequence
  Description of Artificial Sequence: Synthetic oligonucleotide
aaagcaaacuaugaaguau

SEQ ID NO: 2586021 - RNA, 19 nt, Artificial Sequence
  Description of Artificial Sequence: Synthetic oligonucleotide
uuaaccaaaacuugugaua

SEQ ID NO: 2586022 - RNA, 19 nt, Artificial Sequence
  Description of Artificial Sequence: Synthetic oligonucleotide
uugaauucauuucuaucac

SEQ ID NO: 2586023 - RNA, 19 nt, Artificial Sequence
  Description of Artificial Sequence: Synthetic oligonucleotide
cuuaggcauuauaacaugc

SEQ ID NO: 2586024 - RNA, 19 nt, Artificial Sequence
  Description of Artificial Sequence: Synthetic oligonucleotide
acucuucuuaaccaaaacu

SEQ ID NO: 2586025 - RNA, 19 nt, Artificial Sequence
  Description of Artificial Sequence: Synthetic oligonucleotide
uugauuacaaagacauuuc

SEQ ID NO: 2586026 - RNA, 19 nt, Artificial Sequence
  Description of Artificial Sequence: Synthetic oligonucleotide
uuauaacaugcauuaguga

SEQ ID NO: 2586027 - RNA, 19 nt, Artificial Sequence
  Description of Artificial Sequence: Synthetic oligonucleotide
uuagugguaggcccuauac

SEQ ID NO: 2586028 - RNA, 19 nt, Artificial Sequence
  Description of Artificial Sequence: Synthetic oligonucleotide
uaaguuuuagugguaggcc

SEQ ID NO: 2586029 - RNA, 19 nt, Artificial Sequence
  Description of Artificial Sequence: Synthetic oligonucleotide
ugguaauggaagaagcaac

SEQ ID NO: 2586030 - RNA, 19 nt, Artificial Sequence
  Description of Artificial Sequence: Synthetic oligonucleotide
uaaauugucaugucaucaa

SEQ ID NO: 2586031 - RNA, 19 nt, Artificial Sequence
  Description of Artificial Sequence: Synthetic oligonucleotide
gauaaauggauugaauuaa

SEQ ID NO: 2586032 - RNA, 19 nt, Artificial Sequence
  Description of Artificial Sequence: Synthetic oligonucleotide
uacucaaguugauuuaaca

SEQ ID NO: 2586033 - RNA, 19 nt, Artificial Sequence
  Description of Artificial Sequence: Synthetic oligonucleotide
gacagguagacagagagca

SEQ ID NO: 2586034 - RNA, 19 nt, Artificial Sequence
  Description of Artificial Sequence: Synthetic oligonucleotide
uuauaauggucacuuucac

SEQ ID NO: 2586035 - RNA, 19 nt, Artificial Sequence
  Description of Artificial Sequence: Synthetic oligonucleotide
uaauggaagaagcaaccuc

SEQ ID NO: 2586036 - RNA, 19 nt, Artificial Sequence
  Description of Artificial Sequence: Synthetic oligonucleotide
caaguugauuuaacaaugc

SEQ ID NO: 2586037 - RNA, 19 nt, Artificial Sequence
  Description of Artificial Sequence: Synthetic oligonucleotide
aagacauuucuuuguuucu

SEQ ID NO: 2586038 - RNA, 19 nt, Artificial Sequence
  Description of Artificial Sequence: Synthetic oligonucleotide
uaaaauaaauugucauguc

SEQ ID NO: 2586039 - RNA, 19 nt, Artificial Sequence
  Description of Artificial Sequence: Synthetic oligonucleotide
ugugauaaauggauugaau

SEQ ID NO: 2586040 - RNA, 19 nt, Artificial Sequence
  Description of Artificial Sequence: Synthetic oligonucleotide
cuuauguacaaaugcugac

SEQ ID NO: 2586041 - RNA, 19 nt, Artificial Sequence
  Description of Artificial Sequence: Synthetic oligonucleotide
auugugauacucaaguuga

SEQ ID NO: 2586042 - RNA, 19 nt, Artificial Sequence
  Description of Artificial Sequence: Synthetic oligonucleotide
acucaaguugauuuaacaa

SEQ ID NO: 2586043 - RNA, 19 nt, Artificial Sequence
  Description of Artificial Sequence: Synthetic oligonucleotide
caauugauuacaaagacau

SEQ ID NO: 2586044 - RNA, 19 nt, Artificial Sequence
  Description of Artificial Sequence: Synthetic oligonucleotide
guuuggugguguuauaaug

SEQ ID NO: 2586045 - RNA, 19 nt, Artificial Sequence
  Description of Artificial Sequence: Synthetic oligonucleotide
ugugucuccuuuaaauuaa

SEQ ID NO: 2586046 - RNA, 19 nt, Artificial Sequence
  Description of Artificial Sequence: Synthetic oligonucleotide
ucaauguugauacccuguc

SEQ ID NO: 2586047 - RNA, 19 nt, Artificial Sequence
  Description of Artificial Sequence: Synthetic oligonucleotide
guugaaacagucaguuugg

SEQ ID NO: 2586048 - RNA, 19 nt, Artificial Sequence
  Description of Artificial Sequence: Synthetic oligonucleotide
ucaucaaccugaaaauaau

SEQ ID NO: 2586049 - RNA, 19 nt, Artificial Sequence
  Description of Artificial Sequence: Synthetic oligonucleotide
guauaaguuuuagugguag

SEQ ID NO: 2586050 - RNA, 19 nt, Artificial Sequence
  Description of Artificial Sequence: Synthetic oligonucleotide
uguacuaaugguguuuggu

SEQ ID NO: 2586051 - RNA, 19 nt, Artificial Sequence
  Description of Artificial Sequence: Synthetic oligonucleotide
cauuucuaucaccaacacg

SEQ ID NO: 2586052 - RNA, 19 nt, Artificial Sequence
  Description of Artificial Sequence: Synthetic oligonucleotide
auuagugauagccuuccaa

SEQ ID NO: 2586053 - RNA, 19 nt, Artificial Sequence
  Description of Artificial Sequence: Synthetic oligonucleotide
aaaugcugacaaagaaaac

SEQ ID NO: 2586054 - RNA, 19 nt, Artificial Sequence
  Description of Artificial Sequence: Synthetic oligonucleotide
aauucauuucuaucaccaa

SEQ ID NO: 2586055 - RNA, 19 nt, Artificial Sequence
  Description of Artificial Sequence: Synthetic oligonucleotide
agagauauacguuguacua

SEQ ID NO: 2586056 - RNA, 19 nt, Artificial Sequence
  Description of Artificial Sequence: Synthetic oligonucleotide
acuauuucugugugagaag

SEQ ID NO: 2586057 - RNA, 19 nt, Artificial Sequence
  Description of Artificial Sequence: Synthetic oligonucleotide
agauauacguuguacuaau

SEQ ID NO: 2586058 - RNA, 19 nt, Artificial Sequence
  Description of Artificial Sequence: Synthetic oligonucleotide
uugucaauguugauacccu

SEQ ID NO: 2586059 - RNA, 19 nt, Artificial Sequence
  Description of Artificial Sequence: Synthetic oligonucleotide
uuagagugcaguugacaca

SEQ ID NO: 2586060 - RNA, 19 nt, Artificial Sequence
  Description of Artificial Sequence: Synthetic oligonucleotide
cacagaguggcagugacag

SEQ ID NO: 2586061 - RNA, 19 nt, Artificial Sequence
  Description of Artificial Sequence: Synthetic oligonucleotide
guuauaauggucacuuuca

SEQ ID NO: 2586062 - RNA, 19 nt, Artificial Sequence
  Description of Artificial Sequence: Synthetic oligonucleotide
ugguaggcccuauacacug

SEQ ID NO: 2586063 - RNA, 19 nt, Artificial Sequence
  Description of Artificial Sequence: Synthetic oligonucleotide
aguugauuuaacaaugcaa

SEQ ID NO: 2586064 - RNA, 19 nt, Artificial Sequence
  Description of Artificial Sequence: Synthetic oligonucleotide
uaggcacugaccuucagua

SEQ ID NO: 2586065 - RNA, 19 nt, Artificial Sequence
  Description of Artificial Sequence: Synthetic oligonucleotide
auacguuguacuaauggug

SEQ ID NO: 2586066 - RNA, 19 nt, Artificial Sequence
  Description of Artificial Sequence: Synthetic oligonucleotide
aacacgugacucuucuuaa

SEQ ID NO: 2586067 - RNA, 19 nt, Artificial Sequence
  Description of Artificial Sequence: Synthetic oligonucleotide
acuaaugguguuugguggu

SEQ ID NO: 2586068 - RNA, 19 nt, Artificial Sequence
  Description of Artificial Sequence: Synthetic oligonucleotide
uuccaacuauuucugugug

SEQ ID NO: 2586069 - RNA, 19 nt, Artificial Sequence
  Description of Artificial Sequence: Synthetic oligonucleotide
cacgugacucuucuuaacc

SEQ ID NO: 2586070 - RNA, 19 nt, Artificial Sequence
  Description of Artificial Sequence: Synthetic oligonucleotide
auuucugugugagaagaug

SEQ ID NO: 2586071 - RNA, 19 nt, Artificial Sequence
  Description of Artificial Sequence: Synthetic oligonucleotide
acauacauuuuaccuucag

SEQ ID NO: 2586072 - RNA, 19 nt, Artificial Sequence
  Description of Artificial Sequence: Synthetic oligonucleotide
agauugaauucauuucuau

SEQ ID NO: 2586073 - RNA, 19 nt, Artificial Sequence
  Description of Artificial Sequence: Synthetic oligonucleotide
uuucuaucaccaacacgug

SEQ ID NO: 2586074 - RNA, 19 nt, Artificial Sequence
  Description of Artificial Sequence: Synthetic oligonucleotide
aggcccuauacacuguguc

SEQ ID NO: 2586075 - RNA, 19 nt, Artificial Sequence
  Description of Artificial Sequence: Synthetic oligonucleotide
uugucaugucaucaaccug

SEQ ID NO: 2586076 - RNA, 19 nt, Artificial Sequence
  Description of Artificial Sequence: Synthetic oligonucleotide
uagugauagccuuccaacu

SEQ ID NO: 2586077 - RNA, 19 nt, Artificial Sequence
  Description of Artificial Sequence: Synthetic oligonucleotide
gacacauugugauacucaa

SEQ ID NO: 2586078 - RNA, 19 nt, Artificial Sequence
  Description of Artificial Sequence: Synthetic oligonucleotide
ugucaauguugauacccug

SEQ ID NO: 2586079 - RNA, 19 nt, Artificial Sequence
  Description of Artificial Sequence: Synthetic oligonucleotide
ggcauuauaacaugcauua

SEQ ID NO: 2586080 - RNA, 19 nt, Artificial Sequence
  Description of Artificial Sequence: Synthetic oligonucleotide
uacacugugucuccuuuaa

SEQ ID NO: 2586081 - RNA, 19 nt, Artificial Sequence
  Description of Artificial Sequence: Synthetic oligonucleotide
cacugucugguauaggcac

SEQ ID NO: 2586082 - RNA, 19 nt, Artificial Sequence
  Description of Artificial Sequence: Synthetic oligonucleotide
acuaugaaguauaaguuuu

SEQ ID NO: 2586083 - RNA, 19 nt, Artificial Sequence
  Description of Artificial Sequence: Synthetic oligonucleotide
aacaugcauuagugauagc

SEQ ID NO: 2586084 - RNA, 19 nt, Artificial Sequence
  Description of Artificial Sequence: Synthetic oligonucleotide
aaagguguuuuaaaauaau

SEQ ID NO: 2586085 - RNA, 19 nt, Artificial Sequence
  Description of Artificial Sequence: Synthetic oligonucleotide
ucugugugagaagaugaug

SEQ ID NO: 2586086 - RNA, 19 nt, Artificial Sequence
  Description of Artificial Sequence: Synthetic oligonucleotide
ugacagguagacagagagc

SEQ ID NO: 2586087 - RNA, 19 nt, Artificial Sequence
  Description of Artificial Sequence: Synthetic oligonucleotide
acaauugauuacaaagaca

SEQ ID NO: 2586088 - RNA, 19 nt, Artificial Sequence
  Description of Artificial Sequence: Synthetic oligonucleotide
uggaagaagcaaccucuug

SEQ ID NO: 2586089 - RNA, 19 nt, Artificial Sequence
  Description of Artificial Sequence: Synthetic oligonucleotide
uuggugguguuauaauggu

SEQ ID NO: 2586090 - RNA, 19 nt, Artificial Sequence
  Description of Artificial Sequence: Synthetic oligonucleotide
acacgugacucuucuuaac

SEQ ID NO: 2586091 - RNA, 19 nt, Artificial Sequence
  Description of Artificial Sequence: Synthetic oligonucleotide
ucuccuuagagugcaguug

SEQ ID NO: 2586092 - RNA, 19 nt, Artificial Sequence
  Description of Artificial Sequence: Synthetic oligonucleotide
cauuauaacaugcauuagu

SEQ ID NO: 2586093 - RNA, 19 nt, Artificial Sequence
  Description of Artificial Sequence: Synthetic oligonucleotide
ugacucuucuuaaccaaaa

SEQ ID NO: 2586094 - RNA, 19 nt, Artificial Sequence
  Description of Artificial Sequence: Synthetic oligonucleotide
guuguacuaaugguguuug

SEQ ID NO: 2586095 - RNA, 19 nt, Artificial Sequence
  Description of Artificial Sequence: Synthetic oligonucleotide
uagugguaggcccuauaca

SEQ ID NO: 2586096 - RNA, 19 nt, Artificial Sequence
  Description of Artificial Sequence: Synthetic oligonucleotide
ugcauuagugauagccuuc

SEQ ID NO: 2586097 - RNA, 19 nt, Artificial Sequence
  Description of Artificial Sequence: Synthetic oligonucleotide
agugauagccuuccaacua

SEQ ID NO: 2586098 - RNA, 19 nt, Artificial Sequence
  Description of Artificial Sequence: Synthetic oligonucleotide
gacucuucuuaaccaaaac

SEQ ID NO: 2586099 - RNA, 19 nt, Artificial Sequence
  Description of Artificial Sequence: Synthetic oligonucleotide
aagcaaacuaugaaguaua

SEQ ID NO: 2586100 - RNA, 19 nt, Artificial Sequence
  Description of Artificial Sequence: Synthetic oligonucleotide
auaaagacacauugugaua

SEQ ID NO: 2586101 - RNA, 19 nt, Artificial Sequence
  Description of Artificial Sequence: Synthetic oligonucleotide
cagcuuaggcauuauaaca

SEQ ID NO: 2586102 - RNA, 19 nt, Artificial Sequence
  Description of Artificial Sequence: Synthetic oligonucleotide
aaccucuugucaauguuga

SEQ ID NO: 2586103 - RNA, 19 nt, Artificial Sequence
  Description of Artificial Sequence: Synthetic oligonucleotide
aguugacacauacauuuua

SEQ ID NO: 2586104 - RNA, 19 nt, Artificial Sequence
  Description of Artificial Sequence: Synthetic oligonucleotide
acugugucuccuuuaaauu

SEQ ID NO: 2586105 - RNA, 19 nt, Artificial Sequence
  Description of Artificial Sequence: Synthetic oligonucleotide
uguuuggugguguuauaau

SEQ ID NO: 2586106 - RNA, 19 nt, Artificial Sequence
  Description of Artificial Sequence: Synthetic oligonucleotide
uucuugacagguagacaga

SEQ ID NO: 2586107 - RNA, 19 nt, Artificial Sequence
  Description of Artificial Sequence: Synthetic oligonucleotide
uuuucuugacagguagaca

SEQ ID NO: 2586108 - RNA, 19 nt, Artificial Sequence
  Description of Artificial Sequence: Synthetic oligonucleotide
accaacacgugacucuucu

SEQ ID NO: 2586109 - RNA, 19 nt, Artificial Sequence
  Description of Artificial Sequence: Synthetic oligonucleotide
ggugguguuauaaugguca

SEQ ID NO: 2586110 - RNA, 19 nt, Artificial Sequence
  Description of Artificial Sequence: Synthetic oligonucleotide
auacucaaguugauuuaac

SEQ ID NO: 2586111 - RNA, 19 nt, Artificial Sequence
  Description of Artificial Sequence: Synthetic oligonucleotide
uucugugugagaagaugau

SEQ ID NO: 2586112 - RNA, 19 nt, Artificial Sequence
  Description of Artificial Sequence: Synthetic oligonucleotide
auguugauacccugucuca

SEQ ID NO: 2586113 - RNA, 19 nt, Artificial Sequence
  Description of Artificial Sequence: Synthetic oligonucleotide
uccaacuauuucuguguga

SEQ ID NO: 2586114 - RNA, 19 nt, Artificial Sequence
  Description of Artificial Sequence: Synthetic oligonucleotide
uauuucugugugagaagau

SEQ ID NO: 2586115 - RNA, 19 nt, Artificial Sequence
  Description of Artificial Sequence: Synthetic oligonucleotide
acgugacucuucuuaacca

SEQ ID NO: 2586116 - RNA, 19 nt, Artificial Sequence
  Description of Artificial Sequence: Synthetic oligonucleotide
agcagcuuaggcauuauaa

SEQ ID NO: 2586117 - RNA, 19 nt, Artificial Sequence
  Description of Artificial Sequence: Synthetic oligonucleotide
gauauacguuguacuaaug

SEQ ID NO: 2586118 - RNA, 19 nt, Artificial Sequence
  Description of Artificial Sequence: Synthetic oligonucleotide
agcuuaggcauuauaacau

SEQ ID NO: 2586119 - RNA, 19 nt, Artificial Sequence
  Description of Artificial Sequence: Synthetic oligonucleotide
agagagcagauugaauuca

SEQ ID NO: 2586120 - RNA, 19 nt, Artificial Sequence
  Description of Artificial Sequence: Synthetic oligonucleotide
agucaguuuggcauggacu

SEQ ID NO: 2586121 - RNA, 19 nt, Artificial Sequence
  Description of Artificial Sequence: Synthetic oligonucleotide
gagauauacguuguacuaa

SEQ ID NO: 2586122 - RNA, 19 nt, Artificial Sequence
  Description of Artificial Sequence: Synthetic oligonucleotide
auuuuaccuucagaggcug

SEQ ID NO: 2586123 - RNA, 19 nt, Artificial Sequence
  Description of Artificial Sequence: Synthetic oligonucleotide
ggauugaauuaaaaugagc

SEQ ID NO: 2586124 - RNA, 19 nt, Artificial Sequence
  Description of Artificial Sequence: Synthetic oligonucleotide
ucuugucaauguugauacc

SEQ ID NO: 2586125 - RNA, 19 nt, Artificial Sequence
  Description of Artificial Sequence: Synthetic oligonucleotide
gucaucaaccugaaaauaa

SEQ ID NO: 2586126 - RNA, 19 nt, Artificial Sequence
  Description of Artificial Sequence: Synthetic oligonucleotide
uuuaccuucagaggcugua

SEQ ID NO: 2586127 - RNA, 19 nt, Artificial Sequence
  Description of Artificial Sequence: Synthetic oligonucleotide
gacaaagaaaacugauuau

SEQ ID NO: 2586128 - RNA, 19 nt, Artificial Sequence
  Description of Artificial Sequence: Synthetic oligonucleotide
uauaggcacugaccuucag

SEQ ID NO: 2586129 - RNA, 19 nt, Artificial Sequence
  Description of Artificial Sequence: Synthetic oligonucleotide
uuuagugguaggcccuaua

SEQ ID NO: 2586130 - RNA, 19 nt, Artificial Sequence
  Description of Artificial Sequence: Synthetic oligonucleotide
guugauacccugucucaca

SEQ ID NO: 2586131 - RNA, 19 nt, Artificial Sequence
  Description of Artificial Sequence: Synthetic oligonucleotide
gcagcuuaggcauuauaac

SEQ ID NO: 2586132 - RNA, 19 nt, Artificial Sequence
  Description of Artificial Sequence: Synthetic oligonucleotide
gagcagauugaauucauuu

SEQ ID NO: 2586133 - RNA, 19 nt, Artificial Sequence
  Description of Artificial Sequence: Synthetic oligonucleotide
gguauaggcacugaccuuc

SEQ ID NO: 2586134 - RNA, 19 nt, Artificial Sequence
  Description of Artificial Sequence: Synthetic oligonucleotide
cuuaaccaaaacuugugau

SEQ ID NO: 2586135 - RNA, 19 nt, Artificial Sequence
  Description of Artificial Sequence: Synthetic oligonucleotide
uucuccuuagagugcaguu

SEQ ID NO: 2586136 - RNA, 19 nt, Artificial Sequence
  Description of Artificial Sequence: Synthetic oligonucleotide
uggugguguuauaaugguc

SEQ ID NO: 2586137 - RNA, 19 nt, Artificial Sequence
  Description of Artificial Sequence: Synthetic oligonucleotide
agcaaccucuugucaaugu

SEQ ID NO: 2586138 - RNA, 19 nt, Artificial Sequence
  Description of Artificial Sequence: Synthetic oligonucleotide
auaacaugcauuagugaua

SEQ ID NO: 2586139 - RNA, 19 nt, Artificial Sequence
  Description of Artificial Sequence: Synthetic oligonucleotide
uuuuaccuucagaggcugu

SEQ ID NO: 2586140 - RNA, 19 nt, Artificial Sequence
  Description of Artificial Sequence: Synthetic oligonucleotide
guaggcccuauacacugug

SEQ ID NO: 2586141 - RNA, 19 nt, Artificial Sequence
  Description of Artificial Sequence: Synthetic oligonucleotide
cugguauaggcacugaccu

SEQ ID NO: 2586142 - RNA, 19 nt, Artificial Sequence
  Description of Artificial Sequence: Synthetic oligonucleotide
aguuuuagugguaggcccu

SEQ ID NO: 2586143 - RNA, 19 nt, Artificial Sequence
  Description of Artificial Sequence: Synthetic oligonucleotide
gcaguugacacauacauuu

SEQ ID NO: 2586144 - RNA, 19 nt, Artificial Sequence
  Description of Artificial Sequence: Synthetic oligonucleotide
ugguguuuggugguguuau

SEQ ID NO: 2586145 - RNA, 19 nt, Artificial Sequence
  Description of Artificial Sequence: Synthetic oligonucleotide
aauugauuacaaagacauu

SEQ ID NO: 2586146 - RNA, 19 nt, Artificial Sequence
  Description of Artificial Sequence: Synthetic oligonucleotide
cugugucuccuuuaaauua

SEQ ID NO: 2586147 - RNA, 19 nt, Artificial Sequence
  Description of Artificial Sequence: Synthetic oligonucleotide
caugcauuagugauagccu

SEQ ID NO: 2586148 - RNA, 19 nt, Artificial Sequence
  Description of Artificial Sequence: Synthetic oligonucleotide
ggaagaagcaaccucuugu

SEQ ID NO: 2586149 - RNA, 19 nt, Artificial Sequence
  Description of Artificial Sequence: Synthetic oligonucleotide
aagcaaccucuugucaaug

SEQ ID NO: 2586150 - RNA, 19 nt, Artificial Sequence
  Description of Artificial Sequence: Synthetic oligonucleotide
uaauggucacuuucacaau

SEQ ID NO: 2586151 - RNA, 19 nt, Artificial Sequence
  Description of Artificial Sequence: Synthetic oligonucleotide
gcuuaggcauuauaacaug

SEQ ID NO: 2586152 - RNA, 19 nt, Artificial Sequence
  Description of Artificial Sequence: Synthetic oligonucleotide
uaucaccaacacgugacuc

SEQ ID NO: 2586153 - RNA, 19 nt, Artificial Sequence
  Description of Artificial Sequence: Synthetic oligonucleotide
guuuggcauggacuucucc

SEQ ID NO: 2586154 - RNA, 19 nt, Artificial Sequence
  Description of Artificial Sequence: Synthetic oligonucleotide
cagaggcuguaaacaauug

SEQ ID NO: 2586155 - RNA, 19 nt, Artificial Sequence
  Description of Artificial Sequence: Synthetic oligonucleotide
cagagauauacguuguacu

SEQ ID NO: 2586156 - RNA, 19 nt, Artificial Sequence
  Description of Artificial Sequence: Synthetic oligonucleotide
uugugauacucaaguugau

SEQ ID NO: 2586157 - RNA, 19 nt, Artificial Sequence
  Description of Artificial Sequence: Synthetic oligonucleotide
gucugguauaggcacugac

SEQ ID NO: 2586158 - RNA, 19 nt, Artificial Sequence
  Description of Artificial Sequence: Synthetic oligonucleotide
uaaugguguuugguggugu

SEQ ID NO: 2586159 - RNA, 19 nt, Artificial Sequence
  Description of Artificial Sequence: Synthetic oligonucleotide
caacacgugacucuucuua

SEQ ID NO: 2586160 - RNA, 19 nt, Artificial Sequence
  Description of Artificial Sequence: Synthetic oligonucleotide
cagucaguuuggcauggac

SEQ ID NO: 2586161 - RNA, 19 nt, Artificial Sequence
  Description of Artificial Sequence: Synthetic oligonucleotide
cugguaauggaagaagcaa

SEQ ID NO: 2586162 - RNA, 19 nt, Artificial Sequence
  Description of Artificial Sequence: Synthetic oligonucleotide
uaaacaaauuuuggacauu

SEQ ID NO: 2586163 - RNA, 19 nt, Artificial Sequence
  Description of Artificial Sequence: Synthetic oligonucleotide
ugguguuauaauggucacu

SEQ ID NO: 2586164 - RNA, 19 nt, Artificial Sequence
  Description of Artificial Sequence: Synthetic oligonucleotide
uccuuagagugcaguugac

SEQ ID NO: 2586165 - RNA, 19 nt, Artificial Sequence
  Description of Artificial Sequence: Synthetic oligonucleotide
acacauugugauacucaag

SEQ ID NO: 2586166 - RNA, 19 nt, Artificial Sequence
  Description of Artificial Sequence: Synthetic oligonucleotide
ugauagccuuccaacuauu

SEQ ID NO: 2586167 - RNA, 19 nt, Artificial Sequence
  Description of Artificial Sequence: Synthetic oligonucleotide
gcaaacuaugaaguauaag

SEQ ID NO: 2586168 - RNA, 19 nt, Artificial Sequence
  Description of Artificial Sequence: Synthetic oligonucleotide
ugauacccugucucacaga

SEQ ID NO: 2586169 - RNA, 19 nt, Artificial Sequence
  Description of Artificial Sequence: Synthetic oligonucleotide
aggcauuauaacaugcauu

SEQ ID NO: 2586170 - RNA, 19 nt, Artificial Sequence
  Description of Artificial Sequence: Synthetic oligonucleotide
agacagagagcagauugaa

SEQ ID NO: 2586171 - RNA, 19 nt, Artificial Sequence
  Description of Artificial Sequence: Synthetic oligonucleotide
agaggccacugucugguau

SEQ ID NO: 2586172 - RNA, 19 nt, Artificial Sequence
  Description of Artificial Sequence: Synthetic oligonucleotide
uaggcccuauacacugugu

SEQ ID NO: 2586173 - RNA, 19 nt, Artificial Sequence
  Description of Artificial Sequence: Synthetic oligonucleotide
gcauuagugauagccuucc

SEQ ID NO: 2586174 - RNA, 19 nt, Artificial Sequence
  Description of Artificial Sequence: Synthetic oligonucleotide
cagguagacagagagcaga

SEQ ID NO: 2586175 - RNA, 19 nt, Artificial Sequence
  Description of Artificial Sequence: Synthetic oligonucleotide
cauuuuaccuucagaggcu

SEQ ID NO: 2586176 - RNA, 19 nt, Artificial Sequence
  Description of Artificial Sequence: Synthetic oligonucleotide
gaagcaaccucuugucaau

SEQ ID NO: 2586177 - RNA, 19 nt, Artificial Sequence
  Description of Artificial Sequence: Synthetic oligonucleotide
cacugugucuccuuuaaau

SEQ ID NO: 2586178 - RNA, 19 nt, Artificial Sequence
  Description of Artificial Sequence: Synthetic oligonucleotide
aguauaaguuuuaguggua

SEQ ID NO: 2586179 - RNA, 19 nt, Artificial Sequence
  Description of Artificial Sequence: Synthetic oligonucleotide
caguauuuguugaaacagu

SEQ ID NO: 2586180 - RNA, 19 nt, Artificial Sequence
  Description of Artificial Sequence: Synthetic oligonucleotide
ucaccaacacgugacucuu

SEQ ID NO: 2586181 - RNA, 19 nt, Artificial Sequence
  Description of Artificial Sequence: Synthetic oligonucleotide
cugacaaagaaaacugauu

SEQ ID NO: 2586182 - RNA, 19 nt, Artificial Sequence
  Description of Artificial Sequence: Synthetic oligonucleotide
auacacugugucuccuuua

SEQ ID NO: 2586183 - RNA, 19 nt, Artificial Sequence
  Description of Artificial Sequence: Synthetic oligonucleotide
ggcauggacuucuccuuag

SEQ ID NO: 2586184 - RNA, 19 nt, Artificial Sequence
  Description of Artificial Sequence: Synthetic oligonucleotide
gguguuauaauggucacuu

SEQ ID NO: 2586185 - RNA, 19 nt, Artificial Sequence
  Description of Artificial Sequence: Synthetic oligonucleotide
ugguauaggcacugaccuu

SEQ ID NO: 2586186 - RNA, 19 nt, Artificial Sequence
  Description of Artificial Sequence: Synthetic oligonucleotide
agcaaacuaugaaguauaa

SEQ ID NO: 2586187 - RNA, 19 nt, Artificial Sequence
  Description of Artificial Sequence: Synthetic oligonucleotide
gucucacagaguggcagug

SEQ ID NO: 2586188 - RNA, 19 nt, Artificial Sequence
  Description of Artificial Sequence: Synthetic oligonucleotide
gaagaugauggcagagaua

SEQ ID NO: 2586189 - RNA, 19 nt, Artificial Sequence
  Description of Artificial Sequence: Synthetic oligonucleotide
guaauggaagaagcaaccu

SEQ ID NO: 2586190 - RNA, 19 nt, Artificial Sequence
  Description of Artificial Sequence: Synthetic oligonucleotide
cacuuucacaauggaguuc

SEQ ID NO: 2586191 - RNA, 19 nt, Artificial Sequence
  Description of Artificial Sequence: Synthetic oligonucleotide
gugauagccuuccaacuau

SEQ ID NO: 2586192 - RNA, 19 nt, Artificial Sequence
  Description of Artificial Sequence: Synthetic oligonucleotide
aggcuguaaacaauugauu

SEQ ID NO: 2586193 - RNA, 19 nt, Artificial Sequence
  Description of Artificial Sequence: Synthetic oligonucleotide
acguuguacuaaugguguu

SEQ ID NO: 2586194 - RNA, 19 nt, Artificial Sequence
  Description of Artificial Sequence: Synthetic oligonucleotide
gcugguaauggaagaagca

SEQ ID NO: 2586195 - RNA, 19 nt, Artificial Sequence
  Description of Artificial Sequence: Synthetic oligonucleotide
gauggcagagauauacguu

SEQ ID NO: 2586196 - RNA, 19 nt, Artificial Sequence
  Description of Artificial Sequence: Synthetic oligonucleotide
ugucugguauaggcacuga

SEQ ID NO: 2586197 - RNA, 19 nt, Artificial Sequence
  Description of Artificial Sequence: Synthetic oligonucleotide
cccuauacacugugucucc

SEQ ID NO: 2586198 - RNA, 19 nt, Artificial Sequence
  Description of Artificial Sequence: Synthetic oligonucleotide
uuuuagugguaggcccuau

SEQ ID NO: 2586199 - RNA, 19 nt, Artificial Sequence
  Description of Artificial Sequence: Synthetic oligonucleotide
aaugagcagcuuaggcauu

SEQ ID NO: 2586200 - RNA, 19 nt, Artificial Sequence
  Description of Artificial Sequence: Synthetic oligonucleotide
agguagacagagagcagau

SEQ ID NO: 2586201 - RNA, 19 nt, Artificial Sequence
  Description of Artificial Sequence: Synthetic oligonucleotide
gugacucuucuuaaccaaa

SEQ ID NO: 2586202 - RNA, 19 nt, Artificial Sequence
  Description of Artificial Sequence: Synthetic oligonucleotide
caauguugauacccugucu

SEQ ID NO: 2586203 - RNA, 19 nt, Artificial Sequence
  Description of Artificial Sequence: Synthetic oligonucleotide
cauuagugauagccuucca

SEQ ID NO: 2586204 - RNA, 19 nt, Artificial Sequence
  Description of Artificial Sequence: Synthetic oligonucleotide
gcccuauacacugugucuc

SEQ ID NO: 2586205 - RNA, 19 nt, Artificial Sequence
  Description of Artificial Sequence: Synthetic oligonucleotide
agagcagauugaauucauu

SEQ ID NO: 2586206 - RNA, 19 nt, Artificial Sequence
  Description of Artificial Sequence: Synthetic oligonucleotide
gaauuaaaaugagcagcuu

SEQ ID NO: 2586207 - RNA, 19 nt, Artificial Sequence
  Description of Artificial Sequence: Synthetic oligonucleotide
cuaucaccaacacgugacu

SEQ ID NO: 2586208 - RNA, 19 nt, Artificial Sequence
  Description of Artificial Sequence: Synthetic oligonucleotide
acccugucucacagagugg

SEQ ID NO: 2586209 - RNA, 19 nt, Artificial Sequence
  Description of Artificial Sequence: Synthetic oligonucleotide
guuuuagugguaggcccua

SEQ ID NO: 2586210 - RNA, 19 nt, Artificial Sequence
  Description of Artificial Sequence: Synthetic oligonucleotide
caccaacacgugacucuuc

SEQ ID NO: 2586211 - RNA, 19 nt, Artificial Sequence
  Description of Artificial Sequence: Synthetic oligonucleotide
augguguuuggugguguua

SEQ ID NO: 2586212 - RNA, 19 nt, Artificial Sequence
  Description of Artificial Sequence: Synthetic oligonucleotide
ggcacugaccuucaguauu

SEQ ID NO: 2586213 - RNA, 19 nt, Artificial Sequence
  Description of Artificial Sequence: Synthetic oligonucleotide
auacccugucucacagagu

SEQ ID NO: 2586214 - RNA, 19 nt, Artificial Sequence
  Description of Artificial Sequence: Synthetic oligonucleotide
ggcccuauacacugugucu

SEQ ID NO: 2586215 - RNA, 19 nt, Artificial Sequence
  Description of Artificial Sequence: Synthetic oligonucleotide
gaguucuccucagcagugu

SEQ ID NO: 2586216 - RNA, 19 nt, Artificial Sequence
  Description of Artificial Sequence: Synthetic oligonucleotide
cuauacacugugucuccuu

SEQ ID NO: 2586217 - RNA, 19 nt, Artificial Sequence
  Description of Artificial Sequence: Synthetic oligonucleotide
ggcagagauauacguugua

SEQ ID NO: 2586218 - RNA, 19 nt, Artificial Sequence
  Description of Artificial Sequence: Synthetic oligonucleotide
cagcagugucagcugguaa

SEQ ID NO: 2586219 - RNA, 19 nt, Artificial Sequence
  Description of Artificial Sequence: Synthetic oligonucleotide
cgugacucuucuuaaccaa

SEQ ID NO: 2586220 - RNA, 19 nt, Artificial Sequence
  Description of Artificial Sequence: Synthetic oligonucleotide
caguugacacauacauuuu

SEQ ID NO: 2586221 - RNA, 19 nt, Artificial Sequence
  Description of Artificial Sequence: Synthetic oligonucleotide
gcaaccucuugucaauguu

SEQ ID NO: 2586222 - RNA, 19 nt, Artificial Sequence
  Description of Artificial Sequence: Synthetic oligonucleotide
gugucuccuuuaaauuaau

SEQ ID NO: 2586223 - RNA, 19 nt, Artificial Sequence
  Description of Artificial Sequence: Synthetic oligonucleotide
ccugucucacagaguggca

SEQ ID NO: 2586224 - RNA, 19 nt, Artificial Sequence
  Description of Artificial Sequence: Synthetic oligonucleotide
gccuuccaacuauuucugu

SEQ ID NO: 2586225 - RNA, 19 nt, Artificial Sequence
  Description of Artificial Sequence: Synthetic oligonucleotide
gguaggcccuauacacugu

SEQ ID NO: 2586226 - RNA, 19 nt, Artificial Sequence
  Description of Artificial Sequence: Synthetic oligonucleotide
ccuauacacugugucuccu

SEQ ID NO: 2586227 - RNA, 19 nt, Artificial Sequence
  Description of Artificial Sequence: Synthetic oligonucleotide
cguuguacuaaugguguuu

SEQ ID NO: 2586228 - RNA, 19 nt, Artificial Sequence
  Description of Artificial Sequence: Synthetic oligonucleotide
ccaacacgugacucuucuu

SEQ ID NO: 2586229 - RNA, 19 nt, Artificial Sequence
  Description of Artificial Sequence: Synthetic oligonucleotide
aaggauaugaaccaucuuc

SEQ ID NO: 2586230 - RNA, 19 nt, Artificial Sequence
  Description of Artificial Sequence: Synthetic oligonucleotide
aucuuuaucauucacuggc

SEQ ID NO: 2586231 - RNA, 19 nt, Artificial Sequence
  Description of Artificial Sequence: Synthetic oligonucleotide
uguucuguuguccugaucg

SEQ ID NO: 2586232 - RNA, 19 nt, Artificial Sequence
  Description of Artificial Sequence: Synthetic oligonucleotide
aaguauuaaaccuaggcca

SEQ ID NO: 2586233 - RNA, 19 nt, Artificial Sequence
  Description of Artificial Sequence: Synthetic oligonucleotide
uuaaguauuaaaccuaggc

SEQ ID NO: 2586234 - RNA, 19 nt, Artificial Sequence
  Description of Artificial Sequence: Synthetic oligonucleotide
uuagguuagacacacaccc

SEQ ID NO: 2586235 - RNA, 19 nt, Artificial Sequence
  Description of Artificial Sequence: Synthetic oligonucleotide
ugcuuuguagaacagaagg

SEQ ID NO: 2586236 - RNA, 19 nt, Artificial Sequence
  Description of Artificial Sequence: Synthetic oligonucleotide
agaccauuagguuagacac

SEQ ID NO: 2586237 - RNA, 19 nt, Artificial Sequence
  Description of Artificial Sequence: Synthetic oligonucleotide
uuuugaagcugcauaaugg

SEQ ID NO: 2586238 - RNA, 19 nt, Artificial Sequence
  Description of Artificial Sequence: Synthetic oligonucleotide
uaaguauuaaaccuaggcc

SEQ ID NO: 2586239 - RNA, 19 nt, Artificial Sequence
  Description of Artificial Sequence: Synthetic oligonucleotide
aguucuaucggccaaaaug

SEQ ID NO: 2586240 - RNA, 19 nt, Artificial Sequence
  Description of Artificial Sequence: Synthetic oligonucleotide
auaugaaccaucuucaagu

SEQ ID NO: 2586241 - RNA, 19 nt, Artificial Sequence
  Description of Artificial Sequence: Synthetic oligonucleotide
agaacagaaggauaugaac

SEQ ID NO: 2586242 - RNA, 19 nt, Artificial Sequence
  Description of Artificial Sequence: Synthetic oligonucleotide
ugaaccaucuucaaguuac

SEQ ID NO: 2586243 - RNA, 19 nt, Artificial Sequence
  Description of Artificial Sequence: Synthetic oligonucleotide
uucucuuaaguauuaaacc

SEQ ID NO: 2586244 - RNA, 19 nt, Artificial Sequence
  Description of Artificial Sequence: Synthetic oligonucleotide
ucuuaaguauuaaaccuag

SEQ ID NO: 2586245 - RNA, 19 nt, Artificial Sequence
  Description of Artificial Sequence: Synthetic oligonucleotide
ugugcagccauuuugguug

SEQ ID NO: 2586246 - RNA, 19 nt, Artificial Sequence
  Description of Artificial Sequence: Synthetic oligonucleotide
ucucuuaaguauuaaaccu

SEQ ID NO: 2586247 - RNA, 19 nt, Artificial Sequence
  Description of Artificial Sequence: Synthetic oligonucleotide
aauucaacuauuucuguau

SEQ ID NO: 2586248 - RNA, 19 nt, Artificial Sequence
  Description of Artificial Sequence: Synthetic oligonucleotide
ugcuguagccucauaaugg

SEQ ID NO: 2586249 - RNA, 19 nt, Artificial Sequence
  Description of Artificial Sequence: Synthetic oligonucleotide
uuaacuuucuacaauucuc

SEQ ID NO: 2586250 - RNA, 19 nt, Artificial Sequence
  Description of Artificial Sequence: Synthetic oligonucleotide
auucucuuaaguauuaaac

SEQ ID NO: 2586251 - RNA, 19 nt, Artificial Sequence
  Description of Artificial Sequence: Synthetic oligonucleotide
aacagaaggauaugaacca

SEQ ID NO: 2586252 - RNA, 19 nt, Artificial Sequence
  Description of Artificial Sequence: Synthetic oligonucleotide
uuuuacaaucucaucccgg

SEQ ID NO: 2586253 - RNA, 19 nt, Artificial Sequence
  Description of Artificial Sequence: Synthetic oligonucleotide
ucuuuauucucaauguaga

SEQ ID NO: 2586254 - RNA, 19 nt, Artificial Sequence
  Description of Artificial Sequence: Synthetic oligonucleotide
gaacagaaggauaugaacc

SEQ ID NO: 2586255 - RNA, 19 nt, Artificial Sequence
  Description of Artificial Sequence: Synthetic oligonucleotide
aagaauucaacuauuucug

SEQ ID NO: 2586256 - RNA, 19 nt, Artificial Sequence
  Description of Artificial Sequence: Synthetic oligonucleotide
aacuauuucuguaugacca

SEQ ID NO: 2586257 - RNA, 19 nt, Artificial Sequence
  Description of Artificial Sequence: Synthetic oligonucleotide
uuuacaaucucaucccggc

SEQ ID NO: 2586258 - RNA, 19 nt, Artificial Sequence
  Description of Artificial Sequence: Synthetic oligonucleotide
gauaugaaccaucuucaag

SEQ ID NO: 2586259 - RNA, 19 nt, Artificial Sequence
  Description of Artificial Sequence: Synthetic oligonucleotide
caauguagauacuugcucc

SEQ ID NO: 2586260 - RNA, 19 nt, Artificial Sequence
  Description of Artificial Sequence: Synthetic oligonucleotide
uucaaguuacccuuggcug

SEQ ID NO: 2586261 - RNA, 19 nt, Artificial Sequence
  Description of Artificial Sequence: Synthetic oligonucleotide
uucuguaugaccagcugag

SEQ ID NO: 2586262 - RNA, 19 nt, Artificial Sequence
  Description of Artificial Sequence: Synthetic oligonucleotide
uaacuuucuacaauucucu

SEQ ID NO: 2586263 - RNA, 19 nt, Artificial Sequence
  Description of Artificial Sequence: Synthetic oligonucleotide
aguagccagaguucuaucg

SEQ ID NO: 2586264 - RNA, 19 nt, Artificial Sequence
  Description of Artificial Sequence: Synthetic oligonucleotide
aaguguagaggaguguuac

SEQ ID NO: 2586265 - RNA, 19 nt, Artificial Sequence
  Description of Artificial Sequence: Synthetic oligonucleotide
ucucaauguagauacuugc

SEQ ID NO: 2586266 - RNA, 19 nt, Artificial Sequence
  Description of Artificial Sequence: Synthetic oligonucleotide
aggaguguuacccucagug

SEQ ID NO: 2586267 - RNA, 19 nt, Artificial Sequence
  Description of Artificial Sequence: Synthetic oligonucleotide
gauacuugcuccuuggguc

SEQ ID NO: 2586268 - RNA, 19 nt, Artificial Sequence
  Description of Artificial Sequence: Synthetic oligonucleotide
aauucucuuaaguauuaaa

SEQ ID NO: 2586269 - RNA, 19 nt, Artificial Sequence
  Description of Artificial Sequence: Synthetic oligonucleotide
ucaccaguaacuuugcuuc

SEQ ID NO: 2586270 - RNA, 19 nt, Artificial Sequence
  Description of Artificial Sequence: Synthetic oligonucleotide
ugaaauucaaggcccgccc

SEQ ID NO: 2586271 - RNA, 19 nt, Artificial Sequence
  Description of Artificial Sequence: Synthetic oligonucleotide
aaugcuguucuguuguccu

SEQ ID NO: 2586272 - RNA, 19 nt, Artificial Sequence
  Description of Artificial Sequence: Synthetic oligonucleotide
uuguagaacagaaggauau

SEQ ID NO: 2586273 - RNA, 19 nt, Artificial Sequence
  Description of Artificial Sequence: Synthetic oligonucleotide
ucaauguagauacuugcuc

SEQ ID NO: 2586274 - RNA, 19 nt, Artificial Sequence
  Description of Artificial Sequence: Synthetic oligonucleotide
ucucagugaaauucaaggc

SEQ ID NO: 2586275 - RNA, 19 nt, Artificial Sequence
  Description of Artificial Sequence: Synthetic oligonucleotide
ucuaguaacaugacagcaa

SEQ ID NO: 2586276 - RNA, 19 nt, Artificial Sequence
  Description of Artificial Sequence: Synthetic oligonucleotide
uuuguggaugcuuuguaga

SEQ ID NO: 2586277 - RNA, 19 nt, Artificial Sequence
  Description of Artificial Sequence: Synthetic oligonucleotide
uugcagaccauuagguuag

SEQ ID NO: 2586278 - RNA, 19 nt, Artificial Sequence
  Description of Artificial Sequence: Synthetic oligonucleotide
uacaaucucaucccggcca

SEQ ID NO: 2586279 - RNA, 19 nt, Artificial Sequence
  Description of Artificial Sequence: Synthetic oligonucleotide
guucuaucggccaaaaugc

SEQ ID NO: 2586280 - RNA, 19 nt, Artificial Sequence
  Description of Artificial Sequence: Synthetic oligonucleotide
auaugaagaggagaccagc

SEQ ID NO: 2586281 - RNA, 19 nt, Artificial Sequence
  Description of Artificial Sequence: Synthetic oligonucleotide
ucaaguuacccuuggcugc

SEQ ID NO: 2586282 - RNA, 19 nt, Artificial Sequence
  Description of Artificial Sequence: Synthetic oligonucleotide
ugcaaugcuguucuguugu

SEQ ID NO: 2586283 - RNA, 19 nt, Artificial Sequence
  Description of Artificial Sequence: Synthetic oligonucleotide
gugucuuggauguuugugg

SEQ ID NO: 2586284 - RNA, 19 nt, Artificial Sequence
  Description of Artificial Sequence: Synthetic oligonucleotide
ccuucuaguaacaugacag

SEQ ID NO: 2586285 - RNA, 19 nt, Artificial Sequence
  Description of Artificial Sequence: Synthetic oligonucleotide
accauuagguuagacacac

SEQ ID NO: 2586286 - RNA, 19 nt, Artificial Sequence
  Description of Artificial Sequence: Synthetic oligonucleotide
uuuaucauucacuggcacu

SEQ ID NO: 2586287 - RNA, 19 nt, Artificial Sequence
  Description of Artificial Sequence: Synthetic oligonucleotide
acaggcuaaguguagagga

SEQ ID NO: 2586288 - RNA, 19 nt, Artificial Sequence
  Description of Artificial Sequence: Synthetic oligonucleotide
uccugaucgguucuaguag

SEQ ID NO: 2586289 - RNA, 19 nt, Artificial Sequence
  Description of Artificial Sequence: Synthetic oligonucleotide
aaugguccuucgcaucugg

SEQ ID NO: 2586290 - RNA, 19 nt, Artificial Sequence
  Description of Artificial Sequence: Synthetic oligonucleotide
auuagguuagacacacacc

SEQ ID NO: 2586291 - RNA, 19 nt, Artificial Sequence
  Description of Artificial Sequence: Synthetic oligonucleotide
uaaaccuaggccaccuuug

SEQ ID NO: 2586292 - RNA, 19 nt, Artificial Sequence
  Description of Artificial Sequence: Synthetic oligonucleotide
uguagauacuugcuccuug

SEQ ID NO: 2586293 - RNA, 19 nt, Artificial Sequence
  Description of Artificial Sequence: Synthetic oligonucleotide
aaccaucuucaaguuaccc

SEQ ID NO: 2586294 - RNA, 19 nt, Artificial Sequence
  Description of Artificial Sequence: Synthetic oligonucleotide
guagauacuugcuccuugg

SEQ ID NO: 2586295 - RNA, 19 nt, Artificial Sequence
  Description of Artificial Sequence: Synthetic oligonucleotide
uuaucauucacuggcacuc

SEQ ID NO: 2586296 - RNA, 19 nt, Artificial Sequence
  Description of Artificial Sequence: Synthetic oligonucleotide
uauuucuguaugaccagcu

SEQ ID NO: 2586297 - RNA, 19 nt, Artificial Sequence
  Description of Artificial Sequence: Synthetic oligonucleotide
uugcuguagccucauaaug

SEQ ID NO: 2586298 - RNA, 19 nt, Artificial Sequence
  Description of Artificial Sequence: Synthetic oligonucleotide
aguguagaggaguguuacc

SEQ ID NO: 2586299 - RNA, 19 nt, Artificial Sequence
  Description of Artificial Sequence: Synthetic oligonucleotide
gaucgguucuaguagccag

SEQ ID NO: 2586300 - RNA, 19 nt, Artificial Sequence
  Description of Artificial Sequence: Synthetic oligonucleotide
guagccagaguucuaucgg

SEQ ID NO: 2586301 - RNA, 19 nt, Artificial Sequence
  Description of Artificial Sequence: Synthetic oligonucleotide
cuucuaguaacaugacagc

SEQ ID NO: 2586302 - RNA, 19 nt, Artificial Sequence
  Description of Artificial Sequence: Synthetic oligonucleotide
cuuucuacaauucucuuaa

SEQ ID NO: 2586303 - RNA, 19 nt, Artificial Sequence
  Description of Artificial Sequence: Synthetic oligonucleotide
cuuaaguauuaaaccuagg

SEQ ID NO: 2586304 - RNA, 19 nt, Artificial Sequence
  Description of Artificial Sequence: Synthetic oligonucleotide
uucaacuauuucuguauga

SEQ ID NO: 2586305 - RNA, 19 nt, Artificial Sequence
  Description of Artificial Sequence: Synthetic oligonucleotide
ucuuuaucauucacuggca

SEQ ID NO: 2586306 - RNA, 19 nt, Artificial Sequence
  Description of Artificial Sequence: Synthetic oligonucleotide
ucuuggauguuuguggaug

SEQ ID NO: 2586307 - RNA, 19 nt, Artificial Sequence
  Description of Artificial Sequence: Synthetic oligonucleotide
acuauuucuguaugaccag

SEQ ID NO: 2586308 - RNA, 19 nt, Artificial Sequence
  Description of Artificial Sequence: Synthetic oligonucleotide
auuucgcagucccaggauc

SEQ ID NO: 2586309 - RNA, 19 nt, Artificial Sequence
  Description of Artificial Sequence: Synthetic oligonucleotide
guuuguggaugcuuuguag

SEQ ID NO: 2586310 - RNA, 19 nt, Artificial Sequence
  Description of Artificial Sequence: Synthetic oligonucleotide
uucuaguaacaugacagca

SEQ ID NO: 2586311 - RNA, 19 nt, Artificial Sequence
  Description of Artificial Sequence: Synthetic oligonucleotide
ugcagcaagaauucaacua

SEQ ID NO: 2586312 - RNA, 19 nt, Artificial Sequence
  Description of Artificial Sequence: Synthetic oligonucleotide
uagauacuugcuccuuggg

SEQ ID NO: 2586313 - RNA, 19 nt, Artificial Sequence
  Description of Artificial Sequence: Synthetic oligonucleotide
uucaacucauccaguuucc

SEQ ID NO: 2586314 - RNA, 19 nt, Artificial Sequence
  Description of Artificial Sequence: Synthetic oligonucleotide
auucaacuauuucuguaug

SEQ ID NO: 2586315 - RNA, 19 nt, Artificial Sequence
  Description of Artificial Sequence: Synthetic oligonucleotide
accaucuucaaguuacccu

SEQ ID NO: 2586316 - RNA, 19 nt, Artificial Sequence
  Description of Artificial Sequence: Synthetic oligonucleotide
auaauggagaggugugcag

SEQ ID NO: 2586317 - RNA, 19 nt, Artificial Sequence
  Description of Artificial Sequence: Synthetic oligonucleotide
uguaugaccagcugagcau

SEQ ID NO: 2586318 - RNA, 19 nt, Artificial Sequence
  Description of Artificial Sequence: Synthetic oligonucleotide
gaggugugcagccauuuug

SEQ ID NO: 2586319 - RNA, 19 nt, Artificial Sequence
  Description of Artificial Sequence: Synthetic oligonucleotide
gaugcuuuguagaacagaa

SEQ ID NO: 2586320 - RNA, 19 nt, Artificial Sequence
  Description of Artificial Sequence: Synthetic oligonucleotide
guuacccucagugucuugg

SEQ ID NO: 2586321 - RNA, 19 nt, Artificial Sequence
  Description of Artificial Sequence: Synthetic oligonucleotide
uccaguuucccgguguagg

SEQ ID NO: 2586322 - RNA, 19 nt, Artificial Sequence
  Description of Artificial Sequence: Synthetic oligonucleotide
uuuugguugacagcauuca

SEQ ID NO: 2586323 - RNA, 19 nt, Artificial Sequence
  Description of Artificial Sequence: Synthetic oligonucleotide
auuuugguugacagcauuc

SEQ ID NO: 2586324 - RNA, 19 nt, Artificial Sequence
  Description of Artificial Sequence: Synthetic oligonucleotide
ugucuuggauguuugugga

SEQ ID NO: 2586325 - RNA, 19 nt, Artificial Sequence
  Description of Artificial Sequence: Synthetic oligonucleotide
cuuggauguuuguggaugc

SEQ ID NO: 2586326 - RNA, 19 nt, Artificial Sequence
  Description of Artificial Sequence: Synthetic oligonucleotide
agaauucaacuauuucugu

SEQ ID NO: 2586327 - RNA, 19 nt, Artificial Sequence
  Description of Artificial Sequence: Synthetic oligonucleotide
cagguugcagaccauuagg

SEQ ID NO: 2586328 - RNA, 19 nt, Artificial Sequence
  Description of Artificial Sequence: Synthetic oligonucleotide
agauacuugcuccuugggu

SEQ ID NO: 2586329 - RNA, 19 nt, Artificial Sequence
  Description of Artificial Sequence: Synthetic oligonucleotide
agguuagacacacaccccu

SEQ ID NO: 2586330 - RNA, 19 nt, Artificial Sequence
  Description of Artificial Sequence: Synthetic oligonucleotide
uuaaaccuaggccaccuuu

SEQ ID NO: 2586331 - RNA, 19 nt, Artificial Sequence
  Description of Artificial Sequence: Synthetic oligonucleotide
acuugcgcaccuuuuacca

SEQ ID NO: 2586332 - RNA, 19 nt, Artificial Sequence
  Description of Artificial Sequence: Synthetic oligonucleotide
gaggagaccagccugcauc

SEQ ID NO: 2586333 - RNA, 19 nt, Artificial Sequence
  Description of Artificial Sequence: Synthetic oligonucleotide
ucaucacaggcuaagugua

SEQ ID NO: 2586334 - RNA, 19 nt, Artificial Sequence
  Description of Artificial Sequence: Synthetic oligonucleotide
gaguguuacccucaguguc

SEQ ID NO: 2586335 - RNA, 19 nt, Artificial Sequence
  Description of Artificial Sequence: Synthetic oligonucleotide
uuacaaucucaucccggcc

SEQ ID NO: 2586336 - RNA, 19 nt, Artificial Sequence
  Description of Artificial Sequence: Synthetic oligonucleotide
guguagaggaguguuaccc

SEQ ID NO: 2586337 - RNA, 19 nt, Artificial Sequence
  Description of Artificial Sequence: Synthetic oligonucleotide
ucagugucuuggauguuug

SEQ ID NO: 2586338 - RNA, 19 nt, Artificial Sequence
  Description of Artificial Sequence: Synthetic oligonucleotide
ucuucaaguuacccuuggc

SEQ ID NO: 2586339 - RNA, 19 nt, Artificial Sequence
  Description of Artificial Sequence: Synthetic oligonucleotide
ucauaaugguccuucgcau

SEQ ID NO: 2586340 - RNA, 19 nt, Artificial Sequence
  Description of Artificial Sequence: Synthetic oligonucleotide
ucacaggcuaaguguagag

SEQ ID NO: 2586341 - RNA, 19 nt, Artificial Sequence
  Description of Artificial Sequence: Synthetic oligonucleotide
uaccagaagggcuuuuaca

SEQ ID NO: 2586342 - RNA, 19 nt, Artificial Sequence
  Description of Artificial Sequence: Synthetic oligonucleotide
ugguugacagcauucacuu

SEQ ID NO: 2586343 - RNA, 19 nt, Artificial Sequence
  Description of Artificial Sequence: Synthetic oligonucleotide
gaauucaacuauuucugua

SEQ ID NO: 2586344 - RNA, 19 nt, Artificial Sequence
  Description of Artificial Sequence: Synthetic oligonucleotide
uggcacuccaaguugcagc

SEQ ID NO: 2586345 - RNA, 19 nt, Artificial Sequence
  Description of Artificial Sequence: Synthetic oligonucleotide
agugaaauucaaggcccgc

SEQ ID NO: 2586346 - RNA, 19 nt, Artificial Sequence
  Description of Artificial Sequence: Synthetic oligonucleotide
uauuaaaccuaggccaccu

SEQ ID NO: 2586347 - RNA, 19 nt, Artificial Sequence
  Description of Artificial Sequence: Synthetic oligonucleotide
cuuuaucauucacuggcac

SEQ ID NO: 2586348 - RNA, 19 nt, Artificial Sequence
  Description of Artificial Sequence: Synthetic oligonucleotide
uguagaggaguguuacccu

SEQ ID NO: 2586349 - RNA, 19 nt, Artificial Sequence
  Description of Artificial Sequence: Synthetic oligonucleotide
ucacuggcacuccaaguug

SEQ ID NO: 2586350 - RNA, 19 nt, Artificial Sequence
  Description of Artificial Sequence: Synthetic oligonucleotide
guugcagaccauuagguua

SEQ ID NO: 2586351 - RNA, 19 nt, Artificial Sequence
  Description of Artificial Sequence: Synthetic oligonucleotide
caggaucucagugaaauuc

SEQ ID NO: 2586352 - RNA, 19 nt, Artificial Sequence
  Description of Artificial Sequence: Synthetic oligonucleotide
uuaccagaagggcuuuuac

SEQ ID NO: 2586353 - RNA, 19 nt, Artificial Sequence
  Description of Artificial Sequence: Synthetic oligonucleotide
ucggccaaaaugcuuuccu

SEQ ID NO: 2586354 - RNA, 19 nt, Artificial Sequence
  Description of Artificial Sequence: Synthetic oligonucleotide
aguuacccuuggcugcugc

SEQ ID NO: 2586355 - RNA, 19 nt, Artificial Sequence
  Description of Artificial Sequence: Synthetic oligonucleotide
uucgcaucuggguuugccc

SEQ ID NO: 2586356 - RNA, 19 nt, Artificial Sequence
  Description of Artificial Sequence: Synthetic oligonucleotide
uagguuagacacacacccc

SEQ ID NO: 2586357 - RNA, 19 nt, Artificial Sequence
  Description of Artificial Sequence: Synthetic oligonucleotide
cagccauuuugguugacag

SEQ ID NO: 2586358 - RNA, 19 nt, Artificial Sequence
  Description of Artificial Sequence: Synthetic oligonucleotide
aggauaugaaccaucuuca

SEQ ID NO: 2586359 - RNA, 19 nt, Artificial Sequence
  Description of Artificial Sequence: Synthetic oligonucleotide
acuuucuacaauucucuua

SEQ ID NO: 2586360 - RNA, 19 nt, Artificial Sequence
  Description of Artificial Sequence: Synthetic oligonucleotide
ugcuccuugggucaccagu

SEQ ID NO: 2586361 - RNA, 19 nt, Artificial Sequence
  Description of Artificial Sequence: Synthetic oligonucleotide
agaaggauaugaaccaucu

SEQ ID NO: 2586362 - RNA, 19 nt, Artificial Sequence
  Description of Artificial Sequence: Synthetic oligonucleotide
agcaugcccagugcaaugc

SEQ ID NO: 2586363 - RNA, 19 nt, Artificial Sequence
  Description of Artificial Sequence: Synthetic oligonucleotide
gaucucagugaaauucaag

SEQ ID NO: 2586364 - RNA, 19 nt, Artificial Sequence
  Description of Artificial Sequence: Synthetic oligonucleotide
uucuaguagccagaguucu

SEQ ID NO: 2586365 - RNA, 19 nt, Artificial Sequence
  Description of Artificial Sequence: Synthetic oligonucleotide
uccauuucgcagucccagg

SEQ ID NO: 2586366 - RNA, 19 nt, Artificial Sequence
  Description of Artificial Sequence: Synthetic oligonucleotide
uguagaacagaaggauaug

SEQ ID NO: 2586367 - RNA, 19 nt, Artificial Sequence
  Description of Artificial Sequence: Synthetic oligonucleotide
uuguggaugcuuuguagaa

SEQ ID NO: 2586368 - RNA, 19 nt, Artificial Sequence
  Description of Artificial Sequence: Synthetic oligonucleotide
ucacuugcgcaccuuuuac

SEQ ID NO: 2586369 - RNA, 19 nt, Artificial Sequence
  Description of Artificial Sequence: Synthetic oligonucleotide
uccaaguugcagcaagaau

SEQ ID NO: 2586370 - RNA, 19 nt, Artificial Sequence
  Description of Artificial Sequence: Synthetic oligonucleotide
agugucuuggauguuugug

SEQ ID NO: 2586371 - RNA, 19 nt, Artificial Sequence
  Description of Artificial Sequence: Synthetic oligonucleotide
uacccuuggcugcugcccg

SEQ ID NO: 2586372 - RNA, 19 nt, Artificial Sequence
  Description of Artificial Sequence: Synthetic oligonucleotide
uguuuguggaugcuuugua

SEQ ID NO: 2586373 - RNA, 19 nt, Artificial Sequence
  Description of Artificial Sequence: Synthetic oligonucleotide
cauaaugguccuucgcauc

SEQ ID NO: 2586374 - RNA, 19 nt, Artificial Sequence
  Description of Artificial Sequence: Synthetic oligonucleotide
uagccagaguucuaucggc

SEQ ID NO: 2586375 - RNA, 19 nt, Artificial Sequence
  Description of Artificial Sequence: Synthetic oligonucleotide
cagaccauuagguuagaca

SEQ ID NO: 2586376 - RNA, 19 nt, Artificial Sequence
  Description of Artificial Sequence: Synthetic oligonucleotide
cauucacuggcacuccaag

SEQ ID NO: 2586377 - RNA, 19 nt, Artificial Sequence
  Description of Artificial Sequence: Synthetic oligonucleotide
guagaacagaaggauauga

SEQ ID NO: 2586378 - RNA, 19 nt, Artificial Sequence
  Description of Artificial Sequence: Synthetic oligonucleotide
ugccccaccuucuaguaac

SEQ ID NO: 2586379 - RNA, 19 nt, Artificial Sequence
  Description of Artificial Sequence: Synthetic oligonucleotide
cuauuucuguaugaccagc

SEQ ID NO: 2586380 - RNA, 19 nt, Artificial Sequence
  Description of Artificial Sequence: Synthetic oligonucleotide
cagugaaauucaaggcccg

SEQ ID NO: 2586381 - RNA, 19 nt, Artificial Sequence
  Description of Artificial Sequence: Synthetic oligonucleotide
ucuaucggccaaaaugcuu

SEQ ID NO: 2586382 - RNA, 19 nt, Artificial Sequence
  Description of Artificial Sequence: Synthetic oligonucleotide
ucuguuguccugaucgguu

SEQ ID NO: 2586383 - RNA, 19 nt, Artificial Sequence
  Description of Artificial Sequence: Synthetic oligonucleotide
auacuugcuccuuggguca

SEQ ID NO: 2586384 - RNA, 19 nt, Artificial Sequence
  Description of Artificial Sequence: Synthetic oligonucleotide
uucuaucggccaaaaugcu

SEQ ID NO: 2586385 - RNA, 19 nt, Artificial Sequence
  Description of Artificial Sequence: Synthetic oligonucleotide
uugcagcaagaauucaacu

SEQ ID NO: 2586386 - RNA, 19 nt, Artificial Sequence
  Description of Artificial Sequence: Synthetic oligonucleotide
uaugaaccaucuucaaguu

SEQ ID NO: 2586387 - RNA, 19 nt, Artificial Sequence
  Description of Artificial Sequence: Synthetic oligonucleotide
uaaguguagaggaguguua

SEQ ID NO: 2586388 - RNA, 19 nt, Artificial Sequence
  Description of Artificial Sequence: Synthetic oligonucleotide
agcaaucucaugccuauuu

SEQ ID NO: 2586389 - RNA, 19 nt, Artificial Sequence
  Description of Artificial Sequence: Synthetic oligonucleotide
accuucuaguaacaugaca

SEQ ID NO: 2586390 - RNA, 19 nt, Artificial Sequence
  Description of Artificial Sequence: Synthetic oligonucleotide
uucacuugcgcaccuuuua

SEQ ID NO: 2586391 - RNA, 19 nt, Artificial Sequence
  Description of Artificial Sequence: Synthetic oligonucleotide
cacacaccccuccauuucg

SEQ ID NO: 2586392 - RNA, 19 nt, Artificial Sequence
  Description of Artificial Sequence: Synthetic oligonucleotide
acagcaaucucaugccuau

SEQ ID NO: 2586393 - RNA, 19 nt, Artificial Sequence
  Description of Artificial Sequence: Synthetic oligonucleotide
agugcaaugcuguucuguu

SEQ ID NO: 2586394 - RNA, 19 nt, Artificial Sequence
  Description of Artificial Sequence: Synthetic oligonucleotide
aguuucccgguguaggcca

SEQ ID NO: 2586395 - RNA, 19 nt, Artificial Sequence
  Description of Artificial Sequence: Synthetic oligonucleotide
aggugugcagccauuuugg

SEQ ID NO: 2586396 - RNA, 19 nt, Artificial Sequence
  Description of Artificial Sequence: Synthetic oligonucleotide
cagaaggauaugaaccauc

SEQ ID NO: 2586397 - RNA, 19 nt, Artificial Sequence
  Description of Artificial Sequence: Synthetic oligonucleotide
uugcgcaccuuuuaccaga

SEQ ID NO: 2586398 - RNA, 19 nt, Artificial Sequence
  Description of Artificial Sequence: Synthetic oligonucleotide
gaaauucaaggcccgccca

SEQ ID NO: 2586399 - RNA, 19 nt, Artificial Sequence
  Description of Artificial Sequence: Synthetic oligonucleotide
uggaugcuuuguagaacag

SEQ ID NO: 2586400 - RNA, 19 nt, Artificial Sequence
  Description of Artificial Sequence: Synthetic oligonucleotide
acccucagugucuuggaug

SEQ ID NO: 2586401 - RNA, 19 nt, Artificial Sequence
  Description of Artificial Sequence: Synthetic oligonucleotide
ugacagcaaucucaugccu

SEQ ID NO: 2586402 - RNA, 19 nt, Artificial Sequence
  Description of Artificial Sequence: Synthetic oligonucleotide
auucacuggcacuccaagu

SEQ ID NO: 2586403 - RNA, 19 nt, Artificial Sequence
  Description of Artificial Sequence: Synthetic oligonucleotide
cugaucgguucuaguagcc

SEQ ID NO: 2586404 - RNA, 19 nt, Artificial Sequence
  Description of Artificial Sequence: Synthetic oligonucleotide
cucuuaaguauuaaaccua

SEQ ID NO: 2586405 - RNA, 19 nt, Artificial Sequence
  Description of Artificial Sequence: Synthetic oligonucleotide
cacuugcgcaccuuuuacc

SEQ ID NO: 2586406 - RNA, 19 nt, Artificial Sequence
  Description of Artificial Sequence: Synthetic oligonucleotide
guaacaugacagcaaucuc

SEQ ID NO: 2586407 - RNA, 19 nt, Artificial Sequence
  Description of Artificial Sequence: Synthetic oligonucleotide
cuacaauucucuuaaguau

SEQ ID NO: 2586408 - RNA, 19 nt, Artificial Sequence
  Description of Artificial Sequence: Synthetic oligonucleotide
agccagaguucuaucggcc

SEQ ID NO: 2586409 - RNA, 19 nt, Artificial Sequence
  Description of Artificial Sequence: Synthetic oligonucleotide
uguggaugcuuuguagaac

SEQ ID NO: 2586410 - RNA, 19 nt, Artificial Sequence
  Description of Artificial Sequence: Synthetic oligonucleotide
ugguccuucgcaucugggu

SEQ ID NO: 2586411 - RNA, 19 nt, Artificial Sequence
  Description of Artificial Sequence: Synthetic oligonucleotide
cacaggcuaaguguagagg

SEQ ID NO: 2586412 - RNA, 19 nt, Artificial Sequence
  Description of Artificial Sequence: Synthetic oligonucleotide
cacuggcacuccaaguugc

SEQ ID NO: 2586413 - RNA, 19 nt, Artificial Sequence
  Description of Artificial Sequence: Synthetic oligonucleotide
guagaggaguguuacccuc

SEQ ID NO: 2586414 - RNA, 19 nt, Artificial Sequence
  Description of Artificial Sequence: Synthetic oligonucleotide
cuggguuugccccaccuuc

SEQ ID NO: 2586415 - RNA, 19 nt, Artificial Sequence
  Description of Artificial Sequence: Synthetic oligonucleotide
uuggccacuugcaggggug

SEQ ID NO: 2586416 - RNA, 19 nt, Artificial Sequence
  Description of Artificial Sequence: Synthetic oligonucleotide
caucacaggcuaaguguag

SEQ ID NO: 2586417 - RNA, 19 nt, Artificial Sequence
  Description of Artificial Sequence: Synthetic oligonucleotide
gccauuuugguugacagca

SEQ ID NO: 2586418 - RNA, 19 nt, Artificial Sequence
  Description of Artificial Sequence: Synthetic oligonucleotide
gguucuaguagccagaguu

SEQ ID NO: 2586419 - RNA, 19 nt, Artificial Sequence
  Description of Artificial Sequence: Synthetic oligonucleotide
cuugcgcaccuuuuaccag

SEQ ID NO: 2586420 - RNA, 19 nt, Artificial Sequence
  Description of Artificial Sequence: Synthetic oligonucleotide
cuccauuucgcagucccag

SEQ ID NO: 2586421 - RNA, 19 nt, Artificial Sequence
  Description of Artificial Sequence: Synthetic oligonucleotide
ucgguucuaguagccagag

SEQ ID NO: 2586422 - RNA, 19 nt, Artificial Sequence
  Description of Artificial Sequence: Synthetic oligonucleotide
ucaacucauccaguuuccc

SEQ ID NO: 2586423 - RNA, 19 nt, Artificial Sequence
  Description of Artificial Sequence: Synthetic oligonucleotide
aucggccaaaaugcuuucc

SEQ ID NO: 2586424 - RNA, 19 nt, Artificial Sequence
  Description of Artificial Sequence: Synthetic oligonucleotide
cgcaccuuuuaccagaagg

SEQ ID NO: 2586425 - RNA, 19 nt, Artificial Sequence
  Description of Artificial Sequence: Synthetic oligonucleotide
aggagaccagccugcauca

SEQ ID NO: 2586426 - RNA, 19 nt, Artificial Sequence
  Description of Artificial Sequence: Synthetic oligonucleotide
guaugaccagcugagcaug

SEQ ID NO: 2586427 - RNA, 19 nt, Artificial Sequence
  Description of Artificial Sequence: Synthetic oligonucleotide
ccaccuucuaguaacauga

SEQ ID NO: 2586428 - RNA, 19 nt, Artificial Sequence
  Description of Artificial Sequence: Synthetic oligonucleotide
ugacagcauucacuugcgc

SEQ ID NO: 2586429 - RNA, 19 nt, Artificial Sequence
  Description of Artificial Sequence: Synthetic oligonucleotide
cuucaaguuacccuuggcu

SEQ ID NO: 2586430 - RNA, 19 nt, Artificial Sequence
  Description of Artificial Sequence: Synthetic oligonucleotide
uuuaccagaagggcuuuua

SEQ ID NO: 2586431 - RNA, 19 nt, Artificial Sequence
  Description of Artificial Sequence: Synthetic oligonucleotide
caaugcuguucuguugucc

SEQ ID NO: 2586432 - RNA, 19 nt, Artificial Sequence
  Description of Artificial Sequence: Synthetic oligonucleotide
augaccagcugagcaugcc

SEQ ID NO: 2586433 - RNA, 19 nt, Artificial Sequence
  Description of Artificial Sequence: Synthetic oligonucleotide
ucuguaugaccagcugagc

SEQ ID NO: 2586434 - RNA, 19 nt, Artificial Sequence
  Description of Artificial Sequence: Synthetic oligonucleotide
ggugcauugcuguagccuc

SEQ ID NO: 2586435 - RNA, 19 nt, Artificial Sequence
  Description of Artificial Sequence: Synthetic oligonucleotide
acaccccuccauuucgcag

SEQ ID NO: 2586436 - RNA, 19 nt, Artificial Sequence
  Description of Artificial Sequence: Synthetic oligonucleotide
cauaauggagaggugugca

SEQ ID NO: 2586437 - RNA, 19 nt, Artificial Sequence
  Description of Artificial Sequence: Synthetic oligonucleotide
uuacccucagugucuugga

SEQ ID NO: 2586438 - RNA, 19 nt, Artificial Sequence
  Description of Artificial Sequence: Synthetic oligonucleotide
aguugcagcaagaauucaa

SEQ ID NO: 2586439 - RNA, 19 nt, Artificial Sequence
  Description of Artificial Sequence: Synthetic oligonucleotide
ugaucgguucuaguagcca

SEQ ID NO: 2586440 - RNA, 19 nt, Artificial Sequence
  Description of Artificial Sequence: Synthetic oligonucleotide
ucuaguagccagaguucua

SEQ ID NO: 2586441 - RNA, 19 nt, Artificial Sequence
  Description of Artificial Sequence: Synthetic oligonucleotide
agaccagccugcaucaucu

SEQ ID NO: 2586442 - RNA, 19 nt, Artificial Sequence
  Description of Artificial Sequence: Synthetic oligonucleotide
uagacacacaccccuccau

SEQ ID NO: 2586443 - RNA, 19 nt, Artificial Sequence
  Description of Artificial Sequence: Synthetic oligonucleotide
guauuaaaccuaggccacc

SEQ ID NO: 2586444 - RNA, 19 nt, Artificial Sequence
  Description of Artificial Sequence: Synthetic oligonucleotide
caugcccagugcaaugcug

SEQ ID NO: 2586445 - RNA, 19 nt, Artificial Sequence
  Description of Artificial Sequence: Synthetic oligonucleotide
uuugccccaccuucuagua

SEQ ID NO: 2586446 - RNA, 19 nt, Artificial Sequence
  Description of Artificial Sequence: Synthetic oligonucleotide
uggagaggugugcagccau

SEQ ID NO: 2586447 - RNA, 19 nt, Artificial Sequence
  Description of Artificial Sequence: Synthetic oligonucleotide
agaagggcuuuuacaaucu

SEQ ID NO: 2586448 - RNA, 19 nt, Artificial Sequence
  Description of Artificial Sequence: Synthetic oligonucleotide
cuguuguccugaucgguuc

SEQ ID NO: 2586449 - RNA, 19 nt, Artificial Sequence
  Description of Artificial Sequence: Synthetic oligonucleotide
cucaauguagauacuugcu

SEQ ID NO: 2586450 - RNA, 19 nt, Artificial Sequence
  Description of Artificial Sequence: Synthetic oligonucleotide
uucuguuguccugaucggu

SEQ ID NO: 2586451 - RNA, 19 nt, Artificial Sequence
  Description of Artificial Sequence: Synthetic oligonucleotide
auguuuguggaugcuuugu

SEQ ID NO: 2586452 - RNA, 19 nt, Artificial Sequence
  Description of Artificial Sequence: Synthetic oligonucleotide
agguugcagaccauuaggu

SEQ ID NO: 2586453 - RNA, 19 nt, Artificial Sequence
  Description of Artificial Sequence: Synthetic oligonucleotide
uguccugaucgguucuagu

SEQ ID NO: 2586454 - RNA, 19 nt, Artificial Sequence
  Description of Artificial Sequence: Synthetic oligonucleotide
cagucccaggaucucagug

SEQ ID NO: 2586455 - RNA, 19 nt, Artificial Sequence
  Description of Artificial Sequence: Synthetic oligonucleotide
caccuuuggccacuugcag

SEQ ID NO: 2586456 - RNA, 19 nt, Artificial Sequence
  Description of Artificial Sequence: Synthetic oligonucleotide
ggccaaaaugcuuuccuuc

SEQ ID NO: 2586457 - RNA, 19 nt, Artificial Sequence
  Description of Artificial Sequence: Synthetic oligonucleotide
aucacaggcuaaguguaga

SEQ ID NO: 2586458 - RNA, 19 nt, Artificial Sequence
  Description of Artificial Sequence: Synthetic oligonucleotide
aaguugcagcaagaauuca

SEQ ID NO: 2586459 - RNA, 19 nt, Artificial Sequence
  Description of Artificial Sequence: Synthetic oligonucleotide
gugcaaugcuguucuguug

SEQ ID NO: 2586460 - RNA, 19 nt, Artificial Sequence
  Description of Artificial Sequence: Synthetic oligonucleotide
cuugcaggggugucuuuuc

SEQ ID NO: 2586461 - RNA, 19 nt, Artificial Sequence
  Description of Artificial Sequence: Synthetic oligonucleotide
ugagcaugcccagugcaau

SEQ ID NO: 2586462 - RNA, 19 nt, Artificial Sequence
  Description of Artificial Sequence: Synthetic oligonucleotide
gccaaaaugcuuuccuuca

SEQ ID NO: 2586463 - RNA, 19 nt, Artificial Sequence
  Description of Artificial Sequence: Synthetic oligonucleotide
ccugaucgguucuaguagc

SEQ ID NO: 2586464 - RNA, 19 nt, Artificial Sequence
  Description of Artificial Sequence: Synthetic oligonucleotide
uuguccugaucgguucuag

SEQ ID NO: 2586465 - RNA, 19 nt, Artificial Sequence
  Description of Artificial Sequence: Synthetic oligonucleotide
guucuaguagccagaguuc

SEQ ID NO: 2586466 - RNA, 19 nt, Artificial Sequence
  Description of Artificial Sequence: Synthetic oligonucleotide
cuaguaacaugacagcaau

SEQ ID NO: 2586467 - RNA, 19 nt, Artificial Sequence
  Description of Artificial Sequence: Synthetic oligonucleotide
cuucgcaucuggguuugcc

SEQ ID NO: 2586468 - RNA, 19 nt, Artificial Sequence
  Description of Artificial Sequence: Synthetic oligonucleotide
augaaccaucuucaaguua

SEQ ID NO: 2586469 - RNA, 19 nt, Artificial Sequence
  Description of Artificial Sequence: Synthetic oligonucleotide
augcuuuguagaacagaag

SEQ ID NO: 2586470 - RNA, 19 nt, Artificial Sequence
  Description of Artificial Sequence: Synthetic oligonucleotide
agcaagaauucaacuauuu

SEQ ID NO: 2586471 - RNA, 19 nt, Artificial Sequence
  Description of Artificial Sequence: Synthetic oligonucleotide
guccugaucgguucuagua

SEQ ID NO: 2586472 - RNA, 19 nt, Artificial Sequence
  Description of Artificial Sequence: Synthetic oligonucleotide
agacacacaccccuccauu

SEQ ID NO: 2586473 - RNA, 19 nt, Artificial Sequence
  Description of Artificial Sequence: Synthetic oligonucleotide
aucuggguuugccccaccu

SEQ ID NO: 2586474 - RNA, 19 nt, Artificial Sequence
  Description of Artificial Sequence: Synthetic oligonucleotide
acacaccccuccauuucgc

SEQ ID NO: 2586475 - RNA, 19 nt, Artificial Sequence
  Description of Artificial Sequence: Synthetic oligonucleotide
cagcugagcaugcccagug

SEQ ID NO: 2586476 - RNA, 19 nt, Artificial Sequence
  Description of Artificial Sequence: Synthetic oligonucleotide
uaaugguccuucgcaucug

SEQ ID NO: 2586477 - RNA, 19 nt, Artificial Sequence
  Description of Artificial Sequence: Synthetic oligonucleotide
cuaucggccaaaaugcuuu

SEQ ID NO: 2586478 - RNA, 19 nt, Artificial Sequence
  Description of Artificial Sequence: Synthetic oligonucleotide
acagaaggauaugaaccau

SEQ ID NO: 2586479 - RNA, 19 nt, Artificial Sequence
  Description of Artificial Sequence: Synthetic oligonucleotide
acaugacagcaaucucaug

SEQ ID NO: 2586480 - RNA, 19 nt, Artificial Sequence
  Description of Artificial Sequence: Synthetic oligonucleotide
aagaggagaccagccugca

SEQ ID NO: 2586481 - RNA, 19 nt, Artificial Sequence
  Description of Artificial Sequence: Synthetic oligonucleotide
uggauguuuguggaugcuu

SEQ ID NO: 2586482 - RNA, 19 nt, Artificial Sequence
  Description of Artificial Sequence: Synthetic oligonucleotide
auuaaaccuaggccaccuu

SEQ ID NO: 2586483 - RNA, 19 nt, Artificial Sequence
  Description of Artificial Sequence: Synthetic oligonucleotide
cuguagccucauaaugguc

SEQ ID NO: 2586484 - RNA, 19 nt, Artificial Sequence
  Description of Artificial Sequence: Synthetic oligonucleotide
gaccauuagguuagacaca

SEQ ID NO: 2586485 - RNA, 19 nt, Artificial Sequence
  Description of Artificial Sequence: Synthetic oligonucleotide
gcaauaugaagaggagacc

SEQ ID NO: 2586486 - RNA, 19 nt, Artificial Sequence
  Description of Artificial Sequence: Synthetic oligonucleotide
cccgguguaggccagguug

SEQ ID NO: 2586487 - RNA, 19 nt, Artificial Sequence
  Description of Artificial Sequence: Synthetic oligonucleotide
caguuucccgguguaggcc

SEQ ID NO: 2586488 - RNA, 19 nt, Artificial Sequence
  Description of Artificial Sequence: Synthetic oligonucleotide
accccuccauuucgcaguc

SEQ ID NO: 2586489 - RNA, 19 nt, Artificial Sequence
  Description of Artificial Sequence: Synthetic oligonucleotide
ugcgcaccuuuuaccagaa

SEQ ID NO: 2586490 - RNA, 19 nt, Artificial Sequence
  Description of Artificial Sequence: Synthetic oligonucleotide
ggcacuccaaguugcagca

SEQ ID NO: 2586491 - RNA, 19 nt, Artificial Sequence
  Description of Artificial Sequence: Synthetic oligonucleotide
uaguagccagaguucuauc

SEQ ID NO: 2586492 - RNA, 19 nt, Artificial Sequence
  Description of Artificial Sequence: Synthetic oligonucleotide
caccuucuaguaacaugac

SEQ ID NO: 2586493 - RNA, 19 nt, Artificial Sequence
  Description of Artificial Sequence: Synthetic oligonucleotide
gcuuuguagaacagaagga

SEQ ID NO: 2586494 - RNA, 19 nt, Artificial Sequence
  Description of Artificial Sequence: Synthetic oligonucleotide
ccaaguugcagcaagaauu

SEQ ID NO: 2586495 - RNA, 19 nt, Artificial Sequence
  Description of Artificial Sequence: Synthetic oligonucleotide
gucaccaguaacuuugcuu

SEQ ID NO: 2586496 - RNA, 19 nt, Artificial Sequence
  Description of Artificial Sequence: Synthetic oligonucleotide
uuggauguuuguggaugcu

SEQ ID NO: 2586497 - RNA, 19 nt, Artificial Sequence
  Description of Artificial Sequence: Synthetic oligonucleotide
gacagcaaucucaugccua

SEQ ID NO: 2586498 - RNA, 19 nt, Artificial Sequence
  Description of Artificial Sequence: Synthetic oligonucleotide
uacccucagugucuuggau

SEQ ID NO: 2586499 - RNA, 19 nt, Artificial Sequence
  Description of Artificial Sequence: Synthetic oligonucleotide
cagcauucacuugcgcacc

SEQ ID NO: 2586500 - RNA, 19 nt, Artificial Sequence
  Description of Artificial Sequence: Synthetic oligonucleotide
uugggucaccaguaacuuu

SEQ ID NO: 2586501 - RNA, 19 nt, Artificial Sequence
  Description of Artificial Sequence: Synthetic oligonucleotide
ccucauaaugguccuucgc

SEQ ID NO: 2586502 - RNA, 19 nt, Artificial Sequence
  Description of Artificial Sequence: Synthetic oligonucleotide
uguuacccucagugucuug

SEQ ID NO: 2586503 - RNA, 19 nt, Artificial Sequence
  Description of Artificial Sequence: Synthetic oligonucleotide
ccagguugcagaccauuag

SEQ ID NO: 2586504 - RNA, 19 nt, Artificial Sequence
  Description of Artificial Sequence: Synthetic oligonucleotide
ccaguuucccgguguaggc

SEQ ID NO: 2586505 - RNA, 19 nt, Artificial Sequence
  Description of Artificial Sequence: Synthetic oligonucleotide
gguuugccccaccuucuag

SEQ ID NO: 2586506 - RNA, 19 nt, Artificial Sequence
  Description of Artificial Sequence: Synthetic oligonucleotide
gcauaauggagaggugugc

SEQ ID NO: 2586507 - RNA, 19 nt, Artificial Sequence
  Description of Artificial Sequence: Synthetic oligonucleotide
gccucauaaugguccuucg

SEQ ID NO: 2586508 - RNA, 19 nt, Artificial Sequence
  Description of Artificial Sequence: Synthetic oligonucleotide
guuugccccaccuucuagu

SEQ ID NO: 2586509 - RNA, 19 nt, Artificial Sequence
  Description of Artificial Sequence: Synthetic oligonucleotide
aggggugucuuuucuucuu

SEQ ID NO: 2586510 - RNA, 19 nt, Artificial Sequence
  Description of Artificial Sequence: Synthetic oligonucleotide
cccuccauuucgcaguccc

SEQ ID NO: 2586511 - RNA, 19 nt, Artificial Sequence
  Description of Artificial Sequence: Synthetic oligonucleotide
gucccaggaucucagugaa

SEQ ID NO: 2586512 - RNA, 19 nt, Artificial Sequence
  Description of Artificial Sequence: Synthetic oligonucleotide
aucgguucuaguagccaga

SEQ ID NO: 2586513 - RNA, 19 nt, Artificial Sequence
  Description of Artificial Sequence: Synthetic oligonucleotide
ugcugcccggugcauugcu

SEQ ID NO: 2586514 - RNA, 19 nt, Artificial Sequence
  Description of Artificial Sequence: Synthetic oligonucleotide
agaggugugcagccauuuu

SEQ ID NO: 2586515 - RNA, 19 nt, Artificial Sequence
  Description of Artificial Sequence: Synthetic oligonucleotide
uuucccgguguaggccagg

SEQ ID NO: 2586516 - RNA, 19 nt, Artificial Sequence
  Description of Artificial Sequence: Synthetic oligonucleotide
cccaccuucuaguaacaug

SEQ ID NO: 2586517 - RNA, 19 nt, Artificial Sequence
  Description of Artificial Sequence: Synthetic oligonucleotide
acuugcaggggugucuuuu

SEQ ID NO: 2586518 - RNA, 19 nt, Artificial Sequence
  Description of Artificial Sequence: Synthetic oligonucleotide
cuaggccaccuuuggccac

SEQ ID NO: 2586519 - RNA, 19 nt, Artificial Sequence
  Description of Artificial Sequence: Synthetic oligonucleotide
acuccaaguugcagcaaga

SEQ ID NO: 2586520 - RNA, 19 nt, Artificial Sequence
  Description of Artificial Sequence: Synthetic oligonucleotide
cuuccacucucuccucauc

SEQ ID NO: 2586521 - RNA, 19 nt, Artificial Sequence
  Description of Artificial Sequence: Synthetic oligonucleotide
ggauaugaaccaucuucaa

SEQ ID NO: 2586522 - RNA, 19 nt, Artificial Sequence
  Description of Artificial Sequence: Synthetic oligonucleotide
augguccuucgcaucuggg

SEQ ID NO: 2586523 - RNA, 19 nt, Artificial Sequence
  Description of Artificial Sequence: Synthetic oligonucleotide
gguugacagcauucacuug

SEQ ID NO: 2586524 - RNA, 19 nt, Artificial Sequence
  Description of Artificial Sequence: Synthetic oligonucleotide
cucauccaguuucccggug

SEQ ID NO: 2586525 - RNA, 19 nt, Artificial Sequence
  Description of Artificial Sequence: Synthetic oligonucleotide
agaguucuaucggccaaaa

SEQ ID NO: 2586526 - RNA, 19 nt, Artificial Sequence
  Description of Artificial Sequence: Synthetic oligonucleotide
cugagcaugcccagugcaa

SEQ ID NO: 2586527 - RNA, 19 nt, Artificial Sequence
  Description of Artificial Sequence: Synthetic oligonucleotide
ucgcagucccaggaucuca

SEQ ID NO: 2586528 - RNA, 19 nt, Artificial Sequence
  Description of Artificial Sequence: Synthetic oligonucleotide
cuaaguguagaggaguguu

SEQ ID NO: 2586529 - RNA, 19 nt, Artificial Sequence
  Description of Artificial Sequence: Synthetic oligonucleotide
guagccucauaaugguccu

SEQ ID NO: 2586530 - RNA, 19 nt, Artificial Sequence
  Description of Artificial Sequence: Synthetic oligonucleotide
gcugcugcccggugcauug

SEQ ID NO: 2586531 - RNA, 19 nt, Artificial Sequence
  Description of Artificial Sequence: Synthetic oligonucleotide
agaggagaccagccugcau

SEQ ID NO: 2586532 - RNA, 19 nt, Artificial Sequence
  Description of Artificial Sequence: Synthetic oligonucleotide
aucccggccagcagaagca

SEQ ID NO: 2586533 - RNA, 19 nt, Artificial Sequence
  Description of Artificial Sequence: Synthetic oligonucleotide
ugcauugcuguagccucau

SEQ ID NO: 2586534 - RNA, 19 nt, Artificial Sequence
  Description of Artificial Sequence: Synthetic oligonucleotide
ggaugcuuuguagaacaga

SEQ ID NO: 2586535 - RNA, 19 nt, Artificial Sequence
  Description of Artificial Sequence: Synthetic oligonucleotide
gcugagcaugcccagugca

SEQ ID NO: 2586536 - RNA, 19 nt, Artificial Sequence
  Description of Artificial Sequence: Synthetic oligonucleotide
aaguuacccuuggcugcug

SEQ ID NO: 2586537 - RNA, 19 nt, Artificial Sequence
  Description of Artificial Sequence: Synthetic oligonucleotide
gacacacaccccuccauuu

SEQ ID NO: 2586538 - RNA, 19 nt, Artificial Sequence
  Description of Artificial Sequence: Synthetic oligonucleotide
uuuuaccagaagggcuuuu

SEQ ID NO: 2586539 - RNA, 19 nt, Artificial Sequence
  Description of Artificial Sequence: Synthetic oligonucleotide
accaguaacuuugcuucuu

SEQ ID NO: 2586540 - RNA, 19 nt, Artificial Sequence
  Description of Artificial Sequence: Synthetic oligonucleotide
uugcuccuugggucaccag

SEQ ID NO: 2586541 - RNA, 19 nt, Artificial Sequence
  Description of Artificial Sequence: Synthetic oligonucleotide
caauucucuuaaguauuaa

SEQ ID NO: 2586542 - RNA, 19 nt, Artificial Sequence
  Description of Artificial Sequence: Synthetic oligonucleotide
gaaggauaugaaccaucuu

SEQ ID NO: 2586543 - RNA, 19 nt, Artificial Sequence
  Description of Artificial Sequence: Synthetic oligonucleotide
cuguucuguuguccugauc

SEQ ID NO: 2586544 - RNA, 19 nt, Artificial Sequence
  Description of Artificial Sequence: Synthetic oligonucleotide
ucccaggaucucagugaaa

SEQ ID NO: 2586545 - RNA, 19 nt, Artificial Sequence
  Description of Artificial Sequence: Synthetic oligonucleotide
guaggccagguugcagacc

SEQ ID NO: 2586546 - RNA, 19 nt, Artificial Sequence
  Description of Artificial Sequence: Synthetic oligonucleotide
gguguaggccagguugcag

SEQ ID NO: 2586547 - RNA, 19 nt, Artificial Sequence
  Description of Artificial Sequence: Synthetic oligonucleotide
auucacuugcgcaccuuuu

SEQ ID NO: 2586548 - RNA, 19 nt, Artificial Sequence
  Description of Artificial Sequence: Synthetic oligonucleotide
uacuugcuccuugggucac

SEQ ID NO: 2586549 - RNA, 19 nt, Artificial Sequence
  Description of Artificial Sequence: Synthetic oligonucleotide
gccagaguucuaucggcca

SEQ ID NO: 2586550 - RNA, 19 nt, Artificial Sequence
  Description of Artificial Sequence: Synthetic oligonucleotide
acuggcacuccaaguugca

SEQ ID NO: 2586551 - RNA, 19 nt, Artificial Sequence
  Description of Artificial Sequence: Synthetic oligonucleotide
uucccgguguaggccaggu

SEQ ID NO: 2586552 - RNA, 19 nt, Artificial Sequence
  Description of Artificial Sequence: Synthetic oligonucleotide
cauuuugguugacagcauu

SEQ ID NO: 2586553 - RNA, 19 nt, Artificial Sequence
  Description of Artificial Sequence: Synthetic oligonucleotide
cuccaaguugcagcaagaa

SEQ ID NO: 2586554 - RNA, 19 nt, Artificial Sequence
  Description of Artificial Sequence: Synthetic oligonucleotide
guuucccgguguaggccag

SEQ ID NO: 2586555 - RNA, 19 nt, Artificial Sequence
  Description of Artificial Sequence: Synthetic oligonucleotide
cuugcuccuugggucacca

SEQ ID NO: 2586556 - RNA, 19 nt, Artificial Sequence
  Description of Artificial Sequence: Synthetic oligonucleotide
gguuagacacacaccccuc

SEQ ID NO: 2586557 - RNA, 19 nt, Artificial Sequence
  Description of Artificial Sequence: Synthetic oligonucleotide
caccccuccauuucgcagu

SEQ ID NO: 2586558 - RNA, 19 nt, Artificial Sequence
  Description of Artificial Sequence: Synthetic oligonucleotide
ugcagaccauuagguuaga

SEQ ID NO: 2586559 - RNA, 19 nt, Artificial Sequence
  Description of Artificial Sequence: Synthetic oligonucleotide
ggugucuuuucuucuuuau

SEQ ID NO: 2586560 - RNA, 19 nt, Artificial Sequence
  Description of Artificial Sequence: Synthetic oligonucleotide
cccggugcauugcuguagc

SEQ ID NO: 2586561 - RNA, 19 nt, Artificial Sequence
  Description of Artificial Sequence: Synthetic oligonucleotide
ccuugggucaccaguaacu

SEQ ID NO: 2586562 - RNA, 19 nt, Artificial Sequence
  Description of Artificial Sequence: Synthetic oligonucleotide
gugugcagccauuuugguu

SEQ ID NO: 2586563 - RNA, 19 nt, Artificial Sequence
  Description of Artificial Sequence: Synthetic oligonucleotide
ccauuucgcagucccagga

SEQ ID NO: 2586564 - RNA, 19 nt, Artificial Sequence
  Description of Artificial Sequence: Synthetic oligonucleotide
cauccaguuucccggugua

SEQ ID NO: 2586565 - RNA, 19 nt, Artificial Sequence
  Description of Artificial Sequence: Synthetic oligonucleotide
gugcagccauuuugguuga

SEQ ID NO: 2586566 - RNA, 19 nt, Artificial Sequence
  Description of Artificial Sequence: Synthetic oligonucleotide
ugcccggugcauugcugua

SEQ ID NO: 2586567 - RNA, 19 nt, Artificial Sequence
  Description of Artificial Sequence: Synthetic oligonucleotide
cagaguucuaucggccaaa

SEQ ID NO: 2586568 - RNA, 19 nt, Artificial Sequence
  Description of Artificial Sequence: Synthetic oligonucleotide
gugcauugcuguagccuca

SEQ ID NO: 2586569 - RNA, 19 nt, Artificial Sequence
  Description of Artificial Sequence: Synthetic oligonucleotide
gaguucuaucggccaaaau

SEQ ID NO: 2586570 - RNA, 19 nt, Artificial Sequence
  Description of Artificial Sequence: Synthetic oligonucleotide
gcaaugcuguucuguuguc

SEQ ID NO: 2586571 - RNA, 19 nt, Artificial Sequence
  Description of Artificial Sequence: Synthetic oligonucleotide
gguugcagaccauuagguu

SEQ ID NO: 2586572 - RNA, 19 nt, Artificial Sequence
  Description of Artificial Sequence: Synthetic oligonucleotide
gguccuucgcaucuggguu

SEQ ID NO: 2586573 - RNA, 19 nt, Artificial Sequence
  Description of Artificial Sequence: Synthetic oligonucleotide
ggaucucagugaaauucaa

SEQ ID NO: 2586574 - RNA, 19 nt, Artificial Sequence
  Description of Artificial Sequence: Synthetic oligonucleotide
caaguuacccuuggcugcu

SEQ ID NO: 2586575 - RNA, 19 nt, Artificial Sequence
  Description of Artificial Sequence: Synthetic oligonucleotide
cauuucgcagucccaggau

SEQ ID NO: 2586576 - RNA, 19 nt, Artificial Sequence
  Description of Artificial Sequence: Synthetic oligonucleotide
cagcaagaauucaacuauu

SEQ ID NO: 2586577 - RNA, 19 nt, Artificial Sequence
  Description of Artificial Sequence: Synthetic oligonucleotide
cagugcaaugcuguucugu

SEQ ID NO: 2586578 - RNA, 19 nt, Artificial Sequence
  Description of Artificial Sequence: Synthetic oligonucleotide
gucuuggauguuuguggau

SEQ ID NO: 2586579 - RNA, 19 nt, Artificial Sequence
  Description of Artificial Sequence: Synthetic oligonucleotide
gaggaguguuacccucagu

SEQ ID NO: 2586580 - RNA, 19 nt, Artificial Sequence
  Description of Artificial Sequence: Synthetic oligonucleotide
cucagugucuuggauguuu

SEQ ID NO: 2586581 - RNA, 19 nt, Artificial Sequence
  Description of Artificial Sequence: Synthetic oligonucleotide
gggucaccaguaacuuugc

SEQ ID NO: 2586582 - RNA, 19 nt, Artificial Sequence
  Description of Artificial Sequence: Synthetic oligonucleotide
cccagugcaaugcuguucu

SEQ ID NO: 2586583 - RNA, 19 nt, Artificial Sequence
  Description of Artificial Sequence: Synthetic oligonucleotide
cgcagucccaggaucucag

SEQ ID NO: 2586584 - RNA, 19 nt, Artificial Sequence
  Description of Artificial Sequence: Synthetic oligonucleotide
cuugggucaccaguaacuu

SEQ ID NO: 2586585 - RNA, 19 nt, Artificial Sequence
  Description of Artificial Sequence: Synthetic oligonucleotide
ucccgguguaggccagguu

SEQ ID NO: 2586586 - RNA, 19 nt, Artificial Sequence
  Description of Artificial Sequence: Synthetic oligonucleotide
guuguccugaucgguucua

SEQ ID NO: 2586587 - RNA, 19 nt, Artificial Sequence
  Description of Artificial Sequence: Synthetic oligonucleotide
cugcccggugcauugcugu

SEQ ID NO: 2586588 - RNA, 19 nt, Artificial Sequence
  Description of Artificial Sequence: Synthetic oligonucleotide
ggauguuuguggaugcuuu

SEQ ID NO: 2586589 - RNA, 19 nt, Artificial Sequence
  Description of Artificial Sequence: Synthetic oligonucleotide
caccaguaacuuugcuucu

SEQ ID NO: 2586590 - RNA, 19 nt, Artificial Sequence
  Description of Artificial Sequence: Synthetic oligonucleotide
ugcagccauuuugguugac

SEQ ID NO: 2586591 - RNA, 19 nt, Artificial Sequence
  Description of Artificial Sequence: Synthetic oligonucleotide
gagaggugugcagccauuu

SEQ ID NO: 2586592 - RNA, 19 nt, Artificial Sequence
  Description of Artificial Sequence: Synthetic oligonucleotide
uagccucauaaugguccuu

SEQ ID NO: 2586593 - RNA, 19 nt, Artificial Sequence
  Description of Artificial Sequence: Synthetic oligonucleotide
gcccggugcauugcuguag

SEQ ID NO: 2586594 - RNA, 19 nt, Artificial Sequence
  Description of Artificial Sequence: Synthetic oligonucleotide
cugcugcccggugcauugc

SEQ ID NO: 2586595 - RNA, 19 nt, Artificial Sequence
  Description of Artificial Sequence: Synthetic oligonucleotide
ccagaguucuaucggccaa

SEQ ID NO: 2586596 - RNA, 19 nt, Artificial Sequence
  Description of Artificial Sequence: Synthetic oligonucleotide
ccggugcauugcuguagcc

SEQ ID NO: 2586597 - RNA, 19 nt, Artificial Sequence
  Description of Artificial Sequence: Synthetic oligonucleotide
cagugucuuggauguuugu

SEQ ID NO: 2586598 - RNA, 19 nt, Artificial Sequence
  Description of Artificial Sequence: Synthetic oligonucleotide
gcuaaguguagaggagugu

SEQ ID NO: 2586599 - RNA, 19 nt, Artificial Sequence
  Description of Artificial Sequence: Synthetic oligonucleotide
ggucaccaguaacuuugcu

SEQ ID NO: 2586600 - RNA, 19 nt, Artificial Sequence
  Description of Artificial Sequence: Synthetic oligonucleotide
ccagugcaaugcuguucug

SEQ ID NO: 2586601 - RNA, 19 nt, Artificial Sequence
  Description of Artificial Sequence: Synthetic oligonucleotide
gcugcccggugcauugcug

SEQ ID NO: 2586602 - RNA, 19 nt, Artificial Sequence
  Description of Artificial Sequence: Synthetic oligonucleotide
ccuccauuucgcaguccca

SEQ ID NO: 2586603 - RNA, 19 nt, Artificial Sequence
  Description of Artificial Sequence: Synthetic oligonucleotide
cuuuuaccagaagggcuuu

SEQ ID NO: 2586604 - RNA, 19 nt, Artificial Sequence
  Description of Artificial Sequence: Synthetic oligonucleotide
gccagguugcagaccauua

SEQ ID NO: 2586605 - RNA, 19 nt, Artificial Sequence
  Description of Artificial Sequence: Synthetic oligonucleotide
ggguuugccccaccuucua

SEQ ID NO: 2586606 - RNA, 19 nt, Artificial Sequence
  Description of Artificial Sequence: Synthetic oligonucleotide
ccauuagguuagacacaca

SEQ ID NO: 2586607 - RNA, 19 nt, Artificial Sequence
  Description of Artificial Sequence: Synthetic oligonucleotide
gcuguucuguuguccugau

SEQ ID NO: 2586608 - RNA, 19 nt, Artificial Sequence
  Description of Artificial Sequence: Synthetic oligonucleotide
ggccaccuuuggccacuug

SEQ ID NO: 2586609 - RNA, 19 nt, Artificial Sequence
  Description of Artificial Sequence: Synthetic oligonucleotide
cgcaucuggguuugcccca

SEQ ID NO: 2586610 - RNA, 19 nt, Artificial Sequence
  Description of Artificial Sequence: Synthetic oligonucleotide
gccccaccuucuaguaaca

SEQ ID NO: 2586611 - RNA, 19 nt, Artificial Sequence
  Description of Artificial Sequence: Synthetic oligonucleotide
aggccagguugcagaccau

SEQ ID NO: 2586612 - RNA, 19 nt, Artificial Sequence
  Description of Artificial Sequence: Synthetic oligonucleotide
ccuucgcaucuggguuugc

SEQ ID NO: 2586613 - RNA, 19 nt, Artificial Sequence
  Description of Artificial Sequence: Synthetic oligonucleotide
ggccagguugcagaccauu

SEQ ID NO: 2586614 - RNA, 19 nt, Artificial Sequence
  Description of Artificial Sequence: Synthetic oligonucleotide
ggagaggugugcagccauu

SEQ ID NO: 2586615 - RNA, 19 nt, Artificial Sequence
  Description of Artificial Sequence: Synthetic oligonucleotide
ccccuccauuucgcagucc

SEQ ID NO: 2586616 - RNA, 19 nt, Artificial Sequence
  Description of Artificial Sequence: Synthetic oligonucleotide
cacuugcaggggugucuuu

SEQ ID NO: 2586617 - RNA, 19 nt, Artificial Sequence
  Description of Artificial Sequence: Synthetic oligonucleotide
cagcaaucucaugccuauu

SEQ ID NO: 2586618 - RNA, 19 nt, Artificial Sequence
  Description of Artificial Sequence: Synthetic oligonucleotide
cggccaaaaugcuuuccuu

SEQ ID NO: 2586619 - RNA, 19 nt, Artificial Sequence
  Description of Artificial Sequence: Synthetic oligonucleotide
ggagaccagccugcaucau

SEQ ID NO: 2586620 - RNA, 19 nt, Artificial Sequence
  Description of Artificial Sequence: Synthetic oligonucleotide
cgguguaggccagguugca

SEQ ID NO: 2586621 - RNA, 19 nt, Artificial Sequence
  Description of Artificial Sequence: Synthetic oligonucleotide
cgguucuaguagccagagu

SEQ ID NO: 2586622 - RNA, 19 nt, Artificial Sequence
  Description of Artificial Sequence: Synthetic oligonucleotide
ccccaccuucuaguaacau

SEQ ID NO: 2586623 - RNA, 19 nt, Artificial Sequence
  Description of Artificial Sequence: Synthetic oligonucleotide
cccuuggcugcugcccggu

SEQ ID NO: 2586624 - RNA, 19 nt, Artificial Sequence
  Description of Artificial Sequence: Synthetic oligonucleotide
ccucagugucuuggauguu

SEQ ID NO: 2586625 - RNA, 19 nt, Artificial Sequence
  Description of Artificial Sequence: Synthetic oligonucleotide
aauaauaauauguacagca

SEQ ID NO: 2586626 - RNA, 19 nt, Artificial Sequence
  Description of Artificial Sequence: Synthetic oligonucleotide
uuaauaauaauaauaauaa

SEQ ID NO: 2586627 - RNA, 19 nt, Artificial Sequence
  Description of Artificial Sequence: Synthetic oligonucleotide
aguaaaauagucaagauuc

SEQ ID NO: 2586628 - RNA, 19 nt, Artificial Sequence
  Description of Artificial Sequence: Synthetic oligonucleotide
uaaaacuuuagacauagag

SEQ ID NO: 2586629 - RNA, 19 nt, Artificial Sequence
  Description of Artificial Sequence: Synthetic oligonucleotide
aaacuuuagacauagagaa

SEQ ID NO: 2586630 - RNA, 19 nt, Artificial Sequence
  Description of Artificial Sequence: Synthetic oligonucleotide
auguacagcaauuagauuc

SEQ ID NO: 2586631 - RNA, 19 nt, Artificial Sequence
  Description of Artificial Sequence: Synthetic oligonucleotide
aaacaagcuacacaggugg

SEQ ID NO: 2586632 - RNA, 19 nt, Artificial Sequence
  Description of Artificial Sequence: Synthetic oligonucleotide
auaauaauaauauguacag

SEQ ID NO: 2586633 - RNA, 19 nt, Artificial Sequence
  Description of Artificial Sequence: Synthetic oligonucleotide
uauuaguuaauaauuuggg

SEQ ID NO: 2586634 - RNA, 19 nt, Artificial Sequence
  Description of Artificial Sequence: Synthetic oligonucleotide
agcaauuagauucugcacc

SEQ ID NO: 2586635 - RNA, 19 nt, Artificial Sequence
  Description of Artificial Sequence: Synthetic oligonucleotide
aauaauaauaauauguaca

SEQ ID NO: 2586636 - RNA, 19 nt, Artificial Sequence
  Description of Artificial Sequence: Synthetic oligonucleotide
aauaauaauaauaauaaua

SEQ ID NO: 2586637 - RNA, 19 nt, Artificial Sequence
  Description of Artificial Sequence: Synthetic oligonucleotide
aaaguuacaaggguguacc

SEQ ID NO: 2586638 - RNA, 19 nt, Artificial Sequence
  Description of Artificial Sequence: Synthetic oligonucleotide
uuaguuaauaauuugggac

SEQ ID NO: 2586639 - RNA, 19 nt, Artificial Sequence
  Description of Artificial Sequence: Synthetic oligonucleotide
aauaauuugggacauguaa

SEQ ID NO: 2586640 - RNA, 19 nt, Artificial Sequence
  Description of Artificial Sequence: Synthetic oligonucleotide
aaagcaucggguuuacagc

SEQ ID NO: 2586641 - RNA, 19 nt, Artificial Sequence
  Description of Artificial Sequence: Synthetic oligonucleotide
aguauguuuggacagugcc

SEQ ID NO: 2586642 - RNA, 19 nt, Artificial Sequence
  Description of Artificial Sequence: Synthetic oligonucleotide
aauaaguuaacauucucaa

SEQ ID NO: 2586643 - RNA, 19 nt, Artificial Sequence
  Description of Artificial Sequence: Synthetic oligonucleotide
aacguuugauuucaguugg

SEQ ID NO: 2586644 - RNA, 19 nt, Artificial Sequence
  Description of Artificial Sequence: Synthetic oligonucleotide
uaaguuaacauucucaaua

SEQ ID NO: 2586645 - RNA, 19 nt, Artificial Sequence
  Description of Artificial Sequence: Synthetic oligonucleotide
aaauaguauguuuggacag

SEQ ID NO: 2586646 - RNA, 19 nt, Artificial Sequence
  Description of Artificial Sequence: Synthetic oligonucleotide
uguauuaaagguaaauagu

SEQ ID NO: 2586647 - RNA, 19 nt, Artificial Sequence
  Description of Artificial Sequence: Synthetic oligonucleotide
uuaaagguaaauaguaugu

SEQ ID NO: 2586648 - RNA, 19 nt, Artificial Sequence
  Description of Artificial Sequence: Synthetic oligonucleotide
uacagaacaauaauaauaa

SEQ ID NO: 2586649 - RNA, 19 nt, Artificial Sequence
  Description of Artificial Sequence: Synthetic oligonucleotide
auuaaagguaaauaguaug

SEQ ID NO: 2586650 - RNA, 19 nt, Artificial Sequence
  Description of Artificial Sequence: Synthetic oligonucleotide
uuugggacauguaaaaugc

SEQ ID NO: 2586651 - RNA, 19 nt, Artificial Sequence
  Description of Artificial Sequence: Synthetic oligonucleotide
uuuguuauuaguuaauaau

SEQ ID NO: 2586652 - RNA, 19 nt, Artificial Sequence
  Description of Artificial Sequence: Synthetic oligonucleotide
aagacaauaaguuaacauu

SEQ ID NO: 2586653 - RNA, 19 nt, Artificial Sequence
  Description of Artificial Sequence: Synthetic oligonucleotide
aaagacaauaaguuaacau

SEQ ID NO: 2586654 - RNA, 19 nt, Artificial Sequence
  Description of Artificial Sequence: Synthetic oligonucleotide
guguauuaaagguaaauag

SEQ ID NO: 2586655 - RNA, 19 nt, Artificial Sequence
  Description of Artificial Sequence: Synthetic oligonucleotide
aagcaucggguuuacagcc

SEQ ID NO: 2586656 - RNA, 19 nt, Artificial Sequence
  Description of Artificial Sequence: Synthetic oligonucleotide
auaauaauaauaauaauaa

SEQ ID NO: 2586657 - RNA, 19 nt, Artificial Sequence
  Description of Artificial Sequence: Synthetic oligonucleotide
auaauaauaauaauaauau

SEQ ID NO: 2586658 - RNA, 19 nt, Artificial Sequence
  Description of Artificial Sequence: Synthetic oligonucleotide
aaucauucugcuuccauug

SEQ ID NO: 2586659 - RNA, 19 nt, Artificial Sequence
  Description of Artificial Sequence: Synthetic oligonucleotide
uaaauaguauguuuggaca

SEQ ID NO: 2586660 - RNA, 19 nt, Artificial Sequence
  Description of Artificial Sequence: Synthetic oligonucleotide
ucucauuucacaaagcauc

SEQ ID NO: 2586661 - RNA, 19 nt, Artificial Sequence
  Description of Artificial Sequence: Synthetic oligonucleotide
aaaaugcaaaucauucugc

SEQ ID NO: 2586662 - RNA, 19 nt, Artificial Sequence
  Description of Artificial Sequence: Synthetic oligonucleotide
aacagaacgaggcuaagcu

SEQ ID NO: 2586663 - RNA, 19 nt, Artificial Sequence
  Description of Artificial Sequence: Synthetic oligonucleotide
auuaauaauaauaauaaua

SEQ ID NO: 2586664 - RNA, 19 nt, Artificial Sequence
  Description of Artificial Sequence: Synthetic oligonucleotide
uuugauuucaguuggucac

SEQ ID NO: 2586665 - RNA, 19 nt, Artificial Sequence
  Description of Artificial Sequence: Synthetic oligonucleotide
aacgaggcuaagcuugugc

SEQ ID NO: 2586666 - RNA, 19 nt, Artificial Sequence
  Description of Artificial Sequence: Synthetic oligonucleotide
uaguuaauaauuugggaca

SEQ ID NO: 2586667 - RNA, 19 nt, Artificial Sequence
  Description of Artificial Sequence: Synthetic oligonucleotide
uaauaauaauaauaauaug

SEQ ID NO: 2586668 - RNA, 19 nt, Artificial Sequence
  Description of Artificial Sequence: Synthetic oligonucleotide
aaaacuuuagacauagaga

SEQ ID NO: 2586669 - RNA, 19 nt, Artificial Sequence
  Description of Artificial Sequence: Synthetic oligonucleotide
aaaaguuacaaggguguac

SEQ ID NO: 2586670 - RNA, 19 nt, Artificial Sequence
  Description of Artificial Sequence: Synthetic oligonucleotide
aaaauagucaagauucuca

SEQ ID NO: 2586671 - RNA, 19 nt, Artificial Sequence
  Description of Artificial Sequence: Synthetic oligonucleotide
auuugggacauguaaaaug

SEQ ID NO: 2586672 - RNA, 19 nt, Artificial Sequence
  Description of Artificial Sequence: Synthetic oligonucleotide
acuaaaacuuuagacauag

SEQ ID NO: 2586673 - RNA, 19 nt, Artificial Sequence
  Description of Artificial Sequence: Synthetic oligonucleotide
aaguaaaauagucaagauu

SEQ ID NO: 2586674 - RNA, 19 nt, Artificial Sequence
  Description of Artificial Sequence: Synthetic oligonucleotide
uuguuauuaguuaauaauu

SEQ ID NO: 2586675 - RNA, 19 nt, Artificial Sequence
  Description of Artificial Sequence: Synthetic oligonucleotide
ucacaaguaaaauagucaa

SEQ ID NO: 2586676 - RNA, 19 nt, Artificial Sequence
  Description of Artificial Sequence: Synthetic oligonucleotide
auagucaagauucucauuu

SEQ ID NO: 2586677 - RNA, 19 nt, Artificial Sequence
  Description of Artificial Sequence: Synthetic oligonucleotide
guaaauaguauguuuggac

SEQ ID NO: 2586678 - RNA, 19 nt, Artificial Sequence
  Description of Artificial Sequence: Synthetic oligonucleotide
uguuauuaguuaauaauuu

SEQ ID NO: 2586679 - RNA, 19 nt, Artificial Sequence
  Description of Artificial Sequence: Synthetic oligonucleotide
aaauagucaagauucucau

SEQ ID NO: 2586680 - RNA, 19 nt, Artificial Sequence
  Description of Artificial Sequence: Synthetic oligonucleotide
aaaugcaaaucauucugcu

SEQ ID NO: 2586681 - RNA, 19 nt, Artificial Sequence
  Description of Artificial Sequence: Synthetic oligonucleotide
caaagcaucggguuuacag

SEQ ID NO: 2586682 - RNA, 19 nt, Artificial Sequence
  Description of Artificial Sequence: Synthetic oligonucleotide
uuaacauucucaauauaaa

SEQ ID NO: 2586683 - RNA, 19 nt, Artificial Sequence
  Description of Artificial Sequence: Synthetic oligonucleotide
aaagguaaauaguauguuu

SEQ ID NO: 2586684 - RNA, 19 nt, Artificial Sequence
  Description of Artificial Sequence: Synthetic oligonucleotide
uuaauaauuugggacaugu

SEQ ID NO: 2586685 - RNA, 19 nt, Artificial Sequence
  Description of Artificial Sequence: Synthetic oligonucleotide
auuaguuaauaauuuggga

SEQ ID NO: 2586686 - RNA, 19 nt, Artificial Sequence
  Description of Artificial Sequence: Synthetic oligonucleotide
aacacucagcaucagauaa

SEQ ID NO: 2586687 - RNA, 19 nt, Artificial Sequence
  Description of Artificial Sequence: Synthetic oligonucleotide
uuuguuuguuauuaguuaa

SEQ ID NO: 2586688 - RNA, 19 nt, Artificial Sequence
  Description of Artificial Sequence: Synthetic oligonucleotide
uccagcaaagcacaaaagu

SEQ ID NO: 2586689 - RNA, 19 nt, Artificial Sequence
  Description of Artificial Sequence: Synthetic oligonucleotide
acaaguaaaauagucaaga

SEQ ID NO: 2586690 - RNA, 19 nt, Artificial Sequence
  Description of Artificial Sequence: Synthetic oligonucleotide
acuuuagacauagagaaca

SEQ ID NO: 2586691 - RNA, 19 nt, Artificial Sequence
  Description of Artificial Sequence: Synthetic oligonucleotide
aauuggccaacacucagca

SEQ ID NO: 2586692 - RNA, 19 nt, Artificial Sequence
  Description of Artificial Sequence: Synthetic oligonucleotide
agggugaugacuuggguuc

SEQ ID NO: 2586693 - RNA, 19 nt, Artificial Sequence
  Description of Artificial Sequence: Synthetic oligonucleotide
uguuuacagaacaauaaua

SEQ ID NO: 2586694 - RNA, 19 nt, Artificial Sequence
  Description of Artificial Sequence: Synthetic oligonucleotide
uagauucugcaccagagac

SEQ ID NO: 2586695 - RNA, 19 nt, Artificial Sequence
  Description of Artificial Sequence: Synthetic oligonucleotide
acaauaaguuaacauucuc

SEQ ID NO: 2586696 - RNA, 19 nt, Artificial Sequence
  Description of Artificial Sequence: Synthetic oligonucleotide
ucaagauucucauuucaca

SEQ ID NO: 2586697 - RNA, 19 nt, Artificial Sequence
  Description of Artificial Sequence: Synthetic oligonucleotide
agguaaauaguauguuugg

SEQ ID NO: 2586698 - RNA, 19 nt, Artificial Sequence
  Description of Artificial Sequence: Synthetic oligonucleotide
auucucauuucacaaagca

SEQ ID NO: 2586699 - RNA, 19 nt, Artificial Sequence
  Description of Artificial Sequence: Synthetic oligonucleotide
aauuagauucugcaccaga

SEQ ID NO: 2586700 - RNA, 19 nt, Artificial Sequence
  Description of Artificial Sequence: Synthetic oligonucleotide
acagcaauuagauucugca

SEQ ID NO: 2586701 - RNA, 19 nt, Artificial Sequence
  Description of Artificial Sequence: Synthetic oligonucleotide
cucauuucacaaagcaucg

SEQ ID NO: 2586702 - RNA, 19 nt, Artificial Sequence
  Description of Artificial Sequence: Synthetic oligonucleotide
uuggccaacacucagcauc

SEQ ID NO: 2586703 - RNA, 19 nt, Artificial Sequence
  Description of Artificial Sequence: Synthetic oligonucleotide
gcuucuugaacuuggagcg

SEQ ID NO: 2586704 - RNA, 19 nt, Artificial Sequence
  Description of Artificial Sequence: Synthetic oligonucleotide
uguacagcaauuagauucu

SEQ ID NO: 2586705 - RNA, 19 nt, Artificial Sequence
  Description of Artificial Sequence: Synthetic oligonucleotide
aauaauauguacagcaauu

SEQ ID NO: 2586706 - RNA, 19 nt, Artificial Sequence
  Description of Artificial Sequence: Synthetic oligonucleotide
uaauaauaauaauaauaau

SEQ ID NO: 2586707 - RNA, 19 nt, Artificial Sequence
  Description of Artificial Sequence: Synthetic oligonucleotide
cuggaauuggccaacacuc

SEQ ID NO: 2586708 - RNA, 19 nt, Artificial Sequence
  Description of Artificial Sequence: Synthetic oligonucleotide
cugauuuuccccauuuccc

SEQ ID NO: 2586709 - RNA, 19 nt, Artificial Sequence
  Description of Artificial Sequence: Synthetic oligonucleotide
auuucaguuggucacauuu

SEQ ID NO: 2586710 - RNA, 19 nt, Artificial Sequence
  Description of Artificial Sequence: Synthetic oligonucleotide
ugugcguucagggugauga

SEQ ID NO: 2586711 - RNA, 19 nt, Artificial Sequence
  Description of Artificial Sequence: Synthetic oligonucleotide
accugagucugugugaucc

SEQ ID NO: 2586712 - RNA, 19 nt, Artificial Sequence
  Description of Artificial Sequence: Synthetic oligonucleotide
agacauagagaacacaaaa

SEQ ID NO: 2586713 - RNA, 19 nt, Artificial Sequence
  Description of Artificial Sequence: Synthetic oligonucleotide
uaauuugggacauguaaaa

SEQ ID NO: 2586714 - RNA, 19 nt, Artificial Sequence
  Description of Artificial Sequence: Synthetic oligonucleotide
uauguuuggacagugccca

SEQ ID NO: 2586715 - RNA, 19 nt, Artificial Sequence
  Description of Artificial Sequence: Synthetic oligonucleotide
agcacaaaaguuacaaggg

SEQ ID NO: 2586716 - RNA, 19 nt, Artificial Sequence
  Description of Artificial Sequence: Synthetic oligonucleotide
aaaucauucugcuuccauu

SEQ ID NO: 2586717 - RNA, 19 nt, Artificial Sequence
  Description of Artificial Sequence: Synthetic oligonucleotide
ugugcaacauguuuacaga

SEQ ID NO: 2586718 - RNA, 19 nt, Artificial Sequence
  Description of Artificial Sequence: Synthetic oligonucleotide
caauaaguuaacauucuca

SEQ ID NO: 2586719 - RNA, 19 nt, Artificial Sequence
  Description of Artificial Sequence: Synthetic oligonucleotide
aacgauacaaagacaauaa

SEQ ID NO: 2586720 - RNA, 19 nt, Artificial Sequence
  Description of Artificial Sequence: Synthetic oligonucleotide
acaacguuugauuucaguu

SEQ ID NO: 2586721 - RNA, 19 nt, Artificial Sequence
  Description of Artificial Sequence: Synthetic oligonucleotide
aacuuggagcguuuguucu

SEQ ID NO: 2586722 - RNA, 19 nt, Artificial Sequence
  Description of Artificial Sequence: Synthetic oligonucleotide
caacguuugauuucaguug

SEQ ID NO: 2586723 - RNA, 19 nt, Artificial Sequence
  Description of Artificial Sequence: Synthetic oligonucleotide
agcaaagcacaaaaguuac

SEQ ID NO: 2586724 - RNA, 19 nt, Artificial Sequence
  Description of Artificial Sequence: Synthetic oligonucleotide
ugauuuuccccauuuccca

SEQ ID NO: 2586725 - RNA, 19 nt, Artificial Sequence
  Description of Artificial Sequence: Synthetic oligonucleotide
aucagauaaagucuguuuu

SEQ ID NO: 2586726 - RNA, 19 nt, Artificial Sequence
  Description of Artificial Sequence: Synthetic oligonucleotide
uuagauucugcaccagaga

SEQ ID NO: 2586727 - RNA, 19 nt, Artificial Sequence
  Description of Artificial Sequence: Synthetic oligonucleotide
uccauuccagcaaagcaca

SEQ ID NO: 2586728 - RNA, 19 nt, Artificial Sequence
  Description of Artificial Sequence: Synthetic oligonucleotide
aagauucucauuucacaaa

SEQ ID NO: 2586729 - RNA, 19 nt, Artificial Sequence
  Description of Artificial Sequence: Synthetic oligonucleotide
aacaacguuugauuucagu

SEQ ID NO: 2586730 - RNA, 19 nt, Artificial Sequence
  Description of Artificial Sequence: Synthetic oligonucleotide
aacacaaaacaacguuuga

SEQ ID NO: 2586731 - RNA, 19 nt, Artificial Sequence
  Description of Artificial Sequence: Synthetic oligonucleotide
cagaacgaggcuaagcuug

SEQ ID NO: 2586732 - RNA, 19 nt, Artificial Sequence
  Description of Artificial Sequence: Synthetic oligonucleotide
acaaagacaauaaguuaac

SEQ ID NO: 2586733 - RNA, 19 nt, Artificial Sequence
  Description of Artificial Sequence: Synthetic oligonucleotide
aucauucugcuuccauugc

SEQ ID NO: 2586734 - RNA, 19 nt, Artificial Sequence
  Description of Artificial Sequence: Synthetic oligonucleotide
auuagauucugcaccagag

SEQ ID NO: 2586735 - RNA, 19 nt, Artificial Sequence
  Description of Artificial Sequence: Synthetic oligonucleotide
gacauagagaacacaaaac

SEQ ID NO: 2586736 - RNA, 19 nt, Artificial Sequence
  Description of Artificial Sequence: Synthetic oligonucleotide
acaaaacaacguuugauuu

SEQ ID NO: 2586737 - RNA, 19 nt, Artificial Sequence
  Description of Artificial Sequence: Synthetic oligonucleotide
cuccauuccagcaaagcac

SEQ ID NO: 2586738 - RNA, 19 nt, Artificial Sequence
  Description of Artificial Sequence: Synthetic oligonucleotide
ucaguuggucacauuuucc

SEQ ID NO: 2586739 - RNA, 19 nt, Artificial Sequence
  Description of Artificial Sequence: Synthetic oligonucleotide
aacuuuagacauagagaac

SEQ ID NO: 2586740 - RNA, 19 nt, Artificial Sequence
  Description of Artificial Sequence: Synthetic oligonucleotide
uucccaaacaagcuacaca

SEQ ID NO: 2586741 - RNA, 19 nt, Artificial Sequence
  Description of Artificial Sequence: Synthetic oligonucleotide
aauaguauguuuggacagu

SEQ ID NO: 2586742 - RNA, 19 nt, Artificial Sequence
  Description of Artificial Sequence: Synthetic oligonucleotide
accgccuugcuucaucagc

SEQ ID NO: 2586743 - RNA, 19 nt, Artificial Sequence
  Description of Artificial Sequence: Synthetic oligonucleotide
cacauuuuccaaauuucac

SEQ ID NO: 2586744 - RNA, 19 nt, Artificial Sequence
  Description of Artificial Sequence: Synthetic oligonucleotide
ugcaacauguuuacagaac

SEQ ID NO: 2586745 - RNA, 19 nt, Artificial Sequence
  Description of Artificial Sequence: Synthetic oligonucleotide
caaaacaacguuugauuuc

SEQ ID NO: 2586746 - RNA, 19 nt, Artificial Sequence
  Description of Artificial Sequence: Synthetic oligonucleotide
acgauacaaagacaauaag

SEQ ID NO: 2586747 - RNA, 19 nt, Artificial Sequence
  Description of Artificial Sequence: Synthetic oligonucleotide
gagcguuuguucuggaacc

SEQ ID NO: 2586748 - RNA, 19 nt, Artificial Sequence
  Description of Artificial Sequence: Synthetic oligonucleotide
aaugcaaaucauucugcuu

SEQ ID NO: 2586749 - RNA, 19 nt, Artificial Sequence
  Description of Artificial Sequence: Synthetic oligonucleotide
auguuuacagaacaauaau

SEQ ID NO: 2586750 - RNA, 19 nt, Artificial Sequence
  Description of Artificial Sequence: Synthetic oligonucleotide
uucaguuggucacauuuuc

SEQ ID NO: 2586751 - RNA, 19 nt, Artificial Sequence
  Description of Artificial Sequence: Synthetic oligonucleotide
ugggacauguaaaaugcaa

SEQ ID NO: 2586752 - RNA, 19 nt, Artificial Sequence
  Description of Artificial Sequence: Synthetic oligonucleotide
cacaaguaaaauagucaag

SEQ ID NO: 2586753 - RNA, 19 nt, Artificial Sequence
  Description of Artificial Sequence: Synthetic oligonucleotide
uacagcaauuagauucugc

SEQ ID NO: 2586754 - RNA, 19 nt, Artificial Sequence
  Description of Artificial Sequence: Synthetic oligonucleotide
uuccauugcuccauuccag

SEQ ID NO: 2586755 - RNA, 19 nt, Artificial Sequence
  Description of Artificial Sequence: Synthetic oligonucleotide
uucucauuucacaaagcau

SEQ ID NO: 2586756 - RNA, 19 nt, Artificial Sequence
  Description of Artificial Sequence: Synthetic oligonucleotide
auacaaagacaauaaguua

SEQ ID NO: 2586757 - RNA, 19 nt, Artificial Sequence
  Description of Artificial Sequence: Synthetic oligonucleotide
cuugaccugagucugugug

SEQ ID NO: 2586758 - RNA, 19 nt, Artificial Sequence
  Description of Artificial Sequence: Synthetic oligonucleotide
agacugugcguucagggug

SEQ ID NO: 2586759 - RNA, 19 nt, Artificial Sequence
  Description of Artificial Sequence: Synthetic oligonucleotide
uccccauuucccaaacaag

SEQ ID NO: 2586760 - RNA, 19 nt, Artificial Sequence
  Description of Artificial Sequence: Synthetic oligonucleotide
cauagagaacacaaaacaa

SEQ ID NO: 2586761 - RNA, 19 nt, Artificial Sequence
  Description of Artificial Sequence: Synthetic oligonucleotide
uuggacagugcccacucca

SEQ ID NO: 2586762 - RNA, 19 nt, Artificial Sequence
  Description of Artificial Sequence: Synthetic oligonucleotide
ggaagaaccgccuugcuuc

SEQ ID NO: 2586763 - RNA, 19 nt, Artificial Sequence
  Description of Artificial Sequence: Synthetic oligonucleotide
cuuuagacauagagaacac

SEQ ID NO: 2586764 - RNA, 19 nt, Artificial Sequence
  Description of Artificial Sequence: Synthetic oligonucleotide
uagacauagagaacacaaa

SEQ ID NO: 2586765 - RNA, 19 nt, Artificial Sequence
  Description of Artificial Sequence: Synthetic oligonucleotide
aauagucaagauucucauu

SEQ ID NO: 2586766 - RNA, 19 nt, Artificial Sequence
  Description of Artificial Sequence: Synthetic oligonucleotide
uuucacaaagcaucggguu

SEQ ID NO: 2586767 - RNA, 19 nt, Artificial Sequence
  Description of Artificial Sequence: Synthetic oligonucleotide
uuccagcaaagcacaaaag

SEQ ID NO: 2586768 - RNA, 19 nt, Artificial Sequence
  Description of Artificial Sequence: Synthetic oligonucleotide
auaauuugggacauguaaa

SEQ ID NO: 2586769 - RNA, 19 nt, Artificial Sequence
  Description of Artificial Sequence: Synthetic oligonucleotide
acaaggguguaccuuaaaa

SEQ ID NO: 2586770 - RNA, 19 nt, Artificial Sequence
  Description of Artificial Sequence: Synthetic oligonucleotide
gacauguaaaaugcaaauc

SEQ ID NO: 2586771 - RNA, 19 nt, Artificial Sequence
  Description of Artificial Sequence: Synthetic oligonucleotide
aagcuugugcaacauguuu

SEQ ID NO: 2586772 - RNA, 19 nt, Artificial Sequence
  Description of Artificial Sequence: Synthetic oligonucleotide
cagagaaccuggaauuggc

SEQ ID NO: 2586773 - RNA, 19 nt, Artificial Sequence
  Description of Artificial Sequence: Synthetic oligonucleotide
uuguuuguuauuaguuaau

SEQ ID NO: 2586774 - RNA, 19 nt, Artificial Sequence
  Description of Artificial Sequence: Synthetic oligonucleotide
accacuauccccuccuugu

SEQ ID NO: 2586775 - RNA, 19 nt, Artificial Sequence
  Description of Artificial Sequence: Synthetic oligonucleotide
uucacaaagcaucggguuu

SEQ ID NO: 2586776 - RNA, 19 nt, Artificial Sequence
  Description of Artificial Sequence: Synthetic oligonucleotide
auaaguuaacauucucaau

SEQ ID NO: 2586777 - RNA, 19 nt, Artificial Sequence
  Description of Artificial Sequence: Synthetic oligonucleotide
uccauugcuccauuccagc

SEQ ID NO: 2586778 - RNA, 19 nt, Artificial Sequence
  Description of Artificial Sequence: Synthetic oligonucleotide
acuauccccuccuuguucu

SEQ ID NO: 2586779 - RNA, 19 nt, Artificial Sequence
  Description of Artificial Sequence: Synthetic oligonucleotide
aauuugggacauguaaaau

SEQ ID NO: 2586780 - RNA, 19 nt, Artificial Sequence
  Description of Artificial Sequence: Synthetic oligonucleotide
uguuuguuauuaguuaaua

SEQ ID NO: 2586781 - RNA, 19 nt, Artificial Sequence
  Description of Artificial Sequence: Synthetic oligonucleotide
acacacaacagaacagaac

SEQ ID NO: 2586782 - RNA, 19 nt, Artificial Sequence
  Description of Artificial Sequence: Synthetic oligonucleotide
ucauuucacaaagcaucgg

SEQ ID NO: 2586783 - RNA, 19 nt, Artificial Sequence
  Description of Artificial Sequence: Synthetic oligonucleotide
aaccacuauccccuccuug

SEQ ID NO: 2586784 - RNA, 19 nt, Artificial Sequence
  Description of Artificial Sequence: Synthetic oligonucleotide
uaguauguuuggacagugc

SEQ ID NO: 2586785 - RNA, 19 nt, Artificial Sequence
  Description of Artificial Sequence: Synthetic oligonucleotide
aucggguuuacagccacac

SEQ ID NO: 2586786 - RNA, 19 nt, Artificial Sequence
  Description of Artificial Sequence: Synthetic oligonucleotide
gaacuuggagcguuuguuc

SEQ ID NO: 2586787 - RNA, 19 nt, Artificial Sequence
  Description of Artificial Sequence: Synthetic oligonucleotide
uggaauuggccaacacuca

SEQ ID NO: 2586788 - RNA, 19 nt, Artificial Sequence
  Description of Artificial Sequence: Synthetic oligonucleotide
agagaaccuggaauuggcc

SEQ ID NO: 2586789 - RNA, 19 nt, Artificial Sequence
  Description of Artificial Sequence: Synthetic oligonucleotide
cuaagcuugugcaacaugu

SEQ ID NO: 2586790 - RNA, 19 nt, Artificial Sequence
  Description of Artificial Sequence: Synthetic oligonucleotide
auucucaauauaaaacuaa

SEQ ID NO: 2586791 - RNA, 19 nt, Artificial Sequence
  Description of Artificial Sequence: Synthetic oligonucleotide
guuacaaggguguaccuua

SEQ ID NO: 2586792 - RNA, 19 nt, Artificial Sequence
  Description of Artificial Sequence: Synthetic oligonucleotide
uuggucacauuuuccaaau

SEQ ID NO: 2586793 - RNA, 19 nt, Artificial Sequence
  Description of Artificial Sequence: Synthetic oligonucleotide
auaauaauauguacagcaa

SEQ ID NO: 2586794 - RNA, 19 nt, Artificial Sequence
  Description of Artificial Sequence: Synthetic oligonucleotide
uaaagguaaauaguauguu

SEQ ID NO: 2586795 - RNA, 19 nt, Artificial Sequence
  Description of Artificial Sequence: Synthetic oligonucleotide
auaguauguuuggacagug

SEQ ID NO: 2586796 - RNA, 19 nt, Artificial Sequence
  Description of Artificial Sequence: Synthetic oligonucleotide
gaauuggccaacacucagc

SEQ ID NO: 2586797 - RNA, 19 nt, Artificial Sequence
  Description of Artificial Sequence: Synthetic oligonucleotide
uugaacuuggagcguuugu

SEQ ID NO: 2586798 - RNA, 19 nt, Artificial Sequence
  Description of Artificial Sequence: Synthetic oligonucleotide
uuacagccacacacaacag

SEQ ID NO: 2586799 - RNA, 19 nt, Artificial Sequence
  Description of Artificial Sequence: Synthetic oligonucleotide
agaaccgccuugcuucauc

SEQ ID NO: 2586800 - RNA, 19 nt, Artificial Sequence
  Description of Artificial Sequence: Synthetic oligonucleotide
acgaggcuaagcuugugca

SEQ ID NO: 2586801 - RNA, 19 nt, Artificial Sequence
  Description of Artificial Sequence: Synthetic oligonucleotide
gacuuggguucuguggucg

SEQ ID NO: 2586802 - RNA, 19 nt, Artificial Sequence
  Description of Artificial Sequence: Synthetic oligonucleotide
uuucaguuggucacauuuu

SEQ ID NO: 2586803 - RNA, 19 nt, Artificial Sequence
  Description of Artificial Sequence: Synthetic oligonucleotide
guauguuuggacagugccc

SEQ ID NO: 2586804 - RNA, 19 nt, Artificial Sequence
  Description of Artificial Sequence: Synthetic oligonucleotide
aaguuacaaggguguaccu

SEQ ID NO: 2586805 - RNA, 19 nt, Artificial Sequence
  Description of Artificial Sequence: Synthetic oligonucleotide
gauucucauuucacaaagc

SEQ ID NO: 2586806 - RNA, 19 nt, Artificial Sequence
  Description of Artificial Sequence: Synthetic oligonucleotide
uugaccugagucuguguga

SEQ ID NO: 2586807 - RNA, 19 nt, Artificial Sequence
  Description of Artificial Sequence: Synthetic oligonucleotide
cagcaauuagauucugcac

SEQ ID NO: 2586808 - RNA, 19 nt, Artificial Sequence
  Description of Artificial Sequence: Synthetic oligonucleotide
gaacagaacgaggcuaagc

SEQ ID NO: 2586809 - RNA, 19 nt, Artificial Sequence
  Description of Artificial Sequence: Synthetic oligonucleotide
acaagcuacacaggugguc

SEQ ID NO: 2586810 - RNA, 19 nt, Artificial Sequence
  Description of Artificial Sequence: Synthetic oligonucleotide
ucucuuuucugguguauua

SEQ ID NO: 2586811 - RNA, 19 nt, Artificial Sequence
  Description of Artificial Sequence: Synthetic oligonucleotide
uugggacauguaaaaugca

SEQ ID NO: 2586812 - RNA, 19 nt, Artificial Sequence
  Description of Artificial Sequence: Synthetic oligonucleotide
ugguguauuaaagguaaau

SEQ ID NO: 2586813 - RNA, 19 nt, Artificial Sequence
  Description of Artificial Sequence: Synthetic oligonucleotide
gcaacauguuuacagaaca

SEQ ID NO: 2586814 - RNA, 19 nt, Artificial Sequence
  Description of Artificial Sequence: Synthetic oligonucleotide
cacucagcaucagauaaag

SEQ ID NO: 2586815 - RNA, 19 nt, Artificial Sequence
  Description of Artificial Sequence: Synthetic oligonucleotide
aguuaauaauuugggacau

SEQ ID NO: 2586816 - RNA, 19 nt, Artificial Sequence
  Description of Artificial Sequence: Synthetic oligonucleotide
acacaaaacaacguuugau

SEQ ID NO: 2586817 - RNA, 19 nt, Artificial Sequence
  Description of Artificial Sequence: Synthetic oligonucleotide
auugcuccauuccagcaaa

SEQ ID NO: 2586818 - RNA, 19 nt, Artificial Sequence
  Description of Artificial Sequence: Synthetic oligonucleotide
cauaucuugaccugagucu

SEQ ID NO: 2586819 - RNA, 19 nt, Artificial Sequence
  Description of Artificial Sequence: Synthetic oligonucleotide
caugccccagagaaccugg

SEQ ID NO: 2586820 - RNA, 19 nt, Artificial Sequence
  Description of Artificial Sequence: Synthetic oligonucleotide
ugaacuuggagcguuuguu

SEQ ID NO: 2586821 - RNA, 19 nt, Artificial Sequence
  Description of Artificial Sequence: Synthetic oligonucleotide
agaacacaaaacaacguuu

SEQ ID NO: 2586822 - RNA, 19 nt, Artificial Sequence
  Description of Artificial Sequence: Synthetic oligonucleotide
gaggcuaagcuugugcaac

SEQ ID NO: 2586823 - RNA, 19 nt, Artificial Sequence
  Description of Artificial Sequence: Synthetic oligonucleotide
ggaauuggccaacacucag

SEQ ID NO: 2586824 - RNA, 19 nt, Artificial Sequence
  Description of Artificial Sequence: Synthetic oligonucleotide
auuucacaaagcaucgggu

SEQ ID NO: 2586825 - RNA, 19 nt, Artificial Sequence
  Description of Artificial Sequence: Synthetic oligonucleotide
gagaacacaaaacaacguu

SEQ ID NO: 2586826 - RNA, 19 nt, Artificial Sequence
  Description of Artificial Sequence: Synthetic oligonucleotide
acagaacaauaauaauaau

SEQ ID NO: 2586827 - RNA, 19 nt, Artificial Sequence
  Description of Artificial Sequence: Synthetic oligonucleotide
uggguucuguggucgagcc

SEQ ID NO: 2586828 - RNA, 19 nt, Artificial Sequence
  Description of Artificial Sequence: Synthetic oligonucleotide
caguuggucacauuuucca

SEQ ID NO: 2586829 - RNA, 19 nt, Artificial Sequence
  Description of Artificial Sequence: Synthetic oligonucleotide
ccaaauuucacaaguaaaa

SEQ ID NO: 2586830 - RNA, 19 nt, Artificial Sequence
  Description of Artificial Sequence: Synthetic oligonucleotide
cauucucaauauaaaacua

SEQ ID NO: 2586831 - RNA, 19 nt, Artificial Sequence
  Description of Artificial Sequence: Synthetic oligonucleotide
gguucuguggucgagcccc

SEQ ID NO: 2586832 - RNA, 19 nt, Artificial Sequence
  Description of Artificial Sequence: Synthetic oligonucleotide
ggagcguuuguucuggaac

SEQ ID NO: 2586833 - RNA, 19 nt, Artificial Sequence
  Description of Artificial Sequence: Synthetic oligonucleotide
uagucaagauucucauuuc

SEQ ID NO: 2586834 - RNA, 19 nt, Artificial Sequence
  Description of Artificial Sequence: Synthetic oligonucleotide
cagcaaagcacaaaaguua

SEQ ID NO: 2586835 - RNA, 19 nt, Artificial Sequence
  Description of Artificial Sequence: Synthetic oligonucleotide
guuggucacauuuuccaaa

SEQ ID NO: 2586836 - RNA, 19 nt, Artificial Sequence
  Description of Artificial Sequence: Synthetic oligonucleotide
agugcccacuccaugcccc

SEQ ID NO: 2586837 - RNA, 19 nt, Artificial Sequence
  Description of Artificial Sequence: Synthetic oligonucleotide
agagaacacaaaacaacgu

SEQ ID NO: 2586838 - RNA, 19 nt, Artificial Sequence
  Description of Artificial Sequence: Synthetic oligonucleotide
gucaagauucucauuucac

SEQ ID NO: 2586839 - RNA, 19 nt, Artificial Sequence
  Description of Artificial Sequence: Synthetic oligonucleotide
aguuggucacauuuuccaa

SEQ ID NO: 2586840 - RNA, 19 nt, Artificial Sequence
  Description of Artificial Sequence: Synthetic oligonucleotide
acauguuuacagaacaaua

SEQ ID NO: 2586841 - RNA, 19 nt, Artificial Sequence
  Description of Artificial Sequence: Synthetic oligonucleotide
acagccacacacaacagaa

SEQ ID NO: 2586842 - RNA, 19 nt, Artificial Sequence
  Description of Artificial Sequence: Synthetic oligonucleotide
uauguacagcaauuagauu

SEQ ID NO: 2586843 - RNA, 19 nt, Artificial Sequence
  Description of Artificial Sequence: Synthetic oligonucleotide
accuggaauuggccaacac

SEQ ID NO: 2586844 - RNA, 19 nt, Artificial Sequence
  Description of Artificial Sequence: Synthetic oligonucleotide
uaagcuugugcaacauguu

SEQ ID NO: 2586845 - RNA, 19 nt, Artificial Sequence
  Description of Artificial Sequence: Synthetic oligonucleotide
ugcuccauuccagcaaagc

SEQ ID NO: 2586846 - RNA, 19 nt, Artificial Sequence
  Description of Artificial Sequence: Synthetic oligonucleotide
cuuccauugcuccauucca

SEQ ID NO: 2586847 - RNA, 19 nt, Artificial Sequence
  Description of Artificial Sequence: Synthetic oligonucleotide
ucgagccccuguuuguuug

SEQ ID NO: 2586848 - RNA, 19 nt, Artificial Sequence
  Description of Artificial Sequence: Synthetic oligonucleotide
ucuguggucgagccccugu

SEQ ID NO: 2586849 - RNA, 19 nt, Artificial Sequence
  Description of Artificial Sequence: Synthetic oligonucleotide
ucacaaagcaucggguuua

SEQ ID NO: 2586850 - RNA, 19 nt, Artificial Sequence
  Description of Artificial Sequence: Synthetic oligonucleotide
uucugcuuccauugcucca

SEQ ID NO: 2586851 - RNA, 19 nt, Artificial Sequence
  Description of Artificial Sequence: Synthetic oligonucleotide
aguuaacauucucaauaua

SEQ ID NO: 2586852 - RNA, 19 nt, Artificial Sequence
  Description of Artificial Sequence: Synthetic oligonucleotide
uuacaaggguguaccuuaa

SEQ ID NO: 2586853 - RNA, 19 nt, Artificial Sequence
  Description of Artificial Sequence: Synthetic oligonucleotide
auguaaaaugcaaaucauu

SEQ ID NO: 2586854 - RNA, 19 nt, Artificial Sequence
  Description of Artificial Sequence: Synthetic oligonucleotide
uaucuugaccugagucugu

SEQ ID NO: 2586855 - RNA, 19 nt, Artificial Sequence
  Description of Artificial Sequence: Synthetic oligonucleotide
guuuggacagugcccacuc

SEQ ID NO: 2586856 - RNA, 19 nt, Artificial Sequence
  Description of Artificial Sequence: Synthetic oligonucleotide
guuaauaauuugggacaug

SEQ ID NO: 2586857 - RNA, 19 nt, Artificial Sequence
  Description of Artificial Sequence: Synthetic oligonucleotide
uuuccccauuucccaaaca

SEQ ID NO: 2586858 - RNA, 19 nt, Artificial Sequence
  Description of Artificial Sequence: Synthetic oligonucleotide
aaccgccuugcuucaucag

SEQ ID NO: 2586859 - RNA, 19 nt, Artificial Sequence
  Description of Artificial Sequence: Synthetic oligonucleotide
ccauaucuugaccugaguc

SEQ ID NO: 2586860 - RNA, 19 nt, Artificial Sequence
  Description of Artificial Sequence: Synthetic oligonucleotide
uguuuggacagugcccacu

SEQ ID NO: 2586861 - RNA, 19 nt, Artificial Sequence
  Description of Artificial Sequence: Synthetic oligonucleotide
aacuaaaacuuuagacaua

SEQ ID NO: 2586862 - RNA, 19 nt, Artificial Sequence
  Description of Artificial Sequence: Synthetic oligonucleotide
guggucgagccccuguuug

SEQ ID NO: 2586863 - RNA, 19 nt, Artificial Sequence
  Description of Artificial Sequence: Synthetic oligonucleotide
caagcuacacaggugguca

SEQ ID NO: 2586864 - RNA, 19 nt, Artificial Sequence
  Description of Artificial Sequence: Synthetic oligonucleotide
caacgauacaaagacaaua

SEQ ID NO: 2586865 - RNA, 19 nt, Artificial Sequence
  Description of Artificial Sequence: Synthetic oligonucleotide
auguuuggacagugcccac

SEQ ID NO: 2586866 - RNA, 19 nt, Artificial Sequence
  Description of Artificial Sequence: Synthetic oligonucleotide
gguguauuaaagguaaaua

SEQ ID NO: 2586867 - RNA, 19 nt, Artificial Sequence
  Description of Artificial Sequence: Synthetic oligonucleotide
acagaacgaggcuaagcuu

SEQ ID NO: 2586868 - RNA, 19 nt, Artificial Sequence
  Description of Artificial Sequence: Synthetic oligonucleotide
uuggguucuguggucgagc

SEQ ID NO: 2586869 - RNA, 19 nt, Artificial Sequence
  Description of Artificial Sequence: Synthetic oligonucleotide
gaaccgccuugcuucauca

SEQ ID NO: 2586870 - RNA, 19 nt, Artificial Sequence
  Description of Artificial Sequence: Synthetic oligonucleotide
ucggguuuacagccacaca

SEQ ID NO: 2586871 - RNA, 19 nt, Artificial Sequence
  Description of Artificial Sequence: Synthetic oligonucleotide
uguucucuuuucuggugua

SEQ ID NO: 2586872 - RNA, 19 nt, Artificial Sequence
  Description of Artificial Sequence: Synthetic oligonucleotide
agauucugcaccagagacu

SEQ ID NO: 2586873 - RNA, 19 nt, Artificial Sequence
  Description of Artificial Sequence: Synthetic oligonucleotide
ugaccugagucugugugau

SEQ ID NO: 2586874 - RNA, 19 nt, Artificial Sequence
  Description of Artificial Sequence: Synthetic oligonucleotide
gugcaacauguuuacagaa

SEQ ID NO: 2586875 - RNA, 19 nt, Artificial Sequence
  Description of Artificial Sequence: Synthetic oligonucleotide
cccaacgauacaaagacaa

SEQ ID NO: 2586876 - RNA, 19 nt, Artificial Sequence
  Description of Artificial Sequence: Synthetic oligonucleotide
gaagaaccgccuugcuuca

SEQ ID NO: 2586877 - RNA, 19 nt, Artificial Sequence
  Description of Artificial Sequence: Synthetic oligonucleotide
aguuacaaggguguaccuu

SEQ ID NO: 2586878 - RNA, 19 nt, Artificial Sequence
  Description of Artificial Sequence: Synthetic oligonucleotide
accauaucuugaccugagu

SEQ ID NO: 2586879 - RNA, 19 nt, Artificial Sequence
  Description of Artificial Sequence: Synthetic oligonucleotide
ugcguucagggugaugacu

SEQ ID NO: 2586880 - RNA, 19 nt, Artificial Sequence
  Description of Artificial Sequence: Synthetic oligonucleotide
uggacagugcccacuccau

SEQ ID NO: 2586881 - RNA, 19 nt, Artificial Sequence
  Description of Artificial Sequence: Synthetic oligonucleotide
caaagacaauaaguuaaca

SEQ ID NO: 2586882 - RNA, 19 nt, Artificial Sequence
  Description of Artificial Sequence: Synthetic oligonucleotide
uacaaggguguaccuuaaa

SEQ ID NO: 2586883 - RNA, 19 nt, Artificial Sequence
  Description of Artificial Sequence: Synthetic oligonucleotide
cagaacagaacgaggcuaa

SEQ ID NO: 2586884 - RNA, 19 nt, Artificial Sequence
  Description of Artificial Sequence: Synthetic oligonucleotide
aaacaacguuugauuucag

SEQ ID NO: 2586885 - RNA, 19 nt, Artificial Sequence
  Description of Artificial Sequence: Synthetic oligonucleotide
aacaagcuacacagguggu

SEQ ID NO: 2586886 - RNA, 19 nt, Artificial Sequence
  Description of Artificial Sequence: Synthetic oligonucleotide
agcuugugcaacauguuua

SEQ ID NO: 2586887 - RNA, 19 nt, Artificial Sequence
  Description of Artificial Sequence: Synthetic oligonucleotide
cggguuuacagccacacac

SEQ ID NO: 2586888 - RNA, 19 nt, Artificial Sequence
  Description of Artificial Sequence: Synthetic oligonucleotide
uugcuccauuccagcaaag

SEQ ID NO: 2586889 - RNA, 19 nt, Artificial Sequence
  Description of Artificial Sequence: Synthetic oligonucleotide
gcuccauuccagcaaagca

SEQ ID NO: 2586890 - RNA, 19 nt, Artificial Sequence
  Description of Artificial Sequence: Synthetic oligonucleotide
aggcuaagcuugugcaaca

SEQ ID NO: 2586891 - RNA, 19 nt, Artificial Sequence
  Description of Artificial Sequence: Synthetic oligonucleotide
ucuugaccugagucugugu

SEQ ID NO: 2586892 - RNA, 19 nt, Artificial Sequence
  Description of Artificial Sequence: Synthetic oligonucleotide
aagcuacacagguggucaa

SEQ ID NO: 2586893 - RNA, 19 nt, Artificial Sequence
  Description of Artificial Sequence: Synthetic oligonucleotide
acagguggucaagcagggc

SEQ ID NO: 2586894 - RNA, 19 nt, Artificial Sequence
  Description of Artificial Sequence: Synthetic oligonucleotide
ccuguuuguuuguuauuag

SEQ ID NO: 2586895 - RNA, 19 nt, Artificial Sequence
  Description of Artificial Sequence: Synthetic oligonucleotide
guuuacagccacacacaac

SEQ ID NO: 2586896 - RNA, 19 nt, Artificial Sequence
  Description of Artificial Sequence: Synthetic oligonucleotide
agaacagaacgaggcuaag

SEQ ID NO: 2586897 - RNA, 19 nt, Artificial Sequence
  Description of Artificial Sequence: Synthetic oligonucleotide
caauuagauucugcaccag

SEQ ID NO: 2586898 - RNA, 19 nt, Artificial Sequence
  Description of Artificial Sequence: Synthetic oligonucleotide
cacuauccccuccuuguuc

SEQ ID NO: 2586899 - RNA, 19 nt, Artificial Sequence
  Description of Artificial Sequence: Synthetic oligonucleotide
aaaccacuauccccuccuu

SEQ ID NO: 2586900 - RNA, 19 nt, Artificial Sequence
  Description of Artificial Sequence: Synthetic oligonucleotide
gaaccuggaauuggccaac

SEQ ID NO: 2586901 - RNA, 19 nt, Artificial Sequence
  Description of Artificial Sequence: Synthetic oligonucleotide
gagacugugcguucagggu

SEQ ID NO: 2586902 - RNA, 19 nt, Artificial Sequence
  Description of Artificial Sequence: Synthetic oligonucleotide
caaguaaaauagucaagau

SEQ ID NO: 2586903 - RNA, 19 nt, Artificial Sequence
  Description of Artificial Sequence: Synthetic oligonucleotide
uggagcguuuguucuggaa

SEQ ID NO: 2586904 - RNA, 19 nt, Artificial Sequence
  Description of Artificial Sequence: Synthetic oligonucleotide
cuacacagguggucaagca

SEQ ID NO: 2586905 - RNA, 19 nt, Artificial Sequence
  Description of Artificial Sequence: Synthetic oligonucleotide
cauugcuccauuccagcaa

SEQ ID NO: 2586906 - RNA, 19 nt, Artificial Sequence
  Description of Artificial Sequence: Synthetic oligonucleotide
uggucgagccccuguuugu

SEQ ID NO: 2586907 - RNA, 19 nt, Artificial Sequence
  Description of Artificial Sequence: Synthetic oligonucleotide
agcuacacagguggucaag

SEQ ID NO: 2586908 - RNA, 19 nt, Artificial Sequence
  Description of Artificial Sequence: Synthetic oligonucleotide
ggacauguaaaaugcaaau

SEQ ID NO: 2586909 - RNA, 19 nt, Artificial Sequence
  Description of Artificial Sequence: Synthetic oligonucleotide
agggcccggaagaaccgcc

SEQ ID NO: 2586910 - RNA, 19 nt, Artificial Sequence
  Description of Artificial Sequence: Synthetic oligonucleotide
uguggucgagccccuguuu

SEQ ID NO: 2586911 - RNA, 19 nt, Artificial Sequence
  Description of Artificial Sequence: Synthetic oligonucleotide
gguuuacagccacacacaa

SEQ ID NO: 2586912 - RNA, 19 nt, Artificial Sequence
  Description of Artificial Sequence: Synthetic oligonucleotide
gcuaagcuugugcaacaug

SEQ ID NO: 2586913 - RNA, 19 nt, Artificial Sequence
  Description of Artificial Sequence: Synthetic oligonucleotide
gacugugcguucaggguga

SEQ ID NO: 2586914 - RNA, 19 nt, Artificial Sequence
  Description of Artificial Sequence: Synthetic oligonucleotide
cuuggguucuguggucgag

SEQ ID NO: 2586915 - RNA, 19 nt, Artificial Sequence
  Description of Artificial Sequence: Synthetic oligonucleotide
ugcuuccauugcuccauuc

SEQ ID NO: 2586916 - RNA, 19 nt, Artificial Sequence
  Description of Artificial Sequence: Synthetic oligonucleotide
caucagauaaagucuguuu

SEQ ID NO: 2586917 - RNA, 19 nt, Artificial Sequence
  Description of Artificial Sequence: Synthetic oligonucleotide
ccagagaaccuggaauugg

SEQ ID NO: 2586918 - RNA, 19 nt, Artificial Sequence
  Description of Artificial Sequence: Synthetic oligonucleotide
aaccuggaauuggccaaca

SEQ ID NO: 2586919 - RNA, 19 nt, Artificial Sequence
  Description of Artificial Sequence: Synthetic oligonucleotide
uccaugccccagagaaccu

SEQ ID NO: 2586920 - RNA, 19 nt, Artificial Sequence
  Description of Artificial Sequence: Synthetic oligonucleotide
agcguuuguucuggaacca

SEQ ID NO: 2586921 - RNA, 19 nt, Artificial Sequence
  Description of Artificial Sequence: Synthetic oligonucleotide
agaacgaggcuaagcuugu

SEQ ID NO: 2586922 - RNA, 19 nt, Artificial Sequence
  Description of Artificial Sequence: Synthetic oligonucleotide
cgauacaaagacaauaagu

SEQ ID NO: 2586923 - RNA, 19 nt, Artificial Sequence
  Description of Artificial Sequence: Synthetic oligonucleotide
accagagacugugcguuca

SEQ ID NO: 2586924 - RNA, 19 nt, Artificial Sequence
  Description of Artificial Sequence: Synthetic oligonucleotide
gcuacacagguggucaagc

SEQ ID NO: 2586925 - RNA, 19 nt, Artificial Sequence
  Description of Artificial Sequence: Synthetic oligonucleotide
cagugcccacuccaugccc

SEQ ID NO: 2586926 - RNA, 19 nt, Artificial Sequence
  Description of Artificial Sequence: Synthetic oligonucleotide
uggucaagcagggcccgga

SEQ ID NO: 2586927 - RNA, 19 nt, Artificial Sequence
  Description of Artificial Sequence: Synthetic oligonucleotide
gggacauguaaaaugcaaa

SEQ ID NO: 2586928 - RNA, 19 nt, Artificial Sequence
  Description of Artificial Sequence: Synthetic oligonucleotide
agcaucagauaaagucugu

SEQ ID NO: 2586929 - RNA, 19 nt, Artificial Sequence
  Description of Artificial Sequence: Synthetic oligonucleotide
guacagcaauuagauucug

SEQ ID NO: 2586930 - RNA, 19 nt, Artificial Sequence
  Description of Artificial Sequence: Synthetic oligonucleotide
ccaaacaagcuacacaggu

SEQ ID NO: 2586931 - RNA, 19 nt, Artificial Sequence
  Description of Artificial Sequence: Synthetic oligonucleotide
gcacaaaaguuacaagggu

SEQ ID NO: 2586932 - RNA, 19 nt, Artificial Sequence
  Description of Artificial Sequence: Synthetic oligonucleotide
uuggagcguuuguucugga

SEQ ID NO: 2586933 - RNA, 19 nt, Artificial Sequence
  Description of Artificial Sequence: Synthetic oligonucleotide
caacacucagcaucagaua

SEQ ID NO: 2586934 - RNA, 19 nt, Artificial Sequence
  Description of Artificial Sequence: Synthetic oligonucleotide
acacucagcaucagauaaa

SEQ ID NO: 2586935 - RNA, 19 nt, Artificial Sequence
  Description of Artificial Sequence: Synthetic oligonucleotide
gaacgaggcuaagcuugug

SEQ ID NO: 2586936 - RNA, 19 nt, Artificial Sequence
  Description of Artificial Sequence: Synthetic oligonucleotide
ggacagugcccacuccaug

SEQ ID NO: 2586937 - RNA, 19 nt, Artificial Sequence
  Description of Artificial Sequence: Synthetic oligonucleotide
caaaaguuacaagggugua

SEQ ID NO: 2586938 - RNA, 19 nt, Artificial Sequence
  Description of Artificial Sequence: Synthetic oligonucleotide
caaaucauucugcuuccau

SEQ ID NO: 2586939 - RNA, 19 nt, Artificial Sequence
  Description of Artificial Sequence: Synthetic oligonucleotide
ccuccucugauuuucccca

SEQ ID NO: 2586940 - RNA, 19 nt, Artificial Sequence
  Description of Artificial Sequence: Synthetic oligonucleotide
gcaucggguuuacagccac

SEQ ID NO: 2586941 - RNA, 19 nt, Artificial Sequence
  Description of Artificial Sequence: Synthetic oligonucleotide
ggguuuacagccacacaca

SEQ ID NO: 2586942 - RNA, 19 nt, Artificial Sequence
  Description of Artificial Sequence: Synthetic oligonucleotide
gguggucaagcagggcccg

SEQ ID NO: 2586943 - RNA, 19 nt, Artificial Sequence
  Description of Artificial Sequence: Synthetic oligonucleotide
ccaacacucagcaucagau

SEQ ID NO: 2586944 - RNA, 19 nt, Artificial Sequence
  Description of Artificial Sequence: Synthetic oligonucleotide
gugcguucagggugaugac

SEQ ID NO: 2586945 - RNA, 19 nt, Artificial Sequence
  Description of Artificial Sequence: Synthetic oligonucleotide
caccagagacugugcguuc

SEQ ID NO: 2586946 - RNA, 19 nt, Artificial Sequence
  Description of Artificial Sequence: Synthetic oligonucleotide
agcaucggguuuacagcca

SEQ ID NO: 2586947 - RNA, 19 nt, Artificial Sequence
  Description of Artificial Sequence: Synthetic oligonucleotide
cuauccccuccuuguucuc

SEQ ID NO: 2586948 - RNA, 19 nt, Artificial Sequence
  Description of Artificial Sequence: Synthetic oligonucleotide
cugguguauuaaagguaaa

SEQ ID NO: 2586949 - RNA, 19 nt, Artificial Sequence
  Description of Artificial Sequence: Synthetic oligonucleotide
auccccuccuuguucucuu

SEQ ID NO: 2586950 - RNA, 19 nt, Artificial Sequence
  Description of Artificial Sequence: Synthetic oligonucleotide
ccugagucugugugauccc

SEQ ID NO: 2586951 - RNA, 19 nt, Artificial Sequence
  Description of Artificial Sequence: Synthetic oligonucleotide
gccaacacucagcaucaga

SEQ ID NO: 2586952 - RNA, 19 nt, Artificial Sequence
  Description of Artificial Sequence: Synthetic oligonucleotide
ccagcaaagcacaaaaguu

SEQ ID NO: 2586953 - RNA, 19 nt, Artificial Sequence
  Description of Artificial Sequence: Synthetic oligonucleotide
gaccugagucugugugauc

SEQ ID NO: 2586954 - RNA, 19 nt, Artificial Sequence
  Description of Artificial Sequence: Synthetic oligonucleotide
ccacacacaacagaacaga

SEQ ID NO: 2586955 - RNA, 19 nt, Artificial Sequence
  Description of Artificial Sequence: Synthetic oligonucleotide
acaaagcaucggguuuaca

SEQ ID NO: 2586956 - RNA, 19 nt, Artificial Sequence
  Description of Artificial Sequence: Synthetic oligonucleotide
cagggugaugacuuggguu

SEQ ID NO: 2586957 - RNA, 19 nt, Artificial Sequence
  Description of Artificial Sequence: Synthetic oligonucleotide
agccccuguuuguuuguua

SEQ ID NO: 2586958 - RNA, 19 nt, Artificial Sequence
  Description of Artificial Sequence: Synthetic oligonucleotide
acguuugauuucaguuggu

SEQ ID NO: 2586959 - RNA, 19 nt, Artificial Sequence
  Description of Artificial Sequence: Synthetic oligonucleotide
guggucaagcagggcccgg

SEQ ID NO: 2586960 - RNA, 19 nt, Artificial Sequence
  Description of Artificial Sequence: Synthetic oligonucleotide
aagaaccgccuugcuucau

SEQ ID NO: 2586961 - RNA, 19 nt, Artificial Sequence
  Description of Artificial Sequence: Synthetic oligonucleotide
caucggguuuacagccaca

SEQ ID NO: 2586962 - RNA, 19 nt, Artificial Sequence
  Description of Artificial Sequence: Synthetic oligonucleotide
uucuguggucgagccccug

SEQ ID NO: 2586963 - RNA, 19 nt, Artificial Sequence
  Description of Artificial Sequence: Synthetic oligonucleotide
ccuggaauuggccaacacu

SEQ ID NO: 2586964 - RNA, 19 nt, Artificial Sequence
  Description of Artificial Sequence: Synthetic oligonucleotide
cccggaagaaccgccuugc

SEQ ID NO: 2586965 - RNA, 19 nt, Artificial Sequence
  Description of Artificial Sequence: Synthetic oligonucleotide
cagggcccggaagaaccgc

SEQ ID NO: 2586966 - RNA, 19 nt, Artificial Sequence
  Description of Artificial Sequence: Synthetic oligonucleotide
ggugaugacuuggguucug

SEQ ID NO: 2586967 - RNA, 19 nt, Artificial Sequence
  Description of Artificial Sequence: Synthetic oligonucleotide
cccagagaaccuggaauug

SEQ ID NO: 2586968 - RNA, 19 nt, Artificial Sequence
  Description of Artificial Sequence: Synthetic oligonucleotide
cccacuccaugccccagag

SEQ ID NO: 2586969 - RNA, 19 nt, Artificial Sequence
  Description of Artificial Sequence: Synthetic oligonucleotide
gcagggcccggaagaaccg

SEQ ID NO: 2586970 - RNA, 19 nt, Artificial Sequence
  Description of Artificial Sequence: Synthetic oligonucleotide
cccauuucccaaacaagcu

SEQ ID NO: 2586971 - RNA, 19 nt, Artificial Sequence
  Description of Artificial Sequence: Synthetic oligonucleotide
cccuguuuguuuguuauua

SEQ ID NO: 2586972 - RNA, 19 nt, Artificial Sequence
  Description of Artificial Sequence: Synthetic oligonucleotide
gugcccacuccaugcccca

SEQ ID NO: 2586973 - RNA, 19 nt, Artificial Sequence
  Description of Artificial Sequence: Synthetic oligonucleotide
uccccuccuuguucucuuu

SEQ ID NO: 2586974 - RNA, 19 nt, Artificial Sequence
  Description of Artificial Sequence: Synthetic oligonucleotide
gcaaaucauucugcuucca

SEQ ID NO: 2586975 - RNA, 19 nt, Artificial Sequence
  Description of Artificial Sequence: Synthetic oligonucleotide
cguucagggugaugacuug

SEQ ID NO: 2586976 - RNA, 19 nt, Artificial Sequence
  Description of Artificial Sequence: Synthetic oligonucleotide
ccaugccccagagaaccug

SEQ ID NO: 2586977 - RNA, 19 nt, Artificial Sequence
  Description of Artificial Sequence: Synthetic oligonucleotide
auucugcaccagagacugu

SEQ ID NO: 2586978 - RNA, 19 nt, Artificial Sequence
  Description of Artificial Sequence: Synthetic oligonucleotide
cuucuugaacuuggagcgu

SEQ ID NO: 2586979 - RNA, 19 nt, Artificial Sequence
  Description of Artificial Sequence: Synthetic oligonucleotide
cugugcguucagggugaug

SEQ ID NO: 2586980 - RNA, 19 nt, Artificial Sequence
  Description of Artificial Sequence: Synthetic oligonucleotide
cguuuguucuggaaccaua

SEQ ID NO: 2586981 - RNA, 19 nt, Artificial Sequence
  Description of Artificial Sequence: Synthetic oligonucleotide
ccaacgauacaaagacaau

SEQ ID NO: 2586982 - RNA, 19 nt, Artificial Sequence
  Description of Artificial Sequence: Synthetic oligonucleotide
acugugcguucagggugau

SEQ ID NO: 2586983 - RNA, 19 nt, Artificial Sequence
  Description of Artificial Sequence: Synthetic oligonucleotide
ccgccuugcuucaucagcu

SEQ ID NO: 2586984 - RNA, 19 nt, Artificial Sequence
  Description of Artificial Sequence: Synthetic oligonucleotide
gucgagccccuguuuguuu

SEQ ID NO: 2586985 - RNA, 19 nt, Artificial Sequence
  Description of Artificial Sequence: Synthetic oligonucleotide
gcccacuccaugccccaga

SEQ ID NO: 2586986 - RNA, 19 nt, Artificial Sequence
  Description of Artificial Sequence: Synthetic oligonucleotide
gcguucagggugaugacuu

SEQ ID NO: 2586987 - RNA, 19 nt, Artificial Sequence
  Description of Artificial Sequence: Synthetic oligonucleotide
cgaggcuaagcuugugcaa

SEQ ID NO: 2586988 - RNA, 19 nt, Artificial Sequence
  Description of Artificial Sequence: Synthetic oligonucleotide
cuguggucgagccccuguu

SEQ ID NO: 2586989 - RNA, 19 nt, Artificial Sequence
  Description of Artificial Sequence: Synthetic oligonucleotide
ggcuaagcuugugcaacau

SEQ ID NO: 2586990 - RNA, 19 nt, Artificial Sequence
  Description of Artificial Sequence: Synthetic oligonucleotide
gggugaugacuuggguucu

SEQ ID NO: 2586991 - RNA, 19 nt, Artificial Sequence
  Description of Artificial Sequence: Synthetic oligonucleotide
guucuguggucgagccccu

SEQ ID NO: 2586992 - RNA, 19 nt, Artificial Sequence
  Description of Artificial Sequence: Synthetic oligonucleotide
gagccccuguuuguuuguu

SEQ ID NO: 2586993 - RNA, 19 nt, Artificial Sequence
  Description of Artificial Sequence: Synthetic oligonucleotide
ggucgagccccuguuuguu

SEQ ID NO: 2586994 - RNA, 19 nt, Artificial Sequence
  Description of Artificial Sequence: Synthetic oligonucleotide
gcguuuguucuggaaccau

SEQ ID NO: 2586995 - RNA, 19 nt, Artificial Sequence
  Description of Artificial Sequence: Synthetic oligonucleotide
gggcccggaagaaccgccu

SEQ ID NO: 2586996 - RNA, 19 nt, Artificial Sequence
  Description of Artificial Sequence: Synthetic oligonucleotide
ccacuauccccuccuuguu

SEQ ID NO: 2586997 - RNA, 19 nt, Artificial Sequence
  Description of Artificial Sequence: Synthetic oligonucleotide
cgagccccuguuuguuugu

SEQ ID NO: 2586998 - RNA, 19 nt, Artificial Sequence
  Description of Artificial Sequence: Synthetic oligonucleotide
cgccuugcuucaucagcuu

SEQ ID NO: 2586999 - RNA, 19 nt, Artificial Sequence
  Description of Artificial Sequence: Synthetic oligonucleotide
aaauuuauuguuuaaaacc

SEQ ID NO: 2587000 - RNA, 19 nt, Artificial Sequence
  Description of Artificial Sequence: Synthetic oligonucleotide
aauuaagcaacaucaagcc

SEQ ID NO: 2587001 - RNA, 19 nt, Artificial Sequence
  Description of Artificial Sequence: Synthetic oligonucleotide
uggaaauuaagcaacauca

SEQ ID NO: 2587002 - RNA, 19 nt, Artificial Sequence
  Description of Artificial Sequence: Synthetic oligonucleotide
ucauagagcacaaagaaca

SEQ ID NO: 2587003 - RNA, 19 nt, Artificial Sequence
  Description of Artificial Sequence: Synthetic oligonucleotide
uguaugguguagaagaugc

SEQ ID NO: 2587004 - RNA, 19 nt, Artificial Sequence
  Description of Artificial Sequence: Synthetic oligonucleotide
guuacauuagcuuagcaug

SEQ ID NO: 2587005 - RNA, 19 nt, Artificial Sequence
  Description of Artificial Sequence: Synthetic oligonucleotide
aucaagcccacauugaugg

SEQ ID NO: 2587006 - RNA, 19 nt, Artificial Sequence
  Description of Artificial Sequence: Synthetic oligonucleotide
auucucuuuagccaagagc

SEQ ID NO: 2587007 - RNA, 19 nt, Artificial Sequence
  Description of Artificial Sequence: Synthetic oligonucleotide
gaaauuaagcaacaucaag

SEQ ID NO: 2587008 - RNA, 19 nt, Artificial Sequence
  Description of Artificial Sequence: Synthetic oligonucleotide
agcacaaagaacaggaucc

SEQ ID NO: 2587009 - RNA, 19 nt, Artificial Sequence
  Description of Artificial Sequence: Synthetic oligonucleotide
aacuuagaaaauuuauugu

SEQ ID NO: 2587010 - RNA, 19 nt, Artificial Sequence
  Description of Artificial Sequence: Synthetic oligonucleotide
agaagaugcacccaaauau

SEQ ID NO: 2587011 - RNA, 19 nt, Artificial Sequence
  Description of Artificial Sequence: Synthetic oligonucleotide
uauuguuuaaaaccauucu

SEQ ID NO: 2587012 - RNA, 19 nt, Artificial Sequence
  Description of Artificial Sequence: Synthetic oligonucleotide
uuagcuuagcaugaggagg

SEQ ID NO: 2587013 - RNA, 19 nt, Artificial Sequence
  Description of Artificial Sequence: Synthetic oligonucleotide
ugugccaaaggcaaagcag

SEQ ID NO: 2587014 - RNA, 19 nt, Artificial Sequence
  Description of Artificial Sequence: Synthetic oligonucleotide
gggaacagcacuuagaggc

SEQ ID NO: 2587015 - RNA, 19 nt, Artificial Sequence
  Description of Artificial Sequence: Synthetic oligonucleotide
accaggggaacucaguacc

SEQ ID NO: 2587016 - RNA, 19 nt, Artificial Sequence
  Description of Artificial Sequence: Synthetic oligonucleotide
uuuucgaccaacuuagaaa

SEQ ID NO: 2587017 - RNA, 19 nt, Artificial Sequence
  Description of Artificial Sequence: Synthetic oligonucleotide
uagcuuagcaugaggaggg

SEQ ID NO: 2587018 - RNA, 19 nt, Artificial Sequence
  Description of Artificial Sequence: Synthetic oligonucleotide
acagcgagagcgcuaagcc

SEQ ID NO: 2587019 - RNA, 19 nt, Artificial Sequence
  Description of Artificial Sequence: Synthetic oligonucleotide
uuucgaccaacuuagaaaa

SEQ ID NO: 2587020 - RNA, 19 nt, Artificial Sequence
  Description of Artificial Sequence: Synthetic oligonucleotide
agcacuuagaggcacaucu

SEQ ID NO: 2587021 - RNA, 19 nt, Artificial Sequence
  Description of Artificial Sequence: Synthetic oligonucleotide
accaguaggagagaggccc

SEQ ID NO: 2587022 - RNA, 19 nt, Artificial Sequence
  Description of Artificial Sequence: Synthetic oligonucleotide
guuggauugguugaggacg

SEQ ID NO: 2587023 - RNA, 19 nt, Artificial Sequence
  Description of Artificial Sequence: Synthetic oligonucleotide
ucaagcaaccuaacaacag

SEQ ID NO: 2587024 - RNA, 19 nt, Artificial Sequence
  Description of Artificial Sequence: Synthetic oligonucleotide
acuuagaaaauuuauuguu

SEQ ID NO: 2587025 - RNA, 19 nt, Artificial Sequence
  Description of Artificial Sequence: Synthetic oligonucleotide
ucuagggacccacacauga

SEQ ID NO: 2587026 - RNA, 19 nt, Artificial Sequence
  Description of Artificial Sequence: Synthetic oligonucleotide
aagccagcgaggcagagug

SEQ ID NO: 2587027 - RNA, 19 nt, Artificial Sequence
  Description of Artificial Sequence: Synthetic oligonucleotide
uuagaggcacaucugguca

SEQ ID NO: 2587028 - RNA, 19 nt, Artificial Sequence
  Description of Artificial Sequence: Synthetic oligonucleotide
agucauagagcacaaagaa

SEQ ID NO: 2587029 - RNA, 19 nt, Artificial Sequence
  Description of Artificial Sequence: Synthetic oligonucleotide
gaugcacccaaauaugcug

SEQ ID NO: 2587030 - RNA, 19 nt, Artificial Sequence
  Description of Artificial Sequence: Synthetic oligonucleotide
acacaugacccucuugggc

SEQ ID NO: 2587031 - RNA, 19 nt, Artificial Sequence
  Description of Artificial Sequence: Synthetic oligonucleotide
auuagcuuagcaugaggag

SEQ ID NO: 2587032 - RNA, 19 nt, Artificial Sequence
  Description of Artificial Sequence: Synthetic oligonucleotide
uuacauuagcuuagcauga

SEQ ID NO: 2587033 - RNA, 19 nt, Artificial Sequence
  Description of Artificial Sequence: Synthetic oligonucleotide
ugugugugguuauggaggg

SEQ ID NO: 2587034 - RNA, 19 nt, Artificial Sequence
  Description of Artificial Sequence: Synthetic oligonucleotide
augcagacaaugcagaagu

SEQ ID NO: 2587035 - RNA, 19 nt, Artificial Sequence
  Description of Artificial Sequence: Synthetic oligonucleotide
ugguaaugcagacaaugca

SEQ ID NO: 2587036 - RNA, 19 nt, Artificial Sequence
  Description of Artificial Sequence: Synthetic oligonucleotide
ccuaacaacagcuguaugg

SEQ ID NO: 2587037 - RNA, 19 nt, Artificial Sequence
  Description of Artificial Sequence: Synthetic oligonucleotide
aaauaugcuguuggauugg

SEQ ID NO: 2587038 - RNA, 19 nt, Artificial Sequence
  Description of Artificial Sequence: Synthetic oligonucleotide
auggcauaggugguaaugc

SEQ ID NO: 2587039 - RNA, 19 nt, Artificial Sequence
  Description of Artificial Sequence: Synthetic oligonucleotide
agauccuagcacauguucc

SEQ ID NO: 2587040 - RNA, 19 nt, Artificial Sequence
  Description of Artificial Sequence: Synthetic oligonucleotide
acaaagaacaggauccagg

SEQ ID NO: 2587041 - RNA, 19 nt, Artificial Sequence
  Description of Artificial Sequence: Synthetic oligonucleotide
ugguguagaagaugcaccc

SEQ ID NO: 2587042 - RNA, 19 nt, Artificial Sequence
  Description of Artificial Sequence: Synthetic oligonucleotide
acgugcagcgcguacagcg

SEQ ID NO: 2587043 - RNA, 19 nt, Artificial Sequence
  Description of Artificial Sequence: Synthetic oligonucleotide
aggagagaggcccagcguc

SEQ ID NO: 2587044 - RNA, 19 nt, Artificial Sequence
  Description of Artificial Sequence: Synthetic oligonucleotide
agagcgcuaagccagcgag

SEQ ID NO: 2587045 - RNA, 19 nt, Artificial Sequence
  Description of Artificial Sequence: Synthetic oligonucleotide
uaugguguagaagaugcac

SEQ ID NO: 2587046 - RNA, 19 nt, Artificial Sequence
  Description of Artificial Sequence: Synthetic oligonucleotide
uaauccucggucucggggc

SEQ ID NO: 2587047 - RNA, 19 nt, Artificial Sequence
  Description of Artificial Sequence: Synthetic oligonucleotide
cacccaaauaugcuguugg

SEQ ID NO: 2587048 - RNA, 19 nt, Artificial Sequence
  Description of Artificial Sequence: Synthetic oligonucleotide
acauuagcuuagcaugagg

SEQ ID NO: 2587049 - RNA, 19 nt, Artificial Sequence
  Description of Artificial Sequence: Synthetic oligonucleotide
cacuuagaggcacaucugg

SEQ ID NO: 2587050 - RNA, 19 nt, Artificial Sequence
  Description of Artificial Sequence: Synthetic oligonucleotide
guaauccucggucucgggg

SEQ ID NO: 2587051 - RNA, 19 nt, Artificial Sequence
  Description of Artificial Sequence: Synthetic oligonucleotide
accucaggggccuuuuggc

SEQ ID NO: 2587052 - RNA, 19 nt, Artificial Sequence
  Description of Artificial Sequence: Synthetic oligonucleotide
aagucauagagcacaaaga

SEQ ID NO: 2587053 - RNA, 19 nt, Artificial Sequence
  Description of Artificial Sequence: Synthetic oligonucleotide
cauuagcuuagcaugagga

SEQ ID NO: 2587054 - RNA, 19 nt, Artificial Sequence
  Description of Artificial Sequence: Synthetic oligonucleotide
gaagaugcacccaaauaug

SEQ ID NO: 2587055 - RNA, 19 nt, Artificial Sequence
  Description of Artificial Sequence: Synthetic oligonucleotide
agcgcgguaauccucgguc

SEQ ID NO: 2587056 - RNA, 19 nt, Artificial Sequence
  Description of Artificial Sequence: Synthetic oligonucleotide
agcgcuaagccagcgaggc

SEQ ID NO: 2587057 - RNA, 19 nt, Artificial Sequence
  Description of Artificial Sequence: Synthetic oligonucleotide
aacucaguaccaguaggag

SEQ ID NO: 2587058 - RNA, 19 nt, Artificial Sequence
  Description of Artificial Sequence: Synthetic oligonucleotide
aaagcagguuacauuagcu

SEQ ID NO: 2587059 - RNA, 19 nt, Artificial Sequence
  Description of Artificial Sequence: Synthetic oligonucleotide
gacgcugucagauccuagc

SEQ ID NO: 2587060 - RNA, 19 nt, Artificial Sequence
  Description of Artificial Sequence: Synthetic oligonucleotide
accgagagcgcgguaaucc

SEQ ID NO: 2587061 - RNA, 19 nt, Artificial Sequence
  Description of Artificial Sequence: Synthetic oligonucleotide
caaagcagguuacauuagc

SEQ ID NO: 2587062 - RNA, 19 nt, Artificial Sequence
  Description of Artificial Sequence: Synthetic oligonucleotide
uuggauugguugaggacgc

SEQ ID NO: 2587063 - RNA, 19 nt, Artificial Sequence
  Description of Artificial Sequence: Synthetic oligonucleotide
auagagcacaaagaacagg

SEQ ID NO: 2587064 - RNA, 19 nt, Artificial Sequence
  Description of Artificial Sequence: Synthetic oligonucleotide
cuuagaggcacaucugguc

SEQ ID NO: 2587065 - RNA, 19 nt, Artificial Sequence
  Description of Artificial Sequence: Synthetic oligonucleotide
gaaagcagcccuugggaac

SEQ ID NO: 2587066 - RNA, 19 nt, Artificial Sequence
  Description of Artificial Sequence: Synthetic oligonucleotide
aagcccuugccccaccgag

SEQ ID NO: 2587067 - RNA, 19 nt, Artificial Sequence
  Description of Artificial Sequence: Synthetic oligonucleotide
aagcagguuacauuagcuu

SEQ ID NO: 2587068 - RNA, 19 nt, Artificial Sequence
  Description of Artificial Sequence: Synthetic oligonucleotide
gauggcauaggugguaaug

SEQ ID NO: 2587069 - RNA, 19 nt, Artificial Sequence
  Description of Artificial Sequence: Synthetic oligonucleotide
gauccuagcacauguucca

SEQ ID NO: 2587070 - RNA, 19 nt, Artificial Sequence
  Description of Artificial Sequence: Synthetic oligonucleotide
uguuggauugguugaggac

SEQ ID NO: 2587071 - RNA, 19 nt, Artificial Sequence
  Description of Artificial Sequence: Synthetic oligonucleotide
cagguagacagaaccggcg

SEQ ID NO: 2587072 - RNA, 19 nt, Artificial Sequence
  Description of Artificial Sequence: Synthetic oligonucleotide
agcagguuacauuagcuua

SEQ ID NO: 2587073 - RNA, 19 nt, Artificial Sequence
  Description of Artificial Sequence: Synthetic oligonucleotide
gaccucaggggccuuuugg

SEQ ID NO: 2587074 - RNA, 19 nt, Artificial Sequence
  Description of Artificial Sequence: Synthetic oligonucleotide
agugccaggcgccugcguc

SEQ ID NO: 2587075 - RNA, 19 nt, Artificial Sequence
  Description of Artificial Sequence: Synthetic oligonucleotide
cuggucauuguccugugug

SEQ ID NO: 2587076 - RNA, 19 nt, Artificial Sequence
  Description of Artificial Sequence: Synthetic oligonucleotide
agcacauguuccaccagcc

SEQ ID NO: 2587077 - RNA, 19 nt, Artificial Sequence
  Description of Artificial Sequence: Synthetic oligonucleotide
acucaguaccaguaggaga

SEQ ID NO: 2587078 - RNA, 19 nt, Artificial Sequence
  Description of Artificial Sequence: Synthetic oligonucleotide
gacagaaccggcgaaggac

SEQ ID NO: 2587079 - RNA, 19 nt, Artificial Sequence
  Description of Artificial Sequence: Synthetic oligonucleotide
ggugguaaugcagacaaug

SEQ ID NO: 2587080 - RNA, 19 nt, Artificial Sequence
  Description of Artificial Sequence: Synthetic oligonucleotide
gagagcgcgguaauccucg

SEQ ID NO: 2587081 - RNA, 19 nt, Artificial Sequence
  Description of Artificial Sequence: Synthetic oligonucleotide
gggaacagggccuucuagg

SEQ ID NO: 2587082 - RNA, 19 nt, Artificial Sequence
  Description of Artificial Sequence: Synthetic oligonucleotide
acaucaagcccacauugau

SEQ ID NO: 2587083 - RNA, 19 nt, Artificial Sequence
  Description of Artificial Sequence: Synthetic oligonucleotide
caucaagcccacauugaug

SEQ ID NO: 2587084 - RNA, 19 nt, Artificial Sequence
  Description of Artificial Sequence: Synthetic oligonucleotide
uuagcaugaggagggaccu

SEQ ID NO: 2587085 - RNA, 19 nt, Artificial Sequence
  Description of Artificial Sequence: Synthetic oligonucleotide
uacauuagcuuagcaugag

SEQ ID NO: 2587086 - RNA, 19 nt, Artificial Sequence
  Description of Artificial Sequence: Synthetic oligonucleotide
agcgagagcgcuaagccag

SEQ ID NO: 2587087 - RNA, 19 nt, Artificial Sequence
  Description of Artificial Sequence: Synthetic oligonucleotide
aaccuaacaacagcuguau

SEQ ID NO: 2587088 - RNA, 19 nt, Artificial Sequence
  Description of Artificial Sequence: Synthetic oligonucleotide
ucacgugcagcgcguacag

SEQ ID NO: 2587089 - RNA, 19 nt, Artificial Sequence
  Description of Artificial Sequence: Synthetic oligonucleotide
uacagcgagagcgcuaagc

SEQ ID NO: 2587090 - RNA, 19 nt, Artificial Sequence
  Description of Artificial Sequence: Synthetic oligonucleotide
aacaucaagcccacauuga

SEQ ID NO: 2587091 - RNA, 19 nt, Artificial Sequence
  Description of Artificial Sequence: Synthetic oligonucleotide
uggccuuguguucuggcac

SEQ ID NO: 2587092 - RNA, 19 nt, Artificial Sequence
  Description of Artificial Sequence: Synthetic oligonucleotide
agggacccacacaugaccc

SEQ ID NO: 2587093 - RNA, 19 nt, Artificial Sequence
  Description of Artificial Sequence: Synthetic oligonucleotide
cucaagcaaccuaacaaca

SEQ ID NO: 2587094 - RNA, 19 nt, Artificial Sequence
  Description of Artificial Sequence: Synthetic oligonucleotide
uggucauuguccugugugu

SEQ ID NO: 2587095 - RNA, 19 nt, Artificial Sequence
  Description of Artificial Sequence: Synthetic oligonucleotide
gugguaaugcagacaaugc

SEQ ID NO: 2587096 - RNA, 19 nt, Artificial Sequence
  Description of Artificial Sequence: Synthetic oligonucleotide
guggugcccauguuggcgg

SEQ ID NO: 2587097 - RNA, 19 nt, Artificial Sequence
  Description of Artificial Sequence: Synthetic oligonucleotide
caaaggcaaagcagguuac

SEQ ID NO: 2587098 - RNA, 19 nt, Artificial Sequence
  Description of Artificial Sequence: Synthetic oligonucleotide
uccuagcacauguuccacc

SEQ ID NO: 2587099 - RNA, 19 nt, Artificial Sequence
  Description of Artificial Sequence: Synthetic oligonucleotide
uggcauaggugguaaugca

SEQ ID NO: 2587100 - RNA, 19 nt, Artificial Sequence
  Description of Artificial Sequence: Synthetic oligonucleotide
ucgaccaacuuagaaaauu

SEQ ID NO: 2587101 - RNA, 19 nt, Artificial Sequence
  Description of Artificial Sequence: Synthetic oligonucleotide
guagacagaaccggcgaag

SEQ ID NO: 2587102 - RNA, 19 nt, Artificial Sequence
  Description of Artificial Sequence: Synthetic oligonucleotide
agguagacagaaccggcga

SEQ ID NO: 2587103 - RNA, 19 nt, Artificial Sequence
  Description of Artificial Sequence: Synthetic oligonucleotide
gaacucaguaccaguagga

SEQ ID NO: 2587104 - RNA, 19 nt, Artificial Sequence
  Description of Artificial Sequence: Synthetic oligonucleotide
cagauccuagcacauguuc

SEQ ID NO: 2587105 - RNA, 19 nt, Artificial Sequence
  Description of Artificial Sequence: Synthetic oligonucleotide
accggcgaaggacaccagg

SEQ ID NO: 2587106 - RNA, 19 nt, Artificial Sequence
  Description of Artificial Sequence: Synthetic oligonucleotide
acccucuugggcaaggcuc

SEQ ID NO: 2587107 - RNA, 19 nt, Artificial Sequence
  Description of Artificial Sequence: Synthetic oligonucleotide
ccucaagcaaccuaacaac

SEQ ID NO: 2587108 - RNA, 19 nt, Artificial Sequence
  Description of Artificial Sequence: Synthetic oligonucleotide
acagcuguaugguguagaa

SEQ ID NO: 2587109 - RNA, 19 nt, Artificial Sequence
  Description of Artificial Sequence: Synthetic oligonucleotide
uucacgugcagcgcguaca

SEQ ID NO: 2587110 - RNA, 19 nt, Artificial Sequence
  Description of Artificial Sequence: Synthetic oligonucleotide
gaaccggcgaaggacacca

SEQ ID NO: 2587111 - RNA, 19 nt, Artificial Sequence
  Description of Artificial Sequence: Synthetic oligonucleotide
agaaccggcgaaggacacc

SEQ ID NO: 2587112 - RNA, 19 nt, Artificial Sequence
  Description of Artificial Sequence: Synthetic oligonucleotide
cuagggacccacacaugac

SEQ ID NO: 2587113 - RNA, 19 nt, Artificial Sequence
  Description of Artificial Sequence: Synthetic oligonucleotide
agcaugaggagggaccuca

SEQ ID NO: 2587114 - RNA, 19 nt, Artificial Sequence
  Description of Artificial Sequence: Synthetic oligonucleotide
gccgccuucacgugcagcg

SEQ ID NO: 2587115 - RNA, 19 nt, Artificial Sequence
  Description of Artificial Sequence: Synthetic oligonucleotide
gcugucagauccuagcaca

SEQ ID NO: 2587116 - RNA, 19 nt, Artificial Sequence
  Description of Artificial Sequence: Synthetic oligonucleotide
cuguaugguguagaagaug

SEQ ID NO: 2587117 - RNA, 19 nt, Artificial Sequence
  Description of Artificial Sequence: Synthetic oligonucleotide
gguuacauuagcuuagcau

SEQ ID NO: 2587118 - RNA, 19 nt, Artificial Sequence
  Description of Artificial Sequence: Synthetic oligonucleotide
auaggugguaaugcagaca

SEQ ID NO: 2587119 - RNA, 19 nt, Artificial Sequence
  Description of Artificial Sequence: Synthetic oligonucleotide
gggaacucaguaccaguag

SEQ ID NO: 2587120 - RNA, 19 nt, Artificial Sequence
  Description of Artificial Sequence: Synthetic oligonucleotide
agguuacauuagcuuagca

SEQ ID NO: 2587121 - RNA, 19 nt, Artificial Sequence
  Description of Artificial Sequence: Synthetic oligonucleotide
auccuagcacauguuccac

SEQ ID NO: 2587122 - RNA, 19 nt, Artificial Sequence
  Description of Artificial Sequence: Synthetic oligonucleotide
acgcugucagauccuagca

SEQ ID NO: 2587123 - RNA, 19 nt, Artificial Sequence
  Description of Artificial Sequence: Synthetic oligonucleotide
accuaacaacagcuguaug

SEQ ID NO: 2587124 - RNA, 19 nt, Artificial Sequence
  Description of Artificial Sequence: Synthetic oligonucleotide
agaugcacccaaauaugcu

SEQ ID NO: 2587125 - RNA, 19 nt, Artificial Sequence
  Description of Artificial Sequence: Synthetic oligonucleotide
gcagguuacauuagcuuag

SEQ ID NO: 2587126 - RNA, 19 nt, Artificial Sequence
  Description of Artificial Sequence: Synthetic oligonucleotide
acagaaccggcgaaggaca

SEQ ID NO: 2587127 - RNA, 19 nt, Artificial Sequence
  Description of Artificial Sequence: Synthetic oligonucleotide
ugcagacaaugcagaaguc

SEQ ID NO: 2587128 - RNA, 19 nt, Artificial Sequence
  Description of Artificial Sequence: Synthetic oligonucleotide
acuuagaggcacaucuggu

SEQ ID NO: 2587129 - RNA, 19 nt, Artificial Sequence
  Description of Artificial Sequence: Synthetic oligonucleotide
ugccccaccgagagcgcgg

SEQ ID NO: 2587130 - RNA, 19 nt, Artificial Sequence
  Description of Artificial Sequence: Synthetic oligonucleotide
ccuugccccaccgagagcg

SEQ ID NO: 2587131 - RNA, 19 nt, Artificial Sequence
  Description of Artificial Sequence: Synthetic oligonucleotide
ucaagcccacauugauggc

SEQ ID NO: 2587132 - RNA, 19 nt, Artificial Sequence
  Description of Artificial Sequence: Synthetic oligonucleotide
cuguuggauugguugagga

SEQ ID NO: 2587133 - RNA, 19 nt, Artificial Sequence
  Description of Artificial Sequence: Synthetic oligonucleotide
guccugugugugguuaugg

SEQ ID NO: 2587134 - RNA, 19 nt, Artificial Sequence
  Description of Artificial Sequence: Synthetic oligonucleotide
agcaaccuaacaacagcug

SEQ ID NO: 2587135 - RNA, 19 nt, Artificial Sequence
  Description of Artificial Sequence: Synthetic oligonucleotide
caccaggggaacucaguac

SEQ ID NO: 2587136 - RNA, 19 nt, Artificial Sequence
  Description of Artificial Sequence: Synthetic oligonucleotide
gguggugcccauguuggcg

SEQ ID NO: 2587137 - RNA, 19 nt, Artificial Sequence
  Description of Artificial Sequence: Synthetic oligonucleotide
uucgaccaacuuagaaaau

SEQ ID NO: 2587138 - RNA, 19 nt, Artificial Sequence
  Description of Artificial Sequence: Synthetic oligonucleotide
gaacagcacuuagaggcac

SEQ ID NO: 2587139 - RNA, 19 nt, Artificial Sequence
  Description of Artificial Sequence: Synthetic oligonucleotide
uucuggcaccuccuggaaa

SEQ ID NO: 2587140 - RNA, 19 nt, Artificial Sequence
  Description of Artificial Sequence: Synthetic oligonucleotide
cuucuagggacccacacau

SEQ ID NO: 2587141 - RNA, 19 nt, Artificial Sequence
  Description of Artificial Sequence: Synthetic oligonucleotide
ggcauaggugguaaugcag

SEQ ID NO: 2587142 - RNA, 19 nt, Artificial Sequence
  Description of Artificial Sequence: Synthetic oligonucleotide
gccagguagacagaaccgg

SEQ ID NO: 2587143 - RNA, 19 nt, Artificial Sequence
  Description of Artificial Sequence: Synthetic oligonucleotide
gacuggaauggaagggaac

SEQ ID NO: 2587144 - RNA, 19 nt, Artificial Sequence
  Description of Artificial Sequence: Synthetic oligonucleotide
uagaggcacaucuggucau

SEQ ID NO: 2587145 - RNA, 19 nt, Artificial Sequence
  Description of Artificial Sequence: Synthetic oligonucleotide
cagguuacauuagcuuagc

SEQ ID NO: 2587146 - RNA, 19 nt, Artificial Sequence
  Description of Artificial Sequence: Synthetic oligonucleotide
agcgaggcagagugccagg

SEQ ID NO: 2587147 - RNA, 19 nt, Artificial Sequence
  Description of Artificial Sequence: Synthetic oligonucleotide
uugaggacgcugucagauc

SEQ ID NO: 2587148 - RNA, 19 nt, Artificial Sequence
  Description of Artificial Sequence: Synthetic oligonucleotide
cuagcacauguuccaccag

SEQ ID NO: 2587149 - RNA, 19 nt, Artificial Sequence
  Description of Artificial Sequence: Synthetic oligonucleotide
gauugguugaggacgcugu

SEQ ID NO: 2587150 - RNA, 19 nt, Artificial Sequence
  Description of Artificial Sequence: Synthetic oligonucleotide
ggcacaucuggucauuguc

SEQ ID NO: 2587151 - RNA, 19 nt, Artificial Sequence
  Description of Artificial Sequence: Synthetic oligonucleotide
augcacccaaauaugcugu

SEQ ID NO: 2587152 - RNA, 19 nt, Artificial Sequence
  Description of Artificial Sequence: Synthetic oligonucleotide
guuggcggcccagaccagg

SEQ ID NO: 2587153 - RNA, 19 nt, Artificial Sequence
  Description of Artificial Sequence: Synthetic oligonucleotide
gagcgcuaagccagcgagg

SEQ ID NO: 2587154 - RNA, 19 nt, Artificial Sequence
  Description of Artificial Sequence: Synthetic oligonucleotide
ugcagcgcguacagcgaga

SEQ ID NO: 2587155 - RNA, 19 nt, Artificial Sequence
  Description of Artificial Sequence: Synthetic oligonucleotide
gaccaacuuagaaaauuua

SEQ ID NO: 2587156 - RNA, 19 nt, Artificial Sequence
  Description of Artificial Sequence: Synthetic oligonucleotide
guagaagaugcacccaaau

SEQ ID NO: 2587157 - RNA, 19 nt, Artificial Sequence
  Description of Artificial Sequence: Synthetic oligonucleotide
agagcgcgguaauccucgg

SEQ ID NO: 2587158 - RNA, 19 nt, Artificial Sequence
  Description of Artificial Sequence: Synthetic oligonucleotide
auuguccugugugugguua

SEQ ID NO: 2587159 - RNA, 19 nt, Artificial Sequence
  Description of Artificial Sequence: Synthetic oligonucleotide
gugcagcgcguacagcgag

SEQ ID NO: 2587160 - RNA, 19 nt, Artificial Sequence
  Description of Artificial Sequence: Synthetic oligonucleotide
acauguuccaccagcccaa

SEQ ID NO: 2587161 - RNA, 19 nt, Artificial Sequence
  Description of Artificial Sequence: Synthetic oligonucleotide
ggccagguagacagaaccg

SEQ ID NO: 2587162 - RNA, 19 nt, Artificial Sequence
  Description of Artificial Sequence: Synthetic oligonucleotide
uuguccugugugugguuau

SEQ ID NO: 2587163 - RNA, 19 nt, Artificial Sequence
  Description of Artificial Sequence: Synthetic oligonucleotide
uugccccaccgagagcgcg

SEQ ID NO: 2587164 - RNA, 19 nt, Artificial Sequence
  Description of Artificial Sequence: Synthetic oligonucleotide
cagcguccccucaagcaac

SEQ ID NO: 2587165 - RNA, 19 nt, Artificial Sequence
  Description of Artificial Sequence: Synthetic oligonucleotide
gagagcgcuaagccagcga

SEQ ID NO: 2587166 - RNA, 19 nt, Artificial Sequence
  Description of Artificial Sequence: Synthetic oligonucleotide
uccccucaagcaaccuaac

SEQ ID NO: 2587167 - RNA, 19 nt, Artificial Sequence
  Description of Artificial Sequence: Synthetic oligonucleotide
cagaaccggcgaaggacac

SEQ ID NO: 2587168 - RNA, 19 nt, Artificial Sequence
  Description of Artificial Sequence: Synthetic oligonucleotide
cagcuguaugguguagaag

SEQ ID NO: 2587169 - RNA, 19 nt, Artificial Sequence
  Description of Artificial Sequence: Synthetic oligonucleotide
cuucacgugcagcgcguac

SEQ ID NO: 2587170 - RNA, 19 nt, Artificial Sequence
  Description of Artificial Sequence: Synthetic oligonucleotide
gcauaggugguaaugcaga

SEQ ID NO: 2587171 - RNA, 19 nt, Artificial Sequence
  Description of Artificial Sequence: Synthetic oligonucleotide
gaacaggauccaggccagg

SEQ ID NO: 2587172 - RNA, 19 nt, Artificial Sequence
  Description of Artificial Sequence: Synthetic oligonucleotide
ggcgaaggacaccagggga

SEQ ID NO: 2587173 - RNA, 19 nt, Artificial Sequence
  Description of Artificial Sequence: Synthetic oligonucleotide
ugcacccaaauaugcuguu

SEQ ID NO: 2587174 - RNA, 19 nt, Artificial Sequence
  Description of Artificial Sequence: Synthetic oligonucleotide
ggccuuguguucuggcacc

SEQ ID NO: 2587175 - RNA, 19 nt, Artificial Sequence
  Description of Artificial Sequence: Synthetic oligonucleotide
ccuagcacauguuccacca

SEQ ID NO: 2587176 - RNA, 19 nt, Artificial Sequence
  Description of Artificial Sequence: Synthetic oligonucleotide
cagcgaggcagagugccag

SEQ ID NO: 2587177 - RNA, 19 nt, Artificial Sequence
  Description of Artificial Sequence: Synthetic oligonucleotide
cccucaagcaaccuaacaa

SEQ ID NO: 2587178 - RNA, 19 nt, Artificial Sequence
  Description of Artificial Sequence: Synthetic oligonucleotide
ggauugguugaggacgcug

SEQ ID NO: 2587179 - RNA, 19 nt, Artificial Sequence
  Description of Artificial Sequence: Synthetic oligonucleotide
guccccucaagcaaccuaa

SEQ ID NO: 2587180 - RNA, 19 nt, Artificial Sequence
  Description of Artificial Sequence: Synthetic oligonucleotide
cagaagucauagagcacaa

SEQ ID NO: 2587181 - RNA, 19 nt, Artificial Sequence
  Description of Artificial Sequence: Synthetic oligonucleotide
gcucaugugccaaaggcaa

SEQ ID NO: 2587182 - RNA, 19 nt, Artificial Sequence
  Description of Artificial Sequence: Synthetic oligonucleotide
ugacccucuugggcaaggc

SEQ ID NO: 2587183 - RNA, 19 nt, Artificial Sequence
  Description of Artificial Sequence: Synthetic oligonucleotide
ucggucucggggcgcgcgc

SEQ ID NO: 2587184 - RNA, 19 nt, Artificial Sequence
  Description of Artificial Sequence: Synthetic oligonucleotide
guaugguguagaagaugca

SEQ ID NO: 2587185 - RNA, 19 nt, Artificial Sequence
  Description of Artificial Sequence: Synthetic oligonucleotide
agaagucauagagcacaaa

SEQ ID NO: 2587186 - RNA, 19 nt, Artificial Sequence
  Description of Artificial Sequence: Synthetic oligonucleotide
cagcgagagcgcuaagcca

SEQ ID NO: 2587187 - RNA, 19 nt, Artificial Sequence
  Description of Artificial Sequence: Synthetic oligonucleotide
ggcucaugugccaaaggca

SEQ ID NO: 2587188 - RNA, 19 nt, Artificial Sequence
  Description of Artificial Sequence: Synthetic oligonucleotide
gugugugguuauggagggg

SEQ ID NO: 2587189 - RNA, 19 nt, Artificial Sequence
  Description of Artificial Sequence: Synthetic oligonucleotide
gggacuggaauggaaggga

SEQ ID NO: 2587190 - RNA, 19 nt, Artificial Sequence
  Description of Artificial Sequence: Synthetic oligonucleotide
gcgguaauccucggucucg

SEQ ID NO: 2587191 - RNA, 19 nt, Artificial Sequence
  Description of Artificial Sequence: Synthetic oligonucleotide
ggagagaggcccagcgucc

SEQ ID NO: 2587192 - RNA, 19 nt, Artificial Sequence
  Description of Artificial Sequence: Synthetic oligonucleotide
gguagacagaaccggcgaa

SEQ ID NO: 2587193 - RNA, 19 nt, Artificial Sequence
  Description of Artificial Sequence: Synthetic oligonucleotide
cuugccccaccgagagcgc

SEQ ID NO: 2587194 - RNA, 19 nt, Artificial Sequence
  Description of Artificial Sequence: Synthetic oligonucleotide
ggcggcccagaccaggagc

SEQ ID NO: 2587195 - RNA, 19 nt, Artificial Sequence
  Description of Artificial Sequence: Synthetic oligonucleotide
ccuugggaacagcacuuag

SEQ ID NO: 2587196 - RNA, 19 nt, Artificial Sequence
  Description of Artificial Sequence: Synthetic oligonucleotide
caguaggagagaggcccag

SEQ ID NO: 2587197 - RNA, 19 nt, Artificial Sequence
  Description of Artificial Sequence: Synthetic oligonucleotide
cauugauggcauagguggu

SEQ ID NO: 2587198 - RNA, 19 nt, Artificial Sequence
  Description of Artificial Sequence: Synthetic oligonucleotide
cucaugugccaaaggcaaa

SEQ ID NO: 2587199 - RNA, 19 nt, Artificial Sequence
  Description of Artificial Sequence: Synthetic oligonucleotide
uggcaccuccuggaaauua

SEQ ID NO: 2587200 - RNA, 19 nt, Artificial Sequence
  Description of Artificial Sequence: Synthetic oligonucleotide
cugcgucccgggcuccucc

SEQ ID NO: 2587201 - RNA, 19 nt, Artificial Sequence
  Description of Artificial Sequence: Synthetic oligonucleotide
ucccgggcuccuccaggug

SEQ ID NO: 2587202 - RNA, 19 nt, Artificial Sequence
  Description of Artificial Sequence: Synthetic oligonucleotide
cucggucucggggcgcgcg

SEQ ID NO: 2587203 - RNA, 19 nt, Artificial Sequence
  Description of Artificial Sequence: Synthetic oligonucleotide
ugcgucccgggcuccucca

SEQ ID NO: 2587204 - RNA, 19 nt, Artificial Sequence
  Description of Artificial Sequence: Synthetic oligonucleotide
uggauugguugaggacgcu

SEQ ID NO: 2587205 - RNA, 19 nt, Artificial Sequence
  Description of Artificial Sequence: Synthetic oligonucleotide
cccgggcuccuccaggugg

SEQ ID NO: 2587206 - RNA, 19 nt, Artificial Sequence
  Description of Artificial Sequence: Synthetic oligonucleotide
agccagcgaggcagagugc

SEQ ID NO: 2587207 - RNA, 19 nt, Artificial Sequence
  Description of Artificial Sequence: Synthetic oligonucleotide
ugcccauguuggcggccca

SEQ ID NO: 2587208 - RNA, 19 nt, Artificial Sequence
  Description of Artificial Sequence: Synthetic oligonucleotide
gguguagaagaugcaccca

SEQ ID NO: 2587209 - RNA, 19 nt, Artificial Sequence
  Description of Artificial Sequence: Synthetic oligonucleotide
gacccucuugggcaaggcu

SEQ ID NO: 2587210 - RNA, 19 nt, Artificial Sequence
  Description of Artificial Sequence: Synthetic oligonucleotide
gcagcgcguacagcgagag

SEQ ID NO: 2587211 - RNA, 19 nt, Artificial Sequence
  Description of Artificial Sequence: Synthetic oligonucleotide
gcaccuccuggaaauuaag

SEQ ID NO: 2587212 - RNA, 19 nt, Artificial Sequence
  Description of Artificial Sequence: Synthetic oligonucleotide
agcuuagcaugaggaggga

SEQ ID NO: 2587213 - RNA, 19 nt, Artificial Sequence
  Description of Artificial Sequence: Synthetic oligonucleotide
gcacccaaauaugcuguug

SEQ ID NO: 2587214 - RNA, 19 nt, Artificial Sequence
  Description of Artificial Sequence: Synthetic oligonucleotide
guacagcgagagcgcuaag

SEQ ID NO: 2587215 - RNA, 19 nt, Artificial Sequence
  Description of Artificial Sequence: Synthetic oligonucleotide
gacaccaggggaacucagu

SEQ ID NO: 2587216 - RNA, 19 nt, Artificial Sequence
  Description of Artificial Sequence: Synthetic oligonucleotide
cagggccuucuagggaccc

SEQ ID NO: 2587217 - RNA, 19 nt, Artificial Sequence
  Description of Artificial Sequence: Synthetic oligonucleotide
agaggcacaucuggucauu

SEQ ID NO: 2587218 - RNA, 19 nt, Artificial Sequence
  Description of Artificial Sequence: Synthetic oligonucleotide
aaccggcgaaggacaccag

SEQ ID NO: 2587219 - RNA, 19 nt, Artificial Sequence
  Description of Artificial Sequence: Synthetic oligonucleotide
gggccuuuuggccuugugu

SEQ ID NO: 2587220 - RNA, 19 nt, Artificial Sequence
  Description of Artificial Sequence: Synthetic oligonucleotide
gcggcccagaccaggagcc

SEQ ID NO: 2587221 - RNA, 19 nt, Artificial Sequence
  Description of Artificial Sequence: Synthetic oligonucleotide
ggggaacucaguaccagua

SEQ ID NO: 2587222 - RNA, 19 nt, Artificial Sequence
  Description of Artificial Sequence: Synthetic oligonucleotide
cagcgcguacagcgagagc

SEQ ID NO: 2587223 - RNA, 19 nt, Artificial Sequence
  Description of Artificial Sequence: Synthetic oligonucleotide
gcgaaggacaccaggggaa

SEQ ID NO: 2587224 - RNA, 19 nt, Artificial Sequence
  Description of Artificial Sequence: Synthetic oligonucleotide
aggacgcugucagauccua

SEQ ID NO: 2587225 - RNA, 19 nt, Artificial Sequence
  Description of Artificial Sequence: Synthetic oligonucleotide
ggucucggggcgcgcgccg

SEQ ID NO: 2587226 - RNA, 19 nt, Artificial Sequence
  Description of Artificial Sequence: Synthetic oligonucleotide
gguugaggacgcugucaga

SEQ ID NO: 2587227 - RNA, 19 nt, Artificial Sequence
  Description of Artificial Sequence: Synthetic oligonucleotide
cugucagauccuagcacau

SEQ ID NO: 2587228 - RNA, 19 nt, Artificial Sequence
  Description of Artificial Sequence: Synthetic oligonucleotide
cagcacuuagaggcacauc

SEQ ID NO: 2587229 - RNA, 19 nt, Artificial Sequence
  Description of Artificial Sequence: Synthetic oligonucleotide
ggcaccuccuggaaauuaa

SEQ ID NO: 2587230 - RNA, 19 nt, Artificial Sequence
  Description of Artificial Sequence: Synthetic oligonucleotide
ggaccucaggggccuuuug

SEQ ID NO: 2587231 - RNA, 19 nt, Artificial Sequence
  Description of Artificial Sequence: Synthetic oligonucleotide
ggacgcugucagauccuag

SEQ ID NO: 2587232 - RNA, 19 nt, Artificial Sequence
  Description of Artificial Sequence: Synthetic oligonucleotide
caccagcccaaagcccuug

SEQ ID NO: 2587233 - RNA, 19 nt, Artificial Sequence
  Description of Artificial Sequence: Synthetic oligonucleotide
gggccuucuagggacccac

SEQ ID NO: 2587234 - RNA, 19 nt, Artificial Sequence
  Description of Artificial Sequence: Synthetic oligonucleotide
ggcccagcguccccucaag

SEQ ID NO: 2587235 - RNA, 19 nt, Artificial Sequence
  Description of Artificial Sequence: Synthetic oligonucleotide
gcgaggcagagugccaggc

SEQ ID NO: 2587236 - RNA, 19 nt, Artificial Sequence
  Description of Artificial Sequence: Synthetic oligonucleotide
ccagcguccccucaagcaa

SEQ ID NO: 2587237 - RNA, 19 nt, Artificial Sequence
  Description of Artificial Sequence: Synthetic oligonucleotide
caccgagagcgcgguaauc

SEQ ID NO: 2587238 - RNA, 19 nt, Artificial Sequence
  Description of Artificial Sequence: Synthetic oligonucleotide
ccaggggaacucaguacca

SEQ ID NO: 2587239 - RNA, 19 nt, Artificial Sequence
  Description of Artificial Sequence: Synthetic oligonucleotide
agggccuucuagggaccca

SEQ ID NO: 2587240 - RNA, 19 nt, Artificial Sequence
  Description of Artificial Sequence: Synthetic oligonucleotide
ggcgcgcgccgccuucacg

SEQ ID NO: 2587241 - RNA, 19 nt, Artificial Sequence
  Description of Artificial Sequence: Synthetic oligonucleotide
gagcgcgguaauccucggu

SEQ ID NO: 2587242 - RNA, 19 nt, Artificial Sequence
  Description of Artificial Sequence: Synthetic oligonucleotide
gcaaggcucaugugccaaa

SEQ ID NO: 2587243 - RNA, 19 nt, Artificial Sequence
  Description of Artificial Sequence: Synthetic oligonucleotide
ggggccuuuuggccuugug

SEQ ID NO: 2587244 - RNA, 19 nt, Artificial Sequence
  Description of Artificial Sequence: Synthetic oligonucleotide
ggcaaggcucaugugccaa

SEQ ID NO: 2587245 - RNA, 19 nt, Artificial Sequence
  Description of Artificial Sequence: Synthetic oligonucleotide
agcccacauugauggcaua

SEQ ID NO: 2587246 - RNA, 19 nt, Artificial Sequence
  Description of Artificial Sequence: Synthetic oligonucleotide
ccaguaggagagaggccca

SEQ ID NO: 2587247 - RNA, 19 nt, Artificial Sequence
  Description of Artificial Sequence: Synthetic oligonucleotide
cgguaauccucggucucgg

SEQ ID NO: 2587248 - RNA, 19 nt, Artificial Sequence
  Description of Artificial Sequence: Synthetic oligonucleotide
cgagagcgcgguaauccuc

SEQ ID NO: 2587249 - RNA, 19 nt, Artificial Sequence
  Description of Artificial Sequence: Synthetic oligonucleotide
ccccucaagcaaccuaaca

SEQ ID NO: 2587250 - RNA, 19 nt, Artificial Sequence
  Description of Artificial Sequence: Synthetic oligonucleotide
gcgcguacagcgagagcgc

SEQ ID NO: 2587251 - RNA, 19 nt, Artificial Sequence
  Description of Artificial Sequence: Synthetic oligonucleotide
gucucggggcgcgcgccgc

SEQ ID NO: 2587252 - RNA, 19 nt, Artificial Sequence
  Description of Artificial Sequence: Synthetic oligonucleotide
cauguuccaccagcccaaa

SEQ ID NO: 2587253 - RNA, 19 nt, Artificial Sequence
  Description of Artificial Sequence: Synthetic oligonucleotide
gcuguaugguguagaagau

SEQ ID NO: 2587254 - RNA, 19 nt, Artificial Sequence
  Description of Artificial Sequence: Synthetic oligonucleotide
gcgagagcgcuaagccagc

SEQ ID NO: 2587255 - RNA, 19 nt, Artificial Sequence
  Description of Artificial Sequence: Synthetic oligonucleotide
cguacagcgagagcgcuaa

SEQ ID NO: 2587256 - RNA, 19 nt, Artificial Sequence
  Description of Artificial Sequence: Synthetic oligonucleotide
cgcgguaauccucggucuc

SEQ ID NO: 2587257 - RNA, 19 nt, Artificial Sequence
  Description of Artificial Sequence: Synthetic oligonucleotide
cgucccgggcuccuccagg

SEQ ID NO: 2587258 - RNA, 19 nt, Artificial Sequence
  Description of Artificial Sequence: Synthetic oligonucleotide
gcccauguuggcggcccag

SEQ ID NO: 2587259 - RNA, 19 nt, Artificial Sequence
  Description of Artificial Sequence: Synthetic oligonucleotide
cgagagcgcuaagccagcg

SEQ ID NO: 2587260 - RNA, 19 nt, Artificial Sequence
  Description of Artificial Sequence: Synthetic oligonucleotide
gcgcgccgccuucacgugc

SEQ ID NO: 2587261 - RNA, 19 nt, Artificial Sequence
  Description of Artificial Sequence: Synthetic oligonucleotide
cccaaauaugcuguuggau

SEQ ID NO: 2587262 - RNA, 19 nt, Artificial Sequence
  Description of Artificial Sequence: Synthetic oligonucleotide
ggcgccugcgucccgggcu

SEQ ID NO: 2587263 - RNA, 19 nt, Artificial Sequence
  Description of Artificial Sequence: Synthetic oligonucleotide
gagugccaggcgccugcgu

SEQ ID NO: 2587264 - RNA, 19 nt, Artificial Sequence
  Description of Artificial Sequence: Synthetic oligonucleotide
gcgcgguaauccucggucu

SEQ ID NO: 2587265 - RNA, 19 nt, Artificial Sequence
  Description of Artificial Sequence: Synthetic oligonucleotide
gcgcgcgccgccuucacgu

SEQ ID NO: 2587266 - RNA, 19 nt, Artificial Sequence
  Description of Artificial Sequence: Synthetic oligonucleotide
ucggggcgcgcgccgccuu

SEQ ID NO: 2587267 - RNA, 19 nt, Artificial Sequence
  Description of Artificial Sequence: Synthetic oligonucleotide
gcgucccgggcuccuccag

SEQ ID NO: 2587268 - RNA, 19 nt, Artificial Sequence
  Description of Artificial Sequence: Synthetic oligonucleotide
cccaccgagagcgcgguaa

SEQ ID NO: 2587269 - RNA, 19 nt, Artificial Sequence
  Description of Artificial Sequence: Synthetic oligonucleotide
ccagcgaggcagagugcca

SEQ ID NO: 2587270 - RNA, 19 nt, Artificial Sequence
  Description of Artificial Sequence: Synthetic oligonucleotide
gcgcuaagccagcgaggca

SEQ ID NO: 2587271 - RNA, 19 nt, Artificial Sequence
  Description of Artificial Sequence: Synthetic oligonucleotide
ccgccuucacgugcagcgc

SEQ ID NO: 2587272 - RNA, 19 nt, Artificial Sequence
  Description of Artificial Sequence: Synthetic oligonucleotide
ccuuguguucuggcaccuc

SEQ ID NO: 2587273 - RNA, 19 nt, Artificial Sequence
  Description of Artificial Sequence: Synthetic oligonucleotide
cccagaccaggagccggag

SEQ ID NO: 2587274 - RNA, 19 nt, Artificial Sequence
  Description of Artificial Sequence: Synthetic oligonucleotide
gcccagaccaggagccgga

SEQ ID NO: 2587275 - RNA, 19 nt, Artificial Sequence
  Description of Artificial Sequence: Synthetic oligonucleotide
ccgagagcgcgguaauccu

SEQ ID NO: 2587276 - RNA, 19 nt, Artificial Sequence
  Description of Artificial Sequence: Synthetic oligonucleotide
gccaggcgccugcgucccg

SEQ ID NO: 2587277 - RNA, 19 nt, Artificial Sequence
  Description of Artificial Sequence: Synthetic oligonucleotide
gcguacagcgagagcgcua

SEQ ID NO: 2587278 - RNA, 19 nt, Artificial Sequence
  Description of Artificial Sequence: Synthetic oligonucleotide
cgcgccgccuucacgugca

SEQ ID NO: 2587279 - RNA, 19 nt, Artificial Sequence
  Description of Artificial Sequence: Synthetic oligonucleotide
gccuuguguucuggcaccu

SEQ ID NO: 2587280 - RNA, 19 nt, Artificial Sequence
  Description of Artificial Sequence: Synthetic oligonucleotide
gcgccgccuucacgugcag

SEQ ID NO: 2587281 - RNA, 19 nt, Artificial Sequence
  Description of Artificial Sequence: Synthetic oligonucleotide
gccuucacgugcagcgcgu

SEQ ID NO: 2587282 - RNA, 19 nt, Artificial Sequence
  Description of Artificial Sequence: Synthetic oligonucleotide
ccugcgucccgggcuccuc

SEQ ID NO: 2587283 - RNA, 19 nt, Artificial Sequence
  Description of Artificial Sequence: Synthetic oligonucleotide
cgcgcgccgccuucacgug

SEQ ID NO: 2587284 - RNA, 19 nt, Artificial Sequence
  Description of Artificial Sequence: Synthetic oligonucleotide
cggucucggggcgcgcgcc

SEQ ID NO: 2587285 - RNA, 19 nt, Artificial Sequence
  Description of Artificial Sequence: Synthetic oligonucleotide
ccucggucucggggcgcgc

SEQ ID NO: 2587286 - RNA, 19 nt, Artificial Sequence
  Description of Artificial Sequence: Synthetic oligonucleotide
ccuucacgugcagcgcgua

SEQ ID NO: 2587287 - RNA, 19 nt, Artificial Sequence
  Description of Artificial Sequence: Synthetic oligonucleotide
ccaccgagagcgcgguaau

SEQ ID NO: 2587288 - RNA, 19 nt, Artificial Sequence
  Description of Artificial Sequence: Synthetic oligonucleotide
cucggggcgcgcgccgccu

SEQ ID NO: 2587289 - RNA, 19 nt, Artificial Sequence
  Description of Artificial Sequence: Synthetic oligonucleotide
gccccaccgagagcgcggu

SEQ ID NO: 2587290 - RNA, 19 nt, Artificial Sequence
  Description of Artificial Sequence: Synthetic oligonucleotide
cgcguacagcgagagcgcu

SEQ ID NO: 2587291 - RNA, 19 nt, Artificial Sequence
  Description of Artificial Sequence: Synthetic oligonucleotide
ccucuugggcaaggcucau

SEQ ID NO: 2587292 - RNA, 19 nt, Artificial Sequence
  Description of Artificial Sequence: Synthetic oligonucleotide
ccccaccgagagcgcggua

SEQ ID NO: 2587293 - RNA, 19 nt, Artificial Sequence
  Description of Artificial Sequence: Synthetic oligonucleotide
uaaauuuucggacagaauc

SEQ ID NO: 2587294 - RNA, 19 nt, Artificial Sequence
  Description of Artificial Sequence: Synthetic oligonucleotide
uuuauuaaaggcacgcagc

SEQ ID NO: 2587295 - RNA, 19 nt, Artificial Sequence
  Description of Artificial Sequence: Synthetic oligonucleotide
cauacauuugcacagagug

SEQ ID NO: 2587296 - RNA, 19 nt, Artificial Sequence
  Description of Artificial Sequence: Synthetic oligonucleotide
aacugguacaauuucagga

SEQ ID NO: 2587297 - RNA, 19 nt, Artificial Sequence
  Description of Artificial Sequence: Synthetic oligonucleotide
agugaagucaguguggggc

SEQ ID NO: 2587298 - RNA, 19 nt, Artificial Sequence
  Description of Artificial Sequence: Synthetic oligonucleotide
acaauuucaggacagcuag

SEQ ID NO: 2587299 - RNA, 19 nt, Artificial Sequence
  Description of Artificial Sequence: Synthetic oligonucleotide
acugguacaauuucaggac

SEQ ID NO: 2587300 - RNA, 19 nt, Artificial Sequence
  Description of Artificial Sequence: Synthetic oligonucleotide
aaaguggcaggucuccagc

SEQ ID NO: 2587301 - RNA, 19 nt, Artificial Sequence
  Description of Artificial Sequence: Synthetic oligonucleotide
ucggacagaaucuucaaag

SEQ ID NO: 2587302 - RNA, 19 nt, Artificial Sequence
  Description of Artificial Sequence: Synthetic oligonucleotide
uggucgaucauacauuugc

SEQ ID NO: 2587303 - RNA, 19 nt, Artificial Sequence
  Description of Artificial Sequence: Synthetic oligonucleotide
uucaaagccaguuaugccu

SEQ ID NO: 2587304 - RNA, 19 nt, Artificial Sequence
  Description of Artificial Sequence: Synthetic oligonucleotide
cagaucauaagcauucucc

SEQ ID NO: 2587305 - RNA, 19 nt, Artificial Sequence
  Description of Artificial Sequence: Synthetic oligonucleotide
ugaacugguacaauuucag

SEQ ID NO: 2587306 - RNA, 19 nt, Artificial Sequence
  Description of Artificial Sequence: Synthetic oligonucleotide
aguuaugccuuccaagagg

SEQ ID NO: 2587307 - RNA, 19 nt, Artificial Sequence
  Description of Artificial Sequence: Synthetic oligonucleotide
auuaaaggcacgcagcagu

SEQ ID NO: 2587308 - RNA, 19 nt, Artificial Sequence
  Description of Artificial Sequence: Synthetic oligonucleotide
uuuucggacagaaucuuca

SEQ ID NO: 2587309 - RNA, 19 nt, Artificial Sequence
  Description of Artificial Sequence: Synthetic oligonucleotide
auacccuugagcaacuugc

SEQ ID NO: 2587310 - RNA, 19 nt, Artificial Sequence
  Description of Artificial Sequence: Synthetic oligonucleotide
cuuggguuuccacauaccg

SEQ ID NO: 2587311 - RNA, 19 nt, Artificial Sequence
  Description of Artificial Sequence: Synthetic oligonucleotide
ucgaucauacauuugcaca

SEQ ID NO: 2587312 - RNA, 19 nt, Artificial Sequence
  Description of Artificial Sequence: Synthetic oligonucleotide
acagagugaagucagugug

SEQ ID NO: 2587313 - RNA, 19 nt, Artificial Sequence
  Description of Artificial Sequence: Synthetic oligonucleotide
aaauuuucggacagaaucu

SEQ ID NO: 2587314 - RNA, 19 nt, Artificial Sequence
  Description of Artificial Sequence: Synthetic oligonucleotide
agaucugucggaugggccg

SEQ ID NO: 2587315 - RNA, 19 nt, Artificial Sequence
  Description of Artificial Sequence: Synthetic oligonucleotide
auggcagauaaauuuucgg

SEQ ID NO: 2587316 - RNA, 19 nt, Artificial Sequence
  Description of Artificial Sequence: Synthetic oligonucleotide
cuuuaugcucucuuccugg

SEQ ID NO: 2587317 - RNA, 19 nt, Artificial Sequence
  Description of Artificial Sequence: Synthetic oligonucleotide
auuguaccugucgauaccc

SEQ ID NO: 2587318 - RNA, 19 nt, Artificial Sequence
  Description of Artificial Sequence: Synthetic oligonucleotide
uaugccuuccaagaggucc

SEQ ID NO: 2587319 - RNA, 19 nt, Artificial Sequence
  Description of Artificial Sequence: Synthetic oligonucleotide
ugucagucagaucaccaag

SEQ ID NO: 2587320 - RNA, 19 nt, Artificial Sequence
  Description of Artificial Sequence: Synthetic oligonucleotide
aauuucaggacagcuaggu

SEQ ID NO: 2587321 - RNA, 19 nt, Artificial Sequence
  Description of Artificial Sequence: Synthetic oligonucleotide
auuugcacagagugaaguc

SEQ ID NO: 2587322 - RNA, 19 nt, Artificial Sequence
  Description of Artificial Sequence: Synthetic oligonucleotide
uggcagauaaauuuucgga

SEQ ID NO: 2587323 - RNA, 19 nt, Artificial Sequence
  Description of Artificial Sequence: Synthetic oligonucleotide
ucauaagcauucuccuugg

SEQ ID NO: 2587324 - RNA, 19 nt, Artificial Sequence
  Description of Artificial Sequence: Synthetic oligonucleotide
ucaggauuguaccugucga

SEQ ID NO: 2587325 - RNA, 19 nt, Artificial Sequence
  Description of Artificial Sequence: Synthetic oligonucleotide
agaaucugggcaguaaccg

SEQ ID NO: 2587326 - RNA, 19 nt, Artificial Sequence
  Description of Artificial Sequence: Synthetic oligonucleotide
aguaaccguggucugaaag

SEQ ID NO: 2587327 - RNA, 19 nt, Artificial Sequence
  Description of Artificial Sequence: Synthetic oligonucleotide
ucugaaagaaggcuggguu

SEQ ID NO: 2587328 - RNA, 19 nt, Artificial Sequence
  Description of Artificial Sequence: Synthetic oligonucleotide
cauggcagauaaauuuucg

SEQ ID NO: 2587329 - RNA, 19 nt, Artificial Sequence
  Description of Artificial Sequence: Synthetic oligonucleotide
gaacugguacaauuucagg

SEQ ID NO: 2587330 - RNA, 19 nt, Artificial Sequence
  Description of Artificial Sequence: Synthetic oligonucleotide
agaucauaagcauucuccu

SEQ ID NO: 2587331 - RNA, 19 nt, Artificial Sequence
  Description of Artificial Sequence: Synthetic oligonucleotide
uaagcauucuccuuggcuu

SEQ ID NO: 2587332 - RNA, 19 nt, Artificial Sequence
  Description of Artificial Sequence: Synthetic oligonucleotide
uacauuugcacagagugaa

SEQ ID NO: 2587333 - RNA, 19 nt, Artificial Sequence
  Description of Artificial Sequence: Synthetic oligonucleotide
ugagcugguugucagucag

SEQ ID NO: 2587334 - RNA, 19 nt, Artificial Sequence
  Description of Artificial Sequence: Synthetic oligonucleotide
auaagcauucuccuuggcu

SEQ ID NO: 2587335 - RNA, 19 nt, Artificial Sequence
  Description of Artificial Sequence: Synthetic oligonucleotide
uccagggcuugccagaaag

SEQ ID NO: 2587336 - RNA, 19 nt, Artificial Sequence
  Description of Artificial Sequence: Synthetic oligonucleotide
caugaugcuggacacacug

SEQ ID NO: 2587337 - RNA, 19 nt, Artificial Sequence
  Description of Artificial Sequence: Synthetic oligonucleotide
cauacuugcucauccacac

SEQ ID NO: 2587338 - RNA, 19 nt, Artificial Sequence
  Description of Artificial Sequence: Synthetic oligonucleotide
aaagccaguuaugccuucc

SEQ ID NO: 2587339 - RNA, 19 nt, Artificial Sequence
  Description of Artificial Sequence: Synthetic oligonucleotide
ugcagaugaaaaucugccc

SEQ ID NO: 2587340 - RNA, 19 nt, Artificial Sequence
  Description of Artificial Sequence: Synthetic oligonucleotide
uugcacagagugaagucag

SEQ ID NO: 2587341 - RNA, 19 nt, Artificial Sequence
  Description of Artificial Sequence: Synthetic oligonucleotide
aaaggcacgcagcaguuau

SEQ ID NO: 2587342 - RNA, 19 nt, Artificial Sequence
  Description of Artificial Sequence: Synthetic oligonucleotide
cagauaaauuuucggacag

SEQ ID NO: 2587343 - RNA, 19 nt, Artificial Sequence
  Description of Artificial Sequence: Synthetic oligonucleotide
gauaaauuuucggacagaa

SEQ ID NO: 2587344 - RNA, 19 nt, Artificial Sequence
  Description of Artificial Sequence: Synthetic oligonucleotide
accuccgucagcuuccgcg

SEQ ID NO: 2587345 - RNA, 19 nt, Artificial Sequence
  Description of Artificial Sequence: Synthetic oligonucleotide
uacaauuucaggacagcua

SEQ ID NO: 2587346 - RNA, 19 nt, Artificial Sequence
  Description of Artificial Sequence: Synthetic oligonucleotide
aucgccaugaccuccguca

SEQ ID NO: 2587347 - RNA, 19 nt, Artificial Sequence
  Description of Artificial Sequence: Synthetic oligonucleotide
ugcucauccacaccuugag

SEQ ID NO: 2587348 - RNA, 19 nt, Artificial Sequence
  Description of Artificial Sequence: Synthetic oligonucleotide
aagaucugucggaugggcc

SEQ ID NO: 2587349 - RNA, 19 nt, Artificial Sequence
  Description of Artificial Sequence: Synthetic oligonucleotide
ugcucaaacaucgccauga

SEQ ID NO: 2587350 - RNA, 19 nt, Artificial Sequence
  Description of Artificial Sequence: Synthetic oligonucleotide
cugucgauacccuugagca

SEQ ID NO: 2587351 - RNA, 19 nt, Artificial Sequence
  Description of Artificial Sequence: Synthetic oligonucleotide
gauuguaccugucgauacc

SEQ ID NO: 2587352 - RNA, 19 nt, Artificial Sequence
  Description of Artificial Sequence: Synthetic oligonucleotide
agagugaagucaguguggg

SEQ ID NO: 2587353 - RNA, 19 nt, Artificial Sequence
  Description of Artificial Sequence: Synthetic oligonucleotide
ugaugugccuggucgauca

SEQ ID NO: 2587354 - RNA, 19 nt, Artificial Sequence
  Description of Artificial Sequence: Synthetic oligonucleotide
ugggcaguaaccguggucu

SEQ ID NO: 2587355 - RNA, 19 nt, Artificial Sequence
  Description of Artificial Sequence: Synthetic oligonucleotide
gaaggcuggguugaacugg

SEQ ID NO: 2587356 - RNA, 19 nt, Artificial Sequence
  Description of Artificial Sequence: Synthetic oligonucleotide
uuuaugcucucuuccuggc

SEQ ID NO: 2587357 - RNA, 19 nt, Artificial Sequence
  Description of Artificial Sequence: Synthetic oligonucleotide
aaaaucugcccugacucgu

SEQ ID NO: 2587358 - RNA, 19 nt, Artificial Sequence
  Description of Artificial Sequence: Synthetic oligonucleotide
cugaaagaaggcuggguug

SEQ ID NO: 2587359 - RNA, 19 nt, Artificial Sequence
  Description of Artificial Sequence: Synthetic oligonucleotide
aaucugggcaguaaccgug

SEQ ID NO: 2587360 - RNA, 19 nt, Artificial Sequence
  Description of Artificial Sequence: Synthetic oligonucleotide
cagaaucugggcaguaacc

SEQ ID NO: 2587361 - RNA, 19 nt, Artificial Sequence
  Description of Artificial Sequence: Synthetic oligonucleotide
ggcagauaaauuuucggac

SEQ ID NO: 2587362 - RNA, 19 nt, Artificial Sequence
  Description of Artificial Sequence: Synthetic oligonucleotide
acccuugagcaacuugccc

SEQ ID NO: 2587363 - RNA, 19 nt, Artificial Sequence
  Description of Artificial Sequence: Synthetic oligonucleotide
ugguacgugaugcccacca

SEQ ID NO: 2587364 - RNA, 19 nt, Artificial Sequence
  Description of Artificial Sequence: Synthetic oligonucleotide
aggacagcuagguuggccu

SEQ ID NO: 2587365 - RNA, 19 nt, Artificial Sequence
  Description of Artificial Sequence: Synthetic oligonucleotide
uuggccuccagaucauaag

SEQ ID NO: 2587366 - RNA, 19 nt, Artificial Sequence
  Description of Artificial Sequence: Synthetic oligonucleotide
aacaucgccaugaccuccg

SEQ ID NO: 2587367 - RNA, 19 nt, Artificial Sequence
  Description of Artificial Sequence: Synthetic oligonucleotide
aguuauugggaggaggcca

SEQ ID NO: 2587368 - RNA, 19 nt, Artificial Sequence
  Description of Artificial Sequence: Synthetic oligonucleotide
guaaccguggucugaaaga

SEQ ID NO: 2587369 - RNA, 19 nt, Artificial Sequence
  Description of Artificial Sequence: Synthetic oligonucleotide
cagaugaaaaucugcccug

SEQ ID NO: 2587370 - RNA, 19 nt, Artificial Sequence
  Description of Artificial Sequence: Synthetic oligonucleotide
acucgucagcgcuccagcc

SEQ ID NO: 2587371 - RNA, 19 nt, Artificial Sequence
  Description of Artificial Sequence: Synthetic oligonucleotide
agcaguuauugggaggagg

SEQ ID NO: 2587372 - RNA, 19 nt, Artificial Sequence
  Description of Artificial Sequence: Synthetic oligonucleotide
gucgaucauacauuugcac

SEQ ID NO: 2587373 - RNA, 19 nt, Artificial Sequence
  Description of Artificial Sequence: Synthetic oligonucleotide
agaaucuucaaagccaguu

SEQ ID NO: 2587374 - RNA, 19 nt, Artificial Sequence
  Description of Artificial Sequence: Synthetic oligonucleotide
cagguucucaggauuguac

SEQ ID NO: 2587375 - RNA, 19 nt, Artificial Sequence
  Description of Artificial Sequence: Synthetic oligonucleotide
gaaucuucaaagccaguua

SEQ ID NO: 2587376 - RNA, 19 nt, Artificial Sequence
  Description of Artificial Sequence: Synthetic oligonucleotide
uguggggcagguuggugag

SEQ ID NO: 2587377 - RNA, 19 nt, Artificial Sequence
  Description of Artificial Sequence: Synthetic oligonucleotide
augcucucuuccuggcugc

SEQ ID NO: 2587378 - RNA, 19 nt, Artificial Sequence
  Description of Artificial Sequence: Synthetic oligonucleotide
ucuugaugugccuggucga

SEQ ID NO: 2587379 - RNA, 19 nt, Artificial Sequence
  Description of Artificial Sequence: Synthetic oligonucleotide
gcacgcagcaguuauuggg

SEQ ID NO: 2587380 - RNA, 19 nt, Artificial Sequence
  Description of Artificial Sequence: Synthetic oligonucleotide
uugagcaacuugcccacgu

SEQ ID NO: 2587381 - RNA, 19 nt, Artificial Sequence
  Description of Artificial Sequence: Synthetic oligonucleotide
caauuucaggacagcuagg

SEQ ID NO: 2587382 - RNA, 19 nt, Artificial Sequence
  Description of Artificial Sequence: Synthetic oligonucleotide
cagccauacuugcucaucc

SEQ ID NO: 2587383 - RNA, 19 nt, Artificial Sequence
  Description of Artificial Sequence: Synthetic oligonucleotide
uucggacagaaucuucaaa

SEQ ID NO: 2587384 - RNA, 19 nt, Artificial Sequence
  Description of Artificial Sequence: Synthetic oligonucleotide
gucgauacccuugagcaac

SEQ ID NO: 2587385 - RNA, 19 nt, Artificial Sequence
  Description of Artificial Sequence: Synthetic oligonucleotide
aaucugcccugacucguca

SEQ ID NO: 2587386 - RNA, 19 nt, Artificial Sequence
  Description of Artificial Sequence: Synthetic oligonucleotide
cuuggcuuggguuuccaca

SEQ ID NO: 2587387 - RNA, 19 nt, Artificial Sequence
  Description of Artificial Sequence: Synthetic oligonucleotide
aaaucugcccugacucguc

SEQ ID NO: 2587388 - RNA, 19 nt, Artificial Sequence
  Description of Artificial Sequence: Synthetic oligonucleotide
uuaugcucucuuccuggcu

SEQ ID NO: 2587389 - RNA, 19 nt, Artificial Sequence
  Description of Artificial Sequence: Synthetic oligonucleotide
caguuaugccuuccaagag

SEQ ID NO: 2587390 - RNA, 19 nt, Artificial Sequence
  Description of Artificial Sequence: Synthetic oligonucleotide
auuuucggacagaaucuuc

SEQ ID NO: 2587391 - RNA, 19 nt, Artificial Sequence
  Description of Artificial Sequence: Synthetic oligonucleotide
aagccaguuaugccuucca

SEQ ID NO: 2587392 - RNA, 19 nt, Artificial Sequence
  Description of Artificial Sequence: Synthetic oligonucleotide
uaccugucgauacccuuga

SEQ ID NO: 2587393 - RNA, 19 nt, Artificial Sequence
  Description of Artificial Sequence: Synthetic oligonucleotide
cgagguacaagaucugucg

SEQ ID NO: 2587394 - RNA, 19 nt, Artificial Sequence
  Description of Artificial Sequence: Synthetic oligonucleotide
uuucggacagaaucuucaa

SEQ ID NO: 2587395 - RNA, 19 nt, Artificial Sequence
  Description of Artificial Sequence: Synthetic oligonucleotide
uaaccguggucugaaagaa

SEQ ID NO: 2587396 - RNA, 19 nt, Artificial Sequence
  Description of Artificial Sequence: Synthetic oligonucleotide
gagugaagucagugugggg

SEQ ID NO: 2587397 - RNA, 19 nt, Artificial Sequence
  Description of Artificial Sequence: Synthetic oligonucleotide
gacacacugucaaagucga

SEQ ID NO: 2587398 - RNA, 19 nt, Artificial Sequence
  Description of Artificial Sequence: Synthetic oligonucleotide
ucucagcaagcagccagcg

SEQ ID NO: 2587399 - RNA, 19 nt, Artificial Sequence
  Description of Artificial Sequence: Synthetic oligonucleotide
gacucgucagcgcuccagc

SEQ ID NO: 2587400 - RNA, 19 nt, Artificial Sequence
  Description of Artificial Sequence: Synthetic oligonucleotide
gagcgcuuucagcagaauc

SEQ ID NO: 2587401 - RNA, 19 nt, Artificial Sequence
  Description of Artificial Sequence: Synthetic oligonucleotide
cgaucauacauuugcacag

SEQ ID NO: 2587402 - RNA, 19 nt, Artificial Sequence
  Description of Artificial Sequence: Synthetic oligonucleotide
ugggcuuuaugcucucuuc

SEQ ID NO: 2587403 - RNA, 19 nt, Artificial Sequence
  Description of Artificial Sequence: Synthetic oligonucleotide
ggauuguaccugucgauac

SEQ ID NO: 2587404 - RNA, 19 nt, Artificial Sequence
  Description of Artificial Sequence: Synthetic oligonucleotide
acaagaucugucggauggg

SEQ ID NO: 2587405 - RNA, 19 nt, Artificial Sequence
  Description of Artificial Sequence: Synthetic oligonucleotide
gucgaucuucuccacgaug

SEQ ID NO: 2587406 - RNA, 19 nt, Artificial Sequence
  Description of Artificial Sequence: Synthetic oligonucleotide
gagcaacuugcccacguuc

SEQ ID NO: 2587407 - RNA, 19 nt, Artificial Sequence
  Description of Artificial Sequence: Synthetic oligonucleotide
gccaguuaugccuuccaag

SEQ ID NO: 2587408 - RNA, 19 nt, Artificial Sequence
  Description of Artificial Sequence: Synthetic oligonucleotide
agguccccgagguacaaga

SEQ ID NO: 2587409 - RNA, 19 nt, Artificial Sequence
  Description of Artificial Sequence: Synthetic oligonucleotide
cuugccagaaagcuugaaa

SEQ ID NO: 2587410 - RNA, 19 nt, Artificial Sequence
  Description of Artificial Sequence: Synthetic oligonucleotide
uauugggaggaggccauga

SEQ ID NO: 2587411 - RNA, 19 nt, Artificial Sequence
  Description of Artificial Sequence: Synthetic oligonucleotide
uucgcucucaucugcucaa

SEQ ID NO: 2587412 - RNA, 19 nt, Artificial Sequence
  Description of Artificial Sequence: Synthetic oligonucleotide
uggugagcgcuuucagcag

SEQ ID NO: 2587413 - RNA, 19 nt, Artificial Sequence
  Description of Artificial Sequence: Synthetic oligonucleotide
auacauuugcacagaguga

SEQ ID NO: 2587414 - RNA, 19 nt, Artificial Sequence
  Description of Artificial Sequence: Synthetic oligonucleotide
gaagucaguguggggcagg

SEQ ID NO: 2587415 - RNA, 19 nt, Artificial Sequence
  Description of Artificial Sequence: Synthetic oligonucleotide
cacguucgcucucaucugc

SEQ ID NO: 2587416 - RNA, 19 nt, Artificial Sequence
  Description of Artificial Sequence: Synthetic oligonucleotide
guaccugucgauacccuug

SEQ ID NO: 2587417 - RNA, 19 nt, Artificial Sequence
  Description of Artificial Sequence: Synthetic oligonucleotide
gcaguuauugggaggaggc

SEQ ID NO: 2587418 - RNA, 19 nt, Artificial Sequence
  Description of Artificial Sequence: Synthetic oligonucleotide
uguaccugucgauacccuu

SEQ ID NO: 2587419 - RNA, 19 nt, Artificial Sequence
  Description of Artificial Sequence: Synthetic oligonucleotide
ucgucagcgcuccagccau

SEQ ID NO: 2587420 - RNA, 19 nt, Artificial Sequence
  Description of Artificial Sequence: Synthetic oligonucleotide
gaucauacauuugcacaga

SEQ ID NO: 2587421 - RNA, 19 nt, Artificial Sequence
  Description of Artificial Sequence: Synthetic oligonucleotide
cauaagcauucuccuuggc

SEQ ID NO: 2587422 - RNA, 19 nt, Artificial Sequence
  Description of Artificial Sequence: Synthetic oligonucleotide
guacaagaucugucggaug

SEQ ID NO: 2587423 - RNA, 19 nt, Artificial Sequence
  Description of Artificial Sequence: Synthetic oligonucleotide
ucgccaugaccuccgucag

SEQ ID NO: 2587424 - RNA, 19 nt, Artificial Sequence
  Description of Artificial Sequence: Synthetic oligonucleotide
agauaaauuuucggacaga

SEQ ID NO: 2587425 - RNA, 19 nt, Artificial Sequence
  Description of Artificial Sequence: Synthetic oligonucleotide
ugucgauacccuugagcaa

SEQ ID NO: 2587426 - RNA, 19 nt, Artificial Sequence
  Description of Artificial Sequence: Synthetic oligonucleotide
ugacucgucagcgcuccag

SEQ ID NO: 2587427 - RNA, 19 nt, Artificial Sequence
  Description of Artificial Sequence: Synthetic oligonucleotide
cacgcagcaguuauuggga

SEQ ID NO: 2587428 - RNA, 19 nt, Artificial Sequence
  Description of Artificial Sequence: Synthetic oligonucleotide
ugguugucagucagaucac

SEQ ID NO: 2587429 - RNA, 19 nt, Artificial Sequence
  Description of Artificial Sequence: Synthetic oligonucleotide
agcuagguuggccuccaga

SEQ ID NO: 2587430 - RNA, 19 nt, Artificial Sequence
  Description of Artificial Sequence: Synthetic oligonucleotide
ugggccgcucuucuugaug

SEQ ID NO: 2587431 - RNA, 19 nt, Artificial Sequence
  Description of Artificial Sequence: Synthetic oligonucleotide
uuguaccugucgauacccu

SEQ ID NO: 2587432 - RNA, 19 nt, Artificial Sequence
  Description of Artificial Sequence: Synthetic oligonucleotide
gggcuuuaugcucucuucc

SEQ ID NO: 2587433 - RNA, 19 nt, Artificial Sequence
  Description of Artificial Sequence: Synthetic oligonucleotide
uggcaggucuccagcaggu

SEQ ID NO: 2587434 - RNA, 19 nt, Artificial Sequence
  Description of Artificial Sequence: Synthetic oligonucleotide
gaugcuggacacacuguca

SEQ ID NO: 2587435 - RNA, 19 nt, Artificial Sequence
  Description of Artificial Sequence: Synthetic oligonucleotide
ucggaugggccgcucuucu

SEQ ID NO: 2587436 - RNA, 19 nt, Artificial Sequence
  Description of Artificial Sequence: Synthetic oligonucleotide
acgcagcaguuauugggag

SEQ ID NO: 2587437 - RNA, 19 nt, Artificial Sequence
  Description of Artificial Sequence: Synthetic oligonucleotide
aggcacgcagcaguuauug

SEQ ID NO: 2587438 - RNA, 19 nt, Artificial Sequence
  Description of Artificial Sequence: Synthetic oligonucleotide
auaaauuuucggacagaau

SEQ ID NO: 2587439 - RNA, 19 nt, Artificial Sequence
  Description of Artificial Sequence: Synthetic oligonucleotide
gcagaugaaaaucugcccu

SEQ ID NO: 2587440 - RNA, 19 nt, Artificial Sequence
  Description of Artificial Sequence: Synthetic oligonucleotide
ccugucgauacccuugagc

SEQ ID NO: 2587441 - RNA, 19 nt, Artificial Sequence
  Description of Artificial Sequence: Synthetic oligonucleotide
ugcacagagugaagucagu

SEQ ID NO: 2587442 - RNA, 19 nt, Artificial Sequence
  Description of Artificial Sequence: Synthetic oligonucleotide
auuucaggacagcuagguu

SEQ ID NO: 2587443 - RNA, 19 nt, Artificial Sequence
  Description of Artificial Sequence: Synthetic oligonucleotide
gcuuuaugcucucuuccug

SEQ ID NO: 2587444 - RNA, 19 nt, Artificial Sequence
  Description of Artificial Sequence: Synthetic oligonucleotide
ccaguuaugccuuccaaga

SEQ ID NO: 2587445 - RNA, 19 nt, Artificial Sequence
  Description of Artificial Sequence: Synthetic oligonucleotide
aaccguggucugaaagaag

SEQ ID NO: 2587446 - RNA, 19 nt, Artificial Sequence
  Description of Artificial Sequence: Synthetic oligonucleotide
guucgcucucaucugcuca

SEQ ID NO: 2587447 - RNA, 19 nt, Artificial Sequence
  Description of Artificial Sequence: Synthetic oligonucleotide
ucgauacccuugagcaacu

SEQ ID NO: 2587448 - RNA, 19 nt, Artificial Sequence
  Description of Artificial Sequence: Synthetic oligonucleotide
gacagcuagguuggccucc

SEQ ID NO: 2587449 - RNA, 19 nt, Artificial Sequence
  Description of Artificial Sequence: Synthetic oligonucleotide
gcagaaucugggcaguaac

SEQ ID NO: 2587450 - RNA, 19 nt, Artificial Sequence
  Description of Artificial Sequence: Synthetic oligonucleotide
agccauacuugcucaucca

SEQ ID NO: 2587451 - RNA, 19 nt, Artificial Sequence
  Description of Artificial Sequence: Synthetic oligonucleotide
caguuauugggaggaggcc

SEQ ID NO: 2587452 - RNA, 19 nt, Artificial Sequence
  Description of Artificial Sequence: Synthetic oligonucleotide
auugggaggaggccaugau

SEQ ID NO: 2587453 - RNA, 19 nt, Artificial Sequence
  Description of Artificial Sequence: Synthetic oligonucleotide
gaucugucggaugggccgc

SEQ ID NO: 2587454 - RNA, 19 nt, Artificial Sequence
  Description of Artificial Sequence: Synthetic oligonucleotide
cuagguuggccuccagauc

SEQ ID NO: 2587455 - RNA, 19 nt, Artificial Sequence
  Description of Artificial Sequence: Synthetic oligonucleotide
cacauaccgcuccagcguc

SEQ ID NO: 2587456 - RNA, 19 nt, Artificial Sequence
  Description of Artificial Sequence: Synthetic oligonucleotide
uccagaucauaagcauucu

SEQ ID NO: 2587457 - RNA, 19 nt, Artificial Sequence
  Description of Artificial Sequence: Synthetic oligonucleotide
accaagcaucucagcaagc

SEQ ID NO: 2587458 - RNA, 19 nt, Artificial Sequence
  Description of Artificial Sequence: Synthetic oligonucleotide
guuaugccuuccaagaggu

SEQ ID NO: 2587459 - RNA, 19 nt, Artificial Sequence
  Description of Artificial Sequence: Synthetic oligonucleotide
uguuuucauccagggcuug

SEQ ID NO: 2587460 - RNA, 19 nt, Artificial Sequence
  Description of Artificial Sequence: Synthetic oligonucleotide
aagucaguguggggcaggu

SEQ ID NO: 2587461 - RNA, 19 nt, Artificial Sequence
  Description of Artificial Sequence: Synthetic oligonucleotide
aggauuguaccugucgaua

SEQ ID NO: 2587462 - RNA, 19 nt, Artificial Sequence
  Description of Artificial Sequence: Synthetic oligonucleotide
gaugggccgcucuucuuga

SEQ ID NO: 2587463 - RNA, 19 nt, Artificial Sequence
  Description of Artificial Sequence: Synthetic oligonucleotide
gguacaauuucaggacagc

SEQ ID NO: 2587464 - RNA, 19 nt, Artificial Sequence
  Description of Artificial Sequence: Synthetic oligonucleotide
gcuggguugaacugguaca

SEQ ID NO: 2587465 - RNA, 19 nt, Artificial Sequence
  Description of Artificial Sequence: Synthetic oligonucleotide
cugcccugacucgucagcg

SEQ ID NO: 2587466 - RNA, 19 nt, Artificial Sequence
  Description of Artificial Sequence: Synthetic oligonucleotide
uaccgcuccagcgucgcca

SEQ ID NO: 2587467 - RNA, 19 nt, Artificial Sequence
  Description of Artificial Sequence: Synthetic oligonucleotide
ggcuggguugaacugguac

SEQ ID NO: 2587468 - RNA, 19 nt, Artificial Sequence
  Description of Artificial Sequence: Synthetic oligonucleotide
ucgccagguucucaggauu

SEQ ID NO: 2587469 - RNA, 19 nt, Artificial Sequence
  Description of Artificial Sequence: Synthetic oligonucleotide
auaccgcuccagcgucgcc

SEQ ID NO: 2587470 - RNA, 19 nt, Artificial Sequence
  Description of Artificial Sequence: Synthetic oligonucleotide
gaucauaagcauucuccuu

SEQ ID NO: 2587471 - RNA, 19 nt, Artificial Sequence
  Description of Artificial Sequence: Synthetic oligonucleotide
acauuugcacagagugaag

SEQ ID NO: 2587472 - RNA, 19 nt, Artificial Sequence
  Description of Artificial Sequence: Synthetic oligonucleotide
ucagcuuccgcggccccgc

SEQ ID NO: 2587473 - RNA, 19 nt, Artificial Sequence
  Description of Artificial Sequence: Synthetic oligonucleotide
ugcccugacucgucagcgc

SEQ ID NO: 2587474 - RNA, 19 nt, Artificial Sequence
  Description of Artificial Sequence: Synthetic oligonucleotide
ccagcggucgaugugcugg

SEQ ID NO: 2587475 - RNA, 19 nt, Artificial Sequence
  Description of Artificial Sequence: Synthetic oligonucleotide
guacaauuucaggacagcu

SEQ ID NO: 2587476 - RNA, 19 nt, Artificial Sequence
  Description of Artificial Sequence: Synthetic oligonucleotide
agccaguuaugccuuccaa

SEQ ID NO: 2587477 - RNA, 19 nt, Artificial Sequence
  Description of Artificial Sequence: Synthetic oligonucleotide
agaaagcuugaaaguggca

SEQ ID NO: 2587478 - RNA, 19 nt, Artificial Sequence
  Description of Artificial Sequence: Synthetic oligonucleotide
ugcuggacacacugucaaa

SEQ ID NO: 2587479 - RNA, 19 nt, Artificial Sequence
  Description of Artificial Sequence: Synthetic oligonucleotide
cauaccgcuccagcgucgc

SEQ ID NO: 2587480 - RNA, 19 nt, Artificial Sequence
  Description of Artificial Sequence: Synthetic oligonucleotide
guccccgagguacaagauc

SEQ ID NO: 2587481 - RNA, 19 nt, Artificial Sequence
  Description of Artificial Sequence: Synthetic oligonucleotide
agguuggugagcgcuuuca

SEQ ID NO: 2587482 - RNA, 19 nt, Artificial Sequence
  Description of Artificial Sequence: Synthetic oligonucleotide
cugucaaagucgaucuucu

SEQ ID NO: 2587483 - RNA, 19 nt, Artificial Sequence
  Description of Artificial Sequence: Synthetic oligonucleotide
cuugagcaacuugcccacg

SEQ ID NO: 2587484 - RNA, 19 nt, Artificial Sequence
  Description of Artificial Sequence: Synthetic oligonucleotide
agucgaucuucuccacgau

SEQ ID NO: 2587485 - RNA, 19 nt, Artificial Sequence
  Description of Artificial Sequence: Synthetic oligonucleotide
ggcacgcagcaguuauugg

SEQ ID NO: 2587486 - RNA, 19 nt, Artificial Sequence
  Description of Artificial Sequence: Synthetic oligonucleotide
uugaugugccuggucgauc

SEQ ID NO: 2587487 - RNA, 19 nt, Artificial Sequence
  Description of Artificial Sequence: Synthetic oligonucleotide
gcacagagugaagucagug

SEQ ID NO: 2587488 - RNA, 19 nt, Artificial Sequence
  Description of Artificial Sequence: Synthetic oligonucleotide
acauaccgcuccagcgucg

SEQ ID NO: 2587489 - RNA, 19 nt, Artificial Sequence
  Description of Artificial Sequence: Synthetic oligonucleotide
ggucugaaagaaggcuggg

SEQ ID NO: 2587490 - RNA, 19 nt, Artificial Sequence
  Description of Artificial Sequence: Synthetic oligonucleotide
uuugggcuuuaugcucucu

SEQ ID NO: 2587491 - RNA, 19 nt, Artificial Sequence
  Description of Artificial Sequence: Synthetic oligonucleotide
caaagccaguuaugccuuc

SEQ ID NO: 2587492 - RNA, 19 nt, Artificial Sequence
  Description of Artificial Sequence: Synthetic oligonucleotide
agcagaaucugggcaguaa

SEQ ID NO: 2587493 - RNA, 19 nt, Artificial Sequence
  Description of Artificial Sequence: Synthetic oligonucleotide
cucgucagcgcuccagcca

SEQ ID NO: 2587494 - RNA, 19 nt, Artificial Sequence
  Description of Artificial Sequence: Synthetic oligonucleotide
auguuuucauccagggcuu

SEQ ID NO: 2587495 - RNA, 19 nt, Artificial Sequence
  Description of Artificial Sequence: Synthetic oligonucleotide
gcaacuugcccacguucgc

SEQ ID NO: 2587496 - RNA, 19 nt, Artificial Sequence
  Description of Artificial Sequence: Synthetic oligonucleotide
ucagcgcuccagccauacu

SEQ ID NO: 2587497 - RNA, 19 nt, Artificial Sequence
  Description of Artificial Sequence: Synthetic oligonucleotide
gcuuccgcggccccgccgg

SEQ ID NO: 2587498 - RNA, 19 nt, Artificial Sequence
  Description of Artificial Sequence: Synthetic oligonucleotide
cuccagccauacuugcuca

SEQ ID NO: 2587499 - RNA, 19 nt, Artificial Sequence
  Description of Artificial Sequence: Synthetic oligonucleotide
gcucauccacaccuugagc

SEQ ID NO: 2587500 - RNA, 19 nt, Artificial Sequence
  Description of Artificial Sequence: Synthetic oligonucleotide
accugucgauacccuugag

SEQ ID NO: 2587501 - RNA, 19 nt, Artificial Sequence
  Description of Artificial Sequence: Synthetic oligonucleotide
cuggguugaacugguacaa

SEQ ID NO: 2587502 - RNA, 19 nt, Artificial Sequence
  Description of Artificial Sequence: Synthetic oligonucleotide
augaugcuggacacacugu

SEQ ID NO: 2587503 - RNA, 19 nt, Artificial Sequence
  Description of Artificial Sequence: Synthetic oligonucleotide
agcuuccgcggccccgccg

SEQ ID NO: 2587504 - RNA, 19 nt, Artificial Sequence
  Description of Artificial Sequence: Synthetic oligonucleotide
ccagaucauaagcauucuc

SEQ ID NO: 2587505 - RNA, 19 nt, Artificial Sequence
  Description of Artificial Sequence: Synthetic oligonucleotide
ggugagcgcuuucagcaga

SEQ ID NO: 2587506 - RNA, 19 nt, Artificial Sequence
  Description of Artificial Sequence: Synthetic oligonucleotide
caccacauggcagauaaau

SEQ ID NO: 2587507 - RNA, 19 nt, Artificial Sequence
  Description of Artificial Sequence: Synthetic oligonucleotide
ccgagguacaagaucuguc

SEQ ID NO: 2587508 - RNA, 19 nt, Artificial Sequence
  Description of Artificial Sequence: Synthetic oligonucleotide
ccgcucuucuugaugugcc

SEQ ID NO: 2587509 - RNA, 19 nt, Artificial Sequence
  Description of Artificial Sequence: Synthetic oligonucleotide
gcuagguuggccuccagau

SEQ ID NO: 2587510 - RNA, 19 nt, Artificial Sequence
  Description of Artificial Sequence: Synthetic oligonucleotide
ggucgaucauacauuugca

SEQ ID NO: 2587511 - RNA, 19 nt, Artificial Sequence
  Description of Artificial Sequence: Synthetic oligonucleotide
cccaccacauggcagauaa

SEQ ID NO: 2587512 - RNA, 19 nt, Artificial Sequence
  Description of Artificial Sequence: Synthetic oligonucleotide
gcugguacgugaugcccac

SEQ ID NO: 2587513 - RNA, 19 nt, Artificial Sequence
  Description of Artificial Sequence: Synthetic oligonucleotide
cuugcccacguucgcucuc

SEQ ID NO: 2587514 - RNA, 19 nt, Artificial Sequence
  Description of Artificial Sequence: Synthetic oligonucleotide
gucagcgcuccagccauac

SEQ ID NO: 2587515 - RNA, 19 nt, Artificial Sequence
  Description of Artificial Sequence: Synthetic oligonucleotide
gguacgugaugcccaccac

SEQ ID NO: 2587516 - RNA, 19 nt, Artificial Sequence
  Description of Artificial Sequence: Synthetic oligonucleotide
cuccgucagcuuccgcggc

SEQ ID NO: 2587517 - RNA, 19 nt, Artificial Sequence
  Description of Artificial Sequence: Synthetic oligonucleotide
uggcuuggguuuccacaua

SEQ ID NO: 2587518 - RNA, 19 nt, Artificial Sequence
  Description of Artificial Sequence: Synthetic oligonucleotide
cggucgaugugcugguacg

SEQ ID NO: 2587519 - RNA, 19 nt, Artificial Sequence
  Description of Artificial Sequence: Synthetic oligonucleotide
guuauugggaggaggccau

SEQ ID NO: 2587520 - RNA, 19 nt, Artificial Sequence
  Description of Artificial Sequence: Synthetic oligonucleotide
caucgccaugaccuccguc

SEQ ID NO: 2587521 - RNA, 19 nt, Artificial Sequence
  Description of Artificial Sequence: Synthetic oligonucleotide
gcggucgaugugcugguac

SEQ ID NO: 2587522 - RNA, 19 nt, Artificial Sequence
  Description of Artificial Sequence: Synthetic oligonucleotide
gguacaagaucugucggau

SEQ ID NO: 2587523 - RNA, 19 nt, Artificial Sequence
  Description of Artificial Sequence: Synthetic oligonucleotide
ugcucucuuccuggcugca

SEQ ID NO: 2587524 - RNA, 19 nt, Artificial Sequence
  Description of Artificial Sequence: Synthetic oligonucleotide
ccugacucgucagcgcucc

SEQ ID NO: 2587525 - RNA, 19 nt, Artificial Sequence
  Description of Artificial Sequence: Synthetic oligonucleotide
acaucgccaugaccuccgu

SEQ ID NO: 2587526 - RNA, 19 nt, Artificial Sequence
  Description of Artificial Sequence: Synthetic oligonucleotide
gucugaaagaaggcugggu

SEQ ID NO: 2587527 - RNA, 19 nt, Artificial Sequence
  Description of Artificial Sequence: Synthetic oligonucleotide
acguucgcucucaucugcu

SEQ ID NO: 2587528 - RNA, 19 nt, Artificial Sequence
  Description of Artificial Sequence: Synthetic oligonucleotide
agggcuugccagaaagcuu

SEQ ID NO: 2587529 - RNA, 19 nt, Artificial Sequence
  Description of Artificial Sequence: Synthetic oligonucleotide
aaggcacgcagcaguuauu

SEQ ID NO: 2587530 - RNA, 19 nt, Artificial Sequence
  Description of Artificial Sequence: Synthetic oligonucleotide
cagcaguuauugggaggag

SEQ ID NO: 2587531 - RNA, 19 nt, Artificial Sequence
  Description of Artificial Sequence: Synthetic oligonucleotide
cagguuggugagcgcuuuc

SEQ ID NO: 2587532 - RNA, 19 nt, Artificial Sequence
  Description of Artificial Sequence: Synthetic oligonucleotide
ggguugaacugguacaauu

SEQ ID NO: 2587533 - RNA, 19 nt, Artificial Sequence
  Description of Artificial Sequence: Synthetic oligonucleotide
ugagcgcuuucagcagaau

SEQ ID NO: 2587534 - RNA, 19 nt, Artificial Sequence
  Description of Artificial Sequence: Synthetic oligonucleotide
ggacagcuagguuggccuc

SEQ ID NO: 2587535 - RNA, 19 nt, Artificial Sequence
  Description of Artificial Sequence: Synthetic oligonucleotide
cugguacgugaugcccacc

SEQ ID NO: 2587536 - RNA, 19 nt, Artificial Sequence
  Description of Artificial Sequence: Synthetic oligonucleotide
gcaguaaccguggucugaa

SEQ ID NO: 2587537 - RNA, 19 nt, Artificial Sequence
  Description of Artificial Sequence: Synthetic oligonucleotide
ucgcucucaucugcucaaa

SEQ ID NO: 2587538 - RNA, 19 nt, Artificial Sequence
  Description of Artificial Sequence: Synthetic oligonucleotide
gaccuccgucagcuuccgc

SEQ ID NO: 2587539 - RNA, 19 nt, Artificial Sequence
  Description of Artificial Sequence: Synthetic oligonucleotide
ccacguucgcucucaucug

SEQ ID NO: 2587540 - RNA, 19 nt, Artificial Sequence
  Description of Artificial Sequence: Synthetic oligonucleotide
ggcaguaaccguggucuga

SEQ ID NO: 2587541 - RNA, 19 nt, Artificial Sequence
  Description of Artificial Sequence: Synthetic oligonucleotide
gggcaguaaccguggucug

SEQ ID NO: 2587542 - RNA, 19 nt, Artificial Sequence
  Description of Artificial Sequence: Synthetic oligonucleotide
cagguccccgagguacaag

SEQ ID NO: 2587543 - RNA, 19 nt, Artificial Sequence
  Description of Artificial Sequence: Synthetic oligonucleotide
gcgcuccagccauacuugc

SEQ ID NO: 2587544 - RNA, 19 nt, Artificial Sequence
  Description of Artificial Sequence: Synthetic oligonucleotide
gugagcgcuuucagcagaa

SEQ ID NO: 2587545 - RNA, 19 nt, Artificial Sequence
  Description of Artificial Sequence: Synthetic oligonucleotide
auccagggcuugccagaaa

SEQ ID NO: 2587546 - RNA, 19 nt, Artificial Sequence
  Description of Artificial Sequence: Synthetic oligonucleotide
augggccgcucuucuugau

SEQ ID NO: 2587547 - RNA, 19 nt, Artificial Sequence
  Description of Artificial Sequence: Synthetic oligonucleotide
gucgccagguucucaggau

SEQ ID NO: 2587548 - RNA, 19 nt, Artificial Sequence
  Description of Artificial Sequence: Synthetic oligonucleotide
cgccagguucucaggauug

SEQ ID NO: 2587549 - RNA, 19 nt, Artificial Sequence
  Description of Artificial Sequence: Synthetic oligonucleotide
cuugaugugccuggucgau

SEQ ID NO: 2587550 - RNA, 19 nt, Artificial Sequence
  Description of Artificial Sequence: Synthetic oligonucleotide
ugcccacguucgcucucau

SEQ ID NO: 2587551 - RNA, 19 nt, Artificial Sequence
  Description of Artificial Sequence: Synthetic oligonucleotide
gcaagcagccagcggucga

SEQ ID NO: 2587552 - RNA, 19 nt, Artificial Sequence
  Description of Artificial Sequence: Synthetic oligonucleotide
ccagccauacuugcucauc

SEQ ID NO: 2587553 - RNA, 19 nt, Artificial Sequence
  Description of Artificial Sequence: Synthetic oligonucleotide
gccccgccggagucgaacc

SEQ ID NO: 2587554 - RNA, 19 nt, Artificial Sequence
  Description of Artificial Sequence: Synthetic oligonucleotide
gaugugccuggucgaucau

SEQ ID NO: 2587555 - RNA, 19 nt, Artificial Sequence
  Description of Artificial Sequence: Synthetic oligonucleotide
caguaaccguggucugaaa

SEQ ID NO: 2587556 - RNA, 19 nt, Artificial Sequence
  Description of Artificial Sequence: Synthetic oligonucleotide
agccagcggucgaugugcu

SEQ ID NO: 2587557 - RNA, 19 nt, Artificial Sequence
  Description of Artificial Sequence: Synthetic oligonucleotide
ccacauaccgcuccagcgu

SEQ ID NO: 2587558 - RNA, 19 nt, Artificial Sequence
  Description of Artificial Sequence: Synthetic oligonucleotide
cccgccggagucgaacccc

SEQ ID NO: 2587559 - RNA, 19 nt, Artificial Sequence
  Description of Artificial Sequence: Synthetic oligonucleotide
ccccgagguacaagaucug

SEQ ID NO: 2587560 - RNA, 19 nt, Artificial Sequence
  Description of Artificial Sequence: Synthetic oligonucleotide
gcccugacucgucagcgcu

SEQ ID NO: 2587561 - RNA, 19 nt, Artificial Sequence
  Description of Artificial Sequence: Synthetic oligonucleotide
cguucgcucucaucugcuc

SEQ ID NO: 2587562 - RNA, 19 nt, Artificial Sequence
  Description of Artificial Sequence: Synthetic oligonucleotide
cccugacucgucagcgcuc

SEQ ID NO: 2587563 - RNA, 19 nt, Artificial Sequence
  Description of Artificial Sequence: Synthetic oligonucleotide
caagcagccagcggucgau

SEQ ID NO: 2587564 - RNA, 19 nt, Artificial Sequence
  Description of Artificial Sequence: Synthetic oligonucleotide
ggccaugaugcuggacaca

SEQ ID NO: 2587565 - RNA, 19 nt, Artificial Sequence
  Description of Artificial Sequence: Synthetic oligonucleotide
ggucgaugugcugguacgu

SEQ ID NO: 2587566 - RNA, 19 nt, Artificial Sequence
  Description of Artificial Sequence: Synthetic oligonucleotide
cugacucgucagcgcucca

SEQ ID NO: 2587567 - RNA, 19 nt, Artificial Sequence
  Description of Artificial Sequence: Synthetic oligonucleotide
ggccccgccggagucgaac

SEQ ID NO: 2587568 - RNA, 19 nt, Artificial Sequence
  Description of Artificial Sequence: Synthetic oligonucleotide
gccuuccaagagguccaug

SEQ ID NO: 2587569 - RNA, 19 nt, Artificial Sequence
  Description of Artificial Sequence: Synthetic oligonucleotide
cagcggucgaugugcuggu

SEQ ID NO: 2587570 - RNA, 19 nt, Artificial Sequence
  Description of Artificial Sequence: Synthetic oligonucleotide
cgucgccagguucucagga

SEQ ID NO: 2587571 - RNA, 19 nt, Artificial Sequence
  Description of Artificial Sequence: Synthetic oligonucleotide
gcccacguucgcucucauc

SEQ ID NO: 2587572 - RNA, 19 nt, Artificial Sequence
  Description of Artificial Sequence: Synthetic oligonucleotide
ccccgccggagucgaaccc

SEQ ID NO: 2587573 - RNA, 19 nt, Artificial Sequence
  Description of Artificial Sequence: Synthetic oligonucleotide
agcggucgaugugcuggua

SEQ ID NO: 2587574 - RNA, 19 nt, Artificial Sequence
  Description of Artificial Sequence: Synthetic oligonucleotide
cagcagaaucugggcagua

SEQ ID NO: 2587575 - RNA, 19 nt, Artificial Sequence
  Description of Artificial Sequence: Synthetic oligonucleotide
gccuggucgaucauacauu

SEQ ID NO: 2587576 - RNA, 19 nt, Artificial Sequence
  Description of Artificial Sequence: Synthetic oligonucleotide
gguuggccuccagaucaua

SEQ ID NO: 2587577 - RNA, 19 nt, Artificial Sequence
  Description of Artificial Sequence: Synthetic oligonucleotide
cuuccgcggccccgccgga

SEQ ID NO: 2587578 - RNA, 19 nt, Artificial Sequence
  Description of Artificial Sequence: Synthetic oligonucleotide
cccgagguacaagaucugu

SEQ ID NO: 2587579 - RNA, 19 nt, Artificial Sequence
  Description of Artificial Sequence: Synthetic oligonucleotide
ccgccggagucgaacccca

SEQ ID NO: 2587580 - RNA, 19 nt, Artificial Sequence
  Description of Artificial Sequence: Synthetic oligonucleotide
ccagcgucgccagguucuc

SEQ ID NO: 2587581 - RNA, 19 nt, Artificial Sequence
  Description of Artificial Sequence: Synthetic oligonucleotide
cgaugugcugguacgugau

SEQ ID NO: 2587582 - RNA, 19 nt, Artificial Sequence
  Description of Artificial Sequence: Synthetic oligonucleotide
gcggccccgccggagucga

SEQ ID NO: 2587583 - RNA, 19 nt, Artificial Sequence
  Description of Artificial Sequence: Synthetic oligonucleotide
cggaugggccgcucuucuu

SEQ ID NO: 2587584 - RNA, 19 nt, Artificial Sequence
  Description of Artificial Sequence: Synthetic oligonucleotide
cgauacccuugagcaacuu

SEQ ID NO: 2587585 - RNA, 19 nt, Artificial Sequence
  Description of Artificial Sequence: Synthetic oligonucleotide
cggccccgccggagucgaa

SEQ ID NO: 2587586 - RNA, 19 nt, Artificial Sequence
  Description of Artificial Sequence: Synthetic oligonucleotide
ucaagcucaagcuauaagg

SEQ ID NO: 2587587 - RNA, 19 nt, Artificial Sequence
  Description of Artificial Sequence: Synthetic oligonucleotide
aauugccuuauccugagcg

SEQ ID NO: 2587588 - RNA, 19 nt, Artificial Sequence
  Description of Artificial Sequence: Synthetic oligonucleotide
agaagaaggucccaaaguc

SEQ ID NO: 2587589 - RNA, 19 nt, Artificial Sequence
  Description of Artificial Sequence: Synthetic oligonucleotide
uuugucauugguuccagag

SEQ ID NO: 2587590 - RNA, 19 nt, Artificial Sequence
  Description of Artificial Sequence: Synthetic oligonucleotide
ugucauugguuccagaggc

SEQ ID NO: 2587591 - RNA, 19 nt, Artificial Sequence
  Description of Artificial Sequence: Synthetic oligonucleotide
uguagugagggccuccugg

SEQ ID NO: 2587592 - RNA, 19 nt, Artificial Sequence
  Description of Artificial Sequence: Synthetic oligonucleotide
aaugaugcauggcuccacg

SEQ ID NO: 2587593 - RNA, 19 nt, Artificial Sequence
  Description of Artificial Sequence: Synthetic oligonucleotide
uacacauacacugucagca

SEQ ID NO: 2587594 - RNA, 19 nt, Artificial Sequence
  Description of Artificial Sequence: Synthetic oligonucleotide
uugauguagaaguugccag

SEQ ID NO: 2587595 - RNA, 19 nt, Artificial Sequence
  Description of Artificial Sequence: Synthetic oligonucleotide
uguagaaguugccagcagc

SEQ ID NO: 2587596 - RNA, 19 nt, Artificial Sequence
  Description of Artificial Sequence: Synthetic oligonucleotide
uuauccugagcgaacacug

SEQ ID NO: 2587597 - RNA, 19 nt, Artificial Sequence
  Description of Artificial Sequence: Synthetic oligonucleotide
ugacucauugcacuggccc

SEQ ID NO: 2587598 - RNA, 19 nt, Artificial Sequence
  Description of Artificial Sequence: Synthetic oligonucleotide
augucagucaucuggcugg

SEQ ID NO: 2587599 - RNA, 19 nt, Artificial Sequence
  Description of Artificial Sequence: Synthetic oligonucleotide
agguggguggcacaggugc

SEQ ID NO: 2587600 - RNA, 19 nt, Artificial Sequence
  Description of Artificial Sequence: Synthetic oligonucleotide
uccggguacacauacacug

SEQ ID NO: 2587601 - RNA, 19 nt, Artificial Sequence
  Description of Artificial Sequence: Synthetic oligonucleotide
agacuuaucguugauguag

SEQ ID NO: 2587602 - RNA, 19 nt, Artificial Sequence
  Description of Artificial Sequence: Synthetic oligonucleotide
uugucauugguuccagagg

SEQ ID NO: 2587603 - RNA, 19 nt, Artificial Sequence
  Description of Artificial Sequence: Synthetic oligonucleotide
ugcaggaucgcccacuuug

SEQ ID NO: 2587604 - RNA, 19 nt, Artificial Sequence
  Description of Artificial Sequence: Synthetic oligonucleotide
aagcucaagcuauaaggag

SEQ ID NO: 2587605 - RNA, 19 nt, Artificial Sequence
  Description of Artificial Sequence: Synthetic oligonucleotide
ucaagcuauaaggaguccg

SEQ ID NO: 2587606 - RNA, 19 nt, Artificial Sequence
  Description of Artificial Sequence: Synthetic oligonucleotide
ucguugauguagaaguugc

SEQ ID NO: 2587607 - RNA, 19 nt, Artificial Sequence
  Description of Artificial Sequence: Synthetic oligonucleotide
aggaccgaagaucuccucc

SEQ ID NO: 2587608 - RNA, 19 nt, Artificial Sequence
  Description of Artificial Sequence: Synthetic oligonucleotide
uggugaguuuccuugauga

SEQ ID NO: 2587609 - RNA, 19 nt, Artificial Sequence
  Description of Artificial Sequence: Synthetic oligonucleotide
uggcuggauagacaggugg

SEQ ID NO: 2587610 - RNA, 19 nt, Artificial Sequence
  Description of Artificial Sequence: Synthetic oligonucleotide
gaugcauggcuccacguag

SEQ ID NO: 2587611 - RNA, 19 nt, Artificial Sequence
  Description of Artificial Sequence: Synthetic oligonucleotide
ucuguacuugucauccggg

SEQ ID NO: 2587612 - RNA, 19 nt, Artificial Sequence
  Description of Artificial Sequence: Synthetic oligonucleotide
uggacaauugccuuauccu

SEQ ID NO: 2587613 - RNA, 19 nt, Artificial Sequence
  Description of Artificial Sequence: Synthetic oligonucleotide
acugacucauugcacuggc

SEQ ID NO: 2587614 - RNA, 19 nt, Artificial Sequence
  Description of Artificial Sequence: Synthetic oligonucleotide
agagaagaaggucccaaag

SEQ ID NO: 2587615 - RNA, 19 nt, Artificial Sequence
  Description of Artificial Sequence: Synthetic oligonucleotide
caagcuauaaggaguccgg

SEQ ID NO: 2587616 - RNA, 19 nt, Artificial Sequence
  Description of Artificial Sequence: Synthetic oligonucleotide
ugggaagccaggaucagug

SEQ ID NO: 2587617 - RNA, 19 nt, Artificial Sequence
  Description of Artificial Sequence: Synthetic oligonucleotide
ugauguagaaguugccagc

SEQ ID NO: 2587618 - RNA, 19 nt, Artificial Sequence
  Description of Artificial Sequence: Synthetic oligonucleotide
ugcagugucucucuguacu

SEQ ID NO: 2587619 - RNA, 19 nt, Artificial Sequence
  Description of Artificial Sequence: Synthetic oligonucleotide
auccugagcgaacacugcc

SEQ ID NO: 2587620 - RNA, 19 nt, Artificial Sequence
  Description of Artificial Sequence: Synthetic oligonucleotide
aaaguccucugcaggaucg

SEQ ID NO: 2587621 - RNA, 19 nt, Artificial Sequence
  Description of Artificial Sequence: Synthetic oligonucleotide
aggacacugaggcuggacg

SEQ ID NO: 2587622 - RNA, 19 nt, Artificial Sequence
  Description of Artificial Sequence: Synthetic oligonucleotide
cuggacaauugccuuaucc

SEQ ID NO: 2587623 - RNA, 19 nt, Artificial Sequence
  Description of Artificial Sequence: Synthetic oligonucleotide
ucuugaugcggcagaaggc

SEQ ID NO: 2587624 - RNA, 19 nt, Artificial Sequence
  Description of Artificial Sequence: Synthetic oligonucleotide
ucccaaaguccucugcagg

SEQ ID NO: 2587625 - RNA, 19 nt, Artificial Sequence
  Description of Artificial Sequence: Synthetic oligonucleotide
ggaucgcccacuuugaucc

SEQ ID NO: 2587626 - RNA, 19 nt, Artificial Sequence
  Description of Artificial Sequence: Synthetic oligonucleotide
ugcauguaggaguaacgcc

SEQ ID NO: 2587627 - RNA, 19 nt, Artificial Sequence
  Description of Artificial Sequence: Synthetic oligonucleotide
guagaaguugccagcagcg

SEQ ID NO: 2587628 - RNA, 19 nt, Artificial Sequence
  Description of Artificial Sequence: Synthetic oligonucleotide
ucagggucaagcucaagcu

SEQ ID NO: 2587629 - RNA, 19 nt, Artificial Sequence
  Description of Artificial Sequence: Synthetic oligonucleotide
gucagggucaagcucaagc

SEQ ID NO: 2587630 - RNA, 19 nt, Artificial Sequence
  Description of Artificial Sequence: Synthetic oligonucleotide
uggacgaggacuucgcaug

SEQ ID NO: 2587631 - RNA, 19 nt, Artificial Sequence
  Description of Artificial Sequence: Synthetic oligonucleotide
cuugaugcggcagaaggcc

SEQ ID NO: 2587632 - RNA, 19 nt, Artificial Sequence
  Description of Artificial Sequence: Synthetic oligonucleotide
uuugauccugcugugcucc

SEQ ID NO: 2587633 - RNA, 19 nt, Artificial Sequence
  Description of Artificial Sequence: Synthetic oligonucleotide
gaagaaggucccaaagucc

SEQ ID NO: 2587634 - RNA, 19 nt, Artificial Sequence
  Description of Artificial Sequence: Synthetic oligonucleotide
ggacccaguagacuuaucg

SEQ ID NO: 2587635 - RNA, 19 nt, Artificial Sequence
  Description of Artificial Sequence: Synthetic oligonucleotide
cauggcuccacguaguauc

SEQ ID NO: 2587636 - RNA, 19 nt, Artificial Sequence
  Description of Artificial Sequence: Synthetic oligonucleotide
augaccuggggcgaugucc

SEQ ID NO: 2587637 - RNA, 19 nt, Artificial Sequence
  Description of Artificial Sequence: Synthetic oligonucleotide
cuauaaggaguccgggagg

SEQ ID NO: 2587638 - RNA, 19 nt, Artificial Sequence
  Description of Artificial Sequence: Synthetic oligonucleotide
cuuaucguugauguagaag

SEQ ID NO: 2587639 - RNA, 19 nt, Artificial Sequence
  Description of Artificial Sequence: Synthetic oligonucleotide
ugucucucuguacuuguca

SEQ ID NO: 2587640 - RNA, 19 nt, Artificial Sequence
  Description of Artificial Sequence: Synthetic oligonucleotide
acuuugauccugcugugcu

SEQ ID NO: 2587641 - RNA, 19 nt, Artificial Sequence
  Description of Artificial Sequence: Synthetic oligonucleotide
agcagcguuccucagcauc

SEQ ID NO: 2587642 - RNA, 19 nt, Artificial Sequence
  Description of Artificial Sequence: Synthetic oligonucleotide
gcuauaaggaguccgggag

SEQ ID NO: 2587643 - RNA, 19 nt, Artificial Sequence
  Description of Artificial Sequence: Synthetic oligonucleotide
guaggaguaacgccagucc

SEQ ID NO: 2587644 - RNA, 19 nt, Artificial Sequence
  Description of Artificial Sequence: Synthetic oligonucleotide
aggaucagugcagagaugu

SEQ ID NO: 2587645 - RNA, 19 nt, Artificial Sequence
  Description of Artificial Sequence: Synthetic oligonucleotide
uugucauccggguacacau

SEQ ID NO: 2587646 - RNA, 19 nt, Artificial Sequence
  Description of Artificial Sequence: Synthetic oligonucleotide
guagacuuaucguugaugu

SEQ ID NO: 2587647 - RNA, 19 nt, Artificial Sequence
  Description of Artificial Sequence: Synthetic oligonucleotide
cucuguacuugucauccgg

SEQ ID NO: 2587648 - RNA, 19 nt, Artificial Sequence
  Description of Artificial Sequence: Synthetic oligonucleotide
ucucaaugaugcauggcuc

SEQ ID NO: 2587649 - RNA, 19 nt, Artificial Sequence
  Description of Artificial Sequence: Synthetic oligonucleotide
agugcagagaugucaguca

SEQ ID NO: 2587650 - RNA, 19 nt, Artificial Sequence
  Description of Artificial Sequence: Synthetic oligonucleotide
aagcuauaaggaguccggg

SEQ ID NO: 2587651 - RNA, 19 nt, Artificial Sequence
  Description of Artificial Sequence: Synthetic oligonucleotide
uauaaggaguccgggagga

SEQ ID NO: 2587652 - RNA, 19 nt, Artificial Sequence
  Description of Artificial Sequence: Synthetic oligonucleotide
uaucccacugacucauugc

SEQ ID NO: 2587653 - RNA, 19 nt, Artificial Sequence
  Description of Artificial Sequence: Synthetic oligonucleotide
uccacguaguaucccacug

SEQ ID NO: 2587654 - RNA, 19 nt, Artificial Sequence
  Description of Artificial Sequence: Synthetic oligonucleotide
ucagucaucuggcuggaua

SEQ ID NO: 2587655 - RNA, 19 nt, Artificial Sequence
  Description of Artificial Sequence: Synthetic oligonucleotide
aggaucgcccacuuugauc

SEQ ID NO: 2587656 - RNA, 19 nt, Artificial Sequence
  Description of Artificial Sequence: Synthetic oligonucleotide
gugaguuuccuugaugacc

SEQ ID NO: 2587657 - RNA, 19 nt, Artificial Sequence
  Description of Artificial Sequence: Synthetic oligonucleotide
gacucauugcacuggcccc

SEQ ID NO: 2587658 - RNA, 19 nt, Artificial Sequence
  Description of Artificial Sequence: Synthetic oligonucleotide
gguacacauacacugucag

SEQ ID NO: 2587659 - RNA, 19 nt, Artificial Sequence
  Description of Artificial Sequence: Synthetic oligonucleotide
caagcucaagcuauaagga

SEQ ID NO: 2587660 - RNA, 19 nt, Artificial Sequence
  Description of Artificial Sequence: Synthetic oligonucleotide
cauccggguacacauacac

SEQ ID NO: 2587661 - RNA, 19 nt, Artificial Sequence
  Description of Artificial Sequence: Synthetic oligonucleotide
uccugagcgaacacugccc

SEQ ID NO: 2587662 - RNA, 19 nt, Artificial Sequence
  Description of Artificial Sequence: Synthetic oligonucleotide
aggaguaacgccagucccc

SEQ ID NO: 2587663 - RNA, 19 nt, Artificial Sequence
  Description of Artificial Sequence: Synthetic oligonucleotide
guuuccuugaugaccuggg

SEQ ID NO: 2587664 - RNA, 19 nt, Artificial Sequence
  Description of Artificial Sequence: Synthetic oligonucleotide
auagcugguggugcugucc

SEQ ID NO: 2587665 - RNA, 19 nt, Artificial Sequence
  Description of Artificial Sequence: Synthetic oligonucleotide
aguagacuuaucguugaug

SEQ ID NO: 2587666 - RNA, 19 nt, Artificial Sequence
  Description of Artificial Sequence: Synthetic oligonucleotide
aaguugccagcagcguucc

SEQ ID NO: 2587667 - RNA, 19 nt, Artificial Sequence
  Description of Artificial Sequence: Synthetic oligonucleotide
auagacagguggguggcac

SEQ ID NO: 2587668 - RNA, 19 nt, Artificial Sequence
  Description of Artificial Sequence: Synthetic oligonucleotide
uaaggaguccgggaggagc

SEQ ID NO: 2587669 - RNA, 19 nt, Artificial Sequence
  Description of Artificial Sequence: Synthetic oligonucleotide
cuucgcaugcuccagccac

SEQ ID NO: 2587670 - RNA, 19 nt, Artificial Sequence
  Description of Artificial Sequence: Synthetic oligonucleotide
gauguagaaguugccagca

SEQ ID NO: 2587671 - RNA, 19 nt, Artificial Sequence
  Description of Artificial Sequence: Synthetic oligonucleotide
gaucagugcagagauguca

SEQ ID NO: 2587672 - RNA, 19 nt, Artificial Sequence
  Description of Artificial Sequence: Synthetic oligonucleotide
aucccacugacucauugca

SEQ ID NO: 2587673 - RNA, 19 nt, Artificial Sequence
  Description of Artificial Sequence: Synthetic oligonucleotide
guugauguagaaguugcca

SEQ ID NO: 2587674 - RNA, 19 nt, Artificial Sequence
  Description of Artificial Sequence: Synthetic oligonucleotide
auugccuuauccugagcga

SEQ ID NO: 2587675 - RNA, 19 nt, Artificial Sequence
  Description of Artificial Sequence: Synthetic oligonucleotide
gauccugcugugcuccucc

SEQ ID NO: 2587676 - RNA, 19 nt, Artificial Sequence
  Description of Artificial Sequence: Synthetic oligonucleotide
uguaggaguaacgccaguc

SEQ ID NO: 2587677 - RNA, 19 nt, Artificial Sequence
  Description of Artificial Sequence: Synthetic oligonucleotide
cugcauguaggaguaacgc

SEQ ID NO: 2587678 - RNA, 19 nt, Artificial Sequence
  Description of Artificial Sequence: Synthetic oligonucleotide
ggacaauugccuuauccug

SEQ ID NO: 2587679 - RNA, 19 nt, Artificial Sequence
  Description of Artificial Sequence: Synthetic oligonucleotide
uauccugagcgaacacugc

SEQ ID NO: 2587680 - RNA, 19 nt, Artificial Sequence
  Description of Artificial Sequence: Synthetic oligonucleotide
gaacacugccccugugagg

SEQ ID NO: 2587681 - RNA, 19 nt, Artificial Sequence
  Description of Artificial Sequence: Synthetic oligonucleotide
acugcauguaggaguaacg

SEQ ID NO: 2587682 - RNA, 19 nt, Artificial Sequence
  Description of Artificial Sequence: Synthetic oligonucleotide
agcuauaaggaguccggga

SEQ ID NO: 2587683 - RNA, 19 nt, Artificial Sequence
  Description of Artificial Sequence: Synthetic oligonucleotide
gacuucgcaugcuccagcc

SEQ ID NO: 2587684 - RNA, 19 nt, Artificial Sequence
  Description of Artificial Sequence: Synthetic oligonucleotide
cacaggaccgaagaucucc

SEQ ID NO: 2587685 - RNA, 19 nt, Artificial Sequence
  Description of Artificial Sequence: Synthetic oligonucleotide
aucguugauguagaaguug

SEQ ID NO: 2587686 - RNA, 19 nt, Artificial Sequence
  Description of Artificial Sequence: Synthetic oligonucleotide
gacaauugccuuauccuga

SEQ ID NO: 2587687 - RNA, 19 nt, Artificial Sequence
  Description of Artificial Sequence: Synthetic oligonucleotide
gucucaaugaugcauggcu

SEQ ID NO: 2587688 - RNA, 19 nt, Artificial Sequence
  Description of Artificial Sequence: Synthetic oligonucleotide
aggucccaaaguccucugc

SEQ ID NO: 2587689 - RNA, 19 nt, Artificial Sequence
  Description of Artificial Sequence: Synthetic oligonucleotide
cacguaguaucccacugac

SEQ ID NO: 2587690 - RNA, 19 nt, Artificial Sequence
  Description of Artificial Sequence: Synthetic oligonucleotide
guacacauacacugucagc

SEQ ID NO: 2587691 - RNA, 19 nt, Artificial Sequence
  Description of Artificial Sequence: Synthetic oligonucleotide
auugguuccagaggcccgg

SEQ ID NO: 2587692 - RNA, 19 nt, Artificial Sequence
  Description of Artificial Sequence: Synthetic oligonucleotide
agcucaagcuauaaggagu

SEQ ID NO: 2587693 - RNA, 19 nt, Artificial Sequence
  Description of Artificial Sequence: Synthetic oligonucleotide
agugucucucuguacuugu

SEQ ID NO: 2587694 - RNA, 19 nt, Artificial Sequence
  Description of Artificial Sequence: Synthetic oligonucleotide
ugaugcauggcuccacgua

SEQ ID NO: 2587695 - RNA, 19 nt, Artificial Sequence
  Description of Artificial Sequence: Synthetic oligonucleotide
cauugguuccagaggcccg

SEQ ID NO: 2587696 - RNA, 19 nt, Artificial Sequence
  Description of Artificial Sequence: Synthetic oligonucleotide
agcacaggaccgaagaucu

SEQ ID NO: 2587697 - RNA, 19 nt, Artificial Sequence
  Description of Artificial Sequence: Synthetic oligonucleotide
guaucccacugacucauug

SEQ ID NO: 2587698 - RNA, 19 nt, Artificial Sequence
  Description of Artificial Sequence: Synthetic oligonucleotide
uccagcgcaggauguagug

SEQ ID NO: 2587699 - RNA, 19 nt, Artificial Sequence
  Description of Artificial Sequence: Synthetic oligonucleotide
gagaagaaggucccaaagu

SEQ ID NO: 2587700 - RNA, 19 nt, Artificial Sequence
  Description of Artificial Sequence: Synthetic oligonucleotide
cguaguaucccacugacuc

SEQ ID NO: 2587701 - RNA, 19 nt, Artificial Sequence
  Description of Artificial Sequence: Synthetic oligonucleotide
caucaaucacugcagagaa

SEQ ID NO: 2587702 - RNA, 19 nt, Artificial Sequence
  Description of Artificial Sequence: Synthetic oligonucleotide
gucauccggguacacauac

SEQ ID NO: 2587703 - RNA, 19 nt, Artificial Sequence
  Description of Artificial Sequence: Synthetic oligonucleotide
ccugguuugucauugguuc

SEQ ID NO: 2587704 - RNA, 19 nt, Artificial Sequence
  Description of Artificial Sequence: Synthetic oligonucleotide
agagcucacugcauguagg

SEQ ID NO: 2587705 - RNA, 19 nt, Artificial Sequence
  Description of Artificial Sequence: Synthetic oligonucleotide
agccacuucuugaugcggc

SEQ ID NO: 2587706 - RNA, 19 nt, Artificial Sequence
  Description of Artificial Sequence: Synthetic oligonucleotide
acccaguagacuuaucguu

SEQ ID NO: 2587707 - RNA, 19 nt, Artificial Sequence
  Description of Artificial Sequence: Synthetic oligonucleotide
agaaguugccagcagcguu

SEQ ID NO: 2587708 - RNA, 19 nt, Artificial Sequence
  Description of Artificial Sequence: Synthetic oligonucleotide
cacugucagcacaggaccg

SEQ ID NO: 2587709 - RNA, 19 nt, Artificial Sequence
  Description of Artificial Sequence: Synthetic oligonucleotide
cuggugggaagccaggauc

SEQ ID NO: 2587710 - RNA, 19 nt, Artificial Sequence
  Description of Artificial Sequence: Synthetic oligonucleotide
ugguuugucauugguucca

SEQ ID NO: 2587711 - RNA, 19 nt, Artificial Sequence
  Description of Artificial Sequence: Synthetic oligonucleotide
auguagaaguugccagcag

SEQ ID NO: 2587712 - RNA, 19 nt, Artificial Sequence
  Description of Artificial Sequence: Synthetic oligonucleotide
uaucguugauguagaaguu

SEQ ID NO: 2587713 - RNA, 19 nt, Artificial Sequence
  Description of Artificial Sequence: Synthetic oligonucleotide
acagguggguggcacaggu

SEQ ID NO: 2587714 - RNA, 19 nt, Artificial Sequence
  Description of Artificial Sequence: Synthetic oligonucleotide
uccucugcaggaucgccca

SEQ ID NO: 2587715 - RNA, 19 nt, Artificial Sequence
  Description of Artificial Sequence: Synthetic oligonucleotide
ugaggcuggacgaggacuu

SEQ ID NO: 2587716 - RNA, 19 nt, Artificial Sequence
  Description of Artificial Sequence: Synthetic oligonucleotide
cagagcucacugcauguag

SEQ ID NO: 2587717 - RNA, 19 nt, Artificial Sequence
  Description of Artificial Sequence: Synthetic oligonucleotide
aggccauagcugguggugc

SEQ ID NO: 2587718 - RNA, 19 nt, Artificial Sequence
  Description of Artificial Sequence: Synthetic oligonucleotide
ugcuggcccaccacggacc

SEQ ID NO: 2587719 - RNA, 19 nt, Artificial Sequence
  Description of Artificial Sequence: Synthetic oligonucleotide
ugucagcacaggaccgaag

SEQ ID NO: 2587720 - RNA, 19 nt, Artificial Sequence
  Description of Artificial Sequence: Synthetic oligonucleotide
uccugguuugucauugguu

SEQ ID NO: 2587721 - RNA, 19 nt, Artificial Sequence
  Description of Artificial Sequence: Synthetic oligonucleotide
uggcaucaaucacugcaga

SEQ ID NO: 2587722 - RNA, 19 nt, Artificial Sequence
  Description of Artificial Sequence: Synthetic oligonucleotide
auggcuccacguaguaucc

SEQ ID NO: 2587723 - RNA, 19 nt, Artificial Sequence
  Description of Artificial Sequence: Synthetic oligonucleotide
uguccagcgcaggauguag

SEQ ID NO: 2587724 - RNA, 19 nt, Artificial Sequence
  Description of Artificial Sequence: Synthetic oligonucleotide
ggcaucaaucacugcagag

SEQ ID NO: 2587725 - RNA, 19 nt, Artificial Sequence
  Description of Artificial Sequence: Synthetic oligonucleotide
aaggaguccgggaggagcu

SEQ ID NO: 2587726 - RNA, 19 nt, Artificial Sequence
  Description of Artificial Sequence: Synthetic oligonucleotide
auccuuguggccuccugga

SEQ ID NO: 2587727 - RNA, 19 nt, Artificial Sequence
  Description of Artificial Sequence: Synthetic oligonucleotide
ucagcacaggaccgaagau

SEQ ID NO: 2587728 - RNA, 19 nt, Artificial Sequence
  Description of Artificial Sequence: Synthetic oligonucleotide
guaguaucccacugacuca

SEQ ID NO: 2587729 - RNA, 19 nt, Artificial Sequence
  Description of Artificial Sequence: Synthetic oligonucleotide
gaggacuucgcaugcucca

SEQ ID NO: 2587730 - RNA, 19 nt, Artificial Sequence
  Description of Artificial Sequence: Synthetic oligonucleotide
cuuugauccugcugugcuc

SEQ ID NO: 2587731 - RNA, 19 nt, Artificial Sequence
  Description of Artificial Sequence: Synthetic oligonucleotide
agugagggccuccugguuu

SEQ ID NO: 2587732 - RNA, 19 nt, Artificial Sequence
  Description of Artificial Sequence: Synthetic oligonucleotide
ugccuuauccugagcgaac

SEQ ID NO: 2587733 - RNA, 19 nt, Artificial Sequence
  Description of Artificial Sequence: Synthetic oligonucleotide
gacuuaucguugauguaga

SEQ ID NO: 2587734 - RNA, 19 nt, Artificial Sequence
  Description of Artificial Sequence: Synthetic oligonucleotide
ucauccggguacacauaca

SEQ ID NO: 2587735 - RNA, 19 nt, Artificial Sequence
  Description of Artificial Sequence: Synthetic oligonucleotide
gcaggauguagugagggcc

SEQ ID NO: 2587736 - RNA, 19 nt, Artificial Sequence
  Description of Artificial Sequence: Synthetic oligonucleotide
gaggccauagcugguggug

SEQ ID NO: 2587737 - RNA, 19 nt, Artificial Sequence
  Description of Artificial Sequence: Synthetic oligonucleotide
ugcggcagaaggccuuggc

SEQ ID NO: 2587738 - RNA, 19 nt, Artificial Sequence
  Description of Artificial Sequence: Synthetic oligonucleotide
caauggccaggucaggguc

SEQ ID NO: 2587739 - RNA, 19 nt, Artificial Sequence
  Description of Artificial Sequence: Synthetic oligonucleotide
gcauguaggaguaacgcca

SEQ ID NO: 2587740 - RNA, 19 nt, Artificial Sequence
  Description of Artificial Sequence: Synthetic oligonucleotide
uugccuuauccugagcgaa

SEQ ID NO: 2587741 - RNA, 19 nt, Artificial Sequence
  Description of Artificial Sequence: Synthetic oligonucleotide
cauacacugucagcacagg

SEQ ID NO: 2587742 - RNA, 19 nt, Artificial Sequence
  Description of Artificial Sequence: Synthetic oligonucleotide
cuggugaguuuccuugaug

SEQ ID NO: 2587743 - RNA, 19 nt, Artificial Sequence
  Description of Artificial Sequence: Synthetic oligonucleotide
cacugacucauugcacugg

SEQ ID NO: 2587744 - RNA, 19 nt, Artificial Sequence
  Description of Artificial Sequence: Synthetic oligonucleotide
ucgcccacuuugauccugc

SEQ ID NO: 2587745 - RNA, 19 nt, Artificial Sequence
  Description of Artificial Sequence: Synthetic oligonucleotide
uagacuuaucguugaugua

SEQ ID NO: 2587746 - RNA, 19 nt, Artificial Sequence
  Description of Artificial Sequence: Synthetic oligonucleotide
uucgcaugcuccagccacu

SEQ ID NO: 2587747 - RNA, 19 nt, Artificial Sequence
  Description of Artificial Sequence: Synthetic oligonucleotide
uggcccaccacggacccag

SEQ ID NO: 2587748 - RNA, 19 nt, Artificial Sequence
  Description of Artificial Sequence: Synthetic oligonucleotide
cacugcauguaggaguaac

SEQ ID NO: 2587749 - RNA, 19 nt, Artificial Sequence
  Description of Artificial Sequence: Synthetic oligonucleotide
cugacucauugcacuggcc

SEQ ID NO: 2587750 - RNA, 19 nt, Artificial Sequence
  Description of Artificial Sequence: Synthetic oligonucleotide
augaugcauggcuccacgu

SEQ ID NO: 2587751 - RNA, 19 nt, Artificial Sequence
  Description of Artificial Sequence: Synthetic oligonucleotide
cagugcagagaugucaguc

SEQ ID NO: 2587752 - RNA, 19 nt, Artificial Sequence
  Description of Artificial Sequence: Synthetic oligonucleotide
ugcagagaugucagucauc

SEQ ID NO: 2587753 - RNA, 19 nt, Artificial Sequence
  Description of Artificial Sequence: Synthetic oligonucleotide
agacagguggguggcacag

SEQ ID NO: 2587754 - RNA, 19 nt, Artificial Sequence
  Description of Artificial Sequence: Synthetic oligonucleotide
cccaguagacuuaucguug

SEQ ID NO: 2587755 - RNA, 19 nt, Artificial Sequence
  Description of Artificial Sequence: Synthetic oligonucleotide
ucagugcagagaugucagu

SEQ ID NO: 2587756 - RNA, 19 nt, Artificial Sequence
  Description of Artificial Sequence: Synthetic oligonucleotide
uagacagguggguggcaca

SEQ ID NO: 2587757 - RNA, 19 nt, Artificial Sequence
  Description of Artificial Sequence: Synthetic oligonucleotide
uagaaguugccagcagcgu

SEQ ID NO: 2587758 - RNA, 19 nt, Artificial Sequence
  Description of Artificial Sequence: Synthetic oligonucleotide
cuuguggccuccuggacaa

SEQ ID NO: 2587759 - RNA, 19 nt, Artificial Sequence
  Description of Artificial Sequence: Synthetic oligonucleotide
agggccuccugguuuguca

SEQ ID NO: 2587760 - RNA, 19 nt, Artificial Sequence
  Description of Artificial Sequence: Synthetic oligonucleotide
cucacugcauguaggagua

SEQ ID NO: 2587761 - RNA, 19 nt, Artificial Sequence
  Description of Artificial Sequence: Synthetic oligonucleotide
agggucaagcucaagcuau

SEQ ID NO: 2587762 - RNA, 19 nt, Artificial Sequence
  Description of Artificial Sequence: Synthetic oligonucleotide
gacccaguagacuuaucgu

SEQ ID NO: 2587763 - RNA, 19 nt, Artificial Sequence
  Description of Artificial Sequence: Synthetic oligonucleotide
gggcuggugaguuuccuug

SEQ ID NO: 2587764 - RNA, 19 nt, Artificial Sequence
  Description of Artificial Sequence: Synthetic oligonucleotide
cagcacaggaccgaagauc

SEQ ID NO: 2587765 - RNA, 19 nt, Artificial Sequence
  Description of Artificial Sequence: Synthetic oligonucleotide
acuuaucguugauguagaa

SEQ ID NO: 2587766 - RNA, 19 nt, Artificial Sequence
  Description of Artificial Sequence: Synthetic oligonucleotide
gucaucuggcuggauagac

SEQ ID NO: 2587767 - RNA, 19 nt, Artificial Sequence
  Description of Artificial Sequence: Synthetic oligonucleotide
gugagggccuccugguuug

SEQ ID NO: 2587768 - RNA, 19 nt, Artificial Sequence
  Description of Artificial Sequence: Synthetic oligonucleotide
accuggggcgauguccagc

SEQ ID NO: 2587769 - RNA, 19 nt, Artificial Sequence
  Description of Artificial Sequence: Synthetic oligonucleotide
ggcuggauagacagguggg

SEQ ID NO: 2587770 - RNA, 19 nt, Artificial Sequence
  Description of Artificial Sequence: Synthetic oligonucleotide
uccuuguggccuccuggac

SEQ ID NO: 2587771 - RNA, 19 nt, Artificial Sequence
  Description of Artificial Sequence: Synthetic oligonucleotide
uccuggacaauugccuuau

SEQ ID NO: 2587772 - RNA, 19 nt, Artificial Sequence
  Description of Artificial Sequence: Synthetic oligonucleotide
agcucacugcauguaggag

SEQ ID NO: 2587773 - RNA, 19 nt, Artificial Sequence
  Description of Artificial Sequence: Synthetic oligonucleotide
ccuggggcgauguccagcg

SEQ ID NO: 2587774 - RNA, 19 nt, Artificial Sequence
  Description of Artificial Sequence: Synthetic oligonucleotide
cacuuugauccugcugugc

SEQ ID NO: 2587775 - RNA, 19 nt, Artificial Sequence
  Description of Artificial Sequence: Synthetic oligonucleotide
uacuugucauccggguaca

SEQ ID NO: 2587776 - RNA, 19 nt, Artificial Sequence
  Description of Artificial Sequence: Synthetic oligonucleotide
aucaaucacugcagagaag

SEQ ID NO: 2587777 - RNA, 19 nt, Artificial Sequence
  Description of Artificial Sequence: Synthetic oligonucleotide
aggcuggacgaggacuucg

SEQ ID NO: 2587778 - RNA, 19 nt, Artificial Sequence
  Description of Artificial Sequence: Synthetic oligonucleotide
ugcauggcuccacguagua

SEQ ID NO: 2587779 - RNA, 19 nt, Artificial Sequence
  Description of Artificial Sequence: Synthetic oligonucleotide
ggugaguuuccuugaugac

SEQ ID NO: 2587780 - RNA, 19 nt, Artificial Sequence
  Description of Artificial Sequence: Synthetic oligonucleotide
aggacuucgcaugcuccag

SEQ ID NO: 2587781 - RNA, 19 nt, Artificial Sequence
  Description of Artificial Sequence: Synthetic oligonucleotide
cucaagcuauaaggagucc

SEQ ID NO: 2587782 - RNA, 19 nt, Artificial Sequence
  Description of Artificial Sequence: Synthetic oligonucleotide
caauugccuuauccugagc

SEQ ID NO: 2587783 - RNA, 19 nt, Artificial Sequence
  Description of Artificial Sequence: Synthetic oligonucleotide
ugucauccggguacacaua

SEQ ID NO: 2587784 - RNA, 19 nt, Artificial Sequence
  Description of Artificial Sequence: Synthetic oligonucleotide
acuucgcaugcuccagcca

SEQ ID NO: 2587785 - RNA, 19 nt, Artificial Sequence
  Description of Artificial Sequence: Synthetic oligonucleotide
ggauagacagguggguggc

SEQ ID NO: 2587786 - RNA, 19 nt, Artificial Sequence
  Description of Artificial Sequence: Synthetic oligonucleotide
ugaugaccuggggcgaugu

SEQ ID NO: 2587787 - RNA, 19 nt, Artificial Sequence
  Description of Artificial Sequence: Synthetic oligonucleotide
caaugaugcauggcuccac

SEQ ID NO: 2587788 - RNA, 19 nt, Artificial Sequence
  Description of Artificial Sequence: Synthetic oligonucleotide
ccugagcgaacacugcccc

SEQ ID NO: 2587789 - RNA, 19 nt, Artificial Sequence
  Description of Artificial Sequence: Synthetic oligonucleotide
uugaugaccuggggcgaug

SEQ ID NO: 2587790 - RNA, 19 nt, Artificial Sequence
  Description of Artificial Sequence: Synthetic oligonucleotide
auguagugagggccuccug

SEQ ID NO: 2587791 - RNA, 19 nt, Artificial Sequence
  Description of Artificial Sequence: Synthetic oligonucleotide
auaaggaguccgggaggag

SEQ ID NO: 2587792 - RNA, 19 nt, Artificial Sequence
  Description of Artificial Sequence: Synthetic oligonucleotide
cuugucauccggguacaca

SEQ ID NO: 2587793 - RNA, 19 nt, Artificial Sequence
  Description of Artificial Sequence: Synthetic oligonucleotide
cuccuguggguccuugguc

SEQ ID NO: 2587794 - RNA, 19 nt, Artificial Sequence
  Description of Artificial Sequence: Synthetic oligonucleotide
gcagcguuccucagcaucc

SEQ ID NO: 2587795 - RNA, 19 nt, Artificial Sequence
  Description of Artificial Sequence: Synthetic oligonucleotide
gagcuggugggaagccagg

SEQ ID NO: 2587796 - RNA, 19 nt, Artificial Sequence
  Description of Artificial Sequence: Synthetic oligonucleotide
cagugucucucuguacuug

SEQ ID NO: 2587797 - RNA, 19 nt, Artificial Sequence
  Description of Artificial Sequence: Synthetic oligonucleotide
cagagaagaaggucccaaa

SEQ ID NO: 2587798 - RNA, 19 nt, Artificial Sequence
  Description of Artificial Sequence: Synthetic oligonucleotide
gcucaagcuauaaggaguc

SEQ ID NO: 2587799 - RNA, 19 nt, Artificial Sequence
  Description of Artificial Sequence: Synthetic oligonucleotide
guuccucagcauccuugug

SEQ ID NO: 2587800 - RNA, 19 nt, Artificial Sequence
  Description of Artificial Sequence: Synthetic oligonucleotide
cuuauccugagcgaacacu

SEQ ID NO: 2587801 - RNA, 19 nt, Artificial Sequence
  Description of Artificial Sequence: Synthetic oligonucleotide
auguaggaguaacgccagu

SEQ ID NO: 2587802 - RNA, 19 nt, Artificial Sequence
  Description of Artificial Sequence: Synthetic oligonucleotide
cugcagugucucucuguac

SEQ ID NO: 2587803 - RNA, 19 nt, Artificial Sequence
  Description of Artificial Sequence: Synthetic oligonucleotide
caccacggacccaguagac

SEQ ID NO: 2587804 - RNA, 19 nt, Artificial Sequence
  Description of Artificial Sequence: Synthetic oligonucleotide
cagccacuucuugaugcgg

SEQ ID NO: 2587805 - RNA, 19 nt, Artificial Sequence
  Description of Artificial Sequence: Synthetic oligonucleotide
accacggacccaguagacu

SEQ ID NO: 2587806 - RNA, 19 nt, Artificial Sequence
  Description of Artificial Sequence: Synthetic oligonucleotide
acaggaccgaagaucuccu

SEQ ID NO: 2587807 - RNA, 19 nt, Artificial Sequence
  Description of Artificial Sequence: Synthetic oligonucleotide
ggacgaggacuucgcaugc

SEQ ID NO: 2587808 - RNA, 19 nt, Artificial Sequence
  Description of Artificial Sequence: Synthetic oligonucleotide
guagugagggccuccuggu

SEQ ID NO: 2587809 - RNA, 19 nt, Artificial Sequence
  Description of Artificial Sequence: Synthetic oligonucleotide
caggaucagugcagagaug

SEQ ID NO: 2587810 - RNA, 19 nt, Artificial Sequence
  Description of Artificial Sequence: Synthetic oligonucleotide
gcucacugcauguaggagu

SEQ ID NO: 2587811 - RNA, 19 nt, Artificial Sequence
  Description of Artificial Sequence: Synthetic oligonucleotide
ggccaggucagggucaagc

SEQ ID NO: 2587812 - RNA, 19 nt, Artificial Sequence
  Description of Artificial Sequence: Synthetic oligonucleotide
gauguagugagggccuccu

SEQ ID NO: 2587813 - RNA, 19 nt, Artificial Sequence
  Description of Artificial Sequence: Synthetic oligonucleotide
gaugaccuggggcgauguc

SEQ ID NO: 2587814 - RNA, 19 nt, Artificial Sequence
  Description of Artificial Sequence: Synthetic oligonucleotide
cccugugaggccauagcug

SEQ ID NO: 2587815 - RNA, 19 nt, Artificial Sequence
  Description of Artificial Sequence: Synthetic oligonucleotide
ggacuucgcaugcuccagc

SEQ ID NO: 2587816 - RNA, 19 nt, Artificial Sequence
  Description of Artificial Sequence: Synthetic oligonucleotide
cucagcauccuuguggccu

SEQ ID NO: 2587817 - RNA, 19 nt, Artificial Sequence
  Description of Artificial Sequence: Synthetic oligonucleotide
uugauccugcugugcuccu

SEQ ID NO: 2587818 - RNA, 19 nt, Artificial Sequence
  Description of Artificial Sequence: Synthetic oligonucleotide
guggccuccuggacaauug

SEQ ID NO: 2587819 - RNA, 19 nt, Artificial Sequence
  Description of Artificial Sequence: Synthetic oligonucleotide
cauagcugguggugcuguc

SEQ ID NO: 2587820 - RNA, 19 nt, Artificial Sequence
  Description of Artificial Sequence: Synthetic oligonucleotide
ugccccugugaggccauag

SEQ ID NO: 2587821 - RNA, 19 nt, Artificial Sequence
  Description of Artificial Sequence: Synthetic oligonucleotide
agcgaacacugccccugug

SEQ ID NO: 2587822 - RNA, 19 nt, Artificial Sequence
  Description of Artificial Sequence: Synthetic oligonucleotide
ggcagaaggccuuggcauc

SEQ ID NO: 2587823 - RNA, 19 nt, Artificial Sequence
  Description of Artificial Sequence: Synthetic oligonucleotide
cccaccacggacccaguag

SEQ ID NO: 2587824 - RNA, 19 nt, Artificial Sequence
  Description of Artificial Sequence: Synthetic oligonucleotide
cgaacacugccccugugag

SEQ ID NO: 2587825 - RNA, 19 nt, Artificial Sequence
  Description of Artificial Sequence: Synthetic oligonucleotide
cguugauguagaaguugcc

SEQ ID NO: 2587826 - RNA, 19 nt, Artificial Sequence
  Description of Artificial Sequence: Synthetic oligonucleotide
aucgcccacuuugauccug

SEQ ID NO: 2587827 - RNA, 19 nt, Artificial Sequence
  Description of Artificial Sequence: Synthetic oligonucleotide
gccuuggcaucaaucacug

SEQ ID NO: 2587828 - RNA, 19 nt, Artificial Sequence
  Description of Artificial Sequence: Synthetic oligonucleotide
ggucucaaugaugcauggc

SEQ ID NO: 2587829 - RNA, 19 nt, Artificial Sequence
  Description of Artificial Sequence: Synthetic oligonucleotide
ggaguccgggaggagcugg

SEQ ID NO: 2587830 - RNA, 19 nt, Artificial Sequence
  Description of Artificial Sequence: Synthetic oligonucleotide
auccggguacacauacacu

SEQ ID NO: 2587831 - RNA, 19 nt, Artificial Sequence
  Description of Artificial Sequence: Synthetic oligonucleotide
caggggcuggugaguuucc

SEQ ID NO: 2587832 - RNA, 19 nt, Artificial Sequence
  Description of Artificial Sequence: Synthetic oligonucleotide
gauguccagcgcaggaugu

SEQ ID NO: 2587833 - RNA, 19 nt, Artificial Sequence
  Description of Artificial Sequence: Synthetic oligonucleotide
agcuggugggaagccagga

SEQ ID NO: 2587834 - RNA, 19 nt, Artificial Sequence
  Description of Artificial Sequence: Synthetic oligonucleotide
ugccagcagcguuccucag

SEQ ID NO: 2587835 - RNA, 19 nt, Artificial Sequence
  Description of Artificial Sequence: Synthetic oligonucleotide
augcauggcuccacguagu

SEQ ID NO: 2587836 - RNA, 19 nt, Artificial Sequence
  Description of Artificial Sequence: Synthetic oligonucleotide
gcgaacacugccccuguga

SEQ ID NO: 2587837 - RNA, 19 nt, Artificial Sequence
  Description of Artificial Sequence: Synthetic oligonucleotide
ccacugacucauugcacug

SEQ ID NO: 2587838 - RNA, 19 nt, Artificial Sequence
  Description of Artificial Sequence: Synthetic oligonucleotide
ccaguagacuuaucguuga

SEQ ID NO: 2587839 - RNA, 19 nt, Artificial Sequence
  Description of Artificial Sequence: Synthetic oligonucleotide
caggaccgaagaucuccuc

SEQ ID NO: 2587840 - RNA, 19 nt, Artificial Sequence
  Description of Artificial Sequence: Synthetic oligonucleotide
gaccuggggcgauguccag

SEQ ID NO: 2587841 - RNA, 19 nt, Artificial Sequence
  Description of Artificial Sequence: Synthetic oligonucleotide
acguaguaucccacugacu

SEQ ID NO: 2587842 - RNA, 19 nt, Artificial Sequence
  Description of Artificial Sequence: Synthetic oligonucleotide
ugauccugcugugcuccuc

SEQ ID NO: 2587843 - RNA, 19 nt, Artificial Sequence
  Description of Artificial Sequence: Synthetic oligonucleotide
cgaggacuucgcaugcucc

SEQ ID NO: 2587844 - RNA, 19 nt, Artificial Sequence
  Description of Artificial Sequence: Synthetic oligonucleotide
ggguacacauacacuguca

SEQ ID NO: 2587845 - RNA, 19 nt, Artificial Sequence
  Description of Artificial Sequence: Synthetic oligonucleotide
cuccuggacaauugccuua

SEQ ID NO: 2587846 - RNA, 19 nt, Artificial Sequence
  Description of Artificial Sequence: Synthetic oligonucleotide
ggcgauguccagcgcagga

SEQ ID NO: 2587847 - RNA, 19 nt, Artificial Sequence
  Description of Artificial Sequence: Synthetic oligonucleotide
ggaccgaagaucuccuccu

SEQ ID NO: 2587848 - RNA, 19 nt, Artificial Sequence
  Description of Artificial Sequence: Synthetic oligonucleotide
ggauguagugagggccucc

SEQ ID NO: 2587849 - RNA, 19 nt, Artificial Sequence
  Description of Artificial Sequence: Synthetic oligonucleotide
gcguuccucagcauccuug

SEQ ID NO: 2587850 - RNA, 19 nt, Artificial Sequence
  Description of Artificial Sequence: Synthetic oligonucleotide
gcggcagaaggccuuggca

SEQ ID NO: 2587851 - RNA, 19 nt, Artificial Sequence
  Description of Artificial Sequence: Synthetic oligonucleotide
auccugcugugcuccucca

SEQ ID NO: 2587852 - RNA, 19 nt, Artificial Sequence
  Description of Artificial Sequence: Synthetic oligonucleotide
cuggacgaggacuucgcau

SEQ ID NO: 2587853 - RNA, 19 nt, Artificial Sequence
  Description of Artificial Sequence: Synthetic oligonucleotide
gcccacuuugauccugcug

SEQ ID NO: 2587854 - RNA, 19 nt, Artificial Sequence
  Description of Artificial Sequence: Synthetic oligonucleotide
gccaggacacugaggcugg

SEQ ID NO: 2587855 - RNA, 19 nt, Artificial Sequence
  Description of Artificial Sequence: Synthetic oligonucleotide
ggccuccuggacaauugcc

SEQ ID NO: 2587856 - RNA, 19 nt, Artificial Sequence
  Description of Artificial Sequence: Synthetic oligonucleotide
ccuuguggccuccuggaca

SEQ ID NO: 2587857 - RNA, 19 nt, Artificial Sequence
  Description of Artificial Sequence: Synthetic oligonucleotide
acggacccaguagacuuau

SEQ ID NO: 2587858 - RNA, 19 nt, Artificial Sequence
  Description of Artificial Sequence: Synthetic oligonucleotide
ccuccugguuugucauugg

SEQ ID NO: 2587859 - RNA, 19 nt, Artificial Sequence
  Description of Artificial Sequence: Synthetic oligonucleotide
aguccgggaggagcuggug

SEQ ID NO: 2587860 - RNA, 19 nt, Artificial Sequence
  Description of Artificial Sequence: Synthetic oligonucleotide
ccuuauccugagcgaacac

SEQ ID NO: 2587861 - RNA, 19 nt, Artificial Sequence
  Description of Artificial Sequence: Synthetic oligonucleotide
augcggcagaaggccuugg

SEQ ID NO: 2587862 - RNA, 19 nt, Artificial Sequence
  Description of Artificial Sequence: Synthetic oligonucleotide
gccuuauccugagcgaaca

SEQ ID NO: 2587863 - RNA, 19 nt, Artificial Sequence
  Description of Artificial Sequence: Synthetic oligonucleotide
gcuggcccaccacggaccc

SEQ ID NO: 2587864 - RNA, 19 nt, Artificial Sequence
  Description of Artificial Sequence: Synthetic oligonucleotide
gccccugugaggccauagc

SEQ ID NO: 2587865 - RNA, 19 nt, Artificial Sequence
  Description of Artificial Sequence: Synthetic oligonucleotide
gccacuucuugaugcggca

SEQ ID NO: 2587866 - RNA, 19 nt, Artificial Sequence
  Description of Artificial Sequence: Synthetic oligonucleotide
ggcuggacgaggacuucgc

SEQ ID NO: 2587867 - RNA, 19 nt, Artificial Sequence
  Description of Artificial Sequence: Synthetic oligonucleotide
augggcuccuguggguccu

SEQ ID NO: 2587868 - RNA, 19 nt, Artificial Sequence
  Description of Artificial Sequence: Synthetic oligonucleotide
aguugccagcagcguuccu

SEQ ID NO: 2587869 - RNA, 19 nt, Artificial Sequence
  Description of Artificial Sequence: Synthetic oligonucleotide
cugaggcuggacgaggacu

SEQ ID NO: 2587870 - RNA, 19 nt, Artificial Sequence
  Description of Artificial Sequence: Synthetic oligonucleotide
gcauccuuguggccuccug

SEQ ID NO: 2587871 - RNA, 19 nt, Artificial Sequence
  Description of Artificial Sequence: Synthetic oligonucleotide
gcagaaggccuuggcauca

SEQ ID NO: 2587872 - RNA, 19 nt, Artificial Sequence
  Description of Artificial Sequence: Synthetic oligonucleotide
ucgcaugcuccagccacuu

SEQ ID NO: 2587873 - RNA, 19 nt, Artificial Sequence
  Description of Artificial Sequence: Synthetic oligonucleotide
ucacugcauguaggaguaa

SEQ ID NO: 2587874 - RNA, 19 nt, Artificial Sequence
  Description of Artificial Sequence: Synthetic oligonucleotide
aggggcuggugaguuuccu

SEQ ID NO: 2587875 - RNA, 19 nt, Artificial Sequence
  Description of Artificial Sequence: Synthetic oligonucleotide
aggaguccgggaggagcug

SEQ ID NO: 2587876 - RNA, 19 nt, Artificial Sequence
  Description of Artificial Sequence: Synthetic oligonucleotide
ccacguaguaucccacuga

SEQ ID NO: 2587877 - RNA, 19 nt, Artificial Sequence
  Description of Artificial Sequence: Synthetic oligonucleotide
ccaccacggacccaguaga

SEQ ID NO: 2587878 - RNA, 19 nt, Artificial Sequence
  Description of Artificial Sequence: Synthetic oligonucleotide
ggccuuggcaucaaucacu

SEQ ID NO: 2587879 - RNA, 19 nt, Artificial Sequence
  Description of Artificial Sequence: Synthetic oligonucleotide
cuccugguuugucauuggu

SEQ ID NO: 2587880 - RNA, 19 nt, Artificial Sequence
  Description of Artificial Sequence: Synthetic oligonucleotide
gaggcuggacgaggacuuc

SEQ ID NO: 2587881 - RNA, 19 nt, Artificial Sequence
  Description of Artificial Sequence: Synthetic oligonucleotide
auguccagcgcaggaugua

SEQ ID NO: 2587882 - RNA, 19 nt, Artificial Sequence
  Description of Artificial Sequence: Synthetic oligonucleotide
ggucaagcucaagcuauaa

SEQ ID NO: 2587883 - RNA, 19 nt, Artificial Sequence
  Description of Artificial Sequence: Synthetic oligonucleotide
cacggacccaguagacuua

SEQ ID NO: 2587884 - RNA, 19 nt, Artificial Sequence
  Description of Artificial Sequence: Synthetic oligonucleotide
gcuggacgaggacuucgca

SEQ ID NO: 2587885 - RNA, 19 nt, Artificial Sequence
  Description of Artificial Sequence: Synthetic oligonucleotide
gagcgaacacugccccugu

SEQ ID NO: 2587886 - RNA, 19 nt, Artificial Sequence
  Description of Artificial Sequence: Synthetic oligonucleotide
ccuuggcaucaaucacugc

SEQ ID NO: 2587887 - RNA, 19 nt, Artificial Sequence
  Description of Artificial Sequence: Synthetic oligonucleotide
cggguacacauacacuguc

SEQ ID NO: 2587888 - RNA, 19 nt, Artificial Sequence
  Description of Artificial Sequence: Synthetic oligonucleotide
ggaucagugcagagauguc

SEQ ID NO: 2587889 - RNA, 19 nt, Artificial Sequence
  Description of Artificial Sequence: Synthetic oligonucleotide
ugagggccuccugguuugu

SEQ ID NO: 2587890 - RNA, 19 nt, Artificial Sequence
  Description of Artificial Sequence: Synthetic oligonucleotide
gcaggaucgcccacuuuga

SEQ ID NO: 2587891 - RNA, 19 nt, Artificial Sequence
  Description of Artificial Sequence: Synthetic oligonucleotide
agcauccuuguggccuccu

SEQ ID NO: 2587892 - RNA, 19 nt, Artificial Sequence
  Description of Artificial Sequence: Synthetic oligonucleotide
gcuccacguaguaucccac

SEQ ID NO: 2587893 - RNA, 19 nt, Artificial Sequence
  Description of Artificial Sequence: Synthetic oligonucleotide
cugucagcacaggaccgaa

SEQ ID NO: 2587894 - RNA, 19 nt, Artificial Sequence
  Description of Artificial Sequence: Synthetic oligonucleotide
gaucgcccacuuugauccu

SEQ ID NO: 2587895 - RNA, 19 nt, Artificial Sequence
  Description of Artificial Sequence: Synthetic oligonucleotide
gaccgaagaucuccuccuu

SEQ ID NO: 2587896 - RNA, 19 nt, Artificial Sequence
  Description of Artificial Sequence: Synthetic oligonucleotide
gccauagcugguggugcug

SEQ ID NO: 2587897 - RNA, 19 nt, Artificial Sequence
  Description of Artificial Sequence: Synthetic oligonucleotide
cuguggguccuuggucuca

SEQ ID NO: 2587898 - RNA, 19 nt, Artificial Sequence
  Description of Artificial Sequence: Synthetic oligonucleotide
gugggaagccaggaucagu

SEQ ID NO: 2587899 - RNA, 19 nt, Artificial Sequence
  Description of Artificial Sequence: Synthetic oligonucleotide
caugcuccagccacuucuu

SEQ ID NO: 2587900 - RNA, 19 nt, Artificial Sequence
  Description of Artificial Sequence: Synthetic oligonucleotide
gccuccuggacaauugccu

SEQ ID NO: 2587901 - RNA, 19 nt, Artificial Sequence
  Description of Artificial Sequence: Synthetic oligonucleotide
gcuccuguggguccuuggu

SEQ ID NO: 2587902 - RNA, 19 nt, Artificial Sequence
  Description of Artificial Sequence: Synthetic oligonucleotide
aguaucccacugacucauu

SEQ ID NO: 2587903 - RNA, 19 nt, Artificial Sequence
  Description of Artificial Sequence: Synthetic oligonucleotide
aggucagggucaagcucaa

SEQ ID NO: 2587904 - RNA, 19 nt, Artificial Sequence
  Description of Artificial Sequence: Synthetic oligonucleotide
gggcgauguccagcgcagg

SEQ ID NO: 2587905 - RNA, 19 nt, Artificial Sequence
  Description of Artificial Sequence: Synthetic oligonucleotide
uggccaggucagggucaag

SEQ ID NO: 2587906 - RNA, 19 nt, Artificial Sequence
  Description of Artificial Sequence: Synthetic oligonucleotide
caguagacuuaucguugau

SEQ ID NO: 2587907 - RNA, 19 nt, Artificial Sequence
  Description of Artificial Sequence: Synthetic oligonucleotide
cuugaugaccuggggcgau

SEQ ID NO: 2587908 - RNA, 19 nt, Artificial Sequence
  Description of Artificial Sequence: Synthetic oligonucleotide
ggccauagcugguggugcu

SEQ ID NO: 2587909 - RNA, 19 nt, Artificial Sequence
  Description of Artificial Sequence: Synthetic oligonucleotide
ccacggacccaguagacuu

SEQ ID NO: 2587910 - RNA, 19 nt, Artificial Sequence
  Description of Artificial Sequence: Synthetic oligonucleotide
gcagagcucacugcaugua

SEQ ID NO: 2587911 - RNA, 19 nt, Artificial Sequence
  Description of Artificial Sequence: Synthetic oligonucleotide
gcuggugaguuuccuugau

SEQ ID NO: 2587912 - RNA, 19 nt, Artificial Sequence
  Description of Artificial Sequence: Synthetic oligonucleotide
guccagcgcaggauguagu

SEQ ID NO: 2587913 - RNA, 19 nt, Artificial Sequence
  Description of Artificial Sequence: Synthetic oligonucleotide
cugccaggacacugaggcu

SEQ ID NO: 2587914 - RNA, 19 nt, Artificial Sequence
  Description of Artificial Sequence: Synthetic oligonucleotide
gcuggugggaagccaggau

SEQ ID NO: 2587915 - RNA, 19 nt, Artificial Sequence
  Description of Artificial Sequence: Synthetic oligonucleotide
gaguccgggaggagcuggu

SEQ ID NO: 2587916 - RNA, 19 nt, Artificial Sequence
  Description of Artificial Sequence: Synthetic oligonucleotide
caggaucgcccacuuugau

SEQ ID NO: 2587917 - RNA, 19 nt, Artificial Sequence
  Description of Artificial Sequence: Synthetic oligonucleotide
ccagcgcaggauguaguga

SEQ ID NO: 2587918 - RNA, 19 nt, Artificial Sequence
  Description of Artificial Sequence: Synthetic oligonucleotide
ccuugaugaccuggggcga

SEQ ID NO: 2587919 - RNA, 19 nt, Artificial Sequence
  Description of Artificial Sequence: Synthetic oligonucleotide
ccccugugaggccauagcu

SEQ ID NO: 2587920 - RNA, 19 nt, Artificial Sequence
  Description of Artificial Sequence: Synthetic oligonucleotide
gggucaagcucaagcuaua

SEQ ID NO: 2587921 - RNA, 19 nt, Artificial Sequence
  Description of Artificial Sequence: Synthetic oligonucleotide
ccggguacacauacacugu

SEQ ID NO: 2587922 - RNA, 19 nt, Artificial Sequence
  Description of Artificial Sequence: Synthetic oligonucleotide
ccuggacaauugccuuauc

SEQ ID NO: 2587923 - RNA, 19 nt, Artificial Sequence
  Description of Artificial Sequence: Synthetic oligonucleotide
cguuccucagcauccuugu

SEQ ID NO: 2587924 - RNA, 19 nt, Artificial Sequence
  Description of Artificial Sequence: Synthetic oligonucleotide
cggcagaaggccuuggcau

SEQ ID NO: 2587925 - RNA, 19 nt, Artificial Sequence
  Description of Artificial Sequence: Synthetic oligonucleotide
gcacaggaccgaagaucuc

SEQ ID NO: 2587926 - RNA, 19 nt, Artificial Sequence
  Description of Artificial Sequence: Synthetic oligonucleotide
gcgauguccagcgcaggau

SEQ ID NO: 2587927 - RNA, 19 nt, Artificial Sequence
  Description of Artificial Sequence: Synthetic oligonucleotide
ugggcuccuguggguccuu

SEQ ID NO: 2587928 - RNA, 19 nt, Artificial Sequence
  Description of Artificial Sequence: Synthetic oligonucleotide
ccagaggcccgggcacccc

SEQ ID NO: 2587929 - RNA, 19 nt, Artificial Sequence
  Description of Artificial Sequence: Synthetic oligonucleotide
ccauagcugguggugcugu

SEQ ID NO: 2587930 - RNA, 19 nt, Artificial Sequence
  Description of Artificial Sequence: Synthetic oligonucleotide
ccaaaguccucugcaggau

SEQ ID NO: 2587931 - RNA, 19 nt, Artificial Sequence
  Description of Artificial Sequence: Synthetic oligonucleotide
gcauggcuccacguaguau

SEQ ID NO: 2587932 - RNA, 19 nt, Artificial Sequence
  Description of Artificial Sequence: Synthetic oligonucleotide
gcccaccacggacccagua

SEQ ID NO: 2587933 - RNA, 19 nt, Artificial Sequence
  Description of Artificial Sequence: Synthetic oligonucleotide
cuggcccaccacggaccca

SEQ ID NO: 2587934 - RNA, 19 nt, Artificial Sequence
  Description of Artificial Sequence: Synthetic oligonucleotide
gucagucaucuggcuggau

SEQ ID NO: 2587935 - RNA, 19 nt, Artificial Sequence
  Description of Artificial Sequence: Synthetic oligonucleotide
cgcaugcuccagccacuuc

SEQ ID NO: 2587936 - RNA, 19 nt, Artificial Sequence
  Description of Artificial Sequence: Synthetic oligonucleotide
cggacccaguagacuuauc

SEQ ID NO: 2587937 - RNA, 19 nt, Artificial Sequence
  Description of Artificial Sequence: Synthetic oligonucleotide
cugcaggaucgcccacuuu

SEQ ID NO: 2587938 - RNA, 19 nt, Artificial Sequence
  Description of Artificial Sequence: Synthetic oligonucleotide
cagcagcguuccucagcau

SEQ ID NO: 2587939 - RNA, 19 nt, Artificial Sequence
  Description of Artificial Sequence: Synthetic oligonucleotide
ccaggacacugaggcugga

SEQ ID NO: 2587940 - RNA, 19 nt, Artificial Sequence
  Description of Artificial Sequence: Synthetic oligonucleotide
cgcccacuuugauccugcu

SEQ ID NO: 2587941 - RNA, 19 nt, Artificial Sequence
  Description of Artificial Sequence: Synthetic oligonucleotide
ggcccaccacggacccagu

SEQ ID NO: 2587942 - RNA, 19 nt, Artificial Sequence
  Description of Artificial Sequence: Synthetic oligonucleotide
uuaacuguuaacaugaccu

SEQ ID NO: 2587943 - RNA, 19 nt, Artificial Sequence
  Description of Artificial Sequence: Synthetic oligonucleotide
auaacuuuuaucuguaaac

SEQ ID NO: 2587944 - RNA, 19 nt, Artificial Sequence
  Description of Artificial Sequence: Synthetic oligonucleotide
ugaaguauaaccuggagca

SEQ ID NO: 2587945 - RNA, 19 nt, Artificial Sequence
  Description of Artificial Sequence: Synthetic oligonucleotide
ucugugaugaacaaggcug

SEQ ID NO: 2587946 - RNA, 19 nt, Artificial Sequence
  Description of Artificial Sequence: Synthetic oligonucleotide
aaagaggugagcaauggcc

SEQ ID NO: 2587947 - RNA, 19 nt, Artificial Sequence
  Description of Artificial Sequence: Synthetic oligonucleotide
caaguaagaaauaaggggc

SEQ ID NO: 2587948 - RNA, 19 nt, Artificial Sequence
  Description of Artificial Sequence: Synthetic oligonucleotide
ucuaauaacuuuuaucugu

SEQ ID NO: 2587949 - RNA, 19 nt, Artificial Sequence
  Description of Artificial Sequence: Synthetic oligonucleotide
ugagcaauggccaucauac

SEQ ID NO: 2587950 - RNA, 19 nt, Artificial Sequence
  Description of Artificial Sequence: Synthetic oligonucleotide
uuagcagcaaguaagaaau

SEQ ID NO: 2587951 - RNA, 19 nt, Artificial Sequence
  Description of Artificial Sequence: Synthetic oligonucleotide
uauaaccuggagcagaggc

SEQ ID NO: 2587952 - RNA, 19 nt, Artificial Sequence
  Description of Artificial Sequence: Synthetic oligonucleotide
gucauuaggaguuagcagc

SEQ ID NO: 2587953 - RNA, 19 nt, Artificial Sequence
  Description of Artificial Sequence: Synthetic oligonucleotide
gcaaguaagaaauaagggg

SEQ ID NO: 2587954 - RNA, 19 nt, Artificial Sequence
  Description of Artificial Sequence: Synthetic oligonucleotide
aauaacuuuuaucuguaaa

SEQ ID NO: 2587955 - RNA, 19 nt, Artificial Sequence
  Description of Artificial Sequence: Synthetic oligonucleotide
aucauacgaaacuggaagc

SEQ ID NO: 2587956 - RNA, 19 nt, Artificial Sequence
  Description of Artificial Sequence: Synthetic oligonucleotide
uguuguaggacauuacagc

SEQ ID NO: 2587957 - RNA, 19 nt, Artificial Sequence
  Description of Artificial Sequence: Synthetic oligonucleotide
uccagggacaauuugcugg

SEQ ID NO: 2587958 - RNA, 19 nt, Artificial Sequence
  Description of Artificial Sequence: Synthetic oligonucleotide
aaaauccagguguuguagg

SEQ ID NO: 2587959 - RNA, 19 nt, Artificial Sequence
  Description of Artificial Sequence: Synthetic oligonucleotide
caucauacgaaacuggaag

SEQ ID NO: 2587960 - RNA, 19 nt, Artificial Sequence
  Description of Artificial Sequence: Synthetic oligonucleotide
aacaucacgaaguagccaa

SEQ ID NO: 2587961 - RNA, 19 nt, Artificial Sequence
  Description of Artificial Sequence: Synthetic oligonucleotide
agcaccuacacauuucugg

SEQ ID NO: 2587962 - RNA, 19 nt, Artificial Sequence
  Description of Artificial Sequence: Synthetic oligonucleotide
accuacacauuucuggccc

SEQ ID NO: 2587963 - RNA, 19 nt, Artificial Sequence
  Description of Artificial Sequence: Synthetic oligonucleotide
ucaaacccaacucuccagg

SEQ ID NO: 2587964 - RNA, 19 nt, Artificial Sequence
  Description of Artificial Sequence: Synthetic oligonucleotide
ucaaauaccaggaguccag

SEQ ID NO: 2587965 - RNA, 19 nt, Artificial Sequence
  Description of Artificial Sequence: Synthetic oligonucleotide
auuucuggcccacuaaguc

SEQ ID NO: 2587966 - RNA, 19 nt, Artificial Sequence
  Description of Artificial Sequence: Synthetic oligonucleotide
guuguaggacauuacagcc

SEQ ID NO: 2587967 - RNA, 19 nt, Artificial Sequence
  Description of Artificial Sequence: Synthetic oligonucleotide
uguuacgaaaugcuguucu

SEQ ID NO: 2587968 - RNA, 19 nt, Artificial Sequence
  Description of Artificial Sequence: Synthetic oligonucleotide
aacccaacucuccaggcuc

SEQ ID NO: 2587969 - RNA, 19 nt, Artificial Sequence
  Description of Artificial Sequence: Synthetic oligonucleotide
gaaucaguacuucagugac

SEQ ID NO: 2587970 - RNA, 19 nt, Artificial Sequence
  Description of Artificial Sequence: Synthetic oligonucleotide
uaagaaauaaggggcagcc

SEQ ID NO: 2587971 - RNA, 19 nt, Artificial Sequence
  Description of Artificial Sequence: Synthetic oligonucleotide
uguccucuaagcuccaggg

SEQ ID NO: 2587972 - RNA, 19 nt, Artificial Sequence
  Description of Artificial Sequence: Synthetic oligonucleotide
aauuugcuggcuucagcuc

SEQ ID NO: 2587973 - RNA, 19 nt, Artificial Sequence
  Description of Artificial Sequence: Synthetic oligonucleotide
cugaaguauaaccuggagc

SEQ ID NO: 2587974 - RNA, 19 nt, Artificial Sequence
  Description of Artificial Sequence: Synthetic oligonucleotide
ugaugaacaaggcugggaa

SEQ ID NO: 2587975 - RNA, 19 nt, Artificial Sequence
  Description of Artificial Sequence: Synthetic oligonucleotide
auuacagguaugugucccc

SEQ ID NO: 2587976 - RNA, 19 nt, Artificial Sequence
  Description of Artificial Sequence: Synthetic oligonucleotide
uucagcucaaagcugccag

SEQ ID NO: 2587977 - RNA, 19 nt, Artificial Sequence
  Description of Artificial Sequence: Synthetic oligonucleotide
agcaaguaagaaauaaggg

SEQ ID NO: 2587978 - RNA, 19 nt, Artificial Sequence
  Description of Artificial Sequence: Synthetic oligonucleotide
auuacagccaacaucacga

SEQ ID NO: 2587979 - RNA, 19 nt, Artificial Sequence
  Description of Artificial Sequence: Synthetic oligonucleotide
acaauuugcuggcuucagc

SEQ ID NO: 2587980 - RNA, 19 nt, Artificial Sequence
  Description of Artificial Sequence: Synthetic oligonucleotide
uucacugugcaucccaggc

SEQ ID NO: 2587981 - RNA, 19 nt, Artificial Sequence
  Description of Artificial Sequence: Synthetic oligonucleotide
uuaggaguuagcagcaagu

SEQ ID NO: 2587982 - RNA, 19 nt, Artificial Sequence
  Description of Artificial Sequence: Synthetic oligonucleotide
uccucuaagcuccagggac

SEQ ID NO: 2587983 - RNA, 19 nt, Artificial Sequence
  Description of Artificial Sequence: Synthetic oligonucleotide
aaauccagguguuguagga

SEQ ID NO: 2587984 - RNA, 19 nt, Artificial Sequence
  Description of Artificial Sequence: Synthetic oligonucleotide
uguaggacauuacagccaa

SEQ ID NO: 2587985 - RNA, 19 nt, Artificial Sequence
  Description of Artificial Sequence: Synthetic oligonucleotide
uaagucauguugagaagug

SEQ ID NO: 2587986 - RNA, 19 nt, Artificial Sequence
  Description of Artificial Sequence: Synthetic oligonucleotide
auaaggggcagccagcucu

SEQ ID NO: 2587987 - RNA, 19 nt, Artificial Sequence
  Description of Artificial Sequence: Synthetic oligonucleotide
ucccuaucaggucauuagg

SEQ ID NO: 2587988 - RNA, 19 nt, Artificial Sequence
  Description of Artificial Sequence: Synthetic oligonucleotide
acuguuaacaugaccuggc

SEQ ID NO: 2587989 - RNA, 19 nt, Artificial Sequence
  Description of Artificial Sequence: Synthetic oligonucleotide
augaacaaggcugggaagg

SEQ ID NO: 2587990 - RNA, 19 nt, Artificial Sequence
  Description of Artificial Sequence: Synthetic oligonucleotide
uaucaggucauuaggaguu

SEQ ID NO: 2587991 - RNA, 19 nt, Artificial Sequence
  Description of Artificial Sequence: Synthetic oligonucleotide
ucugacugcuuauugcacc

SEQ ID NO: 2587992 - RNA, 19 nt, Artificial Sequence
  Description of Artificial Sequence: Synthetic oligonucleotide
uguguuucacugugcaucc

SEQ ID NO: 2587993 - RNA, 19 nt, Artificial Sequence
  Description of Artificial Sequence: Synthetic oligonucleotide
uaagcaccuacacauuucu

SEQ ID NO: 2587994 - RNA, 19 nt, Artificial Sequence
  Description of Artificial Sequence: Synthetic oligonucleotide
cugucuaauaacuuuuauc

SEQ ID NO: 2587995 - RNA, 19 nt, Artificial Sequence
  Description of Artificial Sequence: Synthetic oligonucleotide
guuaacuguuaacaugacc

SEQ ID NO: 2587996 - RNA, 19 nt, Artificial Sequence
  Description of Artificial Sequence: Synthetic oligonucleotide
aguccaguuaacuguuaac

SEQ ID NO: 2587997 - RNA, 19 nt, Artificial Sequence
  Description of Artificial Sequence: Synthetic oligonucleotide
ucauuaggaguuagcagca

SEQ ID NO: 2587998 - RNA, 19 nt, Artificial Sequence
  Description of Artificial Sequence: Synthetic oligonucleotide
acauuucuggcccacuaag

SEQ ID NO: 2587999 - RNA, 19 nt, Artificial Sequence
  Description of Artificial Sequence: Synthetic oligonucleotide
agcaauggccaucauacga

SEQ ID NO: 2588000 - RNA, 19 nt, Artificial Sequence
  Description of Artificial Sequence: Synthetic oligonucleotide
ggaguuagcagcaaguaag

SEQ ID NO: 2588001 - RNA, 19 nt, Artificial Sequence
  Description of Artificial Sequence: Synthetic oligonucleotide
auacgaaacuggaagcagc

SEQ ID NO: 2588002 - RNA, 19 nt, Artificial Sequence
  Description of Artificial Sequence: Synthetic oligonucleotide
aauccagguguuguaggac

SEQ ID NO: 2588003 - RNA, 19 nt, Artificial Sequence
  Description of Artificial Sequence: Synthetic oligonucleotide
aaaaggacucaaauaccag

SEQ ID NO: 2588004 - RNA, 19 nt, Artificial Sequence
  Description of Artificial Sequence: Synthetic oligonucleotide
uacgaaaugcuguucucug

SEQ ID NO: 2588005 - RNA, 19 nt, Artificial Sequence
  Description of Artificial Sequence: Synthetic oligonucleotide
uguuucacugugcauccca

SEQ ID NO: 2588006 - RNA, 19 nt, Artificial Sequence
  Description of Artificial Sequence: Synthetic oligonucleotide
aucaguacuucagugacug

SEQ ID NO: 2588007 - RNA, 19 nt, Artificial Sequence
  Description of Artificial Sequence: Synthetic oligonucleotide
agucauguugagaaguggg

SEQ ID NO: 2588008 - RNA, 19 nt, Artificial Sequence
  Description of Artificial Sequence: Synthetic oligonucleotide
uaacuguuaacaugaccug

SEQ ID NO: 2588009 - RNA, 19 nt, Artificial Sequence
  Description of Artificial Sequence: Synthetic oligonucleotide
cacuaagucauguugagaa

SEQ ID NO: 2588010 - RNA, 19 nt, Artificial Sequence
  Description of Artificial Sequence: Synthetic oligonucleotide
uuucuggcccacuaaguca

SEQ ID NO: 2588011 - RNA, 19 nt, Artificial Sequence
  Description of Artificial Sequence: Synthetic oligonucleotide
uuguaggacauuacagcca

SEQ ID NO: 2588012 - RNA, 19 nt, Artificial Sequence
  Description of Artificial Sequence: Synthetic oligonucleotide
aaguauaaccuggagcaga

SEQ ID NO: 2588013 - RNA, 19 nt, Artificial Sequence
  Description of Artificial Sequence: Synthetic oligonucleotide
gacucaaauaccaggaguc

SEQ ID NO: 2588014 - RNA, 19 nt, Artificial Sequence
  Description of Artificial Sequence: Synthetic oligonucleotide
auaaccuggagcagaggcc

SEQ ID NO: 2588015 - RNA, 19 nt, Artificial Sequence
  Description of Artificial Sequence: Synthetic oligonucleotide
uacgaaacuggaagcagcu

SEQ ID NO: 2588016 - RNA, 19 nt, Artificial Sequence
  Description of Artificial Sequence: Synthetic oligonucleotide
acuaagucauguugagaag

SEQ ID NO: 2588017 - RNA, 19 nt, Artificial Sequence
  Description of Artificial Sequence: Synthetic oligonucleotide
aauaaggggcagccagcuc

SEQ ID NO: 2588018 - RNA, 19 nt, Artificial Sequence
  Description of Artificial Sequence: Synthetic oligonucleotide
uaggacauuacagccaaca

SEQ ID NO: 2588019 - RNA, 19 nt, Artificial Sequence
  Description of Artificial Sequence: Synthetic oligonucleotide
ucauacgaaacuggaagca

SEQ ID NO: 2588020 - RNA, 19 nt, Artificial Sequence
  Description of Artificial Sequence: Synthetic oligonucleotide
cauauguagcccaggcugc

SEQ ID NO: 2588021 - RNA, 19 nt, Artificial Sequence
  Description of Artificial Sequence: Synthetic oligonucleotide
guuagcagcaaguaagaaa

SEQ ID NO: 2588022 - RNA, 19 nt, Artificial Sequence
  Description of Artificial Sequence: Synthetic oligonucleotide
agcuccagggacaauuugc

SEQ ID NO: 2588023 - RNA, 19 nt, Artificial Sequence
  Description of Artificial Sequence: Synthetic oligonucleotide
guguguguguguuucacug

SEQ ID NO: 2588024 - RNA, 19 nt, Artificial Sequence
  Description of Artificial Sequence: Synthetic oligonucleotide
uaggcuagguaguagccca

SEQ ID NO: 2588025 - RNA, 19 nt, Artificial Sequence
  Description of Artificial Sequence: Synthetic oligonucleotide
aaaugcuguucucugugau

SEQ ID NO: 2588026 - RNA, 19 nt, Artificial Sequence
  Description of Artificial Sequence: Synthetic oligonucleotide
uauguguccccauuccugu

SEQ ID NO: 2588027 - RNA, 19 nt, Artificial Sequence
  Description of Artificial Sequence: Synthetic oligonucleotide
gucuaauaacuuuuaucug

SEQ ID NO: 2588028 - RNA, 19 nt, Artificial Sequence
  Description of Artificial Sequence: Synthetic oligonucleotide
uuauugcacccucagucac

SEQ ID NO: 2588029 - RNA, 19 nt, Artificial Sequence
  Description of Artificial Sequence: Synthetic oligonucleotide
aacaugaccuggcuuuggu

SEQ ID NO: 2588030 - RNA, 19 nt, Artificial Sequence
  Description of Artificial Sequence: Synthetic oligonucleotide
aauggccaucauacgaaac

SEQ ID NO: 2588031 - RNA, 19 nt, Artificial Sequence
  Description of Artificial Sequence: Synthetic oligonucleotide
uggguacuggggauuacag

SEQ ID NO: 2588032 - RNA, 19 nt, Artificial Sequence
  Description of Artificial Sequence: Synthetic oligonucleotide
uuggucugacugcuuauug

SEQ ID NO: 2588033 - RNA, 19 nt, Artificial Sequence
  Description of Artificial Sequence: Synthetic oligonucleotide
uccaguguccucuaagcuc

SEQ ID NO: 2588034 - RNA, 19 nt, Artificial Sequence
  Description of Artificial Sequence: Synthetic oligonucleotide
uaaccuggagcagaggccc

SEQ ID NO: 2588035 - RNA, 19 nt, Artificial Sequence
  Description of Artificial Sequence: Synthetic oligonucleotide
aacugggaaagaggugagc

SEQ ID NO: 2588036 - RNA, 19 nt, Artificial Sequence
  Description of Artificial Sequence: Synthetic oligonucleotide
ucuguuacgaaaugcuguu

SEQ ID NO: 2588037 - RNA, 19 nt, Artificial Sequence
  Description of Artificial Sequence: Synthetic oligonucleotide
uggucugacugcuuauugc

SEQ ID NO: 2588038 - RNA, 19 nt, Artificial Sequence
  Description of Artificial Sequence: Synthetic oligonucleotide
cucccuaucaggucauuag

SEQ ID NO: 2588039 - RNA, 19 nt, Artificial Sequence
  Description of Artificial Sequence: Synthetic oligonucleotide
uccaguuaacuguuaacau

SEQ ID NO: 2588040 - RNA, 19 nt, Artificial Sequence
  Description of Artificial Sequence: Synthetic oligonucleotide
uuucacugugcaucccagg

SEQ ID NO: 2588041 - RNA, 19 nt, Artificial Sequence
  Description of Artificial Sequence: Synthetic oligonucleotide
auuccugucuaauaacuuu

SEQ ID NO: 2588042 - RNA, 19 nt, Artificial Sequence
  Description of Artificial Sequence: Synthetic oligonucleotide
ucagugacugacucauggc

SEQ ID NO: 2588043 - RNA, 19 nt, Artificial Sequence
  Description of Artificial Sequence: Synthetic oligonucleotide
gcuuauugcacccucaguc

SEQ ID NO: 2588044 - RNA, 19 nt, Artificial Sequence
  Description of Artificial Sequence: Synthetic oligonucleotide
ugaacaaggcugggaaggg

SEQ ID NO: 2588045 - RNA, 19 nt, Artificial Sequence
  Description of Artificial Sequence: Synthetic oligonucleotide
guguuguaggacauuacag

SEQ ID NO: 2588046 - RNA, 19 nt, Artificial Sequence
  Description of Artificial Sequence: Synthetic oligonucleotide
cugacugcuuauugcaccc

SEQ ID NO: 2588047 - RNA, 19 nt, Artificial Sequence
  Description of Artificial Sequence: Synthetic oligonucleotide
cucauggcucccuaucagg

SEQ ID NO: 2588048 - RNA, 19 nt, Artificial Sequence
  Description of Artificial Sequence: Synthetic oligonucleotide
uuacgaaaugcuguucucu

SEQ ID NO: 2588049 - RNA, 19 nt, Artificial Sequence
  Description of Artificial Sequence: Synthetic oligonucleotide
uauugcacccucagucacc

SEQ ID NO: 2588050 - RNA, 19 nt, Artificial Sequence
  Description of Artificial Sequence: Synthetic oligonucleotide
aagaggugagcaauggcca

SEQ ID NO: 2588051 - RNA, 19 nt, Artificial Sequence
  Description of Artificial Sequence: Synthetic oligonucleotide
uugagaaguggguaggcua

SEQ ID NO: 2588052 - RNA, 19 nt, Artificial Sequence
  Description of Artificial Sequence: Synthetic oligonucleotide
uccauauguagcccaggcu

SEQ ID NO: 2588053 - RNA, 19 nt, Artificial Sequence
  Description of Artificial Sequence: Synthetic oligonucleotide
auaccaggaguccaguuaa

SEQ ID NO: 2588054 - RNA, 19 nt, Artificial Sequence
  Description of Artificial Sequence: Synthetic oligonucleotide
ucucugugaugaacaaggc

SEQ ID NO: 2588055 - RNA, 19 nt, Artificial Sequence
  Description of Artificial Sequence: Synthetic oligonucleotide
acuggaagcagcugaagua

SEQ ID NO: 2588056 - RNA, 19 nt, Artificial Sequence
  Description of Artificial Sequence: Synthetic oligonucleotide
aguauaaccuggagcagag

SEQ ID NO: 2588057 - RNA, 19 nt, Artificial Sequence
  Description of Artificial Sequence: Synthetic oligonucleotide
acugggaaagaggugagca

SEQ ID NO: 2588058 - RNA, 19 nt, Artificial Sequence
  Description of Artificial Sequence: Synthetic oligonucleotide
ugcccucaaacccaacucu

SEQ ID NO: 2588059 - RNA, 19 nt, Artificial Sequence
  Description of Artificial Sequence: Synthetic oligonucleotide
gccaacaucacgaaguagc

SEQ ID NO: 2588060 - RNA, 19 nt, Artificial Sequence
  Description of Artificial Sequence: Synthetic oligonucleotide
cuuauugcacccucaguca

SEQ ID NO: 2588061 - RNA, 19 nt, Artificial Sequence
  Description of Artificial Sequence: Synthetic oligonucleotide
cuccauauguagcccaggc

SEQ ID NO: 2588062 - RNA, 19 nt, Artificial Sequence
  Description of Artificial Sequence: Synthetic oligonucleotide
aucacgaaguagccaauga

SEQ ID NO: 2588063 - RNA, 19 nt, Artificial Sequence
  Description of Artificial Sequence: Synthetic oligonucleotide
agugacugacucauggcuc

SEQ ID NO: 2588064 - RNA, 19 nt, Artificial Sequence
  Description of Artificial Sequence: Synthetic oligonucleotide
uguuaacaugaccuggcuu

SEQ ID NO: 2588065 - RNA, 19 nt, Artificial Sequence
  Description of Artificial Sequence: Synthetic oligonucleotide
gugacugacucauggcucc

SEQ ID NO: 2588066 - RNA, 19 nt, Artificial Sequence
  Description of Artificial Sequence: Synthetic oligonucleotide
cauacgaaacuggaagcag

SEQ ID NO: 2588067 - RNA, 19 nt, Artificial Sequence
  Description of Artificial Sequence: Synthetic oligonucleotide
ggucauuaggaguuagcag

SEQ ID NO: 2588068 - RNA, 19 nt, Artificial Sequence
  Description of Artificial Sequence: Synthetic oligonucleotide
guuaacaugaccuggcuuu

SEQ ID NO: 2588069 - RNA, 19 nt, Artificial Sequence
  Description of Artificial Sequence: Synthetic oligonucleotide
aggucauuaggaguuagca

SEQ ID NO: 2588070 - RNA, 19 nt, Artificial Sequence
  Description of Artificial Sequence: Synthetic oligonucleotide
ccauauguagcccaggcug

SEQ ID NO: 2588071 - RNA, 19 nt, Artificial Sequence
  Description of Artificial Sequence: Synthetic oligonucleotide
auggcucccuaucagguca

SEQ ID NO: 2588072 - RNA, 19 nt, Artificial Sequence
  Description of Artificial Sequence: Synthetic oligonucleotide
acucauggcucccuaucag

SEQ ID NO: 2588073 - RNA, 19 nt, Artificial Sequence
  Description of Artificial Sequence: Synthetic oligonucleotide
acaugaccuggcuuugguc

SEQ ID NO: 2588074 - RNA, 19 nt, Artificial Sequence
  Description of Artificial Sequence: Synthetic oligonucleotide
uguguccccauuccugucu

SEQ ID NO: 2588075 - RNA, 19 nt, Artificial Sequence
  Description of Artificial Sequence: Synthetic oligonucleotide
guccaguuaacuguuaaca

SEQ ID NO: 2588076 - RNA, 19 nt, Artificial Sequence
  Description of Artificial Sequence: Synthetic oligonucleotide
guaagaaauaaggggcagc

SEQ ID NO: 2588077 - RNA, 19 nt, Artificial Sequence
  Description of Artificial Sequence: Synthetic oligonucleotide
cuaagcaccuacacauuuc

SEQ ID NO: 2588078 - RNA, 19 nt, Artificial Sequence
  Description of Artificial Sequence: Synthetic oligonucleotide
agcagcugaaguauaaccu

SEQ ID NO: 2588079 - RNA, 19 nt, Artificial Sequence
  Description of Artificial Sequence: Synthetic oligonucleotide
ugcaucccaggcuagccug

SEQ ID NO: 2588080 - RNA, 19 nt, Artificial Sequence
  Description of Artificial Sequence: Synthetic oligonucleotide
uaauaacuuuuaucuguaa

SEQ ID NO: 2588081 - RNA, 19 nt, Artificial Sequence
  Description of Artificial Sequence: Synthetic oligonucleotide
caguacuucagugacugac

SEQ ID NO: 2588082 - RNA, 19 nt, Artificial Sequence
  Description of Artificial Sequence: Synthetic oligonucleotide
uugugugugugugugugug

SEQ ID NO: 2588083 - RNA, 19 nt, Artificial Sequence
  Description of Artificial Sequence: Synthetic oligonucleotide
acgaaguagccaaugacca

SEQ ID NO: 2588084 - RNA, 19 nt, Artificial Sequence
  Description of Artificial Sequence: Synthetic oligonucleotide
cuaauaacuuuuaucugua

SEQ ID NO: 2588085 - RNA, 19 nt, Artificial Sequence
  Description of Artificial Sequence: Synthetic oligonucleotide
auguugagaaguggguagg

SEQ ID NO: 2588086 - RNA, 19 nt, Artificial Sequence
  Description of Artificial Sequence: Synthetic oligonucleotide
gaaguauaaccuggagcag

SEQ ID NO: 2588087 - RNA, 19 nt, Artificial Sequence
  Description of Artificial Sequence: Synthetic oligonucleotide
aaauaccaggaguccaguu

SEQ ID NO: 2588088 - RNA, 19 nt, Artificial Sequence
  Description of Artificial Sequence: Synthetic oligonucleotide
gagcaauggccaucauacg

SEQ ID NO: 2588089 - RNA, 19 nt, Artificial Sequence
  Description of Artificial Sequence: Synthetic oligonucleotide
ugacucauggcucccuauc

SEQ ID NO: 2588090 - RNA, 19 nt, Artificial Sequence
  Description of Artificial Sequence: Synthetic oligonucleotide
uuaacaugaccuggcuuug

SEQ ID NO: 2588091 - RNA, 19 nt, Artificial Sequence
  Description of Artificial Sequence: Synthetic oligonucleotide
uggagcagaggccccagcu

SEQ ID NO: 2588092 - RNA, 19 nt, Artificial Sequence
  Description of Artificial Sequence: Synthetic oligonucleotide
accgaggaaaauccaggug

SEQ ID NO: 2588093 - RNA, 19 nt, Artificial Sequence
  Description of Artificial Sequence: Synthetic oligonucleotide
uguguguguguguuucacu

SEQ ID NO: 2588094 - RNA, 19 nt, Artificial Sequence
  Description of Artificial Sequence: Synthetic oligonucleotide
ucauguugagaagugggua

SEQ ID NO: 2588095 - RNA, 19 nt, Artificial Sequence
  Description of Artificial Sequence: Synthetic oligonucleotide
uacuggggauuacagguau

SEQ ID NO: 2588096 - RNA, 19 nt, Artificial Sequence
  Description of Artificial Sequence: Synthetic oligonucleotide
ccaguguccucuaagcucc

SEQ ID NO: 2588097 - RNA, 19 nt, Artificial Sequence
  Description of Artificial Sequence: Synthetic oligonucleotide
uggccaucauacgaaacug

SEQ ID NO: 2588098 - RNA, 19 nt, Artificial Sequence
  Description of Artificial Sequence: Synthetic oligonucleotide
uguucucugugaugaacaa

SEQ ID NO: 2588099 - RNA, 19 nt, Artificial Sequence
  Description of Artificial Sequence: Synthetic oligonucleotide
gguguuguaggacauuaca

SEQ ID NO: 2588100 - RNA, 19 nt, Artificial Sequence
  Description of Artificial Sequence: Synthetic oligonucleotide
aacuccauauguagcccag

SEQ ID NO: 2588101 - RNA, 19 nt, Artificial Sequence
  Description of Artificial Sequence: Synthetic oligonucleotide
accccugcugaaucaguac

SEQ ID NO: 2588102 - RNA, 19 nt, Artificial Sequence
  Description of Artificial Sequence: Synthetic oligonucleotide
ggaacugggaaagagguga

SEQ ID NO: 2588103 - RNA, 19 nt, Artificial Sequence
  Description of Artificial Sequence: Synthetic oligonucleotide
aggaguuagcagcaaguaa

SEQ ID NO: 2588104 - RNA, 19 nt, Artificial Sequence
  Description of Artificial Sequence: Synthetic oligonucleotide
guauguguccccauuccug

SEQ ID NO: 2588105 - RNA, 19 nt, Artificial Sequence
  Description of Artificial Sequence: Synthetic oligonucleotide
agcccaagaccacaccgag

SEQ ID NO: 2588106 - RNA, 19 nt, Artificial Sequence
  Description of Artificial Sequence: Synthetic oligonucleotide
gcagcugaaguauaaccug

SEQ ID NO: 2588107 - RNA, 19 nt, Artificial Sequence
  Description of Artificial Sequence: Synthetic oligonucleotide
gguaguagcccacagccga

SEQ ID NO: 2588108 - RNA, 19 nt, Artificial Sequence
  Description of Artificial Sequence: Synthetic oligonucleotide
ugcuuauugcacccucagu

SEQ ID NO: 2588109 - RNA, 19 nt, Artificial Sequence
  Description of Artificial Sequence: Synthetic oligonucleotide
ccuaucaggucauuaggag

SEQ ID NO: 2588110 - RNA, 19 nt, Artificial Sequence
  Description of Artificial Sequence: Synthetic oligonucleotide
aguuaacuguuaacaugac

SEQ ID NO: 2588111 - RNA, 19 nt, Artificial Sequence
  Description of Artificial Sequence: Synthetic oligonucleotide
caggucauuaggaguuagc

SEQ ID NO: 2588112 - RNA, 19 nt, Artificial Sequence
  Description of Artificial Sequence: Synthetic oligonucleotide
gacucauggcucccuauca

SEQ ID NO: 2588113 - RNA, 19 nt, Artificial Sequence
  Description of Artificial Sequence: Synthetic oligonucleotide
ucaccucccucccaacaca

SEQ ID NO: 2588114 - RNA, 19 nt, Artificial Sequence
  Description of Artificial Sequence: Synthetic oligonucleotide
gacaauuugcuggcuucag

SEQ ID NO: 2588115 - RNA, 19 nt, Artificial Sequence
  Description of Artificial Sequence: Synthetic oligonucleotide
caccuacacauuucuggcc

SEQ ID NO: 2588116 - RNA, 19 nt, Artificial Sequence
  Description of Artificial Sequence: Synthetic oligonucleotide
guuacgaaaugcuguucuc

SEQ ID NO: 2588117 - RNA, 19 nt, Artificial Sequence
  Description of Artificial Sequence: Synthetic oligonucleotide
acgaaaugcuguucucugu

SEQ ID NO: 2588118 - RNA, 19 nt, Artificial Sequence
  Description of Artificial Sequence: Synthetic oligonucleotide
caauuugcuggcuucagcu

SEQ ID NO: 2588119 - RNA, 19 nt, Artificial Sequence
  Description of Artificial Sequence: Synthetic oligonucleotide
guacuucagugacugacuc

SEQ ID NO: 2588120 - RNA, 19 nt, Artificial Sequence
  Description of Artificial Sequence: Synthetic oligonucleotide
aaucaguacuucagugacu

SEQ ID NO: 2588121 - RNA, 19 nt, Artificial Sequence
  Description of Artificial Sequence: Synthetic oligonucleotide
aguacuucagugacugacu

SEQ ID NO: 2588122 - RNA, 19 nt, Artificial Sequence
  Description of Artificial Sequence: Synthetic oligonucleotide
aagaccacaccgaggaaaa

SEQ ID NO: 2588123 - RNA, 19 nt, Artificial Sequence
  Description of Artificial Sequence: Synthetic oligonucleotide
cuggcuucagcucaaagcu

SEQ ID NO: 2588124 - RNA, 19 nt, Artificial Sequence
  Description of Artificial Sequence: Synthetic oligonucleotide
aggacauuacagccaacau

SEQ ID NO: 2588125 - RNA, 19 nt, Artificial Sequence
  Description of Artificial Sequence: Synthetic oligonucleotide
agcccuaagcaccuacaca

SEQ ID NO: 2588126 - RNA, 19 nt, Artificial Sequence
  Description of Artificial Sequence: Synthetic oligonucleotide
gaccacaccgaggaaaauc

SEQ ID NO: 2588127 - RNA, 19 nt, Artificial Sequence
  Description of Artificial Sequence: Synthetic oligonucleotide
guaggcuagguaguagccc

SEQ ID NO: 2588128 - RNA, 19 nt, Artificial Sequence
  Description of Artificial Sequence: Synthetic oligonucleotide
uagcccacagccgagccca

SEQ ID NO: 2588129 - RNA, 19 nt, Artificial Sequence
  Description of Artificial Sequence: Synthetic oligonucleotide
uuugcuggcuucagcucaa

SEQ ID NO: 2588130 - RNA, 19 nt, Artificial Sequence
  Description of Artificial Sequence: Synthetic oligonucleotide
gcaccuacacauuucuggc

SEQ ID NO: 2588131 - RNA, 19 nt, Artificial Sequence
  Description of Artificial Sequence: Synthetic oligonucleotide
uguguguguguguguuuca

SEQ ID NO: 2588132 - RNA, 19 nt, Artificial Sequence
  Description of Artificial Sequence: Synthetic oligonucleotide
ggucugacugcuuauugca

SEQ ID NO: 2588133 - RNA, 19 nt, Artificial Sequence
  Description of Artificial Sequence: Synthetic oligonucleotide
caugaccuggcuuuggucu

SEQ ID NO: 2588134 - RNA, 19 nt, Artificial Sequence
  Description of Artificial Sequence: Synthetic oligonucleotide
ucccaacacaccccugcug

SEQ ID NO: 2588135 - RNA, 19 nt, Artificial Sequence
  Description of Artificial Sequence: Synthetic oligonucleotide
uguguguuucacugugcau

SEQ ID NO: 2588136 - RNA, 19 nt, Artificial Sequence
  Description of Artificial Sequence: Synthetic oligonucleotide
augaccuggcuuuggucug

SEQ ID NO: 2588137 - RNA, 19 nt, Artificial Sequence
  Description of Artificial Sequence: Synthetic oligonucleotide
ccaacaucacgaaguagcc

SEQ ID NO: 2588138 - RNA, 19 nt, Artificial Sequence
  Description of Artificial Sequence: Synthetic oligonucleotide
uccagcccuaagcaccuac

SEQ ID NO: 2588139 - RNA, 19 nt, Artificial Sequence
  Description of Artificial Sequence: Synthetic oligonucleotide
uaggaguuagcagcaagua

SEQ ID NO: 2588140 - RNA, 19 nt, Artificial Sequence
  Description of Artificial Sequence: Synthetic oligonucleotide
gaguccaguuaacuguuaa

SEQ ID NO: 2588141 - RNA, 19 nt, Artificial Sequence
  Description of Artificial Sequence: Synthetic oligonucleotide
gcucaaagcugccaggaac

SEQ ID NO: 2588142 - RNA, 19 nt, Artificial Sequence
  Description of Artificial Sequence: Synthetic oligonucleotide
cucuguuacgaaaugcugu

SEQ ID NO: 2588143 - RNA, 19 nt, Artificial Sequence
  Description of Artificial Sequence: Synthetic oligonucleotide
uuacagccaacaucacgaa

SEQ ID NO: 2588144 - RNA, 19 nt, Artificial Sequence
  Description of Artificial Sequence: Synthetic oligonucleotide
ugugugugugugugugugu

SEQ ID NO: 2588145 - RNA, 19 nt, Artificial Sequence
  Description of Artificial Sequence: Synthetic oligonucleotide
cugccaggaacugggaaag

SEQ ID NO: 2588146 - RNA, 19 nt, Artificial Sequence
  Description of Artificial Sequence: Synthetic oligonucleotide
gaggaaaauccagguguug

SEQ ID NO: 2588147 - RNA, 19 nt, Artificial Sequence
  Description of Artificial Sequence: Synthetic oligonucleotide
gaaacuggaagcagcugaa

SEQ ID NO: 2588148 - RNA, 19 nt, Artificial Sequence
  Description of Artificial Sequence: Synthetic oligonucleotide
gagaaguggguaggcuagg

SEQ ID NO: 2588149 - RNA, 19 nt, Artificial Sequence
  Description of Artificial Sequence: Synthetic oligonucleotide
agucaccucccucccaaca

SEQ ID NO: 2588150 - RNA, 19 nt, Artificial Sequence
  Description of Artificial Sequence: Synthetic oligonucleotide
cacagccgagcccaagacc

SEQ ID NO: 2588151 - RNA, 19 nt, Artificial Sequence
  Description of Artificial Sequence: Synthetic oligonucleotide
cagguauguguccccauuc

SEQ ID NO: 2588152 - RNA, 19 nt, Artificial Sequence
  Description of Artificial Sequence: Synthetic oligonucleotide
ggcccacuaagucauguug

SEQ ID NO: 2588153 - RNA, 19 nt, Artificial Sequence
  Description of Artificial Sequence: Synthetic oligonucleotide
cuaucaggucauuaggagu

SEQ ID NO: 2588154 - RNA, 19 nt, Artificial Sequence
  Description of Artificial Sequence: Synthetic oligonucleotide
gucaccucccucccaacac

SEQ ID NO: 2588155 - RNA, 19 nt, Artificial Sequence
  Description of Artificial Sequence: Synthetic oligonucleotide
gugugugugugugugugug

SEQ ID NO: 2588156 - RNA, 19 nt, Artificial Sequence
  Description of Artificial Sequence: Synthetic oligonucleotide
cagcucuguuacgaaaugc

SEQ ID NO: 2588157 - RNA, 19 nt, Artificial Sequence
  Description of Artificial Sequence: Synthetic oligonucleotide
cuaagucauguugagaagu

SEQ ID NO: 2588158 - RNA, 19 nt, Artificial Sequence
  Description of Artificial Sequence: Synthetic oligonucleotide
agguguuguaggacauuac

SEQ ID NO: 2588159 - RNA, 19 nt, Artificial Sequence
  Description of Artificial Sequence: Synthetic oligonucleotide
ucccucccaacacaccccu

SEQ ID NO: 2588160 - RNA, 19 nt, Artificial Sequence
  Description of Artificial Sequence: Synthetic oligonucleotide
cugcccucaaacccaacuc

SEQ ID NO: 2588161 - RNA, 19 nt, Artificial Sequence
  Description of Artificial Sequence: Synthetic oligonucleotide
auguguccccauuccuguc

SEQ ID NO: 2588162 - RNA, 19 nt, Artificial Sequence
  Description of Artificial Sequence: Synthetic oligonucleotide
gucuccuggguacugggga

SEQ ID NO: 2588163 - RNA, 19 nt, Artificial Sequence
  Description of Artificial Sequence: Synthetic oligonucleotide
uggguaggcuagguaguag

SEQ ID NO: 2588164 - RNA, 19 nt, Artificial Sequence
  Description of Artificial Sequence: Synthetic oligonucleotide
uuuggucugacugcuuauu

SEQ ID NO: 2588165 - RNA, 19 nt, Artificial Sequence
  Description of Artificial Sequence: Synthetic oligonucleotide
acuccauauguagcccagg

SEQ ID NO: 2588166 - RNA, 19 nt, Artificial Sequence
  Description of Artificial Sequence: Synthetic oligonucleotide
ggggauuacagguaugugu

SEQ ID NO: 2588167 - RNA, 19 nt, Artificial Sequence
  Description of Artificial Sequence: Synthetic oligonucleotide
caucacgaaguagccaaug

SEQ ID NO: 2588168 - RNA, 19 nt, Artificial Sequence
  Description of Artificial Sequence: Synthetic oligonucleotide
agaggugagcaauggccau

SEQ ID NO: 2588169 - RNA, 19 nt, Artificial Sequence
  Description of Artificial Sequence: Synthetic oligonucleotide
cccucagucaccucccucc

SEQ ID NO: 2588170 - RNA, 19 nt, Artificial Sequence
  Description of Artificial Sequence: Synthetic oligonucleotide
ccagggacaauuugcuggc

SEQ ID NO: 2588171 - RNA, 19 nt, Artificial Sequence
  Description of Artificial Sequence: Synthetic oligonucleotide
ucuccuggguacuggggau

SEQ ID NO: 2588172 - RNA, 19 nt, Artificial Sequence
  Description of Artificial Sequence: Synthetic oligonucleotide
cauggcucccuaucagguc

SEQ ID NO: 2588173 - RNA, 19 nt, Artificial Sequence
  Description of Artificial Sequence: Synthetic oligonucleotide
cucccucccaacacacccc

SEQ ID NO: 2588174 - RNA, 19 nt, Artificial Sequence
  Description of Artificial Sequence: Synthetic oligonucleotide
uccccauuccugucuaaua

SEQ ID NO: 2588175 - RNA, 19 nt, Artificial Sequence
  Description of Artificial Sequence: Synthetic oligonucleotide
ccaggaguccaguuaacug

SEQ ID NO: 2588176 - RNA, 19 nt, Artificial Sequence
  Description of Artificial Sequence: Synthetic oligonucleotide
guauaaccuggagcagagg

SEQ ID NO: 2588177 - RNA, 19 nt, Artificial Sequence
  Description of Artificial Sequence: Synthetic oligonucleotide
ucaguacuucagugacuga

SEQ ID NO: 2588178 - RNA, 19 nt, Artificial Sequence
  Description of Artificial Sequence: Synthetic oligonucleotide
cuagccuggaacuccauau

SEQ ID NO: 2588179 - RNA, 19 nt, Artificial Sequence
  Description of Artificial Sequence: Synthetic oligonucleotide
agggacaauuugcuggcuu

SEQ ID NO: 2588180 - RNA, 19 nt, Artificial Sequence
  Description of Artificial Sequence: Synthetic oligonucleotide
guguguguguguguguuuc

SEQ ID NO: 2588181 - RNA, 19 nt, Artificial Sequence
  Description of Artificial Sequence: Synthetic oligonucleotide
aggugagcaauggccauca

SEQ ID NO: 2588182 - RNA, 19 nt, Artificial Sequence
  Description of Artificial Sequence: Synthetic oligonucleotide
cagcccuaagcaccuacac

SEQ ID NO: 2588183 - RNA, 19 nt, Artificial Sequence
  Description of Artificial Sequence: Synthetic oligonucleotide
aagcaccuacacauuucug

SEQ ID NO: 2588184 - RNA, 19 nt, Artificial Sequence
  Description of Artificial Sequence: Synthetic oligonucleotide
acccucagucaccucccuc

SEQ ID NO: 2588185 - RNA, 19 nt, Artificial Sequence
  Description of Artificial Sequence: Synthetic oligonucleotide
gggacaauuugcuggcuuc

SEQ ID NO: 2588186 - RNA, 19 nt, Artificial Sequence
  Description of Artificial Sequence: Synthetic oligonucleotide
caagaccacaccgaggaaa

SEQ ID NO: 2588187 - RNA, 19 nt, Artificial Sequence
  Description of Artificial Sequence: Synthetic oligonucleotide
cccaagaccacaccgagga

SEQ ID NO: 2588188 - RNA, 19 nt, Artificial Sequence
  Description of Artificial Sequence: Synthetic oligonucleotide
aguggguaggcuagguagu

SEQ ID NO: 2588189 - RNA, 19 nt, Artificial Sequence
  Description of Artificial Sequence: Synthetic oligonucleotide
ggcucagucuccuggguac

SEQ ID NO: 2588190 - RNA, 19 nt, Artificial Sequence
  Description of Artificial Sequence: Synthetic oligonucleotide
ggccaucauacgaaacugg

SEQ ID NO: 2588191 - RNA, 19 nt, Artificial Sequence
  Description of Artificial Sequence: Synthetic oligonucleotide
gugagcaauggccaucaua

SEQ ID NO: 2588192 - RNA, 19 nt, Artificial Sequence
  Description of Artificial Sequence: Synthetic oligonucleotide
acacaccccugcugaauca

SEQ ID NO: 2588193 - RNA, 19 nt, Artificial Sequence
  Description of Artificial Sequence: Synthetic oligonucleotide
gguaggcuagguaguagcc

SEQ ID NO: 2588194 - RNA, 19 nt, Artificial Sequence
  Description of Artificial Sequence: Synthetic oligonucleotide
agaaguggguaggcuaggu

SEQ ID NO: 2588195 - RNA, 19 nt, Artificial Sequence
  Description of Artificial Sequence: Synthetic oligonucleotide
gugaugaacaaggcuggga

SEQ ID NO: 2588196 - RNA, 19 nt, Artificial Sequence
  Description of Artificial Sequence: Synthetic oligonucleotide
guaguagcccacagccgag

SEQ ID NO: 2588197 - RNA, 19 nt, Artificial Sequence
  Description of Artificial Sequence: Synthetic oligonucleotide
cccacuaagucauguugag

SEQ ID NO: 2588198 - RNA, 19 nt, Artificial Sequence
  Description of Artificial Sequence: Synthetic oligonucleotide
uaccaggaguccaguuaac

SEQ ID NO: 2588199 - RNA, 19 nt, Artificial Sequence
  Description of Artificial Sequence: Synthetic oligonucleotide
uaguagcccacagccgagc

SEQ ID NO: 2588200 - RNA, 19 nt, Artificial Sequence
  Description of Artificial Sequence: Synthetic oligonucleotide
cugcugaaucaguacuuca

SEQ ID NO: 2588201 - RNA, 19 nt, Artificial Sequence
  Description of Artificial Sequence: Synthetic oligonucleotide
ggagguagcuccagugucc

SEQ ID NO: 2588202 - RNA, 19 nt, Artificial Sequence
  Description of Artificial Sequence: Synthetic oligonucleotide
uguguguguguguguguuu

SEQ ID NO: 2588203 - RNA, 19 nt, Artificial Sequence
  Description of Artificial Sequence: Synthetic oligonucleotide
agccagcucuguuacgaaa

SEQ ID NO: 2588204 - RNA, 19 nt, Artificial Sequence
  Description of Artificial Sequence: Synthetic oligonucleotide
uacacauuucuggcccacu

SEQ ID NO: 2588205 - RNA, 19 nt, Artificial Sequence
  Description of Artificial Sequence: Synthetic oligonucleotide
ggacucaaauaccaggagu

SEQ ID NO: 2588206 - RNA, 19 nt, Artificial Sequence
  Description of Artificial Sequence: Synthetic oligonucleotide
uacagguauguguccccau

SEQ ID NO: 2588207 - RNA, 19 nt, Artificial Sequence
  Description of Artificial Sequence: Synthetic oligonucleotide
agcucaaagcugccaggaa

SEQ ID NO: 2588208 - RNA, 19 nt, Artificial Sequence
  Description of Artificial Sequence: Synthetic oligonucleotide
agccaacaucacgaaguag

SEQ ID NO: 2588209 - RNA, 19 nt, Artificial Sequence
  Description of Artificial Sequence: Synthetic oligonucleotide
guguguguguguguuucac

SEQ ID NO: 2588210 - RNA, 19 nt, Artificial Sequence
  Description of Artificial Sequence: Synthetic oligonucleotide
cgaaaugcuguucucugug

SEQ ID NO: 2588211 - RNA, 19 nt, Artificial Sequence
  Description of Artificial Sequence: Synthetic oligonucleotide
ggaaaauccagguguugua

SEQ ID NO: 2588212 - RNA, 19 nt, Artificial Sequence
  Description of Artificial Sequence: Synthetic oligonucleotide
cccucaaacccaacucucc

SEQ ID NO: 2588213 - RNA, 19 nt, Artificial Sequence
  Description of Artificial Sequence: Synthetic oligonucleotide
acugacucauggcucccua

SEQ ID NO: 2588214 - RNA, 19 nt, Artificial Sequence
  Description of Artificial Sequence: Synthetic oligonucleotide
acgaaacuggaagcagcug

SEQ ID NO: 2588215 - RNA, 19 nt, Artificial Sequence
  Description of Artificial Sequence: Synthetic oligonucleotide
gagcccaagaccacaccga

SEQ ID NO: 2588216 - RNA, 19 nt, Artificial Sequence
  Description of Artificial Sequence: Synthetic oligonucleotide
cuacacauuucuggcccac

SEQ ID NO: 2588217 - RNA, 19 nt, Artificial Sequence
  Description of Artificial Sequence: Synthetic oligonucleotide
cacugugcaucccaggcua

SEQ ID NO: 2588218 - RNA, 19 nt, Artificial Sequence
  Description of Artificial Sequence: Synthetic oligonucleotide
gaggugagcaauggccauc

SEQ ID NO: 2588219 - RNA, 19 nt, Artificial Sequence
  Description of Artificial Sequence: Synthetic oligonucleotide
cucugugaugaacaaggcu

SEQ ID NO: 2588220 - RNA, 19 nt, Artificial Sequence
  Description of Artificial Sequence: Synthetic oligonucleotide
ugacugacucauggcuccc

SEQ ID NO: 2588221 - RNA, 19 nt, Artificial Sequence
  Description of Artificial Sequence: Synthetic oligonucleotide
gggagguagcuccaguguc

SEQ ID NO: 2588222 - RNA, 19 nt, Artificial Sequence
  Description of Artificial Sequence: Synthetic oligonucleotide
gucugacugcuuauugcac

SEQ ID NO: 2588223 - RNA, 19 nt, Artificial Sequence
  Description of Artificial Sequence: Synthetic oligonucleotide
gcucuguuacgaaaugcug

SEQ ID NO: 2588224 - RNA, 19 nt, Artificial Sequence
  Description of Artificial Sequence: Synthetic oligonucleotide
cgagcccaagaccacaccg

SEQ ID NO: 2588225 - RNA, 19 nt, Artificial Sequence
  Description of Artificial Sequence: Synthetic oligonucleotide
gcccuaagcaccuacacau

SEQ ID NO: 2588226 - RNA, 19 nt, Artificial Sequence
  Description of Artificial Sequence: Synthetic oligonucleotide
cccauuccugucuaauaac

SEQ ID NO: 2588227 - RNA, 19 nt, Artificial Sequence
  Description of Artificial Sequence: Synthetic oligonucleotide
guccucuaagcuccaggga

SEQ ID NO: 2588228 - RNA, 19 nt, Artificial Sequence
  Description of Artificial Sequence: Synthetic oligonucleotide
cauuucuggcccacuaagu

SEQ ID NO: 2588229 - RNA, 19 nt, Artificial Sequence
  Description of Artificial Sequence: Synthetic oligonucleotide
cacauuucuggcccacuaa

SEQ ID NO: 2588230 - RNA, 19 nt, Artificial Sequence
  Description of Artificial Sequence: Synthetic oligonucleotide
cuguuacgaaaugcuguuc

SEQ ID NO: 2588231 - RNA, 19 nt, Artificial Sequence
  Description of Artificial Sequence: Synthetic oligonucleotide
ugacugcuuauugcacccu

SEQ ID NO: 2588232 - RNA, 19 nt, Artificial Sequence
  Description of Artificial Sequence: Synthetic oligonucleotide
ugaccuggcuuuggucuga

SEQ ID NO: 2588233 - RNA, 19 nt, Artificial Sequence
  Description of Artificial Sequence: Synthetic oligonucleotide
ccgaggaaaauccaggugu

SEQ ID NO: 2588234 - RNA, 19 nt, Artificial Sequence
  Description of Artificial Sequence: Synthetic oligonucleotide
gccaucauacgaaacugga

SEQ ID NO: 2588235 - RNA, 19 nt, Artificial Sequence
  Description of Artificial Sequence: Synthetic oligonucleotide
ugcuguucucugugaugaa

SEQ ID NO: 2588236 - RNA, 19 nt, Artificial Sequence
  Description of Artificial Sequence: Synthetic oligonucleotide
aggcucagucuccugggua

SEQ ID NO: 2588237 - RNA, 19 nt, Artificial Sequence
  Description of Artificial Sequence: Synthetic oligonucleotide
caacaucacgaaguagcca

SEQ ID NO: 2588238 - RNA, 19 nt, Artificial Sequence
  Description of Artificial Sequence: Synthetic oligonucleotide
gaagggagguagcuccagu

SEQ ID NO: 2588239 - RNA, 19 nt, Artificial Sequence
  Description of Artificial Sequence: Synthetic oligonucleotide
uggcccacuaagucauguu

SEQ ID NO: 2588240 - RNA, 19 nt, Artificial Sequence
  Description of Artificial Sequence: Synthetic oligonucleotide
cccuaucaggucauuagga

SEQ ID NO: 2588241 - RNA, 19 nt, Artificial Sequence
  Description of Artificial Sequence: Synthetic oligonucleotide
cuggguacuggggauuaca

SEQ ID NO: 2588242 - RNA, 19 nt, Artificial Sequence
  Description of Artificial Sequence: Synthetic oligonucleotide
cagcucaaagcugccagga

SEQ ID NO: 2588243 - RNA, 19 nt, Artificial Sequence
  Description of Artificial Sequence: Synthetic oligonucleotide
guugagaaguggguaggcu

SEQ ID NO: 2588244 - RNA, 19 nt, Artificial Sequence
  Description of Artificial Sequence: Synthetic oligonucleotide
acugugcaucccaggcuag

SEQ ID NO: 2588245 - RNA, 19 nt, Artificial Sequence
  Description of Artificial Sequence: Synthetic oligonucleotide
gcuuuggucugacugcuua

SEQ ID NO: 2588246 - RNA, 19 nt, Artificial Sequence
  Description of Artificial Sequence: Synthetic oligonucleotide
cauuccugucuaauaacuu

SEQ ID NO: 2588247 - RNA, 19 nt, Artificial Sequence
  Description of Artificial Sequence: Synthetic oligonucleotide
gguauguguccccauuccu

SEQ ID NO: 2588248 - RNA, 19 nt, Artificial Sequence
  Description of Artificial Sequence: Synthetic oligonucleotide
cucagucuccuggguacug

SEQ ID NO: 2588249 - RNA, 19 nt, Artificial Sequence
  Description of Artificial Sequence: Synthetic oligonucleotide
cuggagcagaggccccagc

SEQ ID NO: 2588250 - RNA, 19 nt, Artificial Sequence
  Description of Artificial Sequence: Synthetic oligonucleotide
caccgaggaaaauccaggu

SEQ ID NO: 2588251 - RNA, 19 nt, Artificial Sequence
  Description of Artificial Sequence: Synthetic oligonucleotide
cuguuaacaugaccuggcu

SEQ ID NO: 2588252 - RNA, 19 nt, Artificial Sequence
  Description of Artificial Sequence: Synthetic oligonucleotide
uggcucccuaucaggucau

SEQ ID NO: 2588253 - RNA, 19 nt, Artificial Sequence
  Description of Artificial Sequence: Synthetic oligonucleotide
ggacaauuugcuggcuuca

SEQ ID NO: 2588254 - RNA, 19 nt, Artificial Sequence
  Description of Artificial Sequence: Synthetic oligonucleotide
guguuucacugugcauccc

SEQ ID NO: 2588255 - RNA, 19 nt, Artificial Sequence
  Description of Artificial Sequence: Synthetic oligonucleotide
gcccacuaagucauguuga

SEQ ID NO: 2588256 - RNA, 19 nt, Artificial Sequence
  Description of Artificial Sequence: Synthetic oligonucleotide
cagccaacaucacgaagua

SEQ ID NO: 2588257 - RNA, 19 nt, Artificial Sequence
  Description of Artificial Sequence: Synthetic oligonucleotide
ccugcugaaucaguacuuc

SEQ ID NO: 2588258 - RNA, 19 nt, Artificial Sequence
  Description of Artificial Sequence: Synthetic oligonucleotide
ccaucauacgaaacuggaa

SEQ ID NO: 2588259 - RNA, 19 nt, Artificial Sequence
  Description of Artificial Sequence: Synthetic oligonucleotide
cgaaguagccaaugaccac

SEQ ID NO: 2588260 - RNA, 19 nt, Artificial Sequence
  Description of Artificial Sequence: Synthetic oligonucleotide
guacuggggauuacaggua

SEQ ID NO: 2588261 - RNA, 19 nt, Artificial Sequence
  Description of Artificial Sequence: Synthetic oligonucleotide
cucuaagcuccagggacaa

SEQ ID NO: 2588262 - RNA, 19 nt, Artificial Sequence
  Description of Artificial Sequence: Synthetic oligonucleotide
acaucacgaaguagccaau

SEQ ID NO: 2588263 - RNA, 19 nt, Artificial Sequence
  Description of Artificial Sequence: Synthetic oligonucleotide
ccucuaagcuccagggaca

SEQ ID NO: 2588264 - RNA, 19 nt, Artificial Sequence
  Description of Artificial Sequence: Synthetic oligonucleotide
ucuaagcuccagggacaau

SEQ ID NO: 2588265 - RNA, 19 nt, Artificial Sequence
  Description of Artificial Sequence: Synthetic oligonucleotide
cagccgagcccaagaccac

SEQ ID NO: 2588266 - RNA, 19 nt, Artificial Sequence
  Description of Artificial Sequence: Synthetic oligonucleotide
ccccauuccugucuaauaa

SEQ ID NO: 2588267 - RNA, 19 nt, Artificial Sequence
  Description of Artificial Sequence: Synthetic oligonucleotide
acccaacucuccaggcuca

SEQ ID NO: 2588268 - RNA, 19 nt, Artificial Sequence
  Description of Artificial Sequence: Synthetic oligonucleotide
cuuuggucugacugcuuau

SEQ ID NO: 2588269 - RNA, 19 nt, Artificial Sequence
  Description of Artificial Sequence: Synthetic oligonucleotide
gcugcccucaaacccaacu

SEQ ID NO: 2588270 - RNA, 19 nt, Artificial Sequence
  Description of Artificial Sequence: Synthetic oligonucleotide
gcaucccaggcuagccugg

SEQ ID NO: 2588271 - RNA, 19 nt, Artificial Sequence
  Description of Artificial Sequence: Synthetic oligonucleotide
cauuaggaguuagcagcaa

SEQ ID NO: 2588272 - RNA, 19 nt, Artificial Sequence
  Description of Artificial Sequence: Synthetic oligonucleotide
guaggacauuacagccaac

SEQ ID NO: 2588273 - RNA, 19 nt, Artificial Sequence
  Description of Artificial Sequence: Synthetic oligonucleotide
gugcaucccaggcuagccu

SEQ ID NO: 2588274 - RNA, 19 nt, Artificial Sequence
  Description of Artificial Sequence: Synthetic oligonucleotide
aucccaggcuagccuggaa

SEQ ID NO: 2588275 - RNA, 19 nt, Artificial Sequence
  Description of Artificial Sequence: Synthetic oligonucleotide
accuggcuuuggucugacu

SEQ ID NO: 2588276 - RNA, 19 nt, Artificial Sequence
  Description of Artificial Sequence: Synthetic oligonucleotide
gcccaagaccacaccgagg

SEQ ID NO: 2588277 - RNA, 19 nt, Artificial Sequence
  Description of Artificial Sequence: Synthetic oligonucleotide
acaccccugcugaaucagu

SEQ ID NO: 2588278 - RNA, 19 nt, Artificial Sequence
  Description of Artificial Sequence: Synthetic oligonucleotide
caaauaccaggaguccagu

SEQ ID NO: 2588279 - RNA, 19 nt, Artificial Sequence
  Description of Artificial Sequence: Synthetic oligonucleotide
gcuucagcucaaagcugcc

SEQ ID NO: 2588280 - RNA, 19 nt, Artificial Sequence
  Description of Artificial Sequence: Synthetic oligonucleotide
ccacagccgagcccaagac

SEQ ID NO: 2588281 - RNA, 19 nt, Artificial Sequence
  Description of Artificial Sequence: Synthetic oligonucleotide
gaccuggcuuuggucugac

SEQ ID NO: 2588282 - RNA, 19 nt, Artificial Sequence
  Description of Artificial Sequence: Synthetic oligonucleotide
guguccccauuccugucua

SEQ ID NO: 2588283 - RNA, 19 nt, Artificial Sequence
  Description of Artificial Sequence: Synthetic oligonucleotide
gcuagccuggaacuccaua

SEQ ID NO: 2588284 - RNA, 19 nt, Artificial Sequence
  Description of Artificial Sequence: Synthetic oligonucleotide
agaccacaccgaggaaaau

SEQ ID NO: 2588285 - RNA, 19 nt, Artificial Sequence
  Description of Artificial Sequence: Synthetic oligonucleotide
gcccucaaacccaacucuc

SEQ ID NO: 2588286 - RNA, 19 nt, Artificial Sequence
  Description of Artificial Sequence: Synthetic oligonucleotide
guguguguguguguguguu

SEQ ID NO: 2588287 - RNA, 19 nt, Artificial Sequence
  Description of Artificial Sequence: Synthetic oligonucleotide
ccuacacauuucuggccca

SEQ ID NO: 2588288 - RNA, 19 nt, Artificial Sequence
  Description of Artificial Sequence: Synthetic oligonucleotide
gacugacucauggcucccu

SEQ ID NO: 2588289 - RNA, 19 nt, Artificial Sequence
  Description of Artificial Sequence: Synthetic oligonucleotide
ccagcccuaagcaccuaca

SEQ ID NO: 2588290 - RNA, 19 nt, Artificial Sequence
  Description of Artificial Sequence: Synthetic oligonucleotide
uugcuggcuucagcucaaa

SEQ ID NO: 2588291 - RNA, 19 nt, Artificial Sequence
  Description of Artificial Sequence: Synthetic oligonucleotide
cucccaacacaccccugcu

SEQ ID NO: 2588292 - RNA, 19 nt, Artificial Sequence
  Description of Artificial Sequence: Synthetic oligonucleotide
cugacucauggcucccuau

SEQ ID NO: 2588293 - RNA, 19 nt, Artificial Sequence
  Description of Artificial Sequence: Synthetic oligonucleotide
ccgagcccaagaccacacc

SEQ ID NO: 2588294 - RNA, 19 nt, Artificial Sequence
  Description of Artificial Sequence: Synthetic oligonucleotide
cccacagccgagcccaaga

SEQ ID NO: 2588295 - RNA, 19 nt, Artificial Sequence
  Description of Artificial Sequence: Synthetic oligonucleotide
ccacuaagucauguugaga

SEQ ID NO: 2588296 - RNA, 19 nt, Artificial Sequence
  Description of Artificial Sequence: Synthetic oligonucleotide
caucccaggcuagccugga

SEQ ID NO: 2588297 - RNA, 19 nt, Artificial Sequence
  Description of Artificial Sequence: Synthetic oligonucleotide
ccuaagcaccuacacauuu

SEQ ID NO: 2588298 - RNA, 19 nt, Artificial Sequence
  Description of Artificial Sequence: Synthetic oligonucleotide
caguguccucuaagcucca

SEQ ID NO: 2588299 - RNA, 19 nt, Artificial Sequence
  Description of Artificial Sequence: Synthetic oligonucleotide
cuggcccacuaagucaugu

SEQ ID NO: 2588300 - RNA, 19 nt, Artificial Sequence
  Description of Artificial Sequence: Synthetic oligonucleotide
gccgagcccaagaccacac

SEQ ID NO: 2588301 - RNA, 19 nt, Artificial Sequence
  Description of Artificial Sequence: Synthetic oligonucleotide
ccugucuaauaacuuuuau

SEQ ID NO: 2588302 - RNA, 19 nt, Artificial Sequence
  Description of Artificial Sequence: Synthetic oligonucleotide
ccacaccgaggaaaaucca

SEQ ID NO: 2588303 - RNA, 19 nt, Artificial Sequence
  Description of Artificial Sequence: Synthetic oligonucleotide
gccagcucuguuacgaaau

SEQ ID NO: 2588304 - RNA, 19 nt, Artificial Sequence
  Description of Artificial Sequence: Synthetic oligonucleotide
gcucccuaucaggucauua

SEQ ID NO: 2588305 - RNA, 19 nt, Artificial Sequence
  Description of Artificial Sequence: Synthetic oligonucleotide
ccccugcugaaucaguacu

SEQ ID NO: 2588306 - RNA, 19 nt, Artificial Sequence
  Description of Artificial Sequence: Synthetic oligonucleotide
ggaguccaguuaacuguua

SEQ ID NO: 2588307 - RNA, 19 nt, Artificial Sequence
  Description of Artificial Sequence: Synthetic oligonucleotide
cccucccaacacaccccug

SEQ ID NO: 2588308 - RNA, 19 nt, Artificial Sequence
  Description of Artificial Sequence: Synthetic oligonucleotide
cccugcugaaucaguacuu

SEQ ID NO: 2588309 - RNA, 19 nt, Artificial Sequence
  Description of Artificial Sequence: Synthetic oligonucleotide
ccaagaccacaccgaggaa

SEQ ID NO: 2588310 - RNA, 19 nt, Artificial Sequence
  Description of Artificial Sequence: Synthetic oligonucleotide
cgaggaaaauccagguguu

SEQ ID NO: 2588311 - RNA, 19 nt, Artificial Sequence
  Description of Artificial Sequence: Synthetic oligonucleotide
cagcucucuccagcccuaa

SEQ ID NO: 2588312 - RNA, 19 nt, Artificial Sequence
  Description of Artificial Sequence: Synthetic oligonucleotide
cacccucagucaccucccu

SEQ ID NO: 2588313 - RNA, 19 nt, Artificial Sequence
  Description of Artificial Sequence: Synthetic oligonucleotide
cuccuggguacuggggauu

SEQ ID NO: 2588314 - RNA, 19 nt, Artificial Sequence
  Description of Artificial Sequence: Synthetic oligonucleotide
gcagaggccccagcucucu

SEQ ID NO: 2588315 - RNA, 19 nt, Artificial Sequence
  Description of Artificial Sequence: Synthetic oligonucleotide
ggugagcaauggccaucau

SEQ ID NO: 2588316 - RNA, 19 nt, Artificial Sequence
  Description of Artificial Sequence: Synthetic oligonucleotide
cccuaagcaccuacacauu

SEQ ID NO: 2588317 - RNA, 19 nt, Artificial Sequence
  Description of Artificial Sequence: Synthetic oligonucleotide
cuccagcccuaagcaccua

SEQ ID NO: 2588318 - RNA, 19 nt, Artificial Sequence
  Description of Artificial Sequence: Synthetic oligonucleotide
ccaacucuccaggcucagu

SEQ ID NO: 2588319 - RNA, 19 nt, Artificial Sequence
  Description of Artificial Sequence: Synthetic oligonucleotide
ccagguguuguaggacauu

SEQ ID NO: 2588320 - RNA, 19 nt, Artificial Sequence
  Description of Artificial Sequence: Synthetic oligonucleotide
ggcuagccuggaacuccau

SEQ ID NO: 2588321 - RNA, 19 nt, Artificial Sequence
  Description of Artificial Sequence: Synthetic oligonucleotide
ggcucccuaucaggucauu

SEQ ID NO: 2588322 - RNA, 19 nt, Artificial Sequence
  Description of Artificial Sequence: Synthetic oligonucleotide
aauucagauguauagaucc

SEQ ID NO: 2588323 - RNA, 19 nt, Artificial Sequence
  Description of Artificial Sequence: Synthetic oligonucleotide
aauuuuaccauucagauca

SEQ ID NO: 2588324 - RNA, 19 nt, Artificial Sequence
  Description of Artificial Sequence: Synthetic oligonucleotide
aacuaaaugugcuuguuuc

SEQ ID NO: 2588325 - RNA, 19 nt, Artificial Sequence
  Description of Artificial Sequence: Synthetic oligonucleotide
auguauagaucccagauac

SEQ ID NO: 2588326 - RNA, 19 nt, Artificial Sequence
  Description of Artificial Sequence: Synthetic oligonucleotide
acuuuuacgauccuuugcc

SEQ ID NO: 2588327 - RNA, 19 nt, Artificial Sequence
  Description of Artificial Sequence: Synthetic oligonucleotide
cuuacauuugccaauacag

SEQ ID NO: 2588328 - RNA, 19 nt, Artificial Sequence
  Description of Artificial Sequence: Synthetic oligonucleotide
aauagugaacuaaaugugc

SEQ ID NO: 2588329 - RNA, 19 nt, Artificial Sequence
  Description of Artificial Sequence: Synthetic oligonucleotide
agaaacaacuuacauuugc

SEQ ID NO: 2588330 - RNA, 19 nt, Artificial Sequence
  Description of Artificial Sequence: Synthetic oligonucleotide
aguguuuccauuguaagcc

SEQ ID NO: 2588331 - RNA, 19 nt, Artificial Sequence
  Description of Artificial Sequence: Synthetic oligonucleotide
aaaugugcuuguuucauag

SEQ ID NO: 2588332 - RNA, 19 nt, Artificial Sequence
  Description of Artificial Sequence: Synthetic oligonucleotide
uacauuugccaauacaggg

SEQ ID NO: 2588333 - RNA, 19 nt, Artificial Sequence
  Description of Artificial Sequence: Synthetic oligonucleotide
uuugcguucacaaaagaca

SEQ ID NO: 2588334 - RNA, 19 nt, Artificial Sequence
  Description of Artificial Sequence: Synthetic oligonucleotide
uccauuguaagccuuugcg

SEQ ID NO: 2588335 - RNA, 19 nt, Artificial Sequence
  Description of Artificial Sequence: Synthetic oligonucleotide
uaugaaauaugcaaaucug

SEQ ID NO: 2588336 - RNA, 19 nt, Artificial Sequence
  Description of Artificial Sequence: Synthetic oligonucleotide
aaccaaauguacuggcugc

SEQ ID NO: 2588337 - RNA, 19 nt, Artificial Sequence
  Description of Artificial Sequence: Synthetic oligonucleotide
aaauaugcaaaucugccaa

SEQ ID NO: 2588338 - RNA, 19 nt, Artificial Sequence
  Description of Artificial Sequence: Synthetic oligonucleotide
auugaaggcaauuuuacca

SEQ ID NO: 2588339 - RNA, 19 nt, Artificial Sequence
  Description of Artificial Sequence: Synthetic oligonucleotide
gaucuguucucccacaggg

SEQ ID NO: 2588340 - RNA, 19 nt, Artificial Sequence
  Description of Artificial Sequence: Synthetic oligonucleotide
auagaucccagauaccugg

SEQ ID NO: 2588341 - RNA, 19 nt, Artificial Sequence
  Description of Artificial Sequence: Synthetic oligonucleotide
aagucuuuucccaugaguc

SEQ ID NO: 2588342 - RNA, 19 nt, Artificial Sequence
  Description of Artificial Sequence: Synthetic oligonucleotide
ucugccaagaaaauuaaau

SEQ ID NO: 2588343 - RNA, 19 nt, Artificial Sequence
  Description of Artificial Sequence: Synthetic oligonucleotide
aaauggucuauguacagau

SEQ ID NO: 2588344 - RNA, 19 nt, Artificial Sequence
  Description of Artificial Sequence: Synthetic oligonucleotide
uuuauugaaggcaauuuua

SEQ ID NO: 2588345 - RNA, 19 nt, Artificial Sequence
  Description of Artificial Sequence: Synthetic oligonucleotide
uuaauauaauccacuauau

SEQ ID NO: 2588346 - RNA, 19 nt, Artificial Sequence
  Description of Artificial Sequence: Synthetic oligonucleotide
uccacuauauaauagugaa

SEQ ID NO: 2588347 - RNA, 19 nt, Artificial Sequence
  Description of Artificial Sequence: Synthetic oligonucleotide
augaaauaugcaaaucugc

SEQ ID NO: 2588348 - RNA, 19 nt, Artificial Sequence
  Description of Artificial Sequence: Synthetic oligonucleotide
uugcguucacaaaagacag

SEQ ID NO: 2588349 - RNA, 19 nt, Artificial Sequence
  Description of Artificial Sequence: Synthetic oligonucleotide
uaauccacuauauaauagu

SEQ ID NO: 2588350 - RNA, 19 nt, Artificial Sequence
  Description of Artificial Sequence: Synthetic oligonucleotide
aacaacuuacauuugccaa

SEQ ID NO: 2588351 - RNA, 19 nt, Artificial Sequence
  Description of Artificial Sequence: Synthetic oligonucleotide
ugugcggccacuuuuacga

SEQ ID NO: 2588352 - RNA, 19 nt, Artificial Sequence
  Description of Artificial Sequence: Synthetic oligonucleotide
acacuuaauggugucaacc

SEQ ID NO: 2588353 - RNA, 19 nt, Artificial Sequence
  Description of Artificial Sequence: Synthetic oligonucleotide
aaagacaggcaacugggca

SEQ ID NO: 2588354 - RNA, 19 nt, Artificial Sequence
  Description of Artificial Sequence: Synthetic oligonucleotide
ucccaucugaaucagacac

SEQ ID NO: 2588355 - RNA, 19 nt, Artificial Sequence
  Description of Artificial Sequence: Synthetic oligonucleotide
aauaugcaaaucugccaag

SEQ ID NO: 2588356 - RNA, 19 nt, Artificial Sequence
  Description of Artificial Sequence: Synthetic oligonucleotide
ucuacugcggcucccaucu

SEQ ID NO: 2588357 - RNA, 19 nt, Artificial Sequence
  Description of Artificial Sequence: Synthetic oligonucleotide
aaaucugccaagaaaauua

SEQ ID NO: 2588358 - RNA, 19 nt, Artificial Sequence
  Description of Artificial Sequence: Synthetic oligonucleotide
ucuguucucccacagggcc

SEQ ID NO: 2588359 - RNA, 19 nt, Artificial Sequence
  Description of Artificial Sequence: Synthetic oligonucleotide
uauugaaggcaauuuuacc

SEQ ID NO: 2588360 - RNA, 19 nt, Artificial Sequence
  Description of Artificial Sequence: Synthetic oligonucleotide
aaauucagauguauagauc

SEQ ID NO: 2588361 - RNA, 19 nt, Artificial Sequence
  Description of Artificial Sequence: Synthetic oligonucleotide
aguguugcuggccaggcuc

SEQ ID NO: 2588362 - RNA, 19 nt, Artificial Sequence
  Description of Artificial Sequence: Synthetic oligonucleotide
aagccaagggagcuaguac

SEQ ID NO: 2588363 - RNA, 19 nt, Artificial Sequence
  Description of Artificial Sequence: Synthetic oligonucleotide
uccccuucaggauacgucg

SEQ ID NO: 2588364 - RNA, 19 nt, Artificial Sequence
  Description of Artificial Sequence: Synthetic oligonucleotide
ugucacccgauauuggagg

SEQ ID NO: 2588365 - RNA, 19 nt, Artificial Sequence
  Description of Artificial Sequence: Synthetic oligonucleotide
gaaauaugcaaaucugcca

SEQ ID NO: 2588366 - RNA, 19 nt, Artificial Sequence
  Description of Artificial Sequence: Synthetic oligonucleotide
aggaaccaaauguacuggc

SEQ ID NO: 2588367 - RNA, 19 nt, Artificial Sequence
  Description of Artificial Sequence: Synthetic oligonucleotide
aggacugccuaacugacag

SEQ ID NO: 2588368 - RNA, 19 nt, Artificial Sequence
  Description of Artificial Sequence: Synthetic oligonucleotide
gaaccaaauguacuggcug

SEQ ID NO: 2588369 - RNA, 19 nt, Artificial Sequence
  Description of Artificial Sequence: Synthetic oligonucleotide
ucagauguauagaucccag

SEQ ID NO: 2588370 - RNA, 19 nt, Artificial Sequence
  Description of Artificial Sequence: Synthetic oligonucleotide
uucaggauacgucggaucu

SEQ ID NO: 2588371 - RNA, 19 nt, Artificial Sequence
  Description of Artificial Sequence: Synthetic oligonucleotide
gaaacaacuuacauuugcc

SEQ ID NO: 2588372 - RNA, 19 nt, Artificial Sequence
  Description of Artificial Sequence: Synthetic oligonucleotide
agccaagggagcuaguacg

SEQ ID NO: 2588373 - RNA, 19 nt, Artificial Sequence
  Description of Artificial Sequence: Synthetic oligonucleotide
aauccacuauauaauagug

SEQ ID NO: 2588374 - RNA, 19 nt, Artificial Sequence
  Description of Artificial Sequence: Synthetic oligonucleotide
aucugaaucagacacuuaa

SEQ ID NO: 2588375 - RNA, 19 nt, Artificial Sequence
  Description of Artificial Sequence: Synthetic oligonucleotide
agauguauagaucccagau

SEQ ID NO: 2588376 - RNA, 19 nt, Artificial Sequence
  Description of Artificial Sequence: Synthetic oligonucleotide
gccaauacagggcaaaugg

SEQ ID NO: 2588377 - RNA, 19 nt, Artificial Sequence
  Description of Artificial Sequence: Synthetic oligonucleotide
ucaacagucggacugcauc

SEQ ID NO: 2588378 - RNA, 19 nt, Artificial Sequence
  Description of Artificial Sequence: Synthetic oligonucleotide
uguuucauagaaacaacuu

SEQ ID NO: 2588379 - RNA, 19 nt, Artificial Sequence
  Description of Artificial Sequence: Synthetic oligonucleotide
aaaagacaggcaacugggc

SEQ ID NO: 2588380 - RNA, 19 nt, Artificial Sequence
  Description of Artificial Sequence: Synthetic oligonucleotide
uuuacgauccuuugccucu

SEQ ID NO: 2588381 - RNA, 19 nt, Artificial Sequence
  Description of Artificial Sequence: Synthetic oligonucleotide
gauauuggaggcuggcagc

SEQ ID NO: 2588382 - RNA, 19 nt, Artificial Sequence
  Description of Artificial Sequence: Synthetic oligonucleotide
cuuugcguucacaaaagac

SEQ ID NO: 2588383 - RNA, 19 nt, Artificial Sequence
  Description of Artificial Sequence: Synthetic oligonucleotide
uaccauucagaucaaaauu

SEQ ID NO: 2588384 - RNA, 19 nt, Artificial Sequence
  Description of Artificial Sequence: Synthetic oligonucleotide
cuauguacagauacaucag

SEQ ID NO: 2588385 - RNA, 19 nt, Artificial Sequence
  Description of Artificial Sequence: Synthetic oligonucleotide
uaauauaauccacuauaua

SEQ ID NO: 2588386 - RNA, 19 nt, Artificial Sequence
  Description of Artificial Sequence: Synthetic oligonucleotide
aagccuacuguuuauugaa

SEQ ID NO: 2588387 - RNA, 19 nt, Artificial Sequence
  Description of Artificial Sequence: Synthetic oligonucleotide
cagaucaaaauucagaugu

SEQ ID NO: 2588388 - RNA, 19 nt, Artificial Sequence
  Description of Artificial Sequence: Synthetic oligonucleotide
gaaucagacacuuaauggu

SEQ ID NO: 2588389 - RNA, 19 nt, Artificial Sequence
  Description of Artificial Sequence: Synthetic oligonucleotide
guaugaaauaugcaaaucu

SEQ ID NO: 2588390 - RNA, 19 nt, Artificial Sequence
  Description of Artificial Sequence: Synthetic oligonucleotide
aacuuacauuugccaauac

SEQ ID NO: 2588391 - RNA, 19 nt, Artificial Sequence
  Description of Artificial Sequence: Synthetic oligonucleotide
acuuacauuugccaauaca

SEQ ID NO: 2588392 - RNA, 19 nt, Artificial Sequence
  Description of Artificial Sequence: Synthetic oligonucleotide
uccaaguuccgagugcucg

SEQ ID NO: 2588393 - RNA, 19 nt, Artificial Sequence
  Description of Artificial Sequence: Synthetic oligonucleotide
ugugucacccgauauugga

SEQ ID NO: 2588394 - RNA, 19 nt, Artificial Sequence
  Description of Artificial Sequence: Synthetic oligonucleotide
auggacuuccccuucagga

SEQ ID NO: 2588395 - RNA, 19 nt, Artificial Sequence
  Description of Artificial Sequence: Synthetic oligonucleotide
accuggguaugaaauaugc

SEQ ID NO: 2588396 - RNA, 19 nt, Artificial Sequence
  Description of Artificial Sequence: Synthetic oligonucleotide
auaauccacuauauaauag

SEQ ID NO: 2588397 - RNA, 19 nt, Artificial Sequence
  Description of Artificial Sequence: Synthetic oligonucleotide
auccuuugccucuacugcg

SEQ ID NO: 2588398 - RNA, 19 nt, Artificial Sequence
  Description of Artificial Sequence: Synthetic oligonucleotide
aagacaggcaacugggcaa

SEQ ID NO: 2588399 - RNA, 19 nt, Artificial Sequence
  Description of Artificial Sequence: Synthetic oligonucleotide
aaggcaauuuuaccauuca

SEQ ID NO: 2588400 - RNA, 19 nt, Artificial Sequence
  Description of Artificial Sequence: Synthetic oligonucleotide
aucaggacugccuaacuga

SEQ ID NO: 2588401 - RNA, 19 nt, Artificial Sequence
  Description of Artificial Sequence: Synthetic oligonucleotide
ugcugaauggacuuccccu

SEQ ID NO: 2588402 - RNA, 19 nt, Artificial Sequence
  Description of Artificial Sequence: Synthetic oligonucleotide
cauucagaucaaaauucag

SEQ ID NO: 2588403 - RNA, 19 nt, Artificial Sequence
  Description of Artificial Sequence: Synthetic oligonucleotide
cuggguaugaaauaugcaa

SEQ ID NO: 2588404 - RNA, 19 nt, Artificial Sequence
  Description of Artificial Sequence: Synthetic oligonucleotide
acaacuuacauuugccaau

SEQ ID NO: 2588405 - RNA, 19 nt, Artificial Sequence
  Description of Artificial Sequence: Synthetic oligonucleotide
acuaaaugugcuuguuuca

SEQ ID NO: 2588406 - RNA, 19 nt, Artificial Sequence
  Description of Artificial Sequence: Synthetic oligonucleotide
auucagaucaaaauucaga

SEQ ID NO: 2588407 - RNA, 19 nt, Artificial Sequence
  Description of Artificial Sequence: Synthetic oligonucleotide
uuuuacgauccuuugccuc

SEQ ID NO: 2588408 - RNA, 19 nt, Artificial Sequence
  Description of Artificial Sequence: Synthetic oligonucleotide
uguauagaucccagauacc

SEQ ID NO: 2588409 - RNA, 19 nt, Artificial Sequence
  Description of Artificial Sequence: Synthetic oligonucleotide
caguguuuccauuguaagc

SEQ ID NO: 2588410 - RNA, 19 nt, Artificial Sequence
  Description of Artificial Sequence: Synthetic oligonucleotide
uccagauuggcuucuucug

SEQ ID NO: 2588411 - RNA, 19 nt, Artificial Sequence
  Description of Artificial Sequence: Synthetic oligonucleotide
ucggacugcauccaacugu

SEQ ID NO: 2588412 - RNA, 19 nt, Artificial Sequence
  Description of Artificial Sequence: Synthetic oligonucleotide
auucagauguauagauccc

SEQ ID NO: 2588413 - RNA, 19 nt, Artificial Sequence
  Description of Artificial Sequence: Synthetic oligonucleotide
caacagucggacugcaucc

SEQ ID NO: 2588414 - RNA, 19 nt, Artificial Sequence
  Description of Artificial Sequence: Synthetic oligonucleotide
cacuauauaauagugaacu

SEQ ID NO: 2588415 - RNA, 19 nt, Artificial Sequence
  Description of Artificial Sequence: Synthetic oligonucleotide
augugcuuguuucauagaa

SEQ ID NO: 2588416 - RNA, 19 nt, Artificial Sequence
  Description of Artificial Sequence: Synthetic oligonucleotide
gauacaucaggacugccua

SEQ ID NO: 2588417 - RNA, 19 nt, Artificial Sequence
  Description of Artificial Sequence: Synthetic oligonucleotide
ugcguucacaaaagacagg

SEQ ID NO: 2588418 - RNA, 19 nt, Artificial Sequence
  Description of Artificial Sequence: Synthetic oligonucleotide
uucagauguauagauccca

SEQ ID NO: 2588419 - RNA, 19 nt, Artificial Sequence
  Description of Artificial Sequence: Synthetic oligonucleotide
caucaggaaccaaauguac

SEQ ID NO: 2588420 - RNA, 19 nt, Artificial Sequence
  Description of Artificial Sequence: Synthetic oligonucleotide
aaugugcuuguuucauaga

SEQ ID NO: 2588421 - RNA, 19 nt, Artificial Sequence
  Description of Artificial Sequence: Synthetic oligonucleotide
gacugccuaacugacagug

SEQ ID NO: 2588422 - RNA, 19 nt, Artificial Sequence
  Description of Artificial Sequence: Synthetic oligonucleotide
aggcaauuuuaccauucag

SEQ ID NO: 2588423 - RNA, 19 nt, Artificial Sequence
  Description of Artificial Sequence: Synthetic oligonucleotide
cacuuuuacgauccuuugc

SEQ ID NO: 2588424 - RNA, 19 nt, Artificial Sequence
  Description of Artificial Sequence: Synthetic oligonucleotide
cugccuaacugacagugag

SEQ ID NO: 2588425 - RNA, 19 nt, Artificial Sequence
  Description of Artificial Sequence: Synthetic oligonucleotide
gagugcucgggucugcucc

SEQ ID NO: 2588426 - RNA, 19 nt, Artificial Sequence
  Description of Artificial Sequence: Synthetic oligonucleotide
aguacgguggugcucgcug

SEQ ID NO: 2588427 - RNA, 19 nt, Artificial Sequence
  Description of Artificial Sequence: Synthetic oligonucleotide
auagugaacuaaaugugcu

SEQ ID NO: 2588428 - RNA, 19 nt, Artificial Sequence
  Description of Artificial Sequence: Synthetic oligonucleotide
aucaagucuuuucccauga

SEQ ID NO: 2588429 - RNA, 19 nt, Artificial Sequence
  Description of Artificial Sequence: Synthetic oligonucleotide
aguuccgagugcucggguc

SEQ ID NO: 2588430 - RNA, 19 nt, Artificial Sequence
  Description of Artificial Sequence: Synthetic oligonucleotide
ucaagucuuuucccaugag

SEQ ID NO: 2588431 - RNA, 19 nt, Artificial Sequence
  Description of Artificial Sequence: Synthetic oligonucleotide
uagaaacaacuuacauuug

SEQ ID NO: 2588432 - RNA, 19 nt, Artificial Sequence
  Description of Artificial Sequence: Synthetic oligonucleotide
uagaucccagauaccuggg

SEQ ID NO: 2588433 - RNA, 19 nt, Artificial Sequence
  Description of Artificial Sequence: Synthetic oligonucleotide
uccucaucaacagucggac

SEQ ID NO: 2588434 - RNA, 19 nt, Artificial Sequence
  Description of Artificial Sequence: Synthetic oligonucleotide
acuauauaauagugaacua

SEQ ID NO: 2588435 - RNA, 19 nt, Artificial Sequence
  Description of Artificial Sequence: Synthetic oligonucleotide
guacagauacaucaggacu

SEQ ID NO: 2588436 - RNA, 19 nt, Artificial Sequence
  Description of Artificial Sequence: Synthetic oligonucleotide
gcggaugaguuccagauug

SEQ ID NO: 2588437 - RNA, 19 nt, Artificial Sequence
  Description of Artificial Sequence: Synthetic oligonucleotide
ucaucaacagucggacugc

SEQ ID NO: 2588438 - RNA, 19 nt, Artificial Sequence
  Description of Artificial Sequence: Synthetic oligonucleotide
cacuuaauggugucaacca

SEQ ID NO: 2588439 - RNA, 19 nt, Artificial Sequence
  Description of Artificial Sequence: Synthetic oligonucleotide
acagugaguguugcuggcc

SEQ ID NO: 2588440 - RNA, 19 nt, Artificial Sequence
  Description of Artificial Sequence: Synthetic oligonucleotide
gccuacuguuuauugaagg

SEQ ID NO: 2588441 - RNA, 19 nt, Artificial Sequence
  Description of Artificial Sequence: Synthetic oligonucleotide
gaauggacuuccccuucag

SEQ ID NO: 2588442 - RNA, 19 nt, Artificial Sequence
  Description of Artificial Sequence: Synthetic oligonucleotide
gcuaguacgguggugcucg

SEQ ID NO: 2588443 - RNA, 19 nt, Artificial Sequence
  Description of Artificial Sequence: Synthetic oligonucleotide
ccuacuguuuauugaaggc

SEQ ID NO: 2588444 - RNA, 19 nt, Artificial Sequence
  Description of Artificial Sequence: Synthetic oligonucleotide
gaaggcaauuuuaccauuc

SEQ ID NO: 2588445 - RNA, 19 nt, Artificial Sequence
  Description of Artificial Sequence: Synthetic oligonucleotide
cauccaacugugucacccg

SEQ ID NO: 2588446 - RNA, 19 nt, Artificial Sequence
  Description of Artificial Sequence: Synthetic oligonucleotide
gauaccuggguaugaaaua

SEQ ID NO: 2588447 - RNA, 19 nt, Artificial Sequence
  Description of Artificial Sequence: Synthetic oligonucleotide
uuugccaauacagggcaaa

SEQ ID NO: 2588448 - RNA, 19 nt, Artificial Sequence
  Description of Artificial Sequence: Synthetic oligonucleotide
caagggagcuaguacggug

SEQ ID NO: 2588449 - RNA, 19 nt, Artificial Sequence
  Description of Artificial Sequence: Synthetic oligonucleotide
cugccaagaaaauuaaaua

SEQ ID NO: 2588450 - RNA, 19 nt, Artificial Sequence
  Description of Artificial Sequence: Synthetic oligonucleotide
uaccuggguaugaaauaug

SEQ ID NO: 2588451 - RNA, 19 nt, Artificial Sequence
  Description of Artificial Sequence: Synthetic oligonucleotide
caucaggacugccuaacug

SEQ ID NO: 2588452 - RNA, 19 nt, Artificial Sequence
  Description of Artificial Sequence: Synthetic oligonucleotide
auguacagauacaucagga

SEQ ID NO: 2588453 - RNA, 19 nt, Artificial Sequence
  Description of Artificial Sequence: Synthetic oligonucleotide
caggaaccaaauguacugg

SEQ ID NO: 2588454 - RNA, 19 nt, Artificial Sequence
  Description of Artificial Sequence: Synthetic oligonucleotide
auaugcaaaucugccaaga

SEQ ID NO: 2588455 - RNA, 19 nt, Artificial Sequence
  Description of Artificial Sequence: Synthetic oligonucleotide
guauagaucccagauaccu

SEQ ID NO: 2588456 - RNA, 19 nt, Artificial Sequence
  Description of Artificial Sequence: Synthetic oligonucleotide
aaucugccaagaaaauuaa

SEQ ID NO: 2588457 - RNA, 19 nt, Artificial Sequence
  Description of Artificial Sequence: Synthetic oligonucleotide
ggagcuaguacgguggugc

SEQ ID NO: 2588458 - RNA, 19 nt, Artificial Sequence
  Description of Artificial Sequence: Synthetic oligonucleotide
agauaccuggguaugaaau

SEQ ID NO: 2588459 - RNA, 19 nt, Artificial Sequence
  Description of Artificial Sequence: Synthetic oligonucleotide
uacaucaggacugccuaac

SEQ ID NO: 2588460 - RNA, 19 nt, Artificial Sequence
  Description of Artificial Sequence: Synthetic oligonucleotide
ccaaaugcagggcugugcg

SEQ ID NO: 2588461 - RNA, 19 nt, Artificial Sequence
  Description of Artificial Sequence: Synthetic oligonucleotide
auauaauagugaacuaaau

SEQ ID NO: 2588462 - RNA, 19 nt, Artificial Sequence
  Description of Artificial Sequence: Synthetic oligonucleotide
auaccuggguaugaaauau

SEQ ID NO: 2588463 - RNA, 19 nt, Artificial Sequence
  Description of Artificial Sequence: Synthetic oligonucleotide
uacugcggcucccaucuga

SEQ ID NO: 2588464 - RNA, 19 nt, Artificial Sequence
  Description of Artificial Sequence: Synthetic oligonucleotide
gcguucacaaaagacaggc

SEQ ID NO: 2588465 - RNA, 19 nt, Artificial Sequence
  Description of Artificial Sequence: Synthetic oligonucleotide
acgucggaucuguucuccc

SEQ ID NO: 2588466 - RNA, 19 nt, Artificial Sequence
  Description of Artificial Sequence: Synthetic oligonucleotide
caagccuacuguuuauuga

SEQ ID NO: 2588467 - RNA, 19 nt, Artificial Sequence
  Description of Artificial Sequence: Synthetic oligonucleotide
agugaguguugcuggccag

SEQ ID NO: 2588468 - RNA, 19 nt, Artificial Sequence
  Description of Artificial Sequence: Synthetic oligonucleotide
gacacuuaauggugucaac

SEQ ID NO: 2588469 - RNA, 19 nt, Artificial Sequence
  Description of Artificial Sequence: Synthetic oligonucleotide
auacgucggaucuguucuc

SEQ ID NO: 2588470 - RNA, 19 nt, Artificial Sequence
  Description of Artificial Sequence: Synthetic oligonucleotide
caaauguacuggcugcuca

SEQ ID NO: 2588471 - RNA, 19 nt, Artificial Sequence
  Description of Artificial Sequence: Synthetic oligonucleotide
uccuaccccaagccuacug

SEQ ID NO: 2588472 - RNA, 19 nt, Artificial Sequence
  Description of Artificial Sequence: Synthetic oligonucleotide
aucccagauaccuggguau

SEQ ID NO: 2588473 - RNA, 19 nt, Artificial Sequence
  Description of Artificial Sequence: Synthetic oligonucleotide
aggcucuuauucuucagua

SEQ ID NO: 2588474 - RNA, 19 nt, Artificial Sequence
  Description of Artificial Sequence: Synthetic oligonucleotide
cugugucacccgauauugg

SEQ ID NO: 2588475 - RNA, 19 nt, Artificial Sequence
  Description of Artificial Sequence: Synthetic oligonucleotide
ugccuaacugacagugagu

SEQ ID NO: 2588476 - RNA, 19 nt, Artificial Sequence
  Description of Artificial Sequence: Synthetic oligonucleotide
cugugcggccacuuuuacg

SEQ ID NO: 2588477 - RNA, 19 nt, Artificial Sequence
  Description of Artificial Sequence: Synthetic oligonucleotide
uguuuccauuguaagccuu

SEQ ID NO: 2588478 - RNA, 19 nt, Artificial Sequence
  Description of Artificial Sequence: Synthetic oligonucleotide
gaucccagauaccugggua

SEQ ID NO: 2588479 - RNA, 19 nt, Artificial Sequence
  Description of Artificial Sequence: Synthetic oligonucleotide
auauuggaggcuggcagca

SEQ ID NO: 2588480 - RNA, 19 nt, Artificial Sequence
  Description of Artificial Sequence: Synthetic oligonucleotide
ugaaggcaauuuuaccauu

SEQ ID NO: 2588481 - RNA, 19 nt, Artificial Sequence
  Description of Artificial Sequence: Synthetic oligonucleotide
cugcugaauggacuucccc

SEQ ID NO: 2588482 - RNA, 19 nt, Artificial Sequence
  Description of Artificial Sequence: Synthetic oligonucleotide
gucacccgauauuggaggc

SEQ ID NO: 2588483 - RNA, 19 nt, Artificial Sequence
  Description of Artificial Sequence: Synthetic oligonucleotide
acaucaggacugccuaacu

SEQ ID NO: 2588484 - RNA, 19 nt, Artificial Sequence
  Description of Artificial Sequence: Synthetic oligonucleotide
gccuaacugacagugagug

SEQ ID NO: 2588485 - RNA, 19 nt, Artificial Sequence
  Description of Artificial Sequence: Synthetic oligonucleotide
uacgucggaucuguucucc

SEQ ID NO: 2588486 - RNA, 19 nt, Artificial Sequence
  Description of Artificial Sequence: Synthetic oligonucleotide
aucagacacuuaauggugu

SEQ ID NO: 2588487 - RNA, 19 nt, Artificial Sequence
  Description of Artificial Sequence: Synthetic oligonucleotide
ucuuuucccaugagucuuu

SEQ ID NO: 2588488 - RNA, 19 nt, Artificial Sequence
  Description of Artificial Sequence: Synthetic oligonucleotide
agaucccagauaccugggu

SEQ ID NO: 2588489 - RNA, 19 nt, Artificial Sequence
  Description of Artificial Sequence: Synthetic oligonucleotide
ggaucuguucucccacagg

SEQ ID NO: 2588490 - RNA, 19 nt, Artificial Sequence
  Description of Artificial Sequence: Synthetic oligonucleotide
ggugcucgcugcugaaugg

SEQ ID NO: 2588491 - RNA, 19 nt, Artificial Sequence
  Description of Artificial Sequence: Synthetic oligonucleotide
auggugucaaccaggcucu

SEQ ID NO: 2588492 - RNA, 19 nt, Artificial Sequence
  Description of Artificial Sequence: Synthetic oligonucleotide
aaguuccgagugcucgggu

SEQ ID NO: 2588493 - RNA, 19 nt, Artificial Sequence
  Description of Artificial Sequence: Synthetic oligonucleotide
caaguuccgagugcucggg

SEQ ID NO: 2588494 - RNA, 19 nt, Artificial Sequence
  Description of Artificial Sequence: Synthetic oligonucleotide
uggccaggcuccaagccaa

SEQ ID NO: 2588495 - RNA, 19 nt, Artificial Sequence
  Description of Artificial Sequence: Synthetic oligonucleotide
cacaaaagacaggcaacug

SEQ ID NO: 2588496 - RNA, 19 nt, Artificial Sequence
  Description of Artificial Sequence: Synthetic oligonucleotide
gucggaucuguucucccac

SEQ ID NO: 2588497 - RNA, 19 nt, Artificial Sequence
  Description of Artificial Sequence: Synthetic oligonucleotide
gugucacccgauauuggag

SEQ ID NO: 2588498 - RNA, 19 nt, Artificial Sequence
  Description of Artificial Sequence: Synthetic oligonucleotide
cauuguaagccuuugcguu

SEQ ID NO: 2588499 - RNA, 19 nt, Artificial Sequence
  Description of Artificial Sequence: Synthetic oligonucleotide
gaugaguuccagauuggcu

SEQ ID NO: 2588500 - RNA, 19 nt, Artificial Sequence
  Description of Artificial Sequence: Synthetic oligonucleotide
ccuuccucaucaacagucg

SEQ ID NO: 2588501 - RNA, 19 nt, Artificial Sequence
  Description of Artificial Sequence: Synthetic oligonucleotide
auccaacugugucacccga

SEQ ID NO: 2588502 - RNA, 19 nt, Artificial Sequence
  Description of Artificial Sequence: Synthetic oligonucleotide
cuaacugacagugaguguu

SEQ ID NO: 2588503 - RNA, 19 nt, Artificial Sequence
  Description of Artificial Sequence: Synthetic oligonucleotide
cauggagggcaguguuucc

SEQ ID NO: 2588504 - RNA, 19 nt, Artificial Sequence
  Description of Artificial Sequence: Synthetic oligonucleotide
caaauggucuauguacaga

SEQ ID NO: 2588505 - RNA, 19 nt, Artificial Sequence
  Description of Artificial Sequence: Synthetic oligonucleotide
cgauauuggaggcuggcag

SEQ ID NO: 2588506 - RNA, 19 nt, Artificial Sequence
  Description of Artificial Sequence: Synthetic oligonucleotide
ggauacgucggaucuguuc

SEQ ID NO: 2588507 - RNA, 19 nt, Artificial Sequence
  Description of Artificial Sequence: Synthetic oligonucleotide
auacaucaggacugccuaa

SEQ ID NO: 2588508 - RNA, 19 nt, Artificial Sequence
  Description of Artificial Sequence: Synthetic oligonucleotide
uccaacugugucacccgau

SEQ ID NO: 2588509 - RNA, 19 nt, Artificial Sequence
  Description of Artificial Sequence: Synthetic oligonucleotide
cagauguauagaucccaga

SEQ ID NO: 2588510 - RNA, 19 nt, Artificial Sequence
  Description of Artificial Sequence: Synthetic oligonucleotide
accaaauguacuggcugcu

SEQ ID NO: 2588511 - RNA, 19 nt, Artificial Sequence
  Description of Artificial Sequence: Synthetic oligonucleotide
aauggucuauguacagaua

SEQ ID NO: 2588512 - RNA, 19 nt, Artificial Sequence
  Description of Artificial Sequence: Synthetic oligonucleotide
uaccccaagccuacuguuu

SEQ ID NO: 2588513 - RNA, 19 nt, Artificial Sequence
  Description of Artificial Sequence: Synthetic oligonucleotide
uugccucuacugcggcucc

SEQ ID NO: 2588514 - RNA, 19 nt, Artificial Sequence
  Description of Artificial Sequence: Synthetic oligonucleotide
gucggacugcauccaacug

SEQ ID NO: 2588515 - RNA, 19 nt, Artificial Sequence
  Description of Artificial Sequence: Synthetic oligonucleotide
uacgguggugcucgcugcu

SEQ ID NO: 2588516 - RNA, 19 nt, Artificial Sequence
  Description of Artificial Sequence: Synthetic oligonucleotide
agcuaguacgguggugcuc

SEQ ID NO: 2588517 - RNA, 19 nt, Artificial Sequence
  Description of Artificial Sequence: Synthetic oligonucleotide
guacgguggugcucgcugc

SEQ ID NO: 2588518 - RNA, 19 nt, Artificial Sequence
  Description of Artificial Sequence: Synthetic oligonucleotide
cacccgauauuggaggcug

SEQ ID NO: 2588519 - RNA, 19 nt, Artificial Sequence
  Description of Artificial Sequence: Synthetic oligonucleotide
ccacuauauaauagugaac

SEQ ID NO: 2588520 - RNA, 19 nt, Artificial Sequence
  Description of Artificial Sequence: Synthetic oligonucleotide
accccaagccuacuguuua

SEQ ID NO: 2588521 - RNA, 19 nt, Artificial Sequence
  Description of Artificial Sequence: Synthetic oligonucleotide
agccuacuguuuauugaag

SEQ ID NO: 2588522 - RNA, 19 nt, Artificial Sequence
  Description of Artificial Sequence: Synthetic oligonucleotide
caggcuccaagccaaggga

SEQ ID NO: 2588523 - RNA, 19 nt, Artificial Sequence
  Description of Artificial Sequence: Synthetic oligonucleotide
ccaagccuacuguuuauug

SEQ ID NO: 2588524 - RNA, 19 nt, Artificial Sequence
  Description of Artificial Sequence: Synthetic oligonucleotide
uacagggcaaauggucuau

SEQ ID NO: 2588525 - RNA, 19 nt, Artificial Sequence
  Description of Artificial Sequence: Synthetic oligonucleotide
ccaaguuccgagugcucgg

SEQ ID NO: 2588526 - RNA, 19 nt, Artificial Sequence
  Description of Artificial Sequence: Synthetic oligonucleotide
ucacccgauauuggaggcu

SEQ ID NO: 2588527 - RNA, 19 nt, Artificial Sequence
  Description of Artificial Sequence: Synthetic oligonucleotide
acgauccuuugccucuacu

SEQ ID NO: 2588528 - RNA, 19 nt, Artificial Sequence
  Description of Artificial Sequence: Synthetic oligonucleotide
cagugaguguugcuggcca

SEQ ID NO: 2588529 - RNA, 19 nt, Artificial Sequence
  Description of Artificial Sequence: Synthetic oligonucleotide
cucuacugcggcucccauc

SEQ ID NO: 2588530 - RNA, 19 nt, Artificial Sequence
  Description of Artificial Sequence: Synthetic oligonucleotide
gccaagggagcuaguacgg

SEQ ID NO: 2588531 - RNA, 19 nt, Artificial Sequence
  Description of Artificial Sequence: Synthetic oligonucleotide
uacgauccuuugccucuac

SEQ ID NO: 2588532 - RNA, 19 nt, Artificial Sequence
  Description of Artificial Sequence: Synthetic oligonucleotide
cuuuuacgauccuuugccu

SEQ ID NO: 2588533 - RNA, 19 nt, Artificial Sequence
  Description of Artificial Sequence: Synthetic oligonucleotide
agggagcuaguacgguggu

SEQ ID NO: 2588534 - RNA, 19 nt, Artificial Sequence
  Description of Artificial Sequence: Synthetic oligonucleotide
ugcauccaacugugucacc

SEQ ID NO: 2588535 - RNA, 19 nt, Artificial Sequence
  Description of Artificial Sequence: Synthetic oligonucleotide
gcggccacuuuuacgaucc

SEQ ID NO: 2588536 - RNA, 19 nt, Artificial Sequence
  Description of Artificial Sequence: Synthetic oligonucleotide
ugucaaccaggcucuuauu

SEQ ID NO: 2588537 - RNA, 19 nt, Artificial Sequence
  Description of Artificial Sequence: Synthetic oligonucleotide
caacuuacauuugccaaua

SEQ ID NO: 2588538 - RNA, 19 nt, Artificial Sequence
  Description of Artificial Sequence: Synthetic oligonucleotide
guguugcuggccaggcucc

SEQ ID NO: 2588539 - RNA, 19 nt, Artificial Sequence
  Description of Artificial Sequence: Synthetic oligonucleotide
gccuuugcguucacaaaag

SEQ ID NO: 2588540 - RNA, 19 nt, Artificial Sequence
  Description of Artificial Sequence: Synthetic oligonucleotide
ucgggucugcucccuuccu

SEQ ID NO: 2588541 - RNA, 19 nt, Artificial Sequence
  Description of Artificial Sequence: Synthetic oligonucleotide
cagauaccuggguaugaaa

SEQ ID NO: 2588542 - RNA, 19 nt, Artificial Sequence
  Description of Artificial Sequence: Synthetic oligonucleotide
gcucccuuccucaucaaca

SEQ ID NO: 2588543 - RNA, 19 nt, Artificial Sequence
  Description of Artificial Sequence: Synthetic oligonucleotide
guuccgagugcucgggucu

SEQ ID NO: 2588544 - RNA, 19 nt, Artificial Sequence
  Description of Artificial Sequence: Synthetic oligonucleotide
uuccgagugcucgggucug

SEQ ID NO: 2588545 - RNA, 19 nt, Artificial Sequence
  Description of Artificial Sequence: Synthetic oligonucleotide
cuaguacgguggugcucgc

SEQ ID NO: 2588546 - RNA, 19 nt, Artificial Sequence
  Description of Artificial Sequence: Synthetic oligonucleotide
uuacgauccuuugccucua

SEQ ID NO: 2588547 - RNA, 19 nt, Artificial Sequence
  Description of Artificial Sequence: Synthetic oligonucleotide
gcucauucuccaaguuccg

SEQ ID NO: 2588548 - RNA, 19 nt, Artificial Sequence
  Description of Artificial Sequence: Synthetic oligonucleotide
uauuggaggcuggcagcaa

SEQ ID NO: 2588549 - RNA, 19 nt, Artificial Sequence
  Description of Artificial Sequence: Synthetic oligonucleotide
ggucuauguacagauacau

SEQ ID NO: 2588550 - RNA, 19 nt, Artificial Sequence
  Description of Artificial Sequence: Synthetic oligonucleotide
gggucugcucccuuccuca

SEQ ID NO: 2588551 - RNA, 19 nt, Artificial Sequence
  Description of Artificial Sequence: Synthetic oligonucleotide
cggacugcauccaacugug

SEQ ID NO: 2588552 - RNA, 19 nt, Artificial Sequence
  Description of Artificial Sequence: Synthetic oligonucleotide
cuccaaguuccgagugcuc

SEQ ID NO: 2588553 - RNA, 19 nt, Artificial Sequence
  Description of Artificial Sequence: Synthetic oligonucleotide
caggcucuuauucuucagu

SEQ ID NO: 2588554 - RNA, 19 nt, Artificial Sequence
  Description of Artificial Sequence: Synthetic oligonucleotide
aagaggcggaugaguucca

SEQ ID NO: 2588555 - RNA, 19 nt, Artificial Sequence
  Description of Artificial Sequence: Synthetic oligonucleotide
acuuccccuucaggauacg

SEQ ID NO: 2588556 - RNA, 19 nt, Artificial Sequence
  Description of Artificial Sequence: Synthetic oligonucleotide
uaguacgguggugcucgcu

SEQ ID NO: 2588557 - RNA, 19 nt, Artificial Sequence
  Description of Artificial Sequence: Synthetic oligonucleotide
acccgauauuggaggcugg

SEQ ID NO: 2588558 - RNA, 19 nt, Artificial Sequence
  Description of Artificial Sequence: Synthetic oligonucleotide
gucuuuucccaugagucuu

SEQ ID NO: 2588559 - RNA, 19 nt, Artificial Sequence
  Description of Artificial Sequence: Synthetic oligonucleotide
auuugccaauacagggcaa

SEQ ID NO: 2588560 - RNA, 19 nt, Artificial Sequence
  Description of Artificial Sequence: Synthetic oligonucleotide
ggacuuccccuucaggaua

SEQ ID NO: 2588561 - RNA, 19 nt, Artificial Sequence
  Description of Artificial Sequence: Synthetic oligonucleotide
gcaacugggcaacuccaaa

SEQ ID NO: 2588562 - RNA, 19 nt, Artificial Sequence
  Description of Artificial Sequence: Synthetic oligonucleotide
acugcggcucccaucugaa

SEQ ID NO: 2588563 - RNA, 19 nt, Artificial Sequence
  Description of Artificial Sequence: Synthetic oligonucleotide
gagcuaguacgguggugcu

SEQ ID NO: 2588564 - RNA, 19 nt, Artificial Sequence
  Description of Artificial Sequence: Synthetic oligonucleotide
ggaaccaaauguacuggcu

SEQ ID NO: 2588565 - RNA, 19 nt, Artificial Sequence
  Description of Artificial Sequence: Synthetic oligonucleotide
ccauuguaagccuuugcgu

SEQ ID NO: 2588566 - RNA, 19 nt, Artificial Sequence
  Description of Artificial Sequence: Synthetic oligonucleotide
cggaugaguuccagauugg

SEQ ID NO: 2588567 - RNA, 19 nt, Artificial Sequence
  Description of Artificial Sequence: Synthetic oligonucleotide
gugcucgcugcugaaugga

SEQ ID NO: 2588568 - RNA, 19 nt, Artificial Sequence
  Description of Artificial Sequence: Synthetic oligonucleotide
caucaacagucggacugca

SEQ ID NO: 2588569 - RNA, 19 nt, Artificial Sequence
  Description of Artificial Sequence: Synthetic oligonucleotide
agggcugugcggccacuuu

SEQ ID NO: 2588570 - RNA, 19 nt, Artificial Sequence
  Description of Artificial Sequence: Synthetic oligonucleotide
aucaacagucggacugcau

SEQ ID NO: 2588571 - RNA, 19 nt, Artificial Sequence
  Description of Artificial Sequence: Synthetic oligonucleotide
ucgcugcugaauggacuuc

SEQ ID NO: 2588572 - RNA, 19 nt, Artificial Sequence
  Description of Artificial Sequence: Synthetic oligonucleotide
cccgauauuggaggcuggc

SEQ ID NO: 2588573 - RNA, 19 nt, Artificial Sequence
  Description of Artificial Sequence: Synthetic oligonucleotide
caacugugucacccgauau

SEQ ID NO: 2588574 - RNA, 19 nt, Artificial Sequence
  Description of Artificial Sequence: Synthetic oligonucleotide
ccaaauguacuggcugcuc

SEQ ID NO: 2588575 - RNA, 19 nt, Artificial Sequence
  Description of Artificial Sequence: Synthetic oligonucleotide
cuuugccucuacugcggcu

SEQ ID NO: 2588576 - RNA, 19 nt, Artificial Sequence
  Description of Artificial Sequence: Synthetic oligonucleotide
ccuuugcguucacaaaaga

SEQ ID NO: 2588577 - RNA, 19 nt, Artificial Sequence
  Description of Artificial Sequence: Synthetic oligonucleotide
ccaauacagggcaaauggu

SEQ ID NO: 2588578 - RNA, 19 nt, Artificial Sequence
  Description of Artificial Sequence: Synthetic oligonucleotide
uggcagcaacauggagggc

SEQ ID NO: 2588579 - RNA, 19 nt, Artificial Sequence
  Description of Artificial Sequence: Synthetic oligonucleotide
uuccuaccccaagccuacu

SEQ ID NO: 2588580 - RNA, 19 nt, Artificial Sequence
  Description of Artificial Sequence: Synthetic oligonucleotide
cuacugcggcucccaucug

SEQ ID NO: 2588581 - RNA, 19 nt, Artificial Sequence
  Description of Artificial Sequence: Synthetic oligonucleotide
cuaccccaagccuacuguu

SEQ ID NO: 2588582 - RNA, 19 nt, Artificial Sequence
  Description of Artificial Sequence: Synthetic oligonucleotide
ccaacugugucacccgaua

SEQ ID NO: 2588583 - RNA, 19 nt, Artificial Sequence
  Description of Artificial Sequence: Synthetic oligonucleotide
gggagcuaguacgguggug

SEQ ID NO: 2588584 - RNA, 19 nt, Artificial Sequence
  Description of Artificial Sequence: Synthetic oligonucleotide
cguucacaaaagacaggca

SEQ ID NO: 2588585 - RNA, 19 nt, Artificial Sequence
  Description of Artificial Sequence: Synthetic oligonucleotide
gcaaaucugccaagaaaau

SEQ ID NO: 2588586 - RNA, 19 nt, Artificial Sequence
  Description of Artificial Sequence: Synthetic oligonucleotide
ggcaacugggcaacuccaa

SEQ ID NO: 2588587 - RNA, 19 nt, Artificial Sequence
  Description of Artificial Sequence: Synthetic oligonucleotide
cuuccccuucaggauacgu

SEQ ID NO: 2588588 - RNA, 19 nt, Artificial Sequence
  Description of Artificial Sequence: Synthetic oligonucleotide
guugcuggccaggcuccaa

SEQ ID NO: 2588589 - RNA, 19 nt, Artificial Sequence
  Description of Artificial Sequence: Synthetic oligonucleotide
cccuucaggauacgucgga

SEQ ID NO: 2588590 - RNA, 19 nt, Artificial Sequence
  Description of Artificial Sequence: Synthetic oligonucleotide
ccuaccccaagccuacugu

SEQ ID NO: 2588591 - RNA, 19 nt, Artificial Sequence
  Description of Artificial Sequence: Synthetic oligonucleotide
gcuccaagccaagggagcu

SEQ ID NO: 2588592 - RNA, 19 nt, Artificial Sequence
  Description of Artificial Sequence: Synthetic oligonucleotide
ccgauauuggaggcuggca

SEQ ID NO: 2588593 - RNA, 19 nt, Artificial Sequence
  Description of Artificial Sequence: Synthetic oligonucleotide
ggcugugcggccacuuuua

SEQ ID NO: 2588594 - RNA, 19 nt, Artificial Sequence
  Description of Artificial Sequence: Synthetic oligonucleotide
ggugucaaccaggcucuua

SEQ ID NO: 2588595 - RNA, 19 nt, Artificial Sequence
  Description of Artificial Sequence: Synthetic oligonucleotide
cccaucugaaucagacacu

SEQ ID NO: 2588596 - RNA, 19 nt, Artificial Sequence
  Description of Artificial Sequence: Synthetic oligonucleotide
cgucggaucuguucuccca

SEQ ID NO: 2588597 - RNA, 19 nt, Artificial Sequence
  Description of Artificial Sequence: Synthetic oligonucleotide
ccuaacugacagugagugu

SEQ ID NO: 2588598 - RNA, 19 nt, Artificial Sequence
  Description of Artificial Sequence: Synthetic oligonucleotide
cccagauaccuggguauga

SEQ ID NO: 2588599 - RNA, 19 nt, Artificial Sequence
  Description of Artificial Sequence: Synthetic oligonucleotide
gcucgcugcugaauggacu

SEQ ID NO: 2588600 - RNA, 19 nt, Artificial Sequence
  Description of Artificial Sequence: Synthetic oligonucleotide
ggacugccuaacugacagu

SEQ ID NO: 2588601 - RNA, 19 nt, Artificial Sequence
  Description of Artificial Sequence: Synthetic oligonucleotide
cuuuucccaugagucuuuu

SEQ ID NO: 2588602 - RNA, 19 nt, Artificial Sequence
  Description of Artificial Sequence: Synthetic oligonucleotide
ggcggaugaguuccagauu

SEQ ID NO: 2588603 - RNA, 19 nt, Artificial Sequence
  Description of Artificial Sequence: Synthetic oligonucleotide
ggccaggcuccaagccaag

SEQ ID NO: 2588604 - RNA, 19 nt, Artificial Sequence
  Description of Artificial Sequence: Synthetic oligonucleotide
cugcucccuuccucaucaa

SEQ ID NO: 2588605 - RNA, 19 nt, Artificial Sequence
  Description of Artificial Sequence: Synthetic oligonucleotide
gugcggccacuuuuacgau

SEQ ID NO: 2588606 - RNA, 19 nt, Artificial Sequence
  Description of Artificial Sequence: Synthetic oligonucleotide
ggcucccaucugaaucaga

SEQ ID NO: 2588607 - RNA, 19 nt, Artificial Sequence
  Description of Artificial Sequence: Synthetic oligonucleotide
guggugcucgcugcugaau

SEQ ID NO: 2588608 - RNA, 19 nt, Artificial Sequence
  Description of Artificial Sequence: Synthetic oligonucleotide
gggcugugcggccacuuuu

SEQ ID NO: 2588609 - RNA, 19 nt, Artificial Sequence
  Description of Artificial Sequence: Synthetic oligonucleotide
ggagggcaguguuuccauu

SEQ ID NO: 2588610 - RNA, 19 nt, Artificial Sequence
  Description of Artificial Sequence: Synthetic oligonucleotide
cgguggugcucgcugcuga

SEQ ID NO: 2588611 - RNA, 19 nt, Artificial Sequence
  Description of Artificial Sequence: Synthetic oligonucleotide
cggcucccaucugaaucag

SEQ ID NO: 2588612 - RNA, 19 nt, Artificial Sequence
  Description of Artificial Sequence: Synthetic oligonucleotide
cccaagccuacuguuuauu

SEQ ID NO: 2588613 - RNA, 19 nt, Artificial Sequence
  Description of Artificial Sequence: Synthetic oligonucleotide
ccgagugcucgggucugcu

SEQ ID NO: 2588614 - RNA, 19 nt, Artificial Sequence
  Description of Artificial Sequence: Synthetic oligonucleotide
cggccacuuuuacgauccu

SEQ ID NO: 2588615 - RNA, 19 nt, Artificial Sequence
  Description of Artificial Sequence: Synthetic oligonucleotide
aauuuggcaagcuugugcc

SEQ ID NO: 2588616 - RNA, 19 nt, Artificial Sequence
  Description of Artificial Sequence: Synthetic oligonucleotide
aaagguagcugguugaacc

SEQ ID NO: 2588617 - RNA, 19 nt, Artificial Sequence
  Description of Artificial Sequence: Synthetic oligonucleotide
ucaaaugucuuauaguucg

SEQ ID NO: 2588618 - RNA, 19 nt, Artificial Sequence
  Description of Artificial Sequence: Synthetic oligonucleotide
aauuguuuaacgaaacccc

SEQ ID NO: 2588619 - RNA, 19 nt, Artificial Sequence
  Description of Artificial Sequence: Synthetic oligonucleotide
uauagagaaagguagcugg

SEQ ID NO: 2588620 - RNA, 19 nt, Artificial Sequence
  Description of Artificial Sequence: Synthetic oligonucleotide
aaaucuuugcagcauaaag

SEQ ID NO: 2588621 - RNA, 19 nt, Artificial Sequence
  Description of Artificial Sequence: Synthetic oligonucleotide
uaaacuuugguccuggcag

SEQ ID NO: 2588622 - RNA, 19 nt, Artificial Sequence
  Description of Artificial Sequence: Synthetic oligonucleotide
aaauacuuggaucuggcug

SEQ ID NO: 2588623 - RNA, 19 nt, Artificial Sequence
  Description of Artificial Sequence: Synthetic oligonucleotide
gaaguucagaguuauagag

SEQ ID NO: 2588624 - RNA, 19 nt, Artificial Sequence
  Description of Artificial Sequence: Synthetic oligonucleotide
aagaaguucagaguuauag

SEQ ID NO: 2588625 - RNA, 19 nt, Artificial Sequence
  Description of Artificial Sequence: Synthetic oligonucleotide
uguagcaugaccacggcag

SEQ ID NO: 2588626 - RNA, 19 nt, Artificial Sequence
  Description of Artificial Sequence: Synthetic oligonucleotide
aauacuuggaucuggcugu

SEQ ID NO: 2588627 - RNA, 19 nt, Artificial Sequence
  Description of Artificial Sequence: Synthetic oligonucleotide
cuuuugaagaaguucagag

SEQ ID NO: 2588628 - RNA, 19 nt, Artificial Sequence
  Description of Artificial Sequence: Synthetic oligonucleotide
aacgaaaccccugugaagg

SEQ ID NO: 2588629 - RNA, 19 nt, Artificial Sequence
  Description of Artificial Sequence: Synthetic oligonucleotide
uucagaguuauagagaaag

SEQ ID NO: 2588630 - RNA, 19 nt, Artificial Sequence
  Description of Artificial Sequence: Synthetic oligonucleotide
uuugaagaaguucagaguu

SEQ ID NO: 2588631 - RNA, 19 nt, Artificial Sequence
  Description of Artificial Sequence: Synthetic oligonucleotide
ucuucuaggacuuuuauuu

SEQ ID NO: 2588632 - RNA, 19 nt, Artificial Sequence
  Description of Artificial Sequence: Synthetic oligonucleotide
ucuuauaguucgcaaaccc

SEQ ID NO: 2588633 - RNA, 19 nt, Artificial Sequence
  Description of Artificial Sequence: Synthetic oligonucleotide
uuauaguucgcaaacccug

SEQ ID NO: 2588634 - RNA, 19 nt, Artificial Sequence
  Description of Artificial Sequence: Synthetic oligonucleotide
gaguuauagagaaagguag

SEQ ID NO: 2588635 - RNA, 19 nt, Artificial Sequence
  Description of Artificial Sequence: Synthetic oligonucleotide
guaguaggcauucaggugc

SEQ ID NO: 2588636 - RNA, 19 nt, Artificial Sequence
  Description of Artificial Sequence: Synthetic oligonucleotide
uuuaacgaaaccccuguga

SEQ ID NO: 2588637 - RNA, 19 nt, Artificial Sequence
  Description of Artificial Sequence: Synthetic oligonucleotide
agcugguugaaccuuaguc

SEQ ID NO: 2588638 - RNA, 19 nt, Artificial Sequence
  Description of Artificial Sequence: Synthetic oligonucleotide
uauaguucgcaaacccugg

SEQ ID NO: 2588639 - RNA, 19 nt, Artificial Sequence
  Description of Artificial Sequence: Synthetic oligonucleotide
ucaccgaaauuguuuaacg

SEQ ID NO: 2588640 - RNA, 19 nt, Artificial Sequence
  Description of Artificial Sequence: Synthetic oligonucleotide
aaucuuugcagcauaaagu

SEQ ID NO: 2588641 - RNA, 19 nt, Artificial Sequence
  Description of Artificial Sequence: Synthetic oligonucleotide
ugucuuauaguucgcaaac

SEQ ID NO: 2588642 - RNA, 19 nt, Artificial Sequence
  Description of Artificial Sequence: Synthetic oligonucleotide
gaauuuggcaagcuugugc

SEQ ID NO: 2588643 - RNA, 19 nt, Artificial Sequence
  Description of Artificial Sequence: Synthetic oligonucleotide
uguguaucucagcagaacu

SEQ ID NO: 2588644 - RNA, 19 nt, Artificial Sequence
  Description of Artificial Sequence: Synthetic oligonucleotide
ucagaguuauagagaaagg

SEQ ID NO: 2588645 - RNA, 19 nt, Artificial Sequence
  Description of Artificial Sequence: Synthetic oligonucleotide
uuccgcucagccaagagcc

SEQ ID NO: 2588646 - RNA, 19 nt, Artificial Sequence
  Description of Artificial Sequence: Synthetic oligonucleotide
ucaaauacuuggaucuggc

SEQ ID NO: 2588647 - RNA, 19 nt, Artificial Sequence
  Description of Artificial Sequence: Synthetic oligonucleotide
uuaacgaaaccccugugaa

SEQ ID NO: 2588648 - RNA, 19 nt, Artificial Sequence
  Description of Artificial Sequence: Synthetic oligonucleotide
ugcagcauaaaguacugga

SEQ ID NO: 2588649 - RNA, 19 nt, Artificial Sequence
  Description of Artificial Sequence: Synthetic oligonucleotide
aaucugaugucuucaauuu

SEQ ID NO: 2588650 - RNA, 19 nt, Artificial Sequence
  Description of Artificial Sequence: Synthetic oligonucleotide
uuuugaagaaguucagagu

SEQ ID NO: 2588651 - RNA, 19 nt, Artificial Sequence
  Description of Artificial Sequence: Synthetic oligonucleotide
uuaaccuuguccuguaaga

SEQ ID NO: 2588652 - RNA, 19 nt, Artificial Sequence
  Description of Artificial Sequence: Synthetic oligonucleotide
ucguguagcaugaccacgg

SEQ ID NO: 2588653 - RNA, 19 nt, Artificial Sequence
  Description of Artificial Sequence: Synthetic oligonucleotide
uguuuaacgaaaccccugu

SEQ ID NO: 2588654 - RNA, 19 nt, Artificial Sequence
  Description of Artificial Sequence: Synthetic oligonucleotide
aguuauagagaaagguagc

SEQ ID NO: 2588655 - RNA, 19 nt, Artificial Sequence
  Description of Artificial Sequence: Synthetic oligonucleotide
agcauaaaguacuggauga

SEQ ID NO: 2588656 - RNA, 19 nt, Artificial Sequence
  Description of Artificial Sequence: Synthetic oligonucleotide
uccaucuugaagugaagcc

SEQ ID NO: 2588657 - RNA, 19 nt, Artificial Sequence
  Description of Artificial Sequence: Synthetic oligonucleotide
cucagugguagacaggucc

SEQ ID NO: 2588658 - RNA, 19 nt, Artificial Sequence
  Description of Artificial Sequence: Synthetic oligonucleotide
uucaaauacuuggaucugg

SEQ ID NO: 2588659 - RNA, 19 nt, Artificial Sequence
  Description of Artificial Sequence: Synthetic oligonucleotide
uccuguaagagcugaagca

SEQ ID NO: 2588660 - RNA, 19 nt, Artificial Sequence
  Description of Artificial Sequence: Synthetic oligonucleotide
uguuccaucuugaagugaa

SEQ ID NO: 2588661 - RNA, 19 nt, Artificial Sequence
  Description of Artificial Sequence: Synthetic oligonucleotide
uaaaguacuggaugaucag

SEQ ID NO: 2588662 - RNA, 19 nt, Artificial Sequence
  Description of Artificial Sequence: Synthetic oligonucleotide
uugauuuaaucugaugucu

SEQ ID NO: 2588663 - RNA, 19 nt, Artificial Sequence
  Description of Artificial Sequence: Synthetic oligonucleotide
aaugucuuauaguucgcaa

SEQ ID NO: 2588664 - RNA, 19 nt, Artificial Sequence
  Description of Artificial Sequence: Synthetic oligonucleotide
aaguacuggaugaucagag

SEQ ID NO: 2588665 - RNA, 19 nt, Artificial Sequence
  Description of Artificial Sequence: Synthetic oligonucleotide
uccucuguaaacuuugguc

SEQ ID NO: 2588666 - RNA, 19 nt, Artificial Sequence
  Description of Artificial Sequence: Synthetic oligonucleotide
ugugaaggcgauucggacc

SEQ ID NO: 2588667 - RNA, 19 nt, Artificial Sequence
  Description of Artificial Sequence: Synthetic oligonucleotide
ugucuuuccgcucagccaa

SEQ ID NO: 2588668 - RNA, 19 nt, Artificial Sequence
  Description of Artificial Sequence: Synthetic oligonucleotide
cuuggcagcacuguggagg

SEQ ID NO: 2588669 - RNA, 19 nt, Artificial Sequence
  Description of Artificial Sequence: Synthetic oligonucleotide
agacagguccuuuugaaga

SEQ ID NO: 2588670 - RNA, 19 nt, Artificial Sequence
  Description of Artificial Sequence: Synthetic oligonucleotide
uaaucugaugucuucaauu

SEQ ID NO: 2588671 - RNA, 19 nt, Artificial Sequence
  Description of Artificial Sequence: Synthetic oligonucleotide
uuugcagcauaaaguacug

SEQ ID NO: 2588672 - RNA, 19 nt, Artificial Sequence
  Description of Artificial Sequence: Synthetic oligonucleotide
ucuaggacuuuuauuugcu

SEQ ID NO: 2588673 - RNA, 19 nt, Artificial Sequence
  Description of Artificial Sequence: Synthetic oligonucleotide
uggaugaucagagggaucu

SEQ ID NO: 2588674 - RNA, 19 nt, Artificial Sequence
  Description of Artificial Sequence: Synthetic oligonucleotide
auaaaguacuggaugauca

SEQ ID NO: 2588675 - RNA, 19 nt, Artificial Sequence
  Description of Artificial Sequence: Synthetic oligonucleotide
uuuccgcucagccaagagc

SEQ ID NO: 2588676 - RNA, 19 nt, Artificial Sequence
  Description of Artificial Sequence: Synthetic oligonucleotide
agugaagccggaucaguuc

SEQ ID NO: 2588677 - RNA, 19 nt, Artificial Sequence
  Description of Artificial Sequence: Synthetic oligonucleotide
aucuuugcagcauaaagua

SEQ ID NO: 2588678 - RNA, 19 nt, Artificial Sequence
  Description of Artificial Sequence: Synthetic oligonucleotide
uuguuuaacgaaaccccug

SEQ ID NO: 2588679 - RNA, 19 nt, Artificial Sequence
  Description of Artificial Sequence: Synthetic oligonucleotide
uuauagagaaagguagcug

SEQ ID NO: 2588680 - RNA, 19 nt, Artificial Sequence
  Description of Artificial Sequence: Synthetic oligonucleotide
aguacuggaugaucagagg

SEQ ID NO: 2588681 - RNA, 19 nt, Artificial Sequence
  Description of Artificial Sequence: Synthetic oligonucleotide
ucguaguaggcauucaggu

SEQ ID NO: 2588682 - RNA, 19 nt, Artificial Sequence
  Description of Artificial Sequence: Synthetic oligonucleotide
gcuacaguuaaccuugucc

SEQ ID NO: 2588683 - RNA, 19 nt, Artificial Sequence
  Description of Artificial Sequence: Synthetic oligonucleotide
cucguaguaggcauucagg

SEQ ID NO: 2588684 - RNA, 19 nt, Artificial Sequence
  Description of Artificial Sequence: Synthetic oligonucleotide
gauuuaaucugaugucuuc

SEQ ID NO: 2588685 - RNA, 19 nt, Artificial Sequence
  Description of Artificial Sequence: Synthetic oligonucleotide
agaaguucagaguuauaga

SEQ ID NO: 2588686 - RNA, 19 nt, Artificial Sequence
  Description of Artificial Sequence: Synthetic oligonucleotide
aaaguuucaccgaaauugu

SEQ ID NO: 2588687 - RNA, 19 nt, Artificial Sequence
  Description of Artificial Sequence: Synthetic oligonucleotide
aagcauggcuuucucuauc

SEQ ID NO: 2588688 - RNA, 19 nt, Artificial Sequence
  Description of Artificial Sequence: Synthetic oligonucleotide
uuccccaaaucuuugcagc

SEQ ID NO: 2588689 - RNA, 19 nt, Artificial Sequence
  Description of Artificial Sequence: Synthetic oligonucleotide
accgaaauuguuuaacgaa

SEQ ID NO: 2588690 - RNA, 19 nt, Artificial Sequence
  Description of Artificial Sequence: Synthetic oligonucleotide
uugaaccuuagucuucucu

SEQ ID NO: 2588691 - RNA, 19 nt, Artificial Sequence
  Description of Artificial Sequence: Synthetic oligonucleotide
caagcuugugccaagccug

SEQ ID NO: 2588692 - RNA, 19 nt, Artificial Sequence
  Description of Artificial Sequence: Synthetic oligonucleotide
uuuaaucugaugucuucaa

SEQ ID NO: 2588693 - RNA, 19 nt, Artificial Sequence
  Description of Artificial Sequence: Synthetic oligonucleotide
uugaaagccgccucuucag

SEQ ID NO: 2588694 - RNA, 19 nt, Artificial Sequence
  Description of Artificial Sequence: Synthetic oligonucleotide
cuugugccaagccuggucc

SEQ ID NO: 2588695 - RNA, 19 nt, Artificial Sequence
  Description of Artificial Sequence: Synthetic oligonucleotide
ugaaagccgccucuucagg

SEQ ID NO: 2588696 - RNA, 19 nt, Artificial Sequence
  Description of Artificial Sequence: Synthetic oligonucleotide
gcaguagacaaucuguucc

SEQ ID NO: 2588697 - RNA, 19 nt, Artificial Sequence
  Description of Artificial Sequence: Synthetic oligonucleotide
ugggucaucucagugguag

SEQ ID NO: 2588698 - RNA, 19 nt, Artificial Sequence
  Description of Artificial Sequence: Synthetic oligonucleotide
ucagccaagagccggcuac

SEQ ID NO: 2588699 - RNA, 19 nt, Artificial Sequence
  Description of Artificial Sequence: Synthetic oligonucleotide
cagcauaaaguacuggaug

SEQ ID NO: 2588700 - RNA, 19 nt, Artificial Sequence
  Description of Artificial Sequence: Synthetic oligonucleotide
ccucuguaaacuuuggucc

SEQ ID NO: 2588701 - RNA, 19 nt, Artificial Sequence
  Description of Artificial Sequence: Synthetic oligonucleotide
aaaugucuuauaguucgca

SEQ ID NO: 2588702 - RNA, 19 nt, Artificial Sequence
  Description of Artificial Sequence: Synthetic oligonucleotide
aagguagcugguugaaccu

SEQ ID NO: 2588703 - RNA, 19 nt, Artificial Sequence
  Description of Artificial Sequence: Synthetic oligonucleotide
aaaguacuggaugaucaga

SEQ ID NO: 2588704 - RNA, 19 nt, Artificial Sequence
  Description of Artificial Sequence: Synthetic oligonucleotide
ugaaccuuagucuucucuu

SEQ ID NO: 2588705 - RNA, 19 nt, Artificial Sequence
  Description of Artificial Sequence: Synthetic oligonucleotide
aaacuuugguccuggcagu

SEQ ID NO: 2588706 - RNA, 19 nt, Artificial Sequence
  Description of Artificial Sequence: Synthetic oligonucleotide
uaaccuuguccuguaagag

SEQ ID NO: 2588707 - RNA, 19 nt, Artificial Sequence
  Description of Artificial Sequence: Synthetic oligonucleotide
uucuugauuuaaucugaug

SEQ ID NO: 2588708 - RNA, 19 nt, Artificial Sequence
  Description of Artificial Sequence: Synthetic oligonucleotide
ucuuugcagcauaaaguac

SEQ ID NO: 2588709 - RNA, 19 nt, Artificial Sequence
  Description of Artificial Sequence: Synthetic oligonucleotide
uaacgaaaccccugugaag

SEQ ID NO: 2588710 - RNA, 19 nt, Artificial Sequence
  Description of Artificial Sequence: Synthetic oligonucleotide
cuugaagugaagccggauc

SEQ ID NO: 2588711 - RNA, 19 nt, Artificial Sequence
  Description of Artificial Sequence: Synthetic oligonucleotide
auuuaaucugaugucuuca

SEQ ID NO: 2588712 - RNA, 19 nt, Artificial Sequence
  Description of Artificial Sequence: Synthetic oligonucleotide
ucuaucucuuccccaaauc

SEQ ID NO: 2588713 - RNA, 19 nt, Artificial Sequence
  Description of Artificial Sequence: Synthetic oligonucleotide
agugaccucguguagcaug

SEQ ID NO: 2588714 - RNA, 19 nt, Artificial Sequence
  Description of Artificial Sequence: Synthetic oligonucleotide
ugauuuaaucugaugucuu

SEQ ID NO: 2588715 - RNA, 19 nt, Artificial Sequence
  Description of Artificial Sequence: Synthetic oligonucleotide
ucuguuccaucuugaagug

SEQ ID NO: 2588716 - RNA, 19 nt, Artificial Sequence
  Description of Artificial Sequence: Synthetic oligonucleotide
uuccaucuugaagugaagc

SEQ ID NO: 2588717 - RNA, 19 nt, Artificial Sequence
  Description of Artificial Sequence: Synthetic oligonucleotide
ugaagaaguucagaguuau

SEQ ID NO: 2588718 - RNA, 19 nt, Artificial Sequence
  Description of Artificial Sequence: Synthetic oligonucleotide
gauucggaccaugucagug

SEQ ID NO: 2588719 - RNA, 19 nt, Artificial Sequence
  Description of Artificial Sequence: Synthetic oligonucleotide
ucagugaccucguguagca

SEQ ID NO: 2588720 - RNA, 19 nt, Artificial Sequence
  Description of Artificial Sequence: Synthetic oligonucleotide
uguccuguaagagcugaag

SEQ ID NO: 2588721 - RNA, 19 nt, Artificial Sequence
  Description of Artificial Sequence: Synthetic oligonucleotide
uucaccgaaauuguuuaac

SEQ ID NO: 2588722 - RNA, 19 nt, Artificial Sequence
  Description of Artificial Sequence: Synthetic oligonucleotide
ucagugguagacagguccu

SEQ ID NO: 2588723 - RNA, 19 nt, Artificial Sequence
  Description of Artificial Sequence: Synthetic oligonucleotide
uacaguuaaccuuguccug

SEQ ID NO: 2588724 - RNA, 19 nt, Artificial Sequence
  Description of Artificial Sequence: Synthetic oligonucleotide
uuuugauaauguucucaaa

SEQ ID NO: 2588725 - RNA, 19 nt, Artificial Sequence
  Description of Artificial Sequence: Synthetic oligonucleotide
augucuuauaguucgcaaa

SEQ ID NO: 2588726 - RNA, 19 nt, Artificial Sequence
  Description of Artificial Sequence: Synthetic oligonucleotide
uaggacuuuuauuugcuuu

SEQ ID NO: 2588727 - RNA, 19 nt, Artificial Sequence
  Description of Artificial Sequence: Synthetic oligonucleotide
guccuguaagagcugaagc

SEQ ID NO: 2588728 - RNA, 19 nt, Artificial Sequence
  Description of Artificial Sequence: Synthetic oligonucleotide
cuucuaggacuuuuauuug

SEQ ID NO: 2588729 - RNA, 19 nt, Artificial Sequence
  Description of Artificial Sequence: Synthetic oligonucleotide
ugguccagccuugaaagcc

SEQ ID NO: 2588730 - RNA, 19 nt, Artificial Sequence
  Description of Artificial Sequence: Synthetic oligonucleotide
cuuugcagcauaaaguacu

SEQ ID NO: 2588731 - RNA, 19 nt, Artificial Sequence
  Description of Artificial Sequence: Synthetic oligonucleotide
gagaaagguagcugguuga

SEQ ID NO: 2588732 - RNA, 19 nt, Artificial Sequence
  Description of Artificial Sequence: Synthetic oligonucleotide
agaguuauagagaaaggua

SEQ ID NO: 2588733 - RNA, 19 nt, Artificial Sequence
  Description of Artificial Sequence: Synthetic oligonucleotide
uuucucuaucucuucccca

SEQ ID NO: 2588734 - RNA, 19 nt, Artificial Sequence
  Description of Artificial Sequence: Synthetic oligonucleotide
auucggaccaugucaguga

SEQ ID NO: 2588735 - RNA, 19 nt, Artificial Sequence
  Description of Artificial Sequence: Synthetic oligonucleotide
uuucaaauacuuggaucug

SEQ ID NO: 2588736 - RNA, 19 nt, Artificial Sequence
  Description of Artificial Sequence: Synthetic oligonucleotide
auuguuuaacgaaaccccu

SEQ ID NO: 2588737 - RNA, 19 nt, Artificial Sequence
  Description of Artificial Sequence: Synthetic oligonucleotide
acgaaaccccugugaaggc

SEQ ID NO: 2588738 - RNA, 19 nt, Artificial Sequence
  Description of Artificial Sequence: Synthetic oligonucleotide
cuacaguuaaccuuguccu

SEQ ID NO: 2588739 - RNA, 19 nt, Artificial Sequence
  Description of Artificial Sequence: Synthetic oligonucleotide
uugaagaaguucagaguua

SEQ ID NO: 2588740 - RNA, 19 nt, Artificial Sequence
  Description of Artificial Sequence: Synthetic oligonucleotide
aaagccgccucuucaggaa

SEQ ID NO: 2588741 - RNA, 19 nt, Artificial Sequence
  Description of Artificial Sequence: Synthetic oligonucleotide
cauaaaguacuggaugauc

SEQ ID NO: 2588742 - RNA, 19 nt, Artificial Sequence
  Description of Artificial Sequence: Synthetic oligonucleotide
ugucagugaccucguguag

SEQ ID NO: 2588743 - RNA, 19 nt, Artificial Sequence
  Description of Artificial Sequence: Synthetic oligonucleotide
gugaaggcgauucggacca

SEQ ID NO: 2588744 - RNA, 19 nt, Artificial Sequence
  Description of Artificial Sequence: Synthetic oligonucleotide
cuguaagagcugaagcaug

SEQ ID NO: 2588745 - RNA, 19 nt, Artificial Sequence
  Description of Artificial Sequence: Synthetic oligonucleotide
caaaugucuuauaguucgc

SEQ ID NO: 2588746 - RNA, 19 nt, Artificial Sequence
  Description of Artificial Sequence: Synthetic oligonucleotide
ucucuuccccaaaucuuug

SEQ ID NO: 2588747 - RNA, 19 nt, Artificial Sequence
  Description of Artificial Sequence: Synthetic oligonucleotide
augucagugaccucgugua

SEQ ID NO: 2588748 - RNA, 19 nt, Artificial Sequence
  Description of Artificial Sequence: Synthetic oligonucleotide
acaguuaaccuuguccugu

SEQ ID NO: 2588749 - RNA, 19 nt, Artificial Sequence
  Description of Artificial Sequence: Synthetic oligonucleotide
agagggaucugucucccga

SEQ ID NO: 2588750 - RNA, 19 nt, Artificial Sequence
  Description of Artificial Sequence: Synthetic oligonucleotide
ucugcacuccucguaguag

SEQ ID NO: 2588751 - RNA, 19 nt, Artificial Sequence
  Description of Artificial Sequence: Synthetic oligonucleotide
guuucaccgaaauuguuua

SEQ ID NO: 2588752 - RNA, 19 nt, Artificial Sequence
  Description of Artificial Sequence: Synthetic oligonucleotide
guagcaugaccacggcagg

SEQ ID NO: 2588753 - RNA, 19 nt, Artificial Sequence
  Description of Artificial Sequence: Synthetic oligonucleotide
ugaagugaagccggaucag

SEQ ID NO: 2588754 - RNA, 19 nt, Artificial Sequence
  Description of Artificial Sequence: Synthetic oligonucleotide
accccugugaaggcgauuc

SEQ ID NO: 2588755 - RNA, 19 nt, Artificial Sequence
  Description of Artificial Sequence: Synthetic oligonucleotide
uccccaaaucuuugcagca

SEQ ID NO: 2588756 - RNA, 19 nt, Artificial Sequence
  Description of Artificial Sequence: Synthetic oligonucleotide
uguaaacuuugguccuggc

SEQ ID NO: 2588757 - RNA, 19 nt, Artificial Sequence
  Description of Artificial Sequence: Synthetic oligonucleotide
uuuggcaagcuugugccaa

SEQ ID NO: 2588758 - RNA, 19 nt, Artificial Sequence
  Description of Artificial Sequence: Synthetic oligonucleotide
ugguccuggcaguagacaa

SEQ ID NO: 2588759 - RNA, 19 nt, Artificial Sequence
  Description of Artificial Sequence: Synthetic oligonucleotide
uuucucggcauccgucucu

SEQ ID NO: 2588760 - RNA, 19 nt, Artificial Sequence
  Description of Artificial Sequence: Synthetic oligonucleotide
uucggaccaugucagugac

SEQ ID NO: 2588761 - RNA, 19 nt, Artificial Sequence
  Description of Artificial Sequence: Synthetic oligonucleotide
cuugaaagccgccucuuca

SEQ ID NO: 2588762 - RNA, 19 nt, Artificial Sequence
  Description of Artificial Sequence: Synthetic oligonucleotide
cucuguggugucuuuccgc

SEQ ID NO: 2588763 - RNA, 19 nt, Artificial Sequence
  Description of Artificial Sequence: Synthetic oligonucleotide
gaaagccgccucuucagga

SEQ ID NO: 2588764 - RNA, 19 nt, Artificial Sequence
  Description of Artificial Sequence: Synthetic oligonucleotide
guuuaacgaaaccccugug

SEQ ID NO: 2588765 - RNA, 19 nt, Artificial Sequence
  Description of Artificial Sequence: Synthetic oligonucleotide
gaccucguguagcaugacc

SEQ ID NO: 2588766 - RNA, 19 nt, Artificial Sequence
  Description of Artificial Sequence: Synthetic oligonucleotide
agggaucugucucccgagg

SEQ ID NO: 2588767 - RNA, 19 nt, Artificial Sequence
  Description of Artificial Sequence: Synthetic oligonucleotide
aagcuugugccaagccugg

SEQ ID NO: 2588768 - RNA, 19 nt, Artificial Sequence
  Description of Artificial Sequence: Synthetic oligonucleotide
gagccggcuacaguuaacc

SEQ ID NO: 2588769 - RNA, 19 nt, Artificial Sequence
  Description of Artificial Sequence: Synthetic oligonucleotide
aguuucaccgaaauuguuu

SEQ ID NO: 2588770 - RNA, 19 nt, Artificial Sequence
  Description of Artificial Sequence: Synthetic oligonucleotide
cugugaaggcgauucggac

SEQ ID NO: 2588771 - RNA, 19 nt, Artificial Sequence
  Description of Artificial Sequence: Synthetic oligonucleotide
ucggcauccgucucucuga

SEQ ID NO: 2588772 - RNA, 19 nt, Artificial Sequence
  Description of Artificial Sequence: Synthetic oligonucleotide
ucucuuucucggcauccgu

SEQ ID NO: 2588773 - RNA, 19 nt, Artificial Sequence
  Description of Artificial Sequence: Synthetic oligonucleotide
ugcacuccucguaguaggc

SEQ ID NO: 2588774 - RNA, 19 nt, Artificial Sequence
  Description of Artificial Sequence: Synthetic oligonucleotide
uugcagcauaaaguacugg

SEQ ID NO: 2588775 - RNA, 19 nt, Artificial Sequence
  Description of Artificial Sequence: Synthetic oligonucleotide
cacggcaggcucuucuagg

SEQ ID NO: 2588776 - RNA, 19 nt, Artificial Sequence
  Description of Artificial Sequence: Synthetic oligonucleotide
augaucagagggaucuguc

SEQ ID NO: 2588777 - RNA, 19 nt, Artificial Sequence
  Description of Artificial Sequence: Synthetic oligonucleotide
accucguguagcaugacca

SEQ ID NO: 2588778 - RNA, 19 nt, Artificial Sequence
  Description of Artificial Sequence: Synthetic oligonucleotide
guagacagguccuuuugaa

SEQ ID NO: 2588779 - RNA, 19 nt, Artificial Sequence
  Description of Artificial Sequence: Synthetic oligonucleotide
gucuuauaguucgcaaacc

SEQ ID NO: 2588780 - RNA, 19 nt, Artificial Sequence
  Description of Artificial Sequence: Synthetic oligonucleotide
aagagccggcuacaguuaa

SEQ ID NO: 2588781 - RNA, 19 nt, Artificial Sequence
  Description of Artificial Sequence: Synthetic oligonucleotide
gcuccuucugcacuccucg

SEQ ID NO: 2588782 - RNA, 19 nt, Artificial Sequence
  Description of Artificial Sequence: Synthetic oligonucleotide
uggcuguguaucucagcag

SEQ ID NO: 2588783 - RNA, 19 nt, Artificial Sequence
  Description of Artificial Sequence: Synthetic oligonucleotide
cucguguagcaugaccacg

SEQ ID NO: 2588784 - RNA, 19 nt, Artificial Sequence
  Description of Artificial Sequence: Synthetic oligonucleotide
cuuauaguucgcaaacccu

SEQ ID NO: 2588785 - RNA, 19 nt, Artificial Sequence
  Description of Artificial Sequence: Synthetic oligonucleotide
gacagguccuuuugaagaa

SEQ ID NO: 2588786 - RNA, 19 nt, Artificial Sequence
  Description of Artificial Sequence: Synthetic oligonucleotide
ggcgauucggaccauguca

SEQ ID NO: 2588787 - RNA, 19 nt, Artificial Sequence
  Description of Artificial Sequence: Synthetic oligonucleotide
acuuggaucuggcugugua

SEQ ID NO: 2588788 - RNA, 19 nt, Artificial Sequence
  Description of Artificial Sequence: Synthetic oligonucleotide
uuucaccgaaauuguuuaa

SEQ ID NO: 2588789 - RNA, 19 nt, Artificial Sequence
  Description of Artificial Sequence: Synthetic oligonucleotide
caccgaaauuguuuaacga

SEQ ID NO: 2588790 - RNA, 19 nt, Artificial Sequence
  Description of Artificial Sequence: Synthetic oligonucleotide
guuauagagaaagguagcu

SEQ ID NO: 2588791 - RNA, 19 nt, Artificial Sequence
  Description of Artificial Sequence: Synthetic oligonucleotide
gucagugaccucguguagc

SEQ ID NO: 2588792 - RNA, 19 nt, Artificial Sequence
  Description of Artificial Sequence: Synthetic oligonucleotide
cucuuucucggcauccguc

SEQ ID NO: 2588793 - RNA, 19 nt, Artificial Sequence
  Description of Artificial Sequence: Synthetic oligonucleotide
ugguugaaccuuagucuuc

SEQ ID NO: 2588794 - RNA, 19 nt, Artificial Sequence
  Description of Artificial Sequence: Synthetic oligonucleotide
gaaagguagcugguugaac

SEQ ID NO: 2588795 - RNA, 19 nt, Artificial Sequence
  Description of Artificial Sequence: Synthetic oligonucleotide
ucucccgaggcuccuucug

SEQ ID NO: 2588796 - RNA, 19 nt, Artificial Sequence
  Description of Artificial Sequence: Synthetic oligonucleotide
auuuggcaagcuugugcca

SEQ ID NO: 2588797 - RNA, 19 nt, Artificial Sequence
  Description of Artificial Sequence: Synthetic oligonucleotide
caguagacaaucuguucca

SEQ ID NO: 2588798 - RNA, 19 nt, Artificial Sequence
  Description of Artificial Sequence: Synthetic oligonucleotide
cuaucucuuccccaaaucu

SEQ ID NO: 2588799 - RNA, 19 nt, Artificial Sequence
  Description of Artificial Sequence: Synthetic oligonucleotide
aggcgauucggaccauguc

SEQ ID NO: 2588800 - RNA, 19 nt, Artificial Sequence
  Description of Artificial Sequence: Synthetic oligonucleotide
aaggcgauucggaccaugu

SEQ ID NO: 2588801 - RNA, 19 nt, Artificial Sequence
  Description of Artificial Sequence: Synthetic oligonucleotide
uccgcucagccaagagccg

SEQ ID NO: 2588802 - RNA, 19 nt, Artificial Sequence
  Description of Artificial Sequence: Synthetic oligonucleotide
auagagaaagguagcuggu

SEQ ID NO: 2588803 - RNA, 19 nt, Artificial Sequence
  Description of Artificial Sequence: Synthetic oligonucleotide
uucugcacuccucguagua

SEQ ID NO: 2588804 - RNA, 19 nt, Artificial Sequence
  Description of Artificial Sequence: Synthetic oligonucleotide
ccggcuacaguuaaccuug

SEQ ID NO: 2588805 - RNA, 19 nt, Artificial Sequence
  Description of Artificial Sequence: Synthetic oligonucleotide
acggcaggcucuucuagga

SEQ ID NO: 2588806 - RNA, 19 nt, Artificial Sequence
  Description of Artificial Sequence: Synthetic oligonucleotide
agaauuuggcaagcuugug

SEQ ID NO: 2588807 - RNA, 19 nt, Artificial Sequence
  Description of Artificial Sequence: Synthetic oligonucleotide
cucggcauccgucucucug

SEQ ID NO: 2588808 - RNA, 19 nt, Artificial Sequence
  Description of Artificial Sequence: Synthetic oligonucleotide
acaaucuguuccaucuuga

SEQ ID NO: 2588809 - RNA, 19 nt, Artificial Sequence
  Description of Artificial Sequence: Synthetic oligonucleotide
aucugaugucuucaauuuu

SEQ ID NO: 2588810 - RNA, 19 nt, Artificial Sequence
  Description of Artificial Sequence: Synthetic oligonucleotide
cuuuccgcucagccaagag

SEQ ID NO: 2588811 - RNA, 19 nt, Artificial Sequence
  Description of Artificial Sequence: Synthetic oligonucleotide
ugugccaagccugguccag

SEQ ID NO: 2588812 - RNA, 19 nt, Artificial Sequence
  Description of Artificial Sequence: Synthetic oligonucleotide
uccuucugcacuccucgua

SEQ ID NO: 2588813 - RNA, 19 nt, Artificial Sequence
  Description of Artificial Sequence: Synthetic oligonucleotide
aagugaagccggaucaguu

SEQ ID NO: 2588814 - RNA, 19 nt, Artificial Sequence
  Description of Artificial Sequence: Synthetic oligonucleotide
gaaaccccugugaaggcga

SEQ ID NO: 2588815 - RNA, 19 nt, Artificial Sequence
  Description of Artificial Sequence: Synthetic oligonucleotide
gaucugucucccgaggcuc

SEQ ID NO: 2588816 - RNA, 19 nt, Artificial Sequence
  Description of Artificial Sequence: Synthetic oligonucleotide
gcugguugaaccuuagucu

SEQ ID NO: 2588817 - RNA, 19 nt, Artificial Sequence
  Description of Artificial Sequence: Synthetic oligonucleotide
agccuugaaagccgccucu

SEQ ID NO: 2588818 - RNA, 19 nt, Artificial Sequence
  Description of Artificial Sequence: Synthetic oligonucleotide
cagaguuauagagaaaggu

SEQ ID NO: 2588819 - RNA, 19 nt, Artificial Sequence
  Description of Artificial Sequence: Synthetic oligonucleotide
acagguccuuuugaagaag

SEQ ID NO: 2588820 - RNA, 19 nt, Artificial Sequence
  Description of Artificial Sequence: Synthetic oligonucleotide
cuggcaguagacaaucugu

SEQ ID NO: 2588821 - RNA, 19 nt, Artificial Sequence
  Description of Artificial Sequence: Synthetic oligonucleotide
gguccuuuugaagaaguuc

SEQ ID NO: 2588822 - RNA, 19 nt, Artificial Sequence
  Description of Artificial Sequence: Synthetic oligonucleotide
cugguccagccuugaaagc

SEQ ID NO: 2588823 - RNA, 19 nt, Artificial Sequence
  Description of Artificial Sequence: Synthetic oligonucleotide
cuuugguccuggcaguaga

SEQ ID NO: 2588824 - RNA, 19 nt, Artificial Sequence
  Description of Artificial Sequence: Synthetic oligonucleotide
uugguccuggcaguagaca

SEQ ID NO: 2588825 - RNA, 19 nt, Artificial Sequence
  Description of Artificial Sequence: Synthetic oligonucleotide
agaaagguagcugguugaa

SEQ ID NO: 2588826 - RNA, 19 nt, Artificial Sequence
  Description of Artificial Sequence: Synthetic oligonucleotide
gaugaucagagggaucugu

SEQ ID NO: 2588827 - RNA, 19 nt, Artificial Sequence
  Description of Artificial Sequence: Synthetic oligonucleotide
ccuucugcacuccucguag

SEQ ID NO: 2588828 - RNA, 19 nt, Artificial Sequence
  Description of Artificial Sequence: Synthetic oligonucleotide
uccagccuugaaagccgcc

SEQ ID NO: 2588829 - RNA, 19 nt, Artificial Sequence
  Description of Artificial Sequence: Synthetic oligonucleotide
uugugccaagccuggucca

SEQ ID NO: 2588830 - RNA, 19 nt, Artificial Sequence
  Description of Artificial Sequence: Synthetic oligonucleotide
ucccgaggcuccuucugca

SEQ ID NO: 2588831 - RNA, 19 nt, Artificial Sequence
  Description of Artificial Sequence: Synthetic oligonucleotide
uagcugguugaaccuuagu

SEQ ID NO: 2588832 - RNA, 19 nt, Artificial Sequence
  Description of Artificial Sequence: Synthetic oligonucleotide
aguuaaccuuguccuguaa

SEQ ID NO: 2588833 - RNA, 19 nt, Artificial Sequence
  Description of Artificial Sequence: Synthetic oligonucleotide
uuguccuguaagagcugaa

SEQ ID NO: 2588834 - RNA, 19 nt, Artificial Sequence
  Description of Artificial Sequence: Synthetic oligonucleotide
gguccagccuugaaagccg

SEQ ID NO: 2588835 - RNA, 19 nt, Artificial Sequence
  Description of Artificial Sequence: Synthetic oligonucleotide
ucggaccaugucagugacc

SEQ ID NO: 2588836 - RNA, 19 nt, Artificial Sequence
  Description of Artificial Sequence: Synthetic oligonucleotide
gguagacagguccuuuuga

SEQ ID NO: 2588837 - RNA, 19 nt, Artificial Sequence
  Description of Artificial Sequence: Synthetic oligonucleotide
gugaagccggaucaguucu

SEQ ID NO: 2588838 - RNA, 19 nt, Artificial Sequence
  Description of Artificial Sequence: Synthetic oligonucleotide
aaguuucaccgaaauuguu

SEQ ID NO: 2588839 - RNA, 19 nt, Artificial Sequence
  Description of Artificial Sequence: Synthetic oligonucleotide
caagccugguccagccuug

SEQ ID NO: 2588840 - RNA, 19 nt, Artificial Sequence
  Description of Artificial Sequence: Synthetic oligonucleotide
ggcaguagacaaucuguuc

SEQ ID NO: 2588841 - RNA, 19 nt, Artificial Sequence
  Description of Artificial Sequence: Synthetic oligonucleotide
gaaggcgauucggaccaug

SEQ ID NO: 2588842 - RNA, 19 nt, Artificial Sequence
  Description of Artificial Sequence: Synthetic oligonucleotide
ucucagugguagacagguc

SEQ ID NO: 2588843 - RNA, 19 nt, Artificial Sequence
  Description of Artificial Sequence: Synthetic oligonucleotide
gaagccggaucaguucuuc

SEQ ID NO: 2588844 - RNA, 19 nt, Artificial Sequence
  Description of Artificial Sequence: Synthetic oligonucleotide
cagcucccggccacgauac

SEQ ID NO: 2588845 - RNA, 19 nt, Artificial Sequence
  Description of Artificial Sequence: Synthetic oligonucleotide
gcgauucggaccaugucag

SEQ ID NO: 2588846 - RNA, 19 nt, Artificial Sequence
  Description of Artificial Sequence: Synthetic oligonucleotide
gggaucugucucccgaggc

SEQ ID NO: 2588847 - RNA, 19 nt, Artificial Sequence
  Description of Artificial Sequence: Synthetic oligonucleotide
agcugaagcauggcuuucu

SEQ ID NO: 2588848 - RNA, 19 nt, Artificial Sequence
  Description of Artificial Sequence: Synthetic oligonucleotide
ccgaaauuguuuaacgaaa

SEQ ID NO: 2588849 - RNA, 19 nt, Artificial Sequence
  Description of Artificial Sequence: Synthetic oligonucleotide
gccggaucaguucuucagc

SEQ ID NO: 2588850 - RNA, 19 nt, Artificial Sequence
  Description of Artificial Sequence: Synthetic oligonucleotide
caugucagugaccucgugu

SEQ ID NO: 2588851 - RNA, 19 nt, Artificial Sequence
  Description of Artificial Sequence: Synthetic oligonucleotide
ccucguaguaggcauucag

SEQ ID NO: 2588852 - RNA, 19 nt, Artificial Sequence
  Description of Artificial Sequence: Synthetic oligonucleotide
aguagacaaucuguuccau

SEQ ID NO: 2588853 - RNA, 19 nt, Artificial Sequence
  Description of Artificial Sequence: Synthetic oligonucleotide
gcauccgucucucugaccu

SEQ ID NO: 2588854 - RNA, 19 nt, Artificial Sequence
  Description of Artificial Sequence: Synthetic oligonucleotide
uggcaagcuugugccaagc

SEQ ID NO: 2588855 - RNA, 19 nt, Artificial Sequence
  Description of Artificial Sequence: Synthetic oligonucleotide
ggucaucucagugguagac

SEQ ID NO: 2588856 - RNA, 19 nt, Artificial Sequence
  Description of Artificial Sequence: Synthetic oligonucleotide
agccggcuacaguuaaccu

SEQ ID NO: 2588857 - RNA, 19 nt, Artificial Sequence
  Description of Artificial Sequence: Synthetic oligonucleotide
agagccggcuacaguuaac

SEQ ID NO: 2588858 - RNA, 19 nt, Artificial Sequence
  Description of Artificial Sequence: Synthetic oligonucleotide
ucuuuccgcucagccaaga

SEQ ID NO: 2588859 - RNA, 19 nt, Artificial Sequence
  Description of Artificial Sequence: Synthetic oligonucleotide
gugaccucguguagcauga

SEQ ID NO: 2588860 - RNA, 19 nt, Artificial Sequence
  Description of Artificial Sequence: Synthetic oligonucleotide
gaagugaagccggaucagu

SEQ ID NO: 2588861 - RNA, 19 nt, Artificial Sequence
  Description of Artificial Sequence: Synthetic oligonucleotide
cugguugaaccuuagucuu

SEQ ID NO: 2588862 - RNA, 19 nt, Artificial Sequence
  Description of Artificial Sequence: Synthetic oligonucleotide
auacuuggaucuggcugug

SEQ ID NO: 2588863 - RNA, 19 nt, Artificial Sequence
  Description of Artificial Sequence: Synthetic oligonucleotide
ggcaagcuugugccaagcc

SEQ ID NO: 2588864 - RNA, 19 nt, Artificial Sequence
  Description of Artificial Sequence: Synthetic oligonucleotide
cagccuugaaagccgccuc

SEQ ID NO: 2588865 - RNA, 19 nt, Artificial Sequence
  Description of Artificial Sequence: Synthetic oligonucleotide
agugguagacagguccuuu

SEQ ID NO: 2588866 - RNA, 19 nt, Artificial Sequence
  Description of Artificial Sequence: Synthetic oligonucleotide
cgccucuucaggaacuucc

SEQ ID NO: 2588867 - RNA, 19 nt, Artificial Sequence
  Description of Artificial Sequence: Synthetic oligonucleotide
aucuggcuguguaucucag

SEQ ID NO: 2588868 - RNA, 19 nt, Artificial Sequence
  Description of Artificial Sequence: Synthetic oligonucleotide
gaucaguucuucagcuucu

SEQ ID NO: 2588869 - RNA, 19 nt, Artificial Sequence
  Description of Artificial Sequence: Synthetic oligonucleotide
gcauucaggugcuggguca

SEQ ID NO: 2588870 - RNA, 19 nt, Artificial Sequence
  Description of Artificial Sequence: Synthetic oligonucleotide
caaaucuuugcagcauaaa

SEQ ID NO: 2588871 - RNA, 19 nt, Artificial Sequence
  Description of Artificial Sequence: Synthetic oligonucleotide
cuccucguaguaggcauuc

SEQ ID NO: 2588872 - RNA, 19 nt, Artificial Sequence
  Description of Artificial Sequence: Synthetic oligonucleotide
uucucggcauccgucucuc

SEQ ID NO: 2588873 - RNA, 19 nt, Artificial Sequence
  Description of Artificial Sequence: Synthetic oligonucleotide
agccaagagccggcuacag

SEQ ID NO: 2588874 - RNA, 19 nt, Artificial Sequence
  Description of Artificial Sequence: Synthetic oligonucleotide
gcuugugccaagccugguc

SEQ ID NO: 2588875 - RNA, 19 nt, Artificial Sequence
  Description of Artificial Sequence: Synthetic oligonucleotide
uccucguaguaggcauuca

SEQ ID NO: 2588876 - RNA, 19 nt, Artificial Sequence
  Description of Artificial Sequence: Synthetic oligonucleotide
gcaagcuugugccaagccu

SEQ ID NO: 2588877 - RNA, 19 nt, Artificial Sequence
  Description of Artificial Sequence: Synthetic oligonucleotide
accacggcaggcucuucua

SEQ ID NO: 2588878 - RNA, 19 nt, Artificial Sequence
  Description of Artificial Sequence: Synthetic oligonucleotide
gaggcuccuucugcacucc

SEQ ID NO: 2588879 - RNA, 19 nt, Artificial Sequence
  Description of Artificial Sequence: Synthetic oligonucleotide
cagguccuuuugaagaagu

SEQ ID NO: 2588880 - RNA, 19 nt, Artificial Sequence
  Description of Artificial Sequence: Synthetic oligonucleotide
ccugugaaggcgauucgga

SEQ ID NO: 2588881 - RNA, 19 nt, Artificial Sequence
  Description of Artificial Sequence: Synthetic oligonucleotide
gaagaaguucagaguuaua

SEQ ID NO: 2588882 - RNA, 19 nt, Artificial Sequence
  Description of Artificial Sequence: Synthetic oligonucleotide
cccugugaaggcgauucgg

SEQ ID NO: 2588883 - RNA, 19 nt, Artificial Sequence
  Description of Artificial Sequence: Synthetic oligonucleotide
uggugucuuuccgcucagc

SEQ ID NO: 2588884 - RNA, 19 nt, Artificial Sequence
  Description of Artificial Sequence: Synthetic oligonucleotide
cuuggaucuggcuguguau

SEQ ID NO: 2588885 - RNA, 19 nt, Artificial Sequence
  Description of Artificial Sequence: Synthetic oligonucleotide
ccucguguagcaugaccac

SEQ ID NO: 2588886 - RNA, 19 nt, Artificial Sequence
  Description of Artificial Sequence: Synthetic oligonucleotide
caagagccggcuacaguua

SEQ ID NO: 2588887 - RNA, 19 nt, Artificial Sequence
  Description of Artificial Sequence: Synthetic oligonucleotide
aaaccccugugaaggcgau

SEQ ID NO: 2588888 - RNA, 19 nt, Artificial Sequence
  Description of Artificial Sequence: Synthetic oligonucleotide
accaugucagugaccucgu

SEQ ID NO: 2588889 - RNA, 19 nt, Artificial Sequence
  Description of Artificial Sequence: Synthetic oligonucleotide
uacuuggaucuggcugugu

SEQ ID NO: 2588890 - RNA, 19 nt, Artificial Sequence
  Description of Artificial Sequence: Synthetic oligonucleotide
caguuaaccuuguccugua

SEQ ID NO: 2588891 - RNA, 19 nt, Artificial Sequence
  Description of Artificial Sequence: Synthetic oligonucleotide
guccagccuugaaagccgc

SEQ ID NO: 2588892 - RNA, 19 nt, Artificial Sequence
  Description of Artificial Sequence: Synthetic oligonucleotide
agguagcugguugaaccuu

SEQ ID NO: 2588893 - RNA, 19 nt, Artificial Sequence
  Description of Artificial Sequence: Synthetic oligonucleotide
ccaaaucuuugcagcauaa

SEQ ID NO: 2588894 - RNA, 19 nt, Artificial Sequence
  Description of Artificial Sequence: Synthetic oligonucleotide
cacuccucguaguaggcau

SEQ ID NO: 2588895 - RNA, 19 nt, Artificial Sequence
  Description of Artificial Sequence: Synthetic oligonucleotide
gugccaagccugguccagc

SEQ ID NO: 2588896 - RNA, 19 nt, Artificial Sequence
  Description of Artificial Sequence: Synthetic oligonucleotide
agguccuuuugaagaaguu

SEQ ID NO: 2588897 - RNA, 19 nt, Artificial Sequence
  Description of Artificial Sequence: Synthetic oligonucleotide
cuccucuguaaacuuuggu

SEQ ID NO: 2588898 - RNA, 19 nt, Artificial Sequence
  Description of Artificial Sequence: Synthetic oligonucleotide
cgaaaccccugugaaggcg

SEQ ID NO: 2588899 - RNA, 19 nt, Artificial Sequence
  Description of Artificial Sequence: Synthetic oligonucleotide
ucucggcauccgucucucu

SEQ ID NO: 2588900 - RNA, 19 nt, Artificial Sequence
  Description of Artificial Sequence: Synthetic oligonucleotide
augaccacggcaggcucuu

SEQ ID NO: 2588901 - RNA, 19 nt, Artificial Sequence
  Description of Artificial Sequence: Synthetic oligonucleotide
guguaucucagcagaacuu

SEQ ID NO: 2588902 - RNA, 19 nt, Artificial Sequence
  Description of Artificial Sequence: Synthetic oligonucleotide
caugaccacggcaggcucu

SEQ ID NO: 2588903 - RNA, 19 nt, Artificial Sequence
  Description of Artificial Sequence: Synthetic oligonucleotide
cuguuccaucuugaaguga

SEQ ID NO: 2588904 - RNA, 19 nt, Artificial Sequence
  Description of Artificial Sequence: Synthetic oligonucleotide
cuaggacuuuuauuugcuu

SEQ ID NO: 2588905 - RNA, 19 nt, Artificial Sequence
  Description of Artificial Sequence: Synthetic oligonucleotide
ccaagagccggcuacaguu

SEQ ID NO: 2588906 - RNA, 19 nt, Artificial Sequence
  Description of Artificial Sequence: Synthetic oligonucleotide
gcucccggccacgauacug

SEQ ID NO: 2588907 - RNA, 19 nt, Artificial Sequence
  Description of Artificial Sequence: Synthetic oligonucleotide
ugaccucguguagcaugac

SEQ ID NO: 2588908 - RNA, 19 nt, Artificial Sequence
  Description of Artificial Sequence: Synthetic oligonucleotide
ggaugaucagagggaucug

SEQ ID NO: 2588909 - RNA, 19 nt, Artificial Sequence
  Description of Artificial Sequence: Synthetic oligonucleotide
gugguagacagguccuuuu

SEQ ID NO: 2588910 - RNA, 19 nt, Artificial Sequence
  Description of Artificial Sequence: Synthetic oligonucleotide
ggcuacaguuaaccuuguc

SEQ ID NO: 2588911 - RNA, 19 nt, Artificial Sequence
  Description of Artificial Sequence: Synthetic oligonucleotide
gcaugaccacggcaggcuc

SEQ ID NO: 2588912 - RNA, 19 nt, Artificial Sequence
  Description of Artificial Sequence: Synthetic oligonucleotide
ggcauccgucucucugacc

SEQ ID NO: 2588913 - RNA, 19 nt, Artificial Sequence
  Description of Artificial Sequence: Synthetic oligonucleotide
gguagcugguugaaccuua

SEQ ID NO: 2588914 - RNA, 19 nt, Artificial Sequence
  Description of Artificial Sequence: Synthetic oligonucleotide
gcagcauaaaguacuggau

SEQ ID NO: 2588915 - RNA, 19 nt, Artificial Sequence
  Description of Artificial Sequence: Synthetic oligonucleotide
ccacggcaggcucuucuag

SEQ ID NO: 2588916 - RNA, 19 nt, Artificial Sequence
  Description of Artificial Sequence: Synthetic oligonucleotide
agcuugugccaagccuggu

SEQ ID NO: 2588917 - RNA, 19 nt, Artificial Sequence
  Description of Artificial Sequence: Synthetic oligonucleotide
gggucaucucagugguaga

SEQ ID NO: 2588918 - RNA, 19 nt, Artificial Sequence
  Description of Artificial Sequence: Synthetic oligonucleotide
ucccggccacgauacuguu

SEQ ID NO: 2588919 - RNA, 19 nt, Artificial Sequence
  Description of Artificial Sequence: Synthetic oligonucleotide
cgucucucugaccuucuuc

SEQ ID NO: 2588920 - RNA, 19 nt, Artificial Sequence
  Description of Artificial Sequence: Synthetic oligonucleotide
acuccucguaguaggcauu

SEQ ID NO: 2588921 - RNA, 19 nt, Artificial Sequence
  Description of Artificial Sequence: Synthetic oligonucleotide
guaucucagcagaacuuuu

SEQ ID NO: 2588922 - RNA, 19 nt, Artificial Sequence
  Description of Artificial Sequence: Synthetic oligonucleotide
ggugcugggucaucucagu

SEQ ID NO: 2588923 - RNA, 19 nt, Artificial Sequence
  Description of Artificial Sequence: Synthetic oligonucleotide
ccccugugaaggcgauucg

SEQ ID NO: 2588924 - RNA, 19 nt, Artificial Sequence
  Description of Artificial Sequence: Synthetic oligonucleotide
cccaaaucuuugcagcaua

SEQ ID NO: 2588925 - RNA, 19 nt, Artificial Sequence
  Description of Artificial Sequence: Synthetic oligonucleotide
gcuguguaucucagcagaa

SEQ ID NO: 2588926 - RNA, 19 nt, Artificial Sequence
  Description of Artificial Sequence: Synthetic oligonucleotide
cgaggcuccuucugcacuc

SEQ ID NO: 2588927 - RNA, 19 nt, Artificial Sequence
  Description of Artificial Sequence: Synthetic oligonucleotide
gccggcuacaguuaaccuu

SEQ ID NO: 2588928 - RNA, 19 nt, Artificial Sequence
  Description of Artificial Sequence: Synthetic oligonucleotide
agcucccggccacgauacu

SEQ ID NO: 2588929 - RNA, 19 nt, Artificial Sequence
  Description of Artificial Sequence: Synthetic oligonucleotide
ugaaggcgauucggaccau

SEQ ID NO: 2588930 - RNA, 19 nt, Artificial Sequence
  Description of Artificial Sequence: Synthetic oligonucleotide
ccuguaagagcugaagcau

SEQ ID NO: 2588931 - RNA, 19 nt, Artificial Sequence
  Description of Artificial Sequence: Synthetic oligonucleotide
cagccaagagccggcuaca

SEQ ID NO: 2588932 - RNA, 19 nt, Artificial Sequence
  Description of Artificial Sequence: Synthetic oligonucleotide
gcauaaaguacuggaugau

SEQ ID NO: 2588933 - RNA, 19 nt, Artificial Sequence
  Description of Artificial Sequence: Synthetic oligonucleotide
ccggaucaguucuucagcu

SEQ ID NO: 2588934 - RNA, 19 nt, Artificial Sequence
  Description of Artificial Sequence: Synthetic oligonucleotide
gcacuccucguaguaggca

SEQ ID NO: 2588935 - RNA, 19 nt, Artificial Sequence
  Description of Artificial Sequence: Synthetic oligonucleotide
cucagccaagagccggcua

SEQ ID NO: 2588936 - RNA, 19 nt, Artificial Sequence
  Description of Artificial Sequence: Synthetic oligonucleotide
ccaugucagugaccucgug

SEQ ID NO: 2588937 - RNA, 19 nt, Artificial Sequence
  Description of Artificial Sequence: Synthetic oligonucleotide
cggaccaugucagugaccu

SEQ ID NO: 2588938 - RNA, 19 nt, Artificial Sequence
  Description of Artificial Sequence: Synthetic oligonucleotide
cuccuucugcacuccucgu

SEQ ID NO: 2588939 - RNA, 19 nt, Artificial Sequence
  Description of Artificial Sequence: Synthetic oligonucleotide
cugggucaucucaguggua

SEQ ID NO: 2588940 - RNA, 19 nt, Artificial Sequence
  Description of Artificial Sequence: Synthetic oligonucleotide
ugaccacggcaggcucuuc

SEQ ID NO: 2588941 - RNA, 19 nt, Artificial Sequence
  Description of Artificial Sequence: Synthetic oligonucleotide
ccggccacgauacuguuuu

SEQ ID NO: 2588942 - RNA, 19 nt, Artificial Sequence
  Description of Artificial Sequence: Synthetic oligonucleotide
gccaagagccggcuacagu

SEQ ID NO: 2588943 - RNA, 19 nt, Artificial Sequence
  Description of Artificial Sequence: Synthetic oligonucleotide
ccagccuugaaagccgccu

SEQ ID NO: 2588944 - RNA, 19 nt, Artificial Sequence
  Description of Artificial Sequence: Synthetic oligonucleotide
cggcauccgucucucugac

SEQ ID NO: 2588945 - RNA, 19 nt, Artificial Sequence
  Description of Artificial Sequence: Synthetic oligonucleotide
cggcaggcucuucuaggac

SEQ ID NO: 2588946 - RNA, 19 nt, Artificial Sequence
  Description of Artificial Sequence: Synthetic oligonucleotide
uggcagcacuguggagguu

SEQ ID NO: 2588947 - RNA, 19 nt, Artificial Sequence
  Description of Artificial Sequence: Synthetic oligonucleotide
cauccgucucucugaccuu

SEQ ID NO: 2588948 - RNA, 19 nt, Artificial Sequence
  Description of Artificial Sequence: Synthetic oligonucleotide
gccuugaaagccgccucuu

SEQ ID NO: 2588949 - RNA, 19 nt, Artificial Sequence
  Description of Artificial Sequence: Synthetic oligonucleotide
ggcagcucccggccacgau

SEQ ID NO: 2588950 - RNA, 19 nt, Artificial Sequence
  Description of Artificial Sequence: Synthetic oligonucleotide
cggaucaguucuucagcuu

SEQ ID NO: 2588951 - RNA, 19 nt, Artificial Sequence
  Description of Artificial Sequence: Synthetic oligonucleotide
cccggccacgauacuguuu

SEQ ID NO: 2588952 - RNA, 19 nt, Artificial Sequence
  Description of Artificial Sequence: Synthetic oligonucleotide
auaaaugaaauccaggugg

SEQ ID NO: 2588953 - RNA, 19 nt, Artificial Sequence
  Description of Artificial Sequence: Synthetic oligonucleotide
aaagcugauggucagugcc

SEQ ID NO: 2588954 - RNA, 19 nt, Artificial Sequence
  Description of Artificial Sequence: Synthetic oligonucleotide
aaacuagauaauuggaugg

SEQ ID NO: 2588955 - RNA, 19 nt, Artificial Sequence
  Description of Artificial Sequence: Synthetic oligonucleotide
uggucaacaaagcugaugg

SEQ ID NO: 2588956 - RNA, 19 nt, Artificial Sequence
  Description of Artificial Sequence: Synthetic oligonucleotide
ugucagauaaaugaaaucc

SEQ ID NO: 2588957 - RNA, 19 nt, Artificial Sequence
  Description of Artificial Sequence: Synthetic oligonucleotide
uauugugccaauuucagug

SEQ ID NO: 2588958 - RNA, 19 nt, Artificial Sequence
  Description of Artificial Sequence: Synthetic oligonucleotide
gaaacuagauaauuggaug

SEQ ID NO: 2588959 - RNA, 19 nt, Artificial Sequence
  Description of Artificial Sequence: Synthetic oligonucleotide
agauaaaugaaauccaggu

SEQ ID NO: 2588960 - RNA, 19 nt, Artificial Sequence
  Description of Artificial Sequence: Synthetic oligonucleotide
acucagauaggccauuugc

SEQ ID NO: 2588961 - RNA, 19 nt, Artificial Sequence
  Description of Artificial Sequence: Synthetic oligonucleotide
ucagauaaaugaaauccag

SEQ ID NO: 2588962 - RNA, 19 nt, Artificial Sequence
  Description of Artificial Sequence: Synthetic oligonucleotide
aaugaaauccagguggcuc

SEQ ID NO: 2588963 - RNA, 19 nt, Artificial Sequence
  Description of Artificial Sequence: Synthetic oligonucleotide
uaugcugcaacuccucugg

SEQ ID NO: 2588964 - RNA, 19 nt, Artificial Sequence
  Description of Artificial Sequence: Synthetic oligonucleotide
auaagccagaacuucgagc

SEQ ID NO: 2588965 - RNA, 19 nt, Artificial Sequence
  Description of Artificial Sequence: Synthetic oligonucleotide
aauuggaugggguugaaua

SEQ ID NO: 2588966 - RNA, 19 nt, Artificial Sequence
  Description of Artificial Sequence: Synthetic oligonucleotide
gauaaaugaaauccaggug

SEQ ID NO: 2588967 - RNA, 19 nt, Artificial Sequence
  Description of Artificial Sequence: Synthetic oligonucleotide
aacuggagaccacagcucg

SEQ ID NO: 2588968 - RNA, 19 nt, Artificial Sequence
  Description of Artificial Sequence: Synthetic oligonucleotide
ggugaaacuagauaauugg

SEQ ID NO: 2588969 - RNA, 19 nt, Artificial Sequence
  Description of Artificial Sequence: Synthetic oligonucleotide
ugcugaaagagccaggucu

SEQ ID NO: 2588970 - RNA, 19 nt, Artificial Sequence
  Description of Artificial Sequence: Synthetic oligonucleotide
ugaaacuagauaauuggau

SEQ ID NO: 2588971 - RNA, 19 nt, Artificial Sequence
  Description of Artificial Sequence: Synthetic oligonucleotide
acuccagccgucuauuugc

SEQ ID NO: 2588972 - RNA, 19 nt, Artificial Sequence
  Description of Artificial Sequence: Synthetic oligonucleotide
auuggaugggguugaauac

SEQ ID NO: 2588973 - RNA, 19 nt, Artificial Sequence
  Description of Artificial Sequence: Synthetic oligonucleotide
uaaaugaaauccagguggc

SEQ ID NO: 2588974 - RNA, 19 nt, Artificial Sequence
  Description of Artificial Sequence: Synthetic oligonucleotide
uugaauaccacugcaaacu

SEQ ID NO: 2588975 - RNA, 19 nt, Artificial Sequence
  Description of Artificial Sequence: Synthetic oligonucleotide
aacuagauaauuggauggg

SEQ ID NO: 2588976 - RNA, 19 nt, Artificial Sequence
  Description of Artificial Sequence: Synthetic oligonucleotide
ugaaggagcaggaucauaa

SEQ ID NO: 2588977 - RNA, 19 nt, Artificial Sequence
  Description of Artificial Sequence: Synthetic oligonucleotide
aggugugaucgcuacagcc

SEQ ID NO: 2588978 - RNA, 19 nt, Artificial Sequence
  Description of Artificial Sequence: Synthetic oligonucleotide
augccgaccacucugccgc

SEQ ID NO: 2588979 - RNA, 19 nt, Artificial Sequence
  Description of Artificial Sequence: Synthetic oligonucleotide
ucagugaagaucucaggcc

SEQ ID NO: 2588980 - RNA, 19 nt, Artificial Sequence
  Description of Artificial Sequence: Synthetic oligonucleotide
cagauaaaugaaauccagg

SEQ ID NO: 2588981 - RNA, 19 nt, Artificial Sequence
  Description of Artificial Sequence: Synthetic oligonucleotide
uggugaaacuagauaauug

SEQ ID NO: 2588982 - RNA, 19 nt, Artificial Sequence
  Description of Artificial Sequence: Synthetic oligonucleotide
gauggucagugccagagcc

SEQ ID NO: 2588983 - RNA, 19 nt, Artificial Sequence
  Description of Artificial Sequence: Synthetic oligonucleotide
uguuccggcaguaaugcug

SEQ ID NO: 2588984 - RNA, 19 nt, Artificial Sequence
  Description of Artificial Sequence: Synthetic oligonucleotide
gaaccagucauagaggccc

SEQ ID NO: 2588985 - RNA, 19 nt, Artificial Sequence
  Description of Artificial Sequence: Synthetic oligonucleotide
ugacagaaauggcaagagg

SEQ ID NO: 2588986 - RNA, 19 nt, Artificial Sequence
  Description of Artificial Sequence: Synthetic oligonucleotide
gaucgcuacagccugagca

SEQ ID NO: 2588987 - RNA, 19 nt, Artificial Sequence
  Description of Artificial Sequence: Synthetic oligonucleotide
uggaaccagucauagaggc

SEQ ID NO: 2588988 - RNA, 19 nt, Artificial Sequence
  Description of Artificial Sequence: Synthetic oligonucleotide
ucuauuugccccaggcugc

SEQ ID NO: 2588989 - RNA, 19 nt, Artificial Sequence
  Description of Artificial Sequence: Synthetic oligonucleotide
uacugacugggccaaagcc

SEQ ID NO: 2588990 - RNA, 19 nt, Artificial Sequence
  Description of Artificial Sequence: Synthetic oligonucleotide
agaaauggcaagaggaguc

SEQ ID NO: 2588991 - RNA, 19 nt, Artificial Sequence
  Description of Artificial Sequence: Synthetic oligonucleotide
gagugugugacccagagcu

SEQ ID NO: 2588992 - RNA, 19 nt, Artificial Sequence
  Description of Artificial Sequence: Synthetic oligonucleotide
uguucugggaucuccuucc

SEQ ID NO: 2588993 - RNA, 19 nt, Artificial Sequence
  Description of Artificial Sequence: Synthetic oligonucleotide
gucuauuugccccaggcug

SEQ ID NO: 2588994 - RNA, 19 nt, Artificial Sequence
  Description of Artificial Sequence: Synthetic oligonucleotide
gagauaagccagaacuucg

SEQ ID NO: 2588995 - RNA, 19 nt, Artificial Sequence
  Description of Artificial Sequence: Synthetic oligonucleotide
aacugaaggagcaggauca

SEQ ID NO: 2588996 - RNA, 19 nt, Artificial Sequence
  Description of Artificial Sequence: Synthetic oligonucleotide
aucgcuacagccugagcac

SEQ ID NO: 2588997 - RNA, 19 nt, Artificial Sequence
  Description of Artificial Sequence: Synthetic oligonucleotide
uuggcuaaacucccaacug

SEQ ID NO: 2588998 - RNA, 19 nt, Artificial Sequence
  Description of Artificial Sequence: Synthetic oligonucleotide
agcugcuuggcuaaacucc

SEQ ID NO: 2588999 - RNA, 19 nt, Artificial Sequence
  Description of Artificial Sequence: Synthetic oligonucleotide
cagaacuucgagcuguucc

SEQ ID NO: 2589000 - RNA, 19 nt, Artificial Sequence
  Description of Artificial Sequence: Synthetic oligonucleotide
agcaccaggagauaagcca

SEQ ID NO: 2589001 - RNA, 19 nt, Artificial Sequence
  Description of Artificial Sequence: Synthetic oligonucleotide
gaugccagcugcuauugug

SEQ ID NO: 2589002 - RNA, 19 nt, Artificial Sequence
  Description of Artificial Sequence: Synthetic oligonucleotide
agagccaggucugcgaugc

SEQ ID NO: 2589003 - RNA, 19 nt, Artificial Sequence
  Description of Artificial Sequence: Synthetic oligonucleotide
uggcuaaacucccaacugc

SEQ ID NO: 2589004 - RNA, 19 nt, Artificial Sequence
  Description of Artificial Sequence: Synthetic oligonucleotide
gaaacuggagaccacagcu

SEQ ID NO: 2589005 - RNA, 19 nt, Artificial Sequence
  Description of Artificial Sequence: Synthetic oligonucleotide
gauaagccagaacuucgag

SEQ ID NO: 2589006 - RNA, 19 nt, Artificial Sequence
  Description of Artificial Sequence: Synthetic oligonucleotide
uucgagcuguuccucagag

SEQ ID NO: 2589007 - RNA, 19 nt, Artificial Sequence
  Description of Artificial Sequence: Synthetic oligonucleotide
acuagauaauuggaugggg

SEQ ID NO: 2589008 - RNA, 19 nt, Artificial Sequence
  Description of Artificial Sequence: Synthetic oligonucleotide
cagugaagaucucaggccc

SEQ ID NO: 2589009 - RNA, 19 nt, Artificial Sequence
  Description of Artificial Sequence: Synthetic oligonucleotide
agaacuucgagcuguuccu

SEQ ID NO: 2589010 - RNA, 19 nt, Artificial Sequence
  Description of Artificial Sequence: Synthetic oligonucleotide
aggaauagagcugcuuggc

SEQ ID NO: 2589011 - RNA, 19 nt, Artificial Sequence
  Description of Artificial Sequence: Synthetic oligonucleotide
uaaugcugaaagagccagg

SEQ ID NO: 2589012 - RNA, 19 nt, Artificial Sequence
  Description of Artificial Sequence: Synthetic oligonucleotide
uguuccucagagcacggga

SEQ ID NO: 2589013 - RNA, 19 nt, Artificial Sequence
  Description of Artificial Sequence: Synthetic oligonucleotide
augaaauccagguggcuca

SEQ ID NO: 2589014 - RNA, 19 nt, Artificial Sequence
  Description of Artificial Sequence: Synthetic oligonucleotide
caggaauagagcugcuugg

SEQ ID NO: 2589015 - RNA, 19 nt, Artificial Sequence
  Description of Artificial Sequence: Synthetic oligonucleotide
aaauccagguggcucacau

SEQ ID NO: 2589016 - RNA, 19 nt, Artificial Sequence
  Description of Artificial Sequence: Synthetic oligonucleotide
guugaauaccacugcaaac

SEQ ID NO: 2589017 - RNA, 19 nt, Artificial Sequence
  Description of Artificial Sequence: Synthetic oligonucleotide
uccacagagugugugaccc

SEQ ID NO: 2589018 - RNA, 19 nt, Artificial Sequence
  Description of Artificial Sequence: Synthetic oligonucleotide
gagguggucaacaaagcug

SEQ ID NO: 2589019 - RNA, 19 nt, Artificial Sequence
  Description of Artificial Sequence: Synthetic oligonucleotide
ggcaagaggagucaggccc

SEQ ID NO: 2589020 - RNA, 19 nt, Artificial Sequence
  Description of Artificial Sequence: Synthetic oligonucleotide
ucuguuccggcaguaaugc

SEQ ID NO: 2589021 - RNA, 19 nt, Artificial Sequence
  Description of Artificial Sequence: Synthetic oligonucleotide
aggccauuugcucaggugu

SEQ ID NO: 2589022 - RNA, 19 nt, Artificial Sequence
  Description of Artificial Sequence: Synthetic oligonucleotide
agauaauuggaugggguug

SEQ ID NO: 2589023 - RNA, 19 nt, Artificial Sequence
  Description of Artificial Sequence: Synthetic oligonucleotide
agauaggccauuugcucag

SEQ ID NO: 2589024 - RNA, 19 nt, Artificial Sequence
  Description of Artificial Sequence: Synthetic oligonucleotide
ucauaagagguggucaaca

SEQ ID NO: 2589025 - RNA, 19 nt, Artificial Sequence
  Description of Artificial Sequence: Synthetic oligonucleotide
ugugccaauuucagugaag

SEQ ID NO: 2589026 - RNA, 19 nt, Artificial Sequence
  Description of Artificial Sequence: Synthetic oligonucleotide
agagugugugacccagagc

SEQ ID NO: 2589027 - RNA, 19 nt, Artificial Sequence
  Description of Artificial Sequence: Synthetic oligonucleotide
uaccacugcaaacuuggga

SEQ ID NO: 2589028 - RNA, 19 nt, Artificial Sequence
  Description of Artificial Sequence: Synthetic oligonucleotide
aaacuggagaccacagcuc

SEQ ID NO: 2589029 - RNA, 19 nt, Artificial Sequence
  Description of Artificial Sequence: Synthetic oligonucleotide
ggcaguaaugcugaaagag

SEQ ID NO: 2589030 - RNA, 19 nt, Artificial Sequence
  Description of Artificial Sequence: Synthetic oligonucleotide
agagguggucaacaaagcu

SEQ ID NO: 2589031 - RNA, 19 nt, Artificial Sequence
  Description of Artificial Sequence: Synthetic oligonucleotide
uuacugacugggccaaagc

SEQ ID NO: 2589032 - RNA, 19 nt, Artificial Sequence
  Description of Artificial Sequence: Synthetic oligonucleotide
uagauaauuggaugggguu

SEQ ID NO: 2589033 - RNA, 19 nt, Artificial Sequence
  Description of Artificial Sequence: Synthetic oligonucleotide
uggaugggguugaauacca

SEQ ID NO: 2589034 - RNA, 19 nt, Artificial Sequence
  Description of Artificial Sequence: Synthetic oligonucleotide
acagccugagcacugguga

SEQ ID NO: 2589035 - RNA, 19 nt, Artificial Sequence
  Description of Artificial Sequence: Synthetic oligonucleotide
aaagagccaggucugcgau

SEQ ID NO: 2589036 - RNA, 19 nt, Artificial Sequence
  Description of Artificial Sequence: Synthetic oligonucleotide
ugggguugaauaccacugc

SEQ ID NO: 2589037 - RNA, 19 nt, Artificial Sequence
  Description of Artificial Sequence: Synthetic oligonucleotide
ugccgcaggaaacuggaga

SEQ ID NO: 2589038 - RNA, 19 nt, Artificial Sequence
  Description of Artificial Sequence: Synthetic oligonucleotide
gaucauaagagguggucaa

SEQ ID NO: 2589039 - RNA, 19 nt, Artificial Sequence
  Description of Artificial Sequence: Synthetic oligonucleotide
ggagcaggaucauaagagg

SEQ ID NO: 2589040 - RNA, 19 nt, Artificial Sequence
  Description of Artificial Sequence: Synthetic oligonucleotide
gcugauaugcugcaacucc

SEQ ID NO: 2589041 - RNA, 19 nt, Artificial Sequence
  Description of Artificial Sequence: Synthetic oligonucleotide
gauaauuggaugggguuga

SEQ ID NO: 2589042 - RNA, 19 nt, Artificial Sequence
  Description of Artificial Sequence: Synthetic oligonucleotide
uggacagcacuccagccgu

SEQ ID NO: 2589043 - RNA, 19 nt, Artificial Sequence
  Description of Artificial Sequence: Synthetic oligonucleotide
aaacuugggagcagggaug

SEQ ID NO: 2589044 - RNA, 19 nt, Artificial Sequence
  Description of Artificial Sequence: Synthetic oligonucleotide
uuggaugggguugaauacc

SEQ ID NO: 2589045 - RNA, 19 nt, Artificial Sequence
  Description of Artificial Sequence: Synthetic oligonucleotide
agcuguuccucagagcacg

SEQ ID NO: 2589046 - RNA, 19 nt, Artificial Sequence
  Description of Artificial Sequence: Synthetic oligonucleotide
ugcgcuucgaccccauugu

SEQ ID NO: 2589047 - RNA, 19 nt, Artificial Sequence
  Description of Artificial Sequence: Synthetic oligonucleotide
augacagaaauggcaagag

SEQ ID NO: 2589048 - RNA, 19 nt, Artificial Sequence
  Description of Artificial Sequence: Synthetic oligonucleotide
uucgaccccauuguucugg

SEQ ID NO: 2589049 - RNA, 19 nt, Artificial Sequence
  Description of Artificial Sequence: Synthetic oligonucleotide
ugggaucuccuucccuucg

SEQ ID NO: 2589050 - RNA, 19 nt, Artificial Sequence
  Description of Artificial Sequence: Synthetic oligonucleotide
aggaucauaagaggugguc

SEQ ID NO: 2589051 - RNA, 19 nt, Artificial Sequence
  Description of Artificial Sequence: Synthetic oligonucleotide
aacuucgagcuguuccuca

SEQ ID NO: 2589052 - RNA, 19 nt, Artificial Sequence
  Description of Artificial Sequence: Synthetic oligonucleotide
cugucagauaaaugaaauc

SEQ ID NO: 2589053 - RNA, 19 nt, Artificial Sequence
  Description of Artificial Sequence: Synthetic oligonucleotide
cuaaacucccaacugcuga

SEQ ID NO: 2589054 - RNA, 19 nt, Artificial Sequence
  Description of Artificial Sequence: Synthetic oligonucleotide
cugacugggccaaagccac

SEQ ID NO: 2589055 - RNA, 19 nt, Artificial Sequence
  Description of Artificial Sequence: Synthetic oligonucleotide
auaagagguggucaacaaa

SEQ ID NO: 2589056 - RNA, 19 nt, Artificial Sequence
  Description of Artificial Sequence: Synthetic oligonucleotide
acccagagcugucagauaa

SEQ ID NO: 2589057 - RNA, 19 nt, Artificial Sequence
  Description of Artificial Sequence: Synthetic oligonucleotide
gucaacaaagcugaugguc

SEQ ID NO: 2589058 - RNA, 19 nt, Artificial Sequence
  Description of Artificial Sequence: Synthetic oligonucleotide
cuggccgcaguccacagag

SEQ ID NO: 2589059 - RNA, 19 nt, Artificial Sequence
  Description of Artificial Sequence: Synthetic oligonucleotide
agggaugacagaaauggca

SEQ ID NO: 2589060 - RNA, 19 nt, Artificial Sequence
  Description of Artificial Sequence: Synthetic oligonucleotide
gaaagagccaggucugcga

SEQ ID NO: 2589061 - RNA, 19 nt, Artificial Sequence
  Description of Artificial Sequence: Synthetic oligonucleotide
ugaauaccacugcaaacuu

SEQ ID NO: 2589062 - RNA, 19 nt, Artificial Sequence
  Description of Artificial Sequence: Synthetic oligonucleotide
cucagagcacgggagaugc

SEQ ID NO: 2589063 - RNA, 19 nt, Artificial Sequence
  Description of Artificial Sequence: Synthetic oligonucleotide
aucauaagagguggucaac

SEQ ID NO: 2589064 - RNA, 19 nt, Artificial Sequence
  Description of Artificial Sequence: Synthetic oligonucleotide
agugaagaucucaggcccc

SEQ ID NO: 2589065 - RNA, 19 nt, Artificial Sequence
  Description of Artificial Sequence: Synthetic oligonucleotide
agagcugcuuggcuaaacu

SEQ ID NO: 2589066 - RNA, 19 nt, Artificial Sequence
  Description of Artificial Sequence: Synthetic oligonucleotide
caggcugcugagcacaccc

SEQ ID NO: 2589067 - RNA, 19 nt, Artificial Sequence
  Description of Artificial Sequence: Synthetic oligonucleotide
uacagccugagcacuggug

SEQ ID NO: 2589068 - RNA, 19 nt, Artificial Sequence
  Description of Artificial Sequence: Synthetic oligonucleotide
caacaaagcugauggucag

SEQ ID NO: 2589069 - RNA, 19 nt, Artificial Sequence
  Description of Artificial Sequence: Synthetic oligonucleotide
accccauuguucugggauc

SEQ ID NO: 2589070 - RNA, 19 nt, Artificial Sequence
  Description of Artificial Sequence: Synthetic oligonucleotide
ucugggaucuccuucccuu

SEQ ID NO: 2589071 - RNA, 19 nt, Artificial Sequence
  Description of Artificial Sequence: Synthetic oligonucleotide
ugcuugucgcugcucagga

SEQ ID NO: 2589072 - RNA, 19 nt, Artificial Sequence
  Description of Artificial Sequence: Synthetic oligonucleotide
ugcagguugcccaggaaua

SEQ ID NO: 2589073 - RNA, 19 nt, Artificial Sequence
  Description of Artificial Sequence: Synthetic oligonucleotide
cagagugugugacccagag

SEQ ID NO: 2589074 - RNA, 19 nt, Artificial Sequence
  Description of Artificial Sequence: Synthetic oligonucleotide
agguggucaacaaagcuga

SEQ ID NO: 2589075 - RNA, 19 nt, Artificial Sequence
  Description of Artificial Sequence: Synthetic oligonucleotide
ugcaacugcuugucgcugc

SEQ ID NO: 2589076 - RNA, 19 nt, Artificial Sequence
  Description of Artificial Sequence: Synthetic oligonucleotide
ugauggucagugccagagc

SEQ ID NO: 2589077 - RNA, 19 nt, Artificial Sequence
  Description of Artificial Sequence: Synthetic oligonucleotide
uaggccauuugcucaggug

SEQ ID NO: 2589078 - RNA, 19 nt, Artificial Sequence
  Description of Artificial Sequence: Synthetic oligonucleotide
gagaccacagcucggagcu

SEQ ID NO: 2589079 - RNA, 19 nt, Artificial Sequence
  Description of Artificial Sequence: Synthetic oligonucleotide
gaccacagcucggagcugg

SEQ ID NO: 2589080 - RNA, 19 nt, Artificial Sequence
  Description of Artificial Sequence: Synthetic oligonucleotide
accaggguaagcucuugca

SEQ ID NO: 2589081 - RNA, 19 nt, Artificial Sequence
  Description of Artificial Sequence: Synthetic oligonucleotide
gcaggaucauaagaggugg

SEQ ID NO: 2589082 - RNA, 19 nt, Artificial Sequence
  Description of Artificial Sequence: Synthetic oligonucleotide
agcaggaucauaagaggug

SEQ ID NO: 2589083 - RNA, 19 nt, Artificial Sequence
  Description of Artificial Sequence: Synthetic oligonucleotide
guugcccaggaauagagcu

SEQ ID NO: 2589084 - RNA, 19 nt, Artificial Sequence
  Description of Artificial Sequence: Synthetic oligonucleotide
aaccagucauagaggcccc

SEQ ID NO: 2589085 - RNA, 19 nt, Artificial Sequence
  Description of Artificial Sequence: Synthetic oligonucleotide
guuacugacugggccaaag

SEQ ID NO: 2589086 - RNA, 19 nt, Artificial Sequence
  Description of Artificial Sequence: Synthetic oligonucleotide
acaugccgaccacucugcc

SEQ ID NO: 2589087 - RNA, 19 nt, Artificial Sequence
  Description of Artificial Sequence: Synthetic oligonucleotide
gacucagauaggccauuug

SEQ ID NO: 2589088 - RNA, 19 nt, Artificial Sequence
  Description of Artificial Sequence: Synthetic oligonucleotide
caaagcugauggucagugc

SEQ ID NO: 2589089 - RNA, 19 nt, Artificial Sequence
  Description of Artificial Sequence: Synthetic oligonucleotide
gaugggguugaauaccacu

SEQ ID NO: 2589090 - RNA, 19 nt, Artificial Sequence
  Description of Artificial Sequence: Synthetic oligonucleotide
gugaaacuagauaauugga

SEQ ID NO: 2589091 - RNA, 19 nt, Artificial Sequence
  Description of Artificial Sequence: Synthetic oligonucleotide
ccggcaguaaugcugaaag

SEQ ID NO: 2589092 - RNA, 19 nt, Artificial Sequence
  Description of Artificial Sequence: Synthetic oligonucleotide
gccaauuucagugaagauc

SEQ ID NO: 2589093 - RNA, 19 nt, Artificial Sequence
  Description of Artificial Sequence: Synthetic oligonucleotide
gaaauggcaagaggaguca

SEQ ID NO: 2589094 - RNA, 19 nt, Artificial Sequence
  Description of Artificial Sequence: Synthetic oligonucleotide
acuccucuggccgcagucc

SEQ ID NO: 2589095 - RNA, 19 nt, Artificial Sequence
  Description of Artificial Sequence: Synthetic oligonucleotide
cugcuauugugccaauuuc

SEQ ID NO: 2589096 - RNA, 19 nt, Artificial Sequence
  Description of Artificial Sequence: Synthetic oligonucleotide
uuugcucaggugugaucgc

SEQ ID NO: 2589097 - RNA, 19 nt, Artificial Sequence
  Description of Artificial Sequence: Synthetic oligonucleotide
augcugaaagagccagguc

SEQ ID NO: 2589098 - RNA, 19 nt, Artificial Sequence
  Description of Artificial Sequence: Synthetic oligonucleotide
aagagccaggucugcgaug

SEQ ID NO: 2589099 - RNA, 19 nt, Artificial Sequence
  Description of Artificial Sequence: Synthetic oligonucleotide
ccaauuucagugaagaucu

SEQ ID NO: 2589100 - RNA, 19 nt, Artificial Sequence
  Description of Artificial Sequence: Synthetic oligonucleotide
uggucagugccagagccca

SEQ ID NO: 2589101 - RNA, 19 nt, Artificial Sequence
  Description of Artificial Sequence: Synthetic oligonucleotide
cuagauaauuggauggggu

SEQ ID NO: 2589102 - RNA, 19 nt, Artificial Sequence
  Description of Artificial Sequence: Synthetic oligonucleotide
uugugccaauuucagugaa

SEQ ID NO: 2589103 - RNA, 19 nt, Artificial Sequence
  Description of Artificial Sequence: Synthetic oligonucleotide
cagggaugacagaaauggc

SEQ ID NO: 2589104 - RNA, 19 nt, Artificial Sequence
  Description of Artificial Sequence: Synthetic oligonucleotide
cacaugccgaccacucugc

SEQ ID NO: 2589105 - RNA, 19 nt, Artificial Sequence
  Description of Artificial Sequence: Synthetic oligonucleotide
aacaaagcugauggucagu

SEQ ID NO: 2589106 - RNA, 19 nt, Artificial Sequence
  Description of Artificial Sequence: Synthetic oligonucleotide
agguggcucacaugccgac

SEQ ID NO: 2589107 - RNA, 19 nt, Artificial Sequence
  Description of Artificial Sequence: Synthetic oligonucleotide
cucugccgcaggaaacugg

SEQ ID NO: 2589108 - RNA, 19 nt, Artificial Sequence
  Description of Artificial Sequence: Synthetic oligonucleotide
ucgaccccauuguucuggg

SEQ ID NO: 2589109 - RNA, 19 nt, Artificial Sequence
  Description of Artificial Sequence: Synthetic oligonucleotide
auggucagugccagagccc

SEQ ID NO: 2589110 - RNA, 19 nt, Artificial Sequence
  Description of Artificial Sequence: Synthetic oligonucleotide
ccaggaauagagcugcuug

SEQ ID NO: 2589111 - RNA, 19 nt, Artificial Sequence
  Description of Artificial Sequence: Synthetic oligonucleotide
aggaggacuggaaccaguc

SEQ ID NO: 2589112 - RNA, 19 nt, Artificial Sequence
  Description of Artificial Sequence: Synthetic oligonucleotide
ugugaucgcuacagccuga

SEQ ID NO: 2589113 - RNA, 19 nt, Artificial Sequence
  Description of Artificial Sequence: Synthetic oligonucleotide
cagagcacgggagaugcag

SEQ ID NO: 2589114 - RNA, 19 nt, Artificial Sequence
  Description of Artificial Sequence: Synthetic oligonucleotide
cugggccaaagccaccagg

SEQ ID NO: 2589115 - RNA, 19 nt, Artificial Sequence
  Description of Artificial Sequence: Synthetic oligonucleotide
ucgugcugggcccaugcaa

SEQ ID NO: 2589116 - RNA, 19 nt, Artificial Sequence
  Description of Artificial Sequence: Synthetic oligonucleotide
cuucgugcugggcccaugc

SEQ ID NO: 2589117 - RNA, 19 nt, Artificial Sequence
  Description of Artificial Sequence: Synthetic oligonucleotide
augcugcaacuccucuggc

SEQ ID NO: 2589118 - RNA, 19 nt, Artificial Sequence
  Description of Artificial Sequence: Synthetic oligonucleotide
aucuguuccggcaguaaug

SEQ ID NO: 2589119 - RNA, 19 nt, Artificial Sequence
  Description of Artificial Sequence: Synthetic oligonucleotide
agauaagccagaacuucga

SEQ ID NO: 2589120 - RNA, 19 nt, Artificial Sequence
  Description of Artificial Sequence: Synthetic oligonucleotide
cuuggcuaaacucccaacu

SEQ ID NO: 2589121 - RNA, 19 nt, Artificial Sequence
  Description of Artificial Sequence: Synthetic oligonucleotide
uggagaccacagcucggag

SEQ ID NO: 2589122 - RNA, 19 nt, Artificial Sequence
  Description of Artificial Sequence: Synthetic oligonucleotide
aggcccuggaucuguuccg

SEQ ID NO: 2589123 - RNA, 19 nt, Artificial Sequence
  Description of Artificial Sequence: Synthetic oligonucleotide
ggaugacagaaauggcaag

SEQ ID NO: 2589124 - RNA, 19 nt, Artificial Sequence
  Description of Artificial Sequence: Synthetic oligonucleotide
cacagagugugugacccag

SEQ ID NO: 2589125 - RNA, 19 nt, Artificial Sequence
  Description of Artificial Sequence: Synthetic oligonucleotide
uuugccccaggcugcugag

SEQ ID NO: 2589126 - RNA, 19 nt, Artificial Sequence
  Description of Artificial Sequence: Synthetic oligonucleotide
aggguaagcucuugcaguu

SEQ ID NO: 2589127 - RNA, 19 nt, Artificial Sequence
  Description of Artificial Sequence: Synthetic oligonucleotide
cagcaccaggagauaagcc

SEQ ID NO: 2589128 - RNA, 19 nt, Artificial Sequence
  Description of Artificial Sequence: Synthetic oligonucleotide
aagcugauggucagugcca

SEQ ID NO: 2589129 - RNA, 19 nt, Artificial Sequence
  Description of Artificial Sequence: Synthetic oligonucleotide
guggucaacaaagcugaug

SEQ ID NO: 2589130 - RNA, 19 nt, Artificial Sequence
  Description of Artificial Sequence: Synthetic oligonucleotide
aggucugcgaugccagcug

SEQ ID NO: 2589131 - RNA, 19 nt, Artificial Sequence
  Description of Artificial Sequence: Synthetic oligonucleotide
cauaagagguggucaacaa

SEQ ID NO: 2589132 - RNA, 19 nt, Artificial Sequence
  Description of Artificial Sequence: Synthetic oligonucleotide
accacucugccgcaggaaa

SEQ ID NO: 2589133 - RNA, 19 nt, Artificial Sequence
  Description of Artificial Sequence: Synthetic oligonucleotide
ccagccgucuauuugcccc

SEQ ID NO: 2589134 - RNA, 19 nt, Artificial Sequence
  Description of Artificial Sequence: Synthetic oligonucleotide
cugcgcuucgaccccauug

SEQ ID NO: 2589135 - RNA, 19 nt, Artificial Sequence
  Description of Artificial Sequence: Synthetic oligonucleotide
acucccaacugcugauaug

SEQ ID NO: 2589136 - RNA, 19 nt, Artificial Sequence
  Description of Artificial Sequence: Synthetic oligonucleotide
agccagaacuucgagcugu

SEQ ID NO: 2589137 - RNA, 19 nt, Artificial Sequence
  Description of Artificial Sequence: Synthetic oligonucleotide
ucgagcuguuccucagagc

SEQ ID NO: 2589138 - RNA, 19 nt, Artificial Sequence
  Description of Artificial Sequence: Synthetic oligonucleotide
ggagaugcagguugcccag

SEQ ID NO: 2589139 - RNA, 19 nt, Artificial Sequence
  Description of Artificial Sequence: Synthetic oligonucleotide
ugcugauaugcugcaacuc

SEQ ID NO: 2589140 - RNA, 19 nt, Artificial Sequence
  Description of Artificial Sequence: Synthetic oligonucleotide
auuguucugggaucuccuu

SEQ ID NO: 2589141 - RNA, 19 nt, Artificial Sequence
  Description of Artificial Sequence: Synthetic oligonucleotide
cccaguuacugacugggcc

SEQ ID NO: 2589142 - RNA, 19 nt, Artificial Sequence
  Description of Artificial Sequence: Synthetic oligonucleotide
auaggccauuugcucaggu

SEQ ID NO: 2589143 - RNA, 19 nt, Artificial Sequence
  Description of Artificial Sequence: Synthetic oligonucleotide
cauuugcucaggugugauc

SEQ ID NO: 2589144 - RNA, 19 nt, Artificial Sequence
  Description of Artificial Sequence: Synthetic oligonucleotide
ugaucgcuacagccugagc

SEQ ID NO: 2589145 - RNA, 19 nt, Artificial Sequence
  Description of Artificial Sequence: Synthetic oligonucleotide
cucagauaggccauuugcu

SEQ ID NO: 2589146 - RNA, 19 nt, Artificial Sequence
  Description of Artificial Sequence: Synthetic oligonucleotide
agagcacgggagaugcagg

SEQ ID NO: 2589147 - RNA, 19 nt, Artificial Sequence
  Description of Artificial Sequence: Synthetic oligonucleotide
ccaggcugcgcuucgaccc

SEQ ID NO: 2589148 - RNA, 19 nt, Artificial Sequence
  Description of Artificial Sequence: Synthetic oligonucleotide
ugugugacccagagcuguc

SEQ ID NO: 2589149 - RNA, 19 nt, Artificial Sequence
  Description of Artificial Sequence: Synthetic oligonucleotide
cuugucgcugcucaggacu

SEQ ID NO: 2589150 - RNA, 19 nt, Artificial Sequence
  Description of Artificial Sequence: Synthetic oligonucleotide
ugcgaugccagcugcuauu

SEQ ID NO: 2589151 - RNA, 19 nt, Artificial Sequence
  Description of Artificial Sequence: Synthetic oligonucleotide
ggaucauaagaggugguca

SEQ ID NO: 2589152 - RNA, 19 nt, Artificial Sequence
  Description of Artificial Sequence: Synthetic oligonucleotide
guggcucacaugccgacca

SEQ ID NO: 2589153 - RNA, 19 nt, Artificial Sequence
  Description of Artificial Sequence: Synthetic oligonucleotide
acuggugaaacuagauaau

SEQ ID NO: 2589154 - RNA, 19 nt, Artificial Sequence
  Description of Artificial Sequence: Synthetic oligonucleotide
cuugggagcagggaugaca

SEQ ID NO: 2589155 - RNA, 19 nt, Artificial Sequence
  Description of Artificial Sequence: Synthetic oligonucleotide
caaacuugggagcagggau

SEQ ID NO: 2589156 - RNA, 19 nt, Artificial Sequence
  Description of Artificial Sequence: Synthetic oligonucleotide
cugcuugucgcugcucagg

SEQ ID NO: 2589157 - RNA, 19 nt, Artificial Sequence
  Description of Artificial Sequence: Synthetic oligonucleotide
gcacgggagaugcagguug

SEQ ID NO: 2589158 - RNA, 19 nt, Artificial Sequence
  Description of Artificial Sequence: Synthetic oligonucleotide
accccaguccaccagggua

SEQ ID NO: 2589159 - RNA, 19 nt, Artificial Sequence
  Description of Artificial Sequence: Synthetic oligonucleotide
gaccccauuguucugggau

SEQ ID NO: 2589160 - RNA, 19 nt, Artificial Sequence
  Description of Artificial Sequence: Synthetic oligonucleotide
caccaggguaagcucuugc

SEQ ID NO: 2589161 - RNA, 19 nt, Artificial Sequence
  Description of Artificial Sequence: Synthetic oligonucleotide
gccgcaggaaacuggagac

SEQ ID NO: 2589162 - RNA, 19 nt, Artificial Sequence
  Description of Artificial Sequence: Synthetic oligonucleotide
agcugucagauaaaugaaa

SEQ ID NO: 2589163 - RNA, 19 nt, Artificial Sequence
  Description of Artificial Sequence: Synthetic oligonucleotide
guuccggcaguaaugcuga

SEQ ID NO: 2589164 - RNA, 19 nt, Artificial Sequence
  Description of Artificial Sequence: Synthetic oligonucleotide
ucggagcuggacagcacuc

SEQ ID NO: 2589165 - RNA, 19 nt, Artificial Sequence
  Description of Artificial Sequence: Synthetic oligonucleotide
cuccagccgucuauuugcc

SEQ ID NO: 2589166 - RNA, 19 nt, Artificial Sequence
  Description of Artificial Sequence: Synthetic oligonucleotide
ugaaauccagguggcucac

SEQ ID NO: 2589167 - RNA, 19 nt, Artificial Sequence
  Description of Artificial Sequence: Synthetic oligonucleotide
uucgugcugggcccaugca

SEQ ID NO: 2589168 - RNA, 19 nt, Artificial Sequence
  Description of Artificial Sequence: Synthetic oligonucleotide
ccagguggcucacaugccg

SEQ ID NO: 2589169 - RNA, 19 nt, Artificial Sequence
  Description of Artificial Sequence: Synthetic oligonucleotide
ucccaacugcugauaugcu

SEQ ID NO: 2589170 - RNA, 19 nt, Artificial Sequence
  Description of Artificial Sequence: Synthetic oligonucleotide
auagaggccccaggcugcg

SEQ ID NO: 2589171 - RNA, 19 nt, Artificial Sequence
  Description of Artificial Sequence: Synthetic oligonucleotide
cugaaagagccaggucugc

SEQ ID NO: 2589172 - RNA, 19 nt, Artificial Sequence
  Description of Artificial Sequence: Synthetic oligonucleotide
gagcugucagauaaaugaa

SEQ ID NO: 2589173 - RNA, 19 nt, Artificial Sequence
  Description of Artificial Sequence: Synthetic oligonucleotide
uaauuggaugggguugaau

SEQ ID NO: 2589174 - RNA, 19 nt, Artificial Sequence
  Description of Artificial Sequence: Synthetic oligonucleotide
cacagcucggagcuggaca

SEQ ID NO: 2589175 - RNA, 19 nt, Artificial Sequence
  Description of Artificial Sequence: Synthetic oligonucleotide
gagcaggaucauaagaggu

SEQ ID NO: 2589176 - RNA, 19 nt, Artificial Sequence
  Description of Artificial Sequence: Synthetic oligonucleotide
uugcucaggugugaucgcu

SEQ ID NO: 2589177 - RNA, 19 nt, Artificial Sequence
  Description of Artificial Sequence: Synthetic oligonucleotide
gagaugcagguugcccagg

SEQ ID NO: 2589178 - RNA, 19 nt, Artificial Sequence
  Description of Artificial Sequence: Synthetic oligonucleotide
gcugaaagagccaggucug

SEQ ID NO: 2589179 - RNA, 19 nt, Artificial Sequence
  Description of Artificial Sequence: Synthetic oligonucleotide
gugaucgcuacagccugag

SEQ ID NO: 2589180 - RNA, 19 nt, Artificial Sequence
  Description of Artificial Sequence: Synthetic oligonucleotide
gaucuguuccggcaguaau

SEQ ID NO: 2589181 - RNA, 19 nt, Artificial Sequence
  Description of Artificial Sequence: Synthetic oligonucleotide
acuggagaccacagcucgg

SEQ ID NO: 2589182 - RNA, 19 nt, Artificial Sequence
  Description of Artificial Sequence: Synthetic oligonucleotide
gcugagcacaccccagucc

SEQ ID NO: 2589183 - RNA, 19 nt, Artificial Sequence
  Description of Artificial Sequence: Synthetic oligonucleotide
agcagggaugacagaaaug

SEQ ID NO: 2589184 - RNA, 19 nt, Artificial Sequence
  Description of Artificial Sequence: Synthetic oligonucleotide
gggcccaugcaacugcuug

SEQ ID NO: 2589185 - RNA, 19 nt, Artificial Sequence
  Description of Artificial Sequence: Synthetic oligonucleotide
acgggagaugcagguugcc

SEQ ID NO: 2589186 - RNA, 19 nt, Artificial Sequence
  Description of Artificial Sequence: Synthetic oligonucleotide
gcugcuuggcuaaacuccc

SEQ ID NO: 2589187 - RNA, 19 nt, Artificial Sequence
  Description of Artificial Sequence: Synthetic oligonucleotide
cugauaugcugcaacuccu

SEQ ID NO: 2589188 - RNA, 19 nt, Artificial Sequence
  Description of Artificial Sequence: Synthetic oligonucleotide
ccgucuauuugccccaggc

SEQ ID NO: 2589189 - RNA, 19 nt, Artificial Sequence
  Description of Artificial Sequence: Synthetic oligonucleotide
agcacuggugaaacuagau

SEQ ID NO: 2589190 - RNA, 19 nt, Artificial Sequence
  Description of Artificial Sequence: Synthetic oligonucleotide
caggguaagcucuugcagu

SEQ ID NO: 2589191 - RNA, 19 nt, Artificial Sequence
  Description of Artificial Sequence: Synthetic oligonucleotide
cugggaucuccuucccuuc

SEQ ID NO: 2589192 - RNA, 19 nt, Artificial Sequence
  Description of Artificial Sequence: Synthetic oligonucleotide
gggaugacagaaauggcaa

SEQ ID NO: 2589193 - RNA, 19 nt, Artificial Sequence
  Description of Artificial Sequence: Synthetic oligonucleotide
gggguugaauaccacugca

SEQ ID NO: 2589194 - RNA, 19 nt, Artificial Sequence
  Description of Artificial Sequence: Synthetic oligonucleotide
cugagcacuggugaaacua

SEQ ID NO: 2589195 - RNA, 19 nt, Artificial Sequence
  Description of Artificial Sequence: Synthetic oligonucleotide
uagagcugcuuggcuaaac

SEQ ID NO: 2589196 - RNA, 19 nt, Artificial Sequence
  Description of Artificial Sequence: Synthetic oligonucleotide
uccucagagcacgggagau

SEQ ID NO: 2589197 - RNA, 19 nt, Artificial Sequence
  Description of Artificial Sequence: Synthetic oligonucleotide
gaacuucgagcuguuccuc

SEQ ID NO: 2589198 - RNA, 19 nt, Artificial Sequence
  Description of Artificial Sequence: Synthetic oligonucleotide
cuguuccucagagcacggg

SEQ ID NO: 2589199 - RNA, 19 nt, Artificial Sequence
  Description of Artificial Sequence: Synthetic oligonucleotide
gcuucgaccccauuguucu

SEQ ID NO: 2589200 - RNA, 19 nt, Artificial Sequence
  Description of Artificial Sequence: Synthetic oligonucleotide
uccggcaguaaugcugaaa

SEQ ID NO: 2589201 - RNA, 19 nt, Artificial Sequence
  Description of Artificial Sequence: Synthetic oligonucleotide
gagcagggaugacagaaau

SEQ ID NO: 2589202 - RNA, 19 nt, Artificial Sequence
  Description of Artificial Sequence: Synthetic oligonucleotide
cuauugugccaauuucagu

SEQ ID NO: 2589203 - RNA, 19 nt, Artificial Sequence
  Description of Artificial Sequence: Synthetic oligonucleotide
gaugcagguugcccaggaa

SEQ ID NO: 2589204 - RNA, 19 nt, Artificial Sequence
  Description of Artificial Sequence: Synthetic oligonucleotide
gucauagaggccccaggcu

SEQ ID NO: 2589205 - RNA, 19 nt, Artificial Sequence
  Description of Artificial Sequence: Synthetic oligonucleotide
ccaguuacugacugggcca

SEQ ID NO: 2589206 - RNA, 19 nt, Artificial Sequence
  Description of Artificial Sequence: Synthetic oligonucleotide
ggaaccagucauagaggcc

SEQ ID NO: 2589207 - RNA, 19 nt, Artificial Sequence
  Description of Artificial Sequence: Synthetic oligonucleotide
cacugcaaacuugggagca

SEQ ID NO: 2589208 - RNA, 19 nt, Artificial Sequence
  Description of Artificial Sequence: Synthetic oligonucleotide
ccacugcaaacuugggagc

SEQ ID NO: 2589209 - RNA, 19 nt, Artificial Sequence
  Description of Artificial Sequence: Synthetic oligonucleotide
agugugugacccagagcug

SEQ ID NO: 2589210 - RNA, 19 nt, Artificial Sequence
  Description of Artificial Sequence: Synthetic oligonucleotide
ggaucuccuucccuucgug

SEQ ID NO: 2589211 - RNA, 19 nt, Artificial Sequence
  Description of Artificial Sequence: Synthetic oligonucleotide
ucgcuacagccugagcacu

SEQ ID NO: 2589212 - RNA, 19 nt, Artificial Sequence
  Description of Artificial Sequence: Synthetic oligonucleotide
uccucuggccgcaguccac

SEQ ID NO: 2589213 - RNA, 19 nt, Artificial Sequence
  Description of Artificial Sequence: Synthetic oligonucleotide
augcaacugcuugucgcug

SEQ ID NO: 2589214 - RNA, 19 nt, Artificial Sequence
  Description of Artificial Sequence: Synthetic oligonucleotide
ccauuguucugggaucucc

SEQ ID NO: 2589215 - RNA, 19 nt, Artificial Sequence
  Description of Artificial Sequence: Synthetic oligonucleotide
caggcugcgcuucgacccc

SEQ ID NO: 2589216 - RNA, 19 nt, Artificial Sequence
  Description of Artificial Sequence: Synthetic oligonucleotide
uggcucacaugccgaccac

SEQ ID NO: 2589217 - RNA, 19 nt, Artificial Sequence
  Description of Artificial Sequence: Synthetic oligonucleotide
gagcacuggugaaacuaga

SEQ ID NO: 2589218 - RNA, 19 nt, Artificial Sequence
  Description of Artificial Sequence: Synthetic oligonucleotide
gcuacagccugagcacugg

SEQ ID NO: 2589219 - RNA, 19 nt, Artificial Sequence
  Description of Artificial Sequence: Synthetic oligonucleotide
gcuuggcuaaacucccaac

SEQ ID NO: 2589220 - RNA, 19 nt, Artificial Sequence
  Description of Artificial Sequence: Synthetic oligonucleotide
gucgcugcucaggacucag

SEQ ID NO: 2589221 - RNA, 19 nt, Artificial Sequence
  Description of Artificial Sequence: Synthetic oligonucleotide
cuucgaccccauuguucug

SEQ ID NO: 2589222 - RNA, 19 nt, Artificial Sequence
  Description of Artificial Sequence: Synthetic oligonucleotide
ggucugcgaugccagcugc

SEQ ID NO: 2589223 - RNA, 19 nt, Artificial Sequence
  Description of Artificial Sequence: Synthetic oligonucleotide
gcuaaacucccaacugcug

SEQ ID NO: 2589224 - RNA, 19 nt, Artificial Sequence
  Description of Artificial Sequence: Synthetic oligonucleotide
gagcacgggagaugcaggu

SEQ ID NO: 2589225 - RNA, 19 nt, Artificial Sequence
  Description of Artificial Sequence: Synthetic oligonucleotide
cagaaauggcaagaggagu

SEQ ID NO: 2589226 - RNA, 19 nt, Artificial Sequence
  Description of Artificial Sequence: Synthetic oligonucleotide
cuggagaccacagcucgga

SEQ ID NO: 2589227 - RNA, 19 nt, Artificial Sequence
  Description of Artificial Sequence: Synthetic oligonucleotide
acucugccgcaggaaacug

SEQ ID NO: 2589228 - RNA, 19 nt, Artificial Sequence
  Description of Artificial Sequence: Synthetic oligonucleotide
cugcugauaugcugcaacu

SEQ ID NO: 2589229 - RNA, 19 nt, Artificial Sequence
  Description of Artificial Sequence: Synthetic oligonucleotide
cagguggcucacaugccga

SEQ ID NO: 2589230 - RNA, 19 nt, Artificial Sequence
  Description of Artificial Sequence: Synthetic oligonucleotide
gugacccagagcugucaga

SEQ ID NO: 2589231 - RNA, 19 nt, Artificial Sequence
  Description of Artificial Sequence: Synthetic oligonucleotide
ggaauagagcugcuuggcu

SEQ ID NO: 2589232 - RNA, 19 nt, Artificial Sequence
  Description of Artificial Sequence: Synthetic oligonucleotide
gcacuggugaaacuagaua

SEQ ID NO: 2589233 - RNA, 19 nt, Artificial Sequence
  Description of Artificial Sequence: Synthetic oligonucleotide
cugccgcaggaaacuggag

SEQ ID NO: 2589234 - RNA, 19 nt, Artificial Sequence
  Description of Artificial Sequence: Synthetic oligonucleotide
ggagcuggacagcacucca

SEQ ID NO: 2589235 - RNA, 19 nt, Artificial Sequence
  Description of Artificial Sequence: Synthetic oligonucleotide
cucuggccgcaguccacag

SEQ ID NO: 2589236 - RNA, 19 nt, Artificial Sequence
  Description of Artificial Sequence: Synthetic oligonucleotide
cuucgagcuguuccucaga

SEQ ID NO: 2589237 - RNA, 19 nt, Artificial Sequence
  Description of Artificial Sequence: Synthetic oligonucleotide
acugaaggagcaggaucau

SEQ ID NO: 2589238 - RNA, 19 nt, Artificial Sequence
  Description of Artificial Sequence: Synthetic oligonucleotide
uggaucuguuccggcagua

SEQ ID NO: 2589239 - RNA, 19 nt, Artificial Sequence
  Description of Artificial Sequence: Synthetic oligonucleotide
ggugugaucgcuacagccu

SEQ ID NO: 2589240 - RNA, 19 nt, Artificial Sequence
  Description of Artificial Sequence: Synthetic oligonucleotide
gcugucagauaaaugaaau

SEQ ID NO: 2589241 - RNA, 19 nt, Artificial Sequence
  Description of Artificial Sequence: Synthetic oligonucleotide
caccaggagauaagccaga

SEQ ID NO: 2589242 - RNA, 19 nt, Artificial Sequence
  Description of Artificial Sequence: Synthetic oligonucleotide
ggccauuugcucaggugug

SEQ ID NO: 2589243 - RNA, 19 nt, Artificial Sequence
  Description of Artificial Sequence: Synthetic oligonucleotide
gugugugacccagagcugu

SEQ ID NO: 2589244 - RNA, 19 nt, Artificial Sequence
  Description of Artificial Sequence: Synthetic oligonucleotide
agagcccaggaggacugga

SEQ ID NO: 2589245 - RNA, 19 nt, Artificial Sequence
  Description of Artificial Sequence: Synthetic oligonucleotide
cgugcugggcccaugcaac

SEQ ID NO: 2589246 - RNA, 19 nt, Artificial Sequence
  Description of Artificial Sequence: Synthetic oligonucleotide
gagucaggcccuggaucug

SEQ ID NO: 2589247 - RNA, 19 nt, Artificial Sequence
  Description of Artificial Sequence: Synthetic oligonucleotide
gcugcuauugugccaauuu

SEQ ID NO: 2589248 - RNA, 19 nt, Artificial Sequence
  Description of Artificial Sequence: Synthetic oligonucleotide
agccugagcacuggugaaa

SEQ ID NO: 2589249 - RNA, 19 nt, Artificial Sequence
  Description of Artificial Sequence: Synthetic oligonucleotide
cucggagcuggacagcacu

SEQ ID NO: 2589250 - RNA, 19 nt, Artificial Sequence
  Description of Artificial Sequence: Synthetic oligonucleotide
aggcagcaccaggagauaa

SEQ ID NO: 2589251 - RNA, 19 nt, Artificial Sequence
  Description of Artificial Sequence: Synthetic oligonucleotide
ggcugcugagcacacccca

SEQ ID NO: 2589252 - RNA, 19 nt, Artificial Sequence
  Description of Artificial Sequence: Synthetic oligonucleotide
acagcacuccagccgucua

SEQ ID NO: 2589253 - RNA, 19 nt, Artificial Sequence
  Description of Artificial Sequence: Synthetic oligonucleotide
ccaggagauaagccagaac

SEQ ID NO: 2589254 - RNA, 19 nt, Artificial Sequence
  Description of Artificial Sequence: Synthetic oligonucleotide
cucaggugugaucgcuaca

SEQ ID NO: 2589255 - RNA, 19 nt, Artificial Sequence
  Description of Artificial Sequence: Synthetic oligonucleotide
cagccgucuauuugcccca

SEQ ID NO: 2589256 - RNA, 19 nt, Artificial Sequence
  Description of Artificial Sequence: Synthetic oligonucleotide
cccaugcaacugcuugucg

SEQ ID NO: 2589257 - RNA, 19 nt, Artificial Sequence
  Description of Artificial Sequence: Synthetic oligonucleotide
ccgcaguccacagagugug

SEQ ID NO: 2589258 - RNA, 19 nt, Artificial Sequence
  Description of Artificial Sequence: Synthetic oligonucleotide
ccacucugccgcaggaaac

SEQ ID NO: 2589259 - RNA, 19 nt, Artificial Sequence
  Description of Artificial Sequence: Synthetic oligonucleotide
cuggugaaacuagauaauu

SEQ ID NO: 2589260 - RNA, 19 nt, Artificial Sequence
  Description of Artificial Sequence: Synthetic oligonucleotide
cugcuuggcuaaacuccca

SEQ ID NO: 2589261 - RNA, 19 nt, Artificial Sequence
  Description of Artificial Sequence: Synthetic oligonucleotide
uugccccaggcugcugagc

SEQ ID NO: 2589262 - RNA, 19 nt, Artificial Sequence
  Description of Artificial Sequence: Synthetic oligonucleotide
gguggcucacaugccgacc

SEQ ID NO: 2589263 - RNA, 19 nt, Artificial Sequence
  Description of Artificial Sequence: Synthetic oligonucleotide
ggcuaaacucccaacugcu

SEQ ID NO: 2589264 - RNA, 19 nt, Artificial Sequence
  Description of Artificial Sequence: Synthetic oligonucleotide
uggccgcaguccacagagu

SEQ ID NO: 2589265 - RNA, 19 nt, Artificial Sequence
  Description of Artificial Sequence: Synthetic oligonucleotide
ugccagagcccaggaggac

SEQ ID NO: 2589266 - RNA, 19 nt, Artificial Sequence
  Description of Artificial Sequence: Synthetic oligonucleotide
gcuguuccucagagcacgg

SEQ ID NO: 2589267 - RNA, 19 nt, Artificial Sequence
  Description of Artificial Sequence: Synthetic oligonucleotide
gagccaggucugcgaugcc

SEQ ID NO: 2589268 - RNA, 19 nt, Artificial Sequence
  Description of Artificial Sequence: Synthetic oligonucleotide
gcucacaugccgaccacuc

SEQ ID NO: 2589269 - RNA, 19 nt, Artificial Sequence
  Description of Artificial Sequence: Synthetic oligonucleotide
accagucauagaggcccca

SEQ ID NO: 2589270 - RNA, 19 nt, Artificial Sequence
  Description of Artificial Sequence: Synthetic oligonucleotide
gacagcacuccagccgucu

SEQ ID NO: 2589271 - RNA, 19 nt, Artificial Sequence
  Description of Artificial Sequence: Synthetic oligonucleotide
ugggcccaugcaacugcuu

SEQ ID NO: 2589272 - RNA, 19 nt, Artificial Sequence
  Description of Artificial Sequence: Synthetic oligonucleotide
caguuacugacugggccaa

SEQ ID NO: 2589273 - RNA, 19 nt, Artificial Sequence
  Description of Artificial Sequence: Synthetic oligonucleotide
gcgaugccagcugcuauug

SEQ ID NO: 2589274 - RNA, 19 nt, Artificial Sequence
  Description of Artificial Sequence: Synthetic oligonucleotide
agccgucuauuugccccag

SEQ ID NO: 2589275 - RNA, 19 nt, Artificial Sequence
  Description of Artificial Sequence: Synthetic oligonucleotide
ccagucauagaggccccag

SEQ ID NO: 2589276 - RNA, 19 nt, Artificial Sequence
  Description of Artificial Sequence: Synthetic oligonucleotide
agcugcuauugugccaauu

SEQ ID NO: 2589277 - RNA, 19 nt, Artificial Sequence
  Description of Artificial Sequence: Synthetic oligonucleotide
ugccgaccacucugccgca

SEQ ID NO: 2589278 - RNA, 19 nt, Artificial Sequence
  Description of Artificial Sequence: Synthetic oligonucleotide
aggacucagauaggccauu

SEQ ID NO: 2589279 - RNA, 19 nt, Artificial Sequence
  Description of Artificial Sequence: Synthetic oligonucleotide
caggaucauaagagguggu

SEQ ID NO: 2589280 - RNA, 19 nt, Artificial Sequence
  Description of Artificial Sequence: Synthetic oligonucleotide
gggccaaagccaccaggca

SEQ ID NO: 2589281 - RNA, 19 nt, Artificial Sequence
  Description of Artificial Sequence: Synthetic oligonucleotide
ccagcugcuauugugccaa

SEQ ID NO: 2589282 - RNA, 19 nt, Artificial Sequence
  Description of Artificial Sequence: Synthetic oligonucleotide
agcacgggagaugcagguu

SEQ ID NO: 2589283 - RNA, 19 nt, Artificial Sequence
  Description of Artificial Sequence: Synthetic oligonucleotide
gaccacucugccgcaggaa

SEQ ID NO: 2589284 - RNA, 19 nt, Artificial Sequence
  Description of Artificial Sequence: Synthetic oligonucleotide
cucacaugccgaccacucu

SEQ ID NO: 2589285 - RNA, 19 nt, Artificial Sequence
  Description of Artificial Sequence: Synthetic oligonucleotide
ccgaccacucugccgcagg

SEQ ID NO: 2589286 - RNA, 19 nt, Artificial Sequence
  Description of Artificial Sequence: Synthetic oligonucleotide
gccgucuauuugccccagg

SEQ ID NO: 2589287 - RNA, 19 nt, Artificial Sequence
  Description of Artificial Sequence: Synthetic oligonucleotide
gcuugucgcugcucaggac

SEQ ID NO: 2589288 - RNA, 19 nt, Artificial Sequence
  Description of Artificial Sequence: Synthetic oligonucleotide
ggucaacaaagcugauggu

SEQ ID NO: 2589289 - RNA, 19 nt, Artificial Sequence
  Description of Artificial Sequence: Synthetic oligonucleotide
ccccaguuacugacugggc

SEQ ID NO: 2589290 - RNA, 19 nt, Artificial Sequence
  Description of Artificial Sequence: Synthetic oligonucleotide
ucccuucgugcugggccca

SEQ ID NO: 2589291 - RNA, 19 nt, Artificial Sequence
  Description of Artificial Sequence: Synthetic oligonucleotide
uuccggcaguaaugcugaa

SEQ ID NO: 2589292 - RNA, 19 nt, Artificial Sequence
  Description of Artificial Sequence: Synthetic oligonucleotide
aguuacugacugggccaaa

SEQ ID NO: 2589293 - RNA, 19 nt, Artificial Sequence
  Description of Artificial Sequence: Synthetic oligonucleotide
cgcuucgaccccauuguuc

SEQ ID NO: 2589294 - RNA, 19 nt, Artificial Sequence
  Description of Artificial Sequence: Synthetic oligonucleotide
caaagccaccaggcagcac

SEQ ID NO: 2589295 - RNA, 19 nt, Artificial Sequence
  Description of Artificial Sequence: Synthetic oligonucleotide
cacucugccgcaggaaacu

SEQ ID NO: 2589296 - RNA, 19 nt, Artificial Sequence
  Description of Artificial Sequence: Synthetic oligonucleotide
caacugcuugucgcugcuc

SEQ ID NO: 2589297 - RNA, 19 nt, Artificial Sequence
  Description of Artificial Sequence: Synthetic oligonucleotide
cugaaggagcaggaucaua

SEQ ID NO: 2589298 - RNA, 19 nt, Artificial Sequence
  Description of Artificial Sequence: Synthetic oligonucleotide
ggaugggguugaauaccac

SEQ ID NO: 2589299 - RNA, 19 nt, Artificial Sequence
  Description of Artificial Sequence: Synthetic oligonucleotide
cagcucggagcuggacagc

SEQ ID NO: 2589300 - RNA, 19 nt, Artificial Sequence
  Description of Artificial Sequence: Synthetic oligonucleotide
uagaggccccaggcugcgc

SEQ ID NO: 2589301 - RNA, 19 nt, Artificial Sequence
  Description of Artificial Sequence: Synthetic oligonucleotide
gccauuugcucagguguga

SEQ ID NO: 2589302 - RNA, 19 nt, Artificial Sequence
  Description of Artificial Sequence: Synthetic oligonucleotide
ggccccaggcugcgcuucg

SEQ ID NO: 2589303 - RNA, 19 nt, Artificial Sequence
  Description of Artificial Sequence: Synthetic oligonucleotide
ccccaguccaccaggguaa

SEQ ID NO: 2589304 - RNA, 19 nt, Artificial Sequence
  Description of Artificial Sequence: Synthetic oligonucleotide
ggcccaugcaacugcuugu

SEQ ID NO: 2589305 - RNA, 19 nt, Artificial Sequence
  Description of Artificial Sequence: Synthetic oligonucleotide
gcccaugcaacugcuuguc

SEQ ID NO: 2589306 - RNA, 19 nt, Artificial Sequence
  Description of Artificial Sequence: Synthetic oligonucleotide
ccgcaggaaacuggagacc

SEQ ID NO: 2589307 - RNA, 19 nt, Artificial Sequence
  Description of Artificial Sequence: Synthetic oligonucleotide
cuggaucuguuccggcagu

SEQ ID NO: 2589308 - RNA, 19 nt, Artificial Sequence
  Description of Artificial Sequence: Synthetic oligonucleotide
ggaucuguuccggcaguaa

SEQ ID NO: 2589309 - RNA, 19 nt, Artificial Sequence
  Description of Artificial Sequence: Synthetic oligonucleotide
ccucagagcacgggagaug

SEQ ID NO: 2589310 - RNA, 19 nt, Artificial Sequence
  Description of Artificial Sequence: Synthetic oligonucleotide
cuauuugccccaggcugcu

SEQ ID NO: 2589311 - RNA, 19 nt, Artificial Sequence
  Description of Artificial Sequence: Synthetic oligonucleotide
gugcugggcccaugcaacu

SEQ ID NO: 2589312 - RNA, 19 nt, Artificial Sequence
  Description of Artificial Sequence: Synthetic oligonucleotide
cgggagaugcagguugccc

SEQ ID NO: 2589313 - RNA, 19 nt, Artificial Sequence
  Description of Artificial Sequence: Synthetic oligonucleotide
cuacagccugagcacuggu

SEQ ID NO: 2589314 - RNA, 19 nt, Artificial Sequence
  Description of Artificial Sequence: Synthetic oligonucleotide
accacagcucggagcugga

SEQ ID NO: 2589315 - RNA, 19 nt, Artificial Sequence
  Description of Artificial Sequence: Synthetic oligonucleotide
cugggcccaugcaacugcu

SEQ ID NO: 2589316 - RNA, 19 nt, Artificial Sequence
  Description of Artificial Sequence: Synthetic oligonucleotide
gcaacugcuugucgcugcu

SEQ ID NO: 2589317 - RNA, 19 nt, Artificial Sequence
  Description of Artificial Sequence: Synthetic oligonucleotide
cuguuccggcaguaaugcu

SEQ ID NO: 2589318 - RNA, 19 nt, Artificial Sequence
  Description of Artificial Sequence: Synthetic oligonucleotide
gggaucuccuucccuucgu

SEQ ID NO: 2589319 - RNA, 19 nt, Artificial Sequence
  Description of Artificial Sequence: Synthetic oligonucleotide
gcaagaggagucaggcccu

SEQ ID NO: 2589320 - RNA, 19 nt, Artificial Sequence
  Description of Artificial Sequence: Synthetic oligonucleotide
aggcugcgcuucgacccca

SEQ ID NO: 2589321 - RNA, 19 nt, Artificial Sequence
  Description of Artificial Sequence: Synthetic oligonucleotide
cagcacuccagccgucuau

SEQ ID NO: 2589322 - RNA, 19 nt, Artificial Sequence
  Description of Artificial Sequence: Synthetic oligonucleotide
ccuucccuucgugcugggc

SEQ ID NO: 2589323 - RNA, 19 nt, Artificial Sequence
  Description of Artificial Sequence: Synthetic oligonucleotide
ccacagagugugugaccca

SEQ ID NO: 2589324 - RNA, 19 nt, Artificial Sequence
  Description of Artificial Sequence: Synthetic oligonucleotide
cccagagcugucagauaaa

SEQ ID NO: 2589325 - RNA, 19 nt, Artificial Sequence
  Description of Artificial Sequence: Synthetic oligonucleotide
gccgaccacucugccgcag

SEQ ID NO: 2589326 - RNA, 19 nt, Artificial Sequence
  Description of Artificial Sequence: Synthetic oligonucleotide
ccaccaggguaagcucuug

SEQ ID NO: 2589327 - RNA, 19 nt, Artificial Sequence
  Description of Artificial Sequence: Synthetic oligonucleotide
ggcucacaugccgaccacu

SEQ ID NO: 2589328 - RNA, 19 nt, Artificial Sequence
  Description of Artificial Sequence: Synthetic oligonucleotide
ccucuggccgcaguccaca

SEQ ID NO: 2589329 - RNA, 19 nt, Artificial Sequence
  Description of Artificial Sequence: Synthetic oligonucleotide
cgucuauuugccccaggcu

SEQ ID NO: 2589330 - RNA, 19 nt, Artificial Sequence
  Description of Artificial Sequence: Synthetic oligonucleotide
cccauuguucugggaucuc

SEQ ID NO: 2589331 - RNA, 19 nt, Artificial Sequence
  Description of Artificial Sequence: Synthetic oligonucleotide
caccccaguccaccagggu

SEQ ID NO: 2589332 - RNA, 19 nt, Artificial Sequence
  Description of Artificial Sequence: Synthetic oligonucleotide
ggacagcacuccagccguc

SEQ ID NO: 2589333 - RNA, 19 nt, Artificial Sequence
  Description of Artificial Sequence: Synthetic oligonucleotide
ggacucagauaggccauuu

SEQ ID NO: 2589334 - RNA, 19 nt, Artificial Sequence
  Description of Artificial Sequence: Synthetic oligonucleotide
ccugagcacuggugaaacu

SEQ ID NO: 2589335 - RNA, 19 nt, Artificial Sequence
  Description of Artificial Sequence: Synthetic oligonucleotide
ccuucgugcugggcccaug

SEQ ID NO: 2589336 - RNA, 19 nt, Artificial Sequence
  Description of Artificial Sequence: Synthetic oligonucleotide
cgaccacucugccgcagga

SEQ ID NO: 2589337 - RNA, 19 nt, Artificial Sequence
  Description of Artificial Sequence: Synthetic oligonucleotide
gguggucaacaaagcugau

SEQ ID NO: 2589338 - RNA, 19 nt, Artificial Sequence
  Description of Artificial Sequence: Synthetic oligonucleotide
cagcugcuauugugccaau

SEQ ID NO: 2589339 - RNA, 19 nt, Artificial Sequence
  Description of Artificial Sequence: Synthetic oligonucleotide
gcgcuucgaccccauuguu

SEQ ID NO: 2589340 - RNA, 19 nt, Artificial Sequence
  Description of Artificial Sequence: Synthetic oligonucleotide
cgaccccauuguucuggga

SEQ ID NO: 2589341 - RNA, 19 nt, Artificial Sequence
  Description of Artificial Sequence: Synthetic oligonucleotide
cccaggaauagagcugcuu

SEQ ID NO: 2589342 - RNA, 19 nt, Artificial Sequence
  Description of Artificial Sequence: Synthetic oligonucleotide
gccccaggcugcgcuucga

SEQ ID NO: 2589343 - RNA, 19 nt, Artificial Sequence
  Description of Artificial Sequence: Synthetic oligonucleotide
gcugcgcuucgaccccauu

SEQ ID NO: 2589344 - RNA, 19 nt, Artificial Sequence
  Description of Artificial Sequence: Synthetic oligonucleotide
gcccaggaauagagcugcu

SEQ ID NO: 2589345 - RNA, 19 nt, Artificial Sequence
  Description of Artificial Sequence: Synthetic oligonucleotide
cgcaguccacagagugugu

SEQ ID NO: 2589346 - RNA, 19 nt, Artificial Sequence
  Description of Artificial Sequence: Synthetic oligonucleotide
ggcugcgcuucgaccccau

SEQ ID NO: 2589347 - RNA, 19 nt, Artificial Sequence
  Description of Artificial Sequence: Synthetic oligonucleotide
cccuucgugcugggcccau

SEQ ID NO: 2589348 - RNA, 19 nt, Artificial Sequence
  Description of Artificial Sequence: Synthetic oligonucleotide
ugucaaaucauuuugggag

SEQ ID NO: 2589349 - RNA, 19 nt, Artificial Sequence
  Description of Artificial Sequence: Synthetic oligonucleotide
uguaacuuuaaguagagcu

SEQ ID NO: 2589350 - RNA, 19 nt, Artificial Sequence
  Description of Artificial Sequence: Synthetic oligonucleotide
uaaguagagcuucauaucg

SEQ ID NO: 2589351 - RNA, 19 nt, Artificial Sequence
  Description of Artificial Sequence: Synthetic oligonucleotide
uuuaaguagagcuucauau

SEQ ID NO: 2589352 - RNA, 19 nt, Artificial Sequence
  Description of Artificial Sequence: Synthetic oligonucleotide
uuuaucaaacuucuucugc

SEQ ID NO: 2589353 - RNA, 19 nt, Artificial Sequence
  Description of Artificial Sequence: Synthetic oligonucleotide
aucgcagucuuucagaagg

SEQ ID NO: 2589354 - RNA, 19 nt, Artificial Sequence
  Description of Artificial Sequence: Synthetic oligonucleotide
aaaucauuuugggaggggc

SEQ ID NO: 2589355 - RNA, 19 nt, Artificial Sequence
  Description of Artificial Sequence: Synthetic oligonucleotide
ucuucuaaaaugaagccuc

SEQ ID NO: 2589356 - RNA, 19 nt, Artificial Sequence
  Description of Artificial Sequence: Synthetic oligonucleotide
aaaucaaagugguucauaa

SEQ ID NO: 2589357 - RNA, 19 nt, Artificial Sequence
  Description of Artificial Sequence: Synthetic oligonucleotide
uacauuugcaaucuugugu

SEQ ID NO: 2589358 - RNA, 19 nt, Artificial Sequence
  Description of Artificial Sequence: Synthetic oligonucleotide
aguagagcuucauaucgcc

SEQ ID NO: 2589359 - RNA, 19 nt, Artificial Sequence
  Description of Artificial Sequence: Synthetic oligonucleotide
aguccaugaauucuuuccc

SEQ ID NO: 2589360 - RNA, 19 nt, Artificial Sequence
  Description of Artificial Sequence: Synthetic oligonucleotide
augaacuacauuugcaauc

SEQ ID NO: 2589361 - RNA, 19 nt, Artificial Sequence
  Description of Artificial Sequence: Synthetic oligonucleotide
aauucuuuccccuggcuca

SEQ ID NO: 2589362 - RNA, 19 nt, Artificial Sequence
  Description of Artificial Sequence: Synthetic oligonucleotide
aguucauggccacacaagg

SEQ ID NO: 2589363 - RNA, 19 nt, Artificial Sequence
  Description of Artificial Sequence: Synthetic oligonucleotide
ucacgauaaaccuaagcgc

SEQ ID NO: 2589364 - RNA, 19 nt, Artificial Sequence
  Description of Artificial Sequence: Synthetic oligonucleotide
uaagauaugaguccaugaa

SEQ ID NO: 2589365 - RNA, 19 nt, Artificial Sequence
  Description of Artificial Sequence: Synthetic oligonucleotide
ucuucuucacgauaaaccu

SEQ ID NO: 2589366 - RNA, 19 nt, Artificial Sequence
  Description of Artificial Sequence: Synthetic oligonucleotide
uuggugucaaaucauuuug

SEQ ID NO: 2589367 - RNA, 19 nt, Artificial Sequence
  Description of Artificial Sequence: Synthetic oligonucleotide
aaccuguaacuuuaaguag

SEQ ID NO: 2589368 - RNA, 19 nt, Artificial Sequence
  Description of Artificial Sequence: Synthetic oligonucleotide
guucauaagauaugagucc

SEQ ID NO: 2589369 - RNA, 19 nt, Artificial Sequence
  Description of Artificial Sequence: Synthetic oligonucleotide
auguuggcaaaucaaagug

SEQ ID NO: 2589370 - RNA, 19 nt, Artificial Sequence
  Description of Artificial Sequence: Synthetic oligonucleotide
uuucagaagguauuccugc

SEQ ID NO: 2589371 - RNA, 19 nt, Artificial Sequence
  Description of Artificial Sequence: Synthetic oligonucleotide
uguuuugguuaucagcuug

SEQ ID NO: 2589372 - RNA, 19 nt, Artificial Sequence
  Description of Artificial Sequence: Synthetic oligonucleotide
uugguuaucagcuuguguu

SEQ ID NO: 2589373 - RNA, 19 nt, Artificial Sequence
  Description of Artificial Sequence: Synthetic oligonucleotide
uuaucaaacuucuucugcu

SEQ ID NO: 2589374 - RNA, 19 nt, Artificial Sequence
  Description of Artificial Sequence: Synthetic oligonucleotide
acaaccuguaacuuuaagu

SEQ ID NO: 2589375 - RNA, 19 nt, Artificial Sequence
  Description of Artificial Sequence: Synthetic oligonucleotide
uucuguuuugguuaucagc

SEQ ID NO: 2589376 - RNA, 19 nt, Artificial Sequence
  Description of Artificial Sequence: Synthetic oligonucleotide
gaguccaugaauucuuucc

SEQ ID NO: 2589377 - RNA, 19 nt, Artificial Sequence
  Description of Artificial Sequence: Synthetic oligonucleotide
auuugcaaucuuguguucc

SEQ ID NO: 2589378 - RNA, 19 nt, Artificial Sequence
  Description of Artificial Sequence: Synthetic oligonucleotide
uucuucacgauaaaccuaa

SEQ ID NO: 2589379 - RNA, 19 nt, Artificial Sequence
  Description of Artificial Sequence: Synthetic oligonucleotide
aagauaugaguccaugaau

SEQ ID NO: 2589380 - RNA, 19 nt, Artificial Sequence
  Description of Artificial Sequence: Synthetic oligonucleotide
uggugucaaaucauuuugg

SEQ ID NO: 2589381 - RNA, 19 nt, Artificial Sequence
  Description of Artificial Sequence: Synthetic oligonucleotide
aaagugguucauaagauau

SEQ ID NO: 2589382 - RNA, 19 nt, Artificial Sequence
  Description of Artificial Sequence: Synthetic oligonucleotide
cucucucuucucuaaaucg

SEQ ID NO: 2589383 - RNA, 19 nt, Artificial Sequence
  Description of Artificial Sequence: Synthetic oligonucleotide
ucaugaacuacauuugcaa

SEQ ID NO: 2589384 - RNA, 19 nt, Artificial Sequence
  Description of Artificial Sequence: Synthetic oligonucleotide
uaaaccuaagcgcaggcuc

SEQ ID NO: 2589385 - RNA, 19 nt, Artificial Sequence
  Description of Artificial Sequence: Synthetic oligonucleotide
agucuucuaaguuuuccuc

SEQ ID NO: 2589386 - RNA, 19 nt, Artificial Sequence
  Description of Artificial Sequence: Synthetic oligonucleotide
ucucucuucucuaaaucgc

SEQ ID NO: 2589387 - RNA, 19 nt, Artificial Sequence
  Description of Artificial Sequence: Synthetic oligonucleotide
aaaugaagccuccuuuggu

SEQ ID NO: 2589388 - RNA, 19 nt, Artificial Sequence
  Description of Artificial Sequence: Synthetic oligonucleotide
gucaaaucauuuugggagg

SEQ ID NO: 2589389 - RNA, 19 nt, Artificial Sequence
  Description of Artificial Sequence: Synthetic oligonucleotide
uggcucaugaacuacauuu

SEQ ID NO: 2589390 - RNA, 19 nt, Artificial Sequence
  Description of Artificial Sequence: Synthetic oligonucleotide
ucuuucagaagguauuccu

SEQ ID NO: 2589391 - RNA, 19 nt, Artificial Sequence
  Description of Artificial Sequence: Synthetic oligonucleotide
aaguagagcuucauaucgc

SEQ ID NO: 2589392 - RNA, 19 nt, Artificial Sequence
  Description of Artificial Sequence: Synthetic oligonucleotide
uucauaucgccccacugug

SEQ ID NO: 2589393 - RNA, 19 nt, Artificial Sequence
  Description of Artificial Sequence: Synthetic oligonucleotide
ugaacuacauuugcaaucu

SEQ ID NO: 2589394 - RNA, 19 nt, Artificial Sequence
  Description of Artificial Sequence: Synthetic oligonucleotide
uaaaucgcagucuuucaga

SEQ ID NO: 2589395 - RNA, 19 nt, Artificial Sequence
  Description of Artificial Sequence: Synthetic oligonucleotide
ucaaagugguucauaagau

SEQ ID NO: 2589396 - RNA, 19 nt, Artificial Sequence
  Description of Artificial Sequence: Synthetic oligonucleotide
uuaaguagagcuucauauc

SEQ ID NO: 2589397 - RNA, 19 nt, Artificial Sequence
  Description of Artificial Sequence: Synthetic oligonucleotide
auaagauaugaguccauga

SEQ ID NO: 2589398 - RNA, 19 nt, Artificial Sequence
  Description of Artificial Sequence: Synthetic oligonucleotide
uucauggccacacaagguc

SEQ ID NO: 2589399 - RNA, 19 nt, Artificial Sequence
  Description of Artificial Sequence: Synthetic oligonucleotide
uucauaagauaugagucca

SEQ ID NO: 2589400 - RNA, 19 nt, Artificial Sequence
  Description of Artificial Sequence: Synthetic oligonucleotide
uuuuacgcuggucaugccu

SEQ ID NO: 2589401 - RNA, 19 nt, Artificial Sequence
  Description of Artificial Sequence: Synthetic oligonucleotide
uucacaaccuguaacuuua

SEQ ID NO: 2589402 - RNA, 19 nt, Artificial Sequence
  Description of Artificial Sequence: Synthetic oligonucleotide
agucuuucgguacauguca

SEQ ID NO: 2589403 - RNA, 19 nt, Artificial Sequence
  Description of Artificial Sequence: Synthetic oligonucleotide
ucuaaaaugaagccuccuu

SEQ ID NO: 2589404 - RNA, 19 nt, Artificial Sequence
  Description of Artificial Sequence: Synthetic oligonucleotide
caugaauucuuuccccugg

SEQ ID NO: 2589405 - RNA, 19 nt, Artificial Sequence
  Description of Artificial Sequence: Synthetic oligonucleotide
ucuucucuaaaucgcaguc

SEQ ID NO: 2589406 - RNA, 19 nt, Artificial Sequence
  Description of Artificial Sequence: Synthetic oligonucleotide
acauuugcaaucuuguguu

SEQ ID NO: 2589407 - RNA, 19 nt, Artificial Sequence
  Description of Artificial Sequence: Synthetic oligonucleotide
cuggcuaccccaaacuucc

SEQ ID NO: 2589408 - RNA, 19 nt, Artificial Sequence
  Description of Artificial Sequence: Synthetic oligonucleotide
aacuacauuugcaaucuug

SEQ ID NO: 2589409 - RNA, 19 nt, Artificial Sequence
  Description of Artificial Sequence: Synthetic oligonucleotide
cacaaggucaagucuuucg

SEQ ID NO: 2589410 - RNA, 19 nt, Artificial Sequence
  Description of Artificial Sequence: Synthetic oligonucleotide
aaaucgcagucuuucagaa

SEQ ID NO: 2589411 - RNA, 19 nt, Artificial Sequence
  Description of Artificial Sequence: Synthetic oligonucleotide
cuaaaucgcagucuuucag

SEQ ID NO: 2589412 - RNA, 19 nt, Artificial Sequence
  Description of Artificial Sequence: Synthetic oligonucleotide
ucauguuuggugagcagcu

SEQ ID NO: 2589413 - RNA, 19 nt, Artificial Sequence
  Description of Artificial Sequence: Synthetic oligonucleotide
uguguuugucaucagcauc

SEQ ID NO: 2589414 - RNA, 19 nt, Artificial Sequence
  Description of Artificial Sequence: Synthetic oligonucleotide
ucaaaucauuuugggaggg

SEQ ID NO: 2589415 - RNA, 19 nt, Artificial Sequence
  Description of Artificial Sequence: Synthetic oligonucleotide
cuuguguuugucaucagca

SEQ ID NO: 2589416 - RNA, 19 nt, Artificial Sequence
  Description of Artificial Sequence: Synthetic oligonucleotide
aagguauuccugcuuggcu

SEQ ID NO: 2589417 - RNA, 19 nt, Artificial Sequence
  Description of Artificial Sequence: Synthetic oligonucleotide
uggcaaaucaaagugguuc

SEQ ID NO: 2589418 - RNA, 19 nt, Artificial Sequence
  Description of Artificial Sequence: Synthetic oligonucleotide
gauaugaguccaugaauuc

SEQ ID NO: 2589419 - RNA, 19 nt, Artificial Sequence
  Description of Artificial Sequence: Synthetic oligonucleotide
aggucaagucuuucgguac

SEQ ID NO: 2589420 - RNA, 19 nt, Artificial Sequence
  Description of Artificial Sequence: Synthetic oligonucleotide
uaacuuuaaguagagcuuc

SEQ ID NO: 2589421 - RNA, 19 nt, Artificial Sequence
  Description of Artificial Sequence: Synthetic oligonucleotide
cuuucagaagguauuccug

SEQ ID NO: 2589422 - RNA, 19 nt, Artificial Sequence
  Description of Artificial Sequence: Synthetic oligonucleotide
aagucuuucgguacauguc

SEQ ID NO: 2589423 - RNA, 19 nt, Artificial Sequence
  Description of Artificial Sequence: Synthetic oligonucleotide
ggugucaaaucauuuuggg

SEQ ID NO: 2589424 - RNA, 19 nt, Artificial Sequence
  Description of Artificial Sequence: Synthetic oligonucleotide
uuuacgcuggucaugccuc

SEQ ID NO: 2589425 - RNA, 19 nt, Artificial Sequence
  Description of Artificial Sequence: Synthetic oligonucleotide
caaccuguaacuuuaagua

SEQ ID NO: 2589426 - RNA, 19 nt, Artificial Sequence
  Description of Artificial Sequence: Synthetic oligonucleotide
agugguucauaagauauga

SEQ ID NO: 2589427 - RNA, 19 nt, Artificial Sequence
  Description of Artificial Sequence: Synthetic oligonucleotide
cacgauaaaccuaagcgca

SEQ ID NO: 2589428 - RNA, 19 nt, Artificial Sequence
  Description of Artificial Sequence: Synthetic oligonucleotide
acugcuucuuacugcucgc

SEQ ID NO: 2589429 - RNA, 19 nt, Artificial Sequence
  Description of Artificial Sequence: Synthetic oligonucleotide
ucacauguuggcaaaucaa

SEQ ID NO: 2589430 - RNA, 19 nt, Artificial Sequence
  Description of Artificial Sequence: Synthetic oligonucleotide
ucuaaaucgcagucuuuca

SEQ ID NO: 2589431 - RNA, 19 nt, Artificial Sequence
  Description of Artificial Sequence: Synthetic oligonucleotide
gaauucuuuccccuggcuc

SEQ ID NO: 2589432 - RNA, 19 nt, Artificial Sequence
  Description of Artificial Sequence: Synthetic oligonucleotide
aaucgcagucuuucagaag

SEQ ID NO: 2589433 - RNA, 19 nt, Artificial Sequence
  Description of Artificial Sequence: Synthetic oligonucleotide
aucacauguuggcaaauca

SEQ ID NO: 2589434 - RNA, 19 nt, Artificial Sequence
  Description of Artificial Sequence: Synthetic oligonucleotide
aaggucaagucuuucggua

SEQ ID NO: 2589435 - RNA, 19 nt, Artificial Sequence
  Description of Artificial Sequence: Synthetic oligonucleotide
uucucuaaaucgcagucuu

SEQ ID NO: 2589436 - RNA, 19 nt, Artificial Sequence
  Description of Artificial Sequence: Synthetic oligonucleotide
cacugcuucuuacugcucg

SEQ ID NO: 2589437 - RNA, 19 nt, Artificial Sequence
  Description of Artificial Sequence: Synthetic oligonucleotide
uccuucgcgucuuccagcg

SEQ ID NO: 2589438 - RNA, 19 nt, Artificial Sequence
  Description of Artificial Sequence: Synthetic oligonucleotide
ucagucuucuaaguuuucc

SEQ ID NO: 2589439 - RNA, 19 nt, Artificial Sequence
  Description of Artificial Sequence: Synthetic oligonucleotide
uuugcaaucuuguguuccu

SEQ ID NO: 2589440 - RNA, 19 nt, Artificial Sequence
  Description of Artificial Sequence: Synthetic oligonucleotide
acuacauuugcaaucuugu

SEQ ID NO: 2589441 - RNA, 19 nt, Artificial Sequence
  Description of Artificial Sequence: Synthetic oligonucleotide
cuucgcgucuuccagcgcg

SEQ ID NO: 2589442 - RNA, 19 nt, Artificial Sequence
  Description of Artificial Sequence: Synthetic oligonucleotide
gguucauaagauaugaguc

SEQ ID NO: 2589443 - RNA, 19 nt, Artificial Sequence
  Description of Artificial Sequence: Synthetic oligonucleotide
uucgguacaugucagucuu

SEQ ID NO: 2589444 - RNA, 19 nt, Artificial Sequence
  Description of Artificial Sequence: Synthetic oligonucleotide
cauaucgccccacugugag

SEQ ID NO: 2589445 - RNA, 19 nt, Artificial Sequence
  Description of Artificial Sequence: Synthetic oligonucleotide
cuucuaaaaugaagccucc

SEQ ID NO: 2589446 - RNA, 19 nt, Artificial Sequence
  Description of Artificial Sequence: Synthetic oligonucleotide
agcaucagcgcccgcugcc

SEQ ID NO: 2589447 - RNA, 19 nt, Artificial Sequence
  Description of Artificial Sequence: Synthetic oligonucleotide
cuggucaugccuccggugg

SEQ ID NO: 2589448 - RNA, 19 nt, Artificial Sequence
  Description of Artificial Sequence: Synthetic oligonucleotide
ucauggccacacaagguca

SEQ ID NO: 2589449 - RNA, 19 nt, Artificial Sequence
  Description of Artificial Sequence: Synthetic oligonucleotide
cucauguuuggugagcagc

SEQ ID NO: 2589450 - RNA, 19 nt, Artificial Sequence
  Description of Artificial Sequence: Synthetic oligonucleotide
cauacucauguuuggugag

SEQ ID NO: 2589451 - RNA, 19 nt, Artificial Sequence
  Description of Artificial Sequence: Synthetic oligonucleotide
ugucagucuucuaaguuuu

SEQ ID NO: 2589452 - RNA, 19 nt, Artificial Sequence
  Description of Artificial Sequence: Synthetic oligonucleotide
guacaugucagucuucuaa

SEQ ID NO: 2589453 - RNA, 19 nt, Artificial Sequence
  Description of Artificial Sequence: Synthetic oligonucleotide
uuucgguacaugucagucu

SEQ ID NO: 2589454 - RNA, 19 nt, Artificial Sequence
  Description of Artificial Sequence: Synthetic oligonucleotide
auacucauguuuggugagc

SEQ ID NO: 2589455 - RNA, 19 nt, Artificial Sequence
  Description of Artificial Sequence: Synthetic oligonucleotide
cagaagguauuccugcuug

SEQ ID NO: 2589456 - RNA, 19 nt, Artificial Sequence
  Description of Artificial Sequence: Synthetic oligonucleotide
uaucgccccacugugagug

SEQ ID NO: 2589457 - RNA, 19 nt, Artificial Sequence
  Description of Artificial Sequence: Synthetic oligonucleotide
acauguuggcaaaucaaag

SEQ ID NO: 2589458 - RNA, 19 nt, Artificial Sequence
  Description of Artificial Sequence: Synthetic oligonucleotide
cuaccccaaacuuccagag

SEQ ID NO: 2589459 - RNA, 19 nt, Artificial Sequence
  Description of Artificial Sequence: Synthetic oligonucleotide
uuccccuggcucaugaacu

SEQ ID NO: 2589460 - RNA, 19 nt, Artificial Sequence
  Description of Artificial Sequence: Synthetic oligonucleotide
auaugaguccaugaauucu

SEQ ID NO: 2589461 - RNA, 19 nt, Artificial Sequence
  Description of Artificial Sequence: Synthetic oligonucleotide
augucagucuucuaaguuu

SEQ ID NO: 2589462 - RNA, 19 nt, Artificial Sequence
  Description of Artificial Sequence: Synthetic oligonucleotide
cuacauuugcaaucuugug

SEQ ID NO: 2589463 - RNA, 19 nt, Artificial Sequence
  Description of Artificial Sequence: Synthetic oligonucleotide
agauaugaguccaugaauu

SEQ ID NO: 2589464 - RNA, 19 nt, Artificial Sequence
  Description of Artificial Sequence: Synthetic oligonucleotide
aaucauuuugggaggggcu

SEQ ID NO: 2589465 - RNA, 19 nt, Artificial Sequence
  Description of Artificial Sequence: Synthetic oligonucleotide
cucuaaaucgcagucuuuc

SEQ ID NO: 2589466 - RNA, 19 nt, Artificial Sequence
  Description of Artificial Sequence: Synthetic oligonucleotide
ugaauucuuuccccuggcu

SEQ ID NO: 2589467 - RNA, 19 nt, Artificial Sequence
  Description of Artificial Sequence: Synthetic oligonucleotide
cuucuaaguuuuccucugg

SEQ ID NO: 2589468 - RNA, 19 nt, Artificial Sequence
  Description of Artificial Sequence: Synthetic oligonucleotide
uaucagcuuguguuuguca

SEQ ID NO: 2589469 - RNA, 19 nt, Artificial Sequence
  Description of Artificial Sequence: Synthetic oligonucleotide
acgaggguucuucuucacg

SEQ ID NO: 2589470 - RNA, 19 nt, Artificial Sequence
  Description of Artificial Sequence: Synthetic oligonucleotide
agcuaucacauguuggcaa

SEQ ID NO: 2589471 - RNA, 19 nt, Artificial Sequence
  Description of Artificial Sequence: Synthetic oligonucleotide
gaagguauuccugcuuggc

SEQ ID NO: 2589472 - RNA, 19 nt, Artificial Sequence
  Description of Artificial Sequence: Synthetic oligonucleotide
caguucauggccacacaag

SEQ ID NO: 2589473 - RNA, 19 nt, Artificial Sequence
  Description of Artificial Sequence: Synthetic oligonucleotide
accuguaacuuuaaguaga

SEQ ID NO: 2589474 - RNA, 19 nt, Artificial Sequence
  Description of Artificial Sequence: Synthetic oligonucleotide
aagugguucauaagauaug

SEQ ID NO: 2589475 - RNA, 19 nt, Artificial Sequence
  Description of Artificial Sequence: Synthetic oligonucleotide
cucaugaacuacauuugca

SEQ ID NO: 2589476 - RNA, 19 nt, Artificial Sequence
  Description of Artificial Sequence: Synthetic oligonucleotide
cucgccgcaauucuuuuac

SEQ ID NO: 2589477 - RNA, 19 nt, Artificial Sequence
  Description of Artificial Sequence: Synthetic oligonucleotide
uaugucaguucauggccac

SEQ ID NO: 2589478 - RNA, 19 nt, Artificial Sequence
  Description of Artificial Sequence: Synthetic oligonucleotide
aaaccuaagcgcaggcucu

SEQ ID NO: 2589479 - RNA, 19 nt, Artificial Sequence
  Description of Artificial Sequence: Synthetic oligonucleotide
uccagagcccgcuucacaa

SEQ ID NO: 2589480 - RNA, 19 nt, Artificial Sequence
  Description of Artificial Sequence: Synthetic oligonucleotide
gauacggccgcgccgccag

SEQ ID NO: 2589481 - RNA, 19 nt, Artificial Sequence
  Description of Artificial Sequence: Synthetic oligonucleotide
gugucaaaucauuuuggga

SEQ ID NO: 2589482 - RNA, 19 nt, Artificial Sequence
  Description of Artificial Sequence: Synthetic oligonucleotide
ucuuuccccuggcucauga

SEQ ID NO: 2589483 - RNA, 19 nt, Artificial Sequence
  Description of Artificial Sequence: Synthetic oligonucleotide
ugucaguucauggccacac

SEQ ID NO: 2589484 - RNA, 19 nt, Artificial Sequence
  Description of Artificial Sequence: Synthetic oligonucleotide
acaugucagucuucuaagu

SEQ ID NO: 2589485 - RNA, 19 nt, Artificial Sequence
  Description of Artificial Sequence: Synthetic oligonucleotide
agguauuccugcuuggcuu

SEQ ID NO: 2589486 - RNA, 19 nt, Artificial Sequence
  Description of Artificial Sequence: Synthetic oligonucleotide
cuucuguuuugguuaucag

SEQ ID NO: 2589487 - RNA, 19 nt, Artificial Sequence
  Description of Artificial Sequence: Synthetic oligonucleotide
uccuuuggugucaaaucau

SEQ ID NO: 2589488 - RNA, 19 nt, Artificial Sequence
  Description of Artificial Sequence: Synthetic oligonucleotide
ucuuccagcgcguccuggc

SEQ ID NO: 2589489 - RNA, 19 nt, Artificial Sequence
  Description of Artificial Sequence: Synthetic oligonucleotide
uccacgcucgcgcguacgg

SEQ ID NO: 2589490 - RNA, 19 nt, Artificial Sequence
  Description of Artificial Sequence: Synthetic oligonucleotide
uuccgcuccacgcucgcgc

SEQ ID NO: 2589491 - RNA, 19 nt, Artificial Sequence
  Description of Artificial Sequence: Synthetic oligonucleotide
cuuccuucgcgucuuccag

SEQ ID NO: 2589492 - RNA, 19 nt, Artificial Sequence
  Description of Artificial Sequence: Synthetic oligonucleotide
uuguguuugucaucagcau

SEQ ID NO: 2589493 - RNA, 19 nt, Artificial Sequence
  Description of Artificial Sequence: Synthetic oligonucleotide
ucauaagauaugaguccau

SEQ ID NO: 2589494 - RNA, 19 nt, Artificial Sequence
  Description of Artificial Sequence: Synthetic oligonucleotide
ugacgaggguucuucuuca

SEQ ID NO: 2589495 - RNA, 19 nt, Artificial Sequence
  Description of Artificial Sequence: Synthetic oligonucleotide
ucauaucgccccacuguga

SEQ ID NO: 2589496 - RNA, 19 nt, Artificial Sequence
  Description of Artificial Sequence: Synthetic oligonucleotide
cugugagugacgaggguuc

SEQ ID NO: 2589497 - RNA, 19 nt, Artificial Sequence
  Description of Artificial Sequence: Synthetic oligonucleotide
ucagaagguauuccugcuu

SEQ ID NO: 2589498 - RNA, 19 nt, Artificial Sequence
  Description of Artificial Sequence: Synthetic oligonucleotide
cacauguuggcaaaucaaa

SEQ ID NO: 2589499 - RNA, 19 nt, Artificial Sequence
  Description of Artificial Sequence: Synthetic oligonucleotide
uaccccaaacuuccagagc

SEQ ID NO: 2589500 - RNA, 19 nt, Artificial Sequence
  Description of Artificial Sequence: Synthetic oligonucleotide
cuccuuuggugucaaauca

SEQ ID NO: 2589501 - RNA, 19 nt, Artificial Sequence
  Description of Artificial Sequence: Synthetic oligonucleotide
ugagugacgaggguucuuc

SEQ ID NO: 2589502 - RNA, 19 nt, Artificial Sequence
  Description of Artificial Sequence: Synthetic oligonucleotide
uacugcucgccgcaauucu

SEQ ID NO: 2589503 - RNA, 19 nt, Artificial Sequence
  Description of Artificial Sequence: Synthetic oligonucleotide
uccacacacugcuucuuac

SEQ ID NO: 2589504 - RNA, 19 nt, Artificial Sequence
  Description of Artificial Sequence: Synthetic oligonucleotide
ugcuucauuuucucucggu

SEQ ID NO: 2589505 - RNA, 19 nt, Artificial Sequence
  Description of Artificial Sequence: Synthetic oligonucleotide
cauguuggcaaaucaaagu

SEQ ID NO: 2589506 - RNA, 19 nt, Artificial Sequence
  Description of Artificial Sequence: Synthetic oligonucleotide
caaaucauuuugggagggg

SEQ ID NO: 2589507 - RNA, 19 nt, Artificial Sequence
  Description of Artificial Sequence: Synthetic oligonucleotide
ccucuucuaaaaugaagcc

SEQ ID NO: 2589508 - RNA, 19 nt, Artificial Sequence
  Description of Artificial Sequence: Synthetic oligonucleotide
gugacgaggguucuucuuc

SEQ ID NO: 2589509 - RNA, 19 nt, Artificial Sequence
  Description of Artificial Sequence: Synthetic oligonucleotide
uucuaaaaugaagccuccu

SEQ ID NO: 2589510 - RNA, 19 nt, Artificial Sequence
  Description of Artificial Sequence: Synthetic oligonucleotide
auaaaccuaagcgcaggcu

SEQ ID NO: 2589511 - RNA, 19 nt, Artificial Sequence
  Description of Artificial Sequence: Synthetic oligonucleotide
ggggcuuuuacgcugguca

SEQ ID NO: 2589512 - RNA, 19 nt, Artificial Sequence
  Description of Artificial Sequence: Synthetic oligonucleotide
agcgcguccuggcuacccc

SEQ ID NO: 2589513 - RNA, 19 nt, Artificial Sequence
  Description of Artificial Sequence: Synthetic oligonucleotide
ugguuaucagcuuguguuu

SEQ ID NO: 2589514 - RNA, 19 nt, Artificial Sequence
  Description of Artificial Sequence: Synthetic oligonucleotide
ggcaaaucaaagugguuca

SEQ ID NO: 2589515 - RNA, 19 nt, Artificial Sequence
  Description of Artificial Sequence: Synthetic oligonucleotide
uaucacauguuggcaaauc

SEQ ID NO: 2589516 - RNA, 19 nt, Artificial Sequence
  Description of Artificial Sequence: Synthetic oligonucleotide
acucauguuuggugagcag

SEQ ID NO: 2589517 - RNA, 19 nt, Artificial Sequence
  Description of Artificial Sequence: Synthetic oligonucleotide
gguccauacucauguuugg

SEQ ID NO: 2589518 - RNA, 19 nt, Artificial Sequence
  Description of Artificial Sequence: Synthetic oligonucleotide
gcucaugaacuacauuugc

SEQ ID NO: 2589519 - RNA, 19 nt, Artificial Sequence
  Description of Artificial Sequence: Synthetic oligonucleotide
cacaaccuguaacuuuaag

SEQ ID NO: 2589520 - RNA, 19 nt, Artificial Sequence
  Description of Artificial Sequence: Synthetic oligonucleotide
agagcuucauaucgcccca

SEQ ID NO: 2589521 - RNA, 19 nt, Artificial Sequence
  Description of Artificial Sequence: Synthetic oligonucleotide
aaccuaagcgcaggcucuc

SEQ ID NO: 2589522 - RNA, 19 nt, Artificial Sequence
  Description of Artificial Sequence: Synthetic oligonucleotide
cacgcucgcgcguacggcg

SEQ ID NO: 2589523 - RNA, 19 nt, Artificial Sequence
  Description of Artificial Sequence: Synthetic oligonucleotide
uuccuucgcgucuuccagc

SEQ ID NO: 2589524 - RNA, 19 nt, Artificial Sequence
  Description of Artificial Sequence: Synthetic oligonucleotide
gcuuuuacgcuggucaugc

SEQ ID NO: 2589525 - RNA, 19 nt, Artificial Sequence
  Description of Artificial Sequence: Synthetic oligonucleotide
cccacugugagugacgagg

SEQ ID NO: 2589526 - RNA, 19 nt, Artificial Sequence
  Description of Artificial Sequence: Synthetic oligonucleotide
ccuguaacuuuaaguagag

SEQ ID NO: 2589527 - RNA, 19 nt, Artificial Sequence
  Description of Artificial Sequence: Synthetic oligonucleotide
guuuuccucugguccauac

SEQ ID NO: 2589528 - RNA, 19 nt, Artificial Sequence
  Description of Artificial Sequence: Synthetic oligonucleotide
uggucaugccuccgguggc

SEQ ID NO: 2589529 - RNA, 19 nt, Artificial Sequence
  Description of Artificial Sequence: Synthetic oligonucleotide
ugccucacuuccuucgcgu

SEQ ID NO: 2589530 - RNA, 19 nt, Artificial Sequence
  Description of Artificial Sequence: Synthetic oligonucleotide
cuuuaaguagagcuucaua

SEQ ID NO: 2589531 - RNA, 19 nt, Artificial Sequence
  Description of Artificial Sequence: Synthetic oligonucleotide
uuacgcuggucaugccucc

SEQ ID NO: 2589532 - RNA, 19 nt, Artificial Sequence
  Description of Artificial Sequence: Synthetic oligonucleotide
uggcgcagcaucagcgccc

SEQ ID NO: 2589533 - RNA, 19 nt, Artificial Sequence
  Description of Artificial Sequence: Synthetic oligonucleotide
ucucgguuuuccugccuca

SEQ ID NO: 2589534 - RNA, 19 nt, Artificial Sequence
  Description of Artificial Sequence: Synthetic oligonucleotide
caaagugguucauaagaua

SEQ ID NO: 2589535 - RNA, 19 nt, Artificial Sequence
  Description of Artificial Sequence: Synthetic oligonucleotide
uccugcuuggcuucuguuu

SEQ ID NO: 2589536 - RNA, 19 nt, Artificial Sequence
  Description of Artificial Sequence: Synthetic oligonucleotide
agcgcaggcucucucuucu

SEQ ID NO: 2589537 - RNA, 19 nt, Artificial Sequence
  Description of Artificial Sequence: Synthetic oligonucleotide
agcaucucugcagcuauca

SEQ ID NO: 2589538 - RNA, 19 nt, Artificial Sequence
  Description of Artificial Sequence: Synthetic oligonucleotide
ucgguuuuccugccucacu

SEQ ID NO: 2589539 - RNA, 19 nt, Artificial Sequence
  Description of Artificial Sequence: Synthetic oligonucleotide
caagucuuucgguacaugu

SEQ ID NO: 2589540 - RNA, 19 nt, Artificial Sequence
  Description of Artificial Sequence: Synthetic oligonucleotide
acgauaaaccuaagcgcag

SEQ ID NO: 2589541 - RNA, 19 nt, Artificial Sequence
  Description of Artificial Sequence: Synthetic oligonucleotide
guguuugucaucagcaucu

SEQ ID NO: 2589542 - RNA, 19 nt, Artificial Sequence
  Description of Artificial Sequence: Synthetic oligonucleotide
uccgcuccacgcucgcgcg

SEQ ID NO: 2589543 - RNA, 19 nt, Artificial Sequence
  Description of Artificial Sequence: Synthetic oligonucleotide
guagagcuucauaucgccc

SEQ ID NO: 2589544 - RNA, 19 nt, Artificial Sequence
  Description of Artificial Sequence: Synthetic oligonucleotide
uucucucgguuuuccugcc

SEQ ID NO: 2589545 - RNA, 19 nt, Artificial Sequence
  Description of Artificial Sequence: Synthetic oligonucleotide
ugccgcuuccgcuccacgc

SEQ ID NO: 2589546 - RNA, 19 nt, Artificial Sequence
  Description of Artificial Sequence: Synthetic oligonucleotide
acugugagugacgaggguu

SEQ ID NO: 2589547 - RNA, 19 nt, Artificial Sequence
  Description of Artificial Sequence: Synthetic oligonucleotide
ugaagccuccuuugguguc

SEQ ID NO: 2589548 - RNA, 19 nt, Artificial Sequence
  Description of Artificial Sequence: Synthetic oligonucleotide
guuggcaaaucaaaguggu

SEQ ID NO: 2589549 - RNA, 19 nt, Artificial Sequence
  Description of Artificial Sequence: Synthetic oligonucleotide
gugguucauaagauaugag

SEQ ID NO: 2589550 - RNA, 19 nt, Artificial Sequence
  Description of Artificial Sequence: Synthetic oligonucleotide
gcuucuuacugcucgccgc

SEQ ID NO: 2589551 - RNA, 19 nt, Artificial Sequence
  Description of Artificial Sequence: Synthetic oligonucleotide
ucuuacugcucgccgcaau

SEQ ID NO: 2589552 - RNA, 19 nt, Artificial Sequence
  Description of Artificial Sequence: Synthetic oligonucleotide
uuggcaaaucaaagugguu

SEQ ID NO: 2589553 - RNA, 19 nt, Artificial Sequence
  Description of Artificial Sequence: Synthetic oligonucleotide
uccuggcuaccccaaacuu

SEQ ID NO: 2589554 - RNA, 19 nt, Artificial Sequence
  Description of Artificial Sequence: Synthetic oligonucleotide
cucugguccauacucaugu

SEQ ID NO: 2589555 - RNA, 19 nt, Artificial Sequence
  Description of Artificial Sequence: Synthetic oligonucleotide
ucucuaaaucgcagucuuu

SEQ ID NO: 2589556 - RNA, 19 nt, Artificial Sequence
  Description of Artificial Sequence: Synthetic oligonucleotide
cuucauaucgccccacugu

SEQ ID NO: 2589557 - RNA, 19 nt, Artificial Sequence
  Description of Artificial Sequence: Synthetic oligonucleotide
ucgcagucuuucagaaggu

SEQ ID NO: 2589558 - RNA, 19 nt, Artificial Sequence
  Description of Artificial Sequence: Synthetic oligonucleotide
agcuucauaucgccccacu

SEQ ID NO: 2589559 - RNA, 19 nt, Artificial Sequence
  Description of Artificial Sequence: Synthetic oligonucleotide
acgcuggucaugccuccgg

SEQ ID NO: 2589560 - RNA, 19 nt, Artificial Sequence
  Description of Artificial Sequence: Synthetic oligonucleotide
acacaaggucaagucuuuc

SEQ ID NO: 2589561 - RNA, 19 nt, Artificial Sequence
  Description of Artificial Sequence: Synthetic oligonucleotide
uuacugcucgccgcaauuc

SEQ ID NO: 2589562 - RNA, 19 nt, Artificial Sequence
  Description of Artificial Sequence: Synthetic oligonucleotide
cuuuuacgcuggucaugcc

SEQ ID NO: 2589563 - RNA, 19 nt, Artificial Sequence
  Description of Artificial Sequence: Synthetic oligonucleotide
ucacaaccuguaacuuuaa

SEQ ID NO: 2589564 - RNA, 19 nt, Artificial Sequence
  Description of Artificial Sequence: Synthetic oligonucleotide
gucuuucgguacaugucag

SEQ ID NO: 2589565 - RNA, 19 nt, Artificial Sequence
  Description of Artificial Sequence: Synthetic oligonucleotide
cuggcgcagcaucagcgcc

SEQ ID NO: 2589566 - RNA, 19 nt, Artificial Sequence
  Description of Artificial Sequence: Synthetic oligonucleotide
uccagcgcguccuggcuac

SEQ ID NO: 2589567 - RNA, 19 nt, Artificial Sequence
  Description of Artificial Sequence: Synthetic oligonucleotide
cugcuucauuuucucucgg

SEQ ID NO: 2589568 - RNA, 19 nt, Artificial Sequence
  Description of Artificial Sequence: Synthetic oligonucleotide
aucauuuugggaggggcuu

SEQ ID NO: 2589569 - RNA, 19 nt, Artificial Sequence
  Description of Artificial Sequence: Synthetic oligonucleotide
agugacgaggguucuucuu

SEQ ID NO: 2589570 - RNA, 19 nt, Artificial Sequence
  Description of Artificial Sequence: Synthetic oligonucleotide
gguuaucagcuuguguuug

SEQ ID NO: 2589571 - RNA, 19 nt, Artificial Sequence
  Description of Artificial Sequence: Synthetic oligonucleotide
cucucgguuuuccugccuc

SEQ ID NO: 2589572 - RNA, 19 nt, Artificial Sequence
  Description of Artificial Sequence: Synthetic oligonucleotide
acuuuaaguagagcuucau

SEQ ID NO: 2589573 - RNA, 19 nt, Artificial Sequence
  Description of Artificial Sequence: Synthetic oligonucleotide
cagcuuguguuugucauca

SEQ ID NO: 2589574 - RNA, 19 nt, Artificial Sequence
  Description of Artificial Sequence: Synthetic oligonucleotide
guaacuuuaaguagagcuu

SEQ ID NO: 2589575 - RNA, 19 nt, Artificial Sequence
  Description of Artificial Sequence: Synthetic oligonucleotide
cugccucacuuccuucgcg

SEQ ID NO: 2589576 - RNA, 19 nt, Artificial Sequence
  Description of Artificial Sequence: Synthetic oligonucleotide
cuucuucacgauaaaccua

SEQ ID NO: 2589577 - RNA, 19 nt, Artificial Sequence
  Description of Artificial Sequence: Synthetic oligonucleotide
ccauacucauguuugguga

SEQ ID NO: 2589578 - RNA, 19 nt, Artificial Sequence
  Description of Artificial Sequence: Synthetic oligonucleotide
ugugagugacgaggguucu

SEQ ID NO: 2589579 - RNA, 19 nt, Artificial Sequence
  Description of Artificial Sequence: Synthetic oligonucleotide
ggcucaugaacuacauuug

SEQ ID NO: 2589580 - RNA, 19 nt, Artificial Sequence
  Description of Artificial Sequence: Synthetic oligonucleotide
uacgcuggucaugccuccg

SEQ ID NO: 2589581 - RNA, 19 nt, Artificial Sequence
  Description of Artificial Sequence: Synthetic oligonucleotide
uucgcgucuuccagcgcgu

SEQ ID NO: 2589582 - RNA, 19 nt, Artificial Sequence
  Description of Artificial Sequence: Synthetic oligonucleotide
gacgaggguucuucuucac

SEQ ID NO: 2589583 - RNA, 19 nt, Artificial Sequence
  Description of Artificial Sequence: Synthetic oligonucleotide
caugaacuacauuugcaau

SEQ ID NO: 2589584 - RNA, 19 nt, Artificial Sequence
  Description of Artificial Sequence: Synthetic oligonucleotide
cacacugcuucuuacugcu

SEQ ID NO: 2589585 - RNA, 19 nt, Artificial Sequence
  Description of Artificial Sequence: Synthetic oligonucleotide
ucucucgguuuuccugccu

SEQ ID NO: 2589586 - RNA, 19 nt, Artificial Sequence
  Description of Artificial Sequence: Synthetic oligonucleotide
uggccacacaaggucaagu

SEQ ID NO: 2589587 - RNA, 19 nt, Artificial Sequence
  Description of Artificial Sequence: Synthetic oligonucleotide
gagcccgcuucacaaccug

SEQ ID NO: 2589588 - RNA, 19 nt, Artificial Sequence
  Description of Artificial Sequence: Synthetic oligonucleotide
gcuucauaucgccccacug

SEQ ID NO: 2589589 - RNA, 19 nt, Artificial Sequence
  Description of Artificial Sequence: Synthetic oligonucleotide
gaagccuccuuugguguca

SEQ ID NO: 2589590 - RNA, 19 nt, Artificial Sequence
  Description of Artificial Sequence: Synthetic oligonucleotide
ggcuaccccaaacuuccag

SEQ ID NO: 2589591 - RNA, 19 nt, Artificial Sequence
  Description of Artificial Sequence: Synthetic oligonucleotide
uggcuucuguuuugguuau

SEQ ID NO: 2589592 - RNA, 19 nt, Artificial Sequence
  Description of Artificial Sequence: Synthetic oligonucleotide
cauguuuggugagcagcug

SEQ ID NO: 2589593 - RNA, 19 nt, Artificial Sequence
  Description of Artificial Sequence: Synthetic oligonucleotide
gcuaccccaaacuuccaga

SEQ ID NO: 2589594 - RNA, 19 nt, Artificial Sequence
  Description of Artificial Sequence: Synthetic oligonucleotide
auaucgccccacugugagu

SEQ ID NO: 2589595 - RNA, 19 nt, Artificial Sequence
  Description of Artificial Sequence: Synthetic oligonucleotide
cuucauuuucucucgguuu

SEQ ID NO: 2589596 - RNA, 19 nt, Artificial Sequence
  Description of Artificial Sequence: Synthetic oligonucleotide
ggccacacaaggucaaguc

SEQ ID NO: 2589597 - RNA, 19 nt, Artificial Sequence
  Description of Artificial Sequence: Synthetic oligonucleotide
ggucaagucuuucgguaca

SEQ ID NO: 2589598 - RNA, 19 nt, Artificial Sequence
  Description of Artificial Sequence: Synthetic oligonucleotide
uauuccugcuuggcuucug

SEQ ID NO: 2589599 - RNA, 19 nt, Artificial Sequence
  Description of Artificial Sequence: Synthetic oligonucleotide
uuccagcgcguccuggcua

SEQ ID NO: 2589600 - RNA, 19 nt, Artificial Sequence
  Description of Artificial Sequence: Synthetic oligonucleotide
caaaucaaagugguucaua

SEQ ID NO: 2589601 - RNA, 19 nt, Artificial Sequence
  Description of Artificial Sequence: Synthetic oligonucleotide
ucugguccauacucauguu

SEQ ID NO: 2589602 - RNA, 19 nt, Artificial Sequence
  Description of Artificial Sequence: Synthetic oligonucleotide
ccuggcuaccccaaacuuc

SEQ ID NO: 2589603 - RNA, 19 nt, Artificial Sequence
  Description of Artificial Sequence: Synthetic oligonucleotide
ucgguacaugucagucuuc

SEQ ID NO: 2589604 - RNA, 19 nt, Artificial Sequence
  Description of Artificial Sequence: Synthetic oligonucleotide
cucuucucuaaaucgcagu

SEQ ID NO: 2589605 - RNA, 19 nt, Artificial Sequence
  Description of Artificial Sequence: Synthetic oligonucleotide
gcuaucacauguuggcaaa

SEQ ID NO: 2589606 - RNA, 19 nt, Artificial Sequence
  Description of Artificial Sequence: Synthetic oligonucleotide
aucagcaucucugcagcua

SEQ ID NO: 2589607 - RNA, 19 nt, Artificial Sequence
  Description of Artificial Sequence: Synthetic oligonucleotide
guuuugguuaucagcuugu

SEQ ID NO: 2589608 - RNA, 19 nt, Artificial Sequence
  Description of Artificial Sequence: Synthetic oligonucleotide
uccccuggcucaugaacua

SEQ ID NO: 2589609 - RNA, 19 nt, Artificial Sequence
  Description of Artificial Sequence: Synthetic oligonucleotide
cuuggcuucuguuuugguu

SEQ ID NO: 2589610 - RNA, 19 nt, Artificial Sequence
  Description of Artificial Sequence: Synthetic oligonucleotide
ucgccgcaauucuuuuacu

SEQ ID NO: 2589611 - RNA, 19 nt, Artificial Sequence
  Description of Artificial Sequence: Synthetic oligonucleotide
aggggcuuuuacgcugguc

SEQ ID NO: 2589612 - RNA, 19 nt, Artificial Sequence
  Description of Artificial Sequence: Synthetic oligonucleotide
gucaguucauggccacaca

SEQ ID NO: 2589613 - RNA, 19 nt, Artificial Sequence
  Description of Artificial Sequence: Synthetic oligonucleotide
gucaugccuccgguggccg

SEQ ID NO: 2589614 - RNA, 19 nt, Artificial Sequence
  Description of Artificial Sequence: Synthetic oligonucleotide
cuuuggugucaaaucauuu

SEQ ID NO: 2589615 - RNA, 19 nt, Artificial Sequence
  Description of Artificial Sequence: Synthetic oligonucleotide
ggaggggcuuuuacgcugg

SEQ ID NO: 2589616 - RNA, 19 nt, Artificial Sequence
  Description of Artificial Sequence: Synthetic oligonucleotide
caaggucaagucuuucggu

SEQ ID NO: 2589617 - RNA, 19 nt, Artificial Sequence
  Description of Artificial Sequence: Synthetic oligonucleotide
caugucagucuucuaaguu

SEQ ID NO: 2589618 - RNA, 19 nt, Artificial Sequence
  Description of Artificial Sequence: Synthetic oligonucleotide
auggccacacaaggucaag

SEQ ID NO: 2589619 - RNA, 19 nt, Artificial Sequence
  Description of Artificial Sequence: Synthetic oligonucleotide
ggguucuucuucacgauaa

SEQ ID NO: 2589620 - RNA, 19 nt, Artificial Sequence
  Description of Artificial Sequence: Synthetic oligonucleotide
cucgguuuuccugccucac

SEQ ID NO: 2589621 - RNA, 19 nt, Artificial Sequence
  Description of Artificial Sequence: Synthetic oligonucleotide
cauggccacacaaggucaa

SEQ ID NO: 2589622 - RNA, 19 nt, Artificial Sequence
  Description of Artificial Sequence: Synthetic oligonucleotide
cccaaacuuccagagcccg

SEQ ID NO: 2589623 - RNA, 19 nt, Artificial Sequence
  Description of Artificial Sequence: Synthetic oligonucleotide
cgauaaaccuaagcgcagg

SEQ ID NO: 2589624 - RNA, 19 nt, Artificial Sequence
  Description of Artificial Sequence: Synthetic oligonucleotide
cuaagcgcaggcucucucu

SEQ ID NO: 2589625 - RNA, 19 nt, Artificial Sequence
  Description of Artificial Sequence: Synthetic oligonucleotide
aucagcgcccgcugccgcu

SEQ ID NO: 2589626 - RNA, 19 nt, Artificial Sequence
  Description of Artificial Sequence: Synthetic oligonucleotide
ucgcgcguacggcggccgg

SEQ ID NO: 2589627 - RNA, 19 nt, Artificial Sequence
  Description of Artificial Sequence: Synthetic oligonucleotide
gccgccgcgggauacggcc

SEQ ID NO: 2589628 - RNA, 19 nt, Artificial Sequence
  Description of Artificial Sequence: Synthetic oligonucleotide
caucagcgcccgcugccgc

SEQ ID NO: 2589629 - RNA, 19 nt, Artificial Sequence
  Description of Artificial Sequence: Synthetic oligonucleotide
gucuuccagcgcguccugg

SEQ ID NO: 2589630 - RNA, 19 nt, Artificial Sequence
  Description of Artificial Sequence: Synthetic oligonucleotide
cuucucuaaaucgcagucu

SEQ ID NO: 2589631 - RNA, 19 nt, Artificial Sequence
  Description of Artificial Sequence: Synthetic oligonucleotide
ggcuuuuacgcuggucaug

SEQ ID NO: 2589632 - RNA, 19 nt, Artificial Sequence
  Description of Artificial Sequence: Synthetic oligonucleotide
ugcucgccgcaauucuuuu

SEQ ID NO: 2589633 - RNA, 19 nt, Artificial Sequence
  Description of Artificial Sequence: Synthetic oligonucleotide
guucauggccacacaaggu

SEQ ID NO: 2589634 - RNA, 19 nt, Artificial Sequence
  Description of Artificial Sequence: Synthetic oligonucleotide
cagcuaucacauguuggca

SEQ ID NO: 2589635 - RNA, 19 nt, Artificial Sequence
  Description of Artificial Sequence: Synthetic oligonucleotide
ccuggcgcagcaucagcgc

SEQ ID NO: 2589636 - RNA, 19 nt, Artificial Sequence
  Description of Artificial Sequence: Synthetic oligonucleotide
uucuuacugcucgccgcaa

SEQ ID NO: 2589637 - RNA, 19 nt, Artificial Sequence
  Description of Artificial Sequence: Synthetic oligonucleotide
ccgcuucacaaccuguaac

SEQ ID NO: 2589638 - RNA, 19 nt, Artificial Sequence
  Description of Artificial Sequence: Synthetic oligonucleotide
augucaguucauggccaca

SEQ ID NO: 2589639 - RNA, 19 nt, Artificial Sequence
  Description of Artificial Sequence: Synthetic oligonucleotide
gcuggucaugccuccggug

SEQ ID NO: 2589640 - RNA, 19 nt, Artificial Sequence
  Description of Artificial Sequence: Synthetic oligonucleotide
gaggguucuucuucacgau

SEQ ID NO: 2589641 - RNA, 19 nt, Artificial Sequence
  Description of Artificial Sequence: Synthetic oligonucleotide
gcgggauacggccgcgccg

SEQ ID NO: 2589642 - RNA, 19 nt, Artificial Sequence
  Description of Artificial Sequence: Synthetic oligonucleotide
cuuccgcuccacgcucgcg

SEQ ID NO: 2589643 - RNA, 19 nt, Artificial Sequence
  Description of Artificial Sequence: Synthetic oligonucleotide
gagcuucauaucgccccac

SEQ ID NO: 2589644 - RNA, 19 nt, Artificial Sequence
  Description of Artificial Sequence: Synthetic oligonucleotide
gagugacgaggguucuucu

SEQ ID NO: 2589645 - RNA, 19 nt, Artificial Sequence
  Description of Artificial Sequence: Synthetic oligonucleotide
agagcccgcuucacaaccu

SEQ ID NO: 2589646 - RNA, 19 nt, Artificial Sequence
  Description of Artificial Sequence: Synthetic oligonucleotide
ucgccccacugugagugac

SEQ ID NO: 2589647 - RNA, 19 nt, Artificial Sequence
  Description of Artificial Sequence: Synthetic oligonucleotide
cugccgcuuccgcuccacg

SEQ ID NO: 2589648 - RNA, 19 nt, Artificial Sequence
  Description of Artificial Sequence: Synthetic oligonucleotide
gucagucuucuaaguuuuc

SEQ ID NO: 2589649 - RNA, 19 nt, Artificial Sequence
  Description of Artificial Sequence: Synthetic oligonucleotide
ggucaugccuccgguggcc

SEQ ID NO: 2589650 - RNA, 19 nt, Artificial Sequence
  Description of Artificial Sequence: Synthetic oligonucleotide
gcaucagcgcccgcugccg

SEQ ID NO: 2589651 - RNA, 19 nt, Artificial Sequence
  Description of Artificial Sequence: Synthetic oligonucleotide
gccacacaaggucaagucu

SEQ ID NO: 2589652 - RNA, 19 nt, Artificial Sequence
  Description of Artificial Sequence: Synthetic oligonucleotide
guccauacucauguuuggu

SEQ ID NO: 2589653 - RNA, 19 nt, Artificial Sequence
  Description of Artificial Sequence: Synthetic oligonucleotide
acgcucgcgcguacggcgg

SEQ ID NO: 2589654 - RNA, 19 nt, Artificial Sequence
  Description of Artificial Sequence: Synthetic oligonucleotide
aucgccccacugugaguga

SEQ ID NO: 2589655 - RNA, 19 nt, Artificial Sequence
  Description of Artificial Sequence: Synthetic oligonucleotide
cuccacgcucgcgcguacg

SEQ ID NO: 2589656 - RNA, 19 nt, Artificial Sequence
  Description of Artificial Sequence: Synthetic oligonucleotide
cucgcgcguacggcggccg

SEQ ID NO: 2589657 - RNA, 19 nt, Artificial Sequence
  Description of Artificial Sequence: Synthetic oligonucleotide
ccucugguccauacucaug

SEQ ID NO: 2589658 - RNA, 19 nt, Artificial Sequence
  Description of Artificial Sequence: Synthetic oligonucleotide
cuuacugcucgccgcaauu

SEQ ID NO: 2589659 - RNA, 19 nt, Artificial Sequence
  Description of Artificial Sequence: Synthetic oligonucleotide
acugcucgccgcaauucuu

SEQ ID NO: 2589660 - RNA, 19 nt, Artificial Sequence
  Description of Artificial Sequence: Synthetic oligonucleotide
cuuuccccuggcucaugaa

SEQ ID NO: 2589661 - RNA, 19 nt, Artificial Sequence
  Description of Artificial Sequence: Synthetic oligonucleotide
accuaagcgcaggcucucu

SEQ ID NO: 2589662 - RNA, 19 nt, Artificial Sequence
  Description of Artificial Sequence: Synthetic oligonucleotide
cagcgcguccuggcuaccc

SEQ ID NO: 2589663 - RNA, 19 nt, Artificial Sequence
  Description of Artificial Sequence: Synthetic oligonucleotide
augccuccgguggccgccg

SEQ ID NO: 2589664 - RNA, 19 nt, Artificial Sequence
  Description of Artificial Sequence: Synthetic oligonucleotide
gccgcaauucuuuuacuuu

SEQ ID NO: 2589665 - RNA, 19 nt, Artificial Sequence
  Description of Artificial Sequence: Synthetic oligonucleotide
ccuaagcgcaggcucucuc

SEQ ID NO: 2589666 - RNA, 19 nt, Artificial Sequence
  Description of Artificial Sequence: Synthetic oligonucleotide
gaacuacauuugcaaucuu

SEQ ID NO: 2589667 - RNA, 19 nt, Artificial Sequence
  Description of Artificial Sequence: Synthetic oligonucleotide
gcagucuuucagaagguau

SEQ ID NO: 2589668 - RNA, 19 nt, Artificial Sequence
  Description of Artificial Sequence: Synthetic oligonucleotide
ggccuggcgcagcaucagc

SEQ ID NO: 2589669 - RNA, 19 nt, Artificial Sequence
  Description of Artificial Sequence: Synthetic oligonucleotide
ccacacaaggucaagucuu

SEQ ID NO: 2589670 - RNA, 19 nt, Artificial Sequence
  Description of Artificial Sequence: Synthetic oligonucleotide
cgcuucacaaccuguaacu

SEQ ID NO: 2589671 - RNA, 19 nt, Artificial Sequence
  Description of Artificial Sequence: Synthetic oligonucleotide
cguccuggcuaccccaaac

SEQ ID NO: 2589672 - RNA, 19 nt, Artificial Sequence
  Description of Artificial Sequence: Synthetic oligonucleotide
agccggggccuggcgcagc

SEQ ID NO: 2589673 - RNA, 19 nt, Artificial Sequence
  Description of Artificial Sequence: Synthetic oligonucleotide
cgggauacggccgcgccgc

SEQ ID NO: 2589674 - RNA, 19 nt, Artificial Sequence
  Description of Artificial Sequence: Synthetic oligonucleotide
gcguacggcggccggcagc

SEQ ID NO: 2589675 - RNA, 19 nt, Artificial Sequence
  Description of Artificial Sequence: Synthetic oligonucleotide
gcaggcucucucuucucua

SEQ ID NO: 2589676 - RNA, 19 nt, Artificial Sequence
  Description of Artificial Sequence: Synthetic oligonucleotide
ccuccucuucuaaaaugaa

SEQ ID NO: 2589677 - RNA, 19 nt, Artificial Sequence
  Description of Artificial Sequence: Synthetic oligonucleotide
cugcucgccgcaauucuuu

SEQ ID NO: 2589678 - RNA, 19 nt, Artificial Sequence
  Description of Artificial Sequence: Synthetic oligonucleotide
cuaucacauguuggcaaau

SEQ ID NO: 2589679 - RNA, 19 nt, Artificial Sequence
  Description of Artificial Sequence: Synthetic oligonucleotide
ucgcgucuuccagcgcguc

SEQ ID NO: 2589680 - RNA, 19 nt, Artificial Sequence
  Description of Artificial Sequence: Synthetic oligonucleotide
ccuuuggugucaaaucauu

SEQ ID NO: 2589681 - RNA, 19 nt, Artificial Sequence
  Description of Artificial Sequence: Synthetic oligonucleotide
ccgcaauucuuuuacuuuu

SEQ ID NO: 2589682 - RNA, 19 nt, Artificial Sequence
  Description of Artificial Sequence: Synthetic oligonucleotide
guauuccugcuuggcuucu

SEQ ID NO: 2589683 - RNA, 19 nt, Artificial Sequence
  Description of Artificial Sequence: Synthetic oligonucleotide
cacugugagugacgagggu

SEQ ID NO: 2589684 - RNA, 19 nt, Artificial Sequence
  Description of Artificial Sequence: Synthetic oligonucleotide
gccccacugugagugacga

SEQ ID NO: 2589685 - RNA, 19 nt, Artificial Sequence
  Description of Artificial Sequence: Synthetic oligonucleotide
cgcuuccgcuccacgcucg

SEQ ID NO: 2589686 - RNA, 19 nt, Artificial Sequence
  Description of Artificial Sequence: Synthetic oligonucleotide
gggcuuuuacgcuggucau

SEQ ID NO: 2589687 - RNA, 19 nt, Artificial Sequence
  Description of Artificial Sequence: Synthetic oligonucleotide
gggccuggcgcagcaucag

SEQ ID NO: 2589688 - RNA, 19 nt, Artificial Sequence
  Description of Artificial Sequence: Synthetic oligonucleotide
cgccccacugugagugacg

SEQ ID NO: 2589689 - RNA, 19 nt, Artificial Sequence
  Description of Artificial Sequence: Synthetic oligonucleotide
cuggcucaugaacuacauu

SEQ ID NO: 2589690 - RNA, 19 nt, Artificial Sequence
  Description of Artificial Sequence: Synthetic oligonucleotide
cgcgucuuccagcgcgucc

SEQ ID NO: 2589691 - RNA, 19 nt, Artificial Sequence
  Description of Artificial Sequence: Synthetic oligonucleotide
gcaaaucaaagugguucau

SEQ ID NO: 2589692 - RNA, 19 nt, Artificial Sequence
  Description of Artificial Sequence: Synthetic oligonucleotide
ccgccgcgggauacggccg

SEQ ID NO: 2589693 - RNA, 19 nt, Artificial Sequence
  Description of Artificial Sequence: Synthetic oligonucleotide
gcgucuuccagcgcguccu

SEQ ID NO: 2589694 - RNA, 19 nt, Artificial Sequence
  Description of Artificial Sequence: Synthetic oligonucleotide
agccuccuuuggugucaaa

SEQ ID NO: 2589695 - RNA, 19 nt, Artificial Sequence
  Description of Artificial Sequence: Synthetic oligonucleotide
ccuucgcgucuuccagcgc

SEQ ID NO: 2589696 - RNA, 19 nt, Artificial Sequence
  Description of Artificial Sequence: Synthetic oligonucleotide
gcucgccgcaauucuuuua

SEQ ID NO: 2589697 - RNA, 19 nt, Artificial Sequence
  Description of Artificial Sequence: Synthetic oligonucleotide
cccgcuucacaaccuguaa

SEQ ID NO: 2589698 - RNA, 19 nt, Artificial Sequence
  Description of Artificial Sequence: Synthetic oligonucleotide
cgcgggauacggccgcgcc

SEQ ID NO: 2589699 - RNA, 19 nt, Artificial Sequence
  Description of Artificial Sequence: Synthetic oligonucleotide
gcgcguccuggcuacccca

SEQ ID NO: 2589700 - RNA, 19 nt, Artificial Sequence
  Description of Artificial Sequence: Synthetic oligonucleotide
gggauacggccgcgccgcc

SEQ ID NO: 2589701 - RNA, 19 nt, Artificial Sequence
  Description of Artificial Sequence: Synthetic oligonucleotide
gaggggcuuuuacgcuggu

SEQ ID NO: 2589702 - RNA, 19 nt, Artificial Sequence
  Description of Artificial Sequence: Synthetic oligonucleotide
ccccacugugagugacgag

SEQ ID NO: 2589703 - RNA, 19 nt, Artificial Sequence
  Description of Artificial Sequence: Synthetic oligonucleotide
ccacgcucgcgcguacggc

SEQ ID NO: 2589704 - RNA, 19 nt, Artificial Sequence
  Description of Artificial Sequence: Synthetic oligonucleotide
ccccuggcucaugaacuac

SEQ ID NO: 2589705 - RNA, 19 nt, Artificial Sequence
  Description of Artificial Sequence: Synthetic oligonucleotide
ggauacggccgcgccgcca

SEQ ID NO: 2589706 - RNA, 19 nt, Artificial Sequence
  Description of Artificial Sequence: Synthetic oligonucleotide
uggccgccgccgcgggaua

SEQ ID NO: 2589707 - RNA, 19 nt, Artificial Sequence
  Description of Artificial Sequence: Synthetic oligonucleotide
gcuccacgcucgcgcguac

SEQ ID NO: 2589708 - RNA, 19 nt, Artificial Sequence
  Description of Artificial Sequence: Synthetic oligonucleotide
gccgcgggauacggccgcg

SEQ ID NO: 2589709 - RNA, 19 nt, Artificial Sequence
  Description of Artificial Sequence: Synthetic oligonucleotide
gcucgcgcguacggcggcc

SEQ ID NO: 2589710 - RNA, 19 nt, Artificial Sequence
  Description of Artificial Sequence: Synthetic oligonucleotide
guggccgccgccgcgggau

SEQ ID NO: 2589711 - RNA, 19 nt, Artificial Sequence
  Description of Artificial Sequence: Synthetic oligonucleotide
gugagugacgaggguucuu

SEQ ID NO: 2589712 - RNA, 19 nt, Artificial Sequence
  Description of Artificial Sequence: Synthetic oligonucleotide
gccgccagccggggccugg

SEQ ID NO: 2589713 - RNA, 19 nt, Artificial Sequence
  Description of Artificial Sequence: Synthetic oligonucleotide
cgccgcgggauacggccgc

SEQ ID NO: 2589714 - RNA, 19 nt, Artificial Sequence
  Description of Artificial Sequence: Synthetic oligonucleotide
cgguuuuccugccucacuu

SEQ ID NO: 2589715 - RNA, 19 nt, Artificial Sequence
  Description of Artificial Sequence: Synthetic oligonucleotide
cgucuuccagcgcguccug

SEQ ID NO: 2589716 - RNA, 19 nt, Artificial Sequence
  Description of Artificial Sequence: Synthetic oligonucleotide
ccgccgccgcgggauacgg

SEQ ID NO: 2589717 - RNA, 19 nt, Artificial Sequence
  Description of Artificial Sequence: Synthetic oligonucleotide
gguggccgccgccgcggga

SEQ ID NO: 2589718 - RNA, 19 nt, Artificial Sequence
  Description of Artificial Sequence: Synthetic oligonucleotide
cgccgcaauucuuuuacuu

SEQ ID NO: 2589719 - RNA, 19 nt, Artificial Sequence
  Description of Artificial Sequence: Synthetic oligonucleotide
cgcucgcgcguacggcggc

SEQ ID NO: 2589720 - RNA, 19 nt, Artificial Sequence
  Description of Artificial Sequence: Synthetic oligonucleotide
ccgcgggauacggccgcgc

SEQ ID NO: 2589721 - RNA, 19 nt, Artificial Sequence
  Description of Artificial Sequence: Synthetic oligonucleotide
cgcagucuuucagaaggua

SEQ ID NO: 2589722 - RNA, 19 nt, Artificial Sequence
  Description of Artificial Sequence: Synthetic oligonucleotide
guacggcggccggcagcuc

SEQ ID NO: 2589723 - RNA, 19 nt, Artificial Sequence
  Description of Artificial Sequence: Synthetic oligonucleotide
ccagcgcguccuggcuacc

SEQ ID NO: 2589724 - RNA, 19 nt, Artificial Sequence
  Description of Artificial Sequence: Synthetic oligonucleotide
cgcgcguacggcggccggc

SEQ ID NO: 2589725 - RNA, 19 nt, Artificial Sequence
  Description of Artificial Sequence: Synthetic oligonucleotide
cguacggcggccggcagcu

SEQ ID NO: 2589726 - RNA, 19 nt, Artificial Sequence
  Description of Artificial Sequence: Synthetic oligonucleotide
cgcguacggcggccggcag

SEQ ID NO: 2589727 - RNA, 19 nt, Artificial Sequence
  Description of Artificial Sequence: Synthetic oligonucleotide
ccgccagccggggccuggc

SEQ ID NO: 2589728 - RNA, 19 nt, Artificial Sequence
  Description of Artificial Sequence: Synthetic oligonucleotide
cgcguccuggcuaccccaa

SEQ ID NO: 2589729 - RNA, 19 nt, Artificial Sequence
  Description of Artificial Sequence: Synthetic oligonucleotide
gcgcagcaucagcgcccgc

SEQ ID NO: 2589730 - RNA, 19 nt, Artificial Sequence
  Description of Artificial Sequence: Synthetic oligonucleotide
cgguggccgccgccgcggg

SEQ ID NO: 2589731 - RNA, 19 nt, Artificial Sequence
  Description of Artificial Sequence: Synthetic oligonucleotide
cgcuggucaugccuccggu

SEQ ID NO: 2589732 - RNA, 19 nt, Artificial Sequence
  Description of Artificial Sequence: Synthetic oligonucleotide
cgcuccacgcucgcgcgua

SEQ ID NO: 2589733 - RNA, 19 nt, Artificial Sequence
  Description of Artificial Sequence: Synthetic oligonucleotide
ccgcuccacgcucgcgcgu

SEQ ID NO: 2589734 - RNA, 19 nt, Artificial Sequence
  Description of Artificial Sequence: Synthetic oligonucleotide
gcgccgccagccggggccu

SEQ ID NO: 2589735 - RNA, 19 nt, Artificial Sequence
  Description of Artificial Sequence: Synthetic oligonucleotide
cgccgccagccggggccug

SEQ ID NO: 2589736 - RNA, 19 nt, Artificial Sequence
  Description of Artificial Sequence: Synthetic oligonucleotide
ucaaacuccaucaugaucu

SEQ ID NO: 2589737 - RNA, 19 nt, Artificial Sequence
  Description of Artificial Sequence: Synthetic oligonucleotide
aacuuucggacauagcggc

SEQ ID NO: 2589738 - RNA, 19 nt, Artificial Sequence
  Description of Artificial Sequence: Synthetic oligonucleotide
agagucuguaucuugaggg

SEQ ID NO: 2589739 - RNA, 19 nt, Artificial Sequence
  Description of Artificial Sequence: Synthetic oligonucleotide
gaguuguuggauuugagag

SEQ ID NO: 2589740 - RNA, 19 nt, Artificial Sequence
  Description of Artificial Sequence: Synthetic oligonucleotide
ugugccauugaguuguugg

SEQ ID NO: 2589741 - RNA, 19 nt, Artificial Sequence
  Description of Artificial Sequence: Synthetic oligonucleotide
uucgccaugauucggacag

SEQ ID NO: 2589742 - RNA, 19 nt, Artificial Sequence
  Description of Artificial Sequence: Synthetic oligonucleotide
uaucuugagggacacagcc

SEQ ID NO: 2589743 - RNA, 19 nt, Artificial Sequence
  Description of Artificial Sequence: Synthetic oligonucleotide
uguaucuugagggacacag

SEQ ID NO: 2589744 - RNA, 19 nt, Artificial Sequence
  Description of Artificial Sequence: Synthetic oligonucleotide
aacaacagguccauggugg

SEQ ID NO: 2589745 - RNA, 19 nt, Artificial Sequence
  Description of Artificial Sequence: Synthetic oligonucleotide
ucugcaaugauuuucuuuu

SEQ ID NO: 2589746 - RNA, 19 nt, Artificial Sequence
  Description of Artificial Sequence: Synthetic oligonucleotide
aggucuuucgccaugauuc

SEQ ID NO: 2589747 - RNA, 19 nt, Artificial Sequence
  Description of Artificial Sequence: Synthetic oligonucleotide
augauuuucuuuuccuggg

SEQ ID NO: 2589748 - RNA, 19 nt, Artificial Sequence
  Description of Artificial Sequence: Synthetic oligonucleotide
uuugauagcucaucuguga

SEQ ID NO: 2589749 - RNA, 19 nt, Artificial Sequence
  Description of Artificial Sequence: Synthetic oligonucleotide
aucaacacgaacuuucgga

SEQ ID NO: 2589750 - RNA, 19 nt, Artificial Sequence
  Description of Artificial Sequence: Synthetic oligonucleotide
ugagugaaccaccagugga

SEQ ID NO: 2589751 - RNA, 19 nt, Artificial Sequence
  Description of Artificial Sequence: Synthetic oligonucleotide
uguucagucccugcgaagg

SEQ ID NO: 2589752 - RNA, 19 nt, Artificial Sequence
  Description of Artificial Sequence: Synthetic oligonucleotide
ucggacagcguccaucugg

SEQ ID NO: 2589753 - RNA, 19 nt, Artificial Sequence
  Description of Artificial Sequence: Synthetic oligonucleotide
ugaguuguuggauuugaga

SEQ ID NO: 2589754 - RNA, 19 nt, Artificial Sequence
  Description of Artificial Sequence: Synthetic oligonucleotide
gaacuuucggacauagcgg

SEQ ID NO: 2589755 - RNA, 19 nt, Artificial Sequence
  Description of Artificial Sequence: Synthetic oligonucleotide
ugauagcucaucugugagg

SEQ ID NO: 2589756 - RNA, 19 nt, Artificial Sequence
  Description of Artificial Sequence: Synthetic oligonucleotide
ucugguuuugccgaagcag

SEQ ID NO: 2589757 - RNA, 19 nt, Artificial Sequence
  Description of Artificial Sequence: Synthetic oligonucleotide
uucagcugucuguucaugg

SEQ ID NO: 2589758 - RNA, 19 nt, Artificial Sequence
  Description of Artificial Sequence: Synthetic oligonucleotide
ucaacacgaacuuucggac

SEQ ID NO: 2589759 - RNA, 19 nt, Artificial Sequence
  Description of Artificial Sequence: Synthetic oligonucleotide
caugauucggacagcgucc

SEQ ID NO: 2589760 - RNA, 19 nt, Artificial Sequence
  Description of Artificial Sequence: Synthetic oligonucleotide
gagagucuguaucuugagg

SEQ ID NO: 2589761 - RNA, 19 nt, Artificial Sequence
  Description of Artificial Sequence: Synthetic oligonucleotide
cauggcucgguucagggcc

SEQ ID NO: 2589762 - RNA, 19 nt, Artificial Sequence
  Description of Artificial Sequence: Synthetic oligonucleotide
cauggcaucgucgauggcg

SEQ ID NO: 2589763 - RNA, 19 nt, Artificial Sequence
  Description of Artificial Sequence: Synthetic oligonucleotide
cacaacagcaucacucucc

SEQ ID NO: 2589764 - RNA, 19 nt, Artificial Sequence
  Description of Artificial Sequence: Synthetic oligonucleotide
ucuuccucgucgcccaugg

SEQ ID NO: 2589765 - RNA, 19 nt, Artificial Sequence
  Description of Artificial Sequence: Synthetic oligonucleotide
ucugggguaacuucagcug

SEQ ID NO: 2589766 - RNA, 19 nt, Artificial Sequence
  Description of Artificial Sequence: Synthetic oligonucleotide
ucgauggcgucauucauca

SEQ ID NO: 2589767 - RNA, 19 nt, Artificial Sequence
  Description of Artificial Sequence: Synthetic oligonucleotide
cgaacuuucggacauagcg

SEQ ID NO: 2589768 - RNA, 19 nt, Artificial Sequence
  Description of Artificial Sequence: Synthetic oligonucleotide
ucuuucgccaugauucgga

SEQ ID NO: 2589769 - RNA, 19 nt, Artificial Sequence
  Description of Artificial Sequence: Synthetic oligonucleotide
aguuguuggauuugagagu

SEQ ID NO: 2589770 - RNA, 19 nt, Artificial Sequence
  Description of Artificial Sequence: Synthetic oligonucleotide
uuccaggucugcaucagca

SEQ ID NO: 2589771 - RNA, 19 nt, Artificial Sequence
  Description of Artificial Sequence: Synthetic oligonucleotide
guuuugccgaagcaguucc

SEQ ID NO: 2589772 - RNA, 19 nt, Artificial Sequence
  Description of Artificial Sequence: Synthetic oligonucleotide
gaugucugcaaugauuuuc

SEQ ID NO: 2589773 - RNA, 19 nt, Artificial Sequence
  Description of Artificial Sequence: Synthetic oligonucleotide
uguuggauuugagagucug

SEQ ID NO: 2589774 - RNA, 19 nt, Artificial Sequence
  Description of Artificial Sequence: Synthetic oligonucleotide
uuccucgucgcccauggca

SEQ ID NO: 2589775 - RNA, 19 nt, Artificial Sequence
  Description of Artificial Sequence: Synthetic oligonucleotide
gaacaacagguccauggug

SEQ ID NO: 2589776 - RNA, 19 nt, Artificial Sequence
  Description of Artificial Sequence: Synthetic oligonucleotide
uggauguuggcgcgcauca

SEQ ID NO: 2589777 - RNA, 19 nt, Artificial Sequence
  Description of Artificial Sequence: Synthetic oligonucleotide
uuggcgcgcaucaacacga

SEQ ID NO: 2589778 - RNA, 19 nt, Artificial Sequence
  Description of Artificial Sequence: Synthetic oligonucleotide
gauguuggcgcgcaucaac

SEQ ID NO: 2589779 - RNA, 19 nt, Artificial Sequence
  Description of Artificial Sequence: Synthetic oligonucleotide
gacacagccuggauguugg

SEQ ID NO: 2589780 - RNA, 19 nt, Artificial Sequence
  Description of Artificial Sequence: Synthetic oligonucleotide
guuguuggauuugagaguc

SEQ ID NO: 2589781 - RNA, 19 nt, Artificial Sequence
  Description of Artificial Sequence: Synthetic oligonucleotide
ugauuuucuuuuccugggu

SEQ ID NO: 2589782 - RNA, 19 nt, Artificial Sequence
  Description of Artificial Sequence: Synthetic oligonucleotide
agucuguaucuugagggac

SEQ ID NO: 2589783 - RNA, 19 nt, Artificial Sequence
  Description of Artificial Sequence: Synthetic oligonucleotide
gauuugagagucuguaucu

SEQ ID NO: 2589784 - RNA, 19 nt, Artificial Sequence
  Description of Artificial Sequence: Synthetic oligonucleotide
gagugaaccaccaguggag

SEQ ID NO: 2589785 - RNA, 19 nt, Artificial Sequence
  Description of Artificial Sequence: Synthetic oligonucleotide
caugaucucugccugccgc

SEQ ID NO: 2589786 - RNA, 19 nt, Artificial Sequence
  Description of Artificial Sequence: Synthetic oligonucleotide
auucggacagcguccaucu

SEQ ID NO: 2589787 - RNA, 19 nt, Artificial Sequence
  Description of Artificial Sequence: Synthetic oligonucleotide
guuggcgcgcaucaacacg

SEQ ID NO: 2589788 - RNA, 19 nt, Artificial Sequence
  Description of Artificial Sequence: Synthetic oligonucleotide
caucagccaaggcugaggc

SEQ ID NO: 2589789 - RNA, 19 nt, Artificial Sequence
  Description of Artificial Sequence: Synthetic oligonucleotide
ugucuguucauggugccca

SEQ ID NO: 2589790 - RNA, 19 nt, Artificial Sequence
  Description of Artificial Sequence: Synthetic oligonucleotide
cuuucggacauagcggcgg

SEQ ID NO: 2589791 - RNA, 19 nt, Artificial Sequence
  Description of Artificial Sequence: Synthetic oligonucleotide
ggauuugagagucuguauc

SEQ ID NO: 2589792 - RNA, 19 nt, Artificial Sequence
  Description of Artificial Sequence: Synthetic oligonucleotide
ucuggggcagacgucagcc

SEQ ID NO: 2589793 - RNA, 19 nt, Artificial Sequence
  Description of Artificial Sequence: Synthetic oligonucleotide
gagggacacagccuggaug

SEQ ID NO: 2589794 - RNA, 19 nt, Artificial Sequence
  Description of Artificial Sequence: Synthetic oligonucleotide
uuggauuugagagucugua

SEQ ID NO: 2589795 - RNA, 19 nt, Artificial Sequence
  Description of Artificial Sequence: Synthetic oligonucleotide
ucagcugucuguucauggu

SEQ ID NO: 2589796 - RNA, 19 nt, Artificial Sequence
  Description of Artificial Sequence: Synthetic oligonucleotide
cugagugaaccaccagugg

SEQ ID NO: 2589797 - RNA, 19 nt, Artificial Sequence
  Description of Artificial Sequence: Synthetic oligonucleotide
caucaugaucuucuggauc

SEQ ID NO: 2589798 - RNA, 19 nt, Artificial Sequence
  Description of Artificial Sequence: Synthetic oligonucleotide
agugaaccaccaguggagg

SEQ ID NO: 2589799 - RNA, 19 nt, Artificial Sequence
  Description of Artificial Sequence: Synthetic oligonucleotide
ccgaacaacagguccaugg

SEQ ID NO: 2589800 - RNA, 19 nt, Artificial Sequence
  Description of Artificial Sequence: Synthetic oligonucleotide
agguuugauagcucaucug

SEQ ID NO: 2589801 - RNA, 19 nt, Artificial Sequence
  Description of Artificial Sequence: Synthetic oligonucleotide
acacaacagcaucacucuc

SEQ ID NO: 2589802 - RNA, 19 nt, Artificial Sequence
  Description of Artificial Sequence: Synthetic oligonucleotide
auagcggcgggugcggacc

SEQ ID NO: 2589803 - RNA, 19 nt, Artificial Sequence
  Description of Artificial Sequence: Synthetic oligonucleotide
uggccugugccauugaguu

SEQ ID NO: 2589804 - RNA, 19 nt, Artificial Sequence
  Description of Artificial Sequence: Synthetic oligonucleotide
auugaguuguuggauuuga

SEQ ID NO: 2589805 - RNA, 19 nt, Artificial Sequence
  Description of Artificial Sequence: Synthetic oligonucleotide
aucgucgauggcgucauuc

SEQ ID NO: 2589806 - RNA, 19 nt, Artificial Sequence
  Description of Artificial Sequence: Synthetic oligonucleotide
uccagcucccucauggcuc

SEQ ID NO: 2589807 - RNA, 19 nt, Artificial Sequence
  Description of Artificial Sequence: Synthetic oligonucleotide
agguccauggugguaggac

SEQ ID NO: 2589808 - RNA, 19 nt, Artificial Sequence
  Description of Artificial Sequence: Synthetic oligonucleotide
agcaucacucuccuccuca

SEQ ID NO: 2589809 - RNA, 19 nt, Artificial Sequence
  Description of Artificial Sequence: Synthetic oligonucleotide
ucgucgauggcgucauuca

SEQ ID NO: 2589810 - RNA, 19 nt, Artificial Sequence
  Description of Artificial Sequence: Synthetic oligonucleotide
guuugauagcucaucugug

SEQ ID NO: 2589811 - RNA, 19 nt, Artificial Sequence
  Description of Artificial Sequence: Synthetic oligonucleotide
gacacaacagcaucacucu

SEQ ID NO: 2589812 - RNA, 19 nt, Artificial Sequence
  Description of Artificial Sequence: Synthetic oligonucleotide
ggugguaggacuccaccag

SEQ ID NO: 2589813 - RNA, 19 nt, Artificial Sequence
  Description of Artificial Sequence: Synthetic oligonucleotide
ucagucccugcgaagguuc

SEQ ID NO: 2589814 - RNA, 19 nt, Artificial Sequence
  Description of Artificial Sequence: Synthetic oligonucleotide
gagucuguaucuugaggga

SEQ ID NO: 2589815 - RNA, 19 nt, Artificial Sequence
  Description of Artificial Sequence: Synthetic oligonucleotide
uggauuugagagucuguau

SEQ ID NO: 2589816 - RNA, 19 nt, Artificial Sequence
  Description of Artificial Sequence: Synthetic oligonucleotide
uugagccucucuuccaggu

SEQ ID NO: 2589817 - RNA, 19 nt, Artificial Sequence
  Description of Artificial Sequence: Synthetic oligonucleotide
uuguucagucccugcgaag

SEQ ID NO: 2589818 - RNA, 19 nt, Artificial Sequence
  Description of Artificial Sequence: Synthetic oligonucleotide
cuugagggacacagccugg

SEQ ID NO: 2589819 - RNA, 19 nt, Artificial Sequence
  Description of Artificial Sequence: Synthetic oligonucleotide
cauguccaugaucucugcc

SEQ ID NO: 2589820 - RNA, 19 nt, Artificial Sequence
  Description of Artificial Sequence: Synthetic oligonucleotide
uuuccuggguuucuagcuu

SEQ ID NO: 2589821 - RNA, 19 nt, Artificial Sequence
  Description of Artificial Sequence: Synthetic oligonucleotide
gguuugauagcucaucugu

SEQ ID NO: 2589822 - RNA, 19 nt, Artificial Sequence
  Description of Artificial Sequence: Synthetic oligonucleotide
ucauggcucgguucagggc

SEQ ID NO: 2589823 - RNA, 19 nt, Artificial Sequence
  Description of Artificial Sequence: Synthetic oligonucleotide
uagcucaucugugaggcuc

SEQ ID NO: 2589824 - RNA, 19 nt, Artificial Sequence
  Description of Artificial Sequence: Synthetic oligonucleotide
ucuggccuugcuuugccau

SEQ ID NO: 2589825 - RNA, 19 nt, Artificial Sequence
  Description of Artificial Sequence: Synthetic oligonucleotide
gaggcucagucccagcuca

SEQ ID NO: 2589826 - RNA, 19 nt, Artificial Sequence
  Description of Artificial Sequence: Synthetic oligonucleotide
ucgcccauggcaucgucga

SEQ ID NO: 2589827 - RNA, 19 nt, Artificial Sequence
  Description of Artificial Sequence: Synthetic oligonucleotide
gauucggacagcguccauc

SEQ ID NO: 2589828 - RNA, 19 nt, Artificial Sequence
  Description of Artificial Sequence: Synthetic oligonucleotide
ggucuuucgccaugauucg

SEQ ID NO: 2589829 - RNA, 19 nt, Artificial Sequence
  Description of Artificial Sequence: Synthetic oligonucleotide
ggaccugggacacaacagc

SEQ ID NO: 2589830 - RNA, 19 nt, Artificial Sequence
  Description of Artificial Sequence: Synthetic oligonucleotide
agggcccucugguuuugcc

SEQ ID NO: 2589831 - RNA, 19 nt, Artificial Sequence
  Description of Artificial Sequence: Synthetic oligonucleotide
gugcggaccaggucuuucg

SEQ ID NO: 2589832 - RNA, 19 nt, Artificial Sequence
  Description of Artificial Sequence: Synthetic oligonucleotide
uuucgccaugauucggaca

SEQ ID NO: 2589833 - RNA, 19 nt, Artificial Sequence
  Description of Artificial Sequence: Synthetic oligonucleotide
gagguuugauagcucaucu

SEQ ID NO: 2589834 - RNA, 19 nt, Artificial Sequence
  Description of Artificial Sequence: Synthetic oligonucleotide
uccucgucgcccauggcau

SEQ ID NO: 2589835 - RNA, 19 nt, Artificial Sequence
  Description of Artificial Sequence: Synthetic oligonucleotide
uccaucuggccuugcuuug

SEQ ID NO: 2589836 - RNA, 19 nt, Artificial Sequence
  Description of Artificial Sequence: Synthetic oligonucleotide
cuuucgccaugauucggac

SEQ ID NO: 2589837 - RNA, 19 nt, Artificial Sequence
  Description of Artificial Sequence: Synthetic oligonucleotide
ucggacauagcggcgggug

SEQ ID NO: 2589838 - RNA, 19 nt, Artificial Sequence
  Description of Artificial Sequence: Synthetic oligonucleotide
acaacagguccaugguggu

SEQ ID NO: 2589839 - RNA, 19 nt, Artificial Sequence
  Description of Artificial Sequence: Synthetic oligonucleotide
ucuugcggcgcccgaacaa

SEQ ID NO: 2589840 - RNA, 19 nt, Artificial Sequence
  Description of Artificial Sequence: Synthetic oligonucleotide
cacgaacuuucggacauag

SEQ ID NO: 2589841 - RNA, 19 nt, Artificial Sequence
  Description of Artificial Sequence: Synthetic oligonucleotide
uguuggcgcgcaucaacac

SEQ ID NO: 2589842 - RNA, 19 nt, Artificial Sequence
  Description of Artificial Sequence: Synthetic oligonucleotide
ccugcgaagguucuugagc

SEQ ID NO: 2589843 - RNA, 19 nt, Artificial Sequence
  Description of Artificial Sequence: Synthetic oligonucleotide
ugcggaccaggucuuucgc

SEQ ID NO: 2589844 - RNA, 19 nt, Artificial Sequence
  Description of Artificial Sequence: Synthetic oligonucleotide
caggucugcaucagcauca

SEQ ID NO: 2589845 - RNA, 19 nt, Artificial Sequence
  Description of Artificial Sequence: Synthetic oligonucleotide
ugaggcucagucccagcuc

SEQ ID NO: 2589846 - RNA, 19 nt, Artificial Sequence
  Description of Artificial Sequence: Synthetic oligonucleotide
ugcggcgcccgaacaacag

SEQ ID NO: 2589847 - RNA, 19 nt, Artificial Sequence
  Description of Artificial Sequence: Synthetic oligonucleotide
cauggccugugccauugag

SEQ ID NO: 2589848 - RNA, 19 nt, Artificial Sequence
  Description of Artificial Sequence: Synthetic oligonucleotide
ugggguaacuucagcuguc

SEQ ID NO: 2589849 - RNA, 19 nt, Artificial Sequence
  Description of Artificial Sequence: Synthetic oligonucleotide
acagcguccaucuggccuu

SEQ ID NO: 2589850 - RNA, 19 nt, Artificial Sequence
  Description of Artificial Sequence: Synthetic oligonucleotide
cacacugagugaaccacca

SEQ ID NO: 2589851 - RNA, 19 nt, Artificial Sequence
  Description of Artificial Sequence: Synthetic oligonucleotide
acacugagugaaccaccag

SEQ ID NO: 2589852 - RNA, 19 nt, Artificial Sequence
  Description of Artificial Sequence: Synthetic oligonucleotide
aggaccugggacacaacag

SEQ ID NO: 2589853 - RNA, 19 nt, Artificial Sequence
  Description of Artificial Sequence: Synthetic oligonucleotide
uccauggugguaggacucc

SEQ ID NO: 2589854 - RNA, 19 nt, Artificial Sequence
  Description of Artificial Sequence: Synthetic oligonucleotide
acagguccauggugguagg

SEQ ID NO: 2589855 - RNA, 19 nt, Artificial Sequence
  Description of Artificial Sequence: Synthetic oligonucleotide
ccaugauucggacagcguc

SEQ ID NO: 2589856 - RNA, 19 nt, Artificial Sequence
  Description of Artificial Sequence: Synthetic oligonucleotide
gugccauugaguuguugga

SEQ ID NO: 2589857 - RNA, 19 nt, Artificial Sequence
  Description of Artificial Sequence: Synthetic oligonucleotide
agccacacugagugaacca

SEQ ID NO: 2589858 - RNA, 19 nt, Artificial Sequence
  Description of Artificial Sequence: Synthetic oligonucleotide
cauugaguuguuggauuug

SEQ ID NO: 2589859 - RNA, 19 nt, Artificial Sequence
  Description of Artificial Sequence: Synthetic oligonucleotide
acgaacuuucggacauagc

SEQ ID NO: 2589860 - RNA, 19 nt, Artificial Sequence
  Description of Artificial Sequence: Synthetic oligonucleotide
cauggugguaggacuccac

SEQ ID NO: 2589861 - RNA, 19 nt, Artificial Sequence
  Description of Artificial Sequence: Synthetic oligonucleotide
gguaacuucagcugucugu

SEQ ID NO: 2589862 - RNA, 19 nt, Artificial Sequence
  Description of Artificial Sequence: Synthetic oligonucleotide
cugcaaugauuuucuuuuc

SEQ ID NO: 2589863 - RNA, 19 nt, Artificial Sequence
  Description of Artificial Sequence: Synthetic oligonucleotide
ugccauugaguuguuggau

SEQ ID NO: 2589864 - RNA, 19 nt, Artificial Sequence
  Description of Artificial Sequence: Synthetic oligonucleotide
gcaucaacacgaacuuucg

SEQ ID NO: 2589865 - RNA, 19 nt, Artificial Sequence
  Description of Artificial Sequence: Synthetic oligonucleotide
ugguuuugccgaagcaguu

SEQ ID NO: 2589866 - RNA, 19 nt, Artificial Sequence
  Description of Artificial Sequence: Synthetic oligonucleotide
aggucuggggcagacguca

SEQ ID NO: 2589867 - RNA, 19 nt, Artificial Sequence
  Description of Artificial Sequence: Synthetic oligonucleotide
uucugccgcucccugucca

SEQ ID NO: 2589868 - RNA, 19 nt, Artificial Sequence
  Description of Artificial Sequence: Synthetic oligonucleotide
uuguuggauuugagagucu

SEQ ID NO: 2589869 - RNA, 19 nt, Artificial Sequence
  Description of Artificial Sequence: Synthetic oligonucleotide
uccuggguuucuagcuucu

SEQ ID NO: 2589870 - RNA, 19 nt, Artificial Sequence
  Description of Artificial Sequence: Synthetic oligonucleotide
caacacgaacuuucggaca

SEQ ID NO: 2589871 - RNA, 19 nt, Artificial Sequence
  Description of Artificial Sequence: Synthetic oligonucleotide
ugcgaagguucuugagccu

SEQ ID NO: 2589872 - RNA, 19 nt, Artificial Sequence
  Description of Artificial Sequence: Synthetic oligonucleotide
gucuuucgccaugauucgg

SEQ ID NO: 2589873 - RNA, 19 nt, Artificial Sequence
  Description of Artificial Sequence: Synthetic oligonucleotide
acuuucggacauagcggcg

SEQ ID NO: 2589874 - RNA, 19 nt, Artificial Sequence
  Description of Artificial Sequence: Synthetic oligonucleotide
caggaccugggacacaaca

SEQ ID NO: 2589875 - RNA, 19 nt, Artificial Sequence
  Description of Artificial Sequence: Synthetic oligonucleotide
uccaggucugcaucagcau

SEQ ID NO: 2589876 - RNA, 19 nt, Artificial Sequence
  Description of Artificial Sequence: Synthetic oligonucleotide
cucgucgcccauggcaucg

SEQ ID NO: 2589877 - RNA, 19 nt, Artificial Sequence
  Description of Artificial Sequence: Synthetic oligonucleotide
cugguuuugccgaagcagu

SEQ ID NO: 2589878 - RNA, 19 nt, Artificial Sequence
  Description of Artificial Sequence: Synthetic oligonucleotide
auuugagagucuguaucuu

SEQ ID NO: 2589879 - RNA, 19 nt, Artificial Sequence
  Description of Artificial Sequence: Synthetic oligonucleotide
auguuggcgcgcaucaaca

SEQ ID NO: 2589880 - RNA, 19 nt, Artificial Sequence
  Description of Artificial Sequence: Synthetic oligonucleotide
augauucggacagcgucca

SEQ ID NO: 2589881 - RNA, 19 nt, Artificial Sequence
  Description of Artificial Sequence: Synthetic oligonucleotide
auggcaucgucgauggcgu

SEQ ID NO: 2589882 - RNA, 19 nt, Artificial Sequence
  Description of Artificial Sequence: Synthetic oligonucleotide
ggggagguuugauagcuca

SEQ ID NO: 2589883 - RNA, 19 nt, Artificial Sequence
  Description of Artificial Sequence: Synthetic oligonucleotide
uaacuucagcugucuguuc

SEQ ID NO: 2589884 - RNA, 19 nt, Artificial Sequence
  Description of Artificial Sequence: Synthetic oligonucleotide
ugcccauggccuugguaac

SEQ ID NO: 2589885 - RNA, 19 nt, Artificial Sequence
  Description of Artificial Sequence: Synthetic oligonucleotide
ggacauagcggcgggugcg

SEQ ID NO: 2589886 - RNA, 19 nt, Artificial Sequence
  Description of Artificial Sequence: Synthetic oligonucleotide
gucgauggcgucauucauc

SEQ ID NO: 2589887 - RNA, 19 nt, Artificial Sequence
  Description of Artificial Sequence: Synthetic oligonucleotide
ugaugucugcaaugauuuu

SEQ ID NO: 2589888 - RNA, 19 nt, Artificial Sequence
  Description of Artificial Sequence: Synthetic oligonucleotide
gaccaggucuuucgccaug

SEQ ID NO: 2589889 - RNA, 19 nt, Artificial Sequence
  Description of Artificial Sequence: Synthetic oligonucleotide
cagccacacugagugaacc

SEQ ID NO: 2589890 - RNA, 19 nt, Artificial Sequence
  Description of Artificial Sequence: Synthetic oligonucleotide
gucgcccauggcaucgucg

SEQ ID NO: 2589891 - RNA, 19 nt, Artificial Sequence
  Description of Artificial Sequence: Synthetic oligonucleotide
cacugagugaaccaccagu

SEQ ID NO: 2589892 - RNA, 19 nt, Artificial Sequence
  Description of Artificial Sequence: Synthetic oligonucleotide
gcaaugauuuucuuuuccu

SEQ ID NO: 2589893 - RNA, 19 nt, Artificial Sequence
  Description of Artificial Sequence: Synthetic oligonucleotide
cuugcggcgcccgaacaac

SEQ ID NO: 2589894 - RNA, 19 nt, Artificial Sequence
  Description of Artificial Sequence: Synthetic oligonucleotide
uucagggcccucugguuuu

SEQ ID NO: 2589895 - RNA, 19 nt, Artificial Sequence
  Description of Artificial Sequence: Synthetic oligonucleotide
uugcggcgcccgaacaaca

SEQ ID NO: 2589896 - RNA, 19 nt, Artificial Sequence
  Description of Artificial Sequence: Synthetic oligonucleotide
auggcucgguucagggccc

SEQ ID NO: 2589897 - RNA, 19 nt, Artificial Sequence
  Description of Artificial Sequence: Synthetic oligonucleotide
auagcucaucugugaggcu

SEQ ID NO: 2589898 - RNA, 19 nt, Artificial Sequence
  Description of Artificial Sequence: Synthetic oligonucleotide
ucuguucauggugcccaug

SEQ ID NO: 2589899 - RNA, 19 nt, Artificial Sequence
  Description of Artificial Sequence: Synthetic oligonucleotide
cauccaggaccugggacac

SEQ ID NO: 2589900 - RNA, 19 nt, Artificial Sequence
  Description of Artificial Sequence: Synthetic oligonucleotide
gaaccaccaguggagggga

SEQ ID NO: 2589901 - RNA, 19 nt, Artificial Sequence
  Description of Artificial Sequence: Synthetic oligonucleotide
gaggggagguuugauagcu

SEQ ID NO: 2589902 - RNA, 19 nt, Artificial Sequence
  Description of Artificial Sequence: Synthetic oligonucleotide
gucccugcgaagguucuug

SEQ ID NO: 2589903 - RNA, 19 nt, Artificial Sequence
  Description of Artificial Sequence: Synthetic oligonucleotide
cauagcggcgggugcggac

SEQ ID NO: 2589904 - RNA, 19 nt, Artificial Sequence
  Description of Artificial Sequence: Synthetic oligonucleotide
gccgaagcaguuccucagg

SEQ ID NO: 2589905 - RNA, 19 nt, Artificial Sequence
  Description of Artificial Sequence: Synthetic oligonucleotide
ucccugcgaagguucuuga

SEQ ID NO: 2589906 - RNA, 19 nt, Artificial Sequence
  Description of Artificial Sequence: Synthetic oligonucleotide
uucggacagcguccaucug

SEQ ID NO: 2589907 - RNA, 19 nt, Artificial Sequence
  Description of Artificial Sequence: Synthetic oligonucleotide
cuucagcugucuguucaug

SEQ ID NO: 2589908 - RNA, 19 nt, Artificial Sequence
  Description of Artificial Sequence: Synthetic oligonucleotide
ccacacugagugaaccacc

SEQ ID NO: 2589909 - RNA, 19 nt, Artificial Sequence
  Description of Artificial Sequence: Synthetic oligonucleotide
auggccugugccauugagu

SEQ ID NO: 2589910 - RNA, 19 nt, Artificial Sequence
  Description of Artificial Sequence: Synthetic oligonucleotide
cuggccuugcuuugccauc

SEQ ID NO: 2589911 - RNA, 19 nt, Artificial Sequence
  Description of Artificial Sequence: Synthetic oligonucleotide
ggagguuugauagcucauc

SEQ ID NO: 2589912 - RNA, 19 nt, Artificial Sequence
  Description of Artificial Sequence: Synthetic oligonucleotide
ggaggggagguuugauagc

SEQ ID NO: 2589913 - RNA, 19 nt, Artificial Sequence
  Description of Artificial Sequence: Synthetic oligonucleotide
gcaucagccaaggcugagg

SEQ ID NO: 2589914 - RNA, 19 nt, Artificial Sequence
  Description of Artificial Sequence: Synthetic oligonucleotide
cucccucauggcucgguuc

SEQ ID NO: 2589915 - RNA, 19 nt, Artificial Sequence
  Description of Artificial Sequence: Synthetic oligonucleotide
accaguggaggggagguuu

SEQ ID NO: 2589916 - RNA, 19 nt, Artificial Sequence
  Description of Artificial Sequence: Synthetic oligonucleotide
cuggauguuggcgcgcauc

SEQ ID NO: 2589917 - RNA, 19 nt, Artificial Sequence
  Description of Artificial Sequence: Synthetic oligonucleotide
ucauggccugugccauuga

SEQ ID NO: 2589918 - RNA, 19 nt, Artificial Sequence
  Description of Artificial Sequence: Synthetic oligonucleotide
uucagucccugcgaagguu

SEQ ID NO: 2589919 - RNA, 19 nt, Artificial Sequence
  Description of Artificial Sequence: Synthetic oligonucleotide
agcaucagccaaggcugag

SEQ ID NO: 2589920 - RNA, 19 nt, Artificial Sequence
  Description of Artificial Sequence: Synthetic oligonucleotide
ugucugcaaugauuuucuu

SEQ ID NO: 2589921 - RNA, 19 nt, Artificial Sequence
  Description of Artificial Sequence: Synthetic oligonucleotide
accaggucuuucgccauga

SEQ ID NO: 2589922 - RNA, 19 nt, Artificial Sequence
  Description of Artificial Sequence: Synthetic oligonucleotide
cucugguuuugccgaagca

SEQ ID NO: 2589923 - RNA, 19 nt, Artificial Sequence
  Description of Artificial Sequence: Synthetic oligonucleotide
ugccgcucccuguccagcu

SEQ ID NO: 2589924 - RNA, 19 nt, Artificial Sequence
  Description of Artificial Sequence: Synthetic oligonucleotide
guccauggugguaggacuc

SEQ ID NO: 2589925 - RNA, 19 nt, Artificial Sequence
  Description of Artificial Sequence: Synthetic oligonucleotide
gcgcccgaacaacaggucc

SEQ ID NO: 2589926 - RNA, 19 nt, Artificial Sequence
  Description of Artificial Sequence: Synthetic oligonucleotide
aggacuccaccagcagguc

SEQ ID NO: 2589927 - RNA, 19 nt, Artificial Sequence
  Description of Artificial Sequence: Synthetic oligonucleotide
guggaggggagguuugaua

SEQ ID NO: 2589928 - RNA, 19 nt, Artificial Sequence
  Description of Artificial Sequence: Synthetic oligonucleotide
gguuuugccgaagcaguuc

SEQ ID NO: 2589929 - RNA, 19 nt, Artificial Sequence
  Description of Artificial Sequence: Synthetic oligonucleotide
cugggguaacuucagcugu

SEQ ID NO: 2589930 - RNA, 19 nt, Artificial Sequence
  Description of Artificial Sequence: Synthetic oligonucleotide
ggcgucauucaucaucucu

SEQ ID NO: 2589931 - RNA, 19 nt, Artificial Sequence
  Description of Artificial Sequence: Synthetic oligonucleotide
agcucaucugugaggcuca

SEQ ID NO: 2589932 - RNA, 19 nt, Artificial Sequence
  Description of Artificial Sequence: Synthetic oligonucleotide
ccgaagcaguuccucaggc

SEQ ID NO: 2589933 - RNA, 19 nt, Artificial Sequence
  Description of Artificial Sequence: Synthetic oligonucleotide
ggacacagccuggauguug

SEQ ID NO: 2589934 - RNA, 19 nt, Artificial Sequence
  Description of Artificial Sequence: Synthetic oligonucleotide
gccacacugagugaaccac

SEQ ID NO: 2589935 - RNA, 19 nt, Artificial Sequence
  Description of Artificial Sequence: Synthetic oligonucleotide
ccaggucugcaucagcauc

SEQ ID NO: 2589936 - RNA, 19 nt, Artificial Sequence
  Description of Artificial Sequence: Synthetic oligonucleotide
ggcccucugguuuugccga

SEQ ID NO: 2589937 - RNA, 19 nt, Artificial Sequence
  Description of Artificial Sequence: Synthetic oligonucleotide
ugauucggacagcguccau

SEQ ID NO: 2589938 - RNA, 19 nt, Artificial Sequence
  Description of Artificial Sequence: Synthetic oligonucleotide
cugcaucagcaucagccaa

SEQ ID NO: 2589939 - RNA, 19 nt, Artificial Sequence
  Description of Artificial Sequence: Synthetic oligonucleotide
aaccaccaguggaggggag

SEQ ID NO: 2589940 - RNA, 19 nt, Artificial Sequence
  Description of Artificial Sequence: Synthetic oligonucleotide
uucggacauagcggcgggu

SEQ ID NO: 2589941 - RNA, 19 nt, Artificial Sequence
  Description of Artificial Sequence: Synthetic oligonucleotide
gcggaccaggucuuucgcc

SEQ ID NO: 2589942 - RNA, 19 nt, Artificial Sequence
  Description of Artificial Sequence: Synthetic oligonucleotide
caggucuggggcagacguc

SEQ ID NO: 2589943 - RNA, 19 nt, Artificial Sequence
  Description of Artificial Sequence: Synthetic oligonucleotide
cuuccucgucgcccauggc

SEQ ID NO: 2589944 - RNA, 19 nt, Artificial Sequence
  Description of Artificial Sequence: Synthetic oligonucleotide
uagcggcgggugcggacca

SEQ ID NO: 2589945 - RNA, 19 nt, Artificial Sequence
  Description of Artificial Sequence: Synthetic oligonucleotide
guuggauuugagagucugu

SEQ ID NO: 2589946 - RNA, 19 nt, Artificial Sequence
  Description of Artificial Sequence: Synthetic oligonucleotide
gcaggucuggggcagacgu

SEQ ID NO: 2589947 - RNA, 19 nt, Artificial Sequence
  Description of Artificial Sequence: Synthetic oligonucleotide
gcccauggcaucgucgaug

SEQ ID NO: 2589948 - RNA, 19 nt, Artificial Sequence
  Description of Artificial Sequence: Synthetic oligonucleotide
gccugugccauugaguugu

SEQ ID NO: 2589949 - RNA, 19 nt, Artificial Sequence
  Description of Artificial Sequence: Synthetic oligonucleotide
ccaugaucucugccugccg

SEQ ID NO: 2589950 - RNA, 19 nt, Artificial Sequence
  Description of Artificial Sequence: Synthetic oligonucleotide
gucuugcggcgcccgaaca

SEQ ID NO: 2589951 - RNA, 19 nt, Artificial Sequence
  Description of Artificial Sequence: Synthetic oligonucleotide
caacagcaucacucuccuc

SEQ ID NO: 2589952 - RNA, 19 nt, Artificial Sequence
  Description of Artificial Sequence: Synthetic oligonucleotide
guucagucccugcgaaggu

SEQ ID NO: 2589953 - RNA, 19 nt, Artificial Sequence
  Description of Artificial Sequence: Synthetic oligonucleotide
gcgggugcggaccaggucu

SEQ ID NO: 2589954 - RNA, 19 nt, Artificial Sequence
  Description of Artificial Sequence: Synthetic oligonucleotide
ccgcucaaacuccaucaug

SEQ ID NO: 2589955 - RNA, 19 nt, Artificial Sequence
  Description of Artificial Sequence: Synthetic oligonucleotide
ggccugugccauugaguug

SEQ ID NO: 2589956 - RNA, 19 nt, Artificial Sequence
  Description of Artificial Sequence: Synthetic oligonucleotide
ggcaucgucgauggcguca

SEQ ID NO: 2589957 - RNA, 19 nt, Artificial Sequence
  Description of Artificial Sequence: Synthetic oligonucleotide
cugugccauugaguuguug

SEQ ID NO: 2589958 - RNA, 19 nt, Artificial Sequence
  Description of Artificial Sequence: Synthetic oligonucleotide
agcguccaucuggccuugc

SEQ ID NO: 2589959 - RNA, 19 nt, Artificial Sequence
  Description of Artificial Sequence: Synthetic oligonucleotide
uggcgucauucaucaucuc

SEQ ID NO: 2589960 - RNA, 19 nt, Artificial Sequence
  Description of Artificial Sequence: Synthetic oligonucleotide
gcgcgcaucaacacgaacu

SEQ ID NO: 2589961 - RNA, 19 nt, Artificial Sequence
  Description of Artificial Sequence: Synthetic oligonucleotide
cccugcgaagguucuugag

SEQ ID NO: 2589962 - RNA, 19 nt, Artificial Sequence
  Description of Artificial Sequence: Synthetic oligonucleotide
aggcgucuugcggcgcccg

SEQ ID NO: 2589963 - RNA, 19 nt, Artificial Sequence
  Description of Artificial Sequence: Synthetic oligonucleotide
cgccaugauucggacagcg

SEQ ID NO: 2589964 - RNA, 19 nt, Artificial Sequence
  Description of Artificial Sequence: Synthetic oligonucleotide
gccaaggcugaggcugugg

SEQ ID NO: 2589965 - RNA, 19 nt, Artificial Sequence
  Description of Artificial Sequence: Synthetic oligonucleotide
ccucauggcucgguucagg

SEQ ID NO: 2589966 - RNA, 19 nt, Artificial Sequence
  Description of Artificial Sequence: Synthetic oligonucleotide
ccaucuggccuugcuuugc

SEQ ID NO: 2589967 - RNA, 19 nt, Artificial Sequence
  Description of Artificial Sequence: Synthetic oligonucleotide
uggcaucgucgauggcguc

SEQ ID NO: 2589968 - RNA, 19 nt, Artificial Sequence
  Description of Artificial Sequence: Synthetic oligonucleotide
gccauugaguuguuggauu

SEQ ID NO: 2589969 - RNA, 19 nt, Artificial Sequence
  Description of Artificial Sequence: Synthetic oligonucleotide
cucaggcgucuugcggcgc

SEQ ID NO: 2589970 - RNA, 19 nt, Artificial Sequence
  Description of Artificial Sequence: Synthetic oligonucleotide
acauagcggcgggugcgga

SEQ ID NO: 2589971 - RNA, 19 nt, Artificial Sequence
  Description of Artificial Sequence: Synthetic oligonucleotide
ggacagcguccaucuggcc

SEQ ID NO: 2589972 - RNA, 19 nt, Artificial Sequence
  Description of Artificial Sequence: Synthetic oligonucleotide
ccauggccuugguaacccc

SEQ ID NO: 2589973 - RNA, 19 nt, Artificial Sequence
  Description of Artificial Sequence: Synthetic oligonucleotide
ccgcucccuguccagcucc

SEQ ID NO: 2589974 - RNA, 19 nt, Artificial Sequence
  Description of Artificial Sequence: Synthetic oligonucleotide
caggcgucuugcggcgccc

SEQ ID NO: 2589975 - RNA, 19 nt, Artificial Sequence
  Description of Artificial Sequence: Synthetic oligonucleotide
caggucuuucgccaugauu

SEQ ID NO: 2589976 - RNA, 19 nt, Artificial Sequence
  Description of Artificial Sequence: Synthetic oligonucleotide
ucgucgcccauggcaucgu

SEQ ID NO: 2589977 - RNA, 19 nt, Artificial Sequence
  Description of Artificial Sequence: Synthetic oligonucleotide
gggcagacgucagcccuag

SEQ ID NO: 2589978 - RNA, 19 nt, Artificial Sequence
  Description of Artificial Sequence: Synthetic oligonucleotide
acacgaacuuucggacaua

SEQ ID NO: 2589979 - RNA, 19 nt, Artificial Sequence
  Description of Artificial Sequence: Synthetic oligonucleotide
gcgucauucaucaucucuu

SEQ ID NO: 2589980 - RNA, 19 nt, Artificial Sequence
  Description of Artificial Sequence: Synthetic oligonucleotide
agucccugcgaagguucuu

SEQ ID NO: 2589981 - RNA, 19 nt, Artificial Sequence
  Description of Artificial Sequence: Synthetic oligonucleotide
ccuugcuuugccaucuuuu

SEQ ID NO: 2589982 - RNA, 19 nt, Artificial Sequence
  Description of Artificial Sequence: Synthetic oligonucleotide
ccauugaguuguuggauuu

SEQ ID NO: 2589983 - RNA, 19 nt, Artificial Sequence
  Description of Artificial Sequence: Synthetic oligonucleotide
gcucaucugugaggcucag

SEQ ID NO: 2589984 - RNA, 19 nt, Artificial Sequence
  Description of Artificial Sequence: Synthetic oligonucleotide
ggcucagucccagcucauc

SEQ ID NO: 2589985 - RNA, 19 nt, Artificial Sequence
  Description of Artificial Sequence: Synthetic oligonucleotide
cagguccauggugguagga

SEQ ID NO: 2589986 - RNA, 19 nt, Artificial Sequence
  Description of Artificial Sequence: Synthetic oligonucleotide
cgcccgaacaacaggucca

SEQ ID NO: 2589987 - RNA, 19 nt, Artificial Sequence
  Description of Artificial Sequence: Synthetic oligonucleotide
ggcgggugcggaccagguc

SEQ ID NO: 2589988 - RNA, 19 nt, Artificial Sequence
  Description of Artificial Sequence: Synthetic oligonucleotide
cgaacaacagguccauggu

SEQ ID NO: 2589989 - RNA, 19 nt, Artificial Sequence
  Description of Artificial Sequence: Synthetic oligonucleotide
cagccaaggcugaggcugu

SEQ ID NO: 2589990 - RNA, 19 nt, Artificial Sequence
  Description of Artificial Sequence: Synthetic oligonucleotide
gggguaacuucagcugucu

SEQ ID NO: 2589991 - RNA, 19 nt, Artificial Sequence
  Description of Artificial Sequence: Synthetic oligonucleotide
cagcguccaucuggccuug

SEQ ID NO: 2589992 - RNA, 19 nt, Artificial Sequence
  Description of Artificial Sequence: Synthetic oligonucleotide
cagucccugcgaagguucu

SEQ ID NO: 2589993 - RNA, 19 nt, Artificial Sequence
  Description of Artificial Sequence: Synthetic oligonucleotide
ccaucaugaucuucuggau

SEQ ID NO: 2589994 - RNA, 19 nt, Artificial Sequence
  Description of Artificial Sequence: Synthetic oligonucleotide
cgucuugcggcgcccgaac

SEQ ID NO: 2589995 - RNA, 19 nt, Artificial Sequence
  Description of Artificial Sequence: Synthetic oligonucleotide
ggcgcccgaacaacagguc

SEQ ID NO: 2589996 - RNA, 19 nt, Artificial Sequence
  Description of Artificial Sequence: Synthetic oligonucleotide
ggcagacgucagcccuagc

SEQ ID NO: 2589997 - RNA, 19 nt, Artificial Sequence
  Description of Artificial Sequence: Synthetic oligonucleotide
ggauguuggcgcgcaucaa

SEQ ID NO: 2589998 - RNA, 19 nt, Artificial Sequence
  Description of Artificial Sequence: Synthetic oligonucleotide
aggcucagucccagcucau

SEQ ID NO: 2589999 - RNA, 19 nt, Artificial Sequence
  Description of Artificial Sequence: Synthetic oligonucleotide
cuucauggccugugccauu

SEQ ID NO: 2590000 - RNA, 19 nt, Artificial Sequence
  Description of Artificial Sequence: Synthetic oligonucleotide
ggaccaggucuuucgccau

SEQ ID NO: 2590001 - RNA, 19 nt, Artificial Sequence
  Description of Artificial Sequence: Synthetic oligonucleotide
gccgcucccuguccagcuc

SEQ ID NO: 2590002 - RNA, 19 nt, Artificial Sequence
  Description of Artificial Sequence: Synthetic oligonucleotide
ggcgucuugcggcgcccga

SEQ ID NO: 2590003 - RNA, 19 nt, Artificial Sequence
  Description of Artificial Sequence: Synthetic oligonucleotide
cucaucugugaggcucagu

SEQ ID NO: 2590004 - RNA, 19 nt, Artificial Sequence
  Description of Artificial Sequence: Synthetic oligonucleotide
ccauggugguaggacucca

SEQ ID NO: 2590005 - RNA, 19 nt, Artificial Sequence
  Description of Artificial Sequence: Synthetic oligonucleotide
gggagguuugauagcucau

SEQ ID NO: 2590006 - RNA, 19 nt, Artificial Sequence
  Description of Artificial Sequence: Synthetic oligonucleotide
cccgaacaacagguccaug

SEQ ID NO: 2590007 - RNA, 19 nt, Artificial Sequence
  Description of Artificial Sequence: Synthetic oligonucleotide
gcaucgucgauggcgucau

SEQ ID NO: 2590008 - RNA, 19 nt, Artificial Sequence
  Description of Artificial Sequence: Synthetic oligonucleotide
gccaugauucggacagcgu

SEQ ID NO: 2590009 - RNA, 19 nt, Artificial Sequence
  Description of Artificial Sequence: Synthetic oligonucleotide
ggggcagacgucagcccua

SEQ ID NO: 2590010 - RNA, 19 nt, Artificial Sequence
  Description of Artificial Sequence: Synthetic oligonucleotide
gcccucugguuuugccgaa

SEQ ID NO: 2590011 - RNA, 19 nt, Artificial Sequence
  Description of Artificial Sequence: Synthetic oligonucleotide
gccuugcuuugccaucuuu

SEQ ID NO: 2590012 - RNA, 19 nt, Artificial Sequence
  Description of Artificial Sequence: Synthetic oligonucleotide
cgcgcaucaacacgaacuu

SEQ ID NO: 2590013 - RNA, 19 nt, Artificial Sequence
  Description of Artificial Sequence: Synthetic oligonucleotide
gcgucuugcggcgcccgaa

SEQ ID NO: 2590014 - RNA, 19 nt, Artificial Sequence
  Description of Artificial Sequence: Synthetic oligonucleotide
gcucccucauggcucgguu

SEQ ID NO: 2590015 - RNA, 19 nt, Artificial Sequence
  Description of Artificial Sequence: Synthetic oligonucleotide
gcccgaacaacagguccau

SEQ ID NO: 2590016 - RNA, 19 nt, Artificial Sequence
  Description of Artificial Sequence: Synthetic oligonucleotide
cgucgauggcgucauucau

SEQ ID NO: 2590017 - RNA, 19 nt, Artificial Sequence
  Description of Artificial Sequence: Synthetic oligonucleotide
gcgcaucaacacgaacuuu

SEQ ID NO: 2590018 - RNA, 19 nt, Artificial Sequence
  Description of Artificial Sequence: Synthetic oligonucleotide
caccaguggaggggagguu

SEQ ID NO: 2590019 - RNA, 19 nt, Artificial Sequence
  Description of Artificial Sequence: Synthetic oligonucleotide
caucgucgauggcgucauu

SEQ ID NO: 2590020 - RNA, 19 nt, Artificial Sequence
  Description of Artificial Sequence: Synthetic oligonucleotide
ccaggucuuucgccaugau

SEQ ID NO: 2590021 - RNA, 19 nt, Artificial Sequence
  Description of Artificial Sequence: Synthetic oligonucleotide
gggacacagccuggauguu

SEQ ID NO: 2590022 - RNA, 19 nt, Artificial Sequence
  Description of Artificial Sequence: Synthetic oligonucleotide
ccuggauguuggcgcgcau

SEQ ID NO: 2590023 - RNA, 19 nt, Artificial Sequence
  Description of Artificial Sequence: Synthetic oligonucleotide
cggcgggugcggaccaggu

SEQ ID NO: 2590024 - RNA, 19 nt, Artificial Sequence
  Description of Artificial Sequence: Synthetic oligonucleotide
cgggugcggaccaggucuu

SEQ ID NO: 2590025 - RNA, 19 nt, Artificial Sequence
  Description of Artificial Sequence: Synthetic oligonucleotide
cgauggcgucauucaucau

SEQ ID NO: 2590026 - RNA, 19 nt, Artificial Sequence
  Description of Artificial Sequence: Synthetic oligonucleotide
cgcccauggcaucgucgau

SEQ ID NO: 2590027 - RNA, 19 nt, Artificial Sequence
  Description of Artificial Sequence: Synthetic oligonucleotide
uuuaauacccuuaauaacg

SEQ ID NO: 2590028 - RNA, 19 nt, Artificial Sequence
  Description of Artificial Sequence: Synthetic oligonucleotide
auaaucuccauauugagcc

SEQ ID NO: 2590029 - RNA, 19 nt, Artificial Sequence
  Description of Artificial Sequence: Synthetic oligonucleotide
uuaugaaguaaucuuaggg

SEQ ID NO: 2590030 - RNA, 19 nt, Artificial Sequence
  Description of Artificial Sequence: Synthetic oligonucleotide
uuaauaauggauauuuuca

SEQ ID NO: 2590031 - RNA, 19 nt, Artificial Sequence
  Description of Artificial Sequence: Synthetic oligonucleotide
agcacauuccuuuugaggc

SEQ ID NO: 2590032 - RNA, 19 nt, Artificial Sequence
  Description of Artificial Sequence: Synthetic oligonucleotide
aauggauauuuucaaugcc

SEQ ID NO: 2590033 - RNA, 19 nt, Artificial Sequence
  Description of Artificial Sequence: Synthetic oligonucleotide
cugaggacaaauuugaugg

SEQ ID NO: 2590034 - RNA, 19 nt, Artificial Sequence
  Description of Artificial Sequence: Synthetic oligonucleotide
gauguggcaagauaaaagg

SEQ ID NO: 2590035 - RNA, 19 nt, Artificial Sequence
  Description of Artificial Sequence: Synthetic oligonucleotide
uuuauaugucuucauaugc

SEQ ID NO: 2590036 - RNA, 19 nt, Artificial Sequence
  Description of Artificial Sequence: Synthetic oligonucleotide
uaaaaggauauuuaugaag

SEQ ID NO: 2590037 - RNA, 19 nt, Artificial Sequence
  Description of Artificial Sequence: Synthetic oligonucleotide
acagauauagcauaaucuc

SEQ ID NO: 2590038 - RNA, 19 nt, Artificial Sequence
  Description of Artificial Sequence: Synthetic oligonucleotide
uugaacaugauccaaggug

SEQ ID NO: 2590039 - RNA, 19 nt, Artificial Sequence
  Description of Artificial Sequence: Synthetic oligonucleotide
aauaacggagguuuucaac

SEQ ID NO: 2590040 - RNA, 19 nt, Artificial Sequence
  Description of Artificial Sequence: Synthetic oligonucleotide
uuugauuaagccaugguuc

SEQ ID NO: 2590041 - RNA, 19 nt, Artificial Sequence
  Description of Artificial Sequence: Synthetic oligonucleotide
uuuaauaauggauauuuuc

SEQ ID NO: 2590042 - RNA, 19 nt, Artificial Sequence
  Description of Artificial Sequence: Synthetic oligonucleotide
uccuuuaucaaccugcuga

SEQ ID NO: 2590043 - RNA, 19 nt, Artificial Sequence
  Description of Artificial Sequence: Synthetic oligonucleotide
ugcaacaauaguaucuacg

SEQ ID NO: 2590044 - RNA, 19 nt, Artificial Sequence
  Description of Artificial Sequence: Synthetic oligonucleotide
uucaacuggaugcaguugg

SEQ ID NO: 2590045 - RNA, 19 nt, Artificial Sequence
  Description of Artificial Sequence: Synthetic oligonucleotide
aaaaggauauuuaugaagu

SEQ ID NO: 2590046 - RNA, 19 nt, Artificial Sequence
  Description of Artificial Sequence: Synthetic oligonucleotide
gauuucuauguguucaugg

SEQ ID NO: 2590047 - RNA, 19 nt, Artificial Sequence
  Description of Artificial Sequence: Synthetic oligonucleotide
auuucuauguguucauggc

SEQ ID NO: 2590048 - RNA, 19 nt, Artificial Sequence
  Description of Artificial Sequence: Synthetic oligonucleotide
caggauaaagcuuagcucc

SEQ ID NO: 2590049 - RNA, 19 nt, Artificial Sequence
  Description of Artificial Sequence: Synthetic oligonucleotide
uuaauacccuuaauaacgg

SEQ ID NO: 2590050 - RNA, 19 nt, Artificial Sequence
  Description of Artificial Sequence: Synthetic oligonucleotide
uaugaaguaaucuuagggu

SEQ ID NO: 2590051 - RNA, 19 nt, Artificial Sequence
  Description of Artificial Sequence: Synthetic oligonucleotide
uauagcauaaucuccauau

SEQ ID NO: 2590052 - RNA, 19 nt, Artificial Sequence
  Description of Artificial Sequence: Synthetic oligonucleotide
aagauaaaaggauauuuau

SEQ ID NO: 2590053 - RNA, 19 nt, Artificial Sequence
  Description of Artificial Sequence: Synthetic oligonucleotide
uuauaugucuucauaugcc

SEQ ID NO: 2590054 - RNA, 19 nt, Artificial Sequence
  Description of Artificial Sequence: Synthetic oligonucleotide
uaagccaugguucaauacc

SEQ ID NO: 2590055 - RNA, 19 nt, Artificial Sequence
  Description of Artificial Sequence: Synthetic oligonucleotide
acagucacaacacagauau

SEQ ID NO: 2590056 - RNA, 19 nt, Artificial Sequence
  Description of Artificial Sequence: Synthetic oligonucleotide
ugauauuugcuccacugag

SEQ ID NO: 2590057 - RNA, 19 nt, Artificial Sequence
  Description of Artificial Sequence: Synthetic oligonucleotide
aaagcuuagcuccaggaga

SEQ ID NO: 2590058 - RNA, 19 nt, Artificial Sequence
  Description of Artificial Sequence: Synthetic oligonucleotide
uuuuauaugucuucauaug

SEQ ID NO: 2590059 - RNA, 19 nt, Artificial Sequence
  Description of Artificial Sequence: Synthetic oligonucleotide
ugauguggcaagauaaaag

SEQ ID NO: 2590060 - RNA, 19 nt, Artificial Sequence
  Description of Artificial Sequence: Synthetic oligonucleotide
uaauggauauuuucaaugc

SEQ ID NO: 2590061 - RNA, 19 nt, Artificial Sequence
  Description of Artificial Sequence: Synthetic oligonucleotide
uuuuaauacccuuaauaac

SEQ ID NO: 2590062 - RNA, 19 nt, Artificial Sequence
  Description of Artificial Sequence: Synthetic oligonucleotide
uuuaugaaguaaucuuagg

SEQ ID NO: 2590063 - RNA, 19 nt, Artificial Sequence
  Description of Artificial Sequence: Synthetic oligonucleotide
aaagccggcacugacaguc

SEQ ID NO: 2590064 - RNA, 19 nt, Artificial Sequence
  Description of Artificial Sequence: Synthetic oligonucleotide
agucacaacacagauauag

SEQ ID NO: 2590065 - RNA, 19 nt, Artificial Sequence
  Description of Artificial Sequence: Synthetic oligonucleotide
acuguaaggauuucuaugu

SEQ ID NO: 2590066 - RNA, 19 nt, Artificial Sequence
  Description of Artificial Sequence: Synthetic oligonucleotide
ucuuucuuaggcaugauuu

SEQ ID NO: 2590067 - RNA, 19 nt, Artificial Sequence
  Description of Artificial Sequence: Synthetic oligonucleotide
uauuuaugaaguaaucuua

SEQ ID NO: 2590068 - RNA, 19 nt, Artificial Sequence
  Description of Artificial Sequence: Synthetic oligonucleotide
ucuugaacaugauccaagg

SEQ ID NO: 2590069 - RNA, 19 nt, Artificial Sequence
  Description of Artificial Sequence: Synthetic oligonucleotide
aauaauggauauuuucaau

SEQ ID NO: 2590070 - RNA, 19 nt, Artificial Sequence
  Description of Artificial Sequence: Synthetic oligonucleotide
aauacccuuaauaacggag

SEQ ID NO: 2590071 - RNA, 19 nt, Artificial Sequence
  Description of Artificial Sequence: Synthetic oligonucleotide
auuuuauaugucuucauau

SEQ ID NO: 2590072 - RNA, 19 nt, Artificial Sequence
  Description of Artificial Sequence: Synthetic oligonucleotide
gagaaguuaagccaggaca

SEQ ID NO: 2590073 - RNA, 19 nt, Artificial Sequence
  Description of Artificial Sequence: Synthetic oligonucleotide
uagcauaaucuccauauug

SEQ ID NO: 2590074 - RNA, 19 nt, Artificial Sequence
  Description of Artificial Sequence: Synthetic oligonucleotide
uccuuuguugacuuucucg

SEQ ID NO: 2590075 - RNA, 19 nt, Artificial Sequence
  Description of Artificial Sequence: Synthetic oligonucleotide
caucggacaauuuucacag

SEQ ID NO: 2590076 - RNA, 19 nt, Artificial Sequence
  Description of Artificial Sequence: Synthetic oligonucleotide
auauuuaugaaguaaucuu

SEQ ID NO: 2590077 - RNA, 19 nt, Artificial Sequence
  Description of Artificial Sequence: Synthetic oligonucleotide
aucuucaugacgccaacac

SEQ ID NO: 2590078 - RNA, 19 nt, Artificial Sequence
  Description of Artificial Sequence: Synthetic oligonucleotide
aguaacuccccauuuacug

SEQ ID NO: 2590079 - RNA, 19 nt, Artificial Sequence
  Description of Artificial Sequence: Synthetic oligonucleotide
auuaggaaggguccggcac

SEQ ID NO: 2590080 - RNA, 19 nt, Artificial Sequence
  Description of Artificial Sequence: Synthetic oligonucleotide
auugagcccaagcacauuc

SEQ ID NO: 2590081 - RNA, 19 nt, Artificial Sequence
  Description of Artificial Sequence: Synthetic oligonucleotide
auaacggagguuuucaacu

SEQ ID NO: 2590082 - RNA, 19 nt, Artificial Sequence
  Description of Artificial Sequence: Synthetic oligonucleotide
uaaagcuuagcuccaggag

SEQ ID NO: 2590083 - RNA, 19 nt, Artificial Sequence
  Description of Artificial Sequence: Synthetic oligonucleotide
acacagauauagcauaauc

SEQ ID NO: 2590084 - RNA, 19 nt, Artificial Sequence
  Description of Artificial Sequence: Synthetic oligonucleotide
uaaucuuaggguuggauaa

SEQ ID NO: 2590085 - RNA, 19 nt, Artificial Sequence
  Description of Artificial Sequence: Synthetic oligonucleotide
ugaaguaaucuuaggguug

SEQ ID NO: 2590086 - RNA, 19 nt, Artificial Sequence
  Description of Artificial Sequence: Synthetic oligonucleotide
aauaguaucuacggcagca

SEQ ID NO: 2590087 - RNA, 19 nt, Artificial Sequence
  Description of Artificial Sequence: Synthetic oligonucleotide
uaggguuggauaaaagggc

SEQ ID NO: 2590088 - RNA, 19 nt, Artificial Sequence
  Description of Artificial Sequence: Synthetic oligonucleotide
ucacaacacagauauagca

SEQ ID NO: 2590089 - RNA, 19 nt, Artificial Sequence
  Description of Artificial Sequence: Synthetic oligonucleotide
ggaaauugaauuaggaagg

SEQ ID NO: 2590090 - RNA, 19 nt, Artificial Sequence
  Description of Artificial Sequence: Synthetic oligonucleotide
gacgccaacacacaaagca

SEQ ID NO: 2590091 - RNA, 19 nt, Artificial Sequence
  Description of Artificial Sequence: Synthetic oligonucleotide
uuuacuguaaggauuucua

SEQ ID NO: 2590092 - RNA, 19 nt, Artificial Sequence
  Description of Artificial Sequence: Synthetic oligonucleotide
agaaguuaagccaggacac

SEQ ID NO: 2590093 - RNA, 19 nt, Artificial Sequence
  Description of Artificial Sequence: Synthetic oligonucleotide
aauuugauggcuccuuuau

SEQ ID NO: 2590094 - RNA, 19 nt, Artificial Sequence
  Description of Artificial Sequence: Synthetic oligonucleotide
gcaacaauaguaucuacgg

SEQ ID NO: 2590095 - RNA, 19 nt, Artificial Sequence
  Description of Artificial Sequence: Synthetic oligonucleotide
uguggcaagauaaaaggau

SEQ ID NO: 2590096 - RNA, 19 nt, Artificial Sequence
  Description of Artificial Sequence: Synthetic oligonucleotide
agcaggauaaagcuuagcu

SEQ ID NO: 2590097 - RNA, 19 nt, Artificial Sequence
  Description of Artificial Sequence: Synthetic oligonucleotide
uaauaauggauauuuucaa

SEQ ID NO: 2590098 - RNA, 19 nt, Artificial Sequence
  Description of Artificial Sequence: Synthetic oligonucleotide
cauaaucuccauauugagc

SEQ ID NO: 2590099 - RNA, 19 nt, Artificial Sequence
  Description of Artificial Sequence: Synthetic oligonucleotide
ugaggcucauuuuauaugu

SEQ ID NO: 2590100 - RNA, 19 nt, Artificial Sequence
  Description of Artificial Sequence: Synthetic oligonucleotide
aaaacaguaacuccccauu

SEQ ID NO: 2590101 - RNA, 19 nt, Artificial Sequence
  Description of Artificial Sequence: Synthetic oligonucleotide
ucuucugcagacaucuuca

SEQ ID NO: 2590102 - RNA, 19 nt, Artificial Sequence
  Description of Artificial Sequence: Synthetic oligonucleotide
cagauauagcauaaucucc

SEQ ID NO: 2590103 - RNA, 19 nt, Artificial Sequence
  Description of Artificial Sequence: Synthetic oligonucleotide
uuaggaaggguccggcacg

SEQ ID NO: 2590104 - RNA, 19 nt, Artificial Sequence
  Description of Artificial Sequence: Synthetic oligonucleotide
auauuugcuccacugagga

SEQ ID NO: 2590105 - RNA, 19 nt, Artificial Sequence
  Description of Artificial Sequence: Synthetic oligonucleotide
cacaggaucuuucuuaggc

SEQ ID NO: 2590106 - RNA, 19 nt, Artificial Sequence
  Description of Artificial Sequence: Synthetic oligonucleotide
gaaauugaauuaggaaggg

SEQ ID NO: 2590107 - RNA, 19 nt, Artificial Sequence
  Description of Artificial Sequence: Synthetic oligonucleotide
gaaguaaucuuaggguugg

SEQ ID NO: 2590108 - RNA, 19 nt, Artificial Sequence
  Description of Artificial Sequence: Synthetic oligonucleotide
uugauuaagccaugguuca

SEQ ID NO: 2590109 - RNA, 19 nt, Artificial Sequence
  Description of Artificial Sequence: Synthetic oligonucleotide
gauaaagcuuagcuccagg

SEQ ID NO: 2590110 - RNA, 19 nt, Artificial Sequence
  Description of Artificial Sequence: Synthetic oligonucleotide
aaaagggcccuucucuuug

SEQ ID NO: 2590111 - RNA, 19 nt, Artificial Sequence
  Description of Artificial Sequence: Synthetic oligonucleotide
ucggacaauuuucacagga

SEQ ID NO: 2590112 - RNA, 19 nt, Artificial Sequence
  Description of Artificial Sequence: Synthetic oligonucleotide
augacgccaacacacaaag

SEQ ID NO: 2590113 - RNA, 19 nt, Artificial Sequence
  Description of Artificial Sequence: Synthetic oligonucleotide
caugauugcaacaauagua

SEQ ID NO: 2590114 - RNA, 19 nt, Artificial Sequence
  Description of Artificial Sequence: Synthetic oligonucleotide
ugcaguuggacacauuuuc

SEQ ID NO: 2590115 - RNA, 19 nt, Artificial Sequence
  Description of Artificial Sequence: Synthetic oligonucleotide
gauauuugcuccacugagg

SEQ ID NO: 2590116 - RNA, 19 nt, Artificial Sequence
  Description of Artificial Sequence: Synthetic oligonucleotide
aucauuuaauaauggauau

SEQ ID NO: 2590117 - RNA, 19 nt, Artificial Sequence
  Description of Artificial Sequence: Synthetic oligonucleotide
auuuaugaaguaaucuuag

SEQ ID NO: 2590118 - RNA, 19 nt, Artificial Sequence
  Description of Artificial Sequence: Synthetic oligonucleotide
uacggcagcaggauaaagc

SEQ ID NO: 2590119 - RNA, 19 nt, Artificial Sequence
  Description of Artificial Sequence: Synthetic oligonucleotide
uuaauaacggagguuuuca

SEQ ID NO: 2590120 - RNA, 19 nt, Artificial Sequence
  Description of Artificial Sequence: Synthetic oligonucleotide
uccggcacgaggaaagccg

SEQ ID NO: 2590121 - RNA, 19 nt, Artificial Sequence
  Description of Artificial Sequence: Synthetic oligonucleotide
aaggauauuuaugaaguaa

SEQ ID NO: 2590122 - RNA, 19 nt, Artificial Sequence
  Description of Artificial Sequence: Synthetic oligonucleotide
uuaggcaugauuugauuaa

SEQ ID NO: 2590123 - RNA, 19 nt, Artificial Sequence
  Description of Artificial Sequence: Synthetic oligonucleotide
ugcugauguggcaagauaa

SEQ ID NO: 2590124 - RNA, 19 nt, Artificial Sequence
  Description of Artificial Sequence: Synthetic oligonucleotide
uuuucaaugccaauuccuu

SEQ ID NO: 2590125 - RNA, 19 nt, Artificial Sequence
  Description of Artificial Sequence: Synthetic oligonucleotide
ucuucauaugccacagccc

SEQ ID NO: 2590126 - RNA, 19 nt, Artificial Sequence
  Description of Artificial Sequence: Synthetic oligonucleotide
uuugaggcucauuuuauau

SEQ ID NO: 2590127 - RNA, 19 nt, Artificial Sequence
  Description of Artificial Sequence: Synthetic oligonucleotide
cucgauaucuucugcagac

SEQ ID NO: 2590128 - RNA, 19 nt, Artificial Sequence
  Description of Artificial Sequence: Synthetic oligonucleotide
uugaauuaggaaggguccg

SEQ ID NO: 2590129 - RNA, 19 nt, Artificial Sequence
  Description of Artificial Sequence: Synthetic oligonucleotide
auaaagcuuagcuccagga

SEQ ID NO: 2590130 - RNA, 19 nt, Artificial Sequence
  Description of Artificial Sequence: Synthetic oligonucleotide
uaguaucuacggcagcagg

SEQ ID NO: 2590131 - RNA, 19 nt, Artificial Sequence
  Description of Artificial Sequence: Synthetic oligonucleotide
agauaaaaggauauuuaug

SEQ ID NO: 2590132 - RNA, 19 nt, Artificial Sequence
  Description of Artificial Sequence: Synthetic oligonucleotide
ugauuugauuaagccaugg

SEQ ID NO: 2590133 - RNA, 19 nt, Artificial Sequence
  Description of Artificial Sequence: Synthetic oligonucleotide
uuucucgauaucuucugca

SEQ ID NO: 2590134 - RNA, 19 nt, Artificial Sequence
  Description of Artificial Sequence: Synthetic oligonucleotide
auuucuugaacaugaucca

SEQ ID NO: 2590135 - RNA, 19 nt, Artificial Sequence
  Description of Artificial Sequence: Synthetic oligonucleotide
uuccuuuugaggcucauuu

SEQ ID NO: 2590136 - RNA, 19 nt, Artificial Sequence
  Description of Artificial Sequence: Synthetic oligonucleotide
caucauuuaauaauggaua

SEQ ID NO: 2590137 - RNA, 19 nt, Artificial Sequence
  Description of Artificial Sequence: Synthetic oligonucleotide
augaaguaaucuuaggguu

SEQ ID NO: 2590138 - RNA, 19 nt, Artificial Sequence
  Description of Artificial Sequence: Synthetic oligonucleotide
gauauuuaugaaguaaucu

SEQ ID NO: 2590139 - RNA, 19 nt, Artificial Sequence
  Description of Artificial Sequence: Synthetic oligonucleotide
uugaggcucauuuuauaug

SEQ ID NO: 2590140 - RNA, 19 nt, Artificial Sequence
  Description of Artificial Sequence: Synthetic oligonucleotide
gauaaaagggcccuucucu

SEQ ID NO: 2590141 - RNA, 19 nt, Artificial Sequence
  Description of Artificial Sequence: Synthetic oligonucleotide
caugauccaaggugaaggg

SEQ ID NO: 2590142 - RNA, 19 nt, Artificial Sequence
  Description of Artificial Sequence: Synthetic oligonucleotide
auuugauggcuccuuuauc

SEQ ID NO: 2590143 - RNA, 19 nt, Artificial Sequence
  Description of Artificial Sequence: Synthetic oligonucleotide
auaaaaggauauuuaugaa

SEQ ID NO: 2590144 - RNA, 19 nt, Artificial Sequence
  Description of Artificial Sequence: Synthetic oligonucleotide
ucuuaggguuggauaaaag

SEQ ID NO: 2590145 - RNA, 19 nt, Artificial Sequence
  Description of Artificial Sequence: Synthetic oligonucleotide
auacccuuaauaacggagg

SEQ ID NO: 2590146 - RNA, 19 nt, Artificial Sequence
  Description of Artificial Sequence: Synthetic oligonucleotide
cuccaggagaaguuaagcc

SEQ ID NO: 2590147 - RNA, 19 nt, Artificial Sequence
  Description of Artificial Sequence: Synthetic oligonucleotide
ugaauuaggaaggguccgg

SEQ ID NO: 2590148 - RNA, 19 nt, Artificial Sequence
  Description of Artificial Sequence: Synthetic oligonucleotide
caugauuugauuaagccau

SEQ ID NO: 2590149 - RNA, 19 nt, Artificial Sequence
  Description of Artificial Sequence: Synthetic oligonucleotide
aggguuggauaaaagggcc

SEQ ID NO: 2590150 - RNA, 19 nt, Artificial Sequence
  Description of Artificial Sequence: Synthetic oligonucleotide
aaacugcucuaucaauuga

SEQ ID NO: 2590151 - RNA, 19 nt, Artificial Sequence
  Description of Artificial Sequence: Synthetic oligonucleotide
cuuucuuaggcaugauuug

SEQ ID NO: 2590152 - RNA, 19 nt, Artificial Sequence
  Description of Artificial Sequence: Synthetic oligonucleotide
ucuucaugacgccaacaca

SEQ ID NO: 2590153 - RNA, 19 nt, Artificial Sequence
  Description of Artificial Sequence: Synthetic oligonucleotide
caggacacaugauauuugc

SEQ ID NO: 2590154 - RNA, 19 nt, Artificial Sequence
  Description of Artificial Sequence: Synthetic oligonucleotide
aauuaggaaggguccggca

SEQ ID NO: 2590155 - RNA, 19 nt, Artificial Sequence
  Description of Artificial Sequence: Synthetic oligonucleotide
uauguguucauggcaucgg

SEQ ID NO: 2590156 - RNA, 19 nt, Artificial Sequence
  Description of Artificial Sequence: Synthetic oligonucleotide
ugcucuaucaauugauuuu

SEQ ID NO: 2590157 - RNA, 19 nt, Artificial Sequence
  Description of Artificial Sequence: Synthetic oligonucleotide
aaaggauauuuaugaagua

SEQ ID NO: 2590158 - RNA, 19 nt, Artificial Sequence
  Description of Artificial Sequence: Synthetic oligonucleotide
uccccauuuacuguaagga

SEQ ID NO: 2590159 - RNA, 19 nt, Artificial Sequence
  Description of Artificial Sequence: Synthetic oligonucleotide
cuucauaugccacagccca

SEQ ID NO: 2590160 - RNA, 19 nt, Artificial Sequence
  Description of Artificial Sequence: Synthetic oligonucleotide
acaauaguaucuacggcag

SEQ ID NO: 2590161 - RNA, 19 nt, Artificial Sequence
  Description of Artificial Sequence: Synthetic oligonucleotide
aaauuugauggcuccuuua

SEQ ID NO: 2590162 - RNA, 19 nt, Artificial Sequence
  Description of Artificial Sequence: Synthetic oligonucleotide
acuuucucgauaucuucug

SEQ ID NO: 2590163 - RNA, 19 nt, Artificial Sequence
  Description of Artificial Sequence: Synthetic oligonucleotide
ucaauaccuggaaacugcu

SEQ ID NO: 2590164 - RNA, 19 nt, Artificial Sequence
  Description of Artificial Sequence: Synthetic oligonucleotide
aacaguaacuccccauuua

SEQ ID NO: 2590165 - RNA, 19 nt, Artificial Sequence
  Description of Artificial Sequence: Synthetic oligonucleotide
uuuucaacuggaugcaguu

SEQ ID NO: 2590166 - RNA, 19 nt, Artificial Sequence
  Description of Artificial Sequence: Synthetic oligonucleotide
acggcagcaggauaaagcu

SEQ ID NO: 2590167 - RNA, 19 nt, Artificial Sequence
  Description of Artificial Sequence: Synthetic oligonucleotide
acacaaagcauguugcuuu

SEQ ID NO: 2590168 - RNA, 19 nt, Artificial Sequence
  Description of Artificial Sequence: Synthetic oligonucleotide
augauauuugcuccacuga

SEQ ID NO: 2590169 - RNA, 19 nt, Artificial Sequence
  Description of Artificial Sequence: Synthetic oligonucleotide
auuuucaaugccaauuccu

SEQ ID NO: 2590170 - RNA, 19 nt, Artificial Sequence
  Description of Artificial Sequence: Synthetic oligonucleotide
guuaagccaggacacauga

SEQ ID NO: 2590171 - RNA, 19 nt, Artificial Sequence
  Description of Artificial Sequence: Synthetic oligonucleotide
uuguugacuuucucgauau

SEQ ID NO: 2590172 - RNA, 19 nt, Artificial Sequence
  Description of Artificial Sequence: Synthetic oligonucleotide
uuaagccaugguucaauac

SEQ ID NO: 2590173 - RNA, 19 nt, Artificial Sequence
  Description of Artificial Sequence: Synthetic oligonucleotide
uggcaagauaaaaggauau

SEQ ID NO: 2590174 - RNA, 19 nt, Artificial Sequence
  Description of Artificial Sequence: Synthetic oligonucleotide
ucucgauaucuucugcaga

SEQ ID NO: 2590175 - RNA, 19 nt, Artificial Sequence
  Description of Artificial Sequence: Synthetic oligonucleotide
caagauaaaaggauauuua

SEQ ID NO: 2590176 - RNA, 19 nt, Artificial Sequence
  Description of Artificial Sequence: Synthetic oligonucleotide
aucaaauuucuugaacaug

SEQ ID NO: 2590177 - RNA, 19 nt, Artificial Sequence
  Description of Artificial Sequence: Synthetic oligonucleotide
agcauaaucuccauauuga

SEQ ID NO: 2590178 - RNA, 19 nt, Artificial Sequence
  Description of Artificial Sequence: Synthetic oligonucleotide
auggcaucggacaauuuuc

SEQ ID NO: 2590179 - RNA, 19 nt, Artificial Sequence
  Description of Artificial Sequence: Synthetic oligonucleotide
uacccuuaauaacggaggu

SEQ ID NO: 2590180 - RNA, 19 nt, Artificial Sequence
  Description of Artificial Sequence: Synthetic oligonucleotide
cuauguguucauggcaucg

SEQ ID NO: 2590181 - RNA, 19 nt, Artificial Sequence
  Description of Artificial Sequence: Synthetic oligonucleotide
uaacggagguuuucaacug

SEQ ID NO: 2590182 - RNA, 19 nt, Artificial Sequence
  Description of Artificial Sequence: Synthetic oligonucleotide
ugggaaggaaauugaauua

SEQ ID NO: 2590183 - RNA, 19 nt, Artificial Sequence
  Description of Artificial Sequence: Synthetic oligonucleotide
uuacuguaaggauuucuau

SEQ ID NO: 2590184 - RNA, 19 nt, Artificial Sequence
  Description of Artificial Sequence: Synthetic oligonucleotide
augauugcaacaauaguau

SEQ ID NO: 2590185 - RNA, 19 nt, Artificial Sequence
  Description of Artificial Sequence: Synthetic oligonucleotide
uguguucauggcaucggac

SEQ ID NO: 2590186 - RNA, 19 nt, Artificial Sequence
  Description of Artificial Sequence: Synthetic oligonucleotide
gcagacaucuucaugacgc

SEQ ID NO: 2590187 - RNA, 19 nt, Artificial Sequence
  Description of Artificial Sequence: Synthetic oligonucleotide
ugaggacaaauuugauggc

SEQ ID NO: 2590188 - RNA, 19 nt, Artificial Sequence
  Description of Artificial Sequence: Synthetic oligonucleotide
uucugcagacaucuucaug

SEQ ID NO: 2590189 - RNA, 19 nt, Artificial Sequence
  Description of Artificial Sequence: Synthetic oligonucleotide
ucauuuuauaugucuucau

SEQ ID NO: 2590190 - RNA, 19 nt, Artificial Sequence
  Description of Artificial Sequence: Synthetic oligonucleotide
uugacuuucucgauaucuu

SEQ ID NO: 2590191 - RNA, 19 nt, Artificial Sequence
  Description of Artificial Sequence: Synthetic oligonucleotide
guaaucuuaggguuggaua

SEQ ID NO: 2590192 - RNA, 19 nt, Artificial Sequence
  Description of Artificial Sequence: Synthetic oligonucleotide
cuccccauuuacuguaagg

SEQ ID NO: 2590193 - RNA, 19 nt, Artificial Sequence
  Description of Artificial Sequence: Synthetic oligonucleotide
uggauaaaagggcccuucu

SEQ ID NO: 2590194 - RNA, 19 nt, Artificial Sequence
  Description of Artificial Sequence: Synthetic oligonucleotide
uucaugacgccaacacaca

SEQ ID NO: 2590195 - RNA, 19 nt, Artificial Sequence
  Description of Artificial Sequence: Synthetic oligonucleotide
acaucuucaugacgccaac

SEQ ID NO: 2590196 - RNA, 19 nt, Artificial Sequence
  Description of Artificial Sequence: Synthetic oligonucleotide
uucuuaggcaugauuugau

SEQ ID NO: 2590197 - RNA, 19 nt, Artificial Sequence
  Description of Artificial Sequence: Synthetic oligonucleotide
aggauauuuaugaaguaau

SEQ ID NO: 2590198 - RNA, 19 nt, Artificial Sequence
  Description of Artificial Sequence: Synthetic oligonucleotide
ggacacaugauauuugcuc

SEQ ID NO: 2590199 - RNA, 19 nt, Artificial Sequence
  Description of Artificial Sequence: Synthetic oligonucleotide
cuuaauaacggagguuuuc

SEQ ID NO: 2590200 - RNA, 19 nt, Artificial Sequence
  Description of Artificial Sequence: Synthetic oligonucleotide
uaauacccuuaauaacgga

SEQ ID NO: 2590201 - RNA, 19 nt, Artificial Sequence
  Description of Artificial Sequence: Synthetic oligonucleotide
aaguuaagccaggacacau

SEQ ID NO: 2590202 - RNA, 19 nt, Artificial Sequence
  Description of Artificial Sequence: Synthetic oligonucleotide
aggcaugauuugauuaagc

SEQ ID NO: 2590203 - RNA, 19 nt, Artificial Sequence
  Description of Artificial Sequence: Synthetic oligonucleotide
uggcaucggacaauuuuca

SEQ ID NO: 2590204 - RNA, 19 nt, Artificial Sequence
  Description of Artificial Sequence: Synthetic oligonucleotide
uaggcaugauuugauuaag

SEQ ID NO: 2590205 - RNA, 19 nt, Artificial Sequence
  Description of Artificial Sequence: Synthetic oligonucleotide
ugauugcaacaauaguauc

SEQ ID NO: 2590206 - RNA, 19 nt, Artificial Sequence
  Description of Artificial Sequence: Synthetic oligonucleotide
guucaauaccuggaaacug

SEQ ID NO: 2590207 - RNA, 19 nt, Artificial Sequence
  Description of Artificial Sequence: Synthetic oligonucleotide
gcauaaucuccauauugag

SEQ ID NO: 2590208 - RNA, 19 nt, Artificial Sequence
  Description of Artificial Sequence: Synthetic oligonucleotide
ugccaugauugcaacaaua

SEQ ID NO: 2590209 - RNA, 19 nt, Artificial Sequence
  Description of Artificial Sequence: Synthetic oligonucleotide
uuuugaggcucauuuuaua

SEQ ID NO: 2590210 - RNA, 19 nt, Artificial Sequence
  Description of Artificial Sequence: Synthetic oligonucleotide
aguuggacacauuuucuuu

SEQ ID NO: 2590211 - RNA, 19 nt, Artificial Sequence
  Description of Artificial Sequence: Synthetic oligonucleotide
guguucauggcaucggaca

SEQ ID NO: 2590212 - RNA, 19 nt, Artificial Sequence
  Description of Artificial Sequence: Synthetic oligonucleotide
gacaauuuucacaggaucu

SEQ ID NO: 2590213 - RNA, 19 nt, Artificial Sequence
  Description of Artificial Sequence: Synthetic oligonucleotide
gaauuaggaaggguccggc

SEQ ID NO: 2590214 - RNA, 19 nt, Artificial Sequence
  Description of Artificial Sequence: Synthetic oligonucleotide
uaauaacggagguuuucaa

SEQ ID NO: 2590215 - RNA, 19 nt, Artificial Sequence
  Description of Artificial Sequence: Synthetic oligonucleotide
uuucaaugccaauuccuuu

SEQ ID NO: 2590216 - RNA, 19 nt, Artificial Sequence
  Description of Artificial Sequence: Synthetic oligonucleotide
cuuaggcaugauuugauua

SEQ ID NO: 2590217 - RNA, 19 nt, Artificial Sequence
  Description of Artificial Sequence: Synthetic oligonucleotide
aacugcucuaucaauugau

SEQ ID NO: 2590218 - RNA, 19 nt, Artificial Sequence
  Description of Artificial Sequence: Synthetic oligonucleotide
ucacaggaucuuucuuagg

SEQ ID NO: 2590219 - RNA, 19 nt, Artificial Sequence
  Description of Artificial Sequence: Synthetic oligonucleotide
ggagguuuucaacuggaug

SEQ ID NO: 2590220 - RNA, 19 nt, Artificial Sequence
  Description of Artificial Sequence: Synthetic oligonucleotide
uuuucacaggaucuuucuu

SEQ ID NO: 2590221 - RNA, 19 nt, Artificial Sequence
  Description of Artificial Sequence: Synthetic oligonucleotide
ggaaggaaauugaauuagg

SEQ ID NO: 2590222 - RNA, 19 nt, Artificial Sequence
  Description of Artificial Sequence: Synthetic oligonucleotide
ugagcccaagcacauuccu

SEQ ID NO: 2590223 - RNA, 19 nt, Artificial Sequence
  Description of Artificial Sequence: Synthetic oligonucleotide
aucaaccugcugauguggc

SEQ ID NO: 2590224 - RNA, 19 nt, Artificial Sequence
  Description of Artificial Sequence: Synthetic oligonucleotide
ucaugacgccaacacacaa

SEQ ID NO: 2590225 - RNA, 19 nt, Artificial Sequence
  Description of Artificial Sequence: Synthetic oligonucleotide
cauuuuauaugucuucaua

SEQ ID NO: 2590226 - RNA, 19 nt, Artificial Sequence
  Description of Artificial Sequence: Synthetic oligonucleotide
gggaaggaaauugaauuag

SEQ ID NO: 2590227 - RNA, 19 nt, Artificial Sequence
  Description of Artificial Sequence: Synthetic oligonucleotide
agcccaucauuuaauaaug

SEQ ID NO: 2590228 - RNA, 19 nt, Artificial Sequence
  Description of Artificial Sequence: Synthetic oligonucleotide
gcaugauuugauuaagcca

SEQ ID NO: 2590229 - RNA, 19 nt, Artificial Sequence
  Description of Artificial Sequence: Synthetic oligonucleotide
augauccaaggugaagggg

SEQ ID NO: 2590230 - RNA, 19 nt, Artificial Sequence
  Description of Artificial Sequence: Synthetic oligonucleotide
auaguaucuacggcagcag

SEQ ID NO: 2590231 - RNA, 19 nt, Artificial Sequence
  Description of Artificial Sequence: Synthetic oligonucleotide
uaacuccccauuuacugua

SEQ ID NO: 2590232 - RNA, 19 nt, Artificial Sequence
  Description of Artificial Sequence: Synthetic oligonucleotide
cucauuuuauaugucuuca

SEQ ID NO: 2590233 - RNA, 19 nt, Artificial Sequence
  Description of Artificial Sequence: Synthetic oligonucleotide
uuucaacuggaugcaguug

SEQ ID NO: 2590234 - RNA, 19 nt, Artificial Sequence
  Description of Artificial Sequence: Synthetic oligonucleotide
ggacaauuuucacaggauc

SEQ ID NO: 2590235 - RNA, 19 nt, Artificial Sequence
  Description of Artificial Sequence: Synthetic oligonucleotide
uuugcuccacugaggacaa

SEQ ID NO: 2590236 - RNA, 19 nt, Artificial Sequence
  Description of Artificial Sequence: Synthetic oligonucleotide
ccaggagaaguuaagccag

SEQ ID NO: 2590237 - RNA, 19 nt, Artificial Sequence
  Description of Artificial Sequence: Synthetic oligonucleotide
aguaucuacggcagcagga

SEQ ID NO: 2590238 - RNA, 19 nt, Artificial Sequence
  Description of Artificial Sequence: Synthetic oligonucleotide
aagggcccuucucuuuguc

SEQ ID NO: 2590239 - RNA, 19 nt, Artificial Sequence
  Description of Artificial Sequence: Synthetic oligonucleotide
agcccaagcacauuccuuu

SEQ ID NO: 2590240 - RNA, 19 nt, Artificial Sequence
  Description of Artificial Sequence: Synthetic oligonucleotide
gauuugauuaagccauggu

SEQ ID NO: 2590241 - RNA, 19 nt, Artificial Sequence
  Description of Artificial Sequence: Synthetic oligonucleotide
ucuauguguucauggcauc

SEQ ID NO: 2590242 - RNA, 19 nt, Artificial Sequence
  Description of Artificial Sequence: Synthetic oligonucleotide
aagcuuagcuccaggagaa

SEQ ID NO: 2590243 - RNA, 19 nt, Artificial Sequence
  Description of Artificial Sequence: Synthetic oligonucleotide
uugauggcuccuuuaucaa

SEQ ID NO: 2590244 - RNA, 19 nt, Artificial Sequence
  Description of Artificial Sequence: Synthetic oligonucleotide
aacacagauauagcauaau

SEQ ID NO: 2590245 - RNA, 19 nt, Artificial Sequence
  Description of Artificial Sequence: Synthetic oligonucleotide
gccaugguucaauaccugg

SEQ ID NO: 2590246 - RNA, 19 nt, Artificial Sequence
  Description of Artificial Sequence: Synthetic oligonucleotide
caauaguaucuacggcagc

SEQ ID NO: 2590247 - RNA, 19 nt, Artificial Sequence
  Description of Artificial Sequence: Synthetic oligonucleotide
auauagcauaaucuccaua

SEQ ID NO: 2590248 - RNA, 19 nt, Artificial Sequence
  Description of Artificial Sequence: Synthetic oligonucleotide
cuguaaggauuucuaugug

SEQ ID NO: 2590249 - RNA, 19 nt, Artificial Sequence
  Description of Artificial Sequence: Synthetic oligonucleotide
accuggaaacugcucuauc

SEQ ID NO: 2590250 - RNA, 19 nt, Artificial Sequence
  Description of Artificial Sequence: Synthetic oligonucleotide
ugucuucauaugccacagc

SEQ ID NO: 2590251 - RNA, 19 nt, Artificial Sequence
  Description of Artificial Sequence: Synthetic oligonucleotide
uuggauaaaagggcccuuc

SEQ ID NO: 2590252 - RNA, 19 nt, Artificial Sequence
  Description of Artificial Sequence: Synthetic oligonucleotide
caggagaaguuaagccagg

SEQ ID NO: 2590253 - RNA, 19 nt, Artificial Sequence
  Description of Artificial Sequence: Synthetic oligonucleotide
aaucuuaggguuggauaaa

SEQ ID NO: 2590254 - RNA, 19 nt, Artificial Sequence
  Description of Artificial Sequence: Synthetic oligonucleotide
acagcccaucauuuaauaa

SEQ ID NO: 2590255 - RNA, 19 nt, Artificial Sequence
  Description of Artificial Sequence: Synthetic oligonucleotide
cagacaucuucaugacgcc

SEQ ID NO: 2590256 - RNA, 19 nt, Artificial Sequence
  Description of Artificial Sequence: Synthetic oligonucleotide
ucauaugccacagcccauc

SEQ ID NO: 2590257 - RNA, 19 nt, Artificial Sequence
  Description of Artificial Sequence: Synthetic oligonucleotide
gcaggauaaagcuuagcuc

SEQ ID NO: 2590258 - RNA, 19 nt, Artificial Sequence
  Description of Artificial Sequence: Synthetic oligonucleotide
aguaaucuuaggguuggau

SEQ ID NO: 2590259 - RNA, 19 nt, Artificial Sequence
  Description of Artificial Sequence: Synthetic oligonucleotide
aucggacaauuuucacagg

SEQ ID NO: 2590260 - RNA, 19 nt, Artificial Sequence
  Description of Artificial Sequence: Synthetic oligonucleotide
ugacagucgaucugcuguc

SEQ ID NO: 2590261 - RNA, 19 nt, Artificial Sequence
  Description of Artificial Sequence: Synthetic oligonucleotide
gaaggguccggcacgagga

SEQ ID NO: 2590262 - RNA, 19 nt, Artificial Sequence
  Description of Artificial Sequence: Synthetic oligonucleotide
acaugauauuugcuccacu

SEQ ID NO: 2590263 - RNA, 19 nt, Artificial Sequence
  Description of Artificial Sequence: Synthetic oligonucleotide
aaagggcccuucucuuugu

SEQ ID NO: 2590264 - RNA, 19 nt, Artificial Sequence
  Description of Artificial Sequence: Synthetic oligonucleotide
acugacagucgaucugcug

SEQ ID NO: 2590265 - RNA, 19 nt, Artificial Sequence
  Description of Artificial Sequence: Synthetic oligonucleotide
aucuuucuuaggcaugauu

SEQ ID NO: 2590266 - RNA, 19 nt, Artificial Sequence
  Description of Artificial Sequence: Synthetic oligonucleotide
auguguucauggcaucgga

SEQ ID NO: 2590267 - RNA, 19 nt, Artificial Sequence
  Description of Artificial Sequence: Synthetic oligonucleotide
uugcaacaauaguaucuac

SEQ ID NO: 2590268 - RNA, 19 nt, Artificial Sequence
  Description of Artificial Sequence: Synthetic oligonucleotide
auagcauaaucuccauauu

SEQ ID NO: 2590269 - RNA, 19 nt, Artificial Sequence
  Description of Artificial Sequence: Synthetic oligonucleotide
ugccaauuccuuuguugac

SEQ ID NO: 2590270 - RNA, 19 nt, Artificial Sequence
  Description of Artificial Sequence: Synthetic oligonucleotide
augguucaauaccuggaaa

SEQ ID NO: 2590271 - RNA, 19 nt, Artificial Sequence
  Description of Artificial Sequence: Synthetic oligonucleotide
aggauuucuauguguucau

SEQ ID NO: 2590272 - RNA, 19 nt, Artificial Sequence
  Description of Artificial Sequence: Synthetic oligonucleotide
uuagcuccaggagaaguua

SEQ ID NO: 2590273 - RNA, 19 nt, Artificial Sequence
  Description of Artificial Sequence: Synthetic oligonucleotide
ggaaggguccggcacgagg

SEQ ID NO: 2590274 - RNA, 19 nt, Artificial Sequence
  Description of Artificial Sequence: Synthetic oligonucleotide
uugcuuuccuucugccaug

SEQ ID NO: 2590275 - RNA, 19 nt, Artificial Sequence
  Description of Artificial Sequence: Synthetic oligonucleotide
uucugccaugauugcaaca

SEQ ID NO: 2590276 - RNA, 19 nt, Artificial Sequence
  Description of Artificial Sequence: Synthetic oligonucleotide
gacgauagggaagggccug

SEQ ID NO: 2590277 - RNA, 19 nt, Artificial Sequence
  Description of Artificial Sequence: Synthetic oligonucleotide
guugcuuuccuucugccau

SEQ ID NO: 2590278 - RNA, 19 nt, Artificial Sequence
  Description of Artificial Sequence: Synthetic oligonucleotide
ugacgccaacacacaaagc

SEQ ID NO: 2590279 - RNA, 19 nt, Artificial Sequence
  Description of Artificial Sequence: Synthetic oligonucleotide
gacaucuucaugacgccaa

SEQ ID NO: 2590280 - RNA, 19 nt, Artificial Sequence
  Description of Artificial Sequence: Synthetic oligonucleotide
uuaagccaggacacaugau

SEQ ID NO: 2590281 - RNA, 19 nt, Artificial Sequence
  Description of Artificial Sequence: Synthetic oligonucleotide
aguuaagccaggacacaug

SEQ ID NO: 2590282 - RNA, 19 nt, Artificial Sequence
  Description of Artificial Sequence: Synthetic oligonucleotide
cugacagucgaucugcugu

SEQ ID NO: 2590283 - RNA, 19 nt, Artificial Sequence
  Description of Artificial Sequence: Synthetic oligonucleotide
ccuuuguugacuuucucga

SEQ ID NO: 2590284 - RNA, 19 nt, Artificial Sequence
  Description of Artificial Sequence: Synthetic oligonucleotide
gcaucggacaauuuucaca

SEQ ID NO: 2590285 - RNA, 19 nt, Artificial Sequence
  Description of Artificial Sequence: Synthetic oligonucleotide
auguggcaagauaaaagga

SEQ ID NO: 2590286 - RNA, 19 nt, Artificial Sequence
  Description of Artificial Sequence: Synthetic oligonucleotide
gaaguuaagccaggacaca

SEQ ID NO: 2590287 - RNA, 19 nt, Artificial Sequence
  Description of Artificial Sequence: Synthetic oligonucleotide
ucgauaucuucugcagaca

SEQ ID NO: 2590288 - RNA, 19 nt, Artificial Sequence
  Description of Artificial Sequence: Synthetic oligonucleotide
gcucauuuuauaugucuuc

SEQ ID NO: 2590289 - RNA, 19 nt, Artificial Sequence
  Description of Artificial Sequence: Synthetic oligonucleotide
caauaccuggaaacugcuc

SEQ ID NO: 2590290 - RNA, 19 nt, Artificial Sequence
  Description of Artificial Sequence: Synthetic oligonucleotide
cugcagacaucuucaugac

SEQ ID NO: 2590291 - RNA, 19 nt, Artificial Sequence
  Description of Artificial Sequence: Synthetic oligonucleotide
ggagaaguuaagccaggac

SEQ ID NO: 2590292 - RNA, 19 nt, Artificial Sequence
  Description of Artificial Sequence: Synthetic oligonucleotide
gcgacgauagggaagggcc

SEQ ID NO: 2590293 - RNA, 19 nt, Artificial Sequence
  Description of Artificial Sequence: Synthetic oligonucleotide
cuucugccaugauugcaac

SEQ ID NO: 2590294 - RNA, 19 nt, Artificial Sequence
  Description of Artificial Sequence: Synthetic oligonucleotide
agggaagggccuggaaugg

SEQ ID NO: 2590295 - RNA, 19 nt, Artificial Sequence
  Description of Artificial Sequence: Synthetic oligonucleotide
ggggcgacgauagggaagg

SEQ ID NO: 2590296 - RNA, 19 nt, Artificial Sequence
  Description of Artificial Sequence: Synthetic oligonucleotide
uucauggcaucggacaauu

SEQ ID NO: 2590297 - RNA, 19 nt, Artificial Sequence
  Description of Artificial Sequence: Synthetic oligonucleotide
uagcuccaggagaaguuaa

SEQ ID NO: 2590298 - RNA, 19 nt, Artificial Sequence
  Description of Artificial Sequence: Synthetic oligonucleotide
aucuacggcagcaggauaa

SEQ ID NO: 2590299 - RNA, 19 nt, Artificial Sequence
  Description of Artificial Sequence: Synthetic oligonucleotide
uaucuacggcagcaggaua

SEQ ID NO: 2590300 - RNA, 19 nt, Artificial Sequence
  Description of Artificial Sequence: Synthetic oligonucleotide
gauauagcauaaucuccau

SEQ ID NO: 2590301 - RNA, 19 nt, Artificial Sequence
  Description of Artificial Sequence: Synthetic oligonucleotide
auaccuggaaacugcucua

SEQ ID NO: 2590302 - RNA, 19 nt, Artificial Sequence
  Description of Artificial Sequence: Synthetic oligonucleotide
cacaugauauuugcuccac

SEQ ID NO: 2590303 - RNA, 19 nt, Artificial Sequence
  Description of Artificial Sequence: Synthetic oligonucleotide
auggcuccuuuaucaaccu

SEQ ID NO: 2590304 - RNA, 19 nt, Artificial Sequence
  Description of Artificial Sequence: Synthetic oligonucleotide
acgaggaaagccggcacug

SEQ ID NO: 2590305 - RNA, 19 nt, Artificial Sequence
  Description of Artificial Sequence: Synthetic oligonucleotide
guaacuccccauuuacugu

SEQ ID NO: 2590306 - RNA, 19 nt, Artificial Sequence
  Description of Artificial Sequence: Synthetic oligonucleotide
auuccuuuguugacuuucu

SEQ ID NO: 2590307 - RNA, 19 nt, Artificial Sequence
  Description of Artificial Sequence: Synthetic oligonucleotide
uguugacuuucucgauauc

SEQ ID NO: 2590308 - RNA, 19 nt, Artificial Sequence
  Description of Artificial Sequence: Synthetic oligonucleotide
ggauaaaagggcccuucuc

SEQ ID NO: 2590309 - RNA, 19 nt, Artificial Sequence
  Description of Artificial Sequence: Synthetic oligonucleotide
caugacgccaacacacaaa

SEQ ID NO: 2590310 - RNA, 19 nt, Artificial Sequence
  Description of Artificial Sequence: Synthetic oligonucleotide
cuuuaucaaccugcugaug

SEQ ID NO: 2590311 - RNA, 19 nt, Artificial Sequence
  Description of Artificial Sequence: Synthetic oligonucleotide
agacaucuucaugacgcca

SEQ ID NO: 2590312 - RNA, 19 nt, Artificial Sequence
  Description of Artificial Sequence: Synthetic oligonucleotide
ggcacugacagucgaucug

SEQ ID NO: 2590313 - RNA, 19 nt, Artificial Sequence
  Description of Artificial Sequence: Synthetic oligonucleotide
ugauuaagccaugguucaa

SEQ ID NO: 2590314 - RNA, 19 nt, Artificial Sequence
  Description of Artificial Sequence: Synthetic oligonucleotide
cacauuccuuuugaggcuc

SEQ ID NO: 2590315 - RNA, 19 nt, Artificial Sequence
  Description of Artificial Sequence: Synthetic oligonucleotide
acgauagggaagggccugg

SEQ ID NO: 2590316 - RNA, 19 nt, Artificial Sequence
  Description of Artificial Sequence: Synthetic oligonucleotide
cagcccaucauuuaauaau

SEQ ID NO: 2590317 - RNA, 19 nt, Artificial Sequence
  Description of Artificial Sequence: Synthetic oligonucleotide
auauugagcccaagcacau

SEQ ID NO: 2590318 - RNA, 19 nt, Artificial Sequence
  Description of Artificial Sequence: Synthetic oligonucleotide
aucuuaggguuggauaaaa

SEQ ID NO: 2590319 - RNA, 19 nt, Artificial Sequence
  Description of Artificial Sequence: Synthetic oligonucleotide
augauuugauuaagccaug

SEQ ID NO: 2590320 - RNA, 19 nt, Artificial Sequence
  Description of Artificial Sequence: Synthetic oligonucleotide
agggcccuucucuuugucu

SEQ ID NO: 2590321 - RNA, 19 nt, Artificial Sequence
  Description of Artificial Sequence: Synthetic oligonucleotide
aggauaaagcuuagcucca

SEQ ID NO: 2590322 - RNA, 19 nt, Artificial Sequence
  Description of Artificial Sequence: Synthetic oligonucleotide
gauuaagccaugguucaau

SEQ ID NO: 2590323 - RNA, 19 nt, Artificial Sequence
  Description of Artificial Sequence: Synthetic oligonucleotide
aggaucuuucuuaggcaug

SEQ ID NO: 2590324 - RNA, 19 nt, Artificial Sequence
  Description of Artificial Sequence: Synthetic oligonucleotide
guuggacacauuuucuuuu

SEQ ID NO: 2590325 - RNA, 19 nt, Artificial Sequence
  Description of Artificial Sequence: Synthetic oligonucleotide
ggaucuuucuuaggcauga

SEQ ID NO: 2590326 - RNA, 19 nt, Artificial Sequence
  Description of Artificial Sequence: Synthetic oligonucleotide
aagccggcacugacagucg

SEQ ID NO: 2590327 - RNA, 19 nt, Artificial Sequence
  Description of Artificial Sequence: Synthetic oligonucleotide
caacuggaugcaguuggac

SEQ ID NO: 2590328 - RNA, 19 nt, Artificial Sequence
  Description of Artificial Sequence: Synthetic oligonucleotide
aggacacaugauauuugcu

SEQ ID NO: 2590329 - RNA, 19 nt, Artificial Sequence
  Description of Artificial Sequence: Synthetic oligonucleotide
aaguaaucuuaggguugga

SEQ ID NO: 2590330 - RNA, 19 nt, Artificial Sequence
  Description of Artificial Sequence: Synthetic oligonucleotide
auaugccacagcccaucau

SEQ ID NO: 2590331 - RNA, 19 nt, Artificial Sequence
  Description of Artificial Sequence: Synthetic oligonucleotide
cuccuuuaucaaccugcug

SEQ ID NO: 2590332 - RNA, 19 nt, Artificial Sequence
  Description of Artificial Sequence: Synthetic oligonucleotide
aaggguccggcacgaggaa

SEQ ID NO: 2590333 - RNA, 19 nt, Artificial Sequence
  Description of Artificial Sequence: Synthetic oligonucleotide
ucuacggcagcaggauaaa

SEQ ID NO: 2590334 - RNA, 19 nt, Artificial Sequence
  Description of Artificial Sequence: Synthetic oligonucleotide
cuuuugaggcucauuuuau

SEQ ID NO: 2590335 - RNA, 19 nt, Artificial Sequence
  Description of Artificial Sequence: Synthetic oligonucleotide
gcccaucauuuaauaaugg

SEQ ID NO: 2590336 - RNA, 19 nt, Artificial Sequence
  Description of Artificial Sequence: Synthetic oligonucleotide
cccaucauuuaauaaugga

SEQ ID NO: 2590337 - RNA, 19 nt, Artificial Sequence
  Description of Artificial Sequence: Synthetic oligonucleotide
ggauaaagcuuagcuccag

SEQ ID NO: 2590338 - RNA, 19 nt, Artificial Sequence
  Description of Artificial Sequence: Synthetic oligonucleotide
acugcucuaucaauugauu

SEQ ID NO: 2590339 - RNA, 19 nt, Artificial Sequence
  Description of Artificial Sequence: Synthetic oligonucleotide
ggcagcaggauaaagcuua

SEQ ID NO: 2590340 - RNA, 19 nt, Artificial Sequence
  Description of Artificial Sequence: Synthetic oligonucleotide
cauggcaucggacaauuuu

SEQ ID NO: 2590341 - RNA, 19 nt, Artificial Sequence
  Description of Artificial Sequence: Synthetic oligonucleotide
gcuccaggagaaguuaagc

SEQ ID NO: 2590342 - RNA, 19 nt, Artificial Sequence
  Description of Artificial Sequence: Synthetic oligonucleotide
uaccuggaaacugcucuau

SEQ ID NO: 2590343 - RNA, 19 nt, Artificial Sequence
  Description of Artificial Sequence: Synthetic oligonucleotide
acggagguuuucaacugga

SEQ ID NO: 2590344 - RNA, 19 nt, Artificial Sequence
  Description of Artificial Sequence: Synthetic oligonucleotide
ggauuucuauguguucaug

SEQ ID NO: 2590345 - RNA, 19 nt, Artificial Sequence
  Description of Artificial Sequence: Synthetic oligonucleotide
cuugaacaugauccaaggu

SEQ ID NO: 2590346 - RNA, 19 nt, Artificial Sequence
  Description of Artificial Sequence: Synthetic oligonucleotide
cauaugccacagcccauca

SEQ ID NO: 2590347 - RNA, 19 nt, Artificial Sequence
  Description of Artificial Sequence: Synthetic oligonucleotide
ugccacagcccaucauuua

SEQ ID NO: 2590348 - RNA, 19 nt, Artificial Sequence
  Description of Artificial Sequence: Synthetic oligonucleotide
cuacggcagcaggauaaag

SEQ ID NO: 2590349 - RNA, 19 nt, Artificial Sequence
  Description of Artificial Sequence: Synthetic oligonucleotide
ggcaucggacaauuuucac

SEQ ID NO: 2590350 - RNA, 19 nt, Artificial Sequence
  Description of Artificial Sequence: Synthetic oligonucleotide
acgccaacacacaaagcau

SEQ ID NO: 2590351 - RNA, 19 nt, Artificial Sequence
  Description of Artificial Sequence: Synthetic oligonucleotide
cacagucacaacacagaua

SEQ ID NO: 2590352 - RNA, 19 nt, Artificial Sequence
  Description of Artificial Sequence: Synthetic oligonucleotide
gguucaauaccuggaaacu

SEQ ID NO: 2590353 - RNA, 19 nt, Artificial Sequence
  Description of Artificial Sequence: Synthetic oligonucleotide
ggguuggauaaaagggccc

SEQ ID NO: 2590354 - RNA, 19 nt, Artificial Sequence
  Description of Artificial Sequence: Synthetic oligonucleotide
cacagcccaucauuuaaua

SEQ ID NO: 2590355 - RNA, 19 nt, Artificial Sequence
  Description of Artificial Sequence: Synthetic oligonucleotide
ccaugguucaauaccugga

SEQ ID NO: 2590356 - RNA, 19 nt, Artificial Sequence
  Description of Artificial Sequence: Synthetic oligonucleotide
cagcaggauaaagcuuagc

SEQ ID NO: 2590357 - RNA, 19 nt, Artificial Sequence
  Description of Artificial Sequence: Synthetic oligonucleotide
caaccugcugauguggcaa

SEQ ID NO: 2590358 - RNA, 19 nt, Artificial Sequence
  Description of Artificial Sequence: Synthetic oligonucleotide
ccaagcacauuccuuuuga

SEQ ID NO: 2590359 - RNA, 19 nt, Artificial Sequence
  Description of Artificial Sequence: Synthetic oligonucleotide
aacuccccauuuacuguaa

SEQ ID NO: 2590360 - RNA, 19 nt, Artificial Sequence
  Description of Artificial Sequence: Synthetic oligonucleotide
ggguccggcacgaggaaag

SEQ ID NO: 2590361 - RNA, 19 nt, Artificial Sequence
  Description of Artificial Sequence: Synthetic oligonucleotide
acccuuaauaacggagguu

SEQ ID NO: 2590362 - RNA, 19 nt, Artificial Sequence
  Description of Artificial Sequence: Synthetic oligonucleotide
agcuuagcuccaggagaag

SEQ ID NO: 2590363 - RNA, 19 nt, Artificial Sequence
  Description of Artificial Sequence: Synthetic oligonucleotide
cugcucuaucaauugauuu

SEQ ID NO: 2590364 - RNA, 19 nt, Artificial Sequence
  Description of Artificial Sequence: Synthetic oligonucleotide
uauugagcccaagcacauu

SEQ ID NO: 2590365 - RNA, 19 nt, Artificial Sequence
  Description of Artificial Sequence: Synthetic oligonucleotide
ggcgacgauagggaagggc

SEQ ID NO: 2590366 - RNA, 19 nt, Artificial Sequence
  Description of Artificial Sequence: Synthetic oligonucleotide
guccggcacgaggaaagcc

SEQ ID NO: 2590367 - RNA, 19 nt, Artificial Sequence
  Description of Artificial Sequence: Synthetic oligonucleotide
guaucuacggcagcaggau

SEQ ID NO: 2590368 - RNA, 19 nt, Artificial Sequence
  Description of Artificial Sequence: Synthetic oligonucleotide
cuuuguugacuuucucgau

SEQ ID NO: 2590369 - RNA, 19 nt, Artificial Sequence
  Description of Artificial Sequence: Synthetic oligonucleotide
caguaacuccccauuuacu

SEQ ID NO: 2590370 - RNA, 19 nt, Artificial Sequence
  Description of Artificial Sequence: Synthetic oligonucleotide
ccggcacgaggaaagccgg

SEQ ID NO: 2590371 - RNA, 19 nt, Artificial Sequence
  Description of Artificial Sequence: Synthetic oligonucleotide
caucuucaugacgccaaca

SEQ ID NO: 2590372 - RNA, 19 nt, Artificial Sequence
  Description of Artificial Sequence: Synthetic oligonucleotide
agccggcacugacagucga

SEQ ID NO: 2590373 - RNA, 19 nt, Artificial Sequence
  Description of Artificial Sequence: Synthetic oligonucleotide
caguuggacacauuuucuu

SEQ ID NO: 2590374 - RNA, 19 nt, Artificial Sequence
  Description of Artificial Sequence: Synthetic oligonucleotide
augcaguuggacacauuuu

SEQ ID NO: 2590375 - RNA, 19 nt, Artificial Sequence
  Description of Artificial Sequence: Synthetic oligonucleotide
gggaagggccuggaauggg

SEQ ID NO: 2590376 - RNA, 19 nt, Artificial Sequence
  Description of Artificial Sequence: Synthetic oligonucleotide
gguuggauaaaagggcccu

SEQ ID NO: 2590377 - RNA, 19 nt, Artificial Sequence
  Description of Artificial Sequence: Synthetic oligonucleotide
cccaagcacauuccuuuug

SEQ ID NO: 2590378 - RNA, 19 nt, Artificial Sequence
  Description of Artificial Sequence: Synthetic oligonucleotide
augccacagcccaucauuu

SEQ ID NO: 2590379 - RNA, 19 nt, Artificial Sequence
  Description of Artificial Sequence: Synthetic oligonucleotide
ccuggaaugggaaggaaau

SEQ ID NO: 2590380 - RNA, 19 nt, Artificial Sequence
  Description of Artificial Sequence: Synthetic oligonucleotide
gcacgaggaaagccggcac

SEQ ID NO: 2590381 - RNA, 19 nt, Artificial Sequence
  Description of Artificial Sequence: Synthetic oligonucleotide
acauuccuuuugaggcuca

SEQ ID NO: 2590382 - RNA, 19 nt, Artificial Sequence
  Description of Artificial Sequence: Synthetic oligonucleotide
gcagcaggauaaagcuuag

SEQ ID NO: 2590383 - RNA, 19 nt, Artificial Sequence
  Description of Artificial Sequence: Synthetic oligonucleotide
aucuccauauugagcccaa

SEQ ID NO: 2590384 - RNA, 19 nt, Artificial Sequence
  Description of Artificial Sequence: Synthetic oligonucleotide
ggcacgaggaaagccggca

SEQ ID NO: 2590385 - RNA, 19 nt, Artificial Sequence
  Description of Artificial Sequence: Synthetic oligonucleotide
cccauuuacuguaaggauu

SEQ ID NO: 2590386 - RNA, 19 nt, Artificial Sequence
  Description of Artificial Sequence: Synthetic oligonucleotide
cacgaggaaagccggcacu

SEQ ID NO: 2590387 - RNA, 19 nt, Artificial Sequence
  Description of Artificial Sequence: Synthetic oligonucleotide
gccaauuccuuuguugacu

SEQ ID NO: 2590388 - RNA, 19 nt, Artificial Sequence
  Description of Artificial Sequence: Synthetic oligonucleotide
cacacaaagcauguugcuu

SEQ ID NO: 2590389 - RNA, 19 nt, Artificial Sequence
  Description of Artificial Sequence: Synthetic oligonucleotide
gcacauuccuuuugaggcu

SEQ ID NO: 2590390 - RNA, 19 nt, Artificial Sequence
  Description of Artificial Sequence: Synthetic oligonucleotide
cccuuaauaacggagguuu

SEQ ID NO: 2590391 - RNA, 19 nt, Artificial Sequence
  Description of Artificial Sequence: Synthetic oligonucleotide
ccaugauugcaacaauagu

SEQ ID NO: 2590392 - RNA, 19 nt, Artificial Sequence
  Description of Artificial Sequence: Synthetic oligonucleotide
gccuggaaugggaaggaaa

SEQ ID NO: 2590393 - RNA, 19 nt, Artificial Sequence
  Description of Artificial Sequence: Synthetic oligonucleotide
gccaacacacaaagcaugu

SEQ ID NO: 2590394 - RNA, 19 nt, Artificial Sequence
  Description of Artificial Sequence: Synthetic oligonucleotide
gcuuagcuccaggagaagu

SEQ ID NO: 2590395 - RNA, 19 nt, Artificial Sequence
  Description of Artificial Sequence: Synthetic oligonucleotide
aggguccggcacgaggaaa

SEQ ID NO: 2590396 - RNA, 19 nt, Artificial Sequence
  Description of Artificial Sequence: Synthetic oligonucleotide
gguccggcacgaggaaagc

SEQ ID NO: 2590397 - RNA, 19 nt, Artificial Sequence
  Description of Artificial Sequence: Synthetic oligonucleotide
ggcaagauaaaaggauauu

SEQ ID NO: 2590398 - RNA, 19 nt, Artificial Sequence
  Description of Artificial Sequence: Synthetic oligonucleotide
ccggcacugacagucgauc

SEQ ID NO: 2590399 - RNA, 19 nt, Artificial Sequence
  Description of Artificial Sequence: Synthetic oligonucleotide
guuggauaaaagggcccuu

SEQ ID NO: 2590400 - RNA, 19 nt, Artificial Sequence
  Description of Artificial Sequence: Synthetic oligonucleotide
ccaauuccuuuguugacuu

SEQ ID NO: 2590401 - RNA, 19 nt, Artificial Sequence
  Description of Artificial Sequence: Synthetic oligonucleotide
cagucacaacacagauaua

SEQ ID NO: 2590402 - RNA, 19 nt, Artificial Sequence
  Description of Artificial Sequence: Synthetic oligonucleotide
cuggaaugggaaggaaauu

SEQ ID NO: 2590403 - RNA, 19 nt, Artificial Sequence
  Description of Artificial Sequence: Synthetic oligonucleotide
gggccuggaaugggaagga

SEQ ID NO: 2590404 - RNA, 19 nt, Artificial Sequence
  Description of Artificial Sequence: Synthetic oligonucleotide
cugccaugauugcaacaau

SEQ ID NO: 2590405 - RNA, 19 nt, Artificial Sequence
  Description of Artificial Sequence: Synthetic oligonucleotide
cgauaucuucugcagacau

SEQ ID NO: 2590406 - RNA, 19 nt, Artificial Sequence
  Description of Artificial Sequence: Synthetic oligonucleotide
cccuucucuuugucuaaaa

SEQ ID NO: 2590407 - RNA, 19 nt, Artificial Sequence
  Description of Artificial Sequence: Synthetic oligonucleotide
ccuuaauaacggagguuuu

SEQ ID NO: 2590408 - RNA, 19 nt, Artificial Sequence
  Description of Artificial Sequence: Synthetic oligonucleotide
gggcgacgauagggaaggg

SEQ ID NO: 2590409 - RNA, 19 nt, Artificial Sequence
  Description of Artificial Sequence: Synthetic oligonucleotide
cggcacgaggaaagccggc

SEQ ID NO: 2590410 - RNA, 19 nt, Artificial Sequence
  Description of Artificial Sequence: Synthetic oligonucleotide
ccacagcccaucauuuaau

SEQ ID NO: 2590411 - RNA, 19 nt, Artificial Sequence
  Description of Artificial Sequence: Synthetic oligonucleotide
cggacaauuuucacaggau

SEQ ID NO: 2590412 - RNA, 19 nt, Artificial Sequence
  Description of Artificial Sequence: Synthetic oligonucleotide
gcccuucucuuugucuaaa

SEQ ID NO: 2590413 - RNA, 19 nt, Artificial Sequence
  Description of Artificial Sequence: Synthetic oligonucleotide
ggccuggaaugggaaggaa

SEQ ID NO: 2590414 - RNA, 19 nt, Artificial Sequence
  Description of Artificial Sequence: Synthetic oligonucleotide
cgacgauagggaagggccu

SEQ ID NO: 2590415 - RNA, 19 nt, Artificial Sequence
  Description of Artificial Sequence: Synthetic oligonucleotide
gcccaagcacauuccuuuu

SEQ ID NO: 2590416 - RNA, 19 nt, Artificial Sequence
  Description of Artificial Sequence: Synthetic oligonucleotide
cggcacugacagucgaucu

SEQ ID NO: 2590417 - RNA, 19 nt, Artificial Sequence
  Description of Artificial Sequence: Synthetic oligonucleotide
ccaacacacaaagcauguu

SEQ ID NO: 2590418 - RNA, 19 nt, Artificial Sequence
  Description of Artificial Sequence: Synthetic oligonucleotide
cgauagggaagggccugga

SEQ ID NO: 2590419 - RNA, 19 nt, Artificial Sequence
  Description of Artificial Sequence: Synthetic oligonucleotide
cggagguuuucaacuggau

SEQ ID NO: 2590420 - RNA, 19 nt, Artificial Sequence
  Description of Artificial Sequence: Synthetic oligonucleotide
ggaugcaguuggacacauu

SEQ ID NO: 2590421 - RNA, 19 nt, Artificial Sequence
  Description of Artificial Sequence: Synthetic oligonucleotide
gccggcacugacagucgau

SEQ ID NO: 2590422 - RNA, 19 nt, Artificial Sequence
  Description of Artificial Sequence: Synthetic oligonucleotide
cggcagcaggauaaagcuu

SEQ ID NO: 2590423 - RNA, 19 nt, Artificial Sequence
  Description of Artificial Sequence: Synthetic oligonucleotide
aagauaagaauuaagaucc

SEQ ID NO: 2590424 - RNA, 19 nt, Artificial Sequence
  Description of Artificial Sequence: Synthetic oligonucleotide
auaauuuauaaucuaaucg

SEQ ID NO: 2590425 - RNA, 19 nt, Artificial Sequence
  Description of Artificial Sequence: Synthetic oligonucleotide
aaauaaaacauucagacuu

SEQ ID NO: 2590426 - RNA, 19 nt, Artificial Sequence
  Description of Artificial Sequence: Synthetic oligonucleotide
agaauuaagauccuucagc

SEQ ID NO: 2590427 - RNA, 19 nt, Artificial Sequence
  Description of Artificial Sequence: Synthetic oligonucleotide
aaugacaucacauuaauuu

SEQ ID NO: 2590428 - RNA, 19 nt, Artificial Sequence
  Description of Artificial Sequence: Synthetic oligonucleotide
uaugagauaauuuauaauc

SEQ ID NO: 2590429 - RNA, 19 nt, Artificial Sequence
  Description of Artificial Sequence: Synthetic oligonucleotide
uacauuagaaccauggucc

SEQ ID NO: 2590430 - RNA, 19 nt, Artificial Sequence
  Description of Artificial Sequence: Synthetic oligonucleotide
acuauaaacaucuaggaga

SEQ ID NO: 2590431 - RNA, 19 nt, Artificial Sequence
  Description of Artificial Sequence: Synthetic oligonucleotide
uucaagauaagaauuaaga

SEQ ID NO: 2590432 - RNA, 19 nt, Artificial Sequence
  Description of Artificial Sequence: Synthetic oligonucleotide
aguacaguaggauaucugc

SEQ ID NO: 2590433 - RNA, 19 nt, Artificial Sequence
  Description of Artificial Sequence: Synthetic oligonucleotide
aaaccuucaacuaagggac

SEQ ID NO: 2590434 - RNA, 19 nt, Artificial Sequence
  Description of Artificial Sequence: Synthetic oligonucleotide
aaaacauucagacuugagu

SEQ ID NO: 2590435 - RNA, 19 nt, Artificial Sequence
  Description of Artificial Sequence: Synthetic oligonucleotide
uuaacaaagaaacaaugac

SEQ ID NO: 2590436 - RNA, 19 nt, Artificial Sequence
  Description of Artificial Sequence: Synthetic oligonucleotide
ucaccuauaaauaugagau

SEQ ID NO: 2590437 - RNA, 19 nt, Artificial Sequence
  Description of Artificial Sequence: Synthetic oligonucleotide
aauucuaccaacauuaaca

SEQ ID NO: 2590438 - RNA, 19 nt, Artificial Sequence
  Description of Artificial Sequence: Synthetic oligonucleotide
acuauaaagcgauggagcc

SEQ ID NO: 2590439 - RNA, 19 nt, Artificial Sequence
  Description of Artificial Sequence: Synthetic oligonucleotide
gauguuauauccugcaagg

SEQ ID NO: 2590440 - RNA, 19 nt, Artificial Sequence
  Description of Artificial Sequence: Synthetic oligonucleotide
uaugaaacacugaugacag

SEQ ID NO: 2590441 - RNA, 19 nt, Artificial Sequence
  Description of Artificial Sequence: Synthetic oligonucleotide
agauaugaaacacugauga

SEQ ID NO: 2590442 - RNA, 19 nt, Artificial Sequence
  Description of Artificial Sequence: Synthetic oligonucleotide
aacuauaaagcgauggagc

SEQ ID NO: 2590443 - RNA, 19 nt, Artificial Sequence
  Description of Artificial Sequence: Synthetic oligonucleotide
auaaauaugagauaauuua

SEQ ID NO: 2590444 - RNA, 19 nt, Artificial Sequence
  Description of Artificial Sequence: Synthetic oligonucleotide
ugucaggucaacuauaaag

SEQ ID NO: 2590445 - RNA, 19 nt, Artificial Sequence
  Description of Artificial Sequence: Synthetic oligonucleotide
acauuuuacacuucuaauc

SEQ ID NO: 2590446 - RNA, 19 nt, Artificial Sequence
  Description of Artificial Sequence: Synthetic oligonucleotide
ucaacuaagggacaaauaa

SEQ ID NO: 2590447 - RNA, 19 nt, Artificial Sequence
  Description of Artificial Sequence: Synthetic oligonucleotide
aaauucuaccaacauuaac

SEQ ID NO: 2590448 - RNA, 19 nt, Artificial Sequence
  Description of Artificial Sequence: Synthetic oligonucleotide
aucacauuaauuuacauua

SEQ ID NO: 2590449 - RNA, 19 nt, Artificial Sequence
  Description of Artificial Sequence: Synthetic oligonucleotide
caagauaagaauuaagauc

SEQ ID NO: 2590450 - RNA, 19 nt, Artificial Sequence
  Description of Artificial Sequence: Synthetic oligonucleotide
cacauuaagauauuucucc

SEQ ID NO: 2590451 - RNA, 19 nt, Artificial Sequence
  Description of Artificial Sequence: Synthetic oligonucleotide
aacuacuauaaacaucuag

SEQ ID NO: 2590452 - RNA, 19 nt, Artificial Sequence
  Description of Artificial Sequence: Synthetic oligonucleotide
aauaaacuacuauaaacau

SEQ ID NO: 2590453 - RNA, 19 nt, Artificial Sequence
  Description of Artificial Sequence: Synthetic oligonucleotide
acacauaaaagccagauau

SEQ ID NO: 2590454 - RNA, 19 nt, Artificial Sequence
  Description of Artificial Sequence: Synthetic oligonucleotide
acacuucuaaucuugcugc

SEQ ID NO: 2590455 - RNA, 19 nt, Artificial Sequence
  Description of Artificial Sequence: Synthetic oligonucleotide
uccaaaauacauuuuacac

SEQ ID NO: 2590456 - RNA, 19 nt, Artificial Sequence
  Description of Artificial Sequence: Synthetic oligonucleotide
ugauguuauauccugcaag

SEQ ID NO: 2590457 - RNA, 19 nt, Artificial Sequence
  Description of Artificial Sequence: Synthetic oligonucleotide
uaagggacaaauaaaacau

SEQ ID NO: 2590458 - RNA, 19 nt, Artificial Sequence
  Description of Artificial Sequence: Synthetic oligonucleotide
aaagccagauaugaaacac

SEQ ID NO: 2590459 - RNA, 19 nt, Artificial Sequence
  Description of Artificial Sequence: Synthetic oligonucleotide
uauaaagcgauggagcccg

SEQ ID NO: 2590460 - RNA, 19 nt, Artificial Sequence
  Description of Artificial Sequence: Synthetic oligonucleotide
ugauaagcaaauuuuauua

SEQ ID NO: 2590461 - RNA, 19 nt, Artificial Sequence
  Description of Artificial Sequence: Synthetic oligonucleotide
uuuuacacuucuaaucuug

SEQ ID NO: 2590462 - RNA, 19 nt, Artificial Sequence
  Description of Artificial Sequence: Synthetic oligonucleotide
auuuacauuagaaccaugg

SEQ ID NO: 2590463 - RNA, 19 nt, Artificial Sequence
  Description of Artificial Sequence: Synthetic oligonucleotide
ugaagacaacacuagacag

SEQ ID NO: 2590464 - RNA, 19 nt, Artificial Sequence
  Description of Artificial Sequence: Synthetic oligonucleotide
ccaacauuaacaaagaaac

SEQ ID NO: 2590465 - RNA, 19 nt, Artificial Sequence
  Description of Artificial Sequence: Synthetic oligonucleotide
uuacauuagaaccaugguc

SEQ ID NO: 2590466 - RNA, 19 nt, Artificial Sequence
  Description of Artificial Sequence: Synthetic oligonucleotide
uaaaagccagauaugaaac

SEQ ID NO: 2590467 - RNA, 19 nt, Artificial Sequence
  Description of Artificial Sequence: Synthetic oligonucleotide
uaagaauuaagauccuuca

SEQ ID NO: 2590468 - RNA, 19 nt, Artificial Sequence
  Description of Artificial Sequence: Synthetic oligonucleotide
uaaauaugagauaauuuau

SEQ ID NO: 2590469 - RNA, 19 nt, Artificial Sequence
  Description of Artificial Sequence: Synthetic oligonucleotide
uuaucuucaagauaagaau

SEQ ID NO: 2590470 - RNA, 19 nt, Artificial Sequence
  Description of Artificial Sequence: Synthetic oligonucleotide
uacacuucuaaucuugcug

SEQ ID NO: 2590471 - RNA, 19 nt, Artificial Sequence
  Description of Artificial Sequence: Synthetic oligonucleotide
uuugcuugaauaacaguug

SEQ ID NO: 2590472 - RNA, 19 nt, Artificial Sequence
  Description of Artificial Sequence: Synthetic oligonucleotide
uggguaaugcugaaugugg

SEQ ID NO: 2590473 - RNA, 19 nt, Artificial Sequence
  Description of Artificial Sequence: Synthetic oligonucleotide
uaagcaaauuuuauuaaaa

SEQ ID NO: 2590474 - RNA, 19 nt, Artificial Sequence
  Description of Artificial Sequence: Synthetic oligonucleotide
auaaaagccagauaugaaa

SEQ ID NO: 2590475 - RNA, 19 nt, Artificial Sequence
  Description of Artificial Sequence: Synthetic oligonucleotide
aaagaaacaaugacaucac

SEQ ID NO: 2590476 - RNA, 19 nt, Artificial Sequence
  Description of Artificial Sequence: Synthetic oligonucleotide
gaauuaagauccuucagca

SEQ ID NO: 2590477 - RNA, 19 nt, Artificial Sequence
  Description of Artificial Sequence: Synthetic oligonucleotide
ugcaagguagacuuuaucu

SEQ ID NO: 2590478 - RNA, 19 nt, Artificial Sequence
  Description of Artificial Sequence: Synthetic oligonucleotide
uugaauaacaguugaauuu

SEQ ID NO: 2590479 - RNA, 19 nt, Artificial Sequence
  Description of Artificial Sequence: Synthetic oligonucleotide
cauuaacaaagaaacaaug

SEQ ID NO: 2590480 - RNA, 19 nt, Artificial Sequence
  Description of Artificial Sequence: Synthetic oligonucleotide
uaggauaucugccaaggug

SEQ ID NO: 2590481 - RNA, 19 nt, Artificial Sequence
  Description of Artificial Sequence: Synthetic oligonucleotide
aauuuauaaucuaaucgug

SEQ ID NO: 2590482 - RNA, 19 nt, Artificial Sequence
  Description of Artificial Sequence: Synthetic oligonucleotide
aauuaagauccuucagcag

SEQ ID NO: 2590483 - RNA, 19 nt, Artificial Sequence
  Description of Artificial Sequence: Synthetic oligonucleotide
aaacugcaaaccuucaacu

SEQ ID NO: 2590484 - RNA, 19 nt, Artificial Sequence
  Description of Artificial Sequence: Synthetic oligonucleotide
ugauuugcuugaauaacag

SEQ ID NO: 2590485 - RNA, 19 nt, Artificial Sequence
  Description of Artificial Sequence: Synthetic oligonucleotide
uuuauaaucuaaucgugau

SEQ ID NO: 2590486 - RNA, 19 nt, Artificial Sequence
  Description of Artificial Sequence: Synthetic oligonucleotide
uucaccuauaaauaugaga

SEQ ID NO: 2590487 - RNA, 19 nt, Artificial Sequence
  Description of Artificial Sequence: Synthetic oligonucleotide
ugauccuguacucuaacca

SEQ ID NO: 2590488 - RNA, 19 nt, Artificial Sequence
  Description of Artificial Sequence: Synthetic oligonucleotide
aaggugauguuauauccug

SEQ ID NO: 2590489 - RNA, 19 nt, Artificial Sequence
  Description of Artificial Sequence: Synthetic oligonucleotide
agcaggaacuucuaguggg

SEQ ID NO: 2590490 - RNA, 19 nt, Artificial Sequence
  Description of Artificial Sequence: Synthetic oligonucleotide
ugggaguuagcauagaguc

SEQ ID NO: 2590491 - RNA, 19 nt, Artificial Sequence
  Description of Artificial Sequence: Synthetic oligonucleotide
ucaacuauaaagcgaugga

SEQ ID NO: 2590492 - RNA, 19 nt, Artificial Sequence
  Description of Artificial Sequence: Synthetic oligonucleotide
guuucugccacugauaagc

SEQ ID NO: 2590493 - RNA, 19 nt, Artificial Sequence
  Description of Artificial Sequence: Synthetic oligonucleotide
gacuuuaucuucaagauaa

SEQ ID NO: 2590494 - RNA, 19 nt, Artificial Sequence
  Description of Artificial Sequence: Synthetic oligonucleotide
aaaccagcgagacacauua

SEQ ID NO: 2590495 - RNA, 19 nt, Artificial Sequence
  Description of Artificial Sequence: Synthetic oligonucleotide
uuuacauuagaaccauggu

SEQ ID NO: 2590496 - RNA, 19 nt, Artificial Sequence
  Description of Artificial Sequence: Synthetic oligonucleotide
agaaccaugguccaaaaua

SEQ ID NO: 2590497 - RNA, 19 nt, Artificial Sequence
  Description of Artificial Sequence: Synthetic oligonucleotide
gaauguggcaaaaccagcg

SEQ ID NO: 2590498 - RNA, 19 nt, Artificial Sequence
  Description of Artificial Sequence: Synthetic oligonucleotide
auaugaaacacugaugaca

SEQ ID NO: 2590499 - RNA, 19 nt, Artificial Sequence
  Description of Artificial Sequence: Synthetic oligonucleotide
cugaauguggcaaaaccag

SEQ ID NO: 2590500 - RNA, 19 nt, Artificial Sequence
  Description of Artificial Sequence: Synthetic oligonucleotide
uguacucuaaccacugcug

SEQ ID NO: 2590501 - RNA, 19 nt, Artificial Sequence
  Description of Artificial Sequence: Synthetic oligonucleotide
aaagcgauggagcccguag

SEQ ID NO: 2590502 - RNA, 19 nt, Artificial Sequence
  Description of Artificial Sequence: Synthetic oligonucleotide
uagagucuguucuugauga

SEQ ID NO: 2590503 - RNA, 19 nt, Artificial Sequence
  Description of Artificial Sequence: Synthetic oligonucleotide
gacaacacuagacagaugu

SEQ ID NO: 2590504 - RNA, 19 nt, Artificial Sequence
  Description of Artificial Sequence: Synthetic oligonucleotide
ucuaaucgugauuugcuug

SEQ ID NO: 2590505 - RNA, 19 nt, Artificial Sequence
  Description of Artificial Sequence: Synthetic oligonucleotide
caaaccuucaacuaaggga

SEQ ID NO: 2590506 - RNA, 19 nt, Artificial Sequence
  Description of Artificial Sequence: Synthetic oligonucleotide
uuaaguuucugccacugau

SEQ ID NO: 2590507 - RNA, 19 nt, Artificial Sequence
  Description of Artificial Sequence: Synthetic oligonucleotide
ggacaaauaaaacauucag

SEQ ID NO: 2590508 - RNA, 19 nt, Artificial Sequence
  Description of Artificial Sequence: Synthetic oligonucleotide
uguuauauccugcaaggua

SEQ ID NO: 2590509 - RNA, 19 nt, Artificial Sequence
  Description of Artificial Sequence: Synthetic oligonucleotide
aaacaucuaggagaaaaug

SEQ ID NO: 2590510 - RNA, 19 nt, Artificial Sequence
  Description of Artificial Sequence: Synthetic oligonucleotide
uuuacacuucuaaucuugc

SEQ ID NO: 2590511 - RNA, 19 nt, Artificial Sequence
  Description of Artificial Sequence: Synthetic oligonucleotide
aacaucuaggagaaaauga

SEQ ID NO: 2590512 - RNA, 19 nt, Artificial Sequence
  Description of Artificial Sequence: Synthetic oligonucleotide
gacacauuaagauauuucu

SEQ ID NO: 2590513 - RNA, 19 nt, Artificial Sequence
  Description of Artificial Sequence: Synthetic oligonucleotide
gucaacuauaaagcgaugg

SEQ ID NO: 2590514 - RNA, 19 nt, Artificial Sequence
  Description of Artificial Sequence: Synthetic oligonucleotide
uaaaacauucagacuugag

SEQ ID NO: 2590515 - RNA, 19 nt, Artificial Sequence
  Description of Artificial Sequence: Synthetic oligonucleotide
auacauuuuacacuucuaa

SEQ ID NO: 2590516 - RNA, 19 nt, Artificial Sequence
  Description of Artificial Sequence: Synthetic oligonucleotide
uaagauauuucuccuuuuc

SEQ ID NO: 2590517 - RNA, 19 nt, Artificial Sequence
  Description of Artificial Sequence: Synthetic oligonucleotide
auaaacuacuauaaacauc

SEQ ID NO: 2590518 - RNA, 19 nt, Artificial Sequence
  Description of Artificial Sequence: Synthetic oligonucleotide
uccuuuucugcacugucag

SEQ ID NO: 2590519 - RNA, 19 nt, Artificial Sequence
  Description of Artificial Sequence: Synthetic oligonucleotide
aacuaagggacaaauaaaa

SEQ ID NO: 2590520 - RNA, 19 nt, Artificial Sequence
  Description of Artificial Sequence: Synthetic oligonucleotide
auaaacaucuaggagaaaa

SEQ ID NO: 2590521 - RNA, 19 nt, Artificial Sequence
  Description of Artificial Sequence: Synthetic oligonucleotide
auuaacaaagaaacaauga

SEQ ID NO: 2590522 - RNA, 19 nt, Artificial Sequence
  Description of Artificial Sequence: Synthetic oligonucleotide
auuaagauauuucuccuuu

SEQ ID NO: 2590523 - RNA, 19 nt, Artificial Sequence
  Description of Artificial Sequence: Synthetic oligonucleotide
ucacauuaauuuacauuag

SEQ ID NO: 2590524 - RNA, 19 nt, Artificial Sequence
  Description of Artificial Sequence: Synthetic oligonucleotide
uaaucuaaucgugauuugc

SEQ ID NO: 2590525 - RNA, 19 nt, Artificial Sequence
  Description of Artificial Sequence: Synthetic oligonucleotide
auaagcaaauuuuauuaaa

SEQ ID NO: 2590526 - RNA, 19 nt, Artificial Sequence
  Description of Artificial Sequence: Synthetic oligonucleotide
accacugcugaaccaaggc

SEQ ID NO: 2590527 - RNA, 19 nt, Artificial Sequence
  Description of Artificial Sequence: Synthetic oligonucleotide
cuucaagauaagaauuaag

SEQ ID NO: 2590528 - RNA, 19 nt, Artificial Sequence
  Description of Artificial Sequence: Synthetic oligonucleotide
auaucugccaaggugaugu

SEQ ID NO: 2590529 - RNA, 19 nt, Artificial Sequence
  Description of Artificial Sequence: Synthetic oligonucleotide
aguaggauaucugccaagg

SEQ ID NO: 2590530 - RNA, 19 nt, Artificial Sequence
  Description of Artificial Sequence: Synthetic oligonucleotide
acacuagacagauguugcc

SEQ ID NO: 2590531 - RNA, 19 nt, Artificial Sequence
  Description of Artificial Sequence: Synthetic oligonucleotide
uuuacuggaguguccgucc

SEQ ID NO: 2590532 - RNA, 19 nt, Artificial Sequence
  Description of Artificial Sequence: Synthetic oligonucleotide
aauguggcaaaaccagcga

SEQ ID NO: 2590533 - RNA, 19 nt, Artificial Sequence
  Description of Artificial Sequence: Synthetic oligonucleotide
gucaggucaacuauaaagc

SEQ ID NO: 2590534 - RNA, 19 nt, Artificial Sequence
  Description of Artificial Sequence: Synthetic oligonucleotide
agggacaaauaaaacauuc

SEQ ID NO: 2590535 - RNA, 19 nt, Artificial Sequence
  Description of Artificial Sequence: Synthetic oligonucleotide
accuauaaauaugagauaa

SEQ ID NO: 2590536 - RNA, 19 nt, Artificial Sequence
  Description of Artificial Sequence: Synthetic oligonucleotide
aaucuaaucgugauuugcu

SEQ ID NO: 2590537 - RNA, 19 nt, Artificial Sequence
  Description of Artificial Sequence: Synthetic oligonucleotide
ucuaggagaaaaugaauuu

SEQ ID NO: 2590538 - RNA, 19 nt, Artificial Sequence
  Description of Artificial Sequence: Synthetic oligonucleotide
aagacaacacuagacagau

SEQ ID NO: 2590539 - RNA, 19 nt, Artificial Sequence
  Description of Artificial Sequence: Synthetic oligonucleotide
ugagauaauuuauaaucua

SEQ ID NO: 2590540 - RNA, 19 nt, Artificial Sequence
  Description of Artificial Sequence: Synthetic oligonucleotide
ugaugaagacaacacuaga

SEQ ID NO: 2590541 - RNA, 19 nt, Artificial Sequence
  Description of Artificial Sequence: Synthetic oligonucleotide
aaauaugagauaauuuaua

SEQ ID NO: 2590542 - RNA, 19 nt, Artificial Sequence
  Description of Artificial Sequence: Synthetic oligonucleotide
uugcuugaauaacaguuga

SEQ ID NO: 2590543 - RNA, 19 nt, Artificial Sequence
  Description of Artificial Sequence: Synthetic oligonucleotide
uacauuuuacacuucuaau

SEQ ID NO: 2590544 - RNA, 19 nt, Artificial Sequence
  Description of Artificial Sequence: Synthetic oligonucleotide
auuugcuugaauaacaguu

SEQ ID NO: 2590545 - RNA, 19 nt, Artificial Sequence
  Description of Artificial Sequence: Synthetic oligonucleotide
acaaagaaacaaugacauc

SEQ ID NO: 2590546 - RNA, 19 nt, Artificial Sequence
  Description of Artificial Sequence: Synthetic oligonucleotide
acuaagggacaaauaaaac

SEQ ID NO: 2590547 - RNA, 19 nt, Artificial Sequence
  Description of Artificial Sequence: Synthetic oligonucleotide
auagagucuguucuugaug

SEQ ID NO: 2590548 - RNA, 19 nt, Artificial Sequence
  Description of Artificial Sequence: Synthetic oligonucleotide
uguggcaaaaccagcgaga

SEQ ID NO: 2590549 - RNA, 19 nt, Artificial Sequence
  Description of Artificial Sequence: Synthetic oligonucleotide
acuugggugauccuguacu

SEQ ID NO: 2590550 - RNA, 19 nt, Artificial Sequence
  Description of Artificial Sequence: Synthetic oligonucleotide
auaugagauaauuuauaau

SEQ ID NO: 2590551 - RNA, 19 nt, Artificial Sequence
  Description of Artificial Sequence: Synthetic oligonucleotide
ugaauaacaguugaauuuu

SEQ ID NO: 2590552 - RNA, 19 nt, Artificial Sequence
  Description of Artificial Sequence: Synthetic oligonucleotide
gagcccguaguacaguagg

SEQ ID NO: 2590553 - RNA, 19 nt, Artificial Sequence
  Description of Artificial Sequence: Synthetic oligonucleotide
auucuaccaacauuaacaa

SEQ ID NO: 2590554 - RNA, 19 nt, Artificial Sequence
  Description of Artificial Sequence: Synthetic oligonucleotide
caagguagacuuuaucuuc

SEQ ID NO: 2590555 - RNA, 19 nt, Artificial Sequence
  Description of Artificial Sequence: Synthetic oligonucleotide
aagaaacaaugacaucaca

SEQ ID NO: 2590556 - RNA, 19 nt, Artificial Sequence
  Description of Artificial Sequence: Synthetic oligonucleotide
cuugaugaagacaacacua

SEQ ID NO: 2590557 - RNA, 19 nt, Artificial Sequence
  Description of Artificial Sequence: Synthetic oligonucleotide
cuacuauaaacaucuagga

SEQ ID NO: 2590558 - RNA, 19 nt, Artificial Sequence
  Description of Artificial Sequence: Synthetic oligonucleotide
auuuauaaucuaaucguga

SEQ ID NO: 2590559 - RNA, 19 nt, Artificial Sequence
  Description of Artificial Sequence: Synthetic oligonucleotide
uuucaccuauaaauaugag

SEQ ID NO: 2590560 - RNA, 19 nt, Artificial Sequence
  Description of Artificial Sequence: Synthetic oligonucleotide
ucugccaaggugauguuau

SEQ ID NO: 2590561 - RNA, 19 nt, Artificial Sequence
  Description of Artificial Sequence: Synthetic oligonucleotide
accagcgagacacauuaag

SEQ ID NO: 2590562 - RNA, 19 nt, Artificial Sequence
  Description of Artificial Sequence: Synthetic oligonucleotide
gaaccaugguccaaaauac

SEQ ID NO: 2590563 - RNA, 19 nt, Artificial Sequence
  Description of Artificial Sequence: Synthetic oligonucleotide
acuagacagauguugccug

SEQ ID NO: 2590564 - RNA, 19 nt, Artificial Sequence
  Description of Artificial Sequence: Synthetic oligonucleotide
acucuaaccacugcugaac

SEQ ID NO: 2590565 - RNA, 19 nt, Artificial Sequence
  Description of Artificial Sequence: Synthetic oligonucleotide
agacacauuaagauauuuc

SEQ ID NO: 2590566 - RNA, 19 nt, Artificial Sequence
  Description of Artificial Sequence: Synthetic oligonucleotide
uuauaaucuaaucgugauu

SEQ ID NO: 2590567 - RNA, 19 nt, Artificial Sequence
  Description of Artificial Sequence: Synthetic oligonucleotide
augagauaauuuauaaucu

SEQ ID NO: 2590568 - RNA, 19 nt, Artificial Sequence
  Description of Artificial Sequence: Synthetic oligonucleotide
uguccguccacuuggguga

SEQ ID NO: 2590569 - RNA, 19 nt, Artificial Sequence
  Description of Artificial Sequence: Synthetic oligonucleotide
caacuauaaagcgauggag

SEQ ID NO: 2590570 - RNA, 19 nt, Artificial Sequence
  Description of Artificial Sequence: Synthetic oligonucleotide
cuguucuugaugaagacaa

SEQ ID NO: 2590571 - RNA, 19 nt, Artificial Sequence
  Description of Artificial Sequence: Synthetic oligonucleotide
aucgugauuugcuugaaua

SEQ ID NO: 2590572 - RNA, 19 nt, Artificial Sequence
  Description of Artificial Sequence: Synthetic oligonucleotide
uuuaaguuucugccacuga

SEQ ID NO: 2590573 - RNA, 19 nt, Artificial Sequence
  Description of Artificial Sequence: Synthetic oligonucleotide
uaguacaguaggauaucug

SEQ ID NO: 2590574 - RNA, 19 nt, Artificial Sequence
  Description of Artificial Sequence: Synthetic oligonucleotide
acacauuaagauauuucuc

SEQ ID NO: 2590575 - RNA, 19 nt, Artificial Sequence
  Description of Artificial Sequence: Synthetic oligonucleotide
agaaacaaugacaucacau

SEQ ID NO: 2590576 - RNA, 19 nt, Artificial Sequence
  Description of Artificial Sequence: Synthetic oligonucleotide
aacuucuagugggaguuag

SEQ ID NO: 2590577 - RNA, 19 nt, Artificial Sequence
  Description of Artificial Sequence: Synthetic oligonucleotide
aacugcaaaccuucaacua

SEQ ID NO: 2590578 - RNA, 19 nt, Artificial Sequence
  Description of Artificial Sequence: Synthetic oligonucleotide
uaauuuacauuagaaccau

SEQ ID NO: 2590579 - RNA, 19 nt, Artificial Sequence
  Description of Artificial Sequence: Synthetic oligonucleotide
auguggcaaaaccagcgag

SEQ ID NO: 2590580 - RNA, 19 nt, Artificial Sequence
  Description of Artificial Sequence: Synthetic oligonucleotide
accaacauuaacaaagaaa

SEQ ID NO: 2590581 - RNA, 19 nt, Artificial Sequence
  Description of Artificial Sequence: Synthetic oligonucleotide
ucgugauuugcuugaauaa

SEQ ID NO: 2590582 - RNA, 19 nt, Artificial Sequence
  Description of Artificial Sequence: Synthetic oligonucleotide
augacaucacauuaauuua

SEQ ID NO: 2590583 - RNA, 19 nt, Artificial Sequence
  Description of Artificial Sequence: Synthetic oligonucleotide
cauuuuacacuucuaaucu

SEQ ID NO: 2590584 - RNA, 19 nt, Artificial Sequence
  Description of Artificial Sequence: Synthetic oligonucleotide
cacauaaaagccagauaug

SEQ ID NO: 2590585 - RNA, 19 nt, Artificial Sequence
  Description of Artificial Sequence: Synthetic oligonucleotide
auaaucuaaucgugauuug

SEQ ID NO: 2590586 - RNA, 19 nt, Artificial Sequence
  Description of Artificial Sequence: Synthetic oligonucleotide
uccuguacucuaaccacug

SEQ ID NO: 2590587 - RNA, 19 nt, Artificial Sequence
  Description of Artificial Sequence: Synthetic oligonucleotide
ugcacugucaggucaacua

SEQ ID NO: 2590588 - RNA, 19 nt, Artificial Sequence
  Description of Artificial Sequence: Synthetic oligonucleotide
uuauauccugcaagguaga

SEQ ID NO: 2590589 - RNA, 19 nt, Artificial Sequence
  Description of Artificial Sequence: Synthetic oligonucleotide
agauaauuuauaaucuaau

SEQ ID NO: 2590590 - RNA, 19 nt, Artificial Sequence
  Description of Artificial Sequence: Synthetic oligonucleotide
aggauaucugccaagguga

SEQ ID NO: 2590591 - RNA, 19 nt, Artificial Sequence
  Description of Artificial Sequence: Synthetic oligonucleotide
caacacuagacagauguug

SEQ ID NO: 2590592 - RNA, 19 nt, Artificial Sequence
  Description of Artificial Sequence: Synthetic oligonucleotide
cuaaucgugauuugcuuga

SEQ ID NO: 2590593 - RNA, 19 nt, Artificial Sequence
  Description of Artificial Sequence: Synthetic oligonucleotide
ccaaggugauguuauaucc

SEQ ID NO: 2590594 - RNA, 19 nt, Artificial Sequence
  Description of Artificial Sequence: Synthetic oligonucleotide
ggaguuagcauagagucug

SEQ ID NO: 2590595 - RNA, 19 nt, Artificial Sequence
  Description of Artificial Sequence: Synthetic oligonucleotide
ggaguguccguccacuugg

SEQ ID NO: 2590596 - RNA, 19 nt, Artificial Sequence
  Description of Artificial Sequence: Synthetic oligonucleotide
aacacugaugacagggugu

SEQ ID NO: 2590597 - RNA, 19 nt, Artificial Sequence
  Description of Artificial Sequence: Synthetic oligonucleotide
uuacacuucuaaucuugcu

SEQ ID NO: 2590598 - RNA, 19 nt, Artificial Sequence
  Description of Artificial Sequence: Synthetic oligonucleotide
uucaacuaagggacaaaua

SEQ ID NO: 2590599 - RNA, 19 nt, Artificial Sequence
  Description of Artificial Sequence: Synthetic oligonucleotide
gaagacaacacuagacaga

SEQ ID NO: 2590600 - RNA, 19 nt, Artificial Sequence
  Description of Artificial Sequence: Synthetic oligonucleotide
ucuaaucuugcugcugccc

SEQ ID NO: 2590601 - RNA, 19 nt, Artificial Sequence
  Description of Artificial Sequence: Synthetic oligonucleotide
uaaucuugcugcugcccag

SEQ ID NO: 2590602 - RNA, 19 nt, Artificial Sequence
  Description of Artificial Sequence: Synthetic oligonucleotide
cagacuugaguuuacaugu

SEQ ID NO: 2590603 - RNA, 19 nt, Artificial Sequence
  Description of Artificial Sequence: Synthetic oligonucleotide
aagguagacuuuaucuuca

SEQ ID NO: 2590604 - RNA, 19 nt, Artificial Sequence
  Description of Artificial Sequence: Synthetic oligonucleotide
auuagaaccaugguccaaa

SEQ ID NO: 2590605 - RNA, 19 nt, Artificial Sequence
  Description of Artificial Sequence: Synthetic oligonucleotide
acaucuaggagaaaaugaa

SEQ ID NO: 2590606 - RNA, 19 nt, Artificial Sequence
  Description of Artificial Sequence: Synthetic oligonucleotide
uucagacuugaguuuacau

SEQ ID NO: 2590607 - RNA, 19 nt, Artificial Sequence
  Description of Artificial Sequence: Synthetic oligonucleotide
cuauaaagcgauggagccc

SEQ ID NO: 2590608 - RNA, 19 nt, Artificial Sequence
  Description of Artificial Sequence: Synthetic oligonucleotide
acugaugacaggguguacu

SEQ ID NO: 2590609 - RNA, 19 nt, Artificial Sequence
  Description of Artificial Sequence: Synthetic oligonucleotide
ucuaaccacugcugaacca

SEQ ID NO: 2590610 - RNA, 19 nt, Artificial Sequence
  Description of Artificial Sequence: Synthetic oligonucleotide
cucuaaccacugcugaacc

SEQ ID NO: 2590611 - RNA, 19 nt, Artificial Sequence
  Description of Artificial Sequence: Synthetic oligonucleotide
gaugucuggguaaugcuga

SEQ ID NO: 2590612 - RNA, 19 nt, Artificial Sequence
  Description of Artificial Sequence: Synthetic oligonucleotide
aucuaggagaaaaugaauu

SEQ ID NO: 2590613 - RNA, 19 nt, Artificial Sequence
  Description of Artificial Sequence: Synthetic oligonucleotide
cacauuaauuuacauuaga

SEQ ID NO: 2590614 - RNA, 19 nt, Artificial Sequence
  Description of Artificial Sequence: Synthetic oligonucleotide
aaucgugauuugcuugaau

SEQ ID NO: 2590615 - RNA, 19 nt, Artificial Sequence
  Description of Artificial Sequence: Synthetic oligonucleotide
ugcuugaauaacaguugaa

SEQ ID NO: 2590616 - RNA, 19 nt, Artificial Sequence
  Description of Artificial Sequence: Synthetic oligonucleotide
agccagauaugaaacacug

SEQ ID NO: 2590617 - RNA, 19 nt, Artificial Sequence
  Description of Artificial Sequence: Synthetic oligonucleotide
aauuuacauuagaaccaug

SEQ ID NO: 2590618 - RNA, 19 nt, Artificial Sequence
  Description of Artificial Sequence: Synthetic oligonucleotide
acugauaagcaaauuuuau

SEQ ID NO: 2590619 - RNA, 19 nt, Artificial Sequence
  Description of Artificial Sequence: Synthetic oligonucleotide
aaugcugaauguggcaaaa

SEQ ID NO: 2590620 - RNA, 19 nt, Artificial Sequence
  Description of Artificial Sequence: Synthetic oligonucleotide
uggaguguccguccacuug

SEQ ID NO: 2590621 - RNA, 19 nt, Artificial Sequence
  Description of Artificial Sequence: Synthetic oligonucleotide
aauacauuuuacacuucua

SEQ ID NO: 2590622 - RNA, 19 nt, Artificial Sequence
  Description of Artificial Sequence: Synthetic oligonucleotide
acauuagaaccauggucca

SEQ ID NO: 2590623 - RNA, 19 nt, Artificial Sequence
  Description of Artificial Sequence: Synthetic oligonucleotide
uucuaaucuugcugcugcc

SEQ ID NO: 2590624 - RNA, 19 nt, Artificial Sequence
  Description of Artificial Sequence: Synthetic oligonucleotide
guguccguccacuugggug

SEQ ID NO: 2590625 - RNA, 19 nt, Artificial Sequence
  Description of Artificial Sequence: Synthetic oligonucleotide
aaaauucuaccaacauuaa

SEQ ID NO: 2590626 - RNA, 19 nt, Artificial Sequence
  Description of Artificial Sequence: Synthetic oligonucleotide
gcaaaccuucaacuaaggg

SEQ ID NO: 2590627 - RNA, 19 nt, Artificial Sequence
  Description of Artificial Sequence: Synthetic oligonucleotide
aagcgauggagcccguagu

SEQ ID NO: 2590628 - RNA, 19 nt, Artificial Sequence
  Description of Artificial Sequence: Synthetic oligonucleotide
aggucaacuauaaagcgau

SEQ ID NO: 2590629 - RNA, 19 nt, Artificial Sequence
  Description of Artificial Sequence: Synthetic oligonucleotide
agcgagacacauuaagaua

SEQ ID NO: 2590630 - RNA, 19 nt, Artificial Sequence
  Description of Artificial Sequence: Synthetic oligonucleotide
gauggagcccguaguacag

SEQ ID NO: 2590631 - RNA, 19 nt, Artificial Sequence
  Description of Artificial Sequence: Synthetic oligonucleotide
gugauuugcuugaauaaca

SEQ ID NO: 2590632 - RNA, 19 nt, Artificial Sequence
  Description of Artificial Sequence: Synthetic oligonucleotide
auuuuacacuucuaaucuu

SEQ ID NO: 2590633 - RNA, 19 nt, Artificial Sequence
  Description of Artificial Sequence: Synthetic oligonucleotide
uaaugcugaauguggcaaa

SEQ ID NO: 2590634 - RNA, 19 nt, Artificial Sequence
  Description of Artificial Sequence: Synthetic oligonucleotide
acaucacauuaauuuacau

SEQ ID NO: 2590635 - RNA, 19 nt, Artificial Sequence
  Description of Artificial Sequence: Synthetic oligonucleotide
gugauccuguacucuaacc

SEQ ID NO: 2590636 - RNA, 19 nt, Artificial Sequence
  Description of Artificial Sequence: Synthetic oligonucleotide
aaccacugcugaaccaagg

SEQ ID NO: 2590637 - RNA, 19 nt, Artificial Sequence
  Description of Artificial Sequence: Synthetic oligonucleotide
agacuuuaucuucaagaua

SEQ ID NO: 2590638 - RNA, 19 nt, Artificial Sequence
  Description of Artificial Sequence: Synthetic oligonucleotide
cuggguaaugcugaaugug

SEQ ID NO: 2590639 - RNA, 19 nt, Artificial Sequence
  Description of Artificial Sequence: Synthetic oligonucleotide
uuuucugcacugucagguc

SEQ ID NO: 2590640 - RNA, 19 nt, Artificial Sequence
  Description of Artificial Sequence: Synthetic oligonucleotide
ugugggugucuucuuuacu

SEQ ID NO: 2590641 - RNA, 19 nt, Artificial Sequence
  Description of Artificial Sequence: Synthetic oligonucleotide
uacucuaaccacugcugaa

SEQ ID NO: 2590642 - RNA, 19 nt, Artificial Sequence
  Description of Artificial Sequence: Synthetic oligonucleotide
aucuaaucgugauuugcuu

SEQ ID NO: 2590643 - RNA, 19 nt, Artificial Sequence
  Description of Artificial Sequence: Synthetic oligonucleotide
aagccagauaugaaacacu

SEQ ID NO: 2590644 - RNA, 19 nt, Artificial Sequence
  Description of Artificial Sequence: Synthetic oligonucleotide
ggugauguuauauccugca

SEQ ID NO: 2590645 - RNA, 19 nt, Artificial Sequence
  Description of Artificial Sequence: Synthetic oligonucleotide
caggucaacuauaaagcga

SEQ ID NO: 2590646 - RNA, 19 nt, Artificial Sequence
  Description of Artificial Sequence: Synthetic oligonucleotide
acuucuagugggaguuagc

SEQ ID NO: 2590647 - RNA, 19 nt, Artificial Sequence
  Description of Artificial Sequence: Synthetic oligonucleotide
cuugaguuuacauguuaaa

SEQ ID NO: 2590648 - RNA, 19 nt, Artificial Sequence
  Description of Artificial Sequence: Synthetic oligonucleotide
uuacuggaguguccgucca

SEQ ID NO: 2590649 - RNA, 19 nt, Artificial Sequence
  Description of Artificial Sequence: Synthetic oligonucleotide
caacuaagggacaaauaaa

SEQ ID NO: 2590650 - RNA, 19 nt, Artificial Sequence
  Description of Artificial Sequence: Synthetic oligonucleotide
uucuaccaacauuaacaaa

SEQ ID NO: 2590651 - RNA, 19 nt, Artificial Sequence
  Description of Artificial Sequence: Synthetic oligonucleotide
auauccugcaagguagacu

SEQ ID NO: 2590652 - RNA, 19 nt, Artificial Sequence
  Description of Artificial Sequence: Synthetic oligonucleotide
agcauagagucuguucuug

SEQ ID NO: 2590653 - RNA, 19 nt, Artificial Sequence
  Description of Artificial Sequence: Synthetic oligonucleotide
cuuuacuggaguguccguc

SEQ ID NO: 2590654 - RNA, 19 nt, Artificial Sequence
  Description of Artificial Sequence: Synthetic oligonucleotide
uucuagugggaguuagcau

SEQ ID NO: 2590655 - RNA, 19 nt, Artificial Sequence
  Description of Artificial Sequence: Synthetic oligonucleotide
guacucuaaccacugcuga

SEQ ID NO: 2590656 - RNA, 19 nt, Artificial Sequence
  Description of Artificial Sequence: Synthetic oligonucleotide
cuugaauaacaguugaauu

SEQ ID NO: 2590657 - RNA, 19 nt, Artificial Sequence
  Description of Artificial Sequence: Synthetic oligonucleotide
uuagaaccaugguccaaaa

SEQ ID NO: 2590658 - RNA, 19 nt, Artificial Sequence
  Description of Artificial Sequence: Synthetic oligonucleotide
gauccuucagcagggugug

SEQ ID NO: 2590659 - RNA, 19 nt, Artificial Sequence
  Description of Artificial Sequence: Synthetic oligonucleotide
guaaugcugaauguggcaa

SEQ ID NO: 2590660 - RNA, 19 nt, Artificial Sequence
  Description of Artificial Sequence: Synthetic oligonucleotide
aucuucaagauaagaauua

SEQ ID NO: 2590661 - RNA, 19 nt, Artificial Sequence
  Description of Artificial Sequence: Synthetic oligonucleotide
cuucuagugggaguuagca

SEQ ID NO: 2590662 - RNA, 19 nt, Artificial Sequence
  Description of Artificial Sequence: Synthetic oligonucleotide
cuugggugauccuguacuc

SEQ ID NO: 2590663 - RNA, 19 nt, Artificial Sequence
  Description of Artificial Sequence: Synthetic oligonucleotide
gauuugcuugaauaacagu

SEQ ID NO: 2590664 - RNA, 19 nt, Artificial Sequence
  Description of Artificial Sequence: Synthetic oligonucleotide
uguugccugaugucugggu

SEQ ID NO: 2590665 - RNA, 19 nt, Artificial Sequence
  Description of Artificial Sequence: Synthetic oligonucleotide
uucugcacugucaggucaa

SEQ ID NO: 2590666 - RNA, 19 nt, Artificial Sequence
  Description of Artificial Sequence: Synthetic oligonucleotide
acuugaguuuacauguuaa

SEQ ID NO: 2590667 - RNA, 19 nt, Artificial Sequence
  Description of Artificial Sequence: Synthetic oligonucleotide
acuucuaaucuugcugcug

SEQ ID NO: 2590668 - RNA, 19 nt, Artificial Sequence
  Description of Artificial Sequence: Synthetic oligonucleotide
caguaggauaucugccaag

SEQ ID NO: 2590669 - RNA, 19 nt, Artificial Sequence
  Description of Artificial Sequence: Synthetic oligonucleotide
uauauccugcaagguagac

SEQ ID NO: 2590670 - RNA, 19 nt, Artificial Sequence
  Description of Artificial Sequence: Synthetic oligonucleotide
cauucagacuugaguuuac

SEQ ID NO: 2590671 - RNA, 19 nt, Artificial Sequence
  Description of Artificial Sequence: Synthetic oligonucleotide
gacuugaguuuacauguua

SEQ ID NO: 2590672 - RNA, 19 nt, Artificial Sequence
  Description of Artificial Sequence: Synthetic oligonucleotide
acauucagacuugaguuua

SEQ ID NO: 2590673 - RNA, 19 nt, Artificial Sequence
  Description of Artificial Sequence: Synthetic oligonucleotide
guggcaaaaccagcgagac

SEQ ID NO: 2590674 - RNA, 19 nt, Artificial Sequence
  Description of Artificial Sequence: Synthetic oligonucleotide
gaugacaggguguacuuuu

SEQ ID NO: 2590675 - RNA, 19 nt, Artificial Sequence
  Description of Artificial Sequence: Synthetic oligonucleotide
augcugaauguggcaaaac

SEQ ID NO: 2590676 - RNA, 19 nt, Artificial Sequence
  Description of Artificial Sequence: Synthetic oligonucleotide
ucuuuacuggaguguccgu

SEQ ID NO: 2590677 - RNA, 19 nt, Artificial Sequence
  Description of Artificial Sequence: Synthetic oligonucleotide
cugauaagcaaauuuuauu

SEQ ID NO: 2590678 - RNA, 19 nt, Artificial Sequence
  Description of Artificial Sequence: Synthetic oligonucleotide
auguuauauccugcaaggu

SEQ ID NO: 2590679 - RNA, 19 nt, Artificial Sequence
  Description of Artificial Sequence: Synthetic oligonucleotide
caucacauuaauuuacauu

SEQ ID NO: 2590680 - RNA, 19 nt, Artificial Sequence
  Description of Artificial Sequence: Synthetic oligonucleotide
ugccaaggugauguuauau

SEQ ID NO: 2590681 - RNA, 19 nt, Artificial Sequence
  Description of Artificial Sequence: Synthetic oligonucleotide
uggcaaaaccagcgagaca

SEQ ID NO: 2590682 - RNA, 19 nt, Artificial Sequence
  Description of Artificial Sequence: Synthetic oligonucleotide
uugggugauccuguacucu

SEQ ID NO: 2590683 - RNA, 19 nt, Artificial Sequence
  Description of Artificial Sequence: Synthetic oligonucleotide
gcugaauguggcaaaacca

SEQ ID NO: 2590684 - RNA, 19 nt, Artificial Sequence
  Description of Artificial Sequence: Synthetic oligonucleotide
aaaaccagcgagacacauu

SEQ ID NO: 2590685 - RNA, 19 nt, Artificial Sequence
  Description of Artificial Sequence: Synthetic oligonucleotide
acugucaggucaacuauaa

SEQ ID NO: 2590686 - RNA, 19 nt, Artificial Sequence
  Description of Artificial Sequence: Synthetic oligonucleotide
cacugcugaaccaaggccu

SEQ ID NO: 2590687 - RNA, 19 nt, Artificial Sequence
  Description of Artificial Sequence: Synthetic oligonucleotide
uccugcaagguagacuuua

SEQ ID NO: 2590688 - RNA, 19 nt, Artificial Sequence
  Description of Artificial Sequence: Synthetic oligonucleotide
auucagacuugaguuuaca

SEQ ID NO: 2590689 - RNA, 19 nt, Artificial Sequence
  Description of Artificial Sequence: Synthetic oligonucleotide
uucugccacugauaagcaa

SEQ ID NO: 2590690 - RNA, 19 nt, Artificial Sequence
  Description of Artificial Sequence: Synthetic oligonucleotide
uagcauagagucuguucuu

SEQ ID NO: 2590691 - RNA, 19 nt, Artificial Sequence
  Description of Artificial Sequence: Synthetic oligonucleotide
agcgauggagcccguagua

SEQ ID NO: 2590692 - RNA, 19 nt, Artificial Sequence
  Description of Artificial Sequence: Synthetic oligonucleotide
guugccugaugucugggua

SEQ ID NO: 2590693 - RNA, 19 nt, Artificial Sequence
  Description of Artificial Sequence: Synthetic oligonucleotide
cugcaagguagacuuuauc

SEQ ID NO: 2590694 - RNA, 19 nt, Artificial Sequence
  Description of Artificial Sequence: Synthetic oligonucleotide
gccaaggugauguuauauc

SEQ ID NO: 2590695 - RNA, 19 nt, Artificial Sequence
  Description of Artificial Sequence: Synthetic oligonucleotide
gggacaaauaaaacauuca

SEQ ID NO: 2590696 - RNA, 19 nt, Artificial Sequence
  Description of Artificial Sequence: Synthetic oligonucleotide
gugugggugucuucuuuac

SEQ ID NO: 2590697 - RNA, 19 nt, Artificial Sequence
  Description of Artificial Sequence: Synthetic oligonucleotide
gugauguuauauccugcaa

SEQ ID NO: 2590698 - RNA, 19 nt, Artificial Sequence
  Description of Artificial Sequence: Synthetic oligonucleotide
gauaagaauuaagauccuu

SEQ ID NO: 2590699 - RNA, 19 nt, Artificial Sequence
  Description of Artificial Sequence: Synthetic oligonucleotide
agauaagaauuaagauccu

SEQ ID NO: 2590700 - RNA, 19 nt, Artificial Sequence
  Description of Artificial Sequence: Synthetic oligonucleotide
caaggugauguuauauccu

SEQ ID NO: 2590701 - RNA, 19 nt, Artificial Sequence
  Description of Artificial Sequence: Synthetic oligonucleotide
uacuggaguguccguccac

SEQ ID NO: 2590702 - RNA, 19 nt, Artificial Sequence
  Description of Artificial Sequence: Synthetic oligonucleotide
caggaacuucuagugggag

SEQ ID NO: 2590703 - RNA, 19 nt, Artificial Sequence
  Description of Artificial Sequence: Synthetic oligonucleotide
uggagcccguaguacagua

SEQ ID NO: 2590704 - RNA, 19 nt, Artificial Sequence
  Description of Artificial Sequence: Synthetic oligonucleotide
ccacugcugaaccaaggcc

SEQ ID NO: 2590705 - RNA, 19 nt, Artificial Sequence
  Description of Artificial Sequence: Synthetic oligonucleotide
cuguacucuaaccacugcu

SEQ ID NO: 2590706 - RNA, 19 nt, Artificial Sequence
  Description of Artificial Sequence: Synthetic oligonucleotide
auguugccugaugucuggg

SEQ ID NO: 2590707 - RNA, 19 nt, Artificial Sequence
  Description of Artificial Sequence: Synthetic oligonucleotide
ggguaaugcugaauguggc

SEQ ID NO: 2590708 - RNA, 19 nt, Artificial Sequence
  Description of Artificial Sequence: Synthetic oligonucleotide
acacugaugacagggugua

SEQ ID NO: 2590709 - RNA, 19 nt, Artificial Sequence
  Description of Artificial Sequence: Synthetic oligonucleotide
agagucuguucuugaugaa

SEQ ID NO: 2590710 - RNA, 19 nt, Artificial Sequence
  Description of Artificial Sequence: Synthetic oligonucleotide
ggugauccuguacucuaac

SEQ ID NO: 2590711 - RNA, 19 nt, Artificial Sequence
  Description of Artificial Sequence: Synthetic oligonucleotide
gaguguccguccacuuggg

SEQ ID NO: 2590712 - RNA, 19 nt, Artificial Sequence
  Description of Artificial Sequence: Synthetic oligonucleotide
uaaucgugauuugcuugaa

SEQ ID NO: 2590713 - RNA, 19 nt, Artificial Sequence
  Description of Artificial Sequence: Synthetic oligonucleotide
cagcgagacacauuaagau

SEQ ID NO: 2590714 - RNA, 19 nt, Artificial Sequence
  Description of Artificial Sequence: Synthetic oligonucleotide
aaccuucaacuaagggaca

SEQ ID NO: 2590715 - RNA, 19 nt, Artificial Sequence
  Description of Artificial Sequence: Synthetic oligonucleotide
ccagauaugaaacacugau

SEQ ID NO: 2590716 - RNA, 19 nt, Artificial Sequence
  Description of Artificial Sequence: Synthetic oligonucleotide
cacuugggugauccuguac

SEQ ID NO: 2590717 - RNA, 19 nt, Artificial Sequence
  Description of Artificial Sequence: Synthetic oligonucleotide
aguguccguccacuugggu

SEQ ID NO: 2590718 - RNA, 19 nt, Artificial Sequence
  Description of Artificial Sequence: Synthetic oligonucleotide
uagacagauguugccugau

SEQ ID NO: 2590719 - RNA, 19 nt, Artificial Sequence
  Description of Artificial Sequence: Synthetic oligonucleotide
aucuugcugcugcccagca

SEQ ID NO: 2590720 - RNA, 19 nt, Artificial Sequence
  Description of Artificial Sequence: Synthetic oligonucleotide
caccuauaaauaugagaua

SEQ ID NO: 2590721 - RNA, 19 nt, Artificial Sequence
  Description of Artificial Sequence: Synthetic oligonucleotide
cauuaagauauuucuccuu

SEQ ID NO: 2590722 - RNA, 19 nt, Artificial Sequence
  Description of Artificial Sequence: Synthetic oligonucleotide
ugcugaaccaaggccuuuu

SEQ ID NO: 2590723 - RNA, 19 nt, Artificial Sequence
  Description of Artificial Sequence: Synthetic oligonucleotide
ugaugacaggguguacuuu

SEQ ID NO: 2590724 - RNA, 19 nt, Artificial Sequence
  Description of Artificial Sequence: Synthetic oligonucleotide
cuaggagaaaaugaauuuu

SEQ ID NO: 2590725 - RNA, 19 nt, Artificial Sequence
  Description of Artificial Sequence: Synthetic oligonucleotide
ccagcgagacacauuaaga

SEQ ID NO: 2590726 - RNA, 19 nt, Artificial Sequence
  Description of Artificial Sequence: Synthetic oligonucleotide
cgugauuugcuugaauaac

SEQ ID NO: 2590727 - RNA, 19 nt, Artificial Sequence
  Description of Artificial Sequence: Synthetic oligonucleotide
aaacuacuauaaacaucua

SEQ ID NO: 2590728 - RNA, 19 nt, Artificial Sequence
  Description of Artificial Sequence: Synthetic oligonucleotide
ccuuuucugcacugucagg

SEQ ID NO: 2590729 - RNA, 19 nt, Artificial Sequence
  Description of Artificial Sequence: Synthetic oligonucleotide
guaguacaguaggauaucu

SEQ ID NO: 2590730 - RNA, 19 nt, Artificial Sequence
  Description of Artificial Sequence: Synthetic oligonucleotide
gcuugaauaacaguugaau

SEQ ID NO: 2590731 - RNA, 19 nt, Artificial Sequence
  Description of Artificial Sequence: Synthetic oligonucleotide
ugucuggguaaugcugaau

SEQ ID NO: 2590732 - RNA, 19 nt, Artificial Sequence
  Description of Artificial Sequence: Synthetic oligonucleotide
cagauguugccugaugucu

SEQ ID NO: 2590733 - RNA, 19 nt, Artificial Sequence
  Description of Artificial Sequence: Synthetic oligonucleotide
cauagagucuguucuugau

SEQ ID NO: 2590734 - RNA, 19 nt, Artificial Sequence
  Description of Artificial Sequence: Synthetic oligonucleotide
gugggaguuagcauagagu

SEQ ID NO: 2590735 - RNA, 19 nt, Artificial Sequence
  Description of Artificial Sequence: Synthetic oligonucleotide
gccacugauaagcaaauuu

SEQ ID NO: 2590736 - RNA, 19 nt, Artificial Sequence
  Description of Artificial Sequence: Synthetic oligonucleotide
guaggauaucugccaaggu

SEQ ID NO: 2590737 - RNA, 19 nt, Artificial Sequence
  Description of Artificial Sequence: Synthetic oligonucleotide
cuucaacuaagggacaaau

SEQ ID NO: 2590738 - RNA, 19 nt, Artificial Sequence
  Description of Artificial Sequence: Synthetic oligonucleotide
ugccugaugucuggguaau

SEQ ID NO: 2590739 - RNA, 19 nt, Artificial Sequence
  Description of Artificial Sequence: Synthetic oligonucleotide
gcaagguagacuuuaucuu

SEQ ID NO: 2590740 - RNA, 19 nt, Artificial Sequence
  Description of Artificial Sequence: Synthetic oligonucleotide
cacugucaggucaacuaua

SEQ ID NO: 2590741 - RNA, 19 nt, Artificial Sequence
  Description of Artificial Sequence: Synthetic oligonucleotide
uaaagcgauggagcccgua

SEQ ID NO: 2590742 - RNA, 19 nt, Artificial Sequence
  Description of Artificial Sequence: Synthetic oligonucleotide
gagacacauuaagauauuu

SEQ ID NO: 2590743 - RNA, 19 nt, Artificial Sequence
  Description of Artificial Sequence: Synthetic oligonucleotide
acaacacuagacagauguu

SEQ ID NO: 2590744 - RNA, 19 nt, Artificial Sequence
  Description of Artificial Sequence: Synthetic oligonucleotide
cacuagacagauguugccu

SEQ ID NO: 2590745 - RNA, 19 nt, Artificial Sequence
  Description of Artificial Sequence: Synthetic oligonucleotide
ccuguacucuaaccacugc

SEQ ID NO: 2590746 - RNA, 19 nt, Artificial Sequence
  Description of Artificial Sequence: Synthetic oligonucleotide
ggaacuucuagugggaguu

SEQ ID NO: 2590747 - RNA, 19 nt, Artificial Sequence
  Description of Artificial Sequence: Synthetic oligonucleotide
aucugccaaggugauguua

SEQ ID NO: 2590748 - RNA, 19 nt, Artificial Sequence
  Description of Artificial Sequence: Synthetic oligonucleotide
ccguccacuugggugaucc

SEQ ID NO: 2590749 - RNA, 19 nt, Artificial Sequence
  Description of Artificial Sequence: Synthetic oligonucleotide
acugcugaaccaaggccuu

SEQ ID NO: 2590750 - RNA, 19 nt, Artificial Sequence
  Description of Artificial Sequence: Synthetic oligonucleotide
cauuagaaccaugguccaa

SEQ ID NO: 2590751 - RNA, 19 nt, Artificial Sequence
  Description of Artificial Sequence: Synthetic oligonucleotide
agcccguaguacaguagga

SEQ ID NO: 2590752 - RNA, 19 nt, Artificial Sequence
  Description of Artificial Sequence: Synthetic oligonucleotide
agacuugaguuuacauguu

SEQ ID NO: 2590753 - RNA, 19 nt, Artificial Sequence
  Description of Artificial Sequence: Synthetic oligonucleotide
agacaacacuagacagaug

SEQ ID NO: 2590754 - RNA, 19 nt, Artificial Sequence
  Description of Artificial Sequence: Synthetic oligonucleotide
auggagcccguaguacagu

SEQ ID NO: 2590755 - RNA, 19 nt, Artificial Sequence
  Description of Artificial Sequence: Synthetic oligonucleotide
ggagcccguaguacaguag

SEQ ID NO: 2590756 - RNA, 19 nt, Artificial Sequence
  Description of Artificial Sequence: Synthetic oligonucleotide
caaugacaucacauuaauu

SEQ ID NO: 2590757 - RNA, 19 nt, Artificial Sequence
  Description of Artificial Sequence: Synthetic oligonucleotide
ugccacugauaagcaaauu

SEQ ID NO: 2590758 - RNA, 19 nt, Artificial Sequence
  Description of Artificial Sequence: Synthetic oligonucleotide
ggucaacuauaaagcgaug

SEQ ID NO: 2590759 - RNA, 19 nt, Artificial Sequence
  Description of Artificial Sequence: Synthetic oligonucleotide
cugaugacaggguguacuu

SEQ ID NO: 2590760 - RNA, 19 nt, Artificial Sequence
  Description of Artificial Sequence: Synthetic oligonucleotide
aaccagcgagacacauuaa

SEQ ID NO: 2590761 - RNA, 19 nt, Artificial Sequence
  Description of Artificial Sequence: Synthetic oligonucleotide
cacuucuaaucuugcugcu

SEQ ID NO: 2590762 - RNA, 19 nt, Artificial Sequence
  Description of Artificial Sequence: Synthetic oligonucleotide
gaacuucuagugggaguua

SEQ ID NO: 2590763 - RNA, 19 nt, Artificial Sequence
  Description of Artificial Sequence: Synthetic oligonucleotide
gcccagcaggaacuucuag

SEQ ID NO: 2590764 - RNA, 19 nt, Artificial Sequence
  Description of Artificial Sequence: Synthetic oligonucleotide
cacugaugacaggguguac

SEQ ID NO: 2590765 - RNA, 19 nt, Artificial Sequence
  Description of Artificial Sequence: Synthetic oligonucleotide
ccguaguacaguaggauau

SEQ ID NO: 2590766 - RNA, 19 nt, Artificial Sequence
  Description of Artificial Sequence: Synthetic oligonucleotide
cugccacugauaagcaaau

SEQ ID NO: 2590767 - RNA, 19 nt, Artificial Sequence
  Description of Artificial Sequence: Synthetic oligonucleotide
agcagggugugggugucuu

SEQ ID NO: 2590768 - RNA, 19 nt, Artificial Sequence
  Description of Artificial Sequence: Synthetic oligonucleotide
gccagauaugaaacacuga

SEQ ID NO: 2590769 - RNA, 19 nt, Artificial Sequence
  Description of Artificial Sequence: Synthetic oligonucleotide
cccguaguacaguaggaua

SEQ ID NO: 2590770 - RNA, 19 nt, Artificial Sequence
  Description of Artificial Sequence: Synthetic oligonucleotide
cagggugugggugucuucu

SEQ ID NO: 2590771 - RNA, 19 nt, Artificial Sequence
  Description of Artificial Sequence: Synthetic oligonucleotide
gcgauggagcccguaguac

SEQ ID NO: 2590772 - RNA, 19 nt, Artificial Sequence
  Description of Artificial Sequence: Synthetic oligonucleotide
cugcugcccagcaggaacu

SEQ ID NO: 2590773 - RNA, 19 nt, Artificial Sequence
  Description of Artificial Sequence: Synthetic oligonucleotide
cgauggagcccguaguaca

SEQ ID NO: 2590774 - RNA, 19 nt, Artificial Sequence
  Description of Artificial Sequence: Synthetic oligonucleotide
cguaguacaguaggauauc

SEQ ID NO: 2590775 - RNA, 19 nt, Artificial Sequence
  Description of Artificial Sequence: Synthetic oligonucleotide
gaguuagcauagagucugu

SEQ ID NO: 2590776 - RNA, 19 nt, Artificial Sequence
  Description of Artificial Sequence: Synthetic oligonucleotide
gcacugucaggucaacuau

SEQ ID NO: 2590777 - RNA, 19 nt, Artificial Sequence
  Description of Artificial Sequence: Synthetic oligonucleotide
auaaagcgauggagcccgu

SEQ ID NO: 2590778 - RNA, 19 nt, Artificial Sequence
  Description of Artificial Sequence: Synthetic oligonucleotide
gggaguuagcauagagucu

SEQ ID NO: 2590779 - RNA, 19 nt, Artificial Sequence
  Description of Artificial Sequence: Synthetic oligonucleotide
cugccaaggugauguuaua

SEQ ID NO: 2590780 - RNA, 19 nt, Artificial Sequence
  Description of Artificial Sequence: Synthetic oligonucleotide
gcaaaaccagcgagacaca

SEQ ID NO: 2590781 - RNA, 19 nt, Artificial Sequence
  Description of Artificial Sequence: Synthetic oligonucleotide
gggugauccuguacucuaa

SEQ ID NO: 2590782 - RNA, 19 nt, Artificial Sequence
  Description of Artificial Sequence: Synthetic oligonucleotide
ggauaucugccaaggugau

SEQ ID NO: 2590783 - RNA, 19 nt, Artificial Sequence
  Description of Artificial Sequence: Synthetic oligonucleotide
ccuucaacuaagggacaaa

SEQ ID NO: 2590784 - RNA, 19 nt, Artificial Sequence
  Description of Artificial Sequence: Synthetic oligonucleotide
gccugaugucuggguaaug

SEQ ID NO: 2590785 - RNA, 19 nt, Artificial Sequence
  Description of Artificial Sequence: Synthetic oligonucleotide
auccugcaagguagacuuu

SEQ ID NO: 2590786 - RNA, 19 nt, Artificial Sequence
  Description of Artificial Sequence: Synthetic oligonucleotide
cuggaguguccguccacuu

SEQ ID NO: 2590787 - RNA, 19 nt, Artificial Sequence
  Description of Artificial Sequence: Synthetic oligonucleotide
cugcacugucaggucaacu

SEQ ID NO: 2590788 - RNA, 19 nt, Artificial Sequence
  Description of Artificial Sequence: Synthetic oligonucleotide
gcccguaguacaguaggau

SEQ ID NO: 2590789 - RNA, 19 nt, Artificial Sequence
  Description of Artificial Sequence: Synthetic oligonucleotide
ccugcaagguagacuuuau

SEQ ID NO: 2590790 - RNA, 19 nt, Artificial Sequence
  Description of Artificial Sequence: Synthetic oligonucleotide
cgagacacauuaagauauu

SEQ ID NO: 2590791 - RNA, 19 nt, Artificial Sequence
  Description of Artificial Sequence: Synthetic oligonucleotide
cugcugaaccaaggccuuu

SEQ ID NO: 2590792 - RNA, 19 nt, Artificial Sequence
  Description of Artificial Sequence: Synthetic oligonucleotide
guccguccacuugggugau

SEQ ID NO: 2590793 - RNA, 19 nt, Artificial Sequence
  Description of Artificial Sequence: Synthetic oligonucleotide
cagcagggugugggugucu

SEQ ID NO: 2590794 - RNA, 19 nt, Artificial Sequence
  Description of Artificial Sequence: Synthetic oligonucleotide
uauugaaacauuaauaagu

SEQ ID NO: 2590795 - RNA, 19 nt, Artificial Sequence
  Description of Artificial Sequence: Synthetic oligonucleotide
aaguuaauauuacuuaagg

SEQ ID NO: 2590796 - RNA, 19 nt, Artificial Sequence
  Description of Artificial Sequence: Synthetic oligonucleotide
ucucucauaacauuuaggg

SEQ ID NO: 2590797 - RNA, 19 nt, Artificial Sequence
  Description of Artificial Sequence: Synthetic oligonucleotide
aauaauauuuuaaacaaug

SEQ ID NO: 2590798 - RNA, 19 nt, Artificial Sequence
  Description of Artificial Sequence: Synthetic oligonucleotide
aaaacaaugaaaccacguc

SEQ ID NO: 2590799 - RNA, 19 nt, Artificial Sequence
  Description of Artificial Sequence: Synthetic oligonucleotide
uaauauuuuaaacaaugcc

SEQ ID NO: 2590800 - RNA, 19 nt, Artificial Sequence
  Description of Artificial Sequence: Synthetic oligonucleotide
ucucauaacauuuagggug

SEQ ID NO: 2590801 - RNA, 19 nt, Artificial Sequence
  Description of Artificial Sequence: Synthetic oligonucleotide
aguuaauauuacuuaaggc

SEQ ID NO: 2590802 - RNA, 19 nt, Artificial Sequence
  Description of Artificial Sequence: Synthetic oligonucleotide
guuaauauuacuuaaggca

SEQ ID NO: 2590803 - RNA, 19 nt, Artificial Sequence
  Description of Artificial Sequence: Synthetic oligonucleotide
aaagucaucucucauaaca

SEQ ID NO: 2590804 - RNA, 19 nt, Artificial Sequence
  Description of Artificial Sequence: Synthetic oligonucleotide
aaaaucacagcuucuuugg

SEQ ID NO: 2590805 - RNA, 19 nt, Artificial Sequence
  Description of Artificial Sequence: Synthetic oligonucleotide
acauuaauaaguuaaauaa

SEQ ID NO: 2590806 - RNA, 19 nt, Artificial Sequence
  Description of Artificial Sequence: Synthetic oligonucleotide
auaauaauauuuuaaacaa

SEQ ID NO: 2590807 - RNA, 19 nt, Artificial Sequence
  Description of Artificial Sequence: Synthetic oligonucleotide
uuuagcuuggcucuggucc

SEQ ID NO: 2590808 - RNA, 19 nt, Artificial Sequence
  Description of Artificial Sequence: Synthetic oligonucleotide
cauaauaauauuuuaaaca

SEQ ID NO: 2590809 - RNA, 19 nt, Artificial Sequence
  Description of Artificial Sequence: Synthetic oligonucleotide
aguuaaauaaaguuaauau

SEQ ID NO: 2590810 - RNA, 19 nt, Artificial Sequence
  Description of Artificial Sequence: Synthetic oligonucleotide
uuggugaugaaaaucacag

SEQ ID NO: 2590811 - RNA, 19 nt, Artificial Sequence
  Description of Artificial Sequence: Synthetic oligonucleotide
uaaggcaucacauuccagg

SEQ ID NO: 2590812 - RNA, 19 nt, Artificial Sequence
  Description of Artificial Sequence: Synthetic oligonucleotide
ugggaucucaaacacaacg

SEQ ID NO: 2590813 - RNA, 19 nt, Artificial Sequence
  Description of Artificial Sequence: Synthetic oligonucleotide
uuaauauuacuuaaggcau

SEQ ID NO: 2590814 - RNA, 19 nt, Artificial Sequence
  Description of Artificial Sequence: Synthetic oligonucleotide
gaaauccaaguauacaggg

SEQ ID NO: 2590815 - RNA, 19 nt, Artificial Sequence
  Description of Artificial Sequence: Synthetic oligonucleotide
uaauaaguuaaauaaaguu

SEQ ID NO: 2590816 - RNA, 19 nt, Artificial Sequence
  Description of Artificial Sequence: Synthetic oligonucleotide
uuaauaaguuaaauaaagu

SEQ ID NO: 2590817 - RNA, 19 nt, Artificial Sequence
  Description of Artificial Sequence: Synthetic oligonucleotide
agagggaaaacaaugaaac

SEQ ID NO: 2590818 - RNA, 19 nt, Artificial Sequence
  Description of Artificial Sequence: Synthetic oligonucleotide
acauuuaggguggagaacc

SEQ ID NO: 2590819 - RNA, 19 nt, Artificial Sequence
  Description of Artificial Sequence: Synthetic oligonucleotide
ucaaguuagcauucaaagg

SEQ ID NO: 2590820 - RNA, 19 nt, Artificial Sequence
  Description of Artificial Sequence: Synthetic oligonucleotide
uuuuauacacaguugcagc

SEQ ID NO: 2590821 - RNA, 19 nt, Artificial Sequence
  Description of Artificial Sequence: Synthetic oligonucleotide
aaugaaaccacgucaugca

SEQ ID NO: 2590822 - RNA, 19 nt, Artificial Sequence
  Description of Artificial Sequence: Synthetic oligonucleotide
aauccaaguauacagggaa

SEQ ID NO: 2590823 - RNA, 19 nt, Artificial Sequence
  Description of Artificial Sequence: Synthetic oligonucleotide
gucaaguuagcauucaaag

SEQ ID NO: 2590824 - RNA, 19 nt, Artificial Sequence
  Description of Artificial Sequence: Synthetic oligonucleotide
uauuacuuaaggcaucaca

SEQ ID NO: 2590825 - RNA, 19 nt, Artificial Sequence
  Description of Artificial Sequence: Synthetic oligonucleotide
auacuggucacucuuacag

SEQ ID NO: 2590826 - RNA, 19 nt, Artificial Sequence
  Description of Artificial Sequence: Synthetic oligonucleotide
auauugaaacauuaauaag

SEQ ID NO: 2590827 - RNA, 19 nt, Artificial Sequence
  Description of Artificial Sequence: Synthetic oligonucleotide
uuaaacaaugccuugggau

SEQ ID NO: 2590828 - RNA, 19 nt, Artificial Sequence
  Description of Artificial Sequence: Synthetic oligonucleotide
uccauaauaauauuuuaaa

SEQ ID NO: 2590829 - RNA, 19 nt, Artificial Sequence
  Description of Artificial Sequence: Synthetic oligonucleotide
ucugggauccucuuggcgg

SEQ ID NO: 2590830 - RNA, 19 nt, Artificial Sequence
  Description of Artificial Sequence: Synthetic oligonucleotide
aaaguuaauauuacuuaag

SEQ ID NO: 2590831 - RNA, 19 nt, Artificial Sequence
  Description of Artificial Sequence: Synthetic oligonucleotide
aacagcgucuggcugggcc

SEQ ID NO: 2590832 - RNA, 19 nt, Artificial Sequence
  Description of Artificial Sequence: Synthetic oligonucleotide
acauagaugcuacaggcag

SEQ ID NO: 2590833 - RNA, 19 nt, Artificial Sequence
  Description of Artificial Sequence: Synthetic oligonucleotide
aaugaguagcagcagguga

SEQ ID NO: 2590834 - RNA, 19 nt, Artificial Sequence
  Description of Artificial Sequence: Synthetic oligonucleotide
auuuuaaacaaugccuugg

SEQ ID NO: 2590835 - RNA, 19 nt, Artificial Sequence
  Description of Artificial Sequence: Synthetic oligonucleotide
uucucugggauccucuugg

SEQ ID NO: 2590836 - RNA, 19 nt, Artificial Sequence
  Description of Artificial Sequence: Synthetic oligonucleotide
guaaaugaguagcagcagg

SEQ ID NO: 2590837 - RNA, 19 nt, Artificial Sequence
  Description of Artificial Sequence: Synthetic oligonucleotide
ucugauuuagcuuggcucu

SEQ ID NO: 2590838 - RNA, 19 nt, Artificial Sequence
  Description of Artificial Sequence: Synthetic oligonucleotide
uaugucuggacccaguccu

SEQ ID NO: 2590839 - RNA, 19 nt, Artificial Sequence
  Description of Artificial Sequence: Synthetic oligonucleotide
ucacagagggaaaacaaug

SEQ ID NO: 2590840 - RNA, 19 nt, Artificial Sequence
  Description of Artificial Sequence: Synthetic oligonucleotide
ucaugcaucuaagaaaucc

SEQ ID NO: 2590841 - RNA, 19 nt, Artificial Sequence
  Description of Artificial Sequence: Synthetic oligonucleotide
uuaggguggagaaccaggg

SEQ ID NO: 2590842 - RNA, 19 nt, Artificial Sequence
  Description of Artificial Sequence: Synthetic oligonucleotide
acagaucucucucuugagc

SEQ ID NO: 2590843 - RNA, 19 nt, Artificial Sequence
  Description of Artificial Sequence: Synthetic oligonucleotide
uuuguguaugucuggaccc

SEQ ID NO: 2590844 - RNA, 19 nt, Artificial Sequence
  Description of Artificial Sequence: Synthetic oligonucleotide
aaccaggguucacagaggg

SEQ ID NO: 2590845 - RNA, 19 nt, Artificial Sequence
  Description of Artificial Sequence: Synthetic oligonucleotide
agaugcuacaggcagcaac

SEQ ID NO: 2590846 - RNA, 19 nt, Artificial Sequence
  Description of Artificial Sequence: Synthetic oligonucleotide
cucauaacauuuagggugg

SEQ ID NO: 2590847 - RNA, 19 nt, Artificial Sequence
  Description of Artificial Sequence: Synthetic oligonucleotide
auaaguuaaauaaaguuaa

SEQ ID NO: 2590848 - RNA, 19 nt, Artificial Sequence
  Description of Artificial Sequence: Synthetic oligonucleotide
guuaacagcgucuggcugg

SEQ ID NO: 2590849 - RNA, 19 nt, Artificial Sequence
  Description of Artificial Sequence: Synthetic oligonucleotide
uuggggucagcacagaucu

SEQ ID NO: 2590850 - RNA, 19 nt, Artificial Sequence
  Description of Artificial Sequence: Synthetic oligonucleotide
uaaaugaguagcagcaggu

SEQ ID NO: 2590851 - RNA, 19 nt, Artificial Sequence
  Description of Artificial Sequence: Synthetic oligonucleotide
augcauuaacugcagacuc

SEQ ID NO: 2590852 - RNA, 19 nt, Artificial Sequence
  Description of Artificial Sequence: Synthetic oligonucleotide
uauuuuaaacaaugccuug

SEQ ID NO: 2590853 - RNA, 19 nt, Artificial Sequence
  Description of Artificial Sequence: Synthetic oligonucleotide
agggaaaacaaugaaacca

SEQ ID NO: 2590854 - RNA, 19 nt, Artificial Sequence
  Description of Artificial Sequence: Synthetic oligonucleotide
aaucacagcuucuuuggga

SEQ ID NO: 2590855 - RNA, 19 nt, Artificial Sequence
  Description of Artificial Sequence: Synthetic oligonucleotide
uguuuuauacacaguugca

SEQ ID NO: 2590856 - RNA, 19 nt, Artificial Sequence
  Description of Artificial Sequence: Synthetic oligonucleotide
uucugauuuagcuuggcuc

SEQ ID NO: 2590857 - RNA, 19 nt, Artificial Sequence
  Description of Artificial Sequence: Synthetic oligonucleotide
uucggagagaauaggcagg

SEQ ID NO: 2590858 - RNA, 19 nt, Artificial Sequence
  Description of Artificial Sequence: Synthetic oligonucleotide
ucucuuguagcucuccagc

SEQ ID NO: 2590859 - RNA, 19 nt, Artificial Sequence
  Description of Artificial Sequence: Synthetic oligonucleotide
uacagaaguucucaagucu

SEQ ID NO: 2590860 - RNA, 19 nt, Artificial Sequence
  Description of Artificial Sequence: Synthetic oligonucleotide
uccaaguauacagggaagg

SEQ ID NO: 2590861 - RNA, 19 nt, Artificial Sequence
  Description of Artificial Sequence: Synthetic oligonucleotide
uaauaauauuuuaaacaau

SEQ ID NO: 2590862 - RNA, 19 nt, Artificial Sequence
  Description of Artificial Sequence: Synthetic oligonucleotide
uaguggaugcauuaacugc

SEQ ID NO: 2590863 - RNA, 19 nt, Artificial Sequence
  Description of Artificial Sequence: Synthetic oligonucleotide
augccuugggaucucaaac

SEQ ID NO: 2590864 - RNA, 19 nt, Artificial Sequence
  Description of Artificial Sequence: Synthetic oligonucleotide
cuaagaaauccaaguauac

SEQ ID NO: 2590865 - RNA, 19 nt, Artificial Sequence
  Description of Artificial Sequence: Synthetic oligonucleotide
cucaucuuuacaaaaguca

SEQ ID NO: 2590866 - RNA, 19 nt, Artificial Sequence
  Description of Artificial Sequence: Synthetic oligonucleotide
aaguauacagggaagggga

SEQ ID NO: 2590867 - RNA, 19 nt, Artificial Sequence
  Description of Artificial Sequence: Synthetic oligonucleotide
uuuaaacaaugccuuggga

SEQ ID NO: 2590868 - RNA, 19 nt, Artificial Sequence
  Description of Artificial Sequence: Synthetic oligonucleotide
aacauuuaggguggagaac

SEQ ID NO: 2590869 - RNA, 19 nt, Artificial Sequence
  Description of Artificial Sequence: Synthetic oligonucleotide
cuucggagagaauaggcag

SEQ ID NO: 2590870 - RNA, 19 nt, Artificial Sequence
  Description of Artificial Sequence: Synthetic oligonucleotide
acuuaaggcaucacauucc

SEQ ID NO: 2590871 - RNA, 19 nt, Artificial Sequence
  Description of Artificial Sequence: Synthetic oligonucleotide
uaacauuuaggguggagaa

SEQ ID NO: 2590872 - RNA, 19 nt, Artificial Sequence
  Description of Artificial Sequence: Synthetic oligonucleotide
cacuaguucacugucauac

SEQ ID NO: 2590873 - RNA, 19 nt, Artificial Sequence
  Description of Artificial Sequence: Synthetic oligonucleotide
aaacauuaauaaguuaaau

SEQ ID NO: 2590874 - RNA, 19 nt, Artificial Sequence
  Description of Artificial Sequence: Synthetic oligonucleotide
caaugaaaccacgucaugc

SEQ ID NO: 2590875 - RNA, 19 nt, Artificial Sequence
  Description of Artificial Sequence: Synthetic oligonucleotide
uuacaaaagucaucucuca

SEQ ID NO: 2590876 - RNA, 19 nt, Artificial Sequence
  Description of Artificial Sequence: Synthetic oligonucleotide
gaguagcaggcacagaagc

SEQ ID NO: 2590877 - RNA, 19 nt, Artificial Sequence
  Description of Artificial Sequence: Synthetic oligonucleotide
gacucaugggucaaguuag

SEQ ID NO: 2590878 - RNA, 19 nt, Artificial Sequence
  Description of Artificial Sequence: Synthetic oligonucleotide
uuggcgguaaaugaguagc

SEQ ID NO: 2590879 - RNA, 19 nt, Artificial Sequence
  Description of Artificial Sequence: Synthetic oligonucleotide
caaguauacagggaagggg

SEQ ID NO: 2590880 - RNA, 19 nt, Artificial Sequence
  Description of Artificial Sequence: Synthetic oligonucleotide
auaacauuuaggguggaga

SEQ ID NO: 2590881 - RNA, 19 nt, Artificial Sequence
  Description of Artificial Sequence: Synthetic oligonucleotide
auuacuuaaggcaucacau

SEQ ID NO: 2590882 - RNA, 19 nt, Artificial Sequence
  Description of Artificial Sequence: Synthetic oligonucleotide
guaguggaugcauuaacug

SEQ ID NO: 2590883 - RNA, 19 nt, Artificial Sequence
  Description of Artificial Sequence: Synthetic oligonucleotide
aguuagcauucaaaggugc

SEQ ID NO: 2590884 - RNA, 19 nt, Artificial Sequence
  Description of Artificial Sequence: Synthetic oligonucleotide
aucacauuccaggucacac

SEQ ID NO: 2590885 - RNA, 19 nt, Artificial Sequence
  Description of Artificial Sequence: Synthetic oligonucleotide
uggucacucuuacagaagu

SEQ ID NO: 2590886 - RNA, 19 nt, Artificial Sequence
  Description of Artificial Sequence: Synthetic oligonucleotide
aacugcaugguggaagaag

SEQ ID NO: 2590887 - RNA, 19 nt, Artificial Sequence
  Description of Artificial Sequence: Synthetic oligonucleotide
caaguuagcauucaaaggu

SEQ ID NO: 2590888 - RNA, 19 nt, Artificial Sequence
  Description of Artificial Sequence: Synthetic oligonucleotide
aacaaugaaaccacgucau

SEQ ID NO: 2590889 - RNA, 19 nt, Artificial Sequence
  Description of Artificial Sequence: Synthetic oligonucleotide
ugaguagcaggcacagaag

SEQ ID NO: 2590890 - RNA, 19 nt, Artificial Sequence
  Description of Artificial Sequence: Synthetic oligonucleotide
cagcuucugauuuagcuug

SEQ ID NO: 2590891 - RNA, 19 nt, Artificial Sequence
  Description of Artificial Sequence: Synthetic oligonucleotide
cuggugauucucuuguagc

SEQ ID NO: 2590892 - RNA, 19 nt, Artificial Sequence
  Description of Artificial Sequence: Synthetic oligonucleotide
uuagcauucaaaggugcug

SEQ ID NO: 2590893 - RNA, 19 nt, Artificial Sequence
  Description of Artificial Sequence: Synthetic oligonucleotide
uucacucaucuuuacaaaa

SEQ ID NO: 2590894 - RNA, 19 nt, Artificial Sequence
  Description of Artificial Sequence: Synthetic oligonucleotide
ugcauuaacugcagacuca

SEQ ID NO: 2590895 - RNA, 19 nt, Artificial Sequence
  Description of Artificial Sequence: Synthetic oligonucleotide
aacugcagacucauggguc

SEQ ID NO: 2590896 - RNA, 19 nt, Artificial Sequence
  Description of Artificial Sequence: Synthetic oligonucleotide
uuacagaaguucucaaguc

SEQ ID NO: 2590897 - RNA, 19 nt, Artificial Sequence
  Description of Artificial Sequence: Synthetic oligonucleotide
aaccacgucaugcaucuaa

SEQ ID NO: 2590898 - RNA, 19 nt, Artificial Sequence
  Description of Artificial Sequence: Synthetic oligonucleotide
acaaaagucaucucucaua

SEQ ID NO: 2590899 - RNA, 19 nt, Artificial Sequence
  Description of Artificial Sequence: Synthetic oligonucleotide
cuaguucacugucauacug

SEQ ID NO: 2590900 - RNA, 19 nt, Artificial Sequence
  Description of Artificial Sequence: Synthetic oligonucleotide
uaacugcagacucaugggu

SEQ ID NO: 2590901 - RNA, 19 nt, Artificial Sequence
  Description of Artificial Sequence: Synthetic oligonucleotide
uccucuuggcgguaaauga

SEQ ID NO: 2590902 - RNA, 19 nt, Artificial Sequence
  Description of Artificial Sequence: Synthetic oligonucleotide
uucacagagggaaaacaau

SEQ ID NO: 2590903 - RNA, 19 nt, Artificial Sequence
  Description of Artificial Sequence: Synthetic oligonucleotide
aaguuagcauucaaaggug

SEQ ID NO: 2590904 - RNA, 19 nt, Artificial Sequence
  Description of Artificial Sequence: Synthetic oligonucleotide
aaaugaguagcagcaggug

SEQ ID NO: 2590905 - RNA, 19 nt, Artificial Sequence
  Description of Artificial Sequence: Synthetic oligonucleotide
uaaguuaaauaaaguuaau

SEQ ID NO: 2590906 - RNA, 19 nt, Artificial Sequence
  Description of Artificial Sequence: Synthetic oligonucleotide
ugaaaccacgucaugcauc

SEQ ID NO: 2590907 - RNA, 19 nt, Artificial Sequence
  Description of Artificial Sequence: Synthetic oligonucleotide
acugucauacuggucacuc

SEQ ID NO: 2590908 - RNA, 19 nt, Artificial Sequence
  Description of Artificial Sequence: Synthetic oligonucleotide
ucuugcggagaacugcaug

SEQ ID NO: 2590909 - RNA, 19 nt, Artificial Sequence
  Description of Artificial Sequence: Synthetic oligonucleotide
cuuuacaaaagucaucucu

SEQ ID NO: 2590910 - RNA, 19 nt, Artificial Sequence
  Description of Artificial Sequence: Synthetic oligonucleotide
ggugaugaaaaucacagcu

SEQ ID NO: 2590911 - RNA, 19 nt, Artificial Sequence
  Description of Artificial Sequence: Synthetic oligonucleotide
uggugauucucuuguagcu

SEQ ID NO: 2590912 - RNA, 19 nt, Artificial Sequence
  Description of Artificial Sequence: Synthetic oligonucleotide
aaaggugcugugcuguuuu

SEQ ID NO: 2590913 - RNA, 19 nt, Artificial Sequence
  Description of Artificial Sequence: Synthetic oligonucleotide
ucauacuggucacucuuac

SEQ ID NO: 2590914 - RNA, 19 nt, Artificial Sequence
  Description of Artificial Sequence: Synthetic oligonucleotide
uguaugucuggacccaguc

SEQ ID NO: 2590915 - RNA, 19 nt, Artificial Sequence
  Description of Artificial Sequence: Synthetic oligonucleotide
acagaagcguucuugcgga

SEQ ID NO: 2590916 - RNA, 19 nt, Artificial Sequence
  Description of Artificial Sequence: Synthetic oligonucleotide
ugucauacuggucacucuu

SEQ ID NO: 2590917 - RNA, 19 nt, Artificial Sequence
  Description of Artificial Sequence: Synthetic oligonucleotide
gaagagagagcuggcuucg

SEQ ID NO: 2590918 - RNA, 19 nt, Artificial Sequence
  Description of Artificial Sequence: Synthetic oligonucleotide
acgucaugcaucuaagaaa

SEQ ID NO: 2590919 - RNA, 19 nt, Artificial Sequence
  Description of Artificial Sequence: Synthetic oligonucleotide
acuggucacucuuacagaa

SEQ ID NO: 2590920 - RNA, 19 nt, Artificial Sequence
  Description of Artificial Sequence: Synthetic oligonucleotide
cauagaugcuacaggcagc

SEQ ID NO: 2590921 - RNA, 19 nt, Artificial Sequence
  Description of Artificial Sequence: Synthetic oligonucleotide
uacaaaagucaucucucau

SEQ ID NO: 2590922 - RNA, 19 nt, Artificial Sequence
  Description of Artificial Sequence: Synthetic oligonucleotide
gcacauagaugcuacaggc

SEQ ID NO: 2590923 - RNA, 19 nt, Artificial Sequence
  Description of Artificial Sequence: Synthetic oligonucleotide
gggaaggggauauugaaac

SEQ ID NO: 2590924 - RNA, 19 nt, Artificial Sequence
  Description of Artificial Sequence: Synthetic oligonucleotide
agacucaugggucaaguua

SEQ ID NO: 2590925 - RNA, 19 nt, Artificial Sequence
  Description of Artificial Sequence: Synthetic oligonucleotide
ugccuugggaucucaaaca

SEQ ID NO: 2590926 - RNA, 19 nt, Artificial Sequence
  Description of Artificial Sequence: Synthetic oligonucleotide
auuuagcuuggcucugguc

SEQ ID NO: 2590927 - RNA, 19 nt, Artificial Sequence
  Description of Artificial Sequence: Synthetic oligonucleotide
aguggaugcauuaacugca

SEQ ID NO: 2590928 - RNA, 19 nt, Artificial Sequence
  Description of Artificial Sequence: Synthetic oligonucleotide
ucaugggucaaguuagcau

SEQ ID NO: 2590929 - RNA, 19 nt, Artificial Sequence
  Description of Artificial Sequence: Synthetic oligonucleotide
aguuaacagcgucuggcug

SEQ ID NO: 2590930 - RNA, 19 nt, Artificial Sequence
  Description of Artificial Sequence: Synthetic oligonucleotide
gaaaggcaguaguggaugc

SEQ ID NO: 2590931 - RNA, 19 nt, Artificial Sequence
  Description of Artificial Sequence: Synthetic oligonucleotide
uauacagggaaggggauau

SEQ ID NO: 2590932 - RNA, 19 nt, Artificial Sequence
  Description of Artificial Sequence: Synthetic oligonucleotide
caucucucauaacauuuag

SEQ ID NO: 2590933 - RNA, 19 nt, Artificial Sequence
  Description of Artificial Sequence: Synthetic oligonucleotide
uuaaggcaucacauuccag

SEQ ID NO: 2590934 - RNA, 19 nt, Artificial Sequence
  Description of Artificial Sequence: Synthetic oligonucleotide
gcuucuuugggacacuugc

SEQ ID NO: 2590935 - RNA, 19 nt, Artificial Sequence
  Description of Artificial Sequence: Synthetic oligonucleotide
aaauccaaguauacaggga

SEQ ID NO: 2590936 - RNA, 19 nt, Artificial Sequence
  Description of Artificial Sequence: Synthetic oligonucleotide
caugcaucuaagaaaucca

SEQ ID NO: 2590937 - RNA, 19 nt, Artificial Sequence
  Description of Artificial Sequence: Synthetic oligonucleotide
gagagaauaggcaggucug

SEQ ID NO: 2590938 - RNA, 19 nt, Artificial Sequence
  Description of Artificial Sequence: Synthetic oligonucleotide
ucaucucucauaacauuua

SEQ ID NO: 2590939 - RNA, 19 nt, Artificial Sequence
  Description of Artificial Sequence: Synthetic oligonucleotide
ggaugcauuaacugcagac

SEQ ID NO: 2590940 - RNA, 19 nt, Artificial Sequence
  Description of Artificial Sequence: Synthetic oligonucleotide
acagagggaaaacaaugaa

SEQ ID NO: 2590941 - RNA, 19 nt, Artificial Sequence
  Description of Artificial Sequence: Synthetic oligonucleotide
gaaaccacgucaugcaucu

SEQ ID NO: 2590942 - RNA, 19 nt, Artificial Sequence
  Description of Artificial Sequence: Synthetic oligonucleotide
aguaguggaugcauuaacu

SEQ ID NO: 2590943 - RNA, 19 nt, Artificial Sequence
  Description of Artificial Sequence: Synthetic oligonucleotide
ugauuuagcuuggcucugg

SEQ ID NO: 2590944 - RNA, 19 nt, Artificial Sequence
  Description of Artificial Sequence: Synthetic oligonucleotide
uuaacagcgucuggcuggg

SEQ ID NO: 2590945 - RNA, 19 nt, Artificial Sequence
  Description of Artificial Sequence: Synthetic oligonucleotide
auagaugcuacaggcagca

SEQ ID NO: 2590946 - RNA, 19 nt, Artificial Sequence
  Description of Artificial Sequence: Synthetic oligonucleotide
cuuggugaugaaaaucaca

SEQ ID NO: 2590947 - RNA, 19 nt, Artificial Sequence
  Description of Artificial Sequence: Synthetic oligonucleotide
ucacacuaguucacuguca

SEQ ID NO: 2590948 - RNA, 19 nt, Artificial Sequence
  Description of Artificial Sequence: Synthetic oligonucleotide
cuggcuucggagagaauag

SEQ ID NO: 2590949 - RNA, 19 nt, Artificial Sequence
  Description of Artificial Sequence: Synthetic oligonucleotide
augaguagcagcaggugag

SEQ ID NO: 2590950 - RNA, 19 nt, Artificial Sequence
  Description of Artificial Sequence: Synthetic oligonucleotide
uuacuuaaggcaucacauu

SEQ ID NO: 2590951 - RNA, 19 nt, Artificial Sequence
  Description of Artificial Sequence: Synthetic oligonucleotide
agagaauaggcaggucugg

SEQ ID NO: 2590952 - RNA, 19 nt, Artificial Sequence
  Description of Artificial Sequence: Synthetic oligonucleotide
uuggcucugguccaguuuu

SEQ ID NO: 2590953 - RNA, 19 nt, Artificial Sequence
  Description of Artificial Sequence: Synthetic oligonucleotide
aucucucauaacauuuagg

SEQ ID NO: 2590954 - RNA, 19 nt, Artificial Sequence
  Description of Artificial Sequence: Synthetic oligonucleotide
uggugggaaaggcaguagu

SEQ ID NO: 2590955 - RNA, 19 nt, Artificial Sequence
  Description of Artificial Sequence: Synthetic oligonucleotide
ucagcacagaucucucucu

SEQ ID NO: 2590956 - RNA, 19 nt, Artificial Sequence
  Description of Artificial Sequence: Synthetic oligonucleotide
acaaugaaaccacgucaug

SEQ ID NO: 2590957 - RNA, 19 nt, Artificial Sequence
  Description of Artificial Sequence: Synthetic oligonucleotide
cuuggcgguaaaugaguag

SEQ ID NO: 2590958 - RNA, 19 nt, Artificial Sequence
  Description of Artificial Sequence: Synthetic oligonucleotide
uacaggcagcaacugugag

SEQ ID NO: 2590959 - RNA, 19 nt, Artificial Sequence
  Description of Artificial Sequence: Synthetic oligonucleotide
ggaguuaacagcgucuggc

SEQ ID NO: 2590960 - RNA, 19 nt, Artificial Sequence
  Description of Artificial Sequence: Synthetic oligonucleotide
guaugucuggacccagucc

SEQ ID NO: 2590961 - RNA, 19 nt, Artificial Sequence
  Description of Artificial Sequence: Synthetic oligonucleotide
aagucaucucucauaacau

SEQ ID NO: 2590962 - RNA, 19 nt, Artificial Sequence
  Description of Artificial Sequence: Synthetic oligonucleotide
acaggcagcaacugugagu

SEQ ID NO: 2590963 - RNA, 19 nt, Artificial Sequence
  Description of Artificial Sequence: Synthetic oligonucleotide
aguucucaagucuguggug

SEQ ID NO: 2590964 - RNA, 19 nt, Artificial Sequence
  Description of Artificial Sequence: Synthetic oligonucleotide
cacagagggaaaacaauga

SEQ ID NO: 2590965 - RNA, 19 nt, Artificial Sequence
  Description of Artificial Sequence: Synthetic oligonucleotide
uggagaaccaggguucaca

SEQ ID NO: 2590966 - RNA, 19 nt, Artificial Sequence
  Description of Artificial Sequence: Synthetic oligonucleotide
gaaaacaaugaaaccacgu

SEQ ID NO: 2590967 - RNA, 19 nt, Artificial Sequence
  Description of Artificial Sequence: Synthetic oligonucleotide
cuuguagcucuccagccuc

SEQ ID NO: 2590968 - RNA, 19 nt, Artificial Sequence
  Description of Artificial Sequence: Synthetic oligonucleotide
gcaacugugaguagcaggc

SEQ ID NO: 2590969 - RNA, 19 nt, Artificial Sequence
  Description of Artificial Sequence: Synthetic oligonucleotide
acuaguucacugucauacu

SEQ ID NO: 2590970 - RNA, 19 nt, Artificial Sequence
  Description of Artificial Sequence: Synthetic oligonucleotide
ugcuacaggcagcaacugu

SEQ ID NO: 2590971 - RNA, 19 nt, Artificial Sequence
  Description of Artificial Sequence: Synthetic oligonucleotide
aggguggagaaccaggguu

SEQ ID NO: 2590972 - RNA, 19 nt, Artificial Sequence
  Description of Artificial Sequence: Synthetic oligonucleotide
gaugcauuaacugcagacu

SEQ ID NO: 2590973 - RNA, 19 nt, Artificial Sequence
  Description of Artificial Sequence: Synthetic oligonucleotide
auauuacuuaaggcaucac

SEQ ID NO: 2590974 - RNA, 19 nt, Artificial Sequence
  Description of Artificial Sequence: Synthetic oligonucleotide
ggauauugaaacauuaaua

SEQ ID NO: 2590975 - RNA, 19 nt, Artificial Sequence
  Description of Artificial Sequence: Synthetic oligonucleotide
augaaaaucacagcuucuu

SEQ ID NO: 2590976 - RNA, 19 nt, Artificial Sequence
  Description of Artificial Sequence: Synthetic oligonucleotide
ggaaaacaaugaaaccacg

SEQ ID NO: 2590977 - RNA, 19 nt, Artificial Sequence
  Description of Artificial Sequence: Synthetic oligonucleotide
gucacacuaguucacuguc

SEQ ID NO: 2590978 - RNA, 19 nt, Artificial Sequence
  Description of Artificial Sequence: Synthetic oligonucleotide
gggaaaacaaugaaaccac

SEQ ID NO: 2590979 - RNA, 19 nt, Artificial Sequence
  Description of Artificial Sequence: Synthetic oligonucleotide
uggcgguaaaugaguagca

SEQ ID NO: 2590980 - RNA, 19 nt, Artificial Sequence
  Description of Artificial Sequence: Synthetic oligonucleotide
caguaguggaugcauuaac

SEQ ID NO: 2590981 - RNA, 19 nt, Artificial Sequence
  Description of Artificial Sequence: Synthetic oligonucleotide
ucuuggcgguaaaugagua

SEQ ID NO: 2590982 - RNA, 19 nt, Artificial Sequence
  Description of Artificial Sequence: Synthetic oligonucleotide
aucucaaacacaacguuuu

SEQ ID NO: 2590983 - RNA, 19 nt, Artificial Sequence
  Description of Artificial Sequence: Synthetic oligonucleotide
aaaggcaguaguggaugca

SEQ ID NO: 2590984 - RNA, 19 nt, Artificial Sequence
  Description of Artificial Sequence: Synthetic oligonucleotide
aaggcaguaguggaugcau

SEQ ID NO: 2590985 - RNA, 19 nt, Artificial Sequence
  Description of Artificial Sequence: Synthetic oligonucleotide
auuuaggguggagaaccag

SEQ ID NO: 2590986 - RNA, 19 nt, Artificial Sequence
  Description of Artificial Sequence: Synthetic oligonucleotide
gucagcacagaucucucuc

SEQ ID NO: 2590987 - RNA, 19 nt, Artificial Sequence
  Description of Artificial Sequence: Synthetic oligonucleotide
acaguugcagcuucugauu

SEQ ID NO: 2590988 - RNA, 19 nt, Artificial Sequence
  Description of Artificial Sequence: Synthetic oligonucleotide
agucaucucucauaacauu

SEQ ID NO: 2590989 - RNA, 19 nt, Artificial Sequence
  Description of Artificial Sequence: Synthetic oligonucleotide
gauucucuuguagcucucc

SEQ ID NO: 2590990 - RNA, 19 nt, Artificial Sequence
  Description of Artificial Sequence: Synthetic oligonucleotide
gaagcguucuugcggagaa

SEQ ID NO: 2590991 - RNA, 19 nt, Artificial Sequence
  Description of Artificial Sequence: Synthetic oligonucleotide
cacucuuacagaaguucuc

SEQ ID NO: 2590992 - RNA, 19 nt, Artificial Sequence
  Description of Artificial Sequence: Synthetic oligonucleotide
ggagaaccaggguucacag

SEQ ID NO: 2590993 - RNA, 19 nt, Artificial Sequence
  Description of Artificial Sequence: Synthetic oligonucleotide
gaugcuacaggcagcaacu

SEQ ID NO: 2590994 - RNA, 19 nt, Artificial Sequence
  Description of Artificial Sequence: Synthetic oligonucleotide
gcgguaaaugaguagcagc

SEQ ID NO: 2590995 - RNA, 19 nt, Artificial Sequence
  Description of Artificial Sequence: Synthetic oligonucleotide
cucugggauccucuuggcg

SEQ ID NO: 2590996 - RNA, 19 nt, Artificial Sequence
  Description of Artificial Sequence: Synthetic oligonucleotide
cauaacauuuaggguggag

SEQ ID NO: 2590997 - RNA, 19 nt, Artificial Sequence
  Description of Artificial Sequence: Synthetic oligonucleotide
uguguaugucuggacccag

SEQ ID NO: 2590998 - RNA, 19 nt, Artificial Sequence
  Description of Artificial Sequence: Synthetic oligonucleotide
gcuggugauucucuuguag

SEQ ID NO: 2590999 - RNA, 19 nt, Artificial Sequence
  Description of Artificial Sequence: Synthetic oligonucleotide
agcacagaucucucucuug

SEQ ID NO: 2591000 - RNA, 19 nt, Artificial Sequence
  Description of Artificial Sequence: Synthetic oligonucleotide
ggcacagaagcguucuugc

SEQ ID NO: 2591001 - RNA, 19 nt, Artificial Sequence
  Description of Artificial Sequence: Synthetic oligonucleotide
cacgucaugcaucuaagaa

SEQ ID NO: 2591002 - RNA, 19 nt, Artificial Sequence
  Description of Artificial Sequence: Synthetic oligonucleotide
uggaugcauuaacugcaga

SEQ ID NO: 2591003 - RNA, 19 nt, Artificial Sequence
  Description of Artificial Sequence: Synthetic oligonucleotide
agcguucuugcggagaacu

SEQ ID NO: 2591004 - RNA, 19 nt, Artificial Sequence
  Description of Artificial Sequence: Synthetic oligonucleotide
ucggagagaauaggcaggu

SEQ ID NO: 2591005 - RNA, 19 nt, Artificial Sequence
  Description of Artificial Sequence: Synthetic oligonucleotide
uuauacacaguugcagcuu

SEQ ID NO: 2591006 - RNA, 19 nt, Artificial Sequence
  Description of Artificial Sequence: Synthetic oligonucleotide
gcaucuaagaaauccaagu

SEQ ID NO: 2591007 - RNA, 19 nt, Artificial Sequence
  Description of Artificial Sequence: Synthetic oligonucleotide
augaaaccacgucaugcau

SEQ ID NO: 2591008 - RNA, 19 nt, Artificial Sequence
  Description of Artificial Sequence: Synthetic oligonucleotide
cuggucacucuuacagaag

SEQ ID NO: 2591009 - RNA, 19 nt, Artificial Sequence
  Description of Artificial Sequence: Synthetic oligonucleotide
acacaguugcagcuucuga

SEQ ID NO: 2591010 - RNA, 19 nt, Artificial Sequence
  Description of Artificial Sequence: Synthetic oligonucleotide
auccucuuggcgguaaaug

SEQ ID NO: 2591011 - RNA, 19 nt, Artificial Sequence
  Description of Artificial Sequence: Synthetic oligonucleotide
agcauucaaaggugcugug

SEQ ID NO: 2591012 - RNA, 19 nt, Artificial Sequence
  Description of Artificial Sequence: Synthetic oligonucleotide
uggcuucggagagaauagg

SEQ ID NO: 2591013 - RNA, 19 nt, Artificial Sequence
  Description of Artificial Sequence: Synthetic oligonucleotide
ggagagaauaggcaggucu

SEQ ID NO: 2591014 - RNA, 19 nt, Artificial Sequence
  Description of Artificial Sequence: Synthetic oligonucleotide
augggucaaguuagcauuc

SEQ ID NO: 2591015 - RNA, 19 nt, Artificial Sequence
  Description of Artificial Sequence: Synthetic oligonucleotide
aagagagagcuggcuucgg

SEQ ID NO: 2591016 - RNA, 19 nt, Artificial Sequence
  Description of Artificial Sequence: Synthetic oligonucleotide
cacagcuucuuugggacac

SEQ ID NO: 2591017 - RNA, 19 nt, Artificial Sequence
  Description of Artificial Sequence: Synthetic oligonucleotide
auccaaguauacagggaag

SEQ ID NO: 2591018 - RNA, 19 nt, Artificial Sequence
  Description of Artificial Sequence: Synthetic oligonucleotide
acucaugggucaaguuagc

SEQ ID NO: 2591019 - RNA, 19 nt, Artificial Sequence
  Description of Artificial Sequence: Synthetic oligonucleotide
gguaaaugaguagcagcag

SEQ ID NO: 2591020 - RNA, 19 nt, Artificial Sequence
  Description of Artificial Sequence: Synthetic oligonucleotide
gaaggggauauugaaacau

SEQ ID NO: 2591021 - RNA, 19 nt, Artificial Sequence
  Description of Artificial Sequence: Synthetic oligonucleotide
gcggagaacugcauggugg

SEQ ID NO: 2591022 - RNA, 19 nt, Artificial Sequence
  Description of Artificial Sequence: Synthetic oligonucleotide
acagcgucuggcugggcca

SEQ ID NO: 2591023 - RNA, 19 nt, Artificial Sequence
  Description of Artificial Sequence: Synthetic oligonucleotide
gcuguuuuauacacaguug

SEQ ID NO: 2591024 - RNA, 19 nt, Artificial Sequence
  Description of Artificial Sequence: Synthetic oligonucleotide
uugggaucucaaacacaac

SEQ ID NO: 2591025 - RNA, 19 nt, Artificial Sequence
  Description of Artificial Sequence: Synthetic oligonucleotide
ucucugggauccucuuggc

SEQ ID NO: 2591026 - RNA, 19 nt, Artificial Sequence
  Description of Artificial Sequence: Synthetic oligonucleotide
aggcacagaagcguucuug

SEQ ID NO: 2591027 - RNA, 19 nt, Artificial Sequence
  Description of Artificial Sequence: Synthetic oligonucleotide
gaguuaacagcgucuggcu

SEQ ID NO: 2591028 - RNA, 19 nt, Artificial Sequence
  Description of Artificial Sequence: Synthetic oligonucleotide
aagcguucuugcggagaac

SEQ ID NO: 2591029 - RNA, 19 nt, Artificial Sequence
  Description of Artificial Sequence: Synthetic oligonucleotide
ugucuggacccaguccugc

SEQ ID NO: 2591030 - RNA, 19 nt, Artificial Sequence
  Description of Artificial Sequence: Synthetic oligonucleotide
cucucucuugagcuuggug

SEQ ID NO: 2591031 - RNA, 19 nt, Artificial Sequence
  Description of Artificial Sequence: Synthetic oligonucleotide
caugggucaaguuagcauu

SEQ ID NO: 2591032 - RNA, 19 nt, Artificial Sequence
  Description of Artificial Sequence: Synthetic oligonucleotide
ccaaguauacagggaaggg

SEQ ID NO: 2591033 - RNA, 19 nt, Artificial Sequence
  Description of Artificial Sequence: Synthetic oligonucleotide
uuguagcucuccagccucu

SEQ ID NO: 2591034 - RNA, 19 nt, Artificial Sequence
  Description of Artificial Sequence: Synthetic oligonucleotide
acugugaguagcaggcaca

SEQ ID NO: 2591035 - RNA, 19 nt, Artificial Sequence
  Description of Artificial Sequence: Synthetic oligonucleotide
ucucaagucugugguggga

SEQ ID NO: 2591036 - RNA, 19 nt, Artificial Sequence
  Description of Artificial Sequence: Synthetic oligonucleotide
accacgucaugcaucuaag

SEQ ID NO: 2591037 - RNA, 19 nt, Artificial Sequence
  Description of Artificial Sequence: Synthetic oligonucleotide
cauacuggucacucuuaca

SEQ ID NO: 2591038 - RNA, 19 nt, Artificial Sequence
  Description of Artificial Sequence: Synthetic oligonucleotide
caggcagcaacugugagua

SEQ ID NO: 2591039 - RNA, 19 nt, Artificial Sequence
  Description of Artificial Sequence: Synthetic oligonucleotide
guggaugcauuaacugcag

SEQ ID NO: 2591040 - RNA, 19 nt, Artificial Sequence
  Description of Artificial Sequence: Synthetic oligonucleotide
ccucuuggcgguaaaugag

SEQ ID NO: 2591041 - RNA, 19 nt, Artificial Sequence
  Description of Artificial Sequence: Synthetic oligonucleotide
ggcagcaacugugaguagc

SEQ ID NO: 2591042 - RNA, 19 nt, Artificial Sequence
  Description of Artificial Sequence: Synthetic oligonucleotide
guucuugcggagaacugca

SEQ ID NO: 2591043 - RNA, 19 nt, Artificial Sequence
  Description of Artificial Sequence: Synthetic oligonucleotide
cucucauaacauuuagggu

SEQ ID NO: 2591044 - RNA, 19 nt, Artificial Sequence
  Description of Artificial Sequence: Synthetic oligonucleotide
cuacaggcagcaacuguga

SEQ ID NO: 2591045 - RNA, 19 nt, Artificial Sequence
  Description of Artificial Sequence: Synthetic oligonucleotide
augcaucuaagaaauccaa

SEQ ID NO: 2591046 - RNA, 19 nt, Artificial Sequence
  Description of Artificial Sequence: Synthetic oligonucleotide
ggugggaaaggcaguagug

SEQ ID NO: 2591047 - RNA, 19 nt, Artificial Sequence
  Description of Artificial Sequence: Synthetic oligonucleotide
uccugcuuggggucagcac

SEQ ID NO: 2591048 - RNA, 19 nt, Artificial Sequence
  Description of Artificial Sequence: Synthetic oligonucleotide
aggggauauugaaacauua

SEQ ID NO: 2591049 - RNA, 19 nt, Artificial Sequence
  Description of Artificial Sequence: Synthetic oligonucleotide
ugggucaaguuagcauuca

SEQ ID NO: 2591050 - RNA, 19 nt, Artificial Sequence
  Description of Artificial Sequence: Synthetic oligonucleotide
agaagcguucuugcggaga

SEQ ID NO: 2591051 - RNA, 19 nt, Artificial Sequence
  Description of Artificial Sequence: Synthetic oligonucleotide
ugcagacucaugggucaag

SEQ ID NO: 2591052 - RNA, 19 nt, Artificial Sequence
  Description of Artificial Sequence: Synthetic oligonucleotide
agcuucugauuuagcuugg

SEQ ID NO: 2591053 - RNA, 19 nt, Artificial Sequence
  Description of Artificial Sequence: Synthetic oligonucleotide
gaucucaaacacaacguuu

SEQ ID NO: 2591054 - RNA, 19 nt, Artificial Sequence
  Description of Artificial Sequence: Synthetic oligonucleotide
cauuuaggguggagaacca

SEQ ID NO: 2591055 - RNA, 19 nt, Artificial Sequence
  Description of Artificial Sequence: Synthetic oligonucleotide
uagcaggcacagaagcguu

SEQ ID NO: 2591056 - RNA, 19 nt, Artificial Sequence
  Description of Artificial Sequence: Synthetic oligonucleotide
ggaaggggauauugaaaca

SEQ ID NO: 2591057 - RNA, 19 nt, Artificial Sequence
  Description of Artificial Sequence: Synthetic oligonucleotide
ggcuucggagagaauaggc

SEQ ID NO: 2591058 - RNA, 19 nt, Artificial Sequence
  Description of Artificial Sequence: Synthetic oligonucleotide
gggaguuaacagcgucugg

SEQ ID NO: 2591059 - RNA, 19 nt, Artificial Sequence
  Description of Artificial Sequence: Synthetic oligonucleotide
ucauaacauuuagggugga

SEQ ID NO: 2591060 - RNA, 19 nt, Artificial Sequence
  Description of Artificial Sequence: Synthetic oligonucleotide
guagcaggcacagaagcgu

SEQ ID NO: 2591061 - RNA, 19 nt, Artificial Sequence
  Description of Artificial Sequence: Synthetic oligonucleotide
ggcgguaaaugaguagcag

SEQ ID NO: 2591062 - RNA, 19 nt, Artificial Sequence
  Description of Artificial Sequence: Synthetic oligonucleotide
uucuugcggagaacugcau

SEQ ID NO: 2591063 - RNA, 19 nt, Artificial Sequence
  Description of Artificial Sequence: Synthetic oligonucleotide
gcauucaaaggugcugugc

SEQ ID NO: 2591064 - RNA, 19 nt, Artificial Sequence
  Description of Artificial Sequence: Synthetic oligonucleotide
cugauuuagcuuggcucug

SEQ ID NO: 2591065 - RNA, 19 nt, Artificial Sequence
  Description of Artificial Sequence: Synthetic oligonucleotide
cacaguugcagcuucugau

SEQ ID NO: 2591066 - RNA, 19 nt, Artificial Sequence
  Description of Artificial Sequence: Synthetic oligonucleotide
gccuugggaucucaaacac

SEQ ID NO: 2591067 - RNA, 19 nt, Artificial Sequence
  Description of Artificial Sequence: Synthetic oligonucleotide
gauuuagcuuggcucuggu

SEQ ID NO: 2591068 - RNA, 19 nt, Artificial Sequence
  Description of Artificial Sequence: Synthetic oligonucleotide
cucuuacagaaguucucaa

SEQ ID NO: 2591069 - RNA, 19 nt, Artificial Sequence
  Description of Artificial Sequence: Synthetic oligonucleotide
cgguaaaugaguagcagca

SEQ ID NO: 2591070 - RNA, 19 nt, Artificial Sequence
  Description of Artificial Sequence: Synthetic oligonucleotide
aguauacagggaaggggau

SEQ ID NO: 2591071 - RNA, 19 nt, Artificial Sequence
  Description of Artificial Sequence: Synthetic oligonucleotide
gucuggcugggccagcaca

SEQ ID NO: 2591072 - RNA, 19 nt, Artificial Sequence
  Description of Artificial Sequence: Synthetic oligonucleotide
acauuccaggucacacuag

SEQ ID NO: 2591073 - RNA, 19 nt, Artificial Sequence
  Description of Artificial Sequence: Synthetic oligonucleotide
aggguucacagagggaaaa

SEQ ID NO: 2591074 - RNA, 19 nt, Artificial Sequence
  Description of Artificial Sequence: Synthetic oligonucleotide
aucucucucuugagcuugg

SEQ ID NO: 2591075 - RNA, 19 nt, Artificial Sequence
  Description of Artificial Sequence: Synthetic oligonucleotide
aaggugcugugcuguuuua

SEQ ID NO: 2591076 - RNA, 19 nt, Artificial Sequence
  Description of Artificial Sequence: Synthetic oligonucleotide
ugugaguagcaggcacaga

SEQ ID NO: 2591077 - RNA, 19 nt, Artificial Sequence
  Description of Artificial Sequence: Synthetic oligonucleotide
ggugauucucuuguagcuc

SEQ ID NO: 2591078 - RNA, 19 nt, Artificial Sequence
  Description of Artificial Sequence: Synthetic oligonucleotide
ggucaaguuagcauucaaa

SEQ ID NO: 2591079 - RNA, 19 nt, Artificial Sequence
  Description of Artificial Sequence: Synthetic oligonucleotide
ggaagaagagagagcuggc

SEQ ID NO: 2591080 - RNA, 19 nt, Artificial Sequence
  Description of Artificial Sequence: Synthetic oligonucleotide
cauuccaggucacacuagu

SEQ ID NO: 2591081 - RNA, 19 nt, Artificial Sequence
  Description of Artificial Sequence: Synthetic oligonucleotide
cucuuggcgguaaaugagu

SEQ ID NO: 2591082 - RNA, 19 nt, Artificial Sequence
  Description of Artificial Sequence: Synthetic oligonucleotide
cacuugcugcuggugauuc

SEQ ID NO: 2591083 - RNA, 19 nt, Artificial Sequence
  Description of Artificial Sequence: Synthetic oligonucleotide
gcuucggagagaauaggca

SEQ ID NO: 2591084 - RNA, 19 nt, Artificial Sequence
  Description of Artificial Sequence: Synthetic oligonucleotide
cugggccagcacauagaug

SEQ ID NO: 2591085 - RNA, 19 nt, Artificial Sequence
  Description of Artificial Sequence: Synthetic oligonucleotide
guggugggaaaggcaguag

SEQ ID NO: 2591086 - RNA, 19 nt, Artificial Sequence
  Description of Artificial Sequence: Synthetic oligonucleotide
gcuggcuucggagagaaua

SEQ ID NO: 2591087 - RNA, 19 nt, Artificial Sequence
  Description of Artificial Sequence: Synthetic oligonucleotide
cucaugggucaaguuagca

SEQ ID NO: 2591088 - RNA, 19 nt, Artificial Sequence
  Description of Artificial Sequence: Synthetic oligonucleotide
ggcaguaguggaugcauua

SEQ ID NO: 2591089 - RNA, 19 nt, Artificial Sequence
  Description of Artificial Sequence: Synthetic oligonucleotide
acacuaguucacugucaua

SEQ ID NO: 2591090 - RNA, 19 nt, Artificial Sequence
  Description of Artificial Sequence: Synthetic oligonucleotide
aguccugcuuggggucagc

SEQ ID NO: 2591091 - RNA, 19 nt, Artificial Sequence
  Description of Artificial Sequence: Synthetic oligonucleotide
agcuucuuugggacacuug

SEQ ID NO: 2591092 - RNA, 19 nt, Artificial Sequence
  Description of Artificial Sequence: Synthetic oligonucleotide
cacacuaguucacugucau

SEQ ID NO: 2591093 - RNA, 19 nt, Artificial Sequence
  Description of Artificial Sequence: Synthetic oligonucleotide
augcuacaggcagcaacug

SEQ ID NO: 2591094 - RNA, 19 nt, Artificial Sequence
  Description of Artificial Sequence: Synthetic oligonucleotide
guauacagggaaggggaua

SEQ ID NO: 2591095 - RNA, 19 nt, Artificial Sequence
  Description of Artificial Sequence: Synthetic oligonucleotide
ugcuggugauucucuugua

SEQ ID NO: 2591096 - RNA, 19 nt, Artificial Sequence
  Description of Artificial Sequence: Synthetic oligonucleotide
cucaagucuguggugggaa

SEQ ID NO: 2591097 - RNA, 19 nt, Artificial Sequence
  Description of Artificial Sequence: Synthetic oligonucleotide
ggugcugugcuguuuuaua

SEQ ID NO: 2591098 - RNA, 19 nt, Artificial Sequence
  Description of Artificial Sequence: Synthetic oligonucleotide
ggucacacuaguucacugu

SEQ ID NO: 2591099 - RNA, 19 nt, Artificial Sequence
  Description of Artificial Sequence: Synthetic oligonucleotide
auacacaguugcagcuucu

SEQ ID NO: 2591100 - RNA, 19 nt, Artificial Sequence
  Description of Artificial Sequence: Synthetic oligonucleotide
cguucuugcggagaacugc

SEQ ID NO: 2591101 - RNA, 19 nt, Artificial Sequence
  Description of Artificial Sequence: Synthetic oligonucleotide
ggggauauugaaacauuaa

SEQ ID NO: 2591102 - RNA, 19 nt, Artificial Sequence
  Description of Artificial Sequence: Synthetic oligonucleotide
cagaaguucucaagucugu

SEQ ID NO: 2591103 - RNA, 19 nt, Artificial Sequence
  Description of Artificial Sequence: Synthetic oligonucleotide
cagcaacugugaguagcag

SEQ ID NO: 2591104 - RNA, 19 nt, Artificial Sequence
  Description of Artificial Sequence: Synthetic oligonucleotide
acaaugccuugggaucuca

SEQ ID NO: 2591105 - RNA, 19 nt, Artificial Sequence
  Description of Artificial Sequence: Synthetic oligonucleotide
agagcuggcuucggagaga

SEQ ID NO: 2591106 - RNA, 19 nt, Artificial Sequence
  Description of Artificial Sequence: Synthetic oligonucleotide
ggguggagaaccaggguuc

SEQ ID NO: 2591107 - RNA, 19 nt, Artificial Sequence
  Description of Artificial Sequence: Synthetic oligonucleotide
gggaucucaaacacaacgu

SEQ ID NO: 2591108 - RNA, 19 nt, Artificial Sequence
  Description of Artificial Sequence: Synthetic oligonucleotide
aggugcugugcuguuuuau

SEQ ID NO: 2591109 - RNA, 19 nt, Artificial Sequence
  Description of Artificial Sequence: Synthetic oligonucleotide
ggaucucaaacacaacguu

SEQ ID NO: 2591110 - RNA, 19 nt, Artificial Sequence
  Description of Artificial Sequence: Synthetic oligonucleotide
aggcagcaacugugaguag

SEQ ID NO: 2591111 - RNA, 19 nt, Artificial Sequence
  Description of Artificial Sequence: Synthetic oligonucleotide
gcagcaacugugaguagca

SEQ ID NO: 2591112 - RNA, 19 nt, Artificial Sequence
  Description of Artificial Sequence: Synthetic oligonucleotide
cagccucuucucugggauc

SEQ ID NO: 2591113 - RNA, 19 nt, Artificial Sequence
  Description of Artificial Sequence: Synthetic oligonucleotide
augucuggacccaguccug

SEQ ID NO: 2591114 - RNA, 19 nt, Artificial Sequence
  Description of Artificial Sequence: Synthetic oligonucleotide
gucauacuggucacucuua

SEQ ID NO: 2591115 - RNA, 19 nt, Artificial Sequence
  Description of Artificial Sequence: Synthetic oligonucleotide
caggguucacagagggaaa

SEQ ID NO: 2591116 - RNA, 19 nt, Artificial Sequence
  Description of Artificial Sequence: Synthetic oligonucleotide
gucaugcaucuaagaaauc

SEQ ID NO: 2591117 - RNA, 19 nt, Artificial Sequence
  Description of Artificial Sequence: Synthetic oligonucleotide
cgucaugcaucuaagaaau

SEQ ID NO: 2591118 - RNA, 19 nt, Artificial Sequence
  Description of Artificial Sequence: Synthetic oligonucleotide
gcuucugauuuagcuuggc

SEQ ID NO: 2591119 - RNA, 19 nt, Artificial Sequence
  Description of Artificial Sequence: Synthetic oligonucleotide
caaugccuugggaucucaa

SEQ ID NO: 2591120 - RNA, 19 nt, Artificial Sequence
  Description of Artificial Sequence: Synthetic oligonucleotide
ggggucagcacagaucucu

SEQ ID NO: 2591121 - RNA, 19 nt, Artificial Sequence
  Description of Artificial Sequence: Synthetic oligonucleotide
gggucaaguuagcauucaa
